United States Patent Application Publication US 2007/0067865 A1 - sequence listing, part 17

SEQ ID NO: 114408 - DNA, 240 bp, Glycine max
aaacccaaaaacacttgatttgtaattttcctcttctcaatcttgtcttgggtttctcttgccgtgagattgaacatccaccatatgccacaagttgtgtaaagagagagtgaaggatcaagcaatgcataagatagagcctgctgacagaagatagagagcatagctgaacatacccaacagggctttgtgtatgagcagttgttctctcttttcttctatcaacatatcagttcctgg

SEQ ID NO: 114409 - DNA, 242 bp, Glycine max
tctcgagccgctgcgagcggctcgagcagtatttccatggatgctcctaaatatagtaagtttatttgctttctcagctttccaattttgagttcattttaaataatttctcagctttccaattgcgaagtatatgatctttgtttgcctagtgtagtcaatttgttctgaaactttgctgattatagtttatgaaacccattttttatccttcaatagtaccaaccattgatgggaagacc

SEQ ID NO: 114410 - DNA, 235 bp, Glycine max
tagttctagatcgcgggcggccgccctttttttttttttttacaccaacaaaagtacagaatataacatacatcaaataaaatagacagtatttcatcaatctttaaaaagctgtaaaaggtagctttgatataaatttacagtggataaaatacacgggaactttaccaatgtagccgcaaattttaaacaactcaaagcgcactcaaaggcgtcatgtcattctagatcgcga

SEQ ID NO: 114411 - DNA, 263 bp, Glycine max
cattcttctatggtcacacctcaccaagaaagtgtatttatttgatcgtctatgttgatgacataattatcagaaaaaatgctgctgctgcaatttctcagctgaaaaaacatctattcaggcattttaagaccatagaccttggatgtctaaaagtctaaaatacttccttggtatagaggtagctcaatcaaacaaaggcattgttatctctcagaggaagtacgctttggatattcctaaatgaaactggcatgagtgga

SEQ ID NO: 114412 - DNA, 253 bp, Glycine max
cttcaccttcctgggttttacttttcatattcctacttcatttggggtagtttaaaattggaacttcaaagtacaagcttttgagatttggaggttagctctttgcaaggaattgaattgttgcacctcattaccatctgtgacatctgaaattcaggtttcttagtattatttgagaccaacacaatggtgtctgcttgtgtgaccttgaaagccaatacccatttagtaaaatcgagaaaagacaatactt

SEQ ID NO: 114413 - DNA, 235 bp, Glycine max
caattttgggaagtgggtttttgattttgtgtggggttgttgttgttggtgggaaaatgagggtagataggattgaagagatcaacaccaatcttctccgccatgccaacgtcgacaccttcatcgtcttccgatccctcacccctctcctcgtcgccctcgccgacaccgtcttccgcagacagtcctgcccctgcaacctcagcttcctctgcctcctcgtcatcctcgacgg

SEQ ID NO: 114414 - DNA, 268 bp, Glycine max
tcttcactgggcatctgctggcagtgcttcacgtggtagtactgaggggatagttttgtcaaaccaagcaagttgatttgtgctccatttgtagttaagtaggttatattttgagggtgttcactaacaaagggaatctagctatgcaatctggaagcccttggtctttgtacttaggatggatgagattgtgtattttgaaaattggtggttgttagaatagggtgatctttccttcagggtatttgatcgaggaattcttgtaagt

SEQ ID NO: 114415 - DNA, 262 bp, Glycine max
actgttcattgcagttccatgacaatgttaaagcctttgacttttttgtttttggcttggttctttcagtttcctgttgttaatggtgcacacgcagtgtcttccttgttgaggtgttactttttcttgtttttttctctccaagttttccctcaaccaaacagaatgagctaaaaaaatgtggaattttctctttcttcttccacttcaggtcttccggatgcttttattttgggtagttattttggtttttggatgagtg

SEQ ID NO: 114416 - DNA, 122 bp, Glycine max
aaataaccttgaggagatgttggtggtgataagagcggaagttgataaagcaaaggaagacgtggactctggtctggctatttttgcggcagacctggttggaattcttggagaaagtgcag

SEQ ID NO: 114417 - DNA, 258 bp, Glycine max
gttctgaagatctacctgctaaatttctaaaattcattcattttccctgtctatattctctcctctccctcctcctgtgtctcagtttgctggctagatacgtagaattgctgctgcttcttcaatggctcaaattgcgcttattgctcctgcagcaactgttatacctattattactggtagggggatacaacaaaaactatcatatgctgcaagaagagacaaagtgagtttagcatcactggttcctagttggag

SEQ ID NO: 114418 - DNA, 258 bp, Glycine max
ctgggtacaaaattgaaagcaaacaagttttggcttccaaaagtacaaggctactagtagataaggtagttattaattgatctctgttaacttctgttgcagttataattggttaagtagctcaaaggatacattttgatcttctgctgacatctgctgggtacaaaattgaaagcagacaagttttggcttccaaaagtacaaggctactagtagataaggcctgaagttgaaccaatggattgttcagctgctaga

SEQ ID NO: 114419 - DNA, 126 bp, Glycine max
caatttgtcactatactctatttgggaacagaactaggtgataacttttggtgtactgaatattggggtgtcagtttcctgtgaaagattctgaaggcaattgaagtaaatgccatggatcgtggg

SEQ ID NO: 114420 - DNA, 133 bp, Glycine max
ggctcgagccgagttcggctcgagctttgaaaagcactccgctagaaggtgtaagcgaaatgctgcttctttttcattgcgtatagagagacatgggtggacataacaatgaccatgaacatcaacgaagctt

SEQ ID NO: 114421 - DNA, 260 bp, Glycine max
agtttgcaagctatcaagttagttagaaacaattttctgataagttagttgatggccaacatctaactgtttttaagtttttccattttggtagttttctctttgataacttattttcttgagtgctatataaacatagaagtatttccttatgggtatgttgcaacagtgaggtcccattcatgcaatcacaatgagtggaagatcaaagtgtgtcagaaagatagagtgacacttggggatccttgatgttgttatct

SEQ ID NO: 114422 - DNA, 111 bp, Glycine max
aattttctgaatgctacaaccattgaaggcgcgaatttgatctgatttcacgaaggccgaatcgaaaacgcgacatggtagactccaaattgctgtttcaacacatgcaag

SEQ ID NO: 114423 - DNA, 253 bp, Glycine max
gatatttcgcggactaaattcatggtttattcaagaaaaaatgcatcattattaatgtattttgaaagctttctgaaattaaaagttatcatgcttatttatgtttttacttttttcctttcagtactgtttcccttttctacaagtaagaagtttaaacagggtcatcagtaagaaaatattttcagaaaagctatgtgaaagaccagtttactacttgctttcaccaaggttcacaaggattatgctgtgt

SEQ ID NO: 114424 - DNA, 253 bp, Glycine max
aatcgataaatgtgtgagtaatagacagtcttgcttgaaatacatatgattttcatttacagttagaaataggcctgtgagtaactttatgctttatctcctgcacaagaaacttgatattagatattaatgtgaaagcactgatttcaggctagctatgctttttttttccctttcttatttactaatgccttgtattgatgtttccattctactatgactcagattgcagatgtgtggtcttgtggggtga

SEQ ID NO: 114425 - DNA, 248 bp, Glycine max
atcttttctttattttctctctatgcatattgctccacatagttcaatggctatggagggagagctacaaccatcacaagttcaactcagggtaaactctaggcagtggaggaaagtggtaaatgtacattcaatggagatagacccatctttcacttcaaaagttgaacacagggaagtgaagcatttcaaggaatggtttccttggttgattcccttctttgtcattgccaatgttattgtgttca

SEQ ID NO: 114426 - DNA, 248 bp, Glycine max
ggaactgtttctgtatatgttgcaattaattctgggaggtgtgtgatatttggtgtgttgatttaggaagtggtctcggaataaatagcattgctgtaattggaattactgtattcgtttataaatatgcaattatatcttcaggtgtgatggtaattgtgaactaggtcaatcttttcagtatgtacgtgatttctgggcagaagtaaagaactactgaattgtgactggttctgtgaattacacgt

SEQ ID NO: 114427 - DNA, 250 bp, Glycine max
cagtatttctctttagaagagattctgagagctgaatagaagagatgtttgatgtttgtgtgcataatggaatatcctagaccagaagaataacgagttatgtatgttaccatgcatattaatgttgtgctggtgcatatactcttatttgctcattaggggcaggtggtttttgttacaggagtggtggacatatgtctgtatgggaccatcagatcctcatcgaaattggcatcttggaatgcgaggt

SEQ ID NO: 114428 - DNA, 253 bp, Glycine max
ctagtagctaccagaatttagccgtacttgttttaccttgcttgttgtatggttttttagtatgtaaataaacctttatcatattcctctaggctaaatatgtatttaaaataatacttttattttaaatacatatttagcctagaggaatatgataaaggtttatttacatactaaaaaaccatacaacaagcaaggtaaaacaagtacggttaataatgtatttaaaataaaagtattattttgaagccta

SEQ ID NO: 114429 - DNA, 103 bp, Glycine max
cttgagcaagtgtacttcctagttgttatgatcattatctcttgcaggctaattttatatttggcatggactgcaatatccaaattgccaaaaattttatggg

SEQ ID NO: 114430 - DNA, 245 bp, Glycine max
gcaacggtggtcttgtatttgtttcttttggagacagagagtgagagagaagaactgtgtgttgtgtgtgtaagagagccatggggaaatctacctcctgcttcaaactagtcacttgcggtggcgatgcggcggagaatgatgattaccaccaagtctctgagatcaaggcatctaacgataaacgtggttggagtttccgagagaaatctcaaggcatcgtgtgcttagcaatactgtgatag

SEQ ID NO: 114431 - DNA, 256 bp, Glycine max
atcctttgtttcgatgccaaaacagacccttgacaaccccattttttcttcttattttttttatctatttgtttttcagttaatctcattctttgaatttttatggcaataatattgcctttcagttttctctcttgcccccgaagtcactgaaaattcttgggaaaatctcaaaatcaggtttttctctcttttttttcttcccttttctgtttcggggcttaaatttcacttgagaattcattgaacccagata

SEQ ID NO: 114432 - DNA, 251 bp, Glycine max
caaggaagtaacttagatcgcgatttggttgcaatctcaagtccagatatggttgcatgcaagaaaatagagtctgaaagcaaagattttagcactaaggaaagttctaatggcctaattaagaatcctgtttcaatgagaaacaggaaatttgccagtgatgtgaaatttgattcaaagtgccaacaagctaccaaagtggttgatcaagaatgcactcttggatctagtgaggatcctagtaatttggc

SEQ ID NO: 114433 - DNA, 248 bp, Glycine max
gcttgaacactcagcgtgtgagtgtgtgtgtgtacaagtgtgcctcgtacaaactaaggataccttatcatcgcttcgcaccaaaaactactacttggatactacgaccatcgccatctgtgatactgtgatatttcgtctgcttcgagcggcggatacgtacactagagtacaaaagaaaaagactttaccgtggaggcacagtacctataaattgttgccaccacgatgacgccaaacccaaagca

SEQ ID NO: 114434 - DNA, 246 bp, Glycine max
caggaaaatatccttttggagactacatttcttattccaactttacttttacggtgaaagaaatcaagcatttgtggagacacaaagggtgtgaaagcaaatatgggaggaaactggttatgaggattgatgattttatgaaaccagtagaaacaaatgttatctgtagcaattggaagaaatggaagcaacctatcatatggtttcaggaacagtagattctgtggcggcacagtttttcttaaa

SEQ ID NO: 114435 - DNA, 244 bp, Glycine max
agaagacatgtggagaatttgttacaaccaattaaaaatgcatggagccagaagggtgtgagcattgttagtgatggatggagtgacctgcaaagaagatctcattaatttcatggttgtcccggagagtggacctatgtttttaaaggccattgattgttcaaatgagatcaaagacaatgatttcattgccaaacatatgagggagtaattatggaggttgggcactcaaatgttgtgcgaa

SEQ ID NO: 114436 - DNA, 256 bp, Glycine max
aatcggctcgagataattgcgtgttcgcaggccaggcaactgagagagaaagaatacagagatagagagtagcatcaataatgtattgtgactgaaaacaaaataagggaagaggagcacaaacaaaaccaaacaaacctcataagttagggattcctttttggttcgttgctgtggaatcgattcctttgccacatattaaacgtgcgtcgctgtgaagtaaagcatgatcgcagcattgtctgctagttatgac

SEQ ID NO: 114437 - DNA, 244 bp, Glycine max
acaattcggaaattcgtaaaaaactctagaagcgttttcggttgggtttccgggtcaagctttttattgaaccgaaccgaaccgacctgaatccacagtgtgcttcctcgtcatctcaagttttgctcatcattctcactgcagctattattgactctgtttccaaagacgcaatggcatccttagatattcattcactgcttttattctctgccattttccgtgttattttgattgtgtatgg

SEQ ID NO: 114438 - DNA, 244 bp, Glycine max
attttacatggtctaaaagaaccaagacttatcatagtggagatcaaataaattgtgtgcagacttcaaatcaaagcaaaagttatattatatagcatacagtttgctatacagtttatattacaagttcttgaaaagaatcagtgccaaaaacttgacaccaggagaggaatggggcttgtaaaaaaaattgggaagtatcagctggtaggacaattggagaaggtacattctctaaggttaa

SEQ ID NO: 114439 - DNA, 244 bp, Glycine max
ctttttcttcttcttcttttccttttttttttccccaaagaaaatcgcttagattttcgtctttcaagatttcgacgtccttcttcttattgcgccaaagttattgattttctcctttcccgtatttgaatcgtttattggtcattttcgtgtcggttaatttcttgtcgaaaaaaaaaagaaagaggaaggattaggagacgctttaatgacctagattagtttaataatatcacgtttgaaa

SEQ ID NO: 114440 - DNA, 243 bp, Glycine max
ctctcgctcttcaatggccgtatcctctattcgaatcgccgtcgtcggtgatgtggtaaagtatcctcttcccactgtcgttacagttccaattttcctaacacaactttcacttaacatgttttccaattttggaacgattccaattacctgattttggggggttttctgaagcatgattgctggaaccttgaacaagattcgaaagcacttgagctcttgcagccagacttggtgctgttt

SEQ ID NO: 114441 - DNA, 253 bp, Glycine max
gcatcatcaatggttgcatcgtcttcgccctcgagtcaacccttttgttccttttcaaaccccaactcatcatcatcatcgctctctttcaaaaccaaagctattaccaggacaagaccaagaacaaaaaccagaactagaacaacgaggttaacatggctgaatcctcaccctcgtggtgctttggttgaggcaacaccaccaccaacaagtcacctccttccccaaaagatggatctctcaaggtgcttgc

SEQ ID NO: 114442 - DNA, 246 bp, Glycine max
gtttaattcattttactttcttaatttcttctccaacaagtatttactgagaacccagtaagagacaacagacaaggcgggaagctaagcataaaaaaacgagcactgtttagcacaacctgcttgcgatacaaactaagccaaaaatttctccttccagagagtgaaaagttcaaattcaaattcaaaatggtagaattgattgaaatgcaattcgattatccagaatgaaagaaagacttggtg

SEQ ID NO: 114443 - DNA, 249 bp, Glycine max
agatgacaagttgaagttgcgcaacagcgattgggcggagaaacagtctcaacacacaaacacccagacacccacgttgtgttatgttatgtcttatgtctcctatattcatcatattaataattaaaccaatctaattaaataataataatttaacttcaccggaatcaacgctctccacttggcttcacaaatctgaaagaacacattaaccactcctctctttgttctcttctttccacacaacat

SEQ ID NO: 114444 - DNA, 283 bp, Glycine max
tagggcctttgaggtctccttgaggagaagggaagaagaagaaggaggaggaccccaccaacctccagcttttaattccatttttcgttgattcttccttccttcttcatttctctttaatcccaaacaaacgctgccttctcgtttcttctattttgactttcaaatcgcgtgcacttctactttccttcccttcacttatcgtctctgcaattgtcaatgatcttcagtcttcgctttcccattcgtttttgaactattcctcttttaccttaaaacacac

SEQ ID NO: 114445 - DNA, 279 bp, Glycine max
cacagtcatcgtctgttcaggatcatattcacgccccctctctctctctctctctctctctctctcttactttgtgtctttctatctctctcttcaattccaaaaccctacccccatccaattccaattcaccctcaatcatgggttctgaaggttccactgtcgtcggtcattattcaacctcttcacttccatcttcatttcctaatatcttttttccttctctctatcaattactcttgtggttcgctaattataattatgagtttttggttgttc

SEQ ID NO: 114446 - DNA, 280 bp, Glycine max
  unsure (1)..(280): unsure at all n locations
ggcattcaccatctcctgtgggacacaggtatagcaggaggagcagaagagacagaagcagatctccttattcatcctactcttacaacaggcgaaaaagtcgttctatttcaccaagaggtcacagaagtccttctactactccaagacgtcgtagaagccgaactccatctgctanacgatacagaagacatagaagtaggagttcctcgttgtctcctactcgtaaatcttccagtcaaagtcttgggtcaatagagcacaaagtgcaactgaaaac

SEQ ID NO: 114447 - DNA, 252 bp, Glycine max
  unsure (1)..(252): unsure at all n locations
cttgtttcggagcttctcagggaccaaattacaggggattcttccatgttcaaagatctccaattgtccagcatattcacattgttttcatgttaattgtggtggaaagaatgtaaaggtgatggaaaatgatgaaaatattcactatgtaggagatggaggtgtgttaggtagcggtgctgctaatatttcattgatcatganaatcactggggatttcttggatgatggtgatcgattaaattcacgtta

SEQ ID NO: 114448 - DNA, 272 bp, Glycine max
tagacacagacaccctcagaacctgaccaaaatacttactactatatcctactcacattttacattcccacctctttcctttcccccttaccattctcgagattctcgcttttactacattactctctccttcatactgggtttaaggtagggtttatttaactaggaagaaagtttttaaagagagagataggcaaaccgaaaagacgtggtctttctcattgatatatacatacacagatccctatggaatgaagagggtgctccccaat

SEQ ID NO: 114449 - DNA, 270 bp, Glycine max
caccaccttaatgtaattcatgagcctaagttccccatccaccaacattccccgccacaacctacccttttgaggttcggttgcttggcactcacgtaacaccaccatgagttttaattgccttacctgtggccaaattcttcaaagggtaaattctgatagggatgatgaatgtctcccaccacaagaaacaaagaaacctaacaggaaagtggcaatgcaagttgatagaagctggtcaaggaacatgaccccacccaaatatgcacg

SEQ ID NO: 114450 - DNA, 270 bp, Glycine max
ggaatatagaagcataaaactgaaactaacatatacatgccattaaaatactaaaattttcatgttgtctctagcctcaaggatcagatagcaaatctacaatcagagaatgaatccctacggagtcaggcagcggctgctgctttagagcagaaagttcatccagaaaaaatagaagcagaccattcagcagctgctctagagcagcaacttcttggtctggttctattttttctggatgaactttctgctctagagcagcaagttcat

SEQ ID NO: 114451 - DNA, 259 bp, Glycine max
ctctgaaccagttttttgtggaaatcgatagctctctcaattaggggctcgcgataaatggcacggttggttctgccatcgaagacattgattttttcgaggaacactcttctgggtttgatctcccctgctcctaatacagcaagagggagcatcagattcaagcatttccttgcatcagaggtcattttccgaaagaagtattgcccattatattcttcactaccaacggtatagcaagtaagtaggcgactaattt

SEQ ID NO: 114452 - DNA, 247 bp, Glycine max
aaaaaaaacaagcattatatgaacttaatgacccttgacatttcttttgattttgtgtattaaattgttttggtggatcaattgatctcttgagtactcagatcagtgctggacaaggacaagtaaccaaaattccaagaagggttcattaatacatggccttagagcactacctttcgcaggaatggaaaaccagccccagcccgatcccgagccccatgacagtgacagataaccttgatgggtg

SEQ ID NO: 114453 - DNA, 255 bp, Glycine max
cacatataaactccgatgttttacgccttttaatttctttgcaccatactctttcattcaattcaacgccacacttcatagaaaagaaaagcgatggagtcttccggtgcagcgaatgagaagctcttagaaaatggcacttcttctgataaacccacaaagggaaagggtggtttaagaaccatgcccttcatcatagtgaacgagtgtctggagaaggtggcgagctacgggatcatgcctaacatgatactg

SEQ ID NO: 114454 - DNA, 247 bp, Glycine max
agactcatgtatacaagaggccacctgtcttttcaagatcattgatttttgctactgcattcatgagcttcttctctgtagttatagcactgtttaaggatatacctgacattgaaggagataaagtatttggcatccaatctttttcagtgcgtttaggtcagaagccggtatgttgttcaaatgtaccatctcagcagaattagttgtgccctcctgtatcccttggttgttactaactactctt

SEQ ID NO: 114455 - DNA, 245 bp, Glycine max
cactagatgaatagataggtactgtttcgttcgtaatttgcaatttggtgagattcttcattcttatgctgtgcgggtttcctcttcagattcatggcggcaacccaaccaccgcagggtccggatcgtaccaccgatcatactgtcaattgagcttattgatcatgcatgcagaagagataccggccgaaccagataacttgaaggagcagggtacaacaactataggtcattcaagggagacc

SEQ ID NO: 114456 - DNA, 241 bp, Glycine max
atgagtttgagtttgagtttgagtttcagtctgagtgtgtgtgtatgagagagagagagagagagagagagagagacgcacaagcacatatactataagaatatcacacattacagtattctgagtatctctctgctgcgcagttatgaccgagaatacataggtgagatttctacagtagtgtagctgggtgcagttctcatggctgtctagcagacactcatcttccgagccataagtg

SEQ ID NO: 114457 - DNA, 251 bp, Glycine max
gtggtagtgcccaaacatgtaaccaatgaccagcaagatatctcacgatcatggatgaaacttgcttactttgtacaagggctgaaccctcaaaagagagagagaggtcaacatatagaacatggaaatgagcatgaccatttgcctattattttagggcaatcgattgccaatattcatgctctataggtggatgggtgagtgtctgaagctagcaagggggaaatggatgaagaaatagatgagagcgc

SEQ ID NO: 114458 - DNA, 234 bp, Glycine max
attgtccatcattttagtccttacttgcaagattggggtacatttgaccatttgcagaaacaacatttggataatccaaaggatgataatattgctcagcaagctgcaaagcagagattcacactggaaaattttgttaggctttcagagtcgcttaagacaagttcttgtggagagagaataaaggacattatcctggagaagggtataactaaaactgcaatgacacatttg

SEQ ID NO: 114459 - DNA, 170 bp, Glycine max
aaaatggctggaaaagaaaaagacattaagggtcaaaactttggtcattcctcttctcccccactctgtatctctcactcagccacattaaacactaaagtcgcttgctgtgtactcactttaatttataccttcttaataagtcgcgatccagagcttagcatttaaat

SEQ ID NO: 114460 - DNA, 198 bp, Glycine max
ctttattatacacagacaatcgcacaccgtatcccctgttttgagtttccgagagtcagaacatggcctgcgccgaaaacagagaatggaagttcctgttttcctctgcctcttctcattgacgcttgttgcagcgcattgctgaattggaatcgggtctccgggcagacatccgtggtctacgcctgcgacgatgcg

SEQ ID NO: 114461 - DNA, 141 bp, Glycine max
ctagtgttggtatcaatactgcgtgggggcttctaatggctagcatctcagtagatacgggtcgtgaaacaccattgcagttcgcttatatgtgagtactttcatcggtatgagactatgtgtgtatgtctaattgtactg

SEQ ID NO: 114462 - DNA, 202 bp, Glycine max
tagcgtgcaaaattatattcaaaaaaaaaaaaaaaggggaggctgcagattagtgagttcgtcaacccggaaattatttcgggcccggaacttgaaggggtacaagttttcccaaaagggagccgtattaaagcttggggaaatcatggccaaagctgttcccagtgaaaaattgtaatccgttcaaaattccaaacaacat

SEQ ID NO: 114463 - DNA, 250 bp, Glycine max
attttcgacatggcggcgcaacatctcatcgttgccgtcgctaacaccgctgctatgcgatcctattggaacaccagtctaatggattatctctataacatgctcaggtgtttcggtggaaatgactcaactggacagctattttctgcttccaatgtagagtttgctctagtcacctatcatactcatggatgttattctagttcccgtgtgcaacgggctggttggcacagcgctccagaagttttct

SEQ ID NO: 114464 - DNA, 251 bp, Glycine max
ctccgccgccacttgtaccgcctgttagttctcagtcaaacagtgttgttgtaccatcatctagcttgcagacacaaaaaccaggtagataatacccgaatctggaaaacattgaaatcttctcggtcgtttcttttgtcgcgtttgatagggttaaaactagaccaacaaaacatttgttgtttttgtgggtggtgtttttcttcttttttttttttttgcccctgggatcttggagcttacgggttttt

SEQ ID NO: 114465 - DNA, 247 bp, Glycine max
ctctcatagaatgtgaaagaatctaccaacattccattggcattattattattatcccaatcagaaaaagaagaagaaagaaataaagttgatagtatttcagatctcagaatgcgtttgatggaaatcatcggaatccgagttggttagcattgctattaaagtataacacactgcaacaccgtgccattctgaagttgaacggcggagaagaagatgttgtgcgcttgttcttccggggagcagt

SEQ ID NO: 114466 - DNA, 231 bp, Glycine max
ctcgagacgtatcatggtgtctttacgtcttcctcggaggcggtactcgcgacccgtatcagctggtacaatgggatgcacgagctcatagaagacggtcgccggagccggtgattctaggtcggagggacgtgcgtggtgcctacatgttctcggaggcgaagcaataatgggttggggagacaccaaaacggcgtcgtcgaggatgcgcgtcacggggatgcgcgtgag

SEQ ID NO: 114467 - DNA, 247 bp, Glycine max
gcggtttcgaacattcggaggaatttctctctcgctctctctcttcaattcaacacttcgagaatcgaaggcacagtaggtaaagagatttttcatcacacaccctactcaatcaaaaacttaagatttctgtatggtgggatcttaaaaaatatagtgattccaaatattaaatggggtgtctttgaactgatgatgaggtatgtatatactgggacagtaaatgtcaatttggatattgctgagg

SEQ ID NO: 114468 - DNA, 251 bp, Glycine max
ataacctgctggtgcagcttttcttttttaaaaacagaaaaatttaagttaaaagggataagaaaaatacaaatagctcaatacgcttctcttcagggttgaagacttgtgctagggcctttgtataacgagtaggcaatttgcaatttaattgcatccgttactattaagtgttagagtgaaatttgtgtgtactgtaaattctggtggaagtgtaagtacccataagttttgttaacttttgaaatgta

SEQ ID NO: 114469 - DNA, 252 bp, Glycine max
cacttccaagcctttccatttgcttcgctcgagttattattttgcacagagagagagagaaaggagacagatttgaattgagtggtattccaacgtcgaaagcagagaggagaaacactaaggtttctcctaaagtgctctatttttaattctctctctttctatatatctatgtgactccgcctacatcactcagaccggtggtcatgtccctcatgtgacaattcgggagctgcaaggttttggtcttgt

SEQ ID NO: 114470 - DNA, 245 bp, Glycine max
gtttgtttggtggttgcagcatccttggcactggcagtgtttgtgtccataactgtaactggcaggcctggctatgcaggtgctgggctgagccctgcaagatgcctaggtccagcgttgcttcatggaggcccactatggaatgggcattgggttttctggcttgggcctttcttggcctgcataatctattatagtgtctccattaatctaccaaagaaaggtttgaattgggttgatggaga

SEQ ID NO: 114471 - DNA, 267 bp, Glycine max
gctttgcatttctcagctccagttctgttgttgagcaaagggtttgtatttcagaatgcctaactaacacgtcaaatgtaaatgcaattgctggagattctcccctttgctttggacatgatgttaaagagttggattgcaagcctgtagagggtaaaagggcaggtggaacaattggtcttggggcatttgggttccacaacaggggaacccggacatttgacattgttaattttgagcaacttgatcttgtggtgactgaatctg

SEQ ID NO: 114472 - DNA, 262 bp, Glycine max
aagaaatctgactccttcgcgtcacgaccgccaatggaaccttcttgacggccatgtctttgaaggaactactattgaaaggtgggcactaattagttttgggggcacacctgagcagaagtccaatgtccccagatttataaaccagttatgtcaaaggtgtgaacaattgggcatttttctcaacaagaacactgttattagtccccagtttgaatctatccaaattcttaacaatgtcacccttttggaatctaggctc

SEQ ID NO: 114473 - DNA, 164 bp, Glycine max
gggaggaagaccattagccggttgaaaatcaatgacctgctagagtcacactttaaggagaactgtgaggagtcctctgatggcgttttctttgactcagaagatgatgagaatgccttgacagcttgtgaaaccccgagaacagcaccttccgagaggaagag

SEQ ID NO: 114474 - DNA, 250 bp, Glycine max
caagagccctgcaggaactcatgatcccaccagtggtggtttgcttggaccaagctatgcttcatgcacatgtgctcctcacaagcttgtttctgattctgatatgaaaagttctggtatttcaccatcactgttatggaaaagtactacatctggccctaatttagatcgtcgatactatatccaccaattaagccccgggacctaaaaccggtgacactcttgctcatcatcagctggccatgagctt

SEQ ID NO: 114475 - DNA, 133 bp, Glycine max
ctcttcttcgtctcaaatatcttcgttccttcgattcgttccatttcttccaaaatggccaaagacacagttcgcgttctcgacactggagctgctgggtgaattggttacgaagttggccccaagattgaaa

SEQ ID NO: 114476 - DNA, 273 bp, Glycine max
cccaattacagtatgcttctacaaatgacatgaggtctcaactctgcttggctgccaaggatccaactggagaaagttgctctagtgacatggtacatttctttgcagaatttagaaaattcattagccatgattattatgcttccctggatcaggaaatgtctttggaacgaatgaactatgagaccggagtaacctctacagcagcattggcttctatgacacctgcaatggagccttgcagtgattcttattggactgatagaatatcca

SEQ ID NO: 114477 - DNA, 264 bp, Glycine max
gagaaattactcactcgtggcaggaaagtactttctgacatttcaaactctgggaagccacaggttcctgagataaaaaataagaagaccctgaaaccaatagaggagtctcttccccccagtgcaattgccgaagaacaaatcttgcacgatcataagaaatgcatccattcacagtttgaaactgcatatggcatcaatttttcaagactgttggacttgacgatggtacatttatatattctatgtggtgcatttttttgg

SEQ ID NO: 114478 - DNA, 265 bp, Glycine max
gtggaatatatgagagaggcgtgtgctttgaaaagtagcgtttgtatataaactatgtgagatgtggcctcttttgatgttatctttgtctctaataaaaccacgatttcatgccacgtggcctgtgttatttggttatggtggatcagttatgaacttatttagggtttaattatggtaaaacattgtttttcttaatttctcttgattcctgatctttggctttatggtggagtttgcactttgcggcatgcatgcatttgaa

SEQ ID NO: 114479 - DNA, 240 bp, Glycine max
gcagcgtttggaaggacgcatcctgttgtgacgtacttgcccaagtcaaaagcagataaaaagaaaagtctgctgggaagttcaccagattctagtgaggctcaagtggcatccaaggtggttgatgaatctgaagatgatgatgattctagtgatgatggtgattctaatgatgatggtcctgtggagtgggcttcatattggccacctattataacaatctacgtggttgcttacttc

SEQ ID NO: 114480 - DNA, 107 bp, Glycine max
gaaaatcctttctttcctagcaagcttaccaagataatagaaaaaacatttcgatcatttccatatggacaagctctgtttcaactactgtttcgttggatactgcc

SEQ ID NO: 114481 - DNA, 129 bp, Glycine max
gacatatatcttagtcagtctcagctaggtactggtgtgggcgttattcggtcatggatctgtgacaagtatgcgatacggacttatgcttctcgactgaagatatcagggtgaactgatcatcctcta

SEQ ID NO: 114482 - DNA, 262 bp, Glycine max
gtgatccctctctttcttttactttcgccaaatctgaacaacatgatcaacatcagagatccaagagctttgaggcttacggcgatgtttccaagtctggtgtgtggggcgtccttgctcagaaagccaaagaaattctggaggacgataagtcgtcatccccacaacacaacgacgtcatcaatatcatgccaccagttgtcgacatagacaaactcaaatcgcactcttttaatacctttgctcctcctcctcaggagaa

SEQ ID NO: 114483 - DNA, 260 bp, Glycine max
ggcagtgaaagctagaatccgccgagagaacaccaactctagaaggtactcaggatcttacatgagaagctttagagaagacacaaggtcatttagatcaaacataaccatttctagcactgcttcttcacccggataccccttaaaagatgatatagacccttcaacatattctttcacaactgctcttaaagcattgcaagcaagggcaggctataacaggtggggatgcttatctccagatggttttgctttaaatt

SEQ ID NO: 114484 - DNA, 245 bp, Glycine max
ctttaaaatttgaatcaaaacgttcagtaactgctggtaatcgattaccattcttgtgtaatcgattacacagtgtaaagtttgaattcaaatttctaatagctgttataagtcattttggccattggtaatcgattacatcctctggtaatcgattacgagagagtaaatctcttgaaaaagacatttttacttaaatttcttggccaaaccttttgcagtttcaatttgggattcccttccta

SEQ ID NO: 114485 - DNA, 199 bp, Glycine max
aaggaattgtcctatttgtgactctgacatggatgctagcgtgcatgtcaatctctcttagtacaactttttttcttttttctttttacataattttcattgtagagtttagaacaacagaaactagaaacaaaatagtttatcttgtcaaaaagacagttagaagaaaaaaaaaatagaatttggaattcttttgttc

SEQ ID NO: 114486 - DNA, 257 bp, Glycine max
gtttgtttgttttgtttctatgtcttgtcatatgttctaagaaggcaatgttgggctactagccccactctgctgacaattggcgtgaccgacatctgtagcttttatgtccacggaggaatcaatgcacctgtttttggtgggtcttgttcgtcttcaactggaaactattacctactttggtagacacaaatattatctctaaagcttgtttacaatgctcctttaatcttattgatacaatatatgcaacaagg

SEQ ID NO: 114487 - DNA, 254 bp, Glycine max
ccttcccagaaattaggttttagtatttctttctttctttatttatcagcgattcgtggcaatttttcgaaggtacggtttgatgggtgatcgcggttcgggcgtggcgaaccgatttggatgaagcaggcggaggaggcgaactgaagagcgaggcggagaaggacgcggcggcgaaggcggcgttcgaggccaccttcaaggctttggagaacaaacatgacaagggaggaggaggaggaggaggagggagc

SEQ ID NO: 114488 - DNA, 256 bp, Glycine max
  unsure (1)..(256): unsure at all n locations
attaggaggaacctccagctatcgttgctgccggacggngncattagtcgccgccaaccgaaactacgagagttacgtcgtcgttttgaagctcaagccgccgcacgtacacgaaaacgtcgcgtcgtgctccaattgacctcatcgccgtgctcgacgtcggtggcgccatgtccggcagcaagctccgtctcatgaaaagctccatgcggcaagtgatctcgtcgctccgtccaaccgatcgtctttccatcgt

SEQ ID NO: 114489 - DNA, 251 bp, Glycine max
tctcagcatactgggaaactttctgagggtagcaactatatacaaacaagaatcttcaacaaggatcaaaatccaagcttggagttcaccttagggagatcaaattggcacaacagtgaacatgcctaattttaattggtttacatatatgatcactttattactagccaaattaatagaaaagattaatatgcacaggtatataaattaatatataggtagtgcttttgtcaagacaaagatgtctgcac

SEQ ID NO: 114490 - DNA, 249 bp, Glycine max
ctcaatagatgatcttaatgtcaagtcagtacctatatatgatggcattcacacaaataaagttatgaagagaaagaaacggaaaaaagctgaagaaagtgatttatcatcatatgtgtctaatcatagtatattctcttactacgagaacaaaaaccgtggcgcttgtattgaagattttcgtggtgatgccttgagaggtaatgcagagattaatattgaggagttaaagtttaatgataagctgcc

SEQ ID NO: 114491 - DNA, 247 bp, Glycine max
gaattgaaccaactcgaaaatagttcggaactcgattcaataatcagctcgttgaatttggttcatgaaccaaatgagctgaatttgagctcgttaaataaatgacccaaacttgagctgctaatagttcaactcatttgattcatgaattggctcaatatatatatatatataattgattgggtattctattattttatatatatctagggcagggtagtttttatttatgcagactttggttata

SEQ ID NO: 114492 - DNA, 271 bp, Glycine max
attcaacagtgaactcataccatcaacagacagaactttcaaaaagcttgttatatgtcacatctattgtgtgtcaattgtcaactctctactatgctaaataaaataaaggacaacttgtgctttgcttcagctctgtctgtaatttcttgttttataataatggagcagatgttctttgccacttcaacattgcatgtccgcctcatgcaatgggatgatgataacttggttgagcaagctgttaatcgatgcaaccagatttgggaat

SEQ ID NO: 114493 - DNA, 273 bp, Glycine max
tcaaagttcagctaatggaaatacaaaacaggttattaattgtacatggaagcatcctgatgcacggacagtgtatctaacctgcaacatgctggtcaggaagagatccttgttaatgtttctgaaacctttggggcctaaatacatgttgataaagccaagtattcgtaatgttttgagaatctagcacttactgtgcctgaaatcctctgaagatccaacttctcgtttccgcttgtttgatggatctcaaaatttatatgaaagagcaag

SEQ ID NO: 114494 - DNA, 279 bp, Glycine max
catgaaacacaattcaatgaagatcaacagttagaacaacttataaatggacaaatatgctttaaaatttacccatttgaaaatgagatatcagccgaaaggaaaataataatgcctggttctttcaatccattacatgatgggcatctgaagcttatggatgttgctactcgcatttgtggtgatgggcatccttgctttgaaatatcggcagtcaatgcagacaaacctccattatcagtgtctcagatcaaagatcgcatcaagcaacttgaaaaa

SEQ ID NO: 114495 - DNA, 268 bp, Glycine max
cacaataaacacaacacccctaaaatagtgttattaaccaattaactatgattctgtaaaaaaaattaactatgatttattacataatactataataaggtcgagtataaaatataatttaaatgagaaaaaattgataagttattcgtttgttttttttttgtaccaaagttattcgtttcttatttctccaaagaaactacattaacaacaaaaaataatcagtaacaatgagttatacatagattaatatgcactttttgctttc

SEQ ID NO: 114496 - DNA, 143 bp, Glycine max
cgttggagctgtcggtatgggtgtgggtgggaaaacgcttgggcaggaatagaggaatattcagcatttacagcttgtattgtaaaaatttcatgttgtgtaattcaatattctcaatgtacatcaatacacatcatgctttt

SEQ ID NO: 114497 - DNA, 272 bp, Glycine max
caaaacgctcaagcttcacaagtctccggccaaggaatttttctctctatgcctcgtttctgattgtgccggagatgcatttggggaagcaccgtgtggagcagatgaggttgcttcctctcactctccaggaggaggcgagttccacaattccttcaacatttttttgttttctaattaactttgacttactttcattaaattaaccacatttacgttttaacaagcacatcttaaactgtcacattatctaattgaaagtggaatcaaaa

SEQ ID NO: 114498 - DNA, 186 bp, Glycine max
tagcagcgtaaccagaaagacaagaggtgtcactccaccggagcaaaggaacacataacataacccacttctccttttctctctctctctctctcactatagggtttctgttagggttccgctctgttaagccacactggacagacacagaggagaacgttacaacaacaatgatttccacacaac

SEQ ID NO: 114499 - DNA, 269 bp, Glycine max
ataattttaatagctttcctttgccaatatgtaagttgtaactcaacgtcattgtaggtttttatattttgtattttttatggaaatgtcaaagataactcataaattttggttgacagccacaacatacatatcaactttcttgagttggcctggattaatcctttgcaattttaagattttgttgtattcactcacatgcattttagaattgctacactttgaaacgcacaatacagtttcaataatagttttatgacatctcatat

SEQ ID NO: 114500 - DNA, 262 bp, Glycine max
tggtaagagtcccctctcgctcgcttctattcgttccaccattccttcgtcctactcctctattttatttactatcatccattcccaacacacaatacccttctgggtacctcaaaaaacatttattttttcgtttttgtttgggtcccattagattatatttcattgggtcttcgttaattgaaagaccttgttggttcttacttgttttatggatttctaacccttgttcctgtgatataccaattcaagtaaagcagca

SEQ ID NO: 114501 - DNA, 259 bp, Glycine max
attcactctttctctctcccatccctttctctatgctcaaatatatatacaataaaactctacaactggccaaaaaaatcagcttttgctccctgacatattagtatacaatacatagtttttatgtgttgtgtagcactttagattactacttactagagtgaaaagcgagaggcagaagagaggaagggagacatatggaggaggtgtttgtagcaatgaaactggttttttcagttgctgtagtggggattctaag

SEQ ID NO: 114502 - DNA, 291 bp, Glycine max
ctcgagccgcttcaacacagtcggcaaaatctttcaccaccaacacacagccatggcaggctctcaccttctttctcactcaccctcccttcccaaaacctataactactccttaaaccaaaaccctttatcccaaaatcttttttttccacccctagattcaatagctccacaaaatcgcgtgttctcagagctgttctctcccaaaacgctgcaaaaaccgcggtagaggacacaaagaacgctcattttcagcattgtttcaccaaatccgaagatgggtatctgtac

SEQ ID NO: 114503 - DNA, 288 bp, Glycine max
gtgtttctgaagggttacctgtcactaagcgatcaggagatgatagtgaaaagatgcagggagttgggggtgggaagtggaggattctaccagcctggttacggggaagacaccaaaatgcatttgaaaatgatgtgcctcggaaagaactgggtcctcagtccggtcaatacggagaccgacgcccatttgacggagcaaagccaccgcaaattcctcccgagttccacagccatgtccacagtgcactcaaggattccaatgccctccttccctccatctcccctg

SEQ ID NO: 114504 - DNA, 190 bp, Glycine max
gattagttagctacgtgtcagggagtagttgtgtgcatcgaatgttcctatgaatggaacgcgtgctttaagtaaacgctgtagcagtcaaagtgggaatggatatcgattgggatggatttgcgaagttactgatctccgattaagatcataggtgtgctcaaatgctacgtcgcactattcgacgatg

SEQ ID NO: 114505 - DNA, 249 bp, Glycine max
agtaccctccttaatatgccttctctagttgggggaaaccatcagcagttttctgcccagcagcaaaatccccttttgcagcagtctggtattggacttggggtccagtccacaagtctcgttggtatttcttctgcttcactacagcagttaccaatcctgtccattccccctctagtcaacagccattgatgccaggtgtttctatagatgcagatgttggcaattctaagattgacgaacagcagc

SEQ ID NO: 114506 - DNA, 249 bp, Glycine max
cccctgcttctgtcaactgcaatggttcctcaacctctgctaacccttttcctctttctctcccttctctcaattgtcaactcctctccttcccaacaccttcagatcgccaatgctgaacgcaggattgacttgacttctcacattattaaggtcgcttgacgttgcagggtgaaaattcggggaaatcttggacttcagctatgcgtgtcgcgcgatctatcgctcaggtggtatttctagcaatag

SEQ ID NO: 114507 - DNA, 284 bp, Glycine max
aagagagtgactgatgttctctcttttccgtatggtattactttctctgatgagctagcatctataattctgtttgaaccagatactcctgaggaaaagggtactttattctcatattggtagtagaggacgttatgatcctgtatggatattgcattttcaattcatagtctctcaaaggcttatgtagcgcctgtggaagttgctggttcagggtggcttgcgattgcatttgttagcttgactacccagaccataggataagaagattagcgtatggcact

SEQ ID NO: 114508 - DNA, 285 bp, Glycine max
gattaaagcaagtgtagagcattggagctctgctgtagcaagaacttggaagccgattgaacccagcatctggttgtaatatggagcaaagcactatggccatagttatcgcaaatgttggatggcattctctgtatcattggaatcgcaaaattctgattccctagtatgtgctttccttcccttcccccccccccccctcctttgctaggggttttggaatttggggctttcctaatatccaaatttcagttttaggaacaacaatggatcttggttttagtt

SEQ ID NO: 114509 - DNA, 217 bp, Glycine max
ggagtacagcgccacgggtgctccagtctatcgcggagtcctgcatggacgtagtctcgtcatcgctccccaagcttactccaccacgtaacgttaccagtttcctccatctgatacataccacacactctctattatcgctactcttactccctagtgagatgccggatgtggtagcatgatcaatctgagtgctgccaaatcacaacgctgggac

SEQ ID NO: 114510 - DNA, 288 bp, Glycine max
agcaaatgcaatactactaaggcaaactaaagaaccaaacacaaatcctctcatttaccttgtctctctgccttcaaaattttcaaacaagaaaagaaaggaattctgctccaatataattacctctatatctattccacaatctcagattctgtcctagctcacaatggttacattcttcagaaatttggctttcagctatgcttttcttgcaatttttctctcagcaggtattggagtttttctaggtgttgaatctttcggaatcaactatggccaagtggccaa

SEQ ID NO: 114511 - DNA, 282 bp, Glycine max
accaacgcggccagtcccactcgctcccaacaacaagccacccaaagcccaagaacaccctcgtcaaggcccagtcccaggcccacctctttctccgacaacccctccacctcctacagcagcaacagcgcaccctacagcggctccacggctatcgcctctcctccgacaccaccatctcaagcttctcctccctcacctccctccgtgacactctccccgaaaaccctcacatctatgacttctccgaaatctgtgccgccaccaacaacttcctcgcca

SEQ ID NO: 114512 - DNA, 281 bp, Glycine max
ggaagacttaggcccactgaatatcaaagaacttgagcatcttgaacggcaattggattcatctctaaagcaagtgaggtccacaaaggtaataatggataatttatacataaaaaatgtgttaagtttttggcaaattaatatatacttaagcttattaatgtagttcttgatcagtagttgcagcagcctagcgtaatttctctatttgatttaagcatctttccgtttttccgtacaatttgtttttgccaatactatggccgatgcaacattagaat

SEQ ID NO: 114513 - DNA, 277 bp, Glycine max
attttctctacaccaagtctcatgcctcaaagtttctgcgtttaactcggctgctatatcttttctcagctctcctttgatatgtttaagctctgatttggaccttattgaggatatctttggttagggcgagtgattgtctaagaactcctcattctccttctccacaaaatttgtcctcctaaaagaggattgtcccacttctaccaatatcatagcatctgatccatatgaaagtcaaaaaggggtctcacctattgtcgactgtagagtgtaa

SEQ ID NO: 114514 - DNA, 223 bp, Glycine max
ttcatcaccaaagcgttcaatccagacgcagggcgagatacgcactgacggtacctatacctgacgatgtgacatacgtatatcttctaactagccaggtccgtagtacctggtctgccgcggtagccctgatccgaagatcgtgaatcatgatgatcgtatgcagtagacgggtgcacatggagttcgctcctaaggccatctcgccagtagggcgtgctca

SEQ ID NO: 114515 - DNA, 283 bp, Glycine max
tggaatgtagagtggagcttcttcccttgttgctgttgttgttgatgttggtgaacgatcaatgttggaaatggagaaggatgttgattccaagctgaagattcacgggaattcctcatctaccaatggtgctgggaatgtacgaggatcaaaagctttacttttagggcaccccaggagaattacactatccaggactttgaattggagcatatctatggtgttggctcttattctaaggttgtgagggcaacgacgatggacactggaattgtgtacgcat

SEQ ID NO: 114516 - DNA, 291 bp, Glycine max
acgtatttgcctcgtagtaatgcaagtttgagcgacagatccaaccttttcggctgaaagagcttcccttcatctcttccacatttcaatattgtcttttcttcttttatgtcatcaaaacacaaaaaagcatagtcaaaagctatcacttatacgcttatagttgttccaacacacaaagtgtgtgtgagtgtgagagagagacaaagagagtagtgatgggtggttgtgaagtagagtttgaggcagatcagtgcaagataccaaaactacccttgttgaaccctccaa

SEQ ID NO: 114517 - DNA, 263 bp, Glycine max
cttttcccaatactcattatcatcaccatatctgggtgtcaatgctacaaaaatttcaaattattttgagagaaaacacgtcagcttagaaaccaaatccaatattagacaaacctgttgtatgccacaaatcacaatccaatccctaattttgtatcttgcaaagcccccaacccccacacacacaaaaaaaggggaaagtcacttaaattaaaaccctgagaatgtgaaaattttgaaactcgcatcaaccgactctgacc

SEQ ID NO: 114518 - DNA, 254 bp, Glycine max
gaaaaatggcaacaatcatcgccggcaccccaactacatcaatcactcgcacaggtcatgtgctcaaacgacctgttggggcctcatcctctaccgttcttggtaagttttctccttaagagaaatgatattatgatttaaggctttagggagataataatatgatttctttctatttctagaataaaagagtaattaatctcttcccatttctgattgatttccttgtgctcaaaacgatgcatactcatgtt

SEQ ID NO: 114519 - DNA, 261 bp, Glycine max
ggaaaagggtgtcatctttttagggtttccttgtgattcttgagactttaccttttctgggtttctttctcatgactctctttcttctttcttgtgcttagagataaaggggtgtttttgtttttttgaaatttgtttccttttaactggtggggttttagtgcagtctgtttttgttcagataaagtttgtattttttttggtttttggtttttgttttaatgtttttcagggctttttctctctctcactagagttgac

SEQ ID NO: 114520 - DNA, 184 bp, Glycine max
cttattccctcccaaacattaatctctttcgatttttctcctaaagctgcttcctttcgctttttttctctactgggtacgcctccacctctccctttcttttccctctttttggctcaattctcgttcttccgttctgatctcaaacacctaactttatgtttctccaattgttttcaccagt

SEQ ID NO: 114521 - DNA, 259 bp, Glycine max
gtgaattcttatacttatctatgtagtattcttttgattatcttttactcatataatacttccaagaattccatcaaagctaaatctttcaaggtaatttaaggtatttaaatctgtgattgcagttcattggaatttttcaagaaacaattgtgcaagaactggttggggagctggtaagtacacattgattttgaatgctgatgacaaattgtaatgttttataattagggaactaaaaacaaggttaacagaacga

SEQ ID NO: 114522 - DNA, 259 bp, Glycine max
ggaattgatgatgggaacttcctcaatgtttggtcctaaacacaccactcttgattttctaggattggggatggctgccggtggcactgctggtggaggcttatctgcacttatcacatctattgggggtggtttggatgtaactgcagcctttggcaatggagatttttctggcaaagatattggaagtagctcttgatatgatatcttttggtagtaagcaagaactgcacttatcagggcaaaagtatatgatggg

SEQ ID NO: 114523 - DNA, 257 bp, Glycine max
ggtacttagcattccaatcgaggaaggtaattcattaagtgtactgatgggaaaggaaaatggtgagattgtagaaacagatagtgaagagattgttgagattgagatggatgtcaacaaaatgcatgaccttccagttgaggaagatggtacaaagagtgtactgaaggacagaatgaatgcatatatacgctcagatgtgagacatgctctagaaacaatagagagggttatttcagtggttagagaatgtggat

SEQ ID NO: 114524 - DNA, 256 bp, Glycine max
ggtgtttgctgtagattcacaatcatctggttatggactatgaagcagacactctcactcatacgtttattattgtatacataagctccaagatttataatttataatatcttagtatatgtcatatgtgccaattaaggttttagactgcattgtttcgtcatgatccttgacattgcagcctaaattgttgttgaagaccaattttaaaaccttgttgccaatacttgtttgttactaagcccctctggaacaa

SEQ ID NO: 114525 - DNA, 250 bp, Glycine max
cgaacaaagaagggagaggaaacataggagattatcatttccgccattttgcttggaggaacacataatcgagcatatgtcttctcccttgaaaattagtgaaccaatagcatccactcatacaaatgataatgaggtgaaccaatagcatccactacaagtagaagctaacaatcaagaaaatgaacatgaagaaccagttgtcgggagaagtaggacagaaacttcagttgtttggacatgatttgat

SEQ ID NO: 114526 - DNA, 257 bp, Glycine max
cggctcgagttctttggcaacacacccaaatgcaataatattcccattaggttcctcagcacaagccttttatgggcaccagcctcagcaaaacaacccagttttccataataacatacctaacagaacggtgacccactgctcagtggacccattagatacttctttgtgccaaaatcttgccatgcagttatctccgctagatgtgtttaatgaaggtggctctcagtttccattagcattcttagaggatgatc

SEQ ID NO: 114527 - DNA, 257 bp, Glycine max
tgaatctgaacatgatgtgcctgtacgcattggaggttatcaagtctccagacctggtgctgacattgccggtcgtgctactattgcttcgcatcgcagtgcaacgatggttgctgctgacataacgcgtgcgatgcatgtaggctccgaatgtcctcttcgctcgtcctactcgcaaagactaatcaattactacagtaatgtctcgcttggggtatgctcccccccatggccctacggctggtgacttagtccgt

SEQ ID NO: 114528 - DNA, 250 bp, Glycine max
tggattcgtatgtttatcaggatagaattcaaatgttaaccctttcattgtcttcaatttttctgtatttgatttattaaaacattagttacatattgacgagaaaagatcacaacatttaaatttttgtatgattattaaactcttttcaatttggtctttcttttataataaccacaattttcttattttattaatttctaagttgcatttgttgcaaagtatattattaaatacttataattaaata

SEQ ID NO: 114529 - DNA, 248 bp, Glycine max
atttcatactctattatcggccttcgtttcgttcgttagtttctcagtcgtttgttctgagatcaaccttgcatcagggttagggaatggctgctatcttagctcggaaatcactccttgctcttcgtgcgcgccaattggctgtaagcggtcaagggctgcacagctcccaaaactatggccttcgattaagtgcacactcctactctaccaaaagagaggatgaagaaagggagcaactcgcaaag

SEQ ID NO: 114530 - DNA, 246 bp, Glycine max
gcacacgccttgttctttgcaccggaagcactcacttgtatatgtggaccccatctggcgcctattgtgttcatgttcctctatcgcaatttactataacagacctgaaatggaattctgatggcagttgtctacttcttaaggacaaggagtcattctgctgtgcagctgtacccttgttgccagaatctagtgagtacagctcagatgattgatgatcacgagggaatgaaacaaaatgatggt

SEQ ID NO: 114531 - DNA, 245 bp, Glycine max
ggttgggatcttattcaactgctgaagcagcagcaagagcctatgatgctgcacttctatgcctcaaaggctcctcagccaatctcaacttcccttcttcaagctcctcctcacaacactatatcatccctcaagacactgccatgatgtccccaaaatcaatccaaagagttgctgctgctgctgccaacaatttcttggacaataatgctattgctattaataatgctaccaccccaccttct

SEQ ID NO: 114532 - DNA, 249 bp, Glycine max
taaattctctcatttgtaatgtgatcatttaatttaatgaaagtataaaatacttcaaatgcttccaattctgtggtaataacaaatcaacagcattgcatgtaatgattagaagcaattttgtcatgttagaaattctcaaatcttgtgtcatttcgtgttttcttttgtagtatacttttacttaaacttggtagcaattatatttcagacatcttgtgtctgatcatactctctttgtatataaat

SEQ ID NO: 114533 - DNA, 242 bp, Glycine max
ggttgatccatgataattcttctgggtaaactttcaatattgagggagtaaagcacttgttaattacttgctgatctctctcttttctcactcttggacacacgcacacagaggtcaggattgtggaatgtgaacgctgtaatacttgatcttaccacagttagtaagttctcatgacatacgagattcactaatcttttttgatacatgaagggcccaaagggctgagattcactagtcta

SEQ ID NO: 114534 - DNA, 250 bp, Glycine max
  unsure (1)..(250): unsure at all n locations
gcctcatgctatatgccggcccgtgtttaaatgtttcaaagctttaggggactatattgaaacattaccacacgtngacgcttngaatggctgctactgctccatggtgccagaatgggaatattcatacattgattacaactgtctcaaagcacctctgaaaaacatttccaagtttagagagctaaacgagtcaccaccaatggcatccacatcgctaggtctccgaagagaagttaacactctatag

SEQ ID NO: 114535 - DNA, 246 bp, Glycine max
ctgatagtattcattgatatcttttacactgtgtatggtgcatttgaattggaatgtagttgcagtaagactttttaccgctgcatgtaatgtcaatgtgcaatctctaattgcttaaaattgaatcagtgctgtaactttttcttttatggccaggggataaggtggttggattgttataaattgctctttttaaggtttaggaagacattttgtgcaaggttctgaaaggtcatagtcaaataa

SEQ ID NO: 114536 - DNA, 247 bp, Glycine max
ttcagtacataatatatcaaggttctcaagctcctatagggtcgttaaactgtggtaagaaaattggacttggtaatgttgttcacatgtctgtttactaatgcgagcccaaataaccttaatagagtcacataaacatcgccaaacttaaattattattgtcaatggtcatgtagaacagccaagcaaaatattatacaacaagtctgttagtttaataactcattggcatcgtaatcaagattat

SEQ ID NO: 114537 - DNA, 243 bp, Glycine max
cactcggaaatttctggcgatctctgcgttttcccctattttttctgaatctaacaacaaacattcctctggcaacaatcaatactattaataagagttccttccttcactctcacccaagccaaagaaaggaacaagaacaagaccaacaaagtaacgtgaaagagaaagagatggaggaaattgttccagtggtggatttccagaggctttcagaggaagaggagcgcaagaagctgagaa

SEQ ID NO: 114538 - DNA, 242 bp, Glycine max
agcaaaccgagagcgtgcaataatatatataagaagaaaccccacattttatattgtttcagcgaagaaggaagaaattggtgttctttaatgtgaaagggttggaacggtttttgattttaaccctgcaaagagccttcctttgcggtttttcttcttgagaagaagaaggctctttgttgttgttgattttgaagaaggaaagaaggaaggaagaaaatgatgaggctatggatttctta

SEQ ID NO: 114539 - DNA, 243 bp, Glycine max
ctcataccgcataacctaacctttcctcattctcctctccgttctctctttctccggtcacccgccggcgacagaggcacacagaacggggttgagaagctgcgctgcgtttagcgtgttacgtgaataatgcggcagacaaaaacagattgtgctgttgcgacaatcgcaatcgtgcgtgtaaggcgaataatgcgttaagtgatggtgaagacgagagatacagcagcgtcaatgacggac

SEQ ID NO: 114540 - DNA, 248 bp, Glycine max
cctcagcctcagcctctatttattttctattcatttccattttctctcgagtatcctctgctttcatcatgtggagacttcgtcgagcttcttttcgtctcagtacgaggcgaggagttaacgcgggagctagccgtgcttctgctgtcaaattagtggcaaccactagtgtggaatatgaggctggtatccctcagtctcgtcaaatcacttattgtagatttctgtcggctggcatgggtcgtgtg

SEQ ID NO: 114541 - DNA, 257 bp, Glycine max
tgtaggtatgtccctagaaaagatgtagcaattgacaatgtggtaacaagggtcttgtttcttttgatatgaataaaagcgtctcttctgtgtttcttccccatgaaaaagagccaccgtacgcatcaagtaagatcctaagaagatttcacatgttcagtttgggaacgaagtttgttaattaatttgtgtcgttccatttcaatgatgggagaaaaagggagctacgaagcaaaatatacaccaagagattgtgc

SEQ ID NO: 114542 - DNA, 251 bp, Glycine max
gggatctagaaaccaatgtcttccaaaatgtctctggagaagttgccatcagcactcactgcattgatgttgaagggcaaaatgtgcaaaacaatcaataggagcatgatgatgcaaaactctttcaggtgtatcaagttgataatcaattctactatcaaaatgatgaaatccagatatattgacaaacttatcccttccaactcagttgaatgaagcctccagagtgtgcgcagaactgcacagattga

SEQ ID NO: 114543 - DNA, 250 bp, Glycine max
  unsure (1)..(250): unsure at all n locations
ctctcacacaactcccaactcccaattcacaaaaccgtcactatttaccaacccacttcacttcccccactcaacaacagtcgattccattccacaatgcattttcccccactttcccagcaaccaaacagcacataattccttcccantcgagcctctttctctgtcatgtaccgcttgtcgcagatttcatcgtacaccgcctctatagtcggaaacaccgttcgactcatcgcgaaccgctccctgc

SEQ ID NO: 114544 - DNA, 255 bp, Glycine max
ctgatgcacttaggtatttggtgttcggctgctgttttctcctagttgcttctgctgttttatggaaagatgtcttatcagttaactggcgaggtttgctctagttctctctgtctcattttcgtatactctttaatattgatgcatctgttaaagctaggcagacatctaagtcctctattatctaatgaatttatttgacatgataatgtctgcttgtgtttaaggaccagctggtcagcagactggattcag

SEQ ID NO: 114545 - DNA, 252 bp, Glycine max
gcattaaactacatagaaaaataaaaccaaacctttcttcctactactcccattcccacatttcgacaacatggacgaggccttcgacatgccgacggcggaggcaatgggcgaggacttcgacttcgccggcgccaccggcggcgacctcgacggcagcagcagcaaccccatcttgaacgtcggcgaggagcagggtgttcacaaagctggtgtgtagcatggtgtacacaaaccaggtgacggatgggg

SEQ ID NO: 114546 - DNA, 241 bp, Glycine max
ggatcttcaagattccctatgattcaggtgccccaaatgcaaggaactcatatccctgttgcacatatgtctggatctacagcttttcatgggatggccagagcaaatcctccagggtttgggcttcctggacaaggacatcccatgccaatgccgcgagctcctatgtttcctttttcaggaggacaaatgccaaatgttgacccacaagttaagcaaagcactggtggccgtgactcaa

SEQ ID NO: 114547 - DNA, 244 bp, Glycine max
tataaattcaagaaagcataagagtctgaaaattgcttctcatcttaagaatcagtgtactgcccgaaaggatgaaaatgaggaacacaataacaacgtgttagaggaaaagactttgcacgtcatcaagatggaaagtgaaaacaaaactttgcaatctgatcaaaatgcaagctatgatgatgaatcatacctccctcagttgtcatcaccaaagtcttcagtatcctcaatttctaaatcc

SEQ ID NO: 114548 - DNA, 244 bp, Glycine max
ggacaacaccattgctatggggagcagaatgagtaagaccgatgacaatcttctttcaatggctcacaccttcaataaaggggatgagggctataagctgctgggccacaattatggcaagggagatgaaagtatcatatcaatgggtcatccctttgacaagggacatggatatttcatatcaatgggtcaatcatatgataagggagatgtccattttatatctctgagcacctcagatacc

SEQ ID NO: 114549 - DNA, 254 bp, Glycine max
gtgcttcacaatttttcaattttcgtattggtgcttggaacagatcttcctttggaatagtttggttgacttgaataaaccaagctaaagccaaatatcgaacctcataatttcctctctgatttctattcctggatttgttgttttgttttctggcttcatcacttgctaatttggttcctttctttcgttttctacatcgactgttttccaatctttccctttgtttttggcctttctaatggttcggagca

SEQ ID NO: 114550 - DNA, 245 bp, Glycine max
gtttatcattcttcaagataagctgagagagggagaagagccagataaatattattttcaaatgtataactatgtagatgattatgataaaggggatagtggtgtctctgttgaagagctcataaagaaagcaaatgaaaagtactggcaaccaggagaagaccgatttgtaaataatcgttttgaagggccagtaaagttatatgagcagatatttggtcctaatggacctcaaaccatagagg

SEQ ID NO: 114551 - DNA, 242 bp, Glycine max
gaaacgtggaaggtcacgaaaaacaaaggtaactcccatccaaattcactgcattgtctttgacatctttgaattacataaaactcactacattgtctttgacatctttgaattccatcaaactcgctgcattgtcttttgttgaatttcttcttcctcacagcctaccaaccacataattaaccagaaatccaataccccatcaacaccccgaagatctaaaagaataaagcatgtggcag

SEQ ID NO: 114552 - DNA, 240 bp, Glycine max
caaaatcagaactaccaaagcttccatctgatttgcagagcgttttttttttttttttttccttcccaagggaccaacaggggcaaccaaggacactgtagaaagaggaaaggggtcctgtcctttcggcccttgattttcctgggggggattaaaggttgtggcgtcccgggatcgttcttccctgtggcggaaacatgttggacggccgtccctgcgttgtcccgaggatgtttcccg

SEQ ID NO: 114553 - DNA, 99 bp, Glycine max
atattgtatacttaggatggcattctcatggcccaaacccttcagcaagtgatcttgagtttgcaacaaatccccattacaaattattagggtcacact

SEQ ID NO: 114554 - DNA, 265 bp, Glycine max
gagtaacaagcctttaacttccattaaacagaacagacaactctcttactcttacctgttaccactttttttttttttttttccgggttctctaaacttaacaccactttttgcatcatcatcatgctttcacttcccatttcctaatccctctttcctttgttgccacaaatttccattaatttcccttcacgctgaaaccagctacagaaacacctgtttcaaaggaaaaaactcccgggttaaaggaaaccacaacaacact

SEQ ID NO: 114555 - DNA, 263 bp, Glycine max
aatcttcacaccatatttgcattcgctctttctaatctatccccatgatctgctaatgcatcaaatatttgcaagtcattgatatgaaatcactgaagaagatgctgcccattcatgcattttcttaaccaattgaagtttatagcacacagtacatctgcatgaaagattcttattcaaggactcaaatttctgtggagtaacaggtacgttttttttttcttttttgtaagaggagtggtcatggatgccaatgatgacag

SEQ ID NO: 114556 - DNA, 262 bp, Glycine max
ggttgacaatgaacatgggagttaaaaaattgcaggagaaggtgaagaaataaagtgcatctttgaagaaaattgaagaaagaaagagtcattgtgcgatttgttattggataatcatgtggaaacaaatggtgcattccaaggaaaggcaaaattgctctttgctcatgctggagacaaatgggatgctgagttttatgcaaaagtcaatgatgatgtctatgtaaatattggttagtttttctttgacttaaaccctgca

SEQ ID NO: 114557 - DNA, 258 bp, Glycine max
tacaagcacttgtgagagggtacttggtgcggaagcaagcagcagcaaccctgcatagtatgcaggctctaattagagctcaagcaacagtaaggtctaagaaatctcacggactcagcagcacaaagaatgaagcacatttgtttcaaacacaagcacgaagatccatggagagatttgatgacataaagagtgagtacatagctcccatccacagcagaaggctatcatcttcttttgatgccacaatgaataatg

SEQ ID NO: 114558 - DNA, 249 bp, Glycine max
gtggttttctgattccatttgggaaagttttgacttttcatggttcaatccctcctcagttgttgttgttgttgtagatgagtttgaggaaatctagttccctgtaagtgtctgtgaaattagtctcagaaggtttgtttttggggacctccctttttggctttgagacttgttctcagtttgtggataaagtgatttgtaaggtgtttctagttttcttcttctgaagggtaaaagatggataaagat

SEQ ID NO: 114559 - DNA, 253 bp, Glycine max
tatcttttggtttcctgaatccatttctttctacggttatcttatcttattggctaccatcttccctatcttcctcaactgggttctgcgtattgttttaagtttaggcttgtttcattttagtatttgattgctaattttatatttctgtattcatttgtttatttatttatttattactttgtttcattcacgattctagatgagctctaaggttagtgagggggttatttcctttatgttagatttaatc

SEQ ID NO: 114560 - DNA, 243 bp, Glycine max
gagagtcctttggaggttgctcatgcgttttctctgtaaaaataaaaaagtaatagatttttctcattttttgtcttcggttcttctgtgccttgtccgagtcttctttaccggtcaaatcagagactctgttgatgagagaagagatttcatcaatcaccggaatgtgaaaacattaggaaaattaatttcaatcaaagcaagtatacaataatacgatggtcgagtttgggacgagaatgg

SEQ ID NO: 114561 - DNA, 213 bp, Glycine max
gtcatattggtttattgcaaggtcggtggcaacccaaccctacccttgtctcctttctcatatgctatatatcagcctcctccacctagcacttgctccaattcactaccaccaaacacaacacaacacagcataccgtgtttcattttctctcacacacaaacctccttcgttttcattgacttctcaggaggtataactactatttgtcgc

SEQ ID NO: 114562 - DNA, 247 bp, Glycine max
gtgattgtgttgggagatgtcgtgtttctcagacccgaacaggaaattgaaactatgttgtttcgcacgtttgaggtggttaattagggctataaaggactgcaaaagcccatcagctttcatccatcaccatcattcattcaattttatcattctggggccttcactaatggaaaatttgggatttttttggaaaaaaaaaacaagaaaagaaaattcaagagtttggttcaattgtaatctgctt

SEQ ID NO: 114563 - DNA, 218 bp, Glycine max
attgtttcgtccaaccccaagaatggttcttcaattgtctagttgcgttcgttgtggtggacgggttagacttcaattagataattattgggagtccaaaccttcgcagctgggatcgataccggccaccaacagagagaaagagtaatcaagtgtatggcgaactgtcagcaatattagttgcgtgtgctttctctggcaatttgtatgcctagcct

SEQ ID NO: 114564 - DNA, 264 bp, Glycine max
attctatagaaagtgcttttagtgttgttagtgggttaagtttccatggattcagtactagtgcatgttatatcttgtcccaatgcttcagccacaactggtggaaatctctggcggagtaaacattccactgagaaaatatactctacaagttcttgtgcatcaaaagctttgcaaaacaaaaggaaaattcaaatggaatacaatcttttgaggttccaacaaccaactttgaatcatcattacaagtctactgagagaggg

SEQ ID NO: 114565 - DNA, 262 bp, Glycine max
aaacctcagtttctacctttgattacacgttgaaactttggtctaatttcgcgttcccgccgacccacttctctctctatctgtatctctccctctctttctctagaaaaagaggaaaaaaaaaagaagaaaaaaagactttgaatgaaaacttgcttgattgaggctcttttaaaaccaaaccaaactcataatctctcattatctttgattatggtcttcttcttctgaaggaagataagaagttcagaacaagaacgca

SEQ ID NO: 114566 - DNA, 251 bp, Glycine max
gacaccaattccctcccactccctctctattttcctctccacactccacattccgccatggacgacagcttgtacgacgagttcggcaactacatcggccccgagatcgagtccgaccgcgactccgaccgcgactccgacgccgatgacaaccccgacgaccaatccgacgccgtaggagccgcccactccgatggagaggacccgagcaacgggtggatgacgacaatctccgacgagctggagaacca

SEQ ID NO: 114567 - DNA, 256 bp, Glycine max
cgctttactaggcttgaatatgaatatcttcagcagtttgtattcaagcctagtaaagcttttatcctcaaagcaggtactgagctacgtacacccatgcacgataatatacgataatgacgaacacaacataacaaccgcaacaactgttcaaacgtttcacaacttctgctacttcctactccaaccgcacttctgctccgcaattatcatgggcaaggtcaagatcggaatcaacggatttggaagaattggc

SEQ ID NO: 114568 - DNA, 240 bp, Glycine max
cttttcctgaaaatatgcaggtagaatgattgatgtcttgttcattattgcctcacttttgtgtggaatgaggagaaggatttaaatggtagcttcaccaaatatactaaacttatctacctgcaaaagaaattgcctggggtttagatcaatttttagttagtgttctgctcaacaattgatatggcctctttgtagacttcaacttcctaactggtggtagtttatcgctgattgttt

SEQ ID NO: 114569 - DNA, 250 bp, Glycine max
atcattttttcacatgtcttcaacattttcaaatcttattatctctaccttgatgcaaaacccagccgcccatgctgcagcaagtttctcgctttgcatagggccaaaatgtagcagcgaaacttgctgcagcatgggctgctgggttttgctgctacattttggccctatgcaaatccagaaacttcagcaaattcccctaggtgctcccaaggacgttttacaaatagacaaattggttcccctccaa

SEQ ID NO: 114570 - DNA, 257 bp, Glycine max
aggtaagactaggttgttcttttcatgcgctcatatagtatctaagcaagaggcacgctaccaccgtcaaacccttctccttgttaccattctaatggcttggttttttcacatcacactttctttgtgttgtgtgtcgcgcgcgctcgcgtgttgtgtgtgagtttgtgaagtgagttggaggtatagacaacggtttgagatggctgtggtgagtcctatggctgcaacaacacaaaggatgggttcagtgaggt

SEQ ID NO: 114571 - DNA, 255 bp, Glycine max
atcaaatgtatataattcaaaatgagtacacatataaacaggttaaagtttcactatgaccacgaggacctcccctcagcctgatcagtcacttatgacaccaacgtttggtttgatttgcccacctaccttgtaccatgtcaagcatagtcctagaaaaggagcatcaatcaaatcagtcttctgttaagtgttaatggttgaaactcaagcatttcaattctatcctcttgaacttcaagccttcttttcatt

SEQ ID NO: 114572 - DNA, 192 bp, Glycine max
accaccaccacttctctccctccgccgtcgccgcctccgtgccgcccaagcccgttgccgaagctgaggacttcgccaaccccttcgaagacgacgacggtagcgccacgtagaagcgcaaggagtgcgacgagatcggtgagggagccgcctcgtacggattcaacaacaagagatctaaggcgactccgt

SEQ ID NO: 114573 - DNA, 267 bp, Glycine max
gggttcttgagtttgactctagattttgacaaattcaaagtgtgcatgcactgatgcaacccccttcccctttttctacattaaaaaactatgaatgagatttttcttgcgatcatcattgcttgaattgaatcatattaggtttacattctgaattcgattagatttagcatttagggcctattaggtgttggtgtgattgtttgtaccttctggtggtggagcttgttggaaattggagatgagtcagaggggtttaatatatag

SEQ ID NO: 114574 - DNA, 256 bp, Glycine max
ctgcgctcttcagccaccataccatagatccttcattctctgcaacgatcaaacccaaaaaacactgcacctcttcttctggttttcctcgttttgagtttaaattcacagtattttgaggaaacaaattaaagggtaatcgctcgcttaatccaccgagctcaattcccacatccccacaaaagaatcaacaaaatcagatttggtgaagaagagagtgtgatttgatgattatgaattgaagtttgaggtggag

SEQ ID NO: 114575 - DNA, 262 bp, Glycine max
gaacagtgtgactaacactatatggtgacaagatttccctcatgccacttctgttgattttgcatcacttctcccaaaaattggcaatgctgacattcatcaaggctcaaactgtggggacaagttcaaattttgggaggacagatggatgggctgggaggtttcgttgattgcaagataccctaggttgtatgttatatcttcacaacaaaaccatatcatacaacacatgggggtcttccgagataaagggtgggaatgg

SEQ ID NO: 114576 - DNA, 113 bp, Glycine max
atctctctctatctctttgtctctcatccagatcttgcaaaaaggtagaggcacaatggaagagagggctccgactcaaggggaagagtccgtgtaattggagaagtgggggt

SEQ ID NO: 114577 - DNA, 214 bp, Glycine max
agcgcatctcagttcttcacttttatacgctaatctcatgtacagattatacatttaagatgcagaactttgctatcgtaatagtataataagtactacccaattccaaatatcccatgggaacccatattagatttggtatactatatactatacgatacaatctatatggctccatagataagggtgcatgttttcagtatgtgcagagcgt

SEQ ID NO: 114578 - DNA, 251 bp, Glycine max
gtaaaaagtgcagaacatctcaaaatttcaagtagcagtatacctcctacctaccttttgtgtctgctctttaatgattctatctccttttctcatagactaatcatgttgaaatatatcacactggctagctacactacttaaattgtatttgatgtaaagattcagcaaatacattttgaatttcaatattctctgattgcttcttgtgtccctgaatgtctcattgaggatgacctggttttgtctct

SEQ ID NO: 114579 - DNA, 211 bp, Glycine max
aatcaatcaaggcgtttttaattaaaaaaagaagaagaagacattttagaaagaaagaaagagaagagaagagaagaatccctcttgtaaattctcatttccccgtatttgtaggggccattttgattttgatcccaacccacgttaattgttggtccttttttcgatgttcatgaaagaaaagcattgaattgaatcattccacacaaca

SEQ ID NO: 114580 - DNA, 254 bp, Glycine max
gacgacgttttagctcttgtttccggacttgaatttgcgttgtggacttgtggtttgtatgagtagtttcagcgtgagttcgagagaaagggaaggtgtagcgcttgctgagtttggaggcttgtagaatctaaacgtactatgctgacgtggcatcggaaactgcacggggcttctttcagagttgtgtgttgaaggatgttctcagttaacatgatcgcattgattttttgaatgaatgtagatttggtgtt

SEQ ID NO: 114581 - DNA, 250 bp, Glycine max
cgcaaggcttgtacaattaaacgcctttgcttcaaatttcataccacttgagttcttgcttcagcctttgagctgctgctgctacatattaattaggcacaccggaaaataaacttgatggtcttgctcattttgatgaattgtatttttctttctttcttttaccgtaaattttttaaaaacatttaatcttgaattgtaatcttgcactaactgcagtggggtggaatatacttgcatagaattgtgt

SEQ ID NO: 114582 - DNA, 245 bp, Glycine max
caaattcaacgctgcggttttcttgttccttcttcttcctcgatttttgtttgcatctgaatatatacatttttttgtctgatttatgctttcgttttacgaatcatgacgcaattacaatctaataccgttgtgttcattcgcagattcttgacgctactcacgacttttgacagaagatggcttcaagattctggactcagggtggaagtgattccgaggaggaggagagtgattatggtgag

SEQ ID NO: 114583 - DNA, 251 bp, Glycine max
aaaaacacctcacgaaagcgtcattggattcaatgcgagagagacaagtccagaaaagtaaaattaaatagcaacacatcaccgaacagaaggcaatgggtggagagagagaaatggcgaatggtgaatggtgaatggtgaatgaccccacagaaggaataaaacaggctgtggtagagctgtaaacgttccatttcaccactctttatgatatgatatattttctccgaaagcatagctttgagcaaaca

SEQ ID NO: 114584 - DNA, 250 bp, Glycine max
ctgctcacaatggtgactgtgaagcctgatgcttgcattgtggatttctttaatgaggttgcttcttcttcccccccttttttttttgtgggggtggtgaggtggggggtatattggtgtcagatttgcttacataactaggtattgctatcgtctgtagggtgagcactcacatcccaacaattggcctccttggtttggaaggcctgtttatacacttttcctgactgaatgtgacatgacttttggg

SEQ ID NO: 114585 - DNA, 244 bp, Glycine max
ccgtcactcgccgcatgcagcattttgcttcctcaaaattctcttcattctaacttccattttcgcaaagttaggaatcactattcctctccgcttcagttcctgtgatttccggtgaatcggagaattcggaactgtagtgtgattctactgctgcctcttctcgcttttccgaaatgcttctcctcagccctgttactcccggtcaggtctcgttccttctcgggatcattccagtcgttgt

SEQ ID NO: 114586 - DNA, 244 bp, Glycine max
tctacctcttaacaataatcagatagaaaaacatagccaaacaactcagcaatgaaattcacttccttaccagcaacgagatacacaacggagagcgcgaaaacgatcatggagggaataaacacaaccatccagtaataatcagcaatctcctggtccgtaagataaaaagcgccagggaacagatccgaatcgggaccacctttcatacctaactgtatggattgaagccttcgatcgacgc

SEQ ID NO: 114587 - DNA, 241 bp, Glycine max
ggtggtcaggatcctggcaaacaacatgcatacttaaagaagtctgaatcaggacacttgcataaatctgcttactctgattcaggtaagaatggtgggagtatgtcagacatcaacaatccatctttggataggcatgctgagctacaaaagtgtgctgttcctcccaataactcatacttcaagggatcacctacctcagcttttagtggtggaggtggcgtgccttctcagtactcgc

SEQ ID NO: 114588 - DNA, 247 bp, Glycine max
aaaagaacaccaaccttggtgcctatttattatactagaagaaagaagggtagaatggattatcattcacaatacagtagtgctagtgaatcaggttggactcattatttggaccaatcctctcttcctgaaaattactaccagaggagaggtggtgttgtggagtgtgatgaaggaaaaggagcaagaatggaagagtactctgaggaagatttgtccatggtctctgatgcttcttctggacctc

SEQ ID NO: 114589 - DNA, 239 bp, Glycine max
cgctctgttacctggcatcgcatcaatggcgaatcactcaagcagcttcggcggtcgcagtggagttcgagtggtggtcgccggcgaccgctccaccggaaaatcgagcctgatagccgccatagcgacggagtcattcgccgaggccgttccgccggtccttccgcccaccctcctggcccctgatttgtaccccgacaccgttcctctcaccgtcgttgacacaccttccagcttgg

SEQ ID NO: 114590 - DNA, 239 bp, Glycine max
taagaatccactctcgattgctaccattccaaattcaagcttcttacgagagattcgttcattgcttcttctttttttcctttcattttatacggcatacagcaccagactttccttcatgggcatggcaatttttccataaaaattcgttttttatttcctctctttttttaattttttatttgggtcttttcgatcactttgattgaaagacctttttcttcttggttagtttttgt

SEQ ID NO: 114591 - DNA, 217 bp, Glycine max
gtgcaattcacatttttgtacatccttatcagcatttcaacttcaacagtaacttaattacaggagagagagaaaactatgatatttaacacattgcagtttgatagaaggtggattgaagaatatacaccttaattgatttttctctctcctgtaattaagttactgttgaagttgaaatgctgataaggatgtgcaattcacatttttgtacaat

SEQ ID NO: 114592 - DNA, 149 bp, Glycine max
cttttccggcactcacactgttgtcaattcaatcgttcatgctcgcattgcattttcgccttgctttcgtctgcttccatcgtgctaacatagggttgcttctcttctctctgtactctggtcgagcctgtcggcatgtcgagcgctgg

SEQ ID NO: 114593 - DNA, 240 bp, Glycine max
ggaattatcagtgtcttctctttcatacatcaagaaacaaaagggtgttgaaataatgggaccctcttgctctaatcgatcaatagatgacggcacacttctattgaactacaaacagtgttccttcaataagaaattgatgaatgggtatttttcttttggagcacagggccttgctgttgaagattccaatagctgcgcaaagtcaaacagcagctacaaacgtttaagttccatagt

SEQ ID NO: 114594 - DNA, 242 bp, Glycine max
atggatctgcttgccatcgcctccattgccgctgccatagagggttgttccggcgcaatccgccttgcatgtgctaacatcattagtcaagtctacgatcccgagagacagatattggaatcggcgataaaatggccggttaatgtgttgaaggtggcgaaggaagcagtcgtagagcgcgtctgtatcgacttcatcgattacgtcgattataccacgtcctaattggtcagctgataaga

SEQ ID NO: 114595 - DNA, 236 bp, Glycine max
gtgctgctcttctgcttcatccttagaccggagctttgagtctcagtctcttcttctgtgttgtttgcaaaacatgttttcttttttgtttacctgagtgaaggaagacatagacatacctagttgttattgctgttttttgttgttattgttattgaatttagatggagccttcactcctactttcttcaccttcatcatccacccctttacccgtcttcctctcaaacacactt

SEQ ID NO: 114596 - DNA, 203 bp, Glycine max
gagctattgtagtatgtacaaataactattgttaattgtaatgcatgaagaaactgaattcacttaatagcttgtagatttcaaaggctatttcatatctgtatattatgctatatctatacaggtatgcaacatactctgcaatgcattatagtgtcagactggaatttcagcaagtatttactcacaaaacgatctcgtta

SEQ ID NO: 114597 - DNA, 235 bp, Glycine max
gtaagaagcaatgaagttaattttgagaatttatgcatgaattttgtcttggtgttacttaatcagagttacatttgattatatataaggtaaaaattgaaatattattttgttgcagcttcttcgcacaaagtatagttgcgccaaattatccaattgtactagtagaactgaaaggattcttaaagaaagtggaagtcaaggaattttattgtacgactttgtgattgtgagc

SEQ ID NO: 114598 - DNA, 238 bp, Glycine max
aattaacaaacctgggggaagaatttgataattatcacaccaaatattacagtatataatacaataggaccttcctgctgaaatatatactgtaatatttggtgtgataattaacaaacctgggggaagaatttgataaaaaaaaaaaaaaaaaaaaaaaaaaacaaaaaaaaaaaaaaaggggggccctccaaaaaggagccgaggaccccgggaattatttccgggccgggttttg

SEQ ID NO: 114599 - DNA, 247 bp, Glycine max
agcctctatccctttctattggcaacgagtgcggaaaaaaggtatggtgactatcttgtggactacttgaccgacttggagcatcataacctgatccttctaaacaagttaccacagaggttgccagccaagcccctcgttttagtcttcaagtcttcaattatttttaaggacttgaatggtatgttttctttctctttagcatttcttgattaatactacaatgttatttacttagtttattttg

SEQ ID NO: 114600 - DNA, 225 bp, Glycine max
gctgtatttcaccgccgtagatgcgcattttccagtaaccggtgaccttccaacgcggcgtgaggcgctgggataccggaatggtagtgtatgacgaaagcggcctcgaaggaggtacgcgattcagattgcgataacacttcacgcgacctacctaggaggctcgtctcctcgatgttctctgcgctacagcggcgtcacgttcggagaacgtcgtgatacact

SEQ ID NO: 114601 - DNA, 247 bp, Glycine max
cttcgtagtttgatgatggcttccacacacaagcacacatcaatacgatgatccccgtgtcctgtttctgcgtttcaacttcttcctttcaggagcaatttgcagccgagccaggaaagcgaggagcattattctgaatcgaagattaaagaggttaaggatgcaatcgagcccttatctggacgaagcttgaagtactgcactgataattgtctgaggagatatctggaagctcgtaattggaatg

SEQ ID NO: 114602 - DNA, 237 bp, Glycine max
ttttgacctgagttaatgatcattaatgctgttttgaaattctacttttccattacttttcttgattagttattcctctttatgcagcttctttactccttgggatgaatgatgttagatctgacagggcaagaaggcaaagatcagatagccctttctcctttcctcgccaaaaacgttcagtaaggccccgcttgtacctttccattgattcagattcagagtaaaggtcatacc

SEQ ID NO: 114603 - DNA, 201 bp, Glycine max
agtgaccagactgggccaccttgtgaatgctggcagtatctgaagccgtgcacagatctaccttgagtcgctcccgcactaggtgcaccagattctcgacccgctcttgggtcccaccctgctctgactaggtgatcaagctcacgtcggtccagcatcaaacccgggtccagtacaggacgctgttcagggccttcgtcg

SEQ ID NO: 114604 - DNA, 268 bp, Glycine max
ttcacctcaataaacaacccttcctctgcttcagtgccctcccctgccttttcagctaactttttcttttaatatcatatcactcatgtcttacttagagtctcaggtctacaaagagagaaagtttgaagaagaatcagaagaggtcactcttgatgggagtgttgatttccatggacgtcctgcaatcagagccaaatctggcagatgggtggctgcaattatcatcctcttgaaccaagctctggcaactcttgcattttttggg

SEQ ID NO: 114605 - DNA, 264 bp, Glycine max
ccgatggccgcatgtatacattccgttgctgtttttcagtggagtagattatattgatgctcctacaccatatatgatgggactctattcgggtgttgatacttctgctctggcaattgatggggttgttgttgtggaccttgagtataatcgtatcactacctcagaggaaattcctcctattcctgagccagaattcagccttttgcgtggtgagataatgaagctattatatcccaatgtaattggaattgatgagatgaa

SEQ ID NO: 114606 - DNA, 266 bp, Glycine max
aaaatgttggagtcactacccacaccactcgtgcagctgagagacatgtgaaaggctaattcagaagaatcttgggagaaccacaccacaaaagctaactgatgtagttggcgaacctaaagcgttataaacctcgcattagtgttccatactttcaattgtaaccattatccattttttaatccatgcaagcatccatcgatactttgctagaaaatttgtttgtactttgcaaacacaaaattcactgacagaactgcaagcaa

SEQ ID NO: 114607 - DNA, 261 bp, Glycine max
caccgtacaacatattttggaagtagagatcatggagaagaaaaaagatacaattataaagacagatccttaaatgcagctgcctacaaggatttgataaattcatacttgaagaatattaatactagaccaaccaatgaagaaccagctattgctgaccagtggaagcaaacggaaacaccaagcagcattgggcaaaagacagaaactgaggtgctccgcaaagaggaggcggaagaagaatctgaaatggatatgctg

SEQ ID NO: 114608 - DNA, 259 bp, Glycine max
atgagaatgatctgaaatagcttttgggggaccagggagtgactaacattctggatttgcattctttccccagtttactagttatttcctaaatatcaatgcttgttattccgtgtgtcaattttcttgggcaatagcagtgtttgtttgttctctatatcatacatttgacttcatttgtactaggaagaagaattgagaaaaggggaattggaagcagatgcagataggatgatgagagagtacagagctcaactag

SEQ ID NO: 114609 - DNA, 240 bp, Glycine max
cacaaataatgatattagtcctgctgttataccttcttcggtgagcattttggaagcccggagttgtcgaatatgtggaacgcaagttgaagctggatcttgtgatccttctgcggtggctgtaggatcgatattgggctccgtatctaatcttcgtaaagatttatcgctcctttcagctccctctaaaactggaaggagtgtgcaatgggactctgacatgtcatcactgccgtgtgg

SEQ ID NO: 114610 - DNA, 262 bp, Glycine max
gatcaactttgtttaggaattttacacttcaagaaagaaatttcatccttctctgtagataattccatgacttgatagttgatacttattgatcaccagtctgctgactaagaaatgccctggacagcctttttgtaaagccacatcattaccaaaaaccttcctctcaacctctctgaactttacacaggaagttcttttccaagccattttttcttgattgggttaactaaatttcaaataaaaatgataattcctacaa

SEQ ID NO: 114611 - DNA, 270 bp, Glycine max
gcacggtggggctgataaatttacccctgacaaggggactgactggttgaccttgaattcaggctcaactccaaacccttacggtctccctgttggctgtgaatatttcctagtgacagtagccatgttacctgataccaccattcattcatcctctccttcctgatcctgcttcatccctggcagattagacgtgatggaagaatttaattgtacataaactacattcaaaatccaaatgctcttttcttatggtcggttaaccatttg

SEQ ID NO: 114612 - DNA, 264 bp, Glycine max
aaaattaggagtagggttttgctaccaaaacttagcaaaacagacagcgatcagccttatcagcttagaagtcatcattttgaatacttctaactgaaaaaatgtaaatagtataggaaaaataggttttcccgcaaatatgtgtttgccattaaagaaattaagggttcttttccccttgttttctgttttttctttcttttttctatgtactgatgagagaaagaattagctagataaagtagtatgtgtatgactaaggca

SEQ ID NO: 114613 - DNA, 265 bp, Glycine max
accaccacaacagaaacaacaacaagcagcaccttcttcgctccaacgtcggaaccctcagccttagggttttcgcagtgtctggaaactccgcgttcaaaatgaacctcagcgagtacctcgtcactctggagaaacccctcggcatccgattcgcgctaacttctgatggcagaatcatcgtccactctctcaccaaagggggaaatgcggagaggtccaggataattatggtgggcgacacattgaagaaagctggcgattc

SEQ ID NO: 114614 - DNA, 261 bp, Glycine max
ggagttttcagtgaatagggaaatgtctttccacaatcgagcatttttgatggggaagagtcctgagggtttgaatgatggtgacatgacaaaggattcttctagaattgagtccaagcgtgctcatcagtggttcatggatgaccctgaagtggatatgtttcccaataagaaacaagccgtagaggctccgaacaatttgttatctggaatgctcaactccaatatttctttgtggggaaattcctcaggatttcactc

SEQ ID NO: 114615 - DNA, 263 bp, Glycine max
ccctcgagccgaatcggctcgagctaagcaaaaccataagagagaaccatgaagcacaagaaccatgccagagacttctctacggagaagctagttttccaacaacaacaacaacaagcagctcctgtgtctggaatttcaagcatcgaagatgagccaagaagaggaattgactccaacaatggccactcattatcagattgtgaagagagcattgtttcctctccagtcattgaccatttacctcaacctcaacctcaaac

SEQ ID NO: 114616 - DNA, 262 bp, Glycine max
ccacctccaaaaccgtaacacacacaacattctatactcctttcaagcttattagccgcagctagggtttccttctcactctcccagggattgagtaacatctgttcattgatcgtgattggaaggttacaattcggtttatttgatggttgcaacttcgtaccagccgttgaagtgactgtgcatgtccgtgaactgtttttttcagaaattctattgaaattcttaatgggaagaacagttttggcacgccaaaaggatg

SEQ ID NO: 114617 - DNA, 261 bp, Glycine max
atagactctacagagaggtttgcagaagtattagcacagagaataatgcagtggatcagttaaaacaaatagttcatgcagatagacatttggaatataataaagctgagatgaagcatttagaaatgttcaacatggtaaatactcatcatgcaaccactggttataagtgtttgaagttgaaatggaggaaatttggtcacttggctggtcaagttggtggagcaaaaggtatattttgtgggttgtttggacttgaag

SEQ ID NO: 114618 - DNA, 256 bp, Glycine max
aagtcaacttaaaaacaaaataattataagatccaaaccatgtgtataagttaacacccatcgacaagaatcttcagcaaatgaacaaagtgttaaaaattttgctagtatatacacttttaacaatactaatgaatcgagttattgatttttcaaccttaaaaagctattttcagttgacttaaagggaaggggggttaattttggtaatttcctcatttaatcctgcatactcgttaaataattagatgtacta

SEQ ID NO: 114619 - DNA, 251 bp, Glycine max
gttagaagttctctgacaaatcactcaggccacattatttgtatgttatcttgtgtcagtttgcagtatcttgtcacacattcttgaaattgcctgatttcatttatatcatccgttatgcagcctgctcgcgagacggatctgagagtgttcggagttgtgctctactattctctctttatcataacatttttggtttaaccaatgttacttccaatataagtgcagctgtgggtgctgttgtaatgctg

SEQ ID NO: 114620 - DNA, 248 bp, Glycine max
cagaagaaaactaccgtacccaagcctaccaacaaccacaccctctctacatcatcctacctctgattagctagggccacagcaccttcctcttcacttcgttcttcaggactctacaaatgagcaacgacaaggacacacttcaacgtggctgatctcactatcgctctcaacgaggacaatacaccacaccttgtcaatgctctcaagagcaagatacagagcttggctggacagcattctgatat

SEQ ID NO: 114621 - DNA, 252 bp, Glycine max
gacacaacatatcttgagtactgagtttccgaagcgcttacgacgatcaaattcacgttttgttccgaatgcagcattgtcgttgaacttcaggatgtccagtccagcttcaaaagcctcttggacacctgaattccacagaatatttgttgatttatgccttggagaaatgctgaagaatgagcccgggtcaatgcgaattactaaggctggttggaggaacattgttggattcttttatgcgaagacagg

SEQ ID NO: 114622 - DNA, 251 bp, Glycine max
caagagacctacactagttatcttaaagaaccaaataaaacatttgaggttttatggcacagccaaattccaacatgaaggtttggttcttttgctttcttcttcttagcatgactgcaatcaaccatggcaaactagacgataaaaatatacaaaaagaaatgcatgggccgagcgagcataaactttccgatcagaataatgacaaacctgttgctgccaacccctacaatcgtggctgctccataata

SEQ ID NO: 114623 - DNA, 244 bp, Glycine max
gttgctcaaccaaaaatacatagagtggccaagctttagtagtacgctgaggactgcgattctgactcttatacttgttgcaatgcttattgttgcattatcatctgttgattcggctctcagctatctattggctttagctcttcggaaaagaccataaccgtgtggtgtgcctatgtcaccatgtgtaagcagttgatttctgatgcttgtaatttgtttagctctatcctcatatacgtgt

SEQ ID NO: 114624 - DNA, 247 bp, Glycine max
aggatattgtaggctagcaaggctgaactaatcaccaacatgtcccattcactttcaagtactaatgtgcaggaacaggaaggaatgcagaacccatttgaattcagtgaagacaagatcctggatgatgtttacagaacccatttcgattgttttgagaagtgcgatgtgacatctctgcaaacggttgcttcaaatgttatcaaccactcgatcgatatctcagagaaggtcattagtaagggtg

SEQ ID NO: 114625 - DNA, 269 bp, Glycine max
ctcactttctctatcttcaaccagccaaaaaaaaaaaaaaaaaccccaaaaccaaaccctaattccccgaaatttgattcctttcaggaaatttctcccaaaatccaggcctcctgcagacccataccgttttccttctcctttcaaatcctcggccacaaattttgggatctttctgggcctccgaatcatggaaaaggaagagaaggaaccccaggttcagaaaagtgggggcgaaagcgaagacgctgaacccatagggctcgttc

SEQ ID NO: 114626 - DNA, 276 bp, Glycine max
aaacgcggctcgccattctcatttctctctccagaagataaaaaacccttttatatttttatatttttatcactagaaaaatcaaacaaataaaattttcattttcattttcttttcttttctcgctcttgttttttcggggaaattgatttcaccgtaataggagccaagaaaaacaaaacagaaaaattccgaacccgtgaactcttttacctgctacaaatgcatttctctctcttttctcacactttttctctgctaaactcgcaaacacga

SEQ ID NO: 114627 - DNA, 224 bp, Glycine max
gtccatttccgcgaggagagagaaagtgcaagactcggcatagagaggtgagcgtttgtttagtttgtgatgtggtagctttgaagatctagttcactgttgcacatatgagtgtgtaactaatcgaagacgagggacgagtacggatgacgtcactcagtagggaattggtgttcttgatcttgcagtctctcgatgaggagaagttcaaggagactgtgcac

SEQ ID NO: 114628 - DNA, 100 bp, Glycine max
cacgcacacgcacacttgtcattctcaaaacacgcccaaattcgaatcaaattagggttagggtttccaactcccctcgaattatccctgtaatgcagtt

SEQ ID NO: 114629 - DNA, 258 bp, Glycine max
gttttgagtatgctaatctttttcacactgttacagacttggtacagtgcttatgtttcttctatagtgactggtctgcctaatcgcccacatttgatctttgttgacggccattgtgcggtatgcatgatcagttttgtttatttgtttcatttaatttcaacattctaatgctgttggtttgcattctaagaaagcatagaaagtgtaaagcatgcagtatctattgtgatgttggtttgcatacattttacctct

SEQ ID NO: 114630 - DNA, 251 bp, Glycine max
gttgaattagacgaacgccagttacagtttccgggttgttcaataaggagaatgagtgctggagagtgattcaacttgtgctcctgaacctcacaaaatgtctggccaaaatcgctctatattttctgccaaatcgggatttgtcatccctaaaaacgagttgtcagggtcactggtgcctattttccgatgggctaaaaagcatggggtcactgttggtgccaccaatgaagaaagttcaaaacaaattg

SEQ ID NO: 114631 - DNA, 242 bp, Glycine max
ctcaaccccgaaagtttcctcgttatcaggattcccgatgcgcttgttttgcgcattctgtctcgctcattgttcgtggccatggttcttgctgccttgcctttcttgggaactgttctcaaaggttctatttctcttccagttttgttcccaatgtcgaaactgcagccgcatctgggtctctcgatgtgggactattgaattcgattctacatgatttcgctcatgagggtctcctcaga

SEQ ID NO: 114632 - DNA, 242 bp, Glycine max
aacggatttcatttggttcgaaatgtttatttttcaaggttatgcgcagggtttgaagagttattaaatgactttgaaatatgttattatatttgtggatagtctgaaatagttcagaccaaatagaaagagtggttgttttagtttaaaaataagtaaagataaataaaaatatgtagacaatgtagttactttaaaattagcagtgcgtgacttctaagtccaactttaggggtatctaa

SEQ ID NO: 114633 - DNA, 236 bp, Glycine max
ctagaactgaagagcattcacattatagtacaaaaggtgggaataatggcatcctatctggcactgctacttcaaattctagaaactaacttagtatcagcaactgcatgtggcagacatcactttctgatgctaagttagtttctagaactgaagagcattcacattatagtacaaaaggtgggaataatggcatcctatctggcactgctacttcaaattctaaaaatgacctg

SEQ ID NO: 114634 - DNA, 243 bp, Glycine max
tttctctctctctctgcaacgaaaaatggcttccctcacgtgctcccccacctcgctacagctccgattggccttagccgcccctaaattcccacacaccccgcaactgcgaatgcgcaacttaagctcaaccgagttcgccctctacgcgccgcgcaagacggcgggcccgggcccgggcccaaactcgacggcttctcgggctggtccgacaccgacgccgagcagcggcccaacaacgcc

SEQ ID NO: 114635 - DNA, 247 bp, Glycine max
agaaaactttaggaaaacctatttaaagaaatcttgctttaaatggatttaatgaaaaaaattgatagagattagagcccaccagcattgtggatctgtttatctgactccatctagtggaataagcttggtgtttttgtttgaaatagaattacctaattactggacactattctttctcattctattctgcctaatgcctatataattatacttataatattcttattcattgttgcagtggttt

SEQ ID NO: 114636 - DNA, 238 bp, Glycine max
acttaacagcttcaaaattatcaacttactgtttagcctgtgaactaacacacgcgaacaatgactcatggctggagctcaaagtgtcattaatgccgtagtcctcattagtgacactttagctccagccatgagtcattgttcgcgtgtgtcccttaacagcttcaaaatgtcactaatgaggactacggcattaattagctagttttgttgtcaataggaatttaagtttatttct

SEQ ID NO: 114637 - DNA, 237 bp, Glycine max
cagtttttgtagatgatgatgaggatcttcgtaagtccttagagaaagcgagaagattagctcttaaaaagaaggagggggaaggggcatctggtcctcaagctattgcgttgcttgccactctaatcataataatgagactgatgatcaaaaccctacagctggagagtcacgagaaaacaaggtggtcttcacagagatggaagaatttgtctggggtctccacattgatgaaga

SEQ ID NO: 114638 - DNA, 265 bp, Glycine max
gccctttctctcgctactcctcctaccccaaacaaaactttcccattacaaattgtggaatgaagaaagaatggcaagacaagtgagtagtagtatagtagtaattgacccatcaaacaaacaagcataacccatgtacttgttattgtagatagatagagtgagtgagtgagcactgtgttgtgtatatagtagtgtgtaaactctccccaacagacagacacgccactcaattatttctgtccatttcttcttcccatattgt

SEQ ID NO: 114639 - DNA, 128 bp, Glycine max
ctctctctctctctctctctcattcacacgaatcacactctccacagtgcgattcattcaccaatggatcgcaacggtgttctctctcttgcattcatctgcattgtagtcgccggcgtcggaggcca

SEQ ID NO: 114640 - DNA, 262 bp, Glycine max
acaaaatacctataaataacacaccaattaaacattttagcaacataataaagcaaaataattaaccctaaattccacaatacttaaataatcaagtctagcaatgcatcgttactagataattacttgcagaggtgatagtagtggtagaacattcttattgatggtttgatattgttagaggtgagggtttgattcaagaacaacacaccaaatggaggtatgttgaacccttaacacacagaaaacaacccaaaacgag

SEQ ID NO: 114641 - DNA, 257 bp, Glycine max
cgggttttctcctttgttatcttgatatgtttgggttcccttaaaaatgtacaatgtctccttgttccatagtttccaggagataaatctagtcatgctgaaaatccggcttcacaaccattggaaccaggtgaggctaaaagaggacaaaatccacttcccaaactaaaaatgggagagaagcaacaaaatcacaagatgcctatggttccaacgccaggacctgatgctgatgggcatgccaagatggaaagtaa

SEQ ID NO: 114642 - DNA, 240 bp, Glycine max
gagatagtggccgccacaatttcagttcgtgttcgtggaccttggtatacgcatctgactgataacctgtgatatagttgctacgttcatgcgtaatagtactaataataatactaataaatatgcacatttctacataggactgcgtaggcttgtaagctctggatcttaggtttggagagctgtggcagtgtgtgtagtctgcttttgatgtagccaacagagttgcagagaggtgcc

SEQ ID NO: 114643 - DNA, 259 bp, Glycine max
gggaaaagaaattctctgtagtaatatgtagcttaaaattattcacctgtaagcttttattgctaactttgagggtggtttttgtatgaaggaatatttcagggaaaaagggcacatatcaagttagaattcatgtttattgtgagaaaatgagaactataaatttggctcatagtgtatccaaccatatatggatggtaagattagaagttagttaatgcttacatggtcacttaaagtcatgtgcatttattttcaa

SEQ ID NO: 114644 - DNA, 259 bp, Glycine max
  unsure (1)..(259): unsure at all n locations
gtggaacttcaaacaaacttgagtttccaacacatgtttagtttcacacagcatacgacatgcgngnaaattccacaatacttaaataatcaggtctagcaatgcattgctagtagatcattacttgcagaggtgatagtagtggtagaacattcttattgatggtttgatattgtgagaggtgagggtttgattcaagagcaacacagcaaatggaggtatgttgaacccttaacacacagaaaacaacccaaaacga

SEQ ID NO: 114645 - DNA, 246 bp, Glycine max
aaaactacgaaatgtagttattttgttgtaaaagaatgatagtggcttctttactatttttgagatttgtcaaataaaaaagaatctagaattgtgtatgagaatgacccattagtcaaacttgtgatataaaggtaaaagataaattatcttattatattgatggggaatgaccatatgaaattgaacatgcaatttcttatttagttaaatattttattttttgagctgattaatttttttctt

SEQ ID NO: 114646 - DNA, 246 bp, Glycine max
gaaaacgatgaggtggccaggttgaggaaggtggtgagggaggtcggggagttgcttggggcgtttaacttgggggatgttattgggttcatgaggcctttggatctgcaagggtttgggaagaagacatgtttgatgtaggcattcataattgcttcaactgcaactgaggaagaaatgcttcaatggtaagtagcgatgtgaaatctattacatagcttttacgaaggtattgatcttattatt

SEQ ID NO: 114647 - DNA, 249 bp, Glycine max
aaaacacgcgaaaaacttgccagcacagaacttgtccccaacacagcgcttaaaaagcttatccagaaattctgttccgaaaacggcgttatagtcgtgaatccgattgatcataatcaaacagtaacaaaacaagcgacgcaggcagccccgccgcagcacacgccatgcagtttttgtcatggtttctctccaggaggctcgtgttcggaaccgaggaacagaaaaccaaagcagcgtacgagattc

SEQ ID NO: 114648 - DNA, 251 bp, Glycine max
tttgaaataggactgtcattggttttacaaagtatgttggcttgcaattcactcaatctaaggattgatgaaattaatatggttgagttactacctcatctatgtggtgtggccaggtggcttgggggttgctgtcctaggcaacctgagtcagagcgaggaggatacatcatgcaattttggcaagattacctctgctacattggtagagtttgctaagaaaggttggatctgactggaaaagactgaat

SEQ ID NO: 114649 - DNA, 244 bp, Glycine max
acgatttattgctgctattgatgaatccacaaaacccccactccaaatggggttctttattcactatagtgctgatgatatattaaaacaagcaactgaatcaactcttcgatatcagagagggaacctatctccctgctagacggagttcctgttgctatcaaggatgagatagattgtttgccatatcccacaacaggaggtacgacatggctgcacaaagaaaggccttgtagcgatgatg

SEQ ID NO: 114650 - DNA, 240 bp, Glycine max
tgaagattcatcttctaagtctgatgccaaccctgatccagctaaaggtagacgttcaagacctgcaaggaaaagtgagatgcctcctgtaaagaatgaggatttgatacctggggcaactttactgggaaagtgagatctgtccagccatttggtgccttcgttgatattggtgctttcacagatgggcttgttcatatttcgatgttgagtgatagctatgttaaggatgttacaagt

SEQ ID NO: 114651 - DNA, 256 bp, Glycine max
gtctcaatatcgtgcagtttgtgctagtctcttcaatctcttattgctaacgacacctcttcctgttccacgctgcatcagcctcagagcacccgctagggtttcttctgcacacccaaccaaatggcggatcctgagttggaagcaatcagacagagaaggttgcaggagcttatggctagccatggtggcgtgggaaatcaacagaaccctgaacaggagaaagctcaggatgatgcaaagagggaggctgagg

SEQ ID NO: 114652 - DNA, 239 bp, Glycine max
tctcgagccgaatcggctcgaggttcacttccccttccagaattctgcgtttcacacatctcactttctttatcagtcagtttttggcttctaggttttcagtgatttgttctaaagtttagattgtgttattatcccactacagttcacactctgtaacaatacgtggggaaagcctagtgcttgtggaaattcaacaactgttggagttttcttcattgattgaactttgtgtcgtc

SEQ ID NO: 114653 - DNA, 238 bp, Glycine max
gaattgctgaagtgaggatctgtgcttcttgctgaagattaatcctcaacaatttgaccatcgatcagctacagacttttacccaaatggaaggacaaataagtgattcattaagtaacaacaatgtttgaagacaaaattaaccaacgagcttcaaaatgtccaacctccagaaatgtatgcattcgatatgcaatgcatttatagagtaccaccagtcattcgtgaaactaatccc

SEQ ID NO: 114654 - DNA, 341 bp, Glycine max
atcagggactggccctgaggagattcgcttcatgttgagtctcaacacattggatctatccaacaacaatttcatcggcaaggtcccaaccgggggtcagttcgcggtcttcagcgagaaatcctttgcagggaaccccaacctctgtacctcccactcttgcccgaattcctcgttgtaccctgacgacgccttgaagaagaggcgcggcccttggagtttgaaatccacgagggtgatagtcatcgtgattgcactgggcacagccgcgctgctggtggcggtgacggtgtacatgatgaggaggaggaagatgaaccttgcgaagacgtggaagctga

SEQ ID NO: 114655 - DNA, 334 bp, Glycine max
aggaaatacccaacgatgaatcataagccatgtttctgaaaacaggaagccccccttgtccaaattaacagctgctgatttagtcagtgtattcctttaatcgatgcggagaaccaaaagccagcaagttaaggttaatattgatacttaatttccttagagcagcttagtaaactgggaagcttttcattgattcccttcccattctggaatttgataaatttgaggcagtaaatggttcaagaggatctaatagtattccttttcaaaaaaaaaaaaaaaaattaaaaaaaaaaaaaagggggaaaaaaaaaaaaggggggccccccgtttt

SEQ ID NO: 114656 - DNA, 336 bp, Glycine max
  unsure (1)..(336): unsure at all n locations
tgagaaaagggaatctgctttagttgtagtttgatgagctgttagctaaatctcactgtctatgtcncctttatgctctgaagactgaaaggttcacttttcttgtctgaggggaagcatttttttccccttttactgagcattcttgatcttagggttttagaagaggaacaggtaaaaaaaaaaaaaccaagctggtgagactgactagaagattatattccatttaccttttcttttgtttttctcatttatctaaggctacaatgagggttttcttttactttaacttcctctcagtcctataaagctgccaagttatttgttccttgttta

SEQ ID NO: 114657 - DNA, 329 bp, Glycine max
tcttggggggtagatagagcgagatagtgaaaaacgacaacgtatacgaccccgttttagagagagaaagtgaactatatgaaaatttctactttttcttttttatgctgtttttggtgacttgggatgtttgaatagagttttaaaaacataaacttggaggcgattttgttggggtgtgcgtgtcaattttctcaggaaattttgtttgcgtctgttgtaagttacttactttctttctttcttttttctaatttttgtttgatgggtttctttggatgaacttcaaacggtgggcagcttctcagtgaagcaaaggtttgaaagag

SEQ ID NO: 114658 - DNA, 306 bp, Glycine max
gcgtctcaaagggagccccgagtggagggagatgatgatgaagaggatgtggatgatattgagcatgaattcaatattgatgagcacaagaacaagcatggccaggttgcagaagccatgcctcatgggaggatgagctatggaagaggtcctgaagatgatgacaattcccagttcccaacacctgtcattgctggtggtcgttctaagcctgcaagtggggaattcccaatatcatctaatgcctatggggctcagatgttcacctcttcactgcataaaagagtgcatccatatgcagtgtct

SEQ ID NO: 114659 - DNA, 200 bp, Glycine max
  unsure (1)..(200): unsure at all n locations
ctacacaacacaaggtganacaacagacatacacactacagtatanggtagaaatgggtgaactaatgaatatggtctgcacaataagccctagaacagctcagtggttgcacactgatgtcggatctcactgtgtcatgtccacctctcagcttcactctcatctctacaaggtcancctcttcacctgaggaggagat

SEQ ID NO: 114660 - DNA, 294 bp, Glycine max
agcttcaaaggcatgcagtgaaaatgaaagagttactgaatatattaaaaggcagttggaccaggaaactaggaatgatctaaataaatctctttttctaatgcgaatcaaaggtaggtagtaaataatgaactgtagcattcaaggtactgatcatactacagttcattatttactacctacctttgattcgcattagaaaacggtaggtagtaaataatgaactgtagtatgatcagtaccttgaatgctacatcttactagcgtggttattggtagggttcttcagttctg

SEQ ID NO: 114661 - DNA, 193 bp, Glycine max
gaaaatgtgaacctgataacatcactttcgcttgcatgatccagtcatacaacacccaaggcatgactgaggctggttcaaacttggaaaacatgatgatttcggccaaagtagcttgggcactaagttgattggatgctagcatagataagtgggattgaagacttaaccattctactcatggtgatcctga

SEQ ID NO: 114662 - DNA, 336 bp, Glycine max
  unsure (1)..(336): unsure at all n locations
gtcgagccgaatcggctcgagattagaggcgttgaaacagccaaagaagcttggacaagattgggcgcgttatatagcacacaattanaagcggatccagatattgagcaaggtgtggtggatgatagtctccatgaatataaaccgctgcacagatatgtggagagtggtgattggaaaaatgcaaaatcaatgatccataaagatgtccagggcatattttcccacttcgtcaacgggcaggaccgttctgcacgttgcagtgattgctgggtacgaaaacattgtgaggaatttcgtgaagatagggaaagagaaactagttaaaatgcaaga

SEQ ID NO: 114663 - DNA, 338 bp, Glycine max
agaattcagaaagttgttttccaacagatctgtttattaaatttggtaagttcaattgtaaaaaaaaatacacttaggcatttagcattctactgaattttcacttaatctattaaaatattgaggaagtcaaacttgttaattatcatattatgaaaatattgagatagaaaaatgtatttgagtattatgtgagcctgttttcagcttcgtgctctgtatattaggtttggcaatagtaggctaaagtgtggttaaaaattttcactaaaaactttgctttcatagtttaacgacttaaacattacagagagtgggtgattcttgttttatacaaa

SEQ ID NO: 114664 - DNA, 346 bp, Glycine max
acatctttctggttgttctgaatttaaatatcttccagagtttggggaaagcatggaacaattgtcattgcttattttagaggaaactcctataacaaaactaccctcatcacttggatgtctagttggccttgctcatttgaatttgaagaattgcaagaatcttgtttgccttccagatacctttcataaattgaaatccctcaaatttttggatgttcgtggctgctcaaaattatgtagcttgccagatggtttagaggaaatgaagtgcttggaggaaatttgtttaagtgcagatgatagtgtagagctaccttcatctagctttaatctggaaaacctc

SEQ ID NO: 114665 - DNA, 130 bp, Glycine max
ctctttaaaggcagagcttgcactaaaataagagaagctgtaatgggtttggcaatacagcttgcacaaacagcccaggcagactttggagattgtgaagaagcagttgagaaagatgctacaaagactg

SEQ ID NO: 114666 - DNA, 140 bp, Glycine max
ctcttcttctcttgcggctagggctctagcgcagcttcttctagctttaaggaagatgggtacggacaagggtcccatctagaatggtggtcatgggccatgtccgactctgggaaatccactaccactggtcacctgat

SEQ ID NO: 114667 - DNA, 254 bp, Glycine max
  unsure (1)..(254): unsure at all n locations
ataccagaaggtacctctagaacttcgtgatatgtcatcactgagtgatggtgggatgcgtagatccagacgatgtggttctgcgagacgangtggacatggtgatactggatatggtggtaggactaatgactctggatattgtgtaagaggtaatgatgcaggatatagtggcataagcagtgattctaattatcgagggactgagactgctgcttctagcagacgtggaggctgtgggattgaccatgact

SEQ ID NO: 114668 - DNA, 216 bp, Glycine max
  unsure (1)..(216): unsure at all n locations
gctgacgcgacttcttgagaactgtaagagtctcaaatatctggttgatgagtgtcctattacatactagttcacaaatgganaaggacnatcatcaaccagatatgtgagactcttacagttctggttgatgagtgtccttttgcatttgctgaatagtatgtaatatgttattcacttaaataaagcgcattactatctgcaatgcgtgtgttt

SEQ ID NO: 114669 - DNA, 340 bp, Glycine max
  unsure (1)..(340): unsure at all n locations
ggctcgagcggctcgagcggctcgagtgctctaaaaaataagccaggaagtcanaacagaagtagttcgagtaccgagacacgatagttgatgtcaaatgagaaaaacaatgcaaaagcattgcacaaatgtgattgcaaaatcactgaaatagacctgacatcaattgaggatgacagctctgagcaactcctgcctggggaagaaggaaatggttccagcaaagtcaatgccaagacaaatgagaaagagctgacgaagcaatctaataatgaacagcattctaatgttgtatctaagcaaccagaagcaattaagactgtagtgacagctcttaaag

SEQ ID NO: 114670 - DNA, 278 bp, Glycine max
caactacactaatattctctctctctctctgttgcaacgccatcaacaacgtcaccttgatggatgcggaatcggacaagcgctctgcttccaccttttctccttcttcatcttcttcttactcctcttcctcgtgcctccgtttggatcggctcgtcgactccgaggagattgaggcggcggagactctggcgcagttggcaaactgcaacactcactcctccgataaatggtgcaccaaacaagacacaacccgagtcagcgcgagtcgccgactc

SEQ ID NO: 114671 - DNA, 270 bp, Glycine max
cgctggtgctcacttcgatcccgttggcgctctcttcgattcagatattgactggtttgatatacaacactggctgatttgaaatggcttaacttgcaagcataatttatgcagatgcaacaaacgcagcagcaggccacggcgacaccattctcgacctgcactcctcctccttcctccggtggctccgcgtccgaggcaccgccaaagcaggtggctcaagcaatggacaagctcggacaggccgaacgaatcatcgccgacatccga

SEQ ID NO: 114672 - DNA, 267 bp, Glycine max
gggccacacacttcctccactagccaggatagcggacacacagagtggcaaagaaatgttgctcgatccagaaaaaaaagctgaatactatagaaggatgcgagatgatttgaagaaggctgacaacgaagacaagcttatagagcgtcagcgggcttagagaaaaaagaatcaagcagaagatgaaatggaaggctgggaatgcggaagaggacgaccaagatgatatatctgggtcagaagtagatgagactgttgatagatggc

SEQ ID NO: 114673 - DNA, 264 bp, Glycine max
cgagaagccaagggggggcgagatggctttgatctagacaaagtctgaaaaacgaaaccacaaaagaacagactccagggtagtgagaaaggaggacgccatgccgaagaacaagtgtccccgagaagcagttacagaatggacacgtggtagcggtgccacaatctgcttccacttttcaacaacacctgttcgctgtcatgttcttctgcttctcgtctttgttcactcttccagtgcaaacctaacaaacatgggaagtaa

SEQ ID NO: 114674 - DNA, 259 bp, Glycine max
gaaagaaataggagagatttccatcacagtaaaagcaaaacaaaggttgatttcccaatttataaaatatttactgtctgatctaatcaatcagaatacttgttacaataatgaaatcaataatatctattgactgattataatgaatattgatcgattctaacaacttaattgggaattttacttttgcattagcaccaagtcttgtttgtttccatttccaatatttttaaatatgagaagaaacgtggtttggttt

SEQ ID NO: 114675 - DNA, 264 bp, Glycine max
aaataattggttttaatatatatttttctttaaattaaaaaaataatattttctaatataaatttgctatgcgtgtgcgagagtgtgatataataaatatatacactttgattgatgtgaactacaatatcatatatcattaattaggtgacggtccttgggatataaagagaagggagagttagttaagatagttggactattaatgagttagtgggttagttggttagaggaatttataagattaaataggggaagaaggat

SEQ ID NO: 114676 - DNA, 270 bp, Glycine max
tttatgtaagggagacaaataaaacatggaataaaaagctcgcagtggccagtaatttgccaaaagcaaactggagaaagaatatagtcttcagctggacaaggatcattcatcttgaaagaagagtttgtgtgtacaatctttatagttctaaggagggtgcaagagagaactgaatttgctgtgatggcaactcgtagatatgcttttggaagagctgatgaggccactcatccagactccatgagggccactttggctgaatttgtt

SEQ ID NO: 114677 - DNA, 242 bp, Glycine max
gaggaggaatttgcgggaaagaaacgaaacccagacatgaatcgggtgaaacagaaggtaacaagccaaccccacgataattagccatgaaagctcttcacttgagcttctacttctacatcatcgtcttcatatgtccctattcctctcctttcaagtcagcactgtaaaaggggtcaacaacaccagcgccaatgaatctggcaatagaagaattctgcaccagccattgttcccggcga

SEQ ID NO: 114678 - DNA, 248 bp, Glycine max
gcagcagggagctctgccgcctccaacaaaacagagttcagaacacaaaccctcgaaccgaacgtttttgagggtcagtctctccttcttcattcacataatcttttactcttatagtccctttttcttaattttctgtggcaacaaggttgatagagcacgatggttcagtacaattttaagaagattaccgtggtgccaaatgggaaggatgtggtcgacattatcctctctcgcacccagcgtca

SEQ ID NO: 114679 - DNA, 243 bp, Glycine max
gtctaattatcttcggctaaactttgatagggttgtgaatattaaatatctagccgaaacttgttttaaggagaagctactgagagagctgttatatgaggttcgaagctttggctatgccatgaaaattttgaattgtacaatatgggtagcaacaggactattgtttggtttagaagggaccttagaattgaggacaatcctgcattaactgctgctgcaaaggagggttctgtactccct

SEQ ID NO: 114680 - DNA, 242 bp, Glycine max
ctcgagcgaattcggctcgagaattttgataaaccgcgatcacaggttgccgcaccttaaaaccggaaacaaaagcaatcgttacttgatttcaagaatttctcaatttctttctacttctttgtgtacgatttcttaagggaaagaaaatcactctctgtgctggccacagacttcgttaatcattttcttttccactcttagtacaattattgaacactctcctatttgatatatgactt

SEQ ID NO: 114681 - DNA, 239 bp, Glycine max
aatctaacggcatattctctctctctctatatgccgcagcgcatgctttgatcggccaagtcatctctctcgctcccattctccgtatttccaagatcccaacgcactgtcttatcctcccagattccgagtaatggtggtgaagatgatgaggtggcggccctggccgcctctcctctcgaagaagttccaagtgaggctgcacgtgcggaggctccagggctgcgatctgctgcaga

SEQ ID NO: 114682 - DNA, 243 bp, Glycine max
gcagggctacatcacgccgacgatccgcattctgtcgcagaatcgcggtggcggtggttccagaaggtttcgaggaaggagcgtgttgttgttgagagaattgaattcgaattcgccgaattgaacaagggtttgtcaatcgatgaaattgaggttgtgggaacaaccaacgaaggggggatttgttgcgtgaaattggtgacgtggcatcgaaggttttggagccgtgtttatgtgatgaag

SEQ ID NO: 114683 - DNA, 241 bp, Glycine max
cgtaattgaacagataagtaaggaacaagtggtgaagatgaaggttgccaagcctgctactgcaaggacttattcaagtgtttttgactactgtgctgggagatgttgtcatagttctgagagcgtggtccatgaaaatgcttatattagtgacttccaccactgcttttctctgccttcaagtcttctgggaaaaatagtactctcacagaagcacgactgagtggcatcaatgttgttg

SEQ ID NO: 114684 - DNA, 241 bp, Glycine max
agaagaaccttgactcatttgcatgccaagcaatgtttggaattcttcagttgcaagcagagatgcttgaagttgtggactctatgatccaaaaactacaaagttggagccagaactcaaatgggaagttcattgcagtggacttgagaactgagatggtgggaagggagtgtcacaaaaaagattctcaggaagaaaactttgttaccagccacatgagataggtgaattcctcaagaag

SEQ ID NO: 114685 - DNA, 259 bp, Glycine max
ctcttccccttcacttcataccaatgttccttttcacttccccacactcccccttttaccgttttacctgcgttaaaccctcttagaatctcaccccacttttcactacatcttataacacaccttcccctgttttcctctgttttgcttcttctagagtaccctcttcctacatttttttcccctcacttttcttccgtacccatttcccataattgtattttatcctcgaacatatcaatagttcctcgatcagact

SEQ ID NO: 114686 - DNA, 256 bp, Glycine max
atttctctcttcactcatcagatcgctgtctctctctctcttacacacacaaggttctggttttattggggcatatgattgaagattttgatctgttgcttttaccctttcagtggtaaaagttatgaaatacagattgaattcttaactctgataattggttactggggattcgaactatggggtctcaaggtggtggtgataataatggaaaacattcccaactccagcctttggtgcggcaaaattcaatgta

SEQ ID NO: 114687 - DNA, 240 bp, Glycine max
aacagaagagaatcctcgctctcttcgccatcttccttacctttttttctcatttcctcagtctaacgtgtccatcattatcaaaccacactcactcgctcgctcgcacactctttcatttttgaattatgtatcattttcaaatacgtttttaatgttatgcggtaattggcgggaaccaagtgtcaattcagataccctttgtgtcgaattggccaattacgaaagattcgcgttgaa

SEQ ID NO: 114688 - DNA, 103 bp, Glycine max
caagatttttgttttggcacagagtgatgtctttcccaggttattcctttggcacctggaagctaaggggaggttttacttgaactggattataggttcttat

SEQ ID NO: 114689 - DNA, 264 bp, Glycine max
actcgagccgctcgagccgagttattgtgatcaagcagacaaccaaccagaggctgggacgagtgtcacttgtgtaattcacctaactccttcatctgttgtgagttgttcaaattaccaaaaatggatgaagaaatttggttctgctcaacatatcatggctggacatgaaaagaagaatgtagagattcctattttgaaagctagtgcaagaattgcaacacggcttaattacttgtgtcctcagttctttccagctccagg

SEQ ID NO: 114690 - DNA, 262 bp, Glycine max
atcgtttaatgcctgtgttggagcccattatatctttctttggtgactcccaagctagagcaactgaggaggatcatgaggactcataatgaatgttggtgctccttggcagcatagtgttaaagcaaattggacctttaggcacaagattgttgatttagagaaagattgtttgagattacattaatttaactttattttgcaaaaaaattggacctttaggattttatcatttgttctgttgtgactttctaattttata

SEQ ID NO: 114691 - DNA, 265 bp, Glycine max
aatgaataacatggtccatacttttgttgttggtgatgatcagtcaacaccatatttggacaagctacattcttggctaaaacgggtaggtgcaaatgtcaaggcacatatttctgacaatgaactttgcattgaggaagaggagaaggaaaatattagtagtgtacatagtgaaaaacttgcatttgcatttggtttaatagattctcatcacacacctcaaattttacgtatagtaaagaatttgagaatgtgtagagattgc

SEQ ID NO: 114692 - DNA, 258 bp, Glycine max
ctaatccgttcattttttttttgtttaattattttgtggggatttgctagaatctgttttcagtcttttatgaaatttaaagctgggggagctcaaaactttaattatattaactttttgatctaattcagaagtaattacttggtgtatacatagttttttttttggtttaccttaattagcgatttagctatttcgcaatagaagtctcatttcctttgtttttgaagataaactgatttgggaaggggagaagtt

SEQ ID NO: 114693 - DNA, 264 bp, Glycine max
gtttttccacggtatacctcagccttttcaacttcatcacaactattggtgtctgcatcacaatattcctcatcagaacaaaactggacacaatcttcatcgacagaataaaactgcatgaattgagtgaaataacctagagttaatgccaaacacttcttcaacattgaatctttggagaatgctgggtacgtcatcaaagccaacctcatgttgtgtggcatccatcactttttggaagaccccaaggtggtggtgcctgaa

SEQ ID NO: 114694 - DNA, 251 bp, Glycine max
  unsure (1)..(251): unsure at all n locations
ctcgaccgctcgagccgctcgaccggctcgagcggcaaccgtcgacgacgacacgccgttccncgcttcacattctcccaaagcgctcggacaccgcccgtgatggataaagtcttcaacaagctccgcaatttggacgcttacccaaaagtcaatgaagatttttacaaccgcacgctcgccggcggcgttgtcaccgtcgtttccgccgccgtcatgctctttctcttcttttccgagctaagtttata

SEQ ID NO: 114695 - DNA, 273 bp, Glycine max
attccttgagaagtgtcatgctttgaatgggattaaaagaatatggtgtgaatggttaggcaaagaaagtaatggtgaacgagatggtgttgaggttctagagcatgattttgcagttgtgatttttgcttataattatgatctgggtcggtctggtttgcttgatgatgtcaagacattgctccctgtttctgctggccaaaagggaaagacttcattgtctgactctgatgatgttagcgattttttatgcaatcagtatgattcatctgc

SEQ ID NO: 114696 - DNA, 205 bp, Glycine max
tgctagacacagtagcaacaagttgccactaacccaataacagtgtgtctagcgaattgaagtctataccaatagaatatcgtgggaaatttttccttgagtttctgaaggaagaacactgatttcgtgggtttttttttatgtccattagattttgtttgtcaaatgtgtcataaactttcctaaatatattttgcatgttttc

SEQ ID NO: 114697 - DNA, 249 bp, Glycine max
ggctcgagcagtgccttttccaatttcaatgaccaagcaaaaagaagactagaatcagaattgatgcaacggaagcttgtgccttccaccaataaagggcatttaaattttgattgtgacaaatattcaagttatcccaccatccatgggggtgtcacagaacaagtttttgagggaaaccccagcaaagctcaacttatggaagcattgtgtcatttccaaacacgtgcgaggaaagcaggggaggca

SEQ ID NO: 114698 - DNA, 264 bp, Glycine max
gagaaggagtaaaatattttccagtgttctttttttttttgaatttttcttctgccaacaggggagtcaaatctgctagatgccggtttacatcatgggagattatgtcactgtctcgaccactcaagaacacattgcaatccccattgagaaattgaatgcattatcacttgaagttgcaaaggaagaaaaacatgtaaccgatgatgcatatgtggacaatgtccaaaaacctgaagagaaagatgaagaaactcaagaaaa

SEQ ID NO: 114699 - DNA, 260 bp, Glycine max
ctcgagccgcttttttgttttgtttttttttctggatttgttttcttttcttgtttgaagttccttccttttagatctaagaccagcacagattcctgaaatcccagttagtttgactcaccctcgaccctagaactagttgcgtcagaagggtatcactcaaagctcaactttgccatagttctacctttttaatgccccacttgtttggaaagttggaacaatcatgccgcttcattctgcttcgctgtcatttggct

SEQ ID NO: 114700 - DNA, 139 bp, Glycine max
caagctgagaattttgacctgcaaggccaacttgatctggtgtaggcgatcaagttggccttgcaggtcaaaattctcagctctgttcatcagggttcgctgaactatattggtttgcaggtgcaaccacaacatctgg

SEQ ID NO: 114701 - DNA, 261 bp, Glycine max
  unsure (1)..(261): unsure at all n locations
aaacatgacagnaactttctcttctgcttctcctacttcgtgcatttgatctcctcagtctccttcttctcctctgagtctcgttctttcgttttcgtttcttctcgcgggtttttgtgaagccaaagcgtgcaagatactcagaatccgagagaccgattttgtattatttgctgtgaattgcttcgtggggagtgtggaaataaaaggaggaaaaaaaattcattaatattcatattcattcgaattaattgcattaat

SEQ ID NO: 114702 - DNA, 282 bp, Glycine max
caatgggcctctcagcaacccggtttcacccacacgcccttcatcttccactcactcctcaagacactctcacacaccaaccacttcactgccattcactcactcctcaaacaggccaaggccctgaactttcccatcctcccttccttgttgagctccattatagcgtcccacattgctcgcaactctgcccgcgaagctttttgctcttcagtggtgttggctctctctgtagtgaaattggaggggctacatgtaacttcctcctggctgcccttgcct

SEQ ID NO: 114703 - DNA, 198 bp, Glycine max
cgaagatgcccaagattcttctttctccaacagcaggcggtgaatcggaatcccctcggtgtcatgcatcgccggttttacttgaggaactgatctcgaatatcctccacagggttccggtgagatcccttctgcaattcaagtgtgtctgcaagtcatggaattccctcatctccgatcccctatccgcgaaggacc

SEQ ID NO: 114704 - DNA, 280 bp, Glycine max
gaacaagagaacgtacgacaaggttttgttctttattttatcgtcaagaaggttgaagaaaagcgagggtaagaggagaaagatagtctctctccatacatattgatttcaaatgttatcaataaataaaaatggatgacagaaaaagagtaggttgcagagaagagaaaattgtatgtatagggatgaatccgagagcttatgttattatggctgcaaaggcagtggcagtagcagttccactttctgccgcagcggctgctggttatttttattgtta

SEQ ID NO: 114705 - DNA, 263 bp, Glycine max
gttatatttgattcttactcgcagtttgaggagagcatgcttggttacaagatggaggagatggggttgagtgatgaagagggtgatgaggaggagggtgaagagagtggcgttgaggaaggggatgaagaggatattcgtttcaaaggaagattggtggaggaggattttgagaggaagattttacatgggttttggttgaatgacaagaaagacatagacttgaggttggctcggtttgattaccttatggaaaggaggcc

SEQ ID NO: 114706 - DNA, 282 bp, Glycine max
cggctcgaggcatgaagaaattcagaatgaaaaacatgaggaagaagaagatgaacatattgaagaggatgaagaaactaagcatgatcatgaagaacaacaagatggaaacaagaatgaaactgaagaacgtgaagagaacaagcatgaggcagactacaaaggggagaagaaaataagcatggagcagaagaccaggaggaagatgtggaagatgtaggaagaggaggaggagacgatgatatcgatgaaaatgatcaagagaaatcagagatggatact

SEQ ID NO: 114707 - DNA, 118 bp, Glycine max
cagagtgccgacggtgaaatcgagatatacatccggaagtgttgttgggaaagtacaagatagatatgattgaggagatacaccccataagtggtttcttcagctccaattcaatctg

SEQ ID NO: 114708 - DNA, 274 bp, Glycine max
ggagaggaaggtttttggttcacggggtcagggccttaaggatgaaataatgggtcagaatccccttccatcatctacaagtaatgggaagagttctaatcctatcaagatagtgaagagggatgcccactctgtgagattaaatcggctgttgggtgtttgcccgaaaaattgctaacatcattgcattctgttcatgatgaacatcttaatgaggaatttgccttaaacaagtgcaatgctgttgtacaccaagtgggtaaacttgtagaag

SEQ ID NO: 114709 - DNA, 287 bp, Glycine max
  unsure (1)..(287): unsure at all n locations
ctcgagccgctcgagcggctcgagcggnctcgagagattaagttatcagtcaatacgtcaagccatcactttagtcggttctaaattgatcaagctttagtcgctnggtcataatatgcaccatgtactgatggtattgnacaagactagtgcaacttgtgcaatgttagaaagttgagcagatgtgtgattttagtcaagagaaactttagagcagatgtctaatgttttgtgggtagctcctgaggacaaggcgagtttatggtcacaacttcattatgtttcgt

SEQ ID NO: 114710 - DNA, 254 bp, Glycine max
ttgcatttgacatgatatgcaatcatcatctgtcgcctgtccaagttgtccaaagagctaccattcgaaccatccttgtaaaagtcagcagcattacccaatatagctactttaatatgtctgtctattggacttatatgagcattttccagtctcaactctgtatgggcaagaccgtggctgtgcaggtaattaaccccaataagttctcgcattaccattttagccatcataaagcccacgcatctcatgtc

SEQ ID NO: 114711 - DNA, 257 bp, Glycine max
ggtcaatttcatcctctctctacaccgtgaagagaagcataatccctctctatccctacaccacaaacattaactttcaatgccttttcacttcatcaatctccatctccctcaacaacaaccacaaccacaacatcatgttaacccgtaaccctaatcaaataccagaaataccatccgtgccaaaaaccgaacctcctcctccggttccaaaagagcaacctgtgcttccaaccccggaaatagacccttttatg

SEQ ID NO: 114712 - DNA, 165 bp, Glycine max
aaaccatgctcattcccgccacctaactactccctctcccccttaatcagaaacataaaccccaatttccgaattctcgcggtggccttagagcaccaacatcaacaagacttccccagcgggaacagtcctcagcgactcctcaaggaactcgccgaacgcaag

SEQ ID NO: 114713 - DNA, 199 bp, Glycine max
aggcaaaagggcgatttgtttgctcggggatggtgaagagatgacatggattcggggagccagtgtgtgaagaggcttagcaacaagctaagagtcgagcttgagaaaagtgttactacattggtgggcattgaatgtcccaaggatgaaaaacttcgtcgtgggcaaagtttttgataaacctaagacgcactgcttc

SEQ ID NO: 114714 - DNA, 216 bp, Glycine max
ctcttccctcttccaatgctatctactccttcctcaacaaagagcattccctctgttactacgtgtcgagccacagtctattcgttccaggctcgttcttctctattcaccaccactcacacttgcacagcacctgccaaattatgatgagcttcagcaacgagcagaccaccttgtgcaactctctcaggatacttcactgccggtagattcatt

SEQ ID NO: 114715 - DNA, 248 bp, Glycine max
aaccattgtacatgtgtgtggcagtggtatgagaacactttgaaatacctcagccatgtcgttaaggatgctgaatcttttgcaaacgatctaaggagaagtatttatgatcccaggatgaagaatttactcgtgcttgggaggctatgctggagaagtataacctccagcaaaatgaatggctgagatggatttatagagaaagagaaatgggctgttgtctttggtcagaatacattttttgtgga

SEQ ID NO: 114716 - DNA, 261 bp, Glycine max
tgcacatggtaatctagtgtgtttgagtgctttcatgtgcaggttggatgaagtaattcagattccttcgcatcaagctcagattcaatgccagaatacatagggaagcacagagctctacagatagagagaaggaatctgaatttcttcatccaacctgcacatggtaatctagtgtgtttgagtgctttcatgtttggctttaataaaataaaagcagttgttttgtaaaatgttcagaatcaataaaagcatttactg

SEQ ID NO: 114717 - DNA, 268 bp, Glycine max
caaatattggaagtaaaagcagttatacaatgtcttcttggtccttgacaaattgcttggagcaaagaatcgtgccacacagtacagaatctatttttcaaagtgatggtcctttgaaggaaaatagaggacttctgtctcagggtagttcacccactgctggaattgatcactttagtgaattgagtcaggttaggcctcaaaatggctgaacatccatatctcctaaaaatgtgagctctcctctgtccttgtcacctcttggtcg

SEQ ID NO: 114718 - DNA, 265 bp, Glycine max
attttgtgttatgtattgtcttttaataaaaatagagtattggtataatgagctatgatttggagccatactagatcaggatttgtggtttgtttcatctgattgggaagtagtggttgtcttgtttcaaacttgatgggagacatgtatgtactaaatgataaaatgtaggggagttgtcagtagtttttcaatgacttccatttaaacaacatgaaattaaaattataaggaattaagcttctgtggctatgtactaagtttg

SEQ ID NO: 114719 - DNA, 259 bp, Glycine max
ccggaaacaaaagcaatcgttacttgatttcaagaatttctcaatttctttctacttctttgtgtacgatttcttaagggaaagaaaatcactctctgtgctggccacagacttcgtgaatcattttcttttccacacatcatataacataagaacactctcctatttgatataggacttcgtgtcagatttaaacttcttctgtttctttctcagttctctgttcaatttcaagttcaagtgggtgaaatcttggatt

SEQ ID NO: 114720 - DNA, 259 bp, Glycine max
ataaaccgcgatcacaggttgccgcaccttaaaaccggaaacaaaagcaatcgttacttgatttcaagaatctctcaatttcttcctacttctttgtgtacgatttcttaagggaaagaaaatcactctctgtgctggccacagacttcgtgaatcattttcttttccactcttagtttattccatgaacactctcctatttgatataggacttcgtgtcagatttaaacttcttctgtatctttctcagttctctgct

SEQ ID NO: 114721 - DNA, 245 bp, Glycine max
gtagttcagtgtcagtctctcttcatttaagacatccaatgagaatggaggcgttactgtttgcgcttgtggcgattctgtcgagaggttgtgatgctgctacagagtgcacaaacattcctacactatctcatacattcaggtatgagctattgaagtccactagtgctacgtggaaagcagaggcgatggatcactatcatttgacgccatcggctgacacggcctgggcggcattgctgccg

SEQ ID NO: 114722 - DNA, 241 bp, Glycine max
  unsure (1)..(241): unsure at all n locations
atggtggaaattgactttcccccagtgcacttcccgaagtgttaaggagaatggcctcgtttgctatagggtnngangaggctgggtggcaagagaatggctgattctcatggaatatggccaaatggctggttgctttcaatgtgggagatatttgtgttgggagatctcgtcttgggaagtttctgaggatgacttctgccctacattaagatgtacagtctctttcttcatagcattt

SEQ ID NO: 114723 - DNA, 243 bp, Glycine max
aagcgatggagtcttggtccattcgaatccgaagatacgaaacgcttccaacaacggctaaagacttcgagtctcgttggaaggccttctcccactgaatccatccaacggtggcctcgactacttgcaggcacgtgtggactcttgcacggtggaggctatgctatcttggaagccaccaatttatttattttggtttctctatgctttttttatatgatatgtaattaatctttgtttttc

SEQ ID NO: 114724 - DNA, 228 bp, Glycine max
ggctcgaggtttaagatctctctctaaaatatcaaatatgtcaatcgcattttcccgatagataccaatgctaggcagctaaaatagcaacatttccaaggcacaagcaaatcttgctattttagctgccctgcagtggtttctatcgggaaaatggattgacatatttgatgtttaagatctctctctaaaataactttctttttcatatattaattgactgccgat

SEQ ID NO: 114725 - DNA, 242 bp, Glycine max
cggagatctctttcatggcttttactctcgagacttctgactcttctgttacggtcacctcctccacaaccaatcctctttctcaagacatctctaatgcctattatgttcaccctaacgagaatccctctgcgaaactcattactgctcttcttgatggttaggctcaagcgatgacgttggtattgaagatgaagaacaaaattggcttcgtggactgcacgatttcaaaacctcatgag

SEQ ID NO: 114726 - DNA, 242 bp, Glycine max
caacactcttcccttctcctcttcaatcctttctcgccagaagctcactcgccggagcctatcccgctccgtcctccgtcctaccgccggcgaactttccggcagcgtcgacgacgatgaagaatcgggcgaattggacgacctcgatctcgtcgccctcgagcaagaagccaaggatgccgtcgaagcgtattcaagctctctgtctcaaattttgagcattgaagacgaggagaaaagtg

SEQ ID NO: 114727 - DNA, 241 bp, Glycine max
ctcgagccgctttctcaggttctggtttttgattttcaaccaaaagatcctgaagatatatatgtggcactagcggctctatatggtagagcagtgccaggtgagattaattaccgagattactagtctcacgtttacagaaagttaacttcttctgaatgctattgaatattaattaccgagattgtgcatgcatgatcaagtgtaaacagctattatttgcaaaatcttgaagatcatg

SEQ ID NO: 114728 - DNA, 264 bp, Glycine max
cattctcttgggaatttctcaagattttgaaattgctggtaatactcttatgccagctttttctgttccacaggctactgccagatcttctgaaaatgcggaatcctctgcatgatctggaatttgtgttttctttcatttgtccgtttgttaattcaataaaggaaattaggcatgaccctcttgttgagtaatgctctgcctatttgaaaatttcaacacctctttaaatggtcgtaatgatgtgtgaagtgggtgtaattt

SEQ ID NO: 114729 - DNA, 215 bp, Glycine max
ggaggagtttgcattgacatgtcattaatgaaaagagtgacagaattacatgttaatgacatggatgttgttgtagagcctggcataggccataaggttccaaataccttaattattaacacttccttagttcaatatggggtagcccttcatctctctctttcttccctttgcttgctactcttgtcgagtgcatgctttgctattagctccag

SEQ ID NO: 114730 - DNA, 266 bp, Glycine max
  unsure (1)..(266): unsure at all n locations
gcagctttagtgagtatgtatgaaacattaagggtgctttgctagcattatacaggtttcttctgggtgcaggcatcaagaagaaacctgtataatgctagcaaagcagctttagtgagtatgtatgaaacattaagggtggaagttgggccgatgtaggcataacaatcgtgacacccggttagcagaaggcaaggtgngtctggacctagatttgcgagatgttagtgagtgggtgcgccaaagcgatagttaatggcacgttg

SEQ ID NO: 114731 - DNA, 258 bp, Glycine max
tggtggtgaagataatgtaagtgaagagggtgatacaggtgaggaagaagtcgaagatgttcacgatgaacttgagggtgaagaggagcatgagcatgagcatgagcatccagactttgctgatgttgaggaagaggaacaccgagaagtttgaaagagaggcgaaacggaaagaattgaagtttttgttgggggctggacaagatgctatgagatgatctgagaagttttggtgaagtggggtgttacagagtcagt

SEQ ID NO: 114732 - DNA, 205 bp, Glycine max
tgggtttgccacggtttgggcgtcctaagaatgacggtgaattgagttcgaaccttttcgtggccaattgtgggtccgcagtggggctctctgacgatgacattgcatctgtgttctgcaaatttggagagctgaagggagtttatgcagagatgagagtgggacacgtgtcattgtagcttatgatgaagagggttctgcacaa

SEQ ID NO: 114733 - DNA, 278 bp, Glycine max
ttaactaacaaccttgatatccccaagttatccgcatgttgaaaaaaagtttatatattaatcatatttcttccgtatttcaaaaaaaaaaaaaaaagaaaaaaaaaaaaaaaaaggggggcccccccgaaaatggttttcctcccccgggatttttttcgggggcggtcacttgggggggatacctttcccccacagggtcctgtttaggaccccggggaaaacagggataaaggtcttccccgagtaaaattcattccccctaaaaaagccctcaa

SEQ ID NO: 114734 - DNA, 306 bp, Glycine max
tgtttcattgcctcaattctcatttttcagttgagttcagataccataaccataccataccataccagaaaattaaactgaagtgagagagagatgacagtactgtctccttctcttactcggcctaagttgcaatcttcctttctttgttgccctctcacatattctaagcctacaaatagaaatattcaaccaaaacccacttcttatccacgcattagagctttggaccttgatcaaaacacggctaagcgagaaaacacacagccctgtttcccatgcaatggatctggcgctcagaaatgc

SEQ ID NO: 114735 - DNA, 141 bp, Glycine max
atttagacagcggatcgaagagggtgttgatgaaattctccaccgctccgtaccactggttcgtcgcaacacgtgacgataatggcttcgaagaattctcaacgagacacgcgcttagcggtaatcgactctgcaatccga

SEQ ID NO: 114736 - DNA, 152 bp, Glycine max
gaggagaaggggaaatgagataaagggcagaaacacaatagaagttcattcaagtttgaaataccaattcggacttttgaggatctgtggaatctcacaactgtcaccagtcgccagtgtctatgcattcggatcattcccgagatctgatc

SEQ ID NO: 114737 - DNA, 277 bp, Glycine max
cgtaatattaataatcgtaacaaacaagagagagaacagaactactactgtttctttttttgcctttgtttctctgcccctttgtgcagcgtctcacacaccaatggaagaaccaagtggttgcaacaagagcgctccaaaaggaaaaaaggatgacctttaccatgtacttcacaaggtcccttatggagatagcccttatgtcagagctaagcatgcccagaaatgtggaaaaatagatgagcaaatagacatgctgaagcgaaagttgaagttg

SEQ ID NO: 114738 - DNA, 277 bp, Glycine max
caattaacaaacgaagtgatgagaagaagggagagaatggaggaaaaggcaaaagctgaggagaagaagataggtatgagcgagacttggttgaggaagcaccgtcttatctacgacggagccactagacaccctcttattattagcatttgcgatggcaccatcattattgcttcctttaaaacatggctcgttagtaaatttaacttcctttacatatttagtacaattttgggtagccatgtcaagatgtaacaaaatgtttgcgatcagactt

SEQ ID NO: 114739 - DNA, 183 bp, Glycine max
tccaaccccaagaaggaacaagaagtagtagttgctacttgatatggctccaaagaggaagcgccagatggcagtcacagatcagaataaaggaaaagcttttaagagtcatccaacaattcaacttgctaagcatctagcagagataacttctcaaattcctccttgtgtttcatcacatgc

SEQ ID NO: 114740 - DNA, 268 bp, Glycine max
attcactgaatcactgttctctctctagttaattaaaaatggtcacttatgtcgtcaccaccaccttgttcctcttccttgccatggccatcaccaccctttgcctccaagaaattgaggtgctccaaatggcccaaaaccatgtttctcaagccaagaatttgattggaaactctttgagattgcatggcttgggaagcctaagtctttctgatcaaacaagtgctacaatagcccttagtgattgtgccaaactctatgaggagag

SEQ ID NO: 114741 - DNA, 267 bp, Glycine max
gaaaagctgaagaaattgaactggagactgttgttacttccagaggagatgaggatcagaagcatgccataaaaggatttagttttgaagatgaccgcctcatgaattgtaattggttgcaagagcctaatgcagatgaccttttgatgtgctttcgaatattagcagtttgccacactgcgattcctgagctgaatgaggagactggcgtttatacatatgaagctgagtcacctgatgaaggggcttttcttgtagcagcaagag

SEQ ID NO: 114742 - DNA, 235 bp, Glycine max
gtacaactgaagtgatctcaacctggttttgtgtccacttctgttacttaatccacatgcttgccctaattcaacccaagtcaataccctgtcccaaatcttacatagatttctgctaaattttctattgccagatccatcaacttcgacacaccctccaattttcttcttcgaattcaatggcgtggtcgcataaaggcaagttttttatcttctctttactcttctttttctc

SEQ ID NO: 114743 - DNA, 216 bp, Glycine max
ccaaatgcggatttcttcctctttcaagattcatatctgaagtaaatgctatcaaaaggagaataacccgatttgaaatgcaccaaactctgaaattgcttcaaggagagatatcgcaactaagtgagtacaatccacttgatctgttctctggatccaaggaaagaattctgaaagctattaaaggtctccttacaactcctcaaaacaattttc

SEQ ID NO: 114744 - DNA, 151 bp, Glycine max
  unsure (1)..(151): unsure at all n locations
gtttcacctttccacacatcatacgactttacccacttgccttgcagatctttttccagggaaaagtttgcatttctntgtcatctagagttagatgtctgagtgatcagacggaacatgttgaggtgangagctgcgagttatataggat

SEQ ID NO: 114745 - DNA, 273 bp, Glycine max
attgattacagcatcccaaatcaaagtcatactcagagttacctctctctcatttctgcaactgtcaggtcatgtggtcggagccacaacaaaaccgtcatcaacattatttagattttaaataaataaaaattcagatgagagagagagagagagaaataatatgcatggatagattaattagtggcgaaagtggagtatttatatctaattactattcaattatcttaatagccgcgcgcgagaaaagcaacagcgttatggcaagaagaa

SEQ ID NO: 114746 - DNA, 231 bp, Glycine max
ctcgagccgctcgagccgcagtgcagcagcagcaacagcagcatcctccacagccacagcatctggatcacatcaatagcatgtttaatctcggggccgcctgtgcttggggacaatgatcgctgtcaaaatttgtatcagacttggttagcggtcgctcacgcgtgaagctgcaaaaccacgctgtgaagtgtaatgatagatcgtagtactgaaacttgggacttgggg

SEQ ID NO: 114747 - DNA, 270 bp, Glycine max
gccgttgaaaaactcttccgaaacgaaacatgtgagacctgtgacatttaccatgagccaatcccttgacgagtctcacacatcagacagaaacgatgatattgagagatatgctgaacctacacctactgcagccagtaactctttacaaccaacttcaggagaacaagaagcaaggcaatgatcttagagaactataggggttgttctgctcaaaaagagaagaatgtagaatttctgcttctatagaggaatgcttctattatagat

SEQ ID NO: 114748 - DNA, 266 bp, Glycine max
ggggtttctcctctctttctctgcagtttgatggatcgggaaggaggatccaacgccggatcttgctactactccgttctcgggattcgtagggatgcctccttctctgatattcgcactgcctaccgcaaactcgctatggtaaactataactaaacaaccatacatcaccgtttcattcttttcctattcttgattagttcctgaaattttttaaaattatgtttgttttgcgcccggctgagaagaggtggcacccggacaat

SEQ ID NO: 114749 - DNA, 259 bp, Glycine max
gccgtgtgctagcttttgtggcgtctttgtttgtgagcttgaacatacagtgtgtttaagtgttgacactccgaaaaacacccgaagcaaaaaaactcttatttttcagttcctcacatcccaagcctttataaataagttttaggcttgttttggggtacacaaggaacgtgtttcgcttgatcatttactagcatttcggggtgaacattttgttttcagcaaaaaagaaaaggagagaaatcaagaagaacatatg

SEQ ID NO: 114750 - DNA, 256 bp, Glycine max
actcgagccgattcggctcgagaattctttctctctgtttcagaactcagattctcccttccgtttttgttcaggttgttacaagaattagcacctttatcgacacacatgtctctccaacaaccaaatcaagtggtgccattgcaagaaccagaagccacattttctcaactaagcaaacaaaactcaatactctcactcacccttgatgagttctattgcaagaatggaaagagcttaggatccatgaacatgg

SEQ ID NO: 114751 - DNA, 123 bp, Glycine max
tcctagtccaccgtattacagagttcaagatatactatgatgagagcgcggttcccatgactgttgctgcgagttgatcacctggcatccacgtctgtctcatctggcattgcgtattgggaa

SEQ ID NO: 114752 - DNA, 257 bp, Glycine max
aagtgcgtaaatatttaacgacactggctggggtggggaattgaagcgagtcagcgactaagttgacgttgacttgacgttgacgttgacgtttgagccagtcgagttgtgccctaattcagaaagaattgaattccgggaaggaagttctgaatttctcattgaaggaacgcaaaatcataaaatcaaatacagtaccaaaaaagaataaatttttggtttggtggaaagagaaagaaaagaagggatcatcatga

SEQ ID NO: 114753 - DNA, 252 bp, Glycine max
ggagcatgatatggccattgaaaaaattgaaaagttagagggaaagttgcaggatcagacaaatgaaaatcttcggctgaaagaaattcaaggaaagagatactggagctccaaagatcaaagcaaagcgacagagtccaaaccatcaatgacagcaactacaacatttctcatcctatactctcactgaactccaactacaacgggagtggaatctctcttcaggatcttataatgtgcaaagatatttgg

SEQ ID NO: 114754 - DNA, 248 bp, Glycine max
ctccagactcagccagtgccacgtggaagttaaagcagattatctggaagatatggttattatatggtggggttaaaattgcagccatggttccagttttgtcgtgttcctttatattacaggaattgttgataaatgtggttgatgcagccacaattgtagtcgtggacaacaaaaccttgacattgcagtcatggttgtggactgttctctaaaaccttgttgtatgtggaattgaaagaatagac

SEQ ID NO: 114755 - DNA, 249 bp, Glycine max
ggagatggcactggtgggcagtctatttgggggagagaatttgaggatgaatttcataaaaggtaatgaagtttttttacaaacgttctatgttattaattattatatgcaaaaaatatcacatatcagactcctggctaatgattatttgggggatatgccgatggcttgtggaaacttcctggtctgattttgcctcagatggaatttagagcaaatgcttttttctctcttgcagtttgaggcatg

SEQ ID NO: 114756 - DNA, 134 bp, Glycine max
  unsure (1)..(134): unsure at all n locations
ggtatctagcttatcacattgtcttgaaaacctacaaggaagnacctctggatgtactcggcattaatacgaatagcaaagaacaaccagaggaacttcctcgcaggttcgcaagacatgtgataaacagatac

SEQ ID NO: 114757 - DNA, 164 bp, Glycine max
atttaatctagatcttatcttatctagatttgaatttctcatctagatattatttaatctagatcttatcttatcttatctagatttgaatttaatttgtttatgggcctggatttaaaacagctttgtaagctttgggactgaaaaactatataacagcacca

SEQ ID NO: 114758 - DNA, 272 bp, Glycine max
agcacttctccttttttttttctctgttgaaattgaaagtgttttccgggaaataaataaaataaattaaaatcttacacactctagccccgctgtcccttttaaactcccgagagagtataaaactgcatcgaatattacaagatgcactcttgtcaaatgaagggggggaaatgatactacaagccactaggcatgggtctagcaaaggaaacactaatgggaggtggaggccgtgtggccaaagttgaaattcagcagaagaagcctct

SEQ ID NO: 114759 - DNA, 272 bp, Glycine max
  unsure (1)..(272): unsure at all n locations
ggangacaagcgctattatcaggaatcttcgcaatcttctgagccttttcttgtatcgtcaaaattcttgccacaccaacattgtttcttgatgagatcaagacagttcttgatgacgagtatatggtctcctcttctccttttggctggtaacttgtgacgtggatgaagtatgctgatttggatcacatggtttatattactcttttccttgagcactattggctttcaaaatgtaattgtattctacggctcacgggatcatggaaatg

SEQ ID NO: 114760 - DNA, 256 bp, Glycine max
cttggttatgccttcagctgttgtgggaacagtacgttcattggagcgtgactctaatgcttgtactgttgcaagagctggagataatgtagctgtaatgttgcaaggtgtcgatggaaatcatgtgatggcaggagatgtattatgccatcctgactttcctgttgcagttgctaagcatttggagttgaaagtgctagtgttggatggtgcaagtcccatattggtgggcacacagttagagtttcacatacac

SEQ ID NO: 114761 - DNA, 185 bp, Glycine max
ttatgtacaagtacatactcagcctcatatctcggcgctcctgaatcgctcacacttgtagcgtctgccatatagtcgtagtagcatgcttgcttggcgaataagttcaacggggtcaacgtctggcacttcgagaagctcatcgcggtggagatcgaacgccgcggcgattacgatgatggtga

SEQ ID NO: 114762 - DNA, 187 bp, Glycine max
  unsure (1)..(187): unsure at all n locations
ttctccttaatcgctccctccctatataaactcgctctcctttgctttcttcctgttacttcacttataaaaaatctccccgcgnntnnctncngccccttccgtgcttccagcgaccttccacccacacatgaccgacctgcaaaccgtttgcggaatgaccggcgacgtgggttcccccgacaag

SEQ ID NO: 114763 - DNA, 261 bp, Glycine max
gtagttgtgagcgtggcattagcatttgcatgtacccattattgaagcaagcgcaaggtccttattcttctctttcatattgctctcttctcctaaaccactgtttatctaaaaaatcgctttgctttgtcaaaatcgtgcatgatcactacctcaaattgggtcttaacacctacacatacttgggcaatcgctgtctcgacctttactctgagttcggccaccttaacgatgcaccgaagtgtttgatgatatttccca

SEQ ID NO: 114764 - DNA, 149 bp, Glycine max
ttctctccattggtccttaaacactcatcagtcataaccatggccaagcaagttgtttccctttgttgtctgcttatcagtagctgctgcttcgctataagtaccagagagcagcctcagagagaagagtgccagatccaaaaactcaa

SEQ ID NO: 114765 - DNA, 138 bp, Glycine max
ctcgagccttatcggcttacaggtgttggttgtattgtgtataatgttgtgtgtagtgtagtgtagtgtggtagaagaacagcagcagaagatgggcagtgatgcactcagagatatttaacacctccagtccacaca

SEQ ID NO: 114766 - DNA, 265 bp, Glycine max
ggacgaaacaagccttcttttcagagttagggaaaccatcattgcctgcaattggcaccactacaaaggccaaggaaagcactgatcgggtagaagatgaacaacctgcttgggctccattacgagataactatatgctgacaagttcaaaactaaaggattgggacaaaatgcctgataaaaatgtatcagatgacatgggaaaaacttctgaagatagtagttcagatgaagattagtattttagaactcaagcaagcagaat

SEQ ID NO: 114767 - DNA, 262 bp, Glycine max
cgacaattaacaaacgaatggtgagaagaagggagagaatggaggaaaaggcaaaagctgaggagaagaagatagacttgttatgcaggcccaggattacttgttcgttcgggcgtttgtcccatttgcggatagtcgtgctgataaaagcttggaaggaatcagattgccgtggtgacatggaagtcatattggggggcgtggcttctctggaggatgagatttcatggttcaaggcagaagccaacaagtggggtatttc

SEQ ID NO: 114768 - DNA, 266 bp, Glycine max
tcactcgaaatcgagcgaattcggctcgagctcgacgaaaagaggtaaggactgagcaggaagacaccatgttgacaaagaataacgtgattctaacaataataaggatcatatatgcttaatgaaaaagaaaagtttacatatttagctgcaagatatattttatgtaatttggctggttttcaaactgtcttattttgggttatataatgctaaagaggaggcagtttagtatcgaacaattgtgacattgacttatcatcatc

SEQ ID NO: 114769 - DNA, 109 bp, Glycine max
ctatcattctgcttgcattgataaccatgtgattttgggatcatgcaaagggttcatagttttatactataagagaaacgatgatctcattctatggaatccatccaca

SEQ ID NO: 114770 - DNA, 119 bp, Glycine max
caccaagttatgggtttccttgtgttgcttcttatctccctcttaggtctcgcttctagttccagcatatcaactcatgcgttccatattggaccttgacgtaaccaagtttaccacac

SEQ ID NO: 114771 - DNA, 260 bp, Glycine max
ttctaacaagtgattctaacatattaaaagctcccaatcagtggcataggtgacttcaaagtatgcattgagtctatttgaccattgtggatttgtacaaccaaaatggttaaattgagaagatgctttctaacaagtgattctaacatattaaaagctcccaatcagtggcataggtgacttcaaagtatgcattgagtctatttttcattttacactgaagtcattggaaattatcaagcggtcataacttagtctat

SEQ ID NO: 114772 - DNA, 260 bp, Glycine max
atcggatgcaactttggtggttgcaataataaactattttaggaagctttaaaacctgccaatctcataattcttccctcgatcaatcatcaatattcattattattctccttgattcctttctggttttttcatttcttttatcttttaatattttgtttttaaatcatatccctgaaagtacacttttcaaatcccaactctctaagcaatttttctctaagaataggaagaagaaaaataacaaaagggttgggctg

SEQ ID NO: 114773 - DNA, 257 bp, Glycine max
  unsure (1)..(257): unsure at all n locations
gcagtagttctagttctctttctttcactcactctctgacctatgnnataacannaaacaaaaccagctcgtgctggaaccttacgttgtgatactcgtttgaagagtagagaaacttcaaactttcaactttcaaagccacattattttctccatgaacacactctgttttgtctgttgttgttccaatgaaggcatgtgagaaggtattggatccgcagctatggcacgcgtgtgcaggtggcatggttcagatg

SEQ ID NO: 114774 - DNA, 258 bp, Glycine max
cattctgacaaccatctatggtgctccatcaatcgctgtacacgcacatcagtgccaccacaacttaagagcaatcaaccaatggggatttcaccatttcaattttcaggctccattcttccaaattcactgcgctccttcttgtttgacccagaaacaagcaatgatctagttgtggaggagaaggtggtaagcattgaggaaaacatggtagaaagcagcaaggaagagatagtgaatagagccaactgggtagag

SEQ ID NO: 114775 - DNA, 163 bp, Glycine max
actagttcaatatcctagtatgccttaatgcataatttgagatactatgatgatagcacggatcccattactgttgctgggacttgtttgcctggctgcagtttctgtctcatttggcattgcttactgggcaaaagaggaccccttacactacaagtgtctc

SEQ ID NO: 114776 - DNA, 165 bp, Glycine max
tatacactcatcagtcatcaccatggccaatctagttgtgtcccaatgttgtctgcttatcagtggctgctgcatcgctttcagttccagagagtattcgcagtaagacgagtgacaggatccaagtactcaatgccctcaaaccggataaccgtatagagtcag

SEQ ID NO: 114777 - DNA, 113 bp, Glycine max
gtgctggtggcttctttctcaacggacacgatttctgccatttccattttcttcagattccgtctctgtctgcccatctcatctcatctcattttgttttggtccaccctcat

SEQ ID NO: 114778 - DNA, 278 bp, Glycine max
gattcaaccacacaggctacgaacttctcggatagtatctttattaataaggtagaaagtattcgtgtcttatgtaagagtgtaactttgttcttgtttgtactttaaatgatatagcttgttcagttcactaaaactagaatgaagatgttattatcaactaatatttttactgtccatgaaggattgttgccttaataaattgtaaggttggttctcttgctactagcctagatctgtgtcattttgagtgtgctgtaatagtatatattgcctta

SEQ ID NO: 114779 - DNA, 275 bp, Glycine max
tactgtaacatgcctatatttattatgtacctggttcacatgcgtacatcatgaccagagtggcacctatgcttcctagctttatttcaaaacacaaatctaattatccttggggaaatgtatcaacaaccaaaaccttttaccgaggtcaggccttgataattggacaccattgtattctgtctaaatccaactcttcagagagactgtttagatctaaatcctttttaacgatttcacttaatttttcttgatctatctctaattctgtagct

SEQ ID NO: 114780 - DNA, 265 bp, Glycine max
gggaagaggttgcggagaaaaagatgggtgggtgtgacagtgggggacggagcaatggtaaggccaatgcagctggtgaagatgacgccaatacccctcaggttcctcagaagattcaagtaggtaattctccttcctatagagtagaagaaagacttggcaagggtggatttggtcaagtatacgtcgggcgacgtactggtggaaatttggagtgaagaactgggacctggagctgtaggaggtgcattaagaactcgagcat

SEQ ID NO: 114781 - DNA, 137 bp, Glycine max
  unsure (1)..(137): unsure at all n locations
accatgcaacaacaacaaccccagnaaagtcatggtggacgcaagcaggggcaacaccagcaggaggaagaggaagaaggtggcagcgtgctcagtggcttcagcaaacacttcttggcacaatccttcaacacaac

SEQ ID NO: 114782 - DNA, 233 bp, Glycine max
aaagaaacatcatgaagtcaagttgaaagaggggttgaaggacttggctgctaaaagtatggaactgcaaaattctttatcttcgtcatggtcaaagcaagatgcggctgtggcaaaaacaaaagagctgaaaaaactatgtgagagtacactttcatccatgtttgatgggagaccagttaatataattggtctcccatcaaacatggatgaaagtgctagttctagatcgc

SEQ ID NO: 114783 - DNA, 274 bp, Glycine max
actcgagccgattcggctcgagctggcagcttcttctcagcatccgacaacacacagttgctactgctattgccgcacaaaagctgaactaacaaaagatccaagatgaattaataattgctcgagaaattgtcataaatgatgcagagtcttctgttcgctacaagttgacaaaacgccagacacaagaggagatccagaggtgcactggtgccatagttataactagggggaagtatcggctacctaatgcgccacatgatggaggaaccgc

SEQ ID NO: 114784 - DNA, 278 bp, Glycine max
  unsure (1)..(278): unsure at all n locations
attcgagccagcaaagcactggctacttcagagttgaaaacccagcatgtggttatatctctttcctaaccttaaccttggtactgatgctactgacaatcagggcaactcagcggaaactgtttcttttcagctaggaacaagtttcgtgaccgaagccaaccagaccatgantcctccaaggaagacgcctattgtgcactccctcgggaacaattaccaactcaataaggttgacgacaacggcaccccaaaacctcgtctcttggtcggcctct

SEQ ID NO: 114785 - DNA, 114 bp, Glycine max
cttaattactaacacttccgtagtgcaatatggggaagcccttcactcactctcgtgcatcccggtgcttgctactcttgtcgagtgcatgctttgctagtagctccagcaagc

SEQ ID NO: 114786 - DNA, 211 bp, Glycine max
attttaagcttggcaggtctagtatgtgttatatacataataataataatatataataaaaacttgcatgttacccattaaaatattatttagttctactgggcctacaggattacatgtgaagaaaataatattttaagcttggcaggtctagtatgtgttatatacataataataataatatataataaaaacttgcatgttacccatt

SEQ ID NO: 114787 - DNA, 134 bp, Glycine max
gcaatcatcactacagcagatcccccatgttcaaactcagagttcttctttaacttctgcctctactgtctcaaaaacaaatcttcaaggagttcactctgatggtagaagttttgcctctcattcttttcctg

SEQ ID NO: 114788 - DNA, 277 bp, Glycine max
gagaatgcttattattattattatggtcctccaacacccatgacaaaatacaaatgagttttgaggtctcaccaccctccacttcctaatcccccattccctctaattcccctctaatagactatttataatttcttaactaatagttagttatcctagctatcctaactaactgacaactaacatacacctttccccatctatcactatgtctgcactgtccaattctaatgcttcatagttcatatcatgagtagttcattcgcaaatattacat

SEQ ID NO: 114789 - DNA, 188 bp, Glycine max
ctcgagccgttcaaatcaaatccaattgaaatcaaaaataaaaaggaaaaaagacaaagtacagacctctcaacacatggctgcttcaatcccatttacaggtatcaactcctcaagggatcttcccattcctagagaatcaaacaacccatttcccaattggtcctcaaacatgtcaaagtttgcat

SEQ ID NO: 114790 - DNA, 207 bp, Glycine max
gcggctttcaatttttcgaaccctcaaaaccctagtgtcagttcgatttatactctaataattacactcgcgcatagttttacgcgacttaccattgatgatcctattaatttatttggtttgaaagaaattacgtaagacaaagtgggttgtgactgggtggggtaagagagacaagtaataatggaggaatcgatagggcagaaa

SEQ ID NO: 114791 - DNA, 128 bp, Glycine max
caaatcctgtgaatctaatgactaccagcctgcgttctgccagtatgatgagacctggtgttcggatgtcggcatgtacgtcgatcgtcaatgcaacaggcgcttggtgcttgactgttactggtgaa

SEQ ID NO: 114792 - DNA, 279 bp, Glycine max
cgctggctttgtttgttttcttttctctcttccaactttactcaattaccattaattctcgatctcggtgtttctcaaaaggatctcatcttatcgatggaatttagcacgatgaagaagaagaagaagaagcatttgcacgatggaagaacaattgctctcaaccccgaaactgaaactttcctcgttatcaggattcccgatgcgcttgttttgcgcattgtgtctcgctcgttgatcgtgggcatggttctcgcagccttgcctttcttgggaact

SEQ ID NO: 114793 - DNA, 187 bp, Glycine max
ctcgagccgttttgataaaccgcgatcacaggttgccgcaccttaaaacctgaaacaaaagcaatcgttactttatttcaagaatctctcaatttcttcctacttctttgtgtacgatttcttaatggaaagaaaatcactctctgtgctggccacagacgtcgtgaatcatgttcttctccacaca

SEQ ID NO: 114794 - DNA, 230 bp, Glycine max
atacggtttcaataatgttgacactggttaagcagtgatgaccactagctacctttttttaatcaaatagcttgatttcatctgcatagtcatactgtttatatactgctttgttatgttatgggtgttctcacttgattatgatcagggtttggtagaggtatgagtagctatcaatcagaggtatagatagggcgttttggtccaaagatctttggcatggtaagttg

SEQ ID NO: 114795 - DNA, 272 bp, Glycine max
tttggttccaaagctttctagttgcatatacaatggaaggctagaaatattgccctctaaggactgggatctagagtctattcacagcatggaggttttggatatcataaggaaacacgtcagtaccgtgacaggtttgagatcaaatcctagtgtaagggagagttgggaaacgactcctattcgacaattctggcttgcccgagtctatgtcgcctccatattatatggctactttttgaagtcagtttcattgaggtacaacctagagc

SEQ ID NO: 114796 - DNA, 274 bp, Glycine max
tctcgagccgattcggctcgagttcagagtatttaattattggcataagaactggatgctactttttactttgattaacagcaatctgtccaaatatctgtcactgattatgtccggttgacaagcactaatggtatattttctgttaatcaaagtaaaaattagcatccagttcttatgccaataaagagaattcagagtatttaattatttttatttgatgaagctcttcggtaaggatgccaaaagtattactgatttttttatttttatt

SEQ ID NO: 114797 - DNA, 265 bp, Glycine max
ctcgagcgattcggctcactcaccggtttggagcttctctttctttcccaccaaatttcctaggaatcaaacaccatggactcgttggaactctgctttgagctttgaagaagaaaatgttcgggttctctcgcaggcacatgaaacttggcagtagattgaaggttcaactttctgacaccaccctgggaactagaagtaccatcaggcaccataagcgaaatgtaaactccaatggtgatagagttacagggacaagtggtca

SEQ ID NO: 114798 - DNA, 140 bp, Glycine max
ctcgagccgtgcagacaagaaatgttatgtttccagcctaggatgtttctttggactacttgatgccaacttcctcgaggataaacagattggagagattgccgagggtgaaaatgaattcaatattccacacatcatac

SEQ ID NO: 114799 - DNA, 266 bp, Glycine max
tgatgaacttgtaattattcacctatgcgactgcttgtggtatgaaagatgtgtgatagcgcaagactcagtctatatttgagcagatcactggaaatgtcctcgaacttattctagtccagaggctatccagatgaccgagttatatgtatattcataggtggttggatactctcagttaactttgcatccatttcagccatattagcttatatatgcatttatgctagtctgaagtggggatggattcagactcactgtagtac

SEQ ID NO: 114800 - DNA, 104 bp, Glycine max
aatcagataaaccgcgaacacaggtagcagcaacctaaaaccggatacaaaagcaatcgtagctagagctcaaaaatcgcgcatatgcggccaacgtcccagag

SEQ ID NO: 114801 - DNA, 146 bp, Glycine max
tatcgagcgaatcggctcgaggatttcgtttctcctccgaaaaagcctaatttccccttcagtcttccccatgaccacggcgtagctcatttcccccactccgaaaatgtcgctccagggcagcgccagcggaaacggcaccgtgg

SEQ ID NO: 114802 - DNA, 142 bp, Glycine max
ccattcctaaactgcattatctctctactttagtttagagagattcaagtgaaggttttgacccaaaaataaagtacctttggtacttgccacccaaagccagagttcgaggcattaaaataggcaacttttgcagaacctc

SEQ ID NO: 114803 - DNA, 139 bp, Glycine max
gccaatttggtctctactatggctgagcaacatgagcttgttcgcgatgagttcatcagggccaatgtgactaggccccttgtgtccttgttgtccatggatatgggtactgtccttgctgaccccatggccggtcgcg

SEQ ID NO: 114804 - DNA, 137 bp, Glycine max
tggactctcagggtcgctaagaacgtggagaatgtcactgaatatagcaaggaagggtgagagtcgaataccaccagcgactaatataagattttgattctgtactgtgttagggaggggaaacctgtcaaatgaga

SEQ ID NO: 114805 - DNA, 105 bp, Glycine max
  unsure (1)..(105): unsure at all n locations
gggaaaaagttgtattgaaatgttcctgaatcgctccaaactggantaggtttcggggaaaagcctcaaaattgatggtgtcaacggccaaatttgaggcttttc

SEQ ID NO: 114806 - DNA, 260 bp, Glycine max
cgacaaacaaacccatttccctacacctttcttcttcttcttcttcttccttcgcaactctctctctcatcttgcgtgtttaagatcgtcactcaaacggcgccgtctcctctccgattcctcagcacgtttatcaggtttcttggtgctgtttgagtgtttgtgcattgtacattattatctctacatgttctggacttattagcatgatatgccacaattatggagtgttttgttagccaactttcatataggaagaa

SEQ ID NO: 114807 - DNA, 117 bp, Glycine max
atatcctactacaccgtattaaagaacttaagatagactatcatgagaacgcggtccccattactgttacgaggaagtgattacctggcatcagttgctctcgcatccagcattccg

SEQ ID NO: 114808 - DNA, 231 bp, Glycine max
ccaaagctcgtctcctcggtctcctttttttctctctttctgtttcaattgctttcactagtctcaattgttttgcttctaaatattattttagttgtgttgtgggtgtgtgataggggtggagtacatcgttcctgctgatgtctttgaagcctttcctccggaggagcagaaactttggcattctcatgcttatgagattaaatcaggcctgttggtgaatcctagagt

SEQ ID NO: 114809 - DNA, 165 bp, Glycine max
aaacttaattatgaacacttccttagttcaatatggggaagtcttcactcactctctgtcttcccgtgcttagtatcttgtcgagtgcatgttgctattagctcagcaagtcacgagtggcactaacaactcgagcgtgaacgacacgcgtagtcgaagtggtga

SEQ ID NO: 114810 - DNA, 166 bp, Glycine max
taaaatggtggccacagttggtattcctgagaatacaggaataccaactgtggccaccatttgaatcattactttaatacgatgactgcgctgcaaatcaacacttgctctagacattgcacactatcagataatttgccaatagaacactacgcagaatagttcc

SEQ ID NO: 114811 - DNA, 190 bp, Glycine max
ctcgagccgatttcaattccttccctcacccaaaccgcactatcgttcttcgatacgctccatctttgaataggtcctgtttattgagcggttgtggattaagagtaaaagtgtaaaatggccttcgtagcaaatcaacctcagggtttgtgtgtgacatcttcctcaaggcatttgccatggagcaaaa

SEQ ID NO: 114812 - DNA, 265 bp, Glycine max
gaatgtgtgtgtgagagttgcatgtgtatataaatgataaaaaatgttattgatttcctaaggataaataccaattcggatctttttatcctcattccatatacttgttaacttgaatataacacactacacataataacaatgaactaagtctggatattgtattgtatcattcccgtaataacttaatttgtaataaactaaataatttatttttttcaatcaatagttgaggattgtgttcaattactagtgaaaaataact

SEQ ID NO: 114813 - DNA, 103 bp, Glycine max
gtctgtgatgtgtcatgtttattgctgtgtgctaattaaagtacaccctgatgatgagtggtcccgcactagcacaaccacacctagtcgacgtccagagaac

SEQ ID NO: 114814 - DNA, 258 bp, Glycine max
tccatctttctctcactactctctttactcttctgtacaagcagcaaagctaaagcgcttaacatagcaaaaaagtttctgcaatccaaagcgatctgttcttaccttttctgcttggctttttaaccgcttcatctttgtttgttactttctgagaatttccatctgggggcctctctttggcactttccatacttgtgatcttgctttcgtgtcaccgattcaccctttgcgttctaaccaaacttcttcactgtg

SEQ ID NO: 114815 - DNA, 118 bp, Glycine max
attgtgttttaaatccacaacgcgtccggggaccccatcccgggggggagttaacccattcaattgtaacctgaacatcctgcattggagtggcagtccatccagtgacacaaatgat

SEQ ID NO: 114816 - DNA, 242 bp, Glycine max
gttctaaggagggtgcaagagagaactataaagattgtgacacacaaactcttctttcaagatgaatgatccttgtccagctgaagactatattctttcatcttgaaagaagagtttgtgtgtgacaatctttatagttctaaggagggtgcaagagagaactgaatttgctgtgatggcaactcgtagatatgcttttggaagagctgatgaggccactcatccagagtccatgagggcca

SEQ ID NO: 114817 - DNA, 245 bp, Glycine max
tcatcttttgaggattgaagaaactgaactgcaactttgggaaatgttctcagctcagtggttaggaaagaaagacaccaggtgtacaggctccgtaactatcttctgtattaatgcttgagtgctctttatggctgcgtcatattatactacatttctcttgtaaaaaggatgaaaagcagatggaaaagtacgtattcaaaattcaccatactgaacttctttcactgccgtagtgaaaattg

SEQ ID NO: 114818 - DNA, 238 bp, Glycine max
cattggactccaagattggcaagcgaaggatacctatttttttaaatatgctttcttggagtattatattagggaatcacgttccaaaagaaagaaaaaattcttggagaatcacaatttttttttttttttgctttctatagttcttaattaagagctagggaattaagggtcgcttttaaatgaaaggtacttgtcctagtgaatgtagatacgtgcatgttcactaacatatttg

SEQ ID NO: 114819 - DNA, 263 bp, Glycine max
agcacttcacaacttgattagagctgcatggtatcattggaaagttgaatgagaaactaggatgagctgaaatgattcaagcccttcagttgctgcttagacttgtatctttccgaatttttgtgactaataatttatataggcatagagataatgttgttggttttggttgtgctagtgagaggctgacgtgaaatgatgaagtgatgcgagaatagtgtattagtaactttggaagagaacataatggacatgtgctagtg

SEQ ID NO: 114820 - DNA, 257 bp, Glycine max
agcagaaacagagtgcattgtgtagcagtagcgggcaatgacggaacctctctcaaacaccgaactctcttcttctaaaaccctagacccaaccaaccgccacgattccacttcggaaccgcatcaaacggctccggaagaggttgaactcaatcgagaagacgatgtcgttccgaccgcgaaacggaagaggaacgacggcgtcgtcgaagaccgtttgctgcatccactgtggaagaccagcctctgtcctactt

SEQ ID NO: 114821 - DNA, 253 bp, Glycine max
gatccccttcttccccccaccgcatcgtcactcctcttcactggatcaatattcctcccgctttagaagcaatgctatctatgacggacggccaaaattcttccatataaacatgccattgtggcctatggtgccgtcatagcgggccatccttcacaaattgcccatgacatttgttaagctttttgatgattcaaaagatttttccttgagtttggttagagtatctcaagtgcttgaattggaaatcaac

SEQ ID NO: 114822 - DNA, 252 bp, Glycine max
gtctctgcaagatcaagaagtgatgagaggagaaagttgaagacttttctcctttactattgttacaacaatctccttctctctcttcttggagtaattctttgaagaacaagaaaaccactctctcgttgtgggggagtaagagggactctgaagagacatgtttgggtgcaagagtgtatgctgggattctgtccctgaattcactgaccctgatccacttcccttttctctagcttctaccctcctcaa

SEQ ID NO: 114823 - DNA, 250 bp, Glycine max
acggtcacagttatggttttgttgcggtcggtctttgatgttgcaggaaactacagacaaatgcagtcgatgttgttggaattgaggtcgtggtggtgactccaaaaacattgattttgtggccaaaattgtgatcgttttttaaaatcttggggtagagtgttgtcggttttcaagttggggaggactggaaaatatgtacaggcaaaaatgcacaaaattgttattatatcttgtggtgaaactaaaa

SEQ ID NO: 114824 - DNA, 252 bp, Glycine max
atatcacctgtccccatttcttgttctctttcctatcccaccaatttaaaaaatatctcttctccaaaaacaaaaacaaaaaaattaacagcttggaagtaaaatattatttttcattgcatgtcatgttttatttggatagacagaaaagaggacaagtaattccaattcaatttgcagttcaacaaactgtctaactcaccccatttaaataggtccacctagataaataatcaaaacaatcgtaactat

SEQ ID NO: 114825 - DNA, 182 bp, Glycine max
acacagtactgtgagtttagactatactagaagagcatcatatacccttttgcacacaaactaaaagctaagaataatcatcattcatcaccaccaccaagtaaaagctttcactgaactgaaccatggcggattcaacctcatctaatcctgataaggatcaatcctctacggaaccgaaa

SEQ ID NO: 114826 - DNA, 105 bp, Glycine max
caacaactcttacaccaaacacacatccgtctttttaagttcttcatatctcaacctctggttctggttctccaccatgaaccaataagtacaacctcgtaattg

SEQ ID NO: 114827 - DNA, 267 bp, Glycine max
aaatactgaaattgttatagtaaaattaaatttgcttagaaattcgtatacactgtacaaaaccattgagcctttatctagtagctatgggcatatttgattttttaaaatatttttgtttgcattttttgtttttataaataattacaaagatggcattatttttattttatctcctattttaaagacttgtatagaaactggtgaacatatgtagtttatcaaaatgggagtttaccattgacaccaacaaagcttagtttattt

SEQ ID NO: 114828 - DNA, 258 bp, Glycine max
agtacttgagtacaacactacggttgttttgttctgtcatctaaaagcaagatatgagttcatcaggaattagagtattcaaagattgccaaattttgataaatgatagtgttgagcattgccaaattatatttgtgctctttagtttttttcttcccacttccatatatatgcttatttaattcttcttgtgacggtagaaaatcagttattaaaatttgtctgcacaatttgatttccagaagggggaaattaagg

SEQ ID NO: 114829 - DNA, 266 bp, Glycine max
gaacgcccccaacaacacttacttccacaaagccatgaacttccggttccaaaacctcttgggcgccccctacagagggggcaacgtggtcatttccagcaacaccgtgctactctccccggtcggtaaccgcgtagcgtcaccgacctcctcaagtccgaaaccaccacgctccccctccagtcctcctctaacgtcacccgcatcaccgtctcccccgacgccaccttcctcctcgccatcgacgaccgcaaccgctgcctctt

SEQ ID NO: 114830 - DNA, 256 bp, Glycine max
acacaacacaagtttcgcgagcatggtggacacatggttgggtcccaccttctgtaatacccttcccctctccttcccaacttgtaccagaatcctctcatcatcgttttcttcttcctcgtcttcaatggctacctctccgtcgcagcagcaccaccatcaccatcgccgctgttattcaaaccctaaccctcctcaccctcaccctcagcccgctctgctcgtcttttccggtgggaccgccttcaacggcgtc

SEQ ID NO: 114831 - DNA, 268 bp, Glycine max
gtcactcttctgatttctttttctcatctctcagagacccttttgagtcatgaagcaaaaaacgccttcttcaccaaccactgcaacaaatgcgtcgaagatgcaaggtgacaagtccctgcagagtccaccaccaccaccaccaccacgcctcagagcttcttctaaggctccgaagtcaccgccagagattgtaaatagggaatccatttcatgaaccagagctaagtcagtgcctccagacttgaagaacgtttcaagggccaaa

SEQ ID NO: 114832 - DNA, 250 bp, Glycine max
attttgataaaccgcgatcacaggttgccgcaccttaaaaccggaaacaaaagcaatcgttacttgatttcaagaatttctcaatttctttctacttctttgtgtacgatttcttaagggaaagaaaatcactctctgtgctggccacagacttcgtgaatcattttcttttccacatgacgtacaaccctagatcactctcctatatgatatatgacttcgtttcagatttatacttcttctgtacctt

SEQ ID NO: 114833 - DNA, 258 bp, Glycine max
ctcgagccgctgccatggggttttcaatgctgattctttttcacctctaaaaccacttcctctcttattttcttcaacttttgggcattcacaactcatcttctttgtggtgtttctaggtaaacgagacccttgttcttcttgcattcacttgacatgatctccgagcttgttacctgaatctctggagcgagcttctgggctgtagatcctcttctttcttctttgcgtttgggttaaagatctaatttttccatc

SEQ ID NO: 114834 - DNA, 170 bp, Glycine max
gcaatatgttgcctcaacccgtgaggtaaacctgcaagttatccaaaaatgtttgccctgattgattggctacggcatcaaatccctcttgaagatacttcaggagcaacaggaggtctggttcatggagattttcgcattgacaatcttgtgttccatcccacagagga

SEQ ID NO: 114835 - DNA, 162 bp, Glycine max
acttcgtgtcagatttaaacttcttctgtttctttctcagttctctgcttaatttcaagttcaagctggtgacatcttggattagtgctctcactcttctatctggtataggacttcgtgggtagacttttccatttctctcctttctttcactctcttctt

SEQ ID NO: 114836 - DNA, 272 bp, Glycine max
gggatgaggcaaggttgtttccagggagaggtagttcacatttttctcttacagagataaaaaagaaattaaagcatgctatgggaaaggagagacatcgaaaccctgaagggatctcaaaaagacaccctgctgctgaatgtcaaaataagtggcctaccagcaaagccattggtaaagacaatgttggaatgagatctcctaataaagaccacttcttcattgaaaaaattgcaagacctaccactggtgctatgcaaggagacaagact

SEQ ID NO: 114837 - DNA, 142 bp, Glycine max
ctcgagcgaatcggtcactcgacgcgcggatcaactcaaaccgcaattttcactagctgttttagtgtcacgtaacttttatattttaaagtaagctaattgaagacatgacttgcaagtcgaagcacagcaaatgtgcaac

SEQ ID NO: 114838 - DNA, 149 bp, Glycine max
ctcttcgagggtttgggattctcttcctcccttggagaaaaagaagagccaccgctgcgacgccgttcgtgcatttttgaggtgccgctgtcatgtttgggcgtggtggaccaaggaggagtgataactccaaatattatgatattctc

SEQ ID NO: 114839 - DNA, 147 bp, Glycine max
gagaaatgaaacacatgagggaaatgccacaagagcatttcagtttcaagatgtgttctcactggaaaatgaagattctgatgatgtgacaactttgattgacaaaaaggacaatgtctttgtgatgtcaaacaagaaatccaaata

SEQ ID NO: 114840 - DNA, 243 bp, Glycine max
catggcttcttcactgtcttccgttatcaaccaacctcacttagctcaacgcctcaagcttcaccgtccatcctctcttaccactttcacaatcttccaccacaaacacaaacaccaacaccgacacaatgcttcgtttccacacccttatacctcattgcctcgctcacgccctctcaatctcatcatcgcctccagaaccttctctccttccaatactctccaccttcacttcattcctca

SEQ ID NO: 114841 - DNA, 242 bp, Glycine max
cggctcgaggataaaactactctcatcagagagtgcagcagaagcagaagatggagactctgaaagctgcaattccagaaaacctgaagcgaccgataggggatagcgatgtcgatgaccttcgcagcacatgctcttctcttcaccgcttctttctccacttccacccatttcaccagctgatcactgaactcgcagatccaaagtatgctctgtgcgccaagaacaaggacgctgcgttg

SEQ ID NO: 114842 - DNA, 234 bp, Glycine max
gccactctatggatatggtagatttacttgccagtgatgatagtaacatgtctgaaatatttactcaaaaacataaagaatataaactttgttcagctaattcatctcaagctgatcctactattcatttggacacttcagtgaattttaaccaagatcggggattcaaaaacagtgatacaactcaaaaaagagaagtgattgatgcattggaagccaacataacaagccaat

SEQ ID NO: 114843 - DNA, 235 bp, Glycine max
ggctatgaggagagccgagaaggagagactgaaggaaggtgcagcagctgacgaggaacaaaagaaaatgaagaaagagactaagaagaaaagctcgtccacttccaaggatgagaccacaaagttgacctctacaaagaagaaagccagtggctctgatgaagatcatcgatctccagctcacagtcaagttgatgagaaagaagaggctcctgatgaagatgatgatgatggt

SEQ ID NO: 114844 - DNA, 232 bp, Glycine max
tctgctgaaacctattgcttggttcattttccaagtttcatcaggttggccagggaagctggtcttgagtacgtggagattcaaaatttgaccgagttttatgatgacaacaggttagttttgcattctctgtagggcactgatcctcccaaatccttaaaatatattgtttgttattagcagttttggagtttgaaatactatttattgaatttaatttttgtgattgttt

SEQ ID NO: 114845 - DNA, 269 bp, Glycine max
gcacattttgatctctcacatgatataagtatataaatattttagcatgataagaaaaatatataatatattttagccaaactgaataacaatataatatgattactttgaaattattcaaaaaaataaatatcttgttttcttatcggcatgatgaacaactgtataaattgggggatagcaattaattaatcattagttataccatgaaaaatagtatttttatatttttacaatctgtctaattgagttaattagttaagttgaag

SEQ ID NO: 114846 - DNA, 254 bp, Glycine max
ggtttatgcaattttttctggaatttcgggttgcttatgatttggggctgatttttcacatggttttttttcttcattcctatctgctgatttgtatgttaacatcaatgtttatgctctcttgttgtcttatgttgtttggttgctgagaaattttaggagaatttcataaacctagaacttttaatgtatttattgttgttactgttaaaaccgctttttaccttaattttcaatatgaagagacaagtttt

SEQ ID NO: 114847 - DNA, 215 bp, Glycine max
acttaagacacataaaaatgaacacactcttgttgtaccttgaagcctttaaataaaattttcatctttcttctcttccaactcctccaccatgctctgctggcttgaatctttggtgggattgttggcttttcttggaatacagcttcctgtcataatggctgattgccctttgaattttactggttcaaacttcacactggcttcctccctat

SEQ ID NO: 114848 - DNA, 236 bp, Glycine max
ctttcttcttttttagctatccctctcttgaaaaatctagatctcgttcttccttgatctacgttacgcttttagtgaccggatctgtatggatctgaaccagatctacacgccgatggtggttttggcctggtctttcatagatctgatgcatggaggctcagatctactgtacagagatactgtagataatcgatgagaagaacgcagatccagccgcttccgcttgttcgatc

SEQ ID NO: 114849 - DNA, 124 bp, Glycine max
gtacgtaattcggctcgacgaaggtgctaaagaaggcgatgaagaagatagcgttctgctccacggagatctgcgcgtggacatgcctgggctcggcaaggaagacgtgaagatctccgtggag

SEQ ID NO: 114850 - DNA, 235 bp, Glycine max
gtcttgagccatcgactgatgcaatggaagtgaaaagcatggttacaaactcgtcaagtttgtcctctagataacagtgagtgggagtttcagaaatatggccactagaattatgatgtggttgagctcctcggacatttggaccatctatcctagattatgaatatttactgttctatctgttattttcgtttgcttgtgtactgaatttattatgttcaagaaatcagcttgt

SEQ ID NO: 114851 - DNA, 222 bp, Glycine max
attccatatcataattcaatttcaaagaagcagttgtagaatgcaaatgcaatgtgctataatcatttgccatatgtaaattatatgtttctcatgaaaggttgtcttgaaagtattgaatgagccattattttttctattcttcaacatttatttcttattcttcatttttaatgtgatttatacactgaagatgaatgttccttgtctctttgtttgtac

SEQ ID NO: 114852 - DNA, 132 bp, Glycine max
agagtttttgatgtacctcactgaccaggccatggagatgagaaccagactttcttgagctatctatttcttttcactaatagcctaatttccaaacatagccttgggcaaatgtacagaaaccgaggtaga

SEQ ID NO: 114853 - DNA, 121 bp, Glycine max
ggcttttgtacctggggaattattgctgactcgtggggatcttttgctcattatgcggtttcagtttacttgggtggttatgacaaggaggataaggcagccagagcttatgatctcgcag

SEQ ID NO: 114854 - DNA, 132 bp, Glycine max
  unsure (1)..(132): unsure at all n locations
taaaattcttccaccaagtaaagggctgtcntgtgatgcttctttactcccactaaggtctctcatctagtaggagcataagatctcgggcttcggtataggagcatggcgtagccgagtttaccacagagg

SEQ ID NO: 114855 - DNA, 126 bp, Glycine max
gagaatgtgtatgagggtccccttgatgatcaatatgcttcagctatcagagactgtgatcctgacggtctctgatgctctatgtctgatagatactcctggcgactgcatacggcagaattaccg

SEQ ID NO: 114856 - DNA, 131 bp, Glycine max
gtcctacaaacttaattatgaacacttccttagttcaatatggggaagccctacactctctctctttctgcccttagcttgctactctagtcgagtgcatgccttgcgaggagctccagcaagctcaacga

SEQ ID NO: 114857 - DNA, 244 bp, Glycine max
gttccagagtagaggaaaggcgtctaagaaaggaacattccccactaaaacatctttctaaacttgattcaagtcacgtcacttgcattgaaagagtgtgtggtcttggtctgaacccaagaggtattcgacctccaaagctacaatgaattcgataaacttggtcatagatcctccaaagctaccaagatgattctttggtcagtgcagaactagttccctaagaatgaaaggacccccctca

SEQ ID NO: 114858 - DNA, 247 bp, Glycine max
ctcgtttaaaggtatcagcttatccctgagtaaccagaactcattgtaattaacaattggatagtagttcccattagtatgacaaagtggcagttattcctgcagattgaccagtccttccagattcaccgtagttatggaagcatgcttgaaggcgaggctgatgaactcaagagggtattcttggaagggaatccttacctcctggcaattaccatggttgtttctcttcttcatacagtctttg

SEQ ID NO: 114859 - DNA, 127 bp, Glycine max
gtttgaggaatgtgcaagcataaatggtcaatgaaattgatctttaattaatgtagtactactttagtaatgtagtgacttagtttgggtacttcttttgctcaactcatgcattcttaattaatga

SEQ ID NO: 114860 - DNA, 128 bp, Glycine max
  unsure (1)..(128): unsure at all n locations
caataccaggtgattttgtagacactgaactatcatgcaccatagcatacaaatatggtcanccatcagccaacagagttgtagcaggacgcacctgagttggctgatgggtgcccatatttgtatgc

SEQ ID NO: 114861 - DNA, 146 bp, Glycine max
aggacttgtttctttgttaagatctcaggattctaatatggttgcatcctactatcaaagaaatcttgatagcttgaattttgatggaaggctttttattattggctttcaaggtggggttagtacacaagcagtctacgcccttt

SEQ ID NO: 114862 - DNA, 245 bp, Glycine max
atctaagctacaaagacatacatatggacataatttcatctggcttcataaacacagcatctttcaaggacagtatggtgtaactttgaaactttcatatttattcaaaatgctcagtgtaatttaaattgtttttcctttctgagcaagtgcatatcgctatgtgcactattataatcacttgtagcctactgaatacattactttatgttttctggttgcaatgtcatggctatgatcatatt

SEQ ID NO: 114863 - DNA, 247 bp, Glycine max
ggcatctgcttctaagttctgggctgagaaagcctcactttgtcaggatgtacagtatgaatcccttgaatcaatgtataatacaaagcattttgttgcaagaagggagtctccctggaaggttgatgtgattctgctggagtttcctctaaacttaaattacttgaacaggacttactaaatctggagaagattggtaagagtgatccatccaaggtgccatccttgattaagaagcaggcaaaga

SEQ ID NO: 114864 - DNA, 214 bp, Glycine max
  unsure (1)..(214): unsure at all n locations
ttgcattctagcattagtattttactcactaaaaaagagatctacatagagagggaagaaaccacgtacggttattatggcgatgaaactcaaatatctgtcttccattgccgaggttctcttgcaagntgttcacagaaactggacacttcggtagagaaattgggtggtggattttgaaggggggtggccccctgtaatggggaaactattg

SEQ ID NO: 114865 - DNA, 231 bp, Glycine max
agcgcacaaagcaaagcagtaaatgcttttattgattctgaacattttacaaaacaactgcttttattttattaaagccaaacatgaaagcactcaaacacactagattaccatgtgcaggttggatgaagaaattcgggaagcagctgcaagagatgcaagagttgcaagggaagcagctgcaagatatgcaagggatgcaagggtgcaggcgagagttgtaaagagaac

SEQ ID NO: 114866 - DNA, 131 bp, Glycine max
gtctgagacactgtgctccctctcttctctattctatttctatgtgacactctctctcaaaccctatccctccaatccccaatcaatggcgatcctgtctcaatccaccgccagcttctcctgctccttct

SEQ ID NO: 114867 - DNA, 173 bp, Glycine max
ccaaaaccaaaataccacctgcgtccccaatatcacttcttctctctcaattagggtttgcgtttttacactctctccgacacccccccccccctctctctgcttctcctcgatccctcgggtttcaatgcctgccaaatctttcagcaaaatccaaacagtgccaagcagtt

SEQ ID NO: 114868 - DNA, 238 bp, Glycine max
cgagtacgacaatattcacaaacaaatataatcaaaggggtacacgacttttgactacatgcatgacagtgtgaaaaaagaatggcacgcaccgtgcttgctatgcgcccctatttgggggacctacatgggagggagctaacagggctttttagtgataactcccaaggtggtcatatctctctggcccgtctctagaggtatcatccccttcgagaaacatattgcagcagtaggg

SEQ ID NO: 114869 - DNA, 107 bp, Glycine max
  unsure (1)..(107): unsure at all n locations
gcagaggtttctacgcgtcgatcgttgggaattgcgctactcngcgtctcgcacggctaatcctcctcatgagtgtcagcagctgcgcgttcatntggagagccgag

SEQ ID NO: 114870 - DNA, 104 bp, Glycine max
cgcacacagacctaccgtaagagctatggaaagtggaggctttcacggctaccgcaagctccccaacaccaccgctggtaaaccggatagtattacattaaaat

SEQ ID NO: 114871 - DNA, 105 bp, Glycine max
gataccatcgggttacaaagtcactccccgtgacggccccaggcctcgggacacatgagcagtaccgctcgccatccgacatcaagcatgtgtggttgctgtgat

SEQ ID NO: 114872 - DNA, 184 bp, Glycine max
aactcgagccgaatcggctcgaggaatgcatcagatctcaacacgtggaccgcgctgcttataatcggatgcaaacctatttatattcaaccctttagtctccgtttctggtccgccctttcccatctcatctattctcgcctcagcttcaactcaaaacccttccaaaaccctaaaaagccac

SEQ ID NO: 114873 - DNA, 151 bp, Glycine max
gctcgagactaaagtgtgtcaaactcactatgatactgagactattgtctcctccagagtaaccattgttgaatacgcttttgctcctctgcactactctgcatctcccatgttgctacatggttctcactgagcctgatgatgatgaggt

SEQ ID NO: 114874 - DNA, 145 bp, Glycine max
ctttgcactcgtccgtggtgaatctgtttatgcagcaaatacttgatgggcattgggatgagagcatagtcacattgaataaaattggtctagcagatgaaaatgttgtccaggcagcttcgtttttgatattggagcagaagtt

SEQ ID NO: 114875 - DNA, 100 bp, Glycine max
tcatcgcatcagcatggaacacagcacatcctggaacgaggcagataacagcgtctcttcacaacgaagcctcgtttcagttccttccctcaactcacac

SEQ ID NO: 114876 - DNA, 257 bp, Glycine max
gcaatttcttacttaattattactttgtcgttaattcctaattgctaaatgcttgataaatagtcctaacactttttccttgcaaaatcttatggttttggacaagtattaagaaaatcatagcatttggctcactggctagttatattccgttcttacctatgccataacttcaccatattgactaaatataagttgaaatatatcttagtttgctctaccattactcaatcataggatataactattttgctttt

SEQ ID NO: 114877 - DNA, 221 bp, Glycine max
gcttgcttgtactggaccttatctctatcgtgatactgtactgttgcagaaggtttgtagggtgttgagaggttattacctttctgctcttgagcttgtaagtcatggcaatggtgtcttgaatcctcaattacaagttcctggaaatcctcacctacatcttaaggaggcaaggctaagggtggaggatgctttaggagcatgtctactaccatctctgc

SEQ ID NO: 114878 - DNA, 142 bp, Glycine max
ccctaattgaatccaagcaagcagggaaggggagtattattatttgatacgaaatacaaagctcttcaaaacccaaacaacaaccgtactgcacaactccaccactgtgcaatggccgacgaggaacctgttgatcagaaga

SEQ ID NO: 114879 - DNA, 255 bp, Glycine max
gccgcctcagccagctcctgcttctcgctctgttaaacctcaaaaccttctaaaaccccttttcctatttctatgcatcttctccttcttatctaatccgtacttcacctttaattgcttaagtcctattctcgctgaaggaggaaatggctggaaaatcgggcaaggggaggaacagaaaagggtcccataatgctcccagtgcttcagaacctccagtccttccaatgttcctgtgaatgctatgtggaagtc

SEQ ID NO: 114880 - DNA, 162 bp, Glycine max
agctctttaaagataacatttttccaagcaaactattttctgcagaggttgttctaattttgaaaaggataaaatttaagtgttattcttcaattaaacttggtttttcctgggtcatgctgagctgtaattccaaccattaataagcagattaatatagta

SEQ ID NO: 114881 - DNA, 249 bp, Glycine max
ggtagtgtgtccctaagaatgcgcgggtggaccccacactccacaacaaaacaacaacgatggtgggattctacgacctctccgacaccgacaacgacaacgactccgccatcctcgctggcccaagacgcagtcgttttggagcaagtctccgccatcaacttctccggcttcaccgacgaatcccttctcccctcccaactcgaaaccgtttccgcaacctcaaattcttccctccctccaaaacca

SEQ ID NO: 114882 - DNA, 115 bp, Glycine max
  unsure (1)..(115): unsure at all n locations
tcgcacgcacgcgtgcgtggcactcggctcgaggaccgctcgctcgcactgtgcagatcttaatcaagaggagtgagttncgtctttccagccatgacgacgctggtcctgcatg

SEQ ID NO: 114883 - DNA, 261 bp, Glycine max
gacacccatcagccaacagagttgttgcaggacgcacctgagttgaccaagctgtaagaaattccaggtgattttgtcattggtgtcaagttgacaaccataaacaatatgtgtgcatatgaggctcaatcctggtatattcagttctcgacttttgggcaccattgctgcagtccatttgcacagcaaactgtgttggacttcaaatggccaacagttgagaacacccattgaattttgattctaagcaagcagagcttt

SEQ ID NO: 114884 - DNA, 215 bp, Glycine max
cttcttctcttctctgttacagcaatggattctttcccaacacttctctcattcgccgtcatctccttcaccgtcgccctcttatacctccgccgcgtgttccgaccgccgtcagttccgctcccgccggaagccaggcctaccttgatcgacgaacgtgcagtgatatcggcatacaagagcgaaatccgcgccttcatgacgacgctggacgt

SEQ ID NO: 114885 - DNA, 229 bp, Glycine max
atggtgcatgatagttcagtgtctacaataccataccatacaaatatcgccacccatcagccaacagagttgttgcaggacgcaccggggttgaccaagctgtaagaactctgttggctgatgggtgtccatatacgtaatgctatggtgcatgatagttcagtgtctactataccaggtgattttgccattggtgttaagttgccaaccataaaccatatgtgcacat

SEQ ID NO: 114886 - DNA, 255 bp, Glycine max
gctttggttctgaatctgaggaagacatgggtggtggcttatactctgatgaggatggtgacttaaatgaagaatattcatttaggaaaaataaagggaacaaaggtgatccttgcagacaaaataaggggaatagacacgattctggaagaaggaactttaccaaagacaggaagtcaggatctattggtggtcgccgagcaaatatgctcagtgatgattttgctggatcatcccagcagtcttataggaaca

SEQ ID NO: 114887 - DNA, 245 bp, Glycine max
cttgaatctcgaaggaatcaagtgggaacttctcccttgctctctttagggaagtaatagtaacggaagaacccaagggagcaagcttttagttagttagttaattaattaattaattaattaattaatatttgttattaattttgtttttgaccggttaggatgatgatagtattattattattattatttttttatcatcgagaatgatagtatgtgataatttataagtttattgtatggtt

SEQ ID NO: 114888 - DNA, 280 bp, Glycine max
gtctgaactcaattgtgagtgaacaggggtttctcgcatttacttcactttgcacttcacttctctctctctctcttgggttgcattgaagctttatgtttgagattctgaagtgaggagcaactttcttcttaatgttcactttgggattattcattgtgttggttggtgacaagatgcaactatgaagagatttctctctcacagttttctccttcaaattgctgtctctcttcttcttgttcttcttctgtttatgaccaagtctcagggctctcca

SEQ ID NO: 114889 - DNA, 271 bp, Glycine max
ctcgctcaaaaaaattttccgagaaaacaaaagaaaagaaaagaaacccttccttccgttgttttctgtatatatccatcctttttccttgcacccccaacatgataccctcggaacattattggacccaaacaagacctaaccattttttgggtcatggatccgcgacgtgctcaacgagcggcgcattgaccctaaggtccgtagggtcgggttcttcgctccacccgaacccgacccgatctaattcgaagtctctccctcggcaaac

SEQ ID NO: 114890 - DNA, 279 bp, Glycine max
tgtcaattgccaggagacgctttaggccaggtgttccgcgccactcttgatcttctggttgcatacaaggatcaagttgcagaagctgcaaaagaggaagaagctgaagatgatgatgatgatgatatggatgactttcaaactgatgatgaagatgaggatgacaatggttctgacaaggaaatgggaattgatgctgaggatggggatgaagctgacagtagtaaatttacaaagttggctgaacagacaaagacattcaggcccaatgatgaggat

SEQ ID NO: 114891 - DNA, 282 bp, Glycine max
  unsure (1)..(282): unsure at all n locations
cggctcgagttttgataaaccgcgatcacaggttgccgcaccttaaaaccggaaacaanagcaatcgttacttgatttcaagaatctctcaatttcttcctacttctttgtgtacgatttcttaagggaaagaaaatcactctctgtgctggccacagacttcgtgaatcattttcttttccactcttagtttattcactgaacactctcctatttgatataggacttcgtgtcagatttaaacttcttctgtttctttctcagttctctgcttaatttcaa

SEQ ID NO: 114892 - DNA, 249 bp, Glycine max
ggcgtggcacaccacctggtgaacagcagcgcaactcatacatgatggcagagatgtgtccagtgatataaagtcaagaaactcagatatgagctggtcacaccagccacaaaatactcatgctcagtgggagcataatttggattatttatctgaaaccagagatttgactaagtggcaatcctagtggagatcccattaagaggcagctatctggaattttggacagtgaatttgaatccaggagaa

SEQ ID NO: 114893 - DNA, 224 bp, Glycine max
caacgaatgcgagtatattgtctcgagacgctgtcgtctctcctaccagtctcatgtcgcatcttctagtatctcagactaaagttgaagtatcgatgcctgcagttgatgaaactatactgcgtagtgatctaacggccaatcccctggcactgggcgatcttcgagcgcgtgtcgctgtacgatcgcgctcaccgtgttctcggtatgcttatcgttgaggc

SEQ ID NO: 114894 - DNA, 240 bp, Glycine max
  unsure (1)..(240): unsure at all n locations
ggctgatgacaccatcaattatgatgccaaatgctatgaagtgatgcagtgtacatataatgtagggagaattgaattgcactacttnaaagacgagatctttaacgaaatgtctccacatgtgcgtaatagtctcattctgcatagcattgggagttaggctgatgtgaccacgagtatgaggcttcagcgcataagctggtgcgagatggagagattcgagataaggtggtattgata

SEQ ID NO: 114895 - DNA, 132 bp, Glycine max
cgaaccactctgaagccgatcacgttatacacaacactctcaactctccctagactctaaccaatccagccatggctactatttccacactcactgcaatgtccgcctgcaagatctcctcctctgccgcca

SEQ ID NO: 114896 - DNA, 268 bp, Glycine max
cggtcatgcaatcgttgatcaaattgacgaacaggcgaatcgatgtgatacggaggaagagaagagcgacagagaagtttctgaagaaagatattgctgatctattgctcaacggtctcgatatcaacgaaaccatagcaagaggacagtgttaactcaaccacaagcccttcagcccttccataggcattgatatcgacttattaacactttccttagttcaatatggggaagcccttcttcactctctctctttcttccctttgct

SEQ ID NO: 114897 - DNA, 199 bp, Glycine max
ttcgagccgaatcggctcgagagttgcttttacaaatatttattactcagttttgttttgatgtttagaaacacatttgagtttgcaaatctaaatctgtttttttggcaaaaaaaataaaaaaggggggccgccgcaaagtgacttagcggacccgggaataaattcgggacaggtacctccgggcgtccaagctttc

SEQ ID NO: 114898 - DNA, 268 bp, Glycine max
aaagcatgccgggttatgtctggagacacaaggattccctaatgccataaaccagccaaattttccatctgttgtggttcgtccgggtgagaagtatcaacataccatgttgtttgagttttcccttgagtgatgtttgttggagtggcataacaatggggtagacatcttgttgtgcatattatgtttgcgttcaaataattgaatgaccatttcattgtccaagtcgtgttgttttatcactcctgaatgttgacatatattgcaa

SEQ ID NO: 114899 - DNA, 247 bp, Glycine max
gtaactgtaaatatgggtggtgcttgttaatcatattcttattcaaacggatgtcattgtacactatgagtatcagatttctattatttcttgttggctcctgacgatactagaaggcctcaattgaactttggtttcaaattccttacaacgaaaatcatgtttttgctagagaggcgtgtactgaaggagtcctttggtgaacttattctttgtttggaagtgtgatattagtaagacaggatac

SEQ ID NO: 114900 - DNA, 162 bp, Glycine max
ctagtatatcttaataactagtttaagatactatgatgagagcacggttcccattactgttgctgggactagcattcctggacttcaggttctgtctcattgagcattgcttagtggcgtcaagtgaggcccaaatacaacaagtatctccagagctgccat

SEQ ID NO: 114901 - DNA, 255 bp, Glycine max
gtagcttgttcataaccggatgaaggataatatatcttgttagcaatcttttcctctgccagttgttccaaaatctcaagtaatcaagtggatttgtacaagctgagttatattttttaagcttagcacattaagaatattgaaaagatttaccttttaaattcatctagagttagtttttactttagccactgtaaaagtcctactgtatctgactagaactagatcaaccagacaaagtggcagcgtgccatt

SEQ ID NO: 114902 - DNA, 230 bp, Glycine max
attaacacttccgtagttcaatatctggaagcccttcacactctctcgtgcttccctttgcttgctactcttgtcgaatgcatgctttgctattagctgccagtcaagctcatcgagtgcgaactcaataaccttaacgcgttcgaaactgaccaccgcgttgagtccgcagtggtttgagtcgtacatggagctctcgacaccctgagctgctatgtgccggtgtcact

SEQ ID NO: 114903 - DNA, 295 bp, Glycine max
cacgcgcacggaactcggctcgcggtacaacttaaagcacaaaagtttataaacataaatatttaacaaactacttatgctccatgcaccactaagcagcttaagcttactatattctcttcagtgggagataaaggctgacattgctgagatcattccacaactcaaatcccactttgatcataatcagggaaatgctttacgtgttaagcagactttgcatgcaaaagcttctgcgagtaaacacttctctttgcaagcatgcactgctaggatgataggccaccatgcagca

SEQ ID NO: 114904 - DNA, 271 bp, Glycine max
atcttggtttgtttattggatggttgatagaaatctcaacaaagtataggtccctttccttttcaattggaatctcatttaatttctctcactgtttccaaactataaagcagtggctctataatcttgtcaagacacttttgagcggtaccactgggcatttgccttggctggttttcttgcattggccatggcagcaataagctggacacttgaaaccagtgaaacctactggttttggcatagcatttggcatattacaatatacaca

SEQ ID NO: 114905 - DNA, 266 bp, Glycine max
acccacttcgtttgatctttgctgccgctcctttctgttgatagctgcttccttgacccttcgtttcatttttccatttcctaacaatttatggcctcacacgttccttccaaccctgcaacactgctacctctgaaaactatcaaagctttggttacttttctctgtacgagtacaaaccacagtttttcaacgtttttaaacccacccatcaggttgaaacctcaggctaggattttggttataacagtgattcaaaccatgct

SEQ ID NO: 114906 - DNA, 263 bp, Glycine max
caacaataagaacagaacaagagttaagaaacagagcatagagtgatttcattggtagcttcatgttgctctgttctgttcctctctccacccaccaaatcactctatgctctgtttcttaactcttgtactgttctattgttggtctcggagcttggaccagcatacatcaacatgaagccaccaacgaaacccatttcgacccctcatccaaccgagatatttccaccaccgttgatgagattcttgagcaacaatgcctc

SEQ ID NO: 114907 - DNA, 278 bp, Glycine max
gaatgaatgagaagtcttagcaaacactctttgtcggttaatgttttccctggtgacagctgcaactcttttttcttcttcttttggggggggagggggtgttgtttggatttggatttggatcttcattaggtgagttttttgtattcttgttgtatctaatgaaaagttttcttttgttttgtttttggttggttttaccgtggtactgaatatgttgtttgttttggtcggttggttcaatcacagatagcttttggtagaacaagttttgcagt

SEQ ID NO: 114908 - DNA, 276 bp, Glycine max
acctccttcattcccttcctacactcttcatgcactattttcattttgctaagggatcgatcataaggaggaagaaatacaaggttttgggacctcttctcttggcttataaaaagtccaaaacaggtgaattcagaaaggatcttgtgggttgttttgtttgtttgtttgttctaatctttgtggataataaataacctcagaattgaactttgttattacactgtatttgactgtttcctttggaggttggttctaaactccttaattttcttg

SEQ ID NO: 114909 - DNA, 271 bp, Glycine max
gagatattcgttagtttaattagagggaaaatttttaagtatggttgtgacttgtgactgatcttgttttattattcaatgcatggctactttgtttaattgaagctctataacttgagacagctaatatcatttatctgtataattatttgctaaaaagggtatattatagtatccttttgttcctttatatatatatattaccttgtacaaggatttcccatcatcattctatgtcctttcgttatgatccctgaactgaagtctaatc

SEQ ID NO: 114910 - DNA, 242 bp, Glycine max
ctccatcttcactgttttcaaacatgcatctcttcttcttctttcttctttcctccatacacctctctctacaactcaaccataccacctcattattctcactctctttccctctcacaccactctctctctccaccagcaccgcctccaagatgatgctactcaactctctccttgcaaacaacaacaactataacacacgacttaaatcaccaccttattcctctccctacaactacaag

SEQ ID NO: 114911 - DNA, 272 bp, Glycine max
tactaggagtgaagtttaccacacatcactcaattagagatctcaattttcatccccaagctagtatattgttgaacttgcattttctctagtctttttacattgtaaccggaaataatgtgatttgcacatttctgggttatgtcatttgcacatttcatgtatggcttaaatgaatgaaaaaaaagacggattcaattggtccaaatttgacgacattggatatgatacttgatgaatttattcaacctgcaaaacttcatttgtactcg

SEQ ID NO: 114912 - DNA, 154 bp, Glycine max
caacttgcaccctccattatttaagttattattttaagtcacattcttggtagaattagaacacagcactctttggctcccacttgctagcaatttttagcttagagatgttattatacaaacgattttcataaggaagaaaaagatggtatac

SEQ ID NO: 114913 - DNA, 202 bp, Glycine max
tggattatctagttgacaatgcgagaaagaagagaaactgcagaaagttaacatctgttggtgcaattcagagatatattaggaaaacaaactgccccacagctggaacagataagtctaacagatgcctgattaaagacgatgatttattggtgtctgcaatattcaggaataaggacttcagcccagagacgatccgggg

SEQ ID NO: 114914 - DNA, 216 bp, Glycine max
ctttttcagtttagccaacaaaatcacacgccctcagcgtctctgtttctctctctgccgctacttattcgtggggttcttcttccttgcatttttattttattatcttggtgtgaatattcactcaaacccatgaaaccattcatgtgcaccatgaacaacaacaacctcaaagattcagataacttccacaactcttcatggaccatagcaaaa

SEQ ID NO: 114915 - DNA, 248 bp, Glycine max
cgaatttctgaacgactatttaaaaacaaatattcgaagtctccgggggatgcattcattgtcttcaatatttctgttcgtatcgttactttcatctctaactactcttcttctgcatcatttctcagttgcagcaccggttacgaaaattcgtggacccgatttctagtgttgagctgcgattgcatgtggaaatcgatttctggatcaatgcatctgacaaacgattggagtaggacatgagtttg

SEQ ID NO: 114916 - DNA, 226 bp, Glycine max
cgggaggttgattgccaatgacaggctggataggtgtgtggggatttatgttgaggtgaggagttcgaatgtgagggcaagtttgcaggcgctaaatttggattaccttgagatttctgtggcggagttcaatgatgtgcagagcatttaggggcatatggcccattgggggaagcatttggagttcgcggtgaagcatttgtttgaggctgagtataagctttgc

SEQ ID NO: 114917 - DNA, 215 bp, Glycine max
  unsure (1)..(215): unsure at all n locations
agatggtgctacgtcaggattacctttgagatacctagaaactctctccataggacacctccgtcaagtagtagtgatggattcagcacaagagtcagtgattttttttnatttttataaaatatttattattattattatcatacatgtgaaaaggaaacgtgaaacataatcaattgtactataaaataattgccgctaaaatctttaatggt

SEQ ID NO: 114918 - DNA, 189 bp, Glycine max
cactgacacagtgacacagtggttctctcacctctccttctctgtgtaactctgccaccactcttcatttccccaagagaaaaagaaaaaggaaaagaaaaaaactgttcaactttttttcaactgaatcaatcactagcttccatttcttcacaggtggaactgtgaatgtgcaccacagctttttga

SEQ ID NO: 114919 - DNA, 142 bp, Glycine max
ttgaaattttgataaaccgcgatcacaggttgccgcaccttaggaccggaaacaacagcgatcgtctcttgattgcacgattctcacaatttctgcatactctctatgtgtacgatttcttaggggaaagaaaatcactctc

SEQ ID NO: 114920 - DNA, 254 bp, Glycine max
ctcgagccgatcaaaactaaacagtttaataattaccactaatttttcaagtggtaagatgacacccaaaattgagcatgcttgtttttttttatgccaaattactattattgtctctgatagtaatcttttactcaatgacagttaatttagagacctaagaatcatggtatttttgcaacctattagagttgttaaccttagagcaaccatttgatgtgagggagatatgtttattttggttatatttctga

SEQ ID NO: 114921 - DNA, 104 bp, Glycine max
ggctcgagtggtccttaaacactcatcagtcaccaccatggccaagcgcgttagttccctttgtattcacgcttttcagtggctgctgcttagctttcagtacc

SEQ ID NO: 114922 - DNA, 248 bp, Glycine max
agtggttacgaccaggggaggaagaccttgttcagaggtttgatccatcgtctccgcttgatacaattggattttttattgccaaatttctcgtggggtctaaagatacctgacaactattcatgagttggcgtggatatatgtttacttcataattgccactgaaggaagccatcaagtttttttatgattggcctctggcaacagtctgagagcttctcatatgtccatttggaaaatgaattaag

SEQ ID NO: 114923 - DNA, 262 bp, Glycine max
atgaattgcctgtatcttttcatatccatgatacaggaaacacgatcgagtagcaagacaagacataaagatgagcataaattattattatagataacataatattatgggagcaggaaaagacgagggtgcatgtgcatgtgcatgatgagaaaagcaattcaagcgatcttgttgtatccagagtcgtttagtctagtcttgctactcgatcgtgtctcctgtatcatggatatgaatatgaattgcctgtttacttttc

SEQ ID NO: 114924 - DNA, 258 bp, Glycine max
ctttgcacagcacacggaacagatggcaagtgattacgaaatagcaagcgattcctgactggatgttcctcgcaccagcagagctacatggaatttagaaacaacatggttgtctcatgcagcagcctcaagcatcagatatcctgctgttgcacaagttgtattactactaaggctactaactttgcacaaattatgaaccttagccagagtgttgttggtgatcttagattcttcctgatgggaagtgtctgaggg

SEQ ID NO: 114925 - DNA, 264 bp, Glycine max
cgtgactgcagttaatgtctgtggggatggagtcctgcaggtttatacccctggcgaagagaggtttctaaaggtcgagaagaagaacattcggatttcccgagattggatcaataacaggtgggttgatatacagggaaagcccgacatttgcagctatttatcttcaaatgccaggtccagcatcaggatgtcagctaattctgcagtggtagatggatctatgtctgattgctctgcaatattagaaagtaaaccaacacc

SEQ ID NO: 114926 - DNA, 142 bp, Glycine max
caacttgcacccaccattatttaagttattattttaagtcacattcttggtagaattagaacacagcactctttggctcccacttgctagcaatttttagcttagagatgtattatacaaacgattttcatgaggaagaaaa

SEQ ID NO: 114927 - DNA, 265 bp, Glycine max
gttgagtagcaaagcaatgagcgcagtgggtgggtttactctcactctcagtcccatcaatttgaaactcccccttctcccttccaatcgcctctttaaccgcaccccttcaaatcttccatttccttctccctacgctccaacgacgagcaacaacccctcggcctcgacatcgccgcactaaggtcagcttccgtgaggctcattgatgggaatcagatcatggtcggagttgtgtccaagactctggcccgtcaaatggccc

SEQ ID NO: 114928 - DNA, 303 bp, Glycine max
atgggcaccaccttgatgagatgctcccacgcaaacgcaatcttcagagctctcaaacccaaacctcgcaattcttcactgccactttcttcaatggccatcaacaaaggtgtgactgtggatccagctatgataaagcagggatttaagagagcatttgctgctccgtggcctgaaaagctgcgctaccagggagatgggaggccattttggaaacttgtagtttctgaagccactggttgtggagatgaagattattttgaggaagtttatgagtactatgcaaaaggtgatgcgtggcat

SEQ ID NO: 114929 - DNA, 188 bp, Glycine max
  unsure (1)..(188): unsure at all n locations
tatctttctanttggcttcagtttttgcagtgaagattgcggtgactttaacatcaggcctctttatggctttgctatttgctggttaaagcttagtgctgctcttcagcctagagtacctgaagcttaccttcaagatggaagctttgaggagcagccaaaccccaaagacctccagaaaacaaagc

SEQ ID NO: 114930 - DNA, 240 bp, Glycine max
cctggacattctgcaggaggtggctttgccaacagggcatctgcgggattaggtggtggtggtggtgcttctgtcgaatgctataaatgtcatcaaagtggtcattatgtaagagattgtcctggtttcagtgcagcacctccatcatcatatgggagcaattcaggtggtggtggttctggcgaatgctttaaatgccatcaaactggccactgggcaagagaatttcctggtctcagt

SEQ ID NO: 114931 - DNA, 282 bp, Glycine max
attagggtgcactcagccagtcttgtatgggacattatagagcacaataagtctgtgacatgctgttcacttcatgagccgtcagacagccttttaagcggttccactggtaaaaccatgtgggtttggaaaatgatccagagaaagctggaatgtgttgaagttgtagcattgaaggaaccgattcatcatttgcgtgcacatggtgaaacaatttttgcaattagcgagagccacggattaaagctagttaatggatcaagagtgaccaaagatattttg

SEQ ID NO: 114932 - DNA, 266 bp, Glycine max
gttcagttatatcaccgcgttgaatcgttgtagacgtcatggttagtgctagacggtatatgtgtctgatacatgaagtaaccgtacgaagtacgacaggctccgtagcttacggtatgccagcatcgtacggtgggattgttacgattcgctcctaagaatctggtccaatggaacatcgcttctgggttgggggtggtcccgctgtattctagctccctctaaaatactgtcacataagactactatggatgaacctttggtct

SEQ ID NO: 114933 - DNA, 265 bp, Glycine max
tctcgagccgattcggctcgagagtaaatcgaaagggttcatatttcgattgctattagtttagtaatcgcaggagataaaaatgttcctttgaaatatagcaaagatcggagtgttgtaatgacagtggcagccactggaatattaaggaaaggtggtgggttgttggagaggccaaccatagagacaacatcacctggtcgggaatctgaatttgacttgaggaaatcgcggaaacatccccacgctaccgagttttgctgca

SEQ ID NO: 114934 - DNA, 257 bp, Glycine max
ctcgagccggttttcgtctccacttgtaactgcgccttagcttctttttctcttctccgcaacggcgacgacgacgacgttttggttttctgcttaattcgtaaagtgtttcggtggtttttagcttctgcttctttgctggttttcgcaacgcctgtaactgtgccttagcttcgttctctgctgcgcaacgggcgatgttttgggccttttcctttgtcctcttattgcggaaagtgttccgtgggtttagcttc

SEQ ID NO: 114935 - DNA, 276 bp, Glycine max
atttagcaagtggaggtgaagatggtgttgtttgcatatggcgtgttacatcactggataagtccagtatttgttccaccacagaagacagtaattctaatagtaaagtggaatgtgacaactcttctcctcggaacaaacactcaagtcaacccttcattttccttccaaatagtatttttcaaattgaggaatcaccactgccacaattctttggtcattccagtgatgtcttggatttggcttggtctaattcagatattctcctttcatctt

SEQ ID NO: 114936 - DNA, 271 bp, Glycine max
attgtatgaccccctggcaatgcctgatgtcgataaattaaatgctgcatatctttcaatacacggaagttccattttagggcggtccctttggcagagaacttcacaatctttacagcaagcctaggatctatatgtattgtcaggtcaattttaggcattaaggcttcaaaatatggctgtcttacaattttgcgtttgtttcaacatgagtggaagagcatgttaattagatcaatggtagtattttatgatgtaatactgaatatca

SEQ ID NO: 114937 - DNA, 268 bp, Glycine max
acagaaactgaacatacaagctaactataattttttactacaccagtataccaataccatgatgatgttttaattgaattcgttaagtctcttcagaatttggtatactgctacagtcagaaatcgtagctagcttgtttgttcagtttctgaacttagttaaaatatcatcaggcattggtatactactatagttagcttgcttgtacagtttctgaactcattctgaccaggagtttgcacatggcctatgaatatatcaatggaa

SEQ ID NO: 114938 - DNA, 245 bp, Glycine max
ggaagaagaaggaatcggcggtgttcaactgacgatcgcatctcaaagtttggtcacgatcgttgctttgcttgttcgacaccgaggagatgtaagcatgcaaaatggactggatggcaatgatctacgattgaagctcatgcgaaaaagtgcattggggcaggctgacagcaatggcagtaagaggcatatggacctccgtgaaaagctgtcaaaggcaagtcaccctctggctaacacttata

SEQ ID NO: 114939 - DNA, 216 bp, Glycine max
ctcgagccgcttaggtttcatctttacaaggagaacaaagatacccacgaagccttgggggttattggaaatatgctcagtgtccagccaaaatcatttggatttgcgggtacaaaggacaagcgtgctgtcacgaccaaagggttactgtttacaagcagcgagcaagtcggctagcttcccttaacaagcgcttgttcggtattaaactgggtg

SEQ ID NO: 114940 - DNA, 243 bp, Glycine max
tacctcgagccgattcggctcgagctaaagtcaaactcaatcactctacttctctcccaaccactcttcgtctacgtcaatcacttcagccctcgccagaagatctctgcagatttcatcgggctcctcccattgctcgcctcattgtgaccagcagtgctggaaccgaccacatagacttggttgagtgcagccgccatgatattcaggttgtctctgttccaggagatcaagccaaggatg

SEQ ID NO: 114941 - DNA, 241 bp, Glycine max
gcaaaattgaagagatttaagacctctgtcttttctgttgaattagattccataatcttccattagtttccattctgccactttgctacaaagttcttctcctctttggaacacgcaattttaggcctatgcattcagcaagttctgcaaacaaaattgagagttttactgtcaatgaggttgaagcactgtttgtgctttttaggagcatcagcaattctattgtcaatgatggactgct

SEQ ID NO: 114942 - DNA, 238 bp, Glycine max
ctcgagccgaaataatcaagttttgaagaaagaaatcttcactcactatgctcctctgctgcaatagtacggtaaaatgaatcactgtgttccagatttcgaaacccaaatggacgacgacttagaattctcattcccgtctcaaagaaaccctccacgcaaaacgacgagatcatggaactgttatggcaaaacggccaggtcgtgatgcaaagccagaaccaacgacccttcagaa

SEQ ID NO: 114943 - DNA, 236 bp, Glycine max
atcattgtctcaaaaaccttctctctcaacaaaacctacaacaacaacaaaagaagagaaattttttagaacaatggaggcatcaaagatgaagtttttcttggttttggtgattgccatgttggcgatggtagcaactggggtttcagctgctgaggcacctgccccaggtccttcatccgatgccaccgccttctttgtacccactgctcttgcttctctctttgttcttgcat

SEQ ID NO: 114944 - DNA, 257 bp, Glycine max
ctcattcaaaatcctactttctcgctaggttgggttatacagagcctcatagagagcttgaggagaactctggtgagaaatggcagtctctacactcgccagcttcttcatcataccgccctcgcacttgccgcttcatctcgtcctcaattcagactcttttcctccaatgaagaccccccaccggttccccatatcgacgacgtgaacaacaaagagctgagttcgcagatcgagacctacttcaagggcgacga

SEQ ID NO: 114945 - DNA, 235 bp, Glycine max
aaaaaacattgcttctaggtacttggtgtccaaaactcgaggatgtccacagcattattcaacaccagacgaacaatttttttttttttaattaaaaataccaaacacactagttttctttgtaacttcaaccgaacattttaattaaccatctttcataatctttgaccccaagcattcttcctgatttttatacatgctcaatggttctattttttcggttcatgatttattg

SEQ ID NO: 114946 - DNA, 253 bp, Glycine max
tatcgagccgaatcggctcgaggaggcggaaaataatgcagagagatgttgagattgaggtagtgactgttgacagaactggaactttcttgggttccttatgggagtcaaggaccaatatggcaattacactgctcgaagctggtcttgcaaagctgcaaacctcctttggcagtgacagaattcctgattttcatcttctggagcatgtggcaacaatctgccaagaagcaaaagctgagaatttgggaga

SEQ ID NO: 114947 - DNA, 251 bp, Glycine max
ggtgggtgcaatccaaggattgatgattcctatagtccgacattttccgcgcaagctgaaataattgacgatgaagctgtccccattctcgatgggcttacgctctacgggcccaagtgggacatcgtaaaacgctgggctgggcgaattaaaaaaagtatcatgctatgcgatccattcattatcacatgagaggagagagggaagaagagaagattttcatcagttgagttgagagaaggaaagggaaa

SEQ ID NO: 114948 - DNA, 256 bp, Glycine max
gacaaatttcacgtgaaattaaccaggacataatacaatcaaacatcatttaagaatctggatcacaattttccagggtcaagcaatccaactctgaaaagacagacaccattgaacatatgtgaatgagatcaataaaaattacaccagagttggctaacacttaggcctgtccatcatttccttcccaacactgaagtttgaacacactcccaagacaatcaatcagtttaccaagcaaccatttcaacgccca

SEQ ID NO: 114949 - DNA, 214 bp, Glycine max
atacaatacacattggctgctgggtcggtatagcatctgtgactgtcataggtatgtgcagttgaatctccaagaagtgctcgtcatgcttattatgctgctacacaatgtgctcgcaaaagcactcctccatgcatgagatcacatcgtcttatgactacggtgattgtgcatcatgttcgaacggtacccatgtggatgttgtgattactgg

SEQ ID NO: 114950 - DNA, 251 bp, Glycine max
agaacatgcacacttggtggggtaaaaagtccagcaagaccaaggaccaacagcaccaacaacaacaagaccaccctcatggcgccgccgcaaccaccaccctccttcacttcaattttatcaagcccaagcccaaccccaagcccagcaagagcttcgacgacgtcgtgagaaactcccctcgtgccagccgcgatttcggttcctccgccgccgtcgaccaaggtcttcccttgcctcgcccctccgtc

SEQ ID NO: 114951 - DNA, 251 bp, Glycine max
gagattaaacaaaacaccacaacatgggaggtcataggcagaagaagtcttcttccggtttcttctctattttcaacattttctcatcaaggaagcccagaggagggtactatgatgcctctgattcggggcgcaaggtctggcctagcgattacgacaaaggtaactggggtgttgctgaacccaatatcgacatgaaagctgaagctttcattgccgagtatcagaaacgtgtttcagaatctgcactc

SEQ ID NO: 114952 - DNA, 203 bp, Glycine max
gtagatgctgtagccaccaaaattttcctctcaaagtaggtcatcactcagaagccaataacaataactaatggcaacaccagcagggaacgttcgttgtaaagcgactcgacctgctcgagaattacgagttacaccgagtccaccagaacaaccgtcatcagctacacggccaattcgacgtgaaccggatccgagaaagt

SEQ ID NO: 114953 - DNA, 249 bp, Glycine max
ttacaatggacacacagacaatattttgtacaagttttcttgggttaacgttgcggctctgcatgaaacaccaccttctgtgcctcaaccaaaaatctcccttctaaccttattcttcttctcttccttcaccatcattgcgcatgcaattgttcctcaaaacgaaaccttcaaatttgagaactcaggtgaacttggaccctacatcgttgagtacggtgcagattacagaatgataagcatcttcaa

SEQ ID NO: 114954 - DNA, 199 bp, Glycine max
ggaccagctaaacccaatcaacgcttgctctttgctctttgcactgattactatttttcgctgactccggcgagatccgcgtcacttctccagcatcacttgtacaagttccgtccaccggcgttgccctgtaatctggctcctcaatctccgattctgcaatacacactctctcgtaccacatcgaacatgcgatcca

SEQ ID NO: 114955 - DNA, 239 bp, Glycine max
ggagtttctcaaggtcccgtatcgatgatgaaggcactttctcacagacacactatcataggttcagtgtgctatacttggatactcatatgtctgacctgattcagcactatgccgatgtataagtcgaggtagcagatcctgttgtctcatttggtgatactgttgttgaatcttcctcagtggaatgttttgctgaaacaccatacaaggggaataaagtaactatggttgctgat

SEQ ID NO: 114956 - DNA, 243 bp, Glycine max
atgggattgttgcttatggcttgtaatcactcaaccttgctttcaatgacttctccaactctcaattctcatttatctttgctgagtttgtgagcctcacacacctcaacttgtcctcttcttactttaaaggtgaaattagaatcacttgatctctcttttaattacaccagttaaagtggaaagaaagcagttggatgagttttaaggcagcttgtcttggatgaaacagatatgtcttca

SEQ ID NO: 114957 - DNA, 249 bp, Glycine max
ggcattccgtaaaggcggtgaagtcatggggatggaagttcttggtgccaccatgtacacctgtgttgtgtgggtggtgaattgccaaatggcattatctatcagttacttcacttacatacaacatatattcatctggggaagcagtctattctggtatatattcctcctggcatatggagccatagacccttccttctcaaccacagtctataaggtcttcattgaagctcttgcaccagccccatt

SEQ ID NO: 114958 - DNA, 270 bp, Glycine max
aagcagtggtcgttctgagcaatatttgtcgatctggaatgaaccttctcgcatgctgcatgatttcatccccacaagttctgcacgttaatttgtttctgctacttctgctgcagggaagcaataaatgagtttgcacctgcgatgctagaagtatctagtgttgttggccagcattctagcacaaaacctgggctacccagaggatgcacttgaaaaactttgtgatgctggtgcatgctttctgagattaaatcactatccatgctg

SEQ ID NO: 114959 - DNA, 273 bp, Glycine max
gagaaagggagaaaaaaaaaggtcttattattctgtcatctttcacattaatgatcaatatacaccgatcagttcttcattttattcattgttttttatgtatgtatttatttatgttgttgatactttacagaaatcaatgttaagcaacatatcaagcatggctgtgttaattgaacacagtttccttgaagcatacggtggagaatcaagagatggctcttcaactgcaaaattctccactggggacataatatccttgaactcagcagt

SEQ ID NO: 114960 - DNA, 265 bp, Glycine max
attaattttcactgatgaactcccaaagaagatacatgagtcaacaaaactaaattcatgtacaccaggttgttctacacatatatgctggaaacctttccgaattttcaaattcacatttgacccatcaggttgagtcaggtaaccatcaacattgtgagtggagataacattgacccagtagcctttttgaacaaaaaggattccttctaagtcctcagcaccaacatttacatctatgaagctctgttcccagcaccaatta

SEQ ID NO: 114961 - DNA, 130 bp, Glycine max
ggcacctctcacttatctctacttcccacttttcctcctctttgccttaacacactcccgaagcacatcatactcctccaaaacgacactcctcgacgtcgtttcctcccgccaaaacgcacacaatgcc

SEQ ID NO: 114962 - DNA, 270 bp, Glycine max
gttaatagtatgtgaactacttaaagccaacttatatgagtttcacaaatttaatcgagaatcagggggtgaagtgtatttcacgatgccaaggttgcaggtttgtagtgtgccgtgatatgttctttttatatttacatatcatgctgtttgtactgttatctttagttttcatcctttctgctagtctaatactgtcataaacacttttcaacttatgtgagcagtcaattaccattcagtgtttggaagcacttcagtttttgcaca

SEQ ID NO: 114963 - DNA, 267 bp, Glycine max
  unsure (1)..(267): unsure at all n locations
atctgttctgtcccgcgggagcagacgacctgtcttcatcgccaaacaacctcaaaaacattcatcaacgttcactattaatccatccatcattaagtaagaaaataaggttcgatttttttatctttgttttgcttctgatccatcatggaggtgccgagttcctgggatgcccttcgcaaacagctgacgctgcagagagtgatctagagtcttggattgagcgtttactanaacaactccaacaagtaaacacacagatgctag

SEQ ID NO: 114964 - DNA, 266 bp, Glycine max
cggctcgaggttactggacacttgatgcaattgattatagaattgctaggttgttggataacgccacttcgggtaaagtaccgtacaaattatcaggaataactttaaatccagggagagcttacagatacgggaaatcaatgctattaatgaattatagcggggagatacaatttctcaagtgggatgaggatgaccggcaatgggataaacgctggtcaaggcctgctgacaagtgcgacatatataactgttgcgggagcttc

SEQ ID NO: 114965 - DNA, 256 bp, Glycine max
ctcgagccgggttcggcctctttttgatctcttaggaaaaaggtttcatttgtaaaaccactattcctttctgttatttttcttacttaaattgctctgtaggagaaaggaatttatgttatgattttataatatcgaaattatgtatgtttcacaaactccttcagagttgctagatgatggtaaggtagattctattggttttagttgctgttgcctttgatctcagaccgaataggtctaaaactcaaatttt

SEQ ID NO: 114966 - DNA, 256 bp, Glycine max
gaggtggttaacttatatccttgcagctccttttgttctccattcacaaggaatagtcaccaaataaagcacaagttggtttttctattttccttttctttgttttgtaatcatcaccaaacccatatttggtgagtatgagaaattattaaatgatcccataccatcatagtctcaatcaatctccacgtgacacataatcgagttttattaactctttcatgcaaagtgaaaagctcaaccatatgtcacatgg

SEQ ID NO: 114967 - DNA, 122 bp, Glycine max
atttgtaacttacgctactacactgtagttgttccaacacacatatttatggcaacaacgttaatttgatgttctacttgggtaaggtggagtcaagagtatttaagggtgtgatttgatat

SEQ ID NO: 114968 - DNA, 269 bp, Glycine max
gtttacctatatacgttgattcaatgctcctggcatatgaatgttcacgtgtatataacacttagattgtccttgtagtattggaatcagcttcgcgtaaatatggagatttgacctgtcctaattgtgggaacttcaacttttcttttagaactgtttgcaaccagggacactgtcgtgccccaagaccatccctagctgtaactccaccagcccccgttataggcccatatagaggcagtcatcccgtctaccatggtggttttggc

SEQ ID NO: 114969 - DNA, 268 bp, Glycine max
gttgaaagagagagtctcgtgatttgaggaggccacacacacccctctcccatctccgaaacaaaagcttcaaatttcggtcacaatttaaacaaaaggagatttatttaaaaacctttgtttgtattaaatacaagatcagatctttgggtgtggcaaagcatagagagatagaagagggaagaagcctcagtgggtgtgtgattttgaagtaaaaggtgaagtttttgaatagatcaaaggtgatatcgtgttctgcttcatctgg

SEQ ID NO: 114970 - DNA, 276 bp, Glycine max
agtacttagcaaaaagcaagttcctgaagaatatacaactaaggagatggaagagcgcactggaagaaaggtagcattgagtcaaatcttaaatgaggcattaaacagtgttgaaagtgcaaacagaaagcaacatgctgctgaagaggcacttcggagatggattcctcaggatgatctaagaggtcagccagtgtacaactatattaagcccaagaagttcaatcaagctggaaattactcagattctcctctaccagatgtaaccaggtcgat

SEQ ID NO: 114971 - DNA, 217 bp, Glycine max
gtcatctccttcgctagctgcgagtgtgtttgattgagcgctcatgcttgcagtatctagcttcggtggcacctgacagactcggaagtgcgtccaagggccactactgctgctgaagatacaacatgtacccatccctgaggtacaccgattcatgcaacaacgagaccttgggcacgcgctcggcatccattaacgctcacatcaccagttctta

SEQ ID NO: 114972 - DNA, 267 bp, Glycine max
cggctcgagaaaattagttcgtcgcatagcgaaggaaggtataaaaaatactatgaatactgagtcatctgtattagatgagacaaatagtgataagcaagtttctcgtagtaatgaattgaggaaattatatatgcgaaaaactttgcaaatttctacagttagaccatcaattgtgtgtttgaagaaaaagcttattattcttgagctaaatgggctgcttgtggacatagtttctccccctccaaagtaccgtaaaccagatgc

SEQ ID NO: 114973 - DNA, 273 bp, Glycine max
aatgtctataaaagtgcgcgtaacctaagcttgagccatttgctgattatcagaagtttgctgttgttgtattcccaaagccggaagagctcaagatacggtatgataaaagatttacagaaatggggaaagaagtgccacctgatgctgtgaataagatgatagctaattatgttctgcctaaaagcagcgatatgccttgttctgatgaatggttttatcagaatctttcatatatgatcttgtaataactcatcaacatgatcccctgga

SEQ ID NO: 114974 - DNA, 263 bp, Glycine max
atccggtgctctaatctctgcattctgtgatggctccaaaaccgataacgagtcccgtccccgattcgtggtaccccacgctctccgtcttcacactgcgccatcggcctcgtcttaaccgactctttcttcatttatgacgcaacatctgctaggaaaagtcgttcacttgttcaggagctgacaactggtgcagtggcttcagtcttcttgatagctttaaatgaaaattgcattggacgttttagtttaatatccgactc

SEQ ID NO: 114975 - DNA, 263 bp, Glycine max
tatctcactttcatactcacccttattgcagtatgttgacctcaatggcaccaagttcggcagtgccagatgaacaggcaagcccctgaataatgctgtccaatttctgattgtttgattttcattttgtttttgatagagaggtttcccttctgtattgacatgctaatcctttttttggtaaaaatgagagataatatttataattgatacacttacctaccatcaataaagggtttctgcaattttcactcaaacaaaat

SEQ ID NO: 114976 - DNA, 153 bp, Glycine max
atccaagccatcttatatctccggtatgattgagacttgagagactactactactgctggaagttgcaacaggagaaatattacccttcctgtagaagggatttcatattccacagggattccgcgagcttgacacggacaagtgggagtttt

SEQ ID NO: 114977 - DNA, 276 bp, Glycine max
tctcgagcagattcggatcgagccttatttatgttgttctgttgcgcctgttcatttcttctagatttagctcttggcgctgttaaatttggtgctgaacaacgtggttttgtttttcctgaatttcttttgctaaaggcgagtattttgagtccgtgatgaagatttatctgtgccggaggaatgtgatatgttttgctcgtcggtgacggcgcaattcctctaagaagttctgagctcaacattcaatttttgtaacctttgattgctatttta

SEQ ID NO: 114978 - DNA, 152 bp, Glycine max
gatttgatggaagagcactagaatcccctgcaccaattgctgaccaaggagtcatcactcagctttctgatcagatttcaacattagatgaaagaatggatgaattcacctcccgtattgaagagctgaattcaaagttcgctatcagagaa

SEQ ID NO: 114979 - DNA, 279 bp, Glycine max
tgttggtggaactagtagcttggatgactattgcttgcctaattttgacagcatgggccttggatatgatcagaccctcagttttccaggccaagtttccgactctttgatctgtgacactgattcaatggctcatgcttttagtgatgaagaccatctgcagttttttgatactgatcgtcaatcgcatgttcaagcagatctacagagtgctcattgatagcttcatgttggcacgtcccagagccaatggtcgtgcacaaaggagatggagaaagg

SEQ ID NO: 114980 - DNA, 130 bp, Glycine max
agaagaggtgcgcaagatcgtcatcaagttcggcaagaacggcgacggcgaggatctcgtgcgcggagtgtaaggagatgatggcggcgctgggatccaaaacgacgtcggacaaggtgaagagcatgat

SEQ ID NO: 114981 - DNA, 157 bp, Glycine max
gcattttggagcttcataatcgaatggggtttgcacaagcattcgattttctgggtagagtctcgggctttcgcttcctctgactgtgtgcttattagagtggccaggataagagttctagaagtctagtacttacttactcttcacattcctaaac

SEQ ID NO: 114982 - DNA, 146 bp, Glycine max
cggctcgaggctagccatctgcttcaaagtttaaattctaagaaacaagtaaaccttagaagtcagaagaagaagaggttttgaatttaaagttatggaatcgtcgtccattggaatccgaagatatgaagagcttccaacggtta

SEQ ID NO: 114983 - DNA, 253 bp, Glycine max
ctcgagccgcgaactctgaggtctctacgaataactctttcttcttcactttgactttgaactgctcaattcaattgttttaactttttggcagggtaatggtcagaaaccgagattggaaacgtttcagttattctcttcctccgcttccgccttcggaatcttcgacgatgctgcgcaacaagttcctcatatacctcctcctccctgcgttgaagtccttgcttctgaggttccttcatccatcaaacac

SEQ ID NO: 114984 - DNA, 277 bp, Glycine max
ctataatggacactactaccatagccattatgatactgaaagtaaccaaatacaaaatgatgagatcattgcacgggctcttcaagaagaattttcccggctagatattgctgagtgttcaggatattcacagacagatgaagaacagttccatgcttctgagcctacatgtgattggaataacacatcgatgatgaactactgttcagatttttttgtattcaggtcatgattatgcttacaatggagttggtgacataaaaccttctagttcatc

SEQ ID NO: 114985 - DNA, 273 bp, Glycine max
aaggaatacaaggagcggaatgttgaagtggaaaatgaagcttttgaccgatacatgcagaatgtagatttactggaggtggtattagctgtgaagtcgttggatgagaatgtgccctctggattggagtctaatcctactacaatggagagcaatgaggcaatgatccctgggttaaaattgcagctatgatcaaattctatgagaagtgatggtttgagaatgagaatacaacaaattgtagacgagggattaaagaagctcaagaaaagt

SEQ ID NO: 114986 - DNA, 168 bp, Glycine max
ccccttcctacaagttacaaacttctataaaactaatgaacctaaatttcttgacttgagaggagctgatgctgcaatttgcttgttaagtagcccattaattttgtgacaagttgcaatgaatcatctaaaagttatactggaagtctgatctcttccactgcaaaa

SEQ ID NO: 114987 - DNA, 270 bp, Glycine max
tgggaaggccattggtggaggcagtggaacacaaggaggatttctatgagcaccaagagccaagtggatgtgggtatggatgctttcagggttttgggttgagttggtgtagaagccatgaagaaggtaaaggcctggtggagcaaagggcaattcgtggctgagttgcaagttgaggaagataaaggagttttcagaagtgattgcaggccccaagtggaaaacattcatcagaaagataagcgggtatggaaggaagcagcagcagaa

SEQ ID NO: 114988 - DNA, 226 bp, Glycine max
  unsure (1)..(226): unsure at all n locations
agcggatctaggcatgtggttggctgncgcagtacagtagataaggaaacactgcctgctcgtacgatagtcgtccttgctatgacgatgttcaggataatgcgggctgctctacgtgccgttgctccggtagttcacaatatgctcatgaggctgctggtaatatcagttactctcctgttcgtcgtttatctgctcagctaacggcaatgagggaatcaattgc

SEQ ID NO: 114989 - DNA, 274 bp, Glycine max
gaaattctgattggaagtatgttactcagtgaattgagttttgttggagggagggatcaacatctcctcccagtcccatccattaagaggagggaatgcacacagccaaattgttcagtaatgaaacatgtgaatactcttctcaatgatcaacgaaggtgggagtgagtgctatccaaatgtacgagaaacttgaaacaggagctgtgccgcttgaatcaaaatccattccatatatggtaacaaagaaccaaagttgacagagaccttggtg

SEQ ID NO: 114990 - DNA, 99 bp, Glycine max
cattaatctcccattcatttcctctgcatctgtactctccaaaatggcgtccttagaggaggagctcttcgcttcaaccccaggcaagctcaagatcgc

SEQ ID NO: 114991 - DNA, 131 bp, Glycine max
  unsure (1)..(131): unsure at all n locations
gcgcacgtgagctcgcaactctngccgagatccagccgcgacggcgcctttctgtagcccactctagcgtggaacacaggttccagtaaaaaagcttgcgacatgatgtaattactgatcaggagaaagtg

SEQ ID NO: 114992 - DNA, 146 bp, Glycine max
gtatagggataagagagcaccacgtaatgatggatgcgctgataaaggtgcagctccacgcaccacaaccatgcgaaacgggtctctcgtcttagggcatgtcagaggactcacatgcactgcgtcaacggccaccctacttgatt

SEQ ID NO: 114993 - DNA, 264 bp, Glycine max
  unsure (1)..(264): unsure at all n locations
ccctcgagccgaatccgctcgatccnctcgagcaaaaagcaccctctacttcctctcctccccatttctttttctctcttcactctcacccttatctcctccattgcagcttctgctttttcttcaaatcaacaaacaaacaaaccatccccatttcatttcagaagaaacccttttctatcccaaggctcctgaaccgttgtgctttttttgttttttaaatttcttttaaagcacaactgtttcttcctacggtggaacatt

SEQ ID NO: 114994 - DNA, 259 bp, Glycine max
acagtgtggtaaaagaagtcaacagtgaaagcaatggtatagggaatactggacgttcatgataacatgaacaaacctactgcagataaagaaacggcccctcccttacccacaggcaaaaagaaagtacaagctgataaaagtggttctgttaatggacgttcattagcaagcctttggggccgtgcatctgcaaaacccaagccttgctcctcatcagcagaacataataacaaaatttcaaatcctcttgtatcta

SEQ ID NO: 114995 - DNA, 285 bp, Glycine max
ctgttttgtagtctttatttacgactcctttcatttttcgtactcaatgattgcaattcatcgttttgggtactgtttgaggtttaaacgttttgaaagtttggatctttaatctactggttttgtttccgtcacggatgtcttcagaatctggtccttgctcactagttagaatttgagtggggtaaattagaactgttccggtttgtggaattgctcatcaatatcacattcccataagttgggatctgtttcttctaaagtcaacacttgctttataggata

SEQ ID NO: 114996 - DNA, 283 bp, Glycine max
gcgatttatcactgtcgaattaaatcgaagattcagaaaaagaaaagcattttacgttcgaagtcgagtcgaagagttttgggagccaaatgggtcttctgagcatcataaggaaaatcaagcggaaagagaaggaaatgcgaattctaatggtgtaagttttttcttcaattccaatttctctttgattctctccattcataatacattgatatcttgaatcagttgttgttctgcagcggattggacaattctgggaaaaccacaatcgttctaaagataa

SEQ ID NO: 114997 - DNA, 271 bp, Glycine max
attcggatcatgcagtggactttaccccaaagtatgtggaaggtttatgagatactgaaaggcccagaggggagaactttgaggttatgctgctaaccccaaaagatgatgacgggacaaacacggagactaacagaaaggaggacagaaacaacctggctttcaaggaaaatctgtgggaagcagctcggtacttcgagctttcaacctccccatttggttattattggaccaatgggcaaactcttcttcaatgttgctgaggcattga

SEQ ID NO: 114998 - DNA, 275 bp, Glycine max
ctcgagccgaaacggagaaagcaacgtgtgaaggtttttagggatggagatattggtgttacggtttctgtaaggggggttagataggtaggtagtgatgtcgttagttttaaaacgctgttaaagacggaagggtggggtataagaataagaaatagaaatgtgggtctggtatatgtgaatctagaatgtgtagtttgatgggggtttcgtatggtagaagaaagtttgatgcgttgtgtatgttttaggtgatgttggtgtgatgttcagtt

SEQ ID NO: 114999 - DNA, 284 bp, Glycine max
cggctcgaggcatttacatctgaagaagtatatctgaaggtgcttgatctgcaaaccaaggtactcgtctcttctacttgtctaaatcacaagacagtgtaattgcatgtgattttacaggtctcagaaagcagagacactcactgaagaaaggcatttacagggtgccagtattaatagaattcccaagcccaaacctaaggttcagaagcctgtaaagaacgaaactgagagcagcagtgcgcagaatacagagacttctgattctaactcagctgatagtt

SEQ ID NO: 115000 - DNA, 265 bp, Glycine max
tggaccgtataatggaacgtggcgctcgatggcacagaagatgggaaaatatgattgctaacagttgtgagatgactagacaatgaaaacatgtcagacgcattggcgcctgaactggtaagcatctactgcctctgtggagatactaactagatgccatattactacatccaactgctgaaattcacaggtaattctttaccgcaggacacaaactgtccccatgactgtggatcagtagccggatagacaagatgtacttttg

SEQ ID NO: 115001 - DNA, 285 bp, Glycine max
ctcgagccgattctcattgtactccaaacacctcttcaacacctcttcatcctcaacaaacaccacctccaacgacaacacacaacacaaaccaaacgactaactaacagcaaaacgcaaacactctcctcaaaacgacaaccgccacaaaacaacacaaccaccgcccctcgccgccttcatcttccctctctctctcaagggtcgatggctgaactcggaaacaacaacaacggcgccaacacgacgtcgtctaggttctccttcttcaaccgctccctcacc

SEQ ID NO: 115002 - DNA, 277 bp, Glycine max
cattggttcaattccggctgcccaaaaacacgctgcgtagtctgcttagcctgaaccggtcacttcggcggcaagaaaacgtggtggagaatgcatcccatgcggagacactcactgaacgccctctttgagtcctcgccgccacgagaggagcgtgtgcatgaacatgaaactgactccaatgttggctaccgttgccgttcaccagtcttcttggagtaatgaaaacggttcaaccaacccgcctctcgccggttttcgttgcacgtcctgttaa

SEQ ID NO: 115003 - DNA, 280 bp, Glycine max
ggactacatcaagaggcagcaattgcgtgaacttgctttgctgaattcaaatttcagagaagagagtcctggaccaagtggtagtgtgtccccattcaactctagtggaatgaaacgtgcaaagacgggtcgctgagttgttcttgattgatggtgtagatgatgagtattgtggtcctccagccattgattgctgggaatatcttccagtacatgatgtctcattcaatgcaagctataaaagaataggctaacaattcttgctggttagcactctggt

SEQ ID NO: 115004 - DNA, 256 bp, Glycine max
attcatttcttcctccgtcacattctcgaattggcgtgtgcctcttgctatccctcaaaggtcttttgaagcagagcaatggacttctttaactagcgacatccaccaagacacgatgcgtaccagcacacgcatcaggagcacccacaagccacgaacagaccacaactatcaccccagcacaaacaaaggcgaacgaggagctaaaggccaattttgaagatgcccaatttgatttgcatttagttttccaggg

SEQ ID NO: 115005 - DNA, 285 bp, Glycine max
actaaagactaaagaaagacgaagcaatctctgtatctgtgtgcgtgcgtgcgtgttttcatctatctgtcagataaattacataatatcccaaaccatcgaaaggaagcaacgaagaaaaaaaaaataaatgaaaagcgtagagaaccaaatactgctcccttttgtttgcatatccatgtgagagatctgacacattctcttcaaatatagatgcgtggattgttcgccatggtggtttctactgagtcacaaaatcggtgagtgagcgagtgaactcaatgg

SEQ ID NO: 115006 - DNA, 243 bp, Glycine max
ggcatatctacagccatgctaagagaaagaacctcggttttggtgcaacccataaggagcaggctgagctgagctgagtctcgttctatctctctcttaggccgcctctatatctgtgtcataatctcacgccttcccttcttcattttcattcagatagattgcagtgtccagagagcccggctcgacttcggaaccccatagtaatctctctttgacattcataggaaacacacgccatgg

SEQ ID NO: 115007 - DNA, 290 bp, Glycine max
tcgtagtcttactcgttttgtttttgttatctctaatctcttggttcgcgttgcagattagatgattttgtatctttggttctcttttaggatcagtggattttagagatttagctcacaagttctctcgttgtattgtctctattggaaatctcgggcttcagctgctgtggaaaggttcgctaccttgccattgtcatagaaagtgaagaagcttatcagatttccagagttgttaaacttttgcagtggctggacattattggtgtaaagaatgtgtgcctctatga

SEQ ID NO: 115008 - DNA, 281 bp, Glycine max
gttcgaactcgggggtatttttatgcaggagttgtggctcggtagctacaaatccaaaatcaaaaaaaaaaaaaaagggaagattggattttgaaaaagttgggcggttgaaaattaccaggatacggggatctactttagacatgattcgttatctattttaacacttgtcccccatttccagttgaggacccacaaaaacacgggtttttcgtaaacatttccgggcataataatttattcccccccatatggggttttgaaaaggggaaacgggggga

SEQ ID NO: 115009 - DNA, 239 bp, Glycine max
aggtgcaaggagtaagattctggtgaggagttgccgagctgacgtgatgaagttgacattatttttggagagagttgtgttttgtaatcaactcctccgtagttggtttaagttttattttgttgagttaaagatgtaaaacttggattttaattatatttatgaacagatttaatttccattatgcgtatgatgtgtaacaagttactattcctatataattatatattcacttaagt

SEQ ID NO: 115010 - DNA, 286 bp, Glycine max
  unsure (1)..(286): unsure at all n locations
caaactcacgctaacactcttccgaccttcaatggactacattgccctattgggttgcagtgtaaaatgnaatctctgctcttctctctcctccctctcctcttcaagttcagaaatattatcacgaccttttgactgcaagagggtgcagtggtatcaaagtcaaacaggatggcaactttggacaaggtttatatgcagacatggacttcaaagagggggaactggttctgaaggaccccatgcttgtaggagctcagcatcccctcaacaagattgattgttt

SEQ ID NO: 115011 - DNA, 281 bp, Glycine max
agaagacagagcaacattcaatggcgtctaggaagggcttcctttcgaaagtgagttccatgtttgcatcatcaagcaccgatttggagcccaaatccacagatggtgacttggaattggatgaagctgacgtgttcaactggaacatgtccaatgacaacaacaacaagaacactgtgacagagtcgaagaagaggccacgatctggtaagaagaaaaaggtggagggtggtggtggcaaagtgaaccctgtggcctcgtcctcaatgccagtggctatt

SEQ ID NO: 115012 - DNA, 283 bp, Glycine max
aaacaacaccactagtgtagcaacttctatcagcactaataacaattctcttcagagtcatagaccaccaaccccttccaagaactccaaccatatccaaatctatgcaaaagcaaattaatattcctttaacatagcaaagagtcaagaaacgagtcatctccaggctcctccttgtctctagtggtggtgaaaacattattgtaagattgttgattcatgtaagaccccattaatggatttccaaaccctgagaatccaaagcttcctgaactgtgctgca

SEQ ID NO: 115013 - DNA, 284 bp, Glycine max
cttatgacagacaaggaagcagggatagggatagggcttatgacacacaaggaagcaaggatagggaaagggcttatgacagacgaggaagcaaggatagggatagggaatacgaaagagagggtagcaaagttaggttgaaggggaagcatgatgaggggagggaagatttggtggagccacgactctcgtcacattctcataagcggaaagagagggagcacagtgaggacagggactacgaggataagaaaattaggatttccgaggagaggaaggaaggg

SEQ ID NO: 115014 - DNA, 282 bp, Glycine max
gctctattcaacatggaactaaggagctttcaaacccctcacttcttgttcctggggaagaattcaagaaggtattctcagtcagttctgatatgaacatttccaagctcaaactgggaaccatgtgtttgagttggaggagagaccttggggttgaagagcaatctgcttctacttcaacattgccatgggttgtgactaaacaaaagctgccggatgtgaacgtggagttacctccaatgattgtgagtattgaatgtcccccttatgccgtagtgggcg

SEQ ID NO: 115015 - DNA, 289 bp, Glycine max
  unsure (1)..(289): unsure at all n locations
gtaagataggaattaggatagaaatagngaagggtaggatagagaaagttaattaaaatagtttttaggaagaagaaggaagaggcaagnanagancgggaagcgtcaatgtcagttgagataattgatgtaagatttagatataaagaaagagagtttagaaaaattgaaaagtaaaagtttcaggataaaggaagagaatagagaaaaagaaaaaggtgttgttcattgttgtagttgtatgtagatgtagcaacaggaagatggttggcaagttggtagtggtgag

SEQ ID NO: 115016 - DNA, 279 bp, Glycine max
cgacgaagtagcagctggacatttggaacatttgttgcatcatttacctgcaataaatgatttacatgaagaaggatttgatacaaactttgatcttagattaccagaagatctgcatggtgctgaatggttttccaaagcaactgttcagaggttccttcattttgctaagtcaccagatttgatacatgccatcagtagtatcctagatgagatgtctcagttggaggattcagaggaatttcaagtttacttgtatggggagggcaatcaagatca

SEQ ID NO: 115017 - DNA, 293 bp, Glycine max
tgaatggggattctgtacgcgcaggttggtcgtggatcggtggtgcaggaccgatacattgcgacgaagagatttcagggtttatacatctttggtcgtagatgtgagcggttactgattagttgatgatagctgtcgacaaatttcacatggaaagataacgaacacgggaacggaatcgtcttgcatgggacgttgcccctccctcagtgtccgaggcgcaacgggctctgacagtgcccagtggagaagtattcgaaagaaagcacgtttcgcatccgaaaagggacgac

SEQ ID NO: 115018 - DNA, 281 bp, Glycine max
  unsure (1)..(281): unsure at all n locations
cagtgganctacctccagatggttgtgttaagagaaatactgctctctgccgtccgtgctggtgatcctcgtactgcatggagtgcagcagcacgacttcttaggtcctactatcctctaataacacctgctgggcaaaatgggcttgctaatgcactttcaaattcagctgagaggctgccaccagggactcgtagtgctgatcctgctttaccctttgtgaggtccaatgaaaacctctgaagatagtcctacaaatggatctactgtgccccctggca

SEQ ID NO: 115019 - DNA, 279 bp, Glycine max
aaccactctcatcatcagaagcttccgctgtatcccaacgatcgcagccagacaccaacaacaacaacacaaccctaacaaacaagatgatgacccgagccgcaacctcatgaaggcgaaacaaacactgaaagagtattcatgtattgcacatgtcatcaccctcgaagacagccctcatctgacggaatcccaggccatcggcgtggtggcggcgtcgcaggccaacttcatgcgcgtcatcgtccccgaaaatgacgaaccatctggaagcttccg

SEQ ID NO: 115020 - DNA, 282 bp, Glycine max
aagtcacgggaggaaactgctaccagatgctaaacctctctacctctaatctagtaaccacatactacacaacttacattaactcctctctcatattcaacaccatctccctcattgatatatataatctcaagactattattagcgtgtttggttccacttttgggatgtgattttaagaagctaatacttatagattcaacgtctcgaacatgatttctcacttctgaacgagtttccaaacacgctatacgacatgttagaccacaattacatatgggt

SEQ ID NO: 115021 - DNA, 273 bp, Glycine max
aaccccatcagtagcaacattcgcctccaatggacgtgaaggctttagcgaaatcaaagagaagccacacgcagcaccacagcaaaaattctcaccatagccacaagcccaacaaagccgcatcatcatcatcgtcttcttcttctgtgggccccaatgacgctgcgaagaagaacccattggggaagcagcaagtgagcgaggagaagaagaagaaaagccaccattccgcgcttccctcgaattgggacaggtacgaggatgaggaagaag

SEQ ID NO: 115022 - DNA, 274 bp, Glycine max
cagatttccccctgaatgtcagactctaagtcaattagatcccaatgtgctagatgctgaggagaatgtaacaagtttaaatcatgtccgggtttcaaatgatatatttagagctccacctgagaatattacatctgaaaaatctgacatggcaggggatagtggtgacaaagcaggaagtgtgcagaatggcatagttttatgttcaagcaggccttcaaaaggtagtgataaccaaaatgccagtgaaattgaaaatggctctgaatccaag

SEQ ID NO: 115023 - DNA, 264 bp, Glycine max
gcggtggtcgacgtgttggtgccgtgcgttttgatcccgaacttcacttgcgtcatgtgttacagcatcaaggatcattttcaccgttacgctttcaagagttccttcacggatattcctactctttccgtcataagatcccttatacttctctgtgtttataccgtatgtgatggtcctgctctctcacatggtccttaccttggaactgtgactctgtgctcctttctgtcaattgttctcctttcggtcaaagcttgtgtt

SEQ ID NO: 115024 - DNA, 268 bp, Glycine max
gcggaggaaagattgcaatgccaagttggaacgatgggaagctaccattcaagactatgaaatgctattaagagaaaagccaggggatgaggaggtggcaagggctctgtttgagacccagctccaactcaagatgctacacggtgaagatattaaggacttgaaatttggctcaaatttgtttttcatctcaagcaatgatcggtttagacattatgtaacatcacctgggatgtctgtggtactcttttgtaacaaggcaacccat

SEQ ID NO: 115025 - DNA, 266 bp, Glycine max
cggctcgagcttctactttcgttcctctcttctctgtttcaaacaaacggagaacaacctcaactaaagatttgaagggagtgcgcaattgatggatgaatattctgctaaaagagccactgatggggtggtagtccctagaaaggggatacgccatgcatttagagatactgctaacgccagagatcaaaatggtcaggtgtgcagccgcattacttgtagtagcagagtcaatactcctaaaggtgctcaaattggttcttctg

SEQ ID NO: 115026 - DNA, 261 bp, Glycine max
actcgagccgattcggctcgagggtggatatggcaacaattccaacaacaagagcaactcctcttcaccctccccaaatccaccatctccatcgtcgtcatcgtcgccttcatcatcgttaccatcttctccctctgcatcacgttgcttgtcttcactctgaattttgctctctcctttggcagtaggcgtgttgatcaatagcagccggtagagatccggggccaaaagcggctcgagaacacttccaattacaatata

SEQ ID NO: 115027 - DNA, 261 bp, Glycine max
atgaaatccgacagagagaaggagaaagagaaagagaatgatcactgcatcagttctcatatgcagacccttcatcgccgtcttctccacgccttaaaccttggcaccagatctcaacttgcacccccatcccacccagtcacttccctccagacattttgatgagaagacaaatagatggaaaaatgtgctatgatcaattggtgcgctcttgattcattatcaggagatgcacatgcagcacgtcatgctattgttaag

SEQ ID NO: 115028 - DNA, 146 bp, Glycine max
tctccgctcaagcgattcctcactccagtggtacacgctccaacgcacaaacactaatccactccttgctcgtcttcgtcccatccactcagcagacgttagctccgcctacgacgtccttggccccaccatctacgtcgtcggcg

SEQ ID NO: 115029 - DNA, 266 bp, Glycine max
ggagtttctcaagaagcagatgaagaagggcaagggaaagggtaagggtgaaggtgacggtgaggcccacaagtatgtcgcaaaatatagggaggaatctgaacgttgtgttgccgaggttgccttgtctgttaaagaggctctcactgccaagcgcaagagcccttcacaaccccaccatgatgctaagaagttgaaaatatggatggggaagaggaaattgaatgaaagtgatagtgattatagtgatgattctgatgaagagg

SEQ ID NO: 115030 - DNA, 144 bp, Glycine max
aagaacacgaagggcttgacctcttcttcaagagttttgagtgttgttgaagggtttaagcttatcacttcactttcatcagtatatatattattatacacttaataatagtcatagatagtcatagtttttccacgcagcata

SEQ ID NO: 115031 - DNA, 252 bp, Glycine max
ctttctcttcctctctctctctctgtctctcgaattcccaaacaaagatactaattccctttccctttttaacattaaaaaagatgacaagcatgctgaaaactcaggccttactagttctcgtgttattggtgaactttgcttttttcatgggcttagaagcccgtccattaagtatcattgagacggggaaatcagccactggaggggaagaggtggatttctttgattggttagctctgggagcaatga

SEQ ID NO: 115032 - DNA, 255 bp, Glycine max
gctgtcgttgcgccaatcgcggcgatgttgttggtggtgctactcgcggcgagtgtggtggtggaggctcaggagaactcggacgtgaagacgctggtgaagcacatgcacgggaagaagtactgcgacaaaggatgggaatttcgagaatctcttctccaagcggaactcgccggtggcgcacgccgtcggattttgggactaccactcgttcatcgccgctgccgcgcttttcgagccgcaagggttcggcac

SEQ ID NO: 115033 - DNA, 284 bp, Glycine max
aatcgattcattccttctgttgttttgcatcgcaactttcttttgtgtttgggggcaatgtccttcgctaaccatctttcaatttttctttttcttttttccaaccaagacccactatgttctgttattcattaagctttttaatccatcaaatttagaatcctaccaatttgaatgcatcagaatttatcattttcagatgtccacttgcagattatagaagggatactgcttctccataaacctgcaatgcgatagattaccaggttcttcctcacctatat

SEQ ID NO: 115034 - DNA, 284 bp, Glycine max
atgaagtgtccttcaatatgtagtggccaaaatggtgatttctgcatatgcacaagagattaaattttcgccacagttttgcaaatgcattcaatgccagttcagctgctagccctgctgatgaagctgaaatcgataagttggaggagcgagcctcttctctaagaagggagcttgctaacaagaacttgcacctaaagacactcatagatcaactgcgtgatcttatcactgatatatcaacatggcatagtcctttttcaacctgaagtttgggacgagta

SEQ ID NO: 115035 - DNA, 292 bp, Glycine max
tacaattttgccattgtgatggtgacctctttactcttctctccgtgtacaaggaatgggaagctttgcctcgagaaaggaagaacaaatggtgttgggaaaacagtatcaatgccaaatccatgaggaggtgccaagacacaattttggagttagaaacttgccttgagcgtgaacatgacgttgttactccgagttactggcgttgggacccttgtatgccctctaatcatgataagaatttgaaaagggtaatactgttctcacttgctgagaatgtagccatgtactc

SEQ ID NO: 115036 - DNA, 278 bp, Glycine max
atgtttctccacagggtcctctcacacctctgctcctaggaggagcaggatccgctaagggtctctcaagccctggacggaacagtgtggatgcagaagatgagcaatcatcagattgccggaattggaaaggagggctccaccaccagcagcttgaaactgataatcacagcctctaaaattttgcagataaatgataatacaatacataaaatgatgaggagttgaaggcccagaatttgacaacataagaataatagagatctaacacataaaag

SEQ ID NO: 115037 - DNA, 272 bp, Glycine max
ctcgagccgtgcatgtagccaaaaatccaagatcagaatagttatttagtggtcaacttcaacttttatttgttcacatacaattctcaatatccatggctgcagattccaactcaaaccttagaatcaccattgaaagaaacccttcccagtcacgccttgctgagttgaacatcaagtgctggcctaagtacatcctcttctctctctttctttctcttcttgttccattcttttgctatgtattatatgaaaaaaataaaacttagata

SEQ ID NO: 115038 - DNA, 226 bp, Glycine max
ggcagcttcttcaattcaaaacaaaactctctggggtgttggtgttggtgagggatctgaggcaaaggtgttgatgatatgggagcgtgtgtttcaactccacaagggtgcgtgggagggaggttgagctcttccaagaggaaacccagaaagatagggagagagactctcaagaagagttacttctctggtgtgtaatgaggcatcatcggagatagttgatgtg

SEQ ID NO: 115039 - DNA, 266 bp, Glycine max
attaaatatctcgacggtagctttcgatccgccaccgtccgatctcctcctccgtaactgacgacggtgtatcgatatcttacatctctctctagccacagcatgctacagcattagttgatgaaaaattatacattgctggtgggagtagtaattgtcgatacttatctgatgttcaggtttttgatttaagaagtttgatgtggtcttctctgaaactaaaagcaaatgttggaaaagatgatgacgatagctcacaggagatt

SEQ ID NO: 115040 - DNA, 248 bp, Glycine max
tctcttttccaaaattagggaaacaacaaggacgcaaaatgacacaatagcccttcttccctgtttccagcttttctccttctctctctccatcttcttcttcttcttcactcagtcagatccaactcctcagataacacaagaccaaacccgctttttctgcatttctagactagacgttctaccggagaagtataattttttgggtgaacttggagcatttttagtccgattgatttctcgatatc

SEQ ID NO: 115041 - DNA, 242 bp, Glycine max
tgtttttctccccttttgttacacatttgcaattagatttttgttgaaagaaagctctagtttggccctttctactggaatttttactagtaccgaaggatggagggaatttaactactgagaccttcatggttgactgtaagggtcataacagctttttagttgcccttctgtagtttttctttaatctcaaatgtcttttagtttgtgacagataacccttttatgtattattttcttcc

SEQ ID NO: 115042 - DNA, 164 bp, Glycine max
tgatgataggttattggagggttaatgtgtgggtgtaaggactcacttaggaaaattcttgttccattgctattccagcatatgattttttcatatattttgtaatatacaactttctacttttccattcaaaggaaacaactgaatgaaaaatcttgctttcc

SEQ ID NO: 115043 - DNA, 248 bp, Glycine max
aatatattagcctggtctcaattcatgaagccaaaaataatttttggcttgcccttggagaaaatggatggtgtggagagatcttattttatggtggaggcacttataaaattatatgcaagtgagaaatatattcttcatggtgaatcaacagacagaagatttgagattttatgtttctttcaaggttggagctacaaatgtatcggtattgcgaagtgtgtggcagagtttctggctaagtgaga

SEQ ID NO: 115044 - DNA, 245 bp, Glycine max
gtcgattcttagtcgattgagttattttctaaacatgtgtttcttacgattctgtgttgaattaaattaatagttcttgtacgtagcataatgttggatttaaaatttcaattttagtgttctgcaagtattttagctcatggtcctccaaaccctagatcgtagcttttaactttgattgaatagtaattatgttttatttttattttttttaccatgtgtatgttatatgatatgatatgatg

SEQ ID NO: 115045 - DNA, 245 bp, Glycine max
ggggtgggccaggtgaataaacacgacgtcgttttccttgtgagttggtttcagtcaaattgaacggaaccaccgtttctctctcacggtgctgccactgtcactcttctctactttctgcttcccagattctctatttttgcgcgtaatcgaatgtggaactttgcatcgaattgcattgctggaactgtgggactaaaaaatgattcaaagcctactcactctgcttcagaatgttctgatga

SEQ ID NO: 115046 - DNA, 274 bp, Glycine max
cagaagagaacttcaaaattgatgcaatcctcaaaagttcgtcaagtaatcaatggagaaaatgccaccaactccagcaatacagcagaagccaagagcccaagactacaaaagaagtttggtttggagaggcgttctccgccaactagcccatcatcagatttgagcagtaacagaagacaacagaataggcaatcggtggaattgtcttccccaagtacaacacccagacaaaaattcagtgagattagcaatcaaaggagggattttaagc

SEQ ID NO: 115047 - DNA, 267 bp, Glycine max
gtgaaaattggctaccgttttgcctttatgctgacaacaaatttgctgatagactcaactcgtgctattggtctgattattactctgccaaccccaggacaccccataatactaaacttgctccttgggtagccagattttataagcaaacagaaactgtggatgtatagtattcactattgactttattgagcttgttttatttgttgataagacattcctatattgtgttgtcttttttacattaaatcaataaataacatgagt

SEQ ID NO: 115048 - DNA, 263 bp, Glycine max
gttaaatctgtgttctccacgccgattcccaagtaattggtgaacacaattcgcaatcagacacatttcagagagcaacttgctgttagaaaaatggaggataataggccttggaacaacaacaacgttagttttccgaatgtgcggacaatggccttcatgtttcaagttgttggccagtgaattcgggtttgaggcagcctgctcctagggtggtggcggactggctaatggtgtgagacaggatttgaggctgagcaata

SEQ ID NO: 115049 - DNA, 273 bp, Glycine max
gaggcgtcatctggcctgccggaggaaccacgccactgcccccaccgcgatgttcatttcgaatttgttaggttttgagatttgaatagagttctgaacgatgactaggggcattttcacaaggaaatttcgtatgaggtacatacaaatttttgcacatgacagtgactgcaccagaggcttgtggattggtaataatatccacctgcatctgctcggaattttctacctcgcgtagcataggagtttttctttcggtggtgcatatggaag

SEQ ID NO: 115050 - DNA, 196 bp, Glycine max
cattgccttcaatgatgaataatagtatttggcaaaaaaaaaaatcagacaaccataatctaccaacaaccaaatgaaattgccatactcaagccacttagcacaagatgacacttccccctatatctttttttttccttcaataaataaatggtatattggtacagggtatttgcggcaaattaatagcggttta

SEQ ID NO: 115051 - DNA, 266 bp, Glycine max
aagctaccccatcacccaactacccaatccgacatcgaccaaatcgagaaccacatcaatgccaacgttcaccaatcagacccaacaacaattcaaacattcaaccacgcgccaccatccccgacaccgtcaccatctccactgccccttcccccaacatctcttccaacctccctcctatcccacccctccccaaatcctccgactccgccgaaccaccgtccccaccaccgcctcgccccggcatcgccacctccgggttcggt

SEQ ID NO: 115052 - DNA, 255 bp, Glycine max
gaattagtgactcccttatgtgttaatccactcgcatggtacagtgatgaaatttttggtggaaagtccatacaaaatgaaagaagcgtctactctgaaaatccacttacatacttggatgatctaatctatcaacagggtgaatcttatggaattacagactcccctcatgggatgccccatgccttatctgatccacagttgaacaagagtggagcaaggtctggttacatctcgcaagatgggcttggtcaa

SEQ ID NO: 115053 - DNA, 261 bp, Glycine max
gggttagggtcgtggatccggggaggggttattccgaagaaggtggtgatgggtttgccgctatatgggaggacgtggcagttacttgaaccgaatgtgcatggaatcggggctccagctagtggaccgggtcctgggtcgaatggtgcaatggccttatttcaagtgttggagtttaacaacgaaacgggtgcaaatgttgtgtgtgacaaggaaacggcgtcggtttattcgtatagtgggagttactgggtcgggtac

SEQ ID NO: 115054 - DNA, 276 bp, Glycine max
acggcacaaagaaacagggactagggtaaatgagattgatgaagaacaccgtagagcactgtagttgaccgaggatatggctgatcccgatatatccagagacattggatactaccaggaagctatggtacgacagagtactggagtacgaaattttaaagagatggtggaatacttatatgaaagggcaaatgtatacaggaaattaccaataaggagttttaatactacatttagctacactggtacaaaacatgttgatgaaacaactacaaa

SEQ ID NO: 115055 - DNA, 274 bp, Glycine max
cttcaaacattctcctgtaattagttccgccaaaaagccagcgcgtacgaaaagctgcaccttctgtctgacgtttcagctctgcctctgcaaccatgtcaatccagtaatttctgagggttttctggcactgaacaacatctaggtcgcttgttcagctacccctagatattgctgagtactacgcgaatggtggtaaagactatgaggctaagggaagatctagacattatatagtgttgcaggagtggctggaagaggataagaaagaaaa

SEQ ID NO: 115056 - DNA, 268 bp, Glycine max
cagtcctctatattattatcgccaccacccttcccctctaaccacaacatggatcaattctcacacattattcccacagaaagatcacccagaagagaactccaactccaaggtccacgccctacacctctcagaataaacaaagactctcataaaatcaagaaaccacccttggcaccacaacaaccctcacaccctcatcaacccccaccgcgccaacccataataatctacaccgtttcccccaaggtgattcacaccacaccaa

SEQ ID NO: 115057 - DNA, 285 bp, Glycine max
gttattatgagtgatggtaaacaatttctatgcttctgaatctacacctgtttttgagtaactattttcactattatttttcaattgggcctgttaagtaggttttcatgttctggaaatataaccattttttgtatgggttaggttatctcatttagttttactgccacatttttgtatcttccattagggaaagtgcttgaagcatttgtgcttacacacaagcattagcttttgttaattgacccattgacatagattgattagtggattgacgtatgttga

SEQ ID NO: 115058 - DNA, 111 bp, Glycine max
  unsure (1)..(111): unsure at all n locations
gccctaccacctcttcgacggcggcggcatgcgccacgcgcttcgcgtcggccatggcnaaagacccacgctctgcagccgctacgttaggacctacgaatacaccatgga

SEQ ID NO: 115059 - DNA, 287 bp, Glycine max
cagaagcatatgtattttctcatttggaaattgcatgtgtataaatgattggatgcttcctgagaccagctgcagtagaacaagctgcccatcattagactaagcaaatttccttattaaaaaaattatgtaacaattggtacagtttttcaccaaagcagcaagaattgtatgtagttcctatcctgtttaaattgtttgtgaaaatgtgacatgactgcttagctctattggaattatgaaaaaacaaaccttgtcagtaatgcatagttgagtttggtaaaata

SEQ ID NO: 115060 - DNA, 283 bp, Glycine max
ggcaaaaccacctaccagtgaacagataatggcactgcttgctgacacacagggagcaaaactcactaagaagcatagtgaagccaaccggcaaaatcggttcctaaaaagacagttgaatgtaacggaggatgcattggtaaaattcaaaaatgaacttgcagtcatggagcttgaaattcaggccttggccagactagcagaagaaatagctcaatgtggtattccagaaggttcaaggaagatcaatggaaagtacattcattctcaccgtgttgctaga

SEQ ID NO: 115061 - DNA, 288 bp, Glycine max
gggaagttgaagcttaacataaatgattaatttacataattgtagttttgccaaattctcttcattagccaatcaatgtgttcaacgctatgattagtaacatgaagaatgttgaacacatttaattacatattgacagaactgtggaggttgcagatcatttgtcatatccttttgtcagaaggctgcaatccttgccacatcacatccttttgtgtttacttagtatcttaagacttgcaacaatgccaatttccctagatcaatttcttaacctggagagtgaac

SEQ ID NO: 115062 - DNA, 285 bp, Glycine max
caacctactccgattgcatcagctgctaatgagttatataaagttgcaaaatccaatggccttagtgatcaggatttttcagctgtcattgaagcattaaaatccaaatttcagcactcggaaaccaagtggcattcttatgagagacaagttgaagttgaaaaccgtagtaagctaggtgatatgaatcaaatatagacgtacattgtgaggcttgaccatttaaattcattccctgaattgtagaaatatatttgaatatttttccaatgttgtaaaattttt

SEQ ID NO: 115063 - DNA, 249 bp, Glycine max
gtccctcctcatttccacgtcagaattttaaaaggacacggaagcaacatttgattgcttccactggacgtggatcaaagaatgccacatgctaaatcaaacatgctaacttattgcatcttagttcccacatgataggactatattcgtttggaactttgtaattctcaagactgaatttaaagaatgctaaaataaaaatgaataataatagaagaaccatggaaaatgtttagaaatttgacccac

SEQ ID NO: 115064 - DNA, 240 bp, Glycine max
tcactgcaccacttctttatataacacatttttttttttaaatttttatcatccatgtttagggtttaaacgttgaatactcattcatggctttgtcttcaacgtctcatgtaacggttttgccgtgccttctaatgggaagtgctggaggaactgactatggtgcatacacttatgagctatctgaggagcctgactggctatccagaaagttaagtattccatcacaggtccgggggg

SEQ ID NO: 115065 - DNA, 216 bp, Glycine max
gtgtggttagtagtggtctattgctacctgttctatgtttgtacagcttgctactgtgtggcagatctttttgtatggcttgtcatggtgccctggtttctgaacttcccatcgacaggaaatttctacagactactattctccgtcgttgtgtcatatctaggttagcgttgctctcattgtggttagattaactctcagcagtggttgactcgt

SEQ ID NO: 115066 - DNA, 272 bp, Glycine max
tactcgagccgaagtcgtctcgagcggcgtcgagcggctcgaggctacactgtgtggactctgtacctgaagagcataattccactgttcaggataaagaattggagaaacctgaacctccaaacgacaaggtcactcctccttctccagctgctgctcaagaggttgcagatcatgctagtaaaaaggacacagaggagtcacttgacaaaggtcattctctaaaaatctagtattgacattatgaatactcaagagataggtaatatttt

SEQ ID NO: 115067 - DNA, 228 bp, Glycine max
caggtacagacggcgtgcgctcttcttgtgatttgtgatgcaagcaagcaaccaccctcacacacacacacacacacacacctccataaatctcttttgttcttcactccaacaaaacaaacaaggtttgcatttgcttaactggagacagattctgtagctggttccatcccaataaatctaatgattctggagtaactagctctcttctattggtttctgagttct

SEQ ID NO: 115068 - DNA, 268 bp, Glycine max
ggcggcgctgccttgttccgttacggtcttcttctctgaatcatcgtcttaggctttgcagaatttcatttctctttgattgctatactgtacaaccattccattctttcgctcgtttactcgccaagtcaaatcaatatccagagcttccagcgattcgatatttcagagcaagcaagcactcaagcaactgcaatgggtataatcaggagtacattctctttcattgcagggacagcctttggggtttacgtggctcagaattatc

SEQ ID NO: 115069 - DNA, 266 bp, Glycine max
ctttcgtataagcagcacccttcaattttaattgggctttgttagcgctgcctcaaacctcatgcaaatagcactttggtttccgtgagtgtctttgagagagaatcttaaattctacaacggttcagttgtattattatatttaatactatttaatctccaacagtatatatagtagtatatactgacgattctgatgtgggagtgtgagaacagagtagcagagtgtttgtcaaacaaacaaggttgtctctgaagttgtggcg

SEQ ID NO: 115070 - DNA, 268 bp, Glycine max
gggaagagtttaatatttttgtgctttcctttgcttgctgctatgagaggatgatgatgacaataattgttgcaaaatggtgttagtctacatatgatgacgctgctaatattttccatgctcgaatttccatattcccaaccaatctacatattttctaacactccaatcacccttatctaaccaattttacacaacaattatcatagacaacagagaataagattccagtatctatcataaaaatggagaagagcacaaccaacat

SEQ ID NO: 115071 - DNA, 259 bp, Glycine max
gtggcagcagtgacaatgctagcatttgtgttgacaggtggatactatgtccataaggtgccatcttgcatggcttggatcaaatatatatccacaaccttctactgttataggctgctgactagaatccagtatgaggatggcaagaagatatcatatctattgggttgctatcatggtgataagggtggctgcaggtttgttgaagaggatgtggtggggcaaattggcaccctaggatgcattggggtgttgcttt

SEQ ID NO: 115072 - DNA, 254 bp, Glycine max
aaacccccttcgggaaactcaacttcgtgagagttcggattcgaccaagaacatagctgaattggagagcaacagaagcttctcgaactcttcaattaccgagatgaactcgacggcagcatccttgacccaaacagttctcaggaacgagagctgatgcaaaatgatgtcatcgttgtcgttgtagtcctcgacagaaagggaaaatagggttccgaagtctacgattcagcaaaggaggacttcagtggcag

SEQ ID NO: 115073 - DNA, 257 bp, Glycine max
ctcactcacctctgcacttttctgtgattcattcagacttatagaaaacaaaaaaagagcaaacaaaatgttgcggtcacttgcgagagccgcagcgaccaatcatcgatggcatcacaatcacgccacgttctcatctctcggccactcttctaggcccccaaagcccacaccacctttcaaacccgatcccaaaaaacccaccgccgccgccgccgtcgcactcttcgacgaccaggagcgtcgccggcaactag

SEQ ID NO: 115074 - DNA, 107 bp, Glycine max
cacttctcatattatacattagatagtatcaaatcaattctgatcttgggatcacgccgcttctgattagtcctcacgccgcttctgattagtccacacaacatacg

SEQ ID NO: 115075 - DNA, 216 bp, Glycine max
ctcgagccgctgtagtgcacggataattagaatagaataatattcctaattagttaagtttggttgcttagttgatgaaaaaaggaggtagctttatattcaccgcccccctcgggacagattggttattgtttgacatggacggagagagaagcagaatggtgaaggaaaggaggggatctgatatttccttttcgcgttgaattccgaattcca

SEQ ID NO: 115076 - DNA, 247 bp, Glycine max
acggattcttggaaaattactccatatggtgggaattctacccactgataaagtgacagaagtacagcggactgatttagttggtgaatttgttgggcacactggtccaaaaacaaggaggaaggtatgctatttactttgaaatccttctcctatttcagaaaccaaattttctgtgttgcttaatgagttcaaactccaaacactgcctacagatcaaggaagcagaggggggaattctttttgt

SEQ ID NO: 115077 - DNA, 261 bp, Glycine max
ccaatatcaagctcagaagattccaagaggctgaggatgactgcacagaggccttaaatcttgatgatcgttacataaaagcatactcacgaagagcaacagctagaaaagaacttggaaaaattaaagaatcaatggacgatgctgaatttgccttgaggttggaaccaaacaatcaagaaatcaagaaacagtatgctgatgctaagtctttctatgagaaagatattcttcagaaagcatcaggggttctgagaagca

SEQ ID NO: 115078 - DNA, 253 bp, Glycine max
atttgtgagatgttgtgagaatttttaatgatagtttgggtgtgatttttctttgcataattaatgagaaaaaagtgattattattagagagaagagaagaagaaaaaaagggtttaggatggtgttattaggtggtgggaggcttagggaacagtcaccatgtgcatgtgcaattgggagacatgtgcatgtgtggtggtgtcagtttgctttcgagaccatgtgacccatcatactttgcattatttggtt

SEQ ID NO: 115079 - DNA, 259 bp, Glycine max
ctcgagccggcaaattttgccgaaaactccaaaaccctcttttagtaaactcgattaacaccaatctcaatcttctacagcttatcctatatctctctcttttcttctcttcccccaacaacaatttcactcaaaactctctctcaggatggaggcatcgtttgcttttacgtttaaggttgtttgcctaaacggtaaatagtaaaaattagtgattgtgctttttcagctgaaaggtgattaagagaatcagagtttg

SEQ ID NO: 115080 - DNA, 266 bp, Glycine max
cggctcgagctctgggctggttatccaggggaacttggaggcattgcacttgctcagattatctttggtgaccacaatccaggtccaaggtaaatcatattttgcaacattttacatggattaaagatactaacagttgtaatctcaagaaggactaaagtgaagatttactagtattgtattgatgaagtaacgaacaaagaaacaaaatggcctaatagttcataaattttaaagtttattactgaaatggtgtcacgaataca

SEQ ID NO: 115081 - DNA, 262 bp, Glycine max
attttcttctctttaccagcaaagagatgcaaactacacaaatagctcagatatttaaagcaaacctggatttacatgttcttaaatgagtacaagttgatgggcttccatttgaacgttgactgcaggctgagacatgctgtcaactttgtacatgagtcatttgcaaataattggaactgggggtaccatggagctaaagtgcccaccaaatggtcagatgcagatgcataatgagtttgatggggctctccctttggtg

SEQ ID NO: 115082 - DNA, 186 bp, Glycine max
caacgctgccattgtcggttcgaaagtttgagaacctaggattgaggtgaagctgcgttctgaatactgaatctgaccgccaaagtacacagtctttaggatccgaaggacaaccgcacgatccagagatttctatcctttgatcttgctctgataaggacttgtctccttcttccacacaacata

SEQ ID NO: 115083 - DNA, 260 bp, Glycine max
atttggaagaccccaaacgtttcgcctcgcaccacccatttcgtgcttctcctccttaatggcgtcttcgctggagaagcaattcgacgactttagggttcagttcgaagaatctggaaccttgcgcgaacgaattcgaagcgtcgtttcggagatcgagtcctccactagactcatctatgtcacccttcttctcgttcaccagtctcgccccactcccggtatcatggtgattggaagagtgagacgcagcccgtagt

SEQ ID NO: 115084 - DNA, 254 bp, Glycine max
aatttctaatctctaatttctctttctccttaattgtgtgtagcttagctaggcaaaatgagcacaaggcgttggccgagacatgtaacagttaggggaaggaagagaagggcgaaagtttgtttggccaataataatgctgtgaaagtgaaaccttccttgcaaaggaagcttagggagcttcagggagcagttcctgggagtgaggtaatggacatgcacaattttttccaaagcattgaacaatacatact

SEQ ID NO: 115085 - DNA, 254 bp, Glycine max
gagtgacttagaatgtagctcatgctatgaaatttctgtctgtttatttgtactgggaacttcaattttcaactcatcaaaaccagaaggcttctggccttcctttttgcagtcttgggtgagagataatgattttatttttggtcacgagagtgatgaggaagttttgtttgttagtttgtcttggaggtttgatcattttgatggggcaacaccaaatgtaataatgtagtaaactaaatgaagctttattc

SEQ ID NO: 115086 - DNA, 204 bp, Glycine max
cggctcgaggaagagatgggtggaggaaggtgctgaagttccagctgaaccagcatccgctctgccaccgcctccaacaactgctgctttccagaatggttcaactggctacaactcgagattggcattgcagactgaaagttcacctcctattcgaggggctctaacatgcagaactgaactagcccgtgaacgtctagtcca

SEQ ID NO: 115087 - DNA, 250 bp, Glycine max
aatctcttcattagagacgaagacatagcttgaaagtgagacgagaagaaaacagtagaacatgaacatgcaagcggaaccataagagtgttaaaaggcatacttttctttaagatactacaccaccttccaaataacatggagacttcaggggccgttagcttcttacagtattatcctttacattttgatcaagacaagtagcatcattggaacagtcatgaggttgatctgagcagtgactttcagg

SEQ ID NO: 115088 - DNA, 250 bp, Glycine max
ataagtttctaaagcacaaaatgctagtttcagttgaattatgtttcaataaattgtcattattagttaatggaaaaaatccatccaatgcaagcctttctcgaattcaagggttaggtttggcttcatgcaatttgaaggagtttccacattttctccaggttgtgcctgatctgtcatatctttacatgccaaacaataatgtcaatgcattccccagttggatgtggggaaaaacaagtcttcgggg

SEQ ID NO: 115089 - DNA, 125 bp, Glycine max
ctggctgctaaaatgagggcaagcacttcctatgcaatttccagatttgggcaatattatgattgggcatagaacaactcataatactttgagacgcgatgagatggacatagatagtgactgag

SEQ ID NO: 115090 - DNA, 120 bp, Glycine max
gggactttgagctgatgcctccaccaggaagtcataaaaaggagtatgctacaccgatggatctcgatctatccatcttttggcttgaggagtctgaaatcggatctcttcatttggaga

SEQ ID NO: 115091 - DNA, 243 bp, Glycine max
agggattatccactgtcatacagagggcttcagttaacaatatttctggttctgctgttcttaacttactgcagagccaggcaaaggctatggctggagacaatgctgtcaggatgatgctggagaaaatggcacaatgtgcgagtagtgcttacatgagcatactagaaagatgggtttacgaaggtgtaatagatgatccttacggtgaatttttcatcgcagaggataaatctcttcaaa

SEQ ID NO: 115092 - DNA, 243 bp, Glycine max
aattgcacataaatccaattcgagcaagacgattgacctcaacaaaagttaggcatcacaagatagaagacaaacaatgtgaagaagagaagcaagcattagcgagtgagccaaagaagcttaattcttcaaattcatcttcccctaagggactgcgtaggggaaggagtagaactcgacgtgccctccctccatcttcacctttgattattggttcttcttcatcttgatgcccaaactctt

SEQ ID NO: 115093 - DNA, 169 bp, Glycine max
gaaatcttgttcagtctttcaacatatatattgcattcgaaatttggaatttcatctcatttaagatgctgtttgataaacttttcatttataggagaatgaaatgagaagggaaaatgaattgaatttctgttgaaagattaaatcaacttatgctcttcaattttat

SEQ ID NO: 115094 - DNA, 121 bp, Glycine max
ggaaacttttggtcatctcatttaccaagaacatcttatgatattgatttagactctgaaagccctaatccaaatgatcaggttaggttctgttgctcacgaatccagttgcttgattcag

SEQ ID NO: 115095 - DNA, 187 bp, Glycine max
cagattttgtttatggttttactgagagctcttcaaagaaagctgcggaatactggcttatatggcggtttgaaggggatgccaccctagctgacttgatgcagagtagagactttccatataatgttgaaacattaattttgggtgaggtccaagacttgcccaaaggattggagagagaaaatag

SEQ ID NO: 115096 - DNA, 268 bp, Glycine max
gtgactgcttatgatatgtaattcgatcactagatggcattatattagtgttggtggaagtatattagcctggtttctttttattttcatatattcagggattagcactccttatgatcgtcaggtgaattccctttctactctgggtgtgttgtgttgaaaaagaaactctggcaatttccttatgacccattaagaatgctgttaacttgagttctgtttcattttctgcaggagaatatttattttgtcatatatgtcttgatga

SEQ ID NO: 115097 - DNA, 282 bp, Glycine max
aatgctcgatatcgattctctcgagccgctcgagttggattggacaaagataaagtaatatctctcgttagtgtaaatattcaagttgctactaagtaaagtgaactgagctatggttatatgctgaacatttttttcctctggagaaacatcaaatattgatgatgatatgtggctttcttcaaaagcttactacagtccaattgtttaattgtgtggaggcactgagctcgcatctagctacattgcaggaagtcacttgcagccatcagcttttggagc

SEQ ID NO: 115098 - DNA, 268 bp, Glycine max
gttcggccgaaacccgcaacaatggccgcagcaacgttaacgtatcagaacgtcgtcgtttacaacgccgatcaagatgccaactccaactcctccgccaccgccaccaaaaaatcccgggagagcgaccgaagacggtgacgaagcgaaggagaataccgatccgcagcaggttgttgagcaagttgaaattgaatatgtaccagagagtgcagagctagatgaagaattcagaaaaatctttgagaaatttagttttggctaggtt

SEQ ID NO: 115099 - DNA, 276 bp, Glycine max
ttacatatcttgtctattctagtctttatgcagttatttagtgatgtttatgttcctattccattgctacctcaataacaagctagagactttgcttatacatttatttattttttaattattttcagatccattgttagggttgttgaagaacattttctttgtagtttgtagttgtacttattactatatggctgaattcaagtcttctgtatcctcaatcatgtctcctctttaaaatgttgccaactttgtgaaaaatgacatttctctctt

SEQ ID NO: 115100 - DNA, 263 bp, Glycine max
ctctcttgcccctgcaaatgcagctattctgctttctgtggtgcagggtggctattatcggaatgtaggaaatgcagcattaatggcatttggcgtgtgtggtttattgctagcatctggttgcatgcatgccctgaagcaatggggtaagcaaccatataacaactggcataaacagtgaatgtatgcccctttggcaggctttggtagtggtggatgaccttctcttttattgaatgcattgaggagtaaagagatgaata

SEQ ID NO: 115101 - DNA, 265 bp, Glycine max
atccatctctgacccatgcaaggggcgagagaatggagccatctgatgcagtgagcagtggtggttttgatgctgtgtcagattcagctaggcttgattcagggtctagtgcttccagggatcctgaagtggaggaagagtatcagatacaactggctttggagctgagtgcaaaggaggatcctgatgccgcgcaaattgaagctgttaagcagatcagtttgggatcttgtgaccctggttacacaccagctgaagttgtggc

SEQ ID NO: 115102 - DNA, 267 bp, Glycine max
atctcaaggacataatgctgaatctgagcaaaaaagtggacagcatgatgagcagaggagcttacttctcttgctgaagccagagatcagaaagctttgtgatgttcttcttcttccagcttataatgaagtgggaatgaaatgctactaatctggaattggaaaggctaaggttgaagggaaagagattagataaactgaattatcttttgctggaatttctgattgtctgttctaaagtaatctttgctgggtaaaaacccaact

SEQ ID NO: 115103 - DNA, 239 bp, Glycine max
  unsure (1)..(239): unsure at all n locations
aattgtaatgtgcaaaattatattatacataattttttttaatactttctcatgtatgatctccgcactaaatatttttttattttaatttctttgtcaatgccacaataatacttgttaacgacactcagaagaatacgacactcgtatgtggtntagacatgcgatattctgagtgaggaaactatgtggtctataatcggtgcatgctaatttaggaaacagtaggtgatcagcta

SEQ ID NO: 115104 - DNA, 231 bp, Glycine max
aactggccatttttgatgaatgtaggacctaatctcagagacctctgtagctattgttgaagaagatctgggagctcctttagaaattatgctcaattaatgaaggaaccaagatcaagtgtagcatgattctgcatatcatatttggtcgagaagactggaatagtgaactcttatattctaactaatgtaggtacggttcatcgtgcgacattacagggacaagaggtt

SEQ ID NO: 115105 - DNA, 263 bp, Glycine max
cttcaaccttgttcttcccttagattaggggcacatatcacatatcattccttccaaatcttctcctgaaaacaaaaccatgatgagaaggcgttcccttgtgactgcatcaccaaaacaagggtccgtcttctttgttggccacgacaacaacccaacaattcatcctcacactcacacccttctgactccatcaccaaaacaagtcacagaaaaccataatcactccaaaaccttcaaacccagttccaatcacaacaggg

SEQ ID NO: 115106 - DNA, 259 bp, Glycine max
tctcgagccgaatcggctcgagataagctgtagcggagagccagtccttgacagtgatagcgcgtgaggagttgatgcaggtacttgccggcatagacattgtcctcggcgatcttcctcgtcagtcccccggcacgctctatatcactaacaatctctagagaccctgaagcctatcctcttccttgtttatatacccagattgatacaggagaagctgatgatgaccacactgattctgaatccattcatatcccac

SEQ ID NO: 115107 - DNA, 288 bp, Glycine max
gtttgaatgtctcagcttctgtatctggtgttcgtcttgctggaggaatgaactatgctgaagccctcctgcatagatttggaatacttggacctgatggagctcctgggattggtctctgtaaagggttggaaaacttacaaaaaggaccattgtcaaaactttttaaggcaactcctctcattgttgataattcagaagatgttggaagtggaagagaagggaaagaaactggttttcctcaactgaaaaagcctggtgatgtggatgtaactgtagaattgagag

SEQ ID NO: 115108 - DNA, 206 bp, Glycine max
aagatatcccagggtggttccagtggaaagatagctttcagtttaaaacacaagtcatagctggtgacaaccctgttaagttgagtgctgatgatgatgaagaagaaacagaagctgggtatgtttcaaacgatgcaccactagaacggcaagagttaggccatgaggaaggcattggccaatcatcaagacatcttgatgttgca

SEQ ID NO: 115109 - DNA, 277 bp, Glycine max
gatattttagtcataaaatgaattgaattgcgatcgttaaacatggaaaccactttataattggatggaaattatccttagcagataattgtataattttgaatttgtagagaaagagaaaaaatggaaaagtatagaaggtgacagacgcagaagagagatctgggagaagcagaagtgaagatgatgtccggaaaatatacgtcgattgacacgcgcagcttcagggatctgttcctgcagttcaagattcacgtcccgacaccgtcaatttcgc

SEQ ID NO: 115110 - DNA, 290 bp, Glycine max
cacaagtagaagaggctagctacatgcggaagcgacttgatgatgaagattcttcatataaagcctcaacttcaacgacttcagttactgatgtgaatacaaaatcagaagcagcaactaagaagtcagctgcagcaattgcagctgaggttgcagataagctaacagcttctacgtcatcgcagttaatcatgacttctgttctctcaacatttgcagcggaagaggcaaaaagtgcttgtctaacttctgagaccatgtcaaaacctgagaagtcaatacctatatca

SEQ ID NO: 115111 - DNA, 131 bp, Glycine max
gctgtcgccaagtcttaacttagcatcacacctttctaagggatcagagagaagttgaaattgaaactgaaacgatgcagcgtcttcgctttgctgctgcttctgctgagtcgtgcgtggatctaccgttg

SEQ ID NO: 115112 - DNA, 277 bp, Glycine max
ctccgctctctctctctctctctcttcccttctcagcattctacgtcgttgtttcgatacaaaatgctgggttcacgtttctgcgtccgcaccgtatccggcgtgggctccgccgcagcggatcacacgaatgccgcctccaccgcccgctccgttccgagctccgtcgccgtcgacttctcgccgctccacctctcaccgctccggtcccgccgccgcagatccatcctcatttcctgcgattcctcccgccgtagatccagctccggcgactctc

SEQ ID NO: 115113 - DNA, 221 bp, Glycine max
aatgctcgagctcgaccgcttgaagaagcaatctttgcaatgcactgagaacaaccagaggacctataacttcagctgctgaccttttgactctggattatggtgctgagagtgagtacagaatgttcccaggtgaagaaatcactattgctaaagggtacttgagcataattgagtccttggcttctgtgttgccacctggttttgtccagttaggtagg

SEQ ID NO: 115114 - DNA, 209 bp, Glycine max
aggtgctccatttctcatcctcttcgtcgccagccacttgttcttctgatggcattctccaagaagcaccgccaccaccaccaccttcttcttctgtgagcgcggtggtggacgggttttctacggtcaccgactgtgacgggtgcggggtcacattcacagacagaacgcagcaccaggaggaggagctctctcttctggcaattctt

SEQ ID NO: 115115 - DNA, 158 bp, Glycine max
accagccacagattctctcttctctattcagtaaacggctgttttgtatacgagctgtcccagtctcagcctatacatcccaaaacatcaaaacaactggttgggctccttgtatggcttcttcctcagttggtagaagggctacatattcaacacaa

SEQ ID NO: 115116 - DNA, 273 bp, Glycine max
acgaagcttagagtgttattgttgttgtatctgtggtgtggttttggccatggatgaagatcaaatagaaggttgtgtgagtgggtacctcaagcagaaagggtttacgcaaaacgatgaccaacttcaactcaccaacaccgattcatctcttcaacccgacactctcaatcgcgcccaattggagagaggttctgctagataccatgatgggtatggtagactaagatcatgggcatacaggtcacttgactcaatacagcatgagctgct

SEQ ID NO: 115117 - DNA, 280 bp, Glycine max
ggtagatccatatgggaataagtttttagatgctaaacttagtgatgatgatagcaacacaatttggaaacttgatttggaaaggactggattatcttctgcagaatttggattgcaattccatgtgatagatagaggagatataataattgcaaagtttaccaatgatgggatgccgagttcaagttcgtatgaagagattagaggcccaatgtacttctggaaaagggggagtttctggtgttcaggctgaaatgcagagcagtgttactccttttga

SEQ ID NO: 115118 - DNA, 291 bp, Glycine max
cgacaaagcagagttggcacctcttgaggaccttgttgaatctattgttcagttatagtgctgttggtgttttctttccctgatttttaggagagattaaacattggaaatgttggctatacatttttgataaagatttttcatttagcaagtattttacaaggggtccaaaagggtgctttgattcgcattctgtgatctcaacgtcgcattcttttatctcaacgatgaagcgtccactgtcaccatcagcgaacggcgtgaacgttgaggacaggatgtgaagaagaa

SEQ ID NO: 115119 - DNA, 272 bp, Glycine max
cagatcctagtctgctagcagcacaaggtcctgcaacagcttggcaaaatcctcaggctgcacctatgtaccctggcagtgcccctgcttatcatactcaagttcctggcggacaagtgccagcatgggatccaaacctgcaggcagttagaccgagttatgtatcagcacctggtacttttcatgttcaatctggtgcagctcctccaatgccagcctatgcgccaccgcagctatgcctgctgcttcctcacctcatgcacaaagcagcc

SEQ ID NO: 115120 - DNA, 150 bp, Glycine max
tcggcttgagtatcttactcacactcatcggactttctcaaatctctatgactacctattgttgccatccagtaacggtgaaattgtgtatccaaaatgggtagttaaacataaacacactctcctaagaaagcccttaaatttttcatc

SEQ ID NO: 115121 - DNA, 268 bp, Glycine max
ctgagacataccatagagactgtgattcaattaatatattatatggtgtttctcttcaattcccatggagcctaagactcaacctcaagcgaatagtcctccaccaaaaccttgggatcaagcgggttcctcttctggtccagcacctttcaaacctccgtcagctggcaacacaagtgatgtagttgaggcttcagggactgcaaaacctggggaaattgtttctagttctgataggagtgcagctgtcaacaggaatactcttggg

SEQ ID NO: 115122 - DNA, 282 bp, Glycine max
gtttctttcacgtcattagcttgacgactccaatgccttcacatttcgatggtagagttaagcttacacatacgaggtttggatgtctgcagctctagagatatatcggttgcatacaaatgatactctatagctatcattctgcggccaggatctcccatcacactcataggaactaatcctcattttgagagggcttaatcctacgacacaatatggtatctagatgatgatcaacttgttgagcacttctagaaacaggacctgatttgagtggcctga

SEQ ID NO: 115123 - DNA, 273 bp, Glycine max
cagctggcagtgcttttgggcctttcaacttttttcacaatggcagatgattcaatcactactctttggccttggaaggttcgtgagttggctgaaaaggtgtctgaaaacggtgtcttcagactactccgaagtgatgttactcggttccttaccacaatacttattggcacaacggtggtcaatattggggcaactgctcttgtcactgaagcagcaatgctatgtttggtgcagctggtgtcagtgcagcaacaggagtgatgactgttg

SEQ ID NO: 115124 - DNA, 280 bp, Glycine max
gttctccaaaacttggaaacctaagaagacaggcacgataactggccctgttgtttttggaggttagtattttctctccatgctcattttctttgagtaaattacacttgcaatccctgaattttcatgagattgcacaaactccccatgttttttaaggattacagctacctcccttgaaagggggatacggtatcatgtttttcaaacaatgaaggtggttagtgtaatagtttttaaacaattaagggagttagtgtagaggtagaaaacataggaa

SEQ ID NO: 115125 - DNA, 213 bp, Glycine max
gttgaggagtcatacctgctcgaaaatccacaagtatatgcttaatcacttgcttatatattgtgtcatgtatcatacgatataaaaacatattcagttttttaataacggtgtgcaagcaaatatagggttgtgtagaatggttgcaaagacttgcattccgtaataagtcctcattgtatgaacagccaacaatggctagtggtttgccaa

SEQ ID NO: 115126 - DNA, 138 bp, Glycine max
gtcgagccgactcggctcgagagaaagacatgtcttgctccgacgagcgtatccaattcgccgctgatctctcctacttctagccacttctgctcgcagccctccatcatctcttcttcgccggagtccctctccctc

SEQ ID NO: 115127 - DNA, 280 bp, Glycine max
gtttctttatgcacttgcttcattatttcactatgtttgaattatgaggtttagaaatatacttttcttacaatgagacctgcagaaattacggggcttgtcttctagattgcataaattatgcctgcatctctgtatgtggaagatgttggtttcagtttatgatgttgcaggaattatcagaacatcttggaatccagctgctaaatgagcggttaaatgatccaacaatcctagaatcttttgaatccatatttccaaaagataatccaaaaaacac

SEQ ID NO: 115128 - DNA, 271 bp, Glycine max
tagtcctagcgggaggatagatatgcaaaataaaggacttctatgaacgcccaagtaacaatgtgtgatgaaaataaagtagatatgttgaagtaaaattcgtatcatcaagagagaaacacaaacttgttgcgttgagtgtgtgatcagcttcaagccaagaagcaacgatccctttgagatattgggtggacaatgaacaaaagcgtgtagttatggcagaagcaagtggagactttgttgatgttctctttagtttcctgaccccttc

SEQ ID NO: 115129 - DNA, 241 bp, Glycine max
  unsure (1)..(241): unsure at all n locations
ggttttggtttggttccccagcagattctgaattctgataatatagtaccattccatgccagagtgtggcttangtggagagaagaactcactgggaatggaggggcttgcgaaggaagatagtggtggaagtgggagcaagggtggtgctgctcatttgaagggctttatgaggtgggagaagttcttgcccaagatgattttcagggtgctattggttgaagcagatgattccacacga

SEQ ID NO: 115130 - DNA, 276 bp, Glycine max
atttctttccccatcagcgaaaagacagaacaagctctgttgactttttccattttccaattttctcggtgattctatcagcctccgacacaatcgcgcgccaaacgttgaatcggtgccaccaatcaggtcagccaccaactccccctcctcattgttttctccaaatttccttcattccttttcttccgttcattccgttctttttcgaatctacattctttcataatccatttgctaattatatgaaaatctcctatcgattgtcgaatctga

SEQ ID NO: 115131 - DNA, 272 bp, Glycine max
cagaatcctcaaagcagctattagggtttctgtttcttcctcatctatggaggagcacgcttcccatgtgggtcgctccctcgtgaagcagctggcatgctgcaagagaaccaccagagacaaatccctccgcctcctcctcaaatcatggctcccgtcgcagtcccaacccctctccgacgacgacgccaagaagctctggaagggtctcttctactgcatgtggcactccgacaagcccctcgtccaatccgatctcgtcgatcgcctct

SEQ ID NO: 115132 - DNA, 147 bp, Glycine max
gagaaaaccctagccctaacccccgagtctggaagcctctccaatggcgtaccagacacccgatcaagattcaagctccgatccgaagaacccaactcgcctctacaacccatacaaggttctcgaggtccccattcgcaacctcta

SEQ ID NO: 115133 - DNA, 275 bp, Glycine max
ctagttctattacttgtagtagtgtagtatatttaagcctctgccaattgagttaaaagagttgattgcaattatgaaactttacctgagtgagtggtaaagccgcaagaactgccccataaggtggcgctattctgctattttatctcttttccctcgtttcggaaggaaaaaacgagataagcacgctgcttaggaaggagttacaaggaaccttcccttatttgctgcccctttaagctatcccttctcagttataaatccgcaagagtaac

SEQ ID NO: 115134 - DNA, 271 bp, Glycine max
  unsure (1)..(271): unsure at all n locations
ataaataataaagaaaacaaaacaagaagaaggaaacgcgcaacgcaacacaaaaaaccacactttcaattgcatttctctctctttctcacaatttccactttccgggcaggttagnncgananncgnngnnccaangagcgancactnggcggcgngcgncgaccgncgcgcgcgcccggaccccggagagccggaggcgcagacggcgcaggcgccagccgaaccagcnccaccgccggccgccgnggangccgacgccgccgggagt

SEQ ID NO: 115135 - DNA, 280 bp, Glycine max
ttcgatgctcctctgattccgtccaccaccaccaccactaccaccagctcccctcttcctttcacctgtcgtttgtttacactccctttacgtcaccgttttgattgctaaacgcaaccctccacaccataaaccaactaacaacaacaccctctaatatatatatatatatatataatactttccactgttaagaccaattcagttacaaagtcttccttcacacgcatcctccttcccatgttttttcgtgttctctgttctctgttctcttccacac

SEQ ID NO: 115136 - DNA, 272 bp, Glycine max
ctcgagctcgagccttctgaagtatcagtgtatgtaatgcttgtatatcttgtctatgtttcatcactagaaagatagattattgttattatttaactgttggactgtgatgttttggatacagggagaagacaaaaccaaaatcattgagaaaaggacccattgataaagttcaaggagaaggagaatcttccttaagtaccaacacagacgattccaaacctcaaagggtgaggacacttccaaattatggatccagttttaagtgtggt

SEQ ID NO: 115137 - DNA, 262 bp, Glycine max
  unsure (1)..(262): unsure at all n locations
caccaccgttctcttttctcttctcactgaattttcagatctactttttctcctcagtggagtaataatattgattgattcacgcagctatagccatttcagatctaatattctatatatctttctctctctctctattctctctcttcgatggcttccacggttgttgctgtttgtgncaggagngacgngccgtcgcggcagccggtggtggaaccttcgccggcgncgncccccgacaacgccgctaatcggagcgatt

SEQ ID NO: 115138 - DNA, 268 bp, Glycine max
tctctctatgttgacgctagctagggtttctcttcctgctttgtaaatttcatcacgagtctctcatatttttacaatgggactattctcccatcaattcgtttcacgaaattcaaatgtgtagtaggatacccagtgggttgttcttcaatcaaatgcaaactcgcggctagactcgctctaactcgtgattttatacagagttagccaattttccatcaaacacccaaaaatgtccaaaacgtcaccgtttcgctagggtttgttt

SEQ ID NO: 115139 - DNA, 265 bp, Glycine max
gtctcccatcaagctcgcttaaatttggatctgatatcattgaggttgacttggagagaaatgttcagatccatgttggtccaatgagatacaggattgaagatcagctgaagcaggagttgactccggcaccagtattccctcttatagttgcatttctagttgttgcactttttcttagcatgccaagattgaaggatttgtatcaagccacggtagacatacccaccccaggactcactgcggcttcaagaaaagacgtgaa

SEQ ID NO: 115140 - DNA, 243 bp, Glycine max
  unsure (1)..(243): unsure at all n locations
ctgtgaatctgacacttttaattggttcaggaatatccatcacttttttatcaattgaagaattggaatagagaggtttttgactctttgaaaaatgaatccttccttataaaagaagcttgatgcgttagatgctagaaggggtttgagctttaataattttcttgaactggaatatatanaaagatttaggagtatgaacaagtgccagtgtggacaaggagatccattagtattagaaat

SEQ ID NO: 115141 - DNA, 262 bp, Glycine max
gtttctctcaaggatgctgccaactccactgatgaatcagtgtttcatccgcttccaactttgtttcggttgctgggtttaaacccttttaagaaggcggagttaactcctggtgatttctattccaacaaacgtcctctctgtcaaagggtcccattaccacgtaccaagtctgagcatccttctcaaaatggtcaggagaatgacaatgaggattccatttctgaaattgatgttgagaacattgttggtgttggatcga

SEQ ID NO: 115142 - DNA, 260 bp, Glycine max
catatatcaaagggagcaaaattttttctgatggcggtttggtagagaagatggttttcaatgagcgtggaacattggagagtgttggcgacgatgtgattagtgctcacctttatgaaggaagtgtttgtggtgaagaactatctgacatggtgtcttgagcatcctttagcaagcaaaggttgtggaaaagcaaggattccaaggcaaaagttggttagtaaccggacagtaggctgcttaacgaatgtggaggcatt

SEQ ID NO: 115143 - DNA, 259 bp, Glycine max
agccaatttgttaggtcatactatgctactattacaacttttttcagaggatttggttaatgttagaacaaacagttaatttatactgagtaaaaatgaaaaaaagtagaggtgcatgcatctagtgtttaatttcaattaatttattttgtaattcctaacattaaatcaattgttgatgtttagtatagaacaaatctattttcagaataacctaaaacaaatcatcataatcgtttagaaacaccaacacttggag

SEQ ID NO: 115144 - DNA, 257 bp, Glycine max
attttgcatcagcaggagctggggctttggttgaaacccatcaaggactggtctgctgtgatagatctgaaaactcaactaagttatttcaagaaagtcagcaagatattgagtcaggaactaggagatgcggaaaccacaactctgctggccaaggcagtgtacttgattaacattggaagcaatgattatttagtctctctgacagaaaattcgagtgtctttactgctgagaaatatgtcgacatggtagttgg

SEQ ID NO: 115145 - DNA, 269 bp, Glycine max
ggccaatcctcccccaacccacaagagggttggcacacaacaaggaccaagaggataaggaactctgccttggacttcaacaccatctttggatgatgcaaacctcttgtgggttgggggaggattggtctactaggagactcagtaggcataataataaggtgattcctccaagctgtggagagttggtgttgaagtcacagtgctcagagaactcaaagtgcaggtggtgcaccagtgaggaccttgatgacatgtgcttctctaaa

SEQ ID NO: 115146 - DNA, 266 bp, Glycine max
ctcgagccgctcgagccgctcgagcggtcagagctccttaactaccaccagctaatcgtgtacaactgcaacttgtctattctggacgtagaaaccttctagtgtttccagttggagccacctccgtgtgctgtgctgtttgcaatgctgtcacagcagtgccacctcctgctaaatcacaaatactggtgtgtgacaggcacagaaatggcccagttagtatgtggaggttgccatactttactcatgtacatccggggcgcgac

SEQ ID NO: 115147 - DNA, 248 bp, Glycine max
cttgttgatacaactgtgattcctgcttcttcagtcattccaactggtggcctttctggttcccataaacaccacaattgtgctgtacatgttgataataaaaccagtacatctactactctagtagctactgataagtctcccagcaacgttcatggtgatgtgtctgccatttcgattgatcttgaagctctttgtaataagactacgagcttactacaatctccttctaggtctctacaacttcc

SEQ ID NO: 115148 - DNA, 267 bp, Glycine max
ggtctttgtgttgggttaccaaagcctccggctcccgagttgcgcgtgtagcaactcgggatccgctgtttcttcttctccggcggcagcggcgaaagagactaatccttcgccgctgcctcatgttgcttccaattctggatactcttctacggtgactctggagctgccagggaagttggaggccttagaggaaagcattgagaaggtgatttatagatgccggtttatggctattctgggagtatttgggtctttaactggatc

SEQ ID NO: 115149 - DNA, 268 bp, Glycine max
aaaagatgctacagcaaagcacaaaaacagacaagaagccgcagatgctacaatctcattcatgtcatgtcttcataacagcaatctacaaaagttcattctcacacttcatcaaccaatgtaactcctctttgcttggacattctcttacctgctccaccgagcaagggttgctttttatttatgtgctaagaaacacaagcttaaagtagataaacttaagttaattgagctctgtggtacatctgagtctgagttttctagtgtt

SEQ ID NO: 115150 - DNA, 256 bp, Glycine max
cggagctccaggtactcgctccgactctcccgcttcagatcctcatcctgttcttccttttcgctgatcgttttttgagccgacggcgctgattcgttcgcacggaatcttgctcggcgtcggcgtgtaagtcatctgtgaattcccttgggcaagatggctttggggcaatatgctagagtagatggtagaagatcgtcgagttggtgttcaacggtgactgttgtcatgtttgtagctctgtgcttggttgggg

SEQ ID NO: 115151 - DNA, 266 bp, Glycine max
gaccccctctctctgcgactctgcttcggttcttccttcagttcaccagctgcagacaatggcagacaagaagcggaaggagaggaatgaaggcaaccgccaaagaccgaagtcgaagaagaagcggccaaacactcaacagaaggagaggggcccttgtttgccctcatctttgcaaaaacagcttgactgtttaaaccctaccacttcctttgacagcattgattctgacgactacaatgacaatgatgtacacgagtacaagg

SEQ ID NO: 115152 - DNA, 262 bp, Glycine max
  unsure (1)..(262): unsure at all n locations
ggaaatctggcccttgccagaaaatttatccgccagtgctggcggaggtcttctctttccacatggtatcgaaaatagnatacgaagtttgttgatcattacgcatttttgcagtacaggttacaatacaaccatttgctctgatggatcctcatactgaagagttgcctcagtacatacatattgatcagaatgagttttgcatacgaaggcataagaagcagaaggagtatgatattgctatctgtgaatggcaatatga

SEQ ID NO: 115153 - DNA, 289 bp, Glycine max
cgcaaacaaaacaaaccacacgcgcatgaaaatagtaattaatactactaattcatttcctcaacataaaaaaaatagactttcgcggaatatacttttcctttccttctgttctggttaatttcgtttttccgtttcggagatggattcggaggatttccgatccattctggagagtgccggcgtcgacgtttgggccttcatggacgccgccatcgcggtggcttccgtcgaccaccccgacgagttaaagcgccggagagacagaatcgtggagcgcctttacgcg

SEQ ID NO: 115154 - DNA, 290 bp, Glycine max
ggacacactcgtgtgtgtctgggacttgaagactggtgagaaggttcacactctcaagggccatcagctgcaggtcactaggcattgcctttgatgatggggatgttgtctcctcttctgttgattgtaccttaaaacggtggaggaatggacaatctgtagagtcgtgggaggctcataaggcaccggtccaaactgtcataaagctgccctcaggagagcttgttacaggttcaagtgacactactttaaagctttggagaggaaaacttgcttgcacacctttcaag

SEQ ID NO: 115155 - DNA, 287 bp, Glycine max
gtgatgggagaacacaacacaacagagaagaaaggggccaaaagacaaatcagaaaccgaaaaggaattgaacaaaacaaaatcgttcacaaacacaaaggcaccaaccaacctcttcgaattcgcgttttcttctctcttcgcctccatttggactgttgatttggcatatttattacagagatttgctgttgctttttcctacttcacggtgacatttggggcaaatccaaactattgcattgaatcattttacaaggaggaactgcctaatgatctagtgagag

SEQ ID NO: 115156 - DNA, 281 bp, Glycine max
gagaaattgtattgcatgatttgaaatttcagttagtggattctcaagtcttggtacataaaactctcaggtaaagacgtgaaataggttatcatgcagctttgagagttcatgcgtgtttggaaacacgttccctacccaacaaatcatgtcaaatgggttaaagacgtgaaagctagaactaggaacttctattcagatgtgagaatccatgttcgtgatgtatgaccaaacacgctattcatccctttggttttttaaatgcttattctaggagccag

SEQ ID NO: 115157 - DNA, 282 bp, Glycine max
cacgtttgaagatatactcaacagtgttgattgaatttgaattaagccgttggatcatggagatttttctggcaaagatattggaggtagctcttgatatagcagtaataatatattttggtagtaagaaagaaagaacaagagctgcacttatcagggcaaaaagttatataagacagtgtagaattaaaaatgttgtctttgtgtagaatctttagttgcaatgcaccaacatgcacaaatgagggcctttttaggattgtgttgctccctttaatgcga

SEQ ID NO: 115158 - DNA, 283 bp, Glycine max
agaccatccctgaagaatgcagtccaaatcatcatgagtccaacagtagtagccaggtcatatggcaagacaacatctatcctgatgatatgacttatgaggaactactggacctgggggaggcagttgggactcaaagccgaggtctttcccaagaacttattgatatgcttccaacctcaaagtacaaatttgatagtttattcaagagaaaccattctgggaaaaggtgtgtaatttgtcagatgacatacagaagaggtgaccagcaaatgaaattgcc

SEQ ID NO: 115159 - DNA, 295 bp, Glycine max
cggctcgagctcgagccgaatcggctcgagatatgcttagcttctggccacggtaaaattataagtaatatcttctcgaatgttgtttgcagataatgtgtactctctgttgaatgtttgtttcagtatatgcagtggcattttcatttagagtgcatttgatttgctaacaaatgaaggactagacaatacaaatttccaaaaaatttaaaatacccccaatttagttaagccagcaagcacaatgactcactcgggcttgtacgcaatgcgaactcttactccatttctagaa

SEQ ID NO: 115160 - DNA, 288 bp, Glycine max
aaaatactaaaatctataaatttttttcacaatttacgatgattgatgatgtccttggaatcatggtcatccttttttgtttccgaggtttttctgtttcagttgttctttttttttttggaaaaatttcttccatggtcaggtaattttaaatctgttgactctattttaatttttatttatcctttttgaaatggaatttgtattttctacggattttctcgggaataaaagggtggtcaaatattgcttgtttttcaacagtgagattttaattttaattttaaa

SEQ ID NO: 115161 - DNA, 176 bp, Glycine max
atcgaaccgctcgagtcgcacgagtcgaaagagccgctcgaatcgcagagtctccggcgaaacgaaccacactcaccatgtcatcaacagcaatacggggagatccagacagacgaagggcgtacaagaacatcaacaacatatgcctacatggtgctccactacctatgttacga

SEQ ID NO: 115162 - DNA, 284 bp, Glycine max
  unsure (1)..(284): unsure at all n locations
cgttaggcttaccttcgccctctccgnccacaccctctactcctccttctccttcacccttcctttcccggcaaaactccacttcttcaaggctcagtggtatcaacatccctcctgctctcactatcccaaacccttcatcatggcctaccatgtctgatgatttgatgagtcccaaccatttggttgtcggctcttctacttcttcatcttccttaccctactatgctaacggagggtcagatccaattgatgacttccaacttcaagaccagctttctttc

SEQ ID NO: 115163 - DNA, 280 bp, Glycine max
accacctgctaagaagaaaagaaacctaccagggaatccaggtatcttttctctaattaacaactatctcagtttcgtaactatttttttttttcatttaaatatataaaaacatttttgtttccactttttctttttttatttttatccccatgataattactagactaacattgtaattgagaatttgatcgcttgatgttgcacatgatatagaaacattttattggtagttacagtcagacctactctcctaaagcttaagctattaggtaatgtc

SEQ ID NO: 115164 - DNA, 282 bp, Glycine max
ggcgtacaagagcgttagtagtttcagactggacaagacgttttatttttggaagggactcaagtagcatctgagggaactcaacatcttccagagtcttttgcattggcaatgtggcagagctcgttgatcataaatttcatataggaaaattttgtttcaattccatttattctttgaataaggaagctaggtgatgttcgaactcgaacagctgaggcatgctcgccatttagagtcgtggcattagttggtttccgagttttgcagattaagtttgtt

SEQ ID NO: 115165 - DNA, 287 bp, Glycine max
gcttgctctggcttcggaagaacaaggagagtcagttaacaatgttggaaataaagttttggggtccaaaggaagtaatgcttcggtacaccagttttcaggtgcaaatagcaccagcaccatgtatacagatgaatttgactcttctgtggcaatgctaaatattgcgatcgtttggttccatcttcatgactatgtgaagacattgtcagttttggaacctctctttcaaaatattgaacccatagatgagcagacaacagctctacatatttgccttctgctgc

SEQ ID NO: 115166 - DNA, 286 bp, Glycine max
actcgagcgaatcggctcgaggtaaggaagtgtctcaatctgcaccagcgagtgcatctaatgaagttaagtccagtaatcgtggttcacttgttcaggctactatatccacattattcaagaaagtggaagaaaagaaaactccaagaagttcgaggaaatctccatcttcaaaaccttctggccagaagtcacagcctgctggttcaaaaagaaagactgatctggttgaattttctttttttattttttatttcctgaatctgtttttccttcaagtgggaat

SEQ ID NO: 115167 - DNA, 259 bp, Glycine max
cgaaagtatccatgcttgatcaggtccagcactctaccatcatggtcaatgctaatggccaggtccatctccgtgactggcgtatctggtattaggacttatgaaggaggatactgccaccccacgttgtgccaaggatactcttttgggagttactccaatgctgcattgcaatatcgtgtgtatgacctcatgccaagctactatggactagtctgctgctgcaagaactgcctctcccgtctatgatgctgctcca

SEQ ID NO: 115168 - DNA, 286 bp, Glycine max
attcccaatggatgtgtggcatgtgggtcacttgttacatatccctgcagcactctttcagaacttctatcagcttagagttactaaagcttctggtccatcagagacattgatgatttcagatgagcatatttgtgatcaagtaaagagagtggatttctgtcacgtagatcaccagttcttagttaacctatttgaagtgtgttgtgaactattgtataccactattatgcatcgtccaagtgagtgcaaacagtgtgttgctcatcttgaagcttctgttgct

SEQ ID NO: 115169 - DNA, 276 bp, Glycine max
cgaatctagaaatcccagggaatcttcatatcgtatctcgtgtctctgatgcatggcactgatttctctccaaaacagcgtctttccacttccattgccaactactcattcctcagcgaagagctttccctatgttacgatgcgtcgaggcacaatctttggttcgagcctcgttgctatctcaactcaacaccatccagagttgcatagcagttgccgaatgatcatgatgagcttcagcaacaagaggtccaccttgtgcaactctttaaggat

SEQ ID NO: 115170 - DNA, 256 bp, Glycine max
aacccttcgcttcctactcctccaccttttccaagttcaattcagtcaatggtttgggcgaaatgggtcgctatgcagcagcagcggcagcttctctgatatggtcaacgacgttgctcttgttgttattgggcctagtagtagggaccaaagcgacgtcgtacaggaggaacgcgtactcgacgatgatgtacgttgggacgcccagggactacggattctacgttgccgttcgcgtccttctaaaatctctctc

SEQ ID NO: 115171 - DNA, 282 bp, Glycine max
tatgagttgtaaatctcttaacagtgtctttgattctcacattaaaaaaaataataatatatatctaattatttgtgtatatttttatccgatatcatccttaactaagtatgcatatttaattttacataaaataattataataaaagttgggataaaaattttaattatataaaaattacaatttatttttatcacttagttgatgaactatttactcaggagcaaatatataagtcggttcctaaaaatggcaatttacaaggtcatatacagttatta

SEQ ID NO: 115172 - DNA, 287 bp, Glycine max
ctttaagtggcatagccaatacttaaacaatagcatgagttaaattcagatgagataggggcatagagcaggaacataaaaacttaaatgtctgccccttcaccatttctgagcttttacttcatttttggcatatgtaaatgaaagagcagaaataatacaaagtttgatatgaattacaagtcaatactcaatactaggtccaaaagattaatagaagaaaaactcaatacatagatttggcctagcagtccaaaaacatactaacaggtacatgctgatgtgca

SEQ ID NO: 115173 - DNA, 268 bp, Glycine max
ctcccttactctctctcatattatgttttttttttcgtcaaacattttgaaaacgaaataatcgagtaatgcttagttttgtttttatattattattattattatttgaacttaatatgggcgtaaaaataaattagaattttatataaattatgaatttttattattattaaactgaccttagttagtgcagcttattttttttaagtgcaaattttatttgtgtttagtttaattttgatgctttattattagtaaaacaaaattg

SEQ ID NO: 115174 - DNA, 261 bp, Glycine max
tgaagggtggcacggttcagattagctggcacgacggcaaacccgtcttaaccctcgatttccaccctcactccgccactctcgccaccgccggcgccgatttcgacatcaaggtctctctctcgcttcgcattcgcttagattagggaaaatcgttcgctcgatttcattcgtcttcttgtgttttcagttttggcaaataaaaccagcggggtcaccgaagaagcttcccgtggtttcctatcttagtaacctctctta

SEQ ID NO: 115175 - DNA, 276 bp, Glycine max
gtttgcttctcctgctggtcaatcttggccatcctctgcatctcagagtgttgcggctgttacatctgtgcagtcggctggggtgcaatcatctggtgctgcatcaactgatacggtgactaatgctactaaccagcaatccttatctgattggcaagagcacacttctgctgatgggagaagatattattacaacaagaggacaaggcaatcaagttgggaaaaacctttagaattgatgtcacctatagagagagctgatgcatcaactgtttg

SEQ ID NO: 115176 - DNA, 270 bp, Glycine max
gggaatatggggcatgtcttgataacttacaatgcttctgccaaactccttgctgtctcatggttttttgagggaagaaatagttctagttctgcgcctgaagcttctctttcacaccagattgacctcggggaaattctaccagagtgggtcactgttgggttttcgggtgggaacgggaattccaaagggaaaaatgttattcattcctgggaattcagttcaaatatggatctaaaatccactcgtaatccagaggtaataaacaaa

SEQ ID NO: 115177 - DNA, 269 bp, Glycine max
gggtggcattacttggatgaacctatatgattccctcagttaccaaatgtgagaggtgtcctctttgaggtatgcttctcacttaggctaccttcacctgatgtttggacgggtaccagaatccttttcagccctaagtgtttctgaagaatctgttcttattgctttcagcatactctaaatgatgaaaattatggcaaaaaattacaatatagttgtttatgatataagacaatttatacatgcaattgtccataaagcacgactgt

SEQ ID NO: 115178 - DNA, 274 bp, Glycine max
gttctacatgtctacaccagtagaatactaccggtctctaccacctgtgagcaaggcctatggagtggcctgtttaatgactactgctgcattttatctgcaattctatgatgcatggaacatagcacttgattatggctcagtgtttaaacgccttcaagtttggaggcttatcacaaatttcttctttcttggcccgttttcatttccatttgcaatccgtctgataataatagcaaaatatggtgtttcattggaaagagggccctttgac

SEQ ID NO: 115179 - DNA, 268 bp, Glycine max
tgtccttactagggctgctgcacttggacgaggagctgccaccactgggttcaagcggttcctagctctaactgaagctgccaaagacaggacagctgggcctttccggaatctctttaatccataatgaagagagtgctacaaccctaattttttggccagagcccatgagctttgagtttttttttttttttataaaaaattagttttcgggctctttttgctttgcttctctttgattctttatgtaagtttagtatcatgttta

SEQ ID NO: 115180 - DNA, 285 bp, Glycine max
atcagaacttatctttggctacctttcttttcatatataggaattattaaagaaaatcatcacctttcaattttgcagtaagataaattctcagttgtgattgatggtcgttcaaccttcaacacggcaatcataatggatgaaaaggtggaaactcttaaagctgagttacaacgagtgagagaggagaacaacactctaagactgatgcttgaagttctaaacagcaagtgcacaaagcttgagatccatcttcaagagataaacaaggcacaacacaagggc

SEQ ID NO: 115181 - DNA, 279 bp, Glycine max
ctggctttggaagaaaggatgggtactgtgagcacagctctaacagactaaacactatcagaatgcctaaagaaaagtttctaccagtccccaccctctgaaaatgcagctgagagttgcaatgaacataaggatgataccaaatgcagcatttgccaggtatttttcactcgttttgaaccttccatcgcagtcagggtgtcattaagcaccatcatgactcaaagcttattgtccatgatggatagatgatctacctgctttctgcagcatttgatt

SEQ ID NO: 115182 - DNA, 274 bp, Glycine max
gcatgcgtcatggttatgtcccttacagattgctatttatggtaaaagctttaaccattcagctagagatgcatgggagttatttcagtcaactggggttgaagcacttgtggcgtatgattgttctggtgctgttcttctaatgggcactgtttttggtgggctgattactggaacttgctctggtgtttgggcatgggttaaatggaaagacagagttattatgattggatacacaaccatgctgatggggatggtactggttggattggcc

SEQ ID NO: 115183 - DNA, 231 bp, Glycine max
agaggcttcagttcagactcgggaccctgcccttcttccaagataaagtgtttttgttttcattataaaaataaattagaaatatcttttaaaaaaattgcagtggcagcacacacatttttgtgtttcaaaaatggaacctaatgacaaccaactcacctctttcttccaccaccaccaccaaccgcaccaacaccaccagccgccgccaccaccgcagaccacggcgtc

SEQ ID NO: 115184 - DNA, 186 bp, Glycine max
caaaatgtgaacttgtgaaaatgtgtggtgtttctgtttgtgggtctctcggaatgtgcatgtacacgacggaaagcgtggtggcgagtctcgaaaatggcgtgtttaagaatggggacccattgagttcagtgagtcccattctagatcaatgggtggaagaaggcagagaagtcaccaaacttc

SEQ ID NO: 115185 - DNA, 138 bp, Glycine max
tcaccgtttcacctctcttaaactgcacaagcctggaactcctctacctctcgcgcaacgacttctccggcgagattccgccggagatatcctccctccgcctcgtcctccgcctagacatctccgacaacaacatcc

SEQ ID NO: 115186 - DNA, 241 bp, Glycine max
tggcagactctgtcttccaaagtgaaaaaaaggtaaaaacgattatgttctactagtcgcctgtttgaatcactgttttacttaatgtttttgcgtatgaccaagacgaattaaaaccatatgtgcatccaatctactaaaatgaagccattggttactcgattgagttagtcgtagtgcacctagatgcttgacgtgcgtatgacgtgttaattagccattactatatagtattactgta

SEQ ID NO: 115187 - DNA, 124 bp, Glycine max
acagcatggatctgttgattggacaattgatgagataccgattgacgaagtaaagatgctgagcgatcagaggagtgttgcagttctgtatgaacttctgtctggttgtctatcaaatttaggt

SEQ ID NO: 115188 - DNA, 251 bp, Glycine max
tgtagaaggatgggtgcgattgggaaatggttacatcagaagcagtacggcaatacgaacgtctccgttaagaagaaagaccgggcgcgcgtggaaaacgcggtgtacattctgcgctgtccattgcggggttagcctctgcggtggctgctgtggcggcaacagaggaccctcgcggtggctctcgttctaaattggacgttgctctcgcttcggccacgcaactcgttggctcttattgcgttaaaatg

SEQ ID NO: 115189 - DNA, 116 bp, Glycine max
aaaaaccaaagtgagagaggaaatgatgaagccatcgatgctcagatctcttcactcttccgccaccctgggcgcctcccacgtctcccggcgtggctacacctccgagccggtgg

SEQ ID NO: 115190 - DNA, 101 bp, Glycine max
gctcgatggcaattgcgcttcacggcgtctcgtagggctaatccgcctcacgatggtcaccaactgcacgctcctttggcaggccgaggcccctactgctg

SEQ ID NO: 115191 - DNA, 279 bp, Glycine max
atgaaatgaaaaagtcattataattcttcataggtagaatctgattgtgtattcccccaacccctcaatttgacttactttttttaaattgctttgtcatagatgcatgaattaacatctggactcatttaaggaccctgttttttaggggaagaaccaaattttgtttgttgtaacttaagtttccaattccctagcaagataggttactgctaatatgatagtttgaaggtcatttgctctttttggtaaatatagttagtttttaccccaagcata

SEQ ID NO: 115192 - DNA, 238 bp, Glycine max
  unsure (1)..(238): unsure at all n locations
gatctgatgtntgaatctatagaatctggtcaaaccaaattgcaagctagatcgatggatcgatcgatatctctggaacggtgcaacgtggtacatgcggcggacacggcaccggtggatatatgatccgccagcccatcaagcagggctacggcctccgacattgctgcttgcacaacatccacgagcagctgctcatgctccgtggaaacacgcgtagcacaaccgtcttgatgct

SEQ ID NO: 115193 - DNA, 289 bp, Glycine max
atacaactctgagtatttattaaagtcatcagtgatctcagcactatcagaaattgccttaaagcccagtgacagtgatcttggtgcacttcagcaactcttggttgatcaacccaatctccaaactgaggaagttcaatttgtatttgatgtgatatttgctgaagaactgagttgatgatcctctctactatggatgttgacttgggaccaggggatgcctgaacttttatacatcaagggagccttttgatctcccagggacgattgttgatgcagaatgagttaa

SEQ ID NO: 115194 - DNA, 289 bp, Glycine max
agaaattagaaatatttattcattgtcaccaaatcttgttccctgcaagataaagaaagaagggagagaagaagttgttgggttgagttggattggatttctaatctaatctatacctttcttttttcctatgcttttaaggcacaaacccttctttcttccctcttctttcttcttcttattgttattccttgcctttaccctttagggaaggaagaaggaacaactatactactattatccttattattgttattattgtaattaatctttttaatatagttattgt

SEQ ID NO: 115195 - DNA, 259 bp, Glycine max
atataatcctaattctcaaagctatgcctctacgtcctgtcttcaaagcttcaccttacgttcatcatacatagcaacttacttcagtcgataactgaaaccaatctgggacatgacaaccacacgacgatgatgctcccgttgtcgaggacgtgacggatgatgataaggacaacgactactaccactacgactacgatgatcaagatgacaaggacgacgatgctctagatgatactgacggctcaaagcacagcag

SEQ ID NO: 115196 - DNA, 289 bp, Glycine max
tagattaaagatgggctccgatctatgttccggggttgcgcatgcctgtgttccccccgatcatccatttaccaacagggtggcgcttctacttctggaggcagagccatgcaattgtgcttcgtgaataatctgcctatagaatttttctccacgttcaatatcttctgaggacggtggtccagttcaaattgagctgcgttatgctggatcgcaacaacgcgtagtgacggatcaagtttctaacatgaacgttcagatctgtgtactatatggtgatttcggtaag

SEQ ID NO: 115197 - DNA, 287 bp, Glycine max
ggaaggataacctcagtgaagtaaaaagaagaaattgaaaagggaagaaaggaaaaagaagaagtaaaagagggcaacattagagttaataaaaaattgaatgttgtaggaagaaaaacaggattactactcaaataaaaagaagcaggataactcatctagaatcagagatgggtggcaaaaggacactcacaggagtcatattgcagattctttcccaaataatgcattttcagatcgatataatccttcacaatctcttgggatctgtgaggatgatatctcct

SEQ ID NO: 115198 - DNA, 288 bp, Glycine max
ggaatcatctcaaactcactcttcttcttctgcttctgctgcttcttcaaattcaaaccctgttgctgctgctggtggtggtggttctgttgctaatgtttctgcaactgctgcaaaaaaccttcacacacttcccttgcacatcaatggcgcaagggaaggtttcactttcacccttgggaacaacaccagcaccaacaccaacaccaacaccaacaccctccctcaccttcacatgaaccccctcactctttcagctgacaataccaagaaaacttacaggtttgg

SEQ ID NO: 115199 - DNA, 280 bp, Glycine max
ctcgagccgttgagccggatttatctttgggaatgactggtaaatcaattagaatgcagaagaacagtgacctggtacgtattgaaatatgcactagaatgctatgtgaatgtacattaacatctgttcatattgaaatactgggacatcatggagatgcggctagggtcagcgtccagtaaggttgaccatccatgcgccacctaaggaaaccgacaataagggtgccgctccaaattgatagaatactggtctccagacaccagtccaagccgtccca

SEQ ID NO: 115200 - DNA, 227 bp, Glycine max
  unsure (1)..(227): unsure at all n locations
attttcttaacaaggaacagagnnatggaagttcaggaggtaatgtactggtgatagtggttgcagtagtcagttcagtgattgttttggtggttggaatagctattgtggtttatatccgcaaacacagatatatccaaatgaatccaagaggttcaaatgatgcagaaaagttagccaagagccttcaccacaatagcttggcattcnagtattctacactggag

SEQ ID NO: 115201 - DNA, 259 bp, Glycine max
cttgaaagcaaggcagcagaagaaatagtggtctgggaatcttaacactgttggttgtttctaaggaaattaattaaagggtatagtggcaaatgagtggtgatcataacagttctgtttccatggttgggaagaagaaaaagaatggctctcttcggtctattttcatgggtgctgatggcttagactggttcctcatgatttttggtctctttggggccattggtgatggcataggcacccctttggtgttgtttat

SEQ ID NO: 115202 - DNA, 279 bp, Glycine max
ctcgagccgaaaaaaaataagagaaggacaatggggtggttctatccaaaaaagatgagtactgaaggatacacaaggccagaacatgaccactgctagtttctccttctccaaatttccatttggttgtgatatttggcattgtctttagcttattgtggctctcaaattacacagccatttaccttcagtttctcctcatgctgtctcccatacttgggattctcttctatgattcatattcaactacttgtggtggaaggctcaactttagtttca

SEQ ID NO: 115203 - DNA, 245 bp, Glycine max
cttgaatcggtagcatttttatggttattccatcatacggatcacacaaatcattgaagtacgctctagttacattccttcctaattccgataccttccgatactctatctcggttacgcatattctcatacatgaacaggtctctctttcacacgtttcgattcctgattgtagcatcatcatcgaactaagcacacttacttaccttactaaactgttccctttggaatgcgtaattctctac

SEQ ID NO: 115204 - DNA, 274 bp, Glycine max
gaaaggaatacctttaaaatggaatgcagttgcaaaggtgacctgagattggtgcatgaagaatgtttagttaaatggtttagcacaaaaggagataagaaatgtgatgtatgtaggctagaggttcagaatttacctgtaactttgcttcgtgtgactagctctgttcaaagagaaaacagacagctgcaaggtcagcagaacctacatccagagtcaataagcgcttggcaagactttgtggtgcttgtcctgatcagcacaatatgctact

SEQ ID NO: 115205 - DNA, 273 bp, Glycine max
agtgagatcatgattcatgaaggcactaggatagctcccgacccagttcgattttctcatgcaaaatgctcagagctaccagaattaccaagtttctcagggaagaaccccgaaggctggatcttcaagcatgggagcttaaaacaaaatcaggcaatcaactaacaactgttcctagttcctcgatcgagtcatgttgcatcaggttacctgttgcaaacatgaataccatctgccgtgtattattgaatggtcaaaaagaagcaaagagtg

SEQ ID NO: 115206 - DNA, 265 bp, Glycine max
tggagtagacagcttgagtgggacttggagctgcagtgtaggttcagattgcttcaggaaatggctactgtgtcccctttgatctcattccttgaaatccgttttgggtttcaaccagagccagattaccctgcttggtgttgccaatgatattggtgaaaatgttggcattcttcccggtctcgcctgcaacagattcgctccgtggctcattctcttcatcggggctcttgttgcgttccttggttttggggttctcgggctt

SEQ ID NO: 115207 - DNA, 271 bp, Glycine max
caaggctttagagacaagagatgtagatgaaatggttctggcaaactggaagtctcaaggaaccatgggtagcatgtcagtgcttaaagaccgtgagatgttattttcaatgattcaggttggaagttatgtctctaagtggatcactgtaaagaatcccagtcaacattcagttgtgatgcagcttatcttaaattcaggagaaataattaatgagtgtaggggtttagatgatttattacacccttcttcatctagtaacttggttcta

SEQ ID NO: 115208 - DNA, 175 bp, Glycine max
ctcagcggctcgcagtagctttcaagtttctaacaacaacacgccaaaactgtttcatacgtcctcctggggctatccttgcacctggtgagagtatcatcgccatcatggacatgtatatactccagccagaaacttctgccaagcctggtataactggaatcaattttcaaat

SEQ ID NO: 115209 - DNA, 268 bp, Glycine max
gtgggcggtccctaggcgccgtagtttgtcacctcgtggacgtagctacagcaggtcacctccttatcgtgggcgtgaggaggtcccatatgctaatgggtaggtttcttctgtctggaattatgttgacctttaattatattattatttggtcaaatatgttttatttatcaaggttattttttaactctgggatcgacctgatttttcaatatgcattttattctggtatgttgtaaaatgttttgcttaattttttgtttgaaaa

SEQ ID NO: 115210 - DNA, 277 bp, Glycine max
attagctgaagcatcctcccataaagaaacggttacatcaaaggtaagatcagacaaagcagaagaatccgcagaaccctcacttacaggagacagagcagcagcaccggaacccgaagcttcaggttcgggcttcgcctccaggttcggaccttgcttcgacttcttccccgacctggcaccctactcgttcttcccttgcttctgcattgtctgatcttacctttgatgtaaccgagccgcaatgggaggatgcttcagcacattttaatttgca

SEQ ID NO: 115211 - DNA, 276 bp, Glycine max
ctgctcgagctcgagccctcgagccgatttgcctagaaagcagcgtagaaagttggaagcagctcgagaactgctggacgaaagaagtcaaagagttcattcaaaagcaagtcaaggtacaagcgcaagtagtctgaggctaataatccttgtcataaatatgtgcatggaaggaccataaatctccaaaatgcgtgtccttataccatatggaggtgattaaatggagctccactgtgaatttcagctagtgattgtgggtcttttgggtagcca

SEQ ID NO: 115212 - DNA, 277 bp, Glycine max
  unsure (1)..(277): unsure at all n locations
gctgctctctgcatccaaacccgtcaacctttgctcattatgccataaataaatcaatcctaacagtaagtanagcataccccttttgtcgtcatcattgttttcttcctttaggactttcttaaaccccgtggttctcagtgtagagtacctaatgattcatacgattctatttagcttataaaaaaatttcaacttgcttgcactaatacagaatctgtgtctgttatgcanaagaatagacaggacatgtacttcagatttagtcacgaacaca

SEQ ID NO: 115213 - DNA, 267 bp, Glycine max
cgatattttacacaccatttttgagacacatatggacatggttgggtctaacgccagtgacaaagaaaaggtttacctcgctgttggatgctggctatagttgtatcttgatacctggtggagtgcaagaagcatttctcattgagcatggttctgagattgcctttcttaaatcaaggagaggatttgtccgcatagcaatggagaagggaaaacccctggttccagttttctgctttggtcagtcaaatgtctataagtggtgga

SEQ ID NO: 115214 - DNA, 274 bp, Glycine max
gtgggagtccatcgcaatagacaatagtagctgttgctgtgcagttcttcagtcactatgatttcaagtggtctgatactgaagcacttccgcaatgttgattcgctcttccattttcccaaatccatacccccaattttactcccatgctgaccaaccatatcttctccatgctccattcgtttcaattcgcatttcccataccggtgcaccatagttcccctaaaatgtgcaccactctcctcttcagattctctgccatctgatctttccg

SEQ ID NO: 115215 - DNA, 136 bp, Glycine max
ggaggattgtctctcttcagtgacacttgagttcataccatcaattttcttctgaaattcccttacttgttcaagttcccaaagacacttcattggagaataaaggagccaatgaagtgtctttttgtcaagcttt

SEQ ID NO: 115216 - DNA, 272 bp, Glycine max
  unsure (1)..(272): unsure at all n locations
agcaactcctataccaaagcttattcctcaaacaaaaacttctaatgcggattcaaatttatcagaatttcctatttatctttctcataattgcacaaacaataccttctatgncaacaacagtgctttccaaacacacctcaccatactcttatttaacctagcttctaatgccacaaccgggaataagttttataaggctgatgtggctaacacagtgtttggtctcttcttgtgccgagaccaagaggatcttccttcagggctttgtg

SEQ ID NO: 115217 - DNA, 164 bp, Glycine max
  unsure (1)..(164): unsure at all n locations
ctcaagctgangccactggatttgatataggaagcatgtaaatttcgtagttgggctgaatcgattcctgatgcgctcagggtaatgttcagcaatctaactctgcaggataagataacagtgatccccagggtatgcagatcataggctactgtagtaagtgg

SEQ ID NO: 115218 - DNA, 198 bp, Glycine max
aagcttcactgactgaagccaactgtgttttcccagactggactgctatggcagctgagctccgtgcaatgaatcataatgctggagagcgagttcattctcatcaacgagaagcattacatcttgttcatcttgctgcaaggaccaccccagaaggtcgtcactgtctttctatgcagctagctgcggattactttg

SEQ ID NO: 115219 - DNA, 223 bp, Glycine max
  unsure (1)..(223): unsure at all n locations
cacagttctcaagctcaccttgacacgtcttatgaactcagngaagatataaatgagacccctgttactgatgatgttcctgtaaatgcaaatattaagggtggaactgtaaattcttggaggagagataatcaggcttataacgaggaaggtgtgaggtcaggcatagagaaatggcagggaaattcccagccttatccaaatgccggtattccacacaaca

SEQ ID NO: 115220 - DNA, 262 bp, Glycine max
  unsure (1)..(262): unsure at all n locations
tagctcatgctttctncaaccttaaactaagtgcactgtgatgtgagtttccttgggtacatgcggaaattaacaccgagtctngcatgcctgagcatgagacacaggtgatttcttgcaacaatgaccaatatcctaggatatatttttacgngngggacannnannnnnctcgtggagngctaaacgccgagcggtaatcatccnaggctgaggcttttaacggtctgaaggatgtgcagaaggtggtggaaatcgggag

SEQ ID NO: 115221 - DNA, 256 bp, Glycine max
tgaccccaagagtgtgtccttcatcatgtgcaaggacaattgcaccagacaattttgactgtgcaaattgtggagaaggagttgcacccttggtgggtctatatttgaaactagtacctttcctaatattgagccgtggattctgtcccctaataaaacatttctttaggtatttgattaacagcggtgaaattggtcatcaaaatctgacagtggacacctagggaccgtaatagttggctcgtgcatgtagtag

SEQ ID NO: 115222 - DNA, 256 bp, Glycine max
agaaaacctccaaatgaatagaaaatccattagaggaagcacatttgtgacggttcaatccgacactagcagcgacacaagtgctgctaccaaagtggattcagagggtggaagttacccttcgtggaatgagaaggttgtgatggacgtgccattgcatgcaatattcataaccgttgaagtgaagtgcaaaacgtcatcatcagggtctaacagtgttggcgtggcacaaattccggtttctgattccttggag

SEQ ID NO: 115223 - DNA, 243 bp, Glycine max
aagggcttctcgagaaaagggtaaccacttttcctccaaagattccacttttctgatatctttcgactttcctttcgtccttttactgtccctcggggttcatccctcagctcagactcagaagaagaacctcacaccgcaaagctcaaacaccccacccccaagtggtcaaaatgtcaacaactacaatgtaccaacaacaagaacaacctcctcacatgatcagtgtgacacaaaattcat

SEQ ID NO: 115224 - DNA, 259 bp, Glycine max
ctcgagcggttagaggaggtcataatcagtataaccaattgcaggtagggtcctaaacaaattcaagccatagattttttcttctcttcctcaagtcgctgcaactcagccaatctttctgcccaatccctttcccttgcaactgcagccattttacgttctaccctctgaatatttttcttccgattggcctcttgcagctgagctttccttttcttcctttccgccaatataaaggcacggcgttgcccatgcgttt

SEQ ID NO: 115225 - DNA, 257 bp, Glycine max
ggaacaccagatctatttcagagaacttatccagagaatgaagtcaagtctagtggtcttaatattcatcaagatacttgtgaagaggagttaaaaataccacaaaagacaggtctcattgcagatccaggggaatgcattggattttctcccaataaccttgaagcttcagcggttaaaagctttcaggctgaaacttattttcttccgagtgcacttgaagatgttgggggaacttgtaacttgaaagaacaacg

SEQ ID NO: 115226 - DNA, 243 bp, Glycine max
gatggctttagggttggagctgagtggaaataaatttgtttggtctgtgcgctcacctgtcaccaaagttggcactggcaactatttcacagcaggtgaggaagggggaatcagaactactcttgagtctaataatgaaccatcttttcctgatgagttctaccgcatacaaaccaatggaattgtgatcacagattgggcatcccattggatattttgaagcacccatctattggtggtttt

SEQ ID NO: 115227 - DNA, 211 bp, Glycine max
caactccatcaatgcctagaccaatttcatgttgcttcccttgagaacacattttaggcctatcttcgggacaaatttcagaatattgattagtcagagatatgcatccatcatcatgaggatcaaagatctgcttaactttaattggaagctgaagaaagaaatttcagcgatgaagatgatcaatcatccaaacgttgtcaaaatttac

SEQ ID NO: 115228 - DNA, 260 bp, Glycine max
tgaccactgcccctacagcttggatcaggcccgctccgtttcggagagacccggatccggatccggatccggatccgccttctctattttgagtgcacttgcttgagtcgctggtgttttgttttacgtgattacagtgtatttattaatattgagaaacagatccgaatcctagcttgagttgtcccagatcaccttagtacttgaataataatcggtgatctggatgaaagtactactatgcataatgactcatgcta

SEQ ID NO: 115229 - DNA, 263 bp, Glycine max
tttttccgtgctcaaagtcaaaatgtgatggctatcaaccttgcaatgtatatatcacagaattatcactctaatgaggaggcttcagatgcatatcggttgattgggaagtggctagcagaaaccagatctagcaactcaagaacaattttggagaagtatttgaaaccagcagtctctattgctgaggatgtgaatgctacagctaagaatgccttgcaaaggaaatgtcaggctcattttcatcttgcacactatgcgat

SEQ ID NO: 115230 - DNA, 187 bp, Glycine max
cgcccctctctcatcctccaatgttccgaccagcctcaccgatcgaccagatacgccgagtttcaaggacggcagacagactgcttcgatcaaggacggcgctgagtagcagtactaccaaggaacttggcgactggcacgacgtcacttggtcaagaccctgctgagacagaactgcacgatatga

SEQ ID NO: 115231 - DNA, 242 bp, Glycine max
tataccgtatcttacttcctcaatctgttaaagtttaacaaacgcctacacattctcatctcactccccaacaaatcaactttatccgtactcttgttatctataaggttttcaacttttactcccttcttttttctttccgcatttctctttctctttctcattttgtgcttaggatcccgccattctcgtcctcaacaaacctcctaggatgccagtgcagggtggcattaatatcaaac

SEQ ID NO: 115232 - DNA, 172 bp, Glycine max
ctcgagacgacgtcaactcacacgcaaactacggcactgactcacacgtcaacagcatcatggatctggtcgacgtcactccacgagagacgacgaggacacactgaccggtcgcgatcgaggccctcgaaccagctacgacgaacgcggaatgacgatactgccacgtaca

SEQ ID NO: 115233 - DNA, 228 bp, Glycine max
  unsure (1)..(228): unsure at all n locations
tttcatttcactncgtgcgaaagttgatagctcgaaaatagggtgggtatccaaagattgcaacagcgacgatgttcgacgcgataactcttctgacacatgcgccatcaccaaggacgccaaatctcactgcatcacagaggacgtcgaaactggactgttcgccactaagtgccatattacctactagattctcaggatttgcatcggatagcccgccgaactgtt

SEQ ID NO: 115234 - DNA, 261 bp, Glycine max
gttgtgtctgagataccatcttccacgataaataaaattgctagtctgcaatctgcgagcgcttgctttgaaaaggatatgtttgatgcttggctgagagatcagtgtgcttttagtaaattgaaggaatcactggaccaagaaactgctgagctgacagctcagaaggaaatgaatacttcccataaccgtcggtttggcttcagcgtaagtcgaattggaagaagtttcagcttcaaagaggggcctacgcttccacac

SEQ ID NO: 115235 - DNA, 113 bp, Glycine max
gaaaggtccaggactctactcagacatcggcaggagagctcgcgatcttccgatcacggatgatcagaatgaccgcacgagcgccatcgccacgcgcgaatccacagaacata

SEQ ID NO: 115236 - DNA, 268 bp, Glycine max
gtaattcccatgtggacattgatttaatgcgtgggtgacacactttgttgaatatacactagtgctgtgtatatatgtttcagattcatggtcgctcatgtaatttttgttgtagtagtaaaatgacagaatgggaagtagcaacagcagagtagagccagctgacttttgcaaattgataaatctcacttatccatccacccttgatgattattgacttggggtttgtactcatatttttgtagttgtgaggaatttttaatttgga

SEQ ID NO: 115237 - DNA, 162 bp, Glycine max
  unsure (1)..(162): unsure at all n locations
agaatttcactagagatgacccttctcctagggcttacttcgagtgttcatatgcctgtagctgtccagtaggagagaagttagattctattagtagtaattaatgattactgtagtatcgactcatcaatgtaaatctaatcaatntaggttactatgttg

SEQ ID NO: 115238 - DNA, 140 bp, Glycine max
tcactttgcatggattcgtatatctggtcaattccgtgtgcagaattgcaatctgacactagacttattgtcggcgatgttatagatattgtgaacttacacaacaccatatgcgatggagcttttgatgtataatcctc

SEQ ID NO: 115239 - DNA, 177 bp, Glycine max
gaacaatacagcctttaccgatttgcaccaaattcaacaatgaccaacaccatttgaggacaactgtctactgcattcattggctgttcactaatggacaagggggtgccacctaaccacttcgtcaatgaaggatctttcatggtgaagttcatgcaacttcagaccgagcaagag

SEQ ID NO: 115240 - DNA, 267 bp, Glycine max
atcgagccgcgacggagtacgccgctggtgcgctgctctcgctgagctcggagtcggagcactgccagcgcgaggcggtggcggcgggcgtgctgactcagcttctgcttctcatgcagagcgattgcacggagagagcgaagaggaaggcgcagatgctgctgaagcttcttcgggattcgtggccgcaagattccgtcggaaactctgacgattttgcatgcagtcaggtcgttgtggttcccttttgaccgattttattttttg

SEQ ID NO: 115241 - DNA, 257 bp, Glycine max
gaagactcctaagtttaaaggatctgttaaaaagggaaaggctcatgctaatcctccaaatggccttaaaactgaggtgacagccaatcgattacaggtgccatcaataaaacacaaaaaagtagaaggttcttccaatggacggtttgaagcagttcaggagaaacttaatgagttgctggatggagatggtggaataagcaaaagaaaagatgccaccaaagggtacttgaagcttttgtttctcaatgtggcat

SEQ ID NO: 115242 - DNA, 209 bp, Glycine max
agagacaagcgtattgatgtatgtgtatgggtgagattttattctaacatcgtttcatcaaatggcttttatgtctggagttcagcgtctgcttcccgcactccattgttcatccactatgctctattcgctcagtactctattcccaactttcgagggctttagctgcacagtaaactaggacattcgcttggactgtgagctaggta

SEQ ID NO: 115243 - DNA, 267 bp, Glycine max
ctatggaaggagaaaatggaaagaagctgaaaatattgtgcctccatggattcagaacaagtgggagttttcttaaaaagcaaatcagcaaatgggatccttctatattcactcaatttgatatggttttcccagatggtaaataccctgcaggagggaagtctgacatagaaggcatcttccctccaccttactttgagtggtttcaattcgaaaaggtagaaatactatatcctcctatcttttcaatttaagatttggctgact

SEQ ID NO: 115244 - DNA, 151 bp, Glycine max
atcctcagtcatgtattcagaattgtccatgtcagaggttgatatcttatgtttatctcgcaaattttaccggatttcccgagttaacaaataaaacaaaagacaaagaattaaagaaaaagagttggagcatgaaaaaatacgaggagct

SEQ ID NO: 115245 - DNA, 254 bp, Glycine max
atgcctattaacatccacagtagtcccaagaaagaacatggcaaaaacagaacagaaacacagatgggttgcaatatctccaaggctgagccaccaccgttggaaaacaccatgcatcatcatcatcatgcagacgttgcagagttccaaaaacccaaaacccttgaacaagacgtagtgctacaggttccaggatgcaaagttcatatgatggaccaaagagaggccatcgaactcgcacaaggtcacttcac

SEQ ID NO: 115246 - DNA, 234 bp, Glycine max
gaaatgcttatttatctgcactatacaattgttgtctatagttattctctgtttctcccaagaagctcttgtgttgaagtaaaaatctgtgtaatcttctctgttgctagaagttggactggcttgctttcgatgtccccattccttgtgttaaactgacaatcattctaagggcatgcacttgttatttctgttcaaattgggccatctaaaattctttttaaatttaaggtt

SEQ ID NO: 115247 - DNA, 224 bp, Glycine max
tatgaccaaaacattacttctatgggtttttctattgatcaacatcctcatgttttcagctactgggagcacatttactacaaaatgcaacaataggaaatcacaagtatcatggtgattggaatagtgagacgcagcccgtagtttcgatgcttacttatatgcactggcttgaaacaggaagccttctcgagcacaaagaggctgaggaaaaacttggttaa

SEQ ID NO: 115248 - DNA, 251 bp, Glycine max
caaagccctaccaccttcagataaaatttgctatcctcgttctgggtcaagtccaattactgaaccacaaccactcttttctgggcccatagttccattgcctactatagaagagggaattgaagagaaaccaatcacaccccagaatggagctatcatccaaacaaaaaccgaagagaagcctcagtcacaagatagtggcaaagatcaccctaaagaagtagaagacaacaactttgacactgagagtg

SEQ ID NO: 115249 - DNA, 104 bp, Glycine max
tgtacccacttgcaagaaaaaacacactctttctgattctaatcttcaccgctacaggaacaaacggggcttgtccgtcaccgatctcacttccacacaacata

SEQ ID NO: 115250 - DNA, 258 bp, Glycine max
gtcaggtttctccagcgtctggcacgtccaaacgcaccgtttcgtgctgaggaacgtcctgtacgaggataactccttcgatttcgtgttctccagagacctagacaaggtttctgtcccagcattgctggtgtccgaggttgatcgtgtccttaagccacgtggcattggtgcctttcttgtaggcaccactagttctcaccccaatgatttgataagagtagccacacccgtttcctctttgtgtgaggtcttcca

SEQ ID NO: 115251 - DNA, 254 bp, Glycine max
attgtgatatgtagccacgatgtggtcctaattgattgtgaataatgaataatttgtatttcaacctgggttggactagccctttgttttgctttgacccctgggttagagagctgcgagggcgcattttagtggctacaaatatttgcattagatgacagagatgatcatatacaatgcaatccttctggtgacataatggtgattgttctaagacatcaaaatttcaaaaacttgcctgctaaaagacacag

SEQ ID NO: 115252 - DNA, 129 bp, Glycine max
taaccgctatcatatcatctcatctctcaccatttcctatcacattccccattaacttaaagtaacattgctccattaagattctctcatctcatcaacccattctccgatatcttctacttttttcct

SEQ ID NO: 115253 - DNA, 218 bp, Glycine max
gcccaaaacagaagcactttcccatgaacctgggcatcagcatattctcttcccttgttgactatcaagccctttcaagtttcatctcaatcaaaatcgtgaacgtggagcgtgggaatcgagagccaacggaacgcgatttcgattttggatttctttacgaattgcaaaatggagaggagaggtggaatggaagaaaaggcttgggatggatttag

SEQ ID NO: 115254 - DNA, 266 bp, Glycine max
gttgcattgccccttcatcacatcatcaacaacgttcactggtaaatggtgcgtaattttcttctcattgcaagattaactgcatcgttcacacaccacagaagtaccccaatccaattgggttctctgctgcaacacaaacacaatgcttcaatttttttcttcaattccttcacttcaggaatctcttctgattctgaatcagatgatgaaaaccaccatcaaggtgacacctttactgtgtcttacctcataaactcatgggg

SEQ ID NO: 115255 - DNA, 276 bp, Glycine max
attagatctaggtccaaagttggaagtgctttgttttgaaaataaagcttaagctcaaggagtggcataaggaggtttatgggaatttatcctttgggataaggactgtggtagatgagttagatgacgtggaggtaagactttgtgaagagcaaccagttgattgtgatcagaggaaacttctatcctctgagtttgggaggtgtgcctgaattagggagagtatgctggcccaaaaatccagggctaagtggatcaaagagggtaataccatct

SEQ ID NO: 115256 - DNA, 222 bp, Glycine max
cacgctcgtcttcacgatccagcgattccgctctccgacgagtctgcgtaaggtgaagaatcacgaggccagccgccggtgaagaatcgcgcgattcgtctggaaatcgcgattcaaactcgattcatctccgttatagagattcaaccacgattcaggaacaaaaacaagacaacttccgattcgtttcagtagcagctagaatcgtatcgaatcgtgcga

SEQ ID NO: 115257 - DNA, 205 bp, Glycine max
  unsure (1)..(205): unsure at all n locations
acctctctttctctccaccaaaaagaaaatataanaaagcgagaatttcacatacacattagtctgcaagacgatgttcactgaaatgatggatacacatcatcaaccccgaaagaacagagaaaacgatgtgcaaaagataactgaagaaagagtagcaatagcagagccagcttcaccatccacttcgccttctcacgaattc

SEQ ID NO: 115258 - DNA, 260 bp, Glycine max
atactttggtttacttttgtggtgtctctggctgctgggattctccaaatttgcttccaaaagcccgccactgatggtgttggagtgtgtttcattgcttttgcaattgggaatggcttatatgcttgttgggtaagtcatagaattaagttttgttgtaaggtattgagtttgtctcttcaacctgtctccaaattccctgatctgagcaaacccacttattatgtgcttggggctgcattcttgtggatatctctatg

SEQ ID NO: 115259 - DNA, 275 bp, Glycine max
gctggatgcagcaatgaaaatgatggatctcatgacaacaacatctatggtgagaacaggagatagaagcaaggggcccaagtggatgaagaagaaagcgatgattcgatggcttcggatgcttcctccggtccagttcattaccaccatgcctatactcacaggcaaagtagtcatggcaccgcagcctctaagaaagataaacaagatcatggaagcaaattttcttctaagaagaatgcaaacaaacaggagaagaaacgtgttgacagcag

SEQ ID NO: 115260 - DNA, 132 bp, Glycine max
ctttgctacgtgtaaaagaggagaggaaccgcgccaaccctcgcttcttctagctcttcaatccttttataacctttatagatgcattcttaatcgttgggacaaatgttcatcgagaattgtaaggtagag

SEQ ID NO: 115261 - DNA, 277 bp, Glycine max
  unsure (1)..(277): unsure at all n locations
caacgtaccgtagcaaaattcctcttattccaatttgtgaataatttaattttataccttttggaatctcgaagttgataacattgaccaataatatttctctatagatgggagaaatccgggttccctccatgtatattactatttctttcatttttccatcttaattgctttaatttataattctatctcacacatggctctctctattntgtatccacttcttactgccacctttcttttaatgcaaactctggtatagtattcatatgttcat

SEQ ID NO: 115262 - DNA, 267 bp, Glycine max
  unsure (1)..(267): unsure at all n locations
aaaaatattcatatttaagtagtaataactacagaaaaaattggtacagataaaaatcncctatacacaaactgacaccagaacctaaatagaaagttgatactagctgttaagaaaaagttgaaactatagaacctcgtataccaagataaaatgttaaccttgaggaacctagaatcctagccagttgccacctatccaatccagcttgttctaccttggaatcatagaggacccgtgaagccaatcacgagaatagattgcatc

SEQ ID NO: 115263 - DNA, 264 bp, Glycine max
tgcttctgtctcctaagatactttcctcttggtaacttttgtgtttcaaaatctgagggtttttattttctctttttttttccttttctgacagacaagatagcagggaaaaaatcaaacatatacttcagcaattagttccagatttgcacaacaattatggcggcagcttcctcatccactccatttttgggaatcagagaagaaagccctcagattacaacacaccatcaaccctccacagtttctccaaccacagcgcct

SEQ ID NO: 115264 - DNA, 161 bp, Glycine max
gtgtgatcatgtctttctcacattccccttcttcatcatctcaagctcatagtcctcagagtaaccctttaatccccgcaaactgctgtctagaacttggcaaacgaatgcagcaaagcacttgtcacaactgtgatcaacgaggacattggtcttattac

SEQ ID NO: 115265 - DNA, 293 bp, Glycine max
gccaaacagtgtcggtgcagctcggggaggaagaaggggaagaggcagaggcagttatcaagcagatgctccgagagggcgttttggtggtaggagcatgggaaggggaggtaatcaggatagttcagactacaccagactaagaggcgatggttatcttcagcgtggttcccgatgaggaaaatgtggcataaacgcatgcactaagatgccattcaagggtttatacaattagcgaagtctgtgcttggcgtgggtatttttactacagaacattttcttctgtggtttca

SEQ ID NO: 115266 - DNA, 285 bp, Glycine max
attcaaatatgtggataggatagatgttgtatgttggttcattaacaacctttaattaattctcttagactttactaacttattatttttctgttttctgttattttgttatagcatgtaatagttaagtagttttaagttggttaggttagttagatttgaaatagtgcttctatttcttcttgcatagcctaggtacaagactataatcatgagaaagtgatttctaggggttctaaaaagtatgctgaagatcttgaaagtggtttcgcgtcagatgttgaa

SEQ ID NO: 115267 - DNA, 284 bp, Glycine max
ctttggattgtttacctgcattcagctctgataagggagaagaacagttttgtagtgttgaccatgtacatgataatgtgaaatggttccaggaattgagatttgatgaaatagatactgctgagtgtgattttgcaagggttcaagtttctcctcttcctgatgtaccaactgaattgacaaataacacagtggtggaagggacgtgtgcatccccagttcagtttgaatcacaagtagttatgctaaatattggtggcagaaatcagcttacaactgtgtgt

SEQ ID NO: 115268 - DNA, 149 bp, Glycine max
ggttataccggaatctccgattccggcaaacacattccctcctccaagaaaaaccagaagaagctccttctctctctattggccactctcctcatggcggcctccgtggtggccattggtgccggagtaaaaaacaagaccagaaactc

SEQ ID NO: 115269 - DNA, 283 bp, Glycine max
cttgaggatacctactatccgaacctgataaaagttttctatgcaaacttaaccatattggacaatggtgacttgtgttctgaggtttgtaaagtgaagattcgagtcaaaccacgcgattggttggctatagctaatttgaagtatgaggggcaaaagtttcaactttccaaacttcctgacaacattgggtttcatcgtggtcaggcattggatgcgatggtcagacctgatttgcagggacgcaactgtaaaaatactggtagtttgacaattgaagata

SEQ ID NO: 115270 - DNA, 279 bp, Glycine max
aagtattcagctctgaggatgctgcaattctcttccaccattttcccaacatattaaaatttttctcaatccaatttggaaaaagactcttacaaaaagttcatagcttttcatatggagctttcaagtaattagcacgtgaaagatttttccttttaaggaaattctaccaggcaaattaaatttaactgtgttggcctagaggtgaagttattaacatttgttttgaagcttggaaattgttgcttgttcaatcacaacaatggctttagctcctac

SEQ ID NO: 115271 - DNA, 282 bp, Glycine max
ctttgctgtcagaaagaagcaaacaactctctctctctcactccaccaccctttatttctctctcacacacaggtaggtatctgccaaagatataaaggagcccgaagaggacactgtaaaagctttttacaaacttggtctttacacatccaacacaaccaacgaagtaaattagccaccacagtcacgcacgctaagccaaacctaatagtaatagtagcaagtttctttcttttttgctctctctctctccatggacttccatctgaagcaatggagaa

SEQ ID NO: 115272 - DNA, 281 bp, Glycine max
  unsure (1)..(281): unsure at all n locations
gttggcataagtacatagcttgtgcatgntgttgctcacgataagcgtgttcggatctaagtatattacagtatattacttaccaataatgggtttaaattgcggtcgtagttgcgttgccttagttagaaaacctttatattgtgggaaaatgtggctgatgcggccacagttgcggttgcggagaatcaaaataccttaaacgtttactatacctatttaaaaccatgtgaataaaccatagttgcaagagatgtcaattattgcctcttttcctgctt

SEQ ID NO: 115273 - DNA, 280 bp, Glycine max
gcgaattgtgaagccgctggtaaagttcaaatctcgactctgaccacttcttctgatacgatcgttacgtctatcagattctcgtttcttcatttgttgcatcgtgaaatagcaccaaatatgaggggaagaagctgcagttacagcccatcaccttcacctccaaggcgttacagccgaagaaggcacagccttagccctaggggccgatatagaggatgtgatagggatttgccaacaagtcttctggttcgaaacctcaacagagattgcaggccag

SEQ ID NO: 115274 - DNA, 244 bp, Glycine max
  unsure (1)..(244): unsure at all n locations
tttataaagtgaatatgccatgtgccaaagataggactataaaanacaatcttttgatagaagctgctatgtcaatattgttggagggaatcaacaagaaatctcaggatgcaggaagcctccctgaacttaccaaggctccaaaattggctagtggtccaaaagagtctgagctaaaagcaaaggtggaagctgagcaacatgcacttcgtagattgcgaatgtgccatagagatgattgcaa

SEQ ID NO: 115275 - DNA, 268 bp, Glycine max
ggggcttgaaccaaccccttgttttattcgtagtcattgagctgtggcattgtttgtgtgtattagcagtgtttggttcgtactatgaagaggactatgccatggagtgatgacgatgagtcatcgtcttcacattcagattctgaatgtgatagtgaaactggagggggaaattccaaaggtaaatctagaaagcagacaactaagaaaagtggtctaattgactttgaagctctgaagcgacacggttatagaggtggaccttcag

SEQ ID NO: 115276 - DNA, 269 bp, Glycine max
atcacgaggcgacaacatcgacatggagggtctcatcaacggctacatcaacgttgctctcggagctgatggtggcgatcgggaagaacaacaacacgggagagacgaccgtagtagaagctcctgggctgaagtcgtctcccaggatcaacaagatcaccctcttcctcatcaccaacacaaagaggaacagtgccaagattatagttacagacacaggccccataagctcaatctcattcacttctcctctacctctaatgaacaat

SEQ ID NO: 115277 - DNA, 267 bp, Glycine max
atcctctttcttgccggctgtggttcttcttattaggattctccagtagtattaggcattaacataaccatatgagacagcagcttctaaagttctctattagagggttcttgttccttttttgttcttcttctttggtagttgttaagtttggtgagggctaaaatgttgagcattaagaggggtcctactgtggtttcaaattatcaaaaagaagagacatgggaagctgctgtgcccgttgatgttggcgtaactgcctcaaag

SEQ ID NO: 115278 - DNA, 280 bp, Glycine max
cgatttcaccatcttcctcttctgtctcccccaaagacaaatgcggctaatgtggccgaaattgtggtcatgccgattccaaaaaccttgatgtcgcgattaggatggattggcaagggcaaaagctggcggagcaactgatgcagataatgctgactgcatttgctgtgattgcatttgtaggtggatatgtcatggcttctttccaaatgatgattctcatatatgctgggggtgtggttttcaccaccttgctcactgtccccaattggcccctttt

SEQ ID NO: 115279 - DNA, 266 bp, Glycine max
tgatctcattccctacgctgttctcctccaaaaagaagtacgtcttctatcctcttttcttgaacttcactcgtcttcgtcatctcacagccttgcttagtcttgggtgctctttttctctgtcatttaatttgatgcaacaattgaagatgaagaagcatctctttgctctttccatctctgttgcaactcacaggccaaaaatagccacatcaaatctctaattaattggagcaacccaccattattcctatcctggaattttc

SEQ ID NO: 115280 - DNA, 101 bp, Glycine max
cacggcgggcagtaacagtccctgtcaatgattcttacttgggttgggcggtgaatgagaatgacccacccaatcaatatcacacttgcttattgctgctg

SEQ ID NO: 115281 - DNA, 280 bp, Glycine max
atttcctggtagtggcgtcaattgcagaaggctgaaacatgtcagaaacttaagaggctggaactcaagctcagaggcggaatctttctgaaacaggccaaaagtgctccatggtggagatttaaacgcagaaagaaactcggagaccagaatttatctgaaatacgctataaaatgcatgacaggtgattatttcttgtagaaaacttggagctagaatttgtttgaaacatgctggaaaaaatgcacagtggaggatatcaaaatcttgagagaaaca

SEQ ID NO: 115282 - DNA, 274 bp, Glycine max
  unsure (1)..(274): unsure at all n locations
atatgggcttaaattactttatgattcacacgttttttatttttcacagcaaaggcattcggtgagctgtgtcattttcttaaattattgtaacattttattcctctcaatatttgaattggatntgtaataaaatggtgttatatgtcagcattgacaactgactattctagaaatattattacaacactgccaaaaaggatatattattagaaatattattacaacactgccaaaaaagaaaaaagaatttcttggtagtgttcattacacc

SEQ ID NO: 115283 - DNA, 279 bp, Glycine max
atcgaccgcttaagaaggaaaatgtggatatctctttaaggataaagcaagatgaagacacaacacatcaagttacagaatgaacattcatcttgtttagttacaatacaacaacttgaatctcaagtagagagattagatgaaaggctaaaggtgcaggaagaggaattttcagcatctctggtctgtatcaaggaacttgaaaatgaagtcaagtctttggagaaagaactgaaactacaggcagatcaatttgaagaagatctccatgctatgcaa

SEQ ID NO: 115284 - DNA, 280 bp, Glycine max
ctaaattcacaatgacaatgtggtgaaaaacgctcggatttgaagatggacatggacgtggaagaagcttctgcacctaaagagagaaagcccgttttggtgatcttggtgggcgctccagggagcgggaagtccaccttctgcgaagaagttatgggttcctctactcgcccttgggttcgcgtatgccaggcacggaagcatgttctggtgttggcacgaaccggaggtcttgattgccttgcagatgtccaaaaggagcaccttcagttattgaaca

SEQ ID NO: 115285 - DNA, 278 bp, Glycine max
atctaactcaaattattataaatctttttatattgtctttgattcatacagataataaaaaaaaggttgttgatggtttgatgtaatggggtttataaagctgttttctgttgcctctttcccggttatcaaggtcttattgattactgcacttggcttgtttcttgcactggataacatatcaatattgggagaagatgcaaggaagaaagtgaatcagcttgtgttttatgtgtttaatccatcgctggtgggtagcaatctggccaaaaccatta

SEQ ID NO: 115286 - DNA, 289 bp, Glycine max
tgaataagctcgatctgctcgagctagaccgagaccatgtaatttttatttcagattcaggtaaggcataaatgtaagcaaataaaaatatggaagtaaccaatttaagtaccttgctatatcttaatgagtttaagaactaatctatacaaaaagaatacatggtatggagcctgtgacatgagcgaggttcagatgcatcttaagaatatatatattttagctcgtgcaatcatgttttgcaggtaagctcacgtatttcttctattgctgtactcatgctataaag

SEQ ID NO: 115287 - DNA, 263 bp, Glycine max
gtttaataggtcaagtattaaggtatagttggttgagttaatgaggaactgaaaataaggagataaaaatactcgagacatataatgtgaacagaagtaacagctgactaatccttgtacccgcaaatattaagtcaagtaatgtcttgaactagtagaatcagcacagtaatcaaagtaaaccaaaataatgagattctttgatctttaggcttacactgtcatgatgctactgctacctgaatcagagacctttggagctt

SEQ ID NO: 115288 - DNA, 259 bp, Glycine max
gttggatcggtcggcgcaactcaaatgtgatggtaagcaatggattctgcaacctttttgtcttgcttgcaaagcctcctccaaccacactcctaaccacaaccataactaaaaccagctggtgtttgcggatacggagccattggacgaaaccctaggccactctgtctgctacgttagatcttccgctcgctttctctctccctcccattccgatcgcatcctctgctccctccaactccctccgcttctccccttc

SEQ ID NO: 115289 - DNA, 212 bp, Glycine max
tcgtggtgctaaatctgaccatgcacagttcctatctcatatacaacgcttctctctacttcagctctgctattcagaagcagtactttgagaaatacggttatggagagtttcatttgtttcagatgatacctgttactgcaaatgatgttgctttctcgaatccaaggcgtactattgcaggcattaccaatgtcccagtttgcaatcta

SEQ ID NO: 115290 - DNA, 146 bp, Glycine max
  unsure (1)..(146): unsure at all n locations
ccccaatccaatccattccaattcccattgttttcacttctcttccatccatggattctctaagntccacacaacataaaaaacgtaaaaacngcaccacngancgcagantcacgnnatcgcgccaagcctccttccacacaaca

SEQ ID NO: 115291 - DNA, 247 bp, Glycine max
ctttttaggtagagtatagttcatattttatgaagtggatattcgtctgaattagtagatgcaagtgcaagtggtggtcccccattacacatataagcatgccttgcacggttgtattgacacatgatcaaggtagtgggctggtgggttggtcctttgcctatctctggaccttgcatttaactcctagaagaaaatatcatcaaaatctaagattcagtgccctcaatatttatgtgaaattggt

SEQ ID NO: 115292 - DNA, 245 bp, Glycine max
aggagccttgcttcatacatggctgaggaagatatcttgataggaattttgtatccatcccttgatagccgtacaaaaaaaatttggatctcctctatgcaatgctagacacggaggatcattgttgttaatccaaaagtgtttaaatatgaaagtccttggggttgacttgttgaagcatggtatctcagacccatccttgatgacttcttaatcacagagctctagttctgggcttgagaaag

SEQ ID NO: 115293 - DNA, 245 bp, Glycine max
caccactgcaacatttgctgcagccgccacaaatactgtccctgccattactttcatcatggctgttttaattaggatggaaagcatttccataaaacgtgtgcatggattggccaagattttggggtccgttctaagccttgctggggcaataacatttgctttagttaaaggacctcacctgggtttcatgaaatggtatcctgaaaatcagaaccatagttctcaccctttaacaattgtgc

SEQ ID NO: 115294 - DNA, 280 bp, Glycine max
ctggcttattgacattggaggatttgcaaggaaagtgaaaaatactaatctgtcaacagatgatcaaataaaggactgtggaacatatcttgaatgccagaaatgtcattatcatattgataacaatgatgtttctcatgagtggcctggctttcctgtgggtgtgaagtttgatccttctgatattgagcttttagagcatttagcagcaaagtgttgtattggagacagagagccacacatgtttattcacgagttcatcccaactctagaaggagag

SEQ ID NO: 115295 - DNA, 274 bp, Glycine max
gtgtggggatggtggtggaagggggccagagaaccctcaacgccgacagcggtggtgccgcgaaattcctggtggcgcagaacaaccgccagctcgggacggttcaccagcttctggccggcggcatctccggcgcgtttagcaaaacctgcactgctccccttgcgcgcctcactatcctctttcacgtgcaaggtatgcattcttatgtcgcagcattgagcaaccctagcatattgcgcgaggcatcacgtattatcaacgcagaagggtt

SEQ ID NO: 115296 - DNA, 271 bp, Glycine max
attttgggcacagttgctgaggcttaggactatttgtgattgattggtgtttaggttttgtgattgattggtgtgaaaaggaggaaaggaaaaagtgaccttttgttttaatatttcggatcctaaattttagaagctggatttgatctttctgtttctgagctatcaagatgggagggcaatcaagcaagatggttagtgttgaatccccgacacccattaaaatgggtacccattctctgtatgctgctgatttgagctcctatgaagc

SEQ ID NO: 115297 - DNA, 266 bp, Glycine max
cctgtagttattctctttcttcttttttagccaaacctctcttgacacatctagatctcgttcttccttgatctacgttacgcatatagtgaccggatctgaatggatctgaaccagatctacacgccgatggtagttttggcctggacatacatagatctgatgcatggaggctcagatctactgtacagaggtatgcgattcatgttcgtctctcttaaggaatctgtttcgtagaaagtcgtatggtcatccatagtcgcatg

SEQ ID NO: 115298 - DNA, 274 bp, Glycine max
tctcgagccgaatcggctcgagaaactactcatttcccacaacacacccttcactcacgtttacttggtccggattacttctgacgtctattctgaagcgtggtttttaaagcatatgcctttatagtcaagtgattcctcttgtttctggcatagaataaaccactccaaaagaacacaatgagcgctgcttcttttctattctcctgctctatgcatgtgggtgtgtctcatcccaaagtggctgcaaaatcctctccatgcggtttgctca

SEQ ID NO: 115299 - DNA, 266 bp, Glycine max
ggttgcccatagagatgcagaaaactctcaagtagatgttgaagttgtaggggagacagattctattcaagaaaatactgagtatgaaagagacagagactcacacacaaatgttgctgagaagaaagagaagttattctattctcaggcctccgatctgggtattcagatggctagagagacctataacatagagggagcttgtcaagctgataatattaagaccatcattgcacctgatcaaagtggtaactctgttgaggaag

SEQ ID NO: 115300 - DNA, 264 bp, Glycine max
ctcgagccggttaataccctttttttgggtactattcctagtattccgtctttgtctatcacaggtatgtaggattatatctggtatgactctggtagctgtataaaagtattgattatgtatgagaattatggtgcattgctaatggaaattctgagtaattttgttataccattttaaagatattccttgactcctataaagcatgatctcatttctgaaattctaattcccgcaaggtaggtcctgatgtacatgaaaatg

SEQ ID NO: 115301 - DNA, 265 bp, Glycine max
gcagtttcttccttcatttcatactctctggcaaaaccctcgtcgacggtgaccaatcggtggatcaaacatggacaagagcatgctagcggatttggattcgctccctgaggctgataagcaaagaatgactgtcatgatcgatcagctccaaatccgtgacagctacattgagcccaaaaacattgatgttgcagctgaaattgcggctctggattatattttaaaatcaacaaaaggttgatccaggttgtaagaatcaggc

SEQ ID NO: 115302 - DNA, 272 bp, Glycine max
ggccgcccttttttttttttttctttttttttttttttttttcagcacccggctagattcccagtttttaacatcgggaagcgttacttcggagcaaaaaaaaacgtttttcaaatttcccccgtttcccccccttttaaaaattggggggcttttaaaaggggctaccaacccttttggaaaaacaacacacatttccccctaaaaaatttgcctaaaattatgactcaccaacgttggaaaaaaaaaacccccaccaacttttcccgggg

SEQ ID NO: 115303 - DNA, 266 bp, Glycine max
caagccttacatctatgcgtcacctccccctccttaccactattagctagcatagctctatggatatgaagaatatgtgcaacgaataaaagaaagcgatagaaaaggaagaagaagcgcttcgcgatgcacgaaagagaagaattggaagcaaagtttcggcgttttgtcttttataaaaaaaatgttaaatcattataattttctatgatagggattggtttcttgtcttttttcttttgtttatgaatatcggtgtattttaa

SEQ ID NO: 115304 - DNA, 262 bp, Glycine max
gtgcgcttgcatggcgggtccgaaaagcgctaataaaaattaatattgttttttgttttggggagggaaggtttcgggggtgtttttttttctttttggccccgattctcttctctctctatggtgttgttgtgttttttcctttcctttcttttcctttctctcttctatgtcctgtgaatttttctatactctagttcgcgtcgtaagggctcaacaacatgacaaagaattggcaactcggcaaggtacatattacata

SEQ ID NO: 115305 - DNA, 262 bp, Glycine max
aaaccaatgactcagcttagtttcacttcccaaggtgctccatggtgcaaagttacatattttactccatgaacctccttgaacaccgtcaaagttctctttttttccttcgtggtgctcttcaattgtgtgttgtataacatgtctgagcctctgaggagatgatgctgttttaaattgttggcaaggttttacaaaaaggatccgtgactgtgattttggcctcaacgtcaaagttacaggggtctctatgactataatt

SEQ ID NO: 115306 - DNA, 233 bp, Glycine max
atatggcatactctcaacttcaaaaggtggaaactagcctgcagatcaaggcttctgctgaacagttctatgactgtggttggcactagccaaacactattgccaacatttcatcagaggatattcagtcagttgaagttcatgaacgtgcatggggctaagacggatcaatcgtctcctggaactatcgacatgagggaacgtctgtgtagccaagcaagtgcttgaaggca

SEQ ID NO: 115307 - DNA, 265 bp, Glycine max
gcaacttcgcatgcttcaattgttctataccaaattacagttctatacttatagccgagaaattgcttgatgtaatgttctttcaacgaatagctgtaatcagtaggttatcgtgaagcttgttcaatgtatcgatgaactataaatctcgtggttgtgatgaattttggaattccccctccccccttttctgcgtcctcgaaaagctaggtctcgtacgtggtttcgtgtgttagtaaagtaataagtttcaatatgcagatct

SEQ ID NO: 115308 - DNA, 264 bp, Glycine max
attagttttacgattattttttttcccttggattggagctggggtttcttgtggtgagagaaagaacccttattctttgatttgggaacatctaggtctcaatttagtggaacacccttcgtagttggaagttaaattttgaagctttggacgaagatggtaaatgggaatgtgagaataaccagttgggtccaaaagaagatcactgatccccttctctccattatccgaagaggaactgaaccaaaccagttggctttctct

SEQ ID NO: 115309 - DNA, 266 bp, Glycine max
gccttctctcaacaagaagctcacaactatattcttagtctgtgtccattttaaatccttccgtgtccctctcctttcctccacccaaaacgccaccgtttcgccctgcggctccctcgatcggccactgtccccgctaccggcgcgtgagcaagcgccactgccaagtcctcttcgacgcttccctccgcaagctctacatcctcaacggcgttcttccgcacggccacggcgattccaccgccacgtgtcgcctcgtccacgag

SEQ ID NO: 115310 - DNA, 207 bp, Glycine max
ctcgagccgggccgcccttttttattttttttgcccccataacaggctagtactatgttctaggtgaaaattgatgccacagataaccttattgggcaacccttggccccttatttattatagggtatatccattgcgtgtaaattaattaataattctgtcaatatcgctgatcagtcgttaaaggtgggattaacctctatacat

SEQ ID NO: 115311 - DNA, 246 bp, Glycine max
gcacttctctcctccttcacacatatatccattctgaaactgtgaaaaactaactcaaacaacttaaagaaccattattacttcatcagccaaaatgccgagaaaaggaatgagaagcattttcttcaaaccatcaacttccacctcatcgctaccaccacctccttcccctcaacgcactttctcagactccttaatggacgaaaacatagaaaccgcagagaagctaataaccaaatgggacga

SEQ ID NO: 115312 - DNA, 273 bp, Glycine max
tctcgagccgaatcggctcgagcttatatcatatatagttaagcttaacaacctccattcaaacttaaagatgcctcgtaccaccactctggagtgctccggttgcactccgcttcgcgctctaacctttgacgcgcttggtctcatcaaagttgtggaggcccgcgataagcaacgaggagctccccaggtcgtagagaggtggggcgaccttgaatcatcaggttcgcctttatgacatgtctgctcagaggaggcctgttctctcatttg

SEQ ID NO: 115313 - DNA, 279 bp, Glycine max
atctccaccacgatcccaccatcaaccctggcctcggttccgctcgatgccctcgttgtctctctctcctcaaccctaattccgaaagatgcgagtggaccatcactcccgtcttgcacgatgccactgccgtcgctggctccgggattggtggtatgcttggctttgttcatggtttcaatacagatccggaccaacaatccctccctccgcactctccgcttgcaggcaactccagccaccgccaacaatgcccacgacctccacactttccattct

SEQ ID NO: 115314 - DNA, 274 bp, Glycine max
gttgctgctacccgcattgacgttttcatccatagctccttcttcttcttcttcttctccctgttttacttccttttgcaatttgctgtgtcgcaaaaccgaaccagacatcatcctctctctcacacacacatggaagaggggaaggtggaagagatgatgatgatgatgatggaaggagtagcatcaatagcattgttgccatgtggctctatctcaggacacttcatccaacttccacattctatttgctatggcctttgtggcactgaat

SEQ ID NO: 115315 - DNA, 187 bp, Glycine max
atcgagccgcttaaacacttaaactccttttagtttaaataatccaaacccaaaaccccaatattttcccaattaattttcatctaagttttccctaggacaatatatgataccatattaagatatctccacatccttaatactatctaataatgggtgttgtacgaacgtggaaaaccaggagggc

SEQ ID NO: 115316 - DNA, 272 bp, Glycine max
ctcgagccgatcaatgttggggaacaaaaagattctggggctagccttatttcctacgaagggcgctgtagtgcttgacacagtttcattgtttggtcttatgttcttcttcttcatatggtgtgttaaaatggatattgccacattaatgaagactgaaaagttaatatcggaacaagagttcgctttgatggtggcctcgattatagtagtaaattgtatcctagtaccactcataagatacatatatgatccttcagaactatatcagg

SEQ ID NO: 115317 - DNA, 202 bp, Glycine max
gcgatgtgggacttttgggggtttctaagtgtttgaagttggagtctttgcaccttgtgaaaacacccgagtattccgacgtgggactttgcgaagttgcggagaggtgtaagatgctgaagaagcttcacattgatgggtggaagaccaacaggattgggggatgtcgcttgatggctgttgccaaaacaatggtcccaac

SEQ ID NO: 115318 - DNA, 271 bp, Glycine max
ctcgagccgctctccctccctcctagggtttcacgtttccatgtgaaaacggattgagaatatctctctcattctctctctattttatattttctttcacgtcaattagggtttttttgctggcgtgattctgaaggcttggatctggatatcttctttgtttctgattgggactggatattctaaactaacctttcgcgaagactaaggagcaaatagagggagttagaagcttgaaaacgtacaccctaaaattatacactcgcagagg

SEQ ID NO: 115319 - DNA, 278 bp, Glycine max
actcgagccgaatcggctcgagttatggaggttatgaatgtgttacacgtgctaaagcagcagaatatctggttagatcatggatggaagaaatatttcctggtcttaatcaccgtatactttcttatataattgggtttgatagccttaaagctaccagcgggaatggaaatgagtcatcacagacaactagtgaagataataggctacgcatggatgggctttttgaacagaaagaacaagccatccaatttaccagagaatttatagcattgtat

SEQ ID NO: 115320 - DNA, 240 bp, Glycine max
tactcgagccgattcggctcgagcaaacttccacggttatggctatggataacgtggggagtttagacgcggccattgagcaattcctgaatgcggagaagcatgcgatgctcgccggctacgtcgccgccaccagaaacgccgtcaccgaaattttacggttgtgcttcgaagcgcgtgcctggaaaactctcaatgaccagattggtctcttgttcaaacgacgtggccagcttaagc

SEQ ID NO: 115321 - DNA, 272 bp, Glycine max
gagtagaacgccgtcgttccttgtttcgttccctcctctctttcccgctccgcacactcttctctttagttctccccaatcgccagccacattttggggtttagggttttcctctctcctctgcaatatccaatttctccctttctcccccactctctccgcaatccagtgacaatgatgtacaatgatcctcagcagcagcagcaccagtaccagcaacaacagcagcagcagcatttccaccaccagctgccggttccggagttccaccg

SEQ ID NO: 115322 - DNA, 272 bp, Glycine max
actcgagccgattcggctcgagctctactcaaaccactctgtttctcatgctctgctattaccctgtttcctgtggaacaaattaccatctagctctcctccgaattaggttttgttctggagaaatgtatgcagagactggtcttctcttcccatatttgaacaacatctctcacggccttcatcagctcgaggagtactgcaaaacccagaagtccaatgcttcaatgtttctagtgtgaactctcggtggagtttgtctttttgcgccg

SEQ ID NO: 115323 - DNA, 271 bp, Glycine max
attctaaaccaagtgactttgacatgaaggtcttgcttcctatcagttcccgtctaaatctacaggagaaatatggcaaattggatacaatggtaatgtatgattcatgagtgtgctacaataagacacaacgcctgtccgcacttgcaaaggtcatttcctttgttatattactttcaaccaatttagaatagattaaacaccacaagaaaatggcaagtttcaccacctcacccattttccactctttcccttctaccttgttccacct

SEQ ID NO: 115324 - DNA, 160 bp, Glycine max
gatttggcagataaatgagtgaatattgtcattcatggttaatctgatttgcatggtttgaattttgaaaaaatatttttatctttgttcttttcttatcctgaggttcagttatttccgttgtaaattctcagatcattgcaagacacatttgatattg

SEQ ID NO: 115325 - DNA, 269 bp, Glycine max
gccaacatcatgtagtccaaaatcctacaggaatttgggaattcttaaccattcatattccaggtgcaggatccattttaggtctttcagtgtcaagcaagagtagtaaagctagcctatgttaacatattcacttttaccaatatcattgtctgagacaatatgtgcttgaaatatttatatattgcaaattttgttacctgtcaataaattagggacttctttgttttgaattttattggattcttgtgaatctacaatatagatga

SEQ ID NO: 115326 - DNA, 266 bp, Glycine max
ctcgagccgctcgagccgctcttttcgtggttctaagtgctaaccaataagagcatctataccgagttcccaacactgcttgctcttacagctggcttctcggcatattcatcccattgaacctctcactctcccacatgtctcttgaagccagactgcaccattcatgctacattcttgtttaatttgtccccacattcttctattttccttcctcaatttgcttgtgattgagccttgtcaagaaatctaaccaaaataaactc

SEQ ID NO: 115327 - DNA, 263 bp, Glycine max
gtggacggtgatgcctgaaatagtgacattgaaagtatgagatttataataataataatgtcttggcctctccaaccataacaactagcttttgtggtatagttctcccaaggttcttattagtgggggatagggaaattggaatgaatagcatctgtgggaattgaacctccaaatccaaatacaacaaaataaaaggtcgtgatgcttatgaggatgccaaattgaaactatttaatttgtgccagacaatgaagtaagtc

SEQ ID NO: 115328 - DNA, 183 bp, Glycine max
ggggcctcggctgcctaatgtacgtatagccccgtgacctcgcgagtcggattagacctacgagtcgccttgaagcgcaattcccatcgtgcggcgggtagggccgccctttatttttatatttggagccaaatgacgattttgcaaagcaaagatgtttcctgaaaaaattggaatgtccgt

SEQ ID NO: 115329 - DNA, 252 bp, Glycine max
cggagctcatttttacataggttgttctgttatttttgttgttgttcttgtcatccacaatatccggggtacccatttcaccgaatcatactttacttaacaatcctgataccctttggtgaaaaatcgtttctggggtcttaaaggaccaaacttggattcagggtcgtgatggaacagaagcacgttctgttgtcagcattgagtgttggggttgggttgggtgtggggcttgggttgagctcaggccag

SEQ ID NO: 115330 - DNA, 251 bp, Glycine max
actgtctcctctgtccccttctactctcttccgattaacaaacaattttattaaccatgatgcagatcagctccaccataccagcacccaacctccacatgttccaaacgagacgcaccaatttccgatgccgtgcttctccgttgaacccaacaacctcgtcttctcctcaatccataaaatcggtctcagattccacccgcctgcacctcactaaccttgacaatctcctccagaagcaatcaccaacg

SEQ ID NO: 115331 - DNA, 268 bp, Glycine max
ctttggttttgtccaatttgtggatcctgcggatgctgctgatgccaaatatcatatggatggtcaagttcttcttggtcgggagctcactgttgtttttgctgaagagaatagaaagaagccaactgagatgaggacaagagagagaaggggtcgattttctgatcgtaggaggtctcctcctcgttactctcgttcacctcgctactctcggtctccaccaccacgtcatagatctcgttctcacagtcgtgactattattctcct

SEQ ID NO: 115332 - DNA, 261 bp, Glycine max
ctcgagccggttgatacaagactaggaggagaatacccacccaaagctgttgctaaggtgcttactttctattagttttttttttttcattttcttgctaaggtggtattgaaagtccatgaaaatattatgttatatattattttaaattgtatgcatatgaattggaaaactctagagataacatcagaattctatttttttaggtagtaaatactgaatatgcaaaaagaccaaattttgagtctaaaactgctgtat

SEQ ID NO: 115333 - DNA, 264 bp, Glycine max
tctcgagccgctcgagccgctcgaggtgttttcaagtggctgcttatgatcttctttctttcattactcctatttaattaataatagtagttcattataataatgttgtttttgttgctttgcttttcttgatttttgtttgtggtgtttcagagttgccagaaaccaatcccccgcaagtcattgaggaggagccacaaggtgctactgctgtaagtgggagctgtggcagcaacagcacctgctcaacaagcaatggcggtg

SEQ ID NO: 115334 - DNA, 238 bp, Glycine max
ccgtttgacactgcctcatatcgaagtgcttggagaagaagaaaacatgatcaaagttggaacaagtgggttttgtgcaaaatctatgggaagatcaggtctcacacaaggtgtaaactgctatagccatgatgatgacagtggatcagagctttcttggctagacgaagtttatctgtcgttggatgatgatctggaagaaatttggctgcctatttagattgaatgtatactaccc

SEQ ID NO: 115335 - DNA, 258 bp, Glycine max
ggtaatgctaataccccaaaaaagtaaaagggtgggtcatgatattatgacataaaatttcccaacaaagaaaagaaagaaagaaagaaaatcaaacgcaaacaaactcaattcaactcactctcccaccacaccacacagcatagagatctattcgcttctctctgcaaaagtaaaaagctttgcaagcaagcaccccaacatctaaaaacccagaaaaagaaaaggccatttctttacatcttccatgacctgggt

SEQ ID NO: 115336 - DNA, 254 bp, Glycine max
aagttactggaaaggacaagaccaaggatcttagcactctgaagcagaagcttgaaaaaattaacggaaaaatacaaccttgctatcctcattctgatgctcctctttatcctactaaaccagtttgtgatccatgtcatgctccttcttatccttatactaattctgattaccttcatcatcctcagcttcatcatcacttcccttatcctgtaatgtgtctgttagggatattgatatagaagatataaaaa

SEQ ID NO: 115337 - DNA, 259 bp, Glycine max
  unsure (1)..(259): unsure at all n locations
tggaatccttaacaactctaatttccgacaatactgctgtgaaacaagtgcccttttcaatagtagactcaaaaagcattggatatatatccatatgtggatttaaaggattgtcacatgatgttttgcattctatcattctgtctgttatgcctacgacaatgaatcctctatctcatattcgtttgttttctggtacttcatcattttccaagcatctgctgcattatganttgggtgctctaacaccaatgcttag

SEQ ID NO: 115338 - DNA, 276 bp, Glycine max
agggaaagaacaaaagaaagatgtggaagcactgcactgcatagcttctttttttgtccagtgattgacttgcataaatggttttaactgctaggaatgtggcggaaatgaagatgatggatgagggtggcattgaggagaaagcagaagaggggggaaaacaaaaattgcgaacagagaaaggtttgtcaaagaaaaaaaagtcaaaagaaagaagaaaagaatctgcagaggaagggaaaaaacagagaaaagaggaagtagaaccattagcag

SEQ ID NO: 115339 - DNA, 266 bp, Glycine max
gtttacgatgctatcattatttgtgagaatgaaatgaaatataaattcatcggagatgcaatgccttgtggttgttagttaggggttttcgagaaactcgtctctgtatttatgtcgttgttcgagttgctattgaatactagtataaacggttaggaccaattgtggcgatgtttcttcaagtgcgattcagacgtcttgagtgaattgaattgaacattgcttcgaaatgtacaacgtaatttgtagtgaattgaattagtgtt

SEQ ID NO: 115340 - DNA, 267 bp, Glycine max
agatgttgtcttgtctactgctatcgatttgaagcgaacagctccaagacctgttctgacatcatctggagtgagttccaggtctgtgtcccctttctctagaagaccaagcccccctcgttcagctacacctattccaacaacatcgggacacaccttctctaaaagtattactgatagtttgaagaaaacaaatgaacttttgaatcaggaagtgttgaagttacgcggtcaggttgagacctaagacagagatgcgaactgcaa

SEQ ID NO: 115341 - DNA, 266 bp, Glycine max
tctcgagccgattcggctcgagcaggttggccaatgtgtcacttctatctcttattgttatcgccttgcgctttcaacatttacttgttggtatcacaactggaattggttcgtagagttcctttgaattcttcgtatatctaactaacagtatatacagccgtgtgattcgttagcgctcattatatcataaatgagttgtactaactactaagtgagcatatatgcatgcgtacaacaaacatgatgcactctccttccaagca

SEQ ID NO: 115342 - DNA, 271 bp, Glycine max
ctcatcttacatgttcctgacaacttatttgcagaaaacatgcgttgtcaaaagttttcgaggttggaacctactacagtaacggctgatgggagaagttgaggcaaaatcttacactttacagtgtgcaagatctgcttacccttggacaatgtcaaagtgacacttttgacattcttcaaacacggattcccagctgttgaacaattgaaagcagattgcatcacgagagttaatttcaaccatgttataattccgtacagattaaatt

SEQ ID NO: 115343 - DNA, 126 bp, Glycine max
gaggcaatagattattgttgttccagccgacttttttattttgaatatggaaaaatggattgataaagacaaaggaattcttgagacaacagtcttcaattcttgatggcacatggacaattgatt

SEQ ID NO: 115344 - DNA, 266 bp, Glycine max
cagcagtaatcttgttggacaatatttacgaggcattaaaacttcagaaggactagctgtcgcaagaggcttgttggagtacaggtgtagagagctcgtgcacgatgtcatggtcccatagagtcatgagatgcagtgcgttgggtcccacaatggcattgataaggtctaacaatggactttaaggaataagcctagatctgttgtgtcacctatacgcagtattgtgagataatcaggaactggaaaaacgactgaagccttta

SEQ ID NO: 115345 - DNA, 261 bp, Glycine max
tacctctcgcactccctcctcatcggcgtcgtcaacctccgctccgcatcgtgcgacgtcgccggcgacgatcgagccaggtccatcgccgacggcctcgatcagggaaccgtcttcggcttcttgaagctcctctggacattgacttggacggatatgtccttcacggacctctacggcgctgtttccgacatgaacgagctgctgcggggcttgactgagttgactcgcttggaatcggtcgcggaaaggtccgcttgg

SEQ ID NO: 115346 - DNA, 261 bp, Glycine max
agagaagtagggtttccgaagatgaggaaatcgaatccgataccaaccccttcgataaaaacgaaaactctctctatcaggttatcttaatccttcgattgcgtttccattcaattttagacataatacgcttttagaaattatctatgtcgaaagtcataccccgttaccaaatcgcattttgttatgcctttttttctgattttatttctttagggtagccatcggtgtgtaaaagtaaaattcagtttatgtgagtag

SEQ ID NO: 115347 - DNA, 199 bp, Glycine max
  unsure (1)..(199): unsure at all n locations
caaatctttatcagatggcaccttctcggagtgtcgctgattcaacgcctccgtcaacaacatcgaagatcgnanagaacgattttcagccattctttgttcttcataaagcttcatcccggagaaaagatagaaaaccaacagctcagggaagattgtggaagagaaatgagttatcttcatcatttccacacaacat

SEQ ID NO: 115348 - DNA, 149 bp, Glycine max
aaggtgggagatgctgcgaggttagtcattaggtcacaggccatcaagcagcttcgaagcagtctaccgcttgtcaggaagctatggattttggaaggtgtgactccaagggagcctaaggaagagtgcaaggtaactcatcagactta

SEQ ID NO: 115349 - DNA, 268 bp, Glycine max
gcctcatctctcactctatcattcatagggcttttgtataattctgcgcgttctcattcacgacctcaccagtttgaatttcgtttttttgttgacaatttaggattttccaagtgttagcattgtgttttcattcccaatccgaaaggcaatttttttgttttttttcccctgcttttaaatttctgtctaaaatggtgttattttttgcagaaaatatactcatggccgagcacgattttgatggacatgttgtaggatatgtgcc

SEQ ID NO: 115350 - DNA, 258 bp, Glycine max
  unsure (1)..(258): unsure at all n locations
cttgtgtctctacctcctgtctttcctcttccagtaacttaggtacatgatngttgatattagaaactcacaatgcaatgtccgtgccaaggagactatctggaactgtaaatagatgattgtcattcatgtaagcggatgtgaagtaggtaaagtctgaggtggcgatcgaactggaatgagctgatggttatactatggttgaagtggacgagtatagtctgtctaaacaagttctgatggcgtctaagtctcata

SEQ ID NO: 115351 - DNA, 262 bp, Glycine max
  unsure (1)..(262): unsure at all n locations
gcaaatttcaactcaactaactagtttttctttccacacaacttacgcatataancgnanatcacgtanctgtnaanantaaacannaaacaagaagtttanagnancatagaaacaaggtcgatgagagttgagtttataaggttgcagcaatacgagtgaagtttcttcgttggtgctataaataattaaacatgtcttctgcggcagttcaacttggatcacgtccttctcgtgttcacccaatgcaactccaaattta

SEQ ID NO: 115352 - DNA, 204 bp, Glycine max
tctcgagcctctcgagccgaatcggctcgagcgttcaagatagacatgtatgtgttcctctcatctgctctctctgatgttctcttgtccctctcttcttatccgctcttttcagggttgtctcaactcttcgattctgggcttaaactctcgcttccgattcagagtcggatttagggcttccgtggcttggttctgactccc

SEQ ID NO: 115353 - DNA, 131 bp, Glycine max
ggtgagtgctgcttctgcttcatcatcatcagagaagaatggcggctactgtgtcttctgcgtggtcaaagcccggcgcgtgggctctcgattccgaggaacacgaagccgaactccttccacacaacata

SEQ ID NO: 115354 - DNA, 264 bp, Glycine max
ggaggataccttgtattgattttcttcatatttgtatttattgtttacgtttatcttactctttctccatacctgctgtcccctagaatcatacccatttgttccattgacgccatgtgctgtcttgttctctgagttcctcctcttcaacacaacgatccatgtgtaggcctccaaaagcacagcaatgccacccaaagctgcaatgatgccaatgtaagcatgcttccagtcattgtagcgatcccctacagaagtctccaa

SEQ ID NO: 115355 - DNA, 284 bp, Glycine max
  unsure (1)..(284): unsure at all n locations
ctcaacctctccatccgtccgcctcactgatgtcgttgctgcctctcattcttcgctttgtgatctctctctgtaaccatgtcgcgtcgtagtaactacgacaatacagcccagcgtttacttacccctatctcgcgccgtcatgccnagaggtacgacgaaatggttcagtgtatgaagatagtagcacaacttgatcttgatctgactttggatggcaggttacttctctcagtgggatacgttactttgattggttcacgacgggcctcttggcgcgtaat

SEQ ID NO: 115356 - DNA, 264 bp, Glycine max
gttttactctgtctctgaaaatggctgataccatattgaagatatgcatccatgaatgactttgccttacaattgttttctctaacaagtctgcatgaactatttttttctcttgttatgtatcccaacatattccatttatataattgcacttgcagttcttgtaggtttcattgtcatggagctgaattcacagaagagaccattttcaatcaaattatggcctcctagtcagtacactaggcagacccttgtggagaggat

SEQ ID NO: 115357 - DNA, 266 bp, Glycine max
tggtatacaacagaaactacttttcgttgtttacctgtactaagtagttttcttacctaaaaatagatccacagcgaaaactagtttacgccgtgtatttgttttaaatcaatggtttgtttttgaattgttgattaagttaatattttttcaatacagtgtaccgcacacacatgatatattagacacgattgacaagtcacgggaagcttctattcatagcagagatatggcagcgacgcaagagcgggaagcttccatgatga

SEQ ID NO: 115358 - DNA, 111 bp, Glycine max
cataatctgacgacatacagagtcgatccatgtcaatcaatttcattggtctagttccgacacaatattaaaagagcaacaacttttggtcatgcttcaattttccacaca

SEQ ID NO: 115359 - DNA, 285 bp, Glycine max
ctaaaatgaggtgagcaaattacacaatgaattgaatgagaaaatatctgaactaaaatgtctgcaattggagctgactagacgagaagatgaagaagcaggtgattctgtggatagcttcaaaagactaattgaaactatagagaaggaaaacactactcttaagttggaaaaggatgaacatgaggctgcgctcaaatcacgtaggatggctagtcaaatgtcacctgatgattctacagattcagaacaaggttccaagcagtaacagtgatgagcagttac

SEQ ID NO: 115360 - DNA, 257 bp, Glycine max
cttacaggttaacaccggcgggactgcttaacaacctcgctcgttacgtagtcaagtggtggcagaggagcgaattagcatattcactactcaccaccgcagagagaattagaccctgcattgctgcgcccaggatcgctggacatagcacattcgattgtccgtcctacaaaggccaggccttacgagtcttagcttccaattatttaggaaatgaagatcattcacttcttggagatagtgatcggatattggag

SEQ ID NO: 115361 - DNA, 263 bp, Glycine max
gtttttgggctcctgtgccggtccgttaatggccgtaacgagtgaggcaaagcccaagtttagggttcgctgaaaacaagggagtgagtgttattgtaaaatttgcaggtgaagcaacagtgttacgattacgaagcaattacatgagcatgggggaagctcatagaaggatcacggagtatctgaatcgcttttccgacgcgatttcttcgcaagacggagctacgttcaagtctctcttacgatctctcttccaactcccc

SEQ ID NO: 115362 - DNA, 174 bp, Glycine max
gtcgagccgagcggccgctcgcgatctagaacttttccatctggtttctattcggctttatagtatttgtttctgtcactctggttccttttaagttccgcacgacataagaaatgcgaaaaaggaaaaagcagaatcggaactcacgagagtgacgccgcggccatggacaaa

SEQ ID NO: 115363 - DNA, 240 bp, Glycine max
acgtatgcactgcattcggctctagaaacttagtagtacccatttgtttctctgcagaatctagggttgttcctactttggtctagtatcacagctctgatagattggcaccgattctgggtgtgagccaaaaaagtattaatttgtttcctctctttatctcttacgggaagtagtagatatctgtggtcagtgcggtgttgtagtttcgctccgagttccataactaatgcggatccg

SEQ ID NO: 115364 - DNA, 191 bp, Glycine max
ctcggatttatcgcacctagcttcctttgttgcaatttcggtctcgttgctctgattctgattttatgtgttccaatctctggcctgcctgcctgcattcgccattctattttttcagatcatcatagcctagccgtattacactgttgaatcaaaactgtgtcggaagattcttaactttccacacaaca

SEQ ID NO: 115365 - DNA, 265 bp, Glycine max
  unsure (1)..(265): unsure at all n locations
gttttctctcccacaattccttcactttaaccacttatctactcatccccacaatcaaaaatctagaaatanaanannanaaanagaatgananaacatttccactanagtaaagctataantccactncccatatcatgttgncacatgtcatcaccatgctcatttgatgatgatgaaaaatctaccctaagtggtgattggcgatctttccgagcaaaactggtgtctggagaacaattgacaaggcctgttgaggaggttt

SEQ ID NO: 115366 - DNA, 268 bp, Glycine max
attcgaggggacacaaatgatttattttatttatttaaatcctaaacaaaagcaaatacttagcgtgtagcagcggtggaaggaagagaggattgatttgattgtttctgattctgaaacccctcacagtgtcctggccttggatgtctacaattgacaagatcaattaagccactcgaaggcctcgtcaaaatcgcagatctgaccattaactctggacaccatgtggtgcgtctctctctctgtcttttttattgtgaaaattgga

SEQ ID NO: 115367 - DNA, 269 bp, Glycine max
attttctcctctcatggcttcagattccaaaaaggatttccctgctgtttgcatttgtgtgtaggcatgacgaagaatgacatagctggaacagaagagagtaaaacatccaaagatgagacttcatctaaagattctccagcagaacaaagagcgacagctacttttggacctagacctggacctgctgggcatccaggcaacccttttgatctctcagcaatgtctggtctgctcaatgatccaagtatcaaggaattggctgaaca

SEQ ID NO: 115368 - DNA, 263 bp, Glycine max
  unsure (1)..(263): unsure at all n locations
aacgaacacacgacactactcaactgtctcgcttcgcttctcccttcaaacattcaccagacttcttcacttcccggcaatgagagataagtgntccttaacatggagtagtgattgtttgaagcaattgaatctataccgccagagggtttggatgtgtaaagtcactggaaaaactggcttgacttatgaagaggctttggtgtctgaacaacttgctaccgagaaagttcaacagtttcctaaagaactgatgactgttg

SEQ ID NO: 115369 - DNA, 260 bp, Glycine max
  unsure (1)..(260): unsure at all n locations
aaatggcgcattgggatcgttcgactacaagaaagaagagaggcgtacactggcacttaaatctcgtgaagctccacctatattctggattcctgaacgtcaaaagctgatcgttgatatacacgagtttatggtaagcaaggcacctcctgttccttaacctagcgccactgagngctctgaagagaaccccttaaatgaagatgctgatactgcagccaattcactgaatcctgagtctttaactgcaagtgtagtta

SEQ ID NO: 115370 - DNA, 263 bp, Glycine max
cagttgcccaattacactatcactattgtctttagcttttcttccaattacaacactgttattttccctcactttaagttctttcaaaagttagttcttaacatttgttcggaacaaacaaatgaacacacgtacagaatgaaaaactaggttcaaatctagtatgctattaattaaggcctaggaaagcagtatctcgctgtgtttccttcgatcaaaagaaccttccaggaaggttcctactggcataacaagtacaatgt

SEQ ID NO: 115371 - DNA, 136 bp, Glycine max
gccaatcctgctcccggagccgcctagcccgacggcggcgcgtggcactcccgacatcttcggaatccggtgtgcacaccctcgtccgtcacgccgttgtcatcggcaacggtttcccctcctccgagaatcacag

SEQ ID NO: 115372 - DNA, 257 bp, Glycine max
tctcgagtcgaatcggctcgaggttttaattaaattgtggtcacacggaaaatacggctaatgtgactgcaattgcggttgtggaacgctatttaaaatcatattaacccccttctatccccctcaaaattctttcactgaaaagcagcaagaggaggagaatgaggaatggtttcatgtgccactctgaggcatcaacaacagtgtgcatgagaagctgcgatactattactgggtctgtggttgtgcctaggact

SEQ ID NO: 115373 - DNA, 187 bp, Glycine max
ctaagttcttacaacccagttttctccttcattctagtctagtctttttcttcttgttttcccccatgtatagctccaagttcagaaagctgttttgttctgtgttgttttcatggctctgttttggaggtttggccatggcagcaggtgaaagtagcagcagctccagagacctagaccagtcacc

SEQ ID NO: 115374 - DNA, 246 bp, Glycine max
acatgtgaaactagcatacctctaagcaatgctcttagcaaggatttcgattaaaaaataattccatgtaaagaggcgttgatgcagttggaagatgcaccatgagctatcgcattcacctgcctttgacaaaacttccactaccaacggttcctgtctgactgtctgtcggattatcgaatgagctttccaatattcggaattatcattgttcttgaatgtgtgtagtctaatcttggcaccata

SEQ ID NO: 115375 - DNA, 222 bp, Glycine max
gatggagtgtctagagaaaatgcttctgaggtgagtatcttttatatgtttggtagttgatttgacttgtatgtttaaggacataggtgatgcttggataaggggtatgtggactagaaattccagattgaagtggttgtatagagaaatcacgttgtttatggaattgtgtagcatcaatgtgaaggctaaatcactgaatggggagtgaactggcttcac

SEQ ID NO: 115376 - DNA, 266 bp, Glycine max
taggttgtagggtattgacaacacacaaaaactacaaagttaaaggtcgtgatggagaaaggaagtgtggttgaagttgcagcaccaagatgctcccatgcagatgaagatgtgggatgaattagaaggcaacaccagagccctacgcactgctgagacgtttcggcgtttagttcgtgttggtctatgtgtttcagcacgtgttctcatgcttaagaactctcagcgaatgaatatggatctgttgattacaggcgatcttggag

SEQ ID NO: 115377 - DNA, 122 bp, Glycine max
gcggttaggattataaatagtaaaacgacgacaatgcgatcaagaagcgtggttgggtcacgtggacgtagcagagaggtctctgattaaactttcacgctcacacctcccacacaacatac

SEQ ID NO: 115378 - DNA, 267 bp, Glycine max
cttgggagagtttaagagaaatactactatagtataatcttttgacgttgattgaacaggattaaaaaaacagaatgtgtgtgtctccctctctcttcttgtttttgaacgccttcaattcatttggcatcttatgtacattctgcagtgtaaagatcttcttctctctctcttttcagtctttaatttaacgccgattataaagttgtgggttctaggagtaattggtggcgacatttggggaattcttatccgccgcattcttgt

SEQ ID NO: 115379 - DNA, 265 bp, Glycine max
ctcgagccgctcgagccgattttatgtctgatcattttatcatatcatactaattataaacattatgtgtcaataaggtgaattcccatttaatgtgtgtaagaaaagtcttacaccaataccacatattaattaaattctttataaatattatcgtttttggtgtgttaatctatgatgaacttttgtctggttgttgcattggttttgcaacgcagtgaaagcaataaatgtccatctgttgctctcatgtttcaaattggag

SEQ ID NO: 115380 - DNA, 265 bp, Glycine max
tgccaggtacttgtttgtgccttattccctctgattctggaacaagttcccgttctttcttatctttctccactgttttattttctccctgatcttcctctaccttaatttcagtcctatttgttcttctgacagatactcttttaccttcaccagctcattcttcttctatcttcttctgctatatatgctcaacctttaaaggaagtacatgagactcttaaaagagggtatgctttaaagaccagaatcagaagctgattaa

SEQ ID NO: 115381 - DNA, 267 bp, Glycine max
gatagcttggatcttagctataacaatctcacaggtaagctacatagagaatttgctactctgtcatatataaacctttcgtacaattcatttgacttctcgcaagaccttgagtcagagtttccagactattgttattttggggaagactcattaattagttaccacatgccaaatttcacatcctgctaccttacacatatcaattctgtccaccaaaccaatcctcgaactaaaaaaggcaagcctttcatgttaattgttctt

SEQ ID NO: 115382 - DNA, 262 bp, Glycine max
tgccatttctttccattatcttaagatatgatgattgtacttggagctgaatatgggttgtttgaataattgtttacatgttttctatgtctattatatttcctagtacaaattctggttatatgagatcaataacatgggctatattgttgctgtgttttgcaaatcatcataaatgcaattatgattagttttgcattgtatttggttattgaatctcagtgactgtaaaaatatttctatgctgtactaaattttttat

SEQ ID NO: 115383 - DNA, 258 bp, Glycine max
tgccgccctttttttttctttttatttgaatgactaatttattgcaacttacaaagcatctaaatcaactacaacttcatcatctgaattttggggaattcccgtgggcttcttctctctctctctttttttttttttggtggccgggtttccaattttaattaaatgaacaattttgaaggggcttaataaatttcatgcacataataaaaatctcaacctgtgactgatttccccaaagctaattttccagggtat

SEQ ID NO: 115384 - DNA, 261 bp, Glycine max
tgctgcccaaactatgaagttatccgataatggagctcgaaaacgaaaaggaaaacatagtgaaaagaaaattaaatttgtcaaatatgacctccatcaaaactctgagccagtcaaagccagtactttagccgcagatgatagttcaagtggtgagagtgaagttgaggatcctgtttcggatacagatgcataaagctagaataacaaactgttatctgtgtaatcatgttatttacctactccaactagataccacag

SEQ ID NO: 115385 - DNA, 120 bp, Glycine max
  unsure (1)..(120): unsure at all n locations
tctcgagccggatcggctcggacataactgttattctcaggttggatgngtgtcttgacgtacgcgtgngatgtgggaggtaacatcgtggaagcttcgttttccctggggcacagtctt

SEQ ID NO: 115386 - DNA, 197 bp, Glycine max
atcgagccgtgattgctaaatctgtgtgtgtggattaatgcaagatcatttaaatattttacattaagattttcgtgcatattttagatgtctgaatgatatgcaattttttttttggaaggcaaatgatatgcaatttagtgagacaaaaaaaaaaaataaaaaaaaaaaaaaaaaaaaaagaaaaaaaagggggc

SEQ ID NO: 115387 - DNA, 191 bp, Glycine max
taggagactatgtggagctcgttgccgttaccgaccctttcgataccaccggttgactgacatagaagggttcatactcccggttcacggacactggaaccctcacgatgtcacgttaagggccatcagaccttctctcggtgacaagccagtcacgcttttggacagagagccctggagcctcccagggg

SEQ ID NO: 115388 - DNA, 257 bp, Glycine max
agataatcctctcgtggtcaggcaatgtcatctgctgttcttcaagcagaggaagtccaatcaaatttggaaagagaattccctagttttgtgaagtctttagttagatcacacgttgctagttgtttttggatggggctgcctgtgtcattctgtaaaagacacttaccggataaggatacaacattcattttggaagatgaatctggtatagaatacatgacaaaatacattgcatgtaagacaggattgagtgc

SEQ ID NO: 115389 - DNA, 247 bp, Glycine max
gtaatgcaagctgcgtcttcaggcatcggatacggtctaaaatatcaggctaggtgcatatcggatgttaaagcagacacagatcacactagcttcctcgctggcactctcagcctcaaagaagaaaatgaggtacatactcgcatattgttctagtttgatccctgtagagattaattgagtgaatcgttccatgataggtacatctgattcggctttcgtcgagtggaactgaactcttctgcga

SEQ ID NO: 115390 - DNA, 259 bp, Glycine max
ttgcgccccttctcttcacccttcccttcccatcttcttccatttccgtaccgtagatacgattgtttctcttatatctctctctctctctccttctattctattctatcgatcttcaccgcctcgctcgaaccttttcgatctccaaattagggttttcagcttcctcgatgttccgcgcctagattcattccccaattgcctcacagatccacactcaccttcttcaccctcatgttctggaagctcgcctctatct

SEQ ID NO: 115391 - DNA, 262 bp, Glycine max
  unsure (1)..(262): unsure at all n locations
tatcgagccgaatcggctcgagcggctcgagcagaaacttcgaaggattncattggtgacaaactatccaaggatgacatagacttggcatagaacgaagttaataaagataaaacttctgtggatgattctgacttagctgagagtgggaaaaaagacccatttgtcagaaggcaggagctgttgatcaagagtgggcttgcagatagtcttcttgatatatgtattgagagcgtgggagaactgattcagtcaaatttgg

SEQ ID NO: 115392 - DNA, 245 bp, Glycine max
tcagaccagaactacttccgtagggctttgcagtgtgttgtatccagaatgcaggattctgaacttcctgtgcgtgttgattcagtttgtgctttgcgttctgttgttgaagcttgcaaagatttgcatgaaatccgtcgtattcttcctcaactccttgatgaatttttcacacttatgaatccagttggcaatgagggccttctatgtacatctgggactattgtggacaactttggggaaga

SEQ ID NO: 115393 - DNA, 247 bp, Glycine max
gatcaaagccacgaagattcaggcccattttctccggttatatcaaagaaagggtttgggcttggtgtaattgtccgcaaagcagcatctgctgcatcagtagctgcaaggcatgcttatgcagctgcctctgcctctagccctacttttgatgagttgatacctttgaaatgcagcttaatgtccaaaaaaaaaaaagaaaaaggagaaaaaaaaagggggggccccccattttgtgccccccccc

SEQ ID NO: 115394 - DNA, 250 bp, Glycine max
attatttgaagattaacaattgttcgacctcgttgctgccgcgacaactagagtctctatctgaactttgtggagctcatatgtatgtaattccctacctgttactgaaatggagttttgaaaaccattcaagtggataaacctcttgcatccaatctttgggaatagtgctgcaatggcttcaagtcaggaggaggtgacccttttgggagctactggaagcccatttgtgtgcagggttcatattgcc

SEQ ID NO: 115395 - DNA, 166 bp, Glycine max
atcgagccgatccattctcttttaaaaacaaaaaaaaaagcaatagatgaagggtagagtacagatgagggtattgattgctggttgggggatgtggaacaatggtggagttcactggttactcagtgggcctgagcctctttttgatttcgttaacaagcctatg

SEQ ID NO: 115396 - DNA, 251 bp, Glycine max
ctcgagccgcgagtttccaactggtggctttgatcgattggagcttttaattgctaaggctcagttgcttgctttctatcgtttgaagggttactcttgcttgcctgagttgcaatattgtggagttgtggataatgacactgatgccttcttaattaaggacttaattaagggctctgataaaagtttgagtgaagttaataagcatgcaactcatgcgagtaaaaaaggtcaaactggtgctggaaatt

SEQ ID NO: 115397 - DNA, 175 bp, Glycine max
  unsure (1)..(175): unsure at all n locations
caaaaaccaaaagggcactgactaattttcacaatcaattggatttaaggtggangncgcttccccgtcttcatggtcaatggctggacgtgatcccagcccagttttctaatgctgtggtctcgcactctcccacgtgcactttcctcggattcgctctaaatgagtccccagt

SEQ ID NO: 115398 - DNA, 251 bp, Glycine max
  unsure (1)..(251): unsure at all n locations
ctcttgatctgctgtgtaccataaccataaccactcataaggtgccaatagtctgtcagtctatcntcantanttcacatcagctgtgactccnattgagttgtactaatgggatctaggagttatgtccctgaagagaaaggctatgtgtattctgatgaaatggagttttcacttgatgctttcatgagaagtagaaaggcattggttgaatgggacaacaaatccaactttgttgagagagatggatt

SEQ ID NO: 115399 - DNA, 274 bp, Glycine max
cacttgtgtaatgtattgatatcgaggtattttgttctgacagcaagtgatttggaagagtggtatcgtaaccccgagtcttttcaccatgagcaggatatggttcagtggacagaaaaattgaggccatgtgctgaagctttgtacattgtattatttgaaactaatagccaattgctaggtcctgttgtggtctctcttcttcaagagtctatgaataattgcccaactccagtgacggaaattactcctgcattgcttcttaaagatgctg

SEQ ID NO: 115400 - DNA, 168 bp, Glycine max
ggccgcccttttttttttttttgggaatcctaatacgatgtttatccaattaaaaagagttgatatgggccctaatacagggaattataagattggggaaacccaaatatctttccacgccttgcatatccaagatgcaaatttaatagggggttaacaaccttttcc

SEQ ID NO: 115401 - DNA, 274 bp, Glycine max
ccattaactaagtaacatggtttttgtgtatgctacaaaatatgtttttggggtcgtattattgacattttttgacgttcatttgaggatttaaatttaatcattgaggtgttttgctcaaaaaaaaaaaaaaggggggccccccgcttattacccccttcccccgggatttatttccgggccgggaccttgaggggtaccaattttccccaaaaagggcccttttaaaccttgggtaaaaccagggcaaaacttttccccggggaaaattttt

SEQ ID NO: 115402 - DNA, 267 bp, Glycine max
caaaaattgggtcctgcaggccttgctttacattatgctaatatagtgctccaaattgatactcttgttgccagatccagttctatgcctgcaaatacaagggatgcactgtatcagagcttgcctcctaatataaaattagccttgcgttccaaattaccaagctttcatgttgtaaaagagctcaccatatcagatattaaacaagagatggagaaaacattgcattggctggttccgattgctacaaacacggccaaagcacat

SEQ ID NO: 115403 - DNA, 255 bp, Glycine max
tcagggacttgctggggagttggtgaatgttttaagagaagcagggacaattgtaccggatgccctcctgaaatttggcacacatgtaaagaaaaaggtctttttttttccacttttgtttatgcaccagttcagattttttctatgatgaagctaggataaacatttctttgtgtggcagtcctttattttttgtcttgtgcagaacatttgattgattgataaaattctaaattttcaatctatgataggagt

SEQ ID NO: 115404 - DNA, 258 bp, Glycine max
  unsure (1)..(258): unsure at all n locations
aggccagtatggctctctctcaagattctcataagtgtatgcactatagtcagttcctccagcacttcccattctttgtnagtttctnactggccatcagagtagcttaagatttccatcactggtgctgggggttttatcgcgtcacacatagctcggcgtcttaagatagaggggcattacattattgcttctgattggaagaaaaatgagcacatgatggaggacatcatctgtgatgacttccatcttgttgat

SEQ ID NO: 115405 - DNA, 240 bp, Glycine max
ggctcgaggttctcttctaagtaactatttggaaacctctcactctaactctctctctagaaagtcccagccagccaggtaggtaaaggttgtaatcaatcaatcaatcaatcaatcaatcaatcctcttcttcccatccctgccttgcttttctgcctcaacaaattcataccccagcacaaagactatgtttttactatcattttctgtttggcctgcaaaaagtaactgtttttatt

SEQ ID NO: 115406 - DNA, 223 bp, Glycine max
ggaaagacttgatgaagaagagggagagcgtgtgtagtggtaatgggtgacattagacgaagctctcggatggagtacgaggctctttcactgcgccaatctggatccttgatggcattgtcattcgatggtgaatgacggtgttagatcaatgcgtacaatgttgtgtggaatttcgatgtcctcaactaggagtagatggccgcacttgaccgtgtaggcg

SEQ ID NO: 115407 - DNA, 237 bp, Glycine max
tagactggcggctccggcgttgggggcgttagggttagggttagggtttccaagagatgtggtatggtccaagcattggtgaatctgttctcgctgtgtttggatccaagatgccgcgaaggtggtgagcgtgtcgtatactacgtgtttaccggcatagaaggtaaagacgggttgctttggttccgcgacggcggaaaatatggctctggcgatttctccatggccgtcgttcag

SEQ ID NO: 115408 - DNA, 247 bp, Glycine max
agacaacgttgtagcctttttttcatttctctgttcccacaacatggcttcttcgatctcccaaggtctcgtgttcaccacagccatggtcgtctccaccactgttctttaccttgcattctctgggcaaaagacttccccgcctttccaaattcccccaaattccagttcttcccactccaacaaacaaattcttcgctcttgcatatattcagaggagaagaaacgggaaatgaagaagaataag

SEQ ID NO: 115409 - DNA, 182 bp, Glycine max
ataaaatccctaaacactacgaaatccagccacgaagacagacacagagtgccccaaaacaatccaaaatcccgaaaaagatattcaggtcaaggggtatgatccttgcaaaaaaaaaaactaaaaaaaaacaaaaaaaataagggcgtaccaactaattggatatcatcccccaggaaaaa

SEQ ID NO: 115410 - DNA, 101 bp, Glycine max
  unsure (1)..(101): unsure at all n locations
tagaagactttgcagctgaaccaacagcatggcgggtcagtcctccaatgtagtgtccagtactgtgaacatttcagcanattgttccgattcaactgttc

SEQ ID NO: 115411 - DNA, 239 bp, Glycine max
attctaatcaacttaattcaacctatatacgttttttatatattcaatattgttaattctttaaccaaccttgttaagactctcagcaaaaatatctctttacagattctgctctcatctctcgcctcggtactggaaatgaaatagcggaatcctatgtagagattttagtatattcttttttttttttaatcctttcctttgtagattaacttttttagagacgttattagaatatt

SEQ ID NO: 115412 - DNA, 154 bp, Glycine max
ggaggagcaagttgagcagatgaaaaacaagcgaaaagagatagataagaagataaaatggtgggagaagaagtagtaccaatggacgacaaagcgaagaggatgcgagatctgctatcgagtttctactcccctgacccttccatctccataa

SEQ ID NO: 115413 - DNA, 251 bp, Glycine max
taggtgtctttatttctttaaactatgtatcatgttttccttgggatgatctgcatggttaaactttaaaatttgtatgtccggctcttcttaatttccttgcttaacatcatttttttctccgacatatgatgtcttgttttggatgtagttgagttgttgattttgaattattagagagtcttaatcattgattggagacacccaccaaccaatttgattgctttccttttgcatgttttagtttttcc

SEQ ID NO: 115414 - DNA, 252 bp, Glycine max
gcgaaactactaaggaccgtttgaagaacctggaaagtaggatatctcaaatggagagaagtcccacttatagtcagatggatggggaattcagtggaaaaaatattctagagaaggtgatagttggacagtctccaagacgggctaaacattccaggaaattttcctgtgactcgtcttcattgtgccctgagtatatgatggattctcctagctttaggaagatagatgaggatctttccaatttgaaga

SEQ ID NO: 115415 - DNA, 253 bp, Glycine max
gctggttttaagagtgatccactctgccaaactttgaagtcaatgacaactgttctttgctcatacatggcacagatgggtgacaattctcttgttctgcagatagtagagaaagtgataattgatcagataccacaaaagccttctttggataatagttgctctctcctgagaatgcttgttacagtggattccaagcccacaagactttctgaacaaagcattatcattctaggccagcatctttctgaat

SEQ ID NO: 115416 - DNA, 263 bp, Glycine max
cgtttgtatcggattcagaagatattgatgaaaaatatggaagccagaagtggtattgaagtaaaccaacgaggatggaacttaaaaaatgtgattagtttaactcaaaatggtagtcataatggtgcacagaaaaatcctatattgaactttgatcttgaaagtcctgctaaggaggacaatgcagaatctgacagcgatggagttctagagattacaaatgagactgagattgagctgacactaggcccttcaagttacaa

SEQ ID NO: 115417 - DNA, 262 bp, Glycine max
ggcgtttcgcatccagtgggcacaatattatctaaaaaaagcaaaaaatccggaagccatagttgttgatgataaatcatggatgttttttgaaacaacaatgagagttgatgctctatcaaaaatgagaaaccttaagttgcttatgtttcctaggtatgaggaggagctttccacagatgaggagaaggaggagaaattttcaggaaacctcaattatccttccaatgaattaggatatcttatttgaccataccatccc

SEQ ID NO: 115418 - DNA, 158 bp, Glycine max
tctcgagccgattcggctcgagatttacagagcgtacacaagtatattgctcttggagagtgtacatcatatgctagaactatgagtacaaggttatgagtaccgacgctttctgaaaatgctgcaacgacaaaaatgcttgtaccaactaatttagg

SEQ ID NO: 115419 - DNA, 221 bp, Glycine max
ctctgttgttgtgttgttctgttgtctcttctctctctctctctctctctctctctctctctctcatcactgccatgttcttcgaatcgcgatccctcctcttcgcgctccttctctctctcttccttgcttccgccttcgcttcagagtcagatcacaagtatcaacatgatgcacaagttctcctttgggtgcacaaagttggtccttataacaatcca

SEQ ID NO: 115420 - DNA, 256 bp, Glycine max
cactttcaggcttcattgctcccaggaaagaagccttgcaccgccttctgtaacttctgttgggcaagatgaaagcattggaagaatagaaatcagaaacgaccacgttttgaggaacaactctccggtgcttcaacaaaatggcctacctcctctagttagtgcattgaaagcttcggctgagcaaaatgttgccagttttcactttcctggacataacagagggcgtgctgcgcccgcttcgttgactcggctc

SEQ ID NO: 115421 - DNA, 255 bp, Glycine max
gttaaacctgttgggcttcccgagtctcggcatgacgaaagagtgagaggtaaaggttcaagaggactgcatgtcatcactccaagtgtagaagatttgcaacaagctcacttgtatgtgttgaataatagtaatgaagttttgccatacatagttcgtcatgaaaatttagtcaaacaaagtaatccaaaaatgtcgaagaactcagtgttgaaaaaacataacaaaactttcctagattggtttaaacacaca

SEQ ID NO: 115422 - DNA, 253 bp, Glycine max
gcaaaagttgccgccaatgccaaaagttgggtttgaagatgaaacaaagaaaggtttgatttcctttccccttcggatgtggagcatgatgggttcaagtattcgaattgttgatgtcataatgagctggctgggaggagagatgccctggactggatgcctttttgtggttgctccataggagctgttgatggttgcatctatgcattaggaggattttcaagagcttcagcaatgaaatatgtttggcagt

SEQ ID NO: 115423 - DNA, 263 bp, Glycine max
aagggggtcacctctttgctggttcacttggtgaactatggtgacactattaagtccataggaagggcctatggtgtggatgaacaaagtgtgctagaggccaataagttggcagtttcacaaagtaaaaacagcagctggacctccttgccttgacacctattatagttcctctaatagggaagagctgcaaagagaacccagataaattctattgtagatgttaccaagcaccagatggaagctccaaggggcccttctgt

SEQ ID NO: 115424 - DNA, 247 bp, Glycine max
gtttgcatgtgatgtattataatgtcacagtagttatgaaataaaaatcatgtaactgatgaaaaatagaatcaatggctctgcacagccacatcgaaaaaattgaacacgtgaaatcacagaacaagggtaatgatcaatgtgatttggatctattcaggacgggggaaagtaagcacgctatctgatgtttatggaaatgtagaacttctgccctgcttttgggctatctactggagtgtttggc

SEQ ID NO: 115425 - DNA, 253 bp, Glycine max
cagctctgcatctttccaactctgcatattttcgctgcaaacccaagactctgtgttgcttgtgctctctctttgaatgcaaaagccaaaaggtaaaccaaaaagctaaaactagaacatagaaaccatttctactgtttgaaaaggttgctctgctctgctctgtttgtcatcgaagagagcgaggaataagaagacttagagaaaaaaaatgaagtacgtgctggtgactggtggagttgttagtggcctt

SEQ ID NO: 115426 - DNA, 257 bp, Glycine max
atcccaaataagttccttgttccttattcttttttctggaagaattttgagaggctggcatcaaggtggtgtaaattggactaaccttcctgacatttcgaagtgtcttgagcaggctggcaaccaatataaaacttgattcagatagcatcatgtgccatggtcatcataatgggaatatctgtattgttcttaatgcagtctaaaacaaaagtgttaacagggattgggctcagtttgttaatgtctggtttgtt

SEQ ID NO: 115427 - DNA, 249 bp, Glycine max
agatatgttaagatttggtctttccctttgggcagctatataagcgtttgtttgctaccgtgattagagggaattcaggcaacaacctttcttatacagtgcttaatttgtaacatagattgcatcacacagaactttgtcgctgttacgaataactgctcactgaagatcttgaagcactacgatagtcactcagaaacttaaatgggaagattgagtacatgttaagcgatctacctagtggtgggg

SEQ ID NO: 115428 - DNA, 254 bp, Glycine max
tagcggctcgttgagtaaccctgctgcatcttatttatctttgcagatgatggaatctccttggttcgcaagacctgttggtgtttctaaggtaagatgtgagttgcctgctaatcatgcagcacacacagttctaggagttctgttattgtttctggtggcttaggtggatatcatgctgcaaacacatcagatgctcttttgcatgcaaataaaaaggaagaagctaccagcatttgcttggcaaaggatcc

SEQ ID NO: 115429 - DNA, 269 bp, Glycine max
tgtgaggttcaacataaaatgaataagcaagataccttgattaatgttatggtactagctatataggttttttgtactaaattttcatgttcatgttgatgtaaatgcgagtaacgattaattgtggggggggtttgtctttattttgttccttaattcccttttcaattttgttactcttcaaatgttgtcaatcatttttgtttcttttcctccttcattgtatataatcttgtcttgatgagttaaaaaaaaaaaaaaggggcggc

SEQ ID NO: 115430 - DNA, 280 bp, Glycine max
  unsure (1)..(280): unsure at all n locations
tcagttntctagtgggacgagatttcagattaagataatggctgcccacttgcccagaatattggttgggggatcctatttagataaccttactttgaaggttaattcccgttcgctgtcaaccaagaatagcagatttagacgtttgagcacgattttgaggaatcgtgtaaaagtaagcatgagattgaaaaaccatcagcagccagataacactgccatttatggatatataatttataatgctgccaagacctggtgtaattctcatccttacatg

SEQ ID NO: 115431 - DNA, 135 bp, Glycine max
ggaagatgtggagaacttaccgaagtcacagctcactagggagaagaaacttagaaggaaaaatagattaggcttttcgcataataagtttaaattacttatgcacctcaagctgtggaggagttagacaagaaa

SEQ ID NO: 115432 - DNA, 239 bp, Glycine max
  unsure (1)..(239): unsure at all n locations
tcttcctcctcctcgtgattcccgaacattctcttcttattcccagctccacgcgcgcgactccatattctcaccactcgcgccattcttcttcttcctccattagggttttctcacattgctgaatgtagtttcgctctcanatttgacccttgaaaccacaatgtcccggcccgctcggacggcttcgctaagaccctgtttcgaaggattctccgggattgatgagcagacggaaa

SEQ ID NO: 115433 - DNA, 277 bp, Glycine max
tctttgatgggtatcagtggttttatgttttgccccttgttgtgtctactttagcttggtttaggctttttccttttgtttgtatgttaggggtagagaactactgggtggtggttgacctgaactcagcagtgattaagaattttgggttttggagttcccatttttattttttgacgaatgggtggagtggttcaagggtttttgaggtgtggtggatccagatcttttggtttgttgttttgctgggaattttgataaaggctgtgtatttgga

SEQ ID NO: 115434 - DNA, 105 bp, Glycine max
aagaagttccagagcttgttgctggacggagagtgtttataaatcaaggatatgcatatgttgcaatgaatcagattgtttcacttgtagccacacaattccgca

SEQ ID NO: 115435 - DNA, 278 bp, Glycine max
  unsure (1)..(278): unsure at all n locations
cggtcgatatgngtctcgtaatcgtgttgggcaaatttcacatagtgttgttctgggaacatttaatgtgggtgaacaaggtgaaggaattgttcatgacctcactcggggtattgggcatgttttaaattctattggaaacagtggccagagcacattagtggtccaatgctacgcaaacttcttcagttcagccaaggaatgaaactgatggaatgcatgctggaaatcaaacccagcaggaattcaggcaccatcgggacagacatttcatggcc

SEQ ID NO: 115436 - DNA, 280 bp, Glycine max
ctaacaccgttcttcttcttctcttcttcctctgcaactctctcttactcatcttacgtgtttatcatcgtcactcaaacgacgccgtctcctctccgattcctaagccacgtttatcaggttttctggtgctgtttgtgcattgtacatattatttccatatgttctgatggtgctgtaggtgcttccaaatcttggattaatggggagacattagaactgatgagtgacgacttggcatgtcctgttttctcaggatgtattagcatgatatgccgca

SEQ ID NO: 115437 - DNA, 279 bp, Glycine max
agagtttctagtctttgtcgctgccatcattgctcttagcattactgttgcgtagaaaatcagggagagagaatgaccaccataaagaaaattcggatcctttgtatcgttcaaatgctaattactcgcaatctcgcatgaggctcgatttaacagtgaacaataattgcttacttatcttcgtgaacgttttgggatcaattaattacattaatttggtggagtttgcataatcgcgttctgtagatttttagaaatatctaaattaattgcagatat

SEQ ID NO: 115438 - DNA, 112 bp, Glycine max
gtctttctggaacaggcagtaatctgacagcagcgatctctggaggtaacttgacaggaactagtgccaatacttcatctgaatcaaaccaagctcaaaatggtactgtgaa

SEQ ID NO: 115439 - DNA, 264 bp, Glycine max
gaaacggcatgatttatgtgtgaagggtgatgcgcgcaagagaaacaatggattgcaaagagcatatccccatgctccgtacggtggtactcaccgtctcttggttgttgttaatcactctgccatactgtgaagccgcatacaattattcggaatgcaaagagcaaacatacaaatgcggaagtctgatcaacatatcgtatcctttctggggacacgaccagcgagactctgaatgtggtggcggtgacctattcgagctca

SEQ ID NO: 115440 - DNA, 138 bp, Glycine max
gggcagtctatataacgaattctttgctttgtttgtccgctacatactaacaacacaaagaattcgttatatagactggcctgcaatgttgaactatgcaattccttcatttcttttccctataaatagaggcttttt

SEQ ID NO: 115441 - DNA, 146 bp, Glycine max
ctcgagccgaatcggctcgaggggctgcgtcatgcagtttgatacttattcattgaaacaccgacgttttgcattgggcacaaaccggaaaaatacagcaggggtcaagaaaatcctaatcctcttgggctctttgtgtctaaagc

SEQ ID NO: 115442 - DNA, 274 bp, Glycine max
ctcgagctcgagccgaatctctccaagcaaagtgaagattcatcattaccactgctgcgacacagacaagcggctctgaatagagtgaaaggttcactcgactgcgctcacttagaaattatttggcatctggatccattgtgatccaactgccacaatgtatgtgttttgattatgtaattgtaataagttcaaatagcaaaacataggccataagagaaatattaagaacacattttgtgttattagttaaaatttattgaaaattataaaa

SEQ ID NO: 115443 - DNA, 263 bp, Glycine max
gcactgctatcaatgttttcttctttgcttgaagtttaaaaccagcaatactttttctatggttatttatttcctagtgttagtggctagtgttgacaatttgataaggttcttgtaaaattgatagaggtgaagagatgatatgaggggagagccgggtgattatggcttaaacaatttcatgatgccactcacgtttatggaaagttcttttaaagtaatatcaatatatggtgccaacctgttaaaagaaaaatgtggtt

SEQ ID NO: 115444 - DNA, 258 bp, Glycine max
tctcgagccgattcggctcgagggaatctcttactcaaattagcttagtttggttaatgggactctcttatttgtttgtgaaccttgcatttgaatttgtatgccattagatgttatttcaattttaggttataaataatccgatcctctttcaccagagggtgttcaaatttcgagctaaagttccgatctttttttttttttttgctaaaatcatgtgtctaatcatcaagtgtcggaattgcaatgtacatggtg

SEQ ID NO: 115445 - DNA, 107 bp, Glycine max
atcgctggtggaggaagcaccgaatctcaatggcttcttcggtgttctggactcactcccattgctagtcgtctaaacctgcttctctcgttttccgcctcgagcgc

SEQ ID NO: 115446 - DNA, 227 bp, Glycine max
atcggagtgcagcctcgcgtcgctccgtgcggtggctcgggaggtttccgacggagcgttggcggctgcggataagaaggggttggagaaggatccgcgcgcactgtggcggagatacgtgggtgggctagaccgaggacatggaacttgggattgactgtgatgtgagtcgggtcgtggtcagtgatgagttcgtgaaggagatggaagcccgtttccaagcagcg

SEQ ID NO: 115447 - DNA, 252 bp, Glycine max
gttatgtcacctcctcttagttctgaagagtttcataagggtttttgctttgcccatcattgattctcttgagttttgtaaaagaaagcctcttttagattcctttgatcataagaagctcctatcctctgcattcctctctgagggtatctctctctctttgaacttagagagagagagtgagagttgaattgagaagtatcgtttttgctatgtgcaattgttagagagatcaatgaataggggaattga

SEQ ID NO: 115448 - DNA, 111 bp, Glycine max
tggcaatagagagtacatcacagttggtgccattcccattgttgacgaatgggaattacacagcatgcagcattccttggaggttcccgtcagacgatccaagcattccca

SEQ ID NO: 115449 - DNA, 253 bp, Glycine max
tcaggatctccagtcctacggtggagataagggtaatggttgcaaggagtcgaagaatctgaagcgttcgttttcgtcggcgcacggagatttgactagaagccggagtatgcgcgcaaggacttggtctcgtcgtcttcgtcgtcgtcgcggtacgagagggatcggacagtggaggaggatcgggagggttcgcggctggttcggaagcgatcagagcacgatttcgaggctttcgatcggaggaaggggt

SEQ ID NO: 115450 - DNA, 250 bp, Glycine max
ctttggtgtttggatcttcaagaaagatagacccttgggatttcgtcagcatgagtctcttcggtcttggaaacaggttcttcatccaaatttctctccttttcttccgcttcatcttttcttttgagattctgtgtttttttatgtaaaaaaaatgtctttttgtgttacccttttgagggtgagctgggattttgattttgaggctgcccttgatttgtttttggatgaattttgatcccctttgttt

SEQ ID NO: 115451 - DNA, 258 bp, Glycine max
attgtgttttttcctggttatagaaaagtttagtggagtttgatcttgggaaattcataacaggtttcaccgttcaaaaagcacttaatgtacaggatattcaaattcagattcttgtgaaatatgaattctatcttgccaactggatcaatcttcgttcatattgactagatgattatgtaaagagttatataatttgatcaagcctatggagagcatgctatggaggatcatacatacaccagaatgtcactgaag

SEQ ID NO: 115452 - DNA, 234 bp, Glycine max
ctcttattaggagtgggacgatggagaagaaaattgagttgtcatattgttgttatgaggcttttaaggttcttgctaagaattatttggatgttgatcatcatgatttgtttcatgatgttgaggggttgttggaaaagacgaatatgacacctgctgatgttgccgagaatatgatgcctaagtcgaagggtgataatgttgagacatgcttgaagaagttgattgaatctc

SEQ ID NO: 115453 - DNA, 258 bp, Glycine max
cctccttctcctcctttacctccttcaagccttaacatgttcaatggaggtccatattccactgatggcaataatcgaaggacgataaagcccattggggtcgacatactgaagagacagcaaaaagttggacttagcagaggcataatttccactattgctgtttctctttctttagcagttgttttatgtgctgctgctgcctgggtcatgttcaagttcagagatcatgttagtcagtcagcatcaaccccacgg

SEQ ID NO: 115454 - DNA, 252 bp, Glycine max
atggatcaagtccatctccaacactgctgtttgcttcaaaggttgacgagaaaaatattaccatctcccaaacaatccctgggagtacccagaatgtagaatctggcttgagctcagcaactacccccaagacaatggatcatcatgctggaatgatgaacaaggcttttccaattcctattccttcacagctaaattgcttcactccaagccaaataggtggtccaggtggagtagtatctcagctaacac

SEQ ID NO: 115455 - DNA, 219 bp, Glycine max
ccattttcctatctaaagaagagtcacctcttagaagagaacatatactctcatgccgggcttaagggacaatcatgcaatatttaaagtttgtaggactaaccataactttccgggttattcccttcagtttgggatcatagaggcttttatcctttttacttttagtattgctatttctaccaggtaaaaatatattcaacattaggtggtaactgt

SEQ ID NO: 115456 - DNA, 261 bp, Glycine max
tgttactggggaatggtccaccacaaagattaatgagggaatgcagctgtgtttggatgcttgtgcaaagcttgcgaagattatgaggtcatgtttaaaagaagttgcttcggattcccaggagtagaatgacagttctaaattaacacagatcgccttatgtgctgttgtgttggaggaaggtagggaaaggtgccttgaatgccctgaaaattttgtgctcatgatcttgtcaaagacaagtaaatactctgaatttcg

SEQ ID NO: 115457 - DNA, 273 bp, Glycine max
attcgagcgattcggctcgagggaggtacctagatcaatatacgaggcttcaaagggacttcgttgaaacagatcggcgagtttccaagcgttcccgcaagactaaaaatgggagttcaattagtctaaaagtttctgcttcaacatctttatatcagctgaaaatgatgatatgggaatcctttggggttgtcaaggaaaaccagatactacataaaggtgataggataattgatagcgataatgaatttgctaccctcgcagatgtgaaca

SEQ ID NO: 115458 - DNA, 271 bp, Glycine max
ctggactgccttaaacgatgcatggatcttatcaagaaaggagcctctgtttttttctttccagagggaacacgcagtaaagatggaagactaggcacattcaagaagggtgctttcagtgttgctgcaaagacaaatgcaccagtagtaccaattacccttattggaactggtcaaatcatgcctgcaggaaaggagggaatagtgaacataggttctgtgaaagtggttatacataaacctattgttggaaaggatcctgacatgttat

SEQ ID NO: 115459 - DNA, 265 bp, Glycine max
agctaccatactcaccagtggagttgatttatcccttttctctatcctagtacatgctggagggcagcaagaggtgcttgtacagttggctgctttcatccccttaatgtatatgtgtatctgtacatattattccttgtttaaaatgggaatgatgatgttttactcactgacaccaaaacaaacaagctcagtaagcctgcttatgatatgctcgatgattgcaagatatgcagcacccatttcatacaactttctcaatctc

SEQ ID NO: 115460 - DNA, 212 bp, Glycine max
aagatatgcacgagaactcacagtaatgatgttgagaatcggtgatataattccattatgcatgtgctgattgtgcgcctgtgcaggtgaattgagttcaggtgtctctactagccgttagatgcagatatagcgactctgttgcaatgggggcatctgctgtccctccgtttgatccaccattggctgcagtgagtgtagctgacaagctc

SEQ ID NO: 115461 - DNA, 267 bp, Glycine max
ggatttattttacatagttcgggcttgttactcttggataattcacaatgctcctgtaaccgacctgaccaccatcattgtgctggcatcaattgttttagctattgctgaagccactgtaccaaactccatcaacgaccaacataatgttttgactgtatctggtcttattggttatgctgctgttagaggatatatttctgaactttttttctggacccttctggttggggtgtatgccttttcaaaatttgtcaagaagagaga

SEQ ID NO: 115462 - DNA, 211 bp, Glycine max
atcccccacggagcggaagctaacttctatggatttgaaattaggttccaatttggagaagaaacattccatctctacagttgagagccggaatgatgtcttcaatcgcattaggaagaaaacattgatgaactcctctgcagttcttccagactctggcccaatagtttcatctccggccatggagaaatctggtgaagtaaatagggga

SEQ ID NO: 115463 - DNA, 231 bp, Glycine max
agtattttctcactgtcatagacacaagtaagaacgacgtcgttgacatatactatatcttgcttcttggctggaggagcagaagctggttttttactcttcgcatcgaattgaggggatagggatttgatcgaagaggagagtgatggatttctcttcggtgagagctgcgttggattcgaagtcgtacgacaaggttacatatgtgtgcgacaacttgatgcttcaggt

SEQ ID NO: 115464 - DNA, 230 bp, Glycine max
ggcaaaatcaggggtcgaatcttccaaggttgttctggggggcattcaaacctaatactattattcgtgaagtgtcctgtggacctgtccatgtggttgctttgtctgaggaaggcctactacaagcttggggctacaatgaatatggtcaacttggccgaggtgttacttgtgaaggactacagggggcttgtattataagttcttatgctaaattccttgatgaagcc

SEQ ID NO: 115465 - DNA, 134 bp, Glycine max
gtatatattaaggcggcacagacccaagtgggtgtaagtcagtcttgggagtgagtcactcttcttgcataacccagatctggtagtttacaaattgcttccttttatagaaactgaacgataatgtttcattt

SEQ ID NO: 115466 - DNA, 161 bp, Glycine max
ctcgcaccgattcctccatcccttcgcaacagagcagtagcgagaactcctccaaccgctgacacaacatgagcactggatcatctaggtgtcaagatatatttcggtgctatacctacttcagagctctccaataatttttcttccatgaaattacatcc

SEQ ID NO: 115467 - DNA, 204 bp, Glycine max
cggctcgagattttgatgctcagaagcatcctacttgttcatcttatctgttccatgcctggtggttgactatcaggaatgttttagttttgacacttgacagcagtgtggaggattgagttatatactacaaatatgcatgaattccgaagtttattactagacgacatagtattagatgtcacctgtatgttaggggaatcc

SEQ ID NO: 115468 - DNA, 198 bp, Glycine max
gggtctccgacgctggcatgcctaaaatcctgattgctaatagttctatcttgaagaggaacttgtaaaaatgcctcatcccacgttatgagatcctaaagagtgtactttgtgatgatcgggaagttgttagagctttgagaaattcccctcttggttttatatatggtgacttagtgaatgccttggttccaaaca

SEQ ID NO: 115469 - DNA, 256 bp, Glycine max
tcgaaaatgaagagtactgtaggcgtgtgtttgttgtttttggttttgttggaggcgatgtgctgtgaagggtgttggaaggaagagagagatgctcttttggtcctaaattcccgttttgacttccctctctcttgggacggcccagactgttgtcaatgggaaggagtggagtgcaactccaccactgggagagtggccggactcgatttgcggtggcggtggtcgtttccgccttccaatggcaccaaactat

SEQ ID NO: 115470 - DNA, 250 bp, Glycine max
caaatgcgtgtcgaatttaaagcaatctctggctttctgctacttcatgttcattcacacccaattttatgtgttgtatgtaggaactctcttaacgagttgttgcattgagagatggcaacagctaacaggcacagctatgagcttctcctactccaccgacttctgctttgctttgtcgtctcatgctcattatcgttatcttgggcagtgcaagatggtgaacgggttatggtgcgcaacaccccac

SEQ ID NO: 115471 - DNA, 246 bp, Glycine max
gagcagtctcattggctctgaatcggccgaagcttcaggctcttactaataagcttaaagctgtacgcatgacttgccctctatttgacacggcccgttgggtgagttcgacattatataaaccctctatacaacaatcttatggtatttccgttgcctgttcagttctttaagttgctgcactgaatattgcaggtgaggaatcttgagagatcatattttaaaatgtggaatctgcattgctct

SEQ ID NO: 115472 - DNA, 255 bp, Glycine max
tctcgagccgctcgagccgattcggctcaggtgatagaccaaaatgatgtatataagacgggggcaactctcacctcttgaacttattttttacatcgagttaggcccaaatccaaattttgagactacgaataccatatgacatgggattaccacagtttgaatcccacactgatttccaaaaattgtgaaagaactatgcagagttgtaatcagattgcttcctaactacatgttggaattggaagaactgag

SEQ ID NO: 115473 - DNA, 262 bp, Glycine max
gttttccgcctctcaacttgacctctcttgaaacacttaaccttggtgggtgttcgagtcttgagtattttccagaaatattaggagatatgaaaaacataacggtggcaatgggtagaatcggaagaaggtgaagaaaaagtagtgggctcaatactatcttttgaggccacggactgcaatctatgtgatgattttttttttataggttccaagaggtttgctcatgtaggatatttaaatctaccggggaataatttca

SEQ ID NO: 115474 - DNA, 262 bp, Glycine max
ctggaataattggcttcctatgtctgtggagcaacctttaatattcttctttttttttcatcttttgatatagctgctacgattacgcgttgctgtgtgttactttatttaccaatccatttattgatatgttcatgctgctgactaatcttgcactagcagaatatactatataacatcgttgtggtgattgaatcatgtcgcggagaccggtgaatccgtctcggcgattcggagacagtggaggtggattgttttcatc

SEQ ID NO: 115475 - DNA, 262 bp, Glycine max
ctcgagccgcatcgctaagaaatttagatatttcccagtctcctaagacaactagtgaacaccattatgaccgaacataccagctagttcttgttgtgcaacagtggcattcacactttgagaagcttgtcaaccatcaaaagggatacataaaggcgctaaacacttggttaaaattaaacatcatccctattgaaagcaatttaaaggaaaaggtttcttcgcctccaagagttagaagtccacccatacaaggccttct

SEQ ID NO: 115476 - DNA, 262 bp, Glycine max
cttcaaagtagctagctagctcccatgatggatcaagaggtagaaacgcttgaagcgaactgcaacgtgtgaaggaggataatcgtacccttagagagatgctggaaactctgagcagcaaatgcgagaagcttcagtctcatcttcaagagatcaataatgaagaacaagaagtgagcacaaaatcagaccaaagtggatcagtattattagctagagccgattttcccatagcacaaaagccatcacaaatctttgttaa

SEQ ID NO: 115477 - DNA, 166 bp, Glycine max
atggtgtgtcatctcctgggtgtcgtacactgagatagcctatcgttgttgttcacgcgtccagtggcattgatgtccttggtagtggctatatgtggagcgggtaccgtcagaatgtagtgaatggcaatcccagtccggggttacagagtctcgcactctttgc

SEQ ID NO: 115478 - DNA, 152 bp, Glycine max
ggaaatctggccacgttccttatgcaaaaacatgtggataacagtacctcttggagctttgacgtcagctatgtgaacgtggctgcatgctctatctatggctatgcgattgtggttccattggcatactacttcttccttcagtatatggg

SEQ ID NO: 115479 - DNA, 263 bp, Glycine max
caattccccattgagcgcaccgaaagcaaagtgtctctctaacctctgcaaaagtccaagatggatgatactcttcctactcctatagtgggtagacctgagagaagtttttttgtgtgtgtgtgtatgtgtgtgtggtaggaatgaaaatacttacatgtgcttacaagttccatttgctatatgcaggttgcacggttttaactgcttaggtttttgtcttcacaattaaactgtgcactttggttgcaaagtcatggggg

SEQ ID NO: 115480 - DNA, 147 bp, Glycine max
catcttcttggtccttcacaccttcacttgagtctttcatttgcctcaaaactttcaaacacgcagttccccattttcttcttctgcatcctcacaatcgcttgttcagatctcccttgtacaaaagactcatttttcatcacacag

SEQ ID NO: 115481 - DNA, 159 bp, Glycine max
atcgagccgctcgagccgaatcggctcgagaacttccttaccttcctcctctccatcccgatactggtacgccggagtgtggctgagcaagcagggcgccaccgagtgcgagcggtggctggagaagccggtgatcgcactcggcgtcttcctcatgct

SEQ ID NO: 115482 - DNA, 99 bp, Glycine max
agccgcaacggctgctattgacaactatgttaacaccacttattctgattggtcacacgtcagtgactattaccttgaattgaatgtactttaaatgtg

SEQ ID NO: 115483 - DNA, 225 bp, Glycine max
ctgactcaagaatttggaatttcttgttatgatgcttactaaatgttttaactgttggattttcattgcaggaccaaacagttcaacttcaagctctgaaatggatttttttatgatggtggattgctgcacttatttgggctatttagcttgaaaacttagcacggctaaatcatgaaacaacactttgatcttgaagtggtggcctcagaagactatgaatct

SEQ ID NO: 115484 - DNA, 156 bp, Glycine max
actcctcctcctctctgcgctcccaacgctgcaataacacgctcactctctttctaaattcttctcttccacttcgcaccaactctgatcggtgttccttccctccttctgcatcctcctcccgcatcagatgcagactctacctcccttctattg

SEQ ID NO: 115485 - DNA, 133 bp, Glycine max
taaaacttggtttccttctaatgcgaacctctcttcttctacgctgccacaattggattcaaggcagctacgatgtcttgtcccgcactccatcttccatcagatcacaaagagaccctaacccaaaccctag

SEQ ID NO: 115486 - DNA, 124 bp, Glycine max
atcgaaagcagaagcagaagcaggaacctgagttgacgcgaatggagggagaatcgaaggaagatgtttggtgcagagaaacagtgccaaaggtattgaaacttgtctgttccacacaacatac

SEQ ID NO: 115487 - DNA, 224 bp, Glycine max
aatgaattataagtaactggcaccggtaaagccatgcgaaggtttctctttctctacaacgaagcacgaaaattccgcaaacctcatattccccttgcatttccatcgcccttagcttatagtactagcttgaatcatactcataatatcggagacagtaaattcaatttggtggatgtttctgcccaaggtggaaccaaagctgagtttgcgtaatttgaagc

SEQ ID NO: 115488 - DNA, 147 bp, Glycine max
agcccggggcatgttcttcagtctgcttctctgcttgtatgcaacggccacgcgcgccctcagtcgcctgacaacgactgttggtgcatggcaaccacaaagatccgggtcgacccgtcgcaggtccgatgccaaataagaaagatg

SEQ ID NO: 115489 - DNA, 256 bp, Glycine max
ataacacaacaccaacaattgactctcacaagcgatgtcttctctctggttccttaaactgtccctcaaatgccttgatcacctcgcatggcctcttcttgctttggggtatcctctatgtgcttccgtacaagcaattgagactgattccaataaagaaactagggatttgatctcgtattggatacttctctcgttaatatacctctttgagtatgcattttcgaggattcttcaatggttccagttttggcct

SEQ ID NO: 115490 - DNA, 258 bp, Glycine max
aaaatgctcttctaaaagatggtttgccagtgatgaccttaactcccttgaagaactaattggaaggttaaggaggctgaaggagaatgtggggtttatagtaaatcgtgtcacagcaattcaggctggtctagacagctggcagtcagagcaaataaacaggaagctgtactatctttcgttcctttcaataatattcctccctttgtccatcataacaggagtctttggcatgaatgttggaggagttccatggac

SEQ ID NO: 115491 - DNA, 257 bp, Glycine max
gaaacaaccaagaaggagcctgatgagtcacaacacatgcagatgacgggtgcccgatgccgcagatgcacagagggtaaggtgggcttgagggatattatccacgccggacatggtgatcggtatcagctggaatgtactggctgtggttattcctggtttgcctcccgtgatgaggtgtctgagctgactatagatgcatcagattcaaaaagaagcgtaggcacagcgccatgggccactgcaaaatttgaaga

SEQ ID NO: 115492 - DNA, 255 bp, Glycine max
tactcgaacgctcgagcggctcgacgggctcgagattagatgtgatttaaataaagatgattcctcggatcttcaacaaccacttacattatctcgctaccaatgatagttcgtcccagattagagactttaatggtgttggcactctagctcatccatcagtaactgattctgttgaaaagagaaggggtgaaattgtagaagaagcagcttctcaagtggagcacatgaatagcgagcagcaggttgatgctc

SEQ ID NO: 115493 - DNA, 263 bp, Glycine max
ggaattcggtcgattcgagcgaatcggctcgagcttaccacccaaggatacaaatattatttggatattgattggtaacccctggttagtatatttagttagtgagtgaagtgggtgatgatgtatataaagaggaagaggggtcatgagggaatcactcattgtgtgggaatttggagagagttggatctttcaaaagtccaggagcgttcacttcattgtctttgccttgtttttgattgtgaaaccaattgggaccagga

SEQ ID NO: 115494 - DNA, 247 bp, Glycine max
cgctactgaaggtcagttcagagatgaatgctactaacctactcaaacgagatatcgtacatttaaatcttaagttgtcacaacttcaagctttgcttgatgagaaagaggcacagttacgccaatttagaagtatggaaggggggagtactggttcatcgagcaatttgcgtgaagaaactgctcgtgtgtcgaaagattcttcagagctttttccaactggcattccacaagtaggtcaaacaga

SEQ ID NO: 115495 - DNA, 247 bp, Glycine max
aatcagattcatttttttgttcacaggttcttgagaagaaaagaagtggaactgaaaactgagtatggaaactgaaaattgcgaaacttttggcacaacctcactagatactactagtgttggtattgttggccactataagttcgaaaatgggtcatctcagtttgctttcatgaaagttgagaatgacagaggagtttcccttgaccattccctcagcttctctactgaaaattttgtgcagacc

SEQ ID NO: 115496 - DNA, 251 bp, Glycine max
gaaataaccccactcacacactaacatagttactgacagtgccagagagagaaagacgtgtgaagtgtgagtgaagaagctcttgatgttttctcttgcaacctctgaatctaatcttgcgatacagaaaattgttgtgatccaagacctttgattcaggtgattcaaggtaagcttcagttgtgctatttaacagtgtagggcactgcgtgtttacgaaataataagtttgtataattactgtaattaat

SEQ ID NO: 115497 - DNA, 253 bp, Glycine max
ctcgagcgaaaaaacttcaactccttactcaacaattcttgtttgtgtaatttatatcttgttagtatatccttgttgtgggttttgtgtggattttcttctgctaatacttgtttgtttttcactcttagagagatagaaattggttgtgaaaaacagaagcactttgtttctaagtaaaaggaatcttcagctgccatgtttcatcgctggagcaattctcatcaacaggatcagggaagcagcgagcttt

SEQ ID NO: 115498 - DNA, 249 bp, Glycine max
gcttcataaacactccatagttggcagcctggcagcacaagaatcccatattctcattctcttaagccagtgattagaagccagtttttctgtgcttcatactacaccttcacaaaccccaagaagaatggaacggggaagaagaagcagctcttttggccctatgtcctcaactgtcccttgttttctcctccttttgttctgtctctcaggatctgctgaggcctacaagaattatacagttggaga

SEQ ID NO: 115499 - DNA, 241 bp, Glycine max
cggttacagaccccatgtcttctccaccactctctcccatctcattgctaccaactcttcccacttcatcattccttttatacccatcagagcaaggttgaaagacaagttcgaggagtttttcaagtgtgagtatgagctcttcattgaattcactggtttaatccgttggagtagaggagcaagcattggatggcatagtgatgataacaggccctacctcacacaacgccacttctca

SEQ ID NO: 115500 - DNA, 252 bp, Glycine max
aaatgggtcgttttctgaatctcgtttctctgctgttacttatggcttccgttactgttccatttaggaagaggagaccatgctgatataaatttgaagggcattcaggctgataatcacagaaatgttgttcctccatcttcccgctcgtcttcaaactatgttgctctccgtttctgtgacttcaatttggactccaatggacatgggtttcatgtgaaagcaagcaacagtcgttacatggttgtttat

SEQ ID NO: 115501 - DNA, 251 bp, Glycine max
gttggtctcaaaccaggaaaatcatgttcaagtttgaaaatgccttctccttcaataaatggatccccaccacgagtgtgtaaattaatttacagaactaaaaatgcattataattaattactgcatgttatagataccacatgcagaaaaaagtatgtatggaggtttttagaaattattgttatttgatatcttaaaatcaaattctgcaataggaaaaaaaatcagacaacattgagtttatccagct

SEQ ID NO: 115502 - DNA, 248 bp, Glycine max
gctggctatgatgttactatcatctatatgtttctggacatactatatttatttatttgtttgcatagtgttattgttatttttatgttaaaatgttattaattaaactgtttctgttggtgattttttccccgtgtaaacttctgaaaagggattcgaacaggtgagatttccttggagaccagagaagtttatatgtttcgccaaaattttagtaggggtcctctcaaaatattgacgaggtggct

SEQ ID NO: 115503 - DNA, 103 bp, Glycine max
gtgaagggtcgtgtctactgtgacccttgccgtgctggttattgcaaacctcagactaccacctaacattagctggtagctgcgaattaatgttagcacatgc

SEQ ID NO: 115504 - DNA, 126 bp, Glycine max
tgggatagtggcatgttggagaatgttttctcaatgtcatttctctactgttaataaaagttcggaagtgctagattgctaagaaagcaggtgagccttttataggccagcaaatccttcacagta

SEQ ID NO: 115505 - DNA, 271 bp, Glycine max
atcgaacatgctgtatcaatatatcaaccagttgatcggccaagtacttctgcgatttcacctcttcaagttaatgatcacatggatattgaacacattaatccttctgaacccccctcaagtacatttctggccttcagagataaattaccaatgaatcttcacatgtatttacccttatatagagttgcattgagaggtgattgggagaaggccaatgagttcctaaatttgcatcctggtgcggagaatgccaggacttcaagagggt

SEQ ID NO: 115506 - DNA, 271 bp, Glycine max
cacatgttactactccactttgacctttgttgtatgtctagtgtctacccttcaaataccaagcacacatgggtttctctggctgcattaaatttgcaatttaagacagtctggttctggtatagtccttggactaataaaagctaacaggtggtaggaagcaaggtaaagaaagaaagaacatcagccagaaaaatattaactggctcagaaatgctgattttagtaataaaaagtaaaaacaaacatggagaaaggaaaataggagctg

SEQ ID NO: 115507 - DNA, 266 bp, Glycine max
agagaaggaaagcgagagtcggaagagatttggcgcgagttgaaaaccctaattgggaaggttgcaggatagcaatgcggtgttgtcgcatttcaacgacttctctcagcactgctttgctgagatttccggcgacatcgctagaaacacgcgtgttttgaggtctgtcaagtccgaccttgattatatctttcagaagctcagcaaaatgtgtctactatttgaatgtttccctctagtcaaaggcaccaaaggttcctaggcaa

SEQ ID NO: 115508 - DNA, 268 bp, Glycine max
ggtccagacaacggccaccgacaccttcactcgggttcgtggaaaacaacttttgaaaacgagatgttaacgaggagacagaggagatgagttcagtaccaatcaatcgtttgaaatcttttacttttccatttttgttcgttcacctaaatttgttaagtgggtatcattcggatagacttattgaatctggatcttgtttccgaggatgaaggtgaagatttggatgaagatatatctatcgaggagggttagtctatggatgagg

SEQ ID NO: 115509 - DNA, 266 bp, Glycine max
aaagaagtgtctccttttgaggctgcgtttctctaaagtaattggtgcaattctgcagaaggaacctgagtgggatcaatcctccagtcttggccagtttagcaacaagtctgggggtatcttagcatttatttccaaagagggacagaggggtcatccaaagccaggtgataaaaccattggttccaatacatattcgtctgcacgccctgcgccagtgcacacacctaagcttcaaagatttgttgacacaaccgaaatgatga

SEQ ID NO: 115510 - DNA, 267 bp, Glycine max
caacttagtgggggtggtggtaattctgcatcgtttggttcaaagtcgtcatgtaaatcagacagcaaacaagatagtactggtactagtactaatactacttgtacccccaccaccactgcctcgtcatgttctactactatgtatgaatgtgatggaacggtgcaagtggaccatggggacatggattggacattcttgaacgtatttgattattccaatgaggtgtttcctgttgttggatccgactatgatctccataattct

SEQ ID NO: 115511 - DNA, 271 bp, Glycine max
ggatggctgtggcttttcagtgtttatcatgtgctcggagtgaccccttcctcaccgcaagccaatccctcactcttcctttccaacgcaaaccacttttttgctctgtccctctttcctctcgcgctcgcaatctctcttcttcaattgtcgccgcttcttccaaaaagaaaaacaagaaaaaaaagtctcatgatcatgttacgaaggacgatgacgatggcgtggacgcgtttgagctgctcttcaagcaactcgaggaagatctcaa

SEQ ID NO: 115512 - DNA, 263 bp, Glycine max
gtaacggcgacgtccgtgaagtcaatcgcaagtactacgatcgcgacgtctgtcagctctacctcgtcggtctctgccctcacgaactcttccagttaacgaaaatggatatgggcccctgccctaaggtccactccttgcagctccggaaagaatatcaggaggcgaaacaaaggggaccgataattatgaccgggagttggagccattacaaggtggtatatagagtgagtgtgacaggaaaataggggagcatgtacatg

SEQ ID NO: 115513 - DNA, 266 bp, Glycine max
ggggtttctctcgctaaccaagaaggaactagggttttacagaatacaagctctctctctctctctctctctattttgctgctagtaatgttgatgatgtgttcttccatgatgtgcccagacatcaatttctggggttcatgggttgctgttgtctgaaaaaatttcatccttactgctgtttccactagcatctatctgatagcagcaacagaagtgtcctggatgcatttttcttgggaaaagctgtagctgaagctctaaat

SEQ ID NO: 115514 - DNA, 262 bp, Glycine max
cttggtgtaaattttggggatgtttgcactgatgtaccacggaactccaccttcaagagtggtgacttggtgacagcttcgttctggtctgcatgtcctcgtaacgaccttatgactgaaggcacctttgcactggtggaatttctccaagaaaaggatgcttggactcctgcttatgatgatgatgatttctgcctgcgctataagtggtcaaggccttccaaactgagttctaggagcaaagcaaccttggaatggagga

SEQ ID NO: 115515 - DNA, 256 bp, Glycine max
tctcgagccgaatcggctcgagggaacatcttgataaaatctcttaccttttcctccagaaatttacatacaattgtcaatactgtgtagaatgtcaccctagtttgggtttgcattccttgcactctgatttacttggataactttggttttggctttattgatcaatatcccatggagtcaaagcattggccctgtatgcagttcaaaccagaagatggggttctggacattgctagaaggttttctgctcttt

SEQ ID NO: 115516 - DNA, 259 bp, Glycine max
ggcgaagagaagttgatgaagattagaatgaccataaactaagggggacaaatacaaccaactgatgttggagatgccataagcttggacataacaagaggacttgcaaaaattcccccattcatccaaaaccagcaaagactcgtgttgaaggtgagggagcacccagtgaagaacaacaaagtcatgttcaagttggaccaaatggaacacaagtgcaaactgaagcgaacaccaaaggtgataatggaacacatga

SEQ ID NO: 115517 - DNA, 253 bp, Glycine max
acgaagtgcatttcaaccaagtcaagcagtgtcaagctcagctgggattgttgcttcctctcctgaaagcagtttagactcgcctgacattcacccgtttcgtgtgtctacgaccgaagccgaagaagcaagaaggcttgctggtctttctgctgccgccactgcgaacctgaagggaatccctctgtcaaggtcaactagtgatggatatgaggcctctggtggggaggatagtgacagggttcccaccagg

SEQ ID NO: 115518 - DNA, 252 bp, Glycine max
cggatgcgacctgggcataggttgacatggatacaatgctggggaatacccttaattgcctgggacatgcagcaaataaagaagattgtggcgggtattggagaaatggttgaggttgatgacaatgtagagggacagtggaagatggacatggcaaggatcttacttaaaacaccatggaaaccactcatccaacataccgttagggtgaacatccagggggagatatttcaggtgcatataacggaggaa

SEQ ID NO: 115519 - DNA, 252 bp, Glycine max
atgccatcaatagaagcagtctttattccaaagcactccattattttttgaaaaagtttttttgttatctttagagtagatattttgtggtttggatatcaaacagatgcttttaagcatgccagctgtgcagctgaattttgaggtgtctgattaaactgggtgtgactcgtctaattgaattaatggaagcctgccactttaagacttaagacagccagtcatgctgttgaattcagtggttcacattgc

SEQ ID NO: 115520 - DNA, 251 bp, Glycine max
aaatacttgtttgtatttaaggtatatgattcttgcatttgacttgattacacatgatggaataaggcaaagttgttaccaatatcaaccagcctcatcaataaaagacatgttatatggatcatgaaattttatcatgctagaatggcggaggactggctgagtttgcggttgctaaggagagtgtcactgcatcaagaccatcagaaacctcagcatctgaatgtgctgccctacctgtagcaggtctg

SEQ ID NO: 115521 - DNA, 169 bp, Glycine max
atggatcgtgtgggtcgatgaacctctaaccctaactttcagttgccttcaggcaaactttggagttaagaaatggagagggacatgatatcgactttgccgaaaacaatacttcatgacattctgtcaaggatgccagaggaagatgctgttaggacaagtgttttgt

SEQ ID NO: 115522 - DNA, 271 bp, Glycine max
aaaatcatgatgatgtattgggcctgtaaagcccatttgagcgaactttctgaatttgacggaaataataataaaataaaataaaagcgaaccccgagcatgtattgtagattgtagatccatccgcatccgctagctcgcgcaggcaccagcaggtgaggttattgtgatttgaatggagggaagtggaggtggcggtgcttcaccgtctgcaccgttgaagcaatacttacaggtggattgggactttcgtcattgcatccatctacgt

SEQ ID NO: 115523 - DNA, 274 bp, Glycine max
taatggatagaagtcatgctgatgagataggcatcgtcagcacccgaaggcaaagtttcatatattctgttgaaattgtagttcgatggtgatgacatattttatttagattcaaatattaatgtattttattggcaaccgattgtaaactatttttgtcttgatggtgttccacatgttttgtattcacaactgctatttattatttagaaaactttctgatttgacacatttaattcatctatagtatatgatgggggaaccatatttgttc

SEQ ID NO: 115524 - DNA, 159 bp, Glycine max
tctccgacacggcctcgaccagcgccgcccgtggtcggagtcgggtgacgtccggttctcgagccgagtattctccgagccctcggtcctgaatcttatcggcatatagggttatattgattttctaacttttacctggcttgctcgctctattcggaa

SEQ ID NO: 115525 - DNA, 215 bp, Glycine max
gttatagttcctgcataagcttgcatttttggaaaattgtagggttcagctcttaaacaagaggatgcctgtgctttgggtgctcaattttctactctagttttcgaaggggttttgtggaagaatcaatggtggaccggtggtgatgagtttaacacaccagttataaaaattaatcagtgaattaggtaccgggaaattcccggcatttctgg

SEQ ID NO: 115526 - DNA, 276 bp, Glycine max
gtttgcttctcaacccctttcttaaatcccagaaggcagaaacatcacacacagagcatcgtcatcaattcatcatatcatagctaaaaaaaaacaggagagagaaagtgaaaaaataccttttttttagagagagaaagagaaggtagaactgtgaatgtgcaccacagctttttgatcctgttcctaaaatagctaggtgataagttttggtgtactgaatattggggtgtcaaagtttcttgtgaaagattctgaaggcaatcgaagtaaatg

SEQ ID NO: 115527 - DNA, 261 bp, Glycine max
cggctcgagcttgtgatttcagcattgaagctgctttctacctttggtggacctgaatgcctcctatggcctagcaggcgaagctgggaaagaaagacgtttctttgcagtcccggaggaccctttttctggtgttccgtattctgctgctaatggactttgcatccgggacttggctttcgcagatttagttggcaccatgtaacttggaatagatggagagcttgcaaggctttcgtcatctccaactatcgatccagc

SEQ ID NO: 115528 - DNA, 275 bp, Glycine max
attgtgaagtctcgccctgagtaatattttttgttgattgattttgagttaattggtgcaccttagtcatgggatatttttccataaatgatgataatgtttgaggtaaaactcttgcagtttaatcagtgtttggatgtttaaacatgtgaatgtttacttgctaaataaaatgttacttaagattgactaatgcaaaaaaaaaaaaaagattaaaaaaaaaaaaataagaaacatgaaaacgaaagtgaagttcaaaaaaaggaggggggggg

SEQ ID NO: 115529 - DNA, 240 bp, Glycine max
gcttaagcggaggatagcccttgcagcggttgagaagatttgtctgagtgaactaagtgataactttcttgcagttataattccgacagagtatgatttacttatagctagcgctagaaagaatgaaatcgtcgctgcctttgttgaagcttatgaactcgaggtggtttcttccaataggtttgagtataatgcagcatctgacttggttaaggaaattgaatttgaggaagctgaagg

SEQ ID NO: 115530 - DNA, 233 bp, Glycine max
ggctaatactagagtatgcaaaatacggcagagattactttggttaattctcaaacgactttttttttaattccaatattagttttatattactgtaattgtttgtgtgggggaggttttatttgttctgtacttttgttttaactttttattattattactgtgtttttttttcttcttctgattttcctataataagagaaatgttgggaatttatgaggctgtggagctt

SEQ ID NO: 115531 - DNA, 233 bp, Glycine max
gttttacaccctccctacccttctggggatttaaaatttcaatcacaaaatcccagagaatctgactgtcaaacttctaattcaagccagaaaacaacttctgtaggacagcaaatgaatatggtatcctacccaactcgaccactattgaaagtattcatgtatgacttgcctcctgaatttcacttcgggttattgggttggaagagaagtgtgaatcaaacatggcctga

SEQ ID NO: 115532 - DNA, 153 bp, Glycine max
cgctgcttgtgtactataaccaaattggagcaacacctttttgtatctgatcctagaatcacaagcctagctacccattttctaccttctcatgatcttgtaagttaaagctttcttctttttgtctttttcttgatacccttttccacacaa

SEQ ID NO: 115533 - DNA, 233 bp, Glycine max
gttgaggagttgaggaggttaaagaagaggagggctactaaaaagaggattttgaaagagaatgaaccgaaacccgatccttattggttgagaacgttttttagttttgctcctgaggaggctgctaaactacctgattatggccattttgggattttgagtcctttgcttgctaatgtttgtcttaatgagttggatcactggatggaggaaaagattgttgagtttttcag

SEQ ID NO: 115534 - DNA, 230 bp, Glycine max
gtggcatccaaactaacatgtacatcatgatactcttctctgttcatttccatgcttcacccttcatccttcatttttcacctactaccacaaggtccttaaaccccactcccattccataaagcaagccacttcattgaactccaagtttctctctatctttatccatgcttgttccgaattcatggattgatttgacaaatgtcttcaactacaagatactcacccca

SEQ ID NO: 115535 - DNA, 264 bp, Glycine max
ctcgagccgcaaactccaccaacagactctctcactgtccttctctctctccctttccagagtctctgctaagttccaagcatctgcttttcacctcaaacaatcggtggtaagggcgacatgggggtcacgtgggaagcgtgcaatgagtattccctttacacgggagctcttgggaccgcatagctgcttttcaaggcctaccaagtaaccaaggacgggaatgatcataatttgtgctcagagattgttaaggcttgttat

SEQ ID NO: 115536 - DNA, 265 bp, Glycine max
gttcttgcacgtttagctaaactggagactgtcaatgctgatcttgcaagatcctttgcagctgtgcagtggagccttgaagttgaggttaagcaagtatcagaactcagacagcaaatcagttcgaaagagttgtttcacgaagaactcagaaggcgaatgaagaatcctcgtcaaactggagcttcacaaaatcaagtaagttatataattttttgctgaaactggttcattgatactttggtttcttttgtttagtattccg

SEQ ID NO: 115537 - DNA, 260 bp, Glycine max
aaaaatattcaacctgagcaactggaaatacaagaaacagagagaagagagagtgcattaggcaaagatatagagcaactacctaccctccttgaggagtatcagttaaggaataaatctgaaaaaagccctgcaacttatatatctagtcatggctttactgagaatagccattttcctgaaggaaaagaggcacttagtggtgcaatggaggagttaaaagatggttacatttctgagaatgggaaactggttcttga

SEQ ID NO: 115538 - DNA, 260 bp, Glycine max
ggaactttgactctttgaatagtgatggtatgcaagttggtggtgattctagttttcttgttaaattacggtttgaaacagaggtttaactgggtaggtgtgatagaaacaggggagggagagaaagaaattcagtatgcatttgctatataaattcaatgctttttttaatttgttcaaaaggtactaggtatattccaaaattttgttaccaaaaataattggtttatagtctgttttttttttttttttgaaaaggg

SEQ ID NO: 115539 - DNA, 258 bp, Glycine max
accctcttcatcttgttctatctgtgacgagcatcatggcctcaagagcagtgttattgttggctatgtgtgtgcttccggcgatggttgtggccattcgcccagcaaagaaccctttttgcgtgaagggtcgtgtctactgtgacccttgccgtgctggttttgagacctcagctaccacctacattgctggtaattgctaacccttttctctatattgtttaaaaaaatactagtgtttatgttatacggtaccaa

SEQ ID NO: 115540 - DNA, 155 bp, Glycine max
ctccaagccaaccctatccttttcctcatcaagtttctatttaggctaagatggaaaagagctcattgacaagaaccaccattaatccttgagcagctccgcaaaaagtgcccattggcagctgctcattttgtgcccaggtgacaatctagtgg

SEQ ID NO: 115541 - DNA, 255 bp, Glycine max
ggaatttccattctgagacacacagaagcacagaaagaaactccttttaatttttcaatttagaagtcaagatctgacatcatagaaaaatgaccatggatgtcgttcagctgcagaggaagctgcgcgaacaccaagccgctatgtttcaacagttgtaatatttggtggcgattttggatgggttgttttttgttggcggggagaagggttttttggatgatcagttcagccagcttcagaaactgcaagatg

SEQ ID NO: 115542 - DNA, 256 bp, Glycine max
ctcgagccggcactctccctccaacctctctcttcggccccagaatcaccctcctacgcgccaactcatcgtcccgttccctccccaacacaagttgcagtgccacgtcagcaaccgggtcgtctagactcgccaccccgtaagtttctctcttcgccaacacatgtaatgggtgtctcgtatttcattctgggtcgtatcggactgcttaaagtgtccacctgattcctctcttccacttattgcttttgcagga

SEQ ID NO: 115543 - DNA, 257 bp, Glycine max
gtgaataaatggttcctaattttctcattgcaaggttagctgtatcactcacacaccacagaagtacccatatccaattgggttctctgctgcaacacaaacgcaatgctttccttcttttattcaattcattcacttcaggaacctcttctgattctgaatcagatggaaaccaccaaaaaggtggcacctttactgtgtcttacctcatcaactcatgtggggtgtccccaacactggccaggacaatctccaat

SEQ ID NO: 115544 - DNA, 132 bp, Glycine max
ggggaaggaactagtgcaaagtcacttcaaggccaggttaagtcacctggaaatcaataaactagcctaaggattttcacgcttactccaaaagcccataaatcctgttgggcgaattttcggaccccccca

SEQ ID NO: 115545 - DNA, 255 bp, Glycine max
ggagattcagatggcatgcgatcacatcattaccttttcacactttgttcccaggcaggaactttgtccagagaagaggatgttgttctatcccaagcttccaaaaataattggttcagactctcttgaagatcgaataaggtctattcatggtgctgagggaaggaaggatgcgtcgtcttgtcatgtgtttggtcatactcacttctgttgggatgctgttgttgatggtatcaggtatgtacaggcaccctt

SEQ ID NO: 115546 - DNA, 274 bp, Glycine max
gttggggtcggaggaggagaggatggtgtggagttggaggagtgcctttatgggtggggaatccgaggagtggtgtcgttgtatgtcgtgggtggcttctttcagagcttcaaggacttgcaccaactgtggggctttctcactctcttccatccaagccaaggcaaaaccaaaaacactttcttccacgggccattttatactctctttttatttctgacaaaaaatcttttacaattttttttttaaattagttatctaaattcgtaaaaga

SEQ ID NO: 115547 - DNA, 283 bp, Glycine max
tagctcacgttctcagactctggaagatggacatgatcgctgtcgtgacagaactggagcgtcaagaacagatttgtctcgctctcatgaggtttaatgtgatgcagaagcaagatttgtacaatccggatgcatacctctataaggacttgatcattgcagtggcaatggcttgtataatgcatggagtattgcaattgttggaaagcatgagagaggaaaatctgttccccgattcccagacttatactgaagttataaggggcttcttgaactatggatc

SEQ ID NO: 115548 - DNA, 260 bp, Glycine max
ccaatggtaaacatggcgatcttggtgtagctataatgccataatacagtttagctagttggtatggtgagcagtgaagtaggtagacctgagatttgggtgaagaatggcatcaaacctgatgcaaatgagtctaaacagaagaagatagcaaatgggtaagatgaggattcatccgaatctgaatctgatgatgattcaagtgaagatcaggtatttatataatctcgaaagcggcttttatgatggactgttgatga

SEQ ID NO: 115549 - DNA, 117 bp, Glycine max
ggtatggtgataatgttatgcggcagtgaatagttccacctgattgcagacttggtggttcacttggtggtcacaggaggacaatagttgttgcctaaatcttgcacgatcctatgt

SEQ ID NO: 115550 - DNA, 292 bp, Glycine max
atggacgatcgcttcgcggatttgaaccctaagacgtgcgtggttttaggcggcagaggattcctcggaagatcgttggtgctcaggctgttgaaactcagtaactggatcgtccgagtcgccgattccgctcagtctctccaactccaccactccgagtctctcctcgaacaagctctctcttcttctcgcgcttcttacttccacgtcgaccttctcgataaacggagcattgtcaaagttctacaaggttcctctgttgtcatttatatggatgttgccggcgtcgatg

SEQ ID NO: 115551 - DNA, 296 bp, Glycine max
ctggaataagagacctggtcaatacaaccggcatgacgatccaataccaaggcctcaagggaatcgctctttcaatagtcagggacccatgccgggaggtggaaggaactatgggccttcacaaaattatccaccccaacagaactatcagtcaagcatcccagaattatccgccccaacagaactatgcccaagcatcgcagaattatccaccccaacagaattatggccaagcatcgcagaattatccaccccaacagaattatggccaagcatcacagaattatccaccccaa

SEQ ID NO: 115552 - DNA, 277 bp, Glycine max
tgcagcatcaaatgtgctaattagaaaattgattgctgcgggtggaatgttccatcatcagagttcaagaatagccatggcctcacacatgaaaatgcatagtattggaggcagtcctggaacatcattcagaatctcagacactcagatatttttgtacacaggagttgagaatgcatcagatgcaagcactgatcagggaagtgcaggaatgagttcaacttcatcagaacacactgcatatgactcagcagcagagaacagaccctcaacaaca

SEQ ID NO: 115553 - DNA, 277 bp, Glycine max
tgttggatctagtcgtctaggtgtgaaagatagtgatgtatatcattgggaggattcgctcagcgtctgcttgtccagtgcgaggcggtgttatcagttgatttcttcgcccccaatactgaggttggtgtggacaatctgtttgagatgatggaccgcatggttgctcacaacccctcttttttcgacatcacttgtgggcgctggaggtacaacggctgatcttacattgggaatggccatctatatgcatgacattgtctgtgtggaggccatt

SEQ ID NO: 115554 - DNA, 174 bp, Glycine max
catcgagccgaatcggctcgagggtggcggtcgatttggtggaagttatggttgtggtcgattgacctggaaggttgtggttgccactttggtggaagaggtggcggtggaaggggtcttggaaatatacccaaccttgctgcggaacgcacagggaagaagaccaaatttgct

SEQ ID NO: 115555 - DNA, 271 bp, Glycine max
ccggttcgagagaaaggacattgatagcatcatctcatgcatcactaggtcatttgacgaagtggaaagcatggctatctcaaggactagcggaaagagccgagaaatggatgatcttccggtttaagtcacagtgtcagctgggatccatccattcagcacttctaaatgcagacagccccatacacattgcagtacttagattgcagatagtatacaagagttttcgcacgagaagacagctagcagattgtgcaattcttgttgaaca

SEQ ID NO: 115556 - DNA, 148 bp, Glycine max
ctggatcaggaaatctgatctgcatgctaattactcaataaacaaaatgtatgtttattcacatgtatgtagtactgtaaatgctaatcctgaccttttagcttttatagattgaaggaaagaggtactaggctactagtttgatgag

SEQ ID NO: 115557 - DNA, 285 bp, Glycine max
  unsure (1)..(285): unsure at all n locations
actcgagccaattcggctcgagggcaaataattgcattcacgtctaaaattgataatctgcacaaaagacctgctttcctttacagataacagnagaagatctggagctccactgtgaaaaaattagcgaagaacatgcacaaagccttgtaatggtagagaatgaaaagaatgacaaatcaagcagaactatggatcttaagagatcactggaagagcgagaagattcatatcagaagttgaatgaagaatataaacaaattgatagtttgtttaaggaatgca

SEQ ID NO: 115558 - DNA, 268 bp, Glycine max
attcgcttcagtcactcacgagagagaaagatgaacaagaacaaagctggtgcatcgttggattccttgatgtcttccttcaacgctcgcataacgcagcttcaggagctcgtcattgcgcgaaacatgtaccctgcgagcggcgtcgaggatctgtcagcggtggacgcggcggtgagcgcgatggagcttcaggtgaaggctatcaaggaccgcctgcgcgaagaggcactagccattcccaaaaccaagaaactgattgatgcat

SEQ ID NO: 115559 - DNA, 268 bp, Glycine max
gatatttgctaaaagcccatgtatatactaatgcatttcataagggtttaaaagttaaattcaaaccagccaatgcatcttaaaatgatagtggagccacagatggttctgatactttaccaatgtcagattcgggtttgttggatcctgttgctgttaagtcagttccgcccaggagaagaacttccaataacattagaattttgaaggataataatgtgttatgttcatctgaaggggttactggtgagaatgggatgccggtgga

SEQ ID NO: 115560 - DNA, 277 bp, Glycine max
ctgtcactataaaccaagtcagatacgcctctcagcatttctttccctgcttttctgcttaggtaaatgcagaaacaattcaatggggaattgttggagtcttcaatcaggttctccaggcgatcatcccaactccaatactgcccccaacctcaacaatcaatcagggaatattcaattttctgctggattaagcaacacaagattaacacagaatggcaattctacttctcttgggcgtacagccactctggaggtatcagcagcaggttctttg

SEQ ID NO: 115561 - DNA, 271 bp, Glycine max
accctcaccaacaccatcccattcagcctcacagcaacaaagatatcaacatttttgcctaaaagtccattacactgaacctccatatcgtaaccctggccgttcctacccgccacaaatcgaaatatcagatcacgggtctgataatatgtggagagttaggcaggatcatgtgtcatctagttatctttctcaacgaaaccataacaacaactataacacaattgttgggggatccagacaatctggtttttatgatagaaataatcat

SEQ ID NO: 115562 - DNA, 268 bp, Glycine max
cgcgccatggctggcatcaccacctcctccttcaaactctctcactttccgactcacttctcttcttctgattccaaactcttcggattatacctctccaatccctattccctcaaattcgacccttcttctctctccactacctctctctcctacgtcaaagcccgctactacggcggcggcggcggccctccccgctcccccaacgactcccgcttccgctagttctccgattccgacgacgacgataaagctctcgacctctcca

SEQ ID NO: 115563 - DNA, 259 bp, Glycine max
atagtgtcaaacatttgggtagcgttgaccgatgaattgacctttgcggtttcatgcatataataagaagacattgttttctttggtcttaattttctatcaatcgttactgtattgtcctgttaactgtggtgttgagtagtcctgaaacaataacatgatgcttcgattcctagtgctgtttcttacgttggcaagttgtagggagagttacaaaatggcgaaagcagagtataactatacggttgtgtctgcgaga

SEQ ID NO: 115564 - DNA, 134 bp, Glycine max
gcaggtctccagttgatcgtcttcttctctgcatccatcatatccatagtttctcgcgatacgtgacaatttttcaattgtttggtgtgtagagggagcaatgtcagatgctaaggttcaggatttgaagaagg

SEQ ID NO: 115565 - DNA, 135 bp, Glycine max
atttatcactgagcttccttccttgttctctcgataaccactctctcatcaatcaaaggtactcattgtgggaatacaatgtcctccacttcctttagcaatggatggaaatatgatgttttcctcaacttcaga

SEQ ID NO: 115566 - DNA, 128 bp, Glycine max
caaaggaatcgtagatccgtttgcgctgtgtagtttttattcttggtcagagaagagaagcgatggggttttgggaatcttttctcaattggcttcgcagcctctttttcaagcaggaaatggaatta

SEQ ID NO: 115567 - DNA, 142 bp, Glycine max
  unsure (1)..(142): unsure at all n locations
atctcgtaattcttctctatatttatacactgcggtatcaaatattcaatccatcattgtcctccacattccctctacncnnnacacnaacantatcaccancatattcacctctnacaacaacaaataacatcttttaatt

SEQ ID NO: 115568 - DNA, 137 bp, Glycine max
gtgcgcacttcccccattaagtcccgtgaatgtgacgcatagaatatttgcttgctttattatatgtatgtacctcaagtaaagctctgtgcaattccaataattattatacagttcctcactatggcagaggaatc

SEQ ID NO: 115569 - DNA, 143 bp, Glycine max
gcttgataatatcaattttagtttctgcccctgcagtttgtttaaaaaaattcgaagtaacccaacaaaattaggagtaatttgataacctagaaaaacaagactgaattgcagaaacaaaaaacctacatatatgtctccag

SEQ ID NO: 115570 - DNA, 246 bp, Glycine max
ggatgagatgaagacagagatggaatagttgacgaggttggattagggctagaatgaaggggagctgtaaatgaagtgggttctgttgtttggttggggtggatgaattcagggagagattttgagtttgtcccaccaagctgtcataagaggaactggatccactacttgaatgagatacaccttgttgctcaaaaaactgttgtctttgattatactttgaaggtgggggcggaatgatgccag

SEQ ID NO: 115571 - DNA, 243 bp, Glycine max
actcgagccgattccttcgtcctcgacaacttgaacctctttctttgactccgccatcatcctcattcagagcgttggagttgaaagagaaggttcagcctctgatcccatggccggtgtctccctttacaaacctaaatcctacgaattccctctcttatgctcttcaagacggcaaaattcgcctcgaaatcgatttccccaggcctttgcccagtaacatttcttcttataagggatctt

SEQ ID NO: 115572 - DNA, 137 bp, Glycine max
attagtgagttggtcattgacacactcttttctgaaggttgtattgccagagggatctaaagatattacaggatctgttccacttcctgtgaaacagtcgcaggagacaaagctttcccacttggctatagttggta

SEQ ID NO: 115573 - DNA, 126 bp, Glycine max
ggaaaggggtggtgagaatggggggctggaatgataagctgaacgatgacattgacgcgctgctcggggcggatgacaagcttgaggatttcgctgatgatcaggagactaaggcgaccaaggaag

SEQ ID NO: 115574 - DNA, 221 bp, Glycine max
cattggatctaacatcacaaaaataggaggtatttgcctttagaagggtatctctactggtggtagctgaccatgcattttcaacttctgaatttgtggttgagggttcatgtcttagacccttcccattaggctcaggtatttccacgtcaattcatcagggggctaaggaccatcatgcaatccccatgtctttggggtggcggcatgtaactgacttt

SEQ ID NO: 115575 - DNA, 216 bp, Glycine max
aaaacatctaaattaaaagatgcaagcatggagggaatccaatagtcagtgaccagagactagaggcatggtgcttgatctgtactgccaatggctgctatagtactgaatctacgtgtaccctagcaggtactgaaatgcttgctatgtgagcttcaacatgtttgaagatattgctacaggcaacacaagctggttcttttatgtcatcccatg

SEQ ID NO: 115576 - DNA, 275 bp, Glycine max
attaattggtgtactatataagcttattttttatatcttaaagtataccatgttgccacatttttataagcaaatttacacttatatatttgaaggaattttctagacgcaagcaaaatttggtgagaaaaaagaggggatgtaaattcttcatatacgttatctttcttttgtatccatacataatcatgatctgagttgtaaaacaggaatgtttctttgtgcttgaaaattgagacaatgcacgggttgcattaaatagaaggtaaacaagc

SEQ ID NO: 115577 - DNA, 268 bp, Glycine max
  unsure (1)..(268): unsure at all n locations
attctggaggtgtttatattgtaacaggtgcacaactccttagcaaagggagctggccaaggaatgtgcttcatctgcggcttctctttgctcatacacctaattgcagtatccggaagtcagagtggactgctgcaccagaggcttcagaaaatcatcttttctcacaaatttgagcacaacattttcgttcacacagcacggtaacactggtcctccanaacaggctccaactgtacttaactctggagtttatccagaatggtca

SEQ ID NO: 115578 - DNA, 131 bp, Glycine max
tgtaaatattacctacagttatatctgtaggtaatatttactgcagactctccaaatccaagcaaattaatgttgtaatcaataacacccccaccccccttgcgcccatgtaataataagcttggtcaatt

SEQ ID NO: 115579 - DNA, 149 bp, Glycine max
atctaactcaatatagcatagatgttattttcttcccccgaattattgtattttcataattaaaactcataaatgaaatttgctaatgaataataatataaatgaatgagagaagagcctatgcactccaatctcaaatatatatatat

SEQ ID NO: 115580 - DNA, 255 bp, Glycine max
agagagcgttcttgttgcaattcttttaatgctcatgaagattacatttcagacatgactttcgtttctgatgcaatgaaactgttggctacaagtggagatgggacactgtctgtttgcaatcttcgaagaaataaagtgcaagctcagtctgaatttctgaagatgagctattgtctgtggttctaatgaagaatggtaggaaagttgtatgcggatcacaaactgagatcattctattgtattcatggggat

SEQ ID NO: 115581 - DNA, 266 bp, Glycine max
atttacaataactcacgcaccttgttcaaccaactaagattcgagtcatccgcacatgtcggctgccttcggacatcactggtgaatagttcaggaatttcatttcatggatttagtagtaaaggattctgttggattttgggcctcgttgaagttgagcgtttggaggaacgtcatgtttaggtaaacacttttagagcaagacaacctacacgtttgaaaaattgtaaatatctaggattagtatttgtgcataatttttggct

SEQ ID NO: 115582 - DNA, 180 bp, Glycine max
gttgggaggtatcattaatctagacacattggatctatctagcaataattgttcagggaatgtgccagcatctgttggttttcttgagcatctcctgaccctgaatttgagtcataaccaccttgatggttacttgcctgctgatgttgggaatctcagtagcatcagattcttgatttg

SEQ ID NO: 115583 - DNA, 256 bp, Glycine max
agctaggcctttactctcccccttctgccagaatggaggtagacaaataatgagcaggattggcatgactgcctgctctctttcttctgcagctgaagcttcagattttgaatgtgatgcgatccatgatgatgtcaaagcagcagagaaagataatgcactttgcttgctgtctcgcagcttgctagcgagtttagcaaggaatctatgttatctctgcagaagatttttggtgtacgccgtgctcatgtgatat

SEQ ID NO: 115584 - DNA, 265 bp, Glycine max
gagaaagaggattcgccatttcaattctctctctctctctttcaattcgcaggcattgccattttacttaatcactgaccacggccttcaaaaaggagaggttcagtttgtgtcatgtgcatacagcaatcggattgtttggatcagaagtcaattgaggtgtagatggaacttgaagcaagtaatcaacccaagcaagagcgttcaaggacaagatggacagcatcccttgacaagatatttgcagacttggttgtcaagcaga

SEQ ID NO: 115585 - DNA, 276 bp, Glycine max
  unsure (1)..(276): unsure at all n locations
gaaaagtggatgtatttactgttttgcaagcataaaaacatttaacactttctttgtttaatattgaaaattattagatggatttaaaattatattttcatttgactatattctaaggtagttatactttttgttataaattttggtccctactctctgtaccttgatcgccactgcctgaacttgaaacactagctagaatatgtatagcacttggtgttataatataccactggcattataatnttttggtccttcctcttccctaatcaacct

SEQ ID NO: 115586 - DNA, 268 bp, Glycine max
atagaaggttacctttgactggggagagcttggattctaggggcctttatatatatgacgatggcttgcaattcattatatggtttggtagactgatttcacctgatatagctaagaacttacttcggtcggaccttgcagaagagttagcaaaggattgtatattcaagaaagaggagagagggaaagagagtacaagggttaattatttttgtcattttaggcagttctgtattctaaaattttcatttttatctcatcttgttca

SEQ ID NO: 115587 - DNA, 187 bp, Glycine max
cttttacgctcactcaccaacacttttttcactattttcattacgcacgtatattatatggctcctgaacttgtgcccaccgttgcgttcacgaaaccttcaacccttccaaggagtgcctacgtaacattcctcgacggaaccgctgactacgtgaaaatgagtcgttggtattgccaaagggttg

SEQ ID NO: 115588 - DNA, 234 bp, Glycine max
cttttattttttttttgaaaacaaaaataacttcattcaacaatacaattgtttgaaaaagttaacctttaaagcgattcacacggaaataccccaattattttatgggacctacataatatccccgccccaactactggggtttaaattttatttccactgcaaaacctaaaaagggggcatcctttaaacattgaatttggaaacggccccagtatatatcggcaggggatc

SEQ ID NO: 115589 - DNA, 172 bp, Glycine max
tgttgattgatacaacaagtaagtctattattgtgattgaggacattgattgttctcttgatcttactgggaagagggtggtaaaaaggggaaggaaagagtgaggatgcgaagatcctgtgagagactgacaagagagttatatgagagtagtgcttgtcggttgtgaatg

SEQ ID NO: 115590 - DNA, 110 bp, Glycine max
cggaataggctcgagccacttcgagtttcactactcgattggaggatctctacctcacgatcccggttagatactagacgcatcatgtcacaatctgatcattcctctgc

SEQ ID NO: 115591 - DNA, 105 bp, Glycine max
atgaagctcaatacactcgtttcgagcctctccctatacgatatagccggaaactctcggcgtcagcgccaatatcagcaacataaaccacagatctagggtagt

SEQ ID NO: 115592 - DNA, 181 bp, Glycine max
tgttacctcacctcagctactcacacattcttcgccgactctctcaaaagctctaccatcacgccacaacctgcgccagtatgcgtgccacacgcaaccaagcaagcacaacacacttgaacctcataagtggagcagcatcctgccccaggatactcttcgaagcacctgtcgttataca

SEQ ID NO: 115593 - DNA, 180 bp, Glycine max
agacacagtgccattgccggatttaattgcaccactcctctctctctctctcacctcctatacaactaatcttgtaagattttctctctctctaccctgtctttgcccaaaatttggtgggtgcaatcatcacacttactttgccattaaaatccctccaaaaaccgtttcccctttcca

SEQ ID NO: 115594 - DNA, 171 bp, Glycine max
tgtctccataaatgaaatgagtgagggagagaacagaaaattacaaggaaatgactcagtgcagtgactctgaaaacaatcatcataacatcatagtggagggacgaaagatagcttaatcagaacttgtcctactcgtggtcaccatatcaaatgccaagacagggtggt

SEQ ID NO: 115595 - DNA, 239 bp, Glycine max
  unsure (1)..(239): unsure at all n locations
ctcgagccgaaaaattccactgcaccaccaccctccccatttgtacttttcttctcattctcattccactcccctgcattctccacacaatctagctttacnggcttctggggaaccgcataaggttaaactgttaaggcatggattacgtggatccaaaaaggaaaggccaattttgttgaaaaattttttcctgctgcagaatcagcggcattatgcatcatctggagcaagatccc

SEQ ID NO: 115596 - DNA, 99 bp, Glycine max
tgttagaaccacttcgctcttcggattccgccaccgccataacgccatagctgccggcgaacgatttctggggttgttattttcacctcaaagttccta

SEQ ID NO: 115597 - DNA, 208 bp, Glycine max
gtgggtgatggagctgttcatctgaaggaaaagaacggtgctgagttcctttctttgttggccccagataacattctcttgagttaactccagtgtgattacaatgatgtcaggagatcgctatatgtacagttctattccagtgtacaaatttaagaaagggaaggatgttaatgttatctctcctaattgtgtaattgtgagcctc

SEQ ID NO: 115598 - DNA, 284 bp, Glycine max
  unsure (1)..(284): unsure at all n locations
cagagcaatatgcacatgacttggcatttcatagcatttggtgtancagtcatgatgagactgaaagtgaatctgctcattagtcatagatatgaacatacaccaaactatctattacctataacaaggtacttccctaggttatggaactggttcatctcattggtgctgtcaattcttatgtgtgaagtttccttctttgaaccctagaagattctgatgtaggcactggatcacctgcaggatctagccctataatattgatatctcaaaattgaaagggc

SEQ ID NO: 115599 - DNA, 180 bp, Glycine max
ctcgctctcagttatgtctctaattaattaattctaacctgcattttgcatttggagttcatgtttagtactttttacgacatgtcgtttaaccgaatccgaatctcaactcgtgtagtgtttttttaacaacttgctttcgtttcgctgctacttactaattactaacagttgaagaat

SEQ ID NO: 115600 - DNA, 256 bp, Glycine max
gccgcccttttttttttttttaaatttaaacaaaattatcttattggccaaaaatgaattctggctaaaaactacttagggtattaaattgctaggttttaacatctaagtaatttgaggcaagggtagaaaaatatcctccccaattggaaaaccccggtcttaaaatcttatactcaaacctccggggaaaatcaattgcatttttaaaatgggccccccttgtcttcggtcggggggaacactttttgaaacc

SEQ ID NO: 115601 - DNA, 279 bp, Glycine max
aaagactcagactcagactcagtcaccatgttattcaccttttctctgtttctcactcatgggccctttacaatccttgcctatatcagtgagagtctctcgcctttatgccaagctttactttcaaatgccagcattgtgatactgtcaacagttagtgggggttctgacttctgagtagttcgtcaccttaaacagaacacatggctaattttgagaaagattaggtgccaattttctcagaagttcatcccaaaccatcaaatgaacctgttgata

SEQ ID NO: 115602 - DNA, 248 bp, Glycine max
  unsure (1)..(248): unsure at all n locations
atcaaccctccaatttgtttacaatatggaacagaccctctcctttgaatttgagcatgaatttgttcagtacacggcaagagtgaatctgttgatatgcatccactgagcatggatctactgggttgtattcaggactattctattggactatcagcaagctgagagagtcttagaatagcgatctcagtgagtcacaagtcatgccgganactgatgtgcagctcgatgcacacatcacgctcata

SEQ ID NO: 115603 - DNA, 230 bp, Glycine max
aatctccttaagtccagaacagtaagcttgataaaatggtgtgatcaagcttactgttctggacctgaggagatccaattctttattaagttccaagttagtttcagacatgcacaagcattgctctgcagcaactactttattagtttcagcttttgcgacctttgattttaactcttcagtcgatagttccatatcccatatagctgtgtatagcatgttctgctgtt

SEQ ID NO: 115604 - DNA, 204 bp, Glycine max
ctgtgctgaggtcctcaggcaatacgaggagttcgacaatgagaattaattacgtaattaatttcagtaatactgttattattaatctactttcgatttgggttttctaatgtctatttaattcaatcttgatgtggagtcttatccgaatttcaaatcatataagtatgagccgttataataaatagtcactgctaaggtgac

SEQ ID NO: 115605 - DNA, 208 bp, Glycine max
gaacattcttaacctcactttctaaggggatagggagaattgcaatttttagcggtcaaggcgggggaaagcaccagaaatcagctgctgagctaaggtcgatactacacagtgacactgcttgtgcagtgacaccagagacttacaatctcatcatggacacactgtctagcaataacttctctatcatcaacccatgaataagcta

SEQ ID NO: 115606 - DNA, 195 bp, Glycine max
ggccgcccttttttttgtttttaacctttaaatagcttcccaatttctatatttgctcaataaataggggacaaatggggcaactttattctgaattccttgaaactgccgaaatcctttaaaaaaattttaatagtccgggcaaatccttacaggtgcaatttggacccccattttggctggaatttccggctt

SEQ ID NO: 115607 - DNA, 281 bp, Glycine max
aaaaaatatgggttaacatttatgaaaatgtgaaggaagtggattgaatagagaattccaaaacttattgcattacaaaacattaaaaaatagacttctggtattttataacatctttggtgttcaagtcatagatcttgcaaatgtttacgatagcatgttgactaagaccttctagacggacaagattatctagttctttggagggcttcaacacccaacagggttcatggaaaactctgaaacctcggaatttgcagtctgcatcaacttaacatcgg

SEQ ID NO: 115608 - DNA, 262 bp, Glycine max
gcctttggttggtctgtagtagatatacaaggtaatatatcatttctgagcattgtgcagccgtggttggtcatttaacaagttttgtagcagtcgatgtcaatattcaaattattggtttgtctccataattgtaatgttaagtcgaaaatagatatgatttagtgaatgaattaagttttgaccccccccattaccccgcccatcaatcccttagcgtcttcagccatggatatcgatgcatcaatatgtacacaattcg

SEQ ID NO: 115609 - DNA, 261 bp, Glycine max
agctaaagcaccaaagaaagcttgtgaggagcttgaaaaagaagtctctttggtccagaactttggaagagatagttgaaaagcttgtagatattgttacctatatacatcaagcaatttatgagttcgctggaaatcatggtatgagattgtatcccttatgaatcaaaaaccaatgctgtacataatatagctgtagcatatgcaactcttcatgcactaggagtccaggaattaacttagggttggaagtctgaactt

SEQ ID NO: 115610 - DNA, 146 bp, Glycine max
ggaaaacccaccgcaaccttcgcggtttgcgattccgcttccggttccaccgtgctcctcttacacacgtattcaactattcaattttctccttaacgtttaccgttttcttggaacacgttcccaattttttcccccaattgtga

SEQ ID NO: 115611 - DNA, 257 bp, Glycine max
ccccccacaactactgggagagaaaaaaggaaggaaattttgctattttctgagactcttgattttattttatttttatattttttctgctctgaagaagaaagatggaaatgatggcataccagtttactcggttaccttactcggattccctcaaactgctcgaggctgatatacagcatgcaaatgctttggctgctgcaattcccagagccaagggtgggactcttctccaaatgaaattggtttacaaccac

SEQ ID NO: 115612 - DNA, 253 bp, Glycine max
ctcgagccgctctctttgctgcattttccatttgtaaagttgccaaggatgcagctggagttccaggccaaagttcagtgatcagttcctaacatgttgtattttaaactgccatcggataggtgagaatgattggattatcgctggcagttcttggcatatttgcaatcatattagttggaagcttgcaaatagatgacattataatgcggcggttctttgtgggattcttgagctgtgcctctctcatttc

SEQ ID NO: 115613 - DNA, 285 bp, Glycine max
gttggttttgtttcaactattgttggacttgtttgttacggtctcagctcctccttcaactacctatttggagagtggagcttgttgaagatctttctttacagtggttttagtctcttcatctgccttgggaatctgtttgcaaaggtatgtcgaccctcaacctcaacgagtctccgattcaaagctcattcatcattcttggttttgaccatcacatctgtgtattcctattttgctgacaaagctatgaatggaaaaccagatgtatatagcttgatttca

SEQ ID NO: 115614 - DNA, 280 bp, Glycine max
ggacaaccatgtcctagggctcgacacaacgtttccctacacaatctccctttatctttcagctcattagattttaacctcagtttctatttcaactgcagttcttacccttcatctattcagcacatagggtgcatgaaacatgataagtatcagtcttacgtgtttaagaccggggatgaagctgaaagtaatggctttgattggcttaggcactgtgaggagcatgttgtggtgacagtgaagaaggatgagattgaaattagtggtttgatcactg

SEQ ID NO: 115615 - DNA, 277 bp, Glycine max
gcccatcctcctccatctttctctctttcagacacaaaccatactcaaaaggccctagctatgattttttttttaaacaattaagttgccctagctatctatgtagcttgttagctaatagctatagctttcttgttcaaataacctagacaagaattgcgttaggttgcattgtcgataagactataatttataccactatgcttcatgtgatgggtcaataatttattaagatctatataatacttcttccttgcttatttgtgtttgagtgttg

SEQ ID NO: 115616 - DNA, 265 bp, Glycine max
gcctagggtttaagcgacgagagcgtaaatatcccagatcctccctttgaatgcgaagccagccacttctgatttcgatttcgtgccgattattatagttaacaatggctttccaacacgaaaatcggtcgaatattgacccgaatcctattggggtggagacagcatggcttcccagcacgataatgggtcggaaattgacccgaactctactggggtggagacatcaatgtcttccttcacgaaaacggtcggaattgatcag

SEQ ID NO: 115617 - DNA, 279 bp, Glycine max
ctattttgcagattctttggaaggagtgccaccctatcccttatacaagcgcttttcttcagctctgttgaagtgtatggattctgaaacattttgtaggacaggcgccaatttagccatgaccgatgaatttgaagattcttccatgcagcagaagcgtaatgagtggcacagattgattgtggagaaggggtttgaaatagagaatattttgaagagtgtttcctttgaattccatgtccaagagcctttcttttcacagctaaatgatggcctaaa

SEQ ID NO: 115618 - DNA, 278 bp, Glycine max
aggagatgaactgatgcaaacggaacgcggagtccaagcctcaaacaatgaggcagatttaaggagatagttgagagagtgagagagaagaactcggtgttgtgcgagcaagatagccatggggaaatctacctcctgcttcaaactaatcacttgcggtggcgatgcggcggagcaggatgattaccaccaagtctctgagatcaaggaatctcacgataaacgtggctggagtctccgaaagaaatctgcaaggcatcgtgtgcttagcaatactg

SEQ ID NO: 115619 - DNA, 277 bp, Glycine max
gagcgtccgcccttttttttttttttaaataaaacacattggctacccatttataaccgcaatttcacatcaaagcgtcacaaagtttttaacaagactttacatgctaaaaagccctatagctagaatggggtttaccattcagtgatgaagcggataaattccccccatattgaaggggctacaaaaacctaaccatgacataaccctactactccctgtggctatatgagaggaaatttcatctacttaatcacttggggcagccacttgtttt

SEQ ID NO: 115620 - DNA, 277 bp, Glycine max
cttgagcgcatgcttgagaagtcagtcagcccagcaaaagcagatgaattcactctcaagaagaacatcttatatatctttgcttgatcttcctgtgatagaagagccatttctttcagttcagcggggagatatgatttgtaattcctgagtttctaggtgttatcaccctagttttcttgatgaccgtttcctataaatatgcactctttcacgcgcatttttgcactgatcatgtactgagtcgtaaaactaaagcaaaagtagcatctgagaa

SEQ ID NO: 115621 - DNA, 213 bp, Glycine max
  unsure (1)..(213): unsure at all n locations
aaattatctgccatttgaatttcactatcaaagagatgcntcctccaaatagggaggataggtggagctggaagcatgatcatagtggatactactcaacaaaaagcggatatgacttgatatgggaagcacagatgggagctaatcagaatttggactgtggggacatttggaagctctaaataccaagtaaatcactggtttttgcttgga

SEQ ID NO: 115622 - DNA, 251 bp, Glycine max
atttatcagttatatttttgagctgcctagttctctattctttcctaatcctaaacctataattcttttaacagttcttgttctagcattgtcctgacatttgattgctgtaattggtcctcattgctcatggttctatgttattctctgttcttatccagactacatgatatccatgtccaccttctcatatcatccaaatagttataagcgataaaaactggtggcattactttttttccggaatgttt

SEQ ID NO: 115623 - DNA, 259 bp, Glycine max
gcaggagcataaccatgagctgcaggaatggctgaggcagctcaaaagtgtcttctatgacgccgaagatgtgttggatgaattcgaatgccaaacactgcgaaagcaactgctcaaagctcatggtaccatcaaagacgaggtaagccacttcttctcaagttctaatccacttgtttttcgttccaagatggctcaacaaatcaaagatgtcagcaagaggctagacaaggttgcagctgataggcataagtttggt

SEQ ID NO: 115624 - DNA, 280 bp, Glycine max
gttgccttttacactggtcccacaggtatgaatctaaaccgaaaaagtgtatcaattttggagaatttatcaccatgaaaatttcctttaatagctaatatttaatttggaacataatataattaatatttgattgttgtatcaattttgaagtttataaacatcaagagttaggactattttcacattattgcaccaatcgaatgttctagactattggttttcgagacaaaccatgtgctacttgtgatcttggaaatagtaaaatcaaagggttaaa

SEQ ID NO: 115625 - DNA, 269 bp, Glycine max
  unsure (1)..(269): unsure at all n locations
ctcgagccgctcgagccgattcggctcgagcaaattaatcctgaaaaatgaaaaattcaaattnagtctataatgtacaaaaagtgngacatnttggacntgtagttaaatttgtgaaatcattttgcacattacaaaatgatttcacaaatttaacgacaagaccaatctgtcacactttttgtacattagagactaaatttgtgaaatcattttgtaatgtgcaaaaataccaatttgtcactgcctcatactttgagggatcaaag

SEQ ID NO: 115626 - DNA, 256 bp, Glycine max
acacgcacaacctccgacaaatcatactaacagtgcctcatcatcagggcttcgcagaacacagatcaaaccatctctagagagacaaactcgcagtcgcagacatgtcttccttcgatgccttcgccgaagacttgaacgtcgactctacttccagtcgttagcacgatgatgacgaggacaaattctcaggctacggcggctactcctccttcacgggaggattctccgcagtcggatatatcgccgtcgatca

SEQ ID NO: 115627 - DNA, 231 bp, Glycine max
caggaaagctaaaagaagatggctgagggaactcaccatcagagaatgagatgaaggagaagaacgtcatttggttctgtaatgctactgtagatgtatttatggagataggatcttatgaacagtgttgttaaatagccactatagtggttctacggtgccattgtgttgtggaattcgttggttcgcaatcatgactttgtttgctatggcggcatctcaatacatgga

SEQ ID NO: 115628 - DNA, 225 bp, Glycine max
gccgcccttttttttttttttggaaaaaatttaatcaataatcatttagatgaggctttatagaatgtgtataaacatatcctgataaaaacctcttaagacgtagaaaaggtagaaaataacctaaaattgtacaacttttaatctggttagggaaacttgtataatgctgaacacggggttttgggttgtggcattggcaggggaatacctttaagggttttt

SEQ ID NO: 115629 - DNA, 226 bp, Glycine max
cgtggcaccaatgagagcctcaattaccttatcccacatcgacaatctaatccaattttcccaatcatcctcttccaatatcctcgttgccacataacacacattgaaactaaactccaacaagttcctaccatagtctgaggaaagtgagtgagagaaagagatcgcagacacagagcagaatggcttctacccaatgtttcttgaacaacaatgctcttacaac

SEQ ID NO: 115630 - DNA, 186 bp, Glycine max
gtgacggagttgcaaattggcgtgaaggtgtagcctttaacctattactttgattaagatccattgcatcttttatagtttaggttaaaggtttcgattaattaacatttgccgatctaaaaaaaaaggtttcgaataatttgtacggaaagaggagtttgcataaagtgtttttaattaaaattt

SEQ ID NO: 115631 - DNA, 168 bp, Glycine max
cggaagctactcagacccagagacatcgcttcgtgctctctcaatggccaccgcaccggcccccgctccggctccggctccggctccggtgaagtcgcaggctctgcacaactttgccctcccccacttgaaatcgggcgccagcggcaagaccaacccctcaacgcc

SEQ ID NO: 115632 - DNA, 187 bp, Glycine max
ctaataacgtctggcccggtcgggagccggcggtcgggtcagctggagcaacccactgcggcggcgccgacggcggggggaaagatggtgtatggttcggcggtgacgagattgagcgaggaggtgaaggtggggtttagggtttcgagggctgtggtgtgggttttcatggtggtggtggcaatga

SEQ ID NO: 115633 - DNA, 274 bp, Glycine max
tcgagcctcgtttttttttttgaattataaaattgtaatttaataatatcgctggcccctgcaaaaaatgccatcttctgataaatacatctcccacacaatacacaattaactctcaagcactcttatcaggaccaacataacaaaccccattgggaataggggtggaaatagcttttttatttcccctagatataatgttaaataataagaccccgacctataaaatccacgggctacatccgtgagcaataataataatttaggtatatcc

SEQ ID NO: 115634 - DNA, 111 bp, Glycine max
cttctggattctgattggtagtgaacactaggaatctaagggaattggacttgcaggagagtgaagtggaggaccttagtgggcactggctaagccattttcctgattcca

SEQ ID NO: 115635 - DNA, 272 bp, Glycine max
catgcttccgatctccttcctcatctcctccgatcatccttggtcatctcttccgatcatccttcgtcatttttttcttcttcctttgttagcatcacagaaaagttcaataaggcaacaaatttgagatatgaatataagcaattcagaaataggtgggattctttgaaaaaggaatggcaattatgggctaagcttattgggaaggacacaggtcttggctgggatggggagaagaaaaccattgcagctagtgatgaatggtgggaagc

SEQ ID NO: 115636 - DNA, 270 bp, Glycine max
tctcgagccgaatcggctcgacggctcgagtcttgaggcattccgcagagctttaacaactatggagcaggtgggttgatgaccaacataaatccatccaagaccacggtcttcttcagaggctattctgcatcccacttcagtggtggacaatggaattcaggtggtcaatgtgatagtgaaactgatccaattgacaacgagaagtacctaaccgagtatccagataagatgaaggttttggagaaggtgctaaagaatatgaaaacc

SEQ ID NO: 115637 - DNA, 243 bp, Glycine max
ccgctgtgcgctgataatctcattcactacacctcacagcgctactttctctctctcactttaggtcgtgagtctcatctcgattctcagatatgtggtgatctgcttagtgtgaataggtggggaggggtcaccaggattaggagcaccgcggggatggtcaagacgacggaaagtctgaattctctaagagggtcacgagtttctttcgtgattttggtgagaattttggggaggtttttg

SEQ ID NO: 115638 - DNA, 263 bp, Glycine max
gaagatttggagcaacttgttcgtgtctcaaaaactgttagagaagcggtaagttctggggtaatattcagcactgtggtccatttttgtttcaaattcgatttggttgttctgaatttttgtttcaagttcgattgattgttctgattttggaagtgttgggttttgctattgcaggctgattttccggagaaacctttttggggtaagcctcccaaagaagagatttttttccccctcaaaccgttttataagaggggggg

SEQ ID NO: 115639 - DNA, 161 bp, Glycine max
  unsure (1)..(161): unsure at all n locations
gccccaccaccaccatgtccatagatctacgcacttatgccnatacgggnaacccgctccgatcccccaaccgggtcgaccctttntcgcccggctccgcgctcgagaccctcaagacccgaatcttcggagcggcgaaggtttcctgagggtcgggggtt

SEQ ID NO: 115640 - DNA, 213 bp, Glycine max
  unsure (1)..(213): unsure at all n locations
agcctccgccgttgggcattaccgccattgaagctcattcaagctttttttcatcgtcctcaaaattagattctntgtaaaactccgttttaactttgacgcaaccaaactctcgtccaattaagaagaaaaaacgaaaggcatgttcgttggactgttggtggggactgagatagatacgaaggctgctggctgctgcacaagctcaatcct

SEQ ID NO: 115641 - DNA, 153 bp, Glycine max
cattaacatagagaataaggatgccgctcaagtttgctggacgagtcactgtcggttcccttctcctatgtgacgctatgtctctcggtcacatcactggggccgaggatccctacaggttcttcagctggaacgtcacttatggttacattt

SEQ ID NO: 115642 - DNA, 182 bp, Glycine max
ctcgagccggtttgccaataatctgaataaggcgcatgttgattacttttattggctacttgctggaatcacaatgctgcaaagaattgggactggaatatctatatccatatttaccatagtatttgcagcccttgttgagatgaaaagtttgaaaacagctcaagagtctggtgttgtag

SEQ ID NO: 115643 - DNA, 262 bp, Glycine max
ctttagctctctcttactagtttattagattctgcaatggcccttcgttgttctcaaaactcttgtggtcttttggccttatttttgtctcttcttgtcctagtagtttctcttcaatgccaagtagcttcttctgctgtgctgttaagcatgaaacataagcacaaccatgtgaacaatcagagaccaatggtccaaaaaaccaaccaaagcatttgttcattgtttgagggtgcttgggtccgtgatgaaactgaaggat

SEQ ID NO: 115644 - DNA, 227 bp, Glycine max
  unsure (1)..(227): unsure at all n locations
aagacatcaacaccccttatctctctctctgcccaattctggtgattattcccctttcttcctccttactccttttcttccaattgggtcatttatttcacagcaacgggtttttgtttaggcttnttttttgcctaattttgctgtcactcacagtctatgttatcatcgaatcccaagtttcttcgtcaaatttcgtatcttttgctagcttattcttcctcact

SEQ ID NO: 115645 - DNA, 277 bp, Glycine max
aaggctactaattttccaggtgataaattaggggacactgacacccaaatgattgatcaacttccgcaagtacaaacaatagcttcagaagaaatttcagctgaatgtgatagtgatcccactcgattggagttagttcgcctttacaacgggatgtgcaaggcagtggaggaagactccatggatttagttcaaacttctttggccagagaaccggcagagctcaatgtagtggaagaatttccttccagtagaaactctttgcgaagacattagc

SEQ ID NO: 115646 - DNA, 188 bp, Glycine max
tctcattcccccactaacctacctttaccatcacaaaatcctcaattccccttcctccactctttgtcctcttactgaagacaaacaacacacacaaagacacagaacaacaacgttcaaaaatgtcgacaaaccactacaccatggaccttcccgaaccaacactctggtggccacacccacaccac

SEQ ID NO: 115647 - DNA, 99 bp, Glycine max
gcggagagagagagcatggagtacatgtggggctaccagcccggagctctgacgcagaggacgccacagtggacgccgcgtcttggaagcgttccgccc

SEQ ID NO: 115648 - DNA, 269 bp, Glycine max
gggtcaccgtcatcggcttctggggttactaacaatggagcttcgggcattcatagcgtgcctttgagctcaaagtacttgaaggcagcgcatgagcttctagaagaggttgcgaatgtcaacaacgggattggcactgagttgaggaaaaagagtgggggacagaccagggtgattggagaatcatccgcagcaggaagtggagatggttcagttggtggggaagggaacgggaagcgtactcagagctatcaactgcagaaagacaa

SEQ ID NO: 115649 - DNA, 262 bp, Glycine max
gctgcccttgaaagcaaggtaagtaattggcacaagaaggaaactggatggcagaaaagggaagctgcattgagttttcaagttcagaagcttacagagggaagtgatcgccacaagaaagaagccggatggcagaagaaggaagctgcattgaatcttcaagttcagaagcttactgagagaaacacttatttggagatgctactagatatgcagagcaggcaattgatgttcaattttgaattgcagaaaacgtttgatc

SEQ ID NO: 115650 - DNA, 266 bp, Glycine max
actcgagccgattcggctcgaggaggaactcgagttcgtgatccaagacgagggccattttgcagatcctcctcgaaagagggccctgcgatgggactcttcgcggaggatctgagtcggaggtacttccatcaattgattttgtcgtcgagtactgccactcgcgcgacgtcttccagcgcgacctcaagccggagatctcctcctcgacgagaacggcgatttgagtgcggttaggcatcagaattcaaaacagacccgatggg

SEQ ID NO: 115651 - DNA, 259 bp, Glycine max
gcaatgcttgggttttgtgtttgaggttatgaggaaaaagatgaatagagtataattaagaggaagaggattgagagttaggacacataacaaaaaaaaaaagttagttttttctgtgccttttaaaatttccctctccgcgttcctgttctatcttcttttttcaattttttttatttcaaaaaataaggggaaatttttcttgctgaatttcacaggtgaaaaatggcgagctcagtggagaaggagggtggtgcga

SEQ ID NO: 115652 - DNA, 241 bp, Glycine max
atggacgagtcatggagaatgcgaatcggccaaacgccgagcctccctcgccggagatccatggaggagcgctcctccgccagaactcgcctctccatcttcgtcggtgccggcgctggcgaacaggcaaccctcgaccccgacgacttcgccgacttattaggcggcccgccgaggaacctcctagcgcacaaattctcgaggtcgaattcgttctacgacgagattttccggccgccgg

SEQ ID NO: 115653 - DNA, 133 bp, Glycine max
ctcgagccggcgagtagtcaccgagtcgtgccgtcaattaattgcggattggtacctgcacgcgaactacctgcgtctatactgactcgaaatatcgccttacgaaatcatggtgatatctgtgtcctatgtg

SEQ ID NO: 115654 - DNA, 275 bp, Glycine max
atttgcaaaaatgtgaaaatcaggtgtcaggtttggtcaatttactaataaaaatatttgctctaccaggtttatcaatcgattaacagtttttggttattattatgatcttattaccacccggatagactatttttggtttgataaagcattccttcattcaatttggatgctcacatagacgagtagtgttgcaaaaagaagacatgctcgtgtttatgtgcatccgcaggtatctgcattgcatgttttttggatgattatgcgtaacataa

SEQ ID NO: 115655 - DNA, 264 bp, Glycine max
tttcgaccgaatcggctcactagcatacatcatcctcataccataatccatcactcctaatccttccctatccttgaatttgctgcctcctcgcattcaattccacgctctggtggcattatcatcatggatctcggtaataacaacaataacggcgttgttgttgttgtcgtttgggtgcgaacggggacacgctctgaaggtgccgtttagagtaaacgacgtgctccccgtgctgccgcgcgagatctcgtggccggttct

SEQ ID NO: 115656 - DNA, 216 bp, Glycine max
ttcagctcgagccctaagccgcctccgccacccaaacatcgtcatgatcctccgttactgggcctcaggccctgaacgcctcctcgtctaacgagttcatcgaaaaggggaaaccttcaccaatggctccacgagcccggatttctctctcttcctatccccaacttccttggcccaaacgtgtcaacatcatccgtggcgtgggcccatgggttt

SEQ ID NO: 115657 - DNA, 168 bp, Glycine max
gtcgagccgttcacaaccaaaagtgcaaagttcagtctcgcaatctgagatttgcatcagtggttaccttctaccccaagaagttccatctcgatttcagtttccagatatgagcagcaataacataccagtgaaccgtggggaccttcaggtgcctcgggtgacgtc

SEQ ID NO: 115658 - DNA, 144 bp, Glycine max
ggtagttgcccttgttcatcaccaattccatttcggattctggttcacccgaccatcacaaatagatactcactatcgcaaaactaacaaactacgaacccagataagggaaaaaggttgttatctctgctaagtttccgtgtg

SEQ ID NO: 115659 - DNA, 192 bp, Glycine max
tcattggcacatattgtgcttagttgcagtgtttactatttgattgtcatctactcagctcggaatcagatcaagtgttagctgaaaagacagtattttagaaggaattttcagccatgtctagtgctacaaaagtgttggatcgaacattccagggagttggtcacaaagtagggactgaaatatggagga

SEQ ID NO: 115660 - DNA, 279 bp, Glycine max
gctaaattaagacagggcacaataccagctcttgactgctcaagtttttgtggtgcaagatagattatgcccgacattttatctcaatagtcacaagtccctttttcttccaccattgttctttggataaaatttgattgcagtttcttatgtgcttttagtattgttctccaatcaaaattagagtttgactatagatatattcaatgattctatcaatactagtctctttaggaatacatggaatttgtgatggggtggggttttgctacatcgcag

SEQ ID NO: 115661 - DNA, 258 bp, Glycine max
tgctcccactacctctactttcttcttcctcctctcttctctcaatccccacccacctcgctccttcttcagacacaaaccactctttaacaacccctcccttctcctgcgccctcctttgaggtctcctcgacacttaacccgcgccgacgatgacgacggcgacggcggcggccccgaccactacgagatggacgaggacgaacatggaggagctcgacaacaagaaggactttgacatcgagtacgaccccctcg

SEQ ID NO: 115662 - DNA, 265 bp, Glycine max
gtgaaggaagggctgttaacatccacatgttttgtgcccgcaagcctagtctgttgctctcaaccatgagggctttggataaccttggattagacattcagcaggctgttatcagctgcttcaatggatttgctatggatatttttcgagccgagcaatgcaaagaaggtcaggatgtccatccggagcaaatcaaagcagtactcttggattcagctggctacaatggcatgatgtaactagttttgaccagaaacaaactggt

SEQ ID NO: 115663 - DNA, 145 bp, Glycine max
ctgtcttttggtgaatgtgagggacaatcctctgctgttatcttgaagtttgaactcatgcatgcgcctataattgacactgggcctgagttactaggttcactggatacatatgctgcttcagtgcatgaatatgaaatccccc

SEQ ID NO: 115664 - DNA, 131 bp, Glycine max
gttctctagatgccccccccgctctcaagtctcaaccatgtcttccgggaccctagagaacgagaaacctcaagtggaagatgaacaggcccaagctgaagagaaccataccaagcaagagggtgattcgg

SEQ ID NO: 115665 - DNA, 156 bp, Glycine max
gttcgtattgtccgtgatatcccagaatggtttaccgataaatccgagctatttactagcataagacgggctgtaacaaacattcccacatatgcaccagcacaattttacatcgatcatgttctgccccgagtcaaggagaagaagagtgtggct

SEQ ID NO: 115666 - DNA, 197 bp, Glycine max
gtgacatccttcatatttgggacgtcattttaagtgatccagagggtccacagcctatgccaaatggctttgataggcctttgccagctattatgcccagtggaaggacctgagattcttgctgctgcccccaagatacggtgttggaaaaggagacacttctcagaatatgctgcgcaatgctaattctggttcgt

SEQ ID NO: 115667 - DNA, 269 bp, Glycine max
gggggataccagaaagcttttcttgctttccagaaaactcctgagaggaatattgtttcttggacttctatgattgcagggtatacgagaaatggaaatggagagctagcctccgccgttggatctccatcgcttcaacactggaacctcaccaatcgccacgtcaccgttctcaacgtctttgcctgcgcgacggcgatatgtgcaagtggctgttttgctccgcgattccgacgctcctggctttcaagaaagcagcggagtcgatg

SEQ ID NO: 115668 - DNA, 100 bp, Glycine max
gggttcataacttgctcgtaggctggagaggaacatcctcagggaatatccaaatttctcaaaaccactccgctaattgtcaacaacgtttccacacaac

SEQ ID NO: 115669 - DNA, 114 bp, Glycine max
gggctcgagcttagatatgcacactccaacaactccatcatcacttcctccctgttattatcatcgttagggttcacttctggtcacacacaagaagagatacccatgtcaggt

SEQ ID NO: 115670 - DNA, 273 bp, Glycine max
tgcagagtttcagttgctgaagcaacaatttaagttaatatccatcctgaaggatcaaatggtatatttggaagattgggctactttggatcggttgtactctagttcactttcaggagctactgaagccctaagggctagcactcttcgacttcctgttgttggtggggccaagacagagttgctaaatttgaaggacgcaattagctcagcacatggatgtgatgcaggcaatggcatcctccatatgcctattgtcaccaaaggttgggc

SEQ ID NO: 115671 - DNA, 206 bp, Glycine max
  unsure (1)..(206): unsure at all n locations
gaaagacttttgctgctgctgaaacgtaatcgatcttatatctacacactaccatagttactgatgcatctntcgcataccagtcacgtccactgcacccgatgttcacaccacatacaagcttgattcagctaaacctgacatctccattcaagaagaatacttcaaatgccactaatactcctcaggatactagcttacccaat

SEQ ID NO: 115672 - DNA, 271 bp, Glycine max
tgtcgagccgattcggctcgagaagaccaaagaaaaaaccaaaatcatcgtgtggtttttcaaggaccaaattcaaatcagtcataaaaagggggggtatggaaggaggagagagaggtgttaatcccaataattatgagctccaagtttcagtcgcaaacacgcctcaagccatccagtaaatgggttttgttcaatttgaagaaaaccaggttcttagcttcttggcaccctctgctcaatcccatcttctcagtctctcaatctctaa

SEQ ID NO: 115673 - DNA, 242 bp, Glycine max
ctggatctctcttctcttctttgatctccgttaccctttttgttttctcaacagagagagagagatagaatctttcgaagttcgtttgcatgtgctgtgtggtcagtcaccgatggaagcaccaacctgcgaaggtcactgccgaatacgattacctcatcaagccttctcttattggtgatagcggtgtgacaaacattcctctccctttgcggttttctgacggtaccatcacaaccagt

SEQ ID NO: 115674 - DNA, 259 bp, Glycine max
gtcgcccttttttttttttttttattttgggaaaatttattgagacccatttgtggaattggaacgtaaaaatcaactatttgaaacaaattgaaaaatatccctctcccagattttcaaacaaaggggggttttaaacaacgcgttttcccaccttgcccggtaaaacacccagggaaaggaaaattacaccccaaaaagggggggcatggacccgaggcaattcatttcggcgagccaccatcatttccccacccgg

SEQ ID NO: 115675 - DNA, 248 bp, Glycine max
tatcgagccgaatcggctcgagctcgaccgcaaaactcagaaccctagctatatccatggcacggggtggaacagaagcttcacgcagatttgggcaaacactgccagcaccgcgattgcacccagctcgattttcttcctttcacctgcgacggttgcccacaggtaattcattattcatcaccctttttagttcgcatagcatcataattagaacgccttataacttatgcacctaacaacttgta

SEQ ID NO: 115676 - DNA, 274 bp, Glycine max
gtttctggagcgtttgctgttggtacatggacactggtgttatcggcgtatatcaatgatgtaatcgctctatgcgtttttgatcaggatgtttctgccaaactttgcctaaagtatccttatctatatctagagggagtagaggatatcctcttcagctggccccggattcttggctggatgttgaatggagtccttagttctttagtgatcttcttcttgaccactaattctgtcttgaatcaagccttcagaagagatggcaaggtggtag

SEQ ID NO: 115677 - DNA, 101 bp, Glycine max
ctcgagcctaggacctagtagccttgtcagatgctgataagcttcgggagattggtggacatcaagatacacacttgaacgcaaatttcaaaactcatcga

SEQ ID NO: 115678 - DNA, 114 bp, Glycine max
gctttctctgccttatttattgattagcttttatacataattgcatgtctacattctcactgcaataatcgctataataaccattacaataaccgctataataaccactacaat

SEQ ID NO: 115679 - DNA, 278 bp, Glycine max
gcctctcgtgatcaacatggcttgatctcctcaaggtaatatatgcttttccttttctttttcttccctttatttagctcacttttttccgctaattataagctcatgtataattattccctgttgcaccctagaaactcctgtttcagtgaagaatctgtgtacttggctaattcgattgcttcttgttttgtcccaatttgggtgagagagaatgggtcaagagtttctccgttttgacatgtgaatgtcgtctgtccgtgtaaaaaaatatggac

SEQ ID NO: 115680 - DNA, 188 bp, Glycine max
gggatgccatgtttgtaagtgtagaaaattgaagtcgccctgggaaatggggaggaggcggatgctgataggtttattcttctttcattttagggtgttggatatatatgtattgtgtgaagatctttgttttatcaagaaacttgtacatttaataggtttaaatctcagtagtgttttcagcaaaa

SEQ ID NO: 115681 - DNA, 248 bp, Glycine max
tgccactacccttcaactacgaggatgaggaagataaggatgagtgatttggcaggaacagcaagcacagaacaacaagaatctccaccacaatattatttgtatcatctaactttgtaactacacttgttactctcgagtgataaattcgacttcttcactcagggcatatattccaaatgcatagtagttatatggccgaagaaatcgtttttatcaattttgaacttgtcctaaaccttggtcca

SEQ ID NO: 115682 - DNA, 271 bp, Glycine max
ctttcttattatcttctctgtttctacccccaattttttagtgagtactgtgagcttttcctgttctatccaattagttaaccataagtctataactacttaaaattgggttagaatttataaatctacgtaacttgaagaaactagtttatagatatgtaaattagatttagtttggatctataatgtaatgtgtatggaattgtgatgtcaattaatttgagctataactttgaggtatggtttagaaaggaaaaagtagtatgagttg

SEQ ID NO: 115683 - DNA, 150 bp, Glycine max
agctcgaagcgttctattcgtaccgcatggagcagcacactgcaacactcttcatgcaccgaggaagagtacctcgctctctgtctcatcatgcttcgtcacggcggcgccggcgaggtccccgccgccaagcatgctgtatccgacaac

SEQ ID NO: 115684 - DNA, 295 bp, Glycine max
taagattcacaaaatcttgttgtagagaggcgtgaagagggacctatggcacctgtggcacctgtgactatggatgcacttgagcttatctctaaatctcagggcctcaatcttagtagtctttttgagaagcaaatgggactaattaaaaaggtgaacacgatttacatgcacatgttcaccacatgcaaataatttcaaaaatagacaaagctgcacggacccctgggcttcgatgtaaagcagatcaactgtaagtttaaagattcaaggtgaaaagacaagaacggaaaag

SEQ ID NO: 115685 - DNA, 276 bp, Glycine max
gaatcaacttactcaaacatctcaacttgcatctattgattttattgccgatttttcagagcagccttctactgtaacctcagatgggaaggcactgggattatctgtccctaaaaacaaaggatgggcaacttttgatatgcctcagagcacctcatctgctgcacaagtggaaattccagccactgtaccctcaagtgctaaatctatagaagaaagatttgatccattttcaacctcacatgcacacgtgcaacaatggccatcttttgaaat

SEQ ID NO: 115686 - DNA, 277 bp, Glycine max
cttcactcaccaacaatcattgtcgctcttgtttttaatccattccctgctaactttttttatgttgattaatcactgaaacaatttcatccttttctaatttattttggtatactgatgcaattttatcagcaatcactcggtgtgtgttgtgtcaatgttttaaggaaaaggggtttattgtgatttattttttgttcagaaatgttctaccttcaggtctcacacccgagtgcggcaacactgttaaagttgaagaggcataccatagagttgg

SEQ ID NO: 115687 - DNA, 157 bp, Glycine max
gctcgagagaatggactgagtggatggcttggagagtttcaaatgacaagaatgccttcatatataagtggtcaatgatcccgtcccttatatggcatctcaaggaggtaacttggcatgtataaaacttgcctaggatgaccaagaagttgtccat

SEQ ID NO: 115688 - DNA, 277 bp, Glycine max
tcaaaattgattttagtccatattttaaaagaaatattttagtctttgtattttataattgatgaatttcgtcttcttcatgaaacctaacctagctgtggtagtatgatgagagacgaaattcactaattataaaaattacaaagactaatttttgatggaaattaaagaagttaaaacacattttaccctaataataatggatggatggagaattgggacacgaaccaataccctgcaagtagctagctaggacatgcatgtaccttatcacaca

SEQ ID NO: 115689 - DNA, 258 bp, Glycine max
gctttgtgctttggtcttaggatcaggggaaaaccgcatatagaaaagatactcactcgctacgacactgccaaggtccaaacagaggtttcttctactctcaatccatacactattctttcttctctccctaactgcaaaagataaatggagtggcctgcgtctacggacgaatacgaaaagctcataatacggatgagcactcccagggttgtcattgataattccgtttgctcctcagtaagctagtcaaggttg

SEQ ID NO: 115690 - DNA, 116 bp, Glycine max
tgtggattattatgttcatgactcatcttggagtccttctcacattgtgatggttctgcagcttaggttagacaacctgatggtgctacatcttccgaggggaccggccacacaac

SEQ ID NO: 115691 - DNA, 250 bp, Glycine max
ttaaacctcgaagatttagggtttcgcattgctacttcgcgttcgttcatctctctctcacggctcgtaatcttcggttgctttgtttttcgttccctcttttctttcctgaacccgagtccattccgtttagattcttctgtgtggaattgcgagctaatttggggcaaggccctttgtgtggaaattttttttaaaaaaaaatttggggtttaaaattgggctattgttgtgttggggtttgtggtgg

SEQ ID NO: 115692 - DNA, 269 bp, Glycine max
agataataataacaaaagtaaatataatttattcaaaccaagaggaacaggcaaatgagcaaagtaattttcatccccaaaacctaccaccacaagtccactcctcaagtcttctcataattcacaatgcttatgcctccttcaaattatttagtctttatttcagatccaccgtatgcctagcttctgcaattcgtttgttctttttgttttttttttccccacttaatgtgtacaattaattcttcatgttaatttgtcctatctca

SEQ ID NO: 115693 - DNA, 266 bp, Glycine max
  unsure (1)..(266): unsure at all n locations
attatantacaggcagtttgtagcagagatcacggagaaggtaaggaaaatggcagctgataggcagatcactttcaagatgtataaacggagaggagagagggacctgaaagaaaaggcaaaggaaaaaaaggatgggaggaagacgagggcgagacaacgccaatggggtggaggccgtcagaaattataattttcatcagtgaagcttgacttaaaatatgtagtaatctcagaggagtctgatttctggcaagaatttggtc

SEQ ID NO: 115694 - DNA, 264 bp, Glycine max
gctccacaggtctacgcttttcaaattgaagccttgctgaagctcttaagatatcaagaggcctataccatctacaataaaatgccaaaattttcaattgattggtgtaccaagatatttggcccagcttgtagcgcttacctattgatgataggctcaatgatttacttggcatctggcaggtttgaggaagctgtgacagcagctcagcaagcagttaaagttgatccaggcaatagagagctagatgcaatggtaaagaag

SEQ ID NO: 115695 - DNA, 126 bp, Glycine max
tcctcccactaatggtacggcaccaacgggagcgagcaaaccacagtcagcatctccggtatcattacacacttcaaagacagggaacgactatgatttttcctccttaacacaaggaatgtttgc

SEQ ID NO: 115696 - DNA, 233 bp, Glycine max
gtagcactagcattggcttgcttgtgtttccaaccaaagtctagaccatcaatgcaacaagtggctcaagaactctgtgcttcgaaactacccccacctctgcctttctataaaatttcaattgctcagttgatgactccagatatattattgtctttcatttgagtatgaacccggaattcttgctcccaacaactcaggaaagtaatattttggttaaaatatgttttagg

SEQ ID NO: 115697 - DNA, 167 bp, Glycine max
gttgttgttgccttgaatttgaaggatctctgccttggaggaactctgggtgctgagcttgtgaagattgtcaaaataaaatctattatgtagcggaataactctttttctgggatcatcgctgaaggatttgtagaattgtaagaatgtggaggttttggatttgg

SEQ ID NO: 115698 - DNA, 266 bp, Glycine max
acggatgttatgattctggagccagggaatcttttaatggtagttttgcgtcacttgtaaatgatcttggttcctgttcttcaggggagaacaaacggtgcaaaaaaccttgtgatgagaaaatcatccacgaggacttaggagcgatggaaagaaccttctttcctgttgatactcgtaaaaaaaaagactcggggatggtactgaatgagcctcgtgcatacgtggaccaatttcaagttggaattccaaatctagagcttggt

SEQ ID NO: 115699 - DNA, 273 bp, Glycine max
agaactcgagccgaatcggctcgagctcgcctttcttatgattctgatcttagggatcatgttattgttgacagaggtggtaatcaatcagatttacaggagaaaactgataatattgttaatgcttttattggacaacttgttcctgtgtcatctgaaatcagggagatatcaaattttgaaactggctctcaatctagtcttcatgattcagatgttttagcgggacaatcatctgctcttaaggataagatgcctgtacacacagatgct

SEQ ID NO: 115700 - DNA, 267 bp, Glycine max
agagcatgcaattcttggctttgttgtctacatagtcaatattaaggctggctttgcataatgatggatgagtcctgccactatataatttcgttggttcagaagcgttactgtctgtcgctggggctgcaatcgagtgtagaaatctcatagtgttggtattgtagcattcagcttcattttcgagatgttcttgagtttgacagtcgtctacacccttgttatgagagttgatcagcggaagatagtgttcattctgctgctttc

SEQ ID NO: 115701 - DNA, 267 bp, Glycine max
aaaaaatttgtccctgatttttatagtcaccaacaatttttgtcagacctaagccaagaaaacaggaagtcatttttcataaggaaatatactgtagaagaaacactacagtaatcattgatgtcaaaactcatgtctcaaatttctgagttcttggaggcttcaagctcttcatgatctatactcagacaagaatcatcaggttaaagtctttcagttaactgcaacctcagctgaaaggaaatttgaatgaagtacgtcctggcc

SEQ ID NO: 115702 - DNA, 279 bp, Glycine max
gtttattttctttgttcggttaatcaaatgtttctcttagaatatgtgtttgggttcaacttaatccaaaagagttagttcaaaggacgagaattactccacttatatattatatcttgactttatctttaaccgatgtgaaattttgagtttttctcaatatacttccttacgtccaatacttttgggtttggtacatgattaaactattagtgacccatttaataaatctataatagactttgatatcatcatacaatatgagttttactttaactc

SEQ ID NO: 115703 - DNA, 154 bp, Glycine max
ctcgagccgattagatctcaggcaaattattagcaatatcaactgctgaaagttgaagtgacgttttacggattcggatgttacgggctagcaacactttctcttctgcaagatattatcaattaattcaaagggcgtcccacactcccactga

SEQ ID NO: 115704 - DNA, 272 bp, Glycine max
ctggaatctattttcaagttaatcgagtaccccaagcagcaatatgattcgtataagcgtgaggaagaaaatagtcttaagtcattggaagaatttgctaagcaaaagtactttaatgaaaagcttgatgatcatctgacattagagcaatttttgaagaaggaatccacttgcattgaagatcaataccttttgtataaggatcataaaaggaaaaatatcaagacaatggagcaatattttatgcagagattgcgttccaatagagagca

SEQ ID NO: 115705 - DNA, 266 bp, Glycine max
tgttggtgatgttgccgggggagttgagttgctgagtttcgtagggtttgaactcagggaggagaatggagagacatgggcagttcatggagtttccctctgaggaacaaataaaattcattcagagagcaatagtgttgctggaatcacaacttgtacaacaaggacctcctaagagagacgatttgccgtctgcaacttctaccgagatgggtccaaaggcagaaacaaagccggttgacagccagtgaaagtctccttgctgt

SEQ ID NO: 115706 - DNA, 211 bp, Glycine max
caaatttttaattcagatttattaattaatgttatatggaattacatatacactaaaatcatagaaatagaaccttaccagttggcagcgttagaatgacattacatcgcaaacctctcctggaataaagatgagtaatgtccccaacatgggtaaagaacttttgggcatcaatgttttttcctgcaattttagccttaactaaggacag

SEQ ID NO: 115707 - DNA, 129 bp, Glycine max
  unsure (1)..(129): unsure at all n locations
ggagataagacagagagaagtgtcttaataaacgctcttctgtgaagaactggannggagggcnagcgggcttctctttcgtttcgatcttggatctgtggaaatgagagagtgcatgtcaatccggat

SEQ ID NO: 115708 - DNA, 272 bp, Glycine max
gctctttagaagggcacatgaacataaaagaaagagtagcaacaacttcaataatctccctcccaaaagggaagatatcagtggtaagattaggatggagtgatcttaagtttcttgactattatttgcttcttattagtcatattctagaaatggagaacataatagacttaagacttgttattatgcttattttggtttactaaatgaagagttttaatgcaaatatatttgtcttcattttcaaaacaaaatgctaaagggaaagaggt

SEQ ID NO: 115709 - DNA, 274 bp, Glycine max
ctactgatgctgagctggaagctgagctttccaagtatgggtctgtgaaggaggtgaagtttttcgatgagaaggccagtgggaaatcaaaggggtattgccaggttgagttttatttagcttttgctgcgactgcttgtaaggaagggatgaatgggcatgtttttaatgggagaccttgtgttgttgcatttgcatcgccttttacggttaagaaaatgggggaggctcagattttctggtctcagcagatgaaccatactgctgttcctca

SEQ ID NO: 115710 - DNA, 274 bp, Glycine max
agttgcacttaatagtatcttaggatagtctccactcatgaaattcagagttaaatatcaaatggtagaaaaagaaccgtgagaattttgatatatactagttgttggatgcatgcatctttgaggaacttaggattttgcctaagatagtgtgtgtggaaaaaagtggatgcttgatattttgatgcacgaaatctttaaccgtgtaataaaatgtaacatcagaaagggtagtacagcctatttaaaaaaatgaatgcttgacattttgatg

SEQ ID NO: 115711 - DNA, 259 bp, Glycine max
ggtaaatttctttctctctcattatgccctaatttgagaagattggtcccaaagtttattgcaatacttccacagaggttgattaaagctccaacaatccactcccccatgaattttctgatgtggcactgcaaaggagacaccacatgcagtagaagaaaattccaatggccagaaatatggtccttctattttcccttcaatttggattaaggccagccatagttgtttcctctccaaaattagccaaagaggtaat

SEQ ID NO: 115712 - DNA, 290 bp, Glycine max
tcggaatcaggctcgaatcgaccgctagagcggctcgaggaacatgaaacatctcaccgactaaagaggcacaaaacgagtgacatgccaaagaagaaacaggaaaaagatcaaagtaaaagccaccgtcataagtggcagaagcataaagtaaaagagctgggatctgtgacatgtttgggtgctagattgacttgcttcgatgttgtttcttggtggggtttgtcctggcaatgggagctttatatagaaacagcatgatgagaggagcagcagccctgtgcagcttt

SEQ ID NO: 115713 - DNA, 264 bp, Glycine max
ggagagtgtcttcgatgtgtgatttggatggataaatgagtacattgttatgtattcctagtccttgaatcatgatttgcaacatgaaaatgttgaagtgtgctttttccctttcgtatttgattaaaacttattcaataaagcagagctgctatcgtattgcactgcaaatgcacttgaagccagtaaagtaattaataggggagataatagtggtccttgttgctccaaagtgttttagtctgtataatccagaaacagcat

SEQ ID NO: 115714 - DNA, 265 bp, Glycine max
ggggagacgtggggtagagtgaccatgacgaaattagcgcagtggctttggggactagcgatcctgggctccacctgggtggccctgaccacgggagccttgggcctggagctgcccttgtcctgccaggaagtcctgtggccactgcccgcctacttgctggtgtccgccggctgctatgccctgggcactgtgggctatcgtgtggccacttttcatgactgcgaggacgccgcacgcgagctgcagagccagatacaggagg

SEQ ID NO: 115715 - DNA, 247 bp, Glycine max
aaaatctttaggaaaatgtgaactggaaaacgcttcggtcagttttagtgacatagcctgtgatgatgggtctggtgactattattgcggaccgtggtacccagttttaggaatgtggagaaaggaattctgttgattccgttgaggaatctgtagtgtatgcattcgttctgttaagagcaaatctaggagaagtgcttcagctgccaagacgccgtaggggagtgttttaaaggatcgtgtcgca

SEQ ID NO: 115716 - DNA, 282 bp, Glycine max
tgtgtgtatgtgctttggttgtaggaaaacttgaaaattccaaaatccttattttcctatttgagaggctggttcagcagggtgtgtgtgtgtgtgtgtgtgtgtgtgtgtatgaatggtatatttattacattattttgaaagagaattagtgtgttatgtggataatgttatatacagccaaagtggatgtctctatttggcaaggaaggtaggatttctgacactcaggccttaaccaataggttggaagacaagaccaattgaagagttaggaaatgt

SEQ ID NO: 115717 - DNA, 222 bp, Glycine max
ggcatcaggggcctttgttccactttctggagaggctaaggtgcaaagaggcttgggtgtatcaaaaatatcttgatacagtgtgggcatctgtcctgtccacacccaatactgtgtaaagtttggggtcccccagctgttggcatgtgtaggatgtagagcacatctccctcaccatagagtggctggacacctagtacagtgcctcgcctctgcgtcaga

SEQ ID NO: 115718 - DNA, 283 bp, Glycine max
ctctcccagcctctcccccacattgtccctgactctaggggcacatccagtctccatcgtgctgcagcagctggactgagggcagagcctgtaggtgcagaggccctggctcccgaggtccagccactctccctggggcctctggggtgagagcagcttccgataggacctgcccagatttctgcatgtgcacttttgtttactgaaagagagaaaggggggggtcacagcaacatgccctggactttctgccctgttccccaaccccactgaggcctgctgc

SEQ ID NO: 115719 - DNA, 277 bp, Glycine max
gtctgaaggtttgacgtcaataaagggatactgccacaatttttatactgctatttctaaagatgtcacttataaggaacttaaaaacctgttgaattctaaaaatattatgttatttgatgttagagagatatgggaaattctggagtatcaaaaaatccctgagtctatcaatgtaccattggatgaagtaggtgcagctctacagatgaatccaagagacttcagagagacgtgcactgcagtacaaccatccaaatctgacagctagtgtatt

SEQ ID NO: 115720 - DNA, 293 bp, Glycine max
caagaatttttcaggagtctgtgtataagacacaacaaactatatggaaagagacaagacatatggtacaaagacaatttattgcctgagctgaaacatataacatgtggctggctcttgttttgtaaaccaaatgattaatcttcacttgagaaagcagtttctaggaaatgtttaaataaaagagagtctacaccttaaagaaacctatggagcacaagatagataaatttctgcaggacagcctataaaattgtggtactttttgatgtttcagtaaacttgacattgtc

SEQ ID NO: 115721 - DNA, 294 bp, Glycine max
ttttgatgccaaggagcgggcagcagccaaagacaagtatcagctagcatcaggacagaacggtgtccaagtacctgtatcacagccgcctacgcccacctagtggccagtcccagagccgcatggcagacagcttaaatgacttcaggagagccctgggcctgtgctggctgctccttccctgccaccgctgctgcttctgactttgcctctgtcctgcctggtgtggagggctctgtctgttgctgaggaccaaggaggagaagagacctttgctgccccatcatgggggct

SEQ ID NO: 115722 - DNA, 270 bp, Glycine max
cagctctttccaggattcagttctaagctcagtgcctatgataaatatggagtgtaattcaaattcctcttagatatctatatcaggtgccctattgaagaccaacatcttgaggtcccatgtagtcatttcttgcccatgtgggaacacattactgtttggttgagtaccaggtgaagtgattggcctgcagttagggctgtgttgtgcaaaaatcacttgttttggggtgttatgaacacatttaggcgagaagatcacttttgggga

SEQ ID NO: 115723 - DNA, 286 bp, Glycine max
gtgaaaattaaaatgacgtaaagcatgataacttctcagttacagtacttggcacacataaatatttcagctcttccacacagctaatgaaatataaaggcatgaaaaaaggtacatcgactggactagctgaatcacttcttgaggcttccgtttaactgttggcaaataaaagagtcggctgacttgagggtaatcaactgtcctggtatttctaggactgaagggtttcctgggacatgagactttcattacgaaatatgggacagtcccagggacccaggat

SEQ ID NO: 115724 - DNA, 175 bp, Glycine max
gttcaccatgtatttttttttctcttaggacagactaattctgaaaataccgacagaaaagtagctctatgttctcacccggtttactgcgtgtgagcccttgggtccgatgcctcccccagcgctctgtggtcaccggtgtcagggccccctctggtctggcaaggcctggctg

SEQ ID NO: 115725 - DNA, 283 bp, Glycine max
aaaatgcagacatggtgtcacctggatttttttctgcccatgaatgttgccagtcagtacctgtcctccttgtttctctatttttggttatgaatgttggggttaccacctgcatttaggggaaaattgtgttctgtgctttcctggtatcttgttccgaggaactctagttctgtctttcaaccaagaaaatagatttgtggtgtttcttttattgaacttttaacagtctctttagtaaatacaggtagttgaataattgtttccagagctcaaccgatga

SEQ ID NO: 115726 - DNA, 280 bp, Glycine max
gttaagtttcatgggactgatattttatattacttgttcactcctttaaccttaatacttggaaaaggagatcatcctcctatatgccacattgtagactgtcttcatctttaatgactgaagacagtggggtctcaatgggaggtattgtagaagttaaatgtcctcagataccctacatacaggacagcatgattcctctctgatttgtttttaaactcagggtctcagtggaaggcatatcagcataggatgggctgtacagactattgctctcgtc

SEQ ID NO: 115727 - DNA, 223 bp, Glycine max
gcaaggggtgtgtgtgcagtgtgtgtgtgttgtatgttttaatgtattcatacactaatcatgggcctttttcttagtattcttacattcccgtgcatgtgactttccagttatgtaacttgctgttagaaaactttagattccctttgttcctgaagtacacagaagtggtgttcattttcagagtaggaactgatgtgcttttcagaatggctgaaaattt

SEQ ID NO: 115728 - DNA, 132 bp, Glycine max
gtctttatgttcatttggagagtcagggcgaaagacaggtgatgtagcacttctgtttttaataattattgcttaaaatacctattaatagttttgggccattaaaagggacttgaggaagctccccaggat

SEQ ID NO: 115729 - DNA, 129 bp, Glycine max
tggagtttcggaggggtctgccccgagacttcatggattacatgggggcccagcattcagattctaaggatccgcgaagaaccgctttcatggagaaggtgcgggtcttggttgcccgcctgggacact

SEQ ID NO: 115730 - DNA, 226 bp, Glycine max
gtcccgctactgcttacacaggccgggttcccacgcagaggggaggctgctccacccctagtctcctcccttgctcccagcagcggaagcgcctctgacccttggattgagtcccacgtgggggaggaggaggcaggcagcaccagcaggggtccaccaagagcccagaccagcccctctgccctcctaaccgggcctcgaagggtgtggcacaggctacgtgttg

SEQ ID NO: 115731 - DNA, 218 bp, Glycine max
agaagatagacaaggagcaattgggcaggtaggagaatccagacattattgtcctagaaacaaaggaagagggaagtcctaagaagggaggagaggtgaacatttttgacaatgacatacgctctggtggaataaaaaagggtaaaaaaccgatgatttgctatttgggagctttctaatgactttttgaagagcatcctttcaatattgtgatggaa

SEQ ID NO: 115732 - DNA, 223 bp, Glycine max
ctgcacccaaatcttctagtacttgagtaataagcatcaggcattggaagaggttttaaatttgcttttttgaggaaaagaactgggggtggattttggcatcgtagcatatcgattaaagaataatcaggacatcagatacattttaatacatagctggggccttatgttgtagatgaagcttgctgtttttagaaagttcctgggtttcacattcatttct

SEQ ID NO: 115733 - DNA, 112 bp, Glycine max
aaaagccagtgccccagcggaagcacagctcagagctggtctgccatggacatcctggtcccactcctgcagctgctggtgctgcttcttacactgcccctgcacctcatgg

SEQ ID NO: 115734 - DNA, 204 bp, Glycine max
tagatagtgtctatgaaggctgcccaagaacttgaccattagggaaacatggctgtttctgtggattaactagtcaagcccatacaggaagagtgaggtcagctcccaggtggggcaggatgtagtggacgcttggaagaatttgggacaacacacgaattgctaccatggtgagccagtgaaacttgaggaaggcaggactgg

SEQ ID NO: 115735 - DNA, 236 bp, Glycine max
gaagaagtggacaagaaaaatactctaatttagttcagtctgtcttgtcatccagaggcgtcgcccagaccccgggatcggtggaggaagatgctttgctctgtggacccgtgagcaagcataagctgccaaaccaagacgtctttttacaagggaaacggttcaacgaagccttggaaagactattttaaccccgggaacccttaaaaagggaggttgaaaattcccctaagttc

SEQ ID NO: 115736 - DNA, 238 bp, Glycine max
cccctaaggatagggaaggaaagtagccagctcccaatgagctgtcatttcaggcactctcttggcaataagagtaatgttagtttgaatttattgaatcttgctgtgcactcagctggcccattgtatgtatactcatcttaatgattacataacttcacaattcaaacatcagctaagtaaggcctttcctggctgcccatcttacgaaactggaggtacattttctaaagtggaa

SEQ ID NO: 115737 - DNA, 147 bp, Glycine max
cactattccatttctaaattaaagttatgctaaattgagtaagctgtttatcacttaacagctcattttgtctttttcaatatacaaattttaaaaatactacaatatttaactaaggcccaaccgatttccataatgtagcagtta

SEQ ID NO: 115738 - DNA, 179 bp, Glycine max
catctttactctgacacaatacagtgttccaagctcatcttgtacccttcctgcaccatccatggaatttgctgtttctttgagaactcagattcttctgattgggggatggtagttaaacatcaagatctgggtaatagctgtgccttttttttttcccctctaggaaggaggggaaa

SEQ ID NO: 115739 - DNA, 256 bp, Glycine max
gccctggggagccctgggcacagcagcggccgaggggatgtcctgctccaatacccgcactgctctggagtttgccctctttcccaaggagatgctgctggggagctggtatgggtggggtctttccctttacagacggggcagatgccaggactcagcccatcctgaggaggacacgtgtcctcatggagagggtgctccggcccaggcgggggagtcagtgcccagtcagcagctctgccaccatcctgctggg

SEQ ID NO: 115740 - DNA, 255 bp, Glycine max
tgaataatcacccttttcttatatgcctctggagagtcattctagttttgtgaaaatagaacatcaaactgggatgatcggtaggtttttgatgggaagacggctggtaatacttgcctagaactctgtgatggaaaggggccatctcagggatccatagaaagtgtgaatctgccacatgcgaaccacgtattcagcttttctagccaagctgaaagtatggctgaagtatgactttagtgttagacaatgggt

SEQ ID NO: 115741 - DNA, 284 bp, Glycine max
ggttgaagctccaaaactgacagcatctgataatctgttggtttatttcacttttcattaaatgaacattgatgagagaagatgccacttacccaagctttagagaatccctagtggaagattatatgataaactttcagtcctgacataacactagggcatttctagagtgtcattgctaaaacctcacggaacagacgcagccaaggtctgtgttcagcacttggtctctgttgttacgtaaaataataagcatttaaaatagtttacagatatttttgacc

SEQ ID NO: 115742 - DNA, 283 bp, Glycine max
gagcggccaagaggtgtgggacggggcccagagccactgacataactcctccaagtgcttctctgaaacaggctgagaggttctgtgactgcaactgggaagtcagacccaagtcgcagctgagagaaatggttgaaagctcactttctcaaggtttagattagtggtgactaacttccaagcaaacttcatagatagagaaaatgaatgccgacattccttacttacctgcaggaagactttttgagccatagtttgcaaactttagtgccagcagctgttt

SEQ ID NO: 115743 - DNA, 284 bp, Glycine max
attttaggtagaaaattatctgatttaaatacaaacatatttttctcacattgagtaatatgcataatgtagttccaaatgtatttcattactatagtcacaatatccaactaaaaattacggtatctagaattgtaccaaccaaaatctcgtattggcagatcttgacaggctggacctgcaagatgtggcttgaattttaaccatttattacataatctctagtgatcatgcatctagttatcataagaaataatttaaaaggttttgttgctgaaagcagt

SEQ ID NO: 115744 - DNA, 281 bp, Glycine max
gggtgggacacatgggtgatagttccatgatactggctgagtttgcaatagcaggtggaaccctaactattgagggagtttgcagatacctcaggattcgtgacaatgcctttaaagatccaggagagctgttcagctactaggaactgctagcaagtatagcgcgaatggctccgagctcagacactctacagctgagagtagacacttgtggtatgtggagtacagataagccaggggcaggccacggcacgctccatgaaagctaggagggagtgaaa

SEQ ID NO: 115745 - DNA, 281 bp, Glycine max
gccccatcaatgccctggatgagctctgccgcctcatgaagtcctttgtccacccaaagcctggtgctgctgggagtgtgggcgccggcctcatccccatctcctcggagctctgctaccgcctgggggcctgccagatggtcatgtgtggcacaggcatgcagaggagcaccctgagcgtgtccctggagcaggcggccatcttggcacggagccacgggttgctgcccaagtgcatcatgcaggccacggacatcatgcggaacagggcccaagggtgg

SEQ ID NO: 115746 - DNA, 270 bp, Glycine max
  unsure (1)..(270): unsure at all n locations
cagannantcttcatactagtccggagccctgagggggtctaaagagccgacctcctagcaggaagccagccgtgattanagaggatgccagctgaggctggagggagggcaactctgtccccagagataacttcctggggctcgtagcatgttgaattttcacttagcgttaactttagttttttattggtggaaaatgatttcaaatctcgctagtggaagancacnnaaaaannngaggatgagattgattcacattgtgacatatc

SEQ ID NO: 115747 - DNA, 276 bp, Glycine max
gttcatccaatgtctgctttctatgagatagactttgaatgaggtgttgagggtacagaactgaataaggcatggtccttgctcttaaagagctcacagtctggtgggggacataaatgtctgcaattacaatatgatacagtaattgtcatgatagaagtctgcaggtggtcctgggaataatagtgatatggataatacctttactaggtattcttcactaggaggggaataaatggagaacaaccatgttaaagtactttgagatgtataacg

SEQ ID NO: 115748 - DNA, 268 bp, Glycine max
atgggtatatctatttttctaccacgtctagatgacactgcaatatatgcaacttggtaacacaatatcccaagcacagtttacatgtcactatttccaattttctgatgctaagcattcatatgaagtcctcagacccggtcacagcgccactcctactttgtatgctcatagtttaaatttttgtaggaaactttcaattgttttactttttgtataacgaacaaatgctgtctccttttttactaataaataattttgtattact

SEQ ID NO: 115749 - DNA, 273 bp, Glycine max
cgggatgtcagtactaggctggctgtcaggaaatctgatttctagtaccaattgggcatagctaactaggacacttgaagcctgggaaaacacacgcgggcgcatgcgcacacacaagaatacagaagtgtaagttctactggaaagtagagtgggaaacttaattatgacttggaggttttaagtaaactcttctaagtgataatccgatgcattttatattcttggcattgttctaagtcttgttattatctcaattcttacaaaaatccg

SEQ ID NO: 115750 - DNA, 274 bp, Glycine max
cagttcagttgtctctgtaggcggaggctcaaagactgttcgcgcagcacacaggtgtgatcagagccagtggtctgccctgcacagggcgttttgggccagaacttcctatttcactccagcagcagccagggcctgctatgactgagggttggaccctgaaagtgggactttctgtctccctctcttgctgcagaagaagagtcttcctgtatttgtgcaagtaaggagatgtgacttcttggctgggaaactcttgctgatctaactgtgt

SEQ ID NO: 115751 - DNA, 276 bp, Glycine max
cactgagttaacagtggaagattctggtgaaagcttggaagacctcatggccaaaatgaagaatatgtagataatggactgggatatattgtatttctcatgttaaagcctcttcccttgaaattaaaaaaaaattttaactgataaaacttagggcaacattaattaatgtatattcttacctgaattgttatactttttgaaaatcctgtgacttgcctgtttctccccgctccaacgaaatcattaactctcctaaaatgtgtttcattctag

SEQ ID NO: 115752 - DNA, 279 bp, Glycine max
gcagcattcacaataaagcagcccttccctcaatgtcagccagatttgcatcccacataaatgcttcctcacattatggaaatgtactttttctatcaacagagtagaatgaaactccaggcttctaattaatcttggctgacatttgatttcatacccaagttaaaggcaagaagcggtggagcttcccccatgtacatgaccacaggcaaatctctccattaatgtcaaattgcatctgtgcatcttattgtcactgccacatgtcagtcattaatg

SEQ ID NO: 115753 - DNA, 276 bp, Glycine max
cgtcccaactccctttttaggccaccgcattgtatatcccgacacacacacgctttgaatagagccctttggggtgggggagacttaaaggcagtttgtggtttggggaagtaagagttaacataagccattttaattccctgggaagtgggagagtgggtctcccattttccccaagcaccctttttggtaattgtgttctgtgggttggaaggaggtgaagggggacctgggagcgagctgttggtgggtgggaatagggatttggccccgagt

SEQ ID NO: 115754 - DNA, 274 bp, Glycine max
aacaaatgctaatcctgagagttgccctgcaggactcaaaagggaaaggttttgggacgtggcagatacctgcagggacatggaattaaggccattgcaatgtatcatctttgtagcattgtcatcactcctaagctgccttcacagttttagtacactaagatgaggaaatcgaaaatgggcagagaaagctcatactgtataattgaagacagtgacagagaacgtgtcagttatgccaaaactcttttgatttctgttccaggatttccaa

SEQ ID NO: 115755 - DNA, 279 bp, Glycine max
ccgcgacagcgatatccgcttttccacgcagcccttctcccagaagaccctggacaactcagtgcacctgtgcaacaactccatccagaagcacctggagaactcatgccatcggcatccactgcttccgccagacaacatgtggtctagccagaggttccaggcccacctgcaggagatgggtgccccaaatgcttggtccaccatcatcgtgcctggcatgaaggatgctgtgatccacgcacttcagacctcccaggacaccgtgcaatgtcggaa

SEQ ID NO: 115756 - DNA, 278 bp, Glycine max
ggcagggcctgagcctacagggaggcacagggcaggtgggctagccatgaacagaagaggaagctggagtcgctttgggggttcatgcatgtaggctgggatttggggctcacacctcaacctgcatgcccagttccatgcccctcccctcttgtgaaagcacctgtctacttgggctgaggatgtgggggcacaggtggcaggtgaggctgccctcaggaggggcccaggcccagcttgtaccccagctccaccagtacctgaagaagtggggctct

SEQ ID NO: 115757 - DNA, 276 bp, Glycine max
tttttaaaaataaaaaatgtaaatccacttttttaaggcagattgttcattatgcatatacagcttgaactatagtttgggtccatataggaaccaatcaccaaaaactctggtaacagaattaggaaatcctcttgagaagagggccttaatgaccttttatgtgaaaaaaattttggagagaatttctggacatttttttttctgtctctctcacagggtttggttttcagataggagttaggtatgagaacaagaagagagaaaacttggcgg

SEQ ID NO: 115758 - DNA, 275 bp, Glycine max
gaggaagagtctgaaagtggtgaagagtgcacctatggccctctgacctccagccagagcagggcctaggggaggcttagagaggccagggcctctccccgtggttgaagctcccatttatttaagaaaaagtggggggtggggaaaacgttatgttaaatgtttacatggaaccaatgaacaactttaacacacaaatacaacgaaacattcttgtttaattactggcgttatagaaaatatgaattcctgctacatgccgggcagtgtagtgt

SEQ ID NO: 115759 - DNA, 263 bp, Glycine max
aaagccgggagcccaacccataatttaaacattgagctctgatgctgctttgactagacgtgaagttggtataccaagagaagcgcccatggacctagggaaagacctttgtgatccagacttgaggctcatttacatttgacttattctctcggaaactcataaagcgttctatattagccgctgagttttaacaccttctctggacactcatcatatagtctatgtttggcccaacttcttttgataaggtccattcttta

SEQ ID NO: 115760 - DNA, 279 bp, Glycine max
gaattttcagaggtagtaacagtctgctctggagcctttaactaggaatttcagtaataaattcttacatcaaaaaagggctattcttgttttttaaaaagcagaaacagccacctagtaatagagaagtaaaaccatctccaggtagaaatagaaggatactgtatgtttgcaactcaacaagacaagacagccaatggtggaagttgtatgtttcaccatgccttcattaaacagtttgtttatctgttgctatctccatcctcctaagctgagcct

SEQ ID NO: 115761 - DNA, 271 bp, Glycine max
tttgatcttccatctcaagttgtcaacatggctgtgtcattctggcttacatatgttttatttaacaaaattctagtcaagggataagggcataatgaagacaagcttcagttatgaaagtataaactatttgtgtgattaatttttaaaaatgacattaagaagcccattgtaaaataatatttgcagtcaaatggtttttcttgctgtaagtcctgttgtagctatgtttagggtagtggttctcatctaccttggagtgcataagact

SEQ ID NO: 115762 - DNA, 271 bp, Glycine max
gttgattttaaagaagtttttttaagactattgttgacaatagtaaaagagatcaggaggatgaagaatctaaaacaagcctgaaggatgtccaactgtgtatttagaatttccgacattcttctctactggatctacacattggaccccatctgatcctttgctgcttttttggcttggtcaggtcctggcctcattttggcgttacctgtgtcagagttcaaggtggatgtgcttagagctggtcagccccttccagacctggacacgt

SEQ ID NO: 115763 - DNA, 260 bp, Glycine max
agattatataaggtcctgtgcttttgaatctttttcaaaacatttatttctgcctgcttaaaaaaaatacttttatttccccacagagagttcaggacttcagattagtttgtgttcagctcacttaactggatagacaattttgcgttttgcaacaccatcctgtaggttttctttactagtcaaagtgtaggtctttttaaaatttttaatctttatttttatttttattttgaaacagagtctcactctgttgccca

SEQ ID NO: 115764 - DNA, 260 bp, Glycine max
aagtgcttgacatcaaaatgttctagagtgattatctactagattctgaatcatacatcacatctgactagagaccagtttctttcgaatgattcttttatgtatgtagatctgttcttctgaggcagcggttggccaactatagcccaaaggccaaatttggacttctttttataatttcagattgtctatggctgctttcccactactccagcctaaggtaaacagctgcaatagaagccaaatgagaatcgcaaagc

SEQ ID NO: 115765 - DNA, 257 bp, Glycine max
tggatgctttggcaacagagataagcaaggcaacccctgtgaataaggcactcctggtctacacacagtgggagaaacatagaaattcatctcttctgagcggacctgtgggaacccagaggatggacacccagcgtggtctgaggaatcatgggccaaaacaggaggcatcaggagagatctcttgggtaaagaagagtgagggctggaaggatattccaggcagtgggaacaacttacataaagtgagaatattg

SEQ ID NO: 115766 - DNA, 258 bp, Glycine max
aactttttatactaaatttctgtagaagcttgttgggtttgccttcaccagaaggtactttaaatacctaccatagctgatttgttataaagaaacaaaatgggtgttcttctgtttccttttgattatgtttactgtaattatttcattttggatttatacatttacaattgaataaggattataggttgataagctgtttattgtgaaaagatgtgttttgttacaaatacttgttttaaaaattaataagccccc

SEQ ID NO: 115767 - DNA, 258 bp, Glycine max
aacacatacatggagtatggaggaaattttctgaaaaatacatttagattagtttagtttgaaggagaggtgggctgatggctgagttgtatgttactaacttggccctgactggttgtgcaaccattgcttcatttctttgcaaaatgtagttaagatatactttattctaatgaaggccttttaaatttgtccactgcattcttggtatttcactacttcaagtcagtcagaacttcgtagaccgacctgaagttt

SEQ ID NO: 115768 - DNA, 259 bp, Glycine max
aagaagttctgggcaggcctgcagggtctcaccatttatttctacaatagcaatcgggacttccagcacgtggagaagctcaacttgggagcatttgagaaactcacagatgagattccctggggaagctcacgtgaccctggcacccacttcagcctgattctccgggatcaggagatcaagttcaaggtagagaccttggagtgtcgggaaatgtggcttcctctagttggccagtcatcctgaagccaaagaagtt

SEQ ID NO: 115769 - DNA, 256 bp, Glycine max
gtattaaatcagtcatttcatatgcactatatcaagtacaaacaggtagtttacctgtttatagtagtgtactaacaaagtctcccttgcagcttcagactgttatctataggcttatcgttcaaatacagcacttgaatatcccaagtagttcttctacgcatagctcacctttctaaacccagttaagcatggaagagaggtagtaggtaggtgcagtgtgtggaagctgcaaacaagtaggccttttattcat

SEQ ID NO: 115770 - DNA, 250 bp, Glycine max
tgagaaacaaggacaatcactgcatggaggtcataaggcttaaggtacagtttactgttgcagacttttggacaaagttcttttcttggctgttataaaaactatatttggttttaaacagaaacactggttttagtacaaatcatctttgtctactttcatttttctttattattttcatgactgaaaaggagctttggaaatcactgcataaggcttgatttatttgcacaactttctttagggttgc

SEQ ID NO: 115771 - DNA, 255 bp, Glycine max
ccatcttcagcacaaggtgtgccttatcctggccctctattaggatgatacacagtgctctttttgttactgatttatcttcttgtttttggacagttctgctcagaaggaaaggtgtatttgtccatgttggaagacactggcttttggttagaaagcaaaattttatcttttattcaagatcaagaagaagactacctgaagcttcatagggtcatttatcagcaaattatccagacctacctgactgtgtgt

SEQ ID NO: 115772 - DNA, 257 bp, Glycine max
tgtgcgccacgctgtgaatccagtgggcagatactgttagactggagccaaatgaaaacagaaccacatcttgaaagggctgaaagacaacttgctacccatatttctatattcaatgaaaggctcttccagaatgaagacaaaatgatgacattcagagctaaacaaaaactaacagaactcatcaccagaagactcatacttgaagaaatgttacagaaagttactcatgtcgaagaaaaatgatatcagatgga

SEQ ID NO: 115773 - DNA, 256 bp, Glycine max
gaagggacagagattttttggtaggggagacatttttcagttttcattttatttatggtgaggagacagggaaaagtgtaagagaaaagccactgtctcccattggaaggatcatattccacagtctaagagtaagtagagaagattaacatacatgtcagactgaataaagagcagtaggtcaccatgacttcaccttccaggagaagcgccctgttggctctgaagcttgctagaaaaaagaaaggaaggaaca

SEQ ID NO: 115774 - DNA, 259 bp, Glycine max
ctctgtccactcccataggctacagaaaaagtcacaagcgcatggtttccaaccatatgtgttttctgcagttatttctcttgttctggccaaacaaccctaaaaatccttaccattccacaaagttggaccatcacttgtgcacccactttgactatgagtataccaccacattgcatttctgtttgcaccatgtcttccaggagactagactactgttgtccagggtcaatttgagtgtaaagaaaatgtagacaag

SEQ ID NO: 115775 - DNA, 245 bp, Glycine max
gttctaaccatacctttgacagacttaggccatatatgaatgttgtatttcacttgtccttcttatcattgttaattgggataccccgtttgtcatattaatttataatatcgaagttaagatgtgtgtggtgaaactttggtacgtttttttggttttactggaattggtagtttaagatgaacagataccattaatcaacagcaaaaggatgatgtatagtgaaatattaacccagggtctga

SEQ ID NO: 115776 - DNA, 247 bp, Glycine max
cacatgtttgatgtttctattgttcttcttttttgtggtacaggttaattatactaaggagtttgagatggaaatggctaatggaaacggtttccaacttagtgtgaagaagctaagtgaaccaactctagttcctcctgctgaagaaacaaagaagggtttgtatttcctatctaaccttgaccagaacattgctgtgattgtgagaaccgtttactgcttcaaaactgatgagagggggaatgag

SEQ ID NO: 115777 - DNA, 242 bp, Glycine max
aataccttggatgattcatcatcttcattgggggatgcttctgtccagaatgaaagatctttgcctatagtgaggacttcaattggttctgatgctcctgttcaggacaagtacacgagggaagtgagcagaggaaacaggactatgggcctgggagcgcacaacataccttctgattctgatagttatcgtgtggttgcaaattcacaagagactcttgctagaactaatgaccctcacat

SEQ ID NO: 115778 - DNA, 246 bp, Glycine max
cttagatgctgctaatactactactaaaaccaccccaccaacggcaatccccaccaccaccccaaagtctctatctttcgccaacggcacactcaagcgccatcccaccaccaccgttgctcagccgccgtccatggtggtttcctacaaagaatgcctcaaaaaccacgccgccagcatcggcggacatgctctcgacggctgcggcgaattcatgctgtcttcttccaccgtcccctccgaccc

SEQ ID NO: 115779 - DNA, 249 bp, Glycine max
ggcaaaccaagggcagtcctagctcttagctgtgtatcagatggtatgcagacgatagatgcactcctaacatgcaagatgaaaaggaaaagggacgagaatagttcaattatgaggaaatctgctctgacatctcaacaagacagtctatcgtttaaggagcttacaaaagacatacctttccctgttacatactatacactaacagagaaagagttggaagagaatggatattctgttaataagcca

SEQ ID NO: 115780 - DNA, 253 bp, Glycine max
cttcttttccatactattaattcatcacgttctgcttatcaatgcatcgctctcaagcctggcttctttgatgcgtataacgtttccggcaattccgtgcaatgcagtgtgcttctgaaggctgtttgtgctgttctcaggacacctattacgaatattgaccatttgaccgtgagactgcctgatccagatgcttccaaactgcagtggattttggagtgctataatggtatgagaaaaacctattggatta

SEQ ID NO: 115781 - DNA, 147 bp, Glycine max
cttttatttggaatgtacttttgggaagggtgcggcgattatccaagcatgctcctagtagtttatttggacaaaaatggtcatggcacatcaaggatctttgtttttctttttaccactttattggacatgtgaaatatatatata

SEQ ID NO: 115782 - DNA, 274 bp, Glycine max
gtcatataccttcaaattgagtgatggcaccaagagtttccggtttagaaggagcacagtgtgccataaactcaatcgggttgggatgtgacgtaacacgagatatagcatgtgacaactgtaagaagggttcaaggttgacatgagtcactgagaagcagtgccggaatctcgagattcctggaggggtttcaattccaaatgtccctaactctatcaaatgtgtcagaggggaatccattagagtccattcagaagttcgcacctggcaaca

SEQ ID NO: 115783 - DNA, 277 bp, Glycine max
cttccgaagacctttgggtcgagtatcttcggatggaactaccttaccttaataagttgaaggcacgcaaggttgctttaggtgaggatcacggaactctcacccgtgatcctaggagttctgatgaaaaacattggagggatgaaaacagtgagctgtttatgcctcttggtgaaagaggggatggtgatggtgatgatgatagagcaaatgttggaagtgatgagtcggaaaagaagcaggagctgtttgaagaacgtggtatgattatttttca

SEQ ID NO: 115784 - DNA, 280 bp, Glycine max
cgaagacacgttcttctctcaagtgctgaaaaaaaggtaccattgtccatttctcgatccgtaaattttgttgtgcgttttcgttattttcgcgcatgttctgtaccgatcttttgtttcgcatcgtgaatattattcggaactctcttcttcgtttttctttgctcgaacaatttcggattttctggtctgaatttttctcttttcattataaccgaatattagagttccttcaaccatcttttggagatgttgatcaccgactgccacgaatcaattg

SEQ ID NO: 115785 - DNA, 251 bp, Glycine max
cttgagaaacgtgggggagctacttggcgttgcaataagaaagggttgggtgctaaccctcacaagttacaggaatttagtgcgattggtttgtatgaaaggtagagtccaattcacgctgagcttaaagaaccttatgcttgcactatgtccacttgattggcttatcatatataacattcttatgttctatcttttgtctgctggaaacagtttggatgttaataagatactacctgaatttgaggaga

SEQ ID NO: 115786 - DNA, 254 bp, Glycine max
attgccattggctctctttctttgccgtaccatttgaattgaatgtgattgcaattgcaaatccccccttcaattcaattactactttcacgacctaatctaacccttcgctctgctctgctctcacttcaccatattcacacccagatggaaactgtttgtctccactgtggcgacagaggctttccagagacatgggttttttgacccgaatgtatggcttatgcgctgacataggtttgttggctctaccc

SEQ ID NO: 115787 - DNA, 254 bp, Glycine max
agttcacccaaacacttcaaacaaaaccatgcattgaagcctcttaacaagttccaataatgagagaacaaggggtctttcatcttgaggaacatggccagacagagaggtcccagtgggtgcttgattctcccaaccctcctcctctctggaagaagctatttagttctgtcaaggaaaccattctgcctcatggcaacaagttctgcttctcatccaagaggaaacccatcaatggacatgcactcctcatg

SEQ ID NO: 115788 - DNA, 258 bp, Glycine max
gcggactcgcggatgattcttcgaggtatcccggaaacggcaaggacatggaggacattacatcctctgttgccaatgcaagtagctcttcaggctcaggcattcctggcaaagggttgtctaaagtgaccacattgccggcagacatatcacaagataaatcggagtcaagttcaagtaagtttaagatggaaaggtcaaaaacagagaggccgagacacctaagtcctgaagatgcagcacaaatttttgatgaca

SEQ ID NO: 115789 - DNA, 280 bp, Glycine max
cgcaaaccttctcagaaacttgtccttccacgcgcgccgtcttcgtttctctcccactccttccatcttctctcctacagctacagcacccacctccttctcttctcgctcccatgtccccgacaaaccccactccctccttgaagacattagcaacgaagagttgaagaggcgtgtggcaaagcttcaagagggggatgctgaggcaattccttctgtgtttgaggctatattgcagaggtatttagcagggaagcctatagaagctgatgaggagttg

SEQ ID NO: 115790 - DNA, 274 bp, Glycine max
tgttggttggttgagaacaatggcatgaggtttggtgtgtaggggcgtttgttggatgcagtgtcgtcgtccgtttttcgtgagaagctcggctttcgttgcagcgttggttcgttgcagatttcgtccgcggttttcgagagtcgtcggtttgtcacagaaggggccaaagtttgagatgtgtgagtttagtgtgatggttttgatggtgtcgtgtcttgtgcgtgatttgggtggtttatgatggtgtttgggtgttgaggggggggggggg

SEQ ID NO: 115791 - DNA, 184 bp, Glycine max
gtcgaccgaatcggctcagttggtgttttctcaaacaacccgaccaaacgatcaacaggtgtgacaaccaaagtcggttacgtacgcaaactagaacgtggcatattatgtttttgtgaatttggatattttggagtatcgagattttccgttgggtagtttttgatgatcgaagaagaggaag

SEQ ID NO: 115792 - DNA, 283 bp, Glycine max
tgtgcacgtctgcggtgtggtttgttttccttggcgcccttttggtcgtcgaggcgacgctgccgttttggagcggcagcgtccgcagtgagcttctcggttctctctcttcctctgttttcggcgcagttcgcggcaggtccgcgcgtgcccggatgtcgaagctgcgtcttgctcgtctgctccttgtttctgagcgccttctcgctcttccttcgttgccctcggttccgaagccggaggttaacgatgatgggtatgtttcataggtacataagttctc

SEQ ID NO: 115793 - DNA, 279 bp, Glycine max
gcgcttcgctccctctctctggggccgacacatgctgcttctcttcggcttctcccgctgaggcgcgctgtctgtgtggaagtgccggaatacttcgtcggaagcttttttggcaccggaggagccgaacagttctgccctccggagaagcgccactccgaccacaaaaccggcgagcctttcgccgttgacgacctcctcgacttctcccacgccgacgccgttgtgtccgacggtttcttcgacagtgtcgccggaaactccgccgactcctccgcc

SEQ ID NO: 115794 - DNA, 265 bp, Glycine max
tgccaaatccaatgtttttgcctcggagctcatgagttcacgttttttgggatttccgtttagtttgcctatcgtcatcttcgttcattttcctcttgttttaaggttttgcttctgattgattgattgattgcgtttgagagagacttgtgaactcagttctttctttctttcgccctcttgggtaagctcagaaacttccgtaaagaaccagagtttctccctagaattctgtaaggtgtttgatctaggattttcgttgggt

SEQ ID NO: 115795 - DNA, 270 bp, Glycine max
gttttcttccgccgtggctaacagggctcaacaagagcccaacgctgctcctgagcctgatcggtggtacggtctcacccttggaccttccttcggagatgagtcctctggcggatgctgcgctctacgatatgagtttgagcgagcttcggttgatgagactaagccagggttgctacgcaagaccgaagagaacagggtttctgtggaatttcagaacggccgagtaggaaagcccaaggtgacgtttgaggggaatagtgaggaata

SEQ ID NO: 115796 - DNA, 278 bp, Glycine max
gctctgtgtcgggaatgctgtggtgttcagtggtgatagagctgcgcgtccttacaaatgggcacagcacctggcgggtattgatttcttgcctgaggtggctcccttgctgcttgctagccgtgaaacttcggacagtggtgaagctgccaaaggtgaagacttcgtggctggtctttcgcggtgtcgccaacaaaaccgattgcagacagttctgcaaaagattcgatcaaggataaaagctcagttggctcttcgatgatgagtcgcttctcttt

SEQ ID NO: 115797 - DNA, 258 bp, Glycine max
ctctctcgcatcttccccaaaaccctaaccccatcccccttcctcttccgctccctcaccaccgccccctctcgtccttccctccccgcgctctccttcctccgccgtatctccgttgcagccaacccctccctccgccgcgtcctcctcccaaacgacccctacctccgcgccctctccacacgcgccacaactcctccctcaacgacccaaccctaactggtccaaccgtcacccgaaagaaaccacttgctcgac

SEQ ID NO: 115798 - DNA, 265 bp, Glycine max
gttttgatcacccttttgaacacatctcatctcaaaatattttactcttctatccaccatgatgaggctagagtggagaaggcaaaaacgtttctgctttgaacagaaaaagttaggactcaccccattaaagtgctgtcaaagaaatctcatatatatttagcggcagaaggacctgccaccgaaaaacgaagtagctcatgtgtcaacaccaccatcctaattaaagcagcaacattattgctcaaacagcatacagaaaaag

SEQ ID NO: 115799 - DNA, 268 bp, Glycine max
tctcgagcgattcggctgaggaaagagggtagaaatgagaagagggaagtggaagagttgaggcagaggaagaggcaggggagtaataagagcaaagagagtgtgagtgtgaagaaagagaaaaatcaagggaagaagaacaagaagatttccaagctgaagaatgaaccaaggagggtaccttcttctaagaatggttcaaagggtcgaactcgaaaccatcatggtgaggttaaagatttgtcatctgtgtcctcaaactcctcta

SEQ ID NO: 115800 - DNA, 264 bp, Glycine max
atttttaccgaggtttcttccgctttcctctgttcttgctctctctctctctttattccccttccactttcgatgtaaccgatgacgattcttcttttttctctcttttttattttaggatctctggccactgctccagcaactcgttggaaaaactcctctcttctcatcttcatcatcagaagcttcgtcgtccttcttccagaaccttcgggaatcgatgacgaactcaagttgcggaggcgcggagttggagctatgccg

SEQ ID NO: 115801 - DNA, 266 bp, Glycine max
atttgttcttctagttcttcttctttgtcatcatcatcttgttactcctcagcttcagcctcttcttcatgtgcttctccaatgcaatgtttctgtttcactactaccgaggggaagagtagttcttcttcggtctcgattttcctgctgagtggtaacgatggaatcataaagggtaggtgtaggccattggatattgttccaagaagaagagattgtgaaggtggtggttttgatcatcatggtcatgataagagtgccaacaa

SEQ ID NO: 115802 - DNA, 269 bp, Glycine max
ggattgaggtagcgctgattcgatcgcatcagaacattcattcacattcatatcctctctctccgatcccaatggcggatgagagccccaaaccagagaccttcgaactcaacaatggaagcatgcaggtcctcctcaccaatctcggctgcaccatcatctccttatccgtacctggaaaagatggtctttttccgttccaatttttcattttcattttcattcattgctatttgcgtttcactctctctctttctgttttcaaggtg

SEQ ID NO: 115803 - DNA, 266 bp, Glycine max
gaaagagcaacgtcagagagtttgccgtagggttctccttggtttgtggtttccgctttttcctttttctgttttaggtgaggattgtcctcagatcccagaagctatccagacttgttacatacgaaaaactcagatctatggctcatgacaattcacaaaactccaaatatgagaaaagatgaagggtttgaatatttgatgttccaaaaaccatgtctaatttgacttctgcatccggtgaagctagtgcatcttcaggcaac

SEQ ID NO: 115804 - DNA, 263 bp, Glycine max
attatttacaccttcaaatcattttaatttaatttaatcctccgtttcaattttctccgtttaacgaacgcgaatttgcattggttttgatcgatcagatcctgtgttccggagaaaggaaaggaaaggaaagatgtcggggcaaacgcagcgtctgaacgtggtccccaccgtgacgatgctgggagtggtgaaggcccgattggtcggcgccacgcgcggccacgcgtcctgaagaagaagagcgacgcgctcacggtgca

SEQ ID NO: 115805 - DNA, 260 bp, Glycine max
ccacctagtgggataaggcgttgttgttgttgttgttgttgtcttcttagattttttttgtgaagagatggagttcttgaattctggactatgatgacttagtaccttttttgtgaggcttattttcatatgaaaattataaagcttaacaacttattgtaagatcaatatatatatcttaattagcaatttaaacttttgtcatcttgattatatatatatatataatgtgttcctgtgtcttatgttttgtactttag

SEQ ID NO: 115806 - DNA, 265 bp, Glycine max
gtgggtttgaaacaacgactggagagcagtggcttgcatttcgtgatgatgggaaatataacgctgcagactatgcaaaacttgcaagtgagagggtatcgagagatcgagaagggtcatcctggaatccctttgagcaaggactgacaaccaaaaggagacaaaattttatcataaagatgctccaaggtgtcatgaagggtctagcttacttgcatgaccacgataggttgcaccagagtctaggaccgttttctgtggttct

SEQ ID NO: 115807 - DNA, 263 bp, Glycine max
attggcatgtgaagaacatcatcaatagggatagaggtgtcaacctagttaaaatttctgtccctattgtgatgttaaatcatgcctccttttgattaaaaggaaaaaagaaaagagtaatttaatataaagacaactatttaacagagttagaaaatatatatatcttatgtaaatattattatggcttgtttttgacacattcaagccttattttgtattgagtaaagttcttttagcttaaaaaaaaatcaaagcatatg

SEQ ID NO: 115808 - DNA, 264 bp, Glycine max
atcagcctcattgtttgggttgactgggagcacaactttttcttcagggagttcattgttttcttcttcaagttccgtcccaaacaatttcaatgcgggtacaacttctgggcaaagtacccctgctgcttcttcagaaaccaaccctgttagctccagtagtggcatgagttcttctgtgtttgggctttcaagttggcagcccagcaagtcttcatttggttcttcctttagttcatcatcatcaccttcctctgggttttc

SEQ ID NO: 115809 - DNA, 265 bp, Glycine max
actcaaatgacttttgccttaaatagcatctatcacgagcctttaaaaattgccaggtgagactgtcttgaataagtgcccaaataggctcacttaagcaaggccttcaaatatgatattggcctctagaacttctctcacttaagcgaggttgcactgcagcactggtaccatctcaatgcctcaattaagccccaggatgactcgcttaagcgaggctgcatcttcaaggagctcgtgctccacccccttgtcctcgaagtgg

SEQ ID NO: 115810 - DNA, 251 bp, Glycine max
ctcgagcgtttttttttttttgaatcataatcatcttaaatagtaaatactaatggcctcaatatttgccactctactaagcaattggcttcccttgtcaaactatatttgggttaccttttattttgccctatttcatcaaattttctatttgaattttgtgaagtgaaataaaatctggaattggcatgcactgttcttcatacaatggcattccgcgactttattgtcatggggtaatgcctgggttt

SEQ ID NO: 115811 - DNA, 260 bp, Glycine max
gttgtggtagtggtgagtgtgaatgaatgtgaaatgaatcccttgaagcccttcaattattaagttggaagaagatagagaaatcaggtggttttgagtaatggtagtagtttgtgtgtgaagaaagaggtgaggtattatgccgcaataaaggaaaaaacaaaaatgaatgattagtccatgtcttgggggttagagaaagtagcactaacgctggcatggggtgtgtgagctgtatttttatttatttttaatgagaa

SEQ ID NO: 115812 - DNA, 260 bp, Glycine max
agagtccctcagtcccattgtcgttgtcttgtgtcgccgtgctctagtcgacctctccaacgtaaagaaggtagatgaagtagtagttgctacttgatatggctctacagaggaagcgtcagatggcagtcaaagattctgaattaaggaaaagcttttaagagctctcgagcaattcaactagcttggtatctttcagagataatttcttaaattcctccttgtgattcatcacatgctatatcatcctactgatcctc

SEQ ID NO: 115813 - DNA, 260 bp, Glycine max
gcttatacagttgtataatctatataatttctgaagctgtaaatacaaggatatggaaacaaacagatatgctcctatatctcaagtctcccagaacaggtcagaactttgaaacatatatgaatatgatgactatgaaactgatatcgattccaatagagcatccacgtactctttaagtttcacttttgtaattgcacaatggcgacacttaaggttcctcagcctcttccccccgttgcaggattgtgagcagctcc

SEQ ID NO: 115814 - DNA, 253 bp, Glycine max
ctcctcctcctcctccgcttcaccaaagacgaaacactctagtcattacttttgcttcaaagtctggaggaggattttcacttaactcgttactgaaaagttgtaaaagttgcggaggaaagggggcaattgaatgtcctggatgtaaggtgccatgccatgaaattcattttcaaggttctgttgttttgtttctttattattaagaagataaaatgatttaaaagctagttattttggagcttggcaggac

SEQ ID NO: 115815 - DNA, 152 bp, Glycine max
  unsure (1)..(152): unsure at all n locations
cctcgagcganatcggctcgaggcgagcggacgtctcgagagttatcggtcgagacggtacgttagggcccttgacattggtcaacacattcaaatctacggtgcagctggggagatctatggtggggataggagaatggcaagtcttgcga

SEQ ID NO: 115816 - DNA, 288 bp, Glycine max
ctcgagcgatttggaggctaaaagaggacttagtaagaaaaggccacatgaaaatgtttctggtgtccccaacaacaatgcccagactaatatggagttagatattgtggacgaagattaccagattttcctgaattcttgtagggatgactatatacctagtgaattaatagaaaagcagaatttggaggctaaaagaggacttagtaagaaaaggccacatgaaaatgtttctggtccccaacaataatgcccagactaatatggagttaattgttgtggatgagg

SEQ ID NO: 115817 - DNA, 295 bp, Glycine max
acgtcgagctcgagcggttacattctgaaaagaaaacgggctattctgaaattggtggttagaactttgaactcggaaagtcatttgaagtaataatagttgaatagctataagaaattgagtttaatttatatgcattgttagtgtaaatttttttatattgtcaacctataagaaatcatcattaatatgatttttaaggtagttattgtaaaagttaacaaatcacaaattttcacacaagagaattaagattgaacgaacgtgaaaaaaccaatcacaaaccagtgcatag

SEQ ID NO: 115818 - DNA, 285 bp, Glycine max
attgcatccctcttgatttgtagtttgttttgtgctttagataaaagttctgccaaatcaagaggggttttaagatcatagtgtgtgttttgcaacaatggctaagttctttgctgctatgatcttggcactctttgccatttccatacttcaaacagtggtaatggctgctaatgaacaaggaggccacttgtatgacaacaagagcaaatatggaagtggaagtgtcaagagtaccaatgcccatcacaatgctcgaggagatgtagccagacccaataccac

SEQ ID NO: 115819 - DNA, 267 bp, Glycine max
ctcgtgtccgttcgtaggctgcaaccggaacaagctccaccggcggttccggccgctgaaatcggtgatttgcgtgaagaaccacttcaagcgaagcactgcccgaagatgtacacgtgcgagcggtgtcgcaagaagcacttctcggtgctctcggatttgaggagccacttgaagcattgcggaggagaggccaggtggaagtgcacgtgcgggaccacgttctcaaggagacaagttgtttggccacattgcgctgtttgaggg

SEQ ID NO: 115820 - DNA, 110 bp, Glycine max
ctcgagccgagtaagtttatttaagaatgatgttgaagacggtatttgatttcctattgcaagtttacttgggagcaattttatgtttctaccaatgaaatgaaatgaaa

SEQ ID NO: 115821 - DNA, 297 bp, Glycine max
gagttcgggtcgagtttgctgctttgccttctctctcctttcttcctctcctcaagtttgagaaaatcaagagaaagggaggagagagagaaaacaagaaaagaaagacatatttgaagagaaacatggccatttccagtgcttcattcagggtggttgccttccttagcctcttgcttgcagctcttatgacactggcttcttcacaagtcactgctccggctcccgctccagcaagcgatggcaacaatcgaccaagcggttgcatatgttctaatgcttgcggctttggtgctg

SEQ ID NO: 115822 - DNA, 233 bp, Glycine max
cccaaggcctgcttccccttcacaatttcctcctctcttttaatctctttcagctttgctggatcaattccaggctctttggacggggcctccttttcgggacttccaaattcatatccatcattttctgcaacatccttactctcaattttggattcaaaatccctccccttgttttgggaacctttcggagcggttctggattcttctgaccagcaaaattttcttgtgga

SEQ ID NO: 115823 - DNA, 139 bp, Glycine max
gaactggtgagcttctgttgttcttttcctttcttgtttctttggcgctatggttccaactctgtttcgctggagatactttgatcgctggacatgagataactcagaacaggactgggaaccatgattcatctagccg

SEQ ID NO: 115824 - DNA, 270 bp, Glycine max
aaagaaccagattattaattgttcctcccctttttgttggtctcctcttactctttctgtccctctgatatataattaaggatacttgtcaagttcaagctgaggccagctccttggtggatattgttatctactctgattggagaaatgatgtgctcgtctggctccctagatgtcatgtttccaattacatcaaagcatccttttccatttccatgattcagttcctaatggtgaggaatcagtttctatataatgcttgataaagat

SEQ ID NO: 115825 - DNA, 207 bp, Glycine max
ggaactgaagaacacacaattctcaagtcaagatgcagcttcacaacaggaactgctgcataaggaacttgtgggagagaaaattgttctaattcctgagttgtataaagctgttgaggaaggaaatgtgaacaagtttcttgatgtgttggagcaagaatgtaaacaaaggaaattgaatttgtctgttatctttgaacaagtcac

SEQ ID NO: 115826 - DNA, 205 bp, Glycine max
aattgccattgacccaacaagcaataggccagcaccaaaatgagaaatgggtcaatgagttgttggattgcccagtaggattcttggacctattaggcaaaacaagggattccattctgttgatgaaaggaagtgttggagagcttcagagtgcacttagaaggaaaagggtggagatttatacatggagagtatctccctacat

SEQ ID NO: 115827 - DNA, 277 bp, Glycine max
gcgagctcgccgccctttttttttttttttgaaaaacatgatcgggccatgtatagtttgtagttcattaattatttaaaaattctacaggatccaatacgattgctatgatatggtatcaaacccctaaaaaaaaaaaaaaaaaaaaaaaaaaaaaaaaaaaaaaaaaaggggggggccgcaaaaatggatcctcccgccccggggaaatttttgggggcgaattttggggggggaaaattttccccagagggggagattattaaacttgggggaa

SEQ ID NO: 115828 - DNA, 279 bp, Glycine max
ctcgagccgtgcgtattttcgttttggttgtgaccagagacggtggtgaccgttcgcaatgtgctgggaagatggggcaagaaggccgcagaggctactaagaaggctgagagtctcgctggaaacacgtggcagcacttgaaaacaagccctagctttgctgaagctgctatggggagaattgcccagggaacaaaggtcctggcagaaggtggatatgagaagattttcctgaatacatttgagacagttccggaggagcggcttctgaattcttaa

SEQ ID NO: 115829 - DNA, 211 bp, Glycine max
tgggatttgcaaaaaggggtcctccttgggtcccggaataatttggggcaaggtctcttcttggttctgaacgctgcttaaatggtgggcttgatggtcatttgggcacggattgcaaagctggggaattgaagaataagtggtaaccggcttgtgggagaaaagacatatagaaaagaactgcaagaacagccccaaaataattgagcac

SEQ ID NO: 115830 - DNA, 248 bp, Glycine max
tacaggccttaacttgcttcttaatgttccattcactcttcactacgaacatccgactccactaccctcccctaatcaccacataacctatttaaggatctgcattctggattaagcttctatatgtaatggtttgagtttttttaaattgtttgactcatgaagtattgttttgaaggggttttttctttttttcaattttgtgggaaatgattttgccggaaaaacccttgggattttaaattaag

SEQ ID NO: 115831 - DNA, 265 bp, Glycine max
gcttggtcttggttccagccagccatgtctctttttgtacaatgtaggataaaaaggcgtaaaaaatagggaacatggcctagaaggaagtagaggagttccaaagagccagcatgctgaccaattttattttttttaattagcatgcatgttggatatataaaatcctactgtattgatttttttttcctccaaaaaaaaaaaaaaagaaaaaaaaaaaaaaaaaaaaaaaaagggggggccccccaattggtgccctctcccc

SEQ ID NO: 115832 - DNA, 113 bp, Glycine max
atactctccttgatcaacatcagtatcaacttgagaatgtgaataaggagttgaacgaagaggaggacatgttgtggaactcttttctagaggaggcttcaatgttgcggaag

SEQ ID NO: 115833 - DNA, 275 bp, Glycine max
gtgtcctcaccgcctcatcagcctctttgtttcccctttcatggatgaaatccagatggaaattcaatgcccatcttccttcatggatggattctctcattataccctccatcatgaagaagccaccaacttctcaaaacccatttcctgcaacctcaaaatctgtcctcaaccacgcagacttgagctctcttctctctgtttgtggcagagatggaaaccttaatcttggttcttccatccatgcccgtatcatcaagcaacctccatctttc

SEQ ID NO: 115834 - DNA, 142 bp, Glycine max
ttctcgagccgaatcggctcgagcgacatcccattccccaacatgtaatgactagcacaagcgatgatctctttgattttattgtgtcttcattgatggaattcattgctaaagaaggagatggttccaatattccacacaa

SEQ ID NO: 115835 - DNA, 279 bp, Glycine max
gtctcgagccgaatcggctcgagctcgagccgcatcttcattgcatgcttagtgcagatgtttgacatttgtattatggggaattgtagcctgtcgctatggccgaaaacctgttatagttatggggattattgcagttgtcattttcaacacattatttggccttggcacaaatttttggatggctgttatcatgagatttcttctgggcagtttaaatggtttgcttggtcccatgaaggcctatgcctctgaacttttgcgagaagaacaccaagc

SEQ ID NO: 115836 - DNA, 278 bp, Glycine max
ttctcgagccgaatcggctcgagcggctcgagcttgccctgctcttaagttaaaggcaaagcctgtttgtacttgttcaataaatagaaaaatgctaatgtttttgtaagcacttgaaaactctttgttccagtgtagagactagagagtaagctctacctttaaaggatcaagtctacaaatattagatcgttagtatgcctttatccaataattttcattctagttggttgatgacatagaactagttgagcttctattatcaagtaattttaact

SEQ ID NO: 115837 - DNA, 268 bp, Glycine max
caacaacctatggcacgatcccaacctcgccgcctccgaacctggagtacatctcacgcgcgaacagcggatcaaggccgggctggggacgcggcggccgtggaaggcgatgttcaacttccgatcgctgaaggtccctggcggcggcgtgccggaggcataatcgcggattcggatcaacgtgtcgtatttccgcatgaactacgcaatggtgacgctgctgattctgtttctgagcctcgtgtggcaccgatctccctgatcgtgt

SEQ ID NO: 115838 - DNA, 277 bp, Glycine max
ctataatctcacatgggttctgcagtatatcaatcttttcatgatatatactggctacatcattttggccggttcagccttgaaagtaagagatttaggacacaaaagtatatattttctttctattcaattcatattaaaattgaatctttcaaatacatgtctattgaagtattttacttcttttctaaaccaattttttgttcattgtgattgcaggctacttatgttctattcaaggatgatggtctgctgaaacttccatattgtattgcca

SEQ ID NO: 115839 - DNA, 276 bp, Glycine max
taaagttaatgaagatggccggttcggttagaactggaggaaagggtactgtgagaagtctcatatggacatatgaatattttagcttttctccccctccccgctcttccactatgcactcggttgtgggttttcactcaatttgttggctttttagtttttttggaattgaacacaaaatgcatctgttgtgttgaatgctctctttatgttttgtcttatgtttgttctagaaagaagaaggctgtccacaagacaacaaccacagatgacaaa

SEQ ID NO: 115840 - DNA, 219 bp, Glycine max
taaggacccacttttcagaaacccaagaatcaactcacatttgggtttcatttctctctctctctctcccaatcacactgatagaacctgcttgctagatccatttttttgcgcagaacactgacgaaaaaaatggacacaatgctgcctccgaaccaagcagaggaagcaatagtcacaacaagcctcaacgagacagagagtgaagtttgtatgagg

SEQ ID NO: 115841 - DNA, 292 bp, Glycine max
tatgtctccgccgtccgattatttaacggtggcgcaactcgtaatcgtcgcttcaacgtaagggcgaccctgccatttccgcagcaaaacgcaaagcattacaaagagcttcaagccgctattgacgttgttcagagggcttgccgtctctgtcttaatgtcaaatcatccttgttctcaactgatggaaaggttcttgagaaaaatgaccagactcctgttactgtggcagattttggagttcaagcaccataagtttccgagttaaataagctgttcccttctatacctt

SEQ ID NO: 115842 - DNA, 286 bp, Glycine max
actatccgtggcctatttatctggtaggaagtcatccagtggtcagcagtttggaaattacactgaagatgatgttgatgcattacgcgcaattgccgaggaacctggagttgttgatttgttcttgactaacgaatggccgaatggggtcgccaatagagcagctgattcggacattcctgctggactctctgatggcagtgattcaactgtatcggaattagtacaagagatcaaaccacgttatcacattgcaggcaccaaaggcatatactatgcccgcgaa

SEQ ID NO: 115843 - DNA, 281 bp, Glycine max
cggatttttggttttgttgagctcagagaagctgaggctttttgggatcgaactatagctgtttgaacttgagtctagttcaagtcaggttgcaatgaagtgttttccattctacctttggagagatcaaggatggtcctaagagcttgcagtcaatatcgggccattctaacagttctacttatgttgaggctgattcgaggagatctggttctgaattgaactctatggatgcctcagataacatcacagactcactcaggagaagtgcatttcgcagt

SEQ ID NO: 115844 - DNA, 256 bp, Glycine max
  unsure (1)..(256): unsure at all n locations
ngaggactccttactcaacaattcttgtttgtgtaatttatatcttagagatagaaattggttgtgaaaaacagaagcactttgtttctaagtaaaaggaatcttcagctgccatgtttcatcgctggagcaattctcatcaacaggatcagggaagcagcgagctttatgctgaatccaagattaaagagctgaagggtgttatcggacccttatctggacgcatttgacgtattgcactgatgcatgttttaag

SEQ ID NO: 115845 - DNA, 147 bp, Glycine max
  unsure (1)..(147): unsure at all n locations
tgggatccaagagaattattcacatcagtcagaataatttatttagtaggagaacttgtggtggctnttcaccttgtgaaaatatccttgggccaaccacagccacaatcggcgagtgtgattagtctctgatctagtggattgggg

SEQ ID NO: 115846 - DNA, 202 bp, Glycine max
ctcgagccgctcgagccgcgctgctcaaggtacacgcacccacacccacacccacatctgactctgctcacctgcaatggcgctgcagtgtaagtgtggcacccaccactctggcgtttcccaattcctactccatttctgcggaaagaggaagaagagaatggaattggagggtgaaatgcagcagcagcagtgcggagat

SEQ ID NO: 115847 - DNA, 250 bp, Glycine max
agttgagccttttccaattgcagaagttgaagctcgactttgtaagttggatgagatttcaactttgtcgtccatcaatctgacgcatgcatatagatctgaaaaatattcagtacaaaacagatcagagttggagaatttttcgcccaatactcacgggagtttctgttgctgctgcttctcaacctacccatgttgagaattcagcttttgttgatggttctgttgggcagtcaaacactttttcagt

SEQ ID NO: 115848 - DNA, 282 bp, Glycine max
ctaaaaacaaatggaaaaggtttagctggtttttcccaattcgagatacatgcagttaggaatggtatctccttcaaaacaatgatagacatattgggaaggaagtctcaactactactactacaaaggaaggaactcaaacaaggcaccaagtcatgtttctatttgagtagcttccaagagttattccttcccttttctctcttctctggtgtcttcacagaaacaaccaccccatcatgatggaaagtcctcctaaatgcaaactcacattcacattaa

SEQ ID NO: 115849 - DNA, 275 bp, Glycine max
atttgattcacttggatccaaaactactcaagatgattgatagtactttaattaaaattaagactgacatttttgtcaaacataaattacagaggaaataagtgccttctgatttttcttgtggtggggggtctacattagaggactttgaagaagcccatgccaagaattcgtgaaactgttccaacttgcaattgcttttcctgaatcaagttcaccaataatgttagtgtctgcattaattctgcatgggaaacccccccacaccctccttt

SEQ ID NO: 115850 - DNA, 275 bp, Glycine max
agcatcagtccatccatcaccctcccaaaccctagtaatggagatcttgccgtgtgactttctatctgtccttttctcaccgaagatttgagtacttatccttttcctatatattctccagagtttccttcttatacttctctttctctccttattggcggagagagaaaaagagagaggtagagaaaagcgaagagtctctctcttcctatctctctctttcaatgtcagggcacaaatcttccacctctacttcttcttcttcttccttctaa

SEQ ID NO: 115851 - DNA, 273 bp, Glycine max
ggttttggtctccgaggtttgtatcggaatccgatgtattatgcaaaagaagctgcgcatgtcgaccccattttcgtagcacatggctgccgctgataacaccaacccaaaggattattacaaagtgctggaggttgaatatgatgcaaccgatgaaaatatcaaattaaattaccgaagactcgcgttggttggtaacctacctttttattagtagcacaatttttcaaactggaaattttcttttctacaagtttgatttactaccgtgta

SEQ ID NO: 115852 - DNA, 281 bp, Glycine max
ggacaacctgttcaatagacatggaatttgccagattccccaaaatcaagaaactacaaggtaattgtgtgtcatggaagaataccattcttgggcaaggaatgttgaataggttgagaacaatagttacttcacgaagcctatagccaatgtttcaggtcaggcagccagaacatgtggtggcttcaatgttgtggaaaacatgttgtggttagtaaagcaacttacaacccagttaggattttgtcatcaactgcaattcaagcaatagattctttctt

SEQ ID NO: 115853 - DNA, 273 bp, Glycine max
tatcgagccgattcggctcgagatcttaatttgttttttggtgatcgtattgaatatatttggaaaaatagaaactgcacggattttcgaaaatagagtggcaggggtggtggagactctttgagcattgtgcagaataggaggcttcaattgtctccttcgatggttccttgtgagttcccaaatcctataaaatccgatgataataaccatgcaaaatggagataagtaaatccgtccttgttccggccagttgccatccctggccccaac

SEQ ID NO: 115854 - DNA, 270 bp, Glycine max
cgaacatggtaaaattatcataaatgctttgattgatatagtagacatcgtcatgaagaatttagaggctgatgttgttaaaagattggattttggtgatcttgaggctgcatatgagttttactattggtatgcaagaatcaatgggttttgtattcggaagagtaaaactgaaaaataaagtgtgaaataacacagcaaacctttgtttgttctagagaaggtcgaagagaagataggggattgacaagtgaaacaagaaagcgtgaa

SEQ ID NO: 115855 - DNA, 264 bp, Glycine max
gcgagcaccaccaccgcgaccggcgagcccagccaccgtgttcgacttcgaattgagtccgagaaggctgttagataggctttggacgtttaaacaattccgatcaagatccaattttgccttcccattttctcgtcgttttttttgtaacggtctttccatggcatatcccttctctgatttcaagtactcagatggcctcagtgtagtgggtatctccttctgcacagctattgtctgtgaggctatctcatgggttcttat

SEQ ID NO: 115856 - DNA, 264 bp, Glycine max
cttccccttctccttacttctcactctctttccaaaacactccatttctctttccccttacccttcttctgtgtgtgatgatgtagatagagaataaaaagagaccagtgtgcagtgagaaagaggttggtcacttcttgtgtggctttgttttgttctttgtgttggaatttgttgatgggtgaagagggagaagaggtgtcaagagataaggaacagcaacacatgggagtttatggaaatgagtggttgtttagtagtttc

SEQ ID NO: 115857 - DNA, 270 bp, Glycine max
tctcgagccgattcggctcgaggaaggaaggaatcgcaagtagtacgtcccgcaggtgcagacgacctgtcttcatagcaaaacaacctcaaaaacattcaacaacgttcactattaattcatcataaaataaaaacaagtttcgattttttatcttacgttttgtttctgatccattcatggaggtgccgagttcctgggatgctcttcgcaaacaggcgagaaaacttgaagctcagttggatgagcagatgaattcttatcgtaaat

SEQ ID NO: 115858 - DNA, 254 bp, Glycine max
atggcgtgcagaggctcggggagggagtgctgagggggccactgcagaagatggtggtttcgcgcgacggcaagtagctcgcgtcgttgactcacgacgggaggctcttggtgacgacttcggacttgactggagttatcatcgagagggagtgtgagtcagctcttcctccgcagcagattgcttggtgtggaacggatgctgtgctgctgtactgggatgatatgctttgaatgatgagtcctgagggagag

SEQ ID NO: 115859 - DNA, 255 bp, Glycine max
ccaaatctcagcactaaatcttagacatgaaactccgtatcacgttatgttccaagcttttagtatacttatggacttaaagcaatcaatcggttgacttcacgctcctacccctgttgatttttgtgatactgtattgtttagagagaaatcaatgtcattttttggtgatcaataaaatgataaaagcaaagcttcttctggactagtggcgctttcagtggaatcaagatttcctcacctgccctacagaag

SEQ ID NO: 115860 - DNA, 262 bp, Glycine max
ggttgctcgagctcgagccgctcgagccgctaccaccttgattcactcattgtggattgaacaagaaatttacattactttcgactggaaaccttcagtaagatggtttgcagaaagttcttcttgtttatagtgtgatttagtgatgttagataattcaagtgaaggattggtaggcccattagtatgacaccgggggggtgggtgtagtattttgttactccaatatggatgtttatctgagtgtccagatattgtctgt

SEQ ID NO: 115861 - DNA, 254 bp, Glycine max
cgcgagccgtgattccgccggacaacgcggcggaatccgccggaaatggaaatctccgggactcctccgagctcggggtcctctttccgactcagcagcgatgatgaccgacccttgacttaggttctcgtatcggagctggaacagatgatggtgatgctttaacaagggaaacagatccagaggtttcgtcctctagtagaattgctgccagaaagaagaaatatcgtacgagcagcatcaaagtgtttggg

SEQ ID NO: 115862 - DNA, 256 bp, Glycine max
aaaagccaaaaaaaggagtcacatcagtcagaagaagtgatttaataggagaacttgtgttggattctcaccttctgaaaagatccttgggccaactacagccagaatccgcgagtctgatgagtctctgatctagtggattcgggtcatccgtggtctctaacccaagataaaaggagaaccaagaaaattgtgcagcaatgagtcgttactcgttagtctaagtgacatgtggcacagatcggtcaagcaaggt

SEQ ID NO: 115863 - DNA, 254 bp, Glycine max
cgaattggtcagaattcataatcgagaaatcattctctcaatcagacgcaagcagcgaggtacttctcacccaattaaaaaaagagaccggaaataatgacaacgtggttcaatcttatcctattctcttgacatattcgaggttaagtacacacagcaagatgactcactaacaggtcacatacactaagtcaaagtggcatatatgctttaacttgcctctatgtgttgacaagcgaaatcaaactcattaa

SEQ ID NO: 115864 - DNA, 251 bp, Glycine max
aacgcccccacacacagcctcagaaccgcagcacacatatattctcaggtttgatctgctgccactggcgtcggatctgctccgtcacagatttctgccgcctgcgatcctctactcaaataggtacgacctctcttccttttttttctctgtataatgctccgacactcggttctagctgccataatcttcgaattccctcccagcaattgacactctgctgtggctttttcttgtttgcattcttagtc

SEQ ID NO: 115865 - DNA, 254 bp, Glycine max
agctcgtgctcaccagtcagcacgcaacgccccgtcattcccttcactgcgccaaccgtggttctcagcagcatcgccagccgctcttccccctcagcacgtcgtgaatccacgaatccgaactttggttgccatcgtcgtttgttcttgcaggttcacacgcaggagacgaggctctcgttgtgggttcccgtgataactgtcactggttagcgtgaacatccatggtttctcgtacgggcgctctccgtccg

SEQ ID NO: 115866 - DNA, 253 bp, Glycine max
tctcgagccgaatcggctcgagaaaaggctcttctcctgtaagtggtaagccacgccaaacctactgctcctagaggatcttcacttttaagcgataagccaagagaagcaactgctgctgccagtactgctagatctggaaaccgtgaagttaaggcttttgatgaatttgatcctcgtggtcctcctgtatcagctgccccagctcctgctaataatgttgaaatggacttgttcggctccctatcagagt

SEQ ID NO: 115867 - DNA, 246 bp, Glycine max
cccctctctctctctttctctctaaaaaacactattgggtttgattgtatttttttgttaaattattagtggctttgattgtgaaatttcatttttccattgttttgtttattgttaaagatggtatttgaaattgattccgattcatgaatcggatgtagctctgcttcagtctaggaatttagtaattaattttgaccgaggaaggatttccccaagcgtgaccacatcatttgtagttggaaa

SEQ ID NO: 115868 - DNA, 248 bp, Glycine max
catgggtccaagatttaacattctttattctttccaattttcatcacaaacacacacacactacagcacgaaaaaccgaagcaaagcaagcaaagcaagccaatcaagactcaccttcgtgttccaatcagaggatatagagagagaattatgagttggttgaataaaaataaaagtacttgtagtgatggtagtgccaataatgaatcttcttcaagtggaatagttggagaaagggataatcatct

SEQ ID NO: 115869 - DNA, 181 bp, Glycine max
ttaatggtgtgaggcaattgctttggttgctacatcattggggtttcttgaaacatagagtttgggaattttcggtttaaattgtttgcctgagttggctactagtgtgtggttgtacagtgtgctgttcttcttgatgcaagaacggagcagcttggacaagattggcacgaacgcagag

SEQ ID NO: 115870 - DNA, 276 bp, Glycine max
ggttgctactggatgatgcctaatttacacagtttttcgttttgcgcagagttgatcgaaatcctttttcttcggttatgttgaatttcaacagagttttgatttaggactcgagaaaattcttcggttattttcctttttttttctcctttttcctttttgttaaattgttttccttgtgctgaaatgttagggttggaatatcaatatagattggaatacgacggtagaagttaatagcgaggtttttcatctttattgtccaaatcttcgtag

SEQ ID NO: 115871 - DNA, 278 bp, Glycine max
tagttagatggttaagatacatcattgtactttagtgatttcaaagagtggtacaaaagatagttgttgtcgttgttgttgtggttgtctttatacacgtaggagacttgggccagtccttcatcactctctacgcagctctttttattttctactttcctttttctcttagcttagcacaccatatcactgaggttgcttaaatgcaaaactggctcttatttgttgcatacttgacaaaccgatggaattcccattgaaattatcacgcttgttat

SEQ ID NO: 115872 - DNA, 275 bp, Glycine max
ctggaaattaaaattgggaacctggcttgttgttttttcctcccattctctgattggattgcgagggagggagggaattgatttaatcaggaaattttgttgctggaagaattgcttaagggcatatagctggttttgtgcacatgggatcagagagtgtggctccactgagtgagacctcgaaaaacaggtcttcttctggtaaaatgaaccaagggaaagtccccaggacaaattcacaaggctgagagggagaaaatgaagcgtggacattt

SEQ ID NO: 115873 - DNA, 149 bp, Glycine max
cagtttccaagaaatcctagatgctagctacaaatttgatgagaagctacttcttggtgtcggtggttttggacgggtttataacggcacgcttgccgctgggagcaatgtagctgttaccaggggcaacgccgcgctccgcgcaaggc

SEQ ID NO: 115874 - DNA, 272 bp, Glycine max
  unsure (1)..(272): unsure at all n locations
tgagtggtgatggtatccctcctctaggngggagacaataaattgttgattgatgccattacagcccaaatgcaaagaatgttgacagaacataccgaagagctgtatggcgtaattgaacaactagacaatcaagaaaatggcgatgatggtagaggtagaaggaggagatggaaaaataatgcaggtgatgctagagaggacagaattgaaggagtacagctaaacagacccccttttcaaggaaagagtgcaccagaagcatatttgga

SEQ ID NO: 115875 - DNA, 297 bp, Glycine max
ttataatagaacgcggaagaagaagaagaagtaaccgacgcttgaataaaccgaaccgttcttcgattcgggttcaagttcgaagaagaaaagcgatgagttcgggtagtagcagctgtgcggaagctcctccaggaggatccctcgctcgtcaaggccagagactacgacgtcgccacctgtctcatcgagttcggcgccgacgtcaacgcgcaagatcgctggaaaaacacccctctggcggatgcggagggagctaagaagagtaatgtgatcgagcttttgcaatcgcatggt

SEQ ID NO: 115876 - DNA, 287 bp, Glycine max
tgtacaatactccaataatttccatcatcatggcaacacgtggatcaaccggattggaagcctataacacaagcacaaggagtagagcaaaagcaaagaagttgttctttgttaaaactcacatcaagccaagtggagaggctaaagaagaagactaatgatgaaagtccaaaagaattaggggtaagaccttatagcagatttgaagctattgctgctcatatatggagatgtgcatctaaggctcgtgctgaatattcaaattcaaatcacccaactatagttcg

SEQ ID NO: 115877 - DNA, 283 bp, Glycine max
gtatgacatctcgaggtagctgagttgttgcttctaagttgagctggcagatagagcaacaactcacttaaccccgaagagtatgacatctcgaggtagctgaatttgcttcacgggcacggaagatgacactaggtagaattttagcggtggaagaagctagtgtggaatatcagtattctgtttttgtttttacttaaaaaaaaaaaagaaatttcttttgtaaagtactgggattgacctgaatatgttaaattactttgttcccctgtgaaactgattt

SEQ ID NO: 115878 - DNA, 279 bp, Glycine max
cataatgctcgccaggcagagaaagagataatttcttctgtagtttttactgtgtgctatgatgttttctctgggtttgcacacttcaatcgcacaactcaacaatcattggacacagcttcacgctcatacttgcttcgttgtcagggtttgctaagtatttgtctgcaatatcactgggctgcttatgacaattcaggtgaatcactaaatactgtggatcatgcttcatttgacaaccatacatcatatatgggaagtataaatggacccaagtta

SEQ ID NO: 115879 - DNA, 279 bp, Glycine max
  unsure (1)..(279): unsure at all n locations
ttcaagtatatggtagaaagcataatatgactgganatgaagagtatttcatctcagatgattcagatcatgtttctaatagctctgatgccagtagtatctctgatacagacagtgtttcacctgatgacaaccaagatgattatgcttataaagatattaatataatgcactcaggaaacacagacgattttttaacaggaagagaattatctgttgatttcctgganaatgatgttgatgcctttcagagtgtggataactcagatgttacctgtg

SEQ ID NO: 115880 - DNA, 273 bp, Glycine max
  unsure (1)..(273): unsure at all n locations
tattanatccanagtggaattgttatctgctgactcatattctctctctctgtctctctctccaaactaaactagactttcctctgcttcagtttgccgacaagaaccgtcagtttgttgaatctgcttctttttatttcaatttgggattgactcatatgacaagtatgtatagtggtggttacactgctctagttacaaacttatcnccaagagcaacagaggatgatgtgcgcaattttttcacatactgtggtttgattgagcatattg

SEQ ID NO: 115881 - DNA, 305 bp, Glycine max
cagaatacaaaaccctaaaactaccaacgtcacccaaccaccacaacctcccttaatagccgccgcaccaccataaccaccaactccccacccgcgaccaacctccgaccactaccgccgcgccgcatcgtctccgacgccaaccagaaccatctcatccacccttcatccggcatcttcattcttaggaactttggcttcgagcatttataaaggtgcagagacagaacattaaagctgctggtgctttgattctgctatggaacactgaggcaaagctcagcatcttaaaccctgtaactgtg

SEQ ID NO: 115882 - DNA, 304 bp, Glycine max
agatctttatgtgggcctcatttgattttaattttttgaagtttcattttccccctttgtcggcggtcatagagatgagcaagccgtgcattataacagtaaaaaaaaacccaaatttgtgaactttgggcaaactaatttttgtaatttaatggtgaggtattgggtgatatttgaaaggtagagggagtggaaataggttgatacttaatagaagatttatctatagcataatagaaggattttattgtcaaccttaagatgctgcataagaagaatcatcatcatttgatctttcagacca

SEQ ID NO: 115883 - DNA, 296 bp, Glycine max
cagacaaaagcctcattgaagttgagcatagcaggagtgatgctttaaatggattatcagattctaagtctgccacaaatgccagggaagattccaatcagaagaataagaaatttggcactacaaaggatgactacctcaaagatgctggtgttgaacctggaataagaaaccatcaaaagtcaggcaccactttagacagtgaagttaatggcattagtacagagacaaggggctctggatagacagaaaactggctggagaaaaacttccatgaagttgagcctatagttaag

SEQ ID NO: 115884 - DNA, 295 bp, Glycine max
cgtttttgtatatatatgtttttctaaaatgggtctgtgctttacgattagtataaattacagaatttcttaaataatttagctcatcaatacacgtacatgctgtatgcatgaatttggttatttggacttttgaaaatttagctcccactatctttggtgaacacatgtaactttgtggaatagcaaattggacagagatttgccaactaatgcgttttgtaaaatcagttactgaagttttcgtagtagcactggttttgattaagaccatggaattgattcctgtaggtgt

SEQ ID NO: 115885 - DNA, 197 bp, Glycine max
ccatctcatcccaggcgctcccgcaaagcacaccctccgtctctctcactcaagttccagactcctcctgggaagaatattctttttggtcactcaccacctcaagtctccgtcttctcttgaaaatcaccagcaaatcataaatggcaggaaacgattggtcgtacagctaccttgaagcggtacttgacgtcggg

SEQ ID NO: 115886 - DNA, 108 bp, Glycine max
attaaaataccaccaaaaaggaaggaataacgatcggaagttaattggagtgctgcgataaataaagttcccgatgctggcttatgtaaatcgcaagggaaccaacaa

SEQ ID NO: 115887 - DNA, 276 bp, Glycine max
  unsure (1)..(276): unsure at all n locations
tagacaataaaatggttaagttagttattnttaattaatgatatcataactttaaattttatttcaaaaatacgcatggaattaattggtttaagtgatagttgtatttaatgacactactcatttntcatggggtagctttttcaccaatgagtaagacttatctcattaatagtccttataatanataaggtatagaaggagattaacatttaatgcacttannagtgatcatatgtgtcctatatttaggggacaaaaaatatctccattgtt

SEQ ID NO: 115888 - DNA, 260 bp, Glycine max
  unsure (1)..(260): unsure at all n locations
cgcaggatatcatatgattgtttagagtataaaaaagtaatgcctgcccaatagaattgaaatctgtaaatgttgcagagagcattagccaatgaatcatatacatttctttatataggttaatccaattgcttacttgtcttcggtgatatntatgnttattcaagtgctctggaaaacttggattnttaataaccaagatatctgcttgcagcttgggacaccatgagcacgagactacagtgctgtcatatactcgt

SEQ ID NO: 115889 - DNA, 287 bp, Glycine max
ttgaggctttgattatgtctttccaatctctgtggctaagaagcttcggcagctccaatctcttgatatgaagcgctgtgtcataaagaatattgttgaagaaagtgatagttctgatatgacgaatatttaccttgcacagttatcagtagatagctgtgataatatgaataccatagtccagccctccgtgctatttcagaatttagatgaattggtgggtaacgaggctcacaagctttgccggggaattacacttctactttcatcactaggatggtacattg

SEQ ID NO: 115890 - DNA, 299 bp, Glycine max
  unsure (1)..(299): unsure at all n locations
tgtcgagccgttccggtcgcgctgctttggaccatgtcggcttccatttacctcacgttgcagcaactaggaagcttggttcgtaaccactcttggaagatgattatgaagagcatataccaggaatttctgcagcacaattagctgatcttcgaacggtgcttcgtgaaaatgacttgagggttttgcagcttgagttggaatgcatttcagtagtgccannagcagattgtcgtatagttnaatactgttcagagttggaagctgagtaattgattctttgagagccatgttccact

SEQ ID NO: 115891 - DNA, 331 bp, Glycine max
  unsure (1)..(331): unsure at all n locations
atatcgcgtcccagaaacgctagaggaaccctgattcaatcgattcgctgttgccttcgaatttcgttccttggaagattagggagcaatggcaattgcagccccagggcatctgaacgtgaatgaatcacccattggggatctagangctgtgattgcttcgagaaattggagcaattggcgagggacatatggtaagttacatggcanagagatcaagctgtgaattgtgctcgaagaatacgatgacatgagagaagggttctatactgcatagagaatcaaatctaagaactaacagaaatggtcagctgagaatgtgctgatcagc

SEQ ID NO: 115892 - DNA, 219 bp, Glycine max
acccttttttttaattccagttaaatcccttatcacattcacaaatatacataaaggggggattcacgaagatttaattactaaatgaataacttacccatgaatcatttccccggggtatgtttcaagttcccttatataattaatgcaaattgggatttgattataggatatgtttccaaaaagattcaacgtactttttatgggtatacgataagg

SEQ ID NO: 115893 - DNA, 261 bp, Glycine max
  unsure (1)..(261): unsure at all n locations
gtctaccataagttacaaataataaaaaattacaaaatcatgaaaatatatgggtcctagatcttatttntgtgatatctaaaaaatttcaagcaataaaacaaatgtattgaaaagagtgtataagataaatgtgtgttagcattctatatagactatgttaagagcaaggtctgatgcatacgtggctagtctttatattagtattgagaatacagtagctgaagtcccttggcntcatctatatcatttgggagggga

SEQ ID NO: 115894 - DNA, 316 bp, Glycine max
  unsure (1)..(316): unsure at all n locations
tgagtncctcacctctctctccgaaatcctcaaattgcctgtgaatgctagaaaccctaggcacgttcgatttgatgctctcccatttgcaatcaagggcgagcgcattcggttcttgcacgcaggctggtactacgctgcatcggctcgatccctgaatcatcattcttctcgcccatctgttctattccgatacgattgtgtagtcgtgttgtgtgtgtttagtatctcctgacgatcatcagagtgatagcacagagaaagcaatcagagcgagagtgtgaaacacatgtctgngacggggccatagatgtgt

SEQ ID NO: 115895 - DNA, 260 bp, Glycine max
  unsure (1)..(260): unsure at all n locations
tcggaatcggtcgagtgccttgtaagaagtatgggtgaaattttattttcatgcggaagtaatagaagggctgtgattgcaactttgagcatttccgagaatgacattcagcgttttgaagggatttcagaagttgaggttgttacaanatcacttcaaggtctttccattgaatctgccttggatctgcaaaaagttcttagagttgaaacatgcacatcacaaaacaactgctttgcaaaggcttgaagcaaatcttc

SEQ ID NO: 115896 - DNA, 293 bp, Glycine max
  unsure (1)..(293): unsure at all n locations
gttagctataggggacttatgtgaggataatgtctgtgaatccctatagttctctatatgtgaaatgtgatggttgtgtcggaaagaacagtcagctagaattaagatacacatgtggcaaggtatattggatanaatcatcaaactgatttgcctaacaatgagaatatatacttatagattcaacaanacattagatnatatatgtttacttannatacttcgataanaattaacactacanatagntactttggagtatgcgtgccatttcgcatctgggttatgtctgt

SEQ ID NO: 115897 - DNA, 233 bp, Glycine max
  unsure (1)..(233): unsure at all n locations
gaacaacgcatcgcttcggattatctagatctaaagaactagtcaaaacaanaaaaaatataaaaaaagatatattatagcaactgaactattgtgaagcatnaagaacaaaatcttatagttgaagcataaaatatcagtaatgagggtgaaacagggacaaatcatgttgatctatagaagctaggtaccataagtatgatactcactacatcaacataaagatataacga

SEQ ID NO: 115898 - DNA, 147 bp, Glycine max
cggctctaagctgcatagtgagctcaacaagcgatccattgactatcttatgactgatctcctgatcatgtcatactcacatgcggatggtgcctatatgtatccctacgaacgcattactatagctactgactcatgtacaccatc

SEQ ID NO: 115899 - DNA, 297 bp, Glycine max
atggcaagctctcacaatactgatataacggctaatacgcttagcccatctaccaactgggctataggctactgctagcgcttctgaaaatacggcatccgctgcataatctgccattcgaatgcactatcgcagctgcgatcctttaacacactcgaggatattctgcacgaacctctcgagaatgatgctctgccgatactgagaatttccacacctcttaagaatgagtcgtaatgatctgtgaagtgagtctgattttacaaaatttccatgtgatgtactagtatccacacc

SEQ ID NO: 115900 - DNA, 184 bp, Glycine max
  unsure (1)..(184): unsure at all n locations
agcgattcttgcttcaagttccagagatgggtgtgcgtcatttcattcccgatgcggaggagggtgacagtttattngaatggatacagaactgtttctggttttctgggcatggtcttcttgataagtagggaccagtttcagagattgtaactcgcttaggtggatatcggcgtgcagtcag

SEQ ID NO: 115901 - DNA, 341 bp, Glycine max
aatcaaatgatcctacagttggattaggagaagcaactgcagtggttcaacacaccactgtgcatcagctacgcttcatcagtgatgatacgatagactgatgcacacgaatcagtatgtacgcagatcactcctagatcttcaatacacattactacggcaatacgtacatctctaactaagctctctgcaacagagatttgaattctgtgcgtgactaatcgaatgatgagtacccatgtcgttcgtcatgtttcagaatgcttcgtcaagccacattgtcccggccaagagtcagaccaaatatgcaacttaacaccttgggatattgctatgctgtc

SEQ ID NO: 115902 - DNA, 158 bp, Glycine max
cgaaaaaatgttatcgagtggtgggtctaaggagtgaagatttgagttcggttgtatgtggagaaaattggttaaaggaggacaatccacttaccaatacattcaaatgtctacaatgaattaaatagtgtagataaacaatcgaaaacattcctgca

SEQ ID NO: 115903 - DNA, 283 bp, Glycine max
  unsure (1)..(283): unsure at all n locations
caactccaagaagtccacggtcgatgtcgagctctccagcctcggtggcggcatgaacatctcccgtcatcatgcccgtatcttctacgactacgcccgncgtcgcttcgccctcgaggtcctcggcaaaaacggctgcctcgtagagggcgtcctccatctccccggcataccccccgtcaagctcgattctcaagatctcctccagattggggacaaggacttctacttactcctgctcgttcgcagcatccttattcggcccgtcggtacgaggcattag

SEQ ID NO: 115904 - DNA, 319 bp, Glycine max
ctagtcctgagtgtccatggcacatagagcaccgtatgcatgagttagacttactagcaaatctacttatctatagtctgacatgtcattttcgagtgcgatgactcagtgtgatcctaaactatttggataatttcaagcaggatcccaagctatttgtgttatcatcatttcactatgagagttgacaatgagcagatagtttacggactaatgtagcttagagcatctaatttacttacacatgcctatatcatggttctatcagaagatgtatctacaactaccattgcaggtgtggatactctgtaatgactgt

SEQ ID NO: 115905 - DNA, 245 bp, Glycine max
ctggatccaaaataaggaagcatcatcacagggaagaggggggtgttgaagaaagtagaagcagcaagcaagccgcaattttgctctgaacctacattgcgatcatccatgattgatataatcctgcttcatagtttaggggatggcaagaagcattttatggcccgccgtgaggccttgcaaaccaagaatgagaagatagtggtgtcaaatggtaaatcaaaggcttccaatggtggcaaggg

SEQ ID NO: 115906 - DNA, 211 bp, Glycine max
catgaactcaacctggacaccacatgctatactgtgttgctgcgccaacaacactgaactcaaactcattgtgttgtgagtcgtgaacatggcgcttacactatcgagttgcacttccttatcctccgtgctgtactccacagttaaattccgctactcactcagacccagacccatcgtcggctcttaccattgcaataatcacccactc

SEQ ID NO: 115907 - DNA, 156 bp, Glycine max
ctaaaacacatccgctttcatggtcacttcgggttaatatcccactcccatcagcaaggaaagcatcgatgctcccttcaccaagttgccttaatactctgaaatcatagaacacgtccttaaacacctttcaggtgatgtttccttccacacaac

SEQ ID NO: 115908 - DNA, 252 bp, Glycine max
ttaaaggccttattcgccatcgcgcttcatcctcttaaccgatctactatgattaatcttggcgcggttcccggcttttttcgttggttgccaaggacggtagggttgggattgtggaggacgccaccgccgtcatcgcgcaggtcgccggttgcgaagacgccgccgaggccttttttaaggcctccggagtcggcgtcctcgctgacctcctcgaccttgccaccgccgccagcatgcggactaaagaga

SEQ ID NO: 115909 - DNA, 119 bp, Glycine max
acgggctcgagccgattcagcacgagccaagatgcagatgattcactttcttaacctcaaagcacttgtctcgatcacttcccatgactacagtcaatggtgactgtgtagtcagacct

SEQ ID NO: 115910 - DNA, 133 bp, Glycine max
ctatgctggaaaagcttggggtcaccatgaaatctgtggagcagggcctcatatgggaaacattaatataaacgtgtcatatacacctagctgccagtaaatagtgctcacatggaaatgatgatatgtcatc

SEQ ID NO: 115911 - DNA, 228 bp, Glycine max
gttttaatgcttctggactgacaatgtcatgggatacgagtggcattagacgtgtggtacaagccataatcaatgtgctgacgtgcaatgtacaagaccaaatgggtgcgctggcgtgctacataagggtgctaccaccaaattgagctcaccaaagctgcttgattattgacttggagaactgagaggacacatggtctctggtggaatggttgttcatagccaatg

SEQ ID NO: 115912 - DNA, 247 bp, Glycine max
caaaatgtcattttacacgagaaaagcaggagtgaaagagagtgtgtgagagagaaatatgataatgcttgccccatggaccttcaacattttaagaggagattgaccatgggagcaagagatcgatatatatatatatagtccacatcatatccattctttgatatgcttgaagggccattcagtttgttcatagttccatagcgatcaagctcctaataaatagagatctctgggtggctgttgc

SEQ ID NO: 115913 - DNA, 271 bp, Glycine max
gctaatcagaaaacaaacggcagcagaactgcattggacaagggaatgaatgtaaattgcaagacaaaggtgcaacaagaggaagatgtgaaagtgcagtcttcaattactgataatgttgttgtgaaaacaatggtaccaccaggagttgacaacctaaaaccaccctatacattaacaagaagcagatcttcgaggcaatcgcgggacttagacctcaaccctgaagctctattgaatcctccacagtcctatgcttcactgctgcttg

SEQ ID NO: 115914 - DNA, 261 bp, Glycine max
cgcaaacacttgttccggtgtccctctctctttcgcttcatcttcaacattaggtcttctctgactctgtggttgtcactgttcaacgtctttggatttattgcctggccttgaggtaatcagcttaccaacatgggaacacaaccccagcaaacatttcgggaggaagaggaggaggagatgcaaggccatggaactacgatgtcaggtcaatcaatgtcaacaagcagaagtgtcgggtctccatccagccggagtgag

SEQ ID NO: 115915 - DNA, 258 bp, Glycine max
tagatgtcagcttcagtggtagtatgcagaaaattctcgcacatagcaccattcaggcaagtttctacttcctgaaatacattatgtaggaatatgatggggtcttcaatgtcacacattttatgttttgaaaatctatagtgatagcatgatggtatattatcacatattttaagtcttaacaaagtattctgtattctgtatgcttgaaatttgttttatatccaggtgaaaacttatcgtatcaattccgatgga

SEQ ID NO: 115916 - DNA, 195 bp, Glycine max
tgaaaaacaatggatggcttgtgttatatttatgatgatgagtagtattatataataatttatgggagcagaaagacaagacaaaacaagagagaatgagtggcggaggaggaggagaagaggaagcaactctggagttcactcacgacgtggaattgtggtacgccgtttgcacagtcatcgtcgccatatctc

SEQ ID NO: 115917 - DNA, 212 bp, Glycine max
gtggaattcagttctatgcagcttaattggcaaaaggtttcatcttctgattatcaaaatatatatatatttttctactattagaatccttaagttttatccttagcaaagcgttgataacttgtgctcctaaccaagagtttttgtttggtttagttgtttatggtgtccatgtaatatgacaataaaattatgtatgcgattgtcatttc

SEQ ID NO: 115918 - DNA, 236 bp, Glycine max
actcgagccgattcggctcgaggtgcccactaagctcaatggactacccttttcttattcttctcctcagatacgtgccacaccttttgcccggcttccggtgctgatggttggggcacaagtgtcgtggacgccgttgcatagtgctactgcctcttgcatgttcacttctctgctttctcggcataacactagctgaggtggtctttcagaaggtgtttcaacactctataaca

SEQ ID NO: 115919 - DNA, 131 bp, Glycine max
  unsure (1)..(131): unsure at all n locations
tgcaacccgagttcgtcgccttaagcttttgggtgttngggtcacggtggagctttgatggtgcagtaggaggctctctactcttgttactagtagcagtgtgtagtggatgcggggtacccggcttgtcg

SEQ ID NO: 115920 - DNA, 237 bp, Glycine max
ggcgtacaggagaaggcaaggtatatccaagtcttccaccttcaaggaagaatttcatgatccatcattggaagatgacaatgcttctccttcaatcttctcatcttcttcaacaccaccaccatcacctctcgctgctcaagccatcaaagctgctgcttctcgtcgtgaaccttctctttcctttgcttttgcccccgccgagtttgaccatcaaagatccaagactttggggct

SEQ ID NO: 115921 - DNA, 232 bp, Glycine max
  unsure (1)..(232): unsure at all n locations
atcactatggattcccattcacacatnatnccctcaacgacgtccacatnaatggnggngaaagtaccgtgtccgtcgcaaaaccctagagcggagaacaatctgggcaaggtggagccccgacttgaggcgttcctctcactctcccacgtggcttctctcaccctcgatctctccttcgagaggctcctccaatcgatcccctccgactccgactacgatctcatcgatc

SEQ ID NO: 115922 - DNA, 167 bp, Glycine max
gtggaggactgcagatctaaattttatgataaagaacttttctatctctttggacaattttaagagtggacgtttgcacactttgattaccattgcattcagtcatgtagatacctaggctatagtttccaacatgattggactctacttctttggacatgaatatt

SEQ ID NO: 115923 - DNA, 241 bp, Glycine max
tacgaacttaaagtattcatattcatttgttaattaaagtcacgtgttcttattcttgcattaggacagaaatatttgtaaagtttgacattgtgaggtctttttttttttctccctttgaaatacatacattagaattaaaataaaatgatttcatacaaatgcgacgtgcatgcagattggtacatctgttcgtaccactggagtggatcatgcattagagagtattcataatatcaag

SEQ ID NO: 115924 - DNA, 196 bp, Glycine max
  unsure (1)..(196): unsure at all n locations
cctagttcgcgttctcgtcacacacgaatgcttctttgaccatggcttccacacaacatacgaggcagcttcntcgcgcanntcattgccatgagcatccttgaggtatttctacaggcgtacctatatgtattggcaaatggcagcccatgttcatctgcaacacactggaaaagaactccgcaaggatggtttt

SEQ ID NO: 115925 - DNA, 177 bp, Glycine max
  unsure (1)..(177): unsure at all n locations
gacgctttgccgcgcggtttcatttcaccgcagcaacttggtgactccattcccatcaccgcaaccacatactactacgtttctgtcttcgttccattctctacctcttgtgagtgcaatcaatccgtntacattgttatatattgcacacacctgagaccgatacttaggtttaga

SEQ ID NO: 115926 - DNA, 103 bp, Glycine max
gaataagtatgtacagcagacaccgttgcctcagtcatacttaactttttgggttacttgcaatcttgttggagtatctagagagaatggtacctaagatagt

SEQ ID NO: 115927 - DNA, 220 bp, Glycine max
gtcgaaccgtaacggcgtccaaaggggaagcgccaagttcgatcgcccgctcaagccccgcccccgcccctcttccccctctccgggatccgcccttcgccgccccaacgccgccgccagaaacggcgacgccgtacctggaagagttcgagtggctgtaagattgagaccacagaatgctgaagaaatgatagcagatgctgattttgctgactgtgtt

SEQ ID NO: 115928 - DNA, 220 bp, Glycine max
ggcctctgttttcaaaggaaacccttgttcttttccttgcctttctttcttagcactgtcttccaactcccaactcatataattttattttccctagtcttttttgttttcactctttccttgtgtaatctgcaaaaccagctattcagtttagttatcaaaccatgccgaagctcttacattatttttatatataagtaggcaccaaatacacatttat

SEQ ID NO: 115929 - DNA, 223 bp, Glycine max
gcacgttttccaaattcaataaaaaatcaaaaaaaaaacaacaagggttccaagtctcgacgatttcaactctctcagaaggtggatgacgataatttcattgataaaatcaaacgaagagagctcatactggaaagtggagaattagcaaccattggtgccatcttcaactttagaggcaaaaagccagattatcttggagtgcagaaaaatcaaccggcat

SEQ ID NO: 115930 - DNA, 189 bp, Glycine max
tccaaggtccttcccttccttcctgccgattcccaggggcgctagcctccaacggcattagacttcacaccacagtcaccacacctgttcttccagggcaattctcgaggttactacacttagttcgagttctcaaacgacactgctagatcaagaccaatgttcgtgctggtcggttactccttcagc

SEQ ID NO: 115931 - DNA, 149 bp, Glycine max
tgatgtctgcattttgttatagaatttgaagaatttagaagaagttaaagtctctggttctaaaaacttgaaggagcttccaaacctttcagaagatacaaatcttgaagtattggatatcagcgcttgtcctcagttggctagtgtga

SEQ ID NO: 115932 - DNA, 238 bp, Glycine max
gagaaaagttagggttcacaacttttccggatccttttgcttgcgtatctgaatcacataatcaatcatccattcattattcatcatgacatcagcgataaaaatcacgctgaagagttcgtacaacgatgcaagagttggaacttaggccgtagtgctggtgtcgcaaacactaaagcacataatcgatgacaactgcgccgacagcggcatgccactgctgttcgagacgagcaaa

SEQ ID NO: 115933 - DNA, 220 bp, Glycine max
cattttcatatttggaaattcttattcttcttcattcttgcaatggcctcaagcaaagcattcatcacagctttcttcctgcttgctctgaccatgtcaagcatgagcatgagcctagcagctcgtcatcttatgcaaacaagtactggaccaaatttgcctaaaccaacattgccaccttggccttcacttccaattcggcctcaggccatggttcccc

SEQ ID NO: 115934 - DNA, 214 bp, Glycine max
ggactgtggggcaacaggggttttcaacaaggaaacaagcgatgagtaaagatgtgtgcgtgagagggaggttgcaattggtttcaggagttttattataagtttttacaaggggattatgcttggtttggttcatagtcaagggggtgcacaattgggcaattggtaatttgctttcggctttttggttacaaaatgtttttgtcatattatc

SEQ ID NO: 115935 - DNA, 256 bp, Glycine max
gcggcatctctacatatcattcagaacatgagaagcctgatgctgcttatgtgatggagaggaggattcaaatagatttggatagttctgaccaggattggcagggcaatagacatgagagactgagcaaacagagttgtgataaagagatctcaattcgagaagatgccgaagaagtccctgtggtaaaaccaagatctatgcggcgaaggcactcaagatcacgaccacctggttcatatgatgcctctaatga

SEQ ID NO: 115936 - DNA, 249 bp, Glycine max
gtagttaccttcgccctcgctgtcttcgtgccactcattctcgccggagcttcctccgccagggagctccggccgtcggaccacggctccaccttccagacactctcgccggcgggggcgcattcctcgccggagatgcgatccttcttcaacagcgccgactcctcgcagtcgatgtcctcctcctccgacgtggcgcttcccagggccatggactccggcgacgcctcgccgccggagtggtggaaa

SEQ ID NO: 115937 - DNA, 255 bp, Glycine max
gtccaccccaaaaacactctccgctgattgacacccatttgcaggccaaagccatacaagagaaagagagttctgttactgtgcctgtgaagagaacccacaaagagaagccccaaaggcactgtttgaaattggaaaggagggaacttggtgatcataatgataagggcatggtcgaggatgctaaggttgtaaaaggaaaacctaggaatcctcatttggagaaacatgatgttgttgttgttgctgctgctg

SEQ ID NO: 115938 - DNA, 174 bp, Glycine max
gaatattctagaattgttatatatagtaattctagagtggtaatgtatggtgatgattttgaggttgatgtgtgtaaagagaaaaagggcaatcacaagttctcttttgtgaaaaaaaaaaaaaaaaaaaaaaaaaagggggccccccgctacgggcccccccccccccgggat

SEQ ID NO: 115939 - DNA, 232 bp, Glycine max
  unsure (1)..(232): unsure at all n locations
caataatttactttgattctgatgcagacaaaatggaatgtttatgaccaagatttgagtccagtcagttccaatcaaaaacctatgttcttttttttcttacttttggggtgtcattacctttcatgctccacattcaacagtgaccanccacttaatgtaccatcttcttcattcactgccaactccactttctctcagtgcatgcatgtaatatagtattcagtttttg

SEQ ID NO: 115940 - DNA, 228 bp, Glycine max
cctaccataaattctagattctctattgctcaaagaaatctatttatgccctcaaactcaattaccacatcgatcttcttccctcttccctcggatctgatgcaaaactgtcaaaaaatggagtcttttcatcgatttagattgtgggtattcgtttttctgtgcttaatgtttcaatcgggaaatgggttttacctccccggtagttaccctcacaagtatggcatt

SEQ ID NO: 115941 - DNA, 178 bp, Glycine max
gtaaacgatccaaactcttttttcatttgcagcatcaaaatgagttgtagcaacgatggtagcggcagctggagctctaggtttttgaaggtggctagtgcagctgccgctacagccgccgttgccggctggttatatgccattctttcatcctcaacctctgctagctctgagatgg

SEQ ID NO: 115942 - DNA, 235 bp, Glycine max
tggcaatcttgatggtattttggaggcaaatgctttctggattgatgcaaatcaagagaaagctgaagatgttttgttagggaaaggtcttctctctaagtggggaaggaagtcctttgcgcttgatgaaagtcgtcgtgcatcttacaatatgtccaatcaaccaattgtttaaccagattcaatatttatgacctttgagagaggaatgaagcatctggttactgttggactt

SEQ ID NO: 115943 - DNA, 238 bp, Glycine max
aggggccataatggataaagcttctactcctgcagtaacttagtggaagcatctacatggaacaagtccatgtgaagctaggggaagaattgtacttcactgtttgtacacaacacattcctattggaacaactccacaggatgcgaggactgagactggaagtccccgtggcattcatcacaagcagggagatcaaatggttattcatatcgccacagatcttcggccacggacaat

SEQ ID NO: 115944 - DNA, 237 bp, Glycine max
actcgaaccgaatgcgactcgagctatcagagagacttcataagctgatcatgaacctcatgcccagtttacacatgagcagaggaaactaattatgacatacgaggtgattgaacaaacatatggctatatctcaagttgtagcctcaattttttgacttggtttcaaatattggatggtggagatgtctgttcaacatgaaaattctgatgccaatggtgtatcaggatcaggat

SEQ ID NO: 115945 - DNA, 99 bp, Glycine max
atacggcctcgttaccatggtcaacaagaatgaaaattgcagctggagctacaaagggtctagcctttctacatgaagcaaagactcagtcatctatag

SEQ ID NO: 115946 - DNA, 226 bp, Glycine max
gttatgggcatggattctgtacgtgaggtgtatgcgtctgcagatgcagttgaagatcacctacaaccatctcctcagaaatcgacttcgaattcatctgttccgcagccctcatcgtctctgttgctatctctggctctactctaatcgtctccttcgtcgtctctatgtgaatctcttacttcaacgtcgcagccttcgagcgctcgtgctactattccgaagg

SEQ ID NO: 115947 - DNA, 219 bp, Glycine max
aaaggatcagtataacaagtttcgttttagataaaaattccatgcttattcatccacttccatttgaatttatgacagatcatgtgtttgtatggtatgatggacgaatttgcaagcagataatggaactagttaagagaggagagccattagcagtggtgatccaaagcttagatttaaattcttcattcaaacccgacataaccaggaagcagtgaa

SEQ ID NO: 115948 - DNA, 221 bp, Glycine max
cacaggccaagcataaacaagttggaatctctcagatgagttgctttataacctcatactcatagcttctgcagtgagttatggcagaaaacaaagacgaaatctattctgaatgttcaccaggctcaaactctccaagggtagcaagtgtagatacttgtttcatagattatgcggttgtgacacttcatggaacaaaaacagctccccaaagagtcgaa

SEQ ID NO: 115949 - DNA, 220 bp, Glycine max
atttatattaatctatttccaccccacaatattaaatatttgagtattcaaaatcttatgacttttggtatttgtattatttaaattcaaatttccttttatcttttttttttcttcctggttagcttgctagtactcatttaaattgtgaaataatgctcattgtatgaactgtgaacttcttccttgtattttaatattttcttctgaagaatgtaga

SEQ ID NO: 115950 - DNA, 130 bp, Glycine max
tgtactacgctggtgccgaaacccttccggaaccctaaggtatgtgagtaatcagtggttgagattggttgagaagacgatgggtagaaaggagtatatggttactcgtgagtacaccattaacctccac

SEQ ID NO: 115951 - DNA, 223 bp, Glycine max
caaatctaatcattagtcaacatttttgcaatattagttggatgtattacagagaataacatgtcttccattgaggcacgttcaactgaaatatatgttatggagaagaggcagaaagacaagttgaagagactgacgaggaaagagtacgaagcggtaaggtgagtactgacaagacaaaggagattagttctagtgtgggacagaacaaggtacataccag

SEQ ID NO: 115952 - DNA, 264 bp, Glycine max
gtaacttggggagatggtcgtgccaagatactcaaacaagggacgatctgtgtgcactcgttatcccttggaggacagcgtactggctacggaggttctcatgtccaaacaacgaggtatctactttgggcaagatctgatgatgctaactcaacgctggtagcccgagaaattgctagcaggacactgatcgaccgacctattcattctgtgcatcaagaagggatcaaatctggcgctcgagattggacttatgaattcttg

SEQ ID NO: 115953 - DNA, 215 bp, Glycine max
cgcttattgctaacgcgacctcttcctcttcctgctgcatcagcatcagagcacccgctaggggttcttctgcacacccaaccaaatggctgatcctgagttggaagcaatcagacagagaaggttgcaggacttatggctggccatggtggcgtggttagagaatcagagatcattcgttttacttcttttttttttcacccaagagagtgata

SEQ ID NO: 115954 - DNA, 224 bp, Glycine max
tctcgagccgaatcggctcgagcagctcgagaattctctcactccacagagaagactctcagaaccaacagcgagcaccgaataaaaaaaatgcataacaaggacgcttgctctccctcctccaatggcggattcgcggcggcgcctccgccggtcaaattccgtcaaccggcggcctctacagttctctgtactcggcactgtcgaacgagaaccttccatcg

SEQ ID NO: 115955 - DNA, 262 bp, Glycine max
cattagagtatggtctagaagaaattaaacagctaattagcactagtagttgcaacaactttatgcttgatgacagcaagacaggggaaatcgccatgtactactgatgctgactagttaaaaatcaagaacatttgaaagggtaataaacaagggcatgggttgaagttagaactagtactagaagattcagatttgatttggacttggtgtgtgtttttgtgggggaaaggtagtgtactagtgttcaattggtccactt

SEQ ID NO: 115956 - DNA, 260 bp, Glycine max
ggcagccacccccacaacgaaataaaacaaaacaagcacacaaccagagacacacacgcattgaaagatatgaaagagaagcagagcgggaacgtgttcggaaagagagggaacaaagacgaagggttgaggagactgagcgtcagtatgaaacatatttgaaggattgggagtatagagaacgagagatagagaaagagcgtcagtatgaaaaagagaaggagaaggaaagggaacgtaaaaggagaaaggagatactt

SEQ ID NO: 115957 - DNA, 263 bp, Glycine max
atcgagccgattcggctcgagtttgtttctccgaactagcagggatcataagtgaattcacgtaacgcaacaatgtcgatcgctttttccttcttcactccactctcttgctcttccaaatccattccctcattttccctctctacccctaccccccctctccgtttccgcctcactcccctccgccgccccactgatcgcttttaccctctccgctcctccaccggagtccctgacggcggatccttcggaggccacggcgg

SEQ ID NO: 115958 - DNA, 262 bp, Glycine max
gtggactgtcaatgaggagtttgatgattttgaagatgctccacaaattgataattgggacaaagtctcatatatcaatcgacctgttgagatttataaggaagatggtaaatattttagcttaaatgatgcggttaaaagaatattgcccgagtttttcctggaaaattcctttgtaactgatggagatgcaaacattaaccaaagtggagaagagggagaaagttcatctgatccagggtcatgttgcaacacacttgag

SEQ ID NO: 115959 - DNA, 243 bp, Glycine max
caacaatccaaggtatataaagagagtccacccaattataacacacagaatatcaaagtattaaattccaactcttacaagcttttaccaatctttcacaactcttgttcaaggcgaaacagctataggatgaagagcaaaatcttgaaggcactaccaaaagcagttgcagcagtcaccgtgacatttcaaaaccatccattcagcccaggcagggatcacaaatcaaagcctatcgtatct

SEQ ID NO: 115960 - DNA, 242 bp, Glycine max
aaaccaaagaaagagaaaaaaaaaaaagtaaaagtaaaacaacagttttgaatttttgatcttactctgatcctaaatttgttcggtttcttctttctgacaatgtcggaacttctgcattctcattctacaactgacactttcagcaaaggcaacaccttctcacgtttttgttgttactcggttacttcccaccaacatggcttcaaaatccagatccagtttatctgaaacacccaaca

SEQ ID NO: 115961 - DNA, 243 bp, Glycine max
atgcaggtattagatctgatgcagagaatcttattgcagaaacttgtgatgctaacataaaccggttcatatcaaacagggcaaggtcaattaacagaaaatctgtggcggaactttttgttatttcgtagggaagtttgctaagatggattcaatggccgtggagatgggaatctgcccctatactggaaaatgggaacagatagaggacaatatgatttggttgcccaagacttacgcaat

SEQ ID NO: 115962 - DNA, 204 bp, Glycine max
ctttctccttctctctctctctctcacaatctagataaaggtgtgtgtgtgtgtcgggggagataaataccactgtggcccactcaagttgctctaccaagtttcgatttcgaaggaactaatgtatctaatgaaggtaactggtatctctgttgtagaagtgagcatcctcatcatcaacactagtgtagaggaagtaccaat

SEQ ID NO: 115963 - DNA, 206 bp, Glycine max
  unsure (1)..(206): unsure at all n locations
tcatgataattaccatgagttttgtcgtcttcttggtcggttcagagtgaattatcagtcgtcagagcttgttaatgtcggacgatacgcgtcttggatacgtttggttgcagagtttactctcaagtctttgcaatcatggcagtgggcaagcaatagtgtgtactacctcgtanggctgtggtctagattggtgtcttctgttc

SEQ ID NO: 115964 - DNA, 214 bp, Glycine max
tgctgaggcaagtgtgagagtcaggaagttggctttggcatggaaagagaggttggtgggtgatgatgacaatatgtttggagctttggggcttttgcatttggtttgtgcatttggttttgtctcttgattcagcttggaggagcttgttggcttttcggttgcggccccaactaatgaggaggacttcccagagctgtgccgggcggttggg

SEQ ID NO: 115965 - DNA, 188 bp, Glycine max
atctacaattactgaaaccttagtggcttaatgcagaaatttggcccattatgccgtatctgcgaactttgcaataacgtctagttaatattaatcacaccttgctcacgccactccctgtaggagcaactcaaaaagaacgaggcatcatatttctattgatataagtgtagtaggatctgagaatt

SEQ ID NO: 115966 - DNA, 229 bp, Glycine max
gaaattcagaagctgagtgtaccgaaaaaccctacagattcagagaccccgagtgatggattttgaatcaaattatgatattgctgcctctgccaacttcattcacacacacaacttcaccagagttgctttgcaatttcctgataatctcctaaaacattcaactagagtgatcactgctctgcgcgacacacttgaatcattgaaacaaattgatgccacagaatca

SEQ ID NO: 115967 - DNA, 206 bp, Glycine max
gaaatttttcttgtgctgatgattagaaataaactcttatacaaactatattttctgcaaatattttattttatactaataaatactatacgttgttcctcaactttttgtgctcgtgaaaatcacattctgctgctactgaaggtattatgatgattctgcctgtgttctgcggaacatgttgttagatgcaaaagcacctcatc

SEQ ID NO: 115968 - DNA, 254 bp, Glycine max
cttatattcctggtgcaatgataggagttgatggttcatttggaggagcagagcaatattactccctccccaattatcaaaacactatttcttcacctgcttatattcctgttgttcaacctgacaatttccctaacagttctgttgactcatcgtttgataccagtgcttctgtcagcagacctgatggaaaaggtttaaaacataagttcaattcagcttctggttcctttactaggaactcttcaaaatca

SEQ ID NO: 115969 - DNA, 253 bp, Glycine max
attagagaaaaaaattgaggaatctcaggaacttgctagagatgccgctatcgttgtcggaagacatgtgagcccgcttagagatgaataggtggatgactatgaagaacctcatgttcgaggacacaggaacacaatgttctgataggatgtgacattagaatatatgttctattataattgtatgaaattttggacagccttgttttgagccaaagtgaatttattatttatttagacatgttttattatg

SEQ ID NO: 115970 - DNA, 255 bp, Glycine max
attagtagttaatggaaacacacatggcattggcaacttcatacatgactcttgcacctaaatattgctgcgttcagaaacgatccttcatcgtaacttcaggactttcctccgccttcaagccgatcttaagagcgttgcctcaaattccgcggcaaattgatgcttccaaaaccttcacagacatcaaatcgaaatttcttaacgctgttgtggattcagcatttgagtttgtcgaccagcttgtgcttccat

SEQ ID NO: 115971 - DNA, 245 bp, Glycine max
ctaggctggggcatgcagataccttgttttgttttgttggtgaggagtagaagttggacttgtggttatgccgttttgcaaaggtaaaaaacaaaaagggtatgttagagaactaagaagagagcaccacagaaacaatgcgctccattcctgtttccccagaatcacactgcgttttcctattccctcaaccaacaaccccttccttctcttctaattccattgccataacccactccttccac

SEQ ID NO: 115972 - DNA, 247 bp, Glycine max
ggaaattatagggaaggcacatcaaaatgctgattttctgaaggatcaagatgtaatccgaaatgtgcttaatatattgcagacgaatacgagtgattgcatcttctttaggaacatatttcctgccacagatcacattgatctttttggacatgttgaatgtgtacagaatgtttagtgagcttatatcagatagtattgcagaagggggaccttttgcatctagaacatcctatgtgaaacttct

SEQ ID NO: 115973 - DNA, 116 bp, Glycine max
tccaagggtgcagttgtatcagccatgtcaatagagctttgatgttgtatcggaaccttatctatgaagcacttttggattggatgtttagaatctgcaaatggtgggtctgtgct

SEQ ID NO: 115974 - DNA, 247 bp, Glycine max
cttcgttaacagcttaaacagtgaagaagaagattcgctccacgacaagctctcaactgattcttcttcttctgctgcggttaaggaagaggttaaccaacaagaccagggtatcaacgaggaacacgtggcggtggctgcgctacagcagagtaataacaacatcaataattacaacaacaacaacaacaacaactactctgcttctcataatttctaccaaagctcctcctccaaacctcccttg

SEQ ID NO: 115975 - DNA, 221 bp, Glycine max
ctcgaggtcagggtgtgcttttggttgttgatgctgctcagggagtccaagcacaaactgttgctaacttttaccttgcctttgagtctagcctagctattgtgcctgttataaagcccgagattgaccatgcactgtattgaccagacatctgctgatcctgtttgcgctaaagcccaatttacgtcgtatggtgttctctggtctttatccagctgatg

SEQ ID NO: 115976 - DNA, 133 bp, Glycine max
ggcgaactagtgaaccaaccataaggtagaagccccgtcctcgtcctcaattaaagccagcactctatgccactcctgaggtgacaccgcttccggatgcaccctcttcgttccctccttctccacacaacat

SEQ ID NO: 115977 - DNA, 133 bp, Glycine max
ctcgagccggggacttctgtgggttctccagaggttcatctatctgcaagacttcaggttacaggagaagcagaatatactgatgacacaccaatgcctcccaatggtttgcatgctgcctttgttttgagta

SEQ ID NO: 115978 - DNA, 247 bp, Glycine max
aatcaaatttatcaggacctacaacaataattaatcatttgtcaaagatttaaaatatatttaagtctttatattatcaaatatcgactactacaaccgcaatttatattgatcaattaagtatcagtttacaaggtgcaagggatgttgtggcttctactattttagccatcatgctgtgatggcttgtgttacatccacatctacaactacatatatgtttttccttctgtcctagtatatcata

SEQ ID NO: 115979 - DNA, 244 bp, Glycine max
  unsure (1)..(244): unsure at all n locations
cccatttccatacattctgcgcagtaaactngnaataaaaaaaccaatcttgctcacctcggagagagaaactaatagaatgaccggagtggtcatggtgactaatggcggtagatcncacggaagcgggaagctgactaagtctgcgcgaaccgacgaggaaggagaagagcatcagaaccagctgtcgctagtcgctcatctcttggcggccatctgaacatcgatggtgtcgagcatggta

SEQ ID NO: 115980 - DNA, 239 bp, Glycine max
ctctaggagaaatatgatagtgaattaagttggaagggagtacgtgacttcttattctgttatgttttccttttttcttcatgattattacaaaaagggtggcagttataaagagctatggaagaaggatacgcctcttgccattctcattgtttttatcttttggcttaggtttgggcagagagtaccttctctgcagcgttttgtctgttaggcgaggttatagtattatagtaatt

SEQ ID NO: 115981 - DNA, 265 bp, Glycine max
ttcggctcgttctcgatccgtttcggctcgaaggcatgtgctatcgcactgctcactctatgcaagaatcgactcgccgaacctagtagccctttctctcttctctatccccgcaccatctacttctgcttcttccatctatccctcagtggattcttcagtgcatctcatttgggaagagcctgacacgactacagatgaagccatggaagacgttctggtcacggttccgggtgcgattctgcatctgatagaaaaggattcc

SEQ ID NO: 115982 - DNA, 240 bp, Glycine max
ctcagttttattcgaatcccactctcaatctcctttccaaatggccagcgttgaggttgcacagcaaacaccaacaacagttccagaaaatgaaacaaccgaggtaagcaagacccaggaaacaaccccagtcactgaggctcctgcaacagaacaaccagcagctgaggttcctgcaacagaacaaccagccgctgaggctcctgccccagaatcaaccaccgaagcaccaaaggaaga

SEQ ID NO: 115983 - DNA, 143 bp, Glycine max
cgtgtatcgaatattagtgcaggggtaaatcatgtagttcagatatccctattggcataggagtacattctgtgcttcttgtgcaagggatcgcagaattacgatggtttttaagaatatgtatcctcaagctattgcaatgc

SEQ ID NO: 115984 - DNA, 250 bp, Glycine max
agagcgatactccgccaagggtcttgtgtattgtaattgacgttgaactcgtcaaatacaatacactagagccgatactccgccaagggtcttgtgttctgaagacaacgggtgaggatactgtgaagtacacagataatggtgctccaattaaaaggcacagaaggaagatagtcacggtgcattccaagaaaatagctagcaagagttttggaatgagcatactgttcttttgaaggaccttggtggt

SEQ ID NO: 115985 - DNA, 241 bp, Glycine max
aaagcaatgtttagtttcatcctctcatctattccatcaacacaataaaagtcaaaacacctctcataaataaaagagtgggaaaaaatggaaaaaggaattaccaacagcctgaatccgaagtacatacacccaactttaaagatagacgtgtatcattaacaactacctcataaactcacacctgatcaaccaaacaaatctagaacaccccatgctatgatgatgaggcctaatgatg

SEQ ID NO: 115986 - DNA, 231 bp, Glycine max
gcgaaaacggtgtcgttgtggagggcgaagaagatatgatgacaaagtgatcgcgagttcgagtgtgttgatgttcacgatgatgtaactgctactactgatgagaacggtggaaatggaaatgacgttcagggaagaagtgaatctgactctgataaagatgtcaataaaagaggggaaagtgagaatgttgttagtgcagatgtttcagatgagaaggacattgtaacg

SEQ ID NO: 115987 - DNA, 244 bp, Glycine max
gttggtttatttccgtgatagtgcaatattattgacttatttctactgggaaaggttccagagactgtgtcaatgtgtaaagcacctctagtgttgtggtttcacctttacttaatggagttaacaaagttatcgagaaaaacttagttccatttggtccatcaggtagctcggcagatttgacacattctctggaacctttcccagtagaaataagtcaatcagagtcacagttggtttattt

SEQ ID NO: 115988 - DNA, 124 bp, Glycine max
ttccaagttagcgtccgaagcaacggtctctcccacctcggtgatcgccttcgagcatcgagcttcgcagagcaacgtcggcgaactctccggcgagctgagcagctccggcgcgtttgagttt

SEQ ID NO: 115989 - DNA, 154 bp, Glycine max
gatgatgctggatgaagaacaaatttcatttcgttcagcttctcatatgtttgatggtattgaagacgactcacatcaaatcgctgaaatgattggccttataaatgaatcttacttcatacaatctggggttcgaactatactagtcataggt

SEQ ID NO: 115990 - DNA, 244 bp, Glycine max
ggaacgagcgggagaagaagaggagagagggaagagagaagcgagaagtgttcgttgatctacgttgtttggaaaccatggcaagagttcttctcgcacgtaataacctgtgtctgtggatccatgtgtattttttgttacttgttcatctccatgttggaactagtttttaccttcctggtgttgcaccggaggatttccacaagggggattcaccgagggtgaaagtgaacaaactatcttc

SEQ ID NO: 115991 - DNA, 240 bp, Glycine max
ggaacatggttccaaacttcggtggtgccgtggatgatggaggaactgggcgtggaactaggcctatctgaacagcaacctccttttgaaactgaaaccaactttttgggagtcaccttctttcaacttgttacgttcaggcttgtgtttcttcatttcggcgtttagagtcatgaagtttctgcgtcttgggtcttctataactgtgagatagatcatgtgtccaaccttctctgtggt

SEQ ID NO: 115992 - DNA, 242 bp, Glycine max
cggcagagaaacagtcaattgatttatattggattggttttggtatcagctgctgtaatgctgtctttgatcttttgggtcatctacgcaagagagcggcggcaccgtgtttatactaaacagttcattgagggctaaatgtgttgggacttaaactacattatggttctcatgtatatttgagttatagattgtattccgagctgggtttgtgatgtagagttattcatcttacaaaatac

SEQ ID NO: 115993 - DNA, 260 bp, Glycine max
ctcgagccgctcgagccgaatcggctgcagatctttgttcggtgtttgcaatcgggagagacgagcaagaccccttctcaaggatggcgatgactgtacacgtccttgctgggttggcttttatgttttcagctagcattttgcttcagattctggcatgtgcaatatataacaattggtggccaatgttatcagctctgatgtatgtgctggttcctatgccttgcttattctttggaggtggatccactcaatttcta

SEQ ID NO: 115994 - DNA, 258 bp, Glycine max
ctcgagaatgttcagcagccatgatgagtttttacaattttatgcttacagttagattgttaaatattcagttttgtttcttgtgttagataatccttgccaaaggctaattttcatatttgtcttaagatttatacttgaccaatgacctctcagttatgtcattttgcagctcattggtgttcctgatcgagctgagaaagatgaaatagttaaggctgttatgggtttgaaaaatgcggaaattgatgaaggtta

SEQ ID NO: 115995 - DNA, 249 bp, Glycine max
cttcgttaacagcttaaacattgaagaagaagattcgctccaccacaagctctcaactgattcttcttcttctgctgcggttaaggaagatgttaaccaacaagaccagggtatcaccgaggaacacgtggcggtggctgcgctacagcagagtaataacaacatcaataattaccacaacaacaacaacaacaactactctgcttctcataatttctaccaaagctcctcctccaaacctcccttgcc

SEQ ID NO: 115996 - DNA, 239 bp, Glycine max
ttaaagttcatctctcaaccttatacttcaatgcatttcaattttcaacccaataatggctgctttccaaagcatcaacaacattgaaactcaacaaattccaccagagctcctcatatctcaaatcatgcaactccatgcaagcatctccaagcttgaatccctaaggccatgcaagcaagtcaatagtcacttcacccacctagtgaagctttgcaccctcccttcaaccattgaca

SEQ ID NO: 115997 - DNA, 246 bp, Glycine max
tgttgaacaactcatgaatggtgggcaacatggaggggcatcaatgttttattcaatggagaaatggaacccaagcttacgcacaggattcaggttgacatgggtccaagtttggggcattccgcttcaggcttgggactcgaagcactttaggcacatattggtagcaatgggggatatggtggacgtggatgatgatacagaggagaagcggaggcttgatagggctagggtgctcgtaaagac

SEQ ID NO: 115998 - DNA, 241 bp, Glycine max
gtcccaatgccaattcttctccgctaactcttcttgggaactatgctggccctccttgtaaatacgttacaatactgcaaggctttcggcactatgttaagaacgcgttttatcatcccggctgtgatggtggacccaagtgttcttccgctcaaatagaccaggcagtggaagttgaaaacgaagtgggtattgaggtgcccaggagcgagaaagatgggtcctttactcgagacgatgt

SEQ ID NO: 115999 - DNA, 236 bp, Glycine max
gcattcttgatggcaatgacaaattaatcatgggagagaacatggagagcagggaagattggagagaaagaaatgcttgctctttgtcactggttaagagaattcaagctctaggaatacaatgaaaagttgcagaagaaaatgaaggaacaaaatgggaaataattgtttgtaatatatagaacccttgtttgtaacacaagagtttttttttcttacattgtatctttgtgctt

SEQ ID NO: 116000 - DNA, 233 bp, Glycine max
gtgtgtgacagcttctgcagcaactgagaaggaaattttgcttgaattcaagggtttgtggagagaattgtgctttggagcactagcttggggggggtgttgtcctcgtcactttcggggttgacgaggttgaggatattggcgttgttcgggaaccgtttttcgggtggtattccagaagggtatggtgaacttcactcgttgtggaagatcaatttgagttccaatgcttt

SEQ ID NO: 116001 - DNA, 233 bp, Glycine max
gttgatgctactatggtcctctctggagctgtattgactgcttatgttggtgtgaatggacttgcaagaagaatgagtatggatcgatgccttcctcaattcttgatgacagagaatagacttagacatactaatcactttattatcattggatttttcttaatcacttcatctctttacttaattgtaaatggaaatgtggaaacactagcaggagtatacactgtagcttt

SEQ ID NO: 116002 - DNA, 235 bp, Glycine max
ggacagagaagagaaggagaagaacaggaactcaagttttccctccaaaaaccaaaagtaggctcctaagggacaccttagaagttgaatcgatcgttatcatcaacgaatttaatgtcaatgaaacagaaacacgccttctttaaatccccaaatcttaatttctgtcccttcgctcactctcactccgtccatcgccgtttacgcgtcgcggatattcttctcgccgacgaag

SEQ ID NO: 116003 - DNA, 232 bp, Glycine max
ataaaatgtatagtaaagtgtgtgtggtgtctatgcctttgttgaccactttggccttgcaacttgagtaccaatcaaatcgtcctggatctccattagatttttttcacatttttaaacataattctatgcttcttaccactgcagatggtatgctcatgttgttttctttatgtattgaggcgctggaggataatttctttcatagcaggcgaatcagtaattatgtcag

SEQ ID NO: 116004 - DNA, 173 bp, Glycine max
ggcagagattatgaggatcgttatggcagggatggatacagagatgacgactacaggggaagaagtcgaagtgttgattaccaatatgacacaagaagcaggagctctgatagagatcgttatgatgatgatggacaacactcatctcgtggaagcaatgctaaagctgaaga

SEQ ID NO: 116005 - DNA, 233 bp, Glycine max
catcaacataatcttgatatgggtgttccagctgctgccaacatatattattctagcatgaatccttcatctggtacagctgcatctctaaatgctgaagttaggagaggaaattatcaatatttcaatgcctcggctagttctacagttgctccccctaacgcaagacacactgaaaatggcatcccctcactaccacattgtacttcgtggagcagatcaggcgagtctat

SEQ ID NO: 116006 - DNA, 227 bp, Glycine max
tttgttttcaacttcccaagggggaaaaaagtcaaaaaacaagaaaaaaaggggattgtgtttgtgactttttatcgagacaaaatcgagtctttatttataaagtgatatattttgcaattatatgtatgaatatgtaccaattgcaacagtttcatattcaacccatgatgatgaagatggataatacgatgaggaagagggagagaagcaaggccatggagaaa

SEQ ID NO: 116007 - DNA, 225 bp, Glycine max
gcacgatggcttccctctctacattgctcccgaacccgaaccttatttccaagcacaacagcaccctttcttccactcacccatgtgcttattcctggaaaaacaaaaccccaaccagtaagggtcggttctccgtttcttgttcttcttcgtctcaagcatacgacgtcgtcgtagttggcgctggcgtcattggcttaaccatcgctcgccacttcctcgttt

SEQ ID NO: 116008 - DNA, 220 bp, Glycine max
gttctggtggtgtgttctcttctccttgttcaccttctgccagtgagaacaacaaccatagggaaacagccaccaaccctaccaatttcagacaccctcatcattacttaacttcttatgcatcttctgagttccacccttcacttctgtcatctccaccaaagaataattcgccagtgtgttccatcactggtgcagctgcttctagtaaggatgatgt

SEQ ID NO: 116009 - DNA, 100 bp, Glycine max
atagtttgtagctgtccataagtaaacagcgtacgcttaattaggaggtctgaaatgatgaaatagtttgtattgttattgcagaaggtaggttttattc

SEQ ID NO: 116010 - DNA, 217 bp, Glycine max
cacggatggacaggaaatagagaaattttgtgctggttcatagttgtatgggtaagatggctactacactggcttagatcagacttagtgcccacagctgtcaacattgtgctactggtgtccatctagtgacagtcttggttcacttcaaatccgtcgattattctatgggtttggggttacatgtcatctctggagaatctggtgagccatatca

SEQ ID NO: 116011 - DNA, 221 bp, Glycine max
agaattcggaaggtgatgaaactaatcgatgagcagcagtgaaacaaaacttgttggaaccccaattattaattattagtcaaattcaatggccaaccattcttcttcgcgctctttacggagcgcgtgtaacaaccaggaccatagttactatgccgttatcctctgtctggctggttaaagagcaaccatcctagttaccacgtaaggcttgttaccgg

SEQ ID NO: 116012 - DNA, 210 bp, Glycine max
cttacttttttgtcaatcggcagatggacgagaggcggcacatactctttttatttttttattctgaggagggcttaatgcccaggaaaactgaacacaaatcgtacgggacatagggagccccataatgtccttaaccaagagcatatcacacccaggaggcggtgagctcttaacatgcaggtcaatatcttcatgaaaggtgacaca

SEQ ID NO: 116013 - DNA, 227 bp, Glycine max
aaatgacttgacttcacacacttgatcactgttcagcattcacacttcacagttcacatacagacacactcacttcacttacaaattcccaatccgacacacccccaccttcctttctctttctttcattctactgttcactctctcatcacttttatctgtcctcttttattttgttccttttcccaggtcttcttggaaaagaaaagtcgttgtgcaggtacctt

SEQ ID NO: 116014 - DNA, 108 bp, Glycine max
gtttctgtgcagaggcgaaaatgtcagggaaaggacctggtctcttctctgcgatcggaaagataggcagagatatcctcatgaaggattacaactccgatcaaagat

SEQ ID NO: 116015 - DNA, 220 bp, Glycine max
atcctttcaaactaaacacggagaaaagccatgatcgaatggatctcctcttagaggaagagcctctttgttttgcacagctcaagaacttgtctgcttccaaaaacgaagaacttgactttttcgatgagcttgaggagttacccatgtcttcatctttgttgcactttacgaggaacattttttccgatgaaaggattcccgttggcccttcttgatt

SEQ ID NO: 116016 - DNA, 218 bp, Glycine max
gtaaagagaatatagacaatgaagaaagtgaaatgcatgaagacacagaagaaatcaatgcattgctttattctgatgatgatgatgatgatgaggtaataagtactggtcattctccattggttacaaaaagaacttatgtgatgcaagaacagtttgcaggcatgaagaaggaggttgctggctctgattggccaaacaaaaggcagaagttaatt

SEQ ID NO: 116017 - DNA, 222 bp, Glycine max
aaggatggctagcctgacacagcatcaaccaaagggggttaatggaggtagcagccgcatagcagccgtcaatgtcacaccttctaataacctttccacaccatataagaaagatgcctcctcaaatcatcagaaacctgggtggaaaaagttcctgtcatatgtaggtcctggctttctggtctccttggcttaccttgatcctgggaaacatggaaactg

SEQ ID NO: 116018 - DNA, 213 bp, Glycine max
aaagattcctcaatttttatctctttacatctttcagtatgattagcatgtggctagtaagtaataataggttgatggataattcaaagtaactaattaagcaacaaatacacagaaaccatactgaaagatgtaaagagataaagattcctcaatttttggtcattatcattaactattacaggattacttttgtaatttaggtcctgccca

SEQ ID NO: 116019 - DNA, 221 bp, Glycine max
tctctctcctcctcgatcccaattccactatggattcaattccgatgcgattccgagcttgttagattcgtgcaaatggctgagtcgcaattatatggtatcgtccgatgaagcaaagaggttgcttcaggagtttgtgcaaaaacatgagggtgggttggaggtggtgtatgctttgtctggctggttaaagagcaaccatcctagttaccacgtaaggc

SEQ ID NO: 116020 - DNA, 237 bp, Glycine max
cctcctcagatccatacccattttctgaattgcgcctgacattatcaaaatgctaactttttcatctctctgcatctgccaccgcagaatttactcttttcatgagatgggtcagtgaaagttggcaactaccggtgacgacgccaattcacatgcatatacccatatctagtttattgtttcgtggctataagttgcatcagctaggtgctttgtggaactgaatttatgcccttg

SEQ ID NO: 116021 - DNA, 246 bp, Glycine max
actgctcgagctcgagcgctctgacgacatcgttgtcgtcgacactcgtccaccaacccctcagcaccaacgcggaaaccgcgacctacgatgaatccgcgtttctcagcgaaaattcgcgaaaattcaacatcgatttgggaggtcccagggcgctgttctgcgcggacaagacgatcgatctgttgatgaaatcgggcgctgcgcagtatttggagttcaaaggaatcgacgagagcttcgtct

SEQ ID NO: 116022 - DNA, 223 bp, Glycine max
gggggtcgcaaagggggtgaggggggagccacaaggccagtgaggggagaggaaggtcgtgaacgcgagaggggagagcaatgttgttaatggcggatggcgattcatggcagaaagccaaaaatccgccatcaaaatatgacggatggcgtacggaaaatggcggacaacaaaagaaaaaaaaaaaaaatggggtgccaaaaataaaaagggggccaattgg

SEQ ID NO: 116023 - DNA, 242 bp, Glycine max
tctcgagccgctcgagccgctcgagccgggaatgcttaagtctaattttcgcaaaaagtcatctgaatcaccaacttttattgacaaagaatacctggagccagatgtggtacaggaactatacgaggaagggtctgctatgctttcagagaggttagaaacaaaatatccactttgcaacatgttcaagttgttcatctgtgcagtgtgtcaggtagagattaaacccggggagggtattt

SEQ ID NO: 116024 - DNA, 251 bp, Glycine max
ccgacttcggctcgagccttgctaggacatcctattcacattgacttactaattatcactgcattatgttaagattcatagatctcacttgacccagtcgctacgacagcgcctacagtagcctatggacacgatcatggccaagcaaggacagagtacgtctcctgcgatcagtacctagcacccagcctctcagcatcagcggctcctacagcaactgttgcagcagcagccgcttgcacgaccacaaa

SEQ ID NO: 116025 - DNA, 222 bp, Glycine max
cctttgtccactcttcttctcttgcggctagggctttagcgccatggctgctaaattttctgtacaactgctccgctcacgttcatcctcggaatctgggcagtatctatttcgacactggctaatccactatcagtggtcacctcacttacaagctttgaggctgcgacaagcgtgggacatcgaggtatgagttgggcgctcccgagatccacaagaagt

SEQ ID NO: 116026 - DNA, 249 bp, Glycine max
ctcgagccgctcgagccgctttgtgggttgtttgagttttcattccttcaatttaataccaagatggcttgcttggtatctcgctcgggaagggaattgcagaggtacaacaacatgggtggccggcaagttgttgggtgagttcggtcgctattgtgtcttattgcgtctgcgaaattaatgtttcattttgtttttcacttgggtcaattaattttcaataggagttaattggtaggtccctggtgg

SEQ ID NO: 116027 - DNA, 219 bp, Glycine max
cttttgaccttgtttcagtcttttctctttctctctctttatttaatctttcttttttatttaaataaataaagtagagcacaaatgaatctaggactatatatattaatttcgttcaaaaataggactatatattaattactaacgttgtcatcagtttataccagcttgtcctgagctagatgcgtgttggcatgcgtttcatcttcggctctcatc

SEQ ID NO: 116028 - DNA, 251 bp, Glycine max
catatgcaaaagcaagaatacttttggaaagacaacacttggaagagtcactatcgaaattgataaagttgtatcagagggggtttatagtggattattcagtcttaatcatgatggtaataaagatgttcttcccgaacacttgaaattgagattatatggtccaacaggatttccaatgatgacatttgaaaagtatagcaagctactttttgggtggaagcatagaaaggtaatctgcaacatgcatg

SEQ ID NO: 116029 - DNA, 245 bp, Glycine max
ctaagccaaagaaaagggagaggagaagataaggaaggatggattcagttgaggtttatccaatatattcttttcttttttttttttttccccaaaattttccctacccttggtttctttgagcgattctcaaggatgcgagcgtgaaatgtgaatgttatgtggttcagcagttccattcaacttgtgtcccttttgctccatcctttatttaaggacctaataagggggaacattgaaccctt

SEQ ID NO: 116030 - DNA, 249 bp, Glycine max
tatcttaatacagtgtttccccatggatgtgccgccacttattagcagtactttacaaaagttaatagtaatatgtttgagtggaggagatgatcacgatccttctaaaacatctgttaaagcatctcggctgccatcctggctaggcttttggtgatgaatacaaattcacttgcccaattagcatcagatccatcaacttctcaactgcttcagacagcatccatcccagttcaagaaaatatactt

SEQ ID NO: 116031 - DNA, 249 bp, Glycine max
ctcgggacccttcccctgtgatatctttcttaaaaattcattactgtgcacacaagtgtttttaaatctgatatgcgtctgatacacggtttaacaagcctcctagaccaagactagattcggatcggaagggaagttttgaagcagagtcagttcagagattataaggagtgatcaaacaagtcaagtctttgtgcttgtttcaaaaggcgttagaaagaattggtctcactttctcttagggccaga

SEQ ID NO: 116032 - DNA, 249 bp, Glycine max
tggaacttctacaccttctctcctctaagaaaattctatctttactattattattatttctctttttatattttggagttctgaagtattgttgaggactctgacactctgtgaggtctgtcagttcagtattcagtgttccacttgggctaactcagcagcaaaatctgttccttgctttggtatttgtttaggacttgtttcactatctgtcacttgcacttcttctgtgttagaagtgaattatgc

SEQ ID NO: 116033 - DNA, 259 bp, Glycine max
aggttacccgatctaatgagaaaaggttcgaaaggcgccgtgcgttctgtcctttaccattttaaggcacaagcaagcagtccctctttattaggtaaataggactctttcaggcagtgattagattacgctttcccagcagtggttttccctagaatggaagggaagcttaaggaagattttgaccctgttcagctaaatacgtaagttatgcacgaaatcctccataggcgaagggccttaagcaaggaaatgagag

SEQ ID NO: 116034 - DNA, 244 bp, Glycine max
gtcaccaccacaacacccatgtatttcctgaaacttcacctgcacctacacctacaactggggaaggtgctactttacacaattttggtgctccagcccctgcaagaagtgtgcctgccccagggagaagttcttatgctcagcctcctaattgtcgatttgcgcatgtaacacctgcagctccccctactactgctccacactatcctgttgcctcaccatgggttggacccccagcacatgg

SEQ ID NO: 116035 - DNA, 250 bp, Glycine max
gtggacggaaggaaagcgaagtcgaagacctgaaaccctatctatcgttatttctcgaggtttcatttgtgattgtgggaaaagatgcctcagaggcactcgaagaacaacaacgatctcgcgttcttcacgtacgacgagaagcggaaactaggttatggtacccagaaggcaaggttgggaaaggactccattaagcccttcgatgcttgctctctctgcctcaaatccctaatcgaccctatgagct

SEQ ID NO: 116036 - DNA, 248 bp, Glycine max
caaaatgttcacaaatcaatgacgaaaaaatcattgcttttcgtatgaaaaattcattgctaccatttgaatctatcatatttggtaatgcaacaatattccgtaaatcttcttcttcgtctctactctttgagaatataaacctttttagcatcatcttactttgacccatcctccgcggctccacctatcaaacgttttctgctgattctcgaccttcgggtctgaatttaagaaatgcacaaagt

SEQ ID NO: 116037 - DNA, 244 bp, Glycine max
ctttcacgatagaatcatcttgtcgtcgatttgtctcgacaatgtagattttgtgttgaggaagcctttcttggaaggtgttgctattatggcggcatgacaccataatccacacctgtgtcctcctactaatgaattccccttatcagagttgattggcattcgctggttcttactttggctttctttggttatttgacacagtatatgtgtcataggtcggtttaaggcagtgatgaccgat

SEQ ID NO: 116038 - DNA, 272 bp, Glycine max
gaaagattgtctacaggctggaaaagagctgcaccctatccagatatcaccacacttccggtggggagaatctcagtgaatgatctagggcatctgattctcttgtatttgaaaatgaggagatatgatcttcgaaagggtggtgatatctggatagagtgcaccagttttggaggaaagattgtctacaggctggaaaagagctgcacccagtaaggttttcaagtttcaaccctcgtgtaccctgataatggggtagttgattcgaaaga

SEQ ID NO: 116039 - DNA, 200 bp, Glycine max
gcagcaacttagttatactcaacgaaggaggatatgtggagataaataaataaatgttattataagctctgtcatttttcaaaacttcaaattcttgatgagatataaattaaagaaactaatctaatgaaactaaacatatatggatgggggtgtgggttgatcagtcctataatatatatccgcatctattctagctt

SEQ ID NO: 116040 - DNA, 228 bp, Glycine max
ctcgagccgtgcagttgctattgtaagtctactcttgtgtgtgtgtgtatgcatttgtaataatttatgtttatgttttttttgtccatgaattagttgattacaagtgtactttaatttacacatctggactttaaaatgttaggaatgtattaagatatgattcctttttttccttggtattttgagagttattcatgtgggtgcatttcagctgttattaacctc

SEQ ID NO: 116041 - DNA, 131 bp, Glycine max
ctcgagccgaatcggctcgaggaagagcgtgagggagttgggagtgcaggacttggtgaatgcaggaggtttaacacttgcacgaagccaatgaattataccatgttttgactgatattctgtctcagtct

SEQ ID NO: 116042 - DNA, 223 bp, Glycine max
aaaagttcaaaccccaaatcttcaaaatcctcacagcaaacccaatctagaacaacaacaacaacataaaaaaaccttaacaaaaccaaaaccccaagagaaaaacaccacacttccaatcaaatgttcttcctctctttgcccttctcttcctgcttcagagcttcacaacccaaccacgatcccaccatcctctcaacgaacctcaccacctacatctacc

SEQ ID NO: 116043 - DNA, 257 bp, Glycine max
gtaccatcacctcaagcaagtatataactaggagagtataatccaaatacggaacaccattatcattcaagatcctacttcttcaagcacaatcaattccttactaagcataacacttctagcactcatagcattttaccatcattgccattacattcaacaggtgtatgaggaaaaatagaattcaaactcaaaacacatctagtcacaagtgtgtccaatcattcaatagagattagtcacctaatatgaatgtc

SEQ ID NO: 116044 - DNA, 257 bp, Glycine max
gaatcaccaactattgagaatgttcctctattgcaaagccacagaactgaaacatcagaaaagaatgtttaaaagacaagtacaaactcttccacattcttatcatcataaaaaaacataaagaatccattttctaggcatacaacagcatagtacacatacatgactgagggtcaaagctttggattcattgtcccccaagatgatcctgtgctgcttatacctaagttgttgacttgttttcctctaaaataaag

SEQ ID NO: 116045 - DNA, 260 bp, Glycine max
ctcttactttctttccactctgctgctactttgctccgccagcatgacgacggcgtctttacggagcttgacgacgatttggttcgaagcatgtccataggagccgtcttctccgacttcggtgggatgatacattcgattgatttccatcgaaaggatgatttacttgtcacgtctagtggggatgactcggtgcgactttacgacattgctaatgctaagttattgaagaccacttctaataagaaacatggtactga

SEQ ID NO: 116046 - DNA, 253 bp, Glycine max
agacattctccattttctccattttcatacacttgcagagatacttccatagatatggtggtggcgaccctcttgcagttcgagctagctgttgcatctttctgatttctacctgccactgctttccccggaccttatcttcgccacagcagcaatgaaaggaaagaacaggagaagtggtggtgttgtccatatggaatacctcattcacattcaggagattaagccttggcccccatcacaatctctcaga

SEQ ID NO: 116047 - DNA, 252 bp, Glycine max
gcgataaattattctgacattgcaactatccctgtggatcgctgtgttcttgattttgcagctgaaccaacagattcatttgttgggctgattactatggatgatcaagatgagatgtatgcttctgccagaatctatgaaattggtcgtcggaggccaactgatgatgattctgatcctgatgatgctgaaagtgaggaggaagacgaggacgatgatgacgacgatcctgatgttgatcctctgttaagc

SEQ ID NO: 116048 - DNA, 250 bp, Glycine max
atggttactattattgctaaaactgtggtcgatatcaaattctaggtcttttgccaaaagttctttgaacaggtaagataactttgatgagtagcactccagcgaactcaaaagctccttctcgaagaccacagtggcgccaacgccaaccaaccaccatgaagaataatccaagttgcctcaaccgtacagcgttgctctgtggatatttggaagccataaatagctcttccattaacgaattgagaca

SEQ ID NO: 116049 - DNA, 250 bp, Glycine max
cacaaacacaacagtgtctgctgcaccctacaatggtttcgctaccaacatggtttcgctactttcaccacaaggtcggatataccgtttccctcgccgtgaagaacaataaagacagatccaatcacagccagagagataaatgatgctgtttggaaaaacttctttctaggaaagctgacatacttgctctggaataaaggagaggagatggcccctactattgatggaaaagcagtaactcttgttc

SEQ ID NO: 116050 - DNA, 249 bp, Glycine max
gtcgggatgcctgcgatgcagttacactgtactactagtgatcatccctctgagatgtggggcttcgtcaagaacgatgatcggaatatagcgaaagcctagtcagccgataccctatggaaagagcttgtatatgtaaggagaatgctttctgcgagcaaggatatgagagggagagagttgcatgagattccagagcaagtcctgccacggttcgcaagtaagtccaatcgccctgcgggtttgagg

SEQ ID NO: 116051 - DNA, 251 bp, Glycine max
ggagaactggtccatggaatggaagggtcttccttgggtcaccaaggatgtcaactgagtacctatatggctggcgttttgagcctaatgatagtggaacagcttatctaacctacaactttgacaacccttctatgtttggagtcctgaccataagtccacatggaacacttaatttggtagagtttttgaacaaaaagatatttctggagcttgaggtggatcaaaataagtgtgacctttatgggaca

SEQ ID NO: 116052 - DNA, 243 bp, Glycine max
atacttagccacatctattgcatgctctctcctctcctctcatctcctccttattctctcccttcattctccatatattatcatagtcccaaactctctctctcacacacacacaatatctccaccctaaacaaccaccatggcagttgaagctagttacatgaatctcttgccttctcagttactcactaacagagaaaccatcaaatccaatcaacaattacatcatcaattgaactctga

SEQ ID NO: 116053 - DNA, 254 bp, Glycine max
agcgagtccaaattcaagagctgctaagtcagtaattcctctcaagaaccgcaacctagacagcaagagctcgggatggaacatgttagatctctggatggctgcaaagccatgggagagcaggtcaatggtagaaatgtatttggactcacctgacatgactccagtgaccagtaaaagtgatcatcttgttcttccctttaattcggatcaacaaaatggctcagtcaaatcaagaagcaatggtgtgacaa

SEQ ID NO: 116054 - DNA, 221 bp, Glycine max
gggaaagttgatgctgtgttgtaaaattttcatgcactaatcgtagaaatgaaatgttggaggttcaattactggttcaagatcaaattatggtgaattaataatatgaatcaatgtaattggacaaaatttcacaaatacactatttccttcattctttatttcttttgaattgttcaattttgcgattgcatgctgccatgatgtatcttctttttagc

SEQ ID NO: 116055 - DNA, 246 bp, Glycine max
ccagttcctaaaaccacatctccaacatcatatgttcccgtgaagtcaccagttccaaaagctacatctcccacaacatctgctcccatgaaatcaccacttccaaaagctacatctccaaaatatctgctcctgtgaaatcaccacttccaaaagctacgtctccaactacatctgctcctgtgaaatcaccacttccaaaagctacatctccaacaacatctgctcccatgacatcaccacttc

SEQ ID NO: 116056 - DNA, 217 bp, Glycine max
ctcattctttctagatataaagcctggcctgttactattagcgaaaccgaggccaaggtgcttaggcattatagcttcgacgaattagtgattgtttgtacttgtaattcttgataccgttgcggatatcttgattacattcacatgtttttgtaatgtatcacactgctactttttggcaaaaaatacacaccgaaagaaaggtaaataatgaaac

SEQ ID NO: 116057 - DNA, 211 bp, Glycine max
aagcaattctcactttctcacaaatggccaatcccttcccaacattccttccctcttccctcatcttcttttccttcttctttttcttattctcccctctcaccgccgccaaaacacaccgtttcgcgcgcaccatctccccctcctccctgggcctggacggggtccctgagaaactaagccacctccacttcttcttccatgacgttgt

SEQ ID NO: 116058 - DNA, 260 bp, Glycine max
tgtgtgttgagcacatagaacgatgagtttggttggtataggagcaagttttgcattgtagttgtagcaatagcaacacaacacaacaaaacaaaaaccaagtcttcatcatcttcatatgcagagattagcatgatgattagtttatgtgccaagcaatgccttccttcgtgagatataaactgctagcaatttcaaatcttttcgagtatccatgaagctaaaaacaaaaagcaagaagatgaagcgcataaatgaga

SEQ ID NO: 116059 - DNA, 268 bp, Glycine max
aaaaaatcctgttgaatttaatcttatttgctctgttttttcctctgtttctcacaagacataatggagtacaaagtgaaaaccacaacctcaacaccttctccaccaatcccaatccatcttcccactatgctctcaaactctcccccatcttcatcttcttcacctccttcacaatctcccactcctttcccttcaccctctcagggctctccctctgctgctccaccgtctcctccgccgccgccgccacccgtggtggttagcc

SEQ ID NO: 116060 - DNA, 257 bp, Glycine max
ccttaatatcttctgacttataacatcaactcttaattacttgactgcttcttcttctgaccattcatttcctcttcgtacagcggaacaagggagcctagtcttagaatttggagaagttacaattaggagttcgtaagtaagttaagcatgatagaacggtcaccaagtaggaacaacagatccataggcatagaggtaaagcatgttctgcagattattctattgcttggtgtttgctgctggttgatctatca

SEQ ID NO: 116061 - DNA, 256 bp, Glycine max
cagaatcagaggaaagaagagaagaaagagtgggagagatctcattcgtagaaacggcgtcgttgcgcccacgtggacggtgctggtaaccccttcgcccagctaccggctgttaccgttaaatctcttacacgatagtatatatttttgatataatcgttccgttattagagaagttgagaaaatggacggccatatgggaatgaggaaaatcagctctcactgctctatccctgatttggatgattctgatatc

SEQ ID NO: 116062 - DNA, 128 bp, Glycine max
cttggatagtaattaacctcactcaaactcgggaagacagagaccaacaacagttcttgcactgaggtttcacgatattgctggaacttgcactaggtttgtttgtgttagctttgtttctgcacttg

SEQ ID NO: 116063 - DNA, 245 bp, Glycine max
ctctcatcaactccccagattgtccttctttgacattgatgattactccttagatgacttctgtggccttgtaatggcagctggaaagtctggaagttccaggatgttggagcctctaaagcatccatctaagaagtctcgaagagataggagccttggaaaatcatctggaaggtcctccagggatgaagctatggaacaacaaatttggaaaaaattgcctgaggatctatttgagcctgtga

SEQ ID NO: 116064 - DNA, 243 bp, Glycine max
cttgaatttcacgtttctccgaggttttattatcatcatctctatcgtgtccctgtctccgtctcttagtttcttcttcaaatggcagaagttgaagacagagacaaccctcatcacgaccaccctcttcttcaacaacacaatctccaatgaacaatttcccgcgagatctgttaagaacctttgtgggagtgaacaacaacaacaataataacaataacaacagtcactaccacaatttgc

SEQ ID NO: 116065 - DNA, 235 bp, Glycine max
actcgagcaaatcggctcgagtgggagttataaggttggcttgatgattaagagagaaggaggggagagaaaagttaacaactaacattgacctttaaaataaactatattgtctctgtttgttgcatcatatatttatttggaacttcatttaatgcctttgttggcattgcaatgtctcttgcagatttctcgactaattggtgatcttgagtgtgtgacatttgtcttcgac

SEQ ID NO: 116066 - DNA, 106 bp, Glycine max
ggtccctgcaaccttggcctggcacgttctctgccgatctcgctctcacgttcacatgccatgccagtgtcgtaggcagcaccccttcatattcgttccacccacc

SEQ ID NO: 116067 - DNA, 235 bp, Glycine max
aaatacttctcttggcattttgtgtcccttctctctttctcttgctcgatattttccaaccaaaataattattaaaaccaaacgtagctaggcaccactgctaggaatggcaagtgagatatttcttgcccttctgatcacaacctttgtggttgcagcctctgctggtaacttcaaccaagactttgagataacatggggtgatggtcgtgccaaaatcctcaatagtggggaa

SEQ ID NO: 116068 - DNA, 235 bp, Glycine max
tctagctaacacacaaatatatatgcactgcatattgtgttcaaattgtgtgttttaaataaaagcttgttcgagcagagagccatttttttttgttttttgtgataaactcgatcatcaatttcaaggcagtgtcctccatggccaagaccaagagactcctcacactttttctaaggttccttgccattggagcaactatagcagcagtgatcgttatggtgacaagccatga

SEQ ID NO: 116069 - DNA, 151 bp, Glycine max
ggtagccatgactttgttgaagttccatgaagtgtggaagccagttttggtgatgattatagttagtttaggtctggcttttgtcagtatatttctcaagaaggttcttaatgaaggagtggactacttgaccatcctaacatatcgacaa

SEQ ID NO: 116070 - DNA, 231 bp, Glycine max
gcgatgacaacagaacatggcattgcataacacacagcgagtggaagtgttttgatgttaccaaacaaggcaaatgaagtgttgtcgtgtttcaatctttctcttatccctaattcgtctcttttttttcgcctcagaatcccaacaactctctcttccctctctagccacctcctcggttaaaccggccacgcacttgttgctgccctcggtggcactatgtatttggtg

SEQ ID NO: 116071 - DNA, 197 bp, Glycine max
atggcgtgagacttaagacgagattttacgacttctcttctctgcgagtctatgtaggtgcagctgacctcgcttcacttctcgcctcagttcagatgagatggcgtcttcacataatgttgaattggaggctgctaagtttctgcataagcttgttcaagattctcaagatgaaccagcaagctggctactaaact

SEQ ID NO: 116072 - DNA, 262 bp, Glycine max
ctcataattagagacagagacacagcgagctcatatgagtcctaagacgtatgcgatattcatgtgcggtgtcgattccgactacttggtgaagattcaccgatgcacctatagggtattcatgaagatactccaagatcaactcgaagacggggacctctacaagctcgtcaacggagagttcccgtagcagcatgacttggctctctacgatggctacttcatccgtcgcggcttctacgatgcagatgccaatgaccca

SEQ ID NO: 116073 - DNA, 262 bp, Glycine max
taagttttctccgtaacttttgctgggtttaaggatattgaacatcatctccacagagatgccatcatatagggaatttttattcacaattggatagcttcatgccttcatctctaagtttcatgtatattttattttattgttcacaagaatcctggtcccaacagacatgaatgggtcttccttttgctatgcatcttgttgctgattgagagaagttgacacttgtggaaaatcagtatggctgctgattgttcaagat

SEQ ID NO: 116074 - DNA, 201 bp, Glycine max
gctttctgtgacaaatttaggacccatagaatagaaggtacggagggagagcctcacatccacgcaccagagtttccaaagccatcaaatacccccccaaaccaggcagtaccaactcccatcccttcccaaaccccaaaccccatgatccagaccagacacacttcaaaacaaaaagcaggacgacgaagtggcaatacg

SEQ ID NO: 116075 - DNA, 194 bp, Glycine max
gacctaccttaccctatcttttcccttggttgacatggttgattgctggtgggcattgagcacacatttgtaagagaaaagaataagaaagtaggatggaaagacatgggccgagggaggttatgtacgtcaatgagatcatgaataagtattcgacaaattgtacagaaggataagagctagatagaactgtg

SEQ ID NO: 116076 - DNA, 200 bp, Glycine max
cgagcatgtccaatattcttcttcagagctctagctctgaggaggatttgcagcttctaatggaacaaagaaaaaagaagagaaagcaatcgaatcgcgaatccgcgagaagatcactgatgcgaaacagaagcacttggatgatctcattgcacaagggacactcaagaaacaaagagctaacctcagaagtggacatc

SEQ ID NO: 116077 - DNA, 259 bp, Glycine max
caccaatggaaagcagaaaaaactcaaaggtgctgcacaccttttcttatgatcaacaagggcaatacacttctccctacctctccttcaccatgatccattccaacaacttggagtgcaatgtgctaaagaataattctaatacctttttaccagctgaggcctcatttgatgtcccttctattcctaaggaacattctattgagatgtcagaatcagactcttgtagtgaggaaggtggtgattcaactgatgaaga

SEQ ID NO: 116078 - DNA, 143 bp, Glycine max
gcacgtacgcgcacgcttcggctcgagctagcactcatcgtagtttcgcagcatagtacacggagctcgaagagctggtaaacagtcgcttcatggctgaccgagctctctgtagtaaatcacgatcggttcaaacggataga

SEQ ID NO: 116079 - DNA, 237 bp, Glycine max
ctggagaactgaggtagcagtttggttcttgaaaatcatgcatctctgcttgctagattagaatggagcaactgacgaacatgttagcatagagttaggtaaatcccatgaaattttgttgtaatttacttgatataacacatcattgaggcggattatttaagttataatttgtcctttctaaagcctttattgtggggccgaatcgtttcaattttttcttggagtcttactgta

SEQ ID NO: 116080 - DNA, 141 bp, Glycine max
catttgaagttagagacatggcagcagaggcactctctggagtggttatggtggcaaaaaataggaagaggtatgtgcaggatgaccaaaacattgctcttcttctgcaattgctggatccaggggaaggcaattcaggta

SEQ ID NO: 116081 - DNA, 231 bp, Glycine max
gtttcacccattttgtttgcagcctctcctcacgtaatctcaagcacccaggtccacaaaatggactatttcacggtttcagactagtgggtaagttttcttatatgacaaggtctttcctttttccaattcaaaagacaacctagtctgaaaatcgaagccacgccaaacccccttttgttgtggctatcttccattctttcttgatctgacacaagaaaaaatgtatgg

SEQ ID NO: 116082 - DNA, 236 bp, Glycine max
ctcaatatcgctttatccccagtttccactctttctcttcaccaaatcacccgccacatgaaccctccaacacgaccacaacttgttatcacacacacgcaattttgtggcatatattagcccatcaaaaagataggctctttcaaccacatcttcgccaccatcttgtacacgtcttcgccaaagtgagttattagtgatacaatacaacatggtttttcataggagacctctga

SEQ ID NO: 116083 - DNA, 235 bp, Glycine max
aaggagaggaaaaggaagtcattgtcaatagctgtaaggaggagcaaaacctaccattaaatactccctctatggcacagtagtgaaagaaaagagacattgagctgcgcacaggcattcattcatatggatcagtgtggagataaagaggatcacgagggtctccctttaattactccaaacatgcatggcttgttcccctttttgttaatttctatgtatcaagatgttggta

SEQ ID NO: 116084 - DNA, 233 bp, Glycine max
aacgatgaaatcggcgaaaaccgaactttgatttctctcataaacacaatccattctattgctattgcttgctgccgacacataacatcacaaaatgtcgtttccaacaaggttaaggttttccgtctctctttccactctcaagtttcccatcttttcttccaaacccctcactcccaaaactccattctcactttcactctcgactcccctcctttgaaaatgttgatgat

SEQ ID NO: 116085 - DNA, 252 bp, Glycine max
caaggttcttcttccgagggatttcttcgttcccaagcctcctccaccagctcctgcacctgcaaaggctaaggcttcttctgcaaagaaatctactgagggtccttcttctgcagcggataatgactctgctgctatcagcttgaatggaatttggctgtccctttcagtggctactattgctgcagtgttttccttgtgacaatgatacgagttattggtacatcaagtgtgctacttggggtccgatgt

SEQ ID NO: 116086 - DNA, 254 bp, Glycine max
gagagcttgtgtttttctgatcccttatcttaattaatttaatcaccaatggctcgttctatcgctaacgccaagactttctccgctctcgtgctagacggattctccaacactctcaccaggtacataccccaccctaatcgtttcctacacgatcttttaatcgtccttgttatgattgttaattaattatatggtttttgaacagacgtggctactctcaaagcgcaacaaggggaggagttgcctccata

SEQ ID NO: 116087 - DNA, 253 bp, Glycine max
tttatatgctaataaatataataatgttgtgatcatccctttgaaaccttattaacttacactttcaaagggattggcacaacaatattatatgctaataaggtttcttgaaattattggtatgcaataactttgaactgtgtggcagtgtgggaattcattataagcattttgttcgttcttgtgtagaagtttaagtcatttgcaatatcatacgtcttgaaaaatttgtatctggtgtatatgtacgtta

SEQ ID NO: 116088 - DNA, 246 bp, Glycine max
cactcaaccatgatgactacaccatgcccctgttgtccatccaagtcactgaactagttgatgctgttttcataggttgttccatgaaccacgttattggccatgcaactgatgtgcccatcgacaatcgttggtttccaaaagattgcgctccaccaataaatctccctttcaagcatcatgacgagattattagcagatatgaaacacccttgctgagatagagaagctttcacttttcagcag

SEQ ID NO: 116089 - DNA, 233 bp, Glycine max
ggatttgtttgagttttgggtcgagctaggtggtgggcaccgtgtgtttgtgaatctgcatgaaagggaaagtgagaaataattgattcattggtgcggagtatacatgccgcaattctttcaagtcagtatgtttgatgcatttgtacttgggtatctagtttttcagttttggtttgaagacatgcacatagatacaggtccatctgcagtttagtttgttcccggtgggg

SEQ ID NO: 116090 - DNA, 159 bp, Glycine max
caaatcctttctactgttacggtcctctcatcttcagagagcacttgccagattcagattagattcatttcatttctcatttacacgcacacaacacaatactctttcactgttccctctgtcttctttcctttctttcttccttttccccaggtttta

SEQ ID NO: 116091 - DNA, 243 bp, Glycine max
atttaggcttccaaatataaatcacttcacttgaaaatcaattttgtatatgctcatccaaacacattgaaattgacaaataacttctactttactttgaaagctcttatttaaatacttgagagactaaaagtgaaatcaagccaaaaaaaaacaaaaaaaactctaggcaaagcacaatgggtttggttttgacactggtacctgttccatatgctgacttgccctcgcattctagttgaa

SEQ ID NO: 116092 - DNA, 243 bp, Glycine max
tttctttagagatagtttaaacttttcaatatttcgaactacctctatgctaactcgatcaatctaattattcagtgtgcgatgggacctttttcccttcccttctcaatgaaatgtcagatatagtagggtgctttaatcagcgcgcgcagaattgctggaactacatcttgcttctggcttcagaaagtactttctcatgttgaaaggacaattacacaagaatcatactgctctaatcga

SEQ ID NO: 116093 - DNA, 234 bp, Glycine max
ctcgagccgctcgagccgctcgagccgctctgtatctgctttgatattgtgcaggatgtgcataaatagactcagagctagattgttgtcatcatctgcagcagcaggaggtggacatcataaccatacaggaggagcaacattgtttggtgaagcaccattagcaaaaggacaaaagagacaatggcaaggatgggagatgcctatttacataggatatgcagctggcgtcat

SEQ ID NO: 116094 - DNA, 236 bp, Glycine max
gcagcgtccaggtacatccccttcctccctccgtcgaacccacgcctcccaattcctaattagggttagggctttcccaatttcaatgaccttctcttcttccttcccctcacaatccctattcttcatcgttcttcttcttcgttgggattaatcaattaacatatcctatcgtttcagtatcttcttcttctgctgcttcctccatggacctctctcaccctcaatccaacctg

SEQ ID NO: 116095 - DNA, 172 bp, Glycine max
tccgtatgaagatgcattggatgccttgtcatctctgatcactaaacgcactcgtgtcggtgatgtcaatatggaggaacgattcaacgtgctttataagtacctaaagatgcttgatttggtagaggcgatttcaaatatgaagattatccatgttgctggcaccaaaggg

SEQ ID NO: 116096 - DNA, 232 bp, Glycine max
ttctaactctaacttacggcacttggtacttgacccctacgctgtctcaaaggtgggttttttttgtcgttatgttccaaattggagcaaaagggtggtgccggtaaaccacatgaatatccatattatcatgactctcatcacaccaccacaacacaactttattacagaattgtccacactctagactctatatttctataccggctgctgctggcacctaatctgatcc

SEQ ID NO: 116097 - DNA, 233 bp, Glycine max
agtctgtgttgttttgttttgttttttttttcttcttttcaaaagctgcaataaatgatgttttcagttttctgcatatacaacaaaaaatttcatcctaaaattcaaatttttagagatagaaattagttcaaattttttaattcaaccctctatgatttctaaattcataatgtgttcttcctgcccctttcatcccgtaaacttatcaattcttgtttaagtgctgcttc

SEQ ID NO: 116098 - DNA, 232 bp, Glycine max
tggtaatgttcctttcctgaaaagcagtttggatttggatccagccgaggaggttcgagaaacgtgtgaattagcccttcaacgaattcagaatttaaaagatgctggtaatactgatgaattgtctgcaaatggtgtatctccttttaagtctgttgatccagctgcaccagcgatctctggttcttctgttgatcaactaaggcaagtgcttcttgatgaagaaaaaggg

SEQ ID NO: 116099 - DNA, 231 bp, Glycine max
tgcagcagacacacctctcaaccctaacccttttgccccagaaatttaatcttttgatctttcactcatctccttccaacattccgaaatttacaagcttattacatctttgggtttatttttccaagcacgagaaggtaccgggaaaaaggagaaaacactacgcgtttctttggtctttctatttgatctctttaaggttctgtggaaaatactatggttgaccttcca

SEQ ID NO: 116100 - DNA, 231 bp, Glycine max
agaagtcataggagtttaaaacagagacgcaaaatgaagctctgacgatggcagtaaaaggaagcttaagattcgtgtacgctcattttccgatcaaagctagcattggcaacaacaacaagtccatcaagatcagaaatttcctcggcgagaagaagagacatgtaggtgctcgatcatattttgaaaaaagggaagcttcacttgtatggagttacagacatgcaggta

SEQ ID NO: 116101 - DNA, 213 bp, Glycine max
gttttccccttatactccccaacattcttcttgtttatatatttttcaacccaggtaatggggaatgaatatataactctaattaataagctctactttctaatttctcaaccatgtggaatagcacattttgatatccccaacatatgtgcatttactagactattatataaatgagaacatagtacactgtgtttacatgtgcccatctgt

SEQ ID NO: 116102 - DNA, 129 bp, Glycine max
gtgatgctgatccatgtggtctccagctccctctgcactcgtcaccgcttggactcttacatcatgtagcatgatgatcaatcagtgatccgttaagcctttgagttgatagtggagttgcgcatttct

SEQ ID NO: 116103 - DNA, 156 bp, Glycine max
aaataattgaatttcgaagtgggtgtgcactgagcagattcatgtgttgtaaagcttatattttatttgccagcaactctgaattgttattctgtgcttccattgagctaagcctttccaattgctgaaagtgacggttgcctttggatagaagtt

SEQ ID NO: 116104 - DNA, 224 bp, Glycine max
cgacacgcagattatctctcacggtagggactctctcttagcctctgatttcgattccgattctttcgattcgagcaattacgataataacaatgctagcaagaaactgttgagcggtagtggtagcagtgatcgtggtttggatttgaaacggtatagtaggtttgatacgctggtgcgtgcgcttcagtgtgatgtgaatacctatttggaagagcctgagg

SEQ ID NO: 116105 - DNA, 132 bp, Glycine max
caacttgagtcaacatatttaatattgagatgaaaatgactgaggaaaattaaatatgttgactcaagttggcaacatatttaattttcctcagtcattatcttctcaatattaaaatgaaaattcatatcg

SEQ ID NO: 116106 - DNA, 222 bp, Glycine max
gttgattctcagattatgggaactctgagtggcgatggcgatgaggatgatctgaacgcggagattgcggaggtgcgtgcttgtcttgccaacgaagagaacgagctcggtgagacccctctgttcacagctgctgaaaagggtcaccttgatgtggtgaaggagttgcttaactattccaccgctcagactgtttccaagaagaaccgatccggatttgat

SEQ ID NO: 116107 - DNA, 222 bp, Glycine max
gtcgtttgtgtgtgttttccctctttccacttcaaacttgtgaaacagaaagacactcgatgaattgtactttccattctcctccgtttcttcctccaatggctggacctcgatggctaacgtgaaattagtctcatttaccatctcggtcatgtgaattgcgcttagaaccgcgttgtctcgcttctgggcttggcttatcaataatcagcatgacgtttg

SEQ ID NO: 116108 - DNA, 227 bp, Glycine max
cgattcacgagctgtaagagcttctggggttggaggacatttaaagcattcactatgcagataatgaagggaactcatttgaactttttgccatagtctgcaaactctttttgagtaattctaaatcttctcacaacatctttttctttattaatcctcctgtttttgttttttctttttttgggtaagcattaattataagtatgattagtttttgttagaaggag

SEQ ID NO: 116109 - DNA, 246 bp, Glycine max
ctggaatctgagaagaagcgatgtcccggcgatcgtagaagacggagttgggttgcatagcatgcgacgaactgggcgagctgggagcggggatgccccactggctggtggagacccctcagctcctctgcgccatcgacacgcactctctcctcctcgccaaccgctccaccatcctcgcctctcctggtcctccgactccagcgccgctgcaccgtcgcccctcaagatccgacccgacttctc

SEQ ID NO: 116110 - DNA, 235 bp, Glycine max
cttcctttgacagttgcattgtgctgtttttttttttttccccttttcagggggtttctctgctttccttcgggcggattcaggggtcatgtgaacccctttgaaaaaactggcaagtggttaccaaataagtgaactccccctctcttgcttcggggttctcctgcttggtttcgcgagcagggggcgcggcttaagtgccaggttcaaggctgaaagccctccacgcaagggt

SEQ ID NO: 116111 - DNA, 228 bp, Glycine max
ctcgagccgttgtgatcaaatgatgcaacagaagaaatattctgtcgatgaaagaactgcaagcttgctttgcgaatcttgccttaaaagaatatacgaccaagattctactgaggttcaagatagcataaagtcaagggttgaaacagctgaagcagagaatccggatggactgacgataaggttccaaaagatttacagagtataatggataaagcaatcacgaga

SEQ ID NO: 116112 - DNA, 238 bp, Glycine max
ctcaggtttctagctgttctgcaaattctaagagttgcttgataacatctgttttgaaagttgttgatcagtttagaggatcaaatctgtcaaagcactttccagtagctgttgggagtgatattgctggtagacataatgacaagagttttttcccttatgaattgtttgtcaactttagaactcgaacaaggtggagttatgcccatttggtcttataaattgtggaaacagttgt

SEQ ID NO: 116113 - DNA, 237 bp, Glycine max
attgtcacaagtcagaaggcagaagatcagagttgagaattcagatctctctcttccaccaggaaaacccactgagaagcaaaactgaaaacccaactattctcatgtggcttcttccaccagtacgcccaaacagtcctcatccgcaccggcaccacccctcgcctccctcagcgccccctggcttccaatgcgaatcctccacctcctcctcctcttgctccacgagttcggaaa

SEQ ID NO: 116114 - DNA, 125 bp, Glycine max
atcgagccgcttgcatgctattggttctggaagagatttgaagagatttcgcatgaggtttattgggacgtggactatagcaattgtggggagctggtgcaatttcttgaccttgttctacattg

SEQ ID NO: 116115 - DNA, 156 bp, Glycine max
tcagagttttggaagtggtagggggtcttcttctaatgtcatcatccaatgctcctcttcttcttctgcttcgtttgaggatgacgtgtgtgttagcttcctctgtgatgagacacgctacagctgcaccgctttgctttgtgggaaggcgctgga

SEQ ID NO: 116116 - DNA, 229 bp, Glycine max
caaactcttcgaacaaatgtctattttcgcagcaactaaactggatcttgggagggatgttctgtgctggcgattctatagtttgttccctgtggtagatatatcaggcttcggttgcatacaaatagcctgctgtaacaaccatagtattcttccaactctgattgtcaaccattagtgtggagtatttgccttaattgtagttcaagatcaaacggtatgggtgctg

SEQ ID NO: 116117 - DNA, 233 bp, Glycine max
agccttgaaaatttggtgataatgatttttcagtatttgaagaatcaatttgtatcatagtcagaaagcaggatttggatactagatgagacaaatacacaatagggggtacaggtaggaggagctggtgacatatcaatatgttggtgggtgtgtaaaactggacctctgatgtcttttaccttcttttttcccccacattggttagggttctgtgggtatgagtattactt

SEQ ID NO: 116118 - DNA, 209 bp, Glycine max
atgagtaacgtgatcccaccgtggcagtcatagcccattggctgggacaatgggtcgacaaagttaccaaggcgacgaactagattgcgccactgaaactactagcctgatatgttgctgagaggatgaatggtgatccgtgggaacgaggactatacccgattatgacctgagatggcaacggagttgatgacgtgggagctacagct

SEQ ID NO: 116119 - DNA, 238 bp, Glycine max
ggagccttgcacaacatcaactgcgaagaaatctcatagtcatatgacaaagaaagtcttaatatcagttttaccccttagtttggtcattctaatgcttgcattatctgttttcggtgtctggtatcatttacgccaaaattcaaagaataaacaagaccaggctacagattactatctccaaggagtccaaacttattattaccaacgtggagtttgggtggcaaaatgatgttcg

SEQ ID NO: 116120 - DNA, 241 bp, Glycine max
ctttttctttttttgttagaccacagacaattccattgctaccagtttaagagaatgcatagagttttataataatatcatagaaacaaactgaacacataaaaattcagttcagagaagcttctcttcatcaaagcttcatatttttatgtgtattgtgataaactctaattctcaccttagtttctgtttccttatctctctcttgttttccacttttttgaaaagacgtgatactgtg

SEQ ID NO: 116121 - DNA, 228 bp, Glycine max
ctcgagctgctcgcattgtggagaaatcaaatcgaaatatactcatcccagtccattggaacaattgtttgtttgttagtgaaaggatactgttggacacgacaagtctcaaatggactgggaagagtatatttctgaaattgcatctgacataatgaaggaacagagcccaaaaggttgtttcaagttcgaggaaagctctatgagctgctaatcaattgcattcct

SEQ ID NO: 116122 - DNA, 253 bp, Glycine max
cacttccagaatcaattgtctcactgccacatttaaaatcgttgtattttggctgcaacaaacgcatgagcgaaggaggtccagcaaatttgaacagttcactaatcaatactgactacggaagatgcaaaggaaagaacctagatttggacaagtattcgtcattggtgctattacatgtggatcacttttgattgctttggccgttggaatcatttttgtttgccgctatagacaaaagttgattccatgg

SEQ ID NO: 116123 - DNA, 241 bp, Glycine max
ctctgtcaattttaaatctgtcaagtatgtgagtagtttttacttatgtttaataataataggatataaagtggtgatttttctaaattcgctagtttttcattgctggattacagaacttaggaaagatgaaacacacccatcttccagtacttagtgatgtggacaggtgagacaccaatgtcattttgtgtaatataaaatcttgtgagtgaaataataaagttggcttgtatggtaa

SEQ ID NO: 116124 - DNA, 262 bp, Glycine max
ctactattgaacatgactgcagtaatgatgaatttacagctggtgctgaggatcaggtagaacacaactctactattgaaaatgactgcagcaatgatgaatttacagctggtgctgaggatcaggtagaacccagtctactattgaacatgactgctgtaatgatgaatatagtacaactggtgctgaggatcaggtagagctcagctctactattgaacatggcccaaatcctgatggatgtctggttcgtcactcagat

SEQ ID NO: 116125 - DNA, 251 bp, Glycine max
tcaaacaatgggcagtcaaacactccccgtgctggtcactgcactggcgaccgtattcatccaaaaaattaaattctcaaaagaagaaaaagaataaaaaggaaagtgtgtgtgattattgattattcgtttcactatatggtaaccgtttgaataattgaatgtaaccttctatttttccaattctgcatgtgagagtattcaatttctcacataaattgagattttgagaccaaagactttttctttcc

SEQ ID NO: 116126 - DNA, 246 bp, Glycine max
cttggcgggacgccacgtatagcaacaaccaaaccctctctactccaacttcgtatcttcgctaaggttatagcttctacctcatcacttcgtacttctggactctacaatgagcaacgacaacgacaccttcccgtcgctgatcacacttccgatctcaacgaggaccgtagagccgacctcgtgaatgctctccagagcaagatacagcagtctggctggacaacattctgatatactagagtc

SEQ ID NO: 116127 - DNA, 259 bp, Glycine max
attagcttcacaacctcatacgcatggcaatgccataatcatggcgcgtggcacctctcactaaaagctctctctctctctttctctctctcatactctgaaaattcatctttctttgttagcctgcccccattaaagttttggcctttgctatcatgaattcatgatcctttcatcgaattgatatacctctttctctctctacaacaaggtgctatgtttctacttctcttacagtggtgaactttacctatttctc

SEQ ID NO: 116128 - DNA, 227 bp, Glycine max
tctcgagccgaatcggctcgagacatattccagtgggatagtttgttgcatctgaaaaatatgtcggcaacatagagatctctacgtatgattatgaaggtggcatgtggaagacagggcttataatctaagcattgtcatcaaaccaaattactaataatcaagtagatactaagctatatataaaccccctctgccatagtaacttgtaatgaagtattttattc

SEQ ID NO: 116129 - DNA, 256 bp, Glycine max
gacgcagaagcatatccagaagcatcaaagagtgtgctgcaaattttgtgggatgtagttacctatggtcagtgtagacagtggggtaaagctagaatttcagccctggaggcacttgctcaatatgaatgccacagcttgagaatagtattctagatttcaagaaaatgaatttggagctgttcttttctgagacaaatcccaaagtactcaaggctatggaggagtttcatgtcaagttaataacatatgagca

SEQ ID NO: 116130 - DNA, 175 bp, Glycine max
ggcctcattcaaatcattgatcacagctttccttcttgctctgaccttgtcaagcatgagcatgagccaagcaactcgccatcttattcatacaactgcaccatatttgcctaatacaacattgccacctttgccttcacttccaacattgcctcaggctcaatgttccaacttt

SEQ ID NO: 116131 - DNA, 250 bp, Glycine max
gcaaaacacaacactcaaagctttagccaaaggcttgtttggttgcacatacaaggaaatatcacaaagcaaatgatggctgggaaccctaactggtggacatgcatccaccatctctgatccctccacagtatgttcttggatcttcttcaattccttttaattcttctacacaaaaccaagagcaccctcactcattgagccaacttcttttcactggtttaccaggagaagaagagagagttgcatt

SEQ ID NO: 116132 - DNA, 247 bp, Glycine max
ccgaaattctaaaaagaaaggaaattcttagaaaagtttttgctggatttgatcctaatactgtggccaaaatggaggagaaagaaatcatggaaatagatcaaacaaagaagttttgttagccgattgcagagttaggtgcatagtagacaatgccaaatgcataatgaagattgtgagggaatgtggatcattcagctgctatatatggggctatgtgaatcacaaaccagtgattaacagatac

SEQ ID NO: 116133 - DNA, 246 bp, Glycine max
atttgctttactaaagtaatttttctctttgcgtgtaggattaataattagctcatagtttttttggaagagttgtgaaaatgggacttgtggagcttttggggtggcatctatgcccgtgatcaaagtactactaatcactgctgttggcttgcttcttgcactggacaacgtaaatttgttgggaaaagatgcaaggatacaagtgaatcatcttgtgcattatgtgttcaatcctgcactggt

SEQ ID NO: 116134 - DNA, 260 bp, Glycine max
cggctcgagggaagagtttgtattcactaatatatttgaaaggcctattccttggtcactctaaggactgtagtgcagactgattgatcattacttgaaacagatagcaggtcccattatgataaatcagtctgcactacagtccttagagtgaccaagaaagtggaagagtttgtattcactaatatatttgaaaggcctattccttctgtgttaagaggatacagtgctcctgttcgtctggaatctgatctcactga

SEQ ID NO: 116135 - DNA, 239 bp, Glycine max
tctggaatggagtctaaaaacagagatggaaggcatactaagcagggaaaagcgcatggatcatggcggcaacgaaatataacagaatcaactatgtgcatgatgtactggaccatgattcaaactctgaaccaaatgttcagagacaaacagagcatcatcatgatcagaagtctgaagtaagctttgtgaaagggcaaacaaagcattttaatgactctggtgatattgatggttca

SEQ ID NO: 116136 - DNA, 179 bp, Glycine max
gcggtatgatcataccccccaaatgggttgcagcagctggtaactgctacaaccttaaagtttgatttgcaaagaatcaagaggggggcttgctgtagattgcaccaagtccatccttgatgagaccagatgaagaagcttcttttgcgtgtgttggctgtgataagtttcgctctgta

SEQ ID NO: 116137 - DNA, 269 bp, Glycine max
taaggctttcccctggcattgaagagttagtccagaagttgaaggctaatggcatagttgtttatctgatctctggtggcttccgtcaaatgatcaatgtacagagaatatttgtaattaatggtttttctgattcattttgggctcgggaggaaatcaatagttactgacatattgtgaatttggatagactttttaatctgtattgcacactgccattgaaaatatttcagaactagtacatacagtctttgcatgcccataatctt

SEQ ID NO: 116138 - DNA, 260 bp, Glycine max
gagacgaagccttcgaatctctctgaaacttttctcttctctttgattcttctctatcaggtataattcttcaccctctcttctttgatttctcctaaggaataaggaaagaaaataagctcttattttctatttcgtgagaataactgtagtcagttaaacattagaatgagccgttcacaggatccacacccttcccgatctttcttcccttttggaaatccttttcggatgatatcacctaaaggctctcgcatgtc

SEQ ID NO: 116139 - DNA, 211 bp, Glycine max
  unsure (1)..(211): unsure at all n locations
ctcngggttgggctcggtggccagagggaggacgatgtcgcgtcggtggcgcgatggtggtgatgggtccgccggtggcgcggctggggcgagtgctgttggggggggtcgctcccgtggtggtgctcctctggggtccttcgggcnagcgagtttgcgtcaanggcggtgtgggcttcgtccgggcgctggcgcggtgctgctccttcgg

SEQ ID NO: 116140 - DNA, 257 bp, Glycine max
gaatacttatgtgggcatcacatcactttttctcccatcattatcatcttatcttatgtcttcttcttcttcttcttcttcttctttttattattattattattattgcattttgcttatgctaaacccctctttttctattatggggtgaaaatggattcaaatattgttgatcttctctattggggttatatctgtgctttattggaagccctatctgtcttctatgttgtcttatctcgattcgatgtggcaca

SEQ ID NO: 116141 - DNA, 261 bp, Glycine max
atgcactccaaattgaactctcagtgaatctctctctaccctacataagggaagaattgaagtctttatgttcaagagccaaggttgtagctttggttgtggatgtttttgctaatggagcattgaactttgccaaggaactcaaactcctgtcttacatatacctccctcaatccgctatgttactctctttgtacttctactcaacaaaacttgatgagatactttcttctgagtctagggagctacaaaaacctatag

SEQ ID NO: 116142 - DNA, 253 bp, Glycine max
cttccgtgtctctgaaaataggcgacggaaccgccagatacagaagagcaacagtgtgttcctccgcagttaacattctcatgatagtctccgtcatcaccaccaacctcttcgccctctacgccttctcttcttccccaaaagaccctcattcccaccttcaccttcttgacaaaaacttctccctcatctctgagcaggtcaccctcattctccgagagatcgatatgtctcagaagaaacttgcccaaat

SEQ ID NO: 116143 - DNA, 128 bp, Glycine max
cctatcataggctctagcacttaactagcaatactgatgaggactcgatacagagactatgactataaagatgccccagtctaagatggcctgaaaaacgtgtccatggcgggggcgtttgctgagac

SEQ ID NO: 116144 - DNA, 254 bp, Glycine max
cgccggacttagagtagccaatgggaataggacaattagacttggcgatccggatttggtgtcccagatggcatcgtagccgtttattaaatttgagaaaacacaactcgacacctaatgaaccgtacgattcaaacggaaaaaacacacggataatgaatcgtatccgttcgatcactgacaaacgcttccaagagtatgctatatatagggctttacttcctttactttaagaatttttgattcttttcccc

SEQ ID NO: 116145 - DNA, 245 bp, Glycine max
ctggggccgtgtgcgaagagcgtgatcccaaagcattcttcaactggatgagatgataaatagtagcagcataattgagatgacacagttgaaatagtagtagtgtttacgtttcagcgcgcatcactttctctctccgaaatgaagcagtctcttctgctgagaggcgaaatcagtgaccagagttaccagtcgcggggaatattccggcgctccgatgctatcgcctacggctccaactacga

SEQ ID NO: 116146 - DNA, 116 bp, Glycine max
cttctgtacaaggaatccttctcccattttgacatgagaattaagaaaaggatgagggatattggttcactgagtgcataatatcagcctgaagctctatgtaattctcaacatct

SEQ ID NO: 116147 - DNA, 256 bp, Glycine max
cctaccctctaccacaaatgatcagcaaaaccacctccaccacaaccaacaccaccagccttacatctatgcgtcacctccccctccttaccactattagctagcatagctctatggatatgaagaatatgtgcaacgaataaaagaaagcgatagaaaaggaagaagaagcgcttcgcgatgcacgaaagagaagaattggaagcaaagtttcggcgttttgtcttttataaaaaaaatgttaaatcattataat

SEQ ID NO: 116148 - DNA, 263 bp, Glycine max
ggagaaacgatgtgttcatgaattccaaaacattgcataaaggggccatttttgctatgagtatgcagggaaaatgcctttatacaggaggttgggacaaaaatgttaatatacaggaattatctggagatgagtttgaactggatgtcaaagcatatggatccattccttgcagtgctgttgcaacagcttattatgcagccaaggaaaactgtacgttggatatgctgacaagtctatcaaggtttatctgtaaacagtaa

SEQ ID NO: 116149 - DNA, 205 bp, Glycine max
gaaatgagttataataaaagagtatcctaagaattggccagtggacaagatacaaagacaacatcaattgttaattcttccctttctctctgttttatattttctagtatagagaaccagggaaggtatggtaaattggttggcttcaaaattgttatttgttatgataataaaatcgtagtgcaaaactgcaaatgatttgatt

SEQ ID NO: 116150 - DNA, 260 bp, Glycine max
cccgcttgagttatacccaatttgccgagctctgaagcgaatatcagggcacgcaagttttcaagattgcttagttcaattttcattcaaagactttggaccaggacccaggttcttggccaatggtgaaaacaaagcagaaacgcacaggggaagttcctggtaaaaaaagtggtacttcttcacattgccttgttgattctggagacggtgataatcagcatgaggatagtgattggattatagtgaaaaagcagaga

SEQ ID NO: 116151 - DNA, 258 bp, Glycine max
ttcagacactgtacccattcgtgatcatgtccaaccccaaatcagagtcagtagtgtctgaaccctctgcttcggaaccttcaatacccatttcatatccaataaaaactcttgaggacttggagtctcgctcctatttcgagtcctttcactaccctttcaacaaagcttcttcttaccggcaaaattcttcttgcttcttcgttgcccaacaggcgcagattgcttgtgtgccatgacatggctgggggctacttg

SEQ ID NO: 116152 - DNA, 253 bp, Glycine max
ctcgagccgctggtcttttagaaaccatacaaggttcaggctttaaactacagacattaaatctgagttttgaggatgaagaagttgcagttgcctagactaaatgtgctggtgttataacaatagtttgagggagtaaaaaaaaaatttaaagaacatgcctttcacacattcctgactagagcctcgaacaatcattttggtttgtatagggctgactgaggatattggttattattattattgttgttct

SEQ ID NO: 116153 - DNA, 244 bp, Glycine max
cttgtttttgagaagtctattactattacacaagaatgaagagctctctctttcaccttctattcgtgattcttttaggactctcccattttgcatgccttaaagcagtcccagttacaagaactgaaagccttatgcaagcacccaaagttcttcatcatgcactggataatatccacaacacaaggtatgtccaaatttgatgccctatatataagacatcactaaataagttgattgattt

SEQ ID NO: 116154 - DNA, 253 bp, Glycine max
ctgaggcaatgaaaacaaggagaggaaaacgctcagaggcctttaggccttcccttgtgatgaagaaatggttaaacataaagccaaaggagtatgattttagtgaagacgaagtggacactgaaactgagagtgaagatgatgcttgctctcttaaagattcaagacttggcgtgcgtgaagataatcgtccacttagagcacaatccatattcccaagtcaaatatcagacacaccgtgtaagggctacaa

SEQ ID NO: 116155 - DNA, 250 bp, Glycine max
  unsure (1)..(250): unsure at all n locations
aaaanaagcaacttttctgcatcaaccctctgaaggttgatgcaccgccggagcgtcgcagcaggtgtcggtgccggcggtgattcgctcctccgccgattggcaaggaaagaaaacaaaccaaaagaagcacaagagaagcagcagcagcagcaagaacaagactttccatggtggggtactagaagggtccaatccagagtgcgtggattttcaagatgtttggtgtggccctggaattgggttctca

SEQ ID NO: 116156 - DNA, 247 bp, Glycine max
actcgagccgaatcggctcgagattctcgtgagaaaaaaagatccactggtgaagggacaaatgctgacagtgaggttgtgacgttagggaggaaagaccccgatcctaatgtggagcaatcttcttctatcttacatgcaagggacaaggaggaaaaggatgaagaagaaaacaaccatgaaaagcaaaagaagacagatgacgttaatcgtgtggaaaatgagatccagacacaaaagaatgagc

SEQ ID NO: 116157 - DNA, 247 bp, Glycine max
cgaagaactctctccgcagacatgtcctcaaagaactacttgcatgcaaaaaccattgctgactcagaaaaagaagaagaagatgatgaagatgaagctgagagagagaggctggagatttggagctccatccaacggaacaagaaggaggagcaagagaaatcaggagcctttgatatttggagctcaatcgtatctctcaagggcaaagatgaaatctccaaatcaatgcctattacaccttatg

SEQ ID NO: 116158 - DNA, 243 bp, Glycine max
gtaaataattgcacgagttctttcatatattttggaaactacatgttgtgggcttacattgtatgttctcccaaatgcggaaaactgcagagatgatgaatttgacgttgaccttgaggacatcatggtcatggaagcaatttggctttccattcaggagaatggcaggcggagaaatttatcttttgtcgatgctacttctggacactatgtagctgacggtcgctatgtttcatccgtctc

SEQ ID NO: 116159 - DNA, 234 bp, Glycine max
ctcgagccgagcaggtatttgcaaaacagggcctgagccaacattacgttcatcagatggcaccatgggtgccaaatctgattagttctctacctaaggatatatcagatgaatttcctacctatgcctgtcttcttggaaatatattagaaactggtggatttgctttgtctcgacctgactgttcctttgatatggccatagaccttgctgctgttattacatttttgctgg

SEQ ID NO: 116160 - DNA, 145 bp, Glycine max
cttgttccgtccacgacgttaaacttcttcgcgatagaaaggttctaacggtagacaaagagaggactgacaaaggcaaaaagaaaaaactaatgagcaacaaggatttaatgaatttgtttctcagtatcacagaggaatttcc

SEQ ID NO: 116161 - DNA, 256 bp, Glycine max
aaagaattgatagttgcttgcaccgttagctgagttgtttgctttccaaaaacgatgcataccttcaacaaccactctaccacaaccacacctaaatttggaggcaacaattacctcatgataaaacccttacagctaaaaaaataattaaatgttgcagtgcatgtgagttgtgccaccacccatctgagtcaaacctatccaactaactaacatcacgacaatgttgtccttcttcatggcaccgtcgccatca

SEQ ID NO: 116162 - DNA, 244 bp, Glycine max
ctggttgtgggtttggtgctgttgcagaggttttttctgttgcatcatcagaaactggttcagcttctgatcatggcacttgttgtcaggatcttcctcatttctatttagatattctagaagctgttttgacagaattgatcaatggatcccatgagagccagaacctgtatcagatactgtcttctttaagcaagctagaaggtgacttaaaagttatgcaatgtgttagacatgtaatttg

SEQ ID NO: 116163 - DNA, 250 bp, Glycine max
ttcagaagctcaagctggacactgagacggcaatgctagagctgaaccagattctacgggcaaatgaaatcaactttgcagttctgactgctttacctgcattttttctctctcttttactcatgatgttagtacgtggatggttcaaacaggataccaaagctgagggaagaggtagaattgctcggattcagaggaggctacttgttatagaggttaagaaaaggattatgcagtaccaaaattatgt

SEQ ID NO: 116164 - DNA, 99 bp, Glycine max
gcagcagaggctcttcaacatcctttctttcagagttgcttttacatccctccatcccttcgcaccagagctgtaaccagaactccaccatctgctggg

SEQ ID NO: 116165 - DNA, 148 bp, Glycine max
ctcccaccgaccaaaacgcgcaacacgttgtaattaaaacgacaccgaaactaatgggcgtcttcagcgaaaacccgaatccggacccggttgtgatccgccaggtttgggcttcaaatctcgaatccgaattccaactcatccgcga

SEQ ID NO: 116166 - DNA, 148 bp, Glycine max
ttgatatagaaaaagtggcatccatggcggggccgagttaccttcaattccaggctttgtgttgaatttccttataacaatcaaatcaccctcacacacagtgcatctgacaataacaacattgggtgaatcggtggtaaggtaacaa

SEQ ID NO: 116167 - DNA, 148 bp, Glycine max
aaatcccataatccctacctagacaggtttaccacaagcctgtgtcactgtccggtgaacacagcgtcgacattagggtaaggactgaagtcggagatgctgcgggagtcgccggaagtaattttcccagggtggttttattgaagag

SEQ ID NO: 116168 - DNA, 148 bp, Glycine max
gaaaaataaaagaaatggcaatggcaactcagctgctgccgaaggtggagttgtggctgcaggaactgaaaaagagcatgtgatatctggagaagatgcggtaagcaccatcagatctttagatataaattcagcatacttcattaaa

SEQ ID NO: 116169 - DNA, 145 bp, Glycine max
aaaaaagcaggaacttaagcagcatgtctaacatgatgatcatcaccaacactttataaataggcaactagtccttccccaaatatcacatcccaccttaaggccatttccataatcactttttcctactttcttctccatccat

SEQ ID NO: 116170 - DNA, 144 bp, Glycine max
cagcagaaaaaggtcttctctctttctctctccttttccctcaagctcagaatctcccgaacgaaagttgaattttggtgcatattttacaaattaagaatcttgttaaaaagaagaaggatgtcaagcggagcaacacactgg

SEQ ID NO: 116171 - DNA, 144 bp, Glycine max
gtgagagagagagagagagagaaaatagaaggtgaagtgttagtgttatctacaaccatcttatatggtttatacgggcttttggttttatcttcaaagaaatgaaatcaaacgaacgagaaaccagatcatcaccaccagttg

SEQ ID NO: 116172 - DNA, 248 bp, Glycine max
atcgtcgtcttccgcggcctctgattcggctctgatcgtcgcgcactcttctgccgttgcgcggtcatgattctagtgaagttgatgaagatgtgcacttgtctcttgcacatcaaatgtacaagactggcagttataagcaagccctagaacatagcaacactgtctatgagagaaatccgctccgtactgacaacttactacttctgggtgcagtttattatcagttgcatgattttgatatgtgt

SEQ ID NO: 116173 - DNA, 249 bp, Glycine max
gtttgttgtagtgcatcttctttaatgtaaatttcactctttttttattacaaaatatttgttgttaatggattttagtttttgtcagcgagaaaagattagaatgttatttatgtagtactggcagtactactatgttgtgtaagtgtttttcttaaatgggtttgtgtttttttcctcagcagttgaattgaagttgaagccatgagatgaatcacttatctcttgacaccgaagattattctctgt

SEQ ID NO: 116174 - DNA, 134 bp, Glycine max
cggctcgagggactagaccctttggcagtgtctgctgtattctgtgcagcacaatacatgggggcgacagaaatctcaggcatggattgctttatgctgcaactctcagctgatcagaaagaccttgttgagcg

SEQ ID NO: 116175 - DNA, 235 bp, Glycine max
ccaagacagaggatttggtcactgctgatggatcagaggtcaacggatggggagatgatgatccatctgtttttgtaatgacaattggtaaaaggatgcaaggagaataccaagtaacacgtggttatggtcccacaaaagctcaccaagttatgaaggtaacacaataaacaagtcaaagaattgaaaaacattgccaaaatttgcagactctgtcggtagcatgagatatata

SEQ ID NO: 116176 - DNA, 243 bp, Glycine max
ctgattgtgaacacccacttgttatttcctcatgattcaagtctgtgcgtagtgagattgaatcaggtttaccaaatattgcaatatgtggaattgtatcagagagaaaacaggctcaaacccatgcctattatactctgtgggtgagtttattgtttgattttcctacgatgttatgttagtgtttcactggaacagatgtccttatagtgtggatttcatgttctatctaatgcagtgact

SEQ ID NO: 116177 - DNA, 245 bp, Glycine max
cttaacttgccttaaagttaacggttcttttgtcgaatggtcatgagtaaatatataatttgattcctgaagatgttactcgacagggttgctttgattcctcaaaggttttgtctgtacgtgaattggcaacttcagggattgtcctgtatatgcagagactctagaggacaaatgcaacacaagtaacatctttttgggcatcaattgtctgtttactcaatagtttcttgcgggttttcatt

SEQ ID NO: 116178 - DNA, 242 bp, Glycine max
caaacaacaaaaaaatgttaattgaaacattggccatccctgcagcactccttgtgatattcattttgattctatcctctgccttgttccatcttcaagatgatagaactcaattaccaccaggtccttatccccttccaattattggtaaccttcacatgcttggaaaactcccaaatcgaacccttcaagccctagccaaaaaatatggacccataatgtccatcaagttaggtcaaatc

SEQ ID NO: 116179 - DNA, 233 bp, Glycine max
attggaaactctgaaaggcagctgtgggcattgatccattctaaaggccctgtacactcagatgttcaagtcttgtatcataacatcaggtcaagttatgagagagaaatcctcaataaccacactcattcagaacttcaagaagttgaatattccttgtggaagcttcactataagcatattgatgaatttcgcaaaataataaagaagagctctggtaatgcagagaacaa

SEQ ID NO: 116180 - DNA, 241 bp, Glycine max
acttctctcattctttttttctttctcttaaattaactacaaaaccaacaaccctcctccaacttcactcatattttttctttctcttaaacttttttaaggaaaaaaaaaatctaaatccttttaaaaccctattaatactaaacatcatataacattcattgttcatcaagaactatctttgtggtcgtgtttgttcaataatgctacaaaattcctccatgtcttccctcctcctcca

SEQ ID NO: 116181 - DNA, 237 bp, Glycine max
ctcgagccgaatcggctcgagcatcagtctcttccacgcacgagaccagacacacttccccactcacgccactgcttctccacgcaccaccggtgactgacgacgggtgccgaacgtcgacggacgacttctctcctctctggcttttttccgatgtggttcaaatccggcgaggtagctcttctctcgccctttttcggtgctttccggcgaggtcccattctcttcgggtttccg

SEQ ID NO: 116182 - DNA, 216 bp, Glycine max
tttgatttgtgtaccaggtttttgatttggggaacaatgctccggataaggttctgcagaagctttatgctacattggaaacgctcaagcacaatggagataattttgcagctgaaattcagaatagattgaggataattgtaagatgattgctatgttgtgctctctaattcttgggtacttgaagcaaggaagcagattcacgttgcaatggtt

SEQ ID NO: 116183 - DNA, 145 bp, Glycine max
aggtatgcggtatgccacctaaagatcattaagtcagtaatttcggcagtgattgtgtgtttgtagagaaaggaggttatgaaaattagatgattaatacaagggtattattgtctataaacttatataaatttgttgaacttct

SEQ ID NO: 116184 - DNA, 235 bp, Glycine max
cttttgctcttatcttatgcactgtacctttcctcgtctctcttctcctctctgcctatgtcccccttcactgaaaaactcgctatctttactgtcggttactttgtgctaagacattacgcggaaaaaagagacattcgcagtttcctgaccgttgcatcttctttgtgtgcacacctttgaattagggttcttctcgcactctcttcagtcttcaccaccattggtgaaacgt

SEQ ID NO: 116185 - DNA, 236 bp, Glycine max
cggcttgtaaaggcaagaccctatcagccactgccgctaaagaaagcgagctcatagtctacgcgtagctcagacatcgaattccccgacgagctagtatcgaactgttcactcaaggggcagctagtacgccgactgcgtctgcggcagggccacagtataagtcgctcggcgtactcgaatatcgcgctgctgaagttctggaactggctggaaacgctgcgagagttgccatc

SEQ ID NO: 116186 - DNA, 169 bp, Glycine max
gttgttaggcactacgagagattcttttatttgttcattcttttgttatagctttaaaacaaattattgtcttaactcttaggaatgttattacccatttgaagggaccaaaataaagtgatattcagatacttaaaattcaagttacatgtaatttttattcatatat

SEQ ID NO: 116187 - DNA, 232 bp, Glycine max
ggaactagttatagttcaagaaatttggttagttgggaagtacccgagacttgtgttgtagtagatccttctactcagattgagtgtgtcaatggagataataggaaattggaagcaaaacctaatgaatcagggttgaacaaggtgtccatgaaagtcacaaatggggtgtctgagacagataaaaattcatgtgtgattgatataaactgtcacagctgtgatgggttta

SEQ ID NO: 116188 - DNA, 106 bp, Glycine max
tgaagtcgcattaagcaatacggctcaccatgttctgaggatccgtaccttcattgccacatctaactgtcctactgcggatcacgtcgtacagattgatctttcc

SEQ ID NO: 116189 - DNA, 230 bp, Glycine max
tatcgagcgaatcggctcagaaattttacaaaggatgtataaaatacactgaacgacttggggaggcctatgatggagatattgcatttgcaagtgccttggaaacttttggtggtgggcataatgacccaatcagtgtggcttttggaggtcctgttatgaccaaattcaccatagccttacgagaaattggtacatacaaggaagttcttcgatcacaggttgagcat

SEQ ID NO: 116190 - DNA, 135 bp, Glycine max
attcgttctcgcacttcgttgactcaggtcctggatccccggtgactctgctcgattgtatcgtcctatgaggcagaatggatcttgaagggcatagttaggtaccatcgatagcgggaggttggtacatgtagc

SEQ ID NO: 116191 - DNA, 235 bp, Glycine max
cagagaaggcttagtacaacttggttcatttaacaagattgctgaagatctcaattttgtggttagcattcaaaggaagttcagctacctccacagcataccaggtgtattttccattcaaagaccacacctacccattcaacatccatgcattgccaaaccaaacctacaaatgatggaaagcaatgaaatgaccctatctgcctataatgcaacaaatcaagtcacaagagtc

SEQ ID NO: 116192 - DNA, 227 bp, Glycine max
ggcgggggtctaggccattgtttatcgtctctcatttcaagtggggatgtgaattgtttgttcttatttcttctctttttttttttattcattggtcagagactaaaagtaaataagaattcatgatgtaaccaatcgtcagttgaatgcaagagcactactgtgtggcttatgcaatcaatgatgccatgggtctttttggggattttggttttgttaatgaaaac

SEQ ID NO: 116193 - DNA, 100 bp, Glycine max
cttctctgtttgcaacaaacttgagtggtgcactcgcatcagtgcagaggcacctgcagagttgagattgtgctctttccagatctcgtagattccgcac

SEQ ID NO: 116194 - DNA, 261 bp, Glycine max
cggaaggatttgaaggagatgggaaaaatgatggatcaagatgcagtcccaaatctagcaccaattcaaggaaagcgatcatcatattgataattgctttgagtgtgagtgtaagtcttgtaacactacttgggggaagcttttatgtgtattgggtatcgaagaaaagaaagatcatcaaacttaaagaacaattttttcaacaaaatggtggccttttcttacaacaacatatgtctaggcataaaggatcaattgaaa

SEQ ID NO: 116195 - DNA, 257 bp, Glycine max
gtaagaacactttctcttctcttttcccactattgttctgttactgtttttgcagcagcacttcaattcaattcaattaacgaactgcagcacttacttcttcgcttttgcctttttttcttcaactgctctgtaaccgaaaaccaccctttgccagttttgaatcttttgtttctggttttggttacagtttttccgagccttgctattcattattgtccttcgaatcggattgatttggacactgcattgcatgt

SEQ ID NO: 116196 - DNA, 261 bp, Glycine max
ttggaagcaagcaaatcctagggtttctctcttcaaatttgttagccatagctctctcttcacttcgattttaaatgtaattcagattcatctcactgcgcatctcctcactcttcaatctttagggcttttcctctctctcttccccaaaaccctctccccagacgatttgcaatccgattactcgatctcgccatggaatcccgagatttaccgtcgtcgtccccgtcgtccaccgccaaccgcgacgcctcctccgcc

SEQ ID NO: 116197 - DNA, 250 bp, Glycine max
ctcgggcagaatattctgttgagcctgcaaagcggatatcagcatctgtggttgcaaacaatgaagttatagaatatattgctgaagaaagagaggttctagcacttctctctcggctggatttacaaaatctgcattttacaaattcttttccaggaaatgctgatcagtcagttcatcttgtggctggagagggactagaggcttatctccctactggccgatatggttgatatttccgcagaagttg

SEQ ID NO: 116198 - DNA, 253 bp, Glycine max
ctttattctttttctgagcaatttaacggatcaatcccgaacattgaacctagccccaaaaaataagaagccctagaaatttaaaaaattaaggcattcattcactactaagtactaaccttcatgttggagagcagcaccggcgactcgagaaacgacgtcggactgagccccggcggaatcgtgacgcacggcgagcgcgagatcgggagcttggccggtgacatgagcttgtaccttgctccggcggtgg

SEQ ID NO: 116199 - DNA, 259 bp, Glycine max
  unsure (1)..(259): unsure at all n locations
cgcacactctcttccttctcgcgtccattttcaactcattccacacaaccaacgaaacaaaaccaagaccctcactccctaatgaaacaagacccaatcgaaatatgcacttccctatgggtcaaaaccttctcctcttcaaccactcatanccccaacctcaccggcttcctctccaacttcgacctctggctcctcgcttaccaacgctcctgcgcccacgccaccggcaccttccctccccgtaacgccgtccacg

SEQ ID NO: 116200 - DNA, 251 bp, Glycine max
attttggaatgcatagtataactttccggaacaactcttccataactgcttaaatacgcttccagaaatcattatctaaaaaggaattttaggaaaaaatgatttggaatgcccgttctggaatctatagtatacatttatggaaacgctcttttgtaactatactaatgggttctagataaacttttccagaaagtaattttttttaaaaaaaaataaacatttggaattcccattccgaaatggtaaat

SEQ ID NO: 116201 - DNA, 253 bp, Glycine max
cggctcgagctctctcatcttcagcgttaaagcatggccttcgcaagtgccattgcttttcttcttctgcacactctttcatcagttagaagtgatttcctatctcctctaagtcctctggtcgctccattatatgaggatgtgtgcaaaaaagtggaatgtggaaagggaacttgcaagccttctcagaatagtactctcttgtttgaatgccattgtcatccaggttggaggcaaactctttctgctcatg

SEQ ID NO: 116202 - DNA, 254 bp, Glycine max
tttgagttgggttggaacaatttgattcatagttttcaactttcagttgattctttctacatccttgtcacaaaccgcattacccttttggaagatctttcacttttcaggggtggttaaaaaagttgactttttttacctcaagattctggttctggttctggttcccttttgagttttattacgtgataatgaagcttgtggttcgtgtgattgaggcaaagaacttgccaccgacggatcttaatgggttg

SEQ ID NO: 116203 - DNA, 251 bp, Glycine max
ctttggatctcggatcggagccttacccatcttttctaaatcttccaggaacgctttgggacactaaagtttccaaattgtagagaaaaaaacagaatgagagggaagacttgaatcaggattcaggggtgaggctcagagattacaatatggaggatgagagtgggcttgagctcagcttgggtttatcttttggaggctacgtcagccaaacccaagggtaagaatggtagctcctcagatgctagaga

SEQ ID NO: 116204 - DNA, 254 bp, Glycine max
ttgagttccattttccactgcacaaacaaagcacaacgcacaacgcacacacgcgccatagtcatggttctgccagagtcgctgttctttagcgctccgtcactgtcactatcactgtaactgacatataaaaagcacttttcctctcttctcaaatcttccatttcatggctattctacctcctgcttcttcacttccctacgtcttctgaggggatatgttgctctacttatggaataacaagcaattcaat

SEQ ID NO: 116205 - DNA, 176 bp, Glycine max
gtggttttagatttgtgtgtctttgcgataaggatttgagcttcagtgggttttttttttttttttacaatggcaacgaattcttcaaatggggcaacaaagcaacgtcccatgccatctccctggcgtttttccaagttctttcagtccaatatgagaattcgggttactggagg

SEQ ID NO: 116206 - DNA, 239 bp, Glycine max
ggaaatcggatagtgatgggttcatgggttcatgtttgcccaagaatgtccaagttaactacttcatggattgatgatgactgactttggatagtgggtgggggggtttcttgtaaaatggtccacacgttgtaaaatgcaagtgagataggcttcgtgtaactgctaattttcattatagaatgtgtttgtttttcttctgctttcaaaaaaaaaaaaaaaaaaaaggggggccgccg

SEQ ID NO: 116207 - DNA, 241 bp, Glycine max
gtgcaaggcattgttatagactggtaaaagaaaagggttttgaggaaagtctcgcagcttcaatggctgaccctgaagatggagtttcctttcttgttggtcagaccaaaatgtcagatacttccaatgagattaacaatggtctaacaaaggattgtgatgacctaactactgaagctgcagaaggcatgaggcatgctaatgaaatgaagacggatttatcaaacatgacacaccaggc

SEQ ID NO: 116208 - DNA, 136 bp, Glycine max
ctttcttagctgcatcaatgatcattggccattttaatagaaccaagtcaatggaggaactactgggaaatgggattgtggaccttcacttgaggggttcctgcttcttgcaaacgcactagcaatactaaacgag

SEQ ID NO: 116209 - DNA, 243 bp, Glycine max
aatcactctaagtttcaaactttcaaatgtcagagagacagaagatggtgccaaccagcactgaactccaaccgagagcaccttgcaaccttgtactgttcctctctactcctccaactacacttccactttctggttagattttggcttcacattgttgctttcctttcaaactcaaatggggtttgcctttttttgaggggtgtttttgatttttagtgttgccaagtttcaatgtaacaa

SEQ ID NO: 116210 - DNA, 242 bp, Glycine max
agattgaggtgggagatattctaattgcaaacaatccaacaggttctctttcatttctcttctgcttgatgtttaatctaaatgccttgtattttcattatttttataatcattttcacagaatcaatgtgtttttgactgccaacttacaccgctgtttccagttcatttcttccatttccgtagacctgacttgcaatataaaatttgaatttccaggtctatgtgagggtggctgtgct

SEQ ID NO: 116211 - DNA, 172 bp, Glycine max
gtgtgaacagtgaggcttctggttcacaacaattagtcgtatatacagacttaaaggatgaattaaacttacttctgaagaaggtgacagaagaaaatcacagagcagaagagatgaagatccaagctgccgttggattccgccatgttattgatctcctttcatcagaaca

SEQ ID NO: 116212 - DNA, 241 bp, Glycine max
cctcttgtgagtaactatcgttaatatatccctcctccattctgaatcaaattcattgtttgttgaacccatgccactgattcacactactccaccgcttcactatgccatttccacacttatcaatgcaccatcatcatcttcttccaccctctctgctgccacattcggttccaattttctgcgcaaaatccataacccaatttttaggttttccaccgccagaaatcgctcgcgcgct

SEQ ID NO: 116213 - DNA, 242 bp, Glycine max
ttggaccgcaaggaacaagagcacctattgaatgaaagagaaatgatttctattgataatccttgaaagcaacatgagtcagcaggtagtaggctaatgacagactctcggattcgctgtggagtgcttcctttgaagaaagctgctgaagaaaaggctcaagcaatgcgtgcagctgctgctgccagttttaagtcaatgcttaaagagcgaggagatatatcttttaactcccgttggtc

SEQ ID NO: 116214 - DNA, 244 bp, Glycine max
ggggcattaattaagatcactcatcaaaagtttgattctgtttccagtttccaactttcctggtatggcattagaggcagttaatgacagaaaagctgaagttcaagcatttgatgattctaaaacgggtgtaaaaggtgtcctagattctggggtaacaaagatccctaccatgttccatgtcaagttagactcaactcacacctcaccaactcactccaacttcaccatcccaatcatagat

SEQ ID NO: 116215 - DNA, 245 bp, Glycine max
ccccgctccaaacgagatccctcaaaacgacagggtccgaaagcgcgacccgaggctcacatgctccaacttcctcgctggtcgggtcccctgcgcctgccccgaactcgacgcgatactcgaggacgagggtttgcctggcaagaaacgcgcccgcaccgcgcgtgcatctgcatccgctcgctgccaggtccctgcctgcgaggtcgatatctcagagctgaaagggtatcaccgccgacaca

SEQ ID NO: 116216 - DNA, 106 bp, Glycine max
  unsure (1)..(106): unsure at all n locations
tatctttgcaactanaatggcgtcgtcacaaccagagatggagcatccaaagaaggtttttggttgggctgctcgggactcatctgggcttctctccccattcaac

SEQ ID NO: 116217 - DNA, 247 bp, Glycine max
gcaatatgttactgggaaagttctattccaaggtcttctttgtgggttatttgggggatccttactacaaggtttctatgttaaatccttggccttgacaactgcagtatatgtcacagccatgttgaacctcatccccgctgtcacctacatcttgtctgttactctaagacttgagaagtcaaatcttggaacagcaggtgggatgaccaagttgctggggactttaacaggaatcgtggtgcca

SEQ ID NO: 116218 - DNA, 209 bp, Glycine max
ctcattcgactgctcttcttttggtggtaattttaagtgtcaagcgttctgcctcaaaaactttccttgcctggcctctttcccattttaattcttccttcttgatcatcttctcgctttgcttgatttttattcattattcatttgttattcttcctctttctattctttagttacctaattgcacaaccttactataatcaatttat

SEQ ID NO: 116219 - DNA, 254 bp, Glycine max
gcaacgcaccggaaattcaaattccggtcaccgccgccacctgcttttcccgactaaatgcacataacctgattgatacctttgaacatgtaatcaaataaaactattcattcccattaaagaaatcgtcactgcttcttcttctcacttgtaatggcgcccaccacaccctctgctgactcagcttcagcagatgaagttaccgcaaaagccgttaacaagcgctacgaagggctggtcaggttcgaaccaaa

SEQ ID NO: 116220 - DNA, 248 bp, Glycine max
gtttttagaaattattgttatttgatatcttaaaatcaaattctgcaataggacaaaaaatcaaacaacattgagtttatccagctaaaaactacattaccgcatgaaaagtggcatggggtttccttttcttttcctcctttcatgaaaaagaatgaggaactatagtgaattgaaacccattatacaagaactacagttgaaaagtacattgacataaagaatcaagagtctcagaagttgctttg

SEQ ID NO: 116221 - DNA, 242 bp, Glycine max
ctcgagccgcctttatttacttcagcatccaacaaagtgttccttacttacccagatcttcaaatgtgagtgtgagtgttgttgcatcgttgcatgagtcacccatcaaacactgttcaagtaactatttttagtttgttttgtaaatgagggtgtggagggttcacccaccagagcaaaagctttgtcctaatggtgttttgaggtgggttttggtttggatgagtgtgtgttttctgtgt

SEQ ID NO: 116222 - DNA, 243 bp, Glycine max
ctcaagtcaatgtgagatctcaacaaactttatcgtggaaggccaataatacgattgctaaacacatctctactcctattttcctctattgctaattttgtgtagtaagataaaatttattggatgtaacaattaaactttagtatcctgttattgttctttaagttggataaagatagatttagcaaaaaaggcatgtcagaataaattcaagtcgattatttgtagcggaatgtttggaaa

SEQ ID NO: 116223 - DNA, 249 bp, Glycine max
ggactatgactatggcggtagtgcttcacagtatggagatgcttatggtgatagacttggaagatctagtatgggatatggtggtggcagcagaagttctatttccagtcaagattcacatgggttgtatagcagtcggcagggcatgagttatggaggaggtggattttttgctaataatttattgtcgtcggcatcagaatctttgtatcttacattttgacctgttccatgtcaggttcttttggt

SEQ ID NO: 116224 - DNA, 240 bp, Glycine max
  unsure (1)..(240): unsure at all n locations
cgaaggnntgataagcaagcagaggatgacatggggcccatgataagagatatgcgcacaaatcatcacgctatttataccactgatccgctacttgctgcctaggctagtgtgcacccctgtcttgaacctcttaccgtgcgcatcttctcaatccataacaacttcgccaccgttgcaccgaaaccaatcgccacaaactcgggatctcagattcgacgcgccaaacatgtcgaaggc

SEQ ID NO: 116225 - DNA, 262 bp, Glycine max
tattattccatttacagtttatcaaggcaaattacagttggaggagcattttggcaacttgaccagatgatgtgaaccttacggggcggatcgcttgatacaggctacggatatttggatgacgccactttcaatgaaggaagataagtcagggtagacgctacttccgatgaaggaagataagtctgggtagacgccacaaggattaccttgataagtctgataattggttcaacaatgaaccaagagagaaactctcacc

SEQ ID NO: 116226 - DNA, 268 bp, Glycine max
tcgaggtaatgggtcgggctgccccggaaatggcggacttgccaggttcgtgggatttgaagacgacatacccagttatgatgcattcgggtttgggtcggggtttacggcggagaatgacggaggtgccggaggttttgtgacggtggttgggttgtttgactattcggacccgtcggcggatgttttgtggcggtcggagtcattacaagctatgtaggtggtggcggtggttttagtgagacgctgcgtaggggtggaaaatgta

SEQ ID NO: 116227 - DNA, 261 bp, Glycine max
ttttgagtgaaaatggggatttgagagttttaaggtagagcaaaaccatgctaaacttcagtacataggctggctagctagctcaagggataaaatgagccgaatccggaggcttgtctatgttcatctcattccacctgtgactgagaggggattttctagcctgagtgtggtcactgcaccttttgattttactgaaattcaaattagtcgccttcccactgtcgtcattctagggcgacctaatgtagggaaatctgc

SEQ ID NO: 116228 - DNA, 253 bp, Glycine max
gaactcacaaatagatatcttgaatttggaagtcaaacagtacagagcagtgatgtattaagcaatcgtcgaaggacagataagccagaaaatggtaatagtgttgatggccccacgagtcagttatccatgttctcaaacacaagacgcaaaactttgtctttagattctggaagggattcttccagtgcagttgaaaatgagaagttaaagattggcaatgagattgaaattctcggagaaaggttgagga

SEQ ID NO: 116229 - DNA, 256 bp, Glycine max
gaaaaagaaaacttgtattgcagtgtttaacagaaccagcatcattgcagggataattcaatgggatcttccaatgaaggatcttcttcttccaccctaacctccggaaggtcatggtccaaccatgttttcttgagttttcggggtgatcgacacacgcaaaggtttcactggccatctttttgcttccctagagagaagggggatcaaaacattcaaggatgatcatgatcttcagagggggaaattgatatca

SEQ ID NO: 116230 - DNA, 136 bp, Glycine max
gggataagaaaaacatgtctgagatatcgaactccaaagccaccgtggtggaagattgtcgtggcgttcttcatgtctataacgacggttccatagtacgttccacgtcaagcttacgactataacgacgatggca

SEQ ID NO: 116231 - DNA, 257 bp, Glycine max
ccatcctattacaagttccttgggggtgggggatgtggcagttaatgtatacagcttagctttatatgttactctaataagtattttgtgtctgaaatttatatattttgtaatggcccaatcgcgtataacatagcagagaattgttgtatctttagtattattatccccacccatcctattacaagttccttggggtgggggatgtggcagttaatgtatacagcttagctttatatgttactctaatatgtatt

SEQ ID NO: 116232 - DNA, 257 bp, Glycine max
gaaatttgaactattattttgcaactcttcttgccaaattttgaagggacatttgggttgtctataaatgaacgagaacaggattgattgtgtaggacggactcaacaaagctatggcctaaatggtgattggaattctgagtttggcaattgttctagtcaatattttgatgtgagacaggcttcaaatatgggacttgcaatcagccacttgcaatggccagtggtggaggagtggaacaggaaccacacatagg

SEQ ID NO: 116233 - DNA, 252 bp, Glycine max
ctcgagccgaatcggctcgagctgctcgagctcgaccgcttatcttcgaagagttgttactgagagctaaggagaaggactagaaagacgccaagaagcgccaacgccttgctgatgactttactaacctgttatatacattcaaggatattacaacttcctcaaaatgggaggattgcaagtcactttttgagagactcaagagtacaggtcaattggagacgaaagctatagtagagaatttttgaggaa

SEQ ID NO: 116234 - DNA, 255 bp, Glycine max
gtttaaagacttaaatgaaacaactggactggatattttagggtattgtttggaatttctttagtttcaaaaccatataagtctaaaacatatgtttttttatttaatagaaatacattgataatgtgaatgttttttatactatcattcaattatgagtaattgttgacttttgtagtaacttctttaaaagaatatctagagtgttttctaattgattgacaatgtaaaatcaatgtatcaaacgtaaaatct

SEQ ID NO: 116235 - DNA, 208 bp, Glycine max
tgatagtgttgtagtcaaagatttgcacctgcttttccaaccaaaatctccttttgctactgcaaacattttctctccctttgttattggatttcaccaatttttctgtgaacacacacaaaactcttatgcttcttcaaacaacaaaatctttgtcttgagataatggaaaccatgaagcccaaatcagcactgagcattaggtgca

SEQ ID NO: 116236 - DNA, 99 bp, Glycine max
cggctcgagccgactttgttctaactcctccgacactcacccacttgactcgccccagtttcaagtctcccgcgtcgacccggaccttctcaacatgct

SEQ ID NO: 116237 - DNA, 99 bp, Glycine max
ttgtgcttccatggcaaaaccaaagcttcacttgctgtcctttctcttctgcagcatcttgctaagcttcttccactgcacattttcactgatcaaccc

SEQ ID NO: 116238 - DNA, 251 bp, Glycine max
tttgaaaaacagtttgtacagtaatagcccgagctcattatttttattattaaagtatctgaggagagtatcagctttctaattcacaaactctggcttcagtttcaatgagataaaaaaaaaggtatggcacagatcagtttatggtgttaaagaaggtgtattaagaaaaggaaaaaaaaaaaagagagactgtttcataatccatgattagtgattgaatctgatttccattgtttccccctttgtta

SEQ ID NO: 116239 - DNA, 99 bp, Glycine max
acacaacacaaaacgatcttttatttctctgtctagagaagaatctagcaagccttgctcgtcacaaaatcaaaggttgcaactgagaactcactcctt

SEQ ID NO: 116240 - DNA, 262 bp, Glycine max
gaggaagaatggagaaggcaaatgtatatagccacatctaagaacagggtgctgcgacccgagtcttaccgtgacgagtgggacgatgatgacttggttctgcaagctcaacaggattttgccaattatctcacttgatgtttgtgacaggtctgtcttaaccaatgtaaatcatgcgctctgccccgggattctttgtaaagaataatgattataaatcaacttcgcactattgaagaatagaaaatttgattttttaaaa

SEQ ID NO: 116241 - DNA, 145 bp, Glycine max
gtgatgactaagccaaggtagatctattagagtattatctatgtcatatgatatatgctagacgtacgtacaaattagttttgtttttgtttttgtgctgagtgtgtgacaggaagaaaaaaaaagtcaaaaggtgttctactgc

SEQ ID NO: 116242 - DNA, 249 bp, Glycine max
gtctgtagagaggcttgtctttactctttggagaataaggttccacttattgcattttgtgaagggcgctgcttaaccctatttcgtgatccactagttgattcgctacatacaatataccatgaaccaaaggctgaggtcatgccttctgttgaacatctattggcttctgctgacatacagaaaatgattttcttggacactgaccggagggtggctgataccttgcgtccgtactggtctgatgca

SEQ ID NO: 116243 - DNA, 251 bp, Glycine max
gaaactgtgactcattcctctttgactccgactccccatagcattgtgttacactctccctcttttctttcttctatccatcgtcttttaaaaaccttaaacccatccatggtttcttcctccgaccaaacacaattttgagctaattaagataagacggaacgatgccgccgatgaagtgctgggtcacgaggttgtcggggaagcccaacaaacaacaacacgccgtgaagctgacccaattgaagctc

SEQ ID NO: 116244 - DNA, 243 bp, Glycine max
gtccagatgtatactcatctcctgctactggaagcttgagtcaaactgaagcatcttttcctattaatcagccagggattttgaaacaaaagtttgttgatgaggtgatggtcagtgatgaagagaggaaacccagagtagttcgaattaaaagcaacaaggcacatattccagatagtgaagaggaaagtggaaaacacagtcttaagactcagaatgtgaaagggaagaagttggttataa

SEQ ID NO: 116245 - DNA, 247 bp, Glycine max
ctcgagccggtgcagatcatggagcagtaaggtctctggatgttcgccaagatgaatgtacggtttctactgcatgagttggtcaaggatataaatgaactgttcagatatgggaattgagccgaactaactgtttgtccggctatcacggccatgaggaggatgtcaatgatatttgcatcttatcaactattggaagagtggcttcttgtgatgtaacaatccacatatggaatagtcaaactgg

SEQ ID NO: 116246 - DNA, 249 bp, Glycine max
  unsure (1)..(249): unsure at all n locations
actcaacgaccgccttggaatgatgcgtcatgtaacaactcctgattttaaacttcggactgcacttccatcagcttcccattgttcctcagttctcacctcccacaaccttaaacagtcaccatggcggcggtggcaccatgccccgccacccaaacttgagatctgaagcaaaagtcaagtctcatatcccaatctgaagtagagacgcaaaaatgcggacattaacagcgacacggncgtgaagat

SEQ ID NO: 116247 - DNA, 246 bp, Glycine max
cttccataacagagacactactccttctcctttttctccttctctcacaccacactctctcactcacacatattatattatcaattaattaaccattaaataaatgaataaataatctttgtgaagtgaagtttttgacaccgcaaaattccatctgtataaaccactataactaataacgaaccacactttgagtcagataacgattcttgtttcgaatttcaatttcatccacacacttcactg

SEQ ID NO: 116248 - DNA, 241 bp, Glycine max
gaaaaatttgtcagtcacaaaaaatttctaagttccatttttctccttctctttgtttcccttcgttttgtaactctgcaaatccatttctcagctttctttttgaatttgagaggttccagatcattcttcattctgctatttggcaaggtctcgcctgttttacttactggttgaaatattgtgatagaggtttgtgtaacactgcaaattctcccgtggaccttgtgcatttgagtaa

SEQ ID NO: 116249 - DNA, 233 bp, Glycine max
ctcgaggcactcgagccgattcggctcgagtcgtcaaccgtcctattcgtcgtacgaattagggccatcactgatcttgaacaaccatatgccagcgatatgagcgattcacagtcatgaagccgccgcgtagtgcgtttacgtatgcgacttccagatgccggttcccgccagtcccagcggcggctccacgccaactcatcagcgggaacaatccacgcagcaagtgacgg

SEQ ID NO: 116250 - DNA, 244 bp, Glycine max
tgtggaactgaggtatttaatacttatgggctattgggtaatgctgctttgcttcatagatatggatttactgagcaagataattcctatgatattgtaaacatagatatggaactggtacttcaatggtgtacttctgtgttttctgaccgccacagtagagcaagagtttccctttggagaaagttaggctattctgcatgtggcagccaaaactctgaatattttgagatctcatttgatg

SEQ ID NO: 116251 - DNA, 241 bp, Glycine max
gccatggagctgtaagatagttgaatatctcattcaaaacaatgcagttggcctactcagagagataattcttacaggaaaggataatgcagaaaattatttttccattggcaagggatcatcattggagcgtgtgcttattgctgtaatatgtcatgttggtcagaagccatgtatctgttcacaaattaatccaagatatagctttgcatcacagatcattactattcctttcttgtgg

SEQ ID NO: 116252 - DNA, 219 bp, Glycine max
  unsure (1)..(219): unsure at all n locations
cggctcgagctcgagccgaatcggctcgagcggtctcgagttttcttcttcaattcatatcatatacattagctntgtattcagagtttgctagtgagatcccatggacaactacaacagcaatgacttttggatattcagtgaccagttgaggcctgaatctggtttggccaatctgtctctgaatgattattccatttggagcaacagctacagcta

SEQ ID NO: 116253 - DNA, 237 bp, Glycine max
tctcgagccgaatcggctcgaggctttgggtggcttttaagtagagacttcttccatgtcttgtaaagttaattaaagaatagaagaaatcaaatgttatgtattaaaaagataatgtaattttctaattttttttctttaaaaatatttggacaccaaagtgagagtttcctataacaaaactatagcaccttgaatgaaccctagataatgatttcccgtagagaaacaatggtt

SEQ ID NO: 116254 - DNA, 258 bp, Glycine max
cagaattaaaaaaaatcattccaacattccaaaaaataatccaggggcgttgcggacatcgacaaaggtatctcatggtttgctaaatcaagcttcagctaatcccccttctcgggatagaagctgcctgaaatcttcaagccccaccaaaagcaacccccaatcagctaccatatctgcaccttttagattcagaagtgaggaaagagcagttaaacgcaaagagttcttgcagaggatggatgaaactaaatccaa

SEQ ID NO: 116255 - DNA, 246 bp, Glycine max
tggaaacacatctgagaggcatcacaataaagaaacacaaagaaaaacttagagagagcaagtgtttgtgtcatttctctgatgggtaacaacaggttcaagttatcagatatgataccaaatgcttggttttacaagctgaaagacatgagcaaatcaaggaagagaaatggttctcatgctatgaagagtaaagtgtcttcaccaccaacaacaacaacatcacaaaggtcgctgccaagatat

SEQ ID NO: 116256 - DNA, 248 bp, Glycine max
aaaaaaagtaacctcatttgatagaagtgttgggaattatgcctcacagaagactacttcacccagggtgcctgaaactgagtcttctgatggatctgttgcacatcctccacagaatcaaagtttcttgtctcagggcattggtttacaattggctcctcctactcaaaggtttcctgtggtatgttctcatgggtcatcagagacagatcatactacaccacatgtgtctgagacaagggataagg

SEQ ID NO: 116257 - DNA, 207 bp, Glycine max
gttaaaaacaactctgcaattaaactccacatcttatgatctccccaaggcaagaccctcttctgccccacacccacttctccaccatgctcaagctcctcctccgccgtctccggtggccaattcgccgccgctcaaagtccaaagtagtagtgatcaacaagctcgggaagaacgccctacaagcccaaaccgaagcaagcacga

SEQ ID NO: 116258 - DNA, 255 bp, Glycine max
tgaaaactaagttaaaagaactaaaaatctctcgcaacacaccctaaactattttgtaattcaaaatcaatttagaattaatttgtaaaaattccaaactgatcttccaaaaaatgttatttttaagtaatcaatcgagtattaagattagttttggtttaaatcttttaaaaaatcaagccatgcctttctttttacagcttctttaattccatggacttgcacaaccctctctgagcatgcatgttagcctat

SEQ ID NO: 116259 - DNA, 215 bp, Glycine max
gttaaaaacaactctgcaagtatactccatctcttatgatctctccaaggtaagagcctcttctgctccacacccacttgtccaccgtttgtaagctcctttaatgcagactgtggctggctacgatttgagggtccagtacaagagtcttagcatcggttaacccaactgcacaggtagtctccaaataatggagcctcatgatgagactggat

SEQ ID NO: 116260 - DNA, 250 bp, Glycine max
tctcgagccgattcggctcgagtcttaatattcatttgggtctcgcgttattatttttctccgtttctatccctcttttttactctcaaagttttggtttttaaatttgttctggttgaatattttcaaggaacttatgggtgatgataacttgaagaaagaatcagacatggagggtgatcttcaaaggtctctatctttgcgcctaaatcgtagaggagatcgaagtaatcaaaatcctgctaaagat

SEQ ID NO: 116261 - DNA, 235 bp, Glycine max
ccatcccatcccaacccaaacaaacaccaccctgaaccaccaccaaccagcgacccgaaccaccatcaaacaccaccgtcaccaaccaacccaccaacgcaccatcggcacgccgcgcgatcttctctatcgacgcagacaacatctgctccgcctcccgctgcttcaagtgcagccttcaacgctaatgcgtaacccaagaagatgaaggtggcttgcgattagccaagatttg

SEQ ID NO: 116262 - DNA, 230 bp, Glycine max
gtttttgtaatgcaaggacaatcatatcatcaacagtccgagtaaagaaatacaacgagctgatagaggagacaagaaaagaaagagaaagagtttgcagagttgaattccgaaagaggaatggcgaacacgaggagcttcctatcccgattaacaataacctagaacccgtctatggcggaggttccgcactcgaagaaacgcacttcgtttcgataatttgaagtcca

SEQ ID NO: 116263 - DNA, 249 bp, Glycine max
cccgattgctgtataaaagccttagcagcattgatagagagggaaacaacagaaaagcagcgtaaagagacaaatggaggtttggtagataccatgttggttaatgctagagaaaatttagacctaaggctcagctttgactgtatggatacagaagaacttcttaccatcacattggtagatttagaagcaggccttcagcaattaacacagtaatcattctttgcaatctagtagatattttggaga

SEQ ID NO: 116264 - DNA, 215 bp, Glycine max
catgtcacacccaaagggataaaagagaaaacttaatagtacatgggagttgatgatgaacaagagatggaggaggaggaggaggaggagagagaagaagagaaaaagaagacataagcaggatacctaccatactatacatacctattagtgtgagataggggtttagtggtgaaagagtgaagagagatgagtggagtgaaggggcagtgtac

SEQ ID NO: 116265 - DNA, 249 bp, Glycine max
gcaaaccaatgaacctaagggagaagataaggaggttgaagaagaagaagaacaacaacaacaacaacaagaactagaacaagaagaggtggttgaagaagagctagaacaagaagaggtgattgaagagtctggtttgacctatgacaaattcatgatccaaccttcacttgaaagttgcaccaatgattatgtcctgccggattcagatggtgatgacacactggaagctacatggagggctatcat

SEQ ID NO: 116266 - DNA, 251 bp, Glycine max
cttggatggagtacttacttcatttctaaagcaactagaaaatggaccaggagaagagatctatctcaccccaacagtcagaaaggtgacactataaatgtaggatcgggaaatttaaagatgtccttttcctcaacctactggacaactcaaaaggctgtatgattccaaaactggagttgatttacctattcagcaaagctacctttggtatggatctagtgagggcgatagtgatcctcaggcttctg

SEQ ID NO: 116267 - DNA, 247 bp, Glycine max
ttcgtgtcagccataggtaacattactacgccttcctcgttgatttttccagttaatgatttattcttaaattattaattttgttgttgctccagttaattttcgatgcattataaagatttcgatactttgaattaataaaagatcatccagaacattacttttatgatattgattataaaagcgactaatttatcatacatcaacgtatattattaattagagtgacattaagtttaaatctgtt

SEQ ID NO: 116268 - DNA, 246 bp, Glycine max
gctcgtcaaccaacctacctctctctctctctcactcactcttccctattttgtaagcaaaccccataaccatcaccatcatcatcatggtcatcattaattgcctccccatgaagcttctttctaatctttctctgactttataaagcttctccttgtgtacatatcaaattaaccagttgggagaggaagtcgcccttgagaggaagtacaaccatgaggaagccagaggcgagtaataataat

SEQ ID NO: 116269 - DNA, 232 bp, Glycine max
gttgaagatttgaactgtgggtggtggtgtgggttgacgagggtaggaagcgaatgacaggtaggagtagaacaattgtgttttgtagtgaacctggtattggttgaggattaaaaaaggtgggaattttcagagtttcttagcgtttctcgttgatggttgagggaatttggcatctggggtgtttgagttttgttttgattcatttgggttttggttggtgaacgggggg

SEQ ID NO: 116270 - DNA, 233 bp, Glycine max
cggtggaggaaccatttggagagagagccttagccgaccatatctccaatttggttctcaagtggaccaacaaaaccaccatctctactagtggctagcttttatttttcttcttcttcttcctgtaattttattatctgcacttataaaatgtcgctttatgtatttattttatctgggatgatgataaaggtttggtttggttccaaaaaaaaaaaaaaagggcggccgcc

SEQ ID NO: 116271 - DNA, 220 bp, Glycine max
ctcgagacgattcggctcgagctcgagcgctcgagccgaatcgatcgaactcaacaaactcttcttcgtcttcagaaccggcggtgtcggagcgaagaggaatacaaggggctcagttcgtagaggatgtccaacattacctcactcaatcgggtctcgatgttggttcagccctggcttttctccaagagagacttcagcagtacaaggtagtagaaat

SEQ ID NO: 116272 - DNA, 249 bp, Glycine max
aacaaattctcagggcatattagtgcaatctcatcatattccttggagagcttgtctttatcccacaacaagttacaaggcaatattccagaatcaatttttagccttctaaaccttacttacttaggtctatcatcaaacaatctaagtggatctgtcaaatttcatcgtttctccaagcttcaaaatttggaagaacttcacctttcacagaatgatcagttatcactaaatttcaaatccaatgtc

SEQ ID NO: 116273 - DNA, 248 bp, Glycine max
ctcgagccggagagagtgcaataaaagcccaagagaggagagtcaatcaaactcgttgctctctcactcagcttcattcaatcctctgaacaatctaatcgaatctcgaatcctcttactttccctcttcaatttcaactcacattcctttacttcaatctcaatctcaaaccagcagcatcagaataaaaacctagaatttcaccaagaaaaccagaaaagaaaagaaaagaaaaatgacaagaaca

SEQ ID NO: 116274 - DNA, 245 bp, Glycine max
caaagccttcaacaatcagaagcaaagaagtgaagagagagagaaagagatcattctagagacagagagaaaaattagcttcagtagatattagtggtgggtttgggtttcaagagaggagacatgcctaacttgaacccaacacttcaagtacttgcttctgcatacccttaccagatcccaaaggtcttgatctaattttaagtgattcttctgatgactatattgaaggttacatgaagcca

SEQ ID NO: 116275 - DNA, 240 bp, Glycine max
gttgctgaaaggatcatgttgttgaagctttttgtgatatagtctgattatgttgctaggagttaaagctggtgcagacccagaaaagatcttccaatcaaggtactagttccatccatcaacaaagttgtcaattgggatgcttcaatttcaaggttcttttgatgcaaactcgtgcttctaaaaaattcaattacttgatctctcgtacacgtcttggacaaattctcaacacaaaga

SEQ ID NO: 116276 - DNA, 243 bp, Glycine max
ccgcgtttcacttgtttcataacatgcaggccacagacgcgtttagagtcaatgacttcactttatccatacttctcatcgcgtctacgttgttgatggaaggtcaacaggttcacgcgcatgctattaagttagggttggaaatgttgatgatgtggagtggttgtttgaggggatgaaagtcaaggatgttataacttggactgagatggtcatggcgtatatggagtttgggttggtcaa

SEQ ID NO: 116277 - DNA, 243 bp, Glycine max
gtttcggaggctttcacatacaaagatttacatatctcttcatattcttaagaggggatttcacctgataccttgatagattttgttaccctttttttcttcgtttcttactttgagatttcctttctttgattccatttggtttcctttctgggtattctgaggggtttttggagggtttttctttctcatttttttttccaccatgcccgagtctcggaaacaaccggcttctagaccgaa

SEQ ID NO: 116278 - DNA, 242 bp, Glycine max
cggctcgagcggctcgagtggaatcccaagcatgttggcaattgggttgctgtttctctttctacaatacaaacgaaaatatggtacctcaggcggacaattggagtcaagagattcttattctgattcctcctcaaatcctcatggagaaagtagtagcgagtactttggagttccactcttcttgtacgagcagcttaaagaagcgacaaacaattttgatcacaccaaagaacttggag

SEQ ID NO: 116279 - DNA, 240 bp, Glycine max
ctcgagccgctcgagccgttttcataggatgtgtagggctttgatgcctggagatgatgaacatctgacagacgaagcagtatgggaaactcttccgcacttctggatttcaatatccatggtcttctttattgctgccactgtgttcacccttctaaagatatgtggtgatgttgcagctctaggatggtgggacttgtttattaacttcggcattgcacagtgctttgcgtttcttgt

SEQ ID NO: 116280 - DNA, 266 bp, Glycine max
  unsure (1)..(266): unsure at all n locations
ctagttctagattcgcgagcggccgtcggatctagaccctatacncttctctttctctgaaccttcttcttctctctttcacattctcataagatctaaaccccatacacacacacacacacatatctgcttcttgtagaacaagttaagtttgttttgttttgtcgtttgcttaaggattaatcaatcaattatctgatgatggaagagccggttgtggttaacaaaggagattatgatcatgatcatgatcagcctttggattt

SEQ ID NO: 116281 - DNA, 175 bp, Glycine max
cacagcttgagaagtgttattgcatcgttgttctaccacaaaatgagttggaagtgaaagcagaagacacaacatacactataccatgccttctgctccttccaaactctacgcaggttctctgcattctctcaatcccttattcactatatatgcagggtccgatgttttgggc

SEQ ID NO: 116282 - DNA, 254 bp, Glycine max
ggatttctcagccacttcgttgtcagtgacagtgggattgatgaacttgattggtagttggtttggtgctatgccgagttgccatggtgctggtggacttgcggggcaatacaaatttggtggaaggagtggtgggtgtgtggcacttcttggtgttgccaaattggtgttgggtttggtgttgggaacttctttggcacacattttgaagcagtttcctgtggggatcttaggggtgttgcttttgtttgctg

SEQ ID NO: 116283 - DNA, 190 bp, Glycine max
ggagggccttggcatccctcggacggaaatcatggtaccatctgaggttgtcggtccgaaacccgtgtcgggttccaacgtaggatgacatcttgcttaccgccgctagcccagaacaagctcagctgtacaactggacagctgtgagcgggaccaagcgcatgggtcggatctctgcctccaccttcac

SEQ ID NO: 116284 - DNA, 256 bp, Glycine max
gaaaaggagaatttaagaatgtgaagagtaccaagttgttccaatgctccctggcatttgatgacttgttggctgaggaacaaaagtatacaagagctttggaagtgattgttcacgactatctgttgcctcttaggaaagccaatgagtccaaaagaaggtctattcttcctaacttcttgcaacaagtggtgatttccaaagatgatctcaataatgtcctctcaaatgtcgaggcattgttgaaagtccatac

SEQ ID NO: 116285 - DNA, 211 bp, Glycine max
agagaagaaactaactagtaagttcttgtcagagctttattcaaacaggacctaaagtatagactccatagaggaagcacaagttaagttaatcatatatggagtctatactttaggtcctgtttgaataaatttctcacaagcactaacgagagaagaaactaactagtaaaaaatgaaattaacttctcccatactagcttctctaaaa

SEQ ID NO: 116286 - DNA, 221 bp, Glycine max
ctcgagcgctttgaaactagtaattttattatgttcaaatttgtactagaagagtcacattatagtttgttatttgtttcttaagggcagtatgattgtgttagatagctgccaaatatgtttcaaaactttgatcaagtgtatccaatatcatatgttttaattttaaaaaaaaaaaaaaaaaagggcggccgccgacatggtagcccgacgacccggga

SEQ ID NO: 116287 - DNA, 188 bp, Glycine max
tgaaccactaaggttctgttaaatttcaacaaaccaaagcagaatttgtagccttctcttttagtgtgagatatatcatatagccactatggttgagcttttggcagtcatatgtactatcttctcagcccttgcctttgtttatcttctcaaatatcgtaacaaaaacaaacaagagttcccacaca

SEQ ID NO: 116288 - DNA, 230 bp, Glycine max
ctggcgcagaaaacaacctgtgaagtgatcagccctaacctctcgatcatctcttcttcccgtagtattatattatattgcctcttggattgatcttaccatgaaccaaccctcccttttagaatatccactttcttgttgattctttaactttgttgctcagctcacagctcgcagagacgaacgtagaaataataatgagtaacacaatgaggccaaggaataaagcc

SEQ ID NO: 116289 - DNA, 188 bp, Glycine max
gtgaaattatttggtgaattaactccttcaggaaatccagatttacagctttctgcagtacgagaactttcaattatgactgccatgagccatcctgcagcaatgcgattcattgctgatcaatttccaagagaatctatatatcacatttcggtttcgtcagatgtattaacaagagagccagcaag

SEQ ID NO: 116290 - DNA, 170 bp, Glycine max
tgcgcgtgtagaagaggtgttttactagtatcattaatgagttttaggttggctaatggctatatatatataaatacacatttggaagaagcggtgattgattggaattaaacagaaacaaaaagtgacttgttgattatgtctgatgttgacgagattccgagtgctca

SEQ ID NO: 116291 - DNA, 145 bp, Glycine max
cttctccttcaaccttagtctcccaaaaccactgtcacggtaaagacttgttaccagtcccgttcgcacacccacaacaacctctcttagaccatctgctccaccatcttcaacgccaccaacctcctcgttttggatcatgctg

SEQ ID NO: 116292 - DNA, 188 bp, Glycine max
ctattttccgctctaacaatgattctgataaattgtcagcatctatttcaaggtttcgtctttatttgtgccttttttcccccagaaattcataaattcgtggaagtacgaggctcgatttgtgcattgaattggtgccgcatttactctacgaattgaacaaggtggcatgatgcgacgagatgatg

SEQ ID NO: 116293 - DNA, 167 bp, Glycine max
cgggtaagggtgaagcgaagtcaagatcattcagtgaagtgtggtattgagcgaagagcagcgatggaaagaaagggggcggaggaggaggcgtgtcaaattcgaactacgtggtgccgctggacaacatggcgaactcatcctgcataacacgtcctttagccgag

SEQ ID NO: 116294 - DNA, 251 bp, Glycine max
attatttgcagctgctatgtttgctgtagcggccattctatagtcaacaattccaatacagcattttcgggggtagtcactcgactcactcccagccatcttccttcattaactactttatttgtttcttactttgttactattgtgtgacaaattttgaccttttaatacatttaagatgaaattgacattagtgcttttatgtttttgcttccccttcccatatgacaaattgtgtacaacaagatttc

SEQ ID NO: 116295 - DNA, 249 bp, Glycine max
ctccccactctcactccacttcgtaactcaccaccaacctacgcgacgagatctataccgccgaacattctcgaaccctcccatatcgaacaagttcgtgttcattcctctctctctcttttcctttcataccatttctcaattctcactttctttcttagaaagaaaggggtgagagtgatgggggatgaaaaaggtgagaagaaagaaaaaactagtcccagtgccagtggagggaacgatagcaag

SEQ ID NO: 116296 - DNA, 246 bp, Glycine max
gcgcgtggtcagcctgttgctggaagccaccgaggccaccgaggaaacctccgatgccgccgctgccattcgcgtcgtcgatgcgttcctccccaagtataaatacgactatagcagaaagcagttctacgagcacacaggcagcttatctattcatggagaagcatcagcaaagtcagatctgtacagggaaaggtttctgttgttgttccagaggctctctcgtgaccagcattttcagcgcct

SEQ ID NO: 116297 - DNA, 251 bp, Glycine max
ataacttataagacatgatagtgttaggttatactatactatactataacctaacactatcatgtcttataagttataacagagaggccctagaataaccagaggcacatgtctgacataaatatacatgatagtgttacgttatagtatagtatagtatagtttatacgctgtattgtttggtttggtgtgtcatgtatgttggaataattttatccattatagtattttgttgtccgatcatattaaaa

SEQ ID NO: 116298 - DNA, 245 bp, Glycine max
gttttcaatctgatttcctcttttaaagtagcacacgccctcgatctgaatgtatgtgttaattttcatactcgtgtttatgattgttgatatttctatgcgtcgctctctgtttctgatgtttccaatgttattttccggtttggagttcatttctttctggatcggttatcattgggtcttaccgcagaatcggttcggcgtatttctacttgttattagtaccaccactgtttccagcaatt

SEQ ID NO: 116299 - DNA, 246 bp, Glycine max
ctcaattatcacttccatgtatttatctacaccattgaaactataaggcaaaggttgtcgaagttaaaggcaatggaatggttcagatgccccgtttctgggcttttactccccctgtttttctttcttgctttcttcatcttctttccccggaaggaacaaaattatgttacccacttgcctcctccttcgttcctttccactatcaaactcaaccacacaaatataaccactttttctccctct

SEQ ID NO: 116300 - DNA, 244 bp, Glycine max
gagggatcaggtggacgatgaggcaggtgtggtggtctaacatgcaatatatgttgtccactgaataatgggatggggaaggacaaagtgggaaaggaaaatgaaaaaaaaaagagaaaagaaaaaaaaatcctcagctattaattttcttaaatgagtatatctaatagttataatttgtttttcaatgtggaaaaaatgtttcacttctttacagtagaattggtcgataattattaagaca

SEQ ID NO: 116301 - DNA, 245 bp, Glycine max
gtctgttttgccgtggaatatcaagtaatatcatatgaaatggaaatgggtaggtggtggtcgagcacgttggttttcactgttctctctgcaccaatacttataatagcattactctcctccacgttcgaagaagttgaccatgataacacagtgcctgtgacgggtcttcttcacacggattcccgatggatcctcgaccaagatggccgaagggtgaaactagcctgtgtcaattgggtgtc

SEQ ID NO: 116302 - DNA, 239 bp, Glycine max
atttctatgattttctgtggtttttggtttagttcgtgaatggataaactttttcataagcatttgtagcagaatgaaataagtaaaaataagatgggaaaatgaattgagcttatcttaatctaagttcaacttacacatctcaacttttggagaagttaaacatgagaactattataatagttaaattttcgtttatggagtagttggattcattttaccttttattttctactata

SEQ ID NO: 116303 - DNA, 250 bp, Glycine max
  unsure (1)..(250): unsure at all n locations
cgccttccctattcctgttctactcacttcatcttcttactctccctaccttgaaaaaacgtgtttttttttatagaaagcgcagcgnnggaactttacttgtagcaagcaattgtaacgcaagcttcttccttttcccatttccccctcaaagtttgcgacttttgagattctcatggccttccaactcaaacccgaacctgggtctccgcctatgtccacttccaccacccagaaaaactacaaagaa

SEQ ID NO: 116304 - DNA, 234 bp, Glycine max
ctcgagccgattcggctcagggagggtagcacaaagaaagagagtcagtttatggacaacgaagtggaatcatttggaacagaattggtgataaaacaagatctctcaggcgaacttggtggaactgtatgggatgcttcactggttttgatcaaatactttgagaatacatcaatctttccgatcaattattttaaaggcaaaagaattatagagttgggagctggaactggt

SEQ ID NO: 116305 - DNA, 140 bp, Glycine max
atccacccaatctcgtactacaactacaaagccctcttctcttttgttttctgttgacgaaccattttctctgtttgcaaacttgagtggtgcactcgcatcagcgcagaggcacctgcagagttgcgattgcgctcttt

SEQ ID NO: 116306 - DNA, 236 bp, Glycine max
gttttaagagtaccatgcttcctttgcaacgaggcaatgagctggttatccagttttctaatagtccccaccaccagcaacacaaaatctccgaagatctaattctggatgattatgcttctctgaatgtcaatgattctaaccaaaaattcatcactagtagcagcagccaaccaacaaagaaacttttctatggggcaaataaaaagaatcatgactcaaacgaacataagaag

SEQ ID NO: 116307 - DNA, 247 bp, Glycine max
ctcgagccgattcggctcgagtcaaaatctagaacagcatcagactcaatcagcatattctgtcttcttcttctgaaaacacaaaatgcctcgcggtggtggcggtagctccggtggcggaagatctgctcattcagctcgaagtcatgcttcacggccagctcctgctcagagtgacaatcgtggatctctctttgggactgtagctgaaggattggcttttggttctggaagtgctgtggcacac

SEQ ID NO: 116308 - DNA, 210 bp, Glycine max
cctttctcactaggtttcccttttttgtgtttagaattcacatttgcctttgctcccatcctacttgtctcccattttttctctatacagctagccttcttacaagcactgttccctagccttcccccacttgctctcttcattggaccattggataatatttttcgagtattgcaccaaaggcatatcatgatccatacattgcaaagc

SEQ ID NO: 116309 - DNA, 238 bp, Glycine max
cttcttcgtcgatggggtccacaagccctacactggccagagaaccaaagacgctatagtgacatggattaagaagaagatagggcctggtgtgtccaacataactacggtggatgatgctgaacgcatattgacagctgaaagcaaagttgttttgggcctccttaactctttagttggtacggagagtgacgaactagctgcagcatcaaagcttgaggatgatgtcaatttttat

SEQ ID NO: 116310 - DNA, 237 bp, Glycine max
accattcaaatcgaaattcaaacccattcaaccctccaaaccctaatcccaagtaattatcagcttaatcaaccccaaaatccgatccaattaatgaagccatgaaattatagtaattagtaattaatcaacggttcccggtttctgcaaatcacacacagcgatgccgagcgtggccgtgaaactctacagcgtgtttttcaagtttctcttaaagcaccgtttgcagaaccggat

SEQ ID NO: 116311 - DNA, 232 bp, Glycine max
cggctcgaggcaaggcatgctcagaagaagaacaaggttgaaaaaaaagaggaaggtggtggtggtggtggcaacaacaagaggagcataactattcaaaagggaaggcagaaagagtcatcatcatcattcatgtctatgtgtatgaaagaacacagatactgcatggtggaacagaagctgagggagttggagatgttggacatgaacaatgtggaatatgtattggaca

SEQ ID NO: 116312 - DNA, 228 bp, Glycine max
tccaaaatctatagcaacacctttctccgtttatttattaaaacccctacacaaacacactcatcttaagctcaagttcagagtgtgagcaaaatgaaactgtgtttacttttggtgttgttgttggtcacattcacagtggccttatctgggaatgtcagctatcacggtcgctcgcttctcattgatggccaacgcaagcttcttatctctgcttccattcattac

SEQ ID NO: 116313 - DNA, 229 bp, Glycine max
gaggaaagaagcaactgacggacggtcccttctaacctatattgagcttatgggttctttgtttagtatggctaatacaaaggccaatcaaagtgagtctagtgcaacctcaccaaatgagacctctaagaggcaaagaatgtcacctgcctctgttgaagaatgtccaagacttattcctaatatcccggatgagttatcccttcagattattgctagacttcctaga

SEQ ID NO: 116314 - DNA, 245 bp, Glycine max
ctcgagcggctcgagcggctcgagcaaaattgtttatgtaggcacgattaacaatgatgagaagctaatgctagaatgtttagtactgctgaacatttcacctcattcattctgtgcttcactcactagaaatagcttctcatcattgttaatcgtgcctacataaacaattttgccacattgttctgacaaaatacaggaagcgtttggaatttccaaatgttttgtcgcctcctttataagct

SEQ ID NO: 116315 - DNA, 258 bp, Glycine max
tctggagaaaattgatgatttgattcttaaccgatcatctagtgggttggttcaaggagagtggtgttcaaactcagaaataaacaagacaacaaaggtttcagaagctgaggaagagttctgctcgcaatctggcaatattgatgctgtaaaaccagggccatttggcatcaagcttaaaactctactagctgatattgagaacacaaggaaattcagaactagccagtgcaaatcctttgaaagttggtgacaaaa

SEQ ID NO: 116316 - DNA, 258 bp, Glycine max
tgtttttagaaactttgatgcctcaattaattctgatctgaccaagtctgatctaaaacaaagatcattgaagtggcctgtttctggtatggatcctcagaagggaactgcagtcggtaacatagagctaataaatggaaatggatctgttaaacttatgagatgtgttaaacgccatcgaagatggagtgtggccaagataaaagctgttcattggacgcgatatttgctcagatatactgcaatagagatattctt

SEQ ID NO: 116317 - DNA, 240 bp, Glycine max
cgcgtttttatttctcatttcctttttcttcttattaatttattttcctcctttttttggggccgtaaaagaaagaaaacatttccattttttctcagatctgcgaaacctcttagcccccgaacatggcaaactcctgcgccacgccgtccacggacgaaacggcgcccaagaacggcaaaaagggaaaaaaggaaaaccccttcgcgatcgattacggttttaacgccgccgccgccg

SEQ ID NO: 116318 - DNA, 228 bp, Glycine max
tacacttttctccaaaactatccaacaagggaaacagaatattattccattcgtttcacttccacacaacataaaaaccaaaaaaacacctacgccaacggcaacatcagcagtcagcgtcactatttccaacatctgtactatttcctcctctcacacgctcctgatggaaagccgaaaccttccggcgccgctgacggagttctggtcgccgatggggtttgattt

SEQ ID NO: 116319 - DNA, 243 bp, Glycine max
gaaggtcctacctgctgattggaaaaatggacttatatatgattctggccttcagaagtactgacattgcacaagaggcttgttccccctgcgatgatgggacatgattctttgctgaaaaataactcacatatacgcatagatagtaggcatcaatttaggttagtggtaacggcagggtatgatggcaagtggatttgggcaaagaaggtcctacctgctgattggaaaaatggacttata

SEQ ID NO: 116320 - DNA, 151 bp, Glycine max
  unsure (1)..(151): unsure at all n locations
gctcggaattcggctcgagcaacaagccatctcaaattgaacagctttcagtcaccaaacaaacaagtttccatgaaacttgcattaganantatattcatcacatccatggccaagtgtgaagctactgttgtcccagatgtgaaccaac

SEQ ID NO: 116321 - DNA, 226 bp, Glycine max
gttataatgcagagtcatccagtattcctgttaagacagtgcttaactgatgaatctgcaagttataatgcaaaatgtgtaataggtgataatttagggacatgtactactaccacattgcattattctagagatgtctcttttagaacaaatgatagtgtagttactaatagatttgtttcaggaaaatttggcatatcagatctgcagtctgctgatcttccag

SEQ ID NO: 116322 - DNA, 226 bp, Glycine max
ctagcatcccagttacatccgttccgctccagatacgatacaaacaaaagtcgttctagcgtggatcacccgcgtttcactttccgctctctctaccctttcggtccatgcacgccgttctatcggcaccgttaaccggcgtctcatgaacttcctcgcatcgcaagtcccaacctaacgccaaacccgttaacggtgcatccaccctagtcgtcaccgtcgacgc

SEQ ID NO: 116323 - DNA, 244 bp, Glycine max
gttttcgagatctctctttgtcctcaactataccagggattgagatttgaagttctgtgtcaatatccgagtttctcactaccgagcttaaggtaatactattcaccttcactcctttgatggttcaaattttgaaaccctttcttctatttgaattttcaaccgaaaaagcttagtcgctttcttgaagcatcaccatgttcaataaacttctctatctgaaagatgtcactttcaagcaaca

SEQ ID NO: 116324 - DNA, 227 bp, Glycine max
caggcgtgggagtgctctcctgggaaagagtttgcgtggaacttgttgtccctctttactacttctggaatgttgtttctagaagtgagcttgctggcttttttgcttcaaggaaatagtaccactggcttagaggcgttgacacgaacttttggtatatcagggattattgttggttttgatatcttgttgaaggtaattctgtcgttttctctgtgagcttgctg

SEQ ID NO: 116325 - DNA, 214 bp, Glycine max
taaagatgttgatgaagttaagaaaactgcacattacttaaagacctgaattgaagaactggacaaagagaatttggcaaacaggcagaagcctgggtgtggaaaaggatcaggtgttgaccggtcaagaacagcgacaaccatttcttgtaaaaaagtaactgctagataaaatggctgaatttcagaccctgagagaggccatccatcaaga

SEQ ID NO: 116326 - DNA, 233 bp, Glycine max
accttcttattttaaaaaaattatcattttgtttcaatctttaattttgctaatatttaattcttacattttgattaattaaatcaatttaaagatcccctcaaatgtttttccatcatcattcatagtcactttccatgttttccatagccttcatcgctcttggtctctgcatccaaaagagaattagggggaaaactcatgcctaatttttagtgggttacctgatgcgt

SEQ ID NO: 116327 - DNA, 203 bp, Glycine max
cctctcgagccgattcggctcgagtgcagttgcacccctcggcccctttttatttgttgtcatttacaagatcttctgttcattacagaaattgcacacatttttcttgtcggcagtgattaaccaaccactatctatgcaattacatcccttcatgatatataccgtacgttacatagagtagttgattactttatatacat

SEQ ID NO: 116328 - DNA, 129 bp, Glycine max
gacgcctattactgtaacatatgaattatgatattgatattctggtattgattgactggtttgttttcctatgctctatgatatataaaaaatgaaatgccaactgttgttgtcttctcggttatactt

SEQ ID NO: 116329 - DNA, 247 bp, Glycine max
agggaagagaagcttccaagacgtttacaacgattccaacaacacgttcctctaaaaaagaacaacaccacaatctcatcatcaagacatgttgtttagtacgagatttgggttagagaatggaatattctcgactttcgaagcctcgataaaaataaggatgatagtaataataataatcataggatagtgtcagatactccctctagtaattctctggcgtcttggaattttggttctgtgccaa

SEQ ID NO: 116330 - DNA, 230 bp, Glycine max
gcattctcattttgcttgactttggcagcgaccaattaaataagctgagtgcctcaagaacatggatgctgaaacgctgacattgcaaaaggaagtggtttttaaccagacttcaaagcaagtcatggcttcctctgtgatgacgcaaaagttccttttgtagaacccgtttgtaaaacgatggttatagaacaagggcgtgttggacacagtcaacatcatgatgaagt

SEQ ID NO: 116331 - DNA, 249 bp, Glycine max
cttctcgagccgaatcggttcagcgcctcgagcggctcgaggaaagttcaccatagtttttgtgtaacttaaacgtagaaaatattatcaagttgttgcacaaatcattatgggtactctcatgcttctcagaagttcaccctcctctttctcctcatttctggatcacttttatcaacttcctttgcaggtagagtacgatccaactctatcaagaacttcgctaaagatgtgaatgcaatcgaagag

SEQ ID NO: 116332 - DNA, 240 bp, Glycine max
aaagccggagaatgtttactatctttgaacaattctgtatataatcttcatcaaaagaagttgtttccgtataatcctaaagtgcttctgaaacgtctaagaagatttcaagagttatgctgtaggaaaagggattccatggactgaagactgagtaataattaccaaaactgcatgtctgattctgaaagcttggctatcttatgctattaatggctatagaactactttttgggtatt

SEQ ID NO: 116333 - DNA, 239 bp, Glycine max
attttgttggaaggaggtaaaggaagttcgtgacaaaagcggcaatggaaggagaagagggttcccagcagccacagttggtgctcggggacaagctattccttcttcgacaacccgatgttaagacattgacaaggttcgctacaaggaggatgttttcactcacatcaaccaaaacgatatggtccccttgtatgaaaccctagtggccgattccgtgttggacttggatcgtgccc

SEQ ID NO: 116334 - DNA, 276 bp, Glycine max
caaaaacaagaggacctgggagagggaaagaagaagaagaaacgggttcaaccaatacgcatttggcatcaaacccacacaaagcctcaaacttcttccttctctttccactctctcacattctctcgcacacttccccattcctaccttgattcagatttcaatccttcaaatttgcgccaccgataccccattttctcttcctctgttatttatccccgtaagaaaaaaaagaaccgtttttgcgtgtaacagagaagcgccccctcgttgcca

SEQ ID NO: 116335 - DNA, 278 bp, Glycine max
gctcgcgcttcaactaacgccaactgcgtctgtttcagctttctgcttttaccacttcctttctcagatccattattcttcggaaccaactcgcaccgcagcgaatctagcagcttctgcggttccaacaatgctcttgtccggttctactacttgtagctttttattcctcggattcaacaccatgacacctggttacgaatacgatattaatgatctgcatcaagaggctcaagcaagatggttgaagcctgcagaagtgatgtacattttacaga

SEQ ID NO: 116336 - DNA, 257 bp, Glycine max
gctttctgatcttcgtttctctccgctcacactcagtcacagggatttctccccaaggtttccatctatctcatgccctaacttccctccacttcacgtctttttctatgtttatgtctcaattgtcgattctattcttttttaactgcattagaattgagggctttacttcaatcacttgggaagggggaaattgaaaatataattcaatgttaaatgatgttcaattgcaatgttacgctctttgttttggatgg

SEQ ID NO: 116337 - DNA, 278 bp, Glycine max
gaagaaatgaaggtggtggctatatgtgcattgcaaaactttgtcatgaacagcaggaccaatagacgagctgttgcagaagctgggggcatactggtgattcaggaattgcttttgtctccaaacacagaattgctgcacaagccgctttactgatcaaatttttgttttctacccatacattgcaagaatatgtgtcaaatgagttgatcaggtctttgacagctgcactggaaagagagttatggtcaaccgccacaatcaatgaggaggttttg

SEQ ID NO: 116338 - DNA, 273 bp, Glycine max
aatcttcctgttgcaacagaagaggaggacacagaggaagctaagtctctgaaagatagcacagttatagcagatgaaggtggtaaaacacctgccactgataatgataatgagggggaggaagctcagctgacccatttggacttgatgctctgattcctaattccacaaagaaaggtgaaaaattaaaggcaaagaatgaggcatctgtgaaaataagggaggatgaggaagaaaccaatagattcctcaagtcacaaagagaagccctga

SEQ ID NO: 116339 - DNA, 265 bp, Glycine max
tgtgagtgatgctttattgccaaaatctgctactggtcattttgaaagcccagctatttcagagtctttagacattgtggatgatggacctgtgaacaagtcaaatggtacagagtgcagaatattaatccactaccaggttcccagaaagacataaaagaagatgaaatcaatattaatatcaaactaaatgaagaatataacaaatctgttgatacttataccgaatcccgtcaagctcaagatgctggactattagtgaaag

SEQ ID NO: 116340 - DNA, 263 bp, Glycine max
cgaacatcgatcgcgcgccggagctgatttccgcggtggacatcttccaccggcggcgggtggtgctgtcgcgagtggtggatcacggagacggagtccggctggttccggtgctcgccgttagaatcgatgttcttgatcagaaggaggcggtggcgacggcgatggagtatccactgagcgatggagcatgtgagattcccggtgaggatttgaggttgagttggatagtggtgaatccgaagggaaagcgtgcggtgaat

SEQ ID NO: 116341 - DNA, 261 bp, Glycine max
attcttcttgctgccaatactgacaattaatccccatgggacacctcagctctaattctcaaatgacactcatattattattagcccttgcaattttcacttcactaaatttggtccagcacaggttattaccacgccctgcacgacctctatgattaacactatcaccccttgtgccaacttcatcacaggaagcattaacaatggtttaactccatcagctacgtgctgtgattcatttctgtctttgataaccactag

SEQ ID NO: 116342 - DNA, 263 bp, Glycine max
catggatatgctaattacaagtccttaagagatcatttgcagaatgttgtatatgacacacctacaataagtgaatttgagcagaaatggaagaagattgtggaggattttgacctcaggacaataaatggttgaaagagttgttccttgagagacatcgctgggctccttcctttgtaagaggtgagttctgggctggaatgtctattaatccacacaatgaaagcatgcatgcattttttgatggatatgtaagccggcta

SEQ ID NO: 116343 - DNA, 254 bp, Glycine max
gttatgtcaagtattctgatctagctagcttcacttgctccacacgtaccccatagaggatttccatgctatgaggcaaaatgctttttatatgggaataataactttctcagcacatgccaactattccaaagtgatttttacttcaccctctcatcgtatcaaaagagtgttttacttcaagagaacaaacaagatagagtaatcagtcatgccatttggtttggtctcactctcagcctggaacaagcgtc

SEQ ID NO: 116344 - DNA, 256 bp, Glycine max
atagaactttgcttttggcccataatggacatagctatatatggttagtgtccaagtttgaatgtggcactgccttggagagtgagttttagttttctccttttaaattgagatgcctcttcttcctcttgtaatgttcacatattattatagcaacaaacacggtgaacaagttcaattctttcattttgtcaagtttgtatcttaaaaatgtggcttttttgtttttatcccttgttgctattggttagggagg

SEQ ID NO: 116345 - DNA, 257 bp, Glycine max
tgtataaggactacatagatcatgctaggagcatggaagttgaaatatggcatgatcttgcttttgtgtacataagtctgtcacggtggcatgatgcagaggtgtgtctttcaaatctaaggccatcaaactatactctgcttctagatgtcatgcataggtaattaatatgttttatctttgagttttatgatttttggaaaggacatcaatggaaacaacttgcagatattgtctaattcttaatagtatccttt

SEQ ID NO: 116346 - DNA, 259 bp, Glycine max
tttttatctctaacataggtagatagttaaaatgcaactagatttacacagaattcaaattatctaaactactaaagataaaatctaagtaatagagccacaaattcattggatgattccttttccagttttccggatattgcacaaaaattgttcctcgaaaaagttgtggctagaattgttacattgaattaaaataataggaaaagaagaggctccagttaggcaattaggctttggtcccatccaatcgcaacca

SEQ ID NO: 116347 - DNA, 245 bp, Glycine max
gcttagtgcgcgagtcgcatgaccctctctcccttataacccttccgtgtcttttacgagttagatttctcattcgtcattgaacagattcactctctctctctttagagatttgattgacaaacacaactaatttcaaagctaacaactttatggagagagagagagagagagagagagatggagggtgaaggaagaagaagagaaggaggagagagagaaacagcaacagcagcagcaacgag

SEQ ID NO: 116348 - DNA, 238 bp, Glycine max
caagtttgagcagtgagtagtggagagaaaagaatatatgtgtggctttttgttgatagttttggtacacggttatagcatgcgcgcacctgcacattagacaagtgcggtggttagatctctgaaacgccgttacataaatagcactgccactcaagcagaagcagtaccagtaccatgctgcttcaatgcatttcaccaatttagtaatttcgctcgatcccgaaccaataccttg

SEQ ID NO: 116349 - DNA, 221 bp, Glycine max
aaggttcctcttcctagagatgaaaatctctcttacatcacccgcttttttgaagtgttgccacaattcctcctctgttgcatccaccaggaatcgagtgaaatagaacgaagacatgttctgatggtcccccagttttccctcacgtagctttgttgacctcctttccttcgtctgatgaggttgacctcctttactttttctgacgaggttcaaacatg

SEQ ID NO: 116350 - DNA, 220 bp, Glycine max
tagcttgaaacgaagaaatacacatcgaggcatcatcgtcatcctcatcctctcttcttcttttacgaaagcataaagtttctccaaatcaatcccaactcacctccatttgtctcaaatcaattttctcgctaatccaatcctctaattgcccccggtgaatcaccaacaccccaatatataattcaaattttcacgtcaatctcatcgatctcgcgct

SEQ ID NO: 116351 - DNA, 262 bp, Glycine max
aaaatttagctgattgctgagcgtgtcaccccactttgttaatcattagtggggaaatcattctcttgttaattacctattcattaaggaaaagattgtgatctcaaaatggggaaatcaccaggaaaatggatcaaaaccgtactatttgggaaaaagtcatccaaatcaaatatttcacaaggaagagagaagattgtcaataaaaaagcagttgttgcttccaacgagttggaaaatggtttgtccttagatccaaccc

SEQ ID NO: 116352 - DNA, 263 bp, Glycine max
gtcgattataaatattctttcctttcaacccatcgaggcaccattgccaatcaaccgagcagttaagcgggtaatagcttcaacattgggaccctaacgcctcaactaggagatgccttttacaagaataaatagtgacaccctaacgcctcacttgggagtcaccttttacaagaacaaaactggagcagttaagttgaaaggttttcaagataaacctgggagtcgatcaagcacagtagacttgagatcggaacataatt

SEQ ID NO: 116353 - DNA, 212 bp, Glycine max
cgctttattgctgtactgttttcttctacactggtgtgttacccgttcaccccctccgtcgtcccttctcttcgctcctctgttccgacgcggcgtcgcttctcttggctcctccgtccctccgccgttggtggcgtgcttgcggcgagatctacagccttggaagagggttttggggttttgggtgaatctgcgattcttcgaatcaggtg

SEQ ID NO: 116354 - DNA, 164 bp, Glycine max
tgttcatagaatatgataatactctagacagcatacgttctttccctagagctcccaattcacacatagatgcatgaacattggagcaggcatacagcgtagcatcaattcggaggtgaaactcacttcagttagactcaggttcagtatcaaacaagaccaac

SEQ ID NO: 116355 - DNA, 256 bp, Glycine max
ctattacccaaatggggttccttctagatcatcatcttcatcatcagcttcatactcttcatcttcttcagggcaaaatccagggaaaacagctgctataatattaggaggtgcagctgcggtggcttttctggttatattgttgctatttgcaaggagtttgaagaagaaacatgatgattattgacagcagaaaatgatttctgagaaggcaaaattatcctttgtgatgcattgtttttgcatgtctagtaga

SEQ ID NO: 116356 - DNA, 236 bp, Glycine max
aaaacaatcatagattctcctgaaggataaaaagttttagtatccttgatagagattagagagggagggataaggtttgattttgattttgtctctggaagctaactgtcacttatgactgttattgcattgaaaatttttctgcactcacgcattaaatgttacttgatgaatggttcagcagcaaaaaaaaaaaaaaaaaaaaaaaaaaaaaaaaaaaaaaaagggggcgcccc

SEQ ID NO: 116357 - DNA, 171 bp, Glycine max
cccacttcccacttatactgtctagttctccaaccttccaatccaacaacacattttcacgtcttttcatcacacgttgttgttttcagacttaaaaaacgagatcttcctcctcctaggttgttgtttgttaacatttcaaaacagttagcagaacactatactctgata

SEQ ID NO: 116358 - DNA, 136 bp, Glycine max
cggctcgagcttctcgtgccttgctctctttatacacccgttctctcatgtgactctcttctttctggtttaattctactcctccttcgattcatctatctcctccttcatcttcattcttcatacttcatacaca

SEQ ID NO: 116359 - DNA, 255 bp, Glycine max
tctcgagccgattcggctcgaggattttgcccagaagctccttgaacatctgcggctaaggaaagaacgaatggcttcttctacagactcagaggtcaaaccaatcccaccatttgcctatagatgcatatgcttacaccaaacaaacatacagaggatccagacatacaaaagctactgaaattgtcagttccaaaactggggagatgctgaatagttctagcagaagctacagatcagtaaacaacggacaag

SEQ ID NO: 116360 - DNA, 200 bp, Glycine max
caatgagtaacacaggctgtttctttgagaaaacaagcttgccctggaaaaagaacaccagaagatcatccaggaacaagcttgggaggagctgcaagttcaggcttccttggtggtctgaattgtcccccattgagtttctgaaggatatcgcagataaagtgacaaaagctatatgcttgaggtctgcgagaaaatct

SEQ ID NO: 116361 - DNA, 252 bp, Glycine max
cacagaacttggacggccgtaacatcactgtcaatgaagctcagtcccgcggtggcggcggcggcggcggaggaggaggatacaatcgtggtggcggtggatatggtggtcgtagtggcggtggcggtggtggataccgtagccgtgacggtggttatggcggtggctatggtggtggtggtggtggtggttatggcggtggcagagaccgtggttactctcgtggtggtgatggtggtgatggaggctgga

SEQ ID NO: 116362 - DNA, 236 bp, Glycine max
caaaattaaaattccccaaaagcaaaaaaacaaaaaaaagaagaataagagaaagacaacactcgtagaagaagaaagcgtttccaagaagcgaaaggaaggaaaggggttttgtgatttttgaagaatcgcgtttgggagtagtcggagatggagctttcgactccgaattcttcctcgaagcacttgtccatcacgccgggttcaagggttttgagaagccctctctccgacga

SEQ ID NO: 116363 - DNA, 255 bp, Glycine max
aatgggaacccttgggagagcgatctacagcgttggtaactggattccatggactggctaagccattcctcgtctcggctatctcctccttggcggttactacgtctacgagcatctgtctatctatcgacttctgatcgacatatctaacaagggtcctagtggttggtgcatgtgtatcagtcgcggctactaccttcgtcattcaagacgttcagcttatcctctgctcgtcgatttagtatggacttgtcc

SEQ ID NO: 116364 - DNA, 240 bp, Glycine max
ttctcctcctccttcttcctcctctaacaatcactcttttcaccgttttcctccaaatccaaaccacctcttctctctcctcttccctccaaacccctctcatattgcctcttaaaacacaaacactcccatatggcttagtttcacttccaacaccatcgtccactcgtaaggtctcattctaccacaacgtaaccttaaccgtttcactaaccgtaggcacgcccccacagagcgtta

SEQ ID NO: 116365 - DNA, 276 bp, Glycine max
gctgcaatgagttgaagtgaagataagatatgtctctgagtctgagtcaatgtgttgttcactgtatttcccttcaacactaaccgttaatcgctacaccaatgcacgttgttgttgttgtgatggttttctttccttgtcttttcgccatatactgttcctttgcttctactctctcactctcgggagtttagctctttgctgtgatgtgaagtgaagcctctgggttggttccttcacgttgcaaagttttcatctttgttctttgtactatat

SEQ ID NO: 116366 - DNA, 141 bp, Glycine max
tctgcctgcaaattttcttccactcaatagaatatttctcatgtggtgttagtgttgcacctcaagcacccctgagattcgatcgcaaaaagcttaataagaacatggaataaagataatattctacgttattatttcatt

SEQ ID NO: 116367 - DNA, 231 bp, Glycine max
gggaggtgttcaatttggaagcaacagctaaggctttttccattgaggtgctctttttgggctcccgaaacagagaattagaaattcacacataggtcatgctcatagatagatactacatggtggggattggaaatagaaagaatgaaaagaggaacatgaacagggtctctgaatctaatccatttcctcttctcctcctctcgctttcgcctttctaatcaactttca

SEQ ID NO: 116368 - DNA, 259 bp, Glycine max
atttagttgttgttgatgaggatgatgatgatgatggtgttgttcgtaatgatgtagtagttgttgttgatgttgatggttggaatggtagtgatgaggggtgtgattggattgcgaatgagaatgtgaatgagagtgagagtgataaggtgggagtggaatataaagatgagaggagcagcggtaaagctcaacagtaccccttgaggccagaggctgaagactgtgcattttatctcaaaactgggacttgcaaatt

SEQ ID NO: 116369 - DNA, 272 bp, Glycine max
caaagattgataaaggggatgttggtgatgagtgtactctcaggggtgtcaagtttatctctctttctctttcttcttttgggaatttttcaagagtggaggtggagcaaaaggtggaggagcttaggggtcttgtgaaggcaagtgaacatagcaaagggtatgttttgtatttgggggatctcaagtgggtgttagattttagggctagcggatcacaaggcagagggtgttattgtcctgtggatcacatggttggggagattgggaac

SEQ ID NO: 116370 - DNA, 259 bp, Glycine max
aatagatcctctcaaagttgttagaactgctttggtagatgctgccagtgtgtcattgctactgacaacaaccgaggcagctgtggtggataattcacatgacaagaataaacctcctagtcgggtgccagatatggatgatttggatctctaacctgcttcaccaaatgatggaaacaattttttgtaccaatattggatttttgctccttccttttaaggatgtagttgaggcagagttataaacttgggtggcaaa

SEQ ID NO: 116371 - DNA, 262 bp, Glycine max
ctatgttagctatattcattaggaatcaaatatttttttctccatgggttttattcctttgatgtgggatatatgttaataatgctttttacacatatatgttaggaatcaaataataattttttcttcatgggtcttattctttggtgtgacatctatgttaataatgctttatacccatatatggttcagatttaaattatcggcacaggaatgcccagtatgcagggcgggcatctgtagagctacatactctaattta

SEQ ID NO: 116372 - DNA, 216 bp, Glycine max
tcccaaatcaataacaaacaaaccaaacacgacataaacgcaaatgcaaatgcaaacgcagatgctaactccgacgaccggagtaccgaagctccggccgcgatccggccggacgccgcttcagcttaagaactctccggccgatcccatccagccttccgcgaactcaagtcgaagccatattttgagatttcgttgatcgataaagagaacaat

SEQ ID NO: 116373 - DNA, 258 bp, Glycine max
ccgcaacagagagtagaaaagatggcgcggttgatcacagtggtgtggtgcgcggtggcggtgctactgtgcgccgcggcgggcgcgtcgtgggtggaggaggcggcgaacccgatacgaatggtggcgggggtggaggcggaggtggttcgggtgctagggcagtgccggcgcgcgctgaagtttgctaggttcatgagcaggttcgggaagagttaccgaagcgaggaagagatgagggagaggtacgagatattc

SEQ ID NO: 116374 - DNA, 171 bp, Glycine max
ctcgagccgctcgagccggtcaaacttcaaatgcaagttcgaagaaaaggtttccttcagtagctgctacaatcttttcaattgagtttctatgatcttgacatctacttgatcacatcaagtaatgagaatggtagaatcacttcctatgatgtgcagaatgagaaattt

SEQ ID NO: 116375 - DNA, 141 bp, Glycine max
gttgttttgaagtttcatttccttgtttattgggaatgctatttaattgtttcactcttataaataagttggcggcaattagctgtttccactttgtccttgatttttcaattaacaccttaacagagtttttttaatgtt

SEQ ID NO: 116376 - DNA, 270 bp, Glycine max
agcttacctgtccgccgcgaaagtgagcattggactgcgcagggtgcagaaaagagggaagaggagagtgaaaccgcgaaatgacgagcatttcgtatctaaccaacactctgctgccactgcacatccgaaggtttcggccttctctatccactctctcttgctctctggcctcagatgtggaccccactcccaattcctacttccccaagcgcggccaaaccctcgaactggtgtgcgagtcccttgccttcaaagggaagggcctct

SEQ ID NO: 116377 - DNA, 261 bp, Glycine max
ctatgggatttcagcacctggtcaacaagcgggagtcacctcgcttagaagaattttatccatggagactgatagagacaacccatttcccacataccgaaaaagccatgcctaacacatgatcagtacacacagtccctcatcatcatctcgttagcaactgtgcaagtgtgcattatttgatagccaattaacaaacactcaactttacaatgtctcaaaactccgtacttcattggcagtcttgcacaatcattagga

SEQ ID NO: 116378 - DNA, 260 bp, Glycine max
ttcttaataagttttagtcattaataatgtgttttgctagcatttttctgatttcaaataatttaatcttagaagttagaacatcctaggaatctaacttggtttgtgtagaattagaacattatgctgttgattaagtgctaacaatggaatgattttctctgtctttggattctgcagcaactatctctaaaagggtttgctggagacacagccaaggctcatgcaaagacaagtatgatagcaggagagggagtgag

SEQ ID NO: 116379 - DNA, 1690 bp, Arabidopsis thaliana
  unsure (1)..(1690): unsure at all n locations
tagagctatatattcgcacatgtactcgtttcgctttccttagtgctaccggctgccgctgttgtttctcctccatttctctatctttctctctcgctgcttctcgaatcttctgtatcatcttcttcttcttcaagtgaaaaatggccgatggtgaggatattcagccacttgtctgtgacaatggaactggaatggtgaaggctggttttgctggtgatgatgccccgagagcagtgttcccaagtattgttggtcgtcctaggcacactggtgtcatggttggtatgggtcagaaagatgcttacgttggtgatgaagctcagtccaagagaggtatcctcactctgaagtatccaatcgaacatggtattgtaagtaactgggatgacatggaaaagatatggcatcacactttctacaatgagcttcgtgttgctcctgaagagcaccctgttctactcaccgaggctcctcttaacccaaaggctaacagagagaagatgactcagatcatgtttgagacctttaactctcccgctatgtatgttgccattcaagctgttctttctctttacgccagtggtcgtacaaccggtattgtgctggactctggtgatggtgtgtctcacactgtgccaatctacgagggtttctcacttccacatgctatcctccgtcttgaccttgctggtcgtgaccttactgattacctcatgaagatccttacagagagaggttacatgttcaccacaacagcagaacgggaaattgtcagagacatcaaggagaagctttcctttgtcgctgttgactacgagcaagagatggagacctcaaaaccagctcttccatcgagaagaactatgaattacccgatggacaagtgatcacgatcggtgctgagagattcaggtgcccagaagtcttttccagccatcgtttgttggaatggaagctgctggaatccacgagacaacttacaactccatcatgaagtgtgatgtggatatcaggaaggatctttacggtaacattgtgctcagtggtggtaccactatgttctcaggtattgctgaccgtatgagcaaagaaatcacagctcttgcaccaagcagcatgaagattaaggtcgttgcaccaccagagaggaagtacagtgtctggatcggtggatccatccttgcttccctcagcaccttccagcagatgtggattccaaagagccgagtatgatgagtcaggtccatcgattgttcacaggaaatgtttctaagtgtgtcttgtcttatctggttcgtggtggtgagtttgttacaaaaaaatctattttccctagttgagatgggaattgaactatctgttgttatgtggattttattttcttttttctctttagaaccttatggttgtgtcaagaagtcttgtgtactttagttttatatctctgttttatctcttctattttctttaggatgcttgtgatgatgctgtttttttttgtccctaagcaaaaaaatatcatattatatttggtccttggttcatttttttggtttttttttgtcttcacatataaatattgtttgaatgtcttcaatcttttatttgtatgagacaattatttaagtatcgggtgacaatgcagctattatgtattgtcgattgttnnnnnnnnnnnnnnnnnnnn

SEQ ID NO: 116380 - DNA, 1467 bp, Arabidopsis thaliana
  unsure (1)..(1467): unsure at all n locations
ccccccccccccccattgaattgcaatgngcatttgggccccccctcgaggtcgacggtatcgataagcttgatatcgaattcgcggccgcaggagatgatgctcccagggctgtttttcccagtgttgttggtaggccaagacatcatggtgtcatggttgggatgaaccagaaggatgcatatgttggtgatgaagcacaatccaagagaggtattcttaccttgaagtatcctattgagcatggtgttgttagcaactgggatgatatggaaaagatctggcatcacactttctacaatgagcttcgtattgctcctgaagagcaccctgttcttcttaccgaggctcctcttaacccaaaggccaacagagagaagatgactcaaatcatgtttgagacctttaactctcccgctatgtatgtcgccatccaagctgttctctccttgtacgccagtggtcgtacaaccggtattgtgctggattctggtgatggtgtgtctcacactgtgccaatctacgagggtttctctcttcctcatgccatcctccgtcttgaccttgctggacgtgaccttactgattacctcatgaagatccttacagagagaggttacatgttcaccacaacagcagagcgggaaattgtaagagacatcaaggagaagctctcctttgttgctgttgactacgagcaggagatggaaacctcaaagaccagctcttccatcgagaagaactatgaattacccgatgggcaagtcatcacgattggtgctgagagattcagatgcccagaagtcttgttccagccctcgtttgtgggaatggaagctgctgggatccgcgagacaacctataactcaatcatgaagtgtgatgtggatatcaggaaggatctgtacggtaacattgtgctcagtggtgggaccctattgttctctggtatcgctgacccggattgagcaaaggagatcactagctctggccacccaaagcaggcatgaaggattaaggtgcggtggctccaccctgagaggaagtaccaagtggcttggattccgggggcttccatttcttgcttccctcaggaccttccagcagatcgtggattcccaaaggccgggtttgatgagtcagggcccggcgttagttccacaggaagtgcttctaaggaagaggcaaagcgttcaaatctagagtggtgtttgattcggctatctgttttggtaaagccttttgttcatcgactttgttgcaaaaaattcttttgttttctatgtttcttcaccactacattacatttctttcttgttgttatcctctttgggtgtttctgctattaacgaaaaaagaaattttcttttcttnnnnnnnnnnnnnnnnnnnnnnnnnnnnnnnnnnnnnnnnnnnnnnnnnnnnnnnnnnnnnnnnnnnnnnnnnnnnnnnnnnnnnnnnnnnnnn

SEQ ID NO: 116381 - DNA, 829 bp, Arabidopsis thaliana
ccggcactatacgactcacttagggaaagctcgtacgcctgcaggtaccggtccggaattcccgggtcgacccacgcgtccgtcctcactttcatcagccgttttgaatctccggcgacttgacagagaagaacaaggaagaagactaagagagaaagtaagagataatccaggagattcattctccgttttgaatcttcctcaatctcatcttcttccgctctttctttccaagctcataaaaaatggctgaggctgatgatattcaaccaatcgtgtgtgacaatggtaccggtatggtgaaggctggatttgcaggagatgatgctcccagggctgtttttcccagtgttgttggtaggccaagacatcatggtgtcatggttgggatgaaccagaaggatgcatatgttggtgatgaagcacaatccaagagaggtattcttaccttgaagtatcctattgagcatggtgttgttagcaactgggatgatatggaaaagatctggcatcacactttctacaatgagcttcgtattgctcctgaagagcaccctgttcttcttaccgaggctcctcttaacccaaaggccaacagagagaagatgactcaaatcatgtttgagacctttaactccccccgctatgtatgtcgccatccaagctgttctctccttgtacgccagtggtcgtacaaccggtattgtgctggattctggtgatggtgtgtctcacactgtgcccatctacgagggggttcttctcttcctcatgccatcctccggcttgaccttgctggacgtgaccttactgattacctcatgaagat

SEQ ID NO: 116382 - DNA, 1034 bp, Arabidopsis thaliana
  unsure (1)..(1034): unsure at all n locations
nnnnnnnnnnnnnnnnnnnnnnnnnnnnnnnnnnnnnnnnnnnnnnnnnnnnnnnnnnnnnnnnnnnnnnnnnnnnnnnnnnnccacgcgtccgcggacgcgtgggcggacgcgtgggcgtggatactccttcaccacaactgctgaacgtgaaattgttagagccatgaaggagaagctctcctttgttgctgttgactacgagcaggagatggaaacctcaaagaccagctcttccatcgagaagaactatgaattacccgatgggcaagtcatcacgattggtgctgagagattcagatgcccagaagtcttgttccagccctcgtttgtgggaatggaagctgctggaatccacgagacaacctataactcaatcatgaagtgtgatgtggatatcaggaaggatctgtacggtaacattgtgctcagtggtggaaccactatgttctcaggtatcgctgaccgtatgagcaaagaaatcacagcacttgcaccaagcagcatgaagattaaggtcgttgcaccacctgaaaggaagtacagtgtctggatcggtggttccattcttgcttccctcagcacattccagcagatgtggatctccaaggccgagtatgatgaggcaggtccaggaatcgttcacagaaaatgtttctaagctctcaagatcaaaggcttaaaaagctggggttttatgaatgggatcaaagtttctttttttcttttatatttgcttctccatttgtttgtttcatttccctttttgttttcgtttctatgatgcacttgtgtgtgacaaactctctgggtttttacttacgtttgcgtttcaaaaaaaaaaaccgccttcgtttttgcgttttaagtccccattgggtttgttaggcccctcgagtggatcggaatttgatgccccctttttccccctggtccctataaattctttgcggccgcgaattaaaacagcccgggggatccactagttctagagcggccgcccccgcggtggagctccacaatttgttaccgta

SEQ ID NO: 116383 - DNA, 933 bp, Arabidopsis thaliana
  unsure (1)..(933): unsure at all n locations
ctaccgacccagaggcattcgctgagttgaaggtgccaccggggtaaagcaagatcttgggctacttcaatgggacattttctgtgactgtggaggcctacacggatgagatggaaatatcttgggcgggctatttcgtcgagaagcactaagaattacccggtgggcaagttatcactgattggtgctgacagattcagatgcccagaagtcttgttccatccctcgcttgtgggaatggaagctgctggaatccaacgaacaccctacaactcgttcatgaagtgtgatgttgatatcaggaaggacctttacggtaacattgtgctcagtggtggtacaactatgttctcaggtattgcagaccgtatgagcaaagagatcacagctcttgccccgagcagcatgaagattaaggtcgtggcaccacccgagaggaagtacagtgtctggattggtggttctatccttgcttccctcagcactttccagcagatgtggatctctaaggcagagtatgatgaagcaggtccaggcattgtccacagaaaatgcttctaaactaaagagacatcgtttccatgacgggatcacatttctttctatttctccaatttgtttgtttcaaatttttttcccctttgtcatttgtgcactatgtgagaaactttccggttacagcgtttggagagatgtctaaggaggagcaggtttgaaaacccgctctcgctcttacctgaggcactaatccgcgtttcaaactcagcttcattctctattcttgtccatttgtttgtttgtttgtagcctcttcaaactcggataaaaacaaaagtttttggactattgatatttgtactttatttgagggcgaaccgggtattccgtnnnnnnnnnnnnnnnnnnnnnnnnnnnnnnnnnnnnnnnnnnnnn

SEQ ID NO: 116384 - DNA, 752 bp, Arabidopsis thaliana
  unsure (1)..(752): unsure at all n locations
atggaaaaccttcggtttcttcaggtggggggtttcccaccattgtttccccaggaattttgcttgcccgccgtttggccaaagggatcccccgctcttgcacctagcagcatgaagatcaaggtggttgcaccgccagagagaaaatacagtgtctggatcggaggatcaatccttgcatccctcagcaccttccaacagatgtggatttcaaagagtgagtacgatgagtcaggtccatcgattgttcacaggaaatgcttctaagtgtgtcttgtcttatctggttcgtggtggtgagtttgttacaaaaaatctattttccctagttgagatgggaattgaactatctgttgttatgtggattttattttcttttttctctttagaaccttatggttgtgtcaagaagtcttgtgtactttagttttatatctctgttttatctcttctattttctttaggatgcttgtgatgatgctgtttttttttgtccctaagcaaaaaaatatcatattaaaaaaaaaaaaaaaagcatgtttttggtttttttttgtcttcacatataaatattgtttgaatgtcttcaatcttttatttgtatgagacaattatttaagtatcgggtgacaatgcagctattatgtattgtcgattgttaaaaaaaaaaaaaaaaaaaagnnnnnnnnnnnnnnnnnnnnnnnnnnnnnnnnnnnnnnnnnnnnnnnnnnnnnnnnnnnnnnnnnnnnnnn

SEQ ID NO: 116385 - DNA, 618 bp, Arabidopsis thaliana
  unsure (1)..(618): unsure at all n locations
aaaaccgcctatataaatagttcaacactcggtttatttcttctcccctcttcggattgcctcgtcgtcttcagcttcatcggccgttgcatttcccggcgataagagagagaaagaggagaaagagtgagccagatcttcatcgtcgtggttcttgtttcttcctcgatctctcgatcttctgcttttgcttttccgattaagatcgtagaccatggccgatgctgatgacattcaacctattgtctgtgacaatggtactggaatggttaaggctggattcgctggagatgatgctcccagagcggttttccccagtgttgttggtcgacctagacatcatggtgtcatggttgggatgaatcagaaagatgcgtatgttggtgatgaagcacaatccaaaagaggtatcctcacattgaaataccctattgagcatggtgttgttagcaactgggatgacatggagaagatttggcatcacactttctacaatgagtcccgtttgtcctgagcgaggaccccggttcttcttaccgaggttctcctttaaacccaaagccacagggggaggtgcttagtcatgtttanccctnatncncagcatgatgtccattc

SEQ ID NO: 116386 - DNA, 532 bp, Arabidopsis thaliana
  unsure (1)..(532): unsure at all n locations
cnnnnnnnnnnnnnnnnnnnnnnnnnnnacccacgcgtgcgactgtataacttgccattcgtttgggttgtgcatcgccctcatttgattacttgtttctttgatttctccttccatagaaccgaattgttttcagtctgagatttctcctgccgagagaacgattttaatctattttcctcgagagtagaaaatggctgatggtgaagatattcaaccccttgtctgtgacaatggaactggaatggttaaggctggttttgctggggatgatgcaccgagggctgtgtttccaagtattgttggccgtcctcgccacactggagtgatggttggaatgggacagaaggatgcatatgttggcgatgaagctcaatccaagcgtggtattcttacccttaaataccctattgagcacggtattgtcaacaattgggatgatatggaaaaaatctggcatcatactttctacaatgagctccgtgttgctccccaggagcatcctattctgctcactgaagcgcctcttaac

SEQ ID NO: 116387 - DNA, 620 bp, Arabidopsis thaliana
cgggtttctctctcaaaaactacacacccgtaccacaccaccaccctcctcgtttcctcagagatcccctctctaacttctaaggatatagaaaatggcagatggtgaagacattcagcctctcgtctgtgacaatggaaccgggatggttaaggctggatttgctggagatgatgcaccaagagctgtattccctagcatcgttggtcgtcctcgacacactggtgtcatggttggtatgggacaaaaagatgcttacgttggtgatgaggctcagtctaagagaggtattttgacattgaaatatcctattgagcatggtattgttagcaactgggatgatatggagaagatatggcatcacactttctacaatgagctccgtgttgcacctgaagaacaccctgttcttttcactgaggctccttttaaccccaagggcaattgtgagaagatgactcaaatcatgtttgtgtcttttaactctcccgctatgtatgtcggcatgcaagctgttctctgctggtacgccagttattatacaacctgtattgtgctggattctggttaatggtgcgattttacattatgtcaaattttctttctaacttttatatttt

SEQ ID NO: 116388 - DNA, 497 bp, Arabidopsis thaliana
cccacgcgtccgcgtttttatatttactcctcccattcccttctccttcaatccttccttcctcctcctcccttcttcttcttcccctctttcattttccagccactacaaacttttctatctctactttttttcctctcgatttcaggtagaagaaaatggctgatggtgaagacattcaacctcttgtttgcgacaatggaactggaatggttaaggctggttttgctggggatgatgcacctagagctgtgtttcctagtattgtgggtcgtcctcgtcacaccggtgtgatggttgggatggggcaaaaggatgcttatgttggcgatgaagctcaatccaaacgaggtattttaactctcaagtaccctattgagcatggaattgtcaacaattgggatgacatggagaagatttggcatcacactttctacaatgagctccgtgttgctcctgaggaacatcctattctacttaccgaggcaccgcttaac

SEQ ID NO: 116389 - DNA, 470 bp, Arabidopsis thaliana
accacgcgtccggcctcgtcgtcttcagcttcatcggccgttgcatttcccggcgataagagagagaaagaggcggacgcgtggggcacgattccacaacctctttcttttcttctagatctacgtaaattcatcagctagagattgaaaaatggcggacggtgaagatattcagccgctcgtttgcgataacgggactggaatggtcaaggctggttttgcaggtgatgatgctcctagagctgtattcccaagtatcgttggccgtccacgtcacacgggagtgatggttggaatgggacaaaaggatgcatacgtcggagacgaggcacagtcgaaacgtggtatcttgactctcaagtatccaattgagcatggtattgtcaacaactgggatgatatggagaagatttggcatcacactttctacaatgagctgcgtgttgccccggaagagcatccggttttgc

SEQ ID NO: 116390 - DNA, 524 bp, Arabidopsis thaliana
  unsure (1)..(524): unsure at all n locations
ggctttggctccaagtagtatgaagattaaggtcgtggctccaccggagaggaagtacagtgtatggatcggtggctctatattggcttcactcagcactttccagcagatgtggattgcgaaagcagagtacgatgaatctggaccctcaatagtgcataggaaatgcttctaatcacagttcctaagatcaccaaacgaagacggaagtaaaagtaaaagacagaaggttaaaaacattgagattactaccaaatgccacatttttccattatattttctaatctctcttttatcctttttttttttgaatagcctctctatgttaatttttcaactaagcatacttttctttaaacaatttccactcccaatgtactatatataagcgactaatttcaattattatattttctattttaaacttaaaaaaaaaaaaaaagnnnnnnnnnnnnnnnnnnnnnnnnnnnnnnnnnnnnnnnnnnnnnnnnnnnnnnnnnnnnnnnnnnnnnnnnnntacaatc

SEQ ID NO: 116391 - DNA, 1211 bp, Arabidopsis thaliana
aatggctccaggaactttgactgagctagccggagagtctaagctcaactctaaattcgtccgggacgaagacgaacgccccaaagtcgcttacaatgtgtttagcgacgaaatcccggtgatctctctcgccggtatcgatgacgtcgatggaaaaagaggagagatctgccgtcagatcgttgaggcttgtgagaattggggcatcttccaagtggtcgatcacggcgtcgatactaacttagtggcggatatgactcgtctcgctcgtgacttctttgctttacctccggaagacaagctccgtttcgacatgtccggtggtaaaaaaggtggattcatcgtctctagtcacctccagggagaggctgtgcaagattggagagagattgtaacgtatttctcgtacccggtgagaaacagagactactcacggtggccaaataagcctgaaggatgggtgaaagtgacggaggagtatagtgagaggcttatgagtttggcttgtaagcttcttgaggttttgtctgaagctatgggtcttgagaaagagtctcttaccaatgcatgcgtcgatatggaccaaaagattgttgttaattattacccaaaatgccctcagcctgatctcaccctcggactcaagcgtcacactgaccctggaaccattaccttgctgctacaagaccaagtcggtggattacaagccacacgtgacaatggcaagacatggattacggttcagcctgttgaaggagcgtttgtcgtcaatctcggcgaccacggtcattttttgagcaatgggaggttcaagaatgctgatcatcaggccgtggtgaactctaactcgagcagattatccatagccacgttccagaaccccgcgccggatgccacagtgtatccactgaaagtaagagaaggagagaaggcaatattggaggagccaatcacgtttgccgagatgtataagagaaagatgggaagagatttggagcttgctcgcctcaagaagctggctaaagaggagcgtgaccacaaagaagttgccaagcctgtcgaccaaatcttcgcttagaatctctgtgttcttgcttacttgttgttgcgttggttctgttttgtacgttggtactgaaaattatgctaggcgcggtgtgttttgtgtttatttatgttctttcgaatcataaagaaataatgataattaa

SEQ ID NO: 116392 - DNA, 607 bp, Arabidopsis thaliana
tcgcctgcaggtaccggtccggaattcccgggtcgacccacgcgtccgggagcgtttgtcgtcaatctcggcgaccacggtcattttttgagcaatgggaggttcaagaatgctgatcatcaggccgtggtgaactctaactcgagcagattatccatagccacgttccagaaccccgcgccggatgccacagtgtatccactgaaagtaagagaaggagagaaggcaatattggaggagccaatcacgtttgccgagatgtttaagagaaagatgggaagagatttggagcttgctcgcctcaagaagctggctaaagaggagcgtgaccacaaagaagttgccaagcctgtcgaccaaatcttcgcttagaatctctgtgttcttgcttacttgttgttgcgttggttctgttttgtacgttggtactgaaaattatgctaggctcggtgtgttttgtgtttatttatgttctttcgaatcataaagaaataatgataattgatgcacttgtctatggcaaaatcatcatactcccaaaaaaaaaaaaaaagggcggccgctctataggatccaagcttacggacgcgtgcatgcgacgtcatag

SEQ ID NO: 116393 - DNA, 1378 bp, Arabidopsis thaliana
acgaaagaaggggacagaaacaaacataagccaatggaaacaaaaaaattctaaggtgaaaaaagccaatcagaagctgagtaaactctaagctcacacaaaaatggcgtctcttcttggaacatcttcttctgcaatctgggcttctccttcactctcttctccttcctcaaaaccttcctcctcccccatttgcttcaggccaggaaaattgtttggaagcaagttaaatgcaggaatccaaataaggccaaagaagaacaggtctcgttaccatgtttcggttatgaatgtagccactgaaatcaactctactgaacaagtagtagggaagtttgattcaaagaagagtgcgagaccggtttatccatttgcagctatagtagggcaagatgagatgaagttatgtcttttgttgaatgttattgatccaaagattggtggtgttatgattatgggagatagaggaactggaaaatctacaactgttagatcattagttgatctgttacctgagattaatgtagttgcaggtgacccgtataactcggatccgatagatcctgagtttatgggtgttgaagtaagagagagagttgagaaaggagagcaagttcctgttattgcgactaagattaatatggttgatcttcctttgggtgcaacagaagatagagtttgtggaaccatcgatatcgaaaaggctttgacagaaggtgtaaaagcctttgagcctggtttgttggctaaagctaatagagggattctttatgttgatgaagttaatctcttggatgatcatttggttgatgttcttttggattcagctgcttctggttggaatacggttgagagagaagggatttcgatttctcacccggcgaggtttatcttgatcggttcaggaaatccggaagaaggagagcttaggccacagcttcttgatcggtttggtatgcatgcacaagtagggacggttagagatgctgatttacgggtcaagattgttgaagagagagctcgtttcgatagtaacccaaaggatttccgtgacacttacaaaaccgagcaggacaagcttcaagaccagatttcaactgctagggcaaacctttcctcggttcagattgatagggaattgaaggtgaagatctctagagtttgttcagagctcaatgttgatgggttgagaggagacatagtgactaacagagcagcaaaagcacttgcagctctcaaaggaaaagatcgagtaactccagatgatgttgcaaccgttatccctaactgcttaaggcaccgtctgaggaaagatccactggaatctattgattcaggagttctagtttccgagaagttcgccgagattttcagctga

SEQ ID NO: 116394 - DNA, 1248 bp, Arabidopsis thaliana
  unsure (1)..(1248): unsure at all n locations
cgcgcacnnnnnnnnnnnnnnnnnnnnnnnnnnnnnnnnnnnnnnnnnnnnnnnnnnnnnnnnnnnnnnnnnnnnnccacgcgtccgcaaaaaacgaattctcgaagagaaagacactgaaatcgaaaaatctatagagagctcactcactagcaatggcgtctcttctcggaagatctccttcttcaatcttgacctgccctcgtatttcttctccttcctcaacatcttcaatgtcccatctctgcttcggaccagagaaactttctggaagaatccaattcaatccaaagaagaacagatctcgttaccatgtctctgttatgaatgtcgctacagagatcaactctgttgaacaagcaaagaagattgattcaaaggaaagtgcaagacctgtttatccgtttgctgctatagttggacaagatgagatgaagctatgccttttgttaaatgtgattgacccgaagataggtggtgtgatgataatgggagatagaggaactggtaaatcaacaactgttagatctttagttgatttgcttcctgagatcactgttgtttctggtgatcccgataactcagacccgagagatcctgagtgtatggggaaaggaagtaagagagaaagttcaaagggagaagaattgtctgttattgaaaccaaaatcaatatgggtgatcttcctttgggtgctactgaagatagagtttgtggaactattgatatcgaaaaggctttaaccgaagtgtntaaggcgtttgagcctggactactagctaaagctaatagagggattctttatgttgatgaagttaatcttttggatgatcatttagttgatgttcttcttgattcagctgcatctggttggaacactgttgaaagagaagggatatcgatttctcatcctgctcggtttatcctcattggttcaggaaatcctgaagaaggagagcttagaccacagcttcttgacagggtttggtatgcacgcgcaagtaggggncgggtagaagaccgcccgacctgagaagtaaagaattgttgaaagaccgagccncggtttcgnataggaaccccaaaggnggttccgggaaaccttntccangaagaccaactggaagcctccaggggccagatttcaactgcaagaagnaacctttcctngaaggccaaaattggccaannntttnaaggnaancnccaaaggcntggcntacctggncgttatgggtaaaggnnnc

SEQ ID NO: 116395 - DNA, 657 bp, Arabidopsis thaliana
  unsure (1)..(657): unsure at all n locations
tgctcggtttatcctcattggttcaggaagtcctgaagaaggcgagcttagaccccagcttcttgacaggtttggtatgcacgcgcaggtagggacggttagacacgccgagctgagagtcaagattgttgaacaaccagctcgcttcgatagtatcccaaaggagtttcgcgggccttgtcaagaagaacaactgtagcttcaggcgcagattccaacggcatgacgcaatctttctgcagttcagattgatctacatttgggagtgagagatctctcaggtctgtgctgagctggacgttgatggattgagagcagacatggtgatacacagagcagctagagcgcttgcagcactccaaggaagagatctagttacagcggaagatgttggtagggttataccgaattgtttgagactcagactcagaaaggatccattggagtctatggagtcgggaattctcgttaccgagaagttctatgaggttttcacttagagtaaagatagattcttgttacacttttaaagaagattcaatctggatcgcttattattcgcggccgcgaattaaaagcaaaannnnnnnnnnnnnnnnnnnnnnnnnnnnnnnnnnnnnnnnnnnnnnnnnnnnnnnnnnnnnnnnnnnnnnnnnn

SEQ ID NO: 116396 - DNA, 500 bp, Arabidopsis thaliana
  unsure (1)..(500): unsure at all n locations
nnnnnnnnnnnnnnnnnnnnnnnnnnnnnnnnnnnnnnnnnnnnnnnnnnnnnnnnnnnnnnnnnnnnnnccacgcgtccgcggacgcgtgggcggacgcgtgggcggacgcgtgggatcagaagctgagtaaactctaagctcacacaaaaatggcgtctcttcttggaacatcttcttctgcaatctgggcttctccttcactctcttctccttcctcaaaaccttcctcctcccccatttgcttcaggccaggtaaaccagtctctccaaaccttaaaatcttactgttttttctcaattcgaaatcatggtgaattgaatttttgtatacaggaaaattgtttggaagcaagttagatgcaggaatccaaataaggccatagaagaacaggtctcgttaccatgtttcggttatgaatgtagccactgaaatcaactctactgaacaagtagtagggaagtttgattcanagaagagtgcgagaccggtttatcca

SEQ ID NO: 116397 - DNA, 1418 bp, Arabidopsis thaliana
  unsure (1)..(1418): unsure at all n locations
aggctacgccggacctatacgactctacttagggaaagctggtacgcctgcaggtaccggtccggaattcccgggtcgacccacgcgtccggcaaaagtcatttaactttcctaaaacaatggctttaaaacatatgcaaatctttctcttcgtcgctatattttcatcattctgtttctccatcactctttctcgtccactcgacaatgaactcatcatgcaaaagaggcacatcgagtggatgactaaacacggccgtgtctacgcggatgtgaaggaggaaaacaatcgctacgttgtgttcaaaaacaacgtcgaacgcattgaacatttaaatagcattcctgccggaagaactttcaaacttgcggtaaatcagtttgctgatttaaccaatgacgaatttcgttccatgtacactggtttcaaaggtgtctcggcattatctagccaaagccaaactaaaatgtcgccgtttaggtaccaaaacgtttcttctggtgctttgccggtttctgttgactggaggaagaaaggagctgtgacccctatcaagaatcaaggcagctgcggatgttgttgggcgttttcagcggttgcggctattgaaggagcaacacaaataaagaaagggaaacttatatctttgtcagaacaacagcttgttgattgcgacacaaacgattttggctgcgaaggcggtttaatggatactgcgtttgagcatataaaagcgactggcggcttgacaactgagtcagattatccttacaaaggcgaagacgctacttgcaattccaaaaagaccaatccaaaagcaacttctattacaggttatgaggatgtcccggttaatgatgagcaagcactgatgaaggcagtggcacaccaaccggttagcgttggaattgaaggaggtggttttgatttccaattctattcgtctggtgtgttcactggagagtgcactacgtatcttgatcatgcagtaactgcgattggatacggcgaatctactaacggatcaaagtattggatcatcaagaattcatggggaacaaaatggggagaaagtggatatatgaggattcaaaaagatgtcaaggataaacaaggactatgtggtcttgccatgaaagcttcttacccaactatatgaattcaaaaccgtgttaagcttttaattgtgtatgtttgtgtgggattgatgtctaaaaataatttgaattgttttatgtaaaaaaattgtatttagactgttgtatgcattttatgaaattgtaagcttatgtaatgcaaaggattgataattttcgnnnnnnnnnnnnnnnnnnnnnnnnnnnnnnnnnnnnnnnnnnnnnnnnnnnnnnnnnnnnnnnnnnnnnnnnnnnnnnnnnnnnnnnnnnnnnnnnnnnnn

SEQ ID NO: 116398 - DNA, 2089 bp, Arabidopsis thaliana
agaaccggttttgacccgatttgatttttcagcctcaaatctgacaaatcatattcacagcgatctccttcttccacatcgcaacccaatccctctctgtctcttcctcaattcttattctctctcgcaaaggtttggttttttgaagacagagaggagatttgagattttgggtttcaatggcggtttcaagtgctttcgttggttgtccaaagcttgagactttattgaatcaccataatctatctccttcttcttcttcttcgtcctctgtttcacagacaccattgggtcttaatggggttcgtgttcttccgaagaacaatagaaccagacgaggtttgatccaaaaagctcgttgtgagctctctgcttcttctgattctgcgtctaatgcagctagcatctctgctcttgaacaactcaagaactctgcagctgatcgatatacaaaggaaagaagcagtattgttgtgattggacttagtattcacacagctcctgttgagatgcgtgagaagcttgctatacctgaagctgaatggccaagagctattgctgaattgtgtggtttgaatcatattgaagaagctgctgtgcttagtacttgtaaccgtatggagatttatgttttagctttatctcagcatcgtggagttaaagaagttactgaatggatgtcaaagacgagtgggatcccagtttcagagatttgtcaacaccgttttctgttgtacaacaaggatgctacacagcatatatttgaagtctcagctggtcttgactctcttgtcctaggagaaggtcagatccttgcacaggtgaaacaagttgtgaaagttggtcaaggagtgaatggctttgggaggaatatcagcgggctgtttaaacacgcgataactgttggtaagcgtgttagaacagagacaaatattgcttctggtgcggtttcggttagctcagctgctgttgaacttgctctgatgaagcttccgcagtcttcaaacgtatctgctaggatgtgtgtaattggcgctggaaaaatggggttgcttgtgattaagcatttgatggctaagggttgcacaaaagtggtggtagtcaacagaagtgaagagagggtttcagctatccgtgaggagatgcctggtattgagattatatatcgacctcttgatgagatgctagcttgtgcttcagaagcggatgttgtgtttaccagcacagcctctgagacgccattgttcttaaaggagcatgtagagaatctccctcaagcttctccagaggttggaggactgaggcattttgttgacatctctgttccgagaaatgttggatcttgtgttggtgaagtagaaacagcacgggtttacaatgtggacgatctcaaagaagttgttgctgccaacaaagaagacaggatgaggaaagcaatggaagctcaaaccataatcacagaggaatccacacagtttgaagcatggagggattcattggagacggttccaacgatcaagaagttaagagcttatgcagagagaatcagagtggcagagctcgagaagtgcatgtccaaaatgggagatgatatcaacaagaaaacaacgagagcggttgatgacttaagccgaggtatcgtgaacagattcttacatggtccaatgcagcatttgagatgtgacggaagtgacagtagaacgctgagcgagacccttgagaatatgcatgctttgaacagaatgtacggtcttgagaaagacattttggaggaaaagcttaaggcaatggcggaacaacaacagaagtaaaagagaaaaataagaagatgttcatctcttttgacatataagattagcttccccacaaactctgagtaaattgcatagatcctatagcgatggatctatttgattcatttaatttgtgtgcaagagactaacaattctatcgtcaagtgtaagtgttgtgaagctataagcgagcttgttgcatgtttgttgcttcatagactcgagtgtaatggtattggtcccagtatcgttacatatatgtaataatgtataaactttggttcttgcaatataga

SEQ ID NO: 116399 - DNA, 1736 bp, Arabidopsis thaliana
ctctctcgcttcttcaacgatcgcataaattccctctttgtctgctcgattcctgatctctagagtttgtgttcctgagacgaagggggtgtttcgtgtgtaattgagatattgagattattgctttgtaaaactcaaaatctatggcggtttctagcgccttcgttgttacaccgaagctggagaagctgttagcgaatcaccataatccaacgtattcttcttctccggccccgttggatgtaattgggatacgtgctcttccgatgaacaataggaacaagcgaggtctgatccagagagcgcgttgcgagatttctccgtctaataaggcagctagcatctcagctctcgagcagctcaagacttctgctattgaccgatacactaaggaaagaagcagcattgtggtgattgggcttagcattcacacagctcctgttgagatgcgtgagaagcttgccattccagaagctgaatggccacgagctattgctgaattgtgtggtttgaatcatattgaagaagctgctgtactcagtacctgcaaccgaatggagatttatgttttggctctatctcagcatcgtggagtcaaagaagtgactgagtggatgtctaagacaagtggaatcccggtttcagaaatctgtcagcatcgttttctattgtacaacaaggatgtcacgcaacatatatttgaagtctcagctggtctagactctcttgtcctaggtgaaggtcagatacttgcacaggttaaacaagttgttaaagtaggtcaaggagtcaatggttttgggaggaatatcagtgggctatttaaacacgcaatcacagttggaaagcgtgtcagaacagagacaaatatcgctgctggggctgtttccgttagctcggctgcagttgaacttgctctcatgaagcttcccgaatcttctcatgcatcatctgctaggatgttggtagttggtgctggaaagatggggaagcttgtaatcaagcacttggttgctaaaggttgcaccaaaatggtggttgtgaatcgaagcgaagagaaagttgcagctgtgcgcaatgagatgccgcctggcgttgagattatttataaaccccttgatgagatgctgtcttgtgctgcagaagctgatgtagtctttactagcacagcatctgagacaccattattcttgaaggagcaagtagagactctccctcctgttagagatgcgaggctctttgttgatatctctgttcctagaaatgtcgggtcctgcgtcgctgaaatagacggtacacgggttttcaacgtggatgacctcaaggaagtcgttgctgcgaataaagaagacagggtgaggaaagcaatggaagctcaggctataattacagatgaatcaaaacactttgaagcgtggagggactcgttggagacggttccaacaatcaagaaattaaggggatatacagagagaattatagctgcagagattgagaaatccttgcccaaaatgggcattgacatgaacaagaagatgaggaaaacagtagatgatctaatccgaggtatagtgaacaagctcctgcacggtccaatgcagcatttgagatgcgatgggaacgatagcagaacgctgagtgagacactagataacatgcaggctctgaacaggatgtatggacttgatgcagagatactcgaggagaagattagagcaaaggtggaaaaaaagtag

SEQ ID NO: 116400 - DNA, 733 bp, Arabidopsis thaliana
  unsure (1)..(733): unsure at all n locations
agctactacgcctgcaggtaccggtccggaattcccgggtcgacccacgcgtccgaaaatggggaagcttgtgattaagcatttgatggctaagggttgcacaaaagtggtggtagtcaacagaagtgaagagagggtttcagctatccgtgaggagatgcctggtattgagattatatatcgacctcttgatgagatgctttcttgtgctggagaagcggatgttgtgtttaccagcacagcctctgagacgccattgttcttaaaggagcatgtagagaatctccctcaagcttctccagaggttggaggactgaggcattttgttgacatctctgttccgagaaatgttggatcttgtgttggtgaagtagaaacagcacgggtttacaatgtggacgatctcaaagaagttgttgctgccaacaaagaagacaggatgaggaaagcaatggaagctcaaaccataatcacagaggaatccacacagtttgaagcatggagggattcnttggagacggttcccacgatcaagaagttaagagcttatgcagagagaatcagagtggcacaactcnaaaaantgcatgttccaaaaatggggagatgaatatcccccnagaaaaacnaccaaaagcggttgaatgacttnaagcccgaaggttntccgtgaaacagattccttaccnttggtcccaatggcnncattttaaaatttttnaccggaaantng

SEQ ID NO: 116401 - DNA, 742 bp, Arabidopsis thaliana
  unsure (1)..(742): unsure at all n locations
cnnannnnnnnnnnnnnnnnnnnnnnnnngcctgcaggtaccggtctggaattcccgggtcgacccacgcgtccgcgttttaaggcaaattaagatcatcttcataaatcttctcagatctcttccaattttctagaaaaaacatgtcttgctgtggtggaagctgtggttgtggatctgcctgcaagtgcggcaatggttgcggaggttgcaaaaggtaccctgacttggagaacaccgccaccgagactcttgtcctcggtgttgctccggcgatgaactctcagtacgaggcttccggcgagactttcgttgccgagaatgatgcttgcaaatgcggatctgactgcaagtgcaacccttgtacctgcaaatgaagaacttcataaaccctaagtctgtaataaccctaatgttatgttaggtttgcttatatgtaataattggctgatttttccggtagttttgccggcgacgttggtctttctcttcttcttcttcttctgtgtgtgtttttatggtttggtcattaagatatctctgcaaagttttatctttgtgactttattaatcctaagactattatgggtttgtattaaagtttgcttctttcttgctcaattcacaattaaccgttcctagaaggaacccaaagctttaccgttaccgccttggccattgcaaaacgttcattaagctttcttttctattaaggggggcaacccctaaaaaatttccaaat

SEQ ID NO: 116402 - DNA, 580 bp, Arabidopsis thaliana
  unsure (1)..(580): unsure at all n locations
nnnnnnnnnnnnnnnnnnnnnnnnnnnnnnnnnnnnnnnnnnnnnnnnnnnnnnnnnnnnnnnnnnnnaggtaccggtccggaattaattcccgggtcgacgagctcactagtcggcggccgcccttttttttttttttttttttgaaagaagcaaactttaatacaaacccataatagtcttaggattaataaagtcacaaagataaaactttgcagagatatcttaatgaccaaaccataaaaacacacacagaagaagagaaagaccaacgtcgccggcaaaactaccggaaaaatcagccaattattacatataagcaaacctaacataacattagggttattacagactttcgttgccgagaatgatgcttgcaaatgcggatctgactgcaagtgcaacccttgtacctgcaaatgaagaacttcataaaccctaagtctgtaataaccctaagtctgtaataacccaattattacatataagcaaacctaacataacattagggctcgagccgaattccgagcttacgtacgcgtgcatgcgacgtcatagctcttctatagtgcgcctaaat

SEQ ID NO: 116403 - DNA, 654 bp, Arabidopsis thaliana
  unsure (1)..(654): unsure at all n locations
tttgacggtgcatgcacgccttccttagcttggaattcaggttgagggccaattaagatcatcttcataaatcttctcagatctcttccaattttctagaaaaaacatgtcttgctgtggtggaagctgtggttgtggatctgcctgcaagtgcggcaatggttgcggaggttgcaaaaggtaccctgacttggagaacaccgccaccgagactcttgtcctcggtgttgctccggcgatgaactctcagtacgaggcttccggcgagactttcgttgccgagaatgatgcttgcaaatgcggatctgactgcaagtgcaacccttgtacctgcaaatgaagaacttcataaaccctaagtctgtaataaccctaatgttatgttaggtttgcttatatgtaataattggctgatttttcccggtagttttgccggcgacggtggggtttctccccctccggggggggtttttagggtttggcataaagaatctctgcaaagttttatctttgggactttattaatccccagactattatgggtttgtatttaaaaaaaaaaaaaaagggcggccgccgcctcgtgagcttgtggtcccggnnnnnnnnnnnnnnnnnnnnnnnnnnnnnnnnnnnnnnnnnnnnnnnctaatc

SEQ ID NO: 116404 - DNA, 707 bp, Arabidopsis thaliana
  unsure (1)..(707): unsure at all n locations
aggcaaatnaagatcatcttcataaatcttctcagatctnttccaattttctagagaaaacatgtcttgctgtggtggaagctgtggttgtggatctgcctgcaagtgcggcaatggttgcggaggttgcaaaaggtactctgacttggagaacaccgccactgagactcttgtcctcggtgttgctccggcgatgaactctcagtacgaggcttccggcgaagactttcgttgcccgagaatgatgcctgcaaatgcgggatctgactgcaagtgcaaccccttgtacctgcaaaattaaggaccttcaataaaacccctaaggcttgtaaataacccctaactggttatggttaagggttttgctttaataatggaaacaaatttggctggattttttcccggtaggtttttcccggcgacgttggtctttctcttcatcggggggggtttttaagggttggtcattaagatatctccccaaaaaaaaaaatttgggactttcttaatcctaagaccattatgggtttgtattaaagtttgctttttttttgctccgaaaaaaaaaaaaaaaaaaaaaaacaaaaaaaaaaaaaaaaaaaaaaaaaaaaaaaanaaagggcggccgccgactagtgagctcctccacccaggaattaattccggaccggtacctgcaggcgtggtagcccccctaggttagtcgt

SEQ ID NO: 116405 - DNA, 1591 bp, Arabidopsis thaliana
gacttcaattcaatttactttcgattttgtcctcttccaaaaacccttccgcttaaaccctaattcacttcgccggccatgtcgacactcgagggatggatttccggcggataagctcttcgctcaaggatactcttacacctacgacgacgtcatctttcttcctcacttcatcgatttctccacagacgctgtttctctatccacgcgccttagccggcgcgtgcctctctccataccttgcgtttcgtctccgatggatactgtttcggaatctcacatggctgctgctatggcttctcttggtgggattggaatcgtccactataactgtggcatcgccgctcaagcatcgattattcgccaagctaagtcgcttaaacatccgattgcttccgacgccggtgtgaagttcccggagtatgagattacttctttagatgcttttggtccttcttccttcgtttttgtcgagcaaacaggaacaatgacgactcctaaattgttaggctatgtaacgaaatcgcagtggaagagaatgaattacgaacaaagggagatgaagatatacgattacatgaagagctgtgatagcagtgactattgtgtaccatgggaaattgattttgaaaagttggagtttgttttagaagataagcaaaagggctttgtggttcttgagagggatggtgagactgtgaacgtggtgacgaaagatgatatacagagggttaaaggatatcccaagtctggaccagggactgtgggcccagacggtgagtggatggttggtgcagcgataggtacgagggagtctgataaggagaggcttgagcatttggttaatgttggggtcaatgctgtagtgttggatagttcgcaagggaactctatttaccagcttgagatgatcaagtatgtgaaaaagacttaccctgaattggatgtgattggtggcaatgttgtgacaatgtaccaggcacagaatttgatccaagcaggagttgatgggttgagagttggtatgggatctggttcgatatgtaccacacaagaggtttgtgcagttggtcgtggacaggctactgctgtgtacaaggtttgttcgatcgctgctcagagcgggattccagttatagcggatggtggtatctcaaattcagggcacattgtaaaggctctcgtccttggagcatcaactgttatgatgggtagctttttagctggaagtactgaggctcccgggggttacgagtatacgaacggtaagaggatcaagaagtaccgtggaatgggatcgctagaagcaatgactaaaggaagtgaccaaagatacttaggagatcaaacaaaactcaagattgctcaaggagtggttggagcagtcgcggataaaggctcagtgttgaagctgataccttacacaatgcacgccgtgaaacaaggtttccaagaccttggtgcttcttccttgcaatctgctcatggtctgttgagatcaaacatccttaggcttgaggctcgaactggtgctgcacaggtcgaaggaggagttcacgggctggtttcttatgaaaagaaatcgttttaa

SEQ ID NO: 116406 - DNA, 7418 bp, Arabidopsis thaliana
  unsure (1)..(7418): unsure at all n locations
tccccaaatctctcgaagcagagactcgcatagtctctgaagtcatctataatctgctcgcttagaaaaccgccgtattcatcttcaagatcctgtggtatgtcccaatgaaagatagtaacaagaggagtgatttcattggctaagagttcatcaataacatcattgtaaaacttaattccttcttcactaactcctctatcccttttgccataaggtagaactcgtggccaagcaatggaaagccgaaacgaatccatgtttatatccttcattctcttaatatcttcctctctgttattctttagctaaacacccacaattctggccttctctgatgcctctttaagccaatttgtatctctgcttccttacaagatatatctgaagcttaaagggcagtgacaatggctggctcggttaacgggaatcatagtgctgtaggacctggtataaattatgagacggtgtctcaagtggatgagttctgtaaagcacttagagggaaaaggccgatccatagtattttgatagctaacaatggaatggcggctgtgaagtttatacgtagtgtcagaacatgggcttatgaaacatttggtacggaaaaagccatattgttggtggggatggcaacccctgaagacatgcggatcaatgcggagcatatcagaatcgctgatcagtttgttgaggttcccggaggaaccaacaataacaattatgctaacgttcagctgattgtggagatggctgaagtaacacgcgtggatgcagtttggcctggttggggtcatgcatctgaaaaccccgaattacctgatgccctagatgcaaaaggaatcatatttcttggtcctccagcatcttcaatggcagcactgggagataagattggttcttcgttgattgcacaagctgctgatgtacccactctgccatggagtggttcccatgttaaaatacctcctaatagcaacttggtaaccatcccagaggagatctaccggcaagcatgtgtctacacaactgaagaagcgattgctagctgtcaagttgtcggttacccagcaatgatcaaagcatcgtggggtggtggtggtaaaggaatcaggaaggttcataatgatgatgaggttagggctctattcaagcaagttcagggtgaggtcccaggctcaccaatattcataatgaaggttgcgtcacagagtcggcatctagaggtccagctgctctgtgacaagcatggaaatgtttcagctctgcatagccgtgattgtagcgtccagagaagacatcaaaagatcatagaggagggtccaattactgtggctccgccagaaactgtcaagaaacttgaacaagcagctagaaggttggctaagagtgttaactatgttggagctgctactgttgagtatctctacagtatggacactggggagtactacttcttagagcttaaccctcgcttacaggttgagcatcctgtcactgagtggattgccgagataaatcttcctgctgcccaagttgctgtggggatgggaattcctctctggcaaatccctgagataagacggttctatggaatagaacatggtggaggttatgattcttggcgaaaaacatctgttgtagccttcccttttgattttgataaagctcaatctataaggccaaaaggtcattgtgtggctgtacgtgtgacaagtgaggatcctgatgacgggttcaaaccaaccagcggtagagttcaggagttgagttttaagagcaagccaaatgtgtgggcgtacttctctgtcaagtctggtggaggcatccacgagttctcggattcccagtttggacatgtttttgcatttggggaatccagagccctggcgatagcgaatatggttcttgggctaaaagaaattcagatccgtggagaaattaggactaacgttgactacacgatcgaccttttacatgcttctgattaccgtgataacaaaattcacactggttggttggatagtaggattgctatgcgggtcagagctgagaggcctccatggtatctctctgttgtcggcggagctctctataaagcatcagcgaccagtgctgctgtggtttcagattacgttggttatctggagaaggggcaaatccctccaaagcatatatctcttgtacattctcaagtgtctctgaatattgaaggaagtaaatatacgattgatgtagtccggggtggatcaggaacctacaggctaagaatgaacaagtcagaagtggtagcagaaatacacactctacgtgatggaggtctgttgatgcagttggatggcaaaagccatgtgatatatgcagaggaagaagctgcaggaactcgtcttctcattgatggaagaacttgtttgctacagaatgaccacgatccatcaaagttaatggctgagacaccgtgcaagttgatgaggtatttgatttccgacaacagcaatattgacgctgatacgccttatgccgaagttgaggtcatgaagatgtgcatgccacttctttcacctgcttcaggagttatccattttaaaatgtctgaaggacaagccatgcaggctggtgaacttatagccaatcttgatcttgatgatccttctgctgtaagaaaggccgaacccttccatggaagtttcccaagattagggcttccaactgcaatatccggtagagttcatcagagatgtgccgcaacattaaatgctgcacgcatgattcttgctggctatgagcataaagtagatgaggttgttcaagacttacttaattgccttgatagccctgaactcccatttcttcagtggcaagagtgctttgcagttctggcgacacgactacctaaaaatctcaggaacatgctagaatcaaagtatagggaatttgagagtatttccagaaactctttgaccaccgatttccctgccaaacttttaaaaggcattcttgaggcacatttatcttcttgtgatgagaaagagagaggtgcccttgaaaggctcattgaaccattgatgagccttgcaaaatcttatgaaggtggtagagaaagtcatgcccgtgttattgttcattctctctttgaagaatatctatcagtagaagaattattcaatgataacatgctggctgatgttatagaacgcatgcgtcagctatacaagaaagatctgttgaaaattgtggatatagtgctctcacaccagggcataaaaaacaaaaacaaactcgttctccggctcatggagcagcttgtttaccctaatcctgctgcttacagagataaacttattcgattctcaacacttaaccatactaactactctgagttggcgctcaaggcgagtcaattacttgaacagaccaaactaagtgagcttcgttcaaacattgctagaagcctttcagagttagaaatgtttacagaggacggagaaaatatggatactcccaagaggaaaagtgccattaatgaaagaatagaagatcttgtaagcgcatctttagctgttgaagacgctctcgtgggactatttgaccatagcgatcacacacttcaaagacgggttgttgagacttatattcgcagattataccagccctacgtcgttaaagatagcgtgaggatgcagtggcaccgttctggtcttcttgcttcctgggagttcctagaggagcatatggaaagaaaaaacattggcttagacgatcccgacacatctgaaaaaggattggttgagaagcgtagtaagagaaaatggggggctatggttataatcaaatctttgcagtttcttccaagtataataagtgcagcattgagagaaacaaagcacaacgactatgaaactgccggagctcctttatctggcaatatgatgcacattgctattgtgggcatcaacaaccagatgagtctgcttcaggacagtggggatgaagaccaagctcaggaaagagtaaacaagttggccaaaattcttaaagaggaagaagtgagttcaagcctctgttctgccggtgttggtgtaatcagctgtataattcagcgagatgaaggacgaacacccatgagacattctttccattggtcgttggagaaacagtattatgtagaagagccgttgctgcgtcatcttgaacctcctctgtccatttaccttgagttggataagctgaaaggatactcaaatatacaatatacgccttctcgagatcgtcaatggcatctgtatactgttacagacaagccagtgccaatcaagaggatgttcctgagatctcttgttcgacaggctacaatgaacgatggatttatattgcagcaagggcaggataagcagcttagccaaacactgatctccatggcgtttacgtcgaaatgtgttctgaggtctttgatggatgccatggaggaactggaactgaatgcccataatgctgcaatgaaaccagatcacgcacatatgtttctttgcatattgcgtgagcagcagatagatgatcttgtgcctttccccaggagagttgaagtgaatgcggaggatgaagaaactacagttgaaatgatcttagaagaagcagcacgagagatacatagatctgttggagtgagaatgcataggttgggcgtgtgcgagtgggaagtgcggctgtggttggtgtcctctggactggcatgtggtgcttggagggttgtggttgcaaacgtgacaggccgtacatgcactgtccacatataccgagaagttgaaactcctggaagaaacagtttaatctaccactcaataaccaagaagggacctttgcatgaaacaccaatcagtgatcaatataagcccctgggatatctcgacaggcaacgtttagcagcaaggaggagtaacactacttattgctatgacttcccgttggcatttgggacagccttggaactgttgtgggcatcacaacacccaggagttaagaaaccatataaggatactctgatcaatgttaaagagcttgtattctcaaaaccagaaggttcttcgggtacatctctagatctggttgaaagaccacccggtctcaacgactttggaatggttgcctggtgcctagatatgtcgaccccagagtttcctatggggcggaaacttctcgtgattgcgaatgatgtcaccttcaaagctggttcttttggtcctagagaggacgcgtttttccttgctgttactgaactcgcttgtgccaagaagcttcccttgatttacttggcagcaaattctggtgcccgacttggggttgctgaagaagtcaaagcctgcttcaaagttggatggtcggatgaaatttcccctgagaatggttttcagtatatatacctaagccctgaagaccacgaaaggattggatcatctgtcattgcccatgaagtaaagctctctagtggggaaactaggtgggtgattgatacgatcgttggcaaagaagatggtattggtgtagagaacttaacaggaagtggggccatagcgggtgcttactcaaaggcatacaatgaaacttttactttaacctttgttagtggaagaacggttggaattggtgcttatcttgcccgcctaggtatgcggtgcatacagagacttgatcagccgatcatcttgactggcttctctacactcaacaagttacttgggcgtgaggtctatagctctcacatgcaactgggtggcccgaaaatcatgggcacaaatggtgttgttcatcttacagtctcagatgatcttgaaggcgtatcagcaattctcaactggctcagctacattcctgcttacgtgggtggtcctcttcctgttcttgcccctttagatccaccggagagaattgtggagtatgtcccagagaactcttgcgacccacgagcggctatagctggggtcaaagacaataccggtaaatggcttggaggtatctttgataaaaatagtttcattgagactcttgaaggctgggcaaggacggtagtgactggtagagccaagctcgggggaatacccgttggagttgttgcagttgagacacagactgtcatgcagatcatcccagccgatcctggacagcttgactctcatgaaagagtggttccgcaagcagggcaagtctggtttcctgattcagcggccaagactgctcaagcgcttatggatttcaaccgggaagagcttccattgtttatcctagcgaactggagagggttttcaggtgggcagagagatcttttcgaaggaatacttcaggcaggttcaactatagtagaaaatctgagaacctatcgtcagccagtgtttgtgtacatcccaatgatgggagagctgcgcggtggagcgtgggttgttgttgacagccagataaattcggattatgttgaaatgtatgctgatgaaacagctcgtggaaatgtgcttgagccagaagggacaatagagataaaatttagaacaaaagagctattagagtgcatgggaaggttggaccagaagctaatcagtctgaaagcaaaactgcaagatgccaagcaaagcgaggcctatgcaaacatcgagcttctccagcaacagattaaagcccgagagaaacagcttttaccagtttatatccaaatcgccaccaaatttgcagaacttcatgacacttccatgagaatggctgcaaagggagtgatcaaaagtgttgtggaatggagcggctcgcggtccttcttctacaaaaagctcaataggagaatcgctgagagctctcttgtgaaaaacgtaagagaagcatctggagacaacttagcatataaatcttcaatgcgtctgattcaggattggttctgcaactctgatattgcaaaggggaaagaagaagcttggacagacgaccaagtgttctttacatggaaggacaatgttagtaactacgagttgaagctgagcgagttgagagcgcagaaactactgaaccaacttgcagagattgggaattcctcagatttgcaagctctgccacaaggacttgctaatcttctaaacaaggtggagccgtcgaaaagagaagagctggtggctgctattcgaaaggtcttgggttgactgatatcgaagactttagcttctaatccaagaaagatggacatttaaagtttgcttgtgtccgtttggattgataattatatatttgttggtcacagttgtaaatgttgttgtagctttgtcatttccgtataaacaaatacgcaataattcattcaacaaaaaaaaaagnnnnnnnnnnnnnnnnnnnnnnnnnnnnnnnnnnnnnnnnnnnnnnnnnnnnnnnnnnnnnnnnnncgtcctaaa

SEQ ID NO: 116407 - DNA, 955 bp, Arabidopsis thaliana
  unsure (1)..(955): unsure at all n locations
gtccgcgataaatacggttgctctctcgttttttccagcagagacactttttctaattttctcttcttcttcttctttctcgttttgagagaaaacaaaaaaattctgaatctacaggtttcacgaaaaggagaagaaaaaaacaatggcggatcagctcaccgacgatcagatctctgagtttaaggaagctttcagcttattcgacaaggatggtgatggttgcattaccaccaaggagctgggtactgtgatgcgttcccttggacaaaacccaaccgaagcagagcttcaagacatgatcaacgaagtggatgctgatggtaacggtaccattgatttcccagagttcttgaaccttatggctcgtaagatgaaggacaccgactctgaggaagagctcaaggaagcattccgggttttcgacaaggaccagaacggtttcatctcagcagctgagctccgccatgtgatgacaaaccttggtgagaagcttactgatgaagaagttgatgagatgatcaaggaagctgatgttgatggtgatggtcagattaactacgaagagtttgttaaggtcatgatggctaagtgatgctgttttagaaccaaacaatggctctataaacttggtttgcatctcttacatataaattcttatgttatgttctataatttttattcatgggactcgaggtatgttttctgcttgtttaagacgcgaatgttttatcccttttatgctctattttgcgtctgaacattttcaaaagtcttgtttttttgttgtcttgctcctgtaatttgtaaccttggtctagttcgcggttttttattaatggtgtctctctagtaaagcattgtatcatggtttgtgaaaaagaaattaggtcctatcnnnnnnnnnnnnnnnnnnnnnnnnnnnnnnnnnnnnnnnnnnnnnnnnnnnnnnnnn

SEQ ID NO: 116408 - DNA, 915 bp, Arabidopsis thaliana
ctctttcgtttttccctttttctccaatcacagaaaagaaaagaaaaaacaatggcggatcagctcacagacgatcagatctcagaattcaaggaagccttcagcttattcgacaaggatggtgatggttgcattaccacaaaggagcttggtaccgtgatgcgttccctcggtcaaaacccaaccgaagctgagcttcaggacatgatcaacgaagttgttgccggatggtaacggaaccattgatttcccggagttcttgaacctaatggctaggaaaatgaaggacactgactctgaggaagaactcaaggaagctttcagagttttcgacaaagaccagaacggtttcatctcagctgctgaattgagacatgtgatgacttaacctcggcgggaagcttactggtgaagcaagtttgatgagatggtttaagggagcttgatgttgatgggtgatggtcagttcaacttcggaaggggtttgtgaaggttatgatggcctaagtggggggtgaaacaacttcttcggctttctccttttttttttttgactaccttcttatgtaatttcataaagaatgttccttcgctttgttctaaaatttaaatcatggctggtttttgctggttaaaaagccgcgtagggtctgtgtttttaccttttgtctaaatgactcattgttcatgttattgacaggttcagaacctgattcttgaaatataacagtaatgagatcttcttctattatcttcgtattgatcagtctctttagaatctgtcgtcgtatgtagaagcaagaagatgcttatcggttgcggtaagggtagggagcttaacccgagttggctcagacgatgaatgtaaaggagagaagagtatagaagttgtctcagacattccattgttgaagt

SEQ ID NO: 116409 - DNA, 658 bp, Arabidopsis thaliana
ttttttttttttttttttgctgaaattttcttcaatttcgagtttttctttgtgggtttgtttagctattcaaagctttcaattgaagtcgttctctttctgtgttttctagttggtggtggatttttgattttgagttaaggaattgagtagcaagaaggtgagatatggagcacggttcgttcacgaatgttagtcatgcttcgtttactttatcggaagaagatcacacacttgctaatgctgttagattcgtcttaaaccaagatcccagagtaaccgtggctgcatacaccatcccacatccttcccttgaacaggtcaatatccgggtccagacaacaggtgatccagcaagagaggtttttaaagatgcatgtcaagagctcatgcaaatgaacagacatgtgagaagcgtttttgataaggctgttgctgagtataaggatgaacaaaagcgtaaggaggaggctgaagaagaagagcttaagaggcagagggatctatttgggtccatggacattgaaaacaactgataaccattgtattctcctatggagtttatactatttttatcttaaatccagattcgtccttcaaattgactcgtcaaattcataatccacaccaaaatttaaccaaaaaaaaaaaaaaaaaa

SEQ ID NO: 116410 - DNA, 4835 bp, Arabidopsis thaliana
ccctcctcgagaatttccgatcgtgctttcctcaaaagcatttctgtttctcgtcgtcggagcccgacgacagatctctgaatcgctggagaaacataatgattgagtttggcctctatctgtgaagggtatatgctccggctgtatctactttatattctgccaggaagattgtgagcattgaagtgccttgggctctggctgaagatttgagcagattaaatgggtcgcctaaagttgcattctggaatcaaggccattgaggaagaacctgaggactttgagtgtactgattcaagtaatacaaccactttagcatgcatgattgatacggaaattgctgctgttttagcggttatgagaagaaatgtaagatggggaggtcgatacatgtctggtgatgatcaactagaacactcgttgattcagtcacttaaagctcttagaaaacaggtgttctcatggaaccagccgtggcatacaattagtcccatgttgtatcttcagccctttcttgatgtgatacggtcagatgaaactggagcaccaataaccagcattgctttgtcatcagtttacaagatcttaaacctgaatgtaattgatcaaaatactgcgaatattgaagacgctatgcacttggtagttgattctgtgacaagctgtcgatttgaggtgacagatcctgcatcagaagaggttgtgctaatgaagatacttcaggttcttctagcatgtatgaaaaataaagcatcagttatgctaagcaatcagcatgtatgcactgtcgtcaacacttgttttcgtgttgtccaccaagcaggaatgaaaggtgagttattgcaacgagtagctcgccacacgatgcatgaattagtgaggtgtatcttctcgcatctcccagatgttgaaagaacagaaactacacttgtcaacagagctggtagcatcaaacaagagaaagctggagtagacagtgattatgccattgtgagtaaaccagtcgaggatggaaatgctaattccgagtatgatgttgaaaattctatggcaacttttgcaactggtgctcaaagtttgatggatgatggaccagttggccctggaagcagaaagccggcttctccatatgatttgcatataatgacagagccatacggagtcccaagtatggtggaaatttttcacttcttgtgctctttgttaaatgtggtcgaacatgttggtatgggatcccgatcaaacaccatagcatttgacgaagatgtgcctctgtttgcgttgaacttgatcaactcagccattgaattgggtggatcgtccatccgccatcacccaagattgttaagcctaattcaagatgagttatttcgtaacttgatgcagttcggattgtcgatgagccccctgattctttcgatggtttgcagcattgtgctcaatttgtatcaacatctacgaactgaactcaagttgcagcttgaggcattcttttcatgtgtgattctaaggcttgctcaaggaaaatatgggccctcgtatcagcagcaagaggttgctatggaggctcttgtgaatttttgtaggcagaagagttttatggttgaaatgtatgccaatctcgattgtgatataacttgcagcaacgtgtttgaggagctgtctaatcttctctcgaagagcacatttcctgtgaactgtcctttgtctgcaatgcacattcttgctctggatggcctaatcgctgttattcagggaatggccgagaggataagtaatggattgactggtttggatttgggtcctgtccatcttgatgagtacacgcctttctggatggttaagtgtgacaactatagtgatccaaatcactgggtttcatttgtccgcaggagaaaatatatcaagagaaggttaatgattggagcagatcattttaacagggatccaaagaaggggttagagtttctccaaggcacacatcttttgcctgacaaactcgatccccaaagtgttgcttgcttttttagatatactgctgggcttgataagaaccttgttggggattttcttggaaatcatgacgaattttgtgttcaagttctcaatgagtttgctgggactttcgatttccagtacatgaatctggatactgcactccgactcttcttggaaaccttcaggttgcctggagaatcccagaaaatacagagagtgcttgaggcgttctctgaaagatactatatgcaatctcctgagattctggccaacaaggatgctgctcttgtgttatcatactctattatcatgcttaacactgatcagcacaacgttcaagtaaagaaaaagatgacagaagaggatttcattcgcaataataggcatatcaatggaggaaatgatctacctcgagaattcttgtctgaactctttcactccatctgcaacaatgagatcaggactactccagaacaaggtgcaggctttcctgaaatgactcccagccgttggattgatttgatgcataaatcaaagaaaactgctccatatattctggctgattcaagggcttatcttgaccatgatatgtttgctatcatgtctggtccaaccattgctgccatatcagtcgtttttgaccatgcagaacatgaagacgtttaccagacatgcatcgatggattcttggctatagctaaaatttctgcctgtcatcatcttgaagatgtgcttgatgatctggttgtctctctctgcaaattcacaactctgttgaatccatcatctgttgatgaacccgttcttgcatttggtgatgacgcaaaagcaaggatggctactatcacaatttttaccattgcaaacaaatatggagattatatacgtacgggttggaggaacatattggactgtatcttacggctacataaacttggacttctgccagctcgtgtagccagtgatgcagctgatgaatcagaacattcatctgagcaagggcaaggaaagcccctcgcgaattccctatcttcagctcatctacagtcaatgggaactccgaggagatcttccggattgatgggaagatttagtcagcttctttcacttgatacagaagagccaagatcacagcctactgagcaacagcttgcagctcatcaacgaacacttcaaacaattcagaaatgtcacattgacagcatatttaccgaaagcaagtttctacaagctgaatctttgttgcagcttgcgcgtgctctcatttgggctgcaggtaggccacagaaaggaaccagttctccagaggatgaggatactgcggttttctgtctggaattgcttattgcaatcactctaaacaacagagacaggatcgttctcctatggcaaggcgtctatgaacatatagctacaattgctcagtcaacggtgatgccctgcaacttagtggataaagctatttttggtctacttcggatctgccagagactacttccttataaagaaagcctagctgatgagcttttgagatctcttcagcttgtgctgaaactggatgcacgtgttgcagatgcctattgtgagcaaattgcaattgaagtcagccgtcttgtgaaagccaatgctaatcacatcaggtctcaggcgggttggagaacaatcacatccttactctccatcacagcgcggcacccagaagcttctgaatcaggatttgatgccgtatcctttgttatgtctgaaggaactcacctgtatccagccaattatgtactctgtgttgatgctgcaagacagtttgctgaatcccgcgtgggacagtccgaacgctctatccgtgcccttgatctaatgggagattcattagaatttttggctaaatgggctctctcagctaaggaaaacatgggagaagaagatttcgggaagatgtcacaagatattggggaaatgtggttaaggcttgttcaaggactaagaaaagtgtgtttagaccagagggaggatgtccgaaaccacgctttacagtcattacagaagtgtttaggcggagtagacggaatcaacctagctcatagcatgtggtctcaatgctttgacaaagtaatcttcacggttttggatgacttacttgagatagctgctgggtcacagaaagactaccgaaacatggaaggcacattgcttctcgcaatcaaacttctctccaaagtgtttcttcagcaactccaagagctatctcagttatcaaccttctgcaagctatggctcggtgttctaactcgaatggagaaatacatgaaagtgaaagtaagaggcaaaaaaagcgacaagctacaagaatcagtaccagagcttctcaaaaacatattgctggtgatgaagacgaaaggcgtgctattgcaaagaagtgctcttggtggagatagcttatgggagctaacatggcttcatgtgaataacattgcaccgtctatgcgactggagctattccctgatcaagaatcctcacaacttggtgatgatgaaaccgtatcgaatggcttatcttctcctgaaaacacaactggttcgtgaccttacaagtgagatcattaggtgagtttctttcgaatatccatataagtactgtgaaagtgaaagcttcttatgtaacacctctctacgtttttttttgtaatatataagtctttctaattcagagactcgtattaattaagcaagtttcttaattacgactttgttaatcacggacctttggaacgaggtagaaggtcttgaacatgtgtggaacccaccaaaggaaaaatatcagtagattcaggagagttgtt

SEQ ID NO: 116411 - DNA, 516 bp, Arabidopsis thaliana
cagctacaatacgactcacattagggagcgcgcccacgcctgcaggtaccggtccggaattcacgggtcgacccacgcgtccggttgatgaacccagacttgcatttaggtgatgacgcaaaagcaaggatggctactatcacaatttctaccattgcagacaaatgtggagattatatacgtacgggctggaggaacatattggactgtatcttacggatacataatcttggacttctgccagctggtgtagcacagtgatgcagctgatgaatcagaacattcatctgagcaagggcatggaaagcccctcgcgaattccctatcctcagctcatctacacgcaatgggaactccgaggagatcttccgcattgatggggaagatttagccagcttctttcactggatacagactagctctagatcaccgcctactggagcaacagcttgcagctcatcgacgaacacttgaaacaattcagaaatgtcgcattgacagcatatttaccgaaag

SEQ ID NO: 116412 - DNA, 1570 bp, Arabidopsis thaliana
acgactcactatttggaaagctggtcacgcctgcaggtaccggtccggaattcccgggtcgacccacgcgtccgctctctcacaaaaataaaatggagggaagcccagtgaccagtgtcaggctctcttcggtggtgcctgcttctgtggtaggtgagaacaagccacgacagctcacacccatggacttagccatgaagctccactacgtccgagccgtctacttcttcaagggtgcacgtgacttcactgtcgccgacgtgaagaacaccatgtttactctacagtctctactccaatcttatcaccacgtctcaggtcggatccggatgtccgacaacgacaacgacacttcagctgcagccataccttacattcgctgcaacgacagtggcatacgcgtggtcgaggccaacgtcgaagagttcacagtggagaagtggctcgagttggacgaccgttccattgaccaccgattccttgtctacgatcacgttcttggtcctgatcttaccttctcgccactcgttttcctccagataactcagtttaaatgtggtgggctctgtattgggttgagttgggcccatattcttggagacgtgttttcagcatcaacgttcatgaaaacacttggacagctggtatcgggtcatgccccaacaaaaccggtttacccgaaaacccccgaactaacctctcatgctcgtaatgatggtgaagctatttccattgaaaagatagattcggttggcgagtattggttacttaccaataaatgcaagatggggagacacatttttaattttagcctcaaccacattgatagcttgatggccaagtacaccacgcgagaccaacctttctcggaggttgatattttgtatgcattgatatggaagtcgctactgaatatccgcggcgaaacaaacacgaatgttataacaatttgtgaccgtaaaaagtcttcaacctgttggaacgaggacttggtaataagcgtagtggaaaagaatgacgaaatggttgggatatccgaactagctgcactgattgctggtgaaaaaagagaagaaaacggtgcgatcaagaggatgatagaacaagataaaggctcttcggattttttcacgtacggtgcaaatttaacgtttgtgaatcttgatgaaatagatatgtatgaacttgagatcaacggagggaagccggatttcgtaaactacacgattcatggggtcggagacaaaggtgttgttttggtttttcccaagcaaaactttgcaaggattgtaagtgtagtgatgcctgaagaagaccttgcaaaactcaaggaggaggtgactaatatgattatataactttgtatcttcttcttgttgttatacataaatgctgttttttactctttgtaatttcattatcgaattgttgggaagcctatcaataaattgtttgaactgtttttaaaaaaaaaaaaaaaaaaaaaaaaaaaaaaaaaaaaaaaaaaaaaagggcggccgctctagaggatccaagcttacgtacgcgtgcatgcgacgtcatagctctt

SEQ ID NO: 116413 - DNA, 1126 bp, Arabidopsis thaliana
  unsure (1)..(1126): unsure at all n locations
atgcnnnnnnnnnnnnnnnnnnnnnnnnnnnnnnnnnnnnnnnnnnnnnnnnnnnnnnnnnnnnnnnnnnnnnnnnnnnnnnccacgcgtccgcccgcctccactctatcctaccgccgacgtccgtgatcgccgaaatgactgaagcagagtccaagactgttgttcctgagtcagtgttgaagaagagaaagagggaggaagaatgggcacttgccaagaaacaggagcttgaggctgccaaaaagcagaatgctgagaagaggaaactcatatttaaccgggctaaacagtactccaaggagtaccaggagaaagaaagggaattaatccagctgaagcgtgaggcaaaattgaaaggaggcttttatgttgacccagaagctaaactgcttttcattatccgtatccgtggtatcaatgccattgacccaaagacaaagaagattttgcaacttttgcgtttaagacagattttcaatggtgtgttcttgaaggtcaacaaggcaaccattaacatgcttcgccgtgttgaaccctatgtaacctatggatacccgaacttaaaaagtgtgaaggaattgatttacaaacgaggttttggaaagcttaaccaccagaggactgccttaacagacaattctattgtagatcaggggctaggaaagcatggcatcatctgcgttgaggatctgatccatgagatcatgacggttgggccacatttcaaggaagccaataactttttgtggccattccagttgaaggctccattgggagggatgaagaagaagaggaaccattacgtggaaggaggagatgctggaaaccgcgagaacttcatcaacgagctcgttaggagaatgaactgaagcgtaagcgttattgctctgaaactccctaggaaacgttttgctataggtggaaaacttctgttcgcttgcttgtgttgccattgaggcgaagtaaacatttacggtgaaagactttgatattttataagtttgaaattgtaagaacacatcatttatttcaaaaaaaaaaaaaaaagnnnnnnnnnnnnnnnnnnnnnnnnnnnnnnnnnnnnnnnnnnnnnnnnnnnnnnnnnnnnnnnnnncagctcaat

SEQ ID NO: 116414 - DNA, 1467 bp, Arabidopsis thaliana
atgtctcagggtgcatgtgagaatcaacttctatccaaattagctttgagtgacaaacatggagaagcttcgccgtacttccatggctggaaagcttacgacaataatccttttcatccaactcataatccacaaggagttattcaaatgggtctcgccgaaaatcaactttgttcagatttgatcaaggaatggataaaggaaaatccacaggcatctatttgtacggcggagggaattgactctttctccgacattgctgtttttcaagattatcacggtctcaaacaatttagacaggcgattgcgacgtttatggagagagcgagaggcgggcgggtgaggtttgaggcggagagggtggtgatgagcggaggagccaccggagcaaatgagacgatcatgttctgtcttgctgatcccggcgacgcttttctcgtccctactccttattatgctgcattcgatagagacttaaggtggagaactggagttagaataatccctgtggagtgtagcagctcaaacaatttccagattacaaaacaagccctagaatcagcgtaccttaaggcccaagaaaccggtatcaagatcaaaggcctgatcatctcaaaccctcttggaacatctctcgatcgagaaactcttgaaagccttgtcagcttcatcaacgacaagcaaattcacttagtatgcgacgaaatatacgcagcaacggtttttgcggaaccgggattcatcagtgttgcagagatcatccaagagatgtattatgttaaccgtgatctgattcatatcgtctacagtctttcaaaggacatgggtcttcccggtttccgggttggagtggtttactcttacaacgatgttgttgtgtcctgcgcaaggaggatgtcgagttttggattggtctcgtcgcagacacaaagttttctagctgctatgttgtctgatcagagttttgtcgataactttcttgttgaggtttcgaaaagagtagcgaagagacaccatatgttcacggaagggcttgaagagatggggatttcttgcttgagaagcaacgcgggtttattcgttttgatggatttgaggcatatgcttaaggatcagacatttgattccgaaatggcgctttggcgagttattatcaataaggtcaagattaatgtctctcctggctcgtcgtttcactgctctgagcctggttggttccgagtctgctttgctaatatggacgaagacacactccaaattgcacttgaacgaatcaaagactttgtggttggagacagagccaacaagaacaagaactgtaactgcatttgcaacaacaaaagggagaacaagaaacgtaagagttttcaaaagaatctcaagctgagtttatcttcgatgaggtacgaggaacatgttaggtcaccaaagttgatgtctcctcattcaccattgcttcgagcttaa

SEQ ID NO: 116415 - DNA, 1287 bp, Arabidopsis thaliana
cgaccgacttgcggtacgctgggccgcctcgcggtaccggtccggaattcccgggtcgacccacgcgtccgctcgcttgacctacaacacccgattctctaatcgattccgtttctctctttttgggcagatctcagatctttccctctttgattcttcttccttagatcgattctctctagaaacaacaatggcgacaccaggagcttcctcagcgagggaagagttcgtatacatggcgaagctcgccgagcaagcggagcgttacgaagaaatggttgaattcatggagaaagtcgcggaagccgttgacaaagacgaactcaccgtcgaagaacgtaatctcctctccgtcgcttacaaaaacgtcatcggagctcgtcgtgcttcgtggagaatcatttcatcgatcgaacaaaaggaagagagtcgtggtaacgatgaccacgttacgtcgatccgtgactacagaagcaagatcgaaacggaactttctgaaatctgtgacggaatccttaagcttcttgatactagactcgttcctgctgctgcttctggagattcgaaggtgttttaccttaagatgaagggagattatcataggtacttggctgagtttaagactggtcaagagaggaaagatgctgctgaacatactctcaccgcttacaaagctgctcaggatattgctaatgctgaattggctccaacgcatccgattcgtcttggtcttgcgttgaacttctctgtgttttactatgagattctcaattctccagatcgtgcttgtaatctcgctaagcaggcgtttgatgaagcgattgctgagttggatactcttggtgaagagtcatacaaggacagtaccttgatcatgcagcttcttcgtgacaatctcactctctggacatctgatatgcaggatgatgctgcggatgagatcaaggaagcagcagcgccaaaaccgaccgaggaacagcagtgatcttttgagtgaaactgctagttttcttctagggtttggaatttcttctctttctcgtccatatgtttttcttaatccatctaagaggtcgctcttgccatttcgctcatcttcaaaagcttattcattcatcatatttgtggcaagtctgaaccatcaatcatctttttatctctttttaatttattttctcttttcttatttctttgttgttatcgatttcaatgtctgtgtaatcgaaacttgctttcttttctcatcaatttgaagatcataaaaaaaaaaaactcttaaaaaaaaaa

SEQ ID NO: 116416 - DNA, 1286 bp, Arabidopsis thaliana
  unsure (1)..(1286): unsure at all n locations
cannnnnnnnnnnnnnnnnnnnnnnnnnnnnnnnnnnnnnnnnnaccggtccgcaattcccgggtcgacccacgcgtccgaaaaaaaaaatctctctcaatctctctcagatctgaatccatccatcaccgatctctaatggcggcaccaccagcatcatcctcggcgagggaagagttcgtgtacctcgcaaagctcgcagagcaagcggaacgttacgaagaaatggttgaattcatggaaaaagtcgctgaagccgttgacaaagacgaactcaccgtcgaagaacgtaatctcctctccgtcgcttacaaaaacgtaatcggcgctcgtcgtgcttcctggagaatcatctcttccattgaacaaaaagaagagagtcgtggtaacgatgaccatgtgaccacgatccgtgattacagaagcaagatcgaatctgagttatcgaaaatctgtgacggtattcttaagcttcttgatactagacttgttcctgcttctgctaatggagattctaaggttttttaccttaagatgaagggagattatcataggtatttggctgagtttaagactggtcaagagaggaaagatgctgctgaacatactctcaccgcttacaaagctgctcaggatattgctaatgctgaattggctccaacgcatccgattcgtcttggtttggctttgaatttctctgtgttttactatgagattcttaattctccagatcgtgcttgtaatctcgctaagcaggcgtttgatgaagccattgctgagttagatactcttggagaggagtcatacaaggatagtaccttgatcatgcagcttcttcgtgacaatcttactctctggacttctgacatgcaggacgaaagtccggaggagattaaagaagcagcagcaccaaagcctgctgaagaacagaaggagatctaagtttgtggtttcttttttcagtattcttaagttatgcaattataattatgtttctgcttggtgtttattttctaatctttcctttgctatccccgaagcttctaaggccgtctaattcttgtcctttgtttgcttttctcaatcgtggatgctactggatttctgttttgttttacttcttctcttgattgattgcatttcccggcttatgccttgtacttgaaactcagttttctctcttattaatgatttgccattcaccaaaaaaaaaaaaaaaaaaaaaaaaanaaagggcggccgctctagaggatccaagcttacgtacgcgtgcatgcgacgtcatg

SEQ ID NO: 116417 - DNA, 1321 bp, Arabidopsis thaliana
  unsure (1)..(1321): unsure at all n locations
caaaaacaaaaatccacggagccgataaaaaaaaaaaaaaaaactctctcagatctgagaatcatttcttcttcttcttcctcactttgttcatcatcttcttctccgatctaaacaacaatggcgacaccaggagcttcctcagcaagagatgaattcgtatacatggcgaaactcgccgaacaagcagagcgttacgaagaaatggttgaattcatggagaaagtcgcgaaagctgttgacaaagacgaactcaccgtcgaagaacgtaatctcctctccgtcgcttacaaaaacgtcatcggagctcgtcgtgcttcgtggagaatcatttcatcgatcgaacaaaaggaggagtctcgcggtaacgatgaccacgtttcgttgatccgtgactacagaagcaaaatcgaaacggaactttctgatatctgtgacggaatccttaagcttctcgatacgattctcgttcccgctgctgcttctggagattcgaaggtgttttatctgaagatgaaaggtgattatcataggtacttggctgagttcaaatctggtcaagagaggaaagatgctgctgaacatactcttactgcttacaaagctgctcaggatattgctaattctgaattggctccaacgcatccgattcgtcttggtcttgcgttgaacttctctgtgttttactatgagattctcaattctccagatcgtgcttgtaatctcgctaagcaggcgtttgatgaagcaattgctgaattggatactcttggtgaagagtcatacaaggacagtactttgattatgcagcttcttcgtgataacctcactctctggacttctgatatgcaggacgatgttgctgatgacatcaaagaagcagcaccagcagcagcaaaacccgctgacgagcaacaatcctaagtcgtcttaccgcaactttgttgtcatttcagtatctaaaacctctccattaatatgtttttctcttggaggtgtttctctgttggtttcttatttccttttatccccaagctctctaaggcagtctaattcttgtccttttttgctgcttttctcaaccgtggatacgaaaactcgattcctattatttttcgtttatctgtttccattttatcgtgatttgactcctatcttctgtgtctttgtttgtaatggattcaacttctctttttgtttcaatgtcaagaaaaatctttggtttaaaaaaaaacaaaaaaagggcgggccgctctacgaggatccaagcgttcgtacgtccggaggggcattcagtcggcanangctnttnttttagggg

SEQ ID NO: 116418 - DNA, 797 bp, Arabidopsis thaliana
  unsure (1)..(797): unsure at all n locations
nnnnnnnnnnnnnnnnnnnnnnnnnnnnnnnnnnnnnnnnnnnnnnnnnnnnnnnnnnnnnnnnnnnnnnnnnncacaaaaacccacgcatcgtcctctctcgcttgacctacaacacccgattctctaatcgaaaccgtttctctctttttgatcagatctcagatctttccctctttgattcttcttccttagatcgattctctctagaaacaacaatggcgtctgggcgtgaagagttcgtatacatggctaagctcgcggagcaagcggagaggtacgaagagatggtagagtttatggagaaagtctccgccgccgttgatggcgatgaactcaccgtagaagagcgaaatcttctctccgtcgcttataagaatgtgattggtgctcgccgtgcctcgtggcgtatcatttcatcgatcgagcagaaggaagagagccgtggtaacgatgaccacgtcacggcgatccgtgaatataggtctaagatcgagacggaactctccggaatctgcgacggaatccttaagttgcttgactttaggctcatccctcccgtgcttctggtgattccaaggtcttttaccttaagatgaagggagattatcacaggtacttggctgagtttaagactggtcaagagaggaaagacgccgccgaacatacactcgccgcttacattgctccaacacacccaattcgtcttggtcttgcattgaacttctctgtgttctattacgagatcctcaattctcctgatcgtgcctgtaacctcgcaaacaggcctttgatga

SEQ ID NO: 116419 - DNA, 1703 bp, Arabidopsis thaliana
ctccaacttttaaaactcatcataaatagtaaaaaagtagccggaaaaataaaataaaaagtctatttctctttcctttaaaatccaaatcctataaactcatagctttctctgttctttacttatacctcacgttatacatatatatagagtttctataaatgcttctctttcctctcgaacaaatcttcctcacttctctcatttccacactcaccttcctctctatatattaaaccctatctacttaactcttcttctaactctaatctctctctctatttactctgcttctgttctcactctgaaagaaccaaaacatgacggtggttagagagtacgacccgacccgagacttagtcggcgtggaggacgtggaacgacggtgtgaagtcggaccaagcggcaagctttctcttttcaccgaccttttgggtgacccgatttgtagaatccgacattcaccttcctatctcatgctggtggctgagatgggtacggagaagaaggagatagtgggcatgattagaggatgtatcaaaaccgttacatgtggccaaaaactcgatttaaatcacaaatctcaaaacgatgtcgttaagcctctttacactaaactcgcttacgtcttgggccttcgcgtctctccttttcacaggagacaagggattgggtttaagctcgtgaagatgatggaggaatggtttagacaaaacggagctgagtattcgtatattgcaactgagaacgataatcaagcttctgtgaatttgttcaccgggaaatgtggttattcggagtttcgtacaccgtcgattttggttaacccggtttacgctcatcgagttaatgtttcgcggcgagtcacggttatcaagttagagccggttgatgctgagacgttgtaccgaatccggtttagcacaacagagtttttcccgcgggatattgattcggtacttaataacaaactctcgcttgggactttcgtcgcggtgccacgtggaagctgttatggatccgggtctggatcatggcccggttcggctaaattcctcgaatatccacccgagtcatgggccgtattaagcgtgtggaattgtaaagactcgtttctgttagaagtacgtggagcgtcgagattgagacgtgtggtggctaaaacgacgcgagtagttgataaaacgttgccgtttctgaaactaccttcgataccgtccgttttcgaaccttttggacttcattttatgtatggaatcggaggagaaggtccacgcgcggtgaagatggtgaaatccttgtgtgctcacgcgcataacttggctaaggcaggtggttgtggtgtcgtggcggcggaagttgccggagaagacccgttgcggcgaggaataccacattggaaagtgctatcgtgtgacgaggatctttggtgtataaagcggcttggagatgactatagtgatggtgttgttggtgattggactaaatcgccacctggcgtttccatttttgtagaccctagagaattttaaaactttttttttaactctataatatatattctctattaaccacttgatgttaaattaggggttttcttctaagtttatagattttcttgttttagaattaatctttttttttaggtaactttttttgctttttgttttgttttgttttgtttttgtgggtgttataaatta

SEQ ID NO: 116420 - DNA, 1993 bp, Arabidopsis thaliana
catttttttgttcttgtttactagagagaatgagattttgaatgagagattgatcaaaaagatgtgtatatattttggaagaggtaggagtgtttgttagatatattaagaaaggagacgagaagtcacgtgtcaatggagacatcatgcaattgtaggccacgtgttaatggcgtcaccatgcagccgctgcatgtgttaacgagaggagtctattcaaagacacgtttgttttttgcctagctcagaatgtggcgttggcatcgaaccgaaacataaaacgcaaaacgaacctttgggctcgtcagtatgggtttgggccttcaatagattccttctatacggcccacatatccactattggcaacaaaattagaaaaatttaggatttagttttaaaatttgttccgcgacattctagaacaatgaagaaaatggatacaaataataaatctatctgcctcttaaaagttccaaatttcaccacgtcactgctttgataatgcaggtcctcgtcgtctctcctccgctcatcgccgccgcatctctctctaaacctctcaattctctctctaaagccgcactctctttctccagagccaaacccatttgtcctttccctcaaacctctcgacgaccaatctccgtatacaaatccccaatgaacaaccttttcaacagactcggattcgggtctcgtcctcaagcccaagctgacccatcttccgccgcaatcgcccaaggacccgacgatgatgttccgtcttcaggtcagcaattcgcgcaatttggcgccggttgtttctggggagtggagctagcttaccagagagttcctggtgtgaccaagaccgaggttgggtatagccatggcatcgtgcacaatccgagttacgaggatgtctgtactggcactacgggacataacgaggttgttagagttcagtatgatccgaaagagtgtagctttgagagcttgcttgatgttttctggaatcgtcatgatccaaccaccttgaatcgtcaggtgattgattgctttaaccctaaaaatctagacgttatcagtatcagatcgtaatttgaatcaatagagagctctatgtgtgttctgcatttggggctgaattgtttattagataacaacgactagattcacctgtttagacgaactctctgtcccttagtctttagttctacatacatttggtagtctcaagtaactattggctaagttgttatgagctagttagaatctcaggccttgttgatatgaggattcgtgtttgattatgtggaagtgacattgccatttccattttcgtatgcgatcttgtacttgagtctgttcttgttcatgttactatacctacataacacttgaagatgaatctagtgttgttgttgtggttcttcacttactaacttttatgtgttgatctaagtagggtggggatgtgggaacgcagtatcgatcaggtatatactactacacagacgagcaagagcgcatagctcgtgaagctgttgagaaacagcagaagatattgaacaagaggattgtcacagagatacttcccgctacgaaattctacagagcagaaaattaccaccagcaatacctggcaaaagggggtcgcatgggtttaagacaatcagctgagaaaggttgcaaggatccaatccgatgctatggctaagaaactaagtcagtcttccctcaagcacataaaaagaagtgagttgtctcatgaaaaatacaataatctgtagatcacatttgtttcttgtctttgttatgcaaccaatggttatgatgcatcctatgcttatatgaatcaaggctttgtccaaatcaatttcaatttgatactacagtactggtaatacaatttggaagttctcaacaatttcgggttttcttttgatttatgagttttgacaattcaacgttatgaatgattgagcaatggtcgcaacatcatttggatcc

SEQ ID NO: 116421 - DNA, 799 bp, Arabidopsis thaliana
atgcaggtcctcgtcgtctctcctccgctcatcgccgccgcatctctctctaaacctctcaattctctctctaaagccgcactctctttctccagagccaaacccatttgtcctttccctcaaacctctcgacgaccaatctccgtatacaaatccccaatgaacaaccttttcaacagactcggattcgggtctcgtcctcaagcccaagctgacccatcttccgccgcaatcgcccaaggacccgacgatgatgttccgtcttcaggtcagcaattcgcgcaatttggcgccggttgtttctggggagtggagctagcttaccagagagttcctggtgtgaccaagaccgaggttgggtatagccatggcatcgtgcacaatccgagttacgaggatgtctgtactggcactacgggacataacgaggttgttagagttcagtatgatcccaaagagtgtagctttgagagcttgcttgatgttttctggaatcgtcatgatccaaccaccttgaatcgtcagggtggggatgtgggaacgcagtatcgatcaggtatatactactacacagacgagcaagagcgcatagctcgtgaagctgttgagaaacagcagaagatattgaacaagaggattgtcacagagatacttcccgctacgaaattctacagagcagaaaattaccaccagcaatacctggcaaaagggggtcgcatgggtttaagacaatcagctgagaaaggttgcaaggatccaattcgattctatggttaagaaactaagtcagtctttccct

SEQ ID NO: 116422 - DNA, 1019 bp, Arabidopsis thaliana
aaaaaaaggaagaagaagaccagtcgacccacgcgtccgtgaggatgagtagtaaaaattaggaagactctagtctgggagagactttcagcagctatttctttgtcttctttctctttaaagaacctcactctctctctctttagtcaaaaatccccaattcgtgaacaaattagggtttttgaagtttgaagaaggagagaaagatgagtgcttcaaggtttatcaagtgtgtcactgtcggcgacggtgctgttggaaagacttgtcttctcatctcctacactagcaacactttccccacggattatgtgccaactgtgttcgataatttcagtgccaatgtgattgttgatggcaacactatcaacttgggattgtgggatactgcagggcaagaggactacaatagactaagacctttgagctatcgcggtgcagatgtcttcttacttgcattctcacttgtcagcaaagctagctatgaaaatgtttctaaaaagtgggttcctgaactgagacattatgctcctggtgttcccatcatcctcgttggaacaaagcttgatcttcgagatgataagcaattctttgccgagcaccctggtgctgtgcctatctctaccgctcagggtgaagaactaaagaagctgattggggcgcctgcttatatcgaatgcagtgcaaaaactcaacagaatgtgaaagcagtgtttgatgcggctatcaaggtcgttctccagccaccaaaaaacaagaagaagaagaagagaaaatctcagaaaggttgttctatactctgattcaacaagaagaaaggaatcaacaggagaattagagctataagtatttgttttctcctttttcataacttgtttacccaaggaatcaaaaatctgttgtttgtagtctgaaaatgacaaaagttgaagaactagtaacaagtatttgtattcttgtttgcattttgatctgtaaatagcccacgaatccttgatttctctgtttcctaaaaaaaa

SEQ ID NO: 116423 - DNA, 877 bp, Arabidopsis thaliana
  unsure (1)..(877): unsure at all n locations
gccaatttaaccactgattcgagaaaggaaaaactaagatttgctccaaggttaaccaattgtgccactgtcggcaacggtgctgttggaaaaacttgtctcctcatctccaacactagcaacactttcccctcggattatgtgccaacttgtgttcgatagttccagtgccattgtgattgttgatggcaccactatcaacctgggattgtgggatactgcagggcaagagggctcacaatagcctaggacctttgagctgtcgcggtgcagaggtcttcgggcttgcattctcacttgtcagcaaggctagctatgaacatgtttctaaaaagtgggttcttgaactgagacattatgctcgtggtgttcccatcatcgtagttgggaaagagcttgatcttcgacctgataagctattctaagcggagcaccatggtgctgtgcctatgtttaccgctcagggtgaagaactaaagggtctcattggggcgcctgcttatatcgaatgcggtgcatatattcaacagaatgtgaaagcagtgtttgatgcggctatcaaggtagtttttcagcccccaaggagcaagaagatgaaaaaaagcgaatttcggtaaggctgttgtacactctgattcaacaagaagaagggaatcatcaggaaaattagagctatgggtatttgttttctcctttatcataacctgtggacccagggaatcaaaaatctgttgtttgtggtctgacaatgtcaaaagtttaatggctagtagcaagtatttgtatttttgaaagcaaaaaaaaaaaaaaagnnnnnnnnnnnnnnnnnnnnnnnnnnnnnnnnnnnnnnnnnnnnnnnnnnnnnnnnnnnnnnnnn

SEQ ID NO: 116424 - DNA, 800 bp, Arabidopsis thaliana
atttccttgtctacacgatcataaagctcacaaagagagaattgagaagaaacaaactcgtcggagaattcagtactcgccgaagaggaagaagaagaagatgtcttggcaatcatacgtcgatgatcaccttatgtgtgatgtcgaaggcaaccatctcaccgccgccgcaattctcggccaagacggcagtgtctgggctcagagcgccaaatttcctcagttgaagcctcaagaaatcgatggaatcaagaaggactttgaggagcccgggtttcttgccccaaccggactatttctcggtggcgaaaaatacatggttatccaaggtgaacaaggagctgtgatccgagggaagaagggacctggaggtgtcactatcaagaagacaaaccaagctttggtctttggcttctacgatgaaccaatgactggaggtcaatgcaacttggttgtcgaaaggctcggggattaccttatcgagtctgaactctaaaaccaaggtttcatttcaggttcttcttaactaaagagtgtcaatgcactttttattgtgattgattgtaatgctttcaaacacaaatcatttgttactttagaaccaattgtgattgattggtctccttcgttaccgagtttgagtttgtgtgttcttgtaatgacatttgatcatcttttttctccatatgtattgagttttgatttttgtttcttcatattattatttttcttgaaatgatctgctgtttatgatttggggttcaaaatatttttggtttggcaaaaaaaaaaaaaaaaaa

SEQ ID NO: 116425 - DNA, 454 bp, Arabidopsis thaliana
aagactctataatgacgtcgtattacgagaagacgacagaaaggacctggaggtgtcactatcaagaagacaaaccaagctttggtctttggcttctacgatgaaccaatgactggaggtcaatgcaacttggttgtcgaaaggctcggggattaccttatcgagtctgaactctaaaaccaaggtttcatttcaggttcttcttaactaaagagtgtcaatgcactttttattgtgattgattgtaatgctttcaaacacaaatcatttgttactttagaaccaattgtgattgattggtctccttcgttaccgagtttgagtttgtgtgttcttgtaatgacatttgatcacttgtttctccataataagagagttttaagcatttgaaacaaaaaaaatggcttccaaggctttggttctgttgggtctctttgttgttcttctcgtcgtc

SEQ ID NO: 116426 - DNA, 900 bp, Arabidopsis thaliana
  unsure (1)..(900): unsure at all n locations
taggtgaactatagaagagctttgacgtcgcatgcacgcgtacgtaagctcggaatcggtacagaagaagaggaagaagaagaagaagcagagacaacaagaagaagaagaaacagtctcatctcgccggagaagaagaaagatgtcgtggcaatcatacgtcgatgaccatctcatgtgcgaggtcgaaggcaaccacctcacacacgccgccatcttcggccaagacggcagtgtctgggctcagagctcagctttccctcagttgaagcctgcagagatagcaggaatcaacaaagactttgaagaagccggacatcttgccccaaccgggctattccttggcggtgagaagtacatggttgtccaaggtgaggctggagccgtcatccgagggaaaaagggacctggtggagtcactatcaagaagactactcaagctctagtctttggtatctatgatgaaccgatgaccggagggcaatgcaacttggtcgtggagaggctcggcgattaccttatcgagtctggtctctaagttcactcaaagtgcttcaaacaaatttcatttttcgggttctttcttcactagagaagcacccttctgccatgtattgtgatttgattgttgttgtgcatcaaacaaagttattatactcttaaaaagaacaaagaaacaatcatatttgttatggttttgatcctctcctatgatggctcttatgtttttctcttgtactgtatttcgtaatgtataattacgctttggaataaaaatttgagtttgtgatcaaaaaaaaaaaaaaaaaaannnnnnnnnnnnnnnnnnnnnnnnnnnnnnnnnnnnnnnnnnnnnnnnnnnnnnnnnnnnnnnnnnnnnnnnnnnnnnnnnnnnnnnnn

SEQ ID NO: 116427 - DNA, 559 bp, Arabidopsis thaliana
tacgactcactattaggaaagctggtacgcctgcaggtaccggtcccgaattcccggggtcgaccacgcgtccggccacgcgtccgatacgtagagagatccaaaatacccaacctcgcagagtaaaagcaaaaagaagaagaaatcagagagaatgtcgtggcaagcatacgttgatgagcatttgatgtgtgatgtcggcgacggccaaggtcaccaccttaccgccgccgctatcatcggccatgatggtagcgtttgggctcagagcgctaattttcctcagttcaaacctcaagagatcacagacattatgaaggatttcgatgagcctggtcacctcgctcccacgggtatgttcctcgcagggctaaagtatatggtcatccaaggcgagcctaatgctgtcatccgtggcaagaagggagctgggggaatcacgatcaagaaaacaggacaatcaatggtgtttggtctgtacgaagagccagtgactccaggacaatgcaacatggttgtcgagaggttgggtgattacttgatcgaacagggtctttga

SEQ ID NO: 116428 - DNA, 772 bp, Arabidopsis thaliana
ctcactatagggaaagctggtacgcctgcaggtaccggtccggaattcccgggtcgacatcgtacttgtcgtacttcttacagatcgagtcaactctagtcagaatatcgatcacagtcatcttcttccaaatctatcacaagaagctcccagatctgcggacgaatcactcgaaaactcatcaaatcaaaaatcaaacacagagaagagaaaatggccgcagaaggagaagttatcgcttgccacaccgttgaagattggaccgagaagctcaaagccgccaacgaatccaagaaactgattgtgatagacttcactgcaacatggtgcccaccttgccgtttcattgcacccgtctttgctgacttagccaagaagcacctcgacgtagtcttcttcaaggtcgatgttgacgaattgaacactgttgctgaggagtttaaagttcaggcaatgccaacgtttatcttcatgaaagaaggagagatcaaggagactgtggttggtgctgctaaagaagaaatcattgccaatctcgagaagcacaagacagttgttgctgctgcttgatttgcttttctctcttacctattttgctaaaatatgtttggtgttttaaataaatcctttgttcgcccgagtcttttcaccttaaatgtgctcttatgtgtggtggtgaataaatgttgttgcaaacttgattactcgcagctatgctaattgttcgttcatggttatgtttactctttggggattctattgttaaaaaaaa

SEQ ID NO: 116429 - DNA, 926 bp, Arabidopsis thaliana
  unsure (1)..(926): unsure at all n locations
ggtnatggncttnaancccggggggggaaaangcnagnnccaaaaaattanttnnccnaanaaagctccttcgggttttaaggccccttaaccccnttgacagcaagtntttgcaactttggaacttcctctgacaatcgtgccttggtccggcggatctcagcattcattgcaacagcagcagccctgtttttctccttcgtaacaagttcagctttctcgagagcggtctcgatttgggtttcgaaagctccatagagacgagcaaaggcatcatcgccggagatattggcctcccgctgtttgtcgacatcgtacttgtcgtacttcttacagatcgagtcaactctagtcagaatatcgatcacagtcatcttcttccaaatctatcacaagaagctcccagatctgcggacgcgtgggtcgacccaccgtccgatcaaaaatcaaacacagagaagagaaaatggccgcagaaggagaagttatcgcttgccacaccgttgaagattggaccgagaagctcaaagccgccaacgaatccaagaaactgattgtgatagacttcactgcaacatggtgcccaccttgccgtttcgttgcacccgtctttgctgacttagccaagaagcacctcgacgtagntttctttcaaggtcgatgttgacgaattgaacactgttgctgaggagtttaaagttcagacaatggccaacggtttatcttccatgaaagggggggagatcaagganntgtggttggggccgctaaagaagaatcattggcaatcccgggagcncaagacagttnttgctgcnccttgattgnnttccccctacccantttgccaaaanatggttggggttaaaaaacccttgtcccccgggctttacccnaaaggcccntggggggggaaaaagtntcnc

SEQ ID NO: 116430 - DNA, 1165 bp, Arabidopsis thaliana
gccgcagacacagcaatcaattagtttgacgcacattttgacagatgaatctatgcacacgaacaacatggagaaaagtcgatgcaggaagataagacttgaatattcttgacattaagaagaaactctcgtagaaatatcagagaagaagagtaagacacaagcacacactggatattgactcgggtgataagtactaatgggtcctttcgtagggttcatctcattacttcagtacattgtataagtatgcagcgatacccagaacaatacacaacaaaacaatatcgatacagaagttccggctagatctcagctggttcacggtatctttaagtctaacattggtgttcttaagatcggaggttgctctgtccacctttgtgtcgatttcatccatcagtggaacttgtctatccagttcctcgttcatatcagaagccatgttcttcaaagcatctaacccttcggagatcatgtcaagaccttgttcctgttttattttccgcatctcatactcctgcctgaattggctagattcatttgattcttgaaagtaatcatcgtcaaaacgcccatctgaatcaaatttgatatcagcccgagatgttgttgaggacggagtccaagcactagtgcttttagggccacctgctgtcccatcaggtatggcttcaatccgggctggaagagcgagcaccaaatcatttctcgcagcaagctcttcggttgtaaggcccttaacccgcttgacagcaagtctttgcaacttgggaacttcctctgacaatcgtgccttggtccggcggatctcagcattcattgcaacagcagcagccctgtttttctccttcgtaacaagttcagctttctcgagagcggtctcgatttgggtttcgaaagctccatagagacgagcaaaggcatcatcgccggagatattggcctcccgctgtttgtcgacatcgtacttgtcgtacttcttacagatcgagtcaactctagtcagaatatcgatcacagtcatcttcttccaaatctatcacaagaagctcccagatctgagctaagaaggagacaatctctgattcggagaggaagaagactttaatttgtgaaattttgaatcgctacagcctttctggaactggttcggcgacgaaag

SEQ ID NO: 116431 - DNA, 419 bp, Arabidopsis thaliana
  unsure (1)..(419): unsure at all n locations
aagattctntccgcctccttctctctataagaaccgacacagagacgaagaagaataatcactcgaaaactcatcaaatcaaaaatcaaacacagagaagagaaaatggccgcagaaggagaagttatcgcttgccacaccgttgaagattggaccgagaagctcaaagccgccaacgaatccaagaaactgattgtaatagacttcactgcaacatggtgcccaccttgccgtttcattgcacccgtctttgctgactttgcccaagaagcacctcgacgtagttttcttccaaaggtcgatgttgacggtttgnacactgttcgctgnggggtttaaagttcaggcaatnccaccggttttntttcatngtaagaagggggggntnaaggggggccttttgggtttggngntttcgg

SEQ ID NO: 116432 - DNA, 795 bp, Arabidopsis thaliana
  unsure (1)..(795): unsure at all n locations
gggagaaccgtgtgtcgccccgcggggggggtagtatcgccggctctatacgactcatttagggaaagctggtacgcctgcaggtaccggtccggaattcccgagacgagagacgataatgggaggagctttatcaactgtgtttggaagtggagaagatgcaacagctgcagggaccgaatctgagccaagtcgcgtcctaaagtttagctcttccgctcggtggcaacttcatttcaacgagatcaaagaatcaaacaaactgctggtggttgatttctcggcctcatggtgcggaccatgtaggatgattgagcctgcgattcatgccatggctgataagttcaatgatgttgatttcgtcaaattagatgttgatgaacttcctgatgtggctaaagagtttaatgtgacggcaatgcctacctttgtgctggtgaaaaggggtaaagaaattgaaagaatcattggtgccaaaaaggacgaacttgagaagaaagttagcaaactcagagcataatgagcattgttaacgccttaaccaatagtcttgtgtaaactcaataataaatggtatgtttatggggaatgtgatgttctatactctctgctaatgtaagaccttctgtgtgatgccatgattgattgaaatggttttgttgaaaaaaaaaaaccaagaaaaaagaaannnnnnnnnnnnnnnnnnnnnnnnnnnnnnnnnnnnnnnnnnnnnnnnnnnnnnnnngttcccaattatttccgccgnccgccgcgggctcgagtctccacaagaaa

SEQ ID NO: 116433 - DNA, 497 bp, Arabidopsis thaliana
aaacagaacagagaagaaaaagagagaagatggcttcggaagaaggacaagtgatcgcctgccacaccgttgagacatggaacgagcagcttcagaaggctaatgaatccaaaactcttgtggtggttgatttcacggcttcttggtgtggaccatgtcgcttcatcgctccattctttgctgatttggctaagaaacttcctaacgtgcttttcctcaaggttgatactgatgaattgaagtcggtggcaagtgattgggcgatacaggcgatgccaaccttcatgtttttgaaggaagggaagattttggacaaagttgttggggccaagaaagatgagcttcagtctaccattgccaaacacttggcttaagctttccactcttatatatctcttaagatgttggattaattgttctattactcttgacatgttataacttgttcccctttgttatggttccggtctataatctcatctgactatttgaagctg

SEQ ID NO: 116434 - DNA, 1036 bp, Arabidopsis thaliana
  unsure (1)..(1036): unsure at all n locations
tttaggtcacactatagaagagctatgacgtcgcatgcacgcgtacgtaagctcggaattcggctcgagtttcaaaatcagatccaacaaatcttcttcttcttcttcttcttcgatcatcatggccagtatcaaggttcacggagttcccatgtccaccgccacaatgcgcgtcctcgctactctttacgagaaagatctccagttcgagctcatccccgtcgatatgagagccggtgcccacaagcaagaggcccaccttgccctcaaccccttcggtcaaattcctgctctcgaggacggtgatttgacgcttttcgagtcaagagccatcacacagtacctagcagaggaatacagtgagaaaggtgaaaagcttatctcccaagactgcaagaaagtcaaggcaaccactaacgtatggcttcaagttgaaggtcaacagtttgaccctaacgcctctaagcttgccttcgagcgtgtctttaaaggcatgttcggcatgaccactgaccctgccgctgtccaagagctcgaaggtaagctccagaaagtcttggatgtctacgaggctaggctcgccaaatctgagttcttggctggtgattccttcactcttgctgatcttcaccacctcccagccatccattacttgttgggtactgactccaaggtgctctttgactctcgccctaaggttagcgagtggattaagaagatctctgccaggcctgcttgggctaaggttattgacctccagaagcagtagtgaccctctctctttcttcacttcttttcttttccttttgcccaaataaacgagtccagtgattttcttttcttggcttatgtacttgtgttttcagtattatttatgtcatcatcatcctcctcttttgtgttaaaaaaaaaaaaaaaaaagaaaaggcgctcgcgatctatnnnnnnnnnnnnnnnnnnnnnnnnnnnnnnnnnnnnnnnnnnnnnnnnnnnnnnnnnnnnnnnnnnnnnnnnnnnnnnnnnnnnnnnnnnnnnn

SEQ ID NO: 116435 - DNA, 593 bp, Arabidopsis thaliana
  unsure (1)..(593): unsure at all n locations
agattctggaaaaatgggagcaattcaagctcgtcttcccttgttcctttctcccccttctatgaaacaccataccttccttcattcttcttcatccaattccaatttcaaaatcagatccaacaaatcttcttcttcttcttcttcttcgatcatcatggccagtatcaaggttcacggagttcccatgtccaccgccacaatgcgcgtcctcgctactctttacgagaaagatctccagttcgagctcatccccgtcgatatgagagccggtgcccacaagcaagaggcccaccttgccctcaaccccttcggtcaaattcctgctctcgaggacggtgatttgacgcttttcgagtcaagagccatcacacagtacctagcagaggaatacagtgagaaaggtgaaaagcttatctccccaggactgcaagaaagtcaagggcaacccacttaacgtttgggcttcaaggttgaagggtcaacaagttttgacccttaacgggctttaaagggttgcctttcggggggggtcnttttaaaggggttttttggggattccccttttccccttnggggtttccaagggtttt

SEQ ID NO: 116436 - DNA, 404 bp, Arabidopsis thaliana
gctcatccccgtcgatatgagagccggtgcccacaagcaagaggcccaccttgccctcaacgtaacccctttctccctctctctctttacgaacaaacaaaactgaaaacactttatgtttggtttttccaattatctgacaatgatctttgttttgtttcagcccttcggtcaaattcctgctctcgaggacggtgatttgacgcttttcggtcagtttacttttgcgttgatcaatgatttgacttttttagatttacagaaacatcattacgccttagtcactttgtattggataacgatttatctgaaatgacagactgtgatgattatttttgatgctgaaagtttttgttggtaatatatttgcagagtcaagagccatcacacagtacctagcagag

SEQ ID NO: 116437 - DNA, 681 bp, Arabidopsis thaliana
aggtgacactatagcaagactatgacgtcgcatgcacgcgtacgtaagctcggaattcggctcgagctcactgtattcgtctgctaggtactgtgtgaaaggtgaaaagcttatctcccaagactgcaagaaagtcaaggcaaccactaacgtatggcttcaagttgaaggtcaacagtttgaccctaacgcctctaagcttgccttcgagcgtgtctttaaaggcatgttcgtcatgagcgctgaccctgccgctgtccaagagctcgaaggtaagctccagaaagtcttggatgtctacgaggctaggctcgccaaatctgagttcttggctggggattccttcactcttgctgatcttcaccacctcccagccatccattacttgttgggtactgactccaaggtgctctttgactctcgcccctaaggttagcgagtggattaagaagatctctgccaggcctgcttgggctaaggttattgacctccagaagcagtagtgaccctctctcattcttcacttcttttcttttccttttgcccaaataaacgagtccagtgattttcttttcttggcttatgtacttgtgttttcagtattatttatgtcatcatcatcctcctcttttgtgttattgttgggttcattcacatttgtgcaattaaaaaccagagttt

SEQ ID NO: 116438 - DNA, 1065 bp, Arabidopsis thaliana
cttcttcagtcgtaaaaccgccgcgtctctgctgacccttctcttctcatttcatcgacgggagaaaatccgataccatctgagatttccaacagtgaaattaagatgtcaacaggaatatccactgatctccacgtccattttggagctctgaatttctcaaaaacctacaaatctggtttaagcaatcgaacggtgtctttttcgagagtcgggtatgctcagaacaggaaattgagctgcagtgtttccaacacagagaatgtagctcctaaggatgatgaaagaggaaaggatagacctttggttaagatgtgtggcatcacatcagccagagatgcagctatggcagttgaggctggtgccgattttattgggatgattatttggccacattcaaaacgatccatttctctttctgtcgcaaaggatatctcccaagtggccagggaaggtggggccaaacctgttggtgtttttgttgaagatgatgagaacacgatactcagagcagctgattcctctgaccttgagcttgtgcagcttcatggtaatggttcgcgtgctgctttctcgaggttagtacgcgagaggagagtcatatatgtccttaatgcaaatcaggatggaaagctcctgaatgtagttcctgaagaggatggtcatctcgctgattggattcttgtggatagtgcaacgggtgggagtggacacggatttaactgggctcaattcaagttgccttccgtcagaagcagaaatgggtggctcttagctgggggaatcaatccaacaaatgtttcagaagctctttctatccttcaacctgatggaattgatgttagtagcggtatttgcggtacagacggtatccagaaggataagtctaagataagctcctttataactgcagttcgctctgtacactactaatggcaagcaatataaaccccggtaatttatcttgtaactatagttttgagcatcaacctgttgtttccaatccatgtcattaagttttgaattgtaactggctgataataataataatgcccttttttttcc

SEQ ID NO: 116439 - DNA, 1402 bp, Arabidopsis thaliana
ttggagatggaaaatacgaccaccgggttttattaatttgcaaattcttcctgaactagttaaaagaatgaaattggctgatattatgacgatacgcgggagcagagatttaattatgggagaagttgatcgttaaaatgataatttatgcaacagcagtccaaactataaattcttttgttaaattggaatctttaaaagaggtctatggactcatatggatatttgtccctatattttctcttgtattgggaatcataacaggtgtactagtaattgtgtggttagaaagagaaatatctgcagggatacaacaacgtattggacctgaatacgccggcccgttgggaattcttcaagctctagccgatgggacaaaactacttttcaaagaaaatcttcgtccatctagaggaaatactcctttatttagtattggaccatctatagcagttatctctattttactaagttattcagtaattccctttagcaatcaccttgttttagcggatctcaatatcggtatttttttatggattgccatctcaagtattgctcctattggacttcttatgtcaggatatggatcaaataataaatattcttttttaggtggtctgcgagctgctgcccaatcgattagttatgaaataccattaactctatgtgttttatcaatatctctactatctaacagtttaagtacagttgatatagttgaggcacaatcaaaatatggtttttggggatggaatttgtggcgtcaacctataggttttatcatttttctaatttcttccctagcagaatcggagaggttaccgtttgatttaccagaagcggaagaagaattaatagcaggttatcaaactgaatattcaggtataaaatttggtttattttacgttgcttcttatctaaatctattaatttcctcattatttgtaacagttctatacttaggcggttggaatatttctattccgtatatatctattctggagctatttcaaagggatcaaatttttggaacaacaattggtatctttattacattagctaaaacttatttgtttttgttcgtttctatcgcaacaagatggactttacctaggctaagaatggatcaactattaaatcttggatggaaatttcttttacctatttcccttggtaatctattattaaccacttctttccaactcttttcactctaaatttaaaatgaatctaatatattcattatttgttttaaacaagagacagaaacaaagataaaattattcagagataattacaatatgcttcctatgataaccgggttcatgaattatggtcaacataccctacgagctgcaaggtatattggtcaaggtttcatgattaccttatcccacac

SEQ ID NO: 116440 - DNA, 2141 bp, Arabidopsis thaliana
cctacgcatccgcagctctctctagccaaattacttggccacgaccataaacacaaaacaccgcttagcttctaaaatctgaacatcgagaaaaaatgagttggtggtgggctggcgccatcggagctgccaagaagaaactcgacgaagatgaaccatcacaaagcttcgagagcgtcgctctcatcatcggcgttactggaatcgtcggaaacagcttggcggagattctccctctttccgacacacccggtggtccatggaaagtctacggcgtcgctcgtcgtcctcgtcctacctggaacgccgatcatccgatcgattacatccagtgcgatgtctccgacgccgaagacacaagatccaagctttcccctttaaccgatgtcacacatgtcttctacgtcacctggaccaatcgtgaatcggaaagtgaaaactgtgaagcaaatggctcaatgctccgtaacgttctccaagcgattatcccatacgcgccaaatctccgacatgtttgtctccagacagggacaaagcactaccttggccctttcaccaacgttgacggacctcgtcacgatccaccgttcactgaggatatgccgagattgcagatccagaatttctattatacccaagaggatattctgtttgaagagatcaagaagacagaaacggtgacgtggtctatccacagaccaaacatgatctttgggttctctccttatagtttgatgaacattgttgggactctctgtgtctatgcaaccataaacatgaagggatctccgttgttgtttcctgggagcaagaaagcttgggaagggttcatgacggcttctgacgcggatttgattgcggagcagcagatttgggcggcggttgatccgtatgcgaagaacgaggcgatcttaactgcaacaatgctgatatcttcaagtggaaggtcatctgatcggaagattctagctgagcagtttgggattgaggagtatggatttgaggaagggaagaatttggggttggtggagatgatgaaagggaaagagagagtgtgggaggagatggttaaggagaatcaattgcaagagaagaagcttgaggaagttggtgtgtggtggtttgctgatgttatacttggagttgaaggaatgattgatagtatgaacaagagtaaggaatatggcttccttggtttcaggaactccaacaactcttttatctcttggattgacaagtacaaggcgttcaagatcgtaccttgattccaaaacatacttggatgtttgtttactctggtttcatgtttatgtttctcccaaaatctcagttctttgttgtctaaatgaaataaaagcggtaccatctttttctgttcttttttttaattccatctttagtcttgtaaactctactcttttgggaatagttttcaatttttaaatatcgttacaagttgtaatggaaagatattggacaatggtgcagtgtcataaggacaaagagctttacaggctaatggaaataccagattctgtgttttgcagttggagtgtatttgtactccatatggttccataagctgggagaaggcttcacatggacttatctcaactctctttcttgcaagtaagaaagcttgcttatttccaaaggtaggctggtacgtgggaaacaaaccaaagacaacctaagagcatattcatataactacccttgtttgattcataaatcataggtctttgcataatcaatgcactagaaatcaaccagtcctcgcgcacatatgtatacatatatttaagggttttggtttccagatgcacctaaaaaaatacttatatgcaaaagaatagatttgcctttgttatcccaaagtcctccttcaagccttgcctgcttaagcactggattcacctctcccctgaaacatttttgctggattcatcaacaccagttgtgactaagttggtcggatcttctaatgatcctgaattcggaggcatgccaacagaggtttccatttctgacatcttccctacagtatgaccagctttcgtcaaaccagggatttcctttgaggcaggggaagacactggtccttggcttttttgactaaggttaccaagtttttgccccct

SEQ ID NO: 116441 - DNA, 1962 bp, Arabidopsis thaliana
atggcggaatccggcgatttcaacggtggtcaacctcctcctcatagtcctctgagaacaacttcttccggtagtagcagcagcaacaaccgtggtcctcctcctcctcctcctcctcctttagtgatggtgagaaaaagattagcttccgagatgtcttctaaccctgactacaacaactcctctcgtcctcctcgccgtgtctctcaccttcttgactccaactacaatactgtcacaccacaacaaccaccgtctcttacggcggcggctactgtatcttctcaaccaaacccaccactctctgtttgtggcttctctggtcttcccgtttttccttcagaccgtggtggtcggaatgttatgatgtccgtacaaccaatggatcaagactcttcatcttcttctgcttcacctactgtatgggttgacgccattatcagagaccttatccattcctcaacttcagtctctattcctcaacttatccaaaacgttagagacattatcttcccttgtaacccaaatctcggtgctcttcttgaatacaggctccgatctctcatgctccttgatccttcctcttcctctgacccttctcctcaaactttcgaacctctctatcagatctccaacaatccttctcctccacaacagcaacagcagcaccaacaacaacaacaacagcataagcctcctcctcctccgattcagcagcaagaaagagaaaattcttctaccgatgcaccaccgcaaccagagacagtgacggccactgttcccgccgtccaaacaaatacggcggaggctttaagagagaggaaggaagagattaagaggcagaagcaagacgaagaaggattacaccttctcacattgctgctacagtgtgctgaagctgtctctgctgataatctcgaagaagcaaacaagcttcttcttgagatctctcagttatcaactccttacgggacctcagcgcagagagtagctgcttacttctcggaagctatgtcagcgagattactcaactcgtgtctcggaatttacgcggctttgccttcacggtggatgcctcaaacgcatagcttgaaaatggtctctgcgtttcaggtctttaatgggataagccctttagtgaaattctcacactttacagcgaatcaggcgattcaagaagcatttgagaaagaagacagtgtacacatcattgacttggacatcatgcagggacttcaatggcctggtttattccacattcttgcttctagacctggaggacctccacacgtgcgactcacgggacttggtacttccatggaagctcttcaggctacagggaaacgtctttcggatttcacagataagcttggcctgccttttgagttctgccctttagctgagaaagttggaaacttggacactgagagactcaatgtgaggaaaagggaagctgtggctgttcactggcttcaacattctctttatgatgtcactggctctgatgcacacactctctggttactccaaagattagctcctaaagttgtgacagtagtggagcaagatttgagccacgctggttctttcttaggaagatttgtagaggcaatacattactactctgcactctttgactcactgggagcaagctacggcgaagagagtgaagagagacatgtcgtggaacagcagctattatcgaaagagatacggaatgtattagcggttggaggaccatcgagaagcggtgaagtgaagtttgagagctggagggagaaaatgcaacaatgtgggtttaaaggtatatctttagctggaaatgcagctacacaagcgactctactgttgggaatgtttccttcggatggttacactttggttgatgataatggtacacttaagcttggatggaaagatctttcgttactcactgcttcagcttggacgcctcgttcttag

SEQ ID NO: 116442 - DNA, 1197 bp, Arabidopsis thaliana
ataccttcttctttagttataaaaatgttgaaagaagagagtaatgagagtggtacttgggcacgagcatgtgacacttgtcgttcagccgcctgcactgtctactgtgaagccgactctgcctacttgtgcaccacctgtgatgctcgagttcacgcagccaaccgtgttgcttctcgccatgaacgtgttcgtgtctgtcagtcatgtgagtctgccccagctgcgtttttgtgtaaagcagacgctgcgtctctttgtacagcttgtgatgcagagattcattccgcaaacccactagctagacgtcatcagcgagttccgattcttccattatctgcaaactcttgcagctccatggccccaagtgagactgatgctgataacgatgaggatgatcgagaggttgcttcgtggttactccctaatccagggaaaaacatcggtaatcagaataatgggttcttgtttggtgttgagtaccttgatcttgtggattacagctccagcatggacaaccaattcgaagataatcagtacactcactaccagaggagctttggaggagatggagttgtgccgcttcaagttgaagaatcaacaagtcacctgcaacaaagccaacaaaactttcagttgggtatcaactatggattctcctcaggagctcactacaacaacaactccttaaaggacctaaaccatagcgcatccgtttcatcaatggacatcagtgttgtgccagagtcaactgcaagtgacataacagtccaacacccaagaactactaaagagacgatagaccaactatctggtcctcctactcaggtggtgcaacagcttactccaatggagagggaggctagggtcctgagatacagagagaagaagaagacaaggaaatttgacaagacaataagatatgcttcaagaaaggcatatgcagagataagaccacggatcaagggcagattcgcaaagaggatagaaactgaagctgaggctgaagaaatcttctcaacatcgctaatgtctgagactggatatggaattgttccttccttctaaactcctatggcgaagatggactagattgcatgctgtaaattacttctagtttggatttctacaagttattactgcatatgggtccttagttttgtgacttttgtctaactagtacgagtttaatcagat

SEQ ID NO: 116443 - DNA, 2447 bp, Arabidopsis thaliana
gcaaatcaaagatgagatgtcggtaaaaaaaacgctattataagaacacacgccactagttgtggataaagttgtctactttggtctcgttgtgattattatattgcacaattattaacattcatactctcatatgggtattgtttttggtctccgttagatctcaaatctttaactttgcatacccaaaataggaagaaagaagagtcaagtcactaaaataactttcacagtctttgattcgaagatctttgtcgccgagagatatccactctgatttgagttctgaactattctctggaggaggttgaggtctgaaatcatggaacaacttggttagagtgtggaattttagctgatttgatctttgattcatctgtgatcataataactatgaagatggacaaaaagactatagtttggtttagaagagacctaaggattgaggataatcctgcattagcagcagctgctcacgaaggatctgtttttcctgtcttcatttggtgtcctgaagaagaaggacagttttatcctggaagagcttcaagatggtggatgaaacaatcacttgctcacttatctcaatccttgaaggctcttggatctgacctcactttaatcaaaacccacaacacgatttcagcgatcttggattgtatccgcgttaccggtgctacaaaagtcgtctttaaccacctctatgatcctgtttcgttagttcgggaccataccgtaaaggagaagctggtggaacgtgggatctctgtgcaaagctacaatggagatctattgtatgaaccgtgggagatatactgcgaaaagggcaaaccttttacgagtttcaattcttactggaagaaatgcttagatatgtcgattgaatccgttatgcttcctcctccttggcggttgatgccaataactgcagcggctgaagcgatttgggcgtgttcgattgaagaactagggctggagaatgaggccgagaaaccgagcaatgcgttgttaactagagcttggtctccaggatggagcaatgctgataagttactaaatgagttcatcgagaagcagttgatagattatgcaaagaacagcaagaaagttgttgggaattctacttcactactttctccgtatctccatttcggggaaataagcgtcagacacgttttccagtgtgcccggatgaaacaaattatatgggcaagagataagaacagtgaaggagaagaaagtgcagatctttttcttaggggaatcggtttaagagagtattctcggtatatatgtttcaacttcccgtttactcacgagcaatcgttgttgagtcatcttcggtttttcccttgggatgctgatgttgataagttcaaggcctggagacaaggcaggaccggttatccgttggtggatgccggaatgagagagctttgggctaccggatggatgcataacagaataagagtgattgtttcaagctttgctgtgaagtttcttctccttccatggaaatggggaatgaagtatttctgggatacacttttggatgctgatttggaatgtgacatccttggctggcagtatatctctgggagtatccccgatggccacgagcttgatcgcttggacaatcccgcgttacaaggcgccaaatatgacccagaaggtgagtacataaggcaatggcttcccgagcttgcgagattgccaactgaatggatccatcatccatgggacgctcctttaaccgtactcaaagcttctggtgtggaactcggaacaaactatgcgaaacccattgtagacatcgacacagctcgtgagctactagctaaagctatttcaagaacccgtgaagcacagatcatgatcggagcagcacctgatgagattgtagcagatagcttcgaggccttaggggctaataccattaaagaacctggtctttgcccatctgtgtcttctaatgaccaacaagtaccttcggctgttcgttacaacgggtcaaagagagtgaaacctgaggaagaagaagagagagacatgaagaaatctaggggattcgatgaaagggagttgttttcgactgctgaatcttcttcttcttcgagtgtgtttttcgtttcgcagtcttgctcgttggcatcagaagggaagaatctggaaggtattcaagattcatctgatcagattactacaagtttgggaaaaaatggttgcaaatgatcaaaataatgtgctgttataaagcctaacatgtagatgtgtgaatgtgtcttttaactctttgtttccttttggttatactcaaaaggatatgattgcataaacatataatgctgatattatttcaattggctatgaataaaatatacatatttgtttagtctaaaaaaaaatagttaacaaataaataaaagcggccgcccaaaaggttcaaa

SEQ ID NO: 116444 - DNA, 2390 bp, Arabidopsis thaliana
tcgaagttccaaattttctcttagcattctctttcgtttctcgtttgcgttgaatcaaagttcgttgcgatggcggatgttcagatggctgatgcagaaacttttgctttccaagctgagattaaccagcttcttagcttgatcatcaacacgttctacagcaacaaagaaatcttcctccgtgagctcatcagtaactcttctgatgctcttgacaagatccgatttgagagcttaacggataagagcaagctcgatggacagcctgaactcttcattagattggttcctgacaaggctaataagacgctctcaattattgacagtggtattggcatgaccaaagcagatttggtgaacaacttgggaaccattgcgaggtctggaacaaaagagtttatggaggcgcttcaagctggagctgatgtaagcatgataggacaatttggtgttggtttctactctgcttatcttgttgcagagaaggttgttgtcactacaaagcacaatgatgatgaacaatacgtttgggagtctcaagctggtggttccttcactgtcactagggatgtggatggggaaccacttggtagaggaactaagatcagcctcttccttaaggacgatcagcttgaatacttggaggagaggagactcaaagacttggtgaagaagcactctgagttcatcagttaccctatctacctttggaccgagaaaaccaccgagaaggagatcagtgacgatgaggatgaagatgaaccaaagaaagaaaacgaaggtgaggttgaagaagttgatgaggagaaggagaaagatggtaaaaagaagaagaaaatcaaggaagtctctcacgagtgggaactcatcaacaagcagaaaccgatctggttgaggaagccagaagagatcactaaggaagagtatgctgctttctacaagagcttgaccaatgactgggaagatcacttagccgtgaaacacttctcagtggagggtcagctagaattcaaggccattctctttgtaccaaagagagctccgtttgatctctttgacacgaggaagaagttgaacaacatcaagctttatgtcaggagggtgttcattatggacaactgtgaagagctaatcccagagtacctcagctttgtgaaaggtgttgttgactctgatgacttgccactcaacatctctcgtgagacgcttcaacagaacaagatccttaaggtgatcaggaagaatctagtgaagaagtgcattgagatgttcaacgagattgctgagaacaaagaggactacaccaaattctatgaggctttctccaagaatctcaaattgggtatccatgaagacagtcagaacaggggaaagattgctgatcttctacggtaccactccacaaagagtggtgatgaaatgacgagcttcaaagattacgtcacaaggatgaaggaaggtcaaaaggacattttctacatcactggtgaaagcaaaaaggcggtggagaattctcccttcttggagaggctgaagaagagaggatacgaggtactttacatggtggatgcgattgacgaatacgctgttggacaattgaaggagtatgacggtaagaaacttgtttctgcgactaaagaaggcctcaaacttgaagatgagaccgaagaagagaagaaaaagagggaagagaagaagaagtccttcgagaatctgtgcaagacgattaaggaaattctcggggacaaggttgagaaggttgtggtctcagacaggattgtggactctccctgctgtctagtaactggtgaatatggatggactgcaaatatggagaggattatgaaggcacaggcgttgagagatagcagcatgagtggttacatgtcgagcaagaaaacaatggagatcaaccccgacaacggtataatggaggagctcaggaagagagctgaagcagacaagaatgacaagtctgttaaagatcttgtcatgttgctgtatgagacagctttgttgacgtctggattcagtcttgatgaaccgaacacttttgctgctaggattcacaggatgttgaagttgggtctgagtattgatgaggatgagaacgttgaggaagatggtgatatgcctgagttggaggaggacgctgctgaagagagcaagatggaggaagtcgactaagagatgaagaaattgctcttatggttctgaaaacttctaatatgtcgagttgttctgagttttaagattttccaaaatgtctgtcttttttttttatctttagagttacttgaacattgtgactacttctagggttgggtttgtgtcaggtctgttatatcgtgtggtgggtctgtctaatactgattcgagtttttgttatt

SEQ ID NO: 116445 - DNA, 925 bp, Arabidopsis thaliana
  unsure (1)..(925): unsure at all n locations
nnnnnnnnnnnnnnnnnnnnnnnnnnnnnnnnnnnnnnnnnnnnnnnnnnnnnnnnnnnnnnnnnnnnnnnnnnnnccacgcgtccgtacggctgcgagaagacgacagaaggggacggagcaaaaacaagagaagcgtttggattcgacgtttgccttatccgttcagctcatcttcttcttcttcttcgtcacctctgaattagtttcccagaatccgaaattcctaggaagagaacataacaatggcgcagatggttgcgatgcccgtagcgcactcgctctcactcatttgcaattgggcaaaatccaatcctctctctcgcaacactcttgccctcccagcttcaaacactcccaataagcagagtctaagcatcagatgtgctcgtgttggtggagtggagattccggctaataagagaattgagtactctcttcagtacattcatgggattggtcgaactagggctcgtcagattcttgttgatcttcagatggagaacaagattactaaagacatggctgaggaagaactcatcattcttcgtgatgaagtctccaagtacatgattgagggtgatctgaggaggttcaatgctcttgcaatcaagaggttgaaggagatcccatgttaccgtggggtaaggcacatccaaggctgccatgtcggggacagagaaccaagacaactgcagactcttaaggcaagaaattgcattgcagggaaaaaaagttccacgaataatttatgactccttcttctttggataccttttaggtgggctagctctttgttaaaagggtttggatctcaaaccttgtcggactgacccctccagttatttcggctttacctttaaaaaaaaaaaaaaaaaaaaagggccctttaggtccaacttctccggctcggtcatattttttg

SEQ ID NO: 116446 - DNA, 1039 bp, Arabidopsis thaliana
accacgcgtccgcggacgcgtgggcgaacaagagaagcgtttggattcgacgtttgccttatccgttcagctcatcttcttcttcttcttcgtcacctctgaattagtttcccagaatccgaaattcctaggaagagaacataacaatggcgcagatggttgcgatgcccgtagcgcactcgctctcactcatttgcaattgggcaaaatccaatcctctctctcgcaacactcttgccctcccagcttcaaacactcccaatgtaatcatttctcttggactctctcttgcgtatgatgttgtaatttatcgagcttgacttcatgtttttttatgtgttacttcattcttgttcgtcaatttttgggttaggggtggttatagaacactccatcaatttttgggggaatttgtctctgtgtttttaaagttttttttttttttgtaatgaaatgcagaagcagagtctaagcatcagatgtgctcgtgttggtggagtggagattccggctaataagagaattgagtactctcttcagtacattcatgggattggtcgaactagggctcgtcagattcttgttgatcttcagatggagaacaagattactaaagacatggctgaggaagaactcatcattcttcgtgatgaagtctccaagtacatgattgagggtgatctgaggaggttcaatgctcttgcaatcaagaggttgaaggagatccagtgttaccgtggggtaaggcacatccaagggctgccatgtcggggccagagaaccaagaacaactgcaggactcttaaaggcaagaaaattgctattgcagggaagaagaaagtttccaagtgaaaattgctattgcagggaagaagaaagtttccaagtaatcatcttcatgatctccttcttcttctgtaatactctttttagtttgtctagtcatctctgtttaaatgtgattgtaattcccaaacctttgttcgaactgagccctttccagtttttcttcggctttttagctattattattccgtat

SEQ ID NO: 116447 - DNA, 938 bp, Arabidopsis thaliana
  unsure (1)..(938): unsure at all n locations
ttttaggtccactatagaagagctatgacgtcgcatgcacgcgtacgtaagctcgaaaacaagagaagcgtttggattcgacgtttgccttatccgttcagctcatcttcttcttcttcttcgtcacctctgaattagtttcccagaatccgaaattcctaggaagagaacataacaatggcgcagatggttgcgatgcccgtagcgcactcgctctcactcatttgcaattgggcaaaatccaatcctctctctcgcaacactcttgccctcccagcttcaaacactcccaataagcagagtctaagcatcagatgtgctcgtgttggtggagtggagattccggctaataagagaattgagtactctcttcagtacattcatgggattggtcgaactagggctcgtcagattcttgttgatcttcagatggagaacaagattactaaagacatggctgaggaagaactcatcattcttcgtgatgaagtctccaagtacatgattgagggtgatctgaggaggttcaatgctcttgcaatcaagaggttgaaggagatccagtgttaccgtggggtaaggcacatccaagggctgccatgtcggggacagagaaccaagaacaactgcaggactcttaaaggcaagaaaattgctattgcagggaagaagaaagtttccaagtaatcatcttcatgatctccttcttcttctgtaatactctttttagtttgtctagtcatctctgtttaaatgtgatttgtaattcccaaacctttgttcgaactgagccctttccagtttatcttcggctttttagctattaaaaaaaaaaaaaggaaaaaaaaaaccaaagcggccgctctagaggatccaagcttacgtacgcgtgcatgcgacgtcatagtaatctantagtgtcagtctaaattnnnnng

SEQ ID NO: 116448 - DNA, 1765 bp, Arabidopsis thaliana
ctctccagagaagttcttaatttctcctgccaagctgattaagagctctaggaaatggccgaacaacaactaggagtgctaaaggcactcgatgttgcgaagacgcaactttatcatttcacggcgattgtcatcgccggtatgggtttctttaccgatgcctacgatcttttttgcgtgtccttggtgacgaaactccttggccgcatctactatttcaatccggagtcagcgaagcctggctcacttccccctcatgttgcggccgcggtcaacggtgtggccctttgtggaaccctttctggtcaactcttcttcggttggctcggtgacaaactcggacggaaaaaagtgtacggtctcactttggtaatgatgatcttgtgctctgtcgcttctggtctctcttttggccacgaagccaagggtgtcatgaccaccctttgcttcttcaggttttggttgggatttggtattggaggtgactacccactttctgccaccatcatgtctgaatacgcaaacaagaagacccgtggggctttcatcgcagctgtcttcgccatgcaaggtgtcggtatcttggctggaggtttcgtggcactcgcagtatcttctatattcgacaaaaagttcccagctccaacatatgcagtaaacagggccctctcaacgcctcctcaagttgactacatttggcgaatcatcgtcatgtttggtgctttacccgcagctttgacttactactggcgtatgaagatgcctgaaactgcccgttacaccgctttggttgccaagaacatcaaacaagccacagccgacatgtccaaggtcttacaaacagatatcgagcttgaggaaagggtggaggatgacgtcaaagaccccaaacaaaactatggcttgttctccaaggaattccttagacgccatgggcttcatctccttggaactacctccacatggtttttgcttgacattgccttctacagccaaaacttgttccagaaggatattttctcggccatcggatggatcccaaaggcagccaccatgaacgccacccatgaggttttcaggattgctagggctcagactcttatcgccctttgcagtacagtcccaggctactggttcacagttgcgtttattgataccattggaaggtttaagatccaactaaatggatttttcatgatgaccgtgtttatgtttgccattgccttcccttacaaccactggatcaaaccagaaaaccgtatcggatttgtggttatgtactctcttactttcttcttcgccaattttggtccaaatgcaaccacttttattgtccctgctgagatattcccggccaggctaaggtctacatgtcatggaatatcagccgcggctggtaaggctggagccattgttggagcctttgggttcctatatgcggctcaatcacaagacaaggccaaggtagacgcaggatacccaccaggcatcggagttaagaactcattgatcatgcttggtgttcttaactttatcggtatgctcttcaccttccttgtcccagagcccaaaggcaagtcccttgaagaactctctggtgaggctgaggttagccatgacgagaaataattatgtatgtttattttgttatttggagtgcgatgtttggttttgttttcattttattggctcgttgaccttaagttatgatgttataagaatatttatgatatcatttaaatctaaaaaaaaaaaaaaaaatccg

SEQ ID NO: 116449 - DNA, 2020 bp, Arabidopsis thaliana
  unsure (1)..(2020): unsure at all n locations
nnnnnnnnnnnnnnnnnnatacgactcactttagggaaagcacgtacgccctgcaggtaccggtccggaattcccgggtcgacccacgcgtccgctctcattgcttcatcattaccaaatcatcaacttaatcgtttctctcaaatttagggttttctcttttctcgaaagtcttgcggttttctgaatcatctctatctggtttgagggtttcgtttgatatctggagaaaggggtttctggaaacaaggagttcataattcgcgatcttgatctatcgatcttcatttatatataaaagcgtgaatgagattatgatggagtcgaaaggtggtaaaaagaagtccagcagtagtagttccttattttacgaagctcccctcggttacagcattgaagacgttcgtccaaacggtggaatcaagaaattcaaatcttctgtctactcaaactgctccaagaggccatcctgagtaccagcgtgcaccgatcttcataatatagttatagctttctttactttccagtttataattttcttctttcaaagctccttttctgctggttcccggatccaatcgttctctcctcctactacaagtcctgtcgctcacacaacaaggcgagatggccttatctgcaatcggtttcgaaggttacgagaaacggctcgaggtgactttctttgagccaagcatctttcaagactccaagggactgggactccgtgctctgaccaagtcccagcttgatgaaattcttacacctgctgcatgcacgatcgtttcatctctctccaacgatcaattggactcttacgtactctctgagtccagcttctttgtctacccctacaaagtcatcatcaagacttgcggtaccactaagctcctcctctctatcccaccacttctaaagctggctggtgagctctctctgagtgtcaagtctgtgaagtacactcgcggctccttcctctgccccggaggccagccttttcctcaccgcagcttctctgaagaagtctctgttcttgatgggcactttactcagctgggcttgaacagcgtagcctacttgatgggcaatgatgatgagactaagaaatggcatgtctatgctgcctctgcccaggactccagcaactgcaacaacaatgtctacactctcgagatgtgcatgactggtctggacagagagaaagctgctgtcttctacaaggatgaagctgacaagactgggtcaatgactgataactctggaatcagaaagatccttcccaagtctgagatctgcgactttgaattcgagccctgcggctactctatgaactcaattgaaggggatgcaatctccacgatccatgtgacccctgaagatgggtttagctacgctagcttcgaagctgtgggttacgacttcaacacccttgaccttagccagctggtgacaagggttctctcttgcttcgagcccaagcaattctctgtagctgtgcactcgagcgttggagcgaactcatacaagccagagattactgtagacttggaagactatgggtgcagagagaggacatttgagtctctaggagaagagagtggaacagtgatgtatcagacgtttgagaagcttggtaagtactgtggatcgcctagatctaccttgaagtgtgaatggagcagcaacaatagctgcagcagcgaggacgagaaggacgagggaatctagcagaatttttcttcctaataactattttcgagctttctgtttttgttctttctttttaaaaaacttattaagttcttatgaataatgacttgtgaagtttgagttcgtctccttcacaagcaagttgtattggtgttttctactttatgaatatgggttttatataccaaaaaaaaaaaaaaaaaaaaaagggcggccgctctagaggatccaagcttacgtacgcgtgcatgcgacgtcatagctcatctatagttcgcctcaannnnnnnnnnnnnnnnnnnnnnnnnnn

SEQ ID NO: 116450 - DNA, 1089 bp, Arabidopsis thaliana
agcgctacacgactcactatatggaaagctggtacgcctgcaggtaccggtccggaattcccgggtcgacccacgcgtccggccccggaggccagccttttcctcaccgcagcttctctgaagaagtctctgttcttgatgggcactttactcagctgggcttgaacagcgtagcctacttgatgggcaatgatgatgagactaagaaatggcatgtctatgctgcctctgcccaggactccagcaactgcaacaacaatgtctacactctcgagatgtgcatgactggcctggacagagagaaagctgctgtcttctacaaggatgaagctgacaagactgggtcaatgactgataactctggaatcagaaagatccttcccaagtctgagatctgcgactctgaattcgagccctgcggctactctatgaactcaattgaaggggatgcaatctccacgatccatgtgacccctgaagatgggtttagctacgctagcttcgaagctgtgggttacgacttcaacacccttgaccttagccaggtggtgacaagggttctctcttgcttcgagcccaagcaattctctgtaactgtgcactcgagcgttgtagtgcattcatacaagccagagattactgtagccttggaaacctatgggtgcagagagaggacatttgagtctctaggagaagagagtggaacagtgatgtatcagacgtttcagaagcttggtaagtcctgtggatcgcctagatctacctccaagtgtgaatggagcagcaacaatagctgcagcagcgaggacgagaaggacgagggatatctagcagaatttttcttcctaataactattttcgagctttctgtttttgttctttctttttaaaaaacttattaggttcttatgaataatcacttgtgaagtttgagttcgtctccttcacaagcaagttgtattggtgttttctactttatcaatatgggttttatatgcctaaagccttgttatgttattattcttaaaaaaaaaagcaaagggcggccgctctagaggatccaagcttacgtacgcggacatccacgtg

SEQ ID NO: 116451 - DNA, 813 bp, Arabidopsis thaliana
  unsure (1)..(813): unsure at all n locations
tttaatttccgggtcgccccacgcgtccgtatcttttcgttaattgttgttgttatcttcaacgatagcgttgtgctctggagaagtgtttgatcgcagaaaagcttcgttctttgtagtctacaggcgtggaaggaatggcaaaaagctcgttcaagcaagagcatgacttagagaagagaagggcagaggctgctaggattagagagaagtatcctgataggattccggtgattgttgagaaggctgagaagagtgatataccaaccatcgacaagaaaaagtacctagtcccggctgatctgactgtggggcagtttgtgtatgtcattcgcaaaagaatcaaattgagtgcagaaaaggctatcttcatattcgtggacaatgttcttcctccagcaggtgcgctcatgtcttctgtgtacgaagagaaaaaggatgatgatgggttcctctatgtcacttacagcggagaaaacacatttggatttggatctccataatagagacctcttgctggatatttcattttactcctctctattttcaccaaatatttcatcttcttattaattactaagcaagcaagccacctatgtacttattctctaaggacctttggtcgggcgttaatatgtacagaaaacataaaataatgtatataatcttctttcaaggaaaaaaaaaaaaaaaaaaaaaaaaaaagggaggatcnnnnnnnnnnnnnnnnnnnnnnnnnnnnnnnnnnnnnnnnnnnnnnnnnnnnnnnnnnnnnnnnnnnnnnnnnnnnnnnnnnnnnnnnnnnnagatcat

SEQ ID NO: 116452 - DNA, 683 bp, Arabidopsis thaliana
  unsure (1)..(683): unsure at all n locations
gccggaccaaagcctccnatntgnaccccgctttgatcgcccctgcggactactcgatgccctcaattgaaggggatgcaatctccacgacccatgtgccccctgaagatgggttttcgctacgctaccttcgaagctgtgggttccggcttcaccccccttgcccttagccacctggtgccaagggttctctcttgcttcgagcccaagcaattctctgtagctgtgcactcgagcgttggagcgaactcatacaagcccagagattactgtagacttggaagactatgggtgcagagagaggacatttgagtctctaggagaagagagtggaacagtgatgtatcagacgtttgagaagcttggtaagtactgtggatcgcctagatctaccttgaagtgtgcaatggagcagcaacaatagctgcagcagcgaggacgagaaggacgagggaatctagcagaatttttcctcctaataaccaattttcgagccttcctggttttggccttcctttttaaaaaaccttattaaggtcttatgcaataatgccttgtgaagtttgaggccggcccctcacaaangggggccgggaatncctgancccggggngccccaagcctanaangggcnccnccccgggggggcccancnttttncccccnangnaggggaaatttna

SEQ ID NO: 116453 - DNA, 651 bp, Arabidopsis thaliana
  unsure (1)..(651): unsure at all n locations
taggagcacactatagaagagttatgacgtcgcatgcacgcgtacgtaagctcggaattcggctcgaggcgttgtgctctggagaagtgtttgatcgcagaaaagcttcgttctttgtagtctacaggcgtggaaggaatggcaaaaagctcgttcaagcaagagcatgacttagagaagagaagggcagaggctgctaggattagagagaagtatcctgataggattccggtgattgttgagaaggctgagaagagtgatataccaaccatcgacaagaaaaagtacctagtcccggctgatctgactgtggggcagtttgtgtatgtcattcgcaaaagaatcaaattgagtgcagaaaaggctatcttcatattcgtggacaatgttcttcctccagcaggtgcgctcatgtcttctgtgtacgcaagaggaaaaaggatgatgatgggttcctctatgtcacttacagcggagaaacccatttggatttggtccccntaatagnggccctttnctggntattccatttacccccctcaattttccccaatnttcanctnctattaattccttggagaagncccctttgccttttcntnaggcctttgcggggtaantgtcngacntaatatgttnacnncttaaaat

SEQ ID NO: 116454 - DNA, 627 bp, Arabidopsis thaliana
  unsure (1)..(627): unsure at all n locations
acttatataaaggcactctttctacctttctttttttcctaacaacccattttattggttcagcattaccaaatcatcaacttaatcgtttctctcaaatttagggttttctcttttctcgaaagtcttgcggttttctgaatcatctctatctggtttgagggtttcgtttgatatctggagaaaggggtttctggaaacaaggagttcataattcgcgatcttgatctatcgatcttcatttatatataaaagcgtgaatgagattatgatggagtcgaaaggtggtaaaaagaagtccagcagtagtagttccttattttacgaagctcccctcggttacagcattgaagacgttcgtccaaacggtggaatcaagaaattcaaatcttctgtctactcaaactgctccaagaggccatcctgagtaccagcgtgcacccgatcttcataatataggttatagctttcctttactttcccaggtttaaattttcttctttcaaaaggccccttttctgcctggttcccggacccaatcggtcttttcccccactaaaagccctttgggtacaaaaaagggggggtgtggcctttattcaaatgggtttgaggnncgggaacggc

SEQ ID NO: 116455 - DNA, 684 bp, Arabidopsis thaliana
  unsure (1)..(684): unsure at all n locations
cnnnnnnnnnnnnnnnnnnnnnnnnnnnnnnnnnnnnnnnnnnnnnnnnnnnnnnnnnnnnnnnnnnnnnnnccacgcgtccgcggacgcgtgggcaagactccaagggactgggactccgtgctctgaccaagtcccagcttgatgaaattcttacacctgctgcatgcacgatcgtttcatctctctccaacgatcaattggactcttacgtactctctgagtccagcttctttgtctacccctacaaagtcatcatcaagacttgcggtaccactaagctcctcctctctatcccaccacttctaaagctggctggtgagctctctctgagtgtcaagtctgtgaagtacactcgcggctccttcctctgccccggaggccagccttttcctcaccgcagcttctctgaagaagtctctgttcttgatgggcactttactcagctgggcttgaacagcgtagcctacttgaatgggcaatgatgatgagactaagaaatggcatgtctatgctgccctctgccccagggactccagcaactgcaaacaaccaaatggnctacantcttcgagaattgtgcaattaatttggtcctggccaanaggggaaaggnttgnctgtntnnttnaaagggtttnaaggtttncaaaggncttgggggcaaatngcctgataaacttt

SEQ ID NO: 116456 - DNA, 459 bp, Arabidopsis thaliana
  unsure (1)..(459): unsure at all n locations
tatttttccgttaattgttgttgttatcttcaacgatagcgttgtgctctggagaagtgtttgatcgcagaaaagcttcgttctttgtagtctacaggtttgatcactgagttcttaactncttttttggtttgattgcgatcctgtactttcgtttagattacttaaaggttgggtctttaacatgatcgactgatagatttgtgggaattttgataatctgagttccagagtttgggaattgatgatttgatttgagtgttaaatttgttttgatggttgtctgattggtgtcacccatttgtaatgtgtgtgtaggcgtggaaaggaattgcaaaaaagctccgtttcaagcaagagcatgacctttgggaaggagaaggggcagaggcttctaggnttngaggggaagtatcccnataaggatncccggtgattttntnnnaaggcttagaaggg

SEQ ID NO: 116457 - DNA, 1357 bp, Arabidopsis thaliana
  unsure (1)..(1357): unsure at all n locations
taatcgactcactatagggaaagccggtacgcctgcaggtaccggtccggaattcccgggtcgacccacgcgtccgattgagtgaaaatatttttttttaaatggttgtggtgaacaaaacgaatctcttattgcttcttctctctctatgtctcaccctcgacctctcctccgcacaactccgccgtaacttctacgccggaagttgtcctaacgtcgaacaaatcgttagaaacgccgtacagaaaaaagtccaacaaactttcaccaccattcccgccactctacgcctctatttccatgattgtttcgtcaatgggtgtgatgcatcagtgatgatagcgtcaacaaataataataaggcggagaaggatcatgaggaaaatttatcgttggccggagatggattcgacaccgtcattaaagctaaagaagctctcgatgccgtcccaaattgtcgtaacaaagtttcatgcgctgatattctcacgatggccactcgtgacgtcgttaatcttgcgggtggaccacaatacgacgtggaattgggaaggctagatggactatcatcaacagcggctagcgtcggagggaagttgccgcatccgaccgacgatgtcaataaactcacttcactcttcgccaaaaacggccttagccttaacgacatgatcgctctctccggggcacacacattaggattcgcgcattgcacaaaagtgttcaatcggatatacactttcaacaagacaactaaagtggatcccacggttaacaaagattacgtgacagagctaaaagcgtcgtgtcctcgaaacatagatccaagagtggctattaacatggacccaacaacaccaagacaattcgacaacgtttactacaaaaacttgcaacaagggaaaggattgttcacgtcggatcaagtcttattcacggatcgtcggtcaaagccaaccgttgacttatgggctaataatggacagttgtttaatcaagcttttattaactcgatgatcaagcttggtcgtgttggtgttaaaactggtagtaatggtaatatccgtcgtgattgtggagcttttaattgatttaaatatatctgtattagattttgtttattgtatttgggtataggatgggtcatgggtctcataaagctggttcagctaaattgaaaattgtaataaatctctgtcttgggtttcagtttgcaaaacctaaactgtaattatagagtggaggaaataagaagtatcgtatattatttatcaaaaaaagggcggccgctctagaggatccaagcttacgtacgcgtgcatgcgacgtcaagactcttctatagtgtcnnnnnnnn

SEQ ID NO: 116458 - DNA, 706 bp, Arabidopsis thaliana
  unsure (1)..(706): unsure at all n locations
tgcgggtcccgtttcggatttccgggttcgaccccccgtccgggtaattgggggtgatgcttcagggatgatagcgtcaccaaataatattaaggcggagaaggatcatgaggaaaatttatcgttggccggagatggattcgacaccgtcattaaagctaaagaagctctcgatgccgtcccaaattgtcgtaacaaagtttcatgcgctgatattctctcgatggccactcgtgacgtcgttaatcttgttagtaactcaagcttatttattctattaaattaaaacattagtataagttattacattaaattcaatataggcgggtggaccacaatacgacgtggaattgggaaggctagatggactatcatcaacagcggctagcgtccggagggaagttgccgcatccgaccgacgatgtcaataaactcacttcaactctttcgccaaaaacgggccttagccttaaccggcatgatcgctctcttccggggcacacaccatttgagggtttgcgtatttnaccaaaaggtgttcaatncgggtattcacttttnaccaaggcaacttaaggtgggncccccgggtnaccaaaggtttcggngcaannnctnaaangggnngtgcccttgaacaatggcccnngggtgggttttccattggcccacaacncctgggaatttgcaccggttttaaaacntt

SEQ ID NO: 116459 - DNA, 1633 bp, Arabidopsis thaliana
atcaatatcgatacccccaaaaaaaaaaaaaaacagctacaaagaagtgagaattgacacagcaaatgggtcttccgggaaaaaataaaggtgcagttttgtcgaagatagcgactaacaatcaacacggagagaactcagagtactttgatggatggaaagcttacgacaaagatccttttcatctttcccgtaacccccatgggatcatccaaatgggtcttgcagagaatcagctttgcttagatttgatcaaagattgggtcaaagagaacccagaagcttctatttgcacccttgaaggtattcatcagtttagcgacatcgctaatttccaagactaccatggtcttaagaagtttagacaggcaattgcacatttcatgggaaaagctagaggtggaagagtgacttttgatccggagagggtggttatgagcggaggagccaccggagccaatgaaacaatcatgttctgccttgcggatcccggcgacgttttcctcattccctccccgtactatgccgcatttgatagagacttgaggtggcggacaggtgtcgagataatcccggttccttgttcaagctccgacaatttcaaattaaccgttgacgccgcggaatgggcttataaaaaagcccaagagtccaataaaaaagtcaaaggtctgattttgaccaacccatcaaatccactcggtacaatgttggataaggacacactcacgaacttggtccggtttgtcacgaggaagaacattcacctagtcgtcgacgagatctacgccgccacagtcttcgccggaggagatttcgtgagcgttgctgaggtggtcaatgatgtggacatctccgaagtcaacgttgacttgattcacattgtctatagtctttctaaagatatgggacttcctggttttagagtcgggatagtctattctttcaatgactcggtcgtgtcttgcgcaagaaaaatgtcaagtttcggacttgtttcgtctcagacacaactcatgcttgcttcgatgttgtccgatgatcagtttgtggataattttctaatggaaagctcgagaaggttggggataaggcataaagtttttaccacggggatcaagaaagcagatattgcttgtttgacaagcaacgctggtttatttgcgtggatggatttgagacatctactgagagatcgtaactcgtttgaatctgagatcgagctttggcatataatcatcgatagagttaagctcaatgtgtctcctggctcttccttccgttgcacggaacctggatggtttaggatttgctttgccaacatggacgatgatactctccatgtggcgcttggacggatccaagatttcgtgtctaagaacaagaacaagatcgtcgagaaagcatctgaaaatgatcaggtaatccagaacaagagtgctaaaaagctgaaatggacgcagaccaatcttcgactaagtttccgacgactttacgaggatggtctctcgtctccagggataatgtcaccacactcacctcttctccgagcatgaaaatcttaaggcataacagttgagagattggattaactcgttcgcgtttcactccgggtgaaataatcttaaattag

SEQ ID NO: 116460 - DNA, 488 bp, Arabidopsis thaliana
cccaagcgtccgctccgccctctctccccatctctttcgacagatctcttctctctctcgtgtttcacgaaacaatggcgactcaattcagcgcttctgtctcattgcaaacttcttgtctggcaacaacaaggattagtttccaaaagccagctttgatttccaaccatggaaagactaatctatccttcaacctccgccgttcaatcccatctcgccgcctctctgtttcttgcgcggcaaaacaagagacgatagagaaagtgtctgctatagttaagaagcaactatcacttacaccggataaaaaagtcgttgcagaaaccaaatttgctgaccttggagcagattctctcgacacggttgagatagtaatgggtttagaggaagagtttaacatccaaatggccgaagagaaagcacagaagattgccacagttgagcaagctgctgaactcattgaagagctcatcaacgagaagaagtaa

SEQ ID NO: 116461 - DNA, 2200 bp, Arabidopsis thaliana
atctaacggtcctacagtccccgagtgtatagaatagtgcgttacacttgattccttctagtgtgaccctatttctggagccaataaaaggctcgtgtcaaaactcgcctcttccccacaaagagaattctctcatttcttcttcttcgctcagctccgacaacgaagggcgaagaatctcgctccctcaatttcgcattgccatcgattttcttaggtaattctggttactctgagatctctatcgctttaaatctcgttgtttatctctgttcttcatttgattctattgatctgcttcacagtcttatatatcatcaacaaggtaaaatgattcgtttcgtcttgatgatctcatggtttctctgcgtaatcctagattgaatgtagtgtagatctcgtgtggagtgtgaatgtatcgagatcctggattattcggctctgttactcttattttccgccattaagttacactgttgtatggatctgtttaacctaaattttctgcgtctgaatgtgttcatggtttagtttctgattgcatcgtttctacatgtagcctctcttatgcttaatggtggataagtgttctattccactggagatgcacaattgcttttactgcactttatagcatattccatttcttacactacgggttgtttaattttgtagaggttaaaatggttgaacagactcagcaccccacgattcttcagaaggtttctggccaactcttgagctcgagtgtttctcaggacattcgtggttatgcttcggcttccaaaaggcctgctacataccagaaacatgcagcttacggaaactactccaatgctgcatttcaatatcctcttgtggctgcatctcagattgcaactactacttctcctgtgtttgtccaagctccaggagagaagggatttactaactttgctattgatttcatgatgggtggtgtttctgctgctgtgtcaaagactgctgctgctcccattgagcgtgtcaagcttttgattcaaaaccaggatgagatgcttaaggctggaaggcttactgagccatacaagggtattcgtgactgtttcggcaggacaattagggatgaaggtattggttcgttgtggagaggaaacaccgctaatgttatccgttacttccccactcaggttggtttagtttcacttctttcggccttttttaaaatgtcttagttatatatgatgtattggttactgatctatctctcacttgctaggccttgaactttgcattcaaagattacttcaagaggcttttcaacttcaagaaagacaaggatggctactggaagtggtttgctggtaacttggcatctggaggtgctgctggtgcctcttcccttctctttgtgtactctcttgactatgcacgtacccgtcttgccaatgactccaagtctgccaagaaggggagaggcgaaaggcagttcaatggtcttgttgatgtctacaagaagaccctcaagtcagatggtattgctggactttaccgtggtttcaacatctcgtgtgctggtatcattgtctaccgtggtctctactttggactgtacgactctgtgaagcctgtcctcctcactggagacctgcaggtttgtttgagctctattcttatatatctgtaaggtgacagcttaagaaatcagggatcctgattctaatgttgttatttctttccttgctggatatttcaggacagtttcttcgctagttttgctcttggatggctcatcaccaatggtgcgggccttgcgtcgtacccgattgacacggttagaagaagaatgatgatgacatcaggtgaagcggtgaagtacaagagctcatttgatgcgttctcacagatcgtgaagaaggaaggagccaagtctctgttcaagggtgcgggtgccaacatcctgcgtgccgttgcaggtgctggtgtgcttgctggctacgacaagctgcagttaatcgtcttcggcaagaagtatggatctggaggtgcctaagtaccaccaaatcccgcagtcattaagcttcgccttttgtttttttctccattttttttgcagtttcagatttcttttataaaaaagatgttgatgaaatcatttccccataaaattagagaggagcaaggggaaatattatctgttcgacgataatggttttgttat

SEQ ID NO: 116462 - DNA, 1319 bp, Arabidopsis thaliana
ttaggagcactatagaagagctatgacgtcgcatgcacgcgtacgtaagctcggaattcggctcgagctcatttcttcttcttcgctcagctccgacaacgaagggcgaagaatctcgctccctcaatttcgcattgccatcgattttcttagaggttaaaatggttgaacagactcagcaccccacgattcttcagaaggtttctggccaactcttgagctcgagtgtttctcaggacattcgtggttatgcttcggcttccaaaaggcctgctacataccagaaacatgcagcttacggaaactactccaatgctgcatttcaatatcctcttgtggctgcatctcagattgcaactactacttctcctgtgtttgtccaagctccaggagagaagggatttactaactttgctattgatttcatgatgggtggtgtttctgctgctgtgtcaaagactgctgctgctcccattgagcgtgtcaagcttttgattcaaaaccaggatgagatgcttaaggctggaaggcttactgagccatacaagggtattcgtgactgtttcggcaggacaattagggatgaaggtattggttcgttgtggagaggaaacaccgctaatgttatccgttacttccccactcaggccttgaactttgcattcaaagattacttcaagaggcttttcaacttcaagaaagacaaggatggctactggaagtggtttgctggtaacttggcatctggaggtgctgctggtgcctcttcccttctctttgtgtactctcttgactatgcacgtacccgtcttgccaatgactccaagtctgccaagaaggggagaggcgaaaggcagttcaatggtcttgttgatgtctacaagaagaccctcaagtcagatggtattgctggactttaccgtggtttcaacatctcgtgtgctggtatcattgtctaccgtggtctctactttggactgtacgactctgtgaagcctgtcctcctcactggagacctgcaggacagtttcttcgctagttttgctcttggatggctcatcaccaatggtgcgggccttgcgtcgtacccgattgacacggttagaagaagaatgatgatgacatcaggtgaagcggtgaagtacaagagctcatttgatgcgttctcacagatcgtgaagaaggaaggagccaagtctctgttcaagggtgcgggtgccaacatcctgcgtgccgttgcaggtgctggtgtgcttgctggctacgacaagctgcagttaatcgtcttcggcaagaagtatggatctggaggtgcctaa

SEQ ID NO: 116463 - DNA, 1170 bp, Arabidopsis thaliana
gagaagataagaaagcagcacgaacaccaactcttaaggaaaacatctaagttatggttaagtaattgcatgcaatttaaagctacgtgtccagcttaagacactcaagtctcacatctgtccctttttacttcgacttcgcttcttttggcttcttttaaactctctctatctctctctttcttcttcacactttgttgttaatttcaagtgtttgatcataatggcaacatcagctcgtagagcatacggtttcggtagagccgatgaggctacacaccctgactccattagagcaactttagctgagtttctctccacttttgtcttcgtctttgcagctgaaggctctatcctctctctcgataagttgtattgggaacatgcggctcatgcggggacaaacacaccaggagggctgattttagtagcgttggctcatgcgtttgctctgtttgctgctgtttcagcagccattaatgtctccggcggacacgttaacccggcagtcacttttggtgctcttgttggaggcagagttacagcgatccgcgccatctactactggatcgctcagcttcttggagccatcctcgcttgtctcttgttaaggctcacaacaaacggcatgagaccagttggtttccgtctagcatcaggtgttggagcggttaatggacttgtattagagatcattttaacatttggcttagtctacgtagtgtattccactttgattgatccaaaacgtggaagcctcgggatcatagcaccgcttgcaatcggactcatagttggggcaaacatcttagtaggtggaccattttctggtgcttcgatgaatccagctagagcttttggtccagcgttggtgggatggagatggcatgaccactggatctattgggtcggaccattcatcggtagtgctttagccgcccttatatatgagtacatggtcatacccaccgaaccacctacccaccacgcacatggtgtacaccagcccttggcccctgaagattactagatggaactttcctcatgtcaccactgcttttgttcgttgttcaagctctctttgtctgtatgatgagatcacttgcatagatactttttttcttatgctactcttatgttgtaataataaaaaataaagaacgatttcgc

SEQ ID NO: 116464 - DNA, 471 bp, Arabidopsis thaliana
ccggcggacccggcccggaattccggggccgcccacacccgtccggtaaagaagaccaagggtttcctttatgcttttttccgttactatggtggcttttccggttggggcgcgattatggacgttcctttaagggggcgtaaaaacctccgttgctttccaagccacccgaagggttaacaccgccattacttcaataacaggcaacgggggagggagttaactgcttgcagggggggcctccgatgggaaagaaaaagtttgggacttttttttaccttcctgaccttaccgattccgaattggttaaggaggtggtcatacctaatccgaaacaggtggtttccttggttataatccaattgggaccacggtatttttgttccttaggcacgttacctaacccgtttcctataatggacggatctggccaatgtggaaccttcctttgttcggttgaaccgactccgt

SEQ ID NO: 116465 - DNA, 792 bp, Arabidopsis thaliana
cagctctattcgactcactctatggaaagctggtacgcctgcaggtaccggtccggaattcccgggtcgacccacgcgtccgtgcggctgcgagaagacgacagaagggtactgttgcgataagacgacagaagggtgcggctgcgagaagacgacagatgggttcggctgcgagaagaccacagaggggggaacgacgacgggacaaaagcttcaccggagatcaaagacgcgagggtggtgaacattccaaagacttagaactcttactgtaagaacaaggaatgcgataagccttctttgcacaaggttacccaatacaagaagggtaaagacagtcttgctgctcaaggaaacgcgtcgttatgaccgtaaacaatctggtaagggtggtcagactaagcctgtcttccacaaaaaggctaagaccacgaagaagattgttttgaggcttcagtgtcaaagctgcaagcacttttcgcagcgtcctatcaagaggtgcaagcatttcgagatcggtggtgacaagaagggaaagggaacatctctgttttaagttggtttcatcttattttctgcgattttcgtacttgctggatttgggaatccattttgttttagctctctcgtataagattgtctcatctttgcttgattaactctatattttgaatcatcaagatatgggttttgctgttaaaaaaaaaaaaaaaaaaaaaaaaaaaaaagcggccgctctagaggatccaagcttacgtacgcgtgcatgcgacgtcatgatcttctataggt

SEQ ID NO: 116466 - DNA, 1041 bp, Arabidopsis thaliana
tacggctgcgagaagacgacagaagggtacggctgcgagaagacgacagaagggtacggctgcgagaagacgacagaagggtacggctgcgagaagacgacagaagggacaacaagaagtatgtaatggcttttctctatgctctcctcccgccgctgaggtgtagcgagtcgccggctcaggccaccatggtcgcttccattcaccgggttgaaagttcatccgcttcttttcccgggtcaccccgcaaagaccaaacaagggacattcacttttccattcgcaaggcaacggggggaggaggtaacctgcatgcagatgcaggtgtggccaccaaatcggaaaagaagaagttttgagactctcttcttaacctttcctgacccttaaccgatttccgaaattgggctaaggaaagtttgactaacctttatcccgcaacaaagtgggattcccttgtgtttgaaattcgaagtttggagcaacgggatttttttgtacccgtgaagcaacgggtaaacttaaccccgggttacttatgattggacggggtacctggacaattgtgggaaggtttcccctttgttccgggttgaaaccgacttccggtcaaggtgttgaaagggaagttgaaagaatgcaaagaagggagtaaccctggggggccttcaattaggggtcatcgggattccgacaacaccccgtcaaagtccaagtgcatcaagtttcatttgcctacaaagccaccaagctttcaccgggttaattttccctttttgctttttggtgtaaaccctcaaaaacttttatccccccatcttttgatttttatccccttggttttcttgcttttttccttcttttcttggggtttaaatttccggacttaaacggtttgttttcccggtttcgcgagacaatattctatcggattggtcaaatggtctgatttatgaaatatgtaatttatatatccgggcgtcttgattttttccgatggttaactagtttgaaaatttccgatgagataagacaacatac

SEQ ID NO: 116467 - DNA, 1192 bp, Arabidopsis thaliana
gctacgccggcactaatacgacttacttagggaacgctggtacgcctgcaggtaccggtccggaattcccgggtcgacccacgcgtccgagacaaccacaagaacacaaaacacacaaaaacaaagaggttctttctttgaagaagaaatggaaaaagttgatgtttatgatgagcttgttaacctaaaggcaacagagctgagattgggattaccagggacagaagaaactgtttcttgtggaaaaagcaacaaaagagttttacctgaagctactgagaaagagattgaatccactggaaaaactgaaaccgcttctcctccaaaggctcagattgttggatggccaccagttagatcttacagaaagaacaatgttcagacaaagaagagtgaatctgaaggtcaaggaaactatgtgaaagtaagtatggatggtgctccatatctaaggaagatagatctaacgatgtataaacaatatccagagttgatgaaatcacttgaaaacatgtttaaattctctgtgggagaatattttgagagagaaggatataaaggctcagactttgtacctacttatgaagacaaagatggtgattggatgcttgttggtgatgttccttgggagatgtttgtttcgtcttgtaagaggctaaggatcatgaaaggatctgaagttaaaggtttaggttgtggtggtctttaacaaacctaattgagagataaagatcaaagagaaagattccaaaccagagttttttgttctgtttcttgaaacagagtaaatatagctctgaaactgctcgggttcttggggagagatgtttcatacaatcatactttgtgaatgtttacctcatcggtaaaaagagagatgcttaaaatggtcttaagcataaaagtgtgagaaagatctaaatctaaactttagctgtaactctgtctccattaaagagaaaggttttgtggtattagaaagatctaatctgaagattatctttgtgtttttcactttttataatgttcttatcgaacaactttgatgtttttgatgtaattacccatttttctgttctgtttctcttcaaattaagatctgtctttacaaaaaaaaaaaaaaagggcggccgctatagaggatccaagcttacgtacgcgtgcatgggtcgtcatagctagtctatagtgt

SEQ ID NO: 116468 - DNA, 1743 bp, Arabidopsis thaliana
  unsure (1)..(1743): unsure at all n locations
nnnnncgactcactatatggaaagctggtacgcctgcaggtaccggtccggaattcccgggtcgacccacgcgtccgcacgcgtcgttctcgtcaccctatccttctctcttgcgatatctctgagatttgtctgacagtctctaaccatgggtaaagagaagtttcacatcaacattgtggtcattggccacgtcgattctggaaagtcgaccaccactggacacttgatctacaagttgggtggtattgacaagcgtgtcattgagaggttcgagaaggaggctgctgagatgaacaagaggtccttcaagtacgcatgggttttggacaaacttaaggctgagcgtgagcgtggtatcaccattgacattgctctctggaagttcgagaccaccaagtactactgcactgtcattgatgctcctggccatcgtgatttcatcaagaacatgatcactggtacctcccaggctgattgtgctgtccttatcattgactccaccactggtggttttgaggctggtatctccaaggatggtcagacccgtgagcacgctctacttgctttcacccttggtgtcaagcagatgatctgctgttgtaacaagatggatgccactacccccaagtactccaaggccaggtacgatgaaatcatcaaggaggtgtcttcctacttgaagaaggttggttacaaccccgacaaaatcccatttgtgcccatctctggatttgagggtgacaacatgattgagaggtccaccaaccttgactggtacaagggaccaactctccttgaggctcttgaccagatcaacgagcccaagaggccgtcagacaagccccttcgtctcccacttcaggatgtctacaagattggtggtattggaacggtgccagtgggacgtgttgagactggtatgatcaagcctggtatggttgtgacctttgctcccacaggattgaccactgaggtcaagtctgttgagatgcaccacgagtctcttcttgaggcacttccaggtgacaacgttgggttcaatgttaagaatgttgctgtcaaggatcttaagagagggtacgtcgcatccaactccaaggatgaccctgccaagggtgctgctaacttcacctcccaggtcatcatcatgaaccaccctggtcagattggtaacggttacgccccagtcctggattgccacacctctcacattgcagtcaagttctctgagatcttgaccaagattgacaggcgttctggtaaggagattgagaaggagcccaaattcttgaagaatggtgatgctggtatggtgaagatgactccaaccaagcccatggttgtggagaccttctctgagtacccaccacttggacgtttcgctgtgagggacatgaggcagactgttgcagtcggtgttatcaagagtgttgacaagaaggacccaaccggagccaaggttaccaaggctgcagtcaagaagggtgccaagtgaaccatcctctaaaactctatctgccgcaggtgaatcaaaggacagggttagttttattacaataagtttggtatttggggtcgcgcggacatgggttccttggtttccgtttttcttcccccgtccaagaagccgtttgttttcttcgctaaattgggggtttcctttggaacccggaagggtggggcgggaattcttaacaacgacaccaatgtcttttccctggcgttttttttgccgttttg

SEQ ID NO: 116469 - DNA, 1760 bp, Arabidopsis thaliana
  unsure (1)..(1760): unsure at all n locations
atgcnnnnnnnnnccagcactatacgactcacttagggaaagctggtacgcctgcaggtaccggtccggaattcccgggtcgcccacgcgtccgatttctcacattttcgtagccgcaagactcctttcagattcttacttgcagctatgggtaaagagaagtttcacattaacattgtggtcattggtcatgttgattctggaaaatcgaccacaactggtcacttgatctataagcttggtggtattgacaagcgtgtcatcgagaggttcgagaaggaggctgctgagatgaacaagaggtccttcaagtacgcatgggtgttggacaaacttaaggccgagcgtgagcgtggtattaccatcgatattgctctatggaagttcgagaccaccaagtactactgcacagtcattgatgccccaggacatcgtgatttcatcaagaacatgattactggtacctcccaggctgattgtgctgttcttatcattgactccaccactggaggttttgaggctggtatctctaaggatggtcagacccgtgagcacgctcttcttgctttcacccttggtgtcaagcagatgatttgctgttgtaacaagatggatgccaccacccccaaatactccaaggctaggtacgatgaaatcatcaaggaggtgtcttcatacctgaagaaggtcggatacaaccctgacaaaatcccatttgtgccaatctctggattcgagggagacaacatgattgagaggtcaaccaaccttgactggtacaagggaccaactcttcttgaggctcttgaccagatcaacgagcccaagaggccatcagacaagccccttcgtcttccacttcaggatgtctacaagattggtggtattggaacggtgccagtgggacgtgttgagactggtatgatcaagcctggtatggttgttacctttgctcccacagggttgaccactgaggttaagtctgttgagatgcaccacgagtctcttcttgaggcacttcccggtgacaatgttggattcaatgtcaagaatgttgctgtcaaggatcttaagagaggatacgttgcctctaactccaaggatgatccagctaagggtgccgccaacttcacctcccaggtcatcatcatgaaccaccctggtcagattggtaacggttacgccccagttctcgattgccacacctctcacattgcagtcaagttctctgagatcttgaccaagattgacaggcgttctggtaaggagattgagaaggagcccaagtttttgaagaatggtgacgctggtatggttaagatgaccccaaccaagcccatggttgttgagactttctccgagtacccacctttgggacgtttcgctgttagggacatgaggcagaccgttgctgttggtgttattaagagcgtggacaagaaggacccaactggagccaaggtcaccaaggctgcagtgaagaagggtgccaaatgatgagactttcgttatgatcgactctcttatggttttctttggttcttaaaactttgatggcgtttgagcctttttcttttttctctttatttctgtgactttctctctccctcctttttggatatctctgagactttttattatggttttcaattatgcagtttccggataaaaaaaaaaaaaaaaaaaaaaaaagggcggccgctctagaggatctcaagcttacgtgacgcgtgcatagcgaggtcatagctcttagtata

SEQ ID NO: 116470 - DNA, 1247 bp, Arabidopsis thaliana
  unsure (1)..(1247): unsure at all n locations
ggttccaancccccaaaaatnaagaaaatccccanaaacnttgccaaaattaacagncgttntggtaagnattttagaaggagccctaaattcttgaagaatggtgatgctggtatggtgaagatgactccaaccaagcccatggttgtggagaccttctctgagtacccaccacttggacgtttcgctgtgagggacatgaggcagactgttgcagtcggtgttatcaagagtgttgacaagaaggacccaactggagccaaggttaccaaggctgcagtcaagaagggtgccaagtgaactctgaacatcaaaactctttccgctgatgaaatgaaggactattttagtttctttactttagtagtttggtatttggttggttgtttgtgttaccgcttcgtttattctccgtcggagctcaattctcggaattgggttcttgatcggaggtggcggaggtacttggcactcgagcttcctgtttatttcttttgttttgtgttatgattttgaacctttttggatattcggttatatgatatttgtgtcattcctgcggtaaataaatcaatttcttttattcagtggaaaaagagattgatcgtgtttataaaggatacagtctcataaatattataagagtatatgatacaacaacaaatgaatatctcaaatgaatccgagggaaagtcacactcaaagaataacctgttgttttttggacagaactagaatataagcagacgacatgcatagagaagtcgtcactgcaaataaacagaaggttgtcacgaagactcgctagcggaaaaattttatggttctggctgttaagattttgactgagtcacacacagggaaatcttacgagggtggaagacattatcaacagaggagatgagatcaagggttgatcacagaagtagaagagaggcaagaaccattgcgaaaacagaaagtagaagagatagagtgattcgggtttgtccactaggtgcttgtgcattggttgatggggttccaggggatgaggttggggcttttgcggtaaccggaggtagtggtggctcagtgacatcagcatctgtgaaaaccgggtttggagcttcggctggaggaaaggcagtaggactcacaagggttaagagggcaccgggttgggcaggggccatgtaaggtatagtttctttttctgcccaaacatagattccttttgtatctttggcagctgtaaaaaggggaac

SEQ ID NO: 116471 - DNA, 1410 bp, Arabidopsis thaliana
  unsure (1)..(1410): unsure at all n locations
nnnnnnnnnnnnnnnnnnnnnnnnnnnnnnnnnnnnnnnnnnnnnnnnnnnnnnnnnnnnnnnnnnnnnnnnnnnnnnnnnnnccacgcgtccgcccacgcgtccggacccgtgagcacgctctacttgctttcacccttggtgtcaagcagatgatctgctgttgtaacaagatggatgccactacccccaagtactccaaggccaggtacgatgaaatcatcaaggaggtgtcttcctacttgaagaaggttggttacaaccccgacaaaatcccatttgtgcccatctctggatttgagggtgacaacatgattgagaggtccaccaaccttgactggtacaagggaccaactctccttgaggctcttgaccagatcaacgagcccaagaggccgtcagacaagccccttcgtctcccacttcaggatgtctacaagattggtggtattggaacggtgccagtgggacgtgttgagactggtatgatcaagcctggtatggttgtgacctttgctcccacaggattgaccactgaggtcaagtctgttgagatgcaccacgagtctcttcttgaggcacttccaggtgacaacgttgggttcaatgttaagaatgttgctgtcaaggatcttaagagagggtacgtcgcatccaactcaaggatgaccctgccaagggtgctgctaacttcacctcccaggtcatcatcatgaaccaccctgggcagattgttacggttacgcccaatcctggattgcacacctctacattgaatcaagtctctgagatctgacaagattgacggcgttctgtaaggaattgagaggagccaagttcttgaaaaatggtaatgctggtatggtgaaaatgcctccaaccaagcccatggttgtggagaccttctttgagtaccccccacttggacgtttcgctgtgagggacatgaggcagactgttgcagtcggtgttatcaagagtgttgacaagaaggacccaaccggagccaaggttaccaaggctgccgtcaagaagggtgcgaagtgaaccatcctcaaaactctatctgccgcaggtgaatcaaaggacagtgttagttttattacaatagtttggtatttggtcgcgtgtctgtgttcttgtttcgttttctccccgtcagagcgttgttctcgtaattgggttcttgatcggaggtggcggatctacacacacattcttcctgtttttggcttttaatttgttttctcattttgaactgttttaaaatttctgttatatgaatgaatgttttccctgcggtttaaaaaaaaaaaaaattctttaaaaaaaaaaaaaaaaaaaaaaaaaaaaaaagggcggccgctctagaggatccaagcttacgtacgcgtgcatgcgacgtcagag

SEQ ID NO: 116472 - DNA, 1241 bp, Arabidopsis thaliana
cacgttacaaaatttagacaaaaaaataaatatggagctcgagacctcagtttatcgaccaaacgtcgccgtttatgattctccggatggtgtggaggttcgaggacggtacgaccaaatcttcgccaagattttgacgagagaagctcttagctttgtggctgagttacagagagagtttcgtggccatgtgaagtatgccatggagtgccggagagaggcaagacggcgttataactccggtgccgttcctgggtttgatccttccactaagttcatcagagacggtgattggagctgtgccttccgccctcctgccgttgctgaccggagagttgagatcaccggtccggtcgagaggaagatgatcatcaacgctcttaactccggagctaaagtttttatggctgatttcgaggacgctttgtttcaaagttgggagaatctgatgagagggcatgtgaacctgaaagatgcagtggatggatctcattacgttccacgacaagtcaaggaacagagtttacaagctcaacgaccaaaccgctaagctttttgtccggccaagaggttggcatctcccggaggctcacatcctcatcgacggtgaacccgccactggatgtcttgtcgattttggcctttacttcttccacaactacgccaaatttagacagactcaaggttccggtttcggtccattcttctatctccccaaaatggaacattctagggaagcaaagatatggaacagtgtttttgagcgtgctgagaagatggctgggatagagagaggaagcattagagcaactgtgcttatcgagaccctcccggctgtcttccagatgaatgagatactctatgaactacgtgatcactcagtcggtttaaactgtggaagatgggattatatcttcagctatgtcaaaaccttccaagctcaccctgaccggctcttaccagaccgtgtcctagttggcatgggccagcatttcatgagaagttactctgatcttctcatccgtacttgtcataagcgcggtgtccacgccatgggtggcatggcggctcagattccgataagagatgacccaaaagcgaatgagatggcattggatctagtgaggaaagacaagctgagagaggtaagagcagggcatgatggaacatgggcggctcatccaggacttatcccaatctgcatggaagcattcactggtcacatgggaaaaagtccaaac

SEQ ID NO: 116473 - DNA, 879 bp, Arabidopsis thaliana
  unsure (1)..(879): unsure at all n locations
gggaaagcacgtacgcctgcaggtaccggtccggaattcccgggtcgacccacgcgtccgcggacgcgtggggttgaccactgaggttaagtctgttgagatgcaccacgagtctcttcttgaggcacttcccggtgacaatgttggattcaatgtcaagaatgttgctgtcaaggatcttaagagaggatacgttgcctctaactccaaggatgagccagctaagggggcccccaacttcacctcccaggtcatcatcatgaaccaccctgggcagattgggaacgggtacgccccagttctcggattgccacacctctcacattgcagtcaagttctctgggatcttgaccaaagattgacaggcgttctggtaaggagattgagaaggagcccaagttttttgaagaaatggggacccttgggtatgggtaaaaatcacccccaacccaagccccatggggttgttgagaacttttctcccgagttaccccacccttttttggggaaccttttccccctgttttanggaacntttnaaggcctaaacccgtttggctgtttgggtggtttatttaaaagaacctttggaaccaaaaaaggaacccaactggagccaaggtccccaaggctgcagtgaaaaagggtgccaaatgatgaaactttcgttatgatcgactctcttaaggttttctttggttcttaaaactttgatggcgtttgagcccttttcttttttctctttaattctgggactttccctcccccccccttttggaaatctctgagaccttttaatatggttttcaattaagcagtttccggaaaattttgcttgaaactgaaaaaaaaaaaaaaaaacttnannnnttnnnttnt

SEQ ID NO: 116474 - DNA, 704 bp, Arabidopsis thaliana
acgttgggttcaatgttaagaatgttgctgtcaaggatcttaatagagggtacgtcgcatccaactccaaggatgaccctgccaagggtgctgctaacttcacctcccaggtcatcatcatgaaccaccctggtcagattggtaacggttacgccccagtcctggattgccacacctctcacattgcagtcaagttctctgagatcttgaccaagattgacaggcgttctggtaaggagattgagaaggagcccaagttcttgaagaatggtgatgctggtatggtgaagatgactccaaccaagcccatggttgtggagaccttctctgagtacccaccacttggacgtttcgctgtgagggacatgaggcagactgttgcagtcggtgttatcaagagtgttgacaagaagtgaaccatcctcaaaactctatctgccgcaggtgaatcaaaggacagtgttagtttctattactttagtttggtatttggtcgcgtgtctgtagttcttgtttctccccatcggaaactctgttcccggaactgggttcttgatcggaggtgggggagctactttgcccctattttgcttttgaattgttatcaattttgaacctattggagattcggttatatgatgtgatttccgaggatatttctcttaaaaaaaaaaaaaaaaaaagggcggccgctctagaggatc

SEQ ID NO: 116475 - DNA, 528 bp, Arabidopsis thaliana
  unsure (1)..(528): unsure at all n locations
nnnnnnnnnnnnnnnnnnnnnnnnnnnnnnnnnnnnnnnnnnnnnnnnnnnnnnnnnnnnnnnnnnnnnnnccacgcgtccgcaattatttttcttatcttctccgggatttagatatttgacataaatagtgagccccaacttttcttttgcagaagaatgaagcaggggttgataatgaaggtacaaggttaccaaggctgcagttaagaagggtgcaaagtgaactcgaatcctcaaaactctatccgcagatgaatcaaaaaacaatattagtttctttactttagtttggtatttggtcgcgtgttatagcttcgtttcttctccatcggaactctgttcccggaactgggttcttgatcggaggtggcggagctactttgcacctattttgcttttgaattgttatcaattttgaacctatttggagattcggttatatgatgtgattntccgaggnnnnnnnnnnnnnnnnnnnnnnnnnnnnnnnnnnnnnnnnnnnnnnnnnnnnnnnnnnnnnnnnnn

SEQ ID NO: 116476 - DNA, 779 bp, Arabidopsis thaliana
caggggcatttccggatatgacccactcgtccgacacgacactggagatttcatcaagaacatgattactggtacctcccaagctgattgtgctgttcttatcattgactccaccactggaggttttgaggctggtatctctaaggatggtcagacccgtgagcacgctcttcttgctttcacccttggtgtcaagcagatgatttgctgttgtaacaagatggatgccaccacccccaaatactccaaggctaggtacgatgaaatcatcaaggaggtgtcttcatacctgaagaaggtgggatacaaccctgacaaaatcccatttgtgccaatctctggattcgagggagacaacatgattgagaggtcaaccaaccttgacttggtacacgggaccaactcttcttgaggctcttgaccagatcaactagcccaagacgccattatacaagccccttcgtattccacttcaggatgactacaagattggcggtataggaacggtgccagtgtgacctgttgagactggcatgatcaagcctggtatggacgtgacctgtggtcacacagggtcgcccactgccgcctagtctgatgcgatgcaccacaagggtgtttttgagacaattcatgtctacagaggtacatttagtgcttacacagatgctcgaaaagatgctagtagaggatgctggaactctagctgcaaggatgatccaactaagggtgccgccaacttcaccttccaggtcatcatcatgaaccaccctggtcag

SEQ ID NO: 116477 - DNA, 530 bp, Arabidopsis thaliana
  unsure (1)..(530): unsure at all n locations
gatatctctgaggtaattctggagcagcataaacaatcaattgattcattcttcttgataccaggttgtggaaactctagcgagatcgttgctgagatttgtttgacagtctctaaccatgggtaaagagaagtttcacatcaacattgtggtcattggccacgtcgattctggaaagtcgaccaccactgggcacttgatctacaagttgggtggtattgacaatgcgtgtcattgagaggttcgtgaaggatgctgctgtgattaacatagaggttctttaagtacgcatgttgttcgttacatcttaaatattttgcaagnnnnnnnnnnnnnnnnnnnnnnnnnnnnnnnnnnnnnnnnnnnnnnnnnnnnnnnnnnnnnnnnnnnnnnnnnnnnnnnnnnnnnnnnnnnnnnnnnnnnnnnnnnnnnnnnnnnnnnnnnnnnnnnnnnnnnnnnnnnnnnnnnnnnnnnnnnnnnnnnnnnnnnnnnnnnnnnnnnnnnnnnnnnnnnnnnnnnnnnnnnnnnnn

SEQ ID NO: 116478 - DNA, 1478 bp, Arabidopsis thaliana
  unsure (1)..(1478): unsure at all n locations
aatacgactcactttagggaaagcacgtacgcctgcaggtaccggtccggaattcccgggtcgacccacgcgtccgcttcagcaaaactcgtctctcttgcactccaaaaagcaaccatgtctgcttttgtcggcaaatacgcagatgagctgataaagacggctaagtacattgccacaccgggaaagggcattttggcagcagacgagagcacgggaactattgggaaacgattcgccagcatcaatgttgagaacattgagtccaaccgccaagctctccgtgagctcctcttcacgtcccctggcactttcccttgcctctccggtgttatcctcttcgaggaaaccctctaccagaaaaccacggatggcaaacccttcgttgagctcctcatggaaaacggagttatccctggaatcaaagtggacaagggtgtggttgatctagcaggaaccaatggcgagaccactactcagggtctagattcacttggtgcacgttgccaggagattacaaggcaggagctcggtttgcaaaatggcgtgcagtcctcaagattggggccaccgagccaagcgtgctctccatccaagaggacgccagggggctagcccgctatgccatcatctgccaggagaatggactcgtcccgatcgtcgagccagaggtgctgaccggcgggagccacgacatcaagaaatgtgcagcggtgaccgagaccgttcttgctgccgtgtacaaggccttgaacgaccaccatgtcctcctcgaaggcactctgcttaaaccgacatggtcactcccggctccgacagcccaaaggttgcaccggaactaattgcggaatacacggtgactgctctgcgccgcacagtcccaccagctattccgggaatcgtgttcctctcaggcatacagcgcgaagagcaagcgacactaaatctaaacgcaatgaacaagcttgatgtgttgaagccatggacgctcactttctcttttggcggagccctccagcaaagtgctatcaaggcttgggccggtaagcccgagaacgtagccaaagctcaggccaagttcctgaccaggtgcaaggctaacaaggacgctaccctcgggaaatacaccggctgggcttctggtgactcggccgctttcgagaacttggttgtgataggatacaggtactaggagcctttgagaacgggcgtctgcctttgatgcggtttgagtagatgtctaatgtttcgtgggcgttttaactgtttgaatgttcaattttgcagactgctaataattgttattttccggttactgtcaaactatccatgtgaaattcacgttttgaaaagctaataataatgtttttattgtatgagnnnnnnnnnnnnnnnnnnnnnnnnnnnnnnnnnnnnnnnnnnnnnnnnnnnnnnnnnnnnnnnnnnnnnnnnnnnnnnnnnnnnnnnnnnnnnnnnnn

SEQ ID NO: 116479 - DNA, 914 bp, Arabidopsis thaliana
  unsure (1)..(914): unsure at all n locations
ctcactttagggaaagccggtacgcctgcaggtaccggtccggaattcccgggtcgacccacgcgtccggcatttggtagtgtcgaagcaatcattcctcgggctctcctttctaactgcattcctagaaaatattaccctaaaggcctttgtcttggcatcctcgtcctcttcagcaggaactcatctgtcttggaagaattattaccatgtctgcttttgtcagcaaatacgaagatgagctgatcaagacggccaagtacattgcaacgccgggaaggggcattttggcggcagatgagagcacagaaaccattgggaaacgattcgccggaatcaatgttgagaacactgagtccaaccgccaagcttaccgtgagctcctcttcacttcccctggcagttacccttgactctctggtgttatactcttcgaggaaaccctctaccagaaaacctctgatggcaaacccttcgtcgatctcctcatggagaacggtgttatccccggaatcaaagtggacaagggtttggttgatctagcagggaccaacggcgagaccactactcaaggtctagactcgcttggtgcacggtgtcagcagtattacgaggcangagcccggtttgtaaatggcgtgcttcttaagattgggccccgaccaacgtctctcatcaaagacccaggtgtacccgcttgcatatctgcagagatgacttgtccatcgcgagccaagtctgcagtggagcacacatcaaatggcgcgggactaacngtctgctgctgtcaagcttactacactgtctctgaagacttgttaactactgtactccgctcacagcaagtgccgactatggatccgtatgttggcgcagcacacatcggatggtcttagctcggcaagacactatta

SEQ ID NO: 116480 - DNA, 1091 bp, Arabidopsis thaliana
  unsure (1)..(1091): unsure at all n locations
aacttactgtttcagtttggatctgatttttttttggatcaggagaacggtgttatccccggaatcaaagtggacaagggtttggttgatctagcagggaccaacggcgagaccactactcaaggtctagactcgcttggtgcacggtgtcagcagtattacgaggcaggagcccggtttgctaaatggcgtgcattcttcaagattggggccaccgagccaagcgttctctccatccaagaggacgccagggtgctagcccgctatgccatcatctgccaggagaatggacttgtcccgatcgtcgagccagaggtgctgacaggtgggagccacgacatcaagaaatgtgcggcggtgactgagacggttcttgctgccgtgttcaaggccttgaactaccaccatgtccttcttgaaggcactctgcttaaaccgacatggtcactcccggctctgacagcccaaaggtgcaccgaagtgaatagcggaatacacagtgactgctctgcgccgcacagtcccccctgcagttccaggaatcgtgttcctctcaggcggccagagtgaagaggaagcaacactaaatctgaacgcaatgaacaagctcgatgtgttgaagccatggactctcactttctcatttggccgagccctccaacaaagcactctcaaggcttgggcaggtaagacagagaatgtagccaaagctcaggccactttcctgaccaggtgcaagggtaactcggacgctaccctcgggaaatacaccggcggggcttctggtgactcggccgcctctgagagcttgtatgaggaaggatacaagtattaggagcgtttaaatacgggtgtcgccttttatacgatttgaatatatgtcaaatgtttcgtaggcgtttaactgtttaaatttttatcgatttggtttagcgtctgtgtaatgttcttaaactgtgttgtgttttttgtgatggtttctataatattttcgcgccnttgcaaaacggntngntcaaancnnnnnnnnnnnnnnnnnnnnnnnnnnnnnnnnnnnnnnnnnnnnnnnnnnnnnnnnnnnnnnnnnnnnn

SEQ ID NO: 116481 - DNA, 413 bp, Arabidopsis thaliana
accattgggaaacgattcgccgaaatcattgttgagaacactgagtccaaccgccaagcttaccgtgagctcctcttcacttcccctggcagttacccttgcctctctggtgttatactcttcgaggaaaccctctaccagaaaacctctgatggcaaacccttcgtcgatctcctcatggtccgtctcggaaaaagcaaactccagctctagtcttagtcattgggtccaagagttgcagagttgaagctcttgacatgacccaaatggaacttactgtttcagtttggatctgatttttctttggatcaggagaacggtgttatccccggaatcccagtggacccgggtcttggttgatctagcagggaccaacgccgcccccactactcaaggtctagactcgcttggtg

SEQ ID NO: 116482 - DNA, 463 bp, Arabidopsis thaliana
cggacgcgtgggcggacgcgtgggcacaatatggttaagcttgctcatctcctcgtcgcagcgggcggggctctcctcggccgtgacggctgtctcgcaaggcagtcgctaggggttcctcctcaaatagggaacgcgtgtaacctcgataacttagacgttctccagcctaccgaaactatcaagagcgaggctggtcgggtcgagtactgggatcacaacaatcctcagatccgatgtgctggtgtctctgtttctcgccttataatcgaacaaggcggtctctaccttcctaccttcttcagctcccccaaaatttcctacgttgttcaaggaatgggtatcagcggaagagtggtccctggatgcgcggaaaccttcatggactcgcagcctatgcaaggacaacaacagggacagcagggacaacagggacaacagggtcaacagggtcaacaaggac

SEQ ID NO: 116483 - DNA, 497 bp, Arabidopsis thaliana
  unsure (1)..(497): unsure at all n locations
cggacgcgtgggcaaaaagaaaatggttaagctcagcaatctcctcgttgcaaccttcggggttctcctcgttcttaacggctgccttgcgaggcagtcacttggggttcctcctcagctacagaacgagtgttacctcgacaacctagatgtttttctagccaccgaaacaaccagcagggaggctttggcggttcacagcaacaacaagaacagaaaaacttgtggagcgggttcgacgcacaggtcatagctcaagcattgaaaattgacgttcagttggctcagcagcttcagaaccaacaagacagcagaggaaacatcgttcgtgttaagggacctttccaggtcgtgaggccacctctaagacagccctacgagagcgaggagtggagacacccacgtagcccacagggcaacggccttgaggagactatctgcagcatgaggtcccacgagaacatngacgaccctgctcgtgctgacgtgtacaagcc

SEQ ID NO: 116484 - DNA, 277 bp, Arabidopsis thaliana
ccgaattaccgatgcgaccacacatacaaatagaaaatgtgtaagctcagcaatctcctcgttgcaaccttcgttgttctcctcgtccttaacggctgccttgcgaggcagtcacttggggttcctcctcaactacagaactagcaccacctcgtgtcttcgtttccttctggaaatcattactttggataacatcgatcttcttctccgattattggatgcaatttattgattgaatttcagattttgaaggaggtgaagcatcgttatgtaattg

SEQ ID NO: 116485 - DNA, 886 bp, Arabidopsis thaliana
cctgtttggctcaagtatgttcctggaatcagcttcagaacagataatgagccttttaagagagctgtgaaaggattcacagagagaatagttgagctgatgaagagtgagaacttgttcgagtcccagggtggtcccattatcctttctcagattgagaatgagtatggaagacaagggcagttattgggcgctgaaggtcacaactacatgacatgggcagctaaaatggctatagcaactgagactggtgtcccgtgggtcatgtgcaaagaagacgatgcccctgaccctgtgataaacacatgtaacggtttctactgtgattcatttgctccgaacaagccatacaagcctttgatatggacagaggcatggagcggctggttcactgagttcggtgggccaatgcaccatagaccagttcaggatctggcgtttggtgttgcacgtttcatacaaaaaggaggatcttttgttaactactacatgtatcatggaggaactaactttggaagaacagccggaggtccatttgtcaccaccagctatgattatgatgctccgatcgacgaatatggtttaatcagacaacctaaatatggtcacctaaaggaactccacagagctatcaagatgtgtgagaaggctctggtgtcagctgatcccgttgttacatcaataggaaacaagcaacaagctcatgtatactctgcagaatcaggagattgttcggctttcctagctaactatgatacagaatcggcagcaagagttttgtttaacaacgttcattataacttacctccttggtcaatcagtattcttccagactgtagaaatgcagtcttcaatactgcaaaggttggagttcaaacatcccaga

SEQ ID NO: 116486 - DNA, 913 bp, Arabidopsis thaliana
ggtcaacaaggtcaacagggacaacatgtttaacagggtcagcagggtcaacagggacagcggggtcagcagcagcaagggttccgtgacatgcaccagaaggtcgaacatgttcgacatggagacatcattgccattactgcaggctcttcccattggatctacaacaccggtgaccagctcacttgtcattatctgccttctcgacattgccaactgccaaaaccaactcgaccgcggcccaagaacgttccgtctggccggaaacaacccacagggcggttcccagcagcagcaacaacaacaacagaacatgttgagcgggttcgaccctcaggtcctagcccaggcattgaaaatcgacgttaggttggctcaggagcttcagaaccaacaagacagcagaggaaacatcgttcgtgttaagggacctttccaggttgtgaggccgcctcttagacagccatacgagagtgagcagtggagacacccacgtggcccaccacaaagcccacaagacaacggcttggaggagactatctgcagcatgaggacccacgagaacattgatgacccagcccgtgctgacgtgtataagcccaacctcggccgtgtgaccagcgtcaacagctacaccttacccatcttgcagtatatcagactcagcgccacccgtggcattctccagggtaatgcgatggtgcttccgaaatacaacatgaacgcgaacgagatcttgtactgcactcaaggacaagcaaggattcaagtggtgaacgacaacggacagaacgtgctggaccagcatgtgcagaagggacagctcgtggtcatcccacaaggattcgcctatgttgtccagtcccaccaaaacaacttcgaatggatttctttcaagacaaacgctaacgcg

SEQ ID NO: 116487 - DNA, 380 bp, Arabidopsis thaliana
cgggggcgtcccacgcgtccgaaactgtcccataggtttatgttacgaccggtacatttagggaagaagtgttcttttctcgacctcggggacgcgaagagacattgtctatcgctgaattaagttgtcctattttctcattcagtgtctctcttgttttctctaaaccttcatcgtagtaacgttggctgtttcgggtttctcaaaatcgtactcgagtggttcatttggatgccgatgctgtttttatagtcctacaaggtaaaggagtgatcgagtttgtgacggataaaacaaaagaatcgttccacataactaaaggtgatgtggtaagaatcccttctggtgtcaccaactttatcaccaacactaaccagacg

SEQ ID NO: 116488 - DNA, 1683 bp, Arabidopsis thaliana
cacatcaacaaaacaacaagaaaaaatggcaatataccaacaaattaatcataacactgggttctccttatctggcgatagctgtcgtccactagggcttatccttccgtagtggagtatcgacgaagttcgagccaccacagcaatggagaacaatgaaggtcccccgtcgcccgtcctggtggtaggctctggcgaagggatgggaggatagagtcgacgaatcatccatatccacttcaggaagcggagtttcagtgatttggttccagtcaaaggaagggttttgtgagagtgctgcctaagttcacaaaacatgcaccggcttctcttccgaggaatcgtgtaactacagattctcgttggtggagatggagccaacaactttctttgtgcctcaccatttggatgccgatgctgtttttatagtcctacaaggtaaaggagtgatcgagtttgtgacggataaaacaattgaatcgttccacataactaaaggtgatgtggtaagaatcccttctggtgtcacgcggctttatcaccaacactaaccatacagttcctgttctgcctttcccagatcaccggtcctgtcaacaattcaggcaactacaaggattactttcctgctgtattccaatttcaacaattctactttaatgggtttaccaaagaagtcctctctaccagtttcaacgtgccggaagaattgctagggagattggttacgagatcaaaagaaattggtcaagggattatccggggaatttgtccagacgcaaggcaaggaacttgctgagcacgctacatctccttcaaacaaacacaaagccaaaaaagaaaaggaggaagacaaagacctaagaacgttgtggactcctttcaatctctttgcaatagatccaatctactccaacgactttggtcatttccacgaggcacatcctaagaattataatcaactgcaagaccttcacatagccgccgcttgggctaacatgacacagggatccttgttccttcctcattttaactctaagaccacatttgtaacgtttgtggagaatggttgtgcccgcttcgagatggctactccttataaattccaaagagggcaacaacaatggccaggacaaggacaagaaggaggaggaagatatgagttgaaaacgttacacaaagttgtgtcacgagtgtgtaaaggcgaagtttttatcgttccggcaggtcatccattcactatactctcgcaagatcaagactttatcgcggtagggtttggtatttatgcgaccaacagcaaaagaacgttccttgcaggggaagagaatttgctgagcaacctcaacccggcggcaactagggtaacctttggtgttggaagtaaagtcgcggagaaactgttcacgagccaaaactattcctactttgcacctacgagtcgtagccaacaacaaattccagagaaacacaagccatcgtttcaatcaatcttagactttgctggtttttgaaaatgcttttttacagtcctaagaaaggaaagagtttaagagtttaatataatctttgtgaagatatgcaataaaatatggtaacgctctgcatgtaacttctatgtactggtttcttgagttgtaaatttttatgtgacagttttaataaaaccaacggtttagttat

SEQ ID NO: 116489 - DNA, 2170 bp, Arabidopsis thaliana
ggacatctcggtaatatcattgtaacatgtatagaccgacacccctaggctctcgaagaatccatgtcagcccacgcatgacacgcccattcttctcggccactcagcaatttttgtccgagaactgctgaaaaaactcggacacttttataccgccgccaccctaacgcctcgaagaactagcaaaaagaaaataggttaagcctcagcaattctcctcgtttgcataccttcgggggttctcactcgtggcttgagacgggctgccgtgtgcggagggcaggtcacattgagaggttcactcctcagctaccacgaacgagttgtaacctcgacccaacctagatgtttctccaagcccaccgaatactatcaagagtgaaagcccggtcagaatcgagtacctgggaaccaccaaccaccctcagcttccgatgtgttcggtgttatccgtcgccccggaatggaaattgaaacaaggggggtcttttacttttgcccacggttctttcacttccctcaaaaattttcctacgtcgtttcaaggaactgggtattcagcggaatgagtggtcccctggaatgtgcccgagacctttaatggacttcgcattcgatgcaatggacaacaactaaggctcaacccatgggcaagggacgacaggggacaacaaggcccaacgcatggggaaggacaggggacaacaggtgacaacaagggaagacaagtgccaaccatgggaaggggacagggaccaactagggaccaacatagtgtacgacagggaccaacaataggccaactcatgtggaagggaccagggaccacgcagtggacaaacaaagggttctcgtgacaatggcaccagaagggtggaacaatgttgagaacgcggagaccgtctttgccaacaaactccaggtctctgcccactggatctacaactcatgagaactttccactggtcatcaatcgctcttctcgacattggccaactaccaaaaccaacttgaacccgcaacccctagaggtgtttcatttggcccggaaacaaccagcaggggaggcttttggcggttcacaggcaccaacaggaacagaaaaaacttggtggagcgggttcgacgcacaagtcattagttaaagcattgaaaattgtacgttcagttggcttaagcagcttcagaacccaacaatgacacgcagagggaaacaactcgttcgtgttaacgggaccctttccacggtcgttgaggcccacctctaagacacgccctacgaggagcgaggagtggagacactccacattagcccacagggcaacgggccttgagggagaactatctgcagcatgaggtccccacgagaacattttctacctttgtttgtgcttgccgtgatcaagcccagcgcggggtctcgtgaccagcgtcaaccagctataccttgccccatctttggagtatggtcaggcttcagtgcccacttgtgggcgttctccagggtaatggcgatggtgcgttgctaaatacaacatgattgtttggcgagatctgggactgaactggacagacaaggaaggattccaagtgggtcaaccgacaaacggacagaacgggtttgacacaacaggtgcagaataggacagctcgtggtcatctccacatgggttcggaatacgttgtccagtcccacggtggcaatttagagtggtgtctgtttcaaaactaaatgaaaacgcaatgatcagcactttggcgggtagagacctcgctcttgagggcattgccaattggaggtcatatcaaatggtttccagaatctctcccgaggaagcttggtagattcaagttcaacacactcgagaccactctgacccacgctgtcttttggcaacaacaacagtttgatcgagggagattgtcggggctttaaatcaaaacgtttttctttttcttaaataaagtatggtcagtttgtaatcacgtccctttacctttaacgtacgtgtaaaatatgtgtctgccccccctcacttgtaataacactttcttctcaaaaatgagagggaagtttcgagttacaaactaaaaaaaaaaaaaaagggcggccgctctagaggatccaagcttacgtacgcgtgcatgcgacgtcatagctcggccatag

SEQ ID NO: 116490 - DNA, 1244 bp, Arabidopsis thaliana
cccccaattaacatatccgccattgtttccggcaacgaaaactaccaaaaaaaataatggaggtcgaaagagtccaagacatttcatcttcttctctactaacagaagcaatcccgttggagttcatcagatcagagaaagaacaaccagcgatcacaacattccgaggtccaacgccggcgattcccgtcgtcgatctaagcgatcccgacgaagaaagcgtgaggcgcgcggtggtgaaagcgagtgaagaatgggggctattccaagtggttaaccacgggattccgacggagctgatacgacgtttacaagacgtcggaagaaaattcttcgagcttccttcgtcggagaaagaatccgtcgctaaaccggaagattcgaaagacattgaaggatacggaacaaagcttcagaaagatccagaaggtaaaaaagcttgggtcgatcatctcttccatcgaatctggccaccgtcatgcgtcaattacagattctggcctaagaatccacctgaatacagggaggtgaatgaagagtatgcagtgcatgtgaagaagctatcggagacgttattagggattctctcggatggattagggttaaagcgtgatgcgttgaaagaaggtctcggcggagagatggcggagtatatgatgaagattaactattatccgccgtgtcctcggccggatttagctttaggtgtaccggctcatacagatctcagtggaatcactcttcttgttcctaacgaagttcctggacttcaagttttcaaagatgatcactggttcgatgcagagtatattccctccgccgtcattgttcacatcggcgatcagattctgaggttgagtaatgggaggtataaaaatgtgttgcataggacgacggtggataaagagaagacgaggatgtcgtggccggttttcttggagcctccccgtgaaaagattgttggacctttaccggaactaaccggagatgataatcctccaaagtttaaaccgtttgctttcaaggattacagttaccgcaagctcaataaacttcctctggattgagaaaaatcaatacgagaagaataatttgtggttgtggaataggaagtggttcgttattgagttgttgttttcccgcggttgtgtctcttgcttattgttattttatgtttaaaataaagattaaaacatctacctacattgtgtgtgatgttgacatgttaaaaaaaaaaaaaaaaa

SEQ ID NO: 116491 - DNA, 1017 bp, Arabidopsis thaliana
atgcttgtagtggtggtgattggggttgtggagtgtaggagatttgagaaggagacgttaggaggtggtggtggtggtggacttggcggtggctttggtggtgggaaaggttttgggggaggaattggtgccgggggaggttttggtggtggtgcaggaggaggtgccggtggtggtttaggaggaggcgccggtggaggaggaggtattggtggtggtgcaggaggaggtgccggtggtggtttaggaggaggtgctggtggaggactcggaggaggtcatggtggaggtattggtggtggtgctggaggaggtgctggtggaggactaggaggaggccacggtgggggtattggtggtggtgccggaggaggttctggtggaggacttggaggaggtattggtggtggtgccggtggtggtgccggaggaggtggaggacttggaggaggtcatggtggaggtattggtggtggtgctggaggaggtgctggtggaggactgggaggaggccacggtgggggtattggtggtggtgccggaggaggttctggtggaggacttggaggaggtattggtggtggcgcaggaggaggtgccggtggaggtggaggtgctggtgggggcggtggtcttggaggaggacatggtggcggttttgggggtggtgccggtggtggattaggtggcggtgccggcggaggtaccggaggaggatttggtgggggtgctggcggtggtgctggtgggggtgccgggggaggattcggcggtggtgctggtggaggtgccgggggaggattcggcggtggtgcaggaggaggtgctggtggaggagctggcggaggatttggtggtggtgcaggcggaggtcacggtggaggtgttggtggtggatttggtggaggttctggaggaggatttggtggaggtgctggtggaggagccggcggaggtgctggtggaggatttggtggtggtggtggtgcaggtggtggatttggcggtggattttaa

SEQ ID NO: 116492 - DNA, 646 bp, Arabidopsis thaliana
caagtcgttgcgagtttgattggtttttacttgtctagtgttttatataaacttgtgttgtgtaagtaactaaagagccatggcgtctcaacaagagaagaagcagctggatgagagggcaaagaagggcgagaccgtcgtgccaggtggtacgggaggcaaaagcttcgaagctcaacagcatctcgctgaagggaggagccgaggagggcaaactcgaaaggagcagttaggaactgaaggatatcagcagatgggacgcaaaggtggtcttagcaccggagacaagcctggtggggaacacgctgaggaggaaggagtcgagatagacgaatccaaattcaggaccaagacctaaatcaaacttccccacacggatgtaatattaatccggtttaaatctttcccatgtagttatatcttgtgtagtttcctgtgcgtacttaaggttcttgtttagtttacggatggtgatgaccatgtgtatgttttcgtctacgtaaagtgtctcgtttgttttccagtaccaatttctcttctttagtaagaagttaatgattgtggattaaaaaaaaaaaaaaaagggcggccgctctagaggatccaagcttacgtacgcgtgcatgcgacgtcaatagctcttcta

SEQ ID NO: 116493 - DNA, 1065 bp, Arabidopsis thaliana
  unsure (1)..(1065): unsure at all n locations
aacattgtatgagccgaagaactccatcaaatcaaatctcactcatcaaactttaacatttaactatcacaatatgttttcttttcttatcttcttgttggaggcttttcaggtggttattgctaccgtggtctccatagtcttcttagtgttcgcgggtctaacactggtaggttcagccacggcattaaccataacaacaccgctttttattatattcagtccgattcttgtaccagccacgatagccactgctgtcataaccacaggattcaccacgggtggcgcactcggagcgatggccgttgctctcatcagacgtaagatgggagctaagccgactgcggaaggaacttcgtcagcccaacctcttctcaaattgccagtttatggtggatatggaggattttggggaggaaagaaattttctggaacattcggaaataaaccagggggtggaaatccgtttggagacatctcaaaatggctcggaccaggggccgcaggtggaggtgcacctggaggattaggagggggcggaaatccgtttggaaacatctcaaaatggttcggaccaggggccgcaggtggagatgcatctgctgctggtggtgcacctgccgctgaagctgcaccagccgctggagctgcgcctgccgctggagctgcgcctgccgctggagctgcgcctgctgctggagctgctcctgccgctggtggaagtacaccacccacatggtaaaggaaataagtcaagttgttccaacatgtatattgtgcattgattcataaggaaacaaaagctttttaaaacgtcttatgctcatatgtattctccaaggtcaaagctgcttacacaagactatgctacaatgttcattaatttatagtataaatcatatagctcgatgaacaaatgggaacgtataatgtataatgtacggtcgactcttagaccatgtacattgcacatttagtcggcattgtagtctgtaaatcatactatatcaattcttaaggtttttatatactaagtaattttgtatnnnnnnnnnnnnnnnnnnn

SEQ ID NO: 116494 - DNA, 1195 bp, Arabidopsis thaliana
  unsure (1)..(1195): unsure at all n locations
atgannnnnnnnnnnagaaaacactcgatcggctatatatatacgtacaacacataagaaacccgagccaaccccttcactctctctaatcaaaaagcttttaacctcagccgttaaatctttctccgatcatgccgaccagaaacatcgccattggtggagtccaagaagaggtctatcaccccaacgcacttagggcggcgctcgctgagtttatctcgactttgatcttcgtcttcgccggctcaggctccggaattgctttcaacaagatcactgacaatggagcaaccactccttccggcctcgtcgccgctgccttagctcatgctttcggtctctttgtcgctgtctctgttggcgctaacatttccggtggccacgttaaccctgccgttaccttcggtgtcttactcggtggtaacatcactctcctccgtggtattctctactggattgctcagcttcttggctccgtcgccgcttgtttcctccttagctttgccaccggtggcgagccaattccagcgttcggtctctctgccggagtcggatcattaaacgctctcgtcttcgagatcgtgatgaccttcgggctcgtctacaccgtctacgccacagccgttgaccccaagaacggtagtctcggaacaatcgcaccaatcgccataggtttcatcgttggagctaacatcctcgccggtggagctttcagcggagcttccatgaacccagccgttgctttcggaccagccgtcgtaagctggacgtggaccaaccactgggtttactgggctggtcctcttattggtggtggactcgccggaattatctacgactttgtcttcatcgatgaaaatgcccacgagcaattgcctaccaccgattactgaagacgtcaaattcaacgttgttaatctgatgaatttttcgtgatttgcttttttaatttgcatcgtaatgggtttctggccgttggatcatttttagatgaatctttgtctattgattgatcatttatgtgtctttgggtttgttgttggagttgtaatatctctggaaggcttttgtgcaattgtattgtacggtttaataactataattgagaaaaccagggaatgtgaattatgaaaatgaattatataatcatgcgaagtcatagctcgtctatagtcaacgaaattcatccattttc

SEQ ID NO: 116495 - DNA, 1211 bp, Arabidopsis thaliana
  unsure (1)..(1211): unsure at all n locations
nnnnnnnnnnnnnnnnnnacgactcactatagggaaagctggcacgcctgcaggtaccggtccggaattcccgggtcgacccacgcgtccccactcttctagcatcttgaagcttaaatctcagccgtccgatcatgccgatcagaaacatcgccattggccgtccagatgaagccacccgtcccgatgccttaaaggcggcgttggctgagttcatttcaactttgatctttgtcgtcgccggttcaggctctggcatggctttcaacaagctcactgaaaacggagccaccactccttctggtctcgtagctgctgcagtggctcatgcctttggactcttcgtcgctgtctcagttggtgccaacatctctggtggacacgttaaccctgccgtcactttcggtgctttcattggtggtaacatcactctcctccgtggtatcctctactggattgctcagcttctcggctccgtcgtcgcttgcctcatccttaaattcgccaccggtggcttggctgtgccggcttttggtctctctgctggagtaggagtgttgaacgctttcgttttcgagatcgtgatgacattcgggcttgtttacaccgtctacgctacagccattgaccccaaaaacgggagtcttggaacaattgctcccatcgcaatcggtttcattgttggagccaacatcttagctggaggagctttctctggagcctccatgaatcccgccgtggctttcggaccagcggtggtgagctggacatggaccaaccactgggtctactgggccggacctctcgtcggcggtggaatcgctggactcatctacgaagttttcttcatcaacaccacacacgagcagctcccaaccacagactactgaattaatctctctttttctctcttgtgtaattttattcgactttgaatttgaattttaatgtctttttaatttccgtttgtgtaatttcgaatcatcaaggggtttatgatcgttcgatcttttagatgaatccttgtccgttggtttcaagagtggccattgcaatttcgactatataatgtgaattatgtatcaatctcatcttaagttttcaagtgttgcaataccccccccccccaaaaaaaaaaaaaaaaagggcggccgctctagaggatccaagcttacgtacgcgtgcatgcgacgtcatagctcagctatagt

SEQ ID NO: 116496 - DNA, 1482 bp, Arabidopsis thaliana
agaaaacactcgatcggctatatatatacgtacaacacataagaaaaccaaaccaatcacttcactctctctaatcaaaaagcttttaacctcagccgttaaatctttctccgatcatgccgaccagaaacatcgccattggtggagtccaagaagaggtctatcaccccaacgcacttagggcggcgctcgctgagtttatctcgactttgatcttcgtcttcgccggctcaggctccggaattgctttcaacaagatcactgacaatggagccaccactccttccggcctcgtcgccgctgccttagctcatgctttcggtctctttgtcgctgtctctgttggcgctaacattgccgctgccttagctcatgctttcggtctctttgtcgctgtctctgttggcgctaacatttccggtggccacgttaaccctgccgttaccttcggtgttttactcggtgggaacatcactctcctccgtggtattctctactggattgctcagcttcttggctccgtcgccgcttgtttcctccttagctttgccaccggtggcgagccaattccagcgttcggtctctctgccggagtcggatcattaaacgctctcgtcttcgagatcgtgatgaccttcgggctcgtctacaccgtctacgccacagccgttgaccccaagaacggtagtctcggaacaatcgcaccaatcgccataggtttcatcgttggagctaacatcctcgccggtggagctttcagcggagcttccatgaacccagccgttgctttcggaccagccgtcgtaagctggacgtggaccaaccactgggtttactgggctggtcctcttattggtggtggactcgccggaattatctacgactttgtcttcatcgatgaaaatgcccacgagcaattgcctaccaccgattactgaagacgtcaaattcaacgttgttaatctgatgaatttttcgtgatttgcttttttaatttgcatcgtaatgggtttctggccgttggatcatttttagatgaatctttgtctattgattgatcatttatgtgtctttgggtttgttgttggagttgtaatatctctggaaggcttttgtgcaattgtattgtacggtttaataactataattgagaaaaccagggaatgtgaattatgaaaatgaatttttttgttaaaaaaaaaaaaaaaaaaaagaaagaaaaaaaaaaaaaaaaaaaaagaaaaacaaaagggaggaacctataaaaaaatccaaatttaaaaaaaagggccggcggggttggggggtccaatataataaaccctaaattccctgcttttggcacttttttaacttgtatcttagactgacaataaacctctagcttttttcttcccccctttttcccaacactgggagaaaacaacccgggggaatattcccccccaagatttgttaccccaggttttttttataaagcca

SEQ ID NO: 116497 - DNA, 1155 bp, Arabidopsis thaliana
  unsure (1)..(1155): unsure at all n locations
aaaaacccggccggaccgacgcgtccgcggacgcgtgctctctaatcaaaaagcttttaacctcagccgttaaatctttctccgatcatgccgaccagaaacatcgccattggtggagtccaagaagaggtctaccaccccaacgcacttagggcggcgctcgctgagtttatctcgactttaatcttcgtcttcgccggatcaggctccggaattgctttcaacaagatcactgacaatggagccaccactccttccggcctcgtcgccgctgccttagctcatgctttcggtctctttgtcgctgtctctgttggcgctaacatttccggtggccacgttaaccctgccgttaacttcggtgtcttactcggtggtaacatcaattttcctccgtggggattctctactggtattggctcaagcttcttgggttccgtcggccggttgttttcctccttaaggttttccaaccggtgggggggccaatccaaggggttcgggtttttttgccgggggtaggatacattaaaagggttttggttttggagatcggaaatgaccttgggggttgtctaaacgtttgcggaaaagccgttgatccaagaacggtagttcggaaaattgaccattccgccataggtttcatcgttggagctaacatcctcgctggtggagctttcagcggagcttccatgaacccagccgttgctttcggaccagccgtcgtaagctggacgtggaccaaccactgggtttactgggctggtcctcttattggtggtggactcgccggaattatctacgactttgtcttcatcgatgaaaatgcccacgagcaattgcctaccaccgattactgaagacgtcaaattcaacgttgttaatctgatgaatttttcgtgatttgcttttttaatttgcatcgtaatgggtttctggccgttggatcatttttagatgaatctttgtctattgattgatcatttatgtgtctttgggtttgttgttggagttgtaatatctctggaaggcttttgtgcaattgtattgtacggtttaataactaaaaaaaaaaaaaaaaaaaannaagggcggccgctctagaggatccaagcttacgtacgcgtgcatgcgacgtcatagctcgtctat

SEQ ID NO: 116498 - DNA, 764 bp, Arabidopsis thaliana
  unsure (1)..(764): unsure at all n locations
tttggccgggatcaattttccccnggnnnccnnntttcccanggttccnnaangcnaaaattcccccttcnaaanggggccaaaannntgggcncccaccccggntgcgcccgttaaaganctagngncccccccgggnttccagggaattccggcccncccgggtttttgggccnccctgctgggantagggagtnttaaacgcttccgttttccgaaatcggtgatgccattcgggcttggttacacccgtctacggtacagccattgcccccaaaaacgggagtcttggaacaattgctcccatcgcaatcggtttcattgttggagccaacatcttagctggaggagctttctctggagcctccatgaatcccgccgtggctttcggaccagcggtggtgagctggacatggaccaaccactgggtctactgggccggacctctcgtcggcggtggaatcgctggactcatctacgaagttttcttcatcaacaccacacacgagcagctcccaaccacagactactgaattaatctctctttttctctcttgtgtaattttattcgactttgaatttgaattttaatgtctttttaatttccgtttgtgtaatttcgaatcatcaaggggtttatgatcgttcgatcttttagatgaaaaaaaaaaaaaacaaaagaanaaagggcggccgctctagaggatccaagcttacgtacgcgtgcatgcgacgtcatnnnnnnnnnnnnnnnnnnnnnnncg

SEQ ID NO: 116499 - DNA, 624 bp, Arabidopsis thaliana
  unsure (1)..(624): unsure at all n locations
cttcactctctctaatcaaaaagcttttaacctcagccgttaaatctttctccgatcatgccgaccagaaacatcgccattggtggagtccaagaagaggtctaccaccccaacgcacttagggcggcgctcgctgagtttatctcgactttaatcttcgtcttcgccggatcaggctccggaattgctttcaacaagatcactgacaatggagccaccactccttccggcctcgtcgccgctgccttagctcatgctttcggtctctttgtcgctgtctctgttggcgctaacatttccggtggccacgttaaccctgccgttaacttcggtgtcttactcggtggtaacatcaattctcctccgtgggattctctactggattgctcaagcttctttggtccgtcggccggttgtttcctccttaggttttccaaccggtgggggggcaatccaagggttcggttttttttccgggggtagataattaaaacggtttggcttctganatcggaaatacctttgggttgggttacaacggctttggaaaagccgttntccaagaacggaagttnggacaattgaccaatgcataggttaangtngggaaaacnnntgggntta

SEQ ID NO: 116500 - DNA, 697 bp, Arabidopsis thaliana
  unsure (1)..(697): unsure at all n locations
nnnnnnnnnnnnnnnnnnnnnnnnnnnnnnnnnnnnnnnnnnnnnnnnnnnnnnnnnnnnnnnnnnnccgtttggccacgcgtccgcggacgcctgggccgacgcgtgggttctagcatcttgaagcttaaatctcagccgtccgatcatgccgatcagaaacatcgccattggccgtccagatgaagccacccgtcccgatgccttaaaggcggcgttggctgagttcatttcaactttgatctttgtcgtcgccggttcaggctctggcatggctttcaacaagctcactgaaaacggagccaccactccttctggtctcgtagctgctgcagtggctcatgcctttggactcttcgtcgctgtctcagttggtgccaacatctctggtggacacgttaaccctgccgtcactttcggtgctttcattggtggtaacatcactctcctccgtggtatcctctactggattgctcagcttctcggctccgtcgtcgcttgcctcatccttaaattcgccaccggtggcttggctgcgccggctgttggtctctctgctggagtaggagtgttgaacgcttctcgttttcgagatcgtgatgacattcgggcttgtttacaccgtctaccgctacagccattgaccccaaaaacgggagtcttggaacaattgctcccatcgcaattgggttcattc

SEQ ID NO: 116501 - DNA, 913 bp, Arabidopsis thaliana
  unsure (1)..(913): unsure at all n locations
ccggaattgctttcaacaagatcactgacaatggagccaccactccttccccggcctcgtccgccgctgccttagctcatgctttcggtctctttgtcgctgtctctgttggcgctaacatttccggtggccacgttaaccctgccgttaccttcggtgtcttactcggtgggtaacatcactctcctccgcggtattctctactggattgctcagcttcttggctccgtcgccgcttgtttcctccttagctttgccaccggtggcgagcccaatcccagcgttcgggtctctcctgccggagtccggatcattaaaacgctatgggctcttggaagatccgtaaactgccttcgggctctggtctaaaacccggtaccccaaaaacccgttnccccaaaaacggtaaccccggaaaaaaccgnaccaaccnccaanaggtttcaccgttggagctaaaanccncgccggtggnactttnaancggagcttccaatgaacccancccgtttgctttcggaccaanccgccgtaagctggacgtggaccaaccactgggtttactgggctggncctcttattggtggtggactcgccggaattatctacgactttgtcttcatcgatgaaaatgcccacgagcaattgcctaccaccgattactgaagacgtcaaattcaacgttgttaatctgatgaatttttcgtgatttgcttttttaatttgcatcgtaatgggtttctggccgttggatcatttttagatgaatctttgtctattgattgatcatttatgtgtctttgggtttgttgttggagttgtaatatctctggaaggcttttgtgcaattgtagcggccggcgaattncgatgatgcaagacttnattcgatgaccgtacgtaccttcgtagg

SEQ ID NO: 116502 - DNA, 1066 bp, Arabidopsis thaliana
  unsure (1)..(1066): unsure at all n locations
acggacgcgtgggatcactttcgaaattacatttacgctttcttgcaatcaaattttccgatcttaagttcagaagacgatgtcagaggtggaaatagagaacgctgctacgatcgaaggaaacaccgctgcggatgcgccggtgacggatgcggccgttgagaagaagcctgcagcgaaaggacgaaagacgaagaatgttaaggaagtgaaggagaagaagactgttgctgccgctccgaagaagagaactgtttcatctcatcctacttacgaagagatgattaaggatgcgattgttacgttgaaagagagaactggatctagccaatacgcgattcagaagttcatcgaggagaagcgtaaggagcttcctccaacattcagaaagctgttgcttctcaatctgaagagactcgttgcttctgggaagcttgtgaaggtcaaagcctcgtttaaactcccatcggcgtcggctaaagcatcatcccctaaggcggcagcggagaaatctgctcctgcgaagaagaaaccggcgactgtggcggttaccaaggcgaagagaaaggtcgctgcggcttccaaggctaagaaaacaatcgccgttaaacctaagactgctgctgctaagaaagtgaccgcgaaggctaaggctaagcccgttcctcgtgccactgctgctgcaactaagaggaaagctgttgatgcgaagcccaaggctaaggctagaccagccaaggcagccaaaacggccaaggttacatctccggctaagaaagctgttgctgccacgaagaaagttgctacggtggccacaaagaagaagactccggttaagaaggttgtgaagccaaagacggttaagtctccagcaaagagggcttcttctagggttaagaagtgaagttagggtttgtaggtagaagaatggttaacgatagtttagacttgtataattcaatcatcttttatgcgacttttggttgcttttcttccctttcaagtgttccttgttattccacagttcctttggactacccccttaaacttaaattntnggtttttt

SEQ ID NO: 116503 - DNA, 889 bp, Arabidopsis thaliana
  unsure (1)..(889): unsure at all n locations
ccnnnnnnnnnnnnnnnnnnnnnnacgcccgtnnnnnnnnnnnnnnnnnnnnnnnnnnnnntggccgttctgcccaagcgtccgccctattactgcttttgttacgaaagacaaaaaaacaaaacaaaacaaaagtcagctcaggcgaagaacagatggctcgtaccaagcaaaccgctcgtaagtccaccggaggtaaagctccaaggaagcaacttgctactaaggctgctcgtaaatctgcaccaactactggtggagtcaagaaaccacatcgttaccgtcctggaactgttgctctccgtgaaatccgtaagtaccagaagagtactgagttgcttatcaggaaactgccatttcagaggctagtccgtgagattgctcaagatttcaagactgatttgcgtttccagagccatgctgtcttagctctccaggaagctgcagaagcatatcttgttggtctctttgaagacactaacctttgtgccattcatgccaagcgtgtgaccataatgcccaaagacattcagctcgctcgtcgtatcagaggtgaacgcgcttaagccaaccaagaatccgagatttggttcaagtagtttttgttttttatgaaagcaagatcttaattgctgtgttttttaaatctctgggtatgtagtagtaagagtagtaagaagtctgcaatctaagaatgttgtgttctttaagcttattattatgtgtgttgcgaactctttttaactcttttgttaaattcttatgttttcttaactcgtttgttcgtcaccaaaaacaaaaacaaaaaagnnnnnnnnnnnnnnnnnnnnnnnnnnnnnnnnnnnnnnnnnnnnnnnnnnnnnnnnnnnnnnnnnnnnnnnnnnnncan

SEQ ID NO: 116504 - DNA, 546 bp, Arabidopsis thaliana
  unsure (1)..(546): unsure at all n locations
nnnnnnnnnncagctctctacgactcactatanggaaagctggcacgcctgcaggtaccggtccggaattcccgggtctgacccacgcgtccgatcatcccctattactgcttttgttacgaaagacaaaaaaacaaaacaaaacaaaagtcagctcaggcgaagaacaggtatgatttgtttgtaattagatcaggggtttaggtctttccattactttttaatgttttttctgttactgtctccgcgatctgattttacgacaatagagtttcgggttttgtcccattccagtttgaaaataaaggtccgtcttttaagtttgctggatcgataaacctgtgaagattgagtctagtcgatttattggatgatccattcttcatcgtttttttcttgcttcgaagttctgtataaccagatttgtctgtgtgcgattgtcattacctagccgtgtatcgagaactagggttttcgagtcaattttgccccttttggttatatctggttcgataacgattcatctggattagggttttaagtggt

SEQ ID NO: 116505 - DNA, 737 bp, Arabidopsis thaliana
  unsure (1)..(737): unsure at all n locations
cttatacgactcactatatggaaagctggtacgcctgccggtacccgtcccgaattcccgggtcgacccacgcgttccgggcaaggacgtccccaatattatctttttcgaattcggagctcaagtttgaaattcggagaagctagagagttttctgagatggctcgtactaagcaaacagctcgtaagtctactggaggaaaggctcctaggaagcagcttgctacaaaggctgcacgtaagtctgcaccaaccactggaggagtcaagaagccccatcgttaccgtccaggaactgttgcactacgtgaaattcgtaagtaccagaagagtaccgagttgctgatcaggaagctccctttccagaggctagttcgtgagattgcccaggatttcaagactgacttgcgtttccagagccatgctgtgcttgcactccaggaggctgctgaagcataccttgtgggtctctttgaggacactaacctctggcgccatccatgccaagcgtgtgaccataatgcccaaagacattcagctcgctcgcaggatcagaggagaacgtgcttaattgtgattgggaagtagtgggttttgtnattnggggggttcccaaaaagaagtngnattganatggctaaaaactttnggggatggaccttggannanggggttttttccttcctcccggnntgccaagcggtaaaatcctgggcccccaacncgtttgggggatc

SEQ ID NO: 116506 - DNA, 835 bp, Arabidopsis thaliana
  unsure (1)..(835): unsure at all n locations
aattcggagctcaagtttgaaattcggagaagctagagagttttctgagatggctcgtactaagcaaacagctcgtaagtctactggaggaaaggctcctaggaagcagcttgctacaaaggctgcacgtaagtntgcaccaaccactggaggagtcaagaagccccatcgttaccgtccaggaactgttgcactacgtgaaattcgtaagtaccagaagagtaccgagttgctgatcaggaagctccctttccagaggctagttcgtgagattgcccaggatttcaagactgacttgcgtttccagagccatgcttgtgcttgcactcccaggaggctgctgaagcataccttgtgggtccttctttgaggaccactaacctctgccggccatccatgccaagcgtgttgaccataatgccccaaagacattcagctcgctcgcaaggatcagaggagaacgtgcttaattgtgattgggaagtagttggattatgtgaatgtgggtggttttctaaatagatagttggaattagataatggcttaaaaagcttttgggtgtaggagacttggaaacaatggtgtttttttttttcttttctttctgtttcttgtctagtcggtttatgatttgcttgtgttcttcttagctacgttttgtggtgtgtattgctttcttctttggcaatgttgaacaccttttgttgttgaattcatctctgaaacatatgaatatgttaaagtttctgactcaaaaaaaaaaacaaagggcggcagctctagaggatccaagcttacgtacgcgtgcaggtgacgtcatagatcttctatagt

SEQ ID NO: 116507 - DNA, 686 bp, Arabidopsis thaliana
  unsure (1)..(686): unsure at all n locations
aattggagttccggcccagacccacgcgtccggttcaatcatcccctattactgcttgtttacgttagacaaaaaaacaaaacaaaacaaaagtcagctcaggcgaagaacagatggctcgtaccaagcaaaccgctcgtaagtccaccggaggtaaagctccaaggaagcaacttgctactaaggctgctcgtaaatctgcaccaactactggtggagtcaagaaaccacatcgttaccgtcctggaactgttgctctccgtgaaatccgtaagtaccagaagagtactgagttgcttatcaggaaactgccatttcagaggctagtccgtgagattgctcaagatttcaagactgatttgcgtttccagagccatgctgtcttagctctcccagggaagctgcagaagcatatcttgttggtctctttgaagaacactaacctttgtgccattcatgccaagcgtgtgaccataaatgcccaaaagncatttcaagctcgntcgntcggtatcagaaggtgaacggcgcttaagccaaccanggaattccgaggattttggtttcaaagtaagttttttggtttttttnattgaaaagcaaagnnccttaaaattgcntngtggtttttttaaaaaactcttggggaatttaggtnggnaaggnnttgntaanaaggctttttc

SEQ ID NO: 116508 - DNA, 1292 bp, Arabidopsis thaliana
  unsure (1)..(1292): unsure at all n locations
cttcaactgctgcgtctagctgtccttccttcttcatttgcttcttcttctctagctcagcgcggatcgctgcagtagtaccctgacgtagcctttcttcttcctttactttctcatcttctatctctcaaaagaaaagcagacaactttatttgcaaaaacagagttttttttttcttatcttgagaaagttcaacagaagatgatgttcgagaaagacgatctgggtctaagcttaggcttgaattttccaaagaaacagatcaatctcaaatcaaatccatctgtttctgttactccttcttcttcttcttttggattattcagaagatcttcatggaacgagagttttacttcttcagttccaaactcagattcgtcacaaaaagaaacaagaactttcatccgaggaatcgacgtgaacagaccaccgtctacagcggaatacggcgacgaagacgctggagtatcttcacctaacagtacagtctcaagctctacagggaaaagaagcgagagagaagaagacacagatccacaaggctcaagaggaatcagtgacgatgaagatggtgataactccaggaaaaagcttagactttccaaagatcaatctgctattcttgaagagaccttcaaagatcacagtactctcaatccgaagcagaagcaagcattggctaaacaattagggttacgagcaagacaagtggaagtttggtttcagaacagacgagcaagaacaaagctgaagcaaacggaggtagactgcgagttcttacggagatgctgcgagaatctaacggaagagaaccgtcggctacaaaaagaagtaacggaattgagagtacttaagctctctcctcagttctacatgcacatgagcccacccactactttgaccatgtgcccttcatgtgaacacgtgtcggtcccgccaccacaacctcaggctgctacgtcagcgcaccaccggtcgttgccggtcaatgcgtgggctcctgctacgaggatatctcacggcttgacttttgacgctcttcgtcctaggtcctaagtctttttacttgcaaccaaagggcattttggtcgttttttaagtttcatggaccagatatgcatgtagttgttaacatgtatgtattttcttagaaagaaagaaaaacagattaatattaaaaaaaaaaaaggnnnnnnnnnnnnnnnnnnnnnnnnnnnnnnnnnnnnnnnnnnnnnnnnnnnnnnnnnnnnnnnnnnnnnnnnnnnnnnnnnnnnnnnnnnnnnnnnnnnnn

SEQ ID NO: 116509 - DNA, 646 bp, Arabidopsis thaliana
  unsure (1)..(646): unsure at all n locations
nnnnnnnnnnnnnnnnnnnnnnnnnnnnnnnnnnnnnnnnnnnnnnantccccacttatcccccctttgggaantgtcccctcggtccgnccggatcccggncncccccacgccttcacaaacaaaacacacatcaaaaacgattttacaagaaaaaaatatctgaaaaatgtcagagaccaacaagaatgccttccaagccggtcaggccgctggcaaagctgaggagaagagcaatgttctgctggacaaggccaaggatgctgctgctgcagctggagcttccgcgcaacaggcgggaaagagtatatcggatgcggcagtgggaggtgttaacttcgtgaaggacaagaccggcctgaacaagtagcgatccgagtcaactttgggagttataatttcccttttctaattaattgttgggattttcaaataaaatttgggagtcataattgattctcgtactcatcgtacttgttgttgtttttagtgttgtaatgttttaatgtttcttctccctttagatgtactacgtttggaactttaagtttaatcaacaaaatctagtttaagttctaaaaaaaaaaannnaagggcggccgtcgtaccagtatccaagcttacgtacgcgtgcatgcgagtcaag

SEQ ID NO: 116510 - DNA, 374 bp, Arabidopsis thaliana
cacacttcaaaaacgattttacaagaaataaatatctgaaaaaatgtcagagaccaacaagaatgccttccaagccggtcagaccgctggcaaagctgaggagaagagcaatgttctgctggacaaggccaaggatgctgcagctggtgctggagctggagcacaacaggcgggaaagagtgtatcggatgcggcagcgggaggtgttaacttcgtgaaggacaagaccggcctgaacaagtagcgattcgggtcaaatttgggagttataatttcccttttctaattaactgttgggattttcaaataaacgatctttgatcaagaattgcattatatatatataaatatattgcaaaattattagacgagcc

SEQ ID NO: 116511 - DNA, 1858 bp, Arabidopsis thaliana
gaacaaagagggtttgattgattcacttgaaaaagagaaaacacagctttggaaaatggagtcacagttgacacgtccttatggtcatgagcaagcagaagaaccaatcagaattcaccatccagaagaagaagagcatcatgagaagggagcatccaaagtgttgaagaaagtaaaagaaaaggctaagaaaatcaagaacagtctcactaaacatggaaatggtcatgatcacgatgtggaagatgatgatgatgagtatgacgagcaagacccagaagttcacggcgcaccagtgtatgaatcctctgccgtgagaggtggtgtaacgggtaaacctaagtctcttagtcatgccggagaaactaatgttccggcatcggaggagattgttcctccagggacaaaagtttttcctgtcgtgtcttctgaccacaccaaacccattgagcctgtatcattacaagatacctcttacggacatgaggcactggctgatcctgtaagaacgacggaaacatcggactgggaagcgaaaagagaggcaccgactcattatcctctcggagtgtcagaattttcagacagaggagagagcagagaggctcatcaagagccattgaacactcctgtgtctctgctttcagcaacagaggacgtgactaggacgtttgctcctggtggtgaagatgactatctcggtggtcaacggaaagtcaacgtcgagacgccaaaacgtttggaggaagatccggctgctccaggaggaggatcggattatctcagtggtgtatctaattatcagtccaaagttactgatcccacgcataaagaagctggagtaccagagattgctgagtctcttggtagaatgaaagtgactgatgagtctcctgatcagaaatcaagacaaggacgcgaagaagactttccgacgagaagccatgagtttgatctgaagaaggaatctgatatcaacaagaattctccggcaagatttggaggggaatcaaaagctgggatggaggaagattttccgacaagaggtgatgtgaaagtagagagtggattgggaagagacttaccgacgggaactcatgatcagttctcaccagaactatctcgtcccaaagagagagatgattctgaggaaaccaaagatgagtcgacacatgagacaaaaccaagcacctacacagagcagttagcttcagctacatcagccataactaacaaagctatagccgcaaagaacgtcgttgcctcaaagctaggttacaccggagagaatggcggcgggcaaagcgagagccctgtaaaagatgaaactccgagatctgttactgcttacgggcagaaagtggcgggaactgttgctgagaagttgactccggtttacgaaaaagtcaaagaaacaggatcaacggtgatgacaaagctacctctctccggaggtggaagtggagtgaaggagacgcaacaaggggaagagaaaggtgtgacggctaaaaattatatatcagagaagctgaaacctggagaagaggacaaagctttatcggaaatgatagctgagaaacttcattttggaggaggaggagagaagaagacaacggctacaaaggaggtggaagtgacggttgagaagataccttccgaccagatagcggaggggaaaggacatggtgaggcggttgcagaggaaggaaaaggtggagaaggaatggtggggaaagttaaaggagcggtcacttcttggctcggtggtaaaccgaagtcgccacggtccgttgaagagtctccacaatcacttggcaccaccgttggtaaaactccctcgtccttgtgttacacgtaa

SEQ ID NO: 116512 - DNA, 2452 bp, Arabidopsis thaliana
  unsure (1)..(2452): unsure at all n locations
ctctgttttactcaagatcaaacgtataaacaaacaatcatcaggaataaagggtttgattacttctattggaaagaaaaaaatctttggaaaatggatcaaacagaggaaccaccactcaacacacaccagcagcacccagaagaagttgaacatcatgagaatggtgcgactaagatgtttaggaaagtaaaggctagagctaagaagttcaagaacagtctcactaaacatggacaaagcaatgagcatgagcaagatcatgatttggttgaagaagatgatgatgatgacgagctagaacctgaagtgatcgatgcaccaggcgtaacaggtaaacctagagaaactaatgttccagcatcggaggaaattattccaccagggacaaaggtgtttcctgtcgtgtcttccgattacaccaaacccactgaatctgtaccagtacaagaggcctcttacggacacgatgcaccggctcattctgtaaggacgacgtttacatcggacaaggaagagaaaagagatgtaccgattcatcatcctctgtccgaattgtcagacagagaagagagtagagagactcatcatgagtcattgaacactccggtctctctgctttctggaacagaggatgtaacgagtacgtttgctccaagtggtgatgatgaatatcttgatggtcaacggaaggtcaacgtcgagaccccgataacgttggaggaagagtcggctgtttcagactatcttagtggtgtatctaattatcagtccaaagttactgatcccaccaaagaagaaactggaggagtaccggagattgctgagtcttttggtaatatggaagtgactgatgagtctcctgatcagaagccaggacaatttgaaagagacttgtcgacgagaagcaaagaattcaaagagtttgatcaggactttgactctgttctcggtaaggattcgccggcgaaatttccaggtgaatcaggagttgttttcccggtgggctttggtgacgagtcaggagctgagctggaaaaagattttccgacgagaagtcatgattttgatatgaagactgaaactggaatggacacgaattctccatcaagaagccatgaatttgatctgaagactgaatctggaaacgacaagaattctccgatgggctttggtagtgaatcaggagctgagctggaaaaagaatttgatcagaagaacgattctggaagaaacgagtattcgccggaatctgacggcggtttaggagctccgttgggaggaaattttccggtgagaagtcatgagttggatctgaagaacgaatctgatatcgacaaggatgtgccgacgggatttgacggagaaccagattttctggcgaagggaagacctggatacggtgaggcatcagaagaggataaatttccggcgagaagtgatgatgtggaagtagagactgagctgggaagagacccaaagacggagactcttgatcaattctcaccggaactttctcatcctaaagaaagagatgagtttaaggagtccagagatgattttgaggagacgagagatgagaaaacagaggagccaaaacagagcacttacacagagaagtttgcttcaatgctaggttactccggagaaattccggtgggagatcaaactcaagtggcgggaactgttgatgagaagttgactccggtcaatgagaaggatcaagaaacagagtctgccgtgacgacgaagttacctatctccggaggtggaagtggagtagaggagcaacgaggggaagataaaagtgtgtcgggtagagattatgtggcggagaaactgacaactgaagaagaagacaaagccttttctgatatggttgccgagaaacttcagattggaggagaagaagagaagaaggaaacgacgacaaaggaagtggagaagatctctaccgagaaggcagcatcggaggagggtgaggcggtggaagaggaagtgaaaggaggaggaggaatggttgggaggattaaaggatggttcggtggtggtgcgactgatgaggtgaagccagaatcgccacattctgttgaagaggctccaaaatcatctggctggtttggtggtggtgcgacggaggaggtgaagccaaaatcgcctcattccgttgaagagtctccacaatcacttggctccactgttgttccggtgcagaaggagctttaagaatatgagaactgagattttcaagtttcactttggatgtttatgtgtgttttgtttgacgtctttgatgtattatggtataattccttgtttgtgtgaaaaaaggacatttggttaataaattgttcggctttggattaaaaaaaaaaaaaaagnnnnnnnnnnnnnnnnnnnnnnnnnnnnnnnnnnnnnnnnnnnnnnnnnnnnnnnnnnnnnnnnnnnngcc

SEQ ID NO: 116513 - DNA, 625 bp, Arabidopsis thaliana
  unsure (1)..(625): unsure at all n locations
ctcattattnnccnccaggaaataaatttcccntnaaattnttcccnaaacctncaccttaananaacccaaccctttcctatatgttcccnaaaccttcantttgaggagaagaagagaagaaggaaccgccgccaaaggaagtggagaagatctctccccagaagccaccatcggaggagggtgagccggtggaacaggaagtgaaaggaggaggaggaatggtcgggaggattaaaggatggttcggtggtggtgcgactgatgaggtgaggccagaatcgccacattctgttgaagaggctccaaaatcatctggctggtttggtggtggtccgacgcaccaggtgaagccaaaatcgcctcattccgttgaagagtctccacaatcacttggctccactgttgttccggtgcagaaggagctttaagaatatgagaactgagattttcaagtttccctttggatgtttatgtgtgttttgtttgacgtctttgatgtatcatggtataactccttgtttgtgtgggaagaaatataaaaaaagaacgaacccatagagcggccgctctagaggatccaagcttacgtacgcggcgatgcgacgtcatagtcttctatagt

SEQ ID NO: 116514 - DNA, 915 bp, Arabidopsis thaliana
acccacgcatccacggacgcgtgggctttttgatcaatctctcattcaaaatctcattctctctagtaaacaagaacaaaaaaatggcggatacagctagaggaacccatcacgatatcatcggcagagaccagtacccgatgatgggccgagaccgagaccagtaccagatgtccggacgaggatctgactactccaagtctaggcagattgctaaagctgcaactgctgtcacagctggtggttccctccttgttctctccagccttacccttgttggaactgtcatagctttgactgttgcaacacctctgctcgttatcttcagcccaatccttgtcccggctctcatcacagttgcactcctcatcaccggttttctttcctctggagggtttggcattgccgctataaccgttttctcttggatttacaagtacgcaacgggagagcacccacagggatcagacaagttggacagtgcaaggatgaagttgggaagcaaagctcaggatctgaaagacagagctcagtactacggacagcaacatactggtggggaacatgaccgtgaccgtactcgtggtggccagcacactacttaagttaccccactgatgtcatcgtcatagtccaataactccaatgtcggggagttagtttatgaggaataaagtgtttagaatttgatcagggggagataataaaagccgagtttgaatctttttgttataagtaatgtttatgtgtgtttctatatgttgtcaaatggtaccatgttttttttcctctcttattgtaatttgcaagtgttatgtatgttgtactttatttggcttctttgtcacttagaaacggtggtctacatatggaaaaggtcttgttttgttaaaaaaaaaaaaacccacgcgtccg

SEQ ID NO: 116515 - DNA, 2455 bp, Arabidopsis thaliana
  unsure (1)..(2455): unsure at all n locations
cccacgcgtccgcccacgcgtccgcccacgcgtccgcaattccttaaccaacaatattacaaataagctcctatcttctttctttcttttagagatcttgtaatctcctcttagttaatcttctattgtaaaactaagatcaaaagtctaaatggagattaacggggcacacaagagcaacggaggaggagtggacgctatgttatgcggcggagacatcaagacaaagaacatggtgatcaacgcggaggatcctctcaactggggagctgcagcggagcaaatgaaaggtagccatttggatgaagtgaagagaatggttgctgagtttaggaagccagttgtgaatcttggtggtgagactctgaccattggacaagtggctgcgatctcaactattggtaacagtgtgaaggtggagctatcggagacagctagagccggtgtgaatgctagtagtgattgggttatggagagtatgaacaaaggcactgatagttatggtgttactactggttttggtgctacttctcatcggagaaccaaaaacggtgtcgcacttcagaaggaacttattagattccttaacgccggaatattcggaagcacgaaagaaacaagccacacattgccacactccgccacaagagccgccatgcttgtacgaatcaacactctcctccaaggattttccggtatccgatttgagattctcgaagcaattaccagtttcctcaacaacaacatcactccatctctccccctccgtggtacaatcaccgcctccggagatctcgttcctctctcctacatcgccggacttctcaccggtcgtcccaattccaaagctactggtcccaacggtgaagctttaacagcagaggaagctttcaaattagcaggaatcagctccggattctttgatctccagcctaaggaaggtctcgcgctagtcaatggcacggcggttggatctggaatggcgtcaatggtgttattcgaaacgaatgttctctctgttttggctgagattttgtcggcggttttcgcagaggtgatgagtggtaagcctgagttcaccgatcatctcactcacagacttaaacatcatcccggtcaaatcgaagcggcggcaataatggagcatatcctcgacggaagctcgtacatgaaattagctcagaagcttcacgagatggatccgttacagaaacctaaacaagatcgttacgctcttcgtacttctcctcaatggttaggtcctcaaatcgaagtgatccgttacgcaacgaaatcgatcgagcgtgagattaactccgtcaacgataatccgttgatcgatgtttcgaggaacaaggcgattcacggtggtaacttccaaggaacaccaatcggagtttcaatggataacacgagattggcgatagcagcgattggtaaactcatgtttgctcaattctcagagcttgtgaatgatttctacaacaatggtttaccctcgaatctaaccgcttcgaggaatccaagtttggattatggattcaagggagctgagattgcaatggcttcttattgttcagagcttcaatacttagctaatcctgtgactagccatgttcaatcagcagagcaacataaccaagatgtcaactctttgggactaatctcgtctcgcaaaacttctgaagctgttgatattctcaagcttatgtcaacaacgttcctcgttgcgatttgtcaagctgtggatttgagacatttggaggagaatttgagacagactgtgaagaacactgtctctcaagtggcgaagaaagttcttactactggagtcaatggtgagcttcatccttctcgcttctgcgaaaaggatttactcaaagttgtagaccgtgaacaagtctacacatacgcggatgatccttgtagcgcaacgtacccgttgattcagaagctgagacaagttattgttgaccatgctttagtcaatggtgagagtgagaagaatgcagtgacttcaatcttccataagattggagctttcgaggaggagcttaaggcagtgctaccgaaagaagtggaagcagcaagagcagcctacgataacggaacatcggctatcccgaacaggatcaaggaatgtaggtcgtatccattgtatagattcgtgagggaagagcttggaacagagcttttgaccggagagaaagtgacgtcgcctggagaagagttcgacaaggttttcacggcgatttgtgaaggtaaaatcattgatccgatgatggaatgtctcaacgagtggaacggagctcccattccaatatgttaaggggtttagtccccctgtttttttcttcccataaagtctttttttttttacatgcctgaataattttaccaaatgattctctgtggagtggttctattattaatttgggtaactatnaagnttttc

SEQ ID NO: 116516 - DNA, 2611 bp, Arabidopsis thaliana
  unsure (1)..(2611): unsure at all n locations
nnnnnnnnnnnnnnnnnnnnnnnnnnnccttacctaacaacaacactaacattgtccttcttatttaaacgtctcttctctcccccgcctccccacaagtccaaaaaccaccaacaattcaaactctctctttctcctttcaccaaacaatacaagagatctgatctcattcacctaaacacaacttcttgaaaaccaatggatcaaatcgaagcaatgttgtgcggcggaggagagaagacaaaagtggcggttactacgaagactttggcagatccattgaattggggtttagcagcggatcaaatgaaaggaagtcatttagatgaagtgaagaagatggtcgaagagtatcgtagaccagtcgtgaatcttggcggagaaacactgacgatcggacaagttgctgccatctccaccgtaggaggcagcgttaaggttgagttagcggagacttcaagagccggtgtgaaagctagcagtgattgggttatggagagcatgaacaaaggtactgacagttacggagtcaccaccggctttggtgctacttctcaccggagaaccaaaaacggcaccgcattacaaacagaactcattagatttttgaacgccggaatattcggaaacacgaaggagacatgtcacacactgccgcaatccgccacaagagccgccatgctcgtcagagtcaacactcttctccaaggatactccgggatccgattcgagatcctcgaagcgattacaagtctcctcaaccacaacatctctccgtcactacctctccgtggaaccattaccgcctccgggcatctcgttcctctctcttacatcgccggacttctcaccggccgtcctaattccaaagccaccggtcccgacggtgaatcgctaaccgagaaagaagcttttgagaaagccggaatcagtactggattcttcgatttacaacctaaggaaggtttagctctcgttaatggcacggcggttggatctggaatggcgtcgatggttctattcgaagcgaatgtccaagcggtgttagcggaggttttatcagcgatcttcgcggaggttatgagcgggaaacctgagtttaccgatcatctgactcatcgtttaaaacatcatcccggacaaatcgaagcggcggcgataatggagcacatactcgacggaagctcatacatgaaattagctcaaaaggttcacgagatggatccattgcagaaaccaaaacaagatcgttacgctcttcgtacatctcctcaatggctaggtcctcaaattgaagtaatccgtcaagctacgaaatcgatagagcgtgaaatcaactccgttaacgataatccgttgatcgatgtttcgaggaacaaggcgattcacggtggtaacttccaaggaacaccaatcggagtttctatggataacacgagattggcgattgctgcgattgggaagctaatgtttgctcaattctctgagcttgttaatgatttctacaacaatggacttccttcgaatctaactgcttcgagtaatccaagtttggattatggattcaaaggagcagagattgctatggcttcttattgttctgagcttcaatacttggctaatccagtcacaagccatgttcaatcagctgagcaacataatcaagatgtgaactctcttggtttgatctcgtctcgtaaaacatctgaagctgtggatattcttaagctaatgtcaacaacgttccttgtggggatatgtcaagctgttgatttgagacatttggaggagaatctgagacaaactgtgaagaacacagtttctcaagttgctaagaaagtgttaaccactggaatcaacggtgagttacatccgtcaaggttttgcgagaaggacttgcttaaggttgttgatcgtgagcaagtgttcacgtatgtggatgatccttgtagcgctacgtacccgttgatgcagagactaagacaagttattgttgatcacgctttgtccaacggtgagactgagaagaatgcagtgacttcgatctttcaaaagattggagcttttgaagaggagcttaaggctgtgcttccaaaggaagttgaagcggctagagcggcttatgggaatggaactgcgccgattcctaaccggattaaggaatgtaggtcgtatccgttgtataggttcgtgagggaagagcttggaacgaagttgttgactggagaaaaggttgtgtctccgggagaggagtttgataaggtcttcactgctatgtgtgaaggtaaacttattgatccgttgatggattgtctcaaggaatggaacggagctccgattccgatttgctaagacagcattcctctgtttctgttctgtgtttttgtgttttgtttcaattttaatttcctgtgttaatgtttgaattgagtttttgattgtaatgtgaatggtgtcaccccttgtatgatatatatgatataaaaacttacgtgtnnnnnnnnnnnnnnnnnnnnnnnnnnnnnnnnnnnnnnnnnnnnnnnnnnnnnnnnnnnnnnnnnnnnnnnnnnnnnnnnnnnnnnnnnnnnnnnnnnnnnnnnnnnnnnnnnnn

SEQ ID NO: 116517 - DNA, 1779 bp, Arabidopsis thaliana
  unsure (1)..(1779): unsure at all n locations
ccggaacgcccggggccgcccaaccgtcccgtcaaaaagactctttttacgatcattttacctactcatccatgacgagggtcggttattcacactacagctgctttacatctatttcgtaagtgggtctttcaaagtcatctcctttgatctactttcattcccgcgccgccgatttggtgataagtcagtagaaatggataaggagaaatctccagcacctccttgtggaggtcttcctcctccatctccatcaggccgatgctctgcattctcagaagctggtcccattggtcatggttcagatgctaatcgaatgagtcatgatattagccgtatgcttgataacccacctaagaagattggacatcggcgagctcattctgaaatacttactctccctgatgatttgagctttgatagtgatcttggtgtggttggtaatgctgctgatggagcttctttctctgatgagactgaagaagatttgctctctatgtatcttgatatggataagtttaattcttctgctacatcttctgcccaagttggtgagccatcaggaactgcttggaaaaatgagacaatgatgcagacaggcacaggctcaacttccaatcctcagaatacggttaatagtcttggcgaaaggccaagaatcaggcatcaacatagccaatctatggatggttcaatgaatatcaatgagatgcttatgtcgggaaatgaagatgattctgctattgatgctaagaagtctatgtctgctactaaacttgctgagcttgctctcattgatcctaaacgtgctaagaggatatgggcaaacaggcagtccgcagcacgatcaaaagaaaggaagacgagatacatatttgagcttgagagaaaagtacagactttgcaaacagaggctacaactctctcagcccagttgaccctcttacagagagacacaaatggcttgactgttgaaaacaatgagctgaagctgcggttacaaacaatggagcagcaggttcacttgcaggatgaactaaacgaagcactaaaggaggaaatccagcatctgaaggtgttgactggccaagttgctccatcagcgttgaactatgggtcgtttggatcaaaccagcagcaattctattccaacaatcagtcaatgcaaacaatcttagctgcaaaacagttccagcaacttcagattcattcacagaagcagcaacaacaacaacaacaacaacaacagcaacaccaacagcagcagcagcaacagcaacagtatcagtttcaacagcaacagatgcaacagcttatgcagcagcggcttcaacagcaagaacaacaaaatggagtaagactcaagccttcacaagcccagaaagagaactgaggaatatgaatatgtcccacggtattggcgttttggtacgtagaagaaaccttttggtaaggtcattgaagataaacatttgggtaagcccaaagaaacagagttccgtgcattgcaaatatgcaatgcactgcaattattagttgtttggatttgatatagagactgagtctcgaaaccatagtatgtaaaaatataatcacgttcaaaagctgttaatttgttataatcttataacaattgtgttttaagataccaacctactttgtgttatgatatttgttcactaaaaaaaaaaaaaaaaaagnnnnnnnnnnnnnnnnnnnnnnnnnnnnnnnnnnnnnnnnnnnnnnnnnnnnnnnnnnnnnnnnnnnnnnnnnnncatt

SEQ ID NO: 116518 - DNA, 497 bp, Arabidopsis thaliana
cctgtccgatcgaattctttcctttccttaatctaatctcctaccaagaggcgctctcttctcttcctctaatttccttctcccttactaaatttccttctctaatctctactttgtccaaaagcatttaactttaaccggaaaaatcttacatttttttcctcctggatctctctctctatatctgcagattcacactacagctgatttagatctatttcgtaagtgggtctttcaaagtcgtctcctttgatctactttgattcaggggtcgttgatttggtgataagtcagtagaaatggataaggagaaatctccagcacctccttgtggaggtcttcctcctccatctccatcaggtcgatgctctgcattctcagaagctggtcccattggtcatggttcagatgctaatcgaatgagtcatgatattagccgtatgcttgataacccacctaagaagattggacatcggcgagctcattctgaaatactt

SEQ ID NO: 116519 - DNA, 887 bp, Arabidopsis thaliana
  unsure (1)..(887): unsure at all n locations
nnnnnnnnnnnnnnnnnnnnnnnnnnnnnnnnnnnnnnngctggctacgcccctgcaggtaccggtccggatttcccgggtcggcccacgcgacggtacggctgcgagaagacgacagaagggggagaagagatcgagagaagaatagtttgatcatcttgtgagaaaaataatggctgcttcagtgatgctatcttcggtgacattgaaaccagctggtttcacggtggagaagacggcggctagaggattaccgtcgctcacaagagctcgtccctccttcaaaattgtcgccagtggcgtcaagaagatcaagaccgacaagcccttcggaattaacggcagcatggacttgagggacggcgtcgacgcctccggcagaaagggcaagggatacggtgtttacaagtacgtcgacaagtatggagctaacgtcgatggatacagtcctatttacaacgagaacgagtggtcagcgagtggtgacgtgtacaagggaggagtcaccggattggcaatttgggcggtaactctcgccggaattcttgccggaggtgctcttcttgtgtacaacacaagtgctttggctcagtaaatcttaaagttgttagcgcatgtgtaatcatgtttctataaatgtttctgtgttgttctctttctctctaatgttgtaaaactcagacatactttgaatttataagacttctagtgtttgtatataaaatcatcttcctaaaaaaaaaaaaaaaaaaaaaaaaaaagggcggccgctctagaggatccaagcttacgtacgcgtgccatgcgacgtccttacctctttctattggcgtcaccctaaattcaatttcacttgggccgtcgcttttaacaacggtcttgaactg

SEQ ID NO: 116520 - DNA, 824 bp, Arabidopsis thaliana
  unsure (1)..(824): unsure at all n locations
aagctggtacgcctgcaggtaccggtccgtttttcccgggtcgacccaccgcgtccgcccccacgcgtccgtacggcctgcgaacgagtccgcccacgcgtctgtacggctgcggaagacgacagaggggggggatcgagagaagaatagtttgatcatcttgtgagaaaaataagggctgcttcagtgatgctatcttcggtgacattgaaaccagctggtttcacggtggagaagacggcggctagaggattaccgtcgctcacaagagctcgtccctccttcaaaattgtcgccagtggcgtcaagaagatcaagaccgacaagcccttcggaattaacggcagcatggacttgagggacggcgtcgacgcctccggcagaaagggcaagggatacggtgtttacaagtacgtcgacaagtatggagctaacgtcgatggatacagtcctatttacaacgagaacgagtggtcagcgagtggtgacgtgtacaaggcaggagtcaccggattggcaatttgggcggtaactctcgccggaattcttgccggaggtgctcttcttgtgtacaacacaagtgctttggctcagtaaatcttaaagttgttagcgcatgtgtaatcatgtttctataaatgtttctgtgttgttctctttctctctaatgttgtaaaactcagacatactttgaatttataagacttctagtgtttgtataaaaaacacacccaaagggcggccgctctagaggatccaagcccacgcacgcgtgcgtgcgacgtcatagctcgtagtagnnnnnnnnnnnnnnnnnnnnnnnn

SEQ ID NO: 116521 - DNA, 723 bp, Arabidopsis thaliana
tgcaggtaccggtccgaaattcccgggtcgacccacgcgtccgcccaagcgtccgcccacgcgtccgcccacgcgtccgcccacgcgtccggctatcttcggtgacattgaaaccagctggtttcacggtggagaagacggcggctagaggattaccgtcgctcacaagagctcgtccctccttcaaaattgtcgccagtggcgtcaagaagatcaagaccgacaagcccttcggaattaacggcagcatggacttgagggacggcgtcgacgcctccggcagaaagggcaagggatacggtgtttacaagtacgtcgacaagtatggagctaacgtcgatggatacagtcctatttacaacgagaacgagtggtcagcgagtggtgacgtgtacaaggcaggagtcaccggattggcaatttgggcggtaactctcgccggaattcttgcggccgtgctcggtgctcttcttgtgtacaacacaagtgctttggctcagtaaatcttaaagttgttagcgcatgtgtaatcatgtttctataaatgtttctgtgttgttctctttctctctaatgttgtaaaactcagacatactttgaatttataagacttctagtgtttgtatatatattcatcttcctatcaaaaaaaaaaaaaaaaaaaaaaaagggcggccgctctagaggatccaagcttacggacgcgtgcatgcgacgtcatag

SEQ ID NO: 116522 - DNA, 678 bp, Arabidopsis thaliana
  unsure (1)..(678): unsure at all n locations
cccacgcgtccgcccacgcgtccgcccacgcgtccgcccacgcgtccggctatcttcggtgacattgaaaccagctggtttcacggtggagaagacggcggctagaggattaccgtcgctcacaagagctcgtccctccttcaaaattgtcgccagtggcgtcaagaagatcaagaccgacaagcccttcggaattaacggcagcatggacttgagggacggcgtcgacgcctccggcagaaagggcaagggatacggtgtttacaagtacgtcgacaagtatggagctaacgtcgatggatacagtcctatttacaacgagaacgagtggtcagcgagtggtgacgtgtacaagggaggagtcaccggattggcaattttgggcggtaacctctcgccggcaattcctgtcgccggaggtgctcttccttgtgtacaacacaagtgctttggcccagtaaatcttcaagttgtgtaagcgcatgtgtaaacatggttccaaacaatggttcgggggtggccccttccccccaaaggtggaaaaaccggccanccttgaatttactaaacccccagggtggatcaaaacggccgggatcctgaacccgggggccccagtttaagggncanccgggngnccacttgncccttgangggaattcanttggaanatggnaa

SEQ ID NO: 116523 - DNA, 724 bp, Arabidopsis thaliana
  unsure (1)..(724): unsure at all n locations
cctgcttgtaccggtccggaattcccggttcgacccactcgtcacgcccacgcgtccgcggacgcgtgggctgcgagaagacgacagaagggggagaagagatcgagagaagaatagtttgatcatcttgtgagaaaaataatggctgcttcagtgatgctatcttcggtgacattgaaaccagctggtttcacggtggagaagacggcggctagaggattaccgtcgctcacaagagctcgtccctccttcaaaattgtcgccagtggcgtcaagaagatcaagaccgacaagcccttcggaattaacggcagcatggacttgagggacggcgtcgacgcttccggcagaaagggcaagggatacggtgtttacaagtacgtcgacaagtatggagctaacgtcgatggatacagtcctatttacaacggggaaccgagttggtcaaccgagttggtaaccgttttcaaagggggggggtccacccggttttggcaatttttgggcgggtaaccttttcgcccggattttttttcccgggggggcccttttctttgntntacaaacaaaaagtncttttggctcagnaaatcttaaaagttttttagnncatttttaaaacnaggttttnnaaaatntttccngggttgnccctttcccccnaantttgaaaccccgnanacttnattttaagctctgggtttttnaaaaaaaaaaaaatttc

SEQ ID NO: 116524 - DNA, 862 bp, Arabidopsis thaliana
  unsure (1)..(862): unsure at all n locations
gtgtcggcactggtgcgctcgccttggctgcgtcgacccgtagcggtcagcctctcgtgacagtacgtcgcctgagttgaaagccataaatagaactgcgcgatagcactgcccgtcgcgagcatgtggagacgcactccacggaaaggagcttgatccccctcgctctatgaaagtcacnnnnnnaagctggtacgcctgcaggtaccggtccggaattcccgggtcgacccacgcgtccgcttcatcaaatctcacaaatcttcaacacttaatcacaaatctcaaagcttcggataccaaatggctcgtaccaagcaaaccgcaaggaaatccaccggaggaaaagccccaaggaaacaactcgcaacaaaggcggcgaggaaatcagctccggcgaccggaggagtaaagaagccacacagattccgtcctggaactgttgccctaagagaaatcaggaagtatcagaagagcactgagcttctgatccgcaagcttccgttccagcgtttggttcgtgagatcgctcaggatttcaaaacagatctgcgtttccagagcagcgccgtcgcagcacttcaggaagcggctgaagcatacctcgttggattgtttgaagacaccaatctttgcgcgattcatgctaagagagtcactatcatgcctaaggatattcaattggcgaggagaattagaggcgagagggcttaagaaggagattgaagtactctagactgtgatcggtatgcttatgtatatctttcgttttccctaatttccgggtttagggttggattaggttttgcgtttatgttgttcgttcaaatgcctcaatgaatcaaaattaagtctgttttcg

SEQ ID NO: 116525 - DNA, 637 bp, Arabidopsis thaliana
aatagttggatcatcttgtgagaaaaataatggctgcttcagggatgctatcttcggggacattgaaaccagctggtttcacggtggagaagacggcggctagaggattaccgtcaagaagatctagtccgcccagcccttcggaattaacgccagcatggacttgagggacggcgtcgacgcctccggcatgaaagggcaagggatacggtgttttcaagtacgtcgccaagtatggagctaacgtcgatggacacagtcctatttaccatcgagaaccgagtggtcacccgagtggtgacgtgtacaagggaggagtcacccggattggcaatttgggcggtaactctcgccggaattcttgccggaggtgctcttcttgtgtccaacacaagtgctttggctcagtaaatcttaaagttgttagcgcatgtgtaatcatgtttcaacaaaagcttctgggtggttctctttctcccaaacgttgtaaaactcacacacactttgaatttataagacttctagtgtttgtattaacaaaaagtataatataaaaaaaagacaaacccctaaagcggccgctctagaggatccaagcttacgtacgcgtgcaggcgacgtcataatcttctatagt

SEQ ID NO: 116526 - DNA, 650 bp, Arabidopsis thaliana
  unsure (1)..(650): unsure at all n locations
tgggtgccgggccccccctacgggtcgacggtatcgataagcttgatatcgaattcgcggccgcagtgatgctatcttcggtgacattgaaaccagctggtttcacggtggagaagacggcggctagagggattaccgtcgctcacaagagctcgtccctccttcaaaattgtcgccagtggcgtcaagaagatcaagaccgacaagcccttcggaattaacggcagcatggacttgagggacggcgtcgacgcctccggcagaaagggcaagggatacggtgtttacaagtacgtcgacaagtatggagctaacgtcgatggatacagtcctatttaccaacgagaacgagtgacgtagtggtcagcgagtggtgacgtgtacaagggaggagtcaccggattggcaatttgggcggtaacctctcgccggcatttcttgcccggaggtgctcttccttgtgtacaacacaagtgctttggcctcagtaaatcttaaaattgttanccctgtgnaaccagttccaaaaatgttcnggggtgtcccttnggcccgaattcctgaacccggggggccacaattttaaacggcccacccggtgggcccactttttncctaaganggaattttncttggaananggaacgtgc

SEQ ID NO: 116527 - DNA, 681 bp, Arabidopsis thaliana
  unsure (1)..(681): unsure at all n locations
acgactcactatagggaaagctggcacgcctgcaggtaccggtccgtccggaattcccgggtcgacccacgcgtccgcccacgcggtccgcccacgcgtccgtacggcggcgtgcgaggacgacagacagaggggggagaagagatcgagagaagaatagtttgatcatcttgtgagaaaaataatggctgcttcagtgatgctatcttcggtgacattgaaaccagctggtttcacggtggagaagacggcggctagaggattaccgtcgctcacaagagctcgtccctccttcaaaattgtcgccagtggcgtcaagaagatcaagaccgacaagcccttcggaattaacggcagcatggacttgagggacggcgtcgacgcctccggcagaaagggcaagggatacggtgtttacaagtacgtcgacaagtatggagctaacgtcgatggatacagtcctatttacaacgggaacgagtggtcagcgagtggtgacgtgtacaaggggaggggttcacccgggtttggcaatttttgggcggtaaacttttcgcccggaatttttttcccggaggtgcttttttttttttacaacaaaagtccttttggctccagtaaatctttaaagtttttcgccctttttaacatgtttctaaaaggttctgggttgnccnttcc

SEQ ID NO: 116528 - DNA, 707 bp, Arabidopsis thaliana
ttgacggcgcatgcacgcgtacgtaagctcggaattcggctcgagatttactttgatcatgttgagagagaaaaatggctgcttcagtgatgctatcttcggtgacattgaaaccagctggtttcacggcggagaagacggcggctagaggattaccgtcgctcacaagagctcgtccctccttcaaaagtgacgccagtggcgtcatgaggatcgggaccggccaagccctttcggaattaaccggcacgcatggacttgagggccggcgtccacccctccggcacgacagggcaagggatacggtgtttccaagtacgtcgccaagtatggagctaacgtcgatcggatacagtcctatttaccaacgagaacgagtggtcagccgagtggtgacgtgtccaaagggaggagtcaccgcattgccaatttgggcggtaactcggtactgctcggaattcttgccggaggtgctcttcttgtgtacatcccaagacctttggaacaataaatattaaagttgttagcgcatgtgtaatcatgtttctataaatgtttctgtgttgttctcattctctctaatgttgtaaaactccgacatactttgaatttataagacttccagtgtttgtatcaaaaaaaaatataaaaaaaagatttaaaacaccctgagcaaaccgctctagaggatccaagcttacgtacgc

SEQ ID NO: 116529 - DNA, 795 bp, Arabidopsis thaliana
  unsure (1)..(795): unsure at all n locations
ctctaatacgactcactttagggaaagctcgtacgcctgcaggtaccggtccggaattcccggtgtcgacccacgcgtccgcccacgcgtccgtacggctgcgagaagacgacagaagggggagaagagatcgagagaagaatagtttgatcatcttgtgagaaaaataatggctgctccagtgatgctatcttcggtgacattgaaaccagctggtttcccggtggagaagacggcggctagaggattaccgtcgctcacaagagctcgtccctccttcaaaattgtccccagtggcgtcgaagaagatcaagaccgacaagcccttcggaattaatcggcagcttggactctgaggggacgtcggcgtcgtcgcctccggcagaaagggcacggggatccggtgtttccccgtccgtcgcccggttatgtgagctcccgtcgatggtttccgtcctttttccccacccggagccgccgtgggccgcgcggcgggtggtgcgtgtcctaggtaggagtcgccggcttggccctttggtcggtggctctccccgtttttcttgccggaggtgctcttcttgtgtgccccccaaaagcccaggcgccgtcgttcttaaagttgttagcgcatgtgtaatcatgtttctataaatgtttctgaattgttctctttctctctaatgctgtaaaactccgacatactttgaattcccccgacttttagcgtttgtatagtaaaaaaaaagaatttcccccccntggagaggccgctctagaggntcccagcttcgtccg

SEQ ID NO: 116530 - DNA, 788 bp, Arabidopsis thaliana
  unsure (1)..(788): unsure at all n locations
tttgacgtcgcatgcacgcgtacgtaagcttggatcctctagagcggcctctcgcgatctggcggacgcgtgggcggacgcgtgggcggacgcgtggggaagaatagtttgatcatcttgtgagaaaaataatggctgcttcagtgatgctatcttcggtgacattgaaaccagctggtttcacggtggagaagacggcggctagaggattaccgtcgctcacaagagctcgtccctccttccaaaattgtcgccagtggcgtccagaggctccaggccccccagccccttcggaattcacggccagcatggactctgaggggacgccggcgtccccgccctccggccagaaagggcaaggcatccggtgtttacaagtccgtcgccaagtatggagctcccgtcagatggatccagtcctatttacaaccgaagaacgacggtagtggtcacgcgagtggtgactgtgttcaaggggaggggttcaccggatcggcaatttttggccatttgggcgggaacttctatgcgccggtattctctgccgcccggtgctcttggtgtgttctctcaaggtgctttggctcngttnncttctcccgatgtgaaccgatgtgtcntcatgtttctataaatgtttctgtgttgttctctttctctcataatgttgtgaaactcagacatcctttgaatttattagacttctagtgctcgtctcgtgggcggaacaataaaaaaaaacgattagcggccgctctaaaggatcccagcttacgtacacgtgcggg

SEQ ID NO: 116531 - DNA, 646 bp, Arabidopsis thaliana
  unsure (1)..(646): unsure at all n locations
cnnnnnnnnnnnnnnnnnnnnnnnnnnnnnnnnnnnnnnnnnnnnnnnnnnnnnnnnnnnnnnnnnnnnnccacgcgtccgcccacgcgtccggcgagaagacgacagaagggtacggctgcgagaagacgacagaagggtacggctgcgagaagacgacagaagggtacggctgcgagaagacgacagaagggtacggctgcgagaagacgacagaaggatacggctgcgagaagacgacagaagggggagaagagatcgagagaagaatagtttgatcatcttgtgagaaaaataatggctgcttcagtgatgctatcttcggtgacattgaaaccagctggtttcacggtggagaagacggcggctagaggattaccgtcgctcacaagagctcgtccctccttcaaaattgtcgccagtggcgtcaagaagatcaagaccgacaagcccttcggaattaacggcagcatggacttgagggacggcgtcgacgcctccggcagaaagggcaagggatacggtgtttacaagtacgtcgacaagtatggagctaacgtcgatggatacagtcctatttacaccgagaacgagtggtcagcgagtggtgacgtgttcaagggaggagtcacccgattgggcattg

SEQ ID NO: 116532 - DNA, 789 bp, Arabidopsis thaliana
cccgggtcgacccacacgtccgacaacccgtcggccaacccttcgttacggttgaaaaaacacaaaaaggtaacggtgccaaaagaccacaaaaaggggaaaagagattcagagaagaataatttgattaacctgtgaaaaaaataatggctgcctcaatgatgctaacctccgtgacatataaaccaactggtttcacagtggagaaaacagcggctataggattaccgtcgctcacaaaagctcgtccctccctcacaattgtctccagtggcgtcaagaagatcaagaccgacaagcccttctgaattaacggcagcatggacttgatggacagcgtcgacgcctccggcagaaaagggcaaggcggattcgggtgtttacaagtacgtcggacaagtaatggagctaaacgtcgatggacacatggcctactttacaactagaacgagtggtcagcgagtagttacgtgtacaaggtaggagtcaccggattggcaatttgggcggtaactctcgctggaattcttgccgcaggtgctcttcttgtgttcaacacaagtgctttggctcagtaaatctcacagctgttagcgcatgtgtaatcatgtttctataaatgtttctgtgttgttctctttctctccaatgttgtaaaactcagacatactttgaatttataagacttctagtgtttgtatatatattcatcttcctatccttagtaatataacaaccgcacaaacccatagatcgaccgctctagaggatccaagcttacgtacgcgg

SEQ ID NO: 116533 - DNA, 849 bp, Arabidopsis thaliana
  unsure (1)..(849): unsure at all n locations
tnnnnnnnnnnnnnnnnnnnnnnnnnnnnnnnnnnnnnnnnnnnnnnnnnnnnnnnnnnnnnnnnccaggcgtccgtcggctgcgagaagacgacagaaggatacggctgcgagaagacgacagaaggatacggctgcgagaagacgacagaaggatacggctgcgagaagacgacagaaggatacggctgcgagaagacgacagaaggatacggctgcgagaagacgacagaaggatacggctgcgagaagacgacagaaggatccggctgcgagaagacgacagaaggatccggctgcgagaagacgacagaagggggaagagatcgagagaagaatagtttgatcatcttgtgagaaaaataatggctgcttcagtgatgctatcttcggtgacattgaaaccagctggtttcacggtggagaagacggcggctagaggattaccgtcgctcacaagagctcgtccctccttcaaaattgtcgccagtggcgtcaagaagatcaagaccgacaagcccttcggaattaacggcagcatggacttgagggacggcgtcgacccacgcgtccgatgcatctgcattgaagaaatacacatatgggaaacatattgttagtcgtttggaacagccctctatttgaagaaaaccaagaattgaggagatgagtnggcccttctgatttcaagacagtggggctgactcagattcactcaatacaattcgcttttcaatgnaagctggntatccatttggaaggccttagatgattgtngaggcannnnattgtgttcctggaattttncaanccgtnggnnnttnnnggntgccnggaaantccaaccgg

SEQ ID NO: 116534 - DNA, 459 bp, Arabidopsis thaliana
ccgtaccgttccgaaactctcgggtcgacgcacgcctccgtacgtcggcgcgaagacgacagaaggggagaagagatcgacacaacaatagtttgatcatcttgtgagaaaaataatggctgcttcagtgatgctatcttcggtgacattgaaaccagctggtttcacggtggagaagacggcggctagaggattaccgtcgctcacaagagctcgtccctccttcaaaattgtcgccagtggcgtcaagaagatcaagaccgacaagcccttcggaattaacggcagcatggacttgagggacggcgtcgacgcctccggcagaaagggcaagggatacggtgtttacaagtacgtcgacaagtatggagctaacgtcgatggatacagtcccatttacaacgagaacgagtggtcagcgagcgagtggtgacgtgtacaatggacgagtcaccggat

SEQ ID NO: 116535 - DNA, 550 bp, Arabidopsis thaliana
  unsure (1)..(550): unsure at all n locations
ctgatcagcgtttaacattgttcaaccgagtgagaatgcatgcatctgcattgaagaaatacacatatgggaaacatattgttagtcgtttggaacagccctctattgaaggtatgaaattcccccataaaacccagaattgaggagatgagtggctcttctgatttcaagacagtgggctgactcagattccctcaatacaattcgctttttcatgaaagctggatattcattgggaaggtcttagatgattgtgaaggacatcgatattgttgtttacttggaattttatcataaccgttgtgatgattgtgtggcatgttctgtaaatattcataactgtatcagtagtttacttcagatctgtaactggtttgtggaatttcacatggtattcgaaactttcttgnnnnnnnnnnnnnnnnnnnnnnnnnnnnnnnnnnnnnnnnnnnnnnnnnnnnnnnnnnnnnnnnnnnnnnnnnnnnnnnnnnnnnnnnnnnnnnnnnnnnnnnnnnnnnnnnnnnnnnnnnnnnnnnnnnnnnnnnnnnnn

SEQ ID NO: 116536 - DNA, 1076 bp, Arabidopsis thaliana
  unsure (1)..(1076): unsure at all n locations
ccgnnnnnnnnnnnnnnnnnnnnnnnnnnnnnnnnnnnnnnnnnnnnnnnnnnnnnnnnnnnnnnnnnnnnnnccacgcgtccgcccacgcgtccgcccacgcgtccgcccacgcgtccggcgttaacgaatcttcatcgatcaaactcatcaaagtctaatatcacaaagaaagagtttttttaactagcttagctcaaagtgtttgcttaagacaagaagaacatggcgtcttaccagaaccgtccaggaggtcaggccactgacgagtacggaaacccgatccagcagcagtatgacgagtacggaaatccgatgggaggaggaggatacggaactggtggtggtggaggagctacaggtggccaaggatacggaacaggtggccaagggtacggatcaggtggccaagggtacggaaccggtggccaaggatacggaaccgggaccgggactgaaggctttggaactggcggaggagctaggcaccacggccaagagcaactccacaaggaaagtggtggtggcttgggaggaatgcttcaccgctccggatctggatccagctctagctcggaggatgatggacaaggagggaggaggaagaagggaataacacaaaagatcaaggagaagttgccaggtcatcatgatcagtctggtcaagctcaagcgatgggcggcatgggatccggatatgatgctggtggctacggtggtgagcaccacgagaagaaggggatgatggacaagatcaaggaaaagcttcccggtggtggccgttaagcttcgaacaatcgtgtatacatattaaataaaaataatgagggtttgtaacgcagtcgcattcggtcgttgtattgtgctttttatgtatgtacgtcctgcgatgtgtgttgtttacttacatgagtgtgtaatgagcatctggctctttttatgttctgagatgtttgtgttatgtaatttcacatctatataaatctacttttttttggtaaaaaaaaaaaaaaagggcgggcgctttagtgtacagggctcacgacgcgggcgcgggcgtcaagctctagatagtt

SEQ ID NO: 116537 - DNA, 769 bp, Arabidopsis thaliana
gctggtacgcctgcaggtaccggtccggaattcccgggtcgacccacgcgtccgaggatacggaacaggtggccaagggtacggatcaggtggccaagggtacggaaccggtggccaaggatacggaaccgggaccggcccctgaaggctttggagctggcgcaggagctaggccccgcggccaagagctacctccacaaggaaagtggtggtggcttgggaggaatgcttctccccctccggatctggatccacctctagctcggaggatcatggacaagcagggagcacgaagaagggaataacacaaaagttcaagcacaagttgccaggtcatcatgatcagtctggtcaagctctagcgatgggcggcatgggatccggatatgatgctggtggctccggtggtgagccccccgagaagaaggggatgatggtcaagatcaagggaaaagctttcccggtggtggccgttaagcttcgaaccatcgtgtatacagattaaatcaaagtaatgaggggttgtaacgcagtcgcattcgggcgttggattgtgctttttacgtatgtacggcctgccatgtgtgttgtttactttcatgagtgtgtaatgagcatctggctcattttatgttctcagatgtttgtgttatgtaattccccttctatattaatttacttttttctgaaaaaaaaaaaaaaaaaaaaaaagggcggccgctctagaggatccaagcttacgtacgcgtgcatgcgacgtcatagcttc

SEQ ID NO: 116538 - DNA, 531 bp, Arabidopsis thaliana
  unsure (1)..(531): unsure at all n locations
aggatacggaacaggtggccaagggtacggatcaggtggccaagggtacggaaccggtggccaaggatacggaaccgggaccgggactgaaggctttggaactggcggaggagctaggcaccacggccaagagcaactccacaaggaaagtggtggtggcttgggaggaatgcttcaccgctccggatctggatccagctctagctcggaggatgatggacaaggagggaggaggaagaagggaataacacaaaagatcaaggagaagttgccaggtcatcatgatcagtctggtcaagctcaagcgatgggcggcatgggatccggatatgatgctggtggctacggtggtgagcaccacgagaagaaggggatgatggacaagatcaaggaaaagcttcccggtggtggccgttaagcttcgaacaatcgtgtatcctattaaataaaatattgagggtttaaccctccgattcggcgtggattgccttttaggtgaccccccatatggttttcctccctnggaaantc

SEQ ID NO: 116539 - DNA, 585 bp, Arabidopsis thaliana
  unsure (1)..(585): unsure at all n locations
ggaaccgtgaccgggactgaaggctttggaactggcggaggagctaggcaccacggccaagagcaactccacaaggaaagtggtggtggcttgggaggaatgcttcaccgctccggatctggatccagctctagctcggaggatgatggacaaggagggaggaggaagaagggaataacacaaaagatcaaggagaagttgccaggtcatcatgatcagtctggtcaagctcaagcgatgggcggcatgggatccggatatgatgctggtggctacggtggtgagcaccacgagaaagaaggggattcgatggacaagatcaagggaaaagcttcccggtggtggccgttcaagcttcgaacaatcgtgtattcatattaaattaaaaaataatgtggggttttttaaccgcatccgcatttccggtccgttgtaattgtgcctttttatgggattggtcccgccctccggatgtgtcggttggttactttcatgggagtgtgtaatgggccatcttggctcctttttaatggtcctgagnatgnttngnggtaatggaaatttccncaccnnttntnaaatctt

SEQ ID NO: 116540 - DNA, 1672 bp, Arabidopsis thaliana
  unsure (1)..(1672): unsure at all n locations
atgatcttnnnnnnnnnnnnnnnnnnnnnnnnnnnnnnnnnnnnnnnnnnnnnnnnnncgcggtacccggtccggaattcccccgcgggcccgcccacgcgtccgaaagctctcttttctctccagatttcgattcccgaggctcgagagaaaaccgtaaatctcttctccgttcactcaatcaaccaaagatgcgtgagattcttcacatccagggtggtcaatgcggtaaccagatcggagccaagttctgggaagtggtttgcgccgagcacggcatcgatccaaccggaaggtacaccggagactcagatctgcaacttgagcgcatcaacgtttactacaatgaagcgagttgcggtagattcgttcctcgtgcagtgctcatggatttggagcctgggactatggatagtctcagatctggaccgtacggtcagacctttcgacctgataacttcgtctttggtcaatccggtgcgggtaacaactgggccaaaggacactacactgaaggagctgaacttattgattctgttctcgatgttgttcgtaaggaagctgagaactgcgattgtcttcaagggtttcaggtgtgtcattcattgggaggaggaactggatctggaatgggaacactgttgatatctaagatccgagaagagtatccagacgaatgatgcttaccttttcggttttcccatctccaaaggtctctgacactgtggttgagccttacaatgcaactctctctgtccatcagcttgttgagaatgctgatgagtgcatggttcttgacaatgaggcctttacgatatctgcttccgtaccctcaaactcactactcctagctttggtgacttgaaccatttgatctctgctacaatgacggtgtgacttgctgtcttaggttccctggtcaactcaactctgacctcagaaactcgctgtgaacctcatcccattccctcgtcttcacttcttcatggtgggttttgctcctctcacctcaagaggttcacagcagtacagtgccctcactgtccctgagctgacccagcaaatgtgggatccaaagaacatgatgtgtgctgctgacccacgtcacggacgttacctcacagcatctgccatgttccgtggaaagatgagcaccaaagaggttgacgagcagatgctgaacgttcagaacaagaactcgtcctactttgtggaatggatcccaaacaacgtgaaatccagtctgtgatatcccacctacgggtctgaaaatggcttccactttcattggaaactcaacatcgatccaggagatgttcaggcgagtgagtgagcagttcacagctatgttcaggagaaaggctttcttcattggtacacaggtgaaggaatggacgagatggagttcactgaagcagagagcaacatgaacgatcttgtcgcagagtaccagcaataccaagatgcaacggctgatgaagaaggtgactacgaggaggaagaagaggaatacgaacaggaagaagagtactgagagttaattagttataaaaaccgcttgaaatatcaatttagtcgttggctacttcttttcttaaaaaaaaaatgagaacctcacctaccagtcgcagggttatttctatgcttgatttgactatctggatgatgttat

SEQ ID NO: 116541 - DNA, 968 bp, Arabidopsis thaliana
  unsure (1)..(968): unsure at all n locations
actaatcgactcatttagggaaagccggtacgcctgcaggtaccggtccggaattcccgggtcgacccacgcgtccgcggacgcgtgggctgtccctgagctgacccaacagatgtgggattcaaagaacatgatgtgcgcagcagacccgcgccacgggcggtacctaactgcctcggccatgttccgtggcaagatgagcacaaaagaagtggacgagcagatgatgaacgttcagaacaagaactcttcctactttgtggaatggatcccaaacaacgtcaagtcaagcagtgtctgtgacatagctccaccgaagggtctctcaaatggcgtcgacatttcattgggaactccacctcgatccaagagatgtttaggcgtgtcagtgagcagttcactgctatgttcaggagaaaggctttcttgcattggtacacaggtgaaggtatggacgagatggagttcactgaagctgagagcaacatgaacgatcttgtctctgagtaccagcagtatcaagatgctaccggctgatgaagaaggagaatacgtaggaggaagaagatgagtacgagcctaagaagaaacttattgaagaaacagatgataagaacacctcaacttccagttgctgtttacttttaaaactctcttctattaagttcttatagtttctgtaaccatcgcttgcgttattagtagttatgatactctgcgtaggctaagaggatttcatccctcaatattcaaacaatctattttgctaaatcaaaatccatccatagtattttttttctttgtttcattatataaccttttgttaattttgactatgtgaattcggtgaagacttcaccatctttcaaataaaaaaaaaaaaaaaagggcggccgctctagaggatccaagcttacgtacgcgtgcatgcgaggtcatagtcttactatagtgtcnagttaaattca

SEQ ID NO: 116542 - DNA, 1101 bp, Arabidopsis thaliana
  unsure (1)..(1101): unsure at all n locations
ccgggccgacccacgcgttcgagcgattctcactaaaaccctcgaacacatcgcctttatctctttctctagatctactcgctatggctactatcaccgttgttaaggctagacagatcttcgacagtcgtggtaatcccaccgttgaggttgatatccacacgtcaaatggtattaaggttacagcagctgttccaagtggagcttccactggtatctatgaggctcttgagctgagggatggaggatctgactaccttggaaagggtgtatctaaggctgttggcaatgtgaacaacatcatcgggccagcacttattggaaaggacccaactcagcagactgctattgacaacttcatggtccatgaacttgacggaacccaaaacgagtgggggtggtgcaagcaaaagcttggagccaatgcgattcttgctgtgtctcttgctgtctgcaaagctggggctgttgtcagcggcattcctctatacaagcacattgccaaccttgctggtaaccccaagattgtgctaccagttcctgccttcaacgtcatcaatggtggatcccatgccggaaacaagcttgctatgcaggagtttatgatcctccctgttggagctgcttctttcaaggaagccatgaagatgggtgtggaagtttaccaccacttgaagtctgtgattaagaagaagtacggccaggatgccacaaatgttggtgatgaaggtgggtttgcaccaaacattcaggagaacaaggagggtcttgaattgctcaagactgctatcgagaaggctggatacactggaaaggttgtcattggaatggatgttgccgcttcagagttctactcagaagacaagacctacgacttgaacttcaaagaagagaacaacaatggctctcagaagatttctggtgatgctctaaaggacctgtacaaagtccctttntcggntgaggtancccaatcggtngtnccatttgagggaccccntttttganccaaggatggncttnggggaggcacctattggcttaaggattggnccccccttgnggtgttgggaacccgaagggtttcaagaatttntccgg

SEQ ID NO: 116543 - DNA, 746 bp, Arabidopsis thaliana
  unsure (1)..(746): unsure at all n locations
nnnnnnnnnnnnnnnnnnnnnnnnnnnnnnnnnnnnnnnnnnnnnnnnnnnnnnnnnnncccacgcggccacgcaataaacagagggagtcgccaaattttctcatcattttctcgagaaaatagactaaaagcgattcccgagagaaagaaagaacaaaaaaaaaacatccgagtgaaaatgagagaaattcttcatattcaaggaggtcagtgcggaaaccagatcggagctaagttctgggaagttatttgcggcgagcacggtattgatcaaaccggtcagtcatgtggcgatacagatctacagcttgaaaggatcaatgtctattttaacgaagctagcggaggcaaatacgttcctcgtgctgttcttatggatctggagcctggaactatggattctctcagatctgggccgtttggtcagattttccggcctgataacttcgtttttggtcagtctggtgctgggaataacttgggcgaaaggtcattacacggagggagctgagttgattgattctgtgcttgaggttgtgaggaaggaagctaaaaactgtgatggtcttaaagggtttcaagtttgtcattctttgggaggaggaactgggttctgaatgggaacacttcttatntctaagattagagaggaatatccagatcgtatgatgatgaccttttcgggcttcccatctcctaagggctctgatccagttgttgagcatacaatgctactctttccgt

SEQ ID NO: 116544 - DNA, 1120 bp, Arabidopsis thaliana
caggtaccggtctggaattcccgggtcgacccacgcgtccggctgcttctttcaaggaagccatgaagatgggtgtggaagtttaccaccacttgaagtctgtgattaagaagaagtacggccaggatgccacaaatgttggtgatgaaggtgggtttgcaccaaacattcaggagaacaaggagggtcttgaattgctcaagactgctatcgagaaggctggatacactggaaaggttgtcattggaatggatgttgccgcttcagagttctactcagaagacaagacctacgacttgaacttcaaagaagagaacaacaatggctctcagaagatttctggtgatgctctaaaggacctgtacaagtcctttgtcgctgagtacccaatcgtgtccattgaggacccatttgaccaagatgactgggagcactatgctaagatgaccactgagtgtggaaccgaggttcagattgtcggtgatgatttgttggtcactaaccccaagagagttgctaaggcaatcgcagagaagtcttgcaatgctcttcttttgaaggttaaccaaatcggatctgtaaccgagagtatcgaggcagttaagatgtcgaagaaagcaggttggggagtgatgaccagccacagaagtggtgaaaccgaggacacattcattgctgacttagccgttggcttgtccactggacaaatcaaaaccggtgctccttgcagatccgagcgtcttgccaagtacaaccagcttttgcgtattgaggaggagttgggatcagaggcaatttacgctggagtcaacttccgcaaacctgtggaaccctactaaatggagcttttagaagcaaagtggtcttctttgtgacgaggagaagatgacctgagtttgatcatttgctttaattaaataaaacgttctgtttttgtttcttctttgtttggtttcttacgtcttttgttgaaccctttttgggaaaagttactcatttttgtaagggaaacatgagaatgctctgcctttgtcgaggacggtagccccttatttcaatctaatttcggctttaagggcgaccgctctagaggatccaagcttacgtacgcgtgcgtgcg

SEQ ID NO: 116545 - DNA, 766 bp, Arabidopsis thaliana
  unsure (1)..(766): unsure at all n locations
gannnnnnnnnnnnnnnnnncacctcactcatctgnggcaaagccctggcacgcctgcaggtaccggtccggatctcccggctcgacacccacgcgtccggctcatcccattccctcgtcttcacttcttcatgggtgggttttgctcctctcacctcaagaggttcacagcagtaccgctgccctcacagtccctgagctcacccagcaaatgtgggactccaaaacatgatgtgtgctgcagacccaaggcacggacgctacctcacagcctctgccatgttccgtggcaagatgagcacaaaggaagttgacgagcagatgctgaatgttcagaacaagaactcgtcctactttgggagtggatccccaccaacgtcaagtcaacagtctgtgatatcccacctactggtctgaaaatggcttccactttcattggaactcacatcgatccaagagatgttcaggcgagtgagcgaccagttcacagctatgttcaggagaggaaggctttccttgcattggtacacaggtgagggcatggaccgagatggagttactgaagcagagagtaccatgaatgnncttntcgagggttccagcagtnccaagntnttcaacccgaggaggagggtcgntgngggagaggggggtcgggctttangtgttncaatggtccccggtttgnantttttanaagnagnatcatttttttncccaaccnnattttnttcgaaaaccttattttcgcaagggccgtttannc

SEQ ID NO: 116546 - DNA, 597 bp, Arabidopsis thaliana
  unsure (1)..(597): unsure at all n locations
attcaaagccaaggacaagaaaaaaaaaaaagagtcgcccattttcttctcatttttttttttgctcttgacgaagaaaccaaaaaaaaaaaaaatgagagagatccttcatatccaaggcggtcaatgtggaaaccagatcggagcaaagttctgggaagtgatctgcgacgaacacggcattgatcacaccggtcaatacgtcggcgattctccgttacagcttgaacgtatcgatgtctatttcaacgaagctagcggtggaaagtacgttcctcgcgctgttcttatggatctggagcctggtaccatggattctctcagatctggtccgttcggtcagattttccgtcctgataacttcgtctttggtcaatctggtgccggaaataactgggcgaaaggtcattacaccgaaggtgctgagttgattgattctgttctcgattgttttgaggaaggaagctgagaaccagcggtttttttttaaaaggttccccaagggtgcccaattcatatttggggggggacctggcccttggaattggggcctttnttggtttntaaggnnangagggntnccancccgatttgtgg

SEQ ID NO: 116547 - DNA, 675 bp, Arabidopsis thaliana
gcaggtaccggtctcggattcccgggtcgacccacgcgtccggaacattcagaacaagaactcatcctactttgtggaatggatcccaaacaacgtcaagtccagtgtctgtgatattgcaccaaagggtttgaaaatggcgtctactttcattggtaactcaacctcaatccaggagatgtttaggcgtgtgagcgaacagttcacagctatgttcaggagaaaggctttccttcattggtacacaggagaaggcatggacgagatggagttcactgaagcagagagtaacatgaatgatcttgtcgcagagtaccagcagtaccaagatgctacagccggagaggaagagtacgaggaggaagaagaggagtacgagacttaagatgttgtcaatggctccctcggattcgtaagctgtgtaagcaagcagcattcactttcttctttccccttatcctgaatttttttcttcgtaatatctcttttattgtttcgttcatgtgtgttcgtttttgttattgaaaccctatatcggttctggatttgttaaacttttgcgtgtattgcttattgtttttgtcggtaaaaaaaatattgcttttgttctcttaaaaaaaaaaaaaaaaaggccgcccgctcaaaagaatccaagctaacgaacgcgggcatgcg

SEQ ID NO: 116548 - DNA, 1110 bp, Arabidopsis thaliana
  unsure (1)..(1110): unsure at all n locations
tcactagtaggacgcgttgttcgtcgcaacaccctatagtgagtcgtattaatcagcttgtatagaacgctgatgaatgcatggtcctcgacaatgaagctctctacgatatctgcttccgtaccctcaaactcagcactcctagctttggggacttgaaccatttgatctccgcaacaatgagcggtgtgacttgctccttaaggttccccggacaattaaactctgacctcaggaaactcgcggtgaacctaatcccattccctcgtctccatttcttcatggtgggttttgcgcccctcacttcgcgtggctcgcaacaatacatctcactcaccgttcctgcgctcacccagcaaatgtgggacctccaacaacttgatgtgtgctgctgacccacgtcacggacgttacctcacaccctctgccatgttcagtgcagatgcccaagggagttccggccanttctgatttccagaccaagacctcgncnnctttgtggagtgacccccaaccaccgtgaattcgccagtctgtgacatcccacctactggtctgaagatggcatcaactttcatttggaaactcaccatcaatcccaagagatgttcaggcgagtgcagtgagcagttcaccagctatgttcaggagcaaaggctttccttccacgcgtacacaggtgagtcggaatggacgagatggaattcacagaagcggagagcaacatgaacgatcttgtgtcagagtaccagcaataccaagatgcaactgcggatgaagaaggtgactacgaggatgaggaagaaggtgaatatcaacaggaggaagagtactgagaataatttagttataactgctttaaaaacaaaaacaatttagtcgtttgctacttttcttttttttaaaaggaacacctcaactaccagttgtagtttttttctctgcttgtatttgacatatctggttgatgtttctgtacttttgttcttaatcttgttattgcctgtgatgtttctattaataaaaaaaaaaaaacaaaaanaaaaaaaaaaaacccaaaaaaaaagggcggcccctctagaggatccaagcttacgtacgcgtgcatgc

SEQ ID NO: 116549 - DNA, 823 bp, Arabidopsis thaliana
cagctctctacgactcactattgggaaagctggcacgcctgcaggtaccggtccggaattcccgggtcgacccacgcgtgcggtcatgccatcccctcgttttcacttcttcatggatggatcagctcctctcacctcaagaggttcacagcagaaccgctccctcacagtccctgagctcacccagcatatgcgggactccaagaacatgatgtgcgctagacacccaaggcacggacgctacctaacagactctgccatgttccgtggccaagatgagcccaaagggaggttgccgaccagatgctgaatggtcagaccaagacctcgtcctccttgtgtggagggggatccccaacaccggtgaaaccaacagcctgtgatatccccacctactggggtctgaagatggcctccactctcattggacactccaacatcgatccaagagatgttcaggcgaccgactgagcaggtcacagctatgtacaggaggcggaaggctttcttgctttggtacacaggtgagggaatggacgagatggagttcacagaagcagagagcaacatgaacgatcttgtgtcagagtaccagcaataccaagatgcaacggctgataaagaaggtgactacgaggatgaggaagaaggtgaataccaacaggaagaagagtactgagagtaatttagttataaaaaccgcttgaaaaaatcaatttagtcgtttgctactttttttcttaaaaaaaaaaaaaaagggcggccgctctagaggatccaagcttacgtacgcgtgcatgcgacgtcatagctagtctatagt

SEQ ID NO: 116550 - DNA, 758 bp, Arabidopsis thaliana
  unsure (1)..(758): unsure at all n locations
atgattcgccggacctaatacgacttacttagggaaagctggtacgcctgcaggtaccggtccggaattcccgggtcgagccacgcgtccgctcatcccattccctcgtcttcacttcttcatggttggttttgctcctctcacctcaagaggttcacagcagtaccgctccctcgactgtccctgagctcacccagcagatgtgggactgccaaaggaacatgatgtgtgctgctgaccctcggcacggacgctacctcactgccttccgctgtgttcccgtggcaagctgagcaccaaagggggttgacgagcagatgctgaacgttcagaaccaagaactcgtcctacttttgtggagtgggatcccccacaacggcaagtccagcagtctgtgatatccccacctacggggtctggaaaatggcgtccactttcaatttgggaacctcaaccttcgatccaggaagatgttcaggcgtgtggagcgacaacagttccccagctatgttacaggaggaaggctttccttcattggtacacaggagaaggcatggacgngatggagttcactgaagcaggagagtaancatggatgatnctttgtcgcaggggttccancagttcccagntnnntccagcccgaagaggagggttccgnggagggagaagggggggttcgggnctttaggtgttgnnaatggntccctnggttcgaaagntttttnnanaaggngttttactttttntttnccctt

SEQ ID NO: 116551 - DNA, 510 bp, Arabidopsis thaliana
  unsure (1)..(510): unsure at all n locations
atcgatccaagagatgttcaggcgagtgagtcaccagttcacacctatgttcaggaggaaggctttcttgcattggtacacaggtgagggaatggacgagatggagttcacagaagcagagagcaacatgaacgatcttgtgtcagagtaccagcaataccaagatgcaacggctgatgaagaaggtgactacgaggatgaggaagaaggtgaataccaacaggaagaagagtactgagagtaatttagttataaaaaccgcttgaaaaaatcaatttagtcgtttgctactttttttcttttaaaaaaaaatgagaacctcaactaccagttgcaggtttatttctatgcttgtatttgactatatctggatgatgtttatgtactttgttttttaaatttggttcggtctttaaaaaaaaaaaaaaaaaaaaagggcggccgctctagaggatccaagcttacgtacgcgtgcaggcgacgtcataactcttctatagnnnnnnnnnn

SEQ ID NO: 116552 - DNA, 531 bp, Arabidopsis thaliana
aaaaactcttcctactttgtggaatggtttccaaacaacgtgaagtcaagcgtctgagacatagctccccgaggtctctcaatggcatcgacatttattgggaattccacatcgatccaagagatgtttaggcgggtgagcgagcagttcactgctatgttcaggaggaaagctttcttgcattggtacacaggtgaaggaatggacgagatggagtttactgaagctgagagcaacatgaacgatctagtctcagagtaccagcaataccaagacgcaactgcagatgacgaaggcgagtatgaagaagacgaggatgaagaagagatattggatcatgagtgagtgaaaagagctgatattaccgatttttaaatacctctcttatcttcttttcgtttggtcggtatatgtttattgagtttcatgtattgtttgtgatggtctgtgtgtaatagtgaggtcggatctacccttttatgcgtggtttttatatgaaattgtcagatagaagttttttatgctcttcct

SEQ ID NO: 116553 - DNA, 705 bp, Arabidopsis thaliana
  unsure (1)..(705): unsure at all n locations
gaaggcgggcccccctgcaggacccggcccggaattcccggttctgcccacgcgtccgttctcttctcctttccctttttcacaatctctctctctctctctctttttagaccagtattatctctctgagcaagatgagagagatccttcacattcaaggtggtcaatgcgggaaccagattggttccaagttctgggaagtggtaatgcgacgagcacggtattgatcccacgggacgttacaggagatactcgagatctacagcttgaacgtgtcaatgtttactacaacgaggcatcctgctggaagatacgttcctcgtgctgttctcatggatcttgagcctggtactatggacagtgtcagaactggaccttatggtcaaatcttccaggcctgacaactttgttttcgggcaatctggtgctggaaacaactgggctaaagggcattacactgaaggagctgagcttattgatgctgtgcttgatgttgtgaggaaggaagctgagaactgtgattgtcttcaaggttttcaagtttgtcattctttggggaggagggaccnggtcctggaattgggaccactttcttaanttcnnaaaggttnngggggggatnntccnaatccgaatgntgatgacccttttcnggctttncccaattcccaagggctttgaaacaangttttttggcccannaaa

SEQ ID NO: 116554 - DNA, 452 bp, Arabidopsis thaliana
agaggttgatgaacagatgatgaacgtccagaacaaaaactcctcatactttgttgaatggattccaaataacgtgaaatcaagcgtctgcgatatagctcccactggtttgaaaatggcatcaactttcattggaaactcaacttcaatccaggaaatgttcaggcgtgtgagtgaacagttcactgccatgttcaggagaaaggctttccttcattggtacacaggagaaggaatggacgagatggagttcactgaagcagagagtaacatgaatgatcttgttgcagagtatcagcaatatcaagatgctacagtcggtgaagaggagtacgaggaggacgaagaagaagaagaagcctaaagaaaagatgattgattattacttttgtaaggctgtaagttcgtcgcactcatttccttttacctctttttctgaattgggattctct

SEQ ID NO: 116555 - DNA, 606 bp, Arabidopsis thaliana
ggaataacagagacaattggttatattagctgtcactcccatctttcatattccttcaccatctctctctctctcgatcttgtgaaccactacacacactaacacaatgagagagatccttcacattcaaggtggtcaatgcggtaaccagattggttccaagttctgggaagtcatctgcgacgagcacggcatcgattccaccggacgttacagtggagacactgcagatctccagcttgaacgtatcaatgtctattacaatgaagcttcaggtggaagatacgttcctcgtgctgttcttatgggtcttgagcctggtactatggatagtatcagatccggaccgtttggtcagatcttccgtcctgataactttgtctttggtcagtctggtgctgggaataactgggctaaaggtcactacactgaaggtgctgagcttattgattcggtccttgatgttgttcgcaaagaggctgagaactgtgactgccttcaaggatttcaggtgtgccattccttgggaggaggaactggttctggaatgggaactttgttgatatctaagatcagggaggagtacccagaccgtatgatgatgac

SEQ ID NO: 116556 - DNA, 461 bp, Arabidopsis thaliana
ggagtgagcaataataaaagctcacttactcacacttttattcatttctctgaaaacccttaaatctccggatttcgattcccgaggctcgaaaaaaccctaaatctcttctccgttcactcatccaaccgaagatgcgtgagattcttcacatccagggtggtcaatgcggtaaccagatcggcgccaagttctgggaagtggtttgcgccgagcacggcatcgatccaaccggaaggtacaccggagactcagatctgcaacttgagcgcatcaacgtttactacaatgaagcgagttgcggtagattcgttcctcgtgcagtgctcatggatttggagcctgggactatggatagtctcagatctggaccgtgtacggtcaggaccctttcggatctggatacttcgtctttggccaatccggtgctggtaccactgggctcagggtcactatttgta

SEQ ID NO: 116557 - DNA, 908 bp, Arabidopsis thaliana
acgcgtgggtctctcctccatcatcgtcacttgcaaatccagctctccatttcttcatggtgggttttgcgcccctcacttcccgtggctcgcaacaaatgtgggactccaaaaacatgatgtgtgcagctgatccacgtcacggacgttacctcacagcctctgctattttcagaggacagatgagcacaaaagaagtcgacgagcaaatcctaaacatacagaacaagaactcgtcatacttcgttgagtggatcccaaacaacgtgaaatccagcgtttgtgatatccaccaaaggggctcaaaatggcggcgacgtttgtgggtaactcgacgtcgattcaagaaatgttcaggagagtgagtgagcagttcacggctatgtttaggcgtaaagcgtttctgcattggtacacaggagaaggaatggacgaaatggagtttacggaagctgagagcaatatgaatgatttggtcgctgaataccaacagtaccaagatgctactgctgatgaggaaggtgagtatgatgttgaagaagaagaggagggagattatgagacttgatccaccaaatcaaacattttacttaaaagacaaggaaacgactcttggaaatctctctatttaaatttgattgaaaaacattgaaaaaatgggaaatttgtttaaatgtgttttttgtttgagtaatttgttcaaagaaagtttgaagtttccatttattttgggtgtcttgtattttccatttgagataatacgtccttgcttctcaagctactgtgtagtatataaattttacacttctctcaaagaacaaaaaagaaaacaaacccatagagcggccgctctagaggatccaagcttacgtacgcgtgcaggcgacgtcataactcttctatagtag

SEQ ID NO: 116558 - DNA, 457 bp, Arabidopsis thaliana
ccgcctttctctctccctctcccttcttattcttctccttcttctccttcaccatctcgaggtcccaaaatcttcatcgagcagtctcattcatctcatcatgagagaaatcctccacgtccaaggcggccaatgcggtaaccaaatcggttccaaatttctgggaagttattcatgcggcgacgaacacggcgttgatccccaccggacgttatacaaccggtgattctcgccgccgatcttcagctcgaaccgtatcaatgtttattacaatgaagcttcttggtggtcgcgttacgttcctcgtgctgttctcatggatctcgagcctggtactatggatagtatcagatctgggtccctacggtcagattttccgtcctgataacttcgtcctttggtcaatccggtgccggaaataattgggcgaaaggtcattatactgaaggtgctgtac

SEQ ID NO: 116559 - DNA, 374 bp, Arabidopsis thaliana
ataaaaactcactcactctcacttttttcatttcttcaacagaaaaaacctaaagctctcttttctctccagatttcgattcccgaggctcgagagaaaaccgtaaatcggcttctccgttcactcaatcaaccaaagatgcgtgagattcttcacatccagggtggtcaatgcggtaaccagatcggagccaagttctgggaagtggtttgcgccgagcacggcatcgatccaaccggaaggtacaccggagactcagatctgcaacttgagcgcatcaacgtttactacaatgaagcgagttgcggtagattcgttcctcgtgcagtgctcatggatttggagcctgggactatggatagtctcagatctgg

SEQ ID NO: 116560 - DNA, 1119 bp, Arabidopsis thaliana
  unsure (1)..(1119): unsure at all n locations
cnnnnnnnnnnnnnnnnnnnnnnnnnnnnnncctgcgccggcgttccagccgagcgggcaagaaacaatgccacacgcgtccgctcgtccacatctttctcctttggtggcaaacacaacgacagatagagagaaacgatggcgtcgaactcgcttatgagctgtggcatagccgccgtgtacccttcgcttctctcttcttccaagtctaaattcgtatccgccggagttccactcccaaacgccgggaatgttggtcgtatcagaatggctgctcactggatgcctggcgagccacgaccagcttaccttgacggttctgctcctggtgactttgggtttgacccacttggacttggagaagttccagcgaaccttgagagatacaaagagtcagagctcatccactgtagatgggctatgctcgctgttcctgggattttggtaccagaagcattaggatatggaaactgggttaaggctcaggaatgggcagcactaccagggggtcaagccacttacttgggaaacccagtcccgtggggtactttgcccacaatcttggccattgagttcttagccattgcatttgttgagcaccagagaagtatggagaaagaccctgagaagaagaagtacccgggaggcgcatttgaccctcttggatactcgaaggaccccaagaagctcgaggaattgaaagttaaagagatcaagaacgggcggcttgcgctgttggcgtttgtaggattctgtgtgcaacagtcggcttacccggggacaggaccattggagaacttggcaactcacttggcggatccatggcacaacaacattggcgatattgttatccctttcaactaatgaatgtaaaaatagaaatatgtgtaccttatgagctttatgtgtatcaaaaacactgtgtaatgaaagacagatttgtgaattcctgtaatttgtcttggtgatcgaatgctcgtgtgagcttgaattctaagtgatgaaccttttgtccccacaaaaaaaaaaaaaaaaaaaacccaaaaannnnnnnnnnnnnnnnnnnnnnnnnnnnnnnnnnnnnannnnnnnnnnnnnnnnnnnnnnnnnnnnnnnnnn

SEQ ID NO: 116561 - DNA, 1057 bp, Arabidopsis thaliana
ctatacgactactatagggaaagctggcacgcctgcaggtaccggtccggaattcccgggtcgacccacgcgtccgctcgtccacatctttctcctttggcggccaacacaacgacagatagagagaaacgatggcgtcgaactcgcttatgagctgtggcatagccgccgtgtacccttcgctgctctcttcttccaagtctaaattcgtatccgccggagttccactcccaaacgccgggaatgttggtcgtatcagcatggctgctcactggatgcctggcgagccacgaccagcttaccttgacggctctgctcctggatgactttgggtttgacccacttggacttggagaagcttccagcgaaccttgagagatacacagagtcagagctcatccactgtagatgggctatgctcgctgttcctgggattgtgccaccagaagcattaggatatgctaaactgcgttaatggctcaggaatgggcagcactaccagggggtcaagccacttacttgggaaacccagtcccgtggggtactttgcccacaatcttggccattgagttcttagccattgcatttgttgagcaccagagaagtatggagaaagaccctgagaagaagaaggtacccgggaggcgcatttgaccctcttggatactcgaaggacccccagaagctcgaggaattcaaagttaaagagatcaagaacgggcggcttgcagctgttggcgtttgtaggattctgtgtgcaacagtcggcttacccggggacaggaccattggagaacttggcaactcacttggcggatccatggcacaacaacattggcgatattgttatccctttcaactaatgaatgtaaaaatagaaatatgtgtaccttatgagctttatgtgtatcaaaaacactgtgtaatgaaagacagatttgtgaattcctgtaatttgtcttggtgatcgaatgctcgtgtgagcttgaattcaaaaaaaaaaaaaaagggcggccgctctagaggatcccagcttgcgtacgcgtgcctgccccgt

SEQ ID NO: 116562 - DNA, 792 bp, Arabidopsis thaliana
acgcttatacgatcagtctcccacattcacacttccaccacccacgcgtacgctcgtccacatctttctcctttggcggcaatctcaacgacagatagagagaaacgatggcgtcgaactcgcttatgagctgtggcatagccgccgtgtacccttcgcttctctcttcttccaagtctaaattcgtatccgccggagttccactcccaaacgccgggaatgttggtcgtatcagaatggctgctcactggatgcctggcgagccacgaccaggttaccttgacggttctgctcctggagactttgggttcgacccacttggacttggagaatctccagcgaaccttgagagatacaaagagtcagagctcatccactgtagatgggctatgctcgctgttcctgggattttgggaccagaagcattaggatatggaaactgggttaaggctcaggaatgggcagcactaccagggggtcaagccacttacttgggaaacccagtcccgcggggtactttgcccacaatcctggccattgagttcttagccattgcatttggtgagcacccaagaaagatggagaaagaccctgagaaagaaaaagtccccgggaggcgcaattgacccttttgggtactcgaaggacccccaaaagctcggggaattggaaagttaaagagaacccagaccgggcgggtttgcgcctgctgggcggttggtagggaattcctgggggggcaaccagtgcggcctttaccccggggggccaggggacccattggggaggaaa

SEQ ID NO: 116563 - DNA, 1406 bp, Arabidopsis thaliana
  unsure (1)..(1406): unsure at all n locations
ttgtatgacataatgacgacgagacgaaggacaaaattgtcatttaaggaataaaagatattcttacaaagatattttttgctcgaaacgaggagaaaaaatcattagttatcgaaaatgctcacatgatgtgggcctaaccactaacccaattaaccacacatcttaatcagagtaagttgaaacaaatctttcagcaaaccctagaaaacatgtttaaccctagttattacgtcacacctgttctataaattaaggctgcgtcttatcacctcaaatcacataagtctctctcttacattttgaaaccctaatttctcaaaaaaaatgtctgaagttgagtaccggtgctttgtcggcggccttgcctgggccaccaatgatgaagatcttcaaaggacgttctcacagttcggcgacgttatcgattctaaggtctgttacacgagagatcggtctcccggatcgagccgattccgatgattctgatcctcgacggatctgattccgatctgtttctctgttacttgattcgattactgttactatgttctctctcgttctttgttactgttacttaatttgtcccatcggtacgttcatcttcctgcttctatgagctcggagatcgatcgatttttgctttatattcatcgctttgttttatattccttccacgattgtttttgctgatgtgtatgattttgtttgtttacagatcattaacgaccgcgagagtggaagatcaaggggattcggattcgtcaccttcaaggacgagaaagccatgagggatgcgattgaagagatgaacggtaaagagctcgatggacgtgtcatcaccgtgaacgaggctcagtcgagaggtagcggcggtggcggaggaggccgtggtggaagcggtggtggttaccgcagcggaggcggtggtggatactcaggaggcggtggcggcggatactcaggaggaggcggtggtggttacgagagacgtagcggaggttacggatctggtggaggcggtggtggccgaggatacggtggtggtggacgccgtgagggaggtggctacggaggcggtgatggtggaagttacggaggcggtggtggcggctggtaatcaaagatagagttgtttgcgtgctgctgctctgtttttggtttagatttggttttgtgtcaccacttctggtttggttatcgttcgtttggtttacttttttgatgaaacagtttcgtttaagtcttctttgtctggaacgaaatgttaattcgcgtgttgtttactaaatttataacgtttccttttaaccagattcgagattttccctcaaataatttatcttgttagacacaagagatnnnnnnnnnnnnnnnnnnnnnnnnnnnnnnnnnnnnnnnnnnnn

SEQ ID NO: 116564 - DNA, 1073 bp, Arabidopsis thaliana
cacacacgtccgcccacgcgtccgcccacgcgtccgggcggaaagaggaggagaaagcggcgcagagcgtggcggtgaccgtggtgacttcgggcgtggattcggcggtggacgtggaggtggccgtggccgtgatcgtggtccaagaggccgtggaagacgtggaggccgtgcctcggaagaaacgaaatgggttccagtgaccaaactaggtcgtctagtggctgacaataaaataacgaagctagagcagatctatcttcattctctcccagtaaaggagtaccaaatcatagatcatcttgttggtcctacgttgaaagacgaggttatgaagatcatgcctgttcagaaacaaaccagagctggtcaaaggactagattcaaggcctttgttgttgttggtgatggaaatggtcatgttggtttgggtgtcaagtgttctaaggaagttgctactgccattagaggagctattattcttgctaagctatcagtggttccggtgaggagaggttattgggggaataagattgggaagccacacactgtgccttgtaaggttactggtaaatgtggttctgttactgtgagaatggttcctgctccgagaggttctggtattgttgctgctagggttcctaagaaggttcttcagttcgctggtattgatgatgtctttacttcttcaagaggatctaccaaaacccttggaaactttgtcaaggctacattcgattgcttacagaagacatatgggttccttacaccagagttctggaaagagactagattctccagatcgccgtaccaagagcacactgatttcctgtcgactaaggctgtttctgcaaccaaggttatcactgagggtgaagaccaagcttaagaccttcatgagatgagtttggtttataggttttggttatcgcaaatatttatctttccggtcttgtttcttggttgtcttttatcagtttttgatattggagtttcagttacaaggataatcataatttagttatgtttggcttttgttagatatttgcttccatgaaatgacattttgcaat

SEQ ID NO: 116565 - DNA, 1102 bp, Arabidopsis thaliana
  unsure (1)..(1102): unsure at all n locations
accggncccggnaattncccgggntcgaacccacgctcaccgctcactactctcactgtaatcccttagatcttcttttcaaatttcaatggcgtccggtgatgttgagtatcggtgcttcgttggaggtctagcatgggccactgatgacagagctcttgagactgccttcgctcaatacggcgacgttattgattccaagatcattaacgatcgtgagactggaagatcaaggggattcggattcgtcaccttcaaggatgagaaagccatgaaggatgcgattgagggaatgaacggacaagatctcgatggccgtagcatcactgttaacgaggctcagtcacgaggaagcggtggcggcggaggccaccgtggaggtggttggcggtggataccgcagcggcggtggtggaggttactccggtggaggtggtagctacggaggtggcggcggtagacgcgagggtggaggaggatacagcggcggcggcggcggttactcctcaagaggtggtggtggcggaagctacggtggtggaagacgtgagggaggaggaggatacggtggtggtgaaggaggaggttacggaggaagcggtggtggtggaggatggtaattcctttaattaggtttgggattaccaatgaatgttctctctctcgcttgttatgcttctacttggttttgtgtgttctctattttgttctggttctgctttagatttgatgtaacagttcgtgattaggtattttggtatctggaaacgtaatgttaagtcacttgtcattctctaaataacaaatttcttcggagatattatctctgttgattgattctatcaactaaaaagaaaaaggaaaaaaaaaaaaaaaaaaaaaaaaaaaaaaaaaaaaaaaaaaaaaaaaataaaaaaaaaaaaaaggggccgctctaaaggatcaaagctaacttacgcgtgaatgcaaagtaaaagctcttcaaaagtgtaaccaaaattaaattaagggggcgtcttttaaaaacgtcgtgagggaaaaaaccggtgggttacaaaattaaaccgctttgaagaaaatccccttttcgaaagggggggaa

SEQ ID NO: 116566 - DNA, 694 bp, Arabidopsis thaliana
  unsure (1)..(694): unsure at all n locations
cccactcgtccggtgaggagaggttactgggggaataagattgggaagccacacactgtgccttgtaaggttactgggaagtgtggctctgttactgtgagaatggttcctgctccgagaggttctggtattgttgctgctagggttcctaagaaggttcttcagttcgctggtattgatgatgtctttacttcctccaagaggatccactaaaactcttggaaactttgtcaaggcgacgtttgactgcttacaaaagacatatgggttccttacaccagagttttggaaagagactagattctccagatcgccctaccaagagcacactgatttcttgtcgactaaggctgtttttgcaaccaaggttatcccggagggtgaagaccaagcttaagaccttcatgagataagttttggttgttcttaaaactaattcctcctttgaaaaagagtatttttttttcttgattatctatgagttttgttattggtggtttcgttactgttttggattttgttagatgtttgccttaatgcaaattcccctgaaaaagcttttgcaataacaaaaaaaaaaaaaaaaaaaaaaaaaagaaaaaaaaaaaaaagggcaggccgctctagaggatccaagcttacgtacgcgtgcatgcgacgtcaaagtctnnctataagtcacctangatcaatc

SEQ ID NO: 116567 - DNA, 670 bp, Arabidopsis thaliana
tcccgggtcgaccaacccgtccgttctcttacattttgaaaccctaatttctcttcttttccccaaaaaaaaatgtctgaagttgagtaccggtgctttgtcggcggccttgcctgggccaccaatgatgaagatcttcaaaggacgttctcacagttcggcgacgttatcgattctaagatcattaacgaccgcgagagtggaagatcaaggggattcggattcgtcaccttcaaggacgagaaagccatgagggatgcgattgaagagatgaacggtaaagagctcgatggacgtgtcatcaccgtgaacgaggctcagtcgagaggtagcggcggtggcggaggaggccgtggtggaagcggtggtggttaccgcagcggaggcggtggtggatactcaggaggcggtggcggcggatactcaggaggaggcggtggtggttacgagagacgtagcggaggttacggatctggtggaggcggtggtggccgaggatacggtggtggtggacgccgtgagggaggtggctacggaggcggtgatggtggaagttacggaggcggtggtggcgggtggtaatcaaaaatagagttgtttgcgtgctgctgctctgcatttggcttagatttggttttgagtcaccactgatggttcgggtatcgcctgt

SEQ ID NO: 116568 - DNA, 820 bp, Arabidopsis thaliana
acccactatacggtaagctggtacgcctgcaggtaccggtccggaattcccgggtcgacccacgtggccgcccacgcgtccgactctcactgtaatcccttagatcttcttttcaaatttcaatggcgtccggtgatgttgagtatcggtgcttcgttggaggtctagcatgggccactgatgacagagctcttgagactgccttcgctcaatacggcgacgttattgattccaaggtctgttacacgccgagatcggactccgagtgatatcgatgatctcatcctcgacggatctgttccgatcttgtgtttctctgttacttgattcgattactctgttactattctcgttctttgttactactactactactactgttacttgtattttcccaaatcggtacgttcatcttcctgcttctgtgagcccggagatcgatcggattttgattcgtcaccttcaaggatgagaaagccatgaaggatgcgattgagggaatgaacggacaagatctcgatggccgtagcatcactgttaacgaggctcagtcacgaggaagcggtggcggcggaggccaccgtggaggtggtggcggtggataccgcagcggcggtggtggaggttactccggtggaggtggtagctacggaggtggcggcggtagacgcgagggtggaggaggatacagcggcggcggcggcggttactcctcaagaggtggtggtggcggaagctacggtggtggaagacgtgagggaggaggaggatacggtggtggtgaaaggaggaggttactggcgaattgggggaaacacca

SEQ ID NO: 116569 - DNA, 622 bp, Arabidopsis thaliana
gactcaccttagggaaagctacgtacgcctgcaggtaccggtccggaattcccgggtcgacccacaggtccgcccacgcgtccggcgcccactgtaatcccttagatcttcttttcaaatttcaatggcgtccggtgatgttgagtatcggtgcttcgttggaggtctagcatgggccactgatgacagagctcttgagactgccttcgctcaatacggcgacgttattgattccaaggtctgttacacgccgagatcggactccgagtgatatcgatgatctcatcctcgacggatctgttccgatcttgtgtttctctgttacttgattcgattactctgttactattctcgttctttgttactactactactactactgttacttgtattttcccaaatcggtacgttcatcttcctgcttctgtgagcccggagatcgatcggatttttttgtattttgtatatttgttgtagatctaaatgcttttgttcagttttgttggattgttttgctgatctgaaaaaaaaaaaaaaaaaaaaaactaaagggcgaccgctctagaggatccaagcttacgtacgcgtgcgtgcgacgtcatagtcttctatagtgcaccta

SEQ ID NO: 116570 - DNA, 532 bp, Arabidopsis thaliana
  unsure (1)..(532): unsure at all n locations
gctcactactctcactgtaatcccttagatcttcttttcaaatttcaatggcgtccggtgatgttgagtatcggtgcttcgttggaggtctagcatgggccactgatgacagagctcttgagactgccttcgctcaatacggcgacgttattgattccaagatcattaacgatcgtaagactggaagatcaaggggattcggattcgtcaccttcaaggatgagaaagccatgaaggatgcgattgagggaatgaacggacaagatctcgatggccgtagcatcactgttaacgaggctcagtcacgaggaagcgggtggcggcggaggccaccgtggaaggtggttggccggttggattaccccaagcggcggttggtggaggttactccgggtggaggtggtagctacgggaggtggcggcggtacccccgaataattgaggaggnataaancggccgncgggcggcgggtaacncctcaaanaggttgttnttnccgaaactnancgtttgtttaaaaactttaggaat

SEQ ID NO: 116571 - DNA, 525 bp, Arabidopsis thaliana
  unsure (1)..(525): unsure at all n locations
gctggtacgcctgcaggtaccggtccggatttcccgggtcgacccacgcgtccgcggacgcgtgggcggacgcgtgggtgggtttgatcttgaccacgacgagaaagacagcagttacaacagaatcaagagcttagtgactgaggaactaaaacagtatttcagaccagagttctcgtacaggttagatgagatgattgttttcagacagttaacaaagctggaagtcaaggaggatacagcggcggcggcggcggttactcctcaagaggtggtggtggcggaagctacggtggtggaagacgtgagggaggaggaggataccgtggtggtgaaggaggaggttacggaggaagcgggggtggtggaggatnnnnatttctttaattanggttgggggataccaatgagtggtcttnttttgggttgtgatgcttatacttggggtgtgggggggctctatttggggtgggctctgctttagattagagggacccgggggcggattaggtatttgtgggatcc

SEQ ID NO: 116572 - DNA, 755 bp, Arabidopsis thaliana
ggtcgcctgcaggtaccggtccggaattcccgggtcgacccacgcgtccgctaatttctcttcttttccccaaaaaaaaatgtctgaagttgagtaccggtgctttgtcggcggccttgcctgggccaccaatgatgaagatcttcaaaggacgttctcacagttcggcgacgttatcgattctaagatcgattaacgaccgcgagagtggaagatcaaggggattcggattcgtcaccttcaaggacgagaaagccatgagggatgcgattgaagagatgaacggtaaagagctcgatggacgtgtcatcaccgtgaacgaggctcagtcgagaggtagcggcggtggcggaggaggccgtggtggaagcggtggtggttaccgcagcggaggcggtggtggatactcaggaggcggtggcggcggatactcaggaggaggcggtggtggttacgagagacgtagcggaggttacggatctggtggaggcggtggtggccgaggatacggtggtggtggacgccgtgagggaggtggctacggaggcggtgatggtggaagttacggaggcggtggtggcggctggtaatcaaagatagagttgtttgcgtgactgctgctctgcatttttggtttagatttggttttgtgtcaccacttctggtttgttatcgttcgtttgtttacttttttgatgaaacagtttcgtttaagtcttctttgtctggaacgaaatgttaattcgcgtgttgtt

SEQ ID NO: 116573 - DNA, 509 bp, Arabidopsis thaliana
  unsure (1)..(509): unsure at all n locations
nnnnnnnnnnnnnnnnnnnnnnnnnnnnnnnnnnnnnnnnnnnnnnnnnnnnnnnnnnnnnnnnnnccacgcgtccgtgaaaccctaatttctcttcttttccccaaaaaaaaatgtctgaagttgagtaccggtgctttgtcggcggccttgcctgggccaccaatgatgaagatcttcaaaggacgttctcacagttcggcgacgttatcgattctaaggtctgttacacgagagatcggtctcccggatcgagccgattccgatgattctgatcctcgacggatctgattccgatctgtttctctgttacttgattcgattactgttactatgttctctctcgttctttgttactgttacttaatttgtcccatcgatcattaacgaccgcgagagtggaagatcaaggggattcggattcgtcaccttcaaggacgagaaagccatgagggatgcgattgaagagatgaacggtaaagagctcgatggacgtgtcatcaccgtga

SEQ ID NO: 116574 - DNA, 371 bp, Arabidopsis thaliana
ctcaatgtaatcccttagatcttcttttcaaatttcaatggcgtccggtgatgttgagtatcggtgcttcgttggaggtctagcatgggccactgatgacagagctcttgagactgccttcgctcaatacggcgacgttattgattccaagatcattaacgatcgtgagactggaagatcaaggggattcggattcgtcaccttcaaggatgagaaagccatgaaggatgcgattgagggaatgaacggacaagatctcgatggccgtagcatcactgttaacgaggctcagtcacgaggaagcggtggcggcggaggccaccgtggaggtggtggcggtggataccgcagcggcggtggtggaggttact

SEQ ID NO: 116575 - DNA, 508 bp, Arabidopsis thaliana
cgattgtattaggtgacactatagaagatctatgacgtcgcatgcacgcgtacgtaagctcggaattcggctcgagaatccgaatccccttgatcttccagtctcacgatcgttaatgatcttggaatcaataacgtcgccgtattgagcgaaggcagtctcaagaggattcggattcgtcaccttcaaggatgagaaagccatgaaggatgcgattgagggaatgaacggaccagatctcgatggccgtagcatcactgttaacgaggctcagtcacgaggaagcggtggcggcggaggccaccgtggaggtggtggcggtggataccgcagcggcggtggtggaggttactccggtggaggtggtagctacggaggtggcggcggtagacgcgagggtggaggaggatacagcggcggcggcggcggttactcctcaagaggtggtggtggcggaagctaccgtggtggaagacgtgagggaggaggaggataccgtggtggtgaa

SEQ ID NO: 116576 - DNA, 480 bp, Arabidopsis thaliana
  unsure (1)..(480): unsure at all n locations
ctcactgtaatcccttagatcttcttttcaaatttcaatggcgtccggtgatgttgagtatcggtgcttcgttggaggtctagcatgggccactgatgacagagctcttgagactgccttcgctcaatacggcgacgttattgattccaagatcattaacgatcgtaagactggaagatcaaggggattcggattcgtcaccttcaaaggatgagaaagccatgaaggattgcgtttgaggggaatgaaacggccaagatcttcgaatggccgtagcatcacctgttaacgggggcctcattcacgggggaaagccggttgccggccggggggccccccttgggacggttggttggccggtttggatcaccccaagtcggccggttcgcgttggaaggtttactcccggtttagggtggtagctancgggangtnngctnccggtagaccngaangnttttnnnaaggttcaaccggccg

SEQ ID NO: 116577 - DNA, 546 bp, Arabidopsis thaliana
  unsure (1)..(546): unsure at all n locations
ctctcactgtaatcccttagatcttcttttcaaatttcaatggcgtccggtgatgttgagtatcggtgcttcgttggaggtctagcatgggccactgatgacagagctcttgagactgccttcgctcaatacggcgacgttattgattccaaggtctgttacacgccgagatcggactccgagtgatatcgatgatctcatcctcgacggatctgttccgatcttgtgtttctctgttacttgattcgattactctgttactattctcgttctttgttactactactactactaactgttaccttgtattttccccaaatcgggtacggtcaatctctccctgccttcttgtgagcccggngatcgatcggattttttttgaattttgaaaatttgttggaggtctaaagncttttgntcaagtttgttnggttgttttgctgaacctggnttttgnatnntttnggtaacaggcatnacggccgagggctgaaggncaaggggnttggntnggacctcaaggtnngaaancataagntcggtttg

SEQ ID NO: 116578 - DNA, 583 bp, Arabidopsis thaliana
  unsure (1)..(583): unsure at all n locations
gccttaatacaactcatatagggaaagctggtccgcctgcaggtaccggtccggaattcccgggtcgacccaggggtccgcggacgcatgggtttgaaaccctaatttctcttcttttccccaaaaaaaaaatgtctgaagttgagtaccggtgctttgtcggcggccttgcctgggccaccaatgatgaagatcttcaaaggacgttctcacagttcggcgacgttatcgaggctgagatcattaacgaccgcnagagtggaagatcaaggggattcggattcgtcaccttcaaggacgagaaagccatgagggatgcgattgaagagatgaacggtaaagagctcgatggacgtgtcatcaccgtgaacgaggctcagtcgagaggtagcggcggtggcggaggaggccgtggtggaagcggtggtggttaccgcagccggaggcggtggtggatactcaaggaggccggtggcggcggatactccaggaggaaggccggggggtggttacgagagaccgtagccggnngttancggntcttnttgnagccggttntttcccaaggataccggttgttgtg

SEQ ID NO: 116579 - DNA, 446 bp, Arabidopsis thaliana
  unsure (1)..(446): unsure at all n locations
tttgaaaccctaatttctcttcttttccccaaaaaaaaatgtctgaagttgagtaccggtgctttgtcggcggccttgcctgggccaccaatgatgaagatcttcaaaggacgttctcacagttcggcgacgttatcgattctaagatcattaacgaccgcgagagtggaagatcaaggggattcggattcgtcaccttcaaggacgagaaagccatgagggatgcgattgaagagatgaacggtaaagagctcgatggacgtttccatcacccgtgaacgaggctcagtccgaagaggttgccggcgggtggccggagggaggccccttggttggaagcccggtggttgggttacccccacccggggcccggtggttgggttactccaagaaagccggttggccggcggattctccnnggaagaaagccggttngttggtttacc

SEQ ID NO: 116580 - DNA, 184 bp, Arabidopsis thaliana
agagaatgacaagtgacttaacattacgtttccagataccaatgaatgttctctctctcgcttgttatgcttctacttggttttgtgtgttctctattttgttctggttctgctttagatttgacgtaacagttcgtgattaggtattttggtatctggaaacgtaatgacaagtgacttaaca

SEQ ID NO: 116581 - DNA, 913 bp, Arabidopsis thaliana
cattattatcaatcgaaattccaaccgactcaacaatgtcttcatccaacgcctgcgcctctccgtcaccgttccccgccgtcacgaagcttcatgtagactccgtcacgtttgtaccgtccgtcaagtcaccggcctcctccaatccattattcctcggcggcgccggtgtccgaggccttgatatccaaggtaaattcgtgatcttcaccgtcattggagtatacctagagggtaacgccgttccttctctatctgtcaagtggaagggaaaaactacggaggagctaacagaatctatcccgttcttccgtgaaatagtcaccggtgcgtttgagaagtttatcaaggtgacaatgaaactgccgttaacgggacaacaatattcggagaaagtgacggagaattgtgtggctatatggaaacaattagggctttatacggactgtgaagctaaagctgtggagaagttcttggagatcttcaaggaagaaacattccctcccggttcatcgatcctcttcgctctctcccctaccggctctcttacggttgcgttttcgaaagatgatagtatccctgaaaccgggatcgctgtgatcgagaacaaattgttggcggaggcggttctggaatccatcatcgggaagaacggtgtgtcccctggcactaggttaagtgttgcagaaagattatctcagctaatgatgaagaacaaggccgaaaaggaagttagtgatcactctcttgaggaaaaactagccaaagagaactgacaatgatagatttttcttgtgtttttgtcattttccatttcttatgttttctatatctaatttcttatgcggtactcaagtggagaataaagaacatgcatttacattataataaagaataggaatttcggtgtttt

SEQ ID NO: 116582 - DNA, 909 bp, Arabidopsis thaliana
atgactaacatgactcttcgcaagcatgttatatactttcttttcttcataagctgctctcttagcaaaccctccgatgcatccagaggtggcatagccatctattggggccaaaacggaaacgaaggtaacctctctgccacgtgtgccaccggccggtatgcttacgtcaacgtcgcctttcttgtgaaattcggaaatggccaaacaccggagctcaaccttgccggccactgcaaccctgcggcgaacacttgcacccattttggctctcaggtcaaagattgtcagtctcgtggcatcaaggttatgttgtctctcggcggcgggattggaaactactcgattgggtcgagggaggacgcaaaagttatcgctgattatctgtggaacaacttcttgggaggaaaatcatcatcacgtcccttaggtgatgctgttctagatggtatcgatttcaatatcgagcttggctctcctcaacactgggatgatctcgccaggactctctcaaagtttagccacagaggaagaaaaatatatctaacaggagctcctcaatgtccatttccagacagattaatgggaagtgctctcaacactaaacgttttgactatgtttggattcaattctacaataatccaccgtgttcatacagttcaggtaatactcaaaacctcttcgattcatggaacaagtggaccacttcaatcgcagcccaaaaattcttcttgggtctaccggcagctcctgaagctgccggaagtggctatatcccaccagatgtactgacttcacagattcttccgactttaaagaagtctaggaagtatggaggtgtaatgctttggtctaaattctgggatgataaaaatggatacagttcatctatattggctagtgtgtga

SEQ ID NO: 116583 - DNA, 1190 bp, Arabidopsis thaliana
  unsure (1)..(1190): unsure at all n locations
atgcctccacaaaaagaaaaccatagaacattgaacaaaatgaagactaatctttttctctttctcatcttttcacttctcctatcattatcctcggccgagcaatgtggtcgccaagctggaggagcactctgccccaacggtctatgctgcagcgagttcggctggtgcggtaacaccgaaccatactgtaagcagcctggctgccaaagccagtgcactcccggtggtactcctcctggacccaccggcgatctttcgggcatcatttcaagttctcagttcgatgatatgcttaagcataggaatgatgccgcttgtcctgctagaggtttctacacttacaacgcctttatcaccgctgcaaagtccttccccggttttggcaccaccggagacaccgccacgaggaagaaggaggtggccgccttcttcggccagacttcccatgaaactacaggtggatgggctacagcaccagacggaccatattcatggggctactgtttcaagcaagaacagaatcctgcttcagactactgtgaaccgagcgccacgtggccatgcgcatctggcaaacgctactacggaagaggaccaatgcaactgtcgtggaactacaattacggtctatgcggtagagcaataggagttgacttactcaacaaccctgaccttgttgccaacgacgcagtgatcgctttcaaagccgcgatttggttctggatgactgctcagcctcccaaaccgtcttgccatgccgtgatagccggccagtggcagccttcagacgccgaccgtgccgccgggagattaccgggttatggagtgattacgaacatcattaacggtggattggagtgtggacgtggccaagacgggagagtcgccgatcgtatagggttttatcagaggtattgtaacatatttggtgttaatcctggtggtaatcttgattgttacaaccaaagatccttcgttaacggcctcctcgaagctgctatttagtaacgagagtattattattataatataatacgcagctttgtattatcaaaacaataatatcaggctaataaaactctttcccatgaaaaaaaaaaaaaaaaaagnnnnnnnnnnnnnnnnnnnnnnnnnnnnnnnnnnnnnnnnnnnnnnnnnnnnnnnnnnnnnnnnnnnnnnnnnnncat

SEQ ID NO: 116584 - DNA, 1531 bp, Arabidopsis thaliana
  unsure (1)..(1531): unsure at all n locations
nnnnnnnnnnnnnnnnnnnnnnnnnnnnnnnnnnnnnnnnnnnnnnnnnnnnnnnnnncgggggggagccacgcgtccgcacaacagcaacatcaaactctaataaacccaagttggtgtatactataatggtgatggctggtgcttcttctttggatgagatcagacaggctcagagagctgatggacctgcaggcatcttggctattggcactgctaaccctgagaaccatgtgcttcaggcggagtatcctgactactacttccgcatcaccaacagtgaacacatgaccgacctcaaggagaagttcaagcgcatgtgcgacaagtcgacaattcggaaacgtcacatgcatctgacggaggaattcctcaaggaaaacccacacatgtgtgcttacatggctccttctctggacaccagacaggacatcgtggtggtcgaagtccctaagctaggcaaagaagcggcagtgaaggccatcaaggagtggggccagcccaagtcaaagatcactcatgtcgtcttctgcactacctccggcgtcgacatgcctggtgctgactaccagctcaccaagcttcttggtctccgtccttccgtcaagcgtctcatgatgtaccagcaaggttgcttcgccggcggtactgtcctccgtatcgctaaggatctcgccgagaacaaccgtggagcacgtgtcctcgttgtctgctctgagatcacagccgttaccttccgtggtccctctgacacccaccttgactccctcgtcggtcaggctcttttcagtgatggcgccgccgcactcattgtggggtcggaccctgacacatctgtcggagagaaacccatctttgagatggtgtctgccgctcagaccatccttccagactctgatggtgccatagacggacatttgagggaagttggtctcaccttccatctcctcaaggatgttcccggcctcatctccaagaacattgtgaagagtctagacgaagcgtttaaacctttggggataagtgactggaactccctcttctggatagcccaccctggaggtccagcgatcctagaccaggtggagataaagctaggactaaaggaagagaagatgagggcgacacgtcacgtgttgagcgagtatggaaacatgtcgagcgcgtgcgttctcttcatactagacgagatgaggaggaagtcagctaaggatggtgtggccacgacaggagaagggttggagtggggtgtcttgtttggtttcggaccaggtctcactgttgagacagtcgtcttgcacagcgttcctctctaaacagaacgcttgccttctatctgcctacctacctacgcaaaactttaatcctgtcttatgttttatataatataatcattatatgtttacgcaataattaaggaagaattcatttgatgtgatatgtgatatgtgctggacaggtctattcgactgtttttgtactctcttttttgtgtctttttacaatattaaatctatgggtcttgaatgac

SEQ ID NO: 116585 - DNA, 565 bp, Arabidopsis thaliana
  unsure (1)..(565): unsure at all n locations
tgtttagtacacaacagcaacatcaaactctaataaacccaagttggtgtatactataatggtgatggctggtgcttcttctttggatgagatcagacaggctcagagagctgatggacctgcaggcatcttggctattggcactgctaaccctgagaaccatgtgcttcaggcggagtatcctgactactacttccgcatcaccaacagtgaacacatgaccgacctcaaggagaagttcaagcgcatgtgcgacaagtcgacaattcggaaacgtcacatgcatctgacgggaggaattcctcaaggaaaacccacacatgtgtgcttacatggctccttctctggacancagacagggcatcgtggtggtcgaagtccctaagctaggcaaagangcggcagttaagggccatcaagggagttgggccagcccagtcaaaggtcactcatgtcggtttttgaactacctccggggttggcatgccttggtgctgctttccagttaccaggttnttggcttcggcttccgtaggggttatgtttccaaaggttntttncggng

SEQ ID NO: 116586 - DNA, 1654 bp, Arabidopsis thaliana
  unsure (1)..(1654): unsure at all n locations
cgtttctacaacgacccactatagggtaaagccgggtccccccccggtaccggtccggaattcccgggtcgacccacgcgtccgaattctttatcctatattactagtctctgcttcaccaatcctttttgctctcctgtctgctacaaaccttaacttggattctttctggtcaccatggcttcggttactttctctgtccccaagggtttcactgaattctcaggattgcgaagctcctctgcttctcttcccttcggcaagaaactttcttccgatgagttcgtttccatcgtctccttccagacttctgcaatgggaagcagtggtggatacaggaaaggtgtgactgaggccaagcttaaggtggccattaatggattcggtaggatcgggaggaacttcctgagatgttggcatggtcgcaaggactctcctcttgatatcattgccattaatgacactggtggcgtcaagcaggcttcgcatttacttaaatacgactctactctcggaatctttgatgctgatgtcaaaccttctggagagactgcaatctctgttgatggaaagatcatccaagttgtctctaaccgaaacccgtctcttctcccttggaaggagctaggaattgacattgtcatcgaaggaaccggagtgtttgtggatagagaaggtgcagggaaacacattgaagctggtgccaagaaggttatcattactgctccaggcaaaggagatattccaacttatgtcgttggtgtcaatgcagatgcttacagtcatgatgaacctatcatcagcaatgcatcttgcactaccaactgtcttgctccctttgtcaaggttcttgaccagaaattcggtatcataaagggtacaatgacgactactcactcttacaccggtgaccagaggttgctagacgcgagtcaccgtgatctaaggagagcaagagcagctgctttgaacattgttcctacttctacaggagcagctaaagctgtggctcttgtgctccctaacctcaaaggaaaactcaacgggatcgctctccgtgtaccaacaccaaacgtatcagtggttgatctcgttgtgcaggtctcaaagaagacatttgctgaggaagtcaacgctgctttcagagattctgcagagaaagagcttaaaggtatactcgatgtctgcgatgagccactagtgtccgttgatttcagatgctcagatttttcaacgaccattgattcatcactcactatggttatgggagatgatatggttaaggtgattgcttggtatgataatgaatggggttactcacagagagttgttgacttggctgacattgttgccaacaactggaagtgatttcatcaaactttgtttcatgtttttccatttttttctctttctcttttttacattatggttctcaaaatatcggtgaagactgtataattgtagtatggatttgtaataaataatcataaactattcaaacttgtttacattttgtgttttgtgatacacttttcagtnnnnnnnnnnnnnnnnnnnnnnnnnnnnnnnnnnnnnnnnnnnnnnnnnnnnnnnnnnnnnnnnnnnnnnnnnnnnnnnnnnnnnnnnnnnnnnnnnnnnnnnnnnnnnnnnnnnn

SEQ ID NO: 116587 - DNA, 1099 bp, Arabidopsis thaliana
  unsure (1)..(1099): unsure at all n locations
cggacgcgtgggcggacgcgtgggcggacgcgtccgcggacgcgtggggcatttacttaaatacgactctactcttggaatctttgacgctgatgtcaaaccttcaggagactcagctctctctgttgatggaaagatcatcaagattgtatctaatcgtaacccatctaatctcccctggggggaactaggcattgacttagttatcgaaggaaccggagtgtttgttgacagagacggtgctgggaagcaccttcaggctggagccaagaaggttcttatcactgcacctggaaaaggtgacatcccaacttatgtcgttggtgtcaatgctgaactttacagccatgaagatacgatcatcagcaatgcgtcttgtactactaactggtttcgctccattcgtcaaggttcttgaccaggaaattttggggtcataaagggtacaattggcaactttctctactcattacaactgggtgaccccaagggttgttcagatgcggggccacccgtgatctaaggggggcaagagcagcagctttgaacattgttccaacatctacaggagcagccaaagctgtggctcttgtgcttcctaacctcaaaggaaaactctaacggaattgcattgcggtgtgccaactccaaaccgtttcagtggtttgacttcagtcggtgcaaggctcccaaggaaaacttttgctgaagaagtcaatgctgctttcagagatgcagctgagaaagagcttaaaggtatccttgacgtctgtgatgagcctcttgtctctgttgacttcaggtgctctgatgtatcctccactattgattcttccctcacaatggttatgggagatgatatggttaaagtgattgcttggtatgacaatgaaatgggggttactcacaggagagtccgttgattttggnctgncatttgttggccaataactggaagtggaagncctcaacaacctcnttgnatggccngnccccattanttttncctggtaccntggatncgggaangnaaattggagnncccgggggtaatattggaattgggncccaaaaatnaaggaanaaacctnggtcnaac

SEQ ID NO: 116588 - DNA, 569 bp, Arabidopsis thaliana
  unsure (1)..(569): unsure at all n locations
nnnnnnnnnnnnnnnnnnnnnnnnnnnnnnnnnnnnnnnnnnnnnnnnnntctgcttacatcatacaacaagcttctctctctggtagccatggcttcggctactttctctgtggccaaaccatctcttcagggtttttctgagttctcaggacttcgaaactcctctgctcttccctttgccaagagatcttcttccgatgagtttgtttccttcgtcagtttccaaacttctgcaatgagaagcaatggtggatacaggaaaggggtgaccgaggccaagataaaggtagccatcaatgggttcggtaggattggtaggaacttcttgaggtgttggcatggtcgtaaggactctcctcttgatgtcgttgtcattaacgacactggtggtgttaaacaagcatcacatctcctcaaatacgactcaactcttggaatctttgacgctgatgtcaaaccttcaggagactcagctctctctgttgatggaaagatcatcaagattgtatctgatcgtaacccatctaatctccccgggggggaactaggccttgacttagttatcga

SEQ ID NO: 116589 - DNA, 663 bp, Arabidopsis thaliana
  unsure (1)..(663): unsure at all n locations
aagctatccagaatctaatcttatttgcctccaagtcatcaattctttatcctatattactagtctctgcttcaccaatcctttttgctctcctgtctgctacaaaccttaacttggattctttctggtcaccatggcttcggttactttctctgtccccaagggtttcactgaattctcaggattgcgaagtcctctgcttctcttcccttcggcaagaaactttcttccgatgagttcgtttccatcgtctccttccagacttctgcaatgggaagcagtggtggatacaggaaaggtgtgactgaggccaagcttaaggtggcccattaatggattcggtaggatcgggaggaacttcctgagatgttggcatggtcgcaaggactctccctcttgatatcattgccattaaatgacactggtggcgtcaagaaggcttcgcatttaccttaaaacgcgcctctactctcggaatctttgatgctgatgtcaaaaccttctggagagactgcaatcnctgttgatggaaanatcatcaaagttgtctccaaccgaaaccggntcttctcccttggaagggctnnggattgaaattgcatcgaggaccggatgttgtngaaaaaagnnaaggannatnactggcaaaagnnctnctnnctc

SEQ ID NO: 116590 - DNA, 595 bp, Arabidopsis thaliana
  unsure (1)..(595): unsure at all n locations
tcccccgnnccagggttctnacccgngnccccgtttttagggggccaaggccccctncttgaacatttncccncctncnccgggccccctaaagctgtgnctcttgggcccccctacctcaagggaaacccaacgggaccgctctccgtgtcccaacaccaaacgtatcagtggttgacctcgttgtgcaggtctcaaagaagacatttgctggaggaagtcaacgctgctttcagagattctgcagagaaagagcttaaaggtatactcgatgtctgcgatgagccactagtgtccgttgatttcagatgctcagatttttcaacgaccattgattcatcactcactatggttatgggagatgatatggttaaggtgattgcttggtatgataatgaatggggttactcacagaggagttgttgacttggctgacattgttgccaaccaacttggaagtggatttcatcaaaacttttgtttcatggtttttcccattttttcccccttccccttttttcattatggtgcgccccataaaaatccggggtaangcctgnntaanttntngtattgggttttgaaaaaataaccc

SEQ ID NO: 116591 - DNA, 666 bp, Arabidopsis thaliana
  unsure (1)..(666): unsure at all n locations
caccctatcccccccgcctgcccccgccgcggggtattatattagtacacnnnnnnnnnnnnnnnnnnnnnnnnnnnnnnnnnnnnnnnnnnnnnnnnnnnnnnnnnnnnnnnncgcgggctagaactagtggtcaccatggcttcggttactttctctgtccccaagggtttcactgaattctcaggattgcgaagctcctctgcttctcttcccttcggcaagaaactttcttccgatgagttcggttccatcgtctcctttcatacttctgggaggggaagcattggtggatacaggaaaggaaaaactgaggccaaccttaaggggcccatttatgggattccgtaggatccggaaggaacttcctgagatgttggcatggcccccaaggactctccctctggatatcattgccattaatgacactggtggcgtcaagcaagcttcgcatttacttaaatacgactctactctcggaatctttgatgctgctggcacaccttcgggagagaccgcaccgtctgttgctggagagagcacccgagctggccgtttacatagatcggttcatcggccataacgtgggcgttcaaggtggcagctcagaaaggagaatggttgcccgggttggcatcgcctgattatctcaccggcagtcttgcc

SEQ ID NO: 116592 - DNA, 373 bp, Arabidopsis thaliana
cagagatgcagctgagaaagagcttaaaggtaacccttgacgtctgctgatgagcctcttggctctgttgaccttcaggtgctccgatgtatcctccactattgattcttccctcacaatggttatgggagatgatatggttaaagtgattgcttggtatgacaatgaatggggttactcacagagagtcgttgatttggctgacattgttgccaataactggaagtgaagactcaacaacctcttgatgtctgctccattattttttactgttacatgattcggaatgtataattgtagttcctgagtttattatgtatttgtgctctataatttatagtaataaacttgattcaaacaaaaaaaaacccgg

SEQ ID NO: 116593 - DNA, 943 bp, Arabidopsis thaliana
gtagatactcaacaaactcagaactagaattttctaatcttcactcagcgatatttttggctcatactcgaaacaaatggcttctacactctcatttgctgcatcggctctatgttcacctcttgctccatctccttctgtctcatcgaagtccgctacaccgttctcggtttcgttcccacggaagatccctagccggatcagggctcaagaccagagagaaaactccattgatgttgttcagcaaggacaacaaaaagggaaccaaggatcaagtgtcgaaaaaagacctcaacaacgcttaaccatggacgtctctcctttcggattgttggatcctttgtcaccaatgaggacgatgcgacaaatgttagatactatggacaggatgttcgaggacactatgcctgtctcaggaagaaacagaggaggaagtggagtgtcagagattcgtgcaccgtgggacatcaaagaggaagaacacgagatcaagatgcgtttcgacatgcctggtctctctaaagaagacgtcaaaatctctgtagaagataacgtacttgtgatcaaaggagagcagaagaaggaagacagtgatgattcttggtctggaagaagcgttagctcatatggaacacgacttcagctcccagacaactgtgagaaagacaagatcaaagctgagctcaagaacggagtcctctttatcactatccctaagaccaaagtcgaacgcaaagtcatcgatgtccagattcagtaggactcgattcaacattatcctcttgtttaatgtttcttggaggtactgtttgttgtacataagcatatgtttctctttatagcttaaagtgtgtgatgcaagtaaaaacaacaaagagagattttagagaagtcttttccacaaaagaaatgaaataatggcactaaaaaaaaaaaaaaaaaa

SEQ ID NO: 116594 - DNA, 2159 bp, Arabidopsis thaliana
  unsure (1)..(2159): unsure at all n locations
ctaccnnnnnnnnnnnnnnnnnnnnnggcttctctaatttcatagctcctaacaaagcaatatcatttccaatttataaaagttaaagccatggctgcatctttctctgtcccctctatgataatggaagaagaagggagattcgaagcggaggttgcggaagtgcagacttggtggagctcagagaggttcaagctaacaaggcgcccttacactgcccgtgacgtggtggctctacgtggccatctcaagcaaggctatgcttcgaacgagatggctaagaagctgtggagaacgctcaaaagccatcaagccaacggtacggcctctcgcaccttcggagcgttggaccctgttcaggtgaccatgatggctaaacatttggacaccatctatgtctctggttggcagtgctcgtccactcacacatccactaatgagcctggtcctgatcttgctgattatccgtacgacaccgttcctaacaaggttgaacacctcttcttcgctcagcagtaccatgacagaaagcagagggaggcaagaatgagcatgagcagagaagagaggacaaaaactccgttcgtggactacctaaagcccatcatcgccgacggagacaccggctttggcggcaccaccgccaccgtcaaactctgcaagcttttcgttgaaagaggcgccgctggggtccacatcgaggaccagtcctccgtcaccaagaagtgtggccacatggccggaaaggtcctcgtggcagtcagcgaacacatcaaccgccttgtcgcggctcggctccagttcgacgtgatgggtacagagaccgtccttgttgctagaacagatgcggtcgcagctactctgatccagtcgaacattgacgcgagggaccaccagttcatcctcggtgccactaacccgagccttagaggcaagagtttgtcctcgcttctggctgagggaatgactgtaggcaagaatggtccggcgttgcaatccattgaagatcagtggcttggctcggccggtcttatgactttctcggaagctgtcgtgcaggccatcaagcgcatgaacctcaacgagaacgagaagaatcagagactgagcgagtggttaacccatgcaaggtatgagaactgcctgtcaaatgagcaaggccgagtgttagcagcaaaacttggtgtgacagatcttttctgggactgggacttgccgagaaccagagaaggattctaccggttccaaggctcggtcgcagcggccgtggtccgtggctgggcctttgcacagatcgcagacatcatctggatggaaacggcaagccctgatctcaatgaatgcacccaattcgccgaaggtatcaagtccaagacaccggaggtcatgctcgcctacaatctctcgccgtccttcaactgggacgcttccggtatgacggatcagcagatggttgagttcattccgcggattgctaggctcggatattgttggcagttcataacgcttgcgggtttccatgcggatgctcttgtggttgatacatttgcaaaggattacgctaggcgcgggatgttggcttatgtggagaggatacaaagagaagagaggacccatggggttgacactttggctcaccagaaatggtccggtgctaattactatgatcgttatcttaagaccgtccaaggtggaatctcctccactgcagccatgggaaaaggtgtcactgaagaacagttcaaggagagttggacaaggccgggagctgatggaatgggtgaagggactagccttgtggtcgccaagtcaagaatgtaagacatatgttcattacggcggtgcggccaaagcggtgcggcatcttcgtaggaaagcttggaaaccacactatcttcaatatatatctttggacacccgagtaaaagaaaaaaaaagacagaaacagataataaatgtatctttgttattgtatttctcttcttcaacgtaataattgggttaaaaggtttggggcaatattttatggggtttgcttctttgtatggatatttggaatttggtgttattggctttggttatatgattaggatccactagttctagagcggccgcccccccggtggaggtcccgcttatctaacctaggtgggttccat

SEQ ID NO: 116595 - DNA, 559 bp, Arabidopsis thaliana
  unsure (1)..(559): unsure at all n locations
cccccccccgatcgaggggggaatcaataggctggttatcgatttcggggccgctttctctgccccctctatgataatggaagaagaagggagattcgaaccggaggttgcggaagtgcagacttggtggagctcagagaggttcaagctaacaaggcgcccttacactgcccgtgacgtggtggctctacgtggccatctcaagcagggctatgcttcgaacgagagggctaagaagctgtggagaacgctcaaaagccatcaagccaacggtacggcctctcgcaccttcggagcgttggaccctgttcaggtgaccatgatggctaaacatttggacaccatctatgtctctggttggcagtgctcgtccactcacacatccactaatgagcctggtcctgatcttgctgattatccgtacgacaccgttcctaacaaggttgaacacctcttcttcgctcagcagtaccatgacagaaagaagagggggaaagattggcttgcccgggaggggggcaaaaattcgtcgnggctcctaagcctaatgcgggggnac

SEQ ID NO: 116596 - DNA, 626 bp, Arabidopsis thaliana
agcttctctaatttcatagctcctaacaaagcaatatcatttccaatttataaaagttaaagccatggctgcatctttctctgtcccctctatggtaagaaaacgacccataattctcctttgtattatttgattaagttgaatacaatagaattatttcaccagtaaataagactaacatggaaattgatgatcgataaaccaaatcagataatggaagaagaagggagattcgaagcggaggttgcggaagtgcagacttggtggagctcagagaggttcaagctaacaaggcgcccttacactgcccgtgacgtggtggctctacgtggccatctctagcaaggctatgcttcgaacgagatggctaagaagctgcggcgagcgctcaaaagccactaaccaagacaacatctttacccgctgtacctattacgacgcgctggacccagcaagggtgtcgatgagtctaacagtgacaccatatacatgttgcttggtgtctaaccattaaatactctatatagataggaggctaggccccattgtgaaggctacaatttttatgatgcacgaggacaacggagaaattgtggtgcaggacgtaaccccctggagtatatcca

SEQ ID NO: 116597 - DNA, 637 bp, Arabidopsis thaliana
  unsure (1)..(637): unsure at all n locations
gntcctgcccngatttttgcantcaacccttcggtccaccgntccctgtggtgaancatttncaaggattncctagncccggatnttggcttatgtgnggggttccaaggggaagagnggccccatggggttgccactttggctcaccagaaatggcccggtgctaattactatgatcgttatcttaagaccgtccaaggtggaatctcctccactgcagccatgggaaaaggtgtcactgaagaacagttcaaggagagttggacaaggccgggagctgatggaatgggtgaagggactagccttgtggtcgccaagtcaagaatgtaagacatatgttcattacggcggtgcggccaaagcggtgcggcatcttcgtaggaaagcttggaaaccacactatcttcaatatatatctttggacacccgagtaaaagaaaaaaaaagacagaaacagataataaatgtatctttgttattgtatttctcttcttcaacgtaataattgggttaaaaggtttggggcaatattttatggggtttgcttctttgtatggatatttggaatttggtggtattggctttggttatatgactattgatattcctataaaaaattaatattctcttttttttt

SEQ ID NO: 116598 - DNA, 1257 bp, Arabidopsis thaliana
  unsure (1)..(1257): unsure at all n locations
nnnnnnnnnnnnnnnnnnnnnnnnnnnnnnnnnnnnnnnnnnnnnnnnaacaagcgtccgcccacgcgtccgcccacgccctctccaaaacacacccacacgtacgcacacacacaaagacaatgtctcctttcaaaatattcttcttcacgactcttctcgtggcggcgttttcagtgtcggctgctgatttcaacactgacgtcaacgtagcttggggaaatggccgtgggaagatactcaacaacggccagcttcttactctctccttagacaaatcctctggttccggttttcaatccaaaacagagtatttgtttggaaagattgatatgcagattaagcttgttcctggtaactctgcaggaacagtcacaactttttacctaaaatccgaaggatccacttgggatgagattgattttgagttcttgggtaatatgagtggagatccttatactttacacactaatgtttacactcaaggtaaaggtgacaaagagcaacaattccatctctggttcgacccaaccgccaatttccacacttactcaatcctctggaaccctcaaagaatcatattgaccgtcgatgacacacccattagagagtttaaaaactatgagtctctcggtgtcttgtttccaaagaacaagccgatgaggatgtacgcgagtttatggaacgcagacgattgggcaacaagaggcggtcttgttaaaactgattggtctaaagctccattcatggcttcttacagaaacattaagattgactcgaaaccaaactccaattggtacactcaagaaatggattcaacaagccaagctagactcaaatgggttcagaagaattacatgatctacaattattgtactgaccataggaggtttccacagggagctcctaaggaatgcacaacaagctcatagaatctcaaattatattctatttatttatctacacttcctctctttcttttatgtgaaaattgtgaatgctctgtttatagcttgtctattatgtccgagaatttctttttctgtttttgattcttttcgttgtatatctttgtccaataaaggaaatgatgtgtctttactcttatagatatgtataaaaagatgtccctgttttatttgttaaaaaaaattgtttatgataatgatagttcttttaaaaaaaaaaaacaaacaaaagggcggccgcnnnnnnnnnnnnnnnnnnnnnnnnnnnnnnnnnnnnnnnnnnnnnnng

SEQ ID NO: 116599 - DNA, 634 bp, Arabidopsis thaliana
  unsure (1)..(634): unsure at all n locations
attatatgttaaactctctcccactatatatatgtatcctccttcttctgtatttctcacattggttaccaaaccctgtggggaacacacccacacgtgcgcacacacacaaagacactgcctcctctcaaaatatgcttcttcacgactcttctcgtggcggcggtttcagcggcggctgctgatttcaacactgacgtcaacgtagctgggggaaatggccgtgggaagatactcagcaacggccagctccttactctctccttagacaaatcctctggttccggtcttcaatccaatacagagtatttgggttggaaagattgatatgcagattaagctcgttcctgggaactctgcaggaacagtcacaactttttacctaaaatccgaaggtcccacttgggatgagattgattttaagttcttgggnaatatgagtggagatccttattactttncacacctaatgtttcactcaagggtaagggtgncaaagggnaccatttcatctttggtttggcccaaccggcaatttccacattncttaanccntggnccntnaaggattatnttgccgngggggaaancccttggggggttaaaccttngggctctnggggnttntttnaag

SEQ ID NO: 116600 - DNA, 687 bp, Arabidopsis thaliana
atgagaataaggagaagagatgaaaaagagaatcaagaatacaagaaaggtttatggacagttgaagaagacaacatccttatggactatgttcttaatcatggcactggccaatggaaccgcatcgtcagaaaaactgggctaaagagatgtgggaaaagttgtagactgagatggatgaattatttgagccctaatgtgaacaaaggcaatttcactgaacaagaagaagacctcattattcgtctccacaagctcctcggcaatagatggtctttgatagctaaaagagtaccgggaagaacagataaccaagtcaagaactactggaacactcatctcagcaaaaaactcgtcggagattactcctccgccgtcaaaaccaccggagaagacgacgactctccaccgtcattgttcatcactgccgccacaccttcttctcgtcatcatcaacaagaaaatatctacgagaatatagccaagagctttaacggcgtcgtatcagcttcgtacgaggataaaccaaaacaagaactggctcaaaaagatgtcctaatggcaactactaatgacccaagtcactattatggcaataacgctttatgggttcatgacgatgattttgagcttagttcactcgtaatgatgaattttgcttctagtgatattgagtactgcctttag

SEQ ID NO: 116601 - DNA, 1387 bp, Arabidopsis thaliana
  unsure (1)..(1387): unsure at all n locations
nnnnnnnnnnnnnnnnnnnnnnnnnnnnnnnnnnnnnnnnnnnnnnnnnnnnnnnnnnnnnnnnnnnnnnnccacgcgtccgcactcacaagtcacaactcaaataatctttgtcttcctcctacaaataatggggttttctccttcattttcttgcagtgctattggagccctaattttgggttgccttctgcttcaagcatcaaactctaatgctcagttgaggcctgatttctacttcgggacgtgcccatttgtttttgatatcattggaaatatcatcgtcgatgaactgcagactgatcctcgtattgccgcgagcctccttcgtcttcactttcacgactgctttgttcgtggttgtgatgcatcgatcttgcttgacaattccacatcattccggactgagaaagatgctgctccgaacgcaaattcggctcgagggtttaatgtcatagatagaatgaaagtagcccttgagagagcttgcccaggaagagtctcttgtgcagatattctcaccatcgcctctcaaatatcagtgcttttgtcgggaggtccatggtggccggttccgaaggggaggagagacagtgtagaagctttcttcgctctggctaatacagctctgccctctccgtttttcaatcttactcaacttaaaacagcctttgctgacgttggcctaaaccgcacttccgatctagttgctctttccggtggtcacacatttggaagagcacaatgccagttcgtgacgcctcgtctctacaacttcaatggtacaaacagtccagacccaagtctgtacccaacttaccttgtcgaactccgtcgattgtgtcctcaaaacggaaacggcaccgttctggtcaacttcgatgtcgtgactccagatgctttcgatagtcaatactacaccaaccttcgtaatgggaaaggtcttattcagagtgaccaggaactcttttcgactccaggagccgatacgatccctttagtaaaccaatacagcagcgacatgtccgtgttctttcgagcattcattgacgcaatgattaggatgggaaatcttagacctttgactggaactcaaggagagattagacaaaattgtagggttgtgaatccacgaattagggttgtggagaacgacgatggtgttgtgagttctatctgattatgcatgttgccatgttggggatatatatatggatatgtaagaaagtataaaatgcgcacgtgagaacaatttcgactaataaaagttttcacgagttatgagattaaaaaaaaaaaaaaaaaaaaaaaagggcggccgctctagaggatccaagcttacgtacgcgtgccatgcgacgtcaannnnnnnnnnnnnnnnnnnnnn

SEQ ID NO: 116602 - DNA, 943 bp, Arabidopsis thaliana
  unsure (1)..(943): unsure at all n locations
acaagtcacaactcaaataatctttgttttcctcctacaaatatggggttttntccttcattttcttgcagtgctattggagccctaattttgggttgccttctgcttcaagcatcaaactctaatgctcagttgaggcctgatttctacttcgggacgtgccctctccgtttttnaatcttactcaacttaaaacagcctttgctgacgttggcctaaaccgcacttccgatctagttgctctttccggtggtcacacatttggaagagcacaatgccagttcgtgacgcctcgtctctacaacttcaatggtacaaacagtccagacccaagtttgaacccaacttaccttgtcgaactncgtcgattgtntcctcaaaacgggaaacgggcaccgttctggtcaacttcgatgtggtgacctccagangctttcgntaggcaaatactnnaccaaccttcgcaaatgggaaaggtttgattcagagtgaccgagtccttttttcaactccaggagctgatacgattccactagtaaaccaatacagcagcaacacgttcgttttctttggagcattcgttgatgcaatgattaggatgggaaatcttaaacctttgactggaactcaaggagagataagacagaattgtagggttgtgaatccaagaattagggttgtggagaacgacgatggtgttgtgagttctatctgattatgcatgttggggatatatggatatgtaagaacgtataaaatgtgtgggattgtgggaacatttcggctaaataaagttctcacaagttcgtgtgatttatgaaatttggtcttaatttaccactttttgattccggattttctgagcactaaaaaagtggatgaatttcataatatattgatacgtggtgtttgaataaaaaaaaaaaaaaaaaaaagggcggcc

SEQ ID NO: 116603 - DNA, 1312 bp, Arabidopsis thaliana
  unsure (1)..(1312): unsure at all n locations
cccacgcgtgaatcaactagttttgtttttcctctttcaaaaatgcatttctcttcgtcttcaacatcgtccacttggacaatcttaatcacattgggatgtcttatgcttcatgcatctttgtccgctgctcaactcacccctaccttctacgataggtcatgtcctaatgtcactaacatcgtacgagaaaccattgtaaatgagttaaggtcggaccctcgtatcgctgcgagcatccttcgtcttcacttccacgactgctttgttaatggttgtgacgcatccatcttgttagacaacacgacatcatttcgaacagagaaagatgcgtttggaaacgcaaattcggctcggggatttccagtgattgatagaatgaaagctgcggtggagagggcatgcccaagaaccgtttcatgcgcagatatgctcaccattgcagctcaacaatctgtcactttggcaggaggtccttcttggagggttcctttgggaaggagagacagtttacaagcattcctggaactcgctaatgcaaatcttccagctccattctttacacttccacaacttaaagccagcttcagaaatgttggtctcgatcgtccttctgatctcgttgctctctccggggctcacacatttggtaaaaatcaatgtcagtttattcttgacagattatacaatttcagcaacacaggtttacccgaccctacactcaacactacttacctccaaactcttcgtggactatgcccccttaatggcaatcgaagtgccttggtagattttgatctacgtacgcctacggttttcgacaacaaatactacgtgaatctcaaagagcgaaaaggtcttatccagagcgaccaagagttgttctctagccccaatgccactgacacaatccccttggtgagagcatatgctgatggcacacaaacattcttcaatgcatttgtggaggcaatgaataggatgggaaacattacaccaactacaggaactcaaggacaaatcagattgaactgtagagttgtgaactccaactctctgctccatgatgtggtggatatcgttgactttgttagctctatgtgagaattgtttacccaatatgtggctacaagaatacatatatattaatgaataaaactctcaagacgtttacttgagaacatttattttaaaaaaaaaaaaaagggggcgccntagggtcaagtttgncggnnnnnnnnnnnnnnnnnnnnnnnnnnnnnnnnnnnnnnnnnnnnnnnnnnnnnnnnnnnnnnnnnnnnngaagtatcat

SEQ ID NO: 116604 - DNA, 1243 bp, Arabidopsis thaliana
  unsure (1)..(1243): unsure at all n locations
nnnnnnnnnnnnnnnnnnnnnnnnnnnnnnnnnnnnnnnnnnnnnnnnnnnnnnnnnnnnnnnnnnnnnnnnnnnnnnccacgcgtccgcccacgcgtccgctgaactttcgtctctataaaccctttcgacgacgagtgaagaagaaagcgagacgaagaagcaaagatgttcagaaaccaatacgacacagatgttacgacatggagtccaacaggtcgtttattccaagtggaatacgccatggaagcagtgaagcaaggatctgcagcaattggactcagatctcgttctcatgtcgttctcgcttgtgttaacaaagctcaatcggagctttcttcgcatcagaggaagatctttaaagtcgatgaccatatcggtgttgcaatcgctggtctcacagccgacggtcgtgtattgtctcggtatatgagatcggaatcgattaatcactcttttacttatgagtctcctcttcctgttggtcgtctcgttgttcatcttgctgataaagctcaggtctgtacccaacgatcatggaaacgaccctatggtgttggtttgctggtaggtggattggatgagtctggagcccacctttactacaactgtcccagcggaaactacttcgagtaccaagcttttgctattggatcccgttcccaagcagcaaagacctatctggaacgcaggtttgagagctttggggattcttctagagaagatctgatcaaagatgctattttggctgttagggagacattgcaaggggaaacactgaagagttctctctgcacagtcgctattctaggagtcgatgaaccgttccacttcctggaccaggaagcaatacagaaagtgatcgacacatttgagaaagtgccagaggaagaggaaggagaaggcgaggctggtgagggtgaggccgaagctgccgaggctgcaccagcagaacgaggtggtggtgttgcaggtgaccaagacgtggctccaatggaaatgtaaggcttgtgtgtgtaacgctggatggaactattttatttcgatgttagttggatttttactttgcaaaatggctgcgggtttagattatatgcttgagaagttgaaaccatttcgtcattttaactcaatagctgccatcaagactttctcgtaaaaaaaaaaaaaaaaaaaagggcggccgctctagaggatccaagcttacgtacgcgtggatgcgacgtcaagctcttctatgagt

SEQ ID NO: 116605 - DNA, 1023 bp, Arabidopsis thaliana
cgggtccacccaagcgtccgagaggaacaagaagaagaaagatgttcaggaaccagtacgacacagatgtgacaacatggagtcccacaggtcgactattccaagtcgaatacgccatggaagctgtgaaacaaggctccgcagcaataggactcagatctcgctctcatgtcgtcctcgcttgtgtcaacaaagcacaatcagagctctcttctcatcaaaggaagatctttaaagtcgatgatcatattggtgttgctattgctggtctcactgctgatggtcgtgttctctctcgatatatgagatctgagtctattaatcactcttttacttatgagtctcctcttcctgttggtcgtcttgttgttcatcttgctgataaagctcaggtatgtacccaacgatcatggaaacggccttatggtgtgggtttgctggtaggtggattggacgagtcaggagctcacctctactacaactgccctagcggaaactactttgaatatcaagcattcgctatcgggtctcgttcacaagctgcgaaaacctatctggagcgcaaattcgagagcttccaagaatcatcaaaagaagatctgataaaagatgctattatggccataagggaaactttgcaaggggaaacactgaagagctcgctctgcactgtttctgttctaggagtcgatgaaccattccatttcttggaccaggaaagcattcaaaaggtgattgatacgtttgagaaggttcctgaggaagaggaagatgctggtgagggtgaggccgaacccgaagctgctcctggtgctgctggaactggtgaacaaggtggttcaggtgatcaagatgttgcaccaatggaaatttgagcaagagggaatgagttcaaagttggattttctaaccaattttcttgtgtgtagctctttgatatgttccaacttccaagtacaattgtggtttttattcggctttgtttatttaacagcttggaacaaggagttattctaaattact

SEQ ID NO: 116606 - DNA, 3126 bp, Arabidopsis thaliana
  unsure (1)..(3126): unsure at all n locations
cccacgcgtccgccatgaagaaaagaagaacctttcttctattttcatttacctttcttcttcttctatctctttctaaagctgattctgatggagatctctcagcgatgttatcactcaagaaaagcttaaacccacccagttctttcggttggtctgaccctgacccatgtaaatggactcacatcgtttgtacaggaacaaaacgtgtgacccggatccaaatcgggcattcgggtcttcaaggtacactttctcctgatctacgtaacttatcagagcttgaaagacttgagcttcaatggaacaacatctctggtcctgttccttctttaagtggtttagcttcattacaagtcttgatgttaagtaacaacaactttgattctatccctagtgatgtctttcaaggtttaacttcgttacaatctgtagaaattgataacaatccttttaagagttgggagattccagagagtttgagaaatgcttctgctcttcagaatttctctgctaattcggctaatgtttccggttctttacccggttttctcggaccggatgagtttcccggtttgtcgattttgcatttggctttcaacaacttagaaggagagttgcctatgagtttagctggctctcaggttcagtcattgtggctcaatggtcagaaactaaccggtgatattactgttcttcagaacatgactggtttaaaagaggtttggcttcactccaacaagttttcgggtcctttaccggacttttcgggtcttaaggagcttgagagcttgagtttgagagataactcctttacaggtccagttcctgcgtctttgttaagtcttgagtcacttaaagttgtgaacttgacgaataatcatctacaaggaccagtgcctgtgtttaagagctctgtttcagttgatttggataaagattctaacagcttttgcttgtctagtcctggtgagtgtgatcctagagtgaagtctttgcttttgatagctagttcattcgattatccgccccggctcgctgagagttggaaaggaaacgatccttgtactaactggattgggatagcttgtagcaatgggaacattactgttatcagtcttgagaaaatggaactaaccgggacgatttctcccgagtttggagcgatcaagtcgcttcaaagaatcattcttggtatcaacaatcttactggtatgattcctcaagagcttacaacgttacctaatctcaaaacactcgatgtttcgagtaacaagcttttcgggaaggtcccgggttttagaagcaatgttgttgtgaatactaatggtaatcctgacattggaaaggataaaagctctttgtcttctcctggttcttcttcgccttcaggtggttcgggttcaggtatcaacggtgataaagaccggagaggaatgaagtcttcgacttttataggaatcattgttggttcagttcttggaggtttgttatcaatcttcttgattggtttgttagttttctgttggtacaaaaagaggcagaagagattctcaggaagtgagagctcaaatgcagtagtggtgcatccgcgacattcggggtctgacaatgagagtgttaagattacagttgcgggttcaagcgtaagcgttggagggataagtgatacttatacgcttcctggtacaagtgaggttggagataatattcaaatggtggaagcaggaaacatgctgatatcaatccaagtgcttcgttctgtgactaacaacttcagttcagataacattcttggatcaggaggtttcggggttgtgtataaaggcgagttgcacgatggaacgaagattgcggttaagagaatggagaatggagttattgctggtaaaggctttgcggagtttaaatcagagattgcggttttaacaaaggttaggcatcgtcatttggttacgcttcttggttattgtttggatgggaatgagaagttacttgtgtatgagtatatgcctcaagggacattgagtaggcatttgtttgagtggtcagaggaaggacttaagcctctgttgtggaaacagagattgactttagctttggatgttgctagaggtgtggagtatctccatggattagctcaccagagctttatacacagggatcttaagccttctaacattcttcttggggatgatatgagggcgaaagttgcagactttggactcgttcgtctcgctcctgaaggaaaaggatcgattgagactagaatcgctggaacatttggttacttggcacccgaatacgcagtaacgggtcgagtgacaacgaaggtcgatgtatacagcttcggggtaatcctaatggaactcataacgggaagaaaatctctagacgaatcgcaaccagaagaaagcattcacttggtctcttggttcaaacggatgtacatcaacaaagaagcatcattcaagaaagcgatcgacacgacaatagacctagacgaagaaaccttagccagcgttcacactgttgctgaactagcaggccattgctgtgcccgtgagccttaccagagaccagacatgggacacgcagtcaacattctgtcatcactcgttgagctatggaaaccgtcggatcagaatccagaagacatatatggtatcgatctcgacatgtctttacctcaagcacttaagaaatggcaagcttatgaaggaagaagtgatctcgaatcttcaacttcatcacttttacctagcttggacaacacgcagatgagtattcccactagaccttacggattcgcagagtcattcacttcagtagatggacgatgaatgagagattccttgaaacccagatttgatttttctccttttggaaatttgggtttcctctcctcttcttcccctcccaattttttcatgtttcttgtgatgcaagtaacatttagggcttaatttgggtgtcttaatattattttgatgttgagtgtttnnnnnnnnnnnnnnnnnnnnnnnnnnnnnnnnnnnnnnnnnnnnnnnnnnnnnnnnnnnnnnnnnnnnnnnnnnnnnnnnnnnnnnnnnnnnnnnnnnnnnnnnnnnnnnnnnnnnnnnnnnn

SEQ ID NO: 116607 - DNA, 1624 bp, Arabidopsis thaliana
  unsure (1)..(1624): unsure at all n locations
aaaagattcactaaatggccaccgcaagcaccgctgctactttcagaccctcctccgtttcagcttcttccgaattaacccatctgagatcaccctccaaactccccaaatttacgcctctgccatcggctcgctcacggtcctcttcttcgttctccgtctcctgcaccatcgctaaggacccagctgttgtcatggcggactcggagaagattaaggccgctggatctgatccgactatgtggcaacgacctgattcattcggtcgtttcgggaagtttggcggcaagtacgtccccgaaactctaatgcacgccctctctgaactcgaaacggctttctattcgctcgccaccgacgaagatttccagagagaattagcagagatcttgaaagactacgttggtcgggaaagtcctctttactttgcagagaggctcacggagcattaccgccgtgaaaacggtgaagggccgctcatatacctcaaaagggaagacttgaaccacaccggtgctcacaagatcaacaacgctgtggctcaggctcttctcgccaagcgtctaggaaagaaacgaattattgctgagacaggggctggtcaacatggtgtagccacagctactgtgtgtgcacgtttcggtttgcagtgcattatctacatgggtgctcaagacatggagagacaagctcttaatgtgttcagaatgcgtcttctcggtgctgaggtaaggggagtccactctggaacagccactttaaaggacgcaacttctgaagctataagggattgggtgaccaatgtggagactacacattacatattgggatccgttgcgggtcctcatccttatcctatgatggtcagagactttcacgcggtgattggtaaagaaacaaggaaacaagcgatggagaaatggggcgggaagccggatgttttggtggcttgtgtcggtggtggttcaaacgctatgggactcttccatgaatttgtgaatgacacagaggtccggatgatcggtgtggaagcagcgggattcggattggacagtggcaaacacgctgctacattgacaaaaggagatgttggtgtcctccatggagctatgagttacttgctgcaagatgatgatggacaaatcattgaaccacactccatcagtgcaggattggactaccctggagtcggacccgagcacagtttctttaaagacatgggacgggctgaatactatagcataaccgacgaagaagcgttggaagcgttcaagagagtgtcgcggttagagggaatcattccagcactggagacctcacacgcactagcttacctcgagaagctatgtcccacattatcagacgggacgagagtggtcttgaacttcagcggaagaggagataaagatgttcagacagtggctaaatatcttgatgtttgaagagagaaacacttatgtttgtttttcagttattcagacagaatgaaatcctttttgtacttgtaaaaaaaaaaaaagnnnnnnnnnnnnnnnnnnnnnnnnnnnnnnnnnnnnnnnnnnnnnnnnnnnnnnnnnnnnnnnnnnnnnagggaattgcaaactcaatgggggggggcgggggc

SEQ ID NO: 116608 - DNA, 890 bp, Arabidopsis thaliana
  unsure (1)..(890): unsure at all n locations
aatacgtctcactatagggtaagctggtacgcctgcaggtaccggtccggaattcccgggtcgacccacgcgtccgggagaaatggggcgggaagccggatgtcttggtggcttgtgtcggtggtggttcaaacgctatgggactcttccatgaatttgtgaatgacacagaggtccggatgatcggtgtggaagcagcgggattcggattggacagtggcaaacacgctgctacattgacaaagggagatgttggtgtcctccatggagctatgagttacttgctgcaagatgatgatggacaaatcattgaaccacactccatcagtgcaggattggactaccctggagtcggacccgagcacagtttctttaaagacatgggacgggctgaatactatagcataaccgacgaagaagcgttggaagcgttcaagagagtgtcgcggttagagggaatcattccagcactggagacctcacacgcactagcttacctcgagaagctatgtcccacattatcagacgggacgagagtggtcttgaacttcagcggaagaggagataaagatgttcagacagtggctaaatatcttgatgtttgaagagagaaacacttatgtttgtttttcagttattcagacagaatgaaatcctttttgtacttgtaatctgtttgtactttacttctctctggtcagtacgtttccaacaaaattggaaatagaaaaagattacgaagagaacgaaatttgaataaatgtattatcaataaaataaaaaacatttcataaaaaaaaaaaaaaaagnnnnnnnnnnnnnnnnnnnnnnnnnnnnnnnnnnnnnnnnnnnnnnnnnnnnnnnnnnnnnnnnnnnnnnnnnnnnnnnnn

SEQ ID NO: 116609 - DNA, 1839 bp, Arabidopsis thaliana
  unsure (1)..(1839): unsure at all n locations
nnnatgattctccaggtctctacgactcactattgggaaagctggtccgcctgcaggtaccggtccggaattcccgggtcgacccacgcgtccgcaacaaaacaaccttcttcctcgcgaaaacagagagaaagaggaagaagaagaagaagtctctgagaaattttcgaacatgagggagatcattagcattcatatcggacaagctggtattcaggtcggaaattcttgttgggagctttattgtctcgaacatggtatccaacccgatggcaccatgcccagtgatagtactgttggtgcatgtcatgatgcattcaacacattctttagcgagacaagctcaggccaacatgtgcctcgagctgtgtttcttgatctcgaaccaaccgtcattgacgaagtaagaaccggcacttacagacagcttttccatcccgagcaacttatctctggcaaagaagatgcagccaataactttgctagaggccattacactgttggaagggaaattgttgacacctgccttgaaaggctgaggaaattggcagacaattgcacagggttacaaggatttttggtattcaatgctgttgggggtggaacaggttctggtttgggttctttactgttggagcgcttgtccgtagattttggaaaaaaatcaaaactcggtttcaccatctacccttctcctcaggtttctacagcagttgtggagccgtataacagtgttctctcgactcattctcttctcgaacacacagatgttgttgttcttttggacaatgaagccatatacgatatctgcaggagatctttagacattgagaggcctacatactccaatttgaaccgcttgatctcccaaaccatctcttcgcttacaacttctctaagatttgacggtgccatcaatgtggacatcaccgagttccagaccaaccttgtaccttaccctcggatccacttcatgctctcctcttatgcacctgtgatttcatctgcaaaggcctaccatgagcagttttcggtccctgagatcacgacttccgtctttgaaccctccaatatgatggctaaatgtgaccctaggcatggcaagtacatggcttgctgtttgatgtatcgtggtgacgttgtgcccaaggatgtcaatacagccgttgctgccatcaaagccaaacgaacaattcagtttgttgactggtgcccaactggattcaagtgcgggataaactaccagccgccttccgttgttccaggtggtgacctggctaaggttcaacgagcggtttgcatgatcagcaataatactgcagttgctgaagtgttctcacgtatagaccataagtttgatctcatgtactccaaaagagcctttgtccattggtatgtaggagagggtatggaagaaggagagttctctgaggctcgtgaggatcttgctgccctcgagaaagattatgaggaagttggtggagaaggagcggaggacgacgacgaagaaggcgatgagtattagaaagacacaagagtgtgtgttcccttgtttctttcttgtgaagtacagtaattatgtctttgtgaatgtgatctctacagttattttgtgatgtttacgggtctctccccttttatttctcatttgtgtttactaaaggattgcatttctagtgcatctcaatacatagtttgaaggatttttggcatttcaaatacaaataacaaactaataaagatccttgtaagaaaaaaaaaaaaaaaagnnnnnnnnnnnnnnnnnnnnnnnnnnnnnnnnnnnnnnncatnnnnnnnnnnnnnnnnnnnnnnnnnaac

SEQ ID NO: 116610 - DNA, 1693 bp, Arabidopsis thaliana
  unsure (1)..(1693): unsure at all n locations
gtttcaaattctctctctctttctctttctttctcaatttttgtagtttcatactctagcttactaatcaaagatgcgagagattcttcacatacaaggtggccaatgcggaaaccagatcggagctaagttctgggaagtagtttgcgccgagcacgggatcgattcgacgggaagataccaaggagagaacgatttgcaactcgaacgagtcaatgtctactacaacgaagcgagttgcggaagattcgtcccacgcgccgtcctcatggatctagagcctggtactatggatagtgtcagatccggtccgtacggtcagatcttccgtcctgataacttcgtatttggtcaatccggtgccggtaacaattgggctaaaggacactacactgaaggtgctgagcttatcgattccgttctcgatgttgttcgtaaggaacgtgagaattgtgactgcttgcaaggattccaagtgtgtcactcattaggaggaggaactggatctggaatgggaacgttgttgatttcaaagattagggaagagtatccagataggatgatcgtgacgttttctgttattccatcaccgaaagtgtcagacactgttgttgagccttataatgcaactctctctgttcatcagcttgtggagaatgcagatgagtgtatggttcttgacaatgaagctctctatgacatttgcttcagaactcttaagctcaccactccaagctttggagacttgaatcacctcatctctgcaaccatgagtggtgtcacttgctgccttcgtttcccgggtcagctaaactctgacctgcgcaagcttgcagtgaatttaatcccattccctcgtctccacttcttcatggttgggtttgcaccactcacatctcgtggatcacagcaatacagagccttaaccgtccctgagctcactcaacagatgtgggatgccaagaatatgatgtgtgcagctgatccacgccacggcaggtacttgacagcctcagccatgttcagaggcaaaatgagcacgaaagaagttgacgaacagatgatcaacgttcagaacaagaactcgtcatactttgtggaatggatcccaaacaacgtgaaatcaaccgtgtgtgacattccaccaacaggtctgaaaatggcttcgactttcatcgggaactcgacatcgatccaggagatgtttaggcgtgtgagcgaacagttcacagcgatgttcagaagaaaagctttcttgcattggtacacaggtgaaggaatggacgagatggagttcacagaggcagagagcaacatgaatgatttggtatcagagtatcaacagtaccaagacgcaacggctgatgaggaagaagggtatgagtatgaagaagacgaagtggaagtgcaggaggagcaataacaacagcttctctgtttctcttaattccttttttttttttctcttttgtgtgagtttagtgtcttcttattcattttctcttctggttttggttttcttgtgttgacatttggctatgtgtgatggtgcatttatgtctaaggcttaggaaaatatatgtttataagttttttcgggtgaaaaaaaaaaacacaaagnnnnnnnnnnnnnnnnnnnnnnnnnnnnnnnnnnnnnnnnnnnnnnnnnnnnnnnnnnnnnnnnnnnnnnnnn

SEQ ID NO: 116611 - DNA, 1927 bp, Arabidopsis thaliana
  unsure (1)..(1927): unsure at all n locations
nnnnnnnnnnnnnnnnnnnnnnnnnnnnnnnnnnnnnnnnnnnnnnnnnnnnnnnnnnnnnnnnnnnnnnnnnnnnnnnnnncccacgcgtccgcgaagttgaaccaaaaaaagaagatctcactctcaccgccttcatttcctcgatctccgtcttcctccttctccgtctgtcgcagagcatcgctcgaattagggtttctgctgagagaagatgagggaaatcattagcattcatatcggacaagccgggatccaagtcggaaattcctgctgggagctttactgtctcgaacatggaatccagcccgacggaatgatgccgagtgatactacagttggtgttgcacacgatgcgttcaatactttctttagcgagactggtgctgggaagcatgttcctagggctgtcttcgttgatctcgagcctaccgttatcgacgaagttcgtactggtacttaccgtcaacttttccatccagagcagctcatttctgggaaagaagatgctgctaacaacttcgctagaggacattacactgttgggaaggaaattgtggatctatgtcttgaccgtgtgaggaaacttgccgacaactgtactggcttacaagggtttttggtgttcaatgctgttggtggtggaactggttctggattgggttctctgttgctagagcgtttgtctgtagattatggaaagaagtctaagcttggttttaccatatacccttctcctcaggtttctactgctgttgtagaaccttacaacagtgttctctcaacgcattcccttcttgaacatacggatgtagctgtcctcttggataacgaagccatctatgacatttgccgcagatccctagatatcgagaggccaacctacacaaacttgaacaggttgatatcacagatcatttcatccttgacaacatctttgaggtttgatggtgccatcaacgtggatatcactgagttccagaccaatcttgtcccatatccccgtatccatttcatgctgtcatcttatgcaccagtcatctcagccgccaaggcttaccacgagcagctatcagtccctgagatcaccaatgccgtttttgagccagctagcatgatggcaaagtgtgacccgagacacggaaagtacatggcctgttgtttgatgtaccgaggagatgttgttcccaaagatgttaatgctgctgttggcaccatcaagacaaagaggactgttcagtttgttgactggtgcccaactgggttcaaatgtggaatcaactaccaacctccaacagttgttccaggtggtgacctcgctaaggttcagagagctgtatgtatgatcagtaacaacacagcagttgcagaggtgttctcacggatcgaccacaagtttgatctcatgtatgcgaagagggcatttgtccactggtacgttggtgaaggaatggaggaaggtgaattctctgaggcacgtgaagacttggccgcactggagaaagattacgaagaagttggtgctgaaggtggagacgatgaagaagatgaaggtgaagactattgacaccttttctcaaaaaaactgcaaccaaaaaaagttttttcgtttatctgttttcactttatgattcttgttgattgtttaaatcctgtaaaatattcgttcggtcttcgtgttttatctcggttggatacattttcattggtagagcgaccattgcgagttcccgagttcattatcaagcttttgttgtaccaaactttgataatcttcttacaactgtccatttttccttgaagtaaaaaaaaaaaaaggnnnnnnnnnnnnnnnnnnnnnnnnnnnnnnnnnnnnnnnnnnnnnnnnnnnnnnnnnnnnnnnnnnnnnnnnnnnnnnnnnnnnnnnnnnnnnnnnnggcagtatcat

SEQ ID NO: 116612 - DNA, 1057 bp, Arabidopsis thaliana
  unsure (1)..(1057): unsure at all n locations
cagctctcctacgactcactattgggaaagcatcgcccgcctgcaggtaccggtccggaattcccgggtcgacccacgcgtccgccaaaactccagaaccctagaattcgaaatctccaaagaacccgacaaagcgccatgtcgctcactatcccggcgaatctcgttctcaacccgagatctaacaaatctctcactcaatccgtacctaaatcctccgcaagattcgtctgctccgatgacaaatcctcctcctccacacctcaatccatgaaagctttctccgccgccgtcgccctctcttccatcctcctctctgctcctatgccagctgtcgctgatatctcaggtttgactccttgcaaggactcaaaacagttcgctaaaagagagaagcaacagatcaagaagcttgaatcttctcttaagctctacgctcctgaatctgcccctgctcttgctctcaatgctcagatcgagaaaaccaaacgcaggttcgacaactacgggaagtacggattgttatgcgggtcagacggtttaccgcacttgatagtgaacggagaccagcggcattggggagagttcattactccagggattcttttcctctacattgctggatggatcgggtgggttggaagaagctacttaatagctattagtggtgagaagaaacccgcgatgaaagagatcatcatcgatgttcctttggctagtcggatcatcttccgtggtttcatttggcccgttgctgcctacagagagtttctcaatggtgatctcattgctaaggatgtttaaaaagggaacttgttttctgcttttgtgttactctctctaatctctttgttttccattgtacttattgaaaaacaatgcattgtcgaaaaccttataaaatttggattgcgccagttaaaaaaaaaaaaaaaaaaaagaaaaaaaacaaaaaaaggacggccgctctagaggatccaagcttacgtacgcggtcatgcgacgtcaaagctcttctatnnnnnnnnnnnnnnnnnnnnnnnnnnnnnnnnnnnnn

SEQ ID NO: 116613 - DNA, 507 bp, Arabidopsis thaliana
ttaggacacactatagaagagtctatgacgtcgcatgcacgcgtacgtaagctcggaattcggctcgagtctcgctcaccgctctcatttcctcaattctccgtccgtcgaagaagcgaatcgctcgaaattagggtttctactgagagaagatgcgagaaatcataagcattcacatcggacaagctgggatccaggtcggaaattcgtgttgggagctttactgtctcgaacatggaatccagccggacggaatgatgccgagtgatactacagttggtgttgcacacgatgcgttcaatactttctttagcgagactggtgctgggaagcatgtccctagggctgtcttcgttgatctcgagcctaccgttatcgacgaagttcgtactggtacttaccgtcaacttttccatccagagcagctcatttctgggaaagaagatgctgctaacaacttcgctagaggacattacactgttgggaaggaaattgtggatctatgtc

SEQ ID NO: 116614 - DNA, 492 bp, Arabidopsis thaliana
  unsure (1)..(492): unsure at all n locations
ttgaacatacggatgtagctgtcctcttggataacgaagccatctatgacatttgccgcagatccctagatatcgagaggccaacctacacaaacttgaacaggttgatatcacagatcatttcatccttgacaacatctttgaggtttgatggtgccatcaacgtggatatcactgagttccagaccaatcttgtcccatatccccgtatccatttcatgctgtcatcttatgcaccagtcatctcagccgccaaggtttaccacgagcagctatcagtccctgagatcaccaatgccgtttttgagccagctagcatgatggcaaagtgtgaccccgagacacgggaaagtacatgggcctgttggtttgatgtaccggggcgatttttttcccaaaagggtgtaanncctgttttttgggccccttnaggccaagggggctttttaagttttttttnntngtncccanctggggtaaaaatggggnaca

SEQ ID NO: 116615 - DNA, 653 bp, Arabidopsis thaliana
  unsure (1)..(653): unsure at all n locations
cacacttcacccaaaactccagaaccctagaattcgaaatctcccaagaacccgacaaagcgccatgtcgctcactatcccggcgaatctcgttctcaacccgagatctaacaaatctntcactcaatccgtacctaaatcctccgcaagattcgtctgctccgatgacaaatcctcctcctccgcacctcaatccatgaaagctttctccgccgccgtcgccctctcttccatcctcctctctgctcctatgccagctcgtcgctgatatctcaggtttgactccttgcaaggcctcaaaacaagttcgcttaaagggggggaggcaacagcttcaaggaggctttaattcttctttttaaggtttttaagggttccctgcaactttggcccctggttttgtgctcttaagtgctcagttgtggggaaaacccaaagggcaggttcgacaactacgggaagtacggattgttatgcgggtcagacggtttaccgcacttgatagtgaacggagaccagcggcattggggagagttcattactccagggattcttttcctctacattgctggatggatcgggtgggttgttagtaccttctttcttatctaacccgattcatatgatactctcctcttatctcttttttttct

SEQ ID NO: 116616 - DNA, 1761 bp, Arabidopsis thaliana
  unsure (1)..(1761): unsure at all n locations
attcctttgtcgacccgcgcgatcagatctagattcagtttttttcatcaaaaaagagcgtcttcataaacgcccttcgtcttcttccctggaaatctagtttctttcttccacgaaaatgagagagtgcatttcgatccacattggtcaggctggtatccaggtcggaaatgcttgctgggagctgtactgtcttgaacatggcattcagcctgatggccagatgccgagtgacaagactgttggtggaggtgacgatgctttcaacaccttcttcagtgaaaccggtgcaggtaagcacgtcccacgtgctgtctttgttgatcttgagccaactgtgatcgacgaggtcaggactggtacttaccgtcagcttttccaccctgaacaactcatcagcggtaaagaagatgcagctaacaatttcgcccgtggtcattacaccattgggaaagagattgttgatctgtgcttggaccgtatcagaaagctcgctgataactgtactggtctccaaggattcctcgtcttcaacgctgttggtggagggactggatctggtcttggatctctcctccttgagagactttctgttgactacgggaaaaagtccaagttgggtttcacagtttacccatctccacaggtgtctacctctgtggttgagccttacaacagtgtcctctccactcactctctcttggaacacactgatgtctccatcctcctcgacaatgaagctatctatgacatctgtagacgctcccttaacattgagagacctacctacaccaacctcaaccgtctcgtctctcaggttatttcttccttgactgcttctctgaggttcgatggtgccttgaatgttgatgtaactgagttccaaaccaacttggtcccatacccaagaatccacttcatgctttccgtcctatgcaccagtcatctccgcagagaaggccttccatgagcaactctcagttgctgagatcacaaacagtgcctttgaacctgcttccatgatggcaaagtgtgacccgcgtcacggaaagtacatggcttgctgtttgatgtaccgtggtgatgtagtccccaaggatgtgaacgcagctgttggcaccatcaagaccaagcgaactattcagtttgttgactggtgtcctactggattcaagtgtggtatcaactaccagccaccaactgttgttccaggaggtgatcttgctaaagtccagagagctgtttgtatgatctcaaactccaccagtgttgctgaggtgttctcccgtattgatcacaagtttgatcttatgtacgccaaacgtgctttcgttcactggtatgtgggtgagggtatggaagaaggagaattttcagaggctcgtgaggatcttgcagcattggagaaggattatgaagaggtcggtgctgaaggtggtgacgatgaggatgatgaaggagaggaatactaagaaggttgtcggttttatgtgggatttctattatctcgtgtttgtgtgaataggctcgaaactcttacgagtcgtacttgtgttttcaaaaaccatatttctatctcttgcttgtggcggtagccatttgttctagttcgtttgtttctgataatattttcatctccaagaactgaatttaagctgggtttggtttaaaaaaaaaatataaaaaaaaacaaagggcggccgctctagaggatccaagcttacgtacgcgtgcatgcgacgtcatagtntagctatagtg

SEQ ID NO: 116617 - DNA, 686 bp, Arabidopsis thaliana
  unsure (1)..(686): unsure at all n locations
nnnnnnnnnnnnnnnnnnnnnnnnnnnnnnnnnnnnnnnnnncggtccgggattcccggcacgccccacgcgtccgatcagatctagatctaaaagaagagcgtcttcataaacgcccttcttcttcttcgtcttcttccctgcaaatctagtttctagatcttttctttcttccgcgaaacgaaaatgagagagtgcatttcgatccacattggtcaggccggtatccaggtcggaaatgcttgctgggagctttactgtcttgaacatggcattcagcctgatggccagatgccgagtgacaagactgttggcggaggtgacgatgctttcaacaccttcttcagtgagaccggtgcagggaagcacgtcccacgtgctgtctttgttgatcttgagccaactgtgatcgacgaggtcaggactggtacttaccgtcagcttttccaccctgaacaactcatcagcggtaaagaagacgctgctaacaatttcgcccgtgggcattacaccattgggaaagagattgttgatctctgcttggaccgtatcagaaagctcgctggtaactgtacttgggctccaagggttcctgggtttaaacgtgtttggtggggggcttgacctgggnttggctttcccccctgagggtttttttcncgggaaaaccagttggttaaagttcc

SEQ ID NO: 116618 - DNA, 510 bp, Arabidopsis thaliana
agtccagagagctgtttgtatgatctcaaactcaaccagtgttgctgaggtgttctcccgtattgatcacaagtttgatcttatgtacgccaaacgtgctttcgttcactggtatgttggtgagggtatggaagaaggagaattctcagaggctcgtgaggatcttgcagcattggagaaggattatgaagaggtcggtgctgaaggtggtgacgatgaggatgatgaaggagaggaatactaagaagaatgtttcttaaaaattggattttgtgttgggttttctctattatctcgtgttgtgatgaatgggctcgaaactcttacgagtcttagttgtgtgtttttctaaacctatatatttctatctcttgctggtggtttgatttctattatctagttcgtttgtgtattgactcatgtttctggtaatatctttcttactatgtgataaagtaatctcaaaaactgaattttagctgggtggaaaggaaggaaaaaaaaaaagga

SEQ ID NO: 116619 - DNA, 459 bp, Arabidopsis thaliana
  unsure (1)..(459): unsure at all n locations
ganttgctaaagcccgggngctttttncatgnccnaacncgcccatttnctgaggtgttcccccgtttgatcacaagttgatcttatgtacccccaaacgtgctttcgttcactggtatgtgggtgagggtatggaagaaggagaattctcagaggcacgtgaggatcttgccagcattggagaaggattatgaagaggtcggtgctgaaggtggtgacgatgaagatgatgaaggagaggaatactaagaagaatgtttctaaaaactttggatttgtgtgggtttctctataatctcgtcttgtgagaatgggctcaaaactcttgggagtctttaatcgtgtgtgttttaaaacctacttctctatcttttcgtagccatgttatctctctattatctatttcctttgtgtgttaaatcgtttctgcctttctggtaatatcttatcactactatc

SEQ ID NO: 116620 - DNA, 766 bp, Arabidopsis thaliana
  unsure (1)..(766): unsure at all n locations
tctaatacnactcactatagggacaagctggtacgcctgcaggtaccggtccggaattcccggggggacccacagcgttcgaccacgcgttcgcccacgcgtacgtacggaagacgaaacacaaaagatgcagatcttcgtgaaaaccttgaccggcaagaccatcactctcgaggtcgagagcagcgacaccatcgacaatgtcaaggccaagatccaagacaaagaaggaatccctccggatcagcagagattgatcttcgccggaaagcagctcgaagatggccgtactttggctgactacaacatccagaaagaatctacacttcatcttgtgttgaggcttagaggaggtattattgagccttccttgatgatgcttgctcgtaagtacaatcaggataagatgatttgccgcaagtgctatgctcgtcttcacccaagagctgtcaactgcaggaagaagaagtgtggtcacagcaaccagttgaggcctaagaagaagatcaagtagagagactcttatcaagaatcccatctcttgcttgcttttttttgttgtcttccctttgatagggtttgtttttcttgtttcagtgactttctatgttaaaagataatgtcagtaaaaggatttggttttctattattctgaatcgattacggaagattcttgcttaaattccaatctatacaagtatcgtgaaataatgaccgtttatgtgattaggagacgtgtttcattaataaaatataagatcaatcc

SEQ ID NO: 116621 - DNA, 546 bp, Arabidopsis thaliana
ggcaaagaagacgaacgcaaagatgcagattttcgtgaaaacgctaaccggcaagaccatcaccctcgaggtcgagagcagtgacaccatcgacaatgtcaaggccaagatccaggacaaagaaggaattcctccggaccagcagaggttgatcttcgccggaaaacagcttgaagatggtcgtaccttggctgactacaacatccagaaagagtcgactttgcatcttgttctgaggcttaggggaggtatcattgagccttcattgatgatgttggctcgtaagtataaccaagacaaaatgatttgtcgcaagtgttatgctcgtctccacccaagagctgtgaactgcaggaagaagaagtgtggccatagcaaccagttgaggccaaagaagaagatcaagtgatcttttgttcaccaaaagcttatttacgttatttttgtgtttgctttgagaaagactcctctattgttctgacacaaaccttgtttcagtgaattttgattttacgattattgtttagtaaatctgatttttggctt

SEQ ID NO: 116622 - DNA, 658 bp, Arabidopsis thaliana
actacggtttcaattttggagctccaccccggtggcggccgctctagaactagtggatcccccgggctgcatttatattttttggccgccggcaagaccatcactctcgaggtcgagagcagctacaccatcgacaatgtcaaggccaagatccaagacaaagaaggaatccctccggatcagcagagattgatcttcgccggaaagcagctcgaagatggccgtactttggctgactacaacatccagaaagaatctacacttcatcttgtgttgaggcttacaggaggtattattgagccttccttgatgatgcttgctcgtaagtacaatcaggataagatgatttgccgcaagtgctatgctcgtcttcacccaagagctgtcaactgcaggaagaagaagtgtggtcacagcaaccagttgaggcctaagaagaagatcaagtagagagactcttatcaagaatcccatctcttgcttgcttttttttgttgccttccctttgatagggtttgtttttcttgtttcagtgactctctatgttaaaagataatgtcagcaaaaggatttgggtttttctagcggccgcgaattcaatttcaagcttattgataccggcgacctcgagggggggcccggaacccaattcgcccta

SEQ ID NO: 116623 - DNA, 502 bp, Arabidopsis thaliana
actcactatttggaaagctggcacgcctgcaggtaccgggcccgaattcccgggttcgcccacgcggccgcttgggttgaggcttaaaggaggtattattgagccttccttgatgatgcttgctcgtaagtacaatcaggataagatgatttgccccaagtgctatgctcgtcttcacccaagagctggcaactgcaggaagaagaagtgtggtctctgctaccagttgaggcctaagaagaagatcaagtagagagactcttatcaagaatcccatctcttgcttgcttttttttgggtggcttcccctttgttaggggttggtttttcttggtttcagtgacctttctattgtttaaagattaatgtcagttaaaagggatttggtttttctattaaaaaaaaaaaaaaaaagggccggcccctcttaaaggatcccaagcttacctaccgccggccttggcaacgtaataaatttttttttaggggcacccttaaattc

SEQ ID NO: 116624 - DNA, 628 bp, Arabidopsis thaliana
  unsure (1)..(628): unsure at all n locations
gcccntaaggaaaaactggnccccccnggtcgnccttttaactnaggnccccccgggttcaggaatncccnccccnggnangccattactntcggggncgagancancgcnccatcncaatttcaaggccaagntccaaggcaaaggagggaatccctccggatcagcagagattgatctccccggaaagcagctcgaagatggccgtactttggctgactacaacatccagaaagaatctacacttcatcttgtgttgaggcttagaggaggtattattgagccttccttgatgatgcttgctcgtaagtacaatcaggataagatgatttgccgcaagtgctatgctcgtcttcacccaagagctgtcaactgcaggaagaagaagtgtggtcccagcaaccagttgaggcctaagaagaagatcaagtagagagactcttatcaagaatcccatctcttgcttgcttctttttgttgtcttccctttgatagggtttgtttttcttgtttcagtgactctctatgttaaacgataatgtcagtaaaaggatataattttctattaaaaaaaaaaaaaaaaaaaaaaaaaaaaaaaaaaagggcggccgctctaagaaacaagctt

SEQ ID NO: 116625 - DNA, 1213 bp, Arabidopsis thaliana
  unsure (1)..(1213): unsure at all n locations
tccggaatttccgggtcgacccacccgtccggaattcggcacgagggtatgacgtcgttttgctccatgatttctcttcttcttcttctctctctttcatcgccggttttctccgatgacgcttctttccagaaacttccggtgccggaaactaggtcaggtcccgaagctttcgcttttgattccaccggtaaagggttctataccggtgtctccggtggtaaaatcctcaagtacctccccgagacgggttatgttgactttgcccagatcactgaatcctcgaactcttcatggtgcgatggtactattggaacggctttagccggacgctgtggtcgaccagcaggaatagcattcaacgagaaaacaggtgatctttacgtcgccgatgctccgttgggtcttcacgttatttctcccgccggtggtttggctacgaagatcaccgacagtgttgacggaaagcctttcaagtttcttgacggtcttgacgttgatcccactactggtgtcgtctacttcacttccttcagctcacgcttctccccaatccaagtgttgattgcattggggttaaaggacgcgaccggaaagctctacaaatacgacccatcgaccaaagtcgtgactgtactgatggaagggctaagtggttcagccgggtgtgcagtgagctcagatggttcgtttgtgctggttagtcagttcacaaaaagtaacatcaagaggtattggatcaagggacccaaagctggttcttctgaagacttcaccaactcagtctcaaaccctgacaatatcaaaagaattggctctactggaaacttttgggtcgcttcagtggtgaacaagatcatcgtacctacgaacccatcagcagtcaaagttaactctaatggtgaagttcttcaaaccattcctctcaaagataaatttggagacactttgctcagcgaagtcaacgaattcgagggcaatttatatataggaactctcaccggaccatttgctggaattcttaagatcgaaaagggttcttgtcctgccacttagatctcttatttgaatgcagccgatgtgttacaatcatatatatatatttgagctttttatttatttctgaataaaatagccacttagatctcttnnnnnnnnnnnnnnnnnnnnnnnnnnnnnnnnnnnnnnnnnnnnnnnnnnnnnnnnnnggaat

SEQ ID NO: 116626 - DNA, 870 bp, Arabidopsis thaliana
  unsure (1)..(870): unsure at all n locations
nnnnnnnnnnnnnnnnnnnnnnnnnnnnnnnnnnnnnnnnnnnnnnnnnnnnnnnnnnnnnnnnnnnnnnnnnnnnnnnnnnnccacgcgtccgcggacgcgtccgcccacgcgtccgacttaattaagatacgatcatggcgtcgtttgtctttgtgatttctcttcttcttctctctttttcgtcggctgttttctccgatgatgcttcttttcagaaacttccggtgcctgacaagaggtcaggccctgaatctttcgcctttgactctaccggcggattctacaccggagtctccggtggtaaaatcctcaagtacgttcctgggaagggttatgtcgattttgcccagatcacagattcctcgaactcggcatggtgcaacggagcattaggaaccgctttcgccggaaagtgtggtcgaccagcgggaatagccttaaacagcaaaacaggtgatctctatgtcgccgatgctccgttgggtcttcacgttatctctcccgcaggaggtttggccacaaagctggccgacagtgttgacggaaagcctttcaagtttcttgacggtcttgatgttgatcccaccaccggcgtcgtctacttcacttccttcagttccaagtttggaccccgggaagtgttaatcgcagtgggattaaaagacgcgagcggaaagctgttcaaatacgacccagcgaccaaagccgtgactgagttaatggaaggtctaagtggtgctgctggttgtgcagtgagctcagatggttcattcgtgctagttagcgagttctaaagagtaactcaagaatattggattaaggcccaagctggacattgaaacttctcagcctgctcgaccccgacac

SEQ ID NO: 116627 - DNA, 535 bp, Arabidopsis thaliana
  unsure (1)..(535): unsure at all n locations
aattttgtctatagctaaaaaaaggttcaattgtaaaaggaatatggagtcttaccaaaaccagtccggagcgcagcagactcaccaacagcttgaccaatttggaaatccatttccagccaccaccggagcctatggaactgccggtggagctccagccgtggctgaaggtggtggtttaagtggcatgcttcaccgttctgggagtagctctagctctagctcggaggatgatggactaggtggaaggaggaagaagaagggaataacggagaagattaaagagaagctgccgggtcatcacggctccaacaagacttcttctttaggttctacaacggcggcctatgataccggcaccgttcaccacgggaagaaaggcatgatggggaaggtcaaagagaagctttcgggggggtgggcaatcaattaggttttcattttaaattaaccttgtttgggggtggggcggtaaccgggttnattgggccgtttcaatgggcataaacttttaaaccccccnttttttggaaag

SEQ ID NO: 116628 - DNA, 957 bp, Arabidopsis thaliana
  unsure (1)..(957): unsure at all n locations
cannnnnnnnnnnnnnnnnnnnnnnnnnnnnnnnnnnnnnnnnnnnnnnnnnnnnnnnnnnnnnnnnnnccacgcgtccggcttaagagttttgaaaaatatcttcactagagatgataaaatcagtgactcttcgttcgtttcatctcccaattgagtttaacgacaccaaattcgtctcacggccttgtttcctggcgagatccttcccggtggttcgttgttcaagcaccagagacgtacctaagcttgaactcttcagccgcggaaaattcgaccggattcttcaagatccgccacttattgaaaaagccgaatccgaactctcagattactgttcgacgcttgaaggtgatgactcttacagttgctggagagcttactttgaactcaaagatctcgaaagagagaagccaaaggttgaagttgagaatttgattttgcaaacaggtggtttgaaatcgttaatcgggtgtttacatggagttgcttcaatggagaaagataacaaaaccaagaatggtttacatgtaggagaagaatcagatagagagaaaggaatgaatttgcacattcatattcctgatggtttaccaaaatttgaacaagagttggaggaagaagagaaatcgaaaatgccggattcagctttcactagattgcttagaagtaaaggaactatccctgcttggttctctcacgctcctgaccacgaaaccgactgaaagcggattacggattacggtacctttagaaagttgttatcttatcacagttatatgtaaatatagttcttggttttgctttagttcatgtagtctatcttttgttaagatgtgatcatattgccatagaaatgtggttgttattaacttgatgttcgccaatgttgaatttgtttaatgctgtgtgcctattatagtactacgcggttttggtttccgaagagtcaatctt

SEQ ID NO: 116629 - DNA, 1076 bp, Arabidopsis thaliana
acgaccgctatggggtataagctggtacgcctgcaggtaccggtccggaagtccccgcacgcgccccatcacacacaaggagagaagagagaaagagagaaagagagacagagataatggcgtacagtgcgtgtttcctacaccagagcgcattggcttcatcagccgcacgatcatcatcttcctcctcatcccagcgtcacgtgtcgctctccaaacctgttcagatcatctgtaaagctcaacagtctcatgaagacgataactccgccgtctcccgccgtcttgctctcactctcctcgtcggcgccgctgctgttggttccaaagtatctcctgctgatgccgcctacggtgaagctgcaaacgtgtttgggaagccaaagacgaacacagacttcttgccatacaatggagatgggttcaaagtgcaggttccagcaaaatggaacccaagcaaagagattgagtatccaggacaagtccttaggttcgaagacaacttcgatgctactagcaatctcaatgtcatggtcactcctaccgacaagaagtccatcactgattacggttctcccgaagagttcctctctcaggttaattacctcctagggaaacaagcttacttcggtgagactgcctctgagggaggctttgacaacaatgcagtggcaacagcaaacattctggagtcatcatctcaggaagttggtgggaaaccctactattacttgtctgtgttgacaagaacggctgatggagacgaaggtgggaagcatcagctgatcacagcaaccgtgaatggagggaagctttacatctgcaaagcacaagctggagacaagaggtggttcaagggagccaggaaatttgtcgagagcgcagccacttctttcagtgttgcttgagtgaaagcaacacaacgtaacaatgctctgcttgctttcttcatttgtctcttgtaaaaaatggaaaatgaaactgagcttttgagaaaaaaaaaaaaaaaaaaaaaaaaaagggcggccgctctagaggatccaagcttacgtacgcgtgcatgcgacgtcagagct

SEQ ID NO: 116630 - DNA, 624 bp, Arabidopsis thaliana
  unsure (1)..(624): unsure at all n locations
nnnnnnnnnnnnnnnnnnnnnnnnnnnnnnnnnnnnnnnnnnnnnnnnnnnnnnnnnnnnnnnnnnnnnnnnnccacgcgtgcgcccacgcgtccgaaaatcattgactcttcgttcgtttcatctcccaattgagtttaacgacaccaaattcgtctcacggccttgtttcctggcgagatccttcccggtggttcgttgttcaagcaccagagacgtacctaagcttgaactcttcagccgcggaaaattcgaccggattcttcaagatccgccacttattgaaaaagccgtatccgaactctcagattactgttcgacgcttgaaggtgatgactcttacagttgctggagagcttactttgaactcaaagatctcgaaagagagaagccagaggttgaagttgagaatttgattttgctaacaggtggtttgaaatcgttaatccgggtgtttacattgggagttgccctcaaattggggaaaggcttaccaaaaacccaaggaaattggctttcaattgtagggggcaaggaatccggttttgggggggaaagggganttnatttttncccanatttnaaatntcccccananggggtttncccaaaaatttttnaacc

SEQ ID NO: 116631 - DNA, 697 bp, Arabidopsis thaliana
gcaccggtttcggaattcccgggtcgacccgcccccccgcgcacaaggagagaagagagaaagagagaaagagagtcagatgataatggcgtacagtgcgtgtttcctacaccagagcgcattggcttcatcagccgcacgatcatcatcttcctcctcatcccagcgtcacgtgtcgctctccaaacctgttcagatcatctgtaaagctcaacagtctcatgaagacgataactccgccgtctcccgccgtcttgctctcactctcctcgtcggcgccgctgctgttggttccaaagtatctcctgctgatgccgcctacggtgaagctgcaaacgtgtttgggaagccaaaggcgaacacagacttcttgccatacaatggagatggggtccaaagtgcaggttccagcaaaattggaacccagagcaaagggttttggtatccagggcaagtccttaggttcgaagcaactttcggtgctacttgcaatctcaatggcatggtcactccttccggcaaggaagtccatccctgtttacggttctcccgaaagcggtccctctctcaggttaattacctcctaggggaaacaagccttactttcgggtgaggacttgcccttctgaaggggaaagctttttggacaaaccaatggccaagtggggccaaacagggctaaaaacattttcctggg

SEQ ID NO: 116632 - DNA, 1182 bp, Arabidopsis thaliana
  unsure (1)..(1182): unsure at all n locations
tcgcgggtcgacgcaagcctctaaacagacgtcctggaaaagacgacagaaggggaatcacacacaaggagagaagagagaaagagagaaagagagacagagataatggcgtacagtgcgtgtttcctacaccagagcgcattggcttcatcagccgcacgatcatcatcttcctcctcatcccagcgtcacgtgtcgctctccaaacctgttcagatcatctgtaaagctcaacagtctcatgaagacgataactccgccgtctcccgccgtcttgctctcactctcctcgtcggcgccgctgctgttggttccaaagtatctcctgctgatgccgcctacggtgaagctgcaaacgtgtttgggaagccaaagacggacacagacttcttgccatacaatggagatgggttcaaaggtgcaggttccagcaaaaatgggaccccaagcgcaaaaggcggattttggtttccacgggcaaagctccttaagggtttcgaaggacaaacttcggattggtttcttcggaattctcaatgtcatgggcaattcttccggcaaagaagtccatnactggttnccggttttcccggaagcggtccccntctcagggttaacttcccccctggggaaacccaangcattcctncggtnagacctccctttggggggcttttccaccaattcagtggcaccagcaaacatttctggagtcatcatctcaggaagttggtggaaacccctaactattacttgtctgtgttgacaagaacggctgatggagacgaaggtgggaagcatcagctgatcacagcaaccgtgaatggagggaagctttacatctgcaaagcacaagctggagacaagaggtggttcaagggagccaggaaatttgtcgagagcgcagccacttctttcagtgttgcttgagtgaaagcaacacaacgtaacaatgctctgcttgctttcttcatttgtctcttgtaaaaaatggaaaatgaaactgagcttttgagaactatcaagatgatgttaccttttcggcatcacttgtgtacctatgataacagactcgttttccaagttttcttaaaaaacaactatattcaaaaaacaataaagcgaccgctctagaggatccaagcttacgtacgcgtgcgttcgacctcataatcttcgaga

SEQ ID NO: 116633 - DNA, 689 bp, Arabidopsis thaliana
  unsure (1)..(689): unsure at all n locations
gcgccacncttggngangcactcgtgttctgnatccaatgccatggcncccnccgccagancccacnctgatccgntccccgaagggtnccntcccagttaatccccctngggaacangcttactncggtgancctcctctggggaggctttgccaccaatncagtggcaccagcaaacattctggagtcatcatctcaggaagttggtgggaaacccctactattacttgtctgtgtttgacaagaccggctgatggagacgaaggtgggaagcatcagctgatcacagcaaccgtgaatggagggaagctttacatctgcaaagcacaagctggagacaagaggtggttcaagggagccaggaaatttgtcgagagcgcagccacttctttcagtgttgcttgagtgaaagcaacacaacgtaacaatgctctgcttgctttcttcatttgtctcttgtaaaaaatggaaaatgaaactgagcttttgagaactatcaagatgatgttaccttttcggcatcacttgtgtacctatgataacagactcgttttccaagttttcttaaaaaacaactatattcaatagatattttctcaaattaaaaaaaaaaaaaaaaaagggcggccnnnnnnnnnnnnnnnnnnnnnnnnnnnnnnnnnnnnnnnnnnnnnnnnnnnnnnnnnnn

SEQ ID NO: 116634 - DNA, 914 bp, Arabidopsis thaliana
  unsure (1)..(914): unsure at all n locations
gatctcgaaagagagaagccaaaggttgaagttgagaatttgattttgcaaacagatggtttgaaatcgttaatcgggtgtttacatggagttgcttcaatggagaaagataacttatatcacacacaaggagagaagagagaaagagagaaagagagacagagataatggcgtacagtgcgtgtttcctacaccagagcgcattggcttcatcagccgcacgatcatcatcttcctcctcatcccagcgtcacgtgtcgctctccaaacctgttcagatcatctgtaaagctcaacagtctcatgaagacgataactccgccgtctcccgccgtcttgctctcactctcctcgtcggcgccgctgctgttggttccaaagtatctcctgctgatgccgcctacggtgaagctgcaaacgtgtttgggaagccaaaagacggacacagacttcttttgccatacaaatggtggtgggttccaaagtgcaaggtttcccaccaaaattgggtaccccacgccaagagaagttgtgatttatccaggacaaggctccttaggttcgaagacaacttcgatgctactagcaatctcaatgtcatggtcactcctaccgacaagaagtccatcactgattacggttctcccgaagagttcctctctcaggttaattacctnctagggnaacaagcttacttcggtgagacttgcctctnagggaggcttttacaacaattcagtngcaacagcaaacaattctggnggcatcatctcagggagtttggtngggaaccctccttattactttgcctgtgttgcaaagancggcttnttggggccgaggttggaggattantgtcanagaaccnttgattggggnggtttnattnaaaggcaagttgngcaagnggtnta

SEQ ID NO: 116635 - DNA, 550 bp, Arabidopsis thaliana
  unsure (1)..(550): unsure at all n locations
tacggctgcgagaagcagaagggtacggccgcgagaagacgacagaagggcacggctgcgagaagacgacagaagggtacggctgcgagaagacgacagaagggtacggccgcgagaagacgacagaagggggaagagagaaagagagacagagataatggcgtacagtgcgtgtttcctacaccagagcgcattggcttcatcagccgcacgatcatcatcttcctcctcatcccagcgtcacgtgtcgctctccaaacctgttcagatcatctgtaaagctcaacagtctcatgaagacgataactccgccgtctcccgccgtcttgctctcactctcctcgtcggcgccgctgctgttggttccaaagtatctcctgctgatgccggcctacggtgaagctgcaaacgtgtttggggaagcaaagacggtcacaganttttttnccatacaaatgggggatgggttcaaagtngaaggtttccccaaaattggnnccccagnnaaagggttttngttttntnggcaanttcctttngtntggnngaa

SEQ ID NO: 116636 - DNA, 402 bp, Arabidopsis thaliana
  unsure (1)..(402): unsure at all n locations
gngaccgggccgggaattccctgggcggcccactgantccggcacacaaggatgatgaatgagagaaagagagaaagagagacagagataatggcgtacagtgcgtgtttcctacaccagagcgcattggcttcatcagccgcacgatcatcatcttcctcctcatcccagcgtcacgtgtcgctctccaaacctgttcagatcatctgtaaagctcaacagtctcatgaagacgattactccgccgtctcccgccgtcttgctctcactctcctcgtcggcgccgctgcttgtggttccaaagtatcttctgctgatgccgtctaccgtgatacttcatacgtgttttgtaatccttggtctataccttaccttttttcctttccattaggtaatagggtt

SEQ ID NO: 116637 - DNA, 1762 bp, Arabidopsis thaliana
atgctttcaattactctcgccgacgattttctcaccggaaaaaaacaatatcattgcggatacacaaactataatggacctcctcttgctggagaagtctttaatcgccgtcttcgtggcggtgattctcgccacggtgatttcaaagctccgcggcaagaaattgaagctacctccaggtcctataccaattccgatcttcggaaactggcttcaagtcggagatgatctcaaccaccgtaatctcgtcgattacgctaagaaattcggcgatctcttcctcctccgtatgggtcagcgaaacctagtcgtcgtctcctcaccggatctaacaaaggaagtgctcctcactcaaggcgttgagtttggatccagaacgagaaacgtcgtgttcgacattttcaccgggaaaggtcaagatatggtgttcactgtttacggcgagcattggaggaagatgagaagaatcatgacggttcctttcttcaccaacaaagttgttcaacagaatcgtgaaggttgggagtttgaagcagctagtgttgttgaagatgttaagaagaatccagattctgctacgaaaggaatcgtgttgaggaaacgtttgcaattgatgatgtataacaatatgttccgtatcatgttcgatagaagatttgagagtgaggatgatcctcttttccttaggcttaaggctttgaatggtgagagaagtcgattagctcagagctttgagtataactatggagatttcattcctatccttagaccattcctcagaggctatttgaagatttgtcaagatgtgaaagatcgaagaatcgctcttttcaagaagtactttgttgatgagaggaagcaaattgcgagttctaagcctacaggtagtgaaggattgaaatgtgccattgatcacatccttgaagctgagcagaagggagaaatcaacgaggacaatgttctttacatcgtcgagaacatcaatgtcgccgcgattgagacaacattgtggtctatcgagtggggaattgcagagctagtgaaccatcctgaaatccagagtaagctaaggaacgaactcgacacagttcttggaccgggtgtgcaagtcaccgagcctgatcttcacaaacttccataccttcaagctgtggttaaggagactcttcgtctgagaatggcgattcctctcctcgtgcctcacatgaacctccatgatgcgaagctcgctggctacgatatcccagcagaaagcaaaatccttgttaatgcttggtggctagcaaacaaccccaacagctggaagaagcctgaagagtttagaccagagaggttctttgaagaagaatcgcacgtggaagctaacggaaatgacttcaggtatgtgccgtttggtgttggacgtagaagctgtcccgggattatattggcattgcctattttggggatcaccattggtaggatggtccagaacttcgagcttcttcctcctccaggacagtctaaagtggatactagtgagaaaggtggacaattcagcttgcacatccttaaccactccataatcgttatgaaaccaaggaactgttaaactttctgcacaaaaaaaaggatgaagatgactttataaatgtttgtgaaatctgttgaaatattcccttgttttgcttttgtgagatgtttttgtgtaaaatgtctttaaatggttcgttctacgattgcaataataattagtggtgctcattcttaaaaaaaaaaaaaa

SEQ ID NO: 116638 - DNA, 891 bp, Arabidopsis thaliana
  unsure (1)..(891): unsure at all n locations
nnnnnnnnnnnnnnnnnnnnnnnnnnnnnnnnnnnnnnnnnnnnnnnnnnnnnnnnnnnnnnnnnnnccacgcgtccgcggacgcgtgggctcttacccataaaaagttttcccctttaattcttgtcctccgcttttccattttactcttcttgtatgtttctgtcttcttactcaacttttgcttcaggcttcgtctcttttgcaatttttgagttagccaagtgctcaagggagatacataatacctgaagatgtccaaggcaagtgatgccgtcagagaaccattggtggacaagaatatggctggatcaaaaccagaccagccgtggatggtttatctcagcacattcgttgcggtctgtggttcttttgcgttcggttcttgtgcgggatactcttcacctgctcaggctgcaattaggaatgacctttcattgactatagctgagttttcactctttggttctttactaacttttggcgcaatgatcggtgctataacaagcgggcctatagctgatttagttggaagaaagggggcgatgagagtttcctctgcattttgtgtagtcgggtggctagcaatcatctttgccaagggagtagtggctctggaccttggaagactggcaacgggatatggaatgggagcattttcctatgtggtgccaatctttatagcagaaattgcacctaaaactttcagaggggctctaaccacactgaaccagattctgatctgcactggagtgtcggtttccttcatcataggcacactagtgacgtggagagtcttggcattaataggaatcatcccatgcgctgcctccttccttggcctcttttttatccctgagtctccaagatggctggcaaaagtggggcgtg

SEQ ID NO: 116639 - DNA, 406 bp, Arabidopsis thaliana
acgtagtcattagctatattctagtttaatggttatcatcagaaaatctgaaatcaaatttttggattgtaatccatggctgctcttggtaaaggacataaaacagctttcatctcttgaatggcttcgtctcttttgcaatttttgagttagccaagtgctcaagggagatacataatacctgaagatgtccaaggcaagtgatgccgtcagagaaccattggtggacaagaatatggctggatcaaaaccagaccagccgtggatggtttatctcagcacattcgttgcggtctgtgggtcttttgcgttcggttcttgtgcgggatactcttcacctgctcaggctgcaattaggaatgacctttcattgacttagctgagttttcactctttgggtctttac

SEQ ID NO: 116640 - DNA, 897 bp, Arabidopsis thaliana
  unsure (1)..(897): unsure at all n locations
nnnnnnnnnnnnnnnnnnnnnnnnnnnnnnnnnnnnnnnnnnnnnnnnnnnnnnnnnnnnnnnnnnnnnnnccacgcgtggcgccacgcgttttcctcttcctctcattatttttgttctcgccaccgaaacaacagaagttgcagactttatccgaatttagggtttcagctcgttctctcttctccaattatcagatccacgaaactctacttttcggatcaggtctcagcttctctatcgtttgcccctcagatcaacaaagtttcatgtctgaacttgattcccaggtccctactgccttcgacccgtttgctgatgcgaatgctgaggactcaggtgcaggaacaaaggagtacgttcatattcgtgtccagcagcggaatggtaggaaaagcttgacaacggtccaggggctgaagaaagagtacagctacaccaagatacttaaggacctcaagaaagaattttgctgcaacggaactgtggttcaagactcagaactcggacaggttattcagcttcaaggcgatcagaggaagaacgtctccacgttcctagtccaggctgggcttgtgaagaaagataacatcaagatccatggtttctgagcagcttctgttgcatttcccgtaggccgtttaagtggatcattactctatcgtgcagttacaaaacatatcttcacctttcccttcgattacttgttacttgtttctgttttagcgttggaatgatactaagagaccatcatcgttttctttcacatgttacttctgtaatacgagattgttaagcattctccattaaaaaaaaaaaaaaagnnnnnnnnnnnnnnnnnnnnnnnnnnnnnnnnnnnnnnnnnnnnnnnnnnnnnnnnnnnnnnnnnnnnnnnnn

SEQ ID NO: 116641 - DNA, 496 bp, Arabidopsis thaliana
  unsure (1)..(496): unsure at all n locations
cggcacgagacaaaacacaagttgcagactttatccaaatttagggttttctctttttttcttacttagttatcatcagatcttcaaaaccccaaaatttgcaaatcagatctcagcttcccggttagtactaccctcaaatcaactaagtttcatgtctgaacttgactcccaggttcccactgcctttgatccgtttgctgatgcgaatgttgaggactcaggtgccggaacaaaagaatacgttcatatccgtgtccagcagcgaaatggtaggaaaagcttgacaaccgtccagggcctgaagaaagagtacagctataccaagatacttaaggacctcaagaaagagttttgctgcaacggcactgtggttcaggattcagaactcggacaggttatacagcttcaaggtgcccaacgtacgttcgcctcctgacaggtggttngtnanaggttcanaagccntggtttnacgncttgngcaatttnaaac

SEQ ID NO: 116642 - DNA, 952 bp, Arabidopsis thaliana
cacactctctacgcttgacatggccttcgatctccaccatggctcagcttcagatacgcattcatcagaacttccgtcgttttctctcccaccttatcctcagatgataatggaagcgattgagtccttgaacgataagaacggctgcaacaaaacgacgattgctaagcacatcgagtcgactcaacaaactctaccgccgtcacacatgacgctgctcagctaccatctcaaccagatgaagaaaaccggtcagctaatcatggtgaagaacaattatatgaaaccagatccagatgctcctcctaagcgtggtcgtggccgtcctccgaagcagaagactcaggccgaatctgacgccgctgctgctgctgttgttgctgccaccgtcgtctctacagatccgcctagatctcgtggccgtccaccgaagccgaaagatccatcggagcctccccaggagaaggtcattaccggatctggaaggccacgaggacgaccaccgaagagaccgagaacagattcggagacggttgctgcgccggaaccggcagctcaggcgacaggtgagcgtaggggacgtgggagacctccgaaggtgaagccgacggtggttgctccggttgggtgctgaattaatcggtacttatgcaatttcggaatctttagttactgaaaaatggaatctcttagagagtaagagagtgctttaatttagcttaattagatttatttggatttctttcagtatttggattgtaaactttagaatttgtgtgtgtgttgttgcttagtcctgagataagatataacattagcgactgtgtattattattattactgcattgtgttatgtgaaactttgttctcttgttgaacaaaaaaaaaaaaaaaaaaaaaaagggcgaccgctctagaggatccaagcttacgtacgcgtgcgtgcgacgtc

SEQ ID NO: 116643 - DNA, 833 bp, Arabidopsis thaliana
tatagtgtgaccgcctccggtgccggtccggaattccggggtcgacccaaagcaacactttcactaatcctctaatggcagaagacaagatcttaaagaagactccggcggcgaagaagccgcgaaaaccgaaaaccaccactcatcctccatactttcagatgataaaagaggctttgatggtcctgaaagagaagaacggatcaagcccttatgctatagctaagaagatagaggagaaacacaagtctttacttccagagagtttccgtaaaacactttctctacagcttaaaaactctgttgctaaaggtaagctcgtgaagatcagagcctcttacaagctctcagataccaccaagatgataacgaggcagcaggacaagaagaataagaagaatatgaagcaagaagataaagagatcacaaagaggactaggtcttcttcgacaaggcctaagaagactgtgtctgtgaacaaacaagaaaagaagaggaaagtgaagaaggcgagacagcctaagtctatgaaatcttcagttggtaagaagaaggccatgaaaggctccgctgcttgatcactgaggaggaggagaagaaaatggaactgggtgtgaatatgaagaataaggtttttctgttgtctctggaaatggatgatgactttgttttgggttggggggggccccttttggggtgtaagaagaaaagagtctttcggatgtataacccagtacctacccagggaataatacctcttaaatagagaagaatttttaacttgggggggggaaaaacccgctccacacctatgtgtctcatcaaaaaggggg

SEQ ID NO: 116644 - DNA, 838 bp, Arabidopsis thaliana
caagcaaagcaacactttcactaatcctctaatggcagaagacaagatcttaaagaagactccggcggcgaagaagccgcgaaaaccgaaaaccaccactcatcctccatactttcagatgataaaagaggctttgatggtcctgaaagagaagaacggatcaagcccttatgctatagctaagaagatagaggagaaacacaagtctttacttccagagagtttccgtaaaacactttctctacagcttaaaaactctgttgctaaaggtaagctcgtgaagatcagagcctcttacaagctctcagataccaccaagatgataacgaggcagcaggacaagaagaataagaagaatatgaagcaagaagataaagagatcacaaagaggactaggtcttcttcgacaaggcctaagaagactgtgtctgtgaacaaacaagaaaagaagaggaaagtgaagaaggcgagacagcctaagtctatcaaatcttcagttggtaagaagaaggccatgaaagcttccgctgcttgatcactgaggaggaggagaagaagatggaactgtgtgtgaatatgaagaataaggttttttgttgtctctgtaaatgcatcatgactttgttttggtttggtgtggtctcttttgggtgtaagagtaaagagtcttcggatgtataaccagtactaccatgtaatatactctaaatagatagatttttacttgggttgataaaaaaaaaaaaaaaaaaaaaaaaaaaaaagcggccgctctagaggatccaagcttacgtacgcgtgcatgcgacgtcatagtatatctatagttcagttaaat

SEQ ID NO: 116645 - DNA, 899 bp, Arabidopsis thaliana
accggtccggaattcccgggtcatcacaaagatctctctacttcaataaatctccaccttactttaagaacaagaaaaacacagtattaacaaatggcaggaatcaaagttttcggtcacccagcttccacagccactagaagagttctcatcgctcttcacgagaagaatgtcgactttgaattcgttcatgtcgagctcaaagatggtgaacacaagaaagagcctttcatccttcgcaacccctttggtaaagttccagcctttgaagatggagacttcaagattttcgaatcaagagcaattactcaatacatagctcatgaattctcagacaaaggaaacaaccttctctcaactggcaaggacatggcgatcatagccatgggcattgaaattgagtcgcatgagtttgacccagttggttcaaagcttgtttgggagcaagtcttaaagcctttgtatggtatgaccacagacaaaaccgttgttgaagaagaagaggctaagctagccaaagtcctcgatgtttacgaacacaggcttggtgagtccaagtatttggcttctgaccacttcactttggtcgatcttcacactatccctgtgattcaatacttacttggaactccaactaagaaactcttcgacgagcgtccacatgtgagtgcttgggttgctgacatcacttcaaggccttctgctcagaaggttctttaagtgaatctcaaactatttatcgatcagaagatgtaataaaagtggcgatgacctaattgcccaattctcataaactctgtttttctttttgtgtttactctgtttttctgctgccgagtgtttgatttgaatgtaatcttcgataatgagtcttgatataataaaatatttcttatttt

SEQ ID NO: 116646 - DNA, 597 bp, Arabidopsis thaliana
  unsure (1)..(597): unsure at all n locations
gttctctctacttcaataaatctccaccttgctttaagaacaaagtcttaacaaatggcaggaatcaaagttttcggtcacccagcttccacagccactagaagagttctcatcgctcttcacgagaagaatctcgactttgaattcgttcatatcgagctcaaagatggtgaacacaagaaagagcctttcatcttccgcaacccttttggtaaagttccagcctttgaagatggagacttcaagcttttcgaatcaagagcaatcactcaatacatagctcatttttactcagacaaagggaaccaacttgtctccccttggctccaaggacattggcgggcatagccatggggcattggaaatttgaatccgcatgagtttgacccagttgggtccaaagctttgtttggggggcaagccttaaagcctttgtttgggttggccccaggcaaaaccgttgttgaaggaggagaggctaagcttgccaagggcctcggtgtttcggccacagggttgggggccagatttgggttcggaaattcccttgggggcttaaactcccggggtagcaatttntggaacccctagaacctt

SEQ ID NO: 116647 - DNA, 663 bp, Arabidopsis thaliana
gctgccgtaccggtccggcattcctggtctcccttggctccaaggacattgcgggcatagccatgggcattgaaattgaatcgcatgagtttgacccagttggttcaaagcttgtttgggagcaagtcttaaagcctttgtatggtatgaccacagacaaaaccgttgttgaagaagaagaggctaagctagccaaggtcctcgatgtttacgaacacaggcttggtgagtccaagtatttggcttctgataaattcactttggtcgatcttcacactatccctgtgattcagtacttgcttggtacaccaactaagaaactctttgacgagcgtccacatgtcagtgcttgggttgctgacatcacttctaggccttctgctaagaaggttctttaagtgactcacaaactgttaatcagaagattgaataaagtggcgatgacctcattgccctaattctcataaacaataaaagtggcgatgacctaattgccaaattctcatacactctgtgatttttttgtgtgggccccctcggttttttttttttggtttgaatgtaatcttcaataataatgagtcttgatatataataaaaatatatttggtagcctgaaaaaaaaaaaaaaaaaaaaaaaaaaaaaaggggcggccgctctag

SEQ ID NO: 116648 - DNA, 998 bp, Arabidopsis thaliana
  unsure (1)..(998): unsure at all n locations
gtacgcctcgcaggtaccggcttggaattcccggctcgacccacgcgtccgcaagaatatctctcttctacagtaaacaaaaaaatggcaatgaatggtttgtccaagatggctgtagccgccgcaactgctcttctcctagttctgaccattgtcccgggcgcagtagctgtgacttacactattgaatggaccactggtgtggactactcaggttgggctaccggaaagactttcagggttggtgacattctagagttcaagtatggttcttcccacacggtggatgtggttgacaaagccggatatgatggctgcgacgcctcctcctcgactgagaaccattccgatggagacaccaaaatcgatcttaagactgtaggaataaactatttcatctgttctacacctggtcactgcagaaccaatggcggcatgaagctagccgttaatgtcgtagccggttctgccggacctccggccactcccacgccaccttcttcaactccgggaactcctaccacaccggaatcacctccgtctggcggatcacccacacccaccacacccacacctggtgcaggttcaacttctcctcctcctccaccaaaggcaagtggtgcgtctaagggagtgatgagttacgttttggtgggagtctcgatggttttgggttatggtttgtggatgtaattggtttagagagccagggtggagtcagtgcttttgcctttttaaattattttggtttttggttgtaagagaatttgggtttgtgtgccacgtcagaagctcttcattattcgtaggatttttattatctcggcatttgattatcgctatcatcatcatcatcacgttcacttattctcttgttgtattaaattatactattaattttcattttcgttcatgtggaaaaaaaaaaaaaaagcgtaattatcatctgttctcttcttcatattcgtttnnnnnnnnnnnnnnnnnnnnnnnnnnnn

SEQ ID NO: 116649 - DNA, 626 bp, Arabidopsis thaliana
  unsure (1)..(626): unsure at all n locations
caagaatatctctcttctacagtaaacaaaaaaatggcaatgaatggtttgtccaagatggctgtagccgccgcaactgctcttctcctagttctgaccattgtcccgggcgcagtagctgtgacttacactattgaatggaccactggtgtggactactcaggttgggctaccggaaagactttcagggttggtgacattctagagttcaagtatggttcttcccacacggtggatgtggttgacaaagccggatatgatggctgcgacggctcctcctcgactgagaaccattccgatggagacaccaaaatcgatcttaagactgtaggaataaactatttcaatctgttctacaacctgggcacttcagtggcgggcattaagcttagcccgttaatgtcgttggccggttttttccggacctccggccaattccagggcacctttttcaaactccggggaccttcttccacaccgggattaacctccgtttggggggttacccaaaacccacaaaaccaaccctggggaaggttaaattttcttcttttcaccaaaggaaatgggtggcgttaagggggttatngtacgtttggggnggntgatggtttggnanggtttgg

SEQ ID NO: 116650 - DNA, 2543 bp, Arabidopsis thaliana
  unsure (1)..(2543): unsure at all n locations
nnnnnnnnnnnnnnnnnnnnnnnnnnnnnnnnnnnnnnnnnnnnnnnnnnnnnnnnnnnnnnnnnnnnnnnnnnnnnnnccacgcgtccgggaaaaagaacgatctagaagaaagaaaaaaaaaggaaaagaaacccttatggaggttcccacaccactctatatataataacatccttctcctaaatcccgcatcagtacttctctctgcaaattttgctctctttatctctcgatttgattcataaaccctagttcttagattttttttccgatcaacgacaatggcggacgcagaaacctttgctttccaagctgagatcaaccagttgctctccctcatcatcaataccttttactctaacaaggagatcttccttcgtgaactcatcagtaactcttctgatgctttggacaagattaggtttgagtccttgacagacaagagcaagctcgatggtcagccagagctcttcattcacatcattcccgacaagactaacaacaccttgacgattatcgatagtggtattgggatgaccaaggctgatttggtgaacaaccttggaacaattgcaagatctggaaccaaggaattcatggaggcgttggctgctggagctgatgttagcatgattggacagtttggtgttggtttctactctgcttacttggttgctgacaaggttgttgttactaccaagcacaatgacgatgagcagtacgtgtgggagtctcaggccggtggatctttcaccgtcaccagagacacctctggtgaggctcttggtagaggaactaagatggtcctttacctcaaggaagaccagatggagtacattgaggagcgaaggcttaaggatttggtgaagaagcactctgagttcatcagctacccaatctctctctggattgagaagaccattgagaaggagatctctgatgatgaagaggaggaagagaagaaggatgaggaaggcaaggttgaggaagttgatgaggagaaagaaaaggaggagaagaaaaagaagaagattaaggaggtttctcatgagtgggatttggtgaacaagcagaaaccgatttggatgaggaagccagaggagatcaacaaggaggagtacgctgctttctacaagagtttgagcaatgactgggaggagcatttggctgtgaagcatttctctgttgaaggacagcttgagttcaaagctatcctctttgttcccaagagagctccttttgatctctttgacactaagaagaagcccaacaacatcaagctctatgtccgtcgtgtcttcatcatggacaactgtgaagacatcattcctgagtaccttgggtttgtcaagggtattgttgactctgaagatcttcctctcaacatctcgagagagacattgcagcagaacaagatcctcaaggtcatccgcaagaaccttgtgaagaagtgccttgagctcttctttgagattgctgagaacaaggaagactacaacaagttctacgaggctttctctaagaacctgaagctcggtatccatgaggactcccaaaacagaaccaagattgctgagttgctccgttaccactcaaccaagagcggtgatgaattgaccagtctcaaggactacgtgacaaggatgaaggaaggtcagaacgatatcttctatatcactggtgagagcaagaaggctgttgagaactctccattccttgagaagctcaagaagaagggtattgaagttctctacatggttgacgctatcgatgagtatgctattggtcagctcaaggaattcgaaggaaagaagcttgtctctgcaaccaaggaaggtctgaaactggatgagactgaagacgagaagaagaagaaagaagagctcaaggagaagtttgagggactctgcaaagtgatcaaggacgttttgggagacaaggttgagaaggttatcgtctctgaccgtgttgtggactcaccctgctgtcttgtaacaggcgagtatggctggactgcaaacatggagaggatcatgaaagctcaagccttgagagacagcagcatgggtggctacatgtcgagcaagaagacaatggagattaacccagagaactccatcatggatgagctgagaaagagagctgatgcagacaagaacgacaagtctgtgaaggaccttgtgcttcttctctttgagaccgctcttctcacttctggtttcagccttgatgagcccaacactttcggaagcaggatccacaggatgttgaagcttggattgagcattgatgacgatgatgctgttgaagccgatgctgagatgcctccacttgaagatgatgccgatgctgaaggtagcaagatggaggaagttgactaaattatcacacacagtcgacttaatcattaggggtgttgagacattggttatctttttatcttttttttttttttatgttttcgtttgaactaatattttggaactattttctggagtttatttcttctatcgctagtattcgtgaagattttttctctg

SEQ ID NO: 116651 - DNA, 847 bp, Arabidopsis thaliana
gcaggtaccggtttggtattcccgactcgacccacgcgtccgctggatgagaccgaagatgaaaagaagaagaaagaagagctcaaggagaagtttgaaggactctgcaaagtgatcaaagacgttttgggtgacaaggtcgagaaggttattgtttctgaccgtgttgtggactcaccgtgctgtcttgtaaccggcgaatacggctggactgcaaacattgtgaggatcatgaaagctcaagccttgagagacagcagcatggctggttacatgtcgagtaagaagacaatggagattaatccagagaactccatcatggatgagttgagaaagcgagctgacgcagacaagaacgacaagtctgtgaaggaccttgtgcttctcctctttgagaccgctcttctcacttctggtttcagccttgatgagccaaacactttcggaagcaggatccacaggatgctgaagcttggactgagcattgatgacgatgatgctgttgaagccgatgctgagatgcctccccttgaagacgatgctgatgccgaaggtagcaagatggaggaagtcgactaatttatcacacaaaagtcgactaaattattagcggtgttataagactatggttttctttttttcttttcgttaaaacttatgttattttggtgattatcttcacgaattttttctatggttttattgttgtgaagatatttctctgaactcggttttatgacaaagattctattatgctcaaaaaaaaccaaaaaaagggcggccgctctagaggatccaagcttacgtacgcggtcatgccacgtcatagctcttctatagttcccct

SEQ ID NO: 116652 - DNA, 418 bp, Arabidopsis thaliana
gggcacgcgcacgcggctttctaaggaccttcagatttactttgacaaagtcacggagtgggctttggcgcaatcgggctccaccctctgtagacaagcactcgccagcttggaaattgatcctggactccacccattagttccctttttcacttctttcatcgctgaagagattgtcaaaaacatggataattatccaatcttgttggctttgatgcgtcttgctagaagcctccttcataaccctcatgtacatattgagccatatctgcatcagttgatgccgtctattatcacttgccttattgccaagcgcttaggaagaaggtcatctgataatcactgggacttgagaaacttcactgccagcacagttgcttcaacgtgcaaaagggttggacacgtttatcacaatttg

SEQ ID NO: 116653 - DNA, 465 bp, Arabidopsis thaliana
  unsure (1)..(465): unsure at all n locations
ctctttgacactaagaagaagcccaacaacatcaagctctatgtccgtcgtgtcttcatcatggacaactgtgaagacatcattcctgagtaccttgggtttgttaagggtattgttgactctgaagatcttcctctcaacatctcgagagaaacattgcagcagaacaagatcctcaaggtcatccgcaagaaccttgtgaagaagtgccttgagctcttctttgagattgctgagaacaaggaggactacaacaagttctatgacgcagcttttctctaaggacccggaagctcgggtattcctcgggggcttcccaaaacaaggacccaagtttgcggggtttcttccggtaaccacttaacccaagggcgggtgattgnatttgacccagtttaaagggcnttggggncaaaggttttnagggaagggtcaaaaccggtnttttttnnaataacttgggtg

SEQ ID NO: 116654 - DNA, 729 bp, Arabidopsis thaliana
  unsure (1)..(729): unsure at all n locations
cagctctctacgactcactattagggaaagctggcacgcctgcaggtaccggtccggaattcccgggtcgacccacgcgtccggttctctacatggttgacgctatcgatgagtatgctattggtcagctcaaggaattcgaaggaaagaagcttgtctctgcaaccaaggaaggtctgaaactggatgagactgaagacgagaagaagaagaaagaagagctcaaggagaagtttgagggactctgcaaagtgatcaaggacgttttgggagacaaggttgagaaggttatcgtctctgaccgcgttgtggactcaccctgctgtcttgtaaccggcgagtatggctggactgcaaacatggagaggatcatgaaagctcaagccttgagagacagcagcatggctggctacatgtcgagcaagaagacaatggagattaacccagagaactccatcatggatgagctgagaaagagagctgacgcagacaagaaccgctaagtctgtgaaggatccttgtgcttctcctctttgagaccgcccttntcacctctggtttcagccttgacgngccaaacactttcggaagcaggattcacaggatgttgaagcttggactnagtatttnattaccgntgattctttttgaagcccgttgttnaaattncntccccctttaaggcggnttnnttnttcgggaaggtngcaaanttggngnatgtcgnct

SEQ ID NO: 116655 - DNA, 568 bp, Arabidopsis thaliana
tgatcctcagcgctacacgactcactatttggaaagctggtccgcctgcaggtaccggtccggaattcccgggtcgacccacgcgtccgctcagcaatgattgggaggagcatttggctgtgaagcatttctctgttgaaggacagcttgagttcaaagctatcctctttgttcccaagagagctccttttgatctctttgacactaagaagaagcccaacaacatcaagctctatgtccgtcgtgtcttcatcatggacaactgtgaagacatcatccctgagtacctcggatttgtgaaaggtattgtcgactctgaagatcttcctctcaacatctcgagagagacattgcagcagaacaagatcctcaaggtcatccgcaagaaccttgtgaagaagtgccttgagctcttctttgagattgctgagaacaaggaagactacaacaagttctacgaggctttctctaagaacctgaagctcggtatccatgaggactcccaaaacagaaccaagattgctgagttgctccgttaccactcaaccaagagcggtgatgaattgac

SEQ ID NO: 116656 - DNA, 539 bp, Arabidopsis thaliana
  unsure (1)..(539): unsure at all n locations
atgatctccnnnnnctctacgactcactatagggacagctggtacgcctgcaggtaccggtccggaattcccgggtcgacccacgcgtccgcccacgcgtccggaggactcccaaaacagaaccaagattgctgagttgctccgttaccactcaaccaagagcggggatgaattgaccagtctcaaggactacgtgacaaggatgaaggaaggtcagaacgatatcggcgggttcactggggggagcaagaaggctgttgagaactctccattccttgagaagctcaagaagaagggtatttgaagttctctacatgggtgacgctatcgatgagtatgctattggtcagctcaaggatttcgaaggaaagaggcttgtctctccaaccagggaaggtctgaaactggatgagactgaagacgagaagaagaagaaagaagagctcaaggagaagtttgagggactctgcaaagtgatcaaggacgttttgggagacaaggttgagaaggttatcgtctctgaccgtgttgtggactca

SEQ ID NO: 116657 - DNA, 2159 bp, Arabidopsis thaliana
tcgatctttaaccaaatccagttgataaggtctcttcgttgattagcagagatctctttaatttgtgaatttcaattcatcggaacctgttgatggacaccaccattgatggattcgccgattcttatgaaatcagcagcactagtttcgtcgctaccgataacaccgactcctctattgtttatctggccgccgaacaagtactcaccggacctgatgtatctgctctgcaattgctctccaacagcttcgaatccgtctttgactcgccggatgatttctacagcgacgctaagcttgttctctccgacggccgggaagtttctttccaccggtgcgttttgtcagcgagaagctctttcttcaagagcgctttagccgccgctaagaaggagaaagactccaacaacaccgccgccgtgaagctcgagcttaaggagattgccaaggattacgaagtcggtttcgattcggttgtgactgttttggcttatgtttacagcagcagagtgagaccgccgcctaaaggagtttctgaatgcgcagacgagaattgctgccacgtggcttgccggccggcggtggatttcatgttggaggttctctatttggctttcatcttcaagatccctgaattaattactctctatcagaggcacttattggacgttgtagacaaagttgttatagaggacacattggttatactcaagcttgctaatatatgtggtaaagcttgtatgaagctattggatagatgtaaagagattattgtcaagtctaatgtagatatggttagtcttgaaaagtcattgccggaagagcttgttaaagagataattgatagacgtaaagagcttggtttggaggtacctaaagtaaagaaacatgtctcgaatgtacataaggcacttgactcggatgatattgagttagtcaagttgcttttgaaagaggatcacaccaatctagatgatgcgtgtgctcttcatttcgctgttgcatattgcaatgtgaagaccgcaacagatcttttaaaacttgatcttgccgatgtcaaccataggaatccgaggggatatacggtgcttcatgttgctgcgatgcggaaggagccacaattgatactatctctattggaaaaaggtgcaagtgcatcagaagcaactttggaaggtagaaccgcactcatgatcgcaaaacaagccactatggcggttgaatgtaataatatcccggagcaatgcaagcattctctcaaaggccgactatgtgtagaaatactagagcaagaagacaaacgagaacaaattcctagagatgttcctccctcttttgcagtggcggccgatgaattgaagatgacgctgctcgatcttgaaaatagagttgcacttgctcaacgtctttttccaacggaagcacaagctgcaatggagatcgccgaaatgaagggaacatgtgagttcatagtgactagcctcgagcctgaccgtctcactggtacgaagagaacatcaccgggtgtaaagatagcacctttcagaatcctagaagagcatcaaagtagactaaaagcgctttctaaaaccgtggaactcgggaaacgattcttcccgcgctgttcggcagtgctcgaccagattatgaactgtgaggacttgactcaactggcttgcggagaagacgacactgctgagaaacgactacaaaagaagcaaaggtacatggaaatacaagagacactaaagaaggcctttagtgaggacaatttggaattaggaaattcgtccctgacagattcgacttcttccacatcgaaatcaaccggtggaaagaggtctaaccgtaaactctctcatcgtcgtcggtgagactcttgcctcttagtgtaatttttgctgtaccatataattctgttttcatgatgactgtaactgtttatgtctatcgttggcgtcatatagtttcgctcttcgttttgcatcctgtgtattattgctgcaggtgtgcttcaaacaaatgttgtaacaatttgaaccaatggtatacagatttgtaatatatatttatgtacatcaacaataaaaaaaaaaaaaaaaaaagggcggccgctctagaggatccaagcttacgtacgcgtgcatgcgacgtgatag

SEQ ID NO: 116658 - DNA, 860 bp, Arabidopsis thaliana
atcggctcaatactgaaagttttttctatatataaatataaaaggtaaaatgccagggatcacactaggagacacggtgccgaacctagaagtggagacgacacatgacaagttcacacttcatgactacttcgccaattcttggaccgtcctcttctctcatcccggggatttcacacccgtgtgcaccacggagcttggtgcgatggccaaatacgctcatgagttcgataagagaggcgtgaagctccttggtctgtcttgtgacgatgtacagtcacacaaagactggatcaaagatattgaagcctttaatcacggaagcaaggtgaattacccgataatcgctgaccccaacaaagagatcattcctcagcttaacatgattgatccaattgagaacggaccgtctcgtgcccttcatattgttggtcctgacagtaagataaaattgagcttcttgtatccgtcgaccgcgggacgtaacatggacgaagtattgagggctttagactcgttgttgatggcgtccaagcacaataacaagatcgccactccggttaactggaagccagatcaaccggttgtgatttcgcctgctgtgtcggacgaggaagccaaaaagatgttcccacagggtttcaagaccgccgatcttccgtcaaagaaaggctatctgcgtcacacagaggtctcttgaaaagataataacaaaagcctactatataacgtacatgcaagtattgtatgatattaatgtttttacgtacgtgcaaacaaaaataattacgtttgtaacgtatggtgatgatgtggtgcactaggtgtaggccttgtattaataaaaagaagtttgttct

SEQ ID NO: 116659 - DNA, 1128 bp, Arabidopsis thaliana
atggacattccgtattaccactacgaccatggcggagacagccaatatcttccaccgggtttcaggtttcatcccacggacgaagagctcatcactcattaccttctccgcaaagtcctcgacggttgcttctcaagccgtgccatcgcagaagttgatctcaacaagtgtgagccttggcaacttcccgggagagctaagatgggagagaaagaatggtacttctttagcctccgtgaccggaagtatccgacgggactgagaactaacagagcaactgaggctggttactggaaagctaccggaaaagacagagagatctttagttcaaagacttgtgcacttgttgggatgaagaagactcttgtcttttacaaaggaagagctccgaaaggagagaagagtaattgggttatgcatgaatatcgtcttgaaggcaaattctcttaccatttcatctcaagaagctccaaggatgaatgggtgatctctagggttttccagaaaaccactttagctagcaccggagccgtctccgaaggaggaggaggaggaggagcaactgtgagcgtaagcagcggtactggtccatctaaaaagacgaaagtaccctcaacaatctcaagaaactatcaagaacaaccaagctctccttcctccgtctcactcccacctctcctggatccgaccactaccctcggctacaccgacagcagttgctcctacgacagccgtagcaccaacacaaccgtcacagccagcgcaataaccgagcacgtgtcctgtttctccactgtccctactactactacggccttgggcttagacgttaactcattcagccgtcttccaccgccgctagggtttgactttgacccttttcctcgtttcgtttctagaaacgtctcgactcaatctaacttcagatcgttccaagaaaacttcaatcaatttccttactttggatcgtcttctgcatcgactatgacctccgccgttaatctgccttctttccaaggcggcggaggcgtctccgggatgaattactggctaccggcgactgccgaagagaatgagtcaaaggtcggtgtgcttcatgctggacttgactgtatttggaactactga

SEQ ID NO: 116660 - DNA, 1832 bp, Arabidopsis thaliana
  unsure (1)..(1832): unsure at all n locations
atgatctgccnnnnnnnnnnnnnnnnnnnnnnnnnnnnnnnnnnnnnnnnnnnnnnnnnnnnnnnnnnnnnnnnnnnnnnnccacgcgtccgcggacgcgtgggcttgtcttcatcttcatctaataaagttaacaacactctcatcaatttttattatgttcaaatctgtctgacttttcgttcttttctcttacacccaagcgttttaacaatctaacatctgtctctttgaatacttagatatccaacttcaatttctctcctttctcttcccaactttgattcctgatttgggtctttgttaaagttcaagaaagttcttttttctttttttttcctcctttaatggacgaagtttctcctgcagtcgctgttccattcagaccattcactgaccctcacgccggacttagaggctattgcaacggtgaatctagggttactttaccggaaagttcttgttctggcgacggagctatgaaagattcttcctttgagatcaatacaagacaagattcattgacatcatcatcatctgctatggcaggtgtggatatctccgccggagatgaaatcaacggttcagatgagtttgatccgagatcgatgaatcagagtgagaagaaagtacttagtagaacagagagtagaagtctgtttgagttcaagtgtgttcctttatatggagtgacttcgatttgtggtagacgaccagagatggaagattctgtctcaacgattcctagattccttcaagtttcttctagttcgttgcttgatggtcgagtcactaatggatttaatcctcacttgagtgctcatttctttggtgtttacgatggccatggcggttctcaggtagcgaattattgtcgtgagaggatgcatctggctttgacggaggagatagtgaaggagaagccggagttttgtgacggtgacacgtggcaagagaagtggaagaaggctttgttcaactcttttatgagagttgactcggagattgaaactgtggctcatgctccggaaactgttgggtctacctcggtggttgcggttgtctttccgactcacatctttgtcgcgaattgcggcgactctagggcggttttgtgtcgcggcaaaacgccactcgcgttgtcggttgatcacaaaccggatagggatgatgaagcggcgaggatagaagctgccggtgggaaagtaatccggtggaacggggctcgtgtatttggtgttctcgcaatgtcaagatccattggcgatagataccttaaaccgtcagtaattccggatccagaagtgacttcagtgcggcgagtaaaagaagatgattgtctcatcttagcaagtgatggtctttgggatgtaatgacaaacgaagaagtgtgcgatttggctcggaaacggattttactatggcataagaagaacgcgatggccggagaggctttgcttccggcggagaaaagaggagaaggaaaagatcctgcagcaatgtccgcggcagagtatttgtcgaagatggctttgcaaaaaggaagcaaagacaatataagtgtggtagtggttgatttgaagggaataaggaaattcaagagcaaatccttgaattgaaaaagaaggtttggaagaaaagtgaaaaaaaaagttttgatggtgggtaaaaattctctttagtgaaaaaagaaagataaaacaacaggtaataattacattgtaatattaatttcctgcttaaatttgttatttactttctcaaaaannnnnnnnnnnnnnnnnnnnnnnnnnnnnnnnnnnnnnnnnnnnnnnnnnnnnnnnnnnnnnnnn

SEQ ID NO: 116661 - DNA, 2992 bp, Arabidopsis thaliana
  unsure (1)..(2992): unsure at all n locations
atggcgatgagacttttgaagactcatcttctgtttctgcatctgtatctatttttctcaccatgtttcgcttacactgacatggaagttcttctcaatctcaaatcctccatgattggtcctaaaggacacggtctccacgactggattcactcatcttctccggatgctcactgttctttctccggcgtctcatgtgacgacgatgctcgtgttatctctctcaacgtctccttcactcctttgtttggtacaatctcaccagagattgggatgttgactcatttggtgaatctaactttagctgccaacaacttcaccggtgaattaccattggagatgaagagtctaacttctctcaaggttttgaatatctccaacaatggtaaccttactggaacattccctggagagattttaaaagctatggttgatcttgaagttcttgacacttataacaacaatttcaacggtaagttaccaccggagatgtcagagcttaagaagcttaaatacctctctttcggtggaaatttcttcagcggagagattccagagagttatggagatattcaaagcttagagtatcttggtctcaacggagctggactctccggtaaatctccggcgtttctttcccgcctcaagaacttaagagaaatgtatattggctactacaacagctacaccggtggtgttccacgcgagttcggtggtttaacaaagcttgagatcctcgacatggcgagctgtacactcaccggagagattccgacgagtttaagtaacctgaaacatctacatactctgtttcttcacatcaacaacttaaccggtcatataccaccggagctttccggtttagtcagcttgaaatctctcgatttatcaatcaatcagttaaccggagaaatccctcaaagcttcatcaatctcggaaacattactctaatcaatctcttcagaaacaatctctacggacaaataccagaggccatcggagaattaccaaaactcgaagtcttcgaagtatgggagaacaatttcacgttacaattaccggcgaatcttggccggaacgggaatctaataaagcttgatgtctctgataatcatctcaccggacttatccccaaggacttatgcagaggtgagaaattagagatgttaattctctctaacaacttcttctttggtccaattccagaagagcttggtaaatgcaaatccttaaccaaaatcagaatcgttaagaatcttctcaacggcactgttccggcggggcttttcaatctaccgttagttacgattatcgaactcactgataatttcttctccggtgaacttccggtaacgatgtccggcgatgttctcgatcagatttacctctctaacaactggttttccggcgagattccacctgcgattggtaatttccccaatctacagactctattcttagatcggaaccgatttcgcggcaacattccgagagaaatcttcgaattgaagcatttatcgaggatcaacacaagtgcgaacaacatcaccggcggtattccagattcaatctctcgctgctcaactttaatctccgtcgatctcagccgtaaccgaatcaacggagaaatccctaaagggatcaacaacgtgaaaaacttaggaactctaaatatctccggtaatcaattaaccggttcaatccctaccggaatcggaaacatgacgagtttaacaactctcgatctctctttcaacgatctctccggtagagtaccactcggtggtcaattcttggtgttcaacgaaacttccttcgccggaaacacttacctctgtctccctcaccgtgtctcttgtccaacacggccaggacaaacctccgatcacaatcacacggcgttgttctcaccgtcaaggatcgtaatcacggttatcgcagcgatcaccggtttgatcctaatcagtgtagcgattcgtcagatgaataagaagaagaaccagaaatctctcgcctggaaactaaccgccttccagaaactagatttcaaatctgaagacgttctcgagtgtcttaaagaagagaacataatcggtaaaggcggagctggaattgtctaccgtggatcaatgccaaacaacgtagacgtcgcgattaaacgactcgttggccgtgggaccgggaggagcgatcatggattcacggcggagattcaaactttggggagaatccgccaccgtcacatagtgagacttcttggttacgtagcgaacaaggatacgaatctccttctttatgagtacatgcctaatggaagccttggagagcttttgcatggatctaaaggtggtcatcttcaatgggagacgagacatagagtagccgtggaagctgcaaagggcttgtgttatcttcaccatgattgttcaccattgatcttgcatagagatgttaagtccaataacattcttttggactctgattttgaagcccatgttgctgattttgggcttgctaagttcttagttgatggtgctgcttctgagtgtatgtcttcaattgctggctcttatggatacatcgccccagagtatgcatataccttgaaagtggacgagaagagtgatgtgtatagtttcggagtggttttgttggagttaatagctgggaagaaacctgttggtgaatttggagaaggagtggatatagttaggtgggtgaggaacacggaagaggagataactcagccatcggatgctgctattgttgttgcgattgttgacccgaggttgactggttacccgttgacaagtgtgattcatgtgttcaagatcgcaatgatgtgtgtggaggaagaagccgcggcaaggcctacgatgagggaagttgtgcacatgctcactaaccctcctaaatccgtggcgaacttgatcgcgttctgacccaagcaagataaatangaaaataagatgcgaaatgtggtgatcattt

SEQ ID NO: 116662 - DNA, 712 bp, Arabidopsis thaliana
  unsure (1)..(712): unsure at all n locations
nnnnnnnnnnnnnnnnnnnnnnnnnnnnnnnncattcataaatttttcttcaatttgaattttctcgagaaaaatgtcttgctgtggaggaaactgcggatgtggatctggctgcaagtgcggcaacggttgtggaggttgcaaaatgtaccctgacttgggattctccggcgagacaaccacaactgagacttttgtcttgggcgttgcaccggcgatgaagaatcagtacgaggcttcaggggagagtaacaacgctgagaacgatgcttgcaagtgtggatctgactgcaagtgtgatccttgcacctgcaagtgaagaagcctttttaaataagcagagataatcgagtctctttaattaattaagttattcaataagtaaaccatatataggatggtgtttttaggtttggtttatgtgtaataatggcttcagcttatcttttagccgatcattgtcttttgtgtttgttttgatcatatcttttagatgtctagcaactctgccatgtgatgagtttgtacttccagtggaatgataataatattatagttttaaaaaaaaaaaaaggcggccccccccggggcccctccgcnnnnnnnnnnnnnnnnnnnnnnnnnnnnnnnnnnnnnnnnnnnnnnnnnnnnnnnnnnnnnnnnnnnnnnnnnnnnnnnnnnnnnnnnnnnnnnnnnnnnnnnnnnnnnnnnn

SEQ ID NO: 116663 - DNA, 805 bp, Arabidopsis thaliana
  unsure (1)..(805): unsure at all n locations
aaaaatgtcttgctgtggaggaaactgcggatgtggatctgtttctattttcggcaacggttgtggagggtaagtggccaacgtctcggttggatttatattttccggggaaatcgttgcatgcaagtatgcaacaactgtgaatcgatgatgatatcttgttttgatgaatggtttcttggagattttttcttgtaaaaaagatacaactcttttgaatttacacgatctctgttttcataggatactgatgggttttttctttcgattgttgcagttgcaaaatgtaccctgacttgggattctccggcgagacaaccccaactgaagacttttgtcttgggcgttgccccggcgatgaagaatcagttcgaggcttcaggggagagtaacaaccctgagaacgatgcttgcaagtgtggatttgactgcaagtgtgatccttgcacctgcaagtgaaaaagcctttttaaataagcaaaaaaaaccgagtctctttaattaattaagttattcaataagtaaaccatatataggatggggtttttaggtttggtttatgggtaaaaaaggcttcagcttattttttaaccgaacattgtcttttgggtttgttttgatcaaatcttttaaaagtctagcaactttgccatgtgatgagtttgtacttccaggggaatgataataaaattatagtttttnaaaaaaaaaaaaaaaaaaaaaaaaaaaaaaaaaaaaaaaaaaaaaaanaaagggcggccgctctagaggatccaagcttacgtacgcgtgcaatgcgacgtca

SEQ ID NO: 116664 - DNA, 497 bp, Arabidopsis thaliana
ttccgggtctacccacagcagtccgcggacgtaagctcggcaattcggctcgagtaaaattgccggcctgtgcaggaaactgcggatgtggatctggctgcaagtgcggcaacggttgtggaggttgcaaaatgtaccctgacttgggattctccggcgagacaaccacaactgagacttttgtcttgggcgttgcaccggcgatgaagaatcagttcgaggcttcaggggagagtaacaacgctgagaacgatgcttgcaagtgtggatctgactgcaagtgctgatcctttgcacctggcaagtggaagaaagccttttttaaataagcaggaggttaatccgagtctcctttaattaattaagctattcaataagtaaaccatatatatgagtggtgttgttaggtttggtttatgggtaataatggctacagcttatcttttaagcaatcattgcctttggtgttacgtcgggacatatgtttcagatgggtg

SEQ ID NO: 116665 - DNA, 481 bp, Arabidopsis thaliana
  unsure (1)..(481): unsure at all n locations
aatttnctcgagaaaaatgtcttgctgtggaggaaactgcggatgtggatctggctgcaagtgcggcaacggttgtggaggttgcaaaatgtaccctgacttgggattctccggcgagacaaccacaactgagacttttgtcttgggcgttgcacctgcgatgaagaatcagtacgaggcttcaggggagagtaacaacgctgagaacgatgcttgcaagtntggatctgactgcaagtgtgatccttgcacctggcaagtgaagaagcctttttaaataagcagaggttaatcggagtctcctttaattaatttaagttattcaataaggtaaacccttttttagggttgggggtttttagggtttggggttatgggggaataaatngcctcccccctaaacttttttcggccggtccaatggccctttggggttttttttngcccaaacttttaggggcntngaacnttcccctnngnt

SEQ ID NO: 116666 - DNA, 5113 bp, Arabidopsis thaliana
  unsure (1)..(5113): unsure at all n locations
aaattgatctcatcttcaatcaaattcatcatcttcgatactcgtttcttctctctttggtttcatacagatcccaaatttctagggctcctagtcctttgatttcttcgactggaatcgcaattccccactacgtcaagctggacagacaccgaagggatcgccatgagagtggcggctacgaggattcctaccataaccaccgagcccatcccagaggtccatctcgtccctcagattcacgcttcgaagaggatgatgatgattttcgccgccaccgtcgtcgtcgtggaagcagccctagcaattatcgaattggaattgggggcggaggaggaggtaatggtggtcgacgctgggaagatgacactcctaaggattttgatggtcccggagatggaggtttccggcagatgaatggtcccccagatagagtagattttaagcctatgggtcctcaccatggtggaagttttcggcctatggggtttgcctacgatgatggttttcgtccaatgggtcctaacggtggtgtgggaggagaagggacacggtcaattgttggagctcggtataactatcccgcgaagtatcctccttcagagagtccagacaggaggagatttatcggtaaagcaatggagtctgattattctgtaagaccgactacaccgccggtccagcagcctctttccggtcagaaaagagggtatcctatctcagaccatggcagctttactggaactgatgtctctgatcgtagcagtacagtcaagctttttgttggatctgtaccaaggacagctacagaagaagaaatccgtccctatttcgaacagcatggaaatgttctggaggttgctctgatcaaggacaagagaactggacagcagcaaggtatgtcaatctccattttattaggaaatagtcgtgaattatactttttaaaatttcaggtctccctgaaaaggctgatgggaagcaaccccagtctcatcattggcctccaattgtttgcaacaattttcgggcttattgcttatgcttgccagcgtcttatctgtgttcgattctgtcacagaagaaggctacctgtgctaagaaagggtttatgtacttatgttgggcaaatagatttcgctacttgtgtgtattctagaactttagatgtgtttgaaaagtgtagaatttattgagggtgttttagagttggagttaatgtacagagaactgaattttgctgttgcctttatagtgggaattggttataagaacatcgctattttcctctccctattgaaattcattttctttactcttcctctagatggattgaagatgttgtgtatggtcttgacaggatgaatgtatttttttaagttggtagtttgataaggacatgaggttcaaaagatggtttcttgatttgccactcctgctggtcaaagatttggccgtctttctaattttatcatgttggaggtttggcgtcttcattttctttcatatcaatttatgggtgtgctgtctattggttaatgatggcattccttttacctttttggatgagtgatgctggaatgaatgcgtttctccttttcttttgttgatggcctgaggaactatgatggctatatttctttccactctctttgaatggcctgaaatgtgtgctttctgtatggtcgtccctctcaatttcttggatggcttgtgatgtgatataccatctctcgtcataggtgaatgaatgatttgtttagtagttcttatgtatgtattttgtatgttcccacgtctctattccttggatggcttgtgatgtgatataccatctctcgtcatagatgaatgaatattttgttgagtagctcttatgtctgtatggtggcccttgcagtgctgatcgatatttatgtggaagaaatgtttgatgatagattttttttgtatgctcccttttcgctaatcaagcctttgtgcttgcaaggtgcaactgttattttattattgaatttcctgttctactactccatttagttctgtctctattttgtcagtgtgaagaaatactagacgatgaatggtgtgtttgtacgtgcatagttatttataaattcttgactttccaagaagttattatttctataactgctacacctttgtggatggcagaacaaatgcatctgattgtggtgacataaacacttttgatcgcggttgaatgtactagattccatacaactctttcttcagccttgtgaaatattattatgttaggtggtgcaaacatatggaaggaacctgattgttttagtttcttagaatagtttctgatgttaatacagcatgttgacttcactctcttgcccttgatcaatcagcatcaggcaggggcctaattatgtattacatgaagcaatcgtattcttttctgaattagatttttttccaatgagttatcttgcccataactgtagttctttatttgaagtcttcaaatgcttgatgtatggtgacgaaaatgtgtatatgttttggttttgattatccgctactcatcaattattgagattcttacatactgaatccgttactttggacctatagttatgttttatgttgctaattaacttgtacatgtttctagattttctttcaaatggatcctgcttggacaaatgcagccaccctttgtctgaaaggccctcttgtagatatgttatctgcagatactgactgtgttcaattttttaatatttgtttttgccatattctccatttgaagacattaatttattctctccaacaactttacatcaatatttaagtggaggctgtcagacatgtcttatgattttcctactgaacttatgtgctttgagtagtacatcttgttactagtacaatttgatggtagaaggaaaagttgaaccctgaaacagatagcttaagtatcagtctttaatgcaggctgttgttttgtaaaatatgcaacttcgaaagatgcggatagagccatcagagcactgcacaatcagatcactcttcctgggggaactggtcctgttcaagttcgatatgctgacggggagagagaacgcataggcaccctagagtttaagctttttgttggttcactaaacaagcaagccactgaaaaagaagttgaggagatctttttacaatttggtcatgtggaagatgtctatctcatgcgggatgaatatagacagagtcgtggatgtgggtttgttaaatattcaagcaaagagacggcaatggcagctatcgatggtctcaacggaacttataccatgagaggttgcaatcagccattgattgttcggtttgctgagccaaagaggcctaaacctggcgagtcaagggacatggcacctcctgttggacttggttcagggcctcgttttcaagcttcaggaccaaggcctacctctaactttggtgactctagtggggatgtaagccacacaaatccttggcgtccagctacttcacgaaacgtaggcccacctagtaacactgggatccgtggtgccggtagtgacttttcccctaaaccaggtcaagcaacattgccttcaaatcagggtggcccgttaggtggttatggtgttcctccccttaaccctctcccagtccctggagtttcatcttctgccacattgcaacagcaaaatcgggcagctggccagcatataacaccattaaaaaaacctcttcacagtccacagggtctccctctccccctccgtccgcaaactaatttccctggggcccaggcacccttgcagaatccttatgcttatagcagccagttgcctacctctcagctgccaccacagcaaaacatcagtcgtgcaactgctcctcaaactcctttgaacattaatctacggccaacaactgtgtcttctgcaactgttcaatttccccctcgttcccagcagcaaccgctacaaaagatgcaacatcctccttctgagctagctcagctcttgtcgcagcaaactcagagtctacaagcaacattccaatcgtctcagcaagcaatttctcagctgcagcagcaggtgcagtctatgcagcaaccaaaccaaaatttaccactctcacagaatggccgagctggtaaacaacagtgggctggatctgcaattccaagagtggctagcaccactggttcgacaccagtgagctatgtgcaaacagctgcacctgcagtaagtcagagcgtaggttctgtcaaatgtacctggaccgagcatacctcgcctgatggatttaaatattattacaatggtctaacgggtgaaagcaagtgggaaaaacctgaggaaatgatagtgttcgaacgagagcaacagaaacagcaacaacatcaagagaagccaactatacagcagtcccagacccaattacagccgttgcagcaacaaccacaacaagttcagcagcaatatcagggccagcaattacagcagccgttttattcttcactgtatccaactccaggggccagccataatactcagtatccatcattgccagttggtcaaaatagccagtttcctatgtcaggaattggtcagaatgctcaggattatgctcggacacatatacccgtgggagctgcttcaatgaatgatatatcaagaactcaacagagccgtcaatctccccaagaactcatgtggaagaataaagcttgaggtacatgagacgaggagctaaactatctcagtagctagatagaaatttctggaactaattagtcaaggagaggaaaagcagcaatggtagtgtccttagtctctgatttttttagttaaccccttcagttataatagataggcgatcgtagaccatctgcattctatcttttctctaatcagatatctcctcctttttcattttaagagctgccaaacaatggcctgttgtaacataactagcgcaagttatgtctcatgttgtgttactagtagtaacttagctgggtaaaccaaactttgatccagattaggagtcatatataattatataaatagaatatgtacattcatagatnnnnnnnnnnnnnnnnnnnnnn

SEQ ID NO: 116667 - DNA, 670 bp, Arabidopsis thaliana
aagttcaacaaaagaaaatggagaatatgggaactagagtgatagagccattgataatggggagagtggtaggagatgttcttgatttcttcactccaacaactaagatgaatgttagttataacaagaagcaagtctccaatggccatgagctctttccttcttctgtttcctccaagcctagggttgagatccatggtggtgatctcagatccttcttcactttggtgatgatagacccagatgttccaggtcctagtgacccctttctaaaagaacacctgcactggatcgttacaaacattcccggcacaacagatgctacgtttggcaaagaggtggtgagctatgaattgccaaggccaagcatagggatacataggtttgtgtttgttctgttcaggcagaagcaaagacgtgttatctttcctaatatcccttcgagagatcacttcaacactcgtaaatttgcggtcgagtatgatcttggtctccctgtcgcggccgtcttctttaacgcacaaagagaaaccgctgcacgcaaacgctagtttcatgattgtcataaactgcaaaaatgaaagaagaaaatttgcatgtaatctcatgtttatttgtgttctgaatttccgtactctgaataaaaactgccaaagatgagttgaatccg

SEQ ID NO: 116668 - DNA, 1510 bp, Arabidopsis thaliana
  unsure (1)..(1510): unsure at all n locations
agaacatcatcaatgaagaccaattgcgagatccgacaacaccgcttcttttgatttcgatcttactttccctggatctcatagttaatctggtttgagtctagaaatgtcgagtgatgcagctcgtacgccattgttacccactgagaagatagataccatggctcaagatttcaacctgaactcaagaacttcttcttcaagaaaacgaagattgcgtcgctctagaagtgctcctcgtggtgattgtatgtacaatgatgatgtcaaaatcgacgaaccacctcctcatccgagtaaaatcccaatgttcagtgatctaaacccgaatctcaggcgagtgatcatgttcttggctttatatcttaccattggtactctctgtttctacctcgtgagagaccagatctccggtcataaaaccagtggtgtggtagatgctctctatttctgtatagtaacgatgacaactgttggatacggtgaccttgtccctaatagttccgcctcaaggctacttgcttgtgccttcgtcttctcgggaatggtcctcgttggtcacctcttaagtcgagcggcggattatctagtggagaaacaagaggctttgctcgttagggctttccatttgcgtcaaagctttggtccaacagacattctcaaggagttgcatactaacaagttgagatacaaatgctatgctacatgccttgtccttgtagtcctcttcattgttggcacgattttccttgtaatggttgagaaaatgccggttatctcagctttctactgcgtctgctccacggttacaacattgggttatggagataagagttttaactcggaagccggacgcctttttgctgtgttttggatcttgacgagcaccatatgtttggctcagtttttcctctatgtagctgagctaaatacagaaaacaaacagagggcgttggtgaaatgggttttaacgcgaagaatcacaaacaatgatctcgaagcagctgatctcgatgaagatggagttgttggagctgcagagtttattgtgtataaactgaaagaaatgggtaagattgatgagaaagatatttctgggataatggatgagttcgagcaacttgattacgatgaatcaggaactctcacgacttctgacatcgttttagctcagaccacgtctcagattcaaaggtaagcctcattatcatcatcatcatcatcttgcgaagcgaatcagaatgtttgtttagttataccttcacacaacaaaagccaaagagagtgaccgttttttgaaattttgtttgtttttcctgtttgtgtttgtaatgtaatgccacagtctaactctttgtcgtttcttgatgctgagtgtataatttcatctctatctataaatatgaagcgcggccgnnnnnnnnnnnnnnnnnnnnnnnnnnnnnnnnnnnnnnnnnnnnnnnnnnnnnnnnnnnnnnnnnnnnnnnnnnnnnnnnnnnnnnnnnnngtt

SEQ ID NO: 116669 - DNA, 464 bp, Arabidopsis thaliana
ccccccttgaggtcgactgtatcgataagcttgatatcgaattcgcggccgccttcgtcttctcgggaatggtcctcgttggtcacctcttaagtcgagcggcggattatctagtggagaaacaagaggctttgctcgttagggctttccatttgcgtcaaagctttggtccaacagacattctcaaggagttgcatactaacaagttgagatacaaatgctatgctacatgccttgtccttgtagtcctcttcattgttggcacgattttccttgtaatggttgagaatattctttttatctcagctaactacttcatgggcgtggactgttacaacattggggtatggatataagagctataactagtaagccggacgcctttttgctgtgttttggatcttgacgagcagcatatgtttgtctcagtttttcctttatgtagttgttctaaattcagattt

SEQ ID NO: 116670 - DNA, 1252 bp, Arabidopsis thaliana
  unsure (1)..(1252): unsure at all n locations
agctctcctacgactcactattgggaaagctggcacgcctgcaggtaccggtccggaattcccgggtccgacccacgcgtccgacttcccctaatttcgcttcgaattcaaaagccctaattcgaaaattcccatttctcaaggtttttaaaagagtattgcaaagatgtcttctgattcgtcccgggaagagaatgtgtacttggccaagttagccgagcaagctgagcgttacgaggaaatggttgagttcatggagaaagttgcaaagaccgtggagaccgaggaacttactgttgaagagaggaatctcttgtctgttgcttacaagaacgtgattggtgctaggagagcttcttggaggattatctcttccattgagcagaaggaagatagcaggggcaacagtgatcatgtttcgattatcaaggattacagaggcaagattgaaactgagctcagcaagatttgtgatggcattttgaaccttcttgaggctcatctcattcctgctgcttctttggctgagtccaaagttttttacctgaagatgaagggagattatcatcggtaccttgctgaattcaagactggtgctgagaggaaagaagctgctgagagcactcttgttgcctacaagtctgctcaggatattgctcttgctgatctggctcccactcacccaatcagactggggcttgctcttaacttctctgttttctactatgagattctcaactcatctgatcgtgcgtgtagtctcgcaaagcaggcttttgatgaggcaatctcggagctagacacattgggagaggaatcatacaaggacagtacattgatcatgcagcttctccgtgacaatctcaccctctggacttctgacctcaatgacgaagctggtgatgatatcaaggaagccccgaaagaggtgcagaaagttgatgaacaagcccaaccaccaccttcgcagtgataaaatcagatccatggaatgatttgcagacaaaaaaatatatggcttggttctgtgtttttaaacagaaaaaaaccttgtagtttccttaaacatgggctgtagtttccttaaacatggatttgtagtagtaattgtagctgcatgatttggttatcgatggttaaaactaaaaaagtgcttctcacaaaaaaaaaaaaaaaggannnnnnnnnnnnnnnnnnnnnnnnnnnnnnnnnnnnnnnnnnnnnnnnnnnnnnnnnnnnnnnnnnnnnnnnn

SEQ ID NO: 116671 - DNA, 1078 bp, Arabidopsis thaliana
  unsure (1)..(1078): unsure at all n locations
cgcgtctcgccacgcgtccgcgacaaatccctaattccaaaatcctctcggatctaaaagagtgtgtgataacataagatgtcgtcttctcgggaagagaatgtgtacttagccaagttagctgagcaagctgaacgttatgaggaaatggttgagttcatggagaaagttgcaaagactgttgacaccgatgagcttactgtcgaagagagaaacctcttgtctgttgcttacaagaacgtcattggtgctaggagagcttcctggaggatcatatcttccattgaacagaaggaagaaagcagaggaaacgatgatcatgtttccattatcaaggactacagaggaaagatcgaaactgaactcagcaaaatctgtgatggaatactcaatcttctggattctcaccttgttcccactgcatctttggccgagtccaaagtcttttacctcaaaatgaaaggagattaccacaggtaccttgctgagtttaagactggagctgagaggaaagaagctgctgagagcactctggttgcttacaagtcagctcaggatattgcacttgctgatttagctcctactcatccgattagactgggacttgctcttaacttctctgtcttctactacgagattctcaactcacctgatcgtgcctgcagtctcgcaaaacaggcttttgatgaggccatttctgagctggatacattaggagaagaatcatacaaagacagtacgttgataatgcaacttctccgtgacaatctgaccctttggaactctgacatcaatgatgaggcgggcggtgatgagatcaaggaggcgtcaaaacatgagccggaagaggggaaaccagctgagacagggcagtgaccagagagagagggagagacatttctaagtatgtatggtatggattttccaaaaacatatgatatgattaggggatttgtagaagcagagagaaagatctttatttgattttctccaaaaatctctgttcccttttttttttattgggttattaaagctgtttgagtccnnnnnnnnnnnnnnnnnnnnnnnnnnnnnnnnn

SEQ ID NO: 116672 - DNA, 1437 bp, Arabidopsis thaliana
atgtctcttcttgctttcttcctcttcaccatccttgtcttttcaagttcatgttgttccgcaactcggttccaagggcacaggtacatgcagaggaaaacaatgctagatttggctagcaagattggtatcaactatggaagaagaggaaacaacctcccatctccatatcaatccatcaacttcatcaaatctatcaaagctggtcatgtcaagctctatgacgccgatccagagagtctcacactcctctctcaaaccaatctctacgtcaccataaccgtccctaaccaccaaatcaccgccctcagctctaaccaaaccatagctgacgaatgggtcagaactaacatcctcccttactatccacaaacacaaatccgttttgtccttgtcggaaacgaaatcctcagctacaattctgggaatgtctctgtgaatcttgtaccggcgatgcgcaaaatcgttaactcactcagattacatgggattcacaacatcaaagttgggacacctctagctatggattctctccggtcgtcgtttcctccatcgaacggaacattccgggaagaaatcaccggaccggtgatgttaccgttgctgaagtttctcaacggaacaaactcttacttcttccttaatgttcatccttacttccgttggtcaagaaaccccatgaacaccagtttggattttgctctgttccaaggacactcaacctataccgatcctcaaaccggtttggtttaccgtaatcttctagaccaaatgttggattcggttctcttcgccatgaccaaactcggttatccacatatgcgcctcgcgatctctgaaaccggatggcctaatttcggtgacatcgacgaaaccggagccaacattctcaacgcagctacctataaccgtaatctgatcaagaagatgagcgcaagtcctccaatcggtacaccatcaagacccggtttaccaataccgacatttgttttctccttattcaacgaaaaccagaaatccggttcggggacacagagacattggggaatcttgcatcccgacggttcaccaatctacgacgtagatttcaccggtcaaacacccttaaccggtttcaacccgttacctaaaccgacgaacaacgttccttacaaaggtcaagtgtggtgcgtaccagtcgaaggagccaacgagactgagcttgaagaaacattgaggatggcttgtgcccaaagcaacaccacttgtgcagctttagctcctgggagagaatgttacgaaccagtctccatttattggcatgcaagctacgcgcttaattcgtactgggctcagtttcgtaaccaaagcattcaatgtttcttcaatggattggctcatgagacaacaaccaaccctggaaatgatcgttgcaagtttccgagcgttactctgtga

SEQ ID NO: 116673 - DNA, 1564 bp, Arabidopsis thaliana
atttcacaaaccaaaccaaaaccaaaaaaatagcttatctctctcttatcaccggttcaatcactaaaccatggcgacctccgtcgataaccgccattatcccaccatgaacggcgtcgctcacgccttcaaacctcctctcgttccttctcctcgctcattcgaccgccaccgtcaccaaaaccaaactctcgacgtcatcctcaccgaaactaaaatcgtcaaagaaaccgaagtcatcaccaccgtcgtagacagttacgacgactcctcaagcgacgacgaagacgagagccataaccgtaacgtcccttactacaaagagctggttaaaaaatcaaacagcgatttagaaccgtcgattttagatccgagagatgaatcaacggctgatagttggattcaacgtaactcatccatgctccgtctcaccggaaaacatccattcaacgccgaagcacctcttcctcgtcttatgcaccatggattcatcactccagttccactccattacgtccgcaaccacggtgcagttcccaaagcgaattggtcagactggtcaatcgaaattaccggactcgttaaacgtccggctaaattcaccatggaagagctaatctccgagttccccagccgcgaattcccggtgacactcgtctgcgccggtaatcgccgcaaggaacagaacatggtgaaacaaacgatcggattcaattggggatccgccggagtatctacttctctatggaaaggtattccgttaagcgaaatcctccgtcgatgcgggatctatagccggagaggaggcgcgttaaacgtttgcttcgaaggagcggaggatcttcccggcggcggcggatctaaatacggaacaagtattaagaaggagatggcgatggatccggctagagatattatcttagcttatatgcaaaacggcgagcttttaacgccggatcatgggtttccggttcgggtcattgtaccgggtttcatcggtggtcggatggttaaatggttaaagagaatcatcgtcacgcctcaagaatctgacagttactatcactataaagacaatcgagtccttccttctctcgttgatgctgagctggcaaattccgaagcttggtggtataagcctgaatacataatcaacgagcttaatataaactcggtgattacaacacctggtcacgcagagattttaccgattaatgcattcactactcagaagccgtacacattaaaaggctacgcttattctggaggaggtaagaaggtaacgagggttgaggtgactctagacggaggagacacgtggagtgtttgtgagcttgaccaccaggagaaaccgaacaagtacggtaaattctggtgctggtgtttctggtcacttgacgttgaggttcttgatctgctcagtgctaaagacgtcgcggttcgagcctgggacgagtctttcaatactcagcctgataaactcatctggaacctcatggggatgatgaacaattgcttggtcaagattaggaccaacgtgtgcaagcctcatagatgagagata

SEQ ID NO: 116674 - DNA, 1483 bp, Arabidopsis thaliana
aggacgcgtggggcctatctgaaacaacaacctccgtttgaggttttgccgggaaaatataaagttcacaggctttggtctctgcatttgcaatatatttaaaatggcagcagctttcttgaatcttggcggctatgttttcgttttcttctcttcgttcttagctatagtggccccacaggttcgaggcaatgttgctgtctttgatagctactggacgcaacgacaaagtgatgcattgaaacaaaccatcggctcttacgatcctcatccacttaacgtcaccaaccattttaattaccatgtcaatatagcagtggatgcatcggaatcaaggaacgatacaaggagagagcttactcaggtgagaagtggtcgtaaaacgcacaaaagcagcggaaaatgcctagcttataacccgatagacaactgctggcgatgcgatcgtaactgggctaataaccggaagaaactagccgactgtgtgctcggattcggccggagaaccaccggaggaaaagacggaccgatatacgtcgtcaaagacgcgtctgacaacgatcttatcaaccctaaaccaggaacgttaaggcatgcagtgactcgagacggaccgctttggatcatattcgcaagaagcatgatcataaaactgcaacaagaactgatgataacgagcgacaaaacaatcgatggaagaggagctagggtttacatcatggaaggtgctggattaacgttgcaatttgtgaataatgtgatcattcacaatatttatgtcaagcacattgttcctgggaacggtgggttgatcagagactctgaggctcacatagggcttaggacaaaaagtgatggtgatggaatcagtttgattggagcaaccaatatttggatcgaccatgtctcaatgacaagatgtgcagatggtatgatcgatgctattgacggctccactgctgtaactatttccaacagtcatttcaccgaccaccaagaggtgatgttgtttggggcgagggacgaacacgtgatcgacaagaaaatgcagataacggttgcgtttaaccacttcggtaagcgattggaacagagaatgcctcgttgcagatacggaacgatacatgtggtgaacaatgactacacacattgggaaatgtatgcaattggtgggaacatgaaccctacaattattagtcaaggcaatcgtttcattgctcctcctaatgaagaagccaaacagattacaaaaagagagtacacaccatacggtgaatggaaatcttggaattggcaatcagaaggagattactttctcaacggagcttattttgtgcaatccggaaaagcaaatgcgtggagctctaaaccgaaaaccccgctcccaaacaagtttacaattcgacctaaaccgggaacgatggtccggaaacttaccatggatgcaggagtacttggctgcaaacttggtgaagcttgctga

SEQ ID NO: 116675 - DNA, 847 bp, Arabidopsis thaliana
  unsure (1)..(847): unsure at all n locations
gataaatactaaactcactgttaaaactttctcaacaaagcttcctgtttctctacaaatggcatctgctctcgctcttaagagactcctatcatcctccatcgctccacgttcccgtagtgttcttcgtccagctgtttcctctcgcctcttcaacaccaacgccgttaggagctacgacgacgacggcgaaaatggagacggcgttgatttatatcgccgctctgttcctcgccgccgtggtgatttcttctcagatgtgtttgatccgttttcgccgacgaggagcgttagtcaagtgctgaatctgatggaccagttcatggagaatcctctgttatcagctactcgtggcatgggagcttcaggagctcgtcgtggttgggatataaaagagaaagacgatgctctgtacctgagaatcgacatgcctgggctgagcagagaggatgtgaagctggctttggagcaggacactctggtgattagaggagaaggaaaaaacgaggaagatggtggcgaggaaggagagagcggtaatcggagattcacaagcaggattggattaccggataagatttacaagatcgatgagattaaggcggagatgaagaacggagtgttgaaagttgtgatcccgaagatgaaagaacaagagagaaatgatgttcgtcagatcgagatcaactaaaaacgtcgacgtttttttctgttctagttttgttgataggtctttgaataagaagtgtgtgtagtttggcacggtcgatgttgagtcatgtagtctctaaagactaaaaggttatatgtttctttcttgaaaaaaaaaaaannnnnnnnnnnnnnn

SEQ ID NO: 116676 - DNA, 671 bp, Arabidopsis thaliana
  unsure (1)..(671): unsure at all n locations
nnnnnnnnnnnnnnnnnnnnnnnnnnnnnnnnnnnnnnnnnnnnnnnnnnnnnnnnnnnnnnnnnnnnnnnnnnccacgcgtccgcggacgcgtgggtgcgagaagacgacagaaggggagaacaacaacaacaacaacaaacaagaactcaaacacttcataactaaacatcctttaaagccttttcaaaaactcaatcatgtcaagcaactgcggaagctgcgactgtgctgacaagacccagtgcgtaaagaagggaaccagctacaccttcgacatcgtcgagactcaggagagctacaaggaggccatgatcatggacgttggtgccgaggagaacaacgcaaattgcaagtgcaagtgcggctcctcttgcagctgcgtcaactgcacttgctgccccaactaatgaagcttctttaatcaaaatgtaatatgaataaaagttgatgtgggctcatctattgagctcatgtctctcttattactactctctagtatggtgtgatgtaatgggttatgacccttctttcccttccctataaaactaaaggaacttgcaaggttaatttgaaaagatggtttctttttattatcaatcgcatcagcatgggattttgtatcaaatcgatcccattatctccttgcttttatacccctnnnnnnnnnn

SEQ ID NO: 116677 - DNA, 585 bp, Arabidopsis thaliana
  unsure (1)..(585): unsure at all n locations
atagaagagctttgacgtcgcatgcacgcgtacgtaagctcggaattcggctcgaggaactcaaacacttcgtaactgaaacatcctttaaagccttttcaaaaactcaatcatgtcaagcaactgcggaagctgcgactgtcctgacaagacccagtgcgtaaagaagggaaccagctacaccttcgacatcgtcgagactcaggagagctacaaggaggccatgatcatgggcgggtggtgccgaggagaacaacgcaaattgcaagtgcaagtgcggctcctcttgcagctgcgtcaactgcacttgctgccccaactaatgaagcttctttaatcaaaatgtaatatgaataaaagttgatgtgggctcatctattgagctcatgtctctcttcattactactctctaggatgggtgtgatggaatggggttatgacccctctttcccttccctataaaacttaaaggaactttcaaggttnaaaaaaaaananttaaaaanaaagggggggccgctttngggggtccaggtttnggccggggtnattnagnggnnaanggttttttttggggcccnaaat

SEQ ID NO: 116678 - DNA, 701 bp, Arabidopsis thaliana
  unsure (1)..(701): unsure at all n locations
ctcactattagggaaagcntggtaccgcctgcaggtacctggtccggaattcccgggtcgacccacgctngtccgggcnngggattacccgctgagtttaagcatatcaataagcggaggaaaagaaactaacaaggattcccttagtaacggcgagcgaaccgggaagagcccagcttgaaaatcggacgtcttcggcgttcgaattgtagtctggagaagcgtcctcagcgacggaccgggcctaagttccctggaaaggggcgccagagagggtgagagccccgtcgtgcccggaccctgtcgcaccacgaggcgctgtctacgagtcgggttgtttgggaatgcagccccaatcgggcggtaaattccgtccaaggctaaatacgggcgagagaccgatagcgaacaagtaccgcgaggtaaagatgaaaaggactttgaaaagagagtcaaagagtgcttgaaattgtcgggggcgaacctgacgtggaagaggaggaggacgtggtgngtgatggtgggtttcaacacagatcagatggaccaccagtccaggcagctgcttgagagtgaggtttctcttacacaaacataaaaagaagaaaaaagccccaagtcgtggatgttnnttttctatctcctttgtctctcactttctttctatgtttgcttcttctgtccatcaagaagacatgttt

SEQ ID NO: 116679 - DNA, 948 bp, Arabidopsis thaliana
  unsure (1)..(948): unsure at all n locations
gagttttccattttccaanctaattccctccttaaggacaaanttgacttcncccgttcgncctttnnanctngtgaccccccggcttcaggggaaaagaacttacaaggattcccttagtaacggcgaccgacccgggaagaccccagcttgaaaatcggacgtcttcggcgttcgaattgtagtctggagaagcgtccttcagcgaccggacccggccctaagttcccctggaaaaggggcgccagagagggtgagagccccgtcgtgcccggaccctgtcgcaccacgaggcgctgtctacgagtcgggttgtttgggaatgcagccccaatcgggcggtaaattccgtccaaggctaaatacgggcgagagaccgatagcgaacaagtaccgcgaggtaaagatgaaaaggactttgaaaagagagtcaaagagtgcttgaaattgtcgggagggaagcggatgggggccggcgatgcgtcctggtcggatgcggaacggagcaatccggtccgccgatcgattcggggcgtggaccgacgcggattacggtggcggcctaagcccgggcttttgatacgcttgtggagacgtcgctgccgtgatcgtggtctgcagcacgcgcctaacggcacaccttcgacatcgtcgagactcaggagagctacaaggaggccatgatcatggacgttggtgccgaggagaacaacgcaaattgcaagtgcaagtgcggctcctcttgcagctgcgtcaactgcacttgctgccccaactaatgaagcttctttaatcaaaatgtaatatgaataaaagttgatgtgggctcatctattgagctcatgtctctcttattactactctctagtatggtgtgatgtaatgggttatgacccttctttcccttccctataaaactaaagaaacttgcaaaaaaaaaaaaaagaa

SEQ ID NO: 116680 - DNA, 624 bp, Arabidopsis thaliana
attttggtgcagtgaaggttcaaagctggcatgcatgatgcatataataactgctctggacctaatacttactacgcatttaaattaatatttatggataatatggttaataaataaggaacttctatttatatcacaaaaggtcactggtcttcttcgtgtgacttcaccactttctcatctcccacaaaaatggctctctcacttctttcagtctttatctttttccatgtctttaccaatgttgtttttgctgcttcaaatgaggaatccaacgccttagtttctttaccaacgccaacacttccatcgccatctccggctaccaaaccgccgtcgccagctctcaaaccgccgacgccgtcgtacaagccacccacgctgccaactactcctattaaaccacccaccacaaaacctccggtcaaacctccaactattccggttacaccagtaaaacctccggtttcaactcctccgatcaaactaccgccggtacaaccacctacgtacaaacccccaacgccaacagttaaaccaccgtccgtccaaccacctacgtacaaacccccaactccaacggttaaaccacccactacatcaccggttaaaccacccactacg

SEQ ID NO: 116681 - DNA, 536 bp, Arabidopsis thaliana
  unsure (1)..(536): unsure at all n locations
cccgggaggacccactggggcccggagggattacccgctgagtttaagcatatcaataagcggaggaaaagaaactaacaaggattcccttagtaacggcgagcgaaccgggaagagcccagcttgaaaatcggacgtcttcggcgttcgaattgtagtctggagaagcgtcctcagcgacggaccgggcctaatttccctggaaaggggcgccagagagggtgagagccccgtcgtgcccggaccctgtcgcaccacgaggcgctgtctacgagtcgggttgtttgggaatgcagccccaatcgggcggtaaattccgtccaaggctaaatacgggcgagagaccaatagcgaacaagtaccgcgaggtaanagatgnagaaggggaaagagagtgagagcaaagatttggtggtggaagcaggagagcaatgttnaaacaagggacagttaaaagagtttgnattcaatggttttggttcncaaggtaangannggnnnccaagcanaagtgattgntttacgcgcactttttc

SEQ ID NO: 116682 - DNA, 373 bp, Arabidopsis thaliana
gcgagagaccgatagcgaacaagtaccgcgaggtaaagatgaaaaggactttgcctgagaaaaccgcgaggaagaagaaacggctcaagcagatcaatatgagttttgttaagaaaccgcacaataagatgagacggagaatgtgatgctgatgaatcttcaacatctgatagaattttctaaagattattgtctttgtcctttcctttttaagatattgtcaagagtactcatcattttgcttgatcatgagcaaattgtcccaataatcttttgttttgtctcagtgtaacgtttactaagagttcatgcttggctccaagggtccgggaggtaaaattacggttccttgggtaatttggaaaaaaaaaaa

SEQ ID NO: 116683 - DNA, 2477 bp, Arabidopsis thaliana
  unsure (1)..(2477): unsure at all n locations
nnnnnnnnnnnnnnnnnnnnnnnnnnnnnnnnnnnnnnnnnnnnnnnnnnnnnnnnnnnnnnnnnnnnnnnnnnnnnnnnnnnccacgcgtccgtctctctctatctatcttcttcatctttgtttcagcttctcctttgaaactagattatctccgttaatggcgcctcagatctaaccttgggagttatatatatatacttgttcaactcttcttcgaacgctgtccaacttcttcctctggttcgatcatcgagatctcgaggttatttggccgcaatgcagaagcgaatagccttgtcgtttccagaagaggtactagagcatgtgttctcgtttattcagctggataaggataggaactcagtctctctggtgtgcaagtcatggtacgagatcgagcggtggtgcaggaggaaagtcttcatcgggaactgctacgccgtgagtccagcgacggtgattaggaggttcccgaaagtgagatccgtggagcttaaaggaaaacctcactttgctgactttaatttggtacctgacggatggggaggttacgtgtatccatggattgaggccatgtcttcgtcttacacgtggcttgaagagataaggctgaagaggatggtggtcaccgacgattgcttggagctcatagccaagtcttttaagaattttaaggttcttgtgctttcttcctgcgaaggcttctccaccgatggtctcgctgctatcgctgccacttgcaggaatctgaaagagcttgacttacgagagagtgatgttgacgacgttagtggccactggcttagccatttcccagatacatacacttctttggtatcactcaatatatcttgcttagcatctgaggtcagtttctctgctctggaaaggctggtgactaggtgtcccaatctcaagtctctcaagcttaaccgagctgttccacttgaaaaattggctactttacttcaaagagcacctcaattggaggaattgggcactggtgggtacactgcagaagtgcgaccagatgtttactctggtttatctgtagcgctctctgggtgcaaggaattgaggtgcttatctggattttgggatgctgttcctgcctatcttccagcagtttattcggtttgcagtcggcttacaactttgaatctgagttatgcaacagtccagagctatgatcttgtcaagcttctttgtcaatgccctaaactgcagcgcctctgggtgcttgactacatcgaggatgctggtcttgaggtgcttgcttcaacctgcaaggacctacgcgagctgagagtgtttccgtccgagccttttgtcatggaaccaaatgtggcattgacggaacaggggcttgtctccgtctccatgggctgtccaaaactcgagtcggttctctacttctgccgtcaaatgaccaatgctgcattgataaccattgctaggaaccgtcccaacatgactcgcttccgtttgtgcatcattgagccaaaagccccagactatctgactctagagccactggatattggatttggagccatagtagagcactgcaaggatctccgtcgcctctctctatctggcctcttgaccgacaaggtttttgaatacattgggacatatgccaagaagatggaaatgctctcagtggcatttgcaggagacagtgacttaggcatgcatcatgttttgtccgggtgcgatagcttgaggaaactagagataagggactgcccgtttggagacaaggcgcttttggccaatgcttcaaagctggagacaatgcgatccctttggatgtcttcttgttccgtgagttttggagcctgcaagttactaggacagaagatgccaaagctgaatgtggaagtcatcgatgaacggggtgcaccggactcgagaccagagagctgccctgttgagagagtcttcatataccgaacagtggctggtcctcgatttgacatgcctggcttcgtctggaacatggaccaagactcaacaatgaggttttccaggcaaatcattactactaacggattataagacaaagaaacgaggtacatttttcattaatccttgttcatcatcccatataatcgtgttccggtttaggaacatgagagagctcggtcgccaataatttgaatctcggctgcttcatataaccatcaagctcatgagcaatgaataagtggagagagagaaagagagatctaagagagctttgttttatttatgtaagaattattgattgttgtatgtttatttggctacttacactgagagatcctggtggggtatttttcttaagaggataagagatttttttaaaagacaatgtcaaaaatgtaactgttcgacgtgttaaaaaaaaaaaaaaagggcggccgctctagaggatccaagcttacgtacgcgtgcaggcgacgtcaangatctctatagtgtgcacccaa

SEQ ID NO: 116684 - DNA, 2579 bp, Arabidopsis thaliana
cctcgatgacgacggtatccataagctagatatcgaattcgcggccgccttcccaacttctctcctctctcttcacattattatattctctctggttcttgcaatccaatccaatctctctctctctctctctctcagaaactaaactgaaatattgcagagttttgaatacacggccatgaaccaatcaccatctcttatcgaacagggtatttctcaacagcatttgaagactttgtcttgtgccaatgttcttactttggcttaccagagtcttggagtgatctatggtgatcttagtacatcgccactctatgtttataagaccactttctctgggaaactaagtcttcatgaagacgatgaagagatctttggagtgttctctttcatcttctggacatttacactcattgctctttttaaatacgttttcattgttctctcagcagatgacaatggagaaggtggaacatttgcgttgtactcgcttctttgtagatatgccaagctaagcattttaccaaatcatcaagaaatggatgagaaactatcaacatatgcaacgggaagcccaggagagactcggcaaagcgcagcggttaaatcattctttgagaagcatccgaaatctcaaaagtgtttgttgctctttgttcttttagggacatgtatggctattggtgatagtgtcctcactccaacaatctcagttctttcagctgtttctggagtcaaactcaagattcccaaccttcacgagaattatgttgtcatcatcgcatgtatcatcttggtggcgatattctcagtccagcgttatggtacgcatagagtcgccttcattttcgctccaatctccactgcttggcttctctccatcagtagcattggagtttacaacactataaaatggaacccgcgtatagtctctgcgctttcgcctgtttacatgtataagttccttagaagcaccggtgttgaagggtgggtttcacttggaggtgttgttctttcaatcacaggtgttgagactatgtttgctgacttaggtcacttctcttctctgtccataaaggtggctttctcgttctttgtatacccgtgtttgatacttgcatacatgggtgaggctgcgtttctctctaaacaccatgaagatattcagcaaagcttctacaaggcgatacccgagcctgtgttctggccagtgttcattgtggctacatttgcagctgtggtgggaagccaagctgtcatatccgcaacgttttcgatcataagtcaatgttgtgcacttgattgctttcctcgggtcaagatcattcacacttcaagcaaaatacatggacaaatctatatccctgaagttaactggatgctgatgtgtctttgcctggcggtcactatcgggttaagagacactaatatgatgggtcatgcatatggacttgctgtgacctctgtgatgcttgtgactacatgtttgatgactttagtgatgacaattgtctggaagcaaagaatcattacagttctcgcattcgttgtctttttcggttccatcgagcttctctatttctcgtcatgcgtctacaaagtacctgaaggaggttggattccgattctcctctctttgacattcatggcggtaatgtacatatggaactacggaactacaaagaaacatgaattcgacgttgagaacaaggtctcgatggaccggatagtttctctaggaccaagcataggaatggttagagttccaggaataggactggtctattcgaatcttgtgacgggagttccagctgttttcggacatttcgtgacgaatctgcctgcgtttcacaagattctagtgtttgtatgtgtgaagtcagttcaggttccttatgttggagaagaagagaggtttgtgataagcagagtaggcccaaaagagtatggaatgtttagaagtgtggttaggtatggatacagagatgttcctagagaaatgtatgacttcgaaagccggttagtatctgcaatagtcgaattcgttgaaaccgaaccgggacttgaagaagaagaaatgtcgagtgttcggagaaagaaagaggaatgtatggagataatggaagcgaaagaagctggagtagcgtatatactgggacattcatacgcaaaggcgaagcaatcatcgtcggtgttgaagaaactagcagtgaatgttgtatttgcgttcatgagcacgaattgcagaggaacagatgttgtgcttaatgttcctcacacttctctgcttgaagttggaatggtttattacgtctaaacagagtaatacttagctttagcataagatcagtacagtttttagtagtagtacagtatataagagagctctaacttcattttcagttgttttagcagagaagtttaatgtgtaaatatacttacagttaatgaagggaaattaagaaatttaaaaaaaaaaaaaaaaaaaaaaaaaaaaaaaaaaaaaaaaaaaaaagggcggccgctctagaggatccaagcttacgtacgcgtgcaggcgacgtcataactcttctaga

SEQ ID NO: 116685 - DNA, 1116 bp, Arabidopsis thaliana
  unsure (1)..(1116): unsure at all n locations
nnnnnnnnnnnnnnnnnnnnnnnnnnnnnnnnnnnnnnnnnnnnnnnnnnnnnnnnnnnnnnnnnnnnnnnnnnnnnnnnnnnccacgcgtgaaacctccattaccttcgtctttcttcctcagtcgccctacaatggctttgcctttgtctggcacgcgccacctcacgcgcgctctcctctctaatgtcactcttatggctcctcctcggattccttcctctgttcactacggtggatctcggttaggttgttcgacccggttcttctcaattcgatgtggagctaaccggtcaggttctacttactcgccgcttaactctggctctaactttagtgatcggcctccgacggagatggctcctttgtttccgggatgcgattatgagcactggcttattgttatggataaacctggcggggaaggcgcgactaagcagcagatgattgattgttacattcaaaccctagcgaaagtcgttggaagtgaggaagaggcgaagaagcgaatctacaatgtttcatgtgagaggtatttagggtttggttgtgagattgatgaagagacatccactaagcttgaaggtttaccaggtgttctgtttgtgcttccagattcctatgtggatcctgaaaacaaagattatggagctgagctgtttgttaatggagagatagtccaacgatcaccagagaggcagaggcgggttgagccacagccgcagagagcccaagatagaccgagatacaatgacagaactcgttactctcgccgcagagaaaacacaagatgaactgtaactgaagatggtatacatacacctaagctaagccagtatgaggatgatgatgatgatgatgataatggtggtgaggatgatgttactgccgccacacgagggctctgtattccagtccgttgcagttaatggaccgggcttactttggatattgttgaaattctaagttttgtttctatgtaacaattttatttaataatgtaaattgaggtttcactgttttaggaaattactttgggtagaagattagttttcttttcaagaacaattcatgtgggaaatggtaaatttattttagtgatctttttaatacaat

SEQ ID NO: 116686 - DNA, 1942 bp, Arabidopsis thaliana
ctctatacgactcatatagggaaggcttggtccccctgcaggtcccggcccggatttcccgggtcgacccacccgtccgcggggcgagaagacaacagaaggggaccacccaaaagtagtaacaactaagaatggaagatatcatcatcggcgtggtggctctcgccgcggttctccttttcttcctctaccaaaaaccgaaaaccaaacggtacaagctacctccagggccatcaccacttccggtgatcggaaacctccttcagcttcagaagcttaacccacaacgcttcttcgctggatgggccaaaaaatacggtccaatcttgtcatacaggataggaagcagaacaatggtggtgatatcttcagctgagctagctaaagagcttctcaagacgcaagatgtcaactttgcggaccggcctccacatcgtggccatgagttcatatcctacggcaggcgtgacatggcattaaaccactacacaccgtattaccgagagataaggaagatggggatgaaccacttgttctcaccaacacgtgtggccacctttaagcatgtacgagaggaagaggctaggaggatgatggataagatcaacaaggccgcggataaatccgaagtagtcgatataagtgagcttatgttgaccttcacgaactcggttgtgtgtagacaagcgttcgggaagaagtacaatgaagatggagaagagatgaagaggttcatcaagattctttatgggactcaaagcgttttggggaagatctttttctctgattttttcccatattgtggctttcttgatgatttatcaggcctcacagcttatatgaaagagtgtttcgaaagacaagacacttatattcaagaggttgtcaatgagacgcttgatcctaagagagtcaagcccgaaaccgagagcatgattgatctcttgatggggatctacaaagaacaacctttcgcttctgagtttactgtagataatgtcaaagccgtcatcttggatattgtagtggcgggaacagatactgcagctgcggcggttgtgtgggggatgacgtatctaatgaagtacccacaagtgttgaagaaagctcaagcagaagtgagagagtatatgaaagagaaaggttcaacgttcgttactgaagacgatgtcaagaaccttccttacttcagagccttagttaaagaaaccctaaggatcgaaccagtgattcctctccttatccctcgtgcttgcattcaagataccaagatcgccggttacgacatccccgcaggaacaacggtcaacgtcaacgcgtgggccgtgtcacgtgacgagaaagaatggggaccgaaccctgatgagttcaggcccgagaggtttcttgagaaggaagttgacttcaaaggcacggactacgagtttataccgttcgggtcaggccggagaatgtgcccgggaatgcgtcttggggccgcgatgcttgaggttccttatgcgaaccttctcctcagcttcaactttaaacttcctaatgggatgaaaccagatgatatcaatatggatgtcatgactggtcttgctatgcacaagtcgcagcatctcaagcttgttccagagaaagtgaacaagtattagctaatatatatcaaataaatctaccttctctgattatatagtatatgttcctccagtgtattctgtttcaatgtttggtttctttcttaaatggcaatcgtctctctatctttctcttcacattttgatatgaaggaagcaaattcacatgatgtcttttgtgatccttatatatttcactgaatggctacaaaaataaaactaatttccaaaaaaataaaaaaaaaaaaaaccaaaaagcggccgctctagaggatccaagcttacgtacgcgtgcatgcgacgtcataatcttctatagt

SEQ ID NO: 116687 - DNA, 867 bp, Arabidopsis thaliana
  unsure (1)..(867): unsure at all n locations
agctggnacgcctgcaggtaccggtccgttattcccgggtggacccacgcgtccgcccacgcgtccgtacggctgcgagaagacaacagaaggggatgacgtatctaatgaagtacccacaagtgttgaagaaagctcaagcagaagtgagagagtatatgaaagagaaaggggcacctcccgttacggaggacgangncaagaaccttccttacttcagagccttagctaaagaaaccctaaggatcgaaccagtgattcctctccttatccctcgtgcttgcattcaagataccaagatcgccggttacgacatccccgcaggaacaacgggcaacgtcaacgcgtgggccgtgtccccgtgccgagaaagaaatggggcccccacccctcatgaggttagggccccagggggttcttgagaaggaaggtgacttcaagggcgcggaccacgagtttatacccgctcggctcggcacggagaatgggccccgggaatgcgtctgggggcccgcgatgcttgagggtccttaggcgaaccttctcctcagcttcagctttaagcttcttaatgggatggaccccgatgatatcaatatggatgtcatgactggtcttgctatgcccaagtcgcagcatctcaagcttgttccagagaaagtgtccnggttttcccccctatatacggaggaactcccccttctctgattatatagtatatgttcctcccagtgtattctgtttcaatgtttggtttctttcttaaatggcaatcgtctctctatctttctccccccagaaagaaaaaaaaaaaaaaaacggatagcgcccgctctagaggatccaagcttacgtacgcgtgctgcg

SEQ ID NO: 116688 - DNA, 1508 bp, Arabidopsis thaliana
  unsure (1)..(1508): unsure at all n locations
ttcatagtctcattacatcatcgtgaagagtttcgatcatcaaccgttcgttttcttactatataaaccttgctcgagacctgcgtgtgaagcgtataaagacgacaaagtaaaccaaaaaaaaaaagagttctcctacaattttcctaaattcttggatttgagatttcactttttccgatttgaaacaatgatgataactcgcggtggagccaaggcggcgaaatcgctgttagtggcggctggaccacgtttgttctcgacggtccgtacggtttcgtctcacgaggctttatcagcaagccatattttgaagcctggtgttacatctgcttggatatggactagagctccgacgattggaggtatgagattcgctagcacgatcactctgggagagaaaactccgatgaaggaggaggacgcgaatcagaagaaaacagagaacgaatccaccggtggagacgccgccggaggtaataacaagggagataaaggaatcgcgagctattggggtgttgaacctaataagattactaaagaagatggttctgaatggaagtggaactgtttcaggccatgggaaacgtataaagctgatataacgatagatctgaagaagcatcatgttccaacgacgtttcttgatagaatagcttattggactgttaaatctcttcgttggcctaccgatttgttcttccagaggagatatggatgtcgagctatgatgcttgaaactgtagcagcagtacctggaatggttggaggaatgttactacactgcaaatcgcttcgacgttttgagcaaagtggaggatggattaaggctcttcttgaggaagcagagaatgagagaatgcatcttatgacattcatggaagtcgcgaaaccgaaatggtacgagagagcgctcgtgatcactgtgcaaggagtcttcttcaacgcttatttccttggttacttaatctctcccaagtttgctcatcgtatggttgggtaccttgaagaagaagcgatccattcttatactgagtttctcaaggaacttgacaaaggtaacattgagaatgttcctgctccggctattgctattgattactggaggcttcctgctgatgcgacacttcgtgatgttgtgatggttgttcgtgctgacgaggctcatcaccgtgatgtaaaccattttgcatctgatattcactaccaaggtcgtgaactaaaggaagctccagctccaattgggtatcattgattcgattaaaagaagagctttttctcaagtttaaaactttgttctaaagaatttaagttctttgacttgtatatacatcatcacctctgcttaagccatacttggattcggctttctttgaatgttgctacgaatgttctgatttcttctttacttttcctgtcaatgggcttttgggcttatcttttgctattgtatggccttgcatttagaatgagagtaatagtttgtagaagctgctnnnnnnnnnnnn

SEQ ID NO: 116689 - DNA, 1745 bp, Arabidopsis thaliana
aaaaatgagtctcttgagaaacttgtgatcactggctcacagaatcttatccccatatgtatcttacctacataatagccacatattactttgcttcactttgaaccattggttggttttgatcaaaaccaaaggatgtgtgtatgtatgtatatattctaacgctcaaaactgatcactagcattcctagatttttccttcttgtgatcacttgcagctatggccacacatgcagctctcgccgtctcaagaatcccggtcacacagcgactgcagtctaagagtgccattcactctttccctgctcaatgctcctccaagaggctagaagtcgctgaattctccggtctgcgtatgagtagtatcggtggggaagcatctttcttcgatgctgtagctgcacaaatcatccctaaggctgtgacaacatcaactcctgttagaggagagacagtggcgaaactgaaagttgcgattaacggttttggaaggattggtaggaactttcttaggtgttggcatggtcgtaaagactctcctctcgaagttgttgtacttaacgacagtggtggtgtcaagaatgcatcccacttgcttaagtatgactccatgcttggaaccttcaaggctgaagtgaaaattgtggacaatgaaactattagtgttgatggtaagctcatcaaagttgtctccaacagagaccctcttaagcttccatgggctgagctcggcattgacattgttatcgagggaacaggagtgtttgttgatgggccaggagcagggaagcatatccaagccggagcctcgaaagttatcatcactgcaccagccaaaggtgctgatatccctacctatgttatgggagtcaatgagcaagactatggtcacgatgtcgctaacattattagcaatgcatcttgcaccaccaactgtttggcaccttttgctaaagtcttggatgaagaatttggaattgtcaaggggacaatgacaaccacacactcctacaccggagaccaaaggcttctagatgcatcacacagggacctaaggcgtgcaagagccgcagcactgaacatagtgcctaccagcacaggagcagccaaggcggtgtcattagtgttgccgcagctgaagggtaaacttaacggcattgcactccgtgtgccaacaccaaacgtctcagtggttgaccttgttataaacgttgagaagaaaggtttgacagcagaggatgtgaacgaggcctttagaaaagccgctaatggaccgatgaaaggcattttagacgtttgcgatgcgcctcttgtctctgttgacttcaggtgctctgatgtctctaccaccattgactcgtccctcactatggttatgggtgatgatatggtcaaggtggttgcttggtatgataacgagtggggttacagccaaagagtggtggatttggctcacctagtggctagcaagtggccgggagcggaagctgttggaagtggagatcctttggaggatttctgcaagacaaacccggctgatgaggaatgcaaagtctatgactgaacaactttgatcatttctttctttatttttcaccaaaacaatactttgtatcatgagttacttattcgaaatcgtactatgcatacttgtttttctcataagattttcttgtctgatgaacaactatatgttaagactgagagaattgtatttgagaaataaccattttatgctacatgtt

SEQ ID NO: 116690 - DNA, 513 bp, Arabidopsis thaliana
ctttaaatcatttagaggttgtgaaatattatggagagtgaaggaaagattgtgttcacagaagagcaagaggctcttgtagtgaagtcttggagtgtcatgaagaaaaactcagctgaattaggtctcaaactcttcatcaagatctttgagattgcaccaacaacgaagaagatgttctctttcttgagagactcaccaattcctgctgagcaaaatccaaagctcaagcctcacgcaatgtctgtttttgtcatgtgttgtgaatcagcagttcaactgatgaaaacagggaaagttacggtgagggagactactttgaagagacttggagccagccattctaaatacggtgtcgttgacgaacactttgaggtggccaagtatgcattgttggagacgataaaggaggcagtgccggagatgtggtcaccggagatgaaggtggcttggggtcaggcttatgatcaccttgttgctgccattaaagctgaaatgaatctttccaactaa

SEQ ID NO: 116691 - DNA, 1024 bp, Arabidopsis thaliana
  unsure (1)..(1024): unsure at all n locations
tatacgactcacttagggaaagctggtacgcctgcaggtaccggtccggaattcccgggtcgacccacgcgtccgcccacgcgtgcgtacgagctgcgagaagatacagaaggatactgctgcgagaagacgacagaagggtacggctgcgagaagacgacagaaggggaaatattcgtgtttttttcaaactgtgagagaaaaagaaagagagaaagagatgggagagattgggtttacagagaagcaagaagctttggtgaaggaatcgtgggagatactgaaacaagacatccccaaatacagccttcacttcttctcacagatactggagatagcaccagcagcaaaaggcttgttctctttcctaagagactcagatgaagtccctcacaacaatcctaaactcaaagctcatgctgttaaagtcttcaagatgacatgtgaaacagctatacagctgagggaggaaggaaaggtggtagtggctgacacaaccctccaatatttaggctcaattcatctcaaaagcggcgttattgaccctcacttcgaggtggtgaaagaagctttgctaaggacattgaaagaggggttgggggagaaatacaatgaagaagtggaaggtgcttggtctcaagcttatgatcacttggctttagccatcaagaccgagatgaaacaagaagagtcataaaaccctattgatcatttgggtatcgcatacatgaatctattccacatacatgatacacatatacgtgtttctgtgtgtgtactatgttgctctctgactttctacagttcactattttaattataaagaaggatcttgtgctatcattagggagatacgtgatactgtagttcttcttgagattgttattcgtgagaaatatcatggtttgaagtatttattttctaaaaaaaaaaaaaaaaaaaaaaaaaaaannnnnnnnnnnnnnnnnnnnnnnnnnnnnnnnnnnnnnnnnnnnnnnnnnnnnnnnnnnnnnnntgtcctaat

SEQ ID NO: 116692 - DNA, 926 bp, Arabidopsis thaliana
gaagactagttcttgttttctccatattcctcaacaacatcaaaatgttgactcccaccatttctaaatccatctctttagtaaccattctattagttctacaagctttctctaacacaacaaaggctcaaaattgcggttgttcgtcagagctatgttgtagtcagtttggcttttgcggtaacacttcagactattgtggtgtaggttgccaacaaggaccttgttttgctcctccccctgcaaatggtgtctctgtggctgagattgtaacgcaagaattcttcaatggaatcatcagtcaagccgcgtctagttgcgccggcaatagattttacagtcggggagcttttcttgaggccttagactcatattctcgtttcggtagagttggatcgaccgacgactctaggcgtgagattgcagcgttctttgctcatgtcacacatgaaacaggacgtaatttctgctacatagaagagatagacggagcctcaaaggattactgcgacgagaatgcaacacaatatccatgcaatcctaacaaaggctactacggccgcggaccgatccaactctcttggaatttcaactacgggccagccgggacagcaattggtttcgacggcctgaatgcaccggaaacagtagccacggatccagtcatatccttcaaaaccgccttgtggtactggaccaatagggttcagcctgttatctctcaaggttttggtgcaacaatccgtgccattaacggtgctttggagtgtgacggggccaacacagccaccgttcaagctagagttcgttactacacggattattgtcgtcaacttggcgttgatcctggaaacaacctcacttgctaacaaaaacatctatttctctgtatacatatataaaagtaaaaatagacaagctttaag

SEQ ID NO: 116693 - DNA, 910 bp, Arabidopsis thaliana
  unsure (1)..(910): unsure at all n locations
gtctcctctacagacaagccattgatgtgcaagaacatgtatggaggtcagtttaagcctccacggcggttaaggagcgacgagcttcccgccattgtcaacgactttagaatcgctgcacgaaacgcgatcgaagctggtaagcaaagtcttttcccctttggatgttagatgatcaagacacttgacatatggaccggtgctggcttcgatggagtggaggttcacggcgcacatggttacctgatcgatcagttcctgaaagccaaagtgaatgacagaagtgaccaatatggtgggtcattagagaaccgctgtagatttgctcttgaagtaatcgaagcagtggtgaacgagatcggttcagatcgtgttggaatcagactctcgccatttgcagattacatggagtcaggagactcgaatccagaagcattagggctctacctggtgcaagctatgaacaagcatggcatggagtcgtctacggtcacatggttgaacctagaatgaaaacccttgaaggaatcttcgaatgcacggaatcgcttacgcccatgcgaaaagccttcaaaggtacgttcatagtagcaggaggatattctagagaagacgggaacaaggcggtggaagagggaagaaccgatcttgtggcttatggacggccgttcttggcgaatccggatctgacgaggagattcgaactcaatgagccgttgaataggtacgatagatcaacgttctacacttcagatcctgtagtgggctatacagactaccctttcctcgagaccacagatacaacaactgcttaaggcggccgnnnnnnnnnnnnnnnnnnnnnnnnnnnnnnnnnnnnnnnnnnnnnnnnnnnnnnnnnnnnnnnnnnnnnnnnnnnnnnnnnnnnnnn

SEQ ID NO: 116694 - DNA, 653 bp, Arabidopsis thaliana
  unsure (1)..(653): unsure at all n locations
caagaacaagaacaagaagaagaagaacaagacaagaagaacaaagtacccaagaaaacacacaagaaggaaacacaaagattgatattgatccaaaagcaatggcgtacgagaaagtcaacgagcttaaccttaaggacacagagctatgtcttggattacccggaagaacagagaagatcaaagaagaacaagaggtttcttgcgttaaaattaacaacaagcgtctatttgaggaaactcgtgatgaagaagaatctacacctcctaccaaaactcaaatcgttggttggccaccagtgagatcttcccgtaagaacaacaacagtgtgagctacgtgaaagtgagtatggacggagctccttaccttcgcaagatcgatctcaagacatacaaaaactaccccgagcttctcaaagcgttagagaatatgttcaaagtcatgattggtgaatattgtgagagagaaggatacaaaggatctggatttgtaccaacatacgaagataaagatggtgactggatgttggttggtgatgttccatgggacatgttctcttcttcttgtaggagactcagaaccatgaagggggcccacgctccggccctaccctccctcttgtcagaananctggaccttttgnctaaaang

SEQ ID NO: 116695 - DNA, 768 bp, Arabidopsis thaliana
  unsure (1)..(768): unsure at all n locations
gaagaatctacacctcctaccaaaactcaaatcgttggttggccaccagtgagatcttcccgtaagaacaacaacagtgtgagctacgtgaaagtgagtatggacggagctccttaccttcgcaagatcgatctcaagacatacaaagactaccccgagcttctcaaagcgttagagaatatgttcaaagtcatgattggtgaatattgtgagagagaaggatacaaaggatctggatttgtaccaacatacgaagataaagatggtgactggatgttggttggtgatgttccatgggacatgttctcttcttcttgtaagagactcagaatcatgaagggatccgacgctcctgctctagactcttccttatgatccagagaagctgagaatcttttgtctaaaaaggagatgatgactatgatcgatgaatgaaaaaccctttttggtttgattcggatcggagtttgactaaagttgaccgtgaaagacgaaacttcggggttttgtccgacgagagatccatctctagtgatgttctttttgtttttgtatttagatttgaagtttgatgtaaagatacatgagattttatgtataatacggacacatacacaatctatagatgtataatgtattaagtagttatgtcctataagatcatcagttttctgttaaaaaaaaaaaaaaaaaaagnnnnnnnnnnnnnnnnnnnnnnnnnnnnnnnnnnnnnnnnnnnnnnnnnnnnnnnnnnnnnnnnnnnaacga

SEQ ID NO: 116696 - DNA, 568 bp, Arabidopsis thaliana
  unsure (1)..(568): unsure at all n locations
caagaacaagaacaagaagaagaagaacaagacaagaagaacaaagtacccaagaaaacacacaagaaggaaacacaaagattgatattgatccaaaagcaatggcgtacgagaaagtcaacgagcttaaccttaaggacacagagctatgtcttggattacccggaagaacagagaagatcaaagaagaacaagaggtttcttgcgttaaaattaacaacaagcgtctatttgaggaaactcgtgatgaagaagaatctacacctcctaccaaaactcaaatcgttggttggccaccagtgagatcttcccgtaaggacaacaaccagtgtgagcttcgtgaaaagtgagtatggacggggctccttacctttcgnaagttcggtctnaacggcattcaaaaactnccccggggtttttaaaagcgtttggggtttttttcaaaggcatggtttggtggatcttttgggggggcgggcttccaagggtctgggtttncccccnatcgggggttaagtggtncctggtttttgttggggtttccctggncantttttttttntttang

SEQ ID NO: 116697 - DNA, 430 bp, Arabidopsis thaliana
gcgtccacaagaacaagaagaagaagaacaagacaagaagaacaaagtacccaagaaaacacacaagaaggaaacacaaagattgatattgatccaaaagcaatggcgtacgagaaagtcaacgagcttaaccttaaggacacagagctatgtcttggattacccggaagaacagagaagatcaaagaagaacaagaggtttcttgcgttaaaagtaacaacaagcgtctatttgaggaaactcgtgatgaagaagaatctacacctcctaccaagtaagtagaagagatctgagtttcaaattggcttctttcaaattattggctcttgaatagttttactaatctttctttcctcaaatttacagaactcaaatcgttggttggccaccagtgagatcttcccgtaagaacaacaacagtgtgagcta

SEQ ID NO: 116698 - DNA, 688 bp, Arabidopsis thaliana
  unsure (1)..(688): unsure at all n locations
ggaagacgaagaagaagagcaatcgaagaaaagagggatttgtgtttgtttgttgttcttcgattgaaaatggtgaaatcgacgagtaaggatgctcaggatctatttcgatctcttcggtctgcttattctgctactccgactaatcttaagatcatcgacttgtatgtcgttttcgctgtcttcaccgctctgattcaggtggtttatatggctttggtgggatcatttccatttaactcgttcctatctggagttctctcttgtatcgggacagcagttcttgctgtttgcctccggattcaagtgaacaaagaaaacaaggaattcaaggatttagcacctgagagagcttttgctgattttgttctctgcaacttagtcctccatttggtgatcatcaacttcctcggatagaggtttcactctcctgtctacaagttgctttcatgctttaatgtactggagtttttaggtgtcacttggaatcaaaactctagtttgagatatttttgttgttgtcgaagtatcaaacttttattagtgtctctctcactcaataacagagtctcctgcagtaatggcctaatgggaaaaaaaaaaaaaaaaaaagggcggccgctctagaggatccaagcttacgtacgcgtgcatgcgacgtcannnnnnnnnnnnnnnnnnnnnnnnn

SEQ ID NO: 116699 - DNA, 1196 bp, Arabidopsis thaliana
  unsure (1)..(1196): unsure at all n locations
accacgcgtcaaacattactcattcacaaaaccatcttaaagcaactacacaagtcttgaaattttctcatattttctatttactatataaacttttaatcaaatcaagattaactatggctgaggagtacaagaacaacgttcccgagcacgagacaccaacggtcgcaacagaggaatcaccagcgacgacaacagaggttacggatcgtggattgtttgatttcttggggaagaaggaagaggaagtgaaacctcaagagacaacgacgctcgagtctgagttcgatcataaggctcagatctctgaaccggagttagctgcggagcacgaggaagtgaaggagaacaagattactctgctagaggagcttcaagaaaagaccgaggaagatgaggagaacaagcctagtgtcatcgaaaagcttcaccgatccaacagctcttcttcctcttcgagcgatgaagaaggtgaggaaaagaaggagaagaagaagaagatcgttgaaggagaggaagataagaaaggactagtggagaagatcaaggagaagctcccaggacaccacgacaagacagcagaggatgatgtaccagtttccactaccatcccggtaccagtgtcggagagtgtggtggagcatgaccatcccgaggaagagaagaaaggattagttgagaagatcaaggagaagcttcctggtcaccacgacgagaaagcagaggattcaccagctgtcacgtccacgccgttggttgtaacggagcatccggtggagcctacgacggagcttccagtggaacatccggaggagaagaaggggattttggaaaagatcaaagagaagcttccaggttatcatgccaagaccactgaagaggaagtgaagaaagaaaaagagtctgatgattaagcaaaatggttaaagaatgaataatgatgtgggagtgggacattcgctgtgttttgtgatcattatctttctcttttaagttgttattgtggctttcgttgattgcatttgatcctttattttgtaatttcattctatcttttatataaagtttgcatatggtttatacttaaaaaaaaaaaaaaaaaaaaaaaaaaagcgaccgctctagaggatccaagcttacgtacgcgtgcatgcgacgtcttagtcttctaannnnnnnnnnnnnnnnnnnnncgc

SEQ ID NO: 116700 - DNA, 742 bp, Arabidopsis thaliana
tcgcagtaccggtccggaattcccgggtcgacccacgcgtccgctctacatttatcaagcaagtgtatgcggttggagcttggaagatcggtgtgacatctctgcctccaacaggatgtcttcccgctgcaagaacccttttcggtttccatgaaaaaggctgtgtttcaagactcaacacagatgctcaaaactttaacaagaagcttaacgctgctgcttcaaagcttcagaagcaatattccgatcttaagattgttgtcttcgacatctactctccactttatgatcttgttcagaacccttccaaatccggattcacggaagcaaccaaaggatgttgtggaacaggaacagtcgagacaacttcactcttgtgcaacccgaaatcgtttgggacatgctccaatgctactcagtatgtgttctgggacagtgtgcatccttctgaagctgccaatgagattcttgccactgccctaattggacagggcttttctctcctcggttgatctcacgtatttttcttatattctcttttcaaatcgctgtttctatcacacattgagtcatacatttgtttttctttgaattatgtatcaaagcatcactgttttactaaaaatgtattgaaacttattacaagtactaaaccaaaaaaaaaaaaaaaaaaaaaaaaaaaaaaaaaaagggcggccgctttaaaggaacccagcttaaggaagggggcaagccacgtcaa

SEQ ID NO: 116701 - DNA, 1105 bp, Arabidopsis thaliana
gggacgaaccggtgtaccacgatttggttcgtcactgtctggcctacccaaaagcggatggattcttggtgaatacatgggaagagatggagcccaaatcattaaaagtcccttcaagaccccgaaaactttttgggccgggtcgctcgtgtaccggttttatcccggtttgggtcccgttatgcagaccgatacaatcatccacgaccgatcacccggtttttgattggttaaacaaacaaccaaacgagtcggttctctacatttccttcgggagtggtggttctctaacggctcaacagttaaccgaattggcgtgggggctcgaggagagccagcaacggtttatatgggtggttcgaccgcccgttgacggctcgtcttgcagtgattatttctcggctaaaggcggtgtaaccaaagacaacacgccagagtatctaccagaaagggttcgtgactcgtactttgcgatagaggtttcatgatcccatcatgggcaccgcaagctgaaatcctagcccatccaggccgttggtgggtttttaacacatttggtggtttggagctccacgttggcaaaccgtccttttgccggcgttcccactgatagccttggccgcttttcgccgagcagaatatgaacgcggcgttgcttagcgatgaactgggaatctctgttagagtggatcctccaaaggaggcgatttctcggtcgaagattgaggcgatggtgaggaaggttatggcctgaggacgaaggtgaagagatgagaaggaaagtgaagaagttgagagacccggcggagatgtcacttagtattcacggtggtggttcggcgcatgagtcgctttgcagagtcacgaaggagtgtcaacggtttttggaatgtgtcggggacttgggacgtggtgcttagtaatggttactgttttctagctctttagtggttgaatttacttgtcgtttcttaatgtgtatttttcattgtaatagaataatcgatgttttgtaataaaaaaaaaaaaaaaaaaagggcggccgctctagaggatccaagcttacgtacgcgtgcatgcgacgtcagagctggtctataacgaa

SEQ ID NO: 116702 - DNA, 862 bp, Arabidopsis thaliana
  unsure (1)..(862): unsure at all n locations
tttagggttcataaaccatccctgtgnttttcccttccatgtntggaagntgttgtaatactctctaagttcattcgtgtggatctatcaaaacntataaatcatattaacgttatgtntgtttacagtgtgcatccttctgaagctgccaatgagattcttgccactgccctaattggacagggcttttctctcctcggttgatctcacgtatttttcttatattctcttttcaaatcgctgtttctatcacacattgagtcatacatttgtttttctttgaattatgtatcaaagcatcactgttttactaaaaatgtattgaaacttattacaagtactaaaccaagagttgagaacaatgaggagtacaagaacaacgttcccgagcacgagacaccaacggtcgcaacagaggaatcaccagcgacgacaacagaggttacggatcgtggattgtttgatttcttggggaagaaggaagaggaatgtgaaacctcaagagacaacgacgctgaagattgaggcgatggtgaggaaggttatggctgaggacgaaggtgaagagatgagaaggaaagtgaagaagttgagagacacggcggagatgtcacttagtattcacggtggtggttcggcgcatgagtcgctttgcagagtcacgaaggagtgtcaacggtttttggaatgtgtcggggacttgggacgtggtgcttagtaatggttactgttttctagctctttagtggttgaatttacttgtcgtttcttaatgtgtatttttcattgtaatagaataatcgatgttttgtaatatattaatgtatttgatatttctcaactaatttccattgtaatattg

SEQ ID NO: 116703 - DNA, 642 bp, Arabidopsis thaliana
  unsure (1)..(642): unsure at all n locations
ccccccctcgaggtcgactgtatcgataagcttgatatcgaattcgcggccgccaacgttcccgagcacgagacaccaacggtcgcaacagaggaatcaccagcgacgacaacagaggttacggatcgtggattgtttgatttcttggggaagaaggaagaggaagtgaaacctcaagagacaacgacgctcgagtctgagttcgatcataaggctcagatctctgaaccggagttagctgcggagcacgaggaagtgaaggagaacaagattactgctagaggagcttcaagaaaagaccgaggaagatgaggagaacaagcctagtgtcatcgaaaagcttcaccgatccaacagctcttcttcctcttcgagcgatgaagaaaggtgaggaaaagaaggagaagaagaagaagatcgttgaagggagaggnaggttaagaaaggnctagtgggngaagatcnngggagaagctcccaggncaccacggccangccagccngaggatgatgtcccagttccacttccatcccnggtccagtnncgnaaattttggtgggcattgccatnccgggganananaaaggttttttnnaantnttggggacttctggtncccgcgggaancanggttccagttt

SEQ ID NO: 116704 - DNA, 351 bp, Arabidopsis thaliana
atataagcagccttgggtcttttccaaggtttttgttttagccatggctaaacctccgtcctttggctgctgcttcttcctcttattcttctccttcttatcttcttcctttgtctcatttgccctaaccgatacagaagctgccttcattgtgcagcgacaacttttaacgttaccagacaacgacgctcgagtctgagttcgatcataaggctcagatctctgaaccggagttagctgcggagcacgaggaagtgaaggagaacaagattactctgctagaggagcttcaagaaaagaccgaggaagatgaggagaacaagcctagtgtcatcgaaaagcttcaccgat

SEQ ID NO: 116705 - DNA, 1238 bp, Arabidopsis thaliana
aaacaatcggagaaagttgatggaggagattgttcgttttgtgaacgcttcaatggcataaatttccggccatcacatttcttctactttctctttctctctcccttgttgttgttctctagaattcgattcatcgttgttaacgtcgtccattcttcttctttgatcccttctttgatctctcacatttccgattccaatttagggtttcctctcttttcacatttctagggtttttcttgttccctttgtaccggagatggtgaattgaaaggaaaaataaaacgcttttgagagcttatatttgaggttgtttcctcaggttttgtagatctgaggttgctatttttgaattagagattcttttttttttttttcaaaattttgtttgttgtgatcatacatagacgtacgtagctccatttctggtggagaaggaagaagaagagaaatgagcgcttcgaggttcataaagtgtgtcaccgttggcgacggagctgttggtaaaacctgtttgctgatttcttacaccagcaacacttttcctacggattatgtaccgactgttttcgataactttagcgcaaatgtggttgttaatggagccactgtgaatcttggcctatgggataccgcagggcaggaggattataacagattaagacctttgagttaccgcggtgctgatgttttcatcttagcattctctcttatcagtaaggctagttatgagaatgtctccaagaagtggatcccagagctgaagcattatgcccctggtgtccctatagttcttgttggaaccaaactagatcttcgggatgacaaacagttcttcattgaccaccctggcgctgtaccaattactactgctcagggagaggaactgaagaaactaattggagctcccgcatacatcgagtgcagttcaaaaacacaagagaacgtgaaaggagtatttgatgcagcgatccgagtggttcttcaacctccaaagcagaagaaaaagaaaagcaaagcacaaaaagcctgctccattttgtaatttctctacgcttctcttacgtatctctctctgtctctctgtctcttccactcttctagtgaaggcttaagaagaaaacacattgggcttaaaaattgttccagagttcgttgtgataagctctcttaatccttaaaaaaacgattatttctgtttattgatgaatagtttccagctttagctgagacctaat

SEQ ID NO: 116706 - DNA, 1136 bp, Arabidopsis thaliana
  unsure (1)..(1136): unsure at all n locations
tctcacatcctccaattcatcgtcctcacgttcccttttgtttattcatcttccttccttcttcacatttctgattttctctatttggggggtttgtttccacattatacatatctagggttttgagatggttaattgaaagataatggtcgaagtttcggaggaattggcttcacattgtgggtgtttctggcttcctcaggtttaaatctgaggttgatctcttttgttttttggtaaattgtgacatattttggctcgaagaagaagaagaagaggcaatgagcgcatcaaggttcataaagtgcgtcaccgttggtgatggagctgttggtaaaacctgtttgctgatttcttataccagcaacacctttcccacggattatgttccgactgttttcgataactttagtgcaaatgtggttgttaatggagccacggtgaatcttggattgtgggatactgcagggcaagaggactataacagattaagacctttgagttaccgtggtgctgatgttttcattcttgccttctctctcattagtaaggctagttatgagaatgtttccaagaagtggattcctgagttgaagcactatgctcctggtgtcccaattgtccttgttggaaccaaactagatcttcgagatgacaaacagtttttcatcgaccatcctggtgctgtccctattaccactgttcagggagaggagctgaagaagctaattggagcgccagcttacatcgagtgcagttcaaaatcacaagagaacgtgaagggcgtgtttgatgcagcgatcagagtggtccttcaacctccaaagcagaagaaaaagaagaacaaagcacaaaaggcctgctccatcttgtaatagcactcatggaagtcaagaagctctttgagatgaggatgacagggtggtttaaaaaagtatcgctttttcatttttgttgttgttttccgttttcatttgtgatctcttagttccgtacaaaacgaattgtgaggttaattcaacttctattttaactgatagaaaaaaaaaaaaagnnnnnnnnnnnnnnnnnnnnnnnnnnnnnnnnnnnnnnnnnnnnnnnnnnnnnnnnnnnnnnnnnnnnnnnnnnnacaatcg

SEQ ID NO: 116707 - DNA, 584 bp, Arabidopsis thaliana
caagggtttgccgtacaaaggtatcggaggagagagtaaagggtaaacaaaagagagactggtttacttcttcttcgtgtgcgagtagctttttcctgcgattctcatcgagttttggttagtgctttgttatcaaggtgaaaatcgatttgaagatggcgagcgaaagtcctgatgttgctgttgtagctccggtggtggagaatggcggcgctgagtcctctaatggtaaagaggaacaattggaatctgagctttcgaagaagcttgagattgcagaagatggtcaagaggagaacgatggagaagaaggaagcaaagctgagacttcaacgaagaagaagaagaagaaaaataaaagcaagaagaagaaggaactccctcaacagactgatccaccttcaattcctgtcgttgagctcttcccatcaggagagtttcctgaaggtgaaatccaagagtatagggatgagtatctgtcgtagcattctattgaccattgtggacagcttttacggaaatctttcatatgttgtagttgactttgtggaagagtccataccacttttatcttctcaactcat

SEQ ID NO: 116708 - DNA, 769 bp, Arabidopsis thaliana
tacgactcactttagggaaagctcgtacgcctgcaggtaccggtccggaattcccgggtcgacccacgcgtccgtgcagaagacgacagaagggtacggctgcgagaagacgacagaagggtacggctgcgagaagacgacagaagggtacggctgcgagaagacgacagaaggggaagaagaagaagaaaaataaaagcaagaagaagaaggaactccctcaacagactgatccaccttcaattcctgtcgttgagctcttcccatcaggagagtttcctgaaggtgaaatccaagagtataaggatgataatctttggagaacaacatctgaagagaagagagagctggagcgttttgaaaagccaatatataactctgttcgccgagctgcagaagttcatcgccaggttcgtaaatatgtcagaagcatagtgaagcctggaatgttgatgactgatatatgtgagaccctagagaatactgttcgtaagttgatatcagagaatggtcttcaagctggtattgcattccctacaggatgctctttgaattgggtcgctgctcattggacaccaaactctggagataagactgtacttcagtacgacgatgttatgaaattggactttggaacacatattgatgggcatattattgactgtgcatttacagttgccttcaaccctatgttcgatcctctcttagcagcctctcgtgaagctacgtataccggtatcaaggaagctgggatcgatgtccgtctctg

SEQ ID NO: 116709 - DNA, 798 bp, Arabidopsis thaliana
cgcctgcaggtaccggtccggaattcccgggttgacccacgcgtccgtactgcgagaagacaacagaaggggatctcactttgttcatctaaaaactcctcctttcatttccaaacaaaaacttctttttattctcacatcttaaagatctctctcatggcgatgtctttctcaggagctgttctcactggtatggcttcttctttccacagcggagccaagcagagcagcttcggcgctgtcagagtcggccagaaaactcagttcgtcgtcgtttctcaacgcaagaagtcgttgatctacgccgctaaaggtgacggcaacatcctcgatgacctcaacgaggccacaaagaaagcttcagatttcgtgacggataaaacaaaagaggcattagcagatggtgagaaagcgaaagactacgttgttgaaaaaaacagtgaaaccgcagatacattgggtaaagaagctgagaaagctgcggcgtatgtggaggagaaaggaaaagaagccgcaaacaaggcggcagagttcgcggagggtaaagcaggagaggctaaggatgccacaaagtagggtcttacctaatcagttaatttcaagcacttaaactcgtagatatattgatccatatcctctctcttcatgtttaatagtacttacaataagatgagtctgttgtaatttctattaatttcacatcacaactgaaataagatatggtatccacagtcaccgtcacattctttaatgttttgcaaaatattcaatagacaaattaaataaaaaaaaaaaaaa

SEQ ID NO: 116710 - DNA, 2809 bp, Arabidopsis thaliana
  unsure (1)..(2809): unsure at all n locations
gggaaagctactacgcctgcaggtaccggtccggaattcccgggtcgacccacgcgtccgcggccgcgtgggatcctcgtaatcctctcctttctccttcagacccctcctagttgctgtttaaacaaacaaaaaaagactgcttctctttcttatttctctcatcatcatcatcaatggttttatgagatttatatcaaaaaacattgaggagctagagagaaagagagagtgtgtgtgtagaaaaagattgaaacatcatcaagattgatggagcaaggaggaggtggtggtggtaatgaagttgtggaggaagcttcacctattagttcaagacctcctgctaacaacttagaagagcttatgagattctcagccgccgcggatgacggtggattaggaggtggaggtggaggaggaggaggaggaagtgcttcttcttcatcgggaaatcgatggccgagagaagaaactttagttcttcttcggatccgatccgatatggattctacttttcgtgatgctactctcaaagctcctctttgggaacatgtttccaggaagctattggagttaggttacaaacgaagttcaaagaaatgcaaagagaaattcgaaaacgttcagaaatattacaaacgtactaaagaaactcgcggtggtcgtcatgatggtaaagcttacaagttcttctctcagcttgaagctctcaacactactcctccttcatcttccctcgacgttactcctctctccgtcgctaatcccattctcatgccttcttcttcttcttctccatttcccgtattctctcaaccgcaaccgcaaacgcaaacgcaaccgcctcaaacgcataatgtctcttttactcctactccaccacctcttccacttccttcaatgggtccgatatttaccggtgttactttctcgtctcatagctcatcgacggcttcaggaatggggtctgatgatgatgacgacgatatggacgttgatcaggctaacattgcgggttctagtagccgaaaacgcaaacgtggaaaccgcggtggaggcggtaaaatgatggaattgtttgaaggtttggtgagacaagtaatgcaaaagcaagcggctatgcaaaggagtttcttggaagctcttgagaagagagagcaagaacgtcttgatcgtgaagaagcttggaaacgtcaagaaatggctcggttagctcgagaacacgaggtcatgtctcaagaacgagccgcctctgcttctcgtgacgccgcaatcatttcattgattcagaaaattactggccataccattcagttacctccttctttgtcatctcaaccgcctccaccgtatcaaccgccacccgcggtcactaaacgtgtggcggaaccaccattatcaacagctcaatctcaatcacaacaaccaataatggcgattccacaacaacaaattcttcctcctcctcctccttctcatcctcacgctcatcaaccagaacagaaacaacaacaacaaccacaacaagagatggtcatgagctcggaacaatcatcattaccatcatcatcaagatggccaaaggcagagattctagcgcttataaacctgagaagtggaatggaaccaaggtaccaagataatgtacctaaaggacttctatgggaagagatctcaacttcaatgaagagaatgggatacaacagaaacgctaagagatgtaaagagaaatgggaaaacataaacaaatactacaagaaagttaaagaaagcaacaagaaacgtcctcaagatgctaagacttgtccttactttcaccgcctcgatcttctttaccgcaacaaagtactcggtagtggcggtggttctagcacttctggtctacctcaagaccaaaaacagagtccggtcactgcgatgaaaccgccacaagaaggacttgttaatgttcaacaaactcatgggtcagcttcaactgaggaagaagagcctatagaggaaagtccacaaggaacagaaaaggtacaaactttgcttttccttgtcaaaatgtgattggattaatgttatttgataattgaaatatgatatgttggaattgaagccagaagaccttgtgatgagagagctgattcaacaacaacagcaactacaacaacaagaatcaatgataggtgagtatgaaaagattgaagagtctcacaattataataacatggaggaagaggaagatcaggaaatggatgaggaagaactagacgaggatgagaagtccgcggctttcgagattgcgtttcaaagccctgcaaacagaggaggcaatggccatacggaaccacctttcttgacaatggttcagtaaaatcagaatcattgtttcaagaaaatgtacttatgtgtgcatagttttctaaacaaaacacccaaaaacacaaaacacaaacacacacacacacacatctgacaccccaaactgaaatatcaaggtctcatcgatcttcgatttttcagtgaatacaattctttttcccattctttcccttttgttcttttctttctcactgtctcttgtttgtttcttcttgttcattgttttcttcttccaacccccacatgaacaaaaaactctagctaaaaggtcttttagattattttggagttgtaatttcatcagcaagtctcacactttttttttttctcttaaaacatttgttgattggttnnnnnnnnnnnnnnnnnnnnnnnnnnnnnnnnnnnnnnnnnnnnnnnnnnnnnnnnnnnnnnnnnnnnnnnnnnnnnnnnnnnnnnn

SEQ ID NO: 116711 - DNA, 2166 bp, Arabidopsis thaliana
aaaagttccccttttaagtcctactcctctttttgttatatagaaagaaaaactatatatatacaaaataaagttatacgaagaaaattgtattatatttataagatctagataaaatggtccatcccacccaattaaatacccctaagataaaatcacaatagacgaaaaaaatttaaaaagaaaagaaaaaggaaattcaaccacaaccttcgtcttctcttgaaactctcctcatctctctcaagaaagattcaagttcgagtcttagctatgtctggaaactcagaaggactgttagagagctcaggcggcggcgtgggaggttccgtcgaggaggaaaaagatatgaagatggaggaaaccggtgaaggagccggcagcggaggaaaccggtggccaagaccagagactttagctctattgagaatacgttcagagatggataaagcttttcgtgactctactctcaaagctcccttatgggaagaaatttccaggaaaatgatggagcttggttacaagagaagttcaaagaaatgcaaggagaagttcgagaacgtgtacaagtaccacaaacgtaccaaagaaggtcgtaccgggaaatccgaaggcaaaacttaccggtttttcgaagagttagaagctttcgagactctcagttcctatcaacctgaacctgagtcgcaacccgcgaaatcttctgcagtgatcacgaacgcgcccgcaacctcttccttgataccatggattagctctagcaatccatcaaccgaaaaaagttcttcaccgttgaaacatcatcatcaggttagtgtacaacccatcaccacaaaccctaccttcctcgccaagcaaccatcttccacgacgccttttcctttttatagcagcaacaatactactactgttagccagccgccaatttcaaatgacttgatgaacaatgtttcatcgctgaatcttttctcgagctcaacttcttcatctactgcatctgacgaggaagaagatcatcatcaggttaagagctcgagaaagaagaggaagtattggaaagggttgtttacgaagttgacaaaagagttaatggagaaacaagagaagatgcaaaaaaggttcttggaaacactggagtatcgtgagaaagagagaatctcaagagaagaagcttggagggtccaagagatagggagaatcaacagagaacacgaaacattaatccatgagaggtccaatgctgcagctaaagacgctgcaatcatatccttcttacacaaaatctcaggaggacaaccacaacacccgcaacaacataatcataaaccatcacaaaggaaacaatatcaaagcgatcattcaataacgtttgagagtaaagagccgagggcggttctattggatacaacaataaagatggggaattacgataacaatcattcggtgtctcctagttcttcaagatggcctaaaaccgaggtcgaggccttgataaggataagaaagaatcttgaagctaactatcaagaaaacggtactaagggaccattatgggaagagatctctgcagggatgagaagattgggatacaatagaagcgcgaaacgctgcaaagagaagtgggaaaacatcaacaagtactttaagaaagtcaaagaaagcaacaagaaacgtccccttgattccaagacttgcccttattttcaccagctcgaagctttgtacaacgagaggaacaaaagtggggcaatgccattgccattgcctctaatggtgactccacagagacagttgcttctctcgcaagaaacccagaccgagtttgagactgatcagagggaaaaagttggtgataaagaagatgaagaagaaggagagagtgaagaagatgaatacgatgaagaagaagagggagaaggagacaatgagacaagtgagttcgagattgtgttgaacaaaacatcttcacctatggacattaacaataatcttttcacctaagtggttttataatcattttattatatacactttcctgtaaaatggggttgaaggaaaaaaaaaaaagcatatacaacaaatgtaagtaaatggcttgattttttagttattagtattccatttcgtgatatatttaataaaataattgattaaaaagaaaaaaaa

SEQ ID NO: 116712 - DNA, 545 bp, Arabidopsis thaliana
  unsure (1)..(545): unsure at all n locations
cagctccnnnnnnnnnnnnnnnnnnnnngttgcgcccccgccaggcaccggcccgaatttccgggttcaacccacccgtccgcggacccctgggccgacccctggggggactgttagagacctcaggcggcggcgtgggaggttccgccgaggaggaaaaagatttgaggatggaggaacccggtgaaggacccgccaccggaggaaaccgggggccaagaccagagactttatctctgtggagaatccgtccagagatggataaaccttttcgggactctcctctcaaagctcccttatgggaagaaatttccaggaaaatgatggaccttggttacaagagaagttcaaagaaatgcaaggagaagttcgagaccgtgtacaagtaccacaaacgtaccaaagaaggtcgtaccgggaaatccgaaggcaaaacttaccggtttttcgaagagttagaacctttcgagactctcagttcctatcaacctgaacctgagtcccaacccgccaaatcttctgcagtgatcacgaacgcccccgca

SEQ ID NO: 116713 - DNA, 570 bp, Arabidopsis thaliana
  unsure (1)..(570): unsure at all n locations
gagagacgaatcaaaaacatttgagataaaaatcagaaaagtaaagagacgaaaatggcggatcaacaagcaggaacaatcgtcggaggagttcgcgatattgatgcaaatgctaatgatcttcaagtcgagagtctcgctcgtttcgctgtcgatgagcataacaagaacgagaacttgactctggagtacaagaggctccttggtgcgaaaacacaggttgtggcaggaacaatgcaccatctaactgtggaggtggctgatggtgagaccaataaggtctatgaggccaaggttttggagaaagcttgggagaatctcaagcagttggagagtttcaaccaccttcacgatgtttaatccgatgccctgagcttttcttcttccggctttnaggttagggtcccttgtgtccttttaagaccacggnggttaagagttcttggtttaanccaagttaaacttcctttaaanaagggnaatnccngncccaaggtntttaaccnggganttgggggnanccttttanccnnggtttnggaattnccttttangaaacnnccccttttt

SEQ ID NO: 116714 - DNA, 528 bp, Arabidopsis thaliana
  unsure (1)..(528): unsure at all n locations
aaaacatttgagataaaaatcagaaaagtaaagagacgaaaatggcggatcaacaagcaggaacaatcgtcggaggagttcgcgatattgatgcaaatgctaatgatcttcaagtcgagagtctcgctcgtttcgctgtcgatgagcataacaagaacgagaacttgactctggagtacaagaggctccttggtgcgaaaacacaggttgtggcaggaacaatgcaccatctaactgtggaggtggctgatggtgagaccaataaggtctatgaggccaaggttttggagaaagcttgggagaatctcaagcagttggagagtttcaaccaccttcacgatgtttaatcccgatgccctgagctttctctgcggcttgagtgaggtccttgtgtgctctcagaccacgtgataagagttctgggttaaccaagtaacttctttantaagngaatccngtcccatgtgtttanctggattnngngancnttaaccccgtttngnattncnnttgaaccntcccttttgc

SEQ ID NO: 116715 - DNA, 621 bp, Arabidopsis thaliana
  unsure (1)..(621): unsure at all n locations
aaccatttgtcatacaaaatcaaacaatttattattctaaagatggatttcacacactcaggagcgatcttttgaggagttgcagtattgatccaaatgctaatgatcttcaagtcgagagtctcgctcgtttcgctgtcgatgagcataacaaagaacgagaacttgactctggagtacaacaggctccttggtgcgaaaacacaggttgtggcaggaacaatgcaccatctaactgtggaggtggctgatggtgagacccataaggtctatgaggccagcgttttggagaaagcttgggagaatctcaagcagttgcagagtttcaaccaccttctcgatgtttggatcccgttgccctgcgctttctctgcggcttgggtgtggtccttgtgtgctctcagaccgcgtgacaaccgttcaaaaaaacaaaagtttcnttctttaataagtgaaatccagtcccacgtgtttgaactggtattgtgagaatctcttgactctcgtttgtgtattgctattagcaaactctcactttttctcttcttgctttgcttttctcgtcttctnncagattaaacccncgtgagcagccgctctagaggtcccagcttcgcacgc

SEQ ID NO: 116716 - DNA, 1336 bp, Arabidopsis thaliana
  unsure (1)..(1336): unsure at all n locations
gtcgacccacgcgtccgctcaccatcaaacaactacaacatctgcggttagtatgttgaaagtagagagtaactgggcacaagcctgtgatacatgccgatcagccgcctgcaccgtgtactgccgggctgattctgcctacttgtgctccagttgtgatgctcaagttcatgctgccaatcgtcttgcttcccgccatgaacgtgttcgagtctgtcaatcatgtgagcgagccccggctgcctttttctgcaaggcagatgctgcatctctatgcacaacctgtgattcagagattcattccgcaaacccacttgctagacgccatcaacgagttccaattctgcccatttctgagtactcttacagttccacggccactaaccattcatgtgagacaacagtgacagatccagagaacagacttgtgcttggtcaagaagaagaggatgaagatgaagcagaggcggcttcatggttgttgcctaattcagggaaaaacagtggtaacaacaatggcttctcgattggggatgagtttctgaaccttgttgattatagttcgagtgataagcaattcacagatcaatccaatcagtatcaactagactgcaacgtacctcagaggagctatggggaagatggagttgttccacttcaaattgaagtatcaaagggcatgtaccaagagcaacagaactttcagctgagtatcaactgtggctcctggggagctcttcgaagctccaatggttccctcagtcatatggtgaatgtttcatctatggacctgggagttgtgccggagtcaacaacgagtgacgcaacagtatcaaacccaagatcgcccaaagcggtaacagaccaaccaccttaccctccagctcagatgctcagtccaagggacagagaagctagagtcctgagatacagagagaagaagaagatgaggaaatttgagaagacgataagatatgcttcaaggaaagcgtatgcagagaaaagaccacggatcaagggccggtttgcaaagaagaaagatgtcgatgaagaggcaaaccaagctttctccacaatgataacatttgacaccggatatggaattgttccatcattctgatgctgctatggcaaaactagactgcatgcttgtaaattacttctggtttgaaattcctgcaagttattaccacggttttatgcatatagggtctgtagtttactagttttgcctaactagtacgagttaattagatatacactcatacttagctgctgtaagttaatacaaattttgcccacttggtagnnnnnnnnnnnnnnnnnnnnnnnnnnn

SEQ ID NO: 116717 - DNA, 1731 bp, Arabidopsis thaliana
  unsure (1)..(1731): unsure at all n locations
cnnnnnnnnnnnnnnnnnnnnnnnnnnnnnnnnnnnnnnnnnnnnnnnnnnnnnnnnnnnnnnnnnccacgcgtccggtggagagagagcatgtgaataaaaagcgtgaagctttttgatatctctttctcttcctcttcctttctcctccgatagatttcgccggcgatggcggtggactccttagaaacggagattgacacggcggtgcgtgttgtccacctcgcttcttctctctgtgttaaagttcaagagaagcttcatcttcctaacggtggtcacgttaagtctaaagacgatgattcccctgtcaccgtcgctgattttggtgtacaagcaattgtgagctgggttttagctgaagtgtttggtgatcaaaacctttcaattgttgctgaagaagacactgagacactctctgaggctgattctttaggtcttttaggagctgtgtcgaatgcggttaatgaagcattgtccgaagctcagaactacgggcttccgaagccagttaagccattggggtctagtgaaattcttaaggctattagtagatgtaactctgttggaggtcctaaaggaaggcattgggtgcttgatcctgttgatggaacgttagggtttgttcgtggggatcagtatgctgttgctttagctttgatagagaatggtaaagttcttttgggtgttctaggatgtcctaattatccggttaagaaagaatgtttaagtaatggttgtaaccaagctatgaagacgaaagctgttgcggggtcagtatcgaaaggatgtgttatgtatgcaaagagaggtagtggtcaagcgtggatgcaaccgttgatcgttggaggaataccagaatctgcaacacttcttaaggtttcttcagttgatgatccggttttagctacagtttgtgagccagtagagagagcaaactcaaaccacttgttcactgcaggacttgccaatagcatgggagttagaaagcagcctatgcgagtgtatagcatggtgaaatatgcagcgattgcacgtggagacgctgaagtgtttatgaagtttgcacagtcaagttacaaagagaagatatgggatcacgcagctggagttgttattgtggaagaagctggtggtgtggtgactgatgcgggagggagaaacttagacttctcgaaaggtgtttacttggaaggtcttgaccgtggaatcatcgcatgttctggtcaagttttacatgagaagattataggtgctgtttatgctagttgggaatcttccagtctctgaaaaagcttatccacaatccgtagtttggtgcagcatcatcgagccaaagcaaaggaggaacaagggccattacggtttaggatgagcaagggccagtttcaatgaatgtgaatggcggagaagtaaatatagtcgaggaagcagcggtaaaagtaagaatctagtttatttacctatctaagagtaataaagctgctgcatttcacgaacccttatgttctatgatctttaatggatgatatcatttttaatcaaaaaaaaaaaaaaaaacaccttcaaaacgcggattatacatgtcgttttcctgacaaaagacaaaaattagtaaattactgaaaaaaaaaaaaaaaaaaaaaaaaaaaaaaagggcgaccgctctagaggatccaagcttacgtacgcgtgcaggcgacgtcataactcttctatagttgcacctaa

SEQ ID NO: 116718 - DNA, 1771 bp, Arabidopsis thaliana
  unsure (1)..(1771): unsure at all n locations
accacgcgtccgaaaaaacgaagggaattcacaaatcttagagaaaacaaaaatccaatttttgctgtgaagatggcaatgtctgtaaatgtttcttcttcttcgtcttctgggatcataaactctcgtttcggtgtttcattggagccaaaagtttcgcaaattggttcgttgaggttattggatcgtgttcatgttgctcctgtgtctctgaatctatctgggaagcgatcatcatctgttaaacctttaaacgctgaaccaaagacaaaggattcaatgattcctcttgcggcaacaatggtagcagaaattgcagaggaagttgaagtggttgagattgaggattttgaagagcttgctaagaagttagagaatgcttcacctcttgagattatggacaaagctcttgagaaatacgggaacgatatcgccattgcatttagtggtgcagaagatgttgctcttattgagtacgctcatttgactgggaggccatttagagtatttagtttggatacagggaggttgaatcctgagacgtatcggtttttcgatgcggtggagaagcactatgggattaggattgagtatatgtttcctgattctgttgaggttcaaggtttggttaggagcaagggattgttctctttttatgaggatggtcatcaggagtgttgccgtgttcgaaaggtgagacctttgaggcgtgctctcaagggtttaaaggcttggattactggtcagaggaaagatcaatctccggggacaaggtctgagattccggttgttcaggttgatccggtgtttgaaggtttggatggtggagttggtagtttggtgaagtggaatccggttgcgaatgttgaagggaatgatgtttggaacttcttgaggactatggatgttccggttaacacattgcatgcggcagggtatatatcgattggatgtgagccttgcacgaaagcggttttaccgggtcagcacgagagagaagggagatggtggtgggaagatgctaaagccaaggaatgtggacttcacaaagggaatgtcaaagaaaactccgatgatgctaaagtgaacggggaatcgaaatccgctgttgcagatatctttaagagtgagaatcttgtgactttgagcaggcaggggattgagaatttgatgaagttggagaaccgtaaagagccttggatcgtcgtgctttatgctccgtggtgccccttttgtcaagccatggaagcatcgtatgatgaactggcggataaattggctggaagtgggattaaggttgccaaattcagagcagatggtgaccagaaggagtttgctaagcaggaattgcagctcggtagcttccctaccattctggttttccctaagaactcatcgagaccgatcaagtatccgtctgagaagagagatgttgagtctttgacttcgttcttgaatcttgtccgataagtaaaccacaaaaccagtcgacatttctatgaggaataagaattatatcttcgtctcgttccagattgctagaacagatgaagttggtgtttggagaatcaattcaaagctttggatcacaaagtcagagataagctctgctacaaagcttgagtaattgcagtattgtaagatttataaagttgcgatagtgttgattcttcatgtaaatgtgtggtgtctattaaaatcaagcctctgtttcttctttgcaaannnnnnnnnnnnnnnnnnnnnnnnnnnnnnnnnnnnnnnnnnnnnn

SEQ ID NO: 116719 - DNA, 656 bp, Arabidopsis thaliana
  unsure (1)..(656): unsure at all n locations
cnnnnnnnnnnnnnnnnnnnnnnnnnnnngcggggacgcctgcaggtaccggtcccgtatacccggggcgacccccgcgtccgtacggccgcgagaagacgacaggaggggatgtttggaacttcttgaggactatggatgttccggctaacacattgcatgcggcagggtatatatcgattggatgtgagccttgcacgaatgcgcctttaccggggcggcacgagagagaagggagatggtggtgggaagacgcccaagccaaggaaggtggactccacaaagggaatggcaaagaaaactccgatgatgctaaagtgaagggggaatcgaaatccgccggggcagatatctcgaagagtgagaatcctgggactttgagcaggcaggggattgagaattcgatgaaggtggagaaccgtaaagagccttggatcgggcgtgccttaggcgccggggggccccctttggcaagccatggaaagcatcgtatgatgaacgggcggataaacgggccggaagtgggattaaggctgccaaacccagagcagatggtgaccagaaggagtttgctaagcaggaattgcagctcggtagcttccctaccattctggttttccctaagaacccatcgagaccgatcaagtattcgtctg

SEQ ID NO: 116720 - DNA, 1793 bp, Arabidopsis thaliana
  unsure (1)..(1793): unsure at all n locations
nnnnnnnnnnnnnnnnnnnnnnnnnnnngccggnacgcctgcaggtaccggnccctgcaggaattcctcgagctacgtcacggcaaatccaaaccaaagttctccattttcgtagcttctttaagctttttcagtatcatagagacacttttttttttttgattagaaatggctttagctgttacttcttcttcaactgcaatctctggatcgagtttctctcgttctggagcttcttctgaatctaaagctcttcaaatatgttcgattaggttatctgatcgaacccatttgtctcagagacgttactctatgaaacctttaaacgctgagtcacattcacgaagcgaatcttgggttactcgtgcttcaactctaattgctcctgaagttgaagagaaaggaggagaagttgaagactttgagcaacttgctaaaaagcttgaagatgcttctccacttgaaatcatggataaagctcttgagagattcggagaccaaatcgcaattgcttttagtggagctgaagatgttgcattgattgaatatgcacgtttaactggaaagccatttagggtttttagtttagatacagggagattaaaccctgaaacgtacaggctctttgacgcagtcgagaagcagtacgggattcgaattgagtacatgtttcctgatgcagttgaggttcaagctttagtgaggaacaagggtttgttctcattctatgaagatggtcatcaagagtgttgccgtgtgaggaaagttagacctttgcgtcgtgctcttaagggtcttaaagcttggattacaggacagaggaaagaccaatctccgggtacgagatctgagatccctattgttcaggttgatccagtgtttgaagggttagatggcggtgttggaagtcttgtgaagtggaatcctttggctaatgttgaaggagctgatgtgtggaactttctgagaactatggatgttccggtgaatgcattgcacgcacaagggtatgtgtcaatcgggtgtgagccgtgtactaggccggtgcttccaggccaacatgagagagaaggaaggtggtggtgggaagatgctaaagctaaagaatgtggtctacacaaagggaacatcaaggaggaagatggtgctgcagactcaaagcctgctgctgtgcaagagatatttgaaagcaacaatgtggttgcattgagcaaaggaggggttgagaatcttttgaagctagagaaccgtaaagaggcgtggttggtcgtactttacgctccttggtgccctttctgccaggcgatggaagcatcgtacatcgaattggctgagaaacttgcgggaaaaggagttaaagtggcgaaattccgagctgacggtgagcagaaggagtttgctaagcaagagcttcagttagggagcttcccgacgatacttctctttccgaaaagagctccacgggctattaagtacccttcagagcatagagatgttgattcactcatgtcgtttgtgaatcttcttcggtgagttatgagatagaaaataaaaagagggtgatgaagaatgaaagagaattgagatgaaggagtgatttcatcttggttataatattgtggaggtcagagaataaacaagagttattactcttctacatgactttgtatatttgtattgtaggggtttttatagactctttttgttacctctatgtatcttttttggtctacttttgagttctactattgtttataacgtttttctccttgtttatcaaaaaaaaaaaaaaa

SEQ ID NO: 116721 - DNA, 1763 bp, Arabidopsis thaliana
  unsure (1)..(1763): unsure at all n locations
cctcgagctacgtcagggaaaaaacacaacacaaaaataaaaaaaacttaagaacattgtttcgagagatttggtttggagtgaaaatggcactagcaatcaacgtttcttcatcttcttcttctgcgatctcaagctctagcttcccttcttcagatctcaaagtaacaaaaatcggatcattgaggttattgaatcgtaccaatgtctctgcggcttctctgagtttgtccgggaagagatcctccgtgaaagctcttaatgtgcaatcaattacaaaggaatccattgttgcttctgaggttacagagaagctagatgtggtggaagttgaagactttgaggaactagcaaagagattagagaatgcttctcctcttgagatcatggataaagctcttgagaagtttgggaatgacattgctattgcctttagtggagctgaagatgttgctctgattgagtatgctcatttaactggaagaccttatagggtattcagtttggatacagggagattgaatccagaaacatatagactcttcgataccgtggagaaacattacggtattcggattgagtatatgtttcctgatgctgttgaggttcaagctttagttaggaacaagggtttgttctctttctatgaagatggtcaccaggagtgttgccgtattagaaaggtgagacctttgaggcgtgcgttgaagggtttacgtgcttggatcactggtcagaggaaagatcaatcacccgggacaagatcggagattcctgttgttcaggttgatccagtgtttgaaggattagatggtggagttggtagtttggtgaagtggaatccggttgctaatgttgaagggaatgatgtttggaatttcttgaggacgatggatgttcctgtcaacacgcttcacgctgcgggttatgtttcaatcggatgtgagccatgcacgagagcggttttgccgggtcagcatgagagagaagggagatggtggtgggaagatgctaaggctaaagagtgtggccttcacaaagggaatatcaaggagaataccaatggaaacgcaaccgctaatgtcaacgggacagcctcagtcgcggatatcttcaatagcgagaatgttgtgaacttgagcaggcaagggattgagaatttgatgaagttagagaaccggaaagaggcttggatcgttgtgctttatccaccgtggtgcccgttttgtcaggcaatggaagcttcattcgatgaattggcggataagctgggaggaagtggtgtgaaggttgctaagtttagagctgatggtgaccagaaggactttgccaaaaaggagttgcagcttggaagctttccaacaatacttgtgttcccaaagaactcttcaagaccaatcaagtatccatcagagaagagagatgttgattctttgacatctttcttgaatcttgttcggtaaatccgcaataaaatccgccgactctacgatgacgaagagatcaataatagaccatccagtctcgttccagattgctagaacagatgaagaaggtgaagatgagaatctctatttggagctttagccttttgtatagctgtggttaaaaataattacgccaaggttttgccttttgtgagtttatttttaccaattttcagtgtattactccttttttgcctttgtgatggatatgaacaagtttgatatgaaagtgactcattactcattagccccnnnnnnnnnnnnnnnnnnnnnnnn

SEQ ID NO: 116722 - DNA, 1428 bp, Arabidopsis thaliana
cagctctcaacgactcactattgggaaagctggcacgcctgcaggtaccggtccggaattcccgggtcgacccacgcgcacgcgttcagacgatggcggctgcaatggcttctcatgtttcgacggctcgatcaccggctctttccttctcttcttcgtcttcctccttcttccccggtactactcttcggagattctccgccgtttcactcccttctcctgctctccctcgccttcgtgtttcatgtcaagcctcctccgtcacttcgccttcttctccttccgatgtcaaaggaaaatctgacctgaaagactttctggcaatagatgattttgacacagccaccattaaaacgattttagacaaggcttcagaggttaaggccttgctgaaatcaggggagagaaattatctaccttttaaagggaagtctatgtctatgatctttgcaaaaccttccatgaggactcgggtttcgtttgagactggttttttcttgctcggtggccatgcgttatatctaggtcccaatgacattcagatgggtaagcgggaggaaactcctgatgttgctcgtgttctttcacgctataatgacatcattatggctcgtgtatttgctcatcaggacattcttgatttggctaactactcgagtgttccagttgtcaatggtctgactgatcataaccatccttgccaaatcatggccgatgccctcacaatgataaaacacattggtcaatttgaaaggaaaaaggttgtgtatgttggagatgggaacaacatggttcactcttggttagaattggcatccgttattccattccactttgtctgcgcttgcccaaaagggtatgaaccagacaaagaaagagtttcaaaggcaaagcaagctggattaagtaagatagagatcaccaatgatcctaaagaagctgttattggagcagatgttgtgtactcagacgtatgggccagtatgggtcaaaaggatgaagccgaagctcgccggaaagcattccaaggattccaggtggatgaagctctgatgaagttggcgggtcaaaaagcctatttcatgcattgtttgcctgcagagagaggagttgaggtgaccaatggagtcgtagaggctccttattccattgtctttccacaggcggagaatcgcatgcatgctcaatatgctataatgcttcacttgctcggcttttaaacctctttgttatcttagctctcgcatgcggttggttcgtgtaccacattgacttaataatgtactatttattaaccttagtttgagaacccgtatgattaataagatttgtggctgattcagctgggaatatgaatgagctacttttctaaaaaaaaacaaaaaaaagtcaataaaaaaataaaaaaaggaaaaaagggcgaccgct

SEQ ID NO: 116723 - DNA, 779 bp, Arabidopsis thaliana
  unsure (1)..(779): unsure at all n locations
nnnnnnnnnnnnnnnnnnnnnnnnnnnnnnnnnnnnnnnnnnnnnnnnnnnnnnnnnnnnnnnnnnnnccacgcgtccgcggacgcgtgggcgcgtgggcggacgcgtgggcggacgcgtggctctctcagtacacttcttttcatacctcaagagactaaaactagtttgaggagatttagaggagtgtttggttctttggataacaatatcccaaactgaaaatggctaagtcatatggagctatcttcctcttgaccctcattgtcctcttcatgcttcaaaccatggttatggcctcaagtggatctaatgtgaagtggagccagaaacgttatggaccaggaagcctgaaacgtacccaatgcccatcggaatgtgataggaggtgtaaaaagacacagtaccacaaggcttgcattacgttctgcaacaaatgctgcaggaagtgtctctgtgtgcctccgggttactatgggaacaaacaagtttgctcctgctacaacaactggaaaactcaagagggtggaccaaaatgcccttgaaaaaatctcccttcgttccctttttataataaaaattttcaactataactaaatttcctttgatcaatgttttatctactttattcctaatgttgtaatgttatgtcactccttttcggattttgttctaaatcctaaaaaaaatgagagtggccctatgaatgaattttttacctagcttacgggccggnaatttgggggggnggnntttccccaaaanggncaanggttngg

SEQ ID NO: 116724 - DNA, 624 bp, Arabidopsis thaliana
  unsure (1)..(624): unsure at all n locations
gaattcggcgccacgcgtccgttagacctttttatcctaatttcataactagtttgaggagatttagaggagtgggtggttctttggataacaatatcccaaactgaaaatggctaagtcatatggagctatcttcctcttgaccctcattgtcctcttcatgcttcaaaccatggttatggcctcaagtggatctaatgtgaagtggagccagaaacgttatggaccaggaagcctgaaacgtacccaatgcccatcggaatgtgataggaggtgtaaaaagacacagtaccacaaggcttgcattacgttctgcaacaaatgctgcaggaagtgtctctgtgtgcctccgggttactatgggaacaaacaagtttgctcctgctacaacaactgggaaactcaagagggtggaccaaaatgcccttgaaaaaatctcccttcgttccctttttataataaaattttcaacataccaaattncnttgntcaatggttaaccnacttatccaatgtgaatggatgcacncccttcgggttggncaanccaaaaaatggggggccntgatgtcggcggatccgaccnggggcccngnttangggcgaccgggggnccagttttnc

SEQ ID NO: 116725 - DNA, 712 bp, Arabidopsis thaliana
  unsure (1)..(712): unsure at all n locations
gcccnttagactggggcccccgggttcaggattccggccccctttcaatcccccaggggctaaacctcgtttggggggtttgggggggtgttgggttctttggataccaatnccccaaccctggaaatggctaggccatatggggctatctccctcttgcccctcattgccctcttcatgcttccaaacccatggttatggcctccaagtggatctaatgtgaagtggagccagaaacggttatggaccaggaagcctgaaacgtacccaatgcccatcggaatgtgataggaggtgtaaaaagacacagtaccacaaggcttgcattacgttctgcaacaaatgctgcaggaagtgtctctgtgtgcctccgggttactatgggaacaaacaagtttgctcctgctacaacaactggaaaactcaagagggtggaccaaaatgcccttgaaaaaatctcccttcgttccctttttataataaaaattttcaactataactaaatttcctttgatcaatgttttatctactttattcctaatgttgtaatgttatgtcactccttttcggattttgttctaaatcctaaaaaaaatgagagtggccctatgaatgatatttttcatgaaaaaaaaaaaaaaaaaagggcggccgctctagaggatccaagcttacgtacgcgtgcatgcggcgtcatagttatactatagtg

SEQ ID NO: 116726 - DNA, 663 bp, Arabidopsis thaliana
  unsure (1)..(663): unsure at all n locations
cganatntgcttgtttnaacgtnnttnnccggggggactcnggttgctggnaaatttacnnnccggnggatcccgnccncggggttttggttctttgggaaccattccccaaactggaaatggctaagncattggggncttnttccctcttggccctcattgnccctctttaatgcttcaaacccatggtnatggccntcaagtgggatctaatgtgaaattggaccccaggaaccgttatggncccagggaancctgaaacgtaccccaatgcccatcggaatgtgataggaggtgtaaaaagacacagtaccacaaggcttgcattacgttctgcaacaaatgctgcaggaagtgtctctgtgtgcctccgggttactatgggaacaaacaagtttgctcctgctacaacaactggaaaactcaagagggtggaccaaaatgcccttgaaaaaatctcccttcgttccctttttataataaaaattttcaactataactaaatttcctttgatcaatgttttatctactttattcctaatgttgtaatgttatgtcactccttttccgggattttgttctaaatcataaaaaaaatgagagtggccgcggccgcgaattcgatatcaagcttatcgatacagtcgacccgagggggggccc

SEQ ID NO: 116727 - DNA, 1212 bp, Arabidopsis thaliana
  unsure (1)..(1212): unsure at all n locations
annnnnnnnnnnnnnnnnnnnnnnnnnnnnnnnnnnnnnnnnnnnnnnnnnnnnnnnnnnnnnnnnnnnnnnnnnnnnnnnttggccgcgcaaacttgaaagttgaaacaaggatattgttgaatcaataagagagaacagatgatattactacacaataccagaaataaaagagaaaaactcagcaaagaagtcaaaatagtccaacttgtataaaataccaaaaatcctgcaaacttcttgactagtagttgaaacttgtcccacgcttttcttttgaacaacgcttttaggatggagggcagacacttgtgctggtcacaaagatggcagttgggctgcctggagatggaggattctgcgtcagcagcgaagcatgtggaccagctattgaaacatcatcagggtcacttgcagaatatattttaacctcttcaagaccaagttgccgcctgatcaagtccttgttactctgaaggacttcgatctctccaaaaggtaacctcaagttcagagcctgagtgccaatagatattgcctcgtccttcttgaatttaaggaaaggcatgcaaaccttttgaatggctttcaagttttttccctcctgcaacaatgttgcacttagttctgcaagcatctctgtatccggtgggaaactacaggtttgctggtcaaatctactgcggccgcgaattcgcggacgcgaggaagtgttgggtcttttggataacaataatccaaactgaaaatggctaagtcatatggagctatcttcctcttgaccctcattgtcctcttcatgcttcaaaccatggttatggcctcaagtggatctaatgtgaagtggagccagaaacgttatggaccaggaagcctgaaacgtacccaatgcccatcggaatgtgataggaggtgtaaaaagacacagtaccacaaggcttgcattacgttctgcaacaaatgctgcaggaagtgtctctgtgtgcctccgggttactatgggaacaaacaagtttgctcctgctacaacaactggaaaactcaagagggtggnccaaaatgcccttgnaaaaatctccctttcgttcccttttttntaattaaaaaatttttcaacttttacctaaaatttccnttgggtcaantggttttatctaccttttattcccaaatggtngnaaatgggtntgggcanccccntttnggggtttt

SEQ ID NO: 116728 - DNA, 1317 bp, Arabidopsis thaliana
  unsure (1)..(1317): unsure at all n locations
nnnnnnnnnnnnnnnnnnnnnnnnnnnnnnnnnnnnnnnnnnnnnnnnnnnnnnnnnnnnnnnnnnnnnnnnnnnnnnnnnnnccacgcgtccgcccacgcgtccgtacggctgcgagaagacgacagaaggggaacatcaaaaactaacacagaaagaaaaaaaacagttcctgttctattagattgttttctaaattgtctgaaaatcatggaagtaacttcccaatctaccctccctccagggttcagatttcatcctaccgacgaagaactcatcgtttactatcttcgaaaccagaccatgtctaaaccatgccctgtctccatcatcccagaagttgatatctacaaattcgacccatggcaattacccgagaaaacagagtttggagaaaatgagtggtatttcttcagccctagagaaagaaaatatccaaacggagtcagaccaaaccgggcagctgtttccggttattggaaagcaaccggtacagacaaagccattcacagcggttcaagtaacgtaggtgtcaagaaagccctagtcttctacaaaggtagacctcctaaaggaatcaaaactgactggatcatgcatgagtatcgtctccatgattcacgtaaagcatcaacgaaacgtaacggttccatgaggttagatgaatgggtactgtgtaggatatacaagaagagaggagcaagtaagcttctgaatgagcaagagggtttcatggacgaagtactaatggaggatgagacaaaagttgtagttaacgaagcagagagaagaactgaagaagagataatgatgatgacgtcgatgaaacttccaaggacgtgttcgctggctcatttgttggaaatggattacatgggacccgtctctcacattgataattttagtcagttcgatcatcttcatcaacctgattcggagtctagttggttcggggaccttcagtttaaccaagacgagatcttaaaccatcatcgtcaagcgatgtttaagttttagtgatggggtcagtaaaaaagaagaagaaacaagaaaagatgtgcttgaaaagttactttggtagatatttggttagtttggggacatgaatgaaaattgtaaaatattataactaaaacccaatgggattttatatttctcccatatgaatgtgaaatgaaaaacaatgtttaattaaaaattaagttgtttcagccaaaaaaaaaaaaaaaaagggcggccgctctagaggatccaagcttacgtacgcgtgcatgcgacgtcatagnnnnnnnnnnnnnnnnnnnnnnnnnnnnnnnn

SEQ ID NO: 116729 - DNA, 1668 bp, Arabidopsis thaliana
caagattttctctcaggtgactgaacaacagagaaaaacatggcgaaaaaaggaaaagaagtgttgaacgctttggacgcagccaaaacgcagatgtaccatttcacagcgattgtaatcgcgggtatgggttttttcactgatgcttacgatctatttagcatctccctcgtcacgaagctcctaggccgcatatactaccacgttgatagctccaagaagcctggaacgctccctcctaatgttgctgccgctgttaatggtgtggccttctgcggtaccttagcaggccagctcttcttcggttggctcggtgacaagctcggccgcaagaaagtttacggtattaccttgatgctcatggtactatgttctctcgggtctggtctatcatttggtcactcagctaacggagtaatggccacactttgtttcttccggttctggctcggtttcggcataggcggcgactaccctctctcagccaccatcatgtcggaatacgccaacaagaaaacacgtggcgccttcatagcagccgtcttcgctatgcaaggcttcggaatcttagccggaggaatcgtgtctctcatcgtctcgagtacatttgaccatgccttcaaagcgcccacctacgaggttgatcctgttggctccactgttcctcaagcggattacgtgtggcggattgtgctcatgtttggagctatcccagctttacttacttattattggcggatgaaaatgccggaaactgctcggtataccgctcttgtagctcggaataccaaacaagccgcctccgatatgtctaaggtgcttcaagtggatctaattgcagaagaagaagcacaatcaaattcaaattcatcaaaccctaatttcaccttcggtttattcaccagagaattcgctcgccgtcacggtctccaccttctcggcacaaccaccacatggttcctcctagacatcgcctattacagcagcaacctcttccaaaaagacatctacacagcaatcggatggattcccgccgccgaaacaatgaacgcaatccacgaagtcttcaccgtctcaaaagctcaaaccctaatcgctctctgcggcaccgtccctggttactggttcaccgtcgcattcatcgatatactcggtcgattcttcatccagttgatgggatttatcttcatgacgatctttatgttcgctttagcgattccttatgatcattggagacatagagagaatcgaattggttttttgattatgtattcgttgactatgttcttcgctaattttggacctaatgcgacgacgtttgttgttcctgctgagatatttccggcgaggttgagatcgacttgtcatgggatatcggcggcgagtggtaaggcgggagcgattgttggagcgtttgggtttctttacgcggcgcagagttcggattcggagaagactgatgctggttatcctcctgggattggtgttaggaattcgttgttgatgcttgcttgtgttaatttcttggggattgtttttactctgttggttccggagtctaaagggaagtctttggaagagatttcgagagaagatgaggaacaaagcggcggagatacggtggtggagatgactgtggcaaattccggtagaaaagtcccggtttga

SEQ ID NO: 116730 - DNA, 1251 bp, Arabidopsis thaliana
ccacgcgtccgaccacgcgtccgcttcgttgtgataggtcaggtcagggaacaacaatggcttcttctgcaacagcaccaaattcgctatctttcttctcatcttctctctttttatcctcctctcaccaaatccctaaaacctacatttccgtttcaaaactcggctccggcagagtctcgaagccgctttctgtctcttcccagctagcgactctaccgattctatcattcgaaggagagaaggtcggagagacgtatctagacctcaaagcggcgccggaggataccgcgcgtgccgttgtgcaccgagccatcgtgacggacctgaataacaagcggcgaggtactgcttccacactgactcgcggtgaagttcgtggtggtggaattaaaccttactcacagaagaaaactggccacgcgaggcgtggatctcagagaacaccgttacgtcccggtggaggtgtggtgtttgggccaagacctaaggattggtcaattaaaatcaataggaaggagaagaagctagcgatatctacggcgttatcgagtgcggcatctgcggaaggtggtgcgatagtggtggaggaatttggggagaagtttgagaagcccaagactaaagatttgttagctgcgatgcaaaggtggggattggatcccaaggagaaagctatgttcttgatgattgatgtggatgagaatgtggcgaaatcgagtaggaacattggaaccttgaggatgttgacgcctaggacactgaatctgtttgatattttgaacgctgataagcttgttctgactcctgcggctgtggagttcttgaatgcgaggtacggtgttgatgcggtggaggaagaagatgacgatgaagatgagacggaagggtcagaggaagcttaagaatgagtagcacccgtagttccaattgcttcaagtgtggcttaattatgagtttaatcttgagtacatcttctcactctccttgatgaggtcttctctttcctttttgtgtcacaacaagagaaatgtgtatttacttttagagtttttcttaagagatcatcctcaatttcttgtcatactgattttgtgtccaactctcaatgaaggagtaaggagtgaaattagatatcatgagtaacgttgattgtgtgtgtatcagttaagattgagccgaattcaagcagcccgggggatccactagttctagagcggccgccaccgcggtggagctccagcaaatgtt

SEQ ID NO: 116731 - DNA, 2186 bp, Arabidopsis thaliana
cccacgcgtccgcggacgcgtgggaaaaaaaagagtcatggcattttcatcttcgtgttcgtccgtcaaagccgtcaactcacggtggacgtctccgtctccgtcaccgtcttctagattcgccgtcctccctgctttccttcaccgccgttacgcaacaagcgtcaaactaacggccataagcgccgccttaaaaaccgtcgagcaaacgacgttaacagaggataacagattctcaaccgtcggatctgactctgatgaatacaatccaactcttccaaagccgaggatcctcgtcaccgagaaactgggagaagccggcgtgaatctcctcagggaattcggcgacgttgactgctcttacgatctttcgccggaagatctgaagaagaaagtggcggagagtgacgctctgatcgtgagaagcggaactaaagtgacgagggaagtgtttgaggcggcgaaggggaggttgaaagtggtcggaagagccggagttgggattgacaatgttgatctgcaggcggcgacggagcacgggtgtttggtggttaatgctccaacggctaatacggtggctgctgccgaacatggaattgctttgcttgcttctatggcacgtaacgttgctcaggccgacgcttctattaaagccggaaaatgggagaggagcaagtacgtcggtgtatctctcgtcggaaaaaccttggccgtgatgggtttcgggaaagttgggacggaggtggcgagaagagccaaaggtctaggcatgaccgttatctcccacgacccttacgcgccagctgacagagccagagctctcggtgtcgatcttgtttcattcgatcaagctatctccaccgccgatttcgtctccctgcacatgcctttaactccggccaccaaaaaggtcttcaacgacgaaactttctctaagatgaagaaaggtgtgcgtctcattaatgtcgctagaggtggcgtcatcgacgaggatgcactcgttagagctctcgatgccggaatcgttgctcaggcagcattagatgtgttctgtgaggaaccaccatcgaaagatagcagactaattcagcatgaaaatgttactgtgacacctcatcttggagctagcacaaaagaagctcaggaaggtgtagccattgagatagcagaggctgtagcaggggcattgaaaggagagttatcagctactgccgtcaatgctccaatggtggctcctgaggtcttgtctgagttgactccttatattgtcttagctgagaagcttgggaggttagctgtgcagttagcatctggaggtaaaggagtacagtccattagggtggtctatcggtcagctcgtgaccgagatgatttggatactagactacttcgtgcaatgatcacaaagggaatcattgaaccgatctcagattcatatgtcaacttggtgaatgctgatttcatagctaaacaaaagggtcttcgtattagtgaggaacgaatggttgttgattcatcaccagagtaccctgttgattccatccaagttcagattttgaatgtggagtcaaatttcgctggtgctgtctctgatgctggtgatataagtattgaagggaaggtgaagtacggagttccgcatttaacttgtgtcggatcatttggtgtggatgtgagccttgaagggaatctgatactgtgcaggcaagtggatcaaccagggatgattggacaggttggtaacatacttggagaacaaaacgtgaatgtgaatttcatgagtgttggaagaacagtgttgaggaaacaagcgataatggcgattggagttgatgaagaaccagacaacaaaacacttgagaggattgggggtgtttctgcgattgaagagtttgtgtttcttaaactataaagtttgagatggagttgcattgtggtgtatggagaataaaactgtgacccggattaaggtgttttatccagtggttgttaagctgtagagaatctgtggtgttgcgagcgagtgtgtgtatcttggtattattacattgttcttgttttgctttcttatggtatgtaatgcctttggttaatgtcatgtttctcttgtaaaatgcttttgcttatattttacgatgaaccgttggactcaaaaaaaaaaaaaagggcgcgccgcgtctatagag

SEQ ID NO: 116732 - DNA, 1086 bp, Arabidopsis thaliana
  unsure (1)..(1086): unsure at all n locations
cctttgtgtcacacaaataaacaccataaactaaacaataaaccatacaaaaaaatatgaaaatcctctcactttcactactcttgctcttggccgctacggtctcccacgtccagtcttcggcatccgttccagggctcatcgaactcctcgaatcgaacaccatctttgggaacgaagccgaactcttagagaaagagggactgtccatcaactaccccaactgcagaagctggcaccttggtgttgagacctctaacatcataaacttcgacacggtgcccgcaaattgcaaagcctatgttgaagactacttgatcacttccaaacagtaccaatacgactccaaaactgtaaacaaagaggcatatttttacgccaaaggacttgccctaaagaacgataccgtcaatgtttggatctttgacctagacgacactctcctctctagtattccctactacgctaaatatggatatgggaccgagaacacagccccgggggcgtactggtcgtggttagagtccggagaatcaactccaggactcccggagaccttgcatctatacgaaaacctcttggaactcgggattgaacccatcataatctctgaccgatggaaaaaattgtcagaagtcactgtcgagaatctcaaggctgttggtgtgacaaaatggaagcatctcatactcaagccaaacggatcgaagttgacgcaagtggtgtacaagtcaaaggtgaggaatagccttgtgaagaaaggatacaacatcgttggcaatattggagaccaatgggctgatttggttgaggatactcctggaagggtttttaagctcccaaatccactctactacgtaccttcttaattaagcatctatcttcatggcattgtccccttgtatccatttcatatctatgtcgtttcgtttatctttgtagccgttttggcaccactgcttaaataaaatgccaatcctatcgtaacttaataagtacaaaaaaccaaaaaaagnnnnnnnnnnnnnnnnnnnnnnnnnnnnnnnnnnnnnnnnnnnnnnnnnnnnnnnnnnnnnnnnnnnnnnn

SEQ ID NO: 116733 - DNA, 1115 bp, Arabidopsis thaliana
  unsure (1)..(1115): unsure at all n locations
atgatactccaggtctctacgactcactattgggaaagctggtccgcctgcaggtaccggtccggaattcccgggtcgacccacgccgtgcgaccataccataaaaaacatgaaaatcctctcactttcacttctcttgctcttggccgctacggtctcggcatccgttccagggctcatcgaactcgtcgattcgaaaaccatctttgggaacgtagccgaactcttagagaaagagaaactttccatcaactacgccaactgcagaagctggcaccttggtgttgagacctctaacatcatagacttcgacacggtgcccgcaaattgcaaagactatgttgaagactacttgatcacttccaaacagtaccaatacgactccaaaaccgtgtgcaaagaggcttatttctatgccaaaggacttgccctaaagaacgacaccgtcaatgtttggatctttgacctagatgataccctcctctctagtattccctactacgcaaaatatggatacggaacagagaagaccgacccgggggcgtactggttgtggttagggaccggagcatcaacccctggactcccggagggcttgtatctttaccaaaacatcatagagctcgggattgaacccatcatactcagtgaccgttggaagttgtggaagaatgtcactctcgacaatctcgaagctgctggcgtgacctactggaagcatctcatattgaagcctaatggttcgaacttgaggcaagtggtgtacaagtcaaaggtgaggaagagtctcgtgaagaaaggatacaacatcgttggcaatatcggagatcaatgggctgatttggttgaggatacccctgggagggtttttaagctcccaaatccactctactacgtaccttcttaagaatctatcttcatcgcattgtccccttgtatacacttcatatctatgtcgtttcgtttatctttgtagccgttgtggcaccgctgcataaataaaatgtctatcctatcgtaacttaataagtacaaaaaaaaaaaaaaaaagnnnnnnnnnnnnnnnnnnnnnnnnnnnnnnnnnnnnnnnnnnnnnnnnnnnnnnnnnnnnnnnn

SEQ ID NO: 116734 - DNA, 1109 bp, Arabidopsis thaliana
actatagcatgagctatgacgccgcatgcacgcgtacgtaagcttggatcctctagagcggccgcccttttttttttttccgtttttttttttttaaacaataaacatgcatatataggttattgtttctgtagcacggcatacatcaatagaatgacgattgagaaatttagtttcatcagtacgtaataattagtacttagcaaaaaaaaagaagtggataaatatctttaatttatggaatttcaatggttgtagagcaaatttttccatatcgtcatgcatccttgtctatgtccttgactaattttcacgcgcccggtttagctgctggtttagctgctggtttagcggcaggtgcagcaggggcaggggcagcgggagcggctggggcagctccacctgctgcggcagcacctggaattttaattggaaagtctctacccgtatatttcttgtagagccacattaagatggtgagacccgacacaccagaggtgcctccggccattaaacctgaagcaagaatagtggtggcaatacccgcgggtacaagaacggggctaaaaacgaggaatagcggcatggacgcgaatagtgccacggctgtgccggttagagatataccggccagcaacaagaggcatattgcagcttcagtggcaaaaaaagccgtcataacacccttgagcgtcggcttttgtcttcgtatctcgtcgtcgcgacgacgttttttctttccaaaaatcaaagagagtggaaagggcgccatagcttgtttcgcaagtggtgtacaagtcaaaggttaggaatagccttgtgaagaaagggtacaacatcgttgggaatattggagaccaatgggctgatttggttgaggatactcctggaagggtttttaagctcccaaatccactctactacgtaccttcttaattaagcatctatcttcatggcattgtccccttgtatccatttcatatctatgtcgtgaagatagatgcttaattaagaaggtacggacgcgtgggtcgacccgggaattccggaccggtacctgcaggcggaccagctttcccaatagtgagtcgtagagacctgaagtatca

SEQ ID NO: 116735 - DNA, 1395 bp, Arabidopsis thaliana
cgagctctaatacgactcactatatggaaagctggtgcgcctgcaggtaccgggccggaattcccgggtggggccggcgcgtgcaattctaataagaaacagagaatcatcaaatcaaatccctaaaaattgatttttgaaatggagaagaacgcatcgacttcgtcgttgaaggacttgggtccgagtggtctagatctaaccagcgcctttttcaaaccgatccacaactccgatccttctctcccttcaaaccgacgtaccaaagtctccgtcgtcggagtcggaaacgtcggaatggccatagctcaaaccatcctcactcaagatctcgcagacgagatcgctctcgttgacgccaaacccgataagcttcgtggcgaaatgcttgatctccaacacgccgctgctttcctccctcgaactaagatcaccgcttctgttgattacgaagtcaccgctggatctgatctttgtatcgtcactgctggtgctagacagaatccaggcgagtctagactcaatttgcttcagagaaacgtcgctctcttccgtcatatcattcctccactcgctaaagcttctcctgattctatattgatcgttgtttctaatcctgttgatgttttgacttacgttgcttggaaactctctggctttccggtgaatcgggtgcttggatctggtactaatctcgattcttctcggttccggttcttaatcgcagatcatctcgatgttaatgctcaggatgtacaggcatttattgtgggagagcatggagacagctcagtggcattgtggtcaagcattagtgttggaggcattcctgtcttaagctttttggagaagaaccagatagcttacgagaaacaaactcttgaggacatccaccaagctgttgttggtagtgcctatgaagtgattggactcaagggttacacttcttgggccattggctactcagttgctaatctggctcgtaccatcctccgtgaccagcggaagatccacccggttactgttcttgctcgtggattttatggtgttgatggtggtgatgttttcctcagtctgccggctttgcttggaaggaatggtgtagttgctgtgaccaatgtgcatatgactgatgaagaggctgagaagctgcagaaatcggcaaagactatattggagatgcagagccaattgggactttgaatatccacatctatatatgcatcaatttcaattttataactagtatcccacgggtgatagtgtcgatgttgatcactatatgttatgtaaatgcttgttcatgcagagtaatcccaactttgagttctattttgaaaaaaaaaaaaaaaagggcggacgctctagaggatccaagcttacgtacgcgtgcgt

SEQ ID NO: 116736 - DNA, 534 bp, Arabidopsis thaliana
cccacgcgtccgaaaattaaaagcaccttacttaattacatatcgttcgtgtttttttcttcaaaaaatggcgtcaaagcaactgagcagagaagagcttgatgagaaggcgaagcaaggagagaccgtcgtcccaggtggcaccggtggccacagcctcgaagctcaagagcatcttgctgaaggaaggagcaagggagggcagacgaggaaggagcagctaggacatgaaggttatcaggagatcggtcacaaaggtggagaggcgaggaaggagcagttagggcacgagggttatcaggagatgggtcacaaaggtggagaggcgaggaaggagcagctagggcacgagggttatcaggagatgggacacaaaggaggagaggcgaggaaggagcagctagggcacgagggttataaggagatgggacgtaaaggaggactcagtacgatggaaaaatctggtggagagcgtgcggaggaagaagggattgtgatcgatgagtcaaagttcatcaacaagtgattagtgtt

SEQ ID NO: 116737 - DNA, 2196 bp, Arabidopsis thaliana
  unsure (1)..(2196): unsure at all n locations
cnnnnnnnnnnnnnnnnnnnnnnnnnnnnnnnnnnnnnnnnnnnnnnnnnnnnnnnnnnnnnnnnnnnnnnnccacgcgtccgcggacgcgtgggtagaatcaagaaaagtaaaaccagaaaaagccattttaaataaatagtatcgtgtttgattttaatttcatcaacataattattatataaacacccactcttcacgagtacattcatcatcactcactagtgtcgaacaatggcaccatcaatgaaagaaattttttctaaagataatttcaagaaaaacaagaaacttgttttgctatccgccgccgtagctttgctcttcgtagccgccgtcgccggaatctctgccggagcttcaaaagccaacgaaaaacgaactctatccccgtcgtctcacgccgtgctaagatcctcatgcagctccacgcgttaccctgagctctgtatctctgccgtggtaactgccggcggcgtcgagctaacgtcgcaaaaagatgtcatcgaggcatcggtgaacctaacaataaccgccgtggagcacaattacttcaccgtgaagaagctgatcaagaagaggaaaggactgacgccgcgcgagaagacggcgcttcatgactgtttggagactattgatgagacgctggacgagctccatgaaacggtggaagatctccatttgtatccaaccaaaaaaactctccgggaacacgccggagatctcaaaacactaattagctccgccattaccaaccaggagacttgtctcgacggcttctctcatgacgacgccgataagcaagttcgtaaagccttgttgaaggggcagatacacgtagagcacatgtgcagcaacgctctagcaatgatcaagaacatgactgatactgacatagccaacttcgagcaaaaagctaaaataacctcaaacaaccgtaagctcaaggaggagaatcaggaaactacggtggctgtagatatcgccggagccggagaactagactcggagggatggccaacttggttatccgctggagataggaggcttcttcagggttcaggtgtgaaacgtgacgccaccgtggcagctgacggtagcggtacatttaaaactgtggctgctgcggttgccgcggcccctgaaaatagtaataagaggtatgtgatacatataaaagccggagtttacagagagaatgtggaggttgctaagaagaaaaagaatataatgtttatgggagatggtcggacgagaactattatcaccggaagtcgaaacgttgtagacggtagcaccactttccactccgccaccgttgctgctgtcggcgagagattcttagctcgtgacatcactttccaaaacacggcgggtccgtcgaagcaccaagcggtggctctccgtgtgggttctgatttctccgccttctacaattgcgacatgttagcttatcaagacactctatacgtccactctaaccgtcaattcttcgtcaaatgtctcatcgccggaaccgttgacttcatcttcggaaacgccgccgtcgtgctccaagactgtgacatccacgctcgccgccctaattccggtcagaaaaacatggtcacagctcagggaagaacggatcctaaccagaacacagggatcgttatccagaaatgtaggatcggtgccacgtcggatttacagtcggtgaaaggtagttttccgacgtacttgggtcggccatggaaggaatattcacaaacggtgataatgcagtcggctatctccgacgtgatccgacccgaagggtggtccgagtggaccgggacttttgcgttgaacactctgacttacagagagtattcgaacacaggagcaggggctggaactgcaaatagagtgaagtggaggggctttaaggtaattacggctgctgctgaagctcaaaaatatacggctggtcagtttattggtggtggaggctggttatcgtcgaccggtttccccttctcgctcggtctttgagagattgttgtgtaatgtgttcctacgtattgttggctacaaaaattattgattaatattgtatgaagcaaatcgtgttgtcctctttgttttgtttgggttgtgtactttctctagattatcgtagtattagaaacgagatgaaataatgcgggtttttgcgccttgagaatatggatttga

SEQ ID NO: 116738 - DNA, 1225 bp, Arabidopsis thaliana
  unsure (1)..(1225): unsure at all n locations
gggctttgtactatttgagtgtttttataaaaccatttttccatcttcctcatcaccttcccaagaagaagaacaccaaagaagaagaaaggttaataatgatgggcagtgtcgagctgaatctgagggagactgagctgtgtcttggtcttcccggtggagatacagtggctccggtaaccggaaacaagagagggttctcagagacggttgatctgaagctaaatctgaataatgagcctgcaaacaaggaaggatctacgactcatgacgtcgtgacttttgattccaaggagaagagtgcttgtcctaaagatccagccaaacctccggccaaggcacaagttgtgggatggccaccggtgagatcataccggaagaacgtgatggtttcctgccaaaaatcaagcggtggcccggaggcggcggcgttcgtgaaggtatcaatggacggagcaccgtacttgaggaaaatcgatttgaggatgtataaaagctacgatgagctttctaatgctttgtccaacatgttcagctcttttaccatgggcaaacatggaggagaagaaggaatgatagacttcatgaatgagaggaaattgatggatttggtgaatagctgggactatgttccctcttatgaagacaaagacggtgattggatgctcgtcggcgacgttccttggccaatgttcgtcgatacatgcaagcgtttacgtctcatgaaaggatcggatgccattggtctcgctccgagggcgatggagaagtgcaagagcagagcttgaagtcaaattaaaaggataagtggtatcgattatatatttgattaacacattgattggtgttaattgctcttttttttcttacgatgaaatacattgttcagtttcttttgattgtctgtgttttgatcaaaaaaaaaaaaaaaaaaaaagtttgtatgctattatgtgtaatgaacttaagttaaatatttgagacatttgtaatggaaaatgtgtaatgtgatttacagacgtttcaacccgggtgtctctncctagagatggggcgatgagagacaacagactgttcctctatcgtaagataaagttgtaggagtggtgtagttctgtcaactccgacatgaagtgaaggatgaagcaggatgcaacctcgtatgactgatcatgtgatgtaagaatgttctctccgatgatcagatgtagtccgttcaagatgc

SEQ ID NO: 116739 - DNA, 1607 bp, Arabidopsis thaliana
atggctctaaacaactttttgactttccaactactccttcttctacttcgtgtttcatcggaatctccatggatcgtcgccggagatgtgtctcgaatcccgatcaatttcctcgaattagcaaagagcccggaggttttcgattcaatggtgagaatcagaaggaaaatccacgagaatcctgagctgggatacgaggaattcgaaactagtaagttcattaggtcggagcttgaccttatcggagttaagtataggtttccggtagctatcaccggtattatcggatatatcggtaccggagaaccaccattcgtcgctctaagagcagatatggatgctttgcctattcaggaagctgttgagtgggagcacaagagcaaaaatcctggaaaaatgcatgcttgtggacatgatggtcatgttgctatgcttcttggtgctgctaagatacttcaacaacatcgccaacatttgcagggaactgtggtgcttatctttcagccagctgaggaaggtttgagtggagcaaagatgatgagagaagaaggagcgttgaagaacgttgaagctatttttggtatacatctttccccccggactccctttgggaaagctgcttcacttgcaggttcatttatggctggagctggagctttcgaggctgtaatcactgggaaaggaggtcatgctgccatccctcagcatacaatagatcctgttgttgcagcttcaagcattgtcctcagtcttcaacacttggtttcacgtgaaactgacccttcggattcaaaggtggtcacagttactaaggttaatggaggcaacgcgttcaatgtcatccctgattcaatcaccataggaggaactcttcgagcctttaccgggtttactcagcttcaggagagaatcaaagagattattacaaagcaagcagccgttcaccgatgcaatgcgtccgtgaatctagcacccaatggtaaccaaccgatgccaccaactgtgaacaacatggacttatacaagaaattcaagaaggtggttagggatttgttgggtcaagaagcttttgtggaagcagtgcctgaaatgggatccgaggacttctcatactttgcagaaacaatcccgggccatttctccctcttgggaatgcaagatgagacccaaggttatgcgtcgtctcattcaccacactatagaatcaacgaggatgttcttccttacggagctgctatccatgcaacgatggcagtacagtacctcaaagataaggcttctaaaggttctgtctcaggctttcatgacgaactctaatccctgtcaaccttggtacagtttcctcatcggtcattggttcgaattcagaagtaccaaatttacactccattgttgatagaattccatttaaatgatgaaaagccttaattcgtagaacaatttcaattggcaaattctcaacttttatgatatgtttgtgtaactgtaacatactggcataatcttagaacatgaattataattaataggctagtcttgttgtaatgcattggcaaaaccacaccttttatatttatattgatcagaatcggagattttaagcatca

SEQ ID NO: 116740 - DNA, 872 bp, Arabidopsis thaliana
aaggctctctctgtctctttctcaaaatcatctgctggaagtgaatcgtctaatccgagtttggaggatctgtcttgagggtttggttttttggatcgctcacgcgtccggaatcgcaaaaccaaatttggaggattctttctgaggggtttctcagtgagaaaatggcttcgaaacggatcttgaaggagctgaaggatctccagaaagaccctccaacctcctgcagtgcaggtccagttgctgaagacatgtttcattggcaagctacaattatgggtcctgcagagagtccgtattcaggcggtgtgtttctcgttaccattcacttccctccggactatccattcaaaccaccaaaggttgcatttaggacgaaggtgtttcaccctaatatcaacagcaacggaagcatttgccttgacattttgaaagaacaatggagtcctgcactcaccatatcgaaggttttctttcgatatgttcattgttaacggacccaaacccagatgatccattggttccagagattgctcacatgtacaaaaccgatagagcaaagtatgagtctactgcgagaagctggactcagaaatatgcaatgggatgaaagtttgtgtcctttgatccctcacagactcggttttaatagagagagagagagaaagagagaggacttcttcacatagggatcttccatgaaataagttagattcctatgttttatcatctctttgtttgaaacctctttaatctcaaacaaaaacattacttcacctctttattatccatatgttccctatctttgtttctatgctttttccaaaaaattataagaaaaattattattttatgtaaagcttgaaactttg

SEQ ID NO: 116741 - DNA, 725 bp, Arabidopsis thaliana
ttggtccgcctgcaggcaccggtccggaattccggggtcgacccacgcgtccggtttctcattgataaaatggcttcgaaacggatcttgaaggagctgaaggatctccagaaagaccctccaacctcctgcagtgcaggtccagttgctgaagacatgtttcattggcaagctacaattatgggtcctgcagagagtccgtattcaggcggtgtgtttctcgttaccattcacttccctccggactatccattcagaccaccaaaggttgcatttaggacgaaggtgtttcaccctaatatcaacagcagcggaagcatttgccttgacattttgaaagaacaatggagccctgccctcaccatttccaaggtgttgctctcgatatgttcgctgttaacagatccaaatccagatgaccctttggtaccagagattgcacacatgtacaaaaccgacagagccaaatacgaggctactgcaagaaactggactcagaagtatgccatgggctaaacaaagattcgtatgcttcagcacctgtttatgttttcatgtctgtttctttcttcttcttgttttaactttaataaaaatgtctaaaatatcaactttttcgtctgtactatatatgtttatgggttttattatcatcatctttatctgaaatttgaagatggaaggcggccgttctagaggatccaacttacgtacgcgtgcatgcc

SEQ ID NO: 116742 - DNA, 616 bp, Arabidopsis thaliana
  unsure (1)..(616): unsure at all n locations
accacgttaggtctcaaaggctctctctgtctctttctcaaaaatcatctgcaggaagtgaatcgtcaaaaccgagtttggaggatctgtcttgaggagtttttttttggttgagaaatggcttcgaaaaggatcttgaaagagctcaaggatctccagaaggatcctccaacttcctgcagtgctggcccagttgctgaagacatgtttcattggcaagctacaataatgggtccatctgatagtccttattcaggcggtgtctttctcgtaaccattcacttccctccggattatcctttcaaaccaccaaaggttgcattcaggacaaaagtgttccaccctaatgtcaacagcaatggaagcatttgccttgacattttgaaagaacaatggagtcctgcacttcaccatatcgaaggtttttgctttcggtatggtccatttgttaacgggccccaaacccagttgatccattgggtcccaggggttgctcacatgtccaaaaccgttagggaaaagtttggggttcttgcgggaagttggcctcagaattttgcaatggggtgaaagtttttcccctttccccccaaaggntgggtttnnntgggggggg

SEQ ID NO: 116743 - DNA, 822 bp, Arabidopsis thaliana
cgcttccgtttcttaaagcataaaaaccaaaactttctctttcgttttgctttcttccaatcatctgcaggagtgaatcgcaaaaccaaatttggaggattctttctgaggggtttctcagtgagaaaatggcttcgaaacggatcttgaaggagctgaaggatctccagaaagaccctccaacctcctgcagtgcaggtccagttgctgaagacatgtttcattggcaagctacaattatgggtcctgcagagagtccgtattcaggcggtgtgtttctcgttaccattcacttccctccggactatccattcaaaccaccaaaggttgcatttaggacgaaggtgttccaccctaatgtcaacagcaacggaagcatttgccttggcattttgaaagagcaatggagtcctgcactgaccatatcgaaggttttgctttcgatatgttcattgttcacggacccaaacccagatgatccattggttccagagattgctctcatgttcaaaaccgatagagccaagtattagtttactgcgagaagctggtctcaaaaataagccatgggatgaaagtttgtgtcctttgatccctcaaaggctcgggtttaatagagagcaaagagcaacagagagggcttttttccataaggattttccatggaataagttagaatcctatgtgtttaccatctccttgtttggaacctccttaatttccaacaaaaaccatccttttcctccaaaaaaaaaaaaaaaaaaaaaaaggcggccggtttaaaggatatccaggctaaggaaggggggctatgcaagttat

SEQ ID NO: 116744 - DNA, 1174 bp, Arabidopsis thaliana
  unsure (1)..(1174): unsure at all n locations
annnnnnnnnnnnnnnnnnnnnnnnnnnnnnnnnnggccccccctcgaggtcgacggtatcgataagcttgatatcgaattcgcggccccttctttccgattctcggatttttcctgggaatcaaacgcatcgccgagaatcggaagagagggataaggttatggctcctcatggagatggattaagtgacatcgaagaacctgaggtcgatgctcaatcggagattcttcgaccgatctcctcagtcgtcttcgtcatcgctatgcaagcggaggctcttcctttggtcaacaagttcggactctctgaaactactgattcgccgcttggtaaaggattgccctgggttctgtatcacggcgtgcataaagatcttcgaatcaatgtagtttgccccggaagagatgcagctttagggatcgatagtgttggaactgttccagcttctctcataacttttgcttccatccaagcattaaaacctgacatcataatcaatgccggaacctgcggtggcttcaaggtcaaaggagccaacataggcgatgtattccttgtatctgatgttgtgtttcatgatagaagaataccaattccgatgtttgatctgtatggagttggtctccgtcaggcattctcgacacccaatctcctcaaggaactcaatttgaagattggcaggttatctactggtgactcgttggatatgtccacgcaagatgaaacattgatcattgccaatgatgctacgctaaaggacatggagggtgctgccgtggcgtatgtggctgatcttctgaaaataccagtcgtgttcctcaaagccgtgaccgatctagtggacggagataaacctacagcagaagagttcttgcagaacttgacagttgtgaccgctgcattagagggaactgctactaaagtgatcaacttcatcaatgggagaaacctttcggacctttaacttctgttctcttccttttttatggagagtgattttttaaaatgcgttcaacgtgcttgttgcagtttcactgatttccagtgatcatatttctcgttaataaatttcaagttataagaaaaaaaaaaaaaaaaaaaaaaaagggcgagccgctctagaggatccaagcttacgtacgcgtgcatgcgacgtcataactcttctatagt

SEQ ID NO: 116745 - DNA, 572 bp, Arabidopsis thaliana
  unsure (1)..(572): unsure at all n locations
tccaagcatctgcaggagtgaatcgcaaaaccaaatttggaggattctttctgaggggtttctcagtgagaaaatggcttcgaaacggatcttgaaggagctgaaggatctccagaaagaccctccaacctcctgcagtgcaggtccagttgctgaagacatgtttcattggcaagctacaattatgggtcctgcagagagtccgtattcaggcggtgtgtttctcgttaccattcacttccctccggactatcctttcaagccaccaaaggttgcatttaggacgaaggtgtttcaccctaatatcaacagcaacgggaggcattttgccttgcatttttgaaaggacaatggggccctgcccttaaccatttcggagggtgtttctttccgaaattttcctgtttaaaaggctcccaatcccggttccccgtttgtgcctaccagaggtttcacaaatgtcaaancggcagggccaatacggggttctnaagaaactgggcttagnagtttnnatnggtnacaaggtngnntnttagactgttttgttcatgctgtttttntctctntnc

SEQ ID NO: 116746 - DNA, 539 bp, Arabidopsis thaliana
cttcatttcattctatagatggagatccaatttttcaactagcagggcttcaagtgacctatgaatgcaacaagaaaccacaaggtcttactcaagatgctattaactgtttacaccggcaaacttttagctcagccgaggttaaatccgagatgagagattgtagcatatgtttagagagtttcactaaaggtgacatgctaatatccttaccctgtacccatagtttccattcttcttgcttaaacccttggcttagagcttgtggagattgtccttgttgccgtagagccatagcaaaggaatagaaactttgtaaatagcaatcttttggcctaaccattagggccttagccttacacatcttctcttcttcttgctatagacatccttaaaacgatcttctgagttttgtcgcccatgagtgttttttttactgtcacatgtttgtaatggtttttgatgtgccattaggcagttcaagcgttgatatcgtatggtgtgaatctttttagttttattcactgtgatctctcttt

SEQ ID NO: 116747 - DNA, 1176 bp, Arabidopsis thaliana
  unsure (1)..(1176): unsure at all n locations
aaaaggtccaaaaacgaataaactgtatctctcattcgccggagtttccagccgtttctttccgattctcggatttttcctgggaatcaaacgcatcgccgagaatcggaagagagggataaggttatggctcctcatggagatggattaagtgacatcgaagaacctgaggtcgatgctcaatcggagattcttcgaccgatctcctcagtcgtcttcgtcatcgctatgcaagcggaggctcttcctttggtcaacaagttcggactctctgaaactactgattcgccgcttggtaaaggattgccctgggttctgtatcacggcgtgcataaagatcttcgaatcaatgtagtttgccccggaagagatgcagctttagggatcgatagtgttggaactgttccagcttctctcataacttttgcttccatccaagcattaaaacctgacatcataatcaatgccggaacctgcggtggcttcaaggtcaaaggagccaacataggcgatgtattccttgtatctgatgttgtgtttcatgatagaagaataccaattccgatgtttcatctgtatggagttggtctccgtcaggcattctcgacacccaatctcctcaaggaactcaatttgaagattggcaggttatctactggtgactcgttggatatgtccacgcaagatgaaacattgatcattgccaatgatgctacgctaaaggacatggagggtgctgccgtggcgtatgtggctgatcttctgaaaataccagtcgtgttcctcaaagccgtgaccgatctagtggacggagataaacctacagcagaagagttcttgcagaacttgacagttgtgaccgctgcattagagggaactgctactaaagtgatcaacttcatcaatgggagaaacctttcggacctttaacttctgttctcttccttttttatggagagtgattttttaaaatgcgttcaacgtgcttgttgcagtttcactgatttccagtgatcatatttctcgttaataaatttcaagttataagacgttctctccctagtgttgcttaaattttgcggccgnnnnnnnnnnnnnnnnnnnnnnnnnnnnnnnnnnnnnnnnnnnnnnnnnnnnnnnnnnnnnnnnnnnnnnnnnnnnnnnnnnnnnnnnntt

SEQ ID NO: 116748 - DNA, 577 bp, Arabidopsis thaliana
  unsure (1)..(577): unsure at all n locations
gcaaaaccaaatttggaggattctttctgaggtatcaaagctttctccttttgattaacccacacgcgaatttgctcgcttctttctgaggggtttctcagtgagaaaatggcttcgaaacggatcttgaaggagctgaaggatctccagaaagaccctccaacctcctgcagtgcaggtccagttgctgaagacatgtttcattggcaagctacaattatgggtcctgcagagagtccgtattcaggcggtgtgtttctcgttaccattcacttcccttccggactatcccattcaaaccaccaaagggttgcattttgggacggaggtgtttcacccctaatattcaacagcaacgggaggcattttgcnttggacaatttttgaagcgaccaatctggggcccctgccccttaaaccattttcccaaagggtgtttnccccccaggttttgggccgcttttaaaaaaagttcccanttnccnggttggcccctttggggcccccagggttnnncacantttttaaaaancgggaagggncaaattnggggggttttttnaanaaattggggctt

SEQ ID NO: 116749 - DNA, 762 bp, Arabidopsis thaliana
  unsure (1)..(762): unsure at all n locations
nnnnnnnnnnnnnnnnnnnnnnnnnnnnnnnnnnnnnnnnnnnnnnnnnnnnnnnnnnnnnnnnnnnnnnnnnnnnnnnnnnnccacgcgtccgtcctcatggagatggattaagtgacatcgaagaacctgaggtcgatgctcaatcggagattcttcgaccgatctcctcagtcgtcttcgtcatcgctatgcaagcggaggctcttcctttggtcaacaagttcggactctctgaaactactgattcgccgttaagagctctccttttttcgattttgcttgtttggatttgatctccatgaatctctcacttcaaagtttacttttttgcaggcttggtaaaggattgccctgggttctgtatcacggcgtgcataaagatcttcgaatcaatgtagtttgccccggaagagatgcagctttagggatcgatagtgttggaactgttccagcttctctcataacttttgcttccatccaagcattaaaacctgacatcataatcaatgccggaacctgcggtggcttcaaggtcaaaggagccaacataggcgatgtattccttgtatctgatgttgtgtttcatgatagaagaataccaattccgatgtttgatctgtatggagttggtctccgtcaggcattctcgacacccaatctcctcaaggaactcaatttgaagattggcaggttatctactggtgactcgttggatatgtccacgcaagatgaaacattgatcattgccaatgatgctac

SEQ ID NO: 116750 - DNA, 440 bp, Arabidopsis thaliana
ctcgagccgaatcggctcgagcaaaagtgttccaccctaatgtcaacagcaatggaagcatttgccttgacattttgaaagaaccagatggagtccatgcacaatcaccatatcgaaggcgaaaaagcactctttaaccaatagcagtggatgagatgcagtgaatctcctcttgttcttaatcaaatctcttgtcaatttataggttttgctttcgatatgttcattgttaacggacccaaacccagatgatccattggttccagagattgctcacatgtacaaaaccgatagagcaaagtatgagtctactgcgagaagctggactcagaaatatgcaatgggatgaaagtttgtgtcctttgatccctcacagactcggttttaatagagagagagagagaaagagagaggacttcttcacatagggatcttccatg

SEQ ID NO: 116751 - DNA, 713 bp, Arabidopsis thaliana
gctggagtgaatcgcaaaaccaaatttggaggattctttctgaggggtttctcagtgagaaaatggcttcgaaacggatcttgaaggagctgaaggatctccagaaagaccctccaacctcctgcagtgcaggtccagttgctgaagacatgtttcattggcaaactactgattcgccgcttggtaaaggattgccctgggttctgtatcacggcgtgcataaagatcttcgaatcaatgtagtttgccccggaagagatgcagctttagggatcgatagtgttggaactgttccagcttctctcataacttttgcttccatccaagcattaaaacctgacatgctaatatccttaccctgtacccatagtttccattcttcttgcttaaacccttggcttagagcttgtggagattgtccttgttgccgtagagccatagcaaaggaatagaaacttgtaaatagaatctttgcctaaccattaggccatagccatacacatcttctcttcttcttgctatagacatccttaaaacgatcttctgagttttgtcgcccatgagtgttttttttactgtcacatgtttgtaatggtttttgttgtgccattaggcagttcaagcgttgatatcgtatggtgtgaatctttttagttttattcactgtgatctctcttttaatgtcttgttggttatatgaaagagactttttc

SEQ ID NO: 116752 - DNA, 1079 bp, Arabidopsis thaliana
  unsure (1)..(1079): unsure at all n locations
aatcgatccaacggtcataatcgtctttccaagataggccagctccgaaactcacctccacgcatctataatcgtgtatcaagaaacggatctttcttctctatcttctgaatatcacaaaacccaattagccggagatggccgcaacatccgccgctgctgcagctgcttcttccatcatgggtactcgggtggctcccggtatccatcccggttcaggtcggttcacagccgtgttcggtttcggaaagaagaaggcagctcccaaaaagagtgccaaaaagacggtgactacggaccggcctctttggtacccaggcgccatttctcctgactggcttgatggttccttggttggagattacggttttgatcccttcggtttaggcaaaccggccgagtatcttcaattcgatatcgattcactagaccagaatctggctaagaacttggccggagacgtgatcggaacccgtacggaagctgccgacgccaaatcgacgccgtttcagccgtacagtgaggtgttcggaatccagagattcagggaatgcgaactcatccacggacggtgggcgatgctcgctactctcggcgctctctccgtcgaatggcttaccggcgttacatggcaagacgctggcaaggtggagcttgtagatggatcgtcctacttggggcagccattacctttctcgatctcgacattgatatggatcgaggtgttagtgatcggctacatcgagttccagcgcaacgccgagcttgattcggagaagcgtttataccccggaggcaagttctttgacccgctaggtttagcggctgacccggagaagactgctcaacttcagttagctgagatcaagcatgcacgtcttgcgatggtcgccttcttgggattcgcggttcaagcggctgcaacaggtaaaggtccactcaacaattgggctactcacctcagtgatccactccacaccaccatcatcgataccttctcctcatcttaaattaaaaatcatttatcaatgntgnganttcttatttngaaaccttaaggnnaaaaanaagggnntntg

SEQ ID NO: 116753 - DNA, 599 bp, Arabidopsis thaliana
cacaaaacccaattagccggagatggccgcaacatccgccgctgctgcagctgcttcttccatcatgggtactcgggtggctcccggtatccatcccggttcaggtcggttcacagccgtgttcggtttcggaaagaagaaggcagctcccaaaaagagtgccaaaaagacggtgactacggaccggcctctttggtacccaggcgccatttctcctgactggcttgatggttccttggttggagattacggttttaatcccttcggtttaggcaaaccggccgagtatcttcaattcgatatcgattcactagaccagaatctggctaagaacttggccggagacgtgatcggaacccgtacggaagctttccgacggcaaatcgacggcgttttaagccgtacaagtgaggtgttcgggaatccagagatttaaggggattcggaccttttccacgggcggttggcgttttttcgttaattttgggggttttttcgtcgggaatggtttcccggggttaaatggaaaacgttgaaagtgggtttaagtgatcgcctcttggggagcataactttttctgaattatgtgggtggtgtc

SEQ ID NO: 116754 - DNA, 983 bp, Arabidopsis thaliana
  unsure (1)..(983): unsure at all n locations
gagaagtatagagaagtaatataaaggtagaaaaattggtatagatctaacggacggctaggatcttacaaagccagacataacccgaggaacaaagaaaataacccgcagaaacaccccacaagtattgcggatgggagaacgaggggaccgtttacaacgttacgaggacaagggtgaggcgaaagtttttccggtccacgttaaaaaaaaaaccactgggcgccaaaccaaaccccctcctccgggggtggccgaattttaaacaatggcacgccgggttccccatgaaaaccgcaatgggcccaccccattaaagttggtggccccctcnnnnnnnnnnnnnnnnnnnnnnnnnnnnnnnnnnnnnnnnnnnnnnnnnnnnnnnnnnnnnnnnnnnnnnnnnnnnnnnnnnnnnnnnnnnnnnnnnnnnatgaactctagcgctctacgactcactatttggaaagctggaccgcctgcaggtaccggtccggaattcccggggcgcacccgacgtccggttaggtttagcggctgacccggagaagactgctcaacttcagttagctgagatcaagcatgcacgtcttgcgatggtcgccttcttgggattcgcggttcaagcggctgcaacaggtaaaggtccactcaacaattgggctactcacctcagtgatccactccacaccaccatcatcgataccttctcctcatcttaaaatcattatcatgtgagattctatttgtaacttatgtaaaaacagagctatgatgatactgaatcgactttgggcttttgcttgtttggtttaaaaaaaaaaaaaaaaaaaaaaaaaaaaaaaaaaaagggcggccgctctagaggatccaagcttacgtacgcgtgcatggtacgtcatagctagtctatagtnnnnnnnnnnnnnnnnnnnnnnnnnnnnnnnnnnnnnnnnnnnnnnnnnnnnnnnnnnnnnnnnnnn

SEQ ID NO: 116755 - DNA, 525 bp, Arabidopsis thaliana
tcgaggtgttagtgatcggctacatcgagttccagcgcaacgccgagcttgattcggagaagcgtttataccccggaggcaagttctttgacccgctaggtttagcggctgacccggagaagactgctcaacttcagttagctgagatcaagcatgcacgtcttgcgatggtcgccttcttgggattcgcggttcaagcggctgcaacaggtaaaggtccactcaacaattgggctactcacctcagtgatccactccacaccaccatcatcgataccttctcctcatcttaaaatcattatcatgtgagattctatttgtaacttatgtaaaaacagagctatgatgatactgaatcgactttgggcttttgcttgtttggtttatttacatgtttggcccatgacattaaattgggcttctccttaattaataaaaaaaaaagagaataaacataaaaataaaaaaaaaaaaaaaaaaaaaaaaaaaaaagggggcggccgttttagaggatccaagcttacc

SEQ ID NO: 116756 - DNA, 1902 bp, Arabidopsis thaliana
gaaatattacgaaaaagagatattttttatttttacttattttgggattatcatttacccggaacgggcaaagcggtgagtcatcttaccttataaatgatcacaaacccgaggactgtgagttttcgtgtagaacaaatccttctctgagaaaaaacaacagatccgaattttatctttaatcagccggaaaaaatggagaaagcgatcgagagacaacgcgttcttcttgagcatctccgaccttcttcttcttcttcgcacaattacgaggcttctctatctgcttctgcttgcttggctggggacagtgctgcatatcagaggacctctctctatggagatgatgttgtcattgtcgcggcacataggactccactatgcaagtccaaacgtggcaatttcaaggatacatatcccgatgatttgctcgcacctgttttgagggcattgatagagaagacgaatctaaacccaagtgaagtaggtgacattgttgtgggtactgttttggcacctggatctcagagagccagtgaatgcaggatggctgcgttctatgctggtttccctgaaaccgtggctgtcagaactgtgaatagacagtgctcatctgggcttcaggctgttgctgatgtagccgctgccattaaagcgggattttatgacattggtatcggggctggtttggagtccatgactaccaatccaatggcatgggaagggtcagtcaacccagcggtgaagaagtttgcacaagcgcagaattgtcttcttcctatgggtgttacgtcagaaaatgtagcacaacgctttggtgtctcaaggcaggagcaagatcaagctgctgttgactcgcacagaaaggcagctgctgctactgctgctggtaaattcaaggatgagatcattcctgttaagaccaagcttgttgacccgaagactggtgatgagaaacccattacagtttctgttgatgatggtatccgaccaaccacaactcttgcttctcttgggaagctgaagccagtgtttaagaaggatggcaccactactgctggaaattccagccaagtaagtgatggtgcaggagcggttctcctaatgaagagaagtgttgcaatgcaaaaaggacttcccgttcttggtgtattcaggacatttgctgcagttggtgttgaccctgcaatcatgggtatcggtccagcagttgccattcctgctgcagttaaggcggctggtttagaacttgatgacatcgacttgtttgagatcaatgaggcatttgcatctcagtttgtttattgccgtaacaaattgggacttgacccagagaaaatcaatgtcaacggaggtgcaatggccataggccatcctttgggcgctacaggagcgcgttgtgttgctacattgttgcacgagatgaaacgccgtggtaaagactgccgttttggagtagtgtcaatgtgcattgggacggggatgggtgcagcagctgtgtttgagagaggagatggagttgatgagcttcgcaacgcaaggaaagttgaagcgcaaggtcttttgtccaaggacgctcgctagagaggaccatgcaccaaaaccgtttttcacctcacctctctcttttctggtcttcttgtcactttcttcagatattattatagtttcgaataaagcacacaaccaatgtttgcctgagtcttgtgttgttcttgaccaggtcatgtgtttagtattttttttaagtgaagggggataatctttaaatcttttatatgtaagaatattgttcttctcgaatttcatcagttgttgcttctagaaattttagattttttgggtggcagccatttctatcggccgctctagaggatccaagcttacgtacgcgtgcatgcg

SEQ ID NO: 116757 - DNA, 541 bp, Arabidopsis thaliana
ttaggacaactatagaagatctatgacgtcgcatgcacgcgtacgtaagctcggaattcggctcgagcgaaaacaatggaaaaagcaacggagagacaaaggatactgcttcgtcatcttcaaccttcgtcatcttccgacgcctctctctctgcctcagcttgcttgtccaaagacagtgctgcatatcaatatggagatgatgttgtcattgtcgcggcacaaaggactgcactttgcaaggcaaaacgtggcagcttcaaggatacatttccagacgagttgcttgcctctgtattgagagcattgatagagaaaactaatgtaaacccaagtgaagttggtgacattgtagtgggtactgttttgggaccaggatctcagagagccagtgaatgcaggatggctgcgttctatgctggtttccccgaaactgttcccatcagaaccgtgaacagacagtgttcatctgggcttcaggctgttgctgatgttgccgctgccataaaagctggtttttatgacattgggtttgaagctg

SEQ ID NO: 116758 - DNA, 781 bp, Arabidopsis thaliana
gttccaatttaccaaaccatagagacttgaattaatgagaatctctcaactctcaaccaaaccgtaagaaatccacagccgagagatatctttataaactctgtcctcactaatggttctttaaccaacttacaagagctctatcttgccgcagtccgtccttttcaaagcatatcaatgtctacattgtgtctatataattataaaacgctcatgaacagttgctacttgttaaaactctcacaggagcgcgttgtgttgctacattgttgcacgagatgaaacgccgtggtaaagactgccgttttggagtagtgtcaatgtgcattgggacggggatgggtgcagcagctgtgtttgagagaggagatggagttgatgagcttcgcaacgcaaggaaagttgaagcgcaaggtcttttgtccaaggacgctcgctagagaggaccatgcaccaaaaccgtttttcacctcacctctctcttttctggtcttcttgtcactttcttcagatattattatagtttcgaataaagcacacaaccaatgtttgcctgagtcttgtgttgttcttcaccaggtcatgtgtttacgtatttgttttaacgtgaaggggggataggctttaaatcttttatatctaagaatattgttcttctcgaatttcatcagttgttgcttccttagaaattttagattttttggggtggcagccatttctatatttcgatgggtaagtcaaacggtcataaagtcaaagggtccttcctttgtttgtggtt

SEQ ID NO: 116759 - DNA, 571 bp, Arabidopsis thaliana
atgatacttcagctctccacgactcactattgggaaagctggtccgcctgcaggtaccggtccggaattcccgggtcgacccacgcgtccggaaaaaacaacagatccgaattttatctttaatcagccggaaaaaatggagaaagcgatcgagagacaacgcgttcttcttgagcatctccgaccttcttcttcttcttcgcacaattacgaggcttctctatctgcttctgcttgcttggctggggacagtgctgcatatcagaggacctctctctatggagatgatgttgtcattgtcgcggcacataggactccactatgcaagtccaaacgtggcaatttcaaggatacatatcccgatgatttgctcgcacctgttttgagggcattgatagagaagacgaatctaaacccaagtgaagtaggtgacattgttgtgggtactgttttggcacctggatctcagagagccagtgaatgcaggatggctgcgttctatgctggtttccctgaaaccgtggctgtcagaactgtgaatagacagtgctcatctgggcttcaggctgtt

SEQ ID NO: 116760 - DNA, 1562 bp, Arabidopsis thaliana
  unsure (1)..(1562): unsure at all n locations
nnnnnnnnnnccnnnnnnnnnnnnnnnnnnnnnnnnnnnnnnnnnnnnnnnnnnnnnnnnnnnnnaccacgcgtccgagaataccacgtagtaatattagtagtaatttttttatttttttggggaaaaaatgggtggatattttggagtttctacaatttttattatctgtttgttgggaatttcagccaatgctgaggtattcaccattggttcttcatcaggttctgatattactcaggcacttctgaaagcattcacatcggcatgccaatcttcgtcaccaagcaaagtggtgatcccaaaaggagagttcaagcttggtgagatcgagatgaggggtccatgcaaagctcccattgaggtcacccttcaaggtactgtcaaagctgacggtaacgctatccaagggaaggaaaaatgggtcgtcttcggcaacattgatggctttaagttgaacggaggaggagccttcgacggtgaaggcaatgcagcttggagagtcaataactgtcacaagactttcgagtgcaagaaacttcccatcagtataaggtttgacttcatattgaactctgagatcagagacatatcctcgatcgatgccaagaacttccacatcaacgtgttgggagccaagaacatgaccatgaataacatcaagatcgtcgccccagaagacagtcccaacactgatggaatccatttgggaagaagtgacggaatcaagatccttaactctttcatctccaccggagacgattgtatctccgtcggagatgggatgaagaaccttcacgtggagaaggtcacatgcggtccgggacacggaatcagtgtcgggagtcttggaaggtacggacacgagcaagatgtcagcggcattaaggtcatcaactgcactcttcaagagactgacaacgggttgaggatcaagacatggccctctgcagcttgctccaccaccgcatccgatattcatttcgaggatattatcctcaaggacgttagcaacccaatcctcatcgaccaagagtactgcccttggaaccagtgcaacaagcaaaaagcatcaacaattaagttggtgaacattagcttcaagaacatcagaggaacatcagggaacaaggacgcggtgaagctactttgcagcaaggggtatccgtgccagaacgtggagattggagacattgatatcaagtacaatggagcagatggtccagccactttccattgctcaaacgtcagtcccaaaatcttgggatctcagagccctaaagcatgcagcgctccagcagcctaaatgtagaagctctaaaacaattaattaatcaaacactcattcaattcaattttatatatgaatttcttctacacagtaactatatacgatgtatgctctcatttaattcaacaatgaatgcatcatccattatttcttggtgaaaaaaaaaaaaaaaaaaaaaaaaaacaaagggcggccgctctagaggatccaagcttacgtacgcgtgcaggcgacgtcaagatcttctatagtggtacctaanngtaaatcg

SEQ ID NO: 116761 - DNA, 930 bp, Arabidopsis thaliana
  unsure (1)..(930): unsure at all n locations
taggaacactatagaagagctatgacgtcgcatcgcacgcgtacgtaagctcggaattcggcgtgagtgaagatctacccaaaaaaaaaaaaaaaaagagatggttctgctagagaagctttgggatgatgttgtggctggacctcagcctgaccgtggccttggccgcctccgtaagatcaccacccaacccattaatatccgagatataggagaagggagcagcagtaaggtggtgatgcataggtcgttgaccatgccggcggagtgagccctggaactccaacgactccaaccactccgacgacgccacgtaaggataacgtgtggaggagcgtctttaatccgggaagcaacctcgccactagagccatcggctccaacatctttgataaacccacccatccaaattctccctccgtctacgactggttgtacagcggtgactcaaggagtcagcaccgttagggatggtccgatggagtttgacatgcgggtgatgtaaatatggtgacctgatcttccgccaccttactttgttttttttaatattgtttttgtgtactttatcagagtggataaagtgacggggaatgtttttcttttgtacaaaaaactgtcttcccacctaagcaatgtgtgttagtttctgttttgggctgtgttttgcaagtttttgtatttcagagttgtgtagtgtagttgcaagtggcggttggatctttcactatcttgttggattttgatgatggttgatgcttttgctttaatgttaaataaataagcatacttttgctaaaaaaaaaaaaaaaaaaaaaaaggnnnnnnnnnnnnnnnnnnnnnnnnnnnnnnnnnnnnnnnnnnnnnnnnnnnnnnnnnnnnnnnnnnnnnnnnnnnnnnnnnnnnnnnnnnngtagctggcagtatcat

SEQ ID NO: 116762 - DNA, 576 bp, Arabidopsis thaliana
  unsure (1)..(576): unsure at all n locations
agcaaaagtatgctggatgggtttatcattaaagcaaaagcatcaaccatcatcaaaatccaacaagatagtgaaagatccaaccgccacttgcaactacactacacaactctgaaatacaaaatcattgaagatctacccaaaaaaaaaaaaaaagagatggttctgctagagaagctttgggatgatgttgtggctggacctcagcctgaccgtggccttggccgcctccgtaagatcaccacccaacccattaatatccgagatataggagaagggagcagcagtaaggtggtgatgcataggtcgttgaccatgccggcggcagtgatgccctggtactccaacgactccaaccactccgacgacggcaaggtaagggataacgtgtggaggggcgtcttaaatccgggaggnaaccttgccacttagagccatcggttccaaacaattntttgnttaaacccacccatccaanttttccctccgttttcggcttggtttttanaaggggnnncntnaaagggggttaagcncccttagggnttggnccctttggggtttttanaatgnggg

SEQ ID NO: 116763 - DNA, 572 bp, Arabidopsis thaliana
  unsure (1)..(572): unsure at all n locations
ccacgcgtccgaaatcattgaagatctacccaaaaaaaaaaaaaaagagatggttctgctagagaagctttgggatgatgttgtggctggacctcagcctgaccgtggccttggccgcctccgtaagatcaccacccaacccattaatatccgagatataggagaagggagcagcagtaaggtggtgatgcataggtcgttgaccatgccggcggcagtgagccctggaactccaacgactccaaccactccgacgacgccacgtaaggataacgtgtggaggagcgtctttaatccgggaagcaacctcgccactagagccatcggctccaacatctttgataaacccacccatccaaattctccctccgtctacgactgcgttgataatgaagctcaaaggaaggaacatgtggcactgtgtttagtgggcgcgtggattaagtgaatagttttattctgatttgaccaaatcaaaccttcccttttttggtgcataattggttgtaaaccggtggctcaaangggctnncacccggtatggggttgggcccaatggnnntgnncaantc

SEQ ID NO: 116764 - DNA, 786 bp, Arabidopsis thaliana
  unsure (1)..(786): unsure at all n locations
nnnnnnnnnnnnnnnnnnnnnnnnnnnnnnnnnnnnnnnnnnnnnnnnnnnnnnnnnnnnnnnnnnnnnnnnnnnnnnnnnnnnnnnnnnnnnnnnnnnnnnnnnnccacgcgtccggattaagtgaatagttttattctgatttgaccaaatcaaccttcctttttgtgcatatggtataatatcattaactctttaaccttcatggccaaagttttagagtgctaatcacagccgttgtttttttcttctcagtattgagatttgagattgttgatcggatggttcagatcacgagttgttggttcactaattgaccgcacgtggggtgtttgcaggttgtacagcggtgactcaaggagtcagcaccgttagggttggtccgatggagtgtgacatgcgggtgatgtaaatatggctgacctgatcttccgccaccttactttgcttttttttaatattgtttttgtggacctttatcagagtggataaagtgacgggggaatgtttttcttttgctacaaaaaaactgtcttcccacctaagcaatgtgtgttagtttctgttttgggctgtgttttgcaagtttttgtatttcagagttgtgtagtgtagttgcaagtggcggttggatctttcactatcttgttggattttgatgatggttgatgcttttgctttaatgttaaataaataagcatacttatgctaaaaaaaaaaaaaaaaaaaaagggcggccgctctagaggatccaagcttacgtacgcgtgcatgcgacgtcatagt

SEQ ID NO: 116765 - DNA, 636 bp, Arabidopsis thaliana
  unsure (1)..(636): unsure at all n locations
acccacatcttgaaacccncccaccaaatcccccancncaccgcnccgtgaaaatgaaccccaaaggaaggaccatgtggcccgtgtttagngccccgtggattaagtgaatagttattctgatttgaccaaatcaaccttcctttttgtgcatatggttgtacagcggtgactcaaggagtcagcaccgttagggatggtccgatggagtgtgacatgcgggtgatgtaaatatggtgacctgatcttccgccaccttactttgttttttttatattgtttttgtgtactttatcagagtggataaagtgacggggaatgtttttcttttgtacaaaaaactgtcttcccacctaagcaatgtgtgttagtttctgttttgggctgtgttttgcaagtttttgtatttcagagttgtgtagtgtagttgcaagtggcggttggatctttcactatcttgttggattttgatgatggttgatgcttttgctttaatgttaaataaataagcatacttttgctaaaaaaaaaaaaaaaaaggnnnnnnnnnnnnnnnnnnnnnnnnnnnnnnnnnnnnnnnnnnnnnnnnnnnnnnnnnnnnnnnnnnnnnnnnnnnnnnnnnnnnnnnnnnnnnnn

SEQ ID NO: 116766 - DNA, 1477 bp, Arabidopsis thaliana
gttaacactcttttaaaagaacaaaaaaagcaaaaataaaataaagatattatcaccatggctaacgcaagaagtttagtcgccaaggcaaacaatattaacgtaggttcattgattctaatggccttggtgtttggttcttgcgtggctaatggtgaatatctcggcggccgccgtggtctcgctgctaattccggtaaccccacggtctatgatattactaagtttggagccgtaggagatggttccaccaatacttttaaggcgtttttgaacacatggatacaagtgtgtgacagtccagtaccagcaacgctactagttcctaagggaacatttttggctggtccagtcattttcgccggtccatgcaagagcaaagtgaccgtcaatgttataggcacaatcatcgctacgaccagcgggtacgcaactcccgagtggttcttgttcgagcgtgttgacaatctcgtcctcaccggaaccggcacattccacgggaaaggtgaagctgtctggaaagcagatggttgtggtaaaaaggtccaatgcaatcttcctccaacgtctctcaaattcaggaacatgaaaaatgttgaaatcaatggcataagctcggtgaacgcaaaggccttccacatgttcttagtcaaaactgagaatgttaacatccaaaacattaagcttaccgcaccagctgaaagccccaacaccgatggtatccatttgagcaatgcagacaacgttagcatcctcgacagtaccatagcgactggagacgattgtgtttcagtcggtcgtggctccaacaacgtaaccgtcgaacgtgtgatttgtggtccaggacacggtctaagtgtcggtagtcttggtaagtacaagaacgaggaagacgttagcggaatccacgttaacaactgcacgatgattgagaccgacaatggtcttaggatcaagacatggggtgggtcagacccaagcaaggctgtggacattaagtttgaaaacatcatcatgcagagtgtcaagaacccaatcatcattgatcaaaactacggttcaagaggcggagattcacaagttgctataagtgatattttgttcaagaacattagaggaacaacaattacaaaagatgttgttcagattatgtgtagcaaatcggtgccgtgccaaggagtaaacgttgttgacgtgaacttggactatgtaggcaagacaggaggagagaagaagtcgtcatcaggcggtttggtcggagctctttgcgataacgccaatgttatcttcggtggaaaacttagtttccctatgtgtcccaaataagctttttggtataaataatttaatattaaaaaaaataatcaaaagtttcacaaacattgttttgtttgtgagttagtttgggaatttatcaacaagaaataatcagtggaatatttgacttttgatttttgataatgtttttttcccgatt

SEQ ID NO: 116767 - DNA, 1814 bp, Arabidopsis thaliana
  unsure (1)..(1814): unsure at all n locations
acgactcactatttggaaagctggtccgcctgcaggtaccggtccggaattcccgggtcgacccacgcgtgcgcaaaaacaaaagaagaagagaataaacaaaagaagaaaaaaaactaataaaacaaaatcaataaaaagagaataaaaaatggtgggttctcacaaagcaagcggagtgcttcttgtgctactagtggttatggccaccacaatagcaaacgggacaccggttgtcgataaagcaaaaaatgcagctacagcagttgaagatacagcaaaaaatgcagctacagcagttggcggtgcagctgcatcagttggtgctaaagtatcaggtgccaaaccaggcgcagcacttgatgttaaagcatcaggagccaaaggagacggcaaaactgatgatagtgcggcatttgcggctgcatggaaagaagcttgtgcagcagggagcacgattacagtgccaaaaggtgagtatttggtagagagcctagagttcaaaggtccatgcaaaggtccagtcactttggaattgaatggcaattttaaggctccggctacggtcaagaccactaagcctcatgccggatggattgatttcgaaaatctcgctgatttcactttgaatggaaacaaagctatttttgacggtcaagggtccctcgcttggaaggccaatgactgcgccaaaaccggcaaatgcaactctctccctatcaacatccgattcactggtctaacaaactcaaagattaacagtattacatcaacaaacagcaagcttttccacatgaacatccttaactgcaagaacataactcttacggatatcggtattgatgcacctccggagagtctcaacaccgatggtatccacatcggaaggtccaatggagtcaacttaattggggcaaagattaaaaccggagatgactgcgtttccattggagatggtaccgaaaatctcattgttgagaacgtagaatgtggaccaggacacggaatttccattggaagtcttggaagataccctaatgaacaaccagtaaaaggagtcaccgtgaggaaatgcctcatcaagaacactgacaatggtgttcgcatcaagacatggccaggatctccccccggtatcgcctccaacattcttttcgaagatatcacaatggacaatgttagccttcccgttctcatcgaccaagagtactgtccttatggccactgcaaagctggggtaccatcgaaagtgaagttgtcagacgtgactatcaagaacattaagggaacatcagcaacaaaggtagcagtgaagctaatgtgcagcaaaggcgttccttgcaccaatattgctctctctgacatcaacttggtccacaacggcaaagagggaccagctgtctcagcatgttctaacatcaagcctattctcagcggaaagttggttccagcggcttgcactgaagtcgctaaaccgggtccttaaattaaagtcgcttgtccaccataaatccatccaatctggtgaagacgctttgattagggtgcgatgaaaaaattttgcaatatttttttgacatataaattatatggatattttatagataagacggagtccattcaggattggagtttataacctgaagagtgactcgtgaattgggtagtaattgttgtgtggattcgcatttatgcgagaatgttttaataattattcgaaaagtaataatatcattgaaattttgaagtttttatttaaagcaatacacgnnnnnnnnnnnnnnnnnnnnnnnnnnnnnnnnnnnnnnnnnnnn

SEQ ID NO: 116768 - DNA, 2134 bp, Arabidopsis thaliana
acccacgcatccacgaacaaaccctagaccgttaaaacccttatcaatttcgctgaaacggcaaatggaagaagtgtcgtcggagatggaagtggaggttcaaaatcgtcagctttcggattcttctccggctcaaaacgtgaagaaatttgggctcaagaactctattcagaccaacttcggctctgactacgtcttccagattgtcccaaaaatcgattggacagcaatcgcggtttccttatcaaccaacaccgtcaagctttactcgccggtgactggtcagtactacggcgaatgtaaaggccactccgataccgtcaatcagattgcgttttcctccgactcggcggcgtctcctcacgttttgcactcttgttcctccgatggtaccattagatcttgggacactcgaagtttccaacaggtttcgcgtattgatactgggaatgatcaggagattttcagcttctcctatggaggtgctgcagataatcttctggctggtggatgcaaagagcagagagagcacaaccaccgtgaatcatccgccggagaaggtgggagttcatcaatgacgacggtgattaaagaagaagctgccggagttgacgagcttttggttgttttaggttacaaagttcgatcatccgacatggctgacgtggcacacaagcttgaacagttagagatggttcttggtgatggaatctcgaatctttctgatgaaactgttcattacaatccttctgatctctctggttgggtcgaaagcatgctctcggatcttgacccgacccggattcaagaaaagcctgactcagagtacgatcttagagctattcctggctctgcagtgtatccacgtgacgagcacgtgactcgtcggagcaagaggacggaaattgaatcggagttatcctctacgcgctctgtggtggttttggattctcaagaaactggagtgcgtttagtccacgcgctattagcttgtgctgaagctgttcaacagaacaatttgaagttagccgacgcgctcgtgaagcacgtggggttactcgcgtcctctcaagctggtgctatgaggaaagtcgcgacttacttcgctgaagggcttgcgagaaggatttaccgtatttaccctcgagacgatgtcgcgtcgtcttcgttttcggacactcttcagattcatttctatgagtcttgtccgtatctcaagtttgcgcattttacggcgaatcaagcgatacttgaggtttttgctacggcggagaaggttcatgttattgatttaggacttaaccatggtttacaatggccggctttgattcaagctcttgctttacgtcctaatggtccaccggattttcggttaaccgggatcggttattcgttaaccgatattcaagaagttggttggaaacttggtcagcttgcgagtactattggtgtcaatttcgaattcaagagcattgctttaaacaatttgtctgatcttaaaccggaaatgctagacattagacccggtttagaatcagtggcggttaactcggtcttcgagcttcatcgcctcttagctcatcccggttccatcgataagtttttatcgacaatcaaatcaatccgaccggatataatgactgtggtcgagcaagaagcaaaccataacggtaccgtatttctcgatcggttcacggaatcgctacattactattcgagcttattcgactcgctcgagggcccgccaagccaagaccgagtgatgtcggagttattcctaggacggcagatactaaaccttgtggcatgcgaaggagaagaccgggtagagaggcatgagactttaaatcagtggagaaaccggttcggtttaggaggatttaaaccggttagtatcggttcgaacgcgtataagcaagcaagcatgttgttggcactttatgccggggctgatgggtataatgtggaagagaatgaaggttgtttgttgcttggatggcaaacgcgaccgcttattgcaacatctgcgtggcgaatcaatcgtgtggaataaaaaaaaaaaaggacggccgctctagaggatccaagcttacgtacgcgtgcatgcgacgtcaagctcttctataggttcacc

SEQ ID NO: 116769 - DNA, 537 bp, Arabidopsis thaliana
  unsure (1)..(537): unsure at all n locations
nnnctctacgactcctatagggaacgctggtacgcctgcaggtaccggtccggaattcccgggtcggcccacgcgtccgattttatttttctttcttcttcttcaattattatgacactcccgtgttcctaatcttttctcttattcttctctttcttctcatcttacaaaatcttgcaaatcaattttaatgaagagagagcacaaccaccgtgaatcatccgccggagaaggtgggagttcatcaatgacgacggtgattaaagaagaagctgccggagttgacgagcttttggttgttttaggttacaaagttcgatcatccgacatggctgacgtggcacacaagcttgaacagttagagatggttcttggtgatggaatctcgaatctttctgatgaaactgttcattacaatccttctgatctctctggttgggtcgaaagcatgctctcggatcttgacccgacccggattcaagaaaagcctgactcagagtacgatcttagagctattcctggctctgcagtgtatcc

SEQ ID NO: 116770 - DNA, 1737 bp, Arabidopsis thaliana
atggattcttcttcatcagtcgtttacgttggttcatcatccaaatccagaaactttcaatctaaatccaaaggttcgattacatctttctcaatcgattcaagaggcaccaagaaatcaatgaagacgttattaatcccagaaccagaaccaacttcccctgaagttatagaaagttctgtgtcctctgtttcagctgaatccgagacaccaatttcgattatacgtaagaagaaacaatcagagccaaggttttactctagcccaaccaacacgttttacacagaagcaaaacaaagctttaccaacacagaattcagtgaatgtgcaagcataagcactattggtataggtggtattgatttggagaagaatggtgtaatgatatacagaggaagtatagggagtgatgttagtgatgagagtagctcaagtggtctgagtaatgcagcttacaagccacatagagataataacgataagcgttgggttgcgattcaggaggttcgttctcgggttggttcgtcgcttgaggctaaagatttcaagctgattaagaagttaggaggaggtgatattggtaatgtttacttagctgagttgattggaactggagtgagttttgctgtgaaagttatggagaaagctgctattgcagcgaggaagaagcttgttagagctcagactgagaaagagatacttcaatcgttagatcatcctttcttgcctacgctttactcacatttcgaaacagagatgaattcttgtttggttatggagttttgtcctggtggtgatttacattctcttagacaaaaacagcgtggaaagtacttccctgagcaagctgctagattttatgttgctgaagttcttcttgctatggagtatctacatatgcttgggatcatatacagagaccttaagcctgagaatgttttagttcgtgaagatggacatataatgctatctgatttcgacctctctttgagatgtgcagtctctccaacgttggttcggttcgcagcaatcacgcttgagtccaaaagctcaagctactgtatccaaccaacatgtgtagaccaatcgagctgcattgttcagcctgactgcatccagccagtgtgtttcactcctcggttcttgtctaaaggaaagcacaggaagaagtcgaacgatatgagccgccaaatcagaccgcttcctgagctgatagctgaaccgactagcgcaaggtcaatgtcgtttgttggtacacacgagtacctagcaccagagattatcaaaggagaaggtcatggaagcgcggttgactggtggacattcgggatattcctctatgagcttctatttgggataacaccgtttagaggaggcgataacagagcgacactctttaacgtagttggacagccattgcggtttcccgagcatccaaatgtgagctttgcagctagagatttgatcagaggattgctagtgaaagagcctcagcatcggttggcttatagaagaggagctactgagattaagcagcatccgtttttccaaagtgtgaattgggctttgatcagatgcaccagtccaccacagattcctcaaccggttaaaccaatggatcaagctcacagtgttcgtcatggttttagtcaaggacatggacatgttggttatgataagcctcctactgtggatgtgaagccttctggtaattatttggaaattgatttcttctga

SEQ ID NO: 116771 - DNA, 904 bp, Arabidopsis thaliana
  unsure (1)..(904): unsure at all n locations
agctggtacgcctgcaggtaccggtccggatttcccgggtggagccacgcgtccggacctctcagcagccaacgacagttatcaaagcttaagccgttttagggttttatccttttgctgagatccaatcatggcggatgttgaaccagaggttgctgctgctggagttcccaagaagaggacgtttaagaagtttgccttcaaaggagttgatctcgatgctcttctcgatatgtctactgatgatcttgtcaagctcttctcttctcgtattcgtagaaggttctctagaggtttgacaaggaagccaatggctctgattaagaagctgaggaaagcgaaaagggaggcaccacaaggtgagaagccagaaccagtgagaacccacttgaggaacatgatcatcgtccctgaaatgattggaagcatcattggagtgtacaacggaaagactttcaaccaggttgagatcaagcctgagatgattggtcactacctggctgagttctctatctcatacaagccggtcaagcacggtaggcctggtgttggtgctacccactcttccagattcattccccttaagtgaaaagcttctattggggaatgtgtttacttgctcgttatatgtggatctaagtacgtggatctcttatgtttttgaagctttataatgacattactttagaagctttctcaactctagctcttgcgttttcattatcatgttacaagaggatcttaaatcaaatcattttggatttttgttttgtttatgttgttataatttatttgggtttggttgnnnnnnnnnnnnnnnnnnnnnnnnnnnnnnnnnnnnnnnnnnnnnnnnnnnnnnnnnnnnnnnnnnnnnnnnnnnnnnnnnnnnnnnnnnnnnnnnnnn

SEQ ID NO: 116772 - DNA, 720 bp, Arabidopsis thaliana
ggaaaacgcaagctaccacagatttagagtttatccaccttatctttcgccgagatccaacaatggctgatgtggaaccagaggttgcagcagcaggagttccaaagaagagaacgttcaagaaattcgccttcaaaggagtcgatctcgatgctcttctcgacatgtctaccgatgatcttgtcaagctcttctcttcccgtattcgcagaaggttctctagaggattgacgagaaagcctatggctttgattaagaaactccgcaaggcgaaaagagaggcaccagctggtgagaagccagaaccagtgagaacccacttgaggaacatgatcattgtgcctgaaatgattggaagcatcattggtgtgtacaatggaaagactttcaaccaagtggagatcaagcctgagatgattggacattaccttgcagagttctccatctcgtacaagccagttaagcacggtaggcctggcgttggtgctacccactcctccaggttcatccctctcaagtgaagaccatacagagtctgtgttgtgctcttgttttgttagatctcattatgcaattatagggtcctccttctttgtctgttttgggaccattttgtctgtctgtacttctctgtttggctactctgctgcgattctctcttctttagatgagtctaaactcttgttccaatcctttaaagaagactcaaaacttttttgg

SEQ ID NO: 116773 - DNA, 449 bp, Arabidopsis thaliana
  unsure (1)..(449): unsure at all n locations
aaaccgggggcgacccagcgnncgagcagccaacgacaggnancaaagtttaagtttttttacgagaaaatccttttgcggagagccaatcatggcggatggtgaaccacacgttgccgctgctggagttcccaagaagaggacgtttaacaagtttgccttcaaaggagttgatctcgatgctctcctcgatatgtctactgatgatcttgtcaagctcttctcttctcgtattcgtagaaggttctctacaggtttgacaacggaagccaatgggctctgattaagaagctgaagaaagcctaaaagggaggcaccccccatgttgagaaacccntaaaccacttnatcaacnccactttganggaacntngatncntccntcccntnaaaatgaattgggaancctcnctttggaattgnttctaaggaanagacttncttccccg

SEQ ID NO: 116774 - DNA, 1223 bp, Arabidopsis thaliana
  unsure (1)..(1223): unsure at all n locations
accggccggaancccggnggaccacgcgtccgctaaactcaatatataatgataacacgttcacgtgttcatcgtcaaaagagtgtctcagtgagtacaatcttcaggtgtcttctagttttgatcagacgctctattcaattctcttaattagtcatatctttctttcttttttcctcgtttcgtgttaattttattttaaaacaaaggattaaagagtcgttctttcttttggtaacatggagccttaatgatcctttgttagctctagctaggattttacgtactacttagggtattcaaactaaaataaaatcaagaagaagagcagagagatggtgaggacaccatgttgcaaagaagaaggaataaagaaaggagcttggactcctgaggaagatcaaaagcttattgcttatcttcacctacatggtgaaggtggatggcgtactctccctgaaaaagctggattgaagagatgtggaaagagttgtagattgagatgggctaattacttaagacccgacattaagagaggagagtttagtcctgaagaagacgacactatcatcaagcttcatgctcttaagggtaacaagtgggccgcaatcgccactagcttggcgggacgaactgacaacgaaataaaaaactattggaacacaaatctcaagaagcggttgaagcaaaaaggcatcgatgcaatcactcacaaaccgatcaattcaaccggtcaaaccggtttcgaaccaaaagtaaataaaccggtatattcatccggttccgctaggcttcttaaccgcgtcgcaagcaaatacgcggttgaattaaaccgggacttactgaccgggatcatcagtggaaactccaccgtcgccgaagattcacaaaactccggcgacgttgattctccgacctccacattgctcaacaaaatggcggcaacatcagttttgatcaacactacgactacatattccggcttctccgacaactgttctttcactgatgaattcaacgaattctttaacaatgaagagatctccgatatttacacgactgtcgataattttgggtttatggaagagttaaagagtattttaagctacggcgatgccagcgccggagttattgaaaattcgccggaggtcaatgtagctgatgcaatggagttcattgattcctggaacgaagatgacaatatggttggagtctttgtctga

SEQ ID NO: 116775 - DNA, 1911 bp, Arabidopsis thaliana
  unsure (1)..(1911): unsure at all n locations
atggaggagatgactcccgcagttgcaatgactcttagcttagcagccaacaccatgtgtgaatcatcacctgtcgagatcactcagctaaagaacgttactgatgcagctgacttgttatctgattctgaaaatccaagcttttgcaacggagggactgaatgcactatggaagatgtttctgaactggaagaggtaggtgaacaggatttgttgaaaactttatccgatacgagaagcgggtcttccaatgtttttgatgaagacgatgtattgtctgttgtggaggataatagtgctgtcataagtgagggcttgttagttgttgatgcaggctctgaattaagcttgtctaatacagctatggaaatagataacgggcgagttcttgcaaccgcgattatcgtaggcgaatcaagcattgagcaggttcccaccgcggaagttcttatcgcgggtgtaaatcaggataccaatacttcggaggttgtcattagattgccagatgaaaatagtaatcatctggtgaaagggagaagtgtttatgaactagattgtataccgctttggggcacggtttccattcaagggaatagatctgagatggaggatgcttttgccgtgtcacctcattttctgaaactacccatcaaaatgcttatgggggaccatgagggtatgagtccaagcctcacacacctcaccggtcattttttcggtgtttatgatggtcatggaggccataaggttgctgactattgccgagatagactccattttgctttggctgaagaaatagaacgtataaaagacgaattatgcaagaggaatacaggagagggtaggcaggtgcagtgggataaagtcttcacgagttgttttctaactgtcgatggtgagattgaaggaaaaattggtagagccgttgttggttcttctgataaggttcttgaggctgttgcgtctgagaccgtaggatcaactgctgttgttgccttggtttgctcatcacatatagtagtttctaactgcggtgattcgagggcggttttattccgtggcaaagaagccatgcccttgtcagttgatcacaaaccagatagagaggatgaatatgcaagaatagaaaatgctggaggcaaagttatacaatggcaaggcgcacgtgtttttggtgttctcgccatgtctaggtccatcggtgacagatatctgaagccatatgtgatcccagaaccggaagtgacattcatgcctcggtcaagagaagacgagtgtctcatactagccagtgacggtctttgggatgtaatgaacaaccaagaagtctgcgaaatagcaaggagacggatattgatgtggcacaagaagaacggtgcaccgcctctagcagagagaggcaaaggaatagatccagcttgccaagccgcagctgactacctctcaatgcttgctctacaaaaaggaagtaaagacaacatctccatcattgtgattgacttgaaagctcaaagaaagttcaagaccagaacctgaagcttaattacaagcagtacgcttacttacttttttttttactgggggtaagtttcggggttttcgtataatttagatccgttaagggtcctaatttccggccaggtttttaccatgtttaattaccccaatatttgttaggaggggggaaaaatttaagggaaaaaaatngnaatccggggnttgggggagggggaggtaaaggcctnaaggcttnaggttaggaggttgttccttgnctattttaaggccatccctttttnnncangggcctgattcggttntttagggggantgggnggaatcttttttttttgggggtttaaaagngnattttaangttngggttgcaaaaatttttnccttnccaaattt

SEQ ID NO: 116776 - DNA, 620 bp, Arabidopsis thaliana
gggatgtaatgaacaaccaagaagtctgcgaaatagcaaggtgacggatattgatgtggcacaagaagaacggtgcaccgcctctagcagagagaggcaaaggaatagatccagcttgccaagccgcagctgactacctctcaatgcttgctctacaaaaaggaagtaaagacaacatctccatcattgtgattgacttgaaagctcaaagaaagttcaagaccagaacctgaagcttaattacaagcagtacgcttacttacttttttttttactgggggtaagtttcgagttttcgtataatttagatcgttaaggatctaatttcgacaggtttttacatgttaattactcaatattgttagaagggagaaaaaataaagaaaaaaaatggaaatgcgggttggggaggagaagtaaagactaaagactgaagattaagaagatgatgcatagctaattataagtccattcctttttttctcatggtacttgaattcgtatgtataagaagaaataggcagagaaatgctttttttttttggggtattgaaatagttgaatatgttgtaatagtttgagagatgtggcaaatgaaattgtaaaagaaactatgtccc

SEQ ID NO: 116777 - DNA, 998 bp, Arabidopsis thaliana
  unsure (1)..(998): unsure at all n locations
nnnnnnnnnnnnnnnnnnnnnnnnnnnnnnnnnnnnnnnnnnnnnnnnnnnnnnnnnnnnnnnnnnnnnnnnnnttctgcttttaattcgcggccgcagttggcatgcatggtcttggcttgcatgattgtggccggtccaatcacagcgaacgcgcttatgagttgtggcaacccgtcaacggcaaccttggcagggtgcattgcctacttgaaccccgaggtgctccacttacccaaagggtgctgcaacggcgttactaaccttaaaaacatggccagtacaaccccagaccgtcagcaagcttgccgttgccttcaatctgccgctaaagccgttggtcccggtattaacactgcccgtgcagctggacttcctagcgcatgctaagtcaatattccttacaaaatcagcgccagcaccaactgcaacaccttgagggtgatgagcgacggttaaaataaacctactatgcggatggtttcgaattatttatttaattcccatgaagattaattccttaaacataaaaggaatggtttccctaactgggccttgggatcccttctcttttcttcacaaatttttcacccctgggcgctctatttatttattttacattcgcgcggggcggccggcgatatacccttaaattacaatttggggggaaacaccggttgctagggtatacccttaatgtgttttccgcgccaacaaaccacaaaccgggttattttttttggaaaaattttttaacgggccgtggcccggtcgaaaaattttttataattatcaaaagcctttaattgaatatccccggtagaacaccttttaaggggtggggcacccgggtaccccaaaatttcggcccctttaatttgaggggtgaattacaaaattaacttggctcgggggttgttacaaccccttctgaaactgtgaaaaaacccttggggtttccccaaatttaattcgccttggaagacaaaacccccttt

SEQ ID NO: 116778 - DNA, 843 bp, Arabidopsis thaliana
  unsure (1)..(843): unsure at all n locations
actcccactnnnnnnnnnnnnnnnnnnnnnnnnnnnnnnngcaagtaccgctccggaattcccgggtcgacccacgcgtccgatccatcacatctcctcttgcaaaccaacgtaaaacactaactaagagatcaatatggctggagtgatgaagttggcatgcatggtcttggcttgcatgattgtggccggtccaatcacagcgaacgcgcttatgagttgtggcaccgtcaacggcaacctggcagggtgcattgcctacttgacccgaggtgctccacttacccaagggtgctgcaacggcgttactaaccttaaaaacatggccagtacaaccccagaccgtcagcaagcttgccgttgccttcaatctgccgctaaagccgttggtcccggtctcaacactgcccgtgcagctggacttcctagcgcatgcaaagtcaatattccttacaaaatcagcgccagcaccaactgcaacaccgtgaggtgatgagcgacggtcaaatgaagctactagcggatgtttcgaatattatataatcgatgagataatattaaataaagatgttcgaatggctgtactcttttcaatttcctgtctttttttatcgtggcgtttctattatgtgatcgtctgtactatgttcgcaaacaacgttctttgaatttcagacttgaagtttaagtgttcaaaaacatagttccctaacttaccttatctcacagagggcggcccgcttttagaggaatccaaagctttacggtaccgcgtgcctttgcgaacggtcataagcttttttttataggtgtcaaccctaaaatttcaattttcacctggcc

SEQ ID NO: 116779 - DNA, 717 bp, Arabidopsis thaliana
  unsure (1)..(717): unsure at all n locations
gcccgaattncccncttagggnaaaaggggnccccccggnggcccttaaantngggcccccnggntcaggatcccgcccgaaacccttcctaggggccaattggctgggtgataaatttggatccatggntttgnttnaatgattgtgnccggncaatcaccagnggacccgcttatgggttgtggcaccgtcaccggcaacctggcagggtgcatgcccctacttgccccccgaggtgctcccacttacccaaagggtgctggcaaccggcgttacttaccccttttaaaaaacatggccagttacaaccccagaccgtcagcaagcttgcccgttgccttcaatctgccgcctaaagccgttggtcccggtctcaacactgcccgtgcagctggacttcctagcgcatgcaaagtcaatattcccttacaaaatcagcgccagcaccaactgcaacaccgtgaggtgatgagcgacggtcaaatgaagctactagcggatgtttcgaatattatataatcgatgagataatattaaataaagatgttcgaatggctgtactcttttcaatttcctgtctttttttatcgtggcgtttctattatgtgatcgtctgtactatgttcgcaaacaacgttctttgaatttcagacttgaagtttaagcggccgcgaattcgatatcaagcttatctataccgtcgagctctagggggg

SEQ ID NO: 116780 - DNA, 788 bp, Arabidopsis thaliana
  unsure (1)..(788): unsure at all n locations
gatntttnnaaggtgnattcccctctagggaaaaagtggncccnccggggggccgtttaaactggggcccccgggttcaggaattccgccncgcctaatcagttgcatgcatggtcttggttgcatgattgtgccgggtcaatcacacggacgcgcttatgagttgtggcaccgtcaccggcaacctggcagggtgcattgcctacttgccccgaggtgctccacttacccaagggtgctgcaacggcgttactaacccttaaaaacatggccagtacaacccccagaccgtcagcaagcttgccgttgccttcaatctgccgctaaagccgttggtcccggtctcaacactgcccgtgcagctggacttcctagcgcatgcaaagtcaatattccttacaaaatcagcgccagcaccaactgcaacaccgtgaggtgatgagcgacggtcaaatgaagctactagcggatgtttcgaatattatataatcgatgagataatattaaataaagatgttcgaatggctgtactcttttcaatttcctgtctttttttatcgtggcgtttctattatgtgatcgtctgtactatgttcgcaaacaacgttctttgaggcccggaatcctgaaccccggggngncnccnaggcctnnanngggcgcaaccngggtgngnnccaacgttttggccccttttngagggggaaatttnaacnttngggaacaangggaaaacnnggnnccnggggaaaattgancccggccaaaatcccnanaaaaaatggggg

SEQ ID NO: 116781 - DNA, 701 bp, Arabidopsis thaliana
  unsure (1)..(701): unsure at all n locations
aaacccccgggggtgccnccccccgntttataagacctntnggngngnccccccccgggggntncagggaatttcccgggccccccgggntttagttnaaggttnnngaattccattgggcctttgnctttccaattggtttgtggccnggttccaattcacagnggaccccggctttantgaggttgtggccacccggtcaacggnaaacccttggcaggggntncatttncctacttggcccccggaggtnctccacttaccccaaggggtgctgcaaccggcggttactacccttaaaaacatggccagtacaacccccaggaccgtcagcaagcttgccgttgccttcaatctgccggctaaagccgttggtcccggtctcaacactgcccgtgcagctggaccttcctagcgcatgcaaagtcaatattccttacaaaatcagcgccagcaccaacctgcaacaccgtgaggtgatgagcgacggtcaaatgaagctactagcggatgtttcgaatattatataatcgatgagataatattaaataaagatgttcgaatggctgtactcttttcaatttcctgtctttttttatcgtggcgtttctattatgtgatcgtctgcactatgttcgcaaacaagcggccgcgaattcgatatcaagcttatcgataccgtcgacctcgagggggggccc

SEQ ID NO: 116782 - DNA, 632 bp, Arabidopsis thaliana
  unsure (1)..(632): unsure at all n locations
gtttgtnaatccncggaatnngnccctaacnagggancaantggctgnagnatgaanttttggcatgcatggtcttggcttgcaatgattgtggccggtccaatcacagcgaacgcgcttatgagttgtggcaccgtcaacggcaacccggcagggtgcattgcctacttgacccgaggtgctccacttacccaagggtgctgcaacggcgttactaaccttaaaaacatggcctacaaccccagaccgtcagcaagcttgccgttgccttcaatctgccgctaaagccgttggtcccggtctcaacactgcccgtgcagctggacttcctagcgcatgcaaagtcaatattccttcaaaatcagcgccagaccaactgcaacaccgtgaggtaatgagcgacggtcaaatgaagctactagcggatgtttcgaatattatataatcgatggggtaatattaaataaagatgttcgaatggctggaccctttcaatttccggccttttttatcggggggtccaataagggatcgccgaccaatgtcgnaaaacgtcttgattcatctgacttaaataaaagngggatccttanccnggggcccaatttangggccncggggggccccttttn

SEQ ID NO: 116783 - DNA, 629 bp, Arabidopsis thaliana
  unsure (1)..(629): unsure at all n locations
gggggggggggaggttgaanncacccctcctctcgcaaaccaacgtttaacactaactaananaacaagatagcgtgaaagtttaagtgtgttggcatccccaaggcttgcatgactgtggccggtcccattcacagcgaacgcgctttatgagttgtggcaccgccaacggcaacctggcagggtgcattgcctacttgacccgaggtgctccacttacccaagggtgccgcaacggcgttactaacccttaaaaaacatggccagtacaaccccagaccgtcagcaagcttgccgctgccgtcaatctgccgctaaagccgttggccccggtctcaacactgcccgtgcagctggacttcctagcgcatgcaaagtcaatattccttacaaaatcagcgccagaccaactgcaacaccgtgagggattgaagcgacggtcaaatgaagctactagccggatgttttcggaataattatataaatncgntngggattaatattaaaataaaagatggttccgaatggngtggaacccttttcnaatttcccngggcntttttttaancggggggggttncaaataaatggggaacggcctggaacaaaggttcggnaaanaacggtct

SEQ ID NO: 116784 - DNA, 1170 bp, Arabidopsis thaliana
cattactttgctcacagctttggaccgcaaaaaaaaaaactcaagagagactttgtggccatggcagcctctctccaatccaccgctacattcctccagtcggcgaagatcgccaccgctccttctcgcggaagttctcacctccgatcgactcaagccgtcggcaaatcttttgggctcgaaacttcctcggctcgcctcacttgctccttccagtctgactttaaggacttcaccggtaaatgctccgacgctgtcaaaatcgccggattcgctcttgccacctctgctctcgtcgtctcgggagcaagtgcggagggagctccaaagagattgacctatgatgagattcagagcaagacatacatggaagtgaaaggaactggaacggctaaccagtgccctactattgacggtggctctgagactttctcgttcaaacccggaaagtatgcaggaaagaagttctgcttcgagcctacttccttcaccgtcaaggcagacagtgtaagcaagaacgctcctccagagttccagaacacaaagctcatgacccgtcttacctacacccttgacgagatcgaaggacccttcgaggttgcttcagacggaagcgtcaatttcaaggaagaagatggaatcgactatgctgcagtcacagtccaacttccaggaggtgaacgtgtgccattccttttcacagtcaaacagcttgacgcctcaggcaaaccagacagcttcaccggaaaattcttggttccatcgtaccgtggctcttccttcttggacccaaagggccgtggtggatccacaggatatgacaacgccgtggcattgccagctggaggcagaggagacgaggaggagcttgtaaaggagaacgtgaagaacactgccgcttcagtgggagagatcactctgaaagtgacaaagagcaagccggagacaggagaggtgatcggagtgttcgagagtcttcagccgtcggatactgacttgggtgctaaggtaccaaaggatgtgaagatccaaggggtgtggtatggtcaacttgagtgatcatgttattatattttccgttgattgtgtttgatgataatgataacatcttttgatgctttcttcgtttatctctcttatataaaatgcacatgcctaagatcttgaatt

SEQ ID NO: 116785 - DNA, 940 bp, Arabidopsis thaliana
  unsure (1)..(940): unsure at all n locations
nnnnnnnnnnnnnnnnnnnnnnnnnnnnnnnnnnnnnnnnnnnnnnnnnnnnnnnnnnnnnnnnnnnnnnnnnnnnnnnnnnnccacgcgtccgcggacaacatattgacatctgagtcttgtcatcatggcaacttctctccaagccgccgcaacttttcttcaaccggcgaagattgccgcttctccttctcgtaatgtccatctccgatcaaaccaaaccgtgggcaagtcctttgggttagactcttcacaagctaggctcacgtgctctctccactctgacctcaaagacttcgctggaaaatgctccgacgccgccaagatcgccggttttgctctagccacctctgctctcgttgtctcgggggccggtgcggagggagcaccaaagaggctaacgtacgacgagatacagagcaagacttacatggaggtaaagggtaccggtacggcaaaccagtgtccaactatcgatggtggctctgagacattctcgttcaaagctggtaagtacacaggcaagaagttctgcttcgagcccacttccttcaccgtcaaggcagatagcgtcagcaagaatgcaccgccggatttccaaaacaccaagctcatgacccgtctcacttacacactcgatgagatcgaaggacccttcgagggtggttcagacggaagcgtgaagttcaaggaagaagatggtatcgattacgcagcagtcacagtccatgcttcgggaggagaacgcgtgccgttcctcttcacgggtaagcagctcgaggcttcagggaaaccccgaagcttcagtggcaagttcttagttccatcgtaccgtggctcgtcctttttgacccanaggtcgtggtggaccactgggtacgatatgagtgctttgctgccggagcaagagacagaaagcttcaggaaacgcagacacgcg

SEQ ID NO: 116786 - DNA, 762 bp, Arabidopsis thaliana
  unsure (1)..(762): unsure at all n locations
gcnnnnnnnnnnnnnnnnnnnnnnnnnnnnnnnnnnnnnnnnncccccggcaggacccggcccggaatacccggttcgacccacgcgtccggcgaaacaaaatctctcctctgattattactactcaacttcgcattatcactcaaacaaacatattgacatctgagtcttgtcatcatggcaacttctctccaagccgccgcaacttttcttcaaccggcgaagattgccgcttctccttctcgtaatgtccatctccgatcaaaccaaaccgtgggcaagtcctttgggttagactcttcacaagctaggctcacgtgctctctccactctgacctcaaagacttcgctggaaaatgctccgacgccgccaagatcgccggttttgctctagccacctctgctctcgttgtctcgggggccggtgcggagggagcaccaaagaggctaacgtacgacgagatacagagcaagacttacatggaggtaaagggtaccggtacggcaaaccagtgtccaactatccgatggttggctctggagacattctcgtttcaaagctgggaaagtacacaggcaagatgttctgcttaggggcccacttccttcaccgtcaaggcagatagcgttagcaaggatgcaccggcggatttcaccaaaaccaaagttattnccggtttatttnaaatngntngancnagggccttnggggttgtttaacggaggtaantaaggaaanttgtttgttgggattaanccntt

SEQ ID NO: 116787 - DNA, 1146 bp, Arabidopsis thaliana
  unsure (1)..(1146): unsure at all n locations
gagaagaagagtattttgttgtgtttgtgataacatgtttatgatttgcatttctatgtatcgaagttggcacttgagaacacctaaaccaataacagactcggatagtataatagaaggagaaaccgctattccaattctgtaatcttcgattcatgtagatacaatcttcttggatcagtgagtttgatttaaaagttgcttgtttctcgtgtaatgaaagggagcaagtgcggagggagctccaaagagattgacctatgatgagattcagagcaagacatacatggaagtgaaaggaactggaacggctaaccagtgccctactatgatggggctctagccattctcgtcaaagctggtagtacacaggcaagaagttctgcttcgagcccacttccttcaccgtcaaggcagatagcgtcagcaagaatgcaccgccggatttcaaaacaccaagctcatgacccgtctcacttacacactcgatgagatcgaaggacccttcgaggttggttcagacggaagcgtgaagttcaaggaagaagatggtatcgattacgcagcagtcacagtccagcttccgggaggagaacgcgtgccgttcctcttcacggttaagcagctcgaggcttcagggaaacccgaaagcttcagtggcaagttcttagttccatcgtaccgtggctcgtcctttttggacccaaagggtcgtggtggatccactgggtacgataatgcagtggctttgcctgccggaggcagaggagacgaggaagagctatccaaggaaaacgtcaagaacacggcggcttccgtcggagagatcactttgaagatcacaaagagcaaaccggagacaggtgaagtgatcggagtgttcgagagtcttcagccatcggatactgacttgggtgctaaggtaccaaaagatgtgaagatccaaggggtttggtacggtcagattgagtgattcatataatttgttacttttgtaaaattgtattgaaacaacttctttctatcaatatatatatatatatattaacgctcgataaaaaaaaaaaaaaaagnnnnnnnnnnnnnnnnnnnnnnnnnnnnnnnnnnnnnnnnnnnnnnnnnnnnnnnnnnnnnnnnntgtcctaa

SEQ ID NO: 116788 - DNA, 533 bp, Arabidopsis thaliana
  unsure (1)..(533): unsure at all n locations
actcaagagagactttgtggccatggcagcctctctccaatccaccgctacattcctccagtcggcgaagatcgccaccgctccttctcgcggaagttctcacctccgatcgactcaagccgtcggcaaatcttttgggctcgaaacttcctcggctcgcctcacttgctccttccagtctgactttaaggacttcaccggtaaatgctccgacgctgtcaaaatcgccggattcgctcttgccacctctgctctcgtcgtctcgggagcaagtgcggagggagctccaaagagattgacctatgatgagattcagagcaaggcatacatggaagtgaaaagggactggaacgggctaaccaagtgccctactattgacccggtggctcttagacttttttggttcaaaccccggaaaggtttcaggaaagaaggttctcctttgggcctatttcctttaccggtaaggcaggcagtttatgaaaggacgttctccgnggtttagacanaaagtatgnccgttncctaacctt

SEQ ID NO: 116789 - DNA, 1083 bp, Arabidopsis thaliana
  unsure (1)..(1083): unsure at all n locations
ggggtctgtctgagtggatttgtatactatattgtgatgagagtcaccacaacaaattcgttgacatgagcctttcatatatttttgaattatactgaactaaaacccatttaaaagcccatttaaagacccattataagagtagagatactcagcccatttaaagataaaattacgtcatagcgatttttccattaaaagagtgaggaagagacaaaagtgattgattggtcagaaaaaatggaagcggcgaagaaacagagtgttacaaatcagcttctcgccgtgaaatcagcttccggcaagacttttagccagttagccgcggagacaggtctaaccaacgtatacgtagctcagcttctccgtcgtcaagctcagctcaaaccggacacagtcccaaagcttaaggaagctttaccagctctgaccgatgaactaatcggagatatgatgtctcctccgtggagatcctatgatcctaatctcatccaagaacccactatctacaggttgaatgaagcagtgatgcattttggtgagagtataaaggagattatcaatgaagattttggagatggcatcatgtcggcgatagatttctattgctctgtcgacaaaatcaaaggagtggatggtaacaatcgcgtggttgtgacgcttgatggaaagtatctttcgcattccgaacagaggacggagaatatggtctcaaggctaaatctcaagggaggtacaagcgaatgataagaaagcctttacgtatccatgaaggccttattgtaagtggtaacgttgtaatacctatgtgtttgtttatctgtaatatatgcaacttcagcatctagattaaaagctgtttcaggttgaataacagtgaataaacaaaacttataaaacctttctatgtttatctttaacatcgtaatcgagttccgattcatgcttaaaaaagattgaataaagtttcaggcactgctatgtaaaaaaaaaaaaaaaaagnnnnnnnnnnnnnnnnnnnnnnnnnnnnnnnnnnnnnnnnnnnnnnnnnnnnnnnnnnnnnnnnnnnnnnnnngataatcg

SEQ ID NO: 116790 - DNA, 648 bp, Arabidopsis thaliana
  unsure (1)..(648): unsure at all n locations
gtcgactgtatcgatatgcttgatatcgaattcgcggccgcatcagcttctcgccgtgaaatcagcttccggcaagacttttagccagttagccgcggagacaggtctaaccaacgtatacgtagctcagcttctccgtcgtcaagctcagctcaaaccggacacagtcccaaagcttaaggaagctttaccagctctgaccgatgaactaatcggagatatgatgtctcctccgtggagatcctatgatcctaatctcatccaagaacccactatctacaggttgaatgaagcagtgatgcattttggtgagagtataaaggagattatcaatgaagattttggagatggcatcatgtcggcgatagatttctattgctctgtcgacaaaatcaaagggagtgggatggtaacaatcgcgtgggttgtgcacgcttgatgggaaagtatctttcgcattcccnacagaaggccggggaataatgggccccaagggtaaaccccaagggggggccaaagcggttggtaagaagccttttccgaacccaggaggccttatttggaaggggancggtggaaacccatggggttggttacccgaaaaattggactccggccctgttaaaagggcgggatttgnnggggana

SEQ ID NO: 116791 - DNA, 788 bp, Arabidopsis thaliana
gcgcctaatcacaaacacacacaaatctctgaagtaaaatgacgttcccttctctttctgtctcatttctcttctttgccttcatattcgttacgcatgcattcgacctcagcatcatccagatgcaacagggaacatgtccgtacacggtggttgtcatgacaagctgtctttctccggagtcgacaagagatcagatcagcattgtttttggcgatgccgacggtaacaaggtgtatgcaccgaaactagggggtttggtaagaggaccagggggtttggggaagtgttcaacgaacacattccaagtcagaggtcaatgtttgaatgaccctatctgctctctctatatcaaccggaatggacccgacggttgggtcccggagtccattgagatctactcagaaggttcaaagtccgttaaattcgatttcagcaagagcgtccctcaactaaacacttggtacggccacaacaactgcaacaccacaggcagaccatcgtctcccgatctgcctccaccgcattttccgccagagtttccaccggagacacctaccaccccaccgccgcctccaccaaggccgtctgctgcttcaaggcttggaaatggtgagagtgttttccttgcgtttgccattgcgactgcgattgccgcaatggtgcgttgggttactagcatggtacttgaagagcatgtagttgggttgtatgaagctttttctttccgtcgaatgtttctatttgctttcgttttgcttcagcctttttctttgtgagaaaacata

SEQ ID NO: 116792 - DNA, 369 bp, Arabidopsis thaliana
gtgaacatgtccttacacggtttttgtcatgtcaagctgtctttctccggggtcctcgggagatcagatcatcattgtttttggcgatgccgacggtaacaaggttaagtaactagattgttgtgtatatagttccagttaagtcgacatcttatttgctttaaagtggtttagataccttgcatgtgtgctcagtgcaagtaactttatagtgatttaaataaaaatgttaaatatctctgttgttttaggtgtatgcaccgaaactagggggtttggtaagaggaccagggggtttggggaagtgttcaacgaacacattccaagtcagaggtcaatgttttgatgaccctatctgctctctctata

SEQ ID NO: 116793 - DNA, 589 bp, Arabidopsis thaliana
ttccctcaataaaccaaataagctaagtgttttgtgtaacgaaaacaaaaaatgggaaacctcatgtctctcgttctcgtggctttgctcttttctctctcccttgctgttattgcggacacatccaacgatgccacacatgttaaagaagaagtgaagccgagtactgaagcaactgatgctatagaagccgaagtcgaggtcaatgacgctgttgtagagccccagcaaggcttgcctggtggtggttgtaggttcggatgttgcggtgggtactggtggaatggactgtgcatatactgttgccgcagtcaagccgaggccaacgaagttgtaaaaactgttgagcctcagaaggaagaagctaagccatgatttcgcatgtaacacaaactctatatgtttgtatgcatgcagtggtcaattaccgtatgtatgtataaataaaagaagcatggtgcctaagtaagtaagatacctagaggagctcaatagaaagaaaccaaaggttcattaatggtttttggttatgaggtgttttctcgtggatgttataaataataactgttttaatattaatattttgttc

SEQ ID NO: 116794 - DNA, 2100 bp, Arabidopsis thaliana
  unsure (1)..(2100): unsure at all n locations
nnnnnnnnnnnnnnnnnnnnnnnnnnnnnnnnnnnnnnnnnnnnnnnnnnnnnnnnnnnnnnnnnnnnnnnnnnngaccacgcccacgcgtccggtcattcaacaacttggcttttatctaataaagcccctccctctccgataaaccttaaataaaaccggagggagagcaaaaaataaaaacaaaaatatacaaaaacaaaaacaaaaaatcataaaaaatgattggaaaagttgtggtctcggtggcctccatcctcttaatagttggagttgccataggagtcgttgcctacataaacaaaaatggtgatgctaatctgtctccccaaatgaaagcggtccgaggaatttgcgaggcgacttccgacaaagcctcatgtgtcaaaactctcgagccggtcaagagcgatgacccaaacaagctgatcaaggctttcatgctcgctaccagagatgctataacccaatcatcaaacttcacgggtaaaaccgaaggaaacttgggttcgggcatctcgccaaacaacaaagccgttcttgattactgcaagaaagttttcatgtacgcgcttgaggatctcagcaccattgttgaggaaatgggtgaagatcttaaccagatcgggagcaaaatcgaccagcttaaacaatggttaaccggtgtttacaattaccaaactgattgtcttgacgatatcgaagaagatgatttaagaaaggcgattggtgagggcattgcaaactccaagattctcactaccaacgctattgacatcttccacactgtcgttagcgccatggccaagattaacaacaaggttgacgacttgaagaacatgacaggcggaatccccactcccggagcccctcctgttgttgatgaatctcccgtggccgacccagatggtcctgctcgtcgtcttcttgaagacattgacgagaccggaatcccaacatgggtttcaggtgctgacaggaagctcatggctaaggctggacgtggccgtagaggcggccgcggaggcggtgctagggtcagaacgaactttgtggtggctaaggatggaagcggacagtttaagacggttcaacaagccgttgatgcttgtcctgagaataaccgaggccgatgcatcatctacatcaaggccggtctctacagagagcaagtaatcatccctaagaagaagaacaacatcttcatgtttggagatggtgcaagaaagaccgtcatttcttacaacagaagtgttgctctcagccgtggaaccaccacatccctcagtgccacagttgaatcggaaggattcatggcgaaatggatgggattcaagaacaccgccggtccaatgggacaccaagccgcggctatccgagtgaacggagaccgtgccgtgatcttcaactgcagattcgacggttatcaagacacattgtacgttaacaacggtcgtcagttctacagaaactgtgtggtctcgggaacagtagacttcatcttcggcaaatccgcaaccgtgatccaaaacacactaattgttgtccgtaaaggaagcaagggacaattcaacacggtcacagccgatggaaacgaaaagggtctagcgatgaaaatcggtatcgtcctccaaaactgtcgcatcgttcccgacaagaaactagcggcagagagattaatcgtggagtcatacttgggaaggccatggaagaaattctctaccaccgtgattatcaactccgagataggagatgtgattagaccagaaggttggaagatttgggatggggaaagtttccacaagtcatgtaggtacgttgagtacaacaaccgtggaccaggagctatcactaaccgaagagttaactgggttaagatcgccaggtctgcagctgaggtcaatgacttcactgttgctaactggttaggtcctattaactggattcaagaagccaatgttcccgtcacgcttggattataaggcgtataaatcaaatcaaatcaaatcaaaaaaaaaaaaaaaggggcgaacaannnnnnnnnnnnnnnnnnnnnnnnnnnnnnnnnnnnnnnnnnnnnnnnnnnnnnntcgtcctaaa

SEQ ID NO: 116795 - DNA, 807 bp, Arabidopsis thaliana
cagctacatacgactccattagggaaagctcgtacgcctgcaggtaccggtccggaattcccgggtcgacccacgcgtccggaacatgacaggcggaatcttcgctccttcagacaaaggagcagctcccgtcaacaaaggaacccctcctgttgctgatgattctcccgtggccgatccagatggtcctgctcgccgtcttcttgaagacattgacgagaccggaatcccaacatgggtttcaggtgctgacaggaagctcatgactaaggctggacgtggcagtaatgacggtggtgctaggatcagagcaacctttgtggtggctaaggacggaagtggacagtttaagactgttcaacaagccgttaatgcttgtcctgagaaaaacccaggccgttgcatcatccacatcaaggctggtatctacagagagcaagtgatcatccctaagaagaagaacaacatcttcatgttcggagatggtgcaagaaagaccgtcatttcttacaacagaagtgttaaactcagccctggaaccaccacttcccttagtggcacagtccgtaagtctcaccaaaccctaattcactagttaggttaacaaatatttttctctacatatatagctcatgttatatattattgcgcagaggttgagtccgaaggattcatggcaaaatggatcggattcaagaacaccgccggtccaatgggacaccaagctgtggctatcagagtgaacggagaccgtgccgtgatcttcaactgcaggttcgacggttaccaagacaccttgtacgtcaa

SEQ ID NO: 116796 - DNA, 792 bp, Arabidopsis thaliana
  unsure (1)..(792): unsure at all n locations
attnggaanccnaccgntccaacnccccnttttcccntaggnaccagggccattcacccggtcncncccgtgnaccgaaagggtctngccgtgaaatcggtttcgcccncccaaactntcgcatcgttccccgncaagaaacttgcggcagagggattaatcgtggagtcatacttgggaaggcccatggaagaaattctctacccaccgtgattatccaactccgagataggagatgtgattagaccagaaggttggaagatttgggatgcggaaagtttccacaagtcatgtaggtacgttgagtacaacaaccgtggaccaggagctttcgctaacagaagagttaactgggctaaggttgccagggtctgcagctgaggtcaatggcttcacagttgctaactggttaggtcctattaactggattcaagaagccaatgttcctgtcacaattggattataatttataaagcgtatatgaaaattattttagtttttaagtatatcacaattggtgtatgaaattggtttatgaaaactttttaagaaagtctataatgtttttcctctgctaacttgcttcatctaattaaggtcacattgcaatgcagccaagtactcatgttgctttattataagctccttcttcctgcaaaaaaaaccaaaaaaaaaacaaagggcagcctgctcgcgatcgcacgcgtggnnnnnnnnnnnnnnnnnnnnnnnnnnnnnnnnnnnnnnnnnnnnnnnnnnnnnnnnnnnnnnnnnnnnnnnnnnnaggatcat

SEQ ID NO: 116797 - DNA, 477 bp, Arabidopsis thaliana
aaggcgggccccccggcgggacccggcccggatttccgggtttgacccaggcgtccgtttaatctaataaagcctctccctctccgattaaccttaataaatccggagggatcggaaagaaaaaagaaccaaaaaaaaaaaaaaaacagaaaaaaaaaaatgattggaaaagttgtggtctcggtggcctccatcctcttaatagtcggagttgccataggagtcgttgccttcataaacaaaaatggcgatgctaatctgtctccccaaatgaaagcggttcaaggaatttgccagtcgacatccgacaaagcctcatgtgtcaaaactctcgagccggtcaagagcgaggacccaacaagctgatcaaggctttcatgctcgctacaaaagacgaattaaccaaatcgtctaacttcacgggtcaaaccgaagtaaacatgggctcgagcatcttggcaaaaaacaaagccgttc

SEQ ID NO: 116798 - DNA, 945 bp, Arabidopsis thaliana
  unsure (1)..(945): unsure at all n locations
cggtccggatttccgggtcgacccacgcgtccgaacatatgcatgtgcggagatggtgcaaaaaaaaccgtcttttcttacaacagaagtgttaaactcagccctggaaccaccacttcccttagtggcacagtccaggttgagtccgaaggattcttggcaaaatggatcggattcaagaacaccggcggtccaatgggacaccaagctgtggctatcagagtgaacggagaccgagccgtgatcttcaactgcaggttcgacggttaccaagacaccttgtacgtcaacaatggtcgtcagttctacagaaacattgtcgtgtcatgaacagtcgacttcatcttcggcaaatccggaaccgtgatccaaaactcactcattggtgtccgtaaaggaaacaagggacatttcaacacggtcacagccgatggaaacgaaaagggtctagcgatgaaaatcggtatcgtcctccaaaactgtcgcatcgttcccgacaagaaactagcggcagagagattaatcgtggagtcatacttgggaaggcccatggaagaaattctcttcccaccgggattatccaactcccagattggagatgtgattaagcccagaacgctggaagattttgggatgggaaagtttcccccagttaaggagggtcgtttaagtccaccacccttggcccggagcttttccttacccaaaaagttaattgggttaggttccccggttctccacctaaggccaatgacttccctgttcctacctggttaggtcctattacttgaattcaagaacccaatgttcccttcacgcttggataataaggcgtataattcaaatcaaatcaaatcaaaaaaaaaaaaaaaggccgcnnnnnnnnnnnnnnnnnnnnnnnnnnnnnnnnnnnnnnnnnnnnnnnnnnnnnnnnnnnnnnnnnnn

SEQ ID NO: 116799 - DNA, 672 bp, Arabidopsis thaliana
  unsure (1)..(672): unsure at all n locations
tctaatacngactcatctatangggaaacgctggtancgcctgcaggtacccggtccggaattcccgggtcgacccacgcgtccgcaatcatcaaacttcacgggtaaaaccgaaggaaacttgggttcggcatctcgcaaacaacaaagccgttcttgattactgcaagaaagttttcatgtacgcgcttgaggatctcagcaccattgttgaggaaatgggtgaagatcttaaccagatcgggagcaaaatcgaccagcttaaacaatggttaaccggtgtttacaattaccaaactgattgtcttgacgatatcgaagaagatgatttaagaaagactattggagagggcattgcaagctccaagattctcactagcaacgctattgacatcttccacactgtcgttagcgccatggccaagcttaacttgaaggtcgaggacttcaagaacatgacaggcggaatcttcgctccttcagacaaaggagcagctcccgtcaacaaaggaacccctcctgttgctgatgattctcccgtggccgatccagatggtcctgctcgccgtcttcttgaagacattgacgagaccgggatcccaacatgggtttcaggtgctgacaggaagctcatgactaaggctggacgtggcagtaatgacggtggtgcta

SEQ ID NO: 116800 - DNA, 865 bp, Arabidopsis thaliana
  unsure (1)..(865): unsure at all n locations
ttaggtgacactactagaagactatgacgtcgcacgcacgcgtacgtaagcttggatcctctagagcggtcgcggaggcggtgctagggtcagaacgaactttgtggtggctaaagatggaagcggacagtttaagacggttcaacaagccgttgatgcttgtcctgagaataaccgaggccgatgcatcatctacatcaaggccggtctctacagagagcaagtaatcatccctaagaagaagaacaacatcttcatgtttggagatggtgcaagaaagaccgtcatttcttacaacagaagtgttgctctcagccctggaaccaccacttccctcagtgccacagtccaggttgagtccgaaggattcatggcgaaatggatcggattcaagaacaccgccggtccaatgggacaccaagccggggctatccgagtgaacggagaccgtgccgtgatcttcaactgcaggttcgacggttaccaagacaccttgtacgtcaacaacggtcgtcagttctacagaaacattgtcgtgtcaggaacagtcgacttcatcttcggcaaatccgcaaccgtgatccaaaactcactcattgttgtccgtaaagggaacaagggccaattcaacacggtcacaggccgatgggaacgnaaaggggtctngcgntgaaaatcggtatcgtcctccaaaactntcggattcgttnccggcaaggaacttgcggcagannggttaatcgtggggtatctttggaggccctggagaattntttcccccgngttttaactccgggtggnntttnttgccnaaggttgaggtttggttgggagttccaagnattgncgtggtacacctggcnnc

SEQ ID NO: 116801 - DNA, 2439 bp, Arabidopsis thaliana
  unsure (1)..(2439): unsure at all n locations
atgaaggtgcaggagggtttgttcttggtggctattttcttctcccttgcgtgtacgcagctggtgaaggggcaacatcaacctggtgagaattgccaaaataaatgtggcaacatcacaatagagtacccttttggcatttcttcaggttgttactatcccggaaatgaaagtttcagtatcacctgtaaggaagataggccacatgtcttaagcgacattgaagtggcaaactttaatcacagcggccagctacaagttctgcttaatcgatcctctacttgctacgacgagcaaggaaaaaaaactgaggaggacagttcttttacactggaaaatttatctcttttccgccaacaacaagttaactgcagtaggctgtaacgctttatcacttctggacacttttggaatgcaaaactactcaactgcatgcttgtcattatgcgattctcccccagaggctgatggagaatgtaatggtagaggttgctgcagagtcgacgtttctgccccgttggatagctatacattcgaaactacatcaggtcgcatcaagcacatgacttcttttcacgactttagtccttgcacctacgcttttctcgttgaagatgataagttcaacttcagttctacagaagatcttctgaatctgcgaaatgtcatgaggttccctgtgttactagattggtctgttggaaatcagacatgcgagcaagttggaagcacaagcatatgcggtgggaacagcacttgtctcgattctactcctagaaacgggtatatctgcagatgcaatgaaggctttgatgggaatccatacctttcagctggttgccaagacgtcaatgagtgtactactagtagtactatccatagacataactgttcggatcccaaaacctgtagaaacaaggttggaggcttctattgtaagtgtcaatctggttaccgcttagataccaccactatgagctgcaagcgtaaagagtttgcatggactacaattcttcttgtaaccaccatcggcttcttggtcattctgcttggcgttgcctgtatacaacagagaatgaagcacctgaaggacaccaagctccgagaacaattcttcgagcaaaatggtggcggcatgttgacacaacgactctcaggagcagggccgtcaaatgttgatgtcaaaatctttactgaggatggcatgaagaaagcaacaaatggttatgctgagagcaggatcctgggtcagggtggccaaggaacagtgtacaaagggatattgccggacaactccatagttgctataaagaaagcccgacttggagacagtagccaagtagagcagttcatcaatgaagtgctcgtgctttcacaaatcaaccataggaacgtagtcaagctcttgggctgctgtctagagactgaagttcccttgttggtctatgagttcatcaccaatggcacccttttcgatcacttgcatggttccatgattgattcttcgcttacatgggaacaccgtctgaagatagcaatagaagtcgctggaactcttgcatatcttcactcctctgcttctattccaatcatccatcgggatatcaaaactgcaaatattcttctggatgtaaacttaactgcaaaagtagctgactttggtgcttcaaggctgataccaatggataaagaagagctcgaaactatggtgcaaggcactctaggttacctagacccagaatattacaacacagggttgttaaacgaaaagagcgatgtttatagttttggggtcgtcctaatggaactgctctcaggtcaaaaggcattgtgctttaaacggccacagtcctcaaaacatctggtgagttactttgcgactgccacaaaagagaataggttggatgagattattggcggcgaagtgatgaacgaggataatctgaaggagatccaggaagctgcaagaattgctgcagagtgtacaaggctaatgggagaggaaaggccaaggatgaaagaagtagctgcaaagctagaagccttgagggtcgaaaaaaccaaacataagtggtcggatcagtaccctgaggagaatgaacacttgattggtggtcacatcttgtcagcacaaggcgaaaccagtagcagcattggctatgacagcatcaagaatgtagcaatattggacattgaaactggccgctgatattaatgctctgacaaattcacatgtatttcttttgtttgtaagaaaaagaaagccacctccttgttgcttcatcaataatgctttgcctcatttgtttgtacatcatcaataatcatgttcatattttccttaaaaaaaaaaaaaaaaaagnnnnnnnnnnnnnnnnnnnnnnnnnnnnnnnnnnnnnnnnnnnnnnnnnnnnnnnnnnnnnnnnnnnnnnnnnnnnn

SEQ ID NO: 116802 - DNA, 2430 bp, Arabidopsis thaliana
  unsure (1)..(2430): unsure at all n locations
atgaaagtgcagcgtctgttcttagtagctattttctgcctctcttatatgcagctggtcaaggggcaaaccttgcctcgttgccccgaaaaatgtggcaacgttacacttgagtacccttttggcttttctccaggttgttggcgtgccgaagatcctagtttcaatctcagttgtgtgaacgagaatctattctataagggccttgaagtggtcgaaatatctcacagcagccagttacgcgtcctatatcctgcatcctacatttgctacaacagcaaaggaaagttcgctaaagggacttactactggagtaatctaggtaatttgactctctccggcaacaacacgattactgcattaggctgtaactcgtacgcttttgtgtcctctaatggaactcgaagaaactcagttggatgcatatcagcatgtgatgctctttcccatgaagcaaatggagaatgtaatggtgaaggctgctgccagaaccccgtccctgcagggaacaattggttaatagtcagatcatatcgctttgacaacgacacgtcagtgcaacctatctctgagggtcaatgcatctacgcctttctcgttgaaaatggcaagtttaagtacaatgcttcggacaaatattcttatctgcagaatangaatgtggggtttcctgtggtcttggattggtctattaggggagagacatgtgggcaagttggagaaaagaaatgcggtgtgaatggcatatgttccaattctgctagtgggatcgggtatacatgcaaatgcaaaggaggtttccaggggaatccatatcttcaaaacggttgccaagacatcaatgagtgtactactgctaatcctatccataaacataactgctcgggtgacagcacctgtgaaaacaagttgggacacttccgttgtaattgtcgatctcgttacgaattaaataccaccactaatacctgcaaacctaaaggcaatcctgaatacgttgaatggactacaattgttcttggaaccactatcggcttcttggtcattctgcttgccattagctgtatagaacataaaatgaagaacaccaaggacaccgagctccgacaacaattcttcgagcaaaatggtggcggcatgttgatgcagcgactctcaggagcagggccatcaaatgttgatgtcaaaatcttcactgaggaaggaatgaaggaagcaactgatggttatgatgagaacagaatcttgggccanggaggccaaggaacagtctacaaaggtatattaccggacaactccatagttgctataaagaaagctcggcttggagacaatagccaagtagagcagttcatcaatgaagtgcttgtgctttcacaaatcaaccataggaacgtggtcaagctcttgggctgctgtctagagactgaagttcccttgttggtctatgagttcatttccagtgggacccttttcgatcacttacacggttctatgtttgattcttctctaacatgggaacatcgtttgagaatggctgtagaaatagctggaactcttgcttatcttcactcctctgcttctataccaatcatccatcgcgatatcaaaactgcaaatattcttctggatgaaaacttaactgcaaaagtagctgactttggtgcttcaaggctgataccaatggataaagaagacctcgcaactatggtgcaaggaactctaggttacctagacccagaatattacaacacagggttgctaaacgaaaagagcgatgtttatagctttggggtagtcctaatggaactgttatcaggtcaaaaggcattgtgctttgaaaggccacagacttcaaaacatatagtgagttactttgcctcagccacgaaagagaataggttgcacgagattattgatggccaagtgatgaacgagaataatcagagggagatccagaaagctgcaagaattgctgttgagtgtacaagattgacgggagaagaaaggccagggatgaaggaagtagctgcagagcttgaggccttgagagtcacaaaaaccaaacataagtggtcagatgagtatcctgaacaggaggatactgagcacttggttggtgttcaaaaattatcagcacaaggcgaaaccagcagcagcattggctatgatagtatcaggaatgtagcaatactggacattgaagcaggccgctgatatctccatccaactctcactgttggccacattccgttcgatatgatcaggtttcttcccgcatcatactcatagtaaacatgtaatagaaccctgtaaataaaaaagataataagctaaagctttagacattcatgtctcgccagatcgtcaatcgccgtgtttgaaaactcttcttatagatagatatactgtaaccttattaccgcagga

SEQ ID NO: 116803 - DNA, 965 bp, Arabidopsis thaliana
  unsure (1)..(965): unsure at all n locations
actcactatagggaaancagtacgcctgcaggtaccggtccggaattcccgggtcgaccccgaaaaaacataaaatctgttcttcttcttcggctgagagacaatggcggaggagcaaaagacgagtaaggttgacgtagaatctccggctgttttagctccggcgaaggaaccgactcctgctccggtggaagtcgcggatgagaaaattcataatccacctcccgtcgagtccaaagctcttgccgttgtagaaaaacccatcgaggagcatacacctaagaaagcttcatctggttcggccgatagagatgtgatacttgccgacttggaaaaagagaagaaaacgtcattcatcaaagcatgggaagagagtgagaagtcaaaggctgagaacagggcacaaaagaagatctctgatgtgcatgcttgggaaaatagcaagaaagcagccgtagaagctcaacttaggaagatcgaggaaaaattagagaagaaaaaagcgcagtacggtgagaaaatgaagaacaaagtagctgcaatccacaagttagcagaagagaagagagcaatggttgaagctaaaaaaggagaagagcttctcaaagctgaagaaatgggtgctaagtatagagccactggtgtagtaccaaaggcaacgtgtggatgtttctaagcctttattgaatttgtatctttgtaacaattcatctctgtttctttcttcttcttttgtttttgtgtgattcaacaactctttttagtttttgttatttgtttggtcgtttgtgtcttgtttacatattgggtgattgtgtgtaaaagtgaaagattaatggagtataattgtatggagcctccnnnnnnnnnnnnnnnnnnnnnnnnnnnnnnnnnnnnnnnnnnnnnnnnnnnnnnnnnnnnnnnnnnnnnnnnnnnnnnnnnnnnnnnnnnnnnnnnnnnnnnnn

SEQ ID NO: 116804 - DNA, 492 bp, Arabidopsis thaliana
  unsure (1)..(492): unsure at all n locations
anccnaacnccttggtcacggngatgccanaccttaaccnggantgcgnatccaccccnggtcattgcggcncgnggaaggtggacacccctgacttggatgggaacctccaagtacttagccactggctgtgccaatggtacagtgagcatttgggacagcttattaggccaactgcgtccataccctaccatggtccacccaaggatgcggtccaggccatctcagtctctacccaacacggacttcattgtttcggtatctgtcgataacactgctagagtctttgagtcatctgagttccaaaacaaagtgacataggcaagtgaggagaatacttgcagatactatccagacatgttgctatctgtgttcgttgttgtggtcttaattctatgctttgtgggggaaaattttgacaagaaagttatcaatgtctaaaattccatatgtacacggcttaatttattgataaatgtagtctctgtttgg

SEQ ID NO: 116805 - DNA, 372 bp, Arabidopsis thaliana
gaataatctagcgatggaagaagaggatgaaggagagattttccttggtgaatccgatgtcctccgtgaaatcgatgtcgacgaagaagatcttcctgaagcagatgatgatgatatggacgatgatggtgaacaatttgatgaaaacgatgactctgttcacacattcactggtcacaaaggtgagctttatgcattggcttgtagtccaacagatgctacacttgttgcaactggaggtggagatgataaagcatttctctggaaaattggtaatggagattgggctgctgagcttcctggtcacaaggactctgtctcttgtttagcttttagctatgatggacagttacttgcttctggaggattaga

SEQ ID NO: 116806 - DNA, 770 bp, Arabidopsis thaliana
gcttgttgcaccgtcttccgtctcctcctctttccctctctctctctctccaaaccagtcctacttctctctctagaaacctagggaagaagaagaagacggtgaagcgagcgatgtcttcggacgacgaaggaagagaggagtatctcttcaagattgttgttatcggcgactctgccgtcggtaaatctaatcttctatctcgttacgcacgtaacgagttcagcgctaactccaaggcgacgatcggagtcgagtttcagacgcagagcatggagattgaaggtaaagaggtcaaggctcagatttgggacactgctggtcaggagcgtttccgtgccgtcacttccgcttattaccgtggcgctgtcggtgccctcgtcgtttacgacattacccgccgcaccactttcgaaagcgttggacgttggctcgatgagcttaagatccattcggatacgacggtggcgagaatgctggtggggaacaagtgtgatctagaaaacataagagcagtgagcgtggaggaaggaaaggctctagccgaagaggaaggactcttctttgtggaaacatcggctcttgattcgactaatgttaaaacagctttcgagatggtgatacttgatatctacaataacgtgagccgtaagcaactcaactcagatacttataaagacgaactcaccgtgaatcgggtaagtcttgttaaggatgataactctgcctccaaacaaagctctggtttctcttgttgttcttccacttga

SEQ ID NO: 116807 - DNA, 1514 bp, Arabidopsis thaliana
atggctaattcctcaatcgtagctcttcttcttctctttgttatcgctagttccgtcaatggaggagatcaagagtatccaaatcaatatctaacagaagctttaggtgataaagaatggttagtgtctgtaagaagacaaatccatgaaaacccagaactccttttcgagttacataaaacaagtgctctgattcgtcgcgagcttgatgaattaggggtttcttattcttacccggttgcgaaaaccgggatcgtagctcaaatcggatccggttatcctccggttgttgctctccgtgctgatatggatgctcttcccttacaagaacttgttgagtgggatcataagagcaaaatcgatggaaaaatgcatgcttgtggtcatgattctcataccactatgctccttggtgctgctaaattgcttagcaaacgcaaacgtatgctcaatggaacagtgaggcttctttttcaaccagcagaagaaggtggtgcaggtgcttttcatatgataaaagaaggtgctttgggtgattctgaagcaatatttgggatgcatgttcatactggcttacctacaggagaattagcaacaatctcgggtcctgctttggcatccacaagcattttcagtgtaagaatgagtggtaaatcacccgcttcttcggagacctattcttgtgttgatccggtgttggctgcatcatctaccatcttagcattgcaacttattatctccagagaagtagatcctctcttaagccatgtgctctctgttacatttatgaaaagtggcggttctgagtttgatgtgattccggcatatgtagaatttgggggaactttgaggagtcttacaaccaatggcatcaactggttgataaagcggttgaaagaggtggttgaaggacaagctgaagtacaaagatgcaaagcggatatagatatgcatgaagacgatcatcctatgtatccagcaacagtgaacgatcacaagctacacgaattcactgaaaaggttttgaaactcttgcttggacccgagaaggtgaaaccggctaacaaggtaatggcgggtgaggattttgctttctatcaacaaaaaatacccggttactacataggaatcggtataagaaacgaagaaatcggttctgtgcgttcggttcattcgccttatttcttcctcgacgagaatgtgcttcccattggatcagcaacgtttgctgccttagctgaaatgtatctacaagagcatcagaatcaaactaagtctggagattgagaaagttactaaaccaaagcttagttaattgccttcacaagtaaatgctattgtttttataaaatgcaatttttacaacttcaagaaatcaagttgtatattataaaaattgtaagtaatgggtctctgtctcatatggtaggtgcagatgtctgagtctgagacacccaaagcgatgtcgtttagtttcgagatatcgcccaaaaaaaatctggtgaatttttatg

SEQ ID NO: 116808 - DNA, 1044 bp, Arabidopsis thaliana
cttccgttgcttttttttttcaatccgccgccacttttcgtttctcgtagcgttaaaatggcggtatcgtacaatgcattagctcagtctttagcgagaagtagctgcttcatccccaaaccttattcctttagagatactaagctgagaagcagatccaatgtcgtattcgcgtgcaatgataataagaacattgctcttcaagctaaggtagataacttgttggaccgcattaaatgggatgacaaaggattagctgtggcaatagcacaaaacgttgatacgggagcagtattgatgcaaggctttgttaatagggaggccctctccacaaccatcagttctcggaaagctacattctttagtcgatcaagatctaccttatggactaagggagagacatccaataacttcatcaatattcttgatgtgtatgttgattgtgatcgtgattcgattatttaccttggaacacctgatggacctacctgtcacacaggggaagagacttgttactacacatcggtttttgatcaattaaacaatgatgaggcttcaggaaacaagctagcattaacaacattgtactcgctagaatcaatcatttccaagcggaaagaagaatcaacagttcctcaagaaggtaaaccatcatggactcgacggttgttgacggatgacgctctgctttgctcaaagatcagggaagaagctgacgagttatgcagaacactggaggataatgaggaagtttcaagaacaccatcagagatggctgatgttttataccacgcaatggtgcttctatctaaaaggggtgtgaagatggaagatgttcttgaagttcttaggaaacgcttctctcaatctggaatcgaggagaagcaaaaccgtacaaagtaaccattttcttcgattgtctgtttagtatttgcgagaatttttttagttactcggaacttatactgttgttcattgtgcaactttgtattgtataaatagatatcctttgtgataaaagaaataaatgagtcctttttccat

SEQ ID NO: 116809 - DNA, 954 bp, Arabidopsis thaliana
accaaattcatcatctttctttcttcttcttcctcatcctctcaatcatatctcgctctctcacagagattgtgacttcacgcacacgtaacctaaatcgaaagatggtgagaaaatatagaaaagctaaaggaattgtagaagctggagtttcgtcaacgtatatgcagctacggagccggagaattgtttatgttagatcggaaaaatcaagctctgtctccgtcgtcggtgataatggagtttcgtcgtcttgtagtggaagcaatgaatataagaagaaagaattaatacatctggaggaggaagataaagatggtgacactgaaacgtcgacgtatcgacggggtacgaagaggaagctttttgaaaatctgagagaggaggagaaagaagaattaagtaaatccatggagaattattcatcggaatttgaatcggcggttaaagaatcgttagattgttgttgtagcgggaggaaaacgatggaggagacggtgacggcggaggaggaggagaaggcgaaattgatgacggagatgccaacggaatcggaaattgaagatttttttgtggaagctgagaaacaactcaaagaaaaattcaagaagaagtacaatttcgatttcgagaaggagaagccattagaaggacgttacgaatgggtaaagttagagtgaagaagaagaagaagtttatggttttttttttaactttttagattttaatatttcagggaataagttaattttattttgttgatttggaaatataagatttgtaggaggaatgtttttagaagtacgaaattgcacagaaaaagaagaaagctttttaacagattttagagcccagaaaagtcgtgtcttttagctctacttttacctcttcttcgaatcttgtgtatcttttagcatattctttagtacatttttatgtttttggtgactgata

SEQ ID NO: 116810 - DNA, 511 bp, Arabidopsis thaliana
atctctctctctcacagagattgtgacttcacgcacacgtaacctaattcgaagatggtgagaaaatatagaaaagctaaaggaattgtagaagctggagtttcgtcaacgtatatgcagctacggagccggagaattgtttatgttagatcggaaaaatcaagctctgtctccgtcgtcggtgataatggagtttcatcgtcttgtagtgggagcaatgaatataagaagaaagaattaatacatctggaggaggaagataaagatggtgacactgaaacgtcgacgtatcgacggtgagtgttaaaaaaaaaactgaaaatgatttgaattttgaaggttttattattttcccggtaatttatttgactctctcttcaataaatttagaatcttgcttgtgagttattttaggggtacgaagaggaagctttttgaaaatctgagagaggaggagaaagaagaattaagtaaatccatggagaattattcatcggaatttgaatcggcg

SEQ ID NO: 116811 - DNA, 2054 bp, Arabidopsis thaliana
caacacaactccttataagacatacacttcatcaacctatagatctcactcacataatcaacctacaaaacaaaaacaagaatgggtagatccaacgagcaagatctgctctctaccgagatcgttaatcgtgggatcgaaccatccggtcctaacgccggctcaccaacgttctcggttagggtcaggagacgtttgcctgattttcttcagtcggtgaacttgaagtacgtgaaacttggttaccactacctcataaaccatgcggtttatttggcgaccataccggttcttgtgctggtttttagtgctgaggttgggagtttaagcagagaagagatttggaagaagctttgggactatgatcttgcaactgttatcggattcttcggtgtctttgttttaaccgcttgtgtctacttcatgtctcgtcctcgctctgtttatcttattgatttcgcttgttacaagccctccgatgaacacaaggtgacaaaagaagagttcatagaactagcgagaaaatcagggaagttcgacgaagagacactcggtttcaagaagaggatcttacaagcctcaggcataggcgacgagacatacgtcccaagatccatctcttcatcagaaaacataacaacgatgaaagaaggtcgtgaagaagcctctacagtgatctttggagcactagacgaactcttcgagaagacacgtgtaaaacctaaagacgttggtgtccttgtggttaactgtagcattttcaacccgacaccgtcgttgtccgcaatggtgataaaccattacaagatgagagggaacatacttagttacaaccttggagggatgggatgttcggctggaatcatagctattgatcttgctcgtgacatgcttcagtctaaccctaatagttatgctgttgttgtgagtactgagatggttgggtataattggtacgtgggaagtgacaagtcaatggttatacctaattgtttctttaggatgggttgttctgccgttatgctctctaaccgtcgtcgtgactttcgccatgctaagtaccgtctcgagcacattgtccgaactcataaggctgctgacgaccgtagcttcaggagtgtgtaccaggaagaagatgaacaaggattcaaggggttgaagataagtagagacttaatggaagttggaggtgaagctctcaagacaaacatcactaccttaggtcctcttgtcctacctttctccgagcagcttctcttctttgctgctttgctccgccgaacattctcacctgctgccaaaacgtccacaaccacttccttctctacttccgccaccgcaaaaaccaatggaatcaagtcttcctcttccgatctgtccaagccatacatcccggactacaagctcgccttcgagcatttttgcttccacgcggcaagcaaagtagtgcttgaagagcttcaaaagaatctaggcttgagtgaagagaatatggaggcttctaggatgacacttcacaggtttggaaacacttctagcagtggaatctggtatgagttggcttacatggaggccaaggaaagtgttcgtagaggcgatagggtttggcagatcgctttcggttctggttttaagtgtaacagtgtggtgtggaaggcaatgaggaaggtgaagaagccaaccaggaacaatccttgggtggattgcatcaaccgttaccctgtgcctctctaaattatcattcttctaaattaaatcaagtaagatctctaattactccaaccaaaagatacagtttggttggatgataggagttatttactgatcattcgtatctaagtctgttataagaatggatgtggctagagtcctgttcagcttcaacttgttttattttttgtttgttctctattggatcttcataaactttgagagattaaagaaaaaaactcttctttagtttgatagaacagatggtcattgtaatttctttaatatgtcagaggccgcgaattcgatatcaagcttatcgataccgtcgacctcgagggggg

SEQ ID NO: 116812 - DNA, 610 bp, Arabidopsis thaliana
  unsure (1)..(610): unsure at all n locations
ctttccgatttccaancttcacccnggttaaagccccntggncatttngctcccnccggcaagcaanttgtccttgagncctcaaaggatctaggcttggagtgaagggaatttgggggcttctagggtgccccttcacaggtttgggaaccacttcttaccagtggaatctggtatgagttggcttacatggaggccaaggaaagtgttcgtagaggcgatagggtttggcagatcgctttcggttctggttttaagtgtaacagtgtggtgtggaaggcaatgaggaaggtgaagaagccaaccaggaacaatccttgggtggattgcatcaaccgttaccctgtgcctctctaaattatcattcttctaaattaaatcaagtaagatctctaattactccaaccaaaagatacagtttggttggatgataggagttatttactgatcattcgtatctaagtctgttataagaatggatgtggctagagtcctgttcagcttcaacttgttttattttttggaaaaaaaccaaagggcgaacnnnnnnnnnnnnnnnnnnnnnnnnnnnnnnnnnnnnnnnnnnnnnnnnnnnnnnnnnnnnnnnnnn

SEQ ID NO: 116813 - DNA, 2530 bp, Arabidopsis thaliana
  unsure (1)..(2530): unsure at all n locations
atggttaaagaaatagcttcttggttattgatactatcaatggtggtgtttgtttctccggttttagctataaacggcggtggttatccacgatgtaactgcgaagacgaaggaaacagtttctggagtacagagaacattctagaaactcaaagagtaagcgatttcttaatcgcagtagcttatttctcaatccctattgagttactttacttcgtgagttgttccaatgttccattcaaatgggttctctttgagtttatcgccttcattgttctttgtggtatgactcatcttcttcatggttggacttactctgctcatccatttagattaatgatggcgtttactgttttcaagatgttgactgctttagtctcttgtgctactgcgattacgcttattactttgattcctctgcttttgaaagttaaagttagagagtttatgcttaagaagaaagctcatgagcttggtcgtgaagttggtttgattttgattaagaaagagactggctttcatgttcgtatgcttactcaagagattcgtaagtctttggatcgtcatacgattctttatactactttggttgagctttcgaagactttagggttgcagaattgtgcggtttggatgccgaatgacggtggaacggagatggatttgactcatgagttgagagggagaggtggttatggtggttgttctgtttctatggaggatttggatgttgttaggattagggagagtgatgaagtgaatgtgttgagtgttgactcgtccattgctcgagctagtggtggtggtggggatgttagtgagattggtgccgtggctgctattagaatgccgatgcttcgtgtttcggattttaatggagagctaagttatgcgatacttgtttgtgttttaccgggcgggacgcctcgggattggacttatcaggagattgagattgttaaagttgtggcggatcaagtaaccgttgcgttagatcatgcagcggttcttgaagagtctcagcttatgagggagaagctggcggaacagaacagggcgttgcagatggcgaagagagacgcgttgagagcgagccaagcgaggaatgcgtttcagaaaacgatgagcgaagggatgaggcgtcctatgcattcgatactcggtcttttgtcgatgattcaggacgagaagttgagtgacgagcagaaaatgattgttgatacgatggttaaaacagggaatgttatgtcgaatttggtgggggactctatggatgtgcctgacggtagatttggtacggagatgaaaccgtttagtctgcatcgtacgatccatgaagcagcttgtatggcgagatgtttgtgtctatgcaatggaattaggttcttggttgacgcggagaagtctctacctgataatgtagtaggtgatgaaagaagggtctttcaagtgatacttcatatggttggtagtttagtaaagcctagaaaacgtcaagaaggatcttcattgatgtttaaggttttgaaagaaagaggaagcttggataggagtgatcatagatgggctgcttggagatcaccggcttcttcagcagatggagatgtgtatataagatttgaaatgaatgtagagaatgatgattcaagttctcaatcatttgcttctgtttcctccagagatcaagaagttggtgatgttagattctccggcggctatgggttaggacaagatctaagctttggtgtttgtaagaaagtggtgcagttgattcatgggaatatctcggtggtccctggctcggatggttcaccggagaccatgtcgttgctccttcggtttcgacgtagaccctccatatctgtccatggatccagcgagtcgccagctcctgaccaccacgctcacccacattcgaattctctgttacgtggcttacaagttttattggtagacaccaacgattcgaaccgggcagttacacgtaaactcttagagaaactcgggtgcgatgtaaccgcggtttcctctggattcgattgccttaccgccattgctcccggctcgtcctcgccttctacttcgtttcaagtggtggtgcttgatcttcaaatggcagagatggacggttatgaagtggccatgaggatcaggagtcgatcttggccgttgattgtggcgacgacagtgagcttggatgaagaaatgtgggacaagtgtgcacagattggaatcaatggagttgtgagaaagccagtggtgttaagagctatggagagtgagctccgaagagtattgttgcaagctgaccaacttctctaagttgttatctcaacttctcttctaccttcaaaatttttacaccataggtttatgtcgaatatatccaaatgaaatttcgaaattgttattatatattccacccatatctctatgatttgtacatcccgcttttttgggttcttgctctccttttgaaccacccaagattgcattgaaaaaaaaaaaaaaaaaaaaaaaaannaagggc

SEQ ID NO: 116814 - DNA, 2299 bp, Arabidopsis thaliana
  unsure (1)..(2299): unsure at all n locations
atgttaaagacattgttagtccaatggcttgtcttcttcttcttcttcttaatcggttccgtcgtcaccgccgcagaagacgacggtagcttgtcgttatgcaactgcgacgacgaagacagtctctttagctacgagacaatcctcaactcgcaaaaagtcggcgactttcttatcgcaatcgcttatttctcgatcccaatcgagctggtttacttcgtgagccggaccaatgtgccttcaccttacaattgggtggtctgcgagtttatagccttcattgttctctgcggcatgacccatttgctcgctggtttcacctacgggcctcactggccttgggtcatgacagctgtcactgtcttcaagatgctgactggtatcgtctctttcctcacggcactctcgttagtcactctcttaccattgcttcttaaggctaaggttcgtgagtttatgttgagtaagaagaccagagagcttgatcgtgaggttgggatcattatgaagcagactgagacgagtttgcatgttcgtatgctcactaccaagattaggacgtctcttgatcgacacaccattctatacactacgcttgtggagttgtccaagactctggggctcaagaactgtgcggtttggatcccgaatgagatcaagacggagatgaatcttactcatgagttaagaccgaggattgatgatgagaatgagaatgagcattttggtggttatgctgggttctcgataccgattagtgagtctgatgttgtgaggattaagagaagcgaagaggtgaatatgttgagccctggttctgtgcttgcctcagtgactagccgagggaagtcaggtcctacggttgggataagagtccctatgcttcgggtttgtaactttaaaggcgggacaccagaggcgattcacatgtgttatgcgatattggtgtgtgtgcttccattgagacagccgcaggcttggacttatcaagagcttgagattgttaaggtggtggctgatcaagtggcggttgcaatctctcacgccgtgattcttgaagaatctcagcttatgagagagaaactcgctgaacagaaccgagcgcttcaggttgcgagggagaacgcactgagagctaatcaagccaaggctgcgttcgagcagatgatgagcgatgcaatgaggtgtcctgtgcggtccattctcgggttgcttcctttgatacttcaggatgggaagttacccgagaaccagactgttatcgttgatgcaatgaggagaaccagcgagttacttgtacagcttgtaaacaatgccggagatataaacaatgggacaatccgcgctgcagagactcattatttcagtttgcattcggttgtgaaagagtcagcttgcgtggcgaggtgtttatgcatggcaaatggttttggtttctcagctgaagtttatagagcattgcctgactacgtcgtaggtgatgatagaaaggtctttcaagcgattttgcatatgcttggggttctaatgaatcgaaagatcaaagggaatgtgactttctgggtttttccggaaagcgggaactcagacgtatcagagaggaaagatattcaagaagcggtttggcgacattgctattcgaaagaatacatggaagttagattcggattcgaggtaactgctgaaggtgaagagagtagtagtagtagtagtggtagtaacctggaggaggaggaagagaatccgagtctcaacgcttgccaaaacattgtaaagtatatgcaagggaatattcgggttgttgaggacggtctaggtttggtgaaaagcgtctcagttgttttccggtttcaactccggcgatcgatgatgtcgagaggcggtggatattctggagaaacgtttagaacctcaactcctccgtctactagccactgatcattgacgtcaggaaggggggcaggggaatgtagtgcaaaagaaagatttaaggggtggaatctgagaatttgtaaaaacagtaggggctttaatgagattaacagagagaggtctaaaacgttgtcgttcggttgtaaaaacctgaaagttaactaggttttaacctatcgtgtaggcaaaaggtatgatgcagacttgttgtaacttgctggtgatagcagaattcaaagtaaaagaatgtgtcggagaatgttccgcggccgnnnnnnnnnnnnnnnnnnnnnnnnnnnnnnnnnnnnnnnnnnnnnnnnnnnnnnnnnnnnnnnnnnnnnnnnnnnnnnnnnnnnnnnnnnatggg

SEQ ID NO: 116815 - DNA, 589 bp, Arabidopsis thaliana
  unsure (1)..(589): unsure at all n locations
ccctatttttannnaagagaccccccctatggctgctggtatcgaataggcttgatatcgaattcgcggccgctacgagacaatcctcaactcgcaaaaagtcgggcgactttcttatcgcaatcgcttatttctcgatcccaatcgagctggtttacttcgcgagccgaaccaatgtgccttcaccttacaattgggtggtctgcgagtttatagccttcattgttctctgcggcatgttcccatttgctcgctggtttcacctacgggcctcactggccttgggtcatgacagctgtcactgtcttcaagatgctgactggtatcgtctctttcctcacggcactctcgttagtcactctcttaccattgcttcttaaggctaaggttcgtgagtttatgttgagtaagaagaccagagagcttgatcgtgaggttgggatcattatgaagcagactgagacgagtttgcatgtccgcatgctcactaccaagattaggacgtctcttgatcgacacaccattctataacaagcttgtggagttgccaanaccnngggggcaaaaantggggggtgggcccgnatgg

SEQ ID NO: 116816 - DNA, 1555 bp, Arabidopsis thaliana
cacgcgtccggatcagtccacgcgtccgagttttagcagagttggtgaaatcaatgggccaccaaaacgccgccgtttcagagaatcaaaaccatgatgacggcgctgcgtcgtcgccgggattcaagctcgtcggattttccaagttcgtaagaaagaatccaaagtctgataaattcaaggttaagcgcttccatcacatcgagttctggtgcggcgacgcaaccaacgtcgctcgtcgcttctcctggggtctggggatgagattctccgccaaatccgatctttccaccggaaacatggttcacgcctcttacctactcacctccggtgacctccgattccttttcactgctccttactctccgtctctctccgccggagagattaaaccgacaaccacagcttctatcccaagtttcgatcacggctcttgtcgttccttcttctcttcacatggtctcggtgttagagccgttgcgattgaagtagaagacgcagagtcagctttctccatcagtgtagctaatggcgctattccttcgtcgcctcctatcgtcctcaatgaagcagttacgatcgctgaggttaaactatacggcgatgttgttctccgatatgttagttacaaagcagaagataccgaaaaatccgaattcttgccagggttcgagcgtgtagaggatgcgtcgtcgttcccattggattatggtatccggcggcttgaccacgccgtgggaaacgttcctgagcttggtccggctttaacttatgtagcggggttcactggttttcaccaattcgcagagttcacagcagacgacgttggaaccgccgagagcggtttaaattcagcggtcctggctagcaatgatgaaatggttcttctaccgattaacgagccagtgcacggaacaaagaggaagagtcagattcagacgtatttggaacataacgaaggcgcagggctacaacatctggctctgatgagtgaagacatattcaggaccctgagagagatgaggaagaggagcagtattggaggattcgacttcatgccttctcctccgcctacttactaccagaatctcaagaaacgggtcggcgacgtgctcagcgatgatcagatcaaggagtgtgaggaattagggattcttgtagacagagatgatcaagggacgttgcttcaaatcttcacaaaaccactaggtgacaggccgacgatatttatagagataatccagagagtaggatgcatgatgaaagatgaggaagggaaggcttaccagagtggaggatgtggtggttttggcaaaggcaatttctctgagctcttcaagtccattgaagaatacgaaaagactcttgaagccaaacagttagtgggatgaacaagaagaagaaccaactaaaggattgtgtaattaatgtaaaactgttttatcttatcaaaacaatgttatacaacatctcatttaaaaacgagatcaatcaaaaaatacaatcttaaattcaaaaccaaaaaaaaaaaaaaaaaaaaaaaagggcggccgct

SEQ ID NO: 116817 - DNA, 893 bp, Arabidopsis thaliana
cgcccccttgatttgacttcctccgcggtaccggtccggaatagggggagacaaatcagaagagagagatttagatattgtagagtgagattctaaagagagagagagagagagatatggctagtggaatcgctcgtggtcgtttagctgaagagaggaaatcgtggaggaagaatcatcctcatggttttgtggcaaagccggagacggggcaggatggaactgtgaatctaatggtgtggcattgcactatacctggtaaagctgggactgattgggaaggtggattctttccattaacgatgcacttcagtgaggattatccgagcaaacctccgaaatgtaaatttccacaagggtttttccaccctaatgtctatccatctggaactgtctgtctctctatccttaacgaggattatggatggagaccagccatcaccgtgaagcagattcttgttggtattcaggatttacttgacacaccgaatcccgctgaccctgcacagacagatggttatcatctcttctgtcaggatccagttgagtacaagaaaagggtgaagctgcagtccaagcagtatcctgctcttgtctaaaacctcaaaaaagagaacgcaccaaaactgatgacaagctctgaatattttctcgtcttgtgtcattatgtttagatgtcattgggtgattgaaaactcctcattttggcaccttaagacactggaatctatttattttcgaaaaaaaactcttctttctctatttaactgttaatattcttggtactgattcagttggtgttgcttctatataatacataattatgttctctggtcgttcatgagtgttgtccaaattctactaagtgaaatatgaagtcttcattccataga

SEQ ID NO: 116818 - DNA, 869 bp, Arabidopsis thaliana
  unsure (1)..(869): unsure at all n locations
agaaaagaaattgagaagaaaaaagaaaaaaaggtgaccgtattctccgtcgattgtagccgcccgaagaaatatcttctcctctctcgtttaaccacgaatttgctctgatattagtgtttctctagccatggcgaacgcggcatctggaatggctgtgcatgatgattgcaagctgagatttctggaactgaaggctaaaaggacacaccgtttcatagtttacaagattgaggagaagcagaagcaagttgttgttgagaaagttggtcaaccgatccaaacttacgaggagtttgcagcatgtcttccagctgatgaatgccgttacgccatttacgattttgactttgtaactgctgagaattgccagaagagcaagatcttcttcatcgcgtggtgtccggatattgctaaggtgagaagcaagatgatctacgcgagctccaaggacaggttcaagagggaactagatgggattcaagtagagctacaggcaactgatccaacagagatggatctcgatgttttcagaagccgtgccaactaaagagtaaaaaccaaagtttattatcatcatccccttgaaagatctattctcttattctgttatttttgagtgatggtactggtacttgattatgtttttacattgtgttgtgaagttatgaacctataaacaacttcattctatcggtgtttcggtcttgtgttcgatgttgtctttggttttaaaatggtgtgtaaggaccccaaatcgtctattgaagatgaacccttttaggtaaaaaaaaaaaaaaaaaaaaanaaagggcggccgctctagaggatccaagcttacgtacgcgtgcatgcgacgtcatagctct

SEQ ID NO: 116819 - DNA, 3842 bp, Arabidopsis thaliana
atggattcttcttttttccttgtcttagtcgcagctgctacaggcttcttcatgctttttagaaaattcagattccatcaagataacaaagaaagtaattcttcttctttatctcgtccaactgctgcaacttctgtgtctcgaaactggaaacacgatgtcttcccgagcttccacggagcagatgtccgaagaacctttcttagtcacatcctcgaatcgttcagaagaaagggaattgacacattcattgataataatatagagaggagtaagtcgatcggtcctgagctcaaagaagctatcaaaggatcaaagatcgcaatcgttttgctctcaaggaaatatgcttcttcgtcatggtgtcttgatgagttggccgagatcatgaaatgcagggaagtgttgggtcagattgtcatgaccattttctatgaagtggagccaactgacataaagaaacagactggtgaattcggaaaagccttcacaaaaacatgtagaggtaaaacaaaagagcatattgagagatggagaaaagctttggaggatgtggcaacaatcgccggatatcattctcacaaatggagcaatgaagcggagatgattgaaaagatatccactgatgtttcaaacatgttggatttatccataccatcaaaagatttcgatgattttgttgggatggcagctcatatggaaaggacggaacaattgttacgcctagatttggatgaagcaaggatgatcgggatttggggaccgcctgggatcggtaagacaactatcgccagatttctgtttaatcaagtctccgacagattccaacttagtgcaatcatggtcaatatcaaaggatgctatccaagaccttgtttcgatgagtacagtgcacaattgcaactacaaaaccaaatgttgtcccagatgatcaatcataaagatatcatgatttctcatttaggagtggctcaagaacggttgagagacaagaaagtgtttctcgttcttgatgaagtggatcaattaggacaactagatgccttggcgaaagatactcgatggtttggtcctggaagtcggattattatcacaacagaagatcaaggaattttgaaggcacatggaatcaatcatgtttacaaagtggaatatccatcaaatgacgaggcttttcaaatcttctgtatgaatgcctttggtcagaaacaaccgtacgaaggtttctgtgaccttgcttgggaggttaaggctttagctggtgaactccctttgggattgaaggttctaggctccgctttgcgggggatgtccaagccagagtgggaaagaacactaccaaggttaagaactagcctcgacggaaaaatcgggggcattatacagttcagttacgatgccttatgtgacgaagataaatatctatttctttatatagcctgcctttttaacaacgaatcaacaaccaaagtggaagaggttcttgcaaacaagttcttggatgtggggcaaggtattcacgtgttagctcaaaaatctctcatatcctttgagggagaagaaatacagatgcatactctgctagaacagtttggaagagaaacttcccgtaagcaattcgttcatcaccgctatacgaaacatcagcttttggtgggtgaaagggatatatgtgaagtactcaatgacgatacaatagatagtagacgttttatagggatacatttggatttatctaagaatgaggaagaattgaatataagtgagaaagcacttgaaagaatccatgattttcaattcgttagaatcaatgataagaatcatgctctacatgagagactacaagatttgatttgtcattctccaaagattagatcactgaagtggtatagttaccagaatatatgtttgccttcaacttttaatccggagtttctcgtcgaactagatatgagtttcagcaagcttcagaagctatgggaaggaactaaacaacttagaaatctcaagtggatggatttgagttattctagttatctgaaagagcttcccaatctttcaactgcaactaatctcgaagaattaaatcttagaaattgctcaagtttagtggagctcccctcctctattgaaaaactcaccagtctccagatattagatctccaaggttgctcaagtcttgtggagcttccctcttttgggaatgcaactaaacttgagatactttatcttgattattgtcggagtcttgagaagctcccaccatctatcaatgccaataatctccagaaattgtctctaagaaattgttcacgtattgtggagctccccgctatcgagaatgcgactaatctctgggaattgaatctgcttaattgctcaagtctaatagagctccctctttctattggaactgccagaaatctatttttgaaggaattgaatattagcggatgctcaagtctcgtgaaactcccatcctctattggagatatgactaatctcaaagagtttgatctatctaactgctcaaatctggtggagcttccttcctctataggaaaccttcaaaacttgtgcaagttaattatgagaggatgctcaaagctagaggctcttccaatcaacatcaacttgaaatctctcgatacacttaatctcacagattgctctcagttgaaaagttttcctgagatctccacacacattaagtatctcaggctcacaggaactgcaataaaagaagttcccttgtcgatcatgtcgtggtctcctcttgctgaatttcagatttcatattttgaaagcctcaaggaattcccgcatgcttttgacatcatcacggagctgcagttgagcaaagatatacaagaagttactccatgggtcaagagaatgtctcgtttacgttattttagactcaacaactgcaataatctggtatcactcccccaacttccagattcccttgcttacttatatgcagataattgtaagtccctcgagaaactagattgttgctttaacaatccatggattagtctccatttccccaaatgcttcaaactgaatcaagaagccagagatctcatcatgcacacatcgacttctagaattgcgatgttacccggtacacaagtgcctgcctgcttcaatcatcgagctacttctggggattacttgaaaatcaagttgaaggagtcgcctcttcctacaaccttgagatttaaggcttgtatcatgcttgttatggttaatgaaggaattagttatgataggaaaatcaagttgagcgttgacatcagggatgaacagaatgatctcaaagttcagtgtacaccaagcggctgttatatatatccactaacagagcatatatacacatttgaacttgaagtagaggaggtgacttccacggagcttgtctttgagttcacactagacaaggaaagcaattggaagataggagaatgcgggatactccaaagagaaacgagatcactgcgccggagctcttcgccggatctcccgtcggaatcttctcgtgtttctagctacaaccactgttagagaggtaagaatcatgggtttgatttctccctcagtcattcgatggattcgattattggttttattttgtgtgaatgggaattagctgtgaaatatgggttttgtatggattttatgagttttgtatttgtcgtgtatttagaaagatgaaacattgatgttcaaagcttgctatttttttaaaaaaaaaaaaaaaaaagggcggccgctctagaggatccaagcttacgtacgcgtgcaggcgacgtcataaatcttctatagtgctccta

SEQ ID NO: 116820 - DNA, 732 bp, Arabidopsis thaliana
atttgagcaaagacattctcttgacccatggaggaacttcttgtatatctttgggtcaagagaatgtctcgtttacgtgatcttagtctcaacaactgcaataatctggtatcactcccccaactttcagattcccttgattacatatatgcagataattcgcgggccctcgagagactggattgttgctttaacaatccagagatccgtctctatttccccaaatgcttcaaactgaatcaagaagccagagatctcatcatgcacacttgtatagatgcgatgtttccaggtacacaagtgcctgcctgcttcattcatcgagctacttctggggattccttgaaaatcaagttgaaggagtcgcctcttcctacaaccttgagatttaaggcttgtatcatgcttgttaaggttaatgaagaactgatgagttatgatcagacaccgatgatcgttgacattgtcatcagggacgaacataatgatctcaaagaaaagatatatccaagcatatatccaagcatatatccacttttaacagagcatatatacacatttgaacttgacgtagaggaggtgacttccacggagcttgtctttgagttcccacaactcaacaaaagaaattggaagataggagaatgcgggatactccaaagagaaacgagatcactttcgccggagctcttcgccggatctctcgccggaatcttctcgtgtttctagcta

SEQ ID NO: 116821 - DNA, 467 bp, Arabidopsis thaliana
cttgaaaatcaagttgaaggagtcgtctcttcctacaaccttgagatttaaggcttgtatcatgcttgttaaggttaatgaagaaatgagagatgatgagatgtggccgagtgtactcattgccatcagggtcaaacagaatgatctcaaagttctatgtacagcaagcatatatccagttttaacagagcatatatacacatttgaacttgaagtagaggaggtgacttccacggagcttgtctttgagttcacaccattccacaaaagcaattggaagataggaggattgcgggatactcccaagaggaacggggtccattttgccggagctcttcggccgggatcttccgccagaatcttctcgggggtttctagctgggccccctgtttgaggggtgaatgaaaatctttaataggagctgccattgtgtgttgattgggtatcaagtactgcttctaagtga

SEQ ID NO: 116822 - DNA, 529 bp, Arabidopsis thaliana
  unsure (1)..(529): unsure at all n locations
nnnnnnnnnnnnnnnnnnnnnnnnnnnnnnnnnnnnnnnnnnnnnnnnnnnnnnnnnnnnnnnnnnnnnnnnnnnnnnnnnnccacgcgtccggagaaaatagccactgatgtttcaaacatgttaaatagtttcacaccatcaagagattttgacgggttagtagggatgagagctcatatggatatgctggaacaattgttgcgcctagatttggatgaagtaaggatgatcgggatttggggaccgcctgggattggtaagacaactatcgccagatttctgtttaatcaagtctccgacagattccaacttagtgccatcattgtgaatatcagaggaatctatccaagaccttgtttcgatgagtacagtgcacaattgcaactacaaaaccaaatgttgtcccagatgatcaatcataaagatatcatgatttctcatttaggagtggctcaagaacggttgagagacaagaaagtgtttcttgttctcgatgaagtggatcaattaggacaactagatgcct

SEQ ID NO: 116823 - DNA, 467 bp, Arabidopsis thaliana
attctccaaagattagatcactgaactggtatggttacgagagtttatgtttgccttcaacttttaatccggagtttctggtcgaacttgatatgcgttccagcaatcttcggaagctatgggaaggaactaaacaacttagaaatctcaagtggatggatttgagttattctagttatctgaaagagcttcccaatctttcaactgcaactaatctcgaagaattaaagcttagaaattgctcaagtttagtggagctcccctcctctattgaaaaactcacgagtctccaaatattagatcttgaaaattgttcgagtcttgagaagctccccgctatcgagaatgcgactaagctccgtgaattgaagctccaaaattgctcaagtctaatagagctccctctttctattggaactgccacaaatctgaagcaattgaatattagcggatgctcaagtctcgtg

SEQ ID NO: 116824 - DNA, 1388 bp, Arabidopsis thaliana
  unsure (1)..(1388): unsure at all n locations
cacacgcgtccgcccacgcgtccgcccacgcgtccggaaaatcttcaaagtgtttgcagagaaatctaaattcatcaacagttttttacaaaagaaatggaaaacggagaagcaaaacagagtgtacctcttctcactccctataagatgggaagattcaatctttcccatagggttgttctagcaccattgacgagacagagatcgtacggaaacgttcctcagcctcacgctgccatatattactctcagagaacgactccaggaggttttctcatcactgaagccactggagtttcagatacagctcaaggatatcaagatactcctgggatatggactaaagagcatgtggaggcatggaagccaatcgttgatgctgtacatgccaaaggtggtatcttcttctgtcagatctggcatgttggccgcgtttctaatagcgggtttcagccaaatggaaaagctcctatctcttgttcggataagccattgatgcctcaaattcgctctaatggcatcgatgaagctctctttacccctccaagacggcttggtatcgaagaaatccccggcattgtcaatgattttaggcttgctgcaagaaatgctatggaagctggttttgatggagttgagattcatggagctaatggctatctgattgaccagttcatgaaggatacggtgaatgatagaactgatgaatacggtggatcattgcaaaaccgttgcaaatttcctctagaaatagtcgatgcagttgctaaggagatcggaccagaccgtgttggaatcaggctctctccatttgctgactacatggaatctggagacactaatccaggagcattagggctttatatggcggaatctttgaacaaatacggaatcctctactgtcatgtgattgaagcgagaatgaaaacaatgggagaagtacatgcttgtcctcacacactaatgccgatgaggaaagcctttaaggggacttttatctccgcaggaggtttcacgagggaagatgggaatgaggctgtgtcaaagggaagaactgatttggtggcttatggtcgatggtttctagccaacccggacctgccaaagaggttccaagtggatgcaccgctgaataagtacgatagaccaacgttttacacttctgatccagtcgtcggttacaccgattaccctttcctcgaatcaacagcttaaaattgttatcaataatgtaatgtagtgtgtttcccttatataagatgtaataagtttctggcttttcatttatactttttaagtttaagtcataaaaccttcnnnnnnnnnnnnnnnnnnnnnnnnnnnnnnnnnnnnnnnnnnnnnnnnnnnnnnnnnnnnaacggaattac

SEQ ID NO: 116825 - DNA, 2389 bp, Arabidopsis thaliana
acttatcacgccacctcaccacctctctcctctctcctctctctcccccctggagagattattcattccctccaatggatctccgtcggaggcctcctaaaccaccggttaccaacaacaacaactccaacggatctttccgttcttatcagcctcgcacttccgatgacgatcatcgtcgccgggctacaacaattgctcctccaccgaaagcatccgacgcgcttcctcttccgttatatctcacaaacgccgttttcttcacgctcttcttctccgtcgcgtattacctcctccaccggtggcgtgacaagatccgttacaatacgcctcttcacgtcgtcactatcacagaactcggcgccattattgctctcatcgcttcgtttatctatctcctagggttttttggtattgactttgttcagtcatttatctcacgtgcctctggtgatgcttgggatctcgccgatacgatcgatgatgatgaccaccgccttgtcacgtgctctccaccgactccgatcgtttccgttgctaaattacctaatccggaacctattgttaccgaatcgcttcctgaggaagacgaggagattgtgaaatcggttatcgacggagttattccatcgtactcgcttgaatctcgtctcggtgattgcaaaagagcggcgtcgattcgtcgtgaggcgttgcagagagtcaccgggagatcgattgaagggttaccgttggatggatttgattatgaatcgattttggggcaatgctgtgagatgcctgttggatacattcagattcctgttgggattgctggtccattgttgcttgatggttatgagtactctgttcctatggctacaaccgaaggttgtttggttgctagcactaacagaggctgcaaggctatgtttatctctggtggcgccaccagtaccgttcttaaggacggtatgacccgagcacctgttgttcggttcgcttcggcgagacgagcttcggagcttaagtttttcttggagaatccagagaactttgatactttggcagtagtcttcaacaggtcgagtagatttgcaagactgcaaagtgttaaatgcacaatcgcggggaagaatgcttatgtaaggttctgttgtagtactggtgatgctatggggatgaatatggtttctaaaggtgtgcagaatgttcttgagtatcttaccgatgatttccctgacatggatgtgattggaatctctggtaacttctgttcggacaagaaacctgctgctgtgaactggattgagggacgtggtaaatcagttgtttgcgaggctgtaatcagaggagagatcgtgaacaaggtcttgaaaacgagcgtggctgctttagtcgagctcaacatgctcaagaacctagctggctctgctgttgcaggctctctaggtggattcaacgctcatgccagtaacatagtgtctgctgtattcatagctactggccaagatccagctcaaaacgtggagagttctcaatgcatcaccatgatggaagctattaatgacggcaaagatatccatatctcagtcactatgccatctatcgaggtggggacagtgggaggaggaacacagcttgcatctcaatcagcgtgtttaaacctgctcggagttaaaggagcaagcacagagtcgccgggaatgaacgcaaggaggctagcgacgatcgtagccggagcagttttagctggagagttatctttaatgtcagcaattgcagctggacagcttgtgagaagtcacatgaaatacaatagatccagccgagacatctctggagcaacgacaacgacaacaacaacaacatgatctgaatctgaatcatcatcctctcaaagaaggacaacaatccaaaacaagggcaggctttttacaacgcattcactcaaaactcgctggtggacagattttagccatgtgcgtatgcgtttgcccttttgttaaataaaaaaactatttgttttgtttgtttgacttgatatctttttttgggattgaggattgagagagatagagagattttacaaactttctctctttctctctttctctctttctcatggataattcgtgtctctttgatttgtctaaggtttgtctttgtttgttaggaagtggtctatatgaacgaaaaatttgtgtatggtgcagttgcgtttggggacatttttgagattttttctctgttttgtttcctctcttcgtttttattgtttgttacatataaaatatttctctgtatgttggaacatctctctctctttagttgttgttggtaaaagatacggatcttctttcctccagaagaatccatctatataatattaccatctatgtgttctact

SEQ ID NO: 116826 - DNA, 627 bp, Arabidopsis thaliana
  unsure (1)..(627): unsure at all n locations
tgcaggtcccgtttccggtttcccgggtcgacccagcgtccgtgttcttgagtatcttaccgatgatttccctgacatggatgtgattggaatctctggtaacttctgttcggacaagaaacctgctgctgtgaactggattgagggacgtggtaaatcagttgtttgcgaggctgtaatcagaggagagatcgtgaacaaggtcttgaaaacgagcgtggctgctttagtcgagctcaacatgctcaagaacctagctggctctgctgttgcaggctctctaggtggattcaacgctcatgccagtaacatagtctctgctgtattcatagctactggccaagatccagctcaaaacgtggagagttctcaatgcatcaccatgatggaagctattaatgacggcaaaggatatccatatctcaagtcactatgccatctatcgagggtggggacagttgggaggaggaacacagcttgcatctcaatcagcgtgttaaacctgctcgggttaaagggcannncagagtnnccgggattancgaaggggctnnnacgttttagccgngcagttttcttggggtttcttaatcccattcactgccctttgngcntaatcatgcctgc

SEQ ID NO: 116827 - DNA, 3016 bp, Arabidopsis thaliana
  unsure (1)..(3016): unsure at all n locations
atggctgaagcatttgtgtcgtttggacttgagaagctttgggatctcctgagtcgagaatcagagcgattgcagggaattgatgggcaacttgatggactaaagcgtcagctgagaagtttacagtcgttgttgaaagatgcagatgccaagaaacatggaagtgatagggtgaggaatttcttggaagatgtcaaagaccttgtttttgatgctgaggatataattgaatcctatgttctgaacaaacttagtggaaaaggaaaaggggtcaagaagcatgtgagacgacttgcttgcttcttgacggatcgccacaaggttgcttcagatatcgagggtatcactaagaggatctctgaagtgattggggaaatgcagagttttgggatacaacaaatcattgatggtggtcgttcgctgtctcttcaggaaagacaaagggtgcagagggagatccgacaaacgtatcctgacagttctgaaagcgatcttgtcggggtggagcagagtgttaaagaattggttggtcatttggtggagaatgatgttcatcaagtggtttctatagctgggatgggcggtattggtaaaaccactctggctagacaagtctttcatcatgacttagtccggcgtcactttgatggattcgcatgggtctgtgtttcccaacaatttacacagaaacatgtttggcagaggatcttgcaagaacttcagccacatgatggggatattttacagatggacgaatatgcacttcagcgtaaactctttcaattgttagaggccggtagatatttagttgtcctcgatgatgtatggaaaaaagaagactgggatgtaataaaagcagtgtttccacggaaaagaggttggaagatgctgcttacttctcgaaatgaaggtgttgggatacatgctgatccaacatgtttaacttttagagcaagcatccttaaccctgaagaaagttggaagctctgtgagagaatagtattccctaggagagatgaaactgaagtaaggcttgatgaagaaatggaagccatgggaaaggaaatggtcacacattgtggaggactaccattagctgttaaagcgttgggaggcttgttagctaataaacatactgttcctgagtggaaaagagtttttgacaatattggatctcaaatagtaggaggatcgtggttagatgacaacagtctcaattcggtttaccgaatattgtctctgagttatgaagatttgccaacgcatttaaagcattgcttccttaacctagcccatttccccgaagattccgagatatctacgtatagtttgttctattactgggctgcagaagggatttacgatggatcaaccatcgaagatagtggagaatactacctagaagagctagtgaggagaaatttggttattgcagacgacaactatttgagttggcaatctaaatattgtcaaatgcatgacatgatgagagaagtatgtttatctaaagccaaagaagagaacttcctacaaattatcatagaccctacttgcacctctaccatcaatgctcaatctcctagtagatctcgcagactcagcatacatagtggtaaagcctttcatatattgggacacaaaaacaatccaaaggtgagatctcttatagtttcgagattcgaggaagacttttggatacgatcagcttcagtcttccacaacttaacattgctcagggtgttggatctttctagggtaaagtttggaggagggaagttaccttctagcattggagggctcatccacttgagatacttgagtttatacgaagctgtggtatctcatctaccttctactatgcggaacttaaagcttctgctctttttgaacttacgtgttgataacaaggaaccgattcacgtgccaaatgttttgaaagagatgctagagttgaggtacctttccctacctcatgaaatggatgataaaaccaagttggaattgggtgatctagtgaacctggagtacttgtatggtttctcaacgcaacacagtagtgtgacagacctcctccgtatgactaagctccggtatctcgctgtatctttgagcgaaaggtgcaattttgaaactctatcgtcatctctccgcgaattgcgaaacctcgagacgcttaatttccttttttcgctcgaaacatatatggttgattatatgggagagtttgttctggatcattttattcatctaaaacagttgggattggcagtacgtatgtcaaagattcctgatcaacatcaattccctccccaccttgtacacttatttctaatttattgcggcatggaagaggatccaatgccaattctagaaaagttgcttcatttgaagtcggttcgtttagcacgtaaggcattcctagggagcagaatggtgtgctcaaaaggcggatttcctcaattatgtgttatagaaatatctaaagaatcagagttggaagagtggatagtagaagaagggtcgatgccatgtcttcgtactttgactatagatgattgcaaaaagttgaaggaacttccagatggactcaagtacataacatccttaaaggaactgaagattgaaggaatgaagagggagtggaaggagaaactggtaccaggtggagaagattactacaaagtccaacacattcccgatgttcaatttatcaactgtgaccagtagcaggtaaaaaataaattgtatggtgttcactttgtttttttctatgttgttgttggattcgtgtgaaagtcatgtggacagtctcaacggctatacattgttccagcatcgntcatctttgaaatagatgcnggaagaccaagaagcggccaattctcttatattggggggntaggggttnttcacaaaagncatcagtgtcaccaggtttcccgangattgctttggggtncaggccccaggtttaatgtccgntccgcttgggtncgttcagtganngattgttgtc

SEQ ID NO: 116828 - DNA, 551 bp, Arabidopsis thaliana
caatttatcaactgtgacctgtagcaggtaaaaaataaattgtatggtgttcactttgtttttttctatgttgttgttggattcgtgtgaaagtcatgtggacagtctcaacgactcatacattgttccagcatcgatcatctttgaaatagatgcaggaaagaccaagaagcgagccaaattctcttatattgggagagatagaggctgcttcacaaaagtcatcagctgatcaacaggtttttccgaagaatagcttatgaagaatacagatcctcaagtattaatgattacgtttccagtcttggagctctcgctttcagtgaatcgttatgttgtgtagctcagaactatattatagaaacaatgcttatattgttgtttgtttttgatgtggatgcatggaatttgcttgagaactcttttacaaaatggagaaacgaaccttgtaaaaaaaaaaaaaaaaaaaaaaaaaaaaagcggccgctctagaggatccaagcttacgtacgcgtgcatgcgacgtcatagacttctatagtgtgtcctaa

SEQ ID NO: 116829 - DNA, 1886 bp, Arabidopsis thaliana
ggatggagaactttgcctcctgacaacatttcagaaaataatcgaatcaaaaaaaacactcaatatggagtcttctatatcacaaacactaagcaaactatcagatcccacgacgtctcttgtcatcgttgtctctcttttcatcttcatcagcttcatcacacggcggcgaaggcctccatatcctcccggtccacgaggttggcccatcataggcaacatgttaatgatggaccaactcacccaccgtggtttagccaatttagctaaaaagtatggcggattgtgccatctccgcatgggattcctccatatgtacgctgtctcatcacccgaggtggctcgacaagtccttcaagtccaagacagcgtcttctcgaaccggcctgcaactatagctataagctatctgacttacgaccgagcggacatggctttcgctcactacggaccgttttggagacagatgagaaaagtgtgtgtcatgaaggtgtttagccgtaaaagagctgagtcatgggcttcagttcgtgatgaagtggacaaaatggtccggtcggtctcttgtaacgttggtaagcctataaacgtcggggagcaaatttttgcactgacccgcaacataacttaccgggcagcgtttgggtcagcctgcgagaagggacaagacgagttcataagaatcttacaagagttctctaagctttttggagccttcaacgtagcggatttcataccatatttcgggtggatcgatccgcaagggataaacaagcggctcgtgaaggcccgtaatgatctagacggatttattgacgatattatcgatgaacatatgaagaagaaggagaatcaaaacgctgtggatgatggggatgttgtcgataccgatatggttgatgatcttcttgctttttacagtgaagaggccaaattagtcagtgagacagcggatcttcaaaattccatcaaacttacccgtgacaatatcaaagcaatcatcatggacgttatgtttggaggaacggaaacggtagcgtcggcgatagagtgggccttaacggagttattacggagccccgaggatctaaaacgggtccaacaagaactcgccgaagtcgttggacttgacagacgagttgaagaatccgacatcgagaagttgacttatctcaaatgcacactcaaagaaaccctaaggatgcacccaccgatccctctcctcctccacgaaaccgcggaggacactagtatcgacggtttcttcattcccaagaaatctcgtgtgatgatcaacgcgtttgccataggacgcgacccaacctcttggactgacccggacacgtttagaccatcgaggtttttggaaccgggcgtaccggatttcaaagggagcaatttcgagtttataccgttcgggtcgggtcgtagatcgtgcccgggtatgcaactagggttatacgcgcttgacttagccgtggctcatatattacattgcttcacgtggaaattacctgatgggatgaaaccaagtgagctcgacatgaatgatgtgtttggtctcacggctcctaaagccacgcggcttttcgccgtgccaaccacgcgcctcatctgtgctctttaagtttatggttcgagtcacgtggcagggggtttggtatggtgaaaactgaaaagtttgaagttgccctcatcgaggatttgtggatgtcatatgtatgtatgtgtatacacgtgtgttctgatgaaaacagatttggctctttgtttgccctttttttttttttctttaatggggattttccttgaatgaaatgtaacagtaaaaataagatttttttcaataagtaatttagcatgttgcaaaaaaaaaaaaaaaaaaa

SEQ ID NO: 116830 - DNA, 1003 bp, Arabidopsis thaliana
  unsure (1)..(1003): unsure at all n locations
cccacgcgtccgctttttcttccaaatcctccaacattcgttgatcaatggctgaagttatgctaccgaggaagatggagattctcaaccattcttcaaagtttggatcaccggatcctcttcatgttcttgccgtcgacgacagtcacgttgatcgtaaattcatcgagcgtttgctcagagtatcttcttgcaaagttactgttgttgatagtgcaacaagagctctccaataccttggtttggatgttgaggaaaaatcagtcggttttgaggatttgaaggttaatttaattatgactgattactcaatgcccggtatgactggatatgaactcttgaagaagatcaaagaatcctcagcttttagagaagtaccggtggtaattatgtcctccgagaacattttgcctcgtattgatagatgtcttgaagaaggggctgaagatttcttactgaagccggtaaaactctcggatgtaaaaagattaagagattctctaatgaaggttgaagatttgtctttcacaaagagtattcagaagagagagctagaaacagagaatgtctaccctgttcactcgcagctcaaacgcgcaaagatctgagctctccgatgcaaattccgtgactggatcttagaaaaagccttttcatatacaggaagcttcaagactcaatgcacttgagctacactgatgattctcgccagcttaatgacctatacaattttccaacccctatggcctttttcgctgattgaattcagtgggtttattcatatagtagtaatgtaaatggtatagagatgagcaaaagctatattatatattatattcattagaggggtcatagcttttttccttacaagagatttgtaagctggcttaatagaagttgttaagaagcctcactttatgtgaataaatgattttgttagctaatcataaacaatcagaagtttcctnnnnnnnnnnnnnnnnnnnnnnnnnnnnnnnnnnnn

SEQ ID NO: 116831 - DNA, 1013 bp, Arabidopsis thaliana
  unsure (1)..(1013): unsure at all n locations
tnnnnnnnnnnnnnnnnnnnnnnnnnnnnnnnnnnnnnnnnnnnnnnnnnnnnnnnnnnnnnnnnnnnnnnnnacccacgcgtcccgggcgccttcactcttcatcttcaaagactgcgccttttagctcagtgaaaaaggttcgagcttcggaaactatggcagcattccctaaccttaactctgatgctggattgaagaagctcgacgagcatcttctcactcgcagttacattactggataccaggcttcaaaggatgatatcaccgtctttgcagctcttgcaaagcccccaacttcacagtatgtgaacgcttctcgttggtacaatcacattgatgccctcttgaggatctctggtgtctctgctgaaggaagcggtgtcattgttgagggatcagctcctatcactgaggaggctgttgctactccccctgcagctgattctaaggatgctgcggctgatgaagaagatgatgatgatgttgaccttttcggagaggagaccgaagaggaaaagaaagctgctgaagagagagcagcttctgtcaaggcatctacaaagaagaaggaatctggaaagtcctcagttttgattgatatcaaaccgtgggatgatgagactgacatgaagaagcttgaggaagctgtgaagtccattcagatggaaggtttgttttggggagcatcaaagcttgtcccagttggttatggtatcaagaagttgcagattttgtgcaccattgttgacgaccttgtctctattgacaccatgatcgaagagcaactcactgttgaaccgatcaatgaatatgtccagagctgtgacattgttgccttcaacaagatatgaggatggagaaagcttgaaggaatgtctgtgttcatgtggtctggttcttcttcttcttctatattcagtttccgaagtttttgtagatgttgttttgactctgttatcatggtctttgcttaccagaaacactcgaagtgcttacttcgaatggattca

SEQ ID NO: 116832 - DNA, 742 bp, Arabidopsis thaliana
  unsure (1)..(742): unsure at all n locations
gatctgccagctacaatacgactcacattagggaaagctcgtacgcctgcaggtaccggtccggaattcccgggtcgacccacagatgcgggctgatgaagaagatgatgatgatgttgaccttttcggagaggagaccgaagaggaaaagaaagctgctgaagagagagcagcttctgtcaaggcatctacaaagaagaaggaatctggaaagtcctcagttttgattgatatcaaaccgtgggatgatgagactgacatgaagaagcttgaggaagctgtgaagtccattcagatggaaggtttgttttggggagcatcaaagcttgtcccagttggttatggtatcaagaagttgcagattttgtgcaccattgttgacgaccttgtctctattgacaccatgatcgaagagcaactcactgttgaaccgatcaatgaatatgtccagagctgtgacattgttgccttcaacaagatatgaggatggagaaagcttcaaggaatgtctgtgttcatgtggtctggttcttcttcttcttctatattcagtttcccaagtttttgtagactgttgttttgactctgttatggcctgccatctctgatccattttgatatttaatgaaaagtgacaattcagtaaaaaaaaaaaaaaagaaagnnnnnnnnnnnnnnnnnnnnnnnnnnnnnnnnnnnnnnnnnnnnnnnnnnnnnnnnnnnnnnnnnnnnnnnnnnnncg

SEQ ID NO: 116833 - DNA, 594 bp, Arabidopsis thaliana
  unsure (1)..(594): unsure at all n locations
cggggcggaccaacccgtccgttttaattttaaaggactgcgcctttttgcttcagggaaaaaggttcgggcttcggaaactatggcagcattccctaaccttaactctgatgctggattgaagaagctcgacgaggcatcttctcactcgcagttacattactggataccaggcttcaaaggatggatatcaccgtctttgcagctcttgcaaagcccccaacttcacagtatgtgaacgcttctcgttggtacaatcacattgatgccctcttgaggatctctggtgtctctgctgaaggaagcggtgtcattgttgagggatcagctcctatcactgaggaggctgttgctactcccccctgcaagctgattctaagggtgcttcccggctgatgaagaaggatgatgatgatgttgacccttttcggagaggagccccagggggaaagaaaanttctttaagagaggcaagcttntttaagggattttcaaagaagaaggattttgnaagccccagttttnnttantnaaacccnggttntnncntcatnanagtttggactttagcctcantgnaggttttttgggngt

SEQ ID NO: 116834 - DNA, 533 bp, Arabidopsis thaliana
taccggtctgggattcccggctcgacccacgcgtccgaagctgctgaagagagagcagcttctgtgaaggcatctacaaagaagaaagaatccggaaagtcatcagttttgatggatatcaagccgtgggatgatgagacggacatgaagaagctagaggaagctgtaagatccattcagatggaaggattgttttggggagcatcaaagcttgtacccgttggttacggtatcaagaagttgcacatcatgtgcaccattgttgatgaccttgtatctatcgacaccatgatcgaagagcaactcactgttgaaccgatcaatgaatatgtccagagttgtgacattgttgccttcaacaagatatgaggatggagaatagcttgaaggaagaactgtttatgttggtggtttcttctctatatccagttttgttacctggttttattgtactctgtgggagggcttttaccaactctgattcattttgatatatgtgaagacaattcagttttgtcttaaagtttcccccc

SEQ ID NO: 116835 - DNA, 2430 bp, Arabidopsis thaliana
  unsure (1)..(2430): unsure at all n locations
nnnnnnnnnnnnnnnnnnnnnnnnnnnnnnnnnnnnnnnnnnnnnnnnnnnnnnnnnnnnnnnnnnnnnccacgcgtccgcttcttcttcgtcttcttctctgaatagtcacaatgcgagtcttcttcttccccaactcgtccatggcgattctctctgttttcctctccctccttctcctctctctccctcttccatcaactcaagatctcaacgccgacagaaccgctcttctctctctccgctccgccgtcggaggccgtacatttcgctggaacatcaaacaaacctcgccgtgtaactgggccggtgtcaaatgcgagagtaacagagtcaccgctctccgcttacccggcgttgctctctccggtgacattccagagggtattttcggtaacttaactcagctccgtacacttagccttcgtctcaatgctctctctggctcactccctaaagatctcagtacctcttccaatctccgacacctttacttacaaggaaacagattctccggcgagatacctgaagttttgttcagtctcagtcacctcgtgaggcttaatctcgcttccaacagcttcaccggagaaatctcttcaggtttcacgaacctcacgaagctaaagactctgtttctagagaataatcaactctctggttcaatccctgacttagatttacctttggttcaattcaacgtttcgaataactcgttgaacggttctatacctaagaatcttcagaggtttgagtctgattcgtttctacagacttcactttgtggcaaaccgcttaaactttgtcctgatgaagaaactgtacctagtcagcctacttctggtggaaacagaacaccaccgagtgttgaaggaagtgaagagaagaagaaaaagaacaaactttccggtggagctattgccggaattgtgatcggatgtgtggttggtttcgctttgattgttttgatactaatggtgctctgtcggaaaaagagtaataagagatcaagagctgttgatatctcaacaatcaaacagcaagaacctgaaattcctggagataaagaagcggtggataatggtaatgtctactcggtgtctgctgctgcagctgcggcgatgactggaaacggaaaagccagtgaagggaacggtccagcgacgaagaagcttgtgttctttggtaacgcgactaaggtttttgatcttgaagacttgttgagagcttctgcggaggttcttgggaaaggaacgtttgggacggcgtataaggcagtgcttgacgcggtgacggttgtggcggtgaagaggttgaaggatgtgatgatggctgataaagagtttaaggagaagattgagttggttggtgcgatggatcatgagaacttggtgccattgagagcttactatttcagcagagatgagaaacttcttgtctatgacttcatgcctatgggaagcttatcagctctcttacatggaaacagaggagcgggaaggagtccactaaactgggatgttagatcaagaattgcaattggtgcagctcgtggtctaaactaccttcactcacaaggcacttcaacatctcacggcaacatcaaatcctcaaacatcctcttaacgaaatcccacgacgctaaagtctcagactttggcttagcccagctcgtgggatcatcagcaacaaatccaaaccgcgctacgggttaccgtgctccagaagtaaccgatccgaaacgcgtgtcgcagaagggtgacgtgtacagtttcggagtggtgttgcttgagctgatcacgggtaaagctccttcgaactcggtgatgaacgaggaaggagttgatttgccgagatgggttaaatcggtggcgagagatgagtggaggagagaagttttcgactcggagttgcttagtttggcgacggatgaagaagagatgatggcggagatggtgcagctagggcttgagtgtacgtcacagcatccggaccagaggccggagatgtcggaagtggttaggaagatggagaatttgcgaccttattctggttcagaccaagtgaacgaagctgattaagtcaaagattcttaattgttaatttatttaatttgaatgaaatggttggggagaaatcaggtttataattttaatttttaatttttgacccaacttgtcaaaaagcacaaggggttttattattagtgggtgactctgctggcatttgcagttgtttgtgttgggcgtgaagggatttggtggtgatttgtaattattgttgttgcttccctttcttaaatctattttctaaattgttacgtatctttttgtcaaaaaaaaaaaaaaaaaaaagggcggccgctctagaggatccaagcttacgtacgcgtgcatgcgacgtcataaattttctagtagtggcacctaa

SEQ ID NO: 116836 - DNA, 657 bp, Arabidopsis thaliana
  unsure (1)..(657): unsure at all n locations
catacgactcactataaggaaagctggtacgcctgcaggtaccggtccggaattcccgggtctacccacgcgtgcgtgcacgcgtntcgtccacgcgttcagccacgcgtccagccacgcgtacgtacggctgatactgagtcgtgatgacgacagaaggggagagtaaagaagataaaaaacacaatttgaagcttttataatattttctcagaaactttcaaagagcttagaaaaatgagtacagctactttcgttgatattattatcgccatcctcttgcctccactcggtgtctttctcagatttggttgcggggttgagttttggatatgtttggttttgacgctacttgggtatattcctgggatcatatacgccatttatgtcctcaccaaatgatttaccatctatcatcatctccttgaacagctgttccgtcgtgttctcctatctttgtgactgattcagcgtttctttttctttcatcagagtttttatgtttcaagtaatttaattaatcatcactgttgtgtttgcattgttatataaatgttgtgttgatataaaagaagagagcgttggtttaaaaaaaaatacccatttgagtaaaaggccggcgttttaaagaatcaacttacgtaccttgctgcaact

SEQ ID NO: 116837 - DNA, 566 bp, Arabidopsis thaliana
  unsure (1)..(566): unsure at all n locations
gcgggtcgacccacgcgtacggaaaacgacagaaggggagagtaaagaagataaaaaacacaatttgaagcttttataatattttctcagaaactttcaaagagcttagaaaaatgagtacagctactttcgttgatattattatcgccatcctcttgcctccactcggtgtctttctcagatttggttgcggggttgagttttggatatgtttggttttgacgctacttgggtatattcctgggatcatatacgccatttatgtcctcaccaaatgatttaccatctatcatcatctccttgaacagctgttccgtcgtgttctcctatctttgtgactgattcagcgtttctttttctttcatcagagtttttatgtttcaagtaatttaattaatcatcactgttgtgtttgcattgttatataaatgttgtgttgatataaaagaagagagcgttggtttgtactttgtgtgaagattttttaaaaatatagttggtttattacaataaattggaaattgtgttgccttggtggatcacaggaccaccattaaccattatnn

SEQ ID NO: 116838 - DNA, 928 bp, Arabidopsis thaliana
tcactatagggatagctggtacgcctgcaggtaccggtccggaattcccgggtcgacccacgcgtccgctcatttcttgttattatccacgaacgaagaaaaacctagaaaacagttgaagaaagaaaatcacaagagaagccatggccggaattggaccgattactcaggattgggaaccagttgtgatccgcaagagagctcctaacgctgcagctaagcgcgacgagaagactgtcaacgccgctcgtcgaagcggcgccgatattgagaccgttcgaaaattcaatgctggatcgaacaaggctgcatcaagcggcacctccttgaacacaaagaagctagatgatgatactgagaacttatctcatgatcgtgtgcccactgaattgaagaaagccatcatgcaagctagaggggagaagaagctgactcagtcccaacttgcccatctgatcaatgagaagccacaagtgatccaagaatacgagtctgggaaagcaattccgaatcaacagatcctttcaaagctggagagggcacttggtgctaaactccgtggaaagaagtagaagtgtagaacaaagctcttaaaggtaacaacaaaagctgatcgcagtttctctccagtccacatgctttaccatatcctaaaaactatatctatgtatggtttggtttaatggcgtagtagtttgttgcgaggaatctttcatgatgtaagaaaaacaaagctgtttggaaccttttgtcattataaataatctcttctctttctttttcgtcatgtctcgtaaactttatctgccacggatgtatgttcttaaagaaattgaagattgaaattgatcaattgccaataatgatctcttttgtctctgtatatgtattgattcaaacaaaaatcatagtagaaaactgtcaagag

SEQ ID NO: 116839 - DNA, 446 bp, Arabidopsis thaliana
gagagtaaagaagataaaaaacacaatttgaagcttttataatattttctcagaaactttcaaggagcttagaaaaatgagtacagctactttcgttgatattattatcgccatcttcttgtctctctctcatttcttgttattatccacgaacgaagaaaaacctagaaaacagttgaagaaagaaaatcacaagagaagccatggccggaattggaccgattactcaggattggggaccagttgtgatccgcaagagagctcctaacgctgcagctaagcgcgacgagaagactgtcaacgccgctcgtcgaagcggcgccgatattgagaccgttcgaaaattcaatgctggatcgaacaaggctgcatcaagcggcacctccctgaacacaaagaagctagatgatgatactgagaacttatctcatgatcgtgtgcccact

SEQ ID NO: 116840 - DNA, 705 bp, Arabidopsis thaliana
cccaagcgtccgcttaagctgtggtggcgcctccagagtctggtaaaagagcttaatcctcctctcgcgatctttctcggcatccaaaaatgtctctagttgcgaacgaggagtttcagcatattctgcgtgtgctcaatactaatgtcgatgggaagcaaaaaattatgtttgctttgacctcaatcaagggtattggaaggcgattggctaacattgtgtgcaagaaggctgatgttgacatgaacaagagggctggagaactaagtgctgctgagattgataacctcatgacaatcgttgctaaccctcgccagttcaagatcccagactggtttcttaacagacaaaaggattacaaggatgggaaatactcccaagttgtttccaatgctcttgacatgaagttgagagatgatcttgagcgtctcaagaagatcagaaaccatcgtggtctgaggcactactggggtctccgtgtacgtggacagcacaccaaaaccaccggacgccgtggaaagactgttggtgtttccaagaagcgttaaaaagagtttgagcttggttcaatggctttgttttgttttttttgtattgttgttttttgcagaagagatagtttaagagatgttgtttcatcaaaagacggtcttagcttttacaatatataattgaatccaaaaactagtctctatttattttacc

SEQ ID NO: 116841 - DNA, 870 bp, Arabidopsis thaliana
tacgactcacgttagggaaagctcgtacgcctgcaggtaccggtccggaattcccgggtcggcccgcgcgtgtgggtcactctccagcgatcgtttattgcttgaagacggcttcttcttctcacaaacctcatctctgctaatcaaaatgtctctggttgcaaatgaggagtttcaacacattcttcgtgtgttgaatactaatgttgatggtaagcagaagattatgtttgcccttacctctatcaaaggtattggtaggcgattggctaacattgtctgcaagaaggctgatgtcgacatgaacaaaagggctggtgagttatctgctgctgagattgataacctcatgacaatcgttgcaaacccacgtcagttcaagatcccagactggttcttgaacaggcagaaggattacaaagatggcaagtattctcaagttgtctccaatgctcttgacatgaagctgagagatgatcttgaacgtctcaagaagatcagaaaccaccgtggtttgaggcattactggggtctccgtgtcagaggacaacacaccaagactactggtcgcagaggaaagactgttggtgtctcaaagaagcgttaagaaagatccaatgttgctacttacttctgtattggatacttcataaggacctgtttttatttcgtactaggacctttttgtgtgacgcttttcgagctttttgtgatcacattcctctgtttttcattcttgatccctccagtgccctgaatagtcttatttattttaatttccagcttaaaaaaaaaaaaaaaagggcgagcgctgtacagtatacaagcttacgtacgcgtgcatggggcgtcatagctcatagatagtgt

SEQ ID NO: 116842 - DNA, 810 bp, Arabidopsis thaliana
  unsure (1)..(810): unsure at all n locations
tacgactcactatttggaaagctggcacgcctgcaggtaccggtccggaattcccgggtcgaccactgaagagagaaagcttgaagacggcgagagctccatcttttctcaggcatctcttatcttcaaatcacaatgtctctggttgcaaatgaggagtttcagcacattttgcgtgtgctcaacactaacgttgatggtaagcaaaagattatgtttgcccttacctctatcaaaggtattggaaggagattggccaacattgtctgcaagaaagccgatgtcgacatgaacaagagggctggtgagttatctgcagctgagattgacaacctcatgactattgttgcaaacccaagacagttcaagattccagactggtttttgaacagacagaaagattacaaggatgggaagtactctcaagttgtctccaatgcccttgacatgaagctcagggatgatcttgagcgtctcaagaaaatcagaaaccatcgtggtctgagacattactggggtctccgtgttcgtggacaacacaccaagacaactggtcgcagaggaaagactgttggtgtgtctaagaagcgttaagccaatgttgctagttgcagctggattggatctttgataaggactgaattttaaattttgttgttcgtacaattttgcacgactcgattttgggtcttttgtgagagatcttctctactgtcatattgcttttaagataatgttgcttactggatcttatgtcacctctctagttacatccatctttcggttggcctattnaattggtttccttcc

SEQ ID NO: 116843 - DNA, 557 bp, Arabidopsis thaliana
acgtcagttcaagatcccagactggttcttgaacaggcagaaggattacaaagatggcaagtattctcaagttgtctccaatgctcttgacatgaagctgagagatgatcgtgcaacgtctcaagaagatcagaaaccaccgtggtttgaggcattactggggtctccgtgtcagaggacaacacaccaagactactggtcgcagaggaaagactgttggtgtctcaaagaagcgttaagaaagatccaatgttgctacttacttctgtattggatacttcataaggacctgtttttatttcgtactaggacctttttgtgtgacgcttttcgagctttttgtgatcacattcctctgtttttcattcttgatccctccagtgccttgaatagtcttatttattttaatttccagcttactctgcttattgtctactgtgacagcaacagatgtctaaggcaattcaacaaaaaaaaaacaaaagggcgaccgctctagaggatccaagcttacgtacgcgtgcgtgcgacgtcataactcttctatagtgtaccta

SEQ ID NO: 116844 - DNA, 2301 bp, Arabidopsis thaliana
atgttaagatctttaggtcttggattgcttctgtttgctcttcttgctctggtttctggtgataacgattacgtgagctgtaattgtgacgacgaaggtttcttaagtgtccacaccatcttagaatgtcaaagagtgagtgatctcttaatagccattgcctatttctcaatacctctcgagcttctctacttcattagcttctccaatgttcctttcaaatgggttcttgttcaattcattgcctttattgtcctatgtggaatgactcatttgcttaacgcttggacgtattacggaccacactctttccagcttatgctttggcttaccatctttaaattcctcacggcgcttgtctcgtgtgccacggctatcacgctcttgactttgattccgttgctgttgaaatggaaagttagagagctttacttgaagcagaatgtgttggagcttaatgaagaggttggattgatgaagaggcagaaggaaatgagtgtgcaggtgagaatgcttactcgggagatcaggaaatcgctcgataagcatatgattctgcggactactctcgttgagctatccaagattcttgatttacagaactctgctgtttggatgcctaacgagaacagaaccgagatgcatttgactcatgagcttagagcgaatccgatgaggagtttcagggtaatcccgattaatgatcccgatgttgttcaggttagggagaccaaagtagtgacaattttgaggaaaaactctgttcttgcggttgagagcagtggttgtggcggttcggaagagtttggaccggttgctgcaattcggatgccgatgcttcacggattgaatttcaaaggaggcactcccgagtttgtggatactccttatgctataatggttttggtacttccgagtgcgaattcacgggtttggaccgataaagagatcgagatagcggaagttgttgctgatcaagtagcggttgctatctctcatgcctcagttcttgaagaatcacagttaatgagagaaaaactcggtattcaaaaccgagctttacttcgagcaaaacagaacgcgatgatggcaagtcaagcgaggaacacttgccagaaagtgatgagtcatggaatgaggagaccaatgcacacaattcttggtctactctccatgtttcagtccgaaagtatgagtcttgaccagaaaatcatcgttgatgcgctcatgaaaacaagcacagttctctcagctttaatcaacgacgtgattgacatttcgcctaaagataacgggaaatctgcattagaggttaaacggttccagctacattccttgataagagaagccgcttgtgttgctaaatgcttaagcgtttacaaaggttacggttttgagatggatgttcaaacgcggttgcctaatttagtagtaggagatgaaaagagaacgtttcagcttgtgatgtatatgcttgggtatatcttggatatgactgatggaggcaaaaccgttacgttccgagttatctgtgaaggtactggaacaagtcaggacaagagcaaaagagaaactggaatgtggaagtcccatatgtccgatgattccctcggtgtgaaatttgaagttgagattaatgagattcagaatcctccattggatggttcggctatggctatgagacatattccgaacagaagatatcatagcaatgggattaaggaaggcttgagcttaggcatgtgtagaaaacttgcacagatgatgcaaggaaacatatggatatcacctaaatcgcatggacaaacacagagtatgcaattagttctgaggtttcagacaagaccatcgattaggagatcaatcttagcaggaaatgctccagagcttcaacatccgaattcaaattccattcttcgtggtctaagaatcactctagcagacgatgatgatgtcaacagaaccgtgactaagagacttcttgagaaactcggctgcgaagtaactgctgtctcgtctggatttgagtgtttgaatgcgttgtcaaatgtggaaatgtcgtatagagttgtgattttggatctgcagatgccggagatggatggtttcgaagtagcaatgaagataaggaagttttgtggacatcattggccattgattatagctttgactgctagtactgaagatcatgttagggaaagatgtttgcaaatggggatgaatggtatgatccagaaaccggttcttttgcatgttatggcttctgagcttagacgggctttgcagaccgcgagcgagtga

SEQ ID NO: 116845 - DNA, 866 bp, Arabidopsis thaliana
tttcccacgcgtccgccacgcctaaaaaaaagaaaaaagagacagaagaagaaaaagataaagaagaatcaaactttgtaaccctttagcagcaatggcgatggctttcaagatggcgacgacggggatgcgtgtgacggatgagtgtacgagttcattcatggacatgaaatggaagaaagttcatagatacatcgttttcaagatcgaagagaagtcacgtaaagtcaccgtcgataaagtcggcggcgccggtgaaagctaccacgatctcgaagattctttaccggtggatgattgtcgctacgctgtctttgatttcgactttgtcaccgtcgataactgccgcaagagcaagatcttcttcattgcatggtcaccggaggcatcaaagataagggcaaagatattgtacgcaacgtcgaaagatgggctgaggagagtgttggaagggattcactatgaactccaagctactgatccgacggagatgggtttcgatattatccaagaccgtgccaaatagattgatcacttaagagaatatgatttgactcactttgtcaataattaacattaattaggtcatcggttaatgtttaattattgctggttagtgcttactcttttttgagtttattatccttgatcagtcttaccggcactatcctttaattatgacgtttgtgttttgattgtgttgttaaaatatttttttgtcggttaagcaaacataaaaagctacgaatttgtcctacgagtaacggatattatacatttatgagagattttattttataaaaaaaaaaaaaaaaaagcggccgctctagaggatccaagcttacggacgcgtgcatgcgacgtca

SEQ ID NO: 116846 - DNA, 564 bp, Arabidopsis thaliana
  unsure (1)..(564): unsure at all n locations
nnatgatttgccnnnnnnnnnnnnnnnnnnnnnnnnnnnnnnnnnnnnnnnnnnnnnnnnnnnnnnnnnnnnnnnnnnnnnnnccacgcgtccgcgcctattgttgccgttgcttgctatctttcgccgtcgtctctttagcttcttgcgaagatggttcttcaaaacgatatcgatctgcttaacccacctgctgagcttgagaagaggaagcacaagctcaagcgtcttgtccagtctcccaattccttcttcatggatgtgaagtgccaaggctgcttcaacatcactactgttttcagtcactcgcagactgttgtggtgtgcggaaactgccagacaattctgtgccagcctacaggaggaaaggcaaagctcaccgaaggatgctctttcaggagaaagggtgattgattgaagcaatcatcaaaataatgaaggctgttttctttttcttttttttttgttgttgttggctatgatgttatctctggaattttaaaatgtttggatttttaatataagtaagcagagtttgctctttttaaaaaaaaaaaaaaaaaa

SEQ ID NO: 116847 - DNA, 2077 bp, Arabidopsis thaliana
  unsure (1)..(2077): unsure at all n locations
atgatgaatccgagtcacggaagaggactcggatcggctggtgggtccagctccggtagaaatcaaggaggtggtggtgagaccgtcgtcgagatgtttccttctggtcttcgagttcttgtcgttgacgatgacccaacttgtctcatgatcttagagaggatgcttaggacttgtctttacgaagtaacgaaatgcaacagagcagagatggcattgtctctgctccggaagaacaaacatggattcgatatagtaatcagtgatgttcatatgcctgacatggacggtttcaagcttcttgagcatgttggtctagagatggacttacctgttatcatgatgtctgcggatgattcaaagagtgtggttctaaagggagtaacgcacggtgcggttgattaccttatcaagcctgtacgtatggaggcacttaagaacatatggcagcatgtagttaggaagaggagaagtgaatggagtgtaccggaacattctgggagcattgaggagactggcgagagacagcagcagcaacatagaggaggtggtggtggtgcagctgtttctggtggagaggatgcggtggatgataactcatcctcggttaacgaaggtaacaattggaggagcagttcacggaagaggaaagacgaggaaggagaagagcaaggagatgataaggacgaagatgcgtcgaatttgaagaaaccgcgtgtcgtctggtctgttgaattgcatcagcagtttgttgctgctgttaatcagctcggcgttgagaaggcggttcctaaaaagatcttagagctgatgaatgttcctggtctaacccgagaaaacgtagcaagtcacctccagaaataccggatatatctaagacggcttggaggggtatcgcagcaccaaggcaatcttaacaactcgtttatgacgggtcaggatgcgagcttcggacctctttcgacattgaatgggtttgatcttcaagcactagccgtcacaggtcagttacctgcacagagtcttgcacagcttcaagccgctggtttaggccggcctgcgatggtctctaagtcaggtttgccggtttcctccattgtggatgagagaagcatcttcagctttgacaacacgaaaacaagatttggagaagggcttgggcatcacgggcaacaaccccaacagcaaccacagatgaacttacttcacggtgtccccacgggtttacaacagcagcttcctatgggtaatcgaatgagtattcaacaacagattgctgctgttcgagctggaaatagtgttcaaaacaacggaatgctgatgcctctagcgggtcagcagtctttgcctcggggaccaccgcctatgctaacctcttcgcaatcatccatcaggcagccgatgttatcaaaccgcatttccgagagaagtggtttctctggaaggaacaatatccccgagagcagcagagtgttaccgacaagttacactaatctcacaacacaacactcatcaagctcgatgccttataacaacttccaaccagaacttcccgtgaacagtttcccgctggcaagtgcaccagggatatcagtaccggttcggaaagccacttcttaccaggaagaggttaacagctccgaagcgggtttcactacgccgagctacgacatgttcaccaccagacagaatgattgggatctgaggaatattggaatagcctttgactcacatcaggactcagaatccgctgcgttttccgcttcaagaagcctactcttcttcgtccatgtcaagacacaacacggcagttgcagccaccgagcatggccgaaaccaccagcagccaccatcgggaatggtacagcaccatcaggtttatgcagacggaaacggtggttcagtgagggtgaaatcagagagagtggctacggatacagcaacaatggcgtttcacgagcagtatagtaatcaagaagatcttatgagcgcacttcttaagcaggtttgattgtttttttttttttgnactttttggggatatttttcgaacgnntttttntnaaacaattttttt

SEQ ID NO: 116848 - DNA, 1212 bp, Arabidopsis thaliana
gagtgagagaagaagatcgatcaatcaatcatcaaaccagtgtgagtaatttagcattactactgttgacttgttcaataaaggtaaagtaagatcaatccggcgcaatcttctttcgttttccggcaccgatctcggtggatctccgattcacatggcggcggataatgcttatctgatgcagtttgttgacgaaacctctttttacaaccgaatcgttctgagtcatcttttgccggcgaatctatgggaacccttacctcattttctccagacatggctccgaaattacctcgccggaaccctactatacttcatctccggtttcctctggtgcttctacatctattaccttaaaatcaacgtttaccttcccaaagatgcaattcctacaataaaggctatgcgtttgcaaatgtttgtggcaatgaaggctatgccatggtacactcttcttccaactgtctccgagagtatgattgaacgtggttggaccaaatgttttgctagcataggcgaattcggctggattctgtattttgtttacatcgccatctatcttgttttcgttgagtttggtatttattggatgcacagagagcttcatgacattaagcctctctataagtatctccatgccacccatcatatctacaacaagcagaatacactctctccatttgccgggcttgcatttcacccagtagacgggatacttcaggctgtaccgcatgtgatagcgctgtttatagtgccaattcatttcacaactcatataggtcttttgttcatggaagcgatatggacggcgaacatccatgactgcatccatggcaacatctggccagtaatgggtgcaggataccatacgatacaccacacgacatacaagcataactatggtcattataccatatggatggattggatgtttggctctcttagggatcctctcttagaagaagatgacaacaaagacagcttcaagaaagcagagtgaggatgcccacttgggggttgttcttctgtgttgtcttgtgttgttgttgtccaaagtttcagcctttcttgttctttttcttcttcttcttattcatgtgtctctctcaacctttccaattatattgttacaaacatttgctgtctagtttaaaacatgtaaatgtttgatgatctttccccaaaaaaaaaaaaactaaattactcacactg

SEQ ID NO: 116849 - DNA, 1452 bp, Arabidopsis thaliana
atgtttgtaaatttcaaatacttctctttctttatccgtacgaaaatggacggtgttaccggcggaggaacgaatatcggcgaggctgtgacggcgccaccaccgcggaatccgcatccagcgactttacttaatgcgaactctttaccgccccctttccttagcaagacgtatgacatggtggaagatccggcgacggacgcgattgtctcatggagtccgacgaacaatagcttcattgtttgggatccaccggagttttctcgtgatcttctacctaaatacttcaaacacaacaatttctccagctttgttcgccagttaaacacctatggttttaggaaagtggatccagatcgatgggaatttgctaatgaaggtttcttaagaggtcaaaaacatctattgaagaagataagccggagaaaatctgttcagggacatggtagtagtagtagtaatccacaatctcagcaattatctcagggtcaaggttcaatggctgcattatcttcatgtgttgaggttgggaaatttgggttagaggaagaagttgaacagcttaaaagagacaaaaacgtgttgatgcaggaactcgttaagttacgccagcagcaacaaacaacagataataaacttcaggttatggttaaacatcttcaggttatggagcagaggcaacaacagattatgtctttccttgctaaagctgtacagaatcctactttcctctctcagtttatacagaagcagactgatagtaatatgcatgtaaccgaggccaataagaagcggagactcagagaggatagtactgctgctactgagagtaatagtcatagccatagcttggatgcatcagatggacagatagttaagtatcagccacttagaaacgattcaatgatgtggaacatgatgaaaacagatgataagtatccgtttcttgacgggttctcatctccaaaccaggtatcaggagtcactcttcaagaggtactacccacaacttcaggacagtcacaggcatatgcatctgtaccatcaggacagcctttatcatacttaccctctacttcaacttctctcccggataccataatgccagagacttcccagataccacaattgacacgagagagtatcaacgacttccctacagaaaactacatggatacagagaagaatgttccagaggcattcatctctccaagcccattccttgatggtggttcagtcccgattcagcttgagggaatacccgaagaccccgagattgatgaactaatgagtaactttgaattccttgaagaatatatgccagaaagcccagtttttggagatgcaactacactagagaacaacaacaacaacaacaacaacacaaatggtagacatatggataagcttatagaagaattgggtcttctcacatcagaaacagaacactag

SEQ ID NO: 116850 - DNA, 1051 bp, Arabidopsis thaliana
  unsure (1)..(1051): unsure at all n locations
tgattatctccnnnnnnnnnnnnnnnnnnnnnnnnnnnnnnnnnnnnnnnnnnnnnnnnnnnnccaagcttctccacgcgtccccattcatcacttatacgatctcttcccaaattattgattttttttacccatttctctcatcgcacggtgatattgagaatcgccgacctgaatcgatcggaaaactttctctgattaccggcggtcaacaccgctgaacacatatgtttgtttgacgacctcttctctccgcgatctttacctcaacaacgagatctgtttccacgaaagaaaggaggatgtcgacgccagcaaggaagaggttaatgagggatttcaagaggttgcagcaagacccacctgcgggtattagtggtgctccacaggacaacaacattatgctctggaatgctgtcatatttgggcctgatgacacaccatgggatggaggtactttcaaactctcactgcagttctctgaagattatcccaataaaccaccaacagttcggtttgtgtcacggatgtttcatcctaatatttatgcagatgggagtatctgcttggacattctacaaaaccagtggagtccaatctatgatgttgctgctatacttacctccatccagtccttgctctgtgaccctaatccgaattctcctgcaaactcggaagctgctcggatgtacagcgaaagcaagcgcgagtacaacaggagagtgcgtgatgttgttgagcaaagctggactgctgactagtagtagtttgttgtaagcgttgtagctctctctactttctctcaatcacgattcagcaacagctttcttctcttttcattcatgtcttgtgtttccaaaactatttaagtgattccatgctttgatgtaacccaacatccttaaaaaaacaactttgtaccaaaccatctgaattattcacttttgtgtatatatgtattacgatttacttgaaaaaaaaaaaaaagggcggccgctctagaggatccaagcttacgtacgcgtgcatgagacgtcaaggtggtttataa

SEQ ID NO: 116851 - DNA, 782 bp, Arabidopsis thaliana
attcgactcatatagggaaagctggtacgcctgcaggtaccggtccggaattcccgggtcgacccacgcgttcgcccacgcgtccggacgccagcaaggaagaggttaatgagggatttcaagaggttgcagcaagacccacctgcgggtattagtggtgctccacaggacaacaacattatgctctggaatgctgtcatatttgggcctgatgactcaccatggggtggaggtactttcaaactctcactgcagttctctgaagattatcccaataaaccaccaacagttcggtttgtgtcacggatgtttcatcctaatatttaggcagatgggagtatctgcttggacattctacaaaaccaggggagtccaatctatgatggtgctgctatacttacctccatccagtccttgctctgtgaccctaagtccgaattctcctgcaaactccggaagctgctccgaatgtacagcgaaagcaagcgcgagtacaacaggaaagtgcgtgatgttgttgagcaaagctggactgctgactagtagtagtttgttgtaagcgttgtagctctctctactttctttcaatcacgattcagcaacagcttttttctcttttcattcatgtcttgtgtttccaaaactatttaagtgattccatgctttgatgtaacccaacatccttaaaaaaacaactttgtaccaaaaaaaaaaaaaaaaaaaaaaaaagggcggccgctctagaggatccaagcttacgtacgcgtgcatgcgacgtgaag

SEQ ID NO: 116852 - DNA, 556 bp, Arabidopsis thaliana
  unsure (1)..(556): unsure at all n locations
cttatacgatctcttcccaaatnattgatttttttaacccatttctctcatcgcacggtgatattgagaatcgccgacctgaatcgatcggaaaactttctctgattaccggcggtcaacaccgctgaacacatatgtttgtttgacgacctcttctctccgcgatctttacctcaacaacgagatctgtttccacgaaagaaaggaggatgtcgacgccagcaaggaagaggttaatgagggatttcaagaggttgcagcaagacccacctgcgggtattagtggtgctccacaggacaacaacattatgctctgggaatgctgtcatattttgggcctcattgacacaccattggggattggagggtctttctaaaactcctcactgcagttttctgaaggcgttcttcccccattaaaccccccccagttcgggtttttttcccggggggtcttccccctatttttttagntgggggttttctttggcattttcaaancagtggggccantntanggtgtgnntattccncancggctttcntggccaatgta

SEQ ID NO: 116853 - DNA, 983 bp, Arabidopsis thaliana
  unsure (1)..(983): unsure at all n locations
cacgcgtccgcagaagcgtgggacgaacttctacatcatttctcttttctctcatcgctcggtgaattcgaggatcctcgagctttttgatcggagactttttctctcatcgtcgttgtttgaattctccggctgagagatgcttgcttgacgacgaatctccaccgatcttttaccttttcgcacaacaagtaagagaaggatgtcgactccagcgaggaagagattgatgagggatttcaagaggttgcagcaagacccacctgcaggaattagtggtgctccacaagacaacaatatcatgttgtggaatgctgttatattcgggcctgatgataccccttgggatggaggtactttcaaattgtcactgcagttttcggaagattatccaaataaaccaccaacagtgcggtttgtttcacggatgttccatccaaacatttatgctgatgggagtatatgcttggacattctccaaaaccaatggagtccaatatacgatgtcgctgctatactaacctccattcagtcattgctatgtgatcctaatccgaattctcctgcaaattcggaagctgcacgaatgttcagtgaaagcaagcgcgagtacaacagaagagtccgcgaggttgtcgaacaaagctggactgccgactagtaattatatcattgtagcatttgtcttcaaataacattaaacctcctctcttgtatctgatttcgaccatcacatctctgagagaagtttactctccctaccactctcttttatgtctttctgtgtttttcaaactctgtgatttgttgctcttcatgttttttttctttgtattttcgtaaccacattcatcttcataattatcatatgtatttcagtcgcaaaaaaaaaaaaaaaaaattatatttggtaaatcagtttacaaatttagttaatannnnnnnnnnnnnnnnnnnnnnnnnnnnnnnnnnnnnnnnnnnnn

SEQ ID NO: 116854 - DNA, 569 bp, Arabidopsis thaliana
  unsure (1)..(569): unsure at all n locations
gaaatcgtttctcgtctctctctctctaaaaccagattcttaatagaagaagaagaagaagaagaggaaaggagaaatctgccatggcgtcgccgagcaaacgtcgagagatggatatgatgaaactgatgatgagtgattacaaggtggatactgtcaacgacgatttgcaaatgttctatgtcacattccatggacccactgacagtctttatcaggggggtgtatggaagataaaagtggaacttcccgaagcttatccatacaaatctccatctgttggatttgtcaacaagatttatcaccctaatgtcgatgaatcttctggtgctgtttgcttagatgttataaaccagacttggagcccaatgtttgatcttataaaattgtgttcgaatccttccttccggaactgcttctatatccaaaccccatcaggtccctttaatgggggagccggttctctgttgatccgggacccgtccaagcctttgggcntaaggggaaaggattttttgggggaatttcaaaacccagggggggtttaaggtattggtgntntgtttnnc

SEQ ID NO: 116855 - DNA, 637 bp, Arabidopsis thaliana
ctttatcaggggggtgtatggaagataaaagtggaacttcccgaagcttatccatacaaatctccatctgttggatttgtcaacaagatttatcaccctaatgtcgatgaatcttctggtgctgtttgcttagatgttataaaccagacttggagcccaatgtttgatcttataaatgtgttcgaatccttccttccgcaactgcttctatatccaaacccatcagatccatttaatggagaagccgcttctctgttgatgcgagaccgtgcagcctatgagctcaaagtgaaagaatattgtgagaaatatgcaaaaccagaggagattttaagtgatgatgatgatgatgatagcatgagcgaagatggttcggactctgatgatgatgacgacgacgaaatcgttgggaaagccgatccatgactgtttacaaatcaatctttctttgcactttcattactccatcttcaactttaaaccagtaatgctcattgcaaagaggagagaagctttcctctgtaaatttgtaaagacttatcattctttaggactattgaaatctcttttttttaaacagtagataaaatgtaacaatttgccatctcacaccaatgaaacattaatccatatctcc

SEQ ID NO: 116856 - DNA, 626 bp, Arabidopsis thaliana
  unsure (1)..(626): unsure at all n locations
tgatcttcaggtctcgtgaaaatatataaataaaaaatcaataaacgaaaatctttcctttttctctcacacatttttcttcatctccactcgaatccggaagaagaacaaaaaccaaaaaaaaaacccagaaaatcagagaaacataagcgaaccgacagagaaaaaaaatgtcttcgccaagcaaacgcagagaaatggatatgatgaagctgatgatgagcgattataaagtggaaacgatcaacgatggcatgcaagaattctatgttgaattcaatggtcccaaagacagtctctatcaaggaggtgtgtggaagataagagttgagcttccagatgcttatccttataaatctccatctgttggtttcattactaaaatttatcatcctaatgttgatgaactgtcgggttctgtttgtttagatgtgattaaccaaacttggggtcctatgttcgaccttgtgaatgtgtttgagacatttcttcctcagcttcttctgtatccaaacccctcaggtccccttgattggagaagctgctgcgttaataattcgggaccgccctctnttggcacggggtaaagatcctttgggggttcaaacccgggaaggtnanagnag

SEQ ID NO: 116857 - DNA, 746 bp, Arabidopsis thaliana
tatttctccacttgattcccagaagacaaaaaaaaaaaaaatcagaaaaaaagaagaagagagaaaccatgtcttcgccgagcaagcgtagagaaatggatttgatgaaactgatgatgagtgactacaaggtggagatgatcaatgatggcatgcaagagttctttgtcgaattcagtggacccaaagacagtatatatgagggaggtgtgtggaagataagagttgaacttcctgatgcttatccttataaatctccatctgttggtttcattaccaaaatataccaccctaatgtcgatgaaatgtcaggttctgtttgtctagatgttattaaccagacctgggggcccgatgttcgacctgggtgaatgtgttcgagacatttcttcccgcaacttcttctgttatccgaatccgtcagatccattgaatggtgaagcatgctgcattgaatgatgcgtgatcgtcctgcttatgagcaacgagttaaagaatactgtgagaagtatgcaaagccaggggaaggttcagaagataagtctagcgatgaagaactaagtgaagaggaatacggctcagataatgaggatgatgatgatgatgatgttgcaattcctggcaaaccaggtcccttgacccagctttggtaggggccttgttttattgtatatgatcatgaattatctctgcttataactcaactgtgaaatctatttctccctttgtgctttgttcacctgttt

SEQ ID NO: 116858 - DNA, 1523 bp, Arabidopsis thaliana
  unsure (1)..(1523): unsure at all n locations
gataaaagccattttgatttgtcgttttaatgccttccatttttaaaaagaaagattactagcgccgactctctaaaactctctcaaaccataaaaaatattctccgatcatcattttaatggagagtacagattcttccggtggtcctccgccgccgcaaccaaacctccctccaggattccggtttcatccaacagacgaagaacttgtaattcattacctcaaacgcaaagcagattctgttcctttaccagtcgcgatcatcgccgacgttgatctttacaaatttgatccatgggaacttcccgcgaaagcttcgtttggagaacaagaatggtattttttcagtccaagagatcggaaatatcccaacggagctagacctaaccgagctgcgacttccggttattggaaagcgactggtacagataaaccggtgatttcaaccggcggtggtggtagtaaaaaagtgggagttaaaaaggctctagtgttttacagtggtaaaccaccaaaaggagttaaatcagattggattatgcatgaatatcggttaactgataataaacctactcatatttgtgacttcggcaacaagaaaaactctctcaggcttgatgattgggtgttgtgtcgtatctacaagaaaaacaatagtacagcatctagacatcatcatcatcttcatcatattcatctagataatgatcatcatcgtcatgatatgatgattgatgatgatcgattccgtcatgttcctcctggtcttcacttcccggcgattttttctgacaataatgatccgacggctatatatgatggtggcggcggcggatacggaggtggaagttactcgatgaatcattgtttcgcatctggatcaaagcaggagcagttgtttccaccggtgatgatgatgactagtctaaatcaagattccggtattggatcgtcgtcgtcacctagcaagagatttaacggcggcggcgttggagattgttcgacttctatggcggcgacgccgttaatgcagaaccaaggtgggatttaccaattgcctggtttgaattggtattcttgaaaacaatttacgatgaagaatttttaaaatttgtgtatatatatacggtttgagtgattagggggcattgggggattttatttacggttgattattattgtagtgttatagaactaaggagattaaattaaatagattggaggagaggtataaggtaacatatagaaattatacaacaatagtttaaatattcttttcttttctttttcatgttattatttttactaatgtataggtgatgattatacttagatgtttgtagcttgtataaattaatgcatgcatatatataaaaatatattaaccaaaaaaaaaaaaaaaaaaaaaaaaaaaggnnnnnnnnnnnnnnnnnnnnnnnnnnnnnnnnnnnnnnnnnnnnnnnnnnnnnnnnnnnnnnnnnnnnnnnnnnnnnnnnnnnnnnnnngagacctgaagtatcat

SEQ ID NO: 116859 - DNA, 1666 bp, Arabidopsis thaliana
  unsure (1)..(1666): unsure at all n locations
ttaggtacacctatagaagactatgacgtcgcctgcacgcgtacgtaagcttggatcctctagagcggccgccctttttttttttttttttttaaacaaatttaatatgcctttattcatttttatgtttatataatgagatttgaaaccattgagttcctacgattggggaaacaaatacatatgtgtgatttaaaccactgagtaatatgttcacaaactctcagaacaggggaagtgccctcctattattattgtgcttatataataacaaaaactaaaccaaaagatgactcaagtcattcgacttagcaaagtccaaatacttctttatttgttttcttgaacgttggggtcgtttctcatcatcttcccaatgtcacctcctcaaaagcttaccggtactgaggagcaagttcaccgtccttgacgatgtaattctcagtagggaagtcttctcccttgaagtatctctccaacatgtctttcgtccccgccgcataccgtagctgagcgtcaatggtggtgccggaggtatgaggggtcatagcctggttaggcatgtaacgccatggatggtccttaggagctggctgtgggtcccaaacgtctccgctgtaccctccaatgtgtccactctccaccgcatccaccactgcttgcctctccatgatggctcctcttgcgttgttcactatcaaaacgcctttcttcaatttccctatcaactctttgttgaacattcctcttgtcttctccgtgagaggcatgttgatgactataacgtcacatttagggagcatttcattcagatcctcaacgaacttagctccagtctctttctccagctctggtgccatctgaagcctgtcatggtacaacaagttacacccgaatggtttcaaccgctgcagcaaaagctttccgattcttccagctcccacggttcctatcgtcttcccttcaagatcataagctctgtacgcaatgcccgcgacgttccactcgcctttgacgacctggttgtaccctggtacgaagttgcgcatgaggattaagattctcatgagctcatcttctgccactgagaccacgttgcttcccgtgacttcagcaaccgtcaggccagcagctgcagctgcctggagatcaatatgatccgagccaataccagctgtgaggagaagcttcaagtttttggctttcttgattctttcagcagttacatacgccgggtggaagggagtggagattaggacgtgaagatccgggatatgtttctcaagttcgcaatcagggccttccttgtcatcagtgacgatgtactgatgtccttgggattcaagccagtcacggattcctaaggcattctcgacgcagccaaggaagttagggttcttggtagcgtattcgttggccttgtagaaaactcctacaatctttttgctatcaccagaagatgcattaaactgacgtcgagcgaagtaacccgaagaagaagaggaagaacaggccctgatcgttgccttagcggcttgtctcatcgccatggttgagaagagataaatatcaatttggttactctttggtcgcggacgcgtgggcggacgcgtgggcggacgcgtgggtcgtcccggnaattcagnnnnnnnnnnnggagtatcat

SEQ ID NO: 116860 - DNA, 561 bp, Arabidopsis thaliana
  unsure (1)..(561): unsure at all n locations
acttaanaanccngtaaggcaaaaaannttnangntcccgggaagnannaaatnttgaccccaacccaaatacccaaccttttaaggaanaaccctttaaangtttttgggccttcctttgattcctttcaagcaagtttacatacccccgggtggaaaggaaattggaagattaggcccttnaagatccgggaatatgtttcctcaaagtcngcaatcaggcccttcaattgtcatcagtgacgatgtactgatgtccttgggattcaagccagtcacggattcctaaggcattctcgacgcagccaaggaagttagggttcttggtagcgtattcgttggccttgtagaaaactcctacaatctttttgctatcaccagaagatgcattaaactgacgtcgagcgaagtaacccgaagaagaagaggaagaacaggccctgatcgttgccttagcggcttgtctcatcgccatggttgagaagagataaatatcaatttggttactctttggtcgatttttgttttgtgtgaaatcagtaattggagcggacgcgtggg

SEQ ID NO: 116861 - DNA, 769 bp, Arabidopsis thaliana
  unsure (1)..(769): unsure at all n locations
ggaaaacccgggccgacccacacgtacgtgcttttctccgtcactgagtaccttgcctctcgagctcccaatcttaagtagaggattgagcttaaggcaagatggtaagaatcagtgttcttaacgatgctctcaagagcatgtacaatgctgagaaacgaggcaagaggcaggtcatgatcaggccttcctccaaagtgattatcaagtttctgattgtcatgcagaagcacggttacattggtgagtttgagtatgtcgatgaccacagatctggcaagatcgtcgttgaattgaacggaaggttgaacaagtgtggtgttatcagcccacgttttgatgttggtgtcaaggaaattgaaggttggactgcccgtttgctcccttctagacagtttggttacatcgtgctgactacatctgctggcattatggaccatgaagaagctagaaggaagaatgttggaggcaaggttctcggcttcttctattgaagttttattttatggggaaacagattttcattgagttatttttaacttttgtcctccattttctctgaaactacctttctctttctttcgaattttgtgataactttgatggatagtgttctgaaatcactctttttggtttggagcccttttttagacttcggaaaaaaaaaaaggattattctnnnnnnnnnnnnnnnnnnnnnnnnnnnnnnnnnnnnnnnnnnnnnnnnnnnnnnnnnnnnnnnnnnnnnnnnnnnnnnnnnnnnnnnnng

SEQ ID NO: 116862 - DNA, 857 bp, Arabidopsis thaliana
  unsure (1)..(857): unsure at all n locations
atgatatcgccggcatactatacgactcactttagggaaagctcgtacgcctgcaggtaccggtccggaattcccgggtcgacccacgcgtccggttaaactttgcctcttcgtcttttgctccagagtttttgtgcggctgccattttcgatttccaaaggttttgagctttgaaaaatggtgagaatcagtgtgcttaacgatgctcttaagagtatgtacaatgctgagaagagagggaagaggcaagtcatgatcaggccttcctctaaagtgatcatcaagtttcttatcgtcatgcagaaacacggttacattggtgagtttgagtacgttgatgaccacaggtctggaaagatcgtggtcgagcttaatggaagacttaacaaatgtggagtcatcagtcctcgtttcgatgttggagttaaggagattgaaggctggaccgctcgtcttcttccttccagacagtttgggtacattgttcttacgacctcggctggtattatggaccacgaagaagccaggagaaagaatgttggtggcaaggttcttggcttcttttactgaatcaagtcttgaaggagagaatcattatgggttggtgatactttgcttctcccttttgggtgagaggggtcccgccgattgaccctaaatatttaaggggtagtagagnttttaatgcctccttctgnttgnaaacccttagntgnaatnccattttttncgttttgggtttcccgaaaagtnttaaagccttcaaagtngccgnattcaaattcntgttntcacaaaaancttgnttntttgncactttcttcgggggtnaaaaaaaaaaggggcccctngggcc

SEQ ID NO: 116863 - DNA, 906 bp, Arabidopsis thaliana
  unsure (1)..(906): unsure at all n locations
gnnnnnnnnnnnnnnnnnnnnnnnnnnnnnnnnnnnnnnnnnnnnnnnnnnnnnnnnnnnnnnnnnnggctcgagattgcttttctccgtcactgagtaccttgcctctcgagctcccaatcttaagtagaggattgagcttaagggcagaagggtagaatcaagggtcttaaccattcttttaagaaccttgtccatggttaaaaaccaaggcagaaggaggcatgaccaggctttcttccaaggggatattaaggttcttgatggcattccaaaaccccggttccttggggaagttggattttgtcattaaccacagatctggcaggatcgtcgttgaattgaacggaaggttgaacaagtgttggtgttatcagcccacgttttgatgttggtgtcaaggagattgaaggctggaccgctcgttttcttccttccagacagtttgggtacattgttcttacgacctcggctggtattatggaccacgaagaagccaggagaaagaatgttggtggcaaggttcttggcttcttttactgaatcaagtcttgaagaagagaatcattatggttggtgatactttgcttctccttttggtgagaagaggattccgattgagctaaatgtttaagggtagtagagtttttgatgtcttcctctgtttgtaatccttagatgatatgccattttgtccgttttggtttttgcgcaaaagttgttaaagaccttgcaaagtagacaggtaatttccaattctgttttttcacaccaaaaacccctgccttttctgaacccattctatccattcaggcggttccatttccaaaaaaaaaaaaaaaggcggccggtttaaaagaatccaggctaaggaaggggggcatgcgacgtataagttcttcaaaa

SEQ ID NO: 116864 - DNA, 669 bp, Arabidopsis thaliana
  unsure (1)..(669): unsure at all n locations
gcgtcgtttgtccaagtttggcggtgcattttatttcaaaggttgacttggagaatgtagaatcaggggcgtaacgatctttaagagttgacaatgctggaagagagggaagaggcaagtatgatcaggccttctctaaagtgacatcaagtttttatcgcatgcagaaacacggttacattggtgagttggtacgttgatgaccacaggtctggaaagagcgtgtcgagcttaatggcgactaacaaatgggggtatgatgcctctttcgatgttgggggaaggagattgaagctgaccgctcgtattcttccttccagacaggtttggggacattgtacttacgacctcggctggtattatggaccacgaagaagccaggagaaagaatgttggtggcaaggttcttggcttcttttactgaatcaagtcttgaagaagagaatcattatggttggtgatactttgctttctcctttttggtgagaagagggattccgattgacctaaatgtttaagggtagtagagtttttnatgtcttcctccngtttgtaatctttaggatggataatgnccatttttgtccggttttggtttttncccaaaaagttnttnaaaggcctttcnaaaggtgggccagtaaattcccaaattnccgnttttcttcc

SEQ ID NO: 116865 - DNA, 3892 bp, Arabidopsis thaliana
  unsure (1)..(3892): unsure at all n locations
cgtcgtcgtctgtgttagggagcacaaataatagagaggcgtagcacaagagagaaggtggtgatcgaggccaagatttagaatttaactataacaaaaagcctctgacgagtgtgactagtcacaagatctgatcatggcttcttgaaacttcttcttcttctttcttctctttaaaggaaaaaaatgtcaggctctaggccgactcagtcctctgagggctcaaggcgatcaaggcacagcgctaggatcattgcgcagaccactgtagatgcgaaactccatgctgattttgaggagtcaggcagctcctttgattactcaacctcagtgcgtgtcactggcccggttgtggagaatcagccaccaaggtctgacaaagttaccacgacttatcttcatcatatacagaagggaaagctgattcagcccttcggttgtttacttgccttggatgagaagaccttcaaagttattgcatacagcgagaatgcatctgagctgttgacaatggccagtcatgcagttcctagtgttggcgaacaccctgttctaggcattgggacagatataaggagtcttttcactgctcctagtgcgtctgcattgcagaaagcccttggatttggagatgtctctcttttgaatcccattcttgtgcactgcaggacttctgcaaagcccttttatgcgattatccacagggttacagggagcatcatcatcgactttgaacccgtgaagccttatgaagtccccatgacagctgctggtgccttacaatcatacaagctcgctgccaaagcaatcactaggctgcaatctttacccagcgggagtatggaaaggctttgtgatacaatggttcaagaggtttttgaactcacggggtatgacagggtgatggcttataagtttcatgaagatgatcacggtgaggttgtctccgaggttacaaaacctgggctggagccttatcttgggctgcattatcctgccaccgacatccctcaagcagcccgttttctgtttatgaagaacaaggtccggatgatagttgattgcaatgcaaaacatgctagggtgcttcaagatgaaaagctttcctttgaccttaccttgtgtggctccacccttagagcaccgcacagctgccatttgcagtacatggccaacatggattcaattgcatctctggttatggcggttgtagttaacgaggaagatggagaaggggatgctcctgatgctactacacagcctcaaaagagaaagagactatggggtttagtggtttgtcacaatacgactccgaggtttgttccatttcctctcaggtatgcctgtgagtttctagctcaagtgtttgccatacacgtcaataaggaggtggaactcgataaccagatggtggagaagaacattttgcgcacgcagacactcttgtgcgatatgctgatgcgtgatgctccactgggtattgtgtcgcaaagccccaacataatggaccttgtgaaatgtgatggagcagctctcttgtataaagacaagatatggaaactgggaacaactccaagtgagttccacctgcaggagatagcttcatggttgtgtgaataccacatggattcaacgggtttgagcactgatagtttgcatgacgccgggtttcctagggctctatctctcggggattcggtatgtgggatggcagctgtgaggatatcatcgaaagacatgattttctggttccgttctcataccgctggtgaagtgagatggggaggtgcgaagcatgatccagatgatagggatgatgcaaggagaatgcacccaaggtcatcgttcaaggctttccttgaagtggtcaagacaaggagtttaccttggaaggactatgagatggatgccatacactccttgcaacttattttgaggaatgctttcaaggatagtgaaactactgatgtgaatacaaaggtcatttactcgaagctaaatgatctcaaaattgatggtatacaagaactagaagctgtgaccagtgagatggttcgtttaattgagactgctacggtgccaatattggcggttgattctgatggactggttaatggttggaacacgaaaattgctgagctgactggtctttcggttgatgaagcaatcgggaagcatttcctcacacttgttgaagattcttcagtggaaatcgttaaaaggatgctagagaacgcattagaaggaactgaggagcagaatgtccagtttgagatcaagacacatctgtccagggctgatgctgggccaataagtttagttgtaaatgcatgcgcaagtagagatctccatgaaaacgtggttggggtgtgttttgtagcccatgatcttactggccagaagactgtgatggacaagtttacgcggattgaaggtgattacaaggcaatcatccaaaatccaaacccgctgatcccgccaatatttggtaccgatgagtttggatggtgcacagagtggaatccagcaatgtcaaagttaaccggtttgaagcgagaggaagtgattgacaaaatgctcttaggagaagtatttgggacgcagaagtcatgttgtcgtctaaagaatcaagaagcctttgtaaaccttgggattgtgctgaacaatgctgtgaccagtcaagatccagagaaagtatcgtttgctttctttacaagaggtggcaagtatgtggagtgtctgttgtgtgtgagtaagaaactggacagggaaggtgtagtgacaggtgtcttctgtttcctgcaacttgccagccatgagctgcagcaagcgctccatgttcaacgtttagctgagcgaaccgcagtgaagagactaaaggctctagcatacataaaaagacagatcaggaatccgctatctgggatcatgtttacaaggaaaatgatagagggtactgaattaggaccagagcaaagacggattttgcaaactagcgcgttatgtcagaagcaactaagcaagatcctcgatgattcggatcttgaaagcatcattgaaggatgcttggatttggaaatgaaagaattcaccttaaatgaagtgttgactgcttccacaagtcaagtaatgatgaagagtaacggaaagagtgttcggataacaaatgagaccggagaagaagtaatgtctgacactttgtatggagacagtattaggcttcaacaagtcttggcagatttcatgctgatggctgtaaactttacaccatccggaggtcagctaactgtttcagcttccctgaggaaggatcagctcgggcgttctgtgcatcttgctaatctagagatcaggttaacgcataccggagctgggatacctgagtttttactaaaccaaatgtttgggactgaggaagatgtgtcagaagaaggattgagcttaatggttagccggaaactggtgaagctgatgaatggagatgttcagtacttgagacaagctgggaaatcaagtttcattatcactgcggaactcgctgcagcaaacaagtagtccccaaaagaaaaggggtctggcttgatataaaatagtcactggttgttctttgcttgtaactttccttatcgcttttgttttcgttttcaaatttcagtaacgatgaaatatccatccatttacatcttctgttgaactcttttctgaagctgtaaatatggatgcatatctaatctcctcctgagtgttttggtttcatgatgtatcattcaaaataagtaatataggagaaatgagctaatgtttagcggccgannnnnnnnnnnnnnnnnnnnnnnnnnnnnnnnnnnnnnnnnnnnnnnnnnnnnnnnnnnnnnnnnnnnnnnnnnggtag

SEQ ID NO: 116866 - DNA, 589 bp, Arabidopsis thaliana
  unsure (1)..(589): unsure at all n locations
agtcgaccgtatcgatatgcttgatatcgaattcgcggccgcgacggattttgcaaactagcgcgttatgtcagaagcaactaagcaagatcctcgatgattcggatcttgaaagcatcattgaaggatgcttggatttggaaatgaaagaattcaccttaaatgaagtgttgactgcttccacaagtcaagtaatgatgaagagtaacggaaagagtgttcggataacaaatgagaccggagaagaagtaatgtctgacactttgtatggagacagtattaggcttcaacaagtcttggcagatttcatgctgatggctgtaaactttacaccatccggaggtccagctaactggtttcagcttcccctggaggaaaggntcagctccgggcggttctggtgcatccttggccaaacccaaggngatcangggttaaccncanacccggagcntgggnaanccngnngttttttcccaaaccaaatgnttttggggcctgggggaaaatgtgcccaaaaaagggttggcctaaanngggttccccggaacctggggaaaccnnataangggngtttccnnacntttgg

SEQ ID NO: 116867 - DNA, 2102 bp, Arabidopsis thaliana
  unsure (1)..(2102): unsure at all n locations
aaaaaagagagaagaaagtccactaaagaaaagagaatagatatagatcaatggcgtttgaagctcttaccggaatcaatggtgatctaatcaccagatcatggtcagcctcgaagcaagcttacctaaccgagcgctatcacaaggaagaagcaggagcagtcgtaatcttcgctttccaaccatctttctcagagaaagatttcttcgatccggacaataaatcttcctttggagaaatcaagttgaaccgtgttcagtttccttgtatgaggaaaatcggtaaaggtgatgtagctactgttaacgaagctttcctcaagaatcttgaagctgtcattgatccaagaacctcatttcaagcttctgtggaaatggctgtgaggagtagaaaacagatagtgttcacaggacattcctcaggaggtgcaactgcaatcttagcaacagtttggtatttggagaaatacttcatacgcaatccaaatgtttaccttgagcctcgttgtgtgacatttggagctcctttggttggtgactctatcttcagtcacgcacttgggagagaaaaatggagccggttctttgtgaactttgtcacaagattcgatattgtccctcggattacgcttgctcgaaaggcgtctgtagaggaaactttgcctcatgttcttgcccaattggatcccagaaattcttcggtccaagagagtgaacagagaataacagagttttacacatcggtgatgcgagacacatcaactgttgcaaaccaagctgtttgtgaattgactggaagcgcagaggcgattttagagaccctttctagtttccttgagctaagtccttatagacccgccggtacttttgttttctctacagagaagagattggttgcagtgaacaactcggacgccattcttcaaatgctgttttacacttgtcaagccagcgatgaacaagaatggtctctaattccatttcgaagtatcagagatcatcatagctatgaggaactggtacagtcgatgggaatgaagttgtttaatcatttggatggagaaaactcaatagagtcttcgctcaatgaccttggagtgagcacaagaggcagacagtacgttcaagctgcattagaggaagagaagaaacgagtagagaatcagaagaagattattcaggtgatccagcaagagaggtttttaaagaaactagcatggatagaagatgaatacaagccaaagtgtcaagcccataaaaatgggtattatgattccttcaaagtttcaaatgaagagaatgacttcaaagcaaacgtcaagagagctgagttagccggtgtttttgacgaggtgctcggtttattgaagaaatgtcaacttccagatgagttcgaaggggacatagattggatcaagttagcaactcgataccgcagattagttgagcctcttgatattgcaaactaccatcgacatttaaagaacgaagacacagggccgtacatgaaaagaggaagaccaacccgctacatatatgctcagagaggctacgaacatcatatactgaagccaaacggaatgattgcagaagatgtattttggaacaaggtaaatggtcttaacttagggttacagctagaggaaattcaagagactctaaagaattcgggatccgagtgcggatcatgcttttgggctgaggttgaagaactcaaaggaaagccatacgaggaagttgaggtaagagttaagacattagaagggatgcttagagaatggatcacagccggggaagtagatgagaaggagatatttctggagggttcaacgtttagaaagtggtggatcacgcttcccaaaaatcacaaatcgcattctcctctgcgagactatatgatggatgaaataacagatacctganccttaggtggtggagtatttaagctattagaacacttgcttctcttaatttgtgcaataagaaatgtttatcaatctggtttccacttcacgatgatcttagaataagaatcatgttgtatgatcattgtgaagtaatgtaatagctctctattctaatgtcaaatttggtttccactt

SEQ ID NO: 116868 - DNA, 2424 bp, Arabidopsis thaliana
  unsure (1)..(2424): unsure at all n locations
acgactcactttangggaaggctgctccgcctgcaggtcccggtccggatttcccggttcgaccctcgcgtccgcccaccgacccctagccgccttattcgtcttcttcgttctctagttttttcctcagtctctgttcttagatcccttgtagtttccaaatcttccgataaaaatgtcgggtaaaggagaaggaccagctatcggtatcgatcttggtaccacttactcttgcgtcggagtatggcaacacgaccgtgttgagatcattgctaatgatcaaggaaacagaaccacgccatcttacgttgctttcaccgactccgagaggttgatcggtgacgcagctaagaatcaggtcgccatgaaccccgttaacaccgttttcgacgctaagaggttgatcggtcgtcgtttctctgacagctctgttcagagtgacatgaaattgtggccattcaagattcaagccggacctgccgataagccaatgatctacgtcgaatacaagggtgaagagaaagagttcgcagctgaggagatttcttccatggttcttattaagatgcgtgagattgctgaggcttaccttggtgtcacaatcaagaacgccgttgttaccgttccagcttacttcaacgactctcagcgtcaggctacaaaggatgctggtgtcatcgctggtttgaacgttatgcgaatcatcaacgagcctacagccgccgctattgcctacggtcttgacaaaaaggctaccagcgttggagagaagaatgttcttatcttcgatcttggtggtggcacttttgatgtctctcttcttaccattgaagagggtatctttgaggtgaaggcaactgctggtgacacccatcttggtggggaagattttgacaacagaatggttaaccactttgtccaagagttcaagaggaagagtaagaaggatatcaccggtaacccaagagctcttaggaggttgagaacttcctgtgagagagcgaagaggactctttcttccactgctcagaccaccatcgagattgactctctatacgagggtatcgacttctactccaccatcacccgtgctagatttgaggagctcaacatggatctcttcaggaagtgtatggagccagttgagaagtgtcttcgtgatgctaagatggacaagagcactgttcatgatgttgtccttgttggtggttctacccgtatccctaaggttcagcaattgctccaggacttcttcaacggcaaagagctttgcaagtctattaaccctgatgaggctgttgcctacggtgctgctgtccagggagctattctcagcggtgaaggaaacgagaaggttcaagatcttctattgctcgatgtcactcctctctcccttggtttggaaactgccggtggtgtcatgaccactttgatcccaaggaacacaaccatcccaaccaagaaggaacaagtcttctccacctactcagacaaccaacccggtgtgttgatccaggtgtacgaaggagagagagccagaaccaaggacaacaaccttcttggtaaatttgagctctccggaattcctccagctcctcgtggtgtcccccagatcacagtctgctttgacattgatgccaatggtatcctcaatgtctctgctgaggacaagaccaccggacagaagaacaagatcaccatcaccaatgacaagggtcgtctctccaaggatgagattgagaagatggttcaagaggctgagaagtacaagtccgaagacgaggagcacaagaagaaggttgaagccaagaacgctctcgagaactacgcttacaacatgaggaacaccatccaagacgagaagattggtgagaagctcccggctgcagacaagaagaagatcgaggattctattgagcaggcgattcaatggctcgagggtaaccagttggctgaggctgatgagttcgaagacaagatgaaggaattggagagcatctgcaacccaatcattgccaagatgtaccaaggagctggtggtgaagccggtggtccaggtgcctctggtatggacgatgatgctccccctgcttcaggcggtgctggacctaagatcgaggaggtcgactaatttgttggacattgacctctctctttctcctatctctatctcttttacttgcttttttttgatctgttaagactttttatgttgggcttttttaaagaagcccattttgtggtgttttttggttagtactattttgaacaatggttggttctataccagtttagctacgatgacggataaaattaaaagtttgccaaaaaaaaaaaaaaaagagggtccaagcttacgtacgcgtgcatgcgacgtnnnnnnnnnnnnnnnnnnnnnnnnnnnnnncaccnnnnnnnnnnnca

SEQ ID NO: 116869 - DNA, 2453 bp, Arabidopsis thaliana
  unsure (1)..(2453): unsure at all n locations
cccctcggtgtcgacggtatcgataagcttgatatcgaattcgcggccgcttcgaattcgcttagataaaacaaaggcttgcctattcctattatgataaaaaaattaaagactttccgcgaagaaatttttttattcatatattttttattttaaaactagggtttcaggtaggtgagcctggaaatgactattccttcattgaatgaataaaaaattgaattccacatccgcttgggtgggaccaacgaaatcgagtgcttactcccactttttattgaattaaccgattaatttgctatcgaagattttttctgtattcgaaaaaattcgtaacaaaatttaacatattttttttattatgagaacaaatcctactacttcaaatccagaggtttcgatacgtgaaaaaaaaaacctgggacgtatcgcccaaatcattggtccggtactggatgtagccttccccccgggcaaaatgcctaatatttacaatgctctggtggttaagggtcgagatactcttggtcaagaaattaatgtgacttgtgaagtacagcaattattaggaaataatcgagttagagctgtagctatgagtgcgacagagggtttaaagagaggaatggacgtggttgatatgggaaatcctctaagtgttccagtcggcggagcgactctaggacgaattttcaacgtgcttggggaacccgttgataatttaggtcctgtcgatactcgcacaacatctcctatccataaatccgcgcctgcttttatagaattagatacaaaattatcgatttttgaaacaggaattaaagtagtagatcttttggccccttatcgtcgtgggggaaaaattggactattcggtggggctggcgtgggtaaaacagtactaattatggaattgatcaacaacattgctaaagctcatggtggtgtatccgtatttggtggagtaggcgaacggactcgtgaaggaaatgatctttacatggaaatgaaagaatctggagtcattaatgaacaaaatcttgcggaatccaaagtggccctagtttatggtcagatgaatgaaccgccaggagctcgtatgagagttggtctgactgccttaactatggcagaatatttccgagatgttaatgagcaagacgtacttctatttatcgacaatatcttccgtttcgtacaagcaggatccgaggtatccgccttattgggtagaatgccttctgctgtgggttatcaacccacccttagtaccgaaatgggtactttacaagaaagaattacttctacgaaaaaggggtccataacctctattcaagcagtttatgtacctgcagatgatttgactgaccccgcacctgccaccacatttgcacatttagatgcgactaccgtactatcaagaggattagctgccaaaggtatctatccagcggtagatcctttagattcaacgtcaactatgctacaacctcgaatcgttggcgaggaacattatgaaactgcgcaacaagtaaaacaaactttacaacgttacaaggagcttcaggacattatagctatcctggggttggatgaattatccgaagaggatcgcttaaccgtagcaagagcacgaaaaattgagcgtttcttatcacaaccctttttcgtagcagaagtatttacaggttctccgggaaaatatgttggtctagcggaaacaattagagggtttaatttgatcctttccggagaatttgattctcttcccgaacaggccttttacttagtgggtaacatcgatgaagctactgcgaaggctacgaacttagaaatggagagtaaattgaagaaatgaccttaaatctttgtgtactgactccgaatcgaattgtttgggattcagaagtaaaagaaatcattttatctactaatagtggacaaattggtgtattagcaaaccacgcgccgattgccacagctgttgatataggtattttgaaaatacgccttgctaaccaatggttaacgatggctctgatgggcggttttgctagaataggcaataatgaaatcactattttagtaaatgatgcagagaagaatagtgacattgatccacaagaagctcagcaaactcttgaaatagcagaagctaacttgagaaaagctgaaggtaagagacagacaattgaggctaatctagctctcagacgagctcggacacgagtcgaggctctcaatacgatttgattttgtaactagctgacgtgtaaaaaaaaagaatgtataaaaaaaataggatcgaaagacgataaaaacaataaaaaaaaaaaaaaaggcggccgctcgcnnnnnnnnnnnnnnnnnnnnnnnnnnnnnnnnnnnnnnnnnnnnnnnnnnnnnnnnnnnnnnnnnnnnnnnnnnnnnnnnnnnnnnnnnnnnaaaatcat

SEQ ID NO: 116870 - DNA, 1035 bp, Arabidopsis thaliana
ccggtcgaccgcgcgtccgcggacgcgtgggcggacgcgtgggtcagcgttgtttgaaacgagaaggttcaagatcttcggtggctctatgtcactcctctctcccttggtttggaaactgccggtggtgtcatgaccactttgatcccaaggaacacaaccatcccaaccaagaaggaacaagtcttctccacctactcagacaaccaacccggtgtgttgatccaggtgtacgaaggagagagagccagaaccaaggacaacaaccttcttggtaaatttgagctctccggaattttccctcccgggcctccctcgtggtgtcccccagatcaccagtctgctttgacattgatgccaatggtatcctcaatgtctctgctgaggacaagaccaccggacagaagaacaagatcaccatcaccaatgacaagggtcgtctctccaaggatgagattgagaagatggttcaagaggctgagaagtacaagtccgaagacgaggagcacaagaagaaggttgaagccaagaacgctctcgagagctacgcttacaacatgaggaacaccatccaagacgagaagattggtgagaagctcccggctgcagacaagaagaagatcgaggattctattgagcaggcgattcaatggctcgagggtaaccagttggctgaggctgatgagttcgaagacaagatgaaggaattggagagcatcttgcaacccaatcattgccaagatgtaccaaggagctggtggtgaagccggtggtccaggtgcctctggtatggacgatgatgctccccctgcttcaggcggtgctggacctaagatcgaggaggtcgactaatttgttggacattgacctctctctttctcctatctctatctcttttacttgcttttttttgatctgttaaggctttttatgttgggcttttttaaagaagcccattttgtggtgttttttggttagtacgcggccgcgaattcgatatcaagcttatcgataccgtcgccctcgagtggtggc

SEQ ID NO: 116871 - DNA, 749 bp, Arabidopsis thaliana
gcagtaccggtcctgtattcccgggtcgacccacgcgtccgaaaaacatctctaaaaatctaaactttaaccttttttctcggaacaccacaaatctcatttttagctttttccgattccaaatctttttgcttatttagtcttcttcaagaactcgatttctttcgcgtttatgtcgacgacgatgaagagacagggctgcagctcagattccggtgatctacggcggcagcccagtcgtctactaaaacgacccccggcgttaaaaatcgttccggcgactccggcggcgaataactggaatacggctatacctctcctctcgccgttagctctttctcccgaatcatcaccggtagaccaaccaccggttgagaaaaatcagtcgacggcggtggcggttgagaaaacgccggttttcaagaaatggcaacatcccgcggcgccgttttattacgagtcatcgacgtttgttccaccgtttgttccgggttagtattggtttagagatccaacggttcaaaagtacagtttgtttgttttttgattctatgtagatctaacggcccagaaaacgcgttttgtgcgtttctactattttgtggttggaacaaactcgattttcgtaaagaatttaataaatcaaaggatttttaattaataagcatggttctggtactgtttttatatggtcccaaatgtaaaagcttaagtccaatttagttattgtggatgtttatggatatagg

SEQ ID NO: 116872 - DNA, 779 bp, Arabidopsis thaliana
  unsure (1)..(779): unsure at all n locations
ctcactatagggaaagctggtacgcctgcaggtaccggtccggaattcccgggtcgacccacgcgtccggagaagtatatgtccgaagacgaggagcacaagaagaaggttgaagccaagaacgctctcgagaactacgcttacaacatgaggaacaccatccaagacgagaagattggtgagaagctcccggctgcagacaagaagaagatcgaggattctattgagcaggcgattcaatggctcgagggtaaccagttggctgaggctgatgagttcgaagacaagatgaaggaattggagagcatctgcaacccaatcattgccaagatgtaccaaggagctggtggtgaagccggtggtccaggtgcctctggtatggacgatgatgctccccctgcttcaggcggtgctggacctaagatcgaggaggtcgacccacgcgtccggtgacattgatccacaagaagctcagcaaacctcttgaaatagcagaagctaacttgggaaaagctgaaggtaagagccagacaattgaggctaatctagctctcagacgacctcggacacgagtcggggctctcactacgatttggatttggtactagctgacgtgtaaaaaaaaagaaaaaagnnnnnnnnnnnnnnnnnnnnnnnnnnnnnnnnnnnnnnnnnnnnnnnnnnnnnnnnnnnnnnnnnnnnnnnnnnnnnnnnnnnnnnnnnnnnnnnnnnnnnnnnnnnnnnnnnnnnnnnnnnnnnnnnnnnnnnnnnnnnnnntg

SEQ ID NO: 116873 - DNA, 581 bp, Arabidopsis thaliana
  unsure (1)..(581): unsure at all n locations
ctcaatgtctctgctgaggacaagaccaccggacagaagaacaagatcaccatcaccaatgacaagggtcgtctctccaaggatgagattgagaagatggttcaagaggctgagaagtacaagtccgaagacgaggagcacaagaagaaggttgaagccaagaacgctctcgagaactacgcttacaacatgaggaacaccatccaagacgagaagattggtgagaagctcccngctgcagacaagaagaagatcgaggattctattgagcaggcgattcaatggctcgagggtaaccagttggctgaggcttgatgagttcgccggacaagatgaagggattgggggagcatctttaaacccaatcaattggcaagcttgtcccaangagcttgtggtgaaggcccgtggtcccaggtggcctcttggtattgcacggatgatgctcctccccctgttcaaggcggggttggacccacgttcgggcggtcggctttttgnggggcaaggccccctctcttcctccctttttttcttttnattggttnnnngggctnttaanntttttttntgggtttttt

SEQ ID NO: 116874 - DNA, 603 bp, Arabidopsis thaliana
  unsure (1)..(603): unsure at all n locations
gnanttggaatgttcaaggctngaattcanccaaagccnggccccaagaagaagttaacccaagaccctntcgggactccnctccaccatggggaccccacccaagccgagaagattggtgagaagctccccgctgcagccaagaagaagatcgaggattctattgagcaggcgattcaatggcctcgagggtaaccagttggctgaggctgatgagttcgaagacaagatgaaggaattggagagcatctgcaacccaatcattgccaagatgtaccaaggagctggtggtgaagccggtggtccaggtgcctctggtatggacgatgatgctccccctgcttcaggcggtgctggacctaagatcgaggaggtcgactaatttgttggacattgacctctctctttctcctatctctatctcttttacttgctttttttgatctgttaagactttttatgttgggcttttttaaagaagcccattttgtggtgttttttggttagtactattttgaacaatggttggttctataccaggcggccgcgaattcgatatcaagcttatcgataccgtcgacatcgagggggggcgtggccaca

SEQ ID NO: 116875 - DNA, 564 bp, Arabidopsis thaliana
ttaggtaccactactagaagatctatgacgtcgcatgcacgcgtacgtaagctcggaattcggctatatctgttgtatatgtaaatcctagatatgacaatatgcggaattcatccatgaaaatgaaaaacaagggggggttgctaaagggatgaataaatgggacgcataaccggatatgctaaaatgaaaatacgaaaaaaaaggctaatgagatcgaaataatgaatcataactaaagttccgtttcgaattcgctagataaaacaaaggcttgcctattcctattatgataaaaaaataaaagactttccgcaaaaaatttttttattcatatattttttattttaaaactaggtttcagttagttgagcttgaaaatgactattccttcattgaatgaataaaaaattgaattccacatccgcttgggtgggaccaacgaaatcgagtgcttactcccactttttattgaattaaccgattaatttgctatcgaagattttttctgtattcgaaaaaatttgtaacaaaatttaacatattttttttattatgagaaca

SEQ ID NO: 116876 - DNA, 636 bp, Arabidopsis thaliana
  unsure (1)..(636): unsure at all n locations
gcnngagtcagccnaagccgggncncaagagaagttgacccaagaccntctcnagactcccttccaccatgnggacnccancaagccgagaagtttgttgagaagctcccggctgcagccaagaagaagatcgaggtttcctattgagcaggcgattccaatggctcgagggtaaccagttggctgaggctgatgagttcgaagaccagaatgaaggaattggagagcattctgcaaccccaatcattgccaagatgtaccaaggagagctggtggtgaacccggtggtccaggtgcctctggtatggacgatgatgctccccctgcttcaggcggtgctggacctaagatcgaggaggtcgactaatttgttggacattgccctctctctttctcctatctctttctcttttacctgcttttttttgatctctcacagactttttatgttgggcttttttaaagaagcccattttgtggtgttttttggttagtactattttgaacaatggttggttctataccagtttagctacgatgacggataaaattaaaagtttgccaaaaaaaaaaaaaaaaaaaggccggccgctctagaggatccaagcttacgtacgcgtgcatgcggtgtcatag

SEQ ID NO: 116877 - DNA, 852 bp, Arabidopsis thaliana
  unsure (1)..(852): unsure at all n locations
gcagcccacccaaaatttcgaaatgggttctatacaagaaagaannacngcggcgggaaatggaaactttttctgtcttcaaacaaaanatanacctccanataatttgactgaccccgcacctgccaacacaggagcacatcaagatgcgactaccgtactatcaaaaagattaactgacaaacgaacccacccagcaaaagatcctttagatacaacgtcaactatgctacaacctcgaatcggtggcgaagaacattatgaaactgcgcaacaagtgaaacaaactttacaacgtcacaaggagcttcaggacattatagctatcctggggttggatgaattatccctagaggatcgcttaaccgtagcaagagcacgaaaaattgagcgtttcttatcacaaccctttttcgtagcagaagtatttacaggttcnccgggaaaatatgttggtctagcggaaacaattagagggtttaatttgatcctttccggagaatttgattcncttcccgaacaggccttttacttagtgggtaacatcgatgaagctacngcgaaggctacgaacttagaaatggagagtaaattgaagaaatgaccttaaatctttgtgtaccggaccccgaatcgaattgtttgggattcagnagtaaaagaaatcattttatcgacgaatagtgggccaattngggtatgagcaaccacgcgcggttgccacagctggtgaaataggaatttgnaaacngcttgcaaccatggtaccgatggcctnatggggggttccanaaggnanatgancccatttggaaggnccgnaanngggntgncccaggnnnaacntnaacc

SEQ ID NO: 116878 - DNA, 425 bp, Arabidopsis thaliana
acggacgcgtgggacctagctctattctttctctttgctgctcttaaactttttcttagctttttctatcttcgtgtgataatggctggtaaaggagaaggtcctgcgatcggtatcgatcttggtacgacgtactcttgcgtcggagtgtggcaacacgaccgtgttgagatcatcgctaatgatcaaggaaacagaaccactccctcgtacgttgctttcactgactccgagaggttgatcggtgatgctgctaagaaccaagtcgccatgaaccctgttaacactgttttcgatgcaaagaggttgattggtcgtagattcagtgacgcatctgtccaaagtgacagacagttatggcctttcactatcatctccggaactgcagagaaaccaatgattgtcgtcgaatacaagggagaaga

SEQ ID NO: 116879 - DNA, 523 bp, Arabidopsis thaliana
  unsure (1)..(523): unsure at all n locations
ctcattatcaagttttgaatctttgactttttataaatccaaatatttaatattaaaattaaaatattaataaaatcactcttgacagtaatatctgttgtatatgtaaatcctagatatgacaatatgcggaattcatccatgaaaatgaaaaacaagggggggttgctaaagggatgaataaatgggacgcataaccggatatgctaaaatgaaaatacgaaaaaaaaaggctaatgagatcgaaataatgaatcataactaaagttccgtttcgaattcgctagataaaacaaaggcttgcctattcctattatgataaaaaaataaaagactttccgcaaaaaattttttttaattcatatatgtttgagtttttaaaactagggtttcagttagttgagcttgaaatggctattccttcnttgatggataaaaantggtttccncatccgnttgggtgggcccncggattcgngtgntttcnnccccttttgtttgnttncccggtaatttgcttccg

SEQ ID NO: 116880 - DNA, 613 bp, Arabidopsis thaliana
  unsure (1)..(613): unsure at all n locations
ccccccctagacctcgacggtatcgctaagcttgatatcgaattcgcggccgcggagaatttgattctcttcccgaacaggccttttacttagtgggtaacatcgatgaagctactgcgaaggctacgaacttagaaatggagagtaaattgaagaaatgaccttaaatctttgtgtactgactccgaatcgaattgtttgggattcagaagtaaaagatatctttttatctactaatagtggacaaattggtgtattagcaaaccacgcgccgattgccacagctgttgatataggtattttgaaaatacgccttgctaaccaatggttaacgatggctctgatgggcggttttgctagaataggcaataatgaaatcactattttagtaaatgatgcagagaagaataagtgacattgatccacaaggaagctcagcaaacctcttgaaatagcagaagccaaccttgaggaaagcctgaagggtaagagccagaccaattggggcctaatctagcccccagacgggcctcgggcaccagtcgaggngggccgggantccctggancccggggggnccnctagnnctaaccggccncncccnggggggccc

SEQ ID NO: 116881 - DNA, 439 bp, Arabidopsis thaliana
  unsure (1)..(439): unsure at all n locations
nnnnnnnnnnnnnnnnnnnnnnnnnnnnnnnnnnnnnnnnnnnnnnnnnnnnnnnnnnnnnnnnnnnnnnnnnnnnnnnnnnnnnnnnnnnaaccacaaatctttggttcactttaacacaacaaccaaaaacaaatctttggttcatatacatagcaatgctttaacaatgctcataactcttgaattattttgctacatatttcatgataaggggtgtctatttaaagggcaatatcagtctaagacgtacttctacagtcatagacaatatcttccgtttcgtacaagcaggatccgattattgggtggaatgccttgtgatgtggggtatcaacccacccttagtacagaaatgggtactaacttccaatttgggttgaaacagagagggtttagggatgatgttcatcagagacccgcacttgggtctccggag

SEQ ID NO: 116882 - DNA, 493 bp, Arabidopsis thaliana
  unsure (1)..(493): unsure at all n locations
cccagagaacgttaggaggaggtatctgagagattgtgctgataatttcagcgaagcagcaaaactttttaattcaaagctctccccaaaattggattcgttgcgtaaaaccctaccgggcatcaaaccgatctacattaatatctatgatcctctttttgacatcatccagaatcctgcaaattatgggtttgaagtgtctaataaaggatgctgtggaacaggagccatagaagttgctgtgttgtgcaataaaatcacatcttctgtatgtctcgacgtgtctactcatgtgttttgggacagttatcatcctacagagaaaacttacaaagtattagtctcggacacgagtcgaggctctcaatacgatttgattttgtaactagctgacgtgcnnnnnnnnnnnnnnnnnnnnnnnnnnnnnnnnnnnnnnnnnnnnnnnnnnnnnnnnnnnnnnnnnnnnnnnnnnnnnnnnnnnnnnnnnnnnnnn

SEQ ID NO: 116883 - DNA, 597 bp, Arabidopsis thaliana
ttcttaaccaagcaatcgagatggccaggatttcctcagacccgcttatggttgggagagtgatcggagacgttgtggacaattgtttgcaggcagtgaaaatgacggtgacctataattctgacaagcaagtctacaatggccatgaacttttcccttctgtagttacatacaaacctaaggttgaagttcatgggggtgacatgagatcattcttcactttggttatgactgatcctgatgttcctggacctagtgatccttatctgagagagcacttgcactggattgttaccgatatcccggggacgactgatgtatcatttggtaaagagataatcgggtacgagatgcctcggccaaacatagggatccaccgctttgtgtatttgttgttcaagcagacccgtagaggaagtgtggtgtctgtgccatcttacagagaccaattcaacactcgagagtttgctcatgagaacgatcttggcctccccgtcgcggctgttttcttcaactgccagcgtgagaccgccgctagacgccgttgaatgactttccaccgctgccgcagctgccctaactaactctggctgtgcc

SEQ ID NO: 116884 - DNA, 1225 bp, Arabidopsis thaliana
  unsure (1)..(1225): unsure at all n locations
gaatggaaggaccgagccgacgccacgcgtacgcggacgcgtgggcggacgcggggattaaataatttgaacagngtaagcccccactgtatgccttcttgccaactaaaactacattgcgtgacttcttctgtaaccatttttctattccgatcaaaccatggcgtatttagctccgatttcttcatccttatccatattcaagaatccccaactctcaagattccaattttcttcttcctcaccgaacccacttttccttcgacctaggattcagattctgagtatgaccatgaacaagtcgccgtctttagtggtggttgcggctactactgcggcagagaagcagaagaagaggtatcctggagaatcaaagggttttgtggaggagatgaggtttgtggctatgagacttcatactaaagatcaagctaaggaaggtgagaaagagactaaatctattgaggaacgtcctgttgctaaatgggaacctactgttgaaggttacttgaggtttcttgtggatagtaaattggtttatgatactcttgaactgattattcaagactccaatttcccaacttatgccgagttcaagaacacggggctggaaagagcggagaaattatccacggatttggagtggttcaaggaacaaggttacgagattccagaaccaacagctcctggtaaaacatattctcaatatttaaaggaattagcagagaaggatcctcaagcattcatttgtcacttctacaacatctactttgctcatagtgctggtggacgaatgattggcagaaaggtggcagagcggatactcgataataaagaactcgagttctacaaatgggacggcgaactttctcaattgttgcagaacgttagggagaaactgaacaaggttgcagaggagtggactagagaagaaaagaatcattgtttggaagagactgagaaatcgttcaagtattctggtgagatacttcgtctcatattgtcctgatttggtgcgcagtgtctctagatatctcaatacgtcttgtggcaactaaaatgatgcacactggttatattcctgtattatattaatcatcttccacatgtattaaactcttcttttgcttcaaagctgttactaaagttcaaggttcaaatttaataataaataaattatttttattccttttatatttattatttattttttttatataaaatt

SEQ ID NO: 116885 - DNA, 1726 bp, Arabidopsis thaliana
gacactatagaatagctatgacgtcgcatgcacgcgtacgtaagctcggaattcggctcgagcaatgataagcccacccacttcgattaccaactccgaccgccagagacagcgagtttcagatcaaagatgtcggcgacgcttacaggatcgggaactgctttggggttttcgtgttcctcgaagatctcgaaaagagtttcttcttcaccagcttctaaccgatgctgcatcaagatgtctgtttccgtcgacgagaagaagaaaagtttcagtcttcagaaatctgaggaagctttcaatgctgctaagaatctaatgcctggaggtgtgaattcccctgttcgagcattcaaatccgttggtggacaacctgttttgattgattctgttaaaggctcaaaaatgtgggacattgatggaaatgagtatattgactacgttggctcttggggacctgctattattggccatgctgatgacgaggttcttgcggctctagctgagacgatgaagaaaggaacaagctttggtgctccttgtctcttggagaatgttttagctgagatggttatatcagctgttcccagcattgaaatggttcggtttgttaattctggtactgaagcgtgtatgggtgtgcttcgtcttgccagagctttcactaacaaagagaagttcattaagtttgaagggtgttatcacggtcatgctaacgccttccttgttaaagctggtagtggtgttgccactttggggctaccggactctccaggtgtccctaaagcagctacttcagatactttaacagctccgtacaatgatcttgaagctgttgagaagctctttgctgcgcataaaggggagatttctgcggtaattctcgaacctgttgttggtaactccggattcatccctcctactccggaattcatcaacggtttacgccagcttactaaagacaatggtgttcttctcatcttcgatgaagtcatgactggatttcgtctagcctatggtggagcccaagaatactttggaatcacgcctgatctaactactcttggtaaaattattggtgggggtcttcccgtgggagcatacggtggtagacgtgatattatggagatggttgctcccgctggaccaatgtaccaagccgggactctaagtggtaatccgctggcaatgactgcagggattcacacgctgaagcggctaaagcaggcaggaacatatgagtatttagacaagatcacgaaggaactaaccaacggaatcttagaagccggaaagaaaaccgggcatccaatgtgcgggggttacataagcggtatgtttggattctttttcgcagaaggaccggtttacaactttgcagactcaaagaagagcgacacagagaagtttggtaggtttttcaggggaatgttggaagaaggtgtttactttgcaccgtctcagtttgaggccgggtttacgagcttggctcacactcccgaggatatacagttaacaattgctgcggctgagagggtactgagtaggatctagaatgttcccaaccctgagtctagtttcacaatcttcatgttttggggacgatgtgtatggtttgatgagcggatggaataattcttgtgtagtgagttgaattttgtttcatcagtagagcttgagattttttgtattttaagatcatctgttaatgtaatggttttatgtt

SEQ ID NO: 116886 - DNA, 643 bp, Arabidopsis thaliana
  unsure (1)..(643): unsure at all n locations
cttttatctctttcttgtatttattttcctcccaaaaaacatctttaagagtcctcatggcgatgtctttatcaggagctgttctcagtggcatgggttcttctttccacaacgtaggagcaaagcagagtggtgttggtaccgtcagagttggccggaagagtgagctcgtcgtcgttgctcagcgcaagaagtcgttgatatacgccgttaaaagtgacggcaacatcctcgatgacctcaacgaagccacacgaaggaggccttggcggatggcgagaaaacaaaagactacattgttgagaaaaccattgaagccaatgaaactgcgactgaggaagctaagaaagctttggattatgtgactgagaaaggaaaagaagccggaaaccccccggctgagttcgtagagggtaaagcagaagaggctaagaatgccacaaagtcctgattcaaccactcatgtagtcatgttcaatagtttacaataagatcagtttgttgtaatttctttttcaccatttgaaatgaagagctgttaattaaaaaaaaaaaaaaagnnnnnnnnnnnnnnnnnnnnnnnnnnnnnnnnnnnnnnnnnnnnnnnnnnnnnnnnnnnnnnnnnnnnnnnnnnnnnnnnnnn

SEQ ID NO: 116887 - DNA, 943 bp, Arabidopsis thaliana
ttgttttaggtgcacactatagaagagctatgacgtcgcatgcacgcgtacgtaagctcggaattcggctcgagaaggaatattcattaagatggcatcttctatagtctcttccatgtttctctttctccttcttcttcttgtatttccacatatagataatgtccttggcgcacgaatggaactccgtgaacttggagagataaattatgctgatccactaggttttactcggcccattgtccccattcatgttccgggttttccgcctcggcggccaactattccgcagttaccaccatatcgtcccagaaggtgccctttctgttatcctcctcctcccccaaaggctttcccaaaaaactcaccaagtcactgatgtcactatagctacgaaattgcgtcaataaatgtatgcacgttaatttgtttcatttgtgatgtgtggggctctttatctattatatgcatgtcacgtgtttgtcatatttgcaatgtatcatgtatgtggctctttatctattatatgcatgtgtttgtcaattgtcatatttgcgatgtatcatgtatgatgtatgtgggctctttatttattatatgcatgtgtttttcataaaaaaaaaaaaaaaggaatgaataaaaacaaaaaaataagaaaaaaaaaaaaaaaaaaataaaaaaaaaaaaaaaaaaaaacaaaaaaaatactactatggggggggcccctttaaagaacccaagtttacgtccccgggcttgcaaattataagcttttttttagggccccctaattcaaatacttggcccggggttttccaccgcgagggctgggaaaaccccgggggttccccacttaatacccttggcaaaaaaaccccctttttccccggttgggggtaatttgccaaaaaagccccccccccccaatcgcccttttcccaaa

SEQ ID NO: 116888 - DNA, 970 bp, Arabidopsis thaliana
acgcgtccgctcgaacacgatgctctgaagacttataaattgcgtaaacttttttcacctggctagggttcttggtcgtcgttaacaggcatctagtatggctttctgcactaaacttggcggtcactggaaacaaggggtaaatgttccagtgtcatcaatgctcggttctcttcgctacatgtccacaaaactttatattggtggcctgtcccctggaactgacgagcactccttgaaggacgctttctctagcttcaatggagtgacagaggcaagagtcatgacaaacaaagtgaccgggaggtctagaggttatggatttgttaacttcataagcgaggattctgccaactctgctatttcagcaatgaatggacaggagctgaatgggtttaacataagtgtgaacgttgcaaaagattggccaagtttgccattgtcgttggtcgagagtatagaagaagctgagaagaaagaaaataagatgatgagccgatctgtatggaaagatccattcgttgatgcgttcctgatgaagaagaagaatgcagctctgaacaggaaaatatggtcaaggagatcgacgattcttcccgagtatgttgattcggcggtgagaatctacaacggcaaaactcatgtgcgttgtaagatcacagaggggaaagttgggcataaattcggagagtttgcgtttacaagaaaagtgaagaagcatgctaaagcaaagtagcatctttgagaatgaattggtcagctgcttgaaaggattgtgttgaaaagccaaaaacgaatcaaatcaataaattctcaataggtaaaactcattagctcacatgatcatgtagacgaatattgagctttagaaagtctttagttttcttgtcgatttcgtatttttggaccacaaaagtgccaatgttattttggaattcgattaacaaatatcaaaaaaaaaaaaaaaaaa

SEQ ID NO: 116889 - DNA, 1404 bp, Arabidopsis thaliana
  unsure (1)..(1404): unsure at all n locations
tacgactcctatagggaaagccggtacgcctgcaggtaccggtccggaattcccgggtcgacccacgcgtccttcccttcctcttcttttctcttctccttccacttccacttcttctatctctcacaattcagcaatggcttcttctatagttacctctagcttgaagcctttagccatggccgattcttcctcttctaccattttctcccatccttccatctcctctaccatctcttcctccagaattcgcagctccagtgtttccctccttaccggacgcattaacctgcccctctctttctctcgcgtctctctatctcttaaaaccaaaacccaccttaaaaaatccccctttgtctccttcgttgcccagacttcggattgggctgaagaaggtggagaaggaagcgtcgctgttgaggagaccgagaacagtttagagtcacaagatgtgagcgaaggagatgagagcgaaggagatgcgagcgaaggagatgtgagcgaaggagatgagagcgaaggagatgtgagcgaaggagctgtgagcgaaagagctgagttcccggagccatcggaagaagccaagcttttcgtcggaaatttggcttatgatgttaatagccaagctttggctatgctctttgagcaagccggtactgttgaaatcgccgaggttatatacaatagggaaactgaccagagtcgtgggtttggatttgtgacaatgagttctgtggacgaagctgagacagctgtggagaagttcaaccgttatgatcttaacggacgtctactaactgtaaacaaggcagctccaagaggatcacgtccagaacgtgcgcctcgggtatatgaacctgcattcagagtatatgtagggaatctaccatgggatgtggacaatggccgtctagaacagcttttcagtgagcatggtaaagttgtggaagctagggtggtttacgaccgtgagacaggtcgttcacgtggattcgggtttgtcacaatgtctgacgtggatgaactcaacgaagccatctctgccctcgatggacagaacttggagggtagagcaatcagagtgaatgtagcggaagagcgtcctccaaggcgtggatattaaagctgagatctagctgtgccctctctctctccctatcttgcattttgtttagacgagattcttacactcttcaacgattgtttttggctgaactctgaatgtgaaagttaagctgcttctaaagtaatttgtatcgcttgtttttgatgatctcttattcatagtttaattcctaaaaaaaaaaaacccccaaccccccccagggcggccgctctagaggatccaagcttacgtacgcgtgcatgcgacgtcaaagtcttctatnnnnnnnnnnnnnn

SEQ ID NO: 116890 - DNA, 794 bp, Arabidopsis thaliana
  unsure (1)..(794): unsure at all n locations
tattaggtacacactatagaagagtctatgacgtcgcctgcacgcgtacgtaagctcggaattcggctcgagtctatctctcacaattcagcaatggcttcttctatagttacctctagcttgaagcctttagccatggccgattcttcctcttctaccattttctcccatccttccatctgctctaccatctcttcctccagaattcgcagctccagtgtttccctccttaccggacgcattaacctgcccctctctttctctcgcgtctctctatctcttaaaaccaaaacccaccttaaaaaatccccctttgtctccttcgttgcccagacttcggattgggctgaagaaggtggagaaggaagcgtcgctgttgaggagaccgagaacagtttagagtcacaagatgtgagcgaaggagatgagagcgaaggagatgcgagcgaaggagatgtgagcgaaggagatgagagcgaaggagatgtgagcgaaggagctgtgagcgaaagagctgagttcccggagccatcggaagaagccaagcttttccgtcggaaatttggcttatgatgttaatagccaagctttggctaatgctctttgagcaagcccggtactgttgaaatcgccgaggttatatacaattagggaaacctaccccagagtcgtggggttttggattttttgaccaattaaagttcctttggcccggaagctttagacaaacttttttggagaagttcaaccccgttattnttctttaaacggggcggntttttaacttttaacaa

SEQ ID NO: 116891 - DNA, 806 bp, Arabidopsis thaliana
  unsure (1)..(806): unsure at all n locations
tgatcctgccagctannnnnnnnnnnnnnnnnnnnnnnnnnnnnnnnnnnnnnnnnnnnnnnnnnnnnnnnnnnnnnnnnnnccacgcgtccgcccacgcgtccgtccacttcttctatctctcacaattcagcaatggcttcttctatagttacctctagcttgaagcctttagccatggccgattcttcctcttctaccattttctcccatccttccatctcctctaccatctcttcctccagaattcgcagctccagtgtttccctccttaccggacgcattaacctgcccctctctttctctcgcgtctctctatctcttaaaaccaaaacccaccttaaaaaatccccctttgtctccttcgttgcccagacttcggattgggctgaagaaggtggagaaggaagcgtcgctgttgaggagaccgagaacagtttagagtcacaagatgtgagcgaaggagatgagagcgaaggagatgcgagcgaaggagatgtgagcgaaggagatgagagcgaaggagatgtgagcgaaggagctgtgagcgaaagagctgagttcccggagccatcggaagaagccaagcttttcgtcggaaatttggcttatgatgttaatagccaagctttggctatgctctttgagcaagccggtactgttgaaatcgccgaggttatatacaatagggaaactgaccagagtcgtggtgttggatttgttacattgagattctgttttctgtatgttatatattttttgtttattctattctttttccatttttatatatttattactcttta

SEQ ID NO: 116892 - DNA, 1207 bp, Arabidopsis thaliana
  unsure (1)..(1207): unsure at all n locations
tccatttctcattgtatcttcatcagtctcttcttattccattttttcaaaccacttgcaaaattcgaatcagatcttctcttcaatcgaaaaaaaagaaaggatttgctctagattgttgaatcgaagatgtcgacaagggaagagaatgtttacatggcgaaattagccgaacaagctgaacgttacgaagaaatggttgaattcatggagaaagttgcgaaaactgttgatgttgaggaactttcagttgaagagaggaatcttctctctgttgcttacaagaacgtgattggagcgagaagagcttcgtggagaatcatttcttcgattgagcagaaagaagagagcaaagggaacgaagatcatgttgctattatcaaggattacagaggaaagattgaatccgagcttagcaaaatctgtgatgggattttgaatgttcttgaagctcatcttattccttctgcttcaccagctgaatctaaagtgttttatcttaagatgaagggtgattatcataggtatcttgctgagtttaaggctggtgctgaaaggaaagaagctgctgaaagcactttggttgcttacaagtctgcttccgacattgccactgctgagttagctcctactcacccgataaggcttggtcttgcactcaacttctctgtgttttactatgaaatcctcaactcgcctgatcgtgcttgcagcctcgcaaagcaggcgtttgatgatgcaatcgctgagttagatacattgggtgaggaatcatacaaggacagtacactgattatgcagcttcttagagacaatctcactctctggacttcagatatgactgacgaagcaggagatgagattaaggaggcatcaaagcccgatggtgccgagtaaacccgaagaagaggaagagtcattttataatggtagaaaactttcatgtgataatctgagtgagggatagctcaggattcttataagagacacagttttattgttgtttgtttgttttgaaactacttgcgatttatcattcctcctttagcttcctcaatatttcctattctcctttctaatgaaatcaaaacttggttatttctgaaaaaaaaaaaaaaaatatgttctnnnnnnnnnnnnnnnnnnnnnnnnnnnnnnnnnnnnnnnnnnnnnnnnnnnnnnnnnnnnnnnnnnnnnnnnnnnnnnn

SEQ ID NO: 116893 - DNA, 1752 bp, Arabidopsis thaliana
  unsure (1)..(1752): unsure at all n locations
agcgtctctacgactcactattgggaaagctggtcacgcctgcaggtaccggtccggaattcccgggtcgacccacgcgtgcggtgagagagtaacagagaaacgtagagatatagcaaaatggctgcgacgcttactggatcagggattgctctagggttttcgtgctccgcaaagttctctaagagagcttcttcgtcgtccaaccgtcgctgcatcaagatgtcggtttcggtagaggagaagacgaagaaattcactcttcagaaatctgaggaagctttcaatgctgcgaagaacttaatgcctggaggtgtgaactcacctgtacgtgctttcaaatctgttggtggacaaccagtggtgatggattctgcaaagggctcacgaataagagacattgatggaaatgaatacattgactatgttggatcttggggacctgctataattggtcatgctgatgatgaggttcttgctgctttggctgagacaatgaagaaaggaacaagctttggtgctccttgtctcttagagaatgttcttgctgagatggtgatttcagctgttccaagtattgaaatggttcggtttgttaactccggtacagaggcatgtatgggtgtgctacgtcttgctcgtgccttcacagggaaacaaaagttcatcaagtttgaaggttgttatcatggtcatgcaaactctttccttgtcaaagcaggtagtggtgtagctactttgggtctacctgactcgcctggggtccccaaagcagctacttcagatactttaacagctccatacaatgatattgctgctgttgagaagctttttgaggcaaacaaaggagagattgctgccatcattcttgaacctgttgttggtaactcgggttttattacacctaaaccagagttcattgagggaatacgccggatcactaaagacaatggtgctcttcttattttggatgaagtcatgactggttttcgtttagcctatggtggagctcaagagtactttggaatcacacctgacttaacaactcttgggaaaatcatcggtggtggtcttcctgtgggagcatacggtggaagaagagacatcatggaaatggttgcacccgcaggaccgatgtatcaagctggtacgctaagtggtaatccgttggctatgacagcgggtatacacacgctgaagcggttaagtcagccagggacatatgaatacttagacaagatcacaaaagagcttacaaatgggatactagaagccgggaagaaaaccgggcatgcgatgtgtggcggttacataagcgggatgttcggtttcttcttcacggaaggacccgtctatgatttctcggatgcaaagaagagtgatacagagaagtttggaaagtttttcagaggaatgttggaagaaggtgtctacttggcaccttctcaattcgaggccggttttactagcttggctcacacttcagaagacatccaattcactatcgcagcggccgagaaggttctaagtcggctctaaaatgtctctggaagcttccagggaaccatgaatgtatttgaaattttttgatgtagagaaaattagattcaattgagagcaagcaagcaatctcgcaaaatttccctgtggtaagacaagtcaaaatgtctccgaaaaaagttagtttttttnnnnnnnnnnnnnnnnnnnnnnnnnnnnnnnnnnnnnnnnnnnnnnnnnnnnnnnnnnnnn

SEQ ID NO: 116894 - DNA, 2181 bp, Arabidopsis thaliana
  unsure (1)..(2181): unsure at all n locations
atacgactcaccttagggaaagctgcgtacgcctgcaggtaccggtccggaattcccgggtcgacccacgcgtccgtagcctacccatttcctccttctttctctcttctatctgtgaacaaggcacattagaactcttcttttcaacttttttaggtgtatatagatgaatctagaaatagttttatagttggaaattaattgaagagagagagatattactacaccaatcttttcaagaggtcctaacgaattacccacaatccaggaaacccttattgaaattcaattcatttctttctttctgtgtttgtgattttcccgggaaatatttttgggtatatgtctctctgtttttgctttcctttttcataggagtcatgtgtttcttcttgtcttcctagcttcttctaataaagtccttctcttgtgaaaatctctcgaattttcatttttgttccattggagctatcttatagatcacaaccagagaaaaagatcaaatctttaccgttaatggaggaagtatctccggcgatcgcaggtcctttcaggccattctccgaaacccagatggatttcaccgggatcagattgggtaaaggttactgcaataaccaatactcaaatcaagattccgagaacggagatctaatggtttcgttaccggagacttcatcatgctctgtttctgggtcacatggttctgaatctaggaaagttttgatttctcggatcaattctcctaatttaaacatgaaggaatcagcagctgctgatatagtcgtcgttgatatctccgccggagatgagatcaacggctcagatattactagcgagaagaagatgatcagcagaacagagagtaggagtttgtttgaattcaagagtgtgcctttgtatggttttacttcgatttgtggaagaagacctgagatggaagatgctgtttcgactataccaagattccttcaatcttcctctggttcgatgttagatggtcggtttgatcctcaatccgccgctcatttcttcggtgtttacgacggccatggcggttctcaggtagcgaactattgtagagagaggatgcatttggctttggcggaggagatagctaaggagaaaccgatgctctgcgatggtgatacgtggctggagaagtggaagaaagctcttttcaactcgttcctgagagttgactcggagattgagtcagttgcgccggagacggttgggtcaacgtcggtggttgccgttgttttcccgtctcacatcttcgtcgctaactgcggtgactctagagccgttctttgccgcggcaaaactgcacttccattatccgttgaccataaaccggatagagaagatgaagctgcgaggattgaagccgcaggagggaaagtgattcagtggaatggagctcgtgttttcggtgttctcgccatgtcgagatccattggcgatagatacttgaaaccatccatcattcctgatccggaagtgacggctgtgaagagagtaaaagaagatgattgtctgattttggcgagtgacggggtttgggatgtaatgacggatgaagaagcgtgtgagatggcaaggaagcggattctcttgtggcacaagaaaaacgcggtggctggggatgcatcgttgctcgcggatgagcggagaaaggaagggaaagatcctgcggcgatgtccgcggctgagtatttgtcaaagctggcgatacagagaggaagcaaagacaacataagtgtggtggtggttgatttgaagcctcggaggaaactcaagagcaaacccttgaactgaggcagagagggtcctttttcttaatttttaaaatgaatatgggtctctccaagaaaaagtatttactattattaatttgtgcttatttttttaactaacaagttataaccatatggagataatgaagcttaatgtgttaagctcttttgtcttgactacattctaaaaagccccttgtatttttcttcccgggctaattgtaatatggttacaacatacattaagatgtagtattattgtttatgcaattactttcaaaactttnnnnnnnnnnnnnnnnnnnnnnnnnnnnnnnnnnnnnnnnnnnnnnnnnnnnnnnnnnnnnnnnnnnnnnnnnnnnnnnnnnnnnnnnnnnnnnnn

SEQ ID NO: 116895 - DNA, 2036 bp, Arabidopsis thaliana
ccgccatcatcatgacttctttctctctcactttcacatctcctctcctcccttcctcctccaccaaacccaaaagatccgtccttgtcgccgccgctcagaccacagctccggccgaatccaccgcctctgttgacgcagatcgtctcgagccaagagttgagttgaaagatggtttttttattctcaaggagaagtttcgaaaagggatcaatcctcaggagaaggttaagatcgagagagagcccatgaagttgtttatggagaatggtattgaagagcttgctaagaaatctatggaagagcttgatagtgaaaagtcttctaaagatgatattgatgttagactcaagtggcttggtctctttcaccgtagaaagcatcagtatgggaagtttatgatgaggttgaagttaccaaatggtgtgactacaagtgcacagactcggtatttagcgagtgtgattaggaagtatggtgaagatgggtgtgctgatgtgactactagacagaattggcagatccgtggtgttgtgttgcctgatgtgcctgagatcttgaaaggtcttgcttctgttggtttaacgagtcttcaaagtggtatggataacgtgaggaacccggttgggaatcctatagctgggattgatccggaggagattgttgacacgaggccttacacgaatctcctttcgcagtttatcaccgctaattcacaaggaaaccccgatttcaccaacttgccaagaaagtggaatgtgtgtgtggtggggactcatgatctctatgagcatccacatatcaatgatttggcctacatgcctgctaataaagatggacggtttggattcaatttgcttgtgggaggattctttagtcccaaaagatgtgaagaagcgattcctcttgatgcttgggtccctgctgatgacgttcttccactctgcaaagctgttctagaggcttacagagatcttggaactcgaggaaaccgacagaagacaagaatgatgtggcttatcgacgaacttggtgttgaaggatttagaactgaggtagagaagagaatgccaaatgggaaactcgagagaggatcttcagaggatcttgtgaacaaacagtgggagaggagagactatttcggagtcaaccctcagaaacaagaaggtcttagcttcgtggggcttcacgttccggttggtaggctacaagctgatgacatggatgagcttgctcggttagctgatacctacgggtcaggtgagctaagactcacagtagagcaaaacatcatcatcccaaatgtagaaacctcgaaaaccgaagctttgcttcaagagccgtttctcaagaaccgtttctcccctgaaccatctatcctaatgaaaggcttagttgcttgtaccggtagccagttctgcggacaagcgataatcgagactaagctaagagctttaaaagtgacagaagaagtagagagacttgtatctgtgccaagaccgataaggatgcattggacaggatgtcccaacacttgcggacaagtccaagtagcagatatcggattcatgggatgcttaacacgaggcgaggaaggaaagccagtcgagggtgctgacgtgtacgtcgggggacgaataggaagtgactcgcatatcggagagatctataagaaaggtgttcgtgtcacggagttggttccattggtggctgagattctgatcaaagaatttggtgctgtgcctagagaaagagaagagaatgaagattgattcaaaagctattggattcttaataagtcaagagacctatgaatggttctctctctggtttcagactttgatacttgatacttgtatttgtattgtgcccataattttgggttttgtagctctctcctttgttgtaacctgtaactttgtccttggttgttttgtaatatcttgttttttagtaatagtagtataatctgattttttgtcatatattttgtcttgatttctctgtgatatttataagaaataaacatttgtttc

SEQ ID NO: 116896 - DNA, 1174 bp, Arabidopsis thaliana
atggacggtgccacctaccaaagattcccaacggtcaagatccgtgagcttaaagatgactacgccaagttcgagcttcgtgaaaccgacgtttctatggccaacgctctccgtcgcgtaatgatctccgaagtccccaccgtcgcaatccatctcgtcgaaatcgaggttaattcctctgttctcaacgacgagttcattgctcatcgacttaggtctcatccctctcactagcgagcgtgctatgagcatgcggttctctcgagattgtgatgcttgtgatggagatggacattgcgagttctgctctgttgagtttccccttagtgctaagtgtgttactgaccaaaccctagatgttactagtagggatctctacagtgctgatcctactgttactcctgtggatttcactagtgactcgtctgcttctgattcaagcgagcacaagggaattatcattgcgaaactgcgccggggacaagagttgaagcttagagcgttagcgaggaaagggattgggaaagatcatgcgaaatggtctcctgcagctactgttacgtttatgtatgagcctgacattattatcaatgaagagatgatggacactttgtcagacgaggaaaagatcgacttgattgagagcagtcctaccaaagtgtttggcatggatccagtcaccagacaggttgtagtggttgatcctgaagcatacacttacgatgaagaagtgatcaagaaagctgaagcaatggggaaaccgggactcattgagatcagtccgaaagatgacagttttatattcactgttgagtccacaggtgcagtgaaggcttcccaactggtactaaatgccattgatcttctgaagcagaagcttgatgcagtccgtctctcagatgacaccgtagaagcggatgatcagtttggtgaactcggtgcccatatgcgtggaggatgaactcaagtgattaattcgagctctttgttatacctgtttgtttcaggttttgagtttcttctggagcagactgatattaaccgtagtggcactggcttgctttgataacatgtgaagtggcagtcttctatttgttctggacctctgatccctctgttcctgaatcttgttaagtttggttgttgttagttgttaaactcgctcgtaacgttt

SEQ ID NO: 116897 - DNA, 4780 bp, Arabidopsis thaliana
tcctttgtacgctcttcttcttcttcttcttcttcttcttcttcttcttcttcttcttcttctcctctctgtactttcgcgaaaaccctaattttctagatctgtttctctataatcgcctctctcactttgtagatccttcagatctactctccagtttctctctcagaaacacccaaccatggctaccaaacttccccttcaaaacagcaatgccgccaatgttgcgaaagctccggctaaatctcgagctgccgccggcgggaagacgatcgaggaaatgtatcagaagaaatcgcagcttgaacacattcttctccgtcctgatacatacatcggatctatcgagaaacacacccaaacactttgggtttatgagaaagatgagatggttcaacgtcctgttacctatgtacctggattgtataagatctttgatgagattctcgtaaacgccgctgataacaaacagagagatgcgaagatggattccgttcaagttgtgattgatgttgagcagaatctgattagtgtttgtaacagtggagctggagttcctgtagagattcatcaggaagaaggaatttatgtaccggagatgatatttggtcatttgttgacgagtagtaactacgatgataatgtgaagaagaccactggtggaagaaacggatatggtgctaagcttactaatatcttctctactgaattcatcatcgagactgcagatgggaagagactcaagaagtataagcaggtctttgagaacaacatggggaagaaatctgaaccggttataaccaagtgtaataagagtgagaactggacgaaggttacattcaaaccagatttgaagaagtttaacatgactgaattagaagacgatgtggttgctctaatgagtaagcgagtgtttgatattgctggatgtttggggaagtctgtcaaagttgagctgaatgggaaacaaataccagtgaagtcattcactgattatgttgacctatacctaagtgcagctaataaatcgaggacggaggatcctctcccaaggttgactgagaaagttaatgatagatgggaggtttgtgtgagcttaagtgaaggacaatttcagcaggtcagctttgtcaactccatagcaacaatcaagggtggtacacatgttgactatgtgacgagtcagattacaaaccatattgtggctgctgtgaacaaaaagaataaaaacgcaaatgttaaggcccataatgtgaaaaaccatctgtgggtctttgtcaatgcattgattgacaatcctgcttttgattctcaaacaaaagaaacactgactcttcgacagagcagttttgggtcgaaatgtgaactttcagaagattttctgaagaaagttggaaaatctggcgtagtggagaatttgctttcatgggcagatttcaagcagaacaaagatctaaagaaaagtgatggagccaaaacagggagggttctagttgagaagttagacgatgccgccgaagctggagggaagaactctcgactctgtacgttaattttgactgaaggagactcagcaaaatctctcgctttggcggggaggtctgtcttgggtaataactactgcggtgtgtttccgcttcgaggaaagctattgaatgtcagggaagccagcaccactcagattacaaacaataaggaaattgagaacctcaagaagatccttggactaaagcaaaatatgaagtacgagaatgttaactcattaagatatggccagatgatgatcatgactgatcaagatcatgatggttctcatataaagggtctcttaatcaattttatccactctttttggccgtcgttactccaggttccatcattcctggttgagtttataacacccattgtgaaggctacgcgtaagggtacaaaaaaagttctgtcattctactcaatgcctgaatacgaagaatggaaagaaagtctgaagggtaatgcaaccgggtgggatatcaaatactacaaggggttgggtacaagtacggctgaggagggcaaagagtactttagtaatcttggtcttcacaaaaaggattttgtttgggaggatgaacaagatggagaagccattgaacttgctttcagtaaaaagaagatcgaagcccggaaaaattggctttcgagctatgtgcctggcaatcatcttgatcagagacaaccgaaagttacgtacagtgacttcgtgaacaaagaactgatcttgttctccatggcggatcttcaacggtcaattccctcaatggttgatgggctcaaaccgggtcagagaaagatacttttcgttgcattcaagaaaatcgctcgtaaagaaatgaaggttgcccagctcgttggttatgtatcattgctgtcagcttatcatcatggcgagcagagtcttgccagtgctatcataggcatggcgcaggattacgtgggcagcaacaatatcaacttacttctaccaaatggtcaatttggtacacgaacttcgggtggaaaagattcagctagtgcaagatacattttcactaagctctctccagtaacaaggatcttgtttcccaaggatgatgatctccttcttgattacttgaatgaagacgggcaaaggatagagccaacttggtacatgcccatcattccaactgtacttgtcaatggcgctgaaggcattggaactgggtggagcacgttcataccaaactataaccctagagagatcgttgctaatgtaaggcgtttacttaacggtgaaagtatggtgcctatggatccttggtatagaggttttaaaggaacaattgagaaaactgcgtccaaagaaggtggttgtacttacacaatcactggtctatatgaggaggtggatgaaacaactattcgaatcacggagttgccaatcagaaggtggaatgatgattacaaaaatttcttgcagtcattgaagacagataatggtgcaccttttttccaggatgtcaaggcttacaatgacgagaaatctgttgattttgaccttattttgagtgaagagaacatgctggcggctcggcaagagggctttctgaagaaattcaaactcaccacgacaatcgctacaagtaatatgcatctctttgataaaaaaggtgtgataaagaaatatgtgaccccagaacaaatccttgaagagttctttgacctcaggtttgaatactatgagaagagaaaggaaaccgtggtgaagaatatggaaattgagctgttgaaactagaaaacaaagcgaggtttattcttgcagttctcagtggagaaatcatagtgaacaagaggaagaaagccgatattgttgaggacttaagacagaaagggttcacaccatttccgaggaaggccgagtctgtcgaagctgcaattgctggagcagttgatgatgatgcagctgaagaacctgaagaaatcttagtggatccggagtcaagctccagttatatacccggctcggaatatgactacctattggcaatggctatagcttcgttgactatagagaaagttgaggagttattagcagacagagataaaatgattattgcagttgcagacatgaagaaaaccacaccgaaatccctctggctcagtgacctagagtctcttgacaaggaactagaaaaacttgatctgaaagatgctcaagtccaacaggctatagaggcagcacagaaaaaaatcagggccaaatctggagcagcagtaaaggttaaaaggcaggcaccaaagaaaccagcaccaaagaagaccacaaagaaagccagtgaatctgagacaacagaggcttcctattcagcaatggacacagataacaacgtagcagaagtggtgaagccaaaagctagacaaggagcaaagaagaaagccagtgaatctgaaacaacagaggcttcccattcagcaatggacacagataacaacgtagcagaagtggtgaagccaaaaggtagacaaggagcaaagaagaaggctccagcagctgcgaaggaggttgaggaggatgaaatgttggatctagcacaacggcttgctcaatacaatttcggctcagcacctgcggattcaagcaaaacagctgaaacatcgaaagcaattgctgtggatgacgatgatgatgacgtggtagttgaggttgcaccagtaaagaaaggaggaaggaaaccggcggcgactaaagctgcaaaaccaccagcagctccgaggaaacgagggaagcagacagttgcttcaacagaggttctggcaattggtgtgtccccggagaagaaagtgaggaagatgagatcatctccgttcaacaagaagagtagttcagtgatgagcaggttggctgataataaggaagaggagagcagcgagaatgtggctggaaactcatcgtctgagaaatctggaggagatgtttctgcgatatcgaggcctcaaagagctaataggaggaaaatgacctatgtgttgagtgattccgagagtgaatctgcgaatgattctgagtttgatgacattgaagacgatgaagatgatgagtagagagagcgagaactgactcggttcttaatatgatttagtttcaaacttgtagtttctccctctggtcttctttggatttggtattactctgtagaaagacatatttctctaacgttggtcacaaaactcttacattgtttaagcgtttaagcgtttagtgactttttggtcagtcaa

SEQ ID NO: 116898 - DNA, 1213 bp, Arabidopsis thaliana
agaaggtttctcttgtcctccatacacttagcacaactgataaatcttttgaggtaaaatcagctttagatcaaggtttttctagtcatctctactcataaagatcaaagcttttgctattctcattttctaccaagagacaatatcatgatgatgggtaaagaggatttgggtttaagtcttagcttgggatttgcacaaaaccatcctctccagctaaatcttaaacccacttcttcaccaatgtccaatctccagatgtttccatggaaccaaacccttgtttcttcctcagatcaacaaaagcaacagtttcttaggaaaatcgacgtgaacagcttgccaacaacggtggatttggaagaggagacaggagtttcgtctccaaacagtacgatctcgagcacagtgagtggaaagaggaggagtactgaaagagaaggtacctccggtggtggttgcggagatgaccttgacatcactctagatagatcttcctcacgtggaacctccgatgaagaggaagattacggaggtgagacttgtaggaagaagcttagactatccaaagatcaatccgcagttctcgaagacactttcaaagagcacaatactctcaatcccaaacagaagctggctttggctaagaagctaggtttaacagcaagacaagtggaagtgtggttccaaaacagaagagcaaggacaaagttaaagcagaccgaagtggattgcgagtatttgaaaagatgtgttgagaaattaacggaagagaatcggcggctcgagaaagaggcagcggaactaagagcattaaagctttcaccgcggttgtatggtcagatgagtccaccgaccacacttttgatgtgtccatcgtgtgaacgtgtggccggaccatcctcatctaaccacaaccagcgatctgtctcattgagtccatggctccaaatggcccatgggtcaacctttgatgtgatgcgtcctaggtcttaactttaatgctgcttctatgggttgtgtgtgggtcattgtactttttagattattgactctcagctaatgtatccttaaaagcctttttctacttttaaatttactttaatctaattaaattagttgtccatgtcttcttgataacaaaaaaatttataattataaaaaaaaaaaacaggataaaaaaaaaaaaaaaaaaaaaaaagctacgtcaggg

SEQ ID NO: 116899 - DNA, 1459 bp, Arabidopsis thaliana
  unsure (1)..(1459): unsure at all n locations
agctctcnnnnnnnnnnnnnnnnncnnnnnnnnnnnnnnnnnnnnnnnnnnnnnnnnnnnnnnnnnnnnnccacgcgtgcggcgtgccataatcttccaaacttcaccagaagaaattcttaacaaacaattttcttcataatattaattctcaagatcttaaagattatattaatacgaagagaaaattcaaatgggtcttgatgattcatgcaacacaggtcttgttcttggtttaggcctctcaccaacgcctaataattacaatcatgccatcaagaaatcttcctccactgtggaccatcgtttcatcaggctcgatccgtcgttgactctaagcctatccggtgagagctacaagatcaagactggtgccggcgccggcgaccaaatttgccggcagacctcgtcccacagcggcatctcatctttctcgagcggaagggtaaagagagaaagagaaatctccggcggcgatggagaagaagaggcggaggagacgacggagagagtggtgtgttcgagagtgagtgatgatcatgacgatgaagaaggtgttagtgctcgtaaaaagcttagactcactaaacaacaatctgctcttctcgaagataacttcaaacttcatagcacccttaatcccaagcaaaaacaagctcttgcgagacagctgaatctaaggcctagacaagttgaagtgtggttccaaaacaggagagctagaacaaaactaaagcaaacagaagtggattgtgagtttttgaagaaatgttgcgagactttaacggatgagaatagaaggcttcaaaaagagcttcaagaccttaaggctttaaaattgtctcaaccgttttacatgcacatgccggcggcgactttgactatgtgcccttcttgtgagagactcggcggtggtggtgtcggaggagatacgacggcggttgatgaagaaacggcgaaaggagctttctccatcgtcacaaagcctcgtttctataaccctttcactaatccttctgcagcatgttagttacttattagttatttaatttctttttgttggttttttttttgtttcttaaatcaaattaggaattagttagaagataaatcccagggaaaaaatattacgttgaaattggggggaaatggggtatagtctttatagataagactcttcaacgattccactttatttttcggtgggattgttggttgatgaagaaaaaaaaatagtttgtaattacaggtttaaatatgtagagaaaaaatgacgaatatgtattatcttgtttttttttccttcgaatatgtattacggtaatataaatttgcttgtaaaaataataaatatattatttgataaaaaaacaaaaaaaggannnnnnnnnnnnnnnnnnnnnnnnnnnnngtacctaannnnnnnnnnnnnnnnnnnnnnnnnnnnnnnnnnnnnnnn

SEQ ID NO: 116900 - DNA, 1412 bp, Arabidopsis thaliana
ccacaaccccatatctctttgtctgaaaaatctcttttgcatatataaataaatataagccatatcttttgaaactgtactgctgcacaagtgtagaggcagtggcacaacatctttaagaaagagagagagaaagagtcatttattcatttcctcgcttaaaaatcttgagcacccagacagaattcttctttcttctttctggggttgagaaaaatgagtgaaagagatgatggattggggctaagtttgagcttgagtttaggttttaatcaaaaggacccgtcttcgaggttaaatccaatgcctctggcttcttatgcatcttcatcacacatgcagcatatgcagcagagcaattataaccatcctcaaaagattcagaacacttggattaacatgtttcagtcatcagagagaaactcggacatgagatcgtttctccggggaatagacgtgaacagagctccatcgacggtggtggttgacgtggaggatgaaggcgccggagtttcgtctccgaacagcaccgtctcaagcgtgatgagcgggaagaagagcgagcgagagctaatggctgcggcaggtgcagttggaggaggtagagtagaagataatgagattgagagagcttcttgctcgctcggcggtggtagcgacgatgaagacggtagcgggaacggagatgacagttcgaggaagaaactccgattgtctaaagaacaagctttggttcttgaagaaacttttaaagaacatagtacactcaatccgaagcaaaagatggctttggctaagcagttgaatctgaggacgagacaagttgaagtgtggttccaaaaccgaaggcaaaggacgaagctgaagcaaacggaagtagactgtgaatatcttaagagatgttgcgagaatctaacggatgagaatcggagattgcaaaaggaagtgagtgagcttagggctttaaagctttctccacacttatacatgcacatgaaacctcccactactctcacaatgtgtccttcttgcgagcgagtcgctgttacgtcatctccgtcatcggtggctcctcctgtgatgaattcatcgtctccgatgggtccgatgagtccgtgggctgccatgcctctacggcaacgacctgctgctggttctcattagagtttaattagtctaaagataataggtttggtgatttgtttttattatattgttgaacggacttggaagttcttttcaagagttggtcccatgctcttctttcctttgttttattcagtttctatttatagctgaattcaggataatggaaaatctactaatattattgtccaattattagtttggggccctgacgtagcttctataattctttaaaaaaaaaaaaaaaaaaaaaaaaagggcggccg

SEQ ID NO: 116901 - DNA, 1213 bp, Arabidopsis thaliana
  unsure (1)..(1213): unsure at all n locations
acaaagatagataaattttaaaggcatatttttttcatttcgactcagatgggttttgatgatacatgcaacacaggtcttgttcttggattaggtccctcaccaatttcaaataattacaatagtaccatcagacaatcctccgtttacaagctcgagccgtcgttgactctatgcctctcgggcgatccctcggttaccgtggtgaccggagctgaccagctatgccgtcagacgtcatctcacagcggagtctcttctttctcaagcgggagggtggtgaaaagagagagagacggtggcgaagagtcgccggaggaggaagagatgacggagagagttataagtgattaccatgaagatgaagaaggtattagtgctagaaaaaaacttaggcttacgaaacaacaatctgctcttcttgaggaaagcttcaaggatcatagcacccttaatcccaaacaaaagcaagttctggctagacagctgaatctaaggcctagacaagttgaagtatggtttcaaaatagaagagccaggacaaagctgaagcaaacagaagtagattgtgagtttttgaagaagtgttgtgaaacattagcagatgagaacataagacttcagaaagagattcaagaactcaaaaccctaaaattgactcagcccttttacatgcacatgcctgcatcgactctaacgaagtgtccttcttgtgagagaatcggcggcggcggcgggggtaatggaggaggaggtggcggcagcggggctaccgcggtgattgtagatggaagtacggccaaaggagctttctctatctcctcaaagcctcacttcttcaacccttttactaacccatctgcagcttgttgaatagtagtaattcgtttaattttattacttaaaatattaattttctttttttttttgggtggcattttaactagtaggaagaacacaaaaactatgttagaaagggtaagatgcgtatagatggtctcttctacaattcccactttgtttttcagtgggattgctggtttgagaaaaagaatagtttgtaattattattttatttgtagaaaaaggtaaaatagtcttccctttaatttataaaaaaaaaaaaaaaaaaaagnnnnnnnnnnnnnnnnnnnnnnnnnnnnnnnnnnnnnnnnnnnnnnnnnnnnnnnnnnnnnnnnnnnnnnnnnttcat

SEQ ID NO: 116902 - DNA, 792 bp, Arabidopsis thaliana
tgcggcactgcgcgtccgcccacgcgtccgcccacgcgtccgatttgctcatctccttcgatttcgaacccctaatcttgagatggcatcggagaagaagctctcgaaccctatgagggatattaaggtccagaagctagttcttaacatctctgttggtgagagtggtgatcgtctcactcgtgcctccaaggtgttggaacagctcagtggtcaaactcctgtcttctctaaggcgaggtacactgtgaggtctttcggtatcaggcgtaatgaaaagattgcgtgctatgtcaccgtgagaggtgagaaggcaatgcagcttcttgagagtggcttgaaagtgaaggaatacgagctgttgaggaggaacttcagtgacactggctgcttcggattcggtatccaggagcacattgatcttggaatcaagtatgatccttctaccggtatctacggtatggatttctacgttgttcttgaacgtccaggataccgtgtggcccgtcgccgtagatgcaagactcgcgttggtattcaacatagagttaccaaggatgatgccatgaagtggttccaagttaagtatgaaggagttatcctcaacaagtctcagaacatcactggttgaagagcttttttttgtcattttgttttggttcaagttcttatatttaagattctggatagtaaggatttcgtgttttgggaacccttttgacttaagttggttaaagaatcttcaaggaccccccaaaaatgaacccatttttgggggtaaaaaaaaaaaaa

SEQ ID NO: 116903 - DNA, 761 bp, Arabidopsis thaliana
  unsure (1)..(761): unsure at all n locations
aaatttgttgaagccgggattaaccaatttttccccaacagggaaacccaggcttatggcccatggaatttcggccaaagcttttaatacgacctcactataaggaaaagtgggtagccctgcaggtcccggtccggaattcccggggtcgacccacgcgtccgaagttaaggagtatgagcttcttaggaggaacttcagtgacactggttgctttggatttggtatccaagagcacattgatcttggaatcaagtacgatccttccactggtatctacggaatggacttttacgttgtccttgaacgcccaggatatcgtgtggctcgccgccgtagatgcaagactcgtgttggtattcaacacagagtaaccaaggatgatgcaatgaaatggttccaggtcaagtatgaaggagttatcctcaacaagtctcagaacatcactggttaaaaagtgttttgatctttaaagatttttgttgattctagcttattttaagttgttatctttggatgttaaagaatttcttgttgtagtaaatcttttgacatcagtttggtagaatctaaatcttccaagaaccttggagatatgtttcttattttattcaatgtcatcatcaaaactaaaatcaatcaaaagcagctcctttgatttccnnnnnnnnnnnnnnnnnnnnnnnnnnnnnnnnnnnnnnnnnnnnnnnnnnnnnnnnnnnnnnnnnnnnnnnnnnnnnnnnnnnnnnnnnnnnnnnnnn

SEQ ID NO: 116904 - DNA, 632 bp, Arabidopsis thaliana
  unsure (1)..(632): unsure at all n locations
gccggcacgcctgcaggtaccggtccggttttcccggggggacccacgcgcccgtacggcggcggaagacgacagaagggggggctttgcaaactctacactgcttcgtctcttagctcgacattgatctccttaaaatggcgtcggagaagaagctctcgaaccccatgagggacattaaggttcagaaacttgttctcaacatttccgttggtgagagtggtgatcgtctcactcgtgcctccaaggtgttggagcagctcagtggacaaacccctgtcttctctaaggcgaggtacactgtgaggtcttttggtatcaggcgtaatgagaagattgcgtgttatgtgactgtgagaggtgagaaggcaatgcagcttcttgagagtggtttgaaagttaaggagtatgagcttcttaagaggaacttcagtgacactggttgctttggatttggtatccaagagcacattgatcttggaatcaagtacgatccttccactggtatctacggaatggactttctacggtgtccttaacgtccaggganccgtntgcccgngccgtagntnaagcttgcgnggatccacaagggttccaagntnatcntaagnggncagtaagattaggtc

SEQ ID NO: 116905 - DNA, 499 bp, Arabidopsis thaliana
  unsure (1)..(499): unsure at all n locations
tgagaaggcaatgcagcttcttgagagtggtttgaaagttaaggagtatgagcttcttaggaggaacttcagtgacactggttgctttggatttggtatccaagagcacattgatcttggaatcaagtacgatccttcccactcggtatctacggaatggacttttacgttgtccttgaacgcccaggatatcgtgtggctcgccgccgtagatgcaagactcgtgttggtattcaacacagagtaaccaaggatgatgcaatgaaatggttccaggtcaagtatgaaggagttatcctcaacaagtctcagaacatcactggttaaaaagtgttttgatctttaaagatttttgttgattctagcttattttaagttgttatctttggatgttaaagaatttnttgttgtagtaaatcttntgacancagtttggtagaatctaaatcctctttctccgngcntgcggccgcgaattcgatgatattagtttatngtt

SEQ ID NO: 116906 - DNA, 353 bp, Arabidopsis thaliana
ctctatttgctcatctccctcgatttcgaacccctaatcttgagatggcgggcggagaagaagctctcgaaccctatgagggatattaaggtccagaagctagttcttaacatctctgttggtgagagtggtgatcgtctcactcgtgcctccaaggttcgttctttctttccccttaagagtactcactatatggcttaggaaatttatttgagactttacgtcttagctactctgaaatgggttggttaggtacatagttcataggtgctgtatcgagagttttggttattgtaggtgttggaacagctcagtggtcaaacccctgtcttctctaagggtatgtgaatatc

SEQ ID NO: 116907 - DNA, 1513 bp, Arabidopsis thaliana
ataaattctacgtacacgtaccacttcttctcctcaaattcatcaaacccatttctattccaactcccaaaaatggcgattcgtcttcctctgatctgtcttcttggttcattcatggtagtggcgattgcggctgatttaacaccggagcgttattggagcactgctttaccaaacactcccattcccaactctctccataatcttttgactttcgattttaccgacgagaaaagtaccaacgtccaagtaggtaaaggcggagtaaacgttaacacccataaaggtaaaaccggtagcggaaccgccgtgaacgttggaaagggaggtgtacgcgtggacacaggcaagggcaagcccggaggagggacacacgtgagcgttggcagcggaaaaggtcacggaggtggcgtcgcagtccacacgggtaaacccggtaaaagaaccgacgtaggagtcggtaaaggcggtgtgacggtgcacacgcgccacaagggaagaccgatttacgttggtgtgaaaccaggagcaaaccctttcgtgtataactatgcagcgaaggagactcagctccacgacgatcctaacgcggctctcttcttcttggagaaggacttggttcgcgggaaagaaatgaatgtccggtttaacgctgaggatggttacggaggcaaaactgcgttcttgccacgtggagaggctgaaacggtgccttttggatcggagaagttttcggagacgttgaaacgtttctcggtggaagctggttcggaagaagcggagatgatgaagaagaccattgaggagtgtgaagccagaaaagttagtggagaggagaagtattgtgcgacgtctttggagtcgatggtcgactttagtgtttcgaaacttggtaaatatcacgtcagggctgtttccactgaggtggctaagaagaacgcaccgatgcagaagtacaaaatcgcggcggctggggtaaagaagttgtctgacgataaatctgtggtgtgtcacaaacagaagtacccattcgcggtgttctactgccacaaggcgatgatgacgaccgtctacgcggttccgctcgagggagagaacgggatgcgagctaaagcagttgcggtatgccacaagaacacctcagcttggaacccaaaccacttggccttcaaagtcttaaaggtgaagccagggaccgttccggtctgccacttcctcccggagactcatgttgtgtggttcagctactagatagatctgttttctatcttattgtgggttatgtataattacgtttcagataatctatcttttgggatgttttggttatgaatatacatacatatacatatagtaatgcgtggtttccatataagagtgaaggcatctatatgtttttttttttttattaacctacgtagctgtcttttgtggtctgtatcttgtggttttgcaaaaacctataataaaattagagctgaaatgttaccaaatctaaaaaaaaagggcggcc

SEQ ID NO: 116908 - DNA, 469 bp, Arabidopsis thaliana
  unsure (1)..(469): unsure at all n locations
atccatactcatcataacttcaacctcagcncctaactactaaaaccctnttactataaatggtacgtacacgtaccacttctgctcctcaaattcatcaaacccatttctattccaactcccaaaaatggcgattcgtcttcctctgatctgtcttcttggttcattcatggtagtggcgattgcggctgatttaacaccggagcgttattggagcactgctttaccaaacactcccattcccaactctctccataatcttttgactttcggttaaaatattttactttgccattcccaactctctcacttatttttgttcttaatgttagaaatacatgtttgttctgaatttatattatgaatttatattatggttttcactagtgttagaaatacatgtttgccattccattcccaactctctccataattaactgttttttttctttcttttctttaaaacaca

SEQ ID NO: 116909 - DNA, 3699 bp, Arabidopsis thaliana
caacttacaagttcctctctcagcttctctcccaccactaaggaggaacgttccaaagatccctttctcagagaattcccagaaaaatcttcaacaattgaaaccctaatggagaatcattcggatccttgaatcctttggtttgtctctcacctccatttctgaaatttcattgctttgtgattcttctgcagattcgttttgaagagaagaaagaaatgtcatcgaacacttcacgaagctgttctactagatctagacaaaactctcgagtttcttcacaagttctcgtcgacgcaaagctacacggaaacttcgaagaatctgagcgtttatttgactattcagcttcaataaacttgaacatgccaagttcttcctgtgagattccttcttcagctgtctcaacgtacttacagaagattcagagagggatgttgattcaaccctttggttgtttaatcgttgttgatgagaaaaaccttaaagtcattgcctttagtgaaaacactcaagagatgttgggtttgattccacatacagtaccaagtatggagcagcgtgaagctttgactataggaactgatgtgaaatcattgtttctgtctccaggttgttctgctttgcagaaagctgttgactttggtgagattagtattttgaatcctatcacgcttcattgtaggtcttcaagtaagcctttttatgcgattctgcatcggattgaggaaggtcttgttattgatttggagcctgtgagtccggatgaggtgcctgtgactgctgccggggctttaagatcgtataagcttgcggcgaaatcgatttcgaggttgcaggcattgcctagtgggaatatgttgttgttgtgtgatgctttggttaaggaagttagtgaattaactggttatgatagggtgatggtgtataagttccatgaggatgggcatggggaagtgattgctgaatgctgccgggaagatatggaaccttatcttgggttgcattactccgctactgatataccgcaagcttcgagatttctgtttatgagaaacaaggttaggatgatttgtgattgttcagcggttccggttaaagtcgttcaagataagagtctctcacagccaataagtctttctggatctactttgagagctcctcatggttgtcacgcacagtatatgagtaatatgggatcagtggcgtctcttgtcatgtctgtaactatcaatggtagtgatagtgatgagatgaacagagatttacagactggcagacacttatggggcttggtggtttgtcatcacgcaagtcctagatttgttccgtttccgttacgatatgcttgtgaattcttgactcaagtatttggcgtgcagatcaacaaagaagcggaatcagctgttctgttgaaagagaagcgtattctgcaaactcagagtgtgctatgtgacatgcttttccgcaatgcaccaataggtatagtcactcaatcaccaaatataatggatcttgttaaatgtgatggagcagccctttattacagagacaacctctggtctctaggagttactcccacagagacacaaattagagatctaatcgactgggttctcaaaagtcatggaggcaacactggctttaccactgaaagtctaatggagtctggctatccggatgcttctgttcttggggagtcaatctgtggaatggctgccgtatatatttccgaaaaagatttccttttctggttccggtctagcactgcaaaacagatcaagtggggcggtgcacgacacgatcctaatgacagagatggtaagaggatgcatcccagatcctcattcaaggcttttatggaaatagtcaggtggaaaagtgtgccctgggatgacatggaaatggatgcaattaattctctgcagctaataataaaaggctcattgcaagaggagcattcaaagactgttgtggatgtcccacttgtggataatagggttcagaaggtagatgaattgtgtgttatcgtgaatgaaatggtgcggttgattgatacagcagctgttcccatctttgcggttgatgcctctggtgttataaatggttggaattctaaagcggctgaggtaacaggattggcagttgaacaagcaataggcaaacctgtatcagatctcgttgaggacgattctgtagaaaccgtgaagaacatgttagccttggctctcgaaggtagtgaagaacgtggtgctgagatcaggatcagagcatttggtcctaaaaggaaaagcagtccggttgagttagttgtcaacacttgttgtagcagagatatgacgaataatgttcttggtgtatgcttcattggacaagatgttacaggccagaaaacgcttactgaaaactatagccgcgtgcaaggagattatgcccgaatcatgtggagcccttccacactcattccaccaatttttataaccaatgaaaatggggtatgctcagagtggaacaacgcaatgcagaagctctctgggataaagagagaagaagttgtcaataaaattcttctcggggaggtttttaccacagatgattatggttgctgccttaaagaccatgacactttaacgaagctgagaataggtttcaatgctgtgatttctggccaaaagaacatagagaagcttttatttggcttttaccatcgtgatggtagcttcatcgaggcattgctttctgcaaacaaaaggactgatattgagggaaaggttaccggggttttatgctttttgcaagtacctagtccagaactccaatatgctctacaggttcagcaaatatcagagcatgcaattgcctgtgccctcaacaaattggcatatctccgccatgaagtgaaggaccccgaaaaggcaatatccttccttcaagatttgctccattcatctggattaagtgaagaccaaaagcggctcctgaggacaagcgttttatgcagggagcagttagccaaagtcataagcgactcagacatagagggaatcgaagaaggctatgtggaactggattgcagcgaattcggcctgcaggaatccctggaagcagttgtaaaacaagtgatggagctgagcatagaacgtaaagtacaaatcagctgcgattatcctcaagaagtttcatcaatgagactgtatggagacaacttaaggcttcagcaaatcctctcagagacactattaagcagcatacgcttcacgcctgcgtggagaggattgtgtgtctcattcaaggtaattgcacggatagaagctataggaaaaagaatgaaaagagtcgaacttgagttcaggataatacacccggcaccaggactgcctgaggatctggtaagagagatgtttcagcctttgagaaagggaacatcaagggaaggtttgggattacacattacccagaagctggtgaaactcatggagagaggaacattgagatacctcagagagtctgaaatgtcagcctttgtgatcctcacagaatttcccttgatttgaagctgaagacctgtctacaagatttacattttattgaataagtgtggtgtttttgaaagtcttcatttttttttctcacatatataaatgtatgtttagttaccgtaacttaattacatatatatatataggaaagttaaatttg

SEQ ID NO: 116910 - DNA, 1233 bp, Arabidopsis thaliana
  unsure (1)..(1233): unsure at all n locations
ggtctcacaaactcttctttcagtcatcacagaaaacaaaaaaaacaatggcggataagctcactgacgatcagattacagaatacagggaatctttcaggttattcgacaagaatggtgatggttccattacgaaaaaggagctcggtaccatgatgcgttcaatcggtgaaaaaccgacaaaagctgatcttcaggacttgatgaacgaagcggatttagatggtgatggaaccatcgatttccctgagttcttgtgcgtaatggctaagaatcaaggtcatgatcaagcgccgcgtcacactaaaaaaacaatggcggataagctcactgacgatcagattacagagtacagggaatctttcaggttattcgacaagaatggtgatggttccattacgaaaaaggagctccgtaccgtgatgttttccctcggtaaaaaccggacaaaagctgatcttcaggacatgatgaacgaagtggatttagatggtgatggaaccatcgatttccctgagttcttgtacctaatggctaagaatcaaggtcatgatcaagcgccgcgtcacactaaaaaaacaatggtggattatcagctcactgacgatcagatcttagaattcagggaagccttccgcgtattcgacaagaatggtgatggttacattaccgtgaatgagctccgtactactatgcgctcccttggtgaaaccaaacaaaagcttgagctccaggacatgatcaacgaagcggatgcagatggtgacggaaccatcagtttctctgagtttgtgtgtgtaatgactggtaaaatgattgacactcagtctaagaaagaaacgtacagagttgtgaatcaaggtcagggtcaagtgcagcgtcacactagaaatgacagagctggtggcaccaattgggagagggacatagcggtcggggttgccagcaatatcatcgcttcgccaatttccgacttcatgaaagataggtttaaagatttgttcgaagcgctgttatcttgaaatgacccggcagtaactttttgcccatagggtctgacaattatgttagatctctctcaaaaggngtttcatctaatgncaataatttcctatgtaaataaatttattgcatgtgttaggtgtgttaccatcttccagttgtgtgcaattttattaaaatgaggtttgtaatatgggtttcagtatcgnatataattggggnattaattgt

SEQ ID NO: 116911 - DNA, 1583 bp, Arabidopsis thaliana
  unsure (1)..(1583): unsure at all n locations
tnnnnnnnnnnnnnnnnnnnnnnnnnnnnnnnnnnnnnnnnnnnnnnnnnnnnnnnnnnnnnnnnccacgcgtccgcccacgcgtccgcccacgcgtccgcccacgcgtccgctcagactaagacagagtcagaaacaatggcgaaatctccagaaacagagcatccgaacaaagtctttggttggggtgctagagacaaatccggtgttctctctccttttcacttctctagaagagacaatggtgaaaatgatgtgacagtgaagatcttgttctgtggagtttgccacactgatttacacaccatcaaaaacgactggggatactcgtattacccagtagttccagggcatgaaatcgttgggatcgctacaaaagttggtaagaacgtgactaaattcaaagaaggagatcgtgtcggagtaggagtgatcagtggctcgtgccaatcttgcgaatcttgtgaccaagatcttgaaaactactgtcctcaaatgtctttcacatacaatgcgattggatccgatggaaccaagaattacggtggctattcggagaacattgtggttgatcaacggtttgttttgcggtttccggagaatttaccgagcgattcgggtgcgccgttgctgtgtgctggaatcactgtgtatagtccaatgaagtattatggtatgactgaggcagggaagcatttaggggttgctggacttggtgggcttggtcatgttgctgttaagattggtaaagcttttggtttgaaagttactgtcattagttcttcttctacgaaagcagaggaagccattaatcatcttggtgctgattcgtttcttgtcacaactgatcctcagaaaatgaaggctgcaattggaacaatggactacattatcgatacgatatcagcagtacatgctctgtatccgttgctcggtttactcaaagtcaacggaaagctcattgctttaggcttacctgagaagcctctcgagctaccaatgttccctcttgttctcggaaggaaaatggttggaggaagtgacgtgggagggatgaaggagacacaagagatgcttgatttctgcgctaagcacaacattacagctgatattgaattgattaagatggatgagattaacactgcgatggagaggcttgctaagtctgatgttaggtacaggttcgtgatcgacgtggctaactccttgagccctccatgaatgatccggatctaagaattgagcattgaggaggctttaaatctatgtcataatcttggtgtttgtttgtgtctctcgagttatcttcgttttctgctttcggtttgagaatcggtttcttctcagacaagttaccttatttcgttgttttcttctcatgttctgtttcctgagagaaactctttctgattccagataagactttgatccattttcagtttgctaataatataaagatgggtctaaaacctaaacagctttaaactnnnnnnnnnnnnnnnnnnnnnnnnnnnnnnnnnnnnnnnnnnnnnnnnnnnnnnnnnnnnnnnnnnnnnnnnnnnnnnnnnnnnnnnnnnnnnnnn

SEQ ID NO: 116912 - DNA, 988 bp, Arabidopsis thaliana
  unsure (1)..(988): unsure at all n locations
atgattctccggcactaatacgactcatttagggaaagctcggcacgcctgcaggtaccggtccggaattcccgggtcgacccacgcgtccgcggacgcgtgggcggacgcgtgggcggacgcgtgggcggacgcgtgggctccgtttcttctttccgattcgtgttttcccgtcggccggagatatatcgcaaccctaatccgaaatggcgtcggagaagaagctatcgaacccaatgagggacattaaagtgcagaagctggttctcaacatctccgttggtgagagtggagatcgtctcaccagagcctccaaggtgttggaacaattgagtggtcagactcctgttttctccaaggctcgatacactgttcgttcttttggtataagacgtaatgagaagattgcttgctatgtgactgtcaggggagagaaggcaatgcagctccttgagagtggattgaaagttaaagaatacgaactcttgagaaggaacttcagcgacactggttgctttggttttggtattcaagagcacattgatttgggtatcaagtatgatccatcgactggaatctacggcatggacttctatgttgttcttgagcgaccaggttaccgtgttgcgcgccgcagaagatgcaagactcgtgttggaatccagcatagagtgacgaaagatgatgccatgaaatggttccaggtgaaatatgaaggagtcattctcaacaagtctcagaacatcactggttaaacaaatgtgtcaaacaaatagctatcatctgttttgttttttttgggttcaaatcgtattttctcagttttgttttgcttctctgttcttcagacattttgattttcctttatatattttgcgtatctactactccgacaaaaaaaaaaaaaaagggcggccgctctagaggatccaagcttacgtacgcgtgcaggcgacgtcannnnnnnnnnnnnnnnnnnnnnnnnnnn

SEQ ID NO: 116913 - DNA, 2240 bp, Arabidopsis thaliana
acaaccttatagaattttctcgccctatttttctctcaacaccaaaaatttgtattttttttttactattgtttaccccaaaaagtattgagaatcgcaaaaaaactgaattgtaaaaaatatttgagaaagagaaatacaaaaaaaaacaaaaaaaaaagttttaaagaaaaggcgaaggagagatcgtgagagacagagaggctgccgaagaaaggagaatttagggtttggagacttttgttgaaatttggcgttacgtttttttgtatttcctcaacaaatttctcatctgctctcttcatattgtgtctttgaacgcttcatctcctcgtcatggtggccacctctgctacgtcgtcattctttcctgtaccatcttcttcacttgatcctaatggaaaaggcaataagattgggtctacgaatcttgctggactcaattctgcacctaactctggtaggatgaaggttaaaccaaacgctcaggctccacctaagattaatgggaaaaaggttggtttgcctggttctgtagatattgtaaggactgataccgagacctcatcacaccctgcgccgagaactttcatcaaccagttacctgactggagcatgcttcttgctgctataactacgattttcttagcggctgagaaacagtggatgatgcttgattggaaacctaggcgttctgacatgctggtggatccttttggtatagggagaattgttcaggatggccttgtgttccgtcagaatttttctattaggtcatatgaaataggtgctgatcgctctgcatctatagaaaccgtcatgaatcatctgcaggaaacggcgcttaatcatgttaagactgctggattgcttggagatgggtttggctctacacctgagatgtttaagaagaacttgatatgggttgtcactcgtatgcaggttgtggttgataaatatcctacttggtaagctatcctcttgcataaacctggttctgcaggtcatgctctcactcttaaccaggttgggaaaaatgatgtgtatttcgttttttcagttgatactgcttttacagtacgagatatatgctcatatgactaatgacttcttgcaccctgaattatatgctctgcatgcatattatattgcatcataactcatttgcttattcaatatatgcctcacaggggagatgttgttgaagtagacacctgggtcagtcagtctggaaagaatggtatgcgtcgtgattggctagttcgggactgtaatactggagaaaccttaacacgagcatcaagtgtgtgggtgatgatgaataaactgacaaggagattgtcaaagattcctgaagaggttcgaggggaaatagagccttattttgtgaattctgatcctgtccttgccgaggacagcagaaagttaacaaaaattgatgacaagactgctgactatgttcgatctggtctcactcctcgatggagtgacctagatgttaaccagcatgtgaataatgtaaagtacattgggtggatcctggagagtgctccagtgggaataatggagaggcagaagctgaaaagcatgactctggagtatcggagggaatgcgggagagacagtgtgcttcagtccctcactgcagttacgggttgcgatatcggtaacctggcaacagcgggggatgtggaatgtcagcatttgctccgactccaggatggagcggaagtggtgagaggaagaacagagtggagtagtaaaacaccaacaacaacttggggaactgcaccgtaagaaaaaagaaaacacaacaacaatggctcatttgaatccccttgtaactatatctgctactaccaccttgcttgcttgcaaccaccaccaccaccaccaccatttcatgtcctcctcctcacaaaagtttcggccaccaaccctttgtatatttctttttttggttcttcttctttttttattcgatggagatttattatatttatttaatctttctatttatttttttgcttaatgggaaatgggtgtcgtgtatcattacgaattctgatgttatgtaacccatgtgccagcggaagacaaaggcatcaactctctcttatcctaaatttaattgtactttgttgagttttgtagttgtttccagctaaaccagcacgtgaacgataactgttatgaaaaaaaaaaaaaaaaaaaaaaaaaaaaaaaagggcggccgctct

SEQ ID NO: 116914 - DNA, 1899 bp, Arabidopsis thaliana
  unsure (1)..(1899): unsure at all n locations
tccgaattttctcgccctatttttctctcaacaccaaaaatttgtattttttttactattgtttaccccaaaaagtattgagaatcgcaaaaaaactgaattgtaaaaaatatttgagaaagagaaatacaaaaaaaaacaaaaaaaaaagttttaaagaaaaggcgaaggagagatcgtgagagacagagaggctgccgaagaaaggagaatttagggtttggagacttttgttgaaatttggcgttacgtttttttgtatttcctcaacaaatttctcatctgctctcttcatattgtgtctttgaacgcttctatctcctcgtcatggtggccacctctgctacgtcgtcattctttcctgtaccatcttcctcacttgatcctaatggaaaaggcaataagattgggtctacgaatcttgctggactcaattctgcacctaactctggtaggatgaaggttaaaccaaacgctcaggctccacctaagattaatgggaaaagggttggtttgcctggttctgtagatattgtaaggactgataccgagacctcatcacaccctgcgccgagaactttcatcaaccagttacctgactggagcatgcttcttgctgctataactacgattttcttagcggctgagaaacagtggatgatgcttgattggaaacctaggcgttctgacatgctggtggatccttttggtatagggagaattgttcaggatggccttgtgttccgtcagaatttttctattaggtcatatgaaataggtgctgatcgctctgcatctatagaaaccgtcatgaatcatctgcaggaaacggcgcttaatcatgttaagactgctggattgcttggagatgggtttggctctacacctgagatgtttaagaagaacttgatatgggttgtcactcgtatgcaggttgtggttgataaatatcctacttggggagatgttgttgaagtagacacctgggtcagtcagtctggaaagaatggtatgcgtcgtgattggctagttcgggactgtaatactggagaaaccttaacacgagcatcaagtgtgtgggtgatgatgaataaactgacaaggagattgtcaaagattcctgaagaggttcgaggggaaatagagccttattttgtgaattctgatcctgtccttgccgaggacagcagaaagttaacaaaaattgatgacaagactgctgactatgttcgatctggtctcactcctcgatggagtgacctagatgttaaccagcatgtgaataatgtaaagtacattgggtggatcctggagagtgctccagtgggaataatggagaggcagaagctgaaaagcatgactctggagtatcggagggaatgcgggagagacagtgtgcttcagtccctcactgcagttacgggttgcgatatcggtaacctggcaacagcgggggatgtggaatgtcagcatttgctccgactccaggatggagcggaagtggtgagaggaagaacagagtggagtagtaaaacaccaacaacaacttggggaactgcaccgtaagaaaaaagaaaacacaacaacaatggctcatttgaatccccttgtaactatatctgctactaccaccttgcttgcttgcaaccaccaccaccaccatttcatgtcctcctcctcctcacaaaagtttcggccaccaaccctttgtatatttctttttttggttcttcttctttttttattcgatggagatttattatatttatttaatctttctatttatttttttgcttaatgggaatgggngccgggaacataacgaatncggnggaatganccctggggcancgnaannaaaggntaanncccctacccaaattatggacttggggggtt

SEQ ID NO: 116915 - DNA, 825 bp, Arabidopsis thaliana
  unsure (1)..(825): unsure at all n locations
gggccccccctcgaggtcgacggtatcgataagcttgatatcgaattcgcggccgctttttgtatttcctcaacaaatttctcatctgctctcttcatattgtgtctttgaacgcttcatctcctcgtcatggtggccacctctgctacgtcgtcattctttcctgtaccatcttcttcacttgatcctaatggaaaaggcaataagattgggtctacgaatcttgctggactcaattctgcacctaactctggtaggatgaaggttaaaccaaacgctcaggctccacctaagattaatgggaaaaaggttggtttgcctggttctgtagatattgtaaggactgataccgagacctcatcacaccctgcgccgagaactttcatcaaccagttacctgactggagcatgcttcttgctgctataactacgattttcttagcggctgagaaacagtggatgatgcttgattggaaacctaggcgttctgacatgctggtggatccttttggtatagggagaattgttcaggatggccttgtgttccgtcagaaatttttctattaggtcatatgaaataggtgctgatcgctctgcatcctatagaaaccgtcatgaatcatctgcagggaaacggccgctttaatcaatgttaagacctgctggatttgcttggggatgggtttcggctctacaacctgagatgtttaagaaagaacttgatatcgggttgccacccgtttccagggtgtgggtgataaatatccccccttggggggcnttttttaagnggcaccnggcagcagcntggaaaatggatcgcgg

SEQ ID NO: 116916 - DNA, 1575 bp, Arabidopsis thaliana
  unsure (1)..(1575): unsure at all n locations
nnnnnnnnnnnnnnnnnnnnnnnnnnagcccacgcgtccgcccacgcgtccgcccacgcgtaaaccttatctcttcaccaccagcttctcaaagctttagcctcgagagcaaaattctctcaagctttagccatgtctgcctctgcttcttccctctctgctttcaatcctaaatcccttcctctctgcgtctccagacccgcttccgtctccgtcttacctccttccctctccttcaaacttcactccgaccacctcgtctctatcttcgcttcctccgccctcaaatgctcatcccccgccgagtacccgtcgcgtttcgttagaaacgttgctgtatcttcggattttgaggtggaggaagatgatatgttcgctgacggtgacgattcagcgcctgtggagcgtaactccttctctcctgaccttaagctctttgttggtaacctttcttttaacgttgatagcgctcagcttgctcagctctttgagagcgctggaaatgttgagatggttgaggttatctatgacaaagtgactggccggagcaggggtttcggatttgtgacaatgtcaaccgcagcggaagttgaagcagcagctcaacagttcaatggctatgaatttgaaggcagacctttgagagtcaatgctggccctcctccacctaaaagagaggaatccttctccagaggaccaagaagtggaggttacggttctgagcgtggtggaggttacggttccgagcgtggtggtggttatggttccgagcgtggtggtggttatggttctcaacgtagtggtggtggttacggagggtctcaacgttccagttatggttcggggtcagggtccggttcgggctcaggttcaggaaaccgtctctacgtgggcaacctttcttggggtgttgatgacatggcacttgagaacttgtttaacgagcaaggaaaggtagttgaagctagggttatctacgacagggacagcggtagatccaagggttttggatttgtgacacttagctcttcccaagaggttcagaaggcgatcaattccttgaatggagcagatttggatggaagacaaataagagtctcagaggctgaggctaggccaccaagaggccaattttgagcggtcacacctctttcatattctcaaaaaatgcaaattctggagggttctttgaagcatatagggttagtggaaaatggcggtttcagacagtaactaaaactcactgctggtgcacgctaggctttatccgcctttgatgcatgaaggtcgttaaggaatggtctttttttgagaaagataacaattagattaaagcagagaacccatgtttcttgtctgttcgaatcctgcgagattggttgtagttgaagttgcattttcttcttgtcttttttgttggtattttgacacaatttggctttttggcatatgagagtgactgtagcagtctgttttaaaaaaggaaaaaaaaaaagttatgtnnnnnnnnnnnnnnnnnnnnnnnnnnnnnnnnnnnnnnnnnnnnnnnnnnnnnnnnnnnnnaacnnnnnnnnn

SEQ ID NO: 116917 - DNA, 668 bp, Arabidopsis thaliana
  unsure (1)..(668): unsure at all n locations
cggancngntccccngccgttacgccaggaagctttaactggnttttcgccgggcncggtaaccnagggttggattttgcccttagctctccccaagaggttcagaaggcgatcaatccctggaatggacccgatttggatggaagccaaataggagccccagaggctgaggctaggccccccaggaggccaattttgagcggtcacacctctttcatattctcaaaaaatgcaaattctggagggttctttgaagcatatagggttagtggaaaatggcggtttcagacagtaactaaaactcactgctggtgcacgctaggctttatccgcctttgatgcatgaaggtcgttaaggaatggtctttttttgagaaagataacaattagattaaagcagagaacccatgtttcttgtctgttcgaatcctgcgagattggttgtagttgaagttgcattttcttcttgtcttttttgttggtattttgacacaatttggctttttggcatatgagagtgactgtagcagtctgttttatttgatgttcttgatcttcttatgttctgaaaaccagttttcctaaaacttaacaaatttcgatatggaacaagaaattttctggaagggtttgattgtgtgaggttgtattgtcagttctcatatgaa

SEQ ID NO: 116918 - DNA, 552 bp, Arabidopsis thaliana
taggtgacactatagaagagtctatgacgtcgcatgcacgcgtacgtaagctcggaattcggctcgagtttcgttagaggcgttggccgtatcttcggattttgaggtggaggaagatgatatgttcgctgacggtgacgattcagcgcctgtggagcgtaactccttctctcctgaccttaagctctttgttggtaacctttcttttaacggtgatagcgctcagcttgctcttgctcggggagagcgctggaaatggtgagatggttgagggtatctatcacaaagtgactggcccggagcaaggggttttcggatttgtgacaatggccaccgcagcggaaggtgaagccgcagcctcaacagttcaatggctatgaatttgaaaggccgaccctttgagaggcaaggctggccctcctccacctaaaagagaggaatccttctccagaggcccaagatgggggggggtccggtctgggcgggggggggggttccgggtcccagcgggggggggggtttgggtcccggcggggggggggttatggtcca

SEQ ID NO: 116919 - DNA, 641 bp, Arabidopsis thaliana
  unsure (1)..(641): unsure at all n locations
cttaaaccttatctcttcaccaccagcttctcaaagctttagcctcgagagcaaaattntctcaagctttagccatgtntgcctctgcttctnccctctctgctttcaatcctaaatcccttcctctctgcgtctccagacccgcttccgtctccgtcttacctccttccctctccttcaaacttcactccgaccacctcgtctctatcttcgcttcctccgccctcaaatgctcatcccccgccgagtacccgtngcgtttcgttagaaaggtttgctgtatcttcggattttaaggtggaggaagatgatatgttcgctgacggtgacgattcagcgcctgtggagcgtaaactccttcttctcctgaccttaaagctctttgttggtaacctttctttttaacggtgatagcggtcagctttgctcaagctctttgagagcggctggaaatgttgagatggttgagggtatctttggcaaaagtgacttggccggagaagggggtcggggtttttaccaatgtaaccccaggggaggtttaggaggagttaacaagttcatgggcttgaatttaacggagcctttnaggaantctggcccnncnccaaaagggntcctttcaaggccaaaggggnttc

SEQ ID NO: 116920 - DNA, 621 bp, Arabidopsis thaliana
  unsure (1)..(621): unsure at all n locations
nnnnnnnnnnnnnnnnnnnnnnnnnnnnnnnnnnnnnnnnnnnnnnnnnnnnnnnnnnnnnnnnnnnnnnnnnnnnnnnnnnnccacgcgtccgtaacctttcttttaacgttgatagcgctcagcttgctcagctctttgagagcgctggaaatgttgagatggttgaggttatctatgacaaagtgactggccggagcaggggtttcggatttgtgacaatgtcaaccgcagcggaagttgaagcagcagctcaacagttcaatggctatgaatttgaaggcagacctttgagagtcaatgctggccctcctccacctaaaagagaggaatccttctccagaggaccaagaagtggaggttacggttctgagcgtggtggaggttacggttccgagcgtggtggtggttatggttccgagcgtggtggtggttatggttccgagcgtggtggtggatacggttctcaacgtagtggtggtggttacggagggtctcaacgttccagttatggttcggggtcagggtccggttcgggctcaggttcaggaaaccgtctctacgtgggcaacctttcttggggtgttgatgacatggcacttgagaacttgtttaacgagc

SEQ ID NO: 116921 - DNA, 417 bp, Arabidopsis thaliana
gcgtccgcaaacgagtccgcggacgcgtgggcggacgcgtcggtgatagcgctcagcttgctcagctctttgagagcgctggaaatgttgagatggttgacgttatctatgacaaagtgactggccggagcatggggttttcggatttgtgacaatgtcaaccgcagcggaagttgaagcagcagctcaacagttcaatggctatgaatttgaaggcagacctttgagagtcaatgctggccctcctccacctaaaagagaggaatccttctccagaggaccaagaagtggaggttacggttctgagcgtggtggaggttacggttccgagcgtggtggtggttatggttccgagcgtggtggtggttatggttccgagcgtggtggtggatacggttctcaacgtagtggtggtgg

SEQ ID NO: 116922 - DNA, 562 bp, Arabidopsis thaliana
cgtccgttcgagagcaaaattctctcaagctttagccttgtttgcctctgcttctcccctctctggggggaggctttaaatcccttcctgtgtgcgtctccagacccgcttccgtttccgtcttacctccttccctctccttcaaacttcactccgaccacctcgtctctatcttcgcttcctccgcccttaaatgctcatcccccgccgggttcccgtcgggtttccgtagaaacgttgctgtatcttcggattttgaggtggaggaagatgatatgttcgctgacggtgacgattcagcgcctgtggagcgtggcctcctgctttctcctgaccttaaagctctttgttggtaacctttcttttaacgttgatagcgctcagcttgctcagctctttgagagcgctggaaatgttgagatggttgaggttatctatgacaaagtgactggccggagcaagggtttcggatttgtgacaatgtcaaccgcagcggaagttgaagcagcagcctcaggtatttttgggattcggattcaagatcctagacctggaaccggta

SEQ ID NO: 116923 - DNA, 1094 bp, Arabidopsis thaliana
  unsure (1)..(1094): unsure at all n locations
nnnnnnnnnnnnnnnnnnnnnnnnnnnnnnnagaagaacatacagtatatcttatccactctcttcctcatccacgcggcaaaccacgcgtccgctttagaaaaatgtcgtcagcttattgttcctccgccgtggctgtatccgccgcagccaccgcttcctccgccgctacctttaatccattactctcctcccactccaattcccaactcttctatcgctttacaccaaaatccttcaaactcgttgccaattgccctaatccactaatcctccactcaaatatccgccgccaccgcttcttctgcgccgccgaaaccgaagctagttccgccgatgatgaaatccaggcatcagtagaagaagaagaagaggtagaagaagaaggagatgaaggtgaagaagaagtagaggaagaaaaacagacgacgcaagcgagtggtgaagaagggaggctttacgttgggaatttaccttacacaatcacttcttctgagctctctcagatttttggagaagctggaactgtcgtcgatgttcagattgtttatgataaagttactgatagaagcagaggatttggatttgtaacaatgggaagcattgaagaagctaaagaagcgatgcagatgtttaacagctctcaaattggtggtagaacggtgaaagtgaacttcccggaggtgccgagaggcggtgagaacgaagtaatgagaaccaaaatccgtgataataaccggagttatgttgatagtcctcataaggtatatgcaggaaaccttggttggaatctaacctcacaaggtttaaaggatgcatttggtgatcaacctggtgtgcttggtgctaaagttatctatgaaagaaatactgggaggtctagggggtttggtttcatctcgttcgagtcagcggaaaatgttcagtctgctttggctacaatgaatggcgtggaagttgaaggacgagcgctgaggctaaatttggcttcagagagagagaaacccactgtgtctcctccttccgtagaagaaggagaaaccgaggaggccagtctagagagtaacgaggtgctttcgaatgttagtgcatga

SEQ ID NO: 116924 - DNA, 1075 bp, Arabidopsis thaliana
accggaaccgccgggccgacccaggcgtatccgggaagctttgtttcatctgttgttccctgtgaccatggctactccactctcaatctcatcaaatcctctcacctcccgccattgttaccgtctccacttatcttctacttcattcaagggaaatgtaagtgttttgggggcaaacccaagtcagattctatctctgaaactcaaccaaacccttaaaacgagaaaccaacagcaatttgcgagaccccttgttgtggttagccaaacggcggctacgtcgtcggcagttgtagctccggagagattccgtttggataatcttggaccacagccaggttcgaggaagaagcagaagagaaaaggtagaggtatctctgcaggacaaggagcaagttgtggttttggtatgagaggtcagaaatcaagatcgggtcctgggattatgagaggctttgaaggtggtcaaactgctctttatcgtcgtcttcccaaacttagaggaatcgctggaggtatgcgttcaggattacctaaatacttaccggttaatatcaaagacatagaaacagctgggtttcaagagggagatgaagtgtcattggagacattgaagcaaaagggtttgattaatccttcagggagagaaaggaaactccctcttaagattctgggtacaggagaactaagcatgaagctcaccttcaaagctcgtgccttctcaacacaagcaaaagagaagcttgaagcttcaggttgtacactcactgtgttgccggaaagaaagaaatgggttaagccatctgttgcaaagaaccaagcacgagcagatgaatactttgccaagaagagagctgcagcagcagaagcagcaacttcagagccagcagcctctgcttaaattacttcagtttcaagctctttttagtgttgtaaagctgcagagaagataattgtctatgacaaatgttaattacaattcctttgtctttttgtatggtgaagagatttacattttgttgtttgaagagtcattatcaaaaagatatttaaacggtaatgtaatattgaactc

SEQ ID NO: 116925 - DNA, 948 bp, Arabidopsis thaliana
atggtggggtgggcgattgcgctacacggcggtgccggagacattccgatcgatctccccgacgagcgacgtatccctcgtgagagcgccctccgtcactgcctcgatcttggcatctccgccctcaaatccggcaagcctcccttggacgtcgccgaacttgtcgttcgtgaacttgagaaccacccggacttcaatgcgggtaaaggatctgtcttaactgcacaaggcactgttgaaatggaagcttccattatggacggtaaaaccaaaagatgtggagctgtctccggcttgaccactgttgttaatcccatttctttagctcgcctcgtcatggagaaaactcctcatatatatcttgcattcgatgctgctgaagcttttgcaagagcacatggtgttgagacggtatattctagccatttcataactcctgaaaacattgcaaggctaaagcaggccaaagaattcaatcgagtccagttggattacacagtccctagtccgaaagtaccggacaattgcggtgacagccaaataggaacggtcggatgtgtagctgtggacagtgctggaaatctagcttcggctacatcaacgggcggttatgtcaacaaaatggttggcagaattggggatacgccagtcattggcgcaggaacttacgctaaccacctttgtgccatctcagccacaggtaaaggagaggatatcatccgtggaaccgtggctagagacgtggctgcactcatggaatataaaggcttgtctttgactgaggcagcggcttatgttgttgaccaatctgttcccagaggaagctgtggactcgttgctgtctctgccaatggtgaagtcacaatgccgtttaacactaccggaatgttcagggcttgtgctagcgaagatggttactctgagatcgcaatctggccaaacaattga

SEQ ID NO: 116926 - DNA, 1745 bp, Arabidopsis thaliana
gcccaaaataatctcataaccattaaaaacaaatctcctccttctctccggcgtcgatggaggatctccgtcgtagatttccgactaaaaagaacggagaagaaatctctaatgtcgccgtcgatcctcctcttcgtaaagcctctgacgcgcttcctcttccgttatacctaaccaacacttttttcctctcgctcttcttcgctactgtttattttcttcttagccgatggcgtgagaagatccgtaactcgacgcctcttcacgtcgttgacttatctgagatctgtgctctaatcggtttcgttgcttcgtttatctacctccttggtttctgtggtattgatctcattttccgatcttcttccgatgatgatgtttgggttaacgatgggatgattccatgtaatcaatccctagattgtcgtgaggttcttccgattaaacctaattccgtcgatcctcctcgggaatcggagcttgattcggtggaagatgaagaaatcgttaaattagtgatcgacggaaccatcccttcgtactcattggagacgaaactcggagattgtaaaagagcagcagcgattagaagagaagcggttcagaggataaccggtaaatccttaaccggtcttccattggaaggtttcgattacaattcaattttggggcaatgctgtgagatgccagttgggtatgttcagatcccagtggggattgcaggacctttgttgcttgatggggttgagtattcagtgccaatggctacaacagaaggttgtttggttgctagtaccaatagaggttttaaagctatacacttgtctggtggtgcttttagtgttcttgtgaaagatgccatgactagagctccagttgttagattcccttctgcaagaagagctgctcttgtcatgttttatcttcaagatccttctaatttcgagagattgtctctcattttcaacaaatcgagtagatttgctaggcttcagagtattacatgcacgattgctgggaggaatctgtatccgaggtttgcgtgtagtactggtgatgctatggggatgaacatggtctcaaaaggtgttcagaatgtcttggactttgtaaagagcgagtttcctgacatggatgttattggcatctctgggaactactgttcggacaagaaggcttcggctgtaaactggatcgaaggacgtggtaagcatgttgtatgtgaagcttttattaaggctgagattgtggagaaagtgttgaagactagcgttgaggctcttgtagagcttaacacgctcaagaatcttgttggttcagccatggcgggttctcttggtgggttcaatgctcattcaagcaatattgtcagcgctgtgttcatcgccactggccaagacccagctcaaaacgtggagagctcacactgtatgaccatgattcttcccgatggtgacgaccttcacatctctgtttcaatgccttgcattgaggttggtactgttggaggtgggacacaacttgcatcacaagcagcttgtttgaatctactcggtgtgaaaggatcaaacaacgagaaacctggctcgaacgcacagcaattggcaagaatagtggctggttcggttcttgcaggagagctttcactaatgtctgctattgcagctggacagcttgtgaagagtcacatgaaatacaacagatccagcagagacattggcccttcgtctcaagtcaacaggtga

SEQ ID NO: 116927 - DNA, 840 bp, Arabidopsis thaliana
  unsure (1)..(840): unsure at all n locations
cnnnnnnnnnnnnnnnnnnnnnnnnnnnnnnnnnnnnnnnnnnnnnnnnnnnnnnnnnnnnnnnnnnnnnnnccacgcgtccgcaaacgtcaataaaagcaattaagatctctctttactgttttcccacttttcctttgagaaaactcaaaacaaagtaaacaaacaaaccagaaaaaggaatggcactgagaatgtgggcttcctctacagcaaatgctctcaagctctcttcttctgcctccaaatctcatctcttgccagctttctccatctccagatgcttctcctcagtgttggaaggacttaagtatgcaaattcacatgagtgggtgaaacatgaaggctcagttgctacaattggtatcactgaccatgcgcaggaccatttaggagaagttgtgtttgtggagctgcctgaagcaaacagttcagtgagcaaagaaaaaagctttggagctgttgagagtgttaaggccacaagtgagattctatctccaatctctggtgaagtcattgaggttaacacaaagctcaccgagtcacctggtttgatcaactcaagcccttatgaagatggttggatgataaaggtgaaaccgagcagccccgcggagttggaagctctgatgggtccaaaggaatacaccaagttctgcgaagaagaagacgctgctcactagggtttcttcgccttttatctttcccaaatgttcgaaaaacagagcaaaacaagagaatccatgctttagtttcaatctttcatttctcaaaaaaaaaaaacaagcgcggccgctctagaggatccaagcttacgtacgcgtgcatgcggcgtcatag

SEQ ID NO: 116928 - DNA, 615 bp, Arabidopsis thaliana
  unsure (1)..(615): unsure at all n locations
cacacacacaaataaagcagtgaaacagaatatctttgagatctcctctttatttggagaagacaaaacacagaacaagaattagaaagaagggagagaaagcaaaaatggcactaagaatgtgggcttcttctacagcaaacgctctcaagctttcttcttctgtttccaagtctcatctctctcctttctccttctctagatgcttctccacagttttggagggtttgaagtatgcaaattcacatgagtgggttaaacatgaaggctctgttgccaccattggcatcactgcccatgctcaggaccatttaggtgaagtggtgtttgttgaactgccagaggacaatacttcagtgagcaaagagaaaagctttggagcagtggagagtgtgaaggcaacaagtgggatcttatccccaatcccagggggaatcccttgggggtaacaagaggctcacagaatccccgggcttgatcaacnaagccccatgaagatggtnggtggcaaagtgaaccaagannccccggagttggatccttnnngggccaangntncccaagtntgcnggggaatctcccccagggggtccccgcttatgccagcacaancnc

SEQ ID NO: 116929 - DNA, 709 bp, Arabidopsis thaliana
cggaagcgtccgcccacgcgtccgcccacgcgtccgcaagaattagaaagaagggagagaaagcaaaaatggcactaagaatgtgggcttcttctacagcaaacgctctcaagctttcttcttctgtttccaagtctcatctctctcctttctccttctctagatgcttctccacagttttggagggtttgaagtatgcaaattcacatgagtgggttaaacatgaaggctctgttgccaccattggcatcactgcccatgctcaggaccatttaggtgaagtggtgtttgttgaactgccagaggacaatacttcagtgagcaaagagaaaagctttggagcagtggagagtgtgaaggcaacaagtgagatcttatcaccaatctcaggtgaaatcattgaggttaacaagaagctcacagaatcacctggcttgatcaactcaagcccctatgaagatggttggatgatcaaagtgaaaccaagtagccccgcggagttggaatctttgatgggtccaaaggaatacaccaagttctgcgaggaggaagatgctgctcactaggagggtttctctctgtcttttatgttccaagttctatcaattctcatgcttgttttctaaatttgcatacactcctatgaccaacttcacaaaataagagttaaagaagatgaaacagagacctaacaaacacattaagattt

SEQ ID NO: 116930 - DNA, 586 bp, Arabidopsis thaliana
ctgagaatgtgggcttcctctacagcaaatgctctcaagctctcttcttctgcctccaaatctcatctcttgccagctttctccatctccagatgcttctcctcagtgttggaaggacttaagtatgcaaattcacatgagtgggtgaaacatgaaggctcagttgctacaattggtatcactgaccatgcgcaggaccatttaggagaagttgtgtttgtggagctgcctgaagcaaacagttcagtgagcaaagaaaaaagctttggagctgttgagagtgttaaggccacaagtgagattctatctccaatctctggtgaagtcattgaggttaacacaaagctcaccgagtcacctggtggaagctctgatgggtccaaaggaatacaccaagttctgcgaagaagaagacgctgctcactagggtttcttcgccttttatctttcccaaatgttcgaaaaacagagcaaaacaagagaatccatgctttagtttcaatctttcatttctcaatgtttcttaccactctcaacttgtatcagtgtgatactaatttgattaaaagatcatccaatgagactc

SEQ ID NO: 116931 - DNA, 1051 bp, Arabidopsis thaliana
acgctcaatacaagaatatctacaatctctagaaaatggcgatcacttacttgcttcctctgtttctttctcttatcatcacctcctctgtttcagctaatttccaaagagacgttgagatcacttggggtgatggtcgtggacagatcaagaacaatggagagcttctcactttatctctagataaatcctctggttctggattccaatccaaaaacgagtacttgtttggtaaagtctccatgcaaatgaagcttgtccctggaaactccgcaggaacagtcacaacactttacttgaaatcacctggaacaacatgggacgagatagatttcgagtttttagggaattcaagtggagaaccttacacacttcacacaaatgtctacacacaaggcaaaggagacaaagaacaacaattcaaactctggtttgatccaacagctaatttccacacttacactattctctggaacccacaaagaatcattttcaccgtcgatggaactccgatcagagaattcaagaacatggagtctctaggcactctgtttcccaagaacaaaccaatgagaatgtactcgagtctttggaacgctgatgattgggcaacgagaggtggtttggtcaaaaccgattggtctaaagctcctttcactgcttcttaccgtggctttcaacaagaagcttgtgtttggtcaaacggcaagtcttcttgtcctaatgcctcgaaacaggggactactactggctcgtggttgtcacaagagcttgactcaacagctcaacaaaggatgagatgggtgcagaggaactacatgatctataattattgtacggatgcgaagaggttccctcaaggtcttcctaaagagtgcttagctgcatagagagagtaaagagttgagagaggaacaagattttatttttctttgtggttataaaattctattcattttattgtagatcacgtgaattttattgatttgttttgtagtatactctatagttcgttaaagttataatattctctttgttacaaaaaaaaaaa

SEQ ID NO: 116932 - DNA, 870 bp, Arabidopsis thaliana
cgcgattcgtctaagcttggtgtatgcaatttgattgggtttactggagattgatctgtgacctaatcaatgagtgataacattgctggttcatcgcaattcgtctaaggttttgttactgattgagaaaacatgggaggtgacaatgataatgacaaagacaaagggtttcatgggtatcctcccgctggatacccaccccctggggcttatccacccgctggatacccacaacaaggttaccctccaccacccggtgcttacccgcctgcaggttatcctccgggtgcctacccacctgctcctggtggttatcctcccgcccctggttatggtggttatcctccagctcctggttatggaggttatcctcctgcacctggtcatggtggttaccctcctgctggctatcctgctcatcactcaggacacgcaggaggaattgggggtatgattgcaggtgctgcagctgcctatggagctcaccacgtagctcatagctctcacggtccttacggacatgctgcatatggtcacggttttggccatggtcatggctatggctatggtcatggtcatggtaagttcaagcatgggaagcacgggaagttcaagcatgggaagcatggaatgtttggaggaggcaagttcaagaagtggaagtgatctagttaataccttttgtgaatctgtctggactgaccaatgtttcaaataagccctaaacattatataagttgactttcgtcggttagattgctggttcgagttggaataattgaaacttaattagtatcaaatcttattgtggccctttaaagctatcgttggctttataatgacagattctgggtttcggtgtgttgtttt

SEQ ID NO: 116933 - DNA, 1538 bp, Arabidopsis thaliana
tctttcattgacacttgccagtttacatcgacacacagtggacatcagaatggatttctcagggagattctttgtcatcttcgttaccttcttctttctccctcctctgtcttcagctgggagctacgattctggttcgggtctcgagtcactcgctcgcgggatgcttcattcagccaaggatcctgagttcttcgagtggatgagaggaattaggagaaagattcatgagaacccagagacagggtttcaggagttcaaaacgagtcaactcgttcgagacgagcttgactcgcttggagtgaagtataagtatcctgtggcgaagactggcgtcgtcgcttggatcggatcctgttcgaaacctgttttcggacttagagccgacatggacgcacttccgttacaggaattagtggaatgggaatcgaaaagtaaagtagatggaaagatgcatgcttgtggtcatgatacttatgttgctatgcttcttggtgctgctaagcttcttcaaaccacaaaacacctcatcaaggggacagtaaaacttgtgtttcaaccaggcgaggaaggttatgcaggtgcttatgaaatgctaaaagacgagattctagacgacttagatgggatactcagtgttcatgtctttccatcgatcccatcaggtggtattggttctaggcctgggaccgttcttgcaggtgcaggattgtttacagtcacggttcacggtcaaggtagccacgcagctacaccgcacttctctaaagacccggttcttgcagcttcttccgctgttgttgccttgcaacagattgtttcgcgggaactggatccactcgaagctggtgtggttacagttggatatattgaaggaggtcatgctcaaaacgtaataccgcagagtgcgaaatttggaggtactttcagaagcttaagcaacgatgggcttctatttatccaaagacggatcaaagagatttcagaggcacaagcatcggtataccgatgcaaagcagaagtaaacttcgaagagaaaaagccgtcgcttcacccggtaatgaataacgacgagggcttatacgagcacggtaaaaaagtagcggaagcgatgattggaaagaataacttccatgatttcccggtgacaatgggaggagaggatttcagcttcttcactcaaaagactaaggctgcgattttcgtgctggggataaagaatgagacgctaggcgctggtaagccgcttcactcgccttacttctttgttgatgaagaagctcttcctgttggggctgctcttcacgcagctatggccgtttcttatttggacgaacatggtcatagccatgaagaagaggttaagagtgaattatagaaggtgttgggagaaaatcagcttatattagtcatcatctatttgtatttgaacttgaaagttaggtgaggttaggtttcgggttgggaagaatgtttgttaatagtcacgagaaaccaaccacttctattaaaataaatttgatgtaagagttttaaaa

SEQ ID NO: 116934 - DNA, 913 bp, Arabidopsis thaliana
agaaaaaactacatttctaacatatagaagaaacagagaaaaagagagagagacccctaatggctgagaaagaagaagtgaagcttttggggatatgggcgagcccttttagccgtcgggtcgagatggctctcaaactcaaaggcataccgtacgagtacgtggaagagatactggagaacaaaagccctttgcttcttgctcttaaccctattcacaagaaagtccctgttcttgtccacaatggtaaaaccattctcgagtctcatgtgattcttgaatacatcgatgagacttggccacaaaatccaattctccctcaagatccttatgaaagatccaaagctcgtttctttgctaaactcgtcgatgaacagattatgaacgtggggtttatatcaatggcaagagcagacgagaaaggaagagaagttttagccgagcaggtaagagaactgattatgtatctcgagaaagaacttgtcggaaaagattacttcggaggcaagactgtcggattcttggactttgtcgccggaagtttaattccgttttgtttggagagaggttgggaaggaataggattggaagtgattacagaggagaagtttccagagttcaagagatgggttaggaatttggagaaggttgagattgttaaagattgtgttccaccaagagaggaacatgtagaacacatgaactatatggcagagagagtgagatcttcttaagaaaacaaatcatgtttagttcttgatcatgcaatgtttgtatggttatgttgttgtttattttattgaatatctttgtatgttgtgtggttgagagtgaggttttatcatcatctctcacgttatcttatttggtccactatttagaattaatggtaagcttggctctattttgtccc

SEQ ID NO: 116935 - DNA, 1262 bp, Arabidopsis thaliana
  unsure (1)..(1262): unsure at all n locations
cggaccggcccgggcgggggccggcccccggatttactgagtgaaaaaagcttatcgcggcgattagttcccggcgaagaagaagaagagagataagaaaatggcgactaatggatctgctagctcagcgcagctctctcagaaggaagctgatgtcaggatgatgtgtgccgctgaggttcatcttggaaccaagaattgcaattaccagatggagcgttacgtcttcaagagacgcaacgatggtatttacatcttcaaccttggcaaaacatgggaaaagctccagatggctgctagagttattgttgccattgagaacccacaggacatcatcgtccagtcagctaggccctatggacagagagctgtgttgaagtttgctcagtacactggagccaatgccattgctggaagacacactcctggtaccttcaccaatcagatgcagacatccttcagtgaaccaaggctgttgattcttactgacccaagaactgaccaccagcctatcaaggaaggtgctttgggaaacattccaatcattgctttctgtgacacagactctccaatgagatttgttgacattggtatcccagccaacaacaagggaaagcacagcattgggtgccttttctggcttctggctcgcatggtccttcagatgcgtggaaccattgctgctggacagaagtgggatgtcatggttgacctgttcttttacagggaacctgaggagactaagccagaggatgaagatgaagctggccctcaggcagaatatggtgcacttcctgctccagaatatggaatggtaggtggagaccaatggaccaccgctcagatccctgatgctgcatggccaggagaaggtcaggcaccaatctctgctgcacctgctgctgcttcttggagtgattccgctgctgcaccggcagatggtggatgggaagctgccgcgccaccctcaggggcaccagctgctggttgggagtaaagttgatagcctttactcaatggtttaatggttatagacatgcttttttgttacttttgggattgaagagttatcgaaccgtaactgttttttcttctcacttgtttctcttaagacccttagatgttttgcacctttttgtttgaatcgaatctatattttgcgtttatcaaaaaaaaaaaaaaannnnnnnnnnnnnnnnnnnnnnnnnnnnnnnnnnnnnnnnnnnnnnnnnnnnnnnnnnnnnnnnnnnnnnnnnnnnnnn

SEQ ID NO: 116936 - DNA, 402 bp, Arabidopsis thaliana
  unsure (1)..(402): unsure at all n locations
actgantgaaaaaagcttatcgcggcgattagttcccggcgaagaagaagaagagagataagaaaatggcgactaatggntctcctagctcagcgcantctccccggaaggaagctgatgtcaggatgatgtgtgccgctgaggttcatcttggaaccaagaattgcaattaccagatggagcgttacgtcttcaagagacgcaacgatggtatttacatcttcaaccttggcaaaacatgggaaaagctccagatggctgctagagttatttgttgccatttgaggaccccccagggccttcatcggtccagtcaagctagggcccttttggccagagagccttttgttttagggttttctccggttcacttggggccccattcccctttttttgggangg

SEQ ID NO: 116937 - DNA, 2071 bp, Arabidopsis thaliana
  unsure (1)..(2071): unsure at all n locations
cgcccccccttgggtgccccgggtcagccacgagaataatcccaaaaaccagaaaaaaaggagctttgcttttgtaggaattaatggattcagtgaactccttcaaaggatatggaaaagtagacgaagctcaagatttagcattgaagaaaaagacaagaaaacgtctacttctactatccatctccgtcgtagttctcatcgccgtaataatcgccgccgtagtcgccaccgtcgttcacaagaacaaaaacgagtcaacaccgagtccacctcccgagttaacaccatccacttcactcaaagccatttgcagtgtaactcgtttccctgaatcttgcatttcaagtatctcaaagcttccatcttccaacacaacagatccagagactctattcaagctctcattgaaagtaatcatcgatgagcttgattcgatttccgatttaccggagaagctatcgaaagagactgaagacgaaagaatcaaatctgcgttaagggtttgtggagatctgatcgaagatgctttagatcgactcaacgacactgtttccgccattgatgacgaagaaaagaagaaaactttgtcatcttccaaaatcgaagatctcaaaacttggctaagcgcaacggtaacagatcacgagacgtgtttcgattcgttagatgagttgaaacagaacaaaacagagtatgcgaactcgacgattactcagaatctgaaatcggcaatgagtagatcaacggagttcacaagtaacagtcttgcaatagtatcgaagattctttctgcgttaagcgatttggggattccgatacacaggagaagaagactgatgagtcatcatcatcagcaaagtgtggattttgagaaatgggcacgacggaggttgttgcaaacggcaggtttaaagcctgatgtgacggtggcgggtgatggaaccggtgatgtgttgactgtgaatgaagcggtggctaaggtgccgaagaagagtttgaagatgtttgtgatttatgtgaagagtggaacttatgttgagaatgttgtgatggataagagtaaatggaacgttatgatttacggtgacggcaaagggaagaccattatttccggcagcaagaacttcgtcgacgggactcctacttacgaaacggcgacgtttgctatacaaggcaaaggatttataatgaaggatattggaatcataaacaccgcgggagcagcaaaacaccaagctgtggcattccgatcaggctctgatttctcagtctattaccaatgctcattcgatggttttcaagacactctttaccctcactccaaccgccaattctaccgtgactgcgacgttactgggacaatcgacttcattttcggaagtgctgcggtcgttttccaaggctgcaaaatcatgcctcgccagcctctttctaaccaattcaacaccataaccgctcagggcaaaaaagatccgaaccaaagctcggggatgtcgattcaacgatgcactatctccgcaaacggcaatgtgattgctcccacgtatcttggccggccgtggaaggagttttccacgacggttattatggagacggtgattggagcagtggttcgaccgtccgggtggatgtcatgggtttctggagttgatccaccagcaagtattgtctacggagagtataagaatacgggcccgggttcagatgtaacgcagagagttaaatgggctggatataaaccggttatgtcggacgccgaggctgcgaagtttacagtggctacgcttttacacggagctgattggataccggcaacaggagtgatcaatcagctatcttaatatagtgacaatacaattggattcgtagcttgtttttgaaaacatccggttgtgatctactttatatttgtttgacacttatgcatgatctgtaattttttccaacatagttgtattttgtgtatcccctaaaaaaaaaaaaaaaagnnnnnnnnnnnnnnnnnnnnnnnnnnnnnnnnnnnnnnnnnnnnnnnnnnnnnnnnnnnnnnnnnnnnnnnnntacaatc

SEQ ID NO: 116938 - DNA, 970 bp, Arabidopsis thaliana
  unsure (1)..(970): unsure at all n locations
caaaaacaacaaacaaaataaataaattcaacagcgatatatcttcatctctctctctctcgccagattttcatcgactcgatttcagatttaagatctcagatacaaaactccgacatgtctacgttcagcggcgatgaaacagctcccttcttcggcttcctcggcgctgcagccgcactcgttttctcctgtatgggagctgcttatggaaccgcaaagagtggtgttggtgtggcttctatgggagttatgagacctgagttggtgatgaaatctattgtccctgttgttatggctggagtgttgggtatctatggattgatcattgctgttatcatcagtaccgggattaaccccaaggctaagtcttactacctctttgatggatacgcacatctctcgtctggtcttgcttgtggtcttgctggtctctcagctggaatggccattgggattgttggtgatgccggtgtcagggcaaatgctcagcagcctaagctctttgttgggatgattcttatccttattttcgcagaagcgcttgctctttacgggcttattgtaggaatcattctttcctcacgagctggccagtctagagctgaatgagaatctaaaccacaagactgctcaaaggtacttcctttacttctgtgtgcgttttgttttatcgtgattagtatgatgtatcatcgggaaccaaaaattttactggattcttggaaatttgtttcggaaacaaaaccgcctatcttcattctccttttcttttccggtggttactctccgatgtagaattttattgtttgattctgtaataaagaagctctgaggagtttggtatgtttttgtattcttgtatttgtcctgaggaagttaaatacatttatttgtaaagaagtttgcttttctgataccatttggtgtgaacttnnnnnnnnnnnnnnnnnnnnnnnnnnnnnnnnnn

SEQ ID NO: 116939 - DNA, 1090 bp, Arabidopsis thaliana
  unsure (1)..(1090): unsure at all n locations
tgatttgccggcannnnnnnnnnnnnnnnnnnnnnnnnnnnnnnnnncccacgcgtccgcggacgcgtgggctcaatccttgtatattcaacggagagagatctgcgagagaaagagagatcagattccggtgttccaaggaagcacatattttaagatccagaatcgcctgagagatgtctaccttcagtggcgatgagaccgctcctttcttcggcttccttggcgctgccgctgcgctcgtcttctcatgtatgggagctgcgtacgggacagcaaagagtggtgtgggagtggcatctatgggtgtgatgaggccggagttggtgatgaagtctattgtcccagttgttatggctggtgtgttgggtatctatggtttgattattgctgttatcatcagtaccgggattaaccccaaggctaaatcctactacctcttcgacggatatgctcatctctcttctggtcttgcttgtgggctagctggtctttcagctggaatggccataggtatcgttggcgatgctggtgtcagggccaatgctcaacagccaaagcttttcgttggtatgattcttatcctcattttcgctgaagctcttgctctatacggtctcatcgtcgggatcattttgtcctcccgagctggtcagtccagagccgaatgagaaaagagtgcggttcttgaagtccgcatgattctttcttccccttttcaccggtctcttcatagagccgggatcttcttatattgtttgtcaggttagtagagagacacagtggttttgttccttgtggcatgtcttctcgaaacaaaaaccacacatcatcatcaaaagcgttgttccgttttcacccttctgttatgtttgtaatgagaccgttgcggattcttctgttcccagtaagataactgtgggagaccccctatttatatcgtttatcattttcctaataaaattccagaaaaactcgatttgatcttgtttatgaaacttttttgaataaaaaaaaaaaaaaaaaaaaaaaaagggcggccgctctagaggatccaagcttacgtacgcgtgcatgcgaagtcatagct

SEQ ID NO: 116940 - DNA, 417 bp, Arabidopsis thaliana
atccaattctctctctctccctccagattcaaacgatccgatccaaaactttgagatccgagaagatgtctacgttcagcggcgatgagactgctccgttcttcggcttccttggcgccgccgccgctctcgtcttctcctgtatgggagctgcttatggcacagcaaagagtggtgttggtgtggcttcaatgggagtgatgagacctgagttggttatgaagtctagtgtccctgtggttatggctggtgttttgggtatttatggacttattattgctgttatcattagtaccggcatcaatcctaaggctaagtcttactacctatttgacggatacgctcacctttcgtctggtcttgcttgtggtcttgctggactctcagctggtatggctattggaattgttggtgatg

SEQ ID NO: 116941 - DNA, 1089 bp, Arabidopsis thaliana
atggcaaggtcaccttgttgcgagaagaacggactcaagaaagggccatggacatctgaagaagaccagaagcttgttgactatatccagaaacatggttatggtaactggagaaccctccccaaaaatgccggtacgtgtttgcaaagatgtggcaaaagttgtaggttaaggtggactaattatctccgaccagatataaaacgaggaagattctcttttgaggaagaagaagccattattcagcttcatagcttcttaggaaacaagtggtctgcgattgcggcgcgtttgccaggaagaacagataatgagatcaagaacttttggaacactcatataagaaagaagctacttagaatggggattgatccagtgactcacagtccacgactcgatctcctcgatatctcatccatcttagcttcatctctatacaattcatcttcacatcacatgaacatgtcaagactcatgatggatactaatcgtcgtcatcagcaacaacatccattggttaaccccgagatactcaagcttgcgacctctatattctctcaaaaccaaaaccaaaaccacaaccaaaatcaaaaccaaaaccaaaacctcgtggtggatcatgagaagcaaacagtttatcatcatcatgatgttaaccaaaccggagtaaaccaataccaaaccgaccaatatttcgagaacgcgattactcaagaactccaatcttccatgccaccattccccaatgaagctcatcagtttaacgacatggatcatcacttcaatggttttggagaacaaaatcttgtttcaacttctactacgtcagtccaagattgctataatccgtcattcaacgattattcaagttcaaattttgtcttagatcattcttattcggatcagagcttcaacttcgcaaattcggtcttaaacacgccatcctcgagcccgagcccgactacgttaaactcgagttacatcaatagtagcagttgcagcactgaggatgaaatagaaagctattgcagtaatctcatgaagtttgatattcccgatttcttggacgttaatggttttattatataa

SEQ ID NO: 116942 - DNA, 999 bp, Arabidopsis thaliana
atgggtagaccaccttgttgcgagaagattgaggtgaagaaaggaccatggactcccgaagaagacataatcttggtctcttatatccaacaacacggccctggaaattggagatctgtccctgcaaacaccggtttgctaaggtgtagcaagagttgcagacttagatggactaattaccttcgtcccgggatcaaacgaggaaatttcactcaaccggaagagaagatgatcatccaccttcaagctcttttgggaaataggtgggcagctatagcatcatatctacctcagaggaccgacaatgatatcaagaactactggaacactcatcttaaaaagaaactagtgatgatgaagtttcaaaatggtatcatcaacgaaaacaaaaccaatctggcaacagatatttcgtcttgtaataataacaacaatggatgtaatcacaacaaaaggaccaccaacaaaggccaatgggagaaaaaacttcaaacagacatcaacatggccaaacaagccttattccaagccttgtcacttgaccaaccatcttcattgatccctcccgatcctgactcaccaaaacctcatcatcattctaccaccacttatgcctcaagcacagataacatctctaaattactccagaactggacaagctcatcatcgtcaaagcctaacacttcatcagtctccaacaaccggagctcaagccccggtgaaggaggactttttgatcatcactctttgttctcatcgaattcagaatctggatcagttgatgagaagctgaatttgatgtccgagacaagcatgttcaaaggtgagagcaagccagacatagacatggaagctacacctactactactactactactactgatgatcaaggctcgttgtcattgatcgagaaatggttgtttgatgatcaaggcttggttcagtgtgatgatagtcaagaagatctcatcgacgtgtctttagaggagttaaaataa

SEQ ID NO: 116943 - DNA, 1246 bp, Arabidopsis thaliana
accacgcgtccgcccacgcgtccgcccacgcgtccgatttgatctcaagctcataggaatttgatctccacattatatcttgatcatcaccacaagaaaaacatttcaacttcttttatcagcaatcacaaatcaaagagatgggaagagctccatgctgtgagaagatggggttgaagagaggaccatggacacctgaagaagatcaaatcttggtctcttttatcctcaaccatggacatagtaactggcgagccctccctaagcaagctggtcttttgagatgtggaaaaagctgtagacttaggtggatgaactatttaaagcctgatattaaacgtggcaatttcaccaaagaagaggaagatgctatcatcagcttacaccaaatacttggcaatagatggtcagcgattgcagcaaaactgcctggaagaaccgataacgagatcaagaacgtatggcacactcacttgaagaagagactcgaagattatcaaccagctaaacctaagaccagcaacaaaaagaagggtactaaaccaaaatctgaatccgtaataacgagctcgaacagtactagaagcgaatcggagctagcagattcatcaaacccttctggagaaagcttattttcgacatcgccttcgacaagtgaggtttcttcgatgacactcataagccacgacggctatagcaacgagattaatatggataacaaaccgggagatatcagtactatcgatcaagaatgtgtttctttcgaaacttttggtgcggatatcgatgaaagcttctggaaagagacactgtatagccaagatgaacacaactacgtatcgaatgacctagaagtcgctggtttagttgagatacaacaagagtttcaaaacttgggctccgctaataatgagatgatttttgacagtgagatggaacttctggttcgatgtattggctagaaccggcggggaacaagatctcttagccgggctctagttaacatgtttgaggagtaaagtgaaatggtgcaaattagttaaggctaagaaattcaaaagcttttgtttaccgagaaaaaaacacactctaactcttgatgtgatgtagttagtgtattaattagaggctgcgttttcaaaaaattgaattcatttgtttctccaaaagaaaaaaaaaagggcggcagctctagaggatccaagcttacgtacgcgtgcaggtgacgtcatagatcttctatagt

SEQ ID NO: 116944 - DNA, 613 bp, Arabidopsis thaliana
  unsure (1)..(613): unsure at all n locations
nnnnnnnnnnnnnnnnnnnnnnnnnnnnnnnnnnnnnnnnnnnnnnnnnnnnnnnnnnnnnnnnnnnnnnnnnnnnnnnnnnnccacgcgtccggacacacaagttttattttgttttcttactatatataaatcaccaaaagaaagtaactttatacacacgtctaggtcgcactactattcttttaactacacaatgatcggctctttaattacttttgtattgatgttcttcgttttccttttggtatcatctttagatggtcagcgattgcagcaaaactgcctggaagaaccgataacgagatcaagaacgtatggcacactcacttgaagaagagactcgaagattatcaaccagctaaacctaagaccagcaacaaaaagaagggtactaaaccaaaatctgaatccgtaataacgagctcgaacagtactagaagcgaatcggagctagcagattcatcaaacccttctggagaaagcttattttcgacatcgccttcgacaagtgaggttttttcgatgacactcataagccacgacggctatagcaacgagattaatatggataacaaaccgggagatatcagtactatcgatcaagaatgtg

SEQ ID NO: 116945 - DNA, 1017 bp, Arabidopsis thaliana
gctgggacgcctgcaggtaccggtccggatttcccgggtcgacccacgcgtccgtacggctgcgagaagacagaagagagtcatgggaagatctccttgctgcgagaaagaacacatgaacaaaggtgcttggactaaagaagaagatgagagactagtctcttacatcaagtctcacggtgaaggttgttggcgatctcttcctagagccgctggtctccttcgctgcggtaaaagctgccgtcttcggtggattaactatctccgacctgatctcaaaagaggaaactttacacatgatgaagatgaacttatcatcaagcttcatagcctcctaggcaacaagtggtctttgattgcggcgagattacctggaagaacagataacgagatcaagaactactggaacacacatataaagaggaagcttttgagcaaagggattgatccagccactcatagagggatcaacgaggcaaaaatttctgatttgaagaaaacaaaggaccaaattgtaaaagatgtttcttttgtgacaaagtttgaggaaacagacaagtctggggaccagaagcaaaataagtatattcgaaatgggttagtttgcaaagaagagagagttgttgttgaagaaaaaataggcccagatttgaatcttgagcttaggatcagtccaccatggcaaaaccagagagaaatatctacttgcactgcgtcccgtttttacatggaaaacgacatggagtgtagtagtgaaactgtgaaatgtcaaacagagaatagtagcagcattagctattcttctattgatattagtagtagtaacgttggttatgacttcttgggtttgaagacaagaattttggattttcgaagcttggaaatgaaataaatgaatagtattagattcttaaattgtaggtgtgataatgaatgttcgcttcttagaaaaaaaaaaaaaaaaaaaaaagataaagcggccgctctaaaggatccaagcttacgtacgcgtgcatg

SEQ ID NO: 116946 - DNA, 851 bp, Arabidopsis thaliana
aaaaaatttgatttgcattgcatttgtaacactaccgagtatagggaaagctggtacgcctgcaggtaccggtccggagttcccggctcgacccacgcgtccgattaaaagtgttcttgttgctgtagaacacaaacagaacaaacaaaaaatcaattgaagagtctctcagtcgttaggggaagcaaatagagaaatggctagctttactgcctccgcttccaccgtctccgccgctcgtccggctctccttctcaagcctaccgtcgccatctctgctcctgttcttggtttgcctccaatgggtaagaagaagggaggagtgagatgttcaatggagacaaagcaaggaaacgtctcagtcatgggggctggagtttcagctgcagcaacagctgctttgacggcggtgatgagcaatcccgcgatggctttggttgatgagaggatgtcaacagaaggaacaggattaccctttggtctaagcaacaacctcttgggttggattctgtttggagtctttggtttgatctggactttcttcttcgtctacacttcatctctcgaggaggatgaagaatctggtctttcactctgaaggaagaatcaatctttcgtcttctcatttccattttcatgtgagaacatgaatcaaaagtgttcacccttctagtttcttgtaattgttaagtaaagactaaaaacctattttcatgtgtgttttacttttccccccaaaaaaaaaataaaaaaaaagggccgggcccggtttcttagaggatacccaaagccttacgtttcccccgtgtcatggccaacggccattagcctcttccctattggggggaccc

SEQ ID NO: 116947 - DNA, 769 bp, Arabidopsis thaliana
  unsure (1)..(769): unsure at all n locations
atgatcctnnnnnnnnnnnnnnnnnnnnnnnnnnnnnnnnnnnnnnnnnnnnnnnnnnnnnnnnnnnnnnnnnnnnnnnnnagccacgcgtccggaattcccgggtcgacccacgcgtccgcagaacaaacaaaaaatcaattgaagagtctctcagtcgttaggggaagcaaatagagaaatggctagctttactgcctccgcttccaccgtctccgccgctcgtccggctctccttctcaagcctaccgtcgccatctctgctcctgttcttggtttgcctccaatgggtaagaagaagggaggagtgagatgttcaatggagacaaagcaaggaaacgtctcagtcatgggggctggagtttcagctgcagcaacagctgctttgacggcggtgatgagcaatcccgcgatggctttggttgatgagaggatgtcaacagaaggaacaggattaccctttggtctaagcaacaacctcttgggttggattctgtttggagtctttggtttgatctggactttcttcttcgtctacacttcatctctcgaggaggatgaagaatctggtctttcactctgaaggaagaatcaatctttcgtcttctcatttccattttcatgtgagaacatgaatcaaaagtgttcacccttctagtttcttgtaattgttaagtaaagactaaaaactattttcaaaaaaaaaaaaaaaaaggnnaagggcggccgctctagaggatccaagcttacgtacgcgtgcatctacgtc

SEQ ID NO: 116948 - DNA, 706 bp, Arabidopsis thaliana
  unsure (1)..(706): unsure at all n locations
gaaggaggttacccccccggttcaaccgttcccncgttgcccggntcctttnaaacccnccggcncaattngccccntcctgggtcccccccaatggntaaaanaaggggggntttagatntccaatggggccaanccagggaaccgccccagncatgggggcctggggtttcagctgcagcaacagctgctttggacggcggtgatgagcaatcccgcgatggctttggttgatgagaggatgtcaacagaaggaacaggattaccctttggtctaagcaacaacctcttgggttggattctgtttggagtctttggtttgatctggactttcttcttcgtctacacttcatctctcgaggaggatgaagaatctggtctttcactctgaaggaagaatcaatctttcgtcttctcatttccattttcatgtgagaacatgaatcaaaagtgttcacccttctagtttcttgtaattgttaagtaaagactaaaaactattttcatgtgtgtttactttcccccattctctttatcttgtcataacattgataaggaggagattatgtgattattaaatatcatgcatgacatgttcatcaaaaaaaaaacccaaagaaaaaaaaaaaaagcggccgctctagaggatccaagcttacgtacgcgtgcatgcgacgtcatagtaaatctatagtgtcgtttaaat

SEQ ID NO: 116949 - DNA, 924 bp, Arabidopsis thaliana
  unsure (1)..(924): unsure at all n locations
nnnnnnnnnnnnnnnnnnnnnnnnnnnnnnnnnnnnnnnnnnnnnnnnnnnnnnnnnnnnnnnnnnnnnnnnnnnnccacgcgtccgtacggctgcgagaagacgaagaaggggaagcaaagaaattaaaagtgttcttgttgctgtagaacacaaacagaacaaacaaaaaatcaattgaagagtctctcagtcgttaggggaagcaaatagagaaatgggtgggggtactgcctccgcttccaccggctacgaacgtcgtccggctctccttctcaagcctaccgtcgccatctctgctcctgttcttggtttgcctccaatgggtaagaaggagggaggagtgagatgttcaatggagaccaagcagggaaacgtctcagtcatgggggctggagtttcagctgcagcaacagctgctttgacggcgggaatgagcaatcccccgatggctttggttgatgagaggatgtcaacagaaggaacaggattaccctttggtctaagcaacaacctcttgggttggattctgtttggagtctttggtttgatctggactttcttcttcggctacacttcatctctcgaggaggatgaagatcctggcctttcactctggaggaagaatcaatctttcgtcttctcatttccattttcatgtgagaacatgaatcaaaagggttcacccttctagttcctggtaattgttaagtaaagactaaaaactattttcatgtgtgtttactttcccccattctctttatcttgtcataacattgataaggaggagattatgtgattattaaaaaaaaaaaaaaaaaaaaaaggnnnnnnnnnnnnnnnnnnnnnnnnnnnnnnnnnnnnnnnnnnnnnnnnnnnnnnnnnnnnnnnnnnnnnnnnnnnnnnnnnnnnnnnnnnnnnnnn

SEQ ID NO: 116950 - DNA, 510 bp, Arabidopsis thaliana
gaatgtattaggtacaactatagaagagctatgacgtcgcctgcacgcgtacgtaagctcggaattcggctcgaggagtctctcaggcgggaggggaagcaaatagagaaatggctagctttactgcctccgcttccaccgtctccgccgctcgtccggctctccttctcaagcctaccgtcgccatctctgctcctgttcttggtttgcctccaatgggtaagaagaagggaggagtgagatgttcaatggagacaaagcaaggaaacgtctcagtcatgggggctggagtttcagctgcagcaacagctgctttgacggcggtgatgagcaatcccgcgatggctttggttgatgagaggatgtcaacagaaggaacaggattaccctttggtctaagcaacaacctcttgggttggattctgtttggagtctttggtttgatctggactttcttcttcgtctacacttcatctctcgaggaggatgaagaatctggtctttcactct

SEQ ID NO: 116951 - DNA, 1168 bp, Arabidopsis thaliana
  unsure (1)..(1168): unsure at all n locations
ccctcgcgtccgcccacgcgtccgaccatcttaaagcaactcaaagctcaaatcgaaatttctagtttctctttatcattcacgctaagtgttcaatcgaatcaagattaagtatggcagaagagtacaagaacaccgttccagagcaggagacccctaaggttgcaacagaggaatcatcggcgccagagattaaggagcggggaatgttcgatttcttgaagaaaaaggaggaagttaaacctcaagaaacgacgactctcgcgtctgagtttgagcacaagactcagatctctgaaccagagtcgtttgtggccaagcacgaagaagaggaacataagcctactcttctcgagcagcttcaccagaagcacgaggaggaagaagaaaacaagccaagtctcctcgacaaactccaccgatccaacagctcttcttcctcttcgagtgatgaagaaggtgaagacggtgagaagaagaagaaggagaaaaagaagaagattgttgaaggagatcatgtgaaaacagtggaagaagagaatcaaggagtaatggacaggattaaggagaagtttccactcggagagaaaccagggggtgatgatgtaccagtcgtcaccaccatgccagcaccacattcggtagaggatcacaaaccagaggaagaagagaagaaagggtttatggataagatcaaggagaagcttccaggccacagcaagaaaccagaggattcacaagtcgtcaacaccacaccgctggttgaaacagcaacaccgattgctgacatcccggaggagaagaagggatttatggacaagatcaaagagaagcttccaggttatcacgccaagaccactggagaggaagagaagaaagaaaaagtgtctgattaagagaaaaatatgataagagtgaataataatgatgtgggagtgggacttatgttgttttttgttttttgttgatcattgtctcttttattttgtctttctagctgttctccaagtttgtgtttagagttagatcatttgtgtctaaaatctataaaattattttatctatggggaaacacttgtttactcaatggagcttcaatggatccgttctcatgnnnnnnnnnnnnnnnnnnnnnnnnnnnnnnnnnnnnnnnnnnnnnnnnnnnnnn

SEQ ID NO: 116952 - DNA, 869 bp, Arabidopsis thaliana
  unsure (1)..(869): unsure at all n locations
ttaggtgccactatagaagagtctatgacgtcgcatgcacgcgtacgtaagctcggaattcggctcgaggattaagtatggcagaagagtacaagaacaccgttccagagcaggagacccctaaggttgcaacagaggaatcatcggcgccagagattaaggagcggggaatgttcgatttcttgaagaaaaaggaggaagttaaacctcaagaaacgacgactctcgcgtctgagtttgagcacaagactcagatctctgaaccagagtcgtttgtggccaagcacgaagaagaggaacataagcctactcttctcgagcagcttcaccagaagcacgaggaggaagaagaaaacaagccaagtctcctcgacaaactccaccgatccaacagctcttcttcctcttcgagtgatgaagaaggtgaagacggtgagaagaagaagaaggagaaaaagaagaagattgttgaaggagatcatgtgaaaacagtggaagaagagaatcaaggagtaatggacaggattaaggagaagtttccactcggagagaaaccagggggtgatgatgtaccantcgtcaccaccatgccagcaccacattcggtagaggatcacaaaccagaggaagaagagaagaaagggtttatggataagatcaaggagaagcttccaggccacagcaagaaaccagaggattcacaagtcgtcaacaccacaccgctggttgaaacagcaacaccgattnctgacatnccggaggagaaggaaggggttttnttgncaagatcaaagnngaagnttttcccggtttttacggccaggcccccttttnggggntggggangaaggnaaaantttntttttttt

SEQ ID NO: 116953 - DNA, 992 bp, Arabidopsis thaliana
tccattttagctttaaatcacaaaaaaaagagataaatttctcaaaagaaattataagtagacaccgccctttttataaacaaccctaaaagtagtaaaaataatatcgagacgagacgggtttgtttcttctctctatctctatatctaccaaaatcctttgccccccgaatctagttctctcgatcgaccctgtgacgatggctaataaccaagcaagccttcttctgcagaaacagcttaaagatctgtgtaagaaacctgttgatggtttctctgctggcctcgttgatgagaagaacgttttccaatggagcgtctctattatgggtcctcctgatactttgtatgaaggtggcttttttaatgcaattatgtcgtttccggagaattatccagtttcaccaccaactgtgacgtttacctcggagatgtggcatcctaatgtttattctgatggaaaagtttgcatttctattcttcatcctcctggtgatgatcctcatggatacgagcttgcctctgaacgttggacccctgtccatacggtagaaagcattgtgttgagtatcatatcgatgctctcaggtcccaacgatgagtcaccagcgaatgtggaagctgcaaaggaatggagagacaacagagcagagtttaggaagaaagtgagtcgctgtgtgagaagatcgcaagagatgctatgaacatctctccagcgtttttttcgtgttgtagaaatatcgattctaatcttcttatgagaaagcctaagcagaaccaaccatcttcaagcagcagccagatgaatctgactttgcaaaagcttctctttctttttcctttttgggttttgttctctaaggtttggtttggaatattggtgtggaatcaaatccgctccatattttaggattatattattgcactcgttaatggattcgtttgatctggctttttaactttattctggttttgggttaaaaaaaaaaaaa

SEQ ID NO: 116954 - DNA, 2323 bp, Arabidopsis thaliana
  unsure (1)..(2323): unsure at all n locations
aacagatcgagtttctctttccctcctcgaaatttcctaaatccacacatcacgaagccgaagcagccatgagtaatcttcactgatctctctacacattcaccgtcggcttctcaaatgcaggatattctcggatcggttcgccgatccttggttttccggtcgtctttggccggagacgatggtactagcggcggaggtcttagcggattcgtcgggaagattaactctagtatccgtagctctcgaattgggctcttttctaagccgcctccagggcttcctgctcctagaaaagaagaagcgccgtcgattcggtggaggaaaggggaattaatcggttgcggtgcttttggaagagtttacatgggaatgaacctcgattccggcgagcttcttgcaattaaacaggttttaatcgctccaagcagtgcttcaaaggagaagactcagggtcacatccgagagcttgaggaagaagtacaacttcttaagaatctttcacatccgaacatcgttagatacttgggtactgtaagagagagtgattcgttgaatattttgatggagtttgttcctggtggatcaatatcatctttgttggagaagtttggatcttttcctgagcctgtgattattatgtacacaaagcaacttctgcttgggctggaatatcttcacaacaatgggatcatgcatcgagatattaagggggcaaatattttggtcgataacaaaggttgcatcagactcgcagattttggtgcttccaagaaagttgtagagctagctactgtaaatggtgccaaatctatgaaggggacgccttattggatggctcctgaagtcattctccagactggtcatagcttctctgctgatatatggagtgttgggtgcactgtgattgagatggctacggggaagcctccctggagcgagcagtatcagcagtttgctgctgtccttcatattggtagaacaaaagctcatcctccaattccagaagacctctcaccagaggctaaagactttctaatgaaatgcttacacaaagaaccaagcttgagactctctgcaaccgaattgcttcagcacccgtttgtcactggaaagcgccaggaaccttatccagcttaccgtaattctcttacggaatgtggaaacccaataactactcaaggaatgaatgttcggagttcaataaattcgttgatcaggaggtcgacatgttcaggcttgaaggatgtctgtgaactgggaagcttgaggagttccattatatacccacagaagtcaaataactcaggatttggttggcgagatggagactctgatgacctttgtcagaccgatatggatgatctctgcaacattgaatcagtcagaaacaatgttttgtcacagtccaccgatttaaacaagagttttaatcccatgtgtgattccacggataactggtcttgcaagtttgatgaaagcccaaaagtgatgaaaagcaaatctaacctgctttcttaccaagcttctcaactccaaactggagttccatgtgatgaggaaaccagcttaacatttgctggtggctcttccgttgcagaggatgattataaaggcacagagttgaaaataaaatcatttttggatgagaaggctcaggatttgaaaaggttgcagacccctctgcttgaagaattccacaatgctatgaatccaggaataccccaaggtgcacttggagacaccaatatctacaatttaccaaacttaccaagtataagcaagacacctaaacgacttccgagtagacgactctcagcaatcagtgatgctatgcccagcccactcaaaagctccaaacgtacactgaacacaagcagagtgatgcagtcaggaactgaaccaactcaagtcaacgagtcgaccaagaagggagtaaataatagccgttgtttctcagagatacgtcggaagtgggaagaagaactctatgaagagcttgagaggcatcgagagaatctgcgacacgctggtgcaggagggaagactccattatcaggccacaaaggatagtgaacggctaaagagaaactgtatgtttctttcttatgtttcaaaattacttcttcgtatttttttttgttggtggggtaatttcatgagctagtatgatatatgtagatagttcttcaacggttacatagtattattatttattattaatttaattgccaaaaaaaaaaaaaagnnnnnnnnnnnnnnnnnnnnnnnnnnnnnnnnnnnnnnnnnnnnnnnnnnnnnnnnnnnnnnnnnnnnnnnnnna

SEQ ID NO: 116955 - DNA, 2743 bp, Arabidopsis thaliana
  unsure (1)..(2743): unsure at all n locations
nnnnnnnnnnnnnnnnnnnnnnnnnnnnnnnnnnnnnnnnnnnnnnnnnnnnnnnnnnnnnnnnnnactttctcctatctctctctctctcattaaaaacgtgtttttttttaccggtcaccggtttatggaatgactgattaccggctacaaccaacgatgaatctttggaccaccgacgacaacgcttctatgatggaagctttcatgagctcttccgatatctcaactttatggcctccggcgtcgacgacaaccacgacggcgacgactgaaacaactccgacgccggcgatggagattccggcacaggcgggatttaatcaagagactcttcagcaacgtttacaagctttgattgaaggaacacacgaaggttggacctacgctatattctggcaaccgtcgtatgatttctccggcgcctccgtgctcggatggggagatggttattacaaaggtgaagaagataaagcaaacccgagacggagatcgagttcgccgccgttttctactccggcggatcaggagtacaggaaaaaagtgttgagagagcttaactcgttgatctccggtggtgttgctccgtcggatgacgctgttgatgaggaggtgacggatacggaatggtttttcttggtttcgatgacgcagagcttcgcttgcggtgcgggattagctggtaaagcgtttgcaacgggtaacgcggtttgggtttccgggtcagatcaattatccgggtcgggttgtgaacgggctaagcaaggaggagtgtttgggatgcatactattgcgtgtattccttcggcgaacggagttgtggaagtcgggtcaacggagccgatccgacagagttcggaccttattaacaaggttcgaattcttttcaatttcgacggcggagctggagatttatcgggtcttaattggaatcttgacccggatcaaggtgagaacgacccgtctatgtggattaatgacccgattggaacacctggatctaacgaaccgggtaacggagctccaagttctagctcccagcttttttcaaagtctattcagtttgagaacggtagctcaagcacaataaccgaaaacccgaatctggatccgactccgagtccggttcattctcagacccagaatccgaaattcaataacactttctcccgagaacttaatttttcgacgtcaagttctactttagtgaaaccaagatccggcgagatattaaacttcggcgatgaaggtaaacgaagctccggaaacccggatccaagttcttattcgggtcaaacacaattcgaaaacaaaagaaagaggtcgatggttttgaacgaagataaagttctatcattcggagataaaaccgccggagaatcagatcactccgatctagaagcttccgtcgtgaaagaagtagcagtagagaaacgtccaaagaaacgaggaagaaagccagcaaacggtagagaagagccactaaaccacgtcgaagcagagagacaaagacgcgagaaactaaaccaaagattctacgcgttacgagcggttgtaccaaacgtttcaaaaatggataaagcttcgttactcggtgacgcaatcgcttacatcaacgagcttaaatccaaagtagtcaaaacagagtcagagaaactccaaatcaagaaccagctcgaggaagtgaaactcgagctcgccggaagaaaagcgagtgctagtggaggagatatgtcgtcttcgtgttcttcgattaaaccggtggggatggagattgaagtgaagataattggttgggacgcaatgattagagttgaatctagtaagaggaatcatccggcggcgaggttgatgtcggcgttgatggatttggagttggaagtgaatcacgcgagtatgtcggtggttaacgatttgatgattcaacaagcgacggtgaagatgggttttaggatctatacgcaagaacagctcagagcaagtttgatttcaaaaatcggttaaaagggtgtgttttgggaagtttagaaagttatggggtcaaatcataattaattcgttttagtggcttcagtaattttgtagattttagttttgtaagaaaaaaatcttaaaatagagcgacaagtttcttcttttgctctatgtttgagtctgtatcgttttattgttgtatctcctcaatgagtaaacttgtatatattgatatgagcccgggggaaaaggaatcagtttttggtggaagtaattgatccgatctaggaaaaatgggaggaggtgatcatggacatggagcagaaggaggcgatttcagagccaaagtctggagtatgactggtgggccctaactgtaggcccaaacattggcgtcggaacaccgccattgctatgttcggccgttttccttgtgtgcatccccatcgccaagctatctgctaagcttgagcaaaggccacacatgccagtacgcccaattccttcacagatctggtgcaagaactttggaaccaaggacgattacgaaaaagagcattaaaagtttttttcttggtttggagagaaccctttaattggtcttcttatttgcagacaatgtgagcataaaaaaagcgcaactagctttgtctatggatttcagagtactgtgaacataataatatgtctttttccttgccatgtagaacaacaccatggaatctttccaaattaagaaatttcatgtttttttccatattaaaaaaaa

SEQ ID NO: 116956 - DNA, 534 bp, Arabidopsis thaliana
  unsure (1)..(534): unsure at all n locations
tcgactcactatanggaaagctggcacgcctgcaggtaccggtccggaattcccgggtcgacccacgcgtgcgcggcgtttcactcgcaagactgactcgaaaacaccatcccagcctctggtatcccgtcgctctgcaaactatcaaccgtctctttggcagcacgaatatctcctctcgctcggtaatacatatgtgaaagaggacaacgtcgagagagttacgttattgaagcaggaagtgagtaaaatgctcaatgaaacggaaggtttactcgaacagctagagctcatcgacactttacaaaggcttggagtttcttaccattttgaacaagaaatcaagaagacactaacgaatgtgcatgttaaaaatgtgcgagcacacaaaaaccggatagatcgaaaccgatggggagatttatacgcgaccgcccttgagttccgactcctaaggcaacatggtttcagtatcgcacaagatgtttttgacggaaatattggagttgatttggatgataaagacatcaaggg

SEQ ID NO: 116957 - DNA, 648 bp, Arabidopsis thaliana
  unsure (1)..(648): unsure at all n locations
accncccangaannaaccccagcccnccgaaaaaaaccaanccnagnnaggaaanatgccgcccccnngccctcgattaaacccggtgggatggaaaattgaaantnagatnaattggttgggccccaaatgattagagttgaacctagtaagaggaatcatccggcggcgaggttgatgtcggcgttgatggatttggagttggaagtgaatcacgcgagtatgtcggtggttaacgatttgatgattcaacaagcgacggtgaagatgggttttaggatctatacgcaagaacagctcagagcaagtttgatttcaaaaatcggttaaaagggtgtgttttgggaagtttagaaagttatggggtcaaatcataattaattcgttttagtggcttcagtaattttgtagattttagttttgtaagaaaaaaatcttaaaatagagcgacaagtttcttcttttgctctatgtttgagtctgtatcgttttattgttgtatctcctcaatgagtaaacttgtatatattgatatgagtaatatgagttagttactgaaaaaaaaaaaaaaaaaaaaagggcggccgctctagaggatccaagcttacgtacgcgtgcatgcgacgtcaagactcttctatagtggtc

SEQ ID NO: 116958 - DNA, 608 bp, Arabidopsis thaliana
  unsure (1)..(608): unsure at all n locations
tgattctgccccnnnnnnnnnnnnnnnnnnnnnnnnnnnnnnnnnnnnnnnnnnnnnnnnnnnnnnnnnnnnnnnnnnnnnnccacgcgtccgtttcactaaggaaaaggaatcagtttttggtggaagtaattgatccgatctaggaaaaatgggaggaggtgatcatggacatggagcagaaggaggcgatttcagagccaaagtctggggtatgactggtgggcctaactgtaggcccaaacattggcgtcggaacaccgccattgctatgttcggcgttttccttgtgtgcatccccatcgccaagctatctgctaagcttgagcaaagcccacacttgccagtacgcccaattccttcacagatctggtgcaagaactttgggaaccagggccgattaccaaaaagagcattaaaagtttttttctgggtttggagagaacccttttatgggtcttcttttttgcagacaatgggagcctaaaaaaagcccttctaccttggtctatggatttcagagtcctgtgaacataataatatgtctttttccttgccttgtagaacaacaccctggaatctttccaaattaagaaatttcatgtttt

SEQ ID NO: 116959 - DNA, 967 bp, Arabidopsis thaliana
  unsure (1)..(967): unsure at all n locations
attttgtgagaaaagaatcttcttttgcaaatgcttcgctcctcaattcgacttctctatataagaagaaccagtcctctgcttcgaagtttatcatcatcatcatcatcatcatcatcatcatcatcaaaacgattcgattctgcgaaaccacttttcaattctcatcggattatttctcttccaatttctacaacgggagctaaactatctagatcggagcattcaatggctgcttcttccgaacccaaatctctttacgatttcaccgtcaaggatgctaagggaaacgatgttgatctaagcatctacaaagggaaggttcttttgattgtgaacgttgcttctcaatgtggcttgactaattcgaattatactgagcttgcgcagctgtatgagaagtacaaaggccatggtttcgagattcttgcgtttccgtgtaaccagtttgggaatcaagagcctggtactaatgaagagattgttcagtttgcttgtactcgtttcaaggctgagtacccgattttcgacaaggttgatgttaacggtgacaaagctgccccagtctacaagtttctgaaatcaagcaaaggcgggctctttggagacggcattaagtggaacttcgcaaagttcttggttgacaaagatggaaatgttgtcgatcgtttcgcaccaactacctcacctctcagcattgagaaggatgtgaagaagttgttgggagttactgcttaagcaaggcaagattgcataattagacaaataaaagctcattagtattgtattaccaatactgtgtagtaagctgagttcgtgagtgtgtgcctttgggaccgcgtacaattataatccgttttttagcggccaaactatgtaataatcgtagatctaaatatcagatttcccgttaccttacaaaaannnnnnnnnnnnnnnnnnnnnnnnnnnnnnnnnnnnnnnnnna

SEQ ID NO: 116960 - DNA, 1529 bp, Arabidopsis thaliana
gaatcggcggccgcggatccaacctcgccggcgacggaaaatggctttcgcgtctccttcgctccgtcttcttcctcagtctccgttaggtcgaataacatctaaactacaccgtttcagtactgcgaaactctcactcttctcctttcaccatgattcttcatcttctttggctgtcagaactccggtatcttccttcgtcgtcggcgctatctccggaaaatcctctaccggaacgaaatcgaaatccaaaaccaaacggaaaccacctcctcctccgccagtcactactgtggctgaagagcaacacattgctgagtcagagacagtcaacattgccgaagatgtcactcaattgattggaagcacaccaatggtctatctcaatagagtcacagatggttgtttggctgacattgctgccaagctcgaatcaatggagccctgtagaagcgtcaaagataggatcggtctgagcatgatcaacgaggcagaaaacagcggagctataactccgaggaagactgtattagtagaaccaacaaccggaaacactggccttgggattgcatttgtggctgcagctaaaggctacaagcttatagtgacaatgccagcttctatcaatattgaaaggaggatgcttttacgtgcactaggagcagagattgtgctaacgaatccagagaagggtctcaaaggagcagtggataaagccaaagagattgttctcaagacaaagaacgcatatatgtttcagcaattcgacaatacagcaaatacaaagatccactttgaaactacaggaccagaaatctgggaagatacaatgggtaatgtcgatatattcgttgccggaataggaactggtggtactgtaactggtactggaggtttcttgaaaatgatgaacaaggatattaaggtagttggcgttgaaccatcagaaagaagtgtgatttctggagacaaccctggttacttaccgggaatcttggatgttaaattacttgatgaagtgtttaaggttagcaacggggaagcgattgagatggcgaggagactagctttagaggaaggattgctggttgggatttcatctggagctgctgcagtagcagcagtcagcttggctaaaagagcagagaatgccggtaaactaatcacggttctgtttccaagccatggcgagcggtatatcacaacggctctgtttagttccatcaacagagaagtccaagagatgagatattagtagcagccattagaaaagcccccaaagtttggtccttttggagagtgtaaacaacaaatctctttgcaatacagaaaagagaggtttcagaagactgtgaggttagagctcacacgagaactgagagataaacatgtctcgagcccaaccagttttattcaaagatttgtgaatgtatagaagatcatagaccttgttgcattattcttcttcttctcactcatatgtcagggaagtatgctgaacaaataaaagtttgatcatctaaaccctg

SEQ ID NO: 116961 - DNA, 2406 bp, Arabidopsis thaliana
ctttgaatgctcaatcaaagcttcttcatagttaaacttccacacaacgtcaaaactcgagaagaagatgaaagagagagattcagagagttttgaatctctctcacatcaagttctcccaaacacttcaaattcaacacacatgatccagatggccatggccaactcaggttcatctgcagccgcacaagccggtcaagaccagcctgaccggtcaaagtggctgcttgactgtcctgaaccacctagcccgtggcatgagctcaaaagacaagtcaaaggctctttcctaaccaaagccaaaaagttcaagtcacttcaaaaacagcctttcccaaaacaaatcctctctgtcctccaagccattttcccaatcttcggttggtgcagaaactataaactcaccatgttcaagaacgatctcatggctggtttaaccctcgctagcctctgcattccgcagagcattggttatgcaactcttgcaaagcttgatcctcaatatggcctatatacgagtgtggtaccaccattgatatatgcattgatggggacatcaagagagatagcaatcggaccggtggctgtagtatctcttcttatatcttcaatgttgcagaaactcatcgatccagaaacagatcccttgggatacaagaaactggtcctaaccacaaccttcttcgccgggatcttccaagcttctttcggtttattcaggttagggtttctggtggattttctgtcgcacgcagccatagttgggttcatgggtggtgcagccattgtaattggactccaacagcttaaaggtttgcttggtatcactaacttcaccaccaacactgacattgtctctgttcttcgagctgtctggagatcttgtcaacaacaatggagccctcacactttcatcctcggatgttctttcctcagttttatccttattactcgcttcatcgggaagaagtataagaagctgttttggctaccggcaatagctccgttgatcgccgtggtagtgtcaacactaatggtgtttctgactaaagccgacgagcatggtgtgaagacagtgaggcacatcaaaggaggtcttaatccaatgtccattcaggatctcgactttaatactcctcatctcggacaaatcgctaaaatcggattaatcattgccattgttgctctaaccgaggcgattgcggtggggaggtcgttcgccggaataaaagggtacagactcgatggaaacaaagaaatggtggccattggatttatgaatgtcctcggttccttcacatcttgttacgctgctactggttcattctctcggacggccgttaattttgcggcaggatgtgagacagcaatgtccaacattgttatggcggttacggtgtttgtagcactcgagtgtctaacgaggcttctctactatactccaatcgccatcctcgcttcaataattctctcagcacttccgggactaatcaacattaacgaggctattcacatttggaaagtcgataaattcgattttcttgctctcattggagctttctttggtgttttgttcgcttccgttgagatcggacttcttgtcgcggtggttatttcgtttgccaagatcatactcatatcaattcgtccagggatagaaacgcttggaagaatgcccgggaccgatacttttacagatactaatcaatatcctatgacggttaagactcccggagtgttgattttccgtgtcaagtctgcattgttgtgctttgccaatgccagttcaattgaggaaaggattatgggatgggtcgatgaggaagaagaagaagaaaacacaaagagcaatgccaagagaaagatcctctttgtagtccttgatatgtcaagtttgatcaacgtcgatacatcggggattactgctttgctggaactgcataacaaattaatcaaaactggtgttgagctagtgatcgttaacccgaaatggcaagtaatccacaagctgaatcaagcaaagttcgtcgacagaatcggtggcaaagtttacttgacgatcggcgaagctcttgatgcttgctttggattaaaagtttaagaaacagttttcaaaggaccagttgtgttacgggttattgcatgtgatgaatttatgtgagttgttgtgatttaaataatgtgatgcgtgcatgatcatgattaatatttaagtacgtatgtgtaatagagtgcttggtcgtgactgaataaagtcatgcaaactataatgtgaggatcgatatgggtgtgtttgtaactcgatagatttggaaataatgtataatatatgtaagtttgagaattattggtgttttgtatgattgttgaaatgttatatagaatcagggatatattttttggggc

SEQ ID NO: 116962 - DNA, 1887 bp, Arabidopsis thaliana
cgaatttctcaaaagaaacttctatagaaatctcaaacatattcatgcaacgattctgcgtctgttcaccttcaagttatcgtctcaatcccataacatcaatggctactggatccggttcactgatttggttccggaaaggtctccgggttcacgacaacccggctcttgaatacgcctcaaaaggttctgaatttatgtatccggtttttgttatcgacccgcattatatggagtcagacccatctgcgttctctcccggttcgtctcgcgccggggtaaaccggatccggttcttgcttgagagtctcaaggatctcgattctagcctgaagaaacttggttcacggttgcttgtttttaaaggtgaacctggcgaagtactagttcgttgcttgcaagagtggaaggtgaagaggctttgctttgaatatgatacagatccgtattatcaagctttagatgttaaggttaaggattatgcttcttcaactggagttgaggttttctctccagtgagccatactctgttcaatcccgcacacattatagagaaaaacggtgggaagccacctttgagttatcaatcatttctgaaggttgctggggagccctcatgtgctaaatctgaacttgtgatgtcttattcctcacttcctccaattggagatattggaaaccttggcatttcagaagtaccatctcttgaggaacttggctacaaagatgatgaacaagctgattggactccttttagaggtggtgaatcagaagccttaaaaagattgactaaatcaatcagtgataaggcatgggtggcaaactttgagaaaccaaagggtgatccatctgccttcttgaagcctgctactacagttatgtcaccatatttgaaattcggatgcctttcttcgaggtacttttatcaatgccttcaaaatatttataaggatgttaaaaagcatacatcgccgccagtttctctcctggggcagttgttgtggcgagaatttttctataccactgcatttggaactcctaactttgacaaaatgaagggaaaccggatctgcaaacagattccatggaacgaggatcatgctatgttggctgcttggagggacggtaagacaggatacccttggattgatgccatcatggttcagcttctgaaatggggttggatgcaccatctagcgcgtcactgtgtagcctgttttcttactcgtggggatctgttcatacattgggaacaagggcgtgatgtgtttgagagacttctgatcgattcagactgggcaatcaacaatggaaattggatgtggttatcatgttcgtcgttcttttaccagttcaaccgcatctactctcctatatctttcggaaagaagtatgatcctgatgggaagtacattaggcattttctaccggtactgaaagatatgccaaagcagtatatatatgagccatggacagcaccattgagcgttcaaactaaagcaaactgcatagtcgggaaggactacccaaagccgatggtattgcacgattcagcaagcaaggagtgcaagaggaagatgggtgaagcatatgcattgaacaagaagatggatggtaaagtagatgaagaaaatttgagggatttgaggagaaagcttcagaaagatgaacatgaagagtccaaaatcaggaaccaacgaccaaaactcaaataggtagaggattaaaaaccttttctgaaattgatgaagtgtgtattgttacaataattctagctggtatgacttaatcatggttacatttctatttctatgtaaaaaaatctgttatgcatcaatgtgtcatgtaacacttctcttgaggcaaatataaattatttgaattact

SEQ ID NO: 116963 - DNA, 2089 bp, Arabidopsis thaliana
  unsure (1)..(2089): unsure at all n locations
aatccaaatgagactttattagcttttgatcaatctcattaatccaaattaaatagttaaactagaagatgagcagcaaaagggcatcacaatatcaccaagtagaaatccctccaccacaacctttcttgaaatcactaaagaacactctcaatgagatccttttcgccgacgatccgttccgtagaatcaggaacgaatcgaaaacgtcgaaaaagatcgagttagggttgagacacgtgttccctatcttggaatgggctcgtggttacagtttggagtatttgaaatcagatgttatctcagggataacaattgcaagtcttgctattcctcaagggattagctatgctcagctcgctaatctccctccaatccttggtctttactcgagcttggtgccgccgttggtatacgcgatcatgggaagttcaagagatttagcggtgggaacagtggcggtggcctcgctgttgacggctgcgatgttggggaaagaggtaaacgcagtggtgaatccaaagctttaccttcacttagctttcaccgccactttcttcgccggactcatgcaaacctgccttggcctcttacggttagggttcgtggtggagatattgtcgcacgcggcgattgtagggttcatgggaggagccgcaacagtggtgtgtctgcagcaactgaaaggattacttggcctccatcatttcactcattccaccgatatcgtcactgttctccgctccattttttctcaatctcatatgtggagatgggaaagtggagtgctagggtgttgcttcctaatcttccttcttacaactaaatacattagcaagaagagaccaaagctgttctggatatctgcaatgtctccacttgtttctgtcatttttggaaccattttcctttacttcctccatgaccaattccatggtatccaatttatcggagaactaaagaaagggataaatccaccgtcaatcacacatttggttttcacgccaccttatgtcatgttggctctcaaagttggcattatcactggagtcatagctctcgctgaaggtatagcagtggggagaagctttgcaatgtacaagaattacaatatagatgggaacaaagagatgatagcctttgggatgatgaacattcttggttccttctcctcttgctatctcactaccgggccattttcacgttcggcggtgaactacaacgcgggttgcaaaacggcgttatcaaacgtggtgatggcggttgcagtggcggtgacgttactgttcttaacgccgttattcttctacacgccattagtagttctgtcgtcgatcataatcgctgccatgctaggcctagtcgactacgaagcagccattcatctttggaaactcgacaagttcgatttcttcgtttgtctctctgcttacttgggcgttgtttttggtaccatcgaaattggtctcatcctctccgtgggaatatcagtgatgaggttagtgttgttcgtgggaagaccaaagatttatgtaatgggaaacattcaaaactcagaaatatataggaacattgagcattaccctcaagccatcactcgctcttctcttctcattctccacatcgatggtcctatttacttcgccaactctacctacttgcgagacagaattggaaggtggatcgatgaagaggaagataaattgagaactagcggagatatcagtctacaatatattgtactcgacatgagtgctgtggggaacatcgacacgagcggtataagcatgcttgaggaactcaacaaaatcctgggacgtagagagcttaagctagtgatagcgaacccgggagcagaggtgatgaagaagctaagcaagtccaccttcattgagagcattggtaaagaacggatttatctcacggtggcagaagccgtcgcagcttgcgatttcatgctccacacggctaaacccgactcgccggtaccggaatttaacaacgtttaagatttcatattgaaaatttcacatttctaaaaagttttattgtcattaagaaataagaagttgaaaanacgcggccggcg

SEQ ID NO: 116964 - DNA, 2400 bp, Arabidopsis thaliana
  unsure (1)..(2400): unsure at all n locations
ccnnnnntcctcttcttcgtcttcatcatccgcgcatcaccagttttttctctctctctacaaatcttcttaacggcctttcatcaatggtcagcagacttagctttcgaatataggctaagaacgagcatgtcttcttgtcttcttcctcagttcaagtgcccacctgattctttctctattcacttccgaacctctttctgtgcccctaaacacaacaagggttcagtcttcttccaaccgcaatgtgcagtatccacttcaccggcgttattaacttctatgcttgatgtcgcaaagcttagactaccctctttcgatactgattcggattcccttatatcagacaggcagtggacttatacaaggcccgatggtccttccactgaggcgaagtatttagaagctttagcctctgagacacttctcacaagcgatgaagcagtagttgtagcagcagcagctgaagcagtcgcccttgcaagagctgctgtcaaagttgccaaagatgcaacattatttaagaacagtaacaacacgaacctattaacttcgtcaacggccgacaaacgctccaagtgggaccagtttactgagaaggaacgtgctggcatattggggcatctagcggtttcggacaatggaattgtgagtgataaaatcactgcatctgcctctaacaaagagtctattggtgatttagaatcagaaaaacaagaagaagttgagcttctggaggagcaaccttcagtgagtttagctgtgagatctacacgtcaaactgaaaggaaagctcggagggcaaaagggttagagaaaactgcatcaggtattccgtctgtgaagactggttcgagccctaaaaagaaacgtcttgttgcgcaggaagttgatcataatgatcctttgcgttatctaagaatgacaacaagcagttccaagcttctcactgtcagagaagaacatgagctgtcggcaggaatacaggaccttctgaagttagaaagacttcaaacagagcttacagagcgtagtggacgtcagccaacctttgcgcagtgggcttctgctgctggagtcgatcagaaatcattaaggcaacgtatacatcatggcacactatgcaaagacaaaatgatcaaaagcaacattcgactcgttatttcgattgcaaagaattatcaaggagctgggatgaacctccaagatcttgtccaggaagggtgcagagggcttgtgaggggagcagagaagtttgatgctacaaagggttttaaattttcgacttacgcgcattggtggatcaagcaagctgtgcggaagtctctctctgatcagtccagaatgataagattgccttttcacatggtggaagcaacatatagggtgaaagaggcacgaaagcaactgtacagtgaaaccggtaagcacccaaagaacgaagaaattgcagaggcaacagggctgtcgatgaagagactcatggcggttctactctctcctaaacctccgaggtcgctagaccagaaaatcggaatgaatcaaaacctcaaaccttcggaagtgatagcagatccagaagcagtaacgtcagaagatatactgataaaggaattcatgaggcaggacttggacaaagtgttggactcgttgggtacaagggagaaacaagtgatacgttggagatttgggatggaggatgggagaatgaagacgttgcaagagataggagagatgatgggagtgagcagggagagagtaagacagatagagtcatctgcattcaggaaactaaagaacaagaagagaaacaaccatttgcagcaatacttggttgcacaatcataattctttttctcttcaatatggaatgttttgtgcatagaacccacccacctgagcataacaagcagtaaattattactttttagcatttacgattcttgtgacgccatggacgccattgattccgtcgttgatcctctcagagacttcgctaaggatagtattcgtctcgtcaagcgttgccacaagccagatcgcaaagaattcacgaaagttgcagttcgtaccgcgattgggtttgtggtaatgggattcgttggcttctttgtgaagctaatcttcattccgatcaacaacatcatcgtcggtgccacttagaaagcaaaggatacacaagtcagttctatgttttgagaaaggaagatttagaggttatcgtgttttaagtgaaaggcacaagtcagttctgtgttttgtgtaatcggatcccatttgtttcaatgtttttttggttcttctttttcgttcacaactgaaaaatcggacgtgttttgaatgtagagcaaactaatttaaaaagctgtggatttcgtagtccagcttggtctgttaaaa

SEQ ID NO: 116965 - DNA, 604 bp, Arabidopsis thaliana
  unsure (1)..(604): unsure at all n locations
actatagggaaagctggtccgcctgcaggtcccggtccggaattcccgggtcgacccacgcgtccgcccacgcgttcgaatacaggaccttctgaagttagaaagacttcaaacagagcttacagagcgtagtggacgtcagccaacctttgcgcagtgggcttctgctgctggagtcgatcagaaatcattaaggcaacgtatacatcatggcacactatgcaaagacaaaatgatcaaaagcaacattcgactcgtaatttcgattgcaaagaattatcaaggagctgggatgaacctccaagatcttgtccaggaaggttgcagagggcttgtaaggggagcagagaagtttgatgctacaaagggttttaaattttcaacttacgcgcattggggggtcaagcaagcttgtgcggaagtctctctctgatcagtccagaatggataagattgccttttcacatggtggagcaacatttagggtgaaanggcncggagcaactnncagttnaccgggtagtccccgagnccgngnantttcagggggacaggggtttcattaagggnttatnggggtttnttttcctaacntccgggngtc

SEQ ID NO: 116966 - DNA, 439 bp, Arabidopsis thaliana
  unsure (1)..(439): unsure at all n locations
ctccgcccacgcgtcagcggacgcgtgggttcagatcatttgaatcgaagctaaagaatcgccgccatggacgccattgattccgtcgttgatcctctcagagacttcgctaaggatagtattcgtctcgtcaagcgttgccacaagccagatcgcaaagaattcacgaaagttgcagttcgtaccgcgattgggtttgtggtaatgggattcgttggcttctttgtgaagctaatcttcattccgatcaacaacatcatcgtcggtgccacttagaaagcaaaggatacacaagtcagttctatgttttgagaaaggaagatttagaggttatcgtgtttttaggtgaaaggcacaagtcagttctgtgttttgtgtaatcggatcccattttgttttcaaaggtttttttgggnncccccttttttnntcnnnactt

SEQ ID NO: 116967 - DNA, 1446 bp, Arabidopsis thaliana
  unsure (1)..(1446): unsure at all n locations
cgacggttcgtcattcttcctctaagctttatctttctgatctctgaccttgtgtctctgtgcatgtgtgtttatctgctactgtgttttgtcggtttgatctccaaaaaccagacatgaacagaggaagcttatgccctaatcccatctgtctccctcctcttgagcaatccatctccaaattcttaacacagagtggaacgtttaaagatggagatcttcgagtgaacaaagatggaatccagaccgtgtctctgtccgaaccaggagctccacctcctattgagccattggacaaccaattgagtttggcagatttagaagtgatcaaagtcattggcaaaggaagtagtggtaatgtccagttggtcaaacacaaactcactcaacagtttttcgctcttaaggtcattcaattgaacacagaagaatcaacatgtcgggcgatttctcaggagctgagaataaacttgagctcgcaatgtccatatcttgtctcatgttatcaatctttctaccacaacggtcttgtttcaatcatattggaattcatggatggtggatcccttgcagacttgttaaagaaagtcggaaaagttcctgaaaacatgctatctgccatctgcaagcgagttcttcgaggtctttgttatattcatcatgagaggcgaatcattcatcgggacttaaagccttcaaacttgctaatcaatcatagaggtgaagtcaagatcacagactttggtgtcagcaagatcttgacaagcacaagtagtcttgctaattctttcgtgggcacatacccttatatgtctccagagagaatcagcgggagtttgtacagtaacaagagcgatatttggagcttgggactggttttgctcgaatgtgcaacgggtaaattcccgtatactcctccagaacacaagaaaggatggagtagcgtgtacgagcttgtggacgccattgttgaaaacccgcctccttgtgcaccttccaatctcttttctccagagttttgctccttcatctcgcaatgtgtacaaaaagatccaagggacagaaaatcagcaaaggagcttctggaacacaagttcgtaaagatgtttgaagattcggatacaaatctctcggcttacttcaccgacgcaggatctttgattcccccacttgctaactagaaccgagtttgaacaatcttttaacctccaagttattatttcatatccactagaagagattttatgaaagataaatttacgagatgttatgacttaagagacttgtctacaaaatttgatttaatgtgtgtactttccacatcactattataaacacaactatcatcagttatgtttctctgctagtggtggatatacttatatagtagttcatatcattatacacattttgttttgtnnnnnnnnnnnnnnnnnnnnnnnnnnn

SEQ ID NO: 116968 - DNA, 1986 bp, Arabidopsis thaliana
gaattcggcacgaggttgaaaccattttatatttatctcttcttattttctgcatggtggtttgaattaggccaccaaaaaactcttggataaaaaaaaaactgagaaacagaaaaaagaaaaaacaaaacacacattctcgatttgtctgtgccacacacactctcttgcacattcttgtctcgacaatactctcagaatacgatcttgaagagcaaagattgttcctttattgatgaattgagtgcaaaagagtgttatataatggctactgcagctgttataggactcaacactggcaaaagattgttgagttcatcgttttatcactcagatgttacagagaagtttctatctgtaaatgatcattgttcatcacagtatcatattgcttcaacgaaaagcgggataactgcgaaaaaggcgtcgaactatagtccgagttttccttcgtcgaatcgtcacacacaatctgctaaagctttgaaagagagtgtagatgttgcttctactgagaagccatggctacctaatggaactgataaggaattggaagaagaatgttatgatgatgatgatctaattagtcattctgttgaggcaattttactgttacagaagtctatgttagagaaaagttggaatctttcatttgaaaaggcggtgtcgagtgagtatccgggcaaggggactatacggaagaagaagattccggttatcacctgttcagggatttcagctcgtcaaagaaggattggtgctaagaagaaaactaatatgactcatgttaaagcagtttctgatgtttctagtggaaagcaagttagaggttatgtgaaaggtgtaataagtgaagatgtgcttagtcatgtggaagttgtgcgcttgtctaagaaaatcaaatctggtcttcgtcttgatgatcataagtcaagattgaaggatagattaggctgtgagccttctgatgaacagcttgcagtatctttgaagatatctcgggccgagcttcaggcgtggttgatggagtgtcatctagctagagagaagttggctatgagtaatgtgcgtttggttatgtctattgctcagcgttatgataatttgggagcagaaatgtctgaccttgttcagggtggtcttatcggacttttgcggggaatagagaaatttgattcttccaaaggtttcagaatttcaacttatgtatattggtggattcgacagggtgtctcaagagcactagtggacaactcaagaaccttgaggttacctactcacctacatgaaagactcggtttaatccgaaatgcaaagcttagacttcaagagaaaggaatcacaccctccattgataggattgcagagtctctaaacatgtcgcagaagaaagttagaaatgcaacagaggctgtaagcaaagtattttctctagacagagatgcatttccttctttgaatggtctccctggagaaactcatcacagttacattgcggatactcgtttggagaacaatccgtggcacgggtatgatgatttggcactcaaggaggaagtaagcaagcttataagtgcaacactcggagaacgggaaaaagagatcattcgattatactatggtctagacaaagaatgtctcacatgggaagacattagtaaacggataggattatcgagagagagggtgagacaggtagggcttgtggcactggagaaactaaaacacgcagcgaggaagagaaaaatggaggcaatgatccttaagaattgattttgtttttgtacattttgattacatcagagccatagagagcggttgtgaatgtgtatatatacaggacaaaaaagggggaagagtactactctcttttatttttttatcttccttgcttctttcgtaaactgagttgagaaacaagagacagttatgtaatatggcttcacgtaaacttcatcattcctcataaattatcaactaaaaaaa

SEQ ID NO: 116969 - DNA, 2017 bp, Arabidopsis thaliana
ggcaacgaaacggagagagggaattaggcaaattagaagagagaagtcgtagaccatacaatttgcacacaaactatatctctccactgactccaatcatctccttcctccgctcccatctgcgtctcaatggcttccttcaattcgttccccattcccaaacagattgttggttcttcttcttcgtcgtcctcctctacttctcggccacgtattttagtgcgatcgagtttaacatcgtctatgacctctaccaatagtatgctggtctttgtacatcctcatcctttgattaaacattggctctcgttattgagatctgaccaaacttctttccccattttcgttagaattccaatgacttctgtggttgcaacgaggtggtcgtttctatcctcagtcaaagaggaaagcagaatttatcagaacgattctctaaaagcatgtggctgcgcatctgtatctccttacactgcacaaaataatgtttatgttgagctcaaagacccaaaggaaaatattggcgtgggttctgcagaaagatcatattcatctcgtagcatgttgcaatacaatttactggcaaagaaccttttggcactagaggaaacgtttgttgccttggattctgtaagaatggaaagagatattatgttgcaaatggggaagttgggggctgctgagttatttaaaacctgtctatctaggtatcgtggttcctcaatcacgtcgtgcttatctgacacaactgagttggtggatactacgccgaatcaacaagtctttgtatcctcgaggagaaaagtaaaaaagaaagcaaggaggtcgagtgtgacagctgagaatggtgatcagagttctctgccaatcggtttaagaactacatggaacaatattgatgtccctagagtgagaagaccaccaaaatatagaaagaaaagagagaggatctctagaaacgagactgagatgtcaacaggagtcaagatagtggcggacatggagagaatcagaacacaactggaggaagaaagtggtaaggtagcgagtttgagttgttgggctgcagcagctgggatgaacgagaaactcctgatgcgcaatctacattacggttggtactgtagagatgaactggtgaaaagcacccggtctttggttctcttcctcgcaagaaattaccgtggactgggaatcgcccacgaagatttaattcaggcagggtatgtgggggtgttacaaggagcagagaggtttgatcacacaaggggttacaagttttcaacatatgtgcagtattggataagaaaatcaatgtctacgatggtgtcacggcatgcaagaggcgtccatattccttcatcaataatccgaactatcaatcatatacaaaaggctcgtaagaccctgaaaacgagccatggtataaaatatgcggctgatgaggagattgcaaaactaacaggccactcggtgaagaagattcgagcagctaaccaatgcctaaaagtggtcggttcaattgacaagaaagttggggattgctttactacaaaattcctggaatttacaccagacacaacgatggagagtcctgaggaggccgtgatgaggcagagcgcgaggagagacatacatgatcttctagaagggttagagccaagagagaagcaagtgatggtcctacgttatggtcttcaagactacaggcccaagtccctggaagagattgggaagcttcttaaagttagcaaagaatggattcggaagatcgaacggagagcaatggctaaactcagagaccaacccaacgccgaagacctcagatattatttgaatcagtaaaaaatagagatttttggctccaatgactcttatgtcttctgtcacagtgtgattgtgtaatcttgtgtgtttataatagtaacattggagatcctcgagtgtaaaatgtcttgtacggggttgtaaacttatatagttatattacagtgaaaatagatattgtacaagttat

SEQ ID NO: 116970 - DNA, 937 bp, Arabidopsis thaliana
  unsure (1)..(937): unsure at all n locations
cagagatctgacggcggtagcagagtaatctattccttcccaaaatgtctcgcaattagattctttccaagttcttctgtaaatcccaagtcccgctcttttcctctttatccttttcaccagcttcgctactaagacaacaaatctttccctctctctctcgcctgatcgatcttcaaagagtaagaaaaatgcaggaacaagcgactagctctttagctgcaagctctttaccatcaagcagcgagaggtcatcaagctctgctccacatttggagatcaaagaaggaattgaaagcgatgaggagatacggcgagtgccggagtttggaggagaagctgtcggaaaagaaacttccggtagagaatctggatcggcgaccggtcaggagcggacacaggcgactgtcggagaaagtcaaaggaagcgagggaggacaccggcggagaaagagaacaagcggctgaagaggttgttgaggaacagagtttcagctcagcaagcaagagagaggaaaaaggcttacttgagcgagttggaaaacagagtgaaagacttggagaacaaaaactctgaacttgaagagcgactctctactcttcagaacgagaaccagatgcttagacatattctgaagaacacaacaggaaacaagagaggaggtggtggtggttctaatgctgatgcaagcctttgatctccttcttcttcttgtgttatatttttgtggataaaatttacagagaattgtatcaataattatcatgttaaaattatatgggatgtgagagctaatattgcaattgtagaccaagttctcttaaaaaaaaaaaaaaaaaaacgcggccgannnnnnnnnnnnnnnnnnnnnnnnnnnnnnnnnnnnnnnnnnnnnnnnnnnnnnnnnnnnnnnnnnnnnnnnnnnnnnnnnnnnnn

SEQ ID NO: 116971 - DNA, 1740 bp, Arabidopsis thaliana
  unsure (1)..(1740): unsure at all n locations
ggcacgagcaatcaccgccgattctctctctctctctctcgagtctctcgacggtcgcatatcaaaagtccatttctttcttctctttggaggatcagcaactatggatgaagagtacgaagtcatagttctgggtactggtctcaaggagtgcatccttagtggtcttctctccgtcgatggtcttaaggtacttcacatggacaggaatgactactacggtggagagtcaacttctcttaatctcaatcagctgtggaagaagttcaggggagaagagaaggctcctgctcatttaggttctagcagagactacaatgttgacatgatgccaaagtttatgatggctaacggaaagcttgttcgtgtccttattcatacggatgtgaccaagtacttgtcttttaaagctgttgatggaagctatgtttttgtccaaggcaaggtccaaaaagtgccagcaactcccatggaggccctcaaatctcctcttatgggtatttttgagaaacgtcgagctggaaagtttttcagctatgttcaagaatacgacgagaaggacccaaaaacacatgatggaatggatttgaggagagttacaactaaggatttgattgcgaaattcggtcttaaagaagatactattgactttattggtcatgcagtggcacttcactgtaatgacaatcatctccatcaacctgcctatgatactgtaatgagaatgaagctctacgcagagtcccttgcacgttttcaaggaggttcaccatatatctatcctctctatgggttgggagaattgcctcaggcatttgcacgacttagtgctgtctatggtgggacgtatatgttgaacaaacctgagtgcaaggtagagtttgacgaggagggtaaggtttctggtgttacatctgagggagagactgccaaatgcaagaaagttgtctgcgatccttcttacctaaccaacaaggtcaggaagattggcagggttgctcgggcgattgccattatgagccaccctattccaaacaccaatgattctcagtcggtgcaagtcattctaccccaaaaacaattgggccgcaaatcagacatgtatgtcttctgttgttcatattcacacaacgttgctcccaagggaaagttcatagcatttgtgtcaacagacgctgaaactgataaccctcaaaccgagctccagcctggaatcgaccttcttggtcctgttgatgagctgttcttcgacatctatgatagatatgagcctgtcaacgaacccactttggacaactgcttcatatcaacgagttatgatgctacaacacactttgacacaactgttgttgatgtgttgaacatgtataaattgatcaccggaaaggaactggatctaagtgtggatcttaacgcagctagtgctgcagaggaggaatgatggaaaatattgcaagctctgtctctctctgttagtcaccaaatgatgtaaccggttctctttctccctcttcttaaaagttgtctcaccaaatgttctgttaaaatactaaatcaaaccgatctcatcatgcgtacctattcccggttatcgcagtctgtttttttcttctcaaaaaactaaaatgttggatttcgtggtttttgtttggagtgtctaatatatcatcatgctcttccgtttgagcnnnnnnnnnnnnnnnnnnnnnnnnnnnnnnnnnnnnnnnnnnnnnnnnnnnn

SEQ ID NO: 116972 - DNA, 1678 bp, Arabidopsis thaliana
  unsure (1)..(1678): unsure at all n locations
ttcttctaatagacttcttcgtcactgatctcccacgacgatctcccaaactcatttctctacgttcatcgatctctctctttctcgtttgctctacgaaaatcagccatggatgaagagtacgaggttattgttctcggcaccggtctcaaggagtgtatcctcagcggtctcctttccgtcgatggtgtcaaggtgcttcacatggacaggaatgactactatggtggagaatcaacttcccttaatctcaatcagctttggaagaagttcaggggagaagagaaggctcctgagcatttaggcgctagccgggattacaatgttgacatgatgcctaagtttatgatgggaaatggcaagcttgttcgtacccttattcatacagatgttacaaagtatttgtccttcaaagctgttgatggaagctatgttttcgtcaaaggaaaggttcaaaaggtgccagctactcctatggaggccctgaaatcttctctcatgggcatatttgagaaacgtcgagccggcaagtttttcagttttgttcaagaatacgatgagaaggacccaaaaacacacgatggaatggatttgaccagagttacaacaaaggaactgattgcgaaatatggtcttgatggcaacactattgactttattggtcacgcagtggcacttcacacgaatgaccaacatctcgaccaacccgcctttgatactgtaatgagaatgaagctctatgcggaatctcttgcacgtttccaaggaacatctccatatatttatcctctctatgggttgggagaactaccccaggcatttgcacgacttagtgctgtctatggtggcacatatatgttgaacaaacctgagtgcaaggtagagtttgacgagggaggtaaggttattggtgtaacatctgagggagagactgctaaatgcaaaaagattgtgtgtgacccttcatacctgccgaacaaggttaggaagattggcagggttgctcgggccatcgccattatgagccacccgattccgaacaccaatgattctcactcagtgcaggtcatcataccccagaaacagttggcccgcaaatcggatatgtatgtcttctgttgttcgtactcccacaacgttgctcccaagggaaaattcattgcatttgtgtctacagatgcagagactgataaccctcaaaccgaactaaagcctggaactgatcttttgggtcctgttgatgagatattcttcgacatgtatgatagatacgagcctgtcaacgagccagagttggacaactgctttatatcaacgagctatgatgctacaacacactttgagacaactgttgcggatgtgttgaacatgtataccctaatcaccggaaagcaactggacctaagtgttgacctgagtgccgcaagtgctgcagaggaatgaagaatcatcaccagatcgctccctctctagttgattttctaaaagcttgttttgctcatttctctgtttccgactcttgctttcgtgttcttttttggtttgaactttgaatacaaaatcagaatgatccttcatgttttagaaactaacaaccatgtgtctccgtttgatgttggattcctcggttaaagacttataaatgctctttaaaactcaacnnnnnnnnnnnnnnnnn

SEQ ID NO: 116973 - DNA, 4485 bp, Arabidopsis thaliana
agagagtcgatgtcgtggaactaagttctggtttggttttatgctatgggtgagaaagcgattgacgaagacaaagtagaagcgatgaagggcagcaagacctctcttgttttcgccattaacggacaaagattcgagctcgagctctcttctattgatccttccaccacactcgtcgatttcttgcgcaacaagactcctttcaagagcgtcaagcttggttgtggcgaaggtggttgtggcgcttgtgttgttcttctttcaaagtatgatccattgctcgaaaaagtcgatgaattcacaattagctcgtgtctcacgcttctctgtagcattgatggctgttccatcactacctcagacgggctcggcaacagcagagtcggtttccatgccgtccacgagcgtatcgccggttttcatgccacacaatgcggtttctgtactcctggaatgagcgtttcgatgttttctgctctcttgaacgctgataggtctcatccacctcctcgcagcggtttctcaaatctcacggctgtagaggctgagaaggctgtgtcagggaatctttgccggtgtactggatatagaccgcttgtggatgcttgtaagagttttgcagcggatgtggatatcgaagatctcggattcaatgccttttgcaagaagggagaaaacagagatgaggttttaagaaggttgccatgttatgatcatacatcatctcatgtctgtacatttccggagttcttgaagaaggaaatcaagaacgatatgagtcttcattcaagaaagtatcgatggtcaagcccggttagtgtctcagagcttcaagggttattagaagtcgagaatggtttgtcggttaagttagttgcgggtaacacgagcaccgggtattacaaagaagaaaaagagaggaagtacgaaagatttatcgatatcaggaagattccggagtttactatggtgagaagtgatgagaaaggagttgaattaggagcttgtgtcactatatcgaaagctattgaggttctaagagaggaaaaaaatgtttctgtgttggcgaaaatacgctactcatatggagaaaattgcaaacagattcgtgaggaacacgggaacgataggtggaaacattatgatggctcagagaaaacagtttccttcggatcttgcaaccatacttgttgctgctcaagcaacggtgaagatcatgactagcagctcgagtcaagaacagttcacattggaggagtttctacaacaacctcctcttgatgcaaaatctcttcttttgagcctcgagattccatcttggcactccgcgaagaagaacggttcttcagaagatagtattttgctatttgaaacttacagagcagcgcctcgtcctctaggaaacgcattggcatttctgaatgcggctttctcagctgaagttactgaagcacttgatggcattgttgtaaatgattgccaattagtttttggagcttatgggaccaaacatgcacacagggcaaagaaagtagaagagtttcttacaggaaaagtgatatctgatgaagttttgatggaagctattagcttacttaaagatgagatagtacctgataagggtacttcgaatcccgggtatagatcaagcttggctgttacttttctcttcgagttcttcggatctttaactaaaaaaaacgctaaaacgacaaacggttggctcaatggaggatgcaaagagattggttttgatcagaatgttgaatctttgaaacctgaagctatgctgtcatctgcacaacaaatagttgaaaatcaagagcatagtccggtcgggaaaggcattacaaaggctggagcttgtctccaagcatctggtgaggctgtttatgtagacgacattcctgctccggaaaattgtctatacggcgcatttatttacagtacaatgccgctagcgcgaattaagggtataaggttcaagcaaaacagagttccagaaggagttcttggcattattacttacaaagatattcccaaaggcgggcaaaatatcggtaccaacggtttctttacctcggatcttttgttcgcagaagaagtcactcattgtgcgggtcagataatcgcctttttggttgcagatagtcaaaagcatgcagatgttgcagcaaatcttgttgtgatagattacgacaccaaagatttaaaaccacctatactgtccttagaagaagctgtcgaaaactttagccttttcgaggtccctccacctctgcgtggttacccggttggtgatatcaccaagggaatggatgaagctgaacataagattcttggatcaaagataagtttcgggtcacagtacttcttctatatggagacacaaacagctcttgcagtgccggatgaagacaactgtatggtggtttatagctcgactcaaacccctgagtttgtacatcaaaccatcgctggatgtcttggagttcctgagaacaatgtgcgtgtcatcactagaagagttggaggcggattcggtgggaaagccgtgaaatcaatgcctgttgctgcagcttgtgcacttgcagcatccaaaatgcagcgtcctgtgaggacatatgtgaaccgaaaaacggatatgataactaccggaggaagacatccgatgaaagtcacatatagtgttggattcaaatccaatggaaagattactgctttagatgtagaggtgttacttgatgcagggttaaccgaagatataagcccgcttatgccgaagggaatacaaggagcactaatgaagtatgattggggtgctctgtctttcaatgtgaaagtatgcaaaacaaacactgtgagcagaaccgcgctgagagctcctggggatgtacaaggatcatatataggagaagccatcattgaaaaagtagcttcatatctttcagttgatgttgatgagatcaggaaggttaatcttcatacatatgagagcttaaggttgtttcacagtgccaaagctggtgaattttctgagtatacgttaccattgctttgggacagaatcgatgagttctcgggatttaacaagcggaggaaggtggttgaggagtttaatgcatcaaacaagtggagaaagagagggatttcacgtgtgcctgcggtttatgcagtgaacatgcgatcaacaccgggaagagtaagcgttttgggagatgggtcaatagttgtggaggttcaagggattgagataggacaagggctttggacaaaggtgaaacagatggctgcatattcccttggtttgatccagtgcggtactacaagtgatgaactgcttaaaaaaatcagggtcattcaatccgacacactaagtatggtgcaaggctcaatgactgctggtagtacaacctctgaagcgagtagtgaagcggtaaggatttgctgtgatggcttagttgaaaggcttttaccagtcaagaccgctttggtggagcaaacaggaggacctgtgacttgggatagtctcatcagtcaggcttatcagcaatcgataaacatgtccgttagtagcaaatacatgcctgactccactggcgaatacctgaactatggaattgcagcgagcgaggttgaagtaaacgttttgacgggagaaacaacgatcctgcgtacagatattatctatgattgtgggaagagtctcaatcccgctgttgatttaggacagattgaaggagcctttgttcaaggacttggtttcttcatgcttgaagagttcctaatgaactcagacggtctcgtggtaacagacagcacatggacttacaagatcccaacggttgacacaatcccaagacagtttaatgtggagattctcaacagtggacaacacaagaatcgtgttctttcatccaaagcttcgggtgaaccgccattgcttttagcggcttctgttcactgcgcggtacgagcagctgttaaagaagctaggaaacagatcctgtcatggaatagtaataaacaagggactgatatgtacttcgaattgcctgttccagcaacaatgcctattgtgaaggagttttgtggacttgatgttgtcgagaaatacttggaatggaaaatccagcaaaggaaaaatgtttgatagcttgtgtttgtgttttcgatgtgaatgtaaaattgctctgtttttgtttgtggtttgattcgtttgaagcgtttgatagaatgtttgggattgtgatgtacttgttgttgtaataagctgcatggcaatggcaatggcaatggcaatggcaatggcggtgttctgcttaggaaaaattatgtcgatggcaatggattgtgatgtaattttccattgttgtaataaaaattatgtctttcctgccatattatatatttaggaaaaaattatttaagaggcttctgtttatatgtataatacgatattattttttcctaaatataatatgg

SEQ ID NO: 116974 - DNA, 4228 bp, Arabidopsis thaliana
gatttagtggtgaaagcgatattcactctggcttcaagatctcatcgaggtctttctatgtggacaaggaatatttcggatacgttacactcttacagacacagatagagagaaagagaaaaagagagataatgagcttggttttcgccattaatggacaaaggttcgagcttgagctctcctctgttgacccttcaacaactttgttggagtttcttcgttatcagacttctttcaagagtgtcaagctcagctgcggtgaaggaggatgtggtgcttgtgttgttcttctctccaagttcgatcctgtcttacaaaaagtcgaagatttcactgtgagctcttgtcttacactcctctgcagcgtcaaccactgcaatattacgacatcagaaggacttgggaacagcagagacggtttccacccgattcacaagcggttatccggtttccatgcctctcaatgtggtttctgtacacctggaatgtctgtttctctcttctctgctcttttagatgctgacaagtctcaatattccgaccttacggttgtggaagcagagaaggctgtctcaggaaacttatgtcggtgtactggttaccgtccgattgttgatgcttgtaagagctttgcttcggatgttgacattgaggatcttggattaaactctttttgtaggaaaggggataaagattctagtagtttaactcggtttgatagtgagaagcgtatttgtacatttccagagtttctcaaggatgagattaagtctgtggattctggaatgtaccgatggtgcagcccagcgagtgttgaggaactctcgagcttattggaagcttgcaaggctaatagtaatacagtttctatgaaattggttgctggtaacacaagtatgggatactataaagatgaaagagagcagaattacgacaaatacatagatataactcgaatcccgcaccttaaagagatcagagaaaaccagaatggggttgagataggatcagtggtaacaatctctaaagttattgctgctctgaaggagattagggtctcaccgggagtggagaagatatttggaaaacttgctactcatatggaaatgatagcggcgagatttatcaggaactttggtagcattggtggaaaccttgtgatggctcagaggaaacagtttccttctgatatggctacaatacttcttgcagctggtgcatttgttaacataatgagctcatcaagaggactcgaaaagctaacacttgaagagttccttgaacgttctcctcttgaggctcatgatctggttctgagtattgaaattcctttttggcattctgaaacaaactctgaattgttctttgaaacctatagagctgcacctcgtccacatggaagcgctctggcctacctgaatgctgctttcttggctgaagtgaaggatacaatggtagttaactgtagattggctttcggggcttacgggaccaaacacgccattaggtgtaaggaaatcgaagagttcctgtctggtaaagtaatcactgacaaagttctgtatgaggctattaccttacttggcaatgttgtggtgcctgaagacggtacaagcaatcctgcttacaggtcaagcttggcgcctggcttccttttcaagttccttcacaccttaatgacccatcctactacagataaaccttcaaatggttaccacttggatccaccaaaaccgttgccaatgttgtcttcttcacaaaatgttcctataaacaatgaatataatccagttggtcagcctgttactaaagttggagcttcccttcaggcttctggtgaggctgtttatgtggacgatattccatctcccacaaactgtctctatggagcatttatctatagcaaaaagccattcgctaggataaaaggtattcacttcaaggacgatttggtacctactggagttgttgcagtcatttctcgcaaggatgttcctaaaggcggaaagaatattggtatgaagattggattaggctccgaccaattgttcgcagaggatttcaccactagtgtaggcgaatgcatcgccttcgtggttgctgatacgcagagacatgcggatgctgcagtaaaccttgcagttgttgaatacgagacagaggatttggaaccaccaatcttatctgtagaagacgcggtcaagaaatctagtctgtttgacattatccctttcctttatccacaacaagttggtgatacatcaaaaggaatggctgaagctgatcaccaaattctcagctcggaaataagactcggatcgcaatacgtcttctacatggagacacaaacagctcttgcagtgggagatgaagacaactgcattgtagtctatagttcaacacagacccctcagtacgtacagtcatcggtcgctgcttgcctaggcatccctgaaaataacatccgtgtcataaccagacgtgttggtggaggttttggagggaaatctgtcaagtcaatgccagttgcaacagcgtgcgctcttgctgctaagaaactgcagcgtcctgtgagaacttatgtcaaccgcaagaccgatatgataatgactggtgggaggcatccgatgaagataacgtatagtgtggggttcaaatctacagggaagatcacagctttggagctagaaatactaattgatgctggggcaagttatggttttagtatgtttattccatcaaatctcatagggtcgctaaagaagtacaattggggcgccttatcttttgatatcaaactttgtaaaacaaatcttctaagcagagcaatcatgagatccccgggggacgtgcagggtacgtatattgctgaagccatcatcgaaaatatagcctctagcctctctttggaggttgatacaataagaaagattaatctccatacacatgagagcttagccctgttctacaaggatggtgctggtgaaccacatgagtatactttatcttcgatgtgggataaggttggcgtatcttccaagtttgaggagagggtttctgttgtcagagagttcaacgagtctaacatgtggagaaaacgagggatatctcgagtacctattatctatgaggttttattgtttgctactccagggagagtaagtgttttgagcgatgggacgattgttgttgagattggtggaatcgagctaggacaagggttatggacaaaggtgaagcagatgactagttatgctcttggtatgctacaatgcgatggaacggaagaactcttggagaagataagagttatacaatcagattcattgagcatggtccaaggaaatttcacaggaggtagcacaacatccgagggaagctgcgcagctgttcgtctctgctgcgaaaccttagtcgaaagattgaaacctttaatggaaagatcagatggtccaatcacctggaatgagttgatttctcaggcttatgcacaatccgtgaacttatcagctagtgacttgtatactccaaaagacactcccatgcagtacctgaactatggtactgcggtcagcgaggttgaagtagaccttgtgacgggacaaaccacagttctacagacagatatcttatatgactgtggaaaaagtctcaatcccgctgtcgatttaggacagattgaaggatcttttgttcaaggacttgggtttttcatgcttgaagagtacatagaagatccagaaggactccttctgacggatagcacatggacatacaagattccaacagttgacaccattcctaaacagttcaatgtcgagatactaaatggtggatgtcatgaaaaacgcgtactctcttctaaagcctcgggagagcctccgttgctactggcagcttcggtgcactgcgctaccagacaggctgttaaagaagcacgcaaacagctatgtatgtggaaaggtgagaatggttcctccggttcagcgtttcagttgccagttccagctacaatgccggttgtgaaggagctatgcggtctagatatcattgaaagctatttggagtggaagttacacgacaactcaaacctatgagtaaacaacaaacaatacatgaaagaaggtaatttgtttcctactgttttcttaaacttggagattaatcgctgtgcaggagtatcttctcttttgctctgtttatttctttgaaaacactctgtttctgg

SEQ ID NO: 116975 - DNA, 441 bp, Arabidopsis thaliana
taaatctatctacacagatattaattatattttcataactagattttttttttaaacgtgtttatatatatgctctattatattcgttctttgttaaagaatcaatctaaatattaaaacgttttcatgtgttggatacttggatatatgatgctttaatgatggcctagtggtagagtaaaataatgtaaaatacttttttaaaacatcaaaaataaatgatacacgtatttttatactcatatgtcatatgtgctactactaattataattatgtgaatatatatccacgtagtaagagtcatattgattgtgatgattgataatatgaatgtatataggtctaaaacgaaccgggaaaagttgccggctccggtggctgaactatctccgccccgacgtacgacggggaaacatcactccagaagagcaacttatcat

SEQ ID NO: 116976 - DNA, 1364 bp, Arabidopsis thaliana
ctcattttataataattttctccatcttcttccttcctcttcaagcttatagaacctccaagaaccataaaactctctctgcaacaatctatactttcttcattacttttataaaaaatgggaagacattcttgttgttttaagcagaagctaagaaaaggcctttggtctcctgaagaagatgagaaacttctcaattacatcactagacatggtcatggctgttggagttctgtccctaaactcgcaggtttgcaaagatgtggaaagagttgtagacttaggtggataaattatttgagaccagatttaaagagaggagctttctctcaagacgaagaaagcttgatcattgagctccatgctgcattaggcaacagatggtctcaaatcgcaacgcggttaccgggaagaacagacaacgagatcaaaaacttttggaactcatgtcttaagaagaagctgagaagaaaaggcattgacccaacaacacataaacccttaataacaaacgagcttcaatctcttaacgtcatagatcagaaactgacgtcatcagaagtagtaaagtcaacgggttcgataaacaacctacatgatcagtcaatggtcgtctcatcgcaacaaggtccatggtggttcccggcgaatacaactacgactaatcaaaactctgcgttttgctttagttcaagtaatactacaacggtttcagaccagatcgtatctttaatctcttcaatgtctacgtcatcatctccgacaccaatgacttcaaacttcagtcctgctccaaacaactgggaacaactcaactactgcaacacagtaccaagtcagagcaacagtatcttcagtgccttctttggtaatcaatacacagaagctagccaaaccatgaacaataataatccactagtagatcaacatcatcatcatcaagacatgaagtcatgggcatcagagattcttcattacacagaacacaaccaaagctcagaaactgttatagaagcagaagtgaagccagacattgccaactactactggagatcagcatcatcatcgtcgtcaccaaaccaagaagctgcaacattactacacgatgctaacgtggaagtgtacggtaaaaatctacaaaagcttaataacacggtgtttgatcagagcctttagattattaacatgtgttatagagagtttcattttctattcatattcatagacctgagtttattgattgatccatacatttgttatgcttgtgtgtaaagtatgtatatggtttttgatttatgtaaattttctgctcgagtgaatttttttggtgctaagatgtagttctttattccaaaaaaaaaaaa

SEQ ID NO: 116977 - DNA, 2898 bp, Arabidopsis thaliana
  unsure (1)..(2898): unsure at all n locations
acttatcttcttttgatgttcttgtagcgtctgtacgaaatctcacaaggtttcttcttctcagatttagaaatacttgtgtgatatcttctgagtaaccaaattcttgataaagtttctagctttattcaaacccatttgaaaaatccggtggtgaatcgccggagaaatgtgtttttcgtttctccactgagttttttttgttaagaaatctgttaaaactctagatttcaaacgaatgacattttctgagattgaggaacattgtgaatcgaggactggagtgaagattctctgatgagtgattcagaagaagacgaagaagaagaagaagctagtgaagtcattttaagcagcgtcgttcagaagaagaagaagaagaatctgcgtttcggtgaagaagtagagagacgagacggtttggtgttgttagctcaatctactccaatggtgagatcgagatctcaaggaacgactcggcgcgtgactcccacgcctttagtagatgttgagaagccgctaccaaacggagatctttacatcggaagtttctccggtgggtttccacattggatccgggaagtatctatggaaagatgggtgcatgtacgaaggagattggaaacgagggaaagcttcagggaaaggcaaattctcatggccaagtggagctacttacgaaggtgaattcaaatctgggagaatggaaggttttggtactttcactggagctgatggagatacttatagaggaacttgggttgctgatagaaaacacggacatggacaaaagcgttatgcaaatggagatttttatgaaggtacttggagaaggaatctaccagatggtagaggtaggtatgtgtggagaaatgggaatcagtatactggagagtggcgtagtggtgtgatttctgggaaaggtttgcttgtttggcctaatgggaatcgatatgaaggtttgtgggagaatgggattcctaaagggaatggtgtgtttacttggagtgatgggagttcttgtgttggtgcttggaatgagagtaatattatgaggagtttctttaatggtgttgagaagaatgatttgattgtggggaataggaagagatcttctgttgatagtggagctgggagtttgggaggtgagaaagtttttccaagaatctgtatttgggaatctgatggtgaagctggagatatcacttgtgatattattgataatgttgaagcttccatgatttatagagataggatctctgttgatcgtgatgggtttaggcagtttaagaagaatccttgttggtttaatggtgaggctaagaaacctggacagactatttctaaagggcataagaaatatgatttgatgctgaatttgcaattaggaatcaggtattctgttggcaaacatgcttcgattgttcgtgatcttaaacagactgatttcgatccaaaggagaaattttggacaaggtttccaccagaagggactaagacaacaccgccgcatcagtcagtggatttcaggtggaaggattattgccctttagtgttcagacgtctcagggagcttttccaagtggatccagctaagtatatgctagctatatgtggaaatgatgctctccgcgaactatcttcacctggaaagagtggaagccttttttacctaactcaagatgatagatttatgatcaaaacggtgaagaaatcagaagtcaaggttcttctaagaatgcttccaagttactacaaacatgtctgccaatacgaaaactcccttgtgactagattctacggtgttcattgtgtcaaacctgttggtggccaaaagactcggtttatcgttatgggaaacttattctgctccgagtatagaatccagagacggtttgacctcaaagggtcttctcatgggcgtagcactgcaaagcctgaaggagaaattgatgagaccacgactctcaaggaccttgatctcaatttttctttccgtcttcagagaaactggtatcaagagcttatgaagcaaataaaacgcgattgtgagttcttggaagcagagagaataatggattatagccttttagttggtgttcacttccgtgatgacaacacaggagaaaagatggggctttctccattcgttttgagatctggtaggatagattcatatcagaatgaaaaattcatgcgcggttgtcgcttcctagaggcagaacttcaagacatggaccggattttagctggcaggaaaccatcgatcagattaggcgcaaacatgccagcaaaagctgaacgaatggcccggagaagcgattttgatcagtattcatcaggaggagccagttatccatcacacggtgagatgtacgaagttgttctctactttggagtcattgacatcttgcaagactacgacataaccaaaaagatcgagcatgcgtataagtcactgcaagccgatcctgcttcgatctcagctgttgatcctaaactctattcaaagaggttcagagacttcatcagtaggatcttcattgaagagggctaaagacaagaaggctaaagtttttaactaacattctcggctctacggaaatgtgaagaaagctgcgcgggaagagtaaaaaggtaaatctcaaggatagaagaaaagcgatttcggaattttatgtttatatattttgagatgaccaatcaagtttttgggttggggaggggctttatttatttttgtggtgagccgtttatatatataatatttatatatgtgaatatagattgaaggtttttagtaaaaaaaaaaaaaaaaaaagnnnnnnnnnnnnnnnnnnnnnnnnnnnnnnnnnnnnnnnnnnnnnnnnnnnnnnnnnnnnnnnnnnnnnnnaaatc

SEQ ID NO: 116978 - DNA, 1994 bp, Arabidopsis thaliana
tatcaatggaggctacggcggcgccattctcttcaattgtctcttccagacaaaacttctcttcatcttcttcgattcgcgcttcttctccggcttctttattcctctcccagaagagtattggcaatgttaatcgcaaattcaaatctcccagaagcctctccgtccgcgcatcttctacctcagattctgttgtgactttgcttgactacggagctggaaatgttcggagcatccgcaatgctcttcgtcatctcggcttcagcatcaaagacgttcaaacgccgggagacattctgaatgctgatcgactcatatttccaggcgttgggccttttgcacccgccatggatgtacttaacagaactgggatggctgaagctttgtgcaaatatattgagaatgaccgtccatttctaggcatatgtcttggtctacaactacttttcgattctagtgaacagaatggaccagtcaaaggtcttggtgtgataccgggaatagttggacgctttgatgcttcagctggtataagagtaccccacattggctggaatgctttgcaagttgggaaggattctgaaattttggatgatgttggaaaccgtcatgtctattttgttcattcgtacagggccattccatcagatgaaaataaggactggatttcgtctacctgtaattatggtgaatcatttatatcttccataagaaggggaaatgtgcatgcagttcaattccatcctgaaaagagcggggaggtggggctttctgttttaagaaggttcttgcatccaaaattacctgcaacacagaagccaatggaaggaaaggcctcaaaacttgcaaagagggtgattgcttgtcttgatgtgaggacgaatgataaaggagatctcgtagttactaaaggggatcagtatgatgtgagagagcaatctaatgaaaacgaggttcgaaaccttggcaaacctgttgatttggctgggcagtattacaaagatggtgcagatgagattagctttttaaacataactggattccgcgattttcctctaggggatttgccgatgattcaggtgttgaggcagacatcaaagaatgtctttgtaccactaactgttggaggtggtattagagactttacagatgctagtggcaggtactattctagcttggaagttgctgctgagtatttcagatccggtgctgataagatgtccataggaagtgacgctgtttttgctgcagaggagttcataaaatcaggggtgaagacaggaaagagtagtttagaacagatatccagagtttatggaaatcaggcagtggttgtaagtattgatcctcgtagagtttatgtgaaccatccggatgatgtgccatacaaagtcatcagagtaactaatccaggcccaaatggagaagaatatgcctggtatcagtgcacggtcagtggaggacaagaaggtcgacctattggagcatttgagcttgcgaaagcggttgaagaattaggtgccggtgaaatactattgaactgcataaactgtgatggtcaagggaaaggattcgacatagacttagtaaagctcatctcagattcagtaggcataccggtgatcgcaagcagtggagcaggtactcccgaccacttttccgaggtgtttgaagaagacaaacgcatctgccgcgcttgctgccggcattttccaccggaaagagggtaccaatcccaatctgtgaaagagcacttacaagaggagcgcatagaagtcaggatctgagaattttctggtctgcgtgttaccataattcatgacacattcaacaagatagaatctttaccttcaataaattaaattaagtcggaaccatcggagctccaataggtctgagtgaatcctcttatagttgatttccttttgttgacagtaagactgatacaatttatggatttcccttgaaagtaagaaagcaacgtatgttcactt

SEQ ID NO: 116979 - DNA, 1691 bp, Arabidopsis thaliana
  unsure (1)..(1691): unsure at all n locations
ccaccaccaccttcgatcgatttctactaacttgttcttcttcttctttctcaactctcttgtcttttgtctctccaccaattttttcttgttctttctctctccaccacataaaaaaaaaaacctagctttgtcccctcaactcactgattgaactgcttgattttcgattgatcatctgggtggttttgaatcgaagagtattgttgtattagtggctggtggctctccaaaagagtaaggccggagagagaaatcaatggcctctggcggcggagaggcggataaatcacttgaaatcgggtccgggaccgcggatcccaaaataggcggtactgggagcaggagcgccggagaagaacgatacttcagggcagatacactggatttcagtaaatgggatttgcatatgggtcaaacctctactagcagcgtcctcaccaattccgcttccacgagcgctcccgcaccggcgatgcaggaatgggagattgacctctccaaactcgatatgaagcacgtcctcgctcacggtacttacggcactgtctaccgcggtgtctacgccggccaagaagtcgcagtgaaagtgttagattggggagaagatggttacgccacaccagctgaaactacagctctccgtgcttccttcgagcaagaggtcgccgtctggcagaagctcgatcatcccaacgttaccaagtttataggagcatccatgggaacctctgatctgcggatccctcctgctggtgatactggcggacgtggtaacggtgcacatcctgcgagggcctgttgtgttgtggttgaatatgttgccggaggcacgcttaagaagttcctcatcaagaaatatagggccaaactacccatcaaggatgtcattcagctcgctttggatctcgctagagggcttagttacctccactccaaggcgattgtacatagggacgtgaagtcagagaacatgctgttacagcctaacaagacgctgaagatcgctgatttcggggtagctagagttgaagctcagaaccctcaagacatgacgggtgaaactggaacacttggatacatggcaccagaggttcttgaaggaaagccttacaacaggaaatgcgatgtctatagctttggggtatgcctctgggaaatatactgctgtgacatgccctatgctgactgtagttttgctgagatctctcacgccgttgttcataggaatctgagaccagagattccgaaatgctgcccgcatgcggtggcaaacatcatgaagagatgctgggacccgaatccagacaggcgtccggagatggaggaggtggtgaagctgcttgaagccatagacacaagcaaaggtggtggaatgatagctccggaccagtttcaggggtgcctctgtttcttcaaacctcgaggcccctgaatctctctccctctctttcccttttgctccgtgtctgatatattcttgagagctgcgtgattctttggattttgtatttactttgagctatgggagttggattggtgtgggttttgtcataagaatctttctgcgctctatgtatttatatacttaacacagtcgtgtataattcgattaagctttattttattttttgataagaaaaaaaacaaaaagggaagccgctctagaggatccaangcttacgtacgcg

SEQ ID NO: 116980 - DNA, 944 bp, Arabidopsis thaliana
cctgaattagaaaagaaagatagatagagaaataaatattttatcataccatacaaaaaaagacagagatcttctacttactctactctcataaaccttatccagtttcttgaaacagagtactcttctgatcaatgaactcattttctgccttttctgaaatgtttggctccgattacgagtctccggtttcctcaggcggtgattacagtccgaagcttgccacgagctgccccaagaaaccagcgggaaggaagaagtttcgtgagactcgtcacccaatttacagaggagttcgtcaaagaaactccggtaagtgggtgtgtgagttgagagagccaaacaagaaaacgaggatttggctcgggactttccaaaccgctgagatggcagctcgtgctcacgacgtcgccgccatagctctccgtggcagatctgcctgtctcaatttcgctgactcggcttggcggctacgaatcccggaatcaacctgtgccaaggaaatccaaaaggcggcggctgaagccgcgttgaattttcaagatgagatgtgtcatatgacgacggatgctcatggtcttgacatggaggagaccttggtggaggctatttatacgccggaacagagccaagatgcgttttatatggatgaagaggcgatgttggggatgtctagtttgttggataacatggccgaagggatgcttttaccgtcgccgtcggttcaatggaactataattttgatgtcgagggagatgatgacgtgtccttatggagctattaaaattcgatttttatttccatttttggtattatagctttttatacatttgatccttttttagaatggatcttcttctttttttggttgtgagaaacgaatgtaaatggtaaaagttgttgtcaaatgcaaatgtttttgagtgcagaatatataatcttt

SEQ ID NO: 116981 - DNA, 929 bp, Arabidopsis thaliana
cttgaaaaagaatctacctgaaaagaaaaaaaagagagagagatataaatagctttaccaagacagatatactatcttttattaatccaaaaagactgagaactctagtaactacgtactacttaaaccttatccagtttcttgaaacagagtactctgatcaatgaactcattttcagctttttctgaaatgtttggctccgattacgagcctcaaggcggagattattgtccgacgttggccacgagttgtccgaagaaaccggcgggccgtaagaagtttcgtgagactcgtcacccaatttacagaggagttcgtcaaagaaactccggtaagtgggtttctgaagtgagagagccaaacaagaaaaccaggatttggctcgggactttccaaaccgctgagatggcagctcgtgctcacgacgtcgctgcattagccctccgtggccgatcagcatgtctcaacttcgctgactcggcttggcggctacgaatcccggagtcaacatgcgccaaggatatccaaaaagcggctgctgaagcggcgttggcttttcaagatgagacgtgtgatacgacgaccacggatcatggcctggacatggaggagacgatggtggaagctatttatacaccggaacagagcgaaggtgcgttttatatggatgaggagacaatgtttgggatgccgactttgttggataatatggctgaaggcatgcttttaccgccgccgtctgttcaatggaatcataattatgacggcgaaggagatggtgacgtgtcgctttggagttactaatattcgatagtcgtttccatttttgtactatagtttgaaaatattctagttcctttttttagaatggttccttcattttattttattttattgttgtagaaacgagtggaaaataattcaatac

SEQ ID NO: 116982 - DNA, 908 bp, Arabidopsis thaliana
cctgaactagaacagaaagagagagaaactattatttcagcaaaccataccaacaaaaaagacagagatcttttagttaccttatccagtttcttgaaacagagtactcttctgatcaatgaactcattttctgctttttctgaaatgtttggctccgattacgagtcttcggtttcctcaggcggtgattatattccgacgcttgcgagcagctgccccaagaaaccggcgggtcgtaagaagtttcgtgagactcgtcacccaatatacagaggagttcgtcggagaaactccggtaagtgggtttgtgaggttagagaaccaaacaagaaaacaaggatttggctcggaacatttcaaaccgctgagatggcagctcgagctcacgacgttgccgctttagcccttcgtggccgatcagcctgtctcaatttcgctgactcggcttggagactccgaatcccggaatcaacttgcgctaaggacatccaaaaggcggcggctgaagctgcgttggcgtttcaggatgagatgtgtgatgcgacgacggatcatggcttcgacatggaggagacgttggtggaggctatttacacggcggaacagagcgaaaatgcgttttatatgcacgatgaggcgatgtttgagatgccgagtttgttggctaatatggcagaagggatgcttttgccgcttccgtccgtacagtggaatcataatcatgaagtcgacggcgatgatgacgacgtatcgttatggagttattaaaactcagattattatttccatttttagtacgatactttttattttattattatttttagatccttttttagaatggaatcttcattatgtttgtaaaactgagaaacgagtgtaaattaaattgattcagtttcagtat

SEQ ID NO: 116983 - DNA, 1534 bp, Arabidopsis thaliana
ctaatacgactcacttggggaacagctggtacgcctgcaggtaccggtccggatttcccgggtgctgtctgataaaaagaagaggaaaactcgaaaaagctacacacaagaagaagaagaaaagatacgagcaagaagactaaacacgaaagcgatttatcaactcgaaggaagagactttgattttcaaatttcgtcccctatagattgtgttgtttctgggaaggagatggcagtttatgatcagagtggagatagaaacagaacacaaattgatacatcgaggaaaaggaaatctagaagtagaggtgacggtactactgtggctgagagattaaagagatggaaagagtataacgagaccgtagaagaagtttctaccaagaagaggaaagtacctgcgaaagggtcgaagaagggttgtatgaaaggtaaaggaggaccagagaatagccgatgtagtttcagaggagttaggcaaaggatttggggtaaatgggttgctgagatcagagagcctaatcgaggtagcaggctttggcttggtactttccctactgctcaagaagctgcttctgcttatgatgaggctgctaaagctatgtatggtcctttggctcgtcttaatttccctcggtctgatgcgtctgaggttacgagtacctcaagtcagtctgaggtgtgtactgttgagactcctggttgtgttcatgtgaaaacagaggatccagattgtgaatctaaacccttctccggtggagtggagccgatgtattgtctggagaatggtgcggaagagatgaagagaggtgttaaagcggataagcattggctgagcgagtttgaacataactattggagtgatattctgaaagagaaagagaaacagaaggagcaagggattgtagaaacctgtcagcaacaacagcaggattcgctatctgttgcagactatggttggcccaatgatgtggatcagagtcacttggattcttcagacatgtttgatgtcgatgagcttctacgtgacctaaatggcgacgatgtgtttgcaggcttaaatcaggaccggtacccggggaacagtgttgccaacggttcatacaggcccgagagtcaacaaagtggttttgatccgctacaaagcctcaactacggaatacctccgtttcagctcgagggaaaggatggtaatggattcttcgacgacttgagttacttggatctggagaactaaacaaaacaatatgaagctttttggatttgatatttgccttaatcccacaacgactgttgattctctatccgagttttagtgatatagagaactacagaacacgttttttcttgttataaaggtgaactgtatatatcgaaacagtgatatgacaatagagaagacaactatagtttgttagtctgcttctcttaagttgttctttagatatgttttatgttttgtaacaacaggaatgaataatacacacttgtgaagaaacaaacaacaaggcaagccgctctagaggtccaagct

SEQ ID NO: 116984 - DNA, 1256 bp, Arabidopsis thaliana
cgcacgcgtcggggatattacaagggaaaggggtcaactccaattcaaagctctgattttttccaccaatccccattttttcccttttacaattcttaagctagttttatacttttcttcttcctttcatttgggttaagagaagccatggataccgagtttctccgaaccctagatcgtcagattcttttgggtgtcttcgttgctttcgtcgccgttggtgctggtgctgcttattttcttacatcctccaagaaacgcagagtgtgtttggatccagagaatttcaaggagttcaagcttgttaagagacatcagcttagtcacaatgtggccaagttcgtttttgaactcccaacttctacttctgtgttgggtcttcccattggacaacacatcagttgcaggggaaaggatggtcaaggagaggatgttattaagccatacaccccgactacgttagactctgacgttggacgtttcgaacttgtcattaagatgtatccgcaaggacggatgtctcatcatttcagggagatgcgtgttggagaccatcttgccgtaaagggaccaaagggtaggttcaagtatcaaccaggtcagtttagggcatttggaatgcttgctggaggttcaggcatcactcccatgttccaagtggccagagcaattctagaaaacccaacagacaagacaaaggtgcatctcatttacgccaacgtcacatacgacgacattctcttgaaggaagaattggagggtcttactaccaattaccctgaacaatttaaaatcttctatgttttgaaccagcctccggaagtatgggatggtggtgttggatttgtatcaaaggaaatgattcagactcattgccctgcacctgcatctgatattcagatcctaagatgcggaccaccgccaatgaacaaggccatggctgcaaaccttgaagctctgggatactctccggagatgcaattccagttctgatctgaatatcttcttttggttgctctgaaacggaactcataataatttagttacaatcccaactacgagagttgtgtcttaactgagtgagagttgtatttctgttgtgtgtttgttagcccacttgaaagtttccattgattggtttacgaattggttagacattttggttcacctataccggtttggtgcaaacactttgatgcttaaaaaaaaaacccaaagggcgaaagctctagaggatccaagcttacgtacgcgtg

SEQ ID NO: 116985 - DNA, 529 bp, Arabidopsis thaliana
  unsure (1)..(529): unsure at all n locations
actcacttangggaagctactacgcctgcaggtaccggtccggaattcccgggtctacccacgcgtccgaaaatcttctatgttttgaaccagcctccggaagtatgggatggtggtgttggatttgtatcaaaggaaatgattcagactcattgccctgcacctgcatctgatattcagatcctaagatgcggaccaccgccaatgaacaaggccttgtcttgcaaaccttgaagctctgggatactctccggagatgcaattccagttctgatctgaatatcttcttttggttgctctgaaacggaactcataataatttagttacaatcccaactacgagagttgtgtcttaactgagtgagagttgtatttctgttgtgtgtttgttagcccacttgaaagtttccattgattggtttacgaattggctagacattttgcgttcacctataccgggtttggtgcaaacactttgatgctaaaaaaaaaaaaaaaaggccggccgctctagaggatccaagcttac

SEQ ID NO: 116986 - DNA, 826 bp, Arabidopsis thaliana
  unsure (1)..(826): unsure at all n locations
nnnnnnnnnnnnnnnnnnnnnnnnnnnnnnnnnnnnnnnnnnnnnnnnnnnnnnnnnnnnncggccacgcgtccggagcttcggagctatcgaaaattctgaatctgaaaggtttgagtgaagatgtcttcagatcggaaggttctaagttttgaagaagtttcaaagcacaacaaaactaaggattgttggcttattatttccggcaaggtgtatgatgtgactccattcatggatgatcatcctggaggcgatgaagtcttgttgtcctcaacagggaaagatgctacaaatgattttgaagacgttggtcacagcgacactgcaagggacatgatggacaaatatttcattggtgagattgattcgtctagtgttccagcaactaggacatacgttgcaccacagcaaccagcctacaaccaagacaagacaccagaattcattatcaagattcttcagttccttgttccgatcttgatcttgggattggctcttgtcgtccgtcactataccaagaaagactagaagaagccaaaggcttgctttgatgcttgtcattgaatatctctaccgatctctgtctatctctcttgcgaaaaaaagtactgttactgttgtttggtcttagactgattcttgttgaaattacgaaccaaaaatcattgtgttgctactagttttactgtgttgagtttatgatgacagtgttttcgactttgatgatataataaaagactgcttgatttgcccaaaaaaaaaaataaaaaaagatagggcggccgctctagaggatccaagcttacgtacgcgtgcatgcgtcgtc

SEQ ID NO: 116987 - DNA, 831 bp, Arabidopsis thaliana
  unsure (1)..(831): unsure at all n locations
nnnnnnnnnnnnnnnnnnnnnnnnnnnnnnnnnnnnnnngannnnnnagcggttggtgtaagatcccaaactcacatattcccaaataatagtaatactcttcctcttctcaactctcaccagtcaccagcagatcatcggagatgggcggagacggaaaagttttcaccttgtccgaggtttctcagcacagtagcgccaaggattgttggatcgtcatcgacggcaaggtttatgatgtgacaaagttcttggatgatcatcctggtggtgatgaggttatcttgacttctacagggaaagatgcgaccgatgatttcgaggatgtgggacatagttcgactgcgaaagccatgctagatgagtactatgtgggtgatattgacacagctactgtgccggttaaagctaagtttgtgcctcctacgtcgacgaaagccgtggctactcaggataagagctcggattttgttattaagctccttcagttccttgttccacttctaatcttaggcttggctttcggcattcggtactacactaagaccaaggctccttcttcttgaaagattgaattgtggcctaagtgaattgcttgtgtacgacgtggttaaactctgtctctacctctgtttgtcttgtaagacatcattatattctctattccaatcaactgatagacctttgatttttaagccatctacctttgttgtcttatatcaatcaaatccatttacaaaatcactccaaaaaaaaaaaaaagggcgcgcgctctagaggatccaagcttacgtacgcgtgcatgcgacgtcatagctcttctataggtca

SEQ ID NO: 116988 - DNA, 631 bp, Arabidopsis thaliana
  unsure (1)..(631): unsure at all n locations
agcggttggtgtaagatcccaaactcacagattcccaaataatagtaatactcttcctcttctcaactctcaccagtcaccagcagatcatcggagatgggcggagacggaaaagttttcaccttgtccgaggtttctcagcacagtagcgccaaggattgttggatcgtcatcgacggcaaggtttatgatgtgacaaagttcttggatgatcatcctggtggtgatgaggttatcttgacttctacagggaaagatgcgaccgatgatttcgaggatgtgggacatagttcgactgcgaaagcatgctagatgagtactatgtgggtgatattgacacagctactgtgccggttaaagctaagtttgtgccctcctacggcgacggaaagccgtggctactcaaggctaagagctcgggttttgtttattaaggtccctcaagtccctggttccccttttcaaactttagggtttgggttttcgggattcggaccttcacttaggccaagggtccttttttcttaaaaggtttaattttggcccaagggaatttcttttttccgccggggtaaaacctggctttnccccggtttcttnnaggaacnttttttncctntccaatacctaa

SEQ ID NO: 116989 - DNA, 1314 bp, Arabidopsis thaliana
attaccgtcaccggtgagattcctccaaaatcgggactttttctcaggacgtttgagatgcattcgcgctccgccttgctctatagattcctccgtccggcgtcgagatgcttctcctcttcctcggctgtaactccggtcaccgtaacgcaatctcccaagagtctcgaggctcttcgagctcggctggcgaatgagtcgccttccctaaccgatttcatccacggcgatacctattcggtggaagttggaaccaaaaagaaacctctcccgaaacctaaatggatgaaggaatcaattcccggcggcgagagatatgtccagatcaagaagaaattgagagaccttaagcttcacaccgtctgcgaggaagcgaaatgtcccaatctcggtgagtgctggtctggtggtgaaactggaaccgccaccgctacgattatgatccttggggatacatgtacacgcggctgcaggttttgtaatgtgaagacatcgcgtacacctccaccgcctgatccaaatgaacctaacaatgtggctgaagcaattgcttcctggggggttgattatgttgtgatcaccagtgtagatcgagatgatttacctgatcaagggagtggtcattttgctgaaactgttcagagattgaaattcttgaagccggagatgttgattgaagcactagttcctgatttccgcggagatggtggatgtgttgagaaggtttccaagtcagggcttgatgtcttagctcacaacattgagacagttgaagagcttcagagttttgtgcgggaccatcgtgctaactttaagcagtcattggatgtgcttaggatggctaaggagtatgcacctgcaggcaccttaacaaagacttctgtaatgctgggatgtggagagacccctgatcaagtggttaagacaatggagaaggtgagagcagcaggggttgacgttatgacatttggccaatatatgcgaccatctaaacgccacatgccagtagctgagtacgtgacaccagatgccttcgagaggtatcgccttcttggcatggaaatgggattcagatacgtagcatcaggaccaatggtgaggtcgtcgtacaaagcgggagagtactacataaagtcgatgatagaagccgatcgagtggcttctccttctacatccccgtagattacacactataatatgtgaattctttcactttattgctttgtttcttctgcgggtaagccattcacaacacttatccgccacattctgaataatgtaatactattattgtccaatcttccatgtgtgtct

SEQ ID NO: 116990 - DNA, 2056 bp, Arabidopsis thaliana
  unsure (1)..(2056): unsure at all n locations
cagacgcgtgggtggtttttgagaattgagaaaacccttttaaaattctctatcgatctcatcacaaattttgctatatccacaattcatgtgcttaggcatatagttattcccaagaaaccggtttaactgtttacgtatgcaacctccggcaagcgcaggacttttccggtcgccggaaaatctcccttggccttataattacatggattatttggtcgctggtttcttggttttgacggccggaatacttctccgtccatggctctggtttcgtctacgaaactcgaaaacgaaagatggagatgaagaagaagataatgaggagaagaagaagggaatgattccaaacggaagcttaggctggccggtgatcggagaaaccctaaacttcatcgcttgtggttattcttctcggcctgttaccttcatggacaaacgaaagtctttatacgggaaagtgttcaaaacgaacataatagggacaccaatcataatatcaaccgatgcagaggtgaataaagtggtgctccaaaaccatgggaacacatttgtccctgcataccctaaatcaattacggaactacttggagaaaactctattctcagcatcaatggacctcatcaaaaaaggcttcacacgctcattggcgcgttcctcagatctcctcacctcaaagaccggatcactcgagacattgaggcctcggttgttctcactttggcgtcttgggctcaacttccattggttcatgttcaggatgagatcaaaaagatgacgtttgagatattagtaaaagtgttgatgagcacatctcctggtgaagatatgaacattctcaaacttgagttcgaagaattcatcaaaggtttgatttgtatcccaatcaaattccctggcactagactctacaaatccttaaaggcgaaagagaggttaataaagatggtaaaaaaggttgtggaggagagacaagtggcgatgacaacgacgtctccggcaaatgacgtggtggacgtacttctaagagacggtggtgattcagagaagcaatctcaaccgtcagatttcgtcagcggaaagatcgtagagatgatgatacccggagaggaaacaatgccaacggcgatgaccttggctgtcaaattcttaagtgacaaccccgtcgctctagccaaactcgtggaggagaatatggagatgaagaggcgtaaattggaattgggagaagaatacaagtggaccgattatatgtctctctcttttactcaaaatgtgataaacgaaacgcttagaatggctaacattattaacggggtgtggaggaaagctctcaaggatgtagaaattaaaggttacttaataccgaaaggatggtgtgtattggcatcattcatatcggttcacatggatgaagacatttatgataatccctatcaattcgatccgtggagatgggacagaattaatggatcggcaaacagcagtatttgcttcacaccctttggtggtgggcaaaggctatgtcctggtttagagctgtcgaagctcgaaatatccatctttcttcaccaccttgtaacccggtacagttggacggctgaggaagacgagatagtgtcatttccgactgtgaagatgaagcggaggctcccgatccgagtggctactgtagatgatagtgcttctccgatctcacttgaagatcattaatagatcatttcaaagaacaaaactgtttgtgcaaagaggaagcagagaagtaaacaaatgatcttattaacaaatagtagagaagagaagcaaacaagattggtgggtaagacagaaagaaccaaacgtacagctagtgatggctcaaagatgagagattctaattataattttttttgtttgtcatgtcaaattataagcgttggttaggttgtccctttctcttttatttatcgtaccaaacgcaagttgagatatgattccatatatatggatgatagatatgtatattaatataaccctcctcctttaaaaaaaaaaaaaaaggggggcgncnggggc

SEQ ID NO: 116991 - DNA, 948 bp, Arabidopsis thaliana
ttttaaaatctcaacagcttccaaaaccaaacaacaaaaaaacattcttaataattatctttctgttatgtcgatgacggcggattctcaatctgattatgcttttcttgagtccatacgacgacacttactaggagaatcggagccgatactcagtgagtcgacagcgagttcggttactcaatcttgtgtaaccggtcagagcattaaaccggtgtacggacgaaaccctagctttagcaaactgtatccttgcttcaccgagagctggggagatttgccgttgaaagaaaacgattctgaggatatgttagtttacggtatcctcaacgacgcctttcacggcggttgggagccgtcttcttcgtcttccgacgaagatcgtagctctttcccgagtgttaagatcgagactccggagagtttcgcggcggtggattctgttccggtcaagaaggagaagacgagtcctgtttcggcggcggtgacggcggcgaagggaaagcattatagaggagtgagacaaaggccgtgggggaaatttgcggcggagattagagacccggcgaagaacggagctagggtttggttaggaacgtttgagacggcggaggacgcggcgttggcttacgacagagctgctttcaggatgcgtggttcccgcgctttgttgaattttccgttgagagttaattcaggagaacccgacccggttcgaatcaagtccaagagatcttctttttcttcttctaacgagaacggagctccgaagaagaggagaacggtggccgccggtggtggaatggataagggattgacggtgaagtgcgaggttgttgaagtggcacgtggcgatcgtttattggttttataattttgatttttctttgttggatgattatatgattcttcaaaaaagaagaacgttaataaaaaaattcgtttatc

SEQ ID NO: 116992 - DNA, 1016 bp, Arabidopsis thaliana
  unsure (1)..(1016): unsure at all n locations
agataaatcaatcaacaaaacaaaaaaaactctatagttagtttctctgaaaatgtacggacagtgcaatatagaatccgactacgctttgttggagtcgataacacgtcacttgctaggaggaggaggagagaacgagctgcgactcaatgagtcaacaccgagttcgtgtttcacagagagttggggaggtttgccattgaaagagaatgattcagaggacatgttggtgtacggactcctcaaagatgccttccattttgacacgtcatcatcggacttgagctgtctttttgattttccggcggttaaagtcgagccaactgagaactttacggcgatggaggagaaaccaaagaaagcgataccggttacggagacggcagtgaaggcgaagcattacagaggagtgaggcagagaccgtgggggaaattcgcggcggagatacgtgatccggcgaagaatggagctagggtttggttagggacgtttgagacggcggaagatgcggctttagcttacgatatagctgcttttaggatgcgtggttcccgcgctttattgaattttccgttgagggttaattccggtgaacctgacccggttcggatcacgtctaagagatcttcttcgtcgtcgtcgtcgtcgtcctcttctacgtcgtcgtctgaaaacgggaagttgaaacgaaggagaaaagcagagaatctgacgtcggaggtggtgcaggtgaagtgtgaggttggtgatgagacacgtgttgatgagttattggtttcataagtttgatcttgtgtgttttgtagttgaatagttttgctataaatgttgaggcaccaagtaaaagtgttcccgtgatgtaaattagttactaaacagagccatatatcttcaatccataaacaaaatagacactttaacnnnnnnnnnnnnnnnnnnnnnnnnnnnnnnnnnnnnnnnnnnnnnnnnnnnnnnnnnnnnnnnnnnnnnnnnnnnnnnnnnnnnnnnnnnngga

SEQ ID NO: 116993 - DNA, 770 bp, Arabidopsis thaliana
taggtaccactatagaagagttatgacgtcgcatgcacgcgtacgtaagctcggaattcggctcgaggactcctcaaagatgccttccattttgacacgtcatcatcggacttgagctgtctttttgattttccggcggttaaagtcgagccaactgagaactttacggcgatggaggagaaaccaaagaaagcgataccggttacggagacggcagtgaaggcgaagcattacagaggagtgaggcagagaccgtgggggaaattcgcggcggagatacgtgatccggcgaagaatggagctagggtttggttagggacgtttgagacggcggaagatgcggctttagcttacgatatagctgcttttaggatgcgtggttcccgcgctttattgaattttccgttgagggttaattccggtgaacctgacccggttcggatcacgtctaagagatcttcttcgtcgtcgtcgtcgtcgtcctcttctacgtcgtcgtctgaaaacgggaagttgaaacgaaggagaaaagcagagaatctgacgtcggaggtggtgcaggttaagtgttaggttggtgattagacacgtgttgatgagttattggtttcataagtttgatcctgtgtgttttgtagttgaatagttttgccataaatgttgaggcccccagtaaaaaaaaaaaaaaaaaaaaaagggcggccgctctaaaggatcccagcttacgtacgcgtgcatgcgacgtcaagattcttctatagtgtcgcccc

SEQ ID NO: 116994 - DNA, 1510 bp, Arabidopsis thaliana
gctttttgtgttgaagagagagtttcctatcttctccattcctcccaccatctccctcatcttcatcttcctctctctttctctctttctcaacaatctctattagatctttctccattaccattacctctggctttctcttaaatccaccatcatgaggagaggaagaggctcttccgccgtcgccggacctaccgtcgttgccgccatcaacggatctgtaaaagaaatcagattcagaggcgtaaggaagagaccttggggacgattcgcagctgagatccgtgatccatggaaaaaagctcgtgtttggttaggtactttcgattccgccgaagaagctgctcgcgcttacgactccgccgctcgtaacctccgtggtcctaaagccaaaactaatttccccatcgattcttcttctcctcctcctcctaatctccgatttaatcagattcgtaatcaaaatcaaaaccaagtcgatccgtttatggaccaccggttattcaccgaccatcaacaacagttcccgattgttaaccggcctactagtagcagcatgagcagcaccgttgaatcgtttagcggacccagacctacgacgatgaaaccggccacgacgaagagatatcctagaactccaccggttgttccggaggattgtcacagcgattgcgattcgtcgtcgtctgtaatcgacgacgacgacgatatcgcatcgtcttcacggcgacggaatccgccgtttcaattcgatcttaattttccaccgttggattgtgttgacttgttcaatggcgctgatgatcttcactgtaccgatctacgtctctaatgaattggtaaaatcaaactcaaaatcacagatccgtgatcggtttgattttaatcgaaaacacacaacaaaatccttttttttttttttttaaattttctgtttcgttgatctcatataatttttactatgcgggagaaatagaaagacaaagaaacgaagaagaagaagaagatggtgatgagcttgagagagcttgagctggttctgtgtttcttctgtgatgatattgtaagagtattattattttactattattactaaatcttcaaaaccaagaagaagaagaccgaacacgatgatctgttgtgtctgtttgttttactgtaagaaaaacgcagatctgggtttcgtttttttcttgagatagatcaaacaacccccatctttgtaacatatacatttggaacactcatgattctaaataaaaaatctagaatctttttttcatcttctagagctctgatgagttttgtccaaagatcagttcttgttcacgtgaattaagctagaagaaagacaaatgaagctagttttgtaacctgttcatggattgaatcttaacaagttctgtagcagtgagtgttttggttaattagagattaagatttttggttgttaaaaaaaaagaataaccaaaggtcggcagctctagaggatccaagcttacgcacgcgg

SEQ ID NO: 116995 - DNA, 1166 bp, Arabidopsis thaliana
  unsure (1)..(1166): unsure at all n locations
nnnnnnnnnnnnnnnnnnnnnnnnnnnnnnnnnnnnnnnnntatacgactcatatagggaaagctggtacgcctgcaggtaccggtccggaattcccgggtcggtcgacccacgcgtcccactctctctctaatctatctatccgagaatggccaagatgggcttgaaacccgacccggctactactaaccagacccacaataatgccaaggagattcgttacagaggcgttaggaagcgtccttggggccgttatgccgccgagatccgagatccgggcaagaaaacccgcgtctggcttggcactttcgatacggctgaagaggcggcgcgtgcttacgatacggcggcgcgtgattttcgtggtgctaaggctaagaccaatttcccaacttttctcgagctgagtgaccagaaggtccctaccggtttcgcgcgtagccctagccagagcagcacgctcgactgtgcttctcctccgacgttagttgtgccttcagcgacggctgggaatgttcccccgcagctcgagcttagtctcggcggaggaggcggcggctcgtgttatcagatcccgatgtcgcgtcctgtctactttttggacctgatggggatcggtaacgtaggtcgtggtcagcctcctcctgtgacatcggcgtttagatcgccggtggtgcatgttgcgacgaagatggcttgtggtgcccaaagcgactctgattcgtcatcggtcgttgatttcgaaggtgggatggagaagagatctcagctgttagatctagatcttaatttgcctcctccatcggaacaggcctgagcttttaacggtgtcgtttcaattcgaagcgcatgcgtttcttcttctttttgagctgtgaaaattcgttttctcatagtttttcctctctctctctctcagtctaaatttattaccagtttttagaaagaaaaaacagattaaatctgagagagaaaaatataattttagctgacatggatcgttatgtacatattattacataaccggagatctgaacttttgttgtgtgcttttaattttttgcgacttggtttcaccccatgttgtttctctattttttttactactttttttttttttgttcttccaaattttcaatcaataatttggtaatcttccaggaaaa

SEQ ID NO: 116996 - DNA, 1178 bp, Arabidopsis thaliana
  unsure (1)..(1178): unsure at all n locations
aattttatcaatggcgactcctaacgaagtatctgcactttggttcatcgagaaacatctactcgacgaggcttctcctgtggctacagatccatggatgaagcacgaatcatcatcagcaacagaatctagctctgactcttcttctatcatcttcggatcatcgtcctcttctttcgccccaattgatttctctgaatccgtatgcaaacctgaaatcatcgatctcgatactcccagatctatggaatttctatcgattccatttgaatttgactcagaagtttctgtttctgatttcgattttaaaccttctaatcaaaatcaaaatcagtttgaaccggagcttaaatctcaaattcgtaaaccgccattgaagatttcgcttccagctaaaacagagtggattcaattcgcagctgaaaacaccaaaccggaagttactaaaccggtttcggaagaagagaagaagcattacagaggagtaagacaaagaccgtgggggaaattcgcggcggagattcgtgacccgaataaacgcggatctcgcgtttggcttgggacgtttgatacagcgattgaagcggctagagcttatgacgaagcagcgtttagactacgaggatcgaaagcgattttgaatttccctcttgaagttgggaagtggaaaccacgcgccgatgaaggtgagaagaaacggaagagagacgatgatgagaaagtgactgtggttgagaaagtgttgaagacggaacagagcgttgacgttaacggtggagagacgtttccgtttgtaacgtcgaatttaacggaattatgtgactgggatttaacggggtttcttaactttccgcttctgtcgccgttatctcctcatccaccgtttggttattcccagttgaccgttgtttgattagttttttttgagtttttgaacgatgtgtatgctgacgtggacgtacacgtaggtgcatgcgatgaaaaaaacatctatttgttcatatttttgcgtttttctatttgttcattctttttcacaattcacaatacattatttcagttaatgatcacggataatttagctttaaaaaaaaaaaaaacccaaaccaaagnnnnnnnnnnnnnnnnnnnnnnnnnnnnnnnnnnnnnnnnnnnnnnnnnnnnnnnnnnnnnnnnnn

SEQ ID NO: 116997 - DNA, 3973 bp, Arabidopsis thaliana
  unsure (1)..(3973): unsure at all n locations
atgcataaactagaatgaccaacaaagatactctcaaagtctcacttgtctaaaaaacagataaaaatcatttccaattttgagaaaaggaaaaaaaacaactccaataatactttttgattttcttttcgttgcattaaaataaatgtggcaaaaatccaataatattactattataagttaaaaaaactcaaaaaaaaaaaaagtatattccgtcaactttttctcagtccggttcaatcatctccatcatcgttgatctctctctctccgtcaacgttctctctataaagcagagagtttcacagcgcgtgaaaaatggcttttcccacttagccacaacgacgcgtttcaattctccatctctccctctctctctctctttcttcaaagattccaccaacctatacatatacttatatataatctatgctacgtgtatatacttccgatatccttcaaccaactctttgaattccgactttggatctatgaaaccgttctcaaagaacgatcggcgacggtggtcatttgattcagtttccgccggaaaaaccgccgtcggaagtgcatcaacttcaccgggaactgaatactccattaacggtgatcaagagttcgttgaagtcacaatcgatcttcaagacgatgacacaatcgttcttcgtagcgtcgagccagcaaccgccattaatgtcatcggagatatctccgacgacaacaccggaataatgactccggtttcgatttcgagatctccgacgatgaaacgaacttcatctaatcggttccgacaattctcacaagagcttaaagccgaagctgtggcgaaagcgaaacagttatctcaggagttgaaacgattctcatggtctcgttctttctcaggtaacttaaccactactagtaccgccgctaatcaaagcggcggtgctggtggtggtttggtgaactcggctttagaagcgcgagcgttgcgaaagcaacgtgctcagttagatcggactcggtctagtgctcaaagagctcttcgtggtttgagattcattagcaataagcaaaagaacgttgatggttggaacgatgttcaatcaaatttcgaaaaattcgaaaaaaatggttacatctatcgctccgatttcgctcaatgcataggaatgaaagattcgaaagaatttgcattggaactgttcgatgcattgagtagaagaagaagattaaaagtagagaaaatcaatcacgatgagctttatgagtattggtcacaaatcaacgacgagagttttgattctcgtctccagatcttcttcgacatagtggacaagaatgaagatgggagaattacagaagaggaagtaaaagagataataatgttgagtgcatctgcaaataagctatcaagattaaaggaacaagcagaggaatatgcagctttgattatggaagagttagatcctgaaagacttggctacatagagctatggcaactagagactttgcttctacaaaaagacacatacctcaattacagtcaagcattgagctatacgagccaagcattgagccaaaaccttcaagggttaaggggaaagagtcgaatacatagaatgagttcggatttcgtctacattatgcaagagaattggaaaaggatatgggttttatccttatggatcatgatcatgatcggattattcttgtggaaattcttccaatacaagcaaaaagatgcatttcatgtgatgggatattgtttactcacagccaaaggagcagctgaaacacttaaattcaacatggctctaatacttttcccagtttgcagaaacaccattacttggcttagatccacaagactctcttacttcgttccttttgatgataatatcaacttccacaagacaattgctggagccattgtagtagctgtgatccttcatattggagaccatcttgcttgtgatttccctagaattgttagagccaccgaatacgattacaatcggtatctgtttcattactttcaaacaaaacagccaacatacttcgacctcgttaagggacctgaaggaatcactgggattttaatggtcattttgatgattatttcattcacattagcaacaagatggtttaggcgtaacctagtcaagcttcctaagccatttgatcgactaaccggttttaacgccttttggtattcgcatcatttgttcgtcattgtttatatcttgcttattcttcatggtatcttcctctatttcgccaagccttggtatgttcgtacgacatggatgtatcttgcagtaccagttttactctatggtggagaaagaacacttaggtacttccgttctggttcttattcggttcgactgcttaaggttgctatatatcctggtaatgttctaacgctacaaatgtcgaaaccaactcaatttcgttacaaaagcggacaatacatgtttgtccaatgtcctgcggtttcgccattcgagtggcatccattctcaattacttccgcacctgaagatgattatatcagcattcacattagacaacttggtgattggactcaagaactcaaaagagtattctctgaagtttgtgagccaccggttggcggtaaaagcggacttctcagagccgacgaaacaacaaagaaaagtttgccaaagctattgatagatggaccgtacggtgcaccagcacaagattataggaaatatgatgttctcttattagttggtcttggcattggtgcaactccatttatcagtatcttgaaagatttgcttaacaacattgttaaaatggaagagcatgcggattcgatctcggatttcagtagatcatcagaatacagcacaggaagcaacggtgacacgccaagacgaaagagaatactaaaaaccacaaatgcttatttctactgggtcacaagagaacaaggctcttttgattggttcaaaggtgtcatgaacgaagttgcagaacttgaccaacggggtgtgatagagatgcataactatttaacaagtgtgtatgaagaaggtgatgctcgttctgctctcattacaatggttcaagctcttaatcatgccaaaaatggtgtcgacattgtctctggcactagggtcagaacacactttgcaagacctaattggaagaaggttctcacaaagctaagttccaagcattgcaatgcaagaacaggagtgttttattgcggagtaccggttttagggaaggagcttagcaaactatgcaacacattcaatcaaaaaggttcaaccaagtttgaatttcacaaggagcatttctaaaagacaagaaggaagaagccaaaagccctctagattctttaatatctcaaatttagccacttatagtataaaggcaatctcttcactatttaattcaaagtgattaaacgttaacacactgtcaaaagtgagtgtgttaacgtttagctccacacgttctaggtttatatacaccgaggcatacgtgtaaatatacgagacagaagaaattcaagggggtttgatagaagcatatagtaaaattttaaaatttcttgtatagtaagcaaatgagatggagactctagaagagaggtgaggtttggtgagggatagcgacagtaatacgacgtcgtattcgattgtagaggaagtgcaatacagctgcagggaagataaatgatggaagcaaataatgcgttgataaggtccatgtgattaggaagatgacactctttttgggggatatttttttctattttttttttagtggagtcggtgaaagagagactagagtttttagaatattggaagaatatttgggaataagggagttataatatttttgtatcattgtattatataactaatgtaaggtgtacaaagcataaaatttgatagttcctttcttctnnnnnnnnnnnnnnnnnnnnnnnnnnnnnnnnnnn

SEQ ID NO: 116998 - DNA, 1275 bp, Arabidopsis thaliana
ttttcaaaataaaaattgaaaaaaccaaaaagacacactcataaaagatttattttagagaacaaaaaaatcagaaatataaaaaactgtcttaaggaagagaaaggaacaaaagaaaacagatgtgagctcttcttcttcgtcttcttctctctattttattctcatcctctcctcacagttactataagctcgtctatggccagagacggtggtgtttcttgtttacgaaggtcggagatgatgagcgtcggtggtatcggaggaattgaatctgcgccgttggatttagatgaagttcatgtcttagccgttgatgacagtctcgttgatcgtattgtcatcgagagattgcttcgtattacttcctgcaaagttacggcggtagatagtggatggcgtgctctggaatttctagggttagataatgagaaagcttctgctgaattcgatagattgaaagttgatttgatcatcactgattactgtatgcctggaatgactggttatgagcttctcaagaagattaaggaatcgtccaatttcagagaagttccggttgtaatcatgtcgtcggagaatgtattgaccagaatcgacagatgccttgaggaaggtgctcaagatttcttattgaaaccggtgaaactcgccgacgtgaaacgtctgagaagtcatttaactaaagacgttaaactttccaacggaaacaaacggaagcttccggaagattctagttccgttaactcttcgcttcctccaccgtcacctccgttgactatctcgcctgaatcgtcgccgccgttgactgtttcgactgaatcgtcggattcgtctccgccgttatctccggtggagatcttttccacctcgccactttcatctccgatagacgatgaagatgatgacgtgttgacgtcgtcgtcggaggaatcgccgattcgacggcagaagatgaggagtcccggattagattagtggaactattctgggatgccgtgtaatattatctatctccgttaacttcgtttttacctctgacggtgtttttaattgcacgttgacttgacgccgtcaaattttatagatgtccctttaatctctcgcgcctccacgtgggccttttttccttttccttaaagcttttcgaatatcttttaattattttaatttctgcacaaagttacgtttttaacttttggagccgcggcccctcgggaacttggcaatcgaaccttcgacattcaccatttattatgataacgagacttgaat

SEQ ID NO: 116999 - DNA, 1379 bp, Arabidopsis thaliana
atttttctcttttccctctccttctttcttcctttataaatccatttattctcctctcatctctcagcaaaatcaaatcctcatagttgattctctctatctctctcacgagtcacgatcctactcttcttgatatggctgaggttttgcgtcccgagatgttagatatctctaacgacacttcttcattagcatcaccgaaacttcttcatgttcttgctgttgatgatagtatggttgatcggaagttcatcgagcggttactcagagtctcatcttgtaaagttactgttgtcgatagtgcgacaagagctttacaatatcttggattagatggagagaataatagttcggttggatttgaggatctgaagattaatttgataatgacggattactctatgcctgggatgactggatatgaactactgaagaagatcaaagaatcatcagctttcagagaaataccagttgtgattatgtcttcagagaacatcttgcctcgtatcgatagatgtcttgaagaaggagctgaagatttcttattgaagcctgtgaaattagctgatgtgaagagattaagagattctttaatgaaagctgaggaaagagcttttaagaatattatgcacaagagagagcttgaagctaatgatatctactcgcagctaaaacgcgcaaagatctgagtttatcagattccacgtacgatatgttctttaaaagctcaaagattcacacacatgcatgtcctgattctttcggcttacaatttttgagacattacggcttcttttgctgatagaaccaagactgatcaagagtgacaaagatgggtttttataagatagaaatgtaaattgtagacttggattcattagagaggagaagagatacattttttttttctttacatgagagatatgtaaaatggtggtgtgttattttggaagttaacatatgaatttcttttgtttagttcttttcgccttcatttgcgtgggaaaaagcgttgttcacaatatatgatttttttgttacattacttaaataatgatttaggaatggattagtaccgttcattacacgaggacaagctaatcttttcctaattaaaataaagctgtctatatgaatcgaatccagcgagataagttagttattttaagcgttggttgggaccactttacatggcttttcttagaaatttccccaagttgggttttattaagaccaagaaaattctagtccctagactgttcatctatctgaaagccaaaaatggtatgcaatccggtatatcctatagccaaaaaaacaactaaaattaatccggtccagttactcctaatccaccaattaaattcaatgccaaaacg

SEQ ID NO: 117000 - DNA, 806 bp, Arabidopsis thaliana
atcttctttcattttatcacattcatttcctttgtcttcaatccaaagctttcctcttcttggaaccaatctgctctcttttttattctgagtttgacaatggcggttggtgaggtcatgaggatggagattcccgccggtggagatttgactgttactactccggagttgcatgttcttgccgtcgatgatagtattgtggatcgtaaagtcatcgagaggttgcttagaatctcttcttgtaaagtgacgactgtagagagtggaactaaggctttgcagtatcttggcttagatggaggcaaaggggcttctaatcttaaggatttgaaggtgaatttgatagtgacggattactcaatgccaggactttcaggatatgatctccttaaaaagattaaggaatcttcagcattcagagaagtaccagtagtgattatgtcatctgagaacatcttacctcgtatacaagaatgtctcaaagaaggagcagaggaattcttgttgaaaccggtgaagctagcagatgtaaagcgaatcaaacaacttataatgaggaatgaagctgaggaatgcaaaatcttaagccattctaacaagagaaagcttcaagaagacagtgatacatcatcatcaagtcatgatgatacttctatcaaggactcttcatgttcaaaacgaatgaaatcagaatctgaaaaccttttttctctactttgaattatatgtatagaggccaagaccttagcaaaaccattctgttaatattcctcaagaaagacaatgtttgagagagtcatcacact

SEQ ID NO: 117001 - DNA, 980 bp, Arabidopsis thaliana
ctctcgtcgaaagcaaaacagtctcctttctctatcttctgctcatatcagccattgacacagttgctttgggtttccctcaaacggcgccgattgtctggattttgaccactgatggccttagatcaatcttttgaagatgctgctttacttggagaactctatggagaaggtgcattttgtttcaagagcaagaaacctgaacccattacagtctcggttccttctgatgatactgatgattcgaattttgactgcaatatttgcttagactcggtgcaagaacctgttgtgactctctgtggtcacctcttttgctggccttgtattcacaaatggcttgatgtacagagcttctcaacaagtgatgaataccaaagacatagacagtgtcctgtttgtaaatctaaagtttctcattctactttggttcctttgtatggtagaggccgttgtactactcaggaggaaggtaaaaacagtgtgcctaaaagacccgtaggaccggtttatcggcttgaaatgccgaattcaccttatgcaagtactgatctgcggttatcacaacgggttcatttcaatagcccacaggaaggttactaccctgtctcaggggtgatgagctcgaacagtttatcatactctgctgttttggatccggtgatggtgatggttggagaaatggtagctacgaggttgtttggaacacgagtgatggatagatttgcgtatccggacacttacaatctcgcagggactagcgggccgaggatgagaaggcggataatgcaggcagataaatcgctgggaagaatcttcttcttctttatgtgttgtgttgttctgtgtcttctcttgttttaggttttcatagctagcttggttctgctactgttcagtttcttcaggtgtaaggaaaacatagtcaaagaaatgtacatttgtgttggaaacaaatcaaagttgcttaatgttgaggg

SEQ ID NO: 117002 - DNA, 2281 bp, Arabidopsis thaliana
  unsure (1)..(2281): unsure at all n locations
aacggattctctaaagtgcgccaagcgtgcgcaagagccatcatgtcctacgcatctctcagcgtcaaggacctgaccagccttgtttcaagatccggaaccggttcgtcttcttcgctcaagcctccgggtcagacccgccccgtcaaggtcatcccgcttcagcatcctgacacctccaatgaagctcgtcctccttcgattcctttcgacgatatcttctccggatggacggcgaagatcaagcgcatgaggctcgtcgattggattgatactctctttccttgtttccgatggattcgaacttaccgatggagcgagtattttaagctcgatctcatggctggtatcaccgtcggtataatgcttgttccccaggcaatgtcgtatgcgaaactagctggccttccaccaatttacggtctatactcttcatttgtgccggtatttgtctatgccatatttggctcatcccgtcagcttgcaattggacctgtagcattggtttctcttctcgtctctaatgctttgggtggaatcgctgatacgaacgaggaattacatattgaattggccattttgttggcgcttttagttggaatcttggagtgcatcatggggctcttaaggcttggatggcttattcgtttcattagtcactcagtcatatctggatttacaagtgcttcggccattgtgattgggttatctcaaataaaatatttcctggggtatagcattgcccggagcagcaagattgtgccaatagtagagagcataatagctggagctgataagtttcagtggccacctttcgtgatgggatctcttattctggtgattcttcaagtgatgaaacatgtgggaaaagccaaaaaggaacttcagttcttacgagcagcagcgccactcaccgggattgtgctcggtacaaccattgcaaaagtgtttcatccgccttccatctctctggtgggagaaatacctcagggccttccaacattttctttcccaagaagttttgatcatgcaaaaacgttgcttccaacatcagctctcattactggtgttcccatcttggaatctgtgggaattgccaaagcgcttgccgcaaaaaacagatatgagttggattcaaattcagatttgtttggtcttggtgttgcaaatatattggggtcattattttctgcatacccagctacaggatccttttctaggtcagctgtgaataatgaaagtgaagctaagactggcctatcagggcttataacaggaatcatcattggatgttctctactgttcttgacaccgatgtttaaatacataccacagtgtgctttggcagcaatagtgatatctgccgttagtggcttggtggactatgacgaagctattttcctctggcgtgtggacaagagggatttttcgctttggaccatcactagcaccataacattgttcttcggaatagagatcggtgtccttgttggtgttggtttttcactagcattcgttatccacgagtctgcaaaccctcacattgctgtcttggggcggcttccaggcaccactgtgtacagaaacataaagcagtatccagaggcttacacatacaacgggattgtgatagttcgaatcgattctcctatttactttgccaacataagttacatcaaggacagactacgagaatatgaagtagctgttgacaaatacacaaaccggggactggaggtggatagaataaattttgtaatcctggaaatgtctcctgttacacacatagattcgagcgcagtggaagccttgaaagaactgtatcaagagtataaaacaagggatattcagctagcgatatcaaacccgaacaaagatgttcacttgacaatagcaagatcaggaatggtggagctagttggcaaggaatggttctttgtgagagtacacgacgccgtacaggtgtgtctacaatacgtacagagctctaacttggaggacaagcatttaagttttacgagacgatatggtgggagcaacaacaattcatcctcctccaacgcgctgttgaaggagccattgttatcagtggagaaataaaggatatgtaatgtaagtaatagctgtgtatagtttgttgcgattttgtaaaaacagtatacaatcttcattgtatcacctatataacaacattcttactcttcttttcccacaataaaaatagaccttgatgacctagaggatccaagcttacggacgcgtgcatgcgaagtcatagnnn

SEQ ID NO: 117003 - DNA, 745 bp, Arabidopsis thaliana
cgccggtatcgatatgctggatatcgaattcgcggccgcctgaccagccttgtttcaagatccggaaccggttcgtcttcttcgctcaagcctccgggtcagacccgccccgtcaaggtcatcccgcttcagcatcctgacacctccaatgaagctcgtcctccttcgattcctttcgacgatatcttctccggatggacggcgaagatcaagcgcatgaggctcgtcgattggattgatactctctttccttgtttccgatggattcgaacttaccgatggagcgagtattttaagctcgatctcatggctggtatcaccgtcggtataatgcttgttccccaggcaatgtcgtatgcgaaactagctggccttccaccaatttacggtctatactcttcatttgtgccggtatttgtctatgccatatttggctcatcccgtcagcttgcaattggacctgtagcattggtttctcttctcgtctctaatgctttgggtggaatcgctgatacgaacgaggaattacatattgaattggccattttgttggcgcttttagttggaatcttggagtgcatcatggggctcttaaggtaatactactatttttggttagaattcacataaggaaaacgtttattatcttgactgctacttatatagcttgcctgtgtagtaactggtatccggtaaagcagaagtctcctaattttggtggggcatgttgcgtctccctttgttg

SEQ ID NO: 117004 - DNA, 1825 bp, Arabidopsis thaliana
  unsure (1)..(1825): unsure at all n locations
cnnnnnnnnnnnnnnnnnnnnnnnnnnnnnnnnnnnnnnnnnnnnnnnnnnnnnnnnnnnnnnnnnnnnnnccacgcgtccgagaaaagcgacgccgttttaaaggagatggataaacaaccggcgaccagttggagtatccatacccggccggagataatcgccaagtacgagatcttcgagcgagtcggatccggagcttacgccgacgtttacagagctcgccgtctctccgacggtctaatcgtcgcgctcaaggagattttcgattaccaatctgcgttccgggagattgacgcgctcaccatcctcaatggatctcctaatgtagttgttatgcacgaatacttctggcgtgaggaagagaacgctgtgcttgtgcttgagtttcttaggtcggatctcgctgcggtgatccgagatggtaagaggaagaagaaggtagaaggaggggatggattctcggttggggagattaagagatggatgattcagattttaaccggtgttgatgcttgtcatcggaatttgattgtacatagagatttgaagcctgggaatatgttgatttctgatgatggagttcttaagcttgctgattttggtcaggctaggatactcatggagcatgatattgtagcttcagatgaaaaccaacaagcttacaaactggaagacaaagatggagaaaccagcgaaccaccagaagttattcctgattatgagaactcacctaggcaagggtctgatggtcaggaacgggaagcgatgagtaaagacgagtacttccgacaggtggaagagctcaaggctaaacaggttgttagagatgatactgataaggactcgaatgtgcatgatggagacatatcttgccttgcaacgtgcactgttagtgaaatggatgatgatctcggtaggaactcgttttcttacgatgctgacgaagcagtggatgatacacagggtttgatgacatcttgtgtgggaacccgatggtttaggccaccagaactgctctatggatctacgatgtatgggttagaggtcgatctatggtcgcttggttgtgtgtttgcagaactcttgtctcttgagcctttgttcccaggaatttcagatattgatcagatcagcagagtgaccaatgtgctgggaaatttaaatgaagaggtctggcctggttgtgttgatcttccagactacaagtcaatctcatttgctaaagtagaatctcctcttggtattgaaggatgccttcccaaccattcaggggatgtgatatcgctgctcaagaagcttatctgttatgatccagctagtagagctactactatggagatgctgaatgacaaatatttaagtgaagagcctcttccagttccagtttcagagctctatgtgcctccgacaatgagtggaccagatgaggattctccgagaaagtggaatgattacagagaaatggattcagattcagattttgatggctttggacccatgaatgtaaagcctaccagtagtggatttacaatagaattcccctgaccttggcatttaagagtccatggttgagcatcttgatcatcccgacttcccctgaattcgcctactttgtcaaaaatgtgttgtgtgtgtgtgtgtgttgttcctctctctctgcctccctcgtatgaaaatggtaacatttacaattggaaagtcggtgttagcctttagctattagctgaagagctagttttcttgttgcccaggccattctttaccctatttttcatctgaagtaacaatgaaacaaaatctatatatactcgagttttgcttt

SEQ ID NO: 117005 - DNA, 2526 bp, Arabidopsis thaliana
  unsure (1)..(2526): unsure at all n locations
cagctctctacgactcactattgggaaagctggtcacgcctgcaggtaccggtccggaattcccgggtcgacccacgcgtgcaactttctctctcttgcttctacgcttcttcttgtggcgtagattgttatagagagggaaaccaaaaaagggaatctcaaaagctcgagttcacagatttgacccgagtctttaatccaatctgctggttcgttttccacattcaaactcgactcttgaatatcaaatcagaagtctttgctatggctgctaccgctgctgcttctgttgtccgttacgcacctgaggatcatactcttcccaagccctggaaaggccttatcgatgatagaactggttacttgtacttttggaatcctgagaccaatgttactcagtacgagaaaccaaccccctctctacctcctaagttttctcccgccgtttctgttagctcttccgttcaggttcaacaaactgatgcctatgctcctcccaaggatgacgataagtactccagaggctctgaacgtgtgtccaggttttctgagggtggcaggagtggaccgccttattcgaacggtgctgctaatggagttggggattctgcttatggtgcagcatctaccagagttcctcttccttcatcagctccagcaagtgaactatcccctgaggcctattcccgccgtcatgaaattactgtcagtgggggccaagtaccaccacctctaatgtcctttgaagctactggttttccacctgagcttctgcgggaggtactcagtgcaggtttctctgctccaactccaattcaagctcagtcatggcccattgctatgcaaggtagggacatagtagccattgctaaaactggctcgggaaaaactttgggttacttgattcctggatttttgcatcttcaacgtatccgaaatgattcgcgaatgggcccaacaatcttggtattgtctccaacgagagagctggccacacaaatccaagaagaagctgttaaatttgggaggtcatcaagaatttcgtgtacgtgtttgtatggtggtgcaccaaagggccctcagttgagggatttagaaagaggagcagatatcgtggttgcaactcctgggagattgaatgatatccttgaaatgaggaggattagtctgcgtcagatatcttatcttgtgctagatgaggcagatagaatgttggacatgggttttgaacctcagataaggaagattgtgaaagaaattcccactaagcgtcaaacccttatgtacacagctacatggccaaagggagttaggaaaattgcagctgacttgcttgttaaccctgctcaagtcaacattggcaatgttgacgagcttgtggctaacaagtcaatcacacagcatattgaagtggtagcaccaatggagaaacagaggaggttagagcagatcttgcggtctcaggaaccaggctcaaaggtgataatattctgctcaaccaaaaggatgtgtgatcaactaacacgcaatctaacccgccaatttggagctgctgctatacatggagacaagtcccagcctgagagagacaatgttcttaatcaattccgcagtggcagaactccggttcttgtagcaaccgatgttgctgctcgtggtctggacgttaaggacatcagggcggtcgtaaactatgatttccccaatggagtggaagactatgttcatagaatcggaagaacaggaagagctggagcgactggtcaggcattcacattctttggtgatcaagattcgaaacatgcttcggatctgatcaagattttggaaggagcaaaccagcgagttcctcctcagatccgcgaaatggctacacgtggtggtgggggaatgaacaaattcagtcgttggggacctccttccggcggccgtggtcgtggtggcgactctggttatggtggcagaggtagctttgcttcccgtgacagaagcagcaatggatggggaagagagcgagaaaggagccgtagccctgagagattcaacagagctccaccaccgtcttccaccggatctcctcctcgcagcttccacgagacgatgatgatgaaacacagatgaaaagagagatacaaagctctgataaagccaagtgacagaagattgtgttgtgggggatttcccttatcattgtgacattatatattttttggccgatgaagaaacaaaagaaaaaaaaacaagaccaagaagactgttccctcccattggaaatttacgctcaaaactacaattgatatcttacagtttgtatttcatcttatttattattgcagctcagagattggtaagaatgtttcattagatacgaacgactttcttctaatactgtgggattctctagcatttaaattacaaatcaaagtggtaatattatgaaaaaaacagaaaaaaagnnnnnnnnnnnnnnnnnnnnnnnnnnnnnnnnnnnnnnnnnnnnnnnnnnnnnnnnnnnnnnnnntcccc

SEQ ID NO: 117006 - DNA, 639 bp, Arabidopsis thaliana
  unsure (1)..(639): unsure at all n locations
nnnnnnnnnnnnnnnnnnnnnnnnnnnnnnnnnnnnnnnnnnnnnnnnnnnnnnnnnnnnnnnnnnnnnnnnnnnnnnnnnnnccacgcgtccgggatggtgcttcttctgacatgagccaccattccataagcccaaaagaaccttggtgttccccttctcataggacagtgtggttttctgttttcttaggtactcagtgcaggtttctctgctccaactccaattcaagctcagtcatggcccattgctatgcaaggtagggacatagtagccattgctaaaactggctcgggaaaaactttgggttacttgattcctggatttttgcatcttcaacgtatccgaaatgattcgcgaatgggcccaacaatcttggtattgtctccaacgagagagctggccacacaaatccaagaagaagctgttaaatttgggaggtcatcaagaatttcgtgtacgtgtttgtatggtggtgcaccaaagggccctcagttgaggggtttagaaagaggagcagatatcgtggtttcaactccctgggngttgattntatncctgaantaggngggttangcntcggcaaaattntnatctttccnanatnggngnttgatttttggcccnggttttaacccc

SEQ ID NO: 117007 - DNA, 1346 bp, Arabidopsis thaliana
tgaaaaatacaaacccccttttatttctcctcttctctcctacaagctcattcagaactctcaacatttccggtagagaaaaaaaaaccgttttttttttaatctctttctaaagaaggatatcaaaacaaaacacaaagttgaaaactttgcatctgggtttgtctattttagattcagatcttagtttttttcgattgaatatctacaatggtaatggaaacagagtcaaagttccatgttttagctgttgatgatagtctttttgatcggaaaatgattgagagattgcttcaaaagtcttcatgtcaagtaactacagttgattcaggctctaaagctctggaatttctgggtttaagagtagatgacaacgacccaaatgcactctctacatcgccacaaattcatcaggaagttgaaataaatctaataattacagattactgtatgcctggcatgactggttatgatttgctcaagaaagttaaggaatcagcggcgtttagaagtatacctgtagttataatgtcatctgagaacgttcctgcaagaatctccagatgtttggaagaaggagctgaagagtttttcttgaaaccagtgaagttagctgatcttaccaagttgaaacctcatatgatgaaaacgaagttgaagaaagaaagtgagaaaccagttgccatagaagagattgtggtgtctaaaccggagatagaagaagaagaagaagagtcatcagtgattgaaatcttgcctctccaccaagaaattgaatccgaacaacttgaaccaatgttgagtagtaataagagaaaagcaatggaagaagtggtttctactgatcgatcacgtcctaaatacaatgatatcacaacctcggtctgaaggaggactaacgcaacccgagaagccactacaagacctatatggagaatgccaacagaatctctcagtagaagatctgctaactcttgaatatgaagcaaacaacaacggactgctaggagtaataccgcagcaacatcgttatcatcaggaaaaagagacaatgcagacacaaggagatccactaaatcgaatacctattcaatcagaagcttcaaaccattcagatagtggtgatagcacactaacaatggctcaaaaccaggatggtctcggacacagtagttgttttattctctgtcaatttacttctctcccctagattagctttcttcgtttttttcttttatttttcatgctgttaaacccacaagatttttgggaagtttcttgctactagcttaagaatccaaaactattgcaaagattgaagctttcgagaattagtaatgaatctt

SEQ ID NO: 117008 - DNA, 1115 bp, Arabidopsis thaliana
ggatcccagactctttatttctcttcctcacctaagcttcagcatcgtaaatttaaaactaaaatcgcatcaaatcccggagataggaaagaaaataattgattgtttctagtgaagaacaaaaaaaaaaagtcgaagactttacatctgggttcatcgatttgagataagatcttctttatttgttatcttcaagtttctgcaatgggtatggcagcagaatcgcagtttcatgttttagctgttgatgatagtttatttgatcggaaacttattgagagattgcttcaaaagtcttcgtgtcaagtaacaactgttgattctggctcaaaggctttggagtttctgggtttaagacaaagtactgatagtaacgacccaaatgcgttttctaaggctcctgttaatcaccaggtagttgaagtgaatcttataattacagattattgtatgcctggcatgactggttatgatttgctcaagaaagtcaaggaatcatcagcttttagagatataccagtagttatcatgtcctcagagaacgttcctgcaagaatcagcagatgtttagaagaaggagctgaagagtttttcttgaaaccagtaagattggctgatcttaacaagttgaaacctcatatgatgaaaacaaagttgaagaaccagaagctggaggagattgagacaacttcaaaagtcgaaaatggagtccccactgcagtagctgatccagagattaaagattcaacaaacattgaaattgaaatcttgcctctgcaacaagatctgctattagttcaacaagaggagcaaacattgagtatcaacaacaagaggaagtcagtggaagaagggatttcaactgatagagcacgtcctagattcgacggtatcgcaaccgctgtctgatctaccagctatgatacttcttttttcggtttctgatttagatttttgtagattttcttaggaatgcttctactggtacagtacatggtttcagtagggaatgcagagaggggaatatgatgatgatgttgtatgtggggataatgtttataagtacatcagtaaatcttacatggttaatcccccagttcccagttttgtttcct

SEQ ID NO: 117009 - DNA, 800 bp, Arabidopsis thaliana
gaatgtttgcgctccatttttgggttaccattactcagcttccgttttaaatatcacattagatggacgaaagcggaggtgatagtggttcagtggccacacctgttcaacagcgagcacatgaggcatggaggatttaccaacactatcttgacaagactacacctcatgcaaattacagatggattggaactcttgtcgtcgctcttatctactgtttgagggtttactatattcagggtttctacatcatcgcctatggtcttggaatctaccttctcaatctgcttatcgggttcttgtcccctcttgttgatcctgaagctggtggggtctctgatgggccttctctgcctactagaggttctgatgagttcaagcctttcattcgccgtctccccgagttcaaattctggtactccatgacaaaggctttctgcatagctttcctcatgacattcttctcggtgtttgacgttcctgtgttttggccaattctgctgtgctattggatcgttctctttgttctcaccatgagacgccagatcgcccacatgatcaagtacaaatacatccctttcagcttcggcaaacagaaatatggtggacggagcagcagcggctcacgtgcggattgatctgaccaatttgctgaccattagctactttttttgtctttgcaaaagagaaagaaaaaattgttaagaatatcattttggaccatttttacattgacaaaactatgcagagctataaggaagaattataggcaggataaaaaaggatggaaactaaacttg

SEQ ID NO: 117010 - DNA, 1029 bp, Arabidopsis thaliana
  unsure (1)..(1029): unsure at all n locations
gagcgtcgtcttctcttccttagccaaagccagatctgcttctttttcgctgcgtcgtcgagaggtctctctttgaggaagctaattccttcttcttcttcaccatccgtttcaagaataacaatggaaggaagcggtggtgacagtggttcgatggctacgcctgtacaaaagaaagtacatgaggcatggagggtttaccaatattatctggacaagactacacctcattcaactaacaggtggatcggaacacttgttgtctttcttatctactgtttgagggtttactctattcacggattctacatcatctcctatggtcttggaatctacctcctgaatctgcttatcgggtttttgtctcctcttgttgatcctgagctcgaggtatctgatggagctactctgcctactcgaggttctgatgagttcaagccatttatccgccgtctcccggagtttaaattctggtactccatgactaaggcattctgcatagcctttcttatgacattcttctcggtgtttgatgttcccgtcttctggcccatactgctttgctactgggtcgttctctttgtcctcaccatgagacgccaaatagcccacatgatcaagcacaagtacattcctttcagcatcggaaaacagaaatatagcggccggaaatcttctgcgaacagcggcggcggctctcgtgctgattgatttcaacttgcagccacattttctgcagaaaaagaatgaaaaaaatttgggttttcacgttggaacgttttgtagtgatgaattactagtattgttatgcttctacaatgaagaagaaggaaacagaaaagggtcattagtttttatgttgcaggaatattgttctttgttagttccctttaatccaagtacctcgtgctgtaaatataattcaattttatttcgaaacaaattcattccaaaaaaaaaaaaaagnnnnnnnnnnnnnnnnnnnnnnnnnnnnnnnnnnnnnnnnnnnnnnnnnnnnnnnnnnnnnnn

SEQ ID NO: 117011 - DNA, 1181 bp, Arabidopsis thaliana
  unsure (1)..(1181): unsure at all n locations
cgagctcactagtgagctctcacgancgacgtccgagtaaagaacagcgttcgccgagagatatacatactcggatcagtcgtcaaaagctttggaatttgatacttttgatttttcgagaatcttgaaaatcagtcatgggttctggaaaagagcgtgacactttcgtctacctcgctaagctctctgagcaagctgagcgttatgaagaaatggtggaatcaatgaaaagtgttgcgaaattgaatgttgatctgacggtggaagagaggaacttactctctgtgggttacaagaacgtgattggttcaaggagagcttcgtggaggatcttctcgtcgattgaacaaaaggaagcagtgaaagggaatgatgttaatgtaaagaggatcaaagagtatatggagaaggttgagttagagctttctaacatatgcattgatattatgtctgtcttagatgagcatctcattccttcggcttccgagggtgaatctactgtcttcttcaacaagatgaaaggtgactattaccgctatcttgctgagttcaaatcagggaacgagaggaaagaggctgctgatcagtctttgaaagcctatgagattgctactactgctgctgaggctaagctccctccaacacaccctatcagattgggtttggctttgaatttctctgtcttctactacgagatcatgaacgcacctgaaagggcatgtcaccttgctaagcaggcgttcgatgaagctatctcagagcttgacactctgaacgaggaatcctacaaagatagcaccttaataatgcaactccttagggacaatctgaccttgtggacttctgacatctcagaagaaggaggagacgatgctcataagacgaatggttctgccaaacctggtgctggtggagacgatgcagagtgatatgatatgtgtgcacctggacaatatgtttcaagaactgaatgtgcggtgaataatagtgaaaagtagagtttctctgttccctatatcatgattgtctatgttacttgtactctggtttagccctaaatgtctctctggtttgaatgtattgcatgcctgtctcaggacactcttatttgtaattcactactgtcgtcttactatctatccttatggatccaatcttgaaactaaaaaaaaaaaaaaaaa

SEQ ID NO: 117012 - DNA, 817 bp, Arabidopsis thaliana
gagagacaaaacacaagtttcttcttcttgggattggctatttccagaaatccaagtcaataatcaaagtccaaacaaaaaaatcctctcccaatctccgcttcactcttctcatggacgctctcattgctcagcttcagagacaatttcgtgattacaccatttctctctaccaacaggggtttttggatgatcaatttactgagttgaaaaagctacaagatgatggaagtcctgattttgtgtctgaagtgctttcacttttctttgaagattgtgtgaagcttatcagtaacatggctagagctttggacacgacaggaactgtagattttagtcaggtaggtgctagtgtgcatcaattgaagggtagtagctcaagtgttggtgccaagagggtcaaaactttgtgtgttagcttcaaggaatgttgtgaagctaagaactacgaagggtgtgtgagatgtttgcagcaagtggatattgagtacaaggcgttaaagacaaagcttcaagatatgttcaatcttgagaaacagatcattcaagctggtggtatagttcctcaagtggatattaactaaagagactagtccataagaagaaaaaagatgatgactttctttctttagtttctcttctaaattattttggatttggtgtttgctcaaaaactcaataaaatatgtgcaaaaagaaacaaaaacaagtgatggttgtttataaatcagtagtatgtattgtttgatctcatccgagaaaattgaaaccattggactaatgaatgtgatgataatatatattggtttgcttctcc

SEQ ID NO: 117013 - DNA, 914 bp, Arabidopsis thaliana
gctttgattacagtaaaagaaactggctgtgaagatgctatggaagatccctcaattgaaggtttatgtgatggccttagtgatggcgatgatgtggatggcgatgatagctcatgtgatgaagatgtttgatgtttaaatttgtaagaccggacacatgggcacgaagttacagagacgattttgtgatttcaccattagtctctatcaccaggggtttttggatgatcaattcacagaattgaaaaagctgcaagatgaatgtagtcctgattttgtggctgaggttgttactctcttctttgaagactgtgagaagcttatcagtaatatggctagagctttagatcagacaggaaatgtagatttcaaactggtaggttctagtgttcatcaactcaaaggtagtagctcaagtgttggtgccaagagagtcaaaggtctttgtgttaccctcaaggagtgttgcgactctcagaactatgaagggtgtgtgagatgtttgcagcaagtggatattgagtacaagacattaaaagcaaagcttcaagatctgttcaatcttgagcaacagattgtccaagctggtggtagaatccctcaagtggatatataaacaatagacctatcgacaacagaacagcaagatgatgatcatccagttgcattcttcagacgagtactactcgaatttgttgcttcgaaaaagaaaaaaaactcttgagaatgtgtggaaaagagaggtgattgttgttcatagatcaatactatgtatcttttgtatcatcatctcttgaatcttggtactgatcttatctgaatagtatgaatttgcatctcataagaccatatgaacaagagtgagttatgtattcaaaaacaggaatatttccagacacagaagcatcataaat

SEQ ID NO: 117014 - DNA, 826 bp, Arabidopsis thaliana
gttctcatcttttaagtactgaggattttgttggacattttcttacctccattattggcagagagaaacaaagaaataaagaacaaaagcaaataacagagaatatggatttggttcagaagcagaagagtttgcaagattacaccaaatcactcttcttagaagggattttggacagccagttcttgcagctgcaacaactacaagatgaaagcaatccagattttgtttcacaagttgtcacactcttcttccaagactctgataggattctcaatgatctctcactttccctagatcaacaagttgtagactttaaaaaagttgatccccatgttcatcaactcaaaggtagcagctccagtataggagcacagagagttaagaatgcttgtgttgtcttccgcagcttctgcgagcagcaaaatgtcgaagcatgtcatagatgtttgcaacaagtgaagcaagagtattatcttgtgaaaaacagattagagactctgttcaagctggagcaacagattgtagcttctggtggaatgatcccggccgtcgaactcggattttgagtgaatttcataaacatctctgtccattgttgtttcattttggactctctcttcttcctctctttatgtgactatcaaaaaaaggttcttatgtgaacttctttctttgtgccattggaagagtgagacatgctaaaacgtttcttaatccacatctaaatcccacatatgtaaaataagatctcaagcaaacatatagtcatgagtcatgactacaattatatagagtttgatcaagataatgtacgcatcaaggt

SEQ ID NO: 117015 - DNA, 3564 bp, Arabidopsis thaliana
ctttcactcttcccttctctctccccaaaataaatcagaaacctatcaacattcttcaacagccacaagtaaaatttatagacatttctgtctgaagaagaaaaagattgaatttttttgcttgttgtgggttctttaatggatccaagaacaagacttgactatgctctgtttcagctcacaccaactagaacaagatgtgatcttgtgatattctctggtggtgagaatgagaaacttgcttctgggatttttcaacctttcgttacgcatctcaagagcgttagtgatcagatttctaaaggtggatactccgttactctccgtccttcctccgttggtgttccttggtttactaaagtgacccttcagagatttgtgcgatttgtgactactccggaggttcttgagaggtctgtaacattagagaaggagattgagcagatcgaggattcgattcaagctaatgcagccgccattgccggtgaagctgaaggaaacgagttgggtggtacatggacttctcaaaagtctacggctttatcaaagacgaaaggggaaactgatggagacactgtggaagaaaattcgaaggttggtcttcagcgtgttctggagaaccgtaaagcggctttgtgcaaagagcaagcgatggcttatgctcgagctttggttgttgggtttgaacttgactacatggatgacctcttttcgtttgctgatgctttcggagcttcgcggttaagggaagcgtgtgttaactttgtggacttgtgcaagagaaagaacgaggatagaatgtgggtggaccaaatcactgctatgcaagcatttcctaggcctgaattaacgttcatgggtgactctgggatcgtactcgctggtgaagagaatgatttgttgaatgctacaaacgtaaagcatggaaactctatggatgcctcgagccagggtagctttgagactggccaagaagggagagctcaaatggcaatgccgtggccaaaccagtttcctcagtacatgcagaactttcaaggacatgggtatccgcctccttatatgtttccggggatgcaaggtcaatcaccatatttccatgggaatatgcaatggcctgtaaacatgggagatgtggagtcaaatgagaagtcttccaagaagaaaaagaagaagaagaagaataagaagaagtcgaagcaagatgaatctgccgagccaagcgataattccagtactgagaccgaatcagaagacggaaatgaaggaaagaaacaatccaggaaagtggttatccgcaacataaattatataacttcaaagaggaatggagcgaaggagagtgattcagatgagtctggagaagaagaagggtttgtggatggagattctattaagcagcaagtagaagaagccattggctcagtggagagacgtcataaatcgacttcacaccgtcagaggaaacacaaaagtcacaacggtgatgatgattcaagtaacaaggaaactaaggggaatgataattgggatgccttccagaatcttcttttgaaagacaatgattcagagccagaagaattactacgtatatcatcaactgcgttaaatatggcgtctgaagttgtgagaaagagagaaccgccttctgatgattcattcttggttgcaattggaaatgaggattggggaagagaaaccagcattgagaaattcaatgcaggtgagaatgttcggataataaggaaagggaacaactatgacgaggagatgttgaatccgggtagaagcgatgaatcaagaagctattcgcaggcagagatgtcggttcatgatgggaagctcagaaccagaaatgaggcggaagaagactggttcatacgtaaccaagctggtccagaaacagatccaagtcttgtcaaaacatttgtaggagaccatttccacttaaataagagcagtgagagagatgtcctgaccgatgactctttcatgatccattctcgtgttgagaaccaagtagaagattctcggttaaggacagaaatcatggacttagacgtttacggaaccacccaacaagaaaacagtgccccggagaacactccgcatgaaccagatgacctatacatggttcttggacgggaacaagatgttaaacctacattgttaccatggacccctgaaattgactttgagactaacactttggctcaaagaacaagcagaatcgatttgataactgccacaaaggcctctgcaggtgaacaaaccttagatggtaaagaaaagaagagtcgtggtatctccaaggggaaggatgcaaagtcaagagcatcaagtagacctgacccggcgtcaaaagccaagagacctgcttggggaagtagagctgctgtctccaagtccaaatccgagatggaggaagagagaaagaagagaatggaggaacttttaattcagaggcaaaagagaattgcggagaagagttccggtggtagtgtatcaagttctttagcgtccaagaaaactcctactgtgaccaagtcagtgaagagctcgataaagaatgagaagactcctgaagccgcgcagtcaaaggctaagccagtactgagaagttccaccattgagcgccttgctgttgctcggaccgctccaaaggagccacagcaaaaaccagtaatcaaaagaacatcaaaaccttcaggatacaagacagagaaagctcaggaaaagaaatcgagtaaaataggtcaatcagatgcgaaaagtgtggaactttctcgtgacccgagtctcgaaatcaaggaaacggtggtggaagattcacattcttacttgtcagagaagcaagttgatgcacttcctgctgttgcttctgttgatgatttcaaagacattaaagaattgcatagcttgccatcagaagaaacggccagagtaaagaacagaccgaatgaaatcatagcagagaaagtacaagatcagacgaagatcgatgatcaggaaacagtgaagaatacatctgtttctgaagataagcaaatcaccacgaagcattactcagaggatgttggagaagtccaggcttcacaggaaaaaccggtgtctccaaagaagtcggtgactttttcagagacaaacatggaggagaagtattatttctcaccagcggtctcagagattgacatctcaacgccacctgctactgaagcagatcattcgaggaagaaatggaacagtgaagagacgtctcccaaggcaacggctaaagtcttcaggaagcttcttatgttcggaaggaaaaagtaaaaccgacgttggaattcttcttctccggcatcatcgaacctttgttttgagacgacgtcatgttgagttcagttaaaaagcctctcttattctttaaatttttccttgtgtgatattaaatactgtttttcattttattgttgttatcagtttgatttgtctgtttatattacatttgttgatgtgttgtttatagcattgaaagtgggcatttgagtgtgtataaaaaattggtttggtgaaaaaaaa

SEQ ID NO: 117016 - DNA, 1117 bp, Arabidopsis thaliana
  unsure (1)..(1117): unsure at all n locations
caaatccttcttcctcttcaattctctgtttcctccaaaatggctacaccaaacgaagtatcagctcttttcctcatcaagaagtatctcctcgacgaattgtctccgttgcctactactgccaccaccaatcgatggatgaacgatttcacgtcatttcatcaaaccggtttcgagttttctgaatttgaaaccaaaccggaaataatcgatctcgtcactcccaaaccggagatttctgatttcgaggtgaaatctgaaatttcaattgaatcgaacgattccttcacgttccaatcgaatcctcctcgtgtcactgttcaatccaatcgaaaaccgccgttgaagatcgcaccaccgaaccgaaccaagtggattcaattcgcaaccggaaatcctaaaccggaacttcccgaaccggttgtagcagcagaagagaagaggcattacagaggagtgaggatgaggccgtggggaaaattcgcggcggagatccgagatccgactcgtcgtggaactcgggtttggcttgggacgtttgagacggcgatcgaagcggctagagcttacgacaaagaagcgtttagactacgaggatcaaaggcgattctgaatttcccgcttgaagttgacaagtggaatccacgcgctgaagatggtcgtggcctgtacaaacggaagagagacagcgaggaggaggaagtgaaggtggtgaagaaagtgctaaagaaggaggagagttacgccgttagcgacggagagaatgttgagtcaggtttgacggcgatagatgactgggatttgacggagtttctgagcatgccgcttttatcgccgttatctccacacccaccgtttggttatccacaattgaccgttgtttgaattctatttttctgtttgggtcagcttgttgtatgctgacgtggaattatgctatatcttttgcttattttatgttcacattcgagcaaaatttattcattcgtttatttgttttttaatacaactcttgatatttctaaattctaaccaaaaaaaaaaaaaaagnnnnnnnnnnnnnnnnnnnnnnnnnnnnnnnnnnnnnnnnnnnnnnnnnnnnnnnnnnnnnnnagga

SEQ ID NO: 117017 - DNA, 1351 bp, Arabidopsis thaliana
gtcccacaacacaaacacatttctgttttctccattgtttcaaaccataaaaaaaaacacagattaaatggaatcgagtagcgttgatgagagtactacaagtacaggttccatctgtgaaaccccggcgataactccggcgaaaaagtcgtcggtaggtaacttatacaggatgggaagcggatcaagcgttgtgttagattcagagaacggcgtagaagctgaatctaggaagcttccgtcgtcaaaatacaaaggtgtggtgccacaaccaaacggaagatggggagctcagatttacgagaaacaccagcgcgtgtggctcgggacattcaacgaagaagacgaagccgctcgtgcctacgacgtcgcggttcacaggttccgtcgccgtgacgccgtcacaaatttcaaagacgtgaagatggacgaagacgaggtcgatttcttgaattctcattcgaaatctgagatcgttgatatgttgaggaaacatacttataacgaagagttagagcagagtaaacggcgtcgtaatggtaacggaaacatgactaggacgttgttaacgtcggggttgagtaatgatggtgtttctacgacggggtttagatcggcggaggcactgtttgagaaagcggtaacgccaagcgacgttgggaagctaaaccgtttggttataccgaaacatcacgcagagaaacattttccgttaccgtcaagtaacgtttccgtgaaaggagtgttgttgaactttgaggacgttaacgggaaagtgtggaggttccgttactcgtattggaacagtagtcagagttatgttttgactaaaggttggagcaggttcgttaaggagaagaatctacgtgctggtgacgtggttagtttcagtagatctaacggtcaggatcaacagttgtacattgggtggaagtcgagatccgggtcagatttagatgcgggtcgggttttgagattgttcggagttaacatttcaccggagagttcaagaaacgacgtcgtaggaaacaaaagagtgaacgatactgagatgttatcgttggtgtgtagcaagaagcaacgcatctttcacgcctcgtaacaactcttcttccttttttttttcttttgttgttttaataatttttaaaaactccattttcgttttctttatttgcatcggtttctttcttcttgtttaccaaaggttcatgagttgtttttgttgtattgatgaactgtaaattttatttataggataaattttaaaaagggttacttagataaaacccaaaaccaaaaaggcgcccgctctagagatcccagctacgacgcggcagcgcgtcaagtc

SEQ ID NO: 117018 - DNA, 508 bp, Arabidopsis thaliana
  unsure (1)..(508): unsure at all n locations
aacaaaagagtgaacgatactgagatgttatcgttggtgtgtagcaagaagcaacgcatctttcacgcctcgtaacaactcttcttcttttttttttcttttgttgttttaataatttttaaaaactccattttcgttttctttattggcatcggtttctttcttcttgtttaccaaaggttcatgagttgtttttgttgtattgatgaactgtaaattttatttataggataaattttaaaaagggttacttagatatgtctcaagagttttattagcatgagatgatgaaaatgttgttaccaaatcttaccttggtttcttttcattttatgtgtatgggaactcgtatttatatgtatgcattagctactgcttatggtatttgctgctttttgtatatagatttgaggagttatgactaaaaaaaaaaaaaaagnnnnnnnnnnnnnnnnnnnnnnnnnnnnnnnnnnnnnnnnnnnnnnnnnnnnnnnnnnnnnnnnnnnnn

SEQ ID NO: 117019 - DNA, 154 bp, Arabidopsis thaliana
ataaatacgagttcccatacacataaaatgaaaagaaaccaaggtaagatatgtctcaagagttttattagcatgagatgatgaaaatgttgttaccaaatcttaccttggtttcttttcattttataaatacgagttcccatacacataaaat

SEQ ID NO: 117020 - DNA, 1324 bp, Arabidopsis thaliana
cctaaatatctctcacccaattttgtgtttcttctttctgctaaaaggttataatttttgtttcttggtttggtgagaatcttcaagaaactgaaacaaagaaaatggattctagttgcatagacgagataagttcctccacttcagaatctttctccgccaccaccgccaagaagctctctcctcctcccgcggcggcgttacgcctctaccggatgggaagcggcgggagcagcgtcgtgttggatcccgagaacggcctagagacggagtcacgaaagctaccatcttcaaaatacaaaggtgttgttcctcagcctaacggaagatggggagctcagatctacgagaagcaccaacgagtatggctcgggactttcaacgagcaagaagaagctgctcgttcctacgacatcgcagcttgtagattccgtggccgcgacgccgtcgtcaacttcaagaacgttctggaagacggcgatttagcttttcttgaagctcactcaaaggccgagatcgtcgacatgttgagaaaacacacttacgccgacgagcttgaacagaacaataaacggcagttgtttctctccgtcgacgctaacggaaaacgtaacggatcgagtactactcaaaacgacaaagttttaaagacgcgtgaagttcttttcgagaaggctgttacacctagcgacgttgggaagctaaaccgtctcgtgatacctaaacaacacgccgagaaacactttccgttaccgtcaccatcaccggcagtgactaaaggagttttgatcaacttcgaagacgttaacggtaaagtgtggaggttccgttactcatactggaacagtagtcaaagttacgtgttgaccaagggatggagtcgattcgtcaaggagaagaatcttcgagccggtgatgttgttactttcgagagatcgaccggactagagcggcagttatatattgattggaaagttcggtctggtccgagagaaaacccggttcaggtggtggttcggcttttcggagttgatatctttaatgtgaccaccgtgaagccaaacgacgtcgtggccgtttgcggtggaaagagatctcgagatgttgatgatatgtttgcgttacggtgttccaagaagcaggcgataatcaatgctttgtgacatatttccttttccgattttatgctttcgttttttaatttttttttttgtcaagttgtgtaggttgtgattcatgctaggttgtatttaggaaaagagataagaccaaaaaataaattggaacaatggttttgtggaaaagtggtaaatagacctacctc

SEQ ID NO: 117021 - DNA, 1864 bp, Arabidopsis thaliana
agcccaagcgtccgcattccttaaatcgatttcatccagatctaaactcgagcttttgttgatcgaaaaaatggaagaggatttgattaagcgccttgaagctgcggttacgaggcttgaggggatctcaagcaacggaggaggagtagtttctctttcccgcggaggagatttctcctccgccgccggaatcgatatcgcgtcgtccgatccatcgattctggcttatgaagatctgatttctcaatgtgttggtagggctctgaccgccgctgagaaaatcggtggacctgttctagatgtgactaagatagtcgccgaagcttttgcttcccaaaaggagctgcttgttcgcatcaagcaaactcagaagcctgacctcgctggattggctggatttctcaaaccgttgaatgatgttacaatgaaagctaatgcaatgactgaaggaaaaaggtcggattttttcaatcacttgaaggctgcatgcgatagtttatctgcattggcttggattgctttcactgggaaagattgtggtatgagcatgccaatagctcatgtggaagaaagttggcaaatggctgagttttacaacaataaggttctggtggagtatcgtaacaaagacgcagatcatgtggagtgggctaaagccttaaaagaactttatttacctggtttaagggaatatgtcaaaagtcattaccccttgggacctgtatggaatgcatcagggaaacctgctagtgctcctgcaaagggtccacctggtgctcctgctcctccaccagcacccctcttcagtgctgaatcttcaaagccatcatcatcgtcaaaccagaaacaagggatgtctgctgttttccagcaactcagctcgggtgctgtgacctcaggtcttagaaaagtgacggatgatatgaagacaaagaaccgtgctgatagatctggagctgttagtgcggttgagaaggaaactcgtaccagtaaaccggccttttcgaaaactggaccaccgaaaatggaacttcaaatgggtcgcaagtgggctgttgagaaccaaattgggaagaaggacttggttatcagcgagtgtgattccaaacagtctgtgtacatatatggttgcaaagattctgtcttgcaaatacaaggaaaagtgaataacatcaccattgacaaatgcacgaaagtgggtgttgttttcacggatgttgttgctgcatttgagattgtgaattgcaacaacgtagaagtgcaatgtcagggttcagctcccacagtttctgtggacaacacaactggctgtcagttatatctaaacaaagactcattagagacagctataacaacagccaaatcaagtgagatcaatgtaatggtgcccggtgctacccctgatggagattgggtggaacatgcgctgcctcaacagtacaatcatgtgtttactgaagggaagtttgagacaacaccggtctcgcattcaggtgcctaagcaaaggagaaactattatcactctggattgtgcttgaatatcaggcctttttatactcatatactttgtttcttcagattataatagaggaaagaatctgtttgtttgtttgttggttttttcttttgtctctatcccccaattttgggtttggaggttgtgggtttttgatttttttgtgtgatctgatcatcttgtgtcttgttcgtccttggggttttggatttggatttgggtttctcgtttcttttgtttttacttgtgggcttgtcccgagtccttgctgatgacgttgtgcacaaatcatacttatcatggatagaaaaagttgcaatcctgtttttggaatatgcagttattta

SEQ ID NO: 117022 - DNA, 1382 bp, Arabidopsis thaliana
caagggagtaatttaggtagacgaagacgatgaagaaaggtggattcagcaataatctcaagctcgcaattcctgttgctggcgagcaatccatcaccaaattcctgactcaaagcggtacgtttaaggatggagatctacgtgttaacaaggatggagttcgaatcatttctcaattggagcctgaagtcctgtctccaattaagccagctgatgatcagctgagcttgtcggatttggatatggttaaagtcattggcaaaggaagtagtggtgttgttcagctggttcaacacaaatggactggccaatttttcgccttgaaggtcattcaactaaatattgatgaagcaattcgcaaggcaattgcacaagagctcaaaataaatcaatcgtcacagtgtccaaatcttgttacctcgtaccagtcattttatgacaatggcgcaatctcactaatcttggagtacatggacggaggatctctagcagactttctcaagtcagttaaagccatccctgactcctatctttctgccatctttagacaagtgcttcaaggattaatctatcttcatcacgataggcatatcatccatcgtgacttgaaaccatccaatctgttgatcaaccacagaggagaagtcaaaataactgactttggtgtgagtaccgttatgacaaacaccgcaggtttagcaaacacatttgtggggacttacaattatatgtctccagagagaatcgttggaaacaagtacggaaataaaagtgatatatggagcttgggtttagtagtactcgaatgtgcaacaggaaagttcccttatgcacctccgaatcaagaggaaacatggaccagtgttttcgagttgatggaagccattgttgaccaaccgccacccgctcttccttcaggaaatttctcccctgagttatcttcattcatctccacatgtttgcagaaggagcccaacagtcgaagctctgcaaaggaactgatggaacatcctttcttgaacaaatacgactactcggggatcaatctcgcgtcctacttcacagatgcaggatcgccacttgcaacacttgggaacctgtctggtacgttctccgtgtaaactacaagggagacataatatcaccatctggttcctgttatcatctgaagaattcttgttttcccttccagtgataaaatgatctttataatacatatagatatattaaattgctgtattttaagattatagatatataaggtacatgagagtgtttatttaaaaaaaatcacttggaattcatgttttgtgatacgttagattggaatccatttgggaaaaggagaatcatctgttcttatgtctcaaattttgacttcg

SEQ ID NO: 117023 - DNA, 609 bp, Arabidopsis thaliana
  unsure (1)..(609): unsure at all n locations
tggacaagtcggattaaggnttagggctggttagtgtccgatggcacaggaagtccntntgcncncggatcaggggaacatggccagtgttttcgagttgatggaagccattgttgaccaaccgccacccgctcttccttcaggaaatttctcccctgagttatcttcattcatctccacatgtttgcagaaggatccaaacagtcggaagctctgcaaaggaactgatggaacatcctttcttgaacaaatacgactactcggggatcaatctcgcgtcctacttcacagatgcaggatcgccacttgcaacacttgggaacctgtctggtacgttctccgtgtaaactacaagggagacataatatcaccatctggttcctgttatcatctgaagatttcttgttttaccttccagtgataaaatgatctttataatacatatagatatatttaattgctgtattttaagattatagatatattaggtacatgagaagggttgcggcccgcggaannnnnnnnnnnnnnnnnnnnnnnnnnnnnnnnnnnnnnnnnnnnnnnnnnnnnnnnnnnnnnnnnnnnnnnnnnnnnnnnnnnnnnnnnnnc

SEQ ID NO: 117024 - DNA, 1613 bp, Arabidopsis thaliana
gttcccttttcagtgtcctttcaatttctttcgacgaaacttcatttctcaatttcttttgattttgatcgcttcgaagaacgaatcaatttaagcctgccacaaacaaaccctagaatacgacaacgcacgacgacgaagaagtcgaagaagactactactataaacgacgaagatcattacttcaatcttcaatcgagcttttaaattttcagatcgtagaagaaaatcgaacttttgattccaaaagcgatgagaccgattcaatcgcctccaggagtttccgttccggtgaaaagccgtccccgtcgccgtcctgatcttaccttaccgcttcctcaacgcgatgtttctctcgctgtacctcttcctctcccacctacttccggtggttccggtggctctagtggatctgcgccgtcttctggtggttcggcgtcttcaacgaacactaacagctccatagaagcgaagaactattcggatttagtgagaggtaaccgtatcggaagcggagcaggtggaacggtatacaaagtgattcaccgtccgagttctcgtctatatgcacttaaggtgatatacggtaaccacgaggagactgtgagacgtcagatctgtagagagatcgagattttacgagatgtgaatcatccaaacgttgtgaaatgtcacgagatgtttgatcagaacggtgagatccaggttttgcttgagtttatggataaaggttctttagaaggtgctcatgtgtggaaagagcaacaattagctgatctatctcgtcagattcttagtggtttagcttatctccatagccgtcacatagttcatcgtgatatcaaaccatcgaatcttttgataaactctgctaaaaacgttaagattgctgattttggagttagtaggatcttggctcagactatggatccgtgtaattcatctgttggaaccattgcttatatgagtcctgagaggattaacactgatttgaatcagggaaagtatgatggttatgctggagatatttggagcttaggtgttagcattttggagttttacttggggaggtttcctttccctgtgagtagacaaggtgattgggctagtcttatgtgtgccatttgtatgtctcagcctccagaagctccagcgactgcgtcgccggagtttcggcattttatctcgtgttgcttgcagagagaaccggggaaaaggaggagtgctatgcagctattgcagcatcctttcatattaagagcaagtccgagccagaacaggtctcctcagaatctacatcaactcttgcctcctcctcgtcctctgtcctcgtcttcttctccaaccacatagcgttttctctcttcttcccttcatcaactcatattttttgtgttactactgttcttgagtctgttgtccaattttttgctaatcatggagggtctctgaattttacatttattagggagtaaaaaactcgagagagggtttttgggattattgttttctagaaaggtaaaagagaacaatgataatattcttatgcttatgatggtgcatgtatccccaatgtagctttgttgaattttcataaaagtttttgccaaaaa

SEQ ID NO: 117025 - DNA, 1664 bp, Arabidopsis thaliana
cccacgcgtccgcggacgcgtgggttcgatgaagcttcattctcctcttgatttgatctctttgaaaaacgacgaatcaaacaaaccctagagtcaagtcaatcatgatgataaatacaaacctggaagataaagaatcaaccttgtgaaaaaaaaaaaaaacttttgattccctcttcttctaaaagccatgaaaccgattcaatctccttctggagtagcttcacctatgaagaaccgtttacgcaaacgtcctgacctaagcttaccactcccacaccgcgacgtcgctctcgccgtacctctccctctcccacctccttcttcctcttcatccgctccggcgtcttcctccgcgatctcaaccaacatctccgccgctaaaagcttatccgagctagaacgagtgaaccgaatcggaagcggagccggaggaacggtttacaaagtaatccacactccgacgtcacgtcctttcgctctcaaagtgatttacggaaaccacgaagataccgtgagacgtcagatctgtagagagatcgagatcttaagaagtgttgatcatccaaacgttgtgaaatgtcacgatatgtttgatcataacggtgagatccaggttttgcttgagtttatggatcaaggatctcttgaaggagctcatatatggcaagaacaggaattagctgatctctctcgtcagattcttagtggattagcttatcttcatcgtcggcatatcgttcatcgtgatatcaaaccttcgggatcttcttataaactcagctaaaaatgtgaaaattgctgattttggtgtgagtaggatcttggcacaaacaatggatccttgtaattcatctgttggtactattgcttatatgagtcctgagaggattaatactgatttgaatcatggtcgttacgatggttatgctggagatgtttggagtttaggtgttagtatcttggagttttacttggggaggtttccttttgctgtgagtagacaaggtgattgggctagtcttatgtgtgctatttgtatgtctcagccacctgaagctccggctacggcgtctcaggagtttcgtcactttgtttcttgttgtttacagagtgatcctcctaagagatggtcagctcaacagcttttgcagcatcctttcatacttaaagctaccggtggtcctaatctccgtcaaatgttgccgccgcctcgtcctcttccttctgcctcttagtgtttctaccattttcgtctttcttgtttttcaatttttcgtagtttttcctgacatttttccataagttttgcataccccaagcaaagataatgagaagagtagaagaacaatgtggtttgtgattggggtatgagtcgtcaggaagaaactcagtttgtggttagggtttattgagtctttatcttatgctgctaagcttgatttgtcttatgggtaatgaagaatgttttgctagaaatggaaacaaaaaaatagacaagaagaattcttatggtttaagagtgattttagctggatttgcttatattattgtttatataaggaagtaaatggaggatctttcattggataattctcattaataaagcttcttcctttaattctctagaggatccaagcttacgtacgcgtgcgtgcgacgtc

SEQ ID NO: 117026 - DNA, 975 bp, Arabidopsis thaliana
  unsure (1)..(975): unsure at all n locations
tgcccggggccgccacgcccgcggtcctaccctgcccacgaccccgcgtccgcatctaagtcgttccaatgattcccctttaaacccgatttgcagcggtaatcggttcttagtatgaaggtctacagggtcagtgaaaacacattactgtcacctgcagatctagggtagttatccaaccgtccaagttatgtaacaaccctgaattttatactctgtaaacgttaagatctgatttggagtataggatctggctcagctatggatcgggtattcatctgtggaccattgcttatatagtctgagaggattacactgatttaatcagggacagtatgatggataagctggagatattggagcttaggtgttagcatttggagttttacttggggaggtctcctttccctgtgagtagacaaggtgattgggctagtcttatgtgtgccatttgtatgtctcagcctccagaagctccagcgaatgcgtcgccggagtttcggcattttatctcgtgttgcttgcagagagaaccggggaaaaggaggagtgctatgcagctattgcagcatcctttcatattaagagcaagtccgagccagaacaggtctcctcagaatctacatcaactcttgcctcctcctcgtcctctgtcctcgtcttcttctccaaccacatagcgttttctctcttcttcccttcatcaactcatattttttgtgttactcctgttcttgagtctgttgtccaattttttgctaatcatggagggtctctgaattttacatttattagggagtaaaaaactcgagagagggtttttgggattattgttttctagaaaggtaaaagagaacaatgataatattcttatgctaaaaaaaaaaaaaaagagggcagccgctttagaggatccaagcttacgtacgcgtggatgcgacgtcaaagtcttgtataggtcacnnnnnnagattc

SEQ ID NO: 117027 - DNA, 1797 bp, Arabidopsis thaliana
  unsure (1)..(1797): unsure at all n locations
cnnnnnnnnnnnnnnnnnnnnnnnnnnnnnnnnnnnnnnnnnnnncccggnacttcctgggtcgacccacgcgtccgaaaatacaaatcgactttcatattttctctgcataagagagaaagaaaatgggatctcatgtcgcacaaaaacaacacgtagtttgcgttccttatccggctcaaggccacatcaacccaatgatgaaagtggctaaactcctttacgccaaaggcttccatattaccttcgtcaacaccgtctacaaccacaaccgtctcctccggtcccgtgggcctaacgccgttgacgggcttccttctttccggtttgagtccatccctgacggtctacccgagactgacgtggacgtcactcaggacatccctactctttgcgagtccacaatgaagcactgtctcgctccattcaaggagcttctccggcagatcaacgcaagggatgatgttcctcctgtgagctgtatcgtatccgacggttgtatgagcttcacacttgatgctgcggaggagctcggtgtcccggaggttcttttttggacaactagtgcttgtggcttcttggcttacctttactactatcgcttcatcgagaagggattatcaccaataaaagatgagagttacttaaccaaggaacacttggacacaaaaatagactggataccatcgatgaagaacctaagactaaaagacatccctagcttcatccgaacgactaatcctgacgacatcatgctcaactttatcatccgtgaggctgaccgagccaaacgcgcttcagctatcattctcaacacgtttgatgatctcgaacacgacgttatccaatctatgaaatccattgtacctccggtttattctattggaccgttacatttactagagaaacaagagagcggcgagtatagtgaaatcggacggacaggatcgaatctttggagagaggagactgagtgtctggactggctaaacacgaaagctagaaacagtgttgtgtacgttaacttcgggagtataactgttttgagcgcaaaacagcttgtggagtttgcatggggtttggctgcaacggggaaagagtttttgtgggtgatccggccggatttagtagccggggatgaggcaatggttccaccggagtttttaacggctacggcggaccggaggatgttggcaagttggtgtcctcaagagaaagtcctttctcatccggccattggagggttcttgacgcattgcgggtggaactcgacgttggaaagtctatgcggtggagttccaatggtgtgttggccgttttttgcagagcaacaaactaattgtaagttttctcgtgacgaatgggaggttgggattgagattggtggagatgtgaagagagaagaggttgaggcggtggttagggagttgatggatgaagagaagggaaagaatatgagagagaaggcggaagagtggcggcgcttggcgaatgaagcgacggagcataagcatggttcttctaaattgaactttgagatgctcgttaataaggttcttttaggggagtagagactagtaaatatggatttcaagaaaaaagggatttaagcacacaagagtagaccattgctcacaaagaacctctttatttcccaaattaattactcatttactcataatcaaataaacatcttcttattcatcacaaaccaataaaacttactttcctcagttcaaatatttcatactattagactttgttttgataaaaaattgttcnnnnnnnnnnnnnnca

SEQ ID NO: 117028 - DNA, 967 bp, Arabidopsis thaliana
  unsure (1)..(967): unsure at all n locations
attccttggtcaacccacgcccccgaaaatacaatgccactgtcgtaatccctgtgcataagacacttttttatgggatctcatggagcacaacaacaacacgtgggaggctgtacttatgcggctcaaggccacatcaacccactgatgaaagtggctaaactcctttacgccaaaggcttccatattaccttcgtcaacaccgtctacaaccacaaccgtatcctccggtcccgtgggcctaacgccggtgacgggcttccttctttccggtttgagtacatccctgacggtctacccgagactgacgtggacgttactcaggacatccctactctttgctagtccacaatgaaacactgccatcgctccattcaatgagcttctccggcagatcaacgcaagggatgatgctcctcctgtgagcatgatcgtatccgacggttgtatgagcttcacacttgatgctgcggaggagctcggtgtcccggaggctctttcttggactactagtgcttgtggcttattggcttacctttaccactatcgcttcatcgagaagggattatcaccaataaaagatgaaagttactttaccccggaacccttggacccacaaaacggaccggatgccttcgatgaagaacctaagacttagagacctccctagcttcatccgaacgactaatcctgacgacatcatgctcaactttatcatccgtnaggctgaccgagccaaacgcgcttcagctatcattctcaacacgtttgatgatctcgaacacgacgttatccaatctatgnaatccattgtacctccggtttatnctattgggccgttacatttactagngaaacaaagagagcggcggagtatagtgaaatcgggacgggaccagggttcgnaatctttttgnggngnggnggccttnnggtgtcttngacttgggttaaaccacggaannct

SEQ ID NO: 117029 - DNA, 522 bp, Arabidopsis thaliana
  unsure (1)..(522): unsure at all n locations
ttnccnttcggnggaccncnttggaagctttccgtggagtcccaatggtgtgttccgccgttttttgcggaccacccaactaattgtaagttttctcgtgccgattgggaggttgggattgagattggtggagatgtgaagagagaaggaggttgaggccggtggttagggagttgatggatgaagagaagggaaaggaatatgagagagaaggcggaagagtggcggcgcttggcgaatgaagcgacggagcattagcatgggttcttctatattgaactttgagatgctcgttaataagggttcttttaggggagtagagactagttaatatggatttccagaaaaaagggattttagccccccagagtaggcccttgcttcccaaagaacctctttatttccccaattaattactcctttactcattctccaaataaccttcttctaattaaaaaaaaaaaaaaaaggcggccggttcaaaggaatccaggctaaggaaggggggcatggaaggtcaag

SEQ ID NO: 117030 - DNA, 1119 bp, Arabidopsis thaliana
aaaataaacccaccaccaaataactccactctttatctctcttcctccttctcctataacttgcaacttcccacaccaaaaaagattccatcaaaggtctctctctcttcataaaccaatattttcacgtaagaaacaaactttttccgatcaaagattgtgtgcagagtcagaaattttcccggggaaaagaaaaatgcaggatctgacgtcagcagcagcgtattatcatcagtcgatgatgatgacgacggcgaaacagaaccaaccagagttaccagaacaagaacagctaaagtgtcctcgctgtgactcacctaacactaaattctgttactacaacaattacaatctgtcacagccccgtcacttttgcaaaaactgtcgtcgttactggactaaaggcggtgctcttcgtaacatccccgtcggtggtggaactcggaaaagcaacaaacgatccggttcttctccgtctagtaatctcaagaaccaaaccgtcgctgagaaacctgatcatcatgggtccgggtcagaagaaaaagaagagagagtttcgggtcaagaaatgaatccgacccggatgttatacgggttaccagttggagatccgaatggtgcgagttttagttcgttgttggcgtcgaatatgcagatgggtgggcttgtttacgagtccgggtcgcgttggttaccaggtatggatttgggtttgggttcggtacggaggagtgatgacacgtggactgacttagctatgaacagaatggagaagaattgaagaggcgaagggtaatttggtcaatttgacatagatgtcttttttttagtcatctcatagtcaaacataacaacaaatgatgtcggtccatttagcgctgtagtcattttttttcactttgtttttcgtcattttccacccaaattggctttagtgagtgttatttagaaaaaaaaacatttccgcaaactctagcgagttttatatgatgataagtatttgatgaatatctatttcttttggaattatattattgtcctaatgtgaaccaaggagttgacatatattctatttctttgtaaggaaacatataataaaaagtcaccgcgtttacatgg

SEQ ID NO: 117031 - DNA, 1192 bp, Arabidopsis thaliana
  unsure (1)..(1192): unsure at all n locations
gtttacgcgttcgtccacctctctcaaatctagaaagagaaaaagtcttaaatttgtctcatttatgcgataagaaccacaattcctctatcaaaatctctctctctgacatacccagttggaaaaattcaatcttttatccctaagattcgatctttcttcttgggaagttgataaatgttcaaggaaacataaaaaagagaagatttttgaataaaggttgaagaaaaatgcaggatccagcagcatattaccagacgatgatggcgaagcaacaacaacaacaacaaccacagtttgcagagcaagaacagttaaagtgtcctcgttgtgactcaccaaacactaaattctgttactacaacaactacaatctctcacagcctcgtcacttttgcaaaagctgtcgtcgttactggactaaaggcggcgctctccgtaacgttcccgtcggtggtggttctcgtaagaacgcaaccaaacgatccacttcttcttcttcttctgcttcctctccttccaacagtagccaaaacaagaagacgaaaaacccggatccggatcctgatccacgtaattctcaaaaaccggatttggatccgacccggatgctttacgggtttccgatcggtgaccaagacgtgaagggtatggagattggtggaagctttagctcgttgttggcgaataatatgcagcttggtcttggaggaggagggatcatgcttgacgggtcgggttgggatcatccgggtatgggtttgggtttgaggagaaccgaaccgggtaataataataataacccatggaccgatctggctatgaacagagcggagaaaaactgaagaagaaaagaagagaggggtattttggtaaattatagcaaactgattttgggtgacttgagccatcacgtagacactgaacagtttcgatcatgtttatgtcattttggtaatattattattattcctcctcctactttatttctatttatataatcggttttgtcgtaattttaatcctgtgtaatagaaagaaatttctcagtttattttgtgcattctgatttgatgaaattttatgttttatgtaaaaaaaaaaaaaaaagnnnnnnnnnnnnnnnnnnnnnnnnnnnnnnnnnnnnnnnnnnnnnnnnnnnnnnnnnnnnnnnnnnnnnnnnnnnnnnncg

SEQ ID NO: 117032 - DNA, 1990 bp, Arabidopsis thaliana
  unsure (1)..(1990): unsure at all n locations
cggaagctctcacgtgacaaaaacacgcacaaaattattcaagttaccagctttattaagcaaaacgattgagccaaaaaaaacgcatcagaatctggaacctggatcagatctagtcaggggtcagatcggagagccggcaatataatggcagcggcgagacgattacggacgctccaatctcagccggagaacaaggtctgtgtcgattgctcccagaagaatccacaatgggcatcgatttcatatggaatcttcatgtgcttggaatgctccggtaagcaccgtggtttaggtgttcacatctcattcgtcagatccgtcaccatggattcatggtccgagatccagatcaagaaaatggacgctggaggcaacgagcgtctcaacaattttctcgctcagtacgggatctcgaaagagactgatatcatctccaagtacaattccaacgccgcgtctgtgtatcgagatcggatccaagctttagctgagggaagacaatggagagatccgccgattgttaaggaatcggttggtggtggattgatgaataagaagcctccgttgtctcaaggcggtggtagagattctggtaatggtggatgggataattgggataacgatgattcgtttagatctacggatatgaggaggaatcaatcggcgggtgattttaggtcatcgggaggtcgtggtgctccggcgaagtcgaaatcgtctgaggatatatattcacggtctcagctggaggcgtcggcggcgaataaggagagtttctttgcgaaaaggatggctgagaatgagtctaagcctgagggacttcctccttcacaaggtggtaagtatgttgggtttggatctagtccaggtccagctccgagaagcaatcaacagagtggtggtggtgatgttttctctgttatgtctgagggttttggaagattgtctcttgttgctgcatcagctgcaaatgttgttcagactggaaccatggagtttacttccaaggtcaaagaaggtggcttagatcagacggtcagtgagactgttaatgttgttgcgagtaagacaacagagataggacagaggacatgggggatcatgaaaggagtgatggcaattgcctcacaaaaggttgaagagttcactaaagaagaagcatcaacttggaatcaacagaataaaactgagggcaacggttactaccagaactctgggattggaaacaaaacagcaaattcatcttttggaggatcacaatcatcatcaagtggtcacaacaacagttatcgtaactcgaattcttgggatgactggggagaagagaacaatagcaaaaaggaagcagcaccaaaggtgtcgacttctaatgatgatgacgacggcggttgggctggttgggatgataatgatgctaaagatgatgatttctattatcagcctgcaagcgataagaaatctgtaggtcacaatgggaaatcagacactgcttggaccggtggaggttttctctaacggtgttacaggataatggtgaatgaagtttgtacaattaaggaatagcagagcctgtggtcttctcgtgctctgtcacaagagagagcagagtggtcatctcaaccattaagccaccactggtctttcttttcacatatcaattgcttggcgttcaatcaaatcgatcgtcactatttgttcttctacaatatatatagtttttttttttttatttgtacaagtttcacagtcacagaggattgcttgctaaactattcgggttagtcttcagctctttttttgagattcaaacttttatttttcttgaaatttgtaatgatcacaaaagacaaattttccgttttattgtcttctttctcattaaaaaaaaaaaaaaaaaaaaaaaaaaaaaaaaagggcggccgctctagaggatccaagcttacgtacgcgtgcatgcgacgtcatagtcttnctataaggtcaccta

SEQ ID NO: 117033 - DNA, 646 bp, Arabidopsis thaliana
  unsure (1)..(646): unsure at all n locations
gggcggggggggggtagtatcgccgggactatacgactcatatagggaaagctggtacgcctgcaggtaccggtccggaattcccgggtcgacccacgcgtccgcccacgcgtccgaacctggatcagatctagtcaggggtcagatcggagagccggcaatataatggcagcggcgagacgattacggacgctccaatctcagccggagaacaaggtctgtgtcgattgctcccagaagaatccacaatgggcatcgatttcatatggaatcttcatgtgcttggaatgctccggtaagcaccgtggtttaggtgttcacatctcattcgtcagatccgtcaccatggattcatggtccgagatccagatcaagaaaatggacgctggaggcaacgagcgtctcaacaattttctgcgctcagtacgggatctcgaaagagcttgatatcatctccaagtacaattccaacgccgcctctgtgtatcgagatcggatccaagctttagctgagggaagacaatggagagatccgccgtttgttaaggattcggttggtgggggattgatgaataagaagcccccgttgtctcaaggcggtggaagatctgaatgtggtggaattggnacgtntcttancncggat

SEQ ID NO: 117034 - DNA, 1100 bp, Arabidopsis thaliana
caagcagcagccgaagacgaccgccggcgatttccggttggcaattgttctcatctgatctgctttctcgcgctccaagtttaatggaagcattaactacttcaagggttgtgccagttcaggtcccctgtagaaagctctcttcactttttgctaatttttcttgccttgagttaaggagatatccttgtagaggtcttgtctccattatgaaccatcccaaattgcttcgtccagtgactgcttctgtgcagcctcacgagttgtcgactttggggcatgaaggcaacattgttccttctaaagaaattcttgatctttggagaagtgttgaagcggtatgtttcgatgtggacagcacggtttgtgtggatgaaggtattgatgaacttgctgagttttgtggagctggaaaggctgttgctgaatggactgccagagctatgggtggatctgttccatttgaagaagctctagctgcaagactttctttattcaagccttctctttcaaaagtagaggaatatctcgacaagagacccccaaggctatctcctggcattgaagagttggtcaagaaactcagagccaataacattgatgtctatttgatatctggaggttttcgacagatgatcaatcctgtagcatcgattcttggcatccctcgggagaatatctttgccaacaatcttctatttggaaactccggcgagtttctgggatttgatgagaacgaacctacgtcaagaagtggaggcaaagccaaggcagtgcaacaaatacgaaagggtcgtctctacaagactatggccatgattggagatggtgctactgatctcgaagcacgtaaacctggtggcgcagatttgttcatatgctacgctggagttcagcttcgtgaagccgttgcagcaaatgcagactggcttatctttaagtttgaatctctcataaactcattggactaaaagcctctatagtgattattctcgtttagctaaactcattattcatatctccaaatttgtacccttttatgaatttgtatcaaataccaattgaatcaacaaatgtttttgccaaaaaccctgacgtag

SEQ ID NO: 117035 - DNA, 548 bp, Arabidopsis thaliana
  unsure (1)..(548): unsure at all n locations
nnnnnnnnnnnnnnnnnnnnnnnnnnnnnnnnnnnnnnnnnnnnnnnnnnnnnnnnnnnnnnnnnnnnnnnnnnnnnnnnnnccacgcgtccgcccacgcgtccgtgagaacgaacctacgtcaagaagtggaggcaaagccaaggcagtgcaacaaatacgaaagggtcgtctctacaagactatggccatgattggagatggtgctactgatctcgaagcacgtaaacctggtggcgcagatttgttcatatgcttcgctggagttcagcttcgtgaagccgttgcagcaaatgcagactggcttatctttaagtttgaatctctcataaactcattggactaaaagcctctatagtgattattctcgtttagctaaactcattattcatatctccaaatttgtacccttttatgaatttgtatcaaataccaattgaatcaacaaatgtttttgccaaaaaaaaaacaaaagnnnnnnnnnnnnnnnnnnnnnnnnnnnnnnnnnnnnnnnnnnnnnnnnnnnnnnnnnnnnnnnnnnnnnnnnn

SEQ ID NO: 117036 - DNA, 1096 bp, Arabidopsis thaliana
acgaatctccgtctcctccgtcgcattttccgaggtatagagagagatcaaaccaaagagacacagagagagtatccaccgatggaatccgcagcaacggctgttgtacctccggcagccgccgccaccaccgccaccgccaccgatgataatctccaatcaagcgactcatcatctcccgccgacgccgttaaccgattgatccacgccttttcgcagcgacaacaacatcttctcgacaaaacggttcctcacgttctctatcgatggatcgcatgtctctgtgttgtattgatctacatcgttcgtgtttactttgtggaaggcttctacatcatcacttacgccatcggcatctaccttttgaatctcatcattgcttttctatctcctcaagaagatcccgaagcttctctcacttccggtggttctcttcctactcggagatccgatgagtatcgtcctttcgttcgccgtctccctgagttcaaattctggttatcgatcataagggctttcatcatcggatttatgatgacgttcttcgaggtgtttgatgtacctgtattctggccaatacttctcttctactgggtgatgttgtttttccttacgatgaggaaacagatacagcatatgatcaaatacagatatgtccctttctcttttgggaaaaagcagtatggaaagaaaccggctccaacagagagcagtgaatgatcaatcaaaactgttcaggtcagcaattttacagtcttttgagagaagtagcatttgaaaaggtcggtcttttgttctcttttgatggcctatatctttgttagggatgaagtagagatagacatattttgctcttttatcatcctgactattttactggtttcacctgaactcaatgtacaatcttatttttttacatccttttttcagtgagaaaataatgtttcatacttgacccttttgtaatcatcatggtggaaaactaaagactaatcagtaatcactgtccggttctatcgatgttcatggattgtgtcctagttatttaagaacatggaaattgcgaaaaaaaaaaaaaaaaaaaagggcggccgct

SEQ ID NO: 117037 - DNA, 1187 bp, Arabidopsis thaliana
cgctgttagagagaaactggagcaacttctcaaattttagcctttttttgtttttgcattttgcctaatcggtgcttctccagatttcgcttatcttgttcctatagcataacaatggcggatttcaaaccaaggatcgagatttcgttccttgaaaccttcatttgcagcgctttcgctgcttgttttgctgagttatgtactataccgttggacacagccaaagttagacttcagcttcaaagaaagattcccactggagatggtgagaatttgcccaagtatagaggatcaattggtactctagctaccatagctagagaagaaggtatttcaggtctttggaaaggtgttattgcaggacttcatcgccaatgtatctatggtggcttaaggattgggttatatgagcctgtgaagacacttttggttggaagtgactttattggcgatattcctttatatcaaaagattcttgcagctttgttaactggagctatagctattattgtagctaatccaactgatcttgttaaagttcggcttcaatcagaaggaaagttaccggctggggttcctaggcgttatgcaggagctgtagacgcttatttcaccattgtgaagctggaaggagttagtgcgctatggactggacttggtcccaatattgcccggaatgctattgtaaatgctgcagagttagctagttatgatcaaataaaggagacaattatgaaaattccgttcttcagagacagtgttttaactcatctactagctggtttagctgcaggcttcttcgctgtctgcatcggttctccaattgatgtggtgaaatctagaatgatgggagactctacttaccgaaacacagtcgattgcttcatcaaaacgatgaagaccgaggggattatggcattctacaaaggatttctcccgaattttacacggctaggaacctggaatgccattatgttcctcacattagaacaagtgaaaaaagtgtttctaagagaagtcttgtacgattgattctcagatccctagtcgaaaaccataccttattacataatcccttctataaaactttgaattgttagaattaaaacatatatactttctatgttatgtgagctttgttatttagattagtatagaaacattttatccaaaaaaaaattctttgc

SEQ ID NO: 117038 - DNA, 3323 bp, Arabidopsis thaliana
cttctctagcgtcactcttcttcttcattggtcggtagaataaggccaaggaagggatcagttttaagttttgtttcattctttttgtagtggagaaaaagagtttttgaaaatcaaaacaacaaaaaatgccgattaggcaaatgaaagatagctctgagactcacttagttatcaaaacccaacctttaaagcaccacaatccaaaaaccgttcaaaacggtaaaatccctcctccttctccttctccggtgacggtgactactccggcgacggttactcagagtcaagcttcttcaccttcaccaccgtcaaagaatcgtagccggaggagaaaccgtggtggaagaaaatctgatcaaggagatgtttgtatgagacctagctctcgtcctcgtaaaccgccaccgccaagtcaaaccacttcctccgccgtctccgtcgccaccgccggtgagattgtcgctgtgaatcatcagatgcagatgggtgttcgtaaaaactcaaactttgctccaagacctggatttggaacacttggaactaaatgcattgttaaagctaaccactttctcgctgatttgcctaccaaggatttgaatcagtatgatgttacaattactcctgaagtgtcatcaaagagtgttaacagagctataattgctgagttagttagactttacaaagagtctgatctcgggaggagacttccggcttacgatggccggaaaagtctttacactgctggagaacttccttttacttggaaggagttcagtgttaagattgttgatgaagatgacggtatcatcaatggccctaaaagggagagatcatataaggtggcaatcaagtttgttgcacgggcaaatatgcatcacttaggcgagtttctagctggtaaacgggcagattgtccgcaagaggcggtgcagattcttgatattgtactcagggagttgtcggttaagaggttttgtcccgttggaagatctttcttttcgcctgatattaaaacaccgcagcgactcggtgaagggttagagtcatggtgtgggttttaccagagtattagaccaactcaaatgggtttatcactaaatatcgatatggcttcagctgcattcatcgagcctcttccagtgatagagtttgtagcacagcttcttggaaaggatgtcttgtcgaagccattgtcggattctgatcgcgtcaagattaagaagggtcttagaggagtgaaagtagaggttactcacagagcgaatgtaagaaggaaataccgtgttgcgggtttaacaactcaaccaacaagagagctaatgtttccagtagatgagaactgtactatgaagtcagttattgagtatttccaagagatgtatggattcacgatccagcacacgcatttgccatgtctccaagttggaaaccaaaagaaggcaagctatttgccgatggaggcatgcaaaattgtcgagggacaacggtacacgaaaaggttgaatgagaagcagattactgctctcttgaaagttacatgccaaagggccgagggacagagaaacgatattttgcggactgtccaacacaacgcatatgatcaagatccatatgcaaaggagtttggcatgaacataagcgaaaagttagcttctgttgaagctcgtattcttccagctccatggcttaagtatcacgagaacgggaaagaaaaagattgtctcccgcaagttggtcagtggaatatgatgaacaagaaaatgatcaacgggatgactgtgagcagatgggcctgtgttaacttctcacgcagcgttcaagaaaacgttgctcgtggattttgtaatgaacttggtcagatgtgtgaagtctcaggcatggagtttaatccagaacccgtgataccaatatatagtgcgaggcccgatcaagtcgagaaagctctaaagcatgtttatcacacttcaatgaacaaaaccaaaggcaaagagttagagcttctgctggcaatattacctgataacaacggttcactttatggtgatcttaagagaatctgtgaaaccgagcttggtttgatatctcaatgttgtctcacaaaacatgtgttcaagattagcaaacagtatctggcagatgtatcccttaaaatcaacgtaaagatgggaggaaggaacacagttctagtagacgccataagctgtagaattccactggttagcgatataccgacaatcatttttggcgcagacgtgactcacccagagaacggggaagagtcaagcccttcaatcgctgctgttgttgcttctcaagactggcctgaagtgacaaaatatgcgggtttagtttgtgctcaagctcacaggcaagaacttatacaagatttgtataaaacatggcaagatcctgttcgcggtactgttagtggcggtatgatcagggaccttcttatctcatttagaaaagcaacagggcaaaaaccgcttcgaattatcttttatcgtgatggagtaagcgaagggcaattctatcaagttttactctatgagttggatgcaattcgaaaggcttgtgcatcgcttgaaccgaattatcagccaccggtgacattcatagttgtacagaagcgtcaccacactcgtttgtttgctaataatcaccgagacaaaaacagtactgaccgaagcggaaatatcttaccaggtactgtagttgacactaaaatatgtcatccaactgaattcgacttctacctttgtagccatgcgggtattcagggaacaagcaggcctgcacattaccatgttctttgggacgagaacaatttcacagcagatggtattcaatctctgactaacaatctctgttatacctatgcgcggtgcactcggtcggtctctatagttcctccagcgtattatgctcatcttgcagcatttcgagcacgtttctacctggaacctgagataatgcaagacaacggatcaccgggtaaaaagaacacgaaaacaacaactgtcggagacgtaggtgtgaagcctttaccagccttgaaggagaatgtgaagagagtaatgttctactgctaaaaatccaaacattccttaatcagttttaataagtagtttggttgtttgcttgtagttcggctttagatttaccaatgtttttcttatgtaaattttgtcggtttggtttaagcctttaggaattagtgtattagggtttttctaaagttgtactttagctgatgataacgttgatgcagtgactttgttaaaacctcctcttctacagtagtgtttacgtcgttcctc

SEQ ID NO: 117039 - DNA, 3513 bp, Arabidopsis thaliana
caaacatggattttcaaggcggtgcactttcttacttttctttctctgtctcctagaagccacttcactgggatcgtctccatctttgatccaggttcagagattaaacaatttgaaaaatcggagactctgggattgtatggttcgttgttactgatagattacttaagctatggtttggtttagaatcggttcttctgtggcaaagcttgccataagaaggacactgtctcagtctcgttgtggttcatatgccactagaacaagggttttgccttgtcaaaccagatgttttcactctacaatactcaaatcaaaggcagagtctgctgcacctgttccacgtcctgtcccactttctaagctaactgatagcttcttagatggaacaagcagtgtgtatctagaggagttacaaagagcttgggaggctgatcccaacagtgttgatgagtcgtgggataacttttttaggaattttgtgggtcaggcttctacatcgcctggtatctcggggcaaaccattcaagaaagcatgcgtttgttgttgctagttagagcttaccaggttaatggccacatgaaggccaagcttgatcctttaggtctagagaagagagagattccagaggatctcacgccaggtctttatgggtttactgaggctgatcttgatcgggaattctttctgggtgtatggaggatgtcgggttttctctctgagaaccgcccggttcaaacactgaggtcgatactgtcgaggcttgagcaagcttactgtgggactatagggtatgagtacatgcacattgctgatagggataaatgtaactggttgagagacaagatcgagaccccaactcctcgacagtacaatagtgagcgtcggatggttatttatgataggcttacctggagcacacagtttgagaatttcttggctactaagtggaccacggctaaaaggtttggactggaaggtgctgaatctttgattcctggcatgaaggagatgttcgataggtctgcagatctcggggtagagaacatagttatcggtatgccccataggggtcgacttaatgttttgggtaatgttgttagaaaacctctacgccaaatattcagcgagtttagcggtggtactaggccagtagatgaagttgggctttacaccggaacaggtgatgtgaaataccacttgggtacatcttatgatcgtccaactagaggaggcaaacatctccacttgtctttggtagcaaatcccagtcacttggaagcagtagatcctgttgtgataggtaaaaccagagcgaaacaatattacacgaaagacgagaacagaacaaagaacatgggtattttgatccatggggatggtagctttgccggacaaggagtggtgtatgaaactctccatcttagtgcacttcctaactactgtaccggtggaacagtgcacattgtggtgaataatcaagtggctttcacaaccgatcccagggaaggaaggtcttcacagtattgcactgatgttgcaaaggctttgagcgccccaattttccatgtcaatgcagatgacattgaagcagtagtgcatgcttgtgagcttgctgctgagtggcgccagacgttccattctgatgttgttgttgatttagtatgctaccgtcgctttgggcataacgagatagacgaaccgtcattcacacaaccaaaaatgtacaaggtgatacgcagtcatccctcgtcacttcaaatctaccaggagaagctcttgcaatctggacaggtaacccaagaagatattgataagattcaaaagaaagtaagctctatcctcaatgaagaatatgaggcaagtaaagattatattccacaaaaacgtgactggctggcaagtcactggactggattcaagtctccggagcagatttctaggattcgaaacaccggagtgaagccagagattttgaagaatgtgggaaaggcaatctcaaccttccctgagaactttaagccacacagaggagttaaaagagtaagagtttatgaacaacgtgctcaaatgattgaatcgggagaaggcattgactggggacttggagaagcacttgcttttgctacactggttgtggaagggaaccatgttcggctaagtggtcaagatgttgaaagaggaactttcagtcatagacactcagtgcttcatgatcaagaaaccggggaggaatattgtcccctcgatcacctaatcaaaaaccaagaccctgaaatgttcactgtcagcaacagctccctttcagaatttggtgttctcggtttcgaactgggttattcgatggaaaatcccaattctctggtgatatgggaagctcagtttggagactttgctaatggcgcacaagttatgtttgatcagttcataagcagtggggaagccaaatggctccgtcaaactggtctagtagttttacttcctcatggatatgatggtcagggtcctgaacattccagtggaagattggaacgtttccttcagatgagtgatgacaatccttacgttatccctgagatggacccaactcttcgaaagcagattcaagaatgtaattggcaagttgttaatgttactacacctgccaactatttccatgttctgcgtcggcagatacacagggactttcgcaagcctcttatagtgatggcccccaaaaacttgcttcgtcacaaacagtgtgtatctaatctctcggaattcgatgatgttaaaggacatcctggatttgacaagcaaggaactcgatttaaacggttgatcaaagatcaaagtggccactctgatcttgaagaaggtatcagacgtctagtcctctgctctgggaaggtctactatgagcttgacgaagagcgaaagaagtctgaaacaaaggatgtagccatttgcagagtagagcagctttgcccatttccatatgatctcatccaaagagaactaaagcgatatccaaatgcagagatcgtgtggtgtcaagaagagccgatgaacatgggaggataccaatacatagccctaaggctttgcaccgcgatgaaagcactgcaaagaggaaacttcaacgacatcaaatacgttggtcgtcttccctcagctgctacagccacaggattttaccagcttcatgttaaggagcagactgatcttgtgaagaaagctcttcaacctgaccccatcacccccgtcatcccttaaaaaaacacagcttgagaggcttgagcctgtataaaaaagacacaacacaaaaataaaagattcatgagagaatctttggttaccaaagagtgtcactggaaaataaacagatgtttgctagacttacaaatttaagtttattcgatttgtttggtttgttataggatttaatcgagataaaaggaaaaaagattctagaggatccaagcttacgtacgcggcagtgcgacgtcataactcttctatagtagtaccta

SEQ ID NO: 117040 - DNA, 1954 bp, Arabidopsis thaliana
  unsure (1)..(1954): unsure at all n locations
nnnnnnnnnnnnnnnnnnnnnnnnnnnnnnnnnnnnnnnnnnnnnnnnnnnnnnnnnnnnnnnnnnnnnnnnnnnnnncccacccacgcgtccgcccacgcgtcctctctctctcctccttcaataatttctgcaaaccctaactttctcattcggcgctcaagtttctctccaccccttcgagatttggtgcgatgatgttgcgtgctgtttttaggagagcttccattagaggctcttcttctgcttcgggattgggaaaatcattgcaatcctctcgtgttgcagtgtctgctcaatttcattctgtttcagcaacagagacgttggtgcctcgtggaaaccatgctcatagcttccatcaccgttcttgtccagggtgtccagactgttcaaggactattatcaacggttaccaaggcacagccctgcaaagatgggtcaggcccttttcatctgatagtggggatgtcgtggaagctgttgtgccacacatgggtgaatcaatcactgatggcaccctagccgcctttctgaagaaacctggcgatagagtagaagctgatgaggctattgcacaaattgaaactgacaaggttacaatagatattgctagcccagcaagtggtgtgatccaagagtttttagtcaaggaaggagatactgttgaaccaggaaacaaggttgcaagaatttctacatctgcggatgctgtgtctcatgtggcaccctcagaaaaggcaccagagaaacctgctcccaagccttctcctcctgctgagaagcccaaagttgaaagtaccaaagttgcagagaaacccaaggcaccatcaccgccaccgccatccaaacagtcagctaaagaaccgcagcttccacctaaggatagggaaagacgggttcctatgacaagacttcgcaaacgggtggcaactaggttgaaagactctcagaacacttttgcgttgctgacaactttcaatgaagttgatatgactaatctgatgaagctccgatctcagtacaaggatgcttttcttgaaaagcacggagtgaagttggggcttatgtctggtttcattaaggctgctgttagtgccctccagcaccaacctgtagtaaatgcagttatcgatggagatgatatcatttacagagactacgtggatatcagtatcgctgttggtacctctaagggtcttgtagttccagtcataagagatgctgacaaaatgaactttgctgacatagagaaaacaataaacggtcttgctaagaaggctactgaaggaaccatatcaatcgatgagatggcaggaggatcattcacagtatcaaatggtggtgtctatggaagtcttataagcactcctatcatcaaccctcctcagtctgctattcttggaatgcattcgattgtgcaacgtccaatggttgtgggaggaagcgtagttccgaggccaatgatgtatgtcgcgctgacttacgatcataggctaattgatggaagagaggctgtgtatttcttgcgccgtattaaggatgttgtggaagatcctcagaggcttcttctcgacatatgataaagatccaagacagaagagatcataagtttctgtctttttaccagtttcctttcaggtaaaaccattacggatactgcaatctgcaaatgatgctttgaaaaaagaacgaaactttttttttggagttttcttaatagttttaagagtttttgccgggcgaggaaagcatcggtgtattgagttttcttttattttataatattcatacagtttgaacaaaatgttacaattttgactttcaaaaaataatgccactgataattattggttaaaaaaaaacaaaaagnnnnnnnnnnnnnnnnnnnnnnnnnnnnnnnnnnnnnnnnnnnnnnnnnnnnnnnnnnnnnnnnnnnnnnnnnnnacaatcg

SEQ ID NO: 117041 - DNA, 746 bp, Arabidopsis thaliana
  unsure (1)..(746): unsure at all n locations
ctctnnnnnnnnnnnnnnnnnnnnnnnnnnnnnnnnnnnnnnnnnnnnnnnnnnnnnnnnnnnnnnnnccacgcgtccgcgatcttctcgattctccaattccaaaccctaacattttgattagtccttctgggtttccacagccttgagagattcggaaccaatgatgatgcgtgctgttataaggagagctgccagtaatggctcttctccttcgttattcgcaaaatcactgcagtcttctcgtgttgctgcatcttcccctagcttgctatcaggttcagaaacaggggcatatctgcatcgtggaaatcatgctcatagctttcataaccttgctttgccagggaactcgggcatctcgaggtcggcgagtttagtttcttcaaccctgcaaagatgggtcaggcctttttcagctgaaactggagataccgtggaagcagttgtgcctcatatgggggaatcaattactgatggcaccttggccacctttctgaagaaacctggtgagagagtccaggctgatgaggctattgcacaaattgaaactgataaggtgacaatagatattgctagcccagcaagtggtgtaatccaagagtttctagtcaacgaaggagatactgttgaaccagggacccaagggtcgctattttatcaaagtctgaggatactgcatctcaggttaccccctctcagaagataccagagacaactgataccaaaccttctcctcctgctga

SEQ ID NO: 117042 - DNA, 567 bp, Arabidopsis thaliana
  unsure (1)..(567): unsure at all n locations
cagctctctacgactcactatttggaaagctggcacgcctgcaggtaccggtccggaattcccgggtcgacccacgcgtccgattcaattgtgcaacgtccaatggttgtgggaggaagcgtagtttccgaggccaatgatgtatgtcgcgctgacttacgatcataggctaattgatggaagagaggctgtgtatttcttgcgccgtattaaggatgttgtggaagatcctcagaggcttcttctcgacatatgataaagatccaagacagaagagatcataagtttctgtctttgtaccagtttcctttcaggtaaaaccattacggatactgcaatctgcaaatgatgctttgaaaaaagaacgaaacttttttttttggagttttcttaatagttttaagagtttttgccgggcgaggaaagcatcggtgtattgagttttcttttattttataatattcatacagtttgaacaaaaaaaaccaaaaaagggcggacgctctagaggatccaagcttacgtacgcgtgcatgcgacgtnnnnnnnnnnnnnnnnnnnnnnnnn

SEQ ID NO: 117043 - DNA, 1887 bp, Arabidopsis thaliana
agctctctctcagaaacttcgacggaagaagaacaaaacaacaacaacaacaacaataacgatggcgatggcgagcttagctaggagaaaagcgtactttctcaccagaaacatctctaattctcccactgatgctttcagattctctttctccctcactcgcggcttcgcttcgtcaggatccgacgacaacgacgtcgtcatcatcggcggcggtcctggaggttatgtggcggcgattaaagcggcacagctcggtcttaagactacctgtatcgaaaagcgaggcgctctcggtggtacttgtcttaacgtcggctgtattccttcaaaggcccttcttcactcttctcacatgtaccatgaagcaaagcacgtttttgctaaccatggtgttaaggtctcttcggttgaggtagatcttcctgctatgttggcgcagaaagacacagccgtcaagaatttaacccgtggagtcgaaggtctgttcaagaagaacaaggtaaactatgttaagggctatggtaagtttctgtccccatcggaagtctctgtggacacaatcgatggagaaaacgtggttgtgaaaggcaaacatatcatagttgcaactggctcggatgtcaagtctttgcctggaatcaccatcgatgaaaagaagattgtctcatcaaccggggcactgtctctgacagagatcccaaagaaactcattgtcattggtgctggctatattgggctagagatgggttctgtatggggacggctaggatcagaggtcacagttgttgagtttgcagcggatatcgtaccagcaatggatggtgaaatccgcaagcagtttcaacgctcactagagaagcagaagatgaaatttatgctcaaaactaaagtcgttggggtagattcatctggagatggtgttaaactcatagtggaacctgctgaaggtggagaacagaccactctagaagctgatgtggtcctcgtctcagctggtagaactccgttcacatctggacttgatctagagaaaatcggagttgagacagacaaaggcgggagaattctggtgaacgagagattctcgacaaatgtttcaggcgtttatgcaattggagatgtgattccaggaccaatgcttgctcacaaagccgaagaagatggtgttgcatgtgttgagtttatagcaggcaaacacgggcatgtggattacgacaaagtccctggggttgtctacacgtaccctgaagttgcgtcggttggtaaaaccgaggagcagctgaagaaagaaggtgtaagctacaatgttggaaaattcccattcatggccaatagcagagccaaggccatagacacagcagagggaatggtcaagattttggctgataaagagacagacaagatcttgggagttcacattatgtcaccaaacgcaggagaattgatccatgaggcggttctagctatcaactatgatgcatcaagtgaagacattgctcgagtctgtcacgctcatcccaccatgagtgaggctatcaaggaagctgccatggctacctatgacaagcccattcacatgtagaagccctcaggagatgtggattgagagggagaaggaagtaaagccgcctacgacaagccaaatcaagatgactttggtttaaacttttgatttttaatttctggtggatatgagatgagctgaaagaaaatactttaacggttttaccactcttttttattcgttaaatcttctccagattttcagttgcgggttaggcccaactatagtaataatttgatatgctcaatgaaccaaatgtgattaatcaggtatgatcggtggttttggtgaaagaggataacccacttccatatgtcttg

SEQ ID NO: 117044 - DNA, 532 bp, Arabidopsis thaliana
  unsure (1)..(532): unsure at all n locations
ttganttcccggttggnaattcccgttnttgcgatngcngagctnangctatgataatgcagaaggattggttaagattctggccgataaggagactgataagatcttgggcgttcacattatggcgccaaacgctggagagctgattcatgaggctgttcttgcgattaactacgatgcatcaagtgaagacattgctcgagtctgccatgctcatcccactatgagcgaggctcttaaggaagctgccatggccacctatgacaagcctattcacatctaaaagggaacaaggaagaccttaaaggagtgagccacctatgacaagccaaatcgatatcttaacctggttggattttggttcggttttctgtggtttagccttcaatttgtcctttatactgtgtttttattcgttaatgttcagatacgtgttaagcctgatctttaataaaatattcaacattcactttcaacaaatcatcggtcctccctttttcatctctcttcttcttctccatcatcctcttgc

SEQ ID NO: 117045 - DNA, 666 bp, Arabidopsis thaliana
gaaaaagccaagaagcaagaaagttaacacaacagctaagaatggatttggagtttggaaggtttccaatattttcaatcctcgaagacatgcttgaagcccctgaagaacaaaccgagaagactcgtaacaacccttcaagagcttacatgcgagacgcaaaggcaatggctgctacaccagctgacgttatcgagcacccggatgcgtacgttttcgccgtggacatgcctggaatcaaaggagatgagattcaggtccagatagagaacgagaacgtgcttgtggtgagtggcaaaagacagagggacaacaaggagaatgaaggtgtgaagtttgtgaggatggagaggaggatggggaagtttatgaggaagtttcagttacctgataatgcagatttggagaagatctctccggcttgtaatggcggtgtgttgaaagtgactattccgaaacttcctcctcctgagccaagaaacccaaggcaaaacaaggtccaattcgcttgaggttgtttgtggtcgtgttttttttttttaatggattgaaccgaaaaaccaccaccccttggttttcgttttaaaatggaaaaaaaaaaaatttctctggtcaaaattttccttgtggtcaaacttcaaatcaatggagttttttctttccccc

SEQ ID NO: 117046 - DNA, 1618 bp, Arabidopsis thaliana
  unsure (1)..(1618): unsure at all n locations
atacgactcactttagggaaagcacgtacgcctgcaggtaccggtccggaattcccggttcgacccacgcgtccggccggctggcaacctttctgccttctatgaagtatgcaaaggattagaacttgcaaggaatttccagtttcctgttttaagagagcctccacaatcttttcttacaacaatggaggaatatatgagagacgcacctcagatggtcgacgtcacatctgggccactgcttctgacctatacgcctgatgatggtcttacttctgaagatgttggaccttcacatgaagaacatgaaacatcatcgccttcagatagtgccgttgttccctctgaagaaacgcaactttcttcccagtctcctccttcagtagaaactccacagaacttcattgatactgatgatctattgggtctgcatgatgatacacctgatccgttagcaatcctggaccaaaatgcactagctttggccttagtttccaatgatgttgattcttcgccgtttagttttgggcaagcaagagatttggatccgtcaggatgggagcttgcgttggtcacaacacctagcaatgatatatctgcagccacagagagacagctggcgggtggattagacacgctcaccctgaacagtctatatgacgatggagccttgagagcagcccaacagcctgcctatggcgtcccagcttccaatccgtttgaggtccaagacctgtttgcattttcagacagtgtttcaccgccttcagccgtaaacaacccattcggtctctatgagccaacctatcatcaacaagagcagcagccacagctacaggttgcacccagccctgcaaatccttttggtgattttggggagtttccaatagttccggtttcagaaccacaaagcaccaccagttttggggcatttccagtaccggtttcagagccgtcaaacaccaccggctttggggagattccagtagtcccggttacagaaccgccaaacaccaccgcgtttggggaatttccagtggtgccggtttcagaaccacaaaacatcactgggtttggggcattaccagtaaccccggcttcagaaccatcaaacaccaccggttttggggaatttccagtagtgtcggtttcagcaccacaaaacaccactgggtttggggcattaccagtaatcccggtatcagaaccgtcaaagaccaccggtttgggggaatttccagtagtcccggtttcagaaccgcaaaacaccacgggttttggggagttcccggtaaacgcaggtgctcatgagcaacataacagcaacaaccccttcggcagcacgggcttcttgtgatcccatcttcgtatatttctcaaaatgctttatttgtctcatatgattctattgtttgtgagtagtaataaaatcacatcatcttctagtcttgcaaatcttgttctgctaatagagaaagactcctcgggattgattatataaatgaattttcattggtggaaaaaaaatgaaagatatatataactcattgtgttacattaacaaaataatttgaaaaaaaaaaaaaaaannnnnnnnnnnnnnnnnnnnnnnnnnnnt

SEQ ID NO: 117047 - DNA, 1466 bp, Arabidopsis thaliana
ccacgcgtccgaagcaagatggagtcaagtgatcgttcaagtcaagcaaaagctttcgacgagacaaaaaccggcgtgaaagggcttgtggcttcgggaatcaaagagattccagccatgttccatacacctccggatactctaacaagcctgaaacaaacagcaccaccttcgcagcagctgacgatccccacggtggatctgaaaggaggaagcatggatttgatatcgcggcggagcgtggtggagaagattggagacgctgcggagagatggggattcttccaggtggtgaatcatgggatctcggtggaggtgatggagaggatgaaagaagggattcgcaggtttcacgagcaggacccggaagtgaagaaacggttctactctagggatcacactagagatgtgctttactacagcaacatcgatctccacacttgtaataaggctgcaaattggagagatacgctcgcctgttacatggcccccgatcctcccaagttacaggacttgcccgcggtttgcggggagattatgatggagtactcaaagcaactaatgactttaggtgaatttctctttgagcttctatctgaggctttgggattaaaccctaatcacctcaaggacatgggctgtgccaagtctcatatcatgtttggccaatactatccaccttgccctcagcctgaccttactttaggcataagcaagcacaccgatttctcgtttatcaccattcttcttcaggacaatatcggagggcttcaagttatccatgaccaatgctgggttgatgtttctcctgtccctggcgcccttgtcattaacatcggagatcttctccagcttataagcaatgacaaattcattagcgcggagcatagggtgatagcaaatggatcttctgaaccgcggatttcaatgccatgtttcgtcagcacgttcatgaagccgaatccacgaatatatggacccatcaaagaacttttgtcagaacaaaaccctgccaagtatagagacttaaccatcaccgagttttcaaacaccttcaggtcccaaacgatcagtcaccctgcgttacaccatttcaggatctgaagcaattatattggtggctctgctcggtcttcatctcaaagtaactttcgtgaaaccagcttcttttttctttctcaaaaggcataaggatatttgtaacattcaaataaggtacacaatgaaaactactactacttacttacttcatcttccagccgtgatgtaataaaatttgcgaggaactttcttgttttaagtcctcgtgttaccattttcatctacgaactttggggattagattccccctcttttgaaccttgttttatgttgtatcacgaaaaaagcttattggcctcatttatcatcatcatccaccgatgatatatcgtttaattatatgttcatcaaaaaaaaaaaaaaag

SEQ ID NO: 117048 - DNA, 1146 bp, Arabidopsis thaliana
  unsure (1)..(1146): unsure at all n locations
cgactcactatttggaaagctggaccgcctgcaggtaccggtccggaattcccgggtcgtcccacgcgtgcgcggacgcgtccgcccacgcgtccgcccacgcgtccgcccacgcgtccgcccacgcgtccgcagactcagagagtcacaaagtgtgtgtagcagcaatggcgtctgttgcttcttcaactactctcatctcttctccctcttctagggtttttccagcaaagtcttcactttcctctccatctgtttctttccttcgaaccctttcttctccttccgcatctgcttctctccgctccggatttgctcgacgctcttccctcagctccacttctcgtcggagctttgctgtcaaagcccaggccgatgatcttccactggttggaaacaaggcgcctgattttgaggcagaggctgtgtttgatcaagagttcatcaaggttaagctctctgattacattggaaagaagtatgtgattctctttttctacccattggactttactttcgtctgcccaacagagattactgccttcagtgaccggcattcagaatttgagaagttgaacaccgaagtattaggtgtttctgtcgatagtgtgttctctcaccttgcatgggtccaaacagacaggaaatctggagggcttggtgatctgaactatccccttatttcagatgtcactaaatcaatctcaaagtcgttcggagtgctcatccatgatcagggaatagcactgagaggacttttcataatcgacaaggaaggagtgatccaacattccaccatcaacaatcttggtattggccgaagcgttgatgagacaatgagaaccctccaggcattacagtacatccaggaaaacccggatgaagtctgcccagcaggatggaagccgggtgagaagtcaatgaaacccgacccaaaactcagcaaagagtacttctcagctatttagaaactctactatgatagcaaaaaggtacaatctttgttatatgtgagcagagttttttttcttgtacgctaaaacaatcctttgtttgattctcactttgtccccaaaattataataaaaaactttttccgttgaannnnnnnnnnnnnnnnnnnnnnnnnnnnnnnnnnnnnnnnnn

SEQ ID NO: 117049 - DNA, 1442 bp, Arabidopsis thaliana
  unsure (1)..(1442): unsure at all n locations
acgactcactatangggaagctggcacgcctgcaggtaccggtccggaattcggctttcccgggccgccacggcgaagatgatgatgttgcaacagcatcagccttctttctctctccttacttcttctctgtctgacttcaatggcgctaagctccatttacaagtccagtacaagaggaaggttcatcagccaaaaggagcactctatgtttcagcgtcgagcgaaaagaagattctgataatgggtggtactcgattcattggtctgttcttgtccaggatccttgtcaaagagggacatcaggttacattgttcacaaggggtaaatctcctattgccaaacaattgcccggtgaatctgaccaagactttgctgatttctcttctaagattcttcacttgaaaggagacagaaaggactatgactttgtgaagtcaagtctttcagcagaaggcttcgatgttgtttatgatatcaacgggagggaggccgaagaagttgagcccatactagaagcactacccaaactagagcagtacatctactgttcttcagctggtgtttatctgaaatctgatatcttgccacattgtgaggaggatgcagttgatccgaagagcaggcacaaggggaagctggagactgagagcttactgcaatcaaaaggtgtaaactggacttctatacgtcctgtctacatctacggtccattgaattacaaccccgtcgaagaatggtttttccaccgtctaaaggcaggtcgcccaatcccggttccaaactctgggatacagatctcacaactcggtcacgttaaggacttggcaacagcctttctcaacgtgcttggtaacgagaaagccagcagagagatattcaacatctcgggggagaaatatgttacctttgatgggttagcaaaagcttgcgcaaaggccggtgggtttccggagccagagattgttcattacaacccgaaagagttcgactttgggaagaagaaggcattccctttccgtgatcagcatttctttgcatcggtggagaaagcaaagcatgtcctcggatggaaaccggagttcgacttagtggagggtctcactgactcatacaaccttgatttcggtcgcggaacattccggaaagaagcggatttcaccactgacgacatgattctgagcaagaaacttgttcttcaataatcgaaatcctaagagttgctcattcttggcttgtatgattctgatcacccggttctcttaaagttctgaactttattgtcatctcacgtatgttatggtccggattttgttcgacttttctctaaaaaaaaaaaaaaagggacgatgaagaaaccgagaaagtaaaaaaaaaaaaaaaaaaaaaaagggcggccgctctagaggatccaagcttacgtacgcgtgcatgcgacgtc

SEQ ID NO: 117050 - DNA, 652 bp, Arabidopsis thaliana
  unsure (1)..(652): unsure at all n locations
cccacgcgtccgcggacgcgtgggccaccatacacacttcaatttcaaataagagcttttcttcagttgttgctcagagacttaaccaatcaaccatggcgaagatgatgatgttgcaacagcatcagccttctttctctctccttacttcttctctgtctgacttcaatggcgctaagctccatttacaagtccagtacaagaggaaggttcatcagccaaaaggagcactctatgtttcagcgtcgagcgaaaagaagattctgataatgggtggtactcgattcattggtctgttcttgtccaggatccttgtcaaagagggacatcaggttacattgttcacaaggggtaaatctcctattgccaaacaattgcccggtgaatctgaccaagactttgctgatttctcttctaagattcttcacttgaaaggnggcaggaagggcctatgactttgtgaaggcaagtntttcagcagaaggcttcgatgtttgtttatggtatcaccgggnggnggccnaagaagttggggccatactngnggncctncccaaacttgggnaggacatttctgntctcagtggngttttnntnaatctgntttttccccattgggggggtnaattttncgagggagccnaaggggggc

SEQ ID NO: 117051 - DNA, 623 bp, Arabidopsis thaliana
  unsure (1)..(623): unsure at all n locations
taggtgacactatagaagagctatgacgtcgcatgcacgcgtacgtaagctcggaattcggctcgagctaaaatggcgacggcgttgaagaagaacagaaagaagagaggtcacgtcagcgccggacatggacgtatcggtaagcaccgtaagcatcccggaggtcgtggaaacgcaggaggtatgcatcaccacaggatcctcttcgacaagtaccatccaggttacttcgggaaagttggtatgaggtatttccacaagcttcgtaacaagttcttttgcccaatcgtgaacctggacaagctatggtcacttgttcctgaagacgtgaaggcgaaatcgagcaaggataatgttccgttgatcgatgtgacgcagcatggtttcttcaaggttttggggaaaggtcatttgcctgagaacaaacctttcgttgtgaaggctaagcttatctctaagactgctgagaagaagattaaggaagctggtggtgctgttttctcacttgcttaagtttttttttttcaaatnaagccnctttttaaattnaattccaaggnnattgaccnaaccttttttggnttttggaacaaagggnttttaanccntgggattnggttttt

SEQ ID NO: 117052 - DNA, 713 bp, Arabidopsis thaliana
accacaacgtccgcccacgcgtccgcccacgcgtgaaagggagggaggagagtgtagcagatcggcgaaaatgacaaccagattcaagaagaacaggaagaagagaggtcacgtcagcgccggacatggacgtatcggtaagcaccgtaagcatcccggaggtcgtggtaacgctggaggtatgcatcaccacaggatcctcttcgacaagtaccatccaggttacttcggtaaagttggtatgaggtatttccacaagctgaggaacaagttcttctgcccaatcgttaacctcgacaagctttggtcactcgtccctgaagatgtgaaggcgaaatcaaccaaggacaatgttccgttgatcgatgtgactcaacatggtttcttcaaggttttgggtaaaggtcatttgcctgagaacaagccgttcgttgtgaaggcgaagcttatttcgaagactgctgagaagaagattaaggaagctggtggtgctgttgtgcttactgccttaagttaggtgaatttatttgcttaactctgtttttgaatcttctatggagttttatcatcttttgttgttcttttggattttggaaagagcgagatctctttaaagttagtagttttatgaaccttttgttggattttgataaatgtttggtactccgaattcagaacttataaattgcgtactgctaggtttaaaaaaaaaa

SEQ ID NO: 117053 - DNA, 617 bp, Arabidopsis thaliana
  unsure (1)..(617): unsure at all n locations
agaaagggagggaggagagtgtagcagatcggcgaaaatnacaaccagattcaagaagaacaggaagaagagaggtcacgtcagcnccggacatggacgtatcggtaagcaccgtaagcatcccggaggtcgtggtaacgctggaggtatgcatcaccacaggcatcctcttcgacaagtaccatccaggttacttcggtaaagttggtatgaggtatttccacaagctgaggaacaagttctttctgcccaatcgttaacctcgacaagctttttggtcactcgtccctgaagatgtnaaggcggaattcaaccaaggacaatgttccgtttgatcgatgtgactcaacatgggtttctttcaaaggtttttggggtaaagggtcaatttgcccttagaaccaagccggttcgtttttgaaggcggagtttattttcggagacttctttggaggagggtttgggggaccgtggtccttgttgtcctacctgcttaagntagggaanttantttncttaaccctgttttnaacctctatnggggttnacanctttggtgccttttgnttttggaagggangnttttaaagtggagnttttnccctttntggttanaa

SEQ ID NO: 117054 - DNA, 491 bp, Arabidopsis thaliana
  unsure (1)..(491): unsure at all n locations
gaaagttggtattaggtatttccccaagctttgtaccaaggttctttgcccccatcgtgaacctggccaagctatggtcacttgttccttaagacgtgaaggcgaaatcgagcaaggataatggtccgttgatcgaatgtgacccagcatggtttcttcaaggttttggggaaaggtcatttccctgagaacaaacctttcgttgtgaaggctaagcttatctctaagactgctgagaagaagattaaggaagctggtggtgctgttgttctcactgcttagttttttttttcaattcagtctctttttaatttatttcatgttattgaactcagctttgttggattttggaatcagagatcttttaatctatggtattggattatataaaaaaaaaaaaaaaaaaaaagnnnnnnnnnnnnnnnnnnnnnnnnnnnnnnnnnnnnnnnnnnnnnnnnnnnnnnnnnnnnnnnnnnnnnnnnnnnnnnnnt

SEQ ID NO: 117055 - DNA, 254 bp, Arabidopsis thaliana
ggaaaggtcattcgcctgagaacaaacctttcgttgtgaaggctaagcttatctctaagactgctgagaagaagattaaggaagctggtggtgctgttgttctcactgcttagttttttttttcaattcagtctctttttaatttatttcatgttattgaactcagctttgttggattttggaatcagagatcttttaatctatggtattggattatataatttgcttcgcattatttggaaattttggggatt

SEQ ID NO: 117056 - DNA, 971 bp, Arabidopsis thaliana
  unsure (1)..(971): unsure at all n locations
nnnnnnnnnnnnnnnnnnnnnnnnnnnnnnnnnnnnnnnnnnnnnnnnnnnnnnnnnnnnnnngagaaatctccctctagggtttctttgatcaaaccagagagccgtcagggagagcaaaacaaagatcggagaagatgaagacgattctttcttccgaaacgatggacatccccgacagtgttaccatcaaggttcacgctaaagtgatcgaagtcgaaggacctcgcgggaagcttgttcgcgatttcaagcatctcaacctcgatttccagctgatcaaggatccagagactggaaagaagaagcttaagatcgattcgtggtttggaacacgcaaaaccagcgcctccatcagaaccgctcttagccacgtcgataacttgatctccggtgttaccagaggtttccgttacaagatgaggttcgtgtacgcccattttcccatcaacgcctccatcggcggtgacggaaagtctatcgagatccgtaacttccttggcgagaagaaggtgaggaaggtagagatgttggatggtgtaaccattgttcgatctgagaaggtgaaggatgagattgttcttgacggtaacgacatcgagcttgtttcaaggtcatgcgctttgatcaaccagaaatgtcacgtgaagaagaaggatatcaggaagtttcttgatggtatctatgttagcgagaaaagcaagatcgtagaggaagaatgaatgcccatatcatcgtcttagctcctatttcttgtcttttgaatgttagtttcgttttatggaccaaatccaccggtgttgcaaaactctggctatcccttgttccctttttgtgttcgagattttatttacttatgcacaagttttggagacgagctatcatttctcacctttgcttaataaaatcataaaatgtgaatttgggattgtnnnnnnnnnnnnnnnnnnnnnnnnnnnnnnntacaatcg

SEQ ID NO: 117057 - DNA, 753 bp, Arabidopsis thaliana
  unsure (1)..(753): unsure at all n locations
gggattttcaagcttctcaccctggatttccagctgatcaaggtcccaaagacggaaaagaaaaagcttaagatcgtttcgggtttggaacacgcaaaaccagcgcctccatcagaaccgcttttagccacgtcgataacttgatctccggtgttaccagaggtttccgttacaaaatgaggtttgtgtacgcccattttcccatcaacgcctccatcggcggtgacggaaagtctatcgagatccgtaacttccttggcgagaagaaggtgaggaaggtacagatgttggatggtgtaaccattgttcgatctgagaaggtgaaggatgagattgttcttgacggtaacgatatcgagcttgtttcaaggtcgtgcgctctgatcaaccagaaatgtcacgtgaagaagaaggatatcaggaagttccttgacggtatctatgttagcgagaaaagcaagatcgtagaggaagaatgaatactcatattcccctcttagctcatatttcttgtgtttggaatgttgttagttttgttttatggaccaaatccaccggtgatgtaaaccttgccttttttttgttcgagaatttattaacttatgcaacaagttttggagacaattagagacccattccctctcccacttttgccaaattacatcttctcggatgaattttgaattctgaagnnnnnnnnnnnnnnnnnnnnnnnnnnnnnnnnnnnnnnnnnnnnnnnnnnnnnnnnnnnnn

SEQ ID NO: 117058 - DNA, 931 bp, Arabidopsis thaliana
  unsure (1)..(931): unsure at all n locations
ccgttaccctaaacctcaagccgtcgtctccaaagttccccctcagagacgaaaaaatgaagaccattttgtcctcggagactatggacatccccgacggcgtcgccattaaggtaaacgccaaggtgattgaggtcgaaggtccacgaggtaaactcactcgtgacttcaagcatctgaatctcgatttccagttgattaaagaccaagtcactggaaaacgtcagcttaagattgattcttggtttggttctcgtaagacaagtgcttcgattagaactgctttaagccatgttgataatctcattgctggtgttactcaaggttttctttatagaatgagatttgtgtatgctcattttcctatcaatgcttctattgatggtaacaataagagtattgagattcgtaacttccttggtgagaaaaaggtgaggaaggttgagatgttggatggtgttaagattgttcgatctgagaaggttaaggatgagattattcttgagggaaatgatattgagcttgtttcacggtcttgtgctttgatcaatcagaaatgtcatgtgaagaagaaggatatcaggaagtttcttgatggtatctatgtgagcgagaaaggcaagatcgcagtcgaggaatgaagttcgctattgaaagttctatattagattttatatggtgaagcagtgatattatcgtagctttttgttttacatctttcttatggatttgtagttttgtttttccttttgaatcattgatgaatgcaaattcattatccggtcatgtttggtcttttatttactctcttcttacagaagttttggaggcctcaaaaaaaaaaaaaaaaaaaaaaaaaaagnnnnnnnnnnnnnnnnnnnnnnnnnnnnnnnnnnnnnnnnnnnnnnnnnnnnnnnnnnnnnggagtgtc

SEQ ID NO: 117059 - DNA, 1901 bp, Arabidopsis thaliana
atacgactcatatagggaaagctggtacgcctgcaggtaccggtccggaattcccgggtcgacccacgcgtttgagccgtgtttgtgttgagatgtctatgatcgatgagccgttgtacccaatcgccgtacttatagacgagttaaaaaacgatgatattcagctaagattgaattccatcagaaggctttctacgatcgctcgtgctcttggggaagagaggactagaaaggaattgatccctttccttagcgaaaacaatgacgatgatgatgaggttttattagcaatggctgaagaattgggtgtgtttattccttatgttggtggtgttgagtatgcacatgttcttcttccacctttggaaactctttcgactgtcgaagaaacttgtgttagggagaaagctgttgagtcgctttgtagagttggctctcagatgagggagagtgacttggttgatcatttcatttcgttagttaagcgacttgccgctggtgagtggttcacagctagagtatcggcttgcggtgttttccatattgcatacccgagcgcgccggatatgttgaagactgagttaagatcgttgtatactcagctttgtcaggatgatatgccgatggtaaggagagctgcagcaactaatcttgggaaatttgctgctacggttgaatcagcgcatttgaagaccgacgttatgtccatgtttgaggatcttactcaagatgatcaagattctgttagattattggccgttgagggttgtgctgctcttgggaaattgttggagcctcaggattgtgtccaacacattcttcccgtgattgttaatttctcgcaggataagtcttggcgtgtgcgctatatggttgcaaatcaactctacgagctttgtgaagccgtgggacctgagcctactaggacggagctggtgcctgcatatgtgcgcctacttcgtgataatgaagctgaagtacgcatagcagctgccggaaaagttacaaagttttgtcggattctaaaccctgaaattgctatccaggacattctcccctgtgtgaaggagctatcatcagactcttctcagcatgtcagatctgcattggcctcagttataatgggaatggctccagtcttgggtaaggatgcaacaattgagcatctccttccaatctttctttctctattgaaagatgagttcccggatgtacggctgaacattatcagcaaacttgaccaagtgaatcaggttattgggattgatctactatcacaatccttgttgccagctattgtagaacttgctgaagatagacactggagagtaagacttgctataatcgagtatatccctttgttggcaagtcagttaggtgttggcttctttgacgataagcttggtgctctttgcatgcaatggttacaagacaaggttcactcaatccgcgatgctgctgctaacaatctcaagcggcttgctgaggaatttggtcctgaatgggcaatgcaacatatagttcctcaggttcttgagatggttaacaaccctcactatctctaccgaatgaccattttgcgtgcggtgtctcttcttgcacctgtaatgggctcagagattacatgctctaagctcttacctgtagtaatgactgcatctaaagacagagttccaaacatcaaattcaacgtcgctaaagtacttcaatccctcattccaatagttgatcaatcggttgtggagaagacgattcgtcctgggcttgtggagctaagcgaggatccagatgttgatgtcaggtttttcgcaaaccaagctctacaatctattgacaatgtgatgatgtctagctaaaaacattagatcttgtctctctgcttataatcgttttctatttgg

SEQ ID NO: 117060 - DNA, 2133 bp, Arabidopsis thaliana
  unsure (1)..(2133): unsure at all n locations
gcgaaagacgagctccggtctcatttctcgttcttctgattgatagatcgctcggaacttggaaagcagcgtaatcggtagggagtgatttgagttttggtgaggatgtctatggttgatgagcctttatacccgattgctgtgcttatcgacgagctaaaaaacgatgatattcagcgtagattgaactctattaaacggctttctatcattgctcgtgctcttggagaggagaggacaagaaaagagttgattccatttcttagtgagaacaatgacgatgacgatgaggtgcttttggctatggcggaagagttggggggttttattctgtatgtaggaggggttgagtatgcatatgttctgcttccacctttggagactctatccactgttgaggaaacttgcgtgagggagaaggctgtggattcactttgtagaattggtgctcagatgagggagagtgacttggttgagcatttcactcctctggctaagcgactttcagctggtgaatggttcacagccagagtatcagcatgtgggattttccatattgcatacccaagtgccccagatgtgctaaagacggagctaagatcaatatatggtcagctttgtcaagatgacatgccaatggtgcgcagagctgcagcaactaatttggggaagtttgctgctacaattgaatcagctcatttgaagacagacattatgtccatgtttgaggatcttacgcaagatgatcaagattcggttagattattggctgttgagggttgtgctgctcttgggaaattgttggagccccaggactgtgttgcacacattcttcctgtgattgtcaatttctcgcaggataagtcctggcgtgtgcgttatatggttgcaaatcagctctatgaactttgtgaagctgtaggaccggagccaactaggacggatctggtgcctgcatatgctcgtctacttcgtgataatgaggcagaagttcggatagcagctgctggaaaagttaccaagttttgtcgcattttaaaccctgaactcgctatccagcacattcttccctgtgtaaaggaattatcatcagactcttctcagcacgtcagatctgcattggcatcagttataatgggaatggctccagtcttgggtaaggatgcaacaattgagcatcttcttccaatctttctttctctattgaaagacgaatttcctgatgtacgcttaaacattatcagcaaacttgaccaagtgaaccaggttattgggattgatctactatcacaatcgttactgccagccattgtagaacttgctgaagacaggcactggagagtacgtctggctataatcgagtatattcccttgttggccagtcaattaggtgtaggcttctttgatgagaagcttggtgctctttgcatgcaatggttacaagacaaggttcactcaatccgtgaagctgctgcaaacaatctgaagcgtcttgctgaagagtttggtcctgaatgggcaatgcagcatatagttcctcaggttctagagatgattaacaacccacactatctatatcggatgacgattcttcgtgcagtatcgcttctcgctccagtaatgggatccgagatcacatgttccaaactcttacctgcggtaataactgcatctaaagacagagttccaaacatcaaatttaacgtggccaaaatgatgcaatctctcattccgatagtcgaccaagcggttgtggagaacatgatacggccatgcttggtggagctaagtgaagacccagatgttgatgttcggtatttcgcaaatcaagctctccaatctattgacaatgtgatgatgtctagctaaaaaaaggtaaagaagacagcaacgaattgtgtttggttctcatgagattttgtaaacgatactttgtcgtgtgttgtcttttactttacacgtacgtgaccattgtttctctctgctactaatgttaatgttggcttcatgttttctgtgatttaaaggttgggcgtaaaaaaaaaaaaaaaaaaaagcnnnnnnnnnnnnnnnnnnnnnnnnnnnnnnnnnnnnnnnnnnnnnnnnnnnnnnnnnnnnnnnnnnnnnnnnnna

SEQ ID NO: 117061 - DNA, 528 bp, Arabidopsis thaliana
cccacgcgtccgcaacaaagacttttgtgcaataaagcatggaatccaacagaggtcaaggttcgatccaacagttgcttgctgctgaggtagaagctcaacacattgtcaatgctgcaaggaccgcaaaaatggcaagactgaagcaagctaaggaagaggcagagaaagagattgccgaatacaaagctcaaacagagcaagacttccagaggaaacttgaggagacaagcggagactctggtgcgaatgtgaagaggctggagcaagagactgataccaaaatcgagcagttgaagaacgaagcatcgaggatttccaaagatgttgtcgaaatgcttctgaaacatgtgaccacagtgaagaactgagagatatttttataagaaagtaaaaaaaaagtttatgaaaaaagtgggagtcatttttgagtgatctgctctctttctcttttgtgggtatttctggatttgagagactcatcttatattattgttgctacttaaaaaaaaaaaaaaagggcggccg

SEQ ID NO: 117062 - DNA, 802 bp, Arabidopsis thaliana
tccaggaccggtccggaaattcccggggtcgatccacgcctctctgtccattttcgtggcgaagaagattttttaaggtcttttcaagaaattatggaatctgcagggatccagcaactgcttgctgctgaacgtgaagctcagcaaattgtcaatgccgctaggaccgcaaaaatgactagactgaagcaagccaaggaagaagctgaaacagaggttgctgagcacaaaaccagtacagagcaggggttccagaggaaactcgaagcgacaagtggagattcaggtgcaaacgtgaagaggcttgagcaagagactgatgccaaaatcgagcaattgaagaacgaagctacgagaatttccaaagatgttgtggatatgcttctgaaaaatgtgaccacagtgaacaactgagtataatatctcaaggaaaccatcaactgtaaaatggtgtgatattttcagtggatacgttcattcctttctttatattgttttgtggaatccagactcgtctgttgctattgattttgaaattgtgtcttgaagcattgtattcatttctacagaaagtcgcttaggacttttgtgtgttgtaataaaattgagaacaaaggagcccattggattttgtttcatcaagaagattgaaaatattcgaacaagaaccgtcggttgttttgccaaaaaaaaaaaaaaaaaaaaaaagggcggccgctttaaaggattccaggttaaggtaggggtgaatgcgacgtcagagctcttctatagtgcacgtacacaaaccgggccgggggcg

SEQ ID NO: 117063 - DNA, 1838 bp, Arabidopsis thaliana
ggcagcagcaaatactatcatcacccatctccttagttctattttataattcctcttctttttgttcatagctttgtaattatagtcttatttctctttaaggctcaataagaggagatgggtgaaaccgctgccgccaataaccaccgtcaccaccaccatcacggccaccaggtctttgacgtggccagccacgatttcgtccctccacaaccggcttttaaatgcttcgatgatgatggccgcctcaaaagaactgggactgtttggaccgcgagcgctcatataataactgcggttatcggatccggcgttttgtcattggcgtgggcgattgcacagctcggatggatcgctggccctgctgtgatgctattgttctctcttgttactctttactcctccacacttcttagcgactgctacagaaccggcgatgcagtgtctggcaagagaaactacacttacatggatgccgttcgatcaattctcggtgggttcaagttcaagatttgtgggttgattcaatacttgaatctctttggtatcgcaattggatacacgatagcagcttccataagcatgatggcgatcaagagatccaactgcttccacaagagtggaggaaaagacccatgtcacatgtccagtaatccttacatgatcgtatttggtgtggcagagatcttgctctctcaggttcctgatttcgatcagatttggtggatctccattgttgcagctgttatgtccttcacttactctgccattggtctagctcttggaatcgttcaagttgcagcgaatggagttttcaaaggaagtctcactggaataagcatcggaacagtgactcaaacacagaagatatggagaaccttccaagcacttggagacattgcctttgcgtactcatactctgttgtcctaatcgagattcaggatactgtaagatccccaccggcggaatcgaaaacgatgaagaaagcaacaaaaatcagtattgccgtcacaactatcttctacatgctatgtggctcaatgggttatgccgcttttggagatgcagcaccgggaaacctcctcaccggttttggattctacaacccgttttggctccttgacatagctaacgccgccattgttgtccacctcgttggagcttaccaagtctttgctcagcccatctttgcctttattgaaaaatcagtcgcagagagatatccagacaatgacttcctcagcaaggaatttgaaatcagaatccccggatttaagtctccttacaaagtaaacgttttcaggatggtttacaggagtggctttgtcgttacaaccaccgtgatatcgatgctgatgccgttttttaacgacgtggtcgggatcttaggggcgttagggttttggcccttgacggtttattttccggtggagatgtatattaagcagaggaaggttgagaaatggagcacgagatgggtgtgtttacagatgcttagtgttgcttgtcttgtgatctcggtggtcgccggggttggatcaatcgccggagtgatgcttgatcttaaggtctataagccattcaagtctacatattgatgattatggaccatgaacaacagagagagttggtgtgtaaagtttaccatttcaaagaaaactccaaaaatgtgtatattgtatgttgttctcatttcgtatggtctcatctttgtaataaaatttaaaacttatgttataaattataaaacccgtgtgttttcaattctatatcaaattaaaaaaagggcggccgctctagaggatccaagcttacgtacgcgtgcatgcgacgtcaa

SEQ ID NO: 117064 - DNA, 443 bp, Arabidopsis thaliana
  unsure (1)..(443): unsure at all n locations
ccggcggaatcgaaaacgatgaagaaagcaacaaaaatcagtattgccgtcacaactatcttctacatgctatgtggctcaatgggttatgccgcttttggagatgcagcaccgggaaacctcctcaccggttttggattctacaacccgttttggctccttgacatagctaacgccgccattgttgtccacctcgttggagcttaccaagtctttgctcagcccatctttgccctttattgaaaaatcagtcgcagagagatatccagacaaatgacttcctcagcaagggatttggaaatcaggaatccccggntttaaaggcctccttacaaaggtaaaccggttttcaaggatggggtttacaaggnngtgggcttttttcggtanaaaccccngtggataatccgattgcttggtngccngtttttttaaaannacgg

SEQ ID NO: 117065 - DNA, 705 bp, Arabidopsis thaliana
  unsure (1)..(705): unsure at all n locations
gggtgatcccnaccnnttgcnctttaaaaanaaaccccccntttnttnncncctcggtggagtgaccaaatcttnctcancccanctttccctttattggaaatcagtcncagaganaaaccaagccattgccttcctcaccaaggaaattgaaatcagaanccccggatttaatctcctcnccaaagaaaacgttttcaggatggttnacaggagtggctttntcgttacaaccccccgtgatatcgatgctgatgccgttttttaacgacgtggtcggggatccttaggggcgttagggttttggcccttgccggtttattttccggtggagatgtatattaagcacaggaaggttgagaaatggagcaccagatgggtgtgtttacacatgcttagtgttgcttgtcttgtgatctcggtggtcgccggggttggatcaatcgccggagtgatgcttgatcttaaggtctataagccattccagtctacatattgatggttatgggccatggacaacagagagagttggtgtgtaaagttttccatttcaaagaaaactccaccaatgtgtatattgtatgttgttcctcatttcggatggtctcatctttgtaataaaatttaaaacttatgtttttnatttnnnaaaaaaaaaaaaaaaaaaaaaaagggcggccgctttagaggatcccagcttacggc

SEQ ID NO: 117066 - DNA, 640 bp, Arabidopsis thaliana
  unsure (1)..(640): unsure at all n locations
nnnnnnnnnnnnnnnnnnnnnnnnnnnnnnnnnnnnnnnnnnnnnnnnnnnnnnnnnnnnnnnnnnnnnnnccacgcgtccgcccacgcgtccgcggacgcgcggggggttatgccgcttttggagatgcagcaccgggaaacctcctcaccggttttggattctacaacccgttttggctccttgacatagctaacgccgccattgttgtccacctcgttggagcttaccaagtctttgctcagcccatctttgcctttattgaaaaatcagtcgcagagagatatccagacaatgacttcctcagcaaggaatttgaaatcagaatccccggatttaagtctccttacaaagtaaacgttttcaggatggtttacaggagtggctttgtcgttacaaccaccgtgatatcgatgctgatgccgttttttaacgacgtggtcggggatcttagggggcgttaggggttttggcccttgacgggttattttcccgtggggatttatttaagcanngggaggttttgnaaatgggnccggattgggttttttnaaanccttaggnttcctttctttnancncgggggcccccgggttgacaatncccggnatcttnnctaagggntaaccctaagtcaaat

SEQ ID NO: 117067 - DNA, 638 bp, Arabidopsis thaliana
agacccatgtcacatgtccagtaatccttacatgatcgtatttggtgtggcagagatcttgctctctcaggttcctgatttcgatcagatttggtggatctccattgttgcagctgttatgtccttcacttactctcccattggtctagctcttggaatcgtttcaagttccacccgaatggagttttcaaaggaagtctcactggaattaagcatcggaacaggtgactcaaacccacaagatatggagacccttccaagcacttggagacattgcctttgcgtactcatactctgttgtcctaaccgagattcaggatcaatcgccggagtgatgcttgatcttaaggtctataagccattcaagtctacatattgatgattatggaccatgaacaacagagaccacgctggtgtgtaaagtttaccatttcaaagaaaactccaaaaatgtgtatattgtatgttgttctcatttcgtatggtctcatctttgtaataaaatttaaaacttatgttataaattataaaaccggtgtgttttcaattcaaaaaaaaaaaaaaaaaaaaaacaaaaaagcggccgctctagaggatccaagcttacgtacgcgtgcgtgcgacgtcatagctcttct

SEQ ID NO: 117068 - DNA, 1780 bp, Arabidopsis thaliana
tcttcttcttattttatcatagctaagctcaaaaacaatcgatagatggagaagaagaagagcatgttcgttgaacagagcttcccggagcatgaaattggcgatactaacaaaaactttgacgaggatggccgcgacaaaagaactgggacatggatgaccgggagtgcacacataataacggccgtgatagggtcgggagtgttgtctttggcgtgggcaatcgcacaacttggatgggtggcaggacccgccgtactaatggctttttctttcataacatattttacatcaaccatgcttgccgattgttaccgttcccctgaccctgttaccggcaaacgcaactacacctacatggaagttgtccgatcctatctaggaggaagaaaagtgcaattatgtggattggctcaatacgggaatctgattggaataacaatcggctacacaatcacagcttcaattagcatggtggcagtgaagaggtcgaattgtttccacaaaaatgggcataatgttaaatgtgccacttcaaacactcccttcatgatcatatttgcaatcatccaaattattcttagccaaatcccaaatttccataacctctcttggctctccattcttgcggccgtaatgtccttttgttatgcctccatcggtgttggtctctccatcgccaaagcggcgggtggcggtgagcacgtaagaacaacactgacaggagttacggtcgggattgatgtatcgggtgccgagaaaatatggagaacgttccaagcgattggggacattgcatttgcctacgcatactcaactgttctcattgaaatacaggacaccttgaaagcaggtcctccatcggagaacaaagccatgaaaagagcaagccttgtgggtgtctccacaacaaccttcttctacatgttatgcggttgtgttggttacgctgcctttggaaatgatgctcctggaaatttcctaactggttttggtttctatgagccattctggctaatcgactttgccaatgtctgcatcgccgtgcaccttatcggcgcctaccaagtcttttgtcaaccaatttttcagttcgtagagagccagagcgcgaaacgttggcctgataacaagtttattacaggagaatacaaaatccatgtcccttgctgtggtgattttagtatcaacttcctcagattggtatggaggacttcatatgttgtggtcaccgcggttgtagccatgatcttccctttcttcaacgatttcttgggtcttattggagcagcttccttctggcctttgactgtttactttcccattgagatgcatattgctcagaagaagataccgaaattctctttcacttggacttggttaaaaatcttgagttggacttgtttcattgtgtccctcgttgctgcagccggatcagtgcaaggactcatacaaagtctcaaggatttcaagcctttccaggctccttagtgaaatatgtgttctcgccaacgtctccaagaacacaagttccatgcactctcttccctccaataaaagtttctatttctttgtagtttattggtgtgagacaatctcataccaaatattgtacctctacttgcttgtcttaaacaaatctatcatcagtttatccccaaaaaaaaaaaaaaaaaaaaaaaaaagggcggccgccgactagtgagcttgtcgacccgggaattaaatccggaccgggacctgcagggggaccagccttcccttatattaattgtattaa

SEQ ID NO: 117069 - DNA, 1739 bp, Arabidopsis thaliana
gaatcgcggccggtctctctctcgttgaatccttgttaatctttttcttcaatctctcgatctgatcgttatcgaaaccgcgcgattctaaccaagtccagttaattttgtgctccatagcgattccatggcttctttaatgttatctctcggttccacttctctgttaccgcgcgagattaacaaggataagctaaagcttggaacttctgcttcgaacccgttcctaaaagcaaagtcttttagcagagtgactatgacggttgcagtgaagccttctcgtttcgagggtataactatggctccaccagaccctattcttggagtcagtgaagcattcaaagctgacactaacgggatgaaactcaatcttggtgttggtgcttatcgtactgaggaactccagccttatgtgcttaatgttgttaaaaaggcggagaatttgatgttggagagaggagataacaaagagtatcttccaattgaggggttggcagcattcaacaaggctactgctgagttgctatttggagctggtcatcctgtcattaaggaacaaagagtagcaacaattcagggtctttcgggaacaggttcactgcgattagcagcggctcttatagagcgttatttccctggagcaaaagttgtgatctcatcaccaacctggggtaatcacaagaatatcttcaatgatgccaaagttccgtggtccgaataccgctactatgatccaaaaacaattggtttggattttgagggaatgatagcagatataaaggaagctccagaaggatccttcatcttgcttcacggatgtgctcacaacccaactggaattgacccaacaccagaacagtgggtaaaaattgctgatgtcattcaggaaaagaaccatatcccatttttcgatgttgcataccagggctttgctagtggaagccttgatgaagatgcagcatctgtgagattatttgctgagcggggaatggagttttttgttgctcagtcatatagtaaaaatttaggtttgtatgcagaaagaattggggcaatcaatgtcgtgtgctcctcagctgatgctgctacaagggtcaagagccagttgaaaaggattgctcggcctatgtactcgaatccaccagttcatggggcgagaatcgtggccaatgtagtgggtgatgtaactatgttcagtgaatggaaagcagagatggaaatgatggcaggaagaataaagacggttagacaagagctgtatgatagcctcgtttcaaaagacaagagcgggaaggactggtccttcattctgaagcaaattggcatgttctctttcaccggcctaaacaaagctcagagcgataacatgacggacaaatggcatgtgtatatgactaaagacgggaggatatcattggccggattatctctggccaaatgcgagtatcttgctgatgcgatcatcgactcataccataacgtaagctgagcttccatctcagtagatgacaataagaaacagttttatataccctttttagcttcttcttgatctttgattgaaaccagatggctaaattaataagctagcatcacactatgattgctagacaattttcaaggaaacttttgatttgatcgtgtttgacaggccttgttgtattggaagactcccatcgagttatagaagaacttgttacgattgaaaaaaaaaaaaagcggccgcgaattctgaccgg

SEQ ID NO: 117070 - DNA, 507 bp, Arabidopsis thaliana
cgcctgcaggtaccggtccggtattcccgggtcgaacccgcgtccgcgtgatcatattttgtggatcacatcattgtcttatttttggaattgcttatcctcgcactagttcactgatttgagatctgtgcagttaattttgtgctccatagcgattccatggcttctttaatgttatctctcggttccacttctctgttaccgcgcgagattaacaaggataagctaaagcttggaacttctgcttcgaacccgttcctaaaagcaaagtcttttagcagagtgactatgacggttgcagtgaagccttctcgtttcgagggtataactatggctccaccagaccctattcttggagtcagtgaagcattcaaagctgacactaacgggatgaaactcaatcttggtgttggtgcttatcgtactgaggaactccagccttatgtgcttaatgttgttaaaaaggcggagaatttgatgttggagagaggagataacacaaagtat

SEQ ID NO: 117071 - DNA, 1350 bp, Arabidopsis thaliana
  unsure (1)..(1350): unsure at all n locations
nnnnnnnnnnnnnnntgatacgtcnnnnnnnnnnnnnnnnnnnnnnnnnnnnnnnnnnnnnnnnnnnnnnnnnnnnnnnnattccacgccttgagcagacgaagaaaacccaaaaaaaatccagatccagctgaaattgaattttcaaccaacgaagaagagatttttccaagagcaacagacaagaagaagagaatgaagtcggagctaaatttaccagctgggttccgattccatccaacggacgaggagcttgtgaaattctacttgtgccggaaatgtgcttccgagcagatctcggctccggttatcgccgagattgatctctacaagttcaatccttgggagcttccagagatgtctctgtacggagagaaagagtggtacttcttctcacctagagatcggaaatacccaaacggttcgcgtcctaaccgggcagcaggaaccggttattggaaagctaccggagcagataaaccgattggtaaaccgaagacgttgggtatcaagaaagcactcgtcttctacgcagggaaagctccaaaagggattaagaccaattggataatgcatgagtatcgtctcgctaatgttgatagatcagcttctgttaacaaaaagaacaacctacgacttgatgattgggttttatgtcgaatatacaacaagaaaggaaccatggagaagtatttccccgcggatgagaagccgaggaccacgacaatggctgaacagtcatcatcaccttttgatacatcagactcgacttacccgacattgcaagaggatgattccagcagctcaggtggtcacggtcacgtggtgtcaccggatgttttggaggttcagagcgagcctaaatggggagagcttgaggatgctttggaagcttttgatacttcaatgttggtagttccatggagttgttgcagcctgacgcttttgtccctcagttcttgtatcagtctgattatttcacttccttccaggatccgcctgagcagaaaccattcttgaattggagttttgctccacaggggtaaaaacggaagagaccaaaaaaggtgtttgctagtagtactgtgatgtgccagagagaagagtctcatctcaactcatccctggctcttagtagtaaaagaagattgtagaatgttaatagcttttagcatcaatgtctcattagcaggcacattcttgttctttcatgagaagtttatatgaaaactaaaaatttatattcaaattcttcaagatgttgcacttatgtagatactgatattaaataacaacctaacctttatgagnnnnnnnnnnnnnnnnnnnnnnnnnnnnnnnnnnnnnnnn

SEQ ID NO: 117072 - DNA, 2331 bp, Arabidopsis thaliana
  unsure (1)..(2331): unsure at all n locations
nnnnnnnnnnnnnnnnnnnnnnnnnnnngggaaagctacgtacgcctgcaggtaccggtccggaattccctggtcgacccacgcgtccggtcaccttatcgtctctctatctcctccttcctatatccccttgctctctgggtttttgctcagtgtgctacgtgagagatagagagatggaaggtctgattcaaaccagaggaattctctctttacccgcgaagcccatcggagtgagaaggcttctccaaccctcacatggcttaaagcaaagacttttcaccacaaacttacctgccttgtccttatcctctaatggtcacaagaaatttcaagcctttcagcaaatcccacttgggatttcggtttcccacaaggagagaagcagaggattcatctgcaaggcggaagctgcggcggccggaggcggaaatgtgttcgacgaaggagacacagcggcgatggcggtgtcgcctaagattttcggtgtggaggttacgactctgaagaagattgttcctttagggctaatgttcttttgcatccttttcaattacacaatccttagggacacgaaggatgttttggtggtgacggctaaaggaagttctgctgagattataccctttttgaagacatgggtgaatcttccgatggctattgggtttatgttgctatacaccaaactttccaatgttctctccaaaaaggctctcttttacactgttattgtccctttcattgtctactttggagcctttggtttcgtgatgtaccctctcagcaatttgattcagcctgaagctcttgctgataagcttcttgcaacactcggccccagattcatgggtcctctcgcaatcatgaggatttggagtttctgtttgttctatgtcatggctgagctttggggtagtgttgtcgtttcagttctcttctggggatttgccaaccagattacaactgttgacgaagccaaaaagttctatcctctgtttggacttggggccaatgttgcacttatcttctcaggaagaactgtgaaatatttctctaatatgagaaagaatcttggtcctggagttgatggctgggctgtttcattaaaagctatgatgagtattgtcgtggggatgggtctcgccatctgtttcctctactggtgggtgaatagatatgtgccccttccaacccgtagcaagaagaagaaggtgaaaccacagatgggaacaatggagagcttgaagttcttggtgtcatcaccatacattagggatcttgctactttggtggttgcatatggaattagtatcaaccttgttgaagtcacatggaaatcaaagcttaaaagtcagttccctagcccgaacgaatattcagcatttatgggcgacttctcaacctgcacaggtattgcaacattcacaatgatgcttctaagccaatacgtgtttaagaagtatggttggggagtagctgcaaagatcacaccaaccgttctgctattgaccggtgttgccttcttctctctgatactgtttggcggcccattcgcaccattggttgccaagcttggtatgacaccgctactcgcagcagtgtacgttggtgccctccagaatatcttcagcaagagtgccaagtacagcttgttcgactcccttgcaaagcaaatggcttatatcccattggatgaggacaccaaggttaaaggcaaagctgcaattgatgtggtctgcaacccattggggaaatcaggcggtgctctaatccagcagttcatgatccttacattcggctcactcgccaattccacaccttaccttggagtcatcctgctcggtatagtcactgcatggttagcagcagctaaatcgctggagggacagtttaacactctcatgtctgaggaagagcttgagagggaaatggagagagcttcatcagtcaagattcctgttgtatctcaggaggatgcgccatcaggagaaactacgagccaactatcggagaaatctactcctactggcatttagacgatgatgaataaaagggttttgggatttggttacctgttggttttaatgttttggtcaggagtaatattttgatagtgagaagactaaaattaatcatttagttatatgtttttttggttgttattgttctcttgatgataccaatacaaaactagtaataaaatttccttgttcagtaaaaaaaaaccctgacgtagctcgaggaaaaaaaaaaaaaagggcggccgctctagaggatccaagcttacgtacgcgtgcatgcgacgtcatagatctcntatagtgcgtccta

SEQ ID NO: 117073 - DNA, 2255 bp, Arabidopsis thaliana
ctatattctttcctacgtcagggcaaccagtctcctttatcatctctccatctcatcatcctcctccatttctctcccattttttcttctgtgtatctgcgggagagagtgaaatagagagatggaagctgtgattcaaaccagagggcttctctctttacccaccaaacccatcggagtgagaagccaacttcagccttcccatggcttaaagcagagacttttcgccgcgaagccaagaaatctacatgggttgtctctatcctttaacgggcacaagaaatttcaaacctttgagccaaccctgcatgggatttcgatttcccacaaagagagaagcaccgagttcatatgcaaggcggaggcgcggctgctggcgacggagctgtcttcggcgaagcgattccgcagctgttgtagcctcgcggaagattttcggtgtggaggttgcaaccttgaaaaagattatccctttaggattgatgttcttttgtattcttttcaattacacaattctgagggatacaaaggatgtcttggtggtgacggcgaaaggaagttctgctgagattatacctttcttgaagacttgggtgaatcttcctatggccattgggtttatgctcctctacactaaactctccaatgttctctccaagaaggctctgttttacactgttattgtccctttcatcatctactttgggggctttggtttcgtcatgtaccctctcagcaactatattcacccggaagctctcgcagataagctccttacaaccctcggcccaagattcatgggtcctattgcaatattgcggatttggagtttctgtttgttttatgttatggctgagctttggggtagtgtggtggtctcagttctcttctggggctttgctaatcagatcacaactgtggatgaagccaagaaattctatcctttgttcggcattggagccaatgttgcactgattttctcaggaagaaccgtgaaatacttctctaacttgagaaagaatcttggtcctggagttgacggcagtttcgttgaaagccatgatgagcattgtggtgggaatgggactcgcatttgtctctctattggtgggtcgaatagatatgttcctcttccaacccgtagcaagaacaagaaggagaaaccgaagatgggaacgatggaaagcttgaagttcttggtatcatcaccatacattagagatcttgctactttagtggtggcatacggtattagtatcaatcttgtggaagtcacatggaaatcaaagcttaaagctcagttccctagcccgaatgagtactcagcatttatgggagcattctcaacctgcacgggtgttgcaacattcacaatgatgcttctcagccaatacgtattcaataagtatggttggggagtagctgcaaagatcaccccaactgttctgctattgactggtgttgcgttcttctctctaatattgtttggcggcccattcgcaccacttgttgccaagcttggtatgacaccgctacttgcagctgtgtatgtcggtgcccttcagaatatcttcagcaagagtgccaagtacagcttgttcgacccttgcaaagaaatggcctatatcccattggatgaggacaccaaggttaaaggcaaagctgcgattgacgtggtctgcaacccattaggaaaatcagggggagctttaatacagcagttcatgatcttatcctttggatcactagcgaattcaacgccgtatctaggaatgatcttgttggttattgtcactgcgtggttagctgcagctaagtcgctggagggacagttcaacagcttgcgtctgaagaagagcttgagaaggaaatggagagagcttcatcggtgaagatccctgtcgtgtctcaggacgaaagcggaaacggttcccttggagaatctcctagcagttcaccggagaaatctgctcccaccaacttataaaaagtttttttttgatatttggttttgttgggggggaaagaaagaaggatgatgaatcaaaaataagattttgagagcagtctctcaaacaatcgcccttttgcaccactcactctttatagtctgtagctttttttccttacattcttttcagttcaatgtggtttcacgttctaagtttcttcctaaaaaaaaaaaaatatagtcactaagattataaattatgatagtctactctcaagcacacaaccaatgtttgcctgagtct

SEQ ID NO: 117074 - DNA, 2888 bp, Arabidopsis thaliana
ctttgtgaacaaaacacatctcgtatacttcagatctagactcgaaaattttagacctctttacaattggtctttgttcatctgaagttggagaaaatagttagcttaggtcggatcttttcatatgctttggatcctccttcgtctcttttgtataattttaaccttatcaagagttctttttgaatctcaaaagattatatagtagtatagaaggtttatatgtatatgtatagccagatagtttatgttgtttaaagattcgatgatagccaagttgggttaactttctttttccttgcctccttactcacatacaaaccctatctgtccgtacaaaatactaaaaaccctaacttttctctctccaccaatctagtttattgtttcatttccacttcaacgatgaaaagcttgcatgtggcggccaacgccggagatctggctgaggattgtggaatactcggtggagacgctgatgatactgttttgatggatggaattgatgaagttggtagagagatctggttagatgaccatggaggagataataatcatgttcatggtcatcaagatgatgatttgattgttcatcatgacccttcaatcttctatggagatctcccaacgcttcctgatttcccatgcatgtcgtcttcatcatcgtcttcaacatctccagctcctgtcaacgcaatcgtctcctcagcctcttcttcttcggcagcttcttcctccacttcctcagctgcttcttgggctatattgagatcagatggagaagatccgactccaaaccaaaaccaatacgcatcaggaaactgtgacgactcttctggtgcattgcaatccacagcttccatggagattccattagacagcagtcaaggttttggttgcggcgaaggcggtggtgattgcattgatatgatggagactttcgggtacatggatctacttgatagcaacgagttctttgacacctcagctatatttagccaagacgacgacacgcaaaaccctaacttgatggaccaaacccttgagagacaagaagaccaggtcgttgttccgatgatggagaataacagtggtggagacatgcaaatgatgaattcttccttggaacaggacgatgatctcgctgctgtgtttttggagtggctaaagaacaacaaggagactgtgtcggctgaggatttgaggaaagtaaagataaagaaagctacgattgaatcagcggcaagaagactaggcggtggtaaagaagcgatgaagcagcttttaaagctgattcttgaatgggtccaaactaatcacttacaaagaagacgcaccaccaccaccaccaccaacctctcttatcaacaatcattccaacaagatccatttcaaaaccctaaccctaataacaacaacctaatcccaccgtccgaccaaacctgtttctcaccttcaacatgggttcctccaccaccacaacaacaagcttttgtctcggacccgggttttggatacatgcctgctccaaactatccgccacagccagagttccttcctttacttgaatctccaccgtcatggccaccaccaccacagtctggtcccatgccacatcaacaattccccatgccgccaacctcgcagtataatcaatttggagatccaacaggtttcaatggatacaacatgaatccgtaccaatatccttatgttcctgcaggacaaatgagagatcagagattactccgtttgtgttcctcagcaactaaagaggcaagaaagaaacggatggcgagacagaggaggttcttgtctcatcaccacagacataacaacaacaacaacaacaacaacaataatcagcagaaccaaacccaaatcggagaaacctgtgccgcggtggctccacaacttaaccccgtggccacaaccgccacgggagggacctggatgtattggcctaatgtcccggcagtgccgcctcaattaccgccagtgatggagactcagttacctaccatggaccgagctggctcagcttctgctatgccacgtcagcaggtggtaccagatcgccggcagggatggaaaccagaaaagaatttgcggtttctcttgcagaaagtcttgaagcaaagcgacgtgggtaacctcggaaggatcgttttgccaaaaaaagaagctgagacacacttgccggagctagaggcaagagacggcatctctctggccatggaagacatcggaacctctcgtgtttggaacatgcgctacaggttttggcctaacaacaaaagcaggatgtatctcctcgagaacaccggcgattttgtgaaaaccaatgggctccaagaaggtgatttcatagtcatatactccgacgtcaaatgtggcaaatatttgatacgaggggttaaagtaagacaaccgagcggacaaaagccggaggccccaccgtcgtcagcagctacgaagagacaaaacaagtcgcaaaggaacataaacaataactctccgtcggcgaatgtggtggtcgcttcaccaacttctcaaactgttaaatgaaaaacagagacaaaaagaaacaatataaatattattatgtaccaaataagaaagagggcaaaaggaaaaaatggcagcgtacccgagtgtgccacttctcgtgcatgcatgggatcttgaagacaaatggagggtcatgattaaagctgtttggtcagggtccgggtttttactccattttttgccttttcttgtcgagtcggttcttttataactctttactctttttaccttcaggatattgtagagatgattaattctggaaatggtgtttgtgttataaaaaaaaaaaaaaaaaaatatagttcttttgttgttgt

SEQ ID NO: 117075 - DNA, 1954 bp, Arabidopsis thaliana
  unsure (1)..(1954): unsure at all n locations
cnnnnnnnnnnnnnnnnnnnnnnnnnnnnnnnnnnnnnnnnnnnnnnnnnnnnnnnnnnnnnnncggaatttccacgcgtccgcgcctttattgactgagagaaagcttttgacaatgggccacagacacagcaagtccaaatcctccgatccgccaccgtcctcctcctcctcttcctccggcaacgtagtccaccatgttaaacctgccggagaacgccgcggatcatccggttccggaaccgtcggatcgtcaggctccggaacaggcggatctcgttccaccacatctactcagcagaatggtcggatcttaggtcggccgatggaggaagtacggagaacctatgagtttggtcgtgagcttggtcgtggccagtttggtgtcacgtacctcgtaactcacaaagagacgaaacaacaggtcgcttgcaagtcaatccctacgcgccgccttgttcacaaagacgacattgaagatgttcgccgtgaagtccagattatgcaccatctcagcggtcaccggaacatagtggacttgaagggagcctacgaggacagacactctgtgaatctgataatggagttgtgtgaaggaggggaattgttcgataggatcatttctaaaggtctttactcagagagagctgctgcggatttgtgtaggcagatggtgatggttgtgcatagttgtcattctatgggtgtaatgcaccgagacttgaagcccgaaaactttctctttcttagtaaagatgagaactcaccattgaaagctacagactttggtctctctgtcttcttcaagccaggtgataagtttaaggatcttgttggaagtgcatactatgttgccccagaagttctaaaacggaactatggaccagaggctgatatctggagtgctggtgtgattctatacatccttctcagtggtgttccgcctttctggggagaaaatgaaacggggatctttgatgccattcttcaagggcaacttgatttttcagctgatccatggccagcactatcagatggtgccaaagatcttgtgaggaaaatgttaaaatatgaccctaaagatcggcttacagctgcggaagtgctaaatcatccgtggattagagaagatggggaggcatcagacaaaccgcttgacaatgcggtgttatccaggatgaaacaattccgggcgatgaacaaactaaaaaaaatggccctgaaggttatcgctgagaacctttctgaagaagaaatcattggtcttaaagagatgttcaaatctctagacactgataacaatggaatagtcaccttggaggaattgagaaccggtctcccaaaacttggttcaaagatctctgaagctgaaataaggcagttaatggaagcagctgatatggatggagatggatcaattgattacttggagtttatatcagccacaatgcatatgaacagaatcgaacgtgaggatcacttgtacaccgcattccagttctttgacaatgacaacagcggctacataacaatggaagagctagagctagccatgaagaaatacaacatgggtgatgataaatccatcaaagagatcattgctgaagtagacaccgatcgtgacggaaaaatcaactacgaagaatttgtagcgatgatgaagaagggaaatccagaattggtgccaaaccgacgcagaatgtgagagatcttttgatgttgtttgtttgtttttggttatcactttactcaaactttgtgtttctgttacaatcaattattttgtttcctgcaatctctttttatcaacacaacataaaaaatactttgagatcagaaagccatttgcaggtttggttaaaaaaaaaaaaaaagnnnnnnnnnnnnnnnnnnnnnnnnnnnnnnnnnnnnnnnnnnnnnnnnnnnnnnnnnnnnnnnnnnnnnnnnnnncatt

SEQ ID NO: 117076 - DNA, 1757 bp, Arabidopsis thaliana
aatgccttctccaagtcagtttctttcctcattcaacagtttctcttcttcttcctctgcttaaacgaaaccctcaaagaaataaaaaaaagctctcaagaatggcgaacaaaccaagaaccagatgggttcttccttacaagaccaaaaacgttgaagacaattactttcttggtcaagtccttggacaaggccaattcggaaccactttcctctgtacccataaacagacaggtcaaaagcttgcctgcaaatccatacccaaaaggaagctcctttgtcaagaagattacgacgacgttctgagagagatccagataatgcatcacttgtctgaataccccaacgttgtccgtatagagagtgcgtacgaggacaccaaaaacgtgcatcttgtgatggagctttgtgaaggaggtgagttgtttgatagaattgtgaagagaggtcattacagtgaaagagaagctgctaagcttatcaagaccattgttggggttgttgaggcgtgtcactctcttggtgttgttcatagagatcttaagcctgagaatttcttgttttcttcttctgatgaagatgcttctcttaaatctactgactttggcctctctgttttctgcacaccaggagaagcattttcggaactcgttggtagtgcttactatgtggcacctgaggttttacataagcattatggtcctgaatgtgacgtatggagtgctggagttatcctctacattctcttatgtggttttcctcctttttgggctgagagtgaaataggcatcttcaggaagattttacagggaaagttggagtttgagatcaatccttggcctagcatttcagagagtgccaaagatcttataaagaaaatgcttgaaagcaatcctaaaaagaggctaactgctcatcaagtgttgtgtcatccgtggattgtggatgataaggttgctccagataaacctttggactgcgcggtagtgtcccgcctgaagaagttctctgcaatgaacaaacttaagaagatggctttacgagttattgcagagagactatctgaggaagaaatcggtggtctcaaagaactgttcaaaatgatagacacagataaaagtgggactatcacgtttgaagagttaaaagatagtatgagacgtgttgggtcagagcttatggaatcagagatccaagaactcttgcgtgcggctgatgttgatgagagtggaacaattgactatggagagttcttagctgcaacaatccacttgaacaagctggagagagaggagaatctagtagctgcattctctttctttgataaggatgcaagtggttacatcactatcgaagagcttcaacaggcatggaaggagtttggtataaacgattctaatcttgatgaaatgatcaaagacattgatcaagataatgatggacaaatagactatggagaatttgtggcaatgatgaggaaaggaaatggcactggaggagggattggtcggagaactatgaggaactctctcaactttggaactactcttcctgatgagtctatgaatgtctgaagtactcatttttagtgaaaataatttagcgactttatggagcaaaacatgtcatatgatacaacttgctgtttctgcttactctaattctgcttttaacaactcttagtaattgaaattgtaagctctcaacaatttgtagaattttcccatggattttaccatatctcagagctttagaga

SEQ ID NO: 117077 - DNA, 3241 bp, Arabidopsis thaliana
  unsure (1)..(3241): unsure at all n locations
aggacgcgtgggcggacgcgtgggccgcttataaactttctctcttctgaaaacagatctctctactttgcttcttcactcgacttgtatctatcatccatggcttccgagaatcctttccgaagcatattgaaggcgttagagaagcctgatggtggtgaattcggtaactactacagcttacctgctttgaacgatcccaggatcgataaactaccttattccattaggatacttcttgaatcggccatacgtaactgtgatgagttccaagttaagagcaaagatgttgagaagattcttgattgggagaatacttctcccaagcaggttgagattccgttcaagcctgctcgggttcttcttcaggactttactggtgttcctgctgttgttgatcttgcttgcatgagagatgccatgaataatctcggtggtgattctaataaaattaatccgctggtccctgtagatcttgtcattgatcactccgttcaggtggatgtggcgagatcagagaacgcagtgcaggcaaacatggagcttgagttccagcgtaacaaggaaagatttgcttttcttaagtggggatccaacgcctttcacaacatgcttgtcgtacctcctggatctggaatagttcatcaagtcaacctagaataccttgccagagttgttttcaacacaaatggacttctttacccagacagtgttgttggcacagactctcacaccactatgattgatggactgggtgttgctggatggggagttggcggtatagaagcggaacgaccgatgcttggtcagccaatgagcatggtcctacccggtgttgtgggtttcaagctaacgggaaagttaagagatggaatgacagctactgatttggtcttaacagtgactcagatgttgaggaaacatggagtagttggaaagtttgttgaattccacggggaagggatgagagaattgtctttagctgaccgtgctacaattgccaatatgtctcctgagtacggtgcgaccatgggattcttcccagtcgatcatgtcactttgcagtatctaaggttgacaggcaggagcgatgacactgtctccatgatagaggcgtatttacgagcaaacaagatgtttgtggattacagtgagccggagagtaagacagtttattcctcatgtctggaattgaatctcgaggatgtggaaccttgtgtttctggtcccaagaggcctcatgatcgtgttcctttgaaggaaatgaaagcggactggcattcttgcttggacaatagagtaggattcaagggtttcgctgtacctaaagaagcacagagtaaggctgtagagttcaattttaacgggaccacagcacagcttagacatggagatgttgttatagcagcaatcaccagttgcacaaatacttcaaaccctagtgtaatgcttggcgctgccttagttgcaaaaaaggcctgcgacctaggactggaggttaagccatggatcaaaactagtcttgctccaggctctggagttgtaacaaagtacttggcaaagagtggcttgcagaagtacttgaatcagctcggcttcagtatcgttggttatgggtgcaccacatgcattggaaactcgggggatatccatgaagctgtggcttcagcaatagttgataatgacttggtggcatccgctgtgttgtctgggaacagaaattttgagggacgtgttcacccgttaacaagagctaactatctagcttccccaccgcttgttgtagcctatgctctggctgggactgttgacattgattttgagacacagcccattggaactgggaaagatggaaaacagatatttttcagggacatttggccctctaacaaagaagttgctgaggttgttcaatctagtgtccttcctgatatgttcaaagctacatatgaagcaatcaccaaaggaaattccatgtggaatcagttatctgtggcgtcaggtactctctatgagtgggacccgaaatcaacttacattcacgagccgccttatttcaagggcatgaccatgtctccacccggtccacatggtgtgaaagacgcatactgtttactcaattttggagacagtattaccactgatcacatctcaccagctggtagcatccacaaggacagtcctgcggctaagtacttgatggaacgaggtgtggatagaagagacttcaactcatacggagtcgccgtggtaatgatgagattatggcgagagcactttgcaaatatccgtattgtcaacaaacacttgaaaggagaagttggtcccaaaacagttcacattcccactggagagaagctttctgttttcgatgctgccatgaaatataggaacgagggacgcgacacaatcattttggctggtgctgaatacggtagtggaagttctcgtgattgggctgccaagggtccaatgcttctgggtgtgaaagctgtgatttcaaagagcttcgagcgaattcaccgaagcaatttggtgggaatgggaatcatacctttgtgcttcaaggcgggagaagatgctgagacccttggcctaacgggtcaggagctttacaccattgagctcccaaacaatgttagtgagatcaaaccaggacaagatgtaacagtcgtcacaaacaatggcaaatctttcacatgtacactccgatttgacacagaggtggagttggcttatttcgatcacggagggattttgcaatacgttatcaggaacttgatcaaacaataaatctggtaacaccagagacttgagttatatatcccaaggtttgttgcaataaaaatgtttgcagggaggaggacgagaatgactttaatttaaacttttgcttttgttcttcttcgtctcttgcttcgtgctagtcaattggaaacattatcactgtcgagtcattttttttctttcaaataaacatgcgagctctttttttgttgttgttgttcataagcattgtcaatgctgcattgatagaagtatactctaccattagaaaataaacacaaatacacaaagtaatctaaagagctagaggatgaaaattatctgtgaaggttgtacaaaaacattaaaaaaaatctgagatgatccaaaggattgattatcacattcgaagtgatggttcagagattacctctggnnnnnnnnnnnnnnnnnnnnnnnnnnnnnnnnnnnnnnn

SEQ ID NO: 117078 - DNA, 1513 bp, Arabidopsis thaliana
  unsure (1)..(1513): unsure at all n locations
gttgatattaaaaaaccgaccacgcgtccgcgtttcttcttcttcttctccaattttcaaaattcgaaaagatgttgaagctttcgtgtaatgtgactgattctaagttacagagaagcttactcttcttctcccattcatatcgatctgatccggtgaatttcatccgtcggagaattgtctcttgttctcagacgaagaagacaggtttggttcctttgcgtgctgttgtatctgctgatcaaggaagtgtggttcaaggtttggctactctcgcggatcagctccgattaggtagtttgactgaagatggtttatcttataaagagaagtttgttgttagatcttacgaagtgggtagtaacaaaaccgctactgttgaaaccattgctaatcttttacaggaggtgggatgtaatcatgcacaaagtgttggtttttcgactgatgggtttgcaacaacaactactatgaggaagttgcatctcatttgggttactgcgagaatgcatatcgagatctataagtaccctgcttggggtgatgtggttgagatagagacttggtgtcagagtgaaggaaggattgggacaaggcgtgattggattcttaaggattctgtcactggtgaagtcactggccgtgctacaagcaagtgggtgatgatgaaccaagacacgagacggcttcagaaagtttctgatgatgttcgggacgagtacttggtcttctgtcctcaagaaccgaggttagcatttccggaagagaataacagaagcttgaagaaaatcccgaaactcgaagatccggctcagtattcaatgattgggcttaagcctagacgagctgatctcgacatgaaccagcatgtcaataatgtcacctatattggatgggttctcgagagcataccacaagaaattgtagacacgcacgagcttcaggtcataactctggattatagaagagaatgtcaacaagacgatgtggtggattcactcaccaccaccacctctgaaattggtggaaccaatggctctgccacgtctggcacacagggccacaacgatagccagttcttgcacctcctgaggttgtctggagatggtcaggagatcaaccgcgggacaactctgtggagaaagaagccttcaagttaagaaatagacaatgtctttagccattttgttctcaagtttccatcatctcaatgaagatttcgcttcacgagtctgagcaggtctccatttttctctttcaagtttgggttagactagagggaactggattgttggagtattaatctttgttgaatttcattatgtttgttcatgtttttgtacaaattttggggatttagccaaacccatatcgtctttggtcttgtcttgtgcctgcgtgtatttttaatctatccgttcaaaaacacagattgttcattagtgttttatataaacagagttaaagacctgannnnnnnnnnnnnnnnnnnnnnnnnnnnnnnnnnnnnnnn

SEQ ID NO: 117079 - DNA, 1464 bp, Arabidopsis thaliana
  unsure (1)..(1464): unsure at all n locations
gcacgaggagagaactactctctctatctctctttctctctatctctctctatctctctcatttcttcctgcgtcaatggcgactcaaggtcaggttatcacttgcaaagctgcggtggcttacgagccgaacaagcctctggtcatcgaagatgtgcaagtggctccacctcaagctggtgaggttcggatcaagatcctctacactgctctttgtcacaccgacgcttacacttggagcggcaaggatcctgaaggtctctttccttgtattctaggtcatgaggctgctgggattgttgagagtgttggtgaaggagtaactgaagttcaagctggagatcatgttatcccttgttatcaagctgagtgtcgtgaatgcaagttttgcaaatctgggaagactaacctttgtggcaaggtgagatctgctactggtgttgggattatgatgaatgaccgtaagtcgaggttctcggttaatgggaaacccatttatcacttcatgggtacttccacgtttagtcagtatactgttgttcatgatgttagcgtcgccaaaattgatcctactgctcctttggataaagtttgccttcttggatgtggtgttcccactggccttggagcagtttggaatactgcaaaagtagaaccagggtcaaatgttgccattttcgggtctttggcactgttggacttgctgttgccgagggtgcgaaaacagctggtgcttcaaggatcattggcattgacatcgatagcaagaagtatgaaactgcaaagaagtttggtgttaacgaatttgtgaacccaaaggatcacgacaagccaattcaggaagtgattgtcgatctcactgatggcggtgttgactacagctttgagtgcatcgggaatgtctccgtgatgagagctgcattggagtgctgtcacaagggatggggaacttcggtcatagttggtgttgcagcatcaggacaagagatatcaactcgtccgttccaactcgtgactggccgtgtgtggaaaggaacagcttttggtggtttcaagagtcgaacccaagtgccttggcttgtagaaaagtacatgaacaaggagataaaagtggatgaatacataacacacaacttgaccttgggagaaatcaataaggctttcgatctattgcacgaaggtacttgccttcgttgtgtcctcgataccagcaaatgactatatgggtcctctctgctttaatctatgtgttcttgtgactttcgtcttttatcggtattgacatttcctaagagcaacagactactctactcgtgtgtgtctcgtttctatcttatgcttcaataaaatatcaattaagaccggaaaaaaaaaaaaaaaagcccacgcgtccgnnnnnnnnnnnnnnnnnnnnnnnnnnnnnnnnnnnnnnnnnnnnnnnnnnnnnnnnnnnnnnnnnnnnnn

SEQ ID NO: 117080 - DNA, 863 bp, Arabidopsis thaliana
  unsure (1)..(863): unsure at all n locations
nctgagaggtgggcgaatgatccaagagaagaagaacaatctctcttagatcgtttgatctgatccaatcgaagaagaagatgggaatcttattcacgcggatgttctcttccgtctttggtaacaaagaagctcgaatcctcgtcctcggtctcgacaatgctggaaaaaccacaatcctctatcggcttcagatgggggaagttgtctctacgattccgactattggatttaacgttgagactgtgcagtacaacaatatcaagtttcaggtctgggatttaggtggacaaacaagcatcaggccatactggcgatgctatttcccgaatacacaagcagtgatctatgttgttgactcgagtgatacagatagaatcggggtggcgaaagaggagtttcatgcaattttagaggaagatgaattgaaaggtgcggtggttctgatatttgcaaacaagcaggatcttcccggtgcactcgatgatgcggctgttacagaagccttggagttgcataagataaagagtcgtcaatgggcaatcttcaaaacttgtgctgtgaaaggcgagggacttttcgagggattggactggttgagtaatacattgaagtcgggaagtggctaaaatcatcgtcatacaccaatctgtcacatttctcaagagtgtaactttgatcatttttacttattggtttgtttagtatcttttttttatcttagttcttcatcttaaagagttaatatcaatgacatgttcacttaatattctctttttgttgttttgtttcattctgaaagaaaaaacccaacacagatttttgattgagacccataaggggtaatatcatcactttttaac

SEQ ID NO: 117081 - DNA, 2069 bp, Arabidopsis thaliana
  unsure (1)..(2069): unsure at all n locations
ctctatctcaatcaattcaatttttaatgtaatttcttgtttgatttttctattttcttcgagaaaacaaaattctcctgtaaaatttaatattataaaagtggtttctttttcatttatgtttatataattttcatctttaatcttaaattctggtaaccttaatgcgcgatccgcttttcaaaagttttgtgagagagaatagatctaaaaaaatccacaattttgttcaaatcttggagttaaatgctgaattttaggccttgttgcttagatttatggcttaaagtttcaaacttttcattggatatggtacaaatcttgtagttaaacactgaattgtgtccctcgtgggcgttgttgctttgatttatggccaaaagtttcaaacttggatatggtacaatcttgtagttatacactgcattgtctctcttgggtgttgttgttgctttgatttatggcttaaagtttcaaactttttcttggagatggttcaatcttgttgttgaaagttgaaacactgaattgtctctcttgtgcgtgttgttgcttagatttatggctaaaagtttcaaactttcttcacttcagagcttcttgaatggaaactatggttttgtggttttggttaatcttctgctaacactttttgccctgttttggtttgggaaagtgagaagaaaatgtcaggatctgagacgggtttaatggcggcgaccagagaatcaatgcaatttacaatggctctccaccagcagcagcaacacagtcaagctcaacctcagcagtctcagaacaggccattgtcattcggtggagacgacggaactgctctttacaagcagccgatgagatcagtatcaccaccgcagcagtaccaacccaactcagctggtgagaattctgtcttgaacatgaacttgcccggaggtgagtctggaggcatgactggaactggaagtgagccagtgaaaaagaggagaggtagaccgaggaaatatgggcctgatagtggtgaaatgtcacttggtttgaatcctggagctccttctttcactgtcagccaacctagtagcggcggcgatggaggagagaagaagagaggaagacctcctggttcttctagcaaaaggctcaagcttgaagctttaggctcgactggaatcggatttacgcctcatgtacttaccgtgctggctggagaggatgtttcatccaagataatggcgttaactcataatggaccccgtgctgtgtgtgtcttgtctgcaaatggagccatctccaatgtgactctccgccagtctgccacatccggtggaactgttacatatgaggggagatttgagattctgtctttatcgggatctttccatttgctggagaacaatggtcaaagaagcaggacgggaggtctaagcgtgtcattatcaagtccggatggtaatgtcctcggtggcagtgtagctggtcttcttatagcagcatcacctgttcagattgttgttgggagtttcttaccagacggagaaaaagaaccaaaacagcatgtgggacaaatgggactgtcgtcacccgtattaccgcgtgtggccccaacgcaggtgctgatgactccaagtagcccacaatctcgaggcacaatgagtgagtcatcttgtggaggaggacatggaagccctattcatcagagcactggaggaccttacaataacaccattaacatgccctggaagtagccaagtgatctgtgtcggcttaaaaccaacaacttcccgttattagagtgatttatttctacatttggtttagactttctagttctgatggttatttctacagttggtttagactttctagttctgttcagacaaaaggagtttgataaattgaccgacctattttgtgtgtttgaggtactttcagaaccataggtgttcagaaattagaatgttctgtttaaggtagatcttttattttatgttgaggtactttcggaaccataagttgttcagaaattggaatatcctgattaatgtnnnnnnnnnnnnnnnnnnnnnnnnnnn

SEQ ID NO: 117082 - DNA, 1686 bp, Arabidopsis thaliana
  unsure (1)..(1686): unsure at all n locations
aggatacccgacgtcgtttgactaaatggatccaacgctagacacatcctaaatcacgtcaacgacagtgtcgggactgaaagcagcccgaaagcaaagtaagctagcttagctaggtccaagatccaagctttggaattttgtaaattgtctccactcttagccgttttaatggaaactgttccaccatctcccattacatggccagatgggggagctctcactaacgactgggtacatgggcttatgtcgtgtttcgaatggtcttcatggaatctacctccttcccagttaccttcactattgcctgtcaacgtctttgattccctcgtcctcaccgctcataaaatcctccacaaagaacgtaactgcgttcatatcgatgatcttgactctgtatccaacgttgttgtggttggtgacattcatggtcagcttcatgaccttcttttcctattgaaagatactggctttccttgtcaaaaccggtgttatgttttcaacggagactatgtggatcgcggtgcttggggacttgaaaccttccttgttctcttgtcctggaaggttttgatgccggacagagtctacctactccgtggtaatcatgagtcaaagtattgtacatctatgtatggtttcgagaaggaagtgcttacaaaatacggagacaagggaaaacatgtgtaccggaaatgtttgggttgtttcgaaggtcttcctttggcttccataatttctggacgtgtttatacagcacatggagggcttttccgcagcccagtcttgcctaagcgaacaacaagggggaaaaagaaccgtcgggtagttcttctggaacctgagccgagctcaatgaaactcggtaccttagatgagttgatgcaagctcgaagatcagttcttgatcctccttgggaaggttcaaacttgataccaggagacgttttatggtctgatccttcaattactccgggcctttcaccaaatgaacagagaggcattggtcttctttggggtcccgattgtacagaggattttttgaagaaatatgaactaaagttgatcatcagatcacatgaaggtccagatgctagagagaagagaactggtcttggtggaatggacaatggatatacaatagaccacaatgtcgaatccggaaagcttatcactattttcagtgcacctgactatccgcaattccaagcaacagaagagaggtacaaaaacaaaggagcatatattattttgcaggcgcctgatttctcggatcctcaatttcatagtttcgaagctgttaaaccgcgaccaaaggcgcatccgtattatgactttgaaaatgtcattgattctgatgatgagatggataagtcagcaatggacaccaataacgaacaaccaaatagctgaccgaagctgaaaaggagtatcttgaattgatgttttttacagttgttgtgattgctcattatttgcaaacataaaatggaatcaaatgtaaagaaaagagatgaagaaaattatttgtagaattcacatttaagttatgtatggaagatgaagaaataagaaccatcttaaatctccaaaaaaaaaaaaaaaaaaaaaagnnnnnnnnnnnnnnnnnnnnnnnnnnnnnnnnnnnnnnnnnnnnnnnnnnnnnnnnnnnnnnnnnnnnnngga

SEQ ID NO: 117083 - DNA, 2734 bp, Arabidopsis thaliana
  unsure (1)..(2734): unsure at all n locations
nnnnnctaatcgactcacttagggaacagctggtacgcctgcaggtaccggtccggatttcccgggtcggcccacgcgttttaagtagaagaagaaaagttcttacgaagaacccagattttgttaagaaatggatgtgccagaggagacgaggcttcgccacaagcgagattttatccagttcctcgatagtatgtatatggaggaaatcaaggctttggtacatcaaaagcgtcaccgtctcattattaatatctctgacattcaccaccacttcagggaagttgcctctaggatactgaagaatccaaatgagtatatgcagtcattttgtgacgcagccactgaagctactcgtgctattgaccctaaatacttgaaggaaggagagcttgtccttgttggttttgaaggttattttgtttctcgcgttgttactcctagagagcttctctctgattttattggatctatggtctgtgttgagggcattgtcaccaaatgctctcttgtgaggccaaaggttgttaaaagcgttcacttttgtccatcaaccggtgaatttaccaatcgagattatcgagacataacatctcacgctggtttacccactggctctgtctatcccacaagggatgataagggaaacttattggtgactgagtatgggctgtgcaaatacaaagatcaccagaccttgtcaattcaagaagtgcctgaaaatgctgctcctggtcagcttccacgaagcgttgatgtcattgctgaggatgaccttgttgactcatgcaagccaggagatcgagtatctgttttcggtatttacaaagctcttcctggaaaaagcaagggtagtgtaaatggagtctttaggactatcctcatagccaataatatcgctctgctcaataaagaagcaaatgcacctatatacactaagcaagacctagataacattaaaaatattgcacgaagagatgatgcatttgatctccttgctcgttccttagcaccttctatttatgggcacgcttggataaagaaagcagtagttttactgatgcttggtggtgttgaaaagaacctgaagaacggaacccacttgaggggagacatcaacatgatgatggttggtgatccatctgttgccaaatctcaacttctgagagcgataatgaatattgcacctttggctatatcaaccacaggccgtggttcttccggtgttgggttaactgctgctgtgacttctgaccaagaaacaggggaacgaagactagaagctggtgcaatggtcctcgctgataaaggtatcgtgtgcattgacgagtttgataagatgaatgatcaggaccgagttgctatacacgaagtgatggagcaacagactgtaacaattgcaaaagccggtatccatgcatcactgaatgctagatgcagtgtggttgcagctgcaaatcccatatacggaacttatgacagatcactgactccaacaaagaacattggacttccagattcgctgctttctcgttttgatctactgtttattgtgttggatcaaatggatgctggtatcgacagcatgatttcagaacatgtcttgcgcatgcatcgttacaagaacgatagaagtgaggcagggccagatgggagcttgccttacgcgagagaagacaatgctgagagtgaaatgtttgttaagtataaccaaacactacatgggaagaagaaaagaggccaaacacatgataaaacccttacgattaagttcttgaagaagtacattcattacgccaagcaccgtattacaccaaagctcactgatgaagcatcggaacgtattgcagaagcatatgcagatctcagaaatgcaggttccgatactaagactggaggtacgcttccgataacagccagaactctagagacaataattcgtcttgctacggcacatgccaaaatgaagttgagtagcgaggttactaaagctgatgcagaggctgccttgaagcttatgaactttgcaatatatcatcaagaattaactgagatggatgatcgtgagcaagaagaacgtcaaagggaacaagctgaacaagaaagaacaccaagtggacgtagaggcaaccaacgcaggaataatgaagatggagcagagaatgacactgcaaatgtcgacagtgaaacagcagatccaatggaagtagatgaaccttctgtagagcaattcagcggcacggtctctgcagcaaggattgaaacctttgagcgagtgtttgggcagcacatgaggacacacaggctcgatgacatctctattgcagatatagagactgttgtcaacaacaatggggttggagcatctcgttactctgcagatgagattatggctctcttagagaaactgcaagatgataacaaagtgatgatcagcgatggcaaagttcatatcatttgatcatatgaagaaatcaatattgattgcatcatcatcatcatattagaactcaaaaatagtgtagtagtaaactcttggaaaccaaaatatcattttgtaaaatctttattcatacgttatgttttttgcatttactagtgaagtaaaactgatgataaaatgcttaaaaaaacgcatctgattataaaatttggaatttataacgaaaagcccaatccgagaataaaatcctttcatttttttccttnaaaaaaaaataatnnnnngnnnaaa

SEQ ID NO: 117084 - DNA, 1170 bp, Arabidopsis thaliana
gaccataaaacatttattttgcgcctataaaggcatttcagctccaccgtaggaaactttctcttgaaagaaacccacagcaacaaacagagaaaatgtgtggcggtgctattatttccgattatgcccctctcgtcaccaaggccaagggccgtaaactcacggctgaggaactctggtcagagctcgatgcttccgccgccgacgacttctggggtttctattccacctccaaactccatcccaccaaccaagttaacgtgaaagaggaggcagtgaagaaggagcaggcaacagagccggggaaacggaggaagaggaagaatgtttatagagggatacgtaagcgtccatggggaaaatgggcggctgagattcgagatccacgaaaaggtgttagagtttggcttggtacgttcaacacggcggaggaagctgccatggcttatgatgttgcggccaagcagatccgtggtgataaagccaagctcaacttcccagatctgcaccatcctcctcctcctaattatactcctccgccgtcatcgccacgatcaaccgatcagcctccggcgaagaaggtctgcgttgtctctcagagtgagagcgagttaagtcagccgagtttcccggtggagtgtataggatttggaaatggggacgagtttcagaacctgagttacggatttgagccggattatgatctgaaacagcagatatcgagcttggaatcgttccttgagctggacggtaacacggcggagcaaccgagtcagcttgatgagtccgtttccgaggtggatatgtggatgcttgatgatgtcattgcgtcgtatgagtaaaagaaaaaaaataagtttaaaaaaagttaaataaagtctgtaatatatatgtaaccgccgttacttttaaaaggtttttaccgtcgcattggactgctgatgatgtctgttgtgtaatgtgtagaatgtgaccaaatggacgttatattacggtttgtggtattattagtttcttagatggaaaaacttacatgtgtaaataagatttgtaatgtaagacgaagtacttataacttcttaaaaaaaaaaaaaaaaaaaaaactcgagccgaattccgagcttacgtacgcgtgcatgcgacgtcatagctcttctatagtggcaccta

SEQ ID NO: 117085 - DNA, 857 bp, Arabidopsis thaliana
gctcgagccgctcgagcggcacgagcggctcgagagtaatttagcagcaacaaacagagaaaatgtgtggcggtgctattatttccgattatgcccctctcgtcaccaaggccaagggccgtaagctcacggctgaggaactctggtcagagctcgatgcttccgccgccgacgacttctggggtttctattccacctccaaactccatcccaccaaccaagttaacgtgaaagaggaggaggcggtgaagaaggagcaggcaacagagccggggaaacggaggaagaggaagaatgtttatagagggatacgtaagcgtccatggggaaaatgggcggcggagattcgagatccacgaaaaggtgtcagagtttggcttggtacgttcaacacggcggaggaagctgccatggcttatgatgtagcggcgaagcagatccgtggtgagaaagccaagctcaacttcccagatctggatcatcatccttctactcctccgccatcgtctacttcactaagattatccgatcagccaccggcgaagaaggtttgcgttgtctctcagagcgagttagctcagccgagtttcccggtggagtgtgttggatttggaaagggggaagagtttcagaacctgatgtacggatttgaaccggattatgatttgaaacagcagatatcgagcttggagtcgttccttgagcttgacggtaccacggcggagcaaccgagtcaactagatgagtctgtttgcgatgtggatatgtggatgcttgatgatgtcattgcgtcgtatgagtaaaaggaaaaaaaaacagaagataatgtaatatgtaaaaaaaaaaactaaattact

SEQ ID NO: 117086 - DNA, 655 bp, Arabidopsis thaliana
  unsure (1)..(655): unsure at all n locations
ccccggtgggactttgnaagcnaanttcccccccanatttngggntttttccccccccaaccncacccnccaccaantttccntaaaaggggcccntttaaaaaggcccngnaacaggcccgggaaccgggggagggggaaaaattttttttgnggggatcctaaaccccccatgggaaaaatggccggctaagattcgggaccccccgcaaaacgttttcagagtttgcctttggtccgtttcaacaccgccggaggaaacctccccatggcttattgatgtttccggccaaaccagaccccgtggtgattaaagccaaagctcaacttccccagatctgcaccatcctccctcctccctaaattatactcctccgccgtcatcgccacgatcaaccgatccacctccggcgaagaaggtctgcgttgtctctcagagtgagagcgagttaagtcagccgagtttcccggtggagtgtataggatttggaaatggggacgagtttcagaacctgagttacggatttgagccggattatgatctgaaacagcagatatcgagcttggaatcgttccttgagctggacggtaacacggcggagcaaccgagtcagcttgatgagtccgtttccgaggtggatatgtggatgcttga

SEQ ID NO: 117087 - DNA, 806 bp, Arabidopsis thaliana
  unsure (1)..(806): unsure at all n locations
ccaggttttattcgactcaattttggggaaggtggtacccctgccggtaccggtcccgaatttccgggtccgcccaagccttccgaaacagagaaaatgggggggggggctattaattccgaatattccccttttggcaaccaaggccaggggccgaaacttaccggttgaggacttttgttaaaagttgaaggtttccgccgccgccaatttttggggttttaattcaacttccaaattcaatccaaccacccaggttaccgtgaaagaggaggcagtgaagaaggagcaggcaccagagccggggaaccggaggaagaggaagattgtttatagagggatccgtaaccttccatggggaaaatgggcggctgagattcgagatccacgaaagggtgttagagtttggcttggtacgttcaacacggcggaggaagctgccatggcttatgatgttgcggccaagcagatccgtggtgataaagccaagctcaacttcccagatctgcaccatcctcctcctcctaattatactcctccgccgtcatcgccacgatcaaccgatcagccttcggcgaaggaaggtcttgcgttgtctctcagagtgagagcgagttaagtcagccgagtttcccggtggagtntataggntttttgaaatggggccgggtttaagaacctnagttncggnttttanccggtttttntctttaaacanagttttggntttgaatcgtncctttanttggcgggnaaaaggnggaaaccggtaanttattagnccgttccaggnggaatttgggtgc

SEQ ID NO: 117088 - DNA, 583 bp, Arabidopsis thaliana
  unsure (1)..(583): unsure at all n locations
cacagcaacaaacagagaaaatgtgtggcggtgctattatttccgattatgcccctctcgtcaccaaggccaagggccgtaaactcacggctgaggaactctggtcagagctcgatgcttccgccgccgacgacttctggggtttctattccacctccaaactccatcccaccaaccaagttaacgtgaaagaggaggcagtgaagaaggagcaggcaacagagccggggaaacggaggaagaggaagaatgtttatagagggatacgtaagcntccatggggaaaatgggcggctgagattcgagatccacggaaaaggtgttagagtttggctttggtacgttcaacaacggcggagggaggctgtccattggcttatgattgtttcgggccaagcagatcccgtggtgataaagccaaggtcaacctttcccagttcttgaaccatccttcctcctccctaaattttactccttccgccggtattgccacggtttaaccgtttacccttccggggagaaaggtttcggttttttttcagggggggcccggttgagacacccgtttcccggtggggttttt

SEQ ID NO: 117089 - DNA, 1888 bp, Arabidopsis thaliana
  unsure (1)..(1888): unsure at all n locations
cagctccatacgactcactttaggaaagctggtacgcctgcaggtaccggtccgagattcccgggtcgacccacgcgtccgatcatattctttttgttatctttgtttcgtttttctggtagaagagagaagaaggagagacgaattggcagctaagcgattctctctctttctctctttctcttctcgtgtgtgtaatcttttggtgttcttgaaaccacttttttttttgttaattcctctgtttccttggaattgttttctgcttttttaagaagaaaaaaacgatgaatgtggtgcggagattaacgagtattgcctctggacgtaatttcgtttcttctgataacgtaggagaaactgagacgccgagatcaaagcctaatcagaatcgtgaagaaacagagtctacggaaactacgtcgtacgagaaagattctgtctcttcctcagagaactctgatcatttaccaaaggaaatccgtgaggatatggactgtggaatcatcaagggaaatggaacagaatctggacggattattaccaccaaaaagaagggtttgaatgatcaaaaagacaagacaatctcttacagagctgaacatgtaattggcactggctcattcggtgttgtctttcaggctaagtgcttagagacggaagaaaaagtagcaataaagaaagtgttacaggacaagagatacaaaaacagagaacttcagatcatgcgaatgcttgatcatcctaatgtcgttgagctcaagcattctttcttttccacgactgagaaagacgagctttatcttaaccttgttcttgagtatgtacccgagactatttaccgcgcttccagatcttacaccaagatgaatcagcatatgcctttgatttatattcagctctacacctatcagatttgccgtgctatgaattatctgcatcaagtggttggagtgtgtcaccgtgacattaagccgcagaatctgttggtcaataatgttacgcatgaagtaaagatatgcgattttgggagcgccaaaatgctgattccaggagaaccaaatatatcttacatatgctcaaggtattacagagctcctgaactcatatttggagcaaccgaatacacaagtgcgatcgatatgtggtctgtaggttgtgtcatggctgagctttttcttggacatcctctattccctggagaaaccagtgttgatcaattggtggagatcattaagattttagggacaccagcaagagaagagataaagaacatgaatcctcgttacaatgattttaagttccctcagatcaaagctcagccgtggcacaagattttccggagacaggtatctccagaagcaatggatcttgcctctagattgctccagtattcaccaaacctgagatgcacagcgcttgaagcatgtgcacacccattcttcgatgatctgagagacccgagagcatccttgcctaatggaagagcacttcctccattgtttgatttcacagctcaagaacttgctggggcatctgttgaactgcgtcatcgcttaatacctgagcatgcaaggaaatgaccatttgggttaatggctgcttctctacgcagatgttgatatataaatctttttttattttgagagtttcttgttcacaagtatagcattgtgctggttatgaaccctcactgacctctgcaaccacatcgactagcagtttgaaagtgtataattgtaagtttgtaactttgtagctttcattgttgcagacagaaatgcagaattttccgagttaaaaaaaaaacaaaaagnnnnnnnnnnnnnnnnnnnnnnnnnnnnnnnnnnnnnnnnnnnnnnnnnnnnnnnnnnnnnnnnnnnnnnnn

SEQ ID NO: 117090 - DNA, 2070 bp, Arabidopsis thaliana
caaaaactataagtcccacactcaagtcaattaaagcactccaatggtccaacaagtttcgtcgtctaccttgaaactcaacctttggatgattgatatacataaagacaggatctaaaaacacctaccgaacttgaatagtaggtgtgttgtgtttgagtgtctctctaggtaaacatggtagcagaagaagcaagaaaagaagccatggctaaatcagtatctggcgggaagattacttattttgtggtggcttcatgtgtcatggccgccatgggcggtgtcatcttcggctacgacatcggggtttcaggtggagtgatgtcaatggggccatttctaaaaagatttttcccaaaagtgtataagctccaagaagaagatagaagaagaagaggcaatagcaataaccactactgccttttcaatagccaacttcttacatccttcacatcttctctatacgtttccggtctcatcgctactctgttagcttcgtccgtgactcgttcatggggtcgcaagccctctatatttcttggcggtgtgtcctttctcgccggcgctgctcttggtggctctgctcaaaacgttgctatgctcattattgcgcgtctcttgctcggcgtaggagttggattcgctaaccagtcggttcctctgtatctctccgagatggcgccggcaaaatacagaggagcaatcagcaatggtttccagctctgtatcggaattggatttctatctgcaaatgtaataaactacgaaacccaaaatatcaaacatggttggagaatctctttagccacagctgcaatacctgcttcaatcctcactttaggatcactgtttctcccggaaacgccgaatagtatcatccagaccaccggagatgttcacaagaccgagcttatgcttcgccgtgtccgtggaactaacgacgttcaagatgagcttactgatctcgttgaagcgagttctggttctgatacagattcaaacgcgtttttgaaactgcttcaaagaaaatataggcctgagttagtgatggctttggtgatacctttctttcagcaagttactggaatcaatgttgttgctttctacgcaccggttttgtatagaaccgttgggtttggagagagtggttcgttgatgtcgaccctcgtgactggaatcgtgggaacctcgtcgacgttgttgtcgatgcttgtcgttgacagaatcggtagaaagactctgtttttgattggagggttacagatgctcgtgtcgcaagttaccattggtgtgatcgttatggtggctgatgttcacgacggtgtgatcaaggaagggtatggttacgcggttgtggttttggtgtgtgtctacgtggccgggtttggttggtcttggggtccattaggatggcttgtaccgagtgagatttttccgttggagataagatcggtggcgcagagtgtaactgtggcagtgagttttgtgtttacttttgcggtggctcaaagtgcaccaccgatgttgtgtaagtttcgagctgggattttcttcttttatggagggtggttggtggtaatgacggtagcggtgcagctgtttttgccggagactaagaatgttccaatcgagaaggtggttggactttgggagaagcattggttttggaggagaatgacgagcaagcgtgatatccaagaaaccaccattcttagccattgaaaacaataaaaaaaccagcacctcatgatttgagatgagacgcatcttttgttgccaaaaaaattattgcatataagttttaaaattttcaaagttcaaactaaattaaggatatttttttactattcacgtaacaataatcaaatcacatgatccaagattcgattattgttcaaattattttgtaaatttagccatagtttcattttttcacttatatgtttgtgaaataacgatttgtgtttggaattaaaattaggggtgttttataaatatagtaaaactaggatagtgataatgtaatatattgaacgttaaaggacaaagatgggaaaaaaaaaaaaaaaa

SEQ ID NO: 117091 - DNA, 2328 bp, Arabidopsis thaliana
  unsure (1)..(2328): unsure at all n locations
nnnnnnnnnnnnnnnnnnnnnnnnnnnnnnnnnnnnnnnnnnnnnnnnnnnnnnnnnnnnnnnnnnnnnnnnnnnnnnnnnnnccacgcgtccggccatattttgataagagaagaagaacccttatagagaaagagaaagagagagacagagagagtggatggatgtcttatagaatgaacaaaacatcctctgtttctcttgtccttgtccctttttccagatcttaaggttttccacattttatcatctgggtcctctccttaatgatttgaagacactcaattcctatttgatcggggactagaatttggattctgtttcagacaaaagtagatttccctgtctctttcccgtttgattttcaataagatgaatccggaggagcaaaagatggaatctgcatcggatctgggcaagctcttcattggcgggatttcatgggacacagatgaagaacgactgcaagagtattttggcaagtatggagatttggttgaagctgtgatcatgagagaccgtactaccggacgtggggtcgacccacgcgtccgcgtttttgcagatccttctgttgccgagagagtcatcatggacaaacacatcattgatggccgcacggtcgaggcgaagaaagctgtcccgcgggatgatcagcaagtgctaaaacgacacgccagtccaatgcaccttatctcacctagccatggtggtaatggtggtggagcacggacaaagaagatctttgttggaggtttaccgtctagcattactgaggccgagttcaagaactactttgatcagtttggtacaattgctgatgttgtggtaatgtatgatcataatacacagaggccaagaggctttggcttcatcacttttgattccgaagagtctgttgatatggttctccacaagacctttcatgagctaaacggaaaaatggttgaggttaaaagagcagtgccaaaggagctctcctcgactactcctaaccgaagcccacttattgggtatggtaacaactatggagtagtccctaataggtcttctgctaatagctacttcaatagttttcctcctggttataataataataatctaggctctgctggccggtttagtcctattggtagcggtagaaatgctttctctagcttcgggctcggattgaatcaagaactgaatttgaattcaaactttgatggaaacactcttgggtatagccggatccctggcaaccaatacttcaacagtgcttcaccaaaccgttacaactctccaattgggtacaacagaggagactctgcttacaacccgagcaacagagacttgtggggaaacagaagcgattcctctggtccaggttggaacttgggagtttcggttggtaacaacagaggaaactggggactttcttctgtggtgagcgataacaatggctatggaagaagctatggggctggttctggactttcggggttatcattcgcgggtaatacaaacggttttgatggctctataggggaattgtatagaggcagctcagtttatagcgactcaacatggcagcagtcaatgcctcatcatcagtcttctaatgagttagacggcttgtctcgctcttatggctttggtattgacaatgtaggtcagacccatcagcaatgcctcagaaggtactccggaactacaatgtcggaaatagacaaacacatagaggtattgaagcatagaaagaaatcgacgaagagaagtgagaattgtagatcaagaagaacagccatttccgttgcagagtttgaagagttgttatttcgatatcaagtagagaaagaaaccaactttcttcatcacagtgagtttcttgttttgtttttttcgtcgttagcatcacaaacacaaaaaagagaagtttatttttactttaaaaattcttacataagataagatcagattggtagctgcaaagatacaacatggatgataaaaaaagatttggtttcgtctccatagcaataaccagagatcgttgattctcgatcactattctttaggtttctctccttcttcttccatgatttcttgatgttgtgtgctctgtttgtaactctaattgttaaaattttttatgttacagattttttttttcttttggtttttaaactttggattcgaattgttcatgggaacttttggatttttctattagcgtgagagaaaacacattgtgcaaaaggctccaaaaagaaagnnnnnnnnnnnnnnnnnnnnnnnnnnnnnnnnnnnnnnnnnnnnnnnnnnnnnnnnnnnnnnngtacctaannn

SEQ ID NO: 117092 - DNA, 547 bp, Arabidopsis thaliana
agaaagtggatggatgtcttatagaatgaacaaaacatcctctgtttctcttgtccttgtccctttttccagatcttaaggttttccacattttatcatctgggtcctctccttaatgatttgaagacactcaattccgagctgatcggggactagaaggcggattctgtttcagacaaaagtagatttccctgtctctttcccgtttgattttcaataagatgaatccggaggagcaaaagatggaatctgcatcggatctgggcacgctcttcattggcgggatttcatgggacacagatgaagaacgactgcaagagtattttggcaagtatggagatttggttgaagctgcgatcatgagagaccgtactaccggacgtgcccgtggctttgggtttatcgtttttgcagatccttctgttgctcgagagagtcattatggacaaatacatctattgatggtcgcacggtcgaggctaataaagctgtctccttgtatgatcagcaattgctcaaacgacacgccatttcatgcaccttattt

SEQ ID NO: 117093 - DNA, 2171 bp, Arabidopsis thaliana
ccaacactcacaaattctcttaaagctcacagacgaattctttctatttttaatctttccggcgaacaattctgatctctaataatggcgggtaaaggtgaaggtccagctatcggtatcgatctcggtacaacctactcttgcgtcggtgtttggcaacatgaccgcgtcgaaatcatcgccaacgatcaaggcaaccgcaccactccttcctacgttgctttcactgacagcgagcgtctcatcggggatgctgccaagaatcaagtcgccatgaaccctaccaacaccgtcttcgatgctaagcgtctaatcggaagaagatacagtgatccctctgttcaagcggataagagtcactggccttttaaggttgtttccggtccaggtgagaagcctatgattgtggttaaccacaagggagaggagaaacagttttctgctgaggaaatctcgtcgattgttcttattaagatgcgggagattgcagaagctttccttggttctcctgttaagaacgctgtcgttatagttcctgcttatttcaacgactctcagcgtcaaggcactaaggacgctggagttatctctggtctcaacgtgatgcgtatcatcaatgagccaactgctgctgctattgcttacggtcttgacaagaaggcgtcgagtgttggcgagaagaatgttttgatctttgatttgggaggtggtacttttgatgtgtctttgcttacgattgaggaaggtatctttgaagtcaaggcaactgctggtgacacacatcttggtggtgaggacttcgacaacaggatggttaatcattttgttcaggagtttaagaggaagaacaagaaggatattactgggaacccgagagctttgaggaggcttaggacagcttgtgagcgggcgaagagaactctttcttcgactgctcagacgactatagagattgactctctttttgagggtattgatttctacactaccatcactcgtgctaggttcgaggagctcaacatggatttgtttaggaagtgtatggagccagtggagaagtgtttgagggatgctaagatggacaagagcagtgttcatgatgttgttcttgttggtggctctacaaggattcccaaagtgcagcagcttttgcaagacttcttcaatgggaaagagctctgtaaaagcattaacccggacgaggctgttgcttacggagcagctgtgcaagctgcaatcttgagcggtgaagggaatgagaaggtccaggacttgttacttcttgatgtcactcctctgtccttgggtttggaaactgccggtggtgttatgactgttttgattccgaggaacaccacaattccgaccaagaaagagcagatattctctacctattcagacaaccagcccggtgtactgatccaggtctacgaaggagagagggcacgaacaaaggacaacaaccttttgggaaagttcgagctcagtggtataccacctgctccacgaggtgtaccgcagattactgtctgtttcgacatcgacgccaatggtatcctgaatgtgtcggctgaggacaagacgactggtcagaagaacaagatcacaatcacaaacgacaagggaaggttatcaaaggaagagatcgagaagatggtacaagaggcagagaagtacaaggctgaggatgaagaacacaagaagaaggtggatgcaaagaacgctctcgagaactatgcatacaacatgaggaacacgatcaaggacgagaagatcgcatctaagcttgacgcagctgacaagaagaagattgaggatgcaatcgaccaagctattgaatggttagatgggaatcaactggctgaggcagatgagttcgaggataagatgaaggagctcgagtctctttgcaaccctattattgcaagaatgtaccaaggagctgggcctgatatgggtggtgcaggaggaatggatgacgacacacctgctggtggtagcggcggtgctggcccaaagattgaagaagttgattaagccttttggcttttgtttactctgtttgcttgagattctagttggtttcttgttcttagttttatctttctatgtcactctgaaactggtgtgtgatcattttgatgttttaagaatttagctttaccgttttt

SEQ ID NO: 117094 - DNA, 1494 bp, Arabidopsis thaliana
  unsure (1)..(1494): unsure at all n locations
tttataatcttaactcaaaagaagatcgatcaactattatggagtaacaaatcgccctccaagaaaaacaaaccgccatcgtgcggatcactcgtaaccatcctcagccttgatggtggtggagtcagaggaatcatcgccggagtaatccttgcctttctcgaaaaacaacttcaggaactcgatggagaagaggcgaggcttgcggattacttcgacgtgatagctggaactagcaccggtggtcttgtgacggcgatgttgactgtaccggacgagaccggtcgacctcatttcgcggctaaagacattgtgccgttttaccttgaacattgtcccaagatatttccccagcccacaggcgtgcttgctctgttaccgaagcttccaaagcttctgtctggtccaaagtacagcggaaagtatctgcgaaatcttctgagtaagcttcttggagagacaagacttcaccagaccctcacaaacattgttatacctaccttcgatatcaagaaacttcaacccactattttctcctcttaccagctgttggttgaccctagcttggatgtcaaggtatcagacatatgcatcggcacttcagctgctcccactttctttcctccccattacttttccaacgaagacagtcaaggcaataagacggagtttaatctcgttgatggcgcggttactgctaataacccgactttggtggccatgacagctgtgtctaagcagattgtgaagaataatcctgatatgggtaagctcaagccgttaggtttcgaccggtttctcgttatatcgataggaacaggatcaacaaaaagggaagagaagtacagcgcaaaaaaggctgcaaaatgggggatcatatcttggttatatgacgatggatctactccgatattagacattaccatggaatcaagccgcgacatgatccattatcacagctctgttgtgtttaaagccctacaatctgaagacaagtacctccgaatcgatgatgatacattggaaggagatgtaagcactatggatctagcgacaaagtctaacttggagaatcttcaaaagattggagagaagatgctgacaaacagagtcatgcaaatgaacatcgacactggtgtatatgaacctgttgctgaaaatattaccaatgatgaacagctaaagaggtatgcaaaaattctctcggacgaaaggaaattaaggagactaagaagcgacacaatgattaaagattcatcaaatgaatcacaagagataaaataaaaggaaatcattcgtgcttttgtgtgaaattgtttgttgcatatgttttacgtggtgacgtccattactttatatgctgtgagatgaaattttttaaataaaattggttatctaaaaaaaaaaaaaaaaaaagaagggcannnnnnnnnnnnnnnnnnnnnnnnnnnnnnnnnnnnnnnnnnnnnnnnnnnnnnnnnnnnaacnnnnnnn

SEQ ID NO: 117095 - DNA, 728 bp, Arabidopsis thaliana
ctcaaaagaagatcgatcaactattatggagaacaaatcgccctccaagaaaaacaaaccgccatcgtgcggatcactcgtaaccatcctcagccttgatggtggtggagtcagaggaatcatcgccggagaactcgatggagaagaggcgaggcttgcggattacttcgacgtgatagctggaactagcaccggtggtcttgtgacggcgatgttgactgtaccggacgagaccggtcgacctcatttcgcggctaaagacattgtgccgttttaccttgaacattgtcccaagatatttccccagcccacaggcgtgcttgctctgttaccgaagcttccaaagcttctgtctggtccaaagtacagcggaaagtatctgcgaaatcttctgagtaagcttcttggagagacaaggcttcacccagaccctcacaaacattgttattcctaccttcggtatcaaggaacttcaacccacttttttctcctcttaccagctgttggttgaccctagcttggatgtcaaggtatcagacatatgcatcggcacttcagctgctcccactttctttcctccccattacttttccaacgaagacagtcaaggcaataagacggagtttaatctcgttgatggcgcggttactgctaataacccgactttggtggccatgacagctgtgtctaagcagattgtgaagaataatcctgatatgggtaagctc

SEQ ID NO: 117096 - DNA, 1654 bp, Arabidopsis thaliana
  unsure (1)..(1654): unsure at all n locations
ctgttaagccactaaaaccctaaaggcgtctccttttctcgccaccactctccacaatacccatttctgcaaaatggcttcttctcgtatttctctccgccttgttcgccgatttgcctcagccgccgctgacggtacgaccaccgctccctcttcaggcaaaatctctgtctccaaagctaagtccactctccggaaagaacacgatcccgacaaagctcttaagatctacgccaatgtctccgatcactcagcctctcctgtttcatctcgctacgcccaagagctcactgttcgtcgcctcgccaagtgtcgccgtttctcagacatcgaaaccctaattgaatcccacaaaaatgatcccaaaatcaaagaagaacctttctactctacgcttatcagatcttacggccaagcctctatgtttaatcacgccatgagaaccttcgagcagatggatcaatacggcacacccagatcagctgtttccttcaacgccttgctcaacgcttgtctccattccaagaatttcgataaagtcccccaactgttcgacgaaattcctcagaggtacaataagatcatccctgacaaaatctcttacggtatattgattaagtcatactgtgactctggtacccctgaaaaagccattgagattatgagacagatgcaaggtaaaggcatggaagttactaccattgctttcaccaccattttgagttcattgtataagaaaggtgagctcgaggtagctgataacttgtggaatgagatggtgaagaaaggctgtgaattggataatgcagcgtataatgttcgtataatgagtgctcaaaaggaaagccctgaaagagttaaggagttgattgaagaaatgagtagtatgggattgaaacctgatacgattagctataactatcttatgactgcgtattgtgagagaggaatgttggacgaagctaagaaagtgtatgaaggacttgaaggtaacaactgtgctcccaacgcagctacttttaggacattgatatttcatctttgttatagccgattgtacgagcaaggctatgcgatcttcaagaagagtgtgtatatgcacaagattccagatttcaacactttgaagcatttggttgtgggattggtggagaacaagaaaagagatgacgctaaagggttgattagaacggtgaagaagaaattccctccgagtttcttgaatgcgtggaagaaactcgaggaggaactcgggctgtattcgaaaaccgatgcttttccatcttctgcaaaagaggctgctgctgcttaatagctcaagagcatttcgattgaacatcttattttgttgcttgaagacttgttgaaaactatgatctagtatgcaggtttatttataagctgctcctgcatttttctttcctcataaattagcttgtaaaagcttgaaggtttgttgttggaatctctagaattccatagtcaacaattttcaggttcatatagttcactgctttgttctacacacttgtgcttcatgatgaattcaagtttctttcagtttaaaaaaaaaaaaaaagnnnnnnnnnnnnnnnnnnnnnnnnnnnnnnnnnnnnnnnnnnnnnnnnnnnnnnnnnnnnnnnnnntgtcctaa

SEQ ID NO: 117097 - DNA, 941 bp, Arabidopsis thaliana
gggagctactacgcctgcaggtaccggtccggaattcccgggtcgtacccacgcgtgccgccacgcgtccgattttttgaaacttcttctcttttgcggtttcgtgttccactcctctcttcttggcccacgtgttcatcaatctctccctccgcatgtaatcgcttcgccgtcaatatcacatctttcttcttctttatctttaaaatctctttagatcgattcttttgtggattcttgaaatctccggagaaaaccactatggagacggcgactgaagtggccacggtggtgtcaactccggcggttacggttgcggcggtggcgacgaggaagagagataagccgtataaagggataaggatgaggaagtgggggaagtgggtggcggagataagagagcctaataaaaggtcaaggatctggcttggctcttactctactcctgaagcggcggcgcgtgcttacgacacggcggtgttttatctccgaggtccttctgctcggcttaacttcccggagcttttagccggagtgacggtgacgggaggaggcggaggaggagtgaacggtggtggagatatgtcggcggcgtatataaggagaaaagcggcggaggttggagcacaagtggatgcgttagaagcggcgggggcgggagggaatcgtcatcatcatcatcatcaacatcaacgtggtaatcatgattacgtagataatcatagtgattatcgtattaatgatgatcttatggagtgtagtagtaaagaagggtttaagaggtgtaatggatcgttggaacgggttgatttaaacaaattacccgatccggaaacttcagatgacgattaggaaagcaaaaaatagaaaccaaaaaaaaaaaaaaagggcggccgctctagaggatccaagcttacgtacgcgtgcatgcgacgtcatag

SEQ ID NO: 117098 - DNA, 791 bp, Arabidopsis thaliana
  unsure (1)..(791): unsure at all n locations
tcnnnnnnnnnnnnnnnnnnnnnnnnnnnnnnnnnnggtaccggttgngagtcccgactcgacccacgcgtccccccgccttttctcagatcacaaaaccctaatttcgaatctttattcttcagaatggctttctgtaacaaactcggtggtctattgagacagaacatttcttctaacggaaatgttccggttacgtctatgctcggatctctccggttgatgtctaccaagcttttcatcggaggtctctcatggggaaccgatgacgcatccttaagggatgcttttgctcacttcggtgacgttgttgatgctaaagttatcgttgatagagagacaggaagatcaagggggtttggatttgtcaacttcaatgatgagggtgctgcaactgctgccatatcagagatggacggaaaggaactgaatggtcgtcacatccgagtgaatcctgctaatgatagaccaagtgctccacgggcttatggaggtggtggtggatacagtggtggaggtggaggctacggaggaggtggtggtgggtacggaggaggaggtggtggctatggaggaggtggtgatggtggtggtggtttctaaacagaggaggtgcttgtgaagaagaagagttaatggttctgtttagttggtttcttctattgaatcttatgttagtacaaaacctgaatgggatttgctgaaaactccttactcttttttttttggttaccaatcaatttggttgaaatattttattgccaaaaaaaaaaaannnnnnnnnnnnnnnn

SEQ ID NO: 117099 - DNA, 717 bp, Arabidopsis thaliana
  unsure (1)..(717): unsure at all n locations
ctaatttcgaatctttattcttcagaatggctttctgtaacaaactcggtggtctattgagacagaacatttcttctaacggaaatgttccggttacgtctatgctcggatctctccggttgatgtctaccaagcttttcatcggaggtctctcatggggaaccgatgacgcatccttaagggatcctaatttcgaatctttattcttcagaatggctttctgtaacaaactcggtggtctattgagacagaacatttcttctaacggaaatgttccggttacgtctatgctcggatctctccggttgatgtctaccaagcttttcatcggaggtctctcatggggaaccgatgacgcatccttaagggatgcttttnctcacttcggtgacgttgttgatgctaaagttatcgttgatagagagacaggaagatcaagggggtttggatttgtcaacttcaatgatgagggcgctgcaactgctgccatatcagagatggacggaaaggaactgaatggtcgtcacatccgagtgaatcctgctaatgataggccaagtgctccacgggcttatggaggcggtggtggtncagcggaggaggttggttggtngctattgnggaggaggttgcagctacggtggtgtaatngtggtggtactaacaanggatttggtttaaanagggtaatggtctcttaggtggttntctttnatc

SEQ ID NO: 117100 - DNA, 3438 bp, Arabidopsis thaliana
actctcttctacaaagagtctggtcacactcatggccatcctccatttctctcttcctcttatcgtctctttccttcgtcctcacgcctctcctcgcttcttcctcctccctcgctctctttctcagtcccctttcctctcccgccgccgttttcaccgtacctccgccgtttcctccgccgctgttcatcaccaatcctatcgtaatcccgacgatgatgttacccgcgcggtgtctgttcctacattccaacaagcgattcaacgcctccaggaatattgggcttccgttggatgtgccgttatgcaaccaagtaacactgaggtcggagctggcaccatgaatccttgtacctttttgagggttcttggtcctgaaccatggaatgttgcttatgttgagccaagcatacgtcctgacgactctcgctatggagagaatcccaataggcttcaaagacacactcaatttcaagtcatattgaaacctgaccctggaaactctcaacagctctttatcaacagtctttctgctctaggtattgatgtgactgcacacgatatacggtttgtagaagacaactgggagagcccggtgcttggtgcttgggggttgggctgggagatttggatggatggtatggaaatcacacaatttacttacttccagcaggctggaagtcttccgttgtctccagtatctgttgaaataacttatgggcttgagcgcatcatcatgttacttcaggaagttgaccatttcaaaaagatcttatatgctgatggaatcacctatggggagcttttcttggaaaatgagaaggaaatgagctcatattatttagagcatgctagtgtggatcgccttcaaaagcatttcgattattttgatgaagaagcacgttccttgcttgccttaggacttccaatccctgcgtatgaccagcttctgaagacatctcacgcttttaacattttagacgctagaggtttcattggcgtaactgaacgtgctcgttatttcggtcgaatgcgtacgttggctcgccaatgtgcccaactgtggttagcgacacgtgagtctcttggacatcctcttggtgttgcctccgaaccagttcctcccgtttgtcacagagctgctctggaaaaagtggctgaaaaggtttctgaagatccaagatcgtttattattgagatagggactgaagagatgccacctcaagatgttatcaatgctagtgaacaactcagggtcttagtgctagaattactagagaaccaaagattgcggcatggtgctgtgaaagcatttggcacacctcgcaggctagtggttttagttgatgctatgtcctcgaagcagctggaagaggaggttgaagttcgaggaccccctgcttctaaagcttttgatgatgaaggaaatcctacaaaggctgctgagggttttagccgcagatatggcgttccattggaaaaattgtacagaaaagtttctgggaagacagaatatgtacatgcacgagttacagagccagctcgacttgctttggaggttctgtcagaagatttacctggtatactggctaaaatatcgttcccaaagtcaatgcggtggaactcttcagtaatatttagcaggccgattcgctgggttatggccttacatggtgatctggttgtgccattctcctttgctggcatctcaagtggaaatgtatcttgtggacttcgcaacactgcttcagcatcactgttggtacagaatgcagaatcctatgaagatactatgaggaattctggaatcaatattgagattgaggaaaggaagaaaatcattcttgagaagtcaaatgcactagcaaagagtgtgaatgggcgccttgttgttccgcagaacttacttaatgaagttgcaaatctcgtcgaagctcctgtgcccttaattggaaagttcaaggaatcattcttagaacttccagaggagctattaactattgttatgcagaagcaccagaagtatttttccattattgatgagagtggacagctattgccttactttattgctgttgccaatggtgcaataaatgaggatgtggtgaagaaaggaaatgaagcagttctcagggcacgttatgaagatgcaaagttcttctatgaggtggacacaaggaaaagattttctgaattccgagatcagctacagggaattcttttccatgaaaagctggggacgatgctggataagatgaaccgcctcaaaaagatggtatctaaactttgtttggccctcaaaattgatgaagatctgcttccggttgtagaggatgctgcctcacttgctatgtcagatcttgcaactgctgtagttacagaatttactgcgctgtcaggaataatggctcgtcattatgctctcagagatggctattcagagcagatagcagaagctttgctggaaattacacttcctagattttctggagacgtcatcccaaaaacagatgcaggaatggttttggcaataggtgatagattggatagccttgttggtttatttgctgctggttgccagccaagttcaacaaatgacccttttggccttagaagaatatcatatggcttagttcagattttggtcgagaaggataaaaatgtcaacttcaaacgtgttctagaacttgcagccagtgtacaaccgaggaaggttgaggcaaacactgtagaagatgtgtatcaatttgttactcgaagactggaacagctattggttgacaacggagtaagccctgaagtagttaggtctgtcctagcagagcgtggaaacaatccttgtctggcagcacggactgcatacaagacggaaaagctaagcaaaggtgagatgtttccgaagatagtggaagcatattctcgtcccacacgcattgtccgtgggaaagatgttggtgttggagttgaggtggatgagaatgcatttgagactccccaagagagaacgttgtggagtacttacacctctatcaaagatcgaattcacactggcattgaaatcgaggagttcaccgagatatccatgcaattggtggagccactcgaggatttcttcaacaatgtatttgtaatggtggaggaagaaagagtgaggaagaacagactcgctctgcttaataacattgccaatcttcccaaaggagtcattgacctctcatttttgcccggattttgatctttacttgtttcataatcccactccggaatcatcaattcattgacctctcattttttcttgtttcataacctcatatagttttgtgttcactgagcaaaaattcaaactaaaacttgtgcaatggaatactttaaaaacagtttcaaaacctcaataaaaagatttcaaaagatttttagataaaaaaaaaaaaaaaaaaa

SEQ ID NO: 117101 - DNA, 489 bp, Arabidopsis thaliana
  unsure (1)..(489): unsure at all n locations
nnnnnnnnnnnnnnnnnnnnnnnnnnnnnnnnnnnnnnnnnnnnnnnnnnnnnnnnnnnnnnnnnnccacgcgtccgatttactgcgctgtcaggaataatggctcgtcattatgctctcagagatggctattcagagcagatagcagaagctttgctggaaattacacttcctagattttctggagacgtcctcccaaaaacagatgctggaatggttttggcaatacgtgataggttaattgaaagcctaaagctttgctgtctctcccatttctttctacgccaaacggttcgtcctgtggaacacaaaaccttgtatctggattgcgcggagctaaattgtgtatgcttctgatatgataatgtttgttcgaattcgtgatcctatttactaacacctatgcttggccctatgactgtagaattggatacccccgttggtttatttgctgctggttgccagccaagttcaacaaatgaccctttt

SEQ ID NO: 117102 - DNA, 866 bp, Arabidopsis thaliana
  unsure (1)..(866): unsure at all n locations
cccacgcgtcagaaaccatctcacaaactcatcaaacctctttctcatctcatcttcaagccatctccgatcatcatcagacaatggcagcagctatggcaacagcaaccaagtgcatgtctctaaacccatctcctcctaaactccaaaaccaaaccaaatccaaaccattcatctccctaccaaccccaccaaaaccaaacgtctctctcgccgtcacaagcaccgccctagccggagccgtcttctcttccctcagctactctgagccagctttagccatccaacagatcgctcagctcgctgcagcaaacgccagtagcgacaaccgtggcttagctcttctccttcccatcgtcccagccattgcatgggtcctttacaacatcctccagccagctattaaccaggtcaacaagatgcgtgagagtaaaggtatcgttgttggtctaggtattggtggtggtcttgcagcgtcagggcttttgactccacctccggaggcttatgctgcggcagaagcggcggctgctagttcagacagcagaggacagttgttgttgattgttgtgacaccggcactactttgggttctgtacaatatcttgcagccagctttgaaccaaatcaacaagatgaggtctggggattaaaatcttatatatatataatattattataaatcatctttgggattcaaatgtaaaattaatcctttgttttatggacagttttatgtttacatttttggactaatatcgtttctcttatcggcataaaaaaaaaaaaanaanaaaaannnnnnnnnnnnnnnnnnnnnnnnnnnnnnnnnnnnnnnnnnnnnnnnnngagacctgaagtatcat

SEQ ID NO: 117103 - DNA, 2596 bp, Arabidopsis thaliana
agagaaagagaaagagagagaaaaacagagaggttgtcttcttcgtcaaatatccgattatctggtatcgtgattcggaggtgtaatgggaggtagtagcggcggcggagtttcttatcgtagcggcggcagatcagacgtggaattagaggattacgaggttgatgatttcagagatgggattgtagaatcgcgaggaaacagattcaatcctctcaccaatttcttagggttagacttcgccggcggtagcggtggaaagttcaccgtcattaatggaatcagagatatctccagaggctccattgttcatcccgataaccggtggtacaaggcgtggacgatgtttatattgatatgggcactttattcttccttcttcactccattggaattcggattcttcaggggattaccagagaatctgttcatcctcgatatcgctggccaaatcgctttcttagtagatattgtcttgacattcttcgttgcttatcgtgatagccgaacttatagaatgatctataaacgcagctcaattgctttacggtacttaaaatcaacttttataattgacttacttgcttgcatgccatgggatatcatctacaaggctgcaggcgaaaaagaagaagtgagatacctattgttgataaggctatatcgagttcatagagtaatcctgtttttccacaaaatggagaaagatataagaatcaattacctttttacaagaatcgtcaagcttatattcgtcgagctttattgcactcacaccgcagcttgtatcttctattacttggccacgacgcttcctgcttctcaagaagggtacacttggattggaagcttgaagttaggagattacagttactcgaagtttagagagatcgatctctggactcgatacactacttctatgtactttgcagttgttactatggcaactgttggttatggagatatacacgcggttaatatgcgggaaatgatattcgcgatggtctacatttcattcgatatgattctaggagcttacttgattggtaacatgacagctttgattgtaaaaggttcgaaaacagagagattccgggataagatggctgatatcatgcggtatatgaaccgaaacaaactcggtaggaacatccgtggtcagattaccggacatttgcggttgcagtacgaaagcagctacactgaagcagctgttcttcaagacattcctgtctctatccgtgctaagattgcgcaaactttatacttgccgtatattgagaaagttcctctctttcgcggatgctcatctgaattcattaaccagattgttataagacttcatgaagagttctttcttcctggagaagttataatggagcaaggaagcgtcgttgatcagctctactttgtttgtcacggtgtattggaggagataggtataacaaaggatggatctgaagaaatagtggcagttctacaaccagatcattcttttggagagatttcaatcctctgcaatattcctcagccttacacggttagagttgcagagctatgtcggattctaaggcttgacaagcaatctttcatgaacatactcgagatatttttccatgatggacggaggattctcaacaatctgcttgaagggaaagaatctaatgtccggattaagcaactagaatccgatataacctttcatatcagtaaacaagaggcagacgtagctctgaagttgaatagtgcggctttctacggtgatctttatcagcttaagagtttgattcgagctggaggtgacccgaataagacagattatgacggaagatcgcctttgcatcttgcagcctctagaggatatgaagatattacattatatcttatacaagaatcagttgatgtaaatatcaaagataaattggggagcacacctttactagaagcaatcaagaatgggaatgatcgtgttgcggcgttgcttgttaaagaaggagctacgttgaacatagagaacgcagggactttcctttgcaccgtggttgcgaaaggagacagcgatttcttgaaacggcttcttagtaacggaattgatcctaattccaaagattatgatcacagaacacctcttcatgtagctgcctctgaaggattttatgtcttggcgatccaattggtagaagcaagtgctaatgttcttgcaaaagacagatggggaaacacacctcttgatgaagctttgggttgtgggaacaagatgttgataaagttactcgaagacgctaagaattctcaaatctcttcgtttccgagtggctccaaagagcctaaagataaagtctataagaagaaatgtacagtgtatttttcacatcctggtgattcgaaagagaaaagaaggcgcgggattgtactgtgggtacctcgaagcatcgaggagcttataagaacagcaaaggagcagctgaatgttccggaggcttcttgtgtattatctgaagatgaagccaaaattattgatgtagatttgataagtgatggacaaaaactgtatttggctgttgaaacataatgattcgagcaaatttcaaaaaaa

SEQ ID NO: 117104 - DNA, 875 bp, Arabidopsis thaliana
  unsure (1)..(875): unsure at all n locations
nnnnnnnnnnnnnnnnnnnnnnnnnnnnnnnnnnnnnnnnnnnnnnnnnnnnnnnnnnnnnnnnnnnnnnnnnnnnnnaattcctcgtccgcccaagagacaaaaatccttcgcaatcgagcaacggaagctcctgcatccaccgtccaaatctcttctaacgtcgccggagatcggtaaaccggttcttcatcccgtattcatctcttattgagatcgttggggaagtagagaatggcgacgtttgagctgtacaggagatcgacgatcgggatgtgtctgacggagactttggacgagatggttcagagcggtacgctgagccctgagctagctatccaagtccttgttcaatttgacaagtccatgactgaagctctggagagccaagtgaagaccaaggtgtccatcaagggacacctgcacacttacaggttctgtgacaatgtctggaccttcatattacaggacgcaatgttcaagagtgacgatcgtcaagagaatgtgagccgggtgaagatagtggcatgtgattccaagctgctcacacagtgagatgcaaattgtctgcagggaatttactttcctttgtactagattttgagttttttcactttgtaaactcagcacttgctatatatgttgagcacttgctatatgttgagctccatctgcagccatcaatttagcctatatgtaaattctcggcccaaggacataaggatacattctgttgctatgagaaagttcttgagcttccnnnnnnnnnnnnnnnnnnnnnnnnnnnnnnnnnnnnnnnnnnnnnnnnnnnnnnnnnnnnnnnnnnnnnnnnnnnnnnnnnnnnnnnnnnnnnnnnnnnnnnnnnnnnnnnnnnn

SEQ ID NO: 117105 - DNA, 1568 bp, Arabidopsis thaliana
acgcgtccgacgcttcgtcgccggccgatttctcccagactcgtcttaccgcctccggtcgaaaccctagattcccggaggacgaaattcgttttttcgccggaactaaattaaggagatttgagaggctatgggtacaacaacgacaacaagcgctgtgtatatccatgttatcgaggatgtcgtcaacaaagttcgtgaggagttcattaacaacggaggtcctggcgagagtgttctcagcgagcttcaaggaatttgggagacgaagatgatgcaagccggagtcttgaatggaccaatagagaggtcatcggctcagaagccaacacctggtggtccactgactcatgatttgaatgttccttatgaaggtacagaggagtacgagactcccactgctgaaatgctcttccctcctacaccattgcagactccccttccaacgccgcttcccggtactgctgataactcatccatgtataacatccctaccggctcaagtgattatcccactcctggaactgagaatggagtcaacattgatgttaaagcaagacctagtccttatatgccaccgccttctccgtggacaaatcctagacttgatgtcaatgttgcttatgtggatggccgtgatgagcctgagagaggaaactctaaccagcagtttacgcaggatttatttgtgccatcctctgggaaacgaaaacgtgatgattcttctggacattatcaaaatggtggatctatacctcaacaggatggtgcaggcgatgctatccctgaggcaaactttgagtgtgatgcattccgcataacctctattggcgatagaaaggtaccacgagacttcttcagctcatcatcgaagattcctcaggttgatgggccaatgcctgacccttatgatgaaatgctctctacaccaaatatatatagttatcaaggacccagtgaagagtttaacgaggccagaactcctgctccaaacgagatccaaacgagcactcctgttgctgtacaaaacgatatcattgaagatgatgaagagctgttgaacgaagatgatgatgatgacgagttggacgacctagaaagtggcgaggatatgaacacacaacacctggttttagctcaatttgacaaggtgacgcgcacaaagagcaggtggaagtgcagtctgaaagacgggatcatgcatataaacgataaggacattctcttcaacaaagcagcaggcgagtttgacttctgatcttaacactagcaatgatgcttctaggaaagtccttcaaatgtccagtgtctttctttttaccttatgatttaagaccgaccgagagagacatgagtattcatgggaaagtgtactctggttggcttgttgtacaaaaagaaaagttttttctgtcgaagaaggcgtatcaactttcaccttgtttcatgaactcttattgtctttcacgcaatggaaaattaacttcccaaaaaaaaaaaaaaaaagggcggccgctctagaggatccaagcttacgtacgcgtgcatgcgacgtctagctcttctat

SEQ ID NO: 117106 - DNA, 794 bp, Arabidopsis thaliana
  unsure (1)..(794): unsure at all n locations
gaaaaacggaaaaaccggggaatgatttttcatttgggcccccacctatccaaaaaatggggggggtttctaataccctccaaccaaaaaatgggtgcaaagcaaatgttattcccttagagccaaacctttgaaatgtgctggccctccgtataaccaatgtgggcgataaaaagatcccccgagatttattgggctcatcatgaaagattccccaagttgatgggccaatgcctgacccgtatgatgaaatgttgtccacacccaatatatacagttatcaaggacccccattgaggggtttaatgggcccaagaactcctgccccaaacggaatcccaacgggccaacccctgtggctgtcccaaaccgttatcattgaagatgatgaagagctcgcgcacaaagagcaggtggaagtgcagtctgaaagacgggatcatgcatataaacgataaggacattctcttcaacaaagcaacaggcgagttcgacttctgatcttgacactagtaatgcttctaggaaagtcagagtccttcaaatgtcggatgtctttctttgtaccttatgatttagaccgacctccgagtgagagacatgattatttatgggaatatgtactctggttggcttgttgtacaaaaagaacagatttttccggccgaagaaggcttatcaactttgacttgtttcatgaaaaaaaaaaaaaaagaaaaagggcggccgctctagaggatccaagcttacgtacgcgtgcatgcgacgtcatagctcgtcggatagtnnacatt

SEQ ID NO: 117107 - DNA, 562 bp, Arabidopsis thaliana
  unsure (1)..(562): unsure at all n locations
nnnnnnnnnnnnnnnnnnnnnnnnnnnnnnnnnnnnnnnnnnnnnnnnnnnnnnnnnnnnnnnnnnnnnccacgcgtccgcggacgcgtgggcggacgcgtgggctgatctcctcttctctctgtcttctgagttctgtctacgcttcgtcgccgatcccggccagactccgtcttaccggcacaaaccctagattcccggaggacgaaattcgttttttcgccggaactaaattaaggagatttgagaggctatgggtacaacaacgacaacaagcgctgtgtatatccatgttatcgaggatgtcgtcaacaaagttcgtgaggagttcattaacaacggaggtcctggcgagagtgttctcagcgagcttcaaggaatttgggagacgaagatgatgcaagccggagtcttgaatggaccaatagagaggtcatcggctcagaagccaacacctggtggtccactgactcatgatttgaatgttccttatgaaggtacagaggagtacgagactcccactgctgaaatgctcttccctcctacaccattgcagactccc

SEQ ID NO: 117108 - DNA, 466 bp, Arabidopsis thaliana
  unsure (1)..(466): unsure at all n locations
nnnnnnnnnnnnnnnnnnnnnnnnnnnnnnnnnnnnnnnnnnnnnnnnnnnnnnnnnnnnnnnnnnnnnnnnnnnnnnnnnnnnccacgcgtccgggatggccgtgatgagcctgagagaggaaactctaatcagcagtttacgcaggatttatttgtgccatcttctgggaaacgaaaacgtgatgattcatctgcacactatcaaaatggtggatctatacctcaacaagatggtgcaagcgatgctatccctgaggcaaactttgaatgtgctgcactccgtataacctatgttggcgatagaaagatcccacgagatttgattggctcatcatcgaagattccccaagttgatgggcccatgcctgacccgtatgatgaaatgttgtccacacccatatatacagttatcaaggacccaaatgaagagtttaatgagggcagaactcctgctccaaacgaaa

SEQ ID NO: 117109 - DNA, 1694 bp, Arabidopsis thaliana
ttttctcggcattcgtaaaacagaaaagtgggtctccaagaaaattaccctaaattcacaaagattcatacttttctccacctccaatggattccagagagatccaccaccaacaacagcaacaacaacaacaacaacagcagcagcagcaacaacagcaacatctacaacaacagcaacaaccaccgccagggatgttaatgagtcaccacaattcctacaatcgaaaccctaacgccgccgccgctgttttaatgggtcacaacacctccacatctcaagctatgcatcaaagattaccttttggtggttctatgtcaccgcatcagcctcaacaacatcagtatcatcatcctcagcctcagcaacagatagatcagaagactcttgaatctcttggatttgatggatcgccttcttctgttgccgccactcaacaacattcgatgagatttgggatcgaccatcaacaggttaagaagaaacgaggtagacctaggaagtatgctgctgatggtggtggtggtggtggtggtggtagtaacattgctcttggtttggctcctacttcgcctcttccttctgcttctaattcttacggtggtggaaatgaaggaggtggtggtggtgatagcgccggagctaatgctaactcttccgatccacctgctaaacggaacagaggacgtcctcctggctccggtaagaagcagctcgatgctttaggaggaacaggaggagttgggttcacgcctcatgtcattgaggttaaaacaggagaggacatagctacgaagatattggcgtttacgaaccaagggccacgcgcaatctgtattctctcagctacaggagctgtaactaatgtgatgcttcgtcaagctaacaatagcaatcctactggaactgttaagtatgagggccgatttgaaatcatttctctgtcaggttctttcttgaattctgagagtaatggtactgtgaccaaaactggtaacttgagtgtgtcgctggctggacacgaaggccggattgtgggtggatgtgttgatggaatgctagtagctggatcacaagtccaggtcattgtgggaagctttgtaccagatggaaggaagcagaaacaaagtgcggggcgtgctcagaatactccggagccagcttcagcaccagccaatatgttgagctttggtggtgttggtggaccgggaagccctcgatctcaaggacaacaacactcgagcgagtcatcagaggaaaacgaaagtaattctccgttgcaccgtagaagcaacaacaacaacagcaacaatcatgggatatttggaaactttacacctcaaccgcttcaccaaattcctatgcagatgtaccagaatctctggcctggcaacagtcctcaataaacagatggttcatgggtcaagatttgaccgggtttgcttctctgttccttttgacacatctctccatcagaattatctctataaagtagattgagctctcttactctctcatcttcttctcctttactatttctcttaaatttagctttggttttagataaatagagagagagagacatgttaagtaggtttcaaattcaatcttgtttagtttgtttcttagtagtttcttttgattgtgatgatcataaagacttgttctttttctcctaaaaaaaaaaaaaaaaa

SEQ ID NO: 117110 - DNA, 1975 bp, Arabidopsis thaliana
  unsure (1)..(1975): unsure at all n locations
ctctcccgcctccagcggctagtatcgccnnnnnnnnnnnnnnnnnnnnnnnnnnnnnnnnnnnnnnnnnnnnnnnnnnnnnnnnnnnnnnnnnnnnnnnccacgcgtccgcgaagataagcggagagagagagagagacagagagagattcaaaaatccgattccagatccattcctgggcaaacaaaggttggtgtttctctaatctcaaagcttttttcaaattcggaaaaagcaaatcgtgggaagagattcatcttctctctgtgcgttcatcggatctcggagcttttggttcgtcgtcaatggcggaagagacggagaaaaagtacattacgaacgaagatcttaaaaaacacaacaaatctggagatctatggatcgcgattcaaggcaaggtctacaacgtctccgattggattaaaactcatcccggaggcgacacggtgattctcaatctcgttggtcaagacgtcaccgatgctttcatcgcatttcatcccggaaccgcttggcaccatctcgaccatctcttcaccggttaccacatcagagatttccaagtctccgaagtctcacgcgattaccgtcgtatggctgccgagtttcgtaaactcggtctcttcgaaaacaaaggtcacgttactctctacactctagccttcgtcgccgccatgttcctcggagttctctacggtgttttggcttgtacctccgtcttcgctcaccaaatcgccgccgcgcttctcggtctcctctggatccagagcgcttacataggtcacgattctggtcattacgttatcatgtcgaacaaatcttataacagattcgctcagcttctctccggtaactgtctcaccggaatctcaatcgcgtggtggaaatggactcacaatgctcatcatctagcttgtaacagcctcgattacgatccagatctacaacacatccctgtcttcgccgtctccaccaaattcttctcctcattgacctcgagattctacgatcggaaactcacgtttgatccagtcgcgagattcttagtcagctatcaacactttacttattatccagttatgtgctttggaagaatcaatctcttcattcaaacgtttctcttgctcttctccaaacgtgaagtaccagatcgtgctttaaacttcgccggaatcttagtcttctggacttggttcccactcttagtctcatgtctaccaaactggcctgagagattcttcttcgtcttcacaagcttcaccgtcacggcgcttcaacacattcaattcacgcttaaccatttcgctgctgatgtctacgttggtccacccaccggtagcgactggttcgagaagcaagcggcgggaacaatcgatatctcttgtagatcatacatggattggttctttggtggattacagtttcagcttgagcatcatttgttccctcgcttacctcgttgccatctccggaaagtttctccggtggttcaagagctttgcaagaagcataatcttccgtataggagtatgtcgtggtttgaagcaaatgtgttgaccattaacactttgaagacagcagcttatcaagctagagacgtggctaatccggtggttaagaacttggtttgggaagctttgaatactcatggctaaatgattttaatcaaaacaaaatatgcttttgtttgggttaaatttgatgtgttgtttttatgctttattgaatctttgaatttcgttttgttacttacttacatggaagagatgttttagatcgaaattgaatcgagatttgatttttttattagacaactcttcgtatcgtaatgatttattaataatattattttgaatttaaaaaaaaaaaaaaaagggcggccgctctagaggatccaagcttacgtacgcgtgcaggcgacgtcatgcatcttctataggtgcacctatatactagcgaggggggggggggagt

SEQ ID NO: 117111 - DNA, 712 bp, Arabidopsis thaliana
ctacaattcgactcactttagggaaagctcggccgcctgcaggtaccggtccggaattcccgggtcgacccacgcgttcggaagcaagcggcgggaacaatcgatatctcttgtagatcatacatggattggttctttggtggattacagtttcagcttgagcatcatttgttccctcgcttacctcgttgccatctccggaaagtttctccggaggttcaagagctttgcaagaagcataatcttccgtctaggactatgtcgtggtttgaagcaaatgtgttgcccattaacactttgaaggccgcagcttatcaagctagagacgtgggctaatccggtggctaagatcctgggttgggaagctgtgaatactcatggcgtaaatgatcttaatcaaatccaaatatgctcttgcttgggtcaaaattgaaggggctggttgtatgccttattgaatccctgaatttcggtttggtacttacctacctggaagagaggtattagatcggaattggatccagcatttgtttttttaataggacaactcctcggatcggaaagaattaattaataaattaattttgaatttaataaaaaaaaaaaaaaaaaaagggccgcccccggactaggaagctcgtcgaccccgggaataaatcccggcccggtaccgccaggcgtaccagcttcccctatagagagtcgtataagt

SEQ ID NO: 117112 - DNA, 2145 bp, Arabidopsis thaliana
gctcgttttcaaattaaaaacagggagaaatttggaaattccagtacgacgggagataaaacctaacatacgccatggtgaccgttatctaaactacgccaaaatatttgaagtgtcgtcgtttcataataaaacgcaaacaaaaacccactcccactttctcctttccaaaaaaagaactctcgccactttctctgctcttttctttctctctctctttcttgttttcgccggcgatcatggagaaaagcggcttctctcccgtcggtctaagggttcttgtcgtagacgatgatccaacttggctcaagattctcgagaaaatgctcaagaagtgttcttacgaagtaacgacctgtggattagctagagaggctttgaggttgctgagggagcgtaaagatggatatgatatcgtgatcagcgatgtgaacatgcctgacatggatggtttcaagcttcttgagcatgttggtcttgaattagacctccctgtaataatgatgtcggtggacggcgaaacaagccgagtgatgaagggagtgcacacgggagcttgtgattacctcttgaagccgataagaatgaaggagttaaagattatatggcaacatgttctgagaaagaagcttcaagaagtgagagatatcgaaggctgtggatacgaaggaggagcggattggatcactcgatacgatgaagcacattttcttggaggtggtgaagatgtttcttttgggaaaaagagaaaagactttgactttgagaagaagcttcttcaagatgagagtgatccatcatcttcttcttccaagaaagctagagttgtttggtcttttgagcttcatcataagtttgtcaacgccgttaaccaaatcggatgcgatcacaaagctggtcccaagaagatattggatctcatgaatgttccatggctcactagagaaaatgttgcaagccaccttcagaaatatagactttacctgagcagattagagaaaggaaaggagctcaagtgttattcaggtggcgtgaagaatgcggattcatctccaaaagatgtcgaagtgaattcaggctaccaaagccctgggaggagcagctatgtattctctggaggaaattctctgatccaaaaagcaacagagattgatccaaagccacttgcttcagcttctttgtctgaccccaacaccgatgtgatcatgcctccgaaaacaaaaaagacgcgtataggatttgatcctcccatttcctcctctgcgtttgactctctgcttccttggaatgatgttccagaggtccttgaatcgaagccggttctgtatgagaatagctttctccagcaacaaccattgccaagtcaaagttcctatgttgcaatttctgcaccatctctcatggaggaggaaatgaagcctccttatgagacaccagcaggaggcagtagtgtgaatgcagatgagtttctcatgccacaagacaagatccctactgtaacccttcaagatttggatccctctgccatgaagctgcaggagttcaacacagaaggcgattctgaagaagcttgaactggggaacttccagaatcacatcattctgtttctttagacactgacttagacttgacttggcttcaaggcgagcgtttcttgcaaacaccgactccagtttcaagatacagtagtagcccatcactcctatctgagctcccagcccaccttaattggtatggaaatgagcggctgcctgaccctgacgagtattccttcatggtagaccaaggtttattcatatcttaaccttgttccaataacttcttttcgtatattggttggtgtaatgcagaaagattttgtgggtatacctgaaaataatcttgctttcccaagaaccttccatgatcggatgcattgtacaataatccacgagtgtcgtaggctaattacaccaaacaggttgatgacagtgataaggccacatgtttcacaccgtcgcttaagatctttactgtcacctggaaggaaattagtttgcatgtcatatcgcggccgcgaattcctgcagcccgggggatcccctaggtctagaacggccgccaccgcggtggagctcccgcttttggtccccttaattagagtg

SEQ ID NO: 117113 - DNA, 1134 bp, Arabidopsis thaliana
cccacgcgtccgcccacgcgtgctacgtcagctcccatctaaaaataacccgacccatttacgcgacccaaaccggatcaacccgcaatggataagccaagcttcgtaatccaatccaaagaagcagaatccgccgcgaaacaactcggcgtttccgtcattcagctcctcccgtcgctagtcaaaccagcacaatcctacgctcgaactccgatttcgaaattcaacgtcgcagtcgtcggactcggatcatcaggtcggatcttcttaggcgtcaatgtcgaattcccaaatctccctctccaccactcaatccacgccgaacagttcctcgtcaccaatctcacactcaacggtgaacgtcatctcaatttcttcgccgtctccgccgcaccatgtggccattgccgtcaattcctccaagaaattcgcgacgcacctgaaatcaaaatccttatcaccgatccaaacaactccgccgattccgattccgccgccgattcagacggattcttacgtctcggaagcttcttgccacacagattcggtcccgacgatcttctcgggaaagatcatcctcttcttctcgaatctcacgataaccatctcaaaatctcagatctggattcgatttgtaacggaaacaccgattcatccgccgatttgaaacaaacggctttagcggcggcgaatagatcgtacgcgccgtatagtttatgtccatcgggagtttcgctggtggattgtgacgggaaagtgtacagaggttggtatatggaatcggcggcgtataatcctagtatgggaccagtacaggcggcgttggttgattatgtggctaatggtggtggaggaggatacgagaggatcgtcggagcggttctggtggagaaagaagatgcggtggtgaggcaagagcacacggcgaggttgttattagagactatatcgccgaaatgcgaattcaaagtgtttcattgctatgaagcttagagaatcatttaattatccgaaaaataaaggaattttaaaaaaaaaggaataaaaagaaaatggggctttttaattcttaaaggtgttgagaataacggcgaaagaaaaaaaaaaagggcggccgctctagaggatccaagc

SEQ ID NO: 117114 - DNA, 1783 bp, Arabidopsis thaliana
ttgttcgagaaatcatattgagaacaaatagatttggttatatatggcctttacgaacgtttgcctatggacgctactcgccttcatgctgacttggacagtgttctacgtcacaaacagggggaagaaggcgacgcagttggcggatgcggtggttgaagagcgagaagacggtgctactgacgttatcatcgttggggctggagtaggcggctcggctctcgcatatgctcttgctaaggacgggcgtcgagtccatgtaatagagagggacctgagagaaccagagagaatcatgggtgagtttatgcaaccaggaggacgactcatgctctctaagcttggtcttgaagattgtttggagggaatagatgcccaaaaagccacgggcatgacagtttataaggacggaaaagaagcagtcgcatcttttcccgtggacaacaacaattttccttttgatccttcggctcgatcttttcacaatggccgattcgtccaacgattgcggcaaaaggcttcttctcttcccaatgtgcgcctggaagaaggaacggtgaagtctttgatagaagaaaaaggagtgatcaaaggagtgacatacaaaaatagcgcaggcgaagaaacaacagccttggcacctctcactgtagtatgcgacggttgctactcaaaccttcgccggtctcttaatgacaacaatgcggaggttctgtcataccaagttggttttatctcaaagaactgtcagcttgaagaacccgaaaagttaaagttgataatgtctaaaccctccttcaccatgttgtatcaaatcagcagcaccgacgttcgttgtgtttttgaagttctccccaacaacattccttctatttcaaatggtgaaatggctactttcgtgaagaacactattgctcctcaggtacctttaaaactccgcaaaatatttttgaaagggattgatgaaggagaacatataaaagccatgccaacaaagaagatgacagctactttgagcgagaagaaaggagtgattttattgggagatgcattcaacatgcgtcatccagcaatcgcatctggaatgatggttttattatctgacattctcattctacgccgtcttctccagccattaagcaaccttggcaatgcgcaaaaaatctcacaagttatcaagtccttttatgatatccgcaagccaatgtcagcgacagttaacacgttaggaaatgcattctctcaagtgctagttgcatcgacggacgaagcaaaagaggcaatgagacaaggttgctatgattacctctctagtggtgggtttcgcacgtcagggatgatggctttgctaggcggcatgaaccctcgtccgatctctctcatctatcatctatgtgctatcactctatcctccattggccatctactctctccatttccctctccccttcgcatttggcatagccttcgactttttggtttggctatgaaaatgttggttccccatctcaaggctgaaggagttagccaaatgttgtttccagtcaacgccgccgcgtatagcaaaagctatatggctgcaacggctctctaaaacactggtgctttaaactgcaaaatataacacatatataaatcacgaatctttgtgattctgcatatattgtgttctacaattattctcatataaatgaaaattgttctacgtaaaagtaaaaagaaggaattgtaatactaataaaacgagtttttaattctgttgaaagcttgtgtcaattggtgg

SEQ ID NO: 117115 - DNA, 1846 bp, Arabidopsis thaliana
  unsure (1)..(1846): unsure at all n locations
ccacgcgtccggcaatgacttacgcgtggttatggacgcttctcgcctttgttctgacatggatggtttttcacctcatcaagatgaagaaggcggcaaccggagatttagaggccgaggcagaagcaagaagagatggtgcaacggatgtcatcattgttggggcgggtgttgcaggcgcttctcttgcttatgctttagctaaggatggacgacgagtacatgtgatagagagggacttaaaagagccacaaagattcatgggagagctgatgcaagcgggaggtcgcttcatgttagcccagcttggcctcgaagattgtttggaggacatagacgcacaagaagcgaagtccttggcaatatacaaggatggaaaacacgcgacattgccttttccagatgacaagagttttcctcatgagccagtaggtagactcttacgtaatggtcggctggtacaacgtttacgccaaaaagcagcttctcttagcaatgttcaattagaagaaggaacagtgaagtctttaattgaagaagaaggagtggtcaaaggagtgacatacaaaaatagcgcaggcgaagaaataacggcctttgcacctcttactgtcgtatgcgatggttgttattcgaaccttcgtcggtcactcgtggataatactgaggaagtcctctcgtacatggtgggttacgtcacgaagaatagccgacttgaagatccccatagtctacatttgatattttctaaacctttggtttgtgttatatatcaaataaccagtgatgaagttcgttgtgttgccgaagttcccgctgatagtattccttctatatcgaatggtgaaatgtctaccttcctcaagaaatcaatggctcctcagatacctgaaactggaaatcttcgggagatatttttgaaaggcatagaggaaggattaccagagataaaatcaacagcgacgaaaagtatgtcatcgagattgtgtgataaaagaggagtgattgtgttgggagatgcattcaatatgcgtcatcctataatcgcgtcaggaatgatggttgcactctcggacatttgcattctacgcaatcttctcaaaccattgcctaacctcagcaatactaagaaagtctctgatcttgtcaagtccttttacatcatccgcaagccaatgtcagcgaccgtgaacacgctcgcgagtatcttttcacaagtgcttgttgctacaacagacgaagcaagagagggaatgcgacaaggctgcttcaattacctagctcgtggagattttaaaacaaggggattgatgactattctcggaggcatgaaccctcaccctcttactctagtccttcatcttgtagccatcacccttacgtccatgggccacttgctctctccgtttccttcgcctcgtcgcttttggcatagcctcagaattcttgcctgggctttgcaaatgttgggtgcacatttagtggatgaaggattcaaggaaatgttgattccaacaaacgcagctgcttatcgaaggaactatatcgccacaaccactgtttgatcaatccataacacgaagactgttttattcggagatgaaaaataacaactcaaacagttaactttctacaaccaaataaataattgtgtgtatatgaagttgagcctatggttaagctctactgaattgtgttgaaaacaaacatggatatgttatatgctaatttgttatattctatttattgattcttgaaaaaaaaaaaaaaaaaagnnnnnnnnnnnnnnnnnnnnnnnnnnnnnnnnnnnnnnnnnnnnnnnnnnnnnnnnnnnnnnnnnnnnnng

SEQ ID NO: 117116 - DNA, 2526 bp, Arabidopsis thaliana
cagttatcttcttccttcttctctctgttttttaaatttatttttagagaattttttttgttttgcttccgatttgattatttccgggaacgatgacttctccggggagttcccggtgagatgataagtcagattgcatacttgtctcctccatggctactctcaagggttttggctgcggtggattcgtttggtttctctagaatctaaagaggttatcacaacggctttgcaatttgaaaactttcatgtttggggagatcaaagatggtttcttttttatactttacttgttagagaggatttgaagcagcgaatagctgcaaccggtcctgttatggatactaatacatctggagaagaattattagctaaggcaagaaagccatatacaataacaaagcagcgagagcgatggactgaggatgagcatgagaggtttctagaagccttgaggctttatggaagagcttggcaacgaattgaagaacatattgggacaaagactgctgttcagatcagaagtcatgcacaaaagttcttcacaaagttggagaaagaggctgaagttaaaggcatccctgtttgccaagctttggacatagaaattccgcctcctcgtcctaaacgaaaacccaatactccttatcctcgaaaacctgggaacaacggtacatcttcctctcaagtatcatcagcaaaagatgcaaaacttgtttcatcggcctcttcttcacagttgaatcaggcgttcttggatttggaaaaaatgccgttctctgagaaaacatcaactggaaaagaaaatcaagatgagaattgctcgggtgtttctactgtgaacaagtatcccttaccaacgaaacaggtaagtggcgacattgaaacaagtaagacctcaactgtggacaacgcggttcaagatgttcccaagaagaacaaagacaaagatggtaacgatggtactactgtgcacagcatgcaaaactacccttggcatttccacgcagatattgtgaacgggaatatagcaaaatgccctcaaaatcatccctcaggtatggtatctcaagacttcatgtttcatcctatgagagaagaaactcacgggcacgcaaatcttcaagctacaacagcatctgctactactacagcttctcatcaagcgtttccagcttgtcattcacaggatgattaccgttcgtttctccagatatcatctactttctccaatcttattatgtcaactctcctacagaatcctgcagctcatgctgcagctacattcgctgcttcggtctggccttatgcgagtgtcgggaattctggtgattcatcaaccccaatgagctcttctcctccaagtataactgccattgccgctgctacagtagctgctgcaactgcttggtgggcttctcatggacttcttcctgtatgcgctccagctccaataacatgtgttccattctcaactgttgcagttccaactccagcaatgactgaaatggataccgttgaaaatactcaaccgtttgagaaacaaaacacagctctgcaagatcaaaccttggcttcgaaatctccagcttcatcatctgatgattcagatgagactggagtaaccaagctaaatgccgactcaaaaaccaatgatgataaaattgaggaggttgttgttactgccgctgtgcatgactcaaacactgcccagaagaaaaatcttgtggaccgctcatcgtgtggctcaaatacaccttcagggagtgacgcagaaactgatgcattagataaaatggagaaagataaagaggatgtgaaggagacagatgagaatcagccagatgttattgagttaaataaccgtaagattaaaatgagagacaacaacagcaacaacaatgcaactactgattcgtggaaggaagtctccgaagagggtcgtatagcgtttcaggctctctttgcaagagaaagattgcctcaaagcttttcgcctcctcaagtggcagagaatgtgaatagaaaacaaagtgacacgtcaatgccattggctcctaatttcaaaagccaggattcttgtgctgcagaccaagaaggagtagtaatgatcggtgttggaacatgcaagagtcttaaaacgagacagacaggatttaagccatacaagagatgttcaatggaagtgaaagagagccaagttgggaacataaacaatcaaagtgatgaaaaagtctgcaaaaggcttcgattggaaggagaagcttctacatgacagacttggaggtaaaaaaaaaacatccacatttttatcaatatctttaaatctagtgttagtagtttgcttctccaatctttatgaaagagacttttaattttccttccgaacatttctttggtcatgtcaggttctgtaccatattaccccatgtcttgtctcttgtctctgtttgtgtatgctacttgtggtctatatgtcatctgctactactgttaattaaccattaagcaatggatttgtcttta

SEQ ID NO: 117117 - DNA, 1901 bp, Arabidopsis thaliana
gcaggtaccggtctcggattcccggctcgacccacgcgtccggcggccacgtttctgccggcgacatctctccgtctaactcaaaactctactctccgcttcttatcattcttcaccatttctaacccttcttattctctcttccgtcctctacgccgccgtgttctccctcccttcgatgcttttccggccaattctcgccggagatgcttttgcacagctgtttcggaatctctcggctccggtgatggaaataaagttgagagttacgagaaacgatttgggagtaaagttggagaattcaggaaaaagttgaggatagctgaagtgaaaggaggagcggacgaaggactgagtcgggtcgggcagagccttaacattatgggttgggttcgtacacttcgatctcagagcagtgtcacattcattgagataaatgatggttcatgcttatcgaatttgcaatgtgtgatgacttcggatgcagaagggtatgatcaggtagaatctggttcgatcttgactggagcatcagtatctgtacaaggtactattgtagctagccagggaacgaagcaaaaagtggaacttaaggtggagaaaatcattgtggttggagagtgtgactcttcctatccgatccagaagaaaagggtcagccgggaattcttgagaaccaaggctcatttacgtcctagaaccaacacttttggggcggtggcaagagttaggaatactctggcatatgctacacacaagttctttcaagaaagtggatttgtctgggtggcaagcccaattatcacagcttcggattgtgaaggagcaggagaacagttctgtgtcactacacttattcctagctcccatgagtacaccgatacttccattgatgcgattccgaaaacaaagggagggttgatcgattggtctcaggacttttttgggaaaccagcattcttaaccgtctctgggcaacttaatggagaaacttatgcaaccgctctctcagatgtatacacatttggtcctacatttcgagctgagaattccaacacgtcaaggcacttagccgaattctggatgattgaaccagaacttgcttttgccgacctggatgatgacatggcctgtgccactgcctacctccagtacgtagtaaagtacgttcttgataattgcaaggaagacatggagtttttcgatacatggattgagaaaggaatcattcgccgtttgagtgacgtagctgagaaagagtttctacagctggggtacacagacgccattgaaattcttctgaaagcaaacaaaaaattcgattttccggtgaagtgggggctggatctgcagagtgagcatgaaaggtacataacagaagaggcttttgggggtcgacctgtgataataagagactatccgaaggagatcaaagcattctatatgcgggagaacgatgatgggaagacagtggcagcaatggatatgcttgtgcctcggataggagagctgataggtggaagccaaagagaggaaaggcttgaggtgttggaagcgaggcttgatgagttgaaactcaacaaagagagctactggtggtacctcgacctccgccgctatggttcagttcctcatgcaggatttggactagggtttgagagactggtccaatttgtcaccggaattgataatatcagagacgttattcctttcccgcgcacacctgcctctgctgaattctgatactcgactctctcattgctcaacagttttctcttcatttcctcaaaattcttgtactcttatgtgccattatttatttgacataaacgaaaacctcaaaagaaataattatttgattcatatatagaaatatatttataacaaaaaaaaaaaaaaaa

SEQ ID NO: 117118 - DNA, 1055 bp, Arabidopsis thaliana
aacctgagaagcttgatttctcgaaagatttctttggtcgcgacacttatctgactgcttctgggaggtttcatcttgagagctatgcttctgcacttggaaaagtttatacctttggaccaagattcatagctgataaaattgacaatgcaaggcatttggcagagaagtggaatgtggaaaccgaaatggctttcgcggaattggatgatgctatggattgtgctgatgaatacttcaagttcctctgcaaatatgttctggaaaatcgcgatgaagacatgaaattcatatcaaaacgagttgacaagaccatcaccacacgtctcgaagcaacagcatccagctcccttttgagattctcctataccgaagtgattagtcttctgcaaaaggcaaccactacaaaatttgaaaccaagcctgagtggggagttgctttaacaacagagcatctaagttatctgactgatgagatctacaaaggtcctgtaattgtacatacctacccgaaagcaattaaacagttttacgtaaggttgaatgatgataagaagactgtagcagcgtttgatctggtcgtaccaaaggttggtgttgtgatcaccgggagccaaaacgaagaacggtttgagattctggatgcgaggatcggggaatccggattcacgagggagaagttcgagtggtacttagatttaaggaggcatgggacagtgaaacattcaggaataagcctaagcatggaacaaatgcttctgtatgcgaccgggcttcctgatatcaaagatgccattcctttcccaagaagttggggcaaagcaaacaattaaagcagcctcaagctatttaatttacaaactttaagttacattgttatgtattctctgtaaccatacttgggtgtgaaataataaggaacccctataccaaattgttcataatcctataccaagttttagtatatttgtattgataacatatctactcaaaattgtactcactgcgagtagatttgatgttctatagttgattcaaaaaaaaaaaaaaaaaaa

SEQ ID NO: 117119 - DNA, 3117 bp, Arabidopsis thaliana
  unsure (1)..(3117): unsure at all n locations
caaactccaccaactcagaatattgttggacataataccccttggatgtcgcctctccctttccgtaacgcttggcttgcttctcagcaaaccagtggatttgatgttggttcccgtttccccgtctatccaatcactgaccctgtaaaattgactcccatgaaagaatcatccatgactctttctggcgcaaaacatgttcagagtggaacttctagcaatgtttccaaagtgacaccaacacttgagcctactagtacagttgtagcacctgctcaacattctacaagggtaaaatcaaggaaacggaagaagatgccagtctctgtggagtctggtccaaacattttgaattcgttaaagcagacagaattagctgcctcacctcttgtgccttttacacctactccggctaatctgggttataatgctggcaccctgcccagtgttgtttctatgactgcagtccctatggacctggtatctacgttccccgggaagaaaataaaatcatctttcccatctccaatttttggtggtaaccttgtacgtgaagtaaagcagagatctgtcttgtcagaggatactattgaaaaacttaaggaggctaagatgcatgcagaggatgcatctgctcttgctactgcagctgttagtcatagcgaatatgtatggaagcagatagagcaacaaagtcatgctggcctccagccagaaactcaagacagattaggttcggctgctgttgccatagctggtgcagctgcggtggcaaaagctgcagctgctgccgccaatgttgcagctaatgatgcattgcaggccaagttaatggctgaagaagcatcccttccaaatgcttctgatcagggactcccaaagtcatatgatagcatattacccggtcagggtacccctgcttctatcttgaagggtgaaggtgcagtggtgaactccagttcggttcttattgctgcgagagaggcatctaagaagagggttgaagctgctacagcggccaccaagcgtgctgaaaatatggactccattgtaaaagcagcagaattggcatcagaggctgtttctcaagctggaatacttgtttcaatgggtcatcctccgttgctcaataagctggtggaggcgggtccaagtaattactggaggcaggctcatgaatctcaggaagtacagccctgtaaaacggttgtcttagaaaaagaaactgtgtctactagtgagggaacttttgctggtcccaaaattgtgcagactgagtttggtggctctgtgaatacggcagatggtgtgtccggtccagttcctgccactggaaagttaaagggacaggagggtgataaatatgcagacttggctaaaaacaatgatgtggtttttgaaccagaagttgggtcaaaattttcaattgacgcccaacagactatcaaagcaacaaagaatgaggacatcaaggagggttctaatgtagaggttttcaaagaagaacctggattaagaaccgcatggtactctgccaatgtattgagcttagaggatgataaagcttacgtgttgttcagtgacctatctgtagaacaaggaacagacaagcttaaggagtgggtagccctcaaaggggaaggtgatcaggcccctaaaataagacctgctcgttctgttactgccttgccatatgaaggaaccaggaagagacgtagagctgctcttggggatcatatttggaaaattggggatagggtagactcgtgggtgcatgacagttggttggagggtgttatcacagagaagaacaagaaagatgaaaacacagtgactgtgcattttcctgcggaagaagaaactttgacgatcaaagcttggaatcttcgtccttctcttgtgtggaaagatggaaagtggattgaatgttctagttcaggagaaactatcagctcgtcacatgagggtgatactccaaaggagaagcgtcctagattaggaactcccgctcttgtggctgaagtaaaagacacgagtatgaagattgttgatgatccagacttggggaaaccgcctcagactggtgttcttaacctcggtgtttcagagaatacttttaacattggaaagagtaccagagaggagaacaaacccgatccactccgaatgaagagaaccggtttgcaaaagcaaggatcaaaagtgatttttggtgtccctaaacctggaaagaaaaggaagttcatggacgtgagcaaacactatgtttcagaggcaagcactaaaactcaggaacggaaggaaccagttaagcctgtgagatcaattgtgccccaaaattctggaataggtagctggaaaatgccttctaaaactatctccatagagaaacagacaacaatatctaggcccaagactttcaaacctgcgcccaagcccaaagagaaaccgggtgctacggctaggataattccccgcaaggactcgcgtaatacaacagcatcagatatggaatctgatgagagtgcagaaaacaggggtcctggatctggtgtttcatttaagggaacagtagaagagcaaaccacatcatcctctcatgatactggttcgaagaatagttcctccttgagcactaataaagggagagtggctcctactgcaggaaggttagccaaaatcgaagaggacaaggcgttggctgaaaattcttcaaaaacatcagagggaatggagccacgtagatctatccgcaggatccagccaacttctagactactcgaaggtctgcaaacgtcgatgatgacctcgaagattccttcggtatcacacagcaaaagtcacctaagtcaaagcaaaaagtagcagtagaggcaagtgaaaaggagcagaagaagcaagtgcacataaacgcaagtggaggaaacaaaagcagagcagtatcggctgctattaggttgtttgtaattttagtttcatgcttttgaaaaaaataactctttgttggttgggagagactaaaaaaagtaggggaagagaagaagaaaaatctacatatatatttttggtagactttttggccaaaaatccgttaactnnnnnnnnnnnnnnnnnnnn

SEQ ID NO: 117120 - DNA, 1980 bp, Arabidopsis thaliana
gagagtgagccgtacgatttctctcctcttcttgttttaaaaacctatcaataatattcttcttcttcctcctctcaaatggcggctactagggttcgttgttgtcatagcaatgcagctttcaccagattgccacttacccgccaccgaaactcgccgacgctaccgatttctctaaatcgtgtcgatttccctacgctgaagaaattatcattacccattggagatggctcctccattagaaaggtttcaggttcaggcagcagaaacattgtgcgagctgtgttggaagagaagaagacagaggcgataacggaggtagatgagaagggtatcacgtgcgtgatgaagtttggtggatcttcggtggcgtcagctgagagaatgaaggaagttgctgatttgattttgacttttccggaagaaagtcccgtcattgttctctctgctatggggaaaactaccaacaatctcttgcttgcgggagagaaggcggttagttgtggtgtttctaatgcatctgagattgaggagttgagcattataaaggaattgcatatcaggacggtgaaagagctcaacattgatccctctgttattttgacctatttggaggaactggagcaactcctgaaaggcattgccatgatgaaggaattgacacttcgaaccagagattacttagtctcttttggagagtgtttgtctacaaggatttttgctgcttatcttaatacaatcggtgtcaaggcacgccaatatgatgcatttgaaattggtttcattacaacggatgatttcacaaatggggatatcctggaggcaacttatccagctgttgccaagagattatatgatgattggatgcatgatcctgctgttcctattgtaacaggtttccttgggaagggttggaaaactggtgcggttactaccttgggtaggggtggcagtgatttgacggcaaccacaattggtaaagcgttgggtttgaaagagattcaggtgtggaaagatgtcgatggtgttctaacatgtgaccctactatatataagcgagctacaccagtaccatatctgacatttgacgaagcagccgagctagcttattttggtgcacaggtcttgcacccacagtcaatgagaccagcaagagagggtgagattcctgttagggttaaaagttcttataaccctaaggctcctggaactatcatcactaaaacaagagacatgaccaagagtattctaacgagcattgttctgaaacgtaatgtgaccatgctggatatagcaagcacccgaatgcttggtcaagttggctttcttgcaaaggtattctcgatatttgaggagcttggcatttccgtagatgttgttgccactagtgaagtcagtatatctctgacactggatccttcaaaactttggagcagagaactgattcaacaggagcttgatcatgtagttgaagaactggagaaaattgcagttgtgaatcttctaaaaggaagagcaatcatctctctaattgggaatgttcaacattcctccctgattttagagagggcgtttcatgttctttataccaaaggtgtcaatgtccagatgatatcacaaggagcatccaaggtaaacatttcctttatagtaaacgaagctgaagctgaaggttgtgttcaggctcttcacaaatccttcttcgagagcggtgacctctcagagttattgatacaacccagacttggcaacgggtcacctgtcaggacactgcaagtagaagattgactcgacaagcttattgcttgatctgtgtttttcttgtattaccttctgagtgtagtatgtacgttctacaagcactgcttgttgtcctacgtttaggaacgggaactgctggctacctttcgactgttgtaagaccaattttttgtaccatttgcgtgatcaaagttaaaccagttactagcaaaaaaaaaa

SEQ ID NO: 117121 - DNA, 1836 bp, Arabidopsis thaliana
  unsure (1)..(1836): unsure at all n locations
cccacgcgtccgataatttacttctttctttataactaccatattctcaatcacaacactcgccactgtttcgaatagatggcttctatttcaaccccttttccgatttctctccacccaaaaaccgtacgatcaaagccgttgaaattccgagttttgacccgtccgatcaaagcttccgggtcagaaactcctgatctaaccgtagcgacacgaaccggatccaaagatctcccgatccgaaacataccgggaaactacggtttaccaatcgtaggaccaatcaaagaccgttgggattacttttacgaccaaggagctgaagagttcttcaaatcacgaatccgtaaatacaactccacggtgtacagagtcaacatgccaccgggagcttttatcgccgagaatccacaagtcgtggctttactcgacggtaaaagcttcccggttttattcgatgtcgataaagtcgaaaagaaagatcttttcaccggtacttacatgccgtcaacggaactaaccggaggctaccgtatcctctcgtacctcgatccatcggagcctaaacacgaaaagctcaaaaatctccttttcttcctcctcaagtcatctcgaaaccggatcttccctgagtttcaagctacttactccgagcttttcgattctttggagaaagaggctttccctttaagggaaagcggatttcggcggttccagcgacggaaccgccttttatttcttggctcgagctttctacgggacgaatcccgcagatacaagctcaaagccgacgctccgggtttgatcactaaatgggttttattcaatctccatccattactctctattggtttaccgagagttatagaagaacctctcatccatacatttagtctaccaccggcgttagtcaaatctgattaccagagactctacgagtttcttagaatccgcggtgagattctcgttgaagccgataaattgggtatctcacgagaagaagctactcacaatcttctcttcgccacgagcttcaacacgtggggtgggatgaagattttgtttccgaatatggttaaacgtatcgggccgggcggtcatcaagttcataaccgattagcggaggagattagatctgtgattaaatccaacggcggagaactcacgatgggagcgattgagaaaatggagttaaccaaatcagtggtttacgaatgtctccggtttgaaccaccggttacggctcaatacggtagagcgaagaaggatctggttatcgaaagccacgacgcggcgtttaaagtcaaagccggtgagatgctttacggttatcaaccgttggcgacgagagatccgaagatttttgatcgggcggatgagtttgtgccggagagattcgtcggagaagaaggagagaagcttttgaggcatgtgttgtggtcgaatggaccggagacggagactccgacggtggggaataaacaatgcgccggtaaggattttgttgttttggtggcgaggttgtttgtgattgagattttccggcgatatgattcgtttgatattgaggttggtacgtcgccgttaggaagctccgttaatttctcgtcgttaaggaaagctagcttttaggagccaagggtaaatttgtaattgtatatgttcgcacctgtgtagtccatctgttttcttgttccagtttcgtgaattttgagaaaatgttgataatctgttgctgctctacatgttcgtttttttgtcataatattaaagttcaagctggtaataagtatttacaaatctgtgagataatttcnnnnnnnnnnnnnnnnnnnn

SEQ ID NO: 117122 - DNA, 3292 bp, Arabidopsis thaliana
ccactcactatttggaaagctggaccgcctgcaggtaccggtccggaattcccgggtcgtccacgcgtgcgcccacgcgtccgcttcatcttcttctcccgtaaagctctcgcgtctatggcggtcaaatgtttctctctttatctgattctggcggcgattgtaatcggcggcgtcacctccgagtacatagagtacaacacaaaaccgagaatcgtccctgagaaaatcaatgttcacttagttcctcactcacacgacgatgtaggttggcttaagaccgttgatcagtactacgtaggctccaataactccattaggggagcttgtgttcagaatgtattggattctgtaatcgcttcattgcttgatgatgaaaatagaaagtttatttatgttgaaatggctttctttcaaagatggtggaggcaacaaagcaatgctaagaaagttaaagtcaagaagcttgttgactctggtcaacttgagttcataaatggtggaatgtgtatgcatgatgaggcaactccacattatattgacatgattgatcagactacattaggccatcagtttattaaaactgagtttggtcaggttcctagagttggttggcagattgatccctttggacattctgcagtacaagcttacctgcttggtgctgagtttggctttgattcgctgtttttcgctagaattgactaccaagatcgtgcaaagaggttaagagagaagacacttgaggttatttggcaaggttccaagtctcttggctcttcttcacagatatttactggtgtattcccaagacattatgaccctcctgaagggttcacgtttgaaataaatgatgtatcagctcctatccaggatgatcctctcctttttgactacaatgttcaagaaagagtcaacgactttgtagcagcagccctcgcacaggttaatgtgaccaggacaaatcatataatgtggttaatgggaactgacttccgttaccagtatgcatattcgtggttcagacagatagacaagtttattcattatgttaacaaggatgggcgtctcaatgttctgtattcgacaccatctatctacaccgatgcaaaatatgctgcaaacgagtcctggcccctaaagactgatgatttcttcccgtatgcggacaaacctaatgcatactggacagggtactttacgagcaggccagcctttaagaaatacgtgagggatttaagtggttactatctggcagctcgacaattggaattcttgagaggaagggatagttcaggaccaacaactgatatgctagccgatgctttggcaattgctcaacaccatgatgcagttagtggtacacaaagacaacatgtggctgcagattatgctcttagactctcaatgggctacctgcaggccgagaaattggttgcctcttccctttcctttctatcagcagcaaaatcaagtactgaaaagaagaatcctggcacaaaatttcagcagtgtcccctgcttaatattagttactgtcctgcatctgaagctcgtctgttgagcgggaaaagcctggtggttgttgtttacaattctctaggatggaaacgagaagaagttgtccgagttcctgtgtcgtctgaaaatgttattgtgaaagatgcatctgggaaagaagtcgtgtttcagcttctacctctttcagaaatcgctttgagaattagaaatgagtatgtcaaagcgtatctgggaagatcaccacgggatactgcaaaacacgtgcttgcatttacagcttcagtaccacctcttgggttcagctcgtatgtaatctcagacactggacgaacagcgcgtggactatctgcatcatatgttacttctggaagcatgaatcaaaatgtagaagttggccagggaaatctaaagttacgctattcagaagaaggagttaaaataactcgtcacttaagtaccaaaaatcaggttactgcagaacagtcatatgcttattatattggaagcaatggaactgacaaggatcctcaggcttctggagcttacgtttttcgaccagatggtgtgcttccaattaaatctaaagaagaggctcaattgactattgttcaaggacctttgttcgatgaagtgcaccaggagcttaactcctggatatcacagattaccagagtgtacaagggaaaaaaccatgctgaaattgagttcacaattgggcctataccagctgatgatggtattagcaaagagattatcactaaacttacaaccaccatgaagacaaatggaacattttacacagactcgaatggccgtgacttcatcaagcggattcgggacttcagaacagattgggacttgcaagtgtaccaaccggttgctgggaactattatcctctaaatctcgggatatacatgcaagataaaacctcagagctatccgtgttggtggatcgagctgtaggtggatccagcttagagaacggccagatcgagttgatgcttcatcggagaatgcagcatgatgacattagaggtgttggtgagattcttaatgaaacagtctgtctccctgaaggatgcaaaggattaacgatacaagggaagttttatgtacagatagataaacctggagatggggcaaaatggcgtcgaacatttggtcaagaaatttattctccactacttatagcattcacagaacaggaaggagatagttggattaattcacataagacgacattctcagcgtttgaaccgtcatattcattaccaaaaaacgtcgcattactcaccctccaggagttggaaaatggggaagttcttctaaggcttgctcacttattcgaggttggggaggatagtgagtactcagttatggcaaaagtagagctcaagaaactattccacaacaaaaagataagggaagtaaaggagacaagtctttccgggaaccaagagaaggcggagatggagaagagacggctaatctggaaagtagaaggctcggccggggaggaagtgaagagaggagaggcggtggacgcagagaagctagtggttgagcttgttccgatggaaattcgaaccttgttgatcaagtttgatgatcaaattgaaatggttggtgataaagagcagcaacataggttatgaaataatacacgttgttgttgtctttttaagtttaatcggagaagagaaaaaagtttgaatttagtgtctgatgcgagtttaaaattcgggtgattgcaacagtcacgagtgcgat

SEQ ID NO: 117123 - DNA, 491 bp, Arabidopsis thaliana
  unsure (1)..(491): unsure at all n locations
attatccatagctcatccacgtttgccctcnntcntccaaacctccntctcccctccngattgaaatgggaatggcattcttcttaaggcttctcccttttccgaggttgggaggatagtgagtactcagttttgccaaaagtagagctcaggaacctttcccacaccaaaaagataagggaagtaaaggagacaagtctttccgggacccaagagaaggcggagatggagaagagacggctaatctggaaagtagaaggctcggccggggaggaagtgaagagaggagaggcggtggacgcagagaagctagtggttgagcttgttccgatggaaattcgaaccttgttgatcaagtttgatgatcaaattgaaatggttggtgataaagagcagcaacataggttatgaaataatacacgttgttgttgtctttttaagtttaatcggagaagagaaaaaagtttgaatttagtgtctgatgcgagttt

SEQ ID NO: 117124 - DNA, 1765 bp, Arabidopsis thaliana
  unsure (1)..(1765): unsure at all n locations
gttcaacgagtgcaagacaagagattcaaatacccttcggcatccggagtaaaactccctagagatgaagaagatatcgccttcatgagcgttcttgaactcggagaacttataaagacgagacaaattacttccaaagaactcgttcggatttatcttaagcagttaaaacggtacaatcatgttcttgaagcggtagttacttatactgaagaactggcatacaaacaagccaaagaagctgatgatttactctctcaaggaacttatcttggacctcttcacgggattccatatggtttaaaggatatagttgcagttcccggatataaaacaacttggggttcaacttctttcaaagaccaatttcttgacattgaagcatgggtttacaaaagattaaaagcttcaggtgcagttttagtagcaaagcttgttacgggttctatggcttatgatgatatctggttcgggggacggactaggaatccatggaatatcgaggaattctctaccgggtcatcagctggacccgctgcatccacatcggctggtatggttccttttgctataggctcggagacagcaggctcaatgacataccctgcagcgcggtgtggcataacagcattgcgtccgacatttgggagcgttggtagaaccggagtgatgagcatatccgagagcctggataagctgggacctttctgtagaacagcagcggattgcgctgtaattcttgacgctatcaaaggaaaagatcccgatgatctctcatctagagagatcgcgtttgaagatcccttctccgttgatatcacaaaactcacagttgggtatacaaaagatgctgatatgaaggtggtggaagttcttggttccaaaggtgtcaatatggttccttttgagctaaattatactgtggaatcggttcaagggatattgaacttcacaatggatgtagatatgttggctcattttgatgaatggcaaagaaccggtcaagaagatctctatgaagctcaagatcaatggccggttgagttacgccgtgctcgtgtagttacagcagtagattacattcaggctcagagagctcgtggtaagttgattcgggaagtggagaagagctttacagtcgatgcgtttattggaaatgtgaccgattgggagaaagtctgtatgggaaacctagtcggtttgccggttctagtgattccgaccggtttcaagaacataacggatccaccaaccaacagttgccggagacggacaacgatcaatgccggaatttatgcccctccagaacgtgatcacattgctttggcattgggtatggcgtaccaatcggttaccgatgcacataggaagcgaccacctattgatgatcttggaccggatgactcgataccaaatcctcctcgggctttaatccctccccgtaggttacacatttgagctttcttcaatctttttttttacattgggaaatgtagtcaaatcaatgttgtgtgttttgtttaaaaagaagttatgttataagtagcatattgttctgtctcaatgagtgatcaagtcaatgttatgaaatgaacatatggttgggaccgtttttgacgatcatgctttgtagtgcgcgactctggatataaattaatttattgggattttgtctaaaaaaaaaaaaaaaagnnnnnnnnnnnnnnnnnnnnnnnnnnnnnnnnnnnnnnnnnnnnnnnnnnnnnnnnnnnnnnnnnnnnnnnnn

SEQ ID NO: 117125 - DNA, 1845 bp, Arabidopsis thaliana
  unsure (1)..(1845): unsure at all n locations
nnnnnnnnnnnnnnnnnnnnnnnnnnnnnnnnnnnnnnnnnnnnnnnncacgcgtccgccattcttctctaaactctcaacatgtcttgctcggccaccgatctcgctgtcctgttgggtcctaatgccacggcggcggccaactacatctgtggccagttaggcgacgtcaacaacaaatttatcgacaccgctttcgctatagacaacacttaccttctcttctccgcctaccttgtcttctctatgcagcttggcttcgctatgctctgtgccggttccgtgagagccaagaatactatgaacatcatgcttaccaacgtccttgacgctgcagccggtggtctcttctattatctgtttggctacgcctttgcctttggatctccgtccaatggtttcatcggtaaacactactttggtctcaaagacatccccacggcctctgctgactactccaactttctctaccaatgggcctttgcaatcgctgcggctggaatcacaagtggctcgatcgctgaacggacacagttcgtggcttacctaatctattcctctttcttaaccgggtttgtttacccggtcgtctctcactggttctggtcagttgatggatgggccagcccgttccgtaccgatggagatttgcttttcagcaccggagcgatagatttcgctgggtccggtgttgttcatatggtcggaggtatcgctggactctggggtgcgctcatcgaaggtccacgacttggccggttcgataacggaggccgtgccatcgctcttcgtggccactcggcgtcacttgttgtccttggaacattcctcctctggtttggatggtacggatttaaccccggttccttcaacaagatcctagtcacgtacgagacaggcacatacaacggccagtggagcgcggtcggacggacagctgtcacaacaacgttagctggctgcaccgcggcgctgacaaccctatttgggaaacgtctactctcgggacattggaacgtcactgatgtatgcaacggcctcctcggagggtttgcagccataactggtggctgctctgtcgttgagccatgggctgcgatcatctgcgggttcgtggcggccctagtcctcctcggatgcaacaagctcgctgagaagctcaaatacgacgaccctcttgaggcagcacaactacacggtggttgcggtgcgtggggactaatattcacggctctcttcgctcaagaaaagtacttgaaccagatttacggcaacaaacccggaaggccacacggtttgtttatgggcggtggaggaaaactacttggagctcagctgattcagatcattgtgatcacgggttgggtaagtgcgaccatggggacacttttcttcatcctcaagaaaatgaaattgttgcggatatcgtccgaggatgagatggccggtatggatatgaccaggcacggtggttttgcttatatgtactttgatgatgatgagtctcacaaagccattcagcttaggagagttgagccacgatctccttctccttctggtgctaatactacacctactccggtttgatttggatttttacttttattctctattttctagagtattattttaaatgatgttttgtgatacttaaatattgttttggatatttttttggcatttcagtaatgttttagatgtacagtttcatggggttgtgatgataatatctatgtggtcatttgtgttctctttggagttaaaaaaaagggcgaccgctctagaggatccaagcttacgtacgcgtgcaggcgacgtcataactcttctantagttgcacctaa

SEQ ID NO: 117126 - DNA, 1427 bp, Arabidopsis thaliana
  unsure (1)..(1427): unsure at all n locations
actgcgcgnnnnnnnnnnnnnnnnnnnnnnnnnnnnnnnnnnnnnnnnnnnnnnnnnnnnnnnnnnnnnnnnnnnnnnnnccacgcgtccgcccacgcgtccgtagctgcgagaagacgacagaaggggacatacacaaaacactaaaagtagaagaaaaatggcgactcttaaggtttctgattctgttcctgctccttctgatgatgctgagcaattgagaaccgcttttgaaggatggggtacgaacgaggacttgatcatatcaatcttggctcacagaagtgctgaacagaggaaagtcatcaggcaagcataccacgaaacctacggcgaagaccttctcaagactcttgacaaggagctctctaacgatttcgagagagctatcttgttgtggactcttgaacccggtgagcgtgatgctttattggctaatgaagctacaaaaagatggacttcaagcaaccaagttcttatggaagttgcttgcacaaggacatcaacgcagctgcttcacgctaggcaagcttaccatgctcgctacaagaagtctcttgaagaggacgttgctcaccacactaccggtgacttcagaaagcttttggtttctcttgttacctcatacaggtacgaaggagatgaagtgaacatgacattggctaagcaagaagctaagctggtccatgagaaaatcaaggacaagcactacaatgatgaggatgttattagaatcttgtccacaagaagcaaagctcagatcaatgctacttttaaccgttaccaagatgatcatggcgaggaaattctcaagagtcttgaggaaggagatgatgatgacaagttccttgcacttttgaggtcaaccattcagtgcttgacaagaccagagctttactttgtcgatgttcttcgttcagcaatcaacaaaactggaactgatgaaggagcactcactagaattgtgaccacaagagctgagattgacttgaaggtcattggagaggagtaccagcgcaggaacagcattcctttggagaaagctattaccaaagacactcgtggagattacgagaagatgctcgtcgcacttctcggtgaagatgatgcttaatcaatcaatcctccacagagaaacataagctgctctacagcttctgttatctcttatctccctctctctctctttgatgagtttcaaatcgtttgattttgtttctacaaaaaccttgtttgtttctgttgtgtgttttgagttcctaaataatgcaaaagagagagacagagagaaccagtgtggtctcttaagttatatatatatgaagagcattggcctnnnnnnnnnnnnnnnnnnnnnnnnnnnnnnnnnnnnnnnnnnnnnnnnnnnnnnnnnnnnnnnnnnnnnnnnnnnnnnnnnnnnnnnnnnn

SEQ ID NO: 117127 - DNA, 812 bp, Arabidopsis thaliana
  unsure (1)..(812): unsure at all n locations
acgcctgcaggtaccggtccggaattcccgggtcgacccacgcgtccgcactaccggtgacttcagaaagcttttggtttctcttgttacctcatacaggtacgaaggagatgaagtgaacatgacattggctaagcaagaagctaagctggtccatgagaaaatcaaggacaagcactacaatgatgaggatgttattagaatcttgtccacaagaagcaaagctcagatcaatgctacttttaaccgttaccaagatgatcatggcgaggaaattctcaagagtcttgaggaaggagatgatgatgacaagttccttgcacttttgaggtcaaccattcagtgcttgacaagaccagagctttactttgtcgatgttcttcgttcagcaatcaacaaaactggaactgatgaaggagcactcactagaattgtgaccacaagagctgagattgacttgaaggtcatgggagaggagtaccagcgcaggaacagcattcctttggagaaagctattaccaaagacactcgtggagattacgagaagatgctcgtcgcacttctcggtgaagatgatgcctaatcaatcaatcctccacagagaaaacataagctgctctacagcttctgttatctcttatctccctctctctctctttgatgagtttcaaaatcgtttgattttgtttctacaaaaaccttgtttggtttctgttngtggngttttgagttccnaaantaatgcaaaaanngggggccagagngganccnattttnggcccccttaagggttttannttatttgaangggg

SEQ ID NO: 117128 - DNA, 655 bp, Arabidopsis thaliana
  unsure (1)..(655): unsure at all n locations
cccacgcgtccgcggactcgtgtgcggacgcgtgggttataagtcattcttgtgtcggcttcgactctcaacatacacaacacagtagatgtacaataaaaatggcgactcttaaggtttctgattctgttcctgctccttctgatgatgctgagcaattgagaaccgcttttgaaggatggggtacgaacgaggacttgatcatatcaatcttggctcacagaagtgctgaacagaggaaagtcatcaggcaagcataccacgaaacctacggcgaagaccttctcaagactcttgacaaggagctctctaacgatttcgagagagctatcttgttgtggactcttgaacccggtgagcgtgatgctttattggctaatgaagctacaaaaagatggacttcaagcaaccaagttcttatggaagttgcttgcacaaaggccaatcaacgcagcttgctttcaccgctaggccaagctttacccatggctccgctcacaaagaaggctcctttaaaggggcccggttgttcaaccacaaattaccccgtgactttaggaagcttttggggctttccttccnatacaggtcggagggggctnagtnacatgcatttgctaanaagnantaagtggncntggaaataaggcaantt

SEQ ID NO: 117129 - DNA, 730 bp, Arabidopsis thaliana
  unsure (1)..(730): unsure at all n locations
gaagaaaaatgtctactcttaatgttttttatnctgntcctgcccccacggaaggtgcntaactaaggtgaacggccaacaaannannnnncacnaaccacgactttatcatatcaatcttgactcacaaaagtgctgaacaaaataaatttatcatacaagcataccaaaaaacctacggcgaacaccttctcaagactcttgacaaggagctctctaacgacttcgagagagctatcttgttgtggactcttcaacccgctcaccgtgatgctttattggctaatgaatgctacaaaaagatcggacttcaagcaaccaagtgcttatggaagttgcttgcacaaggacatcaacgcagctgcttcacgctaggcaagcttaccatgctcgctacaagaagtctcttgaagaggacgttgctcaccacactaccggtgacttcagaaagcttttggtttctcttgttacctcatacaggtacganggagatgaagtgaacatgacattggcttaagcaagaagcttaagctggtccangaggaaatcaaagggcaaagcncttccaatgattnaggntgttattnaggatcttttnccccaaggagggaaagcncagtccantgnttcctttttanccgtncccaggttgntcatggnggggnaatttnntaagggcntttngggagggggtnttttttncaaagtcccttcctttttnggggcancc

SEQ ID NO: 117130 - DNA, 844 bp, Arabidopsis thaliana
  unsure (1)..(844): unsure at all n locations
cttgattgagttgtgttttgattctcactgtcacagatctgtcttcttagtctagatctataatgtagttacgtgtaatacaacactaagatcttaagatttatattttgtgaatctgtttgaccggttctgttattatggatctgaagtgtgtgtgacttggatctgaagtatgtgactttgatggttatgtaaagtgaatctgattcgtgtttttcgcaggatggggtacgaacgaggacttgatcatatcaatcttggctcacagaagtgctgaacagaggaaagtcatcaggcgagcataccacgaaacctacggcgaagaccttctcaagactcttgacaaggagctctctaacgatttcgagagagctatcttgttgtggactcttgaacccggtgagcgtgatgctttattggctaatgaagctacaaaaagatggacttcaagcaaccaagttcttatggaagttgcttgcacaaggacatcaacgcagctgcttcacgctaggcaagcttaccatgctcgctacaagaagtctcttgaagaggacgttgctcaccacactaccggtgacttcagaaagcttttggtttctcttgttacctcatacaggtacgaaggngatgaagtgaacatgncattggctaagcaagaagctaagctggtccntgngnaatnaagggcaagcncttcaatgntgnggntgtttttagattcttgtccccagngnaaagnnagtcaatgttctttttaccgtaccaggtgtcatggngggaatttttagngcttttgnaggggtttttttcaatncttactttnggaccttngggttaaagcatc

SEQ ID NO: 117131 - DNA, 661 bp, Arabidopsis thaliana
  unsure (1)..(661): unsure at all n locations
gacgtggaacgcacgcgtacgtaagctcggaattcggctcgagctagcaacttccattaaaacctggttgcacaaggacatcaacgcagctgctttacgctaggcaagcttaccatgctcgctacaagaagtctctttgaagaggacgttgctcaccacactaccggtgacttcagaaagcttttggtttctcttgttacctcattcaggtacgaaggagatgaagtgaacatgaccttggctaagcaagaagctaagctggtccatgagaaaatcaaggacaagcactacaatgatgaggatgttattagaatcttgtccacaagaagcaaagctcagatcaatgctacttttaaccgttaccaagatgatcatggcgaggaaattctcaagagtcttgaggaaggagatgatgatggaccaagttccttgcacttttgaggtcaaccattcagtgcttgacaagaccagagcttttactttgtcgatggtccttcgttcagcaatcaacaaaaccggggaccggatgaagggggcactcacttaggatttgtgcccccaagggcctgggtttggcctttaaggggcccttggggggggggttcccccccggggggaccggattccctttgggaaaacctttttcccaaannccccgggg

SEQ ID NO: 117132 - DNA, 1098 bp, Arabidopsis thaliana
aaaaaaaagaagcttctcctcttcctctgccttcttctttccatttattgcaaaccctgatcaattggttttggtgttagtcttttggggagagagatggggagagggaagatagttatacgaaggatcgataactctacaagtagacaagtgactttctccaagagaaggagtggtttgcttaagaaggctaaagagttatcgatcctttgtgatgcagaagttggtgttatcatattctctagcaccggaaagctctacgactacgcaagcaattcaagtatgaaaacaatcattgagcggtacaacagagtaaaagaggagcagcatcaacttctgaatcatgcctcagagataaagttttggcaaagagaggttgcaagtttgcagcagcagctccaacatctacaagaatgccacaggaaactagtgggagaggaactttctggaatgaatgctaacgacctacaaaatcttgaagaccagctagtaacaagtctaaaaggtgttcgtctcaaaaaggatcaacttatgacaaatgaaatcagagaacttaatcgtaagggacaaatcatccaaaaagagaatcacgagctacaaaatattgtagatataatgcgtaaggaaaatattaaattgcaaaagaaggttcatggaagaacaaatgtgattgaaggcaattcaagtgtagatccaataagcaatggaaccacaacatatgcaccaccgcaacttcaactcatacaactacaaccagctcctagagaaaaatcaatcagactagggctacaactttcctagcaaaacatgtgggacatcgaacaatatacgaaaagagtttgtatgtcatcttcagtaacaaccaagctggatcatttcattcttggttatgtaattctgtttactactttggagtttaatatgttatatgacaagtttctctttgtcaagttacttgtgtatgtacatcataaaataatgatgtgatgtgagtgccgaacatactagacatcattttaccgtgtgtttttttcgggtacattaaatgtacaaaatccagtctaattggcatttttatacaaaaaaaaaaaaaaaaaa

SEQ ID NO: 117133 - DNA, 418 bp, Arabidopsis thaliana
catatatacatcgaaaacaactaagtataaacaatagtcatggctaagtctgctaccatcgttactcttttcttcgctgctcttgttttctttgctgctcttgaagcaccgatggtggtggaagcacagaagttgtgcgagaggccaagtgggacatggtccggagtttgcggaaacagtaacgcgtgcaagaatcagtgcattaaccttgagaaagcacgacatggatcttgcaactatgtcttcccagctcacaaatgtatctgctacttcccatgttaatctaccaagagctcttaatgcttaattataaagtgtgtatttctattaaataagtatgtgtcactctatgagaggtcttatgacatgtaccagatatgttatgttgctttgttttaataaggtaaacttttacggt

SEQ ID NO: 117134 - DNA, 1306 bp, Arabidopsis thaliana
atacgactcacgttagggaaagcacgtacgcctgcaggtaccggtccggaattcccgggtcgacccacgcgtccggaaaaactttcctaattggttcataccaaagtctgagctcttctttatatctctcttgtagtttcttattgggggtctttgttttgtttggttcttttagagtaagaagtttcttaaaaaaggatcaaaaatgggaaggggtagggttcaattgaagaggatagagaacaagatcaatagacaagtgacattctcgaaaagaagagctggtcttttgaagaaagctcatgagatctctgttctctgtgatgctgaagttgctcttgttgtcttctcccataaggggaaactcttcgaatactccactgattcttgtatggagaagatacttgaacgctatgagaggtactcttacgccgaaagacagcttattgcacctgagtccgacgtcaatacaaactggtcgatggagtataacaggcttaaggctaagattgagcttttggagagaaaccagaggcattatcttggggaagacttgcaagcaatgagccctaaagagcttcagaatctggagcagcagcttgacactgctcttaagcacatccgcactagaaaaaaccaacttatgtacgagtccatcaatgagctccaaaaaaaggagaaggccatacaggagcaaaacagcatgctttctaaacagatcaaggagagggaaaaaattcttagggctcaacaggagcagtgggatcagcagaaccaaggccacaatatgcctccccctctgccaccgcagcagcaccaaatccagcatccttacatgctctctcatcagccatctccttttctcaacatgggtggtctgtatcaagaagatgatccaatggcaatgaggaggaatgatctcgaactgactcttgaacccgtttacaactgcaaccttggctgcttcgccgcatgaagcatttccatatatatatttgtaatcgtcaacaataaaaacagtttgccacatacatataaatagtggctaggctcttttcatccaattaatatattttggcaaatgttcgatgttcttatatcatcatatataaattagcaggctcctttctttttttgtaatttgataagtttatttgcttcaatatggagcaaaattgtaatatatttgaaggtcagagagaatgaacgtgaacttaataaaaaaaaaaaaaaagggcgaccgctctagaggatccaagcttacgtacgcgtgcgttcgacgtcataatcttctatagtgtaccta

SEQ ID NO: 117135 - DNA, 1256 bp, Arabidopsis thaliana
  unsure (1)..(1256): unsure at all n locations
cgcgcacnnnnnnnnnnnnnnnnnnnnnnnnnnnnggagataactgacaccgcccattcaaatcccgtttctgtgagggtggttttatctctttggcccaaatttcggtgtaaccaaaaaaaatcttcacacacatccttgaccattttcttgttcatcgctctctttcttcttcacaaatcctaaacgagtaggagctatggctgcaccgattgttgatgcggagtacttgaaagagatcactaaggctcgccgtgagctccgttctctcatcgcgaacaagaactgtgctcctatcatgctccgattggcatggcacgatgctggaacctatgatgctcaatcgaagaccggtggacctaatggctctatcaggaacgaagaagagcacactcatggtgccaacagtggtttgaagatcgctctcgatctctgtgagggcgtgaaagctaagcatcccaaaatcacatacgcagacctgtatcagcttgctggtgtggtagcagttgaggttactggtggacctgacatcgtgttcgttcccgggagaaaggattcaaatgtctgccccaaggaaggaagacttcctgatgccaaacaaggtttccaacatctcagagatgtcttctaccgcatgggactatctgataaggatattgtggcactctcagggggtcatactctgggaagggctcacccggagaggtcaggctttgatggaccatggacccaagagccgctgaagtttgacaactcctacttcgtggaactgctgaaaggagaatcagagggcttgttgaaacttccaactgacaagaccttattggaagacccggagttccgtcgtcttgttgagctttatgcaaaggatgaagatgcattcttcagagactacgcggaatcgcacaagaaactctctgagcttggtttcaacccaaactcctcagcaggcaaagcagttgcagacagcacgattctggcacagagtgcgttcggggttgcagttgctgctgcggttgtggcatttggttacttttacgagatccggaagaggatgaagtaaacgaaataggaagtaaaacacgaagcaacgatgctcttatttgggtattaaagaaactattaatcgtctatcgaatctattttgctgctacaagattctaaactctttgaatccacgattctactgtttagtagtaaaaaagttaaaaagtcaatattttgggtccgtgattcctttttgcgataaannnnnn

SEQ ID NO: 117136 - DNA, 956 bp, Arabidopsis thaliana
  unsure (1)..(956): unsure at all n locations
acgcgtacgcccaagcgtccgtgtgtttgcaaatctgacgccgagtattttgctaaagcagcagccagtcgggacagtgaaatggcgactgaagatgtgcaagatcccagaatcgctaagattgcctcttccattagagtcatccccgacttccctaaaccaggaatcatgtttcaggacataacgacgcttcttctcgacactgaggcctttaaggatactattgctttgtttgttgatagatacaaagataaaggcatatctgttgttgcaggtgttgaagctagaggtttcatttttggccctcctattgcgttggctattggtgccaaatttgttcccatgaggaagcccaagaagctacctgggaaggttatttcggaggagtattcgttggagtatggaacagatacgattgagatgcacgtaggtgcagtagagcctggtgagcgtgctattattattgatgacctcattgccacgggtgggactctcgctgctgcaatccgactacttgaacgagtaggagtgaagattgttgaatgtgcttgcgtaattgagttaccagagcttaagggaaaggagaaactaggagagacgtcgctatttgttcttgtaaagtcggctgcttaacaagaaactggaagagaaggttattggatcgagtgttgatgctatttttcatgtatggtgagacattttgcgtgggatttgatccttgttgtttcaacttatcataattggttcagactagaaaatggcatttgaatgtcaggattcgattgcagtttcctattgttccacttaaaatccccgattaataaggtgttatgggttttatttatagaatcaagttgtaatagtagactccaaaagagaatagagtcttggtaacgcaattcttctaaaaaaaaaaaaaaaaaagggcggccgctnnnnnnnnnnnnnnnnnncaa

SEQ ID NO: 117137 - DNA, 520 bp, Arabidopsis thaliana
  unsure (1)..(520): unsure at all n locations
nnnnnnnnnnnnnnnnnnnnnnnnnnnnnnnnnnnnnnnnnnnnnnnnnnnnnnnnnnnnnnnnnnnnnnnnnnnnnnnnnnnccacgcgtccgtcatcgtctctgtcttgctcgtgctgttccttgcaaccgtcttctcaacaaccaccaccgtgctcctccttcgatccgcctctcaaaccaccgttcaaccacctcactccgcctcttctcctccgccgcagccagtcgggacagtgaaatggcgactgaagatgtgcaagatcccagaatcgctaagattgcctcttccattagagtcatccccgacttccctaaaccaggaatcatgtttcaggacataacgacgcttcttctcgacactgaggcctttaaggatactattgctttgtttgttgatagatacaaagataaaggcatatctgttgttgcaggtgttgaagctagaggtttcatttttggccctcctattgcgttggctattggggccaaatttgttccatggagaagccaagaagc

SEQ ID NO: 117138 - DNA, 728 bp, Arabidopsis thaliana
gcacaagcacgagtgagtgagagatgtttgccgtggagaatgggttgcagggagacccgagattaaaggccatctccgacgccattcgtgtcattcctcacttccccaagactgggatcatgtttcaggacataacaacgttgttgctggatccagttgcctttaaacatgtcgtcgacatcttcgttgatcgttacaagcacatgaacatctctctcgtcgccggagtagaggcgagaggattcatatttggacctcccatcgcgttagccataggtgccaagttcgttccactacgcaaaccgggaaaactacccgggagagtgataagcgaagagtacgaacttgagtatggaagagattgtctagagatgagtgtagaagccgtcaaatcggaggaacgagctctcatcatcgacgatttagttgccactggtgggacactctctgcttccattaacctcttggagcgtgccggggccgaagttgtagagtgtgcatgcgttgttggtttgcctaagtttaaggggcagtgtaagctgaagggaaagcctttgtacgttctggtggaaccaaaccagtttgatgaattaaccttataaaagccttttctattcaacgattatgacaaataatgtaatcggtttaatcgattttgtaactaaggatttgtttgttttctattggctccatgtggaatgattcatgctagttactatgaaaaaaaa

SEQ ID NO: 117139 - DNA, 2659 bp, Arabidopsis thaliana
  unsure (1)..(2659): unsure at all n locations
gagagacacaacacaccatctcaatcatgacttcttcgtttctctcctccactgctttcttcctcctcctttgtctaggattctgccacgtgtcctcttcctcctccgaccaaggaacttacatcgttcacatggctaaatctcagatgccgtcgtctttcgacctccactctaactggtacgattcatctctcagatctatctccgactcagccgaattgctctacacttacgagaacgcgattcatggattctcaacacggctaactcaagaagaagccgactcgctcatgactcaacctggtgttatctccgttttaccggagcaccgttacgagctacacaccactcgtactcctctcttcctcggtctcgacgaacacaccgcagatctgttccctgaagccggctcttacagcgacgtcgtcgtcggagttctcgataccggagtttggcccgagagtaaaagctactccgacgaaggattcggtcctattccttcctcctggaaaggcggatgcgaggccggaaccaatttcaccgcttctctctgtaaccgtaaactaatcggagcaagattcttcgctcgtggttacgaatcaacgatgggaccaatcgatgaatctaaagaatcaagatctcctagagacgacgacggtcacggaactcacacctcatcgaccgccgctggatccgtcgttgaaggagctagcttattaggctacgcttcaggaacagctcgtggtatggctccacgcgctcgtgtcgctgtttacaaagtctgttggctcggtggttgtttcagctcagatattttagctgcaatcgataaagccatcgccgataacgtcaatgtcctgtcgatgtcactcggcggtggaatgtcggattattatagagacggtgttgcgatcggagcattcgccgccatggaaagagggattttagtatcttgctcagctggtaatgctggtccgagtagttctagtttatcaaacgtagctccatggatcacaactgttggtgctggtactttagatcgtgattttccggcgcttgcgattctcggtaacggcaagaatttcaccggagtttctttgtttaaaggagaagctttaccggataaattgttgccgtttatttacgctgggaatgctagtaatgctactaatggtaatctctgtatgaccggaactttgatcccggagaaagtaaaggggaagattgtgatgtgtgatagaggaattaatgctagagttcagaaaggtgatgtggttaaagcagcaggtggagttggaatgattctggctaacactgcggcgaatggtgaagagcttgttgcggatgctcatttgttaccggcgaccaccgttggtgaaaaagccggtgatataatccggcattacgtgactactgatcctaatcccaccgcttcgatttcaatcttaggaacagtcgtcggtgttaaaccatctccggttgtcgcagcgtttagctcacgtggaccgaattcgattacaccgaatattcttaaaccggatctgatcgctcctggagtaaacatcctcgccgcgtggaccggtgctgctggaccaaccggactcgcttccgattctcgccgcgtggagttcaatatcatctctgggacgtcgatgtcttgccctcacgttagtggtttagcggcgcttctcaagtcggtgcatcctgaatggagcccggcggcgattagatcggcgcttatgaccaccgcttacaaaacctacaaagacggtaaaccgttactcgacatcgcgacagggaagccttcgacgccgttcgatcacggtgcaggacacgtgtcaccaacaactgccactaatccaggactcatctacgatctaacgacggaggattacttaggcttcctctgcgcattgaattacacatcgccgcaaattcgaagtgtctcgagacgtaattacacttgcgatccgagtaaatcgtactcggtcgctgatttgaactacccgtcgttcgccgttaacgttgatggagccggtgcgtataagtacacgcgcacggtgacgagcgtgggaggagctgggacttactcggttaaagtaacttcggagacgacaggagtcaagatttcggttgaaccggcggttttgaatttcaaggaagctaacgagaaaaaatcgtatacggtgacgtttactgtagactcgtcgaagccgtctggatctaacagctttgggagtattgaatggtcggatgggaaacacgtggtgggaagtcccgtggcgattagctggacatagtcgtaaattatgagaaatgaaaggggttttatggaaaagaaaaggtgtttacagatttattgtaatgccgtttttagatacgaagaaacctctgtttagcaaacaacgacatgcagtctgttaagacttgcctagtttgtttttgggatgtcttgctgtttttaattttaaaaagaaatatattctccggctacaacagtagctgggtctctctaggtgttttatcaaaaaaaaaaaaaaaaagaatgaagagaaaatgtttgaaaaaaaaaaaaaaagnnnnnnnnnnnnnnnnnnnnnnnnnnnnnnnnntagaatcgnnnnnnnnnnnnnnnnnnnnnngnnnnnntcnnnnnnnt

SEQ ID NO: 117140 - DNA, 513 bp, Arabidopsis thaliana
ttgaatttatgtgacactctacaagagctttgccgcccctgcacgcgtacgtaagctcggaattcggctcgagctgggtcgattcatctctcacatctatctccgactcagccgaattgctctacacttacgagaacgcgattcatggattctcaacacggctaactcaagaagaagccgactcgctcatgactcaacctggtgttatctccgttttaccggagcaccgttacgagctacacaccactcgtactcctctcttcctcggtctcgacgaacacaccgcagatctgttccctgaagccggctcttacagcgacgtcgtcgtcggagttctcgataccggagtttggcccgagagtaaaagctactccgacgaaggattcggtcctattccttcctcctggaaaggcggatgcgaggccggaaccaatttcaccgcttctctctgttaccgtaaactaatcggagcaagattcttcgctcgttgttacgaatcaacgatgggaccaa

SEQ ID NO: 117141 - DNA, 1229 bp, Arabidopsis thaliana
  unsure (1)..(1229): unsure at all n locations
tgatttgccnnnnnnnnnnnnnnnnnnnnnnnnnnnnnnnnnnnnnnnnnnnnnnnngaccggtccggaatttccgtgccaagcgaccgctcgtgtcttactcgtgccagccactcgcatttctccagattttattatccttcctcgaaacaagagcttagctaagatgacgaagaactacccaaccgtgagcgaagattacaagaaggctgttgagaagtgcaggaggaagctcagaggtttgatcgctgagaagaactgtgcacccatcatggtccgactcgcatggcactctgctggaactttcgattgtcaatcaaggactggaggtccattcggaacaatgaggtttgacgctgagcaagctcatggagccaacagtggtatccacattgctcttaggttgttggaccccatcagggagcaattccctaccatctcttttgctgatttccatcagcttgctggtgttgtggccgttgaagttactggtggccctgacattcctttccaccctggaagagaggacaagccccaaccacctccagagggtcgtcttcctgatggctaccaagggttgtgaccatttgagagatgtctttgctaagcagatgggcttatctgacaaagacattgtcgctttatctggtgcccacactctgggacgatgccacaaggataggtctggcttcgaaggtgcatggacatcaaaccctctaatcttcgacaactcttacttcaaggaactcttgagcggagagaaggaaggccttcttcagcttgtctctgacaaagcactattggacgaccctgttttccgtcctttggtcgagaaatacgctgctgatgaagatgcctttttcgctgattacgctgaggcccacatgaagctttctgagcttgggtttgctgatgcttaagctgtgacgtatgctctgtgtgtgtgtgtgtgtctccccgagagtcatggctgtttttggttgggggctggaggggtcgcattgcatttgaactttgtcatatgattgcttaatgtactctcggatttacgtatctgtttttttcggtgggttgcgatttgaacacatccgttgcgcttttgctgcttagacacattaataaaattaatttctctcgataaaaaaaaaaaaaaaaaaacaaagggcggccgctctagaggatccaagcttacgtacgcgtgcatgcgacgtcatagtattctatagtgt

SEQ ID NO: 117142 - DNA, 815 bp, Arabidopsis thaliana
ccgcaccggccattccgggtgcgacccacgcgtccgccagattttattatacttcctcgaaacaagatccacgattcgatgttgcgatcggcgatattatcgtcagctctctcgattctgttctgaggttcgatattgatgagtttctaggctaatcttacgaatctgtgaaagtttctgagagatttggtttctgaaactcactcctgctggattcagagcttagctaagatgacgaagaactacccaaccgggagcgaagattacaagaaggctgttgacaagtgcaggaggaagctcagaggtttgatcgctgagaagaactgtgcacccatcatggtccgactcgcatggcactctgctggaactttcgattgtcaatcaaggactggaggtccattcggaacaatgaggtttgacgctgagcaagctcatggaggcaacagtggtttccacattgctcttaggtgggtggacaccatcagggagcaattgcctaccatctcttttgctgattaacatcaacttgctggtgtggcggccgttgaagttactggtggccctgacattcctttgcaccctggaagagaggacaagccccaaccacctacagagggtcgactgccagaagcttccaagggttgtgacaattcgccagatgtctgtgctaagcgcatgggctaatctgaccaagacaatggcattttatgttggggcccacactttgggagcgaagccccacgggataggggttgggcttttcaaggggcatgggatgttcagaacccttttaaccttgggggagctcctaacct

SEQ ID NO: 117143 - DNA, 1298 bp, Arabidopsis thaliana
  unsure (1)..(1298): unsure at all n locations
gtgtcttactcgtgccagccactcgcatttttccagatttaattatccttcctcgaaacaagagcttagctaagatgacgaagaactacccaaccgtgagcnaagattacaagaaggctgttgagaagtgcaggaggaagctcagaggtttgatcgctgagaagaactgtgcacccatcatggtccgactcgcatggnactctgctggaactttcgattgtaaatcaaggactggaggtccattcggaacaatgaggtttgacgctgagcaagctcatggagccaacagtggtatccacattgctcttagggttgttggaccccatcagggagcaaattncctaccatctttttttnctggattttccattcagctttgctgggtggttnttggnccgtttaaaggttactnggtgggccctnaaaattccttttccanccttgggagngaatggacaagcccccaacccacctcccgaagggttcgtcttcctgatggctaccaaggggttgtgtccttttgaaaagatgtctgtcctgagcagatgggcttatctgacaaagacattgtcgctttatctggtgcccgcactctgggacaatgcctctaggataggtctggcttcaaaggtgcatggacatcaaaccctctaatcttcggcagctcttacttcaaggaactcttgagcggagacaaggaaggccttcttcagcttgtctctgacaaagcactattggacgaccctgttttccgtcctttggtcgagaaatacgctgctgatgaagatgcctttttcgctgattacgctgaggcccacatgaagctttctgagcttgggtttgctgatgcttaagctgtgacgtatgctctgtgtgtgtgtgtgtgtctccccgagagtcatggctgtttttggttgggggctggaggggtcgcattgcatttgatctttgtcatatgattgcttaatgttctctcggatttacgtatctgtttttttcggtgggttgcgatttgagcacatccggcggaccgcgaattcgatagtctaggcttatcgcataccgtcgaccctcggggggcgggccacaaangccactgttcaattaccatnttcacccaccccggcctggagtgggacgtgggccgtcgcttcattcagctccgacggactatgtgtataaggatagagtactgtatgcgtcgcttacttgttgtcatggtccgactccgacgcgcatgatatgcgtctcgagtgaccgattagtgtgtatactgccattgacgagatatgttatac

SEQ ID NO: 117144 - DNA, 624 bp, Arabidopsis thaliana
  unsure (1)..(624): unsure at all n locations
gtcttactcgtgccagccactcgcatttntccagatttnattatccttcctcgaaacaagagcttagctaagatgacgaagaactacccaaccgtgagcgaagattacaagaaggctgttgagaagtgcaggaggaagctcagaggtttgatcgctgagaagaactgtgcacccatcatggtccgactcgcatggcactctgctggaactttcgattgtnaatcaaggactggaggtccattcggaacaatgaggtttgacgctgagcaagctcatggagccaacagtggtatccacattgctcttaggttgttggaccccatcaggggagcaattccctaccatctcttttgctgattttccatcaagcttgcttggtgtttgtgggccgtttaaagttacttgggtggccctgacatttcccttttcacccctgggaggggagggcaaagccccaaaccaccttccagaggggcggttttccttattgcttcccaagggttttagccctttttaanggattgcttttctnaagaanattgggnttttntttcaaaanaaattntncggttnattttggngcccnantttttgggcggttnccnaaggataggnntttgtttt

SEQ ID NO: 117145 - DNA, 1769 bp, Arabidopsis thaliana
  unsure (1)..(1769): unsure at all n locations
tgatcctgccagcatcaatacgactcactttagggaaagctcgtacgcctgcaggtaccggtccggaattcccgggtcgacccacgcgtcctttactctttcagtgagagagagaagttagagctgtaaaagcacatgacttcgataccattggggcctcctcagcctccgtctttagctcctcagccgccgcatcttcacggcggagattctttgaaacgtcgtcccgatatagacaacgacaaggaaatgtctgctgctgttatagaaggaaatgatgctgttaccggtcacataatttctactacaattggaggcaaaaatggtgaacctaaacagaccattagttacatggccgaacgtgttgttggaacaggatcattcggaattgtattccaggcaaaatgcttggaaactggagaatcagtagccattaagaaggttttgcaagatcgccgttataaaaaccgagagttgcaattaatgcgactaatggaccatccaaatgtggtttccttgaagcattgtttcttctctacaacgactagagatgagctcttcctcaatctcgttatggagtatgtaccagagacattgtaccgggttttgaagcactatactagttcaaaccagcggatgcctatcttctatgtcaaactttacacataccaaatcttcagaggcttggcttatatccatactgctcctggtgtctgccacagagatataaaaccacaaaatcttttggttgatccccacacccatcagtgtaagctctgtgattttggaagtgcaaaagtactggtgaaaggtgaaccaaacatatcatatatctgctctcggtattaccgagctccagaactcatctttggtgccacagagtatacatcatccattgatatatggtctgctggttgtgttctggcagagctacttcttgggcagccgttattcccgggagaaaattctgtggaccagctagtggagatcataaaggttcttggtactccaactcgcgaagaaatccggtgcatgaacccaaactacacagacttcagattcccacaaatcaaagcccacccttggcataaggttttccacaagcggatgcctccggaagccattgaccttgcatctcggcttcttcaatactcaccaagtctacgttgcactgcgctcgaggcatgtgcgcatccgtttttcaatgaactccgtgagccaaatgctcgtcttccaaatggccgacctctaccaccgttgttcaacttcaaacaagagttgtctggggcttcaccggagcttatcaacaggctaataccagagcatgtgaggcgacagatgaatggtggctttccatttcaagctggaccctagaaaagcgatctcgagatgcttttccagagcaaaatgccgccttatggaatgaaggagagggagatttacttctctctgattaactaagtatcagcttctgagaagagatgatgtctcctccttagacgtggccaattcagctttttgagaaatcaggaggcgatgattgtgtcctattatattctttttgttcactgacttgtagagagatacttttctcctgtatcagtatttgtatatgtttttgtccttgaaatgaaacaaaatcgattccaaaaaaaaaaaacccaaagggcggccgctctagaggatccaagcttacgtacgcgtgcgtgcgacgtcatagctcttctatnnnnnnnnnnnnnnnnnnnnnnnnnnnnnnnnnnnnnnnn

SEQ ID NO: 117146 - DNA, 1708 bp, Arabidopsis thaliana
aagcaaagagagaggaaaaattagactttactcattgttcagtggttgagagagaaaagagtaaaaaagcacatggcctcattaccattggggcctcagcctcatgctcttgctccgccgctgcagcttcacgacggcgacgctttgaaacgccgtcctgaattggattctgataaggaaatgtctgcagctgttattgagggaaatgacgctgttactggtcatatcatttccactactataggaggcaaaaacggcgaaccaaagcagaccattagttacatggctgagcgggttgttggaacaggttcattcgggattgtttttcaggcgaaatgcttggaaactggagaatcagtagccattaaaaaggtcttgcaagatcgacgctataaaaaccgtgagttgcaactaatgcgaccaatggatcacccaaatgtcatctccttgaagcactgtttcttctctacaacgagtagagatgagctcttcctcaaccttgttatggagtatgtacctgagactttataccgggttttgaggcactatactagttctaatcagaggatgccaattttctatgtcaagctttacacatatcaaatctttagaggtttggcttacatccatactgttcccggtgtttgccacagagatgtgaaaccacaaaatctcttggttgatcccttgacccatcaggttaagctgtgtgattttggaagtgcaaaagtattggtcaaaggtgaaccaaacatatcatatatctgctcccgttattatcgtgctccagaactcatctttggcgccacagagtatacagcatccatagatatatggtctgctggttgtgtactggcagagcttcttcttggccagccgttatttccaggagaaaattcagttgatcagcttgtggagatcataaaggttcttggtactccaactcgtgaagaaattcgatgtatgaacccgaactacacagattttaggttcccacaaatcaaagctcacccttggcacaaggtttttcataaacggatgcctccagaagcaatagaccttgcatctcggcttcttcaatattcaccaagtctacgctgcactgcgctcgaagcatgtgctcatccgtttttcaatgaactccgagagccaaacgcccgtcttccaaatggtcgtccattaccgccattgttcaatttcaaacaagagttaggtggagcttcaatggagctaatcaacaggctaatacctgagcatgtgagacgacaaatgagcacaggattacaaaacagttaaaaactgtgcatgtctgaagagaaagaggagaaaagcaggtttactacttttatttgatagttgacaggttcaacagtatattaaccacgactattatcagcttctatacccgtagtaaagtcatattcagctttttgagaaatcagatgctgataattgcgtctattttttttttattccttagcctggagagtggagagagacactgttcctcgtgtatttttgtatatgtttttgtctgtaaaacaattctgacagatacgtagagacaaaagaaaaacgaggtgataatattaaaccaaaaaaaaaaaaaaaaaatagctaccaaaaaaaaaaaaaagggcggccgctttaaaggatcccagcttacggacgggggcatgcgacgtcaaaattctttataagtgtcacc

SEQ ID NO: 117147 - DNA, 1340 bp, Arabidopsis thaliana
  unsure (1)..(1340): unsure at all n locations
gagagagatagtgaaccagatattattgatggggctggtgctgagcctggtcatgtgattagaaccacactccgtggtcgaaatggtcaatcaagacagacagtcagttacatatcagaacatgttgttggtactggttcctttggcatggttttccaagctaaatgtagggaaactggggaggttgttgccatcaagaaggttctacaagacaaacgctacaagaacagggagctacaaataatgcagatgctagaccatcccaatgccgttgctttaaagcatagctttttctcaagaacagacaacgaagaggtttatttgaatcttgtccttgaatttgtgcctgagaccgtcaatcgtgttgcaagaagttatagtaggacaaaccagctgatgccattgatatatgttaaactctacacctatcagatttgcagggcgcttgcttacatccataattcctttggtctttgtcaccgtgatatcaagcctcaaaacctgctggtgaacccacacacgcatcagctaaaaatatgtgatttcgggagtgcaaaagtgttggtaaaaggagaacccaatgtttcttacatctgttctagatactatcgtgctccagaactcatttttggtgccagtgaatacacaactgcaattgatatatggtccactggttgtgtgatggccgaactgcttcttggacagcctctgtttcctggtgagagcggagttgatcagcttgttgaaatcattaaggttttaggtacaccaacaagggaagaaatcaagtgcatgaatggaaactatacagaatttaagtttccgcagataaaacctcatccatggcacaaggtgttccaaaaacgtttgccaccagaagcagttgatcttctttgtaggttcttccaatattcccccaatttgagatgtacagctttggaagcttgtatccatccgttatttgatgagctaagggacccaaacactcgtcttcccaatggccgaccacttcctccacttttcaactttaaaccgcaagagctatctggcatacctcctgaaatcgtgaacaggcttgtcccagagcatgcccgtaagcagaacctcttcatggctttgcattcgtaagacgcttatcggtttttgcatctgtataagcaagctctcttgatatcaatatttggagcagccagttttcagccatttggcttttgtttttggtgagttctttttctttatttttttctgtttggttggttatatgtcgacgaggatgcatgaatacaaacagtacttgaggtttgctggttnnnnnnnnnnnnnnnnnnnnnnnnnnnnnn

SEQ ID NO: 117148 - DNA, 1804 bp, Arabidopsis thaliana
caaagaaagagaaagagaagagctggattcacatggtcttgttctttctctctccttcttttctatcttgcggcttccctttctctctctatcgccacaatgatcattaccaaccaaactgattgaaactcatttgttctctctctctcaaatccactctctctctttcttttctcttctcctctctgtgtctctatcgccatggctgatgataaggagatgcctgctgctgtagttgatggacatgatcaagtcactggtcatattatttccaccacaatcggtggcaaaaatggtgaaccaaaacagacaattagttacatggcggagcgagttgttggtacaggctcgttcgggatcgttttccaagcaaaatgtttggagactggagaaaccgtggcgataaagaaggttttgcaagatagaagatacaagaaccgagaacttcagttgatgcgtgtgatggatcatccgaatgtggtttgtttgaagcattgcttcttttcgactacaagtaaagacgagcttttcttgaacttggttatggagtatgtccctgagagcttgtatcgagttctgaaacattatagtagtgcaaaccaaagaatgcctcttgtctatgttaaactttacagttatcagatcttccggggacttgcttacattcacagttgcccgggagtttgtcacagagatctaaagcctcaaaatcttctggttgatcctcttactcatcaagtcaaaatctgtgactttggcagtgcgaaacagctcgttaaaggtgaaccaaacatttcttacatctgctcacgattctaccgtgcacccgagctcatatttggtgccactgagtacacaacttctattgatatctggtctgctggttgtgttcttgctgagcttcttcttggtcagccattattccccggagaaaatgctgtggatcagctcgtggaaattattaaagttcttggtacaccaactcgagaagaaatccgttgtatgaatcccaactacacagatttcaagttcccacagataaaggcccatccctggcacaagatcttccacaaaaggatgcccccagaagcgattgattttgcatcaaggctgcttcaatactctccaagtctaagatgcacagcgctcgaagcttgtgcacatccgttctttgatgaactcagagaaccaaacgctcgtttaccaaatggacggcctttcccgcctctcttcaacttcaaacaagaagtagctggatcatcacctgaactggtcaacaagttgattccagaccatatcaagagacaattgggtctaagcttcttgaatcaatctggaacttaaaagggatcctgcaaaagacaactacttttttatatataatgtaccattacacgagccacaaggtcgtagttgaaggcaaacgtggaggacacaattcaaagtttttcctcctcaaactcgttcagacaaagccagctgctagcaaaaccaactacccaaatctgcgaaaacaaaaactctccagtgttgtatctgcttatttctcttctcttttcaagtttggtgaaaaacacagtctcctctttgcttcatttcttctttctttcccccttatgtaaatgagtttagtcagaagtttttttatatagtaaagtttgggcagaaggtgaagaatgtaatcaaagtgatactctttcaacgaggagcttctttcaaacaaaaaaaaaaaaaaaaaagggcggccgctctagaggatccaagcttacgtacgcgtgcatgcgacgtcataatcttctatagg

SEQ ID NO: 117149 - DNA, 432 bp, Arabidopsis thaliana
  unsure (1)..(432): unsure at all n locations
tcgcggtctcgtgggcggacgcgtgggttgctgtcttttgaagaagaagatcctgttttttggagatgcctgctgctgtagttgatggacatgatcaagtcactggtcatattatttccaccacaatcggtggcaaaaatggtgaaccaaaacagacaatttgctacatggcggagcgagttgttggtacaggctcgttcgggatcgttttccaagcaaaaatgtttggagactggaggaaccgcggcgataaagaagggtttgcacggtaggaggtacaagaaccggggacttcagttgatgccgtgtaaatggatcatccgaatttgggttttttnaagnattgcttctttttcgggctttcaaagtaaaaggcggggcttttttttngnaaccttgggttaatgggggnttttccccccnaanggcttt

SEQ ID NO: 117150 - DNA, 1715 bp, Arabidopsis thaliana
  unsure (1)..(1715): unsure at all n locations
nnnnnnnnnnnnnnnnnnnnnnnnnnnnnnnnnngcctgcaggtaccggtctggaattcccgggtcgacccacgcgtccgccacagagaaaacttcgtctctcttctctgcttcgccctctcatttcctgtgagataaaggcggagtctctctccagttattttgctcatccatcgattcttagagttcaaaatggttgatcaagttcagcaccccactattgcgcagaaagctgccgggcagttcatgcgttcaagtgtttccaaggacgttcaagtgggttaccagaggccttctatgtatcaaagacatgcaacctacggaaactactccaatgctgcatttcaatttcctccgacatcccggatgttggcaacaactgcttctcccgtgtttgtccaaaccccaggagagaaggggttcactaactttgcccttgactttctgatgggtggtgtttctgctgccgtctccaagactgctgctgctcctattgaacgtgttaagcttttgatccagaaccaggatgagatgattaaagctggcaggctttctgaaccctacaagggtattggtgactgtttcggcaggacgattaaggatgaaggttttggttctctatggagaggaaacactgccaatgttatccgttatttccccactcaggccttgaactttgccttcaaagattacttcaaaagacttttcaactttaagaaggacagagatggttactggaagtggtttgctggtaacttggcatctggaggagcagctggtgcctcttcccttctgtttgtgtactcccttgactatgcccgtacccgtctagctaatgatgccaaggctgcaaagaaaggaggtggtggaagacagtttgatggtcttgttgatgtctacagaaagacacttaagactgatggtattgctggtctgtaccgtggattcaacatctcatgtgttggtatcattgtctaccgtggtctgtactttggactctatgactctgtgaagcctgttctcctcactggtgacttacaggacagtttcttcgctagtttcgctcttggatgggttattaccaatggtgcgggtcttgcatcctaccccattgacactgtccgcagaagaatgatgatgacgtctggtgaagctgtcaagtacaagagttctttggacgccttcaagcagatcctcaagaatgaaggagccaagtcactcttcaagggagctggtgccaacattctgcgtgctgttgcaggtgctggtgtgctttccggttacgacaaattgcagctgattgtcttcggtaagaagtacggatcaggaggtgcctaagcattgcttcttcctccttttttcgattttaattgcggttttaaggcccgcaataaactgagatgttgatgaaattttttttgcttaagacttagggaggcatgtgccctaaaccaaattttatatcgttctgacgccaactttttttacttatggaataattcatgtttgagagagtttgttagactcttcgattttaaagaattttggatttatgaaataaattcttcttttttatcaaaaaaaaaaaacaaaagggcggccgctctagaggatccaagcttacgtacgcgtgcatgcgacgtcatgatctgctataggtcgtcctcaattaatagcggcggcgctgcgcgcaaccgaatctgagagtggggggc

SEQ ID NO: 117151 - DNA, 660 bp, Arabidopsis thaliana
  unsure (1)..(660): unsure at all n locations
aaaacttcgtctctcttctctgcttcgccctctcatttcctgtgagataaaggcggagtctctctccagttattttgctcatccatcgattcttagagttcaaaatggttgatcaagttcagcaccccactattgcgcagaaagctgccgggcagttcatgcgttcaagtgtttccaaggacgttcaagtgggttaccagaggccttctatgtatcaaagacatgcaacctacggaaactactccaatgctgcatttcaatttcctcccacatcccggatgttggcaacaactgcttctcccgtgtttgtccaaaccccagggggagaaggggttcactaactttgcccttgactttctgatgggtggtgtttctgctgccgtctccagagacttgctgcttgcttctattgaaccgngttaaggtttttgatccagaaccagggtgaggatgattaaaggctggnagggtttttggaacccttacaaggggcttttggcgacttttttttgggaaggccggttaagggttaaagggtttgggcttctttggggggggggctacccttccattggaattttcccccctaagncttgaactttccttnaaagttttttnaaagttttaccttaggggcaaagtgtnctgagggggttttgc

SEQ ID NO: 117152 - DNA, 672 bp, Arabidopsis thaliana
  unsure (1)..(672): unsure at all n locations
cgatctgatttaggcgcactatagaatagcttgacgtcgcatgcacgcgtacgtaagctcggaattcggctcgagctcgagccgctcgagcggctcgagcggctcgagtgactctgtgaagcctgttctcctcactggtgacttacaggacagtttcttcgctagtttcgctcttggatgggttattaccaatggtgcgggtcttgcatcctaccccattgacactgtccgcagaagaatgatgatgacgtctggtgaagctgtcaagtacaagagttctttggacgccttcaagcagatcctcaagaatgaaggagccaagtcactcttcaagggagctggtgccaacattctgcgtgctgttgcaggtgctggtgtgctttccggttacgacaaattgcagctgattgtcttcggtaagaagtacggatcaggaggtgcctaagcattgcttcttcctccttttttcgattttaattgcgggtttaaggcccgcaataaactgagatgtggatgaaattttttttggcttaagaactaagggggcttgtgcccttaaccaaattttatttcggtctgaccccaactttttccttcctatgggaaaatccaggttgaaaaagttgtaaaccccccntttaaaaaatttgggttntgaaaaaancccccttt

SEQ ID NO: 117153 - DNA, 563 bp, Arabidopsis thaliana
  unsure (1)..(563): unsure at all n locations
ccacagagaaaacttcgtctctcttctctgcttcgccctctcatttcctgtgagataaaggcggagtctctctccagttattttgctcatccatcgattcttagagttcaaaatggttgatcaagttcagcaccccactattgcgcagaaagctgccgggcagttcatgcgttcaagtgtttccaaggacgttcaagtgggttaccagaggccttctatgtatcaaagacatgcaacctacggaaactactccaatgctgcatttcaatttcctccgacatcccggatgttggcaacaactgcttctcccgtgtttgtccaaaccccaggagagaaggggttcactaactttgcccccttgactttctgatggggtggtgtttctgctgccgtttccaagactgctggtgctcctattgaccgggttaagttttttgatcccaaacccgggttgggttgttaaagggtggaaggttttttaacccccaaaaggatttggggacttttttggaaggcgggttagggttaaggttttggtgttctttgggggacacttccaatnn

SEQ ID NO: 117154 - DNA, 946 bp, Arabidopsis thaliana
  unsure (1)..(946): unsure at all n locations
ccccccccccccccaatgaanaggcagtgggcattgcgcgnccgcaattcccgggtcgacccacgcgtccgtgtttcggcaggacgattaaggatgaaggttttggatctctattgagattaaacactgccaatgttattcggtatttccccactgatgccttgaactttgccttcaaagattacttcaaaagacttttcaactttaagaaggacagagatgggtactggaagaggtttgttggttacttggcatctggaggagcagctggtgcctcttgccttctgttcgagtactaccctagactatgcccacactcttttagctaatgatgccaaggctgcaaagaaaggatgtggaggaagacagcttgatggtcttggggatgtctacagaaagacacttaagactgatggcattgctggtctgtaccgaggattcaacatctcatgtgtcggtatcattgcctaccggggcctgtactttggactctatgactctgtgaagcctgttctcctcactggtgacttacaggacagttgcttcgctggtttcgctcttgcatgggttattaccaatggtgcgggtcttgcatcctaccccattgacactgtccgcagaagaatgatgatcacgtctggtgaagctgtcgaggacatgagtgctttggacgccttcaagcagatcctcaccaatgatggagccacgtcgctcttcaagggagctggtgcccacattctgcgtgctggtgcaggtgctggtgtgcttaccggttacgacaaattgcaactgattgcctccggnaaaagtacggatcaggngggncnaaaaattgttcttccccccttttncnattaaattcgggttaaaagncccaaaanacnaaatttgaaaantttttttccaaaanctggggnnttncccaaacannttaaancnncngcca

SEQ ID NO: 117155 - DNA, 615 bp, Arabidopsis thaliana
  unsure (1)..(615): unsure at all n locations
cccgccggatccgggcnccccgcccttggtttcaggncattccncctagtccccctggagggntattnccaatgggcggnctgcaccntccccatgcactgccncagaagatgtgtgacgtctggtgaagctgtcaagtaccaggagttctttggacgccttcaggcagatcctcaagaatgaaggagcccaagtcactcttccaagggagctggtgccaacattctgcgtgctgttgcaggtgctggtgtgctttccggttacgacaaattgcagctgattgtcttcggtaagaagtacggatcaggaggtgcctaagcattgcttcttcctccttttttcgattttaattgcggttttaaggcccgcaataaactgagatgttgatgaaattttttttgccttaaggacttagggaggcatgtgccctaaaccaaattttatatcgttctgacgccaactttttttacttatggaataattcatgtttgagagagtttgttagactcttcgattttaaagaattttggatttataaaaaaaaaaaaaagggcggccgctctagaggatccaagcttacgtacgcgtgcatgcgacgtcaagatcttctatagt

SEQ ID NO: 117156 - DNA, 1321 bp, Arabidopsis thaliana
  unsure (1)..(1321): unsure at all n locations
tcctccattcatagtaacaataatattaagaaagagggtaaactatgtcagaattattacagttgcctccaggtttccgatttcaccctaccgatgaagagcttgtcatgcactatctctgccgcaaatgtgcctctcagtccatcgccgttccgatcatcgctgagatcgatctctacaaatacgatccatgggagcttcctggtttagccttgtatggtgagaaggaatggtacttcttctctcccagggacagaaaatatcccaacggttcgcgtcctaaccggtccgctggttctggttactggaaagctaccggagctgataaaccgatcggactacctaaaccggtcggaattaagaaagctcttgttttctacgccggcaaagctccaaagggagagaaaaccaattggatcatgcacgagtaccgtctcgccgacgttgaccggtccgttcgcaagaagaagaatagtctcaggctggatgattgggttctctgccggatttacaacaaaaaaggagctaccgagaggcggggaccaccgcctccggttgtttacggcgacgaaatcatggaggagaagccgaaggtgacggagatggttatgcctccgccgccgcaacagacaagtgagttcgcgtatttcgacacgtcggattcggtgccgaagctgcatactacggattcgagttgctcggagcaggtggtgtcgccggagttcacgagcgaggttcagagcgagcccaagtggaaagattggtcggccgtaagtaatgacaataacaatacccttgattttgggtttaattacattgatgccaccgtggataacgcgtttggaggaggagggagtagtaatcagatgtttccgctacaggatatgttcatgtacatgcagaagccttactagaagggaattcctttcctgccgccgaaacgcaacgcaaaacgaccctcgtttttgcgtttatggcaacacgagaccgttttatatggtcaatgagtgtgccgattcgccattagatttctgttcagtcttcgtttattctatagaccgtccgatttcagatcatccctaatcggacggtggtcgttggatgtatcagtagtgtattactgtgttaggtagaagaaaatccacttgttcttaaattggcataaaagtcagaagctaatatttatatgtgccgcaatcaatttaataaaaaaaaaaaaaaaaaaaaaaccctgacgtagctcgaggaattcnnnnnnnnnnnnnnnnnnnnnnnnnnnnnnnnnnnnnnnnnnnnnnnnnnnnnnnnnnnnnnnnnnnnn

SEQ ID NO: 117157 - DNA, 1848 bp, Arabidopsis thaliana
  unsure (1)..(1848): unsure at all n locations
agctctcnnnnnnnnnnnnnnnnnnnnnnnnnnnnnnnnnnnnnnnnnnnnnnnnnnnnnnnnnnnnnnnccacgcgtccgctctccctctctatctctctcttaccaatttccatttctcgggggaaaataataatacgacttttgaaatctctcactaatatttcccaagaaaacctgatgaattaaaagttcatattttcttggtgttgattggtattagatgactatttcttagtattagtcaattctctgtttccatcttatatggatagtctagacacagagcaaagatccttctttggagaaaaagaagatgagagacgagagaggatcgtttcttcacgtattggtcgtagatagatcttaatcgataaccatctaggccttgatctaaccattcaatataaactttatttccttcttcttttcgatctcaattgttccgaccaaacaagatgaagagatcacgtggaagctccgattctttatccggtttcttaccaattcgccattctacaacagacaaacaaataagcccaagaccaacaactaccggctttctctattccggcgccggagactactcccagatgtttgacgcattagaagacgacggaagtctagaggacctcggcggcgttggacacgcgtcttctacggcggcggagaaaaaacggcggttgggtgtagagcaagtgaaagcgttagagaagaatttcgagattgataacaagttagagccagagaggaaagtgaagctggctcaagagcttgggttgcagccacgccaagtcgcgatctggtttcaaaaccgccgtgctcggtggaagacaaagcagcttgaacgtgattacggcgttcttaagtcaaactttgatgcactcaaacgcaaccgcgactcgcttcaacgcgataacgattcactccttggacagattaaagagctgaaagcaaaacttaacgtggaaggggttaaaggtatagaagagaacggcgctttaaaagcagtggaagcaaatcaatcggtgatggctaataatgaagtcttagagctaagccaccgttctccatcgccaccaccgcatattcctacggacgctccgacatcggagctcgcattcgaaatgtttagcatttttccacgcacggaaaacttcagagacgatcctgccgatagcagcgactcaagcgcggttttgaacgaagagtatagtcccaatacggttgaagcagctggcgcagtggcggccacgactgtagaaatgtcgacgatgggttgttttagccaattcgtgaaaatggaagagcatgaagatctgtttagtggagaggaagcttgcaagttgtttgcggacaatgagcaatggtattgctccgatcagtggaattcgtaaaatgtgggggcagaattaaaagcatagaaaagctgaagggggtatgtggaaatattactgaagtcatattgggtcggaaaatgcattactcaaaatattggggtttttcttgagaaaatggaatatgacgcgagagggtagtaaaaacgagcgtgtggtgttccatgcacgtgtggccgtaatcttttcaaggttgaatgagagaggacaaaaaagtctgaaatcatcgggaataaaaaaaatatgtgacgaagaaatcgttttttcgtcgtttataatattatttgaataattttacttaggtgaatgtaatcgtcaaaaatctttaaattccgaagggttaaagattctgagcccgaaaaaaaaaaaaaaaaaaaaaagggcggccgctctagaggatccaagcttacgtacgcgtgcatgcgacgtcaagcatcttctatagtgcgcc

SEQ ID NO: 117158 - DNA, 1593 bp, Arabidopsis thaliana
  unsure (1)..(1593): unsure at all n locations
ccggcacctatacgactcactatagggaaagccggcacgcctgcaggtaccggtccggaattcccgggtcgacccacgcgtccgcccacgcgtcctcaacctcaacaatctctctcctctctctctctgtatatagaagaatctccattgtctttaatttctctccatttctctttctctcttccttcaaagttttctcttttcttgatgggtttaagagagtaaagatcatcaagtactatgcattaaattgagaagttattaaaaatttcgaaagtaattaaagattgttgatgatgaagagattaagtagttcagattcagtgggtggtctcatctctttatgtcctacaacttccacagatgagcagagtccgaggagatacggtgggagagagtttcagtcgatgcttgaaggatacgaggaagaagaagaagctatagtagaagaaagaggacacgtgggcttgtcggagaagaagagaaggttaagcattaaccaagttaaagctttggagaagaattttgagttagagaataagcttgagcctgagaggaaagttaagttagctcaagaacttggtcttcaacctcgtcaagttgctgtttggtttcaaaaccgtcgtgctcggtggaagacaaaacagcttgagaaagattacggtgttcttaaaacccagtacgattctctccgtcataactttgattccctccgccgtgacaatgaatctctccttcaagagattagtaaactgaaaacgaagcttaatggaggaggaggagaagaagaagaagaagagaacaacgcggcggtgacaacggagagtgatatttcggtcaaggaggaagaagtttcgttgccggagaagattacagaggcaccgtcgtctcctccacagtttcttgaacattctgatggtcttaattaccggagtttcacagatctacgtgatcttcttccattaaaggcggcggcttcttcattcgccgccgcagctggatcttcagacagtagcgattcaagcgctctgctgaatgaagaaagcagctctaatgtcactgtggcggctccggtgacggttccaggaggtaatttcttccagtttgtgaaaatggagcagacggaggatcatgaggactttctgagtggagaagaagcttgtgaattcttttccgatgaacaaccgccgtctctacactggtactccaccgttgatcattggaattgaagctgaaaacaccaccggaagagattttggattggattagatgctcttttcttctctgtggaaaaaacagaggagggcaaaatgggaataaagttaaaattgaagggtgaaagggcaattaaggaagggttaagtctgggcgggaataatgatttagggtgaatttgtaattatgctttttctctagtgattttcgtgcacttcttgtaattaaggatcatcagatcaaagagaaattgagaaggggttaacatgtcaaaaaaaaaaaaaccccaaccccaaaagcggccgctctagaggatccaagcttacgtacgcgtgcaggcgacgtcataatcttctatagtggtcnnnnnnnnnnnnn

SEQ ID NO: 117159 - DNA, 1024 bp, Arabidopsis thaliana
  unsure (1)..(1024): unsure at all n locations
nnnnnnnnnnnnnnnnnnnnnnnnnnnnnnnnnnnnnnnnnnnnnnnnnnnnnnnnnnnnnnnnnnnnnnnnnnnnnnnnnnnccacgcgtccgcccacgcgtccgcccacgcgtccgtacggctgcgagaagacgcagaaggatgagttagagaataagcttgagcctgagaggaaagttaagttagctcaagaacttggtcttcaccctcgtcaagttgctgtttggtttcaaaaccgtcgtgctcggtggaagacaaaacagctttgagaaagattacggtgttcttaaaacccagtacgattctctccgtcataactttgattccctccgccgtgacaatgaatctctccttcaagagattagtaaactgaaaacgaagcttaatggaggaggaggagaagaagaagaagaagagaacaacgcggcggtgacaacggagagtgatatttcggtcaaggaggaagaagtttcgttgccggagaagattacagaggcaccgtcgtctcctccacagtttcttgaacattctgatggtcttaattaccggagtttcacagatctacgtgatcttcttccattaaaggcggcggcttcttcattcgccgccgcagctgggtcttcagacagtagcgattcaagcgctctgctgaatgaagaaagcagctctaatgtcactgtggcggctccggtgacggttccaggaggtaatttcttccagtttgtgaaaatggagcagacggaggatcatgaggactttctgagtggagaagaagcttgtgaattcttttccgatgaacaaccgccgtctctacactggtactccaccgttgatcattggaattgaagctgaaaacacccaccggaggagattttggattggattagatgctcttttcttctctgtggaaaaaacagaggagggcaaaatgggaaaaaaaaaaaaaaagggcggccgctctagaggatccaagcttacgtacgcgtgcaggcgacgtcaagactcttctatagtggtaccta

SEQ ID NO: 117160 - DNA, 736 bp, Arabidopsis thaliana
  unsure (1)..(736): unsure at all n locations
cctgcaggtaccggtccggaattcccggtttacccacgcggcgaaccgcgtccgaccagcgtacgacagctgggagaagaacacaaggatgagttagagaaaagctggagcctgagaggaaagtttatctagctcaagaacttgggcttcaacctagacaagttgctgacgggtagcaaaacctggttggctctgtggaagaggaaacagcacgagaaagattacggcgtacttaaaacccaccacgattctggccgtcagaactgtgattccctccgccgtgacaatgaatctctccttcaagagattagcaaactgaaaacgaagcttaatggaggaggaggagaagaagaagaagaagagaacaacgcggcggtgacaacggagagtgatatttcggtcaaggaggaagaagtttcggtgccggagaagattacagaggcaccgtcgtctcctccacagtttcttgaacattctgatggtcttaattaccggagtttcacagatctacgtgatcttcttccattaaaggcggcggnttcttcattcggcgccgcagctggatcttcagacagtagcggttcaaacggctcctgctgaattgaaggaaagcagnnctaatggncactgttggngggtnccgggtaanggttcncggngggaattttncccccatttngnaaaantggggnnaccngggggctttnggggtnttcntgggggggaaaaaaacctt

SEQ ID NO: 117161 - DNA, 1456 bp, Arabidopsis thaliana
  unsure (1)..(1456): unsure at all n locations
atgatacgccgagacctaatacgacctacttagggaaccctggtacgcctgcaggtaccggtccggaattcccgggtcgacccacgcgtccgacaaatcacatttttatataactgttaacataataatctcagcctcatcaacacacatatatagatagccaacatcacacaaacatagagattccaaaaaataaaaataaagaaaacataaatcctctgaggaaaaattccgatgagatgacagaaggtggagaatattctccggcgatgatgtcagcagagccattcttgaccatgaagaagatgaagaagagcaaccacaacaagaacaatcagagaaggtttagcgacgagcagatcaagtcactggagatgatgtttgagtctgagacaaggcttgagccaaggaagaaggttcaattagctagagagctagggttgcagccgaggcaagtggctatatggtttcagaacaagagggctcgttggaaatccaagcagctcgagactgagtacaacattctcagacaaaactacgacaacttggcttctcagttcgagtccttaaagaaagaaaaacaagctttagtctctgagttgcagaggctaaaagaggcgacgcaaaagaagacacaggaggaggaaaggcagtgtagtggagatcaagcggtggttgctctaagcagcacacatcatgaatcagaaaacgaagagaaccggaggcgtaaaccggaagaggttagaccggagatggagatgaaagatgataggggtcatcatggggttatgtgtgatcatcatgattatgaagatgatgataatggttatagtaacaacatcaagagagagtgttttggtgggtttgaggaagaaccagatcacttaatgaacattgttgaaccagctgatagttgtttgacatcatctgatgattggagaggtttcaaatcagatactactactctcttggaccaatcctgcaacaattacccttggcgggatttttggtcatgaaaacaataaactctaaacaagaagatgaaacagattgagactaaagattggatatatacatattcaaatcgaaatttaccggtctacatcgcatgaaccgagccacggatatagagatattcggtccagcaaatgactcgtttctcagcgagaattttgcaggattttgagctgaaattgtatggttttgtctgtataaatgatgtgtttagaaagacgtatattctcagttcgtgtttgtaattctgtttttaagtagtaagtactcgtcatgctttgtagctaagtagtaagtttaagactaaatttggatgaataaaaatcaaaagcaggagaaatcatataaaaaaaaaaaaaaaggannnnnnnnnnnnnnnnnnnnnnnnnnnnnnnnnnnnnnnnnnnnnnnnnnnnnnnnnnnnnagttcccctatgaatcg

SEQ ID NO: 117162 - DNA, 1498 bp, Arabidopsis thaliana
  unsure (1)..(1498): unsure at all n locations
nnnnnnnnnnnnnnnnnnnnnnnnnnnnnnnnnnnnnnnnnnnnnnnnnnnnnnnnnnnnnnnnnnnnnnccacgcgtccgctctatctctctctctctttgaagcagtttgttacttcttacttttgtgtttcttcatattcttcagaagcaagcacaaggctagggatcgaagaagcggcgatcactgatcgtatctcactacgatcacattaatggatagaatgtgtggtttccgctcgacggaagactattcggagaaagcgacgttgatgatgccgtccgattatcagtctttgatttgttcaaccaccggagacaatcaaagactgtttggatccgacgaactcgctaccgctttgtcctcggagttgcttccgcgtattcgaaaagctgaggataatttctctcttagtgtcatcaaatccaaaatcgcttctcatcctttgtatcctcgcttactccaaacctacatcgattgccaaaaggtgggagcgcctatggaaatagcgtgtatattggaagagattcagcgagagaaccatgtgtacaagagagatgttgctccattatcttgctttggagctgatcctgagcttgatgaattcatggaaacctactgtgatatattggttaaatacaaaaccgatcttgcgaggccgttcgacgaggctacaactttcataaacaagattgaaatgcagcttcagaacttgtgcactggtccagcgtctgctacagctctttcagatgatggtgcggtttcatctgacgaggaactgagagaagatgatgacatagcagcggatgacagccaacaaagaagcaatgaccgcgatctgaaggaccagctactacgcaaatttggtagccatatcagttcattgaaactcgagttctctaaaaagaagaagaaagggaagctaccaagagaagcaagacaagcgttgctcgattggtggaatgttcataataaatggccttaccctactgaaggcgacaaaatagctctggctgaagaaacaggtttggatcaaaaacaaatcaacaattggtttataaaccaaaggaaacgccattggaagccttcggagaacatgccgtttgatatgatggacgattctaatgaaacattctttaccgaggaatgaaaagagagacatgggattgtgcattgtataatttttacactgttttcccaagaaaagaaaacagtaaaaagcttttggtaaatgggacatcatcgcgaatgaatggaaccagttagccaaaacggtcaagggcgtggcgtaacgagacattgtattggaaatagtggcaatattatgtcactaatcttccaatggtccaaaatgatagatttcttatttgtattgaaccttacttagatagctgatgtgtcaactaaataatttattttcatccttatactacttgtatcaatgtctctaattgatcaattgttgcttgctattcnnnnnnnnnnnnnnnnnnnnnn

SEQ ID NO: 117163 - DNA, 3865 bp, Arabidopsis thaliana
  unsure (1)..(3865): unsure at all n locations
gaagtttcttctgtgggggtggatttggtgtgtctgagatctatctccagcaatagttgaatcctttctgagaatctgaagtttttctactgaaggtgctgctgattggcttttctctaattttggaagcaaaatgtctcagaaggttactccattcatgcagtcacttaaatctttgccagcagactatagatttgatggttcaccagtctctgaccgccttgaaaattcttctggtgcaagtgttcgcttgaccaattcgaatgttccaagaaaaggtggcttaaggaatggtgttagtcgaactgatactgctgctggggatagtgaggattcaccatatagcgggcacggtgtttttgttgaagagcagtctttaacggatgatgtagattctggagctgctacaatgcccttgcctcagagtgatgaacgcaggtggagtgacactagtgcatatgctcgaaagaagatactgcaatcttggattcaacttccaaatggtaactgggagcttgggaagatattgtcaacttcaggggaggagtctgttatatctttgcccgaaggaaaagttataaaagtcatatcagagactctagtacctgcaaatcctgatattcttgatggagtggacgatcttatgcagcttagttacttaaatgagccatcagtgttgtacaacctcaactataggtacaaccaagacatgatatatacaaaagcagggccagttttggtggctgtgaatccttttaaggaggttcctttatacggaaatcgatacattgaagcatacaggaagaaatcaaatgagagtcctcatgtgtatgcaattgcagatacagcaattcgcgaaatgatacgcgatgaagttaaccaatctatcattatcagcggcgagagtggagcagggaaaactgagactgctaaaatagctatgcaatacttggctgctcttggaggcggaagcgggatcgaatatgagatacttaagactaatcccattttggaagcatttggaaatgcaaaaacattgagaaatgataattctagtcgttttgggaagctaatagagattcattttagtgaaagtggaaagatatcgggtgctcaaattcaaacctttttactagaaaagtctagagtggtccaatgtgctgaaggggaaaggtcatatcatattttttatcaactttgtgctggggcttcacctgcacttagagagaagctaaatctgacaagcgcccatgagtataaatatttgggacagagtaattgttattcaattaacggagttgacgatgctgaacgttttcacactgttaaggaagctctggacattgtgcatgttagtaaagaagatcaagaaagtgtatttgcaatgcttgctgcagttttatggctgggaaacgtttccttcaccgttattgacaatgaaaaccatgttgaacctgtagcagatgaaagtttgtcaactgttgctaaattgattgggtgcaacatcaatgagcttacgctaactttatcgaaacgtaacatgagagttaggaatgataccattgtacagaagctaacgctaccacaggccattgatgcaagagatgctttagcaaaatcaatctattcgtgcctgtttgactggctggttgaacagatcaacaaatctcttgctgtgggaaagagacgaactggcagatctatcagtattcttgatatctacggctttgaatcatttgataaaaatagcttcgagcagttctgtataaattatgcaaatgagagattgcagcaacactttaaccgtcatctattcaagctggagcaagaggaatatatccaggatggcattgactggacaagggttgattttgaggacaaccaaaattgtctgagtctttttgaaaagaaaccattggggctgctctcccttttggatgaggaatctacatttccgaatggcacagatttgacacttgcaaacaagctaaaacagcatctacagtctaattcatgtttcagaggagataaagggaagcttttcacagttgtgcattatgcaggagaggttacatatgagacgactggatttctagagaagaatagagacttgttgcattcggattctattcaacttttgtcctcttgttcttgcctccttcctcaagcatttgcttctagcatgctgatccaatctgaaaaacccgttgtcggtcctttatacaaagcaggtggtgctgattcccagcgtttgagtgtagctactaaatttaagagtcaactcttccaattgatgcaacgtttaggaaacactaccccacatttcattcgctgtatcaagccaaataacatccagtctcccggggtgtatgagcaagggcttgttttacagcagctaagatgttgtggggtcctagaagtggttcgaatttcacggtctggatttcctacaagaatgtctcatcagaaattttcccgaagatatggttttcttctggtggagaacattgctgatagagatcctctaagtgtttcagttgcgattctccatcagtttaatatcttgccggagatgtatcaagttggctacacaaagttgtttttcagaactggccagattggggttcttgaggacacaaggaaccgtactctccacggcattttacgtgttcaaagttcttttagaggataccaagcacgctgtctcctgaaggaacttaaaaggagaatttctattctccaatcatttgttcgtggagagaagataagaaaagagtttgctgagttacgaaggaggcataaggctgctgctactatacagagccaagttaaaagcaagattgctaggatacagtataagggcatagccgatgcatcagttgtgatacaatcagcaattcgtggttggttggttagaagatgttcaggggatattggatggttaaaatctggaggtgccaagacaaatgagttaggtgaggtgctagtgaaagcatcagtactttccgagctccaacgcagggtacttaaagcggaagctgctctgcgtgaaaaggaagaagagaacgacattcttcagcagaggcttcaacaatatgagaaccggtggtcagagtatgagacaaagatgaaatcaatggaagaaatctggcaaaagcaaatgaggtcgttgcagtccagtctttccatagcaaagaaaagcttagctgttgaggactcagcgagaaactcagatgcatctgtcaatgcgagtgatgcaacagattgggattcaagcagtaatcagttcaggagccaaacaagcaatggagtagggtcaagactacagcctatgagcgcagggctgagcgtgattgggcggttagcagaagaattcgagcagagagctcaagtgtttggtgatgatgcaaagttcttggtggaagtgaaatctggtcaggtggaagcaaacttggacccagacagagaactgaggaggctgaaacagatgtttgagacgtggaaaaaggattatggagggagattgcgggaaacgaaactgatactgagcaagctcgggagcgaagagagcagtggttcgatggagaaagtgaagaggaagtggtggggaaggagaaatagcaccaggtattgatgaaggagaagactattcttacaggcaaacttaggtcgtttgctaattaaggatttggcgggttttatctggtaaaagtagttaaatgatgttcttgagacaacctcgtatttgcctctcaatgttaaggattctgtgattatacaaacaaaaacaaatcttaatttaagtttgtaaattttgtttttctttaatataacaaaagtcacgaaaaaaanagttatatatatg

SEQ ID NO: 117164 - DNA, 1387 bp, Arabidopsis thaliana
  unsure (1)..(1387): unsure at all n locations
atgatactgccnnnnnnnnnnnnnnnnnnnnnnnnnnnnnnnnnnnnnngttctcacccttacttggcaaacactcaacgaagaaaggagagagagacggtaatggcgatcaagaacattctcgcccttgtggttcttcttagcgtggttggagtttctgtcgccattccacagttgcttgacctcgactactaccggtctaagtgtcccaaggcagaggaaattgttcgtggtgtcacagtacaatatgtttctcgccagaaaacccttgccgctaaacttctaaggatgcatttccatgattgtttcgtcagaggatgtgatggttccgttcttctgaaatctgcaaagaatgatgcggaaagagacgctgtccccaacctgaccctgaaaggttatgaagtggtggatgcggccaagacagcgctggagaggaagtgtcctaatctcatttcttgcgctgatgttcttgccttggtcgccagagatgccgtggcagtgatcgggggaccatggtggccggttccattgggccgcagggatggacgcatctcgaaattgaacgatgcattgctaaatttaccatctcctttcgccgacataaagacgctgaagaagaactttgccaacaagggtcttaacgctaaagaccttgtggttctctcagggggtcacaccattggaatctctagttgcgctctcgtcaacagtcgtctctacaacttcacaggaaagggcgattctgacccatccatgaaccctagctacgtgagggaattgaagagaaagtgcccgcctacagatttcagaacctcactgaacatggacccaggcagtgcgttgacattcgacactcactacttcaaggtcgtggctcagaagaaagggctcttcacatctgactctacgcttctcgatgacattgagaccaaaaactacgttcagactcaggccattctccctcctgtgttttcttctttcaataaagatttctccgattccatggtcaaacttggtttcgtccaaattcttaccggcaaaaatggtgagatcaggaagagatgcgccttccctaactaatttggatcgatcagaccgggtttcggatgattttgagtctacacgtttttctctgcttattttctttctttttcttttttctttcacggaagtttgagctttggtgttgtcttcttctgtttcttccatgaataattgttttttgttgagtaactttacatttgtattctttacggtgactgtgttttgtaatggaaaaagtttgtttcgaattcaaaaaaaaaaaaaaaaaacggccgctctagaggatccaagcttacgtacgcgtgcatgcgacgtcagagnnnnnnnnnnnnnnnnnacattc

SEQ ID NO: 117165 - DNA, 1290 bp, Arabidopsis thaliana
  unsure (1)..(1290): unsure at all n locations
cgccatatagaaatttcaactaaaaatggccgtgaagatctcgaccattgaagtattgatcctatcccttgctctacttagcttcggccatggttgttatggccagcttcgactcggattctacagtcaaaattgccaaaacgtcgaaaacatcgtatctaaagttgttggagaggcattcatcaaggattcatcgattgcacccgcaatgatccgcctttattttcacgattgttttagcaacgggtgtgatgcatcgcttcttctagatggttcgaacagtgagaaaaaggcgtcaccaaatctaagtgtacgcggatacgaagtgatagatgacattaagtctgcggtcgaaaaagaatgtgacagggtcgtttcttgtgctgatatcatagctctcgcgactagagatcttgttactcttgcaagcggagggaaaacacgatatgagataccaacaggacgattagacggtaaaatctcttcggctttgcttgtcgatttgccgtctccaaagatgaccgtcgcggaaactgctgctaaatttgatcagaggaaacttagccttaccgatatggttctacttcttggtggacatacgattggagtgacacattgttccttcattatggacagattatataactttcaaaacacgcaaaagcctgatccatctatggatcctaaattggtcgaagaactaagcggcaaatgccctaagggttcgtcaaccgatggcatcattaatctggatcaaaatgctactagctcgaatactatggatgtatctttctacaaagagataaaagtcagccgcggagtccttcatatcgatcaaaaacttgccaacgacgatttgacgagaaagatggtgacggatatagccaacggtaacgatttcttggttaggtttggtcaggctatggtgaatttgggatcggtgagagttattagtaagcccaaagacggggagataagaagatcatgtcgttctacgtgcaacaatccattatgcgtataaacagttgaataaagttacgccctatattttttgttttgtttaatgttattgtgttcacattttttttattcatatgtcattatttttttatttgggttgttaagtattttatattgttatggcatctaagtttttttgtttattgttattgtgttaacttttttttctttatctgcctttgttaatttgggttgtactatcactgagtctcacagttctggtgcttcaacagttcgactaccnnnnnnnnnnnnnnnnnnnnnnnnnnn

SEQ ID NO: 117166 - DNA, 1210 bp, Arabidopsis thaliana
aaatcaaattttctaagtgtctcataaaaaatgacgagattcggattagctcttttgatgattcttgtgattcaagggtttgtgatcttttcagaagcacaattgaagatgggattctacgaccaaacgtgcccttacgcagagaagatcgtacaagatgttgtcaaccaacatataaacaatgcaccctctttggctgctggcctaattaggatgcattttcatgactgcttcgttcggggttgtgatggttcgatcttaatcaacgcgacatcgagcaaccaacaagtggagaagcttgctcctccgaatctaactgtgagaggtttcgattttatcgataaagtaaagtctgctctagaatcaaagtgccctggaatcgtctcttgcgctgatatcatcacacttgctactagagactctattgttgctattggtggaccgacatggaacgttccaacggggcgcagagacggacgtatctctaactttgccgaggctatgaacaatattcctcctcctttcggaaacttcacgactctgataaccctctttggaaaccaaggacttgatgttaaagacctcgtcttgttatccggtgcccacacgattggagtgtctcattgctcctccttctcaaaccgtctcttcaatttcaccggcgttggagaccaagatccatcgctcgacagcgaatatgccgacaatctcaaatcacggagatgtttatctatcgctgacaataccacaaaagtcgaaatggatcccggtagtcgaaacaccttcgatcttagctactaccgtcttgtcctaaaacgtcgtggactttttgagtctgacgctgcattgactatgaatcctgcggcattggctcaggtcaaacgcttcgccggaggatcggagcaagagttctttgctgagttctccaactccatggagaaaatgggaaggattggggtcaaaacagggtcggatggggagattcgaagaacatgtgcatttgttaactaaaagtgtttcttactttttctttcgcaacttttttgttttgttttaaatatcttttatattggtttttatgttccttttgtcaacttttttgggtgtttggaagaatttcgagatatgtattattgtatgtggtgaatatgtgattttcaaataaatttcacgtctgtgaaaatcgttgaactaaaaaaaaaaaaaaaaa

SEQ ID NO: 117167 - DNA, 1184 bp, Arabidopsis thaliana
agaaattaaaggagaaaaatcgatcacgatggatattcgtagtgatgatgcaaaaaaacctatgatgatgtggttcttagggatgctgttgttttccatggtggccgagtcaaatgctcaactgtcagagaattactacgcctcgacatgtcctagcgtagagctcatcgttaagcaggcggttactacaaaattcaaacaaactgtcacaacggctcctgcaacgttgcggatgttctttcacgactgcttcgtcgagggatgtgatgcgtctgtgtttatagcatctgagaatgaagacgcagagaaagacgcagatgacaataaatctctcgccggagacggatttgacaccgtgattaaagctaaaaccgctgtagaatctcaatgtcccggagttgtgtcatgtgccgatatactagctctcgccgctagagacgtcgtcgtgctcgttggagggccagagtttaaggtggagctagggagacgagacgggctcgtgtcgaaagcgtctagagtgaccggcaagttacctgaaccagggcttgacgtgagaggtctagtccagatcttcgctagtaacgggctttcattgaccgacatgatcgctctttcaggcgcacatacaattggatcctctcactgcaaccgtttcgccaaccgtctccacaatttctcgacgttcatgccagtggaccctacgatggacccggtctacgctcagcagctgatacaagcctgctctgaccccaacccagatgctgtagtagacattgacctaacgtccagagataccttcgacaatagctactaccagaacctcgtggctcggaaaggacttttcacctccgatcaagctctgtttaacgatctctcgtctcaggctacggtggtcaggtttgctaacaacgctgaagaattctacagcgcttttagctctgctatgaggaatcttggccgcgttggggttaaggttgggaatcaaggcgagattcgaagggactgctctgcttttaactagctttattgaacaaatgtctataacctaaaacatataaattatgaagcttttgatttaagcttttgctatactaaaatgtcataatccacaatggaacttctcaaaaaaaaaaaaaaaacctatttttcaggattataaaaaaaccataacattatttgaaaac

SEQ ID NO: 117168 - DNA, 1266 bp, Arabidopsis thaliana
acccggccgcacttcccgggtcgaggctcaatttatatacaacactctctctctctcggttttgtccaaacaatggctcgcttcgatattgttctactcataggtctttgcctcataatctctgtctttcccgatacaaccaccgcacaactaagccgcggtttctactccaaaacttgccccaatgtcgaacaaatcgtgagaaatgctgtccaaaagaaaataaagaagacattcgtcgccgtccctgccactctccgtctcttcttccacgactgctttgtcaatggttgtgatgcatctgtcatgatccaatcaacgcctaagaacaaggcagagaaggatcatccagataacatttcgctagctggagatggatttgatgtggtgatccaagctaagaaagcccttgactctaaccctagttgccggaacaaggtctcatgtgccgatattcttactttggccacccgagatgttgttgttgcggctggaggaccgtcctatgaagttgaacttggtaggttcgatggtttggtatcaaccgcgtcaagtgtcgaagggaacttaccaggaccttcggacaatgtagacaaacttaatgctcttttcacgaaaaacaaacttacccaagaagatatgattgctctttcagcggctcacacccttggattcgcacattgcggcaaggtctttaaaagaatccacaaattcaacggcatcaactccgtggacccaactttaaacaaggcttacgctattgagcttcaaaaggcttgtcctaagaatgtggacccaagaattgcaatcaacatggacccagtcacgcccaagacgtttgacaacacttacttcaagaatcttcaacaaggcaaaggtctcttcacctccgatcaagttctcttcacggatggtcgctctaggcccaccgttaatgcttgggcctcaaactctacggcctttaaccgcgcttttgtgatagccatgaccaaacttggccgtgttggagttaagaatagcagcaatggaaacatccgtcgtgattgtggtgcgtttaactagagctggtaatgggaaaatataagttgtcttatctcctaatttttttttcttttatccaattcaacctattttcttttcgtttattaatgtttgaatgttcattttgacgatgagaagatattattggtttttccaaaaaaaaaaaaaaaaacggccgctctagaggatccaagcttacgtacgcgtgcatagcacgtcaatagt

SEQ ID NO: 117169 - DNA, 1375 bp, Arabidopsis thaliana
  unsure (1)..(1375): unsure at all n locations
tgtgcacgtaccggtccttaatttccgggtcgacccacgcgacgcgcaaacacaacttctacaagactcaaatagtttctatttaattactaaaaagaaaaatgggtcgtggttacaatttgctattcgttctagtaacgtttttagtattggttgcagctgtaaccgcacaagggaaccgtggctcaaacagcggtggtggtcgaagccacatgttgggttttatgggaatagatgccgaaacgtagagtctattgtgagatctgtagttcagtctcatgtccggtctatcccggctaatgcacctggaattttgcgaatgcatttccacgattgctttgtccatggctgcgatggctcggttctcctcgctggtaacacctcagagagaaccgcagttccgaaccgttcattgagagggttcgaagttattgaagaagctaaggctcggcttgagaaggcttgtcctcgtaccgtttcttgtgctgatattctcacccttgcagcccgagacgccgtcgttttgaccggtggacaacgctgggaagtgcccttgggacgtctcgacggccgaatctcgcaagcctcagacgtgaacttgcccggaccaagcgactccgttgctaagcagaagcaagacttcgctgctaaaactctcaacacattagacctcgtgactcttgttggcggacacacaataggaactgctggctgcggtctagtaaggggaaggttcgttaacttcaacggcacaggacaacctgacccatcaatcgacccgagttttgtgccgctgattctggctcagtgccctcaaaatggaggcacccgagtggagttagacgagggaagtgttgacaagtttgacacatcgttcctaaggaaggtgacgtcaagtcgcgtggttctccaatccgatctagtcctatggaaggatcccgagacccgagccatcattgaacgtttattaggattacgccgaccatccttgaggttcggaaccgagttcgggaagtcgatggtcaaaatgagtctcatagaagttaagactggatcagatggggagattcgtcgggtttgttccgccatcaactaagatttaaaaaaacacaaatgtgagctttgtttttcatttatgaattcgttaattaataatcacttgttttaaataaaagcttgctacagcattttgtggtcgatggttacgttttgattttcaagtgtaagattgtacttgtaaacaaaaaatgtattatataaaagtgttatttgtttccaaaaaaaaaaaaaaaagaaaaaggcggccgctttaaaggaatccaggctacggaagggggccagccaacgtnnnnnnnnnnnnnnnnnnnnacaatcg

SEQ ID NO: 117170 - DNA, 545 bp, Arabidopsis thaliana
  unsure (1)..(545): unsure at all n locations
tattctcacccttgcagcccccgccgtccgtcgttttggtaatatactgagattattacatgcattacatatttcattcgatttcttactttcttatttatgtgtgtatttcacatgattaaaatatataacatatatatatggtcgtgtttagcggtaatttaatattggtttatgcagaccggtggacaacgctgggaagtgcccttgggacgtctcgacggccgaatctcgcaagcctcagacgtgaacttgcccggaccaagcgactccgttgctaagcagaagcaagacttcgctgctaaaactctcaaacacattagacctcgtgactcttgttggcggggcacacaataggaactgcttggctgcggtctagtaaggggaaggttcgttaacttcaaacggcacagggcaacctgacccatcaattggccccggttttttncccgtgnatttggctcagtgcccnaaaatnggggncccggtgggtttnacggggggagttttanaagtttaaaaangtncnaagnnggtccgnaaag

SEQ ID NO: 117171 - DNA, 702 bp, Arabidopsis thaliana
  unsure (1)..(702): unsure at all n locations
nnnnnnnnnnnnnnnnnnnnnnnnnnnnnnnnnnnnnnnnnnnnnnnnnnnnnnnnnnnnnnnnnnnnnnnnnnccacgcgtccgcggacgcgtgggcggacgcgtgggcacaacttctacaagactcaaatagtttctatttaattactaaaaagaaaaataggagtcgtggttacaatttgctattcgttctagtaacgtttttagtattggttgcagctgtaaccgcacaagggaaccgtggctcaaacagcggtggtggtcgaagaccacatgttgggttttatgggaatagatgccgaaacgtagagtctattgtgagatctgtagttcagtctcatgtccggtctatcccggctaatgcacctggaattttgcgaatgcatttccacgattgctttgtccatggctgcgatggctcggttctcctcgctggtaacacctcagagagaaccgcagttccgaaccgttcattgagagggttcgaagttattgaagaagctaaggctcggcttgagaaggcttgtcctcgtaccgtttcttgtgctgatattctcacccttgcagcccgagacgccgtcgttttgancggtggacaacgctgggaagtgcccttgggacgtctcgacggccgaatctcgcaagccttaacgctgggaagtgcccttgggacgtctcgacggccgaatctcgcaagcctt

SEQ ID NO: 117172 - DNA, 1280 bp, Arabidopsis thaliana
  unsure (1)..(1280): unsure at all n locations
atgannnnnnnnnnnnnnnnnnnnnnnnnnnnnnnnnnnnnnnnnnnnnnnnnnnnnnnnnnnnnnnnnnnnnnnnnnnnnncccaccaagtaacaaaaatggctatctcaaagcttattcctactcttgtgctctttgttttgttctcttttgatgttagtgttgctcatccaggtctaggatttggatggggaagtaatagtcccattggaggatctttttactcaaatctttacccacaattttaccagttctcttgtccacaagctgatgagattgttatgacggtgctcgaaaaagccatagctaaagaaccaagaatggcagcatctttactcagacttcacttccacgactgcttcgttcagggctgtgatgcatcaatcttgttggatgatagtgcaaccataagaagtgaaaagaatgctggaccaaacaagaactccgttagagggtttcaagtaatcgacgagatcaaagccaaacttgagcaagcttgtcctcaaactgtctcctgcgccgacattctagctctagctgctcgtggctcaactatactgagtggtggaccatcatgggagcttccactagggaggagagactcgaggaccgctagccttaatggcgcaaacacgaacattcctgcacctaactcaactattcaaaatctcttaaccatgttccaacgtaaaggtttgaacgaagaagaccttgtttccctatcaggaggacatacgattggagtagcgaggtgcacaacgtttaaacaaagactatacaatcaaaacggtaataaccaaccagacgagacgctagagaggtcttactactatggtctcaggtcaatttgtccaccaacaggcggtgacaacaatatttcacctctagacttagcctctcctgcaagattcgacaacacatacttcaagctccttctatggggcaaaggcttattgacatcagatgaagtgcttctcactggcaatgtaggcaagactggtgcattagtgaaagcttatgccgaagacgagagacttttcttccaacaattcgcaaagtcgatggttaacatgggaaacattcagcctcttactggttttaatggtgagatcaggaagagttgtcatgtgattaactaaagaaactgtgtgtttttgcattattattgtattaaggggtgattaagaataagtcgtgttatgtttttcgatatgttagtgatctaattaacgtctttgaatggnnnnnnnnnnnnnnnnnnnnnnnnnnnnnnnnnnnn

SEQ ID NO: 117173 - DNA, 1339 bp, Arabidopsis thaliana
  unsure (1)..(1339): unsure at all n locations
tttcatttcatcatcatggaccacaaaatgtcaatgtatttgtttgtgtcttacctagcaatctttactcttttcttcaaaggctttgtctcctcgtttccttcgggatataacaatggttacaacaatggtcacggacatggactaactagcaatctcaactatcgattctatgaccggtcttgtccgcgtcttcaaacgattgttaagtccggagtttggagagcttttaaagatgattctcgaatcgctgcatctcttcttcgactccatttccacgattgttttgtcaatggatgtgatggatctatacttctgaacgattcagaggatttcaaaggagagaagaacgctcagccaaaccgaaactcagtccgtggattcgaagtcattgaagacattaaatctgatatcgaaagttcttgtcccttaacagtttcatgcgctgacatagttgctctcgcggctagagaagctgtcgtcctcactggaggaccgttttggcccgtgcctttgggacgaagggactcattaacggcgagtgagcaagcggcgaatacaaatctgccatctccgtttgaggcgttggagaatataacagccaagttcgcgacccttggactcgacctcaaggacgttgttgtcctctcaggagcacatactataggatttgctcaatgtttcgtgatcaagcatagactcttcaacttcaagggctcaggccagcctgacccaaacctagccgcttcctcagcacttctctctaagctaaaggacacgtgtcctaacgtggactcctcagactctaagctcgctgctcttgacgcagctagctcagtcaagtttgacaatgcttactacgtgaacttaatgaacaacataggactgttggattctgatcaaaccctaatgacagatcctacggctgccgccttggtgaagtcgtacagcgagaatccgtacttgttctcgagggatttcgcagtttcaatggttaaaatggggaatatcggagttcagaccggaagtgatggagtaattcgaggaaaatgtggatttccaggttaagttatatatagactcttcacaaaatccaaatcagtctattatatatctagagctaatctagctttaatgaggaatcaaataaaccaaagtctatgaataaaatatgttttatatatatggtgtaaaagcgtccttatgtatcaatatatatatatatggatcccataaacaaaaatacttggacttgtatgtgtgttacgtttgtgtgtaatggaaaatgtatttgtctttgtnnnnnnnnnnnnnnnnnnnnnnnnnnnnnnnnnnnnnn

SEQ ID NO: 117174 - DNA, 1203 bp, Arabidopsis thaliana
tctcatacgactcactttagggaaagctgctacgcctgcaggtaccggtcccgaattcccgggtcgacccactcgctccgtcttttaaacaagctatctagataatgaaaacacaaaccaaagtgatgggaggacatgtcttgcttactgttttcactctttgtatgctttgttcaggggttagggcacagctaagccctgacatttatgctaaatcgtgccccaatctagttcaaattgtccgtaaacaagttgccatcgccctgaaggccgagatacggatggctgcttctctcattcgtcttcatttccacgactgctttgttaatgggtgtgatgcgtcgttattgttggatggagctgacagcgagaaactcgcgatcccaaacattaactctgctagaggatttgaagtaattgatacaatcaaagccgctgtggaaaacgcatgtcctggtgttgtttcttgtgctgatatcctcactttggccgctcgtgactccgttgtattgagtggagggcctgggtggagagtggcattaggaagaaaagatggattggtggcaaatcagaacagtgcaaacaatctaccatctccttttgaacctttagacgccattatcgccaaatttgtagccgtaaaccttaacatcaccgacgtcgtagctttatcaggagctcacacctttggacaagcgaagtgtgctgtcttcagcaaccgtctgttcaactttaccggcgcgggaaatcccgacgcaacacttgagacatcactcttgtctaatctgcaaacagtttgtccgctcggaggaaatagtaacataacagcacctcttgacaggagcactacggacaccttcgacaacaattatttcaagaacctgcttgaaggaaaaggtcttttgagttctgatcagattctgttctcgagtgacttagccgtgaacaccacaaagaaactagtggaggcttatagtcggagccagagcttgtttttcagggacttcacatgtgcgatgatcagaatgggaaacatttcgaatggagctagtggggaggttaggacaaactgcagggttatcaataattagcatgtgtgtgtgttttcgagtttatgtaatgtttgggagttgatcggtctcgtgtgtatcagaatgatcacgtgtgtaataataagaattaatggggtttgttggtttgcct

SEQ ID NO: 117175 - DNA, 2424 bp, Arabidopsis thaliana
  unsure (1)..(2424): unsure at all n locations
ccacgcgtccgcaccccaccaccgataactcaattaactctcttctcttggcttctgccgcgctgagccaccatcgtcctcttctcttcctcttcgatctctcctgaatcctcaaaccctggagagagagagagagagtgacgggggaagaagatgacttctgctttgtatgcttccgatttgtttaagcagctcaagtcaattatggggacagattcgttatccgacgatgttgtacttgtgattgcaacgacgtctttggcactagtagctggatttgtggtgttgttatggaagaaaacgacggcggatcggagcggggagctgaagcctttgatgatccctaagtctcttatggctaaggacgaggatgatgatttggatttgggatccgggaagactagagtctctatcttcttcggtacgcagactggaacagctgagggatttgctaaggcattatccgaagaaatcaaagcgagatatgaaaaagcagcagtcaaagtcattgacttggatgactatgctgccgatgatgaccagtatgaagagaaattgaagaaggaaactttggcatttttctgtgttgctacttatggagatggagagcctactgacaatgctgccagattttcaaaatggtttacggaggaaaatgaacgggatataaagcttcaacaactagcatatggtgtgtttgctcttggtaatcgccaatatgaacattttaataagatcgggatagttcttgatgaagagttatgtaagaaaggtgcaaagcgtcttattgaagtcggtctaggagatgatgatcagagcattgaggatgattttaatgcctggaaagaatcactatggtctgagctagacaagctcctcaaagacgaggatgataaaagtgtggcaactccttatacagctgttattcctgaataccgggtggtgactcatgatcctcggtttacaactcaaaaatcaatggaatcaaatgtggccaatggaaatactactattgacattcatcatccctgcagagttgatgttgctgtgcagaaggagcttcacacacatgaatctgatcggtcttgcattcatctcgagttcgacatatccaggacgggtattacatatgaaacaggtgaccatgtaggtgtatatgctgaaaatcatgttgaaatagttgaagaagctggaaaattgcttggccactctttagatttagtattttccatacatgctgacaaggaagatggctccccattggaaagcgcagtgccgcctcctttccctggtccatgcacacttgggactggtttggcaagatacgcagaccttttgaaccctcctcgaaagtctgcgttagttgccttggcggcctatgccactgaaccaagtgaagccgagaaacttaagcacctgacatcacctgatggaaaggatgagtactcacaatggattgttgcaagtcagagaagtcttttagaggtgatggctgcttttccatctgcaaaacccccactaggtgtattttttgctgcaatagctcctcgtctacaacctcgttactactccatctcatcctgccaagattgggcgccaagtagagttcatgttacatccgcactagtatatggtccaactcctactggtagaatccacaagggtgtgtgttctacgtggatgaagaatgcagttcctgcggagaaaagtcatgaatgtagtggagccccaatctttattcgagcatctaatttcaagttaccatccaacccttcaactccaatcgttatggtgggacctgggactgggctggcaccttttagaggttttctgcaggaaaggatggcactaaaagaagatggagaagaactaggttcatctttgctcttctttgggtgtagaaatcgacagatggactttatatacgaggatgagctcaataattttgttgatcaaggcgtaatatctgagctcatcatggcattctcccgtgaaggagctcagaaggagtatgttcaacataagatgatggagaaggcagcacaagtttgggatctaataaaggaagaaggatatctctatgtatgcggtgatgctaagggcatggcgagggacgtccaccgaactctacacaccattgttcaggagcaggaaggtgtgagttcgtcagaggcagaggctatagttaagaaacttcaaaccgaaggaagatacctcagagatgtctggtgattgatgatatgatttattggtaattctcttctgctttctcaacttttcttggtacgctgtccttaccatttagatatttatttgtttattttccttcgtctcccttcttttagtcaaacatgaatgatttgtcaaagttttctttgtatgaacaaaagtataaactacaaaataaatctgtgagagtgatna

SEQ ID NO: 117176 - DNA, 2689 bp, Arabidopsis thaliana
  unsure (1)..(2689): unsure at all n locations
cagctctctacgactcactattgggaaagctggcacgcctgcaggtaccggtccggaattcccgggtcgacccacgcgtgcgctctcacctacaccacacctaaccaaaccccctacgattcacacagagagagatcttcttcttccttcttcttccttcttctttcttcttctttcttcttctagctacaacatctacaacgccatgtcctcttcttcttcttcgtcaacctccatgatcgatctcatggcagcaatcatcaaaggagagcctgtaattgtctccgacccagctaatgcctccgcttacgagtccgtagctgctgaattatcctctatgcttatagagaatcgtcaattcgccatgattgttaccacttccattgctgttcttattggttgcatcgttatgctcgtttggaggagatccggttctgggaattcaaaacgtgtcgagcctcttaagcctttggttattaagcctcgtgaggaagagattgatgatgggcgtaagaaagttaccatctttttcggtacacaaactggtactgctgaaggttttgcaaaggctttaggagaagaagctaaagcaagatatgaaaagaccagattcaaaatcgttgatttggatgattacgcggctgatgatgatgagtatgaggagaaattgaagaaagaggatgtggctttcttcttcttagccacatatggagatggtgagcctaccgacaatgcagcgagattctacaaatggttcaccgaggggaatgacagaggagaatggcttaagaacttgaagtatggagtgtttggattaggaaacagacaatatgagcattttaataaggttgccaaagttgtagatgacattcttgtcgaacaaggtgcacagcgtcttgtacaagttggtcttggagatgatgaccagtgtattgaagatgactttaccgcttggcgagaagcattgtggcccgagcttgatacaatactgagggaagaaggggatacagctgttgccacaccatacactgcagctgtgttagaatacagagtttctattcacgactctgaagatgccaaattcaatgatataacattggcaaatgggaatggttacactgtgtttgatgctcaacatccttacaaagcaaatgtcgctgttaaaagggagcttcatactcccgagtctgatcgttcttgtatccatttggaatttgacattgctggaagtggacttacgatgaaacttggagatcatgttggtgtactttgtgataacttaagtgaaactgtagatgaagctcttagattgctggatatgtcacctgatacttatttctcacttcacgctgaaaaagaagacggcacaccaatcagcagctcactgcctcctcccttcccaccttgcaacttgagaacagcgcttacacgatatgcatgtcttttgagttctccaaagaagtctgctttagttgcgttggctgctcatgcatctgatcctaccgaagcagaacgattaaaacaccttgcttcacctgctggaaaggatgaatattcaaagtgggtagtagagagtcaaagaagtctacttgaggtgatggccgagtttccttcagccaagccaccacttggtgtcttcttcgctggagttgctccaaggttgcagcctaggttctattcgatatcatcatcgcccaagattgctgaaactagaattcacgtcacatgtgcactggtttatgagaaaatgccaactggcaggattcataagggagtgtgttccacttggatgaagaatgctgtgccttacgagaagagtgaaaaactgttcctcgggcggccgatatttgttaggcaatccaacttcaagcttccttctgattctaaggtaccgatcatcatgatcggtccagggactggattagctccattcagaggattccttcaggaaagactagcgttggtagaatctggtgttgaacttgggccatcagttttgttctttggatgcagaaaccgtagaatggatttcatctacgaggaagagctccagcgatttgttgagagtggtgctctcgcagagctaagtgtcgccttctctcgtgaaggacccaccaaagaatacgtacagcacaagatgatggacaaggcttctgatatctggaatatgatctctcaaggagcttatttatatgtttgtggtgacgccaaaggcatggcaagagatgttcacagatctctccacacaatagctcaagaacaggggtcaatggattcaactaaagcagagggcttcgtgaagaatctgcaaacgagtggaagatatcttagagatgtatggtaacgaaactattgaagccacacactcactgtgtacttatatttatatatatacggcacagaaattgccacattatgatgatcattaagtttgtgatcgcaagaagaaaggaactcaaaatgttttccatttttaatttcttttcatatattttgacaactctatttttttaactcttgttatatatcccccacccaatagtaagaaaaaatgcataagatgttatggggtaaaaaaaaaaagcggccgnnnnnnnnnnnnnnnnnnnnnnnnnnnnnnnnnnnnnnnnnnnnnnnnnnnnnnnnnnnnnnnnnnnnnnnnnnnnnnnnnnnnnnntnnnnnnttagc

SEQ ID NO: 117177 - DNA, 528 bp, Arabidopsis thaliana
gcccccccctggctgaggagggaaaccataagctggatatcgaattcggggccgcgctaaagcacgatatgaaaagaccagattcaaaatcgttgatttggatgattacgcggctgatgatgatgagtatgaggagaaattgaagaaagaggatgtggctttcttcttcttagccacatatggagatggtgagcctaccgacaatgcagcgagattctacatttggttcaccgaggggaatgacagaggagaatggcttaagaacttgaagtatggagtgtttggattaggaaacagacaatatgagcattctaataagggtgccaaagttgtagatgacattcttgtcgaacaaggtgcacagcgtcttgtacaagttggtcttggagatgatgaccagtgtattgaagatgactttaccgcttggcgagaagcattgtggcccgagcttgatacaatactgagggaagaaggggatacagctgttgccacaccatacactgcagctgtgttagaatacagagcttc

SEQ ID NO: 117178 - DNA, 501 bp, Arabidopsis thaliana
  unsure (1)..(501): unsure at all n locations
tctatacgacttatatagggaacgctggtacgcctgcaggtaccggtccggaattcccgggtcgacccacgcgtccgcccacgcgtccgcgagattctacaaatggttcaccgaggggaatgacagaggagaatggcttaagaacttgaagtatggagtgtttggattaggaaacagacaatatgagcattttaataaggttgccaaagttgtagatgacattcttgtcgaacaaggtgcacagcgtcttgtacaagttggtcttggagatgatgaccagtgtattgaagatgactttaccgcttggcgagaagcattgtggcccgagcttgatacaatactgagggaagaaggggatacagctgttgccacaccatacactgcagctgtgttagaatacagagtttctattcacgactctgaagatgccaaattcaatgatataaacatggncaatgggaatggttacactgtgtttgatgctcaacatccttacaaagc

SEQ ID NO: 117179 - DNA, 785 bp, Arabidopsis thaliana
  unsure (1)..(785): unsure at all n locations
nnnnnnnnnnnnnnnnnnnnnnnnnnnnnnnnnnnnnnnnnnnnnnnnnnnnnnnnnnnnnnnnnnnnnnnnnnnnnnnnnnnnaccgacccctttttttttttgtttcagtaacacacacttttaattatatgcttgggaaaatatagtaacatattgaaatatagttgtaattgtgcaaaaacaaactcttaaatcatggcatttcacaaaatgctaattagaggcagcagtcatcattttagagaattcgtggaaagaaagaaaaccatcgccatcaaggtcggcttctcggaccatatgctccgcttcttctgctgttatcttcatccccatgtccttcattccttctcccaactcaagttgagatatgagaccatctccgtctctgtcgaacactctgaatacctcaattaactcatccgatgctgattcctgagaagtgttttgagccataatatacaagaaatcatcaaaagtgatgccaccgttgccaaagatgtcaacatcgctcatcatctgttgcagttgttccgcctttggattcttccccatcgacttcatcactttcgttagcttctccttcgtgatgaacccatcggaatctttgtctatgagacagaaggcttcgtaaaactcttggatctgttcatctgtgaaagcatccgccatatcttcgatcacaaagaaaagtcaaagtctgtctttgattcaatctgatctcgagccgaattccgagcttacgtacgcgtgcatgcgacgtcatagtcttctataggtcacct

SEQ ID NO: 117180 - DNA, 1557 bp, Arabidopsis thaliana
gtggaaagaaagaaaaccatcgccatcaaggtcggcttctcggaccatatgctccgcttcttctgctgttatcttcatccccatgtccttcattccttctcccaactcaagttgagatatgagaccatctccgtctctgtcgaacactctgaatacctcaattaactcatccgatgctgattcctgagaagtgttttgagccataatatacaagaaatcatcaaaagtgatgccaccgttgccaaagatgtcaacatcgctcatcatctgttgcagttgttccgcctttggattcttccccatcgacttcatcactttcgttagcttctccttcgtgatgaacccatcggaatctttgtctatgagacagaaggcttcgtaaaactctttgacttttctttgtgttggtggctccggaggaaataccaacaacacggctacgatggaaactagaaaggcgaggccacaagagaaagtaaattgtccaagatgcaactcaacaaacacaaagttctgttattacaacaactacagtctcacgcaaccaagatacttctgcaaaggttgtcgaaggtattggaccgaaggtggctctcttcgtaacgtcccagtcggaggtagctcaagaaagaacaagagatcctctacacctttagcttcaccttctaatcccaaacttccagatctaaacccaccgattcttttctcaagccaaatccctaataagtcaaataaagatctcaacttgctatctttcccggtcatgcaagatcatcatcatcatgctcttgagcttctaagatccaatggagtctcttcaagaggcatgaacacgttcttgcctggtcaaatgatggattcaaactcagtcctgtactcatctttagggtttccaacaatgcctgattacaaacagagtaataacaacctttcattctccattgatcatcatcaagggattggacataacaccatcaacagtaaccaaagagctcaagataacaatgatgacatgaatggagcaagtagggttttgttccctttttcagacatgaaagagctttcaagcacaacccaagagaagagtcatggtaataatacatattggaatgggatgttcagtaatacaggaggatcttcatggtgaaaaaaggttaaaaagagctcatgaactatcagctttcttctctttttctgtttttttctcctattttattatagtttttactttgatgatcttttgttttttctcacatggggaactttacttaaagttgtcagaacttagtttacagattgtctttttattccttctttctggttttccttttttcctttttttatcagtctttttaaaatatgtatttcataattgggtttgatcattcatatttattagtatcaaaatagagtctatgttcatgagggagtgttaaggggtgtgagggtagaagaataagtgaatacgggggcccggtgtgtaatcagtgagatctgtattcatcgtttaaaaaatttgtagaagtatttctgtaatttattcatattttacaaccc

SEQ ID NO: 117181 - DNA, 673 bp, Arabidopsis thaliana
  unsure (1)..(673): unsure at all n locations
atgatcctgccagcaannnnnnnnnnnnnnnnnnnnnnnnnnnnnnnnnnnnnnnnnnnnnnnnnnnnnnnnnnnnnnnnnnnccacgcgtccggaaatgataaacgtaaagccaatggagcaaatgatttctagcaccaacaacaacacaccgcaacaacaaccaacattcatcgccaccaacacaaggccaaacgccaccgcatccaatggtggctccggaggaaataccaacaacacggctacgatggaaactagaaaggcgaggccacaagagaaagtaaattgtccaagatgcaactcaacaaacacaaagttctgttattacaacaactacagtctcacgcaaccaagatacttctgcaaaggttgtcgaaggtattggaccgaaggtggctctcttcgtaacgtcccagtcggaggtagctcaagaaagaacaagagatcctctacacctttagctgcaccttctaatcccaaacttccagatctaaacccaccgattgcttttctcaagccaaatccctaataagtcaaataaagatctcaactngctatctttcccggtcatgcaagatcatcatcatcatgctcttgagcttctaagatccaatggagtctcttcaagaggcatgaacacgttcttgcctggtcaaatgatggattcaaactc

SEQ ID NO: 117182 - DNA, 497 bp, Arabidopsis thaliana
  unsure (1)..(497): unsure at all n locations
cttccnggnccnatatnngccggcttcntgcngctggnaaccttcaatcccnaatgncccttgnttccgtcctcccaaactcaaggttgaagatatgagaccatccnccgtntctgtcgaacactctgaatacctcaattaactccatcccggatgctgatccctgagaagtgttttgagcccataatatacaaagaaatcattaaaagtgatgccaccgttgccaaagatgtcaacatcgctcatcatctgttgcagttgttccgcctttggattcttccccatcgacttcattactttcgttagcttctccttcgtgatgaacccatcggaatctttgtctatgagacagaaggcttcgtaaaactcttggatctgttcatctgtgaaagcatccgccatatcttcgatcacaaaggaaagttcaaagtcttgtctttgattcaattctgactgatcacgattcncnttaaattccggacngcagtgggccgccc

SEQ ID NO: 117183 - DNA, 786 bp, Arabidopsis thaliana
cgcggtaccggtccggaattcccgggtcgacccacgcgaaatggggagatctatggtgctaatctcggcggttgtactggcttttctagtggcggcgccgataccagaagtaacagccaagaaatatttagtcggcgacaaaaagttctggaaccccaacattaactataccctatgggctcaaggcaaacatttctacgtcggagactggctttattttgtgttctatagagaccaacacaacattcttgaggtaaacaaggctgattatgaaaaatgtatctccaaccgcccaatacgtaattatacacgtggagctgggagagatattgttcctctctatgagactagacgttattatctacttgatggaagaggtggttgcgttcaaggcatgaagctagatgttttagttgagactccttcttcttcttcttcttttacctcctcctcctgcagcacaataagaaatcaattttatgtgtatctatataagttgttttggatttttttccggcgagttcaccaacttgataaggcaaatgttgttttcgtactaagagaagtgaacatggtggtatatttcataatatgtttttatgaatacgttataattcagatttataaataaataaaagggttttggtttggggggggttaaaaaaaaaaaaaaaaaaaaaagggcgcgggtctggtttcttaagaagggattcccaaaggcctttgacggataaccccccgtggccattgtccaaaacggtcaaaataaggatatattttctttat

SEQ ID NO: 117184 - DNA, 577 bp, Arabidopsis thaliana
  unsure (1)..(577): unsure at all n locations
agagaaatggggagatctatggtgctaatctcggcggttgtactggcttttctagtggcggcgccgataccagaagtaacagccaagaaatatttagtcggcgacaaaaagttctggaaccccaacattaactataccctatgggctcaaggcaaacatttctacgtcggagactggctttattttgtgttctatagagaccaacacaacattcttgaggtaaacaaggctgattatgaaaaatgtatctccaaccgcccaatacgtaattatacacgtggagctgggagagatattgttcctctctatgagactagacgttattatctacttgatggaagaggtggttgcgttcaaggcatgaagctagatgttttagttgagactcctcctcctccttcctctttttagttctcctcctcngnaccattaggantcatttttatgnggancccanaagtggtttngattttttccggngggtcaccacttngtaagggaatnttntttcggnctagggngngttttntggaaaattcnaaaaaggttttggaacggtaannggttaaaaaaagga

SEQ ID NO: 117185 - DNA, 2251 bp, Arabidopsis thaliana
tcggctctcgcatcgatgaagaacgtagcgaaatgcgatacttggtgtgaattgcagaatcccgtgaaccatcaaatctcaataaagcaaaacgaacaagaaaatggcgagcacggaagctctcttacccgtcacgtccctacaagatccattatctgagtcaagatccgaccagatcccggagacccgtcggagacgacccatcaaagttcatcttgcagtctattccggtttgctcttgatcgctttgtacgtcactctcatcgtcacacacgacggctccaaggctgaaatagcgacggagtcacgtcctcgtatggccggcgtgtcggagaagagcaacgacggggtttggatatcatccgatgatgggaaagttgaagcgttcccgtggaacaatactattttgtcgtggcaacgcacggcgtttcatttccagcctgagaaaaattggatgaacgatcctaatggtccattgttctataagggatggtaccatttcttctatcaatacaacccaaatgcagctgtgtggggtgacattgtttggggtcacgccgtgtcaaaagaccttatccactggctttatctcccaatagccatggttcctgaccaatggtacgatgcaaacggtgtctggaccggttcagccacttttctagatgatggctccattgtcatgctctacaccggttccactgacgaattcgtacaggttcaaaaccttgcctatcctgaagacccaagcgacccacttttgttgaaatgggtcaagttctccggtaaccctgtcctcgtaccgcctccaggtattggtgcaaaggacttccgtgacccaacaacagcctggaagacatcttctggaaaatggcgaatcaccatcggctcaaagatcaatagaaccggaatatctctcatttatgacactaccgatttcaaaacctacgagaaacacgaaaccttgttgcaccaagtccccaacaccggaatgtgggagtgcgttgatttttacccggtgtcgaagactcagctcaatgggctcgatacttcggtcaacggaccagatgtcaagcatgtcatcaaggctagcatggacgatactagaattgaccattatgccattgggacgtacgatgattcaaacgctacatgggtccccgataatccttctatcgatgtcggaatcagtaccggtttgagatacgattacgggaaatattatgcgtcaaagacgttttacgatcaaaataagggacgaagaatcttatggggttggatcggtgaatctgacagtgaagctgctgatgtacaaaagggttggtcttctgttcagggcatcccaagaactgttgtcttggacacaaggacgcataaaaacttagtccagtggccagttgaggaaatcaaatcattgagactaagcagcaagaaatttgacatgacgattggaccagggactgtggttccggtcgatgtgggttccgccactcagctagacatagaggctgagttcgagatcaagaccgatgatctcaagttattctttgatgatgactctgtggaggccgacaataaattcagctgcgaaacaaacggaggctccacagcgcgtggtgctttagggccttttggattctcggttctcgctgacgagagcttgtcagaacaaactccggtttacttctatgtgactaagggaaaacattcaaaactcaatactgtcttctgcactgacacctcaaggtcgactttggcaaacgatgtggtgaaaccgaatctatggaagcttcgtaccggtcttaaaaggagagaaattgacaatgagaatcttggttgatcattcgatcgtagaaggattcgcacaaggtggaagatcatgtattacctcaagagtatatcccacaaaagctatctatggagctaccaagctcttcttgttcaataacgccattgatgcgaccgttacggcgtcgtttacggtctggcaaatgaacaatgcttttattcatccttactcttcagacgatctcggtgttccttccagcacctgatgagttttctcatcctttcttgttagtcttttgattgttgttaaataatatgggtttgattttatctgtgtttgattcatcatgtgagtgaagagaagaaaataacatttattttctccttttttgaaagagtaaattattttctttgtacaacatcaacaaatatgaaagaacaacgtcaccgattaaaaaaaaaaaaa

SEQ ID NO: 117186 - DNA, 798 bp, Arabidopsis thaliana
  unsure (1)..(798): unsure at all n locations
aagggaaagttggtaccctgcaggtaccgttccgaattcccgggtcgacccacgcgtccggggctgaggttttcttttaccttgctcagaacaatgtcatgtttgaaggtatcctcctaaaaccgagcatggtgactcccggagctgagtctaaagacagagctactcctgaacaagttgccgcctacaccctcaagctcctccgcaacagagtccctcccgcagtccccggaatcatgtttttgtccggaggacagtcggaggtggaggcaacactcaacttgaacgcaatgaaccaggcaccaaacccatggcacgtgtccttctcctacgcacgtgcgttgcagaacacttgtctgaaaacatggggcggcagacccgagaacgtgaacgcagctcagaccactctcttggcccgtgccaaggccaattcgttggctcagctcggaaaatacaccggtgagggtgagtccgaagaggctaaggagggcatgttcgtcaaagggtacacctattgaagagatgatgctgtgaaaaaagagatgaagcagatgttttaatcacatttgtttttgagtttgcttgttattaatcatgtcaaatcattattttctctgcttactttgcgttagctactccttttaataagttctattatattgaagttatctaaaaaaaaaaaaaaaaaaaaaaaggaaaaagggcggccgctctagaggatccaagcttacgtacgcgtgcatgcgacgtcataactcttctatagtgctcctaannnnnnntagctggaaaaatcat

SEQ ID NO: 117187 - DNA, 1545 bp, Arabidopsis thaliana
  unsure (1)..(1545): unsure at all n locations
nnnnncagctctctacgactcactatatggaaagctggcacgcctgcaggtaccggtccggaattcccgggtcgacccacgcgtccgcggacgcgtgcgagcgttttaagctctcactagcaagcaagtactagcaacaatggcgtcaagcactgcgactatgctcaaagcctcaccggtgaaatctgattgggttaagggacagagtcttctcctccgtcaaccttcctctgtctcagctattcgcagccacgtggcaccttccgctctcaccgtccgagccgcttctgcttacgccgatgagctcgtcaaaaccgctaaaacaatcgcgtctccgggacacggaattatggcgatggatgagtccaacgcgacttgtggaaagcgtttggcgtcaattgggctagagaacacggaggctaaccgtcaagcttacaggacgttgcttgtgtcggctccaggacttggacagtacatctccggagctatcctgttcgaggagactctgtaccaatccaccactgatggcaagaaaatggttgatgttctcgtcgagcagaacattgtccctggtatcaaagtcgacaagggtttggtgccacttgttggatccaacaatgagtcatggtgccaaggactagatggtctatcatctcgaactgctgcttactatcaacagggtgcgcgtttcgccaaatggcgtactgtcgtgagcattcctaacggtccgtctgccctcgccgtcaaagaagctgcttggggtcttgctcgatacgctgccatttcacaggacagcggtttggttccgattgttgagccagagatcttgttggatggagaacacgacattgacagaacatacgacgtagcagagaaggtttgggctgaggttttcttttaccttgctcagaacaatgtcatgtttgaaggtatcctcctaaaaccgagcatggtgactcccggagctgagtctaaagacagagctactcctgaacaagttgccgcctacaccctcaagctcctccgcaacagagtccctcccgcagtccccggaatcatgttttttgtccggaggacagtccggaggtggaggcaacactcaacttgaacgcaatgaaccaggcaccaaacccatggcacgtgtccttctcctacgcacgtgcgttgcagaacacttgttctgaaaacatggggcggcagaaccccgagaacgtgaacgcagctcagaccactcttctttggcccgtgccaaggccaattcgttggctcacttccggaaaataccaccggtgagggtgagtccgaagaggctaaggagggcatgttcgtcaaagggtacaccttttgaagggatgatgctgtgaaaaaggagttgaggcagttgttttaatcacatttgttttggagtttgcttgttattaatcatgtcaaatcattattttcgtctgcggactccgcgttagctactccttctaataagttctattatattgaagttatctatctctcttgatctatttaaacttgaaactacaactattccat

SEQ ID NO: 117188 - DNA, 722 bp, Arabidopsis thaliana
  unsure (1)..(722): unsure at all n locations
cggccaaattaaattttccaggctggcggaaaccaaaacgggagggcttccccacaagcggcgttgggttgctttaagggggccttttggaatttctcgggttcctcgctaacgaggggcttgtcagaacaaactccggtttacttctatgtgactaagggaaaacattcaaaactcaatactgtcttctgcactgacacctcaaggtcgactttggcaaacgatgtggtgaaaccaatctatggaagcttcgtaccggtcttaaaaggagaggaattggcaatgagaatcttggttgatcattcgatcgtagaaggaattcgcccaaggtggaagatcatgtattacctccagagtatatcccacaaaagctatctatggagctacccagctcttcttgttccataacgccaattgatgcgaccggtacggcgtcgttttcggtctggccaaatgaaccaaggcttttaattcatccttacttcttcagacggtctcggtggtccttccaagcacctgatgaagttttctcaccctttctggttagtcttttgattggtggtaaaataataggggttggattttatcggggttggatccaccaggtgagtgaagaggcggccgtaccattaattttttccttttttgaaaaattaagcgcccgcgaattcaatatcaagctaatcgataccgtcgactcgaagggggggnnnnnnnnncaa

SEQ ID NO: 117189 - DNA, 604 bp, Arabidopsis thaliana
  unsure (1)..(604): unsure at all n locations
ttaggtgacactatagaagactatgacgtcgcatgcacgcgtacgtaagctcggaattcggctcgagctcgagccgattcggctcgagcggcataagcgtttactgtgagtctctcaaagaaaccaaaggcagagaaaagagataacacacacaaaaaaaaatggcatcaacctcactcctcaaggcttctccggtgttggacaaatccgaatgggtcaagggacaaagcgttctcttccgtcagccttcttccgcttctgtcgtcctccgcaaccgtgccacctccctcaccgtccgtgccgcttcctcctacgccgatgagcttgttaagacagcgaaaactattgcgtctcccggacgtggaatcttggcgatggacgagtcaaacgcgacttgcgggaaacgtttggattcgatagggctagagaacactgaggcaaatcgtcaagctttccggactttgctggtctctgcaccgggactcggacagtacgtcttccggcgcaattctatttgaggagactctgtaccagtctaccaccgaaggcaagaaaatggtcgacgtcctcgtcgagcagaacattgtccctggtttaaagnngg

SEQ ID NO: 117190 - DNA, 1323 bp, Arabidopsis thaliana
tttggtccgggagagtccagctaaataaagaatgcggaggcccccagaggagctcggctattgtcacccgggaacttccagtcagcctagtagattgcagctaggctcttttgatttatggggtgggcaggccgtcttagtggtgacgtttgtctgttaattcgttacgacgagcctcagctgtaactagttcgtgaggctcccttccggccggcttctagagggactatgccgtttagccaaggaagtttaggcaaaaccaggttgtgaccccttaatgttatggccccacgcgcgctacactgatgtattcaacgagttcacaccttggccgaaaggcccgggtaatctttgaaatttcaccgtgatggggatagatcattgcaaattgttggtcttcaaccggaggaattccttagtaagcgcgagtcatcagctcgcgttgactacgtccctgccctttgtacacaccgcccgtcgctcctaccgattgaatgatccggtgaagtgttcggatcgcggcgacgtgggtggttcgccgcccgcgacgtcgcgagaagtccactaaaccttatcatttagaggaaggagaagtcgtaacaaggtttccgtaggtgaacctgcggaaggatcattgtcgatacctgtccaaaacagaacgacccgcgaaccaaagatcaccactctcggtgggccggtttcttagccgattccttgcccgccggatccgtggtttcgcgtatcggcatgatcgggagcttttatctcggtcttgtcgtgcgcgttgcttccggatatcacaaaaccccggcacgaaaagtgtcaaggagaaaaaaaaaaaaaaaaaaagattcgcctccccggagacggagtgtgggcggatgctgtgctgcgaactgaagtctaaaacgactgtcggcaacggatatctcggctctcgcatcgatgaagaacgtagcgaaatgcgatacttggtgtgaattgcagaatcccgtgaaccatcgagtctttgaacgcaagttgcgccccaagccttctggccgagggcacgtctgcctgggtgtcacaaatcgtcgtccctcaccatcctttgctgatgcgggacggaagctggtctcccgtgtgttaccgcacgcggttggcctaaatccgagccaaggacgcctggagcgtaccgacatgcggtggtgaacttgatccattacattttatcggtcgctcttgtccggaagctgtagatgacccaaagtccatatagcgaccccaggtcaggcgggattacccgctgagtttaagcatatcaataagcggaggaaaagaaac

SEQ ID NO: 117191 - DNA, 652 bp, Arabidopsis thaliana
  unsure (1)..(652): unsure at all n locations
cccacgcgtccgcccacgcgtccgcccacgcgtccgcctgaagccaagcatggttactccaggagctgaggccacagacagagctactcctgagcaggttgcttcctacactctcaagctccttcgcaacagaatccctcctgctgtccccggaatcatgttcttgtctggtggacagtccgagttggaggcgaccttgaacttgaacgcaatgaaccaggcaccgaacccatggcacgtgtccttctcctacgcacgtgccttgcagaacacttgcttgaagacatggggaggcaaggaagagaacgtgaaggcggctcaggacattctcttggccagagccaaagccaattcgctggctcagctcgggaaatacactggagaaggcgagtctgaggaagccaaggagggtatgtttgtaaaaggctacacctactaagctatttgtaataatggttccatagatcaaaactcaaaaacttgagcttgattctggtcatttgagttattatactcttcttcaggtataaaagtcagttctgtgttatcatgtgagactagttttgtttcttcatggttaatatcttagtacctactcgttactactaaaaaaaaaannnnnnnnnnnnnnnnnnnnnnnnnnnnnnnnnnn

SEQ ID NO: 117192 - DNA, 704 bp, Arabidopsis thaliana
  unsure (1)..(704): unsure at all n locations
tncgttcattccnggnccttttccnatcccaacnctatcnnngaanggnanctgtnggcccgggtacattccgnttcccggngnccccccgtccggnnttcccctggcaggtgcttcctacactntcaagctncttcgcaacagaatccctcctgtntccccggaatcatgttcttgtctggtggaccagtccgatttggaggcgaccttgaacttgaacgcaatgaaccaggcaccgaaccccatggcacgtgtccttctcctacgcacgtgccttgcagaacacttgcttgaagacatggggaggcaaggaagagaacgtgaaggcggctcaggacattctcttggccagagccaaagccaattcgctggctcagctcgggaaatacactggagaaggcgagtctgaggaagccaaggagggtatgtttgtaaaaggctacacctactaagctatttgtaataatggttccatagatcaaaactcaaaaacttgagcttgattctggtcatttgagttattatactcttcttcaggtataaaagtcagttctgtgttgaaaaagactgaaacatgcttaaaaagagaacttacaaagattagagaggcgggtcttccggttctagttctctggactattttccttaaagtagctcctgcatatggtttgattgttgcccagattgtcgagatgatgactcgg

SEQ ID NO: 117193 - DNA, 1217 bp, Arabidopsis thaliana
gcacagactttataatctccctatctgcaaccacccgcccgcggagcagcagtacttatgttggcaaattaaggtctggttttctgggaaccaagttcacaatatatgacaaccaaacagcatcatccacagcacaagcccaacctaaccgaagactccacccgaaacaagcggctcctaaactacctacgaatagctctaccgtaggaaacataacctacgagctcaatgttcttcgcacaaggggacctagaagaatgcactgcgctatggattctatacccctctcttctgttattgctgaaccgtcagtagttcaaggcatagaagaggaagtctcttcctctccttcaccaaaaggagaaaccatcacaacagtcaaagagattcctgataattctctaagcttaagggaccaaccgctagttctcaaaaacaaatccccaagatggcatgagcagttgcagtgctggtgcctcaacttcaagggaagagtgactgtggcttcagttaagaacttccagcttgttgcagagattgacgcttctttggatgcaccgcctgaagaacatgagagggtgatcttacagtttggcaaaatcggtaaggatattttcaccatggattatcgctaccctctatctgcttttcaagcctttgctatatgcattagcagctttgacaccaaaccggcatgtgaagggtaaactttaacccaccgagttaaatccatctctgcaaatcatcatagaaggcttttcttatctttaggtttcaatgtatcaatccacgaaaagctctttgtatgtagattgttgtagctcttttgaactatgctttaaatccggatctccaaaatcactgtgtcaaatgttttatggaggtcttggttgataagcttactgaagttatgattgttatatccaatgtaatatataaacaaaagccattgcacaacaataataactaatctgattatagactcttcatgtggtatcaacatcagtatctttcatagtccatgttcttcaaacttctcctgctcaaatttctcatctcagtgttgaataagtgagaaactccatcgatgtaaactgaaaaggttggtgcggaataggatttggtctagggccgtaaactttgatctggcggatatgagtatctctcccgttgaggtgatttgacaaaatggctatttgtaacataaatgtattgac

SEQ ID NO: 117194 - DNA, 551 bp, Arabidopsis thaliana
attgggtgacactatagaagagctatgacgtcgcatgcacgcgtacgtaagctcggaattcggctcgagaaagcgttctcttccgtcagccttcttccgcttctgtcgtcctccgcaaccgtgccacctccctcaccgtccgtgccgcttcctcctacgccgatgagcttgttaagacagcgaaaactattgcgtctcccggacgtggaatcttggcgatggacgaggcaaacgcgacttgcgggaaacgtttggattcgatagggctagagaacactgaggcaaatcgtcaagctttccggactttgctggtctctgcaccgggactcggacagtacgtctccggcgcaattctatttgaggagactctgtaccagtctaccaccggaggccagaaaatgggcgacgtcctcgtcgagcagaacattgtccctggtatcaaaggcgacaagggtttggtgccacttggtggatccaaccatgagtcaatggtgccaaggactcagatggtctatcatctcgaactgctgcttactatcaacagggtgcgc

SEQ ID NO: 117195 - DNA, 842 bp, Arabidopsis thaliana
  unsure (1)..(842): unsure at all n locations
nnnnnnnnnnnnnnnnnnnnnnnnnnnnnnnnnnnnnnnnnnnnnnnnnnnnnnnnnnnnnnnnnnnnnnnnnnnnnccacgcgtccgcccacgcgtccgacgacgttgcagagaaggtttgggctgaggtcttcttctacctcgctcagaacaacgtcatgttcgaaggtattctcctgaagccaagcatggttactccaggagctgaggccacagacagagctactcctgagcaggttgcttcctacactctcaagctccttcgcaacagaatccctcctgctgtccccggaatcatgttcttgtctggtggacagtccgagttggaggcgaccttgaacttgaacgcaatgaaccaggcaccgaacccatggcacgtgtccttctcctacgcacgtgccttgcagaacacttgcttgaagacatggggaggcaaggaagagaacgtgaaggcggctcaggacattctcttggccagagccaaagccaattcgctggctcagctcgggaaatacactggagaaggcgagtctgaggaagccaaggagggtatgtttgtaaaaggctacacctactaagctatttgtaataatggttccatagatcaaaactcaaaaacttgagcttgattctggtcatttgagttattatactcttcttcaggtataaaagtcagttctgtgttaaaaaaaaaaaaaaaaaaaaaaaaaaaaaaaaaaacaataaaaaaaaaaacgggtctaacgattttaagaaatccaagctaactgttccctaacatgcgacctgtttattgttttattggtggcccaaatttcaattctctggccgccgttttaca

SEQ ID NO: 117196 - DNA, 627 bp, Arabidopsis thaliana
  unsure (1)..(627): unsure at all n locations
tttacaaacaataattatcattataaaaggagtgacttgtcggctgcaaacgtgattacgtgaaccttactggttataatccaaaaatcacagctctaatttgccaacccaatccagatctctctagttttcaacttctcatataattattcattaatatatttattttgagattttggttgattttttgatatataaatattggacttgccattttctattacaaccatcaaatctcaataaagcaaaacgaacaagaaaatggcgagcacggaagctctcttacccgtcacgtccctacaagatccattatctgagtcaagatccgaccagatcccggagacccgtcggagacgacccatcaaagttcatcttgcagtctattccggtttgctcttgatcgctttgtacgtcactctcatcgtcacacacgacggctccaaggctgaaatagcgacggagtcacgtcctcgtatggccggcgtgtcggagaagagcaacgacgggggttggatatcatccgatgatgggaaagttgaagcgttcccgtggaacaatactattttgtcggggcaaacgggtcgaccntgggcgacccgggatccgacggactgagggananttccc

SEQ ID NO: 117197 - DNA, 2253 bp, Arabidopsis thaliana
agctctctacgactcactatagggaaagctggcacgcctgcaggtaccggtccggaattcccgggtcgacccacgcgtgcagagaaactcgaaaacgagaaaaatggcgagctccgatgctctcttgccaatctccgccagagaagaagaaccattatgtccttacacgagattaccaatggccgacccgaatcaagaaacccatggcccccggagaagaagaccctttaaaggtctcctcgccgtctcatttggtctcttgttcatcgccttttacgtcgctctcatcgccacacacgacggatctagatccaacgacgaagggatcgatgaaacagagacgataacgtcacgtgcacgtcttgctggtgtgtcggagaaacgtaacgatgggttatggaaactttccggtgatcggaacacgccggcgtttgaatggaacaatagtatgttgtcgtggcaacgaacggcgtttcattttcagcctgagcaaaattggatgaacgatcctaacggtccattgttctacaagggatggtaccatttcttctaccaatataacccaaacgcagccgtatggggtgacattgtttggggtcacgccgtgtctagggacctaatccattgggtccatttgcccatagccatggtcgctgatcaatggtacgactccaacggtgtgtggaccggctcagccacatttctccctgatggctctatagtcatgctctataccggttccaccgacaaagcggtgcaggtccaaaaccttgcctaccctgaagaccccaacgacccacttctgttgaaatgggtcaagttcccggggaacccggttctagtacctccgcccggtatcctccctaaggacttccgtgacccaacgactgcatggaagacatcagaaggaaaatggcggatcacgattggttccaagctcaacaaaactggaatctcactcgtgtacgacacaatcgactttaaaacatacgagaaacttgacacattgttgcaccgagttcccaacactggaatgtgggagtgtgttgacttttacccggtgtctaagactgcgggcaatgggcttgacacatcggtcaatggaccggatgtgaagcatatcgtgaaggctagcatggacgacacgaggttcgatcattatgctgtaggcacgtatttcgattcaaacggaacatggatccccgatgatcctactatcgatgttgggatgactgccagtttaagatatgattacggaaagttctatgcttcaaagtcgttttacgaccagaacaagggtcgaagagtcttgtggagttggattggtgaatctgatagtgaggcttctgatgtacaaaagggttggtcttctctccagggtatcccaagaaccgttgtcctcgacacaaagacaggaaagaacttggttcaatggccagtagaagaaatcaaatctcttagactaagcagcaagcaatttgatctcgaggtcggtcccgggtcagtggtaccggtcgatgtaggttccgcagctcagctagacatcgaagcagaattcgagattaacaaagaatctctagacaaaatcatcggaaacgcttcggtagtggctgaagccgaggaatttagctgcgaaaaaagcggaggctccaccgtccgtggtgctttagggccattcggattctcggtacttgccacagagagcttgtctgagcaaacaccggtttacttctatgtagctaagggaaaagattcagagctcaaaactttcttctgcacagacacctcaaggtcatctgttgcaaacgatgtcgttaaaccgatatacggtagcgtcgtaccggttctaaaaggggagaaactgaccatgagaattttggtggatcattcgatagtagaagcattcggacaaggtggaagaacatgtataacatcaagagtctatccaacaactgcaatctatggagcagccaagctcttcttgttcaataatgctcttgatgcgacggttacggcgtcgtttacagtttggcaaatgaacagtgcttttattcatccttactctgacgaagctgtccgtgctctctcccgtacctgattatttttacttccttctcattttttatacatagatttatctgtaataattaatggttttttccgattttatttgatatttgatttagaaaaaaaaggcactgaaacatcccgctctagaggatccaagcttacgtacgcgtgcgtgcgacgtca

SEQ ID NO: 117198 - DNA, 544 bp, Arabidopsis thaliana
gttgcaaacgatgtcgttaaaccgatatacggtagcgtcgtaccggttctaaaaggggagaaactgaccatgagaattttggtggatcattcgatagtagaagcattcggacaaggtggaagaacatgtataacatcaagagtctatccaacaactgcaatctatggagcagccaagctcttcttgttcaataatgctcttgatgcgacggttacggcgtcgtttacagtttggcaaatgaacagtgcttttattcatccttactctgacgaagctgtccgtgctctctcccgtacctgattatttttacttccttctcattttttatacatagatttatctgtaataattaatggttttttccgattttatttgatatttgatttagaaaaaaaaggcactgaaacatcattatctcaatttacaattttggagaaataaatttgtttaatagttaaaaaaaaaaaaaaaaaagggcggccgctctagaggatccaagcttacgtacgcgtgcatgcgacgtcaagattctttataggtgacc

SEQ ID NO: 117199 - DNA, 807 bp, Arabidopsis thaliana
  unsure (1)..(807): unsure at all n locations
nnnnnnnnnnnnnnnnnnnnnnnnnnnnnnnnnnnnnnnnnnnnnnnnnnnnnnnnnnnnnnnnnnnnnnnnnnnnnnnnnnccacgcgtccgcgagctttctcctctacaacaaaataaaataaaattaatggcttcttcacttatcacctccgcagtcattgtcgtggttttaagcctagtgcttggatctgtagagcaagtgagtggactacgtcacgttcccaagtcccctaagaccactgatgtcaaacaccctgactttcttgtaaccattgagcccaaaccaactattctcattcccggtgttggaaggttcttgcttcctcccaaatgcaagaagccgttctacccttacaatcctgtcaccggagctccacttactggtgggggaatcccatcatataatggtggacaaggggccggacctcacacccaactccctggtggcgatgatacgcttgtcccaaaccccggatttgaagcgccaaccccgaccattggagctggcacaggaagcaacggccaagttccaccagtgccactaccctgagtattattaatctgtcaacaaataagcatatcttagatgcaaacatgtctgttttggtgtcttgagtcttggttagataagtaacccgctactttactagccgtttcgtttgccatctctttttctctctgtgtctctctctatttgctacaaaaagagagaatcttgtttcatgtttttcagtttgtctttagatgaattcattttcacataccattatattaaaataaaggaaatgttccgcagtaaaaaaa

SEQ ID NO: 117200 - DNA, 1505 bp, Arabidopsis thaliana
  unsure (1)..(1505): unsure at all n locations
nnnnnnnnnnnnnnnnnnnnnnnnnnnnnnnnnnnnnnnnnnnnnnnnnnnnnnnnnnnnnnnnnnnnnnnnnnnnnnnnnccacgcgtccgcccacgcgtccgcccacgcgtccgcccacgcgtccgacttgacataacttcgtttgtatcgcttttttgaaattctatatattattattgtttgagcagaaactaagacaaaattaagacttttctctcttcttcttctccactgggtcgatctttacgaggttcacttgtacggattcactttaacaacagattcgccatggccgccgccgtcgcagcaccgagactcatctccttgaaagccgtcgcgaagctaggtttccgtgagatctctcaaatccgacaattggctccgcttcactctgcgatacctcatttcggaatgctgcgatgtagatcgcggcagccgttttctacctctgttgtgaaagctcaagctactgctactgagcaatcaccaggggaagttgttcaaaaagtggaatctccagtggtcgttatcactggtgcctcgagagggattggtaaagcaattgctctagccttgggtaaagctggctgcaaggtcttggtgaattatgctaggtcagcaaaggaggctgaagaagttgctaaacagattgaagaatatggtggccaggctatcacttttgggggtgatgtctcgaaagcgactgatgtggatgcgatgatgaaaaccgctcttgacaaatggggaaccattgatgttgtggttaacaatgcaggaattactcgggataccttgttaatacgaatgaagcaatcacaatgggacgaagtgattgctttgaatctcactggtgtatttctctgtactcaggcagcagtaaagatcatgatgaagaaaaaaaggggaagaatcatcaatatctcgtcagttgttggtctcattggtaatattggtcaagcaaactacgcagcggctaaaggtggagttatttcgttttccaagactgctgccagagaaggtgcgagcaggaatataaatgtcaatgtggtttgccccggattcattgcatctgacatgactgcagagcttggagaagacatggaaaagaaaatcctgggaacaatcccattaggacggtatggaaaagctgaagaagtggctggcttggtagaattcttggctctcagtcctgcagccagttacataaccggacaggcattcaccattgatggaggtattgctatctagacatttggtatgagtcggcttttgtttagttaaaacaatttggtaaaagagacaaagttgagttctttttagcacttggtcggattgctattttgcggtttctgttaagaaatatgtaacacttactgcttaaactacgtatttggtcactttcagaaactagaaatcgattaatcccnaaaaaaaaaaaaaaataaaanaaagggcggccgctctagaggatccaagcttacgtacgcgtgcatgcgacgtca

SEQ ID NO: 117201 - DNA, 1078 bp, Arabidopsis thaliana
  unsure (1)..(1078): unsure at all n locations
gggtcgacccaagcctctagattgaactagtggatcccccgggctgcaggaattccgcaatatctgaacttcgccgtcgagagcatccatgggtcgtgtcatcagagctcaacgtaagggtgcgggttccgtcttcaaatcccacactcaccaccgcaaaggtccggctaagttccgtagcctcgatttcggcgagagaaatggttacctcaagggcgtcgtgacggagatcatccacgatcctggtcgtggtgctcctcttgctcgtgtcactttccgtcatcctttccgtttcaagaaacaaaaggagctcttcgtcgccgccgaaggtatgtacaccggtcagttcttgtactgcggtaagaaagctactctcgtcgttggaaatgttctccctcttagatctattcctgaaggagctgttgtctgcaacgtcgagcatcacgtcggtgatcgtggtgtcctcgctagagcttctggtgattacgccattgttatcgctcacaaccctgacagcgacactactaggattaagttgccatcgggttcgaagaagattgtcccaagtggatgcagggctatgattggacaagttgctggaggtggaagaactgagaagccgatgctcaaggcaggaaacgcgtaccacaagtaccgtgtgaagaggaactcatggcctaaggttcgtggtgtggctatgaatccagtggagcatcctcatggaggaggtaaccatcagcacattggtcacgccagtactgttaggcgtgatgcacctcctggacagaaggttggtcttattgctgcaaggaggactggtcgtctcagaggtcaagctgctgcttcagctgccaaggcagactagagttaaaagagataaactttgtttctcttgttttctatgtttcaagttttgttgtctgtgtttccttttgaacctcattctgaaatcctaaaagatttttatgataaacctttctctcttctcgaaaagcttatgttattcacaaaaaaaaaaaaaaaaaaaaaaaaaaaaaaaaaaaaaaaaagggcggccnnnnnnnnnnnnnnnnnnnnn

SEQ ID NO: 117202 - DNA, 828 bp, Arabidopsis thaliana
  unsure (1)..(828): unsure at all n locations
cgccagctctattctactcacttatggaaagctggcacgcctgcaggtaccggtccgcaattcccgggtcgacccacgcgtccgggctgcgagaagacgacagaagggggccgtactctgaagaagacgaagcaaatcctcccacaaagaatcatccatgggtcgtgttatcagagcacaacgtaagggagctggttccgtcttcaaatcccacactcaccaccgtaaaggtccggccaaattcaggagtctcgatttcggggagagaaatggttatctgaaaggtgttgtgacggagatcattcacgatccaggacgtggtgctccattggctcgtgtagctttccgtcatcctttccgattcaagaagcagaaggagcttttcgttgctgctgaaggtatgtataccggtcagtttctttactgtgggaagaaagctactctcgtcgtcggaaatgttcttcctctcagatctattcctgaaggagctgttatttgtaacgttgaacatcatgttggtgatcgtggtgttttcgctagagcttctggtgattacgccattgttatcgctcacaatccctgataacgacactagcaggattaagttgccatcgggttcgaagaagatttntgccaaagtgggatgcaagggccatgaattggtcaaagttgcaaggttggtngaaggaccagagaaagccnattgntcaaaggcttggtnaccggataccncaaagtanccnttnttaaaggggaaacttcttggccntaaggnttccgtggnnntggctnttantccaatttgggatccccncggggggggnaacc

SEQ ID NO: 117203 - DNA, 630 bp, Arabidopsis thaliana
  unsure (1)..(630): unsure at all n locations
gcacngttcagggaccnggcctgaattccctgggcngcccactgccgccagactctgaacttcgccgtcagagagcatccatgggtcgtgtcatcagagctcaacgtaagggtgcgggttccgtcttcaaatcccacactcaccaccgcaaaggtccggctaagttccgtagcctcgatttcggcgagagaaatggttacctcaagggcgtcgtgacggagatcatccacgatcctggtcgtggtgctcctctttgctcgtgtcacttttccgtcatccttttccgttttcaaggaaaccaaaaagggagcttctttcggtcggccgcccgaaggtattgtacaaccggtcagttctttgtaccttttcgggtaagaaagctactcttcgtcgttgggaatgttcttccctcttagatcntatttcctgaaggagcttgttgtntnnaacggtcgnggcatcaacgtcggtgatccgtgggtgtcccccgtanagcttcttgggaattacgccatttttnatnggtnanaaacccttnaagggcacnctnggttaaagttccaccgggttcgnagaangtttccccagtggtcaagggtnttanttggcaantttttgnggngnaaactt

SEQ ID NO: 117204 - DNA, 2273 bp, Arabidopsis thaliana
acgatgactaatacgatgagcaacaacaacaacaacacactagtaacacggcacgagtcagcttgaaagagagaactaaaacctagaaatcgagagagattggtggaagatttttcaccagatttcatgggagaagaagagagtcgaattggagacgagctttcgattttggttctcacggcggagcgactccgtgtagctgtggatgaagctgaatcattcaaaacagagtgtggcgaggttggtaaacaagtagatcggcttgctcaaatgcttagaacacttgttcgattcgtctctagttcttctcaacaagtttatgatcggccgattcgtagagttatcgtcgatgttaagaagaatctcgagcgtggttttgctcttgttcgtaagtgtaggagacacaatataatccgacgagtttgtactatcatcaacgctgctgattttcgtaaggtgattaatcttctggaatcttctaatggtgatgtgaaatggattctgagtgtgtttgattccgacggagatggaagttttggtggtggaatcgtgatttcgcttcctccgattgctacgaatgatccgattttgccttgggtttggtctttggttgcgtcgatacagatggggaaattggttgataagattgatgcggcgaatcagcttggttctcttgccggagataatgatcggaataagaagattattgttgatgaaggtggtgtttctccgttgttaaggcttttaaaggagagttcatcggcggaggggcaaatcgcggcggctactgcgttagggttgttggcttgtgatgaagataaggttaggtctattgttaatgaacttggtgttccgattattgttcaggttcttggtgattcttctgttagagttcagattaaggtagctacattggttgctagaatggctgaacatgatcctgttgctcaagatgagtttgctaggcagagtgtgattaagccattagttacgttgctttcgcttgatgtgtttgttgatgatattcatttgagtaagcataatagtattcactctcttgttcagatgaacaaagaggttgagaaagatccgtcttcgaagctttataggccgcttaagagttctaagtcgaatgtgtatcgtgacattggtggtagtggaagtagaactgggaatttcaagaaggagagggataatgagaatcctgaggtgaaacatgagcttaaggtcaattgtgcggaagctttgtggatgcttgctcgaggaaatgtagcgaatagtaggaggattacggaaacgaaagggttgctttctttggcgaagattgtggaaaaggaagttggtgaattgcaatataattgtttgatgactctgatggagataaccgctgctgcggagtcgagtgctgaccttagacgggcagcattcaagactaattctcctgctgctaaagctgttattgatcagatgttatggataatcaaagatgtcgatagcccgattttaaaaatcccagcgattcaatctatcgggtcattggcacggacattcccggcaagagaaacgagaatgatcaagccattggttgagaaactcggtagtagcaaccaagaagtggctataacagctgtaatttcattgcagaaattcgtatgtcccgagaacttcctctgcgcagagcactcgaagaacataatcgaatacggagcaatcccgttattgatgaaactaataaggaacgtcgagcagcaaatgcagttacagtgtctagctttactctgctacctttccgtgaatgccagtaaccaccaacagttggaacaggccaaggttttgacggtgctcgaaggtgcagaacgtttggcgggtctgcagaatatggagttgagagaactcgtgtcgaaagctatatatcagctaagtctatacaatgcaggaagtcacagtcaaatgctatcgtatgttggtccttaaagcaagatacagtttatagtgtgttggattcatatcgtacagacaggaatcttcattgttagatttacagagaaagagcaaaaagcagaatctctcattttgtgatcgctgattgatcaaatccttcattgtatatggaacgacacaaagataattaggtggaagggtaataaaactagctttgctctctgtgattcgctaggctatgaagtatgaatgatgattccaaaattcctggttcatgatataaattttgtaacatggtttttgatgcaaatgtgggccttattatatcttaa

SEQ ID NO: 117205 - DNA, 1089 bp, Arabidopsis thaliana
ggcacgagcgaagagtgtgtgcacttgaggatcgaattaaggtgagaacaaagaagagagaagaatcgaaatagcaaatctcttgatggtcttgatgatcattaaaggtatatttcggagatatgaaaaatggaatcctgtgcatcctacttatggagcattttggggaatggggattgggattggttgtggcgtcggatggggacctggttttggccctgaggtcattggttatgtcggtgctggctgcggtgttggttttagtgttggtataacacttgctggtctcggcattggtcttcccacaaattttcttcttgcagctccttataacactgtggaagcaactagaaagggtgcttttaatttctttggtaaaaacctctcaaccaatggttggagtgatttgatgcctcaaatcgcggggttgcagagacaagtcagtgagatatgctctggttttaacaagaagcctcatttaaataatgccattgacctaaaaagttttcctttgttcatttcacatgattgtggcaaatttggaagtcatcttctccatgtgcgcaaaggttcggaggacaataaatcatcagctatgtaatgctacccaccacgaggatcttaagcatctgagacgcatttcgagatagttactttgatggaatttgtgaatgtgactgaaatattcagcacaaatcagaacatggttcctgtcttgtttggagaagcactatgaaccaaacctgaagcccttgtgatttagagttacagagatacattaaaagggttcgcggatttcacagtagcattcatagacagttcaggttagttaaacgtgcttcacaaaaagaaaaaaaacagaagtgtagttgaggtcacaccacaggtttatgctttgctcttaatcaaatatttatctttctcttttttgttatttgtcctttttaattccatttgctttattccttacttgtggggattaaatgtttgcagagaaagataattcgactgaataaatacacttttacctgtatacttgttatatatttgtgtcaccccaaagtgaaagctgcagactttgaaacacag

SEQ ID NO: 117206 - DNA, 1861 bp, Arabidopsis thaliana
aaaaatacttcaatgcgttcttaatgggcacggagatttccccacttgaccaaccccagtgaggataaactgttgccgaacgcttctcgccgataaacaccggttttgttgtgacggaaagggaaaaatggggtttgattttctgggattctgtttcgggattatctttcggcgtagctctaatggctggctggagtcgtatgatgactcaccgatcgtccaagcgagtcgccaaggcagttgatatgaaactactaggctctcttagcagagacgatttgaagaaaatttgtggtgataatttccctcaatggatatcgtttccagcatttgaacaggtcaaatggctgaataaactactgagcaagatgtggccatatattgcagaggcagcaacaatggtaataagagattctgttgaacctctgcttgaagattacagaccaccaggaattacttccctgaagttcagcaaattgacgtcgggtaacgtagcaccaaagattgaaggtattcgtgttcaaagtttcaaggaaggtcaagtcacaatggacgttgatcttcgatggggtggtgatccaaatattgttttaggtgtgacagcacttgttgcctccatacccattcagttgaaggatcttcaagttttcacagttgcacgtgttatctttcaacttgcggatgagattccttgcatatctgctgttgttgttgctctacttgctgagccaaaaccaagaattgattacactctgaaggctgttggtggaagcttaacagcaattcctggactatctgatatgattgatgatactgttgatactatcgtcaaagacatgcttcagtggcctcatagaattgtttttcccattggtggtattcctgttgatttaagtgatttggagcttaagccacagggaaagcttatagtaacagttgtgaaagcaactaacttgaagaataaggaattgattggaaaatctgacccttatgctaccatctacattcgtcctgtattcaagtataaaacaaaggcaatcgagaacaatctgaatcctgtctgggatcaaacattcgaattgattgcagaggacaaagaaacccagtcgctcactgtagaggtatttgataaagacgtaggtcaagatgagcgccttggacttgtgaaacttcccttaagcagtttggaagccggagttacaaaagaactggagctaaatctgttgtcttcacttgatactttgaaagtaaaagataagaaagatagaggaagcataactcttaaggtacattatcatgagttcaacaaagaggagcaaatggctgcgttggaagacgagaagaagatcatggaagaaaggaagagactgaaggaagcaggagtgataggtagcacaatggatgcagtcgggatggtgggaagtgggctcggtgctggtgtaggaatggttgggaccggtattggcacaggagtcggattggttggaagcggtgtgagctcgggtgttgggatggttggtagcggttttggagcggtcggtagtggattgagcaaagcagggagatttatgggaagaacaatcacaggtcagtctagcaaacgtagtggctcctcaacacctgtgaataccgttccagaaaacgatggtgcaaaacagcagtgagtaaactttgggttttaagcaagatttgtgatcatgacttcgtttttactctttattgttctgtttttttcccctttaactctctcgaacttgatttctggattcactgcagtaatttgttttccgttgtgagccttccaaattaaatcttgttacaaaattccatttgcttaatcgtccccataaacaaaaatccc

SEQ ID NO: 117207 - DNA, 832 bp, Arabidopsis thaliana
cggacgcgtggtcggacgcgtgggaaaataaaaaacaatggcgaataagttcactagacaacagatttcagagtttagggaacagttcagcgtatacgacaagaatggtgatggtcacattaccacagaggagttcggtgccgtgatgcgttccctcggtttaaacctgacccaagctgagcttcaggaggagatcaacgattcggatttagatggtgacggaaccatcaatttcactgagttcttgtgcgcaatggctaaggacacttactctgagaaagacctcaagaaagatttcagactctttgacatagacaagaatggtttcatctcagctgctgaaatgagatatgtgaggactatcctccggtggaagcaaactgatgaagaaatcgatgagattatcaaggcagctgatgttgatggtgatggtcagatcaactacagagagtttgccaggcttatgatggccaagaatcaaggtcatgatactaaatatgacacaactggtggcactttggagagggacttggcggccggggttgccaaaaatatcatcgcagcgccaatgaccgacttcatcaaaaatttgttcgaagcgttgttttcttgaaatggtacatcagtaactttatgccattagggtctggctggtatgttagatctctctaaaaaggcgtttgatctttgaaaataatttctatgtaataaatttattgtgttaccatcttttcttgcatgcaatttattaaaatgagtttgtaatatggtttcagtatcgaatataattggggtatcaatgtatcttttgagaaaaaaaaaaaaaaaaacc

SEQ ID NO: 117208 - DNA, 1063 bp, Arabidopsis thaliana
  unsure (1)..(1063): unsure at all n locations
nnnnnnnnnnnnnnnnnnnnnnnnnnnnnnnnnnnnnnnnnnnnnnnnnnnnnnnnnnnnnnnnnnnnccacgcgtgaagaagaatcaatactcaaatctcaatcatctctctttcttatcttcttctccgatatgaagctcgccgctagcctcaaccgcctcagccccaaacgtctcttccgtaccaaatcaaaagcttccgtctccagatctgagccttcttccttcagctccaatgcttcttcctcttcctctgatggatcttacggtaacctcaaacaaggtccaaccgcgactccgatcagtgttctccctcaaaactccggcgatttttacactgagcttgttcaagcttttaaactgatcgatcgtgatgacgacggtgttgtttccagaggagatctcgcggcgttgattagcaggttaagtcatgaaccaccgagtcaagaagaggtgagtttgatgctaagagaagtagacggcggagacggtggttgtatcagccttgaagatcttgctagccgtgtcgctggtacttccggtgaaggctctgttgagacggaggagctgagagaggtgttcgagatttttgacgtggatcgtaacggaaaaatatcggcggaggagttacacagagtttttggagtgatcggagatgaacggtgcacgttagaagagtgtatgcgtatgatagcgacggttgatggaaacggtgacggttttgtttgcttcgatgacttttgccgcatgatggttccagcgatgaatgatcatcatcattagaatcatgtttgattgatgatggtgacatcaccatactctttgtcttttttttttgttaccgaaaaattatttattttactgtttttgcggtggttattgtgacggcaagcatttaaattgttcaccgtcggtttaaattcagacgtctttctcaaaatggttatatactaatgtgaacatgtttctagtttcaaaaaaaaaaaaaaaaaannnnnnnnnnnnnnnnnnnnnnnnnnnnnnnnnnnnnnnnnnnnnnnnnnnnnnnnnnnnnnnnnnnnn

SEQ ID NO: 117209 - DNA, 1461 bp, Arabidopsis thaliana
  unsure (1)..(1461): unsure at all n locations
nnnnnnnnnnnnnnnnnnnnnnnnnnnnnnnnnnnnnnnnnnnnnnnnnnnnnnnnnnnnnnnnnnnnnnnnnnnnnnnnnnnnnnnnnnnnnnnnnnnnnnnnnnnnnncccacgcgtccgcggcggccgcagcttccataagagtcttagttctaactataaatacacatatctcactctctctgatctccgcttctcttcgccaacaaatgtcgaccgctcctctctccggcttctttctcacttcactttctccttctcaatcttctctccagaaactctctcttcgtacttcttccaccgtcgcttgcctcccacccgcctcttcttcttcctcatcttcctcctcctcgtcttcccgttccgttccaacgcttatccgtaacgagccagtttttgccgctcctgctcctatcattgccccttattggagtgaagagatgggaaccgaagcatacgacgaggctattgaagctctcaagaagcttctcatcgagaaggaagagctaaagacggttgcagcggcaaaggtggagcagatcacagcggctcttcagacaggtacttcatccgacaagaaagctttcgaccccgtcgaaaccattaagcagggcttcatcaaattcaagaaggagaaatacgaaaccaaccctgctttgtacggtgagctcgcaaagggtcaaagtcctaagtacatggtgtttgcttgttcagactcacgtgtgtgtccatcacacgttctggactttcagccaggagatgccttcgtggtccgtaatatcgccaatatggttcctccttttgacaaggtcaaatatgcaggagttggagccgccattgaatacgctgtcttgcaccttaaggtggagaacattgtggtgatagggcacagtgcatgtggtgggatcaaagggcttatgtctttccccttagatggaaacaactccactgacttcatagaggactgggtcaaaatctgtttaccagccaagtcaaaggttatatcagaacttggagattcagcctttgaagatcaatgtggccgatgtgaaagggaggcagtgaatgtttcactagcaaacctattgacatatccatttgtgagagaaggacttgtgaagggaacacttgctttgaagggaggctactatgacttcgtcaagggtgcttttgagctttggggacttgaatttggcctctccgaaactagctctgtatgaaccaatccatcatcatcatcatcatcatgaccatccatcatcatcatcattattatcatcgtatataatatatatctaccccatatgtaatttgtaatgtgcctttgactgtgatgagttatctctccctctctaccaactttcttcatatatataaaacaaaaaggaaaagcagatgatatagatctttcgtggtttaattatgaacaattgtctttattatttgtgtatcaaaaaaa

SEQ ID NO: 117210 - DNA, 1162 bp, Arabidopsis thaliana
aggacgcgtggtcttcccgttccatttatccgcaaacggagcttgttttcggtgcacctgcttcagccacttcaaacttgaactgagaaggatgggaaacgaatcatatgaagacgccatcgaagctctcaagaagcttctcattgagaaggatgatctgaaggatgtagctgcggccaaggtgaagaagatcacggcggagcttcaggcagcctcgtcatcggacagcaaatcttttgatcccgtcgaacgaattaaggaaggcttcgtcaccttcaagaaggagaaatacgagaccaatcctgctttgtatggtgagctcgccaaaggtcaaagcccaaagtacatggtgtttgcttgttcggactcacgagtgtgcccatcacacgtactagacttccatcctgggggatgccttcgtggttcgtaatatcgccaatatggttcctccttttgacaaggtcaaatatgcaggagttggagccgccattgaatacgctgtcttgcaccttaaggtggaaaacattgtggtgatagggcacagtgcatgtggtggcatcaaggggcttatgtcatttcctcttgacggaaacaactctactgacttcatagaggattgggtcaaaatctgtttaccagcaaagtcaaaagttttggcagaaagtgaaagttcagcatttgaagaccaatgtggccgatgcgaaagggaggcagtgaatgtgtcactagcaaacctattgacatatccatttgtgagagaaggagttgtgaaaggaacacttgctttgaagggaggctactatgactttgttaatggctcctttgagctttgggagctccagtttggaatttcccccgttcattctatatgaactaacacatcaccatcaccatcgctaccaccaccatcacaaacatcatcatcgtcgtcatcatcatgatcagcatcttcatatataaatgttttactcttatttaattgctacttgtaatggtatacatttacttgcgatgagcttcttttccttcattatccagttataaaataaataaataaatcatgtttactttcacagaaaaaaaaaaaaaaaaaaaaaaagggcggccgctctagaggatccaagcttacgtacgcgtgcatgcgacgtcaaagtcttgctat

SEQ ID NO: 117211 - DNA, 998 bp, Arabidopsis thaliana
  unsure (1)..(998): unsure at all n locations
cctcctcgggtcgacggtatcgataagcttgatatcgaattcgcggccgccgccaatatggttcctccttttgacaaggtcaaatatgcatgagttggagccgccattgaatacgctgtcttgcaccttaaggtggaaaacattgtggtgatagggcacagtgcatgtggtggcatcaaggggcttatgtcatttcctcttgacggaaacaactctactgacttcatagaggattgggtcaaaatctgtttaccagcaaagtcaaaagttttggcagaaagtgaaagttcagcatttgaagaccaatgtggccgatgcgaaagggaggcagtgaatgtgtcactagcaaacctattgacatatccatttgtgagagaaggagttgtgaaaggaacacttgctttgaagggaggctactatgactttgttaatggctcctttgagctttgggagctccagtttggaatttcccccgttcattctatatgaactaacacatcaccatcaccatcgctaccaccaccatcacaaacatcatcatcgtcgtcatcatcatgatcagcatcttcatatataaatgttttactcttatttaattgctacttgtaatggtatacatttacttgcgatgagcttctttttcttcattatcccgggccgatcaatgtggccgatgtgaaagggaggcgcgtgaatgtttcactagcaaacctattgacatatcccatttgtgagagaaggacttntgaagggaacacttgctttgaagcgtaaatccattgtccttaggcttgttttccttggggtgaaaaagacttgaatttggcctcttcgnaactagctctgtatgnaccaatccatcatcatcancatcatcatgaccatccatcatcatcatcattattatcatcgnatataatatatatctacccccataatggtaatttgtnaatgtgncctttttaactgnanatggaggtaatctnntnccctcttct

SEQ ID NO: 117212 - DNA, 598 bp, Arabidopsis thaliana
  unsure (1)..(598): unsure at all n locations
gagncccccaatcaacctgcttcccttaggtggaacattgggtaaaggcacagtcatgggggcatcaagggcctatgcattccccttggcggaacaaccctactgcctcaaagaggatgggtcaaaatctgttaccagcaaagtcaaaaggttttggcagaaagtgaaagttcagcatttgaagaccaatgtggccgatgcgaaagggaggcagtgaatgtgtcactagcaaacctattgacatatccatttgtgagagaaggagttgtgaaaggaacacttgctttgaagggaggctactatgactttgttaatggctcctttgagctttgggagctccagtttggaatttcccccgttcattctatatgaactaacacatcaccatcaccatcgctaccaccaccatcacaaacatcatcatcgtcgtcatcatcatgatcagcatcttcatatataaatgttttactcttatttaattgctacttgtaatggtatacatttacctgccattagcctcatttgcggccgcgaattccgtatccagcttaaggatcccgcttaccttcaggggggggccgggcccacaacccccaaa

SEQ ID NO: 117213 - DNA, 952 bp, Arabidopsis thaliana
gctggtacgcctgcaggtaccggtccggaattcccgggtcgacccacgcgtccggaagaagatcacggcggagcttcaggcagcctcgtcatcggacagcaaatcttttgatcccgtcgaacgaattaaggaaggcttcgtcaccttcaagaaggagaaatacgagaccaatcctgctttgtatggtgagctcgccaaaggtcaaagcccaaagtacatggtgtttgcttgttcggactcacgagtgtgcccatcacacgtactagacttccatcctggagatgccttcgtggttcgtaatatcgccaatatggttcctccttttgacaaggtcaaatatgcaggagttggagccgccattgaatacgctgtcttgcaccttaaggtggaaaacattgtggtgatagggcacagtgcatgtggtgggcatcaagggggcttatgtcatttcccccttgacggaaacaactcttctgacttcatagaggattgggtcaaaatctgtttaccagcaaaggcgaaagttttggcagaaagtgaaagttcagcatttgaagaccaatgtggccgatgcgaaagggaggcagtgaatgtgtcactagcaaacctattgacatatccatttgttagagaaggagttgtgaaaggaacacttgctttgaagggaggctactatgactttggtaatggctcccttgagcattgggagctccagtttggaatttcccccgttcattctatatgaactaacacatcaccatcaccatcgccaccaccaccatcacaaacatcatcatcgtcgtcatcatcatgatcagcatcttcatatataaatggtttacttctaattaagtgctacctggaatggtaaacaattacctgcaattaaccttctttgcggccccgaaatcgaaaaccaggttaaccaagccatcccaccccagggggggcc

SEQ ID NO: 117214 - DNA, 649 bp, Arabidopsis thaliana
  unsure (1)..(649): unsure at all n locations
cattttcttctaattttattcggtcaaccaacttgcatagtgaatagatgggaaccgaagcatacgacgaggctattgaagctctcaagaagctgctcatccagaaggaagagctaaagacggttgcagcggcaaaggtggagcagatcacagcggctcttcagacaggtacttcatccgacatgaaagctttcgaccccgtcgaaaccattaagcagggcttcatcaaattcaagaaggagaaatacgaaaccaaccctgctttcgtacggtgagctcgcaaagggtcaaagtcctaagtacatggtgtttgcttgttcagactcacgtgtgtttccatcacacgttctggactttcagccaggagatgccttcgtgggtccgtaacatagncaaacatggttcctcctttcgacaaggtcaaatacggtnggcgtttggagcagccattgnattacggggggnttncaacctttaaggtggngancattntggtgaatagggcacagtgcatntgggtggggtcaaaagggcttntttnttttccccttagnntggaacaacttcccctgccttnatagnggncttgggnaaaanttttttcncnccaggnaaagggttttttananctttgggtttaaccctttaa

SEQ ID NO: 117215 - DNA, 646 bp, Arabidopsis thaliana
  unsure (1)..(646): unsure at all n locations
gccccncgggccgaanccccaaagggcccctttgcaggccaattccnggttggcccccattnaaccgtncctcccccttagggnggaaccattgtggtgntgggccncagtccatgtggtgcatccaaggggctttatggccattccctcttgccggaaccactctactggnctncatnngnggattgggtcaaaatctggtttcccagcaaagtcaaaagttttggcagaaagtgaaagttcagcatttgaagaccaatgtggccgatgcgaaagggaggcagtgaatgtgtcactagcaaacctattgacatatccatttgtgagagaaggagttgtgaaaggaacacttgctttgaagggaggctactatgactttgttaatggctcctttgagctttgggagctccagtttggaatttcccccgttcattctatatgaactaacacatcaccatcaccatcgctaccaccaccatcacaaacatcatcatcgtcgtcatcatcatgatcagcatcttcatatataaatgttttactcttatttaattgctacttgtaatggtatacatttacttgcgatgagcttctttgcggccgcgaattcgatatcaagcttatcgatacagtcgacctcgaagggggg

SEQ ID NO: 117216 - DNA, 693 bp, Arabidopsis thaliana
  unsure (1)..(693): unsure at all n locations
gannnnnnnnnnnnnnnnnnnnnnnnnnnnnnnnnnnnnnnnnnnnnnnnnnnnnnnnnnnnnnnnnnnnnnnnnnnnnnccacgcgtgcgcgcacgcgtgcgctccggtttttttcgccaacaaatgtggaccgctcctctctccgggttctttctcacttcactttctccttctcaatcttctctccagaaactctctcttcggacttcttccaccggcgcttgcctcccacccggctcttgttgggcgcatcttcctcctgctcggcttcccggtccggtccaacgcttatccgtaacgagccagtttttgccgctcctgctcctatcattgccccttattggagtgaagagatgggaaccgaatgcattacgacgaggctattgaagctctcaagaggcttctcatcgagaaggaagagctaaagacggttgcagcggcaaaggtggagcagatcacagcggctcttcanacaggtacttcatccgacaagaaagctttcgaccccgtcgaaaccattaagcagggcttcatcaaattcaagaaggagaaatacggaaccaaccctgctttgtacggtgagctcgcaaagggtcaaagtcctaaggtacatnggtgttttnctttgttcaagcctcacggnntntttcccattaaaanggttttnggncnttttaagccccgggggntt

SEQ ID NO: 117217 - DNA, 1145 bp, Arabidopsis thaliana
gaatatcgacggcgacaatttctctctccggctaacttttttctagagaaagctatggcggacgaagaagatgagttactggagacagaactaagttacgaccagaaaaaggaaatcgccaagtggtttttcctcaacgctcccgctggagaaatcaattacgtcgctaaagatttaaaggcggttttgagcgatgaggaagtgtacaatgaagcagccatggaagcatttccagtgtacaacaaaactcacatgatttgccttgaaatgcccagtggagctggtgatgtgattgtctcatcttacagtgaaattaatgaaaatgagtaccttgatccaagaactgcccaggttgccatagttgatcatgttaaacagatttgtacaaaggtacggcctgcaaatgatgaagaacttccttctttgtatattgaggagtacagatatgctcttgatgctgaaatccagagatatgttagtgaatcttatccgaaaggtatgtctgcagttaattgtgtgaaagggaaagatactgagggtccagggtccgactttgagcttgttgttataattactgctatgagacttagtccccagaacttctgtaatggaagttggagatctgtatggaacatagatttccaggatgaatcccaggtgcttgacataaaagggaaattgcaggtaggagctcattattttgaagagggaaatgtggaattagatgcaaaaaaagatttccaagattcaacaatatttcagtctgcggatgactgcgcgattgccatagccaatattatcaggcaccatgaaacagagtaccttgcatctctagaggtagcttattcaaaattaccggataacactttcaaggatttgaggaggaaacttccggtgacacgaactctgttcccatggcagaacactttacagttcagcctaacaagagaggtcgagaaagaacttggacttggcaagtgactaatcatcaactcgcaaccttttgagtgctatatttcgttgtcaaagtttctgtgatttccattatgtaagtgaaggataagtattatttctgttgtgtcttgtctttcctttggagtaatgtatacaaatcgcattagtaagtatgacagatattgttccgc

SEQ ID NO: 117218 - DNA, 638 bp, Arabidopsis thaliana
  unsure (1)..(638): unsure at all n locations
nnnnnnnnnnnnnnnnnnnnnnnnnnnnnnnnnnnnnnnnnnnnnnnnnnnnnnnnnnnnnnnnnnnnnnnntactacgggtggggggtgtccctccgccgtagtttcgcgagctctatacgactcacttatagggaagctggtacgcctgcaggtacccggtccggaattcccgggtcgacccagcgcgtacgatcaggcaccatgaaacagagtaccttgcatctttagaggtagcttattcaaaattaccggataacactttcaaggatttgaggaggaaacttccggtgacacgaactctgttcccatggcagaacactttacagttcagcctaacaagagaggtcgagaaagaacttggacttggcaagtgactaatcatcaactcgcaaccttttgagtgctatatttcgttgtcaaagtttctgtgatttccattatgtaagtgaaggataagtattatttcctgttgtgtcttgtctttcctttggagtaatgtatacaaatcgcattagtaagtatgatacgatattggtccgcaaaaaaaaaaaaaaaaaaaaagcgcggccgctctagaggatccaagcttacgttcgcgtgcatgggacgtcatagtattctatagttcgcctaaa

SEQ ID NO: 117219 - DNA, 1874 bp, Arabidopsis thaliana
acgactcacatagggaaagctgctacgcctgcaggtaccggtccggaattcccgggtcgacccacgcgtccggcggatttgataaaaatctctgaatctctccaagctctcttctcatcaaaccatggatccttacaagtatcgtccagctagttcttacaactctcccttcttcaccaccaactctggtgctcctgtatggaacaacaactcctccatgaccgttggacccagaggtcctatccttcttgaggattaccatctcgttgagaagcttgccaatttcgacagggaacggattccagagcgtgtggttcatgccagaggagccagtgctaaaggtttctttgaggtcactcatgatatctctaacctcacttgtgctgactttctccgagctcccggtgttcagactcctgtcattgtccggttctccaccgttatccatgagcgtggaagtcccgagaccttgagagaccctcgtggttttgcagtcaagttctacaccagagaggggaactttgatcttgttggaaacaactttcctgttttcttcatccgcgatgggatgaagttccctgacatggtccacgctcttaagccgaacccaaaatctcacatccaagagaactggagaatccttgacttcttctcccaccaccctgaaagtttgaacatgttcactttcctcttcgatgatatcggtatcccacaagattacaggcacatggatggttcaggtgtcaatacatacatgttgatcaacaaagctggcaaagctcactacgtgaagttccattggaaaccaacttgtggagtcaagtctcttttggaagaagatgcaattcgtcttggaggaaccaaccacagtcatgcgactcaagacttgtatgactctatagctgctggaaactaccctgaatggaagctctttatccaaatcattgatcctgctgatgaagacaagttcgactttgacccgctcgatgtgaccaagacctggcctgaggatatcttgcctcttcaacctgttggacgtatggtgttgaacaagaacattgacaacttctttgcagagaatgagcaacttgctttctgtcctgcaattattgtcccagggatacattactcagatgataagctgcttcaaacccgtgtcttctcctatgccgatactcagagacaccgtcttgggaccaaactaccttcagctgccagtcaatgctccaaaatgtgctcaccacaacaaccaccatgagggattcatgaatttcatgcacagggacgaggaggttaactacttcccgtcgaggtatgaccaggttcgtcatgctgagaagtatccaactccgcctgctgtctgttctggaaaacgtgagaggtgcattattgagaaagagaacaacttcaaggagcctggagagagataccgtacctttacaccagagaggcaagaacgattcatccagagatggattgatgccctatccgacccacgcatcacgcatgaaatccgcagtatctggatctcttactggtctcaggctgataagtctttgggacagaagctggcaagccgtctgaacgtgagaccaagcatctaaaacgagtgaaagaattcttgattggcctttctgtggttgttaattagcagagaaaagaaaatgggaagagatcaaagttgcgataatacaatcttcatcatgtggatcttctgtgctatgttataatagtatctgtttaaagaccaaaagaaccttgtgtgttgttgtgtctctcgtttatcagaataatacattatacattgaagatttataatccgtggtgttacttgatgaaagctccttcttccttgaaaaaaaaaaaaaaaaaaa

SEQ ID NO: 117220 - DNA, 409 bp, Arabidopsis thaliana
  unsure (1)..(409): unsure at all n locations
aacgattcanccagagatggattgatnccctatccgacccacgcatcacgcatgaaatcngcagtatctggttcttttactggtctcaggtctgaaatcttgatctctggttactgtcattgtctcgttcttcaagtctcagccgttgaaaagttgtcaagttttaaacatttttgactgattggttaaaaatgtgtgaaacaggctgataagtctttgggacagaagctggcaagccgtctgaacgtgagaccaagcatctaaaacgggtgaaagaattctggattggcctttctgtggttgttaattagcagagaaaagnaaatgggaagagatcaaagttgcgataatacaatcttcatcatgtggatcttctgtgctatgttataatagtatctgtttaaagacc

SEQ ID NO: 117221 - DNA, 1951 bp, Arabidopsis thaliana
caaaattcaaaaacctcacatttcacttctctcttctcgcttcttctagatctcaccggtttatctagctccggtttgattcatctccggttatggggagagaatgaggagttaccgttttagtgattatctacacatgtctgtttcattctctaacgatatggatttgttttgtggagaagactccggtgtgttttccggtgagtcaacggttgatttctcgtcttccgaggttgattcatggcctggtgattctatcgcttgttttatcgaagacgagcgtcacttcgttcctggacatgattatctctctagatttcaaactcgatctctcgatgcttccgctagagaagattccgtcgcatggattctcaaggtacaagcgtattataactttcagcctttaacggcgtacctcgccgttaactatatggatcggtttctttacgctcgtcgattaccggaaacgagtggttggccaatgcaacttttagcagtggcatgcttgtctttagctgcaaagatggaggaaattctcgttccttctctttttgattttcaggttgcaggagtgaagtatttatttgaagcaaaaactataaaaagaatggaacttcttgttctaagtgtgttagattggagactaagatcggttacaccgtttgatttcattagcttctttgcttacaagatcgatccttcgggtacctttctcgggttctttatctcccatgctacagagattatactctccaacataaaagaagcgagctttcttgagtactggccatcgagtatagctgcagccgcgattctctgtgtagcgaacgagttaccttctctatcctctgttgtcaatccccacgagagccctgagacttggtgtgacggattgagcaaagagaagatagtgagatgctatagactgatgaaagcgatggccatcgagaataaccggttaaatacaccaaaagtgatagcaaagcttcgagtgagtgtaagggcatcatcgacgttaacaaggccaagtgatgaatcctcttctccttgtaaaaggagaaaattaagtggctattcatgggtaggtgatgaaacatctacctctaattaaaatttggggagtgaaagtagaggaccaaggaaacaaaacctagaagaaaaaaaaccctcttctgtttaagtagagtatattttttaacaagtacatagtaataagggagtgatgaagaaaagtaaaagtgtttattggctgagttaaagtaattaagagttttccaaccaaggggaaggaataagagttttggttacaattacttttatggaaagggtaaaaattgggttttggggttggttggttggttgggagagacgaagctcacattaatggctttgcagattcccaagaaagcaaaatgagtaagtgagtgtaacacacacgtgttagagaaaagatatgatcatgtgagtgtgtgtgtgtgagagagagagagaagagtatttgcattagagtcctcatcacacaggtactgatggataagacaggggagcgtctgcaaaagatttgtgagtggagatttttctgagctctttgtcttaatggatcgcagcagttcatgggacccttcctcagcttcatcatcaaacaaaaaaaaaatcaagttgcgaagtatatataatttgttttttgtttggatttttaagatttttgattccttgtgtgtgacttcacgtgacggaggcgtgtgtctcacgtgtttgttttctcttcaaatcttttattttggcgggaaatttttgtgtttttgatttctatacgtattcgtggactccaaatgagttttgtcacggtgcgttttagtaacgtatgcatgcgtgtaaggtgtcacgtatgtgtatatatatgattttttttttggattcttgaaaggttaaattttatatataaaacgtt

SEQ ID NO: 117222 - DNA, 1699 bp, Arabidopsis thaliana
taaaacacactcacccactttcctctgtataagcctctctctcctctctcttctcctctgccatgaaaatcgcagttcctcaagacaaaacctcctcagaaatctcccatctttgatgacttttgcttccttagttttcactttcttgtccgaacgctctcaaaaactttgagaccaccccaataaacgaattaaacagactattatcaatcaatacacaacacaacaatcaaaccaaaccccatggctgagaatcttgcttgtggtgaaaccagcgagtcatggatcattgacaacgacgatgatgatatcaactatggcggcggatttacgaacgagattgattacaatcaccaactttttgctaaagacgacaactttggcggcaacggatcaattccgatgatgggttcttcttcatcgtccttgagtgaagacagaatcaaagagatgttggtgagagagattgagttttgccctggaactgattatgttaagagattgctttctggtgatttggatttgtctgttcgaaaccaagctcttgattggattctaaaggtttgtgctcattaccattttggacatctgtgcatatgcctatccatgaactacttggatcggttcttaacatcctatgaattgccgaaagacaaggattgggctgctcagttactagctgtgtcttgcttatcattagcatccaaaatggaagaaactgatgtgcctcacattgttgatttacaggtggaagatcccaagtttgtttttgaggccaaaacaataaaaaggatggagcttttggttgtcaccactttgaattggagattgcaagctctaactccattctccttcattgattatttcgttgacaagatcagtggtcacgtgtcggagaatttgatctatagatcgtcaagattcatcttaaacaccaccaaagcaattgaattcttagacttcaggccttctgagatagctgcagctgctgcagtgtctgtttccatttcaggagaaacagaatgcattgatgaggaaaaggcactgtctagtctcatatatgtaaaacaggagagggtgaagagatgtttgaatctgatgagaagtctcactggggaggagaatgtgcggggaactagtttatcgcaggagcaggcgcgagttgcggtaagagctgtacctgcaagtccagttggagtgttggaagcaacatgtttgagctataggagtgaagagagaacagttgagtcatgtacaaattcctcacagagtagtccagacaacaacaacaacaacaacaacagcaacaagaggaggagaaaacaatgagagagaataaaagagtcatacattgctttttacaacccaaaaccacaagtactcatgacatttgaggttcttatttatttttttggttttttttttctacataaattttctttttctttctttgatttctcattttcaatctgaaaattggattgaatatgagagttttgtgagaaaggaaaaaagaaaataagagagagagagagagctctttggaaggcgggcaaaattaataagtcattattgatgatgatgagagacatccctgttcttgctccaagggacttttttttttctacataatgtcagagatataattaaaaaaaaaagaaatagaaagagaattaattttatgaaaaaaaaaaaaaaa

SEQ ID NO: 117223 - DNA, 1718 bp, Arabidopsis thaliana
  unsure (1)..(1718): unsure at all n locations
nnnnnnnnnnnnnatcactctccgaaacccacttccagctttttcctctctctttctctctctagtctctcttttgtagctctcccctgctaagctaaccactgcacgtttccatagagaggaaagatgagtctctctccgagagattttctctctatcatcttatcttcttccgtgtaatgctctgagccaaaacccaataactaaatcaacaacaatatagaagagaagagaaagatcttatctttcttctcattcttgagtttagtcccccacaatggcgattcggaaggaggaagaaagtagagaagaacagagcaattcgtttcttcttgatgctctctactgcgaagaagagaaatgggacgatgaaggagaagaagttgaagaaaactcttccttgtcttcttcttcttctccattcgttgttttgcaacaagatttgttctgggaagatgaagatctggttacactcttctccaaagaagaagaacaaggactcagctgtctcgatgatgtttatctttccacggatcgaaaagaagctgttggttggattctgagagtcaacgctcattatggcttctctactttagcagctgttttagccataacttatctcgataagttcatctgtagctacagcttacagagagacaaaccatggatgcttcagctcgtttctgtcgcgtgtctctcattagctgctaaagtcgaagaaacccaagtccctcttcttctagactttcaagtggaggagacaaagtatgtgtttgaagcaaaaaccatacagagaatggagctactgattctgtctactctcgagtggaagatgcatctcattactccaatttcgtttgtagaccacattatcaggagattgggacttaagaacaatgctcactgggatttcctcaacaaatgccaccgtctcctcctctctgtaatctccgattcaagatttgtcgggtacctcccatcagtagttgccgcagctaccatgatgcgaattatagagcaagttgatccctttgaccctctttcataccaaactaatctcctcggtgtccttaacttaaccaaggaaaaggtgaaaacttgctacgatctaatcctccaactaccagtggaccgcatctgtttacagatccaaatccaatcttccaagaaacgcaagagtcacgattcatcatcatcgttgaacagtccaagctgcgtgattgatgcaaaccctttcaatagcgacgaaagctcaaacgattcgtggtcagcgagttcgtgcaacccaccaacgtcgtcgtcgtccccgcagcaacaacctccattgaagaagatgagaggagctgaagagaatgagaagaagaagccgattttgcatctgccatgggcaatcgtagccactccataatcgaaagctcgatttcgtttatatgatatttactgtttttttaaactttgagaacaatctttgttgtattaagctttacccgtttgcatatacgaaatgtcgcgaatgcccttacgtgccatggcttgatagagttaatgggtaaagggtattcatgacatttgactgcatgggatgtgacgaaggagagaattagaaataataataataatattgcgtaaaaaaaaaaaaaaaaagggcgaccgctctagaggatccaagcttacgtacgcgtgcgtgcgacgtcaaaattttgtatagtaaacnnnnn

SEQ ID NO: 117224 - DNA, 1929 bp, Arabidopsis thaliana
  unsure (1)..(1929): unsure at all n locations
tgannnnnnnnnnnnnnnnnnnnnnnnnnnnnnnnnnnnnnnnnnnnnnnnnnnnnnnnnnnnnnnnnnnnnnnnnnnnncccggcacgaggaaaggggaaaaaaaaaaaaaatcagattcctgatattttctgcttcgcttcgctttgctttggcctttgggtttgctttgccttttatctccacaataataatattcgttaacctctcctcgttctcgtcgctgtttcttcccgatctttgctatagttctggattcaaaatctttcttccccaatagatgtttgtctcttaatttttgatttttctgcaaaatcaaatttttaagagctatggaggaagagaatgttactagttcaccttcaacaccggtacataggcttaggcatcgaagacgttctaatgaggttgttacggatggggataaagtgaatgcaagtcctttgttggttaatgatcggaataagtacaaatctttcatggtccggacctactctacgttatggatgattggtggttttgttttggttgtctacatgggtcatctttatatcacagctatggttgttgttattcaaatatttatggctaaagagttgtttaatctgctgaggaaagctcctgaggataaatgtctcccctatattaaacagctcaattggcacttctttttcactgccatgcttttcgtttatggacggatccttagtcaacggttagccaataccatgactgcagatcagttcttctatcggctagtcagcggcttaatcaaataccatatggcaatctgttacttgttgtatattataggtttcatgtggttcattctcacattaaagaagaagatgtacaagtaccagtttggccagtatgcttggacccacatgatcttgatagtcgtgtttactcaatcgtcgttcactgttgccaacatatttgaagggatcttctggtttcttctcccagcatctttaattataatcaacgacatcttcgcctacattttcggtttcttctttggaagaacgcctttaataaagctgtctccaaagaaaacatgggagggattcatcggagcctctgtgacaactatcatctctgcatttgttctggcaaatattttgggtcgtttcccttggttgacatgcccacgacaggatttgtccactggctggctacagtgtgacgctgatccattgttcaaacctgaaccttttgctttacctgcatggattccagaatggtttccttggaaggaaatgacgatcctccctgttcagtggcatgctttatgcctcggtttgttcgcttcaatcatagcaccttttggaggatttttcgctagcggtttcaaaagagcattcaaaattaaggactttggtgatagtattccaggacatggtggaatcacagatagaatggactgccagatggttatggcagtatttgcctacatatatcttcaatcatttattgtctcccaaagcgtttcggttgacaaaatcctagaccagatattgacgaaccttacctttgaggaacaacaagcgctcttcgtgaagttaggacaaatgctgaaggacaagctctcataggctccattgccaaaagtttcttttattcagattccgattctccaagaacaggttcctctggaatatccttttatctttgtccttactagagacaataaatttaaaattggattaagatttgttgtttcctgccattgtaaatcctctcgaaatttgtcgaaaaaattagaagtttttttaaaagtcttctcattggatacaataggtttgaagaaagttgtatctactactatctacttatttagtagctttggtggtttttagctgtattttgtatattggttaaaatgaaacaacatttggtttgtttgtctcatgattcgatttgttc

SEQ ID NO: 117225 - DNA, 2093 bp, Arabidopsis thaliana
accacgcgtccgcccacgcgtccgagactcttctccttcgcttattaagccctctcaactcttcttctctctctctctctctctccgcctgtcctccattgatctaatctaactcgctcatcagaatcatctcttcatcgttaatcctcttccttctcactcaccatgtatcgtttcgcttctaacctcgcctccaaggcaaggattgctcaaaacgctcgccaggtttccagcagaatgagctggagcaggaactatgcagcgaaagagattaagtttggtgttgaagctcgagctttgatgcttaagggtgttgaagatcttgctgatgctgttaaagtcaccatgggtcccaagggacgtaatgttgtgattgagcaaagttggggtgctcctaaagtgacaaaagatggtgttactgttgccaaaagtattgagttcaaagacaaaattaagaacgttggtgctagtcttgtgaagcaggttgcaaatgctactaatgatgttgctggtgatggtactacttgtgctactgtcctcacccgggctatatttgccgaaggatgcaaatcagttgccgcaggaatgaatgcaatggacttgcgaagaggtatttccatggcagttgatgctgtggtgacaaaccttaaaagcaaggctaggatgatcagcacatctgaagagattgctcaggttggaaccatttctgctaatggagagagggaaattggagaacttattgccaaggctatggagaaggttggcaaagaaggtgttatcacaatccaagatggaaagacattgtttaacgagttggaagttgtagaggggatgaaattggacagaggttatacttcaccatactttatcactaatcaaaaaacccaaaaatgtgaactagacgatcctctcattcttatccacgagaagaagatctcaagcatcaactctatagtgaaagtgttggagttggctctgaagaggcaaagaccactattgattgtttctgaagatgtggaaagtgatgctcttgcaactcttatccttaacaagctccgtgccggaattaaggtctgtgccatcaaggcccctgggtttggagagaataggaaggccaatttgcaagaccttgctgcccttactggtggagaggtcatcacagacgagcttggcatgaatctggagaaggtggacctaagcatgctaggaacctgcaaaaaggttacagtctccaaggacgacactgttattcttgatggggctggcgacaagaaaggaattgaggaaagatgtgaacagattaggtcagcaattgaactgagcacctcagattatgacaaggaaaaactgcaagaaaggttggctaagctctctggaggtgttgcagtgttgaagattggaggagcaagtgaagctgaagttggtgagaagaaagacagagtgacagatgctttgaatgccactaaagcagcagttgaagagggtattttaccaggaggaggtgtggctcttctatacgcagcaagagagttggaaaaacttccaacagccaactttgaccagaagattggtgtccagattattcagaacgcattgaagactcctgtttacacaatcgcttcaaatgctggagttgaaggtgctgttattgttggcaagctcttggagcaagataacccagacctcggttatgatgctgctaaaggtgaatatgtggatatggtgaaagctggaatcatagaccctctgaaagtgatcaggacagctttggttgatgctgcgagtgtgtcatctttgttgacgacaacggaagctgtagtggttgatcttccgaaagacgaaagcgagtcaggagcagcaggagcaggcatgggtggaatgggaggcatggactactagatccactaaattctgtcttttgttttcaccaatcaccatcttaacttgagaagagagatacgattcttttaaggagttttagtcttcgtctttgccttattgttgctcaataacctcaaaagttttacaataaacagagcacacttgacaatgttacgagacacactattagcatcaacaattaaaaccgaggc

SEQ ID NO: 117226 - DNA, 986 bp, Arabidopsis thaliana
caagagcattgacggcgcatgcaccccacgcgtccggtaacactgggcgaaagaagacgaacataaactcgtctccggtaaccaaaaatggtttccatgactacttcatcttcttcgtacggaacattctctacagtcgtcaacagttctagacctaattcctcagcaacctttctcgtcccttccttgaaattctccaccggaatatcgaatttcgcgaatctgagtaatgggttttctctaaaatctccaattaatcctgggtttctcttcaagtctcgtcctttcactgtccaagctagagctgctgcagaaaaaaccgttcacgatttcaccgttaaggacattgatgggaaggatgttgctttgaacaaattcaaggggaaagttatgttgattgtcaatgttgcttcaagatgtggtttgacatcatcaaattactcagagctttcacatctgtacgagaaatacaaaactcaaggatttgagattctagcttttccctgcaatcagtttggtttccaagagcccgggtcaaactccgagatcaaacaattcgcttgcacccggtttaaagcagagttccctatatttgataaggttgacgtgaatggaccaagcacagcgccgatctacgagttcttgaaatcaaacgcaggaggattcttgggtggtctcattaaatggaactttgagaagttcttgattgataaaaagggaaaggtcgttgagaggtaccctcccaccacatcccctttccaaatcgagaaagacatccagaagttgcttgccgcttaaaaacttttgctcatgagtgagcatatagagactgatggttaaagtaaccgtaaattgtgacataaagtttccggttattgcttgtataccttcttacattctaagttgtactaatcgcttaataatttgcgtataatggtaatgttatatacattatattcacactgaaaaaaaaaaagggcggccgc

SEQ ID NO: 117227 - DNA, 688 bp, Arabidopsis thaliana
  unsure (1)..(688): unsure at all n locations
gggcccccccttgaaatgcatttccatggccggaccgcaattcccgggtcgacccacgcgtccggtaacactggtcgaaagaagacgaacataaactcgtctccatgactactttatcttcttcgtacggaacattctctacagtcttcaacagttctagacctaattcctcagcaacctttctcgtcccttccttgaaattctccaccggaatatcgaatttcgcgaatctgagtaatgggttttctctaaaatctccaattaatcctgggtttctcttcaagtctcgtcctttcactgtccaagctagagctgctgcagaaaaaaccgttcacgatttcaccgttaaggacattgatgggaaggatgttgctttgaacaaattcaaggggaaagttatgttgattgccaatgttgcttcaagatgtggtttgccatcatcaaattacctcagggcttttcacatctgtacggggaattcaaaactcaacgggttttgaggttcttgcgttttcccctgcaaatcaggtttgggttccaaggagcccggggcaaacttccggggtcaaacaattcgcgttgcacccgggttaaagcaggggtccctatatttgataagggtgacgggattggcccaggcacggcgccgttggttttgaattaacgggggggttttnggggctttnaa

SEQ ID NO: 117228 - DNA, 1899 bp, Arabidopsis thaliana
tacgcaaaatcttccctcaaactcagatccgattcttctaattctttgtccccccagagattcttcttctttctccaagtaaaagaaaacaactttctttctcttttcttgcgaaagtcctcaactttcaccactaaatcagcttccttcaatcactgtgtttgctttggacccagtttctgatttagcgactagggttttgattggaaccgtattaagtatatgagaatcgggttttactggtgaatcggattatcatcggaattcggaaaaagatggatcggaatcaaaagatggatcacgttatcggcgggaagtttaagttgggtaggaagcttggaagtggatcattcggtgaactttatttagggatcaatattcaaactggagaagaagtcgcagttaagctggaacctgtgaagacgaggcatcctcaactgcagtatgaatcgaaaatatatatgtttcttcaaggaggaacgggtgttccccatctgaaatggtttggagttgagggtgaatacagttgcatggttatcgatcttcttgggccaagcttggaggacttattcaattactgcaagcgaatattttcattaaaatctgttttaatgcttgcagatcaattgatatgtagagttgagtatatgcattcgcggggttttcttcaccgcgatattaaaccagacaactttttgatgggtcttgggcgcagagcaaaccaggtgtatatcattgattatggccttgctaaaaaatacaaggatcttcagacacaaaagcatataccatacagggaaaacaagaatcttacaggaactgctcggtatgcaagtgtgaacacacaccttgggattgagcaaagtagaagagatgatctggagtcacttggttatgtgttgatgtattttctacgaggaagtcttccgtggcaaggtttaaaagctggtacgaagaagcagaaatatgacaagattagtgaaaagaagatgcttacttctgtagagactctttgcaagtcgtatccatcagagttcacatcgtacttccattactgtcgttcattgagatttgaggacaaaccggattattcatatctgagaagactttttagggatcttttcattcgtgaaggttatcagcttgattatgtgtttgattggacaatctcgaagtatcctcagattggctctagttcgagaccaaggccaactccaagaccagcgttggaccctccaggaccacctgcagaaagagctgaaaagcctacagtcggacaggacctgcgaggaagatttacaggtgcaattgaggcattcaccagacgaaatgtttcaagccaaggcgctcttggtgatcgctctagacacagatcttctgatgatataccctcttctgccaaggaagtgcacgagtctcgaaatggaagtacctcaaagagaggtgtgatatcaagcaccagacctggctcatcagctgaaccaagcgagaaccactcaagccgactattttcaagtggttcacgtcatgccacaacccaacgggttccacagagctatgaatctgcagctgcagcaaggcctgggcatgaggatgccattagaaacttcgagctccttaccatcggctttggaaagaagaggaaatgaagatagggaaggagaagtttgatgagagtgaaaagacaacattcggtgctgatggctctctcctctgaaaataggaaagacatgtcctcgaattgttttttaaccttgggaacaagatgagaaagtgagagagagaaagagagttaatgtaatctgcctctcccaatctctcagtctctgtttttaaaagaatctgttaataaagctttaaagtgtgcctaaaaaaaaaaaaaaaaaaaaaaaaagcgga

SEQ ID NO: 117229 - DNA, 583 bp, Arabidopsis thaliana
  unsure (1)..(583): unsure at all n locations
ttccccttttttttccnncagcccncgggattncgggccttgggcntcccggcgaatttcaacccagcccttgggaccccttgaacccagtnttctgnggttcccctttctcccaggaattcccggtcccgaattggagtcccccaaagggaggtgtgtttcagcccccagcctggctcctcagctgacccaagcgngaccccctcaagccggcttttttccaagtggttccacgtcatgcccacaaccccaacggnttcccacagagctatgaatctgcagctgcagcaaggcctggccatgaggatgcccattagaaacttcgagctccttaccatcggctctggaaagaagaggaaatgaagatagggaaggagaagtttgatgagagtgaaaagacaacattcggtgctgatggctctctcctctgaaaataggaaagacatgtcctcgaattgttttttaaccttgggaacaagatgagaaagtgagagagagaaagagagttaatgtaatctgcctctcccaatctctcagtctctgtttttaaaagaatctgttaataaagctttaaagtgtaact

SEQ ID NO: 117230 - DNA, 505 bp, Arabidopsis thaliana
ttcttttaagacgacagaagggggtgtccagagatttaattaaattgttgaatagtggaagatctcaaactgagaacttctttccctattctgtttagtcggacaggacctgcgaggaagatttacaggtgcaattgaggcattcaccagacgaaatgtttcaagccaaggcgctcttggtgatcgctctagacacagatcttctgatgatataccctcttctgccaaggaagtgcacgagtctcgaaatggaagtacctcaaagagaggtgtgatatcaagcaccagacctggctcatcagctgaaccaagcgagaaccactcaagccgactattttcaagtggttcacgtcatgccacaacccaacgggttccacagagctatgaatctgcagctgcagcaaggcctgggcatgaggatgccattagaaacttcgagctccttaccatcggctctggaaagaagaggaaatgaagatagggaaggagaagtttgatgagagtg

SEQ ID NO: 117231 - DNA, 1339 bp, Arabidopsis thaliana
gagtatatgcatgtccggggatttcttcatcgtgacataaagcctgataactttttgatgggtcttggacgcaaagcgaaccaggtgtacatcattgactacggacttgcaaaaaagtatagagatctccaaactcatagacacattccctacagggaaaacaagaatcttactggaacagctcgatatgcaagtgttaacactcatcttggaattgagcaaagtaggagggacgatctggaatctcttggctacgtgcttatgtattttcttcgaggaagtcttccttggcaaggccttcgtgcgggtaccaaaaaacagaagtatgacaagatcagcgaaaagaaaaggcttacacctgtagaggttctctgtaaatcctttccacctgagttcacatcatacttcctctatgtacgatcattgcggtttgaagacaaaccagattatccatacctaaagaggcttttcagggatctctttattcgagaaggttatcagtttgactatgtatttgattggacaatcttgaagtatccacagtttagttcgggctccagctctagctccaagccaagatcaagcctgagaccagctatgaatcctccagtaccaattgccgaaagaccagataaaccttcagctggagctgggcaagacagtcgagatagattctcaggtgctttagaggcatatgctagaagaaatggctcaggaagcggtgtggtacaagctgatcgatctagaccaagaacctcagagaatgtattagcatcgtcaaaggatacaacaccacaaaactatgagagagtcgaaagaccaatctcttcaacaagacacgcaagttcttcaagaaaagctgttgtatcgagcgtacgagccacttcttcagctgatttcacagagaaccgctctagcagagttgtcccaagcaatggccgttcctcaaccgctcagaggactcagctcgtccctgacccaaccactagaccgtcatcttcttcttttacccgagctgcgccgtcgaggactgctcgtgacatcacgctccagagctttgagctactcaccatagggaatggaaagaggaagtgagaggcttggctttatcgtgagcgtgttggaggacactgcgacattttaatggatggagactttgtttttatttcacgaaattatcggtttcctaatttaaggaataaatcgaacatcatttgattacaaattatatgtgataaagtatatggttttaaaaaaaaaaaaaaaaaaaaaaaagggcggccgctctagaggatccaagcttacgtacgcgtgcgtgcgacgtcataatcttctatag

SEQ ID NO: 117232 - DNA, 832 bp, Arabidopsis thaliana
  unsure (1)..(832): unsure at all n locations
cgactcactcttgggagagagctggacacgcctgcaggtaccggtccggaattcccgggtctgacccacgcgtgggcccacgcgtccggacaaaccagattatccatacctaaagaggcttttcagggatctctttattcgagaaggttatcagtgtgactatgtatcctgattggacaatctctgaagtatccacagtttagttcgggctccagctctagctccttgccaagatcaagcctgagaccagctatgaatcctccagtgccaattgccgaaagaccagataaaccttcagctggagctgggcaagacagtcgagatagattctcaggtgctttagaggcatatgctagaagaaatggctcaggaagcggtgtggtacaagctgatcgatctagaccaagaacctcagagaatgtattagcatcggcaaaggatacaacaccacaaaactatgagagagtcgaaagaccaatctcttcaacaagacacgcacgttcttcaagaaaagctgttgtatcgagcgtacgagccacttcttcagctgatttcacagagaaccgctctagcagagttgtcccaagcaatggccgttcctcaaccgctcagagggactcagctcgtccctgacccaaccactagaccgtcatcttcttcttttanccgagctgcgccgtcgagnatggtcgtgaatcacggtccagagctttgggtactccccatagggatggnaagaggagtnaaggttnggttttcgnngcgtgttgggnantgggcattttatggngggacttgttttttccgattcggtccaatnaggaaangnnct

SEQ ID NO: 117233 - DNA, 547 bp, Arabidopsis thaliana
  unsure (1)..(547): unsure at all n locations
nnnnnnnnnnnnnnnnnnnnnnnnnnnnnnnnnnnnnnnnnnnnnnnnnnnnnnnnnnnnnnnnnnnnnnnnnnnnnnnnnnccacgcgtccggtgcgttcactacggtttgaagacaaaccagattattcatacctaaagaggcttttcagagacctatttatccgagaaggttatcagtttgactatgtattttctctatgtgcgttcactacggtttgaagacaaaccagattattcatacctaaagaggcttttcagagacctatttatccgagaaggttatcagtttgactatgtatttgattggacaatattgaggtatccacagttcggctccagttccagctcgaattccaaaccaagaccaactttaagaccagctatgaatattccagtaccatctgccgacaaagcggaaaagcctccaattggacaggacagccgtgagaggttctcaggtgttttcgaggcatacaccagaagaaatggctcaggaaccggcgttcaagctgatcagtctagtagaccaagaacctcagagaat

SEQ ID NO: 117234 - DNA, 742 bp, Arabidopsis thaliana
atttttccccccaggaaaccagcctatggccccatgtttttccgcccaagcttcttaattccgccctcactataggggaaagctggtaccgccgcagggtaacggtccggaattcccgggtccacccacgcgtccgattacagattcttcaattcctctttcccttctcctccatttcctgattaaggcttcacatctctgagagagaaatgggtcagatccaatactccgagaaatacttcgatgacactttcgaatacaggcacgtcgttcttcctcctgaagtcgctaaacttcttccaaagaatcgtcttctctccgaaaacgaatggcgagcgataggagtgcagcaaagccgcggatgggtacattacgcggttcatcgacctgagccgcacataatgctattcaggaggcctcttaactatcagcagcagcaggagaatcaagctcagaacatgcttgttaagtgaatcattatcatcacctgagtaagaatgttatatgcaacaattctatgagtattggtttatgtttcttgtaaacatggtttgaatctttgtggttatggatgaatatgtgagagttggtttgttgaacaacttctatgtaatgttagtcttggttctaatgtcatcttctgcttcttaattaaaaaaaaaaaaaaaaaagggcggccgctctagaggatcccagcttacggacgcgtgcatgcgacgtcatagctcatcgatagtgtcaa

SEQ ID NO: 117235 - DNA, 781 bp, Arabidopsis thaliana
ggcacgtcgttcttcctcctgaagtcgctaaacttcttcctaagaatcgtcttctctccgaagtaagtttttttccgcattgttctctgatttctgattctaaatccttcgattagatcatcgaagactatgaaaatttgttgctcttaagaaattaagtttgggaaaaatcgaaaaagagatcgtttaggtttaggatttgaatctttgctctgaatccaaattgcaactgttacgattttgaatctttgctttgggattttgtaaggtttagtgataaagagattttagacatttgtgttgtgcaatctcttcaatggttgtattgattggtggtgatggtaaaaactgtttggaatttcgaagaacgaatggcgagcgataggagtgcagcaaagccgcggatgggtacattacgcggttcatcgacctgagccgcacataatgctattcaggaggcctcttaactatcagcagcagcaggagaatcaagctcagaacatgcttgttaagtgaatcattatcatcacctgagtaagaatgttatatgcaacaattctatgagtattggtttatgtttcttgtaaacatggtttgaatctttgtggttatggatgaatatgtgagagttggtttgttgaacaacttctatgtaatgttagtcttggttctaatgtcatcttctgcttcttaaaaaaaaaaaaaaaaaaaaaaaagggcggccgctctagaggatccaagcttacgtacgcgtgcatgcgacgtcatgctgttctatagt

SEQ ID NO: 117236 - DNA, 1233 bp, Arabidopsis thaliana
aacacgcgtccgcaaatttagtttcttcttcttttggttctgtctgaatccaattttcttatattttatttcctccaccaccgtgagatatgatcgccgccggagctaaatcgctattagggctttcgatggcttctccaaaagggattttcgatagcaattcaatgagtaattcaagatctgttgttgttgttcgtgcttgtgtttctatggatggatctcaaactctgagtcataacaaaaatggatctattcctgaggttaaatccattaacggtcacacgggacaaaagcaaggacctttgtctacggtcggaaactcgacaaatataaagtggcatgaatgttctgttgagaaagttgatagacagagattgcttgatcagaaaggatgtgtgatttgggtcaccggtcttagtggttcagggaagagtactttggcttgtgctttgaatcagatgttgtatcaaaaggggaagctttgttatattcttgatggtgataatgttaggcatggcttaaaccgtgatcttagctttaaagctgaggatcgtgcagagaatattcgtagagttggagaggttgctaagctttttgcggatgctggaataatctgcattgcgagtttgatatctccttatagaacagatagggacgcttgtcgaagtttgctccccgagggagattttgttgaggtgttcatggatgtaccgcttagtgtttgcgaggcgagggatccaaagggtctttacaagcttgctcgtgcaggaaagatcaaaggttttaccgggatcgatgacccttacgagccaccattgaactgcgagatttctctaggacgtgaaggaggaacttctcctatcgaaatggcggaaaaggtcgtcggatacttagataacaagggttatcttcaagcataacatacttctagatacacaaatttgttatctcacggtcttagttctattttacgagccaaagtataaaagtaagcaaatccatggctgttttatggaatcacaagttcgacaaaataaatataaatctcataatttttcttgtccctttttttttgtatcataaatcttgatgttatggttctgtatataatatgtgtgaaataaggttaagcctactaaccattttatatgatctataatacaatatactttgtatgcaaaaaaaaaaaaaaaaaactcgagactagttctctctctctctctcctcgtgccg

SEQ ID NO: 117237 - DNA, 2936 bp, Arabidopsis thaliana
  unsure (1)..(2936): unsure at all n locations
actagtaaatgttatgtttgtatcaccatacatataatggtgtatattgatgcatgcatgtatcatatgtagagagagatctataaagcttcataaaagtgtttctctagaaaaaacgacaaaattcgcagagaaaatccaaaccaaaagtagttttgtaacagagagatagatagaaagctcttgaagatctaaccaaaatctacttttgttcttcttcttcttcttttcataaattttcggagtggtcctatttattgtttcttggatcattagagagacagctatcgatggatgaagatggaaacttgcagattagtaatagtaattacaatggagaagaagaaggagaagatccagagaacaacactttgaatcaaccactgcttaagagacatagaactctttcttcaactcctcttgctttggtcggtgccaaggtttcacacatcgagagtttagattatgaaataaacgagaatgatctgttcaagcatgactggagaagcagatcaaaagcacaagtgtttcaatacatattcttaaaatggacattagcttgtcttgttggtctcttcactggtcttatcgctactctcatcaaccttgctgtcgaaaacatcgccggttacaaacttctcgccgtcggctactacattgctcaagataggttttggacaggtctgatggtctttacgggggcgaatttgggtctgactttggtggcgacagtacttgttgtttactttgctcctacggcggctggtccggggatccctgagattaaagcttaccttaatggcattgacactcccaatatgtttggttttaccaccatgatggttaagattgttggaagtattggagcggttgcagctggacttgatcttggtaaagaagggccattggttcatattggaagttgcatagcttctttgcttggtcaaggtggtccagataatcacagaatcaaatggagatggcttcgttacttcaacaacgatagagatcgaagagatcttattacatgtggatctgcctctggagtatgtgctgctttcaggtcaccagtaggaggagtacttttcgctcttgaggaagtcgctacgtggtggagaagcgctctcttgtggagaacattcttcagtacagccgttgtggtggttgtattaagagcgttcattgagatttgtaactccgggaaatgcggacttttcggctcaggaggactcattatgttcgatgtgagtcatgtagaggttaggtaccacgcagcagatataatcccagtcacattgattggagtctttggtggcattcttggaagcttgtacaatcatcttctgcataaagttctccggctttacaatctcatcaaccagaagggaaagattcataaggtgcttctaagtcttggggtatctctattcacatcagtttgcttgttcggtcttcctttcttagcggaatgcaagccttgtgatccttctatagacgagatatgtccaacaaacggaagatcaggaaatttcaagcaattcaactgtccaaatggttattacaacgatctatccactctgcttctcacaaccaatgatgatgcagtcagaaacattttctcttcaaacactcctaatgagtttggcatggtttctctctggatattctttggcctctactgcattttgggtcttataacattcggtatagcgacaccgtcgggtctcttcctaccgattatcctcatgggttctgcatacggtaggatgctaggcacagcaatggggtcttacacaaacatagatcaagggctttacgcggttcttggtgcagcttcactcatggctggttcaatgagaatgactgtttcactctgtgttatatttctggaactcaccaacaaccttcttttgttgcccattacaatgtttgtgcttctgatagctaaaacagtaggtgacagcttcaatctaagtatctacgagatcattctccatcttaagggcttacctttcttggaagcaaatccagagccgtggatgaggaatctcactgtaggtgagcttaacgacgctaagcctccggttgtaacacttaacggagtagaaaaagtggcaaatatagtcgatgtactaaggaacacaacgcataacgcattcccagtcttggatggagcagatcaaaacactggcacagagctccatggtctgatcctaagagctcaccttgtgaaagttctgaaaaagagatggttcttgaatgagaaaaggagaacagaagagtgggaagttagggaaaagttcacaccggttgaattagctgagagagaagataacttcgatgatgttgcaatcacaagctcagagatgcaattgtatgttgatcttcatcctttgaccaacactacaccttacacagtggtgcaaagtatgtcagtggctaaagctttggttctgttccggtcagtgggtctcagacatttactggtggttcccaagattcaagcttcagggatgtcacctgtgatagggatcttaacaaggcaagatctcagggcttataacattctacaagcatttcctcacttggataaacacaaaagtggaaaagctagatgaataagccaaaatgcaaagagcgttcactattatttggtttgtgtgattcgtgtgtctttccacattcttagttgatatatattctgtccagttttgcttgcattcttccttcaagaccaaaaacaaattataccatttggtagatttgtgttttctacttgtaaatctccttttttttccccacgttttcagtttcaaaagaagaagaataagaaatttgaatacagaaccaaactttgaagcttccatggagttcacaaatcttttaaggaattgtgttaaataaacatctttctatgnnnnnnnnnnnnnnnnnnn

SEQ ID NO: 117238 - DNA, 799 bp, Arabidopsis thaliana
  unsure (1)..(799): unsure at all n locations
accggtccggcaattncccggagtcgnacccacgncgtccgggcattncccagtcttggatggagcagatcaaaacactggcacagagctccatggtctgatcctaagagctcaccttgtgaaagttctgaaaaagagatggttcttgaatgagaaaaggagaacagaagagtgggaagttagggaaaagttcacaccggttgaattagctgagagagaagataacttcgatgatgttgcaatcacaagctcagagatgcaattgtatgttgatcttcatcctttgaccaacactacaccttacacagtggtgcaaagtatgtcagtggctaaagctttggttctgttccggtcagtgggtctcagacatttactggtggttcccaagattcaagcttcagggatgtcacctgtgatagggatcttaacaaggcaagatctcagggcttataacattctacaagcatttcctcacttggataaacacaaaagtggaaaagctagatgaataagccaaaatgcaaagagcgttcactattatttggtttgtgtgattcgtgtgtctttccacattcttaggttgatatatatccggtccagttttgcttgcattcttccttcaaggccaaaaacaaattataccatttggtagatttgtgttttctacttgtaaatctccttttttttccccacggttttcagttccaagcggccgcgagttttggcagcccgggggatccactagttctagaacggccgccaccgcggtggagctccagctaatgttaacctggagtgg

SEQ ID NO: 117239 - DNA, 606 bp, Arabidopsis thaliana
  unsure (1)..(606): unsure at all n locations
tngatnctggggagtaccgntgtgtcatccagcccgngtncaattgatgtganctcacccttgcccacactccccntacacagtggtncaagtatgccagtggctaaagctttggttctgtcccggtcagtggtctcagacattttactggtggttcccaagattcaagcttcagggatgtcacctgtgatagggatcttaacaaggcaagatctcagggcttataacattctacaagcatttcctcacttggataaacacaaaagtggaaaagctagatgaataagccaaaatgcaaagagcgttcactattatttggtttgtgtgattcgtgtgtctttccacattcttagttggatatatattctgtccagttttgcttgcattcttccttcaagaccaaaaacaaattataccatttggtagatttgtgttttctacttgtaaatctccttttttttccccacgttttcagtttcaaaagaagaagaataagaaatttgaatacagaacaaaaaaaaaaaaaaagggcggccgctatagaggatccaagcttacgtacgcgtgcatgcgacgtcatagtaattctaatagttcgcctaaatt

SEQ ID NO: 117240 - DNA, 2618 bp, Arabidopsis thaliana
  unsure (1)..(2618): unsure at all n locations
ctctgtaagaaccttaaaaaggttctgttgcagaggttccgaccaaaagccagagtttcatctttatgtgaacaaagacagagagatggtggaagaagatttaaaccagattggtggtaatagtaattacaatggagaaggaggcgacccagagagcaacacacttaaccaacctctagttaaggctaatcgaacactttcttcaactccacttgctttggttggtgccaaagtttcccatatcgaaagcttggactatgaaataaacgagaacgatctgtttaagcatgattggagaaaaagatcaaaggcacaagtacttcaatacgtgttcttgaaatggacgttagcttgtcttgttggtcttttcactggtttaatcgctactctcatcaacttagctgttgaaaacatcgccggctataagcttttagccgttggtcacttcctcactcaagaaagatatgttacaggtctgatggtgcttgttggggcgaatttgggactgacgttggtggcgtctgtgctttgtgtgtgctttgctcctacggcggctggacctggaatccctgagatcaaagcttatcttaatggtgtagatactcccaacatgtttggtgctactactatgatcgttaagattgttggaagcattggagcggttgcagctggacttgatctaggtaaagagggtcctctagttcacattggaagctgcatagcttctttgcttggacaaggtggaacagacaaccaccgtatcaagtggcggtggcttcgttacttcaacaacgatagagaccgcagggatctgattacatgtggctcagctgcaggagtgtgtgcagccttcaggtcacctgttggaggtgtacttttcgccctcgaggaagttgctacttggtggagaagtgccttattgtggcggactttcttcagcacagcggttgttgtggttgttctaagagagttcatagagatctgcaattcagggaagtgtgggttgtttggaaaaggagggctaatcatgtttgatgtgagtcatgtaacttatacttaccatgtaactgatataatccctgtcatgttgattggtgtaatcggtggaattcttgggagcctgtacaatcatcttctgcataaagttctcaggctttacaatctcatcaatgagaagggtaagatccataaggtgcttctcagtcttacagtatcactctttacatctgtttgcctttatggccttcctttcttagcgaaatgcaagccttgtgacccctcgatagatgagatatgcccgacgaatggaagatcgggtaacttcaaacagttccattgccctaaaggttactacaatgatctagctactctgcttctcaccaccaacgatgatgctgtcagaaaccttttctcttccaacactcccaatgagtttggtatgggttccctttggatattctttgtgctatactgcatcttggggcttttcacatttggtattgcaacaccgtctggtctcttcctccccatcatcctcatgggtgctgcatatggccgaatgcttggcgctgcaatgggatcatacacaagtattgaccaagggctttatgctgtccttggtgcagctgcactcatggctggatcgatgagaatgactgtgtcactctgtgttatattccttgaactcaccaacaaccttcttttgcttcctataacgatgatcgtgcttctgatagccaaaactgtgggagacagctttaacccgagtatatatgacatcatcttgcatctaaagggcttacctttcttagaagcaaatccagagccgtggatgaggaacctcaccgttggtgagcttggtgatgctaagcccccggttgtaaccctgcaaggtgttgaaaaggtttcaaatatagttgatgtgctaaagaacacgacgcataatgcattccctgttttagatgaagcagaagtacctcaagtgggtctagcaactggggctacagaactccacgggttgatcttgagagcgcacctcgttaaagttctgaaaaagagatggttcttgacagagaaaagaagaacagaggagtgggaggtcagagaaaagtttccatgggatgaattggctgaaagagaagacaactttgacgacgtggccatcacaagcgctgaaatggaaatgtatgtcgatcttcatcctctcaccaacacaacaccttacacagtcatggagaacatgtcagtggccaaggctttagtacttttccggcaagtgggactccggcatttgcttattgttcccaagattcaagcctcaggaatgtgtcctgtggtagggatcttaaccagacaggacctaagggcatacaacattctacaagcctttcctctcttggaaaaatccaaaggtggaaagacacattgaaagagctacttgcttgttgtaagaaatcgcttgcagccttgtgtttttcttctcattcttaaagatgtatctgtccagttttgcactttttcttcatatccaacagaagttgataagataaatattgcaatgacacaaaaagagagactcatatctccttatcaacaggaacagagcaaaactgtttncc

SEQ ID NO: 117241 - DNA, 2725 bp, Arabidopsis thaliana
caattatatagctttccatttctgtggctttgtaatctgatcggaaatcgaaaacaaacaattttattttcttaaaaaaacaagatcgtggaggagagatggatgatcggcacgaaggagaccatcatgatatagaggttgaaggaggagctttacatggtttcgagaggaagatatctgggattctagacgatggatctgtcggatttcgacagcctcttctcgctaggaatcgaaagaacacaacttctcagatcgctattgtcggagctaatacttgtcccatcgaaagccttgattacgagatcttcgaaaatgattttttcaagcaagactggaggtctaggaagaagattgagatacttcagtatacgtttctcaaatgggcgcttgcttttcttattggtttagctactggacttgttggctttttgaataaccttggtgttgagaatatagctggatttaaactcttgctcatcggtaatctcatgctcaaggaaaaatatttccaggcattttttgcatttgctggttgtaacttaattttggcaactgctgctgcttcactctgtgcttttattgctcctgcggcggcaggatctggcatacctgaggttaaagcatatctcaatggtatagatgcttattcaatattagctccaagcaccctctttgttaagatctttggctctatatttggagttgctgccggatttgtagttggaaaagaagggcctatggttcatactggtgcttgcattgctaatttacttggacaaggtggttccaaaaagtaccggttgacttggaagtggctcagattcttcaaaaacgatagagacagaagagacctgatcacttgcggggctgctgctggtgtagcagctgccttccgtgctccagttggaggagtgcttttcgcccttgaagaagctgcttcatggtggaggaatgcccttctctggaggacattcttcactaccgcagttgtagcagtggtcttacgaagtttgattgagttctgtcgctctgggagatgtggactgtttgggaaaggaggtctcatcatgtttgatgtaaactcgggaccagtgctatatagcactccagatttgctagcaatagtattccttggagttattggtggtgtgcttggaagcctttacaactaccttgtggacaaagtcctccgcacatatagcattataaacgagaaaggtccgagatttaaaattatgcttgtaatggcagtttccattttgagctcgtgttgcgcatttggtctcccatggctttcacagtgtactccatgtcctattggcatagaggagggaaagtgccctagtgtaggtcgatccagcatctataagagtttccagtgtcctccaaaccattacaatgacctttcctccctacttctcaacaccaatgatgatgcaatccgtaatcttttcacatccagatctgaaaatgaattccatatctctacccttgccatcttctttgtcgcagtgtactgccttggcatcataacatacggcatagccataccctctgggcttttcattcctgtcattcttgctggagcctcttatggacgactagtgggtagactgctgggtccagtatctcagcttgatgtaggtctgttttctctgctcggagctgcttccttccttggaggcacaatgagaatgacggtctctctatgtgttatactgctcgaacttacaaataatctcctaatgctgccactggtgatgcttgtactccttatatcaaaaacggttgcagattgtttcaacaggggggtctatgaccagattgtaacaatgaaaggactgccttacatggaagaccatgcagagccgtacatgcgcaatttggttgcaaaggacgtagtttctggagctttgatatccttttcgagagttgaaaaggttggggtaatatggcaggctttaaaaatgacaagacataatggtttccctgtaattgatgagccacctttcacagaagcttctgagctatgtgggattgccttgagatctcatctccttgtgcttctccaagggaagaaattctcgaagcagagaacaacttttggttcacaaattctgagaagttgcaaagcccgtgactttggtaaagcagggttaggtaaggggctcaagattgaagatttggatctaagtgaggaggagatggagatgtatgttgatctccatcccatcactaacacatctccttacactgtgcttgagactctgtctctagctaaggcggctattcttttccggcaacttggtcttcgccacttgtgtgtggtgcctaaaacaccagggagaccgcctattgttggaatactgacaaggcatgatttcatgccggaacatgtcctgggactctaccctcacattgatcccctcaagtgaataaggtaataaagaatggagaaacaagtacgtgagagttctctaaagatctacaatgtaataatatgtgaatatcaaaaaattaaaagcccagatgaccaatgtcacttaggcatttatttcaattattcgttgagattgattatggaaaagcaggggaaggatgattgtgtaatgaggtgatacaagttttttttttttgggttttggttttcacaacatttattcaaaacaataaataaaaactaaacatgtaattatattataagtcgatatcaattttgctc

SEQ ID NO: 117242 - DNA, 2861 bp, Arabidopsis thaliana
aaaaacccacaaaatgaatctaagatagtttgctttacaattcaaaaacccgtctctgtgattcaaaatccctaaatccagagatcgaactctcgatcatgttatcgaatcatctccagaacgggatcgaatccgataacctactctggtctcgtgtccctgaatccgatgatacttccaccgacgatattactctactcaactctcaccgtgacggtgacggaggtgtcaatagtctcgattacgaagtcatcgagaattacgcttatagagaagaacaagctcatcgaggaaagctttatgttggttactacgttgctgtcaaatggttcttctctttactcatcgggatcggaactggattagctgctgtgttcatcaatctctctgttgagaatttcgctggatggaaatttgctcttacttttgctattattcagaagtcgtattttgctgggtttattgtttatcttctcatcaatttagtcttagtgttttcttctgcgtatattattactcaatttgctcctgctgctgctggttctggcattcctgagattaagggttatctcaatggaattgatattcccggcaccttgctctttagaactctcattggaaagatatttggaagcattggttctgttgggggtggcttagccttggggaaagaaggtcctcttgtgcatacaggtgcctgcattgcatcgttgcttggtcagggtggatctacgaaatatcatttgaattctagatggccgcaactttttaagagtgatagagatcggcgtgatcttgtcacttgtggatgtgcagctggagttgctgctgcctttagagccccagttggtggagtgttatttgcattagaggaggtcacatcatggtggagaagtcaacttatgtggcgtgtctttttcacttccgctattgtggctgttgttgtgcgtactgccatgggatggtgcaagagtggaatatgtggacattttggtggaggtggtttcattatatgggatgtatcagatggtcaagatgactactacttcaaagagctactgccaatggctgtaataggagttatcggagggctacttggggcattatttaaccaacttacactctatatgacatcttggcgtcggaactctttgcacaagaaaggaaatcgagtgaagataattgaagcatgcatcatctcttgtataacttcagctatctcatttgggctgccactcctaagaaaatgcagtccatgccctgaatcagttcctgactctggtattgagtgtccacgacctccaggaatgtatggaaattatgtaaatttcttctgcaagacggataacgaatacaatgatctcgctacaattttcttcaatactcaggatgatgctataaggaatttgttcagcgcaaaaacaatgcgagagttcagtgctcagagtctactaacttttctggctatgttttacacattagctgtagtgacctttggcactgctgttcccgccggccagtttgttcctggaataatgataggatcaacttatgggcgccttgtaggcatgtttgtggtcaggttttataagaagctcaacattgaggagggaacttatgctttgctgggagctgcttcatttctcggaggctcgatgcggatgactgtatctttatgtgttatcatggttgaaatcacaaataacctgaaacttctgcctcttataatgttggtacttctcatctcaaaggccgtcggtgatgctttcaatgagggattatatgaagtacaagcacgcctgaagggcattccgttacttgaatcgagacctaagtatcacatgcgtcaaatgatagcaaaggaagcgtgtcaaagtcagaaggtaatctctttacctcgagttatcagggtcgcagatgttgcttcaattttgggcagcaataaacataatggatttcctgtaatcgaccacacgagaagtggtgaaacacttgtcatagggttagtccttcggagtcacttgcttgttctccttcaatcaaaagtcgatttccaacatagtcctttgccttgtgatccaagtgccaggaatatcaggcacagttttagcgagtttgctaaacctgtttcatcgaaagggttatgcatagaagatatacatttaacttcagatgatttagagatgtacatagatcttgctccatttttgaatccgtctccatacgttgttcccgaagacatgtccttgacaaaggtatacaatcttttccggcaacttgggttgcgacatctattcgttgttccccgtccttcccgtgtgataggcttgatcaccagaaaggatttactgattgaggaaaatggggaatcatcagcagtggaactccaacagtcaactagtgtaagaggtcggtacagtgagacagcaacgcggatggacgctgcacgaccgcttctagacgatcttttaggttaataaaacagaccaaacatatacaagcagttgaagctggtagctaagatctttagtcgggccaattcttcgtccatacaaggatacaagcttgttccgcatgttgccacccaaatccggtatggaggatatatgatcgtctcttgagatgggattgtgttgttcgctaaccgatctcattctccgttcacagagagtagaaagattatatatgtagagggcttttgattgttgtaattgtgcaatctttgattattttcttggtcactgtaaaataatccagcttttgatatatttacttgattaacttaaaaaccatattgtaaacaagaaagagaaaaccagaatttatcggtcataccgccatggaaaaataaatcatatttt

SEQ ID NO: 117243 - DNA, 743 bp, Arabidopsis thaliana
ggacttcctgaaaaaaaaaaaatcatttcttctctgaaacgaaaaaccaaagaaacgagaagaagaagctatggcggatcagctaactgatgaacagatctctgagtttaaggaagcttttagcctcttcgacaaagatggagatggttgcatcaccacaaaggagctgggaacagtgatgcggtcactagggcagaacccaacagaagctgagctacaagacatgatcaacgaggttgacgctgatggaaacggaaccattgacttccctgagttcttaaacctaatggctaaaaagatgaaggacacagactcggaggaagagctgaaagaagctttcagggtgttcgacaaagaccagaacggtttcatatccgctgcagagcttcgccatgtgatgacgaatctaggtgagaaactgactgatgaagaggtcgaggagatgattcgtgaagcagatgttgatggagatggtcagataaactacgaggagtttgtcaagattatgatggctaagtgatgatgataagaaaaaaatgaagaataaaagtggtgatgtgatgaccttttaggcttttactatctacaaaagaatgattcgacctttaatgtcttgggtttgatttgagcctagtagtttcttaaggttttaacagactgaatttgtgacttatctttttttataatcgttggtttctttctcgttggcataatggcatgtttagatttcggtaaaaaaaacc

SEQ ID NO: 117244 - DNA, 564 bp, Arabidopsis thaliana
  unsure (1)..(564): unsure at all n locations
aaaaaaaaatcatttcttctctgaaacgaaaaaccaaagaaacgagaagaagaagctatggcggatcagctaactgatgaacagatctctgagtttaaggaagcttttagcctcttcgacaaagatggagatggttgcatcaccacaaaggagctgggaacagtgatgcggtcactagggcagaacccaacagaagctgagctacaagacatgatcaacgaggttgacgctgatggaaacggaaccattgacttccctgagttcttaaacctaatggctaaaaagatgaaggacacagactcggaggaagagctgaaagaagctttcagggtgttcggcaaaggccagaacggtttcatatcccgctgcagagcttcgccatgtgatgacggatctaggtgagaacctgcctgatgaagaggtcgaggggttgtttcgtgaagcagttttttatgggggtggccagataaacctcggggggttttcaaggttattgtgctagtcttgtgtaggaaaattgnggtaaaagtgnntttntgccttnngnttnctttcaaaatgtng

SEQ ID NO: 117245 - DNA, 743 bp, Arabidopsis thaliana
gagagaggcaaataatatattcagtagcaaaaaaaaaatctgggatttctaaaaaaaggtaagaaggaaaatggcggatcagctcaccgatgaccagatctcagagttcaaggaagcctttagcctcttcgataaggatggtgatggttgtatcaccaccaaggagctcggaaccgtgatgaggtctctggggcaaaacccaacagaagctgagcttcaagacatgatcaatgaagttgatgcagatgggaacgggaccattgatttcccggagttcctgaacctgatggcaaggaaaatgaaggacactgattcagaggaagagctcaaggaagcttttagggtttttgataaagaccagaatggtttcatatctgcagcagagcttcgacatgtcatgacaaatctcggtgagaagctatccgatgaggaagttgatgagatgatccgagaagcggatgttgatggcgatggtcagattaactatgaagaattcgtcaaagtcatgatggctaagtgagagaattttatcttaagcccacaaaaagaaacaagatttatgatttctacagtgaagttacattatgacttgattctggttgcgttctttaggacatcattttgcttatttcccttgtttgtttggttaagccttttagtgttatgtgaagtatgaactcatattttgctcatccttgtgacaatttttatctctctttttaaggcatctgattttattctgt

SEQ ID NO: 117246 - DNA, 1623 bp, Arabidopsis thaliana
cttttagccaaactctctctagtctctctctctctctctacttgagagtgccgtctccattttctcaacgtagtcgtttattttgaacaaagactctctccgtttaccaaagtgttgttaacgatgaggaggtgcttctccaaaattactgattgccacttgggtttcaagaattccaacttcttattggttggttctgaagttggttcaggttcagtaacgagaaccattactactactactagtgagcgtttatttagcagtagttatgcagctcatcaagttgatcagataaaagacaatcctgtctctgacatgttgattgataaatttggtcgcttacatacctacttgaggatatctttgactgagcggtgtaatctccggtgtcagtattgtatgccgtctgaaggtgtggaacttactcctaagcctcagttgttgtcacagtctgagattgttaggttggctggtctttttgtttctgctggtgttaacaagattcggttgactggtggcgagcctacggttaggaaagatatcgaagagatttgtctgcagttgtctagtttaaaagggttgaagaatttggctattactaccaacggtatcactcttgcgaaaaaactaccaaggcttaaggaatgcggacttgattcgctgaatatcagcttggatactctggttccagcaaagtttgagtttctgactagacgtaaagggcatgatagggttatgaaatcgattgatactgctattgagcttggatacaatcctgtgaaagtcaattgtgttatcatgaggggattgaatgatgatgagatttgtgattttgttgagttgacacgcgacaagccaatcaatgtccggttcatcgagtttatgccatttgatggaaatgtttggaatgtgaagaaacttgtaccttatgcagaagtgatggataaagtggtcaagaggtttccgagcataaaacgaatgcaagatcacccaactgaaacagctaagaactttacgatcgatgggcattgcggttctgtttctttcatcacatccatgacagaacacttctgtgctggctgcaatagattgagacttcttgcagatgggaacttcaaagtttgcttgtttggtccttcagaggttagtctgagagatcctctccggtctggtgctgatgatgaggcgctaagggaaattataggcgctgctgtgaagagaaagaaagctgcacacgctggaatgcttgacattgctaaaacagctaatagaccaatgatacacattggtggctaagctccggtgaacgttggtgaagttcctggaaaacactacaaggaacatttgagttttatatcttgtaagaatctatctgctgctcccaactctgtgagactgtgacaaacttttttgcaaacaagaacaagaagactgaagagtttctcaaactgtttcttctctgtatacgtaacagacactgtacaggaactcagaatttccacacgaatcttttcagtccaattacttttcttatttatggccaaaaagatcaactataagcttttattatgttaagaattttaaaatcttaaatttgataacaacaacaaatccacttgcgat

SEQ ID NO: 117247 - DNA, 1076 bp, Arabidopsis thaliana
gtggtgaaataaaatgatttcgacgctccgtcgcgccgtgtttctccgtcgatttccggcggtggtttctccgatcaaaagggctttcagcagtagaattgacgatgaattcgatccccaaatcatgaatataaatgagctgaatcaggagatgcagtcaatctttggacaagaaccttctcccgatggtcctgggacaatggatttctctgagttgaaatcatccaaaatcgaacctttgagatcgaagaatattgattttagacaacaaattgagtatcataaatctacacactcgagcaagaatgattcgcaagctatagaacaatatgcaaaagtggctagtgatatgtctaagctaacacatgttggtatcgcaggggaagctcaaatggtggatgtttcttctaaggacaattccaagagaactgcattggcctgttgtaaagttattcttgggaaacgagtatttgatttggtcttagcgaatcaaatggggaaaggagatgttcttggagtggcgaaaatagctgggatcaacggagcaaaacaaaccagcagcttaataccattgtgtcataacattgctcttacgcatgttcgtgtagacttacgactaaaccctgaggattttagtgttgacattgaaggagaagcttcttgcactggaaaaaccggagttgagatggaagctatgactgctgtatcagttgctggtttgactgtttacgatatgtgtaaggctgcttccaaagatatcagtattacagacgtgaggctcgagcgtaaaactggtggaaagagcgggtcttggtctagactctagaggggactgaacacattcaacatttgcctctgttgctataaaggttagctttctttatcttatttggatgcttgggtgatatctcttatatggaaagatggaaacttttgaatctcgattagtcaattaggcactgtgaaagacactatagttttgctcacaatttgttgcttctgctgttttagtttgggtactctctaagaacacaggtgaaatattacctattgatgcctaagagcggtttgaaact

SEQ ID NO: 117248 - DNA, 1584 bp, Arabidopsis thaliana
  unsure (1)..(1584): unsure at all n locations
nnnntgctacgcgnnnnnnnnnnnnnnnnnnnnnnnnnnnnnnnnnnnnnnnnnnnnnncacgcgtccgtctacttctctaattccgggctggtcggaaagtgaggaagatacactgaagcaaaagagcaagtcatggcggcgacatcttcctctgcttttctccttaatccgttgacttctcgccaccgtcctttcaaatactcgccagagctctcttctctctccttatcctctcgaaaggctgctgctttcgatgtttcctcagctgctttcacgctcaagagacagagccggagtgatgttgtgtgcaaggctgtatctatcaagccagaagctggtgttgaagggctcaatatcgccgataacgccgctcagcttattgggaaaactccgatggtgtacttgaacaatgtagtcaagggctgtgttgcaagtgttgctgctaagcttgagatcatggaaccatgttgcagtgtcaaggataggattgggtacagtatgattactgatgctgaagagaaaggacttataacacctggaaagagtgttcttgtggaatctacgagtgggaacacagggattggccttgcattcattgctgcttcaaaaggctataaacttatcttgacgatgcctgcgtccatgagtttggaaaggcgggttcttttgagggcatttggagctgagcttgtgttaactgaacctgcaaaaggtatgactggagcaattcagaaggctgaagaaatcttgaaaaaactcccaattcctacatgctccaacagtttgacaaccctgccaatcccaagattcattatgagacgactggtcctgagatttgggaagatacaagaggcaaaatcgatatattggttgcggggattggaactggtggaactatcactggtgttggtcgattcattaaagaaagaaaacctgaattgaaggttattggtgtcgaacccacggaaagtgctatactttctggtggaaaacccggacctcacaagattcaaggaattggagctggatttgtacccaagaatttggatctggctattgtagatgaatacatagcgatttccagtgaggaagctattgaaacctcgaagcaactagctctccaggaaggcttgttggttggtatatcttctggagctgctgctgctgctgcaatccaggttgcaaagagacctgaaaatgccgggaaactcatagccgttgtgttcccgagcttcggggaacgttacctctcgacccagcttttccagtcgattcgagaagagtgcgagcaaatgcagcccgagctttgattttcttctgtaatttcgtgaccaacaaggaacctcttctttgatttattgctgattgtttttcttctaatagacgtttctgcagaaatctctacgtctactgtgtatatttacaattcgcaacgcaatttggtgtttgttattaataaaggcataagaggttttggtcaaaaaaaaaaaaaaaaaaagatgacaaaatcaaagacaagatccnnnnnnnnnnnnnnnnnnnnnnnnnnnnnnnnnnnnnnnnnnnnnnnnnnnnacaatcc

SEQ ID NO: 117249 - DNA, 2339 bp, Arabidopsis thaliana
  unsure (1)..(2339): unsure at all n locations
cccaagcgtccgggaattcgccattgacaaagtactcaattccaaaacaaagaataagcaaacaacaacaattttcacttccttcaaaaattataaaaatccagtttttatctttgcaagattcaaaagtttgaatttttacttgttttgatttctgggttttgtttgttttttgatttcggtaatgatacaattgagattttgatttcgtgtgatgttgagagattcttaaatgggtctatgtacttcgaaaccgaattcatctaattccgatcaaactccggcgaggaatagtccacttccggcgtctgaatccgtcaagccttcgagctcttccgttaatggtgaagatcagtgtgtaacaacaacgaacaatgaaggcaaaaagtctccgtttttccctttttatagtccaagtccagctcactatttcttctccaagaagactccggcgagatctccggcgactaattcgactaattcgactccgaagcgattctttaaacggccgtttcctcctccgtctccggctaaacatatcagagctgttttagcgagaaggcatggttctgtgaagcctaattcgtcggcgatccctgaaggtagtgaagctgaaggaggtggtgttggattggataaaagctttggtttttccaagagttttgcgagtaagtatgagcttggtgatgaagttggtcgtggtcattttggttatacttgtgctgctaagtttaagaagggtgataataaaggtcaacaagtcgcggttaaagtcattcccaaagcaaagatgacgacggctattgcaattgaagatgtgagaagggaagtgaagatattgagggctttgtctggtcataacaatcttcctcatttctatgatgcttatgaggatcatgataatgtctatatagtgatggaactatgtgaaggaggagagcttttggatagaatactttcaagaggtgggaagtacacagaggaggatgcaaagaccgttatgatacaaatattgaatgtggttgctttttgtcatctgcaaggcgttgtacacagagatcttaaaccagagaattttctttttacctcaaaagaagacacctctcaattgaaggcaatagatttcggtttgtcagattacgtgagaccagatgagaggctcaatgacattgttggtagtgcatactatgtagcacctgaagttctgcatagatcttacagtacagaagctgatatttggagtgttggtgtgattgtatatattctattgtgtggaagccgaccgttttgggctaggacagaatcaggaatctttcgtgctgttctaaaagctgatccaagttttgatgaccctccttggcctttgttatcttcagaggcaagagattttgtaaagcggttgctaaacaaagatccgcgtaaaagattaacagctgctcaagccttaagtcatccatggataaaggactcaaacgacgcaaaggttccaatggatattctggttttcaaacttatgagagcttatttacgatcatcatctctccgtaaagctgcattaagagctttatcgaaaacacttacggttgatgaactgttttatctgagagagcagtttgctttgttagaacctagtaagaacggaaccataagtctagaaaacatcaaatcagctctgatgaaaatggcaacagatgcgatgaaggactcacgtattccagagttcttaggacaactgagtgctcttcaatatagaagaatggactttgaggaattctgtgcagcggcattgagtgttcaccagctagaagctcttgatcgatgggaacaacacgctcgttgtgcttatgagcttttcgaaaaggaagggaaccgaccaatcatgatcgatgaactcgcttcggaacttggtcttggcccttctgtaccggttcacgcagtgcttcacgattggcttagacataccgatgggaagcttagctttctcggatttgtgaaattgcaacatggtgtgtctagccgcacgatcaaagctcattagaagggttttgaaactttgaatgatatgtatgaaatttgtctgagctctaaggtctcattctcctaggagttataatatgtggcttttgacttttgttatgaaagctgagaagcaaagattataaaaaaaaatgagtgtagcaaaaaaagagagaagtgtgttagttttgtagagaatgatatgatattttccccaaatttggtaacttatgacgattgatgatatttctgacatttttagattttgctttttttgacaccnnnnnnnnnnnnnnnnnnnnnnnnnnnnnnnnnnnnnnnnn

SEQ ID NO: 117250 - DNA, 1564 bp, Arabidopsis thaliana
  unsure (1)..(1564): unsure at all n locations
ggaattcggcacgaggaaaatagaaaagtaggatcatggtggcgatgaatggcttcaaggtttaaccgggaagctaagctcgcatctcaaatcttgtctacacttttgggaaaccgaagctgctacacatccatggccgccacatcttcctctgctttacttcttaatccgttgacttcttcttcttcttctactctccgtcgtttcagatgctcgccagagatctcttctctctccttctcctccggttctgatttctctctagcgatgaagaggcagagtcggagttttgctgatggttcggaacgagatccgtctgttgtgtgtgaggctgttaagcgcgagactggacctgatggactcaacatcgctgacaatgtgtctcagctcattgggaaaactcctatggtgtacttgaacagtatagcaaaaggttgtgtagcaaatattgctgccaaactcgagatcatggagccatgttgcagtgtcaaggataggattgggtacagtatggttactgatgctgagcaaaaaggatttatatcacctggaaagagtgttcttgtggaacctacaagtggaaacacgggtattggcctagcattcatcgcttcaaggggctatagacttatcttgacaatgccagcatccatgagtatggaaagaagggttcttttaaaggcatttggagctgagcttgtattaacagatcctgctaaaggcatgactggagcggttcagaaggctgaagagatcttgaaaaacactcctgatgcatacatgctccaacagtttgacaaccctgcaaatccaaagattcattacgagactactggtcctgagatctgggatgatacaaagggcaaggtggatatctttgttgcaggaattggaactggtggaactatcactggtgttggtcgatttattaaagagaaaaatcccaaaacgcaggttattggtgtaagacccaccgaaagcgatatactttctggtggcaaaccgggacctcacaagattcaaggaattggagctggatttatacctaagaatttggatcagaaaattatggatgaagtcatagcgatttcaatttccaagttagaagctatagaaaccgcaaagcaactagctcttaaggaaggcttgatggttggtatatcatctggagctgcagctgctgcaatcaaggtggctaagagacctgagaatgctggaaaactcatagctgttgtttttccgagcttcggagagtatctatcgaccccgctgttccagtctatccgggaagaagttggagaaaatgatcagcctgaggtatgaacattagcaacttggtctacttctgcaaagctctttctccataattacagtctgagtgctagcaatttatttttatcaataaggcattagtgaatgtggtttaggttctattttggatatccaacactagtctatgttttactcaaacattttcttgttggaaatcccaatgcttaattatattgaattgnnnnnnnnnnnnnnnnnnnnnnnnnnnnnnnnnnnnnnnnnnnnnnnnnnn

SEQ ID NO: 117251 - DNA, 1187 bp, Arabidopsis thaliana
  unsure (1)..(1187): unsure at all n locations
acgcgtcaaccaactcgacactatcgatctaatcttttcagctctctccatcgtcgtcgtatctgtgactctcgtgatcatcgcctgaaaaaaatttgagataatggccagaaagttcttcgtcggaggcaactggaaatgtaacggaactgctgaggaggtgaagaagattgtgaacactcttaatgaagctcaggttccttcacaggatgttgtagaggttgtggttagccctccatatgtttttcttcccctggttaagagcacattgaggtctgacttttttgttgcggcacaaaactgttgggttaagaaaggaggtgctttcactggtgaagtgagtgcggagatgcttgtgaacttggatattccatgggttatccttggtcactctgaaaggagggcaatccttaatgaatcaagcgagttcgtcggagacaaggttgcctatgcacttgctcaaggtttgaaagtgattgcttgtgttggtgagactcttgaggagcgggaagctggatcgaccatggatgttgtggctgcccagaccaaggctattgccgatcgggtgacaaactggtcaaatgttgtcatagcctatgaaccagtgtgggccattggaaccggaaaggtcgctagcccagcccaagctcaagaagtacacgatgagctgaggaaatggctggccaagaacgtgagtgctgatgtcgctgctacaacccgcatcatttatggaggatccgtcaatggtggtaactgcaaggagctaggtggacaggccgatgttgatggtttcttggtcggtggtgcttctctaaagcctgagtttatcgacatcattaaggccgcagaggtgaagaaaagtgcctaatgagctcattaagcaatttaaaagtcctttgcttttccagtcgcaactctgaaaaaatgaataagttggtattatgatatgatacattttgcttcagttgtatttggcaaaagtttctctcttactatattgttttgagaacgcaacaatcattttcttcgccatttatttagctgtggacttgcaatttgcaaatcccttccttttaaaaaaaaaaaaaaaaaccaaaaccnnaagnnnnnnnnnnnnnnnnnnnnnnnnnnnnnnnnnnnnnnnnnnnnnnnnnnnnnnnnnnnnnnnnnnnnnnnnnnnnnnnnnn

SEQ ID NO: 117252 - DNA, 956 bp, Arabidopsis thaliana
  unsure (1)..(956): unsure at all n locations
actnagggaccgggcctgaacnnccngggtcancccactgnngtccggaaaaacctgttgggttaagaaaggaggtgctttcaccnggtgaagtgagtccggagatgcttgtaaacttggatatnccatgggttatccttggtcactctgaaaggagggcaatccttaatgaatcaagcgagttcgtcggagacaaggttgcctatgcacttgctcaaggtttgaaagtgattgcttgtgttggtgagactcttgaggagcgggaagctggatcgaccatggatgttgtggctgcccagaccaaggctattgccgatcgggtgacaaactggtcaaatgttgtcataagcctatgaaaccagtgtgggccattggaaccggaaaggtcgctagcccagcccaagctcaagaagtacacgatgagctgaggaaatggctggccaagaacgtgagtccctgatgtcgctgctacaacccgcatcatttatggaggatccgtcaatggtggtaactgcaaggagctaggtggacaggccgatgttgatggtttcttnggcggtggtnttctctaaagcctnagtttatcgncatcattaaggccnaagaggtaaggaaagtnccaattggntcattaagaatttaaaagcccttggcttttccagtcgcaactttgaaaaaatgaataagtgggtattatgatatgatacattttgcttcagttgtatttggcaaaagtttctctcttactatattgttttgagaacgcaacaatcattttcttcgccatttatttagctgtggacttgcaatttgcaaatcccttccttttacagtcttctcaactcttcagagaatctgtgtttggagttcataacccctcgggccttttgatcaaacccctatttctaatgtcgtccgatcataaacctgtgtgttatataatatgttgtttgttc

SEQ ID NO: 117253 - DNA, 1506 bp, Arabidopsis thaliana
atggcgataagaatcactttcacttactccacccatgttgctcggaatctcgtcgggacccgtgttggtcccggtggttactgctttgaatccttggttcgtcctagattcttctcccacaagcgtgatttcgatagatctcctcggaatcgacctgcatcgatgtatggtagcatcgcgagggagctcatcggagaaggaagtcaaagcccgcttgtgatgggtttgatctcgatattgaagtcaacgacgggtcatgagtcgtcaacgatgaatgttctgggggtttcatctttcaaggcttcttctattattccgtttcttcaagggtcgaaatggattaagaatccaccggtgattgatgacgtggataaaggaggaacagtttgtgatgatgatgatgataaggaatcgaggaatggaggaagtggatgggttaataagcttttgagtgtttgttctgaggatgctaaggctgctttcacggcggttactgtttctatcctttttagatcagctcttgcggagccaaagtcgattccttcaacgtctatgtaccctaccttggacaagggtgatcgcgttatggcggagaaggtctcatactttttcaggaagccagaggtttcagatatagtaatcttcaaggctcctccaattttgctggaatatccggaatatggctacagttccaatgatgtattcataaaaaggatagtggcaagtgaaggtgactgggttgaagttcgtgatgggaagctctttgtgaatgacattgtgcaagaagaagattttgtcttagaaccaatgtcatatgaaatggaaccaatgtttgtccccaaaggttatgtctttgtccttggtgataaccgcaacaaaagctttgactctcataactggggtccacttccaatagagaacatcgttggaagatctgtgttccggtactggccaccgagcaaagtatcagacaccatataccacgaccaagctatcacaaggggacctgttgcagtttcatgacaaaagaaagttggatttttcttaggattaaagcacaagattgtgcaaaaccagtctggtcagaattgggtagacttggaattgaaactcaaaaccgttatgatatctgcagatacatactgtatcatcgttatggatcgcatctggttcttagctgatggtcgggaagccggagatgttacgtgttcaaaaggaatggaagatgcaaagaaaaggtaacgatttactgtgattgttatgtgtgaaaaccctggacaagatactgtagtaaaaccataaaggcaactgttaaacaaagtgtgattttttgttgttatgagtttgtactatagaatcgtgtaaaacctcctttgtgttgttgtatgtaaattgggatattgttatattcatgttttggctacgcaaaaaaaaaaaaaaaaaaaaaaaaaaaaaagcgaccgctctagaggatccaagcttacgtacgcgtgcatgcgacgtcat

SEQ ID NO: 117254 - DNA, 471 bp, Arabidopsis thaliana
aatcgacctgcatcgatgtatggtagcatcgcgagggagctcatcggagaaggaagtcaaagcccgcttgtgatgggtttgatctcgatattgaagtcaacgacgggtcatgagtcgtcaacgatgaatgttccgtgtccaaaaggaatggaagatgcaaagaaaaggaaccgatttcctgtgattgttatgtgtgaaaaccctggacaagaccctgtagtaaacccctaccacgcaactgttaaacaaaagtgtgattttttgttgttatgagtttgtactatagaatcgtgtaaaacctcctttgtgttgttgtatgtaaattgggatattgttaaattcatgttttggccactccaagaaacaaaaaaaaataatataaaaaaatcaaccccatagagcggccgctctagaggatccaagcttacgtacgcgtgcgatgcgacgtcatagtcttctatagtgttacct

SEQ ID NO: 117255 - DNA, 768 bp, Arabidopsis thaliana
tgcaattttcctctcctcccaaccaaaacacaagagccaagaacaaagaaaccatggatcatgatcacatgcatggaatgcctcgaccatcatcatcatcatcatcatcaccatcatccatgatgaacaatggatccatgaacgaaggaggaggacatcaccacatgaagatgatgatgcacatgaccttcttttggggcaagaacacggaggttctcttctccggttggcccggaacaagctccggcatgtatgctctttgtcttatctttgtcttctttctcgccgtcctcaccgaatggcttgctcattcctctctcctccgtggctccaccggagattcggctaatcgtgccgccgggttaatccaaaccgccgtgtataccctccgtatcggcctcgcctatctagtcatgctcgccgtcatgtcgtttaacgccggtgtgtttctcgtcgctctggccgggtcatgccgttggtttcatgttgttcggaagccaaaactttcccggaatacctccgatgacccggaaaactaactatgttcctccctcaggttgtgcttgttgatgataatatcaatgctttatatatatgtatggattgatccatgcttgtgattcaaattaaagatctagggtttgtagttttcttggttattttatggattgttcttgaggttcatgtgtgtgtgaatgtgaggaggaggaatatttgatattttctatcgtttgcttaattttttttgcttttgttttaaaaaaaaaa

SEQ ID NO: 117256 - DNA, 2709 bp, Arabidopsis thaliana
atggcgtcagaagcttcgccttcttcttcggccaccagatcggagccacccaaagactctccggcggaggagagaggtccagcttctaaggaagtatcagaagtaatagaatcgctaaagaagaagcttgcagctgataggtgtatatcaataaagaaaaggattgatgaaaacaagaagaatttgtttgctattactcaaagttttatgaggtcttctatggaaagaggaggtagctgtaaagatggcagtgatcttttagttaagaggcaaagagattcgccaggtatgaaaagcggaatcgatgaaagtaataacaacagatatgtagaagatggacctgccagttcaggaatggttcaaggatctagtgtccctgtcaaaatttccttacgtcctatcaaaatgcctgatatcaaacgtttgtcaccttataccacatgggtttttctggacagaaatcaaagaatgactgaagaccagtctgtagtgggtcgaaggagaatttattatgatcaaactggcggggaagcgcttatctgcagtgatagtgaagaggaggccattgacgacgaagaagaaaaaagagattttttggagcctgaagattatattattcgcatgacccttgagcaactaggtctttcagactcagtcctggcggaactagcaaatttcttgtctagaagtactagtgaaatcaaggcaagacatggagtgcttatgaaggaaaaagaagtatccgagagtggcgataatcaagcagagagctcccttctcaacaaagatatggaaggagcattagattctttcgataacctgttctgccgtagatgccttgtatttgattgccggcttcatgggtgttcacaggatctcatttttccggctgagaaaccagctccatggtgtcctcctgtagatgaaaatttaacctgtggtgcaaactgctataaaacgcttctcaagtctggaagatttccgggatatggccccattgaaggtaaaactggcacttcatcagatggtgcaggtactaaaaccacacccacgaagttctccagcaaacttaatgggagaaaaccaaagaccttcccaagtgaaagtgcatcgtctaatgaaaagtgcgcactagaaacaagtgactcagagaatggactacagcaggataccaattccgataaagtttcatcatcgccaaaggtgaaaggtagtgggagacgagtaggtcgtaagaggaacaacaaccgagttgctgagcgagttcctcgtaagactcagaagaggcagaagaagacagaagcctcggatagtgattccatcgccagtggaagttgttcacccagcgatgcaaaacataaagataatgaagatgctacttcctcttctcagaagcatgtaaaatctgggaactccgggaagtcaaggaagaatggcactcctgccgaagtctccaataattctgtgaaggatgacgttcctgtttgccagtcaaatgaggttgcgtcagagcttgatgcgccgggtagtgatgaaagtctaaggaaagaagagtttatgggtgaaactgtatctcgaggaagattggctacaaataagttgtggagaccacttgagaaaagcctttttgataaaggtgttgagatttttggaatgaatagctgcttgattgctagaaatcttttgagtggtttcaaatcatgttgggaggtcttccaatacatgacgtgctcggaaaataaagcttccttctttggaggtgatggattgaatcctgatggctcttccaagttcgatatcaatggaaatatggttaataaccaagtgaggagaaggtcaagatttctacgtaggagaggcaaagtgcggcgcttgaagtatacctggaagtctgctgcatatcattcaattaggaaaagaattactgagaagaaagaccagccctgccgtcagtttaatccatgtaactgccaaattgcttgtgggaaggaatgtccttgtttgctaaacgggacttgctacgagaagtactgcggttgcccaaagagctgcaagaataggtttagaggttgtcattgtgccaaaagtcagtgtcgaagccgccagtgtccatgctttgctgcagatcgggaatgtgacccagatgtttgtagaaactgctgggtcattggtggggatggttcgcttggggtcccaagccaaagaggcgataattatgagtgcaggaatatgaaattgctcctgaaacaacaacaaagggttttacttggaatatctgatatttctggttggggagctttcttaaagaacagtgtaagtaagcatgaataccttggggaatacacaggagagctgatctcacataaagaggcagataaacgcgggaagatatacgatcgcgagaactgctcttttctcttcaatctaaacgatcagtttgtgctagatgcttacaggaaaggagataaactgaaattcgccaaccattctcctgaacctaactgttacgcaaaggtcatcatggttgctggagatcacagggtggggatcttcgcaaaagagaggatactggctggagaagaactattttacgattaccggtatgagccagatcgagctccagcttgggccaaaaaacctgaagctcctggttctaagaaagacgaaaatgttacaccttctgttggtagacccaagaagcttgcttag

SEQ ID NO: 117257 - DNA, 1105 bp, Arabidopsis thaliana
  unsure (1)..(1105): unsure at all n locations
tgatacttccnnnnnnnnnnnnnnnnnnnnnnnnnnnnnnnnnnnnnnnnnnnnnnnnnnnnnnnnnnncccacgcgtccgccacgcgtccggccgcttcttcttcttcctcactgtagctcgtcgtcgctacaccatctagaagacccttaaccatggctgtcgggaagaacaagaggatttcaaagggtaggaaaggaggaaagaagaaggctgttgatcccttctccaagaaggattggtatgacgtgaaggctcctggttctttcacgaacaggaatgttgggaagactcttgtttccaggactcagggtaccaagattgcctctgagggactgaaacacagggtgtttgaggtttctcttgctgatctacaaaatgatgaggataatgcctacaggaagatccgtcttagagctgaagatgttcagggaaggaatgtgttgacccagttctggggtatggatttcacaaccgacaagctaaggtcattggtgaagaagtggcagactttgattgaagcccatgtcgatgtgaaaaccacagacggctacaccttgaggatgttctgcatcgccttcacaaagagacgtgctaaccaagtgaagcgtacctgttacgctcaatccagccaaatccgtcagatccgcagaaagatgagtgagattatggtgaaggaggcttcatcttgtgacctcaaggagctagtggccaagttcatcccagaggccattggaagagagattgagaaggcaacacagggcatctacccgttgcagaatgtgttcatccgtaaagtgaagatcctaaaggctcccaagtttgaccttggaaagctcatggaggtgcatggagattacacagcagaggatgttggtgtgaaggtagacaggccagctgatgagacaatggttgaggagccaacagaaatcatcggagcttaggggattatagatttgtttgttttttcgctggcaaaaaaaaaaaagaacctaatgttatgtcgccattggtgtgactggttttggactcgtttttgatggatgatctttattgtttatcattgttttaccctttttaaattatatngtgncttaggtctttc

SEQ ID NO: 117258 - DNA, 966 bp, Arabidopsis thaliana
  unsure (1)..(966): unsure at all n locations
cagcgtctccnnnnnnnnnnnnnnnnnnnnnnnnnnnnnnnnnnnnnnnnnnnnnnnnnnnnnnnnnnnnnnnccacgcgtgcgggcaacaggacaaatggattggttgcttccctgttaagtggcatttcgttaaagatatccctaatagctccttgaggcatataactctggagaacaatgagaacaagccggttactaatagcagagacacacaggaagtaaagctcgagcaaggcattaaagtcatcaagattttcaaggaccacgcaagcaagacatgcatcctcgatgattttgagttctatgagaatcgtcaaaagattatccaagaaaggaaaagcaaacacctgcagatcaaaaaacagacattggtggccaatgcagacaaaggtgtaatgtcaaaaattaatcttgtgaaacctcaagagtctactacagcctcagaagatgcagcagcactaggagttgcggctgaagtgactaaagaatcgaaagtggtgaaagagaccgagttacctgtggagaaaaatgctgttgctactgcctgctgaaccaacctttggttttaagtggggactgggtgggctgttttaggctatttagagcggttctctagttttgtttccattcctgaatttgcagactttttttttttttttttttttgggacccacttgaggggggagtggcttagtaaatgaagttttggcatgagcattcatcatcttgcagttattctctatccctttagtaatggtccaacatatgaggatatgggtaaaagattggtattgaatcagcttattcagttttatataacttttcaggcaagccaagtnnnnnnnnnnnnnnnnnnnnnnnnnnnnnnnnnnnnnnnnnnnnnnnnnnnnnnnnnnnnnnnnnnnnnnnnnnnnnnnnnnnnnnnnnnnnnnnnnnnnnnnnnnnnnnnnnnnnnnnnnnnnn

SEQ ID NO: 117259 - DNA, 558 bp, Arabidopsis thaliana
  unsure (1)..(558): unsure at all n locations
nnnnnnnnnnnnnnnnnnnnnnnnnnnnnnnnnnnnnnnnnnnnnnnnnnnnnnnnnnnnnnnnnnnnnnnnnnnnnnnnnnccacgcgtccgcccacgcgtccggtcagatggctgtcccgtgtttctacttttctctgtaaacactagtggacaatttgttggtttagccgagatggtaggccctgttgatttcaataagactgttgaatactggcaacaggacaaatggattggttgcttccctgttaagtggcatttcgttaaagatatccctaatagctcctggttctttcacgaacaggaatgttgggaagactcttgtttccaggactcagggtaccaagattgcctctgagggactgaaacacagggtgtttgaggtttctcttgctgatctacaaaatgatgaggataatgcctacaggaagatccgtcttagagctgaagatgttcagggaaggaatgtgttgacccagttctggggtatggatttcacaaccgacaagctaaggtcattggtgaagaagtggcagactttgattgaagcccatgtcg

SEQ ID NO: 117260 - DNA, 1670 bp, Arabidopsis thaliana
accacgcgtccgattctcttcgtttaatgctcttcttcttctactctctttgtgggtttctcttgtaataatcaggcacgagaaaaaaaaatggttaactcatgcgagaacaaaatcttcgttaaacccacttcaacgacgattcttcaagatgaaacaagaagtagaaaattcggacaagagatgaagagggagaagagaagagtgttgcgtgtgattaaccagaatctcgctggtgcaagagtttatccttgtgttgtcaacaagaaaggaagcttattgtctaataagcaagaagaagaagaaggatgtcaaaagaagaagtttgattctttgcgtccttcagttacaagatctggagttgaggaagagactaacaagaagctgaagccctcagttccaagtgctaacgacttcggtgattgtatatttattgatgaggaggaagctacattggaccttccaatgccaatgtcgcttgagaaaccatacattgaagctgatccaatggaagaagttgagatggaggatgtaacagtggaagaaccgatcgtggatatcgatgtcttagactcgaagaactcgcttgcggctgttgaatatgttcaagatctttacgcattttacagaacaatggagagatttagttgtgttccagtagactatatgatgcaacaaatcgacttaaacgagaagatgagagcaatactaatcgactggttaatcgaggtacatgacaagtttgatctgatgaacgagacactgtttctgacagtgaatctgatagatagattcttgtccaagcaaaatgttatgagaaagaagcttcagcttgtagggttagtagctttgctgttagcttgtaagtatgaggaggtttcggttcctgttgtcgaagatttagtactcatttcggacaaagcgtatacgaggaacgatgttctagagatggagaaaacaatgttgagtactttgcaattcaatatctcgttaccgacacaatacccgttcttgaaaagattcctcaaggcagctcaagcagacaagaagtgtgaggtcttggcgtcgttcttgatcgagcttgcccttgtggagtacgagatgcttcggtttccaccatcattactagctgccacatctgtgtacactgctcaatgtacacttgatggttccaggaaatggaacagtacatgtgaattccattgtcattactctgaagaccagctcatggaatgttcacggaagctggtgagtctgcatcagagggcggcgacaggaaacttaacaggagtatataggaagtacagcacaagcaaatttggttacatagcaaaatgtgaagctgcacactttctagtgtctgagtctcatcattcttaatccaaaaggacagtagtaagtagtttgtacagcttcctgacatagttccctcattcactctgtagcacaaataagaagaaacaaaaaaaaaagccaattaaatttgtcttatgattgattctgtttttttgttgttactctttgttcacttcacttgtcagtattaaactctacaatgaatgataaatgattgaatcatttcattctttgttcagaatgaaatgtattttgtatcttatttgagctaaaaaaaaaaaaaaaaaaaaaactcgaggggggccccggtaccc

SEQ ID NO: 117261 - DNA, 1753 bp, Arabidopsis thaliana
ggcacgagtctctctctctctggagcgttctcttctctccttgagcttctcttaccgccattagagctccttcacaaactcataaacctatttgttgagccaggcttggcttaaccactggcctttttccagactaaattatgtattgctcttcttcgatgcatccaaatgcaaacaaagaaaatatctctacttcagatgtacaggagagttttgtacgaataacgagatcacgagctaaaaaagccatgggaagaggagtatcaatacctccaacaaaaccttcttttaaacagcaaaagagacgtgcagtacttaaggatgtgagtaatacctctgcagatattatttattcagaacttcgaaagggaggcaacatcaaggcaaacagaaaatgtctaaaagagcctaaaaaagcagcaaaggaaggtgctaacagtgccatggatattctggtagatatgcatacagaaaaatcaaaattagcagaagatttgtccaagatcaggatggctgaagcccaagatgtctctctttcaaactttaaagatgaagaaattactgagcaacaagaagatggatcaggtgtcatggagttacttcaagttgtagatattgattccaacgtcgaagatccacagtgttgcagcttgtatgctgctgatatatatgacaacatacatgttgcagagcttcaacaacgacccttggctaattatatggagcttgtgcagcgagatatcgacccagacatgagaaagattctgattgactggcttgtagaagtttctgacgactacaagctggttccagatacgctttaccttacagtgaatcttatcgaccggtttctgtccaacagttacattgaaaggcaaagactccagctccttggtgtctcttgcatgcttatagcttcaaaatatgaagagctttccgcaccaggggtggaggagttttgcttcattacggccaacacatacacaagacgagaagtgctgagcatggagattcaaattctaaattttgtgcactttagattatcggttcctaccaccaaaacatttctgaggcggttcattaaagcagctcaagcttcgtacaaggtgcctttcattgaactggagtatttagcaaactatctcgccgaattgacactggtggaatatagtttcctaaggttcctgccatcactaattgctgcttcagctgttttcctagcccgatggacactcgaccaaactgaccatccttggaaccctactctgcaacactacaccagatatgaggtagctgagctgaagaacacagttctcgccatggaggacttgcagctcaacaccagtggctgtactctcgctgccacccgtgagaaatacaaccaaccaaagtttaagagcgtggcaaagctgacatctcccaaacgagtcacattactattctcaagatgacaccaagcaacatcgaaaacagagcccaagtcaggtgatcaaaatacctattttcagacattggatgttatgtcgtctctttgccagttttgtctgtctgtaattctgtagctattgtgtggcgccttaattgtaggccattacttgtcacaccacttagctttaaataaatgttatggaatttttctaatcgcattgctacaactatttactatcctgcgggattttgtacctaggagcacttggaaaacgaatacaaaagtgttaattaatataaatttcactgttcatggcaaaaaaaa

SEQ ID NO: 117262 - DNA, 1780 bp, Arabidopsis thaliana
  unsure (1)..(1780): unsure at all n locations
atgatctnnnnnnnnnnnnnnnnnnnnnnnnnnnnnnnnnnnnnnnnnnnnnnnnnnnnnnnnnnnnnnnnnnnnnnncatagaagacgagacgcccccactacttagactttttctactacaaacctgagattttagtctgagagaaagagaagagaacactaagatgatgacttctcgttcgattgttcctcaacaatccacggatgatgttgttgtggtagatggcaaaaacgtagcgaaaggaagaaaccgtcaagttcttggtgatataggtaatgttgttcgaggaaattacccaaagaacaacgaaccggaaaagatcaatcatcgtcctcgtacacgatctcaaaatcccacgcttcttgtggaggataatctcaaaaaacctgtagtcaagagaaacgcagtaccaaagccgaagaaagtggctgggaatccaaaggtagtagacgtgattgagataagttcagacagtgatgaagaacttggtttagttgctgctcgagagaagaaggctactaagaagaaagcgaccacttacacatctgttcttactgctagaagcaaggctgcttgtggtttagagaagaaacagaaagaaaagattgttgatatcgattctgctgatgttgagaatgacctcgcagctgtggaatatgtggaagatatttacagtttttacaagtctgttgagagtgaatggaggccacgagattacatggcatctcagcctgatattaatgaaaagatgagactgatcctggtggagtggttgattgatgtgcatgtccgattcgagctaaacccggaaacattttacctcactgttaacattctggatcggttcttgtcggttaagccagtgcctcgaaaagaactgcagcttgttggtctcagtgctcttctcatgtcggccaagtatgaagaaatttggccaccacaggtggaggatctagttgatattgcagaccatgcatacagtcacaaacagattctggtgatggagaagacaatactgtctacacttgagtggtacttgacagttccgactcattatgtcttcctagctcgtttcatcaaagcttccattgcagacgaaaagatggagaatatggtgcactatttggctgagttaggcgtaatgcattacgatacgatgataatgttcagtccatcaatggtagctgcttctgcaatctacgcagcaagatcttctctccgccaagttcccatatggaccagcactctcaagcatcacactggctattctgagactcagctcatggactgtgcaaagctgttggcgtatcagcaatggaagcaacaagaagaagggagtgagagcagtactaagggagctttacgaaagaaatactccaaggacgaacgcttcgctgtggctttgatccctccggccaaagctttgttgaccggaactgaatctgcttaggagttaggaccctttaagaagacgaagaagctgaagaaccaagcctagtttcattttccttctgaaaatcaagtctagtttcattagataatggtattttgaacaagtctaatgagtcgctttgaaacctagtcctttagcatgattcattcccaaacactgcatatcttgtaagaagtcagtttcttccgagaagtttaatttccttagatataatattctgtggtttaaaaaaaaaaaaaannnnnnnnnnnnnnnnnnnnnnnnnnnnnnnnnnnnnnnnnnnnnnnnnnnnnnnnnnnnnnnnnnnnnnnnnnnnnnnnnnnn

SEQ ID NO: 117263 - DNA, 914 bp, Arabidopsis thaliana
cgcgtccgatacaacaccttcacttagaaaatttactactgaccaaaaccaagagcattttggtcgtattttaatatccttagtcggtgtctatgaataattaatatgacttacagctcgttggtcgtattttcatatctttattcgttgtctattaataattactatgacttattaacgtattccctgattagtacaactaatataaaatgttaatcttcttctcataatattcttgaagcaaattagcactgaccgatcgatccatggaagaggtgaagaaggatgtatactcggtttgggcattaccagatgaggaatcggagccccgattcaaaaagctaatggaagctttgagatccgaattcactggcccaagattcgttcctcacgtcaccgtcgccgtatctgcttatctgacggcagacgaagccaagaagatgttcgaatcagcttgcgacggtcttaaagcttacaccgccaccgttgatcgcgtctccaccggaactttcttctttcaatgcgttttcttgcttctccaaaccacccctgaggtaatggaagctggtgaacactgtaagaaccatttcaattgttccactaccacaccttacatgccgcatttgagcctgctttacgctgagttgacagaggaagagaagaagaatgcgcaggagaaagcttacacgctcgatagcagcctcgatggactcagtttccggttaaaccgacttgctctatgcaaaaccgataccgaggacaagactctagagacatgggagacagtggctgtatgcaatctcaatccttaagaaagtcaaaactttggttctgaatctgtaacaaaagatcataatgaacttgcttttgaataatgtatcgttttctctaaaactgaataataatgttacaat

SEQ ID NO: 117264 - DNA, 1726 bp, Arabidopsis thaliana
  unsure (1)..(1726): unsure at all n locations
ctctctccctcatcctctcttcttctctcatcatcatcttcttcttcaatggccttcaccgcttttctcctcctcctctcttccatcgccgccggcttcctcctcctactccgccgtacacgttaccgtcggatgggtctgcctccgggaagccttggtctccctctgataggagagacttttcagctgatcggagcttacaaaacagagaaccctgagcctttcatcgacgagagagtagcccggtacggttcggttttcatgacgcatctttttggtgaaccgacgattttctcagctgacccggaaacgaaccggtttgttcttcagaacgaagggaagctttttgagtgttcttatcctgcttccatttgtaaccttttggggaaacactctctgcttcttatgaaaggttctttgcataaacgtatgcactctctcaccatgagctttgctaattcttcaatcattaaagaccatctcatgcttgatattgaccggttagtccggtttaatcttgattcttggtcttctcgtgttctcctcatggaagaagccaaaaagataacgtttgagctaacggtgaagcagttgatgagctttgatccaggggaatggagtgagagtttaaggaaagagtatcttcttgtcatcgaaggcttcttctctcttcctctccctctcttctccaccacttaccgcaaagccatccaagcgcggaggaaggtggcggaggcgttgacggtggtggtgatgaaaaggagggaggaggaggaagaaggagcggagagaaagaaagatatgcttgcggcgttgcttgcggcggatgatggattttccgatgaagagattgttgacttcttggtggctttacttgtcgccggttatgaaacaacctccacgatcatgactctcgccgtcaaatttctcaccgagactcctttagctcttgctcaactcaaggaagagcatgaaaagattagggcaatgaagagtgattcgtatagtcttgaatggagtgattacaagtcaatgccattcacacaatgtgtggttaatgagacgctacgagtggctaacatcatcggcggtgttttcagacgtgcaatgacggatgttgagatcaaaggttataaaattccaaaagggtggaaagtattctcatcgtttagagcggttcatttagacccaaaccacttcaaagatgctcgcactttcaacccttggagatggcagagcaactcggtaacgacaggcccttctaatgtgttcacaccgtttggtggagggccaaggctatgtcccggttacgagctggctagggttgcactctctgttttccttcaccgcctagtgacaggcttcagttgggttcctgcagagcaagacaagctggttttctttccaactacaagaacgcagaaacggtacccgatcttcgtgaagcgccgtgattttgctacttgaagaagaagagacccatctgattttatttatagaacaacagtatttttcaggattaatttcttcttctttttttgcctccttgtgggtctagtgtttgacaataaaagttatcattactctataaagccttagcttctgtgtacataaaaaaaaaaaaaaataaaaaacttagggcggcagctctagaggatccaagcttacgtacgcgtgcatgcgacgtcatagatcttctatagtgtnnnnnnnnnnnnnnnnnnnn

SEQ ID NO: 117265 - DNA, 560 bp, Arabidopsis thaliana
  unsure (1)..(560): unsure at all n locations
gcgtccgtcgcacagagcaacaagaagagcaacggatcattcaaggtgtcctcctctcttccatcgccgccggcttcctcctcctactccgccgtacacgttaccgtcggatgggtcttcctccgggaagccttggtctccctctgataggagagacttttcagctgatcggagcttacaaaacagagaaccctgagcctttcatcgacgagagagtagcccggtacggttcggttttcatgacgcatcttgttggtgaaccgacgattttctcagctgacccggaaacgaaccggtttgttcttcagaacgaagggaagccttttgagtgttcttatcctgcttccatttgtaaccttttggggaaacactctctgcttcttatgaaaggttcttttgcataaacgtatgcactctctcaccatgagctttgccaattcttcaatcattaaagaccatctcaaggttgaaattgaccggtaaggccggttaaanttnatcttnggccntnggggtttccccttgaggnggcaaaagaaacgttngtaacgggaagattt

SEQ ID NO: 117266 - DNA, 845 bp, Arabidopsis thaliana
  unsure (1)..(845): unsure at all n locations
taggtgacactatagaagatcttgacgtcgcatgcacgcgtacgtaagctcggaattcggctcgagggggaatggagtgagagtttaaggaaagagtatcttcttgtcatcgaaggcttcttctctcttcctctccctctcttctccaccacttaccgcaaagccatccaagcgcggaggaaggtggcggaggcgttgacggtggtggtgatgaaaaggagggaggaggaggaagaaggagcggagagaaagaaagatatgcttgcggcgttgcttgcggcggatgatggatttttcgatgaagagattgttgacttcttggtggctttacttgtcgccggttatgaaacaacctccacgatcatgactctcgccgtcaaatttctcaccgagactcctttagctcttgctcaactcaaggaagagcatgaaaagattagggcaatgaagagtgattcggatagtcttgaatggagtgattacaagtcaatgccattcacacaatgtgtggttaatgagacgctacgagtggctaacatcatcggcggtgttttcagacgtgcaatgacggatgttgaggtcaaaggttataaaattccaaaagggtgggaagtattctcatcgtttagagggggttcatttagnccccaaaccactttcaaagnatgntnggactttnaaaccctttgggggattgcaagagcaactncggtaaccggcaaggccctttcttaattgttttcacaaccntttttngtnggaggggcccaaggcttttttnccccggtnacngggcttggntnaggggttnacccnccttgnttttccttaaccccnccngtggc

SEQ ID NO: 117267 - DNA, 1838 bp, Arabidopsis thaliana
gctggtacgcctgcaggtaccggtccgtatattcccggggcgacccacgcgtccgtacggcccacgcgtccgactaacacaaaagaaaagaaaaaaaaaacagagtatcaaacatgtcaatcttgctctgtttcctctgtcttttacctgttttcttagtttctttatcaatcttgtcaaaaaggctaaaaccctcaaaatggaagcttcctccgggaccaaagacgctcccgatcatcggaaacttacacaacctcacaggtttgcctcacacatgttttcgaaatctctcacaaaagttcggaccagtgatgcttctccacttcggattcgtccccgtagtcgtgatctcatcgaaagaaggagcagaagaagctctcaagacccaagatcttgaatgttgcagccgaccagagactgtagcgacaagaatgatctcttacaacttcaaagacattggattcgctccttacggtgaggaatggaaagcgttgaggaagctcgtggttatggagctcttgaacacgaaaaagtttcagtctttcaggtatataagagaggaagagaatgacttgttgatcaagaaactaaccgaatccgctctgaaaaaatcaccggtgaatctgaagaagacccttttcacgctagtcgcgagtatcgtgtgtaggctcgcgttcggggtgaatatccacaagtgcgagttcgtagacgaggacaacgttgctgatctagttaacaagtttgagatgctagtcgctggtgttgccttcaccgatttcttccctggagtgggttggcttgtagaccgaatctcaggtcagaacaagacactaaacaatgttttctcagaacttgacactttcttccaaaacgtgctcgatgatcatattaagcctggaagacaagtatctgagaaccctgacgtcgtagatgtgatgcttgatctaatgaagaagcaagagaaagatggagaatctttcaaactcacaacagatcatctcaaaggaatcatctcggacatatttcttgcaggagtaaacacaagcgccgtcactttgaactgggcgatggccgagctgatcagaaacccgagagtgatgaagaaagtgcaagacgagattaggacaacacttggggacaagaaacagagaatcacagagcaagatctaagccaagttcactacttcaagcttgtggtcaaggagatatttagattacatccagcagctccacttttgcttccaagagagacaatgtctcatgtcaagatccaaggctacgatattcctgtgaaaacacagatgatgatcaacatctactcgatcgcacgtgatccaaaactatggacaaaccctgatgagtttaaccctgacaggtttcttgacagctccatagattacagaggactaaactttgagctgttaccatttggttctggccggagaatctgtcccgggatgacgctgggaatcaccaccgtggaattgggactgttgaatttgctttacttcttcgattgggtagtgcctgtagggaagaatgtgaaggacatcaacttggaagaaacaggatcaatcattattagcaagaagacaacccttgagcttgttccacttgttcatcattgaaatgacgatcatgaaacaattagtccataagattatgtatttgtatccagcttctttatcttgatatggttgtaatcataatctgaatagtgatatcaacaaaaaaaaaaaaaaaggaacccaaaaaaaaaaaaaaaaaaacccaagggcggccgctctagaggatccaagcttacgtacgcgtgcatgtgacgtcatagatcttctata

SEQ ID NO: 117268 - DNA, 823 bp, Arabidopsis thaliana
  unsure (1)..(823): unsure at all n locations
cnnnnnnnnnnnnnnnnnnnnnnnnnnnnnnnnnnnnnnnnnnnnnnnnnnnnnnnnnnnnnnnnnnnnnnnccacgcgtccgcttgcatgcaacacagtttgtgacttttgttttgttttacgtcaggacatatttctagcaggagttggaacaagctccactacattgatatgggcgatgaccgagctgatcagaaacccgagagtgatgaagaaagttcaagacgagattcggacaacacttggggacaagaaggagagaatcacagaagaagatttaaaccagcttcactacttcaagctcatggtcaaagagatattcaggttacatccagcagctccacttttgctcccaagagagacattgtctcatgtcaagatccaaggctacgatattcctgctaaaacacagatcatgatcaacgcttacgcgattgcacgtgatccaaaactatggacaaaccctgatgagtttaaccctgataggttccttgacagctccatagattacagaggactgaactttgagctattaccgtttggatctggtaggagggatatgtccaggggattgacaatggggactcgccattgttgaattgggactattgaatttgctttacttcttcgactgggggctaccagacgaaggaagaagccaaggagatcatcaccgggaatgaagttgctcttgaccttgttcaagtttttctccactgaatatgtgttttggttatggaatgtttgtactacactaagcttgattctcaattaatatctttctaccagtaaaaaaaaaaaaaaaaaagggcgcgccgctct

SEQ ID NO: 117269 - DNA, 981 bp, Arabidopsis thaliana
  unsure (1)..(981): unsure at all n locations
gacactttctttcagaatattcttgatgatcatctcaagcctggaagagagagctctgatatcatcgatgtgatgattgatatgatgaagaagcaagagaaagagggagactctttcaagttcaccactgatcatctcaaagggatgatctcggacatatttctagcaggagttggaacaagctccactacattgatatgggcgatgaccgagctgatcagaaacccgagagtgatgaagaaagttcaagacgagattcggacaacacttggggacaagaaggagagaatcacagaagaagatttaaaccagcttcactacttcaagctcatggtcaaagagatattcaggttacatccagcagctccacttttgctcccaagagagacattgtctcatgtcaagatccaaggctacgatattcctgctaaaacacagatcatgatcaacgcttacgcgattgcacgtgatccaaaactatggacaaaccctgatgagtttaaccctgataggttccttgacagctccatagattacagaggactgaactttgagctattaccgtttggatctggtaggaggatatgtccagggatgacaatggggatcgccattgttgaattgggactattgaatttgctttacttcttcgactgggggctaccagagaaggaagaagccaaggagatcatcaccgggaatgaagttgctcttgaccttgttcaagtttttctccactgaatgtgttttggttatggaatgtttgtactacactaagcttgattctaaattaataacatcttacaagtactgaaaatagtagacagtggacactatggtttatcttccattagaaacaattaaattataaaatcatttttgttaaaacaaaaaaaaaaaaaaaaaagnnnnnnnnnnnnnnnnnnnnnnnnnnnnnnnnnnnnnnnnnnnnnnnnnnnnnnnnnnnnnnnnnnnnnnnnn

SEQ ID NO: 117270 - DNA, 2150 bp, Arabidopsis thaliana
  unsure (1)..(2150): unsure at all n locations
atacgactcacttagggaaagctggtacgcctgaaggtaccggtccggaattcccgggtcgacccacgcgtccgaagcaatttggcttcttaaaaacccgcccatggagaaagccctcacgcaccttcaacccacaaacaaaaagagagagaagagaacgagagaatcattgagaaacgaaacaacaatggccgtctcatcattccagtgccctaccatcttctcctcctcctcaatctccggctttcaatgccgttctgatccagatctcgtcggttctcccgtcggtggatcatctcgccgtcgtgtccatgcctccgccgggatttcttcctcattcaccggggacgctggattatcctccaggatcttaagatttcctcctaatttcgtccgtcagctgagcattaaagcccgtagaaactgtagcaacatcggtgttgcacagatcgtggcggctaagtggtccaacaacccatcctccgcgttaccttcggcggcggcggctgctgctacctcgtctgcatctgcggtttcttccgccgcatctgcagccgcagcctcgtccgccgccgccgcccctgtggctgccgcgcctcccgtcgtgctgaaaagcgtcgatgaggaggttgtggtggccgaggaggggatcagggagaagataggtagtgtacagctgacggattccaaacattctttcttgagctccgatgggagcctcactgttcatgccggtgaaagattaggccgtggtatagtgacggatgctatcactactcctgtagtcaacacatctgcctacttcttcaagaaaactgctgagcttattgacttcaaggagaaaaggagtgtgagtttcgagtatggtcgttatggtaaccctacgactgtggtacttgaagataagataagtgcacttgaaggggctgaatcaactttggttatggcatctgggatgtgtgcaagcactgttatgcttttggcattggttcctgctggtggacacattgtcactactactgattgctacaggaagactaggatcttcatggagaattttcttcccaagttggggatcactgtcactgtgattgatcctgctgatatcgcagggcttgaagctgcagtgaatgagttcaaggtatctctgttcttcactgagtccccgacaaacccattccttagatgtgtcgacattgagctagtttcaaaaatatgccacaagaggggaactctggtttgcattgatggcacctttgcaacacctctgaatcagaaagcccttgctcttggtgctgatcttgtcgtgcactctgctacaaagtacattggaggacacaatgatgttcttgctggatgcatctgtggttcactgaagttggtttcagaaattcgcaatctgcatcatgtgttgggaggaacacttaacccaaacgctgcgtacctaatcatccgaggcatgaagacattgcatcttcgtgtacagcaacagaattcgaccgcttttagaatggccgaaattttagaggcacatcctaaggtgagtcatgtgtactatccaggccttccaagtcatcccgaacatgaactcgccaagcgacaaatgactggttttggaggtgtggtcagtttcgagattgatggagacattgaaacgacaatcaagtttgtggattctctaaagattccttacattgcaccatccttcggtggctgcgaaagcattgttgaccaacctgctatcatgtcctactgggatctgccgcaagaggagagactaaagtatggaatcaaagataacttggttcgtttcagctttggagttgaagactttgaagatgtcaaagctgacattcttcaagctctcgaagccatctgaaaatgacacatcacacaaaaacgctgtcgtttctttgtcctttatttatctctctttgctgttttcagtcaccgtaataatgatgtctttgaactattgttccgcgacatttacgttccgaaataatcgtgtactattatgatgtttgttgtgctatataataaattctgtttagttcccctgacgtagaaaaaaagnnnnnnnnnnnnnnnnnnnnnnnnnnnnnnnnnnnnnnnnnnnnnnnnnnnnnnnnnnnnnnnngacacgaaat

SEQ ID NO: 117271 - DNA, 570 bp, Arabidopsis thaliana
  unsure (1)..(570): unsure at all n locations
atgatacttccnnnnnnnnnnnnnnnnnnnnnnnnnnnngctgggacgcctgcaggtaccggtcccctattccgggggcgaaccacgcgtccgacggctgcgagaagacgacagaagggtacgggctgctgctacctcgtctgcatctgcggtttcttcctgccgcatctgcagccgcagcctcgttcgccgccgccgcccctgtggctgccgcgccccccgtcgtgctgaaaagcgtcnatgaggaggttgtggtggccgaggaggggatcagggagaagataggtagcgtacagctgacggattccaaacattctttcttgagctccgatgggagcctccctgttcatgccggtgaaagattaggccgtggtatagtgacggatgctatcactactcctgtagtcaacacatctgcctacttcttcaagaaaactgctgagcttattgacttcaaggagaaaaggagtgtgagtttcgagtatggtcgttatgggaaccctacgactgtggtacttgaaagaaagataagtgcacttgaaggggctgaatcaacnttggttatggcat

SEQ ID NO: 117272 - DNA, 1393 bp, Arabidopsis thaliana
ttttactaaattgatagcgtgtgccatgtgactgacaccattgagatcatatatctcatcattcgaaacttttattccactacaaccggattttctccaattttcttcaaaacgattcgggtcaaggttattgactttctcattcagtgaagcttgaatcatggcctcgagaattgctaaagatgtgactgaattgattgggaacactccattggtgtatttgaacaatgttgctgaaggatgtgttggtcgtgttgctgctaagcttgagatgatggaaccgtgctctagcgtcaaagacaggattggttttagcatgatttctgatgcagaaaagaagggtcttatcaaaccaggagagagtgtgctgattgagccaacaagtggaaacactggagttgggttagcattcacggcagctgccaaaggctacaagcttattattacaatgccagcttctatgagtactgagagaagaatcattctcttagcttttggagttgagttggttttaactgacccagctaagggcatgaaaggagctatcgcaaaggcggaagagattttggcgaaaacacccaatggttacatgcttcagcagtttgagaaccctgccaaccctaagatccactatgagactacgggacctgagatatggaaaggcactggtggcaaaatcgatggctttgtttctgggattggtactggtggtaccattacaggtgctgggaagtatcttaaagaacagaacgcaaacgtcaagctgtatggagtggagccagttgaaagtgctattctatccggtgggaagccaggtcctcacaagattcaagggataggagctggttttataccaagtgtattgaatgttgatcttattgacgaagttgttcaggtttcaagtgatgaatccattgacatggcaaggcagcttgctcttaaagaaggtcttcttgtgggaatatcatccggtgcagcagctgctgcagcaattaaacttgcacagaggccagaaaacgctgggaagctatttgtggcgatattcccgagtttcggggagaggtatctatcaacggtacttttcgatgcgacaaggaaagaagcggaagccatgaccttcgaggcttgaacattctccatttcttcttaagagacgccaaaataaaagagatgttcagtttctcctatagagactcttcatctttagttacattgcgtctttgcttccatctgtatcttctcttgtgtgccaataaaagtcaaactagattttctctgtttcttttgtgaaccacttgcttgttaatgaagtttaaatttgctatgtaactttgttcataagtatcatactgtttcatgatcaaaactaaaccaacataaaaaaaaaaaaaaa

SEQ ID NO: 117273 - DNA, 639 bp, Arabidopsis thaliana
  unsure (1)..(639): unsure at all n locations
acccaanccggttgttttccngtttcnncncanaaagagggnttttcaacccggggnngtttcctgtttgcccnacaagnggaacccctgggttgggttaccntncccggnacttccaaaggctncaagcttttttttttncaatgccngcttctatgggtactgagagaagaatcattctctttagcttttggggttgagttgnttttaactgacccagctaagggcatgaaaggagctatcgcaaaggcggaagagattttggcgccaccacccaatggttacatgcttcagcagtgtgagaaccctgccacccctaagatccactatgagactacgggacctgagatatggaaaggcactggtggcaaaatcgatggctttgtttctgggattggttctggtggcaccgttccgggtgctgggccctctcttaaacacacggaccgcaaacgtcaacctgtatggagtggagccagttgaaagtgctattctatccggtgggaagccaggtcctcccaagattcaagggataggagctggttttatgccaagctctcatactgtttcatgagccgaaaaaaaaaagaagaacccacgcatggaacggccgctctagaggatccaagcttacgtacg

SEQ ID NO: 117274 - DNA, 1303 bp, Arabidopsis thaliana
  unsure (1)..(1303): unsure at all n locations
nnnnnnnnnnnnnnnnnnnnnnnnnnnnnnnnnnnnnnnnnnnnnnnncctgcaggtaccggtccggaattcccgggtttgacccacgcggccgtacccctgcgagaagacgacaaagggtacggctgcgagaagacgacagagggatacggctgcgagaagacgacagaagggtacggctgcgagaagacgacagaggggtacggctgcgagaagacgacagaagggggtcctcacaagattcaagggataggagctggttttataccaagtgtattgaatgttgatcttattgacgaagttgttcaggtttcaagtgatgaatccattgacatggcaaggcagcttgctcttaaagaaggtcttcttgtgggaatatcatccggtgcagcagctgctgcagcaattaaacttgcacagaggccagaaaacgctgggaagctatttgtagcgatattcccgagtttcggggagaggtatctatcaacggtacttttcgatgcgacaaggaaagaagcggaagccatgaccttcgaggcttgaacattctccatttcttcttaagagacgccaaaataaaagagatgttcagtttctcctatagagactcttcatctttagttacattgcgtctttgcttccatctgtatcttctcttgtgtgccaataaaaggcaaactagattttctctgtttcttttgtggaaacactggagttgggttagcattcacggcagctgccaaaggctacaagcttattattacaatgccagcttctatgagtactgagagaagaatcattctcttagcttttggagttgagttggttttaactgacccagctaagggcatgaaaggagctatcgcaaaggcggaagagattttggcgaaaacacccaatggttacatgcttcagcagtttgagaaccctgtcaaccctaagatccactatgagactacgggacctgagatatggaaaggcactggtggcaaaatcgatggctttgtttctgggattggtactggtggtaccattacaggtgctgggaagtatcttaaagaacagaacgcaaacgtcaagctgtatggagtggagccagttgaaagtgctattctatccggtgggaagccaggtcctcacaagattcaagggataggagctggttttataccaagtatcatactgtttcatgatccnnnnnnnnnnnnnnnnnnnnnnnnnnnnnnnnnnnnnnnnnnnnnnnnnnnnnnnnnnnnnnnnnnnnnnnnnnnnnnnnnnnnnnnnnnnnnnnnnnnnnnnnnnn

SEQ ID NO: 117275 - DNA, 607 bp, Arabidopsis thaliana
attttcttcaaaacgattcgggtcaaggttattgactttctcattcagtgaagcttgaatcatggcctcgagaattgctaaagatgtgactgaattgattgggaacactccattggtgtatttgaacaatgttgctgaaggatgtgttggtcgtgttgctgctaagcttgagatgatggaaccgtgctctagcgtcaaagacaggattggttttagcaattaaacttgcacagaggccagaaaacgctgggaagctatttgtggcgatattcccgagtttcggggagaggtatctatcaacggtacttttcgatgcgacaaggaaagaagcggaagccatgacctttgaggcttgaacattctccatttcttcttaagagacgccaaaataaaagagatgttcagtttctcctatagagactcttcatctttagttacattgcgtctttgcttccatctgtatcttctcttgtgtgccaataaaagtcaaactagattttctctgtttcttttgtgaaccacttgcttgttaatgaagtttaaatttgctaaaaaaaaaaaaaaaagggcgagccgctctagaggatccaagcttacgtacgcgtgg

SEQ ID NO: 117276 - DNA, 706 bp, Arabidopsis thaliana
  unsure (1)..(706): unsure at all n locations
acgcctgcaggtaccggtccggaattcccgggtcgacccacgcgtccgggttattgactttctcattcagtgaagcttgaatcatggcctcgagaattgctaaagatgtgactgaattgattgggaacactccattggtgtatttgaacaatgttgctgaaggatgtgttggtcgtgttgctgctaagcttgagatgatggaaccgtgctctagcgtcaaagacaggattggttttagcatgatttctgatgcagaaaagaagggtcttatcaaaccaggagagagtgtgctgattgagccaacaagtggaaacactggagttgggttagcattcacggcagctgccaaaggctacaagcttattattacaatgccagcttctatgagtactgagagaagaatcattctcttagcttttggagttgagttggttttaactgacccagctaagggcatgaaaggagctatcgcaaaggcggaagagattttggcgaaaacacccaatggttccatgcctcagcaggtttgagaaccctgccaaccccaagatccactatgggcctacggggcctgggatttggaaaggcactggtggcaaacccggtggcggtcctggggttgtccggggggccattccagggntgggnggnnccttaaancnnnnccgaacgcaacccgnttgggggggccccttaaaagnggtnt

SEQ ID NO: 117277 - DNA, 788 bp, Arabidopsis thaliana
  unsure (1)..(788): unsure at all n locations
caaaatatttgttaacaaaaagatttatatttcttctcttctttgttcataactaagaactcagaaagagaccaacgacactgcaaatggcggatgaatctccaaagtctatctacgacttcaccgtcaaggatatcggaggtaacgatgtgagtttggaccaatacaaaggcaaaactcttttggttgtaaacgttgcttccaaatgtggtctgacggatgcgaactacaaggaactgaatgttctgtacgagaaatacaaggagcaagggttggagatattagcattcccgtgtaatcagttcttaggacaagaaccaggaaacaatgaagagattcaacaaactgtctgcaccaggttcaaagctgaattccccatctttgacaaggtggatgtgaacggtaagaacacggcaccattatacaagtacttgaaagcagagaaaggaggtttgctcattgatgctatcaaatggaacttcaccaaattcttggtttctcctgatggcaaggtcttacagagatattctcccagaacctctcctcttcaattcgagaaggacattcaaactgcgttgggacaggcctcttcttaatcaccagaagaagaagtttcaagaactttcgtttggtccaaattatgatcttagaatcatcaacattgcaaacttattttctttgaattctatcattcttgttttaaataattgatgtattcgacgtcttttcatgggatgatatataatatattatcatgtgactctcgttcaaacaaaccnnnnnnnnnn

SEQ ID NO: 117278 - DNA, 929 bp, Arabidopsis thaliana
  unsure (1)..(929): unsure at all n locations
ggtgcacactatagaagagttatgacgtcgcatgcaagcaaagataagcgaagcaaaaacattcagagagaaaattcagcatttttgatagctcaagcacttgattctttccaaaggggtttcctgagatcacaaaggccaagtaacaatggcgaaaggagttgcagttttgaacagcagtgagggtgttacggggactatctttttcacccaggaaggcgatggtgtgaccactgtgagtggaacagtttctggccttaagcctggtcttcatggtttccatgtccatgctcttggtgacaccactaacggttgcatgtctactggtccacatttcaaccccgatggtaaaacacacggtgcccctgaggatgctaatcgacatgctggtgatctaggaaacatcactgttggagatgatggaactgccaccttcacaatcactgattgccagattcctcttactggaccaaactctattgttggtagggctgttgttgtccatgcagaccctgatgacctcggaaagggaggccatgaactcagcctggctactggaaacgcaggcggccgtgttgcttgcggcatcattggtctccagggctaaagctgctacgtttccaaagaagagattgatgtaataaggaggtccaaccttagacctgggtttggtagttgtgtgtatcttctggtgtgtggctaaaaacctatgagcttagtgtggctcaaagcatttttaattcagacagaaaacagagaaaattccgtacttttattatttcatgaataaaaaagagttgatttactgttaaaaaaaaaaaaaaaccccggaaannnnnnnnnnnnnnnnnnnnnnnnnnnnnnnnnnnnnnnnnnnnnnnnnnnnnnnnnnnnnnnnnnnnnnnntacaatctnnnnnnnnnnnnnnn

SEQ ID NO: 117279 - DNA, 702 bp, Arabidopsis thaliana
  unsure (1)..(702): unsure at all n locations
gggtcgncacgcgtccgatgcaatgagccacactaagctcataggtttttagccacacaccagaagacgacagaagggagagagaaaattcagcatttttgatagctcaagcacttgattctttccaaaggggtttcctgagatcacaaaggccaagtaacaatggcgaaagcgagttgcagttttgaacagcagtgagggtgttacggggactatctttttcacccaggaaggcgatggtgtgaccactgtgagtggaacagtttctggccttaagcctggtcttcatggtttccatgtccatgctcttggtgacaccactaacggttgcatgtctactggtccacatttcaaccccgatggtaaaacacacggtgcccctgaggatgctaatccacatgctggtgatctagggaaccatcactgtttggagatgatggnacctgccacctttcacaaatcaacttgattgccaagattcctcttacttggnccaaactctnattgtttggnagggcttttttnttgtccatgaaggcccttattgccccngggaaagggnggcattganctnagcctnggtnctttgaaacggaggcggccgttttcttngggataantnggttccagggtaaaggtntncggttcaaagaggggttnttnaanagggggcaccctagcctggttgaggtttgattntgg

SEQ ID NO: 117280 - DNA, 417 bp, Arabidopsis thaliana
  unsure (1)..(417): unsure at all n locations
cccacgcgtccgctcgtgggctatatagaaaacaagtaaccaaagagagacgaagcaaaaacattcagagagaaaattcacaatttttgtaagctcaagcaacttgatccttcccaaaggggtttcctgagatcacaaagggccaagtatacaatggcgaaaggagttgcagttttgaacagcagtgagaggtgttacggggactatctttttcacccaggaaggcgatggtgtgaccactgtgagtggaacagtttctggccttaagcctggtcttcatgggttccatgtccatgctcttggtgacaccactaacggttgcatgtttactggtcccacatttcaaccccggtggtaaaacaaaacggtgncccctnagggtngtaatcggncaatgccttggnngntcttggggaa

SEQ ID NO: 117281 - DNA, 1884 bp, Arabidopsis thaliana
  unsure (1)..(1884): unsure at all n locations
atgannnnnnnnnnnnnnnnnnnnnnnnnnnnnnnnnnnnnnnnnnnnnnnnnnnnnnnnnnnnnnnnnnnnnnnnnnnnnccacgcgtccggtccgactcagttcccggcgagttcgactcggtgattgattttttcctagaaaaataaaatttcttcttaacgattgatcgattttggttttctatctttcgattctagatctagaattcaatttgtgaggtttggagatggcgagcgagctgatcaatcggcgacacgagacggatcaaccaaccgccgatgcttattacccgaaaccaatcaaaccatggttcacggtgactcgtccgatgcgttacatgctccgtgaacagagacttatcttcgttctcgttggcattgcaatcgctactttggttttcacaattttccctcgctccacacaatcaaccccttactcggatcctttctccggttacggaatccgacccgacgaatcgtacgttccggctatacaagctcagaggaaacctagcctcgagtacctgaaccggatcggagcaacaggcgggaaaatcccactgggattgaaacgcaaagggctaagagtggttgtgaccggtggtgctggattcgttggatcgcatctcgtggatcgtttgatggctagaggagatactgtgattgttgttgataatttcttcactggaaggaaagagaacgttatgcaccatttcagtaaccctaactttgagatgatccgtcacgatgtggttgagccgattcttcttgaggttgatcagatctaccatttggcttgccctgcttctcctgttcattacaaattcaatcccgtcaagactatcaagacgaatgtggttggaacattgaacatgcttggtttggctaagcgagttggggctagatttcttctgacgagtaccagtgaggtttatggtgatcctctgcagcatcctcaggttgagacttactggggcaacgttaatcccattggtgttcgtagttgctacgatgaaggaaaacgtacggcagagacgttgaccatggactatcaccgaggtgccaatgttgaggtcagaattgctaggatcttcaacacctatggtccaagaatgtgtatagatgatgggcgtgttgttagtaacttcgttgcacaggcactaaggaaagagccattgactgtttacggtgatgggaagcagacaaggagtttccaatttgtttctgatctggttgaaggtttgatgagactgatggaaggagaacatgtcggcccattcaacctcggtaaccctggtgaattcacgatgctcgagctcgctaaggtggtccaagagacaattgatccgaatgcaaacatagagttcagaccaaacacagaagacgaccctcacaagagaaagcctgacatcacaaaggccaaagagcttttaggttgggaaccaaaggtctctcttcgtcagggactgcctctcatggtcaaagatttccgtcaacgtgtctttggtgaccagaaggaaggctcctccgcagctgcaaccaccaccaagacaacttcagcttgagcaaatgcagaatctgagtagcagccactgcggctggtagtgggtttataacaaaattgcaagagcgtcgtttctttaaatttatttcgcttttgatttctgttttgataatcgtgtaaacgtagagtaagaatttggtacctttacttactactattcatggacctcactacagttttaaaagaaaaaagaacttctcttttgataaaaaaaaaaaaaaaaaaaagggcggccgctttaaaggattcccagcttacgtacgcgtgcattgcgacgtcatagaatctnctatagtgtgtnnnnnnnnnnnnnnnnn

SEQ ID NO: 117282 - DNA, 868 bp, Arabidopsis thaliana
  unsure (1)..(868): unsure at all n locations
nnnnnnnnnnnnnnnnnnnnnnnnnnnnnnnnnnnnnnnnnnnnnnnnnnnnnnnnnnnnnnnnnnnnnnnnnnnnnccacgcgtccgtacggctgcnataagacgacagaagggaatcccattggtgttcggagttgctacgacgaaggcaaacgtacggctgagccgttgaccatggactatcaccgaggcgccaatgttgaggtcagaattgctagggtggtcgacacctatggcccaaggatgtgtatcagatgacgggcgtgtggttagcaacttcgttgcccaggcattaagaaaagagcctttgactgtttatggtgatggtaagcagactaggagtttccagtttggctctgatctggtggaaggtctgatgaggttgatggagggagaacatgtcggtccatttaaccttggtaaccccggtgaattcaccatgctcgagctcgctaaggtggttcaagagacaattgacccgaacgcaaagatagagttcagaccaaacacagaggacgacccacacaagaggaaaccagacatcacaaaggccaaagagcttcttggttgggaaccaaaggtggctctacgccaaggactcccacttatggtcaaagatttccgtcaacgtgtctttggcgaccaaaagcaggattcttccaccacttcatcatcaacagagtaactgtcgctggagattctcgtttctcttcgttttcatttttaattttgatatttctattcctgtcaatgtagtgatattgaaacctcaccgattttaaagttttattttttttaatgcaacaaaaaaagggcggccgctctagaggatccaagcttacgtacgcgtgcatgcgacgtcatgct

SEQ ID NO: 117283 - DNA, 555 bp, Arabidopsis thaliana
  unsure (1)..(555): unsure at all n locations
nnnnnnnnnnnnnnnnnnnnnnnnnnnnnnnnnnnnnnnnnnnnnnnnnnnnnnnnnnnnnnnnnnnnnnnnccacgcgtccgaatttgtgtttggtggaatattgaaagagtagtgatatggcaaattggaacaggtgttcggagttgttacgacgaaggcaaacgtacggctgagactttgaccatggactatcacagaggcgctaatgttgaggttaggattgctaggatattcaacacttatggcccaaggatgtgtatcgatgacggtcgtgtggttagcaacttcgttgcccaggcattaagaaaagagcctttgactgtttatggtgatggtaagcagactaggagtttccagtttgtctctgatctggtaatccccttttactttttcctccttaagttttcaaattcatgattagataaaaacaaggaaaagttcaattcatggtgtagtagccctacttcttcaaattttgccatgaccacatctttttcaattgttactttcatggggtatacttcagacttgacatggtaaaaacagaaaaca

SEQ ID NO: 117284 - DNA, 517 bp, Arabidopsis thaliana
  unsure (1)..(517): unsure at all n locations
tacaggtcgactcagtctccggctagttcgactcggtaaaatcacgattactttctccttccatttatcacgatcgtggatccagaaactctgaaagatggcgtctgagctgacaaaccggcgacacgagatagagcaaccagaagcggaatcttattatccaaagccgataaagccatggttcgtagcgattcgtccgatccgttacatgctcagagaacagagactcgtcttcgtcctcgtcggcattgccatcgccacattaggattcacaatcttctccaaatcatccaaccaccaaccaattccttacgacgtggatccgctttccggatacggaatgcgatcggagtcatcgtatctgccagcgacgattcataagaagccaagcatcgagtacatgagccggatcggatcggcaggcggcaaaatccctctaagcttgaaacggaaagtgccttgggggggttttttttttcaaagtttgggtnaaggttttttgggggnaaaancntgg

SEQ ID NO: 117285 - DNA, 849 bp, Arabidopsis thaliana
  unsure (1)..(849): unsure at all n locations
gggaaggctggtccccttccaggacccggcccgaatttccgggttcgaccaagccgtccggggatggtggttgatatttctttcattggagggaagaagaccgtaatgcaccatttcagtaaccttaccttggagagaatccgccacaatgtggttgagccaattcttcttgaggttgatcaaatctaccatttggttggccttgtttatcctgttcattacaaattcaatcccgtcaagactatcaggacaaatgtggttggaacattgaacatgcttggtttggttaaccgagttggggctagatttcttctgacgagtaccagtgaggtctatggagatcctctgcagcatcctcaggttgagacttactggggcaacgttaatcccatcggtgttcggagttgctacgacgaaggcaaacgtacggctgagacgttgaccatggactatcaccgaggcgccaatgttgagggcaggattgctaggatattcaacacttatggcccaaggatgtgtatcgatgacggtcgtgtggttagcaacttcgttncccaggcattaagaaaagagcctttgactgtttatggtgatggtaagcagactaggagtttccagtttgtctctgatctggtggaaggtctgatgaggtttatggaggggagaccatgtcggtccatttaancttggtaaccccggtgaattaccatgnttcgagctcgctaaggggggtcaagngccaatttncccnaccgaaaagtagggtttagnccaaancaggggcggnccncanaagggnacccgnntncaaaggccaaggntttttgttgnnccaggggnttcgcaggt

SEQ ID NO: 117286 - DNA, 496 bp, Arabidopsis thaliana
  unsure (1)..(496): unsure at all n locations
accccggtaattcaccatgttgagctcgctaagtggtcaagagacaatgacccgaacgcaaaatagagtcagaccaaacacagagggcgcctccacacaagaggaacccagacatctcaaaggccaaagagcttcttggttgggaaccaaagcgtggctctacgccaaaggactccctacttatggtcaaagatttccgtcaacgtgtctttggcgaccaaaagcaggattcttccaccacttcatcatcaacagagtaactgtcgctggagattctcgtttctcttcgttttcatttttaattttgatatttctattcctgtcaatgtagtgatattgaaacctcaccgattttaaagttttattttttttaatgcaatcaccgtagttttgagcttggaaaaaaaaaaaaaaaaaaaaagaaaaaaaaccttannaaataaaaaaaaaaaaaaaaaaaattttanaattatttttttatatattatatatattn

SEQ ID NO: 117287 - DNA, 400 bp, Arabidopsis thaliana
atcttctccaaatcatccaaccaccaaccaattccttacgacgtggatccgctttccggatacggaatgcgatcggagtcatcgtatctgccagcgacgattcataagaagccaagcatcgagtacatgagccggatcggatcggcaggcggcaaaatccctctaagcttgaaacggaaagtgctaagggttgttgtgacaggtggagcagggttcgtcgggtcacacctggtggaccggttgatggctcgaggagacaacgtgatcgtggtcgacaatttcttcacgggaaggaaagagaacgtgatgcaccatttcaataaccctaatttcgagatgatccgtcacgatgtagtggagccgatccttctagagggtgatcagatctaccatttggcat

SEQ ID NO: 117288 - DNA, 1819 bp, Arabidopsis thaliana
aacgatacgtccctataaattagcaatgtcgctggttcgaacagtgacgatcgttctttttataatcgcgtttctgcaaaacctgcggctcagaaaagacagcaaagtattgttaagtctcgcggtgcttgcgacagatgatggacggtgttctgttatcgggatgcgtgttcttcgtgaaggaggaaacgcgattgatgcgtctgtggctgctgctctgtgtttgggcgttgtaagtcccgcgtctggactaggcggtggagcgtttacagtggttaagatagctggtgggaaagaaattgcttatgattctagagaaaccgctcctctaagagccactgagaatatgtatggaggtaatgttgacctaaagaagaaaggagccttatcagtaggcgttcccggggaagtcgcaggtctattcacggcttggaaacaacatgggaagctaccgtggaagcgttcagtgactcctgcagagaaacttgcagagggattcaagatttccaagtatctttatatgcagatgaacgcgactagaagcgatatcttagcagacaaaggtctctctgacctatttgtttcaaatggagagctcaagaggccagggacgatttgccataacccaaaattggctttaaccttgaagctaattggagagtacggtccaaaagcattttacaatggcacagttggggttaacctagcgagagatatcaaaaaatctggaggaataataactttgaaagatctgcaaagttatagagttaagattaaagaaccgttgtctgcagaacttcttggatatagagtccttggtatgcctcctccttcatctggtggcgctgcaatgatgcttgttttgaacatctttctcaatatgggatcatcagtgttcaggcctctcggtgttcatcgactaatcgaggctctgaaacatgcattcgcagttagaatgaacctcggggatccagatttcactgatgttaccaaggttgtttcggatatgttgtcgccaaagtttgcaaaagacttgaagagcaagataaacgaccaaaaaacttttgatccaaaatattacgggggcatgtggaatcagatcgacgaccacgggacaagtcatttatcgatcatagaccgcgagaggaacgctgtgtctatgactagtacaataaatggttactttggggcattgatgctatctccgagcacaggaatagttctgaacaacgaaatggacgatttctcaatccctatgaaatctaacggtaacttagatgttccaccaccagcaccagctaacttcatccgtcctggaaaacgacctttgtcctctatgtcacccaccattgtactcaaggacggtaaagtgaaagccgctgtgggtgcgagcggaggagccaacattattgccgggacaacggaagtttacttgaatcattttttcctcaagatggatcctctttcttccgtcttagctccaagaatctaccatcagctgataccaaacagagcttcgtacgagaactggacaacagtattcaatgatcatttcgagattcctaaagcaacaagagttgtgttggagaagaaaggtcatgtcctatctcctattgccggagggacgattgctcagttcatagttcaagaatccggtgagaactccggtggaagaagtgagcttgtggcagttagtgatcctcgaaaaggagggttcccttcaggatattgagaattttagatcgagatttattttatgtttttattgtttctttgattattgaaccgaactttgtgatcaatataattttatttcact

SEQ ID NO: 117289 - DNA, 1897 bp, Arabidopsis thaliana
gcgagctaaagccaagagcagcggtgtcaaaaacctcatccgccgcaaaacccctaaaacctccggcaccggaactttctctttcttctatcactttcctttgactgtctctatcgagatttcaatcactgaatcgattgaatcttaagcaatgatgggccaagaagcagctccgacgggaccacccaacagagaactctacgcgctcctgaatttatcaccggaggcctccgacgaagaaatcagaaaagcttatcgtcaatgggctcaagtttatcaccctgacaagatccaatctcctcagatgaaggaagtggctacggagaatttccaacggatatgtgaagcatatgagatattgtcggatgagactaagaggctaatatatgacttatatggcatggaaggattgaattcaggattagagcttggtcctaggttgagtaaggctgatgagatcaaagaggagcttgaaaggattaagaggagaaatgaagaagctaagaagatggctcattttcaacccactggttctattctcttcaatttgtctgtcccacattttttagtaggcgatggcatcatgagaggaatggttatggctagtcaagtgcagtctcagttgtcaaaagatgatgcaattgccattggtggaaatttggcggccaatgaaaagtctggtggcggagtcgctactgccatactgagacgtcagatttctccagtgtcatccatagagtttgtcgcttcaacgggtttgcagtcgcttattggagtgcagacaacacgtcagttaaccatacattcaactgccacaatcaatatttcaaagtcgttgagtgatggctccatcaatcttaccaacacgtggactcgacagctttcagaaacttcaagcggaaatattgaactggcactgggtatgcgatcagcaattacagttggatggaaaaagagagacgagaatgtatctgctgctggtgactttaagattgaatctggtggactcggagcatcagctcgttatactcgtaaactttcatccaaatctcatggtcgcattgtgggtagaatcggaagcaatgctcttgagattgagctcggtggtggaaggcaaatttctgagttcagtacagtaagaatgatgtatacagtaggactcaagggtattttctggaaagtagagctacaccgtggtagccaaaagctgattgttcccattctactctccgcacatttagctccagtatttgcaactggagcattcattgttccaacatctctttactttttgttaaagaaatttgtggtgaagccatatttgcttaaaagagaaaaacaaaaggccttggagaatatggagaaaacttggggccaggttggggaagcaagggcaagggctgagaaagcccagcaattgctacaaaccgtagccacaaggaagaaaaaccgtcaagttgaaacagatgggctcatagtaacgaaagcgttgtatggtgacccaaaagcaatagagagaagaaacgaagaaggagtggaaggactggattcgggagtcattgacgtgacagtgccgatgaacttccttgtgagtgactcagggcagctcaagctccatgagggagtgaagaaatcagggatcatgggtttttgcgatccctgtcccggccaacctaagcagttatacattgcatacacttaccattctcagccatttgaggtaatagttggtgactatgaagagctgagtataccacaagaaggccagtgagagtatgaaaacggtactctccactttgttgtttttattaatacgaacgaatggcttctttcggggatttgtaactcttttacacattcatttctttctcaataaattaagcattcttgtttgcct

SEQ ID NO: 117290 - DNA, 584 bp, Arabidopsis thaliana
  unsure (1)..(584): unsure at all n locations
cgtatgagggtcttaagaagcgcgaggtcgaacccatcaaggatttcgtcgaggagatgaacgataccgttgaccgtttgaccaaatctgttcaagaactgaagttgtgtgggagtgccaaagatcaagaccagtttgcgtaccacatgagtaatgctcagacttggactagtgcggctttgactgacgagaacacttgctccgatgggttctcgggtcgggttatggatgggaggatcaagaactcggttcgggctagaatcatgaacgtgggacatgaaaccagcaacgctttgtccttgattaatgcctttgctaaaacttactaatttaaaactatattttgtcctgtaaaatatatatatagataaatgtaatgtcttgctaagagtttgatgtgatatatttttttcgattttggtagtttctttttgttttgtaacgtggtttataatagtataatgtgtattttgagctataaagttgtttttaagaaaaaaaaaaaaaaagnnnnnnnnnnnnnnnnnnnnnnnnnnnnnnnnnnnnnnnnnnnnnnnnnnnnnnnnnnnnnnnnnnnnnnnnnn

SEQ ID NO: 117291 - DNA, 827 bp, Arabidopsis thaliana
cttttagcttcaaagctgtatttgaaagggtatatatctcacacacaaaacagatcagaagctaaaaggtaataatataatggcggatttgagggacgaaaaaggtaatccgatccatctaactgacacacagggaaacccaattgtcgacctgactgatgagcacggtaaccccatgtacctaaccggtgttgttagctccactcctcagcataaggagagtactaccagcgacattgcagagcaccctactagcaccgttggagaaacacatccggcagctgctccagctggtgctggtgctgccaccgctgccactgcgacaggagtctctgctggtactggagcaaccaccacagggcagcaacaccatgggtcgcttgaagagcatcttcgtcggtctggaagttcatctagctctagctcggaggatgatgggcaaggagggaggaggaagaagagcataaaggagaaaattaaagagaagttcggtagcggcaaacacaaggacgaacaaacaccagcgaccgccacaacaacaggacctgccactaccgaccaacctcacgagaagaagggcattctcgagaagatcaaggacaagcttccaggccaccataaccacaaccacccatgaacaccaatcatatgacgtctttgttacatgaataaatcgtttgcacgaatttcattagggcttatgaagaatcaatatatatgtctagtgaagtttactaaattttagttgtgtttgcttgcagtttgtgaatgtgaccatcgtgttatcatgttcttgtttatttataaagaaggaactgtattttgct

SEQ ID NO: 117292 - DNA, 1650 bp, Arabidopsis thaliana
  unsure (1)..(1650): unsure at all n locations
atgatgatgctccagctctctacgactcactattgggaaagctggcacgcctgcaggtaccggtccggaattcccgggtcgacccacgcgtccgcttttgtcggaatctgacgtcagcatacctgctaccacttccagagttcaatcgatcttcgcctcgttgaaacgttttccctcttcgattatcaacagtgtctccactcgtatcatcaccgcctccaactaattttgccatctctctcgttgttccaatttgattctactagtgagctccgatttaatttagggttttgaaagatgtcagctttgaaaaattacggcttgatctccattgattctgccctccattttcctcgatcaaatcaattgcagagctataagagaaggaatgcaaaatgggtctctccaatagcagctgttgtacctaacttccatcttcctatgcgcagtctcgaggataaaaacaggacaaacacagacgacataaggtcccttagagtgatcacagccattaagacaccgtatttacctgatggaagattcgacctccaagcatacgatgacttagtcaacacgcagatagaaaacggtgctgaaggtgtgattgttggtggtacaactggtgaaggccaattgatgagctgggatgagcacataatgcttatcggccatactgtaaattgttttgggggaaggatcaaagtcattggaaacactggaagtaactcgactagggaagctattcatgccactgagcaaggattcgccatgggaatgcacggggcactgcacattaacccttactatggaaaaacatccattgaaggcatgaatgcgcattttcaaaccgttcttcatatgggaccgactattatatacaacgtgccaggtcgaacgtgccaggatatacctccccaggttatctttaaactctctcagaaccctaatatggctggggttaaggaatgcgttggtaataaccgagttgaagagtatactgagaagggaattgtcgtttggagtggaaatgatgatcagtgccatgattctagatgggatcacggtgccactggagtgatatcggttactagcaatttagttccgggtttgatgaggaagttgatgtttgaaggtagaaactcagcgttgaacgcaaagcttcttcctttaatggattggctattccaagaaccgaatcccattggtgtaaacactgctttggctcagttaggagttgcgaggccggtttttcggttaccttatgtgccattgcctctgtccaaaaggattgagttcgttaaactggtgaaggaaatcggaagggagcattttgtaggagacagagatgttcaggtacttgatgatgatgacttcatcttaatcggtcgatattagagtctcttccctgaagattggttgtgtttatactttcttcgttcagttgttagttatttagctgatgagaaactcacagatggatcaagacttctacttgttgtaatgtttggtctgttacttttggtgatgaatctaatggcttttgcttaaaaaaaaaaaaactaaaaaaaaaaaaaaagggcggccgctctagaggatccaagcttacgtacgcgtgcatgcgacgtcaaagctcttctattnnnnnnnnnn

SEQ ID NO: 117293 - DNA, 2450 bp, Arabidopsis thaliana
  unsure (1)..(2450): unsure at all n locations
nnnnnnnnnnnnnnnnnnnnnnnnnnnnnnnnnnnaggacgcgtgggaaaatcaaaagtgttacgattcggtatcatcgtctctacccgtccggattttgtcaaaccctgctctcttttctccaagtgctctcatggtgcttccgctcttccggcgcgctgcgatcgcccggacttcctcgcttctcagagctcgtcttttcgctcctgcctccgaattccattctcgcttttctaatggactataccacttggacgacaaaattagtagcagtaatggtgtgaggtctgcctctatagacttgattacaagaatggatgatagttctccaaagcccattctgcgatttggcgtgcaaaacttttcatctacaggacccatatcacagacggttcttgcaatgccagccttgtctcctactatgagtcatggaaatgttgtaaaatggatgaagaaagaaggtgacaaggtagaggtgggtgatgtactatgtgagatagagacagacaaagccactgtagaatttgagagtcaagaggaaggatttctggccaagattttagtcactgaaggatcaaaggatatccctgttaatgaaccgattgcaataatggttgaggaggaagacgacattaaaaacgttcctgctaccatagagggtggacgagatggtaaagaggaaacatcagctcatcaagtgatgaaacctgacgaaagcacacaacaaaaaagttccattcagcccgatgcatcagatcttcccccacatgtcgtcttagaaatgccagcactttctcctacaatgaaccaaggtaatattgccaaatggtggaaaaaagagggtgacaagattgaagtgggtgatgtcataggtgagatcgagactgacaaagccactctggaatttgaaagccttgaagaggggtacttagctaagattctaattcctgaaggttccaaggatgtggcggtgggaaagccgattgccctaatagttgaagatgctgaaagtattgaagccatcaagtcttcttccgcaggtagttctgaggttgatacagttaaagaagtccctgacagtgttgtagataaacctacagagaggaaagcaggcttcacaaagatcagtcctgctgcaaagctattgattttagaacatggattggaggcatcatcaattgaggcatcgggtccctatggtacattattgaaatcagacgttgtggccgcaattgcttctggaaaagcttctaaatcatctgcgtctacgaagaagaagcaaccatcaaaggagaccccgtctaaatcctcctccacatcgaagccttctgtgacacagtcagataataattatgaagattttccaaatagtcaaattcgcaagattatagcaaaacgtttattggaatcaaaacagaagataccccatttgtatttacaatcagatgttgtattggatcctcttcttgcatttagaaaagaacttcaagaaaaccatggcgttaaagtgtctgtcaatgacatagttattaaagcagtggcagtcgcactgaggaatgtacgacaagctaatgctttctgggatgctgagaaaggagatatcgttatgtgtgacagtgttgacatatcaattgcagttgcaactgagaagggcttaatgactccaattatcaagaatgcagaccagaaatctatttctgctatttccttagaggttaaggagctggcacaaaaggctcgatctggaaagcttgctcctcatgagtttcaaggagggacattcagcatatcaaatctaggaatgtatcctgtggataatttctgcgcaatcattaacccccctcaggctgggattctagcagttggtagaggaaacaaagaggttgagccagttattggactagatggaattgagaagccttgtgttgtgacaaaaatgaatgtaacgttatccgctgatcatcggatctttgatggacaagttggagcttcgtttatgtctgaattgcgttcaaactttgaggatgttcgaagacttcttctgtgagaaagatccaactgtttaccaaatgaatcttggattactacataataaacctcggaccaacccacgtgcacatccagaaccagaactgctggtctacattgttaactctgatcacatgtttcatttttttccatttggttcatatacttaccaaaatttgttttggtctttaacaattcgtcttatagattggtaacttcctgaggtattttttgtctggtctgtcctctgcaaaataaataatttcagctgtcaatccgcaactggtgaaataatttaaaaagtattttaccctcaaaaaaaaaaaaaaaaacccgaattcctgcagcccgggggatccacgccgctctagaggatccaagcttacgtacgcgtgcatgcgacgtcaagactcttctatagt

SEQ ID NO: 117294 - DNA, 1134 bp, Arabidopsis thaliana
atacgactttcttagggaaacctggtacgcctgcaggtaccggtccggaattcccgtcctcactcctgcgcccaagaaatcatcgtcttcttcttcatctattcaggatcgatccggcttgagatttattacaaattcgtccttctatttgctccaaaagttcgacaatttcgtaggggcaaagatggacgctgattccaagagatttctagctacgcttcgatcccgatctgaaatgttaatgggctttgaagaaatagatggagatgatgatttccaggaggagtttgcttgcccgttctgtgcagaatcgtatgatatcatcgggttgtgctgtcacatagatgatgaacatactttagagtcgaagaacgcggtatgccctgtttgttctcttaaagtgggagttgatatcgtagcacacataacgcttcaccatgggagtttatttaagttgcagcgaaagagaaagtcacgaaaaagcggtaccaattcgacactttcacttcttcggaaagaactaagagaaggagatctacaaaggttgttaggatttacttctcgtaatggttctgttgcgtcaagtgtaactcctgatcctctcctgtcgtcatttatctcacctacacgatcacagagttctcctgcgccacgccaaaccaaaaacgtatccgaggataaacagatagagcgcaagagacaagtgttcatctcaccggtctcgttaaaagatcgggaagagaggaggcacaaatcagagtttgttcagaggctcttgtcatcagccattttcgatgaagtctaatgcacatacaaagattgagaacatggaggaactaattcgaatcagacttgagagaatctggtttcgagaaaaacaatggttgggatgagaagaagacggagaagagcgagatgcagctatgttatcaatatctatatctatctatgtattgtgtctgtttggtgctactaaatacattgcgtagaaatgtgttttcttaagtttattaagcaattgaaaagtaagatataggaagaagaataagtcctcttgtctgtagcataaaccctattggtgttcttgtgttgtgtgtcttatgaaatgaaaaatgttcactcttgtaagctaaa

SEQ ID NO: 117295 - DNA, 660 bp, Arabidopsis thaliana
  unsure (1)..(660): unsure at all n locations
ctgcaacttaaataaactcccatggtgaagcgttatgtgtgctacgatatcaactcctgtcgtcatttatctcacctacacgatcacagagttctcctgcgccacgccaaaccaaaaacgtatccgaggataaacagatagagcgcaagagacaagtgttcatctcaccggtctcgttaaaagatcgggaagagaggaggcacaaatcagagtttgttcagaggctcttgtcatcagccattttcgatgaagtctaatgcacatacaaagattgagaacatggaggaactaattcgaatcagacttgagagaatctggtatatatgaagctctgttagttgtgtaaaagaacctacacagacacattttcatcggaatcttgattcaactgtgtgtaggtttcgagaaaaacaatggttgggatgagaagaagacggagaagagcgagatgcagctatgttatcaatatctatatctatctatgtattgtgtctgtttggtgctactaaatacattgcgtagaaatgtgttttcctaaggttattaagccaattgaaaaggtaagntntngggagnaggataaggccncctggcctggagcataaccccattgggggcctggnggtgngggcctatgaatggaaaaggnccccctgaagc

SEQ ID NO: 117296 - DNA, 890 bp, Arabidopsis thaliana
  unsure (1)..(890): unsure at all n locations
ccgnnnnnnnnnnnnnnnnnnnnnnnnnnnnnnnnnnnnnnnnnnnnnnntggaaacaaatccctgcgaatatcaccggggaatctgacggcggcttagtaccggcggctactgcaaaaaggattgtgttcttcttaggcttgatacttgccttgggaagaatataacaatcatttttgcggtagctaaaacgctaagctctatcgtcatatctttatcattgatacttatttgatatctaaatatcataaaaatggccgctcgttcactctccggtgccgttaaatctctttgctccgccgcatccggaagtctgtcttgttccattgtcttaaggaggagttacgttgctacatcgcagaatgtaacagcagcaggattgagtaagggaggttccaccagagttatggtggggaagatggaacagagaggtttagatcaagaggcagagtctgcttggggaccagatccagttactggatactacagaccttccaatcgtgcggctgagattgatccagctgagctcagagagttgcttttgaaaaacaaagcaaagtctttctgagaattttgattggttggttgacttggttccagtggaaggttgtcgtaggcgactattctgattatgtgtgtttatgtttgtcttgtatcaactattaagtaaaaataaagatcacattaactaaataaaaatataatgtctgtttggatcgactaacacaacatctttagtataacagtgtcttaaatgttttaagagataaatggggatatacgaaaaatagaaaacgttgctaattaaaaaaaaaaaaaaaaaagggcggccgctctagaggatccaagcttacgtacgcgtgcatgcgacgtcatagtaatnctatagt

SEQ ID NO: 117297 - DNA, 1758 bp, Arabidopsis thaliana
  unsure (1)..(1758): unsure at all n locations
aaagccaatgagaagctgacgaaaaaccgcgttggttaaattacatataaatgggttttgtgaattcaaataaagacgaagacaaaaagtttgagactttatctctactttgacccgaccagcgaaagtgtaaattgaaagatagatagaaagaaagagccaactttaaaagcttagcggttgatttcgaaatctcgtcgccggcgcgtggagtcttttcgtcggacaacaacaagagaaaagagatttgtggtgttcttctgcttagaattgttgttttccatctccggcagtgagatttggtggagaattttgatttgtaatcgatggttaaggaaacagagtactacgatgtgctcggagttagcccaactgctacagaatctgagattaagaaagcttactacataaaggcacgccaagttcatcctgataagaaccctaatgatcctcaagctgcacacaatttccaggtcttgggagaggcctatcaagtactaagtgattcaggacaacgccaagcttttgatgcatgtggcaagtcaggaatctcaactgatgcaatcatcgatcctgctacaatttttacaatgctatttggcagcgaactttttgtagggtacataggacagcttgctatggcatctatggcttcacttgatatcttcacggaaggggatcagtttgatacaaaaaagatacaagaaaaattggggattgttcagaaagaaagagaagacaagcttactcagattctgaaagaccgactcaacgaatatgtaataaacaaagacgaatttatcagtaatgctgaagctgaagtagcaagactctcaaatggcagcttatggtgtggatatgttgaatacattgggtatatatatgtaagacaagcagcaaaagagctagggaagaaagctatttatctcggagtcccattcattgctgaatggtttaggaacaaaggtcacttcatcaaatctcaattaacagctgcaacaggcgcatatgcgttgttccagttgcaggaggaaatgaaaaggcagctaaatactgaaggaaattatactgaggaggaacttgaggaataccttcaggcccataaaagagtgatgattgattcactgtggaagctcaatgtcgctgatatcgaagccactctttgtcgtgtttgtcagctggttcttcaagatccagaagccaaaagagaggagcttcgtacaagagcaagaggtttaaaagctctggggaggatctttcagagagccaaaacagctagtgagagtgatcctttagaaaatagtgaacctcaaaagttaaacggaaatggaaagaaccacgatgaggatacttctacatcaccaaaatccagtgaaggatctcactccacctctggtcctcaggaaccacaaaacccctacgtgaaagaattcaaacttggagatgaacaatttaactattacttcccacgaccagcgccacctcctggccagggaaatactcttcctctggctatgattgattcaggtgagatcggggcatatatatatatatatatatatatatatcagtctagatatttctatgcagttgtgtaccatatgtaaattattccttttttcttttggtttggcttgttagaagaaaatgattgatgttgaaagcacatataaaagctctttcgtgataatgtatccatgtaaattaattatgaagggataatgacttagagtatnnnnnnnnnnnnnnnnnnnnnnn

SEQ ID NO: 117298 - DNA, 2653 bp, Arabidopsis thaliana
  unsure (1)..(2653): unsure at all n locations
cttgcaacaacaacacctttctaaaaccctaatttcaaaatcgactgatgttagcgattcgatcgtcgaattacctccgatgcataccttctctctgtactaaaacccaaatctctcaattctcctccgtgttaatctcttttagccgccaaatttcccacttgcgtcttagctcgtgccatagagccatgtcttcttcccgcccttctgcatttgatgctctcatgtccaatgctcgtgcagccgccaagaagaagactccccagacaactaatttgtctcgctcgccgaacaaaaggaaaattggagaaacccaagatgctaatttgggcaaaactattgtttccgaaggtacacttccaaaaacggaggatctgctggagcctgtttctgattctgcaaatcccagatcggatacatcgtcaattgcggaggattcaaagacgggagcgaaaaaggctaagactttgagcaagacggacgaaatgaagagcaaaattggattgctgaagaagaagccgaatgatttcgatcctgaaaaaatgtcttgctgggagaaaggggagagagttccgtttctgtttgtcgcattggcttttgatctgatctcaaatgaaagtggccggattgtgattactgatattctgtgtaacatgttgagaactgttattgccactactcctgaggatttggtcgctactgtttatctttcggcgaatgagattgccccggctcatgaaggtgtagaattgggaattggtgagagtacaattatcaaggctatctctgaggcttttggtagaactgaggatcatgttaagaagcagaatacggaactgggagacttgggacttgtagcaaaaggaagccgttcgactcagactatgatgttcaagcccgaaccattgactgttgtcaaggttttcgatacgtttcgacaaattgctaaggaaagtggaaaagatagtaatgaaaagaagaagaatcgaatgaaggcacttcttgtggcgacaacagactgtgaacctctttacttaacacgattacttcaggcaaaattgcggttagggttctcaggtcagactgtcttagccgcattgggacaagccgctgtatataatgaagagcactcaaagccacccccaaataccaagtctcctttagaagaggctgcaaagattgttaaacaagtattcactgtacttcctgtctatgacattattgttcctgctcttctaagtggcggtgtgtggaatcttccaaaaacttgtaactttacattgggtgttccaattggacccatgcttgcaaaaccaaccaaaggtgtagctgagatactgaataaattccaggacatcgttttcacatgtgaatacaaatatgatggggaacgtgcacagatacattttatggaggatggtacatttgagatatacagtcgaaatgctgaaagaaacactgggaagtacccggatgttgctcttgcgttatcaagattaaagaagccttctgtgaaatcttttattctggattgtgaagttgttgctttcgacagggagaaaaagaaaattcttccgttccagattttgagcactcgagcccgtaaaaatgtgaatgtcaatgatatcaaggttggcgtatgcatctttgcttttgacatgttatatctaaatggccaacaacttatccaggagaatcttaaaattcgccgagagaagctatacgaatcatttgaggaagatcctgggtatttccagtttgcaactgctgtaacatctaacgatatcgatgaaatacaaaagtttcttgacgcttctgttgatgttggctgcgaaggtttaatcattaaaacattggactcagatgctacctatgagcctgcaaagcgatcaaataattggctaaaactgaagaaagactatatggacagcattggggactctgtggatcttgtaccaattcctgctttccatggacgtggaaaacgcacaggtgtctatggtgcatttttactcgcttgctatgatgttgataaggaagagttccagagcatttgtaaaattggtactggattttctgatgccatgcttgacgagcggtcgtccagtcttcgctctcaagtgattgctactccaaaacaatactaccgagttggagacagcctcaatccagatgtttggtttgagcccactgaggtctgggaagtgaaagcagctgacttaacaattagccctgtgcaccgtgcagctactggcatagtggatcctgataaggggatttctcttcgttttcctcgtctacttcgtgtacgggaagacaagaagcccgaggaagcaacatcatctgagcagattgctgatttgtaccaagctcagaaacacaatcatccaagtaatgaagtcaaaggtgacgatgattgaacaacagtaatctggcctcagagcacatttcctcgtatgtacgacattgctcgtaacttgctaatgatgcacattgcgtgtttgagttttcaactgtaactgcttatgtaaaactgcttttaggaaaagtgaatgaaaggttctggaaaaaaattggtacactcatcaactgactctggaatgaataaaaacacagccctgattgacatcnnnnnnnnnnnnnnnnnnnnnnn

SEQ ID NO: 117299 - DNA, 1011 bp, Arabidopsis thaliana
  unsure (1)..(1011): unsure at all n locations
aaaacaaatatactctgtgactaattacatccaacgcatcaagcaaagtaacaaattccataaacacaattagctaaaagaaagaaacaatcatgaaggccaccatatccatcactaccatctttctcgtggtcgctttggccgcaccctccctagctcgtcctgacaaccatgtcgaggactctgtaggccgtctacttcgtcctggtcaaacgtaccacatcgtacctgcgaatcccgagacaggaggaggtattttctcgaacagtgaagaaatctgtcctcttgacatcttccagtcaaacaatccgcttgacttgggcctacccatcaaatttaagtccgagttatggtttgttaaggaaatgaatagtatcaccatcgagtttgaggctccgaactggtttttgtgtcctaaagaatccaaggggtggagagttgtgtactctgaagaattcaaaaagagtcttataataagcactggtggttcatcaaacccaagtggcttccagatccatcgagtcgacggaggtgcttacaagattgtatattgtacaaacatctcgactactacgtgcatgaacgttggcatattcaccgatatctctggtgcacgacgcttagccttgaccagcgatgaggctctcctagttaagttccagaaggcagcaactccaaaagctgatttgaagactaagctgaggatgttccctttctactgattcacaactcttgtaccaagaaaaagtgtcaaaaatatggcctcttgaataatggttgagacaataccaaccacttgtgattagtttgtgtgttttttctggtatgatcagtgtgtcactgtcatgtgttttttgctttgtttaaggattatgcttgtgtataaatgaattatataaaacccgctttgtgttaaaaaaaaaaaaaaaaaaaagnnnnnnnnnnnnnnnnnnnnnnnnnnnnnnnnnnnnnnnnnnnnnnnnnnnnnnnnnnnnnnnnnnnnnnnnnnnn

SEQ ID NO: 117300 - DNA, 481 bp, Arabidopsis thaliana
  unsure (1)..(481): unsure at all n locations
catcaagcaaagtaacaaattccataaacacaattagctaaaagaaagaaacaatcatgaaggccaccatatccatcactaccatctttctcgtggtcgctttggccgcaccctccctagctcgtcctgacaaccatgtcgaggactctgtaggccgtctacttcgtcctggtcaaacgtaccacatcgtacctgcgaatcccgagacaggaggaggtattttctcgaacagtgaaggaatctgtcctcttgacatcttncagtcaaacaattccgctttgactttggggctacccatcaaatttaaggcccgagttcatgggttttttaggggattgattggtttcaaccatcggggttttaggggtcccgaacctgggtttttgtggtcccaaaaggattccaaggggggggggggtttttttccccttggggggttaaaagaggttttttaaaagggcccgggggtttttaaccccaa

SEQ ID NO: 117301 - DNA, 1477 bp, Arabidopsis thaliana
  unsure (1)..(1477): unsure at all n locations
aacatttcttttaaaaatgagaaagttgttggcatcgccgtttagttcattactcgccgtcgttttcatttccgtcatctccgtcgtcagatgctgctctcctaaagatcagacggctctcaatgctttcaagtcgtcactgagcgaaccaaacctcggtatcttcaacacttggtctgaaaacactgattgttgcaaggaatggtacggtatcagctgcgatcctgattcgggtcgggtcactgatatttctctccggggagaatctgaagacgccattttccaaaaggcaggccggtccggttatatgtccggttcgattgatccagcagtttgtgacttaaccgcactcacttccctcgttctcgccgactggaaaggaatcaccggagagattcctccgtgcattacttccctagcttcggttccgtatcctcgatctcgccggcaacaagatcaccggggagattcccgcggaaatcggcaaactctcgaaactcgctgttttaaacctcgccgagaatcaaatgtccggcgagattccggcgtctactgacgtcactcatcgagttgaagcatcttgaattgtacggaaaatggaatcaccggcgtgatcccggccgatttcggtatcgttgaagatgttgagcagagttttactgggccgtaacgaactaaccgggtcaattccagagtcgatctcgggtatggaacggttagcggatctggatctatccaaaaaacatatcgaaggtccgatacccgaatggatgggtaacatgaaggtactctcacttttgaatctcgattgcaattcgttaaccggtccaatccccggttcgcttcttagcaattccggtttagatgttgccaatttgagccgaaatgcgttggaaggaactatacccgacgttttcgggtcaaaaacgtatttagtttcgcttgatctgtcacacaatagtctatcgggtcggatcccggattcgttgtcgtcagctaagtttgtgggacatttggatattagccataacaagctttgtgggcgtattccaacgggttttccttttgatcaccttgaagctacgtcgtttagtgacaaccaatgtctctgcggtggccctttgacgacgtcatgttaataacaaggatatggtttctggttttactgaaccgggttattctttttgctgttgctcttgttcgttgtatcaaacttgtgatattttgcttttcatttcttcgtctttcagattttagtttctaaagctaagatatgttactggcaacggacaggtacaccgatccaatatggtttgcggtctatgtacaataaatccggatgtaaatcaaaagcaatgttatagaatttaatttcaagaaaaaaaaaaaaaaagnnnnnnnnnnnnnnnnnnnnnnnnnnnnnnnnnnnnnnnnnnnnnnnnnnnnnnnnnnnnnnnnnnnnnnnnnnnnnnnnncg

SEQ ID NO: 117302 - DNA, 590 bp, Arabidopsis thaliana
  unsure (1)..(590): unsure at all n locations
aacatttcttttaaaaatgagaaagttgttggcatcgccgtttagttcattactcgccgtcgttttcatttccgtcatctccgtcgtcagatgctgctctcctaaagatcagacggctctcaatgctttcaagtcgtcactgagcgaaccaaacctcggtatcttcaacacttggtctgaaaacactgattgttgcaaggaatggtacggtatcagctgcgatcctgattcgggtcgggtcactgatatttctctccggggagaatctgaagacgccattttccaaaaggcaggccggtccggttatatgtccggtttcgattgatccagcagtttgtgacttaacccgcactcactttccctcgttctcgccgacctggaaaggaatcaccggagaggattcctccgtgcattaccttccctaggtttcgttccgnatccttgntctgggccgggaaaaaagattaaccgggggggattcccggggaaatcgggaaactttggaaactgggtgtttaaccctggccgggttaaaaatttccggggggttccgnggnntngggnaattaccgggttaaggnnttnatttc

SEQ ID NO: 117303 - DNA, 1397 bp, Arabidopsis thaliana
  unsure (1)..(1397): unsure at all n locations
nnnnnnnnnnnnnnnnnnnnnnnnnnnnnnnnnnnnnnnnnnnnnnnnnnnnnnnnnnnnnnnnnnnnnnnnnnnnnnnnnnnccacgcgtccgcccgttgctgtcgaagttaggccaagaaacccatttaaaaaaaaagagagagagatggagagtttcccgatcatcaatctcgagaagcttaatggagaagagagagcaatcactatggagaagatcaaagacgcttgtgaaaactggggcttctttgagtgtgtgaaccatgggatttcactcgagcttttggacaaagtggagaagatgaccaaggaacattacaagaagtgcatggaagagagattcaaggaatcgattaagaacagaggtcttgactctcttcgctctgaagtcaacgacgttgactgggaatccactttctacctcaagcaccttcccgtctctaatatctccgatgtccctgatctcgacgacgattacagaacgttaatgaaagacttcgccggaaagatagagaagttgtcggaggagctactggatctgctgtgcgagaatctcggtttagagaagggttatttaaaaaaggtgttttacgggtcgaaaagaccgacttttggaaccaaagtcagcaattatccaccttgtcctaatccggacctagtcaagggtctccgagcccacaccgacgccggcggcatcatcctcctcttccaagacgacaaagtcagtggacttcagcttcttaaagacggcgagtgggtcgatgttcctccggttaagcattcaatcgtcgttaatctcggcgatcaacttgaggtgataaccaatgggaagtacaagagtgtggaacatagagtgctatctcagacagacggagaaggaagaatgtcgatcgcatcattctataatccgggaagcgactctgttatttttccggcgccggagctgatcggaaaagaagcagagaaggagaagaaagagaactatccgagatttgtgtttgaagattacatgaaactctactctgctgtcaagtttcaggccaaggaaccaaggtttgaagccatgaaagctatggagacaactgtggccaacaatgttggaccattggccactgcgtgaatgatatgtaactggttaataaatatatatatatatatatatatagtctttatataatgtcttagaaacttgattattcactatacgaataattttgttcatgttgttgtatgtttaagtggtgaatgtgttttatatatgggaattaatgttttctgttcgaaaaaaaaaaaaaaaaaaaaaaaaagaaaaaaaaaaaagggcggccgctctagaggctcccaacatgagtccgggttcaggaagcgtgcatgcgacgtcatgctgataggatagt

SEQ ID NO: 117304 - DNA, 595 bp, Arabidopsis thaliana
ctacgacacactttagggagaagctggcacgcctgcaggtaccggtccggaattcccggctccgcccacgcgtccgagacagacttcgccggaaagatagagaagttgtcggaggagctactggatctgctgtgcgagaatctcggtttagagaagggttatttaaaaaaggtgttttacgggtcgaaaagaccgactttcggaaccaaagtcagcaattaccctctcttggcctggtccggacctagtcaaggctgctgcgagcccacaccgacgccggcggcatcatcctcctcttccaagacgacaaagtcagtggacttcaccttctcaaagacggcgagtgggtcgatggtccctccggctaagcattcaatcgtcggtaatctcggccacccaccttgaggtgactaccaatgggaagtacacgagcgggggacatacgaccgctatcccacacagacggacacggaagagtgccgaccgcctcattcctccatccgggaagcgcctctggtatttcaccggcgccggagctgatccgaaaacaagcctagaccgagaagacagcacaccctccagagccgcgctcaca

SEQ ID NO: 117305 - DNA, 396 bp, Arabidopsis thaliana
ggcagacacaggcaaaggaagtgcaagcgctagctgcaacgatcgttgtggctgcccttctccatgtcccggtggcgaatcttgcaggtgcaagatgatgagcgaagcatctggtggggatcaagagcacaacacgtgtccatgtggggagcactgtggctgtaacccttgcaactgccccaagactcaaactcaaacctctgctaagggttgcacttgtggtgagggctgcacctgtgccacttgcgctgcttagacatccttaactatggttataccatacttgtataataggtactactagctagtcgatctgaaataaagctgcacaacaaaatatatgtatcgtatgctctgcttcttgtgtttcctttttatgaatcaccgagagtttgt

SEQ ID NO: 117306 - DNA, 912 bp, Arabidopsis thaliana
cagagtaatttaggcagttcggagaaacaatggcggtagaagacactcccaaatctgttgtaacggaagaagctaagcctaattcaatagagaatccgattgatcgataccatgaggaaggtgatgatgccgaagaaggagagatcgccggaggagaaggagacggaaacgttgacgaatcgagcaaatccggtgttcctgaatcgcatcctctggaacattcatggactttctggttcgataatcctgctgtgaaatcgaaacaaacctcttggggaagttccttgcgacccgtgtttacgttttcaactgttgaggaattttggagtttgtacaacaacatgaagcatccgagcaagttagctcacggagctgacttctactgtttcaaacacatcattgaacctaagtgggaggatcctatttgtgctaatggaggaaaatggactatgactttccctaaggagaagtctgataagagctggctctacactttgcttgcattgattggagagcagtttgatcatggagatgaaatatgtggagcagttgtcaacattagaggaaagcaagaaaggatatctatttggactaaaaatgcttcaaacgaagctgctcaggtgagcattggaaaacaatggaaggagtttctcgattacaacaacagcataggtttcatcatccatgaggatgcgaagaagctcgacaggaatgcaaagaacgcttacaccgcttgaaacctctcaaatctttgcattggtttcaattacagtttggtatgtgagagatctctatttatctaaacatgacttggacagtctgtctttgctagtgtctgattgctcacgacgctctaacatttcatttagtaatacactagtatggttcctcataacaaaaaaaaaaaaaaaa

SEQ ID NO: 117307 - DNA, 878 bp, Arabidopsis thaliana
atccactctgtccctctctcgtaaccaaaagccgtcgagtaatttagctcaactgcgaggaatatggcgaccgatgatgtgaacgagcctctcccggcggcggcggaattaccggcgacagaggcggagaaacaaccacacaagctcgaaagaaagtggagtttctggttcgataaccaatcaaagaaaggcgccgcctggggagcttctcttcgtaaagcctatactttcgacaccgtcgaagatttttggggattgcacgagactatatttcagactagcaaattgacagcgaatgctgaaattcacttgttcaaagctggtgttgagccaaagtgggaagatccagagtgtgctaatggaggaaagtggacttgggttgttactgctaataggaaggaagctttagacaaaggctggcttgaaactttgatggctttgattggagagcaatttgatgaagcagatgagatttgtggtgtggttgctagtgtccgtccacagtcgaagcaagacaagctctccttgtggactaggacgaagtctaatgaagctgttctgatgggtattgggaagaagtggaaggagatacttgatgtcaccgacaagataactttcaataaccatgatgattccagaagaagccggttcactgtctgaagaaacgagtgtgaagccagaggaagatgcaatatggctttttttgtgatactgtttggtcggtttactcaaatagctgagacatttagggacattcactttgaggtgtaaactctacaaagttttctgtttcattaaaatgattttttgttataaattaagttgagttatataaaaaaaaaaaaaaatcccagcttacggacgggggcctgccccgt

SEQ ID NO: 117308 - DNA, 1375 bp, Arabidopsis thaliana
  unsure (1)..(1375): unsure at all n locations
aaagaataaaatcaaatacttacttttgaatccgtttttttcattgtttatccatatgggaaaggttcttgagaaggaggcgtttggattggctgcgaaagacgaatcgggaattctttcgcctttcagtttctctagaagggcgacgggtgaaaaggatgtgaggttcaaagtcttgttctgtggaatttgccacactgatctgagtatggccaaaaacgaatgggggttaactacttatcctcttgtccctgggcatgagattgtgggcgtggtgactgaagttggagccaaagtgaaaaaattcaacgctggagacaaagtcggagttggctatatggccggctcgtgcaggtcatgtgacagctgcaatgatggcgacgagaactactgtccaaagatgatcttaacgtccggagccaaaaactttgacgataccatgacccatggtggatactccgaccacatggtgtgtgctgaggatttcatcatccgtattcctgacaatctcccattagacggtgccgcaccactactctgcgccggggtcacggtctactcccccatgaagtatcacgggctcgacaagcccggtatgcacatcggtgtggtgggactaggcggtttgggccatgtagcagtgaaatttgctaaggctatgggtactaaagttacggttattagtacttcggagcgtaagagagacgaggccgttactcggcttggtgcggatgccttcttggtgagccgtgacccgaaacaaatgaaggatgcaatggggactatggatggtatcattgataccgtatctgcgacccatccacttcttccgctgcttggtttgcttaaaaataagggaaaacttgttatggttggtgcaccagcagaaccgctcgagcttcctgtttttcctctcatctttgggcggaagatggtggtgggtagtatggtaggaggtataaaggagacgcaagagatggtggatttggctggaaaacacaacatcacggcggatattgagctcatctctgcggattatgtcaacaccgccatggaacggcttgcaaaggctgacgttaagtaccgatttgtgattgatgttgccaacacgatgaagccaactccttaactagaaagcttaagaattgaatatccccaaagcttttttcatgtttttgcttgtttgtttgatgttgtttgctggcgactttgtgtgtagtattaccacactgcatgtactttatcagttgaataaacttgaatattgtatttaataagctatctacattagattttggggaagtttgattaaaatttattccgattgnnnnnnnnnnnnnnnnnnnnnnnnnnnnnnnnnnnnnnnnnnnnnnnn

SEQ ID NO: 117309 - DNA, 642 bp, Arabidopsis thaliana
  unsure (1)..(642): unsure at all n locations
ctttcctctcattattatctcttcgcttctcatctctcaatcccattcgcttattatttatccatatgggaaaggttcttgagaaggaggcgtttggattggctgcgaaagacgaatcgggaattctttcgcctttcagtttctctagaagggcgacgggtgaaaaggatgtgaggttcaaagtcttgttctgtggaatttgccacactgatctgagtatggccaaaaacgaatgggggttaactacttatcctcttgtccctgggcatgagattgtgggcgtggtgactgaagttggagccaaagtggaaaaattcaaccgctggagacaaagtcggagttggcttatatggccggctcgtgcaggtcaatgtgacagcttgcaatgattggcgccggggacttacttgtcccaaaggttgttctttaacggcccgagcccaaaaacttttgccggtacccattgccccatggtggcttcctccgcccaaatggtgtgtccttgngggtttnataacccggattccttgcnaatttcccctttagnggggtccnnanccattttttttncccnggggcnagggttnttccccnatnagggttcagggtttnaaaccccgtnttccaaangggttgtgggca

SEQ ID NO: 117310 - DNA, 1353 bp, Arabidopsis thaliana
  unsure (1)..(1353): unsure at all n locations
tgatttnnnnnnnnnnnnnnnnnnnnnnnnnnnnnnnnnnnnnnnnnnnnnnnnnnnnnnnnnnnnnnnnnnnnnnnnnnccacgcgtgcgtgcggctgcgagaagacgagagaagggtacggctgcgagaagacgacagaagggtacggctgcgagaagacgacagagggaactctagatgatcaagaatcctatcgggacaaaataattgagtacaagagtcttgaagatgttgttgagagacacgtaatcagtttcgtgtgtttggagaagaagaagaacagatcaaatacgaggagagatctctaaagagatttatcgtttcaaatttgttcacgttgagaagtttaatttagattaaacaacaaaaagatgggttactggaattccaaggttgttccaaaattcaagaagttattcgagaaaaatagtgctaagaaggctgctgctgctgaagctaccaagacctttgatgaatctaaggaaacaatcaacaaggaaattgaggagaaaaagacagaactccaaccaaaggtcgtggaaacctatgaagccacgtctgcagaagtcaaggctttggtgagagaccctaaggtggctggtttgaagaaaaactcagcggctgtgcagaagtacctcgaggagcttagtcaaaattgaattccccggattcaaaagcggttgagtgaggcttcgtctagcttcggagctggctatgtcgcaggaccggtcacgttcatattcgagaaggtatctgttttcctcccggaggaggtgaagactaaagaaataccggtggaggaagtgaaagctgaagaacctgccaaaactgaagaaccagccaaaaccgaaggaacaagtggtgagaaagaggagattgttgaagagacaaagaaaggcgagacccctgaaaccgcggtcgtggaggagaagaaaccagaggtagaggagaagaaggaagaggctactccggctccggcagtggttgaaactccagttaaggaaccggagacaacgacgacagcgccagtggctgaaccaccaaagccttgatttgttttcaagatggtatgattacttctcttgtatgaaaacatctttgtacgtaacaaaaaaatgaaaggaagaaacggaaaggaacaaaaaaaaaaaacttatttttcattcttttttttcaatttggtttgtctttgtgtggataaatctctctgttttttttttaattattgggaaagtctttaatgtgttatttatttatattcatgtgaatttgtaacaaaaatattttgtggatgttttctatagatttattgtttcaactttcaaccnnnnnnnnnnnnnnnnnnnnnnnn

SEQ ID NO: 117311 - DNA, 751 bp, Arabidopsis thaliana
  unsure (1)..(751): unsure at all n locations
ttttaaaaaagaaaaaactctcaagcgggtcttggtgccagaaagtacccctccgaggaaggctaggtcaaaaattttaatttccccgggatcaaaaaccggtgagtgaggctttcgtcaactttggaagcgggttatgtcccaggaccggtcacgttcatattcgagaaggtatctgttttcctcccggaggagttgaagactaaagaaataccggtgaaggaagtgaaagctgaagaacctgccaaaactgaagaaccagccaaacccgaaggaccaagtggtgagaaagaggagattgttgaagagacaaagaaaggcgagacccctgaaaccccggtcgtggaccagaagaaaccagaggtagaggagaagaaggaagaggctactccggctccggcagtgggtgaaactccagttaaggaaccggagacaacgacgacagcgccagtggctgaaccaccaaagccttgatttgttttcaagatggtatgattacttctcttgtatgaaaacatctttgtacgtaacaaaaaaatgaaaggaagaaacggaaaggaacaaaaaaaaaaaacttatttttcattcttttttttcaatttggtttgtctttgtgtggataaatctctctgttttttttttaattattgggaaagtctttgcgaaaaaaaaaaaagggcggccgctctagaggatccaagcttacgtacgcgtgcagctacgtcannnnnnnnnnnnnnaggtttagtta

SEQ ID NO: 117312 - DNA, 1054 bp, Arabidopsis thaliana
  unsure (1)..(1054): unsure at all n locations
tatacgacttactatagggaacagctggtacgcctgcaggtaccggtccggaattcccgggtcgacccgcgcgtgtgcttgatttcatcctaggatggcatttggctccaacaacttatggagattatccacaatcgatgaaggatcgtgtcggtcatagattgccaaaattcacagaagctgagaagaagttgctaaagggttctacagattacgtaggaatgaattactatacttcagtgtttgcaaaagaaattagccctgatcctaagagtccgagttggacgactgattctcttgttgattgggatagcaagagtgtggatggatacaaaattggtagcaagccgtttaatggtaaactggatgtgtattcaaaaggtttgagataccttttgaagtatattaaggataactatggcgacccagaagttatcattgccgagaatggatacggagaagaccttggagagaagcacaatgacgtaaactttgggacacaagatcacaacagaaaatattatatccaaaggcatctcttgagtatgcacgacgccatttgcaaggacaaagtgaacgttacgggatactttgtgtggtctttgatggacaactttgagtggcaagatgggtacaaggcgaggttcggactttactacatcgatttccagaacaacttgacccgtcaccaaaaagtttcgggcaaatggtattccgaattcctcaaaccacagtttccaacctccaagctgagggaagaactctagatgatcaagaatcctatcgggacaaaataattgagtacaagagtcttgaagatgttgttgaggataatatcagtttgtgtgttctatggatcgttttcatctaccggtccttcctatgttagaaggacttgtgagttgttcgagttttaataatatcaataaatgtcttcttttttaaaaaaaaaaaaaaaaaaagaaagctctggaggatccaagcttacgtacgcgtgcagttgacgtcataactcttctatagnnnnnnnnnnnnnnnnnnncnnnacaattcg

SEQ ID NO: 117313 - DNA, 646 bp, Arabidopsis thaliana
ccgaacggagggccggccacgcgtacggaaagaggagattgttgaagagacaaagaaaggcgtgacccctgatcaaaagcggtgagtgagggttgggctagcttcggagctggctatgtccgcaggacccggtcacgttcatattcgagaagggtatctgtttccctcccggaggaggtgaagactaaagaaataccggtggaggaagtgaaagctgaagaacctgccaaaactgaagaaccagccaaaaccgaacggacaagtggtgagaaagaggagattgttgaagagacaaagaaaggcgagacccctgaaaccgcggtcgtggaggagaagaaaccagacgtagaggagaagaaggaagaggctactccggctccggcagtggttgaaactccagttaaccaaccggagaacaacgacgacagcgccagtggctgaaccaccaaagccttgatttgttctcaagatggtatgattacttctcttgtatgaaaacatctttgtacgtaccaaaaaaatgaaaggaagaaacggaaaggtcctaaaaaaaaaaaaaaaaaaaaaaaaaaagcggccgctctagaggatccaagcttacgtacgcgtgcatgcgacgtcaagactcttctatagtggtacctaa

SEQ ID NO: 117314 - DNA, 1434 bp, Arabidopsis thaliana
  unsure (1)..(1434): unsure at all n locations
nnnnnnnnnnncaactctatgcgactcactatagggatagctcgtacgcctgcaggtaccggtccggaattcccgggtcgacccacgcgtccgcggacccgtaatatctttagctagagagaaaaaaagagtgaggaaactagagagagagaccacccaataatggtgaggttcgagaaggttcatttagtgttagggttagctctggttctaactctggtcggagctccgaccaaagcccaaggacctgtttgcggtgcaggcctgcctgacaaatttagcagattaaacttccctgaaggcttcatttggggaaccgcaacagcagcatttcaggttgaaggagctgttaatgaaggttgcagaggtccaagcatgtgggatactttcactaagaagttcccacatagatgtgaaaatcataacgctgatgttgctgtggatttctatcatcgttacaaggaagatatccagttgatgaaagaccttaacactgatgcttttagactttctattgcgtggcccagaatattcccccatggaaggatgtctaagggaataagcaaagtgggagtccaattctaccacgacctcatcgatgagcttctcaaaaacaatataataccattagttacagtctttcattgggatactccccaagacttggaagatgaatatggtggtttcttaagtggtcgcatcgtgcaagattttaccgaatatgcgaatttcactttccacgaatatggacacaaagtgaaacattggatcacatttaacgagccatgggtgtttagtcgtgccggttacgacaacggaaagaaagctccgggacgttgttcgccgtacatccccggttatggacagcattgtcaggatgggcggtctggatacgaagcttatcaagtcagtcacaacttactcttgtcgcatgcttacgctgttgacgcattcagaaactgcaaacagtgtgctggaggtaaaattggaattgcacacagtccagcttggttcgaaccacaagaccttgagcatgttggaggttccattgaacgtgtgcttgatttcatcctaggatggcatttggctccaacaacttatggagattatccacaatcgatgaaggatcgtgtcggtcatagattgccaaaattcacagaagctgagaagaagttgctaaagggttctacagattacgtaggaatgaattactatacttcagtgtttgcaaaagaaattagccctgatcctaagagtccgagttggacgactgattctcttgttgattgggatagcaagagtgtggatggatacaaaattggtagcaagccgtttaatggtaaactggatgtgtattcaaaaggtttgagataccttttgaagtatattaaggataactatggcgacccagaagttatcattgccgagaatgga

SEQ ID NO: 117315 - DNA, 686 bp, Arabidopsis thaliana
tttaaaggggggacccaacagaaacttgcccgcctggtttaagtaagccgccccataccggtatacggttttaagttaacccggaaaggatttattaaacccttcccacactttctggctaaacaccgtgtacgaatccgtttaattacggatattaccaaggcccacgcaaatgcaccgcttgaagctgtgtctgcttgtcctggtatattcgggtcaggttcttatccgggttacgcgggtcgggtacttgttgacaaaacaaccgggtctagttacaacgctcgtggactcgccggtaggaaatatctattgccggcgatgtgggatccgcagagttcgacgtgcaagactctggtttgatccaagggatgtgagtaagacacgtggcatagtagtgagagcgatgacgagatctagacggcatgtgtagtcaaaatcaagttgcacgcgagcgtgtgtataaaaaaatctttcgggtttgggtctcgggtttggattgtggatagggctctctctttgctttttgtcgttttgtaatgacgtgtaaaaactgtactcggaaatgtgaagaatgcatataaaataataaaaaatcattttgtttaaaaaaaaaaaaaaaaagggcggccgctctagaggatccaagcttacgtacgcgtgcgtgccacgtcatactcttctag

SEQ ID NO: 117316 - DNA, 622 bp, Arabidopsis thaliana
  unsure (1)..(622): unsure at all n locations
agcaatggaaggaactgcggcggaagatgcaacgtctatggagtttagcgagtggatgaactcgacgattacgctatatctcttcaatctgatataactacccttctcaatggcttctaattaccgttttgccatcttcctcactctctttttcgccaccgctggtttctccgccgccgcgttggtcgaggagcagccgcttgttatgaaataccacaacggagttctgttgaaaggtaacatcacagtcaatctcgtatggtacgggaaattcacaccgatccaacggtccgtaatcgtcgatttcatccactcgctaaactccaaagacgttgcatcttccgccgcagttccttccgttgcttcgtggtggaagacgacggagaaatacaaaggtggctcttcaacactcgtcgtcgggaaacagcttctactcgagaactatcctctcggaaaatctctcaaaaatccttacctccgtgctttatccaccaaaacttaacggggggtttccgttccataaccgtngtttaacggnggaanatgtnnccgccggaanttttgnttagccggtnggggcntacggtccncggttgnatcccgtgggattaacggggggttt

SEQ ID NO: 117317 - DNA, 1234 bp, Arabidopsis thaliana
  unsure (1)..(1234): unsure at all n locations
cccttctcaatggcttctaattaccgttttgccatcttcttttctctctttttcgccaccgctggtttctccgccgccgcgttggtcgaggagcagccgcttgttatgaaataccacaacggagttctgttgaaaggtaacatcacagtcaatctcgtatggtacgggaaattcacaccgatccaacggtccgtaatcgtcgatttcatccactcgctaaactccaaagacgttgcatcttccgccgcagttccttccgttgcttcgtggtggaagacgacggagaaatacaaaggtggctcttcaacactcgtcgtcgggaaacagcttctactcgagaactatcctctcggaaaatctctcaaaaatccttacctccgtgctttatccaccaaacttaacggcggtctccgttccataaccgtcgttctaacggcgaaagatgttaccgtcgaaagattctgtatgagccggtgcgggactcacggatcctccggttcgaatccccgtcgcgcagctaacggcgcggcttacgtatgggtcgggaactccgagacgcagtgccctggatattgcgcgtggccgtttcaccagccgatttacggaccacaaacgccgccgttagtagcgcctaacggtgacgttggagttgacggaatgattataaaccttgccacacttctagctaacaccgtgacgaatccgtttaataacggatattaccaaggcccaccaactgcaccgcttgaagctgtgtctgcttgtcctggtatattcgggtcaggttcttatccggggttacgcgggtcgggtacttgttgacaaaacaaccgggtcttagttacaaccgctcgtggactcgccggtaggaaatatctattgccggcgatgtgggatccgcagagttcgacgtgcaagactctggtttgatccaagggatgtgagtaagacacgtggcatagtagtgagagcgatgacgagatctagacggcatgtgtagtcaaaatcaagttgcacgcgagcgtgtgtataaaaaaatctttcgggtttgggtctcgggtttggattgtggatagggctctctctttgctttttgtcgttttgtaatgacgtgtaaaaactgtactcggaaatgtgaagaatgcatataaaataataaaaaatccttttgtttctactttatcaaatttaataatgcattcggnnnnnnnnnnnnnnnnnnnnnnnnnnnnnn

SEQ ID NO: 117318 - DNA, 669 bp, Arabidopsis thaliana
  unsure (1)..(669): unsure at all n locations
gttccgctccgcagttcccggatcgacccacgccgtccgcgaggagagatctctaaagagatttatcgtttcaaatttgttcacgttgagaagtttaatttagattaaacaacaaagagatgggttactggaattccaaagttgttccaaaattcaagaagttattcgagaaaaatagtgctaagaaggctgctgctgctgaagctaccaagacctttgatgaatctaaggaaacaatcaacaaggaaattgaggagaaaaagacagaactccaaccaaaggtcgtggaaaccctttgaagccacgtctgcagaagtcaaggtcgctatcatcttcttttttgctctccaagttacattaagtaattcaaatccatatttactgtaattaagactaaaattaaaacgagcaggctttggtgagagaccctaaggtggctggtttgaagaaaaactcagcggctgtgcagaagtacctcgaggagctagtcaaaattggtaaagattcaattacgctttgtcatgtgtctattttaaaatatcccgacaacaatatatgcttgtcttatatatttatcgntttttgtcttatatatcaaatatttgctggcaaaatttttggattcttatcatgtcctatattcttatacgcatgttatatctctagttt

SEQ ID NO: 117319 - DNA, 708 bp, Arabidopsis thaliana
aggataactatggcgacccagaagttatcattgccgagaatggttagagaaaatactcaaagctcatttcctaaatttcaatattattttatttttgatgaaaaacgaagtttgaatttttcttttggttttcaaggatacggagaagaccttggagagaagcacaatgacgtaaactttgggacacaagatcacaacagaaaatattatatccaaaggcatctcttgagtatgcacgacgccatttgcaaggacaaagtgaacgttacgggatactttgtgtggtctttgatggacaactttgagtggcaagatgggtacaaggcgaggttcggactttactacatcgatttccagaacaacttgacccgtcaccaaaaagtttcgggcaaatggtattccgaattcctcaaaccacagtttccaacctccaagctgagggaagaactctagatgatcaagaatcctatcgggacaaaataattgagtacaagagtcttgaagatgttgttgaggataatatcagtttgtgtgttctatggatcgttttcatctaccggtccttcctatgttagaaggacttgtgagttgttcgagttttaataatatcaataaatgtcttcttttttaaaaaaaaaacccaaagggcgaccgctctagaggatccaagcttacgtacgcgtgcgttcgacgtcatagtcttctata

SEQ ID NO: 117320 - DNA, 555 bp, Arabidopsis thaliana
tatccaaaggcatctcttgagtatgcacgacgccatttgcaaggacaaagtgaacgttacgggatactttgtgtggtctttgatggacaactttgagtggcaagatgggtccaaggcgaggttcggactttactacatcgatttccagaacaacttgacccgtcaccaaaaagtttcgggcaaatggtattccgaattcctcaaaccacagtttccaacctccaagctgagggaagaactctagatgatcgatcaagaatcctatcgggacaaaataattgagtacaagagtcttcgaagatgttgttgaggataatatcagtttgtgtgttctatggatcgttttcatctaccgggtccttcctatgttagaaggacttgtgagttgttcgagttttaataatatcaataaatgtcttcttttttaatatatgttgagttaataattaaatctgcttatcgaagaaaaaaaagaaaaaagggcggccgctatagaggatccaagcttacgtacgcgtgcatgggacgtcatagtaatactatagtgtgtcctaa

SEQ ID NO: 117321 - DNA, 1429 bp, Arabidopsis thaliana
accacgctgatagagagtagagagacacacgcagattttgagctgcgtgctctgttttaagcttgaaggaggaaaaacatggcagaccaagaatcagataagaacattgagatttggaagattaagaagctaatcaaaggacttgaaaccgcaagaggtaatggaacaagtatgatctctcttataatgcctcctagagatcaagtagctcgtgtcactaagatgcttgctgatgaatacggaaccgcctcaaacatcaagagtcgagtgaatcgtcaatctgttttatctgccattacttctgctcaacaaagattgaagctttacaacaaagttcctccgaatggtcttgttctctatactggaaccattgttactgatgatggtaaagagaagaaagtgacgattgatttcgagccttttaaaccgattaatgcttcgttgtatttgtgtgacaataagttccacaccgagcctttgaatgagcttttggagtctgatgataagtttggtttcattgttatggatggaaatggaactttgtttggtactttgagtgggaatacaagagaggttcttcataagttcactgtcgatcttccgaaaaagcacggaagaggaggacaatctgcgttgcgatttgctcgtcttaggatggagaagagacataactatgtgaggaaaaccgcggagcttgccactcagttttacattaatccagctacgagtcagcctaatgtctctggtcttatacttgctggttcagcggattttaagaccgagctaagtcaatcagaactgtttgatcctcgtcttcaagctaagatattgaatgtggttgatgtttcttacggaggagagaatggtttcaaccaagcaattgagctgtctgctgagattctatctaatgtgaagttcatacaagaaaagaaattgattgggaagtactttgaggagattagtcaagacactgggaaatatgttttcggtgttgaagatactttaaaggctctggaaatgggtgctgttgagactcttatagtgtgggagaatctagatattaataggtatgagttaaagaacaacacgaccggagaaatcgtgattaagcatttgggaaaggatcaagagaacaaccaaagcaatttccatgatgcagagactaatgcagagttagaagttcaggagaagatgcctctgcttgaatggtttgctaacgaatataaacgttttggttgtacacttgagtttgtgactaacaagtcccaagaaggatcacaattttgcagaggctttggcggtattggtggattgttgcggtaccagcttgatatgaggacattcgatgaattatccgatggtgaagtttatgaagactcagattaagtaagagaaaatgtggtttaagatctgaagaaggatttgaagt

SEQ ID NO: 117322 - DNA, 1109 bp, Arabidopsis thaliana
gaggcattgaacgagcttcttgagtctgatgacaagtttggtttcattgttatggatggtaatgggacactgtttggaactttgagtgggaatactagagaggttcttcataagtttactgttgatctcccgaagaagcacggaagaggaggacagtctgcacttcgttttgcccgtcttaggatggagaagagacacaattatgttaggaaaaccgctgagcttgctacacagttttacatcaatccagctacgagtcagcctaatgtctctggtctgatccttgctggttcagctgatttcaaaactgagctcagtcaatcagagttgtttgatcctcgtcttcaagctaagatattgaatgttgttgatgtttcttacggaggtgaaaacggtttcaaccaagcgattgagctgtctgctgagattctatccaatgtgaagttcatacaggagaagaaactgattgggaagtactttgaggagataagtcaagataccgggaaatacgttttcggtgtggaggatactctaaaggctctagaaatgggtgctatcgaaacccttatcgtgtgggagaatctggacataaacaggtatgagctaaagaacagtacgacaggagaaatggtggtgaaacactttgggaaagatcaagagtctgatacaagcaacttccatgattcagagactaacgcggagctagaagtacaggagaagatgcctctactcgaatggtttgcaaatgagtacaaacgtttcggctgcactcttgagtttgtgactaacaaatcccaagaagggtcacagttttgcagaggttttggtgggattggtggtatgttacgttaccagcttgacatgaggacatttgatgagttatcagatactgaagtttacgaagattctgattaaagtgggaaaacttttggtgatggtttcagatcgatacagtgagggaaaatgtggcataaagatggtcttttatcaacaaagaagagagatttaagtttcttgttttctatagaacattaaaaagcttgactctttctttctgttagacaatttgtgttgtaatttttgaggattttaaacatctttttgttgtt

SEQ ID NO: 117323 - DNA, 1527 bp, Arabidopsis thaliana
  unsure (1)..(1527): unsure at all n locations
gctctctacgactcactattgggaaagctggcacgcctgcaggtaccggtccggaattcccgggtcgacccacgcgtaaaaaatggcagcaaccgccgcaacaacgacgtcgtctcaccttcttctctcaagctcacgtcacgtggcatcatcatcccagccttcaatcctttcaccgagatctctcttctccaacaacgggaaacgagcaccaactggagtgaggaaccatcagtatgcgagtggagtgaggtgtatggccgtagcggcggatgctgctgagacgaaaacggcggcgaggaagaagagtggatacgaacttcaaacgttgacgggctggttgctgagacaagagatgaaaggagagatagatgcagagctgacgatagtgatgtcgagtatatcattggcttgtaagcagatcgcttcacttgttcaacgtgccggaatctctaacctgaccggagttcaaggcgccgttaatattcagggagaggatcagaagaagcttgacgtcatctctaatgaggtgttttccaactgtttgagatcaagtggaagaacgggaatcatagcctcggaggaagaggacgtgccagttgcggtggaggagagttactccggcaactacgtcgtcgtgtttgaccctcttgatggttcctccaacattgacgctgccgtctctactggttctatcttcggtatctatagccccaatgacgaatgcattgtcgacgactccgacgatatctcagctcttgggtcagaagaacaaaggtgtatagtaaacgtgtgccagccagggaacaacttgttagcagccggctactgtatgtactcgagctcggtcatcttcgttcttactctaggcaaaggcgttttctccttcacgcttgatccaatgtacggtgagtttgtcctcacgcaagaaaacattgagatccccaaagccgggagaatctactctttcaacgaagggaattaccagatgtgggacgataaactaaagaagtacattgatgaccttaaggaccctggtccaactgggaagccttactcggcaaggtacattggaagtttggttggagattttcacaggactttgttgtacggtgggatttacgggtaccctcgtgacgcaaagagcaaaaatggaaagcttaggcttttgtatgagtgtgcaccaatgagtttcattgttgaacaagctggagggaaaggttctgatggacattcgagagtactagatatccaaccgactgagatacatcagagggttcctctatacattggaagcacagaggaagtagagaagttggagaagtacttggcttgactcatgtaccaaacataagccatttaatttctattgtaagccagtttctgactacatggtatatgcaaatagatgcataatggtgaaagtcctattttgctgtcaatatcaatatagagaagcaatcagctgttaagactaaaagaaaagaaaaaggannnnnnnnnnnnnnnnnnnnnnnnnnnnnnaaa

SEQ ID NO: 117324 - DNA, 431 bp, Arabidopsis thaliana
  unsure (1)..(431): unsure at all n locations
gggccgacccacgtcgtccagtaagagtaagaaaggagtagatagatgctctgtctttctatcgagaagacgagtatatcatgagcttgtaagcagatcgctggacttgttcaacgtgccggattctctaacctgaccggagttcaaggcgccgtttatattcagggagaggatcagtagaagcttgacgtcatctctaatgaggtgttccccaactgtttgagatcaagtggtagaacgggaatcatagcctcggaggaagaggacgtgccagttgcggtggaggagagttactccggcaactacgtcgtcgtgtttnaccctcttgatggttcctncaacattgacgntgccgtctctaantggntctaactttcggnanttntaagncccaattacgggattcaattttttggnggttnccncgggaa

SEQ ID NO: 117325 - DNA, 5347 bp, Arabidopsis thaliana
  unsure (1)..(5347): unsure at all n locations
aaacagagaaaaagaaagagagagagagagagaagaagaagctctcatcactcatctgttatcttcctcttcttcttcttcttcctcttcttttttccttccacatttatctttattttattttttagtgtacatttatcttattttacacacacgcctctcattttttttcatttcaatggcgatgcaatctctttcccctgttcctaagcttctctccacaacaccaagctctgttctttcttctgacaagaacttcttcttcgtcgatttcgttggattatactgtaagtccaagaggaccagacgcagacttcgtggagactcttcctcttcctcacgctcttcttcttctctctctcgtctttcctctgttcgtgccgttatcgaccttgaacgtgttcatggcgtctctgaaaaggatctctcctctccttcagctttaagacctcaggttgctaattgggaggatatattgtctgaaagaggagcttgtggagttgggtttatagcaaacttagataacataccttcacatggagttgtcaaagatgctcttattgctcttgggtgtatggaacatcgtggaggttgtggagcagacaatgattctggtgatggctctggacttatgtcttccattccttgggatttctttaacgtctgggccaaggaacaaagtcttgctccttttgataagttgcatactggtgttggcatgatctttcttccacaagatgatacctttatgcaagaagccaagcaagttattgaaaacatatttgagaaagaaggattacaagttcttaggtggagggaagttcctgttaatgttcctatagttggtaaaaatgctagggagacaatgcctaacattcaacaagtgtttgtgaaaatcgcaaaggaagatagtactgatgatattgaaagggaactttacatctgccggaaactaatcgaaagggccgtagctactgagagttggggaacagagctttacttctgttcactgtccaatcaaaccatagtgtacaagggcatgcttcgatctgaagctcttggattgttttatctagatcttcagaatgagctttatgagtctccttttgctatttatcatcgaaggtacagtacaaacactagtcctaggtggcctcttgctcaaccaatgaggtttcttggacataacggggagatcaataccattcaggggaacttaaattggatgcagtctcgagaagcttcattgaaggctgctgtttggaatggccgtgaaaatgaaattcgtccatttggtaatcccaggggttcagactctgctaatcttgatagtgctgcagaaatcatgattagaagtggaagaacaccagaggaagctctaatgattcttgtccctgaggcatacaagaatcatccaaccttatctgtcaaatatcctgaggttgtagatttctatgactactacaaaggacaaatggaggcttgggatggtcctgccttacttttgttcagtgatggaaaaacagttggggcttgtcttgaccgtaatggccttcgtcctgctcgatattggcggactagtgacaatttcgtctatgttgcatctgaggtcggagttgtaccagttgatgaggcaaaagtcacaatgaaaggccgtctaggacctggaatgatgattgctgttgaccttgtgaatggccaggtatatgagaatacagaggtcaagaagagaatatcttcatttaatccatatggaaaatggattaaagaaaactcccggttcttgaagcctgtgaatttcaaatcctcaactgtcatggaaaatgaagaaatcctaagaagccaacaagcatttggttattcaagtgaggatgtgcaaatggttattgagtctatggcttctcaaggaaaggaaccaaccttctgcatgggcgacgatattccgctggcaggattgtctcaaagaccgcatatgctttatgattatttcaaacaaagatttgcacaggttacaaaccctgccattgacccccttagggaaggtttggttatgtctcttgaagtaaatattggaaaacgtggaaatatattggagcttggacctgagaatgcctcgcaggttattctgtctaaccctgtgttaaatgaaggagcgttagaggagttaatgaaggatcaatacttaaaaccaaaggttctgtccacatatttcgatataagaaaaggcgttgaaggttccttgcaaaaggctctatattatctttgtgaagcagctgatgatgctgtccgaagtggctctcagcttctcgttctttcagaccgatccgatagactggaaccaaccaggccttcaattccaataatgttagctgttggcgctgtccatcaacatcttattcagaacggcttgcgtatgtcagcttctattgttgctgataccgcccaatgcttcagcacacatcattttgcttgtttggttggatatggtgcaagtgctgtatgcccatacttggcactggagacatgtaggcaatggcgcttaagtaacaaaactgtggccttcatgcgtaacgggaaaattcctactgtaaccattgagcaagctcagaagaactacactaaggcggttaatgcagggcttcttaaaattctttctaagatgggaatctcattgctttcaagttattgtggtgctcagatatttgagatatatggtttgggacaggatgttgttgatcttgcattcactggaagtgtgtcaaaaatcagtggactcacctttgatgagttggcaagagagacattgtctttctgggtgaaggccttttctgaggatacaactaagcgattagaaaattttgggtttattcaattcaggcctggaggtgagtatcattcaaacaacccagagatgtcaaagttgcttcacaaggctgtccgtgaaaagagtgaaactgcatatgcagtctatcaacagcatctctctaacagacctgttaatgtcctccgtgacctgcttgagttcaagagtgatcgtgcaccgatcccagtagggaaagtagaaccggccgttgctattgttcagagattttgtactggtggaatgtcacttggtgctatttcaagagagactcatgaagctattgctattgcaatgaataggattggtgggaaatcaaactctggagaaggtggagaggatcctatccgttggaagccacttacagatgtggttgatggatattcaccaacactaccacatctcaaaggtcttcaaaacggcgatattgcaacaagtgctatcaagcaggttgcttcagggcgttttggagtcacaccaacgttcttggtcaatgcagatcaattggaaatcaaagttgcacaaggtgccaagcctggggaaggtggtcagcttcctggaaagaaagttagtgcgtatatcgctaggctaagaagctctaaacctggtgttccgcttatatctccgcctcctcaccacgacatttactctattgaggatcttgctcagttgatctttgatctacatcagattaatccaaatgcaaaagtatcagtcaagctagttgcagaagctggaatcggaactgttgcttcaggagttgcaaagggtaacgctgatatcatccagatatcaggccatgatggtggaaccggggctagtccaataagctccataaaacatgctggtggaccatgggaacttggactaacagaaactcaccaaacacttatcgcaaatggactaagagaaagagtcattttaagagtcgatggaggcttaaagagtggtgttgatgttctaatggctgcagctatgggtgctgatgaatacggattcggttccttggcaatgattgctactggttgtgttatggctcgtatttgccacactaataattgcccagtgggtgtagcaagtcagagagaagaattacgtgcaagattccctggtgtacctggtgatcttgtcaactacttcttatacgtagcagaagaggtgagaggtatcttagcacagttgggatacaacagtttagatgacatcattggacgaacagagttactgagaccacgagacatttcgctagttaaaactcaacatctcgatctgagttatcttctttcgtctgttggaacaccttcattgagcagtactgaaatcagaaagcaggaagttcatacaaatggacctgttctcgacgacgatattcttgcagatccattggtgattgatgcaatagagaacgaaaaagtggttgagaaaaccgtcaaaatatgcaacgtagaccgtgcggcttgtggtcgtgttgctggtgttattgcaaagaagtatggagacactggttttgcaggacaagtgaacctaactttcttagggagcgcgggacagtcgtttgggtgctttttgattcccggtatgaacatccggctcataggagagtcaaatgactacgttggaaagggaatggctggtggtgaaatagtagtaactcctgtggaaaaaatcgggtttgtgcctgaggaagcaacgatagtcgggaacacttgcttgtatggtgcaacaggtggtcagatattcgctagaggcaaagctggagagagatttgcagtgagaaactcactcgctgaagcagtagttgaaggcactggagaccattgctgtgagtacatgactggtggctgtgtagtcgtgcttggaaaggtgggaagaaacgttgctgctggtatgacaggagggttagcttaccttcttgatgaagacgacactcttcttcctaagattaacagagagatagtgaagatccaaagagtaactgcgcctgcaggggaattgcagctgaagagcttaattgaagcacatgtggaaaaaaccggaagcagcaaaggcgcaacgattctgaatgagtgggaaaagtatctacctctcttctggcaactggttccaccgagtgaggaagacactcctgaagcttctgctgcttacgtaagaacatccaccggggaagtcacatttcaatcggcttagagatcattcaagagcaggttgtggcagttgaaacacaaggattgatatacatcaatggtggaggactatggagagcagattaatggaaaatcattatcattcacatgtagatcaaatgtgtgggacaatattcttattgtcttgtgatctttacaacaataccatggttgctataactgtacagtaaattcagtaaaataactgctttcaactgtcataatcatatctcataaaaaattgcaatttctctttattgnnnnnnnnnnnnnnnnnnnnnnnnnnnnnnnnnnnnnnnnnnnn

SEQ ID NO: 117326 - DNA, 5305 bp, Arabidopsis thaliana
  unsure (1)..(5305): unsure at all n locations
atggcgatgcaatctctttcccctgttcctaagcttctctccacaacaccaagctctgttctttcttctgacaagaacttcttcttcgtcgatttcgttggattatactgtaagtccaagaggaccagacgcagacttcgtggagactcttcctcttcctcacgctcttcttcttctctctctcgtctttcctctgttcgtgccgttatcgaccttgaacgtgttcatggcgtctctgaaaaggatctctcctctccttcagctttaagacctcaggttcgtttcttcactgatataaatttcacaaacacccaacgtgcaaagtttcatcctttatggggatcttttaagcaggttgctaatttggaggatatattgtctgaaagaggagcttgtggagttgggtttatagcaaacttagataacataccttcacatggagttgtcaaagatgctcttattgctcttgggtgtatggaacatcgtggaggttgtggagcagacaatgattctggtgatggctctggtcttatgtcttccattccttgggatttctttaacgtctgggccaaggaacaaagtcttgctccttttgataagttgcatactggtgttggcatgatctttcttccacaagatgatacctttatgcaagaagccaagcaagttattgaaaacatatttgagaaagaaggattacaagttcttgggtggagggaagttcctgttaatgttcctatagttggtaaaaatgctagggagacaatgcctaacattcaacaagtgtttgtgaaaatcgcaaaggaagatagtactgatgatattgaaagggaactttacatctgccggaaactaatcgaaagggccgtagctactgagagttggggaacagagctttacttctgttcactgtccaatcaaaccatagtgtacaagggcatgcttcgatctgaagctcttggattgttttatctagatcttcagaatgagctttatgagtctccttttgctatttatcatcgaaggtacagtacaaacactagtcctaggtggcctcttgctcaaccaatgaggtttcttggacataacggggagatcaataccattcaggggaacttaaattggatgcagtctcgagaagcttcattgaaggctgctgtttggaatggccgtgaaaatgaaattcgtccatttggtaatcccaggggttcagactctgctaatcttgattgtgctgcagaaatcatgattagaagtggaagaacaccagaggaagctctaatgattcttgtccctgaggcatacaagaatcatccaaccttatctgtcaaatatcctgaggttgtagatttctatgactactacaaaggacaaatggaggcttgggatggtcctgccttacttttgttcagtgatggaaaaacagttggggcttgtcttgaccgtaatggccttcgtcctgctcgatattggcggactagtgacaatttcgtctatgttgcatctgaggtcggagttgtaccagttgatgaggcaaaagtcacaatgaaaggccgtctaggacctggaatgatgattgctgttgaccttgtgaatggccaggtatatgagaatacagaggtcaagaagagaatatcttcatttaatccatatggaaaatggattaaagaaaactcccggttcttgaagcctgtgaatttcaaatcctcaactgtcatggaaaatgaagaaatcctaagaagccaacaagcatttggttattcaagtgaggatgtgcaaatggttattgagtctatggcatctcaaggaaaggaaccaaccttctgcatgggcgacgatattccgctggcaggattgtctcaaagaccgcatatgctttatgattatttcaaacaaagatttgcacaggttacaaaccctgccattgacccccttaggaaggtttggtttatgtctcttgaagtaaatattggaaaacgtggaaatatattggagcttggacctgagaatgcctcgcaggttattctgtctaaccctgtgttaaatgaaggagcgttagaggagttaatgaaggatcaatacttaaaaccaaaggttctgtccacatatttcgatataagaaaaggcgttgaaggttccttgcaaaaggctctatattatctttgtgaagcagctgatgatgctgtccgaagtggctctcagcttctcgttctttcagaccgatccgatagactggaaccaaccaggccttcaattccaataatgttagctgttggcactgtccatcaacatcttattcagaacggcttgcgtatgtcagcttctattgttgctgataccgcccaatgcttcagcacacatcattttgcttgtttggttggatatggtgcaagtgctgtatgcccatacttggcactggagacatgtaggcaatggcgcttaagtaacaaaactgtggccttcatgcgtaacgggaaaattcctactgtaaccattgagcaagctcagaagaactacactaaggcggttaatgcagggcttcttaaaattctttctaagatgggaatctcattgctttcaagttattgtggtgctcagatatttgagatatatggtttgggacaggatgttgttgatcttgcattcactggaagtgtgtcaaaaatcagtggactcacctttgatgagttggcaagagagacattgtctttctgggtgaaggccttttctgaggatacaactaagcgattagaaaattttgggtttattcaattcaggcctggaggtgagtatcattcaaacaacccagagatgtcaaagttgcttcacaaggctgtccgtgaaaagagtgaaactgcatatgcagtctatcaacagcatctctctaacagacctgttaatgtcctccgtgacctgcttgagttcaagagtgatcgtgcaccgatcccagtagggaaagtagaaccggccgttgctattgttcagagattttgtactggtggaatgtcacttggtgctatttcaagagagactcatgaagctattgctattgcaatgaataggattggtgggaaatcaaactctggagaaggtggagaggatcctatccgttggaagccacttacagatgtggttgatggatattcaccaacactaccacatctcaaaggtcttcaaaacggcgatattgcaacaagtgctatcaagcaggttgcttcagggcgttttggagtcacaccaacgttcttggtcaatgcagatcaattggaaatcaaagttgcacaaggtgccaagcctggggaaggtggtcagcttcctggaaagaaagttagtgcgtatatcgctaggctaagaagctctaaacctggtgttccgcttatatctccgcctcctcaccacgacatttactctattgaggatcttgctcagttgatctttgatctacatcagattaatccaaatgcaaaagtatcagtcaagctagttgcagaagctggaatcggaactgttgcttcaggagttgcaaagggtaacgctgatatcatccagatatcaggccatgatggtggaaccggggctagtccaataagctccataaaacatgctggtggaccatgggaacttggactaacagaaactcaccaaacacttatcgcaaatggactaagagaaagagtcattttaagagtcgatggaggcttaaagagtggtgttgatgttctaatggctgcagctatgggtgctgatgaatacggattcggttccttggcaatgattgctactggttgtgttatggctcgtatttgccacactaataattgcccagtgggtgtagcaagtcagagagaagaattacgtgcaagattccctggtgtacctggtgatcttgtcaactacttcttatacgtagcagaagaggtgagaggtatcttagcacagttgggatacaacagtttagatgacatcattggacgaacagagttactgagaccacgagacatttcgctagttaaaactcaacatctcgatctgagttatcttctttcgtctgttggaacaccttcattgagcagtactgaaatcagaaagcaggaagttcatacaaatggacctgttctcgacgacgatattcttgcagatccattggtgattgatgcaatagagaacgaaaaagtggttgagaaaaccgtcaaaatatgcaacgtagaccgtgcggcttgtggtcgtgttgctggtgttattgcaaagaagtatggagacactggttttgcaggacaagtgaacctaactttcttagggagcgcgggacagtcgtttgggtgctttttgattcccggtatgaacatccggctcataggagagtcaaatgactacgttggaaagggaatggctggtggtgaaatagtagtaactcctgtggaaaaaatcgggtttgtgcctgaggaagcaacgatagtcgggaacacttgcttgtatggtgcaacaggtggtcaggatatcgctagaggcaaagctggagagagatttgcagtgagaaactcactcgctgaagcagtagttgaaggcactggagaccattgctgtgagtacatgactggtggctgtgtagtcgtgcttggaaaggtgggaagaaacgttgctgctggtatgacaggagggttagcttaccttcttgatgaagacgacactcttcttcctaagattaacagagagatagtgaagatccaaagagtaactgcgcctgcaggggaattgcagctgaagagcttaattgaagcacatgtggaaaaaaccggaagcagcaaaggcgcaacgattctgaatgagtgggaaaagtatctacctctcttctggcaactggttccaccgagtgaggaagacactcctgaagcttctgctgcttacgtaagaacatccaccggggaagtcacatttcaatcggcttagagatcattcaagagcaggttgtggcagttgaaacacaaggattgatatacatcaatggtggaggactatggagagcagattaatggaaaatcattatcattcacatgtagatcaaatgtgtgggacaatattcttattgtcttgtgatctttacaacaataccatggttgctataactgtacagtaaattcagtaaaataactgctttcaactgtcaaaaaaaaaaaaaaaacccacccccaagnnnnnnnnnnnnnnnnnnnnnnnnnnnnnnnnnnnnnnnnnnnnnnnnnnnnnnnnnnnnnnnngtgtcccaattatttcccccccncaggggcctggggtccccacctaaatg

SEQ ID NO: 117327 - DNA, 1197 bp, Arabidopsis thaliana
  unsure (1)..(1197): unsure at all n locations
nnnnnnnnnnnnnnnnnnnnnnnnnnnnncagctannnnnnnnnnnnnnnnnnnnnnnnnnnnntgaccggtcccggacgcgtccggggcgcttacaacaaatctcaggcggctcaacactatcctcttctacattttccaacgatggcctcaaacgcactctcgtctttcaccgccgctaatcccgctctgtctcctaagccactactccctcacggctctgcttctccgtcggtttctctcggcttctccaggaaagttggcggcggcagagcagtggtcgttgcagcggctacggtggacacaaacaacatgccgatgaccggagtcgtgttccagcctttcgaagaggtgaagaaagccgatctggccattccaatcacatctcatgcctctctcgctcgccagaggtttgccgacgctagcgaggcagtcattaatgagcaaatcaatgtggaatacaacgtctcctatgtgtaccattcaatgtacgcatactttgacagagacaacgttgctatgaagggactagccaaatttttcaaggaatcaagtgaggaagagagagggcatgctgagaagtttatggagtaccagaaccaaagaggaggaagagtgaaactccaccctatcgtctcacctatctcagaattcgaacatgctgaaaaaggagatgctttatatgcaatggagttggctctgtctctagagaaactcactaatgagaagcttctaaacgttcacaaagtggcctcagagaacaatgatccccagttagctgatttcgttgagagtgaatttctgggagagcagattgaagcaatcaagaagatctcagactacatcacccagctaaggatgatcggcaaaggccacggagtttggcatttcgaccagatgcttctgaactagacttggacctctataagttcactttcagatgaccaatgttggggttaaaacagaagaacccgaagattctgtaaaagctttagattgaacattatggactaataagattgtagtagtaagctttgtgttcaagatggtttttgtaataacttcgtaagcttaatcaatgaagtttttgttttagtataaaaaaaaaaaaaaagnnnnnnnnnnnnnnnnnnnnnnnnnnnnnnnnnnnnnnnnnnnnnnnnnnnnnnnnnnnnnnnnnnnnnnnnnntagaatcg

SEQ ID NO: 117328 - DNA, 1843 bp, Arabidopsis thaliana
  unsure (1)..(1843): unsure at all n locations
ccctcgcgtccggctagctcctccaaatccaaatcgttgcgttaaggtttcttcaagtttcaatctttttgcaatgaattgcccagccatgactgcttctccttcttcttcctcttcttcttcctactcaacgtttcgtcctcctcctccactcttgccacaattgagtaacgattcacaaagatctgttgttatgcactgcacaagattaccctttgaagcatttgctgctacttcatcaaaccggcttcttgggaaacattcattgcctttgagagcagctttggttacttcgaaccctttaaacatttcatcttcctcagttatctctgatgccatttcatcttcctctgttatcactgatgatgccaaaattggtgtcttgttattaaaccttggaggtcctgagactttagatgatgtacaaccctttttgtttaacctcttcgccgacccggacattatacggttgccgccggtattccagtttcttcagaagccattagcacagtttatatcagtagcaagagcaccaaaagcaagaagatatgcatctattggtggaggttctcctcttcgccacataactgatgcacaggctgaagaattaagaaaatgcctttgggaaaaaaatgtaccagcaaaggtatatgttggtatgcggtattggcatccattcactgaggaagccattgaacagataaaaagagatggaattacaaaactagttgttctaccactttatcctcaattttctatatcaactagtggttcaagcctaagactcttggagagaatatttcgagaggacgagtatcttgttaacatgcaacatactgttataccatcgtggtatcagcgggagggatatataaaggcaatggcaaatctaatccaaagcgagttgggaaaatttggttctcctaatcaggttgtaatatttttcagtgcacatggcgtgcctcttgcatatgtcgaagaagccggtgatccttacaaggcagagatggaagaatgtgttgatctaatcatggaggaattagacaagagaaagataactaatgcttacactcttgcttatcagagcagagttggaccagttgaatggctgaaaccatacactgaagaagccattactgaacttggtaaaaaaggtgttgaaaatcttctggctgtacccataagttttgtgagcgagcacattgaaactctggaggagatagatgttgagtataaagagttggctttgaagtctggtatcaaaaactgggggcgagtacctgctctaggaacagaacctatgtttatatctgacttggcagatgctgttgtggaaagtcttccatacgttggtgctatggctgtctcaaaccttgaagctcgacagtcgttagttccgctcgggagtgtagaagaactattagcaacgtatgattcacagagaagggagttaccagcaccggtgacaatgtgggaatggggatggacaaaaagtgcagaaacatggaacggaagagcagcaatgttagcggtgctagcactcttggtgctcgaagtcaccaccggaaaagggtttctgcatcagtggggcatcttgccttcattataataaagataacgtatagtctttttctctatgaaaacccaatccaagaatccaaatgtgagctttcacatgtggaataaggccagctatgttattatgctctcttcttctctgtgtagaaatgtgacatttaaatacttcatactgtatcttcataaaacattaaatgttgacattttaatcggcatgctttttcgcnnnnnnnnnnnnnnnnnnnnnnnnnnnnnnnnnnnnnnn

SEQ ID NO: 117329 - DNA, 674 bp, Arabidopsis thaliana
atcattcgatactctctctctctctcaagaaaccaaaactaaggagaggaagaagaagatcctgtccggcgtgtgggtcttcaagaacggagtgataagacttgtggagaaccctaaccagtcaggatccgacacacagaaccgaaggaaagtgatggtctatttaccgacaggagaagtggtctcatcttactcgacgctcgagcagatcctccagagtcttggatgggagagatactttggcggcggcgacacagatctcctccaattccacaaacgctcctccattgatctcatttccctgcctagagatttcaccatattcaactccgttttacatgtacggtatcgtcgtcaagaaccctaattacttccatgtccgagactcccattgattcttcttttgtgtgttggtgtgtgtgttgtgttcggttgttttataatttagagtttgttgggttttgttttatagttgcatgtgcatgttttatttgttttggacgttggaagttgtgttacgtaattctggtttgatgaaagttgagattaagaagggacatgaattagggagaactcaatttcaaaattaattgttctcttccttagcatgattgttctcttcactggttgtaattgaaagatattctctttggctcaaaaaaaaaaaaaaaaaa

SEQ ID NO: 117330 - DNA, 1525 bp, Arabidopsis thaliana
  unsure (1)..(1525): unsure at all n locations
aggcaaaagtagtaaataaggaagaaacaggaggggcgttttcgggagaagaaggaggaatatgagtgtgagttgttgttgtaggaatctgggcaagacaataaaaaaggcaataccttcacatcatttgcatctgagaagtcttggtgggagtctctatcgtcgtcgtatccaaagctcttcaatggagaccgatctcaagtcaacctttctcaacgtttattctgttctcaagtctgaccttcttcatgacccttccttcgaattcaccaatgaatctcgtctctgggttgatcggatgctggactacaatgtacgtggagggaaactcaatcggggtctctctgttgttgacagtttcaaacttttgaagcaaggcaatgatttgactgagcaagaggttttcctctcttgtgctctcggttggtgcattgaatggctccaagcttatttccttgtgcttgatgatattatggataactctgtcactcgccgtggtcaaccttgctggttcagagttcctcaggttggtatggttgccatcaatgatgggattctacttcgcaatcacatccacaggattctcaaaaagcatttccgtgataagccttactatgttgaccttgttgatttgtttaatgaggttgagttgcaaacagcttgtggccagatgatagatttgatcaccacctttgaaggagaaaaggatttggccaagtactcattgtcaatccaccgtcgtattgtccagcacaaaacggcttattactcattttatctccctgttgcttgtgcgttgcttatggcgggcgaaaatttggaaaaccatattgacgtgaaaaatgttcttgttgacatgggaatctacttccaagtgcaggatgattatctggattgttttgctgatcccgagacgcttggcaagataggaacagatatagaagatttcaaatgctcgtggttggtggttaaggcattagagcgctgcagcgaagaacaaactaagatattatatgagaactatggtaaacccgacccatcgaacgttgctaaagtgaaggatctctacaaagagctggatcttgagggagttttcatggagtatgagagcaaaagctacgagaagctgactggagcgattgagggacaccaaagtaaagcaatccaagcagtgctaaaatccttcttggctaagatctacaagaggcagaagtagtagagacagacaaacataagtctcagccctcaaaaatttcctgttatgtctttgattcttggttggtgatttgtgtaattctgttaagtgctctgattttcagggggaataataaacctgcctcacttttattcttgtgttacaattgtatttgtttcatgactatgatcttcttctttcatcagttatatgaatttgagattcttgttggttgnnnnnnnnnnnnnnnnnnnnnnnnnnnnnnnnnnnnnnnnnnnnnnnnnnnnnnnnnnnnnnnnnnnnnnnnnnnnnnnnnnnnnnnnnnnnnnn

SEQ ID NO: 117331 - DNA, 2715 bp, Arabidopsis thaliana
  unsure (1)..(2715): unsure at all n locations
ctcnnnnnnnnnnnnnnnnnnnnnnnnnnnnnnnnnnnnnnnnnnnnnnnnnnnnnnnnnnnnnnnccacgcgttcggccacgcgttcggttaacgagtggatatgagggagcaaacgtagaaaggactcgagaagtcatggcttctgcttaatctcctcttccttaaaaaccagaagatcctttgttccacgtttctcgtttgtagcttcttctctctcagaattcaattcgaattttgacaagtcttgacgaagaagaagaaacagagctgcttcaatggcttctaactcattactacgttcttcttcaaatttcttcttaggatcccatatcataatctcatctcccacccctaaaaccaccagaaaaccctctttccctttctccttcgtctcccgtgctaaataccaaatcactcgatcgtctcaagacgaaaattcgccaaatggtaaacccaattcgccattctcgtcgcaagtagccttagcagctattctactatcttcaatttcatcttcgccgctagctttagctgtagtggacgaaccagcttctccgtctgtcgttatagaatctcaagctgtgaagccatcgacgccatcgccattgttcattcagaacgagatacttaaggctcctagtcctaaatcatcggatctcccagaaggatcacagtggcgatacagcgagtttcttaacgctgtgaagaaagggaaagtcgagagagttagattcagcaaagatggttctgttgttcagcttactgccgtcgacaatcgccgtgcttcagtcatcgtccctaacgaccctgaccttattgatatcttggctatgaacggagttgatatatccgtctctgaaggagaatcctcaggcaatgacttgttcactgtcattggaaacttgattttcccgcttttggcctttggtggactcttcttgcttttcaggcgagctcagggaggccctggtggtggtcctggtggcttgggtggtcctatggatttcggacgttctaaatccaagttccaggaagtgcctgagactggtgtatcatttgcagatgttgctggggctgatcaagctaagttggagttacaggaagttgtggatttcttgaagaatcctgataagtacacagccttgggtgctaagattcctaaagggtgtttacttgttggaccgcctggtacgggtaagacactcctggctagggcggtggctggggaagctggagtgccgttcttctcttcgcggcctcaggagttcgtagagctttttgtgggtgtgggtgcatcgagagttagggatttgttcgagaaggctaagtctaaagccccttgtattgtattcattgatgagattgacgctgtgggtaggcagagaggagctgggatgggaggaggaaatgatgagagagaacagactattaatcagctgttgacagagatggatggattttctggcaactctggtgtgatagttttggcagctacgaataggccggacgttcttgattcggctttgttgaggcctggaaggtttgatcgacaggtcacggtggataggcctgatgtggctggcagagtcaagattcttcaggttcattctagggggaaggcactcggtaaagatgtggactttgacaaggttgccagaaggacccctggtttcacgggtgctgacttacaaaacctgatgaatgaagcggcgattcttgcggctaggcgtgacgttaaggaaataagcaaggatgaaatctctgatgctcttgagaggatcattgctggacctgagaagaagaatgcagttgtctctgaagagaagaagagacttgttgcataccatgaggctggtcatgctctagtgggtgctcttatgccagaatatgatccggttgcaaagatttctatcattcctcgtggccaagctggtgggctcactttttttgctccaagcgaagaaagacttgagtctggattgtacagtaggagctaccttgagaatcaaatggctgttgcacttggcggaagggttgcagaggaggtgatctttggggatgagaatgtgacgactggagcatcaaatgatttcatgcaggtgtctcgtgtggcacgtcaaatgattgagagatttgggttcagcaaaaagattggacaagttgctgttggtggccctggtggaaatcccttcatgggtcaacaaatgtcatcacagaaagattactcaatggcaactgcggatattgtagatgctgaggtgcgagagttagttgagaaggcatacaagagagcaacggagatcataacaactcatattgatatcctacacaagcttgcacagctcctgatcgagaaagaaactgttgacggtgaagagttcatgagtctctttattgacggttaagctgagttgtatatttcttgattccttaaagttgccattgcttagtgcttacaataccataagctaataagtatattcgtgttcatatgtgtccccgattcagtactccccaattcagtatatttgtgtatattccgttgttttagtgaatctaaatatactttgtaatgcaatgcaatttgtttannnnnnnnnnnnnnnnnnnnnnnnnnnnnnnnnnnnnnnnnnnnnnnnnnnnnnnnnnnnnnnnnnnnnnnnnnnnnnnnnnnnnnnnnnnnnnnnnnnnnnnnnnnnnnnnnnnnnnnnn

SEQ ID NO: 117332 - DNA, 1785 bp, Arabidopsis thaliana
  unsure (1)..(1785): unsure at all n locations
cagctannnnnnnnnnnnnnnnnnnnnnnnnnnnnnnnnnnnnnnnnnnnnnnnnnnnnnnnnnnnnnnnnnnccacgcgtccgcgaaactgtcaccaatgatgagattgctgctgacttgaaggagcatgtgatcaagcctgttatccctgctaagtaccttgacgataacaccatctttcacttgaacccatctggtcgttttgtcatcggagggcctcatggtgatgctggacttacagggaggaagatcatcattgacacttatggtggttggggtgctcatggtggaggtgccttctcaggaaaggacccaaccaaggttgacagaagcggtgcctatatcgtgaggcaggctgcaaagagcgtggtagcagcaggactcgcacgccgttgtatcgtgcaggtatcatacgccattggtgtccctgagccgctctcagtgtttgttgacacctacaagaccgggaccatcccagacaaggatatccttgtgttgatcaaggaagcatttgacttcaggccgggaatgatggccattaaccttgaccttaagaggggaggtaacttcaggttccagaaaaccgctgcgtatggccatttcgggcgtgatgaccctgacttcacttgggaggttgtcaagccgctcaagccaaaggcctagacagaaacaaagctggcaattgcaagaactgagttgagtcactccccaactactgggaacttatcattataccattattattgcaaatgactgaataaagaaagcttctgcgttgtcaccattcacatttgttttcgcgaacacaggccagcggttcatatatctggtaatcgaagattgcaaatgaaagatttgagttttatgttttgaatttttgcctcttttttatttttcctttttcttttccctcttaatctcttgtattgtaatttttgattgtgtaaccaagaaatccatcctcgtgatgtttttttttttttataagaaaatatcatgcaagttagaaatccaaaaaaaaaagggcggccgctcgcgatctagaactagttgcacttatgccggagtatgatccagtggccaagatatcgattattccacgtggccaagctggtgggctcacctttttcgctcctagcgaagagaggctagagtccggattgtatagcagaagctaccttgagaaccaaatggctgttgcacttggtggaagggttgcacaagaggtgatctttggagaccagaatgtgacaaccggagcatcaaatgatttcatgccagtgtcgcgggtggctcgccaaatggttgagagattcgggttcagcaaaaagattggacaagttgcagttggtggagcaggaggaaaccctttcttgggtcaaagtatgtcatcgcagaaggattactcgatggcaacagcggatgtggttgatgcggaagtgagagagctcgttgagaaggcgtacgtgagagcgaaagagatcataacaacacaaattgatatcctacacaagcttgcacagctccttattgagaaagaaactgtggatggagaagagttcatgagtcttttcattgacggacaagccgagttatatgtttcttaaaatcaactaattggcttgtaataataccaattagcttcgatctatacatactgtatgttaatatacattgacatgttcagagacttttcttttaaaaaaaaaaaaaaaaaaagggcggccgctctagaggatccaagcttacgtacgcgtgcatgcgacgtcaagctgttatagagt

SEQ ID NO: 117333 - DNA, 837 bp, Arabidopsis thaliana
  unsure (1)..(837): unsure at all n locations
aaaagaccgggggcgttccacgcgtgcnnaaaanaanaactctnttttcttttacgagaagaaaacacccnngggcagcttnatacaaggtggttgcaccccaaacacttatnccnnaatataatccattacccaatatatcaattattccacgaggccaagctgatggactcacctttttcgctcctaacaaaaagaggctagagtccggattgtataacataagctaccttgagaaccaaatggctgctgcacttggtggaagggttacagaagacgtgatctttgtagacgagaatgtgacaaccgtaacatcaaatgatttcatgcaagtgtcgcgggtggctcgccaaatggttgagagatttgggttcagcaaaaagattggacaagttgctgttggtggccctggtggaaatcccttcatgggtcaacaaatgtcatcacagaaagattactcaatggcaactgcggatattgtagatgctgaggtgcgagagttagttgagaaggcatacaagagagcaacggagatcataacaactcatattgatatcctacacaagcttgcacagctcctgatcgagaaagaaactgttgncggtgaagagttcttgagtctctttattgacggccaagctgagttgtatatttcttgattcctcaaagttgccattgcttagtgcttacaataccataagctaataagtatattcgtgttcatatgtgtcaccgattcagtactcaccaattcagtataaaaaaaaaaaaaaagggcgaccgctctagaggatccaagcttacgtacgcgtggatgcgacgtcntagtcttctata

SEQ ID NO: 117334 - DNA, 1879 bp, Arabidopsis thaliana
gtctctcgctactgctgcgtctccgtttaaagagactctaccactctttagtagatctctcacattcccgagaaaatccttgttttctcaggttcgcttgagattcttcgccgagaaacattctcagcttgatacttcaaatgggtgttgccactaatttcgcttctttacaagattctggagatcaacttacagaggaacatgttacaaaaggagagtctactcttagtattacagttgttggagcgtcaggggacttagccaagaagaagatatttcctgacttgtttgctctcttttatgagggttgtcttcctcaggacttttctgtttttggttatgctcggactaaactcactcatgaagagcttcgtgacatgattagtagtactttaacttgccggattgatcagagggaaaaatgtggggataagatggagcagttcttgaaaagatgcttttaccattcgggtcagtataactcggaagaggattttgcggaactaaacaagaagctcaaagagaaagaggcaggaaagatatcaaacaggctgtactatttgtcgatacccccaaacatattcgttgatgtggttaggtgtgcaagtcttagagcctcctcagagaatggctggacaagggtcattgtggaaaagccatttggtcgtgactctgaatcatccggagagttaactagatgtctgaaacagtatcttacagaggagcaaatcttcaggattgatcactatttgggaaaggagcttgttgagaacctttcagtgctccgattctcaaatcttgttttcgagcctctgtggtcaagaaattacatacgcaacgttgagctgattttttctgaggatttcggaacagaagggcgtggaggttactttgatcaatatggaatcatacgagacatcatgcaaaaccatctcttgcaaatacttgcactttttgcaatggagacgccagtgagcttagatgctgaggacataagaagtgaaaaggtgaaagttttgagatcaatgaaaccgttgcggcttgaagatgtggttgttggtcaatacaaaggccataacaagggaggaaaaacttatccagcttatacagacgatccaacggttccaaatcacagtctcactcctacatttgctgcagcagccatgttcatcaacaatgcgagatgggacggtgttccttttcttatgaaagctggaaaagctctccataccagaggagcagagatcagagttcagttcagacatgtcccaggaaacttgtacaagaaaagttttgctactaatttagacaatgcaacaaatgaactagtgattagagttcagcctgatgaagggatatacctgaggatcaacaacaaagttcctggtcttggaatgagactagatcgcagcgaccttaaccttctatatcgatccaggtatccaagagagataccagatgcatatgaaagactgcttctcgatgcaatcgaaggagagaggaggttgtttatcagaagtgatgagctagatgcagcatgggatctattcacaccggctttgaaggaactagaggagaagaaaatcattcctgagctctatccatatggaagcagaggtcctgttggtgcacattaccttgcatctaagtacaatgtgagatggggagatcttggagaagcttaagctttcgacagaaacaatatgatttggtgttaatatgagtaaactaacttgtcgatattatcaatgcgtagataaatccttgttaccaaaacttgctttttctctgacattttttgattgtttttggttctaaatcgagcatttcggaggaatgtaccaaaactcttgcaggaatagaccatttccatcattgc

SEQ ID NO: 117335 - DNA, 1630 bp, Arabidopsis thaliana
tcaaagccagtcaacagttagtattacggtggttggagcctctggtgatcttgctaagaagaagattttcccggctcttttcgccctttactatgaaggttgtctccctgagcattttacagtatttggatattctaggagtaagatgacagatgttgaacttagaaacatggtcagcaaaaccctcacttgcagaattgataagagggcaaactgtggtgaaaagatggaagaatttctcaagagatgtttttacatttctggtcagtatgattctcaggaacattttatcgaattggataagaagctcaaggaacatgaggctggaagaatctcaaaccgcctcttttatttgtctatccctccaaatatatttgtagatgctgtgaaatgtgcaagcacttctgcttcatctgtcaatggatggactagggttatcgtcgagaaaccttttggtcgagattctgaaacctcggctgctttaacgaaatccctcaagcagtatttggaggaagatcaaatttttaggatagaccattacctaggaaaggagctagtcgagaacttatctgttcttcgattctcaaaccttatatttgagccgctatggtcaaggcagtacataaggaacgtgcaatttatattttctgaggatttcggcactgaaggacgtggagggtactttgacaattacggaataataagagatataatgcagaatcatctgcttcaaatcttagccctctttgccatggaaacgcctgttagtttggatgcagaggatatcagaaatgaaaaggttaaggtgttacgttcaatgaggccaattcgagttgaagatgtggtaataggacaatacaagagccacacaaagggaggagtcacatatcctgcctacaccgatgataaaactgtaccaaaaggtagtctgactccaacatttgcagctgctgctcttttcatcgacaatgcaagatgggacggtgtgccctttttaatgaaagcgggcaaagcactacacaccaggagtgcagagataagggtgcagttcaggcatgttccggggaatttgtataaccggaatactggttctgatcttgatcaagctacaaatgagcttgtgatccgtgtccaaccagatgaagcaatctatttcaaaatcaacaacaaggtccctggtttaggaatgagattagatcgcagtaacttgaatcttctatactcagcaaggtattcaaaggagataccagatgcatatgagaggcttctgttagatgcaatagaaggagaaagaagattgttcataagaagtgacgagcttgatgcagcttggtcgctattcactccattgcttaaagagattgaagagaagaagagaatccctgagtactatccttatggtagccgtggtcctgttggtgctcattatctagctgctaaacacaaggtgcaatggggtgacgtcagtattgaccagtaaaacattttcttgtttgtattctcttttttttacattgataatagatttatctaggattcaagctttttctacgcctctttttacagctttaatttgtgcaatttggttatgtaccatttaataaataaataaaccaaaggggtttctctt

SEQ ID NO: 117336 - DNA, 1672 bp, Arabidopsis thaliana
  unsure (1)..(1672): unsure at all n locations
aatacgactcactttagggaaagctcgtacgcctgcaggtaccggtccggaattcccgggtcgacccacgcgtccgattcttctcctcctatcggactttgccacaccagatcggaaaatcccaatcctcttttcctttgttttttttgctatcttcaatcaaaaactctccgacagattcaatgaagcagcaaaagagataaaaccctaacaaaagtaaacaatcggagttttaatcttcttcttcttcggagccggagttttgtctgatctgtcggagaggacgtgtcggcatctattaaaatcctagctggacttccacatcactttactcaattagaagctgttttgagtaacacaagtaagtagtaagcttataaaacaatgggaacgagcgaagacaagatgccatttaagactaccaaaccaacatcttcggctcaggaagttcctcccacaccgtatccagattggcaaaattcaatgcaggcttattatggcggaggaggatctccaaatccttttttcccatccccagttggatctcctagtcctcacccctatatgtggggtgctcaacaccatatgatgccgccttatggcaccccagttccgtacccagcaatgtatcccccgggggcagtctatgctcatcctagcatgcccatgcctcctaattctggtcctaccaacaaggagcctgcgaaggaccaagcttctggcaagaagtcaaaggggaactcgaaaaaaaaggctgaaggaggtgataaagcgctctctggttcagggaacgatggtgcctctcatagtgatgaaagtgtcacagcgggttcatctgatgaaaatgatgagaatgccaatcaacaggaacagggttcaattcgaaagccaagctttggacagatgcttgctgacgcaagttctcaaagtacgactggtgaaatccaaggttcggtgcccatgaagccggtagccccggggactaatctgaatatcgggatggacttatggtcttcccaagctggtgtaccagtgaaggatgaacgagagctcaagcggcagaagaggaaacaatctaaccgtgaatccgctaggcggtctagattgcggaagcaggccgaatgcgaacaacttcaacaaagagtagagagtttgtcgaacgagaatcaaagcctgagagatgagctacagagactctcaagcgaatgtgataagctcaagtctgagaacaactcaatccaggatgagttgcagagagtacttggagcagaggctgtagctaatctagaacagaatgctgctgggtcgaaagatggtgaaggaacaaattaacacttaggaaaattggaactttacaacggattattgggatttttcaacaccggataaaaaaaactgagtccaaagtcatttgagattacgtaactatacaatcgtttgacatttttgtgtaatagagatttgacctacaagactgtagaagctgcaaaagctacgattacactttgttttattagtcttcgtgattggaatcggattctgaatccgagtttgtttttgnnnnnnnnnnnnnnnnnnnnnnnnnnnnnnnnnnnnnnnnnnnnnnnnnnnnnnnnnnnnnnnnnnnnnnnnnnnnnnnnnnnnnnnnnnnnnnnnnnnnnnnnnnnnnnnn

SEQ ID NO: 117337 - DNA, 1448 bp, Arabidopsis thaliana
gagaaaccattctctccgactaagagagagaagcgaatttgtttttttttcttttgtgggttcaattcgaattgttttccctgagactcaagttactgtgtcattactctgcattgagcaatgggtagcaacgaagaaggaaaccccactaacaactctgataagccatcgcaagctgctgctcctgagcagagtaatgttcatgtgtatcatcatgactgggctgctatgcaggcatattatgggcctagagttggtatacctcaatattacaactcaaatttggcgcctggtcatgctccaccgccttatatgtgggcgtctccatcgccaatgatggctccttatggagcaccatatccaccattttgccctcctggtggagtttatgctcatcctggtgttcaaatgggctcacaaccacaaggtcctgtttctcaatcagcatctggagttacaacccctttgaccattgatgcaccagctaattcagctggaaactcagatcatgggttcatgaaaaagctgaaagagttcgatggacttgcaatgtcaataagcaataacaaagttgggagtgctgaacatagcagcagtgaacataggagttctcagagctccgagaatgatggctctagcaatggtagtgatggtaatacaactgggggagaacaatctaggaggaaaagaaggcaacaaagatcaccaagcactggtgaaagaccctcatctcaaaacagtctgcctcttagaggtgaaaatgagaaacccgatgtgactatggggactcctgttatgcccacagcaatgagtttccaaaactctgctggcatgaacggtgtgccacagccatggaatgaaaaagaggttaaacgagagaagagaaaacagtcaaaccgagaatctgctaggaggtcaagactgaggaagcaggctgaaacagaacaactatctgtcaaagttgacgcattagtagctgagaacatgtctctgaggtctaaactaggccagctaaacaatgagtctgagaaactacggctggagaacgaagctatattggatcaactgaaagcgcaagcaacagggaaaacagagaacctgatctctcgagttgataagaacaactctgtatcaggtagcaaaactgtgcagcatcaactgttaaatgcaagtccgataaccgatcctgtcgcggctagctgaccgtggccgcaacaatgagaacccgatatttcttcctttgggttgtgattgtaacttaaaaggagactttttgtttttattcttagatttgtagctctctgcatagtgagcataaattgatgtaatatggtttaagagattcggtgttctctggtgtgtgctgcaaccacataattggtgatagataggtttagttatataagcaaatgtattagagataaggggagacatatttgatggtcttt

SEQ ID NO: 117338 - DNA, 1943 bp, Arabidopsis thaliana
  unsure (1)..(1943): unsure at all n locations
nnnnnnnnnnnnnnnnnnnnnnnnnnnnnnnnnnnnnnnnnnnnnnnnnnnnnnnnnnnnnnnnccacgcgtccgctttttcgctctggtttttttagagagagagaaagatgaaaatgcgtttaattgctgtttaggtttcgaattcgcgatttgaatttctgggtttctctctgtttaagcttcttcttcttcatcttctgcttacgtttcttcttcaaggagctttcggattcttgtagaaagagtcattgttctcttgagtgggaaaccttgaaaccattcctatgggaaatagcagcgaggaaccaaagcctcctaccaaatcagataaaccatcttcacccccggtggatcaaacaaatgttcatgtctaccctgattgggcagctatgcaggcatattatggtccaagagtagcaatgcctccttattacaattcagctatggctgcatctggtcatcctcctcctccttacatgtggaatcctcagcatatgatgtcaccatatggagcaccctatgctgctgtttatcctcatggaggaggagtttacgctcatcccggtattcccatgggatcactgcctcaaggtcaaaaggatccacctttaacaactccggggacgcttttgagcatcgacactcctactaaatctacagggaacacagacaatggattgatgaagaagctgaaagagtttgatgggcttgctatgtctctaggaaatgggaatcctgaaaatggtgcagatgaacataaacgatcacggaacagctcagaaactgatggttctactgatggaagtgatgggaatacaactggggcagatgaaccgaaacttaaaagaagtcgagagggaactccaacaaaagatgggaaacaattggttcaagctagctcatttcattctgtttctccgtcaagtggtgataccggcgtaaaactcattcaaggatctggagctatactctctcctggtgtaagtgcaaattccaaccccttcatgtcacaatctttagccatggttcctcctgaaacttggcttcagaacgagagagaactgaaacgggagcgaaggaaacagtctaatagagaatctgctagaaggtcaagattaaggaaacaggccgagacagaagaacttgctaggaaagtggaagccttgacagccgaaaacatggcattaagatctgaactaaaccaacttaatgagaaatctgataaactaagaggagcaaatgcaaccttgttggacaaactgaaatgctcggaacccgaaaagagagtccccgcaaatatgttgtctagagttaagaactcaggagctggagataagaacaagaaccaaggagacaatgattctaactctacaagcaaattccatcaactgctcgatacgaagcctcgagctaaagcagtagctgcaggctgaatcgatggtaattcatgtcgatttctacttaatttgtcgacataaacaaagaaaataagtgctactaatttcagaaaaacttgatagatagatagtatagtagagagagagagagagagagaggtgtgatgattattgatctataaattttcggagagagagagggagaaagagaaacttttcctccagatgaaaatttggtgttatggtttgttactgttaatatagagaggcttttctttttttataaaatggcttcctttgttgcatttccttgttttagacctgatgtaattttatgaaatcggtgttattgctttgcgtaagcttttgtttcttttgtcaaggtttcatgcataaaggatctttcttttcaggtttcatacatctctctccgaaaatttatagatccaataatcatcacgaatatcacaaacattatgagtctgtctttgggtgattttcttcgctactcttgaggactgtcaatcacacaaggcattcttt

SEQ ID NO: 117339 - DNA, 1442 bp, Arabidopsis thaliana
  unsure (1)..(1442): unsure at all n locations
ggaaaggaaaagagacacacacaaataaagaaaacgaaaacacttttatacttatattgcagccatggctccgactttgcaaggccagtggatcaaggtggggcagaaaggaggaacgggaccaggacctagaagttcacacggcatagccgcggtcggagacaagctctacagtttcggcggcgagttaacaccaaacaaacacatcgacaaagacctctacgtctttgacttcaacactcaaacttggtcaatcgctcaacccaaaggagacgccccaactgtatcctgcttaggcgtgcgcatggtggccgtgggaactaagatctatatctttggaggccgcgatgagaaccgcaacttcgaaaactttcgctcctacgatacggtgacatccgagtggacattcctgacgaagcttgatgaggtgggaggacccgaggctcgtactttccattcgatggcttcggatgaaaaccatgtgtatgtattcggtggggtgagcaaaggcggtactatgaatactcccacgcggttcaggacaatcgaggcgtataacattgctgatgggaaatgggctcagctaccggatccaggagataacttcgagaaaagaggaggagcgggattcgctgtggtacaagggaagatttgggtggtttatgggtttgcgacctcgattgtgcccggaggcaaagatgactatgagtctaatgctgtgcaattctatgatccggcttccaaaaagtggaccgaagtagagactacaggagcgaaaccttccgcaaggagcgtgtttgcccatgcggtagtgggaaagtatataataatatttgcaggtgaggtatggcctgatctcaatgggcattatggtcccgggacgctgtccaatgagggatatgcgttggacaccgagacactggtgtgggaaaagttgggagaagaaggtgcaccagccataccacgaggttggactgcctatactgctgccactgtcgatggaaagaatggcctcctcatgcatggcggaaagcttccgaccaacgagcgaactgatgatctctacttctatgcggtcaattcagcttaatgcgtgtcaagatttgtgttgtgtgtgtggctcgttaatatttattactatccaataaggagccctaatggtttgctgtattattacaaattatctgtgtgtgggactcgtcgagcttttttactctaatgaggcctactcatggttgtgtgagtggttcctcaagtatcattgtccaataaggagccaatttatttatggctggctgttttattacaaattatgtgtatgtgttaataattaaagattgaattatctacaagtttttcgtattatcattaaaaaaagggcggccgctctagaggatccaagcttacgtacgcgtgcatgcgacgtcgtagnnnnnnnnnnn

SEQ ID NO: 117340 - DNA, 3749 bp, Arabidopsis thaliana
aaataaagctctcaattcaattctctctctttcacttttttttcctctgcttgcttcttctgttcatctttttgcttcgtcaaaattttgaccaaagttttgtacttttttgttgctgcaatttttgtgattagattggatctgggcttggagctgaatagcggatttgtataaggttattattagtcttctctatcgttgcggcgttcataagttggagaaagtggtaaagactgcttaagtatgtctgtttctatgagagatttagatccagctttccaaggagctggacagaaagctggtattgagatatggcgtatagagaatttcatccctaccccaattccaaaatcttctattgggaagtttttcaccggagattcttacatagtattgaagacaacggcgttaaaaactggtgcattgcgccatgatatccattactggcttggtaaagatacctctcaggatgaagccggtactgctgcagttaagacagttgaattagatgctgctctaggaggtcgtgcagtgcagtatcgggaagttcaaggccacgagactgagaaattcttgtcttattttaagccatgtatcattcctcaagaaggtggagtagcatcaggattcaagcatgtcgtagctgaagaacatattacccgcttgttcgtctgcagaggaaaacatgttgtccatgtcaaagaggttccttttgctcggagttcattaaaccatgacgatatttacattcttgacacaaagtccaagattttccaattcaatggatccaattctagtatccaagagagagcaaaagcactggaagtggttcagtacatcaaagatacttaccatgatgggacatgtgaagttgctacagttgaggatgggaaacttatggctgatgctgatagtggagaattttggggtttctttggtgggtttgctccgctacctaggaaaacagctaatgatgaagacaaaacttataattcagatatcaccagattattttgtgtcgagaagggacaggcaaatcctgttgaaggcgatacattgaagagggagatgctggatacaaacaagtgttacattcttgattgtggaattgaagtgtttgtttggatgggaagaaccacttctcttgatgatagaaaaattgcgagtaaagcagcagaagaaatgatccgttcatctgaacgaccgaaatcgcaaatgatccgcataatagaagggtttgaaacagtaccattccgatcaaagtttgaatcttggactcaagaaactaatacaaccgtgtcagaagatggtagaggcagagttgctgctcttttgcaacgacaaggagtaaatgtcagaggcctgatgaaagctgctccgcctaaagaagagcctcaggttttcatcgactgcacgggaaatctgcaggtttggcgtgtgaatggtcaggcaaagactctccttcaagctgctgatcattcaaaattctacagtggagattgctatgttttccagtattcttatcccggagaagaaaaagaagaagttcttataggaacgtggtttggcaaacaaagtgtggaggaagaaagaggttctgcagtctctatggcaagcaaaatggttgagtcaatgaaatttgtcccagcccaagctcgcatttatgaaggaaaggaaccaattcaattcttcgtgattatgcaaagctttatcgttttcaagggtggtattagcagtggatacaagaaatacatagccgagaaagaagttgatgatgatacatacaatgagaatggtgttgctctattccgaattcaagggtctggtccggaaaatatgcaagctatacaagttgacccggttgctgcatcactgaactcctcgtactattacatactacataatgattcttccgtctttacttgggctggaaatttatcaaccgcaactgaccaagaactggcggaaaggcagctagatctgattaagccaaatcaacaatctagagcacaaaaggaaggttcagaatcagaacagttctgggagttattaggaggcaaagctgaatattcgagccaaaagctcacaaaggaacccgagcgtgaccctcacttgttctcttgtacattcacaaaagaagttctcaaggtgacagagatatataactttacacaggatgacttgatgaccgaagatatatttatcatagactgtcactcagaaatctttgtctgggttggccaagaagtagtcccaaagaacaagttactagctttaactattggagagaaattcatcgagaaagattctctcctggagaagttatcccctgaagcccctatttatgtgatcatggaaggcggtgagccgtcattcttcacccggttcttcacttcttgggattcctcaaaatccgctatgcatggaaactcattccaaagaaaacttaaaattgtcaaaaatggtggaactccagtggcagataaaccaaaacgaagaactccagcttcatatggtggccgtgccagcgttcctgacaagtcgcagcagcggtcaagaagcatgtcatttagtccagacagggttcgcgtgaggggcagatctccggcgttcaatgcactcgcagcaacatttgagagccaaaatgcaagaaacctgtcaactcctcccccagtagttaggaaactctacccaagatctgttactcctgactcctcaaagtttgctcccgctcccaagtcttcagccatcgcttctcgaagtgcacttttcgaaaaaatacctccacaagaaccttcaattccaaaaccagtcaaagcgagcccgaagacacctgagtctccagcgccagaatccaattcaaaagaacaagaagagaaaaaggaaaatgacaaggaggagggatcaatgagcagccggatagaatctcttacgattcaagaagatgctaaagaaggagtcgaagacgaggaagatttaccagctcacccttatgatcgtctcaagacaacttccactgatcctgtctctgacattgatgtaacaaggagagaggcttacctttcatcagaagagttcaaggagaaatttggcatgacgaaagaagctttctacaagctgcctaaatggaaacagaacaaattcaaaatggctgttcagcttttctgagatataatccttcttcttctccatcaaaagatccgctataaggagaagatacaagggacagtgtcagtgcattttaagctgcttctgctccccatgagaagcttaatacatttttcatggcttgtttaaaaaaaacaacccagagcagttttcttttcttctatttttctttcttctccttcaaatctttctgatttgttttaatgatctgtttgcttgtttctctctatttcattctccattttttagtttgagtagatttttgttttcttcatattttgggattgtttcttcttcaggtcacaggttttgaccttgagtctttgatttatttattcttggggttattttgatatcaaattgaggaaatttggtttcaaaagtcaaatttttatttagtgagatttcataaaaacaaatagactctgtaattttgttttgcagaagttgaggattgagtttttttttttttttttgtgtacagcaaagtgtacaaactaaattgtgcttcctaaacttcagatttctttattttactacatttctcataaatatagaaataccatttgttggccaaaaaa

SEQ ID NO: 117341 - DNA, 886 bp, Arabidopsis thaliana
  unsure (1)..(886): unsure at all n locations
caaatttagagcgagcaataatgagggtttctcaatctcttgtcccttttgccataattgctttggtcctttcctttgtcaatgcttatgatccaagtccactccaagacttctgtgttgccattgatgacctaaaaggcgtttttgtgaatggtaggttttgtaaagacccgaagcgagtcgatgcaaaagattttttcttctcaggtctcaatgtgcccgggaacaccaataatcaagttggctctaatgtgaccactgttaatgttgatcagatcccagggctaaacaccatgggaatatcattggtccgcatagactacgcaccgcatggccaaaatccacctcacacgcaccctcgtggctcagagatccttgtccttgtcgaaggaacattatacgtcggttttgtctcttccaatcaagataacaaccggttattcgccaaagtattgcaccccggtgatgttttcgtgttccccataggaatgatccattttcaggtaaatgtggggaaaattccagcagttgcttttgcgggattgagtagccagaacgcaggtgttatcacaattgcaaacactgtgtttgggtccaatcctccgatttatccagagcttcttgccagggcgttccagttggatgcaagtgttgtcaaagaacttcaggccaagtttgggtccatatgaactgatcatctaagtcgtttaagagtatttatcatcttttacaaaaaaaaagaaaaaaaagtatttatcattgaaacacttaattaaaggaatacacnnactatgaaatatttatgtaacaaaataaaaccngggattatngtaccaagtttcnatattataatatatcaacttttcccanatanaaaaaannaaaa

SEQ ID NO: 117342 - DNA, 1016 bp, Arabidopsis thaliana
acacagtttatcccacacctctctatataaacacccgagaccgagaggagtgagaagagtagggaaaaagaaaagaaaagtagagtactatcttcctcttaaaccaaccattcaaaatgttgcgtactatcttcctcttatctcttctctttgctctatccaatgcctctgttcaagatttctgtgtcgcaaacctgaaacgcgctgaaacccctgcgggttacccttgcattcgtcccattcatgtcaaagctacagactttgtcttctctggcttaggcactcctggaaacactacaaacatcatcaacgccgctgtcacacccgctttcgcagctcagttcccgggtctgaacggtctaggcctctctacagctagacttgacttagctcctaaaggtgtgatcccaatgcacactcaccctggtgcctctgaggttctctttgtccttactggctccattaccgctgggtttgtctcctcggcaaacgctgtctacgtgcagacactcaaaccaggacaggtcatggttttcccacagggcttgcttcatttccagatcaacgcgggaaaatcctctgcttcagccgttgtcactttcaacagcgctaatccgggtctgcagattctcgacttcgcactctttgctaacagtcttcccactgaactcgtcgtgggtactactttccttgacgccactacagtcaagaagctaaagggtgttcttggaggaactggctaaaaaaagacttaggactactccttgactaaaacaccaaaacctgtttcttcatctttttttctctttaattgattcttgtcttctctgttttgtgtgccttgtaattcttcaaaacctgtcaaaattgttacattgtatgtgagttttttcaattaagatcctgagttggtcacaccgttcaaaaaaacccaccccatagagcgaccgctctagaggatccaagcttacgtacgcgtgcgtgcgacgtcataatcttaaacgaatggcaatcaa

SEQ ID NO: 117343 - DNA, 574 bp, Arabidopsis thaliana
  unsure (1)..(574): unsure at all n locations
gtaccgaaccgcagtttcgacccaggcgcacgcagacgatgtgtgctaactactccgaaacgcgctgtatacccctgcgggttacccttgcattcgtcccattcatgtcaaagctacagactttgtcttctctggcttaggcactcctggaaacactacatacatcatcaacgccgctgtcacacccgctttcgcagctcagttcccgggtctgaacggtctaggcctctctacagctagacttgacttagctcctaaaggtgtgatcccaatgcacactcaccctggtgcctctgaggttctctttgtccttactggctccattaccgctgggtttagctcctcggcaaacgctgtctacgtgcagacactcaaaacagggcaggtcaatggtttttccacagggctttgctttcaattttcaagatcaaacggggggaaaatcctctgntttcagccgttgtcaantttttaaaaagnggntaattcggggtctttaanntttnttggctttngnantttntttgctaaaaagnttttccactggacnngctggtgggntntntttcctttg

SEQ ID NO: 117344 - DNA, 1809 bp, Arabidopsis thaliana
  unsure (1)..(1809): unsure at all n locations
nnnnnnnnnnnnnnnnnnnnnnnnnnnnnnnnnnnnnnnnnnnnngcaggtaccggtctggaattcccgggtcgaccacgcgtccggagagagagagactccattgttgaagtgtgttcactgaactcctcctcaaacaacaatggcgacgacggttacactcaaatccttcaccggacttcgtcaatcatcaacggagcaaacaaacttcgtctctcatgtaccgtcatcactttctctccctcaacgacggacctctctccgagtaaccgcagccagagccactcccaaactctccaaccgtaaactccgtgtcgccgtcatcggtggtggaccagcaggcggggcagctgcagagactctagcacaaggaggaatcgagacgattctcatcgagcgtaagatggacaattgcaagccttgcggtggcgcgattcctctctgtatggtcggagaattcaacttgccgttggatattattgatcggagagtgacgaagatgaagatgatttcgccgtcgaacattgctgttgatattggtcgtacgcttaaggagcatgagtatataggtatggtgagaagagaagttcttgatgcttatctgagagagagagctgagaagagtggagccactgtgattaacggtctcttccttaagatggatcatccggagaattgggactcgccgtacactttgcattacactgagtacgatggtaaaactggagctacagggacgaagaaaacaatggaggttgatgctgtcattggagctgatggagctaactctagggttgctaaatctattgatgctggtgattacgactacgcaattgcatttcaggagaggattaggattcctgatgagaaaatgacttactatgaggatttagctgagatgtatgttggagatgatgtgtcgccggatttctatggttgggtgttccctaagtgcgaccatgtagctgttggaacaggtactgtgactcacaaaggtgacatcaagaagttccagctcgcgaccagaaacagagctaaggacaagattcttggagggaagatcatccgtgtggaggctcatccgattcctgaacatccgagaccacgtaggctctcgaaacgtgtggctcttgtaggtgatgctgcagggtatgtgactaaatgctctggtgaagggatctactttgctgctaagagtggaagaatgtgtgctgaagccattgtcgaaggttcacagaatggtaagaagatgattgacgaaggggacttgaggaagtacttggagaaatgggataagacatacttgcctacctacagggtacttgatgtgttgcagaaagtgttttacagatcaaatccggctagagaagcgtttgtggagatgtgtaatgatgagtatgttcagaagatgacattcgatagctatctgtacaagcgggttgcgccgggtagtcctttggaggatatcaagttggctgtgaacaccattggaagtttggttagggctaatgctctaaggagagagattgagaagcttagtgtttaagaaacaaataatgaggtctatctcctttcttcatctctatctctctttttttgtctgttagtaatctatctacactaatgttgttactcttcaatgtattcagtatcatatttatgttttctgttcattgaattagtcaaaaagcatttggctttacaatccccaaaaaaaaaagaaaagcagatttcacnannnaagggcggccgctctagaggatccaagcttacgtacgcgtgcatgcgacgtcataatctttctatagt

SEQ ID NO: 117345 - DNA, 681 bp, Arabidopsis thaliana
  unsure (1)..(681): unsure at all n locations
ttagtgtttaagaaacaaataatgaggtctatctcctttcttcatctctatctctagggttgctaaatctattgatgctggtgattacgactacgcaattgcatttcaggagaggattaggattcctgatgagaaaatgacttactatgaggatttagctgagatgtatgttggagatgatgtgtcgccggatttctatggttgggtgttccctaagtgcgaccatgtagctgttggaacaggtactgtgactcacaaaggtgacatcaagaagttccagctcgcgaccagaaacagagctaaggacaagattcttggagggaagatcatccgtgtggaggctcatccgattcctgaacatccgagaccacgtaggctctcgaaacgtgtggctcttgtaggtgatgctgcagggtatgtgactaaatgctctggtgaaggggtctactttgctgctaagagtggaagaatgtgtgctgaaccattgtccaaggtccacagaatggtaagaagatgatttaccgaaggggctttagggagnccttgggnaatngggaaaaccatcttnccnaccncagggnctttatgtgtccnaaaangttttcanctaacccggaaaaaacggttttgaatnnaanngtgaattccaaatcatngacacttcaacggtccccgngcctt

SEQ ID NO: 117346 - DNA, 2122 bp, Arabidopsis thaliana
  unsure (1)..(2122): unsure at all n locations
agcccacgcgtccgctttctttcatttttttatcagtttctcatttctctctcagtcgcatataaatttgaaacgccgattcgtttttgctctttaagctttcttcttgatttcgacggtgtctctcaatctccgtcaagcttgacgaatttcaggagctatatataccatggcgctcttgtctcaagcaggaggatcatacactgttgttccttctggagtttgttcaaaggctggaactaaagctgttgtttcgggtggcgtgaggaatttggatgttttgaggatgaaagaagcttttggtagctcctactctaggagtctatctaccaaatcaatgcttctccattctgttaagaggagtaagagagggcatcaattgattgttgcggcaagtcctccaacggaagaggctgtagttgcaactgagccgttgacgagagaggatctcattgcctatcttgcctctggatgcaaaacaaaggacaaatatagaataggtacagaacatgagaaatttggttttgaggtcaatactttgcgccctatgaagtatgatcaaatagccgagcttcttaatggtatcgctgaaagatttgaatgggaaaaagtaatggaaggtgacaagatcattggtctgaagcagggaaagcaaagcatttcacttgaacctgggggtcagttcgagcttagtggtgcacctcttgagactttgcatcaaacttgtgctgaagtcaattcacatctttatcaggtaaaagcagttgctgaggaaatgggaattggtttcttaggaattggcttccagcccaaatggcgtcgggaggatatacccatcatgccaaaggggagatacgacattatgagaaactacatgccgaaagttggtacccttggtcttgatatgatgctccgaacgtgtactgttcaggttaatctggattttagctcagaagctgatatgatcaggaagtttcgtgctggtcttgctttacaacctatagcaacggctctatttgcgaattccccttttacagaaggaaagccaaacggatttctcagcatgagaagccacatatggacagacactgacaaggaccgcacaggaatgctaccatttgttttcgatgactcttttgggtttgagcagtatgttgactacgcactcgatgtccctatgtactttgcctacagaaagaacaaatacatcgactgtactggaatgacatttcggcaattcttggctggaaaacttccctgtctccctggtgaactgccttcatataatgattgggaaaaccatctgacaacaatattcccagaggttcggttgaagagatacttggagatgagaggtgctgatggaggtccctggaggaggctgtgtgccctgccagctttctgggtgggtttattatatgatgatgatagtctccaagctatcctggatctgacagctgactggactccagcagagagagagatgctaaggaacaaagtcccagttactggcttaaagactccttttagggatggtttgttaaagcatgtcgctgaagatgtcctgaaactcgcaaaggatggtttagagcgcagaggctacaaggaagccggtttcttgaacgcagtcgatgaagtggtcagaacaggagttacgcctgcggagaagctcttggagatgtacaatggagaatggggacaaagcgtagatcccgtgttcgaagagctgctgtactaagaaaatgggacgtgaacaaaaggtgtctataaacctttgggtgtgagtttatgctatctgaagaattcgagtctccggaataaggatttttttttttggttgtaatcggattttaaaaactgattttgttttagaaattcgaagcattgaaaagcagaagaaaaattgtatgtactaaacgatttcggtgtgggaaatcgtttgggagggtgtgtttggatcttgaataaattacccatttttcttgtccnnnnnnnnnnnnnnnnnnnnnnnnnnnnnnnnnnnnnnnnnnnnnnnnnnnnnnnnnnnnnnnnnnnnnnnnnnnnnnnnnnnnnnnnnnnnnnnnnnnnnnnnnnnnnnnnnnnnnnnnnnnnnnnnnnnnnn

SEQ ID NO: 117347 - DNA, 1427 bp, Arabidopsis thaliana
  unsure (1)..(1427): unsure at all n locations
nnnnnnnnnnnnnnnnnnnnnnnnnnnnnnnnnnnnnnnnnnnnnnnnnnnnnnnnnnnnnnnnnnnnnnnnnnnnnnnnnnnaccacgttaaagaataaaacttgtttttttttttttttttatgaaaatacatagctaatcaatacatatatgaattataacatgtaattttaggcccaaatatagcataaacatcatgggccaacaaacaatacatatatcaatctcttgaacaagcataattcaaataataatgatagcataaattcattaaaaccctcaagagtagtaacttatgcgtctctgtcccttttacattcagctggcataaccgggaacctagtccggtcggtacagtagttgtagatggtccacttcatacgaacccatttgagacgacgccattgttcagcgtcaaggtcacggaactctttctgatcccaccacatgcggccttgtgtggcacagtacttggcttccacagaagcttggcaaccatctatgtggaatcctttgtaagatgcaacgaaaggtgcattggcccaattggtcttctctaaaccgcctctcgtggcccaatcatccgcgttccaaaggcttgagtaaagcttcattggttggttgaatgggaaacgtactcctagatccttagcattcttgaacgttcggattggtatgttgtcaacaaagaatacgatctggtacatgttccaaaggattgagtaagtgtgataagccttagaaggatcaaaccagagatagattcgttgttctctgtttccctttcctcctgtgaatacatttgtctgtaatatagctggttgtcctgttctgtttccaaggaactcaaagtctatctcgtcatgctcattgttggtagatgatagatagaaagctgtgacaactccggctgtgtcaccagctggaagctttatgtgcatactaaaatgtccaaacaaatatgacccctttgattgaaatcctgtgccagtgtatttgtcgaggataagctgaagttcggaaccgccattgaactgtttctggtggtcaaaagcccaagttgggacgtagttacgaccaaatggtacatcaatggccttgcgtggaggaatagccattaccattgttgaagaaaccattagaaagagagccatgagagcccatggagatgaagaaacagtcatggttgtgttttagaaagagatagagagaaatgatgattatcctggatctgacagctgactggactccagcagagagagagatgctaaggaacaaagtcccagttactggcttaaagactccttttagggatggtttgttaaagcatgtcgctgaagatgtccctgaaactcgcaaaggatggtttagagcgcagaggctacaaggaagcggtttcttgaacgcagtcgatgaagtggtcat

SEQ ID NO: 117348 - DNA, 788 bp, Arabidopsis thaliana
  unsure (1)..(788): unsure at all n locations
tcgcgatctagaacttcccattcaaccaaccaatgaagctttactcaagcctttggaacgcggatgattgggccacgtactcctagatccttagcattcttgaacgttcggattggtatgttgtcaccaaagaatacgatctggtacatgttccaaaggattgagtaagtgtgatagcccttagaaggatcaaaccagagatagattcgttgttctctgtttccctttcctcctgtgaatacatttgtctgtaatatagctggttgtcctgttctgtttccaaggaactcaaagtctatctcgtcatgctcattgttggtagatgatagatagaaagctgtgacaactccggctgtgtcaccagctggaagctttatgtgcatactanaatgtccaaacaaatatgacccctttgattgaaatcctgtgccagtgtatttgtcgaggataagctgaagttcggaaccgccattgaactgtttctggtggtcaaaagcccaagttgggacgtagttacgaccaaatggtacatcaatggccttgcgtggaggaatagccattaccattgttgaagaaaccattagaaagagagccatgagagcccatggagatgaagaaacagtcatggttgtgttttagaaagagatagagagaaatgatgatgatgatcggacgcgtgggcggacgcgtgggcggacgcgtgggcggacgcgtgggtcgacccgggaattccggaccggtacctgcaggcgtaccgagctttccctaagtgagtcgtattagtgctg

SEQ ID NO: 117349 - DNA, 983 bp, Arabidopsis thaliana
  unsure (1)..(983): unsure at all n locations
gtgccacatccccccnctcggttcgacggtatcgcataagcttgatatcgaattcgcggccgcatatataccatggcgctcttgtctcaagcaggaggatcatacactgttgttccttctggagtttgttcaaaggctggaactaaagctgttgtttcgggtggcgtgaggaatttggatgttttgaggatgaaagaagcttttggtagctcctactctaggagtctatctatttaatcaatgcttctccattctgttaagaggagtaagagagggcatcaattgattgttgcggcaagtcctccaacggaagaggctgtagttgcaactgagccgttgacgagagaggatctcattgcctatcttgcctctggatgcaaaacaaaggacaaatatagaataggtacagaacatgagaaatttggttttgaggtcaatactttgcgccctatgaagtatgatcaaatagccgagcttcttaatggtatcgctgaaagatttgaatgggaaaaagtaatggaaggtgacaagatcattggtctgaagcagggaaagcaaagcatttcacttgaacctgggggtcagttcgagcttagtggtgcacctcttgagactttgcatcaaacttgtgctgaagtcaattcacatctttatcaggtaaaagcagttgctgaggaaatgggaattggtttcttaggaattggcttccagcccaaatggcgtcgggaggatatacccatcatgccaaaggggagatacgncattatgagaaactacatgccgaaagttggtacccttggtcttgatatgatgctccgaacgggtactgttcaggtaatctggntttagctcagaagctgttttgntcaggaggttcgncctgggctnntttanaaccttnggaacggcnnttttngnattccccttncagaggaanccaancgggtttttnncatgggnggcccttttggcagaacttcata

SEQ ID NO: 117350 - DNA, 955 bp, Arabidopsis thaliana
aaagctcttatctataaaacattctaaagaaaaatgaagatgataatccaaattttcttcatcatctccctcatttcaaccatctcttttgcctctgttcaagacttttgtgtagctgacccaaagggtcctcaaagcccatcaggttactcttgcaagaaccctgaccaagtcaccgaaaatgactttgcatttaccggcctcggcacagctggaaacacttccaacatcattaaagccgcagtgactccagcctttgctcctgcttacgcaggcatcaatggccttggcgtatctctggctcgtcttgacttagccggtggtggtgtcatccctctccacactcatcctggtgcttctgaggtccttgtagtcattcaaggcaccatttgcgccggatttatctcctccgccaacaaagtttacttgaagactctcaacagaggagattctatggtgtttcctcaaggacttcttcattttcagctaaactctgggaaaggccctgccttggcctttgtcgcattcggaagctcctccccagggctccaaattctaccatttgctctgtttgcaaacgatttgccttcagaacttgttgaagccacaacgttccttagcgatgcagaagttaagaagcttaagggtgtgcttgggggaactaattaagcttctcttagtttcattgttcatttttttaaaaatgtggttgtgcgttttgttatttcgagttcctttagcattttgagtttgtttcttctaatgatttggtttttctttatgagttgttattgttctcaatgtttcattttatagtctctttggcttcaaattgtaataactaataagcattatattgcagatttctaaaaaaaaaaaaaaaagggggatccactagttctagagcggccgccaccgcggtggggctccagcttttctaacccttataagggtt

SEQ ID NO: 117351 - DNA, 921 bp, Arabidopsis thaliana
accaagcgtccgcccacgcgtccgcccacgcgtccgcccacgcgtcggccgacgcgaaccataaactgtgagtaaaaaagagaagaaagaaaaatggtgctaaaggtgtacggacctcactttgcttcaccaaagagagctttggtcacactgatcgagaagggcgttgccttcgagaccatccccgtcgatctcatgaaaggagaacacaagcagcctgcttatctcgctctacagccttttggtactgttcctgctgttgttgacggtgactacaaaatcttcgagtcccgtgcggtgatgaggtacgtagctgagaagtacaggtcacaaggacctgatcttttggggaaaaccgttgaagacagaggtcaagttgaacaatggcttgatgtggaagcgaccacttaccacccaccgctattgaacttaacgcttcacataatgttcgcatcagtcatgggattcccatctgatgagaagctgatcaaggagagtgaagagaagcttgcgggtgttcttgatgtctacgaggcacatctctcaaagagcaagtacttggccggtgacttcgtgagcttggctgatttggctcacctcccgttcactgattacttggttggtccgattgggaaagcttacatgatcaaagataggaaacacgtgagcgcgtggtgggatgatattagcagccgtcctgcgtggaaggagactgttgccaagtattcattcccagcttaagatgtgttcatcttcttggtgatgtggtttgtgttttatgagaggtttaataaaagtggaactaaatgtacctcttaatgtaatgttgccacctctgtgttctctttccttttgtagtttaataagtatctttatggctttgtgaggctttcaattttaaggaaatgatcttttcccctt

SEQ ID NO: 117352 - DNA, 564 bp, Arabidopsis thaliana
  unsure (1)..(564): unsure at all n locations
ttccagggcngcccactgcgtccncataaacctgtgagtaaaaaagagaagaaagaaaaatggtgctaaaggtgtacggacctcactttgcttcaccaaagagagctttggtcacactgatcgagaagggcgttgccttcgagaccatccccgtcgatctcatgaaaggagaacacaagcagcctgcttatctcgctctacagccttttggtactgttcctgctgttgttgacggtgactacaaaatcttcgagtcccgtgcggtgatgaggtacgtagctgagaagtacaggtcacaaggacctgatcttttgggggaaaacccgttgaaggccaggggtcaagttgaacaatggctttgatgttgggaagcgccccctttaccaccccccccggctatttgaactttaacggttcacataatgttcggaatcagtcattgggnttcccatctgttggaggaagcttgttcaaggggggttaagggaagntttcgggggttccctttaatggtttcgggggacatttttaaaaggggaagtnctttggccggttacttcnttg

SEQ ID NO: 117353 - DNA, 1105 bp, Arabidopsis thaliana
  unsure (1)..(1105): unsure at all n locations
nnnnnnnnnnnnnnnnnnnnnnnnnnnnnnnnnnnnnnnnnnnnnnnnnnnnnnnnnnnnnnnnnaccgcccgaatttccactcgtccggaggagaaggacgatcgatctaaggagacgatgaagatcttccacgttccttgtctgcaagacaactactcttatctgataatcgatgagagcaccggagacgcggcggttgtggatccagttgatccggagaaggtgatcgcatcggctgagaagcaccaagctaagatcaagttcgtactcactacgcatcatcactgggatcatgccggtggaaacgagaagattaagcagttggttcctgatatcaaagtatatggaggttctctggataaggtgaagggttgcactgatgcggttgataatggtgacaagctgactttgggtcaggatattaacatattggctctccacactccttgtcacaccaagggtcacattagttattatgtgaaccggaaaagaaggagaaaacccagccgtgttcaccggagatacactttttgttgctggatgtgggaagttttttgaagggacagctgagcagatgtatcagtcgttgtgtgtgactctggctgcattacctaaaccgacacaggtttactgcggccatgagtacaccgttaagaacttggaatttgctctaactgtggaaccaaacaacgggaagatacaacagaagttagcatgggcccgtcaacagcgccaagcagatcttcccacaatcccttcaacactggaggaagagctcgaaacaaatccatttatgcgtgttgataagccagagatacaggagaaactcggttgcaagtcgccaattgatacaatgagggaagttcggaacaagaaggatcagtggaggggatgatgataaatggagagcttcttgcctatgttttgtgtacttgtgttgaatgatcctgtaaaaggtgtatgaaccagtaatgttgatattctgtgtgaaactgtgaaccggtttggtaaaccgaaatcagaccgacctgtaagccgtactccctttttgaattttcagtttactatggataataatttcagtgtcaaaaaaaaaaaaaaaa

SEQ ID NO: 117354 - DNA, 1425 bp, Arabidopsis thaliana
  unsure (1)..(1425): unsure at all n locations
acaaaaaccccaaaactctcaagaaaaaaaaaagaaaagaaatggcgatactatgcacaacaacatctccggcagagaaagaacacgaaccaaaacaagatcttgaaaaagaccaaacttctccactaatctttaacccttctcttcttaacctccaatcccaaatcccaaaccaattcatttggccagacgaagagaaaccttccattgacattccagagctcaacgtcccgttcatcgatctctcaagccaagactcgactcttgaagctcctagagtcatcgcagaagcttgcaccaaacacggcttcttcctcgtcgtcaatcatggcgtcagcgagtcactaatagcggatgctcaccgtttgatggaaagtttcttcgacatgcctctcgccggcaaacagaaagctcagagaaaacccggtgagagttgtggctatgcaagtagcttcaccggcagattctccactaagctgccatggaaggagactctctcttttcagttttccaacgataatagtggctcgagaaccgttcaagattacttttccgatacattaggacaagagttcgagcagtttgggaaggtgtatcaagactattgtgaagcaatgagttctctatcactcaagatcatggagcttctgggcttaagtttaggcgtaaaccgagactatttccgaggatttttcgaagagaacgattcgataatgaggctcaatcattatcctccatgccaaacaccagatctcacgttaggtacaggacctcattgtgatccaagttctttgaccatccttcatcaagaccatgtcaatggccttcaagtctttgtcgacaatcaatggcaatccattcgtcccaatcccaaggctttcgttgtcaatattggtgacactttcatggctctatcgaacgggatattcaagagctgtttgcatagagcggttgtgaatagagagagcgcgagaaaatcgatggcgtttttcttgtgtccgaagaaagacaaagtggtgaaaccaccaagtgatattttggagaagatgaaaacaagaaaataccctgacttcacttggtctatgttccttgagttcactcaaaaacattaccgagcagatgtgaatactctcgattccttttctaattgggttattaccaacaacaatcccatctaagaaacaaaattatttactatctcaatcttttgtttttctttggttactttgtgtcctttgttctcatggtgaaatgcattaaattgcatttcaaagttttaaacgtttgtatattgattgttccaagctttagaccaatccctaccgtatgagctcgttcaatgaataatttgaatgaaaaattcaaagaaatttttcttnnnnnnnnnnnnnnnnnnnnnnnnnnnnnnnnnnnnnnnnnnnnnnn

SEQ ID NO: 117355 - DNA, 1454 bp, Arabidopsis thaliana
ccggccggaattccgtttttttttcgactgaatctttaagcctctcaacgtgttttttatatatattttgaaaatcttttacgccttaaaaggatctacgataattaaaaaaaaaatggcaacggaatgcattgcaacggtccctcaaatattcagtgaaaacaaaaccaaagaggattcttcgatcttcgatgcaaagctccttaatcagcactcacaccacatacctcaacagttcgtatggcccgaccacgagaaaccttctacggatgttcaacctctccaagtcccactcatagacctagccggtttcctctccggcgactcgtgcttggcatcggaggctactagactcgtctcaaaggctgcaacgaaacatggcttcttcctaatcactaaccatggtgtcgatgagagcctcttgtctcgtgcctatctgcatatggactctttctttaaggccccggcttgtgagaagcagaaggctcagaggaagtggggtgagagctccggttacgctagtagtttcgtcgggagattctcctcaaagctcccgtggaaggagactctgtcgtttaagttctctcccgaggagaagatccattcccaaaccgttaaagactttgtttctaagaaaatgggcgatggatacgaagatttcgggaaggtttatcaagaatacgcggaggccatgaacactctctcactaaagatcatggagcttcttggaatgagtcttggggtcgagaggagatattttaaagagtttttcgaagacagcgattcaatattccggttgaattactacccgcagtgcaagcaaccggagcttgcactagggacaggaccccactgcgacccaacatctctaaccatacttcatcaagaccaagttggcggtctgcaagttttcgtggacaacaaatggcaatccattcctcctaaccctcacgctttcgtggtgaacataggcgacaccttcatggctctaacgaatggaagatacaagagttgtttgcatcgggcggtggtgaacagcgagagagaaaggaagacgtttgcattcttcctatgtccgaaaggggaaaaagtggtgaagccaccagaagaactagtaaacggagtgaagtctggtgaaagaaagtatcctgattttacgtggtctatgtttcttgagttcacacagaagcattatagggcagacatgaacactcttgacgagttctcaatttggcttaagaacagaagaagtttctaaaattgaggagacaatgttgtggtccagaaggtcacttgtagttatgtatagagctttcactgtttttcttaagatgttcaagacttgttaaggatcggagacttttttgttcttttattatcttgctctaggttgtctggtgttaaataaaagtagcaaaaaataaaaatatatgtactccaaaaaaaaaaaaaaa

SEQ ID NO: 117356 - DNA, 1470 bp, Arabidopsis thaliana
aaatcattgggctgggctaaagaagtgcactacgaggagtcgttcaaaagacacgacttgacccgaccgatccgacccggtaagaggttagcccaccacgcaacgtccgtcggggaagataccacgcgacggaaacgacgaacacgaacagcggaaatcgtcaattcaatctcgcagatcagttttggaatcacatataacaatgtcggcggttctcacagccggcggaggcttaactgccggggatcgcagcattattacggcgattaacaccggcgcttcgagtctctcattcgtcggctcagccttcatcgttctctgctactgcctcttcaaagaacttcgaaaattctctttcaagctcgtcttctaccttgctctctctgatatgctttgcagtttcttcctaatcgttggggatccttcaaaggggttcatttgttacgcacaaggctacactactcatttcttctgcgttgcttcgttcttgtggacaactacaattgctttcactcttcatcgtactgttgtcaagcataaaactgatgtggaggatttggaagcaatgtttcatttgtatgtatgggggacttccttggttgtgactgtcatacgttcttttggtaacaaccactcacatttggggccatggtgctggacgcaaactggtcttaagggaaaggctgttcattttttaactttctacgctcctctttggggagccattctttacaatgggtttacttacttccaagtgatacggatgctaagaaatgctagacgtatggcagttggaatgtcagaccgagtcgatcaatttgataatagagcagagttaaaggtgttgaacagatggggatactatccactcattctaataggatcatgggcattcggcactattaaccgtatccatgatttcatcgagccagggcataagatcttctggctctcagttcttgacgttgggacagctgcactaatgggcttgttcaattcaatagcctatggtttcaacagctcagtgcgtcgagcaatccatgagagactggagctattcttgccagaacggctatatcgatggcttccaagcaatttcagaccaaaaaaccatctgattctacatcagcaacaacaacagcgaagcgaaatggtatcactcaagaccgaggaccagcaatgacactaactttcaactaatacattggaccgataacaagaaggcggcgatgataatagcgtttggatggagagattgatatggtgaaggggggtgcacaacaggttgtcaatgtatatgaaacattctttgggaacacgaacttaacaatttatttatttttgtatgaacttttttattgtgaggtcttctgatcttgatttgaaattaacgaacttggagttcttggacgacaatgttgaagagttttgttacgtaagtcatatgaaaatactatcaaaaaaaaaaaa

SEQ ID NO: 117357 - DNA, 1013 bp, Arabidopsis thaliana
ttcccgggccgtaccgtgcacgtaaaccacacaactcttttcataaaagccctctatctttcaacaaacatccgattagagtagcaacaatagagatcaaacgtaactcacaaaatgctctcgtttcttatcccagttgtacagttttttcaggtggttatcgctgccgtagcatctgtagtcttcttagtgttcgccggtataaccttcggtgcctcaattgtgggactaaccatagccacaccgctttttgtcatcttcagtccgattctcgtaccagccactatagccactactttcctagtcggaggggctaccgctgcagttgccctaggagtgacggcatttgctctcatactttggctctttaaacataggattggagtaaaaccgaagaacaatccagctccgaaaggagccccaaccaaagcagatcaaccgggagcgtcgggaggagcgtctggagataaaccgggagaaatgtcaggagcaggaggaccgtcgggagataaaccaggaggagcgtctggaggaggagataaaccgggaggagcgtcgggaggaggacctggaggagcgtcgggaggaggacctggaggagcgtcgggaggagcgtcgggaggaggacctggaggagcgtcgggaggaggacctggaggagcgtcgggaggagcttcgggagataaaccggaaggagcaccgggagataaacccgggggagcatcggggggtaaaccggggaaaaagccaggacataaaccggcgggagcgcgaggaggtaaacggcttgcgtggtggtaaggatgatcatatggagcaacttgaaaattaattattaggtttcataaattaaacctcatgtatccatctctttttagtaaatattaattaccgtagaagaaactacatgtttcaaatatcatttctattaatttatagcatggtacaaagaaattaactatgaaacaatgctttgtttaaatgaagtaattaatcggtactatagcctatat

SEQ ID NO: 117358 - DNA, 1868 bp, Arabidopsis thaliana
accacgcgtcagatccgatcagaaaatatgagcgaagaactaagtcaaaagccatcatcagctcagtctctgtcactgagagagggcagaaataggtttccttttctgtccctgtcacagagagagggcagattttttccttctctatctctttcagagagagatggaagaaagttttcttttctcagtatgttctcttttctcatgccactgttggaggttattaagattattattgcttctgtggcctccgtaatcttcgtcggtttcgcctgtgtaaccctcgctggttctgccgcagcattagtcgtaagcaccccggttttcatcatatttagtcctgttctcgtaccagctacgatagccacggttgtcttggcgacaggattcacggccggtggctcttttggagcgacggcacttggtctcatcatgtggcttgttaaacgtaggatgggagtaaagccgaaggataatccacctccggcaggacttccaccgaattcgggagcaggagcaggaggagctcaaagtctgatcaaaaagtcaaaggcaaagtctaaaggtgggcttaaggcttggtgtaagaagatgttaaaaagtaaattcggtggtaaaaaaggcaagtccgggggtggaaaaagtaaatttggaggtaaaggcggtaagtccgaaggtgaagaaggtatgtcgtctggggatgaaggtatgtctggaagtgaaggaggtatgtccggaggtgaaggaggtaaatccaaaagtggaaaaggtaaactcaaagctaaactcgaaaagaaaaaaggtatgtccggagggtccgagagtgaagaaggtatgtctggaagtgaaggaggtatgtctggtggtggaggaagtaaatccaaaagtaaaaaaagtaaactcaaagctaaattgggaaagaaaaaaggtatgtccggaggcatgtcaggaagtgaagaaggtatgtctggaagtgaaggaggtatgtccagtggtggaggaagtaaatccaaaagtaaaaaaagtaaactcaaagctaaattgggaaagaaaaaaggtatgtccggaggcatgtcaggaagtgaagaaggtatgtctggaagtgaaggaggtatgtccggaggtggaggaggtaaatccaaaagtagaaaaagtaaactcaaagctaaattgggaaagaaaaaatgtatgtccggaggcatgtcaggaagtgaaggaggtatgtctggaagtgaaggaggtatatccggaggtggtatgtctgggggcagtggaagtaaacacaaaattggaggaggtaaacacggaggtcttggaggtaaattcggaaagaaaagaggcatgtccggaagtggaggaggcatgtcaggaagtgaaggaggtgtgtctggaagtgaaggaagtatgtctggaggtggtatgtctgggggtagcggaagtaaacacaaaattggaggaggtaaacacggaggtcttagaggtaaattcggaaagaaaagaggtatgtcaggaagtgaaggaggtatgtctggaagtgaaggaggtatgtcggaaagtggtatgtccgggagtggagggggtaaacacaaaatcggaggaggtaaacacaaatttggaggaggtaaacacggaggtggaggtggccacatggcggagtaaagaacaatggtcaagttgttccaacattaagcagatcattgtgcattagttcaagattgtatgattgggaaagtaaaagaaagaaaaaatattttctaataagttttatgtttatatgtaatgttgaatctgattattatgataaaaagacataaatgtgatacaatgtttattttaagaacaataataatgtggcaacagttttagtc

SEQ ID NO: 117359 - DNA, 498 bp, Arabidopsis thaliana
aatacgactcactttagggaaagctcgtacgcctgcaggtaccggtccggaattcccgggtcgacccacgcgtccgggtatgtctggtggtggaggaagtaaatccaaaagtaaaaaaagtaaactcaaagctaaattgggaaagaaaaaaggtatgtccggaggcatgtcaggaagtgaagaaggtatgtctggaagtgaaggaggtatgtccagtggtggaggaagtaaatccaaaagtaaaaaagtaaactcaaagctaaattgggaaagaaaaaaagtatgtccggaggcatgtcaggaagtgaagaaggtatgtctggaagtgaaggaggtaaacacggaggtcttggaggtaaattcggaaagaaaagaggcatgtccggaagtggaggaggcatgtcaggaagtgaaggaggtgtgtctggaagtgaaggaagtatgtccggaggtggtatgtctgggggtagcggaagtaaacacataattggaggaggt

SEQ ID NO: 117360 - DNA, 1838 bp, Arabidopsis thaliana
  unsure (1)..(1838): unsure at all n locations
gggcagtggctgctcttctctctcttactcatcatcttccacttgcaatgccactgttttctctatttcttcttctccatcatcttcttcttcgctgaaactcaatccaagtagcttccttttccagaaccctaaaactctgagaaatcagccacctttgaggtgtgggagatcatttaagatggaatcacagaaacccattttcgatttggagaagttagatgatgagtttgttcagaaactggtttacgatgctctcgtttggtcttctcttcacggactcgtcgttggtgacaaaagttatcagaaatcaggaaatgttccaggggttggattgatgcacgcacctattgcattgctaccaactgcattcccagaagcttattggaagcaagcttgtaatgttactcctcttttcaatgaattgattgatcgtgttagcttggatggcaaattcttacaggatagtctctctagaacgaagaaagttgatgtctttacatctagacttcttgacattcactccaagatgctagaaagaaataagaaagaggacattcgtttgggtttacaccggtttgattatatgcttgacgaagaaacaaattcacttcttcagattgagatgaatactatctcgtgttcgtttcctgcccttagtcgtcttgttagccagctacatcagtcattgcttcgatcttatggggatcagattggcatagactctgaacgtgtacctataaacacatccacaatccaatttgctgatgcattggctaaagcttggttggagtacagtaacccaagagcggtagtcatggtaattgtacagccagaagaacgcaacatgtacgatcaacatttgctgagcagtatattgagagaaaagcataatatagttgtcatcaggaagactctagcagaagtcgaaaaagaagggagtgtacaagaggatgaaacccttattgttggcggccaagcagtcgcagtggtttatttcagatctggctatactcctaatgatcatccgtctgaatcagaatggaatgctaggctgcttatcgaggagtcttcagctgtcaaatgcccgagcatagcttaccatttaactggctccaagaaaatccagcaagaactggctaaaccaggtgttctcgagaggtttctggacaacaaagaggacattgctaagctgaggaaatgctttgctgggctttggagcttggatgactcagaaattgtcaagcaggctatcgaaaaacccggattgtttgttatgaagcctcagagagaaggcggaggaaacaacatctatggagatgatgtgagggaaaatcttttgagactgcagaaagaaggagaggaaggaaacgctgcgtatatcctgatgcagaggatattcccaaaagtctcaaacatgttcttggtgcgagaaggcgtttaccataagcatcaagctatatcagaactcggtgtctatggtgcttacctcaggagcaaagacaaagttatagtaaacgagcagagtggttatctaatgcgcacgaagatcgcatcatcagatgaaggcggcgttgcagctggttttggagtcttggacagcatttatctgaattgagatggataactttcacaaccatactgatcaattttactggtttattccttcttcttctcttcttgcttgttaaagatttgtgtattaatcatgaagatcaataagactaggcaaagctctttcacctttaaaaaaaaaacacaaaggtcggccgctctataggatcccagcttacgtacgcgtgcataccacgtnnnnnnnnnnnnnnnnnnnnnnnnnn

SEQ ID NO: 117361 - DNA, 911 bp, Arabidopsis thaliana
  unsure (1)..(911): unsure at all n locations
acgactcactatttggaaagctggtccgcctgcaggtaccggtccggaattcccgggtcgacccacgcgtgcgcaagaaaatccagcaagaactggctaaaccaggtgttctcgagaggtttctggacaacaaagaggacattgctaagctgaggaaatgctttgctgggctttggagcttggatgactcagaaattgtcaagcaggctatcgaaaaacccggattgtttgttatgaagcctcagagagaaggcggaggaaacaacatctatggagatgatgtgagggaaaatcttttgagactgcagaaagaaggagaggaaggaaacgctgcgtatatcctgatgcagaggatattcccaaaagtctcaaacatgttcttggtgcgagaaggcgtttaccataagcatcaagctatatcagaactcggtgtctatggtgcttacctcaggagcaaagacgaagttatagtaaacgagcagagtggttatctaatgcgcacgaagatcgcatcatcagatgaaggcggcgttgcagctggttttggagtcttggacagcatatatctgatttgagatggataacattcacaaccatcttgatcagtttttcttctggtttattccttcttcttctcttcttgcttgttaaagatttgtgtattaatcatgaaggtcaataagactaggcaaagctctttacaattctttccacaggaccgcaaagcctacattgcttattgttatttttagaccgtgtgagatgattactcgtttataaagatcatgaattgaataagataagatcaatcatggaaaaaaaaaaaaaaaaaagnnnnnnnnnnnnnnnnnnnnnnnnnnnnnnnnnnnnnnnnnnnnnnnnnnnnnnnnnnnnnnnnnnnnnnnnntcat

SEQ ID NO: 117362 - DNA, 545 bp, Arabidopsis thaliana
  unsure (1)..(545): unsure at all n locations
cagtaccggttcggtaggcccgacgtcgacccacgcgtccggaaaagcataatatagttgtcatcaggaagactctagcagaagtcgaaaaagaagggagtgtacaagaggatgaaacccttattgttggcggccaagcagtcgcagtggtttatttcagatctggctatactcctaatgatcatccgtctgaatcagaatggaatgctaggctgcttattgaggagtcttcagctgtcaaatgcccgagcatagcttaccatttaactggctccaagaaaatccagcaagaactggctaaaccaggtgttctcgagaggtttctggacaacaaagaggacattgctaagctgagggaaatgctttgctgggcttttggagcttggatgactcagaaattgtcaaagcaaggcttatccgtaaaaaccccggattgtttgtctattgaagccctcagacgagcaaggcggggggaaacaacctctctggtggcgattgattgttaaggggtaaaccttttttgaggccttccagaaagnacngga

SEQ ID NO: 117363 - DNA, 2285 bp, Arabidopsis thaliana
acccacgcatgcgcatcttctctacattcgtctttcatcgcagacaacaaatcttcaatcttcgtcaattccaaaccaccacaatccttcgcaacccaatctccatcgctccgatccagattccgatggacgccaccgagcagtctctccgtcaatctctttccgagaaatcctcatccgtcgaagctcagggtaacgccgtccgagctctcaaggcttcccgtgcagctaaaccagaaatcgatgctgccattgagcaactcaacaaattgaagctcgagaaatctaccgtcgagaaggagcttcagtctattatcagtagctccggtaatggttcgcttaaccgtgaggcttttcgaaaagctgttgtcaatactctcgagcggcgtttgttctatatcccttcgtttaagatctacagtggcgtcgctggactttttgattatggtcctcctggctgtgctattaaatccaatgttctcagcttttggcgtcaacatttcattcttgaggagaacatgctagaagttgattgtccatgtgtgacaccagaggttgttctcaaggcatctgggcatgtagataagttcactgatcttatggttaaggatgagaaaactggaacatgttaccgtgctgaccacttgctcaaggattattgtaccgagaagctggagaaagatcttaccatctctgctgagaaagctgctgaattgaaggatgttcttgctgttatggaagatttttctcctgaacagctaggtgccaagatcagggagtatgggatcactgctccagacacgaagaatccactctctgatccttacccgtttaatttgatgtttcaaacatccattggcccatctggtttgattcctggttacatgcgtcctgaaactgctcaaggtatttttgtcaactttaaggacttgtactattacaatgggaagaaacttccttttgccgcggctcaaattggtcaagcctttagaaatgagatatctcctcgacaagggcttcttagagttcgtgaattcacgctggcagagattgagcacttcgttgatcctgagaataagtcacatcctaagttctctgacgtagcaaaattggaattccttatgttcccaagggaagaacaaatgtctggccaatctgccaaaaaactttgccttggtgaagctgttgctaaaggtactgtgaacaatgaaactctaggatacttcattgggagagtgtatcttttccttactcgtcttggcattgacaaggaacggctgcgcttccgtcagcatctagcaaatgaaatggcccactatgcagcagattgttgggatgctgaaattgaaagttcatatgggtggattgaatgtgttgggattgcagataggtctgcttacgacttacgtgctcactctgacaaaagtggtactcctcttgtggctgaagagaaatttgcagaacctaaagaagtagagaaacttgtgataactcctgtgaagaaagaactgggtcttgcattcaagggaaatcaaaagaatgtggttgaatctttggaggcgatgaatgaggaagaagctatggagatgaaagcaaccctggaatccaaaggggaagtggagttttacgtgtgtaccctaaagaaaagcgtgaacatcaagaaaaacatggtgtctatatcaaaggagaagaagaaagagcaccagcgggttttcactccatcagtgattgaaccatcgtttgggattggtcggatcatatattgtctgtatgagcattgtttcagcacaaggccaagcaaagcaggggatgagcagttgaacttgttccgtttccctcctcttgtagctcccatcaagtgcacggttttcccgcttgttcagaaccaacaattcgaggaagtagccaaagttatttccaaggaactcgcctctgtcggtatctcccataagattgacatcactggtacatcgatagggaagagatatgcgagaaccgatgagcttggagtgccatttgcaataacagtggactcggatacatcagtgacaatcagagaaagagacagcaaagatcaagtccgagtcaccttgaaggaggcagcttccgttgtgagctcagtctcagaggggaaaatgacgtggcaagacgtctgggcaaccttccctcaccattcttctgctgctgcagacgagtagctagccccttgtttttttccgaattaaaaaccaaagtgttaaattaattgttgctgaatctactcattttcggtgttttgtttagag

SEQ ID NO: 117364 - DNA, 2396 bp, Arabidopsis thaliana
  unsure (1)..(2396): unsure at all n locations
ctcactatagggctcgagcggccgcccgggcaggtaagtctcacctttcaattcaaaaccccttccatttttgtgattaatatgcctacttggtggggaagaaagtcctgcaagaacaaggacgataatcacagaggaatcatctccacagatagagatatcaagagctctgctgttgttgttgatcctcctctcactcctactcgtggtggtacacctcgttgcagtcgtgaattcgctggagcttcttctgctttctctggttttgactctgattctaccgagaagaaaggtcaccctcttcctcgtcctttgctctctcctgtttcgatccatcatcaagatcatgtaagcggatccacttctggatctacatctgtttctagcgttagctcatctggatcagctgatgatcagagtcaacttgttgcttctaggggtcgtggtgatgtgaaattcaatgtagcagcagcaccacgtagtcctgagagagtttctccaaaggcagctactattactactaggcccacgtctccacggcatcagcgtttgtctggagttgtgagcttagagtcttctacagggaggaatgatgatggaaggtcctcctctgagtgtcatcctttgcctcgaccacctacttctcctacaagcccttctgctgtgcatggttccaggattggaggaggctacgagacctctccttcggggttttccacgtggaaaaaagggaaatttcttgggagtggcacctttggtcaagtctatcttggtttcaacagtgagaaagggaaaatgtgtgctattaaagaggtcaaggtaatttctgacgatcaaacatcaaaagaatgtctgaagcaactaaatcaggagataaatttgcttaaccagctttgtcatccgaatattgtccagtattacggaagtgaactgagtgaagaaaccttgtccgtctacttggagtacgtgtcaggtggttcaatccataaactacttaaggattatggttctttcactgaacccgttatccaaaactacacgcggcagattcttgctgggcttgcctatttacatggacgaaatacagtacatagggacatcaaaggagcaaatatattagtggatccgaatggtgaaatcaagttggcagactttgggatggccaaacatgtaacagccttttctactatgctttcttttaaagggagtccttactggatggcacccgaggttgtgatgagccaaaatggctacactcatgcagtcgatatctggagtttgggttgtactattctggaaatggcaacatcaaagccaccttggagccagtttgaaggggttgctgcgattttcaaaatcggaaacagtaaagacaccccggaaatacctgatcacctttcaaatgatgcaaagaattttataaggctttgtctgcaacgaaatccgacagtacgtcctacagcttctcagcttctagaacacccttttctacgtaacacaacaagagtggctagtactagtttgcccaaagacttccccccacgttcctatgatggaaacttctcactgcagcctacaagggaaccctatccagggagactgagccatgataattatgcaaaacagccattgtctagaactataaagagcccgagcagagaaaacgtaagacctatcacatccttaccagtatctccatgttcaagccctttacgccaacttgggccagcatacaaaagttgtttcctgtcacctcctcacccgtcttacgcatttcctgggcaagacagtgggtacaacctagcagagtttgctgcaagccctttcaggatgaagaaagacgcaatgatggaaccatctagtttcaggactcaaacaccgaattcaccattgagatcaagactggtgtagaaatggagcaaagattgagagactgaaagccacatactataaacaaggcccaatgaccatgtataaaacagtgtctacccctagttttggccttctccttctcaacacccagggaaatatgaagttatgagaccttagttgtgtgtgtgtggagcatctcctagaagtggagatttttggaacaagaaggagaaatttggggggaaaacagaaagatgtaaagagaaacatgaaaatgaatacaaagttagtgtgagaagtatagatagtaagttgtgttgtcacacaaagataatattcaaccatttgttttcaacctacagtgtgaatatacttttcagaaagtaaattagttactcaaaaaaaaaaaaaaaggnnnnnnnnnnnnnnnnnnnnnnnnnnnnnnnnnnnnnnnnnnnnnnnnnnnnnnnnnnnnnnnnnnnnnnnnnnnnnnnnnnnnnnnnnnnnnnnnnnnnnnnnnnnnn

SEQ ID NO: 117365 - DNA, 560 bp, Arabidopsis thaliana
cggtctgaatttaggcgcactatagaattactatgacgtcgcatgcacgcgtacgtaagctcggaattcggctcgagtgcgagaacaaggacgataatcacagaggaatcatctccacagatagagatatcaagagctctgctgttgttgttgatcctcctctcactcctactcgtggtggtacacctcgttgcagtcgtgaattcgctggagcttcttctgctttctctgggtgtgactctgattctaccgagaagaaaggtcaccctcttcctcgtcctttgctctctcctgtttcgatccatcatcaagatcatgtaagcggatccacttctggatctacatctgtttctagcgttagctcatctggatcagctgatgatcagagtcaacttgttgcttctaggggtcggggtgatgtgaaattcaatgtaccagcagcaccacgtagtcctgagagagtttctccaaaggcagctactattactactaggcccacgtctccacggcatcagcgtttgtctggagttgtgagcttagagtcttctacagggaggaat

SEQ ID NO: 117366 - DNA, 1797 bp, Arabidopsis thaliana
  unsure (1)..(1797): unsure at all n locations
tacgacccactatagggttagctggtacgcctgcaggtaccggtccggaattcccgggtcgacccacgcgtccgaatcgaaaaccctaggagagataaaaacaaaaatctagacggagatttatggcgacagcgaatcctggccgtggaggtggtagaagaggcggtggagctatggatgacgataagttggtcttcgagactaccgatggaattgagcccatcacgagcttcaatgatatgggcattaaggaagatgtgcttcgcggtgtctacgaatatggattcgagaagccttccgcgattcagcagagggctgttatgccgattcttcaaggacgtgatgttattgctcaagctcagtccggtaccgggaagacatctatgattgctctctccgtttgtcaagtcgttgatacttcttctagagaggttcaggccttgatattatccccaacaagagagctggctacacaaacagagaagacgatacaagctattggattacatgccaatattcaggcacatgcttgcatcggtgggaatagtgttggagaagacatcaggaagctggagcatggtgttcatgttgtgtctgggacacctggtcgtgtctgtgacatgataaagaggagaagtcttcgtaccagagctattaaacttctgattcttgatgaatcagatgaaatgctgagcagagggttcaaggaccagatctatgatgtttacagatatcttccaccagatcttcaggtttgcttggtttctgcaactcttcctcacgagattttggagatgacatccaagtttatgacagaaccagtgaagatacttgtgaagcgtgatgagttgactcttgaaggaatcaaacaattttttgttgctgttgagaaggaagagtggaaatttgatacactctgtgatctttatgacacgcttactatcactcaagctgttatcttctgcaatactaaacgaaaggtggattatcttagtgagaaaatgagaagtcacaacttcactgtctcatcaatgcatggagacatgcctcagaaggagagagacgccatcatgaatgagtttcggtcaggtgatagtcgtgttttgataacaacagatgtatgggcacgtgggattgatgtgcaacaagtttctcttgttatcaattatgatctccccaacaaccgtgagctctacatccatcgtattgggcggtctggtcgattcgggcgtaagggtgttgcaatcaactttgttaaaagcgacgacatcaagattctcagagacattgagcagtactacagtacccagattgatgagatgccaatgaatgtagctgatcttatctaaaagagcttgtctgagatttttgtgctttcagcggggaagtgtctggatgaaaaagtattgttgagcgcttctgtcaaattattgcactatcttaacggtgtatttcctttgatgtttctgtgggctcttttgaacaaacttaaactcgcgtgtggtaaatgtttaatgacttgagaagcgatttaggtttagggtttggaccgtttggtttttcgtttcctcgtaattgattctgggggctttgattgtggtttgtgggtcaaaactctcaactatcactacttgtaagacttttgctcgacagttgaaacggttcattgttatcttatttcgtaaagcttggatcattgcnnnnnnnnnnnnnnnnnnnnnnnnnnnnnnnnnnnnnnnnnnnnnnnnnnnnnnnnnnnnnnnnnnnnnnnnnnnnnnnnnnnnnnnnnnnnnnnnn

SEQ ID NO: 117367 - DNA, 611 bp, Arabidopsis thaliana
  unsure (1)..(611): unsure at all n locations
tcagaaggagagagacgccatcactgaatgagtttcggtcaggtgatagtcgtgttttgataacaacagatgtatgggcacgtgggattgatgtgcaacaagtttctcttgttatcaattatgatctccccaacaaccgtgagctctacatccatcgtattgggcggtctggtcgattcgggcgtaagggtgttgcaatcaactttgttaaaagcgacgacatcaagattctcagagacattgagcagtactacagtacccagattgatgagatgccaatgaatgtagctgatcttatctaaaagagcttgtctgagatttttgtgctttcagcgggggaagtgtctggcatgaaaaagtatttggttgagcgcttctggcaaaattattgcacctatccttaccgggggaatttcccttgatggttctgtggggccctttgacaaaccttaacccncggggggggaaaggttaaaggccttgagaaccgactttgggttaggggttgncccgctcgggttccggtcccccgaattactccccgggggttaattggggtttggggaaaccccccaccccctgaaaccttccccagtgangggcctttacng

SEQ ID NO: 117368 - DNA, 2998 bp, Arabidopsis thaliana
  unsure (1)..(2998): unsure at all n locations
nnnnnnnnnnnnnnnnnnnnnnnnnnnnnnnnnnnnnnnnnnnnnnnnnnnnnnnnnnnnnnnnnncttgtcgcgtgggcggacgcgtggggttacaaagcctttcaaaaacctcactctctcaactctcaaaccttatctccttccttctcttctcctctcctctccgtcgagcttactatctccacaaaatggcgtcgacggtaggagttccatcactataccaagttcctcaccttgaaatctccaaacccaattccaaaaagaggtctaattgtttatctttatctctcgataagcctttcttcactcccttatctcttgttcgtagaactcgtcgtatccattcctcttctcttcttgttccttctgctgttgctactcctaattctgttctcagtgaagaagctttcaaaagtcttggtctttctgaccatgacgaatatgaccttgacggcgacaacaacaacgttgaagctgatgatggtgaagaactcgctatctctaaacttagtttgcctcaacgtcttgaagagtctcttgagaaacgtggtatcactcatctcttccccattcagagagctgtgttggtacctgcactgcaaggaagagatattatagctcgtgcaaagacaggaactggaaagactttggcttttggtattcctatcattaaacgtctcactgaagaagctggagactacactgctttcaggaggtctggtcgtcttcctaagttccttgtccttgcgccgacccgagagctggctaagcaagtggagaaggagattaaggagtctgcaccttatttgagcactgtttgtgtgtatgggggagtttcttataccattcagcagagtgctttaactcgtggtgttgatgttgttgttggaactcctggaagaatcattgatttgattgaaggaaggagtcttaaattgggagaagttgagtatttggtacttgatgaagctgatcagatgcttgctgttgggtttgaggaggccgtggaatcgattcttgagaatcttccaactaagcgacaaagtatgcttttctcagcaactatgcctacttgggttaagaagttggcgaggaagtaccttgacaatcccttgaatattgatctggttggagaccaagatgagaagctcgcagagggtatcaaactttatgcaatcgcaaccacatcgacatcaaaacgcactattctaagcgaccttattacagtgtatgcgaagggtggcaagaccattgtttttacccaaactaaaagagatgcagacgaagtttctcttgcattgtcaaacagtatagctaccgaagcacttcatggagatatatctcagcatcaaagagagagaacactcaatgctttccgtcaagggaaattcaccgtattagttgccactgatgttgcatctcgtggacttgacatcccgaacgtagatctagttatccactatgaacttcctaatgacccagaaacttttgtgcaccgttctggtcgtactgggcgtgcagggaaagaaggctctgccattctcatgcacaccagcagccaaaagagaacagtgaggtctctggagcgtgacgtaggctgccattttgaattcattagcccaccaactgttggagacttgttggaatcgtcagcagaccaagtggtggccactctaaatggtgttcaccctgactccataaagtttttctcagcaactgctcaaaaactatatgaggagaaaggaacagatgctttagctgcagctctagctcacctgagtggtttctctcagccgccttcatcaagatctctcctcagccatgagaagggatgggtgactttgcaattgatccgagatccaacgaacgctagaggctttctgtctgcgaggtctgttactggttttctttccgatctttaccgtacagctgcagatgaagttggaaaaatcttcttgatcgccgatgacaggatccaaggagctgtatttgatctaccagaggagatcgcgaaagagctcctagagaaagatgtccccgaaggcaacagtttatccatgataacaaagttacctccacttcaagatgacggaccatctagtgataactacggacggttctctagcagagacaggatgcctagaggaggaggaggttctagagggtcaagaggcggtagaggaggatcatcacgaggccgtgatagttggggaggtgatgatgacagaggtagtagaaggagcattggtggaggaagcagctggtcccgaggtggtagtagttccagaggaagttctgatgattggttgatcggtggcagaagttcatcaagcagcagagctccttcgcgggagagaagttttggaggttcatgcttcatttgtgggaaatctggacacagggcaacagattgtcctgataagagaggattttagagttatcgtagcaaatggtttctgctcttgggagaaagatccttgtcctttttggtgttcttaatgcgaatcttttcgtgcttgcttcaacggtttgtttcagacggtagagaagcaatcagggaggaggatacatgcttcggacaaggtagagcagaaataaataagagagaggcaatagcaaaagtaaaggagaaggttttcctcaaattggcattttcagagtttgcgtgagaaacaagggaaagctgatggatctttttatgttagggttattataatagtcttaatgatcagtttccatgtttctaaggttttgtttgatttaagtggttattagtcagtctacttacactacttttattttcatttttgtacgttttctattgttatatgtgaattcggatcacatgtgtttggacagaagtaactatgtcattataatagaatcttatgccaagaaaaaaaaaaaaaaagggcggccgctctagaggatccaagcttacgtacgcgtgcagtcgacgtcatnnnnnnnnnnnnnnnnnnnnnntcgtcctaaa

SEQ ID NO: 117369 - DNA, 655 bp, Arabidopsis thaliana
  unsure (1)..(655): unsure at all n locations
ccggnaaantggngtcancncattgngggaatctggcccaggcacagatncctgatagngggatttagagttancgtancaatggttctgcnctgggagaaagancntgncctttttggtgtccttaatgcgaatctttcgtgcttgcttccaccggtttgtttcagacggtagagaagcaatcagggaggaggatacatgcttcggtcaaggtagagcagaaataaataagagagaggcaatagcaaaagtaaaggagaaggttttcctcaaattggcattttcagagtttgcgtgagaaacaagggaaagctgatggatctttttatgttagggttattataatagtcttaatgatcagtttccatgtttctaaggttttgtttgatttaagtggttattagtcagtctacttacactacttttattttcatttttgtacgttttctattgttatatgtgaattcggatcacatgtgtttggacagaagtaactatgtcattataatagaatcttatgccaagagacttggtgccggaaaaaaaaaaaaaaaaaataacgtacgcgtgggcggacgcgtggnnnnnnnnnnnnnnnnnnnnnnnnnnnnnnnnnnnnnnnnnnnnnnnnnnnnnnnnnnnnnnnnngtagctg

SEQ ID NO: 117370 - DNA, 1460 bp, Arabidopsis thaliana
  unsure (1)..(1460): unsure at all n locations
gttttagattgttgtaagactttcgagaagccgtctccgattcagtcacatacgtggccgtttttgttagatgggcgtgatcttatcgggattgcgaaaactgggtcaggtaagacattggcttttgggattcctgcgattatgcatgtgttgaagaaaaataagaagattggtggaggatcaaagaaggttaatcctacttgtttagttctttctcctacacgagaattggctgttcagatttctgatgttttgcgtgaagctggagaaccgtgtggtttgaaatcgatttgtgtgtatggtggaagctctaaagggcctcaaataagtgcaattcgatctggagttgatattgtcattggtacgcctggtcgtttgagagacttgattgagtctaatgtgcttcgtctctcggatgtttcctttgtcgtattggatgaagcagatcgaatgcttgatatgggtttcgaggaacctgtccggtttatattgagtaacacaaataaagttcgtcaaatggttatgttcagtgcaacttggcctttggatgttcacaaattggcccaggaattcatggatccaaatccaatcaaggtgatcataggttctgtagacttagctgccaaccacgacgttatgcaaatcattgaggtcttggatgaacgtgcgcgtgatcagcgtctcattgcattactagaaaaataccataaatctcaaaagaacagggttttggtatttgctttatacaaggtggaagctgaacgtctcgagcgttttcttcagcaaagaggttggaaagctgtatctatacacggaaacaaagcacagagcgaacgtaccaggtctttatcattgttcaaagaaggatcctgcccgttactggtggctactgatgttgcagcaagagggcttgatatcccggacgtggaagttgtgataaactacactttccctttaacaacagaggattatgtacacagaatcgggaggacaggaagagcgggtaaaaagggcgttgcacacaccttcttcacgccactgaacaagggtcttgcaggagaacttgtgaatgttcttagggaagcaggacaagtagtgccagctgatcttttgaagtttggcactcatgtaaagaaaaaggaatcaaaattgtatggagctcatttcaaagaaatagctgctgatgctcctaaagctacgaagatcacattcgataattctgatgacgaagactagcttagtttattattttaatggtatcattattttattatatttacttggacaatgaaacctgcatttgattttcgtttgtggtctggggcttggcccgaataacaaaaacaaatatatttcagaattttcattatatttgtatgcaattttgtgttactagttattaaacttttatttgtccacaaaaaaaaaaaaaannnnnnnnnnnnnnnnnnnnnnnnnnn

SEQ ID NO: 117371 - DNA, 1251 bp, Arabidopsis thaliana
  unsure (1)..(1251): unsure at all n locations
atttcctgtcactgtgaagtctttcaaggatcggtatctcaagaagccttacattatcaatctcatggatcagctcacacttatgggtgttacccaatattatgcttttgttgaagagagacagaaggtgcactgccttaacacgctattctctaaggtcagagttttgttacagtcttaaaaccccaatgttttattttctggctacttgatgtatcttttaaaggaaatattgttttatctattgcagctccaaataaaccaatccattatcttttgcaactctgttaatcgtgttgagctgttggccaagaaaattacagaacttggttactcatgcttctatatccatgcaaagatggttcaagaccatcggaacagggttttccatgatttccgcaatggtgcatgcagaaatcttgtttgcactgatttgtttacacgtgggattgacattcaagctgtgaatgtggtgataaatttcgattttcctaggacttctgagtcgtatctacatagggtaggcagatcaggacgatttggacaccttgggttggctgtgaatttggtaacttatgaggaccgcttcaaaatgtatcagacagagcaagaacttggaactgaaatcaagcccataccttcacttatcgacaaggcaatctactgtcagtaacttctacctggtgtacattctctacccggcaaggcattgatggactaaccggtgtagtgaggaggcaaatcattcagctttggcagccactagctcgttctagagatgaaggcaacacatagagtactgtactgaggcaagaagagacagtataggtggttgatggcgatggaagcggttgattgtgtctaaacctttaaagcagtaccggcttgatttggtttgaattgaagacttcttctgctgcatgatatgaaccttaaagttgtcttctctcatctctaattttcatgttcttagaaaccttttcaccttttcattttgatgttctctcatcttgaagacttgagaggaatttccgagtagtgagatcaaaccgaagaagacattttaacttcattcgcttgtttattgcttttagatctccacctgtgcctgaactgtttaaggattatagttggtgtgtgtcaagtcaagtgtcttagcattttaaaaaaaaaaaaaaaaagnnnnnnnnnnnnnnnnnnnnnnnnnnnnnnnnnnnnnnnnnnnnnnntgtcctaannnnnnnnnnnnnn

SEQ ID NO: 117372 - DNA, 827 bp, Arabidopsis thaliana
  unsure (1)..(827): unsure at all n locations
nnnnnnnnnnnnnnnnnnnnnnnnnnnnnnnnnnnnnnnnnnnnnnnnnnnnnnnnnnnnnnnnnnnnnnnnnngaccacgcgtccgcatgcttctatatccatgcaaagatggttcaagaccatcggaacagggttttccatgatttccgcaatggtgcatgcagaaatcttgtttgcactgatttgtttacacgtgggattgacattcaagctgtgaatgtggtgataaatttcgattttcctaggacttctgagtcgtatctacatagggtaggcagatcaggacgatttggacaccttgggttggctgtgaatttggtaacttatgaggaccgcttcaaaatgtatcagacagagcaagaacttggaactgaaatcaagcccataccttcacttatcgacaaggcaatctactgtcagtaacttctacctggtgtacattctctacccggcaaggcattgatggactaaccggtgtagtgaggaggcaaatcattcagctttggcagccactagctcgttctagagatgaaggcaacacatagagtactgtactgaggcaagaaagacagtataggtggtgatggcatgggaacggtgattgttctaacccttaagcataccggtgatttggttgaatgaaactctcttgtggtgattgacctaaagggctctctatcttattttaagtctagaacctttacctttatttgtgtctctttttaaactgagagatttccatgtgaacaaccggagacattactcatcgctgttttgtttaacccactggccgactgtaaggtttatggggggaagcaaaaaaaa

SEQ ID NO: 117373 - DNA, 2400 bp, Arabidopsis thaliana
  unsure (1)..(2400): unsure at all n locations
cggacgcgtgggctcacgcgagaactaaatanagatttacaatatgacccaattggtcgctctctggcgcgctttcggcgctcgcgcggacctttgtcgaaaaatatcaatcccagaatttcgcttcattttggattagaaactcccagatctgctactctctatctccgattttgtgatttttcaaaccctacatttctccggaagagtttagttttttctctgtaactaaaccgagatttttttttcaaaattccgacattaccctaggttgtgtattaccgtagaagaccctagttcctttgtggtattcttggtgtacagatcccttccttagtcagagtttttggttattagtgtttagaggtttgtgatgaacaatcgaggaaggtaccctcctggaattggcgctggccgtggagcctttaaccctaaccctaattaccaatcacggtcgggttatcaacaacatccgccgccccaatacgttcaacgcggtaattacgctcagaatcaccaacaacagtttcaacaagcgccgtctcagccgcatcaataccaacagcaacagcagcaacaacaacaatggcttcgaagaggtcagatccccggcggtaacagtaacggtgacgctgttgtagaagttgagaaaactgttcaatccgaagttatcgacccaaactcggaagattggaaagcaaggctaaaactacctgcacctgatactcgatacagaacagaggatgtgacagccaccaaagggaacgagtttgaagattactttttgaaacgggagcttctcatgggaatatatgagaagggttttgaaagaccttctcctattcaggaagagagtattccaattgccttaactggtagagatatccttgccagagcaaagaacgggactggaaagaccgccgccttttgtattcctgtcttggaaaaaattgaccaagataacaacgttattcaagctgttataattgttccgactcgagagttagcccttcagacatcacaggtctgtaaagagctgggtaagcatttgaagattcaagtcatggtgaccactggtggcaccagtctgaaagacgatatcatgcgtttgtatcagcctgttcatttactggtaggaactcctgggagaattctggatcttaccaagaaaggtgtttgtgttttaaaagattgttcggtgcttgttatggatgaggctgacaagcttttgtctcaagagttccaaccttcagtggaacatttgattagctttcttccagaaagtcgtcagattttgatgttctcagccaccttccctgtcactgtcaaggattttaaggataggtttctgacgaatccttacgtcatcaatctcatggatgaacttacgctcaagggtattacccaattctatgctttcgttgaagaaagacagaaaattcattgcttgaatacactattctccaagctgcaaattaaccaatcaatcatattctgcaattctgtaaatcgtgtggagctcttagccaagaaaatcacagaacttgggtattcatgctcttacatccatgcaaagatgcttcaagaccaccgaaacagagtgttccatgacttccggaatggtgcatgccgtaatctcgtgtgtactgacttgttcacacgtggtattgacattcaagccgtcaatgtggtgataaactttgatttcccaaagaatgctgaaacttatctccatagggttggacgatcaggaaggtttggccatcttggtctagctgtgaatcttatcacctatgaagatcgatttaacctttaccggattgagcaagagcttggaacggagatcaagcaaattcctccacatatcgatcaggcaatttattgccaataaccaagggtaaaccaccttggtctgctgttaggtgaatcagtaataagtggttggttgaagccatggttagacagttgtcttatctagccatgcaggacaaggacaacccaaaaaggcttcacattctgcctcttacctccataatgtttttttctgcgtctttgggattcctttatttttaaagattaactatagtcaaggctaaaaggtttgaaataccgggtagtattacaaaagtgaagtcttttatttagttttaacaagtcgtttgagctattgtttctttctatgccgtagactgatcagtggttacagtgttgtgatgcgtcttcaaggagctgtggtttcatgactctttcatgatccttttccagctttccaacttcaataataagtctttgagacctttnnnnnnnnnnnnnnnnnnnnnnnnnnnnnnnnnnnnnnnnnnnnnnnnnnnnnnnnnnnnnnnnnnnnnnnnnnnnnnnnnnnnnnnnnnnnnnnnnnnn

SEQ ID NO: 117374 - DNA, 873 bp, Arabidopsis thaliana
  unsure (1)..(873): unsure at all n locations
cggacgcgtgggctcacgcgagaactctggcttcgtctctatattattgacccttttgatctctctctgtctcgctttcttcctcgcgtggacctttttcgaaaaatatcaatcccagaatttcgcttcattttggattataaactcccagatctgctactctctatctccgattttgtgatttttcaaaccctagatttctccggaagagtttatttttttctctgtaactaaaccgagatttttttttcaaaattccgacattaccctaggttgtgtattaccgtagaaaaccctagttcctttttggtattcttggtgtacagatcccttccttagtcagagtttttggttattagtgtttagaggtttgtaatgaacaatcgaggaaggtaccctcctggaattggcgctggccgtggagcctttaaccctaaccctaattaccaatcacggtcgggttatcaacaacatccgccgccccaatacgttcaacgcggtaattacgctcagaatcaccaacaacagtttcaacaagcgccgtctcagccgcatcaataccaacagcaacagcagcancaacaacaatggcttcgaagaggtcagatccccggcggtaacagtaacggtgacgnttgttgtagaagttgggaaacttgtttcaaatccggagttatcggcccaaacttcggnagntttggnaagcaaggctnaaacntccttnacctgnttcttggtttcaggccaggggnttttncagcccccnaaggggccgggntttnaggttncttttttaacggggggttnttttgggnttttttggnggggttttnaagccctttccttttggggggggttccnttgctttnctgg

SEQ ID NO: 117375 - DNA, 1324 bp, Arabidopsis thaliana
tcgtatcattgatctgatgaaaaggggagctttgaatctatcagaggttcagtttgtggttcttgatgaagctgatcagatgcttcaagttggatttgcggaagatgttgaaataatattgcagaagttgccagcgaagcgtcagagtatgatgttttctgcaacaatgccaagttggatcagatctctcaccaagaagtacctgaacaatcctttgacaattgatcttgttggagattcagatcagaaacttgcagatgggattactatgtattctatcgctgcagattcttatggaagagcatccatcattggtcctcttgtaaaggaacatggcaaaggaggaaaatgcattgtctttacccaaacaaaacgtgatgcagatcgccttgcatttggattggcaaaaagctataaatgtgaagctttacacggtgacatatctcaagctcagagagaaagaacacttgctggtttcagggatgggaatttcagtattcttgttgcaactgatgttgctgcccgtggacttgatgtacctaatgtcgatttagtaattcattatgagcttcctaataacacggagacgtttgttcaccgaacggggcgaactggtcgtgctggaaagaaaggaagcgcgattctcatccacggtcaagatcaaaccagggctgttaaaatgattgagaaagaagtcggaagcagattcaatgagctgcctagcattgctgtggaaagaggaagcgcaagcatgtttgaaggagtaggtgctagatctggtgggtcgttcggaggaggtcgatcaggcggtggtgggtatggtagttacggtagcagcagtggccgttcaggtggtggtagttatggaggttatggtggcagcagtggccgttcaggtggtggtggtggtagttatggaggttcagggggatcaagcagccgttactctggtggttcagaccgctcatctggtttcggaagctttggttcaggcggttcttcaggaggatttggttcagaccgttcttctcagtcaagtggaaggagcagctttggtgggtttggatcaaacgatggtaaaagatcttactgagagaagtgttgtgttggttttgacccgactcagcaataatggagttgacttaggagagaactcggtatctcgagttgagtagtttacaaggagtcgagctatatataaattctgtagctacttcttgtctcataaaccaacataagttatatcattatttcatatcctctaattcatttttatttctcaatttgagtgaaatgtgtttcccttaaaaaaaaaaaaaaaaaa

SEQ ID NO: 117376 - DNA, 1829 bp, Arabidopsis thaliana
  unsure (1)..(1829): unsure at all n locations
nnnnnnnnnnnnnnnnnnnnnnnnnnnnnnnnnnnnnnnnnnnnnnnnnnnnnnnnnnnnnnnnnnnnnnccacgcgtccgcaaacactagtctcttctgatttgtaccctaacgtttactcgacttatctaaagccgtgaacctcgccggaattcttaaagtcgcgatttttccttaacgccgtttgattcccttacggcctttgaggtccaggagatagcaaatttgttggtgagtactgaaaaatggaggaagagaacgaagtagtgaagacgtttgcagagcttggtgtgcgtgaggagcttgttaaagcttgcgagagattgggatggaagaacccttccaaaattcaagccgaagcccttccttttgctcttgaagggaaagatgtaattggacttgcgcaaaccggttctggtaaaaccggagcttttgcaattcctatattgcaagcactacttgagtatgtttatgattctgagcctaagaaaggacgtagaccggatcctgctttcttcgcttgtgttttatctccaactcgagaacttgcaatccagattgctgaacagtttgaagctcttggtgctgatataagtcttaggtgtgctgtgcttgttggaggtatagacaggatgcaacaaactattgctcttgggaaacggcctcatgttattgttgcaacacctggtcgtctttgggatcatatgtctgatacaaaaggcttttctctgaaatcattgaaatatctggttcttgatgaagcagatagactgttgaatgaagattttgagaaatctcttaaccagattttggaagagatccctcttgagcggaaaacatttcttttttcagcgactatgactaaaaaggttcgaaaacttcaaagggcatgtttgaggaatcctgtgaagattgaagctgcctccaaatattccactgtcgatactcttaagcagcagtatcggtttgttgccgctaaatacaaggattgctatctggtatacattctgagtgaaatgcctgaatcaacatctatgattttcacccgaacatgtgatggtactcgctttctggctttggtgcttcggagccttggttttagagctattcctatcagtggtcaaatgactcagtcaaagagactgggagctttaaataagttcaaagcaggggaatgtaatatcttggtttgtaccgatgtggctagtagagggctcgatatcccatcagttgatgtggttatcaattatgatattcccacaaattcaaaggattacatccatagagtaggaagaaccgctcgtgctggacgttctggtgttgggatatcacttgtaaaccagtatgagctcgaatggtatatacaaatagaaaaactcattggcaagaaactacctgaatatcccgctgaggaagatgaagtcttgtcattgttggagagagttgcagaagcgaaaaagctatctgcaatgaatatgaaagaatcaggaggtaggaagagaaggggagaagatgatgaagaaagtgagaggttcttgggaggtaacaaggacagaggcaacaaggaaagaggtggtaacaaagacaagaagtcttctaagaagttcaaacgataaaatagctctgtttttactgttttccgataactcaccaaagttttgaattgaagttttccatatgaactagggaaatttaatccattttgtactcgtaatttgtatgttcttttctttttgctttgtttctcaatgacagattatacaatttaagttgaaagatgtttaaaagctctggtgtccgttcttggtggctaaaacacccctttgtt

SEQ ID NO: 117377 - DNA, 1598 bp, Arabidopsis thaliana
  unsure (1)..(1598): unsure at all n locations
gaaagacccagaggttcacgggcggtttacccttttgcagacatcccggggccgacaagggtatttgcgtgccacatacatgatgaaaccaaaaaattctgctaccaaactggtgtgaacgttgttgctgcttatggaggaacacccattcaccaccagatcacggaactcgagaggggatgtgatattcttgtggcaacttctggccggttaaatgattcgctcgaaagagctagagtctcaatgcagatgattacgtttttagctctatatgaggcagacaggatgctggacatgggttttgagccacagattagaaagattgttgagcagatggacatgcctccacgtggggtgagacagacaatgctgttcagtgctacatttccaagtcagattcagagacttgcagctgatttcatgtcaaactatatatttttggctgtgggaagagttggttcaagcactgatttaattacccaaagggttgagtttgtccaagagtctgacaagagaagccatctcatggacctgcttcacgcgcaaagagagacccaagacaagcaatcattgacattagtttttgtggagacaaagaggggagctgatactttggaaaattggctgtgcatgaatgagtttccagcaacctccattcatggcgatagaacacaacaggaaagagaagtggcactgaggtccttcaaaactgggaggacacctattttggttgcaacagacgtggcagcacgtggtcttgacattccccacgtggctcatgttgtaaacttcgatctaccaaatgacattgatgactatgtccaccgtatcggacgaacaggacgtgcaggcaaatctggaatagcaactgccttcttcaacgagaacaatgcacaactggctaggtcgcttgctgagctaatgcaagaagccaatcaagaggtccccgagtggctcacacgatatgcttcacgtgcttcatttggtggtggtaagaaacggtctggtggtcggtttggtggccgtgacttcagaagggaaggctcttacagtagaggaggaggcggcggcggcggaggaggcggcagtgattactatggcggaggaggctatggtggtggtggatacggtggtgctccaagcggtgggtatggtgctggagtgaccagtgcttgggattagccaattaggctccccaatttttcctctttttaacctgactacttatttcttctcttctacattcccaagagagcacgtgtatttgcccccacctttgagatctctcattcaagagatggatttaactaatcttgctattaggtggatctctctgttttttcaggctatttttaggatttgtcctaaaagatagacagtagtttttccgattttgatcttgttcttggtttcttctaacaatttcatttgttagtttgaaatccaatttgtctttttgtttccctttgttgttgacaatctttcttggtgaaatacaatctctctttatatcaaaaaaaaaaaaaaagggannnnnnnnnnnnnnnnnnnnnnnnnnnnnnnnnnnnnnnnnnnnnnnnnnnnnnnnnnnnnnnnnn

SEQ ID NO: 117378 - DNA, 2361 bp, Arabidopsis thaliana
  unsure (1)..(2361): unsure at all n locations
cagnnnnnnnnnnnnnnnnnnnnnnaaaatccattgacgccctaacaaaagacgccggctagtgtattcgtcactttctctagtttcctgtaacccaacccactcaaacgaaattttttcttaatctctctttcgttcttcttcttcttcttcttctttagattgttgtaattccaatcggaactctcgattcgctttcttctccgttcttctgtggcggaccggttttgtggttttttatttgaacattcccgatcttgccctgagttccacgatcagtttctttaaaccctaggttttacacaagcattctgtttctccagattatcgcagactctttcgttctattctttgtagttttgtaaaaggtatttcggtagatttagggtttgtctgtgtctagttttcgagatcgagagagatttgtgatgaatactaacagaggaagatatccaccgggtgttggaacgggtcgtggtgcgcctccgaatccaaattatcatcagtcttatcggcagcaacaaccacctcaagatcagcagtatgttcaacgcggttattctcagaaccctcagcagatgcaactccagcaacaacatcaacaacaacagcagcagcaacagtggtcaaaacgccctcagcttcctgaaaacgctagtaacgctaatgaggtggttcagcaaacaacccagcccgaagctagcagcgatgctaatggtcaaaactggaaggctactttaaggctaccacctcctgatactcgttatcagacagcggatgtgacagctacaaagggaaatgaattcgaaaattactttctgaaaagagatctgttaaagggaatatatgagaagggttttgagaagccatctccaattcaagaagagagcattccaattgctttaactggtagtgatattcttgctagagctaaaaacggtacaggaaagactggtgccttctgcattccagtcctcgagaaaattgacccaaataacaatgttattcaagccatgattctagttccaacgcgagagctggcccttcagacatcacaagtttgcaaggagctttccaaatatttgaatatccaggttatggtcaccactggcggtaccagtctgagagatgatattatgcgattacatcaacctgtgcatctgctggttggaactcctggaagaatattggatcttacaaaaaagggtgtctgtgttttgaaagactgtgcgatgcttgtaatggatgaggccgacaagcttttgtctgcagaattccaaccttctctagaggaattgatacagtttctaccccaaaatcgtcagtttttgatgttttccgccacattccctgtcactgttaaggcttttaaggatcgacatctccggaagccctatgttatcaatctcatggatcaactcacgcttatgggtgtcacgcaatattatgcttttgtcgaagaaagacagaaggttcactgcctcaacacacttttctctaagctgcaaataaatcaatcgataatcttttgcaactctgtcaatcgcgtggagctgttggctaagaaaatcacagaacttggttattcatgcttctacattcatgcaaagatggttcaagaccacaggaacagagtattccacgagttccgcaatggtgcttgcaggaatctcgtttgcactgatctgtttactcgaggaattgacattcaagctgtgaatgtcgtgatcaactttgattttcctaggacttctgagtcatatctacacagggtgggtcgatcaggacggtttggacaccttggattggctgtgaatttggtaacttatgaggaccgtttcaaaatgtatcagactgagcaagaacttgggaccgaaatcaaaccaattccttctaatatcgatcaagcaatctactgtcagtaaacttgtaactgtgcatgaaacgtgtctccacccaatgagaggtacaagatggttaaaatggtgtttctcaagctcgaggggaggagatgaggcaactagtacttggcggttcatgtaaagactcgttactcagtggtttggttcctaatctctcttaaagacacttgttatctggttctatggaaacctctttacgctgcacttattatgagactccctttgacttggttagtaataaagatagaacgtatgactctcctcttttttattttcgtgttgggctctgtttggaattatgggctttatcctatttaggatctatttatcatgaaagttgcacttcttaatttttgcttccacgggattattttgatttttccnnnnnnnnnnnnnnnnnnnnnnnnnnnnnnnnnnnnnnnnnnnnnnnnnnnnnnnn

SEQ ID NO: 117379 - DNA, 1580 bp, Arabidopsis thaliana
acggacacgtcggtcttgggaaaaaaaatatataccaaaataaaagatctgcatctgtcttcttcttcttcttcatttcctctaaatttaattacccattttttccgataaatttttgttgaggaagaatttttgttgtaaagagagtttaattaaattatgccttcaatagaagatgagctgtttccgtcaacgccgggtaaattcaaaattgaccggtcaaaccgtcagctccaccgttgtttcgcttctacgagcaccatgtttctttgggctctcttcctcatcgctctcaccgcttcttacttgagtttccaaagcttcgtcgattccggtagccgttatctaaccgcttcttggggcggcatccagtgggagaaacaggttcgtacctccgctcagatccatcgctccggcggtatctccgtccttgttaccggcgctaccggattcgtcggtagccacgtgtcacttgccttgaggaaacgcggcgatggtgttgttggacttgataatttcaacaattactacgatccgtcgttgaaacgtgctcgtagatctctgttgtcgtcgagagggatcttcgtcgttgaaggagatctaaacgacgcgaagctgttagcaaagcttttcgatgtggttgctttcactcacgtgatgcatctcgctgctcaagctggtgttagatacgctttggagaatcctcaatcgtatgttcatagcaacatcgccggacttgtgaatcttctcgagatttgcaaagcggcgaatcctcagccggcgatagtttgggcttcatcgagctccgtttatggactcaacgagaaagttccattctctgaatctgaccggacggatcaaccggcgagtctctacgcccgcacgaaaaaagccggcgaagaatcacccacacttataacctatttacggtcttgcattaccggttaagatcttcacggttacggacctggggtgaccggattggctacttctctcccagaacatctacaagaaaccgattacaatttaccggggcaaaaaccgggtcgatttagcccgggatttcacatacatcgacgatatagtgaaaggatgtttaggatctctggattcatcgggtaaaagtaccgggtcgggtggtaaaaaacgtggagcagcaccgtaccggatatttaacctgggaaacacatctccggttacagtaccgattctggtggatatattggagaagcatttaaaggtgaaagcgaagaggaacttcgtggagatgccaggaaacggcgacgtaccgttcacacatgccaatattagctcagcccgaaatgaattcgggtataaaccgacaaccgatttggaaaccgggttgaagaagttcgttagatggtatctttcttattacggatacaatactaaagccaagcttgtacattaaccgtgactattattattatttttaatgaaattatttttttcttaaaaaaaaaaaaaaaaaggcggccgctctagaggatccaagcttacgtacgcgtgcatgcgacgtgatagctgtttaatggttaacgacttccaacggggggcgg

SEQ ID NO: 117380 - DNA, 700 bp, Arabidopsis thaliana
  unsure (1)..(700): unsure at all n locations
actatagaaaatttatgacgtcgcatgcacgcctacgtaagctcggaattcggctcgaggggaaaaaaatatcttccaaaataaaaggtctgcctttggcttcttcttcttcgtcatttcctctaaatttaaatacccattttttccgattaatttttggtgaagaataatttttggtggaaagagaggttaattaaattatgccttcaatagaatatgatctggttccggcaacgccgggtaaattcaaaattgaccggtcaaaccggcaggttcaacggtggtttggttttaacagcaacatggttttttggggtttttttcttattggttttaacggtttttacttgaatttccaaagctttgttgattcccggaggcggtattttaccggtttttggggccgcatccaaggggagaaaccgggtcgtacctccgctcagatccatcgctccggcggtatctccgtccttgttaccggcgctaccggattcgtcggtagccacgtgtcacttgccttgaggaaacgcggcgatggtgtcgttggacttgataattttaacaattactacggtcccgcttttnaacgngctcgtagntctnttgttngtcggtcgggnaggggatctttcgnccgtttnaagggnggtcttaaacgganggggaagtttntttaggaaaaagttttttcggatnttgg

SEQ ID NO: 117381 - DNA, 1424 bp, Arabidopsis thaliana
ctgaaatagttgttgcaactccaggaaggttatgggaacttatgtccgctggagaaaagcatcttgtagagctgcattccttgtcgttctttgtgttggacgaggctgatcgcatggttgaaagaggtcatttcagggagctgcagtctatactcgacttgcttccagtgacagataaaccaaatgaagggaaaacgcaaactgtgaagagtaatgacacagttttaaacgtcccgaagaagaaaagacaaacttttgttttctcagccaccatagcgctgtcttcggatttccgtaaaaagctaaagcgtggctcctcaaagtcaaagcaatcatcatctggtgaagtgaattctattgaggttttatctgaacgagctggaatgagagataatgttgccatcattgatctgacaactacatctattttggcaccaaagattgaagaatcttttattaagtgcgaagagaaggaaaaagacgcatacttgtattatattttgagcgtccatggacaagggcggacaattgttttctgcacatcagtgactgatttgcggcatatctctgggcttttaaagattcttggacttgatgtttgcacactcttctcagaaatgaagcagcgagctcggttgaagtcaatcgaccgtttccgtgcgagcgaaaatggaatactcatagcaacagatcttgtagcaaggggtattgatattaagaatgtccgaactattattcactacaaacttccacattcggcagaagtgtatgtacatagatgtgggaggactgctagagcattcgcagatggatgcagtatagctttgattgagccaaatgagacgtccaagttttacacgttatgcaagtcattctctatggaaagcgtaaagatattccctttggataactcttatatgccagctgtgaggaagcgattatatctagcacgtcaaatatatgagattgaccggaaaggctcgcgggagaatgcagacaggacctggcttaaaaaacatgctgaatcaatggaactcgaattggacgatgaagaaagtgaagaggaaagagtggacaatgtcaggcagagaaaagcgacctcagcacgacttaataagctgaaggaggaacttagcacgctcttatcacatccgatgcagcccaagaaattttcaggccgttactttgctggggttggtgtgtcgactcttatgcagaatcagtttgtagagttaaagaagcaaaaacaagcacaaatgcaaattggtggagatataaagagaagaaaacttgttgtcattaaccagaactgcatcgaacctcttcaagccttcgtgctggtggtaacgagatgctgaaaatgaaaggtcagagtgcagagaagaggcgcgatatagcgagcttgaaaaaaaaaaaaaaaaaaa

SEQ ID NO: 117382 - DNA, 1731 bp, Arabidopsis thaliana
  unsure (1)..(1731): unsure at all n locations
nnnnnnnnnnnnnnnnnnnnnnnnnnnnnnnnnnnnnnnnnnnnnnnnnnnnnnnnnnnnnnnaccggaaattacccgggtgcccacgcgtccggagatttcgaaaccctagtcgatttcgagatccaactaactctgctccttatctcagcttgttgaatttgcgaagtatgggagacgctagagacaacgaagcctacgaggaggagctcttggactatgaagaagaagacgagaaggtcccagattctggaaacaaagttaacggcgaagctgtgaaaaaagggtacgtgggaatacacagttctggattcagagacttccttttgaaaccggagcttctcagagctattgttgactcaggatttgaacatccatctgaagtgcaacacgaatgtatccctcaagctatcttgggtatggatgttatctgccaagcaaagtctggtatggggaagactgctgtgtttgtcctgtctactctacaacagattgaaccatctcctggccaggtttctgcacttgtcttgtgccatacaagagagctagcttaccagatctgcaatgagtttgtgcgattcagtacctatctgcctgatacaaaagtttcggtgttctatggtggagtcaacattaaaattcacaaagacttgctgaagaatgaatgtcctcacattgttgttggtacccctggtcgagtgcttgcacttgccagggagaaagatctctctttgaagaatgtgaggcattttattcttgatgagtgtgataaaatgctcgagtcacttgacatgcgaagggatgtgcaggagattttcaagatgactcctcatgacaaacaagtaatgatgttctcagcaacgctcagcaaagagatacgcccagtctgcaaaaaatttatgcaagatccaatggaaatatatgtcgatgatgaagccaagttgactcttcatgggcttgtccagcactacatcaaactgagcgagatggagaaaaaccggaagttgaatgaccttcttgatgcgttggacttcaatcaagttgtcatttttgtgaagagcgtgagcagggctgatgagctgaacaagttactggtgggatgccatttcccctcaatatgcatccactctggaatgtctcaagaagagaggttgactcgatacaaaagtttcaaggaagggcacaaaaggatccttgtggcgactgacttggtaggaagagggattgacattgagcgtgtcaacattgtcatcaactatgacatgccagattctgctgatacctatcttcacagggttggcagagctggtagatttggaaccaagggtcttgcaatcacatttgttgcatctgcttcagattcagaggttcttaaccaggtacaagagaggtttgaggttgatataaaggaacttccggagcagattgatacttcaacctacatgccttcttaaacaagtagcacgtccctcaggaaagaagctcttcagatttcaaccttgtaggtgttcgaagggtgatgggggttcacaactatctctcgctccgtttgttttagtgttttctatgacgacatttttttccatatgtttagaacgtctgttgtactctttaaaggagattcgagtcactctccaaatcgcacagttaaaagctgtccagttttttgtacaagagattattatgtttgaaatatcaggatttagtctcgnnnnnnnnnnnnnnnnnnnn

SEQ ID NO: 117383 - DNA, 1019 bp, Arabidopsis thaliana
  unsure (1)..(1019): unsure at all n locations
cggacgcgtgggttgtgattgtatgggccttaatgttccgagcaatatcgctgtatcatagcaaaactcacatctatgacgagaacctggtggacgatgatctcagatcagggccaatggaaatatatgtcgatgatgaagccaagttgactcttcatgggcttgtccagcactataatcaactgagcgagaggagaaaattcgcaagttgaatgccatcttgatgcgtggacttcaatcaagtgtcatttttgtgaagagcgtgagcagggctgcggagctgaccaagttactggtggaatgcaatttcccctcaatatgcatacactctggcatgtctcaagaagagaggttgactcgatacaaaagtttcaaggaagggcacaagaggatccttgtggcgactgacttggtaggaagagggattgacatagagcgtgtcaacattgttatcaactatgacatgccagattctgcggatacctatcttcatagggttgggagagctggtagatttggaaccaagggtcttgcaatcacatttgttgcatctgcttcagattcagaggtccttaatcaggttcaagagaggtttgaggtcgatataaaggagcttcctgagcagattgatacatcgacttacatgccgtcttaaacaagtagcatcatctctgaggaacgaacctcttcagatttcaaccttttaggtgttcaaaggggtcatggaggtccacaactatctctcacaccgtttgttgcttcgctattttagacttttctatgaggacaagtttttccatatatttagaccgttttgtaactcttgaaaaatgagattgagctactctccaaatcgcgcacagttgagagctctcctgttttttgtactagtgatggttatctttaaaatattaagatttcaggatttaaaaaaaaaaaaaaagnnnnnnnnnnnnnnnnnnnnnnnnnnnnnnnnnnnnnnnnnnnnnnnnnnnnnnnnnnnnnnnnnnnnnnnnnnn

SEQ ID NO: 117384 - DNA, 1083 bp, Arabidopsis thaliana
  unsure (1)..(1083): unsure at all n locations
tatccttgagcaattcaatgcaggacttttcgattacttgattgcaacggatgataatagccagactaaaaaacaaaaggaagaggctaaaggtgaggctaacaaggagaacaagaaaaataataagcgtacgaaaccaaagctagatgctgagttcggtgtagttaggggaattgatttcaaaaaagttcacacggttataaactttgatatgcctcaaagtgttactggatatatccatcgaattgggcgtacagggagagcatatagcagcggatcttccgtttctcttatttctcctgatgagatggaagggtttgaagatataaagtccttcttagcaagcgacaagaacaaggatattgatattatcacaccctttcctttgttgaccgaaaatgctgtcgagtctcttagatatagagctgaggatgtggcaaagagtgttacaaagattgcggttcgagagtctcgagctcaggatttgaggaatgagataatcaactctgaaaagttaaaagctcattttgaagctaatccaagagacttagatctgttgagacatgacaagcctctgagtaagactgcacctgcaccacatctaaaggacatccccgagtatctagtggacgcaaagactcaagaagcaagcaagatggtaaagctagctagagccgcaatgggcaacactaggagatctggtggaggcggtggtcgcaacaacaaaaacaagaaacggtctagaaaaggcagcgacccactcaaaacctttcaaccctaatgggtctaagagaggaccgttggccagaaggatggcaaagattctagctcgaccaaaaaacagaagacagtttaagttatttcgtttagcgtaagtgtaaccaaattttgactcgttatagtcaatcacacaaaagaacggagacgagagcatcaatctttgtagctctattcatgtagcatcaggagacaaagttttgtgagcatattattagccttttgaggtttttattgaaatagatttttgtaagcttnnnnnnnnnnnnnnnnnnnnnnnnnnnnnnnnnnnnnnnnnnnnnnnnn

SEQ ID NO: 117385 - DNA, 1085 bp, Arabidopsis thaliana
  unsure (1)..(1085): unsure at all n locations
gtggtgcacggcttgtggcacttctttctgttctcaagaacctttttgaaagagaagcttctcaaaaggtggtcgtcttcttttcgacacgtgatgctgtagattttcattactcacttctgagtgaattccagtggccaccgaattctgagacagaagaggaggggactaaagagttgtttctcaagtgcaaaacgttccggttacatggaagtatggagcaggaggatagaagatctgcgtttgggacctttaaaacagagaagcaggctgttctgttgagtacagatgttgctgctagaggcttggatttcccaaaagtaagatgtattatacaatatgactgtcccggggaagctaccgagtatgtgcatagagttggtagaacagctcgtattggtgaaaaaggagaagccttgttatttctacaaccgattgaaatagactatcttaaggagctgaagaaacatggtgcatcacttacagagtaccctcttatgaaagtacttgataaatttcccatacccggcaatatgccccgaatcaaaaaggtcctatctctagaatcccatccatgggtcatatctctgcagagagctcttgaatcccttacttacgccgagccaaagatgaagagcctggcaaagaatgcatttgtctcttgggttaggggatatgcagctcacaagggagagctcaagagtattttcgtggtgaagaagcttcacttgggtcatgtcgccaagagttttgctctgagagaacaaccgtctttagttgggaaatcacatcacaaggaaacaatgaagagaaagagagacgaacgtcaaaaagggcaacaaggtaagaagagaaagaagatgagtggtactggcaatagaagtacacaaaaaacttgatcaaatcggtttcgccaccataaaccgtggcgtaagttttgtagttaaggagctggtttgctcatcgaatattttgaaatatcgaaaagaagttgggagctttatcatgtttgttaacaatattacttgtattggccagaaagctaaagattcacaaaatttgcttnnnnnnnnnnnnnnnnnnnn

SEQ ID NO: 117386 - DNA, 1242 bp, Arabidopsis thaliana
agtcggaatcatcccagcaattgacaaactcgaaaaccccttctggtcttcatcttgagtatatggaatgcgaacgagataaaaaatcatcacaactagttgatctcctcatcaagaacagtgataaaaagcttatagtattcttcatgacctgtgcttctgttgactactggggactcgtactttcaaaaattcctgccctgaagtccatatctttaattcctatccatggggatatgaagcagaatgcaagagacaaggcattagcttcgtttactaaagcatcaagtggtgcccttctgtgcacagacgttgctgcacgtggacttgatattccaggcattgattatgttgttcagtatgatcccccacaagacccaaatatgttcaaccacagggccggcagaactgcaagattaggaagacaagggagggccattgtgtttttactgcccaaggaagaagcctatgtagagtttatgcgcataagaagagtccctttggaagagagaaaatgctctgaggacgcatccgatgtcatcccgattatacgttcagctgccatgaaggaccgagcagtgatggagaagggattaaaggcatttgtttcctttgtccgtgcttataaggagcatcactgctctttcattttcagatggaaagaccttgagattggaaagttagccatgggatatggcctcttgtatcttccttcaatgtctgaagttaaacaacacagactttccagtgagggtttcacaccagttgaaggtgtcaagtttgaagaaataaaattcaaggacaaatatcgggagaaacaaagacagcaaaacttacaagtaaggaaagagaaacggcaagaagagaaaaaagagaaaggcaagagaaaaagggttgatgcttctgctagtaatgatcctaagaaagcgtcgagaaagttaacggggaaacaaagacaaactattcaaactgctgaagatgaagaagtgatggatcgagattataagttgatgataaaagtaaagaaagggttaattaaagaagatgaatatgaaagacttacaggagatgatgatttattctgatgagaagaaacaaaacctgcatgctgagattggactaagcttagtgtctttctactctcatatcatatgtgattctgttaattttttttttttttttgggtgagaattaatatcggatcatgttatgtcctttttcgttcaaaaaaaaaaaaaaaaa

SEQ ID NO: 117387 - DNA, 829 bp, Arabidopsis thaliana
  unsure (1)..(829): unsure at all n locations
aaccgtgcaattcgtcaaattgttgatgtcatttccgaaagccaaaagtataacaagttggtgaaactgcttgaggacataatggatggaagcagaattcttgtcttcctcgatacaaaaaagggctgtgaccaaatcactcgtcagcttcgcatggatggttggcctgctttgtcaatacatggagataaaagtcaagcggaaagagattgggttctctcggagtttagatcaggcaaaagccctataatgactgctacagacgttgcagctcgtggattagacgtgaaagatgtgaagtatgtgataaactatgacttccctggatcactggaggattatgttcacaggattggacgaacaggtagagccggggctaaaggaacagcttacactttcttcacagttgcaaatgcgagattcgccaaggaacttaccaacatactccaagaagctggacagaaagtgagtcccgaattggcttcaatgggtcgcagtaccgctcctcctcctccagggcttggaggattcagagaccgtgggagcagaagagggtggagctgatcactgattttgtatcttgttatggctttagggctcagtgattttctttctccatttatatctcttgtttactattttgttcctcaaacatttgacatttacagcaaaacattaaacatgtaagataacatttgatctgattatccaaattaattagagtaagataaacaaaaaaaaagaaaaaaaaaannnnnnnnnnnnnnnnnnnnnnnnnnnnnnnnnnnnnnnnnnnnnnnnnnnnnnnnnnnnnnnnnnnnnnccgcat

SEQ ID NO: 117388 - DNA, 1969 bp, Arabidopsis thaliana
gtttcctccaaatttaatccgccgggttaaatttggatgccttttttcttcatgaaaggttggtttgtgaaactcgatgattctctcacgctctggctccgcgcttcatttgtgtggagtctcttcttcagcgccgtcgaagctcttatctcagaggttcaaggtctcgttcgctctcgcttatggctcatctgtttctttccgtttaagctctctcaatcgatctgatagaaaatgggttcgtgggtttgcgtctgctactgaagcagaagtcgagaaaaagggtaatgatactttttttgctgaccataccgtttcttggaagtctcttgggttatcagataatgtctctatagctcttcgagattctgggttcgatagaccatctcttactcaggctgtttgcataccgtctatattgtctgggaaagatgtgattgttgcagcagaaactggtagtggtaaaacacatggttatcttgctccaataattgatcaattaacaaacaccgctcttgattccgaggttacgaatagagaggaaagaccgtttccgcttaagaatatctctcttattctgtgtccaaatgtgatgctttgtgaacaagtggttcggatggttaatggtcttgttgatgaagatggtaatccacttcttagagttgaagctgtgtgtggatctcagggttggccagatagactccctgatataattgtttcgacacctgctgctcttcttaataatattgagccgaaaagaaataggcgtctggaatttctacgatgtgtcaaatatgtggtctttgatgaagctgatatgcttctgtgtggaagcttccagaatcagattatccgtctgataaatatgctgcgtttcgatgagaaacaggtgtctcgtttggctaaatccaatcttggcagaccaatggagattgatgcctctgtaccccaaattgatctagaaaatgaggatgatgcagaattcgatgaaggatctatttctgaggaagaggatgaagaagaggaagaggaatatcttgatgatatagcacaaatgcctagtgttgaagctgaagctgggtcagatactaaaaagggctggagaagagtgagaaagatctatacccgtagtaagcagtatattttcattgcagccacacttccagttaacgggaagaagactgccgggggaattttgaaacatatgtttcaagatgctgtttgggttagcggaaactttcttcaccgaaacagtccgagactaaagcaaaaatgggttgaagtcacagtagactcacaggttgatgctcttatagaggctgtaaaaaacaataacaacaccaacacagagaggacaatggtgtttgcaaacacggtcgaagctgttgaagcagtggccgatatattggagaaagctagtatccagtgttaccgttatcacaagaatcacaagctagacgaacgtgctaatatattagctgatttcagagaaactggtggtgtctttgtttgcactgatgcggctgcccgtggagttgatgttcctaatgtctcacacgttattcaggcggattttgctagttctgcagtggatttccttcacaggattggtcgaacagctagagctgggcaatatggaactgtgaccagtctatacaccgaggctaaccgtgatttagtagaggcaatccgtgaagcagtgaagatgggtcagccagtggaaactgcattcagcaggaagagaggttttaggaacaaggttaagaagagagcttttttgaaagctgaagaagcagaggagcctcaagctgtgagatattaagttctgttgttttttttacaattccatagatttgttgtatatagaagtactcaaaatcgaataatcactatctgttattttcttgtaccaaattttttgatatgagataatacaatctcgtttatgccgaaaaaaaaaaaaaaaaaa

SEQ ID NO: 117389 - DNA, 1747 bp, Arabidopsis thaliana
gcgccgtaccggaattcctcgagctacgtcagggccagtctctcgcaatcttcgctcttctctttgctctctctctctcaacgcggttcagatccgagtttgggagattcaagctccctgaaaaaagccctttactctcgcttaccaactttgctccagcatggcaggatctgcaccagaaggcacacagtttgatgcacgtcagtttgaccagaaactcaatgaagtacttgagggacaagatgagttcttcacatcctatgatgatgttcatgagagctttgatgccatgggtcttcaagagaaccttctcaggggtatttatgcttatggttttgagaagccttctgctattcagcaaagaggaatcgtccccttctgtaagggtcttgatgtgattcaacaggctcagtctggtactgggaaaacagcaactttctgctctggtgtcttgcagcagctggacttctcccttatccagtgtcaggctttggttctagctccaactagagagcttgctcagcaaattgagaaggtcatgagggcccttggtgattaccttggtgtcaaggttcacgcctgtgttggtggaaccagtgtccgtgaggatcagcgcatcctccaagctggtgtccatgttgttgttggaactccagggcgtgtctttgacatgttgaagaggcagtctcttcgtgctgacaacatcaagatgtttgttctcgatgaagctgatgaaatgctctcccgtggtttcaaggaccagatctatgacatattccagcttcttccaccaaagatccaagttggtgtgttctccgcaacaatgccaccagaagctcttgagatcacaaggaagttcatgagcaagccagtgagaatcttggtgaagcgtgatgagcttacccttgaaggtatcaagcagttctacgtcaacgttgagaaagaagagtggaagctcgagacactctgtgatctctacgagactcttgccatcactcagagtgtcatcttcgtgaacaccaggcgtaaggttgattggctcacagacaaaatgagaagccgtgaccacacagtctctgcaactcacggagacatggaccagaacaccagggacatcatcatgagagagttcaggtctggttcctcccgtgttctcatcaccactgacctcttagctcgtggtattgatgtccaacaagtctccctggttatcaacttcgatctcccaactcagccagagaactaccttcaccgtatcggaagaagtggaaggttcgggagaaagggtgttgcgatcaatttcgtgacccgtgatgatgagaggatgctgtttgatattcagaaattctacaatgtggttgtcgaagagctgccttcgaacgtggccgatctgctgtgaagggagaaaagaagtcggttctgttgctgtgtttgctctgccgtactagtatcaccggagaagaaaggttttcttgttttgcaaggcactctttgatctgattttgacccgtcgtctatcagcgatttacatttcttaaattttcttagttgttgttctctcctctctctcccagctacgaacatatctctctcttcttgaccatttttaagtttaagtcatatggagtatttatttcttcactattttaatattcggctttgttgtttgtctttgatttttgtatcaatcaaatcttttcatcaaagtttggttttaagctaaaccctgacgtagctcgaggaattc

SEQ ID NO: 117390 - DNA, 1755 bp, Arabidopsis thaliana
  unsure (1)..(1755): unsure at all n locations
ccnnnnnnnnnnnnnnnnnnnnnnnnnnnnnnnnnnnnnnnnnnnnnnnnnnnnnnnnnnngaattcctcgagctacgtcagggatttgcttcaatcttctctttatcgctccaccagatccaagttcgcgagatttcaagctctctaacaaagttcttcacttttactctcaaagctttcatctttcattcaactacttaagctccaagtatggcaggatccgcaccggaaggaacacaatttgatacgcgtcagtttgaccagaggctgaatgaagttctcgatggacaggatgagttcttcacctcatatgatgaggtccatgagagctttgatgccatgggtttgcaagagaatcttcttaggggtatctatgcttacggtttcgaaaagccttctgctattcagcaaagaggaattgtacccttttgcaagggtcttgatgtgatccagcaggcacagtctggtactggaaaaaccgccactttctgctctggtgtcttgcagcagcttgactatgcccttctccagtgccaggctctcgttttggctcccaccagagagcttgctcagcagattgagaaggtcatgcgtgcccttggtgactaccaaggtgtcaaggttcatgcctgtgttggtggaaccagtgtccgtgaggatcagcgcattctccaggctggtgttcatgttgtcgttggaactcccggtcgtgtttttgacatgcttagaagacaatctctccgccctgactgcatcaagatgtttgtccttgatgaagctgatgaaatgctctcccgtggtttcaaggatcagatctatgacatattccagcttctcccaccaaagattcaggttggagtgttctctgcgacaatgcctccggaagctttggagatcacaagaaaattcatgagcaaaccagtgagaatcttggtgaaacgtgatgagctcacacttgaaggtatcaagcaattctacgtgaacgtggagaaagaagactggaagcttgagactctctgcgatctctacgagactctagccatcactcagagtgtcatctttgtcaacactcgtcgcaaggtcgactggctcacagacaaaatgagaagccgtgaccacacagtctcagcaactcatggagacatggaccaaaacaccagagacatcatcatgagagagttcaggtctggctcgtctcgtgttctaatcacaaccgatctcttggctcgtggtatcgatgtgcagcaagtctctctagtcataaactttgacctcccaactcagccagagaattaccttcaccgtatcggaagaagtggaaggttcgggagaaagggtgtggcgattaactttgtgactcttgatgatcagagaatgctgtttgatattcagaaattctacaatgtggttgttgaggagcttccctcaaacgtggctgatttgctgtgaagaagaagaagaagaagaagaagaaaggttgcttgtttcgcaaatttcttatttgatttttgacccgtctctctctctctgaatcatcgatacatctttttcattctctagtattcttcatcaactctatcgaacatatatatgtctcttctgaccatatttcttttttatcaaatgcaatatttatttcttctaaaaaaaaaaaaaaaaaaannnnnnnnnnnnnnnnnnnnnnnnnnnnnnnnnnnnnnnnnnnnnnnnnnnnnnnnnnnnnnnnnnnnnnnnnnnnnnnnnnnnnnnnnnnn

SEQ ID NO: 117391 - DNA, 1596 bp, Arabidopsis thaliana
  unsure (1)..(1596): unsure at all n locations
ggaagtcgttcgagtttggtctttgtctctatcttttcaatctttctctctcaatcgctcttcaatttgataacagcaaagtcatggcaggaatggcatctgatggaactcaatatgatcctcgtcagtttgatactaagatgaatgccattctcggcgaggaaggagaggaaacattctacactaactatgacgaagtttgcgacacgtttgatgcaatggaattgcaaccagatcttctcaggggtatttatgcttacggtttcgagaagccttctgctattcagcaaagaggaattattccattctgcaagggtcttgatgtgatccagcaagctcaatctggaactggaaagaccgctaccttttgctctggtgttttacagcagctcgatattagtttggttcaatgccaagctcttgttttggcacctacccgagaacttgcccagcaaattgaaaaggttatgagggcacttggtgactaccttggcgtcaaggctcaggcttgtgttggtggaacaagtgttcgtgaggatcaacgtgttcttcagtctggtgttcatgttgttgttggaacccctggtcgtgtctttgacttgttacgcagacaatccctccgtgctgatgcaatcaaaatgtttgttcttgatgaagctgatgaaatgctctctcgtggtttcaaggatcagatatacgacatcttccagcttcttccttccaaggttcaggttggtgttttctctgctacaatgcctcccgaagcccttgagatcacaaggaagttcatgaacaaaccagtcaggattctggtcaagcgagacgagctgactcttgaaggtatcaagcagttttatgtcaatgtagacaaggaagagtggaaactcgagacactatgcgatctctacgagacactggccatcactcaaagcgtcatctttgtgaacacaaggcgtaaggttgattggctaaccgacaaaatgagaagccgtgaccacactgtttcagctacacacggagacatggaccagaacacaagagacatcatcatgcgcgaattccgctctgggtcttcccgtgtcctcataaccactgacctccttgctcgtggtatcgatgttcagcaagtctctctggtcataaactttgacctcccaacccaaccggagaattaccttcatcgtattggaagaagtggaaggtttgggagaaagggagtagcaatcaatttcatgacatcggaggatgagagaatgatggctgatattcagaggttttacaatgtggtcgttgaggagttgccaagcaatgttgctgatcttctctgaagcctttcttttttctgttttttactgagaaagtgctgtgtttacccctttttttggcagcttctctatgctttgatttttgttttcaggctactacttagatttatagttcttggctaaaagcgaacataactcattacatgattttgcttttttggcaatcaagaatttcggcattatttatctttttgtgaacgtggcttacaaggaaggatactctatgagactaaagacttttctctnnnnnnnnnnnnnnnnnnnnnnnnnn

SEQ ID NO: 117392 - DNA, 691 bp, Arabidopsis thaliana
  unsure (1)..(691): unsure at all n locations
ctcccatnnnnnnnnnnnnnnnnnnnnnnnnnnnnnnnnnnnnnnnnnnnnnnnnnnnnnnnnnnnnnnnnnnnnccacgcgtccgcgctatcttcgctcttctctttgctctctctctctcaacgcggttcagatccgagtttgggagattcaagctccctgaaaaaagccctttactctcgcttaccaactttgctccagcatggcaggatctgcaccagaaggcacacagtttgatgcacgtcagtttgaccagaaactcaatgaagtacttgagggacaagatgagttcttcacatcctatgatgatgttcatgagagctttgatgccatgggtcttcaagagaaccttctcaggggtatttatgcttatggttttgagaagccttctgctattcagcaaagaggaatcgtccccttctgtaagggtcttgatgtgattcaacaggctcagtctggtactggaaacagcaactttctgctctggtgtcttgcagcagctggacttctcccttatccagtgccaggctttggttctggctccaaccagaggggttgctcagcaaattgggaggggcatgagggccctgggtgtaccttggggtcaagggtacgcccgggttggtgggaaccagtgtcccgtgaaggatcaagcggcattccctcccaaggctggggtggtccattgtt

SEQ ID NO: 117393 - DNA, 911 bp, Arabidopsis thaliana
  unsure (1)..(911): unsure at all n locations
acttcccctctcactctaatacgactcactatannaaagctggtgcgcctgcaggtaccggtccggaattcccgggtcgacccacgcgtccggccatgggtcttcaagagaaccttctcaggggtatttatgcttatggttttgagaagccttctgctattcagcaaagaggaatcgtccccttctgtaagggtcttgatgtgattcaacaggctcagtctggtactgggaaaacagcaactttctgctctggtgtcttgcagcagctggacttctcccttatccagtgtcaggctttggttctagctccaactagagagcttgctcagcaaattgagaaggtcatgagggcccttggtgattaccttggtgtcaaggttcacgcctgtgttggtggaaccagtgtccgtgaggatcagcgcatcctccaagctggtgtccatgttgttgttggaactccagggcgtgtctttgacatgttgaagaggcagtctcttcgtgctgacaacatcaagatgtttgttctcgatgaagctgatgaaatgctctcccgtggtttcaaggaccagatctatgacatattccagcttcttccaccaaagatccaagttggtgtgttctccgcaacaatgccaccagaagctcttgagatcacaaggaaaggttcatgagcaagccagtnagaatcttggtgaagcgtgatgagcttacccttgaaggtatcaagcagttctacgtcaacgttgagaaagaagagtggaagctcgagacactctgtgatctttacgggnctttttgccatcaacttcagnggtgtcaattttcggggacccccagggggaaaggtttanttggttcccaagnnaaattggggngccgttnccnaaanttttnaaantncnggggctttg

SEQ ID NO: 117394 - DNA, 518 bp, Arabidopsis thaliana
  unsure (1)..(518): unsure at all n locations
acatcttgaacatgtcaaatacacgccctggagttccatcaacaacatgtacgcaagcttggagtatgccctgatgagcttacccttgaaggtatcaagcagttctacgtcaacgttgagaaagaagagtggaagctcgagacactctgtgatctctacgagactcttgccatcactcagagtgtcatcttcgtcaacactcaggcgcaaggtcgactggctcacagacaaaatgagaagccgtgaccacacagtctctgcaactcacggagacatggaccagaacaccagggacatcatcatgagagagttcaggtctggctcctcccgtgttctcatcaccaccgacctcttggctcgtggtatcgatgtccagcaagtctctctagtcataaactttgnncntccaanttaaggccngggattnccnttaacggtatnggnaggangtnggaggttccgtgggaaanggtttttggcnggttaaaccttttttggccnttttgattggtccaaag

SEQ ID NO: 117395 - DNA, 833 bp, Arabidopsis thaliana
gttttaggtgcactatagaagagctatgacgtcgcatgcacgcgtacgtaagctcggaattcggctcgagtattcagcaaagaggaatcgtccccttctgtaagggtcttgatgtgattcaacaggctcagtctggtactgggaaaacagcaactttctgctctggtgtcttgcagcagctggacttctcccttatccagtgtcaggctttggttctagctccaactagagagcttgctcagcaaattgagaaggtcatgagggcccttggtgattaccttggtgtcaaggttcacgcctgtgttggtggaaccagtgtccgtgaggatcagcgcatcctccaagctggtgtccatgttgttgttggaactccagggcgtgtctttgacatgttgaagaggcagtctcttcgtgctgacaacatcaagatgtttgttctcgatgaagctgatgaaatgctctcccgtggtttcaaggaccagatctattacatattccagcttcttccaccaaagatccaagttggtgtgttctccgtaacaatgccaccagaagctcttgagatcacaaggaagttcatgagcaagcctgtgagaattttggtgtatctgtatgtgtcttatcttgtatgtattaattatttattttttaccttttttttttaatttacttttatctttgtttatatttttaattgtcaatgttttattacttcatttatattatttatttttattttatgttatattatatattccttctttttttaaagtaagtattattaatgagtttctattatttactatatattattatgtatatttatatattat

SEQ ID NO: 117396 - DNA, 1959 bp, Arabidopsis thaliana
  unsure (1)..(1959): unsure at all n locations
gttgcagagccttacagttaaaggcatacgcttcaccgttctcttccgtcttttctccactcgttggcatgaattccgatggacccaaatccggtaagaagagacgagagattcgtgctaaacttgtgaagaagttgacgagtgacgaagatggctcgggaaagctagtcaaggacaacaataagagtctaaagaggggaagagaaggcaaatctgatgttgatgagcctcttattaagaaaccagcttctactacgcctctagtgactcaaattgctaaaacttcagattcttatttgtcaaagacaagatttgatcagttcccactgtctcccttaacgttaaaaggaattgaggatgctggatttaagacaatgactgttgttcaggaggctactcttcctctcattctccaaggtaaagatatccttgcgaaggccaaaacaggcactgggaaaacagttgcatttttgcttccatcaattgaagctgttatcaaagctcctcctgcaagccgtgataataggcatcccccaattattgtgcttgtggtatgtcctactcgggaacttgcttgtcaagctgctgcagaagcaaacatcttgctcaagtatcacccatctattggtgttcaagttgtgattggaggcactaagcttcctacggagcaaaggcgcttgcaaaagagtccttgccagattctcgtggctacacccggaaggctcaaagaccatatcgacaacacttctggatttgcaacaaggttgatgggtgtgaaagtccttgtgcttgatgaagctgatcatctcttggacatgggtttccgaagggaaattgagaggataattgctgctgttcctaagcagagacaaacatttttattttccgccacagtatctgatgaggtccgccaaatatgccatgttgctctgaaacgggatcatgaattcgtcaactgtgttcaagagggtgctggggagacgcatcaaaaggtttcacaaatgtacatgattgcatcattagatagacatttctcgcttctatatggtcttctgaaaaaacacatcacagataatgtgggctataaggttattattttctgtacaactgctatggttacaagattggtggctgatctgcttggtaagctaagccttaacgtcagagagatccattctagaaaaccgcagagttacagaaccagagtttctgatgagttccgcaagtccaagagtattatccttgtgacatctgatgtatctgctcgtggtgttgattaccctgatgtgtccttagtcgtacagatgggattgccatcagacagggaacaatatatacatagacttggcagaactgggcggaaaggtaaggaaggagaaggtgtactattgttggcaccgtgggaagagtactttctatcttctgttaaggacttgcccatcacaaagtcttctttaccgccaatagaccatgaggctgtgaaaaaggtgcagaaagggcttatccaagtggaaatgacgaacaaggaggcggcatatcaggcatggttgggttactacaaatcgcagaagaagattgctagagacacgaccagactggtggagttagctaatgagtttagccgcagtatgggacttagcatccctccggctatccctgtaaatattcttggcaagatgggtctcaaaaacgttcctggtattagagtcgctccaggttttgacaagaaacctgcaaagagaaattatcgttcccgctagattttctctttctttgcctaatggtattgtttgtgttgaactttattgcttttttgaagtttggcattttggtaaaagttaccttcttaagaatttcatttggtaaaaaaaaaaaaaaaaacccaaagnnnnnnnnnnnnnnnnnnnnnnnnnnnnnnnnnnnnnnnnnnnnnnnnnnnnnnnnnnnnnnnnnnnnnnn

SEQ ID NO: 117397 - DNA, 2139 bp, Arabidopsis thaliana
gacattttgcgactcttcttctccttatcctctaaatctctcaccggtcaccgacgacgggaacttggtagttacaggaacaagaaatgtcctcgaagttccctctcggtgtacgcttcatcactcattctcttccttgtactcgtctcgcttccatgaattctggcgcccttatctattcatttcgttccgttcctgttctatccaaagcctttccttttaggttaaagtacattggattaggttcccgggtcaacttttcaacccgaccagagagatctcaacccgaattcgcgcggcgaagtggagctggaggagagattcgcgcgtccaagagcttgattgaggatgaggcagagcttagtgattgggtgagcgatttgaggactagttcgttgcgcgggaagttcacgagcgacgaagataacgcggatccagaggtggttcgtagaaacgtagacagggacaccagtaggggtccaaggagaggaagggaaggccaatctgataggttcggtggtgcgaaaaggggaaaggaaggtgaaatggataggtttgggagtccgaacaggaggagaaccagcggcgagcctgctgattcgttcgggaacaagcggttaggtgatcgagaaggttcaaggaacggtcgtgttcaaggaaagagtagtgagtcgtcttttcgtggaaggagtgatagaaatgtagattcagggtcgtcttttcgtggaaggagtgacaaaaatgttgactcagggtcgtcttttcgtggtaggaatgatagaaatgtagattcagggtcgtcttttcgtggaaggagtgatagaaatgtagactcagggtcgtcttttcgtggaaggagtgatagaaatgtagactcagggtcgtcttttcgtggtaggaatgatagaaatgtagactcagggtcgtcttttcgtggtaggaatgatagaaatgtagaatcagggtttaggagagagccaggttccgaaaacaacaggggcttggggaaacagacaagaggcttaagcctggaagaggaagatagtagtgacgatgacgagaacagggttggattgggaaacatcgatgatttgcctagtgaagatagtagtgatgaggatgatgaaaatgatgagcctcttattaagaaagcggcttctgctaaggctgttcagactgataagccaactggtgaacatgtcaaaacttcagattcttacttgtctaagacaagatttgatcaattcccactctctcccttatcgctaaaagccatcaaggatgcgggatttgagacaatgactgttgtgcaggaggctactcttcctatcattctccaaggtaaagatgtcctagccaaggccaaaacaggcactggtaaaaccgttgcatttttgcttccagcaattgaagctgttatcaaatctcctcctgcaagccgggatagtaggcaacccccaattattgtgcttgtggtatgtcctactcgggaacttgccagtcaagctgcggcagaggcaaataccttactgaagtatcacccctctattggtgttcaagttgtgattggaggcacaaagcttcctacagagcaaaggcgtatgcaaacgaatccttgccagatccttgtggctacacctggaaggctcaaagaccatattgaaaacacttctggattcgcaacaagattgatgggtgtgaaagtccttgtgcttgacgaagctgatcatctcttggacatgggtttccgaagggacattgagaggataattgccgctgttcctaagcagagacaaacatttttattttctgccaccgtacctgaagaggtccgccaaatatgccatgttgctctgaaacgggatcatgagttcatcaattgtgtccaagagggctctggggagacacatcaaaaggtcacacaaatgtacatgattgcatcactggatagacatttttcgcttctacatgtgcttcttaaagaacacatcgcagataatgtggactataaggttatcattttctgtacaactgctatggtgacaagattggtggctgatctgcttagtcagctaagcctgaacgtcagagagatccattctagaaaaccgcagagttacagaaccagagtttctgatg

SEQ ID NO: 117398 - DNA, 2933 bp, Arabidopsis thaliana
tttctttaacatcattatacaaagttacaacaacttgaaaaaattaattatataagcccattaaatcttgtatcataagcccagcccaaagttataaacttttcaaaatgcaaggagctaaaaaacaagttggttttgttggtttcaaatcaaaccaaaccgtttttttaagattacgaatcgaatggtttatttttgctaaatcggttcggttttttctccagacctattagtaaacctcttgcttcgattaggcggtcgtctctctgaaattttctgaaacctcttaaaccctagcaatgccgtcgagtttcttctttgaggatgctagtgacgacgagctcgaattaatacgcaatcaagaggacagtagtgaggaagacgtaaaggaaggcgaagcagaagagcatgaagctggagaagacgaagatggagaagaggaatatgaagaagaagatgacgacgaagaagaagaagatgagaagcggaaacgagatgctgatgctcaatctccttgggattttgcatcttactcaagctccgttggtgaagaacacgcccgccgtcacacaacgtctattgatgaaaagatctctaaagctattcagcatcgtccagttcccatttcaataaatgaagaagaagaagaggaagaagaagaagaagatgcctccgatgctgaaactgacaaacaagaggagtatctttcggaagacgatgaggcagctgagtacaaaccagaagatgctactcccaagccgttcttctctacagtggatggagtttcatttcatgctgatactttcatggagcttaatctctctcgtccattgcttcgagcttgtgaaactctcggatacaagaaacctactccgattcaggcagcttgtatacctttagcacttacagggcgtgatctttgtgccagtgccatcactgggtcagggaagactgctgcattcgctttacctactcttgagaggttgctgttccgtcccaagcgggtctttgctactagagttcttattctcactccgactagggagttggccgtccagattcacagtatgattcagaatcttgcacagtttactgatatcaagtgtggattgattgtaggagggctttctgtaagggagcaagaggtggttctgaggtctatgccagatattgttgtggcgactcctggacgtatgatagatcatttgcgtaattctatgtctgttgatttggatgatctagcggttttaatccttgatgaggcagaccgccttctacagactgggtttgccactgaaatcacagagctggttcgcttatgtcccaagagaaggcaaacaatgctcttctcagccacaatgactgaagaagttaaagagctagtcaaactttccttgaacaaaccgttgcggctctcagctgatccatcagctagaaggccaccaggcttgactgaggaggtggtaagaatacgcaggactcgtgaggcaaatcaggaagctgttcttctatcattgtgcacaaggacttttaaatcaaaagtcattatctttagtggaacaaaacaagctgcacatagactgaaaattttattcggattagctggcctcaaagcagctgagcttcatggaaacctaactcaagcacaacgtcttgattctctggagcttttcagaaagcaggaggtcgattttctcattgctaccgatgtagccgctcgaggacttgacatcattggtgttcaaacagttataaattatgcttgtcctcgggaaatagacagttatgttcacagagttggtagaacagctagggctggaagggaaggttatgctgtaacgtttgtgactgatagtgaccgatcccttttgaaagtcattgcaaagaaggtgggttcaaagttgaagagccgagtcatcccagagcagtcaatcgtcaagtggtctcagataatcgatgaaatggaagatcaatattccgctgttatttcagcagagagggatgagcgagctctaaggaaagctgaaatggaatttgcaaaggcggagaacatgcttgagcacagagatgaaatatatgcacgcccaaaaaggacttggttcatgacagagaaggagaagaagctcgtggcacaggctgaaaaggattctgcagggaaccctgctggaggcgaactagttagtgctgatagagcagaggacctcaagatgaaggagaagagaaaacgtgaacgcgagaagaatcttcctaggaaaaaacgtagaaagctagaagctgccagagagatgctagaagataacgaaggagaagaagaggaagaagacgaagaaggagacgaaaagagaggaagatcaagagggaaagacaagaaaaaacaggagacagataagaagggattgacactaaaggatcttggttacatgagagcaaaagcggtgaaagcaaaacagagagcaattgattccggtaagatggagagaccaaagccggacaagaaacaaagccggagtaaaccaagaaaccagcctcgtggtgaagagatgaaagatctgttcaagagtgatatgggcgagaagaaacagggcagaggcggtgccgcggctgcagcaaaacctcggacgaagtcgaagaactcattcaagagcaaagccagatataagcgtaggtaaaaggaaaaagcatttttgagaagatatcgaaggacaaacccacgagaagaaggacatttcattgagaagggtttaaacaatttaaattattgttgtaatatcataatttagaacaaaactggttaagatgttcgaaattttgttttctttgtcctatggtttttataatctttcataaaaaaaaaaaaaaaaaagcgctctagaggatccgagctcacgcacgcgtgcgtgcgacgtcatagctcgtaccatagtgtacaggga

SEQ ID NO: 117399 - DNA, 790 bp, Arabidopsis thaliana
ggaatcaaggaaattcgggttgaggtctggtgttagaagtacttgtatctatggtggtgctcctaaaggacctcagattcgtgatcttagaagaggtgttgagattgtaattgctacacctggtcgtttgattgatatgttggaatgtcaacacactaatttgaagagagtgacttaccttgtactggatgaggctgacagaatgttagacatgggatttgaaccccaaattagaaagattgtatctcagatccgacctgatagacaaacacttctttggagtgcaacatggccacgagaggttgaaactcttgccaggcagtttctacgagatccatataaggccattattggatcaacagatctaaaagctaaccagtctattaaccaagtaatcgagattgtaccgacgccagagaaatacaacaggctccttacactacttaaacagttaatggatgggagtaaaatcctaatttttgtggagacaaagagagggtgtgatcaagtgactagacaattgagaatggacggatggccagctcttgccatacatggtgacaagacccaatcggaaagagaccgagtcttggcagaatttaagagtggacgaagcccgataatgactgccactgatgtagcagcaaggggacttgatgtgaaggacattaaatgtgtggttaattatgatttcccaaatacattggaggattacatccataggattggtcgaaccgggcgtgcaggagctaaaggaatggcctttacattcttcacacatgacaatgct

SEQ ID NO: 117400 - DNA, 983 bp, Arabidopsis thaliana
tttgtccgcggacctctagtgcaatttttagggttttatcctccgaaagtctcaacctttttcttatcctcaacaaggagaaatggcggcgactcaacttacagcgtcaccagtgactatgtcagcaaggagcttagcctcgctggatggtctcagagcttcgagtgtcaagttttcatctttgaaaccagggacccttagacagagccagttccgtcgtttggttgtcaaagctgcttctgttgttgcccctaagtatacttcaattaagccattgggagatcgagttttggtgaagatcaaggaggcagaggagaagactttaggtggtatcttacttccatccactgctcaatcaaaacctcaaggaggtgaagtcgttgccgtgggtgaaggaagaactattgggaagaacaaaattgatatcactgtccctactggagcacaaattatctactccaaatacgcaggaactgaggtggagttcaatgatgtgaagcatcttatcctcaaggaagatgatattgttggcattcttgagacagaggacatcaaagatctcaaacctttgaatgaccgagtctttattaaggttgctgaggcggaggagaaaacagctggagggttgttgttaaccgagactaccaaagagaagccttctattggcacggtgatagcagttggaccgggttccctagacgaggaaggtaaaattacgcctctaccagtatcaaccggaagcacagtactttactccaagtatgctggtaacgacttcaagggcaaagatggttccaactacattgccctcagagcttcagatgtgatggctatactttcttagttatgttatatctttgtaatctgcaacttgtatcccaattgtggaaatttttttccgtaaacggcctgagcataatctggaataaagactttgagtttgaaaatgtgattttattggtgatctaaaaaaaaaaaaaaaa

SEQ ID NO: 117401 - DNA, 884 bp, Arabidopsis thaliana
  unsure (1)..(884): unsure at all n locations
nnnnnnnnnnnnnnnnnnnnnnnnnnnnnnnnnnnnnnnnnnnnnnnnnnnnnnnnnnnnnnnnnnnnnnnnnnnnnnnnnnnccacgcgtccgcccacgcgtccggggaagaacaaaattgatatcactgtccctactggagcacaaattatctactccaaatacgcaggaactgaggtggagttcaatgatgtgaagcatcttatcctcaaggaagatgatattgttggcattcttgagacagaggacatcaaagatctcaaacctttgaatgaccgagtctttattaaggttgctgaggcggaggagaaaacagctggagggttgttgttaaccgagactaccaaagagaagccttctattggcacggtaagtgctcacttgatatcatgtccattcggggaatctgatactttcttagtagcttgatgtgatagtcagttcatacacaagttccaattatacatattctcctcttcattttatggcaggtgatagcagttggaccgggttccctagacgaggaaggtaaaattacgcctctaccagtatcaaccggaagcacagtactttactccaagtatgctggtaacgacttcaagggcaaagatggttccaactacattgccctcagagcttcagatgtgatggctatactttcttagttatgttatatctttgtaatctgcaacttgtatcccaattgtggaaattttttccgtaaacggcctgagcataatctggaataaagacttgagtttgaaaatgtgattttattgctgatttcatgttaaaaaaaaaaaaaaagggcggcagctctagaggatccaagcttacgtacgcgtgcatgcgacgtcatagaacttctatagttcgtcctcaa

SEQ ID NO: 117402 - DNA, 2104 bp, Arabidopsis thaliana
  unsure (1)..(2104): unsure at all n locations
nnnnnnnnnnnnnnnnnnnnnnnnnnnnnnnnnnnnnnnnnnnnnnnnnnnnnnnnnnnnnnnnnnnnnnnnnnccacgcgtccgtgcggctgcgagacgacagaagggtacggctgcgagaaacgacagaagggggcttctgtggctaacaaagagcaaacaaacacttagaagaaactaagaatactctcatcaaggcgatatagaaaaaaatggagagcaaagggagttggacagtggctgatgccgtagactacaaaggacggcctgccgacaaatccaaaaccggtggttggatcactgccgctctcattcttgggatagaagttgtggagaggctatcaacaatgggaatagcagtgaatttggtaacatatttgatggagacaatgcatctcccaagttcaacctctgccaacattgtcactgatttcatgggcacttccttcctcctatgcttgctcggtggttttctcgctgactccttcctcggccgtttcaaaaccatcggcattttctcaaccattcaagctctgggaactggtgctctagcggtagcaactaagctgccagagctacgtccaccaacatgccatcatggagaagcttgcatacccgcgaccgccttccaaatgacaattctttatgtttcgctttaccttatagcccttggaactggtggtcttaaatctagtatctctggatttgggtctgaccagtttgatgacaaagatcctaaagagaaagctcacatggctttcttcttcaacaggttcttcttctttattagtatggggacattattggctgtgactgttttagtttacatgcaagatgaagtgggaagatcttgggcttatggaatctgcactgtctctatggctatagctattgtaatattcttgtgtgggactaagagataccgttataagaagagccaaggaagtcccgttgtgcaaatatttcaggtcatagcagctgcgttccgaaagaggaaaatggaactacctcaaagcattgtttatctttatgaagataaccctgaaggcattagaattgaacatactgatcagtttcacttgttggacaaggcggccatagttgcagaaggagattttgaacaaacccttgatggagttgcaatcccaaacccttggaagctaagctcagtgaccaaagttgaggaagtaaaaatgatggttaggcttttgcctatttgggcaacaactataattttttggacaacatatgcccaaatgattacattctctgttgagcaagcttcaactatgagacgtaacattggaagctttaagatcccagctggttccctcaccgtgtttttcgttgcggctattctcataactctagctgtctacgaccgtgccataatgcctttttggaagaaatggaaaggaaaaccaggtttctctagcctacaaagaatagctattggattggtcttatcaaccgctggaatggcagctgcagctctagtagagcaaaagcgtttatccgttgcgaaatctagttcacaaaaaacattgcctataagtgtgtttttacttgttccacaattcttcttagtaggagctggggaagcctttatctacactggccaacttgatttcttcataacacaatcgcctaagggaatgaaaactatgagcactggactcttcttgaccactttatcactaggtttctttgtcagcagtttcttggtctcaatcgtcaagagggtcacttcaacttctactgatgtaggatggctggctgataacattaaccacggccgactcgattacttttattggcttttagtcattctcagtggaattaacttcgttgtctatatcatatgtgccttgtggtttaagccaacgaagggtaaagactcagtagagaaggaaaatggcaagggattttcagttgaagactgctgaattttgttttgcaataattgtcttgtgtacaatattatcttgcaacaatgtcgctttccaattatgtttcttgtatattaagcaattggcttgtttttagattcctcccggtctcaaatattgtgtctttaccgttaaaaaaaaaaaatcttttttt

SEQ ID NO: 117403 - DNA, 1250 bp, Arabidopsis thaliana
  unsure (1)..(1250): unsure at all n locations
nnnnnnnnnnnnnnnnnnnnnnnnnnnnnnnnnnnnnnnnnnnnnnnnnnnnnnnnnnnnnnnnnnnnnnnnnnnnnccacgcgtccgtagaagacgacagaagggtacggctgcgagaagacgacagaatgggaaccaaacaaatcgagaaagacgaacacttacaaaaaaaaatctctttgtgagctttagcgatcgtaacaatggcgaacgaggtgattcttcttgatttctggccgagtatgttcgggatgaggacaaggatcgcattgagggagaaaggtgttgaatttgagtacagagaagaagatctaaggaacaagagtcctttgcttctccagatgaatccgattcacaagaagattcctgttctcatccacaatggtaaaccggttaacgaatctatcatccaggttcagtacattgacgaggtctggtctcacaagaaccctatccttccttctgatccttacctgagagctcaagctaggttctgggctgatttcattgacaagaagctgtatgatgctcagaggaaggtgtgggcgacaaagggtgaggaacaagaggcagggaagaaggatttcattgagatactcaagactcttgaatctgagcttggagacaaaccttactttagtggcgatgactttggctatgtagacattgcgttgattggattctacacatggtttccagcatacgagaagtttgctaacttcagtatcgaatctgaggttccgaaactgattgcttgggttaagaagtgtttgcagagggagagcgtggctaagtccttgcctgatcctgagaaggttactgaattcgtctctgagctcaggaagaaatttgtacctgagtaaatatgtttctcttgtcatatggttcggacttaagatgctctctgttttactttcgtgtgttgtctttcttaaataatgcagagcatctgtgaggtggtttgagtgtagagaatgtatgtctttgctgtagcagattcctgtgttttctggatttaatggcttgtcctagtttttatgcattgtaactatgagtttaattaatgatcgttaatctataatgattattaatttgttaaaaaaaaaaaaaaatcgccccnnnnnnnnnnnnnnnnnnnnnnnnnnnnnnnnnnnnnnnnnnnnnnnnnnnnnnnnnnnnnnnnnnnnnnnnnnnnnnnnnnnnnnnnnnnnnnnnnnnnnnnnnnnnnnnnnnnnnnnnnnnnnnnnnn

SEQ ID NO: 117404 - DNA, 808 bp, Arabidopsis thaliana
  unsure (1)..(808): unsure at all n locations
ctcgtgcgtcgacgcaagcctatatactgatgcgaaataacgacagaagggggtcccaatcaaacaaatcgagaaagacgaacacttacaaaaaaaaatctctttgtgagctttagcgatcgtaacaatggcgaacgaggtgattcttcttgatttctggccgagtatgttcgggatgaggacaaggatcgcattgagggagaaaggtgttgaatttgagtacagagaagaagatctaaggaacaagagtcctttgcttctccagatgaatccgattcacaagaagattcctgttctcatccacaatggtaaaccggttaacgaatctatcatccaggttcagtacattgacgaggtctggtctcacaagaaccctatccttccttctgatccttacctgagagctcaagctaggttctgggctgatttcattgacaagaagctgtatgatgctcagaggaaggtgtgggcgacaaagggtgaggaccaagaggcaggggaagaagggtttcattggagtacctaaggcctcttgaattctgagctttggaggcaaacccttactttagtggcggtgcctttggctatgtaggcattccggttggttgggtttcacaatggttcccagcattcgggaaggttctaacttcaggatcgaatctgagggnccgaaactgccttctttgggttaaaaagggtttcagagggggagcggtggataagccttcctcaacccttangggtcctaattcgctttggcccagagaaattttccccggaaaaatgtcnttgcaaatggcggcctata

SEQ ID NO: 117405 - DNA, 415 bp, Arabidopsis thaliana
cattattgtatcataaatattctcatctataaattacctaaacccttacaggtagtgtcccaaccaaacaaatcgagaaagacgaacacttacaaaaaaaaatctctttgtgagctttagcgatcgtaacaatggcgaacgaggtgattcttcttgatttctggccgagtatgttcgggatgaggacaaggatcgcattgagggagaaaggtgttgaatttgagtacagagaagaagatctaaggaacaagagtcctttgcttctccagatgaatccgattcacaagaagattcctgttctcatccacaatggtaaaccggttaacgaatctatcatccaggttcagtacattgacgaggtctggtctcacaagaaccctatccttccttctgatccttacctgagagctcaagc

SEQ ID NO: 117406 - DNA, 1264 bp, Arabidopsis thaliana
  unsure (1)..(1264): unsure at all n locations
ccagctctattctgactcacattagggaaagctggcccgcctgcaggtaccggtccggaattcccgggtcgacccacgcgtattctccgacgcattacattttcttccgatcaatacagagagatcagtttctgagagagaagaagatgtctatagaggaagaaaacgttccaacgactgttgactcaggagctgccgatacaacggtgaaatctccggagaagaaaccggcggcgaaaggtggtaaatctaagaagacgacgacggctaaagcaacgaagaagcctgtgaaagctgctgctccaacgaagaagaaaacaacttcctctcaccctacctatgaagagatgattaaagatgcgattgtaacgttgaaggagagaactggatctagtcaatacgcgattcagaaattcatagaggagaaacataaatcactgcctcctacttttaggaagcttttgcttgtgaatctcaagagacttgttgcttctgagaaattggttaaagtcaaagcttcttttaagattccttctgctagatccgcagcaacacctaaaccggctgctccggttaagaagaaggcaactgtagtagctaaacctaagggtaaggttgctgctgctgttgctcctgctaaagctaaagcggcgggctaaaggaactaagaagcctgcggctaaagttgttgctaaggctaaggttactgctaaacctaaggctaaggttactgctgctaaacctaagtctaagtctgttgctgctgtttccaagactaaagctgttgctgctaagcctaaggctaaggagagaccagctaaagcttctaggacttcgactagaacatctccagggaaaaaagttgctgctcctgctaagaaagtggctgtgactaagaaggctccggctaagagtgtgaaggtgaagtctccggcgaagagagcttcgactaggaaggctaagaagtgaagaagattggtttaggataggttttggggggagattgaatacatggtggtggttagcttctatagggtagtcttgtataattgaatcatccttgaaggagcttgctttccaaagttttttacttgtttctttggtttcttcttgaaacttttttttttcttctttgtaagttttggtttgtttgaattttaagccttttgatccataaaaaaaaaaaaaaaaagnnnnnnnnnnnnnnnnnnnnnnnnnnnnnnnnnnnnnnnnnnnnnnnnnnnnnnnnnnnnnnnnnnngtcc

SEQ ID NO: 117407 - DNA, 425 bp, Arabidopsis thaliana
  unsure (1)..(425): unsure at all n locations
aaattctccgacgcattacattttcttccgatcaatacagagagatcagtttctgagagagaagaagatgtctatagaggaagaaaacgttccaacgactgttgactcaggagctgccgatacaacggtgaaatctccggagaagaaaccggcggcgaaaggtggtaaatctaagaagacgacgacggctaaagcaacgaagaagcctgtgaaagctgctgctccaacgaagaagaaaacaacttcctctcaccctacctatgaagagatgattaaagatgcgattgtaaccgttgaaagggggagaccttgggttcttngtcaattcnggcgggttcagaaatttcctttgggggggaaccataaatccccttgcccccctncttttttaggganngcttttttcttnttgaaatcccnaaggg

SEQ ID NO: 117408 - DNA, 1476 bp, Arabidopsis thaliana
cagctacatacgactcacattagggaaagctcgtacgcctgcaggtataataaaaagcattttcttctttcgattgcttcagattcgtcagctcactctttcctctccagaagaaaccctagacatctcatcgccaaaatgttcagatctatgctcgtccgatcttctgcctccgcgaagcaggcggttatccgccgtagcttctcctccggctccgtccccgagcgtaaagtcgccatccttggtgccgccggtggaattggtcagcctcttgctctcctcatgaagcttaatcctcttgtctcttccctctccctctacgatatcgctaacactcctggagttgctgctgatgttggtcacatcaacaccagatctgaggttgttggatacatgggcgatgataacttggccaaagctcttgaaggagctgatctcgttatcattccagctggtgtaccaaggaagcctggtatgacccgtgacgatcttttcaacattaatgctggaattgtcaagaacctttgcactgccatcgccaagtactgcccacatgcgcttattaatatgatcagcaaccctgtgaactctactgttccaattgcagctgagatatttaagaaggctggtatgtacgatgaaaagaaattgtttggtgttaccactcttgacgtcgtcagggccaggactttctatgctggaaaggcaaatgtcccagttgcagaagttaatgttccggtgattggtggtcatgctggggttactattctccctctcttctctcaggcaactcctcaagccaacttgtcaagtgacatacttaccgcccttactaagcgtacccaagatggaggtacagaagtcgtggaggcaaaagcaggaaaaggttcagctacattgtccatggcctatgccggagcattgttcgctgatgcatgcttgaaaggactcaacggtgttccagatgtcatagaatgctcatacgtgcaatctacaatcaccgagcttcctttctttgcctcgaaggtgaggttggggaagaatggtgtggaggaggttcttgacttgggaccactctcagactttgagaaggaaggcttggaagcattgaagccagaactcaagtcctccatagaaaagggagtcaagtttgccaaccagtgattaaaccgagtttactcggtaatttttccaattttccagctagagttgccacctcctccttcatcgggttgtatcaataaaaaatccatgtttgtgcctccattagtgaaaccataaggctctttttggttaatcaccaaactcaaagaaaaactgtaacatgtcaaagttgtaattctttcttcctttttggaaccatgcgactttttttttcatggacaacgagatcataaagtatgaaaaaaaagggcgaccgctctagaggatccaagcttacgtacgcgtgcgtgcgacgtcatagctcttctatag

SEQ ID NO: 117409 - DNA, 1633 bp, Arabidopsis thaliana
  unsure (1)..(1633): unsure at all n locations
atgatcctgccagctactatacngactcactttagggaaagctcgtacgcctgcaggtaccggtccggaattcccgggtcgacccacgcgtccgaagagacaaaaacaacttgaagataaagggataaggaaggcttcctacatgatggacaacatttctttcacacaaattctcataataaaaatcttataatacaaatacttacgtcataatcattcaatctagtccccatgttttaaggtcctgtttcttgtctgatacaaattaaaactcttaaacagcttcctaacgagaggaaactgaggaacacaacaatggagtttcgtggagatgccaaccagaggattgctaggatttcagctcatctcactcctcagatggaggccaagaactctgtaatcggacgggaaaactgcagagctaaaggtggtaatccaggattcaaagtagcaattcttggagctgcaggtggaattggacaatctttatctttgctgatgaagatgaaccctcttgtctctttacttcatctctacgatgttgtcaatgctcctggcgtcactgctgacgtcagtcatatggacactggagctgttgtccgcgggttcttgggagcgaagcagcttgaggacgcgctaacgggtatggatcttgtgatcataccagccggtataccgaggaaaccagggatgacccgcgatgatctgtttaaaatcaatgctgggattgttaaaacactatgtgaaggtgtagcaaaatgttgtcctaatgctattgtcaacttgatcagcaaccctgtgaactctactgtccccattgccgctgaggttttcaagaaagctggaacttatgatcctaagaagctccttggagttactacactcgatgttgctcgtgccaacacatttgtggcagaagttcttggccttgatccaagagaagtcgatgtgccagtagttgggggacacgccggagtcacaatcttgccactactgtcacaggttaaacctcctagcagcttcacacctcaagaaattgagtacctgacaaaccggattcaaaatggtggaactgaagttgtggaggcaaaagctggagctggttctgcaacactttcaatggcatatgctgcagccaagtttgcagatgcttgccttcgcgggttaagaggagatgcgaatgtcgtagaatgctcttttgttgcttcacaggtgacagaattagctttctttgcaacaaaagtgcgccttggccgtacaggagcagaggaagtgtatcagcttggacccttaaacgaatacgaaaggattggtctggagaaagcaaaagatgaattagccggaagtattcagaaaggtgttgaattcatcagaaaatgaaactgagagataatcagagagatacaataagttatttcctcaactatatgatcatgtactcatcatcacatcatgcctatgtctcctctgcttctgatacaactttgtataaatccttatcagtttgtgtacgatatatgtgaccttttccaaaaaaaaaaaaaaaaaaaaaaaaaaaaaaaaaaaagggcggccgctctagaggatccaagcttacgtacgcgtgcaggcgacgtcataactcttctatagn

SEQ ID NO: 117410 - DNA, 1103 bp, Arabidopsis thaliana
ggagctccaccgcggtggcggccgctctagaactagtggatcccccgggctgcaggaatttggttatggtatctttggtacttatggctattgcaacgatgtgttgtgtccaagctacgatcgaggaagaagcggctaaggatgaatcatggactgattgggcaaaggagaagatcggtctcaagcacgaagacaacatccaacccactcacaccaccacgaccgttcaagacgacgcttggagagcgagtcaaaaagccgaggacgcaaaggaggcggctaaacgcaaagcagaggaagcggttggagccgcgaaggagaaagcgggttcggcatacgagacagctaaatcgaaagttggggagggtttgggttctgtgaaagacaaggcctcgcagagttacgactcagctggtcaagttaaggatgacgtgtctcacaagtcaaagcaagttaaagatagcttgtcgggagacgaaaacgatgagtcttggaccggttgggccaaagagaaaatcggaatcaagaacgaagacatcaacagccctaacttgggagagacggtatctgagaaggcaaaagaagctaaggaagcggctaaacgcaaagcaggagatgctaaagagaagttggcggagacagttgagacggcgaaagagaaggcgagcgatatgacgagtgcagctaaggagaaggcggagaagttgaaggaggaagcagagagagagagtaagagtgcgaaggagaaaattaaagaaagttatgagactgcaaaatcaaaagccgatgagactttagagtccgcgaaagataaggcgtcgcagagttacgactcagctgcgcgtaaatcggaggaagctaaagataccgtgtctcacaagtcaaaacgtgttaaagagagcttgaccgacgatgatgctgagctctgagaagttgggagaaactcatcgatgacttgaacagtgttaagatgttgatcttgcttttcttgttacaggtgtttaaatatgtaatcatgttttaatctttttcatgttcttttttatttttggtttagttgtgtgtatgtgttgatctttcggaatatacacattacgttcctg

SEQ ID NO: 117411 - DNA, 439 bp, Arabidopsis thaliana
ctagattataagttatataatcatataatattttgtgttcgattagtgtaacaaaaatggggttagagaggaaagtgtacggtttggttatggtatctttggtacttatggctattgcaacgatgtgttgtgtccaagctacgatcgacgaagaagcggctaaggatgaatcatggactgattgggcaaaggagaagatcggtctcaagcacgaagacaacatccaacccactcacaccaccacgaccgttcaagacgacgcttggagagcgagtcaaaaagccgaggacgcaaaggaggcggctaaacgcaaagcagaggaagcggttggagccgcgaaggagaaagcgggttcggcatacgagacagctaaatcgaaagttggggagggtttgggttctgtgaaagacaaggcctcgcagagttacgactcagctgg

SEQ ID NO: 117412 - DNA, 1159 bp, Arabidopsis thaliana
ttactcttcttctcgacttcggaatctttcaaagcttcttcgatttttccagaggcaatcatggttaaaggtccaggactctacactgaaatcggcaaaaaggccagagatcttctgtacagggattaccaaggagaccagaaattcagtgtcaccacttactcttcaactggtgttgcgatcactacaacgggaacaaacaaaggaagcttgtttttgggtgatgttgctacccaagtgaagaacaacaacttcactgctgatgtcaaagtttccactgattcttctcttttgaccactcttacctttgatgagcctgcccctggactgaaagttattgttcaggctaagttgcccgatcacaaatctggaaaggctgaggttcagtatttccatgactatgctggtatctctaccagcgttggattcacagctaccccgattgtcaacttctccggtgtggttggaaccaatggtttgtctcttggtactgatgtggcctataacaccgaatctggcaacttcaaacatttcaatgctggtttcaacttcaccaaggatgatttgactgcttccctcattctgaatgacaaaggtgagaaattgaatgcatcctactaccagattgtgagcccgtcgactgtggttggagctgagattagccacaacttcacgaccaaagagaacgccatcactgtcggaactcaacacgcgcttgacccattgaccacagtgaaggcaagagtgaacaatgctggtgtggctaacgctctgatccaacatgagtggcgtccaaagtcgttcttcaccgtttctggagaggttgattctaaggcgatcgataagagtgccaaggttgggattgctctcgctctcaagccctgagaagataccaccaaatgggccctgaagtgggtagaataggtgttatttctttttcgtcttcaaatctttggacaaatcgctgtctggtttgctaaacaatctttcatttgttttttttgttcggtgttgggatttgtagaaaataaaagagaaaaatactattgaaaggatcgtctttgacgataaagaaccattaagatcgttttgcggccgctctagaggatccaagcttacgtacgcgtgcatgcgacgtcatagctcgtctggagttcac

SEQ ID NO: 117413 - DNA, 694 bp, Arabidopsis thaliana
  unsure (1)..(694): unsure at all n locations
gctggtacgcctgcaggtaccggtccggaattcccgggtcgacccacgcgtccgggaacaaacaaaggaagcttgtttttgggtgatgttgctacccaagtgaagaacaacaacttcactgctgatgtcaaagtttccactgattcttctcttttgaccactcttacctttgatgagcctgcccctggactgaaagttattgttcaggctaagttgcccgatcacaaatctggaaaggctgaggttcagtatttccatgactatgctggtatctctaccagcgttggattcacagctaccccgattgtcaacttctccggtgtggttggaaccaatggtttgtctcttggtactgatgtggcctataacaccggatctggcaaccttcaaacatttcaaatgctgggtttcaactttcaccaagggtgattttgacctgnttccntcattctgaatgacaaaagggtgagaaaatttgaatgcatcctacttaccagattgtaaggcccgttggctttgggtgggggtnaggttaggcacaactttaanggcccaaagggnncgncattaactttnggnccttaaaangggttttncccattgcccnaagttanggaagggtacaatgttggntgggaangggttnnncacatgngggggccaaggggttttacgttttngggggtgtnaaggg

SEQ ID NO: 117414 - DNA, 932 bp, Arabidopsis thaliana
acgcgtccacttcaccagattatcgccgttcgttcagagaaaactttttccgatacacaaaatcggaggaagaagatgatgaagctcaaagtgtatgcagatcgaatgtcacagccatcacgtgctgttatcatattctgcaaggttaatggaatccaattcgatgaggtcttgatttccttggcgaagcgtcaacaattatctcctgaattcaaagatattaacccattggggaaagttccagctattgttgatggcaggcttaagctctttgagagtcacgcaatcctgatatatctatcctcggcgtttccaagtgttgctgatcattggtatccaaatgatctatccaaaagagccaagattcactcagttttggattggcatcacaccaatttacgtcgtggtgcatgctggatatgttctgaatagtgtactaggtccagctcttagtcttcctctgaatccgaaagcagctgctgaagctgagaacatactaacaaactctctgtccactctagagactttttggcttaagggcagtgccaagtttttactcgggggcaagcaaccatctatagctgatctcagccttgtatgtgaacttatgcagctgcaggttttggatgacaaagatcgtcttagattgcttagccctcataagaaagttgaacaatggattgagagtacgagaaaagcgacaatgcctcactctgatgaggtccatgaggtccttttcagagccaaagatagatttcagaagcagcgagagatggcaaccgcatctaaaccgggtcctcaatctaagatgtaagaacaaaaaacttgaccactttcatcagggtctctatatgagagactccttccccctaaagataagtcattcgagatccaaacactccgtttaatttctcatccagtttcatggatca

SEQ ID NO: 117415 - DNA, 848 bp, Arabidopsis thaliana
  unsure (1)..(848): unsure at all n locations
cgcaatcctgatatatctatcctcggcgtttccaagtgttgctgatcattggtaagtttctacttcgtttgacacaaagtgtaatcattttgctttgatgttcatttgtttacttttaggtatccgaatgatctatccaaaagagccaagattcactcagttttggattggcatcacaccaatttacgtcgtggtgcagctggatatgttctgaatagtgtactaggtccagctctcggtcttcctctgaatccgaaagcagctgctgaagctgagcagttactaacaaagtctctgtccactctagagactttttggcttaagggcaatgctaaatncttgctcgggatgaaccaaaccatcctttttgctggcctccgccttgtatgcgaaccttatgcagctgcaggtttttgggatgccaaagatcggccttagggttgctcagcacctcacttgggaagttgaccaatcgggttgngggtccggaaaaagcaacaatccctccctttgttgggccccatgaggtccttttcaaagtcaaagaaggattccagaagcggcgagagatgggaaccttatctaaaccgggtcttcaatccaagatctaagaacttagaacaaaactttggcaaaaccggtttcaggggtcagtcactggttcgttgaagaaaagccgattatctcctattctccattgtaagaaaaataaggaatgtaataatcacttgttttttgaactatatgtaataatcactttatcaaaggtttttaccgaaccaaataannaaaanaggaaanaanaangggnggcccctnttnggggttccnggctttcggtccggggt

SEQ ID NO: 117416 - DNA, 3189 bp, Arabidopsis thaliana
taccggagaaatggcaagcccacataagccgtggagggcggagtatgcaaagtcgtcgaggtcttcatgtaaaacttgcaagtccgtcattaacaaggagaactttcgtcttggaaagttggttcaatctactcacttcgatggcatcatgcccatgtggaaccatgcttcttgtatactgaagaagacgaagcagataaaatcagttgatgatgttgaaggcatagaatcacttcgttgggaagatcagcaaaagattagaaaatatgtcgaatctggagcagggagtaacacaagcacaagcacaggcacaagcacgagcagtaccgctaataatgccaaactagaatatgggattgaagtgtcacaaacttcccgtgccggttgcagaaagtgtagcgaaaagatcttgaaaggagaggtacgtatattctccaagcctgaaggcccgggtaacaaaggtttgatgtggcatcacgctaaatgtttccttgaaatgtcttcctctactgaactggaaagtttgtctggatggagaagtataccagactcagaccaagaagctcttcttcccttagtgaagaaagctctgccggcagccaaaactgagacagcagaagcacgtcaaacaaattcaagagcaggcacaaaacgaaaaaatgattctgttgataacgagaagtcgaaactagcaaaaagtagttttgacatgtctacaagtggtgctttacaaccttgtagcaaagaaaaggaaatggaggcccaaactaaggaattgtgggacctgaaggatgatctgaaaaaatatgtaacatcagctgagttgcgggaaatgcttgaagtaaatgaacaaagtacaagaggatctgaacttgatctgcgtgataaatgtgctgatggcatgatgtttggcccactcgctctctgcccaatgtgctctgggcatctttctttctccggaggactttaccgatgccatggatacatctcagaatggagcaaatgttctcattccactttggatccagaccgcatcaaagggaagtggaaaatccctgacgaaacagaaaatcaattccttctgaagtggaataagtctcaaaagagtgtgaagccaaaacgtattctgcgtcctgtattgtctggcgagacatctcagggtcaaggttctaaagatgcaactgactcctcaaggagtgaaaggctagcagatcttaaagtttcaattgctggaaatactaaggaaaggcaaccatggaagaagagaattgaggaagctggtgcagagtttcatgctaatgttaaaaaaggtacaagctgtttggttgtttgtggactgacagatatcagagacgctgaaatgagaaaggcaaggaggatgaaagtggcaatcgtgagagaggattatttggttgattgttttaaaaaacagaggaaacttccatttgacaagtacaaaattgaagacactagtgagagccttgtcactgttaaagtaaaaggacgaagcgctgtgcatgaagcgtctggcctccaagagcactgtcacattcttgaagatgggaacagtatctataacacaactctgagcatgtctgatctctctaccggtatcaatagttattacatactccagataatccaagaagataaaggttcagattgttacgtatttcgtaaatggggccgagttggaaatgaaaagattggtggtaacaaagtggaggaaatgtcaaagtctgatgcggttcacgaattcaaacgtctatttcttgaaaaaaccggaaacacatgggaatcttgggaacaaaaaacgaatttccagaaacaacctggaaaatttctcccgttggacattgattatggagttaataagcaagtagccaaaaaagagccatttcagaccagtagcaaccttgctccatcattaatagaattgatgaagatgctttttgatgtggaaacttacagatctgcaatgatggagttcgagataaatatgtcagagatgccacttgggaagctcagcaaacataatatacagaagggttttgaggcattgacggagatacagaggctattgactgaaagcgacccccagcctactatgaaagaaagcttgcttgttgatgctagtaacagattttttaccatgatcccttctattcatcctcatattatccgagatgaagatgactttaagtcaaaggtgaaaatgctcgaggctctgcaggatatcgaaatagcttcaagaatagttggctttgatgttgatagcaccgaatctcttgatgataagtataagaagctgcattgcgatatctcaccacttcctcatgatagcgaagattatcgattaatcgagaagtatcttaacacaactcatgccccaacgcatacagagtggagtcttgagctagaggaagtttttgctcttgaaagagaaggagagtttgataaatatgctccccacagagaaaaacttggcaataagatgctcctatggcatggttctcgattaacgaattttgttggaatattgaaccaaggactgagaattgcacctccagaagctcctgctactggttacatgtttggaaaagggatatactttgctgaccttgtcagtaaaagtgctcagtactgctacacttgtaagaaaaatccggtgggtctaatgcttctgagtgaagttgcattgggagaaatacatgagctaacaaaagctaagtatatggataaacctccgagagggaaacactcgaccaaagggctcggcaagaaagtgcctcaagattccgagtttgccaagtggagaggtgatgtgactgttccctgtggaaaacctgtttcatcaaaggtcaaggcttctgagcttatgtacaatgagtatatcgtctacgatacagcccaggtgaagttgcagttcttgttgaaagtaaggtttaagcacaagagatgagcctgaaccaaacaagaagacgtcacttctgttaactaaatgtttttttgggaaatcgaatccaacacgaagacttaacttttgtaactaaattgcttttgataaattgaattcaacatgtagtcacagatttaactctctggcgttgtagatgtttctggttttaaaagagcgtactctacattttgttatgctttttctcagtaatgacacttcttaagacttaa

SEQ ID NO: 117417 - DNA, 3532 bp, Arabidopsis thaliana
gaagctgcaggagttacaagttctcatcttctctagtcttttacatttcacctccctttcgtcggcgacccaaatccacgttttgggaattcctccctaaaaatcagaaacccttggcttttccaacatggaagacgcctacgccagatctgtctcagaggtgcttgatttctttggggtagacccaacaaagggtctttctgattctcaggttgttcatcattccaggctttatggcaggaatgtactgcctgaagagaaaggaacgccattctggaaactggttctgaaacagtttgatgatttacttgtcaagatattgattgtggctgcaattgtttctttcgtattggctttggctaatggagagactggtttaacagcatttctggagccttttgtcattctgctgatattggctgcaaatgcggcagtgggggtgatcacggagactaatgctgagaaggctcttgaggagctacgtgcctaccaagcaaatatagctacagtgttgcgaaatgggtgcttctctatcctaccagcaacagagctggttccaggcgacattgttgaagttacagtgggatgtaagattccagctgacctgaggatgattgagatgtctagcaatacgtttcgagttgatcaagccattctaactggtgaaagctgttccgtggaaaaagatgttgactgtactttaacaacaaatgctgtctaccaagacaagaaaaatattttattttcgggaactgatgtggtcgcgggtaggggaagggctgttgtcattggagttggttcaaacaccgcaatgggtagcatacacgattctatgttgcagacagatgatgaggcaactccattgaaaaagaagctggacgagtttggcagctttttggctaaggtaattgcgggtatttgtgtacttgtgtgggttgtcaacattggtcacttcagtgacccttctcatggtggattttttaaaggcgcaattcactattttaagattgcagttgcccttgctgttgcagctattcctgaaggacttcctgctgtcgtgacaacgtgtttagctcttggaacaaagaaaatggctcgtttgaatgctattgtacggtcattaccatctgtcgagacgcttgggtgcactactgtaatttgcagtgacaagactggaacattgacaaccaatatgatgtcggtgtctaagatatgtgtagtccaatctgcagagcatggtcctatgattaatgaattcactgttagtgggacaacttatgcaccagaaggtaccgtctttgacagcaatgggatgcagcttgacttacctgctcagtcaccttgccttcatcatttagcaatgtgttcatcactctgcaatgactccatcttgcaatacaatccagataaggattcttatgaaaaaattggagagtcaactgaagttgctcttcgagttcttgcagaaaaggttgggctccctggttttgattcaatgccttctgctctaaacatgttgagcaagcatgaacgtgcatcatattgcaaccattattgggaaaaccaattcaaaaaggtttatgttttggagtttactcgtgaccgaaaaatgatgagcgtcctatgtagccataagcaaatggatgttatgttctcaaagggtgctccagagagtataatagctaggtgtaataaaattctctgcaacggtgatggttctgttgttcctctaactgctgctggccgtgcagagcttgagtcgaggttttacaggtttggcgatgaaacattgagatgcttagcattagcatttaagaccgtgccccacggtcaacaaactatttcctatgataatgagaacgacctgacgtttattgggttggtgggaatgcttgatccaccaagagaagaagtgagagatgctatgcttgcgtgtatgactgctgggatacgtgttatagttgttactggggataacaagtccacagcagagtcactatgtagaaaaataggggcttttgacaatctggtagacttttctggtatgtcctacaccgcttctgaatttgaacggcttccagcagtgcagcaaactctagcattgcgacggatgacacttttttccagggttgaaccttcccacaaaaggatgcttgttgaagccctacagaaacaaaacgaagtggtggcaatgactggtgatggcgttaatgatgcccctgcattgaagaaagctgacattgggattgccatgggttctggaacagctgtagcaaagagtgcttcagatatggttttggctgatgataattttgcttcaatagttgcggctgttgcagaaggaagggctatatataataacacaaagcaattcattagatacatgatttcttcaaatataggggaagtggtctgtatatttgttgcagctgtactgggaatccctgataccttggcacctgttcaacttctgtgggtcaatttggtaacagatggattgcctgccactgccattggctttaataaacaagattccgatgttatgaaggcaaaaccccgaaaggttggtgaagcagtggtcactgggtggttattcttccgctatttggttatcggagtttatgtcggcctggccactgttgctggctttatatggtggtttgtttactctgatggtggtcctaaacttacttacagtgaactgatgaactttgaaacttgcgcacttagagagacaacttatccctgcagcatatttgaggatcggcacccatctactgtggctatgacagtacttgttgttgtcgagatgtttaatgctctaaataacctcagcgaaaatcaatcccttctggttataaccccaaggagtaacttatggcttgttggttcaattatcctgacgatgcttctgcacgtgctaatattatatgttcatccactggcagtcttattttctgtcacgccattatcctgggccgagtggactgctgttctgtatctttcgtttccagttatcatcatcgatgagcttctgaagttcctctctagaaatacaggcatgagattcaggttcagattgaggaaggctgatttactccccaaggaccggcgtgacaagtaggataagaaagcaagagatggctttttcgtcatacagattttttttttggctatatagatacaacagcacacagagaagggaaccttgggagattctaatttcaatccaaaaagcccccaacaccataaaccataaaactctttcgcttttgattgtaccaaatttcactgtattcttacatcaaatcaatgactagtgctctttgtgtcatgcaagtgaatcggaaattctaacatttacaacttaaaatgtgattcgcagattatttggttttaaaaaaaaaaaaaaaaaaaaataaaaaaaaaaaaaaaaaaaaaaaaaaaaaaaaaaaaaaaagggcggccgctcgcgatctagaaccggacgcgtgggcggacgcgtgggcggacgcgtgggcggacgcgtggg

SEQ ID NO: 117418 - DNA, 958 bp, Arabidopsis thaliana
  unsure (1)..(958): unsure at all n locations
atggccgtttgcagtaccggtccggaattcccgggcacccccacgggtccgaatttgctatcggatcatctgctaagcttggtttactcttcctagaacatcgattgtatcgaggtttactattggatcaaagatgtctgcagaggagaagaaccttatagagatcttggaggaaggtcacaaagtcgatgttgttaagtacattgattatgtcagtgcccctcaagctggtgctattgcgacattctcaggcactacaagagacatgttcgagggcaagacagtgttggagttaaggtatgaagcatatgtgccaatggccacacgatgcctcagctcgatctgtacaactgctagatcaacttgggatatccacaagattgctgttgctcaccgtcttggaccagttcctgttggagaaactagcgtgctcattgcggtctcatctgttcaccgtgcagatggtttagatgcttgcaagttcttgatcgacgagttgaaggcatcggttccgatatggaagaaagaggtttacactaatggagagatttggaaggagaattctgagtttatggagaaaagattggagcttgcagagaaaagagacagcattgtaaaaaaaactgtggttgaagaacatagaagaagaggttgctgtggaagcaaagttagagtagaagaagatgaagagcataaagatatttcaggagataacaaatcttcttcttgatcacttgtagcagtaacactgtttcgctttttactttcaatagacaaacttttttaagcccattgttgaatctaaagacttatatgcgttagttggttnnnnnnnnnnnnnnnnnnnnnnnnnnnnnnnnnnnnnnnnnnnnnnnnnnnnnnnnnnnnnnnnnnnnnnnnnnnnnnnnnnnnnnnnnnnnnnnnnnnnnnnnnnnnnnnnnnnnnnnnnnnnnnnnnn

SEQ ID NO: 117419 - DNA, 430 bp, Arabidopsis thaliana
gtctgatccaacaagaaggtgaatatagagcacatgttcttcttcatcatgcagccctaccaaactctcaaaggttagaatttgctatcggatcatctgctaagcttggtttactcttcctagaacatcgattgtatcgaggtttactattggatcaaagatgtctgcagaggagaagaaccttatagagatcttggaggaaggtcacaaagtcgatgttgttaagtacattgattatgtcagtgcccctcaagctggtgctattgcgacattctcaggcactacaagagacatgttcgagggcaagacagtgttggagttaaggtatgaagcatatgtgccaatggccacacgatgcctcagctcgatctgtacaactgctagatcaacttgggatatccacaagattgctgttgctcaccgtcttgga

SEQ ID NO: 117420 - DNA, 2071 bp, Arabidopsis thaliana
ataacccacaaagataaaaaaaaaaaaaatgggcatagagcttcagaatcaccagagccaccatgaagaagccagtcctgcagaagagcccatgtcacggtggctgataaatacgccggaaccaccaagcatgtggcaagagcttattgggtacataagaacaaatgtcttggccaagaagaaacataagaggaacaagacgaagaactcatcatcaaaccttgtttactcttgtcttaaatcggctttccctatacttagttggggaagacaatacaaactcaacttgttcaggaaagatttgatggcaggtctcactctcgctagtctttgcattcctcagagtataggatatgctaatttggctggacttgatccagagtacggtctatatacaagtgtggtaccacctctgatatattcgacgatgggaacttcgagagagttagccattggtcctgtggctgtagtttcgcttcttctgtcgtcaatggttcgtgaccttcaagatccagtcaccgacccaattgcttaccgaaaaattgtcttcactgtcacgttttttgctggcgcgtttcaagccatctttggactcttcaggttagggtttttggtggactttttgtcacatgctgcacttgttgggttcatggctggtgctgcaattgtcattggtttacaacaacttaaaggtttatttggtttgactcattttaccaataaaaccgatgtagtttcggttttatcttcggttttccactcgcttcaccatccgtggcaacctctgaactttgtcatcggtagctcattcctcatcttcatcctcctagctagatttatcggaaaaagaaacaataagttgttttggattccagcgatggcaccgctaatatcagttgtattagcaacactaatagtgtatttatccaatgctgagtcacgaggggttaagattgttaaacacattaaaccagggtttaaccagctttcagttaaccaattacaattcaaaagtccacatcttggtcaaatcgccaaaattggtcttatttctgcaatcatcgccctaacggaagcaatcgcagtgggaagatcgtttgcgacgatcaaaggatatcgtttggatgggaacaaagagatgatggctatgggatttatgaatatcgctggttctttatcttcttgctatgtagctaccgggtctttctcaagaacggcggtgaatttcagtgctggttgcgagacggtggtttcaaacattgtaatggcgattacagtgatgatttcactagaagttttgacgaggtttctctacttcacaccaacggcgattcttgcctccataatcctctcggcgcttccaggtctcattgatgtctctggtgctttacacatttggaaactcgataaactcgattttctcgtcctcattgccgccttcttcggcgtcctctttgcctccgtcgagatcggtcttcttctcgccgtggggatatcgtttgcaagaataatgttgagttcgataagaccaagcattgaggccttagggaggttatcaaaaacagatatcttcggtgacataaatcagtatccaatggcaaataagactgcaggattattgactcttcgaatcagttctcctttgctatgctttgctaatgccaattttataagagacagaatattgaattcagttcaagaaatagaaggagaggagaatgaacaagaagttctaaaagaaaatggtcttcaagtagtaattctcgacatgtcttgcgtgatgggcgtagatacatcaggagtatttgcacttgaagaactacatcaagagctagcttctaatgacatccggttagtcatcgctagtcccagatggagggtacttcacaaattgaagcgagcaaaattggacgagaaaataaagacagaaaatatatatatgacagtaggagaagccgtagatatttatgtaagagcaagatctacgtcccacgagttgtgttgatatatatatgtaagaaacagtacaactcaaacatataacctagtgataattttattgttttctcat

SEQ ID NO: 117421 - DNA, 1647 bp, Arabidopsis thaliana
cttgctcgaacaaaaaaattctctccgcgatacttacaaagcacaagtgagctagctttgagaaagattcaatttttgagccttaagattgtgatgggagttgtgtctatttcaagttcagctgcaagatctccactcgggttgggcaacgatcttttgacacatcggtcttcacttaaaaagccatccattgttgcttttaaagccgatgattccagcaattcagctttgatcattcctcctcgtgagcaagttttgattcctgctgaaaagcataatgagaagaagagagaagtaacgaggagaaagccttgtaaaaccccgaaaaaaccgctttccttggaacataattcggctccttcgtgttcgttaggagtagattacaatgaagctgctgcaagacttgaaagcatatacaagcttagtcctgcaacaaccacattagtcgaggatgatgttgaagatggcggctctaaagccaaagtttcacggaggagaaaaaggaaagaaagtggtgaggagaagaaagtggttgtgaggaataatgtgaagaaggaaaaacgtatgagtcttgataaacggattgctttgaagagaaacgttcaagagaaaccagtcgttgcttctgttgataagaaagtaacaaagaggcagcaagaagaggagaagatcgagaggcttgtgcgggactattcagcttctaatgatatagtgagcttggactggaaaaaaatgaagatacctcctgttctttcttctactgaacatgcttggttgttcaagttgatgcaacctatgaaggctcttcttgaagtgaaagatgtattgcaaaagagcttgggaagagagcctagggaagctgaaatagccggggagatcaatatgactgcgggtgaagtaaaaaagaaaatcgaaataggtagagctgcaagaaacaaacttattaagcacaatctccggcttgtcttgtttgttatgaacaaatactttcatgagtttaccaacggaccaaaattccaagacctttgtcaagcgggtatgagagggcttatcacagcaattgaccgctttgagccgaaaaggaagtttcgtctttcgacttatggtttgttttggattagacatgccatcatacggtcaatgacaacttcaaacttcactcgtgtcccatttggacttgaatcggttagagtggagatatataaagcaaagactgagctatggtttgagatgggaagacctccaacggaggacgaggtagttgagagactcaagataacacctgagagataccgtgaagtattgagggctgcaaaaccggttttgtcactaaattcaaaacattcggttactcaagaagaattcatcaacggaatcacagatgttgatggtgttggagctaataacagcagacagcctgctcttctcaggctcgctctcgacgatgtgctcgattcattgaagccgaaagagagtctggttattcgacagaggtacggtcttgatggaaaaggcgacaggactctaggagagatagctggaaatctcaacatctctagagaaatggttaggaaacatgaagtcaaggccttgatgaagcttaagcatcaggccagagttgattaccttcgtcaatacatcgtctaa

SEQ ID NO: 117422 - DNA, 1083 bp, Arabidopsis thaliana
cacgagaacacatccttccctctcctcctcctccttccccaaaaaacctggagaaccatgcagttgcaatttcctctttaacccatttcaaagattcgtttttttttttttgtaaatctctttctcctttggcgaattcgtattccttcttttccaatgagttctagagacagaggatcaccttcttcttcttcgtcatcttcttcgttaccaggaatagaaaagtataatgaaaaggtgaagaatcagatacaagctcttgttcgtgttattaaagttgctcgtacctatagagacgacaatgtcccttcccttattgaacagggtctttatcttggatctgttgcagcagctagtaataagaatgttttgaaatcttacaatgttacacatattttgactgttgctagttcgttgagaccagctcatcctgatgactttgtttacaaggttgttcgagtcgtggataaggaagatacaaatctagaaatgtacttcgatgagtgtgttgatttcattgatgaagccaagagacaaggcggtagtgttcttgttcattgctttgttggcaaatcacggagtgtcactatagttgttgcttacctcatgaagaaacacggtatgactttagctcaagcattgcaacatgttaaaagcaaaagacccgtggcaagtcctaatgctggtttcatcagacaattacaagacctcgagaagtctatgcaagtgagtgaccagtttttttccttttgaggatgaaaagcaagtggttgtggaggagaagacagttccatgtaaatatctcttacatgcatcttccttcttctctataaaacagggaagcaagttacgattgcacaatgtcaggcgtgaagatcattgatcgtaccattgggagaaacttgtaaatctcacacgaagcatcaatcaaaatgttttgttgtttcttctccttaacaactcgaataataacatggaaacgaatttggaatatgttcatgttctctattcgttttgtatagtttcatcatcatggatataaaagtgaacataaataaaaatttgtaaaaaaaaaaaaaaaaa

SEQ ID NO: 117423 - DNA, 679 bp, Arabidopsis thaliana
  unsure (1)..(679): unsure at all n locations
cctttacttgcagtgtcactatagttgttgcttacctcatgaagaaacacggtatgactttagctcaagcattgcaacatgttacaagcaaaagacccgtggcaagtcctaatgctggtttcatcagacaattacaagacctcgacaagtctaggcaaggtatgccttactataatatcttgaggtctagactattaggttgagatctctgtggtgaatctaagttggagatactctgtctgtctgattcagtagtgagtgaccagtttttttccttttgaggatgcaaagcaagtggttgtggaggagaagacagttccatgtaaatatctcttacatgcatctcccttcttctctataaaacagggaagcaagttacgattgcacaatgtcaggcgtgaagatcattgatcgtaccattgggagaaacttgtaaatctcacacgaagcatcaatcaaaatgttttgttgtttcttctccttaacaactcgaataataacatggaaacgaatttggaatatgttcatgttctctattcgttttgtatagtttcatcatcatggatataaaagtgaacataaataaaaatttgtaaaaaaaaaaaaaaaagnnnnnnnnnnnnnnnnnnnnnnnnnnnnnnnnnnnnnnnnnnnnnnnnnnnnnnnnnnnnnnnnnnnn

SEQ ID NO: 117424 - DNA, 1385 bp, Arabidopsis thaliana
accacgcgtccgaccagtcttcgggtctctcctcctcgcggctcgaaacgcaagcttcacgcttgaaaatctccgttcgttttctacctcgtttagatcggagatggcggagaagccggcgcaagagcaagagcagaagcgagcgatggaacctgcagttctcgacgatattattcgtcgtttggttgagtttcggaacacgagacctggatcggggaagcaagttcatctcagtgaaggtgaaattcgtcagctttgtgctgtctccaaagaaatatttcttcaacagcccaatctgcttgaattggaagctcccatcaagatctgcggtgatattcatgggcagtattcagatctattgaggctttttgagtatggagggttccctcccgaagctaattatttgttcttgggtgattatgttgaccgtggcaagcaaagcttggaaacaatatgtcttcttctagcttacaaaatcaagtaccctgagaacttcttcttgttgagagggaatcatgaatctgcttccattaatcgtatttacggtttctatgatgagtgcaaacgcaggttcaatgtcagactctggaaaatattcaccgattgctttaactgtcttcctgtggccgccttaattgatgacagaatactatgtatgcatggtgggatttccccagagctgaaaagtttggaccagattagaaatattgcacggccgatggatattccggagtctggtttggtatgtgatttactatggtcggatcctagtggagacgtaggctggggcatgaatgatcgtggtgtttcatacacttttggagctgacaaagtcgcagagttcttggagaaacatgacatggaccttatctgtcgtgcccaccaggttgttgaagatgggtatgagttctttgcagaaagacaacttgttacagtattttcagctcccaactattgcggggaatttgacaacgctggcgcaatgatgagcattgatgagagcttaatgtgctcattccagattctaaagccgtcagaaaagaagtcgccttttctgtgacaccgattatccagtgaccaccattgcttcaaattaacaattctacaaaagttgtatactggcaagaggatctagagacggaaactgctcaattgggaccttaatggtactgataatagagcattagacatgtagctgttgacagtgatggcatcgagcagaaggaacaagtcaagtctgtactgtgattttagcatctctcacatctatgtttgtctaaaatgtgtgtgtgtttttagtcttctctctgaataatattagattctcatttgtactctctatttatttaggagaacccaaattcaaaactttttttagtctcttc

SEQ ID NO: 117425 - DNA, 1886 bp, Arabidopsis thaliana
atttagttataaaatgttgctatttgttgatctagtgctctgaatcttttagtgaggcagatgatgaagattatgaatttcttcatgaaattattgtaagaaaaagaacatagagaagctgcggaatgaaagtacactgttctttcacggagaaagaagataaataagcattatcttcttcttcagtttttaacacacattttggaaattttgatgtaaaaattctctttggaacgttgtgttgtctgaaatcttcccaaaggttctatcagaagaagaaggataaagtttcatagaaacccaatggacaacaacaacaacaacaacacttttagttctctggataatgtcatgactaaccaaaatcctcttctcatggattttataccttcaagagaagattcaacttcattctcaacaatgcttccatggaataccatcagatcagatcctctacaaatgggtggctttgatattttcaattctatgctgactaacaaatacttatcatcttctccacggtctatcgatgttcaagataaccgcaatgttgagttcatggctcctcctcctcatcctcctccacttcatcctttggatcatttaagacactatgatgattcctcaaacaacatgtggggttttgaagcaaatagtgagtttcaggcattttcaggtgtagttggtccaagtgaaccaatgatgtctacattcggtgaagaagatttcccgtttctaatttcgaataaaagaaacaatgagctttcattgagtcttgcatcagatgtttctgatgaatgctcggagataagtctttgtgcagctacaagattagcctcagagcaagcttcttgcagcagcaaagacatttctaataacgttgttactcaaggtttctctcaacttatatttggctcaaaataccttcactctgttcaagaaatactatctcatttcgccgcatactcgctcgattattcatctcgaggaaccgagtcaggagctgctagttcagcctttacttcacgttttgagaatataactgagtttcttgatggtgattctaataactcggaggcgggtttcggatctacatttcaaaggagagcattagaagcaaagaaaacccatctcttggatcttcttcaaatggtggatgatcgatatagtcattgcgtagatgagattcatacggttatatcagcgttccatgctgcaaccgagttagatccacagttacacacccggtttgccctccaaaccgtttccttcttatacaagaacctgagagagagaatctgcaagaagataatctctatgggatctgtattggagagaggcaaagacaagactcaagaaacctctatgttccaccagcattgccttcttcagcagctgaaacgaaagaaccatcagatttggagacctcaacgaggtttgcctgagaaatctgtttcggttctacggaattggatgttccaaaacttccttcacccttacccgaaagattcggagaaacatcttctagctatacgaagtggcttgacaagaagtcaggtatcaaactggtttataaatgcgcgggttaggctatggaagccgatgatagaagagatgtatgcggaaatgaacaagaggaagctcaataacagtcacattcaacccaacggaccaactcttcgaatgccaaaatctgttatgatgagccaagcaatgcataaataagacaacaattgtgtttaccaactttgtgataattaggcaattgctactctatgattgcccaaaacctaaaccatgtacgactatcattacgtatgttataattgtatatacaactcctttatctttgactatttcattttattaaaaaaaaaaaaaaaaaa

SEQ ID NO: 117426 - DNA, 1615 bp, Arabidopsis thaliana
  unsure (1)..(1615): unsure at all n locations
tgccgcaaaagcaaaagctatcgccaccaccgtgtcataaatctcagatctctctctctctctctctctctctctctctctctctctctctctctctctctctctctctcttgcgataacaatggccgaaactatgaaagatattacgatgaagaacgatgaatcacaggaagaagaaatccccgatcaatttctctgctgcgtttgcctggaacttctttacaagccaattgtgttatcttgtggtcatctatcatgtttttggtgcgtacataagtccatgaatggctttcgtgagtctcattgtccgatatgtagagacccgtatgttcactttccctctgtgtgccagaagctttattttctgttaaagaagatgtacccacttgctcataagaagagagaagaacaagttttaaaggaagagcaagaacgagaatgtttttctcctcagattgatcttgttttggatttgtctgtgtgtagtggagattctctcaatgtctctgataaacagaaggtggaagagtgttcgaatgcagcgaacttattatctagttcatcaagtagaggtgacattccatgtatccccaaaaatcaagaacccacagatgcaaaagctcttaatgttcatgaaaatgaattacttaaggataacaaagtcagtaagcagatttcgaaagatgatttgctctgttcagcatgtaaggagctgcttgtacgacccgtagttctcaattgcggacatgtgtattgtgaaggatgtgtagtagatatggctgaagaaagcgaaaagatcaaatgtcaagagtgtaatgtttgtgacccaagaggatttccaaaagtttgtttgattcttgaacagcttttggaggaaaactttcctgaagaatacaattcaagaagcagtaaggttcagaaaacgctcgcccataatagcaaaggaaatattcaaagctatctcaaagaaggcccgtccttatcaaacgacaataacaatgatgatccctggttggcaaaccctggatcaaatgttcactttggagctggttgtgattcttgtggggtgtatccaatcataggggatcgatacagatgcaaagactgcaaggaggaaattgggtatgacctttgcaaagactgttacgagactccttcgaaagttccagggagattcaaccagcaacacactcctgaccacaggcttgagcttgcacggtctcctcaggttctgatcaatttcaattctatcggtatccttctcggacccgttatctcaaatgaaggcatggatacagatgaaggcgaggaagggcctcctggttcttctaatgagtcatcaagcacagaatgaaatagcagtcaagtattaatgcatatgctttcgctttgtgtttgcgtttgttattgtatttatacttcataatatattttctcctgagaagtctatggttttaacattttaaacaaagtttatttcttaacaaagtttgttcgcatttgtggttgttaaaaaaaaaaaaaaaaccccaacccccaagnnnnnnnnnnnnnnnnnnnnnnnnnnnnnnnnnnnnnnnnnnnnnnnnnnnnnnnnnnnnnnnnnnnnnnnnnn

SEQ ID NO: 117427 - DNA, 787 bp, Arabidopsis thaliana
  unsure (1)..(787): unsure at all n locations
nnnnnnnnnnnnnnnnnnnnnnnnnnnnnnnnnnnnnnnnnnnnnnnnnnnnnnnnnnnnnnnnnnnnnccacgcgtccgcccacgcgtccgctttcgtcctttttttccttttgcattctctcgtcgtcgtctcaagatctagaagaaggaaacaacaatttcaagagacatggcaggcaaaggtggaaaaggactcgtagctgcgaagacgatggctgctaacaaggacaaagacaaggacaagaagaaacccatctctcgctctgctcgtgctggtattcagtttccagttggacgaattcacaggcaactgaagacccgagtctcggcacatggcagagttggtgccactgcagccgtctacacagcttcaatcctggagtatctgacagcagaggttcttgagttggctgggaatgcgagcaaggatctcaaagtgaagaggataacgccaaggcatctgcagttggcgattagaggagatgaggagctggacacactcatcaagggaacgattgctggaggtggtgtgatccctcacatccacaagtctctcatcaacaaaaccaccaaggagtgatgtgtagctttttatggggtttggatttctgtagtcttggactcattttcctttatccttttcttagttctttgactagtgttgacctcttctggacatcctcaggtgtacattagttaatttgaactctttaggtttccttgttcaatcatatgttctctttctatgctattgtgatttgcttgnnnnnnnnnnnnnnnnnnnn

SEQ ID NO: 117428 - DNA, 718 bp, Arabidopsis thaliana
  unsure (1)..(718): unsure at all n locations
ccggaacggaatgcccggtcggccacgcgtccatctgtgcttcttcttcttcacccagaaaagtaaaacaaaagtcaaaacaatggcgccgagagcagagaagaagcccgcggagaagaaaccagccgccgagaaaccagtagaggagaaatcaaaagccgagaaagctccggcggagaagaaaccaaaagccggcaagaaactcccgaaggaagccggggccggcggcgataagaagaagaagatgaagaagaagagtgtggaaacttacaagatctacatcttcaaggttctgaaacaagttcatccagatattggtatttcaagcaaggctatgggtattatgaacagtttcatcaacgacatcttcgagaaattggcatcggaatcttcaaagctcgctaggtataacaagaagccgacgattacttctcgggagattcagactgctgttagactcgttcttcctggtgagctcgctaaacacgctgtttctgaaggaaccaaggctgttaccaaattcacaagctcttgaattagtaaattagggtttgtatactctgaatttgattctgatgttgtcataacttgtgttaggatttctctttcgttttattaagctttaattatcattctccgttgtaaaggaatcttatgaatctgtcttcgaatcaaaagttctggttgttaatggctcnnnnnnnnnnnnnnnnnnnnn

SEQ ID NO: 117429 - DNA, 648 bp, Arabidopsis thaliana
  unsure (1)..(648): unsure at all n locations
aaacttgatctcacgactccatcttctaaaattcagaatctttctttgaaacttttttcgtgtgaagaaaatggcaccaaaggcagagaagaagccggcagagaagaaaccagtagaggagaaatcaaaagccgagaaagctcctgcagagaagaaaccaaaagccggcaagaaactcccgaaggaagccggtgccggcggcgataagaagaagaagatgaagaagaagagtgttgagacgtacaagatctacatcttcaaggttctgaaacaagttcatccagatattggtatttcaagcaaagctatggggattatgaacagtttcatcaacgacatctttgagaaattggcatcggaatcgtcgaagctcgcgaggtataataagaagccgacgattacttctcgggagattcagactgctgttagaccttgttcttcctggtgacgcttgcgaaacatgctgtttttgaagggacctaaggcggggacctaaggttacctagcctcttgaattgtggatcttgttgaaaatcgatgtttgtaaaattagggttttttagatttgatggttgttgttgactctttgatcgatttctgttccgtttccttgttncgatgtaaacaaatcgnnnccgattccttctt

SEQ ID NO: 117430 - DNA, 815 bp, Arabidopsis thaliana
  unsure (1)..(815): unsure at all n locations
gcatcaagcaatccaaagcgattaaacctactcaatctcagatctcgttaaacctagaaacctcgagaaaaaccgtatcaatggcgccgaaagcagagaagaagcccgctgagaagaaaccagcttccgagaagccggtggaggagaaatcaaaagccgagaaagctccggcggagaagaaaccaaaggccggaaagaagctcccgaaggaagctggtgccggaggcgacaagaagaaaaagatgaagaagaagagtgtcgagacttacaagatctacatcttcaaggtgcttaagcaagttcatcccgatatcggaatctccagcaaagcgatggggatcatgaacagtttcattaacgatatcttcgagaagcttgctcaagaggcgtcgaagcttgcgaggtacaataagaaacctacgatcacttctcgggagattcagactgctgtgagattggtgcttcctggagagttggcgaagcatgccgtttctgaggggactaaagccgtcacgaaattcaccagctcttgaataattgagttagggttcttatcatatggatgttgctctgctttagggttaatggaatttggaagatctgagttagggttttagaatgtcctttaagtatctctgtttcgtttggaatttctacgttttgtaagtactgctgctattgataatgtttggagtctatatttgctctttgtgtcccaaaaaaaaaaaaaaagnnnnnnnnnnnnnnnnnnnnnnnnnnnnnnnnnnnnnnnnnnnnnnnnnnnnnnnnnnnnnnnnnnnnnnnnnnnngaatcg

SEQ ID NO: 117431 - DNA, 418 bp, Arabidopsis thaliana
atacaacttccttttcccgagaaaatcagaaagaaaattcacgatggcaccaagagccgagaagaagcccgccgagaaaaaaaccgccgctgagagaccggtggaagagaacaaggctgctgaaaaggctccggcggagaagaaacccaaggcggggaagaaattgccaccaaaggaagccggtgacaagaagaagaagcgatctaagaaaaacgtcgaaacctacaagatctacatcttcaaggtgctgaagcaggttcatccagatatcggaatttcaagcaaagccatggggattatgaacagtttcatcaacgacatattcgagaagctagctcaggaatcttcgaaactcgctaggtacaacaagaagccgaccattacatctcgcgagatccagacggctgtgagactcgtc

SEQ ID NO: 117432 - DNA, 836 bp, Arabidopsis thaliana
acaaaaatccaaatcccaaaactttcccgagaaaactaaaaaaatggcaccaaaagccggaaagaaaccagcagagaaaaagcccgcagagaaagctccagcagaagaagagaaagtagccgaaaaagcaccagcagagaagaaaccaaaagccggaaaaaaactaccaaaagacccagtccaccggagggagtcgagaaagaagaagaaacgagtcaagaaaagcccagagacatccaagatctacatcttcaaggtgttgaaacaagttcatccagatattggaatctcaagtaaagctatggggattatgaacagttttatcaatgatatattcgagaaacttgcgcaagaagcttcaaaattagctaggtataataagaaacctacgattacttctagggagattcagacagctgttagactagtgttacctggtgaacttgctaagcatgctgtttctgaaggaactaaggctgttactaagtttactagctcttaggtttagccgtttaggtttcgaatcttggttcgttttgatatggaatctgatggtttttatgtaatttgttgaagattgtaatggtgttaatgttttctttttaatttggattttgtgtttagtgacttgggattctccaagaagtttgatatttatgaatgttaaattaaaatttggattttggtggatgattttgtacgatgaatcggtaattttgttgtgaattattcttgagcttagcttttgttttttccaaaaaaaaaaaaaaaaaaaaaaaagggcggccgctctagaggatccaagcttacgtacgcgtgcatgcgacgtcatagct

SEQ ID NO: 117433 - DNA, 604 bp, Arabidopsis thaliana
tgcgtctctaaactctcgcattctcaaaatcactaaaatcaaactcaattttcatcaaatatctctaatggcgccgaaagcagcggagaagaaaccggcagagaagaaaccagccgggaaagctccggcggagaaactcccaaaggcggagaagaaaatcagcaaagacgccggaggaagcgagaagaagaagaagaaatcgaagaagagcgtcgagacttacaagatctacatcttcaaggttctgaaacaagttcatccagatgttggaatctctgggaaagctatggggattatgaacagtttcatcaatgacatcttcgagaaacttgctcaggaatcgtcaaagctcgctaggtacaataagaagccgacgattacatcgagggagattcaaaccgctgtgagacttgtgttgcctggagaactcgctaaacatgcggtttctgaaggcacgaaggcggttaccaaattcaccagttagggttttcctgtaaatttccggttaagtgtttggtttagactcggtttgtttagatgttttgagtttcgtgaattgtttgatgatcactctaatggttcaaaattgatggttgaatttgat

SEQ ID NO: 117434 - DNA, 635 bp, Arabidopsis thaliana
  unsure (1)..(635): unsure at all n locations
ctttctttgagtcggcttcacttctcttgcatccttcaaactcatccacagcaaggaatggcgacagcagcagcaccagcagtgatttcatggacaagatcaggcattgtgtccaaatccggacaaacccagaagaaatctgagatgaaagtttcttacataactggacttaactcatatggtggtctcaaggcacagaacaacaaggttgtctcaatgggatcaccactctgcacagaacagtgttttgctaacgttgtgatgtctctcaaaggaagaagaggtaatggaggagccttatccaccacgtgtaacgctgtcggagagattttcaagattgcagcaatcatgaacgctcttactcttgttggtgttgcagttggattcgttcttcttcgaatcgaaacttctgttgaagaagctgaagcagagtaaatagagtaaattgctgctcttataattatatatttttggttattgttgttgtcaagctttggtaaaacttgatggatacatgttacatttgtttatgaagaagctcttttcttggtggatgaaaaaaaaaagggggcccctngggncccngtntggccgntnattgnnnnnnnnnnnnnnnnnnnnnnnnnnnnnnnnnn

SEQ ID NO: 117435 - DNA, 1894 bp, Arabidopsis thaliana
  unsure (1)..(1894): unsure at all n locations
tacggctgcgagaagacgacagaagggggcagcaaaacaaacaatcatggcggagaaactcagtgatggcagcatcatcatctcagtccatcctagaccctccaagggtttctcctcgaagcttctcgatcttctcgagagacttgttgtcaagctcatgcacgatgcttctctccctctccactacctctcaggcaacttcgctcccatccgtgatgaaactcctcccgtcaaggatctccccgtccatggatttcttcccgaatgcttgaatggtgaatttgtgagggttggtccaaaccccaagtttgatgctgtcgctggatatcactggtttgatggagatgggatgattcatggggtacgcatcaaagatgggaaagctacttatgtttctcgatatgttaagacatcacgtcttaagcaggaagagttcttcggagctgccaaattcatgaagattggtgaccttaaggggtttttcggattgctaatggtcaatatccaacagctgagaacgaagctcaaaatattggacaacacttatggaaatggaactgccaatacagcactcgtatatcaccatggaaaacttctagcattacaggaggcagataagccgtacgtcatcaaagttttggaagatggagacctgcaaactcttggtataatagattatgacaagagattgacccactccttcactgctcacccaaaagttgacccggttacgggtgaaatgtttacattcggctattcgcatacgccaccttatctcacatacagagttatctcgaaagatggcattatgcatgacccagtcccaattactatatcagagcctatcatgatgcatgattttgctattactgagacttatgcaatcttcatggatcttcctatgcacttcaggccaaaggaaatggtgaaagagaagaaaatgatatactcatttgatcccacaaaaaaggctcgttttggtgttcttccgcgctatgccaaggatgaacttatgattagatggtttgagcttcccaactgctttattttccacaacgccaatgcttgggaagaagaggatgaagtcgtcctcatcacttgtcgtcttgagaatccagatcttgacatggtcagtgggaaagtgaaagaaaaactcgaaaattttggcaacgaactgtacgaaatgagattcaacatgaaaacgggctcagcttctcaaaaaaaactatccgcatctgcggttgatttccccagaatcaatgagtgctacaccggaaagaaacagagatacgtatatggaacaattctggacagtatcgcaaaggttaccggaatcatcaagtttgatctgcatgcagaagctgagacagggaaaagaatgctggaagtaggaggtaatatcaaaggaatatatgacctgggagaaggcagatatggttcagaggctatctatgttccgcgtgagacagcagaagaagacgacggttacttgatattctttgttcatgatgaaaacacagggaaatcatgcgtgactgtgatagacgcaaaaacaatgtcggctgaaccggtggcagtggtggagctgccgcacagggtcccatatggcttccatgccttgtttgttacagaggaacaactccaggaacaaactcttatataagccaagctgtgtgcatatacacataatacttctgagtcagagatgtgaaactcggtgatactgaattactgatattaccattacacacatattatggcgttatgtattcataatactgcctggtttctctttacatataattacatttcatcctccaataaaaaaaaaaaaaaaaaactcgagnnnnnnnnnnnnnnnnnnnnnnnnnnnnnnnnnnnnnnnnnnnnnnnn

SEQ ID NO: 117436 - DNA, 1967 bp, Arabidopsis thaliana
acacccacgcgtccgactggcgcctgatttacggttaaaacgcctcttccctctctccgacgcttctcgtcggaaatctgggtttaagtttcttctgcagatcggaagagattctattgaagcggcgttgacacgatttcatctataattgtacgataatgaagcagaagaaccagcataagaagaagaagaagcgatcctgcgccgcgaaaccttccggtgatggaacgacgtcggacgggaacaaaaaagatgtggaggaagagaggaaggacggtgaaggaaagagggagatagaaaacgttggaaaaaattttatcgaatcgttaatggaagccttttgctcggtttcaatggaggaagcgatggctgcttataaggaagcaggcggagatctgaacaaagccgctgagattttatcggatctggtggaaagcggtgatgatccgtcgacgagttcggtggcgagtggttcttcgggtcaggaaacagcgtctacctctgagtatggggcagggtcaagttctagctgtagcgaagatttgactagagatagatggtttaagggaagcaagcagagtagagttattgctgctacagggatggtttcttctgtgattgcgaaggattacttgaagccaaaccctgtgcgaaaagagtttcctatgatggaacggtctaaagagctctgtgggaacgggaaaaaagctgcggatagagagaaagctgaacagttcttaagttcaatgcttggagatgattgcgagcttagcatggctgttgttagagatgttttgtgtcaatgtggctatgatgtcgacatggctttgaatgtcttgcttgacatgtcttcttcatcaactgatgattcattgagtggtaaatgtttcggcataggagtcagcgatagtctggcagagtcatcttttgatactgatacttctgattgtgaacttttctggggtggagactatagtcaaagggactacgcaaaagctctcatgagttctcaagatccttttgcaactacccaaggaattgatgagcttggtcttccacaaaaagtgttggagtctctgttcaacattcgccagaatcctaaacatgaatcaaagacaacgagttggaggaatgtggcaaagaaaatgcagtcacttggcattgatgcttcttcatctagtggggaagagcctcaccctaatacgtttgtgaaggatgacagttatcatgaacttagaaaaggtgcaaatgaccagtggaatgttacgaagtcctactatcaaaaagctgccgaagcatattcgaaaggagggagggctcatgcggcttacctttctgacaagggaagagtggcatctaaacaagctcaacgggctgatgagagggcaagccaagatatattcgttgcaagaaacaaaggtatagagaatgtggtaaccattgatctgcatggtcagcatgttaaaccagcaatgaagctactgaagctacatctcttatttggatcatatgttccttccattcagactctacgagtgatcacaggatgtggagcttctgggtttgggaagtctaaggtgaaacaatcagtggtaaagctgctagaaagagaaggagttaggtattgtgaagagaacagagggacactgctgatcaagcttgacggaggtagtagagagttcagtttcttagacacagagagtgactctgatgaataagtgataactaaaactaaagtcaggttttagctttagatcttaaaatttatgtcgattttgtctatatctgatgctagctctctgttgttaagtaaatgttgggcaaaacttagcttccttctttttcctttccgtatttcacgttatttaagttctgaaaacactttgtctgacacagacagaatgtatatttttcgctaactcttctttaggagtttactgatatatatattatcgtgtaacttctat

SEQ ID NO: 117437 - DNA, 893 bp, Arabidopsis thaliana
attgagacgacaactatagaagatctatgacgtcacatgcacgcgtacgtaagcttggatcctctagagctgccgccctttttttttttttttttttttttaaaccaaataaaaatctgtattaagatgataccattctaggatagcaatatgttttaagttattacaaacacattcacaaacatcatataaaaaacgagggtattaaagaagagatattgtttaagcagctttggcgaatccaactcttcctttcccataatcgaacactgtgtggtatggtcccatgaagatatcacccaagatccagagaggtccacgaggcggagcaatatccattgccgtgaaaccgctggtgcactgagactcaactccttccccgatcttgaatatatagtcttgaggagttagatcaaagcttctgccaccaattgagaatgtgactataggcatcgacgaaaccctcccacagtccactgctgattgttggttttgggttggtatatggtcacatagctcagcagcataagcgagtatgcgttcttgtgtttgattctgagtcaattcgctctccatccacacggctgccatttcgcaagcactgcacatcgcttggtttaaaagacccgatgttccatcgtctacaactgactggatccccatactcacactctgtgtaccatcataagcgcagactccaatttgtgagcatactttcttcggatcctcctgagctagaagagaattcaacatggtttttccgtattgatccaccacggccttgcattcacggcttacaattccttgtgctcctatcgcggacgcgtgggtcgacccgggaattccggaccggtacctgcaggcgtacgagctttccctaaagtgagtcgtat

SEQ ID NO: 117438 - DNA, 941 bp, Arabidopsis thaliana
  unsure (1)..(941): unsure at all n locations
cccacgcgtccggagagagtatcgaagagaagaatccaaaaaaatgggatcttcaccaccgaagaagacgactctgcaacggtacttgtcacagcttcaacaacatcctttaagaacaaaggcaataactgctggagttttgtctggtgttagcgatgttgtatcacagaagctctctggcatacagaagattcagctgagaagggttcttctcaaagtgatatttgctggtgggtttcttggaccagcagggcatttctttcatacatatttagataagttttttaaagggaagaaggatacacagactgttgcaaagaaggtaattctggagcaattgacattgtcaccattgaaccatttgcttttcatgatctattatggagtagtcatagaaagaactccctggacccttgttagagaaaggatcaagaagacttatccaacggtccagcttactgcatggacgtttttcccggtggtgggatggattaactacaagtatgtgccactgcacttccgggtcatcttgcacagcctggtcgcattcttttggggaattttcctaaccctgcgagcgaggtcaatgacactagctttggcaaaggctaagtgattaggaaacacatggatcgtgacagagaactcaagccttgggactcattatgatcacttagtactctgtaagttaaagcaaatcaaacagctctgaaaccaaataaaaatctgtattaagatgataccattctaggatagcaatatgttttaagttattacaaacacattcacaaacatcatataaaaaacgagggtattaaagaagagatattgttttaaaaaaaaaaaaaaaaaaaaaaaaaaannnnnnnnnnnnnnnnnnnnnnnnnnnnnnnnnnnnnnnnnnnnnnnnnnnnnnnnnnnnnnnnnngtacctannnnnn

SEQ ID NO: 117439 - DNA, 1192 bp, Arabidopsis thaliana
ccccatactcacactctgtgtaccatcataagcgcagactccaatttgtgagcatactttcttcggatcctcctgagctagaagagaattcaacatggtttttccgtattgatccaccacggccttgcattcacggcttacaattccttgtgctcctatcgcgtgattgatcatcgtgatgacagtcgatggaccggtgagcagagaagttccggaatcagcaatagcagaacaacctttagcacaatatccggttggtttgccagcaatttggagatcacccatgtcaaactgccagtaacctttatgtgtcacaggaacaaaagtatgctctcctttgaagtgcttcgggtcgactccaccgaaaacaatctcaccgccttctggatctttcgggttacggttaagccagaacgaaaaaatcggttccttaactaaacctttttctaccatgcttatacccaaaccggagttgagtttcctacagaaatctctttgaaacccaaaccgaggataccatcaaactttgctagcaagaatgttataccaggctcactagtagcctctatgaattcctgctctttcacaacaatatcaccaactttaacatcatcattgctaaagtaaccagaaatagcacccgtcccatagcggatagacgcgggttttccgttctttctatatgacgatgactggctagccttgtacttggagtggaaataacaagcaaccgataggtaacatttagtagatggtatccagagattggagctaccagtatcaaagatcacagtgaacttctgaggaggagtaccaatggtaatgtcaccatagtattgagcatccaaatagtttttcagcggaaccatatccgcattttcatcgttcaggcgaaaatagtgtttgggagaccaatgagaccctcggtttttcaaaaaaagctgagaagctagcctgttgctccggtctagtttcctcttcttcaatccaattctaatcgttccatcaccatttcgctcacacgaggcagttgatatgaggattaaacatgaaagcaagaacacgagcaagaatgattggaacctagttcccatttttacagagaaaatcgaacgcgtgggtcgacccggcaataccgtaccggtacctgcaggcgtgccagctttccatatagtgagtcgaattgacacct

SEQ ID NO: 117440 - DNA, 1427 bp, Arabidopsis thaliana
  unsure (1)..(1427): unsure at all n locations
gacacattcaatctccaggatggacattaggttggaaatgggcaaagaaggaagttatatggagtatggttggagcacaaacaactgaacaaggtgattgttcaaagtacaaaggaaacataccacattgttgtaagaaggatccaacagttgtagacttgcttccagggactccttataatcagcagattgctaattgctgcaagggtggtgttatgaactcatgggttcaagaccctgccactgcggctagctccttccagattagtgttggtgctgctggaaccacaaacaaaaccgttagggtcccaagaaacttcactctcatgggacctggtccaggttacacttgtggtccagcaaagattgtcagaccaacaaaatttgtcacgactgacacacgcagaaccactcaagctatgatgacatggaacattacgtgcacatactcgcagttccttgctcaaagaactccaacttgctgtgtttctttatcttctttctacaatgaaaccattgttggatgtccaacttgtgcttgcggatgtcaaaacaacagaacagaatccggtgcctgcctcgacccggacacaccacacttagcctcggttgtgtcaccaccaacaaagaaaggaacggttttaccaccattagtgcaatgcacgagacacatgtgcccgatcagagtgcattggcatgtaaagcagaactacaaagagtattggcgtgtgaagatcacaatcacaaacttcaactatcgcttgaactacacacaatggaaccttgttgctcaacatccaaatctcgacaacatcactcaaatcttcagcttcaactacaaatctcttactccttacgctggactaaacgatacggcgatgttatggggagtgaagttctacaacgatttcttatcagaagcaggtcctcttgggaatgttcaatcagagattttgttccgtaaagaccaatcaaccttcacattcgagaaaggttgggcttttccacgaaggatttactttaatggagacaattgcgtcatgcctcctccagactcttacccttttcttcccaacggtggttcccggtcacaattctcattcgtcgccgccgtgctcctccctcttcttgtctttttcttcttctctgcctaatctcggatttacggttttgccactggtttgcttagggttacggcggagtggtataaacgtttatttatgattcttttgtgtcccacaaaaattataatcttttgatactttttaaaaatataaatagttttcaacttccctgttttcaaaagacatttatatcgttcagttgtttgtgccgnacgcgtggcgnnacgcataggtnnnnnnnnnnnnnnnnnnnnnnnnnnnnnnnnnnnnnnnnnnnnnnnnnnnnnnnnnnnnnnnnnnnnn

SEQ ID NO: 117441 - DNA, 917 bp, Arabidopsis thaliana
tgatctgccaagctactatacgactcacattagggaaagctacgtacgcctgcaggtaccggtccggaattcccgggtcgacccacgcgtccgcggacgcgtgggatccggtgcctgcctcgacccggacacaccacacttagcctcggttgtgtcaccaccaaccaaaagaaaaggaacgggtttttaccaccattagtgcaatgcacgagacacatgtgcccgatcagagtgcattggcatgtaaagcagaactacaaagagtattggcgtgtgaagatcacaatcacaaacttcaactatcgcttgaactacacacaatggaaccttgttgctcaacatccaaatctcgacaacatcactcaaatcttcagcttcaactacaaatctcttactccttacgctggactaaacgatacggcgatgttatggggagtgaagttctacaacgatttcttatcagaagcaggtcctcttgggaatgttcaatcagagattttgttccgtaaagaccaatcagccttcacattcgagaaaggttgggcttttccacgaaggatttactttaatggagacaattgcgtcatgcctcctccagactcttacccttttcttcccaacggtggttcccggtcacaattctcattcgtcgccgccgtgctcctccctcttcttgtctttttcttcttctctgcctaatctcggatttacggttttgccactggtttgcttagggttacggtggagtggtataaacgtttatttatgattcttttgtgtcccacaaaaattataatcttttgatactttttaaaaatataaatagttttcaaaaaaaaaaaaaaaaaagggcggccgctctagaggatccaagcttacgtacgcgtgcatgcgacgtacatagctgttgtatagtg

SEQ ID NO: 117442 - DNA, 686 bp, Arabidopsis thaliana
  unsure (1)..(686): unsure at all n locations
aaaaaccaaaaattggntaaaaaaaatnttnccctaccggggnnaacgaacncganttaggggnggaagtnnncaacggntctttcanaaagcaggccnctgggaatgtccaatccagagatttgtccgtaaaagnccaatcaaccttcacatcgagaaaggtgggcttttcccacgaagggttttcctttaatggagccaattggcgtcatccctcctccagactcttacccttttcttcccaacggtgggtcccggtcccaattctcattcgtcgcccccgggctcctccctcttcttgtctttttcttcttctccgcctaatctcggatttacggttttgccactggtttgcttagggttacgccggagtggtataaacgtttatttatgattcttttgtgtcccacaaaaattataatcttttgatactttttaaaaatataaatagttttccacttccatgtttttaaaagaaatttaaatccctgtgttctgttggtccgtcgttgtagaatatcgggaaaaaaaaaaaaaagatgttagatactgtaaactttgttttccgaacgttatatactttactttttctgttaaaaaaaaaaaaaaaaaaacccaaagggcgaccgctctagaggatccaagcttacgtacgcgtgcgtgcgacgtcatagctcttctatagt

SEQ ID NO: 117443 - DNA, 549 bp, Arabidopsis thaliana
  unsure (1)..(549): unsure at all n locations
gtatccttcnnnnnnnnnnnnnnnnnnnnnnnnnnnnnnnnnnnngcctgcaggtaccggtccggaattcccgggtctacccacgcgtccgcccacgcgtccggcacaaacaactgaacaaggtgattgttcaaagtacaaaggaaacataccacattgttgtaagaaggatccaacagttgtagacttgcttccagggactccttataatcagcagattgctaattgctgcaagggtggtgttatgaactcatgggttcaagaccctgccactgcggctagctccttccagattagtgttggtgctgctggaaccacaaacaaaaccgttagggtcccaagaaacttcactctcatgggacctggtccaggttacactttgtggtccagcaaagattgtcagaccaacaaaatttgtcacgactgacacacgcagaaccactcaagctatgatgacatggaacattacgtgcacatacttcgcggttccttgctcaaagacctccaacttgctgtgtttctttatcttctttctacaatgaaaccatt

SEQ ID NO: 117444 - DNA, 435 bp, Arabidopsis thaliana
  unsure (1)..(435): unsure at all n locations
gtcggcggccgccctttttttttttttttcccgaatattctacaacggcgggccaaccagaccacaaggatataaatttcttttaaaagccaggaaggttggaaactatttatttttttaaacaggtatcaaaagatttataatttttgtggcacccaaaagaatcaataaataaacgtttaatcccactcccccgtaaccctaagcaaaccagtggcaaacccgtacaccccacattaggcagtgaagttctacacacgatttcttatcagaagcagggtcctcttgggaatgttcaatcagagattttgtcccgtaaagaccaatcaaccttcacattcgagaaaggttgggcttttccacgaaggatttacttgaatgaacccacgctcgtaccgaattccgagcttacgtacgcgtgcagntgtcgtcaag

SEQ ID NO: 117445 - DNA, 1311 bp, Arabidopsis thaliana
attagatccatttcagagctaagcgtactaattagtgtactaagggtagtgtgactcattaccacctaaagtagtttcaattttctcctgtcgtcctcggcaaagagttatagtgggaaacaaagggagtggttaataaagaattaattagttaattaagggagttcaagatcataatggtgaggcctccttgttgtgacaaaggaggagtgaagaaagggccatggactcctgaagaagatatcattttagtcacttacatccaagaacatggtcctggtaattggagagctgttcctaccaatactgggctgcttagatgcagcaagagttgtagacttagatggacaaactatttaaggccaggaatcaaaagaggcaatttcacagaacatgaagaaaagatgattgttcatctccaagccctcttaggaaatagatgggctgcaattgcgtcatatcttccacaaaggacagacaatgacattaagaactattggaacactcatttgaagaagaaactcaacaaagtcaatcaagattctcatcaagaacttgaccgttcctcgctctcatcttcaccatcgtcttcttctgctaattccaactcaaacatctcaagaggccaatgggaaaggcgacttcaaaccgatatccacttggcgaaaaaggctctctctgaggctttatctcctgccgttgcaccaatcattacatctacagtgacaacaacgtcttcctctgctgaatcaagacgctctactgcctcagctagcgggtttcttaggacgcaagaaacatctacaacttatgcctcaagcaccgaaaatatcgcgaaattgctcaaagggtgggtgaaaaactcgccgaagactcaaaactccgcggatcaaatcgcttctacagaggtaaaagaagtgatcaagagtgatgatgggaaggagtgtgcaggggcatttcagtcattttctgagtttgatcactcatatcaacaggctggtgtttcacctgatcatgagaccaaaccagacataactggatgctgcagtaaccaaagtcaatggtctttgtttgagaagtggttgtttgaggattctggtggacagattggtgatattctattggatgaaaacactaatttcttctgaagagtttgctttaatcacatggttctaattttaggatcctcatctctattttttttttggggttttccaaattaactcgcttagattatcgtgagataaatcagtaataattttatttattttccctctttaatttacaattaatgatggggttgcttttaaa

SEQ ID NO: 117446 - DNA, 1696 bp, Arabidopsis thaliana
  unsure (1)..(1696): unsure at all n locations
cgatattagcagcacatgttgattgccataagccaaagccaatcctctccacgcgtccgtctggatgtccaccaatcatcttcgcacttctttcgtccagtcgatgataataacggtggagaacgacggaggcgggcgacgttagggtttctaatcatttctctctcttagacgcttatggcagtgaagaaagcctgcgaaatgttcccgaagagtttgatcgaagatgttcacaaatggggttgcatgaagcaaaccggtgttagccttagatacatgatggagtttggttccaaacctactgagaggaatcttttgatttctgctcagtttttgcataaggagcttccgattcgcgtcgccaggagagcgatcgaactccagacgcttccttatggtctctctgataaacctgccgttttgaaggtgcgggattggtatttggaatctttcagggacatgagagcatttcctgagattaaggattcgggtgacgagaaagatttcactcagatgattaaggctgtcaaagtaaggcataacaatgtggttcccatgatggctttgggtgttaatcagctcaagaaaggaatgaattctggaaatcttgatgagattcatcagtttcttgatcgtttctacttgtcgcgaatcgggatccggatgcttattgggcagcacgttgagttgcataatccaaatccaccgcttcatacagtgggttatatacacacaaagatgtctcctatggaggtagcaaggaatgcaagtgaagatgctcggtcaatttgtttccgagagtacggttctgcaccggaaataaacatatatggcgatcccagtttcacctttccgtatgttccaacgcatttgcatcttatgatgtatgagctagtcaagaactctctacgtgctgtccaagagcgatttgttgactctgatagagttgcaccaccaatccgcattatagttgctgatggaatcgaagatgttactataaaggtctcagatgaaggtggaggtatagcaagaagcggtcttcccagaatattcacctatctttacagcactgcaagaaacccgcttgaggaggatgtcgatttaggaatagctgatgttcccgtgactatggctggatatggttatggtcttccaattagtcgcttgtatgctcgatatttcggtggagatttgcagatcatatccatggaaggatatgggactgatgcatacttgcacttgtctcgccttggagattcgcaagagcctttaccctgagaacatctctatgtcaggcaaagtaaagaaagctttgacatgtatttatggtagatgagggatatctacaatactcaattatttatgcttttccagtttcttctaatgtacagactacagacattattttctcgtattacgctttcttgattttagactcagatatggagctttttccaagtgagttaatctcctatgatttgttttgattcgatccaaaaccaccttgtatccgaaaaaaaaaaaaaaaaaattggtttatattcgataaaacagctacaacaagctcctgcatttggatcggttactttaaaaaaaaaaacgtaatcacaaaaaaaaaaaaaaagnnnnnnnnnnnnnnnnnnnnnnnnnnnnnnnnnnnnnnnnnnnnnnnnnnnnnnnnnnnnnnnnnnnngcc

SEQ ID NO: 117447 - DNA, 1649 bp, Arabidopsis thaliana
  unsure (1)..(1649): unsure at all n locations
ccaacgcgtccgcaaagtggttggagtgttgtagaggatgacgacagaatcactgcatgatggaggggcaagtcaggcagaaagtaagcatgacgaattggaggaaaccaaagaagaaagtgatgaaatgaaaacaagtcttggtgtagagagaaatggagataagaaagaactagagcaccagtttgagtgtcaagagaatgaaacatatagaagcaatgtggaggcagctgagtcttcctgtcgttttccaaacggagaagaaattattggcgcagcaacaaatggaaacatgaaagaaaatgagggagaggagggagaggagagttgtcgatcatctatggaagaagagggagatgctacttctgatattggcgcagcaacagatggaaacatgaaagaaaatgagggagaggagagttgtcgatcatctatggaagaagagggagatgctacttctgatatttcacaaaacaaagcagagacagttgaggaacatctgaaaaagatagatgaaacaagagagaaagagagagaaagaaagcaagagagagttatggtagaaagagctattcgtgaagcccgcgaaagggcatttgctgatgctatggaaagagcaggaaaaactgcaatggagaaggcaaaggcagtagcccaccgtagagaggttccaaggaaatcagaaaagggatctgttgaggtaaacgataagttatcatcagctgagaaggcttcaatgcaagccaaactcagagctgagcgtgctgctgtagaacgagcaatcactgaggtcagagaacgtgccatggaaaaagcattgtctggtaagtctgctgcttctcaagcaaaaagttatggcggcagcaagtcatttagctcttctggtgaaagacgaggctcctcatcttctggtacggagaacaaaagttcaggtccttccaattcttcaaaccagactgccaaaggtgaaccaatccagagatgtaaagctagatctgagagacaccagagaacatctgaccgcgcagcagaggctcttgcagagaagaaacttcgtgatcttaaaacccagaaagagcagacagagagaaatagactcgcggaagctcttgatgctgatgtcaaacggtggtcgagtggaaaggaaaacaacttacgggcgttgatctcaacactccaatatatacttggagcagagagtggatggaaaccgattcctctcactgatcttgtctcaagcgcttctgtgagaaaagcctaccgcaaggcaactctttatgttcatcccgacaagcttcaacaacgtggcgcatccacacagcagaagtacatttgtgagaaagtttttgaccttctcaaggaagcatggaacaaatttggtgtcgacgaacgataagtcagatggtgtaaaactttggatttttctttaccctattatcagaagtcaccctgcaaatcagaacctagcagcctaagcacctaagttaacaagtacaggatcaagctatggtatgggatgaagacagatctagagatgtaataactagttataaatatttataactatgtgtcatatatagaaaagtagctcattcatattcccagctgnnnnnnnnnnnnnnnnnnnnnnnnnnnnnnnnnnnnnnnnn

SEQ ID NO: 117448 - DNA, 1393 bp, Arabidopsis thaliana
  unsure (1)..(1393): unsure at all n locations
aaaaccctttcctctcttccttcttgtgtgagaccgagaaaaaaagatgactaagaacagtaaccacgacgagaatgagttcatcagctttgaaccaaatcagaacacgaagatacgctttgaagatgctgatgaagacgaagttgctgaagggtctggtgttgccggcgaggaaactccccaagatgagtccatgttcgacgccggagagagcgccgacaccgctgaagtaactgatgataccaccagtgccgattactacttcgattcttactctcactttggaatccatgaagagatgttgaaggatgttgtgagaacaaagacttatcagaatgttatttatcagaacaagtttcttatcaaggacaaaattgttcttgatgttggagctggaaccggaattttgtctctgttctgtgccaaggcaggagctgctcatgtctacgctgttgagtgttctcaaatggctgacatggcaaaggagattgttaaagctaatggattttctgatgttattacggtattgaaagggaagattgaggagatagagcttcccactcctaaagtggatgtgattatatcggaatggatgggttactttttgttgtttgaaaatatgttggacagtgtcttgtatgctcgtgataaatggcttgttgaaggtggagttgtgctaccagacaaagcctctctgcatcttacagccatagaggattcagagtacaaagaagacaaaatcgaattttggaacagtgtgtatggtttngacatgtcatgtattaagaaaaaagctatgatggaaccacttgttgacacagtcgaccaaaaccaaatcgtcaccgatagtaggcttctaaagacgatggatatctcaaagatgtcctctggtgatgcttccttcacagctccctttaagcttgttgcacaacgcaatgactacatccacgcccttgtagcctactttgatgtatcgtttaccatgtgccacaagctgctgggcttctcaacaggaccgaaatcccgagctacacactggaaacaaacagttctgtatctagaagatgtgttaaccatatgtgagggtgagacaatcactggaactatgtccgtttctcctaacaagaagaatcctcgagacattgacataaagctaagctattctttgaatggccagcattgcaagatctcaaggacccaacactacaaaatgcgttaaagttctctcataagaagcagaacttcagaagatacaattctcatattgtgatttagtttttatatttctttttctccagattacaactttccatttgcttcacattgcaacatttgcttcatctcaagttaaattaatgattttgctctnnnnnnnnnnnnnnnnnnnnnnnnn

SEQ ID NO: 117449 - DNA, 417 bp, Arabidopsis thaliana
  unsure (1)..(417): unsure at all n locations
acgcgtccgcatgtgtgagaccgagagaaatagatgactaagaacagtaaccacgacgagaatgagttcatcagctttgaaccaaatcagaacacgaagatacgctttgaagatgctgatgaagacgaagttgctgaagggtctggtgttgccggcgaggaaactccccaagatgagtccatgttcgacgccggagagagcgccgacaccgctgaagtaactgatgataccaccagtgccgattacgacttcgactcttactctcactttggtaaatgcccttttttcaagttctacttttttccttgtgctctttggttatgaattcttactaagagttgaatttggttccacttttttttgcaggaatccatgaagagatgttgaaggatgttgtgagaacanagacttatcaga

SEQ ID NO: 117450 - DNA, 655 bp, Arabidopsis thaliana
atcaaacgcaaaaacctattatcaaaagaactagggagaaatgactaatcccatgatcatggttatgctgttgttgtttcttgtgatgtcgactagagcagacgaagagctgattaagacagagtgtaatcacacagaataccaaaacgtatgcctcttctgtcttgaagccgatccaatctccttcaatatcgaccgtgctggacttgtcaacatcattatacactgtctcggatctcaacttgatgttcttatcaacaccgtcacgagtctaaagttgatgaaaggagagggtgaagcaaatgagaatgttctgaaagattgcgtcacaggctttgcgattgcacaattacgacttcaaggagccaacatcgatttgataacccttaattacgataaagcgtacgaattggtgaaaactgcgttaaactatcctcggacttgcgaagaaaatctccaaaaactcaagttcaaagattcatctgatgtttatgacgatatcttggcatatagccaactcacctctgttgctaagacgttgatccaccgtctctagatcaatatatatgtcgatctggttatcaaaaatatatttatgtcgatcgtttgctaccactaataaaataaaactccattatgtaaaaaaaaaaaaaaa

SEQ ID NO: 117451 - DNA, 1409 bp, Arabidopsis thaliana
  unsure (1)..(1409): unsure at all n locations
tatacgactcacttagggaaagctggtacgcctgcaggtaccggtccggaattcccgggtcgacccacgcgtccgcggacgcgtgcgcgcacattctcagagcaaatttcaagtttatttcattcaatttcgatccgagtaaccatggagtgtagatcattggatctgacgattatatctgcggaggatctcaaagacgttcaattgatcggtaaacaagacttgtacgccgtcgtttccatcaacggcgacgctaggacgaagcagaagacaaaggttgataaagattgcggcaccaaacctaaatggaagcatcaaatgaagctcaccgtcgatgacgcagcggcgcgtgacaatcgtcttactcttgttttcgagatcgtggcggatcgtcccatcgctggtgataaacctgtcggtgaggttagcgttccggtgaaggagcttttggatcagaataaaggtgacgaggagaaaacggttacttacgccgtgaggttgcctaacgggaaggcgaaaggatctctcaaattctcgttcaaatttggggaaaagtatacttatggatcttcgagtggtcctcacgcgccggtcccttcggctatggatcataagactatggatcagcccgtcaccgcttacccgcccggacacggtgcaccgtctgcataccctgctcctcccgcgggtccttcttccggatatccaccacaaggacatgacgataagcacggtggtgtttatggatacccgcagcaggctggatatccagctggaaccggtggttatccgccacctggtgcatacccacaacagggaggttaccctggatatccgcctcagcaacagggtggatacccgggttatccgccacagggtccatatggttacccgcaacaaggttatccaccacagggtccatacggttacccgcaacagcaagctcatggtaaaccgcagaaaccgaagaagcatggtaaggctggagctggaatgggactaggacttgggcttggagctggtttattgggtgggttgttggttggtgaagcggtttctgacatcgctgatatgggtgacatgggtgacatgggtgacatgggtggtttcgatttctgattgctgtgttatcaagttttaatttcttaggataattgctctaatgtttttcgtttgatgaatcatgtgaagaacgtgagagatcaagttttatcttgtgtttatgtctccggttacttattttcttctaatgaatgtaacattatgatatttccaatctctggctgttgaatagaatgcaatgaaacattggaaatatagtgttgactttgtcacctttattaagcaaaaaaannnnnnnnnnnnnnnnnnnnnnnnnnnnnnnnnnnnnnnnnnnnnnnnnnnnnnnn

SEQ ID NO: 117452 - DNA, 1515 bp, Arabidopsis thaliana
  unsure (1)..(1515): unsure at all n locations
cgcctgcaggtaccggtccggaattcccgggtcgaccacagatattaaaacaactacccaaacaaaactttagatctgaaaatctcagctttgaaatggaggaaatcggaatagttatcgtcggcggcggaatcgctggtctcgccacttccattgctcttcataggaaaggaataaagagtgtggtgttggagagagcagagaaagtgagatcggaaggagctggaatcggaactctctccaatggttggagagcccttgatcagcttggcgttggtgatcgccttcgtctcaattcttctcttattcacaaggcacggaccatgttgattgagaatggaaaaaaacgagaattcgtttcaaatatagtagacgaagctcgttgtattaaaaggaacgatcttgttgaggccttatccgatgcccttccgaaaggaaccatccggttcggttctcatattgtttctattgagcaggacaaaactacgttgtttccggttgttcacttagccaatggaaatagcatcaaagccaaggtcctgattggatgcgatggtgccaattctatcgtcagtgattatttgcagttaaacccgaaaaaggcgtttgcttgtcgtgcggtgagagggtttactaagtacccaaacggccatggatttccacaagaggttctaaggataaagcaaggaaatgtcttaataggaaggcttcctttgacggataatcaagtcttttggtttctagtacatatgcaagacaataatcacaatggtaaagatcaagaatcgattgcgaatctgtgtcgaaaatgggccgatgacttgtctgaagattggaaagaaatggtaaaaatatgcaatgtggagtcattaacactcacacacttaaggtaccgagcgccatcggaaatcatgttagggaaatttcgtcgtgggacagtgactgtagccggcgatgcgatgcacgtgatgggtccgttcttggcacagggcggctcagcggcgctagaggatgcggttgttttagctaggtgtctagctaggaaagttggtccggaccacggagacttgttaaaggattgttcgatgaaaaacattgaagaagctattgatgagtatgtggatgaacgtaggatgagattactcgggctttcggtgcagacttatttgaccggacgttcgctacaaacgtcatcaaaggttctgaggctaatgtttatagctttgttgttacttttgtttggtcgtgatcaaattcgtcatactaggtacgactgtggccgtctctagagatttgatggacattttgtattttttagtgtgaggttgtgtgctttaaactttttttgtgtgtttctttttcttataacatcctcctttctcaatataacaagagtttacatgaccaaaaaaaaaaaaaaaaagggcggcaacaannnnnnnnnnnnnnnnnnnnnnnnnnnnnnnnnnnnnnnnnnnnnnnnnnnnnnnnnnnnnnnnnnnnnnnnnnnnnnnn

SEQ ID NO: 117453 - DNA, 1621 bp, Arabidopsis thaliana
  unsure (1)..(1621): unsure at all n locations
nnnnnnnnnnnnnnnnnnnnnnnnnnnnnnnnnnnnnnnnnnnnnnnnnnnnnnnnnnnnnnnnnnnnnnnnnnnnnnnnnnnccacgcgtccgaaatactagagaggaagaaaaacagagctttctttctaagatcatcaacgcaccatggaagaagaaggcagcccagatatcatcatcgttggcgccggtatctccggcctttccaccgctgttggactacacaggcttgggatcagaagcatggtgctggaatcttcggagacactgagagcgacaggatttgcatttaccacttggttcaatgcttggaaggccatggaagctctcggcgtttctcagcatattcgcagtctccatgatcgccttgaaggatgggtggttggaacaatttctgcaggaactcctcccacagagatgctgtttccagaatccgaagaatatgagtctcgatgcgtacagaggaagctgttgttagaggctctagcaggtgagttgcctgaagagaccatcaggttttcgtctaaggttgttcatattgaattgtctggatgctacaagaaggttcatctctccgacgggaccattctcaaaaccaaggttttggtagggtgcgatggagtgtactcagtggttggtaagtggctaggcttcaaaaatcccgctacaactgcccggttagcaatccgagggctcacacattttccggaaggccatggatttgggaaaaggttcttccagttttatggagacggcgttcgttccggttttatcccatgtgaccacaacactgtctactggttcctaacccacacctccactgatatagatgaggagacaaattcggaaatcctcaaagagtttgtgctgaacaagatcaaagacttgcctgaaaacattaagaatgtggtggagaccactgatcttgatagcatggtgatgtctcaactgaagtaccgacctccatgggaactgctatggtcaaacatcacaaaagacaacgtgtgcgttgcaggagatgcacttcacccaatgactcctgatatcggacaaggaggttgctcagccatggaggatggagttatccttgctcgttgtctaggtgaagcgataaaggcaaagagtctgaaaggtgaaacagaagaaaatgaagaagagggttataagaggattgaagaaggtttgaagaagtatgcaggagaaaggaaatggagaagcattgatcttataacaacggcatatacagtaggattcatacagcagagcagagggaagtggatgaacatgttcagagacaggttcctgtcgtcttacctttctaggatgctgctgaaaaagtcccatttcgattgcggaagccttgtcccatgatgattctcaaacataagtcaaaagcttgtgattcttcttgtcatcaccaactgcagaacagttttcacctttggtttgcttcaaagactatctatctgtttagtgttatttcatataacaaactcagaattaataaagtaagtttgtgtagtgcccaaaaaaaaaaaaaaaaaaaaagnnnnnnnnnnnnnnnnnnnnnnnnnnnnnnnnnnnnnnnnnnnnnnnnnnnnnnnnnnnnnnnnnnnngcc

SEQ ID NO: 117454 - DNA, 947 bp, Arabidopsis thaliana
  unsure (1)..(947): unsure at all n locations
gacgaagaggaatcataaaaagcctaacgaagaagacgaagaagaagaggaacacgatgggtgaagcggtcaaggatgggagagaagaagtgatccaggcttggtatatggatgatagcgaagaggatcagagacttcctcaccacaaggatcctaaggagtttctatcgttggacaaacttgcagagctgggagtacttagctggagacttgatgctgataactatgaaaccgatgaggatttgaaaaagatccgcgaatctcgtggttactcttacatggacttttgtgaggtatgcccggaaaagcttccaaactatgaagtgaaagtgaagagctttttcgaagaacatttgcacactgatgaagagatccgttactgcgttgcaggaagcggttactttgatgtgagggatcgcaatgaagcttggattagggtatgggtaaagaagggaggtatgatagtcttacctgctggaatatatcatcgcttcaccgtagactcagacaactatatcaaggcaatgcggcttttcgtgggtgaaccggtctggacaccatacaatcgcccacacgaccacctccctgcaaggaaagagtacatcgataatttcgtgaaggtgaatgaaggtggtgtcatagacgcgtcagcctagaggattctcagtcttatgcatcagatttctataaactaagcatacaataaagagagctttctgtctcatgttggatattatgtcatctacagatccacttgtgaagaaactttgattcgtgtggctttggcattatggttgtgttgtaactgtatttatagtttatactccagaaatcaaactgtgttacattaaaaaaaaaaaaaaaaaaaaaagnnnnnnnnnnnnnnnnnnnnnnnnnnnnnnnnnnnnnnnnnnnnnnnnnnnnnnnnnnnnnnnnnnnnnngaaat

SEQ ID NO: 117455 - DNA, 917 bp, Arabidopsis thaliana
agaaggggatcgagtaatcgggtggttttgaagacgaagaaggactaagacatcacgaggaacacgatgggtgaagcggtcaaggatgggagagaagaagtgattcaagcttggtatatggatgatagtgaagaggatcagagacttcctcaccacaaggatcctaaagagtttgtatcgttggacaaacttgcagagctgggagtacttagctggagacttgatgctgataactatgaaaccgatgaggatttgaaaaagatccgtgaatctcgtggttactcttacatggacttttgtgaggtatgcccggaaaagcttccaaactatgaagtgaaagtgaagagctttttcgaagaacatttgcacactgatgaggagatccgttactgcgttgcaggaactggttactttgatgtgagagatcgcaatgaagcttggattagggtatgggtaaggaagggggctatgatagtcttacctgctgggactatcatcgcttcaccgtggactctgacaactatatcaaggcaatgcggcttttcgtgggtgaaccggtatggacaccatacaatcgcccacacgaccatcttcctgcaaggaaaagaatatgtcgataacttcatggtcaatgcctcggcttagagagcttcctctctctatatctggctttctgaaaccaggatctataaacaaggcctacaataaagaaagctttcctgtcaagtattggatatttatatgtattcctgtgtagaatgatggcttttggtatgcttgagttgttgtaaacttagttacactctctgatatgtctctctttaccatctttgtcgtatcccatatacgaaaagattacattgggattcatattgtcttacgttcgttcctatgtgcaatatgttgagtttttacac

SEQ ID NO: 117456 - DNA, 512 bp, Arabidopsis thaliana
  unsure (1)..(512): unsure at all n locations
gatacttccnnnnnnnnnnnnnnnnnnnnnnnnnnnnnnnnnnnnnnnnnnnnnnnnnnnnnnnnntcgttggtcgtcgcccacggctacggcggggcgtgttaccacagaaggggaagtgaaagtgaagagctttttcgaagaacatttgcacactgatgaagagatccgttactgcgttgcaggaagcggttactttgatgtgagggatcgcaatgaagcttggattagagtatgggtaaagaagggaggtatgatagtcttacctgctggaatatatcatcgcttcaccgtagactcagacaactatatcaaggcaatgcggcttttcgtgggtgaaccggtctggacaccatacaatcgcccacacgaccacctccctgcaaggaaagagtacattgataatttcgtgaaggtgaatgaaggtggtgtcatagacgcgtcagcctagaggattctcagtcttatgcatcagattctcataaactaagcatacagtaaagaaagctttc

SEQ ID NO: 117457 - DNA, 379 bp, Arabidopsis thaliana
agaagggggaagacgaagaaggactaagacatcacgaggaacacgatgggtgaagcggtcaaggatggagttatccttgctcgttgtctaggtgaagcgataaaggcaaagagtctgaaaggtgaaacagaagaaaatgaagaagagggttataagaggattgaagaaggtttgaagaagtatgcaggagaaaggaaatggagaagcattgatcttataacaacggcatatacagtaggattcatacagcagagcagagggaagtggatgaacatgttcagagacaggttcctgtcgtcttacctttctaggatgctgctgaaaaactcccatttcgattgcggaatccttgtcccatgatgattctcaaacataagtc

SEQ ID NO: 117458 - DNA, 739 bp, Arabidopsis thaliana
cccacgcgtccgagaaacgttagatttctttatacgcgcaaactgaaagagctttgatcgatcgatttggaggattcgtagaagatatgtcgagtatatacagaactgtttcgagaaaagagaaaccgagacgtcatcatggattgacgacacagaagaagcaagagattaaggaagcttttgagctatttgacactgatggttctggtaccattgatgctaaagagcttaatgttgctatgagggcgcttggttttgaaatgacggaagagcaaatcaacaaaatgatagctgatgtggataaagatggaagtggagctatagattttgatgagtttgttcatatgatgactgctaagattggtgaaagagacacaaaagaagagctcactaaagcattccagatcattgatcttgacaaaaatgggaagatatctccggatgatatcaaacgcatggcaaaggacttgggtgagaatttcactgatgctgagatacgagagatggttgaagaagcagaccgagaccgtgatggtgaagttaacatggatgaattcatgaggatgatgaggagaactgcttatggtggtaactagaaaggttgttgctgttcttaacgatatttgatgagctctattatagttctttaactgaggcttaattatctgtaatattattactgaagatacatatatcacagttttaatctatagctcagcttaatggcaaaaaaaaaaaa

SEQ ID NO: 117459 - DNA, 375 bp, Arabidopsis thaliana
ttgatcttgacaaaaatgtatttactcataacttagttagttatttcatttgatcttaatttgtcagaagctaaactatttttcttccaaattttcaggggaagatatctccggatgatatcaaacgcatggcaaaggacttgggtgagaatttcactgatgctgagatacgagagatggttgaagaagcagaccgagaccgtaagtgtcctaaaccttttttctcattctcttgtggcacaatgcttggtttgactaaagatatatgatacattactgaaaactgcaggtgatggtgtagtgaccaacggatgacttcatgaggctgaccgggagaactgcttatggtggtaactagaaaggttgttgctgttc

SEQ ID NO: 117460 - DNA, 1834 bp, Arabidopsis thaliana
  unsure (1)..(1834): unsure at all n locations
nnnnnnnnnnnnnnnnnnnnnnnnnnnnnnnnnnnnnnnnnnnnnnnnnnnnnnnnnnnnnnnnnnccacgcgtccgctctgacttaaaacatttattttatcttcttcttgttctctctttctctttctctcatcactatgaagagtttcaacacagaaggacacaaccactccacggcggaatccggcgatgcctacaccgtgtcggacccgacaaagaacgtcgatgaagatggtcgagagaagcgtaccgggacgtggcttacggcgagtgcgcatattatcacggcggtgataggctccggagtgttgtctttagcatgggctatagctcagcttggttggatcgcagggacatcgatcttactcattttctcgttcattacttacttcacctccaccatgcttgccgattgctaccgtgcgccggatcccgtcaccggaaaacggaattacacttacatggacgttgttcgatcttacctcggtggtaggaaagtgcagctctgtggagtggcacaatatgggaatctgattggggtcactgttggttacaccatcactgcttctattagtttggtagcggtagggaaatcgaactgcttccacgataaagggcacactgcggattgtactatatcgaattatccgtatatggcggtttttggcattattcaggttattcttagccagatcccaaatttccacaagctctcttttctttccattatggccgcggtcatgtcctttacttatgcaactattggaatcggtctagccatcgcaaccgtcgcaggtgggaaagtgggtaagacgagtatgacgggcacagcggttggagtagatgtaaccgcagctcaaaagatatggagatcgtttcaagcggttggggacatagcgttcgcctatgcttatgccacggttctcatcgagattcaggatacactaagatctagcccagctgagaacaaagccatgaaaagagcaagtcttgtgggagtatcaaccaccacttttttctacatcttatgtggatgcatcggctatgctgcatttggaaacaatgcccctggagatttcctcacagatttcgggtttttcgagcccttttggctcattgactttgcaaacgcttgcatcgctgtccaccttattggtgcctatcaggtgttcgcgcagccgatattccagtttgttgagaaaaaatgcaacagaaactatccagacaacaagttcatcacttctgaatattcagtaaacgtacctttccttggaaaattcaacattagcctcttcagattggtgtggaggacagcttatgtggttataaccactgttgtagctatgatattccctttcttcaacgcgatcttaggtcttatcggagcagcttccttctggcctttaacggtttatttccctgtggagatgcacattgcacaaaccaagattaagaagtactctgctagatggattgcgctgaaaacgatgtgctatgtttgcttgatcgtctcgctcttagctgcagccggatccatcgcaggacttataagtagtgtcaaaacctacaagcccttccggactatgcatgagtgagtttgagatcctcaagagagtcaaaaatatatgtagtagtttggtctttctgttaaactatctggtgtctaaatccaatgagaatgctttattgctaaaacttcatgaatctctctgtatctacatctttcaatctaatacatatgagctcttccaaaaaaaaaaaaaaaaggcgcacgctctagaggatccaagcttacgtacgcgtgcatgtgacgtcaagaatcttctaagtgt

SEQ ID NO: 117461 - DNA, 1045 bp, Arabidopsis thaliana
  unsure (1)..(1045): unsure at all n locations
nnnnnnnnnnnnnnnnnnnnnnnnnnnnnnnnnnnnnnnnnnnnnnnncccacgcgtccgcaagaaaaaaaaagcgtccggaaacgttcgaaggccattttctttggacgaccatcggcgttaaggagagagcttagatctcgtgccgtcgtgcgacgttgttttccggcttgatcaaaatggggttgtcattcggaaagttgttcagcaggctctttgcgaagaaagagatgcgtattctgatggttggtctcgatgctgctggtaagacgactatcctctacaagctcaaacttggagagatcgtcaccactattccaaccattgggttcaacgttgagactgttgaatacaagaacatcagcttcaccgtgtgggatgttgggggtcaagacaagatccgtccattgtggagacattacttccagaacacacagggacttatctttgttgtggacagcaatgatcgtgaccgtgttgttgaagccagggacgagcttcacaggatgctgaatgaggatgagttgagggatgcgtgcttcttgtttttgctaacaagcaagatcttccaaacgcgatgaacgctgctgagataactgaaagcttgggcttcattctcttcgtcaacgacactggtacattcagagcacatgtgccacctctggagaaggactctatgagggacttgactggctctccaacaacatcgcaagcaaggcatagatggaatgttagccagattcctcttctgcttgtttggtttacaaatcaaagacagaggtctgtttctctagtactaaaagatttattattatattcttcttcgtcacttatctcaaacgcagatcattttacactttgtacttccccttcaataacttgttacttctctcgtttgcttcctgaatttgagtatatcatttttacatctgcttttcatcaaagcataaagcatctttcgaaacaaaaattgaaccgaatttttctgtaaactgatcaaatgtgtgaagaagacctgttatttggaatatttattttgtcactc

SEQ ID NO: 117462 - DNA, 911 bp, Arabidopsis thaliana
  unsure (1)..(911): unsure at all n locations
ccggaatttccgggtcgacccacccgtccgcctctcacgttcgaagaccatttcttgttctttggacgaccatcggcgacagtgttaagtctagagtcttcttcttcttcggcgtagttttttccccggcttgaaaaatgggtctatccttcggaaagttgttcagcaagctctttgcaaagaaagagatgcgtatcctcatggtgggtctcgatgcagctggtaagactacgatcttgtacaagctcaagcttggagagatcgtgactacgattccaaccattggtttcaatgtggagactgtggaatacaagaacattagctttaccgtgtgggatgtcgggggtcaagacaagattcgtccattgtggaggcactacttccagaacactcagggacttatctttgtggtggacagcaatgatcgtgaccgtgttgtggaagccagagatgagcttcacagaatgttgaacgaagatgagttgagagatgctgtgcttctcgtttttgcttaacaagcaagatcttccaaatgcgatgaacgccgctgagataaccgataagcttggacttcactctctccgtcaacgacactggtacatacagagcacatgtgctacctccggagaagggctttatgagggacttgactggctctctaacaacatcgcaaacaaggcttaggagaacaacgtgtggtttggtttttaatcgaggagagtcttgtcttcttccttctatcttttgttctttcgtctcaaactcttatcatttcatactctttgttcttcgctctaataatttacaagtttttttttttgttgcttttatcctataattcagactcttataaaatggggcccaatttcggcggatattccaatttttttttttttnnnnnnnnnnnnnnn

SEQ ID NO: 117463 - DNA, 895 bp, Arabidopsis thaliana
  unsure (1)..(895): unsure at all n locations
nnnnnnnnnnnnnnnnnnnnnnnnnnnnnnnnnnnnnnnnnnnnnnnnnnnnnnnnnnnnnnnnnnnnnnnncccacgcgtccccacgcgtctcttaagcttctctcacatttctctttcaaatttcttcgagtctctctcgctctctccgtttcttcgcggtctctctctctcagatctctccgaaacattcttcgtagtgaagcaaaatggggttgagtttcgccaagctgtttagcaggctttttgccaagaaggagatgcgaattctgatggttggtcttgatgctgctggtaagaccacaatcttgtacaagctcaagctcggagagattgtcaccaccatccctactattggtttcaatgtggaaactgtggaatacaagaacattagtttcaccgtgtgggatgtcgggggtcaggacaagatccgtcccttgtggagacactacttccagaacactcaaggtctaatctttgttgttgatagcaatgacagagacagagttgttgaggctcgagatgaactccacaggatgctgaatgaggacgagctgcgtgatgctgtgttgcttgtgtttgccaacaagcaagatcttccaaatgctatgaacgctgctgaaatcacagataagcttggcccttcaattccctccgtcaagcgtcaattggtattttccaggagcacatgtgccactttaagggtgaagggcttttatgaaggcttggccctggttctccaacaaaactcgggggaaaagcattttttagggtgaaatttccgtttnatcgngggtgattcttgcctcctgnntttgggcctcnnntgcctttnatnaaagggggttttnaaaattntttgaccttttgcttttttgggattgaatgtnctntt

SEQ ID NO: 117464 - DNA, 963 bp, Arabidopsis thaliana
  unsure (1)..(963): unsure at all n locations
cacaatcgtctttgtgctgctgattggaagcttctctctctctcggtttagatccctttcaattctccaaaggatcaacagttaaaaggaaaatggggctttcatttgcaaagctttttagccggctttttgccaagaaggagatgcgaatccttatggttggtcttgatgctgctggtaagaccaccattttgtacaagctcaagcttggtgagattgtcaccaccattcccaccatcgggtttaatgtggagacggttgagtacaagaacatcagcttcacggtttgggatgtcgggggtcaggacaagatccgtccctttgtggagacactacttccaaaacactcaaggtctgatatttgttgttgatagcaatgacagagaccgtgttgttgaagccagagatgaacttcacaggatgttgaatgaggacgagctgcgtgatgctgtgttgcttgtgtttgccaacaagcaagatcttccaaatgctatgaacgctgctgaaatcacagataagcttggccttcactccctccgtcagcgtcattggtatatccagagcacatgtgccacttcaggtgaagggctttatgaaggtctggactggctctccaacaacatcgctggcaaggcatgatgagggagaaattgcgttgcatcgagatgattctgtctgctgtgttgggatctctctctgtcttgatgcaagagagattataaatattatctgaacctttttgcttttttgggtatgtgaatgtttcttattgtgcaagtagatggtcttgtacctaaaaatttactagaagaacccttttaaatagctttcgtgtattgtgcctggattaatatgattgattgttttgctttaaaaaaaaaaaaaaaagnnnnnnnnnnnnnnnnnnnnnnnnnnnnnnnnnnnnnnnnnnnnnnnnnnnnnnnnnnnnnnnnnnnnnnnnnn

SEQ ID NO: 117465 - DNA, 519 bp, Arabidopsis thaliana
  unsure (1)..(519): unsure at all n locations
gaccatttnttgttctttggacgaccatcggcgacagtnttaagtctagagtcttcttcttcttcggcgtagcctttcttccccccggcttgaaagaagaagatggggctgtccttcggtaagctgttcagcaagctctttgcgaagaaagagatgcgtatcctcatggtgggtctcgatgctgcctggtaagaccaccatcctgtacaagctcaagcttggcgagatcgtcaccaccattccaaccattggtttcaatgtggagactgtggaatacaagaacatcagcttcaccgtctgggatgtcgggggtcaggacaagattcgtccattgtggaggcactacttccagaacacgcaggggctgatcttctgtggtggacagcaacggcccgtgaccgtgttttttggagccaganttggnttcacagatttttgaccgaggtnagttaganatcnttcctccggtttttctaanaagaangctttcccaatggngttacccnnttgnnaccnnaa

SEQ ID NO: 117466 - DNA, 1004 bp, Arabidopsis thaliana
aaataagttcctcgagaaagaaaaaagctcgccgattattcaagatggaattctaatggatctgaccgaaacacacaacgaaaagaacaagaagggcgtggagaaccgccaagctgatgaacacgctttatgccaagaaggagatgcgaattctgatggtaggacctgatgctgctggtaagaccacaatcttgtacaagctcaagctcggagagattgtcaccaccattcccaccatcgggtttaatgtggagacggttgagtacaagaacatcagcttcacggtttgggatgtcgggggtcaggacaagatccgtcccttgtggagacactacttccaaaacactcaaggtctgatatttgttgttgatagcaatgacagagaccgtgttgttgaagccagagatgaacttcacaggatgttgaatgaagatgagcttcgggatgcagtattgcttgtgtttgccaacaagcaggatcctccaaacgctatgaatgctgctgagattactgataagcttggccttcactcactccggcaacgccactggtacatcccaaagcacatgcgcaactagcggtgaaggggctctatgaaggtctggattggctttccaacaacattgctagcaaagcttgaggttatctcgaccagatagttttggtgaggggattgaagctttctctccggagtcgacttgatttcttgtggtttaagacctgctcgatttgtttcatgtttaactgtcaccgtttctcctttttgctaactcttctcgaatgtttgaattcttctaggctttaaaagacttctttttttttttttaattggagttaaaaaatcacatcacttattttcatatagtaaatcaatgttatctgttcactcatcggtaggagctttatgcgcgatgatccttctttgttctccacattgcaatctgtaaacaccaaacctgtaagatcaattggtttactctgccttggtcaaaatcctaattcct

SEQ ID NO: 117467 - DNA, 1384 bp, Arabidopsis thaliana
cggacgcgtccgcccacccctcacacatttcttatcttttgctctcaatagattccattgattcaaaacaaaattttcattaagatttcacaacctccacacacttccaaacacaattaaagagaggaaaaagaatcaataaccctataaataaaaaatcagacaaacagaagtttcctcttcttcttccttaagctagtaccttttgttcttgaaattagggttaatttcttttttccaaataccatcaattctccagaccataaaaactcaaaaagatcagatctttcctctgaaaaagagatacccaacttatgtttttgtgtgtctgtatatagataaacattacatacccatatttgtgtatagacataaaaagtggaaattaaggtaacaaaaagaaatgggaagaggaagagtagagctgaagaggatagagaacaaaatcaacagacaagtaacgtttgcaaagcgtaggaacggtttgttgaagaaagcttatgaattgtctgttctctgtgatgctgaagttgctctcatcatcttctccaaccgtggaaagctctatgagttttgcagctcctcaaacatgctcaagacacttgatcggtaccagaaatgcagctatggatccattgaagtcaacaacaaacctgccaaagaacttgagaacagctacagagaatatctgaagcttaagggtagatatgagaaccttcaacgtcaacagagaaatcttcttggggaggatttaggacctttgaattcaaaggagttagagcagcttgagcgtcaactggacggctctctcaagcaagttcggtccatcaagacacagtacatgcttgaccagctctcggatcttcaaaataaagagcaaatgttgcttgaaaccaatagagctttggcaatgaagctggatgatatgattggtgtgagaagtcatcatatgggaggatgggaaggcggtgaacagaatgttacctacgcgcatcatcaagctcagtctcagggactataccagcctcttgaatgcaatccaactctgcaaatggggtatgataatccagtatgctctgagcaaatcactgcgacaacacaagctcaggcgcagccgggaaacggttacattccaggatggatgctctgagaatcatgtactgtgatgaagctcacccacaaaagaccttatatatatataaagtatagatacaagacttggatttgtagacataagtggctaatataatggtcctgaggatcttctagacatttgtatcttttgggaatccttgcttatattaagaattcaaatgtgcggagcttgttttagcgctgaaccatgactctggttaattatcgtgtaatgagaaacatttgggtc

SEQ ID NO: 117468 - DNA, 1406 bp, Arabidopsis thaliana
  unsure (1)..(1406): unsure at all n locations
aatccgattcacaaaaacttttcttcagattcacaatctcatcacaacccttcaaaaagagaaaagatctaaagaataaacaagagccctaatatcaaatcacaaccaaaaaaaccaaagaaagctaattaaagttttctctctagctattcctcttcttttcttgttcttgaaaactagggtttacttcaccaaaagataagatctttccccagaaaaagcaatacccaagtcatgtttctgtgtgtctgtatatagataaaacattacataccctaataaggttacacaaatagctataaaagagggaaaataagatagggattttttggggtgaggaaagatgggaagaggaagagtagagctcaagaggatagagaacaaaatcaacagacaagtgacgtttgctaaacgtagaaatggtttgctgaaaaaagcttatgagctttctgttctctgcgatgctgaagtctctctcatcgtcttctccaaccgtggcaagctctacgagttctgcagcacctccaacatgctcaagacactggaaaggtatcagaagtgtagctatggctccattgaagtcaacaacaaacctgctaaagagcttgagaacagctacagagagtacttgaagctgaaaggtagatatgaaaatctgcaacgtcagcagagaaatcttcttggagaggatcttggacctctgaattcaaaggagctagagcagcttgagcgtcaactagacggctctctgaagcaagttcgctgcatcaagacacagtatatgcttgaccagctctctgatcttcaaggtaaggagcatatcttgcttgatgccaacagagctttgtcaatgaagctggaagatatgatcggcgtgagacatcaccatataggaggaggatgggaaggtggtgatcaacagaatattgcctatggacatcctcaggctcattctcagggactataccaatctcttgaatgtgatcccactttgcaaattggatatagccatccagtgtgctcagagcaaatggctgtgacggtgcaaggtcagtcccaacaaggaaacggctacatccctggctggatgctgtgagcgatacttcttcccccaataaagatcttaagcaagtactggtggggtcttcgtggtgtgatcttagatcttatgcatatgaataataatgttattgcacaagacttttgcttttgtagacacaagtggctatagctgtaatagccttcaacatctctcttctgtttcaggatttgtttgtgcctattgtaattgcttatatatgtatggtttgtataatgtgtgaaatgttaacatcgaccatgtctcatctggtgnnnnnnnnnnnnnnnnnnnnnnnnnnnnnnnnnnnnnnnnnnnnnnnnnnnnn

SEQ ID NO: 117469 - DNA, 970 bp, Arabidopsis thaliana
accacgggaattcatcttcccatcctcacttctctttctttctgatcataattaatcttgctaagccagctagggcttatagaaatggagggtggtgcgagtaatgaagtagcagagagcagcaagaagatagggagagggaagatagagataaagaggatagagaacactacgaatcgtcaagtcactttctgcaaacgacgcaatggtttactcaagaaagcttatgagctctctgtcttgtgtgacgctgaggttgctcttgtcatcttctccactcgaggccgtctctacgagtacgccaacaacagtgtgagaggaacaatagaaaggtacaagaaagcttgctccgacgccgttaaccctccgaccatcaccgaagctaatactcagtactatcagcaagaggcgtctaaactccggagacagattcgggacattcagaatttgaacagacacattcttggtgaatctcttggttccttgaactttaaggaactcaagaaccttgaaagtaggcttgagaaaggaatcagtcgtgtccgatccaagaagcacgagatgttagttgcagagattgaatacatgcaaaaaagggaaatcgagctgcaaaacgataacatgtatctccgctccaagattactgaaagaacaggtctacagcaacaagaatcgagtgtgatacatcaagggacagtttacgagtcgggtgttacttcttctcaccagtcggggcagtataaccggaattatattgcggttaaccttcttgaaccgaatcagaattcctccaaccaagaccaaccacctctgcaacttgtttgattcagtctaacataagcttctttcctcagcctgagatcgatctatagtgtcacctaaatgcggccgcgtccctcaacatctagtcgcaagctgaggggaaccactagtgtcatacgaacctccaagagacggttacacaaacggg

SEQ ID NO: 117470 - DNA, 1300 bp, Arabidopsis thaliana
  unsure (1)..(1300): unsure at all n locations
nnnnnnnnnnnnnnnnnnnnnnnnnnnnnnnnnnnnnnnnnnnnnnnnnnnnnnnnnnnnnnnnnnnnnnnnnnnnnnnnnnnccacgcgtccgaaagtagattaataactcttaaacacacaaagtttctttattttttagttacatccctaattctagaccagaacatggatttgatctatttcttggttatgtattcttgatcaggaaaagggatttgatcatcaagattagccttctctctctctctctagatatctttcttgaatttagaaatctttatttaattatttggtgatgtcatatataggatcaatggaggaaggtgggagtagtcacgacgcagagagtagcaagaaactagggagagggaaaatagagataaagaggatagagaacacaacaaatcgtcaagttactttctgcaaacgacgcaatggtcttctcaagaaagcttatgaactctctgtcttgtgtgatgccgaagttgccctcgtcatcttctccactcgtggccgtctctatgagtacgccaacaacagtgtgaggggtacaattgaaaggtacaagatagcttgttccgatgccgtcaaccctccttccgtcaccgaagctaatactcagtactatcagcaagaagcctctaagcttcggaggcagattcgagatattcagaattcatataggcatattgttggggaatcacttggttccttgaacttcaaggaactcaaaaacctagaaggacgtcttgataatggatcagccgtgtccgctccaaaagaatgagctgttagtggcagagatagagtatatgcagaagatggaaatggagttgcacacaataacatgtacctgcgagcaagatagccgaaggcgccagattgaatccggaccagcaggaatcgagtgtgatacaagggacgacagtttacgaatccggtgtatcttctcatgaccagtcgcagcattataatcggaactatattccggtgaaccttcttgaaccgaatcagcaattctccggccaagaccaacctcctcttcaacttgtgtaactcaaaacatgataacttgtttcttctcctcataacgattaagagagagacgagagagttcattttatatttataacgcgactgtgtattcatagtttaggttctaataatgataataacaaaactgttgtttctttgcttaattaaaaaaaaaaaaaaaaaaaagnnnnnnnnnnnnnnnnnnnnnnnnnnnnnnnnnnnnnnnnnnnnnnnnnnnnnnnnnnnnnnnnnnnnnnnnnnn

SEQ ID NO: 117471 - DNA, 478 bp, Arabidopsis thaliana
tctgcagttaagtggtactgagataaatgatatagtttctcttcaagaacagtttctcattacccaccttctcctttttgctgatctatcgtaatcttgagaactcaggatcaatggaggaaggtgggagtagtcacgacgcagagagtagcaagaaactagggagagggaaaatagagataaagaggatagagaacacaacaaatcgtcaagttactttctgcaaacgacgcaatggtcttctcaagaaagcttatgaactctctgtcttgtgtgatgccgaagttgccctcgtcatcttctccactcgtggccgtctctatgagtacgccaacaacagtgtgaggggtacaattgaaaggtacaagaaagcttgttccgatgccgtcaaccctccttccgtcaccgaagctaatactcagtactatcagcaagaagcctctaagcttcggaggcagattcgagatattcagaattc

SEQ ID NO: 117472 - DNA, 1638 bp, Arabidopsis thaliana
ggaatttcggatcgtgtctctctctgtttctttgtttcaatccgatttcgaatcaagccctttacttgtgcaccttcaagatttcgttttttccagcgcccagaatgctccgggtgaccaacatttgttcctgattcatttcctattggttcgtattgtctgtgcacacaagagaaatttcaagaagttgttactaaaagagaggccacaagtggatattgtctttgttatcaagtgttagtacagaaaagtggtgagaaagtaatatggctgataccagtccgagaactgatgtctcaacagatgacgacacagatcatcctgatcttgggtcggagggagcactagtgaatactgctgcttctgattcgagtgaccgatcgaagggaaagatggatcaaaagactcttcgtaggcttgctcaaaaccgtgaggcagcaaggaaaagcagattgaggaagaaggcttatgttcagcagctagagaacagccgcttgaaactaacccagcttgagcaggagctgcaaagagcaagacagcagggcgtcttcatttcaggcacaggagaccaggcccattctactggtggaaatggtgctttggcgtttgatgctgaacattcacggtggttggaagaaaagaacaagcaaatgaacgagctgaggtctgctctgaatgcgcatgcaggtgattctgagcttcgaataatagtcgatggtgtgatggctcactatgaggagcttttcaggataaagagcaatgcagctaagaatgatgtctttcacttgctatctggcatgtggaaaacaccagctgagagatgtttcttgtggctcggtggatttcgttcatccgaacttctaaagcttctggcgaatcagttggagccaatgacagagagacagttgatgggcataaataacctgcaacagacatcgcagcaggctgaagatgctttgtctcaagggatggagagcttacaacagtcactagctgatactttatcgagcgggactcttggttcaagttcatcagggaatgtcgcaagctacatgggtcagatggccatggcaatgggaaagttaggtacactcgaaggatttatccgccaggctgataatttgagactacaaacattgcaacagatgataagagtattaacaacgagacagtcagcacgtgctctacttgcaatacacgattacttctcacggctacgagctctaagctccttatggcttgctcgacccagagagtgaaactgtattttggtcacatgtcagctgtacaaaatccatatggacacaaaaccaggagagactattaatcaacacttgtcagattcttcttaccaaatccatcaacaaataagcaaatttctgggaaacaaaagactctttgtatgtaggtttcttctacatggttgtggtaattcatgttgttttagttgtagtcatcagtttttaatttagcatttgaaaagttcaatgttgtttatatagcatcttcgattatcttagaaaggttattgaattttgtttttttttgttacttttgtgtgtggtaaaggtgttttaaccttgcaacttctgtactgtaatcatttaacaatattaagatgttctatttgagttttgt

SEQ ID NO: 117473 - DNA, 2043 bp, Arabidopsis thaliana
caaaaactgttttaagtcccaaaaatcagaccagaacaacaaaaaacctacgaaccctttttgtcttccatggcggccacaacaagcttctcctcttccctctctttaatcactaaaccaaacaattcttcttacaccaataaacctctccctctcttccccaaacccttccttgaacctccacatctctctctccttccttcttccatctccactcctcctccttcactcatccatggagtctcctcctacttctcctctccttcaccatccgaagaacaattctcatgccccttttgattaccacaacgacgaagacgacgaaaagcctcgagaagagtgcggtgtcgtcggaatctatggagatccagaagcttcacgactcttttacttagctctccacgcacttcagcatcgtggtcaagaaggtgcaggtattgtaacagtaagtcccgagaaagttcttcaaaccattacaggtgttggtttagtctctgaggttttcaacgaatcaaaacttgatcaattacctggtgaatttgctattgcccatgttcgttactcaacagctggagcttctatgctcaaaaatgttcagcctttcgtcgccggttatcgattcggttccatcggtgttgcccacaatggtaatttagtaaattacaaaactttgagagctatgcttgaagagaacggttctatcttcaatactagctctgatactgaggttgtgcttcatttgattgctatttctaaagctagacctttttttatgaggattattgatgcttgtgagaaacttcaaggtgcttattcaatggtgtttgttactgaggataagcttgttgctgttcgtgatccttatgggtttagacccttagttatgggtaggagaagtaatggagctgttgttttcgcttcggagacttgtgctcttgatttgattgaagctacttatgagagagaggtttatcctggtgaggttttggttgtggataaggatggtgtcaagtctcagtgtttgatgcccaagtttgagcctaagcaatgtattttcgaacatatctacttctcgttgcctaactcgattgtgtttggtcggtccgtgtatgaatctaggcatgtgtttggtgagattttggcaactgagtcgcctgttgagtgcgatgttgtcatcgctgtgcctgactctggtgttgtggctgctctcgggtacgctgcgaaatccggtgtgccgtttcaacaggggttgattaggtctcattatgtagggaggacgttcattgagccgtcacagaagattagagactttggtgtgaagcttaagttgtctcctgttcgtggtgttttagaagggaagagagttgttgtggtggatgattcgattgttagaggcacaacttcgtctaagattgtgcgtttattgagagaagctggtgcgaaagaggttcatatgaggattgctagtcctcctatagtagcttcttgttactatggtgttgatacgcctagctcagaggagttgatatccaacagattgagtgttgaggagattaacgagttcatcgggagtgactctcttgcgtttctgtcgtttgataccttaaagaaacacttggggaaagactctaagagcttctgctatgcgtgcttcacgggtgactatcccgtgaagccaacagaagttaaggtgaaacgaggaggaggggatttcattgatgacggtctcgttggtagcttcgaaaacatcgaagcaggttgggttcgataatgagagagagactaatggtggtgaaaacatctttacttgcattccaacgtttatgctttgttttctatttgacattattgtcatatttatatctttgttttgtttaaatcttgaaattttttgattaaaatctcacatgtcattttatgaatcctatcttatttgtagacgtctctcattctcttgttcttctctaaaaaaaggttattttgtgaattgaatattgtatttgtagacatcactatgtcatttaatgaggatcgtttttagtc

SEQ ID NO: 117474 - DNA, 764 bp, Arabidopsis thaliana
tatgttggaaggactttcattgagccgtcttttattttcagagattttggagtgaagctgaagctatcgccagtccgaggagttttagaagggaaaagagttgttgttgttgatgattcgattgttagaggaacaacttcgtccaagattgtgcgtttattgagagaagcgggtgcgaaagaggttcacatgaggatcgcgagtcctcctattattgcatcttgttactacggagtggacacgcctagctcaaatgagttgatatcgaataggatgagtgttgatgaaatcagggattacatcggatgtgattcccttgcgtttttgtcgtttgagacgttaaagaaacatttgggggaagattctagaagcttctgctatgcatgcttcacgggggactatccggtgaagcctacagaggataaggtgaagcgaggaggagattttatcgatgatggtctcgttggaggaatccacaacattgaaggaggttgggtacggtagatagcagatattcaagttctgcattatgatgatcaattttgggtactaatggagtaagatgatgacgatatcttgttgaattttgtgttccatttgaccttaattgctggcacatttttactattttattgagtctgggatggattaagatttaagggttgttcttgtctgaatctttgaaaggttccgtttacttttgtctcgttaagaattcaaaacttctctctaaaaaaaaaaaaaaaaaaaaaagggcggccgct

SEQ ID NO: 117475 - DNA, 2475 bp, Arabidopsis thaliana
ctactactcatattgcttatattttcctacaacactctctcaacaaaaaaacaaaaaaaaaagacgttctttctttgtttgtatttagaagaaaaatggctaccaattacaacgagaagcttcttcttaattatgttcccgtttacgttatgcttccgttgggagttgtgaatgtggaaaatgtatttgcggacccagaaacgcttgaaacgcagcttaaacgtctcaaagaagaagctggcgttgatggcgttatggtcgatgtttggtggggaatcatagaatccaaaggtcccaaacaatatgattggacggcctacaaaacgctgttccagctgatcgcacgtttgggactcaaaatccaagcaatcatgtcttttcaccaatgtggtggaaacgttggcgacatcgttactatcccgatcccacaatgggttcgcgatgtcggtgacaatgatcccgatatctactacactaaccgtaaaggaactagagacatcgagtatctctcaatcggtgttgataatcttcccctatttgccggaagaaccgctgttcagttgtacagtgattacatgagtagcttcaaagaaaacatggcggatttgatagaagctggggtgattgttgacatcgaagtcggacttggcccggccggtgaactacgttatccttcttacccccaaagccaaggttgggtgtttcccggcatcggagaattccagtgttatgacaagtacttgaagaaagatttcaaggaagcggcggcgaaagcagggcaccctgagtgggacttgccagaggacgccggagaatacaatgacaagccggaggagactggatttttcaagaaggatgggacttatgtctcggagaaggggaagtttttcatgacatggtactcgaacaaactaatttttcatggagatcagatcttaggagaagccaacaagatctttgctggacttaaagttaacttggctgccaaggtttctgggattcactggttgtacaaccaccacagccacgctgcggagttgactgctggatattacaaccttttcaagagagatggttaccgtccgatcgcccggatgctctcaaaacactacggcattctcaacttcacttgccttgagatgaaagataccgacaatacagctgaagccctaagtgctcctcaagaacttgttcaagaggtactgagcaaggcatggaaagaaggtatagaagttgcgggtgagaacgcattagagacctatggagccaaaggttacaatcagattcttcttaacgcgaggcctaacggggttaacccaaacggtaagccgaagcttagaatgtacggatttacttaccttcggttatccgatactgtctttcaagaaaacaactttgagctgtttaagaagttggtgaggaaaatgcacgctgatcaagattattgtggagacgcagcgaagtacgggcatgagattgtgccgttgaaaacgtcgaattcgcagctgacgctggaggatatcgccgacgcggctcagccaagtggagcatttaagtgggactctgaaaccgatttgaaggtcgacggttagttatattttatatgatcgatcgtctaatcacaaagaaagtaagggaaagaatcaagtattcgttgatgttgttgttttgaacaggcaaactaaggcggtcttggccttcaattagttttgcagatttgatgatatctccagtcttgatctgcccgagaatatcttttcctgctattgtgtatccgaagaccgagaactgtccttcgtcaaaggataatcctcctaagccagagtttcttttatcgtataggtagaagaagaattggtaaggagaagagtattcttctgagttttcgctgtgcgccattgctacagctccataaaccgataaaggaagcactggtaactccccatcctggacactcaatggcgttctgtagagaggttcgaattgtccagaaggcattacttccaatggaacactaacactctccaccttaccactcccatcctctgtgataacagcctggtttacagtattgagtttggctccatcatatgcaccgctagttaccagttttgcaaaattccctgcggttagaggtgctgaatatccatctataacgatctgtactgtagcactctttctttgatcacctccagcttcagctgaaaaagtcgaaccatcagctttctcaatggtgatttccacagttcctcttcctgctaacctgggatagtttaagtactgctgaggaagtagaaatgacaacccagatgcctgtaataactccagatccgcaacagtatctagtgatgctgccagccaaagggacactttatcaggatcttgtttcttaatagacgttataagtgcttgtagtccaccctttccatcaatcagagttgtatacagttctgagcccttgtcttttaagtctac

SEQ ID NO: 117476 - DNA, 686 bp, Arabidopsis thaliana
tacttaccttcggttatccgatactgtctttcaagaaaacaactttgagctgtttaagaagttggtgaggaaaatgcacgctgatcaagattattgtggagacgcagcgaagtacgggcatgagattgtgccgttgaaaacgtcgaattcgcagctgacgctggaggatatcgccgacgcggctcagccaagtggagcatttaagtgggactctgaaaccgatttgaaggtcgacggttagttatattttatatgatcgatcgtctaatcacaaagaaagtaagggaaagaatcaaggaagtaagaataagaagataataaataaagagaataagaagaggcatttgcaactttaagaggttaaaatttcttaaatgagtctgagtttcgttgtgtgttttgggtgtaccataagaaataaaacgtacggggttgctatgtattttgtgaagtgtgtatttctggttgaatattagtctgcgtaataaaaaaaagtatgtgtagtaaaaataaataactgttgcccagtaaaataatgcatcattgtcactgtattgccagaatatatatattacttttttaggttgtaaagaattttagattatataaaaaaaaaaaaaaggaagcgcgctctagaggatccaagcttacgtacgcgtgcatgcgacgtcaagctcttctatagt

SEQ ID NO: 117477 - DNA, 1435 bp, Arabidopsis thaliana
aaaaccacaattctggcaaaaaagaaaaattcccaaaatctagggttttcttctcgcccaatttcacttttcttctacgaaattctccattcctgccggctgtcgggttttctgaatcgattctccttcaccaacttcttctctggttctgttcgattctgattttttttcaaggtcaattttttcttctctttaaactctgcaaaatcgtgatcgattaaattcacctcagggttttttgatttctgaaagaagttaatcttcttcgaaggcgattgcaaaagagtgctctgctgtgaatttccactgagatgcaatcaaaaccgggaagagaaaacgaagaggaagtcaataatcaccatgctgttcagcagccgatgatgtatgcagagccctggtggaaaaacaactcctttggtgttgtacctcaagcgagaccttctggaattccatcaaattcctcttctttggattgccccaatggttccgagtcaaacgatgttcattcagcatctgaagacggtgcgttgaatggtgaaaacgatggcacttggaaggattcacaagctgcaacttcctctcgttcagataatcacggaatggaaggaaatgacccagcgctctctatccgtaacatgcatgatcagccacttgtacaaccaccagagcttgttggacactatatcgcttgtgtcccaaacccatatcaggatccatattatgggggattgatgggagcatatggtcatcagcaattgggttttcgtccatatcttggaatgcctcgtgaaagaacagctctgccacttgacatggcacaagagcccgtttatgtgaatgcaaagcagtacgagggaattctaaggcgaagaaaagcacgtgccaaggcagagctagagaggaaagtcatccgggacagaaagccatatcttcacgagtcaagacacaagcatgcaatgagaagggcacgagcgagtggaggccggtttgcgaagaaaagtgaggtagaagcgggagaggatgcaggagggagagacagagaaaggggttcagcaaccaactcatcaggctctgaacaagttgagacagactctaatgagaccctgaattcttctggtgcaccataataaaaaaagccaaagctctgagaggagagagagacacacactttggctaatataatccattgcctcaaaccggcaaatcattcttggctttttcgtttttgtgtttgctagttgttcttgtcagagtctcatattgtgtgggtttaacagttatgatgaatgtacaaagagcgagttatgttaggtgttagattttggagacaagagacaaaggaatagcaagtaggtcttgtttttattctttgaccttttttttctcttttgcaaaattgaaaaatacgtttgcttaaaaatttgcctttctgacc

SEQ ID NO: 117478 - DNA, 1644 bp, Arabidopsis thaliana
  unsure (1)..(1644): unsure at all n locations
nnnnnnnnnnnnnnnnnnnnnnnnnnnnnnnnnnnnnnnnnnnnnnnnnnnnnnnnnnnnnnnnnnnnnnnnnnnnnnnnnnccacgcgtccgcccacgcgtccgcccacgcgtccggaatgaatctctgtttcttgttttggaaccgagatggcttcctaacaattgggcttttctctgcctcttcctaggaatctgaagctcttctctactctctactctatcactccatctgtgaacatatctttcttattcttctaggcactatctatttttcactttttgtaattggaatttggagatggctatgcaaactgtgagagaaggtctcttctctgctccacagacttcttggtggactgcttttggatctcagccgttggctccggagagtctcgccggcgattctgactcattcgccggagttaaggtcggatctgtcggagagacaagacaacgtgtggataaacagagcaactctgcaacgcacttagctttctcacttggtgatgtaaagagtccaagacttgtgccaaagcctcatggagctactttctcaatgcaatcaccttgcttggaacttggattttctcagccaccgatctatacaaagtatccctatggagaacaacaatactatggagttgtttcagcctatggatctcagagcagggtaatgcttcctctaaacatggaaacggaagatagtaccatctatgtgaactcaaagcaataccatggaatcataaggagacgccaatcccgcgcaaaggctgctgctgttcttgatcagaagaaattgagtagtagatgccgcaagccatatatgcatcattcgcgccatctccatgcattgcggcgtcctagaggatccggtgggagattcttgaacactaaaagtcagaacttggaaaatagcggaaccaatgcaaagaaaggtgatggaagtatgcagattcagtctcagcctaagcctcagcaaagtaactctcagaattctgaagttgttcatccggaaaacgggaccatgaacttatcgaacggattaaatgtgtcgggatcagaagttactagcatgaactacttcctaagttctcccgttcattctcttggtggcatggtaatgcctagcaagtggatagcagcagcagcagcaatggataatggctgctgcaatttcaaaacctgatcctttaccgtttcacagtcaaacggagagagataaagaactcttgccttggtataaaggattttcctttttgccaatccgctttggctgtgaacaggcaaatcatctttggctcattctctattaaggtaacttcgccgtgaggtgaaaaaagctttgatatatttatcttcagtgtaaaagtagttaaaactggtgaagaacaatgatgtgtttggtcactaaacccacttgttccaactagtagtgtgtgttttaagaaaactctgttatctgattttgtagctctctctggctttgtgtgtttctcaaacaactgtaacaacttttaagttatgtggtttatgtaacatatttaagacctgtgtttttgtataaaaaaaaaannnnnnnnnnnnnnnnnnnnnnnnnnnnnnnnnnnnnnnnnnnnnnnnnnnnnnnnnnnnnnnnnnncg

SEQ ID NO: 117479 - DNA, 1668 bp, Arabidopsis thaliana
  unsure (1)..(1668): unsure at all n locations
cnnnnnnnnnnnnnnnnnnnnnnnnnnnnnnnnnnnnnnnnnnnnnnnnnnnnnnnnnnnctcatggcgatgttggtttcccaggaaaggtaaaagagacggagacgaaccaaaacaaggaagaaagaagaagatcttacatacgaagatcactctctgattcactctgagagacaaactggtttactttggttctgtttgacaaaaggagacatgcaaaaataaatctctatcccttgtttttcttcttcgcttcatcgattactcaaagaggttgttggttgtgagaataattagcttgttaaggaagacgttatgatgcatcagatgttgaataagaaagattcagctactcattccactttgccataccttaatactagcatctcttggggagtggttccaactgattccgttgctaatcgtcgcggtcctgctgaatcactaagcttgaaggttgattcaagacctgggcatatacaaactacaaagcaaatcagttttcaggaccaagattcatcttcaacacagtccactggtcaatcttatactgaagttgctagtagtggtgatgataatccttccagacaaatctccttttcggctaaatcaggatctgaaataactcaacggaaggggtttgcaagtaatcctaaacaaggctcgatgactggatttccgaatattcactttgctcctgcacaggctaatttctcatttcactatgctgatccacattatggtggtttattagctgcaacttacctaccacaggcaccaacatgcaatcctcaaatggtgagtatgattcctggtcgtgttcctttaccagcagagctcacagaaactgatccagtctttgtcaatgcgaagcaataccacgcaattatgaggaggagacagcaacgtgctaagcttgaggctcaaaacaaactaatcagagcccgtaagccctatcttcatgagtctcgacatgttcatgctcttaaaaggccaagaggatctggtggaagattcctaaacaccaaaaaacttcttcaagaatccgaacaggctgctgctagagaacaagaacaggacaagttaggccaacaggtaaacagaaagaccaacatgtctagattcgaagctcatatgctgcagaacaacaaagaccgcagctcaaccacttctggctcagacatcacctctgtttccgacggtgctgatatctttggacacactgaattccagttttcaggtttcccaactccgataaaccgagccatgcttgttcatggtcagtctaatgacatgcatggaggtggagacatgcaccatttctctgtccatatctgagacagtggatcttggtgctgtgttcatgttcccaccaagaaggggaagtcatccttggctactactagttctttcgcttgttgtaacttcagtgtttttatttcatattatgtctgtgttagacatcacaagaacgaccaagatcttcactttgaaacactctattaccttttcatcttctgttaccatggatctcttgtctaaactagtgatatgattcttctgataaaaaaaaaaatcctcttgtgttgtcttcgggttttttcgttttccgccgcntaggaaggccgctctagaggatcccagcttacgtacgcgtgtatgccccgt

SEQ ID NO: 117480 - DNA, 905 bp, Arabidopsis thaliana
  unsure (1)..(905): unsure at all n locations
gagcgtttcgtagaaaaattcgatttctctaaagccctaaaactaaaacgactatccccaattccaagttctagggtttccatcttccccaatctagtataaatggcggatacgccttcgagcccagctggagatggcggagaaagcggcggttccgttagggagcaggatcgataccttcctatagctaatatcagcaggatcatgaagaaagcgttgcctcctaatggtaagattggaaaagatgctaaggatacagttcaggaatgcgtctctgagttcatcagcttcatcactagcgaggccagtgataagtgtcaaaaagagaaaaggaaaactgtgaatggtgatgatttgttgtgggcaatggcaacattaggatttgaggattacctggaacctctaaagatatacctagcgaggtacagggagttggagggtgataataagggatcaggaaagagtggagatggatcaaatagagatgctggtggcggtgtttctggtgaagaaatgccgagctggtaaaagaagttgcaagtagtgattaagaacaatcgccaaatgatcaagggaaattagagatcagtgagttgtttatagttgagctgatcgacaactatttcgggtttactctcaatttcggttatgttagtttgaacgtttggtttattgtttccggtttagttggttgtatttaaagatttctctgttagatgttgagaacacttgaatgaaggaaaaatttgtccacatcctgttgttattttcgattcactttcggaatttcatagctaatttattctcatttaataccaaatccttaaattaaaaaaaaaaaaaaaaaaaaggaaaagggcggccgctctagaggatccaagcttacgtacgcgtgcatgcnacgt

SEQ ID NO: 117481 - DNA, 1403 bp, Arabidopsis thaliana
  unsure (1)..(1403): unsure at all n locations
ctnnnnnnnnnnnnnnnnnnnnnnnnnnnnnnnnnnnnnnnnnnnnnnnnnnnnnnnnnnnnnnnnccacgcgtccggacacttaacaattcacacctgctctttttactctttctaaaaccctaaattttctcgcttcagtcttcccactcaagtcaaccaccaattgaattcgatttcgaatcattgatggaaatgatttgaaaaaagagtaaagtttatttttttattccttgtaattttcagaaatgggggattccgacagggattccggtggagggcaaaacgggaacaaccagaacggacagtcctccttgtctccaagagagcaagacaggttcttgccgatcgctaacgtcagccggatcatgaagaaggccttgcccgccaacgccaagatctctaaagatgccaaagagacgatgcaggagtgtgtctccgagttcatcagcttcgtcaccggagaagcatctgataagtgtcagaaggagaagaggaagacgatcaacggagacgatttgctctgggctatgactactctaggttttgaggattatgttgagccattgaaagtttacttgcagaggtttagggagatcgaaggggagaggactggactagggaggccacagactggtggtgaggtcggagagcatcagagagatgctgtcggagatggcggtgggttctacggtggtggtggtgggatgcagtatcaccaacatcatcagtttcttcaccagcagaaccatatgtatggagccacaggtggcggtagcgacagtggaggtggagctgcctccggtaggacaaggacttaacaaagattggtgaagtggatctctctctgtatatagatacataaatacatgtatacacatgcctatttttacgacccatataaggtatctatcatgtgatagaacgaacattggtgttggtgatgtaaaatcagatgtgcattaagggtttagattttgaggctgtgtaaagaagatcaagtgtgcttgttgaacaataggattcactaacgaatctgcttcattgaatcttgtatgtaactaaagccattgtattgaatgcaaatgttttcatttgggatgcttttatgttttggtgagagttatgtagtgattcaagtgtcaaaatgcttacatagagaggcagcaaagaaaccagcttcgttagaatctgtgaggaaagctctgtttgttgagaaagaaggtcaattgcgcgaatgtaagtcgcgggtgttgtagtacaagttgccttgttgatcaggtgcagagacgcggagaggagtgaagccttcgtagtctccgttggttttagcagagcaaatgtctgtcatatacctcaatagctcataattttgtacaaatggttgatttatgtattcctcc

SEQ ID NO: 117482 - DNA, 974 bp, Arabidopsis thaliana
  unsure (1)..(974): unsure at all n locations
aaanccaaaaccgaccaatggataccaactatctagcaaccacctccctccgccgccggggtggcttcttcaccacctggggccaccatctacgccgcaggaggaggagcttcttaccaccaccttctccaacaacaacaacaacagctccaactattctggacctaccaacgccaagagatcgaacaagttaacgatttcaaaaaccatcagcttccactagctaggataaaaaagatcatgaaagccgatgaagatgttcgtatgatctccgcagaagcaccgattctcttcgcgaaagcttgtgagcttttcattctcgagctcacgatcagatcttggcttcacgctgaggagaataaacgtcgtacgcttcagaaaaacgatatcgctgctgcgattactaggactgatatcttcgatttccttgttgatattgttcctagagatgagattaaggacgaagccgcagtcctcggtggtggaatggtggtggctcctaccgcgagcggcgtgccttactattatccgccgatgggacaaccagctggtcctggagggatgatgatttgggagaccagcttatggatccgaatcggtgtttatgtccagcctccgtctcaaggcgtggcagagtgtttggcagacttcgacggggacgggagatgatgtctcttatggtagtggtggaagttccggtcaagggaatctcgacggccaaggttaagctcagagtattccagatgatgcttgacctgcttgaagatagcagatattagtcgacctcgccttgaattttggatgtgtttgatagattatgcctaaattcaatgaaaaggcttcgttaaagaagagtaaaaaaaactcttgtttctctctgttaacgtatatgttattgtagcaaaaccatcattgctgcgacttagcctaactatatataatctaatgtgcagtttctattggaaaaaaaaaaa

SEQ ID NO: 117483 - DNA, 1149 bp, Arabidopsis thaliana
  unsure (1)..(1149): unsure at all n locations
ggatcttttgatccaatcacaaggcaaagatccaatggacaataacaacaacaacaacaaccagcaaccaccaccaacctccgtctatccacctggctccgccgtcacaaccgtaatccctcctccaccatctggatctgcatcaatagtcaccggaggaggagcgacataccaccacctcctccagcaacaacagcaacagcttcaaatgttctggacataccagagacaagagatcgaacaggtttacgatttcaaaaaccatcagctccctctagctcgtatcaaaaaaatcatgaaagctgatgaggatgtgcgtatgatctccgccgaagcaccgattctcttcgcgaaagcttgtgagcttttcattctcgaacttacgattagatcttggcttcacgctgaagagaacaaacgtcgtacgcttcagaaaaacgatatcgctgctgcgattactagaaccgatatcttcgatttccttgttgatattgttcctagggaagagatcaaggaagaggaagatgcagcatcggctcttggtggaggaggtatggttgctcccgccgcgagcggtgttccttattattatccaccgatgggacaaccggcggttcctggagggatgatgattggaagaccggcgatggatcctagcggtgtttatgctcagcctccttctcaggcatggcaaagcgtttggcagaattcagctggtggtggtgatgatgtgtcttatggaagtggaggaagtagcggccatggtaatctcgatagccaaggttgagctatggaaccagaagcttagagatttaatcatcatttcgaccctgcaagtgtctgattcttatatgtctatgattcgaatgacttactcgagagagagagagagatcaaacaaaacaaaacaaaaaagctctttttcatttttcctgttaacttataagttattgcagcaaaactgcagacttgcttaactatatattaatctaaatgtgcagattctaatcaaaaaaaaaaaaaaaaaactagttctagatcgcgaacggccgccgactagtgagcttgtcgaccccggaattaaatccggaccgggacctgcagggggaccaaccttccctaaaattaattggaataannnnggcagta

SEQ ID NO: 117484 - DNA, 1119 bp, Arabidopsis thaliana
ttccattttctgtttctattggaaacttctctctccaatttcgttttcttcacttctttgatcctttagctttgacaaaaccgtagtaaaggatcaaaagttatcatctttggtccatgttgtgaatcgtgctctgcttgggtcgtgactcccaaatccggatttgaaaccagcatatctgagcttaattcgagcatgcatgcgcttctttttttctgattttttttagactttggttctaaatcccttaactttggattaactgtcaatctacaattttatattaacagagatagcttagcaatggagcagtcagaagagggtcaacagcaacagcaacagggagtgatggattatgtacctcctcatgcttatcagagtgggccagtaaatgcagcttcccatatggcattccaacaagctcaccacttccaccaccaccatcagcagcaacaacagcagcagcttcagatgttctgggctaaccaaatgcaagagatcgagcataccactgatttcaagaaccacacccttcccctagcccgcatcaagaagatcatgaaagctgatgaagatgtgaggatgatctctgcggaggctcctgtgatttttgccaaggcctgtgagatgttcattttggagctcactctacgtgcttggatccacaccgaggagaacaagaggaggaccttgcagaagaacgacatcgccgctgccatttccaggaccgacgtgtttgatttccttgtggacataatcccgagggacgagctgaaagaagaaggtttaggcgtgaccaaagggaccataccatcggtggtgggttccccgccatactattacttgcaacaacaggggatgatgcaacactggccccaggagtaacaccctgatgagtcttaaaacttttcccctttcgtttgtttggttgtatcgtagtaaggtagctctgctctgctgggaaccatttctattgtgttctgtaatgacatgttagtatatccccagtctatatctatggcaatgcagtttctgttaaaaaaaaaaaaaaaaaaaaaaaagggcggccgctctagaggatccaagcttacggacgcgtgcatgcgaagtcagggttgt

SEQ ID NO: 117485 - DNA, 1067 bp, Arabidopsis thaliana
cacaaaattacccactacgttgctcttcaacaaaaagattaaacaaagagagaagaatatggcgagagggaagatccagatcaagaggatagagaaccagacaaacagacaagtgacgtattcaaagagaagaaatggtttattcaagaaagcacatgagctcacggttttgtgtgatgctagggtttcgattatcatgttctctagctccaacaagcttcatgagtatatcagccctaacaccacaacgaaggagatcgtagatctgtaccaaactatttctgatgtcgatgtttgggccactcaatatgagcgaatgcaagaaaccaagaggaaactgttggagacaaatagaaatctccggactcagatcaagcagaggctaggtgagtgtttggacgagcttgacattcaggagctgcgtcgtcttgaggatgaaatggaaaacactttcaaactcgttcgcgagcgcaagttcaaatctcttgggaatcagatcgagaccaccaagaaaaagaacaaaagtcaacaagacatacaaaagaatctcatacatgagctggaactaagagctgaagatcctcactatggactagtagacaatggaggagattacgactcagttcttggataccaaatcgaagggtcacgtgcttacgctcttcgtttccaccagaaccatcaccactattaccccaaccatggccttcatgcaccctctgcctctgacatcattaccttccatcttcttgaataattaaaggctaaaaggtttgctggtgccatcattgtctatctaattatttagtaactacttaaaacataaggcatggtgttgctaaaaccttaaactgtcatgtttcttagttatgtattttaaagcctaaagaaatatggattgtgtgatcagtagtgcttaggcttattgtgtgtggaatgttttcaagacttttatcatgtatcgtattattatattgaccactctacttaattatgctacaaatttactcccgctctagaggatccaagcttacgtacgcgtgcatgcgacgtcaagctcttctata

SEQ ID NO: 117486 - DNA, 1569 bp, Arabidopsis thaliana
  unsure (1)..(1569): unsure at all n locations
cactctcgtcagttctctaacagtagcgccaaaatgaatccccaagactaaagctttcttcaatggaagaagaaacccacgacggatctctcgatctccaagagattcgcaggcgcgtgaaagagctcgatttctttccccggaattgcagagaagagcctgtagaatcgtgtagttccgattacgagactctggtggttcaagattttgttcttcagtttgaaccaaaggtgaaagagattgttgaagaatacggcgatgttgatttattggatgttgaagattcagatgcttacttggagtacttgagaaatgagcttcagtctgtggaggctgaaagtgccaaagtttctgaagaaattgaacgtctttctcagtctcatgcccaagattctagtaggttgcaaagggatcttgaaggtcttttactgtcactggattctatgtcatctcaggatgtggagaagtcaaaagagaatcaaccatctagcagctcaatggaagtatgtgaagtgattgatgatgacaagtttaagatgtttgaactcgaaaatcagatggaggagaaaaggatgattcttaagtcattggaagatctggattcgttacgtaaaaggtttgatgctgcagaacaagttgaggacgcattgacaggcttgaaggtgctcgagtttgacggaaactttattaggctccaactgcgaacatatattcaaaaactagacggttttcttggacagcacaaatttgaccacattactgagccatctgaattgatccatgaattgctaatataccttaaggataaaactacagagataacaaaatttgagatgtttccaaatgatatatacataggagacatcatcgaggcagctgattctttcaggcaggtaaggttacactctgcagtgctagacacaagatcttcagtccagtgggttgtcgccaaagtgcaagataaaattatttcaacaactttgagaaaatatattgtgatgagttcgaaaacaattaggtacacgtttgaatactacgacaaagatgaaacaattgtggctcatatagctggaggtattgatgcatttttaaaggtctctgatggttggccactgctgaataccccattgaagcttgcatctctcaagaactctgacaatcagtcaaagggaatttctctgagccttatctgcaaagttgaggaactagcgaattccttggatttagagacccggcaaaacttatcaggcttcatggatgcaattgagaaaatactcgtggagcaaacccgtgaagaactccagtccaataaatcctcccaaaagtgagtaccaagaaccacctcaagagtttgtgcagtttctatctccttattgtttttgtcttgggttgttatctgcaactctttgttgtaatactttggaattgtgtaccaataactgacacaagtctagtttatgtccttaagtttcctttataaaaaaaaaaaaaaaaaggannnnnnnnnnnnnnnnnnnnnnnnnnnnnnnnnnnnnnnnnnnnnnnnnnnnnnnnnnnnnnntgttccta

SEQ ID NO: 117487 - DNA, 908 bp, Arabidopsis thaliana
cattaattcattatcatcaaataatacagcagcaagcaacacagtaaaacccaattccctaatcccaaaattcgatctctcatctgatggctggttacagagccgatgaagagtacgattacctcttcaagctcgtgttgatcggcgactctggtgtcggcaaatcgaatctgctctctcggttcaccaagaacgagttcaatctcgaatccaagtctactattggtgttgagttcgctaccaaaaccactaaagtcgaaggcaaagtcgtcaaagctcagatttgggatactgctggtcaagagagataccgagcaatcacaagcgcttattacagaggagctgttggtgctttgcttatttacgacgtgacaaggcacgcaacatttgagaatgcagcaagatggctaagggaactaagaggacacacagacccaaacatagtggtgatgcttatagggaacaagtgcgatctgcgtcacttggtggcagtcaaaacagaagaggctaaagcctttgctgagagagaatccctctatttcatggagacttcagctctagacgcaaccaatgttgaaaacgcattcacggaagtgctcactcagatccacaagatagtgagcaaaagaagtgttgatggaggaggagagtcggctgatttaccgggaaaaggagagacgataaacgttaaagaagacggatcggttcttaagagaatgggttgctgctctaactagagtggggggattgtagatttggcttgatttggttagggtgagacaacaaatgataatctctttgggtcttgcaatcaaaaaagaaataagaaacgattacttttaagatcatgtgtatgctttggtaactttggcctgtaaggtcctttaaaatttaagtacatgattggt

SEQ ID NO: 117488 - DNA, 1104 bp, Arabidopsis thaliana
  unsure (1)..(1104): unsure at all n locations
agaagaagtaaaatagaagaagccgggaaacaaaagctaaatcgggaactggcgcattttagtcgtccgccataaccttcgctctctgattcttccgattacatcggttttcttctctctccgattcaatggctgctccacctgctagagccagagctgattacgattatctcattaagcttcttttgattggagatagcggtgttggtaaaagttgtcttcttctacgtttctctgatggatctttcaccactagcttcattaccaccattggcattgactttaagataagaacgattgagcttgacggtaaacgtatcaagcttcagatttgggataccgctggtcaagagcggtttcggactatcaccactgcttattaccgtggggcaatgggcattttgctggtgtatgatgtcacagacgagtcatccttcaacaacattaggaactggattcgtaatatcgaacagcatgcttcggataatgttaacaagatcttggtagggaacaaggctgacatggatgaaagcaagagggcagtacctacagcaaagggtcaggctcttgctgatgagtacggaattaagttcttcgaaacaagtgccaagacaaacctaaacgtggaagaagttttcttctcaatagggagggacattaagcagaggctttcagacaccgactcgagggcagagcctgcaacgatcaagataagccaaacggaccaagcagctggagcagggcaggccacacagaaatctgcatgctgtggaacttaaaaaagttttaaaagtgaagtttaagtcgaaaaaagtttgggggtgaagtgaaaaactaagatatcgttgggtgcttatgtaattttttgttttatgccaacaattctgattcgttcttctaaattgtccttcctatttgtacgaaggtttaatcgaaacttgtatttttcttttctatcaccggttttttttgatggccggtgaccggaattggtttatngttgggcancaccttcccccccaaaaaacccccggnccttaaaaaaaaaaaaaaaaaaagggnngggccgccccaangggncccancttcngaccnggggattng

SEQ ID NO: 117489 - DNA, 914 bp, Arabidopsis thaliana
  unsure (1)..(914): unsure at all n locations
acgggaannnnnnnnnnnnnnnnnnnnnnnnnnnnnnnnnnnnnnnnnnnnnnnnnnnnnnnnnnnnnnnnnnnnnccacgcgtccgaggactggcgtattttagccgtccgccatttccatcgctctctctcgtttcttctctgctcatttactataaccaacaaggtctcttctcttctcttctcctctctgcatcattttgatccgattcgatggctgctccacctgctagagctagagccgattatgattatctcattaagcttcttctcatcggtgatagcggtgttggtaaaagttgtttgcttctaaggttctctgatggctctttcaccactagcttcatcactaccattggtattgattttaagataagaactattgagcttgatggcaaacgtatcaagcttcagatttgggacactgctggtcaagaacgttttcgaaccatcaccactgcttattaccgcggggcaatggggattttactggtgtatgatgtcacagacgagtcatccttcaacaacattagaaactggattcgtaatattgaacagcacgcttcagataatgtcaacaaaatcttggtaggaaacanagctgatatggacgagagcaagagggctgtgccaaaatcaaagggtcaagcacttgctgacgaatatggaatcaagttctttggaacaggtgccaaaactaatctgaatgtggaagaagtttcttctcctagcaaaagacataaagcagagactcgctgatactgactctaaaacagaacctgcacgatcaagatcagccaacaggccaggctgctggagcccgcaggcccacaaagtctgatgcgggggaagtatcagtccaaaggctccaagtgaaggaagaaaacagatatcttgggggcttggatttttt

SEQ ID NO: 117490 - DNA, 1047 bp, Arabidopsis thaliana
  unsure (1)..(1047): unsure at all n locations
atacgactcctatagggaaagccggtacgcctgcaggtaccggtccggaattcccgtgtcgacccacgcgtccgggcgcattttagtcgtccgccataaccttcgctctctgattcttccgattacatcggttttcttctctctccgattcaatggctgctccacctgctagagccagagctgattacgattatctcattaagcttcttttgattgtagatagcggtgttggtaaaagttgtcttcttctacgtttctctgatggatctttcaccactagcttcattaccaccattggcattgactttaagataagaacgattgagcttgacggtaaacgtatcaagcttcagatttgggataccgctggtcaagagcggtttcggactatcaccactgcttattaccgtggggcaatgggcattctgctggtgtatgatgtcacagacgagtcatccttcaacaacattaggaactggattcgtaatatcgaacagcatgcttcggataatgttaacaagatcttggtagggaacaaggctgacatggatgaaagcaagagggcagtacctacagcaaagggtcaggctcttgctgatgagtacggaattaagttcttcgaaacaagtgccaagacaaacctaaacgtggaagaagttttcttctcactagggagggacattaagcagaggctttcagacaccgactcgagggcagagcctgcaacgatcaagataagccaaacggaccaagcagctggagcaaggcaggccacacagaaatctgcatgctgtggaacctaaaaaagttcagtcccaaaaggctccaaagttgaagtgaagtgaaaaacagatttatcttggggtgcttttgtatttttttttcttttgattatttgttcttatttgacttcttctagtttgttcatgagggtaatagaatcttttaagaaaaaaaaaaaaaaaaaaaaagnnnnnnnnnnnnnnnnnnnnnnnnnnnnnnnnnnnnnnnnnnnnnnnnnnnnnnnnnnnnnnnnntcgcctcaat

SEQ ID NO: 117491 - DNA, 688 bp, Arabidopsis thaliana
  unsure (1)..(688): unsure at all n locations
agcttctcttctcctctctgcatcattttgatccgattcgatggctgctccacctgctagagctagagccgattatgattatctcattaagcttcttctcatcggtgatagcggtgttggtaaaagttgtctgcttctacggttctctgatggctctttcaccactagcttcatcaccaccattggcattgactttaagataagaacgattgagcttgacggcaaacgtatcaagcttcagatttgggacaccgctggtcaagagcggtttcggaccatcaccactgcttattaccgcggggcaatgggcattttgctggtgtatgatgtcacagacgagtcatccttcaacaacattaggaactggattcttaatatcgaacagcatgcttcggataatgttaacaagatcttggtagggaacaaggctgacatggatgaaagcaagagggcagtacctncagcaaagggtcaggctcttgctgatgagtacgggattnagttcttcgaacaagtgccaagcaaaccctaancgtggaagaggtttcttctcaatagggggggcattaagcagagggttttagcacccgcttgnggcagncctcaacgtnaangttgccaacggccagaanttggnngggagncnncanaattnatctttggcttaaagtttaaggagttgcganta

SEQ ID NO: 117492 - DNA, 968 bp, Arabidopsis thaliana
cttgaatggccttccgtttgcagtaccggtccggaattcccgggtcgacccacgcgtccggagaagaagaagaaggagaaatgtcagacgacgacgagagaggcgaagagtacctcttcaagattgttatcatcggtgattccgccgtcggcaaatccaatctcctcactcgctacgcccgtaacgagttcaatcccaattccaaagccactatcggcgtcgagtttcagactcagagcatgctcatcgacggcaaagaggtcaaagctcagatttgggataccgccggtcaggaacgcttccgcgccgttacatctgcttattaccgtggcgccgttggagccctcgtcgtctacgatatcactcgtagctccactttcgaaaacgtcggtcgctggctcgatgagctcaacactcattctgatacaacagtagcaaaaatgcttattgggaacaaatgtgatctcgagagcataagagcggtgagtgttgaggaaggcaagagtcttgctgagtctgaaggtttgtttttcatggagacctctgcgttggactcgaccaatgtaaagacggctttcgagatggttattcgggagatctatagcaacattagtcgaaagcaattgaactctgattcttacaaagaggagctgactgtgaatcgtgttagcttggttaagaacgagaacgaagggacaaagacattctcttgctgttcgaggtaacatctttgtaacggtttctctttgtcctgaggattggtttcgggttgaattgtgttcctggtaaacttatagaaaggcagagatatattcttatagttctcagttaaagtaaaagaagaagagagaaagatgttttgagtttctttgttacgcatacagaaaaagtttggttagtgtataagttatgttctcatttgtaacttttgtaaacttatgattgttaaatcaattttgatattttcc

SEQ ID NO: 117493 - DNA, 1988 bp, Arabidopsis thaliana
  unsure (1)..(1988): unsure at all n locations
aggtcttattccactcacattttggggaaggcgggacccccggcaggaccgggcccggatttccggggcggccccagccgtccgcgaacccttcttcatcttcttcttctcctccacctaaccaatgggagcaattgatctctctttctcacagagtcttctcttctcttcgtcgcgttccaatctttcctcctccacacaccgttccgtctcttttttgccgccgggaagcaagtcacggtgtctgccgccgttgcgttcaatgagtcatgacgacgacacggcctcaaaggaggtgaagctatggggtggaaggttcgaagagagtgtcactgagaaagtggagaagttcactgagtcaatttcatttgataaggttctctacaagcaggacattatgggtagcaaagctcatgcttcaatgcttgctcaccaggggctaataactgatagcgataaagatagcattttgagaggtcttgatgatattgagagacaaattgaagcaaataagtttgaatggaggactgatcgagaagatgtgcatatgaacattgaagcagctcttactgatcttattggtgaacctgcaaagaaacttcatactgcaaggagcagaaatgaccaagttgctactgacttcaggctttggtgtcgtgatgctatcgatacaattattgtcaaaatcagaaatcttcagagagcacttgttgaactggctttgaagaatgaggctttgattgttcctggttatactcatcttcaaagagctcagcctgttttactcccacacgttctcttaacttttgtagagcagctcgaacgtgatgctggtcgttatgtggactgtcgagcaaggctaaatttctcccccctgggagcttgtgctttggctggaactggtctgcctattgataggtttatgactgcaaatgctcttggatttaccgaaccaatgagaaacagtatcgatgcagtctcagaccgagacttcgtgctggagttcttatatacaaatgccaacaccggtattcatttatcacggcttggagaagagtgggtactgtgggcttccgaggagtttgggttcatgactccaagtgattctgtgtcaaccggaagtagtataatgccacagaagaaaaatccagacccaatggaacttgtcagaggaaaatccgcaagagtcataggcgatctggtcactgtcttaacactgtgcaaaggacttccccttgcttacaacagagattttcaagaagacaaagagccgatgttcgatagtaccaagacaataatgggaatgatcgatgtatctgcagaatttgctcagaatgttacattcaacgaagacagaatcaagaaaagtcttcccgcaggacatcttgatgcgactactctcgctgattatcttgtgaagaaggggatgccttttaggtcatctcatgacatagttggaaaactagttggagtttgcgtctcaaaaggctgtgaacttcagaacttaagtcttgaagagatgaaaaagctgagccctgtgtttgaagaagatgtgtttggatttttgggggttgaaaattcagtcaataagttcagttcctatgggtcaacaggatcaaactgtgttgctgagcaacttggctactgggtcaacaagctcaacattacttccacctgatccggaccaaaccattagcaaaagatttgatgacgtttgtgtaattttcatatttattgaggatttttgtcgttaataccaggaagatttcaagcaacatgttgcagcggtttgagaagacccacaaacaaaataagttttgtaatatttgaaatcgagataatgtggaagagtttggtattcttctcatttcaaaaaaaaaaaaaaaannnnnnnnnnnnnnnnnnnnnnnnnnnnnnnnnnnnnnnnnnnnnnnnnnnnnnnnnnnnnnnnnnnnnnnnnnnnnnnnnnnnnnnnnnnnnnnnnnnnn

SEQ ID NO: 117494 - DNA, 1131 bp, Arabidopsis thaliana
  unsure (1)..(1131): unsure at all n locations
ttaggtgcactatagaagagctatgacgtcgcatgcacgcgtacgtaagctcggaatctttgcttctcagacaatggcggcttctacattgtacaaatcctgtcttcttcaacccaagtctggctccaccactcgccgcctaaacccttctctcgttaaccctcttacgaatcccacaagagtttccgttttggggaagagtcgtagagatgtctttgcgaaagcttcgattgaaatggcggaatcgaattcgataccttccgttgttgtcaattcctctaagcagcatggtccaatcatcgtgattgataattacgacagcttcacatacaatctctgccagtatatgggagagctaggatgccattttgaagtttaccgcaatgatgaacttacagtagaagagctgaaaaaaaaaaatccaagaggggtgttgatttctccagggcctggtacccctcaagactctgggatttccttgcaaactgttttggaactcggaccacttgttcctttatttggagtatgtatgggtttgcagtgtataggagaagcatttggaggaaagattgtgcggccaccatttggtgttatgcatgggaaaagctcaatggttcactatgatgagaaaggagaagaaggcttgttctctggattatcaaaccctttcattgtaggtagatatcacagtctcgtgatcgaaaaagatacatttcctagtgatgaactcgaggttacagcatggacagaagatggtctggtaatggctgcccgtcacagaaagtacaagcatatatagggagtccaatttcatccggagagtattataacaactgagggcaagacaattgtccgcaatttcatcaaaatagtagagaaaaaggagtccgagaagctgacatagactagcctgaatgagaaaatcagctgtgttcgaatagtgcctccctgtaataatatttgccaatgcaaaatgttccttgccatcttcccattgtttctatcataaaaattcgacttgttcctccacttttacttaatttgtgaaaagtggaaagcagaaagctatggttatttaagcatgcctagcgacaaaaatggccgagggcctttcagttnnnnnnnnnnnnn

SEQ ID NO: 117495 - DNA, 2277 bp, Arabidopsis thaliana
  unsure (1)..(2277): unsure at all n locations
ccccccctcggtacgacggtatagctaagcttgatatcgaattcgcggccgcatccttttttgagtttttcccatttcttcttcgtctccatttcatcgtcttctcgctgttctgctatattccgtttcgttggatgaggagaagaagaaagtgaaaaaagttgtgaaatagagagagtttgtttcatgggcaattcatgtcgtggttcttttaaggacaaaatctacgagggcaatcatagtaggcccgaggagaattccaaatccaccaccactactgtttcctctgttcattctcctactacagaccaagatttctccaaacagaacaccaatccagctcttgtgattcctgttaaagaacccattatgcggcgtaacgttgacaatcaatcttactatgttcttggtcacaagactcctaacattcgtgatctttacacgttgagtcgtaagttaggacaaggacaattcgggacaacgtatttgtgtactgatattgccacaggtgttgactatgcttgtaagtctatatccaagaggaaattgatatctaaagaagatgttgaggatgttaggagggagattcagattatgcatcatttagctggtcacaagaatattgttactattaaaggagcttatgaggatcctttgtatgttcacattgtgatggagctttgtgctggtggtgagttgtttgataggattattcatagaggtcattacagcgagaggaaagctgctgagttgaccaagatcattgtcggtgttgttgaggcgtgtcattctcttggtgttatgcatagagatttaaagcctgagaatttcttgttggttaataaggatgatgatttctctcttaaggccattgattttggtctctctgttttcttcaaaccaggccaaatattcaaggatgttgttggaagtccatactatgttgctcctgaggttcttctaaaacattatggtccagaagctgatgtgtggactgctggtgttatactctatatcttactaagtggtgtcccgcctttctgggcagaaacacagcaaggaatatttgatgctgtgttgaagggatatattgactttgatacagacccgtggcctgtcatatccgacagtgctaaagatctgatccggaagatgttatgctctagtccttctgaacgtttgactgctcatgaagtcttgcgtcatccatggatctgtgagaatggagttgcaccggatagagcacttgacccggctgttttgtctcgtctaaaacagttttctgcaatgaataaattaaagaagatggctttaaaggtgatagctgagagcctctcagaagaagagattgcgggtttaagagcaatgtttgaggcaatggatactgataacagcggtgcaatcacttttgatgaactcaaagctggcttgagaagatatggatctaccttgaaagacaccgagatccgagatcttatggaagcggctgatgtggacaacagcgggacaatagattacagcgagtttattgcagcgacgatccatctgaataaactagagagagaagagcatcttgtctctgcatttcagtactttgacaaagatggaagtggttacatcaccattgatgagctgcaacaatcttgcattgaacatgggatgaccgatgtttttcttgaagacataatcaaagaagtagatcaagacaacgatggacggattgattacgaagaatttgttgcgatgatgcaaaagggaaatgctggtgtagggagaagaacaatgaaaaatagtctaaacatcagcatgagagatgtgtaggcacatacacacatctttaaatcgtctattcggtgaggatgcaaatgtttccatggaatcaacatttgcaatgtttaatcacagaggaggaagagaaaccagattcatagctgcagcgaaccagctaaatcgttgaaggtttgagttaaaaatgttaaaaactactgtatgattaaaaaatggtgaaagataaaaaaaaagtgttaagttctgttcatcagtagctgtgaggactatttctattttctctctctctgttttgtttgtttgtaacaactgtttaagtttggtttttatttcatctccatcgtcgaaagctttgaccctttttgggtttttgaaagatcanatcatcttccaatatagtcgaatgtgatatctagtggtacaaaaaaaaaaaaaaggcggcgcttaagatcagctacgagcggcaggcgcaagtcttatagtgtcact

SEQ ID NO: 117496 - DNA, 2427 bp, Arabidopsis thaliana
  unsure (1)..(2427): unsure at all n locations
atgatactttcnnnnnnnnnnnnnnnnnnnnnnnnnnnnnnnnnnnnnnnnnnnnnnnnnnnnnnnnnnnnnnnnnnnnnnnnnnnnnnnnnncttttctcttttgtctccggcaaatttagtttctccttttaagtcagattccttcctaatcccattctttcagtcttctctttcgcccttctgagttcaacaactgtgttatctctatgaacagttcctttgatgaagaacacaaagtgaaagttgctgtctttataaccaggatttggtaattcccattgtttcatgggcaattcttgccgtggatctttcaaggacaaactcgacgaaggcgataacaataagcctgaagattactctaaaacctctaccaccaacttgtcttctaattccgaccattcaccgaacgctgcagacatcattgctcaagaattctccaaagacaacaacagcaacaacaacagcaaagatccagctcttgttattcctttaagagaaccaatcatgaggcgtaacccagacaatcaagcttactatgttcttggtcataagacaccaaacattcgtgatatctatacccttagccgcaagctaggtcaaggtcaatttggaacgacttatctatgtacagagattgcctcaggcgttgactacgcttgtaagtcaatatccaagaggaagttgatctctaaagaagatgttgaggatgttagaagggagattcagataatgcatcatttagctggtcacggtagtatcgtgacgattaaaggagcttatgaggactctttgtatgttcacattgttatggagctttgtgctggaggtgaattgtttgataggattattcagagaggacattatagtgagaggaaagctgctgagctgactaagatcattgtcggtgttgttgaagcgtgtcattcgcttggtgtgatgcatagagacttgaagcctgagaatttcttattggttaataaggatgatgatttctctctcaaggctattgattttgggctatctgtctttttcaaaccaggtcaaatattcactgatgttgttggaagtccatattatgttgctcctgaggttttgctcaaacgttatgggcctgaagctgatgtgtggactgctggtgttatattgtatatattgctaagcggagtcccacctttctgggcagaaacacagcaagggatatttgatgctgtgttgaaaggatatatcgactttgagtcagacccgtggcctgtgatatccgacagtgctaaagacttgatccgcagaatgttatcctccaagcctgcagaacgtttgaccgctcatgaagtcttgcgtcatccatggatctgtgagaatggtgttgcaccagatagagcactagatccagctgttctttctcgtctcaagcaattctctgcaatgaataaactaaagaagatggctttgaaggttatagctgagagtctctcggaagaagagatagctggtttaagagaaatgtttcaagcaatggatactgataacagcggggcaatcacatttgatgaactcaaagctgggctgagaaaatatggatctaccttgaaagacacagagatccatgatcttatggatgcggctgatgtagacaacagtgggacaatagattacagtgagttcattgcagcgacgatccatctcaacaaactagagcgggaagagcatcttgttgcagcgtttcaatattttgacaaagatggaagcggtttcataacaattgatgagctacaacaagcgtgtgttgaacatggcatggctgatgttttccttgaagacatcatcaaagaagttgatcaaaacaatgatggaaagattgattatggtgagtttgtggagatgatgcaaaagggaaatgctggtgttggaagaaggacgatgagaaatagtctaaacattagcatgagagacgcgtagaggttgttttccccggtgtttaatatgttagtgcgatcgtgactgcgaaaatgttcttattcatggaatcaacaacctcaatgctcaccacctagaaggcgatgaaagaagaccaaaccggattcatacctgtggatggttcgagttttgtttaacgactgtgtgattaatcgtcaagtagttttggaggttttttctttacctctttgttgtttgttcattatggccattgttgaagttagtgagctttgttcatcatctgccattgttaaactttgttcacttgtatttgaaaaaaacaaaaatgtctttgtatgttgtgtgatttctaagcatttttactttgaaaatctatttcttcttttctagaaaaaaaaaaaaaaaagnnnnnnnnnnnnnnnnnnnnnnnnnnnnnnnnnnnnnnnnnnnnnnnnnnnnnnnnnnnnnnnnnnnnnnnnnntagaatcg

SEQ ID NO: 117497 - DNA, 1010 bp, Arabidopsis thaliana
atcgactatattgggaagctggtacgcctggaggaccgggcccgaatttccgggtcgacccaagccttccgggaccccttgggggaaaatggaattggccccggattgaacacttggccccggtggtttggcttggcttaaaccagttttttgcatggattaattaaagaagaatggttttaagggggatagttgaaagcttttaaaagaagaaaatggcggttttagaaccatggttggaggcattggttcctgttaccaggcggggcattcattttggatgacctcaaagctggttggagaggatatggatcacccttgaaggacaccgaaatccgagatcttatggaagcggttgatgtggacaccagcggtccattagattacagcgagtttatggcagcgacaatccatctgattaaactagagagagaagagcttcttgtctctgcatttcagtactttgacaaagatggaagtggttacatcaccattgatgagctgcaacaatcttgcattgaacatgggatgaccgatgtttttcttgaagacataatccaagaagtagatccagacccccgatggccgggttgatttcgaagaatttgttcccatgatgccaaagggaaatgctggtgtagggagaagaaccatgaaaaatagtctaaacctcagtatgagagatgtgtaggcacatacacacatctttaaatcgtctattcggtgaggatgcaaatgtttccatggaatcaacatttgcaatgtttcatcccagagcaggaagagaaaccagattcatagctgcagcgaaccagctaaatcgttgaaggtttgagttaaaaatgttaaaaactactgtatgattaaaaaatggtgaaagataaaaaaaaagtgttaagttctgttccaaaaaaaaaaaaaaaccccaccccccaaagcggccgctctagaggatccaagcttacgtacgcgtgcaggcgacgtcaagatcttctaagtgtgcgtcctaa

SEQ ID NO: 117498 - DNA, 949 bp, Arabidopsis thaliana
  unsure (1)..(949): unsure at all n locations
cagctcnnnnnnnnnnnnnnnnnnnnnnnnnnnnnnnnnnnnnnnnnnnnnnnnnnnnnnnnnnnnnnnnnnnccacgcgtccgtccttattaaccaacaaggatgatgatttctctcttaaggccattgattttggtctctctgttttcttcaaaccaggccaaatattcaaggatgttgttggaagtccatactatgttgctcctgaggttcttctaacaacatccttgaatattggggctctctgttttcttcaaaccaggccaaatattcaaggatgttgttggaagtccatactatgttgctcctgaggttcttctaaaacattatggtccagaagctgatgtgtggactgctggtgttatactctatatcttactaaggggtgtcccgcctttctgggcagaaacacagcaaggaatatttgatgctgtgttgaagggatatattgactttgatacagacccgtggcctgtcatatccgacagtgctaaagatctgatccggaagatgttatgctctagtccttctgaacgtttgactgctcatgaagtcttgcgtcatccatggatctgtgagaatggagttgcaccggatagagcacttgacccggctgttttgtctcgtctaaaacagttttctgcaatgaataaattaaagaagatggctttaaaggtgatagctgagagcctctcagaagaagagattcgcgggtttaagagcaatgtttgagggcaatggatactggtaacagcggtgcaatcacttttgatggactcaaagctggcttgagaaggtatgggtcaacccttgaaaggcacccggatcccgcgatcttattggaagcggctgatttgggcaacagcgggccattgggttcagcgggtttttcaaggccggcccctcggataacccggggggaagggctttttttttcattcagncttt

SEQ ID NO: 117499 - DNA, 2573 bp, Arabidopsis thaliana
cctgaccaatacaataatctttttggggcttcttattggctcggatttcagggattttcacacttgtagtagagttgcaacatagacaaatggacgacgatggagaattggggatgttctttcctagctggaccagcaagaatcctattgacacggttgaatctcgtggtttaatgttctcttgttttgttgctgcccttgttggtatattgaccatcgcctacactgcttttcaatggcgaagaaatattaatttaagttggacgaaagccatagccaggtcaaagaaaaatccaaaggcacgacataaggttcctgttgccccacatagctgggaactcgaccctatagctcgtgcgaaaaacttgaactgttgtgtttgcttgaagtccatgtcgccatctcaggcaattgtagcttcagaaagttttttccacaggtgcacaatctgtggagcagcagcacattttaactgttcttcaagtgcgccaaaagattgcaaatgtgtctccatggttggatttgagcatgtggtgcaccagtgggcagtgcggtggacagaaggggctgatcagactgatgactcctcgttttgtagctactgtgacgagtcatgtagtagctcctttcttgggggttctcctatatggtgctgcttgtggtgtcaacgtcttgtgcacgttgactgtcacagtaacatgtcaaatgaaactggtgacatttgtgatttaggcccgcttagaaggttaatattgtgcccactctacgttaaggaattgacgcggaatccctctggaggatttctgagctcaatcactcatggtgctaacgaacttgcatctaccgcccttgccagtatcaggattcaaagcaaaaaatacaagcaaactaatgaaacttcagctgacactggtaatagtggtagcaattgcgatgaatccacagaaagcacagctgatacaggtccaactgttaatggcgctcatgccgtactggaaaattctatcagcgttatgaatggggattcttctaacggggacagtgacagcaatggcaagctggaaaagaagccgagtgttaaaagaaccgggtcttttggtcagaaggaatatcatgcactaaggtcgaaacttaagtatgaactagctgatttgccttcagatgcaagaccgttgttggtttttattaacaaaaagagtggtgctcaacgaggtgattcccttcgtcaacgtcttcatcttcatctaaatcctgtgcaggtatttgaattgagttcagtgcagggaccagaagtgggactttttctcttcaggaaggttcctcactttagagttcttgtttgtggtggagatggcaccgctggttgggtattagatgccatagagaaacagaattttatttctcctcctgcagttgctatactgcctgctggaaccgggaatgatctatcccgagtattaaattggggtggtggtttgggttctgttgagagacaaggaggcttgtcgacagtattacagaacatagagcatgctgcagtcactgtccttgatcgttggaaagtatcgattctgaatcaacaaggaaagcaactccagccgccaaaatatatgaccaattatataggggttgggtgtgatgctaaggttgcccttgagattcacaatctacgggaggagaatccagagagattttatagccagtttatgaacaaagtcctctatgccagagaaggtgcaaggagtataatggacagaacattcgaagatttcccttggcaagttcgagttgaggtggatggtgttgacatcgaggttcctgaggatgcggaaggaatactggttgcaaacattggaagttacatgggaggggtggatttatggcagaatgaagatgaaacatatgaaaactttgatccgcaatcgatgcacgacaagatagttgaagttgtgagtatatctgggacatggcaccttgggaaacttcaggtcgggttgtctcgtgcgagaaggctagctcaagggtcagcagtcaagatacaactttgtgcgcctttaccagtgcaaattgatggagagccttggaatcagcaaccatgtaccttaaccatatcgcaccatggccaggctttcatgctaaagagagccgcggaagagccactgggtcacgcagcagctataatcacagatgttctagagaatgcagaaaccaatcaagtgataaacgcttctcagaaacgaacgctgcttcaagaaatggctctacggctaacttaaaacaggggaaaaaaaaagaaaagacagaagacaaaaccttccctcttcaacaaccaatcaatcatcactggttagttacaaatatttacaaatgcgtgtattttacatatcttgtacctctgcctaatgaagggaatgttaaaaagtcttgaagatcgaaatccgctgattgacaaagcgggttctgtgtggaagtaggaaaaaggaaccaaaaattggaatctggttcctagatttttggctgttctcatagtgaatgaaagcaaaacgtgtttaattaaaaaaaaaaaaaaaaaa

SEQ ID NO: 117500 - DNA, 3033 bp, Arabidopsis thaliana
  unsure (1)..(3033): unsure at all n locations
nnnnnnnnnnnnnnnnnnnnnnnnnnnnnnnnnnnnnnnnnnnnnnnnnnnnnnnnacgcgtcaggtaaatatgagaccacgcgaagccttatagaagagaaaaaaaatatgtattgtagagagtccttgtcgagtctccagactttgaacgtagcaaagagtctcagctctttgttccctaaacaatcagctctcatcaacccgatctccgctggacgtcgaaacaacctgcctcgtccaaacctcagaagacgatgtaaggtcaccgcttcacgggctaatattgaacaagaaggtaacacagtgaaagaacccattcagaatattaaagtaaagggatacataacggcccaagaagagtttctggagggcataacttggtcgagaggtctcgatgacattgctgatatccgcggcagatcattgctcgtcgagcttattagcgccaagactgaccagcggattacggtagaagactacgcacaacgtgtatgggccgaagcccctgatgagaagtacgagtgcgagtttgagatgcctgaagactttggaccagtgggagccatcaagattcagaaccaataccatcgacagttgttcctcaagggggtagagcttaaattacccggcgggtcgataacgtttacatgtgagtcatgggtggcccccaagtccgttgacccaaccaagcggatattcttctccgacaagtcctacttgccttcccaaacaccagagcctcttaaaaagtatcgaaaagaggagctcgagaccttacaaggcaagaaccgcgaggaagttggtgaatttaccaagtttgagcgcatttacgactatgatgtgtacaacgatgttggtgaccctgacaatgatcctgaacttgctcgtccggtaattggaggcctcacacatccatatccaaggcgttgcaagaccggtcgaaaaccttgtgagactgacccctcttcagagcaacgctacgggggagagttctatgtaccaagagacgaggagttctctacagccaagggcacttcattcacaggcaaggccgtactggcagctcttccctccatcttccctcagatcgagtctgttctattgagtccccaagaaccttttccacacttcaaggccatacaaaatctctttgaagaaggcattcagcttcccaaggatgctggcctcttacctctgctccccagaatcatcaaagctcttggcgaagctcaagatgatattctccagtttgatgccccagttctcattaacagggatagattttcatggttacgagacgacgagtttgctcgccagacacttgccggccttaatccttatagcattcagctagttgaagagtggccgttaataagcaaactagacccggccgtttatggtgatcccacctcactcattacttgggaaattgtggaaagagaagttaaaggaaacatgacagttgatgaggctctaaagaataagagattgttcgtgttggattatcatgatttgcttctaccatatgtgaacaaagtgagagagttaaacaataccacattatatgcttctagaacactattcttcctcagcgatgatagcacattgaggcctgttgccattgagttgacttgtccaccaaatatcaacaagccccaatggaaacaagtcttcacgccaggctatgatgctacgtcatgctggctatggaatcttgctaagactcatgctatctctcatgacgccggttatcatcagcttatttcccattggttgaggactcatgcctgtacggagccatacataatagcggcaaatagacaactaagtgccatgcatcccatttataggcttttgcatcctcatttccgctacaccatggaaatcaacgctcgtgcacgccaaagtcttgtcaacggaggtggaatcattgagacttgtttctggcccgggaagtatgcattagagctaagttcagccgtctatggtaaactatggaggtttgaccaggaaggcttacccgcggatctcatcaaaagggggttggctgaggaagataagaccgcagaacatggagtacgtctgacgataccagactatccatttgcaaatgatggtctaatattgtgggatgcaattaaagaatgggtgacagactatgtgaaacattactatcctgatgaagaactgatcacatcggacgaggaactccaaggatggtggagtgaagtgcggaacataggccacggagacaagaaagacgaaccttggtggcctgtcctcaaaacacaagatgacttgattggtgtggtaactacgattgcatgggtcacctcaggtcaccatgcagctgtaaactttggacagtacggatatggaggatactttcccaaccgaccaacgacaacaaggataagaatgccaacggaagatccgacagatgaagccttaaaagagttctatgagtcgccagaaaaagtgttgcttaagacatacccatcgcagaaacaggcgaccctagtgatggtcacgttggatcttttatcaacacattcacctgacgaagagtacattggagaacaacaagaagcatcttgggccaatgagcctgttatcaatgctgcatttgaaagattcaaaggcaagctccaatatctagaaggagtgatagatgagagaaacgtgaacattactctaaagaatagagctggagctggtgttgttaagtatgagcttttgaagcctacctctgagcatggtgttaccggaatgggtgttccttatagtatttctatttgatctatgcattttctttctcaaaaatgctttcattaattttctgtatctctgtcttcttgataaaatgaataaaacaaatgctcctttgtctcctaaaaaaaaaaaaaaaggggcggccgctctagaggatccaagcttacgtacgcgtgcatgcgacgtcatagcttaagtagtagtgtnnnnnnnnnnnnnnnnnnnnnnnnnnnnnnnnnnnnnnnnnnnnnnnnnnnnnn

SEQ ID NO: 117501 - DNA, 871 bp, Arabidopsis thaliana
  unsure (1)..(871): unsure at all n locations
gcgnnnnnnnnnnnnnnnnnnnnnnnnnnnnnnnnnnnnnnnnnnnnnnnnnnnnnnnnnnnnnnnnnnnnnnnccacgcgtccgaaattttccgccataagggggttggctgaggaagataagaccgcagaacatggagtacgtctgacgataccagactatccatttgcaaatgatggtctaatattgtgggatgcaattaaagaatgggtgacagactatgtgaaacattactatcctgatgaagaactgatcacatcggacgaggaactccaaggatggtggagtgaagtgcggaacataggccacggagacaagaaagacgaaccttggtggcctgtcctcaaaacacaagatgacttgattggtgtggtaactacgattgcatgggtcacctcaggtcaccatgcagctgtaaactttggacagtacggatatggaggatactttcccaaccgaccaacgacaacaaggataagaatgccaacggaagatccgacagatgaagccttaaaagagttctatgagtcgccagaaaaagtgttgcttaagacatacccatcgcagaaacaggcgaccctagtgatggtcacgttggatcttttatcaacacattcacctgacgaagagtacattggagaacaacaagaagcatcttgggccaatgagcctgttatcaatgctgcatttgaaagattcaaaggcaagctccaatatctagaaggagtgatagatgagagnaacgtgaacattacnctaagatagagctggantggtgttgttagaatggcttttgaancacctctganatggngttccggatnggggtcctaaagaatccattggcatnattcttcccaaatntcatnt

SEQ ID NO: 117502 - DNA, 549 bp, Arabidopsis thaliana
tttaggtgccactatagaagagctttgacgtcgcacgcacgcgtacgtaagctcggaattcggctcgaggaaaaaaaatatggtgttgtggagagtcccttgtcgcagtctccagaactttgaacgtagcaaagagtctcagcttctttgttccctaaacaatcagctctcatcaacccgatctccgctggacgtcgaaacaacctgcctcgtccaaacctcagaagacgatgtaaggtcacccgctgcgcgggctaatattgaacaagaaggtaacacagtgaaagaacccattcagaatattaaaggaaagggatacataacggcccaagaagagtttctggagggcataacttggtcgagaggtctcgatgacattgctgatatccgcggcagatcattgctcgtcgagcttattagcgccaagactgaccagcggattacggtagaagactacgcacaacgtgtatgggccgaagcccctgatgagaagtacgagtgcgagtttgagatgcctgaagactttggaccagtgggagccatcaagat

SEQ ID NO: 117503 - DNA, 2458 bp, Arabidopsis thaliana
atttcttctctttctctctctctcttctctcatatctctctcttcgccgtcaggttttgcccaaatttctcggtcttcttcactcccgcgagttttttttctcgggaaaattttccaattccaagctccattgaagccaagtaagaggtgcgattctcttcaattttgacttggaacttgtaaatagcgtatggatttgagctggttatggacagaattctagctcgtatgaagaaatcaactggacgaagaggaggagataagaatattactccggtacggcggttagagcgtcgcgatgcggcgaggaatatcaattacgccgcagcttcatgttctagttcgtcagctgaagatctttccgtttcgacttcttcgttgatgactcgctctttggagtttccggagcctactagtttccgaatcggtggtggtgttggagagatggatcggatttatcggtctcttggtgtttctggtcctgatgatttggctatttcttttgatgcttgggaagcttgtaagaaacgttcttcttcagatgttgttaataggtttaagtcttttgatcttgataaggttcgtgatcaggatttgagtgaagaaggtcctagtggtgttgttgttggttctgattcaatgaatcataaggttcagggtcaggatttgagtgaagcaggtcctagtggtggaattgttactgagttgagtgagattgggaatttaatcactcctgtggataggttagtagctgatggtgtggtagagaatagacgtgttatggaaagaacaccaactattgtgaagtcgaaagggtatcttgtaccaaataatgtagtggctgttggtgttggtgttggtggtggtattaaggggctaagaccaccagtacttaagcctcctccggctatgaaacgaccccctattgatcatcggggatcgtcttgggatttcctgacgcatttcgctccaagtgaaacagttaagcggccgagttcctcttcttcttcttccgaggatggatgcgatgaagaggaaggcaaggaagaggaagcggaagcggaagagatgggagctaggtttatccagttgggggatacggctgacgagacgtgctcattcactacaaatgagggtgactcctcaagcacagtatccaatacttcgcctatctatccagatggaggagctatcataacgtcttggcaaaagggtcaacttttgggacgaggatcatttggttctgtgtatgaaggcatttctggagatggggacttctttgctgtcaaggaagtttcacttcttgatcagggaagtcaggcacaagaatgcatacaacaacttgagggggagattaaactacttagtcagcttcagcatcagaatattgtgagatatcgtggcacagccaaggatgggtcaaacttgtacatttttcttgagcttgtaacccaagggtcccttctaaaactctaccaaagataccagcttcgggactctgtagtctccttgtacactagacagattcttgacggtctgaaatatctccacgataaaggttttattcacagggacatcaaatgtgcaaatatattggtggacgctaatggcgccgtcaaacttgcagattttggattggcaaaggtttcaaagtttaacgacattaagtcctgcaagggaactccattttggatggctccagaggttattaaccgaaaggatagtgatggctatggaagtccagctgatatatggagcctcgggtgcactgtgctggaaatgtgtactggtcagatcccctactctgatctcgaacccgttcaagccctgtttaggatcggaaggggtactcttccggaagtacctgatacgttatcactagatgctcggcttttcatacttaagtgtcttaaagtgaacccggaagagcggccaactgcagctgaactgctgaaccatccatttgtgagaagacccttaccatccgtgggttcaggaggctcgggatcagcatctccccttctccgtagatgaggctaattttagtaatttcctcaataggcataacccgaagatttatgagagattagatcccagagaaactattgggagacacgagacttgattcaacgacacacacacacgtgcggtcgggttgcgcaagcaaagagccaaacttacttagtttcctgtgtcattcgttggttatttgttgcaagttatgtgttgggcttgattttaaaactgaagagccttatttttctaggaattagaaatgtcgaccttggggtttttgggtgtataggttttgtttagttttttttgttaaattatagtgtatgtatgtctgtatctatatcatgtaaatgtataattatagttggttcttatagttcctggcttgttgtaactgtgtacacacatcgatgggtttaagttctatttgtctcatatttta

SEQ ID NO: 117504 - DNA, 1586 bp, Arabidopsis thaliana
cgggcgaccacgcgtccgcgttgaccaaatctctcactctcaccagccaaatctctccaacttcctctttctctccacccaaatctcgccggcgatcgtcactgacgaatctgattcgtccccaacactcaacgggaggtagaagaatggcgactcctgttgatccacctaatggaattaggaatcaagggaagcattacttctcaatgtggcaaacacttttcgagatcgataccaaatacgtgcctatcaaaccgataggccgaggcgcgtacggtgtggtttgctcttcggttaacagagagagtaatgagagagtggcgatcaagaagatccacaatgtgtttgagaataggattgatgcgttgaggactcttagggagctcaagcttctacgtcatcttcgacatgagaatgtggttgctcttaaagatgtaatgatggctaatcataagagaagctttaaggatgtttatcttgtttatgagcttatggatactgatcttcatcagattattaagtcttctcaagttctaagtaatgaccattgccaatacttcttgttccagttgcttcgagggctcaagtatattcattcagcaaacattctccatcgggatctgaaacccggtaacctccttgtgaatgcaaactgcgacttaaagatatgtgactttgggctagcgaggacgagcaacaccaaaggtcagttcatgactgaatatgttgtgactcgttggtaccgagccccagagcttctcctctgttgtgacaactatggaacatccattgatgtttggtctgttggttgcattttcgccgagcttcttggtaggaaaccgatattccaaggaacggaatgtcttaaccagctgaagctcattgtcaacattctcggaagccaaagagaagaagatcttgagttcatagataacccgaaagctaaaagatacattagatcacttccgtactcacctgggatgtctttatccagactttacccgggtgcaaatgttttagccattgatctgcttcagaaaatactcgttcttgacccttcgaaaaggattagtgtcacggaagcgcttcaacatccatacatggcgcctttatatgacccgagtgcaaatcctcctgctcaagttcctattgatctcgatgtagatgaagacgaggatttgggagcagagatgataagagaattaatgtggaaggaaatgattcattatcatccagaagctgctaccataaacaacaatgaggtctctgagttttgagttcaagtcttttgcaggtactgttcagagagatctttcaacaacttaaacttatttattttcatgtttgcttcttgaaatgttgttaataatagtgtcgaagaagaagaacaataactttaaattatgtgatatgtttgtgtcatggggctttgttttgtttttggttacaagcttaagtgtctgtaacgtttgtacataagtgtatgtgtccttaaaacttcatactctgtctctgatcttattgttggtgatttttcttattgaagattttcgaatgttcaaagagcaaaccattggattaaaaaa

SEQ ID NO: 117505 - DNA, 1598 bp, Arabidopsis thaliana
  unsure (1)..(1598): unsure at all n locations
atgatactctnnnnnnnnnnnnnnnnnnnnnnnnnnnnnnnnnnnnnnnnnnnnnnnnnnnnnnnnnnnnnnnnnnnngtccgagcgttggccaaatctctctcacttccacaggtttctctctccggccaaatctaacctccggggaacgtcgttggtcacttatcaccgagggaaaacaaaaaatggcgactttggttgatcctcctaatgggataaggaatgaagggaagcattacttctcaatgtggcaaactctgttcgagatcgacactaagtacatgcctatcaagcctattggtcgtggagcttacggtgttgtctgctcctctgttaacagtgacaccaacgagaaagttgctatcaagaagattcacaatgtttatgagaataggatcgatgcgttgaggactcttcgggagctcaagcttctacgccatcttcgacatgagaatgtcattgctttgaaagatgtcatgatgccaattcataagatgagcttcaaggatgtttatcttgtttatgagctcatggacactgatctccaccagattatcaagtcttctcagcgtcttagtaacgatcattgccaatacttcttgttccagttgcttcgagggctcaagtatattcattcagccaatatcctgcaccgagatttgaaacctggtaaccttcttgtcaacgcaaactgcgatttaaagatatgcgattttggactagcgcgtgcgagcaacaccaagggtcagttcatgactgaatatgttgtgactcgttggtaccgagccccagagcttctcctctgttgtgacaactatggaacatccattgatgtttggtctgttggttgcattttcgccgagcttcttggtaggaaaccgatattccaaggaacggaatgtcttaaccagcttaagctcattgtcaacattatcggaagccaaagagaagaagatcttgagttcatagttaacccgaaagctaaaagatacattagatcacttccgtactcacctgggatgtctttatccagactttacccgtgcgctcatgtattggccatcgaccttctgcagaaaatgcttgtttttgatccgtcaaagaggattagtgcctctgaagcactccagcatccatacatggcgccactatatgacccgaatgcaaaccctcctgctcaagttcctatcgatctcgatgtagatgaggatttgagagaggagatgataagagaaatgatatggaatgagatgcttcactaccatccacaagcttcaaccttaaacactgagctctgagctcaagtcttgtttgtacgggtaatttacagaaaacttcttcttcttatgtctgattgtcatcatagactcatagtgtatatagtcttgaaaaataagatgaagactaacttatagtttaagcgaatagtgatgccatggaagctctgttttatttaattacaagcttgatgtgtgtctgtaacatatgtacatagagagagctgttttttttttttaattacaagtttgatgtgtgtctgtaacatatgtacatagaaagagctgtgttttttttttnnnnnnnnnnnnnnnnnnnnn

SEQ ID NO: 117506 - DNA, 1479 bp, Arabidopsis thaliana
ctcagctcaatcctcaatctcagtctctctgttgactccgactgttatataaaaccatacaaataccttcagattcactacttcaaacctcaaagcaaccactgaatctcgactttgatcaattgagagagaaatgaacaccggcggtggccaatacacggattttccggcggtggaaactcacggaggacagttcataagttacgatatcttcggtagtttattcgagatcacatctaagtatcgtcctccgattataccaattggtcgtggagcttatggaatcgtttgctctgtgttggatacggagacgaacgagctagtagcgatgaagaagatagctaatgcttttgataatcatatggatgctaagcgtacgcttcgtgagatcaagcttcttcgtcatcttgatcatgaaaacattatagctataagagatgttgttccaccaccactaagaagacagttcagtgatgtttatatctctactgaattaatggatactgatcttcatcaaatcatcagatctaaccagagtttatcagaagaacactgtcagtacttcttgtaccagctacttcgaggactgaagtatatccactcagctaacattattcatagggatttaaagccgagcaatcttctgttgaacgcgaattgcgatttaaagatttgtgatttcggtcttgctagacctacttcagagaatgattttatgactgagtatgttgttacgagatggtatagagcacctgagcttctgttgaactcttcagattacacagctgctattgatgtttggtctgttggttgtatctttatggagcttatgaatagaaagcctttgttccctggtaaagaccatgttcatcaaatgcgcttattgacagagttgcttggcacaccgacagaatctgatctcggttttactcacaatgaggatgcgaaaagatacatccggcaacttcccaacttcccacgtcagcccttagctaaacttttctctcatgttaacccaatggccattgatcttgttgacagaatgttgacgtttgaccccaacagaagaatcactgttgaacaagctctgaatcaccagtaccttgctaaattgcacgacccgaatgatgagccaatctgtcaaaagccattctcttttgagttcgaacaacagcctctggatgaggaacagataaaagagatgatctaccaagaagccatagcactcaatccaacatacggttagaagtgcagcagccccgtgaatgcctggtattacccaataaccatccgaatggctacttagtatctttgcctgttcttttattcatgtacttcttccacatatgtaatcttgtaacttttatttgtttgttcatgttatttactgctagtgattaagtgtagctccaatgtaaagtactccagttattaaagaatatctatagacttttttacttcacataaaaaaaaaaaaaa

SEQ ID NO: 117507 - DNA, 1330 bp, Arabidopsis thaliana
ctagggttcttcgttttcgttgttgtgaggaattttgctccgatgtcggcggagagttgtttcggaagctcgggtgatcaaagcagcagcaaaggagtggctactcatggtggtagctatgttcagtataatgtctatggcaatctcttcgaagtttctagaaagtatgttcctcctcttcgtcctatcggtagaggcgcttatggaattgtctgtgctgctacaaactcagagactggagaggaggtagctatcaagaagattggtaatgcttttgacaatattatcgatgctaaaaggactttgagagagattaagcttctcaagcatatggatcatgaaaatgtgattgctgtaaaggatataataaaaccaccgcagagagagaacttcaatgatgtttacattgtttatgagcttatggacactgatctccaccaaattattcgctctaaccaacccttaactgatgatcattgtcggttttttctgtatcagttgttgcgtgggctcaaatatgttcattcagctaatgtattgcatcgagatttgaaacctagcaatttgctcctgaatgcaaattgtgatctaaagcttggggatttcgggcttgcgaggaccaaatccgagactgactttatgactgaatatgttgttacacgttggtatcgagctccagagctgctacttaattgctctgaatacacagcagcaattgatatttggtctgtcggttgtatactcggtgaaacaatgacacgagagcccttgtttcccggtaaagattatgttcatcagcttagactcatcactgagcttataggatctcctgatgactcaagcttgggattcttaagaagtgacaatgcaagaagatacgttagacagcttccacagtaccctagacagaactttgctgctagattcccaaacatgtcggctggtgcagtcgatttgctggagaaaatgcttgtttttgaaccaagcagacgcatcacagttgatgaggcgttgtgccacccatatttggcgccgctgcatgatatcaacgaagaaccggtatgtgtgaggccgttcaattttgatttcgagcaacctactttgacagaagagaacattaaggagcttatataccgtgaaacagtcaagttcaatcctcaagactcagtgtgagagaaagagagagagatatatatccttaaaaggaaactcatcaaaatgctatgttttgttttgctctgcttttgttatcaaatctctgataagtttgataatatgtctgtaatttgaataacatcctaaaaaattgaaaaaaaaaaaaagaacaacc

SEQ ID NO: 117508 - DNA, 1866 bp, Arabidopsis thaliana
cacgtctctctctatctccttagattttcaaagttttcaacattcaacaaaatcattattttaattttgcagagacgaatcgaatcgatctcatctccaaaaatcttgtattcaaagtttgattttctgggtttcttctgtattatctcgatatttgaaaaaaatggcgaaggaaattgaatcagcgacagatttaggtgatactaacatcaaaggagttcttgttcatggaggaagatattttcaatacaatgtttatggaaacttgtttgaagtttctaataagtatgttcctcctattcgacctattggtagaggagcttacggttttgtctgtcctgcagtagattcggagacacacgaagagattgcgataaagaagataggtaaagcctttgataataaagtagatgcaaagagaacattgagagagattaagctacttcgtcatttagaacacgagaacgttgttgttataaaagatatcattagaccaccaaagaaggaagatttcgttgatgtttatatagtttttgagttaatggatactgatcttcatcagattattcgatcaaaccaatctttgaatgatgatcattgtcagtacttcttgtatcagattctacgaggactcaaatatattcattcagcaaatgttttacatcgtgaccttaagccgagtaatttgcttttgaattcgaattgcgatcttaagattactgactttggtttggcaaggactacatcagaaacagagtatatgacagagtatgttgtaacacgatggtacagagcaccagagctgcttcttaatagttctgagtatacatctgctattgatgtatggtctgttggttgcatatttgctgagattatgacaagggaaccgcttttcccggggaaggattacgttcatcagcttaaacttatcactgagttgataggatcacctgatggagcgagtctagagtttctcagaagcgcgaacggaggaaaatatgttaaggagctacctaagttcccaagacaaaacttttcagctaggtttcctagtatgaattctacagctatcgatctactagagaaaatgctcgtgtttgatccagtaaaacgtatcacggttgaggaagcactgtgttatccttacttgtcagctcttcacgaccttaacgacgagcctgtttgttccaaccatttcagtttccattttgaggatccgtcttccactgaagaagagataaaggagcttgtgtggctcgaatctgtgaagttcaatcctctgccgagcatttaaaacattatttaagaaggggaaagcaagttttatactctgacattgagcaaaacaaattagtagtgtttaagctctgtttctccttcatctcatgttgatcgttgtttaagctatttcactagttaaaaaagctgtcttgcaactcaagaaattgttctataaggatccttgtaacccaagacatatctttagtagttatgtccattcttattatcaggatgtcttagatagtgttctgtttcttctacatatcatgttgttatcttgtaactcaagaaattaaattaaaaagctatctttgtttaaaaaaaaaacatgtcacttggattgtactcgtagaaaatgggaaaaactcgatgtgtttattcatctccagcagtttcttcaagcactacgtcgagctcttgcaaattttggtaatgaacactagttcgatccttcactctcgaaactcgacaaaaaagtctatcaacttcgtctcttgactctattcgagtgatattttcatcatctagaaggacgttgatcccactccttcgtaacgcggctctaagaaggctggagaacttgtt

SEQ ID NO: 117509 - DNA, 1688 bp, Arabidopsis thaliana
acgcgtccgcagtatcattcataattcactcaccccaaaattacaaaaaaaaaaaaaaagaaaagattttccatttccctcttctcgatccaccaccaccaccaacctcaaaagctttcatctttaccggtcatggacggtggttcaggtcaaccggcggctgatacagagatgacagaagctcctggaggttttcccgcggcggctccatcgcctcagatgcctgggattgagaatattccggcgactcttagccatggtggtaggtttattcagtataacatatttggaaacatcttcgaggtcaccgctaagtataagcctccgatcatgcctattggcaagggtgcttatggcatcgtttgttcggctatgaattctgaaactaacgagagcgttgcgattaagaaaattgctaacgcttttgacaataagattgatgctaagaggactctccgtgagatcaagctgcttcgtcacatggatcatgaaaatattgttgcaatcagagatattatcccgccaccattaagaaacgctttcaacgatgtttacatcgcgtatgagttaatggacactgatctccatcaaatcattcggtcaaatcaagcattatccgaagaacattgccagtattttctttaccagatcctccgtggattgaaatacattcactctgcaaatgtgcttcacagggatttgaaaccaagtaatctcctcctgaacgcaaactgcgacctaaaaatctgcgattttgggctagctcgagtcacttctgagagtgatttcatgactgaatatgttgtcacgagatggtaccgtgcaccagagcttctcttaaactcttctgattatactgcagctatcgatgtttggtctgtaggctgtattttcatggagttaatggaccgtaagccactcttccctggacgagatcatgtccatcagcttcgcttgctcatggagctcataggaactccatcagaagaagagctcgagttcttgaacgaaaacgcaaagcgatacataagacagcttccaccttatcctcgccaatccatcactgataagttcccgacagtgcatcctttagctatagaccttatcgagaagatgttaacatttgatcctagacggagaatcacagttttagacgcattggcccatccatacctgaactcgttgcacgacataagcgatgagccagagtgtacaatacctttcaactttgattttgaaaaccatgcactctcagaggagcagatgaaggaactaatctaccgcgaggcgcttgctttcaatccagaatatcagcaatagtttgaagaacagcatttgggagatgaagatgagataagggtttggcgttatttggtttggacaacattcttaaaaggaggaaagatcattgtttgtcttttgtgtatacttgtgagagatgttgaaggggatgggtctcaaactttatatttcagtcttttggataatttgttctctctgtttttttttttcctattcgtatttgtaatttgccctcattttgttgttgcagttatttaagacttaaattgtctcagaaatagttatgttatgatagcccaccttcaattcaaaaaaaaaaaaagggcggccgctctagaggatccaagcttacgtacgcgtgcgatgcgacgtcatagctcttctat

SEQ ID NO: 117510 - DNA, 603 bp, Arabidopsis thaliana
  unsure (1)..(603): unsure at all n locations
aaacttgtcccccnccaggtcccggnccggattccccgggtcnccccacggtccgggaactaattctccccgggggcgcttgctttcaatcccggatatccccccaatagtttgaagaccagcatttggggagatgaagatgagatagggggtttggcgttatttggtttggacaacattcttaaaaggaggaaagatcattgtttgtcttttgtgtatacttgtgagagatgttgaaggggatgggtctcaaactttatatttcagtcttttggataatttgttctctctgtttttttttttcctattcgtatttgtaatttgccctcattttgttgttgcagttatttaagacttaaattgtctcagaaatagttatgttatgatagcccaccttcaattcctctaaaaaaaaaaaaananaaaaaaaaagggcggccccncctagngggtncccaagctttacgtncggcgttcattcggccggcnatagcccntcctttaggggtcaccnaaattcnaatnnncntggccgtcgggtttcnaacggcnggggcnttgggaaaacccngggggnttcccccaccnttaancngccttnna

SEQ ID NO: 117511 - DNA, 1709 bp, Arabidopsis thaliana
tcttcttcttcctcttcccctaacattccattccccgtatgggtctcaccacttcctaactcttctctctcttatctcttcttgttttagctatgaagaagcaatctcaattcagatccaatcatacccttctcttctttcatctctgatcattaacaacaacaacaacgactcgggttctgtaaattcagttattggagagaaaatggcgatgttagttgagccaccaaatgggattaagcaacaagggaaacattactactccatgtggcaaacattgttcgaaatcgatacaaagtatgttccgattaaacccattggaagaggagcttatggtgtggtttgttcttctatcaatcgtgagactaatgagagagttgctattaaaaagattcacaatgtgtttgagaatcgtgttgatgctttgagaacgttgagggaacttaaacttcttaggcatgtgaggcatgagaatgtgatcgcgcttaaagatgttatgttgcctgctaatagaaccagtttcaaggatgtttatttggtttatgagctaatggatactgatcttcatcagattattaaatcctctcagtctctttctgatgatcactgcaagtacttcttgtttcagttgcttagagggttgaagtatcttcattctgcaaacatacttcaccgggatttgaagcccgggaacctcttagttaatgcgaactgcgatctcaagatttgtgatttcgggttggcgagaacgagccaaggtaatgaacagttcatgactgagtatgtggttacacgttggtacagagcacctgagcttcttctttgttgtgataactatggaacctccattgatgtatggtcggttggttgcatattcgcggagattcttggtaggaaaccgatttttccagggacagaatgcttgaatcagcttaagctaatcatcaacgttgttggtagccaacaagaatctgatattcggttcatagacaacccgaaagctcgaaggtttataaagtctcttccgtactcaagaggaactcatctctccaatctttatccacaagccaatcctctagctatagatttgttacagaggatgcttgtgtttgaaccaaccaagagaatctctgtaaccgatgcgctcttacacccgtatatggcggggttgtttgaacctggaaccaatccgcctgcacatgtcccaatctctctggacatagatgaaaacatggaggaaccagtgataagagagatgatgtggaatgagatgctttattaccaccctgaagctgaaatcttaaatgcctaaatcaacatcaatgatcattaagagtaagctttttccagttttttttttttttgctttctaaaatgcagctttgatgttatgttatatatagcgagtccacaaacgcgggaacagatcgataaaaagcccggtgctttgatctcgtctggtttgatttagttgcagtgagtgagtagtagtaacagagtttgaaaagtggctctcagtatctttaccactttgtaaatgtgactgtttgttactaagtaagttaaggcttgtttttgttacattatctttgagttgatgagttttactactgattttcaggccaactcttgtattttgtatagctttgccattgccccacttgctagccacacgaaataattttttaaaaaaaaaaaactctcatact

SEQ ID NO: 117512 - DNA, 2782 bp, Arabidopsis thaliana
  unsure (1)..(2782): unsure at all n locations
nnnnnnnnnnnnnnnnnnnnnnnnnnnnnnnnnnnnnnnnnnnnnnnnnnnnnnnnnnnnnnnnnnnnnnnnnnnnnnnnnnnccacgcgtgcgcgcacgcgtccgctgatatttattttcttaccttaaatacgacggtgcttcactgagtccgactcagttaactcgttcctctctctgtgtgtggttttggtagacgacgacgacgataatggaggagctagatcgttcacgtgcttttgccagagacgtcaaacgtatcgtcgttaaggttgggacagcagttgttactggaaaaggtggaagattggctcttggtcgtttaggagcactgtgtgaacagcttgcggaattaaactcggatggatttgaggtgatattggtgtcatctggtgcggttggtcttggcaggcaaaggcttcgttatcgacaattagtcaatagcagctttgcggatcttcagaagcctcagactgaacttgatgggaaggcttgtgctggtgttggacaaagcagtcttatggcttactatgagactatgtttgaccagcttgatgtgacggcagctcaacttctggtgaatgacagtagttttagagacaaggatttcaggaagcaacttaatgaaactgtcaagtctatgcttgatttgagggttattccaattttcaatgagaatgatgctattagcacccgaagagccccatatcaggattcttctggtattttctgggataacgatagcttagctgctctactggcgttggaactgaaagctgatcttctgattcttctgagcgatgttgaaggtctttacacaggccctccaagtgatcctaactcaaagttgatccacacttttgttaaagaaaaacatcaagatgagattacattcggcgacaaatcaagattagggagagggggtatgactgcaaaagtcaaagctgcagtcaatgcagcttatgctgggattcctgtcatcataaccagtgggtattcagctgagaacatagataaagtcctcagaggactacgtgttggaaccttgtttcatcaagatgctcgtttatgggctccgatcacagattctaatgctcgtgacatggcagttgctgcgagggaaagttccagaaagcttcaggccttatcttcggaagacaggaaaaaaattctgcttgatattgccgatgcccttgaagcaaatgttactacaatcaaagctgagaatgagttagatgtagcttctgcacaagaggctgggttggaagagtcaatggtggctcgcttagttatgacacctggaaagatctcgagccttgcagcttcagttcgtaagctagctgatatggaagatccaatcggccgtgttttaaagaaaacagaggtggcagatggtcttgtcttagagaagacctcatcaccattaggcgtacttctgattgtttttgaatcccgacctgatgcacttgtacagatagcttcacttgccatccgtagtggaaatggtcttctgctgaagggtggaaaggaggcccggcgatcaaatgctatcttacacaaggtgatcactgatgcaattccagagactgttgggggtaaactcattggacttgtgacttcaagagaagagattcctgatttgcttaagcttgatgacgttatcgatcttgtgatcccaagaggaagcaacaagcttgttactcagataaaaaatactacaaaaatccctgtgctaggtcatgctgatggaatctgtcatgtatatgtcgacaaggcttgtgatacggatatggcaaagcgcatagtttctgatgcaaagttggactatccagcagcctgtaatgcgatggaaacccttcttgtgcataaggatctagagcagaatgctgtgcttaatgagcttatttttgctctgcagagcaatggagtcactttgtatggtggaccaagggcaagtaagatactgaacataccagaagcacggtcattcaaccatgagtactgtgccaaggcttgcactgttgaagttgtagaagacgtttatggtgctatagatcacattcaccgacatgggagtgcacacacagactgcattgtgacagaggatcacgaagttgcagagctattccttcgccaagtggatagcgctgctgtgttccacaacgccagcacaagattctcagatggtttccgatttggacttggtgcagaggtgggggtaagcacgggcaggatccatgctcgtggtccagtcggggtcgaaggattacttacaacgagatggataatgagaggaaaaggacaagttgtcgacggagacaatggaattgtttacacccatcaggacattcccatccaagcttaaacaagacttccgagtgtgtgtttgtgtatttggttgagacttgaggagagacacagaggaggatgggcttttttgtttcctctctgcttagtactcatatcctatcattattattattactactacttattattgaaaccctcgcttatgtagtggttttgatttagggttaggattgcaccaaaaataagatccactttaccacttagtcttgctcataagtacgatgaagaacatttaattagcttctcttcttgtcattgtaagctacctacacatttctgatctttatcaagatactactacttttcaaaaaaaaaaaaaaaaaagaaaaaaagnnnnnnnnnnnnnnnnnnnnnnnnnnnnnnnnnnnnnnnnnnnnnnnnnnnnnnnnnnnnnnnnnnnngtacctaaat

SEQ ID NO: 117513 - DNA, 777 bp, Arabidopsis thaliana
  unsure (1)..(777): unsure at all n locations
aataaaaagagatttatttaagaattgactaggnattaccnataaattatatgaaaatagaatagcaaagtaattcacttaagaataacaatctttattaaacaaatccaacaaattatatacattgcacaaaactcagacgagaaataaagaactcaatgaaaattgaccaatgtcaccactcaccaacacgagagggcgtttctagcaaaatcagaagtcacaagaggaaatctgcaaaaacctcaacattgagaggagaagcaaccaaataaatgaaagagataaaacaatctttttcagtttctcctctgtttcttttcttcattctttctgttttggtttttctctttacttcaatttcgcatctctctacgtgtttcttcaataatacaagacgagatgacgctcgcacgaagaacatgagtatttgcgtttgaccttgaaacaaagtggtaagaaacagaacaaccacttcgtctctatatccaccgccgatacttttccgccgcaataaggacacatccctggtgcttgttgccgaccaagctccgtcttctcttcatgatacacaacttccaaacacatttttactcacaattctcagacttcctttgtgtcttatctttatagtgtttctaggcttggcttccttttttctggtacgttagctagggaaaatctagaacttctagaagtgtggagaaggagaaacgaaaaggatatttttattaccaagaaagggaaaaacttatttcaagtgtaaagatgtgtttt

SEQ ID NO: 117514 - DNA, 2672 bp, Arabidopsis thaliana
  unsure (1)..(2672): unsure at all n locations
tacgactcactatanggagagctggtacgcctgcaggtaccggtccggaattcccgggtcgacccacgcgccacgtccgcttcttccttcaactgagtccgactaagttgactcgttctctcgtgttttcgatagacacaaactatgacggagatcgatcgttcacgcgcgttcgccaaagacgttaagcgtatcgtcgtcaaggttgggactgcagttgttactgggaaaggtggaagattggctcttggacgtttaggagctatctgtgaacagcttgcggagttaaactcagatggatttgaggtcattttggtgtcatctggtgccgttggtcttggtcgacaaaggcttcgatacagacaattagtcaacagcagttttgcagatttacagaagccacaaatggaacttgatgggaaggcttgtgctggtgttgggcagagcagtctcatggcttactatgagactatgtttgaccagttggatgtgacggttgctcaaatgcttgtgaccgatagcagttttagagataaggatttcaggaagcaacttagtgaaactgtcaaagcgatgctgaggatgagggttattccagttttcaatgagaatgatgctataagcactcgcagagccccctacaaggattctactggtatattttgggataatgacagcttagccgctcttctgtcgctagagctgaaagctgatcttttgattcttctaagtgatgttgagggcctttacactggccctccaagtgattctacctcaaaattaatacacacattcattaaagaaaaacaccaggacgagattacttttggcgaaaagtccaaattaggacgagggggtatgactgcaaaagttaaagctgctgttaatgcagcttatggtggcgttcctgttatcataaccagtggatatgcagctgagaatataagtaaagtccttagaggactgcgtgttggtaccctgttccatcaagatgctcatttatgggctccggtcgtagatactacttctcgtgacatggcagttgctgcaagggaaagctcaagaaagcttcaggccttatcttcagaagataggaaacaaattctacacgacattgccaatgcccttgaagtaaatgagaaaacaattaaagctgagaatgatttagatgttgctgcagcacaagaagctggatatgaagagtctttggtagctcgcttagttatgaagcctgggaagatctcaagccttgcagcttccgttcgccagctagccgaaatggaagatccaataggccgtgtattaaagaaaactcaggttgcagatgatcttattttagagaagacctcatcaccaataggtgttcttctgattgtttttgaatcccggcctgatgcacttgttcagatagcttcgcttgcaatccggagtggaaatggtcttctgctgaagggtggaaaggaggctcgtcgatcaaatgctatcttacacaaggtgatcactgatgcaattccggagactgttggaggtaaactcataggacttgtgacctcaagagaggagattcctgatttgctcaagcttgatgacgttattgatcttgtgatcccaagaggcagcaacaagcttgtttctcaaataaaaaactcgacgaaaatcccagtgctaggccatgctgatggaatctgtcatgtatatgttgataagtctggtaaactggacatggcaaagcgcattgtttccgatgcaaagttggactatccagcagcctgtaatgcgatggaaacccttcttgtacataaagatttggagcagaatggttttctcgatgatcttatttatgttctgcaaaccaaaggcgtcactttgtatggtgggccaagagcaagtgcaaaactgaatattccggaaacaaaatcatttcaccacgagtacagttccaaggcctgcaccgttgaaattgtagaagacgtatatggtgctatagatcatattcaccaacatggaagtgcacacactgattgcatagtgacggaagatagtgaagtagcagaaatattcctccgccaagtggacagtgctgctgttttccacaatgcaagcacaagattctctgatggttttaggttcggacttggtgctgaggtgggaataagcacaagcaggattcatgcccgtggtccagttggagttgaaggattattgacaacaagatggataatgagaggaaagggacaagttgtggatggagacaatggaatcgtttacacccataaggatcttcctgtcttacaaaggacagaggctgttgagaatggaatttagttctctctttctctgctgatgtcatattatgttttacaattatgattgaagttttttcccccttttacataggatatagtgttccttgaggtttgtaccatcataagaagatctcattacttaagtggtctttgataatagtgaaatgtttagcagcttctcttcatgtcaaaaaagctccatacatgtccacaacctttgatttaccacaactatttgtatcatttctccatgcagaataatgaatctctttaaaaaaaaaaaaaaaaaaagggcggcgcgctctagaggatccaagctcacgtacgcgtgcatgcgacgtcatagctcgtctatagtgtacggga

SEQ ID NO: 117515 - DNA, 1034 bp, Arabidopsis thaliana
  unsure (1)..(1034): unsure at all n locations
gtacacttagagagcttgacgtccatgccgcgtacgtagctcggaattggctcgacactgatgcaattcagagactgttgggggtaactcattggacttgtgacttcagagaagagattcctgatttgcttaagcttgatgangttatcgatcttgtgatcccaagaggatngcacangcttgttactcagataagacatactacannaatccctgtgctaggtcatgctgatggaatctgtcatgtatatgtcgacaaggcttgtgatacggatatggcanagcgcatagtttctgatgcaaagttggacctatccagcagcctgtatgcgatggaaacccttctcgtgcataaggatctagagcagaatgctgtgcttaaatgagctatcttttgctctgcagagcaatggagtcactttgtatgggtgaccaaaggcangtangatactgaacataccagaagcacggtcattcaaccatgagtactgtgccaaggcttngcactgtngaagttgtagaagacgtttatggtgctatagatcacattcaccgacatggggagtgcacacactgactgcattgtgacggacgatcgcgaagttgcagagctattcctccgccaagtggacagtgctgctgttttccacaatgcaagcacaagattctctgatggttttaggttcggacttggtgctgaggtgggaataagcacaagcaggattcatgcccgtggtccagttggagttgaaggattattgacaacaagatggataatgagaggaaagggacaagttgtggatggagacaatggaatcgtttacacccataaggatcttcctgtcttacaaaggacagaggctgttgagaatggaatttagttctctctttctctgctgatgtcatattatgntttacaattatgattgaagtttttcccccttttacatagggtatagngtcccttaggttntnccnccnaaggaggnncattnnttaggggctttnaaaaaggaatttttccnccccctttt

SEQ ID NO: 117516 - DNA, 439 bp, Arabidopsis thaliana
  unsure (1)..(439): unsure at all n locations
ataaaaaactcgacgaaaatcccagtgctaggccatgctgatggaatctgtcatgtatatgttgataagtctggtaaactggacatggcaaagcgcattgtttccgatgcaaagttggactatccagcagcctgtaatgcgatggaaacccttcttgtacataaagatttggagcagaatggttttctcgatgatcttatttatgtnctgcaaaccaaaggcgtcactttgtatggtgggccaagagcaagtgcaaaactgaatatnccggaaacaaaatcatttcaccacggcgtacagttccaagggcctgcaccgttgaaattgtaggaggccggtttatggggtctattaggtccatatttcncccaccatgggaaggggcacaccacttggtttcccataggtgccgggaggtttgttaaggtggcaggaattt

SEQ ID NO: 117517 - DNA, 439 bp, Arabidopsis thaliana
  unsure (1)..(439): unsure at all n locations
ggaagatagtgaagtagcagaaatattcctccgccaagtggacagtgctgctgttttccacaatgcaagcacaagattctctgatggttttaggttcggacttggtgctgaggtgggaataagcacaagcaggattcatgcccgtggtccagttggagttgaaggattattgacaacaagatggataatgaggggaaagggacaagttgtggatggagacaatggaatcgtttacacccataaggatcttcctgtcttacaaaggccagaggctgttgagaatgggatttaggtccccccttcctctgctgatggccaaattaaggtttaccaattttggattgaaggtttttnccccccttttaacatagggttttaggggtccctggagggttggtcccccccttagggaggncctcatttccttaaaggggccttt

SEQ ID NO: 117518 - DNA, 731 bp, Arabidopsis thaliana
ttttttttttaagaataacaatctttattaaacaaatccaacaaattatatacattgcacaaaactcagacgagaaataaagaactcaatgaaaattgaccaatgtcaccactcaccaacacgagagggcgtttctagcaaaatcagaagtcacaagaggaaatctgcaaaaacctcaacattgagaggagaagcaaccaaataaatgaaagagataaaacaatctttttcagtttctcctctgtttcttttcttcattctttctgcaccacgcgtccgctgatgcaattccggagactgttggaggtaaactcataggacttgtgacctcaagagaggagattcctgatttgctcaagcttgatgacgttattgatcttgtgatcccaagaggcagcaacaagcttgtttctcaaataaaaaactcgacgaaaatcccagtgctaggccatgctggtatgtttataagttcagttccattaagttcttaagttggattggcctagagagaacatggcttattttttgggtgtttccagatggaatctgtcatgtatatgttgataagtctggtaaactggacatggcaaagcgcattgtttccgatgcaaagttggactatccagcagcctgtaatgcgaatggaaacccttcttgtacataaagatttggagcagaatggttttctcgatgatcttatttatgttctgcaaaccaaaggcgtcactttg

SEQ ID NO: 117519 - DNA, 829 bp, Arabidopsis thaliana
  unsure (1)..(829): unsure at all n locations
atgatactgccnnnnnnnnnnnnnnnnnnnnnnnnnnnnnnnnnnnnnnnnnnnnnnnnnnnnnnnnnnnnnnnnnnnnnnnccacgcgtccgcccacgcgtccgccctgttccatcaagatgctcatttatgggctccggtcgtagatactacttctcgtgacatggcagttgctgcaagggaaagctcaagaaagcttcaggccttatcttcagaagataggaaacaaattctacacgacattgccaatgcccttgaagtaaatgagaaaacaattaaagctgagaatgatttagatgttgctgcagcacaagaagctggatatgaagagtctttggtagctcgcttagttatgaagcctgggaagatctcaagccttgcagcttccgttcgccagctagccgaaatggaagatccaataggccgtgtattaaagaaaactcaggttgcagatgatcttattttagagaagacctcatcaccattaggcgttcttctgattgtttttgaatcccgacctgntgcacttgtacagatagcttcacttgccatccgtagtggaaatggtcttctgctgaagggtggaaaggaggcccggcgatcaaatgctatcttacacaaggtgatcactgatgcaattccagagactgttgggggtaaactcattggacttgtgacttcaagagaagagattcctgatttgcttaagcttnatgacggtatcggtcttgtgatnccaagngggagcaacaagntttnttacctccggtaaaaaaattcnttcaaaaannccccntggttanggcaaaaccntattngggatntttc

SEQ ID NO: 117520 - DNA, 1809 bp, Arabidopsis thaliana
  unsure (1)..(1809): unsure at all n locations
tcgtctcctccctcagccatcccctctgagcttataaaaccttcatggcatttgcgcacttctgcagcatccactgtttccttaaaatcgggaaacaacaagagcttcttctccttgttattggattgccttttgccagcctttgttttagtcagttttctcctcattaacttctgtcggtacagaatctctctccaggctggtgaactcttgcagctttctcagtgattctgtatcgatttttcccgtgtaaattatggtttcctctcagcgtcctgtccccaacaaaatccagaaacagcaatatctatccatcagcccttcaaattctgtcttgaaagatgatgttgaacttgagttctctgatgtgtttggtccactccccgaagaggccaatgatattgcttacgacgagcctgctgttgtctacagtcgatcccactccttggttggcccgtgttcgctcgatagtcattctttgaagctgaccaagctcaccttactagagactgaggactcaattgacttggtggagtgtctcgaaggtgaatctttaaaagaaaatgatgatttctctggtaatgacgacagtgacaatgagaaagctttagagggagatctggtgaaagtctcaggtgtagtaggcatagatgattttgaggttatgaaggttgttgggaaaggtgcgtttgggaaagtctaccaggtgaggaaaaaggagacctctgagatatacgctatgaaagtcatgaggaaagatcacattatggagaagaaccatgctgaatacatgaaagctgagcgcgatattcttacaaaaattgatcacccattcattgttcaacttaaatactcttttcagaccaagtacaggctgtatcttgtgctcgactttataaacggaggtcatcttttcttccaactctatcaccaagggcttttcagagaggacttggctcgagtgtacactgcagaaatcgtctctgcagtttcccatctccatgagaaaggcataatgcacagagatctgaaacccgaaaacatactcatggatacagatggccacgtgatgctaacagattttggtttagcaaaggaatttgaagaaaacacaagatcaaactccatgtgcggaactacggagtatatggcacctgaaattgttcgaggaaaaggacatgataaagcagctgactggtggagcgtagggattcttctgtatgagatgctcacaggaaagccaccgtttctcgggagcaaaggaaagatacagcagaaaattgtgaaggacaagatcaagcttccgcagtttctgtctaatgaagctcatgcaatactgaaagggctgctgcaaaaagagccagaaaggcgacttggaagtggactgagcggagcagaggagataaaacagcacaaatggttcaagggaataaactggaagaagctggaggctagagaagtgatgccaagtttcaagccggaagtatcgggaaggcaatgcatagcaaattttgacaagtgttggactgacatgtctgttttggattctccggcgagcagtcccagttcggatcctaaggccaacccttttaccaatttcacttacgtcaggcctcctccttcattccttcaccagtccacaactactttgtagatttactatatttttatgtagttcctacttctttggttgttgtttccttctgacacatgaacattaaagaaaactttggttaccaagacgcttaatttataattgattttatgagattgttattgattgagattnnnnnnnnnnnnnnnnnnnnn

SEQ ID NO: 117521 - DNA, 2085 bp, Arabidopsis thaliana
gttttactctatatctggatttgtttgaaaattgcttgtgttatgcgccagctttttccctaatatatagactaggtcttaattacagatattagagttcgtttcctcgagggtttctttcgacctcgtgtcctggtgaaattttggaattctaaggctttggggttttatttgggaggggatgatcatctaaaggatattcgggcggtgtcgtgttttcttaatctcaattctgttgactttagctttgcgcttaaagtactttgatggcattgggacacttgtgcagcatccactgtttccttaaaatagggaaacaagaagagcttcttgtcctagatattggtttgcctattcccagtttcttcctcattaactttattggtagcagagcctcatccatctggtgaacttgtgaagcttcctctgtgattcttttggcgattggttagaaatatggtttcttctcagtgttctgttgcaaacaaaaaccagactgggaagccgtttcagaaacatctatctttatccatcagccctccaaaatctgtcttgggtgataaccttgagcttcaattctctgatgtctttggaccaatgcctgaagctaactctgaagaggcctgtgatgttgcttacgacgagcctgctgttgtctacagtcgatcccactcattggttggcccgtctttggttgttagccattctttgaagatgaacaagctcactttacgagaaactgaggactcagttgacttggtggagtgtgttgaaggtgaatcgataaaagagaacgatgaattctctggtaatgatgacactgacagtgagaaatctccagaggaggtctcaggtgtagtaggcattgaggactttgaggtattgaaggttgtgggacaaggtgcatttggaaaagtgtaccaggtgaggaaaaaagacacgtctgagatatacgcgatgaaggtcatgagaaaagataaaattgttgagaagaatcatgctgaatacatgaaagccgagcgcgatattctaaccaaaatcgatcatcctttcattgtgcaacttaaatactcttttcagaccaaatacagattgtatcttgttcttgactttataaacggaggtcatcttttcttccagctctatcaccaagggcttttcagggaggacttggctcgtgtgtacactgcagaaatcgtctctgtagtttcccatctccatgagaaaggcataatgcatagagatcttaaacctgaaaacatactcatggacgtagatggccatgtgatgttaactgattttggtttagcaaaagaatttgaagaaaacacaagatcaaactccatgtgtgggactacggagtatatggcccctgagattgttcgtggaaaaggacatgataaggctgccgactggtggagtgtaggaatccttctgtatgagatgctcactggaaagccgccgtttctcgggagcaaaggaaagatacagcagaaaatcgttaaggacaagatcaagcttccacagtttgtgtttaatgaagctcatgccttgctgaaagggctgctgcaaaaagagccagaaaggagactgggaagtggaccgagcggagcagaggagataaaaaaacacaaatggttcaaggcgataaactggaagaagctggaggctagagaagtacaaccaagtttcaagccggcggtttcgggaagacaatgcatagctaattttgacaagtgttggactgacatgtctgttttggattctccagcaagtagtcccaactctgatgctaaggcgaacccttttacaaacttcacatacgtcaggcctcctcattcattccttcatcggaccacatccaacttgtagatgaactataatatgttatcccccgcttctgtttttgtaaaccgaaacatatgaatatgcacaaaatcaacggttgtttgaagaaacctatttctcgatttaatatattatactagataagacattcctattaaaaaaaaaaacaaaaaaagggcggccgctctagaggatccaagcttacgtacgcgtgcatgcgacgtcaaagtcttctat

SEQ ID NO: 117522 - DNA, 2085 bp, Arabidopsis thaliana
  unsure (1)..(2085): unsure at all n locations
ctctctctatctatccccatttccatggaagcaagcagatgtgttcttacatctctttctctctctacagccttacatgaacagtgactgtnctctctctttccctctccttccttttttcttctacttctccttccctttgcttcgaaaagggtatctcgtgatctttatcgctcaaaaatcttcactttcagatcaggccactcgttgatggaatctgtgacagtattgattactagagagtaaagacaagttctttaaatctcagggcatggggaattggtgtttaagattgctctgtgttaatgatggcttcaaaaactccagaaggatcacttaccaattccagtcaaagtatgtcaatcaacactttagcagatcaagtatcttcgagtttgtctttcgctgatccaagtagtgatggcaaaaccggtaatagtaagatcaacgagcaaggtgagagtggaaagagtagcacttgtagaccaagtacaagcagtgatataagcgatgagagcacttgtagcagctttagtagcagtatcaacaaacctcacaaggctaatgatgtgagatgggaagctattcaagctgttagaactaaacatggtggtttgggtttgaatcattttaggctcttgaagaggttaggatgtggagatattggaactgttcatcttgctgagttgaatggaactaggtgttattttgcgatgaaggttatggataaaactgctttggctagccggaaaaagcttcttagggctcaaactgaaagagagatattgcagtgtcttgatcacccgtttcttccgactttgtatagtcattttgagacagagaagttctcttgtttggtgatggagttttgtcctggtggtgatttgcatacactaaggcagagacaacccgggaaacgcttcaccgagcaagcagctaagttttatgtcgcggaagtgcttcttgcaatggaatatttacacatgcttgggatcatttaccgtgatctgaaacccgagaacgttcttgtgagagatgatgggcacgtgatgctttcggattttgatctctccctgagatgtactgtgagcctctctatagtcagatcagctaatgttggatccgaaggcttgtcgaagaattcggtttcttgctcgcaacaacctgcatgcatccagcaaccatcttgcatctcaatggctccaacatcttgcttcggtcctcggttcttctcatcgaaatccaagaaagacaagaaaccgaaaaccgaaaacgggaaccaccaagtaactccgttaccagaactcgttgcagagcccacaggcgcccgttctatgtcttttgttggcacacacgagtacttagctccagagatcatcaaaggtgaaggacatggaagtgcagttgattggtggacctttgggatctttctttatgaactattgtttggtaaaacaccgtttaaagggtcaggaaatcgagcaacgctcttcaacgtggttggtcagcctcttagattccctgaatctccggttgttagcttcgcagctagggatttgataaggagtttgcttgtgaaggagccacaacatagattagcttataagcgtggagcaacagagataaagcaacatcctttctttgaaggagtgaattgggctctggttcgatgtgccagtccaccggagattcctaaaccggttgatcttgaagctttgaatcctactcctactgtgccagcagccgcatcttcgagtgtaagatctgatcagagtaattatcttgagtttgatttcttctgaagaaactgtttccacagttgatgattctcattattgtttctttgcaaattctgtttagtgttttctacaaatgtgtttctttttttttcttctttttaattttcacgtcttggaaaaagttatgagatttgtaatcattcttcaaagttgtgagacagtctctgtaccatcttcttgagtttaatgttagacacgaaccattgagnnnnnnnnnnnnnnnnnnnnnnnnnnnnnnnnnnnnnnnnnnnnnnnnnnnnnnnnnnnnnnnnnnnnnnnnnnnnng

SEQ ID NO: 117523 - DNA, 1961 bp, Arabidopsis thaliana
ctgtttcttgtttttctctctcgcttaactttcacaagaaaaaaaaaagatgaaagaatcattcaaagtgtgtttctgttgtgtaagaaacttcaaggtgaaatcaagtgagccacctgaagaaatcaagaaccttttccatgattactctcaagacgacaggatgtctgctgatgagatgctcagattcgtgatccaagttcaaggagaaacacacgctgatatcaactacgtgaaggatatcttccacagacttaaacatcacggcgtttttcatcctcgtggaattcatcttgaaggattctaccgttatcttcttagtgatttcaactctccattgcctctgacccgcgaggtttggcaagatatgaatcagccattatcgcattacttcttgtacacgggacataactcttacttgactgggaatcagttgaacagtaatagcagcatcgaaccgattgtgaaagctctgagaaatggagttcgtgtcattgagcttgatttatggcctaactcttcaggaaaagaagctgaagttcgtcatggagggacgttaacgagtcgtgaagatctgcagaaatgtcttaacgtggttaaggagaacgcgtttcaggtgtctgcttatcctgttgtgcttactttagaagaccatttaactccaattcttcagaagaaagtcgctaagatggtgagtaagacgtttgggggatcattgtttcaatgtacggacgaaactacagagtgttttccttcaccagaatcactcaagaataagatcttgatctcaacaaagccaccaaaagagtatcttcagacccaaatctcaaaaggttcaacaacggatgaatccactagagctaaaaaaatttcggatgcagaagaacaagttcaagaagaagatgaggagagtgtagcgattgaatacagagacttaatctcgattcacgctgggaaccgcaaaggagggttgaagaattgcttgaatggagatcctaaccgagtcatacggttaagcatgagtgagcagtggcttgagactctggcaaaaacccgtggacccgatttagtaaagttcacgcagcggaatcttttgaggatatttcccaagactacacggtttgactcatctaactatgatcctctcgttgggtggattcatggggctcaaatggttgccttcaatatgcaaagccatgggaggtatctgtggatgatgcaaggaatgtttaaagccaatggtggatgtggctatgtgaaaaagcctgatgttttgctctccaatggtcctgaaggtgaaatctttgacccttgtagtcaaaacctcccgatcaagacaactcttaaggtgaagatctacactggagaaggatggaatatggactttcctttagatcactttgaccgatactctcctcctgatttctacgcaaaggtcggaatcgcaggggttccattggacacagcaagttacagaacagaaatagataaagacgaatggtttccaatttgggacaaggagtttgagttcccattacgtgttcctgagttatctcttctgtgtatcacagtcaaagattacgacagtaacactcagaacgatttcgctggccagacatgttttccgttgtcggaggtaaggccaggtattcgtgccgttcggctccacgatcgtgccggagaggtctacaagcacgtgagactgctcatgcggtttgtcttggagcctcgttagcgcttcgtggataatgttcatttcatcactcgtgtcaatgtcggtacacgttttttatgtttgtaatgttaaggtgtcggtatacattagtcagtcatactaagccatacgataataagagatgtgaaaagaaaaaattaaacgtaattaagatcagcaaaattatgaaacgtatgactttaatataaacaatttgtttgaacagttgataaagataattttgttt

SEQ ID NO: 117524 - DNA, 2330 bp, Arabidopsis thaliana
  unsure (1)..(2330): unsure at all n locations
cttattccgacaaggttcaagatcgattaaacattacatggaggagattcactagaaagaaaggaaaaaaatctctttgtctttgcagatgcgacacgcaaaacgacgattctgatctcgcttgtctgatttcaaaaacaatgagaagatagttctgattatataacacacaaaccctacttcattccttcatcatcgtctccaatcattacccaaagatccgtctttttctttacttcatgtcgaagcaaacgtacaaagtgtgtttctgctttcgccggaggtttcgttacactgcatcggaggcaccgcgtgagatcaagaccattttcgaaaagtactcagagaatggagttatgaccgttgatcatctccacaggtttctgatcgatgttcagaaacaagataaagccaccagagaagatgcacagtcaattatcaattctgcatcttctcttcttcatcgtaatggtctccatcttgatgctttcttcaagtacctctttggtgataataaccctcctcttgctctccataaggtgcatcatgacatggatgctcctatatcgcattatttcatattcactggtcataattcttatctgactggtaatcagctgagcagtgactgtagtgaggtacctattattgatgcgttgaagaaaggtgttagagtcattgaattggatatatggcccaattccaacaaagacgatattgatgttcttcacggaatgactctcactacacctgtggggttgatcaaatgtctcaaagctatcagagcacatgcctttgatgtatctgactatcctgttgttgtaactcttgaagatcatcttactccagatcttcagtctaaagttgctgagatggttactgagatatttggggaaattctgtttactcctcctgtgggagaatctttgaaggagttcccatcgccaaactctttaaaaagacgtattatcatctcaaccaaacccccaaaagagtacaaggaaggaaaagatgtggaagtggtgcagaaaggtaaagacttgggggatgaagaagtttggggaagagaagttccgagctttattcagaggaacaaaagtgaagctaaggatgacttagatggaaatgatgatgatgacgatgatgatgatgaagacaagtctaagattaatgcaccaccccagtataaacatttgattgcaatccatgctgggaaaccaaaaggcggaattactgagtgtttaaaggtagatcctgacaaggttagacgccttagcttaagcgaagaacaacttgaaaaggcagcagaaaaatatgcgaagcagattgtgaggtttactcagcacaatttgctgaggatatacccaaaaggaactagagtcacatcatcaaattacaacccgttggttggctggagccacggtgctcaaatggtggctttcaatatgcaggggtatggaagatcattgtggctaatgcagggaatgtttagagccaatggcggatgtggctacatcaagaaacctgaccttctgctgaaaagtggttcggatagtgacatatttgacccaaaagctactctacctgtgaaaacaacacttagggtaactgtatacatgggagaaggctggtactttgatttccgccacacacactttgaccaatattcaccgcctgacttctatacaagggttgggatagctggagttccaggggatacagtaatgaagaagacgaaaacactggaggataattggataccagcttgggatgaggtgtttgagttcccattaaccgttccagagctggccctgctacgattagaagtgcatgagtatgacatgtcagagaaagatgattttggaggacagacatgcttaccggtttgggagctaagcgaaggaataagagcatttcctttacatagccggaaaggagagaagtacaaatccgttaagcttctcgtgaaggtggagtttgtgtgagacatgattaagaaagatacagcatttaaacttgtctggtaggtttgagtgccacagagtttgtgaatttggaggatttgtatgtgtgagagagaatgtatgcttgatttgttgtttgtaatattatgtacataaaagacgaaagtgagagagagagagacggtcttgtatcgtgtgttgttgtattattatgtagtagtctcgtgtaacacttgaatcgtatgatgatttgtggtttttgtgtaaaaaaaaaaaaaaaaagggcggccgctctagaggatccaagcttacgtacgcgtgcgatgcgacgtcnnnnnnnnnnnnnnnnnnnnnnnnnnnnttcat

SEQ ID NO: 117525 - DNA, 2211 bp, Arabidopsis thaliana
  unsure (1)..(2211): unsure at all n locations
cggacgcgtgggtctatctttacgtcataataattacaatttattcgtaaaaagatgagttttgttaattacttctcttattataatcaaagttttgatttttattttccaataagtcgccgggaaaagtaaaataaaaagccgtcacgtctccgataaataatagagtatcgttagataggtagcttcaacgtaaggaatctaaattggttcagctcaaaaaacgaaaacgatgggttccatcgaagaagaagcaagacctctcatcgaagaaggtttaattttacaggaagtgaaattgtatgctgaagatggttcagtggactttaatggaaacccaccattgaaggagaaaacaggaaactggaaagcttgtccttttattcttggtaatgaatgttgtgagaggctagcttactatggtattgctgggaatttaatcacttacctcaccactaagcttcaccaaggaaatgtttctgctgctacaaacgttaccacatggcaagggacttgttatctcactcctctcattggagctgttctggctgatgcttactggggacgttactggaccatcgcttgtttctccgggatttatttcatcgggatgtctgcgttaactctttcagcttcagttccggcattgaagccagcggaatgtattggtgacttttgtccatctgcaacgccagctcagtatgcgatgttctttggtgggctttacctgatcgctcttggaactggaggtatcaaaccgtgtgtctcatccttcggtgccgatcagtttgatgacacggactctcgggaacgagttagaaaagcttcgttctttaactggttttacttctccatcaatattggagcacttgtgtcatctagtcttctagtttggattcaagagaatcgggggtggggtttagggtttgggataccaacagtgttcatgggactagccattgcaagtttcttctttggcacacctctttataggtttcagaaacctggaggaagccctataactcggatttcccaagtcgtggttgcttcgttccggaaatcgtctgtcaaagtccctgaagacgccacacttctgtatgaaactcaagacaagaactctgctattgctggaagtagaaaaatcgagcataccgatgattgccagtatcttgacaaagccgctgttatctcagaagaagaatcgaaatccggagattattccaactcgtggagactatgcacggttacgcaagtcgaagaactcaagattctgatccgaatgttcccaatctgggcttctggtatcattttctcagctgtatacgcacaaatgtccacaatgtttgttcaacaaggccgagccatgaactgcaaaattggatcattccagcttcctcctgcagcactcgggacattcgacacagcaagcgtcatcatctgggtgccgctctacgaccggttcatcgttcccttagcaagaaagttcacaggagtagacaaaggattcactgagatacaaagaatgggaattggtctgtttgtctctgttctctgtatggcagctgcagctatcgtcgaaatcatccgtctccatatggccaacgatcttggattagtcgagtcaggagccccagttcccatatccgtcttgtggcagattccacagtacttcattctcggtgcagccgaagtattctacttcatcggtcagctcgagttcttctacgaccaatctccagatgcaatgagaagcttgtgcagtgccttagctcttttgaccaatgcacttggtaactacttgagctcgttgatcctcacgctcgtgacttattttacaacaagaaatgggcaagaaggttggatttcggataatctcaattcaggtcatctcgattacttcttctggctcttggctggtcttagccttgtgaacatggcggtttacttcttctctgctgctaggtataagcaaaagaaagcttcgtcgtagtaatgctgttatctatctactttcattacatacaaaagtttgtttctttcaactgtaactgtctctgtatcaataacaacattgctgtgtacttttcctttcaatttcaaaagtttaagtcgcaaaaaaaaaaaaaaaaaacggccgcnnnnnnnnnnnnnnnnnnnnnnnnnnnnnnnnnnnnnnnnnnnnnnnnnnnnnnnnnnnnnnnnnnnnnnnnt

SEQ ID NO: 117526 - DNA, 1783 bp, Arabidopsis thaliana
cacacacacataaacactccacacgctctgcttcgaccaatcaccaaacacgctttaatgactctcacgttttcctcctccgccgcaaccgttgccgttgctgctgcaaccgtaacctcctccgctagggttccggtttatccactcgcttcgtcgactcttcgtggattagtatctttcagattaaccgcgaagaagctgtttctgccgcctcttcgttctcgcggcggcgttagtgtgagagccatgtctgagctagttcaggataaagaatcgtccgtcgcggcgagcattgctttcaatgaagccgccggtgagacgccgagtgagcttaatcattcccgtactttcttggatgcgcgaagtgaacaagatcttttatctggtatcaagaaggaagctgaagctggaaggttgccagcaaatgttgcagcaggaatggaagaattgtattggaactacaaaaatgcagttttaagtagtggagcttccagggcagatgaaactgttgtatcaaacatgtctgttgcttttgatcgcatgcttcttggtgtggaggatccttatacttttaatccatatcataaagcagtcagagaaccatttgactactacatgtttgtccatacatacatccgtcctcttattgatttcaaaaattcgtacgttggaaatgcttctatattctctgagctggaagacaagattcgacagggacacaatatcgtgttgatatcaaaccatcaaagtgaagctgatccggctgtcatttctctattgcttgaagcacaatctcctttcataggagagaacattaaatgtgtggctggtgatcgagtcatcactgatcctctttgtaagccgttcagtatgggaaggaacctcatatgtgtttactcgaaaaagcacatgaatgttgatcctgagcttgttgacatgaaaagaaaagcaaacacacgaagcttaaaggagatggctacaatgctaaggtctggcggtcaacttatatggattgcaccaagcggtggaagggaccgcccgaatccttctactggggaatggtttcctgcaccctttgatgcttcttcggtagacaacatgagaagactggttgaacattctggcgctcctggacatatatatccaatgtctttgctttgctatgacatcatgccccctccaccccaggttgagaaagaaatcggagagaaaagattagttgggtttcacggtactggactatcaattgctcctgaaatcaacttctcagacgtcacagcagactgcgagagccctaatgaggcgaaagaagcatacagccaagctttgtacaagtcggtgaatgaacaatacgagatcttaaactctgcgattaaacacagaagaggagtagaagcatcaacttcaagggtctctttgtcacaaccttggaattagtctctcgttttagggatacacaaacacaatcaatggaaaatactcaaaaaaaaaaatggagatattattcacacgttgtcctagggagtttttttttttttttcaaacgagttccaaagcctccttgaaacaacaagaaaaaaaaaaacaggtacgttgttggtttctaacgtaggaagaagaagaagttggtttgtgtacatatgaatagtgagagaaaacaaactcttgctaggctcttagatctcacatatggtttcatatgtaatattcttttcttttttggaggtttcctactatatagagccgaataattcacaatcccaatttatgcctcttccttctc

SEQ ID NO: 117527 - DNA, 1171 bp, Arabidopsis thaliana
acgaccacacaaagtaattacaatggaacacagaaaggtaagagggaacggcatagacattcacgtagcaatccaaggtccctccgatggtcctatagtcctcctcctccatggtttccctgagctttggtactcatggcgccaccagatccctggactcgccgctcgtggctaccgtgccgtcgctcctgacctacgtggttacggtgactccgatgctcccgctgagatctcttcctacacatgcttcaacatcgttggtgacttaatcgccgtcatatccgccttaaccgcctcagaggatgagaaggtctttgtggttggacatgattggggagctctcatcgcttggtatttatgtctcttccgaccagatagagtcaaagctctggtcaacctcagtgttccgttctctttccggccaaccgatccatcggtgaagcccgttgatcgcatgcgtgctttctacggcgatgattactatatctgcaggtttcaggaatttggagatgtagaagctgagattgcagaggttggaacagagagagtcatgaagagactactcacttatagaactcctggaccggtaattatcccgaaggacaaaagtttttggggatccaaaggcgaaactataccactcccgtcttggctaacggaggaagatgttgcttacttcgtcagcaagtttgaagagaaaggcttctctggtccagtcaattactaccgtaacttcaacaggaacaatgagttgttgggtccatgggtgggaagcaaaatccaggttcctacaaagtttgtgataggggagcttgatctggtctactatatgcctggtgtgaaggaatatatacatggtccccagtttaaggaagatgtgcctttgcttgaagagcctgtggtcatggaaggagtggctcacttcattaaccaagaaaagcctcaggagattctccaaattatccttgatttcatctccaaattctaatgttgctttcccttaaattactcttttaatcaagttccataataagttgaattatgaggatatacatcctcatgtatggttgtatcatcctataacctatataatctatgtatggatgcgtgcatattatttgacattcttttaagttataataatgtaatgtgactcatgtgaaaaaaaaaa

SEQ ID NO: 117528 - DNA, 866 bp, Arabidopsis thaliana
  unsure (1)..(866): unsure at all n locations
caacagtttttgtctcattcccgatctgaatacaacgacgacgagccaaggcttcaactttcagcggcgatgaaactgctcctttcttcggattccttggcgctgccgccgctctcgttttctcctgtatgggagcagcgtacgggacagcgaagagcggggttggtgtagcgtcgatgggtgtgatgagaccagagcttgtgatgaaatcgattgttcctgttgttatggctggagttttaggtatttatggtttgatcattgctgttatcatcagtaccggaatcaaccctaaggccaagtcttactatctattcgatggctatgctcatctctcttccggtcttgcttgtggtctcgctggtctctccgccggtatggctattggaattgtcggcgatgccggtgttagagcgaatgcacaacaacctaagttgtttgtgggaatgattctgattctcatctttgctgaagcacttgccctgtacggtctcattgttggtatcatcctctcttctcgagctggtcagtctagagccgagtgaaatccagagtatctctctctcttatcggctacagtccttgtaatgttttggtatattttactctgttttcttttgtggtatgtttttgagtttctcatgaaaacaagcaacatgggtgaaatttatttgacttttgtttcaaaacccatttcttttctttttcatttgcacactatatatggatacatcaataagtaataaaatatgacggttccatggaaaaaaaaaaaaaaaaaaaaaaaaaaagggcggccgctctagaggatccaagctacgtacgcgtgcagtgcgacgtcatagatctnctatagtgcgacctaa

SEQ ID NO: 117529 - DNA, 707 bp, Arabidopsis thaliana
gggtcgacgcaagcctctagactacatcggagcaacagtcatcaaagagccaatggcttcttcaggtttcagcggcgatgaaactgcgcctttcttcggattcctcggcgccgccgctgcgctcgttttctcctgtatgggagcagcgtacgggacggcgaagagtggagttggagttgcgtcgatgggagtgatgagacctgaacttgttatgaaatcgattgttcctgttgtcatggctggtgtgttaggtatttatggtttgatcatcgctgttatcatcagtactgggattaaccccaaggccaagtcttattacctattcgatggctatgctcatctctcttctgggctagcttgtggtcttgctggtctctctgctggtatggctattggaatcgtcggtgatgctggtgttagagcgaatgcgcaacaaccgaagctgtttgtgggaatgattctgattctcatctttgcggaagcgcttgcactgtatggtctcattgttggtatcatcctctcatctcgagctggtcagtctagagctgagtgaaagaagtggagacttattgttattatcatcatgtctcatatgagaagtttcatgtgatgtgtagcttctcctttcagttctttttcgtgagtttgagttctgttattattagacacacttgtgtaacttgggtgaaattatatgactcggtatc

SEQ ID NO: 117530 - DNA, 409 bp, Arabidopsis thaliana
gggagcaacagtcatcaaagagccaatggcttcttcaggtttcagcggcgatgaaactgcgcctttcttcggattcctcggcgccgccgctgcgctcgttttctcctgtatgggagcagcgtacgggacggcgaagagtggagttggagttgcgtcgatgggaatgattctgattctcatctttgcggaagcgcttgcactgtatggtctcattgttggtatcatcctctcatctcgagctggtcagtctagagctgagtgaaagaagtggagacttattgttattatcatcatgtctcatatgagaagtctcatgtgatgtgtaacttctcctttcagttctttttcgtgagtttgagttctgttattattagacacacttgtgtaacttgggtgaaattatatgact

SEQ ID NO: 117531 - DNA, 2871 bp, Arabidopsis thaliana
cttagatttatctttgagtcccgaaacatcgaggaacgccttcgaatccctctctctctgtgtgtgttctctgtgttctctctctcgcgcgaagcggttctctttcttttgtttatttgtttttatttgtttttctcttatacggaggagagaagatggtggcgcctgctttgttaccggagctctggacggagatccttgtaccgatttgtgcggtgattggtatcgccttttcgcttttccaatggtacgttgtatctcgcgtgaaactcacctctgacctcggcgcatcgtcttccggtggagctaacaatgggaagaatggatacggtgattatctaatcgaggaagaggaaggtgttaatgaccagagtgttgtcgctaagtgcgctgagattcagactgctatttccgaaggtgcaacttcattcctattcacggagtacaaatatgttggtgtcttcatgattttctttgctgctgttatctttgttttcctcggctctgttgagggattcagcactgataacaagccttgtacttacgacaccaccagaacctgcaagcctgcattggctactgcagctttcagtaccattgctttcgtgcttggtgctgttacctctgttctatctggtttccttgggatgaagattgctacatacgctaatgctaggaccactttggaggcgaggaaaggtgttggaaaggcgttcattgttgcattcaggtctggtgctgtgatgggtttccttcttgcagcgagtggtctattggtgctttacattactatcaatgtgttcaagatctattacggagatgactgggaaggtctttttgaggctattactggttatggtcttggtgggtcttccatggctctctttggccgtgttggtggtgggatctacactaaggctgctgatgtcggcgctgaccttgtcggtaaaattgagaggaatattccagaggatgatccaagaaacccagctgtcattgctgataatgtcggtgacaatgttggtgacattgctggtatgggatctgatctctttggatcatatgctgaagcatcatgcgctgctcttgttgttgcctcgatctcatctttcggaatcaaccacgacttcactgccatgtgctacccattgctcatcagttcaatgggaatcttggtttgtttgatcacaactctctttgccactgacttctttgagattaagcttgtcaaggagattgaaccagcattgaagaaccagctcattatctcaactgttattatgactgttggtattgctattgtgtcatgggttggcttaccgacctcctttaccatcttcaactttggaacacaaaaagttgtcaagaactggcagctattcctttgtgtttgtgttggtctttgggctggactcattattggtttcgtcactgagtactacactagtaacgcctacagccctgtgcaagatgttgcagattcatgcagaactggtgcagctaccaatgttatcttcggccttgctcttggttacaaatccgtcattattccaatctttgctattgctatcagtatattcgttagcttcagctttgctgctatgtatggtgttgctgttgctgctcttggtatgctcagtaccattgccactggtttggcaattgatgcttatggtcccatcagtgacaatgctggtggtattgctgaaatggctggaatgagccaccgcatccgtgaaagaactgatgctcttgatgccgctggaaacaccactgctgctattggaaagggatttgccattggctctgctgccctagtctccttggctctctttggtgcctttgtgagccgtgcagggatccacaccgtagatgttttgacccctaaagttatcattgggctccttgttggtgccatgcttccttactggttctctgccatgacaatgaagagtgtgggaagtgcagctcttaagatggttgaagaagttcgcaggcagttcaacaccatccctggacttatggaaggaaccgcaaaaccagactacgccacatgtgtcaagatctccaccgatgcttccatcaaggaaatgatacctcctggttgccttgtcatgctcacacctctcattgttggtttcttctttggagttgagaccctctctggtgtcctcgccggatctcttgtatccggtgttcagatcgccatatcagcatctaacactggtggtgcctgggacaacgccaagaaatacatcgaggctggtgtatcagagcacgcaaagagccttggaccaaagggttcagagccacacaaggcagctgtgattggagacacaattggagacccattgaaggatacttcaggaccttcattgaacatcctcatcaagctcatggctgttgagtctcttgtctttgctcccttcttcgccactcacggtggtatccttttcaagtacttctaaactcaatccgagggaagaagatgacgatgatgaagaagaagaagatgatgatggcgatcgattctaaactttcttttttaccattcttattttcgtttaccgtaggtggttaaaaaaccttttttgttgatgaggctcatttaaagaaccaaccaaatgatgtttctttctctcactctctgtctttctgttttctttttgttctgtttagaatttagaaatccaccaagtattcggtcgagacttgttttagccgttactttctgctgcttatatttcctaaattggttgtcttcttcgagacataattggaatttattgttactgttagtctaaaaaaaaaaaaaaaataaattaatatatttattatattttataaatattttataatttttaataatat

SEQ ID NO: 117532 - DNA, 853 bp, Arabidopsis thaliana
tcctacgactcactatagggaacagctggtacgcctgcaggtaccggtccggaattcccgggtcgacccacgcgtccgccagactacgccacatgtgtcaagatctccaccgatgcttccatcaaggaaatgatacctcctggttgccttgtcatgctcacacctctcattgttggtgtcctctttggagttgagacccttctctggtgtcctcgccggattctcttgtatccggtgttcagatcgccatatcagcatctaacactggtggggcctgggacaacgccaagaaatacatcgaggctggtgtatcagagcacgcatagagccttggaccaaagggttcagagccacacaaggcagctgtgattggagacacaattggagacccattgaaggatacttcaggaccttcattgaacatcctcatcaagctcatggctgttgagtctcttgtctttgctcccttcttcgccactcacggtggtatccttttcaagtacttctaaactcaatccgagggaagaagatgacgatgatgaagaagaagaagatgatgatggcgatcgattctaaactttcttttttaccattcttattttcgtttcccccccccgggttaaaaaaccttttttgttgatgaggctcatttaaagaaccaaccaaatgatgtttcgttctctcactctcggtccttctgttttctttttgttctgtttagaatttagaaatccaccaagtattcggtcgaaaaaaaaaaaaaaaaacaccaaccccaagggcggccgctctagaggatccaagcttacgtacgcgtgcaggcgacgtcataactcttctatagtggtaccta

SEQ ID NO: 117533 - DNA, 583 bp, Arabidopsis thaliana
  unsure (1)..(583): unsure at all n locations
gcccnncnanttctttttngccgctnatggncctggcctgnaatncctgggctacccacngngccgggtgttcagatcgccatatcagcatctaacacctggtggtgcctgggacaacgccaagaaatacatcgaggctggtgtatcagagcacgcaaggagccttggaccaaagggttcagagccacacaaggcagctgtgattggagacacaattggagacccattgaaggatacttcaggaccttcattgaacatcctcatcaagctcatggctgttgagtctcttgtctttgctcccttcttcgccactcacggtggtatccttttcaagtacttctaaactcaatccgagggaagaagatgacgatgatgaagaagaagaagatgatgatggcgatcgattctaaactttcttttttaccatccttattttcggttaaccgtagggggttaaaaaaccttttttgggtgatgaggcccattttaagaaccaaccaaatggtggttccttcccccaaaccccgggcttccggttcccctttggccccggttagaatttagaatcccccaagaatccggc

SEQ ID NO: 117534 - DNA, 689 bp, Arabidopsis thaliana
  unsure (1)..(689): unsure at all n locations
tncaacnccnncngctctacctggngtcctggncaaccccaggatnccncggngctggttttcagngcncgcaaagnccctggnccnaagggttcagngccnccaccaggcagctgtgattggagncncaatggggnccccatggaggatacttcaggaccttcattgaacatcctcatcaagctcatggctgttgagtctcttgtctttgctcccttcttcgccactcacggtggtatccttttcaagtacttctaaactcaatccgagggaagaagatgacgatgatgaagaagaagaagatgatgatggcgatcgattctaaactttcttttttaccattcttattttcgtttaccgtaggtggttaaaaaaccctttttttgttgatgaggctcatttaaagaaccaaccaaatgatgtttctttctctcactctctgtctttctgttttctttttgttctgtttagaatttagaaatccaccaagtattcggtcgagacttgttttagccgttactttctgctgcttatatttcctaaattggttgtcttcttcgagacataattggaatttattgttactgttaaaaaaaaaaaaaaaagggcggccgctctagaggatccaagcttacgtacgcgtgcatgggacgtcatagtaattctatagtgtcgtcctaaataaatcg

SEQ ID NO: 117535 - DNA, 1504 bp, Arabidopsis thaliana
  unsure (1)..(1504): unsure at all n locations
atgatactgccgggaannnnnnnnnnnnnnnnnnnnnnnnnnnnnnnnnnnnnnnnnnnnnnnnnnnnnnnccggaaattncccacgcgtgcacccacgcgtccggcaaaaacaaaaccaacaaggaacttgtctctctctctggctctctttctcttaacgtgatcataacgtgattcgaaaattggatatagataggtttcttgttggatcttgatccctctggaaaaggaggggagaatagcagttcatgatgggattttgtatctgcccgttggagtcacctgcgagattactatggagtacaagcttcttccgccataagatcatgatcttctaatccttcctacttcttcccatctttttaatcatcttctcgctatctctgcttcctctttctctctgtttcctctttctcagaactcagaagtagttgttgttttatttctgttgatcaaaaatggaatccaattcgtttttcttcgatccatctgcttcacacggcaacagcatgttcttccttgggaatctcaatcccgtcgtccaaggaggaggagcaagatcgatgatgaacatggaggaaacttcgaagcgaaggcccttctttagctcccctgaggatctctacgacgatgacttttacgacgaccagttgcctgaaaagaagcgtcgcctcactaccgaacaagtgcatctgctggagaaaagcttcgagacagagaacaagctagagcctgaacgcaagactcagcttgccaagaagcttggtctacagccaaggcaagtggctgtctggtttcagaatcgccgagctcgttggaaaacaaaacagcttgagagagactacgatcttctcaagtccacttacgaccaacttctttctaactacgactccatcgtcatggacaacgataagctcagatccgaggttacttccctgaccgaaaagcttcagggcaaacaagagacagctaatgaaccacctggtcaagtgcccgaaccaaaccaacttgatccggtttacattaatgcggcagcaatcaaaaccgaggaccggttaagttcagggagcgttgggagcgcggtactagacgacgacgcacctcaactactagacagctgtgactcttacttcccaagcatcgtacccatccaagacaacagcaacgccagtgatcatgacaatgaccggagctgtttcgccgacgtctttgtgcccaccacttcaccgtcgcacgatcatcacggtgaatcattggctttctggggatggccttagaaaaccactctgataataaatgtgtgtttatttaagttcaagagtcatcttcttgttgtttccatgttgacgataattgttgactcgtggaataattccgctgttcaacggtatttttatcagttgcattatatgcttttatgaaaaaaaaaaaaaaaagggcggccgctctagaggatccaagcttacgtacgcgtgcatgcgacgtcatagtaatctatagtg

SEQ ID NO: 117536 - DNA, 525 bp, Arabidopsis thaliana
atgatatgccagctactaatcgactcacttagggaaagctggtacgcctgcaggtaccggtccggaattcccgggtcgacccacgcgtccgaaaaggtgcatctgctggagaaaagcttcgagacagagaacaagctagagcctgaacgcaagactcagcttgccaagaagcttggtctacagccaaggcaagtggctgtctggtttcagaatcgccgagctcgttggaaaacaaaacagcttgagagagactacgatcttctcaagtccacttacgaccaacttctttctaactacgactccatcgtcatggacaacgataagctcagatccgaggtacttatacatgggactattatttatctcaacaagattacaaattgaatgatttaccttaattggtccaaaggagaaaaataaaaaaagcatcaagtgaaaagagaatatgcttttcctatttttcaacacaagctgatggagagaatccatcatcatatatatataaattagaggagagactagaaa

SEQ ID NO: 117537 - DNA, 583 bp, Arabidopsis thaliana
  unsure (1)..(583): unsure at all n locations
agcccgcgcgtccgcccacgcgtccgcccacgcgtccgcccacgcgtccgctctgtttcctctttctctctgtttcctctttctcagaactcagaagtagttgttgttttatttctgttgatcaaaaatggaatccaattcgtttttcttcgatccatctgcttcacacggcaacagcatgttcttccttgggaatctcaatcccgtcgtccaaggaggaggagcaagatcgatgatgaacatggaggaaacttcgaagcgaaggcccttctttagctcccctgaggatctctacgacgatgacttttacgacgaccagttgcctgaaaagaagcgtcgcctcactaccgaacaagtgcatctgctggagaaaagcttcgagacagagaacaagctagagcctgaacgcaagactcagcttgccaagaagctttgtctncagccaaggaaagtggctgtttggttncaaaatcgcccgagtcgtttgggaaaaaaaaanaagttttngggnggctnnnggttttttttaaggcccntttngggcccaattttttttaannnggggttccnttgtnntttggcc

SEQ ID NO: 117538 - DNA, 817 bp, Arabidopsis thaliana
attaaagtttgggggaaacgcccaggggtttttccccagtacaccgaagtttgtaaaaacgacgggcccagtaaattgaaatttaaggtggcaactataaaaaaactaataccgttcgcaagccacgcggacgaaaagcttggatcctttaaaacgggccgccccaaaatttttattaccctataaataacaaaaggtcttaacttgatctgtttcataataaagccaaaactcatgtttgttcactccaaacacaaacacagcagtaatcaaaaatcgtctaataacaaaaaggaaatgcaacaaaacagaagaaacaactaagtagtaggcaagattcttcttcactcgtcttcttggctacggagcctagcaagcctgttggtaacaacaacgtctagctgagaagctctctcaacaattgcctttctcttcttagtggagacgttgtgagcaatctcagcacagtaagtcctgttgtgcatcatcaacaactcgagctcacttgtgttgtgaacaacgaatttcttgaatccattgggaagatagtgacgagtcttcttgtcagatccgtaaccaacattgggcatcaaagtcacacctttgaactttcttctcacccttgaatcaataccctttggcctcctccagctttccttgacggtgattctacggtcactctggggtctgatgaacttagcagacctcttcttcacaaccttcttggtaagcaatgggaccgccatatttgcttcttcgtaagatcgatatctccggacgcgtgggtcgacccggtaattccggaagtgcgctgcga

SEQ ID NO: 117539 - DNA, 717 bp, Arabidopsis thaliana
taggtacaactatagcaagagttatgacgtcgcacgcacgcgtacgtaagcttggatcctctagagcggtcgccctttgggggtggtttttttttttttttttgtcctaagattacaaggctcaatcgggtttcgaattcagggaaacaacaaatttgacttttatcccaaaagttcattgctgcaacattgaaacgaatacacagaaggagaacagattacaataatgatgtaagaaagatatataggtcttaggttctcttgacagggtcaaagttggagacgccgacgacgacaccaatgatgacagtgaggacgaggccaccagaagcaatgctgagcaagaaattcttgagggaaggagagattccagaaccagcagcttcagctatctccggaatcaccatcgaagcagtaagagcagccgcggagataccggtcaaagccttgtccatcttgagggccttaacttgaagcctctgtgctctgcctccagttgcaaccaaagccttggatggtttcagaggtaatggcttaaggaaaggagacgaacgggtctggttaagtggtgtgaccaatgacatcgcggaggtagaagccatctcttccgatctctttttggtctctctagattgatctttctgagattccgcgtgccgaattccgagcttacgtacgcgtgcatgcgacgtcaaagctcttctataagtcacctaa

SEQ ID NO: 117540 - DNA, 455 bp, Arabidopsis thaliana
cggacgcgtgggatttaatttcaattttaatttcccaagtgtcctatacaaattgaatcaaaagaaaaatcagcatatgccctaaaagcttaaatggtataaagggtgggtcctatacaaacctcccatgaactgatctcttccttcttctccttcttcttctcttctcactaattttccttcagaaaacttcaacgatcttgtgatattgatatctaaacaagttcttgatctaagctacgaaagttgatctgctcagaattcataataagagttgatcatttgtgggctttgagggtgtgtagacatacatagtaattatatatatgtatatgtatgaggaggaaaggaacaatatcaatagtaagcaagaaggactgagattggagatggcctttcctcaacatggcttcatgtttcagcaactccatgaagacaatgctcataacttacct

SEQ ID NO: 117541 - DNA, 759 bp, Arabidopsis thaliana
  unsure (1)..(759): unsure at all n locations
ntcccntccaaggcccttnaccaatttgcctcagcagttccgacacccaagaatagcatgtgaatgattaatcccatcaaaccctgtgaccccgtgtttatttagttgtatcatgttgaaagagaagactggtttggcctcgtcttagaagtgtgtgtacatagtttcaaaagtcttggcaagnccatacaagagaagagtcaagaatcgaagacagtagattgtgtttgttgttgttgttgttgcattgtgttgctagtgattgtagttccagactatgatttcatttctctggggtgtgggttgttcgtttttttttaacaaaagggcttaacttgatctgtttcatactaaaaccaaaactcatgtttgttcactccaaacacaaacacagcagtaatcaaaaatcgtcttataacaaaaaggaactgccacaaaacagaagaaacttctaagggggggggaagattcttcttcactcgttttcttggctacggaccctaccaagcctgttggtaacaacaacgtctagctgaaaagctctttaaacaattgcctttttttttttaagagaacacgttgggaaccattctcaacacaagaaaggccttggcgaccataataaacaactggagcttatttggggtggagaacaacaaattttcttaactccttggggaaaaatagggcccaccctttttttataaaccccaaccaaatatggggaaaaaagccccgcctttaaatttttttctcccc

SEQ ID NO: 117542 - DNA, 778 bp, Arabidopsis thaliana
  unsure (1)..(778): unsure at all n locations
nnnnnnnnnnnnnnnnnnnnnnnnnnnnnnnnnnnnnnnnnnnnnnnnnnnnnnnnnnnnnnnnnnnnnnnnnnnnnnnnnnnnnnnncggccgcataaaaacgagaacccaagttgtaatatccttcagccactctccaaaaccgcaaaaaaaaaaaaaaaggaggataatccggaatggtttacgccagttaaaaggaaacccctagatgatatcttttagggctttcactcgtcttcctggctacgcaacctaccaagcttgttggaaacaacaacgtctagctgagaagctctctccactatggcctttctcttctttgttgagatattgtgagcaatctctgcacagtaagtcctgttgtgcatcatgagtagctcgagctcagaggtgttgtgaacaatgaacttcttgaatccatttgggaggtagtggcgggtcttcttatcagatccgtaaccaacattgggcatcaaggtgacacccttgaactttcttctcacccgggagtcaatacccttaggcctcctccagctttccttgacggtgattctgcgatcactctggggtctgatgaatttggcagacctcttcttcaccaccttcttcgtaagcaacgggaccgccatatttccttctcttcctcgtaagatcgatatctcaaaagcgactccgtccccttctgtcgtcttctagccgtacgcacgcgtggnnnnnnnnnnnnnnnnnnnnnnnnnnnnnnnnnnnnnnnnnnnnnnnnnnnnnnnnnnnnnnnna

SEQ ID NO: 117543 - DNA, 1544 bp, Arabidopsis thaliana
  unsure (1)..(1544): unsure at all n locations
gaattcaggaaacaacaaatttgacttttatccaaaagttcattgctgcaacattgaaacgaatacacagaaggagaacagattacaataatgatgtaagaaagattggagatggcctttcctcaacatggcttcatgtttcagcaactccatgaagacaatgctcatcacttaccttccccaacctctctcccctcttgtcctcctcatctcttctatggaggaggaggaaactacatgatgaacagatcaatgtcgttcacgggagtatcagatcattatcatctaactcaaaaaagcccgacaacaacgaacaacatgaatgatcaagaccaggtaggcgaggaagacaacctatcagacgatgggtcacatatgatgttaggagagaagaagaagaggctgaatttagagcaagttagggcattagagaagagcttcgagctagggaacaagctggagccagagaggaagatgcagcttgctaaggctttaggattgcagcctaggcagattgcaatatggtttcagaacaggagagctaggtggaagacaaagcagctcgagagagactatgattctctcaaaaaacagttcgatgttttgaaatcggacaatgattctcttcttgcccacaacaagaaactacatgctgagttagtggcattgaagaaacacgaccgtaaagaatcagcaaagatcaagagagaattcgcagaagcttcatggagcaacaatgggagcacagaaaataatcataacaataatagttcagacgctaatcatgtgagcatgatcaaagatcttttcccttcttcgatccgatccgcgaccgcgaccacggcctctacccatattgatcatgagattgttcaagatcaagatcaagggttttgcaatatgttcaatggtattgatgaaacgacgtcggctagttattgggcatggcctgaccagcagcaacaacatcacaatcatcatcagttcaattgatcatattgtctaagaacaacatcatactcatcttgatatcattattatcatcaaaagaaaattccgtagatttttttaataagtattttcaaattatttggcacgtttaaaattaattaaattgggttattatgtttacttgatctgtttcatactaaaaccaaaactcatgtttgttcactccaaacacaaacacagcagtaatcaaaaatcgtcttataacaaaaaggaaatgcaacaaaacagaagaaacaactaagtagtaggcaagattcttcttcactcgtcttcttggctacggagcctagcaagcctgttggtaacaacaacgtctagctgagaagctctctcaanaattgcctttctcttcttagtggagacgttgtgagcaatctcagnacagtaagtcctgttgtgcatcatcaacaactcgagctnacttgtgttgtgaacaacgaatttcttgaatccattgggaagatagtgacgagtcttcttgtnagatccgtaaccaacattgggnattaaagtcacacctttgaactttcttc

SEQ ID NO: 117544 - DNA, 2452 bp, Arabidopsis thaliana
  unsure (1)..(2452): unsure at all n locations
cacacgcgtccgcccacgcgtccgcccacgcgtccgatttaagcatcctaacttcttcttcaaagcttaaaaaccagaaaacaaaaggaagctctctgttcaaatcaaaaagagagatcgtacgcaaaagtttccgatatggctcgctcgtttggagcaaacagcactgttgtgcttgcgatcatcttcttcggatgtttatttgcgttttccactgcaaaagaagaggctacgaagttaggatcagttattgggatagatcttggtaccacttactcttgtgttggtgtttacaagaatggtcatgttgaaattattgccaatgaccaaggaaaccgtattacaccttcatgggttggttttactgactctgaaaggctcattggtgaggctgctaagaatcaagcagctgttaatccagagaggactgtcttcgacgttaagagattgatcgggcgaaaatttgaggacaaggaggttcaaaaggacaggaaacttgtaccttaccagattgtgaacaaggatggtaagccatacattcaagtcaagatcaaggatggtgagactaaggttttcagtcctgaggagatcagtgccatgattctgactaagatgaaggagacagccgaagcctaccttggaaagaaaatcaaggacgctgttgtcactgttccagcttacttcaatgatgctcaaaggcaagctaccaaggatgccggtgttattgctgggctcaatgttgctagaatcatcaacgaacctactgctgctgctattgcctacggtcttgataagaagggtggtgagaagaacatccttgtatttgaccttggtggtggtacttttgatgtcagtgtcttgaccattgataacggagtgtttgaggttctctccacaaatggtgacactcacttgggaggtgaggactttgaccacaggatcatggagtacttcatcaagttaattaagaagaagcaccagaaggacatcagcaaggacaacaaggctcttggtaagctccgaagggaatgtgagagggcaaagagagctctaagcagtcagcaccaagtccgtgtagagattgagtcactctttgatggtgttgatttatctgagccactcaccagagctcgtttcgaggagcttaacaatgatttgttcaggaagaccatgggacctgtgaagaaggccatggatgatgccggtctacagaagagccagatcgatgagattgtccttgttggtggaagcaccaggatcccaaaggttcagcaactgttgaaggacttctttgaaggtaaagagccaaacaagggtgtgaaccccgacgaggctgttgcctatggtgctgctgttcagggtggtattttgagcggagaaggcggtgatgagaccaaagatatccttcttcttgatgttgcgccactcactttaggtatcgagactgtaggaggagtgatgacaaagttgatcccaagaaacacggttattccaaccaagaaatctcaggttttcacaacgtaccaagaccagcagaccaccgtctccattcaggtctttgaaggtgaaagaagtctcaccaaggactgcaggctactcgggaaattcgacctcactggagtcccaccggccccaagaggaacccctcaaatcgaggtcacatttgaagtggacgccaacggtattcttaatgtgaaagcagaggacaaggcgagtggtaaatcagagaagattacaatcacaaacgagaagggtcgtctgagccaagaagagattgaccggatggtgaaggaggcagaggagtttgcagaggaagacaagaaggtgaaggagaagatcgacgccaggaatgccctggagacatacgtgtacaacatgaagaaccaagtgaacgacaaggacaagcttgcagacaaattggaaggagatgagaaggagaagatagaagcagcgacgaaagaggccttggagtggctcgacgagaaccaaaactcagagaaagaagagtacgacgagaagctcaaggaggtagaggcagtgtgtaacccaatcatcacagcagtttaccagagatcaggcggagcaccaggtgcaggaggagaatcatcgactgaggaggaagatgagtctcacgatgagctctagatgtcttctgttattgttaatttattaaaccatagagacaagttttgaggatgaaacgtcgtttttgttttttgtatttggtttcctttttcttatggatttttaggaaaggggagagattaagtagcgtcccttctttagtctccctggacgttctctttatgttcatctgataactttacttcttcataacaaataccttttttcctattcaaaaaaaaaaagggcgaccgctctagaggatccaagcttacgtacgcgtgcgtgcgacgtcataactctnnnnnnnnnnnnnnnnnnnnnnnnn

SEQ ID NO: 117545 - DNA, 650 bp, Arabidopsis thaliana
  unsure (1)..(650): unsure at all n locations
tcaggncagggttncnggaancangagtnagngaatcgcccccaggatccctgggcatccgttccacntgaggnccaagtgncgccaaggncaagcttcagccaaattggaaggagatgagaaggagaagattccaagcagcgtcgaaagagcccttggagtggctccacgagacgccccaactcagagacaggtagagtacgacgagatagctcaaggaggtagagccagtgtgtaacccaatcatcacagcagtttaccagaggtcacgcggagcaccaggtgcaggaggactatcctcgactgaggaggaaggtgagtctctcgatcagctctagatgtcttactgtcagtgttaatgtattatcccatagacccaagtgttgaggatgaaactgtcgtttttgttttctgtaggtggtttcctttttcttatgcagttttaggaaaggggagagacctaagtagcgtcccttctttagtctccctggacgttctctttatgttcatctgataactggacttcttcataacaaataccttttttttaaaaaaaaaaaaaaaaaagnnnnnnnnnnnnnnnnnnnnnnnnnnnnnnnnnnnnnnnnnnnnnnnnnnnnnnnnnnnnnnnnnnnnnnnnnntagaatcg

SEQ ID NO: 117546 - DNA, 994 bp, Arabidopsis thaliana
  unsure (1)..(994): unsure at all n locations
caggctctattccaactcattttagggaaggctggtccgcctgcaggcaccggcccggaattcccgggtcgacccacgcgtccgaggaaacacggttattccaaccaagaaatctcaggttttcacaacgtaccaagaccagcagaccaccgtctccattcaggtctttgaaggtgaaagaagtctcaccaaggactgcaggctactcgggaaattcgacctcactggagtcccaccggccccaagaggaacccctcaaatcgaggtcacatttgaagtggacgccaacggtattcttaatgtgaaagcagaggacaaggcgagtggtaaatcagagaagattacaatcacaaacgagaagggtcgtctgagccaagaagagattgaccggatggtgaaggaggcacaggagtttgcagaggaagccaagaaggtgacggagaagatcgacgccaggaatgccctggagacatacgtgtacaacatgaagaaccaagtgagcgacaaggacaagcttgcagacaaattggaaggagatgagaaggagaagatagaagcagcgacgaaagaggccttggagtggctcgacgagaaccaaaactcagagaaagaagagtacgacgagaagctcaaggaggtagaggcagtgtgtaacccaatcatcacagcagtttaccagagatcaggcggagcaccaggtgcaggaggagaatcatcgactgaggaggaagatgagtctcacgatgagctctagatgtcttctgttattggttaatttattaaaccatagagacaaggttttgaggatgaaacgtcgtttttgttttttgtatttggtttcctttttcttatggatttttaggaaaggggagagattaagtagcgtcccttctttagtctccctggacgttctctttatgcggccccgaattcgatatccagcctatccataccctcgacctcgagggggggcccggtacncaatcgcctatag

SEQ ID NO: 117547 - DNA, 470 bp, Arabidopsis thaliana
ccacgcgtccgcacacgcgtcagctctgtctgtgttcaaaacaagttcattcgatctatagagacgaaacaaaaagagagatcgtacgcaaaagtttccgatatggctcgctcgtttggagctaacagtaccgttgtgttggcgatcatcttcttcggatgtttatttgcgttgtcctctgcaatagaagaggctacgaagttaggatcagtgatagggatagatcttggtactacttactcttgtgttggtgtttacaagaatggtcatgtcgaaattattgccaatgaccaaggaaaccgtattacaccttcatgggttggttttactgactctgaaagactcattggtgaggctgctaagaatcaagcagctgttaatccagagaggactgtcttcgacgttaagagattgatcgggcgaaaatttgaggataaggaggttcaaaaggataggaaacttgtacctta

SEQ ID NO: 117548 - DNA, 1234 bp, Arabidopsis thaliana
  unsure (1)..(1234): unsure at all n locations
nnnnnnnnnngccagcggtaccgaatctcgcagttccgagcccacgcgtccgccgacgcgtccgcggaacgcctcatctttcaatctctcttgattccaatccattcttcttcaagtgccgggttctcgggtcggatcttctaagtctagctagggataatggctactgtcactactcatgcctcggcctcgattttccgaccttgtacttcaaagccaagattcctcaccggttcttccggtaggttgaaccgcgacttgtcgtttacatcgatcggttcatcggccaaaacgtcgtcgttcaaggttgaagctaagaaaggagaatggttgcccggtttggcatcgcctgattatctcaccggcagtcttgccggtgacaatgggtttgacccgttgggtctagcagaggatccagagaacttgaaatggttcgtccaggcagagctggtcaacggacgatgggctatgctcggtgtcgctgggatgcttttgccggaagttttcaccaagatcggaatcataaatgttcctgagtggtacgatgctgggaaagagcagtattttgcatcgtcgtcgacattgttcgtgatcgagttcatattgtttcattacgttgagatcagacggtggcaagacatcaagaacccaggaagtgtgaaccaagaccctatctttaagcaatacagcttacctaagggtgaagttggttaccctggtggaatctttaacccgcttaactttgctcctacgcaagaggccaaggagaaagagctagcaaacgggaggttggcgatgttggcattcttagggtttgtggttcaacacaatgtgactggaaaaggaccatttgagaatctgttgcagcacttgtctgacccatggcacaacactattgtccaaaccttcaactaaagagtgaagacagacttatgatctcatacctatctatcttccatcactttcatgtctgtctgtgagtgtgtttcatcttagagttcttggtttttgagcttgaattattgttgaaccgttgtagctccatgaacaaatttggaatcttcaatgtacagaggaactaagttaatcaacattgttgtactctttaatatctattattcatgtggcaacagttatataaaaaaaaaaaaaaaaaaagagcggccgctttaaaggatcccagctgacgtgcaggcgacgtcatagctcgtaggatagtgtnnnnnnnnnnnnn

SEQ ID NO: 117549 - DNA, 871 bp, Arabidopsis thaliana
ccgtctgcggtaccggtccggaattcccgggtcgacccacgcgtccgatcgcctgattatctcaccggcagtcttgccggtgactattgggtttgacccgttgggtctagcagaggatccagagaacttgaaatggttcgtccaggcagagctggtcaacggacgatgggtctatgctcggtgtcgctgggatgcttttgccggaagttttcaccaagatcggaatcataaatgttcctgagtggtacgatgctgggaaagagcagtattttgcatcgtcgtcgacattgttcgtgatcgagttcatattgtttcattacgttgagatcagacggtggcaagacatcaagaacccaggaagtgtgaaccaagaccctatctttaagcaatacagcttacctaagggtgaagttggttaccctggtggaatctttaacccgcttaactttgctcctacgcaagaggccaaggagaaagagctagcaaacgggaggttggcgatgttggcattcttagggtttgtggttcaacacaatgtgactggaaaaggaccatttgagaatctgttgcagcacttgtctgacccatggcacaacactattgtccaaaccttcaactaaagagtgaagacagacttatgatctcatacctatctatcttccatcactttcatgtctgtctgggagtgtgtttcatccttagagttcttgggttttgagcttgaattatggtggaacccgtgtagctcctggaacaaatttggaatcttcaatggtcagaggaactaagttaatccaaaaaaaaaaaaaaaaagggcggccgctctagaggatccaagcttacggacgcgtgcaatcgaagtcatagttgt

SEQ ID NO: 117550 - DNA, 1080 bp, Arabidopsis thaliana
  unsure (1)..(1080): unsure at all n locations
gtgcgcctgcaggtaccggttcggaattcccgggtcgacccacgcgtccgcgattttccgaccttgtacttcaaagccaagattcctcaccggttcttccggtaggttgaaccgcgacttgtcgtttacatcgatcggttcatcggccaaaacgtcgtcgttcaaggttgaagctaagaaaggagaatggttgcccggtttggcatcgcctgattatctcaccggcagtcttgccggtgacaatgggtttgacccgttgggtctagcagaggatccagagaacttgaaatggttcgtccaggcagagctggtcaacggacgatgggctatgctcggtgtcgctgggatgcttttgcccggaagttttcaccaagatcggaatcataaatgttcctgagtggtaccgatgctgggaaagagcagtattttgcatcgtcgtcgacattgttcgtgatcgagttcatattgtttcattacgttgagatcagacggtggcaagacatcaagaacccaggaagtgtgaaccaagaccctatctttaagcaatacagcttacctaagggtgaagttggttaccctggtggaatctttaacccgcttaactttgctcctacgcaagaggccaaggagaaagagctaccaaacgggaggttggcgatgttggcattcttaggggtttgtggttcaacccaatggtgactggaaaaggaccatttgagaatctgttgcagcacttgtctgacccatggcacaacactattgtccaaaccttcaactaaagagtgaagccagacttatgttttcatacctatctatcttccatcactttcatgtctgtctgtgagtgtgtttcatcttaagagttcttggtttttgagcttgaattattgttgaaccgttgtagctccatgaacaaatttggaatcttcaatgtccaaaggaattaagttaatcaacattgttgtactctttaatatctaaaaaaaaaaaaaaaaaaaaagaaagaagggcggccgctctagaggatcccggccgacgtcagcgacgtcaagcttgaaatagtgnnnnnnnnntcaatcg

SEQ ID NO: 117551 - DNA, 603 bp, Arabidopsis thaliana
  unsure (1)..(603): unsure at all n locations
gtacgcctgcaggtaccggtctggaattcccgggtcgacccacgcctccccattcttcttcaagtgccgggttctcgggtcggatcttctaagtctagctagggataatggctactgtcactactcatgcctcggcctcgattttccgaccttgtacttcaaagccaagattcctcaccggttcttccggtaggttgaaccgcgacttgtcgtttacatcgatcggttcatcggccaaaacgtcgtcgttcaaggttgaagctaagaaaggagaatggttgcccggtttggcatcgcctgattatctcaccggcagtcttgccggtgacaaatgggtttcgacccgttgggtctagcagaggatcccagagaacttgaaatggttcgtccaggcagagcttggtcaacggacggatgggctatgctcgggtgtcgctgggatgcttttgccggaaggtttcaccaagatcggaatcataaatgttcctgaagtggtacgatgctgggaaaggagcagtattttgaatggcggnngaaattttncggnaccgggtnaaatngtttaatacggttaganaaacggtgnaagnataagacccnnng

SEQ ID NO: 117552 - DNA, 416 bp, Arabidopsis thaliana
cccacgcgtccgcccacgcgtccgcggacgcgtgggttccaatccattcttcttcaagtgccgggttctcgggtcggttcttctaagtctagctagggataatggctactgtcactactcatgcctcggcctcgattttccgaccttgtacttcaaagccaagattcctcaccggttcttccggtaggttgaaccgcgacttgtcgtttacatcgatcggttcatcggccaaaacgtcgtcgttcaaggttgaagctaagaaaggagaatggttgcccggtttggcatcgcctgattatctcaccggcagtcttgccggtgacaatgggtttgacccgttgggtctagcagaggatccagcatgctagtgaagggtactgcagccggttatcatcaacctactattggctatgctc

SEQ ID NO: 117553 - DNA, 701 bp, Arabidopsis thaliana
  unsure (1)..(701): unsure at all n locations
anttccccnncaaagggacaaacctgggncccncccggtnggnccccnaaaacctnnnggccccccggnttcagaatnccggncccccngtccatntggtccatnccgttgggnntcanccgntgccaggcatcaaggccccaggaagtgtgacccaagcccctatctttaagncaatacagncttaccttaagggttgaagttggttcccctggtggaatcttttaacccgcttaactttgctcctacgcaagaggccaaggagaaagagctagcaaaccgggaggttggcgatgttggcattcttagggtttgtggttcaacacaatgtgactggaaaaggaccatttgagaatctgttgcagcacttgtctgacccatggcacaacactattgtccaaaccttcaactaaagagtgaagacagacttatgatctcatacctatctatcttccatcactttcatgtctgtctgtgagtgtgtttcatcttagagttcttggtttttgagcttgaattattggttgaaccgttgtagctccatgaaccaatttgggattcttcaatgtacagaggaactaagttaatcaacattgttgtactctttaatatctaaaaaaaaaaaaaaaaagggcggccgctctagaggatccaagcttacgtacgcgtgcatgcgacgtcataaatcttnctatagtgtg

SEQ ID NO: 117554 - DNA, 708 bp, Arabidopsis thaliana
cacgcgtccagagatcagacggtggcaagacatcaacgtaatgaaacaatatgaactcgatcacgaacaatgtcgacgacgatgttcgtgatcgagttcatattgtttcattacgttgagatcagacggtggcaagacatcaagaacccaggaagtgtgaaccaagaccctatctttaagcaatacagcttacctaagggtgaagttggttaccctggtggaatctttaacccgcttaactttgcgcttcctacgcaagaggccaaggagaaagagctagcaaacgggaggttggccgatgttggcattcttagggtttgtggttcaacacaatgtgactggaaaaggaccatttgagaatcttggttgcagcacttgtctgacccatggcacaacactattgtccaaaccttcaactaaagagtgaagacagacttatgatctcatacctatctatcttccatcactttcaagtctgtcagagagtgtggttcatcttagaggtcttggtttttgagcttgaattattggtgaaccgttgtagctccatgaaccaatttggaattttccatggccagaggaacttagttaatccaaaaaaaaaaaaaaaaagggcggcccccggctagtgagcttgtcggcccaggaatttaatccgggccgggtccttccgggggtcccaccttcccaaaaatgggtggagaaaaa

SEQ ID NO: 117555 - DNA, 736 bp, Arabidopsis thaliana
  unsure (1)..(736): unsure at all n locations
gttttcaccaagatcggaatcataaatgtncctgagtggtacgatnctgggaaagagcagtattttgcatcgtngtcgacattgttcgtgatcgagttcatattgtttcattacgttgagatcagacggtggcaagacatcaagaacccaggaagtgtgaaccaagaccctatctttaagcaatacagcttacctaagggtgaagttggttacccnggtggaatctttaacccgcttaactttgctcctacgcaagaggccaaggagaaagagctagccaaacgggaggttggcgatgttggcattcttaggggtttgtgggttcaacacaattgtgtctcggaaaaaggacccatttgaggaatcctgtttgcaagccactttgtctgacccccttgggcacaaacacttctttgtccccacacccttcacacttaaaggggtgtaacgacaggacttatgatctcatacctatctatcttccatcactttcatgtctggctgtgagtgtgtttcatcttagagttcttggtttttccccccaacaagtaggtaacccgttgtggctccatgaacaaatttggaatcttcaatgtacagaggaactaagttaatcaccattgttgtactctttaatatctattattcatgtggcaacagttatatataagcacgccataacttagattcaaaaaaaacacacaagggcggcagctctagaggatccaagcttacg

SEQ ID NO: 117556 - DNA, 2557 bp, Arabidopsis thaliana
  unsure (1)..(2557): unsure at all n locations
ggtatatgcaagtgtagtgctattaaactatcccttttattttcccacccaactcaatttattttctcattctttctctttactcttcttcagatctctctgtttctttctttgttgttgttatctggggatgctttctactctctgtttggtttccttcattgtgactttctattttctgggtttgtttcaagtcatgatttttccgatacccttttgatttttcttgctatttctcacctctgtataagcaagctctctgctgtttctcctcatccaagttgggtttatcagttcagctgtgtagaaattcaatcgtctgagaagtccgaggtttgatgtctgatggctttaagatcgaaaggatttggcttttatcagattagtaatgagattagattgtttttgaggttactgtaatcagatcttgatgctatttctggtgaaagagatttaagacaagttagggaatgggtaatacttgtgttggaccaagcagaaatggcttcttgcaatctgtttcagctgcaatgtggcggccaagagatggagatgattcggcttccatgagtaatggagatattgcaagtgaagctgtttcgggagagcttcgatctcgattatctgatgaagtccagaataaacctcctgaacaggtcacaatgccgaagccagggactgacgtcgagaccaaggacagagagattcgaactgaaagcaagcctgaaacgctagaggagataagccttgagtccaaaccagagactaagcaggagaccaagtcagagaccaagccggagtcaaaacctgatcctccagctaaacctaagaagcctaaacacatgaagagagtgtcaagtgcagggcttaggactgagtcagtgttgcagaggaagactgaaaacttcaaggaattctattccttgggaaggaaactcggacaagggcaatttgggacgacttttttatgtgtcgagaagactacggggaaggagtttgcctgcaagtcgattgctaagaggaagctattgactgatgaggacgttgaggatgtgagaagagaaattcagataatgcatcacttggctggtcaccctaatgtcatctccatcaaaggagcttatgaggatgttgtggcagtgcaccttgtaatggagtgttgtgcaggcggcgagctttttgacaggatcattcaacgcggtcactacacagagaggaaagcggctgagctcactagaaccattgttggggttgtagaggcttgccattctcttggtgttatgcatcgagacctcaagcccgagaattttctgtttgtcagtaaacacgaagattccctcttgaagacgattgattttggactctccatgttctttaaaccagacgatgtttttacagatgttgttggtagcccatattatgttgccccagaagttcttcgaaagcgttatggccctgaagctgatgtctggagtgctggagtgattgtgtacattttattaagcggagttcctccattctgggctgaaaccgaacaaggtattttcgaacaggtactccacggtgatcttgacttttcgtccgatccatggccaagtatatctgaaagtgcaaaggatttagtgaggaaaatgcttgtcagggatcccaagaaaaggttaactgcccaccaagtattatgtcatccatgggttcaagtcgacggtgtggctccagacaagcctttggattctgctgttctgagccgtatgaagcagttttctgcaatgaacaagttcaagaaaatggctcttagagtcattgctgagagcttatctgaagaagaaatcgccggcttgaaagaaatgtttaatatgatagatgcggacaagagtggtcagataactttcgaagaactgaaagcaggactaaaacgagtaggggcgaatctcaaagagtctgaaattctcgacttgatgcaagctgctgatgtggacaacagcggaacaatagattacaaagagttcatagctgcaacattacatctaaacaaaatagagagagaggaccatttgtttgcagcctttacatactttgacaaagatgggagcggctatatcaccccagacgagcttcaacaagcttgtgaggagtttggtgttgaggatgtccgcatagaagaactgatgcgcgatgttgatcaagacaatgacgggcgaatagactacaacgagtttgtggcgatgatgcagaaaggaagcatcacaggaggacctgtgaaaatgggtctagagaaaagctttagcattgctcttaaactctagtttctcagtctatttaaaagtacaaaactaaagccaagaagacaaaagagttttctgataatatataccattttgattatgttgaagacatatgcacacagccaagattctctcttgccctcttttggattctctcaatcttttggatgaggttttgtcttagacttgttttggaaactttgttgtattgtgttacttcttgagcatatatagtcttctaacattacaaaccaaaaaaannaaaaaaaaaagga

SEQ ID NO: 117557 - DNA, 1452 bp, Arabidopsis thaliana
  unsure (1)..(1452): unsure at all n locations
nnnnnnnggtttttttttttttttttttggatccaagataatagtttcagatgcaacagatacaatgttgaaacagagacattgtataatataacacgatattacaggaaaacatacagagagaaagctggttttatttgaaaatgaatctattcgcttcctgcgatcttcttcttcaaggattcaatatcctcagccaattcctttctgcttgacttgaagagaaggtatctgtagacaaaccatccagtgtacccgagaccgacaagttccataactttcggaagcagaggaacagagttgatggcaccaacaacaatggaagataaccaaacagcaacaatggctcctcctccatatataagtacagtagatttgttctcaagaccatcccacttttccttcaaatctgtgatgagttcgttggtatcaatggacgaggtctcttctgaagaagctcttgtcttcaacaattcaactttttgcaatccattccctgaaacaagcttcaacggaacggtgaaagaggatcggccaaaggagcgaggaggaagataagggacggcggagcaacgggtggatacggcgggaacacgtggaaccatcacggccatagaggacgaagctgctactgatatcgccattgaagcacgccgagaacttcttcttcttcttctttgtctgcctacttcttctctctttctcatctaaaccaaaaaatggcagatcagctcaccgatgatcagatctctgagttcaaggaagcttttagccttttcgacaaagacggagatggttgcatcacaacgaaagagctaggaacagtgatgagatcattaggtcaaaatccaacagaagcagagttacaagatatgataaacgaagtagatgctgatggtaacggaaccatagacttccctgagtttctgaacctaatggctaggaagatgaaggacactgactctgaagaagagctcaaagaagctttcagggttttcgataaggaccagaacggtttcatctcggcagctgagttaagacatgtaatgacaaatcttggtgagaagttaactgatgaagaagttgatgagatgatcaaagaagctgatgttgatggagatggtcagatcaattatgaagagtttgtcaaagttatgatggcaaagtgaggaaactattctcatatcttttctctctttttctttctttctttttttgaattgaacaactctgattattgctttattctatgtttgactgttcattattatgcattcgtcccaaatttcatgttatgaactattttgtgactttgggttaaattatttgtttggaagtttttagtttattttatattatgtgaagtaccattgtaatggtcgttgaaaaaaaaaaaaaactctaatagtacttttttaaaaaaaaaaaaaaaaaaaaaaaaagacagcccgt

SEQ ID NO: 117558 - DNA, 731 bp, Arabidopsis thaliana
aaacacgacgttaaaaaaaaaaactcattaagtaaagacaaaggaagagaagaaagacgatttctcgaagaagctatggcggatcaactcactgacgaacagatctccgaattcaaggaagcttttagcctcttcgacaaagatggcgatggttgcatcacaacaaaagagctgggaacagttatgcgttcactaggacaaaacccaacagaggctgagctccaagacatgatcaacgaggttgatgcagatggaaacggcactatcgacttccccgagttcctgaacctgatggctaagaagatgaaagacactgactccgaggaagagctaaaagaagccttcagggttttcgacaaagaccagaacggtttcatctccgctgctgagctacgccatgtgatgaccaatcttggtgagaagctaactgatgaagaagtggaagagatgatccgtgaggctgatgttgatggagatggtcagattaactatgaagagtttgtcaagattatgatggctaagtgatttgataaaggtgatgatgatgatgatgatgacctttttatgcttctaggagtttaaccaaaaacatttgcatgattggtggagatatgcttttaaacagacataatttgtttttcgttcttttgattttctggtttgtgacttttgtgtgtaatggaaaatcaagtaagttggattgaaaccgatgggttgggtttttacttttt

SEQ ID NO: 117559 - DNA, 729 bp, Arabidopsis thaliana
  unsure (1)..(729): unsure at all n locations
atntnaaaagcttnttanncccgttttgggaacttcggggaaacgngtttttttnaanaacctacccctccctngnacttctcttaaggnttaanncccnaagcaaatcctttctctttnctttaaanaaaaggttctgaaaaaaccatccagttgtccccaagcccganaagttccattactttcgaaacaggggaacagagttgatggcaccaacaccaatggaagattcccaacccagcaacaatggctcctcctccatatataagtacagtagatttgttctcaagaccatcccacttttccttcaaatctgtgatgagttcgttggtatcaatggacgaggtctcttctgaagaagctcttgtcttcaacaattcaactttttgcaatccattccctgaaacaagcttcaacggaacggtgaaagaggatcggccaaaggagcgaggaggaagataagggacggcggagcaacgggtgcccccgcgcgggaacacgtggaaccatctcggccatagaggacgaagctgctactgatatcgccattgaagcacgccgagaagttcttcttcttcttatcaatccccaccaagcattcaccatcacaccttgcacaccagctcctttctgtagtcttctcgcagcggacgcgtgggtcgacccgggaattccggaccggtacctgcaggcgtgccagctttccctatagtgagtcgtagagagctg

SEQ ID NO: 117560 - DNA, 681 bp, Arabidopsis thaliana
  unsure (1)..(681): unsure at all n locations
accctttttnatntncccgttttngggaacantcgnganaaancgggtttttttaaaaatgaacnnaccccttcctngncctcctccttaaagnattaaatnnccnnagccaaatcccttcctgcttactttaaaaanaaggtatctgtaganaaaccatccagtgtacccgagaccgacaaagttccataactttcggaaagcagaggaaccagagttgatggcaccaacaacaatggaagataaccaaacagcaacaatggctcctcctccatatataagtacagtagatttgttctcaagaccatcccacttttccttcaaatctgtgatgagttcgttggtatcaatggacgaggtctcttctgaagaagctcttgtcttcaacaattcaactttttgcaatccattccctgaaacaagcttcaacggaacggtgaaagaggatcggccaaaggagcgaggaggaagataagggacggcggagcaacgggtggatacggcgggaacacgtggaaccatcacggccatagaggacgaagctgctactgatatcgccattgaagcacgccgagaacttcttcttcttcttctttgtctgcctacttcttctctactcgatttttttttgcagctgcgctttttactaaacaagattcgtgtagtaacacgtggaaacaa

SEQ ID NO: 117561 - DNA, 1803 bp, Arabidopsis thaliana
tctaatacgactttatatagggaaagctggtacgcctgcaggtaccggtccggaattcccgggtcgagccacgcgtccgcggacgcctgctctcacttgagcacgagaactgtctccgtcgccgttattatctcgtcggctaatatctcagacgagaaatcgacgccggagaaaaagcaatttagttctctttcatctaccaaaatgacatcttctctgtcacttcactcctccttcgtaccttccttcgctgatctctccgaccgaggtttgatcagtaagaactctccgaccagtgtttccatttccaaggttccaacttgggagaagaagcagatctcaaatcggaactctttcaagctgaattgcgtgatggagaaaagtgtcgatggtcaaactcattctaccgttaacaataccactgatagcttaaatactatgaatatcaaagaagaagctagcgtctctacattattggtgaacttggataataaatttgatccctttgatgcaatgagcactccgctttaccaaactgctacttttaagcagccttctgctattgaaaatggaccttatgattatacaagaagtggcaatcctacacgggatgcattggaaagcctccttgcgaagcttgacaaggcagatagagcattttgctttactagcggaatggctgctcttagtgctgttacacatcttatcaaaaatggcgaagaaattgttgctggagatgatgtatatggtggctctgacagattactatcccaagttgttccaagatctggcgttgtggtaaaacgagtaaacacaactaagttagacgaggttgctgctgcaattggtccccaaacaaagcttgtgtggcttgagtctccaacaaacccaagacaacaaatttctgatatacgaaaaatatctgagatggctcatgctcaaggtgctcttgtgttggtggacaacagtattatgtcaccagtgctctctcggccattagaacttggagctgacatcgtgatgcactcggctactaagtttatagccggacacagtgacgtgatggcaggtgtgcttgctgtaaaaggcgaaaaattggcaaaggaggtgtatttcctccaaaactcagaaggttctggattagctcctttcgactgttggctttgccttcgaggaatcaagacaatggctttacggatagaaaagcaacaggaaaacgcacggaaaattgcaatgtacttgtcttctcatccaagagtaaagaaagtgtactatgctggtctaccagatcatcctggtcaccatctccacttctctcaggcgaagggtgcaggatcagtttttagctttataactggatcagttgcgctttcaaagcatctcgtagaaaccaccaaatacttcagcatagctgtcagttttgggagtgttaagtcactgataagcatgccatgcttcatgtcacatgcaagcatacctgcagaagttcgtgaggccagaggtttgacggaagatcttgtccgtatatctgcaggaattgaagatgttgatgatttgatatctgatcttgacattgccttcaaaaccttccctctctagttttggtttgttcttgtctcagcttttgtagtttcataggttcttgaaataaggatctatgtaacaaaccataaaacataatttggtgtttgaaaacacatcaagcaataaattcattattgttagatttgttaaaaacaaagggcggccgctctagaggatccaagcttacgtacgcgtgcatgcgacgtcatagatacttct

SEQ ID NO: 117562 - DNA, 520 bp, Arabidopsis thaliana
accaaaatgaacatcttctctgtcacttcactcctccttcgtaccttccttcgctgatctctccgaccgaggtttgatcagtaagaactctccgaccagtgtttccatttccaaggttccaacttgggagaagaagcagatctcaaatcggaactctttcaagctgaattgcgtgatggagaaaagtgtcgatgctatgaatatcaaagaagaagctagcgtctctacattattggtgaacttggataataaatttgatccctttgatgcaatgagcactccgctttaccaaactgctacttttaagcagccttctgctattgaaaatgggccttattgattatacaagaagtggcaatcctacacgggatgcattggaaagcctccttgcgaagcttgacaaggcagatagagcattttgctttactagcggaatggctgctcttagtgctgttacacatcttatcaaaaatggcgaagaaattgttgctggagatgatgtatatggtggctctgacag

SEQ ID NO: 117563 - DNA, 2348 bp, Arabidopsis thaliana
gccagactcaaaagaatcaaaaccatcttcaaagccgaaaaaacccaatcgagatcggaaattaaacccattcgccggagatttcaccagatccccagctccaatacgtgttctcaaagatgtaatccctatgagcaatcaaactcagatcagcgacaaatacatcttaggtcgtgaattaggtcgaggcgaattcggaatcacttacctctgtactgatcgtgaaacccacgaagctttagcttgcaaatcgatttcaaagcgaaagcttcgaacagctgtcgatatcgaagacgttcgtcgtgaggtagcgattatgtctactttacctgagcatccaaacgtagttaagcttaaggctagttatgaggataacgagaacgtgcatctggttatggagctttgtgaaggaggtgagctttttgatcggattgttgctagaggacattacacggagcgtgctgctgcagctgttgcgagaacgattgctgaggttgtgatgatgtgtcactctaatggagttatgcatcgagatttgaaacctgagaatttcttgtttgctaataaaaaggagaattctccactaaaggctattgattttggcttgtctgtgttcttcaaacctggagataagtttacagagattgtaggaagtccgtattatatggctccagaagtgttgaagagagattatggaccaggggttgatgtgtggagtgccggagttattatctatatcttgctctgtggtgctcctccgttttgggctgagactgaacaaggtgttgctcttgcgatcttgcggggagttcttgattttaagagagacccttggcctcagatatcagagagtgccaagagccttgtgaagcagatgttggatcctgatccgactaagcggttaactgctcagcaagtgttagctcacccatggatacagaatgcaaagaaagctcccaatgttcctttaggagatatagtcagatctaggttgaagcagttctctatgatgaacagattcaaaaagaaagttcttcgtgtaattgcggagcacttgtctattcaagaggttgaagtgataaagaacatgttctcactgatggatgatgacaaggatggtaaaataacttacccggaactcaaagctgggcttcagaaggtcggttcacaacttggtgaaccagagatcaaaatgttgatggaagtggcggatgtcgatggaaatgggtttctggattatggagagtttgtagctgtgataattcacttgcagaagatagagaatgatgaacttttcaaactagcttttatgtttttcgacaaagatggaagtacatacattgaacttgatgagctacgggaagctttagcggatgagttaggcgagccagacgccagtgttctaagcgacatcatgcgtgaagttgacactgacaaggacggacgtataaactatgatgagtttgtgacgatgatgaaagctggaactgactggagaaaggcatcgagacaatattcaagagagaggttcaaaagcttaagcattaacttgatgaaagatgggtcattgcatctccatgacgctctcactggacaaactgttcctgtttaaatttattcgttatcaccaaaaacagagcaatgctccgttttttccccatttcataaattgggaattttccgggcttgttctttgagggatgggaattttacggaagctatggttctttacatatataaacattttacattgtattttgtatgtaatgttttgttcaaaggttgtatttttattgtctcaaagcccctaaaccaaagagtcaaaggaaagatctttattacactgacaccttatcaaactcagcagaagtcttgtccatgtccttgtccttggccacaacatctttgtagcggtaccaatgtgagaccaacaagaaataggccaagtttagagtcatcataccagcaaccaagaagtagaaatactccaatcttcccttgtttaaatcttccggaagccaacttcctcctgaaaatccctctgtggtatcgtgtaccgccgataacaaaaaggtgctgaggtaactcgccaatccgattccacaataatacagagaaccagcaaaacttcgcatgttctctggaaactgtttgtagtaaaactccatttgtccaactccagcgagggcgtccgcgatacccattagcactagctgaggaatcaaccacataccggacatcgaagagattgcgccttttcttggggccaaccctagcgtcggttttgtgagagctacctttcttctgtattgttctcggacgcgtgggtcgaaccgggaattgcggtc

SEQ ID NO: 117564 - DNA, 1960 bp, Arabidopsis thaliana
  unsure (1)..(1960): unsure at all n locations
gatactccnnnnnnnnnnnnnnnnnnnnnnnnnnnnnnnnnnnnnnnnnnnnnnnnnnnnnnnnnnnnnnnnnnnnnnccacgcgtgcgggaacaaagaagatccctgtttatcatcttcttcttcttcaaatcgagatcgaagaagaaccaacaaaaaaccaaaaatggagacgaagccaaaccctagacgtccttcaaacacagttctaccatatcaaacaccacgattaagagatcattaccttctgggaaaaaagctaggccaaggccaatttggaacaacctatctctgcacagagaaatcaacctccgctaattacgcctgcaaatcgatcccgaagcgaaagctcgtgtgtcgcgaggattacgaagatgtatggcgtgagattcagatcatgcatcatctctctgagcatccaaatgttgttaggatcaaagggacttatgaagattcggtgtttgttcatattgttatggaggtttgtgaaggtggtgagctttttgatcggattgtttctaaaggtcattttagtgagcgtgaagctgtcaagcttattaagacgattcttggtgttgttgaggcttgtcattctcttggtgttatgcatagagatctcaaacctgagaatttcttgtttgatagtcctaaagatgatgctaagcttaaggctaccgattttggtttgtctgtcttctataagccaggacaatatttatatgacgtagttggaagtccgtactatgttgcaccagaggtgctaaagaaatgttatggacctgaaatagatgtgtggagtgctggtgttatcctctacattttactcagcggtgttcctcccttctgggcagagactgagtctggaatctttagacagatattgcaagggaagttagatttcaaatctgacccgtggcctactatctcagaagctgctaaagatttgatctataaaatgctcgaaaggagccccaagaaacgcatttctgctcatgaagccttgtgtcacccatggattgtcgatgaacaagcagcaccagacaagcctcttgatccagcagtcttatctcgtctaaagcagttttctcaaatgaataagattaagaaaatggcattacgggtaattgctgagagactttcagaggaagaaattggaggtctgaaggaattgttcaagatgatagacacagacaacagcggaacgattacttttgaagagctcaaagcgggtttgaagagagtcggatctgaactgatggaatcagaaatcaagtctctcatggatgcggctgatatcgacaacagtggtacaatagactacggagaattcctagcagcaaccttacacatgaacaagatggagagagaggagattctggtggctgcattttcggactttgacaaagacggaagcggttatatcaccatcgatgagcttcagtcagcttgcacagagtttggtctatgtgatacacctctggacgacatgatcaaggagattgatcttgacaatgacgggaagatcgatttctcggagtttacagcaatgatgaggaaaggagatggagttgggagaagcagaaccatgatgaagaacttgaacttcaacattgctgatgcttttggagttgatggtgaaaaatctgatgactgactcatcattcttccacaatttctgttttttttctctttaatttcgtttatattttgaattctaatttctaaggatacaaaaatatattctggcttgttttttgctttcctttttatttttgtacatgagcaactttctaaatttttatcctcatatggataatttttgcttcatataaaagtttttgaattccnnnnnnnnnnnnnnnnnnnnnnnnnnnnnnnnnnnnnnnnnnnnnnnnnnnnnnnnnnnnnnnnnnnnnnnnnnnnnnnnnnnnnnnnnnnnnnnnnnnnnnnnnnnnnnnnn

SEQ ID NO: 117565 - DNA, 2269 bp, Arabidopsis thaliana
aatacgactcactttagggaaagctcgtacgcctgcaggtaccggtccggaattcccgggtcgacccgtcgacccacgcgtccgcgacggtataatggccacaaaaccaggagtcctcaccgattggccttggacacccctcggaagtttcaagtacatcgtaatagcaccatgggctgtccatagcacatacaggtttgtgacagatgatccagagaagagggatctcgggtacttccttgtgttccccttcttgctcttcagaattctgcacaaccaggtttggatctctctgtcccgttactatacgtcctcgggaaagagacgcatcgtcgacaagggaatcgacttcaatcaggtcgacagggagaccaactgggatgaccaaatattgttcaacggagtgctgttctatataggcatcaacctattgccggaggccaaacaacttccctggtggagaactgacggagtgttgatgggcagcgcttattcacaccggaccggtggagttcctctattattggctccacaaagctctccaccatcactttctttattcccgctaccattcccaccaccactcctctatcgtcactgagcccatcacttcggtgatacatccgtttgcggagcacatagcatacttcatcctcttcgcgataccactacttaccacgttgctaacaaaaacggcgtcaataatttcgttcgccggatacataatctacatagacttcatgaacaacatgggacactgcaacttcgagctaatccctaagcgccttttccacctctttcctcccctcaagttcctctgttacaccccctcataccactcgctgcaccacacgcagttccggaccaactactccctcttcatgcccttgtatgactacatctacggcacaatggatgaaagcacggatacgttgtacgagaaaactctagaaagaggagatgatagagtggacgtggtgcacttaactcacctgacgacgccagaatccatataccatttgcgcattggcttggcctcatttgcctcctaccccttcgcttatagatggttcatgcgccttttgtggcctttcacctctctctccatgatattcacgctcttctacgcccgcctctttgtcgctgagagaaactccttcaacaagctcaacttgcagtcttgggtgatacctagatataatctacagtacttgttaaaatggaggaaagaagcgatcaataacatgattgagaaagcgatactggaggcagataagaaaggagtgaaggtgcttagtctgggtctcatgaaccaaggggaggagcttaacaggaacggagaggtgtatatccacaaccatccagatatgaaagtgagactggtcgacggcagtagattagcagcagctgttgtgatcaacagtgtacccaaagcaactacaagcgtcgtgatgacaggcaatctcactaaggttgcctacaccatcgcctctgctctctgccagagaggcgttcaggtctccactctgcgcctagacgagtatgagaaaataagatcatgcgttccacaagaatgcagagaccatttggtctatttaacctctgaagcactctcatcaaacaaggtatggctggtgggagaaggaacaacaagagaagagcaggaaaaagccacaaaagggacattgtttataccattctcacagttccccctcaagcagttacgtagcgattgtatctatcataccacaccagcattgatagttccaaaatctctggtgaatgtccactcctgtgagaactggttaccgagaaaggcgatgagtgcaactagagtggccggcatattgcacgccttagaaggatgggaaacgcatgagtgtggcacatcccttcttctctcggatttggacaaagtatgggaagcctgtctcagccacggcttccagcctctcctccttccacatcattaaaactccaaccttggaagatttttggagaatgagagcgacacgctctgtgcttcttttccttatgatccagctcttccacgcacacatgaactatgaaacatatataaagcgcacacattttatgttttacgcacacatatatttatgcatatcaagcttttggtgattatggtattgatagagtcaaattaagctcggtgactatggtattaataagagtactatttccttaaaaaaaaaaaaaaaaaaaaacatatatatatatatatatatataaagcaaacatgttccagaat

SEQ ID NO: 117566 - DNA, 708 bp, Arabidopsis thaliana
  unsure (1)..(708): unsure at all n locations
nnnnnnnnnnnnnnnnnnnnnnnnnnnnnnnnnnnnnnnnnnnnnnnnnnnnnnnnnnnnnnnnnnnnnnnnnnnnnnnnnnnccacgcgtccgtcataccacaccagcattgatagttccaaaatctctggtgaatgtccactcctgtgagaactggttaccgagaaaggcgatgagtgcaactagagtggccggcatattgcacgccttagaaggatgggaaatgcatgagtgtggcacatcccttcttctctcggatttggaccaagtatgggaagcctgtctcagccacggcttccagcctctcctccttccacatcattaaaactccaaccttggaagattttaggagaatgagagcgacacgctctgtgcttcttttccttatgatccagctcttccacgcacaaatgaactatgaaacatatataaagcgcacacatatatttatgcatatcaagcttttggtgattatggtattgatagagtcaaattaagctcggtgactatggtattaataagagtactatttccttttctctttgtgaactaagaaacatatatatataaagcaaacatgttccagaatatctaagtttttcttctcccaaaaaaaaaaaaaaaagggcgaccgctctagaggatccaagcttacgcacgcggcnnnnnnnnnnnnnnnnnnnnnnnnnnnnnnnnnnnnngaatcg

SEQ ID NO: 117567 - DNA, 551 bp, Arabidopsis thaliana
  unsure (1)..(551): unsure at all n locations
aggtatggctggtgggagaaggaacaacaagagaagagcaggaaaaagccacaaaagggacattgtttataccattctcacagttccccctcaagcagttacgtagcgattgtatctatcataccacaccagcattgatagttccaaaatctctggtgaatgtccactcctgtgaggtaagtattcaaagctacccaatccaactaaatttattagaagaggtaggccttatttttaaaaaaacacctcctgcagaacctggttacccagaaaggcgatgagtgcaactagagtggccggcatattgcacgccttagaaggatgggaaacgcatgagtntggcacatcccttcttctctcggattttgacaaagtattggaagcctgtntcagccacgggtttcagcttttcctccttccacatcattaaactccaaccttgggaggttttttggggatnagagngncacggtttgtgcttttttcctatntccagttttcacggcacatgactttgacattttaaggggcaaattttggttcgcaaattc

SEQ ID NO: 117568 - DNA, 1443 bp, Arabidopsis thaliana
  unsure (1)..(1443): unsure at all n locations
agggagagagaaagagaagagagtgagagagatcgaagaacatttacacacatcaatggcgtctctgcaactctgcgacggttatcttctcttcaagccctctgtttctcctcgattcctctctcaacgcatttctcatcgcctaatccctaaagcctcatcttctcctcctccatctccatcaccatcatcgtcctcttcatccttatctttcagtcggcgggagcttctgtaccaatcggcagctgtatcactctcgctttcttccattgttggaccagcgagagctgatgaacagttatccgaatgggaaagagtgtttctcccaatcgatcccggtgttgttcttctcgacattgctttcgtccccgacgaacctagccgagggtttttacttggaacgagacagactttgttagagactaaagatggtggaagcacttggaatccacgttcgattccttcagctgaagaagaagatttcaattatagattcaattcgattagctttaaaggcaaagaaggatggattattggcaaacctgcgattttattgtacactgctgatgctggagagaattgggataggattcctctaagttctcagcttcctggagatatggtgtttataaaagcgacagaagataagagtgcagagatggttactgatgaaggtgctatttatgttacttcaaacaggggatataactggaaagctgctattcaggaaactgtttcagctaccttgaacagaacagtatccagtggaatcagtggtgctagttactacacgggaactttcagtgctgttaatcgttcacctgatggaagatatgtcgctgtttcgagccgtggtaacttctttctgacatgggagcctgggcagccttactggcaaccacacaatagagctgttgctagaagaattcagaacatgggatggagagctgatggtggtctttggcttcttgttcgtggtggaggactttatcttagcaaaggtactgggattacagaggagtttgaagaagttccagtacaaagccgtggctttggcattctagatgttggatatcgctcagaggaagaagcatgggcagcaggaggcagtggcatactactgagaacaagaaatggaggcaaatcatggaaccgtgacaaagctgctgataatatcgcagctaacctatacgcagtcaaatttgtggatgacaagaaaggatttgtgcttggcaacgatggagtcttgctccgatatgttggctgaagaatttaaaaataaaaaagaggttaaattgaaatggttatgtttcaatccttctctgtaaagcctttaactgcgttttgatactacattacactattgtatacattccccttcacaaaatatatataattttgtgtttcttctgaaaaaaaaaaaaaaaaaannnnnnnnnnnnn

SEQ ID NO: 117569 - DNA, 2196 bp, Arabidopsis thaliana
  unsure (1)..(2196): unsure at all n locations
gcaagagctctcaaacaaaacagccttttacataagaacaaacacccccaaaaactgcaaaaaaaagagagagatcattaatccatcttcaagatgtctcttcctgaaactaaatctgatgatatccttcttgatgcttgggacttccaaggccgtcccgccgatcgctcaaaaaccggcggctgggccagcgccgccatgattctttgtattgaggccgtggagaggctgacgacgttaggtatcggagttaatctggtgacgtatttgacgggaactatgcatttaggcaatgcaactgcggctaacaccgttaccaatttcctcggaacttctttcatgctctgtctcctcggtggcttcatcgccgatacctttctcggcaggtacctaacgattgctatattcgccgcaatccaagccacgggtgtttcaatcttaactctatcaacaatcataccgggacttcgaccaccaagatgcaatccaacaacgtcgtctcactgcgaacaagcaagtggaatacaactgacggtcctatacttagccttatacctcaccgctctaggaacgggaggcgtgaaggctagtgtctcgggtttcgggtcggaccaattcgatgagaccgaaccaaaagaacgatcgaaaatgacatatttcttcaaccgtttcttcttttgtatcaacgttggctctcttttagctgtgacggtccttgtctacgtacaagacgatgttggacgcaaatggggctatggaatttgcgcgtttgcgatcgtgcttgcactcagcgttttcttggccggaacaaaccgctaccgtttcaagaagttgatcggtagcccgatgacgcaggttgctgcggttatcgtggcggcgtggaggaataggaagctcgagctgccggcagatccgtcctatctctacgatgtggatgatattattgcggcggaaggttcgatgaagggtaaacaaaagctgccacacactgaacaattccgttcattagataaggcagcaataagggatcaggaagcgggagttacctcgaatgtattcaacaagtggacactctcaacactaacagatgttgaggaagtgaaacaaatcgtgcgaatgttaccaatttgggcaacatgcatcctcttctggaccgtccacgctcaattaacgacattatcagtcgcacaatccgagacattggaccgttccatcgggagcttcgagatccctccagcatcgatggcagtcttctacgtcggtggcctcctcctaaccaccgccgtctatgaccgcgtcgccattcgtctatgcaaaaagctattcaactacccccatggtctaagaccgcttcaacggatcggtttggggcttttcttcggatcaatggctatggctgtggctgctttggtcgagctcaaacgtcttagaactgcacacgctcatggtccaacagtcaaaacgcttcctctagggttttatctactcatcccacaatatcttattgtcggtatcggcgaagcgttaatctacacaggacagttagatttcttcttgagagagtgccctaaaggtatgaaagggatgagcacgggtctattgttgagcacattggcattaggctttttcttcagctcggttctcgtgacaatcgtcgagaaattcaccgggaaagctcatccatggattgccgatgatctcaacaagggccgtctttacaatttctactggcttgtggccgtacttgttgccttgaacttcctcattttcctagttttctccaagtggtacgtttacaaggaaaaaagactagctgaggtggggattgagttggatgatgagccgagtattccaatgggtcattgatcatgaattcatgatcatgatcatgatgatgaacattatgcatgtctatgttgatatgtttgaatttgattttgagttttgtttgtatattttatgatgcttttcttaattacctcttgtttccgagtcgacaaataatggaccgaccgataagggataaaagttaaagttttcccatcaggttctgtataaaagcagaaattgtaacatttcttaagatttgacgcaaccaacgtcttttaaagggcggccgnnnnnnnnnnnnnnnnnnnnnnnnnnnnnnnnnnnnnnnnnnnnnnnnnnnnnnnnnnnnnnnnnnnnnnnnnnnnn

SEQ ID NO: 117570 - DNA, 1445 bp, Arabidopsis thaliana
cttgttcttcctcttcttcgattctcctcttcgacgtctcttgttactgtgcgccgtctttaagccctacgtgctgccaacggcgcactctcctatcctacgctcatctatcgtcactcccacagcgagagctgtctcggaagtttccggttgtactacgatcgatccagattttctcgtagagatctctgattctaaccagacgcgggcgatgtcgaaagctcgtgtgtacaccgaagtcaatgtgattcgacccaaggattattgggattacgagtcactcattgttcaatggggggagcaagatgattatgaggtagtaaggaaggtagggcgtggaaaatatagtgaagttttcgagggtataaatgtgaacagcaaggagaagtgcattatcaaaatcctcaaacctgttaagaaaaagaagataagaagagagattaaaatacttcagaacctatgcggtgggccaaatattgtcaagctgcttgatgttgttagagatcaacattcgaaaactccaagcttgatatttgaatatgttaacagcacagactttaaagttttgtatcctacgttgactgattacgacattcgttactacatctatgagctgttgaaggcactagacttctgccattcacaaggattaatgcacagagatgtcaagcctcataatgttatgattgaccatgagctgcgtaagcttcgtcttatagattggggtcttgctgagttttaccaccctggaaaagagtataatgtccgtgttgtctcaagatatttcaagggacctgaacttcttgtggacttgcaagactatgactattcattggatatgtggagtcttggctgtatgtttgcagggttgttattccgtaaggaacctttcttctacggccatgacaaccaggatcagctagtgaaaatcgccaagggtgttggcactgacgaattgaatgcttatctgaacaagtaccagttagaacttgatccacaactggaagcacttgttgggcggcatagcaggaaaccttggtccaaattcatcaacgcagacaatcagcacttagtttcacccgaggcgattgatttcctcgacaagctacttcggtatgatcatcaagacagattaactgcaaaagaagccatggcgcacgcttacttcgcccaagttagggcagcagaaaccagcagaatgagaagtcaatgaaacacagagatctctctgtctataaacttactgatgatgatgatggtaatgttcatctttttcttcaaagtattttttttaaatcaaggtgatgtttctctgccaacttattaaacaatttgtcctgaattcgaatgtctgaaacggcttatattttaaatatatttttcattgtatgttgtatcaaaccaaaaaaaaaaaaacacgaattacaataaaacaaaaaaaaaaa

SEQ ID NO: 117571 - DNA, 1385 bp, Arabidopsis thaliana
  unsure (1)..(1385): unsure at all n locations
atgatactgccnnnnnnnnnnnnnnnnnnnnnnnnnnnnnnnnnnnnnnnnnnnnnnnnnnnnnnnnnnnnnnnnnnnnnncccacgcgtccgtcttgatcttacgtgcgccgttggcgcattctcttataccaccattaacgtgcgtcaacaccggaaccgttgaatcagacgttactggtatcaggttcgatcgttgcctcgataccgattctctcgccaagatctctctttccaccgtcatgtcgaaagctcgtgtttataccgatgttaacgtgatccgacctaaggattattgggattacgaatctctcaatgttcagtggggggagcaagatgattacgaggtagtgaggaaggtggggagagggaaatacagtgaggtttttgaggggattaacatgaataacaatgagaagtgtattatcaagattctcaagcctgttaagaagaagaagattagaagggagattaaaatacttcagaatctttgtggagggccaaatattgtaaagctgcttgatgttgtcagagatcaacactcaaaaacgccaagcttgatatttgagtatgtaaacagcacagactttaaggttctgtatccaacattgactgattatgacattcgctactacatctatgagctgttgaaggctttggacttctgccactcacaaggaataatgcacagagatgtcaagccacacaatgtcatgatcgaccatgagctgcgcaaacttcgcctaatagattggggtctcgctgagttttatcatcctggaaaagagtacaacgtccgtgtggcctcaagatacttcaaaggtcccgaacttctagttgatttacaggactatgactattccttggacatgtggagcctcggttgcatgtttgctgggatgatattccgcaaggaacctttcttctatggccatgacaaccaggatcagctcgtcaaaattgccaaggtactcggaactgatgaattgaatgcatatctgaataagtatcagttagaacttgatactcaactagaggcacttgttgggagacatagcaggaagccttggtccaaattcatcaacgctgacaataggcatttggtctcacctgaggcgattgattatttggacaagctgctccggtatgatcatcaagacagattaactgcaaaagaagcaatggctcatccctatttcgctcaagtcagggcagcagaaagcagcagaatgaggactcaatagagatgtctcggccgatttttgtttcttcttcttctccagtgtgctcttttgttgtttactaatacattttcatatccatatggatttcttttataatgtcgaaattatggatttataaatatgaaaaaaaaaaaaaaaaaa

SEQ ID NO: 117572 - DNA, 1376 bp, Arabidopsis thaliana
ggcccacgcgtccgcccacgcgtccgattcgacaaaagctaaaaccacgcgtccggaagaagcaaaaccctagagctcaaggtaatcgccgtcgatttctcaatctctcaccggcgattacatgccgatgaaagttgtacaatagctgctgtaagagagagatttatcaggtatttttagaatcatgtatagagacagaggaacggtgaattcgagacctgaagttgtggatcgtaaacggatcaacgacgctcttgaacgtccttctccttcaacctctcgtcaagttaacggcaaaggcaaaggaaccgttacggcggcgacgacgacggcgaacttgattgggaagcagcagtcgaataacatcaaccatagagattctcgttctgcttctctctcgaagaacaatacggtttctgatgatgaatcagacacagatagtgaagaatcagatgtgagtggttctgatggagaggacacttcatggatatcttggttttgtaatctaagaggaaacgagttcttttgtgaagttgatgatgattacattcaagatgacttcaacttgtgtggactcagcagtctagttccctactacgagtacgctcttgatttgattttggatgttgaatcttctcaaggagagatgtttacagaggaacagaatgaattgatcgagtcagcagctgagatgttgtatggactgattcatgctcgttacatattgactagcaaaggattggcagcaatgttagacaaatacaaaaactatgactttggaagatgtccaagagtttattgctgtggccaaccttgtcttccggttggtcaatcagacttaccgcgatctagcactgtgaagatatattgcccgaaatgcgaagacatttattacccacgatcaaagtatcaaggcaacattgatggagcttactttgggacaacgtttccacatctgttcctgatgacttatgggcatctcaagccagcgaaggcaacacaaaactatgttcaaagagtgtttgggttcaaattacacaaaccgtgaaggaagtttgacgacaaaacccaaggatcaagatcatggcgttggaatggaactgagaaagaagagacgtgtgtgaacagaaaccggaaaataaaacgtcactgtaatcacacgaatggtgaagagagcattcatgtctctatttgtcttcaggtacatacacattagaagaagcaaaagcatggttagaaagaaaaaaaacacgaaaatcttttaatgagtttgttaaacttgaacatgtatttttctaccttctgtaaacttttttattttgtttctcatcccagtgcctgatttagtcatttatcatttaaaaaagcatccattg

SEQ ID NO: 117573 - DNA, 2382 bp, Arabidopsis thaliana
gcccatcgtctctctctatcaatcagcgacggaaataaatggaaggtcaaggttgttgtggcggcggcggcggaaagacggagatgataccgacggaggaagctctgagaatagtattcggcgtctctaagcgtctgcctccggtaatcgtatcgctgtatgaagcacttgggaaagtgttggcggaagatattcgagctcctgatcctttacctccatatcctgcttccgtcaaggatgggtacgcagttgttgcttcagatggtcctggagaatatccggtgattactgaatcaagagctgggaatgatggtttgggtgtgactgttactcctggaactgtggcttatgtgacaactggtggacctatacctgtaggtgcggacgcagttgtccaagttgaggacactaaagtaattggagacgtctcaactgaagcaaaaagagtaaaaatactgattcaaaccaagaaaggcaccgatatccgtagagtgggttgtgatattgagaaagatgcaactgtactaacaactggagaaagaattggtgcctcagaaatcggcttgctagcaaccgcaggagtaaccatggtgaaggtatatcctatgccaatagttgctattctctctactggagatgaacttgtggagccgacagctgggactttaggtcgtgggcagattagggactcaaatcgagcaatgttagtggcagcagtgatgcagcagcaatgcaaagttgttgaccttggaattgttagagatgatagaaaagaacttgagaaggttttggacgaggccgtatcctctggagttgatattattttaacttctggtggtgtttcaatgggagacagggatttcgtcaagccattactcgaagagaaagggaaagtatatttcagcaaggtattgatgaaacccgggaaacctttgaccttcgccgagattagagcaaaaccaactgaaagtatgctggggaaaacagtccttgcatttggattacctggaaatcctgtgagctgtttggtttgtttcaatatctttgttgtgcctacaatccgccagcttgcaggatggacaagcccccatccactgagagtgcgacttcgacttcaggagcccatcaagtctgatcccatccgccccgagtttcatcgggccataatcaaatggaaagacaacgatggatcagggactcccggatttgttgctgagagcactggacatcagatgagcagtaggcttttaagtatgaggtcggctaatgctttgttggagttgcctgctacgggaaatgtgctttctgctggaagttctgtatcagctataattgtttctgatattagtgccttttcaatagacaagaaagcctcattatcagaaccaggctctattcggaaagaaaagaagtacgatgaagtacctgggcctgagtataaagtggctattcttaccgtcagtgatactgtctcagctggggctggacctgatcgaagtgggcccagagctgtgtcagtagttgattcctcgtctgaaaaactggggggagctaaggtagttgcaacagctgttgtccccgatgaagtggaaagaataaaagacattcttcagaaatggagcgatgttgacgaaatggatctcattcttacacttggtggtactggcttcactccaagagatgtaacacctgaagcaacgaaaaaggtgatcgagagagaaacacccggtctcctctttgttatgatgcaagagagcttaaagatcactccatttgcgatgctctcgcgctctgcggcaggaattagaggctcaacattgataatcaacatgcctggaaacccaaacgcagtggccgagtgtatggaggctctgttacctgcattgaaacacgcactgaagcagatcaaaggagacaagagagagaaacatccgaagcacatacctcacgcagaagccaccctaccgactgatacatgggaccaaagctataagtcagcctatgagacgggagagaagaaagaagaggctggatgttcttgtactcactaaaactctccagcttctccacaaagccccaagtgattttgctctgcactgttgtgactgtaaaacttttgacaagttttgtgtttgctgagttagttacacgaaacccaaatactatatatggtgcgaaatgtagtttttgtaataaggttctacttttttgtaataatatgcatatcccttgatgagaaaaatactttgtataagccaaataacagaaaatatcaacaatttgattaaacattcattttcggtttggtttacgaaaaaaaaaaaaaaaagggcggccgctctagaggatccaagcttacgtacgcgtgcatgcgacgtcatg

SEQ ID NO: 117574 - DNA, 662 bp, Arabidopsis thaliana
  unsure (1)..(662): unsure at all n locations
angggnggtaacctttcgaatggctttccatggccatttcntgggntgntccccaggttcccctggcncgaaggttcggggnaaccccggtccccttttnggtcnaggggcttaagntccccccnttgcgatntntcgcctttcggcaggattngggctcaaccttgttatcaacatgcctggaaacccaaacgcattgccgattgtatggaggctctgttacctgcattgaaacacgccactgaagccgatcaaaggagacaagagagagaaccatccgaagcccatccctcacgcagaagccaccctaccgcctgatacatgggaccaaagctataagtcagcctcatgagccgggagagaagaaagaagaggctggatgttcttgtactccctaaaactctccagcttctccttcaaagccccaagtcattttcctctgcccccccgtgactgtaaaacttttgacaagttttgtgtttgctgagttagttacccgaaacccaaatactatatatggtgcgaaatgtagtttttgtaataaggtttcacttttttgtaataatacgcataccccttgctggggaattattaaaaacccgcttaacccaagggcgccagctttagaggatccaagcttacgtacgcgtgcagtcgacgtc

SEQ ID NO: 117575 - DNA, 809 bp, Arabidopsis thaliana
gtagaattgtcatcttcgcaaaagcttcgagagtagtgcaatcgaaacaagtcatggatctttcgcctgttaaggaagctttggccgccaaatcctttgacaaaatcgccgatatctgcgatactctcatgcttcaggttgcttccgaaggaattgaatatcatgatgattggccttacgcaatccatcttctgggttacttttacgttgacgattgtgatagcgcacgtttcctctggaaaaggatacctacagctatcaaggagaggaagcctgaagttgttgcagcttgggggattggtcagaagctgtggacacacgtctatgcaggtgtatatgaagctattcggggttatgattggagtcaagaagctaaagatatggttgctgccttctcagatctttacacaaaaaggatgtttcagcttttgttgtctgcctactccacaattaccatccatgatttagctcttttcctagggatgacggaggatgatgccacaacttatgttgtagaggaatggatggaccagtgggatgcagcttcctcaaatgggcggagttgttgaaggaaacaagcttgttaaaaaggaggagcaaaaaaggctggattcatccgcaagctacaaccgctttgaccggcagtatgttgttccacctttgaaccatttaaaacctaaagtgcccgatctcctattaagatagtgaaattctaagaacagaattcgtttttgagagatttcacaatgactgattctaagttgcaacatatcttgactctttgagtatatgatgaataactcctacca

SEQ ID NO: 117576 - DNA, 779 bp, Arabidopsis thaliana
  unsure (1)..(779): unsure at all n locations
cnnnnnnnnnnnnnnnnnnnnnnnnnnnnnnnnnnnnnnnnnnnnnnnnnnnnnnnnnnnnnnnnnnnnnnnnccacgcgtgcgcccacgcgtccgatcgattcgattccaaatcggaaggatgataacgtcgtccctaacctcatctctgcaagctctcaagctttcgtctccgttcgcccatggctccactcctctctcatctctctctaagcccaattccttcccgaaccacagaatgcccgctttagttccggtcatcagagccatgaaaacgatgcaggggcgcgtggtgtgcgcaaccagtgacaagactgtggcggtggaggtggtgaggctggctccccaccccaagtacaagaggcgcgtgaggatgaagaagaagtaccaagctcacgaccccgataatcagttcaaggttggcgacgtggtcagactggaaaagagcagacccatcagtaagactaaatcatttgtggcgcttcctgtcatcgcaagggccgccaggaaagccgaagccggaggagatgaactccttggccttcccttggagtctcagcagccggcgtagagaatgattgctctttgtttcttttggtaaagccgtcttttttttgctctgcttctgtttgtttgttgtgtatcccggaaccagtgtaatttatggaatgcttttgtgatttcattgcttatgccatgagtgtgttttcaatctgacgctttccgacccccaattgtttcctcttacttcatcttcacctccagtaaataatgaatgt

SEQ ID NO: 117577 - DNA, 3045 bp, Arabidopsis thaliana
accacgcgtccgagagaaacaagtggctagctagctcgccaaacttcttcaacaatggcggtttcctagggtttgatgtttatatgatcgggaaactctctcatctagatcgcgataactctcttttccatggaaatgcccggtagaagatctaattacactttgcttagtcaattttctgacgatcaggtgtcagtttccgtcaccggagctcctccgcctcactatgattccttgtcgagcgaaaacaggagcaaccataacagcgggaacaccgggaaagctaaggcggagagaggcggatttgattgggatcctagcggtggtggtggtggtgatcataggttgaataatcaaccgaatcgggttgggaataatatgtatgcttcgtctctagggttgcaaaggcaatccagtgggagtagtttcggtgagagctctttgtctggggattattacatgcctacgctttctgcggcggctaacgagatcgaatctgttggatttcctcaagatgatgggtttaggcttggatttggtggtggtggaggagatttgaggatacagatggcggcggactccgctggagggtcttcatctgggaagagctgggcgcagcagacggaggagagttatcagctgcagcttgcattggcgttaaggctttcgtcggaggctacttgtgccgacgatccgaactttctggatcctgtaccggacgagtctgctttacggacttcgccaagttcagccgaaaccgtttcacatcgtttctgggttaatggctgcttatcgtactatgataaagttcctgatgggttttatatgatgaatggtctggatccctatatttggaccttatgcatcgacctgcatgaaagtggtcgcatcccttcaattgaatcattaagagctgttgattctggtgttgattcttcgcttgaagcgatcatagttgataggcgtagtgatccagccttcaaggaacttcacaatagagtccacgacatatcttgtagctgcattaccacaaaagaggttgttgatcagctggcaaagcttatctgcaatcgtatggggggtccagttatcatgggggaagatgagttggttcccatgtggaaggagtgcattgatggtctaaaagaaatctttaaagtggtggttcccataggtagcctctctgttggactctgcagacatcgagctttactcttcaaagtactggctgacataattgatttaccctgtcgaattgccaaaggatgtaaatattgtaatagagacgatgccgcttcgtgccttgtcaggtttgggcttgatagggagtacctggttgatttagtaggaaagccaggtcacttatgggagcctgattccttgctaaatggtccttcatctatctcaatttcttctcctctgcggtttccacgaccaaagccagttgaacccgcagtcgattttaggttactagccaaacaatatttctccgatagccagtctcttaatcttgttttcgatcctgcatcagatgatatgggattctcaatgtttcataggcaatatgataatccgggtggagagaatgacgcattggcagaaaatggtggtgggtctttgccacccagtgctaatatgcctccacagaacatgatgcgtgcgtcaaatcaaattgaagcagcacctatgaatgccccaccaatcagtcagccagttccaaacagggcaaatagggaacttggacttgatggtgatgatatggacatcccgtggtgtgatcttaatataaaagaaaagattggagcaggttcctttggcactgtccaccgtgctgagtggcatggctcggatgttgctgtgaaaattctcatggagcaagacttccatgctgagcgtgttaatgagttcttaagagaggttgcgataatgaaacgccttcgccaccctaacattgttctcttcatgggtgcggtcactcaacctccaaatttgtcaatagtgacagaatatttgtcaagaggtagtttatacagacttttgcataaaagtggagcaagggagcaattagatgagagacgtcgcctgagtatggcttatgatgtggctaagggaatgaattatcttcacaatcgcaatcctccaattgtgcatagagatctaaaatctccaaacttattggttgacaaaaaatatacagtcaaggtttgtgattttggtctctcgcgattgaaggccagcacgtttctttcctcgaagtcagcagctggaacccccgagtggatggcaccagaagtcctgcgagatgagccgtctaatgaaaagtcagatgtgtacagcttcggggtcatcttgtgggagcttgctacattgcaacaaccatggggtaacttaaatccggctcaggttgtagctgcggttggtttcaagtgtaaacggctggagatcccgcgtaatctgaatcctcaggttgcagccataatcgagggttgttggaccaatgagccatggaagcgtccatcatttgcaactataatggacttgctaagaccattgatcaaatcagcggttcctccgcccaaccgctcggatttgtaaaatacccccggtccattcaaaagttgttataatcatgatatgcacatatactctcagcattcttttgctgcccaggagggagacactagttaagatatagctttaaaggtacattcctcatgagctatcaatcatatcctacagaatcccatggtttttatacatgtattatttttgcgatctttgtctgctgttttgttccctttttaatgttgcagattgttaaaatgtacatgactattgtcacagggaggaaaaaaaaatgtagtaatggaaacaatgtgagggatataatctatctatctagtcccaaagggtaagcaatattgtgttgttatgtctttgtagcaatgcactgaaagctatatttaattacattgctgtacatttataccgctaaattagttactaagcgaaggtaaaaaagagcagctggtaaatgctgtcaaa

SEQ ID NO: 117578 - DNA, 1759 bp, Arabidopsis thaliana
  unsure (1)..(1759): unsure at all n locations
nnnnnnnnnnnnnnnnnnnnnnnnnnnnnnnnnnnnnnnnnnnnnnnnnnnnnnnnnnnnnnnnnnnnnnnnnnnnnnnnnnccacgcgtccgctttaccgaaagagaaatatcaagactaagaaacaagaagagtaagaatcattgggagagcgatcatggcgacgagagcaaacgtacctgaacaagtcagaggtgctcctctcgttgatggtttgaagattcagaacaaaaacggtgctgtgaagagtcggcgtgccctcggtgacatcggaaatcttgtttctgttcccggagttcaaggaggaaaggctcaacctccgattaatcgacccattactcgaagtttccgtgcccagttattagcgaatgcccaactcgaaagaaagccaatcaatggagacaacaaggttccagctcttggtccaaagagacaacctcttgctgcaagaaacccagaagctcaaagggcggttcagaagaagaatctagtggttaagcaacagacgaagcctgttgaagtgatcgagacgaagaaggaggtgactaaaaaggaagtagcgatgtcacctaagaataagaaagtgacgtactcgtctgtacttagtgctcggagcaaagctgcttgtggtatagtcaacaaaccaaagattatcgatattgatgaatctgacaaagataaccatttggctgcggtggagtatgttgatgatatgtactcgttctataaagaagttgagaaggagagtcagcctagaatgtacatgcacattcagactgaaatgaatgagaagatgagagcgatcttgattgattggttactagaagttcacatcaagtttgagctcaaccttgaaactctgtacctcaccgtcaacatcattgatcgattcctctctgtgaaagctgtccctaaaagagagttacagctagtgggaatcagtgccttgcttattgcttccaaatatgaagaaatctggccacctcaggttaacgatctggtgtatgtcacggacaatgcttacagtagcagacagattctggtgatggagaaggcaattcttggaaacctcgaatggtatttgacagtcccgactcaatacgtcttccttgtccgcttcatcaaagcttcgatgtctgatccagaaatggagaatatggttcacttccttgctgaattggggatgatgcattacgacaccttgacgttctgtccctccatgcaagctgcttcagctgtttacacggcaagatgctcattgaacaagtcccctgcttggactgatacattgcagttccacaccggctacacagagtctgagattatggactgctcaaagcttttagcttttcttcactcgagatgcggtgagagcaggctacgtgcagtgtacaagaagtactcgaaggcagagaatggaggtgttgctatggtttctccggccaagtctctcttgagtgctgctgctgattggaagaagcctgtttcttcttagatgttttttttcatcagatctctctctgattcaaaattctagatttctcatcagatactcttttgtttttttgagttcaaacgtattaatgaattcttctcatcagtgtttttcttaatctctgattacttggatattagatttctactatatctttaacagatagatgatgtttgactgtaataaatcagatgcgtgcaattagtttccgacttattgtaaattgaatgatgataaatgaaatgcataaaatagttaatgtt

SEQ ID NO: 117579 - DNA, 1612 bp, Arabidopsis thaliana
  unsure (1)..(1612): unsure at all n locations
accacgcatccgcccacgcgtccgccgaagaagagccacacactcacaaattaaaaagagagagagagagagagagacagagagagagagagattctgcggaggagcttcttcttcgtagggtgttcatcgttattaacgttatcgcccctacgtcagctccatctccagaaacatgggtgcaggtggaagaatgccggttcctacttcttccaagaaatcggaaaccgacaccacaaagcgtgtgccgtgcgagaaaccgcctttctcggtgggagatctgaagaaagcaatcccgccgcattgtttcaaacgctcaatccctcgctctttctcctaccttatcagtgacatcattatagcctcatgcttctactacgtcgccaccaattacttctctctcctccctcagcctctctcttacttggcttggccactctattgggcctgtcaaggctgtgtcctaactggtatctgggtcatagcccacgaatgcggtcaccacgcattcagcgactaccaatggctggatgacacagttggtcttatcttccattccttcctcctcgtcccttacttctcctggaagtatagtcatcgccgtcaccattccaacactggatccctcgaaagagatgaagtatttgtcccaaagcagaaatcagcaatcaagtggtacgggaaatacctcaacaaccctcttggacgcatcatgatgttaaccgtccagtttgtcctcgggtggcccttgtacttagcctttaacgtctctggcagaccgtatgacgggttcgcttgccatttcttccccaacgctcccatctacaatgaccgagaacgcctccagatatacctctctgatgcgggtattctagccgtctgttttggtctttaccgttacgctgctgcacaagggatggcctcgatgatctgcctctacggagtaccgcttctgatagtgaatgcgttcctcgtcttgatcacttacttgcagcacactcatccctcgttgcctcactacgattcatcagagtgggactggctcaggggagctttggctaccgtagacagagactacggaatcttgaacaaggtgttccacaacattacagacacacacgtggctcatcacctgttctcgacaatgccgcattataacgcaatggaagctacaaaggcgataaagccaattctgggagactattaccagttcgatggaacaccgtggtatgtagcgatgtatagggaggcaaaggagtgtatctatgtagaaccggacagggaaggtgacaagaaaggtgtgtactggtacaacaataagttatgaggatgatggtgaagaaattgtcgacctttctcttgtctgtttgtcttttgttaaagaagctatgcttcgttttaataatcttattgtccattttgttgtgttatgacattttggctgctcattatgttatgtgggaagttagtgttcaaaaaaaataaatcaaagaaaaatacaaaaaaaaaaaaaaaggctnnnnnnnnnnnnnnnnnntgtcctaannnnnnnnnnnnnnnnnnnnnnnnnnnnnnnnnnnnnngtagctgnnnnnnnnnnnnnnnnnnnnnng

SEQ ID NO: 117580 - DNA, 715 bp, Arabidopsis thaliana
  unsure (1)..(715): unsure at all n locations
ggctgcccaaaatgtcataacacaacaaattggacaataggattattaaaacgaagcatagcttctttaacaaaagacaaacagacaagagaaaggtcgacaatttcttcaccatcatcctcatgcttctactacgtcgccaccaattacttctctctcctccctcagcctctctcttacttggcttggccactctattgggcctgtcaaggctgtgtcctaactggtatctgggtcatagcccacgaatgcggtcaccacgcattcagcgactaccaatggctggatgacacagttggtcttatcttccattccttcctcctcgtcccttacttctcctggaagtatagtcatcgccgtcaccattccaacactggatccctcgaaagagatgaagtatttgtcccaaagcagaaatcagcaatcaagtggtacgggaaatacctcaacaaccctcttggacgnatcatgatgttaaacngtccagtttgtcctcgggtggnccttgtacttaggctttaacggnttntggnagaccgtatnacggggtcggtttccaattttttcccaanggttccaatttcaatgacccggaacggcttcagataaacntttttnatggggggattttagccgcctttttggcttaccgtanggtgtnaaaaggnttgctcgtncttccttagggnccgtttaaaggannggcnnggtttnc

SEQ ID NO: 117581 - DNA, 1939 bp, Arabidopsis thaliana
cccacgcgtccgcccacgcggaatttctcgagctacttcagttctcattctctctctctctaaaaaaccaaatccagagtcagagaaaatctgtgatggctctttccaacgcctcctctctctccaccagatctatctacggcggtgatctttctcaccgtccaagcaaccgtcaatcatccttcacatttcatcccgccgtcaacaccaagcctaaatccgttaacctcgtcacggctgtacacgcggctgagccagctagaaacgctgtttcagtcaaagaatccgttgcgtcttcttcgtctggtgcattgaaatggactccagagagctggaaactgaagaaggctctgcaacttcctgattatcctaacgccaatgagcttgagtctgtgcttaaaacgatagaggcttttcctccgattgtgttcgccggagaagctaggaatcttgaagagagattggctgatgctgctgttggtaaagcttttcttctccaaggaggtgattgtgctgagagtttcaaggagttcaatgctactaatatcagagacaccttcagggttctgcttcagatgagtattgttcttacattcggtggccaggttccggtcattaaggttgggaggatggctggtcaatttgcaaagcctagatctgatgcatttgaggagaaggatggagtgaaattaccaagctacaagggagataacatcaatggtgatacttttgatgagaaatccaggattcctgatcctaataggatgattcgagcttacactcaatctgcagctactttgaatcttcttagagcctttgccactggaggttacgctgctattcaaagagttactcaatggaaccttgattttgttgaacaaagtgagcaagctgacaggtaccaggaattagctaatagggttgatgaggccttggggttcatgtctgcatgtggacttggcacggatcatccacttatgactacaactgatttctacacatcccatgagtgtttgcttctgccttatgaacagtcccttacaaggttggattcaacttctggtctctactatgattgttctgcacacatggtctggtgcggagagcgtaccagacaattggatggcgctcatgtcgagtttctcagggggattgctaatcctctgggcattaaggtgagcaacaaaatggatccctttgagctggttaagctagtagaaatcctgaatcctaataacaagcctggaagaatcactgtaattgtgagaatgggtgccgagaacatgagagttaagcttccccacctgatcagagcagtccgcagatcaggccagattgtgacatgggtctgcgatccaatgcatggaaacaccatcaaaagcaccttgcggtcttaaaacacgtgcctttgactcaatactggctgaagtccgagcattccttgatgtgcacgagcaagaaggaagccacgcgggcggtatccatctcgagatgacaggtcagaacgtgacagaatgcattggagggtcccgcactgtgacctacgatgacctcagttctcgctaccacacacactgtgacccaaggctgaacgcgtcacagtctcttgaacttgccttcattgttgcagaacggctcaggaagagaagaacgggtagccagcgtgtgtcttgagtccggttcttcccttttatacactttttgattccaaacaaatcttttctctttgtcctgtgactgtgagttggtgtgtttatgacctaagttaaaagccccaaaagcctctctagagagtaaacctgtttctgctgtggacagaccatgtcatgtcattgttctttatgttaactttaatgtcaaaccgtgtcacttacactagtgtatatttctttttacatatctacacgaacatgaaccctgacgtagctcgaggaattcc

SEQ ID NO: 117582 - DNA, 445 bp, Arabidopsis thaliana
ttctcattctcattctctctaaaaaaccaaatcctgagtcagagaaacagagagaagagaagggctgtgatggctctttccaacgcctcctctctctccaccagatctatctacggcggtggtctttctcaccgtccaagcaaccgtcaatcatccttcacatttcatcccgccgtcaacaccaagcctaaatccgtcaacctcgtcacggctgtacacgcggctgagccagctagaaacgctgtttcagtcaaggaatccgttgcgtcttcttcgtctggtgcattgaaatggactccagagagctggaaactgaaaaaagctctgcaacttcctgattatcctaacgccaatgagcttgaatctgtgcttaaaacgatagaagcttttcctccgattgtgttcgccggagaagctagaaatcttgaaaagagattggctgatg

SEQ ID NO: 117583 - DNA, 1856 bp, Arabidopsis thaliana
gaattcctcgagctacgtcagggccctgacgtagccgtcaatcgaaatcccaaagatcagcgatggtgactctaaacgcttcttctcctctcacgaccaagtcgttcctcccctaccgtcacgctcctcgccgtccaatctctttctcccctgtcttcgccgttcattcgactgaccccaagaaatctacccaatcagcctccgcttcggttaaatggagtctagagagttggaagtcgaagaaagctttgcaattgccggattatcctgatcagaaggatgttgattcggttctacagacgctttcttcttttcctcctatagttttcgctggtgaggctaggaaactagaggataagcttggtcaagcggctatgggtcaagcctttatgcttcaaggtggtgattgtgctgagagtttcaaggaatttaacgctaataacattagagacacctttagggttcttcttcagatgggtgttgttctcatgttcggtggccagttaccagttatcaaggtgggaagaatggctggtcagtttgcgaagccgagattagacccatttgaggagaaagatggtgtgaagctgccgagttacagaggagataacataaatggtgatgcttttgatgagaaatcgaggattcctgatcctcataggatggttagagcgtacacacagtctgtggctacgttgaatctcttgagagcatttgctactggaggttatgcagctatgcagagagttagccagtggaaccttgatttcacgcaacatagtgaacagggtgacaggtaccgtgaattggctaatagagttgatgaggctttgggattcatgggtgcagctggacttactagtgctcacccgatcatgactactactgagttttggacatcccatgagtgtttgttattgccttatgagcaagcactcacaagagaggattcaacatctggactttactatgattgctctgcgcacatgctttgggttggagaacgaactcgccaacttgatggtgctcatgttgagtttctgaggggaatcgctaaccccctcggaatcaaggtgagtgataaaatggtccctagtgaactggttaagctgatagagatactaaaccctcagaacaagcctggaaggattacggttatagtgagaatgggagctgagaatatgcgggtcaagcttcctaatttgatcagagcagtccgtggagccggtcagattgtgacttgggttagtgatccaatgcacggaaacacaatcatggctcctggtgggctaaaaactcgttctttcgatgcaatcagggcggaattgagagcgttcttcgacgtccatgatcaagaagggagtttccctggcggggttcatttagaaatgactggtcaaaacgtgacagaatgtgtcggagggtcacgcaccatcacttacaacgatctaagctcacgctaccacactcactgtgacccaagactcaacgcatctcagtctctggagcttgcattcatcattgcagagcgtctgcgaaagagaaggcttggttccgggaatcttccgtcatctattggagtctagagaacaagaaaatacttatccgagctaggatgtgtgtgtatagaggctgatctctacttattaagttgccaagttaaatgagcttgtgtactgttaaaagtaagatattgttgtttttgtgtgttgggttatgattttgtctgaaataagtggctgactttataacccgtaaatctctacgtcacgcttgcaacaaaaattcgatatttgattcaatcacagaaaagtcctcccattaaggtgtaaaccctgacgtagctcgaggaattc

SEQ ID NO: 117584 - DNA, 2144 bp, Arabidopsis thaliana
  unsure (1)..(2144): unsure at all n locations
nnnnnnnnnnnnnaatacgactcactttagggaaagctcgtacgcctgcaggtaccggtccggaattcccgggtcgacccacgccaccctctcactctctctctcctttggattcttcagtgaggagaggaaatgtcggatcttcagacaccgcttgtgaggcccaagaggaagaagacttgggttgattactttgtcaagttcagatggatcattgtcatcttcatcgtccttccattctcagccacattctacttcctcatctacctcggggacatgtggtcagagtccaagtcctttgagaaacgtcagaaggaacacgacgagaatgtcaagaaagtcatcaaaaggcttaagggtagggatgcttccaaggacgggcttgtctgcactgctcgtaagccctggatcgctgttggaatgaggaacgttgactacaagagagcccggcatttcgaggttgacttgggggagttccgtaacatccttgagatcaacaaggagaagatgactgctagagtggagcctcttgttaacatgggacagatttcccgtgctaccgtcccaatgaacctgtctctcgctgttgttgctgagcttgatgaccttaccgttggtggacttatcaatggatatggtattgaaggaagctctcacatctacggtttgtttgctgataccgttgaggcttacgagattgttcttgcgggtggagagcttgtccgcgccacaagggataatgagtattctgatctttactacgcaatcccgtggtcgcaaggaactcttggactccttgtagctgctgagatcaggcttattaaagtcaaggagtacatgagactcacttacataccagtcaagggtgatcttcaagccttagctcaaggttacattgattcttttgctcccaaagacggtgacaagtcgaaaatcccggatttcgtcgaaggcatggtttacaatccaacggaaggagtgatgatggttggaacatatgcatctaaagaagaggcaaagaagaaagggaacaaaatcaacaatgtgggatggtggttcaagccgtggttctaccagcacgcgcagaccgccctgaaaaagggacagtttgttgagtacatcccaactcgtgaatactaccacaggcacacaaggtgcttgtactgggaagggaagcttattcttccatttggtgatcagttctggtttaggtacctcttaggttggttgatgcctccaaaggtctctcttcttaaggccactcaaggtgaagctatcaggaactattaccatgatatgcatgttattcaggatatgcttgttcctctttacaaggttggcgatgcactcgaatgggtccaccgcgaaatggaggtgtatccaatttggctttgcccacacaaactcttcaagcagccaatcaaaggccaaatctacccagagccaggcttcgagtacgaaaacagacaaggagacacagaagatgcacagatgtacactgatgttggagtctactacgcacctggctgtgtcctaagaggtgaagagtttgatggatcagaagcagtgcgtaggatggagaaatggctgatagagaaccatggattccagcctcagtacgcggtgtctgagctcgacgagaagagcttctggagaatgtttaatggtgaattgtatgaggagtgccgcaagaagtatagagctattggaacgttcatgagtgtttactacaagtccaagaaaggaaggaagactgagaaagaagttagagaagccgaacaagctcatctcgaaactgcttatgccgaggcagattaagtaataataagccttggtttgatgtaatggctcgggatgattattgttattcctagtagtgtctgttatgttgttgtttcctaatttcagttttagtgtcttgaagactcttgttgttgttgtttgcttcttgttgttgtttgactcattctggtttgagtggattttagagtttaaaacttttggatttgcctatgaaattgaaggtttccggttttcgnnnnnnnnnnnnnnnnnnnnnnnnnnnnnnnnnnnnnnnnnnnnnnntctaatcgnnnnnnnnnnnnnnnnnnnnnnnnnnnnnnnnnnnnnnnnnnngaagatca

SEQ ID NO: 117585 - DNA, 652 bp, Arabidopsis thaliana
  unsure (1)..(652): unsure at all n locations
ttancccccnatcaagncnaactncccngcccagnttccnntccgaancccggcnaggggcccccngaagatccccanatttcnctgntgnttgggnccactncncacctggcctntccctaagaggtgaagagtttgatggacccagaaccagttccgtaggatggagaaatggctgatagagaacccatggattcccagcctcagtaccccggtgtctgagctcgacgagaagagcttctggagaatgtttaatggtgaattgtatgaggagtgccgcaagaagtatagagctattggaacgttcatgagtgtttactacaagtccaagaaaggaaggaagactgagaaagaagttagagaagccgaacaagctcatctcgaaactgcttatgccgaggcagattaagtaataataagccttggtttgatgtaatggctcgggatgattattgttattccctagtagtgtctgttatgtggttgtttcctaatttcagttttagtgtcttgaagactctggtggttggtgtttgcttcttgttgtgttgactcatctgtgaggattaagtaactaaaaaaaaaaagcgcgcttaagacagctacgacgcggcagcacgtcaagtctctatagtgtcacctaaatcaatcg

SEQ ID NO: 117586 - DNA, 666 bp, Arabidopsis thaliana
  unsure (1)..(666): unsure at all n locations
acgactcacttattagggaaactggtacgcctgcagggtaccggtccggaattcccgggcgctgttgttgctgagcttgatgaccttaccgttggtggacttatcaatggatatggtattgaaggaagctctcacatctacggtttgtttgctgataccgttgaggcttacgagattgttcttgcgggtggggagcttgtccgcgccacaagggataatgagtattctgatctttactacgcaatcccgtggtcgcaaggaactcttggactccttgtagctgctgagatcaggcttattaaagtcaaggagtacatgagactcacttacataccagtcaagggtgatcttcaagccttagctcaaggttacattgattcttttgctcccaaagacggtgacaagtcgaaaatcccggatttcgtcgaaggcatggtttacaatccaacggaaggagtgatgatggttggaacatatgcatctaaagaagaggcaaagaagaaaggggacaaaatcaacaatgtgggatggtggtcaanccgtggtctnccaanacgggganacccgccctgaaaaagggcagttttgttgganancccaccngtgaancttccccanggcacaaaggcgtttnncttggaaggncgtttctccatttggncagnt

SEQ ID NO: 117587 - DNA, 907 bp, Arabidopsis thaliana
  unsure (1)..(907): unsure at all n locations
atatggaatncgcggccgcggnacttttacctgggaggtaagttgatgcctacaaaggacttttttctgaaggccactcaaggtgaagctatcaggaactattaccatgatatgcatgtgattcaggatatgcttagtcctctttacaaggctggcgatgcactcgaatgggcacaccgagatctgctcttgaaggggttttgggannggcccacacaaactctttgaaacaaacaatcaaaggccaaatgtgcccagagccagtcttctattacgaaaaccgacaatgaaacccagattatgctcagatgtacacctgatgttggagtctactacgcacctgactgtgtgctaagaggtgaagagtttgatggatcataagcagtgcctccgatggagaaatggctgctaaaaaaaccatggattccaaccctcagtacgcggtggctgagcccagacgagaagaagcttctgcagaatgtttaatggtgaattgtatgaggagtgccgcaagaagtatagagctattggaacgttcatgagtgtttactacaagtccaagaaaggaagcaagactgagaaagaagttagacaagctgancaagctcatctcgaaactgcttatgccgaggcagattaagtaataataagccttggtttgatgtaatggctcgggatgattattgttattcctagtagtgtctgttatgttgagagtcctcatttcagtgttagtgtcttgaagactcttgttgatgttgtttgcttcttgttgttgtttgactcattctggtctgagtggatcttagagtttacaacttttggattgccctatgcggcccgcgaattcctgcagcccggggcatccactagtatagagcgtccgccaccgcggtgcagctccagc

SEQ ID NO: 117588 - DNA, 1134 bp, Arabidopsis thaliana
  unsure (1)..(1134): unsure at all n locations
nnnnnnnnnnnnnnnnnnnnnnnnnnnnnnnnnnnnnnnnnnnnnnnnnnnnnnnnnnnnnnnnnnnnnnnnnnnccacgcgtccgtacggctgcgagaagacgacagaaggggaagcgttgtaaaagaaagtgtgattcacgcgctttgcttcttccgtttgccctaaacgactctgctagagaagacgaaggagagagaaaatccctccgattatattccgtacaatccgatcgatttcccggcgccagatctcaccgcgactcgtctactttccgatttggttcgtgttgactcagttacgattaaactatggatccaatggatatagtcggcaaatccaaggaagacgcttctcttccaaaagctacgatgactaaaattataaaggagatgttaccaccagatgttcgtgttgcaagagatgctcaagatcttctcattgaatgttgtgtagagtttataaatcttgtatcttcagaatctaatgatgtttgtaacaaagaggataaacggacgattgctcctgagcatgttctcaaggcattacaggttcttggttttggagaatacattgaagaagtctatgctgcgtatgagcaacataagtatgaaacaatgcaggacacacagaggagcgtgaaatggaaccctggagctcaaatgactgaggaggaagcagcagctgagcaacaacgtatgtttgcagaagcacgtgcaagaatgaatggaggtgtttcggttcctcaacctgaacatccagaaactgaccagagaagtccgcaaagctaactgaaaccgtaagggtaagtgttaggcaagaaaaaacaacatccttttaacattcccttgtaagttgcaaatgcgtatgttctctgtttatatgctcttagtatgatatatgttagttagtgtttcacgatctaaaaacacttgtgattcagatgtaattagtaagcattccttgttttgtgtttactttgtgtcttgactaagcatggtgggtcaggtctacacaaagcatctgattcgatgacttacaggaatcttaatgtttgtagattggataaatttggtgattggtgtaattgtttttccataaacacaatgcaatcattgtttagtgttgttaac

SEQ ID NO: 117589 - DNA, 1364 bp, Arabidopsis thaliana
cagatctttccaattgaaagcgaaccgtgaattttgagtctctttaccggaggagaaaaaatgcttggtggattatacggagatcttcctccaccgaccgatgatgagaaacccagtggaaactcctcttccgtctggtcacgcagtaccaaaatggctccacctacacttcgcaaaccaccagcttttgctcccccgcaaacaatcttaagacctctcaacaaacctaaacctatcgtttcggctccgtacaagcctcctccgaattcatcgcaatcggtgcttattccggcgaacgaatcagcaccttcgcatcagcctgcattggttggtgtgacttcatcggtgattgaagagtacgatccagcgagacctaacgattacgaggagtataagagggagaagaagaggaaagctacggaagctgagatgaaacgagagatggataagagaaggcaagtgtatccggaaagagatatgagagaaagagaagagagggagaggagagagagagagataacagtgatcctctcggttgatatctccggtgaggaacgtggaagagaccctgctagagtagtggtggaagtgttgggaagggaagatcctcgtctcctccctgggaatgttgatgggtttagtattgggaaatcgaagccgagtgggttaggagtaggagcaggtggacagatgacacctgctcagaggatgatgccgaagatgggatggaaacaaggacaagggcttgggaaatcagagcaagggattcctacgccattgatggctaagaagactgatcgtagagctggtgtcattgtcaatgctagtgagaataaatcttcttcggcggagaagaaggttgttaagagtgttaatatcaatggtgaaccaaccagggttttgcttcttagaaacatggttgggccaggacaagtagatgatgagctagaagatgaggtaggaggcgagtgtgccaaatacggtacagtcactcgtgtactgatattcgagatcactgaaccgaacttccctgtacacgaagcagtaagaatctttgttcagttttcaagacccgaggaaacaactaaagcccttgtagacctcgatgggagatactttggaggaagaaccgtacgtgcaacgttctatgatgaagagaaattcagtaagaacgagttggctccagttccaggtgaaatccctggctattaataactcctaagacaaagaagaaacttcatcttctaggagattcttgttagagaaagaaatcatagactgaggttttaaaaacatttgtaaagtacttagaaatcttgggttatctctttattgttgttcaataaagcttcacaaggatcaag

SEQ ID NO: 117590 - DNA, 943 bp, Arabidopsis thaliana
  unsure (1)..(943): unsure at all n locations
gtctggatttccggttggacccgccgtccgcgctctttcaccacataaaaactcataaactcgatcgaaccaaagctaaacgaaaaacttaaaacccaaatcttatcactactctaaaagaatcttcatcatggcctcagtaacctcagccaccgttgcaatcccatctttcaccggccttaaagcctcaaccatcaaatcatccgccaccgtcagaatccaaactgctgctgttgcatcaccgaagcttacagtgaagtcatctctaaagaacttcggagtcgcggccgtagcggctgcagcttcaattgctttggccggaaacgccatggcaatagaagttctcttgggaggaggggatgggtcgttagcttttattcccaacgacttctctatagctaaaggagagaagattgtgttcaagaacaacgctggatacccacacaatgttgtcttcgatgaagacgagatcccaagtggcgtcgacgtggccaagatctcgatggacgagcaagatctactcaacggtgcgggagagacgtacgaggttgctttgaccgagccagggacttacagcttctactgtgcgccacatcagggtgctggtatggtcggtaaagtcaccgttaactaaaatgtgtgtgtgagtaagtgagggagtctcggactcaattagaggctcttctttcacattcttacattattacataaagtgttttgtaattctaaagagtgttgaatcgaatggaccgtgattgttgttgtactgtgactggttccataaatggtttttcttggtttatatatgtaacaaaaaaaaaaaccaaagggcggccgctctagaggatccaagcttacgtacgcgtgcatgcgacgtcaagatcttttataggtcgtcctaaaaaaaccgncccgcgcggcgggcgctgtaaatttcgccctc

SEQ ID NO: 117591 - DNA, 625 bp, Arabidopsis thaliana
  unsure (1)..(625): unsure at all n locations
tcgtgggtcgacgcaagactctaaagtgagtcatattaagggaaaacgaaaaacttaaaacccaagtcttatcactactctaaaagaatcttcatcatggcctcagtaacctcagccaccgttgcaatcccatctttcaccggccttaaagcctcaaccatcaaatcatccgccaccgtcagaatccaaactgctgctgttgcatcaccgaagcttacagtgaagtcatctctaaagaacttcggagtcgcggccgtagcggctgcagcttcaattgctttggccggaaacgccatggcaatagaagttctcttgggaggaggggatgggtcgttagcttttattcccaacgacttctctctaatagctaaagggagagaagattgtgttcaagaacaacgctggtatacccacacaatgttgtcttcgatgatgacgagatcccaagtggcgncncgtggcaaaattncgttggcggnaagnttncctacggtngggaaacgncgaggtcgtttcccgccanggggttaacgttnctgtggcaacanggggtgatgnggaaannccgnacaaaatggtngnaaagagggctggcaattaggttttcaatntnatntnaaaaggg

SEQ ID NO: 117592 - DNA, 619 bp, Arabidopsis thaliana
  unsure (1)..(619): unsure at all n locations
caagctctaattcgactaactttatggaaagctggtccgcctgcaggtacctgtccccaattcccgggtcgacccacgcgtgcgggcggngcgagaaacnacagaaggggaccacataaaaactcataaactcgatcgaaccaaagctaaacgaaaaacttaaaacccaaatcttatcactactctaaaagaatctttcatcatggcctcagtaacctcagccacccttgcaatcccggcgggcaccggccttaaagcctcaaccatcaaatcatccgccaccgtcagaatccaaactgctgctgttgcatcaccgaagcttacagggaagtcatctctaaagaacttcggagtcgcggccgtagcggctgcagcttcaatngctttggccggaaacnccatggcaatagaagttctcttgggaggaggggatgggtcgttagcttttatncccaacgactttcttctaatagctaaagggaggagaagattgtggttcaaggaacaacggctgggatacccaacancaatggttggccttccgatgaaagaacgnagattccccaagtnggggtngnncccaagggggnccggggtttgntttnaaanaaagnnttgg

SEQ ID NO: 117593 - DNA, 682 bp, Arabidopsis thaliana
  unsure (1)..(682): unsure at all n locations
tcgccggtcgacgcaagcgactgtactgacgtcgtgttaacgagtcagtggtgctgcggaaattctataaaaaggaaacgaaaaacttaaaacccaaatcttatcactactctaaaagaatcttcatcatggcctcagtaacctcagccaccgttgcggtcccatcttgcatccggccttaaggcctcatccatcaaatcatccgccaccgctcagaatgccaagctgcttgctgttgcatcgaccgtcgcttacagtgaagtcatctcggagaagaacttcggagtcgcggccgtagccgctgcagcttcaattgctttggccggaaacgccatggcagtagaagtgctcttgcgaggaggggatcgggtcgtgagcttttacttcccatcgacttctctatacgccaaaggagagaagattgtgttgcaaaggaacatcgtctggatacccacacaatgttgtcttcgatgaagacgagatcccaagtggcgtcgacgtgggcaagatctcgatggacgagcaagatctactcaaacggtgcgggagagacgtacgaggttgctttgnccgagncaggggcttanagctttantgtgcgcanatcaggggntgggatggncggaaagcncgtaacnaaatgtngtgtangaagtnnggggcccgngccattaanggcctt

SEQ ID NO: 117594 - DNA, 329 bp, Arabidopsis thaliana
  unsure (1)..(329): unsure at all n locations
ttccgaggctacgacccacgcgtgcgctgtatttgtggtctacctattctactcatccgtgaccgtcagaattcaaactgctgctgttgaatcaccgaagcttacagtgaagtcatctctaaagaacttcggagtcgcggccgtagcggctgctgcttcaattgctttggccggaaacgccatggcaatagaagttctcttgggaggaggggatgggtcgnnagctnntattnccaacgtcttctctatagctaaaggatagactattgagtgcacgaacagcgctattttcccacaccatgttgtactcaacgaatgcacaattcttt

SEQ ID NO: 117595 - DNA, 2502 bp, Arabidopsis thaliana
aaataagtaatcttgtgattgcaattgcattgcttagtgatcttctcaacttttatttgtgttcaatcttcagcattgctgcctttgtctcaaaggtggttctgtaaattttctcctaagccatcctcattgacaaacattttcaaggtttcaatttcaaccatggcaaacactctcaatggaaatgtgatcatgacttcaaagcctcagagtacttaccaagttgtggtagctgcaaccaaggaaatgggtattggtaaagacggaaaacttccatggaatttgcctaccgatctcaagttcttcaaggatttaactttgtccacttcggattctgctaagaagaacgctgttgttatgggtaggaaaacgtgggagtctattcccaaaaagtataggccactctctggtcgcctgaatgttgtcttgtctcgttctagcggtttcgatatagccaacactgaaaatgttgtaacttgcagtagcatagattctgctctagacttattagctgcacctccgtttagtctgtccattgagaaagtgtttgtaataggaggtggcgacatattgaggtgtgtgttctatagtcaagactctcccttttttcgtgattttaattctctttgatcgtgttatgtttgttgtattgtagggaagctttgaataaaccgagctgtgaagccatccacataactgagattgatacaagtatcgactgtgatacatttattcccacggttgacacttctgcatatcagccttggtgttcgtcgtttccaatatgtgaaaatggtcttcgattttccttcacgactcatgttcgtgtaaagagttcttctgccggtgaagcctctgatgagagtgatggatcaaaggttcttcaagttgattggaagaagttttcttctgttcttcctaaaatgatttttgaccggcatgaggaatatctctacttaaatctggtcaaagagataatctcaaatggaaacttaaaagacgataggacagggactggtacattatctaaatttggttgtcaggtgagttactacttcataatatgtatctgaatgtcttggttctggtttgcttatcaaaagttaacaaatttccatatctttggatccacagatgaaattcaatttacgcaggaattttccacttctgacgacaaaggtatgttcacttttacattgacttttcatgttttaagcccaaagagagtttgcttcgtcttccctgcatatccggactaacaagatctgtttgcatttcacttgaaagagagttttctggagaggtgttgttgaggaacttctatggttcataagcggttcaaccaatgcaaaggtaagaaaacagatcatttatcatcattttcatgccttaagcaccgtgattgatcaagatgtggagcatatgtagatgaactagattttttttttctttctgagaagtttgtgtaagtggcaggtacttcaagaaaagggtatccgtatatgggatgggaatgcgtcgagagcatatcttgatgggtaaactttaattcagcatttttctttcacaacttgaagctttgtggccattacactgataaattgaaagtttttaattttcagtattggactgactgagagagaggaaggtgaccttggacccgtttatggatttcagtggagacactttggtgctaagtcagtagcttctctcttatctcttgacactttctgagttttggcaaaacagatttctgtgtcgagacattttgttcatctctctctacaggtacacagatatgcatgctgattatactggccaaggatttgatcagctcttagatgtaattaacaagatcaagaacaatcctgatgatcgacggattataatgtcagcttggaatccttctgatcttaagctgatggcacttcctccatgccacatgtttgcacagttttatgttgcaaatggagaactttcatgtcaaatgtatcagcgttcagccgatatgggtctcggcgtaccgtttaacattgcctcatactcccttcttacatgcattcttgctcacgtctgcggtaaagttctaattcccactataaaaggagcaaatttgtgcatttcaaatatcagtcatcgtctgatagtttgttgacattatgcagatcttgttcctggtgattttatccatgtgattggagatgctcatgtttacaaaaaccatgtcaggcctctgcaagagcaacttgagaacccaccaaaaccttttcctgtgagtataaacaaacacatgatttgctgattcttcaatcttgtttgagtttgatgaatgcataatctaccaataattctttgcaactatatgcttatttatctttgggatatttacaggttttgaagataaatccagagaagaaagatatagattcttttgttgcggatgactttgagctcattggctatgatcctcacaagaaaatagatatgaaaatggctgtttag

SEQ ID NO: 117596 - DNA, 661 bp, Arabidopsis thaliana
  unsure (1)..(661): unsure at all n locations
nnnnnnnnnnnnnnnnnnnnnnnnnnnnnnnnnnnnnnnnnnnnnnnnnnnnnnnnnnnnnnnnnnnnnccacgcgtccgctaaaatgattgttgaccggcatgaggaatatctctacttaaatctggtcaaagagataatctcaaatggaaacttacaagacgataggacagggactggtacattatctaaatttggttgtcagatgaaattcaatttacgcaggaattttccacttctgacgacaaagagagttttctggagaggtgttgttgaggaacttctatggttcataagcggttcaaccaatgcaaaggtacttcaagaaaagggtatccgtatatgggatgggaatgcgtcgagagcatatcttgatggtattggactgactgagagagaggaaggtgaccttggacccgtttatggatttcagtggagacactttggtgctaagtacacagatatgcatgctgattatactggccaaggatttgatcagctcttagatgtaattaacaagatcaagaacaatcctgatgatcgacggattataatgtcagcttggaatccttctgatcttaagctgatggcacttnctccatgccacatgtttgcacagttatatgttgcaaatggagaactgtcatgtcaaatgtatcag

SEQ ID NO: 117597 - DNA, 2015 bp, Arabidopsis thaliana
  unsure (1)..(2015): unsure at all n locations
cacgcctaacctgcttcaatggaaaagtcatacatttacctaaccagaccttcttcgcatcttcggcttcttccttcgtgatctctcaaattctctcccttttaaagtcctaaatcaaaaccctaaacccataaatccaatccctccattcgaattattcactctctctctctctctctctcacaattactgatcggttctgaaatttgtagctatgcaggcaacggctttatcatctgggttcaatcctctaacgaaacgtaaagatcacagatttcccaggtcatgctctcagagaaattctctgtctttgattcaatgcgatataaaagagagatctttcggagagtctatgacgatcacgaatcgtggattgagttttaagacgaatgtgtttgagcaagctcgttctgtgactggagactgttcttatgatgaaacttcagctaaagcacgttctcatgttgttgcagaagataagattggtgtcttgcttttgaatttaggtggtcctgaaactcttaacgatgttcaacctttcttgtataatctctttgctgatccggatattataaggcttcctagaccatttcagtttcttcaagggactatagctaagtttatatctgttgttcgtgctccgaaatctaaagaagggtatgctgctattggtggtggctctcctttgcgtaaaataactgatgagcaagcggatgctattaagatgtctttgcaagcgaagaacattgctgctaatgtctatgttggtatgcggtattggtatccgttcactgaggaggctgttcagcagataaagaaggacaaaattactagacttgttgtactgccattgtatcctcagtattctatctctacaacgggttcaagcatacgcgttctccaagatttattcaggaaagatccgtacctagctggagtgccggtagctattataaagtcctggtaccaaaggcgaggctatgtcaattctatggctgacctcattgagaaggagcttcaaactttctctgatcctaaggaggttatgatattcttcagtgcccatggtgttccggtcagctacgtagagaatgctggagatccgtaccagaagcagatggaagagtgtattgacttgataatggaagagctaaaagccagaggggttcttaacgaccataaattggcataccagagtcgtgttggccctgttcaatggctgaagccatacaccgatgaggttcttgtcgaccttggtaagagtggtgttaagagtctactagccgttccagtcagtttcgtgagtgagcacattgagacacttgaggagatagacatggagtatagggaattagctcttgagtcaggggtagagaactggggacgggtacccgcgctaggtctcacaccatccttcatcaccgacttagctgatgcagtgatagaatcacttccttcagcagaagcaatgtcaaacccaaatgcagtggttgactcagaagatagcgagtcgtcagatgctttcagttacattgtcaagatgttcttcggttcgattctggctttcgtcctacttctctccccaaagatgttccatgcgttccggaacctatagaatctcgttggttttgtgttaagtcttttcttggagaaatgtcttggttaaattcaatatatatagtccaatctattgaagtactagtacaccagctctaataagctgatgtgggtaagtagttcaatagattggactatgtatattaaatttgactaagagataaactagagaatgggataaagatgagaacggtattagaaagttctttgaggaaatttagatgtattttaaattgaagatgcatttagctataaacatagtggctacgttcctcttagagatgaggagagaattatattctattattatttggtttcttttcttcgtttttgtatggtttcaatacttaattgtcaaaagtatcctataattttgttnnnnnnnnnnnnnnnnnnnn

SEQ ID NO: 117598 - DNA, 3232 bp, Arabidopsis thaliana
  unsure (1)..(3232): unsure at all n locations
ccttttgcttcttctcctttacttccttttttttttctttccatcattttgtcacaaaccggaaaaaaaatctcaccggagaaaaaataaatctcaccgacgacgaattcgatcatggaggtgttatctacttcctcacctctaacgcttcactcccaccgactcctctctgcttcttcttcttcttcacatgtcacctccatcgccgcttcttcactttcttcattcgcttcttcatatctcggaatctccctttctaaccgcacgatccaccgcttctccacaactccgacgaacttaagacgatttcctcaaagaaaacggaagaaattcactccgatttcagcggttttcgaacggttcaccgaacgagcgatcagagctataatcttctctcagaaggaagctaaatcgttgggaaaagatatggtttacacgcagcatcttctcttaggtttgatcgctgaggatcgtgatcctcaaggcttccttggatccggtatcaccatcgacaaggctcgtgaagctgtttggagtatttgggacgaagctaattccgattcgaaacaggaggaagcttcttctacttcgtattcaaaatcgacggacatgcctttctctatcagcacgaaacgagtctttgaagctgcggttgagtactctaggactatggattgtcaatatatcgcaccggagcatatagccgttggactcttcaccgttgatgatggtagcgccggcagagttctcaagagattgggagcaaatatgaatttgctcacagctgcagcacttacaagacttaaaggagagattgctaaagatggaagagagccatcttcttcatctaaagggagcttcgagtctcctcctagtggtcgaattgctggttctggacctggtggaaaaaaagcgaaaaatgtactggaacagttctgtgtggatctgacagcacgtgctagtgagggtcttattgatcctgttattggtcgggaaaaagaggttcaaagagttatccagatactttgccgcagaactaaaaacaacccaattcttcttggtgaagctggtgttgggaagactgccattgctgaaggactagcgattagtattgcagaagccagtgctcctggatttctcttgacgaaacgcatcatgtccctggatataggattgctaatggccggtgcaaaagaaaggggagagctggaggctcgagtcactgctttgataagcgaggttaaaaaatcaggtaaggtcattctcttcatagatgaagtgcatacacttattgggtctggcacagttggaagagggaacaaagggtctgggcttgacattgctaacctcttgaaaccatcacttggaaggggtgaacttcagtgcattgcatccacaacccttgacgaatttaggagtcagtttgagaaggacaaagcccttgcaaggagatttcagccagtgttgattaacgagccaagcgaggaagatgcggtgaagattttgttgggccttcgtgaaaaatatgaagcccatcacaattgcaaatatactatggaagccatagatgctgcagtgtacctttcatcacgatatatcgctgatagatttcttccagataaagctattgatctcattgacgaggcaggaagcagagctcgtattgaagcttttaggaagaaaaaggaggatgcaatctgtatcctatcgaagccacctaatgattactggcaagagatcaaaacagttcaggccatgcacgaagtggttctctcaagcaggcaaaagcaggatgacggtgatgccatttcagatgagtctggtgaactagttgaagagtcttctttgccacctgcagcaggcgacgatgagcctatactggtgggacctgatgatattgcagccgttgcatcggtttggtctggaattccagttcagcagatcactgcagatgaaagaatgcttcttatgagtctagaagatcagcttagaggcagagttgttggtcaagatgaggcggtagctgccatatctagagctgtgaagaggtcccgggttggcttaaaagatcccgaccgtccaattgctgctatgcttttctgtggaccaacaggggttggaaaaacggagcttacaaaagctctggcagcaaattattttggctcggaagaatccatgctgagattggacatgagtgaatacatggagcgtcatactgtgagcaagctgataggctctcctcctggttatgttggctttgaagaaggtggaatgcttacagaagctatcaggagacgtccttttacagtggttttgttcgatgaaatagagaaagcacatccggatatcttcaatattcttctccagctgttcgaagatggccatctaactgattcacagggaaggagagtatcttttaagaacgcattgatcataatgacctctaatgtcggatcattggccattgcaaagggaagacatggttcaatagggtttatcctcgatgatgatgaagaggcagcatcttataccggaatgaaagctttggtagtcgaagaactcaagaactatttccgtccagagttgttgaaccgaatagacgaaatcgtcattttccgacagctagagaaggctcagatgatggagatcttgaacctgatgctacaagacttgaagtcgaggctcgtggcactcggagttggtttagaggtgtctgaacccgtcaaggagctcatatgcaaacaaggctatgatccagcttacggtgcacgaccactccggagaactgtcacagagattgttgaagatccactcagtgaagcctttcttgccgggagcttcaagcctggtgatacggcttttgtagttcttgatgataccggaaacccatcggttcggaccaaaccagattcttccactatacgagttacagacaaaacatcgatcgcatagtttcaccattggaggattgtatataaagattctttgattatactcactcgtcttatacttaaatctcaattgcttgttgcaaacttgtatatataaagatacatagtgattagtccgtgaggtaattgtattaagtatttgttattcctcgaattaaaactatcctttcattcctgnnnnnnnnnnnnnnnnnnnnnnnnnnnnnnnnnnnnnnnnnnnnnnnnnnnnnnnnnnnnnnnnnnnnnnnnnnnnnnnnnnnnnnnnnnnnnnnnnnnnnnnn

SEQ ID NO: 117599 - DNA, 1036 bp, Arabidopsis thaliana
  unsure (1)..(1036): unsure at all n locations
aggtacactatagaagattatgacgtcgcctgcacgcgtacgtaagctccggattgtggaaaaaaaaagagagaagaaaaatggtgttgacaatctatgctcctttattcgcttcttcaaagagagctgttgtgacattggtggagaagggagtatcattcgaaactgtcaatgtcgatctcatgaaaggagaacagagacagcctgagtatctcgcgattcagcctttcggtaaaatcccagtcctcgtcgacggagactacaaaatcttcgagtcgcgtgcgatcatgaggtatatagcagagaagtatagatcacaaggacctgatcttttggggaagactattgaagagagaggacaagtagagcaatggttagacgttgaggctacaagttaccatccaccactattggctttaacgctcaacattgtctttgcaccacttatgggtttccctgctgatgagaaagttattaaggagagtgaagagaagcttgcagaagtgcttgatgtctatgaagctcagctttctaagaacgaatacttggctggtgattttgtgagtctagctgatttggctcaccttcctttcaccgagtatcttgttggtcctattgggaaggctcatttgatcaaagataggaagcatgttagcgcttggtgggataagattagtagccgtgctgcgtggaaggaggtttccgctaagtactcactacctgtttaaacaaggagatgttgacttggggggtttgtgtgagctttgtgttctttgagggagttcgttttcgggtcgattgtcttgttgtttcaataagaaacggaactctgtctcatttgttgtctctggtttcttgtattctgtaacttttcaagcttttcaataagagtttaaaatcagagtgactcaacccctggtttttcccccttttcagtgtaggtctttgataaaaaaaaaaaaaacaaaaagnnnnnnnnnnnnnnnnnnnnnnnnnnnnnnnnnnnnnnnnnnnnnnnnnnnnnnnnnnnnnnnnn

SEQ ID NO: 117600 - DNA, 657 bp, Arabidopsis thaliana
  unsure (1)..(657): unsure at all n locations
ccggttctatccaactcttttagggaagagctggtccccctgcaggtcccggtccggaattcccggttcgacccacgcgtccgaaaaaaaaagagagaagaaaaatggtgttgacaatctatgctcctttattcgcttcttcaaagagagctgttgtgacattggtggagaagggagtatcattcgaaactgtcaatgtcgatctcatgaaaggagaacagagacagcctgagtatctcgcgattcagcctttcggtaaaatcccagtcctcgtcgacggagactacaaaatcttcgagtcgcgtgcgatcatgaggtatatagcagagaagtatagatcacaaggacctgatcttttggggaagactattgaagagagaggacaagtagagcaatggttagaccgttgaggctacaagttaccatccaccactattggctttaacgctcaacattgtctttgcaccacttatggggttccctgctgatgagaaagtttttaaggggagtgagggaagcttccagaagtccttaatgcctttgaggccanttttctaggccgatacttggtggggttttttngcttgctgctttgcccctcccttcccggaccttttggcctttggaggccnttgccaaggtgggnttttccgtttt

SEQ ID NO: 117601 - DNA, 691 bp, Arabidopsis thaliana
  unsure (1)..(691): unsure at all n locations
cccaagcgtccgcagatccctttttctctctcttttctttccctctataaaatcgcgtcctgctatagtgagtttagaaagaaactgatagtagaaaaaaaaagagagaagaaaaatggtgttgacaatctatgctcctttattcgcttcttcaaagagagctgttgtgacattggtggagaagggagtatcattcgaaactgtcaatgtcgatctcatgaaaggagaacagagacagcctgagtatctcgcgattcagcctttcggtaaaatcccagtcctcgtcgacggagactacagaatcttcgagtcgcgtgcgatcatgaggtatatagcagagaagtataggatcacacggacctgatctttttggggaagactattgaagagagaggacanntagagcaatggttagacgttggaggctacaagttaccatccacccactatttgggttttaacgctcaacattgtctttgggaccacttatgggtttcccctgctgntgaganagttttttaaggagagtgaaggaggaagcttggagnagttncttggttgtcttttaagntcangnttcntaagaacgantactgggtggnnttnnggggagctntngttgtttnggttcacccccctccaccaatntnttttnggccctttggaaggtcattggccaanttngcanntt

SEQ ID NO: 117602 - DNA, 1013 bp, Arabidopsis thaliana
  unsure (1)..(1013): unsure at all n locations
cagctcacttctgactttctatagggaaacctggcacgcctgcaggtaccggtccggaatttcacgggtcgacccacgcgtccgctgcttttgaatttcaaaccttcacataaaaaaaatacttttgaatccgtgtttcattcatcgaatctttttccgataactatggctgaggaaatcaagaatgttcctgaacaggaggtgccaaaggtagcaacagaggaatcatcggcagaggttacagatcgtggattgttcgatttcttgggaaagaagaaagacgaaacaaaaccagaggagactccgatcgcttcagagtttgagcagaaggttcatatttcagagccggagccagaggttaaacacgaaagtcttcttgaaaagcttcaccgaagcgacagttcttctagctcctcaagtgaggaagaaggttcagatggtgagaagaggaagaagaagaaggagaagaagaagccaactactgaagttgaggtaaaggaggaagagaagaaagggtttatggagaagttgaaagagaagcttcctggacacaagaaacctgaagacggttcagccgtcgctgcggcaccggtggttgttcctcctcctgtggaagaagcgcatccagtggagaagaaagggattcttgagaagattaaggagaagcttccaggataccaccctaagaccaccgtagaggaggagaagaaagataaagaataagaagattatcattaaagatattaagaataatgatggttgatttgctttgtttttttttttttttattgtgatgattgatcatcttttgcttttgtgatgtgtaagtttgttggcttttttgttgattacaatttcttattttctcttgtatatggtttttaaaaacaaaagatctcaaggtattttaatggtatgaatattttcatttgatgaagtgatatgcatgatataattttatgcnnnnnnnnnnnnnnnnnnnnnnnnnnnnnnnnntcnnnnnnnnnnnacat

SEQ ID NO: 117603 - DNA, 1076 bp, Arabidopsis thaliana
cccacgcgtccgcccacgcgtccgcccacgcgtccgcccacgcgtccgcccacgcgtccgctgcttttgaatttcaaaccttcacataaaaaaaatacttttgaatccgtgtttcattcatcgaatctttttccgataactatggctgaggaaatcaagaatgttcctgaacaggaggtgccaaaggtagcaacagaggaatcatcggcagaggttacagatcgtggattgttcgatccacgcgtccgagaagaaagactaaacaaaaccagaggagactccgatcgcttcagagtttgagcagaaggttcatatttcagagccggagccagaggttaaacacgaaagtcttcttgaaaagcttcaccgaagcgacagttcttctagctcctcaagtgaggaagaaggttcagatggtgagaagaggaagaagaagaaggagaagaagaagccaactactgaagttgaggtaaaggaggaagagaagaaagggtttatggagaagttgaaagagaagcttcctggacacaagaaacctgaagacggttcagccgtcgctgcggcaccggtggttgttcctcctcctgtggaagaagcgcatccagtggagaagaaagggattcttgagaagattaaggagaagcttccaggataccaccctaagaccaccgtagagggaggagaagaaaggataaagaatttagaaggattattcattttaaaggatatttaagaaataaatggatgggttggaattttgcttttggttttttcttcttttttttttaatatggtggaatggatttgggaatccaatctttttttgggcttctttggggggaatgggggttaaaggcttttgggtttggggccttttttttattggtatgggaattaacccaaatattttcccttaaatttcttccctccctttgggaaattaagggggggctttttttaaaaaaaaccccaaaaagggaatccttccaaggggggatttctttaaatggggtatttggaaaatatttttttcatattttggattttaaaaaaaaaaaaaaaaaaaaaaaggggcg

SEQ ID NO: 117604 - DNA, 936 bp, Arabidopsis thaliana
acgcggccgccaccgcatcccaaaccataacgcttaatccttaaaaaccgtccagatccatttccttcctctaaaactcatcacacacacttctaatggcttcttcttcttgtttgaatctcttcttcttctcttttctctccgctctaatcatttctaaatctcagatctctgattccgttaacggggtcgttttccctgttgttaaagaccttccaaccggtcaatacctcgcacagattcgactcggtgactcaccggatccagtcaagctcgtagtcgatctggccggctcaattctctggtttgattgttcctcaagacatgtttcctcgtcaaggaacctaatatccggtagctctagcggctgcttaaaggcaaaagttggaaatgaacgagtatcatcatcatcatcatcgcgtaaagaccaaaacgccgattgcgaattacttgttaaaaacgacgcctttgggattacggcgagaggagagcttttcagtgacgtcatgtcggttggctctgttacttctccgggaaccgttgatctacttttcgcttgtactccaccgtggctgttacgtgggctcgctagtggagcccaaggagtaatgggcttaggaagggcccaaatctcactcccttcacaactcgccgcggaaactaacgaacgtcgtcggttaactgtttacctgtcgccgttgaacggtgtcgtatcaacgagttcggtggaggatgtctttggagtggctgcgtctagatcgctggttacacgcctttgttatccggtcgagtggcactacgtatttacgtgaaatcataaagtcacggggaaagctctctgaaggtcgtggcgtgagctacacggggttctacacattaagagctgacacagggtcgggagctacccaactgggtgagcactcgtgctctgcgacg

SEQ ID NO: 117605 - DNA, 932 bp, Arabidopsis thaliana
  unsure (1)..(932): unsure at all n locations
tgnaccccaaaggaaatnaanngggcttngggaagggcccaaaaannnttancncccctttnaaaaactcnncccngggaaaacttaacgaaacgtccgtcggcttaacttgtttacctggcgcccgtttgaacggttgccgtatcaacgaggtttcggttggaggggggttttggagtggctgcgtctaagatcgctggtttacacgcctttgttaaccggttcgagtggcaactacgtaattaacgtgaaatcgattagagtcaacggggaaaagctctccgtggaaggtccgttggcggtggagctgagcacggtggttccttacacgattttagagagctcgatctacaaggtgttcgcggaagcttacgccaaagctgcgggtgaagctacatcggtgcctcctgtcgcaccgtttgggctctgcttcactagtgacgtagattttccggcggtagatctagcgttgcagagtgagatggtgcggtggaggattcatgggaagaatctgatggtggatgttggtggtggagtccgatgctcggggattgttgacggcgggtcaagtcgagtcaacccgattgtaatgggtgggctacaattagaaggctttatattggactttgatttgggtaactcaatgatgggctttggacaaagaacacgctctgattcaacttcgttgtaatacagaaacctttgtaattgtaaccttctaattatctggtagatatcctcaattttgatctcttttgagggtactcttttcttacaatacctgctacaagcaatcatgcatttgtacaactaatagatctaatttaagaaacagctattacttaaaaaaaaaaaaaaagnnnnnnnnnnnnnnnnnnnnnnnnnnnnnnnnnnnnnnnnnnnnnnnnnnnnnnnnnnnnnnnnnnnnnnnn

SEQ ID NO: 117606 - DNA, 736 bp, Arabidopsis thaliana
  unsure (1)..(736): unsure at all n locations
agacgcggcgctcttagtaatagctgcatcttggtattgtgaccctgcaggaggaccaactggtaacatctgcagaatcatgggcagacgtcacagatcgtggataggccgatttcttgggaaagaagagagacgaaacataaccagaggagactccgatcgcttcagagtttgagcagaaggttcatatttcagagccggagccagaggttaaacacgaaagtcttcttgaaaagcttcaccgaagcgacagttcttctagctcctcaagtgaggaagaaggttcagatggtgagaagaggaagaagaagaaggagaagaagaagccaactactgaagttgaggtaaaggaggaagagaagaaagggtttatggagaagttgaaagagaagcttcctggacacaagaaacctgaagacggttcagccgtcgctgcggcaccggtggttgttcctcctcctgtggaagaaagcgcatccagtggagaagaaaggggttcttgagaagatttaaggggaagcttccaggataccaccctaagaccaccgtngaggaggnggangaaagntnaaggnttngaagnttntccttaaagnttttnaggantaatgatgggtgatttcctttggttttttttttttaattgggtgnttgacnccctttnntttgnnatggnaagttnttgcctttttgggtcaatcctattnccccgaaatgggtttaaaanaaaannttc

SEQ ID NO: 117607 - DNA, 1217 bp, Arabidopsis thaliana
cagctcgcaattaccctcactaaggggaacaaaagctgggagctccaccgcgggtgggcgggcgctctagaactagtggatccccgggctgaggtacgggtcgtttcctgtgtaagacttcacggtcatactcgccagattcatcgtgactacggatccagtcagctcgagtcgactggccggctcaatctttggttggatgtctaagacctgttcctggcagggactatatccgtagtttagcgctggtaagggaaaggggaaatgaacgagtatcatcatcatcatcatcgccgaaagaccaaaacgccgattgcgatttacttgttaaaaacgacgcctttgggatacggcgagaggagagcttttcagtgacgtcatgtcggttggctctgttacttctccgggaaccgttgatctacttttcgcttgtactccaccgtggctgttacgtgggctcgctagtggagcccaaggagtaatgggcttaggaagggcccaaatctcactcccttcacaactcgccgcggaaactaacgaacgtcgtcggttaactgtttacctgtcgccgatgaacggtgtcgtatcaacgagttcggtggaggaggtttttggagtggctgcgtctagatcgctggtttacacgcctttgttaaccggttcgagtggcaactacgtaattaacgggaaatcgattagagtcaacggggaaaagctctccgtggaaggtccgttggcggtggagctgagcacggtggttccttacacgattttagagagctcgatcttcaaggtgttcgcggaagcttacgccaaagctgcgggtgaagcaacatcggtgcctcctgtcgcaccgtttgggctctgcttcactagtaacgtagattttccggcggtagatctagcgttgcagagtgagatggtgcggtggaggattcatgggaagaatctgatggtggatgttggtggtggagtccgatgctcggggattgttgacggcgggtcaagtcgagtcaacccgattgtaatgggtgggctacaattagaaggctttatattggactttgatttgggtaactcaatgatgggctttggacaaagaacacgctctgatacaaattcgttgtaatacaggaacctgtgttatagaaacatacaaattgtctggtagatatcaacaatttgcggccgcgaattggatatcgtgctctaaaacc

SEQ ID NO: 117608 - DNA, 965 bp, Arabidopsis thaliana
  unsure (1)..(965): unsure at all n locations
cannnnnnnnnnnnnnntacgactcactattagggaaagctggtccgcctgcaggtaccggtccggaattcccgggtcgtcccacgcgtccgggtgaatgatcctaatccgtttagcttttaaaaaaataagaagacatatttatcaacttgatcaacttgagcaagttgcagcagatattttcctcggccaagatctagagttttgagaatggcgatggtatcaggaagacgatctactctaaaccccgacgcacctctttttattccggcagctgtacgacaagtggaagatttctcaccggagtggtggcaattggtgacaacttcgacttggtaccctgattactggatcagtcagcagcagcaaggcgcggatggtttctatgacaacggagagaatgagaatggtggaggtcatatcgatgtagctgatcttcttccagaatcatttgattttgatgatatggaagatttctttgacactgatgctgctgagtttgatcaaggattcgatggaagaatgtattaccaagcaccttccgaatttggctttggaaagaatggtgagatggttaagaaatcaagtggaaacaggagcccgagatcgattgtggaaccagctaagtatgcggaaaagccagcgaaatggggaaaccagagggttgctgctgctccgagaaacatccaccagcctcgctgaagagatatgttgttaactagtcagagaagtcagagcagttcggtctgtgtatctttagccaccactgtacctttgtaatttttagtatttgcttccacaacaaaaatctgtaactttgtatctttatgatgttcattctcaaacttgctatcacaaaaatgtaaaaacataaaaaaaaaaaaaaggaaaactttgcggaggcgaattcgatatcaagcttatcgataccgtcgacctcgagggggggccnnnnaacnnnnnac

SEQ ID NO: 117609 - DNA, 781 bp, Arabidopsis thaliana
  unsure (1)..(781): unsure at all n locations
cggtcgcgtgggcggacgcgtgggcggacgcgtgggtggcgatggtatcaggaagacgatctcaaaactctagatcttggccgaggaaaatatctagagttttgagaatggcgatggtatcaggaagacgatctactctaaaccccgacgcacctctttttattccggcagctgtacgacaagtggaagatttctcaccggagtggtggcaattggtgacaacttcgacttggtaccctgattactggatcagtcagcagcagcaaggcgcggatggtttctatgacaacggagagaatgagaatggtggaggtcatatcgatgtagctgatcttcttccagaatcatttgattttgatgatatggaagatttctttgacactgatgctgctgagtttgatcaaggattcgatggaagaatgtattaccaagcaccttccgaatttggctttggaaagaatggtgagatggttaagaaatcaagtggaaccagggagcccgagatcgattgtgggaaccagctaaagtatgccggaaaagccagcgaaattggggaaaccagaagggttgctgctgctccgggaaacatccaccagccctcgctgaaagagatatggttgttacctagtcagagaagtccgagccaagtccggcccgggtacctttagcccccactggacccttgtaatttttagtatttgctcccacaaaaaatctgaactttgggggccgaattcctgaacccgggggccccagtttaacggcnnnccggggggcccct

SEQ ID NO: 117610 - DNA, 620 bp, Arabidopsis thaliana
  unsure (1)..(620): unsure at all n locations
atcctaatccgnttaccccgtgaaagtttaatagtacggatggaggaacttgagcaagttgcagcagatattttcctcggccaagatctagagttttgagaatggcgatggtatcaggaagacgatctactctaaaccccgacgcacctctttttattccggcagctgtacgacaagtggaagatttctcaccggagtggtggcaattggtgacaacttcgacttggtaccctgattactggatcagtcagcagcagcaaggcgcggatggtttctatgacaacggagagaatgagaatggtggaggtcatatcgatgtagctgatcttcttccagaatcatttgattttgatgatatgggagatttcctttgacactgatgctgctgaggtttgatcaaggnattccgatgggagaatgtattaccaagcaccttccgaatttggcttttggaaaaaatgggtgaaatgggtaaagaaatccaagtgggaccaggggcccnnnatccattgtgggcccanccaaagtattccgggaacccccccaattggggccccanggggtcctcntccccggaanatccaccacccccntnaanaantgtgnacagcngaagcngg

SEQ ID NO: 117611 - DNA, 580 bp, Arabidopsis thaliana
  unsure (1)..(580): unsure at all n locations
ttcggncgccccccncaggccgntgttctttnccccggggaatggantgtggggccntcccgttntgctgacctnttcccggatccattgntttggcngtntggnaggtttctttggccncngatgctgctgngttttgancagggatccgttggaagaatgtattcccaagccccctcccgaatttggctttggaaagaatggtgagatggttaagaaatcaagtggaaacaggagcccgagatcgattgtggaaccagctaaggtatgcggaaaagccagcgaaatggggaaaccagagggttgctgctgctccgagaaacatccaccagcctctcgctgaagagatatgttgttaactagtcagagaagtcagagcagttcggtctgtgtatctttagccaccactgtacctttgtaatttttagtatttgcttccacaacaaaaatctgtaactttgtatctttatgatgttcattctcaaacttgctatcacaaaaatgtaaaaacataaaaaaaaaaaagtntaaacttttgaagggnaattgggnnctnggngtttnttttcccaaaaanatg

SEQ ID NO: 117612 - DNA, 1790 bp, Arabidopsis thaliana
ctcactggcaaaaaagaaagaaaaaaaattcagaagcctttgttttcatcgatgaataaattaacaaacaaaactaaaaaataggatattcgctggccgaatcgcgtcgatccacatcgcaggtgagggttcctgcaatttatccctcgtggtctctgaatctcagatcgtcgtcaacgaatcctccattttctgaatcaaaattttctggaaacaatggggagcttggggacgatgctgagatatccggatgacatatatccgctcctgaagatgaaacgagcgattgagaaagcggagaagcagatccctcctgagccacactggggtttctgctattcgatgctccacaaggtttctcgaagcttttctctcgttattcagcaactcaacaccgagctccgtaacgccgtgtgtgtgttctacttggttctccgagctcttgatactgttgaggatgatactagcataccaactgatgaaaaggttcccatcctgatagcttttcaccggcacatatacgatactgattggcattattcatgtggtacgaaggagtacaagattctaatggaccaatttcaccatgtttctgcagcttttttggaacttgaaaaagggtatcaagaggctatcgaggaaattactagaagaatgggtgcagggatggccaagtttatctgccaagaggtagaaactgttgatgactacgatgaatactgccactatgttgctgggcttgttggtttaggtttgtcgaaactcttcctcgctgcaggatcagaggttttgacaccagattgggaggcgatttccaattcaatgggtttatttctgcagaaaacaaacattatcagagattatcttgaggacattaatgagataccaaaatcccgcatgttttggcctcgcgagatttggggcaaatatgctgacaagcttgaggatttaaaatacgaggagaacacaaacaaatccgtacagtgcttaaatgaaatggttaccaatgcgttgatgcatattgaagattgcctgaaatacatggtttccttgcgtgatccttccatatttcggttctgtgccatccctcagatcatggcgattggaacacttgcattatgctataacaatgaacaagtattcagaggcgttgtgaaactgaggcgaggtcttactgctaaagtcattgatcgtacaaagacaatggctgatgtctatggtgctttctatgatttttcctgcatgctgaagacaaaggttgacaagaacgatccaaatgccagtaagacactaaaccgacttgaagccgttcagaaactctgcagagacgctggagttcttcaaaacagaaaatcttatgttaatgacaaaggacaaccaaacagtgtctttattataatggttgtgattctactggccatagtctttgcatatctcagagcaaactgagtgatccatgtaagcgagtctgattgtatcaccatcattcaagatgttcagagcaaatttgagtgatgaagtaatctaggttgattcttattcacgccactgaatcctaagcaagattgtttccagaacaaacagagtttaagcatggtttagtctaaaaccatggattctattttagttactaccttcgttgtctaaacgtgcatttgttcatctatttttattccttgtgtttaaagttctttctttgtttaaaaaaaaaaaaaaaagggcggccgctctagaggatccaagcttacgtacgcgtgcaagcgacgtcatgctgttctataatagacgtt

SEQ ID NO: 117613 - DNA, 1086 bp, Arabidopsis thaliana
  unsure (1)..(1086): unsure at all n locations
tgatctccnnnnnnnnnnnnnnnnnnnnnnnnnnnnnnnnnnnnnnnnnnnnnnnnnnnnnnnnnnnnnnnnnnnnnncacgcgtncgccacgcgttcgctcgatttgaagagagaaaattcgttcgatttcgttttctcttcttcttttggattttcccggaaaattttggaatcggtgagtctctatcgattactggtcaaccatgaatatctttagatttgctggcgatatgagtcacttgatcagtgtcttaatccttcttctcaaaatctacgcgacgaaatcttgcgctggaatctctctcaagactcaagagctctatgcgcttgtgttcttgactcggtacttggatctgtttacggattatgtatctctgtacaacagcatcatgaagattgtcttcattgccagctctttggctatcgtttggtgtatgcgtaggcatccacttgtgaggaggtcatacgataaggacctggacacatttcgtcatcagtatgttgtgttagcgtgttttgtactgggacttatcctgaatgaaaaattcacagttcaagaggtgttctgggcgttttctatctacttagaggcagttgctatccttccccagttggttctgctacaaagaagtgggaatgtcgacaatttgactgggcaatatgttgtctttctcggggcgtatcggggactctatattatcaactggatctatcgctatttcacagaagatcatttcactagatggattgcttgtgtgtctggtcttgtccaaacagctctctatgcggatttcttctactactactacataagctggaaaaccaacaccaaacttaagcttccggcttgaaaagaacccgaatttttttgcaatagtatcaaaatccaggaagttacagcaatggtgacattagaaaagaaagacatggttaacatttgggtcctccctctttctaacaatgagttgaaaattgaatgatgcaggattgttgtttaaaatgtgtttttttttttagtctttaatgcacattgtaactttcccgacgattttagacattgagaagaggcatcgttttatcaaaa

SEQ ID NO: 117614 - DNA, 1946 bp, Arabidopsis thaliana
ggaaagctggtacgcctgcaggtaccggtccggaattcccgggtcgacccacgcgtccgcagagacagagatagaaattgagagacgataagcaaagtagaaaacacaagtttctctcacacacattatctctttctctattaccaccactcattcataacagaaacccaccaaaaaataaaaagagagacttttcactctggggagagagctcaagttctaatggcgaacttggtcttatcagaatgtggtatacgacctctccccagaatctacacaacacccagatccaatttcctctccaacaacaacaaattcagaccatcactttcttcttcttcttacaaaacatcatcatctcctctgtcttttggtctgaattcacgagatgggttcacgaggaattgggcgttgaatgtgagcacaccattaacgacaccaatatttgaggagtctccattggaggaagataataaacagagattcgatccaggtgcgcctcctccgttcaatttagctgatattagagcagctatacctaagcattgttgggttaagaatccatggaagtctttgagttatgtcgtcagagacgtcgctatcgtctttgcattggctgctggagctgcttacctcaacaattggattgtttggcctctctattggctcgctcaaggaaccatgttttgggctctctttgttcttggtcatgactgtggacatggtagtttctcaaatgatccgaagttgaacagtgtggtcggtcatcttcttcattcctcaattctggtcccataccatggctggagaattagtcacagaactcaccaccagaaccatggacatgttgagaatgacgaatcttggcatcctatgtctgagaaaatctacaatactttggacaagccgactagattctttagatttacactgcctctcgtgatgcttgcataccctttctacttgtgggctcgaagtccggggaaaaagggttctcattaccatccagacagtgacttgttcctccctaaagagagaaaggatgtcctcacttctactgcttgttggactgcaatggctgctctgcttgtttgtctcaacttcacaatcggtccaattcaaatgctcaaactttatggaattccttactggataaatgtaatgtggttggactttgtgacttacctgcatcaccatggtcatgaagataagcttccttggtaccgtggcaaggagtggagttacctgagaggaggacttacaacattggatcgtgactacggattgatcaataacatccatcatgatattggaactcatgtgatacatcatcttttcccgcagatcccacattatcatctagtagaagcaacagaagcagctaaaccagtattagggaagtattacagggagcctgataagtctggaccgttgccattacatttactggaaattctagcgaaaagtataaaagaagatcattacgtgagcgacgaaggagaagttgtatactataaagcagatccaaatctctatggagaggtcaaagtaagagcagattgaaatgaagcaggcttgagattgaagttttttctatttcagaccagctgattttttgcttactgtatcaatttattgtgtcacccaccagagagttagtatctctgaatacgatcgatcagatggaaacaacaaatttgtttgcgatactgaagctatatataccatacattgcattatcttagataaaaaaaagttctagcaaaaagtataaaagaagatcattacgtgagcgacgaaggagatgttgtatatatactacaaattaagcagatccaaatctctatgtttccgatactgaagctttatactaatacaatatacattgcaataaaaggaataaaaaaaagggcgaaagctctagaggatcccagcttacgtaggcg

SEQ ID NO: 117615 - DNA, 1621 bp, Arabidopsis thaliana
cgagagatagacgacgacgacaaggatcaaccaacacagaatccatctctctatctctctacgttatctcttcattcagagagtgcaaatagaacgacagagactttttcctcttttcttcttgggaagaggctccaatggcgagctcggttttatcagaatgtggttttagacctctccccagattctaccctaaacacacaacctcttttgcctctaaccctaaacccactttcaaattcaatccaccacttaaacctccttcttctcttctcaattcccgatatggattctactctaaaaccaggaactgggcattgaatgtggcaacacctttaacaactcttcagtctccatccgaggaagacacggagagattcgacccaggtgcgcctcctcccttcaatttggcggatataagagcagccatacctaagcattgttgggttaagaatccatggatgtctatgagttatgttgtcagagatgttgctatcgtctttggattggctgctgttgctgcttacttcaacaattggcttctctggcctctctactggttcgctcaaggaaccatgttctgggctctctttgtccttggccatgactgcggacatggtagcttctcgaatgatccgaggctgaacagtgtggctggtcatcttcttcattcctcaattctggtcccttaccatggctggaggattagccacagaactcaccaccagaaccatggtcatgtcgagaatgacgaatcatggcatcctttgcctgaaagcatctacaagaatttggaaaagacgactcaaatgtttaggtttacactgccttttccaatgctcgcataccctttctacttgtggaacagaagtccagggaaacaaggttctcattatcatccggacagtgacttgtttcttccaaaagagaagaaagatgttctgacatcaactgcctgttggactgcaatggctgctttgcttgtttgtctcaactttgtcatgggtccaatccagatgctcaaactatatggcatcccttattggatatttgtaatgtggttggacttcgtcacttacttgcaccaccatggacatgaagacaagctcccttggtatcgtggaaaggaatggagttacctgagaggagggctcacaacattagatcgtgactacggatggatcaataacatccaccacgatattggaactcatgtgatacatcatcttttcccgcagatcccacattatcatctagtagaagcaacagaagcagctaaaccagtactaggaaagtactacagagaaccgaaaaactctggacctctgccacttcacttactgggaagcctcataaagagtatgaaacaagaccatttcgtaagcgatacaggagatgtcgtgtactatgaggcagatccaaaactcaatggacaaagaacatgaggacatactgcagtgaaccaggcagacaagttacataaattcatcttggcccattcattatgttctttttgttttggtgtaaagccttttcgagattaaaaaagcattaatttgtagaaacctgtggtaaaactctcgatcaaatgaaataagatatgatcagtagaatacatttc

SEQ ID NO: 117616 - DNA, 512 bp, Arabidopsis thaliana
  unsure (1)..(512): unsure at all n locations
atgatttnnnnnnnnnnnnnnnnnnnnnnnnnnnnnnnnnnnnnnnnnnnnnnnnnnnnnnnnnnnnnnnnnnnnnnnnnnccacgcgtccggacagtgacttgttcctccctaaagagagaaaggatgtcctcacttctactgcttgttggactgcaatggctgctctgcttgtttgtctcaacttcacaatcggtccaattcaaatgctcaaactttatggaattccttactgggtaatgcgccgctgttactcccctgtttcagcctgagcaatttgtgtattatttcctctgccttactcaaaaaggtttttatgtcaaatacagataaatgtaatgtggttggactttgtgacttacctgcatcaccatggtcatgaagataagcttccttggtaccgtggcaaggtaaaatacatattctctgcttccactgttctttgactacatcgctctttcttttaaggttaaagccaactggtgtgtaaatctcatgattctcccaaaaca

SEQ ID NO: 117617 - DNA, 1486 bp, Arabidopsis thaliana
gtcgacacatcttctctctttatataaacaaatctcacataccccaaaaattcatcaaaccctttcttcaccacattattttcactgagcgcataacatttttgagacaagagactctctctctctctcttctctctttctctccccctctctccggcgatggttgttgctatggaccaacgcaccaatgtgaacggagatcccggcgccggagaccggaagaaagaagaaaggtttgatccgagtgcacaaccaccgttcaagatcggagatataagggcggcgattcctaagcactgttgggttaagagtcctttgagatcaatgagttacgtcgtcagagacattatcgccgtcgcggctttggccatcgctgccgtgtatgttgatagctggttcctttggcctctttattgggccgcccaaggaacacttttctgggccatctttgttctcggccacgactgtggacatgggagtttctcagacattcctctactgaatagtgtggttggtcacattcttcattctttcatcctcgttccttaccatggttggagaataagccaccggacacaccaccagaaccatggccatgttgaaaacgacgagtcatgggttccgttaccagaaagggtgtacaagaaattgccccacagtactcggatgctcagatacactgtccctctccccatgctcgcatatcctctctatttgtgctacagaagtcctggaaaagaaggatcacattttaacccatacagtagtttatttgctccaagcgagagaaagcttattgcaacttcaactacttgttggtccataatgttcgtcagtcttatcgctctatctttcgtcttcggtccactcgcggttcttaaagtctacggtgtaccgtacattatctttgtgatgtggttggatgctgtcacgtatttgcatcatcatggtcacgatgagaagttgccttggtatagaggcaaggaatggagttatctacgtggaggattaacaacaattgatagagattacggaatctttaacaacattcatcacgacattggaactcacgtgatccatcatctcttcccacaaatccctcactatcacttggtcgacgccacgaaagcagctaaacatgtgttgggaagatactacagagaaccaaagacgtcaggagcaataccgatccacttggtggagagtttggtcgcaagtattaagaaagatcattacgtcagcgacactggtgatattgtcttctacgagacagatccagatctctacgtttacgcttctgacaaatctaaaatcaattaatctccatttgtttagctctattaggaataaaccagcccacttttaaaatttttatttcttgttgtttttaagttaaaagtgtactcgtgaaactcttttttttttcttttttttttattaatgtatttacattacaaggcgtaaagttttgttatttctcttttct

SEQ ID NO: 117618 - DNA, 588 bp, Arabidopsis thaliana
  unsure (1)..(588): unsure at all n locations
acgcccgcggcaccggtccggggttcgcgccacgcgcccgtctttccactgagcgcataacttttttgagacaagagactcctctctctctctctgctctctttctctccccctctctccggcgatggttgttgctatggaccaacgcaccaatgtgaacggagatcccggcgccggagaccggaagaaagaagaaaggtttgatccgagtgcacataccaccgttcaagatcggagatataagggcggcgattcctaagcactgttgggttaagagtcctttgagatcaatgagttacgtcgtcagagacattatcgccgtcgcggctttggccatcgctgccgtgtatgttgatagctggttcctttggcctctttattgggccgcccaaggaacacttttctgggccatctttgttctcggccacgactgtggacatgggagtttctcagacattcctctactgaatagtgtggttggtcacattcttcattctttcatcctcgttccttaccatggttggtaagttacttatntttattcttttctactattaatttctcttttactggggtatttgtaattat

SEQ ID NO: 117619 - DNA, 2161 bp, Arabidopsis thaliana
gtcgactgaagtgtgaaggtggagattatgtattcacttgttgatttggtatacattctatgtaaggttcaattatttacgttatataattataatggagtaatttacagtaattgggttaaaatggtttgattcggtcaggttgatacggtttggaagttaaacccggcctagatatgatgttacaaccagtccacatcttttatgattttagtggaacaaacgaagagttatttagacgatacaaacaaggtccgaataagtgtgagctgtcccaagtaagaccacgtaatactcacctcaacaagatagtgttcttaaagtgtgtcaaacacaatcacacacacacaaatcataaaacacaaagacgataatccatcgatccacagaatagacgccacgtggtagataggattctcactaaaaagttctcaccttttaatctttctccacgccatttccacaagccataatcctcaaaaatctcaactttatctcccaaaacacaaaacaaaaaaaaatggcttccactgctctctcaagcgccatcgtcggaacttcattcatccgtcgttccccagctccaatcagtctccgttcccttccatcagccaacacacaatccctcttcggtctcaaatcaggcaccgctcgtggtggacgtgtcacagccatggctacatacaaggtcaagttcatcacaccagaaggtgagctagaggttgagtgtgacgacgacgtctacgttcttgatgctgctgaggaagctggaatcgatttgccttactcttgccgtgctggttcttgttcgagctgtgctggtaaagttgtgtctggatctgttgatcagtctgaccagagtttccttgatgatgaacagattggtgaagggtttgttctcacttgtgctggcttacccaacctctgatgttaccattgaaacccccaaagaagaagacattgtttaagcctcacctactcaccagcttttgatggtttaaaaatcatgtctttataaatttcacattttgggttgagtttgttgttactaaaaactattgttatctgttgttattgttcctggtttggctcaccatcaatcgatgacattttaaactatgcaactgcaaattctgcaacactttcgatgagaatctaacattatcgtttaaacattggaaatacattttcttgaagtctagctagctttggtttgtagttcttattctgaactcaacaatcatcaaagtatcaagaaaaatccgatttgcgagcaattgtgaaatcttagattgataaattctctagaaagaactatacatgttatttgtagctatagaagaaactatggaatcttatactctaattaagcccaaatggcaagagaagacatgagtccagctcctaggaacaacattacataagatacaatttgaagcctaaagttacacctcatttttgtactcaagaaatcagcagctatgagatccactaaagccatgtacacaagaattccggctgagagcgagtccaagataccttcagtgaccaatgctccgacactgtgagaattgaaagacgacgccactgcggttccaatcccgatccctatcggggttgtgagggcgaaaaaacaagccattatggtcgctgatttgttcctgaattgcgcttgggagatgcatccaccgagcgcaaatccttcaaagaattgatggaaggatagtgctgcgattagaggccggattgtgcaaggagactgagatactccaagggatagaccgatgattatggaatgtgacacaattccaagctccagaacctgagaaacaacgatatgcctagctccattaacagcatccaaacccccgtgtacgtgtccatgtccgtgtccatgcccgtgcccatgagcatgagcatgaacaatggcgattttactgtggccttcacatgaatcatgaccaggaggatgactatgtttatgatgagcaggatgagcatgaatggccacaaatgggaattccaccattgtcttcttaaacaaaaacaatttcccatgaattcgttccctttttccaatcagggggaaccaccaataaccccggtggattggttaacggggccaaacgggttaaaccagaatcgaataagcttccccttt

SEQ ID NO: 117620 - DNA, 692 bp, Arabidopsis thaliana
  unsure (1)..(692): unsure at all n locations
actttatcncccaaaacacaaaaaaaaaaaatggcttccactgctctctcaagcgccatcgtcggaacttcattcatccgtcgtcccccagctccaatcagtctccgttcccttccatcagccaacacacaatccctcttcggtctcaaatcaggcaccgttcgtggtggacgtgtcacagccatggctacatacaaggtcaagttcatcacaccagaaggtgagctagaggttgagtgtgacgacgacgtctacgttcttgatgctgctgaggaagctggaatcgatttgccttactcttgccgtgctggttcttgttcgagctgtgctggtaaagttgtgtctggatctgttgatcagtctgaccagagtttccttgatgatgaacagcattggtgaagggtttgttcccaacttgtgcctggcttancccaacctcctgatggtaaccaattggaaaccccccaaagacgcaaggaacacatttggtttaaagcctcacccaanctcaccaaggctttttgatgggttaaaaaataccatgggcctttaaaacattgcgaggttggtcgccgtcaccaaaacccattcgggacccnggtgnaannggcccccggggttggggcncccancaaanccgggnggaatttttaaaccttnaaaaaaanannaaaaaaanggggggggccgcc

SEQ ID NO: 117621 - DNA, 634 bp, Arabidopsis thaliana
  unsure (1)..(634): unsure at all n locations
actttatctcccaaaacacaaaaaaaaaaaatggcttccactgctctctcaagcgccatcgtcggaacttcattcatccgtcgttccccagctccaatcagtctccgttcccttccatcagccaacacacaatccctcttcggtctcaaatcaggcaccgttcgtggtggacgtgtcacagccatggctacatacaaggtcaagttcatcacaccagaaggtgagctagaggttgagtgtgacgacgacgtctacgttcttgatgctgctgaggaagctggaatcgatttgccttactcttgccgtgctggttcttgttcgagctgtgctggtaaagttgtgtctggatctgttgatcagtctgaccaagagtttccttgatggatgaaccaagattgggtgaaggggtttgttccccacttggggtggctaacccaacccctgatggtaccattggaaacccccaaaggaggagcaatttgtttaagctcccctactctccagcttttgatggttaaaaaatggcttaaaaatagngtnggnganaaaaaaattgaacccggggnaattgncccgggntgggccnaaaancnggggntttaacctaaaaaaaaaaaaaaaaaggggggnccct

SEQ ID NO: 117622 - DNA, 662 bp, Arabidopsis thaliana
  unsure (1)..(662): unsure at all n locations
acgactcactattgggaaagctggaccgcctgcaggtaccggtccggaattcccgggtcgacccacgcgtccgcaactttatctcccaaaacacaaaaaaaaaaaatggcttccactgctctctcaagcgccatcgtcggaacttcattcatccgtcgttccccagctccaatcagtctccgttcccttccatcagccaacacacaatccctcttcggtctcaaatcaggcaccgttcgtggtggacgtgtcacagccatggctacatacaaggtcaagttcatcacaccagaaggtgagctagaggttgagtgtgacgacgacgtctacgttcttgatgctgctgaggaagctggaatcgatttgccttactcttgccgtgctggttcttgttcgagctgtgctggtaaagttgtgtctggatctgttgatcagtctgaccagagtttccttgatgatgaacagattggtgaaggggttggtcccacttgtgctgcttaccctacctctgatggtaccattgaaaccccaaagagaagacattggttaagcctaccaantcaccagntttgaggggtaaaaacaggccttaaaaatgggttggtggaaaaacaatggaaccggggaatggcccggttggcccacaacgggatttannaaat

SEQ ID NO: 117623 - DNA, 564 bp, Arabidopsis thaliana
  unsure (1)..(564): unsure at all n locations
actttatctcccaaaacacaaaaaaaaaaaatggcttccactgctctctcaagcgccatcgtcggaacttcattcatccgtcgttccccagctccaatcagtctccgttcccttccatcagccaacacacaatccctcttcggtctcaaatcaggcaccgttcgtggtggacgtgtcacagccatggctacatacaaggtcaagttcatcacaccagaaggtgagctagaggttgagtgtgacgacgacgtctacgttcttgatgctgctgaggaagctggaatcgatttgccttactcttgccgtgctggttcttgttcgagctgtgctggtaaagttgtgtctggatctgttgatcagtctgaccagagtttccttgatgatgaacagattggtgaaggggtttgttcctcacttgtgctggcttaacccaactctgatgtaccattgaaaccacaaagaagaagccattgttaagcctcacctactcaacaagcttttgatggttaaaacatgccttaatggggtggggtaaacatgnacgtgaatgccggtggccacact

SEQ ID NO: 117624 - DNA, 567 bp, Arabidopsis thaliana
  unsure (1)..(567): unsure at all n locations
tccccaacaaaaaaangcccagtttaaacccangngncttatcaccgtgtcccagccaancagcccggccctccanngccaacanaaaccctntcggcnnaatcngccccttcgtggggncgttcacaccctggctacatccagggcaagttcatcccccccagaaggtgagctagaggttgagtgtgaccgccgacgtctacgttcttggatcctgctgaggaagctggaanccgatttggccttactcttgcccgtggctggttcttggttcgagctgtgctggtaaagttggtgtctggatctgttgatcagtctgacccagagtttcccttgatgatgaacagattggcgaagggtttgttctcacttgtgctgcttaccctacctctgatgttaccattgaaacccacaaagaagaagacattgtttaagcctcacctactcaccagcttttgatggtttaaaaatcatgtctttataattgagtttgttgttacaaaactattgttatctgttgttattgttcctggtttggctcaccatcaatcgatgacattttaaact

SEQ ID NO: 117625 - DNA, 980 bp, Arabidopsis thaliana
  unsure (1)..(980): unsure at all n locations
agattccactggcgtgtgctctcctcacttcactcgtccttgaaacttgagcttcaattacaaagaatggctgcttcaagtgctgtcaccgcaaactacgtcctcaagccacctccattcgcactggatgctttggagccgcatatgagcaaacaaactctggagtttcactggggaaaacatcacagagcttacgtggacaacctcaagaaacaggttcttggaaccgagcttgaaggcaagcccttagagcacattatccacagcacttacaacaatggtgatctcctccctgctttcaacaacgctgctcaggcgtggaaccacgagttcttctgggagtcaatgaaaccaggtggtggaggaaaaccatcaggagagcttcttgctttgcttgaaagagatttcacttcttatgagaagttctatgaagagttcaatgctgctgcagccactcagtttggagctggctgggcctggcttgcttattcaaatgaaaaactcaaagtagtgaaaactcccaatgctgtgaatccccttgtgctcggctctttcccattgcttaccattgatgtctgggagcatgcttactaccttgacttccagaaccgaagaccagattacataaagacattcatgaccaatcttgtgtcttgggaagctgtaagtgccagacttgaggccgccaaggctgcttctgcttaagcaaatttctgaacaatttgacttcagtgacagtgagttctgcatcaccgaagtctcttataaaatattggtcgctgtaataaggacacagctctcttgttgtgtatgtgtcacagagttcttcattttgcttgtgtaatgaacaattaaacatgctcttttctgagtgtgtgtgcgttttgtgtgtgtcaaatttttcatcgtctcctttattaaactcaaattggcacccttacacaaaatanncanaaatatataaaaactatatactatat

SEQ ID NO: 117626 - DNA, 632 bp, Arabidopsis thaliana
  unsure (1)..(632): unsure at all n locations
cacttcactcgtccttgaaacttgagcttcaattacaaagaatggctgcttcaagtgctgtcaccgcaaactacgtcctcaagccacctccattcgcactggatgctttggagccgcatatgagcaaacaaactctggagtttcactggggaaaacatcacagagcttacgtggacaacctcaagaaacaggttcttggaaccgagcttgaaggcaagcccttagagcacattatccacagcacttacaacaatggtgatctcctccctgctttcaacaacgctgctcaggcgtggaaccacgagttcttctgggagtcaatgaaaccaggtggtggagggaaaaccatcaggagagcttcttgcttttgctttgaaagagatttccaccttctttatgagaaagttcttatgaaggggttcaaatgctgcctgcagccaactcaggtttggagcttggctggggcctggcttgcttattccaaatggaaaaccccaagggngtgaaaacctcccaatgctgttggaatccccttgtgccgggctctttcccattggtcaccattgatgctgggggatcgttcncctgggttccaaaccaggcccgtgttaaaatcttggcaacttggnttc

SEQ ID NO: 117627 - DNA, 1266 bp, Arabidopsis thaliana
aatcaggttccacatttggctttgcacaccttccttgatcctatcaatggcggatctgaaatcaaccttcctcgacgtttactctgttctcaagtctgatctgcttcaagatccttcctttgaattcacccacgaatctcgtcaatggcttgaacggatgcttgactacaatgtacgcggagggaagctaaatcgtggtctctctgtggttgatagctacaagctgttgaagcaaggtcaagacttgacggagaaagagactttcctctcatgtgctcttggttggtgcattgaatggcttcaagcttatttccttgtgcttgatgacatcatggacaactctgtcacacgccgtggccagccttgttggtttagaaagccaaaggttggtatgattgccattaacgatgggattctacttcgcaatcatatccacaggattctcaaaaagcacttcagggaaatgccttactatgttgacctcgttgatttgtttaacgaggtagagtttcaaacagcttgcggccagatgattgatttgatcaccacctttgatggagaaaaagatttgtctaagtactccttgcaaatccatcggcgtattgttgagtacaaaacagcttattactcattttatcttcctgttgcttgcgcattgctcatggcgggagaaaatttggaaaaccatactgatgtgaagactgttcttgttgacatgggaatttactttcaagtacaggatgattatctggactgttttgctgatcctgagacacttggcaagatagggacagacatagaagatttcaaatgctcctggttggtagttaaggcattggaacgctgcagtgaagaacaaactaagatactatacgagaactatggtaaagccgaaccatcaaacgttgctaaggtgaaagctctctacaaagagcttgatctcgagggagcgttcatggaatatgagaaggaaagctatgagaagctgacaaagttgatcgaagctcaccagagtaaagcaattcaagcagtgctaaaatctttcttggctaagatctacaagaggcagaagtagagacatactcgggcctctctccgttttattcttctgacatttatgtattggtgcatgacttcttttgccttagatcttatgttcccttccgaaaatagaatttgagattcttgttcatgcttatagtatagagacttagaaaatgtctatgtttcttttaatttctgaataaaaaatgtgcaatcagtgat

SEQ ID NO: 117628 - DNA, 1316 bp, Arabidopsis thaliana
actccattcataattttgactccactttccaaaaaaaacaaaaaaaaataaatactaatataaaaaattctcaaatctaaaatttcagatttcagaaatcgccatggcttcagtgactctaggttcatggattgttgttcaccaccacaatcatcatcatccatcttcaatccttaccaaatccagatccagatcttgtcctataactcttactaaacccatctcctttcgatcaaaacgcaccgtttcatcatcttcttcaatcgtttcttcttccgttgttacaaaagaagacaatctacgccaatctgaaccatcctctttcgatttcatgtcgtacatcatcaccaaagccgaattagtcaacaaagctttagattcagctgttcctctccgtgagccactcaagatccacgaagcgatgagttactctcttctcgccggtggcaaaagagttagaccagttctctgcatcgctgcttgtgaactcgtcggaggtgaagaatcaaccgctatgccagcacgttgcgccgtcgagatgattcacaccatgtcgttgatccacgacgatctcccttgtatggataacgacgatctccgccgtggaaaaccgaccaaccacaaagtgtttggtgaagacgtcgctgttttagccggagacgcgcttctctctttctctttcgagcatttagcttcggcgacgagttctgatgttgtttctccggtgagagtggttcgagccgttggagaattggctaaagcgataggaacagaagggttagtggcgggtcaagtcgtggatattagtagtgaagggttagatttaaacgacgtcggtttagagcatttggagtttatccatttgcataaaacggcggcgttgcttgaagcttctgctgttttgggagctattgttggtggaggaagtgatgatgagattgagaggttaagaaagtttgcgagatgtattggtttgttgtttcaggtggttgatgatatcttggatgtgacgaaatcgtcgaaagagttagggaaaactgctgggaaagatttgattgctgataagttgacgtatcctaagattatgggtttggagaaatcgagagagtttgctgagaaattgaatagagaggctcgtgatcagcttttagggtttgattctgataaggttgctcctttgttggctttggctaattacattgcctatagacagaactgatttgtgttcgattccttttgtcgggaatcattattagattggaattgtagaaatctcggacaggttctctagagtttgttggtgtaatcgtatccgg

SEQ ID NO: 117629 - DNA, 1256 bp, Arabidopsis thaliana
  unsure (1)..(1256): unsure at all n locations
gggccgtctgcggtaccgttccggaattcccgggtcgacccacgcgtccgaattatcattatctcaaacacaacaaggatagatcatcctcataggcgatgttgtttagtggttcagcgatcccattaagcagcttctgctctcttccggagaaaccccacactcttcctatgaaactctctcccgctgcaatccgatcttcatcctcatctgccccggggtcgttgaacttcgatctgaggacgtattggacgactctgatcaccgagatcaaccagaagctggatgaggccataccggtcaagcaccctgcggggatctacgaggctatgagatactctgtactcgcacaaggcgccaagcgtgcccctcctgtgatgtgtgtggcggcctgcgagctcttcggtggcgatcgcctcgccgctttccccaccgcctgtgccctagaaatggtgcacgcggcttcgttgatacacgacgacctcccctgtatggacgacgatcctgtgcgcagaggaaagccatctaaccacactgtctacggctctggcatggccattctcgccggtgacgccctcttcccactcgccttccagcacattgtctcccacacgcctcctgaccttgttccccgagccaccatcctcagactcatcactgagattgcccgcactgtcggctccactggtatggctgcaggccagtacgtcgaccttgaaggaggtccctttcctctttcctttgttcaggagaagaaattcggagccatgggtgaatgctctgccgtgtgcggtggcctattgggcggtgccactgaggatgagctccagagtctccgaaggtacgggagagccgtcgggatgctgtatcaggtggtcgatgacatcaccgaggacaagaagaagagctatgatggtggagcagagaagggaatgatggaaatggcggaagagctcaaggagaaggcgaagaaggagcttcaagtgtttgacaacaagtatggaggaggagacacacttgttcctctctacaccttcgttgactacgctgctcatcgacattttcttcttcccctctgattttgggccctcttttacatttgggccttccttcgctatacgaaattaggccctgtaatggactgtgtatcgttcatttttagcccagagcttcttcgcttgaaaaaaaaaaaaaaaaaaaggncagggcggccgctctagaggatccaagcttacgtacgcgtgcatgtgaagtca

SEQ ID NO: 117630 - DNA, 1074 bp, Arabidopsis thaliana
  unsure (1)..(1074): unsure at all n locations
atgatatgccgnnnnnnnnnnnnnnnnnnnnnnnnggaaanctatacgcctgaggtaccggtccggaattcccgggtcgacccacgcgtccgatcaaacatcacatttcttcctcttttctctcttttttctcagtcttcaaagagtttcttagtaacccaaatcaatggcaggtatcaaagttttcggacacccagcttccattgccaccaggagagtcctcatcgccctccacgagaaaaacctcgactttgagctcgttcatgtcgaactcaaagacggtgagcacaagaaggagcctttcctctcccgcaacccttttggtcaggttccagcctttgaagatggagacctcaagctcttcgaatcaagagcgattactcagtacatagctcaccgatatgaaaaccaaggaaccaaccttctccaaaccgactccaagaacatatctcagtacgcaatcatggccattggaatgcaagtagaagatcaccagttcgacccagtggcttcaaagcttgcttttgaacaaatattcaagtccatctacggcttgaccacagacgaagccgttgttgcagaagaggaggctaagttagccaaggtccttgatgtctacgaggctaggctcaaggagttcaagtatttggctggtgaaactttcactttgactgatcttcaccacattcccgcgattcaatacctgctcggaactcccaccaagaagctcttcaccgagcgtccacgtgtcaatgagtgggtggctgaaatcaccaagaggccagcttccgagaaggttcagtgagaaatttctaaaaggaaaatatggttttgcttcagtcacagtaataatgctaagattaaataagcggctttctcattgcccaatttctcagtactttctttctgttgtatcctctgttttctttcagttatgtgagtgtgtgtgtatgctcttgagagtatctttggcaaaaactatttatctaatcttcaagctattctagggcgaccgctctagaggatccaagcttacgtacgcgtgcgttcgacgtcataatcttcgagggagtg

SEQ ID NO: 117631 - DNA, 712 bp, Arabidopsis thaliana
  unsure (1)..(712): unsure at all n locations
attttacttgtgtgttatttcatcaccttcaccttcaacatcaaacatcacatctcttcctcttttctctcttttttctcagtcttcaaagagtttcttagtaacccaaatcaatggcaggtatcaaagttttcggacacccagcttccattgccaccaggagagtcctcatcgccctccacgagaaaaacctcgactttgagctcgttcatgtcgaactcaaagacggtgagcacaagaaggagcctttcctctcccgcaacccttttggtcaggttccagcctttgaagatggagacctcaagctcttcgaatcaagagcgattactcagtacatagctcaccgatatgaaaaccaaggaaccaaccttctcccaaaccgacttccaagaaccatatctcagtacgcaatcatgggccattgggaatgcaagtaggaagatcaccagttcgaccccagtggctttaaaagcttgcttttgaacaaattattcaaggccatctacgggttgcccccaggcgaagccggttttttagaagaggggggtaggttgccaagggccttgatggctacgggggtggggcaagggggtcaaggatttgggtggggactttccccttggtgggtttnccaatcccggggttaaaccnggggggggccccccaaaaggnttnnngggggnccngggaaaanngggggggggnnaacccc

SEQ ID NO: 117632 - DNA, 630 bp, Arabidopsis thaliana
  unsure (1)..(630): unsure at all n locations
gggccccccctcgaggtcgacggtatcgataagcttgatttcgcctccgcgcccgcttttttctcagtcttcaaagagtttcttagtaacccaaatcaatggcaggtatcaaagttttcggacacccagcttccattgccaccaggagagtcctcatcgccctccacgagaaaaacctcgactttgagctcgttcatgtcgaactcaaagacggtgagcacaagaaggagcctttcctctcccgcaacccttttggtcaggttccagcctttgaagatggagacctcaagctcttcgaatcaagagcgattactcagtacatagctcaccgatatgaaaaccaagnaaccaacctttctccaaaccggacttccaaggaccatatctcagtacggaaatcatggncatttnggattgcaagtaggaggntcaccagntngncccagtggntttaaaggttgcttttgacaaatttttaagnccatctncgggttnnccaaagacggagcngtttttnagagggggggttaggtngcaaggtcttgatgtttcggggtttgnnttggggtnagttttggttggnnaatttnnnttgntntttancaatccgggttancctgtgnctnccag

SEQ ID NO: 117633 - DNA, 2030 bp, Arabidopsis thaliana
gttaacttaatagtatataaaataaaaatgcatataggttccgtaattaatctcttatcgtcacgagaggcacatctttttccaacatttgaccactctctctctctctctcaggacctttcggcgtaatttcgtcttcccctttgcttaacattttctttctttctttttgaccaaatattaaaaatatatccatttttattttatttttaattaaattcataatttgcatttgtaatagaaaaaaaaagaagagaataaatccaaaagagtgaagcaaaaacattaaagcggaaagaaagtggtaaaacaataatagaaacaggagaagcagaagtactacttcttcttcttctgctctcttctcagaccttgttttgtactttcttcttcttcttctttcttcttcttgtttgcgaactccgatatcttcttcactacctttgactccatttctttttcttcttcaggtgtaggcattgtcttgttatgagaagcaactgtagctggaagctcaagtatttgtttttagctgtggagcttgaatcttgatagttttcgacttctatgttattacctgtggggatatagaaacaatcatgggcttactctgcagtagaagtcgacatcatactgaagatactgatgagaatacacaggctgctgaaatcgaaagacggatagagcaagaagcaaaggctgaaaagcatattcggaagcttttgctacttggtgctggggaatctggaaaatctacaatttttaagcagataaaacttctattccaaacgggatttgatgaaggagaactaaagagctatgttccagtcattcatgccaatgtctatcagactataaaattattgcatgatggaacaaaggagtttgctcaaaatgaaacagattctgctaaatatatgttatcttctgaaagtattgcaattggggagaaactatctgagattggtggtaggttagactatccacgtcttaccaaggacatcgctgagggaatagaaacactatggaaggatcctgcaattcaggaaacttgtgctcgtggtaatgagcttcaggttcctgattgtacgaaatatctgatggagaacttgaagagactatcagatataaattatattccaactaaggaggatgtactttatgcaagagttcgcacaactggtgtcgtggaaatacagttcagccctgtgggagagaataaaaaaagtggtgaagtgtaccgattgtttgacgtgggtggacagagaaatgagaggaggaaatggattcatctgtttgaaggtgtaacagctgtgatattttgtgctgccatcagcgagtacgaccaaacgctctttgaggacgagcagaaaaacaggatgatggagaccaaggaattattcgactgggtcctgaaacaaccctgttttgagaaaacatccttcatgctgttcttgaacaagttcgacatatttgagaagaaagttcttgacgttccgttgaacgtttgcgagtggttcagagattaccaaccagtttcaagtgggaaacaagagattgagcatgcatacgagtttgtgaagaagaagtttgaggagttatattaccagaacacggcgccggatagagtggacagggtattcaaaatctacaggacgacggctttggaccagaagcttgtaaagaaaacgttcaagctcgtagatgagacactaagaaggagaaatttactggaggctggccttttatgaccttattattacatatctctagtaaattacctctccttattattataagaaaaactcgaaaactgaatgaccgtgtaatttatctttcgggacaaaagacttagcgattcaaaatctaatgtgtctcgatggctacgactagtttctattttatcattgtttttgttaacattcctctgtctttgacttcttattttttttctcatcaaaaacatctcattttgatcttgtttttggggttatattattattaaaatgaggcatccacatcccgaaatc

SEQ ID NO: 117634 - DNA, 2173 bp, Arabidopsis thaliana
  unsure (1)..(2173): unsure at all n locations
cccgtnnnnnnnnnnnnnnnnnnnnagaagaagaatcgtggagatggcttcgaccccgaagcttaccagtacaatttcatcatcttctccatctcttcaattcctctgcaaaaaactcccaatcgcaattcatctaccatcatcttcttcctctagctttctctcgcttcctaaaaccctaacctctctctattctctccgtccccgtatcgccctactctcaaaccaccgctattaccactctcgccggttttctgtttgtgccagtaccgataatggagctgaatcagaccgccactacgattttgatctcttcactatcggtgccggaagcggcggcgtccgcgcctctcgcttcgccactagcttcggtgcatccgccgccgtttgcgagcttcctttttccactatctcttccgatactgctggaggcgttggaggaacgtgtgtattgagaggatgtgtaccaaagaagttacttgtgtatgcatccaaatacagtcatgagtttgaagacagtcatggatttggttggaagtatgagactgagccttctcatgattggactactttgattgctaacaagaatgctgagttacagcggttgactggtatttataagaatatactgagcaaagctaatgtcaagttgattgaaggtcgtggaaaggttatagacccacacactgttgatgtagatgggaaaatctatactacgaggaatattctgattgcagttggtggacgtcctttcattcctgacattccaggaaaagagtttgctattgattctgatgccgcgcttgatttgccttccaagcctaagaaaattgcaatagttggtggtggctacatagccctggagtttgcggggatcttcaatggtcttaactgtgaagttcatgtatttataaggcaaaagaaggtgctgaggggatttgatgaagatgtcagggatttcgttggagagcagatgtctttaagaggtattgagtttcacactgaagaatcccctgaagccatcatcaaagctggagatggctcgttctctctgaagaccagcaagggaactgttgagggattttcgcatgttatgtttgcaactggtcgcaagcccaacacaaagaacttagggttggagaatgttggcgttaaaatggcgaaaaatggagcaatagaggttgacgaatattcacagacatctgttccatccatctgggctgttggggatgttactgaccgaatcaatttgactccagttgctttgatggagggaggtgcattggctaaaactttgtttcaaaatgagccaacaaagcctgattatagagctgttccctgcgccgttttctcccagccacctattggaacagttggtctaactgaagagcaggccatagaacaatatggtgatgtggatgtttacacatcgaactttaggccattaaaggctaccctttcaggacttccagaccgagtatttatgaaactcattgtctgtgcaaacaccaataaagttctcggtgttcacatgtgtggagaagattcaccagaaatcatccagggatttggggttgcagttaaagctggtttaactaaggccgactttgatgctacagtgggtgttcaccccacagcagctgaggagtttgtcactatgagggctccaaccaggaaattccgcaaagactcctctgagggaaaggcaagtcctgaagctaaaacagctgctggggtgtagagaaggttgcaaaaaagattgtatttacggcattggagccccctgataaggagaacattgtgtctgtgaagaagaagcttttcttttggcagagaatattttttcataatgtcgtgtgaagatatgatcgctgtcctgcaatacttttgatcgtttgacacacgaccaaattcctcgagagagagaggttgtaactattccgaaagagctctaaaactgaagctttcagttcttgtgacatcataatgaaggctgtatagatataacagtttcgagttttatttggatttgtagtatttttgttttctattgtgttgaacttgtctctttgaagtcaccacgggagacctcatatcagcatcgttggcggccgcgaattcgatatcaagcttatcgataccgtcgacctcgagggggggccnnnnnnnnnnn

SEQ ID NO: 117635 - DNA, 1758 bp, Arabidopsis thaliana
ctttttttcattttgttctgagggggcttttgtgttgacggtggtgggaacaaaggaacatcgtatccattctgtccgggaaacacagcaatgttcatttccgacaaatctcgtcctactgatttctacaaagacgatcatcacaattcctccaccaccagcaccacacgcgatatgatgatcgatgtactcaccactaccaacgaatcagtagatctacaatctcaccaccaccacaatcaccacaatcatcatctccaccaatctcagccacaacaacagattctcctcggagaaagcagtggagaagatcacgaagttaaagcaccaaagaaacgagcggagacatgggttcaagacgaaactcgtagcttaatcatgttccgtagaggtatggatggtttattcaatacatccaaatctaataaacatctctgggaacagatttcgtctaagatgagagaaaaagggtttgatcgatctccgactatgtgtactgataaatggaggaatctgttgaaagagtttaagaaagctaagcatcatgatagaggaaatggatcggcgaagatgtcgtattacaaagagattgaagatattcttagagagaggagcaaaaaagtgacaccaccacagtataataagagccctaatacaccacctacatcagccaaagttgattcctttatgcaatttactgataaaggttttgatgatacgagcatttcttttggatccgttgaagctaatggcaggccagccttaaaccttgaaaggcgtcttgatcatgatggtcatcctcttgcaatcactacagcagttgatgctgttgcagcaaatggagttactccttggaattggagagagactcctggaaacggtgatgatagtcatggtcagccttttggtggtagggtcataacagtgaaatttggtgactatacaagaagaatcggtgttgatggtagtgcagaagcaatcaaagaggtaatcagatctgcttttgggttaagaactcgaagggctttttggttagaagatgaagatcagattattcgctgtcttgaccgagacatgcccttagggaactatctactccgtctggatgatggactggccattagggtttgccattatgatgaatccaaccaattaccagtccattcagaagagaaaatcttctacactgaagaagactaccgcgagtttctggctctacagggatggtcaagcctgcaagttgatggttttaggaacatagaaaacatggatgatcttcaacctggtgctgtgtatcgaggtgtgagatgaggaaatgagatcacaaaacttcttctccaattctatcaacagttatctgaacagaaaacagtcccctgtagatatgatctcattctctttatacatttcttctttttttcatgtacttgctcaaatatgaaatatcataactggcatttaccgtacagaccaagaagacctcaaaatagatttttggtctgttacatttgtaagaacagaacataagagaagtgaataaattgttcacaatcagacgagcgagtgtttgtgtgtggtatcagagtcattcttcatcccttttattgttcttgtatgaaatgagtgtgttcgaccttgtcaatcactctcttgatccaggtgaacggtacagccacatcggtatcagtaaatgctctcaacacaacagacacaccttatccaaccgccaagccgattaatgtctccctctcttacatg

SEQ ID NO: 117636 - DNA, 1094 bp, Arabidopsis thaliana
  unsure (1)..(1094): unsure at all n locations
nnnnnnnnnnnnnnngcctgcaggtaccggtctggnattcccgggtcgacccacgcgtccgcgaatcgaaacgaagaagatcgagatcagtgaagaagaagaagacgaaatcacgaaaccatgttcttgttcgattggttctacggaatcttagcttcgttagggttatggcaaaaagaagcaaagatcttgtttctcggtctcgataatgctggcaaaactacattacttcacatgctcaaagacgagagattagttcagcatcagccgacgcaacatccaacgtctgaagaacttagcattggaaaaatcaagttcaaggcttttgatttgggtggtcatcagattgctcgtagggtttggaaagattactatgccaaggttgatgctgttgtctaccttgtggatgcttatgacaaagaaagatttgcagagtcaaaaagagagcttgatgctcttctctcggatgaagcccttgcaactgtcccgtttctgattcttgggaacaagattgatatcccttatgcagcttctgaagacgaactgaggtatcacttgggtctcactaacttcaccaccggtaagggcaaagtgacgctcggagactctggtgttcgcccacttgaggtcttcatgtgcagcattgtccgtaaaatgggttatggcgagggattcaaatggctctctcagtacatcaactaaagacagacgtcaagtcttttatcatattttcaaaccaaacccaagaagattttccgtacaatttgtctatttcgagctaaaagatttgtgattgacgatgtcacatccttcccttagaagacttgagaacacttttttctcatatttgttctttttgttgttttctgtgtggaacataagtttggtggcttgcatttccaaacttattcatttctcttgtccacatttttgtcaactgcttatgtttcattgaacattattcccaagtttgaccaccaacttttttgaacaaaaaaannnnnnnnnnnnnnnnnnnaagnnnnnnnnnnnnnnnnnnnnnnnnnnnnnnnnnnnnnnnnnnnnnnnnnnnnnnnnnnnnnnnnnnnnnnnnn

SEQ ID NO: 117637 - DNA, 1040 bp, Arabidopsis thaliana
ggactcactaatacagtatttgcaattccagaggcacgagatctctctccggtaaatatcggaaacttttattctcagcaaagcgagatctcgacgtttctcagatccgtccggcgagttagatccttgagaaatcatggctccggtctcggcactcgctaagtataagctggtgtttctgggagatcaatccgtcggcaaaaccagtatcattactcgattcatgtacgacaaattcgacaacacttaccaggccacaattggtattgattttctatcaaagacaatgtaccttgaagatcgaacggtcagacttcagttgtgggatacagctgggcaagagcgattcaggagtctaattccgagctatatcagggattcctccgttgctgttattgtgtatgatgttgcaagcaggcagtccttcctaaacactactaagtggatcgatgaggttaggacagaacgtggtagtgatgtcatagtcgtgcttgtgggaaacaaaactgatctagtggacaaaaggcaagtgtcaatagaggaagcagaagctaaggcacgcgaacttaatgtaatgttcatcgaaaccagtgccaaagcgggcttcaacattaaggcgctcttccgcaagatagcagcagctttgccgggaatggagacattgtcttcaacaaagcaagaggatatggttgatgtcaatctcaagtcttccaatgcaaatgcatctctcgctcagcagcaatcaggaggatgctcttgttagatttggcaacaacaacacaacaacaaatcgatagagaacaacaaaacacactactaaaaaatgtcctcaagcccctttgcatgattcgatcagttatcgtcttccatctgtaaaatttttgcctgtttttcaactttttttcttcatcggattgtttttaaagaagactctgttttagctatggtttgtccctaactgtgatcttttgtggtctttggagtttcaaatgctcgctgcttcagtacttttgtttacttatttctcaaaaacgcgattt

SEQ ID NO: 117638 - DNA, 643 bp, Arabidopsis thaliana
  unsure (1)..(643): unsure at all n locations
cggacgcgtggggtcgacgcggccgcgcggacgcgtgggcggacgcgtgggcggacgcgtgggcggacgcgtgggtcggaaacttttattctcagcaaagcgatgatctcgacgtttctcagatccgtccggcgagttagatccttgagaaatcatggctccggtctcggcactcgctaagtataagctggtgtttctgggagatcaatccgtcggcaaaaccagtatcattactcgattcatgtacgacaaattcgacaacacttaccaggccacaattggtattgattttctatcaaagacaatgtaccttgaagatcgaacggtcagacttcagttgtgggatacagctgggcaagagcgattcaggagtctaattccgagctatatcaagggattcctcccgttgctgttattgtgtatgatgttgcaagcaaggcagtccttcctaaacactactaagggggtcgatgaggtangncagaccgtggtagtntgcatnggcgtccttttngggacaaaactgtctngtggcaaaaggaagtncattggggagcagagttaggccggnccttaatgaattnangancnntccaangggttacataggggttccanatcnncnttcggtnggattttcagt

SEQ ID NO: 117639 - DNA, 2436 bp, Arabidopsis thaliana
  unsure (1)..(2436): unsure at all n locations
accgggccggaaataccggggcggccccacccgtcccggcacgatcttcatcgactcaaattcaaaaactcatctctctctatctctatttctctggttccatagctcaccgtcgcatcgcagatctactccttccgcaataaattttaccggcggaggtatcagatctcgccgatctgttgtagcagctactgtattttgggcttctcatttgatattggggaaacgaggagtagaggacgatggaaaatctgatctctctggttaacaagatacagagagcttgcacggctttaggagaccatggagactccagcgctttacctactctttgggattccttgcctgcgatcgccgtcgttggtggtcagagctcagggaagtcttcagtcctggagagcatcgtgggaaaggactttttaccccgtggatctggcattgttactcgaaggccccttgtcttacagttgcaaaagatcgatgatggaacccgggagtatgcagagtttcttcacctcccgaggaaaaagtttactgattttgctgctgtgaggaaggagattcaagatgagactgacagagagactggacgcagcaaggctatttctagtgttcccattcaccttagcatatactctcccaatgttgtcaacttgacactgatagatcttccagggcttacaaaagttgctgttgatggacaatctgatagtatagtgaaggacattgaaaacatggttcggtcctacattgaaaagcccaactgcatcattttggcaatctcacctgcaaaccaagatcttgctacctcagatgcaattaaaatttcccgtgaggttgatccatcgggggacagaacatttggtgtcttgacaaagattgatcttatggacaaggggacggatgcagtggaaattctggaagggagatcttttaaacttaaatatccgtgggttggtgtcgtcaaccgttcccaagcagatattaacaagaatgtcgacatgattgcggctcggaaaagagagagggagtacttttccaatactactgagtataggcaccttgctaataaaatgggttccgagcatttggcaaagatgctctccaagcatctagaacgtgtgatcaagtcgagaattcctggcattcagtcacttattaacaaaacagtattagagctggaaactgaactaagtcgccttggaaagcctattgcagctgatgcaggggggaagttgtactcaataatggagatatgtcggctttttgatcaaatattcaaagagcatcttgatggagtgcgtgctggtggtgaaaaagtgtacaacgtgtttgataaccagcttcctgcggctctgaagagactccaatttgacaagcagctagcgatggacaacatccggaagctggtcactgaggctgatggttaccagcctcacttgattgctcctgagcaaggttaccgtcgtctcattgagtcttctattgtctccatcagaggccctgctgaagcatctgttgacaccgttcatgctatcttaaaggatctggttcacaagtctgtgaatgaaactgtggaactaaaacaatacccagctctgagagtggaggtgacaaatgcggcgatagagtcgctggataaaatgcgggaaggaagtaagaaagcaacactgcagctggttgacatggagtgcagttacctcactgttgatttcttcaggaaacttccccaggatgttgagaagggtggtaaccccacacactccattttcgaccgctacaacgattcctatctcagacgaatcggatccaatgttttgtcttacgtgaacatggtctgtgctggcctgcggaattcaatccccaagtccatcgtatactgccaagtccgagaagcgaagcgcagtctcctcgaccatttctttgcggagctcggtaccatggatatgaagaggctctcgtcgctattgaacgaagatccagcaatcatggagagacgcagtgccatctcaaagcggctagaattgtatcgagcagcccaatccgagatcgatgctgttgcttggtccaagtgataccggcatgtcatgtccactgttttgctcggttctggtcggtgtggctcagactcggagcagagatttagggtctgtaatttgtataagatgatcttcccgataccatgcagtatcgttttatataacatccacattgtttgtcctacctctatgttttttgtccatcacccgatatgttacgtatcgttttataacatccacattgtttgtcctgcctcaaaaaatttttgtccctccccccgatatgtttcgtttcttaaaaaaaaaaaaaaaaaccaaacacaaagnnnnnnnnnnnnnnnnnnnnnnnnnnnnnnnnnnnnnnnnnnnnnnnnnnnnnnnnnnnnnnnnnngacct

SEQ ID NO: 117640 - DNA, 1170 bp, Arabidopsis thaliana
gttttagctggactggatcctgttggagtactttgtgaaattgttgatgatgatggttccatggctagattaccaaaacttcgtgaatttgccgccgagaacaacctgaaagttgtttccatcgcagatttgatcaggtatagaagaaagagagataaattagtggaacgtgcttctgcggctcggatcccaacaatgtggggacctttcactgcttactgctataggtccatattagacggaatagagcacatagcaatggttaagggtgagattggtgacggtcaagacattctcgtgagggttcattctgaatgtctaacaggggacatatttgggtctgcaaggtgtgattgcgggaaccagctagcactctcgatgcagcagatcgaggctactggtcgcggtgtgctggtttacctacgtggacatgaaggaagagggatcggtttaggacacaagcttcgagcttacaatctgcaagatgctggtcgagacacggttgaagctaatgaggaattaggacttcctgttgattctagagagtatggaattggtgcacagataataagggatttaggtgttaggacaatgaagctgatgacaaataatcccgcaaagtatgttggtttgaagggatatggattagccattgttgggagagtccctctattgagtcttatcacgaaggagaataagagatatctggagacaaagcggaccaagatgggtcacatgtatggcttgaagttcaaaggggatgttgtggagaagattgagtctgaatctgagtcctaagcttaaaaaccaggacgaaccgaatggaatcaagaactatagatataatacttcacaaaaaacaaggaaagaaattgacacagaagaagaggaaaaagacatttgatctgtctgagaaacttgattagattggtttatgttctaatctaatctgatttgatttttttttattttgtctacgattcttgagttacgaaatgttcatcatttgttacttcttgttgtcgggattgagtagttgcatttttttagttgtggagctgtgacaaagaggccagctagtgtgtggaatgtggatcatcatcctttggttgattccttgtagaatcctttttgtaaacatttaaactataataaagtgttatgattaag

SEQ ID NO: 117641 - DNA, 3358 bp, Arabidopsis thaliana
  unsure (1)..(3358): unsure at all n locations
cccacgcgtccgcgctttctctctctctctctcgtgtgtgtgtgtgtgatcgagtggtgaaacgacagagaggggcgtcgttttgttgatttcttctgggtgaagatgtcaggtctcgaagatatcaagaacgagaccgttgatctggaaaaaattccgattgaggaagttttccagcagctaaaatgtacaagggaaggattgacaacgcaggaaggggaagacaggattgtgatatttggccccaacaagctcgaagagaagaaggaaagcaaaattctgaagtttctggggttcatgtggaatccgctttcatgggttatggaagctgcagctctcatggccattgctttggctaatggtgataatcgacctccggattggcaagattttgtgggtattatctgtctgcttgttatcaactccacaatcagtttcattgaagaaaacaacgccggaaatgctgcagctgctctcatggctggtcttgctcctaaaaccaaggttcttagggatggaaaatggagtgaacaagaggctgctatccttgtcccaggtgatattgttagcattaaacttggagacattatcccagccgatgcccgtcttcttgaaggagatcctttaaaggttgatcagtctgctctaactggagagtcccttcctgtgaccaagcaccctggtcaagaagttttctctggttcaacttgtaaacaaggagaaatcgaagcggttgttatagccactggagttcacaccttctttggtaaagctgctcaccttgtggacagcactaaccaagttgggcacttccagaaagttcttacatccattggaaacttctgtatctgttctattgctattggtatagcgattgaaatagtcgtcatgtaccctatccaacaccgaaagtacagagatggaattgacaatctcttggtcctcttgatcggtggtatccccattgctatgcccacggtcttgtctgtgactatggctatcgggtctcacaggttgtctcagcaaggtgctatcaccaaacgtatgacagccattgaagaaatggcgggaatggatgtcctttgcagtgacaaaaccgggacactaacccttaataaattgagtgtggataaaaacttggttgaggttttctgcaagggtgtggagaaagatcaagttctactatttgcagctatggcttctagggtggagaaccaggacgctattgatgcagccatggttggaatgcttgctgatccgaaagaggcccgagctggaatcagagaggttcacttccttccattcaaccctgtggataagagaactgctttgacttacatcgactctgatggtaactggcacagagtcagcaaaggtgctcccgagcagatccttgaccttgccaatgccaggcctgaccttaggaagaaggtactctcttgtattgacaagtacgctgagcgcggtcttaggtcgttggcagtagctcgtcaggtggtacccgagaaaacaaaagaaagcccaggtggaccatgggaatttgttggcttgttgcctctttttgaccctccaagacacgacagtgccgaaaccattcgtagggcgttgaatctaggtgttaatgtgaagatgatcactggtgatcaacttgctattggtaaggaaactggtcgcaggcttggaatgggaacaaacatgtatccatcttcggctcttcttggtacacacaaagacgcaaacctcgcatccattcctgttgaggagttgattgaaaaggctgatggatttgccggagtcttcccagagcacaaatatgaaattgtgaaaaagctgcaggagaggaagcacattgttggtatgaccggtgatggtgttaatgatgcaccctgctttgaagaaagcagatatcggtattgctgtggccgatgctacagatgctgctcgtggtgcttcagatatcgtcctcacggaacctgggctgagtgtcattatcagtgccgttctcactagcagagctattttccagagaatgaagaactatactatttatgcagtctcaatcaccatccgtattgtgtttggtttcatgcttattgctttgatatgggaatttgacttctcagccttcatggttctgatcattgccattcttaacgacggtaccatcatgacaatctcaaaggacagagttaagccatctcccacacctgatagctggaaacttaaagaaatttttgctactggagtcgttctaggaggctaccaggccatcatgactgttattttcttctgggcggcgcacaagactgactttttctcggacacattcggtgtgaggtccattagggacaataaccacgagctaatgggtgcggtgtatctacaagttagtatcattagtcaagctctgatcttcgtcacaagatcaaggagttggtcttttgttgaacgtcctggggcacttctgatgattgctttcgtcattgcacaactggttgcaactttgatcgcagtgtatgccgactggacatttgcaaaggtgaagggtatcggttggggatgggcaggtgtgatttggatttacagtatcgtaacatacttcccacaggacattttgaagtttgccattcggtatatcttgagtggaaaggcttgggccagcttgtttgacaacaggaccgctttcacaaccaagaaagattacggtattggagaaagagaagctcaatgggcacaagctcaaaggacattgcacggtctgcagccaaaagaagatgttaatatcttcccagagaaaggaagttacagagagctgtctgagatcgcagagcaagccaagagaagggccgagatagctaggcttagggagcttcacacattgaagggacatgtggaatcagtcgcaaagctaaagggattggacattgatacagcaggacatcactacactgtgtagttggagttgcacaacaacacaaacatttaccgaaaaccaaccccatcatgactcatcttttgttttgtcttcacaaatctctctttaaaagtcattacagtagagggaagagaactcttgtgtattgccataactcttccaaaactcttttttctttttgttattgttagtcattgttcttaaaactcctactcgatatgagctttgcaaatttgcctttgaagaaacaaggccctttgcctttgaagagacaaggcactttgctttttaatggcctaatgtgattattctaacaaaaaaaaaaaaagttgatcaatttcctcttgaagataaccctttnattttaatacaacnancccnnnnnnnnnnnnnnnnnnngnnnnnnnnnnnnnnnnnnnnnnn

SEQ ID NO: 117642 - DNA, 1054 bp, Arabidopsis thaliana
  unsure (1)..(1054): unsure at all n locations
nnnnnnnnnnnnnnnnnnnnnnnnnnnnnnnnnnnnnnnnnnnnnnnnnnnnnnnnnnnnnnnnnnnnnnnccacgcgtccgcccacgcgtccgtgaactaatgggtgcggtgtacttacaagttagtatcattagtcaagctctgatcttcgtcacaagatcaaggagttggtcttttgttgaacgtcctggagcattgctgatgattgctttcctcattgcacaactgattgcaactttgattgcggtttacgccaactgggaatttgcaaagattaggggtattggttggggatgggctggtgtgatctggctatacagtattgtcacatacttcccattggacgttttcaagtttgccattcgatacatcttgagcggaaaggcgtggctcaacttgtttgagaacaagacggctttcacgatgaagaaagattacggaaaagaagagagagaggctcaatgggcacttgctcaaaggacacttcacggtttacagccaaaagaagctgttaacatcttccctgagaaaggaagttacagagaattgtctgagatcgctgagcaagctaagagaagagctgagatcgctaggcttagggagctgcacacactcaagggacatgtggaatcagtcgtgaagctaaagggcttggacattgaaactcccagtcactacactgtgtagtaaaaccaaacatatgactgatcttcgatcctctcatgttttgtcttcttcttcttctttttttcttcaccacctcttatgattattattcacatagggagagatctttgtttattgccataactcttcccaaaccttattgttagtgttcttgtttctcaaatatgtacttttgcataatttgctcttttgaagaaacaaggcatgcctttgtgtttggcatttggcacatgcacattctcttctttgctcttattccatgagcctatgtaatcttaatcttcttctttttcgtaatccaactcgatatcagcggccgcgaattcgatatctagcttatcgagacagtcgacttcgggggggtg

SEQ ID NO: 117643 - DNA, 618 bp, Arabidopsis thaliana
  unsure (1)..(618): unsure at all n locations
ctaatctctcctcctctccttctctctattttgccggaatacatatgatcgagtgaaacggcggacaaagctgtcgtgttgagtactaattcgccgtcgtttttctcagtgaaggagtggtgagagatgtcgagtctcgaagatatcaagaacgagactgttgatctggaaaaaattccgattgaggaagttttccagcagctaaaatgttcaagggaaggattgacaacgcaggaaggggaggacaggattcagatctttggccccaacaagctcgaagagaaaaaggaaagcaaacttctgaagtttttggggtttatgtggaatccactttcatgggtcatggaaatggctgcaatcatggccattgctttggccaacggtgatggtaggcctccggattggcaggattttgttggtattaatctgtctgttggttatcaactctaccatcagttttatcgaagaaaacaatgctgggaatgctgctgctgcccttatggctgggccttgccccaaaaaccaaagggtcttaggggtgggaaagtggngtgnaccaanaancnggaatccttgnccacgnggaaattgttccacnnaaattngggcattntcccc

SEQ ID NO: 117644 - DNA, 650 bp, Arabidopsis thaliana
  unsure (1)..(650): unsure at all n locations
ttaaccctcactgaggggggcccaaaagctggagattcccaccggggtggcgggccccctcaagaactaagtggattccccgggggctccagggaaattgggcacgggcggcagcgaggccaaaagccgaagggatgggcattgatacaggcggggacatcgccgaccctgtggagtttggagttgcacaacaacacaaacatttcccggaaaccaaccccatcatgactcatcttgtgtggtgtcgtcacaaatctctctttaaaagtcattccagtagagggaagagaactcgtgtgtattgccataactcttccaaaactcgggtgtcgttttggtattgttagtcattgttcttaaaactcctactcgatatgagctttgcaaatttgcctttgaagaaacaaggccctttgccgttgaagagacaaggcccgttgctttgtaatggcctaatgtgattattctatcactcttttgtctgtttgatcaatttcatcttgaagataatatttaaatttttttcccnnnnnnnnnnnnnnnnnnnnnnnnnnnnnnnnnnnnnnnnnnnnnnnnnnnnnnnnnnnnnnnnnnnnnnnnnnnnnnnnnnnnnnnnnnnnnnnnnnnnnnnnnnnnnnnnnnnnnnnnnn

SEQ ID NO: 117645 - DNA, 575 bp, Arabidopsis thaliana
  unsure (1)..(575): unsure at all n locations
cttttctcagtgaaggagtggtgagagatgtcgagtctcgaagatatcaagaacgagactgttgatctggaaaaaattccgattgaggaagttttccagcggctaaaatgttcaagggaaggattgacaacgcaggaaggggaggacaggattcagatctttggccccaacaagctcgaagagaaaaaggaaagcaaacttctgaagtttttggggtttatgtggaatccactttcatgggtcatggaaatggctgcaatcatggccattgctttggccaacggtgatggtaggcctccggattggcaggattttgttggtattatctgtctgttggttatcaactctaccatcagttttatccaagaaaaacaatgctggtaatgctgctgctgctcttatggctgggccttgctcccaaaaccaaggttcttaaggggtggaaaatggggtgaacaanaaccgncantccttgtcccncgngatatttgtnccnttaaatttggggcntttnccccctggtnccngcancttaanggngcccttaaaggtgccaactnccaccnggngcccnc

SEQ ID NO: 117646 - DNA, 538 bp, Arabidopsis thaliana
  unsure (1)..(538): unsure at all n locations
nnnnnnnnnnnnnnnnnnnnnnnnnnnnnnnnnnnnnnnnnnnnnnnnnnnnnnnnnnnnnnnnnnnnnnnnnnccacgcgtccgtgcggctgcgagaagacgacagaagggacatgtggaatcagtcgcaaagctaaagggattggacattgatacagcaggacatcactacactgtgtagttggagttgcacaacaacacaaacatttaccgaaaaccaaccccatcatgactcatcttttgttttgtcttcacaaatctctctttaaaagtcattacagtagagggaagagaaatcttgtgtattgccataactcttccaaaactcttttttctttttgttattgttagtcattgttcttaaaactcctactcgatatgagctttgcaaatttgcctttgaagaaacaaggccctttgcctttggaaaaaaaaaaaaaaaaaaaaaaaaaaaaaagcggccgctctagaggatccaagcttacgtacgcgtgcatgcgacgtcatagtcttgtataggtcactaatagaatcgca

SEQ ID NO: 117647 - DNA, 829 bp, Arabidopsis thaliana
  unsure (1)..(829): unsure at all n locations
nnnnnnnnnnnnnnnnnnnnnnnnnnnnnnnnnnnnnnnnnnnnnnnnnnnnnnnnnnnnnnnnnnnnnnnnnnnnnnnnnnnccacgcgtccgtacggctgcgagaagacgacagaagggtacggctgccgatgaagacgacagattacggggaaaagaagagagagaggctcaatgggcacttgctcaaaggacacttcacggtttacagccaaaagaagctgttaacatcttccctgagataggaagttacagagaattgtctgagatcgctgagcaagctaagagaagagctgagatcgctaggcttagggagctgcacacactcaagggacatgtggaatcagtcgtgaagctaaagggcttggacattgaaactcccagtcactacactgtgtagtaaaaccaaacatatgactgatcttcgatcctctcatgttttgtcttcttcttcttctttttttcttcaccacctcttatgattattattcacatagggagagatctttgtttattgccataactcttcccaaaccttattgttagtgttcttgtttctcaaatatgtacttttgcataatttgctcttttgaagaaacaaggcatgcctttgtgtttggcatttggcacatgcacattctcttctttgctcttattccatgagcctatgtaatcttaatcttcttctttttcgtaatccaacttttcttccggcttaaaaaaaaaaaaaaaaaaaaaaaagggcggccgctctagaggatccaagcttacgtacgcgtgcatgtgacgtcataactcttctatagtgtcnnnnnnnnnnnnnnnnnn

SEQ ID NO: 117648 - DNA, 485 bp, Arabidopsis thaliana
  unsure (1)..(485): unsure at all n locations
aacgacggtaccatcatgacaatctcaaaggacagagttaagccatctcccacacctgatagctggaaacttaaagaaatttttnctactggagtcgttctaggaggctaccaggccatcatgactgtaattttcttctgggcggcgcacaagactgactttttctcggacacattcggtgtgaggtccattagggacaataaccacgagctaatgggtgcggtgtacttacaagttagtatcattagtcaagctctggtcttcgtcacaagatcaaggagttggccttttgttgaacgtcctggagcattgctggtgattgcttttcctcatttgcacaactgatttgccacctttgattgccgggttacgccaacctgtgggattttgcaaggatttgggggaatttggactgggggnttggccttgggggtcctcttgntnatacgaggtgttttcaaaaaacttccccanttggccgcttt

SEQ ID NO: 117649 - DNA, 901 bp, Arabidopsis thaliana
  unsure (1)..(901): unsure at all n locations
nnnnnnnnnnnnnnnnnnnnnnnnnnnnnnnnnnnnnnnnnnnnnnnnnnnnnnnnnnnnnnnnnnnnnnnnnnnnnnnnnnnnccacgcgtgcgcccacgcgttcgcccacgcgtncggctactttgattgcggtttacgccaactgggaatttgcaaagattaggggtattggatggggatgggctggtgtgatctggctatacagtattgtcacatacttcccattggacgttttcaagtttgccattcgatacatcttgagcggaaaggcgtggctcaacttgtttgagaacaagacggctttcacgatgaagaaagattacggaaaagaagagagagaggctcaatgggcacttgctcaaaggacacttcacgggttacagccaaaaaaagctggtaacatcttccctgagaaaggaagttacagagagcttgtctgagatcccttgagcaggccaaagagaaggcccgagatacgctaggcttaggggagcttgcacacactgaagggacatgtggaatcagtcgcaaagctaaagggattggacattgatacagcaggacatcactacactgtgtagttggagttgcacaacaacacaaacatttaccgaaaaccaaccccatcatgactcatcttttgttttgtcttcacaaatctctctttaaaagtcattacagtagagggaagngaactcttgtgtattgccataactcttccaaaactctttttttctntttgttattgttagtcatngtcttaaaactcctactcgatatgagctttncaaggctttcacccataatacggtttacatggtccatttttnggggtnccactttnacaatttttcnaattttgtaaaatccnttnaaggccaatcgggttggggggtcc

SEQ ID NO: 117650 - DNA, 531 bp, Arabidopsis thaliana
  unsure (1)..(531): unsure at all n locations
ggcacagagncagnaaaggcgcncctttgaataactttgaacnngccaaagccagcagggagcttagtttgaaggtgctctccatcattgacaagtatgctgagcgtggtcttaggtcgttggctgttgctcgccaggtggtgccagagaaaacaaaggaaagcccaggtgcgccatgggaatttgttggcttgtggccgcgttttgatccccctggtcgggacagtgctgaaacaattcgacgggctttgaatcttggtgttaacgtcaagatgatcactggtgaccaacttgctattggtaaggaaactggtcgcagacttggaatgggaacaaacatgtatccatcttcggctcttcttggtacacacaaagacgcaaacctcgcatccattcctgttgaggagttgattgaaaaggctgatggatttgccggagtcttcccagagcacaaatacgaaattgtgaaaaagttgcaggagaggaagcatattgttggaatgactggtgatggtgtcaatgatgcccctg

SEQ ID NO: 117651 - DNA, 2251 bp, Arabidopsis thaliana
  unsure (1)..(2251): unsure at all n locations
ggatcctcgctcgctttctcgtctctctcgtgtctctcaacagaaaaccatggcggacggccacttcctcaataatatctctctcagcggtcgcggtggaaagaacccgggtttacttaaaatcaattctggaggaattcaatggaagaaacaaggtggtggaaaagctgtggaagttgatagatctgatattgtaagtgttagttggacgaaagtgacaaagagtaatcaattgggagtcaaaaccaaagatggattgtactacaagttcgttggatttcgagatcaggatgttccaagtctgtctagctttttccaaagttcttatggaaaaacaccggatgagaagcaattatcagttagtggtcgtaattggggagaggtggatttacacgggaatacactaacctttttggttggatcaaaacaagcttttgaagtatctttagctgatgtttcacagactcagcttcaagggaaaaatgatgttactttggagtttcatgttgatgatactgctggtgctaatgagaaagactccgctgatggagattagttttcatattcctaattccaacactcagtttgttggtgatgaaaaccgtccaccttctcaagttttcaatgacacaatcgttgcaatggctgatgttagtcctggagttgaggatgcggtcgtcacatttgagagtattgcaatcctcacacccaggggtcggtacaatgtggaacttcacctttctttcttacgattgcaagagcaagctaatgactttaaaatccagtacagtagcgttgtccgtttgttcttgcttccaaagtcaaaccaaccacacacgtttgttgttatctctctagacccaccaatccggaaaggtcagacaatgtacccccacattgttatgcagtttgaaacagacaccgttgtcgaaagtgaactgtcaattagtgatgaacttatgaatacaaagttcaaggacaagctggagcgatcatataagggtctcattcatgaagtattcaccaccgtgttgcgttggctgtctggtgcaaagatcactaaacctgggaagttccgcagttcccaagatgggtttgcagtgaaatcgtctctcaaggcagaagatggggttctttatccactcgagaagggatttttcttcttacctaaacctccaacgcttatacttcacgatgagattgactatgtcgagtttgaaaggcatgctgctggtggtgctaacatgcattactttgatcttctcataagactgaaaactgaccatgaacatctgttccgtaacattcaaagaaatgagtatcacaatctctataccttcataagctctaagggtttgaagattatgaaccttggaggtgcgggtaccgcagacggtgttgctgctgttcttggggataatgatgatgatgatgctgttgaccctcatcttacgcgtatcagaaaccaagctgctgatgagagtgatgaggaggacgaagactttgttatgggtgaggatgatgatggtggttcaccaactgatgattctggcggggacgactctgatgctagtgaaggcggtgtaggagagataaaagagaaatctatcaagaaggaacctaagaaagaggcttcgtcatcgaaaggattgcctcctaagaggaaaactgtagccgcagacgaaggcagtagtaagaggaagaagccgaagaagaagaaggatcccaacgcaccaaaaagagcaatgtctggtttcatgttcttttcccaaatggaaagagataacataaagaaggaacacccaggaatagcatttggagaggtgggaaaggtgcttggagataagtgcgtcaaatgtctgctgatgataaagagccatatgaagccaaggcttcaagtcgacaagcagcgatacaaggatgagatcagtgattacaagaaccctcagccgatgaatgtggactcaggaaacgattccggatagtaactaaactttgattctccaacattctctactagtatctcatttaccctacaatactaagttatggcatgtagtaaacgttggacctttagttgtttggagttaaccagatttttctctttgaccttttagatcttgtgttacttcctagaaaagaagagcctgtctttacctcaaaaaaaaaaaaaaaaaaagggcggccgctctagaggatccaagcttacgtacgcgtgcatgcgacgtcatagtcttcntataggtcacct

SEQ ID NO: 117652 - DNA, 835 bp, Arabidopsis thaliana
  unsure (1)..(835): unsure at all n locations
nnnnnnnnnnnnnnnnnnnnnnnnnnnnnnnnnnnnnnnnnnnnnnnnnnnnnnnnnnnnnnnnggcctggaatnccgggntgccccccggccccacagcaaaaaaaactcactccctagaaaagtttgaaaatggcgaaggcagataagaaaccagcggagaagaaaccggcagagaaaactccggcagccgaaccagcagcagcggcagagaagaaaccaaaagccggaaagaaactcccgaaggaaccagccggcgccggagacaagaagaagaagagatcaaagaagaacgttgagacatacaagatctacatcttcaaggtgttgaagcaagttcatccagatatcggaatctccagcaaagccatgggaatcatgaacagtttcatcaatgatatctttgagaaacttgctggtgagtcttcgaagcttgcgaggtacaacaagaagccgacgattacttctagggagattcagactgcggtgagacttgtgttgcctggagagttggcgaaacatgctgtttcttgaagggactaaggcggttacgaagtttacgagttcttagatttggaatgtggttttgtaatggaggagaagtagtagtagtagttggaatgtgaaaatagggtttatgcttttgggtatctttgagggttatgtaatatgggaattagggttttaatttatggcccggctatgaaatctacttaattttcccatgttcgattgcaatttcattaaaaaaaaaaaaaaaaaannnnnnnnnnnnnnnnnnnnnnnnnnnnnnnnnnnnnnnnnnnnnnnnnnnnnnnnnnnnnnnnnnnnnnnn

SEQ ID NO: 117653 - DNA, 1748 bp, Arabidopsis thaliana
gtcgacccacgcgtccgaaatttcgaatttttgtctaccgatttttcgttcaatttggtgatgcaattactctaaattcaagctgagagagagacatagagatccttttgtatccgtaacatttaacaatctggttttgcttttcttctgttcctctattatctaatcaaatggcgaatgcatctgggttcttcactcatccttcaattcctaacttgcgaagcagaatccatgttccggttagagtttctggatctgggttttgcgtttccaatcgattctctaagagggttttgtgctctagcgtcagctccgtcgataaggatgcttcgtcgtctccttctcaatatcaacgacccaggctagtgccgagtggctgcaaattgattggatgtggatcagcagttccaagtcttctgatttctaatgatgatctcgctaaaatagttgatactaatgatgaatggattgctactcgtactggtattcgcacccgtcgagttgtatcagccaaagatagcttggttggcttagcagtagaagcagcaaccaaagctcttgaaatggctgaggttgttcctgaagatattgacttagtcttgatgtgtacttccactcctgatgatctgtttggtgctgctccacagattcaaaaggcacttggttgcacaaagaacccattggcttatgatatcacagctgcttgtagtggatttgttttgggtctagtttcagctgattgtcatataaggggaggcggttttaagaatgttttagtgatcggagctgattctttgtctcggtttgttgattggacggatagagggacttgcattctatttggagatgctgctggtgctgtggttgttcaggcttgtgatattgaagatgatggtttgttcagttttgatgtgcacagtgatggggacggtcgaagacatttgaatgcttctgttaaagaatcccgaaacgaaggtgaatcaagctccaatggctcggtgtttggagactttccaccaaaacaatcatcgtattcttgtattcagatgaatggaaaagaggtctttcgctttgctgtcaaatgtgttcctcaatctattgaatctgctttacaaaaagccggtcttcctgcttctgccatcgactggctcctcctccaccaggcgaaccagagaataatagactctgtggctacaagtctgcatttcccaccagagcgagtcatatcgaatttggctaattacggtaacacgagcgctgcttcgattccgctggctcttgatgaggcagtgagaagcggaaaagttaaaccaggacataccatagcgacatccggttttggagccggtttaacgtggggatcagcaattgtgcgatggaggtgaatggctaagtccaacaatgtaagttaacttcagagccaaagctttcttctcccccgacgaacactggaaattgatttaaccggtcttgtttaggccggttaaactagacgtaaagctcattttgtctgaattcggtctctctgtttttgaaatttcattgttgttacttgtttaacttgttagttatttccaatgctaataatcaaaaagaagaaaaaaaaaggagcattctttcatcatttcttgtttgtaatgttaagacaacatttctccatttgcttaatcttttcttctgttttggagaactattagaaaccaaaaagttttatatttctgttcaattttctatacgaattagatccc

SEQ ID NO: 117654 - DNA, 2304 bp, Arabidopsis thaliana
ataacaaatgggtcacaacaagttgccataaaggtcccaacagaagaagaaaagagaagtttccccgtgtcactttgtcacaagcttcatcactatttataactaccttgccaagaagaaagcctaaaaaggtataacagtttctttgtcgtgcgacgtcagcgaaaagatgtcgatctcttggactcgaaatttcttcgaaagattctgcgtcgaggaatacaatatagacaccataaaacagagtagtttcctctctgccgatcttctaccatctcttggagccaggatcaaccaatctactaagctccgcaaacacataatctctccttttaatccacgttacagagcgtgggagatgtggctagtattactagttatttactcagcttggatttgcccatttcaatttgctttcatcacctataaaaaagacgcgattttcatcatcgacaacattgttaatggcttcttcgccattgatattattctcaccttcttcgtcgcttatctcgatagccactcctatcttctagttgacagtcctaagaaaatagcaataaggtacctttcgacgtggttcgctttcgatgtttgttccacagcaccatttcagccactaagcctcttgtttaactacaacggaagcgaactaggattcagaattcttagcatgctcaggttatggcgtctccggcgagttagctcgctatttgcaaggcttgagaaagatatccgtttcaactatttctggatacgttgcacaaaactcatttcggtcactttgttcgctatacattgtgctggatgtttcaactacctgattgcagatagatatcctaatccaagaaagacatggattggagctgtgtatccaaatttcaaagaagcaagtctatggaatagatatgtgactgctctttactggtccattacgacattaacgaccacgggatatggagattttcatgctgagaacccaagagaaatgctttttgacattttcttcatgatgttcaacctcggtttgacagcttacctcattggaaatatgaccaacctcgtcgttcattggactagccgaaccagaacctttagggattcagtgagagctgcttcagagtttgcttcaagaaatcaactcccacatgacatacaagatcaaatgttatcacacatttgcttaaagttcaaaacagagggcttgaaacaacaagagaccttgaacaatctgccaaaagcaatccggtcaagcattgcaaactatttattcttccccattgttcacaacatttacctctttcaaggagtttctcgtaacttcctctttcaattggtttcagatatagacgctgagtatttcccaccaaaagaagatataattctacaaaacgaagctcctactgatctttacattctggtgtcaggagcagtggacttcactgtctacgttgatggacatgatcagtttcaagggaaagcagtaattggagaaacatttggagaggttggagttttatactatagaccacaaccattcacagtaagaacaaccgagctgtctcaaatactgcggataagcagaacatcgctgatgagtgcgatgcatgctcatgctgacgatggacgagtcatcatgaacaatctcttcatgaaacttagagggcaacagtcaatagcaatagatgattcgaatactagtggtcacgaaaacagagatttcaaaagcatgggatgggaagagtggagagattcaagaaaagatggctatggtttagatgttacgaatccgacttccgacactgctctaatggatgcgattcacaaggaagatactgaaatggttaagaagatacttaaggaacaaaagatagagagagccaaagtggaaagatctagtagtgaaaccgctggaagaagttacgctaacgattcatcgaaaaaagatccatattgcagctcaagcaaccaaatcatcaagccatgcaaacgagaagaaaagagagttaccatccacatgatgtctgagagcaagaacgggaagttgatactcgtaccatcatccatagaagagcttctaagacttgcaagtgagaagtttggaggctgcaacttcacaaagatcaccaatgcggacaacgctgagattgatgatttagatgtcatttgggatggtgatcatttgtatttttcatcaaattgagtttgaaaactcgacttcatttatagagcatgtatatctgcagacaatgtatttttacccggtttcatagaaaagtctagattatcccctgacgtagaaaa

SEQ ID NO: 117655 - DNA, 2815 bp, Arabidopsis thaliana
acgagagcaacaaaaactgaaacgtgcctccatttctaaaacccaaatccttcttcgtacaaacgacacaatctctcttaaatgccaaaggtcctctttttcgtcttcttccactctctctatacttctctcacaaatctgggcatgttttgaaatccacattcttcattcactgagtttcctttacctcttaaagtttcaatctttagattgagagagaaatttgaagtaatttaaggtaacaagaagagaacaattttgttctgttatggtgggggcgatggcaaacaatggaagaatccggtcagcttttccggtgactaatgggtcaaaagatctgacgccgaacagtgctccggcgagtacaaccggatctgaatatggtcctgttgagttcacaagagaagacgttgaaactcttcttaatgaacgaatcaagtacaagagcaaattcaactacaaggagagatgcgagaatatgatggattatataaaaagacttagactttgcattagatggtttcaagaacttgagttggattatgcttttgagcaagagaagttgaagaacgcattggaattgaatgagaagcattgtgttgacatggaggttagtttgaaaaacaaagaagaggagctgaatatgataattgaagagctgaggaaaaactttgaatctgttcaagttcaacttgccagggaacaaacggagaagttggcggcgaatgattctcttggaaaagagaaagaagcaagactttctgttgaaaaggcacaagctggtctcacagaagagctaggaaaagcacaaggagatcttcaaacggctaaccagaggatacaatccgtgaatgacatgtacaaactgttgcaagagtataactcaagcttgcagctgtataacagcaagctacaaggtgatcttgatgaagctcacgagactataaaacgcggtgagaaagaacggactgccattattgaaaatattggcaacttgaagggtcagttttcagcattacaggaacaacttgctgcttctaaggcttctcaagaagatatcatgaagcagaaaggtgaattggtaaatgaaattgcgagtctcaaggtagagcttcagcaagtcaaagatgaccgtgatcgccatttagtggaagttaaaaccttacaaaccgaggcaaccaagtacaatgacttcaaagacgccataaccgagcttgagactacatgttcgtcccagagtacccagatacgacagttgcaggatcgactagtaaactctgagaggagactgcaggtgtctgatctatctacctttgagaaaatgaatgagtatgaagaccagaagcaaagcattatcgatctgaaaagtcgcgtagaagaagcagaacttaaactcgttgaaggagaaaaactacggaagaagttgcacaataccattcttgaactgaaaggtaacatacgtgtgttctgtagagttagacctctattgccgggtgagaacaatggagatgagggaaaaactatttcttacccgacatccctagaagcacttggccgtggtattgacttgatgcaaaatgcgcaaaagcatgctttcacatttgataaggtttttgcgccgactgcatcacaagaagatgtcttcactgagatttctcaacttgttcaaagtgctctcgatggttacaaggtgtgcatttttgcatatggacaaactggatcgggaaaaacttacaccatgatgggtaggccaggaaacgtcgaggaaaaaggtctgatcccgcgatgtttggagcaaatatttgagacgaggcagtctcttcgatctcagggttggaaatacgaactgcaggtatccatgttagaaatatacaatgaaacgatccgagatctcctgtcaacaaacaaagaagcagtaagaacagacagtggtgtttctccacagaaacatgctattaaacatgatgctagtggaaacacgcatgtcgctgagcttactattttggatgttaaaagctctcgggaggtttcattcctcttagatcatgctgctcgtaacaggtctgtagggaagactcagatgaacgagcaatcttccagaagccattttgttttcacgctaagaatctctggtgttaacgagagcactgagcaacaagtacaaggtgtcttgaacctgattgatcttgcggggagtgagcgtttatcgaagagtggatcaaccggagatagacttaaagaaactcaagcaatcaacaaaagtttgtcgtcgctaggcgatgtcatattcgccttagcaaagaaagaagatcatgtaccattccgaaactcaaagctcacatatcttctccagccttgcttaggcggtgacgcaaagacgctaatgtttgtgaacattgcaccggaatcttcttcaaccggtgagtctctctgctctcttagattcgcagcgagagtgaatgcttgcgagattggaacaccacgtaggcagactaacatcaaaccattggaaaatcggttgagccttggatgagggaaagaaaagagagatggatttgaagtttgaagctaaaagcttcatttcaaagttaattatatgaatgtacttaatatggtcacaacttgatgaagaaggatgggatgattctaacaagaaaacatgaagaccttttgttgtaatttgtatagtttggtttagcattttattatctgttgtttatgtaattctttttcttttggatcataagtaggattttgcttgttgatgttcggattcatattcatcttctgggattcaaaatatttacttctcgtt

SEQ ID NO: 117656 - DNA, 2608 bp, Arabidopsis thaliana
cgggagagcccaacggagagacatatcgccatttcaaagctaaacaaccagataataatactgaggtttttatgcttataattggggtgaaagagacaaatccagagtgtgtgtaaattaggtacgagaagaatttcagctaactcttttgagagaggagaaaaaagtaatagatggttggggaaatgacgaacaatggaagaatccggccatcttttccggtgaaagatctgaccagtaatgaaggatctgaatatggtggccctgttgagtttaccagagaagatgttgaaactcttcttcatgagcgaatcaagtacaagagcaagtacaattacaaggagagatgtgagaatacgatggactatgtaaaaaggcttaggctttgcattagatggtttcaagaactcgagttagattatgcatttgagcaagagaagttgaagaacgctatggagatgaatgagaagcattgcgccgatttggaggttaatttgaaagtaaaggaagaggagctaaatatggtaattgatgaactgaggaagaactttgcatctgttcaggtgcaacttgccaaagaacaaacagagaaattggctgcaaatgaatctcttggaaaagagagagaagcaagaattgctgttgaaagtttgcaagctgccattacagaagagctagcaaagacgcaaggagagcttcaaacagctaaccagaggattcaagctgtcaatgacatgtacaaactcttgcaagagtataactcgagcttacagttgtacaatagcaaacttcaaggtgatctcgacgaagctcatgaaaatataaagcgaggagagaaagaacggactggcattgtagaaagcattggcaacttaaagggtcagtttaaagcactacaggatcagcttgctgcctcgaaggtgtcacaagatgatgtcatgaagcaaaaagatgaattggtgaatgaaattgtaagtctcaaggttgagattcaacaggtcaaagatgaccgtgaccgccatataacggaaattgaaactctgcaagcagaagcaaccaagcaaaatgacttcaaagacaccataaatgagcttgagagtaagtgttctgttcaaaataaggagatagaagagttgcaggatcaattagtagcttctgagagaaaactgcaggtggctgatttatctacttttgagaaaatgaacgagtttgaagagcaaaaggaaagcattatggagctgaaaggtcgcttagaagaagcggaacttaaactcatcgaaggagaaaaactacggaagaagttgcacaataccatacaggaactgaagggaaacatccgtgtattctgtagggtgagacctctattatcaggagagaattctagtgaggaggccaaaactatatcctaccctacatctctagaagcacttggtcggggcattgacttgttgcaaaatggacaatcgcattgtttcacatttgataaggtttttgtgccaagtgcatcacaagaagatgtttttgtagagatttctcaacttgtccagagcgctcttgatggttacaaggtttgcattttcgcatatggacaaacaggatctggaaaaacttatacaatgatgggtaggccaggaaacccggatgaaaaaggactgattcctcgatgtttggagcaaatatttcaaacaaggcagtctcttcgatcacagggttggaagtatgagttgcaggtgtctatgttagaaatatacaacgaaacgattagggatctcttgtcaacaaacaaggaagctgtgagagcagacaatggcgtttctccgcagaaatatgcaatcaaacatgatgctagtgggaatacacatgttgtggaacttactgttgtagatgttcgaagctcgaaacaggtttcgttcctcttagaccacgcagctcgaaacaggtcagtagggaagaccgcaatgaacgagcaatcttctagaagccatttcgttttcacattgaagatctctggattcaacgagagcacagagcaacaagtacaaggtgtcttgaacctgattgatcttgcgggtagtgagcgtttgtcaaagagcggatcaactggcgatagactgaaagaaactcaagcaatcaacaaaagcttatcgtctctaggcgatgtcatatttgccttagcgaagaaagaagatcacgttcctttcagaaactcaaagctcacttatcttcttcagccctgtttaggtggtgactcgaagacgctaatgtttgtgaacatcacaccagaaccttcctcaaccggtgagtctctgtgctccctcaggtttgcagcaagagtgaatgcttgtgagattggaactgcacaccgtcatgttaacgccaggccgttagattatcgcttgagccttggatgagaattttctccactgaagccaaagaaataaagttatgtttatacccgaatgtgggcactacttgatgttggtactaaatctgtatatagcttgtaatagtttcaaggttctgttatcttctactcttgtcttggatcagaagatttgtgtgctggaaaatcataatgttctgagaccattaaccgcatcatttcatt

SEQ ID NO: 117657 - DNA, 1609 bp, Arabidopsis thaliana
  unsure (1)..(1609): unsure at all n locations
nnnnnnnnnnnnnnnnnnnnnnnnnnnnnnnnnnnnnnnnnnnnnnnnnnnnnnnnnnnnnnnnnnnnnnnnnnnncggacgccggaattcggcacgagtggcacgagaagagagagagagcgatagtgagatttagatcaacagatttgaatcgatttctgaaaacatgcagtacaagaatctggggaaatcgggtttaaaagtgagcacgctctcgttcggagcgtgggttacgttcgggaaccagctcgatgtgaaagaagcgaaatcgattcttcagtgttgtcgtgatcatggagtcaatttcttcgataacgctgaggtttacgctaatggtcgcgctgaggagattatgggtcaagcgattcgtgaactgggttggcgtcgatccgatatcgtcatctctaccaagatcttctggggtggtcctggtcctaacgataagggtttatctaggaaacatatcgttgaaggcactaaagcttctctcaaacgacttgatatggattacgttgatgtgctctattgccacaggccggatgcttcaactcctatcgaagagactgtgagggcgatgaactacgtgattgataagggttgggccttctattggggaaccagtgaatggtcagctcaacaaattacggaggcatggggagctgctgaccggttggatttggttggtccaattgtcgaacagccagaatacaacatgttcgctaggcacaaagttgagacagagtttcttcctctgtacaccaaccatggtataggtctcactacctggagcccacttgcatctggtgtgctcactggtaaatacaacaagggagctattccctcagacagccgatttgcattggagaactacaaaaaccttgccaatagatcacttgtggatgacgtgctgaggaaagttagcggtctcaaacccattgcagatgagctaggtgtaaccttggctcagcttgcaatcgcatggtgtgcttcaaatcctaatgtgtcatctgttatcactggtgccacaagggagtcacagattcaagaaaatatgaaagctgttgatgtgatcccattgttgacccctattgttctggacaagattgagcaagtgatacagagcaaaccaaaacgtcctgaatcatataggtaaaaccaacatccaagatctctcttccctattcaatcgtttacaaaagagtgttgcaggaaaaagaaaacattagaagaagctctgtgatgtatgttgttggatgttgtctcgttttcgctttgtttgttctctttagcagcttatgcatttttaagactcagacagagagaaagagagactaatgttttttttttagtttttcttgtttcatcatttaaaaaaccggtcttatttgttacttgttagtgcaacttaaagtttggttcttgtagtttgccatgtcatgacgtcaatatattgaatagctcatcaaacaattctggttatatcttaatgttgtgaagattttaatttaaaaaaaaaaaaaaaaaaccaagnnnnnnnnnnnnnnnnnnnnnnnnnnnnnnnnnnnnnnnnnnnnnnnnnnnnnnnnnnnnnnnnnnnnnnnnnnnnna

SEQ ID NO: 117658 - DNA, 823 bp, Arabidopsis thaliana
  unsure (1)..(823): unsure at all n locations
gggggggggtagtatcgccggctactatacgactcatatagggaaagctggtacgcctgcaggtaccggtccggaattcccgggtcgacccacgcgtccggattacgttgatgtgctctattgccacaggccggatgcttcaactcctatcgaagagactgtgagggcgatgaactacgtgaatgataagggttgggccttctattggggaaccagtgaatggccagctcaacaaattacggatgtctggggaggtgctgaccggtttgaatttggttggcccaattgtcaaacagccagaataccacatgttcgctaggcacaaagtttgagacagagtttcttcctttgtaccccaaccatggtatagggcctcactaccctggagcccacttgcatctgggtgtgctcactggtacatacaaccagggaagctattccctcagacagccgatttgcattgggggaactacaaaaaccttgggccaatagatcccttgtggatgacggcctgaagaaagttagcggtctccaancccattgcagaatgaactaagtgttaccttgggttcaactttgcnatccgcatgggtgttgcttccaatccccaaagntgttcntcctgtttatccccngggtgccccccaaggggaattcccccnnaattccnaaaaaaatttttgaaaacctggttgaaantntnttncccntttggttgaaaccccntnttgttcnttggaanaaaaaattnaaccnattnttttcnaaaccaaacccaaancctccccgaaccnttttgggttnaaacncccccccatatncc

SEQ ID NO: 117659 - DNA, 2877 bp, Arabidopsis thaliana
  unsure (1)..(2877): unsure at all n locations
cgaacacacaccgagagaaaatcagaaattaaattagagagagagcagagtgaatcaaaacttcaacttcacccaaaaagatgttcggagaacttagggatctgctcaccggcggcggaaatgagacgacgacgaagaaggtgaaaggaacggtggttctgatgaagaagaacgtcctcgatttcaacgatttcaatgcttcgtttctcgatcgtcttcatgaatttctcggaaacaaaatcactcttcgtcttgtaagctctgatgttactgattcagaaaacggttctaaaggcaaactagggaaggctgctcacttggaggattggatcacaacaatcacgtcgttaaccgcaggcgaatccgctttcaaggtcacgttcgattacgaaaccgatttcggttaccctggagcattcttgatcagaaacagccatttcagtgagtttcttctcaaaagtctcacacttgaagacgttccaggccatggcagagtccattacatctgtaattcttggatttaccctgctaaacactacactacagaccgagtcttcttctccaacaagacttatcttccacatgaaacaccagcgacgctgctcaagtatagagaagaagagctagtgagtttgagaggaaccggcgaaggagagcttaaggaatgggacagagtatatgactatgcttactacaatgatttaggcgtcccaccaaagaacccacggcctgtacttggagggacacaggagtatccttacccaagaagaggaagaaccgggcggaaaccaactaaagaagatcctcaaaccgagagcaggctaccgatcacatcgagcctagacatatatgttccacgagatgagagatttggacacttgaagatgtctgatttccttgcttatgctctaaaagcgattgctcagttcatccaacctgcacttgaggctgtattcgacgatactcctaaagagtttgattcttttgaagatgttcttaagatctatgaagaaggaatcgatctaccaaaccaagctttgattgatagtatcgttaagaatataccgcttgagatgttaaaggagatattcagaacagatggccagaaattccttaagtttccagtgcctcaggtcatcaaagaggacaaaactgcatggagaacagatgaggaatttgctagagaaatgttggctggactaaaccctgttgttattcaacttcttaaggagtttcctccaaagagtaagcttgacagtgaatcatacggtaaccagaacagtacaatcactaaaagccacatagaacacaatttggatggactcactgttgaagaggctctggagaaggagaggttgtttatattagaccaccatgacacactgatgccatacttgggacgcgtaaacaccaccacgaccaagacttatgcaagcaggacacttctgttcttgaaagatgatgggaccttgaagccgttggtgatagagctgagcttgcctcatcctaatggagacaaatttggagcagtgagtgaagtatatacgcctggtgaaggtgtctacgactcgctatggcagttggctaaggcttttgtcggtgtaaatgactccggaaatcatcagcttattagccactggatgcaaacacacgcatcgattgaaccgtttgtgattgccacaaacagacagctgagtgttcttcacccggtctttaagctccttgaacctcacttccgtgatacgatgaatatcaatgcacttgctaggcaaatcttgatcaatggtggtggtatatttgaaatcactgtgtttccttctaaatacgccatggagatgtcatctttcatttacaaaaaccactggaccttccctgaccaagcattaccagcagaacttaaaaagagagggatggccgttgaggatccagaagcaccacacggattacgtctgaggataaaagactatccttacgcagtggatgggcttgaggtttggtatgctattgaatcatgggtccgagactacattttcttgttctacaagatagaggaggatatccaaaccgacacagagctccaagcctggtggaaggaggtgcgcgaggaaggtcatggagacaaaaagtcagaaccatggtggcctaaaatgcaaacccgtgaagaacttgttgagtcttgcaccatcattatttgggtggcttctgctcttcatgcagctgttaacttcggacagtatccagttgctgggtacctcccaaacagaccgactataagccgtcagtacatgccaaaggaaaacactccagagtttgaagaacttgagaagaatcctgataaagtgtttttgaagaccatcacagctcagcttcagacacttctagggatatctctgattgagattctctctactcattctagcgacgaggtctatttgggacagagagattctaaagaatgggcggctgagaaagaagcgttggaggcgttcgagaagtttggagagaaagtaaaggagattgagaagaacattgatgagaggaacgacgacgagactctcaagaacaggactggtttggttaagatgccatacactttattgtttccgagcagtgaaggcggagtcaccggcaggggaattccaaatagcgtctctatctgaaacaactctcgcttcagaattgtgtcagagtcacgtgttgttctatatcccatggtttacttgttctacaagttataaactttgattattgttataataaacatcagaataaagcaagtctatacatattaaaaaaaaaaaaagnnnnnnnnnnnnnnnnnnnnnnnnnnnnnnnnnnnnnnnnnnnnnnnnnnnnnnnnnnnnnnnnnnnnnnnnn

SEQ ID NO: 117660 - DNA, 771 bp, Arabidopsis thaliana
  unsure (1)..(771): unsure at all n locations
ggacacactatagaagagttatgacgtcacctgcacgcgtacgtaagcttggatcctctagagcgtgccgctcgcgatctagaaccggacgcgtgggcggacgcgtgggcggacgcgtggggagcagtgaaggcggagtcaccggcaggggaattccaaatagcgtctctatctgaaacaactctcgcttcagaattgtgtcagagtcacgtgttgttctatatcccatggtttacttgttctacaagttataaactttgattattgttataataaacatcagaataaagcaagtctatacatattaaaaaaaaaaaaaaaaaagggcggccgcccttttttttttttttttggtttctctctttctatttccaatcaataaacatatctctctgttcgtgtgtctgtaactctacaatgatctgtatagnttctttctctctttttttctctccattttcctggaaacaaatctgtaacaaagaagaataggaacaaaaaaaagctcagctaacaataatacaaacctcactcgatttttctcaccactctgtacagttttataaatccgatgggcaaccaaagtctgaacgttcgatcttcctctgaactgcnggacatcaccttcccaagagcnatcattcctgagttcatttgcgacacaatccgactagacattccactttgttcttgaacacagntctctcagcaagtcgtgcttcatcgaaagatccgtngtgcgctcattgatcatccgggactgtaatcgct

SEQ ID NO: 117661 - DNA, 2207 bp, Arabidopsis thaliana
  unsure (1)..(2207): unsure at all n locations
taattgtctccatctccatgaagctactgcttctgggtaagttttgtggtcttcgttcatcttttctctagcaatttagtattccattttctcaatccctctggttagaaatcgtgtccggtgatttttgaattatatccttttggtgttttcttcgattttgggggaattcgatggatactctgttgaaaacacccaacaagctcgattttttcatccctcagtttcatgggtttgagagattatgcagtaacaatccataccattcaagggttaggcttggtgtgaagaaaagggctatcaaaattgtctctagtgtagtgagtggtagcgctgctcttttggatcttgttcctgaaactaagaaggagaatcttgactttgagcttcctttgtacgacacttccaagagtcaagttgttgatttggctattgttggtggtggtcctgctggtttagccgtggctcagcaggtttctgaagctggactctctgtttgttccattgatccttctcctaagctcatatggcctaacaattatggagtttgggttgatgagtttgaggctatggatttactagactgcctggataccacatggtctggtgctgttgtctatgtcgatgaaggtgtcaagaaggatttgagccggccttatgggagagttaaccggaaacagctcaaatccaaaatgcttcagaaatgtattaccaacggtgttaaatttcatcagtctaaggtcactaatgtggttcacgaggaggcaaactccactgtggtctgcagtgacggtgtaaagattcaggcttccgtggttcttgatgccactgggttttcccgatgcttggttcagtatgacaaaccttacaaccctgggtaccaagtagcttacgggattgtagctgaagttgatggtcacccattcgatgtagacaaaatggtgttcatggattggagagacaaacatctggactcatatcctgagctgaaagaacggaacagcaagatcccaacgttcttgtacgctatgccattttcttccaaccgaatatttcttgaagaaacttctttagttgctagacctggtctgagaatggaagatatccaagaaagaatggctgctagactgaaacatctggggatcaatgtgaagaggattgaggaagacgagcgttgtgtgatcccgatgggcggtcctttaccagtcttacctcaacgggttgtggggattggtgggacagcaggaatggttcatccttcaactggttacatggttgctaggactcttgcagctgcaccaatagttgcaaatgccattgtgagatacctcggttcaccaagtagtaatagcctgagaggagatcaactctctgctgaggtttggagagacttgtggcctatcgaacggcgtagacagagggagttcttctgttttggaatggatattctgctgaaactcgatttagacgctactagaaggttctttgatgcattctttgatctgcaacctcattactggcacggattcttgtcttccaggctgtttctcccggaactgttggtcttcgggttgtcgctcttctcacacgcttccaatacctcaagattggagatcatgacaaaggggactgttcctcttgctaagatgatcaacaatttggtacaagatagagactaaggaccagaaacttagacatataagtacatctgttctttggttcttgaccagtagtatatccgcattgcaagtcgttggataattgtgtataaaccacagatcataacctgaatccttgtgaaatcaaattgttactactagttcattaaaattaatactttgtgctgcattgtgtttcaccaactcttgtaaatccaaaactagaggcaaaatgtaataagataaaagagtggattttgaacaccaaagcaaatctttcaaactccttccgctccttaatatttgatgctttcgggaaaggcttatatttcatcttcctcgaaagggtctctgttccggataatcaccaacctttactttgtcaggcctgaccataccaccttgaagccgagggcactcaaagaatcttgttcctttcaccctgccatcatgttttccaaggggctcatcattctggaattccaacccaattggccngggncccaacggacttctgctcgttcaacatatttgacccattcctntttt

SEQ ID NO: 117662 - DNA, 1021 bp, Arabidopsis thaliana
aggtctctacgactcactatttggaaagctggatccgcctgcaggtaccggtccggaattcccgggtcgatccacgcgtccgctctcctccatatcttaacaatttcatagcaaaccctaaaattgagaaagagatagagagagaaagatgggtagaggaaagatcgagataaagaggatagagaacgcaaacaacagagtggtgacgttctcaaagaggaggaatggattggtgaagaaggctaaagagatcacagttctttgtgatgcaaaagttgccctcataatctttgcaagtaatggtaagatgattgattactgttgtccttccatggatcttggtgctatgttggaccaataccagaagttatctggcaagaaactatgggatgctaagcatgagaaccttagcaatgagattgataggatcaagaaagagaatgatagcttacaactggagctcaggcatttgaagggagaagatatacagtctctcaacttgaaaaatctgatggctgtcgagcacgccattgaacatggcctcgacaaagtccgagaccaccagatggagatccttatatcaaagaggagaaatgagaagatgatggcggaggagcaacggcaactcactttccagctgcaacaacaggagatggctatagcaagcaacgcaagaggaatgatgatgagagatcatgatgggcagtttggatatagagtgcaaccgattcagccaaatcttcaggaaaagattatgtctttggtcatcgattgatcatcgagattttataatctcatcctgatcaactcctatctatactatcgtggtctttagtttgtctttatcaatctgtgtgtcttaatctcgagcaacatatatactcgctatcagactttttacttaagctatatgtgtgttgtttgcttatgacctctatgtattggttgtgttgtgtgcttaaacgtttcgaactaattgatctgtgtgaaacttattattctgtgataagctatttgtgat

SEQ ID NO: 117663 - DNA, 860 bp, Arabidopsis thaliana
ttcaaaagaaaagcagtaataggaaagagaggcggaaaagggaaagtcaaaaacaaggagcctaccgatgaagaaattaaaactggcaattattggatatctttgaaaaggggttggactttcaaccacgggccacttttcactggacatcccctcaaagcgaactagatggctaagtttcaaccatcagtctccgccctcaaaaaaatcatctataaagcggatgatccaagatgagctaactaagctagcagacaaaagcatcataagaagaagaagaaactccaatagttaatcaatcaaagagaagtaagagaaatggcagattctaactgtggatgtggctcctcctgcaaatgtggtgactcttgcagttgcgagaagaactacaacaaggagtgcgacaactgtagctgtggatcaaaactgcagctgtggggtcaaacttgtaactgtttgatgaaaattaattatggttctaaaaatccaaaaataagggccagaaaaatattggggagaaaataattgtggtttataaggcctaaaaagaatgggggggtgttgtttgttggagaataaaaaaaccggtgaccccgtgtggtggtggcggtaatccactctcttcctaagagctttgtgctctttttcccacagccttgtggatatttttccccaaaggaatgtggaataggtgtggtaaatggggggaaatggttttcacataaggaaccggtaaaaaaaaatatttattgggacccttggctttaagaaacttaaaaaaaaaaaaaaaagggccgccccctctaaaggatccaagcttacgtacgcgtgcaaacacgtcaagtggtcataagagcgtc

SEQ ID NO: 117664 - DNA, 737 bp, Arabidopsis thaliana
  unsure (1)..(737): unsure at all n locations
nnnnnnnnnnnnnnnnnnnnnnnnnnnnnnnnnnnnnnnnnnnnnnnnnnnnnnnnnnnnnnnnnnnnnnnnnnnnnnnnnnnnnnnnnnnnnnnnnnnnnnnaaacttaaaacacacacacacacacacacacaataagataggagtagcaaacaatcaatccattatgatatcttgtcagttaaagaaggataacatttcctcagtaagggaatgtcaaagagaaggaataaaaaaaagagacagaagaatgaaatcatttagagagcctctcaagcttctgatcagcatcctttagagcccgcacaagatgcaatatacggtacttatgcttggcgttttcaatggtcaagtccttcaccttagtctgttcttgcttcacagtggcgttagcttcttcgagctttgactgaagttgtttgttttcctccacaagtttagcatccggaatgtctgtcttagtcgacgcaagagcagcttcaagcttagccaatcgctcctgagcttcagtggctctgtgaaagaagggtttcaaattctcgggaagatgatgatgatcctccatgattttcctctctcagcagcttccgctcaaatcataaacctctcttcccccccttctgtcgtcttctcgcagccgtacggacgcgtgggcggacgcgtgggtcgacacgggaattccggaccggtacctgcaggcgtaccggctttccctaaagtgagtcgtattagtgct

SEQ ID NO: 117665 - DNA, 533 bp, Arabidopsis thaliana
  unsure (1)..(533): unsure at all n locations
taggtgcaactatagaagagttatgacgtcgcatgcacgcgtacgtaagctcggagttcggccagaagaagaagaaactacaatagttaatcaatcaaagagaagtaagagaaatggcagattctaactgtggatgtggctcctcctgcaaatgtggtgactcttgcagttgcgagaagaactacaacaaggagtgcgacaactgtagctgtggatcaaactgcagctgtgggtcaaactgtaactgttgatgaaattattatggtctaaaatcatatatatggcagaaaaattggggaaaatatgtgttttatgctaagagatgtgtgtgtgttgttggaataaagacgtgaccgttgtgttgcgtatcaactctcttaagctttgacttttcccagctttgtattttcctatgtatggtaatggtgtgattgtgtaatgttttcatatgtaacgtaaaaaaaatatttatgtgacattgacttttgtgactctaataagggggagggcccgtcttggggggncccaggntt

SEQ ID NO: 117666 - DNA, 633 bp, Arabidopsis thaliana
  unsure (1)..(633): unsure at all n locations
tcccgtttgcggtaccggtccggaattcccgggtcgacccacgcgtccgagaaaaaagaaaactacaaaatcaatcaaagagaagtaagagaaatggcaggttctaactgtggatgtggctcctcctgcaaatgtggtgattcgtgcagttgcgagaagaactacaacaaggagtgtgataactgtagctgtggatcaaactgcagctgcgggtcaagctgtaactgttgaagaaattatcagcatggtctcaaaccaaggaaaatgggaaaaaaatgtgttttatgctaagagatctttgtgtatgttggaataaagacttggcattgtgttgcgtaatgagtaagagtaactattaagcttgcttgacttgttcctgctgtgtaatgtttttatttgtaacctaaatcataaatagtatatgtattcttttgcgtttgtatggggataggcctcccctctaccgggaaccctaattttaaaggcttttcctatttttacgttttgactaacttaaaatcatatgtaactttggnnnnnnnnnnnnnnnnnnnnnnnnnnnnnnnnnnnnnnnnnnnnnnnnnnnnnnnnnnnnnnnnnnnnnnnnnnnnnnnnnnnnnnnnnnnnnnnnnn

SEQ ID NO: 117667 - DNA, 643 bp, Arabidopsis thaliana
  unsure (1)..(643): unsure at all n locations
aacgtacatcccggacagtttgcctgttccccagntatcgctccttnggaagctgtcccctcagtcccgtccggatccccggtcgacccacgcgcccgaagagaggaactncaatgttaatcatcaaagagagtaagaaaatgccggttctaactgtggatgtggctcctcccgcaaatgtggtgactcttgcagttgcgagaagatctacatacaaggagtgcgacaactgtagctgtggatcaaactgcagctgtgggtcaaactgtacctgttgatgaaattattatggtctaaaatcatatatatggcagaaaaattggggaaaatatgtgttttatgctaacagatgtgtgtgtgttgttggaataaagacgtgcccgttgtgttgcgtatcaactctcttaagctttagacttttcccagctttgtattttccctatgtatgggtaatggtgtgattgtgcaatgttttcatatgtaacgtaaaaaaaatatttctgtagaaaaaataaccaatttctcatacttggnnnnnnnnnnnnnnnnnnnnnnnnnnnnnnnnnnnnnnnnnnnnnnnnnnnnnnnnnnnnnnnnnnnnnnnnnnnnnnnnnnnnnnnnnnnnnnnnnnnnnnnnnnnnnn

SEQ ID NO: 117668 - DNA, 718 bp, Arabidopsis thaliana
gaagaagaagaaactacattagttaatcaactcttttctaagagaagtaagagaaatggcagattctaactgtggatgtggctcctcctgcatatgtggtgactcttgcaggtaaacccctagattctctcttctttacatttatatgcatatatgtagactatgtagttcgagcttcatggtacaaaattcaataaactcttcttatgacttcgcttacaattgtgtttgtgaatagacacaaaagattagttttgtttactttagattcaaaacacttcgggcctatcctgtatatatgctgatcagatgcatgtggttgattaatctttaatctcatcatattaattactaattttttgttggttggattaatttgtgggtgggtaaagttgcgggaaggaccccaccaaggagtgcgacacctgtagctgtgggtcaacctgcagcctgtggggcaaacctgtaactgttggtgaaatttttatgggctaaaaccctttttttggcagaaaatttggggaaaatatgggttttttgctaagggatgtgtgtgtgttgttggaataaagacgggcccgttgtgttgcgtatcaactctcttaagctttgacttttcccagctttgtattttcctatgtatggtaatggtgtgattgtgtaatgttttcatatgtaacgtaaaaaaaatatttatgtgacattgacttttgtgact

SEQ ID NO: 117669 - DNA, 508 bp, Arabidopsis thaliana
tcgcatccctttagagcccgcacaagatgcaatatacggtacttatgcttggcgttttcaatggtcaagtccttcaccttagtctgttcttgcttcacagtggcgttagcttcttcgagctttgactgaagttgattgttttcctccacaagttcatcaccgaggatgaagaaactacaatagttaatcactcaaagtgaagtaagagaaatggcagattctaactgtgggtgtggctcctcctgcgggggtggtgactcttgcagttgcgagaagaactacaacaaggagtgcgacaactgtagctgtggatcaaactgcagctgtgggtcaaactgtaactgttgatgaaattattatgggctaaaatcatatatatggcagaaaaattggggaaaatatgtgttttatgctaagagatgtgtgtgtgttgttggaataaagacgtgaacctctattttccatatcaagggggggggggggtggacttttcccaacttttttattt

SEQ ID NO: 117670 - DNA, 4843 bp, Arabidopsis thaliana
tgacgtagcgaccaattagggtttcgcaatcttccagtagatttcgcttcgcaacggattttgaaaatggtggaaaatggggctaaagctgcgaagcgaaagaagagaccacttccagagattcaagaggtagaagatgtacctaggacgaggagaccaaggcgtgctgcagcgtgtaccagtttcaaggagaaatctattcgagtctgtgagaaatctgctactattgaagtaaagaaacagcagattgtggaggaagagtttctcgcgttacggttaacggctctggaaactgatgttgaagatcgtccaaccaggagactgaatgattttgttttgtttgattcagatggagttccacaacctctggagatgttggagattcatgacatattcgtttcaggtgctatcttaccttcagatgtgtgtactgataaggagaaagagaagggtgtgaggtgtacatcgtttggacgggttgagcattggagtatctctggttatgaagatggttcccctgttatttggatctcaacggaattggcggattatgattgtcgtaaacctgctgctagctacaggaaggtttatgattacttctatgagaaagctcgtgcttcagtggctgtgtataagaaattgtccaagtcatctggtggggatcctgatataggtcttgaggagttacttgcggcggttgtcagatcaatgagcagtggaagcaagtacttttctagtggtgcggcaatcatcgattttgttatatcccagggagattttatatataaccaactcgctggtttggatgagacagccaagaaacatgaatcaagctatgttgagattcctgttcttgtagctctcagagagaagagtagtaagattgacaagcctctgcagagggaaagaaacccatctaatggtgtgaggattaaagaagtttctcaagttgcggagagcgaggccttgacatctgatcaactggttgatggtactgatgatgacagaagatatgctatactcttacaagacgaagagaataggaaatctatgcaacagcccagaaaaaacagcagctcaggttctgcttcaaatatgttctacattaagataaatgaagatgagattgccaatgattatcctctcccatcgtactataagacctccgaagaagaaacagatgaacttatactttatgatgcttcctatgaggttcaatctgaacacctgcctcacaggatgcttcacaactgggctctttataactctgatttacgattcatatcactggaacttctaccgatgaaacaatgtgatgatattgatgtcaacatttttgggtcaggtgtggtgactgatgataatggaagttggatttctttaaacgatcctgacagcggttctcagtcacacgatcctgatgggatgtgcatattcctcagtcaaattaaagaatggatgattgagtttgggagcgatgatattatctccatttctatacgaacagatgtggcctggtaccgtcttgggaaaccatcaaaactttatgccccttggtggaaacctgttctgaaaacagcaagggttgggataagcattcttacttttcttagggtggaaagtagggttgctaggctttcatttgcagatgtcacaaaaagactgtctgggttacaggcgaatgataaagcttacatttcttctgaccccttggctgttgagagatatttggtcgtccatgggcaaattattttacagctttttgcagtttatccggacgacaatgtcaaaaggtgtccatttgttgttggtcttgcaagcaaattggaggataggcaccacacaaaatggatcatcaagaagaagaaaatttcgctgaaggaactgaatctgaatccaagggcaggcatggcaccagtagcatcgaagaggaaagctatgcaagcaacaacaactcgcctggtcaacagaatttggggagagttttactccaattactctccagaggatccattgcaggcgactgctgcagaaaatggggaggatgaggtggaagaggaaggcggaaatggggaggaagaggttgaagaggaaggtgaaaatggtctcacagaggacactgtaccagaacctgttgaggttcagaagcctcatactcctaagaaaatccgaggcagttctggaaaaagggaaataaaatgggatggtgagagtctaggaaaaacttctgctggcgagcctctctatcaacaagcccttgttggaggggaaatggtggctgtaggtggcgctgtcaccttggaagttgatgatccagatgaaatgccggccatctattttgtggagtacatgttcgaaagtacagatcactgcaaaatgttacatggtagattcttacaaagaggatctatgactgttctggggaatgctgctaacgagagggaactattcctgactaatgaatgcatgactacacagctcaaggacattaaaggagtagccagttttgagattcgatcaaggccatgggggcatcagtataggaaaaagaacatcactgcggataagcttgactgggctagagcattagaaagaaaagtaaaagatttgccaacagagtattactgcaaaagcttgtactcacctgagagagggggattctttagtcttccactaagtgatattggtcgcagttctgggttctgcacttcatgtaagataagggaggatgaagagaagaggtctacaattaaactaaatgtttcaaagacaggctttttcatcaatgggattgagtattctgttgaggattttgtctatgtcaaccctgactctattggtgggttgaaggagggtagtaaaacttcttttaagtctgggcgaaacattgggttaagagcgtatgttgtttgccaattgctggaaattgttccaaaggaatctagaaaggctgatttgggttcctttgatgttaaagtgagaaggttttataggcctgaggatgtttctgcagagaaggcctatgcttcagacatccaagaattgtatttcagccaggacacagttgttctccctccaggtgctctagagggaaaatgtgaagtaagaaagaaaagtgatatgcccttatcccgtgaatatccaatatcagaccatattttcttctgtgatcttttctttgacacctccaaaggttctctcaagcagctgcccgccaatatgaagccaaagttctctactattaaggacgacacacttttaagaaagaaaaagggaaagggagtagagagtgaaattgagtctgagattgtcaagcctgttgagccacctaaagagattcgtctggctactctagatatttttgctggttgtggtggcctgtctcatggactgaaaaaggcgggtgtatctgatgcaaagtgggcgattgagtatgaagagccagctgggcaggcttttaaacaaaaccatcctgagtcaacagtttttgtcgacaactgcaatgtgattcttagggctataatggagaaaggtggagatcaagatgattgtgtctctactacagaggcaaatgaattagcagctaaactaactgaggagcagaagagtactctgccactgcctggtcaagtggacttcatcaatggtggacctccatgtcagggattttctggtatgaacaggttcaaccaaagctcttggagtaaagttcagtgtgaaatgatattagcattcttgtcctttgctgactatttccggccaaggtattttcttctggagaacgtgaggacctttgtgtcattcaataaagggcagacatttcagcttactttggcttcccttctcgaaatgggttaccaggtgagatttggaatcctggaggccggtgcatatggagtatcccaatctcgtaaacgagctttcatttgggctgctgcaccagaagaagttctccctgaatggcctgagccgatgcatgtctttggtgttccaaagttgaaaatctcactatctcaaggtttacattatgctgctgttcgtagtactgcacttggtgcccctttccgtccaatcaccgtgagagacacaattggtgatcttccatcagtagaaaacggagactctaggacaaacaaagagtataaagaggttgcagtctcgtggttccaaaaggagataagaggaaacacgattgctctcactgatcatatctgcaaggctatgaatgagcttaacctcattcgatgcaaattaatcccaactaggcctggggctgattggcatgacttgccaaagagaaaggttacgttatctgatgggcgcgtagaagaaatgattcctttttgtctcccaaacacagctgagcgccacaacggttggaagggactatatgggagattagattggcaaggaaactttccgacttccgtcacggatcctcagcccatgggtaaggttggaatgtgctttcatcctgaacagcacagaatccttacagtccgtgaatgcgcccgatctcaggggtttccggatagctacgagtttgcagggaacataaatcacaagcacaggcagattgggaatgcagtccctccaccattggcatttgctctaggtcgtaagctcaaagaagccctacatctcaagaagtctcctcaacaccaaccctagataaccacccaaatttggcatttcctttttcaataatattagtcattatgatccttgtcttgaatgaaactcattggtgctgatacttttgataaagaaagcctacgaagagtttttgtatattccgtattcggattgaaaaatctcattatacaagcaagcaatgatgtct

SEQ ID NO: 117671 - DNA, 1033 bp, Arabidopsis thaliana
  unsure (1)..(1033): unsure at all n locations
aatacgactcactttagggaaagctcgtacgcctgcaggtaccggtccggaattcccggttcgacccacgcgtccgcttactctctctctgatcgtcgtctttttcttttgattctgcttttttccgctaggtttctgagatcttccattcgtctcgaattaagttgctacgatgaaaacagcaaaggggaaagataaagttaagaccacaaaggaagccttgaagccagttgatgacagaaaggtgggaaagaggaaggcaccggctgagaagcctactaaacgagagactcgtaaagagaagaaggctaaaaaggacccaaacaaaccaaaaagagctcctagtgccttctttgtctttctagaagattttagggtcacgttcaagaaagaaaatccaaatgtgaaggccgtctctgctgttgggaaagctggagggcagaaatggaagtcaatgtctcaagctgaaaaagctccatatgaagagaaagctgcaaaaaggaaagctgaatatgagaagcaaatggatgcatacaacaaaaacttggaggaagggagtgatgaatctgaaaagtctagatctgagataaatgatgaagatgaagccagtggggaggaagaactactagagaaggaagcggcaggtgatgatgaagaagaagaagaggaagaagatgacgatgatgatgacgacgaggaagaagactaaatcagggatagaaatcagattttgtatctcaagcttaactgcagatccttaagcagaagtaagtattttgtaatttgtgtgtcgacgagaactatagatctaaaatcgtgtgtttttttgtttttcttttcctaagaaagcgaaacagttgttagcatctctcaggatgtctgtttcagctttttgccacaacaaacaatgtaccaatgtctgcgttagtgatcatccaaaccaaaacaaaaaaaaaaaaaaaaannnnnnnnnnnnnnnnnnnnnnnnnnnnnnnnnnnnnnnnnnnnnnnnnnnnnnnnnnnnnnnnnnaac

SEQ ID NO: 117672 - DNA, 980 bp, Arabidopsis thaliana
atgcaatatcctttattgattgaccgaagatattttacaagcctttctccactaagcccttctctcttcttctcttgtcctctcacttgaatctcccacaaagcgatcaatcacaaattccttcttctctctctttcttttcgtccccaagaatcaattatgaaaggagctaaatcaaagactgaaaccaggagctccaagctctctgtgaccaagaagccggctaaaggagcagggacgtggcaaagccgctgcgaaggaccccaacaaaccaaagaggccagccagtgctttcttcgttttcatggaagatttccgtgagactttcaagaaggaaaaccccaagaacaagtctgtagctactgttggaaaagctgcaggagacaagtggaagtccttgtctgattctgagaaagctccatatgttgctaaggctgagaaacgcaaggttgaatatgagaagaacattaaagcttccaacaagaaactggaggaaggtccaaaggaagatgaggaatctgacaagtcagtgtcagaggtcaatgacgaggatgatgctgaggatggtagtgaaaaggaggaggacgatgactaagaagctgaatgttggtagcattagtatagatggctgcaaaaatctctctgtttttatctttacttgaaatgttaacggggctgattaaaaagggtctttctttttatctttttaaatttccccaatctctcacgaaagccctctgaatggagaaagtgaattgtagaatgtttagatggtgaaaaaaagacttgcagctctgtactctttgctttataaaacgatttagttttcttttctcagttaaaaaaaaaaaaaaaaaaaaaaaaaaaaaaaaaaaaagggcggccgctctagaggatccaagcttacgtacgcgtgcatgcgacgtcatagctcgtctataggtaaacggaattgcaactccaaacccggggcgcggggg

SEQ ID NO: 117673 - DNA, 740 bp, Arabidopsis thaliana
cttcttctcttggcctctcacttgaatctcccaccaagcgatacgatcacaaattccttcttctctctctctcttttcgtccctaagaatcaattatgaaaggagctaaatcaaagactgaaaccaggagctccaagctctctgtgaccaagaagccggctaaaggagcagggcgtggcaaagctgctgctaaggaccccaacaaaccaaagaggccagccagtgctttcttcgttttcatgtaatcctcgcctcaaattctttggttcagtagcttccatggatacaacttttattgccgtacaaaagtcttttcatctggttactgccaatcattttttttaagggaagatttccgcgagactttcaagaaggaaaaccccaaggacaaagtctgtagctacttgttggaaaagctgcttggagacaagtggaagtcccttgtcctgattcctgagaaagctcccttattgcttgctaaggcttgggaaacgcaacggttgattacggggaaggaccttttaaagcttacaacaagaaactggacgaaggtccaaaagaagatgacgaatctgacaagtcagtgtctgaggtcaatgaccaggatgatgctgaggattggagtgaacaaggagaggaccattgactaacaacctgaatggtggacgcatataaattcaagggctgcaaaaaaatctcttctggtctatattcttcaacttggaaaaggtaaacggggg

SEQ ID NO: 117674 - DNA, 779 bp, Arabidopsis thaliana
  unsure (1)..(779): unsure at all n locations
nnnnnnnnnnnnnnnnnnnnnnnnnnnnnnnnnnnnnnnnnnnnnnnnnnnnnnnnnnnnnnnnnnnccacgcgtccgcaaagaggcctgccagtgctttcttcgttttcatggaagatttccgtgagactttcaagaaggaaaaccccaagaacaagtctgtagctactgttggaaaagctgctggagacaagtggaagtccttgtctgattctgagaaagctccttatgttgctaaggctgagaaacgcaaggttgaatatgagaagaacattaaagcttacaacaagaaactggaggaaggtccaaaagaagatgaggaatctgacaagtcagtgtcagaggtctcatggccgggttgatgctgaggatggttgtgaagaggagggaggacgatgacctaagaagcctgaatgttggtagcatttagtatagatggctgcaaaaatctctctgtttttattctttacttgaaatgttaaacggggctgattaaaatgggtctttctttttatctttttatatttccacaatctctcactaaagccctctgaatggagaaagtgaattgtagaatgtttagatggtgaaagagagacttgcagctctgtactctttgctttataaaacgatttagttttcttttctcagtttattatattgttgaattgatgatgatgttagctaaatttctttatactttgtaaaagaaatggtccctctagttttgatgcgttnnnnnnnannnnnnaaaaaaaaaaaaaaagcgggcccctcgc

SEQ ID NO: 117675 - DNA, 781 bp, Arabidopsis thaliana
cgttaactgtgactttcatgtgcgtcggaggcggagctgagatgctgaacctgcaagtaaccgggaagacgatcttatctagtattcgttgtcagagaaagatgtcgtctacttgttcttcgtacgcatttgggccgtacaaaatcgatccccgtgaagtgttctacgcaacgcctctctcttatgccatggttaatctccgtccgcttcttcctggtcatgttcttgtctgcccgagacgccttgtgccacgatttactgatcttacagctgatgagaccagtgacctgtggcttactgctcagaaggttggctctaagcttgagaccttccataatgcgtcttctctcacattagccatccaagatggccctcaagcgggacagactgttccccatgtacacattcatatcttgcctcgtaaaggtggtgactttgagaagaatgatgaaatctatgatgctcttgatgagaaggagaaggaactgaagcagaagcttgatctagataaagaccgggttgataggagcattcaggagatggctgacgaggcttcccaatacagatctcttttcgattgctagttatcatttatcaatatcaaatcaaaccaagctatccagtagctttaataaggacccttgtgacaagtgactttcagtttgaaattttatgtcagagactttgattcaaatttgtaatttctttctaatgtcgcccaatctgggtataaactaagagttatagctttggttgcccctacttaaagagatttggatcc

SEQ ID NO: 117676 - DNA, 588 bp, Arabidopsis thaliana
  unsure (1)..(588): unsure at all n locations
ggaccgaagatattttacaagcctttctccactaagcccttctctcttcttctcttggcctctcacttgaatctcccacaaagcgatcaatcacaaattccttcttctctctctctcttttcgtccctaagaatcaattatgaaaggagctaaatcaaagactgaaaccaggagctccaagctctctgtgaccaagaagccggctaaaggagcagggcgtggcaaagctgctgctaaggaccccaacaaaccaaagaggccagccagtgctttcttcgttttcatggaagatttccgtgagactttcaagaaggaaaaccccaagaacaagtctgtagctactgttggaaaagctgctggagacaagtggaagtccttgtctgattctnagaaagctccttatgttgctaaaggctgagaaacgcaaggttgaattatgtgaagacccattaaagctttcacccangaaactggnggaaggtccaaagggaggttgagggttctttgccaagtcagttttaggggcaattccggggggtttcttttgggtgtgttgtgggaggggccgtgctagagcttattttgtga

SEQ ID NO: 117677 - DNA, 375 bp, Arabidopsis thaliana
agggtgaggaatctgacaagtcagtgtcagaggtcaatgacgaggatgatgctgaggatggtagtgaagaggaggaggacgatgactaagaagctgaatgttggtagcattagtatagatggctgacgaggcttcccaatacagatctcttttcgattgttagttatcatttatcaatatcaaatcaaaccaagctatccagtagctttaataaggaccattgtgacaagtgactttcagtttgaaattttatgtcagagactttgattcaaatttgtaatttctttctaatgtcgcccaatctgggtataaactaagagttatagctttggttgacactacttagtgagattagaatcaactccttcatgttat

SEQ ID NO: 117678 - DNA, 882 bp, Arabidopsis thaliana
  unsure (1)..(882): unsure at all n locations
cgcggtaccggttccgaattcccgggtcgacccacgcgtccgtcaaaccctacgaagatcttcttcttcttcttcaagaatcgatcatgaaaggagctaaatctaaggctgaaaccaggagcacaaagctctctgtgactaagaagcctgctaagggagccaaaggtgctgctaaagatccaaacaaacctaagaggccttccagtgccttcttcgttttcatggaagatttccgtgtgacgtacaaggaggagcaccctaagaacaagtctgttgctgctgttggcaaagctggtggtgaaaagtggaaatccttgtctgactctgagaaggctccttatgtggctaaggctgacaagcgcaaggttgagtatgagaagaacatgaaagcctacaacaagaaattggaggaaggccctaaggaagatgaggaatctgacaagtcagtttcagaggttaacgatgaggatgatgctgaggatggcagtgaagaggaggaagacgatgattaagaagttgaagttgtggtagcgtaatatagaaggctgcaaggaatctctcggatgtttttatctcctctcttaaaatgttaattcggctggttaaagtgggtttttttttttttccttttctttttcttactgatgtttcgttttagtaaactattacctatctcccactgattctacgggtaatggaaaaagtgaatgtagaatgtttagatggtgaaatgagagatttgtagctctatataatgaatgatttagtttttaaannannnnnnnnnnngnnnnnannnnnnaannnaagnnnnnnnnnnnnnnnnnnnnnnnnnnnnnnnnnnnnnnnnnnnnnnnnnnnnnnnnnnnnnnnnnnnnnnnn

SEQ ID NO: 117679 - DNA, 1070 bp, Arabidopsis thaliana
  unsure (1)..(1070): unsure at all n locations
taggtgcactatagaagactatgacgtcgcatgcacgcgtacgtaagctcggaattcggctcgagaaaatatcttatgagaagaaattttaacatcccccacttaaccctctcatctctcggcctctcattcgaatctccttcacaaagcgtacaaatcacaaacacgtagttattctctctttactctctctatttctctctcttcaaaccctacgaagatcttcttcttcttcttcaagaatcgatcatgaaaggagctaaatctaaggctgaaaccaggagcacaaagctctctgtgactaagaagcctgctaagggagccaaaggtgctgctaaagatccaaacaaacctaagaggccttccagtgccttcttcgttttcatggaagatttccgtgtgacgtacaaggaggagcaccctaagaacaagtctgttgctgctgttggcaaagctggtggtgaaaagtggaaatccttgtctgactctgagaaggctccttatgtggctaaggctgacaagcgcaaggttgagtatgagaagaacatgaaagcctacaacaagaaattggaggaaggccctaaggaagatgaggaatctgacaagtcagtttcagaggttaacgatgaagatgatgctgaggatggcagtgaagaggaagaagaccatgaataaaaaggtgaagttgggggagccgtaatattagaaaggctggaagggaaatcctctcgggagggtttttaatcctctttccccttaaaaaaagggttaatttccggcttgggttaaaagagggggttttttctaaattttaattctgaacaacccttattttcccttaaccgggagggttttcgcgttttttaggtaaaacccttttttacccttttttttccccaacctgggtttctttcccgggggttaatggggaaacaaagggaaaatggtgtaaaaagggttctaaaatatgggggaaaaatggaagaaaaattttgggccacccccttttttatatgggaaaggaatttaaaccttttttaaaancacacaantagacgtcttccgtacac

SEQ ID NO: 117680 - DNA, 573 bp, Arabidopsis thaliana
  unsure (1)..(573): unsure at all n locations
cttcaaaccctacgaagatcttctccttcttcttcaagaatcgatcatgaaaggagctaaatctaaggctgaaaccaggagcacaaagctctctgtgactaagaagcctgctaagggagccaaaggtgctgctaaagatccaaacaaacctaagaggccttccagtgccttcttcgttttcatggaagatttccgtgtgacgtacaaggaggagcaccctaagaacaagtctgttgctgctgttggcaaagctggtggtgaaaagtggaaatccttgtntgactctgagaaggctccttatgtggctaaggctgacaagcgcaaggttgagtatgagaaggaccatgaaagccttcaacaagaaattggaggaagggccctaaggaggctggggaatctggccaggcagttccagaggttaccggttgaggttgttcctggggtttgccgtttaagggggggaagccgttcttaaaaagttaagttttggtgcgnatttngaggttcaagnatcttncggtntttaccccccctnaatgtatcgctgtaangttttttttttccnccnncagc

SEQ ID NO: 117681 - DNA, 589 bp, Arabidopsis thaliana
ccaattcaaaaaaagaaataacctaaacgtgttcacacagagatctcgagatgaaagataaccaaacggaagttgaatcgaggagcactgatgatagattgaaagttagagggaacaaagttggaaagaaaacaaaggatccaaacaggcctaagaaaccaccaagtcctttcttcgtcttcctggacgatttccgaaaggagtttaatctggctaaccctgacaacaaatccgtcggtaatgttggtagagcagctggaaagaaatggaaaaccatgactgaagaagaaagagcaccttttgtagcaaaatcacagagcaaaaagactgagtatgctgtgactatgcaacagtataacatggaactggctaatggaaacaagacaactggagatgatgagaaacaagagaaagctgctgatgattaggaagttggatcagtgatttgtgtatcaactatatctgttgttttatgtcaacttttagctagcttttagggagaacaattgttacattcctgttttatcctttctgtcaactgtgggattattcagatgtaactttggatttaaaaaaaaaaaaaaaaaaa

SEQ ID NO: 117682 - DNA, 837 bp, Arabidopsis thaliana
  unsure (1)..(837): unsure at all n locations
atgatacttcagctctacacgactcactattgggaaagctggcacgcctgcaggtaccggtccggaattcccgggtcgacccacgcgtccgcggacgcgtggggtcaaacaaaaaaaaaaaacctaaagaaacttcgacatgaaaggcggcgaatccaaagctgaagcaacgagcactgatcagagactcaaaaccagaggtagaaaggctgggaagaagacgaagaaggatccaaatcaacctaagagacctccaagtgctttcttcgtcttccttgaggatttccgaaaagagtttaacctagcgaatcctaataacaaatccgtcgctactgttggtaaggctgctggagctagatggaaggcaatgactgatgaagataaagctccttacgtcgctaaggctgagagcagaaagactgaatatattaagaatgtgcaacagtacaacttgaaactggctagtggaaccaatagagaagaggatgactctgacaaatccaagtctgaagttgatgaagcagtaagcgaagaggaggcagaagacgacgattgaagcatctaggtcttgctattgacttgactcagatttgagaatgtaaacttgcttaggtttatgaccaaaaacttttaaaaaactcttatttatgctttgtgtttgtgatatttgaacctcatttgctacatcaatgttgttttaggtcagtctgtagggataatatcacttgactgctatatttcccctatttccttatgttttactagtattcatatgttcttcaactttgtatgagttttagtatcagttttatttctacttatgcttnnnnnnnnnnn

SEQ ID NO: 117683 - DNA, 1820 bp, Arabidopsis thaliana
catacgactcaccctaggagaagctaccacgcctgcaggtaccggtccggaattcccgggtctgacccctttcttcttcttcctctacagcttcttcataaatctctctctcttctcctctcttctcaaagatcgaacctttcgatttcagtctcttcagagttctttcgttttcatcgaaacaatggcgaagaacgttgggattttggctatggatatctatttccctcccacctgtgttcaacaggaagctttggaagcacatgatggagcaagtaaagggaaatacactattggacttggccaagattgtttagctttttgcactgagcttgaagatgttatctctatgagtttcaatgcggtgacatcactttttgagaagtataagattgaccctaaccaaatcgggcgtcttgaagtaggaagtgagactgttattgacaaaagcaagtccatcaagaccttcttgatgcagctctttgagaaatgtggaaacactgatgtcgaaggtgttgactcgaccaatgcttgctatggtggaactgcagctttgttaaactgtgtcaattgggttgagagtaactcttgggatggacgttatggcctcgtcatttgtactgacagcgcggtttatgcagaaggacccgcaaggcccactggaggagctgcagcgattgctatgttgataggacctgatgctcctatcgttttcgaaagcaaattgagagcaagccacatggctcatgtctatgacttttacaagcccaatcttgctagcgagtacccggttgttgatggtaagctttcacagacttgctacctcatggctcttgactcctgctataaacatttatgcaacaagttcgagaagatcgagggcaaagagttctccataaatgatgctgattacattgttttccattctccatacaataaacttgtacagaaaagctttgctcgtctcttgtacaacgacttcttgagaaacgcaagctccattgacgaggctgccaaagaaaagttcaccccttattcatctttgacccttgacgagagttaccaaagccgtgatcttgaaaaggtgtcacaacaaatttcgaaaccgttttatgatgctaaagtgcaaccaacgactttaataccaaaggaagtcggtaacatgtacactgcttctctctacgctgcatttgcttccctcatccacaataaacacaatgatttggcgggaaagcgggtggttatgttctcttatggaagtggctccaccgcaacaatgttctcattacgcctcaacgacaataagcctcctttcagcatttcaaacattgcatctgtaatggatgttggcggtaaattgaaagctagacatgagtatgcacctgagaagtttgtggagacaatgaagctaatggaacataggtatggagcaaaggactttgtgacaaccaaggagggtattatagatcttttggcaccgggaacttattatctgaaagaggttgattccttgtaccggagattctatggcaagaaaggtgaagatggatctgtagccaatggacactgattcttgaaaaggaacaaatcataaaaagtcacctgaaaatgttatgttttacttgcaccattttaatcgttttataagtttgttgttactttgatttagggacaaagaaggaatgtattctctgtttttatttactgtttgatttactctctcatgcaaatgataatttggaacttattggaatctctattttgtaagggcggccgctctagaggatccaagcttacgtacgcgtgcatgcgacgtcatg

SEQ ID NO: 117684 - DNA, 705 bp, Arabidopsis thaliana
  unsure (1)..(705): unsure at all n locations
gcccggctnaaaggcccanaattcgaccnttttggcnaagccccncgcttttccaaggaccgtcattcnnggtctttcgggcattnnccccaccccaataccccatgattgccggaaaccggtggtanntccccttanggagtgcncccccgcaaccaatgtcncattccccccacggcaattagcccccttcagccttttcaaaccttgcatctgtaatggatgttggccggtaaattgaaagctaggacatgagtatgcccctgagaagtttgtggagaccaatgaagctaatggaccataggtatggagcaaaggactttgtgacaacccaaggagggtattatagatcttttggcaccgggaacttattatctgaaagaggttgattccttgtaccggagattctatggcaagaaaggtgaagatggatctgtagccaatggacactgattcttgaaaaggaacaaatcataaaaagtcacctgaaaatgttatgttttacttgcaccattttaatcgttttataagtttgttgttactttgatttagggacaaagaaggaatgtattctctgtttttatttactgtttgatttactctctcatgcaaatgataatttggaaaaaaaaaaaaaaaaaagggcggccgctctagaggatccaagcttacgtacgcgtgcatgcgacgtcaaagtcttgctat

SEQ ID NO: 117685 - DNA, 2298 bp, Arabidopsis thaliana
  unsure (1)..(2298): unsure at all n locations
ctataaatagagcaatcggtcgtagaaaaccaagacatcaaaaacacgaatatcgatagtacacttctacgtgcaattttctcctttctcttcctggacatctgtctgtttattacattttcttgtaatctctttttggggttttacaatatctatcccctaaagtttcggaaaattctgtttttctgttctcattcttcgtgatctttttcactttcttcaaaaaaaaaacatgtgtggaatacttgccgtgttaggatgttccgatgattctcaggccaagagagttcgtgttcttgagctttctcgcagattgaggcacagaggacctgactggagtggcttatatcagaacggagataattacttggcccatcaacgtcttgccgtcatcgatcctgcttccggtgatcaacctcttttcaacgaggacaagaccattgttgtcacggtgaacggagagatttataaccatgaggagctgagaaaacgtctgaagaatcacaagttccgtactggtagtgattgtgaagtcattgctcacttgtacgaggagtatggtgtggattttgttgatatgttggatggaatattctcctttgtgttgctcgacacacgagataactctttcatggtggctcgtgatgcgattggtgtcacttcgctctacattggttggggactagacggatctgtgtggatatcttcagagatgaaaggcctaaacgatgactgtgagcatttcgaaacgtttcctccaggtcatttttattcaagcaaattaggagggtttaagcaatggtataatcctccttggttcaatgaatctgttccttcaacgccttatgagcctcttgcgataagacgcgcctttgaaaacgctgtgattaagcggttgatgactgatgttccatttggagttttgctctctggtggtcttgattcttcccttgttgcctccatcactgcacgtcacttggccggtactaaggcggctaagcaatggggtcctcagctccattccttttgcgttggtcttgagggctcaccggacttgaaggcagggaaagaggtggcggaatatttggggacggtgcaccacgagttccacttctcggtgcaggacgggattgatgcgatagaggatgtgatttaccatgttgagacctatgatgtgacgactatcagagcgagcacaccgatgttcttgatgtcccggaaaatcaagtctctaggggtcaagatggttctctccggcgaaggtgcggacgagatctttggagggtacctctatttccacaaggcacctaacaagaaagagtttcaccaagaaacttgtcgcaagatcaaggctcttcacaagtatgactgtctaagagccaacaaatctacctctgcctttggactagaggcacgtgttcctttccttgacaaagacttcatcaacacagctatgtctctcgaccctgaatccaagatgatcaagccagaggaaggaaggatcgagaaatgggttctaaggagagcctttgacgacgaagaacgtccttatctaccaaaacacattctctacagacagaaagaacagttcagtgatggtgttggctacagttggatcgatggcctgaaagatcacgctgctcaaaatgtcaatgacaagatgatgtcgaacgcggggcatatcttccctcacaacactccaaacactaaagaagcttactactacagaatgatctttgaaaggttcttcccgcagaactctgcgagactaacggttcctggaggtgccaccgtggcttgttcgactgcaaaggcagtggagtgggatgcaagctggtccaacaatatggatccatcaggaagagccgctatcggagttcacctttcggcctacgatggcaagaacgtggcattgaccataccaccacttaaggcaattgacaacatgccgatgatgatgggtcaaggagttgtgattcagtcataacttcgaaggagaaatggatgaaatatgtgttatatcttcccaatgggtgaagtgttttgtatgattttaaaaataagaatgtgatcctttttttttcctatgaagatctgaatgtataatctatcttgtaaaaatttgtttctttgtaagatttgaatgtaccgcttttacgtagatcgatgtacatcaatcttataagtttcaattatgtattatattaaaaaaaaaaaaaaaaagnnnnnnnnnnnnnnnnnnnnnnnnnnnnnnnnnnnnnnnnnnnnnnnnnnnnnnnnnnnnnnnnnnnnnnnnnn

SEQ ID NO: 117686 - DNA, 3219 bp, Arabidopsis thaliana
  unsure (1)..(3219): unsure at all n locations
nnnnnnnnnnnnnnnnnnnnnnnnnnnnnnnnnnnnnnnnnnnnnnnnnnnnnnnnnnnnnnnnnnnnnnnnnnnnnnnnnnccacgcgtccgcttttctcactgacaagagagagatagagagagaaaaaggctctgctttctacattatttacgattatacactttccaacatggcggcctctgtagataatcgccaatacgctcgtctcgagccaggtttgaacggcgtggttcgttcttacaaacctcccgttccaggccggtccgattcccctaaggcgcaccagaaccaaaccaccaaccaaaccgtgttcttgaaaccagccaaggttcatgacgatgacgaagacgtgtcgagcgaagacgagaacgagacacacaacagcaacgccgtgtactacaaggagatgataagaaaatccaacgccgagcttgaaccgtccgttttggacccgagggacgaatacacggctgatagctggatcgagcgtaacccttccatggtacgtctcacagggaaacatcccttcaactccgaggcgcctcttaaccgtttaatgcaccacgggtttatcacccctgtcccgttgcactacgttcgtaaccacggccacgtccctaaagcccaatgggccgaatggacggtcgaggtgaccggattcgtcaaacggcccatgaaattcaccatggaccagctcgtctccgagtttgcttaccgcgagttcgccgcgacgctagtctgcgcggggaaccgccgtaaggaacagaacatggtgaagaagtcaaagggattcaactggggatccgccggagtttccacctccgtgtggcgtggtgtccctctctgcgacgtactgcgtcgctgcgggatctttagccgaaaaggcggcgctctcaacgtctgcttcgaagggtcggaggatcttccgggcggtgccggaactgctggttccaaatacggaacgagcatcaagaaggaatatgccatggatccatcaagagacatcattttggcttatatgcaaaacggagagtatctaacaccagaccacggttttccggttcggatcatcatccccggtttcattggtggccggatggttaaatggttgaaacgaatcattgtcacaactaaagaatccgacaatttctaccatttcaaggacaacagagttttaccttctttggtagacgccgaactcgccgacgaagaaggttggtggtataagccagagtacataatcaacgagctaaacataaactccgtgattacgacgccatgtcacgaggagattcttcccatcaacgctttcacaacccaaagaccttatactttaaagggttacgcatattccggaggtggaaaaaaagtgacccgtgtggaggtcacggtagatggtggagagacatggaacgtatgtgcacttgaccatcaagagaagccaaacaagtatgggaagttctggtgttggtgtttttggtcacttgaggttgaggttttggacttgcttagtgccaaagagattgctgttcgtgcatgggacgagactctcaacacgcagcccgagaaaatgatatggaatctcatggggatgatgaataactgctggtttagagtgaagactaacgtgtgcaagccacacaagggagagattgggattgtgttcgagcatccaacgcttcctggtaatgaatctggtggatggatggcgaaggaacgtcacctcgaaaaatcggctgacgcgcctcctagtctaaagaagtctgtctcgacgccgtttatgaacacaactgcgaagatgtactcgatgtccgaggtcaagaagcataattcggctgactcttgctggatcattgtccatggacatatctatgattgtacacgattccttatggatcacccgggtggttcggattcaatcttgatcaatgctggtacggattgtacggaggagtttgaagccattcactcggataaagccaagaagatgcttgaggattaccgtatcggtgagctcatcaccactggttattcctctgactcttcctcgcctaacaactcggttcacggttcatccgccgtgttctcgctgttggctcccattggagaggcgactccggttaggaacctcgctttggttaatccccgggctaaagtcccggttcaactcgtcgaaaagacttccatttctcatgatgttcgtaaattccggtttgctttaccggttgaggatatggttctaggcttaccggttggtaagcacattttcctttgcgccaccatcaatgacaagctctgcctcagagcttacacaccaagcagcaccgttgatgtggttggctacttcgagctcgtggtcaagatttactttggcggtgtccacccaagattccctaacggcgggctcatgtctcagtacctagactctttgcctatagggtcaactttggagattaaaggaccattgggtcacgttgagtatctcggcaagggtagtttcacggttcacggtaaaccaaagtttgctgataaattggcaatgttggcaggtggaaccggaataactccggtttaccaaattatccaagccattctcaaggatccagaggatgagactgaaatgtacgtcatttatgctaaccggaccgaggaagatattctcctaagggaggaactggatggttgggcagagcaatacccggaccggttaaaggtttggtacgtagtggaatcagctaaggaaggttgggcatacagtaccgggtttatttccgaggcgattatgcgagaacatatccctgatggattagatggctcagcccttgccatggcttgcggaccaccaccgatgattcagtttgcggttcagccgaatttggagaagatgcaatataacatcaaggaggatttcttgatattctagtctaaagccaagatatttcaaagtcaaaacgttaagtcgtcaaaaagcctagtgttatgatagattctaaataagtattgagggatttgtttgtatataatgttggttctttaaagtcttggatttggaaatataatgtgttcgttgtattcacgatcgatattttttttcacaataatatacaaaaagtaatttcagaaaaaaaaaaaaaaaaaaaaagggcggccgctctagaggatccaagcttacgtacgcgtgcatgcgacgtcatagctcgtctagtgtgtaacgg

SEQ ID NO: 117687 - DNA, 822 bp, Arabidopsis thaliana
  unsure (1)..(822): unsure at all n locations
gggaccccccctttggggggttcccccggtttgaaggtaattcctcccgggcccaaaggggggtaagtttttcccccgggttttccaccgggtaaaaacccaaaaggttttggtctgaataaaatttgggccaatggttgggccaggttggaacccgggaataaactcccggtttcccaaattaatcccagccattctcaaggatccaaaggatgagactgaaatgtccgtcatttatgctaaccggaccgaggaagatattctcctaagggaggaactgaatggttgggcagagcaatacccggaccggttaaaggtttggtacgtagtggaatcagctaaggaaggttgggcatacagtaccgggtttatttccgaggcgattatgcgagaacatatccctgatggattagatggctcagcccttgccatggcttgcggaccaccaccgatgattcagtttgcggttcagccgaatttggagaagatgcaatataacatcaaggaggatttcttgatattctagtctaaagccaagatatttcaaagtcaaaacgttaagtcgtcaaaaagcctagtgttatgatagattctaaataagtattgagggatttgtttgtatataatgttggttctttaaagtcttggatttggaaatataatgtgttcgttgtattcacgatcgatattttttttcacaataatatacaaaaagtaatttcagaaaaaaaaaaaaaaaaaaaaagnnnnnnnnnnnnnnnnnnnnnnnnnnnnnnnnnnnnnnnnnnnnnnnnnnnnnnnnnnnnnnnnnnaaacggaatg

SEQ ID NO: 117688 - DNA, 638 bp, Arabidopsis thaliana
  unsure (1)..(638): unsure at all n locations
tctataatgcatttgcagtgaccngaataccccggttccnaattnccagccatctcaggacccagnggatggcctgaatgtccgccatttatgctacccggcccgaggaagatattcccctaagggagggaactggatggttggccagagcaattccccggaccggttaaaggtttggtacgtagtggaatcagctaaggaaggttgggcatacagtaccgggtttattcccgaggcgattatgcgagaacatatccctgatggattagatggctcagcccttgccatggcttgcggaccaccaccgatgattcagtttgcggttcagccgaatttggagaagatgcaatataacatcaaggaggatttcttgatattctagtctaaagccaagatatttcaaagtcaaaacgttaagtcgtcaaaaagcctagtgttatgatagattctaaataagtattgagggatttgtttgtatataatgttggttctttaaagtcttggatttggaaatataatgtgttcgttgtattcaaaaaaaaaaaaaaaaaaaaaaaaannnagcgccagctctagaggatccaagcttacgtacgcgtgcatgcgacgtcatagatcttctantagtgcgtcctaaa

SEQ ID NO: 117689 - DNA, 913 bp, Arabidopsis thaliana
ccacccacgcgtcgtaaaaacaatttctcattagcttacaatggcggatacacaccgtgtcgaccgtactgatagacactttcaatttcagtcgccctatgaaggcggccgaggtcaaggtcagtatgaaggtgaccgtggttacggtggtggcggttacaagagcatgatgcctgaaagtggcccatctagtacccaagtattgtccctgttgattggagtccctgtcgtcggttcgctacttgccttggctggattacttctagctggttcggtgatcggcttaatggttgctttaccactatttctcctcttcagcccggttatagtcccagcggctctaactatcgggcttgcaatgacaggctttttagcctcggggatgttcggtctaaccgggcttagctcaatctcatgggtcatgaactatcttcgtgggacaaggaggactgtgcctgagcaattggagtatgctaagaggagaatggctgatgcggttggctacgcaggacaaaagggcaaagaaatgggccagcatgtgcagaacaaggcccaagatgttaaacaatatgatatttctaagccacatgacactaccactaagggtcatgagactcaggggaggacgacggctgcatgatgagttttcagtatgaacggtagatatgtgttttcactattatgtcgttttttctgcattttcaatatgatgttatgtgttttttttgtttggctttttgttgaaccgtgtatgtgttttatgtttttgtaagcatgaaagatcgcaagtgttgtggtaatatttgaatgtaataatatgataagttgataaaaaaaaaaaaaaaagggcggccgctctagaggatccaagcttacgtacgcgtgcatgcgacgtacatagctgttggatagt

SEQ ID NO: 117690 - DNA, 1031 bp, Arabidopsis thaliana
acccacgcgtccgcacgatcgagcaagagagagatggatggtcgattacctgacaaaggcattctcaagagcgaggctctaaaacagtacatcatggaaacaacagcgtatccaagagaacacgaattgcttaaagaacttcgagaagctacaatccagagatatggaaatttaagcgagatgggagttccggttgatgaaagtctattttctatcgatgcttgtaaagatcatgaatgcgaaaaacactatcgagatcggtgttttcaccggttactcgcttctcactacagctcttgctttacctgaagatggccgtattaccgcgatagacattgataaagaagcttacgaagttggactagagtttattaagaaggctggtgttgatcacaagattaattttatccattccgatggtcttaaggccttagaccaattggtgaacgacaaatgtgagtttgatttcggattagcggatgctgacaaatcaagctacgtcaacttccatgagaggcttctaaaattggtgatggttgggggaatcattgcgttcgacaacaccttgtggtttggttttgtggcggaggatgaagatggagttccggagcatatgagagaatatagaacagctcttatagaattcaataagaaattggctttggatccccgagtcgagctctctcagatttccattggagatggtatcacgctctgtagacgtcttgtttgatccaaaagactacttgaagagtacgtagcagaaccaaagtcggagagtttggaataaaagtgttagatggttcaataacgacttcgtcttttgtcacaactttgcttgtaatggtgtgtttgattgatgctcactctttatcttctttctatgttgtggtttcgtcgatgttgttctgtctggcaaccaaactattagtactctaaattacttttaataataattgttgtaacattataatttttttttttctggtcgacacattattattactgttttttttctttttaagtgtttg

SEQ ID NO: 117691 - DNA, 790 bp, Arabidopsis thaliana
atcaaagaatcaggaaagcaaacacaacacaactaacaatggatttaggaaggtttccaataatctcaatcctcgaagacatgcttgaagtccccgaagaccacaacaacgagaagacccgcaacaacccttcacgagtttacatgcgagacgctaaggcaatggctgctacacctgctgacgtcatcgagcaccctaacgcatatgcattcgtcgtggacatgcctggaatcaaaggagatgagatcaaggttcaggtcgagaacgacaatgtgcttgtggtgagtggagagaggcagagagagaacaaagaaaacgaaggtgtgaagtatgtgaggatggagagaagaatgggtaagttcatgaggaagtttcagttgcctgaaaatgcagatttggacaagatctctgctgtttgtcatgacggtgtgttgaaggttactgttcagaaacttcctcctccggaaccaaagaaaccaaagacaattcaagttcaagttgcttgagtttgttttgtgattgtgtgttggatttatctattttgttttgatttatggatttgatgaatgtaatcggaatgcgtgagggatatggtgttttgttctaagatgaaataaaagtttgttctgttccaaagaaaaaaatctaaaaaaaaaaggcgggccggtctagaggaacccaggttacgtaccgcctgcatgcgaagtcatagcttcttttatagggggaccctaaaattcaaattcaattgggcccggcggttttaccaacggtcgtgaactggggaaaa

SEQ ID NO: 117692 - DNA, 1443 bp, Arabidopsis thaliana
atgatactccagctctctacgactcactattgggaaagctggtcacgcctgcaggtaccggtccggaattcccgggtcgctcaagcttttcacagaaaaccaccacccttctctctctactgcctttttaccacagagaagagagaggatccgtcggtgtgctagtctcactgacactacatccgatcgtcgccggtgacattttataagtgtggagtttacttcagctttattattcaggaattgatggatcagtacgagaaagttgagaagattggtgaaggaacttacggtgtggtttataaggcacgtgacaaagtgactaatgagacaattgctttgaagaagatcaggctagagcaggaggatgaaggtgttcctagcacagcaatcagagaaatctccctcttgaaagaaatgcagcacagcaacattgtcaaattgcaggatgtggtgcacagcgagaaacgtttgtatctggtttttgagtatcttgacttggatctcaaaaagcacatggattctactcctgatttctccaaggatctacatatgatcaaaacatatctttaccagattctccgtggaattgcgtattgccactctcatagggttctccatcgtgatctgaagccacagaatttgttgattgatcgccgcacaaactcactgaagcttgctgattttggactggccagagcattcggtatccctgtcaggacatttactcatgaggttgttactctctggtaccgagcaccagagatactcctaggatctcatcattactctacacctgttgatatttggtctgtggggtgcatatttgctgagatgatcagccaaaagcccttatttcctggagactccgagattgatcaactcttcaagattttcagaatcatgggaactccgtacgaggatacatggcgtggggtaacttctctaccggattataaatctgctttccctaaatggaaaccaacggacctagaaacttttgtccccaatctagatcccgatggagtcgatctcctttctaaaatgctgttaatggatccgaccaaaagaatcaacgcaagagccgccctggagcatgaatacttcaaggatcttggaggcatgccttagaaaggcataaaaccagtaatctccttcattctatatataattatcaatcctaagaaaatgaagaacaatattaatgggttttgtttattctttttctgagttcgtttcctacttatattctattacgaaaaaaaagaaagaagaagatttcgagtgtgtgtgtttttttacttctaagcttttgagatcagtttcttgtatcttattttacccagaatatagtatttccctatatgaaatatggtttttgttttgcaaaatgaccatattatgcaacttctcagcttcttgattaaaaaaaaaaaaaaaaaa

SEQ ID NO: 117693 - DNA, 2428 bp, Arabidopsis thaliana
gcttctttttcatctatcgtaattgtgcttgtttcgcctagaatctctcggcccccaaatatctcactcgccgtcgcaggcttcgccgccggcaatttcttaccctatttcatcttccctctcctctgatatacccataaaaacacaaaaaaaacgaaaagataaaaactttggctttagttttgttgattttgtcattcgattcgatttctttttcttctttcaaattctagggttttcgatttggtttcagtctaataacgagaggggagggaagagtaactaaaaccccaaaaaaagtcaaaaaagtttcgaaaatccaaaaaaagataatggcgcaggttcaacttcagggtcagactccgaatggttcgaccgcggcggtcacttctgctccggcgacgtcaggtggagcaacggcgacccagtttggtaacacgtcgctttatgtgggggatctcgatttcaatgtgacggactcgcagcttttcgatgcgtttggccaaatgggtactgtggtcaccgttcgtgtctgtagggatttggtcactcgccgatctcttggctatggatacgttaacttcaccaatccccaagacgctgcaagagcgatccaagaactgaattacatacctctttatggaaaacctattagggttatgtattctcatcgtgatcctagtgttcgccgaagtggcgctggcaacatttttattaagaatttggacgagtccatcgaccacaaagcactgcatgatactttttcatcgtttggaaacattgtgtcgtgcaaggtagctgtcgattcttcaggccagtcaaaaggctatgggtttgtgcaatacgccaatgaagaatctgcccagaaagctatagagaaactgaacggcatgttgctcaatgacaagcaagtgtatgtgggtcctttcctgaggagacaagaaagagactccactgctaacaaaacgaaattcaccaatgtgtatgtgaagaatctcgcggaaagtactaccgatgatgacttgaagaatgcttttggcgagtatggaaagataacaagtgctgtcgtgatgaaagatggagaagggaagtccaagggctttgggtttgtcaactttgaaaatgctgatgatgctgctagggctgtggagtctctcaatgggcacaaatttgatgataaggagtggtatgttggtagagcccagaagaagtcagagagggaaacagaattaagggtccgttatgaacagaatttgaaggaagctgcagacaagtttcaaagttcaaacttgtatgttaagaatttggatcctagcatttcagatgagaaacttaaagagatcttttctccttttggtaccgttacatctagcaaggtgatgcgggatcctaatggaacaagcaaaggctcaggttttgttgctttcgcaactcccgaagaagcaactgaagctatgtcacagttgagcggtaaaatgatcgaaagcaagccactctatgtggctattgcacagcggaaggaagacagaagggtcagactacaggctcagttttcccaagtgaggccagttgcaatgcagccgtctgttggtccccgcatgccagtgtatcccccgggtggtcctggtattggacaacaaatgttctatggtcaggcccctcctgccatgattcctccccagcctgggtatggataccaacagcagcttgttcctggaatgagacctggtgggggtcctgtacccagtttcttcatgcctatggttcagccacagcagcagcgtcctggaggaggaagacgtcctgggggaatccaacactcccagcagcaaaatcccatgatgcagcaacagatgcatccaaggggtcggatgttccggtatccccaagggcgtggtggtagtggtgatgtgcctccatatgatatgggcaacaacatgccattgactattggagctttggcttcaaatctgtctaatgctactccagagcaacagaggacgatgctgggtgaggtgctgtacccgttggtggagcaggttgaggcagagtctgcagccaaagtgactgggatgcttttggagatggaccagactgaagtgctccatctgttggagtcaccagaagctctcaaggccaaagttgcagaggctatggatgttctcaggagtgtcgctgctggtggtgcaaccgagcagctcgcttccttgaacctctcttaaattgctttttatcatttgatctttggcttttgtctctcccatacaattggagttgtttctttgctattcgttttctccctgggaatttggattcctccacataactgcgtttgtgttattttaaaccttcgtttttaaaccacaaaggaaaaacctatctgctttgttcttttgatttagttgcgtgttctagcttgttcgatcta

SEQ ID NO: 117694 - DNA, 1277 bp, Arabidopsis thaliana
tgagctactagtactaagctacaccacggggtttaatttgtgaaatccgaaactagggagactaaatccgaatagatatagatagcctaagggattcggggctgcaacaaaatcactcccactcactgcgaacgtcgactatggcggcgacgtcgctggttctgacgtgcgcatcccctctattcagcagccctcgggttatttctgctacgaagaagctgactacagagttgtcgatttctacagctaaattccgaagaagatgctcgggaaacaatgatgaagtgcttctagaaggaatgccaccggagtattacgatgatgaatggcaagctcgacagagagagaagaccaaagaactgcggcggatgcagcgggaggaagaagaagaagaggagagaaagattgaagaataccgtgaaattggcacgaggttgaaggaatttcccgagcaagacttaaggaaagccagaaagctcgtctccagcttcatcagagctgccgaggaagtcgaagagagaattgaagaagcagccgagaaaggagaacttgacgagcttgtcctcatgatcatatggaaccggcttgaccttgctaggcgcgatgatgagaaggacgccatcagaagtcttgatcttttgtatagaagagtcgagacagagatcttaaaacggcaagcaagtcctgcaatgaaactgctgaatgatcttctaaatatgcatgatggctttgaagacgatgcttggctcaaggactgcagaaaacgaatggctgagaccttcccccgagaagaccccttcagcattctaatgccaccgggattcgacattgatatgcatcaaggacagttgcgaccgcccattgagactgagacagacaacacccttctgagagtagactttgtaagagaagtggatgcactgctacaggaagtgaggatagaggaagacgctacaactggtagcaaaggagaagggcttgatcctgaagctatagcacttaagtttaagcaacaggagaagcaacgaaccatccgccaaattgaagccattcttgatttagccctcaacttgaagtggtaggcagttaactagaatatcaatctatacgccataataatttttttaagatagaccctagagttagattgattcaggcgtttttgtttagaaatgaatggagtctaaataataggttttggctaaaaattccaaatccaaatgttgctgactatctctctgctcatagtctccaccacaatcatctcttcctctttc

SEQ ID NO: 117695 - DNA, 2202 bp, Arabidopsis thaliana
ctgaaaaccaaacaagaccatatgggcactcgaatactccattttgttatcggctacttccactagcctcctccttcgctgcgtctcctgtttctctacttcacgattactcgctagattcattgaagcagttgtgagttaagttggagaaaatggttgtgtttgggaatgtttctgcggcgaatttgccttatcaaaacgggtttttggaggcactttcatctggaggttgtgaactaatgggacatagctttagggttcccacttctcaagcgcttaagacaagaacaaggaggaggagtactgctggtcctttgcaggtagtttgtgtggatattccaaggccagagctagagaacactgtcaatttcttggaagctgctagtttatctgcatccttccgtagtgctcctcgtcctgctaagcctttgaaagttgtaattgctggtgctggattggctggattgtcaactgcaaagtacctggctgatgcaggccacaaacctctgttgcttgaagcaagagatgttcttggtggaaagatagctgcatggaaggatgaagatggggactggtatgagactggtttacatattttcttcggtgcttatccgaatgtgcagaatttatttggagaacttgggatcaatgatcggttgcagtggaaggaacactccatgatttttgctatgccaagtaaacctggagaatttagtagatttgacttcccagatgtcctaccagcacccttaaatggtatttgggctattttgcggaacaacgagatgctgacatggccagagaaaataaagtttgctattggacttttgccagccatggtcggcggtcaggcttatgttgaggcccaagatggtttatcagtcaaagaatggatggaaaagcagggagtacctgagcgcgtgaccgacgaggtgtttattgccatgtcaaaggcgctaaactttataaaccctgatgaactgtcaatgcaatgcattttgatagctttgaaccggtttcttcaggaaaaacatggttccaagatggcattcttggatggtaatcctccggaaaggctttgtatgccagtagtggatcatattcgatcactaggtggggaagtgcaacttaattctaggataaagaaaattgagctcaatgacgatggcacggttaagagtttcttactcactaatggaagcactgtcgaaggagacgcttatgtgtttgccgctccagtcgatatcctgaagctccttttaccagatccctggaaagaaataccgtacttcaagaaattggataaattagttggagtaccagttattaatgttcatatatggtttgatcgaaaactgaagaacacatatgatcacctactctttagcagaagtaaccttctgagcgtgtatgccgacatgtccttaacttgtaaggaatattacgatcctaaccggtcaatgctggagctagtatttgcaccagcagaggaatggatatcacggactgattctgacatcatagatgcaacaatgaaagaacttgagaaactcttccctgatgaaatctcagctgaccaaagcaaagctaaaattctgaagtaccatgtcgttaagactccaagatctgtgtacaagaccatcccaaactgtgaaccatgtcgtcctctacaaagatcacctattgaaggattctacttagctggagattacacaaaacagaagtacttagcttccatggaaggcgctgtcctctctggcaaattctgctctcagtctattgttcaggattacgagctactggctgcgtctggaccaagaaagttgtcggaggcaacagtatcatcatcatgagaagaggacaaaacttaaagatgatttgcttgtaagcattattatttgtgtataaatctcattgcaatccaaacttaaccttactctcttcagtaaatgaatctcacagatttgacatctcacgtttctgtcaattttataatttttaaaaagtaattactgtcgaccttttgtaatcatagtgatttatcattatgtctctcattttaaaaccttttctggtacaaattataaaaggtcgatcatcattgattgatcaaggggtaaaaacaaatgttcatgaccaataaaaagcaccacaaaaaaggaagacgattgttttcaaccacaaaaatttcatttgttttgt

SEQ ID NO: 117696 - DNA, 2073 bp, Arabidopsis thaliana
  unsure (1)..(2073): unsure at all n locations
nnnnnnnnnnnnnnnnnnnnnnnnnnnnnnnnnnnnnnnnnnnnnnnnnnnnnnnnnnnnnnnnnnnnnnnnnnnnnnnnnnnnnnnnnnnnnnncggccgcaaatttgagtgggtgagaattttttacgatagaggaagagacagcatcatctacttcttccgaccgtgtacatatattacagtaagcgttgcaacacaacttcttgaggatcttctcacattaatgggtcaaaccttttgctcttccttttgattaatttagtgtttgacaatctcctcctccttctccttcttcttcaaagttttgtcgcagtatctattgttcttacagagagaaaggaaagctttagtcttttaccagtttgatccaattctgggtttcactgaaaaaaagttgggagtttgattcttctaactgtagaagaaacagagtcaacagaagaaaactaaaaaagttgagatttttctctcacgcgctcaagaacttgagtatgtcttcttctgtagcagtgttatgggttgctacttcttctctaaatccagacccaatgaacaattgtgggttggtaagggttctagaatcttctagactgttctctccttgtcagaatcagagactaaacaaaggtaagaagaagcagataccaacttggagttcttcttttgtaaggaaccgaagtagaagaattggtgttgtgtcttcaagcttagtagcaagtccttctggagagatagctctttcatctgaagagaaggtttacaatgttgtgttgaaacaagctgctttggtgaacaaacagctaaggtcttcttcttatgaccttgatgtgaagaaaccacaagatgttgttcttcctgggagtttgagtttgttggtgggtgaagcttatgatcgatgcggtgaagtttgcgctgaatatcctaagacgttttatcttggaactttgcttatgacacccgaaaggcgaaaggcgatttgggcaatctacgtttggtgtagaagaactgatgaacttgtggatgggccaaatgcttcacatataactcccatggctttagatagatgggaagcaaggttagaagatcttttccgtggtcgtcctttcgatatgcttgatgctgctctcgctgatacagttgctagatacccggtcgatattcagccatttcgagacatgatcgaaggaatgagaatggacttgaagaaatcgagataccagaacttcgatgatctatacctttactgctactacgtcgctggaaccgtcggattgatgagcgttccggttatgggaatcgatcctaagtcgaaagcaacaaccgaaagtgtttacaacgctgccttggcccttggtatagccaatcagcttactaacatactcagagacgtaggcgaagatgcgagaagaggaagggtttatctgcctcaggatgaattggctcaggctggtctttcagatgaagacatattcgccggaaaagtaactgataaatggagaaacttcatgaaaatgcagcttaaacgagcaagaatgttcttcgacgaagctgagaaaggcgtcaccgagctcagtgccgctagcagatggcctgtatgggcttcattgctattgtacaggagaatactggacgagattgaagcgaatgattacaacaattttactaagagagcttatgtggggaaagtcaagaaaattgcagctttgccattggcttatgctaaatcagtactaaagacttcaagttcaagactatcgatatgagagcgagaggaaagtggaacaaaaacaacctaagagcgctttttgtgattaagaaaaaacttaggctcgaatttcttatgttaactaatatatacatattaatggggaagcaaattcttataatgttacattatctttctgaatgtaaaaaagtatttttttttttaattttattttagttatggttnnnnnnnnnnnnnnnnnnnnnnnnnnnnnnnnnnnnnnnnnnnnnnnnnnnnnnnnnnnnnnnnnnnnnnnnnnnnnnnnnnnnnnnnnnnnnnnnnnnnnnnnnnnnnnnnnnnnnnnnn

SEQ ID NO: 117697 - DNA, 674 bp, Arabidopsis thaliana
gggttccacttcatacaagcctcttgcaaagccacaacatacccaaccgtatgcgtcaactctctcaccggttacgccaactccatccaaacaagccctcgacgtctagccgagaccgcactcaatgtgaccgtgactcaggcccagtccaccaaggtcttcgtctggcgcttggggcgtttcactagtctcaagaaacgagagattcaagccgttaaggactgcatcgaggagatccatgatgccgttgaccgtttgaccatgtcgatccatgaagtgaagatgtgtggtagtgctaaaggtcgtgaccagttttggttccacatgagcaatgctcaaacgtggaccagcgctgctttgactaatgcaaacacttgctccgatgggtttgcgggtcgggtcatggatgggcgggtaaagaactcagtaagggcacggatcttgaatttgggaagaggaactagtaacgctttagccttgatcaatgctttcgctaaaaaatactaaataatgtaatacattttctttttgttcttaattctgtaatttgagctacgaatgtgtggatcagctcgagggaaattttatttcttaaaatgtttcatgcataatccgatgtaattctggataaattttgattaaaaatgaatgtacaagtataacattgttaagtt

SEQ ID NO: 117698 - DNA, 1604 bp, Arabidopsis thaliana
ctctgcttaaaaactagggttaggctacgattctgtttacaccaaaaaagcttttcgtcatcgccgtttggctttctgaaacaaatcacaccgtttaagattttctctggttctgagattatggagatggagcgtgtgcatgaattccctcatactcacatggatcgtcgtcccagaaagagagcgcgtctcggttgggatgtgttgcctcaggcaaccaaggctcaggtaggaatgttttgtgggcaagagattggaaatatatcaagctttgcatcttccggagctccttcagacaatagtagctctctttgtgttaagggtgtggctcgaaatggttctcccccatggcgagaagatgataaggatggacattacatatttgaactgggagatgacttaactccacgctataaaatttatagcaaaatgggggaaggtacttttggtcaagtgctagaatgttgggatagggagaggaaggaaatggtggcagtaaaaattgtccgtggtgtgaagaaataccgtgaggctgctatgattgaaattgaaatgctgcaacagcttggtaaacatgacaaaggtggcaatcgttgtgtacaaattcggaactggtttgactatcgtaaccatatctgtattgtatttgagaagcttggatcgagtttatacgattttcttcggaaaaacaattatcgctcctttcccattgatcttgtccgtgagattggctggcaactcttggaatgtgtagcatttatgcatgacttgcgcatgattcatacggaccttaaaccagaaaatattctgttagtctcctcagactatgtgaagattcccgagtacaaggggtcccgattacaaagggatgtatgctataaaagagtgcctaaatcaagtgcaataaaggtgattgattttggtagcacaacttatgagcgccaggaccaaacctacattgtatcaaccagacattatagggcaccagaagtcattttaggtcttggctggagttatccgtgtgatgtttggagcgttggatgtatcatagtggagttgtgcacgggtgaagcattgttccaaacacatgaaaacctggagcatctagcgatgatggagcgtgttcttgggccgtttcctcaacaaatgctgaagaaagtggaccggcactcagagaaatatgtgagaagaggtcgtttggattggccagatggggcaacctcaagagatagcctgaaggcagtattgaagcttcctcggcttcagaatttaataatgcaacatgtggaccactcagccggggagttaataaatatggtgcaaggacttctgcgatttgatccgtcagagagaataaccgctcgtgaagctctgaggcatccgtttttcgcaaggagaagatagcgggacttgaatttgacgagtgtaaatagggatgaaatatgtatgatttgtagcaagtctttaccccacaaccccacgaattctgatataaattaacaaatatgctaagatcactctttttttaaccgtgataggcgattgtttgtctatctttgtaaactggatcgtttcaattcaaaagagttttagttttggattct

SEQ ID NO: 117699 - DNA, 1736 bp, Arabidopsis thaliana
gttaaatattttctcctgagatttttttcttcaattccaattcagtgagcatttttattgtttctccgatctgaattccggcgatcaaattacgacagcgactaattcaacgttttaaattactctgtgtgagagaaatttgcgctctggatttgcatttttctaatcctttatgcaaagcagtgtgtatcgtgataaagctagctcgatcgcgatgatcttagaaactcagaggaatgttgaattccctcatcggatcgttgataagcgtcccaggaaacgtccccgattgacttgggatgctgctccgcctcttcttcctcctcctcctccacccacggtatttcaacctccgttgtactatggtccggagtttgcgagtggtttagttcccaattttgtttacccaaacatgttctataatggccttcctcgtcagggctctcctccctggagaccagatgataaagacggccattatgtctttgttgttggggatactttgactccacgatatcaaatgctcagcaaaatgggtgaaggtacatttggacaagtattggaatgctttgataataaaaacaaagaagtcgtggcaatcaaagttatacggtccataaacaagtatcgtgaagctgccatgatcgaaattgacgtgctgcagaggcttacaaggcatgatgtcggtggttctcgttgtgtgcaaatacggaattggtttgactatcgtaatcatatttgtattgtatttgagaagcttggaccaagcttatatgattttctccgcaaaaacagctaccgttcatttcccattgatcttgttcgggagcttggcagacaacttttggagtctgttgcatatatgcatgatttacggctgatccacacggatttgaagccggagaacattcttttggtatcgtctgaatatatcaaaatacctgattataagtttctatcccgacccacaaaagatgggtcatacttcaagaatctgcccaagtcaagtgccatcaagctcattgatttcggaagtacaacatttgaacatcaagaccataactacattgtatccacaagacattaccgcgcaccagaagttatcctaggggttggatggaactatccatgtgatctgtggagtattggttgcatacttgttgaactttgttcgggagaggcgcttttccaaacgcatgaaaacttggaacatttggccatgatggaaagggtcctaggacctttaccacctcatatggtgctcagagccgaccggcgctctgagaaatacttcagacgaggtgcgaagttagactggcctgaaggtgcgacatcaagagacagcttaaaagcagtatggaaacttccccggctaccgaacctgataatgcagcatgtggatcactcagccggtgatctgatagacctattacaaggtctgcttcgatatgatccaacagagaggttcaaggcaagagaagcactgaaccatcccttcttcacaagaagccgggaacagagtataccacccttcaacccaaaccctcatccatttttatacaaccaaaagaactaaaaaagaaaagaaaaaagaaacagcagataatgtttggatacatctgcagtttctgtgtatccttcagtttcctgtgtttttgtagcattttattatatatatgattatcatgtatagaaatgaaagaaagagagaaaggtttgccccgacgttgctcgag

SEQ ID NO: 117700 - DNA, 1683 bp, Arabidopsis thaliana
gccccgcccctttgaatgcactggcccctcctcgaggtcgacggtatcgataagctagatatcgaattcgcggccgcttgcactctctctagttccaaaccctagcaattcctctgttttcaccattttcggagattatcaccttctccccgattcgccgccttgtgattacatctacgtaaagagtttctggtagaaattttccctcttttagctgcagattggcatcagattccgttctggatgtgtcggtgatcgattttccgcgtcggtgatgatagctaacggattcgagagtatggataaagaacgagtcaggaaacgtcctcgtatgacctgggacgaggccccagctgaaccagaggctaaaagggctgtgattaaaggacatggaagcgatgggaggattttgtcaccaccattaagggacgatgatcgtgatggtcattatgttttcagtttgagggacaatctcactcctagatataaaatacttagcaagatgggtgaaggcacatttggtcgggttttggaatgttgggatcgtgatacaaaagaatatgtggcaataaagataattcgaagcattaagaaataccgggatgcagcaatgattgaaattgatgtacttcagaaacttgttaagagtgataaaggccgcacacgctgtgtacagatgaagaactggtttgattaccgaaatcatatttgcattgtgttcgagaagcttgggccaagtttgtttgactttctaaagagaaataaatactccgcatttcctctggcccttgttcgggattttggatgccagcttttggaatctgtagcatatatgcacgagttacagttagttcacaccgacctcaagcctgagaacattctgttggtgtcttctgaaaatgtaaagcttcctgacaataagaggagtgctgcaaatgagacacatttcaggtgcttaccaaagtcaagcgccattaaactgattgattttggcagtactgtttgtgataaccggattcatcactccattgtccaaacaagacattacagatcccccgaggtcattttaggtctaggatggagttaccagtgtgacttatggagtataggttgtatactatttgaactatgcacgggtgaggctctctttcagacgcatgataacctagaacatctagctatgatggagagggcgcttggacctttacctgaacatatgactcgaaaagccagccggggtgctgagaaatatttcaggagagggtgtcggttgaattggccagaaggagccaactctagagaaagtattagggctgtaaaaagacttgatcgtctcaaggatatggtatcgaaacatgttgacaacacgagatctagatttgcagatctattgtatggtttattggcatatgatccatctgagcgtctcacagcaaacgaagctcttgaccatcctttctttaagagctcaagttgagaagaagcaaaatcagaaccataaaatgtagaattttacttggtaacaagtttttttgttagattcctctaaagctcccgttctcagtagcaccaaacagtagtattcctatttcagttacgagtttggctacgtttattctggaaaatacctctgttgtacattgtgttgttgagaatataaaacttgcatcatattttgaaact

SEQ ID NO: 117701 - DNA, 391 bp, Arabidopsis thaliana
acgcgtccgaccacacgtccgcggacgcgtggggttcgaccccaagggatttggccggtaaaattattgggagttgtctttctcttgcactctctctagttccaaaccctagcaattcctctgttttcaccattttcggagattatcaccttctccccgattcgccgccttgtgattacatctacgtaaagagtttctggtagaaattttccctcttttagctgcagattggcatcagattccgttctggatgtgtcggtgatcgattttccgcgtcggtgatgatagctaacggattcgagaggtatggataaagaacgagtcaggaaacgtcctcgtatgacctgggacgaggccccagctgaaccagaggctaaaagggctgtgatta

SEQ ID NO: 117702 - DNA, 1785 bp, Arabidopsis thaliana
  unsure (1)..(1785): unsure at all n locations
taatacgactcctatagggaaagctggtacgcctgcaggtaccggtccggaattcccgtgtcgacccacgcgtccacaaaatctctctctactaatatctctctctctctctctctattgttgaagaagactcataatcggagattgtttgtttttggtttgctctgtaaattggagaagttttgttagagatcaaatggctgggatttgttgcggtgttgttggagagactgaaccggcggcaccggttgattcaacttctcgagcttctcttagacggaggttagatctacttccgtcgatcaaaattgttgctgactccgccgttgctcctccgcttgaaaactgccgtaaacggcagaagcgtgagacagtagtgctctcgacgttaccgggaaatctagatctggattcgaatgtgaggagtgagaataagaaggctagatcagcggttacgaattcaaattctgttacggaagcagagagtttcttttccgatgtacctaagatcggtacgacgtcggtttgtggtagaagacgagacatggaagacgctgtctcgattcatccttcgtttcttcaacggaactctgagaatcatcatttctacggtgtctttgacggccatggctgctctcatgttgcggagaagtgcagagaacggttgcatgatatagtgaagaaggaagttgaagttatggcttccgacgagtggacagagacgatggttaagagttttcaaaaaatggataaagaagttagccaacgagagtgtaacttagttgttaatggtgctactcggagtatgaaaaattcttgtagatgtgaattgcagtctcctcagtgtgacgccgtcggatccaccgctgttgtatcggttgtcacgccggagaagatcattgtttctaattgcggtgattcacgggctgtgctttgtcgtaacggtgtagccattcctctctccgtagatcacaagccggatcgacccgatgaattgattcggatccaacaagctggtgggcgagttatatattgggatggagctagggttcttggagttcttgccatgtctagagcaattggtgataattacttgaaaccgtatgtgattccggatccggaggtaacagtgacggatcgaactgatgaggatgagtgtttgatcttggcgagtgatggactatgggatgttgtaccaaacgagacggcgtgtggcgtggctcgcatgtgccttcgaggtgctggtgcgggtgacgactcagatgcggcgcacaatgcgtgctccgatgcggcgttgctcttaacaaagttggctctagcaagacagagctccgataacgtgagcgtcgttgtggttgacttgaggaagaggaggaataatcaagcgtcgtcttaataattagtgttataattagtagtagtattagaataattgttacatagcctaattgtaattgtattctttttatttttctattttagtttttctcattttaaggtgttttttcttttctattttagttagctcttaattcaggctggggaagaaaaagagctgattaaatagtttgagtatttttcttatttttctattcaggtaatattatacatgtattcttttagtatggtcgttggaaatgtaataatctaattcagaggggaaaaatgttaaaatgaaagaacagattatgcgtatttaccaaaaaaaaaaaaaaaaagnnnnnnnnnnnnnnnnnnnnnnnnnnnnnnnnnnnnnnnnnnnnnnnnnnnnnnnnnnnnnnnnnt

SEQ ID NO: 117703 - DNA, 481 bp, Arabidopsis thaliana
  unsure (1)..(481): unsure at all n locations
ttttaggttgcggagaagtgcagagaacggttgcatgatatagtgaagaaggaagttgaagttatggcttccgacgagtggacagagacgatggttaagagttttcaaaaaatggataaagaagttagccaacgagagtntaacttagttgttaatggtgctactcggagtatgaaaaattcttgtagatgtgaattgcagtctcctcagtgtgacgccgtcggatccaccgctgttgtatcggttgtcacgccggagaagatcattgtttctaattgcggtgattcacgggctgtgctttgtcgtaacggtgtagccattccctctctccgtagatcaccaaggtagttaaaattaatgccttattatagattttccgggttttggtagtattgattccaagattggcatgggtcctaaggcgntttttttttttttgatngacaaaccggtncgtccccccttaaantttttcgggncc

SEQ ID NO: 117704 - DNA, 1492 bp, Arabidopsis thaliana
  unsure (1)..(1492): unsure at all n locations
cggtggcggccgctctagaactagtggatcccccgggctgcaggaattccctttttaggtccaaagatcgagagagaagagaagattttgaattttttttgttttataaagtttcgtcttaagcgatcgattttttgtgcgaaagattgaaactttttggtaagataattgtgttgtgtggttggatcgtggaggtgggtcttctttcgaatggcgcaacaagggcagggaagcatggaccctgccgctctcgatgatatcattcgtcgtttgttggattacagaaaccctaagcctggtaccaaacaggctatgctcaacgagtctgagatccgtcagctttgcatcgtctctagagagatttttcttcaacagcctaaccttcttgagctcgaagctcctatcaagatctgcggtgatattcatggacaatactcagatctattgaggctgtttgagtatggaggcttcccacctacagctaactatttattcttaggagattacgtagacaggggcaagcagagtttggagactatttgtcttctgcttgcttacaaaatcaaataccctgagaacttttttcttctaagaggaaaccacgaatgtgcttctattaacagaatctatggattctatgatgaatgtaaacgtcgattcagtgtgagactctggaaagtgtttacagattcttttaactgtctccctgttgctgctgttatagacgataagatattatgtatgcacggtggcctttctcccgatttgaccaacgtggaacagattaagaacattaagcgacctactgatgttcctgactctggtttgctctgtgatctgctttggtctgatccaagcaaagatgtcaaaggttgggggatgaatgaccgtggagtctcttacacgtttggccctgacaaagtcgcggagtttctaataaagaatgatatggatctcatctgccgtgcccaccaggttgtagaggatggatatgagtttttcgccgatagacagcttgttacgatattttctgctcccaactactgtggtgaatttgacaatgctggtgctatgatgagtgttgatgaaagtttaatgtgctctttccaaattcttaagcctgctgatcgaaagccccggttcttatgaagtaaagagttgaaacctcgcgggaaagaagaggaaaaaggcgatacgaaagcgggagagacatttgaagctccctgagactttgtccggaggccttgcaaaggcaaaaaaacataatttacatgttatatcatcttatttgaactcttgccatttcttttctcaaaacactttatgttcttatgatcttctcctctgactctatatagacagtaaaaaaaagtctgcaaattttcattctttttcaacaaaaaaaaaaaggaattcgatatcaagcttatcgataccnnnnnnnnnnnnnnnnnnnnnnnnnnnnnnnnnnnnnnnnnnnnnnnnnnnnnnn

SEQ ID NO: 117705 - DNA, 1771 bp, Arabidopsis thaliana
  unsure (1)..(1771): unsure at all n locations
gtgttccgccgctctctacgactcactattagggaaagctggtacgcctgcaggtaccggtccggaattcccgggtcgacccacgcgtccgcggacgcgtgggtctaaaacgaaaaaaaagaaaagaagagaagcttttttagttctctctgcccaatggagaaaagaagaaccagagattgccaaatcatcttctgcaaaagcacccatcaaagaaattacttgtaaatagaaaacaaatcatcaaatctggaagacaaatcattaaaaaaggcgacaactttttttggttcagattttgaaaatttgattttttatttttcttatcttggcgatcgaatcctatccgaaagattgaaacttgggaggtgggtaagtgagtgaatggcgcaacaagggcagggaagcatggaccctgctgttctcgacgacatcattcgtcgtttacttgattaccgaaaccctaaagctgggaccaaacaagctatgctcaacgattctgagatccgacagctttgctttgtctctagagagatatttcttcaacagccttgtcttcttgagctcgctgcccctgttaagatctgcggtgatattcatggtcaatactcagatttattgaggcttttcgagtatggaggtttccctcctgcagcaaactacttattcttaggagattacgttgaccgcggaaagcagagtttggagactatttgtcttctgcttgcttacaagatcaaataccctgaaaacttttttctcttaagaggaaaccatgagtgtgcatctattaacagaatttacggattctatgacgaatgtaaacgaagattcaacgtgaagctctggaaagtgtttaccgatacttttaactgtctccctgtggctgctgtcatagatgaaaagatactttgtatgcatggtggactatctcctgagttgatcaatgtggaacaaattaagaacatagagcgtccaactgatgttccagacgctggtttgctctgtgaccttctttggtctgatcctagtaaagatgtcaaaggctgggggatgaatgatcgtggtgtctcctacacttttggtgctgacaaagttgctgagtttttaataaagaatgatatggatttagtctgtcgtgcccaccaggttgtagaggatgggtatgagttctttgctgatagacagcttgtgactatgttttctgctccaaactactgtggtgaatttgacaatgcgggtgcattgatgagtgtcgacgaaagtttaatgtgctctttccaaattcttaagcctgtggatcggaggtcgcggttcttttgaagagaaagagtccttcttaagttataaccctgattcaaatcttatgggaagaatgggaggagaaaaagcgacgacggatgttggtggcggataattctgaacctccacgagtagtctccgaagttgcaaaagcaacaatatatatatttacatggttatatcatctctgccacttcttttgaatatgatcttgtttcttcaactcaattttttgctctgtttccttctctgttctttcacatgtcagagatacaaatcctctaagtgtatataatactttatatgtatgtatcagaacctcactgcaggatgcttcagttcatgattcttattaaaacagagggttctctagacaaaaaaaaaaaaaaacaaagnnnnnnnnnnnnnnnnnnnnnnnnnnnnnnnnnnnnnnnnnnnnnnnnnnnnnnnnnnnnnnnnnnnnnnnnnn

SEQ ID NO: 117706 - DNA, 1521 bp, Arabidopsis thaliana
ggagccgcacgtgtgctttccttttttctccttccccgttctctagccgattctctctgtctagggctcctccgtcttcttcttctcataccttcacataccacaaaacctctcttctctctctattgattctctacgaagaggaaagtgattttgaaccatcttgatcggaaacggcgtttcgaaactggaggtcgaagacgaaaaaaactcttatctcatcgctccggtgtaccgaattcgagaggtttttgttaggtttcgtagtgattgattgattttgatggaagatagtgtggtggatgatgttataaagaggttactaggagcgaaaaacgggaagacgacgaagcaggttcagttgacggaggctgagattaaacatctttgttctaccgctaagcagatctttctcactcaacctaatcttcttgaactcgaggctcctattaagatttgtggagatactcatggtcagttctcagatcttttgagattgttcgagtatggtggctacccaccagctgcaaactatttgtttcttggggattatgtagatcgtggaaagcagagtgtagagaccatatgccttcttcttgcctacaagatcaaatacaaagagaatttctttcttctacgtgggaaccatgagtgtgcttctataaaccgtatatacggattctatgacgagtgcaagaagagatatagcgttcgagtgtggaagatatttactgactgctttaattgtctacctgttgctgctcttattgatgaaaagatcctctgtatgcatggtgggctatcgcctgagttgaagcacttggatgagatcaggaacattcctcgtcctgctgacattcctgatcatggactactgtgtgatctgttgtggtctgatcctgacaaagacattgaaggatggggagagaatgacaggggtgtctcgtacacttttggggctgataaagtcgaggagtttcttcaaacgcatgaccttgacttaatttgtagagctcatcaggttgtggaagacgggtatgaattctttgcaaatagacagctagtaacgatattctcggccccaaactactgcggagagtttgataacgcaggagcaatgatgagtgtggatgattccttgacgtgctcatttcagatccttaaagcatctgagaagaaaggaaacttcgggtttggcaaaaatgcaggaaggcgaggaaccccgcctcgcaagggtggtggaaaaggctgaagacaaatcccataaactctgttttgtgtattccatgtttcttggttcaagacacttgcttgatcagctgaacttatcaaactgtcttcttcttcttcttcctctgctctggatcactttggcaaggggtacttctgtcttttcccttgactactctggatcacttggtgtctttgacctctgtgaatctgagatattattctctgtgagatacactttatgtcgttttttgttaaaacatttaaatgaaaatcataatgttcctcgtc

SEQ ID NO: 117707 - DNA, 1458 bp, Arabidopsis thaliana
ttcgtccccatctccgtttctgatactttaattaatactcattgaaaaaatcaattcgaactaaaaaaaatctcgaagagtgtgggcgcgtaattttcttctttattttgttctcactgattattttgcattagctcttttcttttttggggtcgaaaaaattaggtttttttttgggattctgttgatggcgacgacgacgacgacgcaggggcagcaaacggcgattgactcggcggttctcgatgatataatcaggcgactcacggaggtccggttagctagaccaggaaagcaagtccagctctctgaagctgagatcaaacagctctgtactacagctagagatattttccttcagcaacccaatttacttgagcttgaggctcccatcaaaatctgtggtgacatacatgggcaatatagtgatttgttgaggctatttgagtatggtggcttccctcctagtgccaattatctatttcttggggactatgtggacagaggcaaacagagtcttgaaacaatatgtctcttactagcttacaagatcaaataccctggcaacttttttctactaaggggaaaccacgaatgtgcttctatcaataggatatatggattttatgatgagtgtaaaaggaggttcaatgtgagagtatggaaggtttttactgattgttttaactgccttcctgttgcggcgcttatagatgacaaaatattgtgtatgcacggtggactttcgccggatcttgaccatttggatgagattagaaacttgccgagaccaactatgattccggataccgggcttctctgtgatttgctctggtctgatcctgggaaagatgttaaaggatggggaatgaatgatagaggtgtttcatacacctttggtccagataaagtttccgagtttcttacgaaacatgatttagatcttgtgtgtcgtgcccatcaggtcgtggaggatgggtatgagttctttgctgatagacaacttgtgacggtgttttcagctcctaactactgtggtgaatttgataatgctggtgcgatgatgagcgtggacgagaaccttatgtgctcgtttcagattttgaagcccgctgagaagaagaccaagttcatgatgtccacaaagatttgatactttcattgagatggatttggtctttcttgagaaattgattgaaaccattgaagatttggctgtgaagtgtgtacttatggtagtgagaactcttggaaaggagcaagaccttcttagtcttctaatctctttcttcccccaaattcactttcagcattttttttctatcttcttttatgggttttacatgattttcatctgcctgttgggatcacatagttggtgtgtacatgcatatggtcgtttcttggattttaggacaccaaatgaaaatgatgttataaaaaaggtttagtatgatg

SEQ ID NO: 117708 - DNA, 1819 bp, Arabidopsis thaliana
taggtacacactatagaagagtctatgacgtcgcctgcacgcgtacgtaagctcggaattcggctcgagaaattccgaattctctgcgatttccatggagttatctcttctccgtccgacgactcaatcgcttcttccgtcgttttcgaagcccaatctccgattaaatgtttataagcctcttagactccgttgttcagtggccggtggaccaaccgtcggatcttcaaaaatcgaaggcggaggaggcaccaccatcacgacggattgtgtgattgtcggcggaggtattagtggtctttgcatcgctcaggcgcttgctactaagcatcctgatgctgctccgaatttaattgtgaccgaggctaaggatcgtgttggaggcaacattatcactcgtgaagagaatggttttctctgggaagaaggtcccaatagttttcaaccgtctgatcctatgctcactatggtggtagatagtggtttgaaggatgatttggtgttgggagatcctactgcgccaaggtttgtgttgtggaatgggaaattgaggccggttccatcgaagctaacagacttaccgttctttgatttgatgagtattggtgggaagattagagctggttttggtgcacttggcattcgaccgtcacctccaggtcgtgaagaatctgtggaggagtttgtacggcgtaacctcggtgatgaggtttttgagcgcctgattgaaccgttttgttcaggtgtttatgctggtgatccttcaaaactgagcatgaaagcagcgtttgggaaggtttggaaactagagcaaaatggtggaagcataataggtggtacttttaaggcaattcaggagaggaaaaacgctcccaaggcagaacgagacccgcgcctgccaaaaccacagggccaaacagttggttctttcaggaagggacttcgaatgttgccagaagcaatatctgcaagattaggtagcaaagttaagttgtcttggaagctctcaggtatcactaagctggagagcggaggatacaacttaacatatgagactccagatggtttagtttccgtgcagagcaaaagtgttgtaatgacggtgccatctcatgttgcaagtggtctcttgcgccctctttctgaatctgctgcaaatgcactctcaaaactatattacccaccagttgcagcagtatctatctcgtacccgaaagaagcaatccgaacagaatgtttgatagatggtgaactaaagggttttgggcaattgcatccacgcacgcaaggagttgaaacattaggaactatctacagctcctcactctttccaaatcgcgcaccgcccggaagaattttgctgttgaactacattggcgggtctacaaacaccggaattctgtccaagtctgaaggtgagttagtggaagcagttgacagagatttgaggaaaatgctaattaagcctaattcgaccgatccacttaaattaggagttagggtatggcctcaagccattcctcagtttctagttggtcactttgatatccttgacacggctaaatcatctctaacgtcttcgggctacgaagggctatttttgggtggcaattacgtcgctggtgtagccttaggccggtgtgtagaaggcgcatatgaaaccgcgattgaggtcaacaacttcatgtcacggtacgcttacaagtaaatgtaaaacattaaaatctcccagcttgcgtgaggttttattaaatattttgagatgtcaaactttcaatttcattttgatcccaaaaaaaaaaaaaaagggcggccaaaa

SEQ ID NO: 117709 - DNA, 2812 bp, Arabidopsis thaliana
cccgaccgttgaaagcactctttcaagtcgccgccggtaactctaaacccgccgtaccaatatttcagtaccctccattaaccctcatcggaaaagatcttcactttgccttcatctttctcaattcctcaatccttactctcttccagggtaagatcttatatgaaatgatttgctaagaggactataagtctcggtgatcggggaattcgatatggaggagagtgaaacaaaggggagaatcagtcaagaaactgataaggcttgtgtttcagttgagagaattgggtctactttactctcatcatttgtgaagaaaggtaaagaagtatcaaataagagaaattctaagcagaataagcgaaaagcggaagaagaactctgttcgaaatcaagaaccaagaagtactctcggggatgggtccgttgtgaggaaatggaggaggagaaggttaagaaaacaagaaagaggaaaagtaagagacagcaaaaggataataaggttgaggttgatgattctttaaggttgcaaaggaggacaaggtatttgctcattaagatgaagatgcagcagaatcttatcgatgcatacgcaactgaaggttggaaaggtcagagccgggaaaagataagaccagacaaggagcttgagagagcccggaaagagatcttaaactgcaagcttggactacgcgacgccattcgccaactggatctgcttagttctgtgggaagcatggaagagaaagtgatagcttcagatggatctattcatcatgatcatatattttgtgcagaatgcaattctcgagaagcttttccagacaatgatataatactttgtgatggaacgtgtaatcgagcatttcaccagaaatgccttgaccctcctttggaaacagaaagcatacctcccggagatcagggctggttttgcaaattttgtgattgcaaaattgaaattatcgacacaatgaatgcacaaattggaactcatttccctgtggacagcaactggcaggatatcttcaatgaagaagctagtcttcctattggatctgaagctacagttaacaatgaagcagattggccttcggatgactccaaggatgatgattatgaccctgaaatgagggaaaacggtggaggaaacagcagcaacgttagtggtgatggtggtggtgataacgatgaagaaagcatttcaactagcttgagcttatcatctgatggtgttgccctttcaacgggatcatgggaaggccatagactcagcaatatggtggagcagtgcgaaacaagtaatgaagaaactgtatgtgggccaagacagcgaaggactgttgactatacacagttgtactatgaaatgtttggaaaggatgcagttttgcaagagcaaggtagtgaagatgaagactggggtccgaatgacagaaggaagagaaaaagggaatctgatgcaggaagcacacttgtaactatgtgtgaaagcagtaagaaagatcaagatgttgtagaaacgctagaacagagtgagagagattctgtctctgtggaaaataaaggaggtcgaaggcggatgttcagactcccaagaaatgcagttgagaagctacgtcaagtatttgcagagactgagcttccctcaaaagctgtgagggatcgtcttgcaaaagagctgagtcttgatccagagaaggtcaataaatggtttaaaaatactcggtatatggcactgcggaataggaagactgagagcgtgaaacaacctggggattctaagacagtctctggaggagattctggaccagaagcagtcatggagaacaacactgaaacaaatgaagttcaagatactttggatgacactgttccacccggatttgacgctacaaatcaaaacatactctccccatgtaataacaaccaggaggaatttcaacaggaaaatgtctcttttccttcacccacagatgaaagtcaacagtatctggaacaaaacgattcttctttcgttctagtgccacatgaaaagcaaagcagcgaaattagcttaaagacggctgtagaggagaatgagacagaaagcaagatgatgaaagagccacatgaagagctaagcagtgaaatgagcctaaagacggctgctgaggagaaggagacagagagcaagatgatagaagagccacatgaagagctaagcagagaaatgagcttaaagacggctgtagaggagaaggagacagagagcaagatgatggaagagccacatgatgagctaaacagcgaaatgagcttaagtacagcggtagaggagaaggagacagggagcaagatgacggaagagtcacatgaagagctaagcaacgaaatgagcttagaagagaaggagacggggagaaagatgacggaagaggaagaattggaagcagtaatggagatgctttgtagaacagaaaacaagttactggacgtgacgcagaggcttgatagatttaaaacaccaaaaggccgaaaaaagttaggcaattcttcttctcctttacttgaagaagactcagtagtgtatgttccaatagcagagatcaaggagaaaaggtaacaatatatatatatatatcaagaaaagaaaaaagtcctttgcagaagttttggtattgttagattcttttggaacgtagtctaagagagtacctaatgtagttttgtgtattattcagtttgtatgtgtcatttaaacttcagataaaatcccccataaaaaaataaaactgggattttttttttaatggaactttttagctctctt

SEQ ID NO: 117710 - DNA, 539 bp, Arabidopsis thaliana
gcttgagcttatcatctgatggtgttgccctttcaccgggatcatgggaaggccatagactcagcaatatggtggagcagtgcgaaacaagtaatgaagaaactgtatgtgggccaagacagcgaaggactgttgactatacacagttgtactatgaaatgtttggaaaggatgcagttttgcaagagcaaggtagtgaagatgaagactggggtccgaatgacagaaggaagagaaaaagggaatctgatgcaggaagcacacttgtaactatgtgtgaaagcagtaagaaagatcaagatgttgtagaaacgctagaacagagtgagagagattctgtctctgtggaaaataaaggaggtcgaaggcggatgttcagactcccaagaaatgcagttgaggtttgcaattgcttcgtcccggttttagtgtcttatatatgtgtagtttaccataagggaaaaaaaaaaaaaaagggcggccgctctagaggatccaagcttacgtacgcgtgcatgcgacgtcatagtcttctatag

SEQ ID NO: 117711 - DNA, 1658 bp, Arabidopsis thaliana
agtgtacttaaggttaggctttattgattactagccagctcaattttctttctttctttctttctttctctgggagtttgggattttcttaagggtctttttcaattctcgctccattttgtacgcatagaactgggtttgtgtttacacacataaagctcttatcttttttcttctttcaatcgagaagattatagagctgagtgactgattggtggtttcttggagttttaatgggaggttgtttcagcaatcggattaaaacagatattgcttccagtacatggctaagttcgaaattcttgagtagagatgggagcaagggctcgtcgaccgcttccttctcttatatgcctcgaacagaaggcgagatcttgcaaaatgctaatctcaagaactttagtctcagtgaactgaaatctgcaactaggaatttccggcctgatagtgtggttggtgaaggtggatttggttgcgttttcaaaggctggatcgatgagtcctctctcgctccttctaaaccggggaccgggattgtcattgctgtgaaaagacttaaccaagaagggtttcaaggtcatcgagagtggctggctgagatcaattatttaggccagctggatcatcctaaccttgtgaaactgattggatactgcttggaagaggagcacaggcttcttgtttacgagtttatgactcgtggtagtcttgagaatcacttattcagaagaggaacattctatcagccactttcatggaacacgcgggttcgtatggctcttggtgcagctagaggacttgcttttcttcacaatgctcaaccgcaagttatataccgagacttcaaagcatctaacatcttgctagattcgaactacaacgcaaagctttcggatttcggtttggctagagatggtccaatgggtgacaacagccatgtttctaccagagtcatgggaactcagggatacgctgctccagaatatctagctacaggtcatttatcggtgaagagcgatgtatacagttttggggttgtgttactggagttgttatcaggaagacgagcaattgacaagaatcaaccagtagtagaacacaatctcgtggattgggcaagaccctacttaacaaacaagagaagacttctgcgagtgatggatcctcgtctccaaggtcaatactcactaacccgagctttgaaaattgcagttcttgcactcgattgcatatctatagatgccaagagtagaccgaccatgaacgaaatcgtcaagacaatggaagaacttcatatccagaaggaagcatcaaaagagcagcagaatcctcaaatcagcattgacaacatcatcaacaaatctccacaagctgtgaattatcctaggccttcaattatgtaacaatcctaggcgagctatttacccgggttttagagatgtatagactctttaccttctgtctgtttagatatgttgtttggtagtaacaaaagagctggcaatgtaagggagagaaggaaacttactagttgtaaacttaggttctcttacaacgttcacatgttatctcaaaaaaaagggcggccgctctagaggatccaagcttacgtacgcgtgcatgcgacgtcatagtcttactatagtgcagttaaatca

SEQ ID NO: 117712 - DNA, 692 bp, Arabidopsis thaliana
  unsure (1)..(692): unsure at all n locations
acgatgaacagaggaagatgaggaagaagacaaagtccaatagggcgtacccaaaaactgagagagaaagagagaggaaagagctccaaaaaaaaaaacatctttncttttcattttcaattagtttcattattatcacaaaagacttttcttctccgagagaacaaaagattatagagctgagtgactgattggtggtttcttggagttttaatgggaggttgtttcagcaatcggattaaaacagatattgcttccagtacatggctaagttcgaaattcttgagtagagatgggagcaagggctcgtcgaccgcttccttctcttatatgcctcgaacagaaggcgagatcttgcaaaatgcttattctcaagaactttagtctcagtggacctgaaatctgcaaccttaggaatttccggcctgataagtgtggttgggtaaagggtggttttggttccgttttcaaaggctgggtccgtgaggcccctctcgctccttctaaaccgggggccgggattgtcattgctgtgaaaagacttancaagaagggttcaaaggcatcgagagtggctggctgagatcaattatttaggcantggatcatccaaccttgtganctnattgntactncttgaanagngncaggttctgttacngttntncncgnggagctnnaccctntcannc

SEQ ID NO: 117713 - DNA, 255 bp, Arabidopsis thaliana
  unsure (1)..(255): unsure at all n locations
gaattatcctaggccttcaattatgtaacaatcctaggcgagctatttaccgggttttaaagatgtatagactctttaccttccgtctgtttagatattatgttgtttggtagaaacaaaagagctggcaatgtaagggagagaaggtcactccctagctgtaaacttaggttctcttccaccgttcccatgttatctcccacccccaacgttatcagggggttttnnnnnnnnnnnnnnnnnnnnnnnnnnnnn

SEQ ID NO: 117714 - DNA, 2262 bp, Arabidopsis thaliana
aatacgactcactttagggaaagctccgtacgcctgcaggtaccggtccggaattcccgggtcgaccctcgcccgcgctctcttcttcacctatagtttatctcttttttttttttgttttggcttctcttaaattcactttctctaaaacataaacgacattgatgtttcttcatcagatcctttaattcttctccaattctcattctccttacatcaatgataaactttgtagttggagatttgttgtggatgaagattattgattgcagcttataggaagctgctctttttgctttgaacaatgtggctaacttttcagattcttataattaatcagtcttatgatgagaagttggttcttgattacatactaccatcaagaagtgaacagtttatgcaatcttgtgacggttcttgtgttcaaagagtagatacttgttcttcaaggtggaggttaacagaggacaattgacggggtttttaatcgttgttgtattgctcgaataaacggaatcatggaaaggtttgttcttgttctgttcttgttgttgtttgtatatatattggacatggtgagaaagtgatgatggtgtttgtggtttttgttatgtgtaggtataagattttggaagagcttggtgatggtacttgtggtagtgtatataaagcagtaaatttggaaacatatgaagttgttgctgttaagaagatgaagagaaagttttattattgggaagagtgtgtgaatctgcgagaagttaaggctcttcgtaagctaaagcatcctcatatcataaagttgaaggagattgtgagagaacataatgagctttttttcatctttgagtgcatggatcacaatctgtaccatataatgaaagaaagggaacgacctttttctgaaggagaaataagaagttttatgtctcagatgctgcaagggctcgcacacatgcataaaaacggttatttccatcgagacctgaaacctgagaatttgctggtgaccaacaatatcctgaaaattgctgactttgggttggctagagaagttgcatctatgcctccttacactgaatatgtgtccacacgttggtatcgagctccagaagttttgctacagtcttcattatacactcctgcagttgacatgtgggcagttggagcgatactagctgagctttacgctttaactccgttatttcctggtgaaagtgagatagatcaattatacaaaatctgctgtgttcttggcaagccggactggaccacgttccctgaagcgaaaagcatatctcgaattatgagtattagtcacacagagtttccgcagacacgaattgctgatttacttcccaatgctgctcctgaagctattgatttgatcaatcgactttgctcatgggatccattgaaacgaccaactgctgatgaggcactaaatcatccatttttcagtatggctacgcaggcttcatatcctatccatgaccttgagctgaggcttgataatatggcggcgttgcctaatcttgagctaaatctctgggactttaacagagaacctgaagaatgttttcttggcttgacactagctgtgaaaccaagtgctcccaaactagaaatgctccgcaatgtatctcaggacatgagcgagaattttctcttttgccccggggtcaacaatgatcgagaaccatcagttttctggtctctgctctctcctgatgaaaacggcctccacgcgccagttgaatcatctcctttatctttgtctttcagtccaatgcagcaacacacagttggacctccacagtcgagtggcttcacaatgacatcatcaatgcaaccgaatatgttggaccgcccgtggatggccgtgtctgcgccgtttcaacaaagtcattacctctgatctaataaacccataccctagtaaaaaaagtaaataacacagaggtttgtcagaaagatttgagtttaaagaacaagatagcaaaacaaaacagaggaaaggtgttagaattttcatttttggggtcaccaatttgttcttaatttgtaaaaatttggtttggctgatgcattttcctctcagagcttgagctctatcaatatcgaacaaataatttccttattcttgtctctgtataatatatgataaaaaaagacattgaaatcttgatgtggcattaccataaagaattacgtttcattaatgttggtcctgtcgccttttaatataaaagccctttaact

SEQ ID NO: 117715 - DNA, 595 bp, Arabidopsis thaliana
ctctcttcttcacctatagtttatctcttttttttttttgttttggcttctcttaaattcactttctctaaaacataaacgacattgatgtttcttcatcagatcctttaattcttctccaattctcattctccttacatcaatgataaactttgtagttggagatttgttgtggatgaagattattgattgcagcttataggaagctgctctttttgttttgaacaatgttgctaacttttcagattcttataattaatcagtcttatgatgagaagttggttcttgattacatactacaatcaagaagtaaacagtttatgcaatcttgtgacggttcttgtgttcaaagagtagatacttgttcttcaaggtggaggttaacagaggacaattgacggggtttttaatcgttgttgtattgctcgaataaacggaatcatggaaaggtataagattttggaagagcttggtgatggtacttgtggtagtgtatataaagcagtaaatttggaaacatatgatgttgttgctgttaagaagatgaagagaaagttttatttattggtagagtgtgtgattctgcgagaagttt

SEQ ID NO: 117716 - DNA, 1464 bp, Arabidopsis thaliana
tctcattcgtcgtggaattccctttttcccccaaattcatatccttccttagatatttttctccttcttcttcttctagattccagctactccagaagattcttcgacttaatctgatgtgattaggaagagcaatagaggaagagaagaatcagaaaaaatggatccggcgactaattcaccgattatgccgattgatttaccgattatgcacgacagtgatcgttacgacttcgttaaagatattggctctggtaatttcggcgttgctcgtctcatgaccgatagagtcaccaaggagcttgttgctgttaaatacatcgagagaggagaaaagattgatgaaaatgttcagagggagattatcaatcatagatcattgagacatcctaatattgttaggtttaaagaggtgattttgacgccttcccatttggctattgttatggaatatgctgctggtggagaactttatgagcggatttgtaatgccggacggtttagtgaagatgaggctcggttcttctttcagcagcttatatctggagttagctattgtcatgcaatgcaaatatgccatcgggatctgaagctggaaaatacattgttagatggaagtccggcacctcgtttgaaaatatgtgattttggttattccaagtcttctgttcttcattcccaaccaaagtcaactgttggtactcctgcatacattgcaccagagattcttcttcgacaggaatatgatggcaagcttgcagatgtatggtcttgcggtgtaacattatatgtaatgttggttggagcttatccattcgaggatccacaggagccacgagattatcgaaagacaatacaaagaatccttagtgtcacatactcgatcccagaggacttacacctctcaccagaatgtcgccatctaatatcgaggatcttcgtggctgatccggcaacaagaatcactattccggagatcacatccgataaatggttcttgaagaatctaccaggtgatttgatggatgagaaccgaatgggaagtcagtttcaagagcctgagcagccaatgcagagccttgacacgattatgcagataatatcggaggctacgattccgactgttcgtaatcgttgcctcgatgatttcatggcggataatcttgatctagacgatgacatggatgactttgattccgaatctgagattgatgttgacagtagtggagagatagtttatgctctctgagattcctgaggacaaagtctgttttgtccgtactgttgagacacaccactggagttttgtcttagctccacgcactccatcgttcatttttggatcgtttgttgttttttactctacaagctttggattcacatacatatatatgtattgtaatgtaatatgtaatatattctatgtatttctctttgtttaataactattggcacattttatac

SEQ ID NO: 117717 - DNA, 1454 bp, Arabidopsis thaliana
tttttttttttttttccatttattttctcgaatcttcttcttcttcctagattccagcgacttaacaacaacaacaacaacatattctctgctgggtattagattcgaatttctctttttgtgatcagaaatggatcgagctccggtgaccacaggaccgttggatatgccgattatgcacgacagtgatcgatatgacttcgttaaggatattggttctggtaatttcggtgttgctcgtcttatgagagataaactcactaaagagcttgttgctgtcaagtacatcgagagaggagacaagattgatgaaaatgttcaaagggagatcattaaccacaggtcactaaggcatcctaatattgtcagatttaaagaggtcattttgacgccgactcatctggctatcataatggaatatgcttctggcggtgaactttacgagcggatttgcaatgcaggacggtttagtgaagatgaggctcggttcttctttcagcagcttctatctggagtcagttattgtcattcgatgcaaatttgccatcgtgacctgaagctagagaatacattgttggatggaagtcctgctcctcgattaaaaatttgtgattttggatattcaaagtcttctgttcttcattcacaaccaaagtcaactgttggtactcctgcatacatcgctccagaggtactgcttcgtcaggaatatgatggcaagattgcagatgtatggtcatgtggtgtgaccttatacgtcatgttggttggagcgtatccgttcgaagatccagaagagccaagagactatcggaaaacaatacagagaatccttagcgttaaatactcaatccctgatgacatacggatatcacctgaatgctgtcatcttatttcaagaatcttcgtggctgatcccgctaccagaataagcataccagagatcaaaacccatagttggttcttgaagaatctccctgctgatctaatgaacgagagcaacacaggaagccagttccaggagcctgaacaaccaatgcaaagccttgacacaatcatgcaaatcatctctgaagccacaattcccgctgttcgaaaccgttgcctagacgatttcatgactgacaatcttgatcttgacgatgacatggatgactttgactctgaatctgaaatcgacattgacagtagcggagagatagtttacgctctctaataaaaagccttttttaacaaccaaaacacttctctatctgttctaagaccagtagtgttctgatcctctggtttcaaattctaccaatttttgtattgtctctgtttgtttcttgttttcttcatgcacacatatatcatatatgtaatgtaaaatatcatctgtgtatattatatatatattccaatgtcacacaaaagcaaattaacagttaaaacagttgaagcaagttgaggtt

SEQ ID NO: 117718 - DNA, 1264 bp, Arabidopsis thaliana
cgggcaggttgatctctccgattcggatatcttagctctggccgatagattctccggcgattcatcttctttatccgccgtaattttcgtatataggatcggtggtggcttttcaagatgccgtcgaacggagatctggaccgtcagatcgagcagctgatggagtgtaaaccgttatcggaggcggatgtgaggacgctttgcgatcaagcgagagcgatccttgtcgaggaatataatgttcagccggtgaagtgtcctgttaccgtttgcggcgatattcacggccagttttatgaccttattgagctctttcgtatcggtggcaacgctcctgatactaactacctcttcatgggagactatgtagatcgtggctactattcagtagagacagtttctctattggtggcactaaaagtgcgatacagggatagacttacaatcttacgagggaatcacgagagtcggcagattactcaagtctatggtttttatgacgaatgcttgaggaagtacggaaatgctaacgtctggaagtattttacagaccttttcgattatcttcctcttaccgccctcatagagagtcaggttttctgtttgcatggagggctttcaccttctctggatactcttgataatatccgaagcttggatcggatacaggaggttccacacgaaggacctatgtgtgatttattatggtctgatcctgatgatcgatgtggatggggaatatctccacgaggtgctggttatacatttggacaggatatcgcagctcaatttaatcacaacaatggactaagtctcatatcaagagcgcatcaacttgtcatggaaggttttaactggtgtcaggataagaatgtggtgactgtgtttagtgcaccaaactattgctaccggtgtggaaacatggctgccattctagagataggagagaacatggagcaaaacttcctccagttcgatccagctcctcgacaagttgaacctgatactactcggaagacccctgattattttttgtgatttctctgcttttttttgtggtcccgaccatatataattttttgaagttccagttttattgcctatgtatcattgtagatgtgcccttttctcttcttttttctaagtggagttcgaatttcccctagaaaaaaagaaacacatcatttttttctgttgttgaggtgattgctataaaaaagtttgtaggagaggcttctatatctataaaaaaaaaacctgcccg

SEQ ID NO: 117719 - DNA, 1627 bp, Arabidopsis thaliana
  unsure (1)..(1627): unsure at all n locations
tctctacgactcactatagggaaagctggcacgcctgcaggcgaagagacaaagaagagagagagagagagagagagagagagagagagagagagagagaaagtgggggaaaaaaggcgaagaatacgcagattccatccaatttagggttaggacttcccctaatttggaaacctagtcctgtttcctgatctgttttccggatcggacgagagacgaattaacgaaaatgggcgcgaattctattccgacggacgcaaccattgatcttgatgagcagatctcgcagctcatgcagtgcaagcctctctcggagcaacaggttagagcattatgcgagaaagccaaggagatcttaatggatgaaagcaatgttcagcctgtgaaaagccctgtgacaatctgcggtgatattcatggacagttccatgatcttgcagagcttttccgtatagggggaatgtgccctgataccaattacctgtttatgggagactatgtggaccgtggttattattctgttgaaactgttacgctgttagtcgccttaaagatgcgatatcctcagcgaatcactattcttagaggaaaccatgaaagtcgtcagattactcaggtttatggattttatgatgaatgtctgcgaaagtacggcaacgcaaatgtttggaaaatctttacagacctcttcgactattttcctctgacagccttggttgagtcagaaatattttgccttcatggtggattatctccatctatcgagacccttgacaacataaggaattttgatcgagttcaagaagtgccccatgaagggccgatgtgtgacttattatggtctgaccccgatgaccgatgtggttggggcatctctcctcggggtgccggatatacatttggtcaggatatatctgaacaattcaatcacacaaacaacttaaagctgatcgcccgagctcaccagttggttatggatggatacaactgggctcacgagcaaaaagtggttactattttcagtgcaccaaactattgttaccgttgtgggaacatggcctcgattcttgaggtcgacgactgcaggaaccacaccttcatccagtttgaaccagcaccgaggagaggagaaccagacgtcacccgaaggactccagactatttcctgtgatcactggacacagactcatctcaatcagcagctgcaggcacccacaagtgaaaagtcacagttggctaactctagattctggtcctatgcattgtgttcaggttgctctgtttaaaattcaacttagtgcccaccaccggaatatagtgtgtattataggcgaagaaggcttcttatcttcctctataaccaagaaaagaaaaaagatacccattatgaacattgttttgttgatgttattagcttcttcttcttctcccttctgcatcagaatgtggtttcatgtgagaaatcttctaaattttatttcacgttattcgttcttgaacatctcttgatttttgaatagaaccttgaaattgttatgtttatttgttcttcaaagcttgatataatacaatagtcgctgaacgcaaannnnnnnnnnnnnnnnnnnnnnnnnnnnnnnnnnnnnnn

SEQ ID NO: 117720 - DNA, 1404 bp, Arabidopsis thaliana
cggacgcgtgggtttcctctctcactctgcacacgaaggcgagagagagagagaaagaaaaaagcgaagaatacgcagaatccatccaatttagggttagggctgcccctaatctggaaacctttgcctcgtttctgatctgttttccggatccgacttgaaggaaagaagacgacgacgcactaccaaaaacatgggcgcgaattcgcttccaacggatgcaaccctcgatctagatgagcagatctcgcagctcatgcagtgcaagcctctctccgagcaacaggtcagagcattatgtgagaaagctaaggagatcttaatggatgaaagcaacgttcagcctgttaaaagccctgtgacaatctgcggtgatattcatggacagttccatgatcttgcagagcttttccgtattgggggaaagtgtcctgataccaactatctgtttatgggagactatgtcgaccgtggatattattctgtggaaactgttacgctgttggttggcttgaaagtacggtatccacagcgaatcactattcttagaggaaaccatgaaagtcgtcagattactcaggtttatggattttatgatgaatgtctgcgaaagtatggcaatgcaaatgtttggaagatatttacagacctctttgactatttcccactgacagccttggtggagtcggaaatattctgccttcacggtggattatcaccatccatcgagacccttgacaacattaggaactttgatcgggttcaagaagttccacatgaagggcctatgtgtgacttattatggtctgatcctgatgacagatgtggctggggaatctctcctcgtggtgctggatatacatttggtcaggatatttcggaacaattcaatcacactaacaacttaaagctgatcgcccgagcgcatcagctcgttatggatggattcaattgggcacacgagcaaaaagtggttactatattcagtgcaccaaactattgctatcgctgtggaaacatggcctcaattcttgaggtcgatgactgcaggaaccacacgttcattcagtttgaaccagcaccgaggagaggagagccagatgtaacccgaaggacacctgactatttcctttgaagatactcagctcctcctgcagcttccggttgttggtttttgaagatctctgcttattccatttggttcaacgcatttgtgttccaggttgcttctctttaaaatcaatttagccctctcccttggaatagtgtaatataggcaaagaggtcaatgaactttaaaacctctcatgaacatgtgtttggctgaacttattagctcccttctgcatcagaatctgtttattgtgagatattttttcgatttatttcacgtaatttttccca

SEQ ID NO: 117721 - DNA, 559 bp, Arabidopsis thaliana
  unsure (1)..(559): unsure at all n locations
gaaggcgagagagagagagaaagaaaaaagcgaagaatacgcagaatccatccaatttagggttagggctgcccctaatctggaaacctttgcctcgtttctgatctgttttccggatccgacttgaaggaaagaagacgacgacgcactaccaaaaacatgggcgcgaattcgcttccaacggatgcaaccctcgatctagatgagcagatctcgcagctcatgcagtgcaagcctctctccgagcaacaggtcagagcattatgtgagaaagctaaggagatcttaatggatgaaagcaacgttcagcctgtttaaaaaagcccctgtgacaaatctgcggtgatattcaatgggccagtttccatgatcttgtcagagcttttttccgtatttgggggggaaagtgtccctgatacccacctatcttgtttatgggggggctcttttttggccccttcggataatatttcctttgggaactgttncgtgttgggttgctttnaaagncggnttcncagggnttactttttttggggnaccntnnaagncncantta

SEQ ID NO: 117722 - DNA, 528 bp, Arabidopsis thaliana
tcttcctctttaatttcatttccagctgttggttggcttgaaagtacggtatccacagcgaatcactattcttagaggaaaccatgaaagtcgtcagattactcaggtttatggattttatgatgaatgtctgcgaaagtgagtttccctgcaaacattcttatgttgtataagctactgactcgctttgttcatgtgatgacaaacttctttaactaatactatgcatgtcctcatggtttctgttgtcgctgctaattttctttctttctttattctagtcctggctagtttatattgatctaccgggttaatattgctttgctcatgtgactgtgttctcatgacattttttcgtaccttagttgttgttagatagtgccattcaaaaatgaatttgataagatatgtctccttctatgcatgtaggaaagtgttttttttttggttatttcgtttgtaatttgcttaacaaagcttgcttgtacttgcaggtatggcaatgcaaatgtttggaagatatttaca

SEQ ID NO: 117723 - DNA, 1553 bp, Arabidopsis thaliana
agagattgatgggtgcttgtatttcgttctttgcttcttcctctccttccaaaacaggtctccatagtcatgccacaacgaacaaccacagcaatggaacagagttctcgtcaaccaccggcgcgacaacaaacagcaagcgtcggacaacagagccaattctccgatatttccactgggattataagtgatgccggtaaactactggaatcgccaaatctcaaagtctataactttctggatctaaagacggcgacgaagaatgtcacaccggattcgatgttgggtcagggaggcttcgggaaaggtatacagagggttggggccgattgccacggctcttgcctccttccagaggcggctcctggtatgatcccgttgccatcaagagattgaattctgagagtgttcaaggatttgcagagtggcgttcaggaagttaactgggaatgctttggcaccgaaatctggtgaagttattgggatactgtcgtgaagacaaagcgcttctccttgtctacgagttcatccccaaagaagtcttgagagtcatgtttcttagacgaaacgatccttttccttgggatttaaggatcaagattgtgatttgtgcagctcgtggtccttgcgtttctacacagcttacaaagagagaatgcatctatagagatcttcaagtcttccatattcttcttgatttgagctatggcgcagtgctttctagagtttctggtccgtggctggtggctatggaacagcagaatagagaagttcacagagggacggctaaggtgcataggcgtcatataaaggttatgctgctcctagaatatatagcaggccatttatacgttaagagtgtcgcattcgcctttggtgtggttttactagaaataatgaccggactgacggcgcacaacacaaaacggcccagaggacaagcagagaatcacttaatgcgaacatacgtcatggatgataagcacacacagacagcaactccatactacacacacaaacgaacagagatagaagaacaaaataatgagatcaaaggaatcaacaaggtcaatcacaaccaaagagtcgccggaaccagattacaattcgcgctacgacattacactctccttcttgtaatcgagccagacccaaaaaaccagaccacccatgaaggaagtaggtcgaagtcctcgaacacatccaagggcttaatgttgtcccataccgttcttccactaaacaggaccgttgctaactcttcacgttcttcgccacatcactatcgctaataaacgtgaaacacttgggtcgtgaacgcaagagagcaacgctggacggtttggatccatgtatgaatatatataaatagttgtttggacaaccttttttttgggtctggtatgaagtgattttagagttctttattgtttcatttctctttgaattaattctgtaattctagataaatattttcattcatatataaaatatttttttaaagtctatgtttacagagttgatattggataaagtttgagaaagtttcatac

SEQ ID NO: 117724 - DNA, 937 bp, Arabidopsis thaliana
cgcttcttaaacctcgacgacatcaacgtctgacttcgcttctcctctcacatggctctacctaaccaacaaaccgtagattatcctagcttcaagctcgtcatcgttggtgatggaggcacagggaaaacgacctttgtgaagagacatcttactggggagtttgagaagaagtatgaacctactattggtgtggaggttcatcctttggatttcttcacaaactgcggaaagatccgtttttactgctgggatactgctggacaagagaaatttggtggccttagggatggatactacatccatggtcaatgtgcgataataatgtttgacgtcacagcaaggctcacatacaagaatgttccgacatggcatcgtgatctttgcagggtgtgtgaaaacatcccgattgttctgtgtggaaacaaagtcgatgtgaagaacaggcaagtgaaggcaaagcaagtcacattccacaggaagaagaatctgcagtactatgagatatcagcaaagagcaactacaacttcgagaagcctttcttgtaccttgctaggaaactggctggagaccagaaccttcactttgtggagtcaccagctcttgctccaccagaggttcaccttgacattgctgctcagccaaagaatgaggccgatcttgcagctgctgcagctcagcctctccccgatgatgatgatgacgcatttgagtaaaatcttccaaaaagcctgctgtggttttcctctatgatgttttttgagttgatgttatatataaatcaatcggctctattttagaaccaaaattgggggaattatttggattgttctgttttttgggacccaaagagaatttgcagtcaagttttttctgccttaaagtatatgcggttattggaaaactttgattctaaaaaaaaaaaaaactcgtgcc

SEQ ID NO: 117725 - DNA, 983 bp, Arabidopsis thaliana
acgcctgcaggtaccggtccggaattcccgggtcgacccacgcgtccgccgcttccttcttaacaccatcgcctgaattcgctctcctctagctcgcgattgcgaaaacatggctctacctaaccagcaaaccgtagattatcccagcttcaagcttgtcattgttggtgatggaggcacagggaagactacttttgttaagagacatcttactggggagtttgagaagaagtatgaacctactattggtgtggaggttcatccattagatttcttcacaaactgtggcaagatccgtttttactgctgggacactgctggacaagagaaatttggtggccttagggatggatactacatccatggtcaatgtgctataataatgtttgacgtcacagcacggctcacatacaagaatgttccgacatggcaccgtgatctctgcagggtgtgtgaaaacatcccgattgttctgtgtgggaacaaagttgatgtgaagaacaggcaagtgaaggcaaagcaggttacattccacaggaagaagaatctgcagtactatgagatatcagcaaagagcaactacaactttgagaagcctttcttgtaccttgctagaaaactggctggagaccaaaaccttcactttgtggagacaccagcgcttgctccaccagaggttcacattgacattgctgatcagcagaagaacgaggccgagctcttacaggctgcagctcaacccctccccgatgacgatgatgatatctttgagtaaatcatccttctagaatgtctgccgtgggaagctcttgcttgttccttttggttttctctatgttgttttggtgttacatataaatcaatcggtctttcttataacaaaaattaggtatgtatttttggacggttcttctgatggtatccaaagctaagttgtttcttcgcaagaatattaagtgattggaaaactttattctacctcc

SEQ ID NO: 117726 - DNA, 935 bp, Arabidopsis thaliana
  unsure (1)..(935): unsure at all n locations
aatatccgggcggacccacgcgtacgcgccgcttccttcttaacaccatcgcctgaattcgctctcctctagctcgcgattgcgaaaacatggctctacctaaccagcaaaccgtagattatcccagcttcaagcttgtcattgttggtgatggaggcacagggaagactacttttgttaagagacatcttactggggagtttgagaagaagtatgaacctactattggtgtggaggttcatccattagatttcttcacaaactgtggcaagatccgtttttactgctgggacactgctggacaagagaaatttggtggccttagggatggatactacatccatggtcaatgtgctataataatgtttgacgtcacagcacggctcacatacaagaatgttccgacatggcaccgtgatctctgcagggtgtgtgaaaacatcccgattgttctgtgtgggaccaaagttgatgtgaagaaccaggcaagtgaaggcgaagcaggttacattccacaggaagaagaatctgcagtactatgagatatcagcaaagagcaactacaactttgagaagcctttcttgtaccttgctagaaaactggctggagaccaaaaccttcactttgtggagacaccagcgcttgctccaccagaggttcacattgacattgctgatcagcagaagaacgaggccgagctcttacaggctgcagctcaacccctccccgatgacgatgatgatatctttgagtaaatcatccttctagaatgtctgccgtgggaagctcttgcttgttccttttggttttctctatgttgttttggtgttacatataaatcaatcggtctttcttataacaaaaaaaaaaaaaaaaaannnaagggcggccgctctagaggatccaagcttacgtacgcgtgcatgcgacgtca

SEQ ID NO: 117727 - DNA, 911 bp, Arabidopsis thaliana
  unsure (1)..(911): unsure at all n locations
cctcgagtgccaagacgggggacacaactaggttcgggagtttacctacaaaagacttccaaggaccaacttgattcgtatggaagaaagaatcccccccaatggctttcttgaattcctcacaccaggcctgaaaccatctaagtcctcaaagctacacgaggagctctgagtcgagtttctttgcaagatcttaaagcccaagcttcaatcccgcggacaataaaagaagggcgacgagtttgtctttggtttcttcttatgttgtatagtttctgctccagtgtagttaagacatgtttagaataaggaaatgggttactatgtacccacatatatgtatccccaatatgtacagtgttgttgttgcctctaaattcgaaatccaaagctttgatttatgcatgaaagacaacataatctatttgcagagtgatgcaagaactcgacgaggaggatcaaacggtcttcgagaatgaagaaccgcccagttatctataagcaaaacatctcgtctctgccacggaacagcaacacattcctcttcaagaatcctaagacaatcatggactatatccgcaggtaaaggctttccatccccaaaagtcacagcctttcttgtaccttgctagaaaactggctggagaccaaaaccttcactttgtggagacaccagcgcttgctccaccagaggttcacattgacattgctgatcaagcaggaaggaacgnngggcgagctccttacaggntgcaggtcaancccctccccggatgacgntgatgntaacctttgggtaaatcatccttcnagaatggntgccgngggaacccttggttgtccctttnggtttcccanggtggttnggggnnantnaacaanggccngngcgatctgancnggggcncngt

SEQ ID NO: 117728 - DNA, 5028 bp, Arabidopsis thaliana
  unsure (1)..(5028): unsure at all n locations
gatcccaagtcagtaaatagctttgactttcttgaccagctccgagtcatgtccgaataaatgagtgttccaaaaaaaaaaaaaaaaccatggccatgaggaaatttcagaacaggcagacgaaacttcgacgaagctcacttagtgcgagacgacgcgtcaaagcatcgtcttcatcttgacccatataaaggtaaataacaataagttaaaagcacccattaccagtgagaggacttcttgttatatatcatatcttcttcgttctcgatttacgagatccttgattctctctttctctaatcttatctcatctgaagtatagttaagaattcactcgttgttcgagagtagtaagctgaagaaatggagagctacttgaacgaaaacttcggcgatgtgaagccgaagaactcgtccgatgaggcgttgcagcgttggaggaagctctgctggatcgtcaagaatcctaaaaggagatttagattcactgctaatctgtctaagcgttccgaggccgaggcgattcggcgttccaatcaggtgcttctttcttctcactttgattactgaaatatttctttctatttctgcttgtatactgttggagatctaataagtgatctttctgcattccgagttttttgtttggttgactcactgtacttactggatgggatctaagtgagctcgtttttagtatttttctagttacctatcctcaggttagggattgttatcactagacatgattacattaggttctgtttctaatttaagatgtagatttttaggttcttcgtggtgtttgctagtaagaatgttcaagcaaatatgactcattagtagcaaacaacccatttcaagccttgtgtttcttgtagtttgtattgaaggaggcgttaattagagcgatcaaagcgttctgttcatttttcctttgagaataaattcttactgctattggtgctttgttctaataccattttcctttgtcaaccttatgaatgcaggaaaaatttcgagtggcggtcttagtttcacaagctgcacttcagttcattaatagtgagaatagactactcccttgtgttattcaatatgtatttgatttccttaacgagaaggtattgcgtgcttacaggtttaaagttgtccagtgagtatacactacctgaagaagtaagaaaagcagggtttgagatttgtcctgatgagttgggatcaattgtagaaggtcatgatttgaaaaagttgaaaattcatggtggaactgagggcctcactgaaaaactttccacgtctattgctagtggaattagtacatctgaagacctgctgagtgtaagaaaagaaatttatggaatcaaccaattcacagaaagccccagccgtggcttttggttatttgtttgggaagcccttcaggatacaacacttatgattctagctgcatgtgcgtttgtttcacttatagttggaatactgatggaagggtggcctattggtgcccatgacggacttggtatagtggcgagtattctgcttgttgtgtttgtcactgccactagtgattataggcaatccctgcaattcaaggacctggatgcagagaagaaaaagattgtggttcaggttacgagagacaaactgaggcaaaaaatctcaatatatgatctactccctggagatgttgttcatcttggcattggagaccagattccagcagatgggctttttatctcagggttttctgttctgataaatgaatcgagcttgactggagaaagtgaaccggttagtgtcagtgtggaacacccgtttcttctctctggtaccaaggttcaggatggatcttgcaaaatgttggtgactacagttggaatgaggactcaatggggtaaactgatggctacactaagtgaaggcggtgatgatgagacaccgttgcaagtaaaacttaatggtgtggcaaccatcattggtaaaataggtctattttttgctgtcattacgtttgctgttttggttcaaggattggctaatcagaagcgcctagataattctcactggatctggactgctgatgaattgatggcgatgctagaatattttgctgttgctgtaacaattgttgtggttgcagttccggagggtctgccgttggctgtgacattaagtcttgcttttgccatgaaaaagatgatgaatgacaaagcgctagtgcgcaatcttgctgcttgtgagacaatgggatctgcaacaactatttgtagtgacaaaactggaactcttacaacaaatcacatgacagttgtaaaagcctgcatctgtgaacaagccaaagaggttaatggtcctgatgctgctatgaaatttgcctctggtatccctgagtctgctgttaaacttctactgcaatctatatttactaacactggtggtgagattgttgtgggcaaaggaaacaaaaccgagatactgggaactcctacagaaactgctctgttagaatttgggttgtcactcggaggggacttccaagaagtaaggcaagcctcaaatgttgtgaaagttgagccctttaactctacaaagaaaagaatgggagttgtcattgagctgcctgaaagacatttccgggcacattgtaagggtgcttcagagatagttttagattcttgtgataagtacatcaacaaagatggtgaagttgttcctctcgatgaaaaatcgaccagtcacctgaagaacataattgaggaatttgctagcgaagcacttcgaactctttgcctagcgtatttcgaaattggtgatgaattccgggagaaaagtgatgaggaactgctcaagctaatcccaaaattgcaggtgattgtctgccaaacacaagttactttatcctgttttatgcagtgtgttggtagttcacatccgcaaacaggaaacaaaccctcaatttcattgcattagcttccggattctgaaaaactccttaggacatactcttctacaaaagattcaagtataatttccttcttgcaggtgatggcacgatcctcgcccatggataagcatactttggtgagactcctccgcacaatgtttcaggaagtcgttgcagtgacaggtgatggaacaaatgatgctccagcacttcatgaagctgatattggactcgcaatgggcatttccggaactgaggtgtgtactcaatcttcattgtccctatttcattatctggtttgtgagaaaatctaacaattgagtttgggttctcatggaaggacaacacttacatattctattcctcgcgtcccgtaggtggcaaaagaaagtgcggatgtgattatcctagatgataacttctctacgattgtcacagtagccaaatggggccgttctgtgtacataaatattcagaaatttgtccagttccagctgacagtaaatgttgtggctcttattgtcaacttcttatcagcctgcctcactggttagttcccaacccacatttatttttctcttgttcaaaagactaatctcctcagggattgcaactaacttctctgttacattgacactaactactgtgggtctcaggaaacgcgcctctgactgctgtccaactactgtgggttaacatgataatggacacacttggagcactcgcgctagcgactgaaccaccacaggacgacctgatgaagagatctccagtgggaaggaaaggaaacttcataagtaatgtaatgtggaggaacatccttggtcagtcactctaccagcttgtcatcatatggtgtcttcaaacaaagggaaagacaatgtttggtctcgatggccccgactctgatctaacactccatacccttattttcaacattttttgtcttctgccaggtaacttgccgcgtctggatcttaaaaaggaaaacaaccaacattgaccataaccacgttctcatcataatgtatgatatttgtttcaggtattcaatgagataagctcgagggaaatggaaaaaattgatgtgttcaaggggatactaaagaactacgtattcgtagcggttctaacatgtacagtggtgttccaagtaatcataatcgagctgctgggtacatttgcggatacaacaccattaaatttgggacaatggttggttagcatcatactcgggttccttggcatgcctgttgctgctgccttgaagatgatccctgttggttcacactaagcaacacattgtataatgtgattccttgtgccacaactttggcattgaaaggtaccaattttttctccggcctttggaagtttgatatcccaagatggccttggactagttacggtgcttttttatgttttcattttggccaaatgtataagtgatttggaggagcatttgcttcgtaaatatttcaatgttgtggaacttgttactttatcttttgttcttctgttagataccttttactgaataagtgaagcataggctaaattgtctctcaccaattctagggctaaattttgtctgtcaccaatacactgacaaattttcagtgacaattccgagtctcagctcaaaatacaattggtcaatggcactcttaacagaaacaacaagtgttgaatcataggaattacactcaacggtcgaaaattgttataaatgaaaagacatttctaagagttggttataatattggaaccaattatcaaatcaaaaacatgaaacaagaaaaagtgtactaatggaacaacaacattttccaaaagcagcagatgagtgtgccatcattcttcaaaaatcaattgtagagccatcattcttcctccattgctgtagctgcgtaatgcccaacgtccttttcttagctacatcccttgctggccaggaacngggtcttgcttgttaagancgagttgggggtttaacaacccctttcggcataggnaacttccccnccanctccttggggggacaaanaccccgngggtcntcccgcaagntnaaaagc

SEQ ID NO: 117729 - DNA, 3484 bp, Arabidopsis thaliana
cattaccagtgagaggacttcttgttatatatcatatcttcttcgttctcgatttacgagatccttgattctctctttctctaatcttatctcatctgaagtatagttaagaattcactcgttgttcgagagtagtaagctgaagaaatggagagctacttgaacgaaaacttcggcgatgtgaagccgaagaactcgtccgatgaggcgttgcagcgttggaggaagctctgctggatcgtcaagaatcctaaaaggagatttagattcactgctaatctgtctaagcgttccgaggccgaggcgattcggcgttccaatcaggaaaaatttcgagtggcggtcttagtttcacaagctgcacttcagttcattaatagtttaaagttgtccagtgagtatacactatctgaagaagtaagaaaagcagggtttgagatttgtcctgatgagttgggatcaattgtagaaggtcatgatttgaaaaagttgaaaattcatggtggaactgagggcctcactgaaaaactttccacgtctattgctagtggaattagtacatctgaagacctgctgagtgtaagaaaagaaatttatggaatcaaccaattcacagaaagccccagccgtggcttttggttatttgtttgggaagcccttcaggatacaacacttatgattctagctgcatgtgcgtttgtttcacttatagttggaatactgatggaagggtggcctattggtgcccatgacggacttggtatagtggcgagtattctgcttgttgtgtttgtcactgccactagtgattataggcaatccctgcaattcaaggacctggatgcagagaagaaaaagattgtggttcaggttacgagagacaaactgaggcaaaaaatctcaatatatgatctactccctggagatgttgttcatcttggcattggagaccagattccagcagatgggctttttatctcagggttttctgttctgataaatgaatcgagcttgactggagaaagtgaaccggttagtgtcagtgtggaacacccgtttcttctctctggtaccaaggttcaggatggatcttgcaaaatgttggtgactacagttggaatgaggactcaatggggtaaactgatggctacactaagtgaaggcggtgatgatgagacaccgttgcaagtaaaacttaatggtgtggcaaccatcattggtaaaataggtctattttttgctgtcattacgtttgctgttttggttcaaggattggctaatcagaagcgcctagataattctcactggatctggactgctgatgaattgatggcgatgctagaatattttgctgttgctgtaacaattgttgtggttgcagttccggagggtctgccgttggctgtgacattaagtcttgcttttgccatgaaaaagatgatgaatgacaaagcgctagtgcgcaatcttgctgcttgtgagacaatgggatctgcaacaactatttgtagtgacaaaactggaactcttacaacaaatcacatgacagttgtaaaagcctgcatctgtgaacaagccaaagaggttaatggtcctgatgctgctatgaaatttgcctctggtatccctgagtctgctgttaaacttctactgcaatctatatttactaacactggtggtgagattgttgtgggcaaaggaaacaaaaccgagatactgggaactcctacagaaactgctctgttagaatttgggttgtcactcggaggggacttccaagaagtaaggcaagcctcaaatgttgtgaaagttgagccctttaactctacaaagaaaagaatgggagttgtcattgagctgcctgaaagacatttccgggcacattgtaagggtgcttcagagatagttttagattcttgtgataagtacatcaacaaagatggtgaagttgttcctctcgatgaaaaatcgaccagtcacctgaagaacataattgaggaatttgctagcgaagcacttcgaactctttgcctagcgtatttcgaaattggtgatgaattctcattagaggctcctattccaagtggtggatacacttgtataggtattgtgggcatcaaagaccctgtacgccctggtgtcaaggagtctgttgcgatttgtaaatctgctggcatcactgtcagaatggtgactggagataaccttactactgcgaaggccatagccagggagtgtggcatattgactgatgatggcatagctatcgaaggtcctgaattccgggagaaaagtgatgaggaactgctcaagctaatcccaaaattgcaggtgatggcacgatcctcgcccatggataagcatactttggtgagactcctccgcacaatgtttcaggaagtcgttgcagtgacaggtgatggaacaaatgatgctccagcacttcatgaagctgatattggactcgcaatgggcatttccggaactgaggtggcaaaagaaagtgcggatgtgattatcctagatgataacttctctacgattgtcatagtagccaaatggggccgttctgtgtacataaatattcagaaatttgtccagttccagctgacagtaaatgttgtggctcttattgtcaacttcttatcagcctgcctcactggaaacgcgcctctgactgctgtccaactactgtgggttaacatgataatggacacacttggagcactcgcgctagcgactgaaccaccacaggacgacctgatgaagagatctccagtgggaaggaaaggaaacttcataagtaatgtaatgtggaggaacatccttggtcagtcactctaccagcttgtcatcatatggtgtcttcaaacaaagggaaagacaatgtttggtctcgatggccccgactctgatctaacactcaatacccttattttcaacatttttgtcttctgccaggtattcaatgagataagctcgagggaaatggaaaaaattgatgtgttcaaggggatactaaagaactacgtattcgtagcggttctaacatgtacagtggtgttccaagtaatcataatcgagctgctgggtacatttgcggatacaacaccattaaatttgggacaatggttggttagcatcatactcgggttccttggcatgcctgttgctgctgccttgaagatgatccctgttggttcacactaagcaacacattgtataatgtgattccttgtgccacaactttggcattgaaaggtaccaattttttctccggcctttggaagtttgatatcccaagatggccttggactagttacggtgcttttttatgttttcattttggccaaatgtataagtgatttggaggagcatttgcttcgtaaatatttcaatgttgtggaacttgttactttatcttttgttcttctgttagataccttttactgaataagtgaagcataggctaaattgtctctca

SEQ ID NO: 117730 - DNA, 1202 bp, Arabidopsis thaliana
  unsure (1)..(1202): unsure at all n locations
nnnnnnnnnnnnnnnnnnnnnctgtcgtcgtcacccacgcgtccaaactccatagctagctagagagtaaaaagaacaaagatgtcgaaagaagtgagcgaagaaggcaaaacccaccatggaaaagactacgtggatcctccaccagctcctcttctcgacatgggtgagctcaaatcctggtctttctacagagctctcatcgctgagttcatcgctacactcctcttcctctacgtcaccgtcgctactgtcatcggccacaagaagcaaaccggtccttgtgacggcgttggtttacttggtatcgcttgggctttcggtggtatgatcttcgtcctcgtctactgcaccgccggtatctctggtggtcacattaacccagctgtgactttcggtctgttcttggcccgtaaggtctctttggtgcgagctcttggttacatgatagctcagtgtcttggagccatttgtggtgtgggtttcgtgaaagctttcatgaaaactccttacaacactcttggtggaggagctaacaccgtagctgacggttacagcaaaggaactgctctcggagctgagattattggaactttcgtccttgtttacaccgttttctctgcaactgaccctaagagaagcgctcgtgactctcacatccccgttttggctccacttccaattggatttgctgtgttcatggtgcatttggctactatccccattactggaactggtatcaacccagctagaagctttggtgctgctgttatctacaacaacgagaaggcgtgggatgaccaatggatcttttgggttggtccgttcttgggagcactagctgcagcagcttaccaccaatacatattgagagcttcagcaattaaggccttgggctcgttccgaagcaacgcaaccaattaatgaaggctttttttaagataatgtcaagaaacaactttaagatttatatgctttaattattatttgttgttcttttgtgtgtaatgagagagatggtggattgatgttaattatgaaatggctcagtgacttctatttcaaaaaaaaaaaaaaaggtgtctttgttaatcgtttgcctttggtttctcttagtagttacaaattcatgttttctcttcatgtcagttcgtaaatatcgaacaatccaagttggaatttattattcacaacatcacaag

SEQ ID NO: 117731 - DNA, 1466 bp, Arabidopsis thaliana
  unsure (1)..(1466): unsure at all n locations
nnnnnnnnnnnnnnnnnnnnnnnnnnnnnnnnnnnnnnnnnnnnnnnnnnnnnnnnnnnnnnnnnnnnnnnccacgcgtccgaaaaaccaaaaaaacatataatcgttggcaaaaatactaagaatattttttaaaagataaagcaataaaaaagtatacaaacaaattaacaagaaggagagctctcactataaaacagagcacatgttcttctcactaaccactccaacagagaagcaaaagaaaaaaaaaagctattgtttgaaagaagaagaagttaactatggcaaaggatgtggaagccgttcccggagaaggatttcagacaagagactatcaagatccgccaccagctccgtttattgatggagcggagctaaagaagtggtctttctacagagcagttatcgcagagttcgtagccactctcctcttcttatacatcaccgttttgacagtcatcggttacaagattcagtccgatactgatgccggtggcgtagattgcggcggagttggaatcctcggtatcgcttgggcctttggtggtatgatcttcatcctcgtctactgcaccgccggtatctctggtggtcacattaacccagcggtgacatttgggctattcttggcacgtaaagtgtcgttacctagggccctattgtacataatcgctcagtgtttgggtgcgatttgtggagttggttttgtcaaagccttccaaagctcttactacacccgttacggaggtggagccaactctctagccgatggctacagcacagggaccggtctagccgcagagatcattggtactttcgttcttgtctacaccgtcttctctgctactgaccccaaacgtagtgctagagactcccacgttccggtgttggcgccacttccaatcggatttgccgtgttcatggtacatttggctaccattcccattaccggaaccggaattaacccggcaaggagtttcggagctgccgtaatctacaacaagagcaagccatgggatgaccactggatattttgggttggaccattcattggagctgcgatagctgcattctaccaccaattcgttctgagagcttcaggttctaagtctcttggatcattcagaagtgctgccaacgtctaaacacatcaaaccagatttctcaagaataaatgaagttgtgatctctctgtacaaatctaaatcagtcacttgcagttttcatttccctttcttatatttgtgttttccacttgctcttttgtgaattttccttcggtgtaattgttttttctttcgcttttaaacgagtgattggaattataatcaatgaaatcaaagaggttcttaagcgttgtgtaaaaaaaaaaaaaaaaacccaagggcggccgctctagaggatccaagcttacgtacgcgtgcnnnnnnnnnnnnnnnnnnnnnnnnnnnnnnnnnnnnnnn

SEQ ID NO: 117732 - DNA, 1288 bp, Arabidopsis thaliana
ggtatcctggacgctacggtccggaaatccgggtcgacccaagcctccgttacggaggcaaaaaaacaacagaaggggcttcacaaacacaacatatccacaatacaaaacacaactttcatatataacaaaaaaagttatagaaatggccaaagacgtggaaggacctgagggatttcagacaagagactacgaagatccgccaccaactccgtttttcgatgcggacgagcttaccaagtggtctttatacagagccgtcattgccgagttcgtagccactctcctcttcttgtacatcaccgttttaactgtcatcggttacaagattcagtccgacacaaaagccggtggagttgactgcggcggcgtcggaatccttggcatcgcgtgggcttttggtggcatgatcttcatccttgtctactgcaccgccggtatctcaggtggtcacataaaccctgcggtgacgtttggtttgttcttagcccggaaggtatcgctgattagggcggtgctttacatggtggctcagtgtttgggtgctatttgtggagttgggtttcgtcaaagctttcaaagctcttactatgatcgttacggtggaggagccaactctctagcagacggctacaacacaggcaccggactagccgcagagatcattggaacattcgttctcgtctacacagtcttctccgctactgatcccaaacgtaacgctagagactcccacgttccggttttggcgccacttccgattgggtttgcggtgtttatggtacatttggccactattccgatcaccggaaccggcatcaacccggctaggagtttcggagctgccgtaatctataacaagagcaagccatgggatgaccactggatattctgggtgggaccattcattggagctgcgatagctgcattttatcaccaatttgtcctaagggcttcaggttccaagtcacttggatccttcagaagtgcagccaacgtttgagtttttgccacacaaaaaaaaacctatcataataacaacaattacaaaatggttgtgttattatgtatgtacaaaaattggcaactttgcttgtaaaactatgcactatatttcttcttgctttttctgttttcattgtggtgtaatactttgatatgtgccaatgccaatgtttgtgtactcgggaaaacaattaatgaaaaccaaattctttttgccctatcctccctctttttattttatacagatgatattaccagctaaaagcatatctacatagactac

SEQ ID NO: 117733 - DNA, 1219 bp, Arabidopsis thaliana
  unsure (1)..(1219): unsure at all n locations
ctacaacaaccacaaagcaaaacacttacttagaaagtccagaaacatccattaacacatatggctaaagacgtggaaggacctgatggatttcagacgagagattacgaagatcctccgccaacaccgtttttcgacgcagaggagcttaccaagtggtctttatacagagcagtcatcgccgagttcgtagccactctcctcttcttgtacgtcaccgttttaactgtcattggttacaagattcagtccgacacaaaagccggtggagttgactgcggcggcgtcggaatccttggcatcgcgtgggcttttggtggcatgatcttcatccttgtctactgcaccgccggtatctcaggtggtcacataaaccctgcggtgacgtttggtttgttcttagcccggaaggtatcgctgattagggcggtgctttacatggtggctcagtgtttgggtgctatttgtggagttgggtttgtgaaggcatttcaaagctctcactatgttaattacggtggaggagccaactttctagctgacggctacaatacaggcaccggactcgcggcagagatcatcggaacattcgtgcttgtctacacagtcttctccgctactgatcccaaacgcaacgctagagactcccacgttccggttttggcgccacttccgattgggtttgcggtgtttatggtacatttggccactattccgatcaccggaaccggtatcaacccggctaggagtttcggagccgccgtaatctttaacaagagcaagccatgggatgaccactggatattctgggtgggaccattcattggagctacgatagctgcattttatcaccaattcgttctaagggcctcaggctccaagtccctcggttcattcagaagtgcagccaacgtttaaacttagccacgaaagaaaaaaagtgtgcctacaattatgtagaaacatatcctcttttccactcgtatcttagcttcttcctattttctatttctaactgtgtgattccatattaaatcgagtgaaatgtttttcaattcatctttgcaacgtatgtaagtttggtgtattgagaaaaaaaatcgagaaagacaactttttcttcgaaaaaaaaccctaaaaaaaaaaaaaaagnnnnnnnnnnnnnnnnnnnnnnnnnnnnnnnnnnnnnnnnnnnnnnnnnnnnnnnnnnnnnnnnnnn

SEQ ID NO: 117734 - DNA, 1065 bp, Arabidopsis thaliana
ctgggcccgccctcgaggtcgacggtatcgataagcttgatatcgaattcgcggccgcgcaaaggatgtggaagccgttcccggagaaggatttcagacaagagactatcaagatccgccaccagctccgtttattgatggagcggagctaaagaagtggtctttctacagagcagttatcgcagagttcgtagccactctcctcttcttatacatcaccgttttgacagtcatcggttacaagattcagtccgatactgatgccggtggcgtagattgcggcggagttggaatcctcggtatcgcttgggcctttggtggtatgatcttcatcctcgtctactgcaccgccggtatctctggtggtcacattaacccagcggtgacatttgggctattcttggcacgtaaagtgtcgttacctagggccctattgtacataatcgctcagtgtttgggtgcgatttgtggagttggttttgtcaaagccttccaaagctcttactacacccgttacggaggtggagccaactctctagccgatggctacagcacagggaccggtctagccgcagagatcattggtactttcgttcttgtctacaccgtcttctctgccactgaccccaaacgtagtgccagagactcccacgttccggtgttggcgccacttccaatcggatttgccgtgttcatgggtacattggctaccattcccattaccggaacccggaataaacccggcaagggagtttcgagctggcgttatctacaacaagagcaagccatgggatgaccactggatattttgggttggaccattcgtgggagcattagcagcagcagcataccatcaatatatcttgagagctgcagcaatcaaagctttggcttcattccgcagcaacccaaccaattgatgattcatgagacttcttagaacaatttgagatctttttttttgtgtgcttaatgagagatatttgtgtgttttaatttgatgtaatcggatttattcattttcatagtttaatttggtcttaattcatctttgtccgttgcttt

SEQ ID NO: 117735 - DNA, 607 bp, Arabidopsis thaliana
  unsure (1)..(607): unsure at all n locations
ctgtcgtcgtcacacagcaccacaaactccatagctagctagagagtaaaaagaacaaagatgtcgaaagaagtgagcgaagaaggcaaaacccaccatggaaaagactacgtggatcctccaccagctcctcttctcgacatgggtgagctcaaatcctggtctttctacagagctctcatcgctgagttcatcgctacactcctcttcctctacgtcaccgtcgctactgtcatcggccacaagaagcaaaccggtccttgtgacggcgttggtttacttggtatcgcttgggctttcggtggtatgatcttcgtcctcgtctactccacccccggtatctctggtggtcacattaacccagctgtgactttcggtctgttcttggcccgtaaggctctttgtgcgagctctttgttacatgatagctcagtggcttggggccatttctggtgtggggttcgtgaaagctttaatgaaaacctcttacaaaattgtttggggggggggttaacaccgagtttcgggttaagaaaaganctttttgcggttantattgactttgcctgttaaccgttttttaaatggtttctggtaaaggaattgc

SEQ ID NO: 117736 - DNA, 408 bp, Arabidopsis thaliana
  unsure (1)..(408): unsure at all n locations
gcaaaagaaaaaaaagctattgtttgaaagaagaagaagttaactatggcaaaggatgtggaagccgttcccggagaaggatttcagacaagagactatcaagatccgccaccagctccgtttattgatggagcgganttaaagaagtggtctttctacagagcagttatcgccgagttcgtagccactctcctcttcttatacatcaccgttttgacagtcatcggttacaagattcagtccgatactgatgccggtggcgtagattccgggcggagtttggaatcctcggtatcgcttgggccttttggtgggtttgacctnaacccnggtttttttaccccccccgtttttttgggggggccaaatttacccccggggggnaaaatttggggcttttttttnggc

SEQ ID NO: 117737 - DNA, 744 bp, Arabidopsis thaliana
  unsure (1)..(744): unsure at all n locations
tgcaggtcccggttttcggattcccggctcgacccacgcgtccgtgttctcgtcttctcgtaggtggtcacattaacccagctgtgactttcggtctgttcttggcccgtaaggtctctttggtgcgagctcttggttacatgatagctcagtgtcttggagccatttgtggtgtgggtttcgtgaaagctttcatgaaaactccttacaacactcttggtggttgagctaacaccgtagctgacggttacagcaaaggaactgctctcggagctgagattattggaactttcgttcttgtttacaccgttttctctgcaactgaccctaagagaagcgctcgtgactctcacatccccgttttggctccacttccaattggatttgctgtgttcatggtgcatttggctactatccccattactggaactggtatcaacccagctaggagctttcggtgctgccgttatctacaacaagcggcaagccgtgggatgaccactggatattttgggttggaccattcattggagctgcgatagctgcattctaccaccaattcgttctgagagcttcaggttctaagtctcttggatcattcagaagtgctgccaacgtctaaacacatcaaaccagatttctcaagactaaatgaagttgtgatctctctgtacaaatataagaaaaggaatcnttactgttcatctctacttgcatcataactgcttcctccggtgttcgctc

SEQ ID NO: 117738 - DNA, 600 bp, Arabidopsis thaliana
  unsure (1)..(600): unsure at all n locations
agaagcaaaagaaaaaaaagctattgtttgaaagaagaagaagttaactatggcaaaggatgtggaagccgttcccggagaaggatttcagacaagagactatcaagatccgccaccagctccgtttattgatggagcgganttaaagaagtggtctttctacagagcagttatcgccgagttcgtagccactctcctcttcttatacatcaccgttttgacagtcatcggttacaagattcagtccgatactgatgccggtggcgtagattgcgggcggagttggaatcctcggtatcgcttgggcctttggtggtatgatcttccatcctcgtctacttcaccccccgggtatctcttgggtggtcacatttaaccccagcgggtggacaattttgggctatttcttttggccccgaaaaagggtccggtaaccctaggggcccctttttgtaccatcaatccccccaagtgttttgggtccgattttttcggggttggttttgtcaaaagccttccaaaggttttacttacccccntacgggggnggggcacctcttttgcggtggttaaananaagggccntttngcnnanggnta

SEQ ID NO: 117739 - DNA, 462 bp, Arabidopsis thaliana
  unsure (1)..(462): unsure at all n locations
acccanncaaaaaccttgggtccncnntaccnaaaaacaccganaagccntgggatnnccaatgggacctttgggtggccccgtccttgggagcactagctgcagcagctttaccacccaatacatattgagagcttcagcaattaaggccttgggctcgttccgaagcaacgcaaccaattaatgaaggctttttttaagataatgtcaagaaacacctttaagatttatatgctttaattattatttggtgttcttttgtgtgtaatgagagagatggtggattgatgttaattatgaaatggctcagtgacttctatttccttctttagtttttgattgtctttgttaatcgtttgcctttggtttctcttagtagttacaaattcatgttttctcttcatgtcagttcgtaaatatcgaacaatccaagttggaatttattattcacaacatcacaag

SEQ ID NO: 117740 - DNA, 1623 bp, Arabidopsis thaliana
  unsure (1)..(1623): unsure at all n locations
tgatatnnnnnnnnnnnnnnnnnnnnnnnnnnnnnnnnnnnnnnnnnnnnnnnnnnnnnnnnnnnnnnnnnnnnnnnnnnnnccacgcgtccgtggattcacagctagtcttgtctctgaagctgaatccaagcttcactcctctttctcctctcttccctttcactccatgttcttctttttcgccgtcgctccggttttcttcttgctactcccgccgcctctattctccggttaccgtctacgccgcgaagaaactctcccacaaaatcagttctgaattcgatgacagaatcaacggcgctctctctcccgacgctgattcccgcttcctcgaccgccaaaaggctttagaggcagctatgaatgacattaacagttcatttggtaaaggaagtgtaacaagattggggagtgctggtggagcattagtggagaccttttcgagtggtattttgactcttgatcttgctttaggtggaggcctaccaaagggtcgggtagtcgaaatatatggaccagaaagtagtggcaagaccacgctagcactccatgctattgctgaagtgcagaagcttggaggcaatgcaatgcttgttgatgcagagcatgcctttgatccagcgtattctaaagcattaggtgttgatgtagaaaatttgatagtgtgccagccagataatggcgagatggctttagaaactgcagaccgtatgtgtcgctcaggtgcggttgaccttatatgtgttgattctgtttcagcacttactccacgagctgagattgaaggtgagattggaatgcagcaaatgggtttgcaagctcgtcttatgagtcaagctcttcgtaaaatgtcaggaaacgcctctaaagctgggtgtactcttattttcctaaaccaaataagatacaagattggtgtgtactatgggaatccagaggtgactagcggaggaattgcgttaaagttcttcgcgtcggtccgtctagaaattcgttctgctgggaagatcaaatctagcaaaggggatgaagatattggtcttcgggctcgtgtaagagtgcagaagagcaaggtttcaagaccgtataagcaagcagagtttgagattatgtttggggaaggagtcagtaaactgggatgcgttcttgattgtgctgaaattatggaagttgtggtcaagaaaggttcctggtacagctacgaagaccaaaggctcgggcaaggaagagagaaagcactgcagcacttaagggaaaaccctgctcttcaagacgaaattgagaagaaagtgagattgttgatgttagatggagaagttcatcgatcaactcctttgatgagcagcagctcttcctcggcttcacatcgcgaagaagaagaagaagactcgcttgacgatttccaatgacataacacttaagcttgagactttcggatctatggatgtacaacacttgattttctctcatcatgttcacctcttgtttcaagtttcatcaattaaaaaaaaacactcatatggttcagtcttaaaaaaaaaaaaaaaaaaaagnnnnnnnnnnnnnnnnnnnnnnnnnnnnnnnnnnnnnnnnnnnnnnnnnnnnnnnnnnnnnnnnnnn

SEQ ID NO: 117741 - DNA, 1294 bp, Arabidopsis thaliana
  unsure (1)..(1294): unsure at all n locations
accgcctgcggtaccggnccggaatcccgggtctacccacgcgtccgcccacgcgtccgctgagagatctcaaatcgacgaccaacaggaagaatgagcagtcgttcgagtagaaccgtgtacgtcggaaaccttcctggcgatatccgtgagagagaggtcgaagatttgttcagtaagtatggacctgttgttcaaattgatttgaaggttcctccaaggcctcctggttatgcattcgttgagtttgatgatgctcgggatgctgaagatgctattcatggtcgtgatggctatgactttgatgggcatcgtttgagggtggaattggcgcatggtgggaggcgttcatcagatgatactcggggtagtttcaatggtggtggccgtggtggtggtcgcggccgtggtgatggtggtagtcgtgggccatctaggagatcagagtttcgtgttctagtcacatggcttgcttcatctgcttcttggcaagatctcaaggatcacatcgctaaaggaggcgatgtctgtttctcgcaagtgtaccgtgatgctagagggacaactggagttgttgattacacctgctatgaggacatgaagtatgcgctgaaaaagctcgacgacacagagtttcgaaatgcgttttcgaatggatatgtccgggttagagaatatgattcaaggaaggattctaggagtcctagccggggaagatcctattctaagagccgcagccgcagccgtggacgaagcgtgagccgaagcaggagcagaagcaggagcaggagcagaagtcccaaggcaaagtcttcacgtaggtcccctgcaaaatctacatcaagatctcctggcccccgctcgaagtcaaggtcaccgtctccaagaagatcgcgttcaagatcaagatctcctctaccttctgttcagaaggaaggaagcaagagccctagcaagccaagtccagccaagagtcctatccacactaggagtccatcgaggtaaaatgggagatatccaggtgaaaagagaagagagaagcatcttcttgctactcaaaacaaattctactttcttgaagtggattatatctgaacgcttattgactgtagaagatgcgacaagtttgatttgcactatcattttgtaatattcttgccattcttcgtcttctggatccctttacttttgagaatgatgtttttttttgaagatatcgtttcaaagccctcnnnnnnnnnnnnnnnnnnnnnnnnnnnnnnnnnnnnnnnnnnnnnnnnnnnnnnnnnnnnnn

SEQ ID NO: 117742 - DNA, 2746 bp, Arabidopsis thaliana
aaacacacacaaccacaatgtagtctatttgttcctacccttaaaagtctctgttggcttttcaaaacctggtccattgagtcattgactcagagagttagaactaaaaagtctttatatttacacatatacgcagatttaatctctacatctttgcttcagtaaaatgggttctctttcttgttcaataatccatctggttcttattctgcaactacaaacatttttcgttttttctcaaaacatcagaaacggctctgttcctgtcggagaatctctcaccgcttcagagtcccaacaaatctctagttcatggcgttcaccttccggtgactttgctttcgggttccgcaagatccaaccaaacgacggtttcactctctccatttggttcgacaagatttctgacaagaccatcgtgtggcacgcacaagccgtcaacacaaccaccggtcttgtccctaatggttcgaaggttacattaactgcagatggcggtctggttatcgctgaccctcgaggtcaggagctgtggagagcgttgagtggtggctctgtttctcgagggcgatttactgacgacggaaacttcgttcttttcagagatgggtcagaagattctgacgaggttctatggtcgagctttgaaaatcccaccgacactctgttacctaatcagaatatagaagttggaaggaatctgtcatcacgtaggacagagacgagcttcaaaaaaggaagattcagcctacgtctagaggatgacggaaatcttcagcttcactctctcaacgccgagactgcctcagaatcagacatatactctcagtactacgaaagtaataccaacgatccaaacaaccccgggattcaattagttttcaaccagtcaggggaaatatatgttcttcaaaggaacaattcaagattcgtcgtcaaagatagagatccggatttttctatcgccgcgccgttctacatttcgacggggtttttgctgagtactatcatcccaaaggaggccaggagaatagtgggtgggtgtttgcttgggctgtgccgggataatatgtgtagccccgatgatgcacttgggaatatggcttgtgggtataataatatatgtagtttaggaaacaacaagaggccaaaatgtgagtgtcctgagaggtttgtgttaaaggatccgagcaatgagtatggtgattgtttgccagattttgagatgcagacttgtagaccagagaaccaaaccgcaaactcagatgtgaatctttacgagttcattactttagagaagacgaattggccgtttggggattatgagagttatgccaactatgatgaagaaagatgtaaagcttcttgtcttagcgattgtttatgtgctgcggttatttttggaacaaatcgggatctaaaatgttggaagaagaagtttcccttgtctcacggtgaaagatctccacgtggtgatagtgatacattcattaaggttcgaaaccgctccatcgcggatgttccagttaccggaaacagagcgaaaaaacttgactggttaatcattgcttgttctgttctacttggaacttcagcttttgtgatttttgatacttcttgctcttatagaaagactaagaagagtaaaaatatgatgaagaatcaagcgagagatatcggtcggactacagctacaactactgcaaatgagttgaatttgagggtctttacatatggagagcttgcagaggctacaagagatttcacggaagagcttggaagaggagcctttggtatagtttacaaaggatatttagaagttgccggtggttctgaagttaccgtggctgtgaagaaactagatcgtcttgatttagataacgaaaaagagttcaagaatgaggttaaagtgataggtcagattcaccacaagaacctagtgaggctcattggcttctgcaacgaaggacagagccagatgatcgtctatgagtttttaccacaagggacgctagccaattttctcttcaggcgtccgaggccgagctgggaagatagaaagaatattgcggtggccattgctcgtggaatcttgtatctacatgaagagtgcagcgagcagatcatacactgtgacataaaaccgcagaacatactcctagatgagtattacactcctcggatctcggattttggtctagcaaagcttttgttgatgaaccaaacgtatacgctcactaacatccgtggaagaaaagggtatgtggcccctgaatggttcaggaatagccccattacatccaaagtagatgtttatagctatggagtaatgcttttagaaatcgtgtgctgcaagaaagccgtcgaccttgaggataacgtgattctcatcaattgggcttacgattgttttcgacaaggaaggttggaagatctgactgaggacgattcagaggcaatgaatgacatggaaactgtggagagatatgtgaaaatagcgatatggtgtatacaagaagagcatgggatgagacctaacatgagaaatgttacacagatgcttgaaggtgtgattcaagtttttgatcctccaaatccgtctccttatagcactttcacttggtctgatgaatctttgtctagtgatccagtgtcacttgtttgataagttgataaaaaaacaaaataaagttattatacttttgtatggaataaactccaatcattaatattagcttaaataatc

SEQ ID NO: 117743 - DNA, 2728 bp, Arabidopsis thaliana
atcttgcaaaaattctctccacatttcaaacgtctaatagttaaagagagcttttgttttttctttcccatgtctatcagtatcaccaccgagaacatatcatcaacaccaccaaccaaacattaacccacccgagagtacccaatgccatgtactacttatcttcctcttcttcttctcctcttccttcttccaccaccatctgtacaaagcaaagttatcatcaaaggaaaccaaaccattctgagtttcaaagctattttccggcttggtttcttcagcaccaccaatggttcctccaattggtacttgggtatctcttacgcttctatgccaactcccacccacgtttgggtcgccaatcgaatccgacccgtttcggatcctgactcttccactctcgagctcacctccaccggatacctaatcgtcagtaacctccgtgacggcgtcgtttggcagacggataacaaacaacccggaaccgatttccggttctctgaaaccgggaatctgattttgatcaacgacgacggttctccggtttggcagagctttgacaatccgactgacacgtggcttccggggatgaatgtcaccggtctaacagctatgacttcgtggcggagtctcttcgatccttcgccggggttttactctctgagactgagtccaagcttcaacgagttccagcttgtttacaaaggaaccacaccgtattggtccaccggaaattggaccggagaagccttcgtcggcgttccggaaatgaccattccttacatctacaggttccatttcgttaacccttacactcccacggcgtcgttttggtacatcgtcccaccgttggactccgtttccgagccacggctgacgcggttcatggtcggcgccaacggccagctgaagcagtacacttgggatccacagacgcagagctggaacatgttctggttgcagccggaggatccttgccgcgtttacaatctctgtggtcaattagggttttgtagcagcgaattgctcaagccctgtgcttgcatccgcggtttccggcctaggaacgacgccgcgtggagatctgatgattacagcgacggatgccgccgtgaaaacggtgattccggcgaaaagagtgatacttttgaagccgttggtgatctacgctacgatggtgatgtgaagatgtcacggttgcaggtaagcaagagctcttgcgccaaaacttgcttaggaaactcttcttgtgttggtttttatcataaggagaagtctaatctctgcaaaattttactcgagtcgccgaataatctgaagaattcaaagggaaacatctctaagtctataattatattgtgcagcgttgttgggtcaatctcagttcttgggtttacattgttagtgccattgattctgttgaagaggagtcgaaagaggaagaagactaggaaacaagacgaagatgggtttgctgtgttgaatcttaaggtattttctttcaaggagcttcaatcagctaccaatgggttctcggataaggtcggacacggcggttttggggcggtgtttaagggaacattaccgggttcttctacattcgtggctgtgaaacgcttagaaagacctggaagcggggagagtgagttccgggcagaggtatgcaccattgggaacattcaacatgtcaatctcgttaggcttagaggtttctgttcagagaatcttcataggcttcttgtctatgattacatgccacaaggatccttgagttcctatctgtctagaacaagccccaaattgctaagctgggagacccgtttcaggatcgcgttaggtactgccaaagggatcgcgtacttgcatgaaggatgcagggactgtattatacactgtgatatcaaaccggagaacattcttttggacagtgattacaacgccaaagtgtctgattttggcttggctaagctccttggacgtgacttcagcagagttctagccacgatgagagggacatggggctacgtggctcccgaatggatatctggtttgcccatcacgacaaaagctgatgtgtatagctttggaatgacattgctcgagctgatcggtggtagaagaaatgtcattgttaatagcgatacactgggagagaaagagacagaaccagagaaatggttctttccgccatgggcagcgcgtgagatcatacaaggcaatgtggactctgtggttgactctagactcaacggagaatataacactgaagaggtgacgaggatggcaacggtggcgatatggtgcatacaagacaatgaagagataaggccagcaatgggaacggtagtgaagatgcttgaaggagttgtggaggtgacggttcctccaccgcctaaattaatacaagctcttgtctccggcgattcataccgaggagtgagcggcacaagctgtagtgaaggccatggctgttcggatctcaatacaggtttgtctagccctggctcacggtcgtcttttggtagaccttctccttgatcaattttgtaaggtgatttggtcaaaaccagccttaaatgttttaagtgttgctctctaagagggtttaattagtttaaactgtatttgttggttgtatgatatttgacttaatcgacattaacagttaaaaccatggattatgtctttcttcttagtttgaaagttcttgtcactttgataatcttct

SEQ ID NO: 117744 - DNA, 452 bp, Arabidopsis thaliana
cggacgcgtgggctgttgttgattcgcaaaggcgaagattatccatcttctcagttactcctactggaaccaaaagctcagaaccttaaaacatggagtctctatctcttcccgttctaaatcctctgttagcttctggttctaatctttttagaaaccagcactcgaggatgacctcttcaatggtatcttcacttaaatcccccattggaggcacatcgctctccactgttcgtcgctttggagtaggtgttgttaggatgcaagctgttgatgaagatattgatttgaagcaaatgagagacatagctgctgctaaaaagcgttgggatggtttgttaagggaaggaaaagtgaagcttcttacaccaagagaagcaggctatgctatttctctttcaaacaaacctctccttgatgttcgtccctctagcgagcgcaacaaggcatgg

SEQ ID NO: 117745 - DNA, 285 bp, Arabidopsis thaliana
aggtcacggcgagacgagccgtttatcattacgataggtgtcaagtggaagtgcagtgatgtatgcagctgaggcatcctaacagaccggtagacttgaacattccaatatgggctgagaatcggtttgggccggggatagcaatttgatgttatgatgctaggcgaactgtaagaaagatatcaaaaacagaaaagtggagctttctgattaggtaattgctcttaaagctaatataaagttataatttggatatttaaaacaagagataaaagaacaactaaa

SEQ ID NO: 117746 - DNA, 477 bp, Arabidopsis thaliana
cattatcaaagtcccagaggcagagagagagaatcagagagagagaagtcgagatgtttttccacatagtattggagcggaacatgcagttgcatcctcgtttctttggtcgtaacctaaaagaaaacctcgtatctaagctcatgaaagatgtcgaaggcacttgcagtggccgacatggatttgtagtggcgataactggaatagatacaatatgaaagggtttgatcagagatgggactggttttgtcacctttccagttaaataccaatgcgtcgttttcagacctttcaaaggcgagattttggaagctgttgtcactttggtcaataagatgggattcttcgctgaagctggccctgttcagatttttgtgtctaagcatttgattccagatgatatggagtttcaagctggagacatgcctaactataccacatcagatggatcagttaagatccagaaggagtgtgaag

SEQ ID NO: 117747 - DNA, 1128 bp, Arabidopsis thaliana
  unsure (1)..(1128): unsure at all n locations
ccacgcgtccgcccaagcgtccacggacgcgtgggcggacgcgtgggatcgaattaaagtcaatggcgtcacgtttatgtcttctccttctcgttgcgtgtatcgccggagcatttgccggagacgtcatcgaactcaatcgatctcagagggagttcgattatttcgctctatctcttcaatggcctggaacctattgccgtggaactcgccattgttgctccaaaaacgcttgctgcagaggctccgatgctccaactcaattcacaattcatgggttatggcctgactataacgatggttcgtggccttcatgttgttatcgatctgactttaaagagaaggagatttcaacgttgatggatggtcttgagaagtactggcctagtctcagttgtggttctccatcatcatgcaatggtgggaaagggtcattttggggccacgagtgggagaaacatgggacttgttcttctcctgtttttcatgatgagtataattacttccttaccacacttaatctctacttgaagcataatgtcacggatgtcctttatcaagctggctatgttgcttccaacagtgaaaagtatcctctaggaggtatcgtaacagccattcagaatgcatttcatatcacccctgaagtggtttgcaaaagagatgcaatcgatgaaatacgtatatgcttctataaagattttaagcccagggactgtgttggttcacaagatttgacatctagaaagtcatgccccaagtacgtaagtttgccggaatacacgccattagatggtgaagctatggttctgaagatgccaacagaaagagaagctctttgaatcggaaaagatgggagctttgttatcttctgagagacaatacatacatgtctctgatgttgtaactttactaccaaaacctataaagattggcttatttcgttctattggatatgtatcatcattactggtaaatcaagtttctttctaataatgtagaagatcagaaaatccataagaagatatcaacatttgagttctatggtaaaaaaaaaaannnnnnnnnnnnnnnnnnnnnnnnnnnnnnnnnnnnnnnnnnnnnnnnnnnnnnnnnnnnnnnnnnnnn

SEQ ID NO: 117748 - DNA, 455 bp, Arabidopsis thaliana
  unsure (1)..(455): unsure at all n locations
atcgatttaaagtcaatggcgtcacgtttatgtnttntccttctcgttgcgtgtatcgccggagcatttgccggagacgtcatcgaactcaatcgatctcagagggagttcgattatttcgctctatctcttcaatggcctggaacctattgccgtggaactcgccattgttgctccaaaaacgcttgttgcagaggctccgatgctccaactcaattcacaattcatgggttatggcctgactataacgatggttcgtggccttcatgttgttatcgatctgactttaaaagagcaaggagatttcaaccgtgttggggggtcgtccgtagtacttggctaggctcaattgtgggtntncatcatcangnaattggtggggaaaggggcaattttngggncncggttnggggnaannaaggggcttttccggtccccttttttaaaaanggggg

SEQ ID NO: 117749 - DNA, 940 bp, Arabidopsis thaliana
  unsure (1)..(940): unsure at all n locations
gatctccagctctatacgactactatagggaagctggtaccctcaggtaccggtccgaattcccggtcaccacaaacctcttcttcagtctgatagagatctcacgtttcaaacaacaagaatggcgttccctaaggtatacttcgacatgaccatcgacggccagcccgcgggaaggatcgtgatggagctgtacaccgataagactcccaggactgccgagaatttcagagctctctgcaccggagagaaaggtgttggcggtaccggaaaaccccttcacttcaagggatctaagtttcaccgtgtgatccctaacttcatgtgccagggaggagatttcaccgccgggaacggaacaggcggtgagtcgatctacgggagcaagttcgaggacgagaatttcgagaggaagcacaccggaccggggatcctgtcgatggcgaacgccggtgcaaacacgaacggatctcagttcttcatctgcaccgtgaagaccgattggcttgatgggaagcacgtggtgtttgggcaggtcgtggaaggcttagacgtggtaaaggccatcgagaaggttggatcatcatctggaaagccgacgaagcctgtggttgttgccgattgtggtcagctctcttaggatcttcctatcatcatccttaatttagcatcatcgtcgtcattgtggtgtctctttatgcttttgcttttgttatggagtctttttaaaatttgtagtcataagtttggtgtgtgttctcatgggaacatatataaacttgcccctttaatattaactaccagaaataaggaatgagcactcttttatcatatctaatttacgttaccaaatttcatcaaaaaaaaaaaaaaagnnnnnnnnnnnnnnnnnnnnnnnnnnnnnnnnnnnnnnnnnnnnnnnnnnnnnnnnnnnnnnnnn

SEQ ID NO: 117750 - DNA, 1156 bp, Arabidopsis thaliana
  unsure (1)..(1156): unsure at all n locations
tgatctccnnnnnnnnnnnnnnnnnnnnnnnnnnnnnnnnnnnnnnnnnnnnnnnnnnnnnnnnnnnnnnnnnnnnnnccacgcggtccgcgtatctgcaaaactaaagactgttgtctaaagcgaaccaacaaaaagtcttcatctttaatcattcaatggcttcttcgtcttctatgcagatggttcacacttcccgctccattgcccagattgggttcggtgttaagtcgcaattagtttctgcaaatcgaacaactcaatcagtttgctttggagctcgttcctctggaattgcattatcttcgagattgcactatgcatcacccattaagcaattttctggggtttatgcgaccaccaagcatcagagaaccgcttgtgttaaatccatggctgctgaggaagaagaagtaatcgaacctcaagctaaagtgacaaacaaggtttactttgatgtggaaattggaggtgaagttgctggcagaattgtgatgggtctctttggagaagttgtgcctaaaaccgttgaaaacttccgtgccttgtgtactggtgagaagaaatacgggtacaagggttcctctttccatcgtattattaaggatttcatgatccaaggaggtgatttcaccgagggaaatggtactggaggtattagtatttacggtgccaagttcgaagatgaaaacttcaccctgaagcatactggacctggaatcttgagcatggcaaacgctggtcctaatactaatggaagccagtttttcatttgtaccgtcaagacttcatggttagataacaagcatgtcgtgtttggacaagtaattgaaggtatgaagcttgttaggactcttgagtctcaagagactcgcgctttcgatgttcccaagaaaggttgtagaatctatgcctgcggagagctcccgttagatgcttgataatcactattgaccgatgcattgtctttgccatctttgttctgttttttgctattatgactattgaggaatccaaaccatcaaaaagccaaagattttcaaattctggtcttttanntattatatattttcaaactcagcttcattctctattcttgtccatttgtttgtttgtttgtagcctcttcaaactcggataaaaacaannagttttt

SEQ ID NO: 117751 - DNA, 806 bp, Arabidopsis thaliana
  unsure (1)..(806): unsure at all n locations
cgtaagacacaagttttctatatcaggtttgtttagaagctcattcgtcctgccgaggtgggtaagccatagttgcatgacactatcgttctgggtgtcttgatgcaatttcagttccagctcacatagcaatttgggtatcgccacaagataaaaccgcttgtaatcatgctctgagagagagtattgacctcagttaagtgccacaaggttccttatgtggaattgagtcaagtcttgcaaattgtaaggtctctttgagagtgggcctaaaccgttaaacttcgtccttggtactgtagaaaaacacgggcaagggtcctcttccatcgaatattaggattcatgatcaagaggtgtttcccgaggaaatgtactgagtattagtattccgtgcaagtcgaaataaacttcccctgagcatctgacctgatctagcatgcaacgtggtctatattatgaagcagttttattggccgcaagactcatggtagatacaagcatgtcggtttggcaagtaatgaaggtataagcttgtaggactcngagtctaagagacttgnctttcgatgtcccaagaaaggtgtagaatctatgcctgcggagagctcccgttagatgcttgataatcactattgaccgatgcattgtctttgccatctttgttctgttttgtgctactatgactaatgaggaatcctaaccatcaaaaagccaaagatttcaaaaaaaaaaaaaaagatttattatatatttcggatacatgagttataagttcttttaatcgatgtgggattcttattnnn

SEQ ID NO: 117752 - DNA, 960 bp, Arabidopsis thaliana
  unsure (1)..(960): unsure at all n locations
cgnnnnnnnnnnnnnnnnnnnnnnnnnnnnnnnnnnnnnnnnnnnnnnnnnnnnnnnnnnnnnnnnnnnnccacgcgtccgattatactcatgatgacttttgttaattataaaaactaatgatgctaataaccaaaatcaagagttgataaaggaagtcacgtttggagattctgtctatagtgtttcgctggaggcgttgaaacagccctctttaacagctcacttcgtttcacattcctaaattcctctcaatcttcttcttacttaacttattatataagtctctgtttctctctgacaaaaatattccaccacaaaaaaaaatggctcaattcttagagaaggcaacttcggctctcagcgaagccaaagaatccgttacaagcaccgctgaatccgtcacggcttctctcactgatgctgagaaaaccgttaaccaaaccgccaggagcactctaactgacgccgagacaaccgttgcagcatctgttgaaacggtcaagaccgaggctgcagccgcaccagacaaagcgtctggtgtgtctacacaggctaaggatgcagtggacaaagctttttctagaggtatagaaggagccaaatctttgcttcaaactttcgaagcgaagagcagcgatatttcctcaaagcttgttggaggtgttaccaatcttgtgagtggagcatcgagcagcaccgtggcaaaccgagaccttccagtatctacagacaaccagcctctgctagcgtctggtgaaacgacgccgtggtggaagaattgttgtggagttcttgatcttttcaagaaagatacttaagttaaaaagatcaaaaaaattgacaaattaaccggntttcacgggatgangnaacagagcactnggaggaggaagacccttatcccttttgattatttanttccctcccttttngntttttnatttnagnttgnngcna

SEQ ID NO: 117753 - DNA, 463 bp, Arabidopsis thaliana
tttttctttggcaaactcgatttcgcctagcttcttctgagcatccgccgcttccgtctacagaatggattctcaaatcaaacacgccgtggtcgtgaaggtcatgggtaggactggttctcgtggtcaggtcactcaggttagagtcaaattcactgattcagaccgtttcatcatgaggaacgtgaaaggacccgtcagagaaggagatgtcctcactctcctcgagtccgagagagaagctagaagactccgttgattccaccatatcccaattctctttcaaaagtcttaccaagatttacattttgatggtctcttgtttcttggcattgtagtcaagttctcttttctttttctactgctttgttttaattacttgaggttttgttaaggccatgggtggaatcctggaatgaatcttttatgacgcaatgaaaatgtgccatcagtaatttcaatc

SEQ ID NO: 117754 - DNA, 1631 bp, Arabidopsis thaliana
  unsure (1)..(1631): unsure at all n locations
ttgaactcatttttaagcaaactttgttttgttttgtttttttattatgattttccacgngtacacttaatcatataccaatgaggcattggttactaccaaaggatacaaaatctttccttttgaaagaaagaaatttcctacggggcgtcctcatcgttggagcttagaagccgtcggcacaagaagaagaagaagaagaatgtctcacaggaagtttgagcacccaagacatggttctcttggtttccttccaaggaagagagctaaccgtcacagaggaaaggtgaaggcgttccctaaggatgaccaaaccaagccttgcaagttcacagctttcatgggttacaaagctggtatgactcacattgtcagagaagtggagaaacctggatccaagcttcacaagaaggagacatgtgaggctgttaccatcattgagacacctgctatggtggttgttggagttgttgcctatgtgaagactcctagaggtttgaggtctttgaacactgtctgggcacagcatttgagtgaggaggtcaggagaaggttctacaagaactgggctaagtctaagaagaaggctttcactgggtacgctaagcagtatgacagtgaggatggcaagaagggtattcaggctcagcttgagaagatgaagaagtacgctactgtcatccgtgttttggctcacactcagatcaggaagatgaagggattgaagcagaagaaggctcacatgatggagatccagatcaatggtggtaccattgcccagaaggttgactttgcctacagtttctttgagaagcagatcccaattgaagctgtcttccagaaggatgaaatgattgatatcattggtgtgaccaagggtaagggttatgaaggtgttgttactcgttggggtgttacccgtcttcctcgtaagactcacagaggtctgcgtaaggttgcttgtattggtgcgtggcatcctgctagagtgtcctacactgttgctagggctggtcagaacggttaccatcaccgtactgagcttaacaagaagatttacaggttgggtaaggttggtactgaggcacacacagccatgactgaatatgacaggactgagaaggatgtgactccaatgggaggcttcccacactacggtattgtgaaggatgactacttgatgattaaggggtgctgtgttggtcccaagaagagagttgtaactctcagacagtcacttctcactcagacttcccgtcttgccttggaggagatcaaactcaagtttattgacaccgcctccatttttggacatggtcgcttccagacctcccttgagaagatgaggttttacaaccgtgtcacgaagtaagagttgttttatcacaattcttcttagaaagtttcatgtttggttatctgttgctacttatctcagagatgttatcctttaaacaatgttatggagttttcttttgcttttagtttgttacttttttggaagttaaaacgatttgcttctcaagttttgagactttgatgtgttctttatcatttatgaaaaaccaacctggagcatnnnnnnnnnnnnnnnnnnnnnnnnnnnnnnnnnnnnnnnnnnnnnnnnnnnn

SEQ ID NO: 117755 - DNA, 881 bp, Arabidopsis thaliana
  unsure (1)..(881): unsure at all n locations
ctttgaacactgtctgggcacagaaggttgactttgcctacagtttctttgagaagcagatcccaattgaagctgtcttccagaaggatgaaatgattganatcattggtgtgaccaagggtaagggttatgaaggtgttgttacccgttggggtgttacccgtcttcctcgtaagactcacagaggtctgcgtaaggttgcttgtatcggtgcgtggcatcctgctagagtgtcctacactgttgctagggctggtcagaacggttaccatcaaccgtacctgagcttaacaaggagntttacaggttgggcaaaaggttgggtaccttagggcacacacttgccatgcctgaatattgccagggctttgaaaggatttgactcccaatggggggcttcccccactccgggatttttgaagggtggccttcttgatgggttaaggggggccttgtgttgggcccaagaagaggggttgtaaccctcaggcagtcccttctcactcagacttcccgtcttgccttggaggagatcaaactcaagtttattgacaccgcctccatttttggacatggtcgcttccagacctcccttgagaagatgaggttttacaaccgtgtcacgaagtaagagttgttttatcacaattcttcttagaaagtttcatgtttggttatctgttgctacttatctcagagatgttatcctttaaacaatgttatggagttttcttttgcttttagtttgttacttttttggaagttaaaacgatttgcttctccaaaaaaaaaaaaaaaaaaaacaaagggcggccgctctagaggatccaagcttacgtacgcgtgcatgcgacgtcaagactcttctatagtggtaccta

SEQ ID NO: 117756 - DNA, 550 bp, Arabidopsis thaliana
ttctctgtgattgattacattgaactctttttaagcaaactttgttttgttttgtttttttattatgattttccacgatacacttaatcatataccaatgaggcattggttactaccaaaggatacaaaatctttccttttgaaagaaagaaattttctaaggtatgtatatatgagagagaataaagaacatagtcaaaccatcatctgaacaccaagttgtggcagctcttgtcacacgggtatgggcaatcgactaactatcacttccgctctatcgaaataccaatctcctacagctattgccaccgcctttttcctgataacaggaggatcatcggcaaaccaagtatcttgtctctcggtttggcagtgagcaaagcaagaattgatgaacaatccattctgtctggacattgagaagcccttgactactctaagcatctgttccctgaatccttgcaagaatctcaactgtgcaggagtacattttccatggtttagtctgcagtcatgccaaaatccactaggatcagcttatgttggagct

SEQ ID NO: 117757 - DNA, 1329 bp, Arabidopsis thaliana
acccacgcgtccggaaaaatcaagaaaatgtctgaatcaaggagcttagcctcaccaccaatgttgatgattcttctcagccttgtaatagcttccttcttcaaccacacagctggacaaatcggagtatgctacgggatgctaggcgataccttgccaagtccatcggacgttgtggctctttacaaacaacaaaacatccagcgaatgcggctctacggccctgacccaggcgctcttgccgctctccgtggctctgacatcgagctcatcctcgacgttcccagttcagatcttgaacgtctcgcctccagtcaaacggaggccgacaagtgggttcaagaaaacgttcagagctacagagatggtgtcagattccggtacatcaacgttggaaatgaggtgaaaccctcagttggggggtttctcttacaagcaatgcagaacatcgagaacgcggtttctggagcagggcttgaagtcaaggtctcaacagctatagccactgacaccaccactgatacgtctcctccgtctcaaggaaggttcagggatgagtataagagctttctcgaaccagtgataggtttcttggcaagcaagcaatctcccttgctcgtgaatctctacccttacttcagctacatgggagacacggccaacatccatctagactacgctctgttcaccgcccagtccactgttgataacgatccagggtactcataccaaaacctattcgacgcaaatctcgactcggtttatgcagcattggagaaatcagggggcggatcgttggaaatcgtggtgtcggagaccggttggcccacagagggagcagtcgggacgagtgtggaaaacgcaaagacttatgttaacaatttgatacaacatgtgaagaatggatcaccgagaaggccagggaaagctatagagacttatatattcgctatgttcgatgagaataagaaggaaccaacgtatgagaagttttggggactgtttcatccagatcgacagtctaagtatgaagttaatttcaactaatccttagagacttgtgggctttttatgtaagcgtatttaaaaattgggaacttgttgtagtaataaggaataattaatgcgctttcatgcgtgtagtatgttgttatttttaaggttataaatgaagctgcaagcataaataaggaaaaaaattagcatgggcctataggcccaataattaaacaagcttgcttagggaatgtgagacccaaaattttgtggaattcttgttagcaaaatgtttttgagtatgcatgatgcgatgagtcatcttggcgaact

SEQ ID NO: 117758 - DNA, 979 bp, Arabidopsis thaliana
ggcacgagctcgcgcgacacacacaaaaaacccataaaaaaatatggcaaatatctccagtattcacattctcttcctcgtgttcatcacaagcggcattgctgttatggccacagacttcactctaaggaacaattgccctaccaccgtctgggccggaactctcgccggtcaaggacccaagctcggcgatggaggatttgaattgactccaggtgcttcccgacagctcacggctcctgcaggatggtcaggccggttctgggctcgtacaggctgcaactttgacgcctccggaaacggtagatgtgtaaccggagactgtggcggtctaagatgtaacggcggcggagttcctcccgtcactctggctgaattcactctagtaggcgatggcggcaaagatttctacgatgtgagcctcgtagatggttacaatgtcaagctggggataagaccatccggaggatcgggagattgcaaatacgcaggctgtgtctctgacctcaacgcggcttgccccgacatgcttaaggtcatggatcagaacaatgtcgtggcctgcaagagtgcctgtgagaggtttaatacggatcaatattgctgccgtggagctaacgataagccggaaacttgtcctcccacggactactcgaggattttcaagaacgcttgccctgacgcctatagctacgcttatgacgacgaaacgagcaccttcacttgtaccggagctaactacgaaatcactttctgcccttaaaaaccgaagcttcgagttagatacagtcgggtttaattatctctcacgtttcttttgcttattatgtacggaaagataaataaggaaagctgatgactatgaatcatcgtcttccacttttaagcttttttagtgagtattagtcagttgttacactcagctgatttgtttacaaagaaataaaacaaaatgattgatctaaaaaaaaaaaaaaaa

SEQ ID NO: 117759 - DNA, 1309 bp, Arabidopsis thaliana
ttcctcgccgccgcctcctactctctctttctctctaaattgctcaattctctcggccacagacctagacaaggatggtgactaaagcagaaaaacaattcgccaaaaatttcaacatagacgatctccctgacgtccctgccggacttcctccacatctcaaagcccagcaaactcgtgtcgtctctaaaaacaacgctcctgctcatactgcgagtgccatttactcgggtacctatgtttcttctacggaagaggacgacaatgtgaagctaggaaacttctatgataacttcaaagttgatgtggttagtctcacaaagacagatatggaatttgatatgattggtattgatgcagcgtttgccaatgcattccgaaggatccttatagctgaggttccttcaatggctattgaaaaagtgttgatagcgtacaacacatcggttattatagacgaagttcttgctcacaggatgggtcttattccaattgccgcagatccacgactttttgagtatttatccgaacatgatcaggcgaatgaaaagaacaacattgttttcaaactccatgtgaaatgtccgaaaaatagaccacgtcttaaagttttaacgagtgatttaaaatggttaccaaatggaagtgagcttctgagagaatcggaaaataaaacctcaaagccaaaaacttacacttcattcagttgcagccaagattcattacctgaatttgctaataatcctatcactccatgcgacctcgatatcttgatagcaaaactcgcccctggtcaggaaatcgagctcgaagctcatgcggttaagggcattggtaaaacacatgcaaagtggtctccagtagggactgcttggtatagaatgcatcctgaggtggttctacgtggggaagttgaggatgaacttgctgaacgacttgtaaacgtctgcccacagaatgttttcgacattgaagacatgggaaaaggtaagaaaagggcaacagtagcgcagccacgtaagtgcacattgtgtaaggaatgcgtaagagacgatgatttggtagaccatgtggatcttggcagtgttaagaaccattttatatttaacattgagtccaccggatcactgcctccagaggttctcttcactgaagctgtgaagatattggaagctaaatgtgaagctataaccgacttttgagttctggtttagttcaattttgaattgtctgtctatcaatgtttctcctcctattgataaattaccaacaaacaacattgacatatttatttatacggttgttgttc

SEQ ID NO: 117760 - DNA, 768 bp, Arabidopsis thaliana
  unsure (1)..(768): unsure at all n locations
cccacgcgtccgcccacgcgtccgcggacgcgtggggcactatcgtctcctacctcctttgcctacaagctttcacgcgggagctcaacatcagccatggcggaacagactgagaaagcttttcttaagcagcctaaggtcttccttagctcgaagaaatctggaaagggaaagagacctggaaaaggtggaaaccgtttctggaagaacattggtttgggcttcaagactcctcgtgaagccattgatggagcttacgttgacaagaaatgccccttcactggaactgtttccattagaggtcgtatcttagctggtacttgccacagtgcgaaaatgcagaggaccattatcgtgcgaagggattaccttcactttgtgaagaagtatcagaggtatgagaagaggcattcaaacattccggctcatgtctcaccatgcttccgtgttaaggaaggagaccatatcatcattggccaatgcaggccattgtcgaagacagtgaggttcaatgtgttgaaggtgataccagctgggtcttcttcttcatttggaaagaaggcattcactggaatgtaagctgctgctgttgatgatgttagtttatgtttctggatagagctgaactattatgttttatggtgattttcttattgaatttttccgacattatattttgttttactctgctgaatctttttcatcccaatctgtgcctctgtttaagatctgnnnnnnnnnnnnnnnnnnnnnnnnnnnnnnnnnnnn

SEQ ID NO: 117761 - DNA, 709 bp, Arabidopsis thaliana
ttttttttttgcctctcgcattttcttcatcctttttgcctcagagctccgtggagagcagcaatcagtagccatggctgagcagactgagaaagcttttcttaagcaacccaaggtcttccttagctcgaagatatctgggaaaggaaagagacctggtaaaggtggaaaccgtttctggaagaacattggtttgggtttcaagactcctcgtgaagccattgatggagcttacattgacagtaaatgtccattcactggaaccgtttctatcagaggacgtatcttagctggtacttgccacagtgccaagatgcagagaaccatcattgttcgtaggaattaccttcactttgtgaagaagtatcaacgatatgagaagagacattccaacatccctgcccatgtctcaccgtgtttccgtgtcaaggaaggtgaccatgtcatcattggccaatgcaggccgttgtcgaagacggttaggttcaatgtgctgaaggtgattccagcgggtgcatctgcctttggtaaaaaggccctcactggagtgtaagagttttgaaagtcatgggagattttggtttgattttgatttcggaatgttttaatgttttgtttaaagatcccttttgttggagactttgattatcacagacgaaataccaatctacgcactttcgttgaacaactctactatattcaactcttg

SEQ ID NO: 117762 - DNA, 698 bp, Arabidopsis thaliana
aattctccggggtcagacccacagcagtccggatctcctgctctcctttgcctacaagctttcacgcgggagctcaacatcagccatggcggaacagactgagaaagcttttcttaagcagcctaaggtcttccttagctcgaagaaatctggaaagggaaagagaattagaggtcgtatcttagctggtacttgccacagtgcgaaaatgcagaggaccattatcgtgcgaagggattaccttcactttgtgaagaagtatcagaggtatgagaagaggcattcaaacattccggctcatgtctcaccatgcttccgtgttaaggaaggagaccatatcatcattggccaatgcaggccattgtcgaagacagtgaggttcaatgtgttgaaggtgataccacctggggcttcttcttcatttggaaagaaggcattcactggaatgtaagctgctgctggtgatgatgttagtttatgtttctggatagagctggactattatgttttatggggaattatgcttatttgaattttcgcccacacatataaaaatttggtttgttgccttcttgttgaaattcttttttttgattcccccaatacctggaggccgtcttgcgccctacaaaatcctggaattttggtggctttcgggttccccatctttaaaacaagggggccgggtcccccctttc

SEQ ID NO: 117763 - DNA, 1333 bp, Arabidopsis thaliana
  unsure (1)..(1333): unsure at all n locations
nnnnnnnnnnnnnnnnnnnnnnnnnnnnnnnnnnnnnnnnnnnnnnnnnnnnnnnnnnnnnnnnnnnnnnnnnnnnnnnnnnnccacgcgtccgcccacgcgtccgcttttctttttcaccgtattctcttttagtcctcgattctctacgcgtttcagcgtcaagtcttctagatctctaaagccttcgtgctcgccaatataaatctctgagatcggtcccgtaaaatcggattcgcgtcgtttttgagtaaaaaaaatggcgcaacaatcgttgatctacagtttcgtcgctcgtggtaccgttatcctcgttgagttcacagatttcaaaggcaatttcacatcaatcgctgctcagtgccttcagaagcttccttcttctaacaacaagtttacctacaactgcgatggtcacacgttcaattacctcgtcgaaaatggattcacctattgtgttgttgcagttgattctgctgggaggcagattcctatggctttcttggaacgagttaaggaggatttcaacaagagatatggtggtggaaaggctgcaactgctcaagcaaacagcttgaataaagaatttgggtcgaaactgaaagagcatatgcagtattgcatggatcatcctgatgagattagcaagcttgctaaggttaaagctcaagtgtctgaagttaaaggtgttatgatggaaaacattgagaaggttcttgaccgtggtgagaagattgagcttttggttgacaaaacagaaaaccttcgctcacaggcgcaagattttagaacacaaggaactcaaatgagaagaaagatgtggtttcagaacatgaagataaagctcattgtccttgcaattatcattgccttgattctcatcatcatcctctcaatttgtgggggattcaactgcggtaaataagtctggaacatttcttcccggcgttatcgactgcgctctgtgcttcccaagatctctgagaatatcttcattcagttcgttgtgctacctttttgttttgtttttgtttttgtgatttctatattctcatactatatgtttcttcttagattgtacttcttgaaatttgttttgtataggctatatatattatacatatatgtatgcatgttcgacaatctgcaatgttgctattgctggtactgacactaattcttgcaaaccaatatttggacgatacttgtacttggcaatttcctgttaaaaaaaaaaaaaaaaaaaaaagnnnnnnnnnnnnnnnnnnnnnnnnnnnnnnnnnnnnnnnnnnnnnnnnnnnnnnnnnnnnnnnnnnnnnnnnnnnnnnnncct

SEQ ID NO: 117764 - DNA, 1235 bp, Arabidopsis thaliana
  unsure (1)..(1235): unsure at all n locations
aagtcttctagatctgtagtttttttccgcgaccgcccaaaaaattctctgatcagacggtcgattggatcggagatttaaggtaaagaaaaaatggcgcaacaatcgttgatctacagtttcgtagctcgcggcacggtgatcctcgttgagttcactgatttcaaaggtaatttcacctcaatcgctgctcagtgcctccagaagcttccgtcttcgaacaacaagttcacctacaactgcgacggtcataccttcaattaccttgtcgaagatggattcacctattgtgttgttgcggttgattctgctgggaggcaaattcccatgtcctttttggaaagagtaaaagaagattttaacaagcgatatggtggtggaaaggctgcaactgctcaagcaaacagcttgaataaggagtttggctctaaactgaaagagcatatgcagtattgcatggatcatcctgatgagattagcaagcttgctaaggtgaaggcgcaagtgtcagaagttaagggtgtaatgatggaaaacattgagaaggttcttgaccgtggtgagaaaattgagcttttggtggacaaaaccgaaaatcttcgctcacaggcacaagatttcagaacaacaggaacgcagatgagaagaaagatgtggcttcagaacatgaagataaaactcatagtgctcgccatcattatcgcactgattctcatcatcgtgctctcagtttgccatgggtttaagtgttaagcccagaaaattcaaaacttctgagatctttctcactcggtacatcgtagtgccttctcttttattgttcgatcttcaatctaatgtttctgcttgaattggttttgtatagatagacatatatgtatgctactcatttgctatattgcttgcatctgatgacattgatcccttgcgaaccagtcagtacttgacaagagatccgaaactattaaatgattttgttgactgaagattgcattgtggtggtgatgataaaaatttgagattgtattgacgattatacggcgtgatgtgtgttggttactttaaatttagataagagtagtgccctctctatatcgttactagggatggtagtacatatatatacgtacgtcatattccgacccaaaaaaaaaaaaaaaaaaaaaaagnnnnnnnnnnnnnnnnnnnnnnnnnnnnnnnnnnnnnnnnnnnnnnnnnnnnnnnnnnnnnnnnnt

SEQ ID NO: 117765 - DNA, 1336 bp, Arabidopsis thaliana
  unsure (1)..(1336): unsure at all n locations
tacgactcactatagggaaagccggtacgcctgcaggtaccggtccggaattcccgggtcgacccacgcgtccgctctcgctccctttcaatttctccttgtattttggatctttcttacttccgtacacacaaacccaaacaaacaacaaaaaactgttgtctctctctctctttggtggaattcaaaaaatcgaattcgtggttgcgtttggtttttcttccttcttcgggtcacgagaacaatgggacaacaaaatttgatctacagcttcgtcgctcgtggtacggtgattctcgtcgagtatacagaattcaaaggaaatttcactgccgtcgctgcacagtgtctccaaaagcttccttcttcgaataacaagtttacatacaattgcgacggacacacgttcaattacctcgtcgagaatggcttcacgtattgtgttgctgctgttgaatctgttgggaggcagattcctatggctttcttggagagaggttaggaagatttcaacaagagatatggtgtggtaaggctcccactgctcaagccaacagcttaaccagagagtttgggtcgaaactgaaggagcacatcaggtactgtgtggatcatcctgacgagattagcaacttgcccaaagttaaggctcaggttactgaggtgaagggtgttatgatgaagaacattgagaaggtccttgaccgtggtgagaaaattgagcttctagttgacaaaactgagaaccttcgttcacaggcacaagaattcagaccccaaggaccaanaataagaagaaagatgtggtttgaaaacatgaagattaagctcatagtcctcggtatcatcattaccttgattctcatcatcatcctctctgttgcgggggattcaagtgtacctaaaacttgaaagaataagaagaatacgttgcgagattaccagccccatattgctctactaagctcattggaacttctcccggtatatgcccttctttatcttcctgtgttcgaggtcactctttacatatatacttttccatttgattttgttaggaacgaaatatgataacttagttctgagaaatgatacttttagggtatgcttgtctgaaatagatgtaagctgctggggtttgcttatatagaaattaggtctttctgctctcatggtgatgatatgttttctgtaatctaaaatctaatgttgagtttttgctgttttcttcaatctctttactttttattaaaaaaaaaaaaaaaaaaagggcggccgctctagaggatccaagcttacgtacgcgtgcaggcgacgtcatagactcttctatagt

SEQ ID NO: 117766 - DNA, 734 bp, Arabidopsis thaliana
  unsure (1)..(734): unsure at all n locations
anaagattggccnactaaggccttncagtnnnctggccccccngngggttcccacctccctagggttaacncccaagttccngaagttaaagggtttnatgntggaaacccnttggggagggttccttgncccttgttgagaaggattngcncttttggntgnccaaaaccggaaacccttcggttcacaggccgcaaggattttaggaccaccagggaacctccaaatgggggaaggaaaggatgtggttttccaggaccatggaggataaagctcattggccctggcaattatccattgcccttggattctcatcatcatccctctcaatttgtgggggattcaactgcggtaaataagtctggaacatttcttcccggcgttatcgactgcgctctgtgcttcccaagatctctgagaatatcttcattcagttcgttgtgctacctttttgttttgtttttgtttttgtgatttctatattctcatactatatgtttcttcttagattgtacttcttgaaatttgttttgtataggctatatatattatacatatatgtatgcatgttcgacaatctgcaatgttgctattgctggtactgacactaattcttgcaaacccaatatttggacgaaaaaaaaaaaaaaaaaaaaagnnnnnnnnnnnnnnnnnnnnnnnnnnnnnnnnnnnnnnnnnnnnnnnnnnnnnnnnnnnnnnnnnnngtacctaa

SEQ ID NO: 117767 - DNA, 1408 bp, Arabidopsis thaliana
  unsure (1)..(1408): unsure at all n locations
ccaaagaccaaatctcatttcttcttcttcttctttttccacattttctgattagcagatcaaatgatgcttgttcgatctgtatttcgatctcagttgcgaccctctgtctcgggtggtctgcaatctgcttcttgctattcttcattatctgctgcttcagctgaagctgagaggactatcagagaaggtcccagaaacgattggagtagagatgaaatcaagtctgtttatgattctcctcttcttgacctcctcttccatggagctcaggttcatagacatgttcataacttcagggaggtacaacaatgtaccctcctctccataaagactggtggctgtagtgaagactgttcatattgtcctcagtcttcgagatatagcactggagttaaggcacaaagactcatgtctaaggacgctgtcattgatgctgctaagaaggcaaaagaagctgggagcacacgtttttgcatgggtgctgcttggcgagatacaattggacggaaaaccaacttcagccagattcttgaatacatcaaagaaataagaggcatggggatggaagtttgctgcaccttaggcatgattgagaaacaacaagcactagagctaaagaaggctggcctcactgcttataaccacaatcttgatacttcaagagagtactacccaaacgtcatcactactagaagttatgacgatcgccttgaaactcttagccatgttcgtgatgctggaatcaacgtttgttcaggaggaatcatagggcttggtgaggcagaggaagacagaataggtttattacacacgctggcaacacttccttctcaccctgagagtgttcccattaatgctctacttgcagtgaaaggcactcctcttgaagaccagaagccagttgagatatgggagatgatcaggatgattggaaccgcacgtattgtaatgccaaaagcgatggtgagactgtctgctggtagagtccggttctcaatgtccgaacaagctctctgtttccttgctggtgcaaactctatcttcaccggagagaagcttttaaccacaccaaacaatgattttgacgctgaccagctcatgttcaagacattaggcctcattcctaaaccgccaagtttctctgaagatgattctgaatcagaaaactgcgagaaagttgcttccgcttctcactaatatcattatccactttttttttttgtttggagtcgggacactatagagcagtcccttttactatgtagcatggtttgacgattttgtgatatcatttttcgttaatcgttattcgaagatgtctagatttctcatctgannnnnnnnnnnnnnnnnnnnnnnnnnnnnnnnnnnnnnnnnnnnnnnnnnnnnnnnnnnnnnnnnnnnn

SEQ ID NO: 117768 - DNA, 1447 bp, Arabidopsis thaliana
gagacagacacggaggatggcgaatcagagtacagagacgaatcaaccgtcgaatatgcagacttacggtgtaccgatttacgccgccgactggattccggaggtagatgtcagatccaaaatcataatggatccggagaaatctgaagatgatgatgagtcgtcttcttcttcttcttcttcccggagctgcatcgttttgtccggcggaggcggagagggacgaagtggaatctctaatgtcatattaatatgccgtgttgatctaaacaccaattctctctcggaacaacctctgggtaggcttgtggttggctctgatctgccttatcggatggctgttcatcctcgggaaggtggtcttatttgcgcgttgcctaacagttgcaaactgtttcattgggaagacattatgagccgagaggataatcaggctggtgagtcggaggaagtgattaaagagttaagagatgttggacaacagttggctctggcgtttaatccggaggggtctgttcttgctgctggtgcggaggatgggactttgagggtttttaaatggcctagcatgaatactttacttaatgagtcccaggctcattcttcagttaaatgccttactttcagcgaaagtggtcaatttcttgtatctcttggcggtccagtttgtcgagtttgggacgtgaatgcttctgctgctgttgccagtctatcaaaagagaaggacgagatgtttgcctcctgtagattctctgtagacagtgcaggcaatgaagttctttacattgctgcaaacactgaacgtggtgggagtattataacatgtgatacaaaattatggaaaagaaaatggtcgaagcctataaaaaagaactctatatcagcttttaatgtctcagctgatgggaagcttcttgcaataggaacccttgaaggagatgttttaatacttgaatcgacaagaatgcaaactatccaaatcgtcaagaaagcgcatcttggtttggtcacagcactgactttctctcctgattcaaggggattagtgtcggtatcttttgactcaagggcaaggctgaccatgattgaacaaaagggggacaaacctggagtaaggtggtggctactggttttattgatagtgttgctatacgtggttgcatactattatatgaaggcaaagggtatcataccttagaaaggcctttaagtgaccacacaggacgatacagcggaatggcttgtaaccaacatatcatacgattacgctttgagttagctttttatgtttgacatctaccagaaacttgcttgctttatatcaataaaacatgtaaactaacactaaaacagcaaaagttacaatttgtttcctcttttttttttttgtagacatagtaaactagaaaactattatcatatgatggatcagtaagactctttcttc

SEQ ID NO: 117769 - DNA, 370 bp, Arabidopsis thaliana
aatgaagttctttacattgctgcaaacactggtaaacttatattctgacattacaagaatattgaactataaatccttccttcttgtcactgctaacgattgaggattgatttttttgcgtagaacgtggtgggagtattataacatgtgatacaaaattatggaaaagaaaatggtcgaagcctataaaaaagaactctatatcagcttttaatgtctcagctgatgggaagcttcttgcaatgtaagtttatctgtcttctcacttttgggaccaacagataaggataatactgtttttggtagtcataatattttcttaatgcagaggaacccttgaaggagatgttttaatacttgaatcgacaag

SEQ ID NO: 117770 - DNA, 1701 bp, Arabidopsis thaliana
cgtccgaataataaccaaaaaagaaaaaagaaaaattccaacaagaaaaaaaaaagaaaaagaaagttgattcttcgcttaggcttgaaatctctccaatccaaatctcaaattaaccttccatcgtcatctctttccctttttttttcccactttctttgcgaatcgcgagatctcggaatcgcatccttgattttgggatactgttttttttttttttaatcttgtttcattttcacgtgaaattcttagctgctagaactggacttgaatttcaacgagaattttggagattttttttttgtttgggtttttcctttctgttttgtgtgtttggaattagggttgtcgagcgagaatggacaagtacgagctggtgaaagacataggtgctgggaattttggagttgccaggctcatgaaggtcaaaaactctaaggaacttgttgccatgaagtacatcgagcgtggtcctaagattgatgagaatgtggcaagagagatcattaatcacagatcacttcgccatccgaatataatccggttcaaggaggtggtgttgacgccaacccatcttgccattgccatggaatatgctgctggtggtgaactattcgagcgtatatgcagtgctggaagatttagtgaggatgaggcgagatatttcttccagcagcttatatcaggtgttagctattgccatgctatgcaaatatgccatagagatctgaagctcgagaatacgctcttggatggaagtcctgctccacgtctgaaaatctgtgattttggttattccaagtcctctctgctgcactctaggcccaaatcaacagttggaactccagcatatattgcacctgaggtcctttctcgaagagaatatgatggcaagatggctgatgtatggtcttgtggtgtgactctttatgtcatgctggttggagcatacccatttgaagaccaggaagaccccaagaacttcaggaaaacaatacaaaaaataatggctgtccagtacaagatcccggactacgtccatatctcacaggattgtaaaaatctcctttcccgtatatttgtcgccaattcactcaagaggatcaccattgcagaaatcaagaaacattcatggttcctaaagaatttgccaagggaactcacagagacagctcaagctgcatatttcaagaaagagaacccaaccttctcccttcagaccgttgaagagatcatgaagatagtggctgacgccaaaacaccgcctcctgtttcccgatccatcggaggttttggctggggaggaaatggggatgcagatggaaaagaggaagatgcagaagacgtggaggaggaagaggaggaggtggaagaagaggaagacgatgaggatgaatacgataagactgtaaaggaagtacacgcaagtggagaagtgagaataagttgatattttggtttttggtctgtgtaagaaagaagtcgtcgttggtttgttgaaactgaaaagtctctgttctcgtgtttgcctttacaatgctttggctaaggttttggttctggttttggagattgtaaaatttgcagtataagatgaacaaacagagaggttgatgatgagaatgagtcctttgctacgcatggtactatgaacattgtgacctccaataaatatttttgtaaattagattttattttccg

SEQ ID NO: 117771 - DNA, 1467 bp, Arabidopsis thaliana
tgttttgcacatacacacaaaaataaaaaagactttatatttattaacttttaaatcacacggattagctccggcgaagtatggccgtcgtcttcatcttcttcctccatcatcagatttttccttaaatggaagaaaccaaacgaaactccgatcttctccgttctcgtgttttcctctctggcttttattgctgggattgggaatttctcaccgctctcttgctttttagttgctgattctttttccttcgactttctatttccaatctttcttcttctctttgtgtattagattatttttagttttatttttctgtggtaaaataaaaaaagttcgccggagatgacggctgtgacggcggcgcaaagatcagttccggcgccgtttttaagcaaaacgtatcagctagttgatgatcatagcacagacgacgtcgtttcatggaacgaagaaggaacagcttttgtcgtgtggaaaacagcagagtttgctaaagatcttcttcctcaatacttcaagcataataatttctcaagcttcattcgtcagctcaacacttacggatttcgtaaaactgtaccggataaatgggaatttgcaaacgattatttccggagaggcggggaggatctgttgacggacatacgacggcgtaaatcggtgattgcttcaacggcggggaaatgtgttgttgttggttcgccttctgagtctaattctggtggtggtgatgatcacggttcaagctccacgtcatcacccggttcgtcgaagaatcctggttcggtggagaacatggttgctgatttatcaggagagaacgagaagcttaaacgtgaaaacaataacttgagctcggagctcgcggcggcgaagaagcagcgcgatgagctagtgacgttcttgacgggtcatctgaaagtaagaccggaacaaatcgataaaatgatcaaaggagggaaatttaaaccggtggagtctgacgaagagagtgagtgcgaaggttgcgacggcggcggaggagcagaggagggggtaggtgaaggattgaaattgtttggggtgtggttgaaaggagagagaaaaaagagggaccgggatgaaaagaattatgtggtgagtgggtcccgtatgacggaaataaagaacgtggactttcacgcgccgttgtggaaaagcagcaaagtctgcaactaaaaaaagagtagaagactgttcaaaccagcgtgtgacacgtcatcgacgacgacgaaaaaaatgatttaaaaaactatttttttccgtaaggaagaaaagttatttttatgttttaaaaaggtgaagaaggtccagaaggatcaacgcaaatatataaatggattttcatgtattatataatttaattagtgtattaagaaaataaaacagatgttgaagttttattgttgcttaatttatgtcttcataatgtaaaaaaaaaaaaaa

SEQ ID NO: 117772 - DNA, 1055 bp, Arabidopsis thaliana
  unsure (1)..(1055): unsure at all n locations
atgatactccnnnnnnnnnnnnnnnnnnnnnnnnnnnnnnnnnnnnnnnnnnnnnnnnnnnnnngtttacaccttcacactccacccgtccgcccacgcgctctctttctttctcagattaatcgctgagaagaagcaaccacctggagacggcggagatggcagggtacagagtggaagatgactacgattacctcttcaaagttgttcttataggcgattctggagttggcaaatccaatctcctttccagattcactaaaaacgagttcaatctagagtctaaatccaccattggcgtcgaattcgccactcgtaccttaaaagtcgatggcaaagtcgttaaagctcagatttgggacactgctggtcaggagaggtaccgtgccatcactagtgcatattaccgtggagccgtgggtgcactcctagtatatgatgtaactcgccgtgcaacatttgagaacgtagatcggtggttaaaggagctcaagaaccacacagatccaaacattgtagtgatgctggttggtaacaaatctgatctccgccacttgctagctgttcctacagaagacgggaagtcctatgcggaacaagaatcgctctgcttcatggaaacatctgcccttgaagctaccaatgtggaggacgcatttgcagaggtgttgacacaaatttatcgcatcacaagcaagaagcaagtggaagctggtgaagatgggaacgcctctgtcccgaaaggtgagaaaatcgaagttaaaaacgatgtctctgcgctgaagaaactcgggtgctgctcaaattgaagcctttttttgttttcactgttgagagagaattataacccccatggtccattgtttgattatgtccttgttttgtaacactatcgacatttgtatgagttttagaccatacactacataatgtttatttaactttatttcaaaaaaaattggtgnnnnnnnnnnnnnnnnnnnnnnnnnnnnnnnnnnnnnnnnnnnnnnnnnnnnnnnnnnnnnnnnnnnnnnnnnnnnnnnnnnnnnnnnnnn

SEQ ID NO: 117773 - DNA, 3103 bp, Arabidopsis thaliana
  unsure (1)..(3103): unsure at all n locations
gcttacgacaacctctcctgctcttcgttttctctctacgacgataaaacccagatttggttcaagcttccataactttaaacccctctcgcgatccaggttgctatcaaatacttgggaggcctcagtattattgaataacacaggctgacaatgagtgtaattgggtttgatttcggaaacgagaattgccttgttgccgttgcaaggcaaagaggtatcgacgtcgtgcttaatgatgagtccaatcgtgagacgcctgctattgtctgcttcggtgacaacgagcgcttcatcggcactgctggagctgcttctaccatgatgaaccccaaaaactccatctctcaaattaagcgcttaattggtcgccagttttccgaccctgagcttcaaagggatatcaaatcctttcccttttctgtcaccgaaggccctgatggctatcctttgatacatgctaattatttgggagagaagcgagcctttaccccgactcaagtcatgggcatgatgttgtctaacctgaaaggtattgccgagaagaatttgaatacagctgttgtcgactgctgtattggtattcctgtttactttaccgacctccagcgtagggctgttctcgatgctgccactattgctggcttgcatcccttgcgcttgatccacgagactacagctacggctttggcatatggtatttataagacagatttgccagagagtgaccagctcaatgttgcattcattgacattggacacgcaagcatgcaagtctgtattgcaggcttcaaaaaaggacagctcaaaatcttgtctcacgctttcgatcgctcccttgggggaagggactttgatgaagttcttttcaatcattttgctgctaagttcaaggacgagtacaagattgacgtctcccagaatgctaaggcttctctcaggctccgtgctacatgcgagaaactgaaaaaggttctaagcgctaatcctctggcaccgttgaatatcgagtgtttgatggatgagaaagatgttaggggtgtcatcaagagggaagagtttgaagagatcagcatcccgattttggagcgtgtaaagaggcctctagagaaagctctctctgatgcaggcctcactgttgaagatgtacatatggttgaggttattggctctggctctcgtgtccctgctatgatcaagattctaactgagttttttggtaaggagcccaggcgtacaatgaatgcaagtgagtgtgtgtcaaggggatgtgccttgcagtgtgccattctcagtccgacctttaaagttcgcgaatttcaggttcatgagagcttccctttctcaatttctctcgcttggaaaggagcagcttctgaagctcaaaatggaggagctgagaaccagcagagcactattgtttttccgaaaggaaatcctattcctagtgtcaaggctctaacattttatcgttctggaacattctctattgatgtgcagtacagtgatgtgaacgatttgcaagcacctcctaaaatcagcacatacacgattggtcccttccagtcatcaaaaggcgagagggcaaagctgaaagtgaaagttagattgaacctgcatggaattgtctctgttgaatcagcaactcttttggaagaggaagaagttgaagtatcggtcacaaaagatcaatcagaggaaactgctaagatggactctgacaaagcttctgctgaggcagctcctgcttctggagactgtgatgtaaacatgcaggacgccaaagacaccagtgatgcaactggtactgacaatggtgttccagagtctgctgagaagccggtgcaaatggaaactgattcaaaggcagaggctccaaagaagaaggtgaagaaaacaaatgtaccactgtcagaattggtctatggtgccttgaaaactgtggaagtcgaaaaggcagtggagaaggaatttgagatggctctgcaagacagagttatggaagagaccaaggaccggaagaatgctgttgagtcttatgtttatgatatgcgaaacaaactgagtgacaaataccaggaatatatcactgactcggagacggaagcattcctggcgaatctgcaggaagtggaggattggttgtatgaagatggggaagatgagaccaaaggtgtttatgttgcgaagctcgaggagctcaagaaggtgggtgaccctgttgaagtgcgttacaaggagtcgttggaaagagggtcggtcattgatcagcttggttactgtattaacagctacagagaggcagctatgtctactgatcccaagtttgatcacattgaattggcagagaagcaaaaggttttgaacgagtgtgtggaagcagaagcatggctgcggggaaagcagcagcagcaggacacgcttcccaagtatgccacaccggctctcttgtcagctgacgttaaaagcaaggcagaggcattggacaagttttgcaggcctataatgaccaaaccaaagccggcggctaaagcagaggcaccacaagccaagggaggtgagcaggcggatgagggcaagagtgagccagagcaaccagcttctgccgaaccaatggagactgagaatcccgcggaaggtagtacctaaatgaatgacgagagcgagatggtgttgtatcgattttgttcttaactctttttgatttacctagtggaacctctttttctggtttcgctattattcccggaaaaaatctatattgttaattcttccttttcgaaaacaatttttaggaagcatcttttttcttattgttccttgtggttttgtttttaatttgaaagtcattttttctgctcctctatatccctattatggagtgtacccggattcgttttatgttcccctgggctgtttttataaacagcaaattaaatgcaatttggttttcttnnnnnnnnnnnnnnnnnnnnnnnnnnnnnnnnnnnnnnnnnnnnnnnnnnnnnnnnnnnnnnnnnnnnnnnnnnnnnnnnnnnnnnnnnnnnnnnnnnnnnnnnnnnnnnnnnnnnnnnnnnnnnnnnnnnnnnnnnnnnnnnnnnnn

SEQ ID NO: 117774 - DNA, 606 bp, Arabidopsis thaliana
  unsure (1)..(606): unsure at all n locations
agatctccagctccctacgactcatatagggaaagctggtacgcctgcaggtaccggtccggaattcccgggtcgacccacgcgtgggcacgattacagatttctcaccttcacccagatttcggtggaagcttccagaacgcgaacccctctcgcgatccaggttgctatcgaacacgtgggacgccccagtactgaagaacacaaagcctaacaatgagtgtagttggttttgattttggaaacgagaattgccttgttgctgttgcaaggcaaagaggtatcgacgtcgtgcttaatgatgagtcaaatcgcgagactccggctatcgtttgctttggtgacaagcagcgcttcatcggtactgctggagctgcttctaccatgatgaaccccaaaaactccatctcacaaatcaagcgcttaattggtcgccagttttccgaccctgagcttcaaagggatatcaaatcccttcccttttctggcactgaaggccctgatgggaacccttggtccaggcaattatttnggnganattangcctttacccgntcaggcatgggatgatgtgccaactgnaaggattnngggaaaattgaaaac

SEQ ID NO: 117775 - DNA, 578 bp, Arabidopsis thaliana
  unsure (1)..(578): unsure at all n locations
cnangggccttttttaaancccccnaggtnnccccttnattnccnnaaaccaaaggttttnacccggttttggaaccaaaaccttgcnccgggnaaaaccnccaccancagnccncgttcccaagtttnccacaccggttttttgncagctgacgtaaaaaaccaagccagagccattggacaagttttgcagccctataatgaccaaaccaaaacccgccgntaaagcagaggcaccacaagccaagggaggtgagcaggcggatgagggcaagagtgagccagagcaaccagcttctgcccgaagcaatggaagactgagaatcccgcggaaggtagtacctaaatgaatgacgagaccgagatggtgttgttgtatcgattttgttttaatttacctagtggaaccactttttgtagtttcgctattatcccccaaacgattctatatttagttctccctttcgacattttttaggaggtatattttttattgtctgttccttgtggtttcattttagtttgaaggtcttgttactttatttttgtttgtctctataatgattgttgtgtgtaaa

SEQ ID NO: 117776 - DNA, 663 bp, Arabidopsis thaliana
  unsure (1)..(663): unsure at all n locations
ctgcggtaccggtccggaattcccgggtcgacccacgcgtccgctctgacaaagcttctgctgaggcagctcctgcttctggagactgtgatgtaaacatgcaggacgccaaagacaccagtgatgcaactggtactgacaatggtgttccagagtctgctgagaagccggtgcaaatggaaactgattcaaaggctgaggctccaaagaagaaggtgaagaaaacaaatgtaccactgtctgaattggtctatggtgccttgaaaactgtggaggtcgaaaaggcagtggagaaggaatttgagatggctttgcaagacagagttatggaagagaccaaggaccggaagaatgctgttgagtcttatgtttatgatatgcggaacaaactgagtgacaaataccaggaatatatcactgactcggagagggaagcattcctggcgaatctgcaggaagttgaggattggttgtatgaagatggggaagatgagaccaaaggtgtttatgttgcgaagctcgaggagctcaaggaggtgggtgaccctgttgaagtgcgttacaaggagtcattggaaagagggtcggtcattgatcagctttggttactgtattaaccgccatccagaggaggcaattatnnnttnnggtnccccaggtttt

SEQ ID NO: 117777 - DNA, 1282 bp, Arabidopsis thaliana
  unsure (1)..(1282): unsure at all n locations
ggaattcctcgagctacgtcagggctcatttccatcatcttcgtcttcgtttgttcccctgagatagagataagagaatttcgagagattcgagagaagagacgatgggtttccaagatctcgaagctggtactcgatctccggcgccgaatcgttttaccggtgggagacaacagagactttcgtctcgtggggatccatctcaggaggtcgccgccgggattttcaggatcagcacggctgtcaattccttcttccgcctcgttaattcgatcggaacacctaaagatactcttgaattacgagataagctgcaaaagacaaggttacagatatccgaattggtgaagaatacttcagctaaacttaaggaagctagcgaagccgaccttcatggatcagctagtcaaattaagaagatagctgatgctaaactggcaaaagatttccaatcagttctcaaagagtttcagaaagctcagagacttgcagctgaaagagaaataacatatactcctgtggtcacaaaagaaatacctaccagttataatgcacctgaactggatactgaatctttaaggatctcccagcagcaagctcttcttctacaatcaagaaggcaagaagtggtgtttttagataacgagataacattcaatgaagcaattattgaggaaagagagcaagggattcgagaaattgaagaccagattcgtgatgtgaatggcatgttcaaagatctagctcttatggtgaaccatcaaggaaatattgtcgatgacatcagctctaaccttgacaactcacatgctgcaactacacaagccactgttcaactcagaaaagcagctaaaactcaaagatcaaactcctctttgacatgcctacttattctcatttttgggattgttctactcattgtcatcatcgttgtcttggtctaagcatcaaacatataactccaagcttcaatcttcaagcatcaagcgaatctatggaaactatacaaagacccattaaagatatatatctaatgtacagattctttatactccatcttccccattcaaccaaattgatcttaacttctcatcgtgtgaatgtttaatcaatgtattactccatcataaggatcttcatgctcaaaagaaataaccataagaaaataatcttgattttttggtnnnnnnnnnnnnnnnnnnnnnnnnnnnnnnnnnnnnnnnnnnnnnnnnnnnnnnnnnnnnnnnnnnnnnnnnnnnnnnnnnnnnnnnnnnnnnnnnnn

SEQ ID NO: 117778 - DNA, 2026 bp, Arabidopsis thaliana
accaaacttttgagaagcattttcgcttcaattcaataaaaggcgaaaaatctctcactgcactttatctcgagagctcagatctccgatctagagcctttcgcttctcctcttctgttcatataacaactgaataatgtcgatctccgcccaaaatccggatatttccggcgatagacaatccggccaagatgttcgtactcagaacgtgatggcttgtcaagctgtttctaatattgttaagacctcacttggtcccgtcggcctcgacaagatgttggtggatgatattggtgatgtgactattacaaatgatggtgctactattcttaggatgttggaggtcgagcaccctgctgctaaggttcttgtcgagttagctgaacttcaagatagagaagtcggtgatgggactacatctgttgttattgtagctgctgagttgttgaagagggcaaatgatttggtcaggaacaaaatacatccaacatcaattatcagtggatataggctagcaatgagagaatcttgcaaatacatagaagagaagttggtgaccaaggtcgaaaagcttgggaaagttccattgataaactgtgccaaaaccagcatgtcctccaaactgatatctggtgacagcgacttctttgccaatttggttgtggaagccgttctttcagtaaagatgacaaatcagcggggagagataaaataccctatcaagggcattaatattctgaaagctcatggacaaagtgcaagagacagctatttgttaaatggatatgcactcaatactggtcgtgctgcccaagggatgccattacgagtgtccccagcaaagattgcttgccttgacttcaatctgcagaagacaaaaatgcagctgggtgtccaagttgttgttaatgacccacgagaacttgaaaagatccgtcaaagagaagctgacatgacaaaagagcggatagagaaacttctcaaagctggggccaatgtaattctgaccacaaaggggattgacgacatggcacttaaatactttgtagaggcaggagctattgctgttaggcgtgtgcgcaaagaagacatgcgtcatgttgccaaggcgacaggagcgactctggtcaccacttttgctgacatggagggcgaagaaacatttgatccagctcaccttggatctgctgatgaggttgttgaagagagaatcgcagatgatgatgttatattgataaagggaaccaaaacaagtagtgcggtctcgttgatcttaagaggtgcaaatgactacatgcttgatgagatggagagagcactgcatgacgctttatgtattgtcaagaggacccttgagtccaacacggtggttgcgggtggaggtgcagttgaatcagcattgtctgtgtatctggagcaccttgctacaaccttgggctctcgcgaacaattggccatcgctgaatttgctgatgcgctattgattataccaaaggtgcttgcagtaaacgctgctaaggatgcaaccgaattggtagctaaactaagagcgtaccaccacactgcacaaaccaaggctgataagaagcactattcaagcatgggacttgacctcgtaaacggaaccatccgcaacaatttggaagctggagtgatcgaaccagctatgagcaaagtgaaaattatccagtttgcaacagaggcagccataacgattctacgaattgacgacatgatcaaactggtgaaggatgagagccaaggcgaagaataagcaaagctcagctcctctttatccgccttatcatccttagtgtgtgtttttgtccgcattttcagctcctctttagcttcttttttgcgctgtaacaatgtagcctctgaaagagctgtttctgtttatttttcaactctctcgtttcttgctcactttttacttcaagaaatttttgctttttgtcgggtaacgcatgtaatgaagttgggctttcgtctcttactgtttgaatttatggtgtagtttttg

SEQ ID NO: 117779 - DNA, 2793 bp, Arabidopsis thaliana
  unsure (1)..(2793): unsure at all n locations
tcgataagctagatatcgaattcgcggccgcctcaaacctcagattatataattaggctaaaatctgataaaccaaaaaatgtatcagagtgagtgctaaagagaactttgtgttgacctctctttccctcctaattccttagggttcctcgatttttctttttcaccgaaacaaaaaccttattcctccttctctttctctgtctatctttctctgtacgttttattcactttcctccacgtggatttgcataaaagcatgaaaatttgttgatgggtttctcttcgacatccagattctagcttccaattccgtaattctccgttaaaaaaccctaatttcatcgaatttactctgatctgtgtagaaattagggagtgaagtgtccgcaagtgtttggcaatgtcggatgacatggttttgcatttctcctcgaattcttctaatcagtcggatcactctttacccgacaaaatcgccaagcttgaggcccgcttgactggtaagaccccttcctcggccaagccaccacaacaacaacaacagcagcagcagcaggtctctctctggtcatctgcttctgccgctgtcaaagtcgtcacttccacaccgccgggattgtccgaaacctctatcagtgattcagacgacgagaatactggagatttcctaatccgagcaaatacaaaaaagcgccagaaagttcaagaatctaacaacttcagtgttgttgatcatgttgagccacaagaggcagcatatgatggaaggaaaaatgatgctgagtccaagacaggccttgatgtaagtaagaagaaacaaggtcgaggtcgggcttcgtcaacaggtagagggcgtggttctaaaactaataacgatgtgacaaaatctcagtttgtggttgcaccagtatcagctgccagtcaactggatgcctctgatcaaaaggattttaggcctgatggacagctcaggaatggtgaatgctctctccaggatgaagacttaaaatctttgcgtgcaaaaatcgctatgctggaggaggaattgcgtaaatctcgacaagattcttctgagtatcaccaccttgtcaggaatcttgagaatgaggtaaaagatctgaaagatcaggaacaacaagggaagcaaaagacaactaaagtaatctcggaccttctcatatctgtttccaaaactgagagacaagaagcaagaacgaaagtcagaaatgaatctttgcgattaggcagtgttggtgttctcaggacaggaacgatcatagctgagacatgggaggacggacaaatgttaaaagatctgaatgctcaacttagacaattgctggaaaccaaggaggctattgagagacaaagaaagttacttaagaaacgacaaaatggtgataagaatgacggaactgacacagaatcaggagcacaggaggaagatatcatccctgacgaggtttacaagtctcgtcttactagtattaagcgggaagaggaagctgttttgcgtgagagagaaaggtacacattagagaaggggctacttatgagggagatgaaacgcatacgagatgaagatggttctcgtttcaaccatttcccagttttgaatagccgctatgctcttctaaatcttcttggtaaaggcggatttagtgaagtctataaggcatatgatttggtggaccatagatatgttgcgtgcaagcttcatggtttaaatgctcagtggagtgaagaaaagaagcaaagttacatccgccatgccaacagggaatgtgagatccataaaagtcttgtgcatcaccacattgttcggctttgggataaatttcatatcgacatgcatacattctgcaccgttctggaatattgtagtgggaaagaccttgatgctgtattaaaggcaacatctaatcttcctgagaaagaagcaaggattatcattgtgcaaatagttcaaggccttgtatatctgaacaaaaagtcacagaagataatccactatgatctgaagcctggtaatgttctctttgatgagtttggagtagcaaaagtaactgattttggtctaagcaagatagtggaggacaatgttggttctcaaggaatggagcttacatcacagggagctggaacatactggtacttgcccccagaatgctttgagcttaacaaaactcctatgatctcatcaaaggttgatgtatggtcagttggtgttttgttttaccaaatgctgtttggaaagcgaccttttggacatgaccaaagccaagaacggatactaagagaagacacaatcattaaagccaaaaaggttgagttcccagtaacaagacctgccatctcaaatgaagcgaaggatttgattcgacggtgtctaacatataaccaagaagataggccggatgttctaacaatggcacaggatccatatcttgcctactctaagaagtgagattgtgtagtcttcaaaaacaaaccagagatgctaaaagaccagatcctagaatattttttggtatagcttataaagtttctgttttgtttgtctaaatattttatctcccggccccttgaaccatattaatttcgggtgaagttaatgtgtcttgtcttccttttattatgtaacatgttatgtatatttttcatgttttataatagaagaaagctgaaagttggaaaaaaaaaaaaaaagnnnnnnnnnnnnnnnnnnnnnnnnnnnnnnnnnnnnnnnnnnnnnnnnnnnnnnnnnnnnnnnnnnnnnnnnnttcattc

SEQ ID NO: 117780 - DNA, 1888 bp, Arabidopsis thaliana
  unsure (1)..(1888): unsure at all n locations
ccggngcggaaataccggggcggcccaagccgtcggacatttcacttttaattttctagaaaaattgctttcgtcttgtctcttcaatgcctctgtatcgtccttaaaccctaaacaagaccccatccgccgccaccggtcaacctctctcctccgccaccgccccgtcgtcatctcctgtaccgccgatggcaacaacatcaaagccccgatcgagacagcggtcaagcctcctcaccgtaccgaggataacattcgagatgaggctcgtcgtaatcgttccaacgccgtgaatccattttcagctaaatacgttccgtttaatgcagctcctggatccacggagtcttactctctcgacgagatcgtgtaccgtagccgctccggtggtttgcttgatgtcgaacacgatatggaggctttgaagcgattcgatggcgcgtattggcgtgatctcttcgattcgcgtgttggtaaaagcacatggccttatggatcgggtgtttggtcgaagaaagagtgggttcttcctgagatcgatgacgacgacatcgtttcagcttttgaaggaaactcgaatctgttctgggcagagagatttggtaagcagtttctaggtatgaatgatctgtgggtgaaacactgtgggattagtcatacaggaagtttcaaggatcttggaatgactgttttggttagtcaagttaatcgtctgagaaagatgaaacgacctgtggttggtgtcggatgtgcttccaccggagatacttctgctgctctatctgcttactgcgcctccgctggaatcccatcgattgtgtttttaccggcgaacaagatctctatggctcagctggttcagccgatagctaatggtgcgtttgttttgagtattgacactgattttgatgggtgtatgaagctgattagagagataactgcggaattgccgatttatttggcgaattcgttgaatagtttgaggttagaagggcagaaaactgcagctattgagattttgcagcagtttgattggcaagttcctgattgggtgattgttcctggaggtaacctaggaaacatctatgccttttacaaagggtttaagatgtgtcaagaactgggacttgtcgataggatcccgaggatggtctgtgcacaagcagctaatgctaatcctctttacttgcactacaagtctggttggaaggacttcaagcccatgactgcaagtaccactttcgcctctgcgattcagatcggtgaccctgtctccatcgatagagctgtgtacgctctcaagaagtgcaatggtattgtagaagaagccacagaggaggagctgatggatgcgatggctcaagcggattcgacaggaatgtttatctgtcctcatacaggtgttgctctaactgctctgttcaagctgaggaatcaaggagtgattgcaccgactgatcgaactgtggtagtgagtactgctcatgggttgaagtttactcagtctaagatagattatcactccaatgccatccctgacatggcttgcagattctccaatcctcctgttgatgtgaaagcagatttcggagctgtcatggatgttctcaagagttacttaggaagtaatacacttacgtcataagagacaagaccataatctttagctgttttgttttttgaaaacttttagacgtttgtttgcgttactcttcaactcatctctctgtgatctttatctgtttctcagttttccaataaagttctatcgcaaagtttgaatcattttaaaaaaaaaaaaaaaagnnnnnnnnnnnnnnnnnnnnnnnnnnnnnnnnnnnnnnnnnnnnnnnnnnnnnnnnnnnnnnnnnnnnnnnnnnnnnnnnnn

SEQ ID NO: 117781 - DNA, 1008 bp, Arabidopsis thaliana
gttgattcagtctcactcttcctcagtagagctcccatcaatggcttcaatcaacctcttcctctacgccttccttcttcttctctctcacgcttcagcttcaactgtaatcttctacaacaaatgcaaacacccagtgtggccaggtatccaacccagcgccggtcaaaacttactcgccggcggtggttttaagcttccagctaacaaagcccactctcttcaactcccaccactctggtccggccgtttctggggtcgccacggctgcaccttcgacagatctggccggggtcactgcgccaccggagattgcggcggttctctctcctgcaacggtgccggcggtgaacctccggccactctcgccgaaatcactctcggccctgagctagacttctatgacgtcagcctcgtcgacggttataacctggccatgtcgattatgccggttaaaggttcaggtcaatgtacgtacgccggttgtgttagcgatctaaaccagatgtgtccggttggtttacaagtccggtcacgtaacgggaaacgtgtagtagcctgtaaaagtgcttgctctgccttcaattcaccacagtactgttgcaccggcttgttcggtaacccacagtcttgcaaaccaacggcttactccaaaatcttcaaagtcgcttgtccaaaagcttactcttatgcttacgacgagccaaccagtatcgccacatgttccaaggctaactacatcgtcaccttttgccctcatcatcgccattaaattagccagtaaagaagaagaaacatttctctattagcaacaaactcttgtcatgtttcgaattcttgagtttctatatctacttttgtaacactatgattgaatgcagatcctattatcaatatcaatggaactcaaccaacttagtgatgtgtcttgtgagtgttaatccccaaattctaaatccttttatgttcagtggcttatgtactagacaatgcaagattaatgctatt

SEQ ID NO: 117782 - DNA, 1268 bp, Arabidopsis thaliana
  unsure (1)..(1268): unsure at all n locations
nnnnnnnnnnnnnnnnnnnnnnnagggggcccaaaactggacccccccggggggccctcaagactaagggatccccccgggctcaggggataaagaaaaagctcacaactttaacctttctggagagagaagaacaaaagagggagagggagagaaatggaaggcaaagaagaagatgtacgagtgggagctaacaagttcccggagaggcaacccatcggtacatcggctcagtccaccgacaaggactacaaagagccacctcctgcgccactgttcgagcccggcgagctcagctcatggtctttctacagagccggaatagctgagtttatcgctactttcttgtttctctacatcactgttttgactgtaatgggagttaagagagcaccaaacatgtgtgcttctgttggaatccaaggtatcgcttgggcttttggtggcatgatctttgctcttgtctactgtactgctggaatttcaggtggacacatcaaccctgctgtaacattcggtctgttcttggctcggaagttatctctgaccagagcagtgttctacatgattatgcaatgtcttggagccatctgtggtgccggagtcgtcaaaggtttccagccaacgccgtaccagactctcggtggtggtgctaacaccgttgctcatggctacaccaaaggttctggccttggtgctgaaatcatcggaacattcgttctcgtctacactgtcttctccgccaccgacgccaagagaagcgcccgtgactcacacgtcccgattttggcgccgctcccaatcggatttgcagtgttcttggtacacttggcaacaataccgatcaccgggaccggaatcaacccagctagaagtcttggagccgcaattatctacaacaaggaccactcttgggatgaccattggattttctgggttggaccattcattggagcagctctagcagcactatatcaccagattgtcatcagagcgattcctttcaagagcaagagttagagacacacagaaagattccacggtccagaatttgttctttagtagtttctttgcttatctatctaatgtagcttgtgttttgcaatgtaatgagcctttcaagaatatgtatttgggaattttctaatcagcttttgtctatgtaaaaactatgtgtttcttttttcttcctatactcgtccaaagggcgaccgctctagaggatccaagcttacgtacgcgtgcgtgcgacgtcatagtcttctata

SEQ ID NO: 117783 - DNA, 542 bp, Arabidopsis thaliana
  unsure (1)..(542): unsure at all n locations
tacgactcactttagggaaagctcgtacgcctgcaggtaccggtccggaattcccgggtcgccccacgcgtgcggaacaaaagagggagagggagagaaatggaaggcaaagaagaagatgtacgagtgggagctaacaagttcccggagaggcaacccatcggtacatcggctcagtccaccgacaaggactacaaagagccacctcctgcgccactgttcgagcccggcgagctcagctcatggtctttctacagagccggaatagctgagtttatcgctactttcttgtttctctacatcactgttttgactgtaatgggagttaagagagcaccaaacatgttgtgcttctgtttggaatccaaggtatcgctttgggctttttgggtggcatgatcttttgctccttgtttctactgttactgcctggaatttccaggtggacacatcaacccctgctgttaacattccgtccggtctccgctcggtccggaaattttcccctgaaccaaaaacaatgtttcctcnatgaattattc

SEQ ID NO: 117784 - DNA, 515 bp, Arabidopsis thaliana
  unsure (1)..(515): unsure at all n locations
atacggctgcgagaagacgacagaaggatacggctgcgagaagacgacagaaggatacggctgcgagaagacgacagaaggggacacacgagaaagaaaaagctcacaactttaacctttctggagagagaagaacaaaagagggagagggagagaaatggaaggcaaagaagaagatgtacgagtgggagctaacaagttcccggagaggcaacccatcggtacatcggctcagtccaccgacaaggactacaaagagccacctcctgcgccactgttcgagcccggcgagctcagctcatggtcttttctacagagccggaatagctgagtttatcgctactttctttgttttctctacatcacttgttttgnccttaaatggggnttaggnggcaccnaacaatgtgtnttctttttgggattccaaggttttcngnttgggctttttgggggggnaaaaatctttttggcccttggnnancntgaaccccntgggantttcaagggggggc

SEQ ID NO: 117785 - DNA, 818 bp, Arabidopsis thaliana
ccacgaattccccaccaccatctctattttcttcctttcccctaagtcttggttcttcttctctctaatacgagaagaaaaaggcgaaaacctcgccaatccgattacgcgaaaaatcaaaggtttttggatatggcgtcgaagcggatcttgaaggaattgaaggatctccagaaggatccacctacatcatgtagcgcaggtcctgttgctgaagacatgtttcactggcaggcaacgataatgggtccttcagagagtccttatgctggaggtgttttccttgtaaccatccatttccctccggattacccattcaagcctcctaaggtggcctttaggaccaaggtgttccatcccaacattaacagcaacggtagcatttgcctcgacatcttgaaggagcagtggagtcctgcgctcaccatttccaaggtgctgctatcgatctgttctttgttaaccgatccaaacccggatgatcctttggtgcccgagatagctcacatgtacaagactgacaagaacaagtacgagtccactgcacgaagctggactcagaagtatgccatgggctaaatggaaaatcccacctactaaattatctctttatgaagaaaaaaatctgccttaatttctatgtatgattcgatagacatctctttgtgtccttttaactttctgaagacaggaccaaatgaagtgggtcttgttttaaacgaaacaaaaaaaaacatcatctttgtgaaaactagaatctgatcatcttctgttgtttcttcttgtggtgaaattatgatttgatgttaaaggaattc

SEQ ID NO: 117786 - DNA, 801 bp, Arabidopsis thaliana
aacccactatagggaaagctggtccgcctgcaggtaccggtccggaattcccgggtcgacccacgcgtccgacgagaagaaaaaggcgaaaacctcgccaatccgattacgctgaaaaatcaaaggtttttggatatggcgtcgaagccggatcttgaaggaaattgaaggatctccagaaggatccacctacatcatgtagcgcaggtcctgttgctgaagacatgtttcactggcaggcaacgataatgggtccttcagagagtccttatgctggaggtgttttccttgtaaccatccatttccctccggattacccattcaagcctcctaaggtggcctttaggaccaaggtgttccatcccaacattaacagcaacggtagcatttgcctcgacatcttgaaggagcagtggagtcctgcgctcaccatttccaaggtgctgctatcgatctgttctttgttaaccgatccaaacccggatgatcctttggtgcccgagatagctcacatgtacaagactgacaagaacatgtacgagtccactgcacgaagctggactcagaagtatgccatgggctaaatggaaaatcccacctactaaattatctctttatgaagaaaaatctgccttaatttctatgtatgattcgatagacatctcttttgtccctttaactttctgaagacaggacccaattgagtgggtccttgtttaaacgaaaccaaaaaaaacctcatctttgtggaaaaaaaaaaaaaaaaggcgggccgctctaaaagattcaaacttaccttcc

SEQ ID NO: 117787 - DNA, 720 bp, Arabidopsis thaliana
  unsure (1)..(720): unsure at all n locations
ccggnnnggaagggccgacccgagcgacccaaaacgtgaattcggaagtcttcaattggaatttggatcgtgggattttggaaatggcatcgaaacggattttgaaggaattgaaggatctgcagaaggatcctcctacttcatgtagcgcaggacccgttgcggaagacatgtttcattggcaggccactataatgggtccatcggatagcccttattctggaggagtttttcttgtaaccatccatttccctccagattacccatttaagcctcctaaggtggcttttaggacgaaggtgttccatccaaacattaacagcaatggaagcatctgcctcgacatcttgaaggagcagtggagtcctgctctcacaatttccaaggtgctgctatcgatctgttctttgttaacggatccaaacccagatgatcctttggtccctgagatagctcacatgtacaagacagacaagaacaagtacgagtccactgctcggacctggacccaaaagtatgccatgggctgacacaaatactgtccttaaggaagagccctaataattaaactcttcttatttctatgtaatgatcttttatagacttgtctgtcttataaaatttgtgaagacaggatcagataagaaattatttgatctccattctatggaattgtaaaacgtaaatcatcaannnnnnnnnnnnnnnnnnnnnnnnnnn

SEQ ID NO: 117788 - DNA, 660 bp, Arabidopsis thaliana
tacggctgcgagaagacgacagaagggggagaagaaaaaggcgaaaacctcgccaatccgattacgcgaaaaatcaaaggtttttggatatggcgtcgaagcggatcttgaaggaattgaaggatctccagaaggatccacctacatcatgtagcgcaggtcctgttgctgaagacatgtttcactggcaggcaacgataatgggtccttcagagagtccttatgctggaggtgttttccttgtaaccatccatttccctccggattacccattcaagcctcctaaggtggcctttaggaccaaaggtgggtgctgctatcgatctgttctttgttaaccgatccaaacccggatgatccttttgggtgcccgagatagctcacatgtacaagactgacaagaacaagtacgagtccactgcacgaagctggactcagaagtatgccatgggctaaatggaaaatcccacctactaaattatctctttatgaagaaaaaaatctgccttaatttctatgtatgattcgatagacatctctttgtgtccttttaactttctgaagacaggaccaaatgaagtgggtcttgttttaaacgaaacaaaaaaaaacatcatctttgtgaaaactagaatctgatcatcccctgttgtttcttct

SEQ ID NO: 117789 - DNA, 499 bp, Arabidopsis thaliana
  unsure (1)..(499): unsure at all n locations
agaagaaaaaggcgaaaacctcgccaatccgattacgcgaaaaatcaaaggtttttggatatggcgtcgaagcggatcttgaaggaattgaaggatctccagaaggcatccacctacatcatgtagcgcaggtcctgttgctgaagacatgtttcactggcaggcaacgataatgggtccttcagagagtccttatgctggaggtgttttccttgtaaccatccatttccctccggattacccattcaagcctcctaaggtggcctttaggaccaaggtgttccatcccaacattaacagcaacggtagcatttcgcctcgacatctttgaagggagcagtgggagtcctgcggttaaccattttccaaagggtgctggctatccgatctggttcctttgttcaaccggtccccaaaacccggctgntccctttgggtcccccgaatngggtttattgttcaaaaacggtcaaagnacaagaaggggnncnctttaacg

SEQ ID NO: 117790 - DNA, 592 bp, Arabidopsis thaliana
  unsure (1)..(592): unsure at all n locations
aaaaccaaaaacgtgaattcggagttatgattttggatcttcttcccgtctttatatataatttcctgggttatgtttttcttcttcttagttcatctgaccattggattggttttcgattgcagagtcttcaattggaatttggatcgtgggattttggaaatggcatcgaaacggattttgaaggaattgaaggatctgcagaaggatcctcctacttcatgtagcgcaggacccgttgcggaagacatgtttcattggcaggccactataatgggtccatcggatagcccttattctggaggagtttttcttgtaaccatccatttccctccagattacccatttaaagcctcctaaggtggcttttaaggacgaaggtgttcccatccaaacattaacagcaatggaagcatctgcctcgacatcttgaagggagcagtggagtccctggntttnacaattttccaaggtgctgctatcgatctgtcctttgtaaacggttccaanccagtgatcctttggnccctnngnnggttcaatttcaaggnaggcaggncaagttngggncnttttttggnccnggncccaa

SEQ ID NO: 117791 - DNA, 414 bp, Arabidopsis thaliana
catatctctaatacgagaagaaaaaggcgaaaacctcgccaatccgattacgcgaaaaatcaaagaatctttgtttgatttttgatttttaggtttttggatatggcgtcggagcggatcttgaaggaattgaaggatctccagaaggatccacctacatcatgtagcgcacgtcctgttgctgaagacatgtttcactggcaggcaacgataatgggtccttcacagagtccttatgctggaggtgttttccttcgaaccatccatttccctcctggattacccattcaagccttctaaggtggcctttactacctaggtgttccatcctatctttaacagcaaccttttcatttgcactttacattttttaatctactattttttcttcttcactcatccattttttagcct

SEQ ID NO: 117792 - DNA, 704 bp, Arabidopsis thaliana
cttctttcccgataaagaagctctcgctttgtgttgtccgtccttcttccaggttttctcgtctctgacgcatggcttctaagaggatcttgaaggagctcaaggatctgcagaaggatcctccttcaaactgcagcgctggtccggtggctgaggacatgttccattggcaagccactatcatgggacctcctgaaagtccgtatgccggaggagtgtttttggtttctattcatttccctccggattatcctttcaagccaccaaaggtgtcttttaagactaaggtgtaccatccaaacatcaatagcaatggaagtatttgccttgatattttgaaagagcaatggagccctgctcttactatctccaaggttctgttgtcgatttgctcgctgttgactgacccaaacccagatgatcctcttgtgccggagatagctcacatgttcaagacagatagatccaagtacgagtcaactgcgagaagctggacacaaaagtacgcaatgggttgatgatataagacaaagcaaaggatatgttattgcgcatcggaataaaataataacttaaaaaaaatgcacttgtttggtttatcaaacgttagcaagtatcgaacaacttagctgctcttactcctcttctgttctgatcactataaactagtattaatttcgaaaaaaaaaaaaaaaaaggaattc

SEQ ID NO: 117793 - DNA, 1795 bp, Arabidopsis thaliana
  unsure (1)..(1795): unsure at all n locations
atgannnnnnnnnnnnnnnnnnnnnnnnnnnnnnnnnnnnnnttagggaaagctcgtacgcctgcaggtaccggtccggaattcccgggtccacccacgcgtccgcaatttctcaaaatcttaaaaactttctctcaattctctctaccgtgatcaagatgcagatctttgttaagactctcaccggaaagacaatcaccctcgaggtggaaagctccgacaccatcgacaacgttaaggccaagatccaggataaggagggcattcctccggatcagcagaggcttattttcgccggcaagcagctagaggatggccgtacgttggctgattacaatatccagaaggaatccaccctccacttggtcctcaggctccgtggtggtatgcagattttcgttaaaaccctaacgggaaagacgattactcttgaggtggagagttctgacaccatcgacaacgtcaaggccaagatccaagacaaagagggtattcctccggaccagcagaggctgatcttcgccggaaagcagttggaggatggcagaactcttgctgactacaatatccagaaggagtccacccttcatcttgttctcaggctccgtggtggtatgcagattttcgttaagacgttgactgggaaaactatcactttggaggtggagagttctgacaccattgataacgtgaaagccaagatccaagacaaagagggtattcctccggaccagcagagattgatcttcgccggaaaacaacttgaagatggcagaactttggccgactacaacattcagaaggagtccacactccacttggtcttgcgtctgcgtggaggtatgcagatcttcgtgaagactctcaccggaaagaccatcactttggaggtggagagttctgacaccattgataacgtgaaagccaagatccaggacaaagagggtatcccaccggaccagcagagattgatcttcgccggaaagcaacttgaagatggaagaactttggctgactacaacattcagaaggagtccacacttcacttggtcttgcgtctgcgtggaggtatgcagatcttcgtgaagactctcaccggaaagactatcactttggaggtagagagctctgacaccattgacaacgtgaaggccaagatccaggataaggaaggaatccctccggaccagcagaggttgatctttgccggaaaacaattggaggatggtcgtactttggcggattacaacatccagaaggagtcgacccttcacttggtgttgcgtctgcgtggaggtatgcagatcttcgtcaagactttgaccggaaagaccatcacccttgaagtggaaagctccgacaccattgacaacgtcaaggccaagatccaggacaaggaaggtattcctccggaccagcagcgtctcatcttcgctggaaagcagcttgaggatggacgtactttggccgactacaacatccagaaggagtctactcttcacttggtcctgcgtcttcgtggtggtttctaaatctcgtctctgttatgcttaagaagttcaatgtttcgtttcatgtaaaactttggtggtttgtgttttggggccttgtataatccctgatgaataagtgttctactatgtttccgttcctgttatctctttctttctaatgacaagtcgaacttcttctttaaaaaaaaaaaaaaaaagaaaaaaaaccaaaagagcggccgctctagaggatccaagcttacgtacgcgtgtagccccgtcaagctcttgtannnnaatcg

SEQ ID NO: 117794 - DNA, 698 bp, Arabidopsis thaliana
  unsure (1)..(698): unsure at all n locations
gtctgcagtaccggtccggaattcccgggtcgacccacgcgtccggcagatcttcgtgaagactctcaccggaaagactatcactttggaggtagagagctctgacaccattgacaacgtgaaggccaagatccaggataaggaaggaatccctccggaccagcagaggttgatctttgccggaaaacaattggaggatggtcgtactttggcggattacaacatccagaaggagtcgacccttcacttggtgttgcgtctgcgtggaggtatgcagatcttcgtcaagactttgaccggaaagaccatcacccttgaagtggaaagctccgacaccattgacaacgtcaaggccaagatccaggacaaggaaggtattcctccggcaccagcagcgtctcatcttcgctggaaagcagcttgaaggatggacgtacttttggccgactacaacatccagaagggggctactcttcacttcggtcctgcgtcttcgtggtggtttctaaatctcgcctctgttatgcttaagaagttcaatgtttcggtccatggaaaactttgggggtttgtgttttggggccttgtataatcccgggggaataagtgccctactatgttccgggggggatttnaacccgggggcccattnttaagggcnnccggggggccactttnccctnanggggaattctttc

SEQ ID NO: 117795 - DNA, 995 bp, Arabidopsis thaliana
gcctgcaggtcccggtccggaattcccgggtcgacccacgcgtccgattttctcaaactctaaaatcaatctctcaaatctctcaaccgtgatcaagatgcagatcttcgttaagactctcaccggaaagactatcaccctcgaggtggaaagctctgacaccatcgacaacgttaaggccaagatccaggataaggaaggtattcctccggatcagcagaggcttatcttcgccggaaagcagttggaggatggccgcacgttggcggattacaatatccagaaggaatccaccctccacttggttctcaggctccgtggtggtatgcagattttcgttaaaaccctaacgggaaagacgattactcttgaggtggagagctctgacaccattgacaacgtcaaggccaagatccaagataaggagggtattcctccggaccagcagaggttgatcttcgccggaaagcaacttgaggacggcagaactttggcggattacaacatccagaaggagtctacgcttcatttggtcttgcgtctgcgtggaggtatgcagatcttcgtaaagactttgaccggaaagaccatcactcttgaagttgagagctccgacaccattgataacgtgaaggctaagatccaggacaaggaaggcattcctccggaccagcagcgtctcatcttcgctggaaagcagcttgaggatggacgtactttggccgactacaacatccagaaggagtctactcttcacttggtcctccgtctccgtggtggtttctaaaccttgtctctctctcttatggttactgaaccaagttcatgtatcgtttcatctagtactttggtggtttatgttttggggccatgtacagcctctgataaataattgatcgactatgtttccgtttctttcatctttcttttctttcaaacaaccaaatcggaacttattctccattcgcaattatctctttcgattcacttttgtc

SEQ ID NO: 117796 - DNA, 1202 bp, Arabidopsis thaliana
  unsure (1)..(1202): unsure at all n locations
acgcctgcaggtaccggtccggaattcccggttcgacccacgcgtccgcccacgcgtccgaagacgacagaagggcaccatcgacaccgttgaggccaagatccaggatcaggagggcattcctccggatcagcagaggcttattttcgccggcaagcagctagaggatggccgtacgttggctgattactctatccctgaaggaatccaccctccacttggtcctcacgctccgtggtggtatgcacattttcgttaaaacccttaacgggaaagacgattactcttgaggtggggagttctgacaccatcgacagcgtcaaggccatcatccaagacggcgagggtattcctccggaccagcaagaggctgatcttcgccggaaagcacttgggggatggcagaactcttgctgactacaatatccagaaggagtccacccttcatcttgttctcaggctccgtggaggtatgcagatctttgtcaagacgttgactggaaagactatcactttggaggtggagagctctgacactatcgacaatgtcaaagccaagatccaggacaaagagggtatccccaccggaccagcagagattgattttcgccggaaaacaacttgaagatggtagaactttggctgactacaacattcagaaggagtctacacttcacttggtgttgcgtctccgtggaggtatgcagattttcgtgaagactctcactggaaagaccattactcttgaagttgagagctccgacaccattgacaacgtgaaggctaagatccaggacaaggaaggtatccctccggaccagcagcgtctcatcttcgctggaaaacagcttgaggatggtcgtactttggccgactacaacatccagaaggagtctacccttcacttggtgctaaggctccgtggtgggtttctaaaaacttatctctgttatgaatcagaagaagttcatgtctcgtttcatttaaaaactttggtggtttgtggttttggggccttgtaaagcccctgatgaataaattgtccaactatgtttccgttcctgtgttatacctttctttcgtaatgagtaatgacatcaaacttcttctggaaaaaaaaaaaaaaaaaaagagnnnnnnnnnnnnnnnnnnnnnnnnnnnnnnnnnnnnnnnnnnnnnnnnnnnnnnnnnnnnnnnnnaac

SEQ ID NO: 117797 - DNA, 636 bp, Arabidopsis thaliana
  unsure (1)..(636): unsure at all n locations
caaatacccaaagagctcttcttcttcacaattcagatttcaattttctcaaactctaaaatcaatctctcaaatctctcaaccgggatcaagatgcagatcttcgttaagactctcaccggaaagactatcaccctcgaggtggaaagctctgacaccatcgacaacgttaaggccaagatccaggataaggaaggtattcctccggatcagcagaggcttatcttcgccggaaaacagctggaggatggccgcacgttggccgattacaatatccagaaggaatccaccctccacttggttctcaggctccgtggtggtatgcagattttcgtcaagaccctcacgggaaagacgattactctttgaggtggagagttctgacaccattgacaacgtcaaagccaagatccaggaccaaaggaggggtatctcctccggacccacccagcagagtttgatcttngccctcggaaagcagctttggagggcttggcaggaacttttggctgactacaaacatttcagaaagggggtccnncantttcaactttgggctttgcggtcttncgtttggnnggttttcaanantcttcggtgaaaganntttttacccgggaanngcctttccncttt

SEQ ID NO: 117798 - DNA, 640 bp, Arabidopsis thaliana
  unsure (1)..(640): unsure at all n locations
gcagatcttcgtgaagactctcaccggaaagactatcactttggaggtagagagctctgacaccattgacaacgtgaaggccaagatccaggataaggaaggaatccctccggaccagcagaggttgatctttgccggaaaacaattggaggatggtcgtactttggcggattacaacatccagaaggagtcgacccttcanttggtgttgcgtctgcntggaggtatgcagatcttcgtcaagactttgaccggaaagaccatcactccttgaagtggagagctccgacaccattgacaacgtgaaggccaagatccagggcaaggaaggcattcctccgggccagcagcgtctcatcttctgctgggaagcagcttttngggttggccgtcctttggccggcttcaacatccagagggggtctactcttcacttgggcccccgtctccgggggggtttctaaaaccttggctctctctcttatggttacttgaaccaaagttcatgtatcggttcanctagtacttttgggtgggtttatgatttttggggcaatgttcaagccncctgggtaaannaaattgntncggcctaatnntttnccgntttttttnnaaanccccttttttttttnaaaac

SEQ ID NO: 117799 - DNA, 385 bp, Arabidopsis thaliana
  unsure (1)..(385): unsure at all n locations
agaatgcagagattgatcttcgccggaaaacaacttgaagatggcagaactttggccgactacaacattcagaaggagtccacactccacttggtcttgcgtctgcgtggaggtatgcagatcttcgtgaagactctcaccggaaagaccatcactttggaggtggagagttctgacaccattgataacgtgaaagccaagatccaggacaaagagggtatcccaccggaccagcagagattgatcttcgccggaaagcaacttgaaggatggagggaccttttggctgcctttcaaacattnaggaagggggtcccacaactttattttggggcttcgcgtctgcgttgggagggttttcaanntctttngggnaaanattttt

SEQ ID NO: 117800 - DNA, 1347 bp, Arabidopsis thaliana
  unsure (1)..(1347): unsure at all n locations
cgtcttcaaggcaactgcagaatgattactttgagaatctatctacttcgtttaggtgtttgattgatttgattccaagcagtggaaatgataagttagagattagcaaattgcttgtagatggtgctaatggtgtaggtggacagaagattgagaagctaagagggtctttgagtaatttagatgttgagattcgtaacacagggagagatggtggtgtgcttaatgaaggtgtaggtgctgattttgtgcagaaagaaaaggttttgcctgtaggatttgggtttaaggaaagttgggatgaggtgtgcgagttggatggtgatgagatcgattggttacttttacagtccttcagatcctctgaaaaggttgagctacttggcggtgataagattctgtctttgtttgctctcttcatcaaagagcaacaaaatgctctggagcatgatgaagaaaggaagcagtctcgtcttgctgatgtgcagacacttacgcgaatggtgcgtctacagattacctaaagcatttgggtttagatgctgtttctgctgaaactggagttaagcatttacacgagaaagcagcagagtttgatattggaatctactttgaagctaatggccacgggactattctcttctcggaatctttcctatcttggttagtttccaaacaaaaggatcttacggctaaaggtcagggtggttctgaagagcacaaagctgtttctagactaatggcggtgagtaatctgattaaccaagcggtaggtgatgctctaagtggagtgctcttggttgaagtgattctacaacacctgggatggtcgatagagaagtggaatgagctatacaaggaccttcctagcaggcagatcaaggtcgaagttccagatagaacagcggttgtgaccacaagcgaagaaaccgaggctctgagacctatggggattcaagatgctattaattctgaaatcaagaagtactcgcgtggcagagcttttataaggccatcgggtacagaagatgtggtgagagtatatgcagaggcttccactcaagaagatgctgattctttggctaattctgtggctcagctcgtcaaaagcttccttggttcaagctaaagaaccatctgaatttctgcaagagtatgttaatgggagatttttttaattttcttgttcacctcttagcttttacatcttttgtgtaacccgaatgacaagttttcttctcagcttcttttgatttaaaaaaaaaaaaaaaagnnnnnnnnnnnnnnnnnnnnnnnnnnnnnnnnnnnnnnnnnnnnnnnnnnnnnnnnnnnnnnnnnnnnnnnnnn

SEQ ID NO: 117801 - DNA, 1084 bp, Arabidopsis thaliana
gctgtttctgccgtcgatcaaccgttgaaaatcatcaccggagctgatgactttggagcgagcctcaaggacgcgatggtaacacacctccgctctctcggcatagacgtggaggataccggagtgtcctcttactactctgctggatctgaagtcggtcgccgcgtctccgcttcatcgtcttccgaagttcgcggcttagtctgctgcggcaccggcgtcggagttgcgatgttcgccaacaagttcccgggcgtctacgcagccacttgtctctccgtcgaagacgccgtcaacgctcgatcaataagcaattgcaatgtcctcgcattctccggcatcaaaacatccccggaaaccgccttggaaatcttcgacgcttggatcaaaactcctttcaaatctccttgtcctgcgtccggatccgaaccatggagctcagttatctcttccttcctcgacaattctctctccgagatgtctcagattggaaagtcaaccgccggcgattcaacaaccaagaagatcgatgaaacaaccgcgtcttgcgtaatttgctgcttggcgaagaacagagagttcactccagtggacatcatgccgggaggctcgatgaagatcgttagagagacgccgacgtcggcgattgtaagattcaaagcgggaagtgtggaaccggcgcatcaccacacattcggccatgaccttgtagtcataaagggaaagaaaagtgtgtggaatctgagcaagaaggagagagctgatctcgttgacggcgattacctattcactcccgccggtgatgttcaccgagtcaaatatcacgaagacactgagttcttcatcacttgggatggccattgggacatattccttgacgaagccctcgaaactgcaaagaaagccatcgaagaagaagcttgaaggtgtaaactttgtgtagtactctcttcttttgaatgttgtaagttctgagagtaaactttcttaaattgatgtactttgtaagaatctttgatttcaaaagatggtgtaatattacaaatactttctcttatgaacactatataaagggtttctacat

SEQ ID NO: 117802 - DNA, 1883 bp, Arabidopsis thaliana
agtacattttaacaaagcggattgctcatctttattcatccaagcctcagccacaagaatttacagttctggtcagtggcgtccctcttgtatccgggaacagtattagtgagacagtagaaaactttttcagggaatatcattcttcctcgtatctttctcatatagttgttcatcggacagacaagttgaaagttctcatgaatgatgctgagaagctgtacaagaagcttacacgagtaaaatccggaagcatatctcgccaaaagtctaggtggggtgggtttctagggatgtttgggaataatgttgatgtggttgaccattaccaaaagaagcttgataagttagaagatgacatgagattgaaacagtctttattagcaggagaggaagttccagctgcttttgtttcctttaggacaagacatggtgctgcaatagcaacaaacattcagcaaggaatagatccaacacaatggctaactgaggcagccccggagcccgaagatgttcattggccatttttcactgcatcgtttgtgagaagatggatctccaatgtagtggtgcttgtggctttcgtagctcttttgatcctatacattgtccccgttgtattggttcaaggtcttgctaatcttcaccagttggagacttggttcccttttctaaaaggaatattaaatatgaaaatcgtgagtcaagtgattacgggatatcttccgagtctcattttccagcttttccttcttatagtaccacccattatgcttctactttcctcaatgcaaggattcatttctcatagccagattgagaaatctgcatgtatcaagcttctaatctttactgtatggaacagtttctttgcaaatgtactgtccggatctgccctttatcgtgttaatgtgttccttgaacctaagactattcctcgtgtgcttgctgcagctgtgccagcacaggcatcgttctttgtatcttatgttgtgacctctggatggactggtttatcatcagagatcctccgtttggttcctcttctttggagtttcataacgaaacttttcggcaaggaagatgacaaagaatttgaggttccttcaactcctttctgccaagaaatcccaaggattctattttttggactcctcggtataacttacttcttcctttcgccattgatactgcctttcttgttggtctactattgtcttggatatatcatctaccgcaaccagctcctaaacgtatatgcggccaagtatgaaactggtggaaagttttggccaatagttcacagctatactatcttctctttggtactaatgcacattattgcagtcggattattcgggcttaaagagcttccagtggcatcttctttaacaattccccttccggttctcacggtccttttcagcatttactgccaaagacggtttttaccaaatttcaaatcttatcctacccagtgtctggtaaacaaagataaagcagacgagagagagcaaaacatgtctgaattctattcggaactcgttgttgcttaccgagatcctgcactttcggcatcacaggactcgagagatatctcaccttgagatcacctttttacttgagctattgaagtttgcttatgttgaagctgttggtttactatacctggtgcaatccatgaaagaacacactaaaccggttgtcttgtacattgggtcttaaccgagaatcaagcggtttttgtcttgtacatttgcttacacttggcttgtgtaaaaaagaaaaaaagtttatgtcaatgtatctctctaaaccggtttaagacggtacaaactttttgaaagatgccaaaacaaaacggtggttaataattttaccac

SEQ ID NO: 117803 - DNA, 1294 bp, Arabidopsis thaliana
gacgttgacggccgccgccgtaccggtccggaattcccgggtcgacccacgcgtccgcaaaccaaacataacactcacaatttaactctctctgtctctctctcatatctctcacttcttctctttctttttaagtccccaaaataacctcgagatcgatggactcaaatctgttcataactcccacttcttctctcaaatcccaagccttggtctcttcatcatcctaactatataagaaaaagaaaaaacaacgtaaagtttctgccataaatcatgagaccaatattagacctcgaaattgaagcttcatcgggcagtagtagcagccaagtggcctcaaacttgtctccggttggggaagattacaaaccaatctcgctgaatcttagcctcagtttcaacaacaacaacaacaataatctggatcttgaatcatcgtctttgacgctgccactttcgagcacgagtgagagtagtaacccggagcagcagcagcaacaacaaccatctgtatcaaagagagtcttctcttgtaactactgccaaaggaagttctatagctctcaagcgctaggtggtcaccaaaacgctcacaaacgtgagagaacactcgccaaacgcgctatgcgtatgggtcttgctggggtcttccccggtagaggatcaagtagcaattatgcggctgctgccacagcagccgctctctcgtgtttgccgcttcacggaagcggaaacgggaacatgacatcgttcaggactttgggaaatccgggcacattcctcggcgccacgaacgttcagcatgacaaggcagacaccagaaacacttattagaaacattgccaggttcaaccaggggtatttcggtaattgtatacctttttacgtggaggacgacgaggccgagatgctctggccggggagtttccggcaagctacgaatgcggttgcggttgaagcgggtaatgataatttaggtgaaagaaaaatggatttcttggacgtcaagcaagcgatggatatggaaagttctcttccagatctaaccttgaagctttgagctttcgtttttttttgtttttttttttgctgaatttggattcttaatttggtgcatcagcttcataactctattatgtacagtgagagtttcacaaaccatttctgatatgttatggtcactatcgattgatcgaccaaaagtcaattctagtgtttgcttacgtggataaaccatttaaacgtttatgtattgtaaactaaatattaagttaattatgctatcaaaaaa

SEQ ID NO: 117804 - DNA, 813 bp, Arabidopsis thaliana
acatcgataaacacatacgttcacacatatatgtctataaatccgacaatgtctcgtactggcgaaagttcttcaggttcgtcctccgacaagacgataaagctattcggcttcgaactcatcagcggcagtcgtacgccggaaatcacgacggcggaaagcgtgagctcgtccacaaacacgacgtcgttaacagtgatgaaaagacacgagtgccaatactgcggtaaagagtttgcaaattctcaagccttaggaggtcaccaaaacgctcacaagaaggagaggttgaagaagaagaggcttcagcttcaagctcggcgagccagcatcggctattatctcaccaaccaccaacaacccataacgacgtcatttcagagacaatacaaaacgccgtcgtattgtgcattctcctccatgcacgtgaataatgatcagatgggtgtgtacaacgaagattggtcgtcgaggtcgtcgcagattaacttcggtaataatgacacgtgccaagatcttaatgaacaaagcggtgagatgggtaagctgtacggtgttcgaccgaacatgattcagttccagagagatctgagttctcgttctgatcagatgagaagtattaactcgctggatcttcatctaggttttgccggagatgcggcataacaaattaaagagagatatatgattaagattatatgtactatagtggcgtatttcattgggatcatgaaggggaaaaaacgagacatatagtattcttgatgcaatttgagttttgtaatttatttaggtttatgtatgttttcgaag

SEQ ID NO: 117805 - DNA, 954 bp, Arabidopsis thaliana
ctcatctttccattttcaagaagacttttaaatctgtctctctctctctctttgtaaatatacatatatagataagctcacatatatggcgactgaaacatcttctttgaagctcttcggtataaacctacttgaaacgacgtcggttcaaaaccagtcatcggaaccaagacccggatccggatcaggatccgagtcacgtaagtacgagtgtcaatactgttgtagagagtttgctaactctcaagctcttggtggtcaccaaaacgctcacaagaaagagcgtcagcttcttaaacgtgcacagatgttagctactcgtggtttgccacgtcatcataattttcaccctcataccaatccgcttctctccgccttcgcgccgctgcctcacctcctctctcagccgcatcctccgccgcatatgatgctctctccttcttcttcgagttctaagtggctttacggtgaacacatgtcgtcacaaaacgccgttgggtactttcatggtggaaggggactttacggaggtggcatggagtctatggccggagaagtaaagactcatggtggttctttgccggagatgaggaggttcgccggagatagtgatcggagtagcggaattaagttagagaatggtattgggctggacctccatttaagccttgggccatgaatgattataattttggcccagtaaagatctgtaaaatactactaggatttcatttttatagagtatgtttttttccttaatttcggttgaaattggtgaatatttttatctcttacttaccaaatctcatatttctatgtatgcgtttgctttcactttttttttttatataattcttcttgtaaaaaatgcaatgtgagttttcttccctatcattctgtcaagctttggttcaattatttagtaatcgaataatataggaatagtgttgaaag

SEQ ID NO: 117806 - DNA, 1017 bp, Arabidopsis thaliana
tctcaaactcactctccctgatctctctcttccatggacgaaaccaacggacgaagagaaactcacgatttcatgaacgtcaacgttgaatccttctctcagcttcctttcatccgccgtactcctcccaaagaaaaagccgccattattcgtctcttcggccaagagctcgtcggtgataactccgacaacttatccgcagaaccttctgatcatcaaaccactaccaagaacgatgagagctctgagaatatcaaggacaaagacaaagaaaaagataaggacaaagacaaagataacagcaacaacaggagattcgagtgtcactactgcttcagaaacttcccaacttctcaagccctaggtggacatcaaaacgctcacaaacgtgaacgtcaacacgccaaacgcggttccatgacatcataccttcatcatcatcagcctcatgaccctcaccacatctacggcttcctcaacaaccaccaccaccgtcactatccgtcttggacgacggaagctagatcatactacggcggaggggacatcaaacgccgtcgtactactcaaggaatactctttgctcctccttcttctaacccaccgacaatcaacggaagtcctttaggtttgtgcgtgtaccgccttccacgtcaacaaatactattcaaggcgtttactcatcttcaccagcttcagcgtttaggtcgcatgagcaagagactaataaggagcctaataactggccgtacagattgatgaaacccaatgtgcaagatcatgtgagtctcgatcttcatctctgacttcttttattttatttttttatcatccatcattgctgtgatatatgagactcgctgatcggtgaagccaattcttttgagagtgttggagactgaaaaaaagaaaaagaaaacgagaaccggtttggtgtgtagatcatcttgaacctttttgaggttttcacattctgagtttatattaataaagggaataatattttggttaattagt

SEQ ID NO: 117807 - DNA, 1585 bp, Arabidopsis thaliana
  unsure (1)..(1585): unsure at all n locations
cggacgcgtgggtttcatctctagaaaagggcacaaaaaaccaaactttacgatttctcctcggcacgagctcgattctgtatgatctcttcgatctaatcgagtcttctaaacgttccgtgtagaatttcaaatctagggtttgctaaagcttgaacctttcttacccttttctctcgaagaggttttgattcctgggcatgaatttttccctaatcttgttaccttcgaagcataacaacaacgaaagatgtcagattcaatccaggaaagatacttagttggatacgcactcgcagccaagaaacagcatagtttcatccaaccttctttgatcgaacactcaaggcaacgaggcattgatctggtcaagcttgatccgacgaaatcgttgttggagcaagggaagcttgattgcataatccacaagctttacgatgtgtattggaaggagaatcttcatgagtttcgcgagaaatgtcctggtgttcctgtaatcgatttgcctgaggctatcgagcgattgcacaatagggtttcgatgcttgaggtgataactcaattgaggtttcctgtttcagatagcgagagatttggtgtcccggagcaagttgttgttatggattcgagcgtcttgagcggtggaggagctttaggggagcttaagtttccggtgattgctaagccgttggatgctgatgggagtgctaaatctcataagatgtttttgatttatgatcaagaagggatgaagattttgaaagctcctattgtgttgcaggagtttgtgaatcatggtggtgtgatctttaaggtctatgtggttggagatcatgtcaaatgtgtaaagagaagatctttacctgatatctctgaagagaagattgggacgtcgaaagggtctcttccgttttcgcagatatcgaatctgactgctcaagaggacaagaacattgagtatggtgaggataggagcttagagaaagtggaaatgcctccgttaagtttcttgacagatctagcaaaggccatgagggaatcaatgggactcaatctctttaacttcgacgtgattagggatgccaaagatgctaataggtaccttataattgatattaactactttcctggatatgctaagatgccctcttacgagcctgtgttgactgagttcttctgggacatggtcactaagaagaatcatgtctgagaaataatctgttggggagttagcaggaacattgttggggaggatttgtaccattgcaatgtgttgcaactgccattgcaattctggcctatggtgactagctgctttgctaattttcatttggattcttgaacttgtgctttttatatttttttagttgtttctcttttgtttacttccgagttttgcaaagccatgttcaaatgcataactgttgctactcttgaaaagcattgaatctctaaattcttggcaaaaaaaaaaaaaaaaaaaaaaaaaaaaaaaaaaaaaaaactcgagggggggcccggtacccaattcgccctatagtgagtcgtattacaattcactggccgnnnnnnnnnnnnnacaatc

SEQ ID NO: 117808 - DNA, 1651 bp, Arabidopsis thaliana
  unsure (1)..(1651): unsure at all n locations
nnnnnnnnnnnnnnnnnnnnnnnnnnnnnnnnnnnnnnnnnnnnnnnnnnnnnnnnnnnnnnnnnnnnnnnnnnnnnnnnnnnccacgcggtttcaaaatccgaaaaagaccaatcaatcctttctccctgaaatggcggcggctctgcagacgaatatccggacggtcaaggttccggctacgttcagagctgtaagtaaacagtcattggcaccctttagagtaagatgtgctgttgcttcccctggtaaaaaacgatacaccatcactctccttcccggagacggcatcggtccggaggttgtctccattgccaaaaatgtgcttcagcaagctggatctttggaaggagtggaatttaacttccgtgagatgcccattggaggagctgctttggatttggtcggagtgcccttgccggaggagactatctcagctgcaaaagaatcagatgcagtgcttcttggagccattggagggtacaaatgggataacaatgaaaaacatctgaggcctgagaaggggttacttcagattcgtgcagctctcaaagtctttgcaaatctgagacctgctacagtcctcccacagttagtggatgcttccaccttaaagagagaggtagcagaaggtgttgatctaatggttgtaagggagcttacaggaggtatttactttggagagccaaggggcataaagaccaatgaaaatggcgaggaagttgggtttaatactgaggtttatgctgctcacgagattgatagaattgctcgtgttgccttcgagactgctcggaaacggcgtggcaagctgtgttctgttgacaaagctaatgttttggaagcctcaatcttatggaggaaacgagtaacagcattagcctctgaatatcctgatgttgagctgtcacatatgtatgttgacaatgccgcgatgcagcttgttcgtgacccaaaacagtttgacaccatcgtcacaaacaacatttttggtgatatattatccgatgaagcttcaatgatcacaggaagcataggaatgctgccatctgctagtctcagtgattcgggacctggactctttgaacctatacatggttctgcacctgatattgctggacaggataaggcaaacccattggcaaccattctaagcgctgcaatgcttctgaaatacggacttggagaagaaaaggcagccaagagaattgaagacgcagtgttggttgctctgaacaacggattcagaactggagacatatactccgcgggaacaaaactggtgggctgcaaggagatgggagaggaggttctgaagtcagtggactcccaagttccagcttctgtttaatatttgtagaaactttgaagagttcatttccaacaacaaatgttgtaccttgtactcaaagagtctcggttttattagcgatttttataatgtgagattattagagggacttatttgatcgaactgaaacgttgatgtttttttctgagaaataaatatccttgtggagatnnnnnnnnnnnnnnnnnnnnnnnnnnnnnnnnnnnnnnnnnnnnnnnnnnnnnnnnnnnnnnnnnnnnnnnnnnnnnnnnnnnnnnnnnnnnnnnnnnnnnnnnnnnnnnnnnnnnnnnnnnnnnnnnn

SEQ ID NO: 117809 - DNA, 1171 bp, Arabidopsis thaliana
atgattctccggcactaatcgactcattaagggaaagctcgtacgcctgcaggtaccggtccggaattcccgggtcgacccacgcgtccgtacggctgcgagaagacgacagaaggatacggctgcgagaagacgacagaagggtacggctgcgagaagacaacagaaggggacggctgcgagaagacgacagaaggggacggctgcgagaagacgacagaagggtacggctgctagaagacgacagaaggggatgattgtaagggagctcactggaggtatttactttggagagccaagaggcattacgatcaacgaaaatggcgaagaagtcggttttaatacagagatctacgctgctcacgagattgacagaattgctcgtgttgcattcgagactgctaggaaagggcgtggcaagctgtgttctgttgacaaagccaatgtcttggatgtatgttttgaattgtttttccactccactcttgtgtgtttttcgttatacaattatttttttgttttgtttcgtataggcatcaatattgtggaggaaaagagtaacagctttagcctctgaatatccagatgttgaactatcacatatgtatgtcgataatgctgcgatgcagcttgtccgtgacccgaaacagtttgacacaatcgtcaccaataacatttttggtgatatattgtctgatgaagcttcaatgatcactggtagcattgggatgcttccatctgctagtctcggtgaatcgggacctggactctttgaacctatacatggttcagcaccagatatagcctggacaagacaaggcaaacccattggccaccattctcagcgcggcgatgcttctgaagtatggacttggagaagaaaaggctgcaaagaggattgaagacgctgtcgtggatgctctgaacaaagggttcagaaccggagacatctactcccctggaaataaactggtgggatgcaaggaaatgggtgaggaggttctcaaatcagtggaatccaaagttccagctactgtttaagtttattgatgatttgaagcacttgaaaaagtttgtgtagcacttggttttacggtcacttatatgctaatccatgcaacattgtaccttttataataaataaattatttgggatcgattctgcaaaaaa

SEQ ID NO: 117810 - DNA, 2094 bp, Arabidopsis thaliana
ataattataatttatttgctctcggcaggatctatataatacacagaccagtctttgcgtggaatatagaccccacgcgtccggggtttatatcttttcatcggattttctttgtcgagcaagagccatgtcactgagacccaacgctaagacggaggttcgccggaaccgatacaaagttgcagtggatgcggaggaaggacgacggaggagagaagacaacatggttgagatccgtaaaagcaagcgtgaggagagtttgatgaagaagagacgtgaaggtatgcaagctcttcagggtttcccttcagcttccgccgcctccgtcgataagaagttggatagtctgaaggatatggtcgctggggtttggtccgatgaccctgccttgcagcttgagtccactactcagttcaggaagcttctctctattgagagaagtcctccaatcgaggaagtgataagtgctggtgttgttcctaggtttgttgagtttcttaagaaagaagattaccccgccattcagtttgaggcagcttgggctctaacaaacattgcatctggaacatcggatcacactaaggttgtaatcgatcacaatgctgttccaatctttgttcagcttcttgcttcccctagcgatgatgttcgtgaacaggctgtatgggctttgggtaacgttgctggtgattcaccacggtgccgtgatcttgttcttggatgtggggcactgcttccgctgctcaatcagcttaatgagcatgctaaattgtccatgcttcgaaatgccacttggaccttgtcaaacttctgtcgtggcaagcctcagcctcactttgaccaggtcaaacctgctcttcccgcccttgaacgactaattcattcagatgatgaagaagtcttgacagatgcctgttgggctctttcttacctctctgatgggaccaatgacaaaatccagactgtcatccaggccggtgttgtcccaaaacttgttgaacttctcctccatcattctccatctgtgctaattcctgctcttcgcactgttggaaatatagttactggagatgatatacaaacacagtgcgtgatcaatagtggtgctctaccttgtcttgccaacctgctcactcaaaaccataagaaaagcataaagaaggaagcttgctggacgatttcaaacatcacagcaggcaacaaagatcagatccagacggtagttgaggctaatttgatttccccgttggtgagtctgcttcaaaatgctgaatttgacattaagaaggaagctgcatgggcaatttcaaatgcaacttcaggtggttctcatgatcaaataaaatacctggtggagcaagggtgcataaaaccattatgcgatctcctggtttgcccagatccaagaatcataactgtctgccttgaaggattggaaaacattttgaaggtgggagaggcagagaagaacttgggtcacacaggagacatgaactattacgctcagctgattgatgatgcagaagggctagaaaagatcgagaaccttcagagccatgacaacaatgagatctatgagaaggctgttaaaattctggagacatactggcttgaagaggaagatgatgagacacagcaacctccaggtgttgatggttctcaggctgggttccagtttggagggaatcaagctccagtaccatccggaggattcaacttcagctgaaggaatggaattggaagcttgcaacttgagaatggtgaaaggtcagagtcagtcagagtctagtttcactgccatggttatactccaggtctggtctggtctggtctcagaggtttgtaccgggtggtcggtttaaaagtacagcgtctgagaaagtgtttggttcattgtccagggctatttttttgaaatgactggtacaccggtcgtgagtcgacctttgtgttgtttttaaattttggagggttataaaaacttacagtggagtcttttgtttttgtgttgacaacagtttgtatgtcggttaaaaaattgaaaccataaacccttttttggtcttcatcgtcatctaaagcctgaaaaaattt

SEQ ID NO: 117811 - DNA, 2169 bp, Arabidopsis thaliana
tataagaattgtcacacgtcttcatcacgccaaactcaaatgcgaagttttctactctaaactttcttaaaggaatataatatccttttcacaaaaccaagttttgccaaaaaaaaatgtattttattttaaattaatattagtcggtgcgaaaagactaatgaataaacaagtcaacttaagtaaattaatggtctctgtatcgaatcttaaaatttagattttaccaaaatgtttttgtaaaccaacgaaattcaatctttctctctgtgccttttttcctcttttctcgttcccctctacttcatttagggtttatcatcctctaccaatccgccgattctatacatacacttttcatatatatacatacatcgtctccactctcgttggctcatttttcattcaccgccacgaagcaagaggagattcgtattagccaccatgtctttgagacctaacgctaagactgaggttcgccggaaccgctacaaagtggcggtggatgctgaggaaggaagacggaggagagaggacaacatggtcgagatccgtaagagtaagcgtgaagaaagcttacagaagaagcgtcgtgaaggccttcaagctaatcagctacctcaattcgctccttcttctgttcctgcttcatcaactgttgagaagaagttggagagtttgcctgctatggttggtggtgtttggtcagatgatagaagtttacagcttgaagcgactactcagttccggaaattgctttctattgagcgtagtcctccgattgaagaagtgattgatgctggtgttgtgcctcggtttgtggaatttctcactagagaggattatccacagcttcagtttgaggctgcttgggcattgacaaacattgcttctgggacttcagagaatacaaaggtggtcattgaacatggtgctgttccgatttttgttcaactattggcttctcagagtgatgatgtccgtgagcaggctgtgtgggcattagggaatgttgctggtgattctccacggtgcagagatcttgtccttggtcaaggagctttgataccattactctctcagttgaatgagcatgctaaactctcgatgctgagaaatgctacttggaccctctctaatttctgcaggggcaagccacagcctccctttgaccaggtccgtccagcactcccagcccttgagcgcctgattcattcgactgatgaggaagtgttaacggatgcatgttgggctctctcttacctttccgatggcacaaatgacaaagtccaatctgtcattgaggcaggtgttgttcctcgactcgtcgagcttctccagcatcaatcaccatctgtgcttattcctgcccttcgtagtattggtaacaatgtcactggagatgatctgcagacacagtgtgtaattaagtcatgtgcacctcctagccttttgggccttctgactcacaatcataagaagagcatcaaaaaggaagcttgctggacaatctcaaatatcactgctggaaacagggaccagattcaggctgtgtgtgaagctggtttgatttgccctcttgtcaatctgcttcaaaatgcggagtttgatataaagaaagaagctgcgtgggcaatatcaaatgccacttcaggtggttctcctgaccaaatcaagtacatggtggaacagggagtcgtgaaaccactgtgtgatcttttggtgtgccctgatccaaggattatcactgtgtgtctggaaggattggagaacattttgaaagttggggaagctgaaaaggtcacaggaaataccggggatgtaaacttttatgcacagctgatcgatgatgctgagggattagaaaagattgagaatctgcagagtcatgacaacagcgaaatctatgagaaggcagtgaagattcttgaaacgtactggttggaagaggaagatgaaactttaccacctggtgatccctctgcacaaggcttccagtttggaggaggtaatgatgcagccgtaccaccaggtggattcaacttccagtgaaggtaaaaaaacctcactacttgggactaatttatctaagcatctaaggctagactagcaaacagagtaaatctgcctgtgtgtctaccttgtgtgaatctgtgagtctggttttgg

SEQ ID NO: 117812 - DNA, 389 bp, Arabidopsis thaliana
gttaacggatgcatgttgggctctctcttacctttccgatggcacttcctcatcagtcgaatgaatcaggcgttcaagggctgggaggaagtgttaacggatgcatgttgggctctctcttacctttccgatggcacaaatgacaaaatccaatctgtcattgaggcaggtgttgttcctcgactcgtcgagcttctccagcatcaatcaccatctgtgcttattcctgcccttcgtagtattggtaacattgtcactggagatgatctgcagacacagtgtgtaattagtcatggtgcacttcttagccttttgagccttctgactcacaatcataagaagagcatcaaaaaggaagcttgctggacaatctcaaatatcactgctgg

SEQ ID NO: 117813 - DNA, 418 bp, Arabidopsis thaliana
  unsure (1)..(418): unsure at all n locations
cttgaaacgtactggttggaagaggaagatgaaactttaccacctggtgatccctctgcacaaggcttccagtttggaggaggtaatgatgcagccgtaccaccaggtggattcaacttccagtgaaggagctgaacatgacgatttgaagagtcgaaggagcttaaagagtttgggggcactggttaaaaagggtatgattagagagtctggtcttctgtgtaaaagtcagatggggtgccttacttagtctggcctggtccggtcagatccagtggttggtgggtttgtgtcatggtataagcttgttgggtgtgannnnnnnnnnnnnnnnnnnnnnnnnnnnnnnnnnnnnnnnnnnnnnnnnnnnnnnnnnnnnnnnnnnnnnnnnnnnnnnnnnnnnnnnnnnnnnnnnnnn

SEQ ID NO: 117814 - DNA, 1978 bp, Arabidopsis thaliana
  unsure (1)..(1978): unsure at all n locations
gagagagagaactagtctcgagtttaaataatcttccgatcgttaattctcttccgatttcgattcgattttagcggcgatgtctctcagacctagcgcgaagacggaggtgcgacggaatcggtacaaagtagcggtcgatgcggaggaaggacggcggaggcgagaggataacttggttgagatcaggaagaacaagagagaggaaaatttgcagaagaagagatttacgtcttctatggcttttggctcagcaacgggacaaacggaacaggatctttcttcagcgaaccaattaaaagataatctacctgctatggttgctggaatctggtcagaggatagcaattcacaattggaggcaacaaatctcttgcggaaactgctttctattgaacaaaatcctcctatcaatgaagttgtacaatctggtgttgttcctcgtgttgtgaagtttctttccagggatgacttccccaaacttcagtttgaggcagcttgggcgctcaccaacattgcttcagggacatcagagaacacaaatgtcatcattgaaagtggagctgtcccgatattcatccaacttctcagctctgctagtgaagatgtccgcgaacaggctgtctgggcattgggaaatgttgctggagactcaccaaaatgccgggatttagtcctaagttacggtgccatgacacttcttctgtctcaattcaatgagaatacaaagctttcaatgctgagaaatgctacatggacattatcaaacttctgcagagggaagcccccacccgcatttgaacagacacaaccagctttaccagttcttgagcgccttgtgcaatcaatggatgaagaagttctcacagatgcatgctgggctctgtcatacctctcggataattcaaacgacaaaatacaagcagtcattgaagcaggagttgttcctcgcctcatccagctcttaggtcattcgtcgccatcagtgctgattcctgctcttcgtaccattggaaatattgtaaccggggatgatctacagactcagatggttctcgaccagcaagcgcttccttgtcttttgaaccttctaaaaaacaattacaagaagagtatcaagaaggaagcttgctggactatctccaacattacagctggaaatgcagatcagatacaagcagtgattgatgcaggtataatccagtctcttgtttgggtgcttcaaagtgcagagttcgaagtaaaaaaagaagctgcttggggaatatcaaatgctacttctggtggcactcatgatcaaatcaagtttatggtgagccaaggctgtatcaaacctctatgcgatctccttacttgcccagatctgaaagttgtaacggtttgcttagaagcactagagaacattctcgtggttggagaagcagagaagaacttaggtcacacaggagaagacaacctctacgctcaaatgattgacgaagcagaagggttagagaagattgagaatcttcagagtcacgacaacaatgatatctacgacaaagccgtgaagatcctcgaaacattttggactgaagacaatgaagaagaaggcaacgacgagaatcatgctccacaatctggtttccagttcggaagcaccaatgttcctcctggtcaattcaactttatttgaaaggtaaaatagttgaattgggtcatagaagttgcttggacttttaagtaagccacatatcgaacgaaagtggtaacatcacaaagatgaaatatcaatcttctctatctcttcatgcccactccttaactcgtggacatgaactatgaagaaacatagtacgattttcttttctttttggaagtttgtctcaataactaaatcatttggggaagagaaacaattattctgtgttagccatcatctcgtctttcaacaaagttccttttttccnnnnnnnnnnnnnnnnnnnnnnnnnnnnnn

SEQ ID NO: 117815 - DNA, 1996 bp, Arabidopsis thaliana
cccccccttgaggtccgcgggattcgataggctggttatcgatttcggggccgtttccgatttcgattcgattttagcggcgatgtctctcagacctagcgcgaagacggaggtgcgacggaatcggtacaaagtagcggtcgatgcggaggaaggacggcggaggcgagaggataacttggttgagatcaggaagaacaagagagaggaaaatttgcagaagaagagatttacgtcttctatggcttttggctcagcaacgggacaaacggaacaggatctttcttcagcgaaccaattaaaagataatctacctgctatggttgctggaatctggtcagaggatagcaattcacaattggaggcaacaaatctcttgcggaaactgctttctattgaacaaaatcctcctatcaatgaagttgtacaatctggtgttgttcctcgtgttgtgaagtttctttccagggatgacttccccaaacttcagtttgaggcagcttgggcgctcaccaacattgcttcagggacatcagagaacacaaatgtcatcattgaaagtggagctgtcccgatattcatccaacttctcagctctgctagtgaagatgtccgcgaacaggctgtttgggcattgggaaatgttgctggagactcaccaaaatgccgggatttagtcctaagttacggtgccatgacacctcttctgtctcaattcaatgagaatacaaagctttcaatgctgagaaatgctacatggacattatcaaacttctgcagagggaagcccccacccgcatttgaacagacacaaccagctttaccagttcttgagcgccttgtgcaatcaatggatgaagaagttctcacagatgcatgctgggctctgtcatacctctcggataattcaaacgacaaaatacaagcagtcattgaagcaggagttgttcctcgcctcatccagctcttaggtcattcgtcgccatcagtgctgattcctgctcttcgtaccattggaaatattgtaaccggggatgatctacagactcagatggttctcgaccagcaagtgcaaccttgtcttttgaaccttctaaaaaacaattacaagaagagtatcaagaaggaagcttgctggactatctccaacattacagctggaaatgcagatcagatacaagcagtgattgatgcaggtataatccagtctcttgtttgggtgcttcaaagtgcagagttcgaagtaaaaaaagaagctgcttggggaatatcaaatgctacttctggtggcactcatgatcaaatcaagtttatggtgagccaaggctgtatcaaacctctatgcgatctccttacttgcccagatctgaaagttgtaacggtttgcttagaagcactagagaacattctcgtggttggagaagcagagaagaacttaggtcacacaggagaagacaacctctacgctcaaatgattgacgaagcagaagggttagagaagattgagaatcttcagagtcacgacaacaatgatatctacgacaaagccgtgaagatcctcgaaacattttggactgaagacaatgaagaagaaggcaacgacgagaatcatgctccacaatctggtttccagttcggaagcaccaatgttcctcctggtcaattcaactttatttgaaaggtaaaatagttgaattgggtcatagaagttgcttggacttttaagtatcaagttcatatccaagtttacagaccatgatcttgatgttgtccaaaacccaacaagcccttctcaagactcatcttctttagctctacgaaaaacccaaggcagaagaaagtgtcaaacttcatcatcactattacctcaaaccctaactccacataaccttttaaccattgacaaatcactttgaaccttttttctactaagaccctaaactactaaaccctaaaacccaaaagtcaaaaacccaaaactcaaaagtcgtatgta

SEQ ID NO: 117816 - DNA, 728 bp, Arabidopsis thaliana
atcttcatcatcttcctctgagaaatcaaaaactcgatcgatcaattcgttgttcgtctacatcgattccttcagaacctagtgatcctctgttttggttgattcgattaagctaaccatgtcttacaaaccaagcgcgaagactgaggttcgccggaacaggtataaagtatctgtggacgccgatgaaggtcgccggagacgggaggataacatggtggagatccggaagaacaagagagaggagaacttgcagaagaagcggcgtgaaggttttaatccttccatggcgtcacagccagggcaggatttctcctcgtctctccctacggaaacgagattggagaatatacaacagatgattgctggagtaatgtcagaggatagagacttacaattggaggcgacggctagcttcaggagattgctttcaattgagcgaaatcctccaatcaatgaagttgttcaatctggtgttgttcctcacattgtgcaatttctttccagggatgacttcactcaacttcagtttgaggcagcttgggcgcttaccaatatcgcttcagggacatctgagaacactagggtcattattgatagtggtgctgtccctttattcgtcaaacttcttagttctgcaagtgaggaagttcgagaacaggctgtatgggcattgggaaacgttgctggtgactcgccaaaatgtcgtgatcatgtcctaagttgtg

SEQ ID NO: 117817 - DNA, 1112 bp, Arabidopsis thaliana
acgtcccataaagaagcgccacacacacagtcacacgaaaactctactgtaactgccaaatcttgttgttttcttaaacgaagagagaagaaagaaagaaaaaaacgttacggattctctgcttcggtttcgcgattgaagcttgagatttcatcttgaacatccgatatggctgaaatcaaggatgaaggaagcgccaagggctatgctttccctctcaggaaccctaatgttacgctgaatgagagaaactttgcagccttcactcacagatcagctgctgctcatccttggcatgacttggagattggtccagaagctcctactgttttcaactgtgttgttgaaattagcaaaggtggaaaggttaagtacgagctagacaagaacagtggccttattaaggttgatcgcgttctctactcatccattgtgtacccccacaactacggtttcatccctcgaactatctgtgaagacagtgatccaatggatgtcctggtactgatgcaggagcctgtgctaaccggatcattcctccgtgcccgtgctattggtctaatgcccatgattgatcagggtgagaaagacgacaagatcattgcagtatgtgctgatgatcccgagttccgtcactacagagacatcaaagagcttccccctcaccgtctagctgaaatccgtcgcttctttgaggactacaagaagaacgagaacaagaaagtcgacgttgaagctttccttcccgctcaagctgccatagacgctatcaaggactccatggatctttacgcagcttacatcaaagctggcctgcaacgctaatgaagaaaccagtccttttccgttcctcccggtttgcttagacatcactgaagccgccttctatactacatgcatgttagataaaatttcaattggtgcatttaatttcgtaatgctcatcagaaaacattgttgaacttaaagctttctgatgatgatgaaaaatttccagtacaatcataaaatttgaaatattagcttttcttttaaaaaaaaaaagggcggccgctctagaggatccaagcttacgtacgcgtgcgtgcgacgtcatagctcgaaaagagtgt

SEQ ID NO: 117818 - DNA, 675 bp, Arabidopsis thaliana
  unsure (1)..(675): unsure at all n locations
gttgctcaaaaccttcttcctgaaatggcttcttctctcatcttcctcctcctcgttaccctaaccttttcagcatcaaccctaatctcagccaaatccaacacaacaacaataatcgaatcaacttgcaaaaccacaaactactacaaattctgcgtctcagctctcaaatccgacccaagaagtcccacagccgacacaaaaggtctcgcctccattatggtcggcgttggtatgacaaacgccacctccaccgcaaattacatcgctggaaacctatccgccaccgtaaaagacaccgttctcaaaaaggtcttacaagattgctccgagaagtatgctctcgccgctgattctctccggctgacgattcaagatcttgatgatgaagcttatgactatgcctccatgcatgtgttggcggcgcaggattatcctaatgtttgccggaatatttttaggcgggttaaagggttggcttatccggtggagattcgccggcgtgaagctagtctgagacgtatttgtggtgttgtctccgggattcttgatcgccttgttgaatgatttacatttgcattaactactttcgtaaaatctctatttaaattatcgtatttcatgaatttaatatgaccgttactttattcccggnnnnnnnnnnnnnnnnnnnnn

SEQ ID NO: 117819 - DNA, 1038 bp, Arabidopsis thaliana
tacgcctgcaggtaccggtccggaattcccgtttcgacccacgcgtccgcccacgcgtccgtcttcttcttcgcttcagccatgggaaccctatctctctcatcttctctcaaaccttcactcgtttcatcaagactcaattcatcttcctccgcatcttcttcttcgtttcctaaaccaaacaatctctacctcaaacccaccaaactcatttcaccacctctcagaacaacttcaccatcgccattgagattcgccaatgcttcaatcgagatgtcgcagacacaggaatcagctattcgcggagctgaatctgacgtcatgggtcttctccttagggaacgaatcgtctttctcggtagtagtatcgacgatttcgtcgctgatgctattatgagtcagttgcttctcttagatgctaaagatccaaagaaagatatcaaactctttatcaattctcctggtggttctctcagtgcaaccatggctatatacgatgtggttcagcttgtgagagctgatgtttcgacgattgctcttggcattgctgcatcaacagcttcgattattcttggtgcgggaactaaaggcaagcgctttgctatgcccaacacgaggataatgattcatcaacctcttggaggtgcaagcggtcaagctatagatgttgagattcaagctaaggaagttatgcataacaagaacaatgtcaccagcattatcgcgggatgtactagtcgatcgtttgagcaggttctgaaagatattgatagggaccggtacatgtctccaattgaagcagttgagtatggtttaattgatggagttattgatggagacagcattattcctcttgaacctgttcctgatagagtgaaaccgagagttaactacgaggagattagcaaggatccgatgaaattcttgactcccgagatacctgatgatgagatctactaaagcccagctcgtctagaacagggatcttccaatgtgactaagactagcagtttcgaagaaaagctcaatttcttctgc

SEQ ID NO: 117820 - DNA, 2132 bp, Arabidopsis thaliana
gtaatttagaaacaaacaaaaagaggaaagtcaaatccacgattaagaagagtaactttgcacgcggcttcgtgatgagttcgtggagcaagagctttaccaggctcgtcaatggtgtttcgcttgtagcgaaagagatctataatcagtcaccggagttacaaagagcgagaaatggagatctcgaaggtttaataacgtcttcagggaaaaaagctttggttgccgccaccgacttagtcggacttacctccgggaagcttcgcgaactctcgattcgtcgatctaaagaaccttccgttgtttacttcgacgaaggagataataaggataacgtcgtcgcaacgcctgagattagatctgttaacaccgaacctagcgagaaaatcgttgattcgaaagtcctgagaagtgaatttagcgatgaagttaagaattcaaatagagaaggtgagattaaggtttcaggcgttgaagcgggagagattattggagttagagctgttgaatcaggtacggtaacggaagcatcatctccgtcggaggtagtacctccggtgaagagacggagacctagagagaggaaggttccttcaactcctatggcaagagcttatgggttttttaatttaggagctgctcttgcttggggagctgttaaagaatctacgtataggatggtaaatgggacaccaatgacaccagacaatcagcctgcgttatcgtctttgatgtctaaggaaaatgctgaaagattggctcttggattgtgtgaaatgcgtggagctgctcttaaagttggccaaatgttgagtatacaggacgagagtctcgttcctgctccgatcttgaatgctctggaatatgtgcgtcaaggtgctgatgtgatgccaaggagtcaacttaatccagttttggatgctgagttaggttccaattggcaatccaagttgactagttttgattatgaaccgctagcggcagcgagtattggtcaggtgcacagagctgttactaaagatggattagaagttgcaatgaagattcagtaccctggcgttgccaacagcattgaaagtgatattgaaaatgtcagacgcttgttaaattatacaaatctaattccaaagggactgtttctagacagagctataaaggttgccaaagaagagttggcgcaggagtgtgactatgaaatcgaagcagtcagtcaaaagcgctttcgtgatttgctttcagacactccagggttttatgtgccgcttgtggtagatgagacttcaagcaaaaagattctaaccactgaacttatatctgggatccccattgataaagtagcgttgttagatcagaaaacacgagattatgttgggaggaagatgctagaactcactttgaaggagctctttgtcttccgctttatgcagacggatccaaactggggtaacttcttatacaatgaagccacaaagacaataaatcttatcgatttcggagcagctcgtgattaccccaagaaattcgtcgatgactatctacgaatggtgatggcatgtgcagaaaaagacagtgaaggagtgattgaaatgtctaggagactcgggttcttaaccggagatgaatcagatgtaatgctagacgctcatgtccaagccggtttcatagtgggtctaccttttgcagaacctggtggctatgctttccgaaccaacaacattgcttctagtatctccaatttaggagcaaccatgttgaaacatagactcagtccaccacccgatgaagcctatagccttcaccgtaaattatccggcgctttcttggcttgtatcaagcttggagccaccgtcccttgccgtgatgtattgctccaagtttacaacaagtatcagttcgatgatgagccacaagatcccgtagtagctacaagctctgtttcttcatagctccctcatacacacacactacattaatgattttttctcgtccccttgtagggagtataaaacgattctttctttggtacaccttcgagtttaatttagtataattttttcaataatgtaaaatgttaaatattacaatgctggagaagtcaatcatcaaaaaaaaaactaaattactcacactgg

SEQ ID NO: 117821 - DNA, 1448 bp, Arabidopsis thaliana
gtcgacgtcgatggggatgagaagtagtggagaatccgctcacattgggattcgtcattcttcttctaaaacccgcaaaatttctccatttctaccaaaaatatccaacttttacttttctttcctgtgaaattatctgctcaaatctttggttcctgacggagatggcggcgatttcaggcatctcctctggtacgttgacgatttcacggcctttggttactcttcgacgctctagagccgccgtttcgtacagctcctctcaccgattgcttcatcatcttcctctctcttctcgtcgtctgctattaaggaacaatcatcgagtccaagcaacgattttgcaagacgatgaagagaaagtggtggtggaggaatcgtttaaagccgagacttctactggtacagaaccacttgaggagccaaatatgagttcttcttcaactagtgcttttgagacatggatcatcaagcttgagcaaggagtgaatgttttccttacagactcggttattaagatacttgacactttgtatcgtgaccgaacatatgcaaggttctttgttcttgagacaattgctagagtgccttattttgcgtttatgtctgtgctacatatgtatgagacctttggttggtggaggagagcagattatttgaaagtacactttgctgagagctggaatgaaatgcatcacttgctcataatggaagaattgggtggaaattcttggtggtttgatcgttttctggctcagcacatagcaaccttctactacttcatgacagtgttcttgtatatcttaagccctagaatggcatatcacttttcggaatgtgtggagagtcatgcatatgagacttatgataaatttctcaaggccagtggagaggagttgaagaatatgcctgcaccggatatcgcagtaaaatactatacgggaggtgacttgtacttatttgatgagttccaaacatcaagaactcccaatactcgaagaccagtaatagaaaatctatacgatgtgtttgtgaacataagagatgatgaagcagaacactgcaagacaatgagagcttgtcagactctaggcagtctgcgttctccacactccattttagaagatgatgatactgaagaagaatcagggtgtgttgttcctgaggaggctcattgcgaaggtattgtagactgcctcaagaaatccattacaagttaataaattagaaagtaaactaaaaaagattatttgtatcagctcatgaacaatagatataatcccatatacttgggaataaaggaataatgtgaaattcccatcgttgtgctagtgtgtgagagaatcaaataccctaatgatgtaaatgtactttgatgagcttaagtcgttgtagaccattttatccatactactagcctttgtggttgaaaaaaaaaaaaaaaaaaa

SEQ ID NO: 117822 - DNA, 1706 bp, Arabidopsis thaliana
cggacgcgtggggagatagataccgctgttttggttcttgtacccctgcgtgatcatgtcgcacacctctcttaacttcttcgatctcttctttttctctacacgattcgattgattcaagtatcaatcaatcgaatccgagataagtcatgagtttcttcaaatgggtttcttttgttttgatccttcacttgcttaatccgactctgatttcatgttcctctaatgggttatctcaaataccttcaaagtttcttactttggctaaaaggaatgattttttcgattggatggttggaatcagaaggagaatccatgagaatccagagttaggttatgaggaagtagagacatctaagcttgttagagcagagttggagaagatgggtgtttcttataagtacccagttgctgttactggtgttgttgggtatgttggaactggtcatgctccttttgttgctttaagggctgatatggatgcacttgctatgcaggaaatggtggaatgggaacacaagagtaaggttccagggaagatgcacgcttgtggacatgacgctcacactacgatgcttctcggtgctgcaaaattgctcaaagaacatgaagaagagctacagggcacagtggttctagttttccaaccagctgaggaaggaggaggaggtgcaaagaagattgtggaggctggagtgttggagaatgtgagtgcaatctttggattacatgtcacaaatcaattggcattaggtcaagtgagctcgagagagggtcctattttggctggtagtggctttttcaaagctaagataagcgggaaaggaggccacgcagctcttccgcagcataccatagatccgatactggcagcttcaaatgttattgttagcttacaacacctcgtttcacgagaggcagatcctttagactctcaggtggttacagttgctaaatttgaaggcggtggtgctttcaatgtgattcctgactctgttactatcggtggtacattccgagctttttccactttttcaactaaaagctttatgcaactcaagaaaagaattgagcaggttatcacaaggcaagcgagcgtgaatatgtgtaatgcaacagtggatttcattgcaagaggagaaacctttttttccccaccaactgtaaatgacaaagccttacaccagtttttcaagaacgtttcaggcgatatgttagggattgagaattacgtcgagatgcaaccattaatgggatcagaagatttctctttctaccaacaagcaatcccgggacattttagcttcgttggaatgcaaaacaaagctcgttcaccaatggcgagccctcactcgccgtactttgaagttaacgaagaattactaccttatggtgcttcccttcatgcttccatggccacaagatatcttcttgaactaaaagcttcaactctaaataagagtaacaaaaaagatgaactttgatgccaacaaacattggcttctcctattcttctactctgaaaaatgtcaaaacatggtaacagttttttcttttttacagagcctgccatgtaaagattaataaattgttatgcagtgtcaagcttctattaaatccaagaaatgttattactgcaaacaaaaacagatttgggccattgcaatgagagagctgaaacggtcaatttaaacaaatcagagcgg

SEQ ID NO: 117823 - DNA, 2212 bp, Arabidopsis thaliana
  unsure (1)..(2212): unsure at all n locations
nnnnnnncagctactnnnnnnnnnnnnnnnnnnnnnnnnnnnnnnnnnnnnnnnnnnnnnnnnnnncggacgcgttgacccacgcgtccgcccacgcgtccgattaacttctctcacactgactctgcgaccctaatttgtgagctctcttctctttgcgcagtcaatttgctacaacttagaaaatggcggcggctacttcatccatcgctccttctctttcatgcccatctccttcttcttcatccaaaaccctttggtcttccaaagccagaaccttggctctacccaatatcggtttcctctcgtcttcttccaagtctctgaggtcgcttactgccaccgtcgctggaaatggcgccactggatcctcccttgccgctcgcatggtttcttcgtctgcggtcaaagcccctgtttctctcgattttgagacatctgtcttcaaaaaggagaaagtttctcttgctggttacgaagagtacattgtgagaggaggaagagacttgttcaagcatctcccagatgctttcaaggggattaagcagattggtgtgattggctggggatctcagggacctgcccaggctcagaatttaagggattcacttgtggaggcaaagtctgacattgttgtcaagattggtctcagaaaagggtctcgctcatttgaggaggcacgtgctgctggcttcactgaagaaagtggtactttgggtgatatatgggaaactatcgctggcagtgatcttgtattgcttttgatctctgatgctgctcaagctgataactatgagaaaatattctctcacatgaagccaaacagcattcttggtttatcacacgggtttctactagggcatttacagtcctcgggactcgatttcccaaagaacatcagtgtggtcgctgtatgccctaagggaatgggtccttctgtgaggaggctttacgtccaaggaaaagaaattaacggtgctggaatcaacgccagttttgcagtccaccaggatgttgacggtagagccgccgatgttgcattgggatggtcagtagcacttggttctccgtttacttttgctactactcttgaacaggagtacaggagtgacatctttggagaaagaggaattttgcttggtgctgttcacggaatcgtggagtctctgtttagaagatacaccgaaaatgggatgagtgaagacttggcttacaagaacacagtagaatgcatcacaggaacaatttcaaggactatctctacccagggaatgttggctgtgtacaactccttgtctgaagaaggtaaaaaagattttgagactgcatacagcgcatccttctatccttgtatggagattctctatgaatgttacgaggatgtacaaagtggcagcgaaatccgaagtgttgtcttagccggtcgtcgcttctatgaaaaggaaggcttgccagcattccctatgggaaatattgaccagacaagaatgtggaaggtgggtgaacgcgtcaggaagtccagacctgctggtgacttgggtccattgtatcccttcaccgctggagtttatgtagcacttatgatggctcagattgagatcttgaggaagaaaggtcactcttactcagaaatcatcaacgagagtgtgattgaatccgtggactctctaaacccatttatgcacgccaggggagtgtccttcatggttgacaactgctcaaccacagcaagattgggttcgaggaaatgggcgccacggtttgactacatcctgacccaacaagctcttgtggctgtggacagtggtgcagcaatcaacagagacctaatcagtaacttcttctctgatccagtccatggtgccattgaggtctgcgcacagctcaggcctaccgttgatatctctgtgcctgctgatgcagactttgttcgacctgagttgcgtcaatctagcaactgagtgaagggttgaaagtttgtcagtctcttatttgtaatcggagtattaagtcgagagtttgtgatgttttcttaggcgtgactgtttgttttgtttgaaggattatgtctctttgctttggtcttaaaatctacttaaatcaaaaaaaaaaaaaaaggaaaaaaaatctagaggatccaagcttacgtacgcgtgcaggcgacgtcannnnnnnnnnnnnngtcacnnnnnnacaatcgcagcnnnnnnnn

SEQ ID NO: 117824 - DNA, 703 bp, Arabidopsis thaliana
  unsure (1)..(703): unsure at all n locations
ttccttggaattttcccacagattggaagtggtaccntaggatccaactntgtactggnccatnttcccctcccgtggagttntntgcnctttntgcccgattgagatctgngaagaaaggtcactctactcagaatctcaacgngggtgatgaatcctgactctctaacccattatgcacgccagggagtgtccttcatggttgacaactgctcaaccacagcaagattgggttcgaggaattggggcgccacggtttgactacatccctgacccaacaagctcttgtggctgtggacagtggtgcagcaatcaacagagacctaatcagtaacttcttctctgatccagtccatggtgccattgaggtctgcgcacagctcaggcctaccgttgatatctctgtgcctgctgatgcagactttgttcgacctgagttgcgtcaatctagcaactgagtgaagggttgcacgtttgtcagtctcttatttgtaatcggagtattaagtcgagagtttgtgatgttttcttaggcgtgactgtttgttttgtttgaaggattatgtctctttgctttggtcttaaaatctacttaaatcaaaaaaaaaaaaaaaaagggcggccactcggacgcgtgggtcgacccgggaattccggaccggtacctgcaggcgtacgagctttccctaaagtgagtcgtatt

SEQ ID NO: 117825 - DNA, 563 bp, Arabidopsis thaliana
  unsure (1)..(563): unsure at all n locations
tgacgtggtacgcacgcgtacgtaagctcggaattcggctcgagctccatacaaggattgaagcctgcgctgtatgcagtggcagcgaaatccgaagtgttgtcttagccggtcgtcgcttctatgaaaaggaaggcttgccagcattccctatgggaaatattgaccagacaagaatgtggaaggtgggggaacgcgtcaggaagtccagacctgctggtgacttgggtccattgtatcccttcaccgctggagtttatggagcacttatgatggctcacattgagatcttgaggaagaaaggtcactcttactcagaaatcaccaacgaggagtgtgattgaatcccgtggactctctaaaacccatttatagcccgccagggggagtggccttcatgggatgacaacctgctccacccacaccaaagaattgggtttcgaggaaatggggcggccacggtttggactcacatcccggactccaccaagtctcttggggttttgggcaattgggtcagcaattaacnaggggccttatcagnaacttttttcttttgnncc

SEQ ID NO: 117826 - DNA, 615 bp, Arabidopsis thaliana
gcacgcgtacgtaagctcggaattcggctctctgccattgaaaaaaatggcggaggagagcagagtcccatcatcggtgtcggtaacagtcgcccacgaccttcttctagccggccaccgctatctagacgtcaggactccagaagagttcagccagggacatgcctgtggggcgatcaacgtgccttacatgaatcgaggagcatcagggatgtcaaagaaccccgacttcctggaacaagtctcctcccatttcggacaatccgataacatcattgttggctgccagagcggtggtagatctatcaaagccaccaccgatcttctccatgcaggtttcacgggagtcaaagatatcgtcggtggctatagtgcctgggccaagaatggccttcctacaaaggcttgatgactcaccattcaccaaacatctttccttatctcttcgtctccttcttcttcaataatgcatcctttccgcatgtaatcatcaataaatgaccctcctttctctttgctgtctgatgtgatagcttggagggaggggatcatcgcgatctttttaaaatatctaaaaatacgagtgtgtgttgattcgttttttttttttttttt

SEQ ID NO: 117827 - DNA, 1751 bp, Arabidopsis thaliana
agagagagaactagtctgtgtcttttttttttttttttggtgataattgaaacatatgaaacaatcgtcgtcatagaagcagcagagattcaccttctttctttatctttccctctcagaaacaggaaacaaaattcaaaaagaacaaaaaaaaaaggtcaaaccaaaaacgatggcgtttcatcacaatcatctctctcaagacctctccttcaatcatttcaccgaccaacaccaacctccacctccgcaaccgcctcctcctcctccgcaacagcaacaacatttccaagaagcaccgcctcctaattggttaaacacagcgcttcttcgttcctcagataacaacaataacttcctcaacctccacacagccaccgctaacaccacaaccgcaagcagctccgattctccttcctccgccgccgccgccgccgctgctaaccagtggctatctcgctcctcctctttcctccaacgaaacaacaacaacaacgcttccatagtcggagatgggatcgatgatgtcaccggaggagcagacactatgattcagggagagatgaaaaccggcggtggagaaaacaaaaacgacggcggaggagctacggcggcggatggagtagtgagctggcagaatgcgagacacaaggcggagatcctttcgcatcctctttacgagcagcttttgtcggcgcacgttgcttgtttgagaatcgcgactccggttgatcagcttccgagaatcgatgctcagcttgctcagtctcaacacgtcgtcgctaaatactcagctttaggcgccgccgctcaaggtctcgtcggcgacgataaagaacttgaccagttcatgacacattatgtgttgctactgtgttcatttaaagagcaattgcaacaacatgtgcgtgttcatgcaatggaagctgtgatggcttgttgggagattgagcagtctcttcaaagcttaacaggagtgtctcctggagaagggatgggagcaacaatgtctgacgatgaagatgaacaagtagagagtgatgctaatatgttcgatgggggattagatgtgttgggttttggtcctttgattcctactgagagtgagaggtcgttgatggaaagagttagacaagaacttaaacatgaactcaaacagggttacaaggagaagatagtagacataagagaggagatattaaggaagagaagagctgggaagttaccaggagataccacctctgttctcaaagcttggtggcaatctcattccaaatggccttaccctactgaggaagataaggcgaggttggtgcaagagacaggtttgcagctaaaacagataaacaattggttcatcaatcagagaaagaggaactggcatagcaatccatcttcttccactgtattgaagaacaaacgcaaaagcaatgcaggtgacaatagcggaagagagcggttcgcgtagaaacaacaaacatatgatgtgaattggggaggtggaagatgggatttgaaagcagggttttagggatttaaagttgagaattttatggaggagtttgggttatacagagagaggggacagtattagaaagtaactttttgtgcaattacatagtaacgtagtttggttatgtgattatgcccatatattttattaagtagcacacaaaccaaaaagaaaatatgaaaactgaagatgcaggcttttgtttaatgttttttgtttgtttgtctgcaaaaaaaaa

SEQ ID NO: 117828 - DNA, 1514 bp, Arabidopsis thaliana
tttccctctccgaaacagaaattcaaaaacaaattcaacacgaaaacgatggcgtttcataacaatcactttaatcatttcaccgaccaacaacaacatcagcctcctcctccgccgcaacagcagcagcaacaacattttcaagaatcagcaccccctaattggctcctccgctccgacaacaacttcctcaatctccacacagctgccacagccgccgctacaagctccgattctccttcttccgccgccgctaaccagtggctctcacgatcctcatccttcctccaacgaggcaacaccgcaaacaacaacaacaacgaaacatccggtgacgtcatcgaagacgttcccggcggagaggagtcaatgatcggagagaagaaggaggcggagaggtggcagaatgcgagacacaaggcggagatactgtctcatccactatacgagcaacttttgtcggcacacgtggcgtgcctgaggatcgcaacgccggtggatcagcttccgaggatagacgcacagcttgctcagtctcaaaacgtcgtggctaagtactcaactttagaagccgctcaaggactcctcgccggcgatgacaaggagcttgaccacttcatgacgcattatgtactattgctttgctctttcaaagaacaactgcaacagcatgttcgtgttcatgcaatggaagctgttatggcctgttgggagattgaacagtcgcttcaaagttttacaggggtatctcctggtgaaggcacaggagcaacaatgtctgaggatgaagatgagcaagtagagagtgatgctcatttgtttgatggaagcttagatgggttagggtttggtcctctagttcccactgagagcgagagatctttgatggaacgagtcagacaagaactcaaacatgaactcaagcagggttacaaggagaaaattgtggacataagagaggagatactgaggaagagaagagctggaaaattaccaggagacaccacctctgttctcaaatcatggtggcaatctcattctaagtggccttaccctactgaggaagataaggcgaggttggtgcaggagacgggtttgcagctcaaacagataaacaattggttcatcaatcaaagaaagaggaattggcatagcaatccatcttcttctaccgtctcaaagaataaacgccgaagcaatgcaggtgaaaacagcggaagagaccgttgagatcaagcttgcatgtagagatccaaaagctttatagaaaggtggaggcatgaagacaaagaattcttacacaacaaacgtaggacgtaattttgtgccagtacatggtatggctttcatatttggtaatgattagggccacacaaaattaaaccccaaagcatgatttgtaatatgaggttttagatggactttatgataggatcgtcagtcttcactgccatctccattctccaccatcaatccatcattatatcttgtgaaaaaaaaagaaatttcacaat

SEQ ID NO: 117829 - DNA, 525 bp, Arabidopsis thaliana
  unsure (1)..(525): unsure at all n locations
gtctcaaagaataaacgccgaagcaatgcaggtgaaaacagcggaagagaccgttgagatcaagcttgcatgtagagatccaaaagctttatagaaaggtggaggcatgaagacaaagaattcttacacaacaaacgtaggacgtaattttgtgccagtacatggtcgccagcaaacgaaagaaagagattatctccgccgttgtcaaaattattaaaagggattataaagtttttcaatttgggcccctttcctgcgttttctttattgtccattatgggcctcattgtctctagactctctaccttacagggtttgctcgccgacgtttcatacatagtcctcttgtttctaaggatgccgattaacacttttcatttttatcaacaaactggcttgcaagggttttgaacctgagtgatgacctaccatttcaaaaaaaaaaaaaaagnnnnnnnnnnnnnnnnnnnnnnnnnnnnnnnnnnnnnnnnnnnnnnnnnnnnnnnnnnnnnnnnnnnnnnnnnn

SEQ ID NO: 117830 - DNA, 1575 bp, Arabidopsis thaliana
gggaaagagaaaacagtcttctcttctccgatcccaaaaacgcaggaaaacaatgtcgtttaacagctcccacctccttcctccacaagaagaccttcctctccgacacttcaccgatcaatcacagcaacctccgccgcagcgtcacttctctgaaacaccttcgcttgtcaccgccagtttcctcaacctccctaccacccttaccactgcggattccgatctcgctcctccgcaccgcaacggagacaattccgttgctgatacaaacccacgctggctctcctttcattcggagatgcaaaatactggagaagtacgttctgaagttatcgacggagtcaacgccgatggtgaaacgatactcggcgttgtaggaggtgaagattggcggagtgctagctataaggcggcgattttaagacatccgatgtacgagcagcttcttgcggctcacgtggcttgccttagggttgcgactcccgttgaccagattccgaggatcgatgctcagctcagtcagttgcataccgtcgccgcgaaatactccactcttggtgtggttgttgacaacaaggaacttgatcatttcatgtcacattatgttgtcttgttatgttcatttaaagaacaactccaacaccacgtttgtgtccatgcaatggaagccattacggcttgttgggagattgaacaatcactgcaatccctaactggagtttctccaagtgaaagtaatggtaagacaatgtcggatgatgaagatgataatcaagtagagagcgaggtgaacatgtttgatggaagtttggacggttcagattgcttgatggggtttggtcctcttgttccaaccgagagagagagatctttgatggaacgtgtgaagaaagaactgaagcatgagcttaaacagggtttcaaagagaagattgtggacataagagaagagataatgaggaagagaagggcgggaaagttgccaggagatacgacttctgtactcaaagaatggtggcgaactcactcgaaatggccatacccaactgaggaagataaggcaaaactggttcaagaaaccggtttgcagttgaaacagatcaacaattggttcatcaaccagaggaaaagaaactggaacagcaactcttccacgtcatctactctcaccaagaacaaacgtaaacggaccgggaagtcgtaggtgacatagcggctaactagaggatggttctttgccatgtgaattcttgggaaccgtatatgaaagaaacgaatccggttctatgctcgtacagagtgtgttatttgtatagtggataccggttagcctatgaaaccggattctggagtccaaattgttgtttgtaacgacttagtagtttttggaagtgatctgtttcgttggtttgcgtcttgtaacgaacgcttaagcaagtgtgggttttttcttgtaaagtgtcaatatgttcgtttgtaatgaatgtatcaagcaatatttatcataattaaactagcttgaaatgtaaaaaaaaaaaaaaaatgtgttcgaaaaaaaaaaaaaaaagggcggcc

SEQ ID NO: 117831 - DNA, 789 bp, Arabidopsis thaliana
  unsure (1)..(789): unsure at all n locations
acttacaacatctatagagagagagagagagagtttagttagagagaaaaaaatggcgagattcacggtgctgattacggcggttgtgctagcttttctaatggcggcgccgatgccaggagtgacggccaagaagtatacagtcggcgagaacaagttttggaaccccaacattaactacaccatctgggctcagggcaagcatttctacctcggagactggctctatttcgtgttcgacagaaaccagcacaatattcttgaagtgaacaagactgactatgaaggatgtatcgccgaccacccaatacgcaactggacacgtggagctgggagagacattgtcactctcaaccagaccaagcattactaccttctcgacggaaagggtggatgttacggtggcatgaagctatctgttaaagtagagaagcttcctcctccaccaaaatctgcacctgtcaagaacattggatcggtttcaatggtcacaggtctcgctcaattcatgattccggtatctctattcgctttccctgcaatgtgggatgtgatctcaaggatgtggtagtagtcaccagtcttcaaagttctttagttgaatcgaaaccgacctcaaaaattcttttcagggaaacctttttaatttagttgagtttctcttttctctttgtaatgttggattgttggttttcctttaatcttttgcctttgaattgattgttaaagaaagattgtatttgatttatttgagaaattaaattactgnnnnnnnnnnnnnnnnnnnnn

SEQ ID NO: 117832 - DNA, 622 bp, Arabidopsis thaliana
  unsure (1)..(622): unsure at all n locations
cgcgagattcacggtgctgattacggcggttgtgctagcttttctaatggcggcgccgatgccaggagtgacggccaagaagtatacagtcggcgagaacaagttttggaaccccaacattaactacaccatctgggctcagggcaagcatttctacctcggagactggctctatttcgtgttcgacagaaaccagcacaatattcttgaagtgaacaagactgactatgaaggatgtatcgccgaccacccaatacgcaactggacacgtggagctgggggagacatttgtcactctccaaccagaccaagcatttactaaccttctccgaccgggaaggggtggatgtttaccgggggcattgaagctatcctggttaaaagtagggaaaggtttcctcccccaacccaaaaatctggcccccggtcaagaacatttgggctcgggtttcaatgggccanaggccncgcccaattcatggttccgggaccccaattcggtttcccnggaatnngggntgggccccaagggttggggaaagncccaggctntaaagtcttttggtnnaccgaaccggncnaaaatttttntggggancttttaatttggggggnccctttc

SEQ ID NO: 117833 - DNA, 794 bp, Arabidopsis thaliana
agaaaataaacaattggcatttgcataaacactttcaaaaacaagtaatcaaaagtattttagaagcttcatcatggcgacgtcaggtacatacgtgacagaagttcctctgaaagggtcagcgaagaaccactacaagaggtggaagagcgaaaaccaactcttccctgacgccattggccatcatatccaaggtgtcaccgttcacgagggcgactgggactcccacggggccatcaagtcctggaactacacatgcgatgggaagcaagaggtgttcaaggagaagagggagttagacgaccagaagatggcggtgacgtttagagggctggatggtcatgtgatggagcagcttaaggtgtatgacgtcatcttccagttcgtccctaagtctcaggaaggttgcgtctgcaaagtcactatgttttgggagaagcgctacgaagactctccagagcccatcaagtacatgaagttcgtcacgagcttggctgctgacatggatgaccacattctcaagaaccagagcaaggcttaatcatcatagtgaccatacttatgaagataaaaataaataaagaaacatcctaatatatatgtgtgtgtgtcgtttgtgtttgtcttgtacatgatgaaaccgcctccttgtcttgtgtacattttatgctgataataatggcggtacgtcttgtaaacttatgcatgtatcatctctgtctttgatgatttgatgttgttatggtgtagtattggtgttcgtaatatataaagagcacaatattaggatgtag

SEQ ID NO: 117834 - DNA, 563 bp, Arabidopsis thaliana
  unsure (1)..(563): unsure at all n locations
aaacaataggcattagcanaaacacctcccctccttttaancaaaagnannnnagaggcggcatcatgttgacgtcaggtacatacctcacagaagttcctctgaaagggtcagcgaagaaccactacaagaggtggaagagcgaaaaccaactcttccctgacgccattggccatcatatccaaggtgtcaccgttcacgagggcgactgggactcccacggngccatcaagtcctggaactacacatgcgatgggaagcaagaggtgttcaaggagaagagggagttagacgaccagaagatggcggtgacgtttagagggctggatggtcatgtgatggagcagcttaaggtgtatgacgtcatcttccagttccgccctaagtctcaggaaggttgcgtctgcaaagtcactatgttttggagaagcgctcgaaactctcagagcccataagacatgaagtcgtacgagctgctgtgcatgatgaccacatctagaccaacagctaatatataggcctctatgagtaaataatagacatctaaatatggggggcgtggt

SEQ ID NO: 117835 - DNA, 741 bp, Arabidopsis thaliana
cgacccacgcgtgcatttcaaaagaaaacaatcaatcgagaaatggcaatgtctggaacatacgtggcggaggtaccgcttaagggatcggcggagaaacactacaagaagtggaggaacgaaaaccacgtcttccaggatgccgtcggccaccacatccaaggttgcactatgcatgacggtgactgggactcccacggctccatcagatcatggaatatcacatgcgatggaaagccggaagtcttcaaggagaagagagagatagacgacgaaaagatggcgttgacgttgaaagggctagagggtcaagcgatggagaagtacaagaagtatgaggttatctaccagttcattcccaagtcgaaggaaggctgcgtctgcaaaatcactctcatatgggaaaagcgcaacgaaaactcccccgaacccatcaactacatgaagtttgtcaagagcttagttgctgacatggacgaccacgtcctcaatggccagaacaaagcttgaatcccctctatggtcatcgtcggatggtcttcatctttatgtgtgtgtatcttttgtgtatctttacgtacgtacgtgacttatcatccgcctctttccccctttatacatgttatgctaataataatggcggtcttggaagcctatgtatcatctctgtttgatgattacatgttgttatgatgttttcgtggtgtaagtgtgtgttcgtaataaaatagtaattgtaag

SEQ ID NO: 117836 - DNA, 696 bp, Arabidopsis thaliana
ttcaaaagaaaacaatcaatcaagaaatggcgatgtcaggaaaatacgtggcggaagtaccgctgaaagggtcggcggagaaacactacaggcgatggaggagccaaaacaatctcttcccggacgccatcggccaccatgtccaaggcgtcaccgtccacgatggcgactgggactcccacggctccatcaaatcctggaactacacacttgatgggaagccggaagtcatcaaggagaaaagagagatagacgacgagaagatggcgttgacgttcagaggactagagggtcatgtgatggagaagtacaagaagtatgaggttatcttacagttcattcccaagtcgaacgaaggctgcgtctgcaaagtcactctgatatgggagaatcgcaacgaagactcccccgaacccatcaactacatgaagtttgtcaagagcttagttgctgatatggatgaccacatcctcaagggccagaacaaagcttaataaccctccatggtcatcgtcgtaaatcatcctcatgcatgtgtcttttgtacttgtctcgtaagtgcctttatcatccgcctttacatgttatgctaataataatggcggtcttgttaagcaattgtattgtatgcttatgtataccatctctgtctgtgatgttattatgcgtgttcgtaataaaataagtgtgttagtt

SEQ ID NO: 117837 - DNA, 1867 bp, Arabidopsis thaliana
  unsure (1)..(1867): unsure at all n locations
aaagatcaactctttcaaacacttactctgcatgtaacttcatagattgaacgaagaaccaaaaaaacagagcaaaacaaacaaaagatggttcaaaaccaccaaacagttctcgccgtcgatatgccacaaaccggcggctccaagtacttggacgacgacgggaaaaacaaaagaactgggagtgtttggacggcgagtgcacacataataacggcagtgataggttcgggagttttgtcactagcgtgggctacggcgcagctaggttggctcgccggaccggtggtgatgttgctcttctctgccgtcacttatttcacttcttctcttcttgctgcttgttaccgctccggcgaccctatctccggcaagaggaactacacttatatggatgctgtccgatcaaatctcggtggcgtgaaggtgacgctatgtgggattgttcagtatcttaatatctttggtgttgctattggctacacaattgcttcagctataagcatgatggcaataaagagatcaaactgtttccacaagagtggagggaaagatccatgtcacatgaacagtaatccttacatgatagcttttggattagtccagattctattctctcagattccagattttgatcaactttggtggctctcaatcctcgccgccgttatgtccttcacttattcctcagccggtctcgccctcggcatagcccaagttgtcgttaatgggaaggtgaagggaagtctcactgggattagcataggagcagtaacagagacacagaagatatggaggacctttcaagctcttggagacattgcttttgcttactcttactccattatcctcatcgagattcaggacacagtgaagtcaccaccatcagaagagaagacgatgaagaaggcaacacttgtgagcgtcagtgtaacgactatgttctatatgttgtgtggatgtatgggatatgcagcctttggagacttgtctccgggaaatctcttaaccggtttcgggttttataatccttattggcttcttgacattgcaaatgcagccattgtgattcaccttattggtgcataccaagtctattgccaacctctgtttgctttcatcgagaagcaagcttccattcaattccctgatagtgagttcattgcaaaagatatcaaaattccaattcctggtttcaagcctctccgcttgaatgtcttcaggttgatatggaggacagtgtttgtgatcataacgacagttatctcaatgcttcttccgtttttcaacgacgttgtgggtctgctcggggcactagggttttggccattgacggtgtattttccagtggaaatgtacatcgcgcagaagaagatacctagatggagcaccagatgggtttgccttcaagtcttcagcttagggtgtctagtagttagcattgctgcagctgcagggtccatagctggagtacttcttgatctaaagtcctacaagccatttcgaagcgaatactgatcaacttgaatagtagccaattcaaagcgatgactaagtcagttttaaacacaatggatatatcaagaacagtcaagagaaccaagaaccatgaatttgggaattttgatcagcttttttttatatagatagaagcaataatgctgttagttcttctctataatcttctctgtaccctgaaggcaagaattgtagtcctaatgagtaaatcttcgattaatgacagagtcatgtgctacaacagaatcatgaactagcaccataatagtatattaccattgtggtaaaatttcaataacaagttcttgtacttnnnnnncgnnnnnnnnnnnnnnnnnnnnnnnnnnnn

SEQ ID NO: 117838 - DNA, 1739 bp, Arabidopsis thaliana
  unsure (1)..(1739): unsure at all n locations
nnnnnnnnnnnnnnnnnnnnnnnnnnnnnnnnnnnnnnnnnnnnnnnnnnnnnnnnnnnnnnnnnnnnnnnccacgcgtccgctcatttctcttttgcatttctttctttttttctgcattgcattcttttgaggggtttaattttctgcatagctttgtctaatctcttagagctcaataagagaagatggatgttccacggccagctttcaaatgttttgatgacgatggccggcttaaacgttcagggacggtttggaccgcgagtgcgcatatcataaccgccgtgattggatctggtgttctatcgcttgcgtgggctataggtcaactcggttggatcgcaggtcctacagtgatgttgttgttctcttttgtcacttactactcttccacgcttcttagcgactgctacagaaccggagatcctgtctctgggaagagaaactatacttacatggacgctgtccgatcaatcctaggtggctttaggttcaagatttgtgggctgattcagtatttgaatctgtttggtatcacggtcgggtacacaatcgcagcatctataagtatgatggcgatcaagaggtccaactgtttccacgagagcggagggaaaaacccgtgtcacatgtcgagcaatccatacatgatcatgtttggtgtgaccgagatcttgctctctcagatcaaagattttgaccagatttggtggctctccattgtcgctgctatcatgtccttcacatactctgcaatcggtttagctctcggaatcattcaagtcgcggcaaatggagttgtcaagggaagtctcaccggaattagcatcggcgcagtgactcagacccaaaaaatatggagaacctttcaagcacttggagacattgcctttgcttattcatactctgttgttcttattgaaattcaggacactgtaagatctccaccagcagaatcaaaaacgatgaagatcgccacaagaatcagcatcgctgttacaacgacattttacatgctatgtggttgtatgggctatgcggccttcggagataaagcaccgggaaacctcttaaccggttttggtttctacaatccgttttggctccttgacgtggctaacgctgccatagttatccaccttgtaggagcttatcaagtctttgctcagcccatcttcgcctttattgagaaacaactggccgctaggtttcccgacagtgacttggtgaccaaggaatacgaaatccgaatccctggttttaggtcaccgtacaaagtcaacgttttcagagcagtttaccgaagcgggtttgtggttttgaccactgtgatatccatgcttatgccgtttttcaacgacgtcgtagggattttaggtgcgttagggttttggcctttgacggtttactttccggtggagatgtatataagacagaggaaggttgagagatggagtatgaagtgggtttgtctgcagatgttgagctgtggttgtttgatgatcacgttggtcgccggagttggctccatcgccggagtaatgctagaccttaaggtttacaagccgttcaagactacttactaaacaaaccatgatgatagatgaagaagaagaaggtggtggagaaaaaaaacaaaagatataaattttaatgatgattttcattggggaaatgtgaataatgtaaaagttcttcgtttcgtataatttttatcttgcgtaatttatatacat

SEQ ID NO: 117839 - DNA, 2027 bp, Arabidopsis thaliana
caaaaaaaaaaaaaaaaaagcacatgcggtttcctctgcttcttccttcttacaagttggatgtctccgtcttccacggtgcttataaattagtgaaacaacaaaagctttggtcagtatttatattatcatgcatttctaatctctactttgtcaattcctatactttcactctcttccaattatataatctctggtccatagaaaacatcggtctcttgtcaccgttgattttatttggtcaaaatcattcttcttctcgctgaataatcgttgatttcacttcttcttctggtcttaaaaaaattcaagatctatacgagaaaacacaaaacaagtaaaactttttcaaccgtttttcctgtcggtaaagtttggattcttcttagtaaattttggtcttattgtcgaccaaaagaagaagatggtcgttcagaatgttcaagatttggatgttcttccgaaacatagctcggattcattcgatgatgatggtcgtcccaagcgaaccgggacggtgtggacagcaagtgcacacataataacagcagtaattgggtcaggagtgttgtcattggcatgggccgttgctcagattggttggattggtggtccagtggctatgttactcttttctttcgttactttttacacatctacccttctctgttcttgttaccgatctggtgactctgttaccggcaaaagaaactacacttacatggacgctattcactccaacctcggtgggattaaggtgaaagtatgtggagttgtgcaatatgttaatctatttggtacagcaattggatatacaattgcatcagctataagtttggtagcaatccaaaggacaagttgccaacagatgaatggaccaaatgatccttgtcatgttaatggaaatgtttacatgattgcgtttggtattgtacaaatcatattctctcagattcctgattttgatcagttatggtggctttccattgtcgctgcggtcatgtcttttgcttattctgccattggacttggccttggtgtctctaaagtggtagagaacaaagaaattaaaggtagtctcactggagtcactgttgggacagtgacactgagtgggacagtgacatcgtcgcagaaaatatggagaacatttcagtctcttggcaacattgcgtttgcgtactcttactcgatgattctcatcgaaattcaggacacggtgaaatcaccgcctgccgaagtaaacacgatgagaaaagcgacttttgtaagtgtggcagtgactacagtcttctacatgctatgtggctgtgtagggtatgcagcatttggggataacgcacccggaaatctcctcgctcatggagggtttagaaacccatattggttgcttgacattgctaatctcgctatagtgatccatctagtcggtgcttaccaagtctattgccaacccctctttgccttcgtcgagaaggaagcctctaggaggtttccagagagcgaattcgtcacaaaagagatcaagatccaactcttcccggggaagccctttaacttgaatctcttcaggctcgtatggaggacgttcttcgtgatgacaacaacgttgatctcaatgttaatgcctttctttaacgatgtagtcggtctcttgggggccattggtttttggcctttaacggtttatttcccagtggaaatgtacattgcacagaagaatgttccgagatggggcacaaagtgggtttgtctacaagtcttgagtgtgacatgtctttttgtgtccgtagccgcggccgcgggatctgttattggcattgttagtgatctcaaggtctacaaacctttccagtctgaattctgagatcatacgggaaaaataaactcctgctaaaagggttaagattagaattgaatgttttaatgtcatatttgtattagttaactttgtgtaagtgttcaattataaatcatgtttctaccgagaattcttacaacatggaactatcaatgattaaaagtag

SEQ ID NO: 117840 - DNA, 768 bp, Arabidopsis thaliana
cacacaaaaaacacaagatctaaaaaaaaaagcttttatcatttagaaaaatttggtttcgaatttcttcgaagagtgaaaatggcgtctcatcaagaacagagttacaaagctggtgaaaccagaggcaaggctcaggagaaaactggggaagctatgggaacgatgggggacaaaacacaagcagctaaggacaaaactcaagagacagcccagtcagcccaacaaaaggctcatgaaacagctcagtcagctaaagacaagacgtctcaagctgcacaaacgactcaagagagagctcaagagtccaaagacaagacaggaagctacatgtcggaaactggagaagcaatcaagaacaaggcacacgatgcagctgaatataccaaagagactgcagaagcaggtaaggagaagaccagtgggatcttgggccagaccggtgagcaggtgaaacagatggctatgggagctactgatgcggtgaagcacactttagggcttcgcactgatgaaggaaacaaagaacatgtttcttcagctccaagtactactactacgaccactactcgtgagacacagaggaagtgaagaggataaatatttgtttcgtgttcgtggttttcatgtttgtttgctttgattagtgtttgttgcgttcgtgaggttatgccgatccttgttgttgtttattgggtttgaatgtacttctacgtattatcatgtaatggttttcttttataaattggacactagttatttcgggtg

SEQ ID NO: 117841 - DNA, 957 bp, Arabidopsis thaliana
ctacaacaacaaatacttttacgaaaaaagcttttaaaacttatctagtttcgtttgatacacatttgaagaaagaaatggcatccaaccaacagagctacaaagctggtgagaccagaggcaaggcccaggagaagactggacaagctatgggaacgatgagggacaaggctgaggagggccgggacaagacttctcaaacggcccaaacagcccaacagaaggcccatgagacagcccagtcagctaaagataagacatctcaaactgcccaagcggctcagcagaaggcccatgaaacggcccagtcagcaaaagagaagacatctcaaactgcccaaacggcacagcaaaaggcccatgagacgacgcaagcagcaaaagaaaagacatctcaagctggcgacaaagctcgcgaggccaaggacaaggccgggagctacttatcggagacaggcgaagccataaagaacaaggctcaagacgctgctcagtatacaaaggagacggctcaaggtgcggcacagtacacaaaggaggcggctgaagccggtagagacaagacgggtggattcttgagccagactggtgagcatgttaagcaaatggcaatgggtgcagctgatgcagtgaagcatacttttgggatggctactgaggaagaagacaaagagcattatccaggaagtactactaccactactgcaactactcgaaccactgatccgactcatcagacttatcagaggaagtgatgagaaaacaaaattgagaacgatatgaaagtatctttgtgttagttggtcttttgagttttgtgtttgtgtttttgtaatttccgttgtgtctttctttatggttgtggttcagctgtgtttcttgttgtgacggtgatcctggagacttctaatttccagccaataagtttagatttgatcctgttacaacttatgtgtt

SEQ ID NO: 117842 - DNA, 843 bp, Arabidopsis thaliana
  unsure (1)..(843): unsure at all n locations
atcagaagatatctttgtaacatctttgaatttcgctaaaggaaaagagagagatttggtaaaaatgcagtcgatgaaagaaacagcttcgaatattgcagcttctgcaaaatctggcatggacaaaaccaaagctaccttggaggaaaaggcggagaagatgaagacacgagaccctgttcagaaacagatggctacacaggttaaagaagataagatcaatcaagctgagatgcagaagagagaaacgcgtcagcacaacgcggccatgaaagaagcggctggagccggaaccggtttaggtttggggacggccactcactcgaccactggacaagtcggacacggcactgggacacatcagatgtcggctctgcctggtcacggaacgggacaactgaccgaccgcgttgtggagggcacggctgtgaccgacccgattggaaggaaccctggaactggtcggacaaccgctcataacactcacgttggtggtggtggtgccaccgggtacggaaccggcgggggatatactggataaacggtgttgttcacttgttctgttatttgctctgtttttgttgaatcgaaatttcgtggttttctgtcttaccttcgtgttctggtttttttttttctttttcttgtgcttctgaataattgtaggacttcgatctcatctaggtttttgttgttggatgatagtcttactttatgagtagaatgttcatgcaatgtaacagtagtaaaattatccgttaacaatnnnnnnnnnnnnnnnnnnnnnnnnnnnnnnnnnnnnnnnnnnnnnnnnnnnnnnnnnnnnnnnnnnnnnnnnnnnnn

SEQ ID NO: 117843 - DNA, 473 bp, Arabidopsis thaliana
gaagaagaaagaagatgcagtcggcgaaggaaaagatcagtgacatggccagtacggccaaggagaaactcaacatcggtggcgcaaaggcacaaggtcatgcggagaagacgatggcaaggaccaaaaaagagaagaagttggcccaagagcgagagaagtctaaggaggcgcaggccaaagctgacctccatcaatccaaggctgagcatgctgcggacgctcaggttcacggccaccatcttcccggtcactccacctaccctacccgagccaccggagctaattacccgccgggacagatctaaaactagctctatagctatattaagattagccgccttgtttaacaatatgatatgtacgttttttctaatataagatcagcagtcatgaaattttcttggttagtttcttttgatagtttatgcataaacaataatgtaatcttgcagaaataaacgtacctaaat

SEQ ID NO: 117844 - DNA, 1004 bp, Arabidopsis thaliana
ctccattaatgttgctctcacactcatgcacctctcttatctttataggagtgtgttccctttgtatgttacccaaaacgggacattaccataacaaaacagagagatgagtcaagaagaacaaccaaagcggccacaagagccagtcacttacggtgacgtttttgaagtctccggtgaactcgctgataagcctatagcgccggaggatgcaaacatgatgcaagcagcggagacacgtgtgtttggccacactcagaaaggcggtgcagcggcagtcatgcagtctgcagccactgctaataaacgcggtggctttgtccatccaggtgacacaactgatctcgccgctgaacgaggcgtcacagtggcgcaaactgacgtccctggtgcacgtgtcacaacagaattcgtcggtggacaggtcgttggacaatacgtcgagcctaggccagtggcgactgcggcagtttatggtaagcagaagttggtgggtttgagtttacaaagtgcaataacgattggagaagcattggaagcgactgtgcaaaccgctggaaacaaaccggtggatcaaagcgacgcagcagcgattcaagcggcagaggttagagcttgtggcactaatgtgattgctcctggtggaatcgccgcttctgctcaatcagcagcaaatcacaacgctaccatagaccgtgatgaggataaaatcaagctcattgatgttttggcggggtgcgaccgggaagttagccgcagataaatctgtgaccaggcaggacgcagagggagtggtgagcgctgagctgaggaacaatcctaatttgtctactcaccctggtggtgtagcggcttctattactgccgccgctaggcttaacgagagagctgatatatgaaaaatcctgcgagagggagatgttttggttctgttgttcaaaaaagttcagtcataatgtaaaaaaatggtcactttccggttataaagttgaaatctttctctc

SEQ ID NO: 117845 - DNA, 599 bp, Arabidopsis thaliana
gaaacagaaaactaaagaaaaaaaatatgcaatcggcgaaacagaagataagcgatatggctagtacagccaaggagaagatggtgatatgtcaagcaaaagctgatgagaaggcagagcgggcgatggcgaggacgaaagaggagaaagagatagcgcaccaacggagaaaggcgaaggaagcagaagcgaatatggatatgcacatggctaaagcggctcatgcggaagacaagcttatggctaagcaatctcactaccatgttactgatcatggtccccacgtgcctcaacaagcgcctgtaccggctcccgcaccggttatgggacacggttacgggcataatcctaccggagttacctcagtgcctcctctgacctatcatccgacttatcctccgacgggacatcataatcatcatcactactaatccgacctactatctttttaaaataaaaaaaaataacctgattatacgtgtggggcctttagtggttttcttagttcttaggcatgtgcttaaaattaagtgattaagcgttgagttgatgtttgcaactttgcgtacacgtttgttgataaatattttggttattcc

SEQ ID NO: 117846 - DNA, 2256 bp, Arabidopsis thaliana
agtcagaacaacacggagaagagaaaaaaaagaggtagccatgttcttgaagcttttaaccatcttcttcttcttcttcaacctcatttttcaatcttcttctcaaagtctcaactttgcttacaacaatggctttaatccaccgacggacttatccatccaagggatcacaaccgtcacacccaacggtctcttgaagctaaccaacacaaccgttcagaaaaccggtcacgccttctataccaaaccgatccggtttaaagattctccaaacggcaccgtttcatccttctcgacatcgttcgtcttcgctattcactctcagatcgcgagtctcagcggtcatggcatagctttcgtcgtcgctcctaacgcaagccttccttacggcaacccaagtcaatacataggtctcttcaacatcacaaacaacggtaatgagacaaatcatgtctttgctgttgaattagatacgatcttgagtacagagttcaatgatacaaacgataatcatgtcggaatcgatatcaatagtttgaagtctgtgcaaagctcgcctgctgggtattgggacgagaaaggtcaattcaagaatctgactttgatcagtcgtaagccgatgcaggtctgggtcgattacgacggacgtacaaataaaatcgatgtgacgatggctccgttcaacgaagataaacctacaagaccgcttgttacggctgttagagatctttcttcggttctactccaagatatgtatgtgggtttctcctctgcgacaggctctgttctgtcggaacattatattctcgggtggagtttcggtttgaacgaaaaggctccacctttagctttatcgagactcccgaagcttcctcgcttcgagcccaagagaatctctgagttctacaagatcggaatgcctttgatttctcagtttttttttttctcgtttattttcctcgtttgttacatcgtgaggaggaggaggaagtttgcggaggagctcgaggaatgggaaaaagagttcgggaagaatcggttcaggttcaaggatttgtactacgcgaccaaagggtttaaggagaagggacttcttggaactggtgggttcgggagtgtttacaaaggtgtgatgcctggtacgaagttggagatcgctgttaaaagagtttcgcatgagtctcgtcaagggatgaaagagtttgtggcggagattgtgagtattggtcggatgagtcataggaatttagttcctctcttgggttattgtcgtaggagaggtgagcttcttttggtgtatgattacatgcctaatggaagcttagacaagtacttgtacaacactccggaggtaacacttaattggaaacagaggattaaggttattctaggtgttgcctctggcttgttctatctccatgaggaatgggaacaagtggtgattcaccgggatgtcaaagctagcaatgtcttgttggacagagagctcaatgggagacttggggatttcggtttggctcggttgtatgatcacggatcggatcctcagaccacgcatgttgttggaacattgggatacttagctcctgaacatactaggacaggacgtgccacgatggctaccgatgtttttgcgtttggggcgttcttactcgaagtcgcatgcggtagacgtcctatcgagttccagcaagagaccgatgagacgttcttgctcgtggattgggttttcgggttgtggaacaagggagacatcttggctgctaaagatccgaatatgggttcggaatgtgatgaaaaagaggtggaaatggttttgaagctaggtctcttgtgctctcactctgacccaagggctagaccaagtatgagacaagtgctacattatctaagaggagatgcaaagttaccagaattgtctccgttggacttgtcggaagtgggatgatgtttggggttcatgacggatttagtgaattaggaatgtcgtattcctcctccgtattcaaagggtttaccggtggatcttccatcgctgattctcaactttctggcgggagatgaatagaatgttttgaagttatataaagtatatgttatttaatggcgatagttatgttttaaatatatttgaacctttttgtgtgttttgcatttcatctgtagagactatttgggcgagatatgggaatgggactatgtatatatacttcagcatatgttgaaaattactgtctaaaaaaaaaaaaaaaaaaa

SEQ ID NO: 117847 - DNA, 821 bp, Arabidopsis thaliana
aggatcgatcaaagtcttgaatatttcatctatatatacctaagaaagaaaagagttaaagaagtatattttcgattcaaagaagaaaaatgaattctcaccagaatcaaaccggagtgcaaaagaagggaataacggagaaaatcatggagaagctaccaggtcatcatggacctactaacactggtgttgttcaccacgagaagaaagggatgacggagaaagttatggagcagctgccaggtcatcatggtgctactggtaccggtggtgttcaccacgagaagaaaggaatgacggaaaaagttatggagcagctgccaggtcatcatggatcacaccaaactggaaccaacacaacttatggtactactaacactggtggtgttcaccacgagaaaaaaagtgtgaccgaaaaagttatggagaaactaccaggtcatcatgggtcacatcaaactgggactaacacggcttatggtactaacactaatgtcgttcaccatgagaaaaaaggtatagcagaaaagattaaagagcaactgccaggtcatcatggaactcacaaaactggaaccaccacaagttatggtaatactggcgttgttcaccatgaaaataaaagtacgatggataagattaaagagaagcttcccggtggtcatcactagattgattaacaacttgtttaagcttattttaagtatttgtgtggtgtaataatatgatgatgtggctttctttcattgagtcgctaaataatatatgtaagtgatggatctttgaattaatataaaatatctacttctggtttcgtttaa

SEQ ID NO: 117848 - DNA, 1964 bp, Arabidopsis thaliana
  unsure (1)..(1964): unsure at all n locations
nnnnnnnnnnnnnnnnnnnnnnnnnnnnnnnnnnnnnnnnnnnnnnnnnnnnnnnnnnnnnnnnnnnnnnnnnnncgggggacccacgcgtccgcttttcagagttcaatcacacaacacctctcttcaatagcaataaccatggctcacactctcggtctcactcaacccaactccactgagcctcacaagatctcgttcactgcgaaggagatcgatgtaattgaatggaaaggagacatactcgtagttggtgtgacagagaaggacttagccaaagacggtaactcaaagtttgagaatccgatcttgagcaaggtcgatgctcacttaagtggacttttagctcaagtctcttccgaggaagatttcactgggaaacctggtcaatcgactgttctcaggcttccgggtttaggatcaaagagaatcgctttgatcggtcttggacagtctgtttcgtctccggtggcttttcatagccttggtgaagctgtagctacagtttcaaaagcttctcaatctactagtgctgctattgtgcttgcttcaagtgtttctgatgaatctaagcttagttctgtatcagctttagcttcaggcatagtacttggtttatttgaagatggtaggtataagtctgaatcaaagaaaccatctttgaaagctgttgatattattggatttggaactggggctgaggtagaaaagaagctgaagtatgctgaagatgtttcttacggtgtaattttcgggagagagctcattaattctcctgccaatgtgcttactcctgctgtactagctgaggaagcagcaaaggtggcttctacgtacagtgatgtcttcactgcaaacatcttgaacgaagagcaatgcaaagagttgaagatgggttcttacctagctgttgctgctgcgtcggctaatcctcctcacttcatccaccttgtctataaacctccgaatggctctgttaagaccaaacttgctcttgttggaaaaggattgacctttgacagtggtggctacaacattaagactggacctggctgctcaattgagctcatgaaattcgacatgggcggttcagctgctgttcttggcgctgcgaaagctattggtgagattaagcctcctggtgttgaggttcatttcatcgttgcagcctgtgaaaatatgattagtggaaccggaatgagacctggagatgtcatcactgcctcaaacggaaagaccattgaggtcaacaacacagatgctgaaggtcgtctaacactcgcagatgctctagtgtatgcttgtaaccaaggcgtcgacaagattgttgacctcgctactttgaccggggcctgtgttattgctcttggaacttcaatggcaggaatctatacacctagcgacgagcttgcaaaggaagtgattgctgcatcagaaaggagtggagagaagctgtggaggatgccactggaagagagctattgggagatgatgaagtctggagtggctgatatggtcaacacaggcgggcgggcaggaggatccatcaccgcggctctcttcttgaaacagtttgtgagtgagaaggtgcaatggatgcatatcgacatggctggaccggtgtggaacgagaagaagaagtctgggaccgggtttggtgttgctacgcttgttgaatgggtacagaagaattcatcttcgtgaatgaaacctagagagcgtgagggagagactgtagagtttttcgggtgttgaaatgattgctggtttttaataaggtctcaaaagttactatgttttcagatgttcttaacttgttatgaaaagtaaaatcgtcaaaagttgaataaagtggtactttgttttaaaaaaaaaaaaaaaaaaaaaaaagnnnnnnnnnnnnnnnnnnnnnnnnnnnnnnnnnnnnnnnnnnnnnnnnnnnnnnnnnnnnnnnnnnnnnngaa

SEQ ID NO: 117849 - DNA, 3482 bp, Arabidopsis thaliana
  unsure (1)..(3482): unsure at all n locations
cttcaaatgttcattggaagaccaataccttatcttctactatcttcaccttccttccatggcttccgctgcggcggcttctccttctctctccttaaacccaacctctcatttccaacaccaaacttctctcgtcacctggcttaaacctcctccctcctccgccctcttccgccgcaaaacccttcctttcttcgaacgccactcacttccgatttcagcttcttcttcttcttcttcttcctcttctacttccctctccgttcacgagaaacccatttcgaattcggttcacttccacggcaatctcatcgagagcttcgagaatcaggactcttcatacgctggaaccattaaaggagcaagcttgattgaggagcttgagaatcctgtcgaaaggaatggactttctggtcggagaagactgtttatgcaagacccaccatggatctctgctttgtttctcaagggtttgagtaaaatggttgatcagactttgaaaatcgagcggaaagatatcgataagaggaaatttgattccttgaggagacgacaagtgaaggaagagactgaagcgtgggagaggatggttgatgagtacagagatttggagaaggagatgtgtgagaagaatctagctccgaatttgccttatgtgaaacatatgttcttgggatggtttcaacctttgaaagatgtgattgagagagagcagaagttgcagaagaataagagcaagaaggttagagcagcttatgctcctcatattgagcttttgcctgctgataaaatggcggttattgtgatgcataagatgatgggtttggttatgtctggacatgaagatgggtgtatccaagttgttcaagctgctgttagtattggcatagctattgagcaggaggtgaggattcataacttcttgaagagaactaggaagaacaatgcaggggactcacaagaggaattgaaagaaaagcaattgcttaggaaacgtgttaatagtttgattcgaaggaaaaggattattgacgcattaaaagtggtgaaaagtgaaggtaccaaaccatggggacgagctacacaagctaagcttggaagccgtctgctagaactattgatcgaagcagcttatgtgcaacctcccttgacccagtctggggactctatacccgagtttcgacctgcattcagacacaggtttaaaactgtgactaaatatccagggtctaagctggtgaggaggtatggagttattgaatgtgactcgctccttcttgcaggactagataaatctgctaagcatatgttaattccttatgttccgatgttagtgccaccaaagagatggaaaggatatgacaagggtggttacttgtttttaccttcctatatcatgcgtactcatggatccaaaaagcagcaagatgcactgaaagatattagtcacaagactgctcatagagtatttgaggcattggatacacttgggaataccaagtggagggtgaataggaatatacttgatgtggtagaaaggctctgggctgatggaggcaacattgcaggcttagttaatcgtgaagatgttcccatacccgaaaaaccatcctctgaggatcctgaagaactccagtcctggaaatggagtgctcgaaaggccaacaagattaacagagagaggcattctctaagatgtgatgttgagctcaaactttctgtggctagaaaaatgaaggacgaagaaggattctactaccctcacaatcttgactttagaggccgtgcatacccaatgcatcctcatctgaatcatctgagttctgatctttgccgtggaaccctggagtttgctgaaggacgaccacttggaaagtcaggcttgcattggctgaaaatacatttagcaaacctctatgcaggtggtgttgaaaagctctcacatgatgcccgtctggctttcgtggaaaaccatttggatgatataatggattcagctgaaaatcctatacatggaaaacgatggtggttaaaggctgaagatccgtttcagtgtttagctgcatgtgttattctgacacaagccttgaaaagcccttcaccttattcagtaatttcccacttgcctattcatcaggatgggtcgtgcaatggtctacagcattatgcagctttaggaagagatagttttgaagctgcggcagttaatctagttgcaggagaaaaaccagctgatgtctactctgaaatttcacggagagttcatgaaataatgaagaaggacagcagtaaggatcctgagtcaaacccaaccgccgcactggcaaagatccttatcactcaagtcgacaggaagctggtaaagcagacggtaatgacgtcagtatatggtgtcacctatgtaggggctcgtgaacaaataaaaagaagattagaagagaaaggtgttatcactgacgagagaatgttatttgctgctgcttgctattctgcaaaagtgacgctagctgcccttggagagatatttgaagcggcacgtgccattatgagttggcttggtgattgtgcaaagataattgcttccgataatcatccagtgcgatggatcacccctcttgggcttcctgttgtgcaaccctattgcagaagtgaaagacatctgataagaacatctcttcaggttttggctctgcagcgagagggtaacacggtcgatgttaggaaacaaagaactgcatttcctcccaactttgtgcactcgctggacggcactcacatgatgatgactgctgttgcatgtcgagaggccggcctaaactttgcaggtgtgcatgactcatactggacccatgcatgtgacgttgacacaatgaacagaatacttagagagaaattcgttgagctttacaacacaccgatccttgaagatttgctccaaagtttccaagaatcatacccgaatctcgtgtttcctccagtaccaaagagaggtgatttcgatttaaaggaagttctcaaatcacagtacttcttcaactgagtcatgcatgtagcaccagtgaaccatctgaagaagggagcaagtttttgacgcagggatcttccttggtggcctgtaaataacatccaccacctcaaaatgacatggaaagaaccagaaatgtgcaagaaagacaaactgatactgcaacacactaagattctgacataaattatcttgcagcagaagaggaattcagacaaatctacttagagaaattttggcagcattcaagaagtttctagctcagtaggtaggtcctagacagtcttgaataattgatgtaaggtatgagtcatttgcatcaagcttgtttttggagatgagattaggattagagttgtgttgtatctgtcattcgtaatgttgtacagagagagacttcatatacaaaacaagaacacaataacgatcnnnnnnnnnnnnnnnnnnnnnnnnnnnn

SEQ ID NO: 117850 - DNA, 1628 bp, Arabidopsis thaliana
  unsure (1)..(1628): unsure at all n locations
taggtgcaactatagaagagctatgacgtcgcatgcacgcgtacgtaagctcggaattcggctcgagcagcttcactgagtcttacgaacatagcaaaatccaaatcaaattcctgaagaaacctctttcgctctcgtcttcgttttcagatcaacaagaaatggcaacagcaacatcagcttctctgttttcaactgtttcttcatcttactccaaagctagctccataccacattcaagactccaatctgtgaaattcaactcagtccctagcttcaccggtctcaaatcaacctctctcatctccggatctgattcctcttccttagccaagactctacgcggttccgtaacgaaagcacaaacatctgacaagaagccttacggattcaaaatcaacgcttcatacaaagtagctgttcttggtgctgctggtggtataggtcagcctttatcacttctcatcaagatgtctccgttagtctctacgcttcatctttacgatatcgccaatgttaaaggagttgctgctgatctaagtcattgtaacactccttctcaagttcgtgatttcactggtccttctgagttagctgattgtttgaaagatgttaacgttgttgtcatccctgctggtgtgccgaggaaacccggtatgactcgtgacgatcttttcaacatcaatgccaatattgtcaagactcttgttgaagctgttgctgagaattgccctaatgctttcattcatattattagtaacccggttaactctacggtacctattgctgctgaagtgttgaagaagaaaggtgtttatgatcctaagaagctgtttggtgtcactactttggatgttgtgagggctaacacttttgtttctcagaagaagaatcttaagcttattgatgttgatgttccggttattggtggacatgctggaatcaccattttgcctctcctctcgaagacaaaaccgtctgttaactttactgatgaagagatccaagagctcactgttaggattcagaacgctggtactgaggttgttgatgctaaggcaggtgcaggttcagctactttgtcaatggcttatgctgctgctagatttgtggagtcatctcttcgtgctcttgatggagacggagatgtctacgagtgctcgtttgtggagtcgactctgactgatcttcctttctttgcatcacgggttaagatagggaagaacggtcttgaagctgtgattgagtcagaccttcagggattgactgagtatgagcagaaagcactagaagctcttaaggtagaattgaaagctagcattgacaagggtgtcgcatttgcaaacaaaccagctgctgcagcagctaactagatcgcaagctgataacatttttcttctgatcatttcgagttttgttttatttttcatatttgttgcatcggcgagacattttcgtgttgtagaataaagaactgtatttgcttcagtttgaagattttggaacatggcattgaagtagaatttataaatcnnnnnnnnnnnnnnnnnnnnnnnnnnnnnnnnnnnnnnnnnnnnnnnnnnnnnnnnnnnnnnnnnnnnnnnnnnnnnnnnnnnnnnnnntagctg

SEQ ID NO: 117851 - DNA, 555 bp, Arabidopsis thaliana
cggacgcgtgggcggacgcgtgggcggacgcgtgggcggacgcgtgggcggacgcgtgggttttttttgtaattttggtttccctttttttttattaaataagatgtattcctccatcgttacctaatccccttcttcgtcttcttcagcttcactgagtcttacgaacatagcaaaatccaaatcaaattcctgaagaaacctctttcgctctcgtcttcgttttcagatcaacaagaaatggcaacagcaacatcagcttctctgttttcaactgtttcttcatcttactccaaagctagctccataccacattcaagactccaatctgtgaaattcaactcagtccctagcttcaccggtctcaaatcaacctctctcatctccggatctgattcctcttccttagccaagactctacgcggttccgtaacgaaagcacaaacatctgacaagaagccttacggattcaaaatcaacgcttcatacaaagtagctgttcttggtgctgctggtggtataggtcagcctttatcacttctcatcaagatgtct

SEQ ID NO: 117852 - DNA, 557 bp, Arabidopsis thaliana
  unsure (1)..(557): unsure at all n locations
cttgtcaatggcttatgccgcgtctaaattgtaaaggcatctcttcggctccttaagggagcgggaaatgtctccaagtgctcgtttgtggagtagactctactggatcttcccttctttgcatcccgggttaagatagggaagaacggtcttgaagctgtgattgagtcaccccttcagggattgcctgagtatgagcagaaagccctaggagctcttaaggtagaattgaaagctagcattgacaagggtgtcgcatttgcaaacaaaccagctgctgcagcagctaactagatcgcaagctccccccatttttcttctgatcatttccagttttgttttatttttcatatttgttgcatcggcgagacattttcgtgttgtagaataaagaatgtatttgcttcagtttgaggtttaaaaccccaaaaaaaaaaaaaaaaaaaagggcggccaaaannnnnnnnnnnnnnnnnnnnnnnnnnnnnnnnnnnnnnnnnnnnnnnnnnnnnnnnnnnnnnnnnnnnnnnnnnnnnnnnnnnnnnnnnnnnnnnnnn

SEQ ID NO: 117853 - DNA, 1752 bp, Arabidopsis thaliana
gttcctcctaatctcaccttcactgttcactctctactctccacttctctcgcttttgtcccaaagtagctatcttcaacaagattcatgtctcttatgatcagatcctcttacgtttctcacatcactctcttccaacctagaaactcaaaaccatcctctttcaccaaccaaatctccttcctttcctcttctaataacaacccttttctcaatttggtctataaacgaaacctaacaatgcaatctgtttcgaaaatgactgttaagagctcgttgattgatcccgacggtggtgaattggtggaattgattgtaccggaaactgagattggagtgaagaaagctgaatcagagacgatgcctaaagtgaagctgaatcagattgatcttgagtgggttcatgtgattagtgaaggttgggctagtcctttaaaagggttcatgagagaagatgagtatttgcaaagtttgcattttaattctcttaggttaaaaaatgggacttttgtgaacatgtctcttcctattgttcttgctattgatgatgatactaaggaacagatcggatcatctgagaatgttgctcttgtttgccctcaaggagatatcattggttctctccgaagtgtggagatttacaaacacaataaggaagaaaggatagctagaacttggggaactacttctccaggattgccttatgtggaagaatatattactccatctggaaactggctgattggtggtgatttagaagtttttgaaccgattaagtataacgatgggcttgatcattacaggctctctcctaaacagcttagggaagagtttgataatcgtcaagcagatgctgtttttgcgtttcagttaaggaatcctgtgcacaatggacatgctctgttgatgaatgatacacggaaaaggcttttggaaatggggtacaagaaccctgttctcttgcttcatcctttaggaggtttcactaaagctgatgatgttcctcttgatgttagaatggaacaacatagcaaggttctagaagatggagttcttgacccgaagactactattgtctcgatctttccgtcaccgatgcactatgctggtccaactgaagttcaatggcacgccaaggcaaggattaacgctggtgctaatttctacattgtaggtcgtgatcctgcaggaatgggccaccctactgagaagagagatctatatgatcctgatcatggaaagagagtcttaagcatggcccctggacttgagaaactcaatattcttccatttagggttgcagcttacgatacaatcgagaagaagatggcgtttttcgatccttctcgtgcaaaagagtttcttttcatttctggaacaaagatgcgaacttatgcaagaacaggggagaatcctccagatggatttatgtgtccgagtggatggaatgttcttgtcaaatactatgagagcttgcaagagagcgaagcaaaacaacaagccgttgtttcagcctaaagaatccagttgcatctctttcagaattgaaactccttagtgatctatatgaggcttttgtttcacctttcattgttttgtttaaattactacccttggatccatgtttttgtctcatggaaaaaactcagatgtttcgaaactctgaaaccaaataatgttctgattgacgagagaagtttgttaataatgtcaggtacactattcaaatctttttaccataaaaaaaaaaaa

SEQ ID NO: 117854 - DNA, 1645 bp, Arabidopsis thaliana
tgagtaatttaggaagtcaatgagaagaaaagaacgattttttttttttaattcccaacttgtgttcgatctctgagcagctcttatctgatacaaccatttttttggatataatatctaaatttgtagtctttagtttaattcagatcccaattataataatgcccttttgatctgatccacattgcgtatcaaaggctattattattttattcccagagttcaattatttagttggtagaatctctctgtgttgttgtgaatctgtctgtttatgtaaatcaattcaaaaggttgtgacttttgtgtttgacttaggaaaatggaagtgaaagctagagctcctgggaagatcatacttgcaggggaacacgctgttgttcatggatccaccgctgtagctgccgccattgatctctacacttacgttactctccgctttcctcttccatcagctgagaacaatgataggcttacacttcagctcaaggacatttccttggagttttcatggtccttagccagaatcaaagaagcgattccttatgattcaagcactctctgccgttctacgccggcttcatgttcagaggagacccttaaatcaattgcagttttggttgaagagcaaaatcttccaaaggaaaagatgtggctctcctctgggatctccacgtttctctggttatacaccagaattatagggttcaatccggctacagtagtcattaactctgagcttccatacgggtctggcctcggttcatcagcagctttatgtgtagctctcacagctgctctccttgcttcttctatttcagagaaaacccgtggtaacggttggtcatctctcgatgaaaccaatcttgagttgctaaataaatgggctttcgaaggcgaaaagatcatccatgggaaaccttctgggatagacaacaccgtcagtgcatacggcaacatgatcaagttctgctcaggcgagataactcggttacaatccaacatgcctctgagaatgctaattaccaacactagagttgggcgaaacacaaaagctctggtctctggtgtgtcacagagagcggtaagacatcctgatgcgatgaagtcagtgttcaacgccgtggattctataagcaaagagctcgctgcgatcattcagtctaaagacgagacctcagttacagaaaaagaagagagaataaaagaactcatggagatgaaccaaggtctgctcctgtcaatgggggttagccacagctcaatcgaggctgtgattctaaccacggtcaagcacaagcttgtctccaaacttacaggagctggtggcggcggctgcgtcctcactctattaccaaccgggacggtggtggacaaagtggtggaggagctcgagtccagcggttttcagtgtttcacggcattgattggtggtaacggagctcagatttgctattgatcaggtcggaaaaatcatatttggcctctcaccattcttaaacttgctgacgtgtacgtcaagaaggctgcaattagaaattcaaagagtcgattttttcttataaatgatgtgttgaatgtaaaattgctttattattataccatgtgacaaataattgaaaaaagctaaattactcacgtttac

SEQ ID NO: 117855 - DNA, 1837 bp, Arabidopsis thaliana
  unsure (1)..(1837): unsure at all n locations
ccnnnnnnnnnnnnnnnnnnnnnnnnnnnnnnnnnnnnnnnnnnnnnnnnnnnnnnnnnnnnnnnnnnnnnccacgcgtccgcggaaatttctccttctccggtgtcgaatcgccgagggaaggtgatttttccgggaaagtctccgttttgtttcacctaatcatctcaaagactcgtcctttataaatggcgacgacggtcatggcccttgcagagaaagtactcgaaagagtttacggaacttccaaatccgccgtttccgtaacaagcggcgacggcgaaaagactcaccgtcatacccatcatcacattcaccgtatcaaaagctacgacgacatcgacgaggatgaatcatcattggagcttatccagatcggtgctgagaggactaagaacgtcttgatcctcatgagcgatactggtggcggtcaccgtgcttccgctgaagccattcgtgacgctttcaagatcgaattcggagacaaatatagagtaattgtgaaggatgtgtggaaggaatacacagggtggccattgaatgatatggagagatcatataagttcatggtgaagcatgttcagctatggaaagttgcttttcacagcacatcacccaaatggatccactcttgttatctagcagccattgctgcttattacgctaaggaagtagaggctggtttaatggagtataagccggagataatcattagtgttcatcctttaatgcaacatattccattgtgggttcttaaatggcaagagctacaaaagagagtcctttttgttactgtcattactgatctcaacacttgtcatcctacttggtttcatccgggggtgaataggtgctattgcccgtctcaagaagtggcgaaaagggcgttgtttgatgggcttgatgagtctcaagtccgtgtctttggtttacctgtgaggccatcttttgcacgagcggttttggtgaaggatgatctaagaaaggagcttgagatggatcaagatcttcgtgcggttctactgatgggaggaggggaaggtatgggtcctgtgaaagaaacagctaaagctcttgaggaatttttgtatgataaagagaacaggaagcctattgggcaaatggttgttatctgtggacgtaacaagaaattggcatctgcattagaagccattgactggaagattcctgttaaggttcgaggatttgagactcaaatggagaaatggatgggagcttgtgactgcatcatcacaaaagctggaccaggaacaatcgctgaatcgctgattcgatcacttcctatcatcctcaacgattacattcctggacaggagaaagggaatgtgccgtatgtagtggagaatggtgcaggagtattcacaagaagtcccaaagagacagctagaatcgttggggaatggtttagcacaaagacagatgagttggaacaaacttcagacaatgcacgtaaactagctcagcctgaggcagtcttcgacattgtcaaagacattgatgagctctcagagcaacgaggtcctcttgctagcgtctcttacaatcttacctcttcttttgccagtttagtttgatgtcccatgtttatattaacatgtctcccttagtagttcttttgtctgttattttttcctttccttatattccctaatttgtttattgattgaagttgtatgtattatttttaagcaaaaggttcatgatgtctttgcaaaaaaaaaaaaaaaaaaaaaaaagggcggccgctctagaggatccaagcttacgtacgcgtgcatgcggcgtcatagtttactatagttcagttcaatcaagc

SEQ ID NO: 117856 - DNA, 1252 bp, Arabidopsis thaliana
tcagaacacaaaagtttggctacagttgtgttctgatagtgatgatcatgatcatcacatgaataagtagaagatatctcttaccttctccttcttctaataagatcagagttttggttcttatttctttgacctctcaaaacaatgggtagatcaccgtgttgtgacaaattgggtttgaagaaaggaccttggacaccagaggaggatcagaaacttttagcttatattgaagaacatggtcatggaagttggcgttcattgcctgagaaagctggtctccatcgatgcggaaagagttgtagactaagatggactaactacctaagacctgacatcaaaagaggcaaattcaacttacaagaagaacaaaccattatccaactccatgctctgttaggaaacagatggtcagcgattgctactcatttgccaaagagaacagacaacgagatcaagaactattggaacactcatttgaagaaacggttagtgaaaatggggattgatccagtgactcataaacccaaaaacgagactcctttatcttctcttggtctatccaagaacgcagctatacttagccacactgctcaatgggaaagtgcaaggcttgaagctgaagcaagactagctagagaatcaaagcttcttcatttacaacattaccaaaccaaaacatcatctcaacctcatcatcatcatggattcactcacaagtcattgttacctaattggacaacaaaaccacacgaagatcaacaacagcttgaatctccgacatctacagtgtcattctctgagatgaaggaatcaatcccggcgaagatagagtttgtcggatcatcaactggtgtgactctgatgaaagaacctgaacacgattggatcaattcaacgatgcacgagtttgaaactacgcagatgggagaaggaatcgaagaagggttcacgggtctcttgctcggtggtgattcaatcgaccggagtttttccggcgataaaaacgagacggccggcgagagtagtggtggtgactgcaactactatgaggacaacaagaactacttggacagcattttcaactttgtagatccttcaccgtcggattcaccgatgttctgaatctaagggttgatatttgttgggaatgtttttgattctttttttagtttctagtttttgtgcttaaactctgattagacaatttttaaactaatccaatttttgcgctaaaaaaaaaaaaaaaaaa

SEQ ID NO: 117857 - DNA, 5110 bp, Arabidopsis thaliana
  unsure (1)..(5110): unsure at all n locations
ctcgattgctctcaagaacccaagtgacgtctggtttcagctgatttgtttcttctcattctctatcttcttctctgggaaatatcgattttgatctattaagagctgctacgagctttgggatgtggtgagatgcttgttctatctcgaacaatccgccggttgttgattttaaacaaactctctatcacaaatctttcccgatcatggattttattgagatctcgttgatctttcgagagcatttgccactactggaactatgttcggtcatcatcaacctcctactctttcttgtctttctatttgctgtctccgcgaggcagattctcgtctgcgtgagaagaggcagagataggctctctaaggacgatacggtttcagcttctaatcttagcttggaaagagaggttaaccatgttagtgttgggtttgggtttaatctgtctttgctctgttgcttatatgtgttaggcgtccaagttttggtgttagtatatgatggggttaaggttagaagagaagtcagtgactggtttgttctttgctttccagcttctcagagtttagcttggtttgtccttagcttcttagttcttcatttgaaatacaagtcttcagagaagctacccttcttggtgaggatatggtggttcctggcgttttcgatttgcctctgtactatgtatgtcgatggaagaaggctagccattgaaggttggagcagatgttcttctcatgttgtcgccaatttagctgttacacctgctcttgggtttctctgctttctggcctggagaggcgtttctggtattcaagttaccagaagctcctctgatcttcaagagcctttgcttgttgaagaagaggcagcttgtcttaaagttactccatatagtactgctgggctagttagccttattacgctttcatggttggatccacttctctcggctggttcaaaaagaccgcttgagcttaaggatataccgcttcttgcaccaagagatagagccaaatcaagttacaaggtcttgaagtcgaattggaagagatgcaagtccgagaatccttcaaagcctccttctttagctcgtgcaattatgaaatcattttggaaagaagctgcttgcaatgccgtatttgctgggttgaatactcttgtgtcctatgtcggtccttacttgatcagctactttgttgattatcttggagggaaggagattttccctcatgaaggatacgtactcgctgggatattctttacgtccaagcttatagagacagtcaccacccgccagtggtatatgggtgttgatatcctagggatgcatgttagatcagctcttacagcaatggtataccgaaaaggtctcaaactttcaagtatagccaagcagaaccacacgagcggtgaaattgtaaactacatggcagtcgatgtccagcgcataggagattactcatggtatcttcatgatatttggatgcttccgatgcaaatagttcttgctcttgcaatcctatataaaagcgtgggcatagctgctgtagctacattggttgctacaataatctcgattcttgtcacgattccactcgctaaggtccaggaagactatcaagataagttgatgactgcgaaagatgaaagaatgaggaaaacctcagagtgtcttaggaacatgagagttctgaaattgcaggcatgggaagatcgttatagagtgagattggaagaaatgagggaagaggagtatggttggcttcgcaaagccttatattctcaggcttttgttacttttatcttttggagttcccccatttttgtcgccgcagttacattcgctacttcgatatttctaggcactcaacttaccgctggaggtgttctttctgctctggcgacattcagaattcttcaggagccacttcggaactttcctgatctggtttcaatgatggctcagacaaaggtttctcttgataggatttctgggttcttgcaggaggaagaacttcaagaagatgcaactgttgttattccacggggactttcgaatatagccatagagattaaagatggtgtgttttgttgggaccctttttcttcaaggccgacattatctgggattcagatgaaagtggagaagggtatgcgtgtggctgtctgtggcacagttggctctggaaaatcaagttttatctcttgcatcctaggggaaatcccaaaaatctctggcgaagttagaatatgtggtactactggttatgtgtctcaatcggcttggattcagtctggtaacattgaagaaaacattctatttggcagtccaatggagaaaacaaagtacaagaatgtgatacaagcatgttccctaaagaaagatatagagcttttctcacatggggaccaaactattatcggggagagaggtataaatctcagcggaggtcagaaacagcgtgtacaacttgcaagggcattatatcaagatgctgacatttatttactagacgacccttttagtgctcttgatgcacacactggctctgatttgtttagggattatattctatctgcattggctgagaaaactgtggtttttgtaacgcatcaagttgagtttctccctgcagctgatctaatattggttctgaaggaaggcaggattattcaatcgggtaaatatgatgatctgctgcaagcaggtactgattttaaggccttagtgtctgcccaccatgaagcaatcgaggcaatggacatcccaagtccctcctcagaagactctgatgaaaatcctattcgcgatagtttggtcttgcataatccaaagtctgatgtttttgaaaatgacatcgagactttggcaaaggaagtacaagagggaggatctgcttcagatctaaaggcaatcaaagagaagaagaagaaagctaagcgttcccgcaaaaagcagcttgttcaagaagaggaacgagtaaagggaaaagtcagcatgaaggtgtacttgtcatacatgggtgctgcatataaaggggctctgattcctcttattatactcgcacaagctgctttccaatttcttcagattgctagtaattggtggatggcttgggcaaatcctcaaactgaaggtgacgaatctaaagtggatcctactctgcttctcatcgtttatacggctttagctttcgggagctctgtgttcatatttgttcgagctgctctggttgcaacttttggtcttgcagctgcacagaaactgttcttaaatatgctcagaagtgtgttccgagcgccaatgtcattctttgattccactcctgcaggaagaattttgaatcgggtttctattgatcaaagtgttgtagatcttgacattccttttagactcggtgggtttgcttcaacaacaatacaactctgtggcattgtcgctgtaatgaccaatgttacctggcaagttttccttcttgttgttccggtagctgttgcttgcttttggatgcagaaatattacatggcttcttcaagagaattggttcggatagttagtatccagaagtctccaataattcatctttttggagaatcaattgctggtgctgccacaataagaggatttggccaggaaaaaagatttatcaaaaggaatctttatcttctagattgttttgttcgacctttcttctgcagtatcgctgctatcgaatggctttgtttacgcatggaattactttccacacttgtatttgctttctgtatggttttactcgtcagttttccacatggaaccattgatccaagcatggcaggtcttgctgtgacatatggacttaacttgaatggacgtctatcacgatggatacttagcttttgtaagcttgaaaacaaaataatctcaatcgaaaggatttatcagtacagtcagattgtaggagaggccccagcaattatagaagatttccgcccgccttcctcgtggcctgcaacgggaacaattgagctagttgatgttaaggttcgttatgctgagaatcttccaacagtactccatggggtgagctgtgtgtttccgggtggaaaaaagattgggattgttgggcgaacgggaagcggaaagtcgactttgattcaagctttgtttcgattgattgagccaactgctggaaaaattactattgacaacattgacatttctcaaattggtcttcatgatcttcgtagtcgccttgggattatacctcaagatcctacattatttgaaggaacaatccgagcaaatcttgacccacttgaagaacattcagatgataaaatctgggaggcgcttgataaatcccagcttggagacgttgttagaggaaaagacctaaaacttgactctccagtactggaaaatggagataactggagtgtagggcagagacagcttgtgtcacttggacgagcattactgaaacaagccaaaatacttgttcttgatgaagcaacagcatcggttgacacagcaacagacaatctgatccagaagataatcagaacagagtttgaagactgcacggtctgcaccattgctcaccggataccaactgttatagacagtgacctagttttggttctcagcgacggtagagtagcagagtttgatactcctgcacggctattagaagacaaatcatcgatgttcttgaaattggtaacagaatactcctcaagatctactggaatccctgaattatgatcctccatgttaaaaattcagtttagggggtttcttttctcaagaggatataaaagaactgatatgtgacaaaagcttaaggtctaaagtaagagagagttttccacagggtttaagaaaagaaaaagcatgaaaggatgccaaaatctccgcgcttaaaaaactttgggtttaaatctcttctgtcgaacattgggagaaactttttttgtatggaacagttagtttctttggttttcatgtttatcgcggccctgcaaaaacaaacaaaaaaaaaaaaaaaagnnnnnnnnnnnnnnnnnnnnnnnnnnnnnnnnnnnnnnnnnnnnnnnnnnnnnnnnnncaaattgnngtaccta

SEQ ID NO: 117858 - DNA, 1869 bp, Arabidopsis thaliana
  unsure (1)..(1869): unsure at all n locations
cnnnnnnnnnnnnnnnnnnnnnnnnnnnnnnnnnnnnnnnnnnnnnnnnnnnnnnnnnnnnnnnncccacgcctacgaaaatcaagtctttggtttccttttatccaaaaaaaaaaaaaagtcttgtgtttctcttaggttggttgagaatcatttcatttcaatggaatccaattgtgttcaatttctcggtaacaagaccattctcatcacaggagctcctggttttcttgccaaggttttggtagagaaaatactaaggttgcaaccaaatgtgaagaagatataccttctgttgagagctcccgacgaaaaatcagccatgcaacgcctacgtagtgaggttatggagatcgacctttttaaagtgttgaggaacaatctaggagaagacaatttgaatgccttgatgcgggaaaaaattgtgccggttccaggtgatatatcgatcgataatttgggattgaaagacactgatctcatacaacgtatgtggagtgagattgatatcataatcaacatagcagccacaacaaatttcgatgaaagatatgatattggtcttggcatcaacacatttggagccctgaatgttctcaacttcgccaaaaagtgtgttaaaggacaattgcttctccatgtctcaaccgcgtatataagcggtgaacaacctggattgttactagagaaaccattcaagatgggggagactctcagcggggatcgggaactagacatcaatatagaacatgatctaatgaaacaaaaattgaaagagcttcaagattgttctgatgaagagatctcgcaaacaatgaaagattttggaatggcaagggcaaagcttcatggatggccaaatacatatgtattcaccaaagcaatgggagagatgctaatgggaaaatacagagaaaatttgccacttgttatcatacgtccaacaatgattactagtactattgccgaaccattccccggttggattgaagggttgaaaacattagacagtgtgattgttgcatatggtaaaggaaggcttaaatgttttcttgcggattcaaactcagtctttgaccttataccggcagacatggtagtaaatgcgatggttgcagccgcgacagctcattcgggagacaccgggattcaggcaatatatcatgttggttcgtcttgtaagaatccagtcacgtttggacaacttcacgatttcacggctcgttacttcgctaaacgtcctttgattggtcggaatggctcgccaatcatagtggtcaaaggaaccattctgtccactatggctcaattcagcctctacatgacccttcgttacaagcttcctctacagatacttcgattgatcaatatagtttatccatggagtcacggagataactacagtgacctaagccgcaaaatcaagctagctatgcgactagttgagctttaccagccttacttactcttcaagggcatatttgatgatttaaataccgaaagactgcgaatgaaaagaaaggagaatatcaaagagttagatggatcgttcgagttcgatcccaagtccattgattgggacaattatatcacaaacacccacattcctggcctcatcacccatgtgcttaaacaataaattatgctggtaatatgtttggaactattgtgaatctcgtgtgtaatattattaaagaatacgattatatcattctaatcttgtaatttacagtttgtgttggcgtgtaatatcaaaataaataaaaaaaacttattccacaaaaaaaaaaaaaaaaaatcatgcnnnnnnnnnnnnnnnnnnnnnnnnnnnnnnnnnnnnnnnnnnnnnnnnnnnnnnnnnnnnnnnnn

SEQ ID NO: 117859 - DNA, 2316 bp, Arabidopsis thaliana
  unsure (1)..(2316): unsure at all n locations
cccacgcgtccgcccacgcgtccgcattctgttcttggtttacttaatcttctttctagttaagtatattcttgttgctcatcaccaaagcttgtgatggaggctctcttcttgagttcttcttcttcctccattgtagcgtcaaacaagcttactaggttacacaaccattgtgtctggtctacagtgattagagataagaaaaggttcggtcccacttggtgccgtgtaggtggtggtggtgatggtgggagaaacagtaacgcagagaggcctattcgggtttcttcgcttttgaaagacagaggtcaggtactgattagggaacagagttcgccggctatggatgctgagacattggttctgtctccaaacgggaatgggagaaccattgagatcaatggagtaaagactttgatgccttttagtggcgcttctatggtggggatgaaagaaggacttggcataatcagtttcctccaagggaagaagtttctaatcactggctcgaccggtttcttagctaaagtactgattgagaaagtcttgagaatggctcctgatgtcagcaagatatatctcttgattaaagccaaaagcaaagaagctgcgatcgagcggctaaagaacgaggtgttagatgcagagctttttaatactctaaaagagactcatggagcatcttacatgtctttcatgttaactaaactcatccctgtgaccggaaacatttgcgattcaaacattgggttgcaagcagattcagctgaagagattgcgaaagaagttgatgttataatcaattctgctgctaatacaaccttcaatgaaagatacgatgttgctctggacatcaacacaagagggcccggtaatctcatgggattcgccaagaagtgcaagaaactcaaactgttcttgcaagtatccacagcttatgtgaatggacaaagacaaggaaggatcatggagaagccattttctatgggagattgtatagcaacagagaacttcctcgaaggaaacagaaaagcattagatgttgatagagagatgaagttagctcttgaagctgctagaaaagggactcaaaatcaagatgaggcacagaagatgaaggatctcggtctagagcgggcaagatcatatggatggcaagacacttatgttttcaccaaagcaatgggtgagatgatgatcaatagcactcgaggagacgtacctgttgttattataaggcctagcgtcatcgaaagcacttacaaagatcctttccctggatggatggaaggaaacaggatgatggatcctatagttttatgttacgggaaggggcaactcacggggtttttggttgatccaaaaggagttcttgatgtagttcctgctgatatggttgttaatgcaacgttagctgctatagcaaagcatggaatggcaatgtcagatccggaacctgaaataaacgtgtatcagatcgcttcttcggcgataaacccgctggttttcgaagacttagcggagcttctttataaccactacaaaacatccccatgcatggactctaaaggtgatcctattatggtgcgtttgatgaaacttttcaattccgttgatgatttctcggatcatttgtggagagatgctcaagaacggagtgggttgatgagtggtatgagttcagcggatagtaagatgatgcagaagctaaagtttatatgcaagaaatctgttgaacaagccaaacaccttgctactatttatgagccatacactttctatggtggaagatttgataacagcaatacacagagattaatggagaatatgtcagaggacgagaagagagaatttggatttgatgttggaagcattaactggacggactacattacaaacgttcacattcccggtttaagaaggcatgtcttgaaaggaagagcttaactttgaatctcactaaaccagaccaaacagaatcgatcccttcttttatctttttatctttttcttttttcattacgtgtaatcgtgttgtgtctaatatatcagtttgatttgtaataatttgaaaaaaaccggaaatgttgttatctttaagtttgcccaaaatctatagtcatgttcgattcaagacaaaaaaaaaaaaaacaacctgtaaaaatattcatagtctttgatgttcacgtatcttaaactgaattattaaatgttgaagttagtaacatacaaaaaaaaaaaaaaaagnnnnnnnnnnnnnnnnnnnnnnnnnnnnnnnnnnnnnnnnnnnnnnnnnnnnnnnnnnnnnnnnnnnnn

SEQ ID NO: 117860 - DNA, 1949 bp, Arabidopsis thaliana
  unsure (1)..(1949): unsure at all n locations
agctannnnnnnnnnnnnnnnnnnnnnnnnnnnnnnnnnnnnnnnnnnnnnnnnnnnnnnnnnnnnnnnnnnccacgcgtccgcggacgcgtggggcagcttttagtatttttttcaacaatcgctttttttttttctcgatctccgtgaagctctcgaatctctggttttgagttttggagaatggtgtttttccgcagcgtatcggcctttactaggctgaggtctcgcgtcggccaacaatcttcactcagcaattctgtcagatggattcagatgcagagctctaccgacctggacctgaagtcgcagctgcaagagttaattccggaacagcaggaccgtctgaagaaactgaagtcagaacatgggaaggtccaactgggaaacatcactgttgatatggttattggtggaatgagagggatgactggattgctttgggaaacctcattgcttgacccggaagagggtattcgctttaggggattgtcgacttcctgagtgccagaaagtattacctactgcccagtctggaggcttgaaccattaccggaggtcttttgtggcttctcttaactggaaaggtaccttagcaaagagcaagttgaagcactgtcgaaagacttggaaccgtgctgctgtgtcagattatgtgtacaatgccatcgatgctctgccttccacagctcatccaatgactcaatttgctagcggtgttatggccctccaggtgcaaagtgagtttcaaaaggcatatgagaatggaattcataagtcaaagttctgggagccaacatatgaggattgcctcaacctgattgctcgtgttcctgttgtagctgcatatgtttatcgaaggatgtataagaatggtgattccattccctcagataaatctttggattatggtgcaaatttttcccacatgttgggatttgatgatgaaaggttgaaagagctcatgaggctttacatcaccatccacagtgatcatgaaggtggaaatgttagtgctcacactggtcacctggttggtagtgcactttcagacccatatctgtcatttgcagctgcattaaatggtttagctgggccactccatggtttggctaatcaggaagttttgctttggatcaaatcagtcgtagaggaatgtggagaagatatatcaaaagaacagttgaaagaatatgtttggaaaacattaaacagtggcaaggttattccgggatatggtcacggtgttctgcgcaatactgatccaagatatgtatgccaaagagaatttgccttgaagcatctacctgacgaccctcttttccagctggtgtcaaagctttatgaagttgtgcctcctgttctcactgagcttggaaaggtgaagaacccgtggccaaatgttgatgctcacagtggggtcttgctgaaccactatggtctaaccgaagcaaggtactacaccgtgctctttggtgtttcaaggagtcttggcatctgctctcagcttatatgggaccgagctcttggacttgcacttgagaggccaaagagtgttaccatggactggcttgaagcccattgtaagaaagcttcatctgcttaagtcaccaccgagtcctgagttgtcgcactctctcgtgtttcaacaaaagtcattctcttccacactggatagctttttttgtttttaccttctattgacagaagaaacatttgttcatgtagaaattgttcctgagaaacacatgcttggtgcaaatttgcatttccgggaaactcgtgataataaataaacagttgtattcagtttgcgtaaaaatcaaacatcaatatcactcatgaattaaagctaaaaaaaaaaaaaaaagnnnnnnnnnnnnnnnnnnnnnnnnnnnnnnnnnnnnnnnnnnnnnnnnnnnnnnnnnnnnnnnnnnnnnnnnnnncat

SEQ ID NO: 117861 - DNA, 1403 bp, Arabidopsis thaliana
  unsure (1)..(1403): unsure at all n locations
cccaagcgtccgcggacgcggagagagagagggacgatcttttctataactgaaacactactcgaggccaagttgctttagccgtaatcgtcgtcgtccctcttcccgatattatctcttctctgttcttcgatttcgaaaccctaacctcctctctttaattcgcgttttctggatcgaagatggtggcggctggtaaatccgacctttccttgcccaaaactttcgcctgcagtgccttcgctgcttgcgtcggcgaggtatgcacaattccattggacactgctaaagttaggcttcagctccaaaagtctgctcttgctggtgatgttactctgcctaaatatcgaggattgttgggaactgttggtaccatagcaagggaagaagggttacgttcactatggaaaggtgttgtacctggattgcatcgtcaatgcctatttggaggtcttaggattggaatgtatgagccggtgaaaaacttgtatgttggaaaagactttgtaggtgatgttccattgagcaagaaaattcttgctggtttgacaacaggtgcactgggtatcatggtagcaaatcccactgatcttgtgaaagttaggcttcaggcggaaggaaaattagctgcaggtgcgccaagacggtactctggagcgctgaatgcgtattcaacaattgtgagacaggaaggagtccgagctctttggactggtcttggacctaacgtagcaagaaacgctattatcaatgctgctgaattagcgagttacgatcaagtgaaagagactatcttgaagattccagggttcactgacaacgttgtcacacatattctatctggactgggggcaggattctttgctgtttgcatcggttctcctgttgacgtggttaagtcaagaatgatgggagattctggtgcttacaagggcaccattgattgcttcgtcaaaactctgaagagcgacggtcctatggcattttacaagggtttcatccccaactttggacgccttggctcatggaacgtaatcatgtttttgaccctcgaacaggcaaagaagtatgtccgggaactcgatgcgtccaaaagaaactgagacacaaagttttaagcagagggaatgagagcaacattgttttcttcttcattttcggtgattgagagaggccagaacttggtcgaatattgttttcggaatagagattcagttttcgagtaaaactgtgaaataaaatttctgtggattgctcataaaaaaaattnnnnnnnnnnnnnnnnnnnnnnnnnnnnnnnnnnnnnnnnnnnnnnnnnnnnnnnnnnnnnnnnnnnnnnnnnnnnnnnnnnnnnnnnnnnnnnnnnnnnnnnnnnnnnnnnnnnnnnnnnnnnnnnnnnnnnn

SEQ ID NO: 117862 - DNA, 1321 bp, Arabidopsis thaliana
  unsure (1)..(1321): unsure at all n locations
cnnnnnnnnnnnnnnnnnnnnnnnnnnnnnnnnnnnnnnnnnnnnnnnnnnnnnnnnnnnnnnnnnnnnnncccacgcgtccgcccacgcgtccgcccacgcgtccgctctcaaaaccaaaatcactaaagaggagaagattgctaaagtttgataaaacattccaaaatcaatggctgataggatcaaaggtccatggagtcctgaagaagacgagcagcttcgtaggcttgttgttaaatacggtccaagaaactggacagtgattagcaaatctattcccggtagatcggggaaatcgtgtcgtttacggtggtgcaaccagctttcgccgcaagttgagcatcggccgttttcggctgaggaagacgagacgatcgcacgtgctcacgctcagttcggtaataaatgggcgacgattgctcgtcttctcaacggtcgtacggacaacgccgtgaagaatcactggaactcgacgctcaagaggaaatgcggcggttacgaccatcggggttacgatggttcggaggatcatcggccggttaagagatcggtgagtgcgggatctccacctgttgttactgggctttacatgagcccaggaagcccaactggatctgatgtcagtgattcaagtactatcccgatattaccttccgttgagcttttcaagcctgtgcctagacctggtgctgttgtgctaccgcttcctatcgaaacgtcgtctttttccgatgatccaccgacttcgttaagcttgtcacttcctggtgccgacgtaagcgaggagtcaaaccgtagccacgagtcaacgaatatcaacaacaccacttcgagccgccacaaccacaacaatacggtgtcgtttatgccgtttagtggtgggtttagaggtgcgattgaggaaatggggaagtcttttcccggtaacggaggcgagtttatggcggtggtgcaagagatgattaaggcggaagtgaggagttacatgacggagatgcaacggaacaatggtggcggattcgtcggaggattcattgataatggcatgattccgatgagtcaaattggagttgggagaatcgagtagacaaagtgagattattaggaaactgtttaaattggagaagaagaaaaatgctctgtttttttctcctttggattaggcttaagaattttgggttttaaggaaatgtatagaggaaatcgagtgaacaaagctcgagagctggggacgtagtgacgaagacgaagatcaaatttctcttaagctattcaggaaaataaaataaatttttatttataaaaaaaaaaaaaagaa

SEQ ID NO: 117863 - DNA, 1131 bp, Arabidopsis thaliana
tcttcttctctacaacaaacaaacaaaagatctgtttcaatggcggatcgtgttaaaggtccatggagtcaagaagaagatgagcagctacgaaggatggttgagaaatacggaccgaggaattggtctgcgattagcaaatcgattccaggtcgatctggtaaatcgtgtagattacggtggtgtaatcagttatctccggaggttgagcatcgtcctttctcgccggaggaagatgagactattgtaaccgcccgtgctcagtttggtaacaagtgggcgacgattgctcgtcttcttaacggtcgtacggataacgccgttaaaaatcactggaactctacgcttaagaggaaatgcagcggaggtgtggcggttacgacggtgacggagacggaggaagatcaggatcggccgaagaagaggagatctgttagctttgatcctgcttttgctccggtggatactggattgtacatgagtcctgagagtcctaacggaatcgatgttagtgattctagcacgattccgtcaccgtcgtctcctgttgctcagctgtttaaaccaatgccgatttccggcggttttacggtggttccgcagccgttaccggttgaaatgtcttcgtcttcggaggatccacctacttcgttgagtttgtcactacctggagctgagaacacgagttcgagccataacaataacaacaacgcgttgatgtttccgagatttgagagtcagatgaagattaatgtagaggagagaggaggaggaggagaaggacgtagaggtgagtttatgacggtggtgcaggagatgataaaagctgaagtgaggagttacatggcggaaatgcagaaaacaagtggtggattcgtcgtcggaggtttatacgaatccggcggcaatggtggttttagggattgtggagtaataacacctaaggttgagtagttttggtttagggttaaaacttgaatcgattggggattttcaagagcattcatttttggggtttatggtaaaattaaaaacaaaaacaaaatgtacagaggaattaaaatttctatggaataatcttaaatctcaaatatttgttacttgttttggtgattcataaccaaaatcaaa

SEQ ID NO: 117864 - DNA, 918 bp, Arabidopsis thaliana
tcaacccaccagtccaagtcaaacctcctcaagccatcccctaatcctatatatcagtttcttctcgcaaaccacctcacaatctatcaacagttttaaaaaaagacataactcaaccaatctcactttgaaaaagacatgaacaaaacccgccttcgtgctctctccccaccttccggtatgcaacaccgtaagagatgtcgattgagaggtcgaaactacgtaaggccagaagttaaacaacgcaacttctcaaaagatgaagacgatctcatcctcaagcttcatgcacttcttggcaatagatggtcattgatagcgggaagattgccaggacgaaccgacaacgaagttaggatccattgggaaacttacctaaaaaggaagctcgtaaaaatgggaatcgacccaaccaatcatcgtctccaccatcacaccaactacatttgtagacgccacctccattcttcacataaggaacatgaaaccaagattattagtgatcaatcttcttcggtatccgaatcatgtggtgtaacaattttgcccattccaagtaccaattgctcggaggatagtactagtaccggacgaagtcatttgcctgacctaaacattggtctcatcccggccgtgacttctttgccgctctttgccttcaggactctagcgaatcctctaccaatggttcaacaggtcaagaaacgcttcttctattccgatgagaaatggtgtatttctttgtacacatttgttatattacaaatgcacatattataatattcactagagagatggtataacgatgtttgaaatatgttaatcctgaattggaccggctggtcattgaacaactattctcttaaatgtccggttctgttttcagtgattagtattatagtagatcgttaataacta

SEQ ID NO: 117865 - DNA, 4896 bp, Arabidopsis thaliana
tttttcccagaaacgcgtttagatttgcaaagttcgtcttctccaatctacagttctacaccaaatctcagtttattcgctttgaggacctttttttgtagatttagaagctcagtgctcgttttgatttaatctagatccagaaagctgaagtctttgatctacgaaacgaaatggttgctaacttcaatccatcagtggggtcatttgtgtgggtggaggatcctgatgaagcatggattgatggtgaagttgtacaagttaatggtgatgagatcaaagttctatgcacttcaggaaaacatgttgttacgaaaatctctaatgcttatcctaaagatgtggaagcaccagcctctggagtggatgatatgactagacttgcttatttgcatgaacctggagttctacagaatttgcattcaagatatgatattaacgagatttatacttatacaggaagtatacttattgctgttaatccgtttagaagacttcctcatctttatagtagccatatgatggctcaatataaaggagcttccttaggagaattgagtccacatccattcgccgtgccagatgctgcgtatagacagatgattaatgatggagtaagtcaatctattctggttagtggagaaagtggtgctggtaaaactgaaagcacaaagttgcttatgagatatcttgcttacatgggagggagagctgctgctgagggaagaagtgttgaacagaaagtgttggagtcgaatcctgttttagaagcatttggaaatgcaaagactgtcaggaacaataattccagtcgctttggtaagttcgtggagattcagtttgacgaaaagggaagaatatcaggagctgccataagaacttatttgttggaaagatcacgagtttgtcaagtctctgatcctgaaagaaactatcactgtttctacatgctttgtgctgctccacaagaagatgtgaagaaattcaagctggaggaaccaaagaaatatcactatctcaatcagtctaaatgtctagagctggatagtataaatgatgcggaggaatatcatgccacaagacgggcaatggatgtcgtcgggatcagtacggaggagcaggatgctattttcagcgtcgtggcagccattctccatatcgggaatatcgaatttgctaagggggaagagattgattcatcgatatccaaagatgataaatccttgtttcatctgaaaactgcagctgagcttctcagctgcgatgaaaaagcacttgaggattctctatgcaagcgtatcatggtaactcgtgatgaaaccatcacaaaaactcttgatccagaagctgctactcttagtagagatgctttggctaaagtcatgtactcgaggttatttgactggcttgttgacaagataaatagctcaattggtcaagatcatgactcgaagtacttgattggtgttcttgatatttatggatttgagagtttcaagacaaacagttttgagcaattttgcatcaatttgaccaatgaaaaacttcaacagcattttaatcagcatgtctttaaaatggagcaagaagaatataagaaagaggaaatcaactggagctatatagagttcgtagacaatcaagatattttagacttaatagaaaagaaaccaggaggtataattgctctgctagatgaagcttgcatgtttcctaggtcaacgcatgaaacttttgcacagaagctataccagacattcaaaacccacaagcgctttaccaagccaaaactagctcgtagcgacttcacaatttgtcattatgctggtgatgtcacttatcagacggaacttttcctggacaagaacaaagattacgttattgccgagcatcaggcattgttaaattcttctagctgttcctttgtagcaagtttgttcccaccaatgtctgacgattccaaacaatcaaaattctcatctataggtacccgtttcaagcaacaattggtatcgttgctcgagattctaaataccacggagccgcactatattcgctgtataaaaccaaataaccttctgaagcctggaatctttgagaacgaaaacattttacaacaattacgttgtgggggagtgatggaggcaataaggattagttgtgctggctatcctactaggaaacattttgatgagttcttggccagatttggtattcttgctccagaagtgttggtaaagaactctgatgaccctgctgcttgcaagaagcttctggacaaagtgggactcgaagggtatcagattggcaagacgaaagtttttctgcgggctggacaaatggctgacttggatacccgaaggactgaggtcttgggaagatcagcaagcattattcagagaaaagttcggtcatatctcgctaaaaagagtttcatcgttctgcgtaattctgctaaacagattcagtcagtttgcagaggttatctcgctagaagtgtatatgaaggcatgcgtagggaagctgctgctttaaaaatccagagagacttgcgtaggtttctggctaggaaggcttacacagagctatattctgctgctgtttcggttcaagctggtatgcgtggtatggttgcccggaaagaactatgttttagaagacaaaccaaagctgcaataataattcagacttggtgccgtggatacctggctcgcctgcattacagaaaactaaagaaagcagctatcacgacccaatgtgcatggagatcaaaagtggctcgtggagaacttcgaaagcttaagatggctgctagagaaactggagcactccaagcagccaagaacaagctagagaagcaagttgaagagctgacctggagattgcagttagagaaacggataaggactgacctggaagaggccaaaaaacaagaaagtgcaaaagcacagtcttctttggaggaattgcaactgaagtgcaaagaaacggaggcattgcttattaaagaacgtgaagctgccaagaagattgctgagactgccccgattattaaggagattcctgtggttgatcaggaattaatggataagatcacgaatgaaaatgaaaagctgaagagtatggtgagttcactggaaatgaaaatcggtgagacagagaaaaaacttcaagagaccaccaagattagccaggatagactaaatcaagcattggaggctgaatctaaactagtgaagttgaagactgcaatgcagaggcttgaagagaaaatattagatatggaagctgagaagaaaattatgcatcagcaaacaataagcactcctgtgaggacaaatctaggacatcctccaactgcacctgttaagaatttggaaaatggccaccaaacgaacttggaaaaggagttcaatgaagccgagtttacaacaccagttgatggcaaggctgggaaatctgctgcagaacgtcaaattatgaatgttgatgctctcattgactgtgtaaaagacaacatcggtttcagtaatggaaaacctgtggctgcatttacaatttacaagtgtctacttcactggaagtgtttcgaatctgagaagactaatgtgtttgatcgtctgattcagatgattggttccgcgattgagaatgaggatgacaatagtcacttggcgtattggttgacaagcacatcggcactactatttttgcttcaaaaaagtcttaaaaccaatggcagcggagcaacacaaagcaagaagccacctgcttcaacttctttatttggaaggatggccatgagcttccgctcttcacccgcttcaggcaaccttgctgctgcagctgaagctgctgctcttgcagtggtccgcccagtggaggcaaagtacccggctctgcttttcaagcaacagcttgcagcctatgttgagaaaatgtttgggatggttagggataacttgaagagagagttatcaactttactttctctatgcattcaggcacccagatcttctaaaggagggatgctaagatctggcaggtcctttggaaaagattctcctgcagttcactggcaaagcattatcgacggtcttaattcgcttcttgtcacactgaaagaaaatcatgttcctttagtactcatccagaagatatactctcaaactttctcatacattaacgtacaacttttcaacagtctccttctgcgtaaagagtgctgtacatttagcaatggtgaatttgtaaaatccgggcttgcggagctagagctatggtgttgtcaagccaaagaatattctgggccgtcttgggaagaactgaaacatattagacaagccgttgggttcttggttatccaccagaaatacagaatctcatacgatgaaatagcaaacgatctttgcccggtcctcagtgtccagcagctttaccgtatttgcaccttatactgggacgatagctataacacccgaagcgtctcacaagaagtgatatcgagtatgcggacactcatgacagaggaatccaatgatgcagacagtgattccttcttgttggatgatgattccagcattcctttctcaatcgatgatatttcaagttcgatggaagagaaggattttgtaggaatcaaaccagcagaagaacttcttgaaatccagcatttgtattcttgcactaagttcctgaaagttgagaagctcagattctgaaaagctctcttcctctgtgattgttttagttttgaggtggaagagtaggggccttcctgaaccaaaaggaaagaagatgggaaaaagtgtaaattcatctttgttgtggagctgtaattctcaactattctttcatttattatttttgacctcagatttttcatttgttttgtta

SEQ ID NO: 117866 - DNA, 5017 bp, Arabidopsis thaliana
tctacaccgcgataagagagagagattaccaaattctcaccggagaagaaaaaagggctttcctttcctgagatttccggtgaaaagtcattgactttatcactctcaagtctctccacaagttgattgattctgctctaatctcctcatctggggtctttcccctcttgctattcaaatggctgctccagtcataattgtgggttcacatgtgtgggttgaagatccacatttggcatggatagatggagaagttactcgaatagatggtataaacgttcatgtcaaaaccaagaaggggaaaaccgttgtgacaaacgtatattttcccaaggatactgaagctccatctggaggtgtagatgacatgacaaaactttcatacttgcatgagcctggagtcttacgaaaccttgagacaagatatgaacttaatgaaatatacacatatacagggaatatcctaattgcagttaatccattccaaaggctgcctcatatttatgaaactgatatgatggaacaatataagggaattgcacttggagaactaagtcctcatgtttttgcaattggggatgctgcatacagggcaatgattaatgaagggaaaaacaattcgattttggtaagtggagaaagtggtgctggtaaaaccgagacgacaaagatgctcatgaggtaccttgcctttttgggagggaggtctggtgtagaaggaaggacagttgaacagcaagtcttagagtctaatccagttctcgaagcatttggcaatgcaaaaactttacggaacaacaattcaagtcgttttggtaaatttgttgaaatccaatttgacaagaatggaaggatatctggggcagctattaggacttatctgctggagaggtcccgtgtttgccaaatctcagatcccgaaaggaattaccattgcttttatcttctttgtgctgctccgccggaggatataaagaagtacaagctggaaaacccacataaatttcattatctaaatcagtcaagttgctataagttggatggtgttgatgatgctagtgaataccttgaaaccagacgagctatggatgtagttggaatcagtaacgaagaacaggaggcaatcttcagggtggttgctgcaattcttcatcttggtaacattgattttggaaagggggaagagatagattcatctgtcatcaaggataaagattcccgaagtcatcttaatatggcggcagagttacttatgtgtaacgcccagagcctagaagatgctcttattaggcgtgtgatggttacacctgaagagattatcacgagaactcttgatcccgataatgcaattgcgagtagggataccctggccaagacaatatactctcacttgtttgactggattgtgaacaaaattaatacctccatcgggcaggacccacggtcaaagtcgattattggagttctggatatctatgggtttgaaagtttcaaatgcaatagttttgagcaattctgcatcaatttcacgaatgaaaaactgcaacagcattttaatcagcatgtcttcaaaatggagcaggaagagtacaccaaagaagagattgcttggagttacatagagtttattgataaccaagatgttcttgagttaattgaaaaaaaaccaggagggattatttcacttctagatgaagcctgtatgtttcccaagtctacacatgaaaccttctcccaaaagttgttccagacgtttaaagaacacgagagatttgccaaaccgaagctctcgcgcactgattttaccatatcgcattatgcaggagaggttacttatcaatcaaaccatttcatcgacaagaacaaagattatatagttgctgaacatcaagcactatttactgcatctaattgcaagtttgtggcgggtttgttccatgcgcttcatgaagactcatccaggtcatcaaaattttcttccattgggtcacggttcaagcaacaacttcactcgctgatggaatcactgaatggtacagaacctcattacatcagatgtataaagccgaacaatgttcttaaacctggtatctttgagaatttcaacgtcattcatcaattacgttgtgggggtgttcttgaggccattcggatcagttgcgctggctatcctaccaggcttgccttctatgactttctcgatcgttttggtctccttgctccagaagttttggaaggaaattatgatgataaagtagcttgccaaatgattcttgataagaaaagtctgacggactaccagataggaaagacaaagattttccttcgagctggtcagatggctgaactagatgcgaggagagcagaggtgcttgggaatgctgccagagtcattcagaggcaattccgcacatgtatggctagaaagaattaccgttctattcgcaatgctgcaattgttttgcaatccttcctacgaggcgaaattgcccgggcagtgcacaagaaactgagaatagaagctgcagctctaagagtccagaagaatttccgccggtacgttgacaggaaatcttttgtcaccacaagatcatctacaatcgtgttgcagactggcttaagggccatgattgcacgtagtgaattcaggctaagaaggcaaagaaaagccgccattgtacttcaggctcattggcgtggtcgccaagcattctcatattacacaagacttcagaaggcggcaatagtcacacaatgtgcctggagatgcagacttgctagaagagagcttagaatgctgaaaatggctgcaagagacaccggtgctcttaaagatgctaagaataaattggagcagcgggtagaagagctttccttgcgtttgcatttggagaagcggttaaggactgatcttgaggaggcaaaggtgcaagaagttgcaaagctgcaagaggcattgcataccatgcggttacaattgaaagaaactactgcaatggtcgtaaaggaacaggaggcggctcgagtagcaattgaagaagcaagttcagttaataaggaacctgttgttgttgaagatacagagaagatcgattctttgagcaacgaaattgacaggctaaagggactgttgtcatcagaaacacataaggcagatgaagcacagcatgcttatcagagtgccttggtccaaaatgaggaattatgtaagaaacttgaagaagctggaagaaaaatagatcagctccaagattctgttcagagattccaagaaaaagtctttagcttggagtcagagaataaagtactccggcaacaaactcttaccatctcaccgactactagagctttggccctaagaccaaaaactaccataatccagagaactccggagaaggatactttctccaatggagaaacaacacaacttcaggaacctgaaactgaggataggccccagaaatcgcttaatcagaaacagcaggaaaatcaagagctgttactaaaatctatttcggaagatataggattttctgaaggcaagcctgttgctgcctgtctgatatacaagtgtctgatacactggagatcttttgaagtagaaagaaccagcatatttaatcgtataatcgagacaatagcatctgccattgagatgcaggaaaacagcgatgtactatgctattggttatccaattccgccacattattaatgtttcttcaacgcactctgaaagccggtgctacaggaagcataactactcccagacgtcggggaatgccttcatctttgtttggacgggtatctcagagtttccgaggttctccacaaagtgctggattcccatttatgactggaagggcaattggcggtgggctagacgaactacgtcaagttgaagctaaatatcctgctttgctttttaagcagcaactcacagctttcctagaaaagatatatggaatgatccgtgacaagatgaagaaagagatttcccctctgcttgcttcttgcattcaggttccaaggacaccgcggtctggtttagtaaaaggacgttcacaaaatacacaaaataatgttgttgctccaaaaccgatgattgctcattggcaaaacattgttacttgtctaaacggccacttgaggactatgagggccaattatgtgccttccttgctaatttctaaagtgttcgggcagatattttcatttatcaatgttcagctgtttaacagccttcttttaagacgtgaatgctgctcgtttagcaatggagagtatgtaaaaacagggcttgctgagctggaaaagtggtgccatgatgcaacggaggagtttgttggttcggcttgggatgaactaaagcacattagacaagctgttggcttcttggttatacatcagaagcctaagaagagcttaaaagagataactactgaactttgtccggtgcttagcattcagcaactgtataggatcagtacaatgtattgggacgacaaatacggtacacatagcgtatctacagaggtgatagcaaccatgcgggcagaggtgtcagatgtatcaaagagcgcgatcagcaattcatttttactagacgacgattcgagcatcccattctcgcttgacgatatctccaaatcgatgcaaaacgtagaggttgcagaggttgatcctcctccgttgatccgccaaaactccaacttcatgttcttgttggaaaggtcagattgaagtagtcaaagttccctatacccgatcgatcgctaggacattttcagattaggagatcagtattgtgctttcaaaaacaaagcctgtacattagtacatatgcctatctttgccagtggctttctggtactgttctactattaataggggtatattgggtaggaaaaaatatatatatgtgaactaaatatttgttgtgtccatgcgttgataggccatttgcttcatggatttttctttgtttatcaagatcagagatattagtttttttttttt

SEQ ID NO: 117867 - DNA, 1210 bp, Arabidopsis thaliana
  unsure (1)..(1210): unsure at all n locations
cagnnnnnnnnnnnnnnnnnnnnnnnnnnnnnnnnnnnannnnnnnnncggaaaccgggtcggcccacgcgtccgcacaactccacgacgagaggaaaaaaaaaactcagagagacaaatctaaatggcgatgattacgcgcaacaccgccacgcgcctccctctcctcctccaatctcaacgcgccgtcgccgctgcctcggtctctcacctccacacatcccttcccgctctctctccctccacatcaccgacttcctacaccagacctggtcctccttcgacctcccctcctcctcctggtctctctaaagcggccgaatttgtgatctccaaggtcgatgatctcatgaactgggctcgtaccggatcgatctggcctatgacctttggtctcgcttgctgcgccgtcgaaatgatgcataccggtgctgctcgctacgatctcgatcgattcggtatcatcttcaggcctagtcctcgccagtctgattgtatgattgtcgccggtactcttaccaataagatggctccggctcttcgcaaggtttatgaccagatgcctgagccaaggtgggtgatttcaatgggaagttgtgccaatggaggtggatactatcactactcctactcggtggttcgaggatgtgacagaattgtcccagtcgacatatacgtcccggggtgcccaccaaccgctgaggctttgctctatggactactccagcttcagaagaaaatcaacaggcgcaaggatttcttgcattggtggaacaagtgagcttcgaacccgtcctccaatcgtgaaagggacttttttcagacatttttaccaaagtttggggataataaatcgtggacgtttcattgcatatttctttgtggtggagatgccatgtaaaggagtgtgtttctaagtttgttgtggaaacttaataaacttaagatgtttgttgtctgagttcttttatgggctcttttattatatatctctctctaccagttttcagctacatgctgactattgctaaatacctacatatatttatacatacgagtgtgttttgtagagctttacagtcaatcaaaagcttagtcggacaaacgagtgtctgacacgcataaaaaaaaaaaaaaaagnnnnnnnnnnnnnnnnnnnnnnnnnnnnnnnnnnnnnnnnnnnnnnnnnnnnnnnnnnnnnnnnnnnnnn

SEQ ID NO: 117868 - DNA, 437 bp, Arabidopsis thaliana
  unsure (1)..(437): unsure at all n locations
atacgactcactttagggaaagctcgtacgcctgcaggtaccggtccggaattcccgggcgacgacgaggggaaaaggaaaaactcagagagacaaatctaaatggcgatgattacgcgcaacaccggccacgcgcctccctctcctcctccaatctcaacgcgccggcgccgctgcctcggtctctcacctccacacatcccttcccgctctctctccctccacatcaccgacgggcctacaccagacctggtcctccttcgacctcccctcctcctcctgggctctctaaagcggccgaatttgtgatctccaaggtcgatgatctcatgaacttggggctcgtacccgatcggtcttgggcctattggacctttggtctcgcttgcttgggcccgcggcaaatgattgaataccggggngtttntttnggtaag

SEQ ID NO: 117869 - DNA, 769 bp, Arabidopsis thaliana
tgcagtaccggtccggaattcccgggtcgacccacgcgtccggaacgagtctgcgttttacttcttctccttgagtttcttcttctagatctgatcgcgaatcaccaaaaggttttattttatacaatgggtcgtggaaacagctgtggtggaggtcaaagctcattggattatctctttggtggtgacgctcctgctcctaagccagttccagctcctcgtcccgctcctactgagtctaacaacggacctgcaccaccagtaacagctgtgactgcaaccgcactcacgactgctactacttctgttgagcctgcagagcttaacaagcagattcctgctggtatcaaaactcctgttaacaactatgccagagctgaaggacagaacaccggcaacttcctcactgaccgtccttcgaccaaagttcacgcagctccgggaggaggatcatccttggattatctcttcactggtggcaagtaaaataattgcaaagacctttatctatccattgtctttgctgcgttatctcactatgaaactgtttgatgtgagcctttaaatgataagaagtcggtttcttgtctcaactcttatctgtaatattttgctgaaaaaatgtttgaatcaaaaacttcccaacttgtctcttattaaccatcaaatgcgagtacaactttttaatcccaaaataaaaaaattaataataaatggggcggccgctctagaggatcccagcttacctacccgtgcttgcgacgtcata

SEQ ID NO: 117870 - DNA, 623 bp, Arabidopsis thaliana
gaaaaacatggagcaaacttttattatgatcaagcctgacggcgtccagagaggactcatcggtgaagtcatctgcaggtttgagaagaagggtttcactttgaaaggtctgaagttgatcagtgtagagagatcttttgctgagaagcactacgaagacttatcttcaaagtctttcttcagtggactcgttgactacattgtatccggccctgttgttgctatgatctgggaaggaaagaatgttgtcttgaccggaagaaagatcattggagctaccaacccagcagcttctgagcctggaactatccgtggggactttgctattgacattggcaggaacgtgatccatggtagtgactctgtcgagagtgcaagaaaggagattgctttgtggttccctgatggacctgtcaactggcagagcagcgttcacccttgggtctatgaaacttgatgatctgttgctttttcagtagtgtgttttcgacattgcttgtcttttgaacaagactgctatatttaagttgagtttgattatccttctctactttgcttgcttgctacatatgaatacaacagctaccaactggtgatataaaatatatcagttattgcagaaa

SEQ ID NO: 117871 - DNA, 640 bp, Arabidopsis thaliana
  unsure (1)..(640): unsure at all n locations
taacaagngccccccggntcagaatcccccggncaacttttntttgancancggcggctccanggggccccancggganncacntccagtttnanaaaagggntccctttgaanggnctnaagttaaccagtnntgagaaatcttttgctgagaagcactacgaaggctttaccttcaaagtctttcttcagtggactcgtttgactacattgtatccggccctgttgttgctatgatctgggaaggaaagaatgttgtcttgaccggaagaaagatcattggagctaccaacccagcagcttctgagcctggaactatccgtggggactttgctattgacattggcaggaacgtgatccacggtagtgactctgtcgagagtgccagaaaggagattgctttgtggttccctgatggacctgtcaactggcagagcagcgttcacccttgggtctatgaaacttgatgatctgttgctttttcagtagtgtgttttcgacattgcttgtcttttgaacaagactgctatattttaagttgagtttgattaaaaaaaaaaaaaaaaaaaagnnnnnnnnnnnnnnnnnnnnnnnnnnnnnnnnnnnnnnnnnnnnnnnnnnnnnnnnnnnnnnnnnnnnn

SEQ ID NO: 117872 - DNA, 1357 bp, Arabidopsis thaliana
ttcccggggtgaaccaaagtaaaaaacaaagactcgagttgatatgtctagtactaaagatatgtcaactgtccaaaacgcaactccttttaacggcgttgccccatccaccaccgtgcgagttacaatcgtccaatcctccaccgtctataacgatactcctgccactatagacaaagcggagaagtatattgtggaggcggcaagcaagggagcagagctagtgttgttcccggaggggtttatcggtggctatcctcgaggttttaggttcggtttagcggttggcgttcataacgaagaagggcgtgatgagtttcggaagtaccatgcttctgctattcatgttcctggccctgaagtagcaagattggctgacgtggctaggaaaaaccatgtgtacttggtaatgggagccatagagaaggaagggtataccctctattgcacagttcttttctttagtccacaaggtcagttcttgggcaagcaccgtaaactcatgcccacaagtttggaacgttgcatttggggccaaggggacggatcaaccatccccgtttacgacactcccattggaaaactcggtgctgctatttgctgggagaataggatgcccctctacagaactgcattgtacgccaaaggcattgagctttattgtgcacctactgctgatggttcgaaagaatggcaatcgtcgatgcttcacattgcgatcgaaggtggatgtttcgtcttgtcggcttgccaattctgccagcgtaaacatttccctgatcatcctgactacttgtttaccgattggtacgacgacaaagaacatgattctattgtctcccaaggtggaagtgtcattatttcacctttgggacaagttctcgccggaccaaactttgaatcagagggtctcgtcacagctgatattgatcttggtgatatagcaagagccaagttatacttcgattcggttggacattactcgagaccagatgttttacacttgaccgtaaatgagcacccgaggaaatcggttacattcgtgacgaaggtggagaaagctgaggatgactcaaacaaatagtaagagacttgaagttcgtatctgctggagttatgtcaatcgtatggagtcaagtccaaaatgttctgttgcgttttcattttatgttcaagtttatttatctttctcttcaatggtaagatctatggagtcaagtaataatggtaagacttatgttgttgaataaaacgaattggttctctcctcttgtattttaaaactgtgccattatgtttatctaatttgggcgttgggcgttgaatcatcaattgttgttcagccgtaaaaaaaaaa

SEQ ID NO: 117873 - DNA, 1312 bp, Arabidopsis thaliana
  unsure (1)..(1312): unsure at all n locations
ctcaagctcaagttaaaacagaaaaaatgtcaacttcagaaaacactccgtttaatggcgttgcctcatccaccattgttcgagctaccattgtccaagcctccaccgtctacaacgatactcccgccactctagaaaaggcgaacaagtttattgtggaggctgcaagcaagggatcggagctggttgtgttcccggaggcgtttatcggtggttatcctcgaggttttaggtttggtttaggggtcggagttcataacgaagaagggcgtgatgagttccgcaagtaccatgcttctgctattaaagttcctggccctgaagtagaaaagttggcggagttggccgggaagaacaatgtgtacttggtaatgggagcgatagagaaggatgggtatacactctattgcacagcacttttcttcagtccacaaggtcagttcttgggtaagcaccgtaaactcatgcccacaagtttggaacgttgcatttggggtcaaggagacggatcaaccatccccgtttacgacactccgattggaaaactcggtgctgctatttgctgggagaataggatgcccctctacagaaccgctttgtacgccaaaggcattgagctttattgtgcacctactgctgatggttcgaaagaatggcaatcgtcgatgcttcacattgcgatcgaaggtggatgtttcgtattgtcggcttgccagttctgccttcgtaaagatttccctgatcatcctgactacttgtttaccgattggtacgacgacaaagagcctgactctattgtttcccaaggtggaagtgttattatttcacctttgggacaggttcttgcgggaccaaactttgaatcagagggtctcatcacagctgatcttgatcttggtgatgtagcaagagctaagttgtacttcgattcggttggacattactcgagaccagatgttttacacttgaccgtaaatgagcacccgaagaaaccggtcacattcatttcgaaggtggagaaagcggaagatgactcaaacaagtaatcggttgtgattcgtcagttcatgtcactcctatgaaggagtcaagttcaaaatgttatgttgagtttcaaacttttatgctaaactttttttcttaattttcgttaataatggaagagaaccaattctcttgtatctaaagattatccatctatcatccaatttgagtgttcaattctggatgttgtgttaccctacattctacaaccatgtagccaattattatgaatctggctttgatttcagttgtgttcttttcttnnnnn

SEQ ID NO: 117874 - DNA, 1381 bp, Arabidopsis thaliana
aaaacaaagactcgagttaatatgtctagtactgaagaaatgtcatcagtcaaaaacacaactcaggttattggcgttgacccatcctccaccgtacgagttaccatcgttcaatcttccaccgtctataatgataccccggccactttagacaaggcggagaagtttattgtggaggcggcgagcaaaggagcgaagttggtgttgtttcccgaggcgttcatcggcggttatcctcgaggttttaggtttggtttagcggtgggagttcataacgaagaagggcgtgatgagtttcgtaactaccatgcttctgctattaaagtccctggccctgaagtggaaagattggctgagttggccgggaaaaataatgtgcacttggtaatgggggctatagagaaggatggttatacactctattgcacagctcttttcttcagtccacaaggtcagtttttaggtaagcaccgtaaagtcatgcccacatctttggaacgttgcatatggggtcaaggggacggatcaaccatccccgtttacgacactcctattggcaaaatcggtgctgctatttgctgggagaataggatgcccctctacagaactgcattgtacgctaaaggcattgagatttattgtgcacctactgctgattattcgttggaatggcaagcatcgatgattcacattgcggtagaaggtggatgtttcgtgttgtcagcgcaccagttctgcaagcgtagagagttccctgaacatcctgattacttgtttaatgacatagtagacactaaagaacatgatcctactgtctccggaggtggaagtgtcattatttcacctttgggaaaggttctcgccggaccaaactatgaatcagagggtctcgtcacagctgatcttgatcttggtgatatagcaagagccaagttatacttcgatgtggttggacattactcaaagccagatatttttaacttgaccgtaaatgagcacccgaagaaaccggttacattcatgacgaaggtcgagaaagcagaggatgaatcaaacaaatagtcaagatttgcaattcgtctactgaagttaagtcaagttcgaaatgtttttttttcagttttaaagttgatgttcaagtttatttttctttctcttcaataatgtaagaggactatttcgatatgttaaaataaaaccaattggttctctcctcttgtattcaattgtcgtgtaataatgttttgttcaattcgagtgttgattaagttgtattctttatttttcctttgcatgtcaaacacagattttttgctgtttaaataagttgctagctaagtctagatgtgagtttgaaaagtcactacaaaactacttaata

SEQ ID NO: 117875 - DNA, 597 bp, Arabidopsis thaliana
  unsure (1)..(597): unsure at all n locations
ccccangngggccccnnccccngttcctnttaacgcntggtgcccctaaggacctgtcctctncccccggggngnaggccattntcccccttgggaaaggtcnccccggcccaacttggatccgggggtctcgtcacagctgatcttgatcctggtgatatagccacagcccaaggtatactccgatgtggttggccatttctcagagccagatatttttgtcttggccgttaatgagcacccgcagaacccggttacattcatgacgaaggtcgaggaagcagaggatgaatcaaacaaatagtcaagatttgcaattcgtcttctgaagttgagtcaagttcgaaatgtttttttttcagttttaaagttgatgttcaagtttagttttctttctcctcaataatgtaagaggactatttccatatgtttaaatcaaacccattggttctctcctcctggattccattggcgtgtaataatgttttggtccactcgagtgttggttaaggtgtattccaaaaacattaaaaaaaaaaaaaaaaaaagggcggccgctttaaaggatcccagcttacggacgggtgcattcgacgt

SEQ ID NO: 117876 - DNA, 924 bp, Arabidopsis thaliana
  unsure (1)..(924): unsure at all n locations
tcgtccacgcgtccgcccacgcgtccgcccacgcgtccgggcgtgatgagtttcggaagtaccatgcttctgctattcatgttcctggccctgaagtagcatgattggctgacgtggctaggaaaaaccatgtgtacttggtaatgggagccatagagaaggaagggtataccctctattgcacagttcttttctttagtccacagggtcagttcttgggcaagcaccgtaaactcatgcccacatctttggaacgttgcatttggggccaaggggacggatcaaccatccccgtttacgacactcccattggcaaactcggtgctgctatttgctgggagaataggatgcccctctacagaactgcattgtacgccaaaggcattgagctttattgtgcacctactgctgattattcgttggaatggcaagcatcgatgattcacattgcggtagaaggtggatgtttcgtgttgtcagcgcaccagttctgcaagcgtagagagttccctgaacatcctgattacttgtttaatgacatagtagacactaaagaacatgatcctactgtctccggaggtggaagtntcattatttcacctttgggaaaggttctcgccggaccaaactatgaatcagagggctcgtacagctgatcttgatcttggtgtatagcanggncaagtatcttcgtgtggttggcattctcaaagncagtattttaacttnccgnaattggaccccaaggaccggnncattattgcggggcngggaaccaggggttgcnaaccaantngcaaggtttaaatcgctnctnaggaagcaaggctgnaatgttttttccggttaaggtgtgccaggttttcttccnncaaaatnagggncttncgntttaaaaaaccattggcnncccttgttaatntc

SEQ ID NO: 117877 - DNA, 1134 bp, Arabidopsis thaliana
  unsure (1)..(1134): unsure at all n locations
cggacgcgtggggtcgtttatagttcaatccttttcctcttctttgtttctaaaaagagaaaagtcacttatggcggatatctcgggaaacggctatggcaacgccagagaagaagtagtaatggtgaatctcaaggatgaagtcgaacatcaacaagaaatggaagacattcataacccaagacccttgaagaaacaagactctctactctcagtctctgtccctttcttacaaaagttgatcgcggagtttcttggaacctactttttggtattcaccggttgtgcatcggtggttgtaaacatgcaaaacgacaatgtcgtgactcttccagggatcgctatcgtttggggactcaccattatggtcctcatttactctcttggtcacatctctggtgctcatatcaatccggccgttaccattgccttcgcctcttgtggccgtttccctctcaaacaggttccagcttatgtcatatcacaagtgataggatcaacgctcgcggctgcgacattacggttgttgttcggacttgatcacgacgtttgtagcggaaaacacgatgtgtttatcggatcatcaccagtgggatcagatcttcaggcgtttacgatggagtttatcgtcactttctatctaatgttcatcatttctggcgttgctaccgataatagagcgatcggagaacttgctggattagcaataggatcaacggtgctacttaacgtgctaattgccgcaccggtatcgagtgcgtcgatgaatccaggaagaagtttaggacctgcactggtctatggttgctacaaaggaatttggatatacttagttgcgccaactcttggtgcgattgcgggtgcatgggtttataacacagttagatataccgataaaccattgcgagaaatcactaaaagtggttcatttctaaagaccgtgagaatcggtagcacttgataagagaaaagaaaacatgggtggagttgatggagtattttcaaatgaatgtaacaactttcaccacacttcacnnatatggcctttgtattaattgctacgtttatctcttttattgttaacgccaagattctctatcttgttattaatgtgtaactgtaccgnntattttt

SEQ ID NO: 117878 - DNA, 1272 bp, Arabidopsis thaliana
aggtttgtttctttgctctgaggtatcttcgtttgatacaaggcgaaatcgatcttcttcttcttcttcttcatccccttgcgttttccatctccatcgtctgctgaaaccatttgatcgatctctcaggttacttagaatggcacaagaagccgatgggatcagattggaccaaagacatgggaaggctcgagtgagagttggaagagtttggcgtcatgctcatgatggatctcatcactttgttgaatggaatgttagcatcagtcttctctctcactgtctctcttcttaccgtcttgatgataactctgatattgtcgccacagataccattaaaaacactgtttatgtgaaagccaaggaatgtggagatcggctctcggtggaggaatttgccatacttattgggaaacacttttgctcattttatccacaggtttttactgctatcgtgaatatcattgagaagccctgggagcgtgtctccatcgatggaaaaccacatttacatggttttaagcttgggtcagagaaccatactacagaggcaagagtagaaaagtctggtgcattaaacttaacttccggtattggaggactagctctactgaagacaacccagtcaggatttgagaggtttgtcagagacaaatacaccattctgcctgaaactcgtgagcgaatgctggccacagaggttaatgcatcttggaggtactcgtatgagtcagttgcaagcattccaacaaaaggactctactttagcgagaagttcatggacgttaagaaagttctgatggatactttctttggtccaccagaaactggtgtgtatagcccttctgtccaacgcactctctacctcatgggaagcgccgtactgaaaaggttcgctgatgtatcatcgattcacctaaaaatgccaaatattcattttctaccagtaaatctttcaacgaaggaaaacccttcaatggtgaagtttaaagatgatgtgtacctgccaaccgatgaacctcatggatctatagaagcaactctaagccgtataacctcgaaactatgaggttttaagacaatacatcatacatggaaatatcaaacacaatttcacaggttctgcaacttttggcgtttgcctcgtttatgaaataacaatttaaatgaagtgtgtaaggtcaacttttggcttttgttgcaagaataatactgtaactgcaaacagtttcacataaaaatgtagcttacatatattatcaaaaaaaaaaa

SEQ ID NO: 117879 - DNA, 1983 bp, Arabidopsis thaliana
  unsure (1)..(1983): unsure at all n locations
cgcgcacnnnnnnnnnnnnnnnnnnnnnnnnnnnnnnnnnnnnnnnnnnnnnnnnnnnnnnnnnnnnnnnnncgctctttgtttgaacaatttatctgggtttttgattctcggatctactccaagacggttttcgaaattaacaagcttttcaggaaatggatcattcatcaaatagatttggcaataatggagtggaatcgattttaccgaattacaagcttggtaaaactcttggaattgggtcttttgggaaggtgaaaatagcagagcatgttgtcacagggcataaggttgctatcaaaatccttaatcgtcgtaagatcaagaacatggagatggaagagaaagtgaggagggagattaagattctacggttgtttatgcatcctcatattattcggcagtatgaggtaatagagaccacgagtgacatttatgttgtgatggagtatgtcaagtctggagagctctttgattatattgttgagaaaggcagattacaagaagatgaggctcgtaactttttccagcagataatatctggtgtagagtactgccatcgtaatatggttgtccatagagacctgaagcctgagaatttactattggattcgaggtgtaatattaagattgcagactttgggttgagtaatgttatgcgggatggtcattttctaaagacgagttgtggaagccccaactacgctgctcccgaggttatatcaggtaaattatatgctggacctgaagtagatgtatggagttgcggagttatattgtacgctctattatgcggtactcttccttttgatgatgaaaacattcccaaccttttcaagaaaattaagggtgggatttacactcttccaagtcatttatcatctgaggctagagacctgatcccaaggatgcttatagttgacccggtgaaacgaatcaccattcctgagatccgtcaacaccgttggttccagactcatctccctcgttatcttgctgtctctccaccggatacagtagagcaggctaaaaagatcaatgaggagatagttcaagaagtggttaacatgggatttgatagaaaccaggttttggaatctctacgcaacagaacacaaaacgatgctactgttacatactacctgttattggataaccggttccgtgttccaagtggctatctagaatccgagtttcaggagacaacagacagtggttccaatcctatgcgcacacctgaagcgggcgcttcacctgtaggccactggattcctgcacatgtggatcactacgggttgggagcaagatcacaagtccctgttgatcgaaaatgggctcttggacttcagtctcatgcgcatcctcgtgaaatcatgaatgaagttttgaaagctcttcaagaactcaatgtgtgttggaagaagattggtcactacaacatgaaatgtcgatgggttcctggtttagctgatggtcagaatactatggtcaacaatcagctgcacttcagagatgaatccagcatcattgaggatgactgtgccatgacttcacccactgtcatcaaatttgaacttcagctatacaaagcccgggaagagaagtacttgctggatatacagagagttaacggtccgcagtttctcttcttggatctatgcgccgcctttcttacagagcttcgtgtgatctgaatgttttaaccatttgttgagacattttttttctttcatgttcaatggtttgtaatagtagagaacataatataatatgtgggtgcagtgtttactttgccgggttacttttatatacctggattctaagttaaactctactgtaatagtaactatcctttcttctttttgatggtttttaaggtttgatcatgtgtacataacttagctgtttcattctaactattgtatttctcctctgatgccaattttatacaacgtttatatcaaaaaaaaaaaaaaaaaa

SEQ ID NO: 117880 - DNA, 1447 bp, Arabidopsis thaliana
ttaggaccaacgtgtgcaagcctgggagaggagagatagggatagttttcgaacacccgaccagacccggaaaccagtcgggtgggtggatggcaaaggagcgtcagcttgagatttcctcagaatccaacaataccttgaagaaatctgtctcatctcctttcatgaacactgcctcgaagatgtattcaatctctgaagttagaaaacacaacactgctgactctgcatggatcatcgtccacggtcacatctatgactgtacacgtttcttgaaagatcatccaggaggcacagattctatcctgataaacgcaggtacagattgcaccgaagagtttgaagccattcactctgacaaagccaagaagcttttggaagattaccgtatcggtgaactcatcaccactggctacgactcttcccctaacgtctcagttcatggtgcctcaaactttggtcctttgttagctccaatcaaagagctaactcctcaaaagaacattgctttggtcaacccacgtgagaaaatcccggttaggctcattgagaagacttcgatctcgcacgacgttcgtaagttccgattcgcattaccatcagaagatcaacagcttggtttaccggtggggaagcacgttttcgtttgcgccaacataaacgacaaactctgtctcagagcttatactcccaccagcgccatcgacgcggttggtcatatcgacctcgtcgtcaaagtttacttcaaagacgttcatccaaggtttcccaatggtggactcatgtctcaacacttagactcgttaccaatcgggtcaatgatagatatcaaaggtccactagggcacatcgagtacaaaggcaaaggcaacttcctggtcagcggcaaacctaagtttgccaagaaactagcaatgctcgccggaggaacaggcatcactcctatctaccagatcattcaatctatattgagtgatccagaggacgaaaccgagatgtatgtggtttacgcaaacagaaccgaggatgacattcttgtgagggaagagctagaaggatgggctagtaagcataaggagaggctaaagatttggtacgtcgttgaaatcgcaaaggaaggttggagttacagtaccgggtttataactgaagctgtgcttagggaacatatccctgaaggtttggaaggcgaatcgctagcactcgcatgcggaccaccgcctatgattcagtttgcgttgcagccaaatctagagaagatgggttacaacgtgaaggaggatctcttaatcttctagatttgctcaagttctgtgctattggaaattcgaaagttgataacaagtatcgcttatgtgtgtatatacatggttatttgggcacttttgtcatagttgttgtttatcagagctccaaattgtatattgtataaaattgtgtttaattt

SEQ ID NO: 117881 - DNA, 424 bp, Arabidopsis thaliana
ggagccgaaaacgaataagaagattaattgaggagaaatcgaagatgtctatagcgttagtggagaagattcaagccaaattttgaagaagtctagtagattctgtattgtaagctactaaaatctgcgatggtgaggcatttcaatcgtcgccggaaaattcatcggagatattaaaattgaatcaagcttcgaattggtcaaccgatctatattgagtgatccagaggacgaaaccgagatgtatgtggtttacgcaaacagaaccgaggatgacattcttgtgagggaagagctagaaggatgggctagtaagcataaggagaggctaaagatttggtacgtcgttgaaatcgcaaaggaaggttggagttacagtaccgggtttataactgaacctgtgcttagggaacatatccctgag

SEQ ID NO: 117882 - DNA, 1939 bp, Arabidopsis thaliana
  unsure (1)..(1939): unsure at all n locations
cnnnnnnnnnnnnnnnnnnnnnnnnnnnnnnnnnnnnagtgcgagcaatttagcttgaatcaaatctcaaacttgcaaagaaacttgaaatattttataacaatgggtgattctactggtgagccggggagctccatgcatggagtcaccggtagagaacaaagctttgctttctcggtgcaatcaccaattgtgcataccgacaagacggccaagttcgaccttccggtggacacagagcataaggcaacggttttcaagctcttctccttcgccaaacctcacatgagaacgttccatctctcgtggatctctttctccacatgttttgtctcgactttcgcagctgcaccacttgtccctatcatccgggagaatctcaacctcaccaaacaagacattggaaacgccggagttgcctctgtctctgggagtatcttctctaggctcgtgatgggagccgtgtgtgatcttttgggtccccgttacggttgtgccttccttgtgatgttgtctgccccaacggtgttctccatgagcttcgtgagtgacgcagcaggcttcataacggtgaggttcatgattggtttttgcctggcgacgtttgtgtcttgtcaatactggatgagcactatgttcaacagtcagatcattggtctggtgaatgggacagcagccggatggggaaacatgggtggcggcataacgcagttgctcatgcccattgtgtatgaaatcattaggcgctgcggttccacagccttcacggcctggaggatcgccttctttgtacccggttggttgcacatcatcatgggaatcttggtgctcaatctaggtcaagatctgccagatggaaatcgagctaccttggagaaagcgggagaagttgccaaagacaaattcggaaagattctgtggtatgccgttacaaactacaggacttggatcttcgttcttctctacggatactccatgggagttgagttgagcactgataatgttatcgccgagtacttctttgacaggtttcacttgaagctccacacagcagggctcatagcagcatgtttcggaatggccaatttctttgctcgtccagcaggaggctacgcatctgactttgcagccaagtacttcgggatgagagggaggttgtggacgttgtggatcatacagacggctggtggcctcttctgtgtgtggctcggccgcgccaacacccttgtaactgccgttgtggctatggtgctcttctctatgggggcacaagctgcttgcggagccacctttgcaattgtgccctttgtctcccggcgagctctaggcatcatctcgggtttaaccggggctggagggaactttggatcagggctcacacaactcctcttcttctcgacctcacacttcacaactgaacaagggctaacgtggatgggagtgatgatagtcgcttgcacgttacctgtgaccttagttcactttcctcaatggggaagcatgttcttgcctccttccacagatccagtgaaaggtacagaggctcattattatggttctgagtggaatgagcaggagaagcagaagaacatgcatcaaggaagcctccggtttgccgagaacgccaagtcagagggtggacgccgcgtccgctctgctgctacgccgcctgagaacacacccaacaatgtttgatcatacattccacccacggtggaatggtgaaggatgatcgcatataagaatatgtcacacagtgaaaaaaaaaaatgcaaatgttatcaatgcttgcataacattactatctatctttcatttactaaacaaaccttttgctttttgccttgaaatctttttattatatatcaaaatatatctctatgtcttgaggtttgattattttgcatatatcattaatgatttgataatattggaactg

SEQ ID NO: 117883 - DNA, 1783 bp, Arabidopsis thaliana
  unsure (1)..(1783): unsure at all n locations
gccagnnnnnnnnnnnnnnnnnnnnnnnnnnnnnnnnnnnnnnnnnnnnnnnnnnnnnnnnnnnnnnnnnnnnnnnccacgcgtccggacaagttcagagaacgagattttaccatcccttattctatcagaccggtttaagctgcagatttctaggcttagcgttcgatttcgtcgctgaaagtgaaaagttcatctagctttagttttctcttttcatggtttccgcgggaaaagttcgtcttttttgaagcccttttgacacaaaagaccagaacaagttgaagaaatatgaatacaacctcgacacattttgttccaccgagaaggtttgaagtttacgagcctctcaaccaaatcggtatgtgggaagaaagtttcaagaacaatggagacatgtatacgcctggctctatcataatcccgactaacgaaaaaccagacagcttgtcagaggatacttctcatgggacagaaggaactcctcacaagtttgaccaagaggcttccacatctagacatcctgataagatacagagaaggctagcacagaatcgagaggcagctaggaaaagtcgtttgcgcaagaaagcttatgttcagcagctagagactagccggttaaagctaattcatttagagcaagaactcgatcgtgctagacaacagggtttctatgtggggaacggagtagataccaatgctcttagtttctcagataacatgagctcagggattgttgcatttgagatggaatatggacattgggtggaagaacagaacaggcaaatatgtgaactaagaacggttttacatggacaagttagtgatatagagcttcgttctctagtcgagaatgccatgaaacattactttcaactcttccgaatgaagtcagccgctgcaaaaatcgatgttttctatgtcatgtccggaatgtggaaaacttcagcagagcggtttttcttgtggataggcggatttagaccctcagagcttctcaaggttctgttaccgcattttgatcctttgacggatcaacaacttttggatgtatgtaatctgaggcaatcatgtcaacaatcagaagatgcgttatcccaaggtatggagaaactgcaacatacattagcagagagtgtagcagccgggaaacttggtgaaggaagttatattcctcaaatgacttgtgctatggagagattggaggctttggtcagctttgtaaatcaagctgatcatctgagacatgagacattgcaacagatgcatcggatcttaaccacgcgacaagcggctagaggtttgttagcattaggggagtatttccaaaggcttcgagctttgagttcgagttgggcggctaggcaacgtgaaccaacgtaattaaggtgtttagatgtcaagaaaggtttgagaccttaacaatcaagaatggagtttgctggtgagtggatttttgggtcaagaacaagagcaataacacaagctgctgtgtgatgatgaatcttgtcttgcggctaaaggaaatgtttgaggaaagttgtacatatgatcagcaacgtaaagtttatagctttttagaaaccaacttttcgatggttgttcttttttttttgtatgtaatattatagataagcttgtggtatatatgattttaatgtgacattacgaacttgatttataaccatggtaaaatgaaaaaaaaagggcggcaactctagaggatccaagcttacgtacgcgtgcaggtgacgtcatagatcttctatagttgtcctaa

SEQ ID NO: 117884 - DNA, 863 bp, Arabidopsis thaliana
cggggggaccaggcgtccgttcgtagacttatctctatatacccccttttaatttgtgtgctcttagcctttactctatagttttatatcatatcaatcgacatggcgaatgtggaccgtgatcggcgtgtgcatgtagaccgtactgacaaacgtgttcatcagccaaactacgaagatgatgtcggttttggtggctatggcggttatggtgctggttctgattataagagtcgcggcccctccactaaccaaatcttggcacttatagcaggagttcccattggtggcacactgctaaccctagctggactcactctagccggttcggtgatcggcttgctagtctccatacccctcttcctcctcttcagtccggtgatagtcccggcggctctcactattgggcttgctgtgacgggaatcttggcttctggtttgtttgggttgacgggtctgagctcggtctcgtgggtcctcaactacctccgtgggacgagtgatacagtgccagagcaattggactacgctaaacggcgtatggctgatgcggtaggctatgctggtatgaagggaaaagagatgggtcagtatgtgcaagataaggctcatgaggctcgtgagactgagttcatgactgagacccatgagccgggtaaggccaggagaggctcataagctaatataaattgcgggagtcagttggaaacgcgataaatgtagttttacttttatgtcccagtttctttcctcttttaagaatatctttgtctatatatgtgttcgttcgttttgtcttgtccaaataaaaatccttgttagtgaaataagaaatgaaataaatatgttttcttttttgagat

SEQ ID NO: 117885 - DNA, 1074 bp, Arabidopsis thaliana
  unsure (1)..(1074): unsure at all n locations
nnnnnnnnnnnnnnnnnnnnnnnnnnnnnnnnnnnnnnnnnnnnnnnnnnnnnnnnnnnnnnnnnnnnnnnnnnnnnnnnnnnccacgcgtccggtcgtggtcgtatatagttggacacttgacaaatctgagcatttcctttttgctgacagcggaaatatctgaaccaacgcgatgccgtcgacgcagtccttgaccgtcgcagcgaagacgctacgaaatcggatcttctctaggtctggatctacatccgccggtccgagtcggtgggcgacgccaggtcacgaggagcgacctaagggttactttatgaaccgtactcctccggcaccaggacagtcgcgaaaatgggaagattgggagcttccttgttacatcaccagcttccttacaattgttatcctcggcgttggactcaatgccaaacctgatctttcaatcgagacttgggctcatcagaaagctttagagcgtcttgagatggagaagctcgcgaccgctggagattcatctgattaagcatcaccgttggatctccggttgcttgatttggtatgtccttattctccgggagttgaggagtttttttaccgtttaatgatgatgataacgaagactggagagttagggtttcgtttggcccttgaactttgtttcaattctcctttgttttgtcgataatgatgatgttcatgaaataagtgttcttttaactgtttagacgcaattgccttcactctctacttcttattacaattctcaaatttggtcactaaaaaaggcgaatgtggaccgtgatcggcgtgtgcatgtagaccgtacggacaaacgtgttcatcaggcaaactacttagatgatgtcggctctggcaacttcagcggacacgcttatgagttgtggcacctgttacttgatccttgcaagtttcattgcctaattattcccgaggtgttttcacttattccaaagtttatgctaatgcgtttttttatccttattataacttgtctatggttaatactttttttctgttaatttttttttattagttttttaactttaattttcttta

SEQ ID NO: 117886 - DNA, 527 bp, Arabidopsis thaliana
tttttgtttagactttgctttttagtagttctagatcatatcaatcgctatggcaaatgtggacaggcgtgtgaatgtcgaccgtactgacaaaggacttcaacttcagccgcagtacgaagatcgtgtcggttatggatatgggtatggcggtaatactgattacaagagtcgcggcccttccactaaccaaatcgtggcacttatagcaggagttccaattggtggctcattgctagccttagctggactcactctagccggttcggtgataggttttatgctctccattccgctcttcctactcttcagtccggtgattgttccggcagctctcaccatcgggctagctgtaaccggaattttggcgtcagggttatttggtctgacgggtctcagctcggtctcgtgggtcctaaactacatccgtgggaggagtgatacggtgccggagcaattggactatgctaagaagcgtatggctgatgcaataggctatgctggtcaagaaggaaaagagatggggc

SEQ ID NO: 117887 - DNA, 646 bp, Arabidopsis thaliana
tttctctgctaatttctactatttgtgttggagggatatattataataaaaagaaccaatggcggaccaaacaagaacccatcacgagatgataagccgagacagtacccaagaggcccatccgaaggccaggcagatggtgaaggcagcaaccgctgtcacagccggtggatccctccttgtcctctccggcttaacactcgctggaacagtcatcgcactcacggtggctactcctctcctcgtcatcttcagccccgtcttggttccagcagtggtaaccgttgctctcatcattaccggattccttgcatccggtggctttggaatagccgccattaccgccttctcttggctctacaggcacatgacgggatctggatcggataagatagagaatgctcggatgaaggttggaagcagagtgcaggatactaagtatgggcagcacaacattggagtccaacaccaacaagtttcttaaaattcaaaggctaaaaacgatttccacattaaattgtcatccatcgttagatctcttctctttgtttttattttcaacgtttatgttgtaatgtgtgatatataataacatgcaatgtatgatgtaatcttgttgttgttgtatgagtaatgttttgatccc

SEQ ID NO: 117888 - DNA, 813 bp, Arabidopsis thaliana
  unsure (1)..(813): unsure at all n locations
cggaaccgcacgcacaaacagacaatttaattccatctaatccaaaaaatcaaaagatgaatgccacaaagtttgttgtgcttctcgtgattggcgttttgtgtgccattgtcaccgcaaggcaggtcaaagatttgtccacggagaccaaattaggggcctctcttccaaaaactactaccaaaggcattggagctcagctttctgcaactggcacaacttacagcaccagcagtgtcgttagctatgctaatggttttaacaatcccaaaggtccaggggccaatgcattcgaaagtgccaacacatttaccagcggacaagtcactgccaagggtcgcaaggcaagagtttcttctgcaagtgcttctgccgctgaaggcgatgctgcagctgcagtgactcgcaaagctgctgctgcacgtgcaaagggtaaggtagcttccgcatcaagggtgaagggttcctctgagaagaagaagaaggacccagcaaaggaaaaaaggattgagcgtgaggtcatctcatattctcatgcatgcgtattcctcaaacctatatattaataatatcctaaaaactacaaactcacaatctctatcttgttcataaataaaaccagagattgtcacctctatatattattatgaaatgctactctttctcatgtaatggcttttttaaaaataaaataaatgcaataaatcttatcttatagttnnnnnnnnnnnnnnnnnnnnnnnnnnnnnnnnnnnnnnnnnnnnnnnnnnnnnnnnnnnnnnnnnnnnnnnnnnnnnnnnnnnnnnnnnnnnn

SEQ ID NO: 117889 - DNA, 569 bp, Arabidopsis thaliana
  unsure (1)..(569): unsure at all n locations
gtcccggttcggatttcccgggtcgacccacgcgtccgggacaagatgcgcaggaaagtgtttctttcgcagcgcagggaaactaggagaaagatgctcggaactcttttaaagaggatgaaaaccttagtttgtttgagggtaaagaagatgctcagagaactagttcttctaaagtggatgaaagttttggtttctttgagggtaaagatgctcagagaactagttcttctaaagacgatgagagttttggtatgtttgaaggtaaaaaagatgctcagagaaatagttcttctaaagaggatgagagttttggtatgtttgaagggttcctctgagaagaagaagggcaaaggaaaaaaggattgagcgtgaggtgctctcatattctcatgcatgcgtattcctcaaacctatatattaataatatcctaaaaacttcaaactcacaatctctatcttgtccataaataaaaccagagattgtcacctctatatattattatggaatgctcctctttcccatgnatggctttttaaaataaaannaatncataaanctttnctta

SEQ ID NO: 117890 - DNA, 632 bp, Arabidopsis thaliana
  unsure (1)..(632): unsure at all n locations
aacacaatctaatccacaaaatcaaaagatgaatgccacaaagtttcttgtgcttctcgtgattggcgttttgtgtgccattgtcaccgcaaggcaggtcgaagatgtgtccacggagaccaaatttggcacctctcttccaaaaactactaccaaaggcattggagctcagctttctgcaactggcacaactttcagcgatagaatgtcgttagctatgctagtggttttaacaatccgaaaggtccaggggccaatgcattcgaaagtgccaacacatttaccagcgggcaagtcactgccaagggtcgcaaggcaagagtttcttctacaagtgcttctgccccgctgaaggggatggcttcagctgcagtgacttcgcaaagcttgctgctgcacggtgcaaaggggtaaaggtaggtttccggatcaaggggtgaaggggttcctctnaggagaagaggggggcccccaaaggggaaaagggttttccccgttgggggntcctattctcatgnatgggtttcccaaacctttattttagggattcttaaacctcaaaccccaactttttttttcaaaaaaacccgggttggcccntaaattttttgnggcccttccccgaagggttt

SEQ ID NO: 117891 - DNA, 431 bp, Arabidopsis thaliana
caaacacacagtttaatccaaaaaaagatcaaaagatggatgccacaaagttttatgtgcttctcgtgattggcgttttgtgtgccattgtcactgcaaggcaggtggaagaagtgtccaaagagaccaaattaggtatctctactccaaaaactactatcaaaggcgtcggagctcagctttctgctaggggcagaactttcagcaactctgggggctctagctttgctagagctactcatggtcgcaaaggtccagaggcttatgcatccgaaggtggctccacaagtaccggcggagaaatcattgccaagggtcgaaagacaagagtttcttctaaaagtgcttcagtctcaaagggagggtctaaagctgcagcgaatcgcaaagctgctgctgcttctgcaggtggtgccacaggttccgaatcc

SEQ ID NO: 117892 - DNA, 513 bp, Arabidopsis thaliana
  unsure (1)..(513): unsure at all n locations
tggccccgttcnntgggncttcttcccnccncgttctttgcctnctgtcttcacatccccaagtccnggnccgtcatccgaagtgcttccncagtccctcggnccagtcttgccaaggtcgcaaggcaagagtttcttctgcaagtgcttctgccgctccaggtgaggctgcagctgccagtgactcgcaaagctgctgctgcacgtgcaaagggtaaggtacttccgcatcaagggtgaagggttcctctgagaagaagaaggagggcaaggggaaggaccgcaaaggaaaaaaggattgagcgtgaggtcatctcatattctcatgcatgcgtattcctcaaacctatatattaataatatcctaaaaactacaaactcacaatctctttcttgttcataaataaaaccagagattgtcacctctatatattattgtgaaatgctactcattctcatgtaatggcttttttaaaaataaaataaatgcaataaatcttatactaatcntcc

SEQ ID NO: 117893 - DNA, 2077 bp, Arabidopsis thaliana
cctgtgccaccatcacttaccctttctcgcctctcctgaaatcaaaatcccattgtgcaaatccattgtcatcgtcatcaatatcatcaccaacttcattctcatcatccatggcccatttctcatctatgtagattctcatctctctacctcctcctcattttctcctcttgattcactaattcttcttcttcttcttcttttcagacatgactcttccttatcgtttctcttccgttagaaaccactcacttctacttaagacttctcatctctgcacacccagatcagctcttggttgttgtttctctcccaaggaatcccctttcttcaggaagaacactgcccaattcctttctcctcagaaacacacttctcttcctctgaaacttgtctgccctttagctagtttctcttcttatgcggattctgagggagaagagcaacaccatgctgatcaaccgatacagaaccctcacgaatcttctaccgtttcaaacgaatcagatgggaaaggtaatgcagaagctactggagacttttctggaatggctcaagcctttcacatttcttccacaacagcaagggcaatctctatagtcatcgccttctctgctctcacccttccaatcttcatgaagtccctgggacaaggactggctctcaagaccaagcttctctcttacgcaacactactctttggtttctacatggcctggaacatcggagctaatgatgtcgcaaatgccatggggacttctgttggatctggagccttgacaatccggcaagctgtgatgacagctgcagttctcgaattctcaggtgctcttttgatgggaactcacgtgactagcacgatgcagaaaggaattctcatggctaatgtgttccaagggaaagatatgttgctctttgctggtctcctctcttccttagctgcagctggaacttggttacaggtagcttcttactatggatggccagtatcaacaactcactgtatcgtcggatcaatggttgggtttgggcttgtatatggaggagctggtgccgttttctggagttccctagctaaagtagcttcatcttgggtcatctctcctatactgggagctcttgtctccttcctagtctacaaatgcatcaggagatttgtttacagtgcaccaaacccaggacaagcagcggctgctgccgctcccgtcgctgtatttgtaggtgtggccagtatctcctcagccgcattgcctctaagtaagatctttccaatagctctatcacaagccttagcctgtggagtagcaggagccatagtattcgacagaatcatccgcaaacagctcggtcacctcctagctaaaacaaaatcaccagaaacatctcaaaaccaacccaaaaccattggtttcctctccgatatcgcaggaccaacaggtacacaactcgaaatagtctacggaatctttggctatatgcaagtcctctccgcttgcttcatgtcattcgctcacggaggcaacgacgtctccaacgcaatcggaccattagccgccgcattaagcattctccaaaacggagcagctgcaggaggagccgagatcgttatcccaatggatgttctcgcttggggaggattcggaatcgttgctggtctcacaatgtggggatacagagtcatcgcaacgatagggaagaagatcactgagctaacaccaacaagaggattcgctgcggaattcgccgccgcgtcggttgttttgtttgcttcgaaattagggcttccgatttctgcgactcatacacttgttggtgctgtgatgggtgttggtttcgctagagggcttaatagtgtgagagctgagactgtgagagagatcgttgcttcgtggcttgtcaccattcccgttggtgctacactcgccgttatctacacttggattttcaccaagatcttatcttttgtattgtgagtttctgtttcttttggttttgttatacgaagaacatgaaattgatcttcttcttctatgttcgtttgaatgattcgagtttgaaaaaaccctaaagttatcat

SEQ ID NO: 117894 - DNA, 2233 bp, Arabidopsis thaliana
  unsure (1)..(2233): unsure at all n locations
taaacccttagggnttttnaaccnccctccaaattaatttccccnaaaaatttgattcctttaacccnnggcctttttcccgccttcgggaaaagaccaagcctccgatgagttaggaggccgcggcggtcgctgcaaaacctagggcgcgagcccgggcggaccggccgtcggtgcagatcttggtggtagtagcaaatattcaaatgagaactttgaaggccgaagaggggaaaggttccatgtgaacggcacttgcacatgggttagtcgatcctaagagtcgggggaaacccgtctgatagcgcttaagcgcgaacttcgaaaggggatccggttaaaattccggaaccgggacgtggcggttgacggcaacgttagggagtccggagacgtcggcgggggcctcgggaagagttatcttttctgtttaacagcctgcccaccctggaaacggctcagccggaggtagggtccagcggctggaagagcaccgcacgtcgcgtggtgtccggtgcgcccccggcggcccttgaaaatccggaggaccgagtgccgctcacgcccggtcgtactcataaccgcatcaggtctccaaggtgaacagcctctggtcgatggaacaatgtaggcaagggaagtcggcaaaatggatccgtaacttcgggaaaaggattggctctgagggctgggctcgggggtcccagttccgaacccgtcggctgtcagcggactgctcgagctgcttccgcggcgagagcgggtcgccgcgtgccggccgggggacggactgggaacggctctctcgggagctttccccgggcgtcgaacagtcagctcagaactggtacggacaaggggaatccgactgtttaattaaaacaaagcattgcgatggtccctgcggatgctaacgcaatgtgatttctgcccagtgctctgaatgtcaaagtgaagaaattcaaccaagcgcgggtaaacggcgggagtaactatgactctcttaaggtagccaaatgcctcgtcatctaattagtgacgcgcatgaatggattaacgagattcccactgtccctgtctactatccagcgaaaccacagccaagggaacgggcttggcagaatcagcggggaaagaagaccctgttgagcttgactctagtccgactttgtgaaatgacttgagaggtgtaggataagtgggagcttcggcgcaagtagaaataccactacttttaacgttattttacttactccgtgaatcggaggcggggtacaacccctgtttttggtcccaaggctcgcttcggcgggtcgatccgggcggaggacattgtcaggtggggagtttggctggggcggcacatcttgttaaaagataacgcaggttgtcctaagatgagctcaacgagaacagaaatctcgtgtggaacaaaagggtaaaagctcgtttgattctgattttaagtacgaatacgaaccgtgaaagcgtggcctatcgatcctttagaccttcggaatttgaagctagaggtgtcagaaaagttaccacagggataactggcttgtggcagccaagcgttcatagcgacgttgctttttgatccttcgatgtcggctcttcctatcattgtgaagcagaattcaccaagtgttggattgttcacccaccaatagggaacgttgagctgggtttagaccgtcgtgagacaggttagttttaccctactgatgcccgcgtcgcgatagtaattcaacctagtacgagaggaaccgttgattcgcacaattggtcatcgcgcttggttgaaaagccagtggcgcgaagctaccgtgcgctggattatgactgaacgcctctaagtcagaatccgggctagaagcgacgcatgcgcccgccgcccgattgccgaccctcagtaggagcttaggctcccaaaggcacgtgtcgttggctaagtccgttcggcggaagcgtcgttcggaccgccttgaattataattaccaccgagcggcgggtagaatcctttgcagacgacttaaatacgcgacggggtattgtaagtggcagagtggccttgctgccacgatccactgagattcagccctttgtcgctaagattcgaaaaaaaaaaaaagcaaaaaagaacacaaagggcgaccgctctagaggatccaagcttacgtacgcgtgcaggcgacgtcaagatcttctaagttggtcctannnnnn

SEQ ID NO: 117895 - DNA, 946 bp, Arabidopsis thaliana
  unsure (1)..(946): unsure at all n locations
cgcagtacaggtccggaattcccggatcgacccacgcgttcgcaacgctgattttcaagactagcaagaacaaaacagctggaccgtttgggattgtatctggcacaaagtttgaattcaagaaggaaggttacaagatcactgggttccacggacgagctggtgagtatgttaatgctattggagcttatttagctccatcaggcaccacccctttgactcctgcaacacaatcccaaaagctagaaggagctggtagtgaggcaggaactttatgggatgatggtgctttcgacggtgtaaggaaagtgtctgtaggacaagcccaagatggtattggagcggtctcgtttgtgtacgacaaagcaggtcaggttgtagaaggaaaagaacatggaaaacccacattgcttggatttgaagagtttgagcttgactatccaagtgaatacatcacggcagttgatggcacctacgatgcaatctttgggaatgaaccaatcgtaaatatgcttaggttcacgactaataagcgagtatctattccttttggaataggagctggcacagccttcgaattcaagaaggacggtcaaaagatagttggtttccatggaagagctggtgatctacttcacaaatttggagtccatgtcgcgccaataaccaaataattatggagattttaagtatcttttgatgatagtttacacactttgaataagctgattctactttatttctctctgtttgtttactgcttcagtgttttaagtcttctctttgtgtttgttgctgttgtgtctttgatggatttttgtgatccgatttaataaaagaagtgtgttcaaagtaaaaaaaaaaaaaaaagnnnnnnnnnnnnnnnnnnnnnnnnnnnnnnnnnnnnnnnnnnnnnnnnnnnnnnnnnnnnnnnnnnnnnnnnnnn

SEQ ID NO: 117896 - DNA, 1355 bp, Arabidopsis thaliana
  unsure (1)..(1355): unsure at all n locations
ctctggttctacttgttcctctgttttggattgtggtggctctctaatggcggcggttattggaaacgtggcgttgttacttgacgttaactctcaccgtacggtggtaactgatcggagaattcgtttaacggtggtcgacgtcgttttgaatttacaaaagagagattcgcacagtcacgtttctcattacgctgctctctcttccaataagcctcttgaatctgacggcgaagctcgggttcgccggtttttaactcgcggaaaagcgaattccagagctaacgccgtcgatttcgacgacgcgggatccagcgacgaagaaagtagtgacggaggcggtggtggtggtgacgaggaggaggaggaggaatatttcgatgtggagaaggagaggaagaggagagctaaggaatttcatgatacgaaggagcttgagaggaaagcagaggagttacagtataagattgatgaagaaggagacgattcagaggagaagaagaggatgagagtgaagagagaactccaaaaggtagctcaggagcaagcagagaggagaaaaactgcagaattgatgtttgaactaggtcaaaaggcttatggtaaaggaatgtatggacgagcgatagagtttcttgaaggagctcttacgattatcccaaggccaacactctttggtggtgagatacaaatttggttagctatggcatatgaggccaataatcgccacgctgattgcattgatctttatcagcaattagagaagaaacatcccagtcctggtattcgtcgtcaagcttctgagcttcggtatatcttgcaagctcctaagcttaagatatctcaggaggaaatggttactattcccatgatcggttcaagttacgacagctatgcagtgacatggagtgataaggaaagggataaggagcggcgaatgaatgcatcgactacgaatcagctcaactcgagtgatgattttctaggaaagctcttggtttggcgaccggtggtcggtatggagaagaaccgagtcttttggcttgctttgacactgtggtttggtttggttggagcagcactcatcttacaaagataagtagaagacatgcaaaatatttttccatcgctttaaattatggtttggtactactgtttcttctacttgtcttgaaattatatttgatttcatgtataaatgtgtaagcaaatgaattcgtcgttgtatataaagtatttgatggaaatatatataactttgtttaaaaaaaaaaaaaaaagnnnnnnnnnnnnnnnnnnnnnnnnnnnnnnnnnnnnnnnnnnnnnnnnnnnnnnnnnnnnnnnnnnnnnnnnnn

SEQ ID NO: 117897 - DNA, 626 bp, Arabidopsis thaliana
  unsure (1)..(626): unsure at all n locations
tggaanttntcccntcggtccgnncgaatccnggtnaccccaccgtccggcggacttacgcaatgtgattttctcgcccagtgctctgaatgtcaaagtgaggaaattcacccaagcccgggtaaccggcgggagttaacttatgactctcttaaggtagccaaatgcctcgtcatctaattagtgacgcgcatgaatggattaacgagattcccactgtcccctgtctactatcccagcgaaacccacagcccaagggaacgggctgggcagaatcagcggggaaagaagaccctgttgagcttgactctagtccgactttgtgaaatgacttggagaggtgtaggataagtgggagcttcggcgcaagtgaaataccactacttttaaacgttattttacttaccccgtgaatcggaggcgggggtccaaccccggttttttgggcccaaggctcgcttcggcgggtcgatccggggcgggggacacttgttcagggggggagttttgttgctgggggcggcacatcttgttaaaagataacgcgagggggccctaagatgagcccaaccgagaacagaaatcctcgggggaaaaaaggnggcccncctaaggnncaaactttg

SEQ ID NO: 117898 - DNA, 603 bp, Arabidopsis thaliana
  unsure (1)..(603): unsure at all n locations
aatcgccccttttngnaacttgtccccnaagtcccgtccgaatcccggtcgacccccggtccgaaaccgcgggagtaactatgactctcttaaggtagccaaatgcctcgtcatctaattagtgacgcgcatgaatggattaacgagattcccactgtccctgtctactatccagcgaaaccacagccaagggaacgggcttggcaggatcagcggggaaagaagaccctgttgagcttgactctagtccgactttgtgagatgacttgagaggtgtaggataagtgggagcttcggcgcaagtgaaataccactacttttaacgttattttacttactccgtgaatcggaggcggggtacaacccccgtttttggtcccaaggctcgcttcggcgggtcgatccgggcggaggacatttcagggtggggagtttggctggggcggcacatctttaaaagataacgcaggggtcctaagatggctcaacgggaacagaaatcccctgtggaaaaaaaagggcggcccccctaaagggcccaatttcgancgcgggatccncgcatacactcaatggcnccaaatcaatcactggcgcgtttgc

SEQ ID NO: 117899 - DNA, 1980 bp, Arabidopsis thaliana
acatcgacgttcactattctcccatacctactggaggaactggcaccggaggaactggcaccggaactggcaccggaactggcactggaactggcactggcaccggaactggcactggaactggcactggaactggcaccggaggaactggcactggaactggcaccggtactggaggaactggcactggaactggcaccggaggaactggcactggaaccggcactgggactggcactggaaccggcactgggactggcactggaaccggcaccggaggaactggcactggaaccggcaccggaggaactggcactggaaccggcactgggaccggcactgggaccggcaccggaggaactggcactggaaccggaactggtaccggttcaggtgctcagaaattggaagcacaaggcaacagtacaggaggtacatcatgggacgatggatccgattacgatggcgtgaccaagatatacgcaagctacggtggggaaggtattcaatacgtcaagttcgactatgtgaaaggtggagtaacaaaacaaggagttctacacggtaaacaacaaagtagacaaaatccacaagagtttgtgattaaccatccagatgagtatcttgtatccgttgagggttggtatgaaaccgtcatgctaggaatccagttcaaaaccaacttgaacacttatgaggtcagaatgtatgatttcactcctagtactgatactaaatttactcttcaagttcaagacaagaagatcattggatttcacggtttcgccggcaaccatcttaattccattggagcttacttcgttccaaaatcctccaccactcctgttccttcaacccctttgaagctgaccgcagaaggtggtgagacaggagctgtatgggacgatggttctcacgatgatgttaagaaagtttatgtaggacaaggccaagatggtgttgcagctgtcaagtttgaatacaaaaatggttctcaggttgtttttggagatgaacgtggaacgagaacattgctaggattcgaagagttcgagcttgaatcagacgaatatataacatccgtggaaggatactacgaaaaaaactttggagttgatactgtagtgacaacgctgattttcaagactagcaagaacaaaacagctggaccgtttgggattgtatctggcacaaagtttgaattcaagaaggaaggttacaagatcactgggttccacggacgagctggtgagtatgttaatgctattggagcttatttagctccatcaggcaccacccctttgactcctgcaacacaatcccaaaagctagaaggagctggtagtgaggcaggaactttatgggatgatggtgctttcgacggtgtaaggaaagtgtctgtaggacaagcccaagatggtattggagcggtctcgtttgtgtacgacaaagcaggtcaggttgtagaaggaaaagaacatggaaaacccacattgcttggatttgaagagtttgagcgtgtctatccaagtgaatacatcacggcaggggatggcccctacagatccaatctttgggaatgaaccattccgtagatatgacttagggttcccggcctagtaagcgagtatctattccttttggaatagaagttggcacagccttggaattcaagaaggacggtcaaacgatagttggtttccatggaaggcttggtgttttccttcccaattttggagtccatgtcgcgccaataaccatatagttatggaggttcccagttcattatggtgatggttgcccgcctttgactaagcagattcaacttcattactctctgttggtataatgctacagtgtcgtaagtcttctctatgtgtttgttgctgttgtgactttgatggatctttggcggccgcgaattcctgcagcccgggggagcctcgtagtaactagagcgtcccccaccgcggtgcagct

SEQ ID NO: 117900 - DNA, 625 bp, Arabidopsis thaliana
  unsure (1)..(625): unsure at all n locations
ctatgnaaagccgcantgannccaccncaanttcnccaaataacttgctcgccttttgcagtccgaatccgaaccgtgaaaccgtggcctatcggatcctttaagaccttcgggaatttgaacctagaggtgttagaaaaagttaccacaggggataactggcttgtggcagccaagcgttcatagcgacgttgctttttggatccttcgatggcgggctcttcctatcattgtgaagcaagaattcaccaagtgttggattgttcacccaccaacataaaagccttcaacctgcaagcccacttccacttaatcccatagaaaacatgatggaagttacccccatctcaaaagtgacaccgaaccatcaagttgatgaattttcatcacccaatctcgtagctcatctcagctccactccattcatcactctcagaagacattagtcgctatgtcttgttttctctattcttcttttgtctgtccaaaggtagcttttgaaagatgtagcagcctttgtctatttctctgtgttgagaaaaaaaaaactcttatgtacgaccnacgcggccggcggaattcggatgatgcaagcttnatgcnatgaccgtcgtaccttcgtngg

SEQ ID NO: 117901 - DNA, 1036 bp, Arabidopsis thaliana
  unsure (1)..(1036): unsure at all n locations
gacgacagatggtggcctctgacatctggcgttcgattacagctccacagaggattcggaaatggttgagtcaaaggttgtagttccagagtcggtgttgaagaagaggaagagagaggaggaatgggctttggagaagaagcagaatgttgaagccgccaagaagaagaacgccgagaacaggaagcttatcttcaaaagagccgagcaatactccaaggaatatgccgagaaggagaaggagttgatctcgttgaaacgcgaggccaagcttaagggaggtttctatgttgaccctgaagctaagctcttgttcatcatccgtatccgtggtatcaatgccattgaccctaagactaagaagattctccagctcttgcgtttgagacagattttcaatggtgttttccttaaagtcaacaaggctacgatgaacatgcttcgccgtgttgagccctatgtcacttacggattccctaacttgaagagtgtcaaggaattgatctacaagagaggttacggaaagcttaaccaccagaggatagctttgactgacaactctattgtagagcaggctcttggaaagcatggtatcatttgcactgaggatttgatccacgagattctaacagtaggacctcatttcaaggaagccaacaacttcctttggccattccagcttaaggcaccactaggtggcctcaagaagaagagaaatcactacgtggaaggtggtgatgccggaaaccgtgagaacttcatcaatgagcttatcaggaggatgaattagaatgttatcgttttcaatgtcaaacttctctgcgttttcattatgtgcctcctcctggattttgatcttctttctcaagttaaaagacattttgaatcttctcttttgttctctttggatcttaatttgtgctttgattactgcaagtgattctacatttctctttaataggatttttaagaaactgtttcttcaaaatctctttacctggacaatttcaaaatggttgcctacattntnttgacg

SEQ ID NO: 117902 - DNA, 1141 bp, Arabidopsis thaliana
  unsure (1)..(1141): unsure at all n locations
nnnnnnnnnnnnnnnnnnnnnnnnnnnnnnnnnnnnnnnnnnnnnnnnnnnnnnnnnnnnnnnnnnnnnnnnccacgggggcgggccgcgtacncccacncgtncgtacgggtgcgagaagacgacagaaggatacggctgcgagaagacgacagaaggggattgttgcgtgtttggttatctcttctttcttctctctcacctaaatcaagggatttgttctgatcaactttgaacagaatttacaacaaatccctagaaaaatctgacccttccttcttcctcaggaagatttaagatacttgttgataaggatattcggaagaagcttttgaaatttttggcaaaggtctcatttgatccgacttttctgttgaaggtgaaatagatacaaaaaaaatgggctcagaggaaaacaacagcacaagctttccaccaacagagccaaagctctgtgataacggatgtggattcttcgggtcaccatccaacatgaatctctgctcgaaatgttacagaagcttaagagccgaggaagatcaaaccgcggtagcgaaagctgcggtgaagaactctttaaagcttccatcttgcagtatcattgcacctggacaaaaacatcctctggaaattaaaccagctcatttggaaaccgttgttgtaaccgctgagccgtcttctgtacctgtagccccggaacaggacgaggctgagccgtcgagacctgttagaccgaacaacaggtgtttcagctgtaacaagaaggttggtgtaatggggtttaagtgcaaatgcggtagcacgttttgcgggagtcataggtacccggagaagcatgagtgtagcttcgatttcaaagaagttggacgtgatgcaattgcaaaggctaatcctttggttaaggcggataaagttcagaggatttgaagaaaacaaactttgttatttttaagtattttcgttgtcttctgcatttgatcagtttctgcctgggatgttcgatgtttggtttccatgaatcaaaatgaaaattgctgttcttgctnnnnnnnnnnnnnnnnnnnnnnnnnnnnnnnnnnnnnnnnnnnnnnnnnnnnnnnnnnnnnnnnnnnnnnnnnnnnnnnnnnnnnnnnnnnnnnnn

SEQ ID NO: 117903 - DNA, 1249 bp, Arabidopsis thaliana
  unsure (1)..(1249): unsure at all n locations
gcgaattcgtaggttcaattcctactggattcacgccaatcggaccctccaataagtctattggaattggctctgtatcaatggaatcttctcatcatctatacataacgaattggtgtggtatattcatatcataacattggcccagtaagaactagcattcttattgagactagaactcatagggaagaaaatcgatttatggatggaatcaaatatgcagtatttacagacaaaagtattcggttattggggaaaaatcaatatacttttaatgtcgaatcaggattaactaggacagaaataaagcattgggtcgaactcttctttggtgtcaaggtaatagctatgaatagtcatcgactccccggaaaggttaaaagaatgggacctattctgggacatacaatgcattacagacgtatgatcattacgcttcaaccgggttattctattccacctcttagaaagaaaagaacttaaatcaaaatacttaatagcatggcgatacatttatacaaaacttctaccccgagcacacgcaatggagccgtagacagtcaagtgaaatccaatccacgaaataatttgatctgtgggcagcatcattgtggtaaaggtcgtaatgccagaggaataattaccgcaaggcatagagggggaggtcataagcgtctataccgtaaaatagattttcgacgaaatgcaaaagacatatatggtagaatcgtaaccatagaatacgaccctaatcgaaatgcatacatttgtctcatacactatggggatggtgagaagagatatattttacatcccagaggggctataattggagataccattgtttctggtacagaagttcctataaaaatgggaaatgccctacctttgaccgatatgcggttaggcactgatttacgtaattggaagtaaccaattaggtttacgacgaaacctagaaatcgatcactgatccaatttgagtacctctacaggatagacctcaacagaaaactgaagagtgtaacggcagcaagtgattgagttcagtaggtcctcatataaaattattgactctagagatatagtaatatggagaagacaaaattgtttcaagcaccgacagaaccataagcgccccttgtttcaaagagaggaggacgggttattcacatttcatttgatggtcagaggcgaattgaaagctaagcagtggtaattctaaagattcccccggngaaaaatagag

SEQ ID NO: 117904 - DNA, 1227 bp, Arabidopsis thaliana
  unsure (1)..(1227): unsure at all n locations
taaacattngncccccngggttaaagnttcnccccccaaaggaccttatttcggaccccntgggggtncccccaccaccttantttttnnagggttcaatttgnnattcctntnggccccaaagttgntnnctttccttgccccgcgtcccgccagaggaaactctggtggaagcccgcagcgatactgacgtgcaaatcgttcgtctgacttgggtataggggcgaaagactaatcgaaccatctagtagctggttccctccgaagtttccctcaggatagctggagctcggacgcgagttctatcgggtaaagccaatgattagaggcattgggggcgcaacgccctcgacctattctcaaactttaaataggtaggacgtgtcggctgctttgttgagccgtcacacggaatcgagagctccaagtgggccatttttggtaagcagaactggcgatgcgggatgaaccggaagccgggttacggtgcccaactgcgcgctaacctagaacccacaaagggtgttggtcgattaagacagcaggacggtggtcatggaagtcgaaatccgctaaggagtgtgtaacaactcacctgccgaatcaactagccccgaaaatggatggcgcttaagcgcgcgacctatacccggccgtcggggcaagagccaggcctcgatgagtaggagggcgcggcggtcgctgcaaaacctagggcgcgagccccggcgganggccgtcggtgcagatcttggtggtagtagcaaatattcaaatgagaactttgaaggccgaagaggggaaaggttccatgtgaacggcacttgcacatgggttagtcgatcctaagagtcgggggaaacccgtctgatagcgcttaagcngaacttcgaaaggggatccggttaaaattccggaaccgggacgtggcggttgacggcaacgttagggagtccgagacgtcggcgggggcctcgggaagagttatcttttctgtttaacagcctgcccaccctggaaacggctcagccggaggtagggtccaccggctggaagagcaccgcacgtcgcgtggtgtccggtgcgcccccggggcccttgaaaatccggaggaccgagtgcngctnacgcccggntttttttacaagagactcgtaaagatanggaaattaatgttnagagaagtaangacttnaggtacaatttnangggancccgttnctntaa

SEQ ID NO: 117905 - DNA, 915 bp, Arabidopsis thaliana
  unsure (1)..(915): unsure at all n locations
gcgcgctgacatgtgtgcgagtcaacgggtgagtaaacccgtaaggcgcaaggaagctgattggcgggatccctcgcgggtgcaccgccgaccgaccttgatcttctgagaagggttcgagtgtaagcatgcctgtcgggacccgaaagatggtgaactatgcctgagcggggtaaagccagaggaaactctggtggaagcccgcagcgatacttgacgtgcaaatcgttcgtctgacttgggtataggggcgaaagactaatcgaaccatctagtagctggttccctccgaagtttccctcaggatagctggagctcggacgcgagttctatcgggtaaagccaattattagaggcatttggggggcgcaacgccctcgacctattctcaaactttaaataggtaggacgtttcggctgctttgtttgagccgtcacacggaattcgagagctccaagtgggcccattttttgtaagaagaactggcgtggccggatgaaccggaagccgggttacggtgcccaactncgcgctaacctagaacccacaaagggtgttggtcgattaagacagcaggacggtggtcatggaagtcgaaatccgctaaggagtgtntaacaactcacctgccgaatcaactagccccgaaaatggatggcgcttaagcncgcgacctatacccggccgtcggggcaagagccaggctagttctagatccggagcggccgttttagaggatcccaagcttacgtacggggttcattcaanggcatagctcttcttttagtgtcancntaaattcaattcaattgggcgtcggttttnaaacgtcgggactttgggnaaacctnggggttacccaactttaatcgnctttaannaaatncccttttncnaantggggtaanttccna

SEQ ID NO: 117906 - DNA, 652 bp, Arabidopsis thaliana
  unsure (1)..(652): unsure at all n locations
tntttaancagtttanncttntcagnnccaatgttaaaaaaccnccaaatnaaccattgttgaccnaatncgaaaatttnnaaattgggattgaaaattcaccctagtacgaggggaacccgttaatcgcaaaattggncancgcgcttggttgaaaanccagtgnccnnaagctaccgtgcgctggattatgactgaacgcctctaagtcagaatccgggctagaagcgacgcatgcgcccgccgcccgattgccgaccctcagtaggagcttaggctcccaaaggcacgtgtcgttggctaagtccgttcggcggaagcgtcgttcggaccgccttgaattataattaccaccgagcggcggggagtttcctgtgcagacgacttaaatacgcgacggggtattgtaagtggcagagtggccttgctgccacgatccactgagattcagccctttgtcgctaagattcgaccctcccctaaatcactccaaaaaaaacaatccccaattctacacaagtgtttctacactaacaaagcaacagctccttaacgaattcccaactttacacgagctcgtctctcgaggttaaatgttattacttggtaagattccggacctcgccaagtgttttgaaaacccgcaacgctc

SEQ ID NO: 117907 - DNA, 804 bp, Arabidopsis thaliana
  unsure (1)..(804): unsure at all n locations
nnnnnnnnnnnnnnnnnnnnnnnnnnnnnnnnnnnnnnnnnnnnnnnnnnnnnnnnnnnnnnnnnnnnnnnnnnnnnnnnnnnccacgcgtccgagaagacgacagaaggggccaggcctcgatgagtaaggaggccccggcggcccctgcaaaaacctagggcgccagccccggccggaccggccgtccggtgcagattcttgggggtagtagcaaatattcaaatattcaaaactctcagacatactcaggtgatggattctgtgatagtagggaatggagattttctgcccatcactcatattggtactatccctctgaacatttctcaaggacaaacgaacacaacaactcctcacacaaggaaacaagcataaaggtctctacgtgttgaaggatgtcccgtttcaaacttattactctaccaggcaacaatctagtgatgatgaagtgtggcatcagagattgggtcaccctaataaagaagttctacaacaccttatcaaaactaaagctattgtagtcaataaaacaagctccaatatgtgtgaggcttgtcaaatggggaaagtatgtcgtcttccttttgttgcttctgaatttgtatcttctcggcccctagaacgtattcattgtgatctatggggccctgcccctgttacttctgctcaaggttttcaatattatgtcatctttatcgatnnnnnnnnnnnnnnnnnnnnnnnnnnnnnnnnnnnnnnnnnnnnnnnnnnnnnnnnnnnnnnnnnnnnnnnnnnnnnnnnnnnnnnnnnnnnnnnnnnnnn

SEQ ID NO: 117908 - DNA, 708 bp, Arabidopsis thaliana
  unsure (1)..(708): unsure at all n locations
ctactggttctacttgttcctctgttttggattgtggtggctctctaatggcggcggttattggaaacgtggcgttgttacttgacgttaacnctcaccgtacggnggtaactgatcggagaattcgtttaacggtggtcgaccctcgcgtccggggcgcacggtcgctgcaaaacctagggcgcgagccgcggcggagcggccgtcggtgcagatcttggtggtagnagcaaatattcaaatgagaactttgaaggccgaagaggggaaaggttccatgtgaacggcacttgcacatgggttagtcgatcctaagagtcgggggaaacccgtctgatagcgcttaagcgcgataacttcgaaagggggatccggttaaaattcccggaacccgggaccgtggcggttgaccggcaacgttagggagtcccggagaacgtcggccgggggcctcgggaagagttatcttttctggtttaacaagcctgcccaccctcggaaacgggctcacccggacggtaagggtccacccggcttgaagagcccccgcaccgtcccgtggtgcccggtgcncccccgggggccttttaaaacccggagnaccnattncggttaagccggttgaattataaccgataaggttccaagggaaaacccttgtcatngaaaattttgaaggaattcnaaatggtccgnaanttggaaaag

SEQ ID NO: 117909 - DNA, 1018 bp, Arabidopsis thaliana
  unsure (1)..(1018): unsure at all n locations
gcaaaagacatatatggtagaatcgtaaccatagaatacgaccctaatcgaaatgcatacatttgtctcatacactatggggatggtgagaagagatatattttacatcccagagggcctataattggagataccattgtttctggtacagaagttcctataaaaatgggaaatgccctacctttgaccgatatgcccttaggcacggccatacataatatagaaatcacacttggaaggggtggacaattagctagagcagcgggtgctgtagcgaaactgattgcaaaagaggggaaatcggccacattaaaattaccttctggagaggtccgtttgatatccaaaaactgctcagcaacagtcggacaagtgggaaatgttggggtaaaccagaaaagtttgggtagtgccggatcgaaatgttcggctaggtaaacgctcctgtagtaagaggagtagttatgaaccctgtcgaccatccccatggaggtggtgaagggagggctccaattggtagaaaaaaacccgtaaccccctggggttatcctgcacttggaagaagaactagaaaaaggaaaaaatatagtgagactttgattcttcgtcgccgtagtaaataggagagaaaatcgaatttctttcttcgtcttaaaaaaataggagttaattaactgtgacacgttcactaaaaaaaaacccttttgtagcaaagcatttattaagaaaaatagagaagcttaatacaaaggcggaaaaagaaatcataataacttggtcccgggcatcatgggcgaacgacgggaattgaacccgcgatggtgaattcacaatccactgccttaatccacttggctacatccgcccctacgctactatctattcttttttgtattgtctaaaaaaaaaaaaaaatacaaatttcaataaaaaaaaaaaaaaagnnnnnnnnnnnnnnnnnnnnnnnnnnnnnnnnnnnnnnnnnnnnnnnnnnnnnnnnnnnnnnnnnntgtaccta

SEQ ID NO: 117910 - DNA, 514 bp, Arabidopsis thaliana
  unsure (1)..(514): unsure at all n locations
aaagggcgcgccggtcttttcaaaacttagggcccgaacccggccggaccggccgtcggtgcagatcttggtggtagtagcaaatattcaaatgagaactttgaaggccgaagaggggaaaggttccatgtgaacggcacttgcacatgggttagtcgatcctaagagtcgggggaaacccgtctgatagcgcttaagcatgagtgtagcttcgatttcaaagaagttggacgtgatgcaattgcaaaggctaatcctttggttaaggcgcccaaagttcagaggatttgaagaaaacaaactttgttatttttaagtattttcgttgtcttctgcatttgatcagtttctgcctgggatgttcgatgtttggtttccatgaatcaaaatgaaaattgctgttcttgcttaaaaaaaaaaaaaaaaaaaaaacaaaaaannnnnnnnnnnnnnnnnnnnnnnnnnnnnnnnnnnnnnnnnnnnnnnnnnnnnnnnnnnnnnnnnngtacctann

SEQ ID NO: 117911 - DNA, 416 bp, Arabidopsis thaliana
tcgacccagccgtccacactttcacctttctctctctaaacatggcgatgctttctactgcttccgtttcggggagcgtcgaccttcctcgaggaaccatgaaggttgactcgtctgcgtctccggaggtcgtatccgatctcccaccatcttccccaaagggctcacctgatcgccatgacccttccacttcttctccgagccccagtcgtggtggtgacaatcagtctgaagtcatatccaagagtgaagagtatcggcaattgtttcggcttccagctgacgaaatccttgttcaagattttaactgtgcttgtcaggagagtattcttatgcagggtcatatgtacctcttcatccattatatctgcttttactccaacatctttggttatgagaccaagaaaattatccca

SEQ ID NO: 117912 - DNA, 386 bp, Arabidopsis thaliana
tttcaaaattagaagaactatggctcggaagaaaccgtatcaaagttgttaacctgtgtgggctcaaatgcataaaaaagattagcttgcagagcaatcgattgacctctatgaaaggatttgaggaatgtgttgctcttgaagagttatatttgagccataatggtatctccaaaatggaaggcttgagtgcattggtcaacctacgggtattggacgtgtcgaacaacaagcttacttcagttgatgacattcagaacctcacaaagttggaagatttgtggcttaatgacaaccagatagaatcactggaagcaatcacagaagctgttacaggatctaaagagaagcttaccactatctacctcgaaaataacccttgtgcc

SEQ ID NO: 117913 - DNA, 394 bp, Arabidopsis thaliana
gaggaaccatgaaggttgacccgtctgcgtctccggaggtcgtatccgatctcccaccatcttccccaaagggctcacctgatcgccatgacccttccacttcttctccgagccccagtcgtggtggtgacaatcggtctgaagtcatatccaagagtatctgaatgtgacgaggaggggaaggtggaaatggtgggcgaaggggtagttaaaaaaagcttaaaggaagcatgggtgaatctgacttcatttgtgaagaggcaaagcgggacaaggcacgttatagtattagcgtttgcagtaatcttactgatgcaggtgacgatagtggtgccactgaaaaaaggaggaagggggcaagtggagtatcatgagaggtacgacgagtacagtg

SEQ ID NO: 117914 - DNA, 742 bp, Arabidopsis thaliana
  unsure (1)..(742): unsure at all n locations
aaaaanggggggggggaggggggggagggaanaaaaatcctttctaaatttattttttaaggttgactcgtctgcggggctgttgtcgtatccgatctcccaccatcttccccaaagggctcacctgatcgccatgacccttccactatttcttcgagccccagtcgtggtggtgacaatcagtctgaagtcatattcaagagtgaagagtatcggcaattgtttcggctttcagctgacgaaatccttgttcaagattttaactgtgcttgtcaggagagtattcttatgcagggtcatatgtacctcttgatgcattatatctgcttttactccaacatctgtggttatgagaccaagaaaattatcccatttgctgaaatatcttgtgttaaacgagccaagactgctggtatttttcctaatgccattgagattttagctggagggaagaagtacttttttgcatcgtttctttcccgcgatgaagctttcaagcttatccatgatggatggttggaatatggtagtgctgtcaaatcagaaggcgagattctggtgaccgaaccgcaggtaagcgatggagttgttaaaagggcacgcagttccatggatttggccaatgaactagatattccagtaagggatgaaactcttcatctttccagcagttccagtcttcctgtcattagtcagaatggcgttccaccttcatccgttcagcggcacgctgaaccagatg

SEQ ID NO: 117915 - DNA, 1743 bp, Arabidopsis thaliana
acaaaattcctctttttttttatttaattaaaattgcatcaaaatgtttgttttcttgagccgaattattctattaagcgcattaaaaaagaaaaaaaaaaaagaaataggagctaatgtaatttagagaaactctatcaaagacttataataaccaaaacgaagacctattgtgaccaaatacaaagggtggggcagatcgtttctttgaatactatgatgtcttttagtttatgagttgctttatttctgatacttctcctccccattctcttatcctatcctcagccattgaagcctctgtgtcccaatttgttttgcagatcatccatgttaaaactattgtctgaaccacggtccccgtcaacattccacaccagattcccattacaccatagttaagcttgtaccccaataatagaccaaatgggattccaaacacgtaatagcaggcgatgttaacgtaggccaccactgcttgccatccagctcccacagccacacctgataagacaggttggacattgttgatgacaatggaaagtgcaagtattggtgtgagttctttaacaagaatgatgactttttcgtctttcacaaaaagtgatggatattgatctctaaagatgagtagaatcattgatacaatgaatccgattagcgtcgatgttatcactgccacaagtagtgagaatttcgcggttcttggatggttagctcctaattcattagacactctcacacttacggctgtgttcatcccaatagcaatcatagcagtccatcccaaaatattcatgcagatggagagggcagctacagagatttcagcattcttcaaatatccagcaaataatatgattgccataaaataccaaacctccaaacagagcataacagcagaagccaaagataatctaacgaaactccacaaattatgaaaagcctcccacgagaaaccagaccaagcctcaccacacgtaccactaaatatgtacacaagctgagccatgtcaatgaagcaccacgacgcgttaagcactacggctagacctggcataccccactggagcttcacaatgacaaaccacgtgagaggcacgtgtataacaagtgcaacagccgatatcacggccatgaccattatcttgctttgcgattgcaaaaatttagcggttggaaaattgatggcgtaggcaaagatttgagggatcatgtagatggaaaatattccggccgcgctagagattgccgccgtttgaccaatggacgcgaggataggggcggcgaaaatgtaaaggagagagaggataagagcagtcacgtttagtatcacccatgatcgttgcaagtaaacgccaagcattgacaattttcctgctccaaacgcttgtccacatagcgtttctaacgcacttcccattccaagcatgatgccgaatgagaagccggcaacgacggagttttcgacggagacagcggcaagagcgatggtgctgatgtgaccggcgaagacctgagtaatagcgccgagagaatattggttcacggatgtgaaaatggcgggaccggccaagtaccatagctttttggtttccacgttgaattccctaacgaagccaccgacggtggtgatcggaggaatatcgtcgacggataagaaaggaagatcagaacgttcttccgccgcagtgagaagcgtctccgttatatctttgtcttttgccatcttaagagaaagag

SEQ ID NO: 117916 - DNA, 609 bp, Arabidopsis thaliana
  unsure (1)..(609): unsure at all n locations
gaactggaacccnaatttaactncattgancaagcaacttccgatgcccctaantttncaaactccccccnnaatgaccnccacgagccgttaacacgacgggcancccgccgtgcccactgganccctaaatgcaacccccgtgaggaccacgtgtggaacaagtgcaaccgctgataatcgcagccatcaccatgattttgctttgtgattgcaagaacttagccgttgggtaattaacaccgtaagcaaagatctgagggatcatgtagatggaaaatattcccgtggcgctagagatcgccggcgtttgaccgatgaacgcgaggattggagcggcgaagatgtaaagaagcgagagaataaccgcggtcacggttagtatcacccatgatcggtgcaagtaaacgcccagcattgaccatttccctgctcccaacgcttgtccacatagcggttcttacgcgcctcccattcccagcatgacccccaatgaggatccagccatggccgagttttccacggagacccctgccagagcgatggtgctgatgtggccggcggagaacttagtaacaacccccaacggaacgcttgggtcagcccgga

SEQ ID NO: 117917 - DNA, 760 bp, Arabidopsis thaliana
actatagaagagctatgacgtcgcatgcacgcgtacgtaaagcttggatcctctagagcgcgcgcccttttgtttttttgttagaagaaactctatcaaagacttataataaccaaaacgaagacctattgtgaccaaatacaaagggtggggcagatcgtttctttgaatactatgatgtcttttagtttatgagttgctttatttctgatacttctcctcccaattcttttatcctatcctcagccattgaagcctctgtgtcccaatttgttttgcaaatcatccatgttaaaactattgtctgaaccaaggtccccgtcaacattccacaccagattcccattacaccatagttaagcttgtaccccaataatagaccaaatgggattccaaacacgtaatagcaggcgatgttaacgtaggccaccactgcttgccatccagctcccacagccacacctgataagacaggttggacattgttgatgacaatggaaagtgcaagtattggtgtgagttctttaacaagaatgatgacttttcgtctttctagaatcattgatacaatgaatccgattagcgtcgatgttatcactgccacaagtagtgagaatttcgcggttcttggatggttagctcctaattcattagacactctctcacacttacggctgtgttcatcccaatagcaatcatagcagtccatcccaaaatattcatgcagatggagagggcagctacagagatttcagcattc

SEQ ID NO: 117918 - DNA, 1760 bp, Arabidopsis thaliana
  unsure (1)..(1760): unsure at all n locations
gggaaagcaacgtacgcctgcaggtaccggtccggaattcccgggtcgacccacgcgtccgaatttggtgatttatcgttaatccatggcggctccgtcgccgtcttcaccaccaaacctcctctctcctccaccattccgatctcccgaagcttcttactttctccgaacttgttcaaatttctctcaattgaaacaaattcacaccaaaatcatcaaacacaatctcaccaacgatcagttactagttcgtcagctcataagtgtttcttcttccttcggagaaacccaatacgcttctctcgtctttaatcaacttcaatctccttctacttttacctggaaccttatgataagatctctctctgttaatcacaaacctcgtgaagctcttcttctctttatccttatgatgatctctcatcaatcccagtttgataaattcactttcccttttgttatcaaagcttgtctcgcttcttcgtcgattcgtttaggtacccaagttcatggtttagctattaaagctgggttttttaatgatgtcttcttccaaaacactctcatggatctttactttaagtgtgggaaaccagatagtggacgtaaggtgtttgataaaatgcctgggagaagtattgtttcatggactactatgctttatggtcttgtctccaattctcagttagattctgcagagattgtattcaatcaaatgccaatgagaaacgttgtttcatggactgcaatgattacggcttacgttaagaaccgtagacccgacgaggcgtttcagctctttaggagaatgcaggttgatgatgtcaagcctaatgagtttacgattgttaatttgttgcaagcttctactcagttaggaagcttgtccttgggaagatgggttcatgactatgctcataaaaacggttttgtgcttgattgtttccttggaaccgctttgatcgatatgtatagcaaatgtggaagcttgcaggacgcaaggaaagtatttgacgtgatgcagggtaagagtttagcgacttggaactcgatgatcactagcttaggggtacatggatgtggtgaagaggctttgtctctgtttgaagagatggaagaagaagcaagcgtagaaccagacgctatcactttcgttggtgtcttatccgcttgtgcgaatactggaaatgtaaaggatggtttgaggtactttactcggatgatccaagtttacggtattctcacctattcgagaacataatgcttgtatgatccaattgttggagcaagcccttgaggtggagaaagcttcaaacttggttgaatccatggattctgatccagacttcaattcttcatttggtaatgaatacacggatggaatgaatgaaacgaacgaaactccgagccaacatcaaattatgttcaccaagtgggatacaggccgattttgaaggttcagtgtctcttgacatatatattttcgtctattaaacagattcattgatcatctttgtaactatacaagaaaagctccttcaaaagtagtgtaatgtcatgtacttgtaaaaggaatgggagcttaagcagggaaaatagtaaattcgatttgtaatagtgtcatgtattttgtaaacagattcatttatctttttacattatgattctcaaaaaaaaaaaaaaagnnnnnnnnnnnnnnnnnnnnnnnnnnnnnnnnnnnnnnnnnnnnnnnnnnnnnnnnnnnnnnnnnntgtacctaa

SEQ ID NO: 117919 - DNA, 1156 bp, Arabidopsis thaliana
ggtttatgctacattgaagcaaagatggttacgagcagcgatcaaatccaaaatggttctgaagagcaatcaaaaagatcagagatttacacatacgaagcaccatggcagatctacgcaatgaactggagcattcgtcgagacaagaagtatcggctcgcaatcacaagcctcatcgagcaatatccgaatcgcgtcgaaattgttcagcttgatgaatcaaatggtgagattcgttcagatccaaatctctgcttcgaacatccttacccaccaacgaaaaccagtttcatacccgataaagaatgtcaaagacccgatcttttagctacttctagtgatttccttcgtttatggcgaatctctgatgatgaatctcgtgttgagcttaagtcttgtcttagtagtgataagaatagtgagtttagtggtccaatcacttcatttgattggaatgaagctgagcctagacgaattggtacttctagtattgataccacttgtactatttgggatatagagcgtgaagttgttgatacccagcttattgctcatgataaagaggtttatgacattgcttggggtggtgttggtgtctttgcctctgtctcagaggatggttccgttagagtgtttgatctccgtgataaggagcattcgacgattatctacgagagtggtgagcctagtactcctttggtgcgacttagttggaacaagcaggatccgaggtatatggctactgttatcatgggcagtgctaaaattgttgtgttggatattcggtttccggctcttcctgtcgtggagcttcagcgacatcaggctagtgtcaatgctatagcttgggctcctcatagctcttcccatatctgctccgctggagatgattctcaggcgttgatttgggatatatcttccatgggacagcatgttgaaggtggtctggatccgattctagcttacacagccggcgctgaggttgagcagcttcagtggtcatcttctcagcctgattgggttgccattgccttctctaacaagctgcagattctccgggtctgattatgttttacagatttctgttggatacttggatgtaaaaactcgttgctattgttgattaatgatcttttgatctctgactctaagcctc

SEQ ID NO: 117920 - DNA, 1825 bp, Arabidopsis thaliana
agacactcaatggccaaaaagcaacctttggcgggcgggtcaaaattgactcttttgacctttcattttcattgaacctctatagacagaaaaggatggatttttctgatgaagacgacgacgaaaactgttttggttctcgtttcaacgacggtgtaaatgaagaagaagaagacgaagagggttttgtgtttaacgacgatgttgaagagaatgaagaagaagagggttttgcgtctgatttctataaggctggttctgattggtcttgtttagtggaagatgaagagactgtttcttcttctgtgaagaagatgaaacagtcgaacttgtttcagatttggggtttacaagagaattctcctgatacaacgaagaagatgaaacaaactgatttgtttcagagttggggtttacaaaagccttctcctttcacttcacctgcttcgaattcggcgaagaagacgacgagtgctcttggaaaaaggcgtagagactcttcgtttagcaatgactcgcctcgaccatgtccattttacaagaaacttccaggaacaccgttcactgtggatgcttttcgctatggttgtgttcaaggatgttctgcttatttccttactcattttcacgctgatcattacattggtctcactaaagcttggtctcatggtcctatttactgctcctctctcactagtcgtcttcttagacttagtctctctgttaatccctcgtctattcatccattggagctagacgttgagtacactattaatgggattaaagtcactttaattgaagctaatcattgccctggtgctgctcttattcactttcgtctcttagatggaacatgttatctgcataccggagatttcagggcttctaaacagatgcaaacgcatcctctcctctttaaccaacgagttcatgttctgtatttggatacaacatattgcaatccgagatacaaattcccttctaaagaagatgtgttaagttatgttgtgagaatcacaaaggatttcctcaggaagcaaccgaagactctgattgtggttggttcttacagcattggaaaagaatgtgtttatcttgctattgccaaagctcttggggttaagatatttgcaaatgcttcaagaagacgaatactgcaatcttttggttgggatgatatttcgaagaatctttctacagatgggaaagccacatgtcttcatgttctgcctatgtcgtcattgaaagttgaaagactcgatgaacacttgaagatttatagagaacagtatggagcagttttggcatttaggcccacaggttggacttactccgagaagataggtgaacaccttgatctgataaaaccaacttcaaggggaaaaatcaccatttatggggtgccatatagtgagcattcaagcttcacagagcttcgtgagtttgttcaattcttaaggcctgataagattattcctacggtgaacaatggaaatgctggaactcgcgagaaaatgcaatcatgtttcagagaatggctcagaccctgaggttcaactctaggttgatggatgatatattggtaagaaaatcaatggctttggccattctatttctaatattatttcctttttctgcagtttctgaatcccaatatgttgatcattgaagctttcaaaggatgtgtgatgcttctgtaagatcttggttattgcaattggtgaatacagtagattgaaatacttgaaggattcataatattctttgatctagatgttttattcttagttatttctcttatactaatctagtatatgtttctttt

SEQ ID NO: 117921 - DNA, 840 bp, Arabidopsis thaliana
  unsure (1)..(840): unsure at all n locations
atnnnnnnnnnnnnnnnnnnnnnnnnnnnnnnncactcctgcagtaccggtcctgaattcccgggtcgacccacgcgtccgctaaaatcactaaacctatcttcttaaccaaaagatcaatagattacaaaaatgcagggagctctgtttatcaaaccaactattcttcttcctcttccttcttcagtttcttctccaaaactcacttttcttcttcctcacgcaaccaaagcttcaagactctcatctctcagatcaaacaactcatcatcatcatcatccttaacgtctgaccctaacaccgtcgactataactcctccatcctttctgtttttccagctgaagcatgcgaagtaatcagtggatacgcttgttctgctgatatttaccctgaagtcaagctcgatacaaagcccgtctcacgtcccgtggcttcagagcccgttgacagagaatacgaagagtataacagccccaaaacggttttccgtgaagaggcctgcgatgatcttggaggagaattctgtgaacctgactttcaaaaagatgccaactagaagaaacaagattttatgtcatgtgaatatgtgtttgtatttctacaagtctttgtaaccactccttaatttatgatatctagcttcactacttaatcaagattgatggtatggattaaaaaaaaaaaaaaaaggcccgccggtctagaagaatcaaggttacgttcgcgtgcctggcacgtcataactcttttatttggggcaccctaaattcaaattcactgggcccggggttttacaaacctcgtggactggggaaaaaccccgggggttaccccaact

SEQ ID NO: 117922 - DNA, 883 bp, Arabidopsis thaliana
  unsure (1)..(883): unsure at all n locations
gctgggttcagctgctcgggacaaaatctgtcctgttcctacccatgttggtattgcaattcatcatgttctgaccagaaagtgactgttgttgttgcccggagcctcccattgctgtttgccatctgttgccaatatttgatgaatcatttgttgttccaatgtttggttaccgctactacaggaaggtggctgttggtggtattgctgggttgagccattattactggagcttggcatttgccgctgaggagatagattggagaacncgaccgtgggtcgacccacgcgtccgctaaacctatatcttcttaaccaaaagatcaatagattacaaaaatgcagggagctctgtttatcaaaccaactattcttcttcctcttccttcttcagtttcttctccaaaactcacttttcttcttcctcacgcaaccaaagcttcaagactctcatctctcagatcaaacaactcatcatcatcatcatccttaacgtctgaccctaacaccgtcgactataacncctccatcctttctgtttttccagctgaagcatgcgaagtaatcagtggatacgctttgtccctggctgatattttacccctgaaggtcaaagctcggttacaaaggcccgtttcacggtgcccgggggctttcagaggccccgttgacagaggaattacgggggggttttaacaggncccaaaacgggttttccgtgaagaggcctgcgatgatcttggaggngattctgtgaacctgnctttcaaaagntgccaactngaggacaaggttttntggcatgtgatatggggttgattntcaagcntttgnacncgcctaattttgggatctggttactntaaccaggttgggtttggtt

SEQ ID NO: 117923 - DNA, 943 bp, Arabidopsis thaliana
  unsure (1)..(943): unsure at all n locations
actnnnnnnnnnnnnnnnnnnnnncaaacactatataancngcatccacttatacacctnctntncattttngagaaccacgcgtccgaaacaaaccaaaacaccatggagcttaaaaatacaatctttctagtcatacttctatcaataaccattctccaatcttcatctgcaaccccaaaccggtcggaatcagaccagtttattgtgtcttcatgccaaaccacccaatatccatcactatgcgtgcacacactctctgcttacgccaccaagatccgccacaacaatgaccaagatctcgcccagactgctctcatcatcagcttggctcgagccaaatccgttactatcttcgtcgccaaactaaccaaagagacaccaaaatttaaacgtagggaatatctagcaatcaaagattgcatcgaagtgctaggcaatagcgtggaccggttagctcaatcggttaaggaacttgctcgagctggtcatgctgtggctagtgaggacttcatgtggaaaatgagtaacgttcaaacatgggtcagtgccgctttgacggacgagacaacgtgtctagatggattctcagaacgagccatgggaggcaaagtcaaaagactgattcggtataaggtggttcacgtggctcaagtcactagcaatgctcttgctttggttaatcagtttgcagagaagcgaagtgtgaagtttccttaaatggacttaaatgtgaaaattttggcttgtaagtgagagtttgaatctaaacttcaattagttgtgtaaattgttatctttttttttcgtcggtcggaaagtaaactcaagattgtgtaacaatctttgttgtgtcctgtataatattgtattttaagataatgatatatagtcaccttttttgggcgcgaattcgatatcaagcttatcgatacaatcgacc

SEQ ID NO: 117924 - DNA, 627 bp, Arabidopsis thaliana
aaaaattaaataaaatattttttttaatatatgaaacatatgttgtgtattgtactattcatattcatttatcacattacaatcatcaaccaaaccaaaaacacaaacataacaacaagggacaagaagaacaaacattgatccatacctaaagtttcataattcgaacatcaaaaacatattttttaattatcataagtacgacactcatcagtctcaggattatcattgcaatactcttccaaaggatcggagccaccagctttcttcttgtccctagcatgactcgccgccgcactcagctcctccacctcgtcccaagccgctacacactccccgctcaccggatcatcagcgcatgtctccttagcttcttgtatactcttctccaccttctccgatatctctccttccgatgtagccttaaccacaaccatccgcttcatcgaaccgaatttccacgggtaattcaaccggaccggacctaatacacgagccacaggtcgaacgaccactcgtggagtcgcgacgttgaggccagctgcagctatggttgtcatcgtcggaggattttgatggaggagaaaagttttttggtgtgacctgatagctcactgagtgagctcg

SEQ ID NO: 117925 - DNA, 772 bp, Arabidopsis thaliana
  unsure (1)..(772): unsure at all n locations
gccagctctaattcgactcactatagggaaagctggcacgcctgcaggtacctggtccgcaattcacgggtcgagccacgcgttcgcccacgcgtccgcccacgcgttcgcccacgcgttcgcccacgcgtacgtacggctgcgagaagactacagatgggggaaccaaaaaatatctaaaatcactaaacctatcttcttaccaaaagatcaatagatttccggggtgcagggagctctgtttatcaaaccaactattctccttcctcttccttcttcagtttcttctccaaaactcacttttcttcttcctcacgcaaccaaagcttcaagactctcatctctcagatcaaacaactcatcatcatcatcatccttaacgtctgaccctaacaccggcgactataactcctaccatcctttctgtttttccagctgaagcatgcgaagtaatccaggggatacgcttgttctggctgatatttaccctgaagtcaagctcgatacaaagggccggtctcacggggcccgtggcttcagaggccccgttgacaggaggattacggaggggtgtttaataacaggcgccccaaaacgggttttccgtgaagagggcctgcagtgtgatttttgggggggattttttgaacccgncttttaaaagggtgccccttgggggnacaagtttttttggcaaggganatnggttnnatttcnaaggtttnaaccccccnnattttgnattngggcccnnntnaaaaaaaagggggtc

SEQ ID NO: 117926 - DNA, 895 bp, Arabidopsis thaliana
  unsure (1)..(895): unsure at all n locations
ggantcantcggnttncnccgggnttttagacttttctttcccgggaccncntgggttcgccccaacggngnnccggcttcgggtatcctccctccctcgaaaggaggaatgcttgggaattagaggccctttgggaatactcgcgggaaccaccttggtcaccctttctctcaaggtcaacgccanggaaccttncaacgccgagcctccccgctcggcnttngtctcatcttatgtcactcccgtcgacccacgcgtccgccaaaagatcaatagattacaaaaatgcagggagctctgtttatcaaaccaactattcttcttcctcttccttcttcagtttcttctccaaaactcacttttcttcttcctcacgcaaccaaagcttcaagactctcatctctcagatcaaacaactcatcatcatcatcatccttaacgtctgaccctaacaccgtcgactataacncctccatcctttctgtttttccagctgaagcatgcgaagtaatcagtggatacgcttgttctgctgatatttaccctgaagtcaagctcgatacaaagcccgtctcacgtcccgtggcttcagagcccggttgacaggngaatacggaggagtataacaggccccaaaancggttttncgtgaagggggtccgtgcagaggcctgcaatgatcttggagggaagaatttttgtgaacctgccctttcaaaaaaatgcccactttggaggaacaagggttttatgtcatgggaaaatgggtttgtatttctacaagtctttgtaacccccccttaatttatgatatcaagcttccctccttaatcaagattgatgttatggattagacccgagttcccaaagttaaaaccccctctgttccaagtt

SEQ ID NO: 117927 - DNA, 678 bp, Arabidopsis thaliana
  unsure (1)..(678): unsure at all n locations
ccnnnnnnnnnnnnnnnnnnnnnnnnnnnnnnnnnnnnnnnnnnnnnnnnnnnnnnnnnnnnnnnnnnnngacccacgcgtccgcggacgcgtgggctcgaaagaagaatgcctggaattagaggtccttcggaatactcgcaggaaccacctcgtcacccttctctcaaggtcaacgccaaggaacctttcaacgccgagcctccccgctcggccttagtctcatcttatgtcactcccgtcgaccttttctacaagcgaaatcatggtcccatccccattgttgatcaccttcaaagctactccgtcacccttactggattgatccagaacccgagaaagctctttatcaaagacatcaggtccctcccaaagtacaatgttactgctactcttcagtgtgccggtaacagaaggactgccatgagcaaagttaggaatgttagaggtgttggatgggatgtttctgcctattgggcaacgctgtctggggtggggcgaaactggccgatgttcttaagctttttggggggtcccaagaggttttctgcttnttcccaatttagggggccaggaaatnttnaggttggttaagngttnatnccctnttaggngggaaattgggggccctntaaaggggnaaattnctttaaggtaagnncaaantctttnaggggg

SEQ ID NO: 117928 - DNA, 512 bp, Arabidopsis thaliana
  unsure (1)..(512): unsure at all n locations
aaacctatcttcttaaccaaaagatcaatagattacaaaaatgcagggagctctgtttatcaaaccaactattcttcttcctcttccttcttcagtttcttctccaaaactcacttttcttcttcctcacgcaaccaaagcttcaagactctcatctctcagatcaaacaactcatcatcatcatcatccttaacgtctgaccctaacaccgtcgactataactcctccatcctttctgtttttccagctgaagcatgcgaagtaatcagtggatacgcttgtnctgctgatatttaccctgaagtcaaagctcgatacaaaggcccgtcttaacgtcccgtgggctttcagaggcccggttgacaggggatacggggggggtnttaacaggccccaaaaacggggttttccggttaagngggccctccggtggtntttggggggggggggttttgttccancctggtttttaaaaaggggncncntttgggggnanaaaggntttttttng

SEQ ID NO: 117929 - DNA, 655 bp, Arabidopsis thaliana
  unsure (1)..(655): unsure at all n locations
caaaagntcaatagattacaaaaatgcagggagctctgtttatcaaaccaactattcttcttcctcttccttcttcagtttcttctccaaaactcacttttcttcttcctcacgnaaccaaagcttcaagactctcatctctcagatcaaacaactcatcatcatcatcatccttaacgtctgaccctaacaccgtcgnctataactcctccatcctttctgttttcccggctgaagcctcccgaagtaatcccggggatacgcttgttctgctgatatttaccctgaagtcaagctcgatacaaagcccgtctcacgtcccgtggctttcagagcccgttgacagaggaatacgaagggtataacagccccaaaacgtaagtgtttttcacattttttaaaaccctttccttagcttgatttttcatctctgagttttgtgatttttggacttggaaacagggttttccgtgaagaggcctgcgatgatcttggaggagaattctgtgaacctgactttcaaaaagatgccaactagaagaaacaagattttatgtcatgtgaatatgtgtttgtatttctacaagtctttgtaaccactccttaatttatgatatctagcttcactacttaatcaagattgatgttatggttt

SEQ ID NO: 117930 - DNA, 739 bp, Arabidopsis thaliana
  unsure (1)..(739): unsure at all n locations
cctggnctggaattcctgggtcgacccacanagtccgnntccgtcgaaagaagaatgcctggaattagaggtccttcggaatacncgcaggaaccacntcgtcacccttctctcaaggtcaacnccaaggaacctttcaacnccgagcctccccgctcggccttagtctcatcttatntcacnnccgtcgacccacgcgtccgaacaaaccaaaacaccatggagcttaaaaatacaatctttctagtcatacttctatcaataaccattctccaatcttcgtcttgcaaccgccaaaccgggtcggaatcagaccaagtttaattgtggtcttcatgccaaaccacccaatatccatcactatgcgtgcacacactctctgcttacgccaccaagatccgccacaacaatgaccaagatctcgcccagacngctctcatcatcagcttggctcgagccaaatccgttacnatcttcgtcgccaaacnaaccaaagagacaccaaaatttaaacgtagggaatatcnagcaatcaaagattgcatccgaagtgcnaggcaattagcgtggaccggttagctcaatccggttaagggaacttgctccgagcctggtcatggctgtgggctagtnganggacttcatggttggaaaantggngtaccggttccaaaccaatnggggcnngttggccgggtttttnccggggcggngncnaacngggggcctannnatnggg

SEQ ID NO: 117931 - DNA, 399 bp, Arabidopsis thaliana
atcaaaaacatattttttaattatcataagtacgacactcatcagtctcaggattatcattgcaatactcttcttgtccctagcatgactcgccgccgcactcagctcctccacctcgtcccaagccgctacacactccccgctcaccggatcatcagcgcatgtctccttagcttcttgtatactcttctccaccttctccgatatctctccttccgatgtagccttaaccacaaccatccgcttcatcgaaccgaatttccacgggtaattcaaccggaccggacctaatacacgagccacaggtcgaacgaccactcgtggagtcgcgacgttgaggccagctgcagctatggttgtcatcgtcggaggattttgatggaggagaaaagttttttg

SEQ ID NO: 117932 - DNA, 1309 bp, Arabidopsis thaliana
  unsure (1)..(1309): unsure at all n locations
ctctatgnnnnnnnnnnnnnnnnnnnnnnnnnnnnnnnnaaaaagccaccactctctctgcttctctgcaacacataacccactcacagaaaaaaacctagaaagctctagagagaaagagagagagagatggaaggtaaagaagaagatgttagagtcggagctaacaagtttccggagaggcaaccgatcggaacttcggctcagagtgacaaggactacaaagagccaccacctgcgccgttgttcgagcccggcgagctagcttcatggtccttctggagagctgggattgctgagtttatagctacgtttttgttcctgtacatcactgttttgactgttatgggtgtgaagaggtcaccgaacatgtgtgcttccgtcggaatccaaggtatcgcttgggctttcggtggtatgatcttcgctctcgtctactgcaccgctggtatctccggtggacacatcaacccagcggttacgttcggtttgttcttagctaggaagctttcgctcacacgagctgtgtactacatagtgatgcagtgcttaggagctatctgtggagctggtgtggtcaaggggttccagccaaagcaataccaggctttgggaggtggagccaacaccatagctcatggctacaccaaaggaagtggtcttggagctgagattattggaacctttgtccttgtttacaccgtcttctctgccactgatgccaagagaaacgctcgtgactctcatgttcctattctagcaccgctccctatcggattcgctgtgttcttggttcacttagcaaccatccccattactggaactggaatcaacccagcaagaagtcttggagctgcaatcatcttcaacaaggacaacgcttgggatgaccactgggtcttttgggttggaccattcattggtgctgcacttgctgctctctaccacgttatagtcatcagagccatcccattcaagtccagaagctaaagctgattgagttctatttaaaatctggcttttgttcttagtttgctttcttttgtgaatctactacctgtgtgtaacgtgtgtatctgttgtcctcttctttgcctaatggagacttatgtaaaacaaagacatgccccagaaacatctgttatctttcttctccattttatcagaggatttctataattggcccattctgggtttttctccnnnnnnnnnnnnnnnnnnnnnnnnnnnnnnnnnnnnnnnnnnnnnnnnnnnnnnnnnnnnnnnnnnnnnnnnnnnnnnnnnnnnnnnnnnnnnnnnnnnnnnnnnn

SEQ ID NO: 117933 - DNA, 1254 bp, Arabidopsis thaliana
gcgggtcgacgcaagcgtctatactgatgcgagacaacagaaggggacactcgagaagaagaagaagaaaaaaaacagagctttacaatttctctctacagagatcgaagatatggaaggcaaggaagaagacgttagagttggagctaacaagttcccggagagacaaccaatcggaacatcagctcagagtgacaaggactacaaggaaccaccaccagctccgtttttcgaacctggtgagctttcttcatggtctttttggagagctgggatcgctgagttcatcgctacttttctctttctctacatcactgtcttgactgttatgggagtgaaaaggtcaccgaacatgtgtgcttccgtcggaatccaaggaatcgcttgggctttcggtggtatgatatttgccttagtctactgtaccgctggtatctccggtggacacatcaacccagcggttacttttggtctgttcttagcccggaagctgtcgcttactagagctctgtactacatagtgatgcagtgcttgggagctatctgtggtgctggagtggttaaagggttccagcctaagcaataccaggctctaggaggaggagctaacactgtggcacatggttacaccaagggaagtggtcttggtagctgagatcattggcacattcgttcttgtatacacagtcttctcagcaactgacgccaagagaaatgctcgtgactctcatgtccctattcttgcaccactcccaatcgggtttgcggttttcttggttcacttggcaaccatcccaatcactggcacaggcatcaacccagctagaagccttggagctgcaatcatctacaacaaagaccattcctgggatgaccactgggtgttttgggttggccccttcattggagctgcacttgctgctctttaccatgtggttgtcatcagagccatccccttcaagtccagaagctaagtaaaaacaagacatcaagtcctctggtttctggccttgtccttagttgcttctatagttctattgttgatctactacatgtatgtgtgcaatgtgtttatctatgtgccctcttaatgcaatatttgtaaacaaggaagaagtcaaaggagaactatttcgaaattatgatgtttaacatgtttattagaaaaaaaaaaaaaaaaaaaaaacaaagggcgaccgctctagaggatccaagcttacgtacgcgtgcgtgcgacgtcatagctcttgctat

SEQ ID NO: 117934 - DNA, 557 bp, Arabidopsis thaliana
ccagctccatacgactcacattagggaaagctcgtacgcctgcaggtaccggtccggaattcccgggtcgacccacgcgtccggaagaaaatgggatctataacggtagctccgggaaccaccgtcttattctccagtcggcggctagatctttgcggtcgtcgccatgagaatctatccgtcgtttcgtcctcacaaccgtctctgatgccaaagcagagatggctttatattcccgagacgaggttgaaaagagaggttttaaagctcgatgtcgtcggaagagctgctgattccacgagctcttctccatcagtagcttccggtgatagaaccttaattcctgatgatgaattcactttagccaagatttcatttggtgttattgggctaggtctcggggtttcgctactctcgtatggttttggggcctattttactatccttcctggaactgagtggtctgctataatgctaacatatggatttcccctttctattatcggaatggctcttaagtacgcagaactcaaaccagttccttgcttgagctattc

SEQ ID NO: 117935 - DNA, 634 bp, Arabidopsis thaliana
tgatttcaagaaaattaagagaaagctcgggagaaaattaccaccaccaaagaatgcaaccaacactgagattaaatccaaagcaattatacttcctgagcaaagtgtggctgctgaaaagagtggcttagctacaagtaagaaaggcttgactttgaaggaacttctgccacagacttctcatcacaatgccaaagttcgcaaagatgcattgtatggtatcaaagaccttttcaagaatcatccagaagagctacagtcacataaatatgctatcatacagaaactcagggaacgcattagtgatgatgataagctagtgagagatgttttttatcaactatttgatattgacatctttcctctttgtaaagaggataaccagggccttatggtgtcacttttgatgccatacatatttagcgctatggctcattcagctattgatgttcgtttgatggctttcaaatttttccaccttgttgtggagttctacccgcctaccttttccttggatgctgaaaagattctcgaaaactacaaggatattatacagaaaaatcatttttatgtggaagataaaagcaagctaaaggtggctctttctgggttgtcacattgcctctcggttttg

SEQ ID NO: 117936 - DNA, 768 bp, Arabidopsis thaliana
acgcctgcaggtaccggtccggaattcccggtttcgacccacgcgtccgtacggctgcgagaagacgcagaaaggtacgggtgcgagaagacgacagaagggggtgtctccgttattaggtatttgtgagaatcttcttgattgagtttatacttcagcgagattgtttatctctaagctccaggagaagctaatttgaattgcttctgggtttttagtacgtagctctctataagatatataacaaatggttcgctccaaggctcctgcaaagaagcagcaaaagaaaggaattgatttcaagaaaattaagagaaagctcgggagaaaattaccaccaccaaagaatgcaaccaacactgagattaaatccaaagcaattatacttcctgagcaaagtgtggctgctgaaaagagtggcttagctacaagtaagaaagaccttcctgggatggaccactgggtgttttgggttggccccttcattggagctgcgcttgctgctctttaccatgtggttgtcatcagagccatccccttcaagtccagaagctaagtaaaaacaagacatcaagtcctctggtttctggccttgtccttagttgcttctatagttctattgttgatctactacatgtatgtgtgcaatgtgtttatctatgtgccctcttaatgcaatatttgtaaacaaggaagaagttccaaaggagaattatttgcaaattatgatgtttaacatgtttattacagctccaagatgtttaacat

SEQ ID NO: 117937 - DNA, 512 bp, Arabidopsis thaliana
ccagctacatacgactcacgttagggaaagctcgtacgcctgcaggtaccggtccggaattcccgggtcgacccacgcgtccgcccacgcgtccgagaaaaaaaacagagctttacaatttctctctacagagatcgaagatatggaaggcaaggaagaagacgttagagttggagctaacaagttcccggagagacaaccaatcggaacatcagctcagagtgacaaggactacaaggaaccaccaccagctccgtttttcgaacctggtgagctttcttcatggtctttttggagagctgggatcgctgagttcatcgctacttttctctttctctacatcactgtcttgactgttatgggagtgaaaaggtcaccgaacatgtgtgcttccgtcggaatccaaggaatcgcttgggctttcggtggtatgatatttgccttagtctactgtaccgctggtatctccggtggacacatcaacccagcggttacttttggtctgttcttag

SEQ ID NO: 117938 - DNA, 557 bp, Arabidopsis thaliana
ctatacgacttacttagggaaagctggtacgcctgcaggtaccggtccggaattcccgggtcgacccacgcgtccgcactcacagaaaaacctataaagctctatagagaaagagaggagagagagagatggttggtaaagaagaagatgttagagtcggagctaacaagtttccggagaggcagccgatcggaacttcggctcagagtgacaaggactacaaagagccaccacctgcgccgttgttcgagcccggcgagctagcttcatggtccttctggagagctgggattgctgagtttatagctacggtttttgttcctggacatcactgttttgactgttatgggttgtgaagaggtcaccgaacatgtgtgcttccgtcggaatccaaggtatcgcttgggctttccgggggtattgatcttccgctctcggctactgcaccgctggtatctccgggtgagttcacatcgtctctcagcggtctacaacgattcgaatatagatcctgggttagctaggtagcgaaattcaaatttagcatgtttaggatt

SEQ ID NO: 117939 - DNA, 654 bp, Arabidopsis thaliana
  unsure (1)..(654): unsure at all n locations
atacgactcactttagggaaagctcgtacgcctgcaggtaccggtccggaattcccgggtcgacccacgcgtccgcccacgcgtccgacggctgcgagacgacagaagggtacggctgcgagaaacgacagaagggggcaacacataacccactcacagaaaaacctanaaagatttctctctacagagatcgagagagagagatggaaggcaaggaagaagacgtttgagtcggagctaacaagttcccggagaggcaaccgatcggaacttcggctcagagtgacaaggactacaaggagccaccacctgcgccgttgttcgagcccggcgagcttgcttcatggtccttctggagagctgggatcgctgagttcatcgctacgtttctcgtcctctacatcactgtcttgactgttatgggtgtgaagagggtcaccggacatgtgtgcttcccggcggaatccaagggaatcgcttgggctttcggtggtnatgatatttngccttagtcttactttacccctgggatntcccgggtgggcaaaataaaccccnacgggtancttttgggccttttttttngccccggaaggttgtnggttnnctannggctntttacnancaaaaggtgnttncagtnctttggggggc

SEQ ID NO: 117940 - DNA, 528 bp, Arabidopsis thaliana
cccacgcgtccgaacattaacaaaattttatgttattgtcaatttgtcatcatcgtctttattttttatttctcaactttctttgcattacatcttccaactatataattaaccactctactttctcaaatcccacactcagagaagaagaagaagaaaaaaaacagagctttacaatttctctctacagagatcgaagatatggaaggcaaggaagaagacgttagagttggagctaacgagttcccggagagacaaccaatcggaacatcagctcagagtgacaaggactacaaggaaccaccaccagctccgtttttcgaacctggtgagctttcttcatggtctttttggacagctgggatcgctgagttcagcgctacttttgctctttctctacaactccgtcttgatcggttcaggtatatccaagagttcatttggtgttattgggctaagtctcggggtttcgctactctcgtatgggtttggggcctattttactatccttcctggaactgagtggtc

SEQ ID NO: 117941 - DNA, 802 bp, Arabidopsis thaliana
  unsure (1)..(802): unsure at all n locations
cgggntcccgggaaaaaccccngntcgtcggtttctagcaaggannttccncccgnnctnntacacangngatccantccttggggctatctgtgnnnctggtttggccaagggntccagcaaaggaattccaggctttgggagntggancaaccaccatagctcatggctccaccaaaaggaagtggtcttggagctgagattattgggaacctttggcccttggtttacaccgtcttctctgcccacttgatgccaagagaaaccgctcgggcctctcatgttcctattctagccccggctccctatcggattcgctgggttcttggttcacttagcacccatcccccttactggaactgggatccacccagccagaagtctgggagctccaatcttcttcaacaaggacaacgcttgggatgccccctgggtcttttgggttggaccattcattggtgcggcacttgctgctctctcccacgttatagtcatcagagcccatcccattcaagtccagaaagctaaagctgattgaggttctatttaaattctggcttttgttcttagtttgctttctcttcgtgaatctataacctgtgtgtaacgggtgtatctgttgtcctcttcttgccctaatggagacttatgtaaaacaaagacatgccccagaaacatctgttatctttcttctccattttatcagaggatttctataaaaaaaaaaaaaaaaaagggcggccgctatagaggatccaagcttacgtacgcgtgcatgggacgtcatagtaagtctagaggt

SEQ ID NO: 117942 - DNA, 898 bp, Arabidopsis thaliana
  unsure (1)..(898): unsure at all n locations
ctcacagaaaaacctagaaagctctagagagtaagagagagagagatggaaggtaaagaaggggatgttagagtcggagctagcgggtttccggagaggcaaccgatcggaacttcggctcagagtgacaaggactacaaagagccaccacctgcgccgttgttcgagcccggcgagctagcttcatggtccttctggagagctgggattgctgagtttatagctacgtttttgttcctgtacatcactgttttgactgttacgggtgtgaagaggtcaccgaacatgtgtgcttccgtcggaatccaatggtaccgcttgggctttcggtggtatgatcttcgctctcgtctactgcaccgctggtatctccggtggacacatcaacccaagcggttacgttcggtttgttcttagcttggaagctttcgctcacacgagctgtgtactacatagtgatgcagtgcttaggagctatctgtggagctggtgtggtcaaggggttccagccaaagcaataccaggctttgggaggtggagccaacaccatagctcatggctacaccaaaggaagtggtcttggagctgagattattggaacctttgtccttgtttacaccgtcttctctgccactgatgccaagagaaacgctcgtnactctcatgttcctattctagcaccggtccctatcggattcgctgtgttcttggttcaatttagnaaccatcccattacttgaacttgaataanccagaagaaggnttngggctnaatcatcttaacaaggcaacggttngntgncccttgggcttttgggtngccatcattgnntgacttntnntttnccaggatgcanaggncaccntaagccaaaggaagtgtagntttaaactgntt

SEQ ID NO: 117943 - DNA, 1721 bp, Arabidopsis thaliana
tctaaaacccattcaccgtctctgtttcgttcgccgtgattcatagtcgtctcgtctcaccgtcaccatcaccgtcttcttcttccattgacaggatcttgtttagattctgcaatggctttcaggcaaactttatctataaggtccaggcttttcgctcgtcgtaaccaaccagtttatcatattatccctcgtgagagtgatcatgaaagggattcattctgtcaagaaacatctcagagaagttaccatagctttcttcaccaaagatccgttaacaattctgatttctccaaagtttctggaggaagcttacatttgcctcttgctcctacgtctggttttgctttctatcgttatatgtcaagtgcacctggtgttggttcagagaagattggtgtgatgtctgacattgcagaagtcataaccgactcaacattgcaagatgtgccagctcaggctgctgctgctgtcagtgaagttacacttgcagctgctgactctttcttccctatcgcggcccttcagcagtgcattgatatggtgcatacattcacaggctttgagtggtgggcatccattgttgtagcaaccattttgatccgatcatcaacagttcctctcttgatcaaacaaatgaaagacacaaccaagttagcgctgatgaggccacggttggagtccatccgggaggaaatgcaaaacaagggaatggactcggttacgatggcagaaggtcaaaaaaagatgaagaatttgtttaaagaatatggtgtcactccattcaccccaatgaaagggatgtttattcagggaccgctgttcatctgctttttccttgctattcgaaatatggcagagaaggtaccttcattccaaacaggaggtgcattatggtttaccgatctaacaactcccgacagcttatacatcttgccggttataacaggattgacattcttgataaccgttgagtgtaatgcacaagaaggcatggaagggaatccgatggctggcactgtaaaaactgtttgtcgggtttttgctctcctcacagtcccgatgacaatgagttttccacaggccatattttgttactggatcacatccaacctgttctctctcatgtatggacttgtgataaagcgtcctcaagtgaagaagatgttacgcatacctgatctgcctccacctcctccaggtcaacaaccttcatttgacctgttttcagctctcaagaaaatgaaagccatgacacaggaccatacacagaaccagatagaaccaccttcgccagtaaacccgaggctttcctcaacatcgctgagtcctgttagtaagaggctcaaggctttggagagccaagtaaagggaaggaagaagaatagcagcaagaagaagtgatttaaaacggtgcatactatttttgttaagagggccaaacgaaaaaaataataaagcttttgagtcgaaagtgaacacagaattttctcactgatgaaactactctgtgagctaaaaagctggaggcagctattgtaagtttgttttgaccaattacagaatagaagattgtttttatagaaaaaaaatggataacatatacttttttatcttgttaagtaacagaacttgaacaacattggatcaaaaaaaaaaaaaaaaaagggcggccgctctagaggatccaagcttacgtacgcgtgcatgcgacgtcatag

SEQ ID NO: 117944 - DNA, 1232 bp, Arabidopsis thaliana
acaacaaatataaaaccagcggccgccagtgtgagtaatttaggcagtaacaaatttggtgaagtcacgagaatcaacgatgacggcgacgaacaagcaagtcatattgaaagactacgtgagtggtttccctacggaatccgatttcgatttcactaccaccaccgtcgaacttagggttccggaaggtactaactctgttctagtgaagaatctctacttgtcatgcgatccttacatgagaattcgcatggggaaacctgatccttccactgctgctcttgctcaagcttacactcccggccagccaatccaagggtatggagtgtctagaataatagaatctggacatccagattacaagaaaggagacttactctggggtatagttgcatgggaggagtacagtgttatcactccaatgactcacgcgcatttcaagatccaacatactgatgttccattatcttattacactggacttttaggtatgcctggtatgactgcctatgctgggttttatgaagtttgttctccaaaggaaggagagacagtttatgtgtcagctgcatctggtgctgttggtcagcttgtgggacaacttgctaagatgatgggctgttatgttgttggaagcgctggaagtaaagagaaggttgatcttctgaagaccaagtttgggtttgatgatgcatttaactacaaggaagaatctgaccttactgctgccctaaaaaggtgtttccctaatggcattgacatatactttgagaatgtaggaggcaaaatgctagatgcagtgcttgtgaacatgaacatgcacgggcgtatcgctgtctgtggaatgatctcacagtacaatcttgagaaccaggaaggtgtacacaacctatccaacataatctacaaaagaatccgcattcaaggctttgtagtgtctgatttctacgacaaatactcaaagttcttggagtttgtgcttccccacattagagaagggaagataacgtacgtggaagatgtagctgatgggcttgagaaagctcccgaagctcttgtgggactcttccatggtaagaatgttgggaaacaagttgttgttgttgctcgtgagtgaaactatgtttgatacttgtactttatccaattagagtttgtgtgggtggtttttgttttatggataaagataatgtttgttatggtttcgaatcaaatagatacaaaattcggtt

SEQ ID NO: 117945 - DNA, 1330 bp, Arabidopsis thaliana
gccactataaaaagcaggcgcgtcctcgaagaagaagaagaagaagtaacggaatatattgaactcatcagaagctgaatcggagaagaagaattaacgatgacggcgacgaacaagcaggtggtattgaaagactacgtgagtggtttccctaaggaatccgatttcaatttcaaaaccaccaccgtcgaacttagggttccggaaggttctaaatcggttcttgtgaagaatctctacctgtcatgcgatccttatatgcggtctcgcatggggaaacctgatccctcctctgctcttgctcaagcttacgctcccggcaagccaatctatgggtatggagtgtctagagtgatagaatctgggcatccagattacaagaaaggtgatttactctggggaatagttggatgggaggagtatagtgttattacaccaatggctcacatgcatttcaagatccaacatacagatgttccattatcctactatactggacttctcggtatgcctggtatgactgcctatgctgggttttatgaagtttgttctccaaagaaaggagagacagtttatgtgtcagctgcatctggtgcggttggtcagcttgtgggacaatttgctaagatgatgggctgttatgttgttggaagcgctggaagtaaagaaaaggttgatctcctgaagaccaagtttgggtttgatgatgcatttaactacaaggaagaatctgaccttagtgctgccctcaaaaggtgttttcccaagggcatcgacatgtactttgagaacgtaggaggcaaaatgctagatgcagtgctcttaaacatgaacccacacgggcgtatcgctgtctgtggaatgatctcacagtacaatcttgaaaatcaagaaggtgtacacaacctatccaatatcatctacaaacgaatacgcattcaaggctttgtagtggctgatttctacgacaaatacccaaagttcttggagttggtgcttccgcgcattaaagaagggaagataacgtatgtggaagatgtagctgatgggctcgagaaagctcctgaagctcttgtggggcttttccatggtaagaacgttgggaaacaagttgttgttattgctcgtgagtgaagaatacttatttgggagtaatgtcttattgcgcgtgagtgaagaatacttatttgggagaaatgttatatttatccaacaagagttggtatgtctgttgaacccaaccgtgagtttttggtttatgaataatactagtaactataatataaaaaaaaaaaaataaaaaaaaaaaaaaaaaaaaagggcggccgct

SEQ ID NO: 117946 - DNA, 658 bp, Arabidopsis thaliana
gaagaatcaacgatgacgacggcgacgaacaagcatgttatattgaaagactacgtgagtgggtgccctacggaatccaatttcgatttcactaccaccaccgacgaacttagggttccggaagccaatagaagggtacggagtgtctacagtgatagaatctgcgcattcagattacaaaaaaggagacctactctggggtataggtgcatgggaggagtacagtgtgatcactccaatgcctcacgcgcatttcaagatgcgacatacttgatttccattatcttattacactagacttttaagtattccttttattactacctattcttatatttttgatatttatttatatctcttatatttatttttatcttgatttttctgtaatttaatttttttttattttatttttcaattattttttttctacttttctatattttattttatttcatttttttctaatattttataattttatatttttctttttattatatattttatatattatatttctatttatattattatatttttaaattttttatattattctattttattttttaattttaatttattcaatttcttaaatttcattacttttataaccatttaatttttttcatactttaataatattttttataat

SEQ ID NO: 117947 - DNA, 1126 bp, Arabidopsis thaliana
  unsure (1)..(1126): unsure at all n locations
taagccatgaagaaccaaagcagcttctccattgttgctcttcttctcattttcttttcctcatctgtctttgctcagctgcagacaaatttttaccggaagtcatgtcctaacgtggaaactattgtccgcaatgccgtccgccaaaagttccagcagacttttgttacggctccggccaccctccgccttttcttccatgattgcttcgtccgtggatgtgatgcttcgatattgctggcatcaccatctgagaaggatcaccctgatgacaagtcactagccggagacgggtttgatacggtggcaaaggcaaagcaggcccttgatagggaccccaactgccgtaacaaagtctcatgcgctgacattttggctctcgccactcgtgacgtcgtcgttttgaccggaggaccgaactatccggtagagctagggaggagagacggcagactatcgacagtggctagcgttcaacacagtctaccccagcctagtttcaaattggaccaacttaacactatgttcgctcgtcacggtctatcccaaaccgatatgattgcactctcaggagcacatactataggattcgcacattgtggcaagttttcgaaaagaatttacaattttagtcctaaacgtccaattgatccgactttgaatattcgttacgccttacaattgagacaaatgtgccccattcgggtcgacttgaggatcgcaattaacatggatcctacttctccaaatacatttgacaatgcttatttcaaaaacctccaaaaagggatgggtttgttcacgtcagatcaagttttgttctctgatgaacgatctagatcaactgtcaattcatttgcttctagtgaagcaacttttagacaagcttttatttcggctataacgaagttgggtcgggttggagttaaaaccggtaacgcgggtgagataagacgggattgttcacgtgttaattagtgatttgttgtttcttttatttaagaaattttgcttcttcttttttaagatttgttttctgaattgtatggttctttgacgaaaaaaaaagaaaaaaagaagaattgtttcacccnnnnnnnnnnnnnnnnnnnnnnnnnnnnnnnnn

SEQ ID NO: 117948 - DNA, 1261 bp, Arabidopsis thaliana
cacacatattttcccaaaatttggatcaaaaagttttccgatagaagaaattaaatatgatgagactcctctttgtattcttcatggttcacaccatctttatcccatgcttttcctttgatacaccggggaaggatcttcctttaaccctagattattacaagtctacttgtccaaccgtatttgacgtcatcaagaaagaaatggaatgcatagtgaaggaagatcctagaaatgcagccataattattcgtcttcacttccacgactgctttgtccaaggatgtgatggatcggtgttgctagacgagacagaaactctacagggagagaagaaagcttctcccaacataaattcattgaaaggatacaaaattgtcgacagaatcaagaacataatcgaatccgaatgtcctggagttgtttcatgcgctgatcttctcacaattggtgctagagatgctacaatcctggtgggtgggccttactgggatgttcctgtgggaagaaaagattcaaaaaccgcaagctacgagcttgccacaacaaaccttccaactccagaagagggtttaatcagcatcattgctaagttctattctcaaggtctctcggttgaagacatggtcgctcttataggagcgcacacgatcggaaaagcacaatgtcgcaacttccgatcccgaatttatggagattttcaagtgacgtcagccctaaatccagtttcggagacgtacttggcaagtcttcgagagatttgtccggcgagtagcggagaaggtgatagtaacgtgacggcgatagacaatgtgacgccgaatctcttcgataactcgatctaccacacactgctaagaggagaagggttactgaattcggaccaggagatgtacacgagcttgttcgggatacaaacgcggcgaatcgtgagcaagtatgcggaggatccagtggctttcttcgagcaattctcgaagtcgatggtaaagatggggaacattttgaactctgaaagcttggctgatggagaagttagaagaaattgcagatttgtgaatacatgattcatcaacaacgaaactaaaaaatggagaaaataatctatttctgatctttatttatataagaaagaaaaaatttaatttgatgttaaaaaaaaaaaaatttatttctacatttttaaaactatagggttcttgaatgtttaaaaccttattctaatgattttcaattgatctgagtctgtagttgtttaaaa

SEQ ID NO: 117949 - DNA, 1343 bp, Arabidopsis thaliana
  unsure (1)..(1343): unsure at all n locations
ccnnnnnnnnnnnnnnnnnnnnnnnnnnnnnnnnnnnnnnnnnnnnnnnnnnnnnnnnnnnnnnnnnnnnnnccacgcgtccgattttcttaccactcaaagagtgcgcactcattatcatcgtttgaaactaaacatggcgacggagaaaagcaagattctggtgatcggaggaactggttacatcgggaaattcctagtagaagcgagcgccaaagctggccactccacattcgctctcgttagagaagcaactctatccgatcctgtcaagggcaaaaccgtccagagtttcaaagatctcggcgtcacaatactacacggagatttgaatgatcacgagagcttagtgaaggctattaaacaggttgatgtggtgatatctaccgttgggagcatgcaaatcttggatcaaaccaagatcatttccgccatcaaagaagccggtaatgtcaagagattcttgccgtctgagtttggggtggatgtggataggacgagtgcggttgagccagctaaatcggcttttgcagggaagatacagatcaggagaaccatcgaagcggaaggaataccatacacttacgctgttaccggttgctttggtggttactacttgccaacattggttcagttcgagcctggtctcacttctcctcctagagacaaagtcaccattcttggcgatggaaatgccaaagctgtgatcaacaaagaggaagatattgctgcttatacgatcaaggcggtggatgatcctaggactctgaacaaaatcctatacattaagccttctaacaacactttatcgatgaacgaaatagtcaccttgtgggagaaaaagattggcaagtctcttgagaagactcacctcccagaggaacaactacttaaaagcatccaagagtctccgattcccatcaatgttgttctgtcgataaaccacgcggtgtttgtgaatggagataccaatatcagtatagagccttcctttggtgtggaagcctctgagctttaccctgatgtcaagtacacaagtgttgacgagtatctcagttatttcgcttgatgaacttcattataaacgtaatttaccaccatgacgcgctagtttcatgttctgtatcaataaaagaatggttcttgtaatggtgaatgtgtgtgtgtatgtgtgactaatcagtaatcacagtgctttacctctgtttccgagcttcccaagaaatatgaattagtaatatataattcataaaaaaaaaaaaaaaaaaaagnnnnnnnnnnnnnnnnnnnnnnnnnnnnnnnnnnnnnnnnnnnnnnnnnnnnnnnnnnnnnnnnnnnaacga

SEQ ID NO: 117950 - DNA, 538 bp, Arabidopsis thaliana
  unsure (1)..(538): unsure at all n locations
agatattgctgcttacacgatcaaggcggtggatgatcctaggactctgaacaaaatcctatacattaagccttctaacaaccctttatcgatgaacgaaatagtctccttgtgggagaaaaagattggcaagtctcttgagaagactctcctcccagaggaacaactacttaaaagcatccaagagtctccgattcccatcaatgttgttctgtcgataaaccacgcggtgtttgtgaatggagataccaatatcagtatagagccttcctttggtgtggaagcctcccacctttaccctgatgtcaagtacacaagtgttgacgagtatctcagttatttcgcttgatgaacttcattataaacgtaatttacccccatgacgcgctagtttcatgttctgtatcaataaaagaatggttcttgtaatggtgaaaaaaaaaaaaaaaacacaagnnnnnnnnnnnnnnnnnnnnnnnnnnnnnnnnnnnnnnnnnnnnnnnnnnnnnnnnnnnnnnnnnnnnnnnnnnnnnnnntt

SEQ ID NO: 117951 - DNA, 2193 bp, Arabidopsis thaliana
tcatcatctacctctgctccaatttctctgaaaacaagaaaccttaatcaatcgaaatctcagtgtaactaatcaatggagatcaagcctggtttatccgctctcgtcactggcggcgcctctgggatcggtcgagctctctgcttagctcttgcagagaaaggagtttttgtaaccgtcgctgatttttcggaggagaaaggacaagagactacttcgcttgttcgaaaagcgaatgccaagtttcatcacgggttaaactttccttctgctatctttgtgaaatgtgatgtgactaatagaggagatctcctcgctgctttcgataagcatttagccacatttggaacacttgacatctgtatcaacaatgctgggattagcactcctttaagatttgataaagatgacactgatggatctaaatcatggaaacacaccattaatgtcgatctgattgcagtagttgaaggcacacaacttgcgatcaaagctatgaaagcaaaacaaaagcctggagttatcattaacatgggatcagctgcgggtctttatccaatgcccattgatcctatctatgctgcctctaaagccggtgtcgtattattcactagatcattagcatattacaggcgccaggggattcgcatcaatgtgctttgccctgaatttatcaagacagacttagctgaagctattgatgcttcaatactagagtcaataggcggttacatgtctatggacatgttgattaaaggtgcttttgagcttataaccgatgagaaaaaggtgggggcatgtctatggattaccaaacgcaggggtttggagtattggccaactccaatggaagagacaaagtacttggtgggttcaagttccaggaaaagaccttcttttaaagtttctacaaaaatagaatttcctcaaagcttcgagaaaatgattgtacacaccttgtctcataaattccgcagtgctacccgcatagtccgtgcaccactacaattacccattggaccacaccaagttctcctgaaaatcatctatgctggtgttaacgcaagtgatgtaaacttcagctcaggtcgttactttactggtggctccccgaagcttccctttgatgctggatttgagggagttggactaattgcagcagtgggagaatctgttaagaatttggaagttgggactccagctgctgttatgacgtttggagcatattctgaatacatgatagtatcttctaagcatgtgcttcctgttccaagaccagatccagaagttgttgccatgcttacctcgggattaactgcattaatcgcccttgaaaaggcaggacaaatgaaatcaggtgaaactgtacttgtgactgctgctgcaggagggactggacaatttgcagtccagcttgcaaagttatcaggaaataaagtgattgctacttgcgggggatcagagaaggccaagctattgaaagagcttggggtcgatcgagtcatagactacaaatccgagaatattaagacggtcttgaaaaaggagtttccgaagggtgtaaatatcatctatgaatctgtaggtggtcaaatgtttgacatgtgcttgaatgctcttgctgtttacggacgactcatcgtgattggaatgatctctcagtatcaaggagagaagggatgggaacctgcaaaatatccagggctctgcgagaaaattttagcaaaaagccaaaccgtggctggtttctttctggtgcaatatagtcaactgtggaaacaaaatcttgacaagttgttcaatctttacgctctcggaaagcttaaggttgggattgatcagaaaaagtttataggtctaaatgctgtagcagatgctgttgaatatctgcattcgggtaaaagcaccggaaaggttgtcgtttgcattgatcccgcatatgagcagaaaacgtcgagactgtaaacaaaacatccacaaagcaaaatccaggttgggagtctatacatgagtggagcttttcctttctttttcttctatggaggcatgaaagggtttgtaagtagagagttctttaagcttatgtttacaataaacagaggagaaagttttttaaaatccaagttaaacgtcaaagtaacaattacaccatcacaaaaataaaagaaacgacagaataataggttgcatcgt

SEQ ID NO: 117952 - DNA, 1309 bp, Arabidopsis thaliana
  unsure (1)..(1309): unsure at all n locations
cagctannnnnnnnnnnnnnnnnnnnnnnnnnnnnnnnnnnnnnnnnnnnnnnnnnnnnnnnnnnnnnnnnnnccacgcgtccgcccacgcgtccggaaataactaatcaaaactctgtatcatcgttttcaaaacctaattaatggctgtaacaaatcttcttctacttgtgatggtttgttcattatcagtcttattgtcatcgtttcttcaatatttgggacatcatctgcgcaactaaacgcaacattttactctgggacttgtcccaacgcctctgccatcgtacgcagcactattcagcaagctcttcaatccgatacaagaatcggagccagcctcatccgccttcattttcatgactgttttgttaatggatgtgatgcatcgatcttgcttgacgacactggaagcatccagagcgagaagaacgctggtccgaatgtaaactcagctagaggattcaacgttgttgataatatcaagactgccctcgaaaacgcttgccctggtgttgtctcttgctctgacgttttagcccttgcctctgaggcttctgtgtctttggcaggagggccatcatggactgtattattaggaagaagagatagtctcacggccaacctcgccggtgcaaattcgtccattccttctcccatcgaaagcctaagcaacatcacatttaaattttcggctgtcgggcttaatacaaacgatctggtagccttatctggtgcgcatacgttcgggcgtgctcgatgtggagtattcaacaacagactatttaacttcagcgggacaggaaatcccgatccaactctaaactcaacgcttctgagcactcttcaacagctatgtcctcaaaacggtagcgcatcaacgatcaccaatcttgatttgagcacaccagatgcgttcgataacaattacttcgccaaccttcagagcaacgatggacttcttcagtcagaccaagagctgttctctaccaccggttcatccaccatcgcgattgttacttcgttcgcaagtaaccagactctgttttttcaggcctttgcacagtccatgatcaatatggggaatattagtcccttgactgggagtaatggagagattaggttagactgtaagaaggttaatggaagttgatttccttaaagctcattttctttgaaaaaacattggcaagctttggttgaataatttttgttatcataatcacatcaaatctgtattgcacttaaatcattctaagcaaatttatgataaatgaaattaaatcnnnnnnnnnnnnnnnnnnnnnnn

SEQ ID NO: 117953 - DNA, 1283 bp, Arabidopsis thaliana
  unsure (1)..(1283): unsure at all n locations
ccggaccggaatgcccgacccgccccacgcgtcccgcgcgccattcctgtaaacacaaaaacttgtaatttccaacgaaatggcgcggttcagtctggttgtagtcgtgactcttagtcttgccatctctatgttccctgacacaaccactgctcaactcaaaaccaatttctacggaaactcatgtccgaatgttgaacaaatcgtgaaaaaagtcgtccaagaaaaaatcaaacagaccttcgtcaccatcccagctactctccgcctcttcttccacgattgcttcgtcaatggatgtgatgcgtcggtcatgattcaatcaacgcctaccaacaaagccgagaaggatcatccagacaatatttctttggccggagatggatttgacgttgtgatcaaagccaagaaagctcttgacgctatcccaagttgcaaaaacaaagtctcttgtgctgatattcttgctttagccacccgtgatgttgttgtcgccgccaaaggtccgtcgtacgcagtggaactcggaaggtttgatggtttggtgtcgactgcggctagcgttaacggaaacttgcccggaccaaataacaaagttacagaacttaacaagctttttgccaaaaacaaacttacccaagaggacatgatcgctctttcagcggctcacacacttggattcgcccattgtggcaaagtgttcaacagaatctacaacttcaacctcacacacgccgttgacccaactctaaacaaagcctacgctaaagaacttcagttggcttgtcccaagacagttgacccaagaatcgccatcaacatggacccaaccactccaagacaattcgacaacatttacttcaagaatctgcaacaaggcaaaggactcttcacttccgaccaagttctcttcaccgatggtcgctcaaagcccaccgttaacgattgggccaagaattctgttgctttcaacaaggctttcgtaaccgctatgaccaaactcggccgcgttggcgttaagactagacgcaacggtaacattcgtcgtgactgtggtgcctttaactgatcatcctttttgggttttgttttcgagatttgttctttgacatgttatgagtttttgttttgttgtcttctgtttgtttctgcttcttgtatttttgaaaaacacattaacgaatctataccgttgttttatttctcgtgactgtaatattaataatcttatttctattaaacttgtttnnnnnnnnnnnnnnnnnnnnnnnnnnnnnnnnnnn

SEQ ID NO: 117954 - DNA, 1302 bp, Arabidopsis thaliana
  unsure (1)..(1302): unsure at all n locations
acttcagtgacacaaacccaaagaaaagtagtgagaaacaaaatcgaggtaactactagatgaagacgatgacgcaattaaatattgcggttgtggttgtagtgacggttcttattggaatgttgagatcatcggaggctcaacttcaaatgaatttctacgcgaagagctgtccaaacgcagagaaaatcatttcagatcatattcaaaatcatatccacaatggtccttctcttgcagctcctctcatccgaatgcacttccatgattgcttcgttaggggatgtgacggatcggtgttgataaattcaacatctggtaacgcagagagagatgcaccaccgaatctaacacttagaggattcggtttcgtggaaaggattaaggctcttcttgaaaaagtgtgtcctaagactgtttcttgcgcagatatcattgctttgactgctagagacgcagttgtcgccaccggaggtccttcatggagtgttccaacgggtagaagagacggtaggatctcaaataagacggaggctactaataacattccacctccaacgagtaatttcacgactttacaacgacttttcaaaaaccaaggccttaatctcaaggaccttgttctgctctctggggctcacacgattggtgtctcacattgttcttccatgaatactcgtctctacaacttctcgactacagtcaaacaagatccatctctcgatagccagtacgcagctaatctaaaggctaacaaatgtaagagccttaacgacaatagcaccatcctcgagatggatcccggtagtagcagaagcttcgatctcagttattataggcttgtcttgaagaggagaggcttgtttcagtctgattctgcattaacaacgaactcagcgactttgaaggtgatcaacgacttggtcaacggttctgaaaagaagtttttcaaagcttttgctaagtcaatggagaagatggggagagttaaagtgaagactggctcagctggtgtgatcaggacacggtgttctgtcgctggaagttagtaagcttcagggtcggaatgtggtgtgttatggtcattgttgttttgtgtgactttcggaaaaaacaaatgttgttaatttaattttgttgttgtttgatttgtgtttatgcacccaagaatgatgtgttatggttcaattaatatgtgaatcatttaaatttaaaaaaaaaaaaaaaagnnnnnnnnnnnnnnnnnnnnnnnnnnnnnnnnnnnnnnnnnnnnnnnnnnnnnnnnnnnnnnnnnngttccta

SEQ ID NO: 117955 - DNA, 1225 bp, Arabidopsis thaliana
aattgaattagccatggagaagaatacttctcaaaccatcttctccaacttttttcttctccttctcctttcttcatgtgtctctgctcagctccggacaggtttctaccagaactcatgtccgaacgtggaaaccattgtacgtaacgctgtccgtcagaaattccagcagactttcgttaccgctccggccactcttcgcctcttcttccacgattgcttcgttcgtggatgtgatgcgtcaataatgatagcatcaccatcggagagagaccatccagatgacatgtcattggccggagacggattcgacacggtggtgaaggcgaagaaagccgttgatagcaatcccaattgccgcaacaaagtctccatgtgctgacattttggctctcgccactcgtgaagtcgtcgttttgaccggaggaccaagctacccggtggagctagggaggagagatggcagaatctccacgaaggccagcgttcaaagccaattgcctcagcccgagtttaacctaaaccagctcaacggcatgtttagccgtcacggcctctctcaaaccgatatgattgccctctcaggagcacacactataggatttgcacattgtggaaaaatgtcaaagagaatatacaattttagccctacaacacgtatcgacccgagtataaaccgtggatacgtggttcagcttaagcaaatgtgcccgatcggtgtcgacgtaagaatcgcaatcaacatggatccgaccagtccacgtactttcgataatgcttatttcaagaatctccaacaaggaaagggtttgttcacgtcagatcaaatcttgttcacagatcaacggtcaagatctacagttaattcgtttgccaatagtgaaggagcttttagacaagctttcatcacagcgatcacgaagttaggtcgggttggtgttttgactggtaatgctggtgagattcgaagggattgttcacgtgtcaattagtgtgatttgaggttttctttcttttattccttaaagaggatttttttttttaataataaaatttaatttcttgttgtcaaaataaggagttcataagtgtgaaacatggaaacttaaattaataagatgggtttattttgttgacaaaaaaaaaaaaaaaaaaaagggcggccgctctagaggatccaagcttacgtacgcgtgcatgcgacgtcatagtgttcgatagtgta

SEQ ID NO: 117956 - DNA, 3924 bp, Arabidopsis thaliana
ctaaccactttcctcccttaatttctatccctatatttattttcctttcattttcctctccaactaattacacacacttgaagctgaaaaaaatgcagccgtccggtgatccggcgccggaaaaggagaaagagatgacgcagccaaaagtgtcactgcttaagctcttctccttcgcagatttctatgattgtgttctaatgactcttggatccgtaggagcgtgcattcatggcgcctcggttccaatctttttcatcttctttggcaaactcatcaatattatcggtcttgcttatcttttcccaaaacaagcctctcacagagtcgccaagtactcgttggattttgtatacttgagtgtggctatactattttcatcatggttagaggttgcatgttggatgcatacgggagagaggcaagcggcgaagatgaggagagcttatctcaggtcaatgttaagccaagacataagcttattcgacaccgaagcttctacaggagaagtcatctccgccatcacctccgacatcctcgtcgtccaagatgctctctccgagaaggtagggaatttcttgcactacataagccggttcatagccggttttgcaattggattcactagtgtatggcaaataagtcttgtcactctatccatagtccccttaatcgctctagctggcggcatctatgcgttcgtcgccatcggacttattgctcgtgtccggaaatcatacatcaaggctggtgagattgcagaagaggtgatcgggaatgtgaggaccgtacaagcattcaccggtgaagaaagggcggtgagattataccgagaagcgctggagaatacgtataagtacgggagaaaagctggtttaaccaaaggattaggtcttggatcgatgcactgtgtcttgtttctatcttgggccttgctcgtatggttcacaagtgttgtggtccacaaggatatcgccgatggtggcaaatcattcactaccatgctcaacgttgtcatcgccggcctgtctcttggacaagcggcgcccgatatttctgcgtttgtacgggcaaaagccgctgcttatccaattttcaagatgattgaacggaacacggtgacaaaaacaagcgcaaaatctggccgtaaactagggaaagtagacgggcacattcaattcaaagacgcgactttcagttacccatctcgccctgatgtggtgatcttcgacaggttaaacctagctatccctgccgggaaaattgtggcacttgttggaggaagcggatcagggaagagcacggtcatatctttgatagagcggttctacgagcctatttctggagcagtgttgctagacgggaacaatatcagtgagctggatattaagtggttaagaggacagattggtttggttaaccaagaaccagctctgtttgcaacaacgattcgtgagaacattctgtatggcaaagacgacgcaactgctgaggagatcacccgtgccgcaaagctctcggaagccatttctttcatcaacaacctccctgaaggatttgagactcaggttggcgagagagggattcaactatctggcggacagaaacaaaggattgctatatcaagagcaattgtgaagaatccatcgatactcttactcgacgaagcaacaagtgctttagacgcagagtcggagaagagcgtgcaagaagcgctggatcgagtgatggttgggagaacaacggtggtggtggctcacagactctcaacggtaagaaatgctgacatcatagcagttgtacacgaaggtaaaatagttgagtttggaaaccacgagaatctcatatctaatcccgacggagcctactcttctcttcttcgtctccaagagactgcctcattgcagcgtaacccttccttgaatcgcacgctaagcagaccacatagtataaaatactcgcgggaactatcaagaacaagatccagcttctgttcagagagggaatcggtaactcgaccggatggggctgatccatccaaaaaagtgaaagtaacggtgggacgtctttactctatgatccgtccggactggatgtatggcgtgtgtggcacgatatgtgcctttatcgctggatctcaaatgccccttttcgcgcttggcgtctcgcaagccttagtttcctattacagtggttgggatgagactcaaaaagagatcaagaagatcgctatcctcttctgctgcgcgtccgttatcactctaattgtctacaccattgagcatatctgctttggcactatgggcgagcgtctcactctccgtgtccgcgaaaatatgttcagagcaatcttgaagaatgaaatcgggtggtttgatgaggtggacaacacaagctcaatgttggcatcgcggcttgagagcgatgcaactttgcttaaaaccatagtggtcgataggtcaacgattctactgcagaacttaggtctagttgtgacctcttttatcatagcatttatactcaactggcgtctcactcttgtcgtcttggccacatacccattggttataagcggacatatcagcgagaaacttttcatgcaaggatatggaggagacttgaacaaagcatacttaaaggccaacatgttggccggtgagtctgttagcaacatccgcacggtcgctgccttctgtgctgaggaaaagattctagaactttattcaagagagcttttagaaccttccaaaagttctttcaggcgtggacaaattgcaggacttttctacggtgtctctcagttcttcattttctcttcctatggcctcgccctctggtacggatcaactttgatggacaaaggattagcgggcttcaaatcagtgatgaaaacattcatggttttgattgtgacggcgttagcgatgggtgagacattggctctagctccggatctgctgaaaggaaaccagatggttgcgtccgtgtttgagatcttggaccggaaaactcagatcgttggagaaaccagcgaggagctgaacaatgtggaaggcacgattgagctcaaaggcgtccactttagctacccttcgagaccagatgttgtaattttccgggactttgatctgatagttcgtgccggaaagagcatggcgctcgttggacagagtggatctgggaaaagttctgttatttcactcattctccggttctatgacccgactgctggaaaagtcatgatagagggaaaagacatcaagaaactagatttgaaagcattgaggaaacacattggtcttgttcaacaagaaccagcacttttcgccacaacaatctacgagaacattttgtatggaaacgaaggagcatctcaatctgaagtcgtcgaatcagctatgctcgcaaatgctcacagcttcattacctctctcccagaaggttactctaccaaagtcggtgaacgtggagttcaaatgtcaggcgggcagagacagaggatcgctatcgctagagccattctcaagaatccagcaattctattacttgacgaagccacaagcgctttggacgttgaatctgagcgtgtggtacaacaagcattggatcggttaatggctaaccggacgactgtggtagttgctcacaggctatcgacgatcaagaacgctgacacgataagtgtattacacggaggtaagatcgtagagcaaggcagccaccgtaagctcgttctaaacaagagtggtccatattttaaacttatcagtcttcagcagcagcaacaaccttaaattaagtactatactttatttattgaaaaactctttttatttttatttttgtggaaaatattgatcatatactcatttgatgtgattatcttaatcttcttgatttaccgttggtaaaaaaaaagttacg

SEQ ID NO: 117957 - DNA, 1355 bp, Arabidopsis thaliana
gccggacctatacgactttcttagggaaacctggtacgcctgcaggtaccggtccggaattcccgggtcgacccacgcgtccgcgtgttccaattattaatgagacgacaattcctaagttctttgattcttcacggttggagaaatcggttagtagaaacaatactaagctcaagttgttctctggtactgctaatccagctttatctcaggaaattgcttggtatatgggtctggagcttgggaaggttagcataaagagatttgctgatggagagatctatgttcagctcaaagaaagtgttagaggttgcgatgtctttttggtgcagcctacttgcactccaactaatgagaatctcatggagctattgatcatggtggatgcttgccgaagagcatcagctaagaaagtcacagctgtgattccgtattttggatacgcaagagctgatagaaagacacaagggcgtgaatctattgctgccaaattggtagcaaaccttataacagaagccggtgcagatagggttctggcttgtgatcttcattcaggacaatccatgggttattttgacataccagtggatcatgtctattgccagcctgtgatacttgattatcttgctagcaagtcaatttcctctgaggatttggtagtggtttctcctgatgttggtggagtagccagggcacgtgcatttgctaagaaattatctgatgcaccacttgccattgtcgataaaaggcgtcacggccacaatgtcgctgaggtcatgaacctaatcggtgatgttaaagggaaggtggcagtaatggtggatgatattattgatacagctggaaccattgtgaaaggagcagctcttttacacgaggagggtgcacgtgaggtttacgcttgctgtacacacgctgttttcagtcctcctgcgatagagcggttatcaagcggtttgctgcaagaagtgatagtgacgaatactttaccagtagcggagaagaattacttcccgcagttaacgatattatcggtggctaatcttctgggtgagaccatttggcgtgtccatgatgatagctccgttagtagtattttcctttgatacttgttggtttttgttaatcggtttaggatcggtctaagttcctcttttttgttctacttcttctcgacagtttctagtctaaccatgtcttgcttctcttactcacctaaagtatgtcacagttctatcttttcttctttttagcataatagagttatgagatatcaatgacaataaaattttaatattttggtttattgaaaataattacattatggtgtaaacattatttctcaggatttattg

SEQ ID NO: 117958 - DNA, 1724 bp, Arabidopsis thaliana
  unsure (1)..(1724): unsure at all n locations
gagtccaacacaaactcggagacgaagaagaaggagagatgaaaaccattaagccattccttcttccgtatcactctgtcaccttcaaaatcctaaaccataatttttccgaattcgttgtggaagagactgcttgagtgagtcagaggtgggtttacgtgaggtattgctgacaatggcgtctctgggtctatcctttcctcccgccgcaaaaacgccgacgtatctagcctcttcgtcttcaactttcttctctaactcttctctatccgtcagaacctctcagtttcgctcccgaaactctgtcttcgcttgtgttaaatgtgatatgccggagtcattgaatgtgggaaacgggaatccaagtatcccaattattaatgagaggacacttccaaagttcttggaatctgctcgtatggagaaatcagtcaatagaaccaatacaaggttgaagttgttctctggtactgcaaatccagcacttgctcaggaaattgcttggtatatgggcttggatcttggcaaggttaatattaagaggtttgctgatggagagatctatgttcagctacaagagagcgttaggggatgtgacgtctatttggtgcagcctacttgcactcccactaatgagaatctcatggagcttttgattatggtagatgcttgccgaagagcatcagctaagaaagttacagctgtgattccgtattttggatatgcaagagctgacaggaagacacaagggcgtgaatccattgctgccaaattggttgcaaatcttatcactgaagctggtgcagatcgagttcttgcttgtgatcttcattcaggacagtcgatgggttattttgacattccagtcgaccatgtgtactgccagccggtgatacttgattatcttgctagcaagtcaattccctcagaggatttggtagtggtttctcctgatgttggtggagtagccagggcccgcgcttttgcaaagaaattatcagatgcaccacttgccattgtcgataaaaggcgttctggacacaatgttgctgaggtcatgaacctaattggtgatgtaagagggaaggtggcaataatggtggatgatatgattgatactgctggaaccattgtaaaaggagcagctttgttacaccaggaaggtgctcgggaggtatatgcgtgctgcacacacgctgttttcagcccgccagcgatagagcgattatcagggggtttgctgcaagaagtgatagtgacaaacacattacctgtagcagagaagaattacttcccgcagttaacaatattatcagtggctaatctcctgggtgagaccatttggcgtgtgcatgatgatagttccgtcagtagcattttcctttgacctttctcattgcaaccaacaatttgaacgattcttggtttgttagtcggtttagaaagtttatcccggttcatgttctaaccggaaagcttcaacaaaatttgcttgcattgtcttttgatacagcttaggtttttcttatttgctccacatctcaaaattatggatgcacaaatggtgttgaaccgattttttattatggtgtacacaagtttttaacttaatatatagaacatcttgtatcgtatcaaaaaaaaaaaaaaaaaaaagggcggccgctctagaggatccaagcttacgtacgcgtgcatgcgacgtcatagtggtngatagtgta

SEQ ID NO: 117959 - DNA, 542 bp, Arabidopsis thaliana
  unsure (1)..(542): unsure at all n locations
atgattcttccagctgctnnnnnnnnnnnnagaagacccatcgccgcaccgcttgagtcactcttcttcccggagaagaaagaaacaacaacaaacatattcaccattaccttcttcttctcctccttctccttcgtttctcactccaaatttggaaccctaaatcctaatatccttcgattagttctcttctctatcggaattcttaacgttgagaggagtctgatatttgccgtgactcaagagattccaggtgtttccgacgtatatatttacatatggcgtcgttggctctgacttctcctccctccgttaagattccttcgtatctctcctcggcgtcttcgtctctcttctcccgttcctcgatttctttcaggaccactgagtctcgctctcgaatctgcgtttctggttacgcgaaatgcaatttgcctaaggcactaaacgggaacgctcgtgttccaattattaatgagacgacaattcctaagttctttgattcttcacggttggagaaatcgggtagtagaaacaatact

SEQ ID NO: 117960 - DNA, 685 bp, Arabidopsis thaliana
  unsure (1)..(685): unsure at all n locations
aagtcatgaacctaattggtgatgtaagagggaaggtggcaataatggtggatgatatgattgatactgctggaaccattgtaaaaggagcagctttgttacaccaggaaggtgctcgggaggtatatgcgtgctgcacacacgctgttttcaggtaaaccactaacctatattttgtttgttcttgaacagtctcaaaatcactacttcctgaagcattatttgttttctttgttacgaacaaatcaatatggaagcccgccagcgatagagcgattatcagggggtttgctgcaagaagtgatagtgacaaacacattacctgtagcagagaagaattacgtcccgcagttaacaatattatcggtgggtaatcttctgggtgagaccctttggcgtggtccatgaagatagcccccgttagtaggattttccttttgaaactgcttggtttttgttaacgcccccccgatcggtataagttcctcttttttgttcnacttcttctcgccagtttctagtctaaccatgtcttgcttctcttactcacctaaagtatgtcacagttctatcttttcttctttttagcataatagagttatgagatatcaatgaaaaaaaaaaaaaacaaaagggcggccgctctagaggatccaagcttacgtacgcgtggatgcgacgtcaa

SEQ ID NO: 117961 - DNA, 3850 bp, Arabidopsis thaliana
gtctccgataactagtggatgatgattcaccctaaatccttccttgtctcaaggtaattctgagaaatttctcaaattcaaaatcaaacggcatggtttccggagtcgggggtagtggcggtggccgtggcggtggccgtggcggagaagaagaaccgtcgtcaagtcacactcctaataaccgaagaggaggagaacaagctcaatcgtcgggaacgaaatctctcagaccaagaagcaacactgaatcaatgagcaaagcaattcaacagtacaccgtcgacgcaagactccacgccgttttcgaacaatccggcgaatcagggaaatcattcgactactcacaatcactcaaaacgacgacgtacggttcctctgtacctgagcaacagatcacagcttatctctctcgaatccagcgaggtggttacattcagcctttcggatgtatgatcgccgtcgatgaatccagtttccggatcatcggttacagtgaaaacgccagagaaatgttagggattatgcctcaatctgttcctactcttgagaaacctgagattctagctatgggaactgatgtgagatctttgttcacttcttcgagctcgattctactcgagcgtgctttcgttgctcgagagattaccttgttaaatccggtttggatccattccaagaatactggtaaaccgttttacgccattcttcataggattgatgttggtgttgttattgatttagagccagctagaactgaagatcctgcgctttctattgctggtgctgttcaatcgcagaaactcgcggttcgtgcgatttctcagttacaggctcttcctggtggagatattaagcttttgtgtgacactgtcgtggaaagtgtgagggacttgactggttatgatcgtgttatggtttataagtttcatgaagatgagcatggagaagttgtagctgagagtaaacgagacgatttagagccttatattggactgcattatcctgctactgatattcctcaagcgtcaaggttcttgtttaagcagaaccgtgtccgaatgatagtagattgcaatgccacacctgttcttgtggtccaggacgataggctaactcagtctatgtgcttggttggttctactcttagggctcctcatggttgtcactctcagtatatggctaacatgggatctattgcgtctttagcaatggcggttataatcaatggaaatgaagatgatgggagcaatgtagctagtggaagaagctcgatgaggctttggggtttggttgtttgccatcacacttcttctcgctgcataccgtttccgctaaggtatgcttgtgagtttttgatgcaggctttcggtttacagttaaacatggaattgcagttagctttgcaaatgtcagagaaacgcgttttgagaacgcagacactgttatgtgatatgcttctgcgtgactcgcctgctggaattgttacacagagtcccagtatcatggacttagtgaaatgtgacggtgcagcatttctttaccacgggaagtattacccgttgggtgttgctcctagtgaagttcagataaaagatgttgtggagtggttgcttgcgaatcatgcggattcaaccggattaagcactgatagtttaggcgatgcggggtatcccggtgcagctgcgttaggggatgctgtgtgcggtatggcagttgcatatatcacaaaaagagactttcttttttggtttcgatctcacactgcgaaagaaatcaaatggggaggcgctaagcatcatccggaggataaagatgatgggcaacgaatgcatcctcgttcgtcctttcaggcttttcttgaagttgttaagagccggagtcagccatgggaaactgcggaaatggatgcgattcactcgctccagcttattctgagagactcttttaaagaatctgaggcggctatgaactctaaagttgtggatggtgtggttcagccatgtagggatatggcgggggaacaggggattgatgagttaggtgcagttgcaagagagatggttaggctcattgagactgcaactgttcctatattcgctgtggatgccggaggctgcatcaatggatggaacgctaagattgcagagttgacaggtctctcagttgaagaagctatggggaagtctctggtttctgatttaatatacaaagagaatgaagcaactgtcaataagcttctttctcgtgctttgagaggggacgaggaaaagaatgtggaggttaagctgaaaactttcagccccgaactacaagggaaagcagtttttgtggttgtgaatgcttgttccagcaaggactacttgaacaacattgtcggcgtttgttttgttggacaagacgttactagtcagaaaatcgtaatggataagttcatcaacatacaaggagattacaaggctattgtacatagcccaaaccctctaatcccgccaatttttgctgctgacgagaacacgtgctgcctggaatggaacatggcgatggaaaagcttacgggttggtctcgcagtgaagtgattgggaaaatgattgtcggggaagtgtttgggagctgttgcatgctaaagggtcctgatgctttaaccaagttcatgattgtattgcataatgcgattggtggccaagatacggataagttccctttcccattctttgaccgcaatgggaagtttgttcaggctctattgactgcaaacaagcgggttagcctcgagggaaaggttattggggctttctgtttcttgcaaatcccgagccctgagctgcagcaagctttagcagtccaacggaggcaggacacagagtgtttcacgaaggcaaaagagttggcttatatttgtcaggtgataaagaatcctttgagcggtatgcgtttcgcaaactcattgttggaggccacagacttgaacgaggaccagaagcagttacttgaaacaagtgtttcttgcgagaaacagatctcaaggatcgtcggggacatggatcttgaaagcattgaagacggttcatttgtgctaaagagggaagagtttttccttggaagtgtcataaacgcgattgtaagtcaagcgatgttcttattaagggacagaggtcttcagctgatccgtgacattcccgaagagatcaaatcaatagaggtttttggagaccagataaggattcaacagctcctggctgagtttctgctgagtataatccggtatgcaccatctcaagagtgggtggagatccatttaagccaactttcaaagcaaatggctgatggattcgccgccatccgcacagaattcagaatggcgtgtccaggtgaaggtctgcctccagagctagtccgagacatgttccatagcagcaggtggacaagccctgaaggtttaggtctaagcgtatgtcgaaagattttaaagctaatgaacggtgaggttcaatacatccgagaatcagaacggtcctatttcctcatcattctggaactccctgtacctcgaaagcgaccattgtcaactgctagtggaagtggtgacatgatgctgatgatgccatattagtcacacttcagttggtatgagagtttgtatcattgtatgagtgtttgtgtgtctaacgacgtcggaggaggatagaaagttttttttttgtttccggtgagattagtagagaagagggagattatttgcgttcagctcagctcgccggaaaaaaaacgtaacagtagttgtagagaatttcaagacttttgtttgtgctgtgtaaattgacaactccgagagaaacaaaacaatgagat

SEQ ID NO: 117962 - DNA, 4349 bp, Arabidopsis thaliana
cgacgaccgtatcttccaccacaaactgcttccggctgagacgacggcgatctactccggctaattctgttacttgattctgctctgaattttaacaagcagaatttctcggatagcaggaagaacgggattaattagctcatcgcttggttctctacgtgagatttagttttggattctggagaaatttccgatcgccttcggtttacggcgattggagtgagtaggatacggagaaatctctattttctgtgtttttttcgcgatttaggaaagttaagcattataaagccaaatttcgtcgatttggcattgagattttgagctttgggtggttatagataggttttttgagttaaggttttacgggtaatcctagggtttagttattggggaagagagaggctccgttaatctggtttgttggaagagtctcctggatctgttgtctcgacggatgatttgggtctgtgagctagggctttttatgcttggctgattaggatgccgatgggacgctttctatctttggtccgaggagactcggctgagtcacctcgtgagattacctcacagagtaatatcatcggcgatactggttctaatggttggcttattaggtttttcgattctgctttcttctgtgagtggattgctgttagttatctgtacaagcaccctcatgctggtgttagggattacttatgcaataggatgtatacgcttcccttatcaggtattgagagttatctcttccagatttgctacatgatggtgcacaaaccaagcccatcgcttgataagtttgttatagacatctgtggaaagtcactgaaaatcgcactgaaagctagttggtttttgttggctgagctggaggatgctgacgataatgaaggcatcagcaggattcaagagaagtgtcaaattgcagctactttgatgggtgagtggtctcctctcatgcgtccacagaacgaggtctcaaccccagggagcaagaatcaggtcctaaatagacttttgtcatcaaaacagaagctcttctccttaaagctatctcctcccacccagaagtctttgtcattctcaccttcgccagggaccaacgtgcaggatgatggtagtcagttacctgctgaggacaataagatttttaagaaacttatcccaagtcctaaagtcagagatgctttaatgtttagaaagtcagctgacaaagatgatgaagagagtgaaaaggaaggattcttcaagaggctcttgagggacagcaaaggtgagggtgatgaaccaatacctaactcagagggtttctttaagcgccttttgaaagacaataaatcagaagatgaggacataacaaacagttccgaggggttcttcaagaggctcttgagtagtaaaggagaaagcgaggaattgacatcgagttcagatgggctgtttaaaaggttgttacgagataataagggagatgaagaggaattgggtgcaaattcagacagtttcttcaagagattgttacgggagagtaaaaacgaggacgaggagtcaaacccaaactcagaaggtttttttaagaaattattccgtgacagcaaacctgaagatgataaagttcctaaagaagtggatgatgaggacaaagatgggttccttaagaaacttttcagggaaaaaaatgatgacaaaagacatggtagtgaaaagaatgaagccaatggaacagtgtatgccgataagaaatctggtgaagaggatgagagggaggggtttttcaaaaaattctttaaggaaaaatctgatgacaagaaagacattgtcaaggttgatgacgggaatgaaagtgagggtgatgaatctccagaattttctcttttcaaaagattattccgtatacatcccgaagatgcaaaacctacttcagaaaatgaaaatagcagcaatggcttagttgaaagcagtcctgggacagaaaactttttccgcaagttgttcagagatcgtgaccaatctgttgaagattctgaactgtttggatcaaagaaacacaaggagaaacggccaggctcacctaaacagcgggatgatactccatctggtaagcccccgctaccaaacaatactgcatcacaattcaggaaaggggcttaccacgagtcgttggagtttgtacaagcgttatgtgaaacgtcatatggtttggtagatatctttcccatcgaagatcggaagattggtcttcgggagtctcttgcagagatcaattttcatttatcggaagctgaaatcactggaggaatttgttttccaatggggagaggagtttttcgtgtggtccatattcctgaagacgaatgcattcttttgaattctagggaaaaggcgccatacatgatctccgtagaagttttgaaagcagaaacacccagtgctaaagaatcatcgaactcccagaagctttctaaaggggggattccattggcaaacggggacgcattcttgcaaaagccacctccatgggcttatccactatggactactcaggaggtttatcgcaacagtgctgaccgaatgtcgttatccactgctcaagcaattgatcaagcgatgactcctaagtcagaggtgaaggtgaaacttgtcaatgtaagtctctcagtggaggatcgtacttcagctcttgaatcatttggcgatccaattgatgatgttctgggggaagccccaaggactgggctgaacaatgatcttgaatgggtaagggtggtcgtaacggctgacccaggacttagaatggaaagcattcctgatccatcagtcccacgtaaaaaggaacatcgtcgtgttccaagtactgttgccatggaggaagttagggctgctgcagcgaagggagaggcacctccaggccttcctctcaaaggggcgggtcaggattcgtcggatgcacaaccaagggccaatggtggaatgctgaaggaaggtgatgccttatcaggtgaactttgggagggaaagcgagacagaatacgtaaagcttcaatatatggaaagttacctggttgggacctgcgttctatcattgtgaagagcggtgacgactgtaggcaggagcatcttgctgtgcaactcatttctcacttttatgatatattccaggaagcaggtctacccctctggttacgtccttatgaagtcttggttacatcttcttatactgcccttatagaaacaattccagatacggcttctattcattctatcaaaagtagatatcccaacataacgagcctacgtgatttctttgttgcaaagtataaagaaaactctccaagttttaagctcgcccagaggaatttcgtggaaagtatggccggatattctttggtctgttaccttctgcaggtaaaagatcgtcataatggaaatcttctcttggatgaagagggtcacattatacacattgattttggttttatgctttcgaattctcctggtggcgtaaactttgagagtgccccgtttaagttaacccgtgaacttcttgaggtcatggactctgatgctgatggggttccaagtgagttctttgactatttcaaggtgctatgcattcaaggattccttacatgtagaaagcacgcggaacggattattctcttagttgaaatgttacaggattcgggtttcccttgcttcaaaggtggtccacgaaccattcaaaacctaagaaaaagattccatctaagtttaactgaagagcaatgtgtctcgttggtcctctctctcatcagcagtagcttagatgcttggcggacacgacaatatgattactaccaacgggtcttaaatggaatattgtgatgttccaaagaaccaacctaataagggtaaaaaactcacaacatacattggtatgttgggttagctcataaaacaatacgttttttgaggaacccttttcatagtagcaatcagaatccttccaaaggtgggggaagatgcctgaagagatcgtgtgtgcacgcatgggagaagaaaccggtcacacgtggaggagaaaactacagtttgtgtacagagtatgatttttgcagaggtttgattgttatctttacttacttgctctacttgcaggagaaaagaaggcaaaagcctgaaattttcttcctcccaaaagctcaaaacaaagcccttttacagaggttaaaaagggtaatgttttgttttaaatttgtttctagtcaaaactcatgatgtgatattgttgtataaattgtgtatcatgcggccgcgaattcgatatcaagcttatcgataccgtcgacctcgagggggggccc

SEQ ID NO: 117963 - DNA, 586 bp, Arabidopsis thaliana
  unsure (1)..(586): unsure at all n locations
gacacttgaacactactttcgaactctctctttatctctcttgcaatgaagctctctatgcgtttgatctcagctgttctcatcatgttcatgatattcgtcgccactgggatgggaccagtcactgtggaggcacgcacttgtgagtcgcagagccataggttcaagggtacatgcgtgagtgcatcaaactgcgccaacgtgtgccacaacgaaggctttgtcggaggtaactgccgtggattccgtcgtcgttgcttctgcaccagacattgctgatctacccattctcatgcataattcaagctttgatccatcgtcgtgtgtcacttctttcttatctaatcttccgtacagtaccatgaagtaccgtacattagtgtgttctcaaataagtctttggatttgtgtgtttccggtttaaatgtaatgttaaatcaactaatgactttgagcctttgactagtaataatcaaaatctatgttctgataaaaaaaagcttgatgcatatgctatagtgtcacctaaatctgcggccgagcttnnnnnnnnnnnnnnnnnnnnnnnnnnnnnnnnnnnnnnnnn

SEQ ID NO: 117964 - DNA, 516 bp, Arabidopsis thaliana
gggcgaccacgcgtgcgaacacttatttccaactctgtctctctcaattttctttctctttctccaaacatgaagttctctatgcgtttgatctcagccgttcttttcttggtgatgatattcgtcgccacagggatgggtccagtcacggtcgaggcacgcacgtgtgcgtcgcagagccaaagattcaagggtaaatgcgtgagcgatacaaactgcgaaaacgtgtgccacaacgaaggcttccccggaggtgattgccgtggattccgtcgtcgttgcttctgcaccagaaattgctgatccatcaatcgattctcatgcatgactcaatcgtcgatctattgtgttttgttacttctttccgtcgtctaatattccgtacgacaacatatcgtaacgtgtatgcgtgtttagtgtgttcttgaataagtctttggtttgtgtgttttcagttttaacgcaacgttacatcaaataatggcttttataaaagaaaataaagggttcgaatat

SEQ ID NO: 117965 - DNA, 1232 bp, Arabidopsis thaliana
  unsure (1)..(1232): unsure at all n locations
cggattggatttagtgtgacactatagaagaactatgacgtcgcatgcacgcgtacgtgacccatccgccgaaagaagaaaaaaagcaaagaacacttgaacgttttctagatagagatggaagggaaagaagaggatgttcgagtgggagctaacaagttcccggagaggcaaccgataggtacatcggctcagacggacaaagactacaaggagccaccaccagctccatttttcgagccaggcgagctgagttcgtggtccttctacagagccggaatcgccgagttcatagccaccttcctgtttctatacataacagtattgacagtgatgggagtgaagagagcaccaaacatgtgtgcctctgttggaatccaaggcattgcttgggctttcggtggcatgatctttgcccttgtctactgtactgctggaatctctggtgggcacataaacccagcggtgacatttggtctgttcttggctcgtaagctgtcattgacgagagctgtcttttacatcgtgatgcaatgtctcggagccatctgcggcgccggagttgtcaaaggcttccagccaaatccttaccaaactctcggcggaggagccaacacagtcgctcacggctacactaagggctctggtttgggtgctgagataatcggaaccttcgtccttgtctacacggtcttctccgccactgacgccaagagaagcgctcgtgactcccacgttccgattttggcaccactcccaatcggattcgctgtgttcttggttcacttggcgacgattccaatcaccggaacaggaattaacccagctaggagtcttggagctgcaatcatctacaacaaggaccacgcttgggacgaccactggatattctgggtcggaccattcattggagcagctcttgcggctctttaccaccaacttgtcatcagagccattccattcaagtccagatcctgatttgatttctttctttataaaacttcattgttgcatcttggtttgtaattgagcttgaaaatatttgagagatctggatcatgtgtttattttaattaatggacttgtctttttcttatttgctgtggatgatctggttttatcgttaaatggagtttgatattatgattgatttggtacgataaaaagnnnnnnnnnnnnnnnnnnnnnnnnnnnnnnnnnnnnnggagctgnnnnnnnnnnnnnnnnnnnnn

SEQ ID NO: 117966 - DNA, 1053 bp, Arabidopsis thaliana
  unsure (1)..(1053): unsure at all n locations
attctttctctgatcatcacattattctctctttttcttcacttttctatcgacaaataccaataccccttccgataacatgggtcatgaatggatcgatgcagagagggagttcaaatggagcgaggatgtcaaagttgaaagtgaagtgactgagatcgttcttgttcgccatggagaaaccacttggaatgctgccggaagaatccagggacaaattgaatcagaccttaacgaggttggactaaagcaggctgttgcaatcgctgagaggttgggaaaagaggaaagacctgtagctgtgtattcatcagacctcaaacgagccaaagacactgctcttatgatcgccaaaacttgtttctgtcccgaggtgatcgaagtacctgacttaaaggagaggcacgtgggtagtctccaaggcctgtattggaaagaaggagcagagaaagaacctgaagcttactctgcctttttctcttcccaaaacgacctcgagattccgggaggaggagagagctttgaccaacttgctgatagatccatggatgctcttgagcaaattgctaagaagcacaaaggagagagagtgatagtggtgactcatggaggagtgttgagggcaatttacttaaggatcacacaagcttcctctgccggaaaactcttgaatgcttcagtgaatgtggttcatctccgtgatcaaaaatggatcatcgattcgtggagcgatgtatcacatctatcatccgttggatttcttcaacgtggctttgatggagacgccaagccctagagaacctcctcattcatatcttgtgtcgatctataaagacttctataaataagtatctatttatcttgatgtttctgtgtgctttacttaagatgcgtaatcttcttgttgatcaattcctatcatcttgtaatttgtattactctattaataagagattttcatctttacttaaaaaaaaaaaaaaagnnnnnnnnnnnnnnnnnnnnnnnnnnnnnnnnnnnnnnnnnnnnnnnnnnnnnnnnnnnnnnnnnnna

SEQ ID NO: 117967 - DNA, 1316 bp, Arabidopsis thaliana
  unsure (1)..(1316): unsure at all n locations
tcgccacnnnnnnnnnnnnnnnnnnnnnnnnnnnnnnnnnnnnnnnnnnnnnnnnnnnnnnnnnnnnnnnnnnnnccacgcgtccgtacggctgcggaagacgacagaaggggacagagacaacaaactaaagttggtggtgatagagtgagagagaaacatggaaggcaaagaagaagacgtcaatgttggagccaacaagttcccagagagacagccgatcggtacggcggctcagacggagagcaaggactataaggaaccaccaccggcgccgtttttcgaacccggcgagctcaaatcttggtctttctacagagcagggatagctgagttcatagccactttccttttcctctacgtcaccgttttgacagtcatgggtgttaagagagctcccaatatgtgtgcctctgttggaatccaaggcatcgcttgggcttttggtggcatgatctttgctcttgtttactgtactgctggaatctcaggaggacatattaatccggcggtgacttttggtttgttcttggcgaggaagctatctttaaccagagctctgttctacatagtaatgcagtgccttggagctatatgtggtgctggtgtggttaaagggtttcaaccagggctgtaccagacgaatggcggtggagctaatgtggtggctcatggttacacaaagggttcaggtcttggtgcagagattgttggaacttttgttctggttacactgttttctcagctactgatgctaagagaagccgcagagactcttatgttcctatcttggctccgcttccaattgggtttgctgtcttcttggtgcacttggctaccatcccaattaccggaactggcattaacccggccaggagtctcggagctgccatcatctacaacaaggatcatgcttgggatgaccattggatcttctgggtcggtccattcattggtgctgcgcttgctgctctgtaccatcagatagtcatcagagctattcctttcaagtccaagacataaagtttcctacatattctctgatcatcatcaagctaagaatatatcaatctttaattctatatgctttcttcttgtttcctatgtcatgtgtgatgatctctatatgtaccactagagctttgatcttgtaacagtgtaaatgtgtaatctattatgtatcaatggcattgtatcttgtaacattaattatgtcaatggaagaatacattgtgtacnnnnnnnnnnnnnnnnnnnnnnnnnnnnnnnnnnnnnnnnnnnnnnnnnnnnnnnnnnnnnnnnnnnnnnnnnnnnnn

SEQ ID NO: 117968 - DNA, 693 bp, Arabidopsis thaliana
  unsure (1)..(693): unsure at all n locations
gctttttctattctctctctctctcgcctctataaaaccattctttctctatctcagccactctcattacccattgtagaaaagaagaaaaaaagcaaagaacacttgaacgttttctagatagagatggaagggaaagaagaggatgttcgagtgggagctaacaagttcccggagaggcaaccgataggtacatcggctcagacggacaaagactacaaggagccaccaccagctccatttttcgagccaggcgagctgagttcgtggtccttctacagagccggaatcgccgagttcatagccaccttcctgtttctatacataacagtattgacagtgatgggagttaagagagcaccaaacatgtgtgcctctttttgggaatccaaggcattgcttgggctttcggtggcatgatctttgcccttgtctactgtactgctggaattctctgggtgggcacataaacccagccggtgacattttgggcctgttcttgggctcgtaagctgtcattgacgggagctgttctttttcatcgggatgaaatgtctntggggccatntttggcgcccgagttttaaaaggttccagccaaatcctttccaaattttgggggggggcccaaagtggttgggtagctaagagaggggttttgttttgggcctgnnaattgaccttgnccttnta

SEQ ID NO: 117969 - DNA, 413 bp, Arabidopsis thaliana
ccacctcattcaaaacttgtgtcgatcctataaagacttcctataaataagtatctatttatcttgatgtttctgtgtgctttacttaagatgcgtaatcttcttgttgatcaattcctatcatcttgtaatttgtattactctattaataagcgcttgcggctctttgccaccagcttgtcatcagagcccattccattcaagtccacctcctgagttgatttctttctttataaaacttcattgttgcatcttggtttgtaattgagcttgaaaatatttgagagatctggatcatgtgtttattttaattaatgcacttgtctttttcttaaaaaaaaaaaaaaagggcggccgccgacgtagtgagctcgtcgacccaggaattaattccggcccggtacctgcaggcg

SEQ ID NO: 117970 - DNA, 571 bp, Arabidopsis thaliana
  unsure (1)..(571): unsure at all n locations
gagaaaacagtgtagtccacaggataagttccaacaatctctgcaccagtacctgaaccctttgttcatggtttacactgttttctcagctactgatgctaagagaagtgccagagagctctcacgtcccgatcttggctccgcttcccaatcgggttcgctgtcttcctggtgcacttggctaccatccccatcaccgggactggcattaacccggccaggagtctcggagctgccatcatcgacaacagggaccacgcttgggacgaccgctggatcttctgggtcggtccattcattggtgctgcgcttgcggctctgtaccagcagcttgtcatcagagccattccattcaagtcctgatcctgctttantatcaatctttataacgcttcattgttgcatcttggtttgtaattgagcttgatcatattttagaggtctggatcatgtggttattttaactaatggacgtgtctttttcaaatttgctgtggatggcggccgcgaattcctgcagaccgggggatccactagatctagagcggccgcccccgcggtggagctccag

SEQ ID NO: 117971 - DNA, 521 bp, Arabidopsis thaliana
taggtacatcggctcagacggggcaaagcctacaagggagccaccaccaggctccaatttttcgagccaggcgagctgagtccgtggtccttcctacagagcccggaatcgcccgagttcaatagccaccttcctgtttcctatacataacaggtattgacagtgatggggagtgaagagagcaccaaacatgtgtgcctctgttggaatccaaggcattgcttgggctttcggtggcatgatctttgcccttgtctactgtactgctggaatctctggtgggcacataaacccagcggtgacatttggtctgttcttggctcgtaagctgtcattgacgagagctgtcttttacatcgtgatgcaatgtctcggagccatctgcggcgccggagttgtcaaaggcttccagccaaatccttaccaaactctcggcggagaagaccgtgtagacaaggacgaaggttccgattatatctcagcacccaaaccagagcccttagtgtagccgtgagcgactg

SEQ ID NO: 117972 - DNA, 1061 bp, Arabidopsis thaliana
tgagaatatttcgtccgtcgttgaaacttgagaatagaggcgaatctggttcgagttagggttccaattgaaaagtttgaagctccttttgactctctctctcttctagatctcgacaactctaacctcttcgatttggtggatcttgagaaattgattttagttcaaagcttctgatggctaaaaaggagagacctagacctgagaagttgtctgtgtatctttatatacctaatattgttgggtatatgagagttctcttgaactgtgttgcttttgctgtgtgtttctccaacaagccacttttctctgtcctttatttcttcagcttttgttgtgatgctgtggatggctgggtggctcgtagattcaaccaagtttcaacatttggagctgttcttgacatggtcacagatagagttagcacggcttgtcttctcgtgattctctctcaaatctacaggcctagtttggtcttcctctcattgctggctttagatattgctagtcattggctgcagatgtacagtacgtttctagcagggaagagcagccataaggatgtgaaagacagcacaagctggctttttagactctactatggaaaccggatatttatgtgttactgctgtgtttcttgcgaggttctgtatatcatccttcttctcattgcaaagaaccaatctgaaaatctcctgaatgtcgtagttgctacattaacacagatttcaccactctcttttctcctggctttgacattgttcggttggtcgatgaagcagaccattaatgtcattcagatgaaaactgctgcagacgtttgtgtactgtatgatatagagaagcagcagaagccttgatcatcttcctttgtctcaacctgaaactcttttttttctttcattgtttgttctcttttcactgtggatgtagataattgtttttaatgaaatgaagaaatattgatttgccttttgacaaaaaaaaaaaaaaaagggcggccgctctagaggatccaagcttacgcacgcgtgcatgccaagtcatagctggtctatagt

SEQ ID NO: 117973 - DNA, 1947 bp, Arabidopsis thaliana
ggcacgagagaaacaaaagtttcctccacttgttgtttcaacaaaacaaaatcctcccctttcatatgttagttacgaggcgatgggaatcgcatccggcgaactcgccggacctcatcttacagttttttgggaatgaattccacggctacggtgacgatatgcctgagacattgcggaggttgacggagttgctgggttatgagaaggaagaagacggcgccggaatgaatgcagccaagaaaatcgcggcggaattgaatcgccgaaaagatgatataccggcgttcagacgcttgcggtgtctcaagcttgatcagttgaacgagtttcttttttctacgaagctcaatcccccgatcggtgaccaggttcatcatgacatgcatgctccgctgtcgcattacttcattcacaccagcctcaattcctacttcaccgggaatgtctttgggaaatacagcattttgcccatcattgaagcacttgaacagggtgtgagggtggttgaactagatctgtggccggatggtagaggcagcatctgcgttaggcctagctggaacttcgagaagcctctgaaattgcaagagtgtttggattctattaaagaacatgcctttaccaaatgtacatatcccttgataattacgttcaaggacggcttgaaaccggaacttcaatccaaagctactcagatgatacaacagacatttaatcatatggtatatcaccatgatcctcatagtttggaggtttttccttcgccacaacaactgcgaaataagatactaatatcaagaagacccccaaaagagttgttatatgctaatgatgatgatggaaaggttggggtacggaatggggttgagataagacaacacccggcagatccaaattaccagagtttagtttccttccatgtagtggagccaagaggcatgctacaaaacgtattaacaggcaaggctaacaaaatccaacgaccaggatggtacgaaacagatattataagcttcacccaaaagagattcttgcggacacgtccacaacggaaattgttgatctatgccccctataaaccccaaagagcgtggatgcacggtgctcaattgattgcactaagcaggaaggaggacaaagaaaaactttggttgatgcaagggatgtttagagcaaatggagggtgcggttatgtcaagaagccggatttccttttgaatgctggtcctagtggagttttctatccaacagtgaatccggtggtggtgaagacattaaaggtcaaaatctacatgggagatggatggattgtggacttcaagaagcggataggtcgactgtctaagccggacttatacgttaggatcagtattgccggtgtaccccatgatgagaagattatgaacacgacagtgaaaaacaacgaatggaaacctacttggggagaagaattcacatttcccttgacctatcctgaccttgctttgattagttttgaagtttatgactacgaagtatcgactgcagatgcattttgtggtcagacttgtctaccggtttctgaactaatagaaggaattcgtgctgttccgctctatgatgaaagaggtaaggcgtgcagctcgacaatgctgctcacacgttttaagtggtcttagcctacaagtttctttctcattaccaagtggctcttggtctagtggtgtttcttaaaacctttcaaagttacgctttctaggacccctagttcaagttccatttggaagggggaaagagtttaggcaagcttagattgtgatacggaaataaggtcttggtccagaactagtttgcattgccattttacttttggaacgaaaacaattattcgccattcaagtttctttcacttttattgctgaatttcttttactatcctttcactttaaaaactgtttttccttt

SEQ ID NO: 117974 - DNA, 855 bp, Arabidopsis thaliana
  unsure (1)..(855): unsure at all n locations
nnnnnnnnnnnnnnnnnnnnnnnnnnnnnnnnnnnnnnnnnnnnnnnnnnnnnnnnnnnnnnnnncggaccacgcgtccgctgcgacgcgacgggataggacgaaggaaaaagaagaagagtgaaagttgcagagcgagaaaaaatggcaaccatgtctgctcttcagagctcttttacttctctttctctatctcccagctcttccttcctcggccagcgtttaatttccccgatttccctctccgtcacttctccggtcaagcccgctgagaacccatgtcttgttcttgcaaagctcaagcgttgggaacgaaaagaatgcaaaccaaacagtcttccgattctccacaaaatgcatgtcaagtttggagatacagtcaaagtaatatctggacgcgacaagggtaaaatcggagaggttactaagattttcactcacaacagtaccattgtgatcaaagatgtgaacctcaaaacaaaacacatgaagagccgagaagagggagagcctggtcaaattgtcaagatagaagcacctatccacagctcaaatgtgatgttgtattcaaaagaaaaagacgtagtaagccgggtgggtcacaaggtacttgaagatggacagaaggtaagatatctgatcaaaacaggggaactcatcgacaccattgagaagtggaagctacttaaggaggctaaggataaggaaaccacccaagttgcagttacctccgcatcttagcgtctcatttctttcttcttcagtgcacttttgatataatagacctatgcattggatggatgtattgaatcccttttaaggtaaattataatatttctgctaaactactcacac

SEQ ID NO: 117975 - DNA, 613 bp, Arabidopsis thaliana
  unsure (1)..(613): unsure at all n locations
gaagagtgaaagttgcagagcgagaaaaaatggcaaccatgtctgctcttcagagctcttttacttctctttctctatctcccagctcttccttcctcggccagcgtttaatttccccgatttccctctccgtcacttctccggtcaagcccgctgagaacccatgtcttgttcttgcaaagctcaagcgttgggaacgaaaagaatgcaaaccaaacagtcttccgattctccacaaaatgcatgtcaagtttggagatacagtcaaagtaatatctggacgcgacaagggtaaaatcggagaggttactaagattttcactcacaacagtaccattgtgatcaaagatgtgaacctcaacaacaaaacacatggaggggccggggaagagggngggcctggtcaaaatttgtcaaggttggagcaccttttccccagcttnaaaatgtggtgttgtattcaaaggcaaaaagccgtcgtaagccgggtggggcacaaggtcctttaggttggccggagggtaggttttttncaaccagggggccttttggcccctttggaggggggntcttnggggttnggttggacncccgntngttcccngtntgggtt

SEQ ID NO: 117976 - DNA, 499 bp, Arabidopsis thaliana
  unsure (1)..(499): unsure at all n locations
cagtcaaagtaaatatttggacccgcacaagggtaaaattggagaggttactaagattttcactcacaacagtaccattgtgatcaaagatgtgaacctcaaaacaaaacacatgaagagccgagaagagggagagcctggtcaaattgtcacaaggtacttgaagatggacagaaggtaagatatctgatcaaaacaggggaactcatcgacaccattgagaagtggaagctacttaaggaggctaaggataaggaaaccacccaagttgcagttacctccgcatcttagcgtctcatttctttcttcttcagtgcacttttgatataatagacctatgcattggatggatgtattgaatcccttttaaggtaaattataatatttctgctccctnnnnnnnnnnnnnnnnnnnnnnnnnnnnnnnnnnnnnnnnnnnnnnnnnnnnnnnnnnnnnnnnnnnnnnnnnnnnnnnnnnnnnnnnnnnnnnnnnnnnnnn

SEQ ID NO: 117977 - DNA, 2195 bp, Arabidopsis thaliana
atcatcaagcttgaagaagagagagaagaagaagaaggaaaccagaatgtctacgacgactactgaggcgagatcaccgttgccgttgttgttgagaagaggaaggtcttcgacggcgttatcggcgtcgacggcggaagcaagatcgccgttatcgatactgcagttcagaagaagatcgagcaaagatgtgaggaacataacgtcagtttcgagcagtctcttgcctgcttttgggactttcatcgaagatgataatccttcttccaaacctttcatcgttcttcactttgatcgtcgttacaggttgtgggaattgtttttggtgatattggttgggtattcggcgtgggcatctttgttcgagttggctttcgagaaagctgccgaaggagcgttattgaccattgatctcgtcgttgacttcttcttcgccgttgatatcatcctcaccttttttgtttcctacttggataatactacttacctcaatgtcaccgaccacaagctcatcgccaaacggtacttgaagagcgtggcttttgtgatggacgtagcatcaacgttacccattcaattcatttataaaactattaccggagatgtcggacgaggccaagctttcggcttccttaatttactccgcctctggcgtctccgtcgtgtagccgaactctttaaaagactagagaaagacgcacatttcaactatttcgtgatccgagtcatcaaacttctatgtgtaacgatattttggatacatttggcgggttgcattttatactggatagcctaccattatccaaggcctacggatacatggataggatcgcaagttgaggattttaaggaaagaagtgtatggttagggtacacttactcaatgtactggtccattgtcacactcactaccgtgggttacggtgatttgcatgcagttaatagccgtgagaagacattcaacatgttctacatgcttttcaacattggcctcacttcttatatcatcggtatcatgaccaatctagttgtccatggcgctcttcgtacattcgccatgaggagtgcgatcaatgatatattgcgatacacaagcaagaacaggttaccggatacaatgagggaacagatgcttgcacatatgcagctcaagttcaagaccgcggagttaaggcaagaagaggttcttcaagacttacctaaggccataagatcaagcattaaccaacatctattccgctccatcatcgaagaagcttatctttttaaaggattccccgaaggcctcctcgtccagctggtttcgcaaatacaagcagaatattttccgccgaaaatggagataatcttgcagaatgagattccaacggatttctacgtaattgtatctggaggagtggatataattgcttccaagggtgtgagtgaacaggtattagcgaagttaggtcccggaagtatggcaggagagataggagtagtgttcaacattcctcagcctttcacagtgaggacacgtcgactttcacaagttatcagaattggtcatcataagttcaaagaaatggtgcagtctgataatgacgtcgacgccaaaatgatcattgccaatttcatgacatatcttaagggattgaatgatgagttaaaaaaagaaattccttttcttagagatttattagatgacgcagatgctcaggttcaggaaacagttcagtcagaggaaacaccacaaagtaacgatgaggaaatagttacggtctcaagacatgaaaatggacagatagaagagagaagaagagagggagttccaaaaagagtgataattcatggacaagctcctcctaatcaagataacaaaaacaatggtgattccaacggtaggcttatcattttacctgactctatccaacttctattcgacttagctgagaagaagttggggaaacgaggaagcacgattgcaatggcagatggtgcacatgttgaacaaattgatgctcttcgagaaaacgatcatttatatattttctaattcgtttataaatatatatattcacaattatcacttcccacacaaataatgatacaaaaaaaactatatttttgttagcgtaaggtgcttatgaaaagatgcaaagtcagatatatgaaaatataaggtgaagatcgaattcccaattccactaaaaaaa

SEQ ID NO: 117978 - DNA, 1982 bp, Arabidopsis thaliana
  unsure (1)..(1982): unsure at all n locations
aacggacgcgtgggcggacgcgtgggcggacgcgtgggcggataaaccaaagcgtttagaaaaaaaacagcgataaaaccgaaacatcaagcaaacaaaaaaaaaagagaagagaaattatttttttttgttttcgttttcaaaaacaaaatctttgaattttatggcaacccgtcttctccgaacaaactttatccggcgatcttaccgtttacccgcttttagcccggtgggtcctcccaccgtgactgcttccaccgccgtcgtcccggagattctctcctttggacaacaagcaccggaaccacctcttcaccacccaaaacccaccgagcaatctcacgatggtctcgatctctccgatcaagcccgtcttttctcctctatcccaacctctgatctcctccgttccaccgccgtgttgcatgcggcggcgataggtcctatggtcgacctagggacgtgggtcatgagctctaaacttatggacgcttcggtgacgcgtggcatggttttagggcttgtgaaaagtacgttttatgaccatttttgcgccggtgaagatgccgacgcagccgctgagcgcgtgagaagcgtttatgaagctactggtcttaaagggatgcttgtctatggcgtcgaacacgccgatgacgctgtatcttgtgatgataacatgcaacaattcattcgaaccattgaagctgccaaatctttaccaacatctcactttagctcagtggttgtgaagataactgccatttgtccaattagtcttctgaaacgagtgagcgatctgctgcggtgggaatacaaaagtccgaacttcaaactctcatggaagctcaaatcgtttccggttttctccgaatcgagtcctctctaccacacaaactcagaaccggaaccgttaaccgcggaagaagaaagggagctcgaagcagctcatggaaggattcaagaaatctgtaggaaatgccaagagtccaatgtaccattgttgattgatgcggaagacacaatcctccaacccgcgatcgattacatggcttattcatcggcgatcatgttcaatgctgacaaagaccgaccaatcgtttacaacacgattcaggcgtacttgagagacgccggtgagagactgcatttggcagtacaaaatgctgagaaagagaatgttcctatggggttcaagttggtgagaggggcttacatgtctagcgaagctagcttggcggattccctgggttgcaagtcgccagtccacgacacaattcaggatactcactcttgttacaatgattgtatgacattcctgatggagaaagcatcaaacggttctggtttcggtgtcgttctcgcaacacataacgctgattcggggagacttgcgtcgaggaaagcgagtgacctcgggatcgataaacagaacgggaagatagagtttgcacagctatatggtatgtcagatgcattgtccttcgggttaaagagagcagggttcaatgttagcaagtacatgccgtttggacccgtcgcaaccgctataccgtatcttctccgacgcgcttatgagaaccggggaatgatggccaccggagctcatgaccgtcaactcatgaggatggaacttaagaggagattaatcgccgggattgcgtaaagagagagtatggagccattaaatgaaattgggaaatgtagatgaataaatttcttctatgtagtttaagaaattgaaaacaaaaaattataatataagaaatggagtaggtaagaacatttcctgtggctaaatatttttcatgagggactatgtttttactatcaatatatcattcacaaatgtatattcaccttatcaataaaaatgctttttacttttttaaaaaaaaaaaaaaaaaaagggcggccgctctagatttggatccaagcttacgtacgcgtgcatgcgaagtcagagctnnnnnnnnnnnnnnnnn

SEQ ID NO: 117979 - DNA, 545 bp, Arabidopsis thaliana
  unsure (1)..(545): unsure at all n locations
aatacgacttctatagggaaagctggtacgcctgcaggtaccggtccggaattcccgggtcgacccacgcgtccggttgcaagtcgccagtccacgacacaattcaggatactcactcttgttacaatgattgtatgacattcctgatggagaaagcatcanacggttctggtttcggtgtcgttctcgcaacacataacgcttattcggggagacttgcgtcgaggaaagcgagtgacctcgggatcgataaacagaacgggaagatagagtttgcacagctatatgggatgtcagatgcattggccttcgggttaaagagagcagggttcaatgttagcaagtacatgccgtttggacccgtcgcaaccgctataccgtatcttctccgacgcgcttatgagaaccggggaatgatggccaccggagctcatgaccgtcaactcatgaggtagttaacacccttgattagttctttaaccatatagtttagttaatagattttggatttggtttactaatgttggtattggttattgcaggat

SEQ ID NO: 117980 - DNA, 1957 bp, Arabidopsis thaliana
  unsure (1)..(1957): unsure at all n locations
gaatctcccatctgttgattctgaggtcagtttaaaatctgaatacaaggattcatcttcactggcaaagatccagggtcagctggagaatttcccaacttcttgaaccaaccaagaactcggtgttcggctgtggggtcatcatgggccacaactacgctaatccattcatcttcagctcctatgttaaatgctactacccatgtctctcgttcttatgttgaagctgattcgaatgcaaatcctcatgctgttcaaagtcaagggaacttgccttcttgttgtccgtcttccaaggtcagcaacatactacatcccaataaggatgccactgcgtctgagatgccagcttcaactaatgatccagaagtaagagtcaaagagacagatacgtccaagcagcaacagatcaccacaggacttgaagctccagtgggatcttccatttatgggagcgacggacaagcgaatcgtcgtctgcctgaggagttgcataccagtgttagctcacagccacaaaaatcagataagcatgaaaaggttgcaagtagcaaagggccatcagcgcctcgtaaaagaaattatgatccagacttgttctttaaagtcaatgggaagctgtatcagaggcttggcaagataggaagtggaggaagcagtgaagtccacaaggttatttcttcagattgtaccatatatgcgctaaaaaagatcaagctcaagggtcgtgactatgctacagcatatggattttgccaggaaattggatatctaaaaaaactgaaagggaaaaccaacatcattcagcttatagactatgaggtcacggataagactttactccaggaggttttgaatggcacaatgagtaacaaagatggaagagttaaggaagatggatttatatatatggtactagaatatggagaaatcgatctggctcacatgttatcccaaaaatggagggaaatcgaaggatctgaccggacaattgatgaaaattggcttcggttctactggcagcaaatacttcaagctgtgaacaccatacatgaggagcgtattgtgcactctgatttaaaacctgcaaatttccttcttgttcgaggctttctaaaacttattgattttggtatcgctaaggccatcaatagcgacactacaaatattcaacgagattcacaggtggggactttgagttacatgtcaccagaagcattcatgtgtaacgaaagcgacgagaatgggaacactataaaatgtggaagaccatcagatatttggtcacttggttgcatactataccaaatggtatatggaagaacaccttttgcagattataagaccttctgggcaaagttcaaagtcataactgatccaaaccacgagattacttacaatcaactctcaaacccgtggcttatcgacctaatgaagaaatgtctagcttgggaccgtaaccaaagatggagaatccctgagcttctccaacatcctttccttgcgccacccatcccacacgagcctcaagtgaaaaccattaaattgttcagtctcatagctgaatcttgtggtagtgatgacgataaagcaaattccatgatttctcagcttgagcaactgctttcaaatcctgctcctcgtccaagaaatgatgtgttagattcaagagatcaaaatcagcaacttctctctcgagtttcagaactttgtattcaactccaggatcggttacaaggtcttgaaggagaaaattagtaagcagtgctgatatgattctacggcttttggatcttgtaaattggtatgttaattgttagatttggaaaaacgacgtttgcttataatgtcttgtttgatttcttgtattggaatgtatcattttgggtgctcgtctaaaaaaaaaaaaaaannnnnnnnnnnnnnnnnnnnnnnnnnnnnnnnnnnnnnnnnnnnn

SEQ ID NO: 117981 - DNA, 2449 bp, Arabidopsis thaliana
  unsure (1)..(2449): unsure at all n locations
gtaaaccctagcaattgtcgtcctcttttgtcgtctctccctgctttcgcacttcatagcctcaatctctcaacaagcagaagagattcgattctccattatcttccttctaaatgccttccctaatgttatctgataagaaagaggagaagaagatgaagaagaagatggctttggataccccagagcttgattctaagaaggggaagaaggagcagaagctgaaactatctgattcggatgaagaagagtcggagaagaagaagagtaagaagaaggataagaagcgtaaggcttccgaggaggaggatgaagtgaagagcgattcaagctcggagaagaagaagagcagcaagaaggttaagttgggcgttgaggatgttgaagttgataaccctaatgctgtttctaagtttcggatttctgcgcctttgagggagaagcttaaggcgaatggtattgaagctcttttcccgattcaggcttccacgtttgatatggttctcgatggtgctgatttagttggacgggctcgtactggtcagggtaaaacattggcttttgtgttgcctatattggaatctttggttaatggacctgccaaaagcaaaaggaagatgggatatggcaggtcaccaagtgttttggtccttttaccgaccagagaattggccaagcaggtggctgctgactttgatgcatatggaggatcacttgggttaagttcatgttgtctctatggaggtgatagcataccagtccaggagggtaaattaaagagaggtgttgacattgtagttggaacccctggtcgtattaaggatcatattgaaagacaaaaccttgatttcagctatttcaaattccgtgttcttgatgaagctgatgaaatgttgaggatgggatttgttgaggatgttgaacttattttagggaaagtggaggattctactaaagtccagactcttctcttcagtgctactttgccatcatgggtgaaaaatatctctaacaggtttcttaaaagagaccagaagactattgatcttgttggtaatgataaaatgaaggccagtaatagtgttcgacacattgctattccttgtaataaggcagccatggctcggttgattcctgatattatcagttgctatagcagtggaggccaaactattattttcgctgaaactaaagttcaagtttctgagctttctggtttgttggatggatcaagagccttgcatggtgaaatacctcaatcacaacgtgaggttactcttgctggatttaggaatggcaagtttgcaacattggtggctacaaatgttgctgctcgtggtctagatatcaatgatgtgcagttaattatccagtgtgagcctccacgtgaagttgaagcatatattcatcgttcaggccgaacaggaagagctggcaacacaggagttgcggttacactctacgattctagaaagtcgagtgtatccaggatcgaaaaagaagctggtatcaaatttgagcaccttgctgcacctcaacctgatgaaattgccagatctggtggtatggaagctgctgagaaagttaaacaagtgtgtgacagtgtggttcctgcattccttgaagctgccaaggaattattagaaacttctggtttatcagctgaagtactcctcgcaaaagctcttgcaaaaactgcgggcttcactgagataaagaaaaggtcacttcttacatcaatggagaactatgtgacactacatcttgaagcagggaaaccaatatactcgccatcatttgtttatggactgctaaggagagttttaccggatgacaaggtggaaatgattgaagggttatctctaacagcagataaaacaggagctgtgttcgatgttaagcaatcagatctagacttgttcattgcaggagcacaaaagagtgctggaagtatgagtttggaagtggttaaggtgatgcctaaactccaggagagagaaccattgccacaaaaaagattcggtggtggtggcagaggaaatcggtttggtggtggtggaggaaatcggtttggcggtggtggtggcagaggaagaggaggcagtggtggtagaggccagagatattgaaaactggaacccaacttctcctttctatataaaaagaaactaaactccgtcttataatttcattactatcttcttccgctgatgttttctacactataataggtggcttttctgtgttttccattttctttccttgaacaaacttatggaggctctcttgtaccctcttatcaattttgtgtaatgttggatgataatgatgattaaattataacttaaaaaaaaaaaaaaaaaagnnnnnnnnnnnnnnnnnnnnnnnnnnnnnnnnnnnnnnnnnnnnnnnnnnnnnnnnnnnnnnnnnnnnnnnnnnnnnnnnttcc

SEQ ID NO: 117982 - DNA, 1710 bp, Arabidopsis thaliana
tctaaaccctaaaagaagaacgatgccggctccgacgacggagatcgaacccatcgaagcacagtcactgaaaaagctcagtctcaaatccctcaaacgatcacttgaactcttctctcccgtccatggccaattccctcctcctgacccggaagccaagcagattcgtctcagccataagatgaaagttgcgtttggaggtgtagaacctgttgtgagtcaacctccacgtcaacctgaccgcatcaatgagcagccaggaccttcaaatgctctttccctcgcagctcctgaagggtctaagagtacgcaaaagggtgcgacagagagtgctattgttgttggtccaactttactgcgtccaatactgcctaaaggcttgaactatacaggttcctcagggaagagcaccaccattatacctgcaaatgtatcttcatatcaaagaaatctgtcaactgctgcattaatggagagaataccaagtagatggccccggccagagtggcatgcaccatggaagaattacagggtcattcaggggcacttgggttgggtcagatctgttgcgtttgacccgagtaatgaatggttttgtactggttcagctgatcgtaccatcaagatatgggatgtagcaactggagttctgaagctaacacttactgggcatatcgagcaagtacgaggcctcgctgtaagcaatcgacatacctatatgttctctgctggtgatgacaagcaagtcaaatgctgggaccttgagcagaataaggttatccgatcttatcatggtcacttgagtggtgtctattgcttagctctgcacccaactttggatgttttattaactggggggcgagactctgtctgcagggtgtgggatattcgtaccaagatgcaaatttttgcactctcaggacatgacaacaccgtttgttctgtatttactcgtccaacagacccacaagttgtcaccggatcccatgacacgaccattaaattttgggaccttcgatatggaaaaacaatgtcaacgctaacacatcataagaaatctgtccgagcaatgaccctccatcctaaagagaatgcctttgcttctgcatcagctgacaacaccaagaaatttagccttccaaagggagagttctgccacaacatgctttcgcaacagaaaaccataattaatgcaatggctgtaaacgaggatggtgtgatggtcactggaggtgataatggaagtatatggttctgggactggaagagtggtcacagtttccaacagtcagaaactatcgtacagcctggttccctggagagtgaagcgggtatatatgcagcgtgttatgataatacaggttcaagattggtaacatgcgaggctgataagacgataaagatgtggaaagaagatgagaatgcaactccagaaactcatcctatcaatttcaaaccaccaaaggagattaggcgcttctaaataacttgtatctgtaactcaaagctcttgttggaatctcactaatctcttcatgattctgtttcctagatcaacttttgagaggggacctttgttttgtggtggggaggaaacaaaaggccatgtactttatgtattttaagggcatttgtaattttttctatcaacaataatagatcatgtattgttgtttatgttgagagaactttgttacttttaaaaaaaaa

SEQ ID NO: 117983 - DNA, 1574 bp, Arabidopsis thaliana
  unsure (1)..(1574): unsure at all n locations
ttcttcgtttactccttcctagatcgatattatacacacatgcgtgtgtattggatctcacgatttcttatcaatggaactcgcttctctttctcagatccccatccaaatcgttttataggtagattagatagataaactacggatatactcgaactctatccatttacggtattgatttggaaatatggacaagtatgacgttgtcaaggatctgggagctggaaatttcggtgtggctcgccttctcaggcacaaggacaccaaagagcttgttgccatgaaatacatcgagagaggtcgcaagatagatgagaacgtggcgagagagattattaatcacagatcacttaaacatcctaatatcatccggttcaaggaggtgatcctgacacctactcatcttgctattgtgatggagtatgcttctggaggagagctctttgatcgaatctgtactgccggtagatttagtgaagctgaggctaggtacttctttcaacagctgatttgtggtgttgattactgccattccttgcaaatatgtcatagagacctgaagcttgagaacacactgctcgatggagcccctgctccgcttttgaaaatctgtgattttggttactctaagtcatctatactacattctaggcctaaatcaactgttggaactccagcttacatagcacctgaagttctttcacggagagaatatgatggcaagcacgcggatgtgtggtcatgtggagtaaccctttatgtgatgctggtgggagcttacccgtttgaggaccctaatgatccaaaaaacttcaggaaaacaatccagcgcataatggctgtacaatacaagatcccggactatgttcacatatctcaggaatgcaaacatcttctctctcgcatattcgtcactaactctgctaagagaatcacacttaaggagatcaagaatcatccgtggtacttgaagaatttgccaaaggagctgctagagtcggctcaagcggcgtattacaagagagacacaagcttctctcttcaaagcgtagaggacataatgaagatagttggagaagcaaggaatccagctccatcaactagtgctgtcaaaagctcgggctcaggagctgatgaagaagaggaagaggacgttgaagctgaagtggaagaggaagaagatgatgaagacgaatacgagaagcatgtcaaagaggcacagtcttgtcaagagtctgacaaagcttaaaaagaaaaatgctctctgtttctcttactttatttcttcttcaagaacactccttggtgagttggtgacttgcttctggtaaaaagaaaaacacatttgtcaaacgcaaaggctgtaaactacgtgctggttgtttcacttttagattgatgtcgttgtactgagtaatgggcatgaaacagaaggtttatattattatatgatactatactataggttttcgtctaaaaaaaaaaaaaaaggnnnnnnnnnnnnnnnnnnnnnnnnnnnnnnnnnnnnnnnnnnnnnnnnnnnnnnnnnnnnnnnnnnnnnnnnnnnnnnnnnn

SEQ ID NO: 117984 - DNA, 1369 bp, Arabidopsis thaliana
acccacacgtccggtttgggtgagaaaacaccccttcggagaggagcaaagcctctcctggggaagaagaagaagaacacgactttttgcttcttctttttaatgcagattttctaaaggtcttcgtaaattttgcgtctgattatcaaattaggttttttttgttgtttccattagttgtctcattgtctgtgaagagaaaggaacagaggaaaatgtcagacctagacaagcaaatagagcagcttaaacgctgcgaggctttgaaggaatcagaagtgaaggctctttgtcttaaagctatggagattctagttgaagagagcaatgttcaaagagtcgatgctcctgtcactatatgtggcgacattcatggacagttctatgacatgaaagagcttttcaaagttgggggtgattgccctaagacccattatttgtttcttggagattttgttgaccgaggtttttattcggttgagacatttctacttcttctagctctcaaggttagatatccagaccgtataactctcattagagggaaccacgagagccggcagattacgcaggtatatggattttatgatgagtgtctgcgtaaatatggctctgtaaatgtttggagatactgcacagatatctttgactacttgagtctttcagctcttgtcgagaacaagatattttgtgttcatggaggtctctctccagctattatgactctagaccagatcagggctattgatcgaaagcaagaagtaccacatgatggtgctatgtgtgatcttttatggtctgatccagaagatattgtcgatggttggggattgagtccccgtggtgccggattccttttcggcggcagtgttgttacgtcttttaaccacttaaacaacattgattacatatgtcgagctcatcagctagtgatggaaggttacaaatggatgttcaatagccagatagtcactgtttggtctgccccaaattactgttatagatgcggtaatgtagctgcaattctagagctcgatgagaatctaaacaaagagtttcgtgtcttcgatgcagccccacaagaatcgagaggagctctagccaagaaacctgcacctgattatttcctgtgagacgcaagtgaatacagaaactggttccttcttctcattgcagagcaagaaagctacccaaaatcatcggtgtataggttgtaaaaatgcaaaagaatctacaatccatgtgttgccaaagagatctctactcaagggtccgtttgagtagaatctttgtgtcttaaaaaaagctttttttttttttttccttctcttttgtttgtaatgctacttttacaaaaagaaaattgttt

SEQ ID NO: 117985 - DNA, 1435 bp, Arabidopsis thaliana
gagctaaatctctctccttgggaagaagacgacgagcttaatacattcgacagtggagaatatcagattctttttggcgagggttggttgattccttcttattcatcagattaaggatcgtttccggtggctgaagagtaatagaaggaggaagaagaggagaggagaggtaaaaatgtcagacctagatcggcaaatagggcagcttaagcgatgcgaaccattgagcgaatcggaggtgaaggctctttgcctcaaagccatggaaattcttgttgaagagagtaatgttcagagagttgatgcccctgtcactttatgtggtgacatccatgggcagttctatgatatgatggagcttttcaaagttgggggtgattgtcctaagaccaactatttgtttatgggagattttgttgatcgtggatattattcggttgagacatttctacttctactcgcactcaaggttagatatccagaccgcataactctcatcagaggaaaccatgaaagcaggcaaatcacacaggtttatggattttatgatgagtgtttgcgtaaatatggctcttcaaatgtctggagatactgcaccgacatttttgactacatgagtctttcagctgttgtggagaacaagatattctgtgttcatggtggtctttctccagctattatgactcttgatcagattaggacaattgaccggaagcaagaagtaccacatgatggtgccatgtgtgatctcctatggtctgatcctgaagatattgttgatggctggggattgagccctcgtggtgccggattcctttttggtggcagtgttgtcacgtcttttaaccactcaaacaacatagactacatagcccgtgcccatcaactagttatggagggttacaaatggatgtttgatagccagattgtgacagtgtggtcagccccaaattactgttacagatgcggtaatgtggcttcaattctagagcttgacgagaatctaaataaagaattccgtgtgtttgatgcagcccagcaggactcgagagggcctcccgccaaaaagccggcccctgattacttcctataatgggcaaaacttcgaaaaccttattcccaaagtcgaactagcgtcaatattcaactccgttgaagaggaagagaattactattcgttcagtgtttaggttgcagtgcagaagaatatacaatagagttgtttcaggcgagctctacctaggccacaaagactgatcgaactggggttgtctaaaaaagatattgttgttgttgtttccggttttggtgtaactgtagtcaaaagagtgtttgtgtattggtagttaaagagtgattttgtcctgattcaagtttgcactttcttaggaggataagacctcaaacagttttggagctcacagttatatcaata

SEQ ID NO: 117986 - DNA, 1907 bp, Arabidopsis thaliana
  unsure (1)..(1907): unsure at all n locations
ggtctctacgactcactattnggaaagctggcccgcctgcaggtaccggtccggaattcccgggtcgacccacgcctgcgcccacgcgttcgcggacacgtgggcggctcagacccaccaataccaattttttaaagagatttctgtcacaagtaagaaagaagcactaattacaaaaaaaaagaaaaagaatcaatcttttgttcttcgattcgatttctaatcaattagattgtttttgttttgtttaacatcagttgcgaatcgagctggattcttgggctcgctttttctttcaatcaaaagtttcgatattagtgaaggataaaattcgctaaaaaaagagaattttttttgttaaaaaaattataaaagctggctttctcaaaatttctccatgtggtcgacgaagaagacgaagaagacgaagaagaaagagaaagtctcttagcaaacatgaccgccaccgaagctaagaatcgcaaaatcaatgtcggagatggagatgacgttgttgatatcgaaatccctgacactgctcatcaaattagcagcgattcatggtttcaggtggcgttcgttttgaccaccggtataaacagcgcgtatgtgttgggatattcaggaacaattatggttcctttaggttggattggtggtgtggttggtcttcttattgctactgcaatctctctttatgcaaacactctcatagctaagcttcatgagtttggtggcagaagacatattcgctatagagaccttgctggattcatttacggtaggaaggcttatcatcttacatggggattgcaatatgttaatcttttcatgattaattgtggattcattatcctagctggttccgccttaaaggctgtttatgtgcttttcagggatgatcataccatgaaactacctcattttatagccattgctggtttgatttgtgcgattttcgctattgggattcctcatttatcggctcttggggtctggcttggagtttcgaccttcctcagtctcatctatattgttgtggcaatcgtgctatcggttagagatggagtaaaaacaccttcaagagattacgagatacaaggatcatcattgagcaaactttttaccatcacaggagcagccgcaaatctggttttcgcattcaacaccgggatgcttccagaaattcaggcaacagtgaggcaaccagttgttaaaaacatgatgaaggctctatactttcaattcacagcgggtgttttaccgatgtacgcagttacattcatcggatattgggcttacggatcctcaacctcgacctatctactaaacagtgttaatggcccactctgggtcaaagcccttgctaacgtctctgctatccttcaatctgttatctctttgcacatatttgcgagtccaacatatgagtacatggacacaaagtatgggatcaaaggaaacccatttgcgataaagaacttgctgtttaggatcatggcgagaggcgggtacatagcggtaagcacgcttatctcagcgctgctgccgttcctcggtgacttcatgagcctaactggtgcagtgagcacattccctctcacattcattctagccaaccatatgtactataaggcaaagaacaataagctgaatgctatgcaaaagctatggcattggcttaacgttgtcttctttagtttgatgtctgttgctgcagccattgcagctgtcagactcatcgccgttgattccaaaaatttccatgtttttgcagatttgtaattcattatattatatagtcaattgtgtatccttcattcttaggcaggtttatttctcctgtaagcttgtattctctctctctttgtcttaccattagagcctaaataaataaatcaagttct

SEQ ID NO: 117987 - DNA, 1791 bp, Arabidopsis thaliana
cccccccgtccggacgtatcgatcttgctgacccatcaattaaattttgacccaaaaggtcaaattcactataagaaaaacagaattcatttcatcaaaattccatttcacactttttctgtctgttacgattcttgcttgatttctttctaaacaaagcaaaagttgtctttttggagttgtgagcaactaattctctgaaattgaggaagagaaagcgagaaggtttttttggagtcagagacagaagaagaatttaacagattcttgtcggaaacatggatacgagtgaagcaaggaaccgtaaagttgttgcagttgaacaattcgatctcgaagtccctgagactgctcatcagattagcagcgattcatggtttcaggtagcttttgttctaacgaccggtataaacagtgcctatgtgttgggatattccgggacagtcatggttcctttgggttggattggtggtgtggttggtctcattcttgctaccgcaatctctctttacgcaaacactcttatcgccaaacttcatgagtttggtggcaaaagacacattcgttacagagatcttgcaggcttcatctatggtaaaaagatgtatcgtgttacatggggattgcaatatgtcaatcttttcatgattaattgtggcttcatcatacttgctggttcggccttaaaggctgtttatgtactttttagagatgatagtctcatgaaactgcctcacttcatcgccatcgcgggtgttgtatgcgcgattttcgcaatcggtattcctcatttatcagctcttggaatctggctaggagtttcaacaatcctcagcataatctacattattgttgcaatagttctatcagctaaagatggagtaaacaagcctgaaagagattacaacatacaaggatcatcaataaacaaactctttaccataacaggagcagctgcaaatctagttttcgcattcaacacgggaatgctcccggaaatacaggccacggtgaagcaaccggtcgttaaaaacatgatgaaggctctgtattttcaattcactgttggtgttttacctatgtacgcggttacattcatcggatattgggcttacgggtcctcgacatcgacttatctcttaaacagcgtcagtggacctgtttgggtcaaagcactcgctaacatttcagcttttctccaatctgttatctctttacatatttttgcaagtccgacttatgagtatatggacacaaagtatggagtcaaaggaagtccattggcaatgaagaatctgttgtttagaacagtagcaagaggaagctacattgcggtgagcactcttctctctgcgcttttaccgtttctcggagatttcatgagccttaccggagcgataagcacgttccctctcacattcatattagcgaatcacatgtatcttgttgctatgaatgatgagcttagtcttgtgcaaaagctatggcattggctcaatgtttgcttctttggattaatgtctcttgctgctgctattgctgctgttagactcatctctgttgactccaagaacttccatgtttttgctgatgtttgattaaaatgtcttcgacatttttaacgatgtaatctttataccaattagaaaaaatttgtaatccttttgttgttacttttattatttcaaatgaaagaaattttttataacataatatataaaaaaaagggcggccgctctagaggatccaagcttacgtacgcgtgcatgtgacgtcatagatcttctatag

SEQ ID NO: 117988 - DNA, 1137 bp, Arabidopsis thaliana
  unsure (1)..(1137): unsure at all n locations
ttttttagtgagagaaacattgatttaagacaaggattcgagtgattctcatacataaggaaacagttttggagaaacttcaaacacgagtcatgattttgacatcaaaacacaaacccggaaagcttcgtctgccatttttcattcttctaagccctagctcaaagctttctctctcaaatccgccatgactaaacagcacgcgaactggtctccttacgataacaatggaggaacatgtgtggccatcgctggatcggattactgtgttatcgccgccgatactcggatgtctactggttacagtattcttagtcgcgattactccaaaatccataaactagcggacagagctgttttgtcttcctctggcttccaggctgatgtgaaagctttgcagaaggttctcaaatccagacacttgatctatcaacatcagcataacaagcagatgagctgtcctgcaatggcccagcttctctccaacacgctttatttcaagcggtttttcccctactatgcctttaatgttctaggagggcttgacgaggaaggaaaagggtgtgtctttacttacgacgctgttggctcatacgagagagttggatacggtgctcaaggttctggttccacactcatcatgcctttccttgacaatcagctcaagtctccaagtcctcttttgctacctaaacaggattcaaacacgcccctttccgaagctgaagcagttgacttggttaaaactgttttcgcatctgccacagagagggatatctacactggagacaagcttgagattatgatacttaaggccgacggtatcaagaccgaactcatggacctgaggaaagactaagctcctttagtgcatttagccaaccttatcggtttgttatttcacttcaacatcgagcttcctgagttgtagaactcgtatgaaatgctactgggtttgatattttacagttaaaatcatgactcgtgtttgaagtttctccaaaactgtttccttatgtatgagaatcactcgaatccttgtcttaaatcaatgtttctctcactatttaatggcaatgtttttacataaaaaaaaaaaaaaaaaaaggccgctntagaggatccaagcttaggtag

SEQ ID NO: 117989 - DNA, 695 bp, Arabidopsis thaliana
  unsure (1)..(695): unsure at all n locations
aagaccgaactcatggacctgaggaaagacttaagctcctttagtgcatttagccaaccttatcggtttgttatttcacttcaacatcgagcttcctgagttgtagaactcgtatgaaatgctactgggtttgatattttacagttaaaatcatgactcgtgtttgaagtttctccaaaactgtttccttatgtatgagaatcactcgaatccttgtcttaaatcaatgtttctctcactatttatggcaatgtttttacatagatcacattaagatatttaatagacaagaatagaatctggaaactcttttcttcagaagctgttctctgatacccatcccttcttctctagctcttgtcgcaatgcctttattcgctttctattgacatcaaagtcgaagttccctttacgggatgcagatcgatattccactttcgagttcttcccaggagtgaacaagaattcaacatcgtctacnaaccccaagattggactttcatattccacatgaacgtagtcatccttcttctccacaatccgcggtgtaaatttatccgggttcaccgacttaatcacattaagaagcncttcatgnnactggcnggtcacagggggtttccttccnccaatanagtccatgggggngataaggacncgntcacnggtatcccagagnggggtacagtataggg

SEQ ID NO: 117990 - DNA, 1298 bp, Arabidopsis thaliana
acaagaagttataaaccaatacatagaagaaaacttccaaccccaaaaaatgatgaagggtgccaagttttcatctcttcttgtgcttttctttatttttccgatcgcatttgctcaactgagagtcgggttttatagtcaatcatgccctcaagccgagactatcgtacgcaatctggtgcgccaacggtttggtgttaccccaaccgttaccgccgctttgctccgtatgcatttccacgactgtttcgttaagggctgtgacgcttctctcctcattgattcaaccaattccgagaaaactgctggaccaaacggaagcgtcagggaatttgacctgatagaccggatcaaggctcagctagaagctgcatgcccttccacagtctcatgtgctgacatcgtcacattggccacacgtgactcggtggccttagccggaggcccaagctacagcatccccacgggaaggcgtgacggtagggtctcaaacaatcttgatgtaaccttaccgggtccaacgatctccgtctctggagccgtgagtttattcacgaacaaagggatgaacacgttcgatgcagtagctcttttgggtgcacacactgttggtcaaggaaattgtggtctctttagtgacagaatcactagcttccaaggaactggacgaccggacccgtccatggaccccgctttggttaccagcctaaggaacacatgcagaaatagcgcgacggcggcactagaccagtcgagtccattgagattcgacaaccagttcttcaagcaaatccgtaaaaggagaggagtgttgcaagttgaccaacgcctcgcatccgacccacagactcgtgggattgtggctcggtatgctaataacaacgccttcttcaagcgtcagttcgttagagcaatggtgaagatgggagcagttgatgtgcttactggtcgtaacggtgagatcagaaggaactgcaggagattcaactaatgaactacagaagcgtggatataatattacatttgatacaatatatttcaaatcttctttatatttttactaattcatttttggttttggttggggttttcttgcataaataaggcttttcttaaattggatggtttcgattttcgagaaagattactatatattatattgttggtctgcatttggtggatgtatcttaagtttacaaataatttgtgatattgaaatattgatatgtatctttatcatggttaatcatatatatatatatatgaatattgtttttcataggacgaccgctataaag

SEQ ID NO: 117991 - DNA, 1614 bp, Arabidopsis thaliana
  unsure (1)..(1614): unsure at all n locations
atgatacttccnnnnnnnnnnnnnnnnnnnnnnnnnnnnatttactataaccttcaaattaagcttcttttattttatgaaacctcgcgtccggaaaactccatttccctttatttaaggaggctgcattgcttgctcactgactcaactcaagagtggtgtagtgagagaagaaagatagagaaaaaaaatgggaggcaaaggtgtgatgatggtggcgatactttgcctttgggcactctctgcaacatctgaagcagtaacagaggctgagccaggtttgatgatgaacttctacaaggacacgtgtcctcaggccgaagacatcgtccgtgaacaagtcaaactcctctacaaacgccacaagaacaccgctttctcttggctccgtaacatcttccatgactgcgccgttgagtcatgtgatgcgtcgcttttgctggattcgacaagaagagagctaggagagaaagaacacgacaggagcttcggacttagaaactttaggtacatcgaggagatcaaggaagctctcgagagggagtgtcctggtgttgtctcatgttctgacattctcgtcttgtccgcaagagaaggcatcgaagcagtaggaggaccttatattcctttgaagacaggaaggagagatggacttaaaagcaggacggatatgctcgagtcatatcttcccgaccacaacgagagtatctccgtcgttcttgaaaagttcaaatccatcggtatcgacactcccggcctcgtcgccctcctagggtcacacagcgtgggaagaactcactgtgtcaagctggtccatcgtttgtaccctgaggtggacccgtccttaaacccggaccacgtccctcacatgctacacaagtgtcctgactcgatccctgacccaaaggcggtccagtacgtgcgtaacgaccgtggcacccccatggtgctagacaacaattactaccgtaacatcctagacaacaagggtttgctccttgtggaccatcagctcgcacacgacaaacgaaccagaccaatcgttaagaagatggctaaggaccaggcctacttcttcaaggagttcactagggcaatccagatcttatccgagaacaaccccttgactggctctaagggtgagatcaggaagcaatgtaatctcgcaaacaagaaccattgaagttggaaaaagtgagaaagacaggggctctggtgtgttgagttctctgcttggtacgaaccaagatgaataaaaaaatcttttaagttaaatcaaagaaagggtgatgatgaatacatcatggtagtgaccacctccttcttttgtgtgttcagccttaatgctttaattatgatgttagtggctttgagttatttaatctaaatgttggctcttcgttgattttgggtttgtggtgggggtgatataatgataatggaaaggatgtatgatatgatggatggtgttgggtatcatgtatgacgatgtaatgataagtaaacatgtccgaatcttttgataaaaaaaaaaaaaaagggcgaccgctctagaggatccaagcttacgtacgcgtgcgtgcgacgtcataaatcttgctatagttgcaccta

SEQ ID NO: 117992 - DNA, 1020 bp, Arabidopsis thaliana
cagctctatacgactcactataggaagctggtcgcctgcagtaccgtccgggatttccgggtcgaccagcgtccggagagaagatgaaaaaaaatgggagcaaagggtgatgatggggcgatactttgccttgggcacctttttgcacaatctgagccaataccaaaggctgacccaggtttgatgataaacttctaaaaggccacgtgtcctcggaccggcattccgggtcgacccacgcgtccgctcctctacaaacgccacaagaacaccgctttctcttggctccgtaacatctttcatgactgcgccgttgagtcatgtgatgcgttgcttttgctggattcgacaagaagagagctaggagagaaagaacacgacaggagcttcggacttagaaactttaggtacatcgaggagatcaaggaagctctcgagagggagtgtcctggtgttgactcatgttctgacattctcgtcttgtccgcaagagaaggcatcgaagcagtaggaggaccttatattcctttgaagacaggaaggagagatggacttaaaagcaggacggatatgctcgagtcatatcttcccgaccacaacgagagtatttccgtcgttcttgaaaagttcaaatccatcggtatcgacacttccgggctcgtcgccctcctaggggcacacagcgggggaagaactcactgtggcaagctgggccatcgtttgaccctggggtggacccgtccttaaacccggaccacgttccttacatgctacacaagggttcctgacttgaatccctggcccaaaggcgggtcccagtccctgccgttaacgcccggggggccctcccccagggtgggctaggaccaaccaattttacctcccggggaaccattccttaagaaccaaccaaagggggttttggcatctccttttgttggggcacccatattaaggcttctggtgacacactcctatcaagaaccgggaacctccatgaaccctcagtattgtgtttat

SEQ ID NO: 117993 - DNA, 739 bp, Arabidopsis thaliana
ttaatgtgtcgtaggagattcataaattttctttccccccgcccccccccagggggaggagggtttttgtccatttcgtttgtgtaaaaaaagttcaaaatccctttgggtatttgaacacttccgggccccggtgcccctcctaggggcaacaaagcggtgggaaagaactcaacttgtgtcaaaactgggcccctccggtttggacccctggagggtggccccggtccttaaaacccggacccacgtcccctctacatgctacaacaagttgccctggctcggttccctgacccaaaggcggtccagtacgggcgtaccgtccgtggccacccccatggtgctagacaacaattactgccgtatcttcctagacaacaagggtttgctccttgtggaccatcagctcgcacacgacaaacgaaccagaccaatcgttaaagaagatggctaaggaccaggcctacttcttcaaggagttcactagggcaatccagatcttatccgagagcaaccccttgactggctctaagggtgagatcaggaagcaatgtaatctcgcatacaagaaccattgaagttggaaaaagtgagaaaaacaggggctcgggtgtgatgagttctctgcttggtacgaaccaagatgaataaaaaaatacttttaaattaaaaaaaaaaaaaaaaagggcggccgctctagaggatccaagcttacgacgcgtgcatgcgacggcaagtg

SEQ ID NO: 117994 - DNA, 552 bp, Arabidopsis thaliana
  unsure (1)..(552): unsure at all n locations
tccggggggggtgtattcatgcggngtttttagagtatgaaagagttagagaaaaaaaatgggaggcaaaggtgtgatgatggtggcgatacttttcccgtttgggcactctctgcaacatctgaagcagtaacagagactgagccaggtttgatgatgaacttctacaaggacacgtgtcctcaggccgaagacatcatccgtgaacaagtcaaactcctctacaaacgccacaagaacaccgctttctcttggctccgtaacatcttccatgactgcgccgttgagtcatgtgatgcgggtcggcttttgctggatttcgccaagaagggagcgctttggggagaaagaacacggcaggggctttcgggccttaggaacttttggggcataccatcgggggggttccaagggaggctttttgcaggggggggtttnccccggtgttcgcctcaatgtttttgacatttttggtttttnccnnaananaagncttcgagnctttagggggcctttnnttcctttnaagccaggngggggnttggctttaaa

SEQ ID NO: 117995 - DNA, 708 bp, Arabidopsis thaliana
  unsure (1)..(708): unsure at all n locations
gtccccgcgtggnagactccttttcaantgtccacgttnncccctgggtggcccccntcttaacccgnccagnccntcaatgcttcacaagtgccctgctcgatccctgccccaaagcgtccagtacgtgcgtaacgaccgtggcaccccccatgtgctagacaacaattactaccgtaacatcctagacaacaagggtttgctccttgtggaccatcagctcgcccccgacaaacggacccagaccaatcgttaagaagatggtaaaggaccaggcctacttcttcaaggagttcactagggcaatccagatcttatccgagaacaaccccttgactggctctaagggtgagatcaggaagcaatgtaatctcgcaaacaagaaccattgaagttggaaaaagtgagaaagacaggggctctggtgtgttgagttctctgcttggtacgaaccaagatgaataaaaaaatcttttaagttaaatcaaagaaagggtgatgatgaatacatcatggtagtgaccacctccttcttttgtgtgttcagccttaatgctttaattatgatgttagtggctttgagttatttaatctaaatgttggctcttcgttgaaaaaaaaaaaaaaaaagggcggccgctctagaggatccaagcttacgtacgcgtgcatggtacgtcatagnnnnnnnnnnnnnnnnnnnnnnna

SEQ ID NO: 117996 - DNA, 556 bp, Arabidopsis thaliana
  unsure (1)..(556): unsure at all n locations
acgnccngnccacccnttanaagtgcctagggccnngccncntcttccaggggtnccctnggcaacccaaancttacccgngaccaccccnttnnctggccctaagggtgagaccnggacccattttaancccgcaaccaggacccatngaagttggaaaaaagtgagaaagaccagggcctctggtgtgtggagtcccctgcttggtaccgacccaggatgaataaaaaaaatcttttaagttaaatcaatgaaagggtgatgatgaatacatcatggtagtgaccacctccttcttttgtgtgttcagccttaatgctttaattatgatgttagtggctttgagttatttaatctaaatgttggctcttcgttgattttgggtttgtggtgggggtgatataatgataatggaaaggatgtatgatatgatggatggtgttgggtatcatgtatgacgatgtaatgataagtaaacatgtccgcctcaaatttaattcactatctaaaattgggtgtgggggtggggtgttgaattattaaataaaagggtggc

SEQ ID NO: 117997 - DNA, 729 bp, Arabidopsis thaliana
tacacgactcactatatggaaagctggcacgcctgcaggtaccggtccggaattcccgggtcgacccacgcgtcgggatggacttaaaagcaggacggatatgctcgagtcatatcttcccgaccacaacgagagtatctccgtcgttcttgaaaagttcaaatccatcggtatcgacactcccggcctcgtcgccctcctagggtcacacagcgtgggaagaactcactgtgtcaagctggtccatcgtttgtaccctgaggtggacccgtccttaaacccggaccacgtgcctcacatgctacacaagtgtcctgactcgatccctgacccaaaggcggtccagtacgtgcgtaacgaccgtggcacccccatggtgctagacaacaattactaccgtaacatcctagacaacaagggtttgctccttggggaccatcagctcgcacacgacaaacgaaccagaccaatcgttaagaggatggctaaaggaccaggcctacttctttcaaggagttcactagggcaatccagatcttatccgagaacaaccccttgactggctctaagggtgagatcaggaagcaatgtaatctcgcaaacaagaaccattgaagttggaaaaagtgagaaaagacaggggcaccttgtcaccccttgggttacctctgtcgctagtggctacacattgatgcgtgatccgagatacaacaagggacttgcgtttac

SEQ ID NO: 117998 - DNA, 1018 bp, Arabidopsis thaliana
  unsure (1)..(1018): unsure at all n locations
agggaccaaagccggaacctccaccgggggggcggccgttttaaacttgggggatcccccggcctgaaggatttcgcggccgccaaaggggtgatgatggtggcgatcctttgccttggggcactctctgcaccatctgaagcagtaccagaggctgagccaggttggatgatgaacttctacaaggacacgtgtcctcaggccttttacatcgtccgtgaacaagtcaaactcctctacaaacgccacaagaacaccgctttctcttggctccgtaacatcttccatgactgcgccgttgagtcatgtgatgcgtcgcttttgctggattcgacaagaagagagctaggagagaaagaacacgacaggagcttcggacttagaaactttaggtacatcgaggagatcaaggaagctctcgagagggagtgtcctggtgttgtctcatgttctgacattctcgtcttgtccgcaagagaaggcatcgaagcagtaggaggaccttatattcctttgaagacaggaaggagagatggacttaaaagcaggacggatatnctcgagtcatatcttcccgaccacaacgagagtatctccgtcgttcttgaaaagttcaaatccatcggtatcgacactcccggcctcgtcgccctcctagggtcacacagcgtgggaagaactcactgtgtcaagctggtccatcgtttgtaccctgaggtggacccgtccttaaacccggaccacgtccctcacatgctacacaagtgtcctgactcgatccctgacccaaaggcggtncagtacgtgcgtaacggccgtgggaaccccatggtgttagncaacaatttntncccgaaaantcttggcaaaaaangggtttttncctttngggccntaatttgnaaaagggaaagggcccagnccattttttangggttggtttggnccgggtttttttttaagggttttttggggntncnnttttttngggaaaaaccttttttggtttaggggnntt

SEQ ID NO: 117999 - DNA, 1271 bp, Arabidopsis thaliana
  unsure (1)..(1271): unsure at all n locations
cacgcgtccgcccacgcgtccgcccaactaaagaggtttcttcttatagaaatgaatttctcttattcttccttgtcaacttggacaaccctaatgacattgggttgtcttctgcttcattcatccatttccagtgctcagctaaccccaactttctatgacaatacatgtccaagcgtctttaccatcgtacgggataccatagtaaacgagctaagatcggatcctcgtatcgctgcaagcatccttcgtcttcacttccacgactgtttcgtcaatggctgtgatgcatcgatcctgttagacaacacaacatcctttcgaacagagaaagatgcggctccaaacgcaaactcggctcgaggatttccagtgatcgatagaatgaaagcagcagtagagacagcatgtccaaggactgtttcatgcgcagatatacttaccatcgcagctcaacaagctgtaaatttggcaggaggtccttcttggagggttcctttggggagaagagacagcttacaagcattctttgctctcgctaatacaaatcttcccgctccattcttcactctcccacaacttaaggccagttttcaaaatgttggacttgaccgtccctctgatctcgttgcactctctggtggtcacacatttggtaaaaaccagtgccaatttattatggatagactatacaactttagcaacactggtttacccgaccctactcttaatactacatacctccagacacttcgtggacaatgtccccgcaatggtaaccagaccgtcttagttgatttcgatctacgcacaccgacggtttttgacaataaatactatgtgaatctgaaagagctaaagggacttatccagacggatcaagagttgttttccagccctaatgccactgacacaatccccttggtgagagaatacgctgatggcactcaaaaattcttcaatgcttttgtggaagcaatgaatagaatgggaaacattacacctctcactggaactcaaggacaaatcagacagaattgtagggtggttaactccaactcgctgctacatgatgtggtcgaaatcgttgactttgtcagctctatgtaacataacgttgtctcgatatatgtggcaaccaaaaatatgttttatgaaataaagtgttctcaaaatgtttatgaagaacatttcgtcttaaaaaaaaaaaaaaaaaaannaagggcggccgctctagaggatccaagcttacgtacgcgtgcatgcgaagt

SEQ ID NO: 118000 - DNA, 735 bp, Arabidopsis thaliana
  unsure (1)..(735): unsure at all n locations
ggatagactatacaactttagcaacactggtttacccgaccctacttttaatactacatacctccagacacttggtggacaatgtccccgcaatggtaaccagaccgtcttagttgatttcgatctacgcacaccgacggtttttgacaataaatactatgtgaatctgaaagagctaaagggacttatccagacggatcaagagttgttttccagccctaatgccactgacacaatccccttggtgagagaatacgctgatggcactcaaaaattcttcaatgcttttgtggaagcaatgaatagaatgggaaacattacacctctcactggaactcaaggacaaatcagacagaattgtagggtggttaactccaactcgctgctacatgatgtggtcgaaatcgttgactttgtcagctctatgtaacataacgttgtctcgatatatgtggcaaccaaaaatatgttttatgaaataaagtgttctcaaaatgtttatgaagaacatttcgtcttaaatcttttctgtccttcatgtttttcttattactttttcaaagtaatctatctaccctcgattgatggaaaatagaactgaaacgaatagcatggttaatttacttaagnaataatatgtagtgttttattttataaaaaaaaaaggaaaggccgctctataggataggatgctaacgtaagggtgcattgcacgtaatagctgtgtctgatagt

SEQ ID NO: 118001 - DNA, 1314 bp, Arabidopsis thaliana
  unsure (1)..(1314): unsure at all n locations
acaaattcattctaaatacatttcttttcactcaagaaattaaaatttcgaaaagtttgttaaaatgaatgcacacatgctcaatctccttgtcatagtcatttttgtagtttctttcgatgtccaagcactcagtcctcactactacgaccatacttgtccacaagccgaccacattgtaaccaatgcagtcaagaaagccatgtcaaacgaccaaactgtccctgctgcgcttttgaggatgcatttccacgactgtttcgtcagaggatgtgatggctcagttctcttagactctaaggggaagaacaaagcagagaaagatggacctcctaacatctcactccatgcattttatgtgattgacaatgcaaagaaggcattagaagaacaatgtcccggtatcgtctcttgcgccgacattctttcacttgcggcaagagatgctgtcgctctctcaggagggcctacatgggcagtgccaaaagggagaaaagatggaagaatatcaaaggcaatagaaacaagacaactaccagctcctactttcaacatttctcaattgcgtcaaaattttggccaaagaggcctctctatgcatgatcttgttgctctctctggaggtcatacactaggattcgcccactgttcatcgttccagaataggctccataaattcaacacacaaaaggaggttgacccaacactaaacccctcattcgcagccaggttggagggagtgtgcccggcccataacacggtgaagaatgctggatcgaacatggatggaaccgtgacgtcattcgacaatatctactacaagatgcttatccaaggcaagtcactattctcatccgacgaatcgcttcttgcagtaccctctactaagaaactcgtggccaaatatgcaaattccaacgaagagttcgagagggcttttgtgaaatcgatgatcaagatgagtagtatcagtgggaatggcaatgaggtcagacttaactgcagaagggttcgctagaatctcaatctacgcttccaacatcacgttactactacatttttatgtctttcgttttctttcgtcacattgattacttgtgaatgggcctttctaaagattaaggcagaggttcttgtatcaggattatctatcaatctctcgtgtgtgcttggataggcatttatttacaagtaataagatcttttctctttcctnnnnnnnnnnnnnnnnnnnnnnnnnnnnnnnnnnnnnnnnnnnnnnnnnnnnnnnnnnnnnnnnnnnnnnnnnnnnnnnnnnnnnnnnnnnnnnnnnnn

SEQ ID NO: 118002 - DNA, 1394 bp, Arabidopsis thaliana
  unsure (1)..(1394): unsure at all n locations
nnnnnnnnnnnnnnnnnnnnnnnnnnnnnnnnnnnnnnnnnnnnnnnnnnnnnnnnnnnnnnnnnnnnnnnnnnnnnnnnnnccacgcgtgcgcccacgcgtccgtacggctgcggacgacagaaggggcacacaccaataattaattagacaaaagataagagagaatagagagagagagagcaatggccaatgcgaagcccttttgtctcctcggcttcttttgtctgttattacagttattctccatcttccatatcggaaatggggaattggagatgaactattacaaagagagttgtccaaaagcggaagagataataagacaacaagtggagacgctttactacaaacacggtaacacagccgtatcttggctccgtaatctcttccatgactgtgtcgtcaagtcgtgtgatgcgtcgctgctgctagagacagcgagaggtgtggaatctgagcagaaatcgaagaggagtttcggtatgagaaactttaagtacgttaagattatcaaagacgcactcgagaaagagtgtccttccacagtctcttgtgctgatattgtcgctctttctgcgagagacggtattgtcatgttgaaagggccaaagatagagatgataaagacaggaaggagagatagtagagggagctacttgggagatgttgagactctaatccctaaccacaatgactctctttcctctgttctctccacctttaactccattggcatcgatgtcgaagccaccgtcgctctcttaggtgctcactcagtgggtagggtccactgcgttaacctagtgcaccggctatacccaacgattgacccgactcttgacccaagttacgccctttacttaaaaaaacgttgcccaagtccaacaccggacccgaacgccgtcttgtactcccgtaacgatcgtgagactccgatggttgtggacaacatgtattataagaacatcatggcccataaggggcttcttgtcattgatgatgagctagccaccgatcccaggaccgcaccgtttgtggccaagatggctgcggacaataattacttccatgagcagttctcacgtggcgtcaggctcttgtccgagaccaacccgctcacgggagaccaaggggagatcaggaaggattgtcgttatgtgaactaatattgatggtccttgcataaaggatatatattgtggaaaagtaataataataatatatatgtgtatgaatgtctgtcaatgttttggattcaataagaagaaataccaaaaccgttgtggatcagaaagagatgtttggatcgtcccaaggtttcgatgggannnnnnnnnnnnnnnnnnnnnnnnnnnnnnnnnnnnnnnnnnnnnnnnnnnnnnnnnnnnnnn

SEQ ID NO: 118003 - DNA, 665 bp, Arabidopsis thaliana
  unsure (1)..(665): unsure at all n locations
actacggtngcccctaagggccaaagntggnttncacccgngggccnttagacttnggacccccgggnttcaaggaattcccgccccctcatctgttatccccaccttttaccccatttggcatcgatgtcgaacccaccggcgctcatcttaggtgctcactccagtgggtagggtcccctgcgttaaccttgttgcaccggcttatacccaacggattgcccctactctcgacccaagtttacgccctttacttaaaaaaacgttgcccaagtccaacaccggacccgaacgccgtccttgtactcccgtaacgatcgtgagactccgatggttgtggacaacatgtattataagaacatcatggcccataaggggcttcttgtcattgatgatgagctagccaccgatcccaggaccgcaccgtttgtggccaagatggctgcggacaataattacttccatgagcagttctcacgtggcgtcaggctcttgtccgagaccaacccgctcacgggagaccaaggggagatcaggaaggattgtcgttatgtgaactaatattgatggtccttgcataaaggatatatattgtggaaaagtaataataatagcggccgcgaattcgatatcaagcttatcgataccgtcgacctcgagggggg

SEQ ID NO: 118004 - DNA, 558 bp, Arabidopsis thaliana
  unsure (1)..(558): unsure at all n locations
attagacaaaagataagagagaatagagagagagcaatggccaatgcgaagccttttgtctcctcggcttcttttgtctgttattacagttattctccatcttccatatcggaaatggggaattggagatgaactattacaaagagagttgtcccaaagcggaagagataataagacaacaagtggagacgctttactacaaacacggcaacacagccgtatcctggctccgtaatctcttccatgactgtgtcgtcaagtcgtgtgatgcgtcgctgctgctagagacagcgagaggtgtggaatctgagcagaaatcgaagaggagtttcggtatgagaaactttaagtacgttaaggttttcaaagacgcactcgaggaagagtgtccttccacaagtctcttgtgcctgatattgtcgctctttcttcgagcagacggtattntcatgttgtaagggccaaaggtngggttttaaggcaggaagggggggttttggaggggcctctttggggattttgggctttacccaccctaccctaatatttttttcnnga

SEQ ID NO: 118005 - DNA, 1377 bp, Arabidopsis thaliana
ggaccaaaattgcctataaaagcaaagtccatctattccacaagaacaagaaaaggcagagaagagagaggctctgataaaaaaaaaaacaaaaaaaaatgacaaaggcttattcaacacgtgtcctcacgtttctgatattgatctcgctaatggcggtgacactgaacctttttcccacggtagaggcaaagaagcggagtagagatgctcctatagtgaaaggtctctcatggaacttttaccagaaagcatgtccgaaagtcgaaaacatcatcagaaaagagctcaagaaagtcttcaagagagatattggtttagccgcagccatccttcgtatacatttccatgattgctttgttcagggatgtgaagcatcagtgctgctagctggatcagccagtggaccaggagaacaatcatcaatcccaaatctgacactacgtcaacaagcctttgtcgtcattaataaccttcgtgccctcgtccaaaagaagtgcggtcaagtcgtctcttgctcagatatcctcgctctcgccgctcgcgattccgtcgtcctatcaggagggccagactatgctgtcccacttggccgacgtgactctctagcgttcgcgagccaggaaacgacgttaaataacttaccaccaccgttcttcaacgcgagccagctcatcgccgacttcgccaacagaaacctcaacatcaccgacttagtagcactttccggtggtcacaccatcggaatcgcgcattgtccgtctttcacagaccgactctacccgaaccaagacccaaccatgaaccagttcttcgccaacagcctcaaacgcacttgtcccaccgcaaactcgagcaacacgcaaggtaatgacataaggagtcctgacgtgttcgacaacaagtactacgttgatctcatgaaccgacaagggctattcacttctgaccaggatctcttcgtggataagaggacacgtggcattgtggaaagctttgcgatcgaccagcagctgttttttgattattttactgtggcgatgatcaagatgggtcagatgagtgtcttaactggaacacaaggagagattcgttccaattgttcagccagaaacacccaaagtttcatgtccgttttggaagaaggcatagaggaagctatttccatgatctaaataaccataaatctcgacctttcctttgtcaactctgtttttatttagttcatgcacttgtggttgggttgtcgaatgcgtaaaactatctgataaataagaacgtcgcttcatcttaaaaaaaaaaaaaaaaggcggcccgctctagaggacccagctacgtacgcgtgcatgcgacgtcatagttcttctatagtgtcac

SEQ ID NO: 118006 - DNA, 620 bp, Arabidopsis thaliana
gctccctacgactcactattagggaaagctggcacgcctgcaggtaccggtccggaattcccgggtcgacccacgcctgcgccgaataataatttttcatttgctgcgtccttttggtgcttgaagcgatgaccatggcagcaaatctagcgcgacggctgatcggaaaccgatcgactcagatccttggagccgtgaactctagctcaggtgcggctagttctgtcgctagggctttctgctcctccaccactccgatcaccgcaactctcttccctggcgatgggatcggtcccgagatcgccgaatctgtcaaaaaggtgtttacaacagctggtgtaccaattgagtgggaagaacactatgttgggactgagatagatccgagaacacagagtttcttgacatgggaaagtctcgaatctgtgcgtagaaacaaagttggtttgaaaggtccaatggctactccaattgggaaaggtcaccgttctttgaacctgactcttaggaaagagcttaatctatatgccaatgttagaccttgttacagtcttcctggttacaaaactcgttacgatgatgttgatctcattaccctcaggaaaccggcgggggttgta

SEQ ID NO: 118007 - DNA, 1332 bp, Arabidopsis thaliana
  unsure (1)..(1332): unsure at all n locations
nnnnnnnnnnnnnnnnnnnnnnnnnnnnnnnnnnnnnnnnnnnnnnnnnnnnnnnnnnnnnnnnccacgcgtccaaaagctaagagcaacaaactaaagattttttaagaaaatggcagcttctaagcgactagttgtctcttgcttgttcttagttttgttgtttgctcaagccaattcgcaaggtttgaaagtaggtttctacagcaaaacatgcccacaactcgagggtatagttaaaaaggtcgtgttcgatgcgatgaacaaagcaccaacacttggtgctcctttgcttagaatgttcttccacgactgcttcgttcggggatgtgacggatcagttttgttagataaaccaaacaatcaaggtgagaagagtgcagttcctaacctaagtcttcgagggtttggcatcatagacgattccaaggcggctctagaaaaagtgtgtccgggaattgtttcttgctctgatatcttggcacttgtcgctagagacgcaatggttgcacttgaaggaccatcatgggaagttgaaacgggaagaagagacggtagggtttctaacatcaacgaagtcaacttgccatcaccttttgataacatcaccaagcttatcagcgattttcgctcaaagggcctcaacgagaaggatctagtcattctctcaggtggtcacacaattggaatgggacattgtcctttattgacaaaccggctttacaacttcaccggaaaaggagacagcgacccaagtttggactcggagtaccccgctaagctcaggaagaaatgcaagcccaccgaatacgacgacggctctagagatggatccggggagtttcaaaacatttgacttgagctacttcacgctagtggctaagagaagaggacttttccagtcggatgctgctctactcgacaactccaagactagggcttatgtcttgcaacagataagaactcatgggtcaatgttctttaacgactttggtgtctctatggtgaaaatgggtcggactggagttcttacgggtaaggccggggagatccgtaagacgtgtcggtctgctaattaagagatatagaaatgaaaatatctcaatatatgtgagtttgattattattgtttgcttcttttattttgttgtcatccctatattaaatgtgattgttttcttgggtattgtttcttgggaataagctgtatctaaaatttataaaagtcttgaaagttcagaatgtttaaaaaaaaaaaaaaaaagnnnnnnnnnnnnnnnnnnnnnnnnnnnnnnnnnnnnnnnnnnnnnnnnnnnnnnnnnnnnnnnnnnc

SEQ ID NO: 118008 - DNA, 1207 bp, Arabidopsis thaliana
agttaaccgagttatatacaacgagtcatcaagagaaagaatccccccaaaaaatggccaagtcattgaacatccttattgcagctctctcgctcattgcattttctcctttttgtttgtgttccaaagcctatggaagtggcggctatctctttcctcagttttatgaccaatcgtgtcctaaagctcaagagattgttcagtccattgtcgctaaagcattcgaacatgatcctcgcatgcctgcctccttgctcagactccatttccacgactgtttcgtcaagggatgtgatgcttccatactattggacagcagtggaaccataatcagcgagaaacgatcaaaccctaacagaaactcagcccgtggtttcgaactcatcgaggaaatcaaacatgccttagaacaagagtgtcctgaaacagtttcttgcgctgatatcttggctctagccgctagagactcaactgttattacgggtggaccgagctgggaagtacgtctaggaagaagagacgcgagaggagcaagcttgagtggttccaacaacgacattcctgctccaaacaacactttccaaaccatcctcactaagttcaagcgtcaaggccttgatctcgtcgatcttgtctccctctcaggaagtcacaccattggaaactcgaggtgcacaagtttccgacagaggttatacaatcaatccggcaacggaaagcctgatatgactcttagccaatactatgcaacactattgcgtcaacgatgtccgagatccggaggtgaccagaccctattcttcctcgacttcgcgacaccgttcaagtttgacaaccactacttcaagaacctgataatgtacaaaggtctattgagctctgatgagattctgttcacgaagaacaaacagtccaaggagctggtggagctatacgctgagaatcaagaggccttctttgagcagtttgctatatcgatggtaaagatgggaaatatctctccgttgacaggcgccaagggagagatcaggcgcatctgtcggagggttaaccatgcttattaatacaaatccatctttataattatgtgcaatataatgctttcgtttctcattgagttttcaatttcttttggctttgtttgcatgagtgtgtatcatatgtttattactcaaatctgattttgtttcggaaaaaaaaaaaaaaa

SEQ ID NO: 118009 - DNA, 1158 bp, Arabidopsis thaliana
  unsure (1)..(1158): unsure at all n locations
aaaacgagagagagtttttgaagatgaagaaagaacactcacaagatccagaaaaaggtaaaagatggcgagatacgatcgagcaatcactgtattctcccccgatggtcacctcttccaagtagagtatgccctagaagccgtccgaaagggtaacgccgccgtcggagtccgcggcacagatactgtcgtcctcgccgtcgaaaagaaatccacccctaagctccaggattccagatcagcaaggaagatagtgagccttgataatcacattgcattggcctgtgctggactgaaagcagatgctcgtgtcttgataaacaaggcgaggatagagtgtcaaagccacaggcttacgttggaggacccagttactgttgagtacattactcggtacatagcagggcttcaacagaagtatactcaaagtggtggtgtgaggccttttggtctttccactcttattgttgggtttgatccctacactcgtatacccgcgctttatcagaccgatccatctggtacattctctgcttggaaagctaatgcaactgggagaaactctaactcaattagggagtttctggagaaaaactacaaagaaagcgctggccaagaaactgttaagcttgctatccgtgctctgcttgaggttgttgagagtgggggaaagaacattgaggttgctgtaatgacacgagaggaaggtgttctgaagcaactagaagaagaagaaattgatatcattgtggctgagatcgaagcagagaaggctgcagctgaagcagccaagaaaggccctgcgaaggaaacatgaaccagatcttaaagtagcggtctcagattatgagttgtaatgctggttcaaagtcagggatattcaagggttgaatagaaaatctagaccgcatgaaatggtttgttggattactagcctatttgacactgttgctttaaatcttaaatgacattttagcggagtttcgatacttgtcagttggaactatggcatgttcagtattctagatgactttgcatttgcgctcaagagttgtagattttgattttggaaacgttgtttcttactaaacatgtctctcttcttattatctccattgtgtaacttaccgtttttttnnnnnnnnnnnnnnnnnnnnn

SEQ ID NO: 118010 - DNA, 706 bp, Arabidopsis thaliana
  unsure (1)..(706): unsure at all n locations
tacggtacgacccacgcgtccgctcaaattacccaacttcttaaacacattcccatcacctcacaaaccattaaccgagagccaactagcgagtagaatcaactatcaagcaatggcatcgatgaccatgaccgctaccttcttcccggccgtcgccaaggttccctcagccaccggcggacgaaggctctccgtagtcagagcctccacgagcgacaacacacccagcttagaagtcaaggaacagagcagcaccacaatgaggagggacctcatgttcacggctgcagctgcagcggtttgttctttggctaaggtagccatggctgaagaagaagagcccaagcgagggacagaggcggccaagaagaaatacgcacaagtttgtgtcacaatgcctacggccaagatctgccgctactgattcaacaacccaccttctgcatgtctatctctctctttcaatttcggtaaattttctcaattaagtttggtctgtaatcgtatatttgatcatcaatttaccaaaagcccttttatctttctaaaaaaaaaaaaaaagaannnnnnnnnnnnnnnnnnnnnnnnnnnnnnnnnnnnnnnnnnnnnnnnnnnnnnnnnnnnnnnnnnnnnnnnnnnnnnnnnnnnnnnnnnnnnnnnnnnnnnnnnnnnnnnnnnnnnnnnnnnnnnnnnnnnnnnnnnnnca

SEQ ID NO: 118011 - DNA, 1846 bp, Arabidopsis thaliana
  unsure (1)..(1846): unsure at all n locations
caagaagggaggaaccactttaaacccttgtctacgctggtccgagtccagagtcctctactttgacagtctccctccatgtcgtcgttgtgtgcatctaattgctatccttcatcttcttctatcaatctcttctccaacaacaacaacccaactaaaccctttcttctctccctcagattcgcctcctccaattctcttccatttgttgctcctctcaaattctctactaccaatcacgtccttagtaactctcgtttctcttcgaaccgaatccaaagacgcctttttttgctccgatgcgtttcagaagaatctcagccgtctctttctatcggtaacggcggctctgaagagagagtgaatgttcttgtaattggtggaggagggagagaacacgccctttgccacgccttgaagcggtctccttcttgtgattctgtgttatgcgcacctggaaacgccggtatatccagttccggagatgccacttgtgtacctgaccttgacatatcagacagtttagctgtcatctctttctgtcagaaatggaatgttggtttagtggttgttggccctgaagtgcctcttgttgctggtctcgctaatgaccttgttaaggccggtatcctcacctttggcccttcttctcaagctgctgctttggaaggttccaagaactttatgaagaatctttgccacaagtacaatatccctactgctaagtataaaacattttctgatgcatctgccgcgaaagaatacattcaagaacaaggggcaccgattgtgattaaagcggatggattagcagctggaaaaggagtcactgttgccatggaactagaggaggcttttgaagctgttgattctatgctggtcaaaggtgtgtttggttctgcaggatgtcaggtggtcgttgaggagtttctcgagggagaagaagcgtccttcttcgcacttgtggatggagaaaacgccattcctctagaatctgctcaggaccacaagcgtgttggagatggagataccggtcctaacacaggcggcatgggagcgtattctcctgcaccggtcttgaccaaggagcttcaggattttgtgatggagtctataatccatcccactgttaaaggaatggctgaagaaggatgtaagtttgtcggcgttctgtttgcgggtctcatgatcgagaagaaatccggtttcctaagctttattgagttcaatgtacggtttggagatccagaatgtcaggtattgatgatgcgtctagagtctgacctagcaaaagttttgctagcggcttgtaaaggcgagctaagtggtgtatcacttgattggtcaaaagattcagcaatggtggttgtaatggcaagcaatggttatcctggttcttatgagaaaggatcaatcatcaaaaaccttgaagaagctgaaagagttgctcctggagtgaaggttttccacgcaggaacgggtctagattcagaggggaatgttgtagcaactgggggacgtgttcttggggtcacggcgaagggtaaagacttggaagaggcgcgtgaaagagcgtactcggcagtacaacagatcaactggcctgggaggtttctttaggcatgatattggttggagagctcttcgccagaaacaagtggcgaccaaagaagagtgatgagaaggaattttgttgtaatggcttgtaaaccaagaatccaaaaacttaaaactcactccaatctgttaagagatgattcaaaataaccatttttgtttnnnnnnnnnnnnnnnnnnnnnnnnnnnnnnnnnnnnnnnnnnnnnnnnnnnnnnnnnnnnnnnnnnn

SEQ ID NO: 118012 - DNA, 1306 bp, Arabidopsis thaliana
  unsure (1)..(1306): unsure at all n locations
tttatcttcattccggaaattgctccggtgaaacagcagccaccgccacatctttctccttctccggcaagcaacttcattccggattttcgtctgaacttcattcttgtctccctcttcgaccaaactgacacttattccgacaaaaccctctgattagaccgtcggaatggaatcacgggtttttctctagtcaattcaacttcccggtgaattcaccgtttaagacccgtgaaacctcgattgctccgctcacaccttcccggaatgttctctccttctctttccgtagtcccgcagagagatgtgcgatgaggattgtaccgcttgtaaaagctgcttcgtctactccacagatagtagcggaggtcgatggttcgtctcacgaacaagaaggaagaagcttgctgtgtttgtgtcgggaggtggttcaaatttcaggaagattcatgagggatgcagtgatggttctgttaatggtgatgttgttttgttggtcactaacaaaaaagattgtggaggtgctgagtatgcaagaagtaatggaattcctgttttagtattcccaaaagcgaaacgagaaccatctgatggactctctccttcagaacttgtagatgtactaaggaaatatggtgtagactttgttcttttagctggatatttgaaacttataccggtcgagctggtccaagcttttcctaaacggattctaaatattcatcctgctcttcttccggctttcggaggcaaaggtctttatggtataaaagtgcataaagctgttctagaatcgggagctagatattcgggtccgacaattcacttcgtcaatgaggagtacgatacaggtcggatacttgctcaaagtgcagtccgtgtgattgctaatgatacaccagaagaattggccaaaagggttcttcatgaggaccacaaactgtatgtcgaggtggtgggtgcgatttgcgaagaagcggattaaatggaggagaagacggtgtccctctcattcaaaacaaacaaaaccctgacgagtactattagattctcaccaaatgaagttattcattggatgttagattagtcacattttcaaaacaaagtgtttcaacataggttatgtagaagaagtttttttgcccgaagtatagattgagacatgtttctgatactaaattttgtttcggttgggtcagaatcatatggaaggagatgaaattcgagtcaggagacagcattttaatgcttgtgttgtataataccnnnnnnnnnnnnnnnnnnnnnnnnnnnnnnnnnnnnnnnn

SEQ ID NO: 118013 - DNA, 1952 bp, Arabidopsis thaliana
  unsure (1)..(1952): unsure at all n locations
nnnnnnnnnnnnnnacgactcacttttagggaagctgcccgcctgcagtaccgtccggaataattcccggttcgctcgaataaaatcagaattacaaacaaaaatggttttgcaaaagcttcctctcattgggctgcttttgctcctgaccatcgtcgcctctccagcaaatgcagatggacctgtttgcccgccgtcgaacaaactaagccgggcaagtttccctgaaggttttttatttggcacggctactgcggcataccaggtcgaaggtgcgattaatgaaacttgtcgtggaccagccttatgggacatctactgtagaagatatccagagaggtgcaataacgataacggcgatgtggccgttgatttcttccatcgttataaggaagatatccaactaatgaagaatctaaacacagacgcctttagaatgtctatcgcatggccaagaatatttcctcatgggagaaaggagaaaggagtgagtcaagctggtgtgcaattctaccacgacctcatcgacgagctcataaaaaatggtataactccattcgttactgtttttcactgggacactccacaagatttagaagatgaatatggcggctttttaagcgaaaggattgtgaaggatttccgagagtatgcagattttgttttccaagaatacggtggaaaagtgaaacattggatcactttcaatgagccatgggttttctcgcacgctggctatgacgtaggcaaaaaggcacctggtcgttgctcttcttacgtcaatgctaaatgccaagacggacgatcaggatacgaggcttaccttgtcactcacaatctccttatctctcacgcagaagcagttgaagcttaccggaaatgcgaaaagtgtaaaggtgggaagatcggaattgcacatagtcctgcttggttcgaagcacatgaccttgctgattcacaagacggtgcgtccatcgaccgtgcacttgactttattttgggatggcatctagacacaactacatttggagattatccacagatcatgaaagacattgttggacatagattgcctaaatttacaactgagcagaaagcaaaactgaaagcttctaccgatttcgttgggctcaactactatacttcagtgttttcaaaccatttggagaaacctgatccttcaaaaccaagatggatgcaagattctcttattacatgggagtctaagaatgcgcaaaattacgccattggtagcaagcctttgaccgctgcattgaacgtttactcgagaggttttagaagtctgttgaagtacattaaggacaaatacgcaaatccggaaattatgatcatggaaaacggatatggagaagaactaggggcctcagattctgttgctgttggtaccgctgatcataacaggaaatattatcttcagaggcatcttttgagtatgcaagaagctgtttgcatcgacaaagtgaatgttacaggatactttgtatggtcattgttggataacttcgagtggcaagatggttacaaaaacagatttggactctactacgttgatttcaaaaataacctcacacgttacgagaaagaatccggcaagtattacaaggatttcctcagtcaaggtgttcgtccatccgcgctcaagaaggatgagctttaagctatttctgtttcaatgtgtttttcctatgttttactttgtgagtgaccaagattcatgaggtcttggttctaataaaaagagtttatttttcttctcatttttcattgtctacatgatttgccagatctacaaggctctggttataataaaatgatcctttgtgcctctaacagttcgttgtaatctatctcgcacgcaannnnnnnnnnnnnnnnnnnnnnnnnnnnnnnnnnnnnnnnnnnnnnnnnnnnnnnnnnnnnnnnnnnnnnnn

SEQ ID NO: 118014 - DNA, 791 bp, Arabidopsis thaliana
  unsure (1)..(791): unsure at all n locations
gcaggtaccggtctcggattcccggctcgacccacgcgtccgaatgcgcaaaattacgccattggtaccaagcctcttaccgctgcattgcccgtctacgctaaaggttttagaagtcttttaaagtacatcaaggacaaatacgcaaacccggaaattatgatcatggaaaatggatatggagataaacttgggaccacagattcggttgacgttggtactgctgatcataacaggaaatattatcttcagaggcatcttctggctatgaacgaggctatttgcatcgataaggtgagagttacgggatactttgtatggtcattgttggataacttcgaatggcaagatggttacaaaaacagattcggactctattacgtcgatttcaaaaataacctcacacgttatgagaaagaatcagccaagtattacaaagatttcctcgctcaaggtgttcgtccatccgcgctcaagagggatgagctttaagttatattttgaggatttcgttttctgttcgatgcttctttcctatgttttagtttgtgattgaccacgcacgattcatgagtcgtggttaataataataaaagtgtttcgttttccttcagtttctagcttatttgacatggtcaagaatgctttagtataaatatattatccttatatggaggtatctttgccttccgaacatgaaaaaaaaaaaaaaaagcnnnnnnnnnnnnnnnnnnnnnnnnnnnnnnnnnnnnnnnnnnnnnnnnnnnnnnnnnnnnnnnnnnnnnnnnnna

SEQ ID NO: 118015 - DNA, 1104 bp, Arabidopsis thaliana
  unsure (1)..(1104): unsure at all n locations
gcagtacccgnccggaatttccgggtcgacccaccccttccggctttgaccgtcggcaaaaaggccccgggacgtggttctccttctttcaatcctaacggccattacggccaataaggattccaggcttacctggtaacttacaatctccttatttgtcacgcgcaggcggttgatccttaccggaaatgctaaaagtgtcagggcggcaagatcggaattgcacatatgcctgcttggttcgactcacatgaccttgctgatgcacaagacggcgcgtccatcgaccgtgcacttgactgtattttgggatggcatctacacacaactacatatggagattatgcacagatcatgaaagacattgctggacattgatagcctaaatgtacaactgagcagaaagcataactgagagcttctaccgatttcggtgggctcaactactatacttcagtgttttcaaaccatttggagaaacctgatccttcaaaaccaagatggatgcaagattctcttattacatgggagtctaagaatgcgcaaaattacgccattggtagcaagcctttgaccgctgcattgaacgtttactcgagaggttttagaagtctgttgaagtacattaaggacaaatacgcaaatccggaaattatgatcatggaaaacggatatggagaagaactaggggcctcagattctgttgctgttggtaccgctgatcataacaggaaatattatcttcagaggcatcttttgagtatgcaagaagctgtttgcatcgacaaagtgaatgttaccagggtacctttgtatggtccattgttgggtaacttccgagtgccaagatggttacaaaaccagntttgggcctctcctccggggctttcaaaaatacccccacacggttcggggaaagaatcccggcaaggtcttccaagggtttccccagccaaggggtccgccctccggcctcaagagggtggctttaggctattcctgttccaagggttcctgttcctagggcactttgtggncccaggttttnggcttggttataaaggggttttncccntttcatgcnnagttncgctcaggctggga

SEQ ID NO: 118016 - DNA, 1142 bp, Arabidopsis thaliana
  unsure (1)..(1142): unsure at all n locations
cccacgcgtccggtttcttaagcgagaacattgtgaaaccgccatattcgtcttctaaatcttgtggagtgtcccaatggaaaacagtcacaagatttagaagacgaatatggcggtttcttaagcgagaacattgtgaaagatttccgagaatatgcagattatgttttcactgaatacggtggaaaagtgaaaaactggatcactttcaacgagccatgggtcttcgctcatgcaggttacgacttaggaaagaaagcaccaggacgttgttctcgctacgttccaggttgcgaagaccgagagggacaatctggtaaagaggcttatctagtcagtcacaatctcctcaacgctcacgcagaagctgttgaagttttccgccaaaaggttaaaggtgggaaaatcggaatcgcacatagtccggcttggttcgaaccacatgatcttaaagattcaaatgacgctccaactgtcagccgtgtacttgactttatgttgggatggcatctggagccaactacttcgggagattatccacaaatcatgaaagaccttcttggttacagattgcctcaatttactgctgcacaaaaagcaaaattgaaagattcgaccgatttcgtagggcttaactactatacttcgacattttcaaattataatgagaagccagatccgtctaaaccaagttggaagcaagattctcttgtttcctgggaacctaagaatgtagatcacagcgccattggtagcatgcctcttactgctgcattgcccgtctacgctaaaggatttagaaagcttttaaagtacatcaaggacaaatacgcaaacccggagattatgataatggaaaatggatatggagataaacttgggaccacagattcggttgacgttggtactgctgatcataacaggaaatattatcttcagagggcatcttcttggctatgaacgagggctatttgcatcgataagggtgagagttacggggtacttttgtatggtcattgttggtacctcgnatgnaagtggttcaaaaccagttcggccttttcggggttcaaaaaacccncccgtttggnaggtncccagttcaaggtcctgccagggtcgccnccncnanggtggttttc

SEQ ID NO: 118017 - DNA, 757 bp, Arabidopsis thaliana
  unsure (1)..(757): unsure at all n locations
atctaaacacaactacatttttatattatccacanatcatnaaanacgttggttnacatagattgcctgaagttacaactaancanaaatcaaaactnaaagcttctaccnatttncttgncctcaactactatacttcagtgttttcaaactatttttagaaacctgatccttcaaaaccaatattgatgcaagattctcttattacatggtagtctaagaatgcgcaaaattacgccattggtagcaagcctttgaccgctgcattgaacgtttactcgagaggttttagaagtctgttgaagtacattaacgacaaatacccaaatccggaaattatgatcctggaaaacggatatggagaagaactaggggcctcagattctgttgctgttggtaccgctgatcataacaggaaatattatcttcagaggcatcttttgagtatgcaagaagctgtttgcatcgacaaagtgaatgttacaggatactttgtatggtcattgttggataacttcgagtggcaagatggttacaaaaacagatttggactctactacgttgatttcaaaaataacctcacacgtaccgagaagaatccggcaagtatnccangnttccncagtcaaggngtcggccaccgngnccaagaaggntggnttaancattccggtcaangggtttcccaggttanctttgnggggccantcctgggctggccaaaaaaggtattcccccattcnagcccagtccggnc

SEQ ID NO: 118018 - DNA, 580 bp, Arabidopsis thaliana
  unsure (1)..(580): unsure at all n locations
ggnagattatgataatggaaaatggatatggagataaacttgggaccacagattcggttgacgttggtactgctgatcagaagcagagcaaaggacttgcccatcttctggctatgaacgaggctatttgcatcgataaggtgagagttacgggatactttgtatggtcattgttggataacttcgaatggcaagatggttacaaaaacagattcggactctattacgtcgatttcaaaaataacctcacccgttatgagaaagaatcagccaagtattccaaagatttcctcgctcaaggtgtttgtccatccgccctcaagagggatgagctttaagttatattttgaggaattcgttttctattcgatgtttttcctatgttttagtttgtgattgcccacgcccgattcatgagtcgtggttaataataataaaagtgtttcgttttccttccaaaaaaaaaaaaaaaaaaaaaaaaaaaaaaaaaaaaaaaaaaaaaaaaaaaaaaaaaaagggcggccgctctagaggatccaagcttacgtacgcgtgcatgcgacgtcaaagctctnctata

SEQ ID NO: 118019 - DNA, 495 bp, Arabidopsis thaliana
gcaagatggttacaaaaacagattcggactctacgctacaggacactttggatggtcattgttggataacttcgagtggcaagatggttacaaaaacagatttggactctactacgttgatttcaaaaataacctcccacgtttccgggaaagaatccggcaagtattccaaggatttcctcagtcaaggtgtttcggtccatccgcggctcaagaaggatgagctttaagctattttctggttcaatgtgtttttcccatgttttactttgtgagtgccccagattcatcaggttcttggttctaataaaaagaggttatttttcttctcatttttcattgtctacatgatttcccaaattttccagggtttggttaaaataaaatgatcctttgtgcccccaagagacaaaaaaaaaaaaaaaaaaaaaaaaaaaaaaaaagggcggccgctttaaaggaatccagcttacggaagggtgcaagccacgttaa

SEQ ID NO: 118020 - DNA, 522 bp, Arabidopsis thaliana
  unsure (1)..(522): unsure at all n locations
nnnnnnnnnnnnnnnnnnnnnnnnnnnnnnnnnnnnnnnnnnnnnnnnnnnnnnnnnnnnnnnnnnnnnnnnnnnnnnnnnnnccacgcgtccgcccacgcgtccgaggatactttgtatggtcattgttggataacttcgagtggcaagatggttacaaaaacaggaaatattatcttcagaggcatcttttgagtatgcaagaagctgtttgcatcgacaaagtgaatgttacaggatactttgtatggtcattgttggataacttcgagtggcaagatggttacaaaaacagatttggactctactacgttgatttcaaaaataacctcacacgttacgagaaagaatccggcaagtattacaaggatttcctcagtcaaggtgttcgtccatccgcgctcaagaaggatgagctttaagctatttctgtttcaatgtgtttttcctatgttttactttgtgagtgaccaagattcatgagggtcttggttctaataaaaagagtttatttttcttctc

SEQ ID NO: 118021 - DNA, 689 bp, Arabidopsis thaliana
  unsure (1)..(689): unsure at all n locations
gaccaagagggcaggtaatttggctcgcgcgcggatgtatcgccgnnnnnnnnnnnnnnnnnnnnnnnnnnnnnnnnnnnnnnnnnnnnnnnnnnnnnnnnnnnnnnnnnnnnccacgcgtccgcccacgcgtccggttataaggaagatattcaactaatgaagaatctaaacacagacgcattcagactctcaatcgcatggtcaagaatatttcctcatgggagaaaggagaagggagtgagtcaagctggtgtgaaattctaccacgacctgagcgatgagctccttaaaaatggtataattccgtttgtgactgtttcccattgggacactccacaagatttagaagacgaatatggcgggttcttaagcgagatcgtttgtgaaggatttccgagagtatgcagatgttgttttccactgaatacgggggaaaagtcaaacactggatcactttcaacgagccatgggttcttcgcgcacgctggctacgacgtaggcaagaaggcgcctggtcgttgtgctcgttttacgtcaatgctaaatgccaagactgactatcagcatacgaggcttaccttagtactcacaattctcttatttctcacgcataatcatttgtagtttacctcaatttcttaaagtttaaaacgtttatggtacgtttttacacataattttttttg

SEQ ID NO: 118022 - DNA, 804 bp, Arabidopsis thaliana
  unsure (1)..(804): unsure at all n locations
gcgaatcaagaattaccaaacannaaaatggttttgcaataagctttctctctcaattgggcatgcattttgactccgtgacggatcataacacctatggcgagcgagagtgcannnatagacaactgttttgcccnngccgtcgaacaaaacctaagctcgggcaatgtttcctctgaaggtgtttttattttggcgacggctacctgcggcatactcaggtcgaagggtgccgattaaattgaaactttgtcgtggaccaagccttatgggacaatctacttgtagaagatatcctagagaggtgcaataacgataacggcgatgtggccgttgatttcttccatcgttataaggaagatatccaactaatgaagaatctaaacacagacgcctttagaatgtctatcgcatggccaagaatatttcctcatgggagaaaggagaaaggagtgagtcaagctcgtgtgcaattctaccacgacctcatcgacgagctcataaaaaatggtataactccattcgttactgtttttcactgggacactccacaagatttagaagatgaatatggcggctttttaagcgnaaggattgtgaaggatttccgagagtatgcagattttnttttccaagaatacggtgggaaaantgaacattgggtccactttcaattgngccatgggttttttcggacggtnggtttttnccgggggnaaaaagggncctgggccggttccctttttncgggaattntnaaanccccaaagggggcngtcncaagtttcgggggtttccctttna

SEQ ID NO: 118023 - DNA, 516 bp, Arabidopsis thaliana
caggttcccggaaggaccgggggggcccaccccttccgttaaattcggatttccaaccaaaaatggttttgcaaatcctgccctctcattggggcggcttttgcttccggaccatcggcgcctctccagcaaatgcagatggccctgtttgccccccgtccaaacaaactaagccgggcaagtttccctgaaggttttttatttggcacggctactgcggcataccaggtcgaaggtgcgattaaatgaaacttgtcgtggaccagccttatgggacatctactgtagaagatatccagagaggttgcaatgacgattacggcgatcgtggccgttgacgtcgtccataagtatcagcgaggaataagatgactgtgggatttatgggcaacatctggtagataatccatctattgggcaagaattttttctcaattctgttagatggcttgagattgagaaactctgtagctgttttgtatacttgattgactactgttttttttatattatttt

SEQ ID NO: 118024 - DNA, 412 bp, Arabidopsis thaliana
cccacgcgtccgcccacgcgtccgcaaaaattagcaaaaatggcattgcaaaagtttcctctcatggggctgcttttgctcctaaccatcctcgtctctgtgacaacagcggttgatgatcctgtttgcccggcgacttccaagctaagccgagcaagtttccctaatgggtttttgtttggcacggctactgctgcgtttcaggtcgaaggtgcaattaatgaaacttgtcgtggaccggctctatgggatatctactgtagaagaaatccagagagatgtagtggcgaccacgccgatgtggccgttgatttcttccatcgttataaggaagatattcagctaatgaagaatctaaacacagatgcattcagactctcaatcgcatggtcaagaatatttcctcatggga

SEQ ID NO: 118025 - DNA, 441 bp, Arabidopsis thaliana
  unsure (1)..(441): unsure at all n locations
gaaaaatgtattcagaggaaaagaaaagcaaattatggttcaatctttgtctactgctgcgctgtttcgtactcattgtttaggccacaagacccccacaacccnatatcaaccgtcaaaacctaaacgcaactgcagcaggagtacaagcacggatcatgaaagacattgtcgcacatagattgcctaaagttacaactgagcagaaagcaaaactgaaagcttctaccgatttcgttgggctcaactactatacttcagtgttttcaaaccatttggagaaaccctgatccttcataaccaagatggttgcaagattctcttattacatgggagtgtaagtttgttttgcccttacttgaaaccgaaccaagaaaaccaatggcaacaaatcaaagggaaaatgtttgtttttggtactaatcgaaacctatctcttct

SEQ ID NO: 118026 - DNA, 392 bp, Arabidopsis thaliana
taaatcttgtggagtgtcccagtgaaaagcagtaccgaatgaagttataccattttttatgagctcgtcgatgaggtcgtggtagaattgcacaccagcttgactcactcctttctcctttctcccatgaggaaatattcttggccatgcgatagacattctaaaggcgtctgtgtttagattcttcattagttggatatcttccttataacgatggaagaatccggcaagtattacaaggatttcctcagtcaaggtgttcgtccatccgcgctcaagaaggatgagctttaagctatttctgtttcaatgtgtctctcctctgttttactttgtgcgtgaccaagattcatgaggtcttggttctaataaaaagagtttatttttcttct

SEQ ID NO: 118027 - DNA, 740 bp, Arabidopsis thaliana
  unsure (1)..(740): unsure at all n locations
aaancagaannacaaacaaaaanggtttttcaaaagcnnccncncaaagggctggggntggcttctttccatagtcgggtgtccagcaaatgcagatggacctgtttgcccgccgtctaacaaactaagccgggcaagtttccctgaaggttttttatttggcacggctactgcggcataccaggtcgaaggtgcgattaatgaaacttgtcgtggaccagccttatgggacatctactgtagaagatatccagagaggtgcaataacgataacggcgatgttgccgttgatttctttcatcgttataaggaagatatccaactaatgaagaatctaaacacagacgcctttataatgtctatcgcatggccaagaatatttcctcatgggagaaaggagaaaggagtgagtcaagctggtgtgcaattctaccacgacctcatcgacgagctcataaaaaatggttacatatattaatcacttaaaaacgaaaaaaaaaacatttataatctcttacgtattaaacttctctaattttttatttttttctgtaattaggtataactccattcgttactgtttttcactgggacactccacaagatttagaagatgaatatggcggctttttaagcgaaaggattgtgtaagtttttctgttggaaaacgaaccccaatcactttttgttttctttgatatgcgaatataaatggtataattcaacaattttttgcaata

SEQ ID NO: 118028 - DNA, 1732 bp, Arabidopsis thaliana
cgaattctccgattccaaaagcagcagaagaaaaaatgtcagccatggaagcactgattctccagctgcatgaaatcggcgccgtgaaattcggcaatttcaagctcaaatctggaatcttttctccggtttacatcgaccttcgtctcatcgtctcttatccatccctcttaacacagatctctcaaactctcatctcttctcttccaccttctgcaaccttcgacgtcgtctgtggtgttccttacactgctctccctatcgccactgttgtctctgtttccaatggtatccctatgcttatgcggcgtaaggagattaaagactatggaacatctaaagctattgaaggaatcttcgaaaaggatcaaacttgtttgataattgaagatcttgtaactagtggtgcttctgttctcgagactgctgctcctcttcgtgctgtggggttaaaggttagtgacgcggtggttttgattgataggcaacaagggggtagggagaatctagcggagaatgggattaagttacattcgatgattatgttgacggatatggttagggttttgaaggaaaaggggaaaattgaagaggaggttgaagtgaatttgcttaagtttttggaagagaatcgtagggttagtgttccaagtgtggagaaacctaagcctaagcctagggttttggggttcaaggaaaggtctgagctttctaagaatccgacagggaagaagctgtttgatattatgttgaagaaggaaaccaatctttgtttagctgctgatgttggaactgctgctgaattgcttgacatcgcagataaggtgggaccagagatttgtctcttgaagactcatgttgatatactgcctgatttcacccctgactttggctctaagctccgtgcgattgcagacaagcacaaatttctcatatttgaggatcgcaagtttgcagacattggtaacactgtcactatgcagtatgaaggaggcatctttaaaatattggagtgggctgatattatcaacgctcatgtaatatcggggccaggaatcgtggatggcctgaaattgaagggtatgcctcgtggtagaggtttgcttttgcttgctgaaatgagctctgcaggtaacctggctacaggagactacactgcagcagctgtgaaaatcgcagacgctcattctgattttgtgatgggattcatctcggtgaatccagcatcttggaaatgcgggtatgtgtatccgtctatgattcatgcaacacctggtgttcaaatggtgaaaggtggtgatgcacttggtcagcagtataacactccacactctgtgattactgagaggggaagtgatattataatcgtgggacggggaatcataaaggcggaaaacccagcagagacggctcatgagtatagagttcaaggatggaatgcatacttggagaaatgctctcagtagattcgatcctgagagatggctgaggttttttgtttttgtgttctagtgctataagattgtgctagtttttgtgtgatttatgtgaggatggattttaagactcatgtctcgttgattgtttacttgattgagtgattctcagttctcaataataataaagtgaagctggcgagtagttgatctccaaaaaataaaaaaaaaaaaaaaaaaaaacaaggcgagccgctttagaggatcccagcttacggacgggtgcatgcaccgtc

SEQ ID NO: 118029 - DNA, 1725 bp, Arabidopsis thaliana
  unsure (1)..(1725): unsure at all n locations
ccaaaacgtcttgaattcatcattactagtttcctttccttagtaaaaccctacatttctccgcccgcctttgatttctccccggccgttcccgccgccggtctccgatttaaccagggttgagtctaattccttctttttgtgctcattgctgtcggattctctaccggcgttacatcgaccagccagactcttccccatttgactgctttactgattcaatcgctcttttagattctggaagttgtgactcagtatctccccttcaacgaattagcatcctgcgcaagaatgtctattgcatcatcacttacttcagccacactttgcggcgcctcagtttttcctaaagcattagcctgcagctctgagttccctatcaatcttcccagcccttttgaaagttcaaagatttgtttgacttcgtttcctgcctctagggatctcaagaaaaatgctactttgaatctgactcgaaatgttggtccagtcaggtgtcatgctatgcaagctgggacgagggagttgaagaaatttgaacttagtgatgtgattgaagggaaacagtttgatagagagatgctaagcgctatattcgatgttgcacgcgaaatggaaaagatagaaaagagctcttcacaaagtgaaatcctcaagggttatttaatggctaccctcttttatgagccttctacccgtaccaggctttcatttgaatctgctatgaaacgccttggaggtgaagtcttaactactgagaacgctagagagttttcgtctgccgcgaaaggggaaacacttgaagacacaataagaacagtggagggttattcagatataattgtgatgcgacattttgaaagcggtgctgcaagaaaagctgcagctactgccaatatacctgtcattaatgcaggtgatggtcctggagagcatcctactcaggctctattggacgtctataccatccaaagtgaaattggaaaattagatggcatcagtgtagccttagttggagaccttgccaacggaaggactgtgcggtctcttgcatacttgcttgccaagttcaaagacgtgaagatctactttgtttcccctgaaattgtgaaaatgaaggatgatataaaagactatttgacatcaagcggggttgaatgggaagaaagttcagatttaatggaagtagcatccaagtgtgatgtagtttatcaaacacgaatccaaagagagaggtttggagaaaggctggacctttacgaagcagctcgtgggaagtttatcgtagacaaagatctgttaggagtgatgcagaaaaaagctattatcatgcatcctttaccgagattggatgaaatcaccgcagatgttgatgctgatccaagagctgcctacttcagacaagcaaagaacggtttgttcattagaatggctcttctaaagctactgcttgtcggttggtgattggatagttcatggtcgttaagttaaatcctttaatggactgattctcaagcctaccatgagctcaaggaatctgcaataataaaatccgaagctttagtgatttttgagtgttaagcacaaaagctgtgatcttgatgttaattaaaagaaggatctgttggtttgttggttaaaagactgatatgaggaagagttgttgaacttaatgaataaattgatttgagctnnnnnnnnnnnnnnnnnnnnnnnnnnnnnnnn

SEQ ID NO: 118030 - DNA, 1672 bp, Arabidopsis thaliana
aggtcacactatagaagattatgacgtcgcctgcacgcgtacgtaagctcggaattcggctcgaggccgtgagcctagaagcttaaaaccctcttcttatagatttcaaagcaaccattttcgaactctgtttgattccactgtcgatttaatcatcttacctaatggccggaagggctgcgacgtcgtcggcgaaatgggcgagagagtttttgttcagaagggtttcgtctaatcctcttggagctacccgtaactgttcttcggttcctggagcttcttctgcaccgaaagtccctcatttttccaagagaggaaggatattgacaggagctaccattggtctggccatagctggaggagcttatgttagtactgcagatgaagcaaccttctgtgggtggctattcaacgcaacaaaggttgtgaatcctttctttgctcttctggatgctgagtttgcgcataagctggctgtttcagctgcagctcgcgggtgggtacctagagaaaagaggcctgatccagcaatcttgggacttgaagtttggggaaggaaattctcaaacccaattgggcttgctgctggatttgacaaaaacgctgaggctactgagggactgctagggatgggatttggctttgttgaggtaggctctgtaactcctgttccacaagaaggcaatccgaaaccacgtatcttcagactaagccaagaaggagctattatcaataggtgtggatttaatagcgaagggattgttgtcgttgcaaagcggttgggtgctcaacatggtaaaagaatgttggctgaaacatcagctacttcgtcatctccaagtgatgatgtaaaaccagggggaaaatctggacctggtattcttggggtcaaccttggaaagaacaagacgagtgaggatgctgctgctgactatgtccaaggagttcataacttatcccagtatgctgattacttggtgatcaatgtttcatcacccaatactgcaggactgcgcatgcttcaaggaaggaaacagttgaaggaccttgtaaagaaggttcaagctgctcgggatgagatgcaatggggtgatgaaggtcctcctcctcttcttgtgaagattgctcctgatctgtccagaggagagcttgaagatattgcagcggtggctcttgctctgcacttagatgggctgatcatatcaaatacaacagtctcaaggcctgatgctgtaagcaacaaccccgtggcaacagaaacaggtggtttgagcgggaaaccgctctttgctctctccaccaacatgttgagagatatgtacactttgacacgaggaaagattccattgataggctgtggcggggttagtagtggtgaggatgcttacaagaaaataagagctggagctactcttgttcagctgtacacgggatttgcctatggaggacctgccccatcccacaaataaaggaggaactggtgaaatgcttagaaagggatggcttcaagtcgatccatgaagcaattggtgctgatcacagatgataaaactcaaagagcaatacgctgcggaaagatcccttttcttaaaacaacaaaacaagttgtatttaaagttcattgattcagttgtctctttctacccccaacaataacatcatcgtttttgcc

SEQ ID NO: 118031 - DNA, 1246 bp, Arabidopsis thaliana
  unsure (1)..(1246): unsure at all n locations
tcacgaagaagaagacgaagcccaaattcggcacgaggaaaaattccattttcctccattgattgtgagtgagaacaaacatttaaagcttcttactcaaagtttctttctttatagatctcaaaaaattcgatatttttctcgattcatccgccattaaggttttattgcgagatcgaagagagaaggagaaaatgacgcatagagtagatcaggaatatgattatttgtttaagattgtgttgattggtgattctggtgttgggaaatcgaatatcttgtcgagattcaccaggaatgagttttgcttggaatctaaatccactattggtgttgaattcgccaccagaactactcaggttgaaggaaagaccattaaggcccagatctgggacactgcaggtcaggagaggtacagggcgatcacaagcgcgtattacagaggcgcagtgggtgcacttcttgtctacgacattactaagagacagacctttgacaatgttttaaggtggctgcgcgaactgagagaccatgcagattccaacattgtgatcatgatggctgggaacaaatccgatctgaaccacttgagatccgttgctgaggaagatggtcaaagtttggctgagaaggaaggtctctctttcctggagacatctgctcttgaagcaacaaacgtcgagaaagcgtttcagaccatcttaggtgagatctaccatatcataagcaaaaaggcactggctgcacaagaagcagcagcagctaattctgcaatccctgggcaaggaactacgattaacgtcgatgacacatctggaggcgcgaaacgagcatgttgctcttcttaaactaaaggtaaactgtttatttcggttgctccttgttcagagattcaaacttttgttttcactggcttctcttcttttcaagttttggctgatgaaacgtaactatgcaagactatgtagaatactctgtttttattctcttcggtttggggtttgtgttcagtttaaagcttgttagtagtatacttagaatcttctggtgcttgcttgctttcccttcttcttcccttggtgtgtttctattgatttctggtttataaagtattttttctatctccggtttagtccggttcgtcttggctttgtttaatcaaatcattgattcctctcttatcaatgtattgtatccggttccnnnnnnnnnnnnnnnnnnnnnnnnnnnnnnnnnnnnnnnnnnn

SEQ ID NO: 118032 - DNA, 1294 bp, Arabidopsis thaliana
  unsure (1)..(1294): unsure at all n locations
ctcactatanggaaagctggtacgcctgcaggtaccggtccggaattcccgggtcgacccacgcgtccgcccacgcgtccgcggacgcgtggggtgagaacaaacatttaaagcttcttactcaaagtttctttctttatagatctcaaaaaattcgatatttttctcgattcatccgccattaaggttntattgcgagatcgaagagagaaggagaaaatgacgcatagagtagatcaggaatatgattatttgtttaagattgtgttgattggtgattctggtgttgggaaatcgaatatcttgtcgagattcaccaggaatgagtgntgcttngaatctaaatccactattgggtgttgaattcgcaccagaactactcangttgaaggaaagaccattaaggcccagatctgggacactgcangtcaggagaggtacagggcgatcacaagcgcgtattacagaggcgcagtgngtgcacttcttgtctacgacattactaagagacagacctttgacaatgttttaaggtggctgcgcgaactgagagaccatgcagattccaccattgtgttcatgatggctgggaacataatccgatctgaaccacttgagatccgtttctaagaaagatggtcaaagtttggctgagaagaaaggtctctctttcctggagacatctgctcttaaagcaacaaacgtcgagaaagcgtttcagaccatcttaggtgagatctaccatatcataagcaaaaaggcactggctgcacaagaagcagcagcagctaattctgcaatccctgggcaaggaactacgattaacgtcgatgacacatctggaggcgcgaaacgagcatgttgctcttcttaaactaaaggtaaactgtttatttcggttgctccttgttcagagattcaaacttttgttttcactggcttctcttcttttcaagttttggctgatgaaacgtaactatgcaagactatgtagaatactctgtttttattctcttcggtttggggtttgtgttcagtttaaagcttgttagtagtatacttagaatcttctggtgcttgcttgctttcccttcttcttcccttggtgtgtttctattgatttctggtttataaagtattttttctatctccggtttagtccggttcgtcttggctttgtttaatcaaatcattgattcctctctaaaaaaaaaaaaaaaaaaaaagnnnnnnnnnnnnnnnnnnnnnnnnnnnnnnnnnnnnnnnnnnnnnnnnnnnnnnnnnnnnnnnnnnn

SEQ ID NO: 118033 - DNA, 453 bp, Arabidopsis thaliana
tcaattccctgaaaaaatttcataattcaaagagtgttccttggagagaaaagtttcatcctttcaacagatctgaagagggtcaattgaaattcgttttcacgattcatccgccatttttccggggaaaaaacaaaaggtgagatcaaagaggaaaaatggcgcatagggtagaacaggattatgattatttgttcaagatcgtgttgattggtgattctggtgtcgggaaaacaaacatcttgtctagattcacaaggaatgagttttgtttggaatctaagtccactattggtgttgaattcgccaccagaactcttcaggttgaaggaaagactgttaaggcccagatatgggacactgcaggtcaagagcggtacagagctatcacaagtgcttattacagaggagcggtaggtgcacttcttgtctatgacatcactaaaagacaaa

SEQ ID NO: 118034 - DNA, 1102 bp, Arabidopsis thaliana
  unsure (1)..(1102): unsure at all n locations
acgactcactatagggaaagctggcacgcctgcaggtaccggtccggaattcccgggtcgacccacgcgtccgcggacgcgtgggcggctgcgagaagacgacagaaggggggatttgctggaaaacaaaccgtcaatctccgtctttatagagaaaaaaagattctcttctcttctcgttctcatcatcgtcttaaagaaggaattcgatttttcgcctgaacctgcggatttttcgattcttcaaattcaatgtcttatgcttatctcttcaagtatatcatcatcggcgatactggagtggggaaatcatgtcttctgcttcagttcaccgacaagaggtttcagccggtgcatgaccttaccattggtgttgaatttggggctaggatgatcaccatcgataacaaacctatcaagcttcagatctgggatacggctggtcaagaatcctttaggtctattacaaggtcatactatagaggagctgcaggggcattgcttgtctatgatatcacaaggagggagacatttaaccatctagctagctggctagaagatgcaaggcagcatgcaaatgcaaatatgacgataatgctcattgggaataagtgtgatcttgctcacagaagggcagtgagtacagaggaaggagagcagtttgcaaaggagcacggtcttatattcatggaggcctctgccaagactgctcagaatgttgaggaggcattcattaagacagctgcaacaatatacaagaagattcaagatggtgtgtttgatgtgtcaaatgagtcatatggaatcaaagttggatatggaggaattccaggaccatcaggtggaagagatggatcaacctcgcaaggaggagggtgctgcggctgagatgggaaaaatatgtctatgtcattatgtaaaaatgatcacatatgatatagcaaaaatgtctctgcttctttctatagttgtaaatcgttttggaattcgatttggtgactgtgttgtggttggttttgaacggtttgacaatacacgtgtatgcctcttcatatatctaaaaattaagatgtgtttgcgnnnnnnnnnnnnnnnnnnnnnn

SEQ ID NO: 118035 - DNA, 1884 bp, Arabidopsis thaliana
  unsure (1)..(1884): unsure at all n locations
gagagttaagcnttgaagacgaagagataacgaattggttgttgatcactcgctttataaatatctaagtttcttgctcacaccaacatctctctaagcttcttcttctaccaatctaattcctctcttcagcttcttgtgttgtgacgcatactcgtcgcagtcttgagatatggccgccgcagtttccaccgtcggtgccatcaacagagctccgttgagcttgaacgggtcaggatcaggagctgtatcagccccagcttcaaccttcttgggaaagaaagttgtaactgtgtcgagattcgcacagagcaacaagaagagcaacggatcattcaaggtgttggctgtgaaagaagacaaacaaaccgatggagacagatggagaggtcttgcctacgacacttctgatgatcaacaagacatcaccagaggcaagggtatggttgactctgtcttccaagctcctatgggaaccggaactcaccacgctgtccttagctcatacgaatacgttagccaaggccttaggcagtacaacttggacaacatgatggatgggttttacattgctcctgctttcatggacaagcttgttgttcacatcaccaagaacttcttgactctgcctaacatcaaggttccacttattttgggtatatggggaggcaaaggtcaaggtaaatccttccagtgtgagcttgtcatggccaagatgggtatcaacccaatcatgatgagtgctggagagcttgagagtggaaacgcaggagaacccgcaaagcttatccgtcagaggtaccgtgaggcagctgacttgatcaagaagggaaagatgtgttgtctcttcatcaacgatcttgacgctggtgcgggtcgtatgggtggtactactcagtacactgtcaacaaccagatggttaacgcaacactcatgaacattgctgataacccaaccaacgtccagctcccaggaatgtacaacaaggaagagaacgcacgtgtccccatcatttgcactggtaacgatttctccaccctatacgctcctctcatccgtgatggacgtatggagaagttctactgggccccgacccgtgaagaccgtatcggtgtctgcaagggtatcttcagaactgacaagatcaaggacgaagacattgtcacacttgttgatcagttccctggtcaatctatcgatttcttcggtgctttgagggcgagagtgtacgatgatgaagtgaggaagttcgttgagagccttggagttgagaagatcggaaagaggctggttaactcaagggaaggacctcccgtgttcgagcaacccgagatgacttatgagaagcttatggaatacggaaacatgcttgtgatggaacaagagaatgtcaagagagtccaacttgccgagacctacctcagccaggctgctttgggagacgcaaacgctgacgccatcggccgcggaactttctacggggaaaaggagcccagcaagtaaacctgccagttcctgaagggtgtactgatcctgtggctgaaaactttgatccaacggctagaagtgacgatggaacctgtgtctacaacttttgagcaatattatcctgcttattaatttgctgttttactcctattgtctcttttggtttatttttctcctttgtgtaattgtggattggatcttgtcctcttttgttccctttttttttttttatgatgtacaacacattggtaatttaaaattgccttgtcataaactacacttaaaaaaaaaaaaaaaaaaaaaaaaaaaaaaaaaaaaaagggcggccgctctagaggatccaagcttacgtacgcgtgcaggcgacgtcatagatcttntatagatggacctaa

SEQ ID NO: 118036 - DNA, 675 bp, Arabidopsis thaliana
atgatctgccagctctatacgactcacttagggaaagctcggtacgcctgcaggtaccggtccggaattcccgggtcgacccacgcgtccgcccacgcgtccgctaccaatctaattcctctcttcagcttcttgtgttgtgacgcatactcgtcgcagtcttgagatatggccgccgcagtttccaccgtcggtgccatcaacagagctccgttgagcttgaacgggtcaggatcaggagctgtatcagccccagcttcaaccttcttgggaaagaaagttgtaactgtgtcgagattcgcacagagcaacaagaagagcaacggatcattcaaggtgttggctgtgaaagaagacaaacaaaccgatggagacagatggagaggtcttgcctacggcacttctgatgatcaacaaggcatcaccagaggcaagggtattggttgactctgtctttccaaggttcctatggggaccgggaccttaaccacggttgtccttagctcatacggatacgttagccaaggcctttggggagtacaactttggcaacatgttggttggggtttaaattgcccccgttttaatggcaagttttttttcaaataccaaggactttttccttttcctaataaggtccctttttgggtttgggggaaagcaggaattctccct

SEQ ID NO: 118037 - DNA, 1188 bp, Arabidopsis thaliana
  unsure (1)..(1188): unsure at all n locations
nnnnnnnnnnnnnnnnnnnttaggtgcactatagaagagctatgacgtcgcatgcacgcgtacgtaagctcccacccgcgcgcccgccattaaacaaaaaaaaaaaaaaaatcaaatctctctctttctctctctaatggcggcgacattaggcagagaccagtatgtgtacatggcgaagctcgccgagcaggcggagcgttacgaagagatggttcaattcatggaacagctcgttacaggcgctactccagcggaagagctcaccgttgaagagaggaatctcctctctgttgcttacaaaaacgtgatcggatctctacgcgccgcctggaggatcgtgtcttcgattgagcagaaggaagagagtaggaagaacgacgagcacgtgtcgcttgtcaaggattacagatctaaagttgagtctgagctttcttctgtttgctctggaatccttaagctccttgactcgcatctgatcccatctgctggagcgagtgagtctaaggtcttttacttgaagatgaaaggtgattatcatcggtacatggctgagtttaagtctggtgatgagaggaaaactgctgctgaagataccatgctcgcttacaaagcagctcaggatatcgcagctgcggatatggcacctactcatccgataaggcttggtctggccctgaatttctcagtgttctactatgagattctcaattcttcagacaaagcttgtaacatggccaaacaggcttttgaggaggccatagctgagcttgacactctgggagaggaatcctacaaagacagcactctcataatgcagttgctgagggacaatttaaccctttggacctccgatatgcaggagcagatggacgaggcctgaggatctagatgaagggggggagggttgttacgcgatgtttctgccaccaaatcgatctcaaaatccccataacctttgctcaaaaactgtgaaaaaagattgaagtgtttatgatgattatgattgtgcacagcttgatgatttatctactctactaaacctctgtgctcttaatatttattgtctcgactctgctcaagccttaaaaacatctttctccttaaaaaaaaaaaaaaaaagncgtgtcctaacgctatacaggatcccagctgacggcaggggacatcatagctcgtcgatagtgt

SEQ ID NO: 118038 - DNA, 874 bp, Arabidopsis thaliana
ctatacgacttacttagggaacgctggtacgcctgcaggtaccggtccggaattcccgggtcgacccacgcgtccgcccacgcgtccggttccatgaattgaaccatctcttcgtaacgctcggcttgctcggcgagcttcgccatgtagacatattgatctctgcttaaggtcgtcgccattagagaagaaggaagagagcttgaagaacgaagaacacgtgtcgcttgttaaggattacagatctaaagttgagactgagctttcttcgatctgttctgggattctcaggttacttgattcgcatctaattccttcagctactgccagtgagtctaaggttttttacctgaagatgaaaggagattatcatcgctattttggctgagtttaaatccggggatgagaggaaaactgctgctgaagatactatgatccgctacaaagctgctcaggacgttgcagttgctgatctagcacctacccatccgatcaggcttggtttggctcctaacttctcagggtgtactacgagattcttaactcttcaaagaaagctggaacatggcaaaacaggcttttgaagagccattggtgacctgacccattgggagaggagcatccaggacagactctcatcttccgttgctaggaacaatctaacctttggacctcgattccagaacaaatgttgacgccgagggcctatgggaaaagacggtattgaatgcccgcaccggacccaaatcgggttcacccctttgcggaaacttggaaaagaaagttggttttataaaatatggcacccttggggtaccgcgcttgacaacctggttgggggaatatcccacttgttcaaaaaaaaaaaaaaaaa

SEQ ID NO: 118039 - DNA, 1128 bp, Arabidopsis thaliana
cccgggccgacccacaacgtcacccacgcgtccgctttttttctgcgggcgcgtcgacccgatttcaaaattttccggtgaaatcgaaaaaaaaagcgagatcttcttctctaatggcgacgaccttaagcagagatcaatatgtctacatggcgaagctcgccgagcaagccgagcgttacgaagagatggttcaattcatggaacagctcgtaagtggagctacaccggccggtgagctgaccgtagaagagaggaatcttctctcggtcgcgtataagaacgtgattggatctcttcgtgcggcatggagaatcgtgtcttcgattgagcaaaaggaagagagcaggaagaacgaagaacacgtgtcgcttgttaaggattacagatctaaagttgagactgagctttcttcgatctgttctgggattctcaggttacttgattcgcatctaattccttcagctactgccagtgagtctaaggttttttacctgaagatgaaaggagattatcatcgttatttggctgagtttaaatctggtgatgagaggaaaactgctgctgaagatactatgatcgcttacaaagctgctcaggacgttgcagttgctgatctagcacctacacatccgatcaggcttggtttggctcttaacttctcagtgttttactacgagattctcaactcttcagagaaagcttgtagcatggcgaaacaggcttttgaagaagccattgctgagctggacacattgggagaggagtcatacaaggacagtactctcatcatgcagttgctaagggacaatctaaccctttggacctccgatatgcaggagcagatggatgaggcctgaaggtctaatggaagaaaagacggttatgtaatgtacctgcaaccgtaaccgaaaatctgagttcaacctcctttgctgtaaaacttgtcgaaaagaaaagtttgtttttttatgacagattatgtgcacagctttggtgttatctgctgctctgtatcaactctgtttttgtttggtaatttatcctcatctttgcttcttttcttctcaaaaaaaaaaaagaggggggggggatattattaaaaaaaaaaaaaaaaaaataattgaa

SEQ ID NO: 118040 - DNA, 814 bp, Arabidopsis thaliana
tcggtccggaattcccgggtcgacccacgcgtccgaaaaaaaatcaaatctctctctttctctctctaatggcggcgacattaggcagagaccagtatgtgtacatggcgaagctcgccgagcaggcggagcgttacgaagagatggttcaattcatggaacagctcgttacaggcgctactccagcggaagagctcaccgttgaagagaggaatctcctctctgttgcttacaaaaacgtgatcggatctctacgcgccgcctggaggatcgtgtcttcgattgagcagaaggaagagagtaggaagaacgacgagcacgtgtcgcttgtcaaggattacagatctaaagttgagtctgagctttcttctgtttgctctggaatccttaagctccttgactcgcatctgatcccatctgctggagcgagtgagtctaaggtcttttacttgaagatgaaaaggtgattatcatcggtacatggctgagtttaagtctggtgatgagaggaaaactgctgctgaagataccatgctcgcttacaaagcagctcaggatatcgcagctgcggatatggcacctactcatccgataaggcttggtctggccctgaatttctcagtgttctactatgagattctcaattcttcagacaaagcttgtaacatggccaaacaggttactcttcttctttctttttcgctgcttgcctcaattaggaacatctctttctctctctttccgttgcctctctggtaacaaacatataagtcgttgacctgagtttgtctcttgagagtttgcttctgtttct

SEQ ID NO: 118041 - DNA, 889 bp, Arabidopsis thaliana
  unsure (1)..(889): unsure at all n locations
tcgcatgccccccttccttagctcggaattcggcttgagaaaaaaaatcaaatctttttttttcttttttttatgggggggacctttagccgagacccagttggggtcctgggcaaacttggccagccagccggaccgtaccaaaaagatggttaatttattggaccagttggttccaggccctcttcaaccgaagaacctaaccgtggagaaaagaattctcctttttgtggctaacaaaaccgtgaccggttctctccccgccgcctggaggatcgtgtcttcgatggaccagaaggaagagagtaggaagaccgacgagcacgtgtcgcttggccaaggattccagatctaaagttgagtctgagctttcttctgttggctctggattccttaagctccttgactcgctatctgatcccatctgctggagcgagtcgagtctaaggtcttttacttgaagatgaaaggtgattatcatcggtacatggctgagtttaagtctggtgatgagaggaaaactgctgctgaagataccatgctcgcttacaaagcagctcaggatatcgcagctgcggatatggcacctactcatccgataaggcttggtctggccctgaatttctcagtgttctactatgagattctcaattcttcagncaaagcttgtaacatggncaaacaggcttttaaggagncatagctgagcttgcactctgggagaggatccttcaaaggcagactttcanaatcagtttcttaggggcaattancctttngcccccgntttcaggncagntgccgggccttaggcctggtaagggggagggtttcgggtttntcnccaaccgcttaaacccnaacctttcnnaactgtgaaaagttggtc

SEQ ID NO: 118042 - DNA, 2143 bp, Arabidopsis thaliana
aaaacacccaccaatgtctcgtgaacttattattctctgccaaccaattcttgttctgttccttactctgttttacaattctcatggctacttcgtctcacaaggatctgtaggaatcggcttcaacggttacttcactttaaccaacaccacaaaacacacattcggtcaagctttcgaaaacgagcacgttgaaatcaagaactcatcgacaggtgtcatctcatctttctcagtcaacttcttctttgcgatcgtccctgaacataaccagcaaggctcacacggtatgactttcgtcatctctcccacaagaggccttcccggagcttcctccgatcaatacctcggaatctttaacaaaacaaacaacggtaaagcctcgaataacgttatagctatcgagttagatattcataaagacgaagagtttggagatattgatgataatcatgttgggattaatattaacggtttgagatctgttgcctctgcttctgctggttactatgatgataaagatggaagctttaaaaaactttctttgatcagcagagaggtaatgaggctttccatcgtttatagtcaacctgatcaacagctcaatgttactttattccctgctgagatccctgttccgccactaaaaccgctcttgtctttgaaccgagatctctcgccgtatttgcttgagaaaatgtatcttggattcactgcatcgacggggtcagttggagcaattcattacttgatgggttggttagttaatggtgtaatcgagtatccgagattggagcttagtataccagtccttcctccatatccaaagaaaacatctaatagaacgaaaactgttttagccgtctgcttaacggtatctgtgtttgctgcgtttgtcgcttcgtggatcggtttcgtcttctatttgaggcataagaaggttaaagaggttcttgaagaatgggagattcaatatggacctcataggtttgcttataaggagcttttcaatgccacaaagggtttcaaggagaaacaacttcttggtaaaggaggctttggtcaagtctataaaggaacacttccgggttctgatgcagagatcgctgtgaagcggacttctcatgattcaagacaagggatgagcgagtttctagccgagatatcgaccattggtcgtctcagacatccaaatttagtcaggcttttaggatactgtaggcataaagagaatctctacttggtgtatgactatatgcctaatggaagccttgacaagtatctaaaccgtagcgagaatcaagaacggcttacttgggaacaacgtttcaggatcatcaaagatgttgcaactgctctactacacctgcatcaagaatgggtacaagtcatcattcatcgagatatcaaaccagctaatgttttaatcgacaatgaaatgaatgcgaggctcggggatttcggactggcgaaactgtatgatcagggattcgatcctgaaacatctaaagtagcgggaacattcggatatatcgcaccagagtttctaagaacaggaagagcaaccacaagcactgatgtttacgcctttgggttggtaatgcttgaagtagtgtgtggtagaaggataattgagagacgtgcagcagaaaatgaagaatatcttgtggattggatcttagagctttgggaaaatgggaaaattttcgatgcagcagaggaaagtatacgtcaagaacaaaacaggggacaagttgagcttgttttgaagctaggtgtgttgtgttcgcatcaagctgcatcgataagaccggctatgagtgtggtaatgaggattttgaatggagtttcacagctaccagataatcttcttgatgttgtaagggctgagaaatttagagaatggcctgagacatcaatggaattactactacttgatgtgaatacatcgagttcattggagttaaccgactcttcttttgtctcccacggccgctgaaattttaagtttaccactgattctttgtttgctatgaagatgtatcacaactgagattattacacattgtaatacacagccgaatgttttttttcctggtatgtacaagaataagaccacaccgcctcctccaaacattttttt

SEQ ID NO: 118043 - DNA, 2254 bp, Arabidopsis thaliana
aaaacaaaagcaatccaatcccaaacccatttgctcttaagattcttcacatagagaagtcacatgttccttcttcttcttccttcatcatccccaaacacacacaaactaaaaaaaaggcaaaaccctagatccaagatcagacctaatctaatcgaaactcatagctgaaaaatgaagagagatcatcaccaattccaaggtcgattgtccaaccacgggacttcttcttcatcatcatcaatctctaaagataagatgatgatggtgaaaaaagaagaagacggtggaggtaacatggacgacgagcttctcgctgttttaggttacaaagttaggtcatcggagatggcggaggttgctttgaaactcgaacaattagagacgatgatgagtaatgttcaagaagatggtttatctcatctcgcgacggatactgttcattataatccgtcggagctttattcttggcttgataatatgctctctgagcttaatcctcctcctcttccggcgagttctaacggtttagatccggttcttccttcgccggagatttgtggttttccggcttcggattatgaccttaaagtcattcccggaaacgcgatttatcagtttccggcgattgattcttcgtcttcgtcgaataatcagaacaagcgtttgaaatcatgctcgagtcctgattctatggttacatcgacttcgacgggtacgcagattggtggagtcataggaacgacggtgacgacaaccaccacgacaacgacggcggcggctgagtcaactcgttctgttatcctggttgactcgcaagagaacggtgttcgtttagtccacgcgcttatggcttgtgcagaagcaatccagcagaacaatttgactctagcggaagctcttgtgaagcaaatcggatgcttagctgtgtctcaagccggagctatgagaaaagtggctacttacttcgccgaagctttagcgcggcggatctaccgtctctctccgccgcagaatcagatcgatcattgtctctccgatactcttcagatgcacttttacgagacttgtccttatcttaaattcgctcacttcacggcgaaccaagcgattctcgaagcttttgaaggtaagaagagagtacacgtcattgatttctcgatgaaccaaggtcttcaatggcctgcgcttatgcaagctcttgcgcttcgagaaggaggtcctccaactttccggttaaccggaattggtccaccggcgccggataattctgatcatcttcatgaagttggttgtaaattagctcagcttgcggaggcgattcacgtagaattcgaataccgtggattcgttgctaacagcttagccgatctcgatgcttcgatgcttgagcttagaccgagcgatacggaagctgttgcggtgaactctgtttttgagctacataagctcttaggtcgtcccggtgggatagagaaagttctcggcgttgtgaaacagattaaaccggtgattttcacggtggttgagcaagaatcgaaccataacggaccggttttcttagaccggtttactgaatcgttacattattattcgactctgtttgattcgttggaaggagttccgaatagtcaagacaaagtcatgtctgaagtttacttagggaaacagatttgtaatctggtggcttgtgaaggtcctgacagagtcgagagacacgaaacgttgagtcaatggggaaaccggtttggttcgtccggtttagcgccggcacatcttgggtctaacgcgtttaagcaagcgagtatgcttttgtctgtgtttaatagtggccaaggttatcgtgtggaggagagtaatggatgtttgatgttgggttggcacactcgtccactcattaccacctccgcttggaaactctcgacggcggcgtactgagtttgactcgaagcatacgacggtggtggagtcgagtcgagtgaatttgagattgagatcagtggaccggtgatgacatatgttcggaccaagacctaaaccgaactgaatcgaaccgttttgccttttgtttattttatttattttcgttcacttgtttaaaattcttatatatatcgttttggtaggtcattttataatttatgcctttttgggatcaatttttaataggctgagtttgtatttattaataaatatctttatgaattttaaatgaaaattatgttttaaaaaaaaaaaaaaaaactaaattact

SEQ ID NO: 118044 - DNA, 745 bp, Arabidopsis thaliana
  unsure (1)..(745): unsure at all n locations
gttggtacgcctgcaggtaccggtccggaattcccggggtcgacccacgcgtccgctgttttatttcgttggaaggagttccgaatagtcaagacaaagtcatgtctgaagtttacttagggaaccagatttgtaatctggtggcttgtgaaggtcctgacagagtcgagagacacgaaacgttgagtcaatggggaaaccggtttggttcgtccggtttagcgccggcacatcttgggtctaacgcgtttaagcaagcgagtatgcttttgtctgtgtttaatagtggccaaggttatcgtgtggaggagagtaatggatgtttgatgttgggttggcacactcgcccactcattaccacctccgcttggaaactctcgacggcggcgcactgagtttgactcgaagcatacgacggtggtggagtcgagtcgagtgaatttgagattgagatcagtggaccggtgatgacatatgttcggaccaagacctaaaccgaactgaatcgaaccgttttgccttttgtttattttatttattttcgttcacttgtttaaaattcttatatatatcgttttggtaggtcattttataatttatgcctttttgggatcaatttttaataggctgagtttgtatttattaataaatatcttatgaaaaaaaaaaaaaaagggcggccgctctagaggatccaagcttacgtacgcgtgcatgcgacgtcatagttttttnnnnnnnnaac

SEQ ID NO: 118045 - DNA, 2152 bp, Arabidopsis thaliana
  unsure (1)..(2152): unsure at all n locations
agtaatttagttttttttttttttttttacaatttattttgttattagaagtggtagtggagtgaaaaaacaaatcctaagcagtcctaaccgatccccgaagctaaagattcttcaccttcccaaataaagcaaaacctagatccgacattgaaggaaaaaccttttagatccatctctgaaaaaaacccaaccatgaagagagatcatcatcatcatcatcaagataagaagactatgatgatgaatgaagaagacgacggtaacggcatggatgagcttctagctgttcttggttacaaggttaggtcatcggaaatggctgatgttgctcagaaactcgagcagcttgaagttatgatgtctaatgttcaagaagacgatctttctcaactcgctactgagactgttcactataatccggcggagctttacacgtggcttgattctatgctcaccgaccttaatcctccgtcgtctaacgccgagtacgatcttaaagctattcccggtgacgcgattctcaatcagttcgctatcgattcggcttcttcgtctaaccaaggcggcggaggagatacgtatactacaaacaagcggttgaaatgctcaaacggcgtcgtggaaaccaccacagcgacggctgagtcaactcggcatgttgtcctggttgactcgcaggagaacggtgtgcgtctcgttcacgcgcttttggcttgcgctgaagctgttcagaaggagaatctgactgtggcggaagctctggtgaagcaaatcggattcttagctgtttctcaaatcggagctatgagacaagtcgctacttacttcgccgaagctctcgcgcggcggatttaccgtctctctccgtcgcagagtccaatcgaccactctctctccgatactcttcagatgcacttctacgagacttgtccttatctcaagttcgctcacttcacggcgaatcaagcgattctcgaagcttttcaagggaagaaaagagttcatgtcattgatttctctatgagtcaaggtcttcaatggccggcgcttatgcaggctcttgcgcttcgacctggtggtcctcctgttttccggttaaccggaattggtccaccggcaccggataatttcgattatcttcatgaagttgggtgtaagctggctcatttagctgaggcgattcacgttgagtttgagtacagaggatttgtggctaacactttagctgatcttgatgcttcgatgcttgagcttagaccaagtgagattgaatctgttgcggttaactctgttttcgagcttcacaagctcttgggacgacctggtgcgatcgataaggttcttggtgtggtgaatcagattaaaccggagattttcactgtggttgagcaggaatcgaaccataatagtccgattttcttagatcggtttactgagtcgttgcattattactcgacgttgtttgactcgttggaaggtgtaccgagtggtcaagacaaggtcatgtcggaggtttacttgggtaaacagatctgcaacgttgtggcttgtgatggacctgaccgagttgagcgtcatgaaacgttgagtcagtggaggaaccggttcgggtctgctgggtttgcggctgcacatattggttcgaatgcgtttaagcaagcgagtatgcttttggctctgttcaacggcggtgagggttatcgggtggaggagagtgacggctgtctcatgttgggttggcacacacgaccgctcatagccacctcggcttggaaactctccaccaattagatggtggctcaatgaattgatctgttgaaccggttatgatgatagatttccgaccgaagccaaactaaatcctactgtttttccctttgtcacttgttaagatcttatctttcattatattaggtaattgaaaaattttaatctcgcctaaattactttttttttttgcatgtgacattggagggtaaattggataggcagaaatagaagtatgtgttaccaagtatgtgcaattggttgaaataaaatcatttttagtgtcacccttcattaaaaaaaaaaaaaaagnnnnnnnnnnnnnnnnnnnnnnnnnnnnnnnnnnnnnnnnnnnnnnnnnnnnnnnnnnnnnnnnnnnnnn

SEQ ID NO: 118046 - DNA, 1064 bp, Arabidopsis thaliana
agcggacgcgtgggttcttctctgtttttttgctttcgtcttcaagagagagagagagagagatacaaagagagaaatttggttgtttgttgacggaagcttcttcggtctctcttctccgtcttacgattgtcaacgcgtggttccatcttcaattttgtttctattttagcagaagtttctcgagcttcaaatactgtttcagatcaatcaatcagtcaatcatggctagctctggaaacaagaacatcaacgccaaattggtattactaggagatgttggagctggaaaatcaagtcttgtgctacggtttgtgaaagatcagtttgttgaatttcaggaatcaaccattggtgcagcttttttctctcaaacattggctgtgaatgatgcgactgtgaagtttgagatatgggatacagctggtcaggaacgataccacagtttggctccaatgtactacaggggtgcagctgctgctattattgtctttgacattactaatcaagcctcatttgagagggcgaagaaatgggttcaggaactgcaggcacaaggtaaccctaatatggtgatggctcttgctggaaacaaagctgatttattagacgcaaggaaggtgtctgcagaggaggcagagatatatgctcaagagaacagccttttctttatggaaacctcagcgaagaccgcaacaaatgtcaaagacatattctacgaaatagcgaaaaggctaccacgtgtacagccagctgaaaacccgacaggaatggttctcccaaacgggccaggggctacggcagtgagttcatcgtgttgtgcttagattcgtaccttaagagagatctcttttggttagtcacatagtagagaacatctggactttcatgtgtttgcttcttcttcgtctttgttactttactttgcttgcattgacaacaacaacagcgtatatcatgatgatacttctgcctttgtgaaatctgaagatatttgtatttggagagatttatatatatatatctcttttgtaattagaaaacataacttagtccgaaaaaaa

SEQ ID NO: 118047 - DNA, 1031 bp, Arabidopsis thaliana
tacggctgggaggggactactgaagggggaggaggaggacattggttgttgttgacgacgcgtttccgctcactaattttttttaacctttttgtgtctccgtcgtcttttgatcttcaatctcagttttgagctgaagattatcgtatcgacctgcgattctcttcagatcgataatccatggctgcagctggaaacaagagcattaacgccaaattggtgttgcttggagatgttggtgctggaaaatcaagtcttgtgttacggtttgtcaaagatcagtttgttgaattccaggaatcaaccattggtgctgcttttttctcacaaacgttagctgtgaacgatgccactgtgaagtttgagatttgggatacagcgggtcaggaacggtaccatagtttggctccaatgtactacagaggtgctgctgctgcaatcattgtttttgatgttacgaatcaggcttcgtttgagagggcaaagaaatgggttcaggaactgcaggcacaaggtaaccctaatatggtcatggcccttgctggaaacaaatctgatttattagatgcaaggaaggtgacagcagaggatgcacaaacatatgctcaggaaaacggccttttccttcatggaaacttcagcaaaaaccgctactaatgtcaaagagatattctatgaaatcgcaagaaggctaccgcgagtacagccaacagaaaacccaacaggaatggttctgccagacagggccatggatagggcagtgagctcatcttgttgtgcttagttatattgtgtaatggcacacacttctcttaaaaagagatcttttggtcactttaaagttatggacttctgtgtttgcgtctctttgctttgttttacgtatttgagatttgatctccactattttgtaaataaatctaatactcaactaagtaactaagtgcgtgagggggctatggatccatttgtcataaccctacgtacgcgtgcatgcgacgtaatagctgttcgatagttcacgcgttttt

SEQ ID NO: 118048 - DNA, 1378 bp, Arabidopsis thaliana
cttttgttggttccttgtcggtttccaagggtttttgtttagggttttcattttctttttccttatctatctaatcctctgtttctctccacatcaaaaaaaacctcaaaattaagagacgaattcgagataatgggttcgcttaaggaaggtcaaggaagagacatggaagaaggtgaatcagaagagccgcttttgatggctcagaaccagagattcactatgttccccattaggtacaaatctatttgggagatgtataagaaggctgaagccagtttctggactgctgaagaggttgatctttccactgatgtgcaacagtgggaggccttgacggattcagagaaacactttatcagccatattctggcgtttttcgcagcgtcagatggtattgttttggagaatttggctagattcttgaatgatgtccaagttccagaggctcgtgctttctatgggtttcaaatagccatggagaacattcattcagagatgtacagcttacttctggagacattcataaaggactcgaaggagaaggatagattgttcaatgctatcgagaccattccttgtatatccaagaaggcaaaatggtgtttagattggattcaaagtcctatgtcgtttgctgtgaggctggtcgcttttgcatgtgctgaaggaatcttcttctcaggaagcttctgtgccatcttctggctaaagaagaggggtcttatgccgggtttgaccttctcaaacgagcttatatcgagagacgaggggctccactgtgactttgcgtgtctcttgatcagtttgctgcagttgcacgttccattggagaaagtttatcaaattgttcacgaggcagtggaaattgagacagagtttgtctgcaaggctcttccatgtgatctgatcggaatgaactcaaacctcatgagtcaatacatacaatttgtcgctgaccgtcttctggttaccttgggatgtgaaaggacatacaaagcagaaaatccatttgactggatggagttcatatctctgcaaggaaagacaaacttctttgagaagagagtgggagagtatcagaaggcatcagttatgtcgaacctccaaaatggaaatcagaactacgaattcacgactgaagaggacttttgaatgaatccgccatcgaatctggaagggctcatcaaagtttagattctttatgagtcactctcattctttttagcccaaatccattagtagtagtctagtaagactagtagtagtagcaatggatgttatttgtgttctctatttcaccatcacttgtcccttctccattgtgtaataatattactatcttagttaatcaaatctataaaaaaaaaaaaaaaaa

SEQ ID NO: 118049 - DNA, 961 bp, Arabidopsis thaliana
cttcaatctctcgtcgtcatttcttcgtctcaccgttgaatctgaaaatgatcgccggagtattgccccgatcttcactcccgtcgaggcagactctctccgccgcgttagcctccttcaattcgtgtatttcgcacaatctcactccagccaccaccggagcttccgtcagctctcgattcactctcgcgtcgtctcctaactcttttggcatcagagcgaggaacatccacattagatctgagccgtcgatgattgttcccgcaggaatcgcgtcacaaggttacgccactgtcacaaaggatcgcaaaaacgagattaagaaagctaagattaaaatttctccagacaatgtcagaccattgagtaggaaggagatcgctctccagaaagaggcagcagaagaaagcacatcaaagataaaaggaacaaagatttgtatagcgattcggtcttttgttaacccggaaaagcaagcttggtgtcttcctcctcacactcgtaaagtcgcaatgcccgatacacgaactctgtacacggtgctaagatcgcctcacgtcgataagaagtctagagaacagtttgagatgaggttcaagaaacggtttcttgtcatcaaagctcagagtcatgagttgagcaagaagctgttttggttaaaacgttatcgtattcttggagctcaatatgaactccagttccattgcaagacccgtttggatatgactcaagtgttaggcaacatcaatggctccaccaccaatgcttactgagatggctaaagacatcattttgtagaagtttcaagacccaaccgggtactatgcaataatttcgaacttacggatccatgaaaccagctttgcttcacatcagatcaagtagttattttcttgcttagtataaacatgtgtttttggacgattttgaaagatacaattgagtttcagttaaaaaaaaa

SEQ ID NO: 118050 - DNA, 1707 bp, Arabidopsis thaliana
gcgatcttcctttctcttcaaacccttcaagagacaatctttcctgcgaaaatggtggtctctgctgactgcagaatctccctctctgcccctagctgcatacgtagtagctccacgggattgactaggcacattaagcttggcagcttctgcaatggtgagctcatggggaagaagctcaacttgtctcagcttccaaacattcgtcttcgatcttctactaacttctctcagaagagaattttaatgtctctaaatagtgtagctggggagagtaaggtacaagaacttgagactgagaaaagggatccaaggacagttgcttccattattcttggaggtggagcaggaactcgactctttcctctcacaaaacgccgcgccaagcctgccgttcctatcgggggagcctataggttgatagatgtaccaatgagcaattgtattaacagcggaatcaacaaagtctacatactcacacaatataactcagcatcattgaacaggcatttagcccgtgcttacaactccaatggacttggctttggagatggctatgttgaggttcttgcggccactcaaacgccaggagaatctggtaaaaggtggttccaaggtacagcagatgcggttcggcaattccattggcttttcgaggatgcaagaagcaaggacatagaggatgtattgatcctttctggagatcacctctacaggatggattacatggattttatacaggatcatcggcagagtggcgcggatataagcatttcctgcataccaatagatgacagacgtgcctcagattttgggcttatgaagatagatgacaaaggaagagttatctcattcagtgaaaaacctaaaggagacgacctgaaagcaatggcagtagacacaactattttaggactttccaaggaggaagctgaaaagaaaccatacatagcttcaatgggagtttatgttttcaaaaaagaaatactgttaaatctcttgagatggcgtttccccacagcaaacgactttggttcagagattatacccttctcagctaaagaattctatgtgaatgcttatctctttaatgactactgggaagatataggaacaataagatctttcttcgaggcgaatcttgcactcactgagcatcctggggcatttagtttctacgacgcggcaaaaccaatatatacatcaaggagaaacctgccaccatcaaaaatagacaactctaagctcatcgattcaatcatttctcatggaagcttcttaaccaactgcttgattgagcatagcattgtgggaattagatcaagagtaggcagtaatgttcagttgaaggacactgtgatgcttggggcagattactacgaaactgaagcagaagttgcagcactacttgctgagggaaacgttcccattggaataggagagaacacaaaaattcaagaatgcataatagacaagaatgctagagttggaaagaatgtaatcatcgcaaactcggagggtatacaagaagcagataggtcatccgatggattttacatcagatctggcattactgtaatcttgaagaactcagtaattaaagatggagttgtgatatgatacttttaagatctaattgtaagaactgagaactaaaaaatgcagagcataaaagtcaacaataaattacaaagaaatttatttgat

SEQ ID NO: 118051 - DNA, 550 bp, Arabidopsis thaliana
aatatccttacatcgcggggatgggagtttattgtttcaaaaccgaagccttactgaagcttctgacatggcggtacccgagttccaatgactttgggtctgaaattattcctgcagctataaaagatcacaatgttcaaggatacatctacagagactattgggaagacatcggaactattaagagtttctatgaagctagtattgctcttgtcgaggagcatcccaagtttgagttttacgatcagaatacacctttctacacttctcctcggtttctaccacccaccaaaaccgagaagtgccggattgttaattcggtaatctcacacggatgtttcttgggagaatgcagcatccaacgttccattattggtgaaagatcacgtcttgactatggtgttgagcttcaggatactcttatgttaggagcggatagttaccaaaccgaatctgagtcgcgtctgcttgcggaaggaaatgttccaattggcattggccgagatacaaagatcaggaaatgcatcatcgataaaaacgcgcggattgg

SEQ ID NO: 118052 - DNA, 1947 bp, Arabidopsis thaliana
gccagctctatacgacttacttagggaaagctggtacgcctgcaggtaccggtccggaattcccgggtcgacccacgcgtccggacaaccacaaaactctcactccaaaactctcaattttgccttcctttgatcgaatactacaatggcgtctgtatctgcaattggagttctcaaggtacctcctgcttcgacttccaattccaccggaaaagccacggaggcggttcccacgaggactctttctttctcctcctctgttacttcatccgacgacaagatttcactcaaatccaccgtctcccgtctttgtaaatctgttgttcgcaggaatccgatcatcgtctctcccaaagccgtctcagattctcaaaactctcaaacttgtctcgatcctgatgctagcagcagtgttttggggataatcttaggaggtggagctggaactcgtctttatccacttacgaagaagagagcgaaaccagctgtgcctcttggtgctaactataggcttattgatattcctgtgagcaactgtttgaatagcaacatatccaagatctatgttcttactcagttcaattccgcgtctttgaatcgtcatctttcacgagcttatgctagtaacatgggaggttataagaatgaaggattcgttgaagttctcgctgctcaacagagtcctgaaaaccccaactggttccaggggacagctgatgccgtcaggcaatacttgtggttgttcgaggagcataatgtcttggagtatctcattcttgctggggatcatttgtatagaatggactatgagaagtttattcaagcacatagggagactgatgctgatatcacagtagctgcattaccaatggacgagcaacgagccactgcttttgggctgatgaagattgatgaggaaggacgtattattgaatttgctgaaaaaccaaaaggggagcacctaaaggccatgaaggttgacacaacaattctaggtcttgatgatcagagagccaaggagatgcctttcattgctagtatgggtatttatgttgtaagcagagatgtaatgctagacttactacggaatcagtttcctggagctaatgactttggaagtgaagtcattcccggtgccacttcccttggactgagggtgcaagcttacctatatgatggttactgggaagacattggtactatagaggcattttataacgctaatcttggaatcaccaagaaaccagttcctgattttagtttctatgaccgttctgctccgatctacacacagccgcgttatttaccaccgtctaagatgcttgatgctgatgttactgacagtgtcatcggagagggctgtgttatcaagaactgcaaaattcatcactctgtggttggactccgttcctgcatatcagaaggtgctattattgaagattcgttattaatgggagctgattattacgagactgctacggaaaagagcctcttaagcgcgaaaggaagtgtacccataggtattgggaaaaactcgcacatcaaaagggccatcatcgacaaaaacgcacgtatcggtgacaatgtcaagatcataaacagcgacaacgtgcaagaggcagcgagagagactgatggatatttcataaagagcggaattgtaacggttatcaaagacgccttaatcccaaccggcactgtcatctgaagtacacataatgctcctttgtttatttcttcatctttctaatgccctatcaataagttttctttatgctttttaagccccaataaatctactactagttgtaatgctgcttacgaaagagattacgaaatcatgttttcacaataccattgtctcttttgagaaaaaagaagaccctatgaatttcactaaatttatcttttgtagataataatcaataaaagtaagtttcttcatcc

SEQ ID NO: 118053 - DNA, 1750 bp, Arabidopsis thaliana
attcatcatcatcaatcaatccttcattttatggatctactcatatcttgattgattcttccttctatctctcccttttcttccatctctttttctctgggtttccccgatttgaagagcgtgacaaaggaagaatcttttattaaaacaaattcttctgttttaatcttgggatggcctcggtgggcatagagcctagtgccgcggttagagaatctactggaaacgttactgatgctgatagattacccgaggagatgaaggacatgaaaattcaagatgataaagaaatggaagctacgattgttaatggcaatgtgactgagactggccatataatagtaactactataggaggaagaaatggccagccaaaacagacaatcagttacatggcggagcgagttgttggacatggctcctttggtgttgtgtttcaggccaaatgtttagaaacaggagaaactgttgctataaagaaagttctacaagatcggaggtacaagaatcgtgagcttcaaacaatgaggctacttgaccatccaaatgttgtgtctttgaaacattgtttcttctctacaaccgaaaaagatgagctttatctcaacttggttctggaatacgttccggaaactgtgcaccgcgtcatcaaacactacaacaaacttaaccaacgaatgcctctcgtttacgtcaaactttacacttatcagatttttaggtccttatcctacattcaccgatgtatcggcgtatgtcatcgagacatcaaacctcaaaacttgttggtaaatccacacactcatcaagtgaaactatgcgattttggaagtgcgaaagtattggttaaaggagagccaaacatttcatacatttgctcgaggtattacagagcacctgagctcatttttggagccaccgagtatactacagccattgatgtctggtctgcaggatgtgttctcgccgagcttcttctcgggcagccattgttcccgggtgagagcggtgttgatcaacttgtagagattataaaggggtttgggaacaccaacaagggaagaaatcaaatgcatgaacccgaattacacagagttcaaatttcctcagattaaagctcatccatggcataagattttccacaagagaatgcctccagaagctgttgatttggtctcaaggcttcttcaatactctcccaatctccgttgtgctgctcttgattcattggtccacccattctttgacgagctaagagatccgaatgcgcgattacccaacggacgtttccttccaccgctctttaactttaagcctcatgaacttaaaggtgtgcctgtggagatggtggcgaagttagttccagaacatgcgaggaagcaatgtccgtggctcagtttatgatttgttctcacctgcaaacacgaaaactagagcaaagcagtcgagatattcatctcttctcttctctctccttcctctgtattaatattattataatgatcatatctcaatctgatgatttagtaaccctttgtttgttgtatgagtagagaaagagtgaatcatttgtgggggttatgatattgtataagccaacaaagattattttttaaagagagtttcgtgttttctgtctcaaaaaaaaaaaaaaaaaaaaaactcaaacccacagggcggccgctctagaggatccaagcttacgtacgcgtgcatgcgacgtcatagtaatctatagttcgcctaaatt

SEQ ID NO: 118054 - DNA, 1604 bp, Arabidopsis thaliana
acccacgcgtccgaaagttagagagagagattcataatcatcaaacccacaaatccttttttttttttgttaaaacccacaaatccttactcgtacggatctctctctctttaatatctcagatcgatgaagagaagaattaggatttttacgttttcatcggcttgaaagtttgaagagttttgtagcctgaaaaatggcgtcagtgggtatagctcctaatcctggagcaagagactctactggtgttgataaattgcctgaagaaatgaatgacatgaaaattcgtgacgataaagaaatggaagcgacagtggtagatggaaatggaacagagactggacatatcattgtgactactattggtggtagaaatggccaaccaaaacagacaattagctacatggctgagcgtgttgttggtcacggatcttttggtgttgtgttccaagcgaaatgtcttgagacaggagaaactgttgcgataaagaaagttttacaagataggaggtacaagaaccgtgagcttcaaaccatgaggctacttgaccatcctaatgttgtgtctctgaaacattgtttcttctcaaccactgaaaaagatgagctttacctcaatcttgttcttgagtacgttccagaaactgttcatcgtgttatcaaacactacaacaaactgaatcagagaatgcctcttatatacgtcaaactttacacttatcagatttttagagccttatcttacattcaccgatgcattggtgtgtgtcatcgtgacataaaacctcaaaacttgttggtaaatccgcacactcatcaagtaaagctatgtgattttggaagtgcaaaagtattggtaaaaggagaaccaaacatttcctacatctgctcgaggtattacagagcacctgaacttatttttggagcaaccgagtatacgacagccattgatgtctggtctgcaggatgtgttctagctgaactattgcttggacagcccttgttccctggtgagagcggtgttgatcaacttgtacacattatcaaggtcttgggaacgcctactagagaagaaatcaagtgcatgaacccaaactacacggaattcaaattccctcagattaaagctcatccatggcacaagattttccacaaacgcatgcctccagaagctgttgatttggtctcaagacttcttcaatactctcctaatctacgaagtgccgctctcgacacattagtccacccattctttgatgagttaagagacccaaacgcacgtctacctaatggacgtttccttccaccggcttttcacttcaagcctcacgagctgaaaggtgtaccattggagatggtagctaagttagtacctgagcatgcaaggaagcagtgtccttggctcggtttgtgatttcctcttaatgtagcatgaacacaacaaacacttcttataaattacctctctatgtatcaatatgtcacaaactgatatgcaccctttgtttgttgtatgagtagagaaaaaaagagttattactatggttggttggttcataatgtaaaagcccaccaagattttttatctagataaagagtttgct

SEQ ID NO: 118055 - DNA, 1486 bp, Arabidopsis thaliana
  unsure (1)..(1486): unsure at all n locations
caggtcctggtccggaatcccgggtcgacccacgcgtccggaagcgacagtggtagatggaaatggaacagagactggacatatcattgtgactactattggtggtagaaatggccaaccaaaacagacaattagctacatggctgagcgtgttgttggtcacggatcttttggtgttgtgttccaagcgaaatgtcttgagacaggagaaactgttgcgataaagaaagttttacaagataggaggtacaagaaccgtgagcttcaaaccatgaggctacttgaccatcctaatgttgtgtctctgaaacattgtttcttctcaaccactgaaaaagatgagctttacctcaatcttgttcttgagtacgttccacaaactgttcatcgtgttatcaaacactacaacaaactgaatcagagaatgcctcttatatacgtcaaactttacacttatcagatttttagagccttatcttacattcaccgatgcattggtgtgtgtcatcgtgacataaaacctcaaaacttgttggtaaatccgcacactcatcaagtaaagctatgtgattttggaagtgcaaaagtattggtaaaaggagaaccaaacatttcctacatctgctcgaggtattacagagcacctgaacttatttttggagcaaccgagtatacgacagccattgatgtctggtctgcaggatgtgttctagctgaactattgcttggacagcccttgttccctggtgagagcggtgttgatcaacttgtagagattatcaaggtcttgggaacccctacctaaaanaagaaatcaagttgcatgaaccaaactacacggaattcaaattccctcagattaaagctcatccatggcacaagattttccacaaacgcntgcctcccaaaacctgttgaattgggtctcaagaanttcttcaatactcctcctaatctacnaaattgccgctccccaaccattaattccacccattccttgatgaattaagaaaaccaaatgcgcgattactcaacggacgtttccttccaccgctctttaactttaagcctcatgaacttaaaggtgtgcctgtggagatggtggccaagttagttccagaacatgcgaggaagcaatgtccgtggctcagtttgtgatttgttctcacctgcaaactcgaaaactagagcaaagcagtcgagaaattcatctcttctcttctctctccttctcggtattaatattattataatgatcatatctccatccgaagagatagtaaccctttgtttgttgtatgagtagagaaagagtgaatcatttgtgggggttatgatattgtataagccaacaaagattattttttaaagagagtttcgtgttttctgtctctctcactcatataaaaatatcaaaaaaagtgttaaaacgcaaagggcggccgctctagaggatccaagcttacgtacgcgtgcatgcaacgtc

SEQ ID NO: 118056 - DNA, 612 bp, Arabidopsis thaliana
  unsure (1)..(612): unsure at all n locations
ggcttatacaatatcataacccccacaaatgattcactctttctctactcatacaacaaacaaagggttactaaatcctcagattaaagctcatccatggcataagattttccacaagagaatgcctccagaagctgttgatttggtctcaaggcttcttcaatactctcccaatctccgttgtgctgctcttgattcattggtccacccattctttgacgagctaagagatccgaatgcgcgattacccaacggacgtttccttccaccgctctttaactttaagcctcatgaacttaaaggtgtgcctgtggagatggtggcgaagttagttccagaacatgcgaggaagcaatgtccgtggctcagtttgtgatttgttctcacctgcaaacacgaaaactagagcaaagcagtcgagatattcatctcttctcttctctctccttctctgtattaatattattataatgatcatatctcaatctgatgatttagtaaccctttgtttgttgtatgagtagagaaagaataaatccctcctgggggttatgatattgtataagccaattnnggttgttaataaaaaaaaaaaaaaaaagggcggccgct

SEQ ID NO: 118057 - DNA, 905 bp, Arabidopsis thaliana
  unsure (1)..(905): unsure at all n locations
tggccgtctctgcggtaccggtccggaattcccgggtcgacccacgcgtccggagaaactgttgctataaagaaagttctacaagatcggaggtacaagaatcgtgagcttcaaacaatgaggctacttgaccatccaaatgttgtgtctttgaaacattgtttcttctctacaaccgaaaaagatgagctttatctcaacttggttctggaatacgttccggaaactgtgcaccgcgtcatcaaacactacaacaaacttaaccaacgaatgcctctcgtttacgtcaaactttacacttatcagatttttaggtccttatcctacattcaccgatgtatcggcgtatgtcatcgagacatcaaacctcaaaacttgttggtaaatccgcacactcatcaagtgaagctatgcgattttggaagtgcgaaagtattggttaaaggagagccaaacatttcctacatctgctcgaggtattacagagcacctgagctcatttttggagccaccgagtatacgacagccattgatgtctggtctgcaggatgtgttctcgccgagcttctgctcgggcagcccttgttcccgggtgagagcggtgttgatcaacttgtagagattatcaaggtcttgggaacgcctactagagaaggaatcaagtgcatgaacccaaactacacgggattcaaattccctcagnttaaagctcatccatggcacaaggattttncacaaacggatgcctccagaagcttntgntttnggctnaaagctttnttcaaaatctcctaatcttcggngngccgtttttgcaaatttggnccnccctttnttttnatgggttaggggcccaanggnggtttccnatnggngggtcnttccnccggttttaacttaaagcc

SEQ ID NO: 118058 - DNA, 507 bp, Arabidopsis thaliana
agcccgggcatagttcttgtctccagcagttccatttaagtacggaggaggaagtgaccatacgccgatgcccgcgaccagctaaggctatcggcaaagaaccccaagcatctcgttatcctcctgttttcgagtaagcagccgcctcggatgtaccgaaaacaaggttattgacaacttcagcttttccgctcggaatcccaacctctgcagctccttcttcaccagctctatttccaggtacgccaaagtcagccattgcaatttgagcaatagcctctttcttctcttcatgatgtgtaatttctcctgtgctagtgctaactgtttgttgatcaccaggaggagtgagctgaaagccaagaacggagccagaaccatctctctctgcgtctgtgataaatctctcttcatcagactcacgagagtcacccggacgcgtgggtcgacccgggaattccggaccggtacctgcaggcgtgcgtgctttccctaaggtgagtcgta

SEQ ID NO: 118059 - DNA, 519 bp, Arabidopsis thaliana
  unsure (1)..(519): unsure at all n locations
ctctatacgactcactattagggaaagctggtgcgcctacaggtaccggtgccggagttcccgggtctacccacgcgtgcgagcagacaaaaaggagataaagagaagaggattcatcatcatcaatcaatccttcattttatggatctactcatatcttgattcttccttctatctctcccttttcttccatctctttttctctgggtttccccggattgagttttttaatctctgaggggcagatttgaagagcgtgacaaaggaagaatcttttattaaaacaaattcttctgttttaatcttgggatggcctcggtgggcatagagcctagtgccgcggttagagaatctactggaaacgttactgatgctgatagattacccgaggagatgaaggacatgaaaattcaagatgataaagaaatggaagctacgattgttaatggcaatgtgactgagactggccatataatagtaactactataggangaagaaatggccacccaaaacagaca

SEQ ID NO: 118060 - DNA, 1203 bp, Arabidopsis thaliana
  unsure (1)..(1203): unsure at all n locations
nnnnnnnnnnnnnnnnnnnnnnnnnnnnnnnnnnnnnnnnnnnnnnaaaggattttacccaaaatctccgatattcttattccccacgcgtccgatcttcttcttctacttcgtcctcatcatcgtcacatagatcctcctttttcgttaattggggagagatatactttcttttgaggatcagatcgtgacagggtttagctcaaggagagggtgagaaaaagaagaagaaggtgagaaaagtgaaggcaaggctttgaggatgtcttttacaggaactcaacagaaatgcaaggcttgtgagaagactgtttatgctgttgagcttctctctgctgatggagttggatatcacaagtcttgcttcaaatgcactcactgcaaaagcaggcttcagctgagtagttactcatcaatggaaggtgttttgtactgtaagcctcattttgagcagctctttaaggagagtggtagtttcaacaagaactttcagtcacctgcaaaatcggctgacaaatcaactcctgagctgacaaggacgcctagccgagttgctggcaggttctctggtacacaagagaaatgcgccacttgtagtaaaactgtgtatcctattgaaaaggtaacagtcgagagccagacatatcacaagtcctgcttcaagtgctcacatggaggttgcccaatttcaccttccaactacgcagctcttgaaggaatcctgtactgcaagcaccatttcgctcagctcttcaaggagaagggaagttacaaccacttaatcaaatccgcttccatcaaacgctctgcagccgcagcagtcgccgccggtgtaccagcagcctccgttcctgaatcttaaaatccaataatttctcctctctagtctaaaatttgaagttaatgccaaactgattcagtttgatttctctttgtgagagcgtgtgtgtaatctatgctttgatgttcttatttccattgatgtctcctaaaattctatgtttgtgtggtgatttggttatctataaaaagtctgaaactttccttataaaaaaaaaaaaagnnnnnnnnnnnnnnnnnnnnnnnnnnnnnnnnnnnnnnnnnnnnnnnnnnnnnnnnnnnnnnnnnnnnnngaaatgcaacccaacctnnnnnnnnnnnnnnnnnnnnnnnnnnnnnnnnnnnnnnnnnnnnnnnnnnnnn

SEQ ID NO: 118061 - DNA, 600 bp, Arabidopsis thaliana
gcggtgttccccccagggaggttttgccgaaccccctttgggcccccctttaggggggtggtgtttcacaaggacttcggcccctggaaatcgggtgccaaataaacccctgggctgccagggccccttgcccggttgctggcaggttctctggctccccaaggggaattggcgccacttggtaggtaaacctggggtaccctatttgaaaagggtaccaggtcgagagcccagacatatcacaaggtcctggcttcaagtgctcacatggaggttgcccaatttcaccttccaactacgcagctcttgaaggaatcctgtactgcaagcaccatttcgctcagctcttcaaggagaagggaagttacaaccacttaatcaaatccgcttccatcaaacgctctgcagccgcagcagtcgccgccggtgtaccagcagcctccgttcctgaatcttaaaatccaataatttctcctctctagtctaaaatttgaagttaatgccaaactgattcagtttgatttctctttgtgagagcgtgtgtgtaatctatgctttgatgttcttatttccattgatgtctcctaaaattctatgttt

SEQ ID NO: 118062 - DNA, 685 bp, Arabidopsis thaliana
  unsure (1)..(685): unsure at all n locations
ttcttcttctacttcgtcctcatcatcgtcacatagatcctcctttttcgttaattggggagagatatactttcttttgaggatcagatcgtgacagggtttagctcaaggagaggtattagatccgtactttgtgataaactttctcaagggggtgagaaaaagaagaagaaggtgagacatgtgaaggcaaggctttgaggatgtcttttacaggaactcaacagaaatgcaaggcttgtgagaagactgtttatgctgttgagcttctctctgctgatggagttggatatcacaagtcttgcttcaaatgcactcactgcaaaagcaggcttcagctgagtagttactcatcaatggaaggtgttttgtactgtaagcctcattttgagcagntctttaagggagngtggtagtttcaacaagaactttcaagtcaccctgcaaaatcgggctgacaaatcaaacttccctgaggcttgncaaggnccgcttggccnaagtttnncttgcaaggttctcttgggtacacaaggggnaatncngccccttttaggtaaaacttgtggatccctntttnaaaagggtancagtcggggggcccggcatttttacaaagcccngctttaagggcctcccaatngggggttccccantttaccttccaactnnggnggctttaagg

SEQ ID NO: 118063 - DNA, 2042 bp, Arabidopsis thaliana
  unsure (1)..(2042): unsure at all n locations
nnnnnnnnnnnnnnnnnnnnnnnnnnnnnnnnnnnnnnnnnnnnnnnnntgtgccggaccggaatttccggttcgacccacgcccacgcgtccgaaagaaattaaatacacacaatgaccaaagaagtttgctccaacattggactttggttattgctcacgttacttattggtaactatgtcgtcaatcttgaagcctcgcaccatgtctacaagagacttacccaaagcactaacaccaaatctccttccgtaaaccagccctaccggaccggtttccatttccaaccccccaaaaattggatgaacgatcctaatgggcctatgatatacaaaggaatatatcatcttttctaccaatggaacccgaaaggagccgtgtggggtaacatcgtgtgggctcattccacgtcaacagacttaatcaattgggatccacatcctccagctatcttcccatctgcacccttcgatatcaacggatgctggtccggttcagctactattctccctaatggaaaaccggttatcctctataccggaatcgaccctaagaaccaacaggtccaaaacatagccgagcctaagaatctctccgatccttatctccgagaatggaaaaagtcgccgttaaatcctctcatggctcctgacgccgttaacggaatcaacgccagctcgttccgtgacccaaccaccgcgtggctaggccaagacaagaaatggagagtgatcatcggaagcaagattcaccgtcgtggactagccattacttacacgagtaaagactttctaaaatgggaaaaatctccagagccgttgcattacgacgacggaagtggaatgtgggaatgtcctgattttttcccggtcacgaggtttggttctaacggcgtggaaacgtcttcgtttggtgaacctaatgagattttgaagcacgtgttgaaaataagtttggacgacacgaaacatgattattacacgattggtacgtacgatcgggttaaagataaattcgtaccggacaatggtttcaagatggacggtacggctccgagatacgattacggaaagtattacgcgtctaaaacgttttttgactcggctaagaaccggagaatcttgtggggttggactaacgagtcatcgtcggttgaggatgatgttgagaaaggctggtccggtattcagacgattccaaggaaaatatggcttgatagatcagggaaacaattaattcagtggccggttagggaagttgaaagattacgtacaaaacaagtcaaaaacttacgcaacaaagttctaaagtcaggatctaggcttgaagtctatggtgtgacagctgcacaggcggatgtagaagtattgttcaaagtgagagacttggagaaagcggatgtgatagaaccaagttggactgatccgcagttgatttgtagcaagatgaatgtatcggttaagtctggtttaggtccattcggtttaatggttttggcatctaagaatttggaagagtacacatctgtttattttagaatcttcaaagcccgtcaaaacagcaataagtacgttgtgctcatgtgcagtgaccaaagcagatcttcgctgaaggaagataatgacaaaacgacatacggagcctttgtggatattaatcctcaccaaccactatccctcagagccttgattgatcattcagtagtggagagtttcggtggaaagggaagagcatgcattacctcaagagtgtatccaaaattggcaataggaaaaagttcacatctctttgcttttaattatggatatcaaagtgttgatgtcttaaacttaaatgcttggagcatgaactctgcccaaatcagttgatcacgtaaagatacacacatgtaaacacattacatctccattgatttagcatttatatgagttgattttggagagatcttatatggtccactttgtttggttgtcaataaaattgtccaatttgtttgtttgaaataattctaaaaggctaatatatatgacattttatttga

SEQ ID NO: 118064 - DNA, 1790 bp, Arabidopsis thaliana
cgaccacgcgtcagcacaatctctccacagaacaaaagcaaaaagcctaaaccgggataatggaagctctaaactctatcttaaccggctacgccgtggcagccctatcagtctacgctctttggttctacttcctgtcccgaagactaaccggtcccaaagtcttaccgttcgtaggaagcttaccgtatctaatcgctaaccggagccgaattcacgattggatcgctgataatctccgagcaactggtggtacgtatcaaacatgcaccatggtgatacctttcgtagccaaggcgcaagggttttacactgtgacgtgtcacccaaaaaacgtcgagcatatccttaagacacggttcgacaactatccgaaaggtccgatgtggcgcgctgctttccacgacctgttaggacaaggaatcttcaacagcgacggtgacacgtggctcatgcaacgtaagactgcagcgcttgagttcacaactagaactcttagacaagccatggctcggtgggttaacgggactatcaagaaccggttatggcttatattagaccgtgcggttcaaaacaacaaaccggttgatcttcaagatttgtttttgaggttaacttttgacaacatttgtggtctgacttttggtaaagacccggagacgctctctctggatctaccggataatcccttctctgtcgcttttgacaccgcgacagaggctactctaaagagacttctctacaccggtttcttgtggaggattcagaaagctatggggattggatcagaagataagctcaagaagagtcttgaagtcgttgagacttacatgaacgatgcaatcgacgctcggaaaaactctccctccgatgatcttttgtcacgtttcttgaagaaacgtgacgttaacggtaacgttcttccaacagatgttcttcagcgtatcgcgcttaactttgttctcgcgggccgtgacacttcttcggtggccttgagctggttcttctggctcgtcatgaataaccgggaggtggaaacgaagatcgttaacgagttgtcgatggttctgaaggagacacgtggcaatgatcaggagaaatggacggaggagccgttagagttcgacgaggcagataggctcgtttacctcaaggctgctttggctgaaacgctgcgtttatacccttctgtgcctcaggatttcaaatacgtcgtagagcattgacgttttgccggacgggactttcgtgccaagaggctcgacggtgacctactcgatttactcgatcggacgtatgaaaacaatttggggcgaagattgtctcgagttccgtccggaacggtggctgacagccgacggtgaacggtttgagactcccaaagatggttacaagttcgtagcgttcaacgccggaccaaggacttgcttgggaaaggacttggcttataatcagatgaagtcggtggcttcagccgttctcctccgttaccgggtttttccggttcccggtcaccgcgttgagcaaaagatgtcgctgacgcttttcatgaagaacggtttacgtgtttatttgcaacctcgtggtgaggtgcttgcatgattcacattaagggtattatcgtaaatatgtttgtcatttgaagtttaaattgttttaagaacaacctactttattctatgttttctccacctacaaaatacttattatgatatatatgcactttttgtgcctttgttaaaattgtttgagtttgttcaactctttttgaataaaagtttatttggttt

SEQ ID NO: 118065 - DNA, 3734 bp, Arabidopsis thaliana
tccagaaacagtgtcttcttctctttttgttgttacttcctttggtttcttcaatggaaaaagaagagctcaacaaattgaatcatctctctctcgtctccaatgtctgcaacgaattggaaacgcatctaggatctgcagaaaaagttttggctgagttcattatcgatctaggtcgtcactctgagacagtcgatgaattcgataagaatcttaaggaaggcaggtgcagagatgccggattacttcgtccggtcgttgttaactacaatccacggtatttatcctccgaagcctaagtcggagaagaagaaagaggaaggtgatgatcagaaattcaaaggcttagcgattaaggatactaaggataaagttaaggagctcgagaaagagattgagagagaagctgaggagcgacggagagaagaggatcgaaatagagatagagatcggagagaatccggtagggatagagacagagatagaaatcgtgatcgtgatgatagaagggatcgacatagggatagagagaggaatcgtggagatgaagaaggtgaagatagaagaagtgataggaggcatagagaaagaggacgtggtgatggtggtgaaggggaagataggcgtagagataggcgtgcgaaggatgagtatgtggaggaagataaaggcggtgcgaatgagccggagttgtatcaggtatataaagggagagttactagggttatggatgcaggttgttttgttcagtttgataagtttagaggaaaagaaggtttagttcatgtttctcagatggctactagaagggttgataaggctaaggagtttgtgaagagagatatggaggtttatgtgaaagttatatcgatttcgagtgataagtatagtctttctatgagggatgttgatcagaatacaggtagagatttgattcctttgaggaagccttcagatgaagatgattcatccaggagtaatccgtcgtatagaactaaggatgggcaagtgactaagactgggatttcagggatcaggattgtggaggagaatgatgttgcgccttcacgtagaccgttgaagaagatgagctctcctgagagatgggaagccaagcagttgattgcctctggtgttttgagagtagatgagtttccaatgtatgatgaggatggagatgggatgctttatcaagaggaaggtgctgaagaagaacttgagattgagatgaatgaagacgaacctgctttcttacaagggcagactaggtactctgttgacatgtctccggttaagatcttcaaaaatccagaaggttctttgagtcgtgcagctgcacttcagtccgctctcactaaggagaggagagaaatgagggaacaacagcagagaacaatgcttgactcaatccccaaggatctgaatcggccatgggaagaccctatgcctgaaactggtgaaaggcatcttgctcaagagcttaggggtgttgggttatcagcttatgacatgcctgagtggaagaaggatgcctttggtaaaactcccacttttggacagagatcaaagctttctattcaagagcaaagggagagccttccgatatacaagttgaaaaaggagctgatacaggctgtgcacgataatcaagttttggtggttattggtgagactggatctggaaagacaacacaggtgactcagtaccttgcagaagcaggttatacaacaaaaggaaagattgggtgtacccagcctcgtagggttgctgcaatgtctgttgccaagagagtagctgaggagtttggttgtcgtttaggagaggaggtagggtatgcgattcggtttgaagattgtactggaccggatacagtgatcaagtacatgactgatggtatgcttctcagggaaattctgatagatgaaaacctctctcagtactctgtaatcatgcttgatgaagctcacgagcggacaatccacactgatgtgctgtttggtcttctaaagaagctgatgaaacgtagactcgaccttcgtctgatagtcacgtctgccacattggatgcagagaagttctctgggtacttctttaactgcaacatttttaccattcctggaagaacatttcctgttgagatactatataccaaacagccagaaacagattacttggatgccgctctgatcacagtccttcagattcacttgactgaacctgagggtgatattctggtctttttgacgggacaggaagaaatcgattctgcctgccagtctctgtacgagaggatgaaaggtctaggtaaaaatgttcccgaactcatcatacttccagtttacagtgcgcttcctagtgaaatgcagtctagaatttttgatcctccccctcctggtaaacggaaagtggttgtagctacaaatattgcagaagcttctttaacaatagatgggatatactatgttgttgatcctgggtttgctaagcagaacgtgtacaatccaaagcaagggctggaatcgctagtcattactccaatttcacaggcatcagcgaagcaaagggctggacgtgctggtcgtactgggccagggaaatgttatcgtctctacacagagagcgcatatcgtaatgaaatgcctcctacatcaatccctgaaatccaaagaatcaaccttggaatgacaaccttgaccatgaaagcaatgggcatcaatgacctgttatcgtttgacttcatggatccaccccaacctcaagcattgatttctgcaatggaacagttgtacagcctgggagctttggatgaggaaggattgttgacaaagctaggtagaaaaatggctgagtttcctcttgaaccgccgctctctaaaatgttgctagctagtgtggatctcgggtgcagcgatgagattttaacgatgattgctatgatccagacgggtaacatattttatagaccaagggagaagcaagcacaggcagaccaaaaacgggcaaagtttttccagcccgaaggtgatcacttgacattgctagctgtgtatgaagcttggaaggctaaaaacttctcaggtccatggtgtttcgaaaacttcatacagtcaagatcgttacgacgtgctcaagatgtgaggaaacaacttctcagcattatggacaagtataaactagacgtcgtaactgctggaaagaatttcacgaagataaggaaagcaatcacggcaggattcttcttccatggagcaagaaaagatccacaggaaggttacaggacgctggtggagaatcaaccggtgtatatacacccgagcagcgcgctgttccagagacaaccagactgggttatatatcatgatcttgtgatgactacgaaagagtacatgagggaagtgactgtgattgacccaaagtggcttgttgagttagctccaaggttcttcaaagtgtctgacccaacaaaaatgagcaagcgtaagcgccaagaacggattgagccgttgtatgaccgttaccacgagcctaactcatggcgtctcagcaaaaggcgtgcttgagagacttttcctttcggtaaatctattcttcttccttatgttggttttgccgtcttcaaatgtactcctgtttttatgtattgaaagctaaaagctaacagaagtgatggatgagccatagattacagctgcatcatcgtttttcttgacatgtatgaaaattcatctttcct

SEQ ID NO: 118066 - DNA, 1209 bp, Arabidopsis thaliana
  unsure (1)..(1209): unsure at all n locations
nnnnnnnnnnnnnnnnnnnnnnnnnnnnnnnnnnnnnnnnnnnnnnnnnnnnnnnnnnnnnnnnnnnnnnnccacgcgtccgcaaaaaacaacaaacaaacaacaacaaaagaaacacaatgcagattcacaaactctgttttcttgctctgttcttagctaatgcagcttttgccgtcaaattcaacttcgattccttcgatggcagcaacttgttattccttggagacgctgagcttggtccttcctctgatggcgtaagccgatccggagctctttccatgacccgagacgaaaccccattctctcatggtcagggtctttacatcaatccaatccaattcaaatcttcaaacacttcttctccttttgaatttaaaacttctttcactttctccatcactcctcgcaccaaacctaattctggtcaaggccttgccttcgtcattgtcccagccgctgataactccggcgcttccggcggaggatatctcggaatcctcaacaaaaccaacgatggaaagtcagaaaacaacctcatatttatcgaattcgacacgtttaagaacaatgagtctaatgacattagtggtaaccatgtcggaatcaacatcaactcgatgacttctcttgtcgctgagaaagctggttattgggttcagacattagtcggaaaaagaaaagtttggtcgtttaaagatgtgaatcttagcagtggagagaggttcaaggcttggatcgagttcagaagcaaagactctaggaataccattaccatcgcccctgaaaacgttaagaaaccgaagaggcctttgatccaaggttcgagagtactcaatgatgttcttcttcaaaacatgtacgctggttttgctggttccatgggacgtgccggtgagcgtcacgatgtttggagctggtcgtttgaaaactaagtaaaccggttcggttcggttcagtttggctaggtatcgtttgctttgtttttgtaattgttgtagagtgaataattaaggtatgaataaaataagccgacctgtggcttactctgcattgtattttcatatttgtgtaatcagtctgaataattcagaggttttcaataaaataaacttcctttcccaaaaaaaaaaaaaaaagnnnnnnnnnnnnnnnnnnnnnnnnnnnnnnnnnnnnnnnnnnnnnnnnnnnnnnnnnnnnnnnnnnnaa

SEQ ID NO: 118067 - DNA, 615 bp, Arabidopsis thaliana
  unsure (1)..(615): unsure at all n locations
gcagagcttggtccttcctctgatggtgtaagccgatccggagctttatccatgacccgagacgagaacccattctctcatggtcaaggtctttacatcaatcaaatcccattcaaaccttcaaacacttcttctcctttttcatttgaaacttctttcactttctccatcactcctcgcaccaaacctaactccggtcaaggtttcgccttcatcataaccccggaagctgataactccggtgcttcaggtggcggatatctcggaatcctcaacaaaacccaacgatgggaaagccagagaaccaacatctttggctatcggaattcggttaacttttttcaggaccaaaaggaggtttctaggcccaattaggtgggtaacccatggtttgggggttaaccaatcaaactcaaatggccttcctcttggttcgcttgaggaaagcttggttacttggggttcaagacaaaggngtcgggggaaaagggaagttttggccggcttaaagggtgtttagcttttngnagttgggggggggtnaaaggntttngggtttggtntagaaacaaagncnttttgggttcgggttnaattgggccttaaaacggtang

SEQ ID NO: 118068 - DNA, 532 bp, Arabidopsis thaliana
caatgaagttcttcttcaaaacatgtacgccggttttgctggttccatgggacgtgccgttgagcgtcacgatatttggagctggaattcggctcgatttttgaaaacccgccaaaaacaactaaaccggtttggttctgtttataggctaagtatcgtttgttttgtttttacttttttagtaattgctgcatactactcagtggtaactagagtgaataattatggtttgaataaaacaagccaagtgcgtggtttcattactccggattgccatatttgtattcagtctgattaattcagatatctcaataaaaagaactttgttttcatgttgtaaaaacaaaaatcccctaccctacatctatcaacatactagggggcggccccccactattgaagtcctcacccccgggaatttattcccgcccgttaccctgaaggctaccaatttttccttatagaggatctccattaaaagctcggcggaaactattggcaataacctggttcctggcgtgaaattgttata

SEQ ID NO: 118069 - DNA, 1825 bp, Arabidopsis thaliana
  unsure (1)..(1825): unsure at all n locations
tagtttgagatggaagaaccagtagaccgagaagatatcgatttaagggtttcatccacagatataggctggaacgaattcgcggccgcctcgaagcgccttgttccattctcttcccagatctactctcgctgtggtgcttccgttacttcctcttactcgatctctcattctatcggtggagatgatctctcttcctctaccttcggaacctcctccttctggagatccatggccacttttactcgaaataaacctcatgtaaatgttggaactattgggcatgttgatcatggcaagaccactttaactgctgcaatcacaaaggttcttgctgaggagggcaaagctaaagctattgcctttgatgaaattgataaagctcctgaagagaagaagagaggaattactattgccacggctcatgtggagtatgaaactgcaaagcgtcactatgctcatgtggattgccctggacacgcagattatgttaaaaatatgattactggagctgcgcaaatggatggcggaattcttgtggtttcaggaccagatggacccatgccgcagacaaaggaacatattctacttgcacgccaggttggtgttccctcacttgtgtgcttcttgaacaaagttgatgtggtggatgaccctgagctcttggagcttgtcgagatggaactacgtgagctcctcagcttctacaagtttcctggggatgatattcccatcatccgaggatctgctctgtccgcattacagggcaccaatgatgaaattggaaggcaagctatattaaagctgatggatgctgttgatgaatatatacctgaccctgttcgcgtccttgacaagcctttcttgatgccaattgaagatgttttctcaattcaaggacgtggaactgttgcaaccggtcgtatcgaacagggagtcattaaagtgggtgaagaagttgagatattgggtttacgtgaaggggggtgttccactaaatcgactgtaactggggttgagatgttcaagaagattttggataatggacaggctggtgataatgtaggacttcttctgcgtgggctaaagagagaagacattcagcgtggaatggtgattgctaagcctggttcatgcaagacatacaagaagtttgaagcagagatttacgtgctcacaaaggatgaaggtggacgtcacactgcatttttctctaactacaggcctcagttttacttgaggactgcagatatcactggcaaagtggaattacccgaaaacgtgaagatggttatgcctggtgacaatgtcacagctgttttcgagttaatcatgcctgtcccactcgaaacaggtcaaagatttgccttaagggaaggaggtagaacagttggagctggtgttgtatcaaaagtgatgacctaaactactcaaaagcacattcttctccttcgttctctaggaatccatcaatttcgagatttttctttttgtctttttgctgctttgagatttctttgggtagatcaaataaacagagagaaacttaatttatgtttccaatgagaaagattagggcagagggcacgaaacgtctatttctttttgatgcttcctactttgtgaaactttcaaaaagccacttccaattctttctcaccttcgtggtttgtcaagtatttgtttttatttcttttagcccctatnnnnnnnnnnnnnnnnnnnnnnnnnnnnnnnnnnnnnnnnnnnnnnnnnnnnnnnnnnnnnnnnnnnnnnnnnnnnnnnnnnnnnnnnnnnnnnnnnnnnnnnnnnnnnnnnnnnnnnn

SEQ ID NO: 118070 - DNA, 506 bp, Arabidopsis thaliana
  unsure (1)..(506): unsure at all n locations
cggacgcgtgggcggacgcgtgggtgtgtgttcgcctttctctcgtacaagtcaaaatggcgtccgttgttcttcgaaaccctagctcgaagcgccttgttccattctcttcccagatctactctcgctgtggtgcttccgttacttcctcttactcgatctctcattctatcggtggagatgatctctcttcctctaccttcggaacctcctccttctggagatccatggccacttttactcgaaataaacctcatgtaaatgttggaactattgggcatgttgatcatggcaagaccactttaactgctgcaatcacaaaggttcttgctgaggaggggcaaagctaaagctattgcctttaaatgaaattggtaaagctcctgaaggggnggagggggggattaacttnttgccacggnttnntgtgggggtntgaaactncaaaggggnaactatggttcattnngggttnccctgggcacggnggtttttgtaaaaaantg

SEQ ID NO: 118071 - DNA, 979 bp, Arabidopsis thaliana
caggtaccggtctggattaaaagtagtagaactaaaaaatggcaaacctcttggtctctactttcatattttccgcacttttgctcatctccaccgcaacagccgccacattcgaaatcctaaaccaatgtagttacaccgtgtgggctgccgcaagccctggaggtggccgacgtctagatgctggccaatcatggaggctagatgtcgcggcgggcactaaaatggcacggatttggggtaggaccaattgtaactttgactcctcaggtcgtggccgatgccaaactggtgactgcagtggtggactccaatgtactggctggggacagccaccaaacacgttggctgagtacgctttgaaccaattcaacaacttagacttctacgatatctcacttgtcgatggatttaacatacctatggagtttagcccaactagttcgaactgccatcggatactatgtaccgcagacataaacggacaatgtccaaacgtgttgagagccccaggtggatgcaacaacccgtgtactgtatttcagacgaaccaatactgttgtacgaacggtcagggatcatgtagcgatactgtgtactcaagattctttaagcagagatgccctgacgcttacagctatccacaagatgacccgactagcactttcacttgcaccaacactaactacagggtcgtgttttgtccaaggtctaggctcggtgctactggatcccaccagctcccgatcaagatggtcaccgaggagaattaatagactcgtatctactgtatgtgtgtgtgtgtgagggtgtacgtagatatgcgtacgtgtgacgtgatcatatatacgttaccataaacacttaatggattataataaggcatgcaataataattacgttagtcgaaaaaaaaaaaaaaaagacttatttttctctttccgatcaattaatgtaaaaataacaatttcgcttcgat

SEQ ID NO: 118072 - DNA, 3726 bp, Arabidopsis thaliana
atggagtacaacgaatacgaacctgaacctcaatatgtagaagacgatgacgatgaggagattacccaggaggacgcgtgggctgttatatctgcttatttcgaagagaaaggtctcgttcgtcaacagctggattcgtttgatgagtttattcaaaatactatgcaagaaatcgttgatgagtctgctgatatcgagatccgacctgaatctcagcataatcctggccatcagtccgattttgcggagacaatctacaagattagctttggacagatttatctgagtaaacctatgatgacagagtctgatggagagactgccaccctgttccctaaggctgcaaggttgagaaatctcacatactctgcgcctttgtatgtcgatgttactaagagagttattaagaaagggcatgatggtgaagaagttacggagacacaggattttactaaagttttcattggaaaggttcccatcatgctccggtctagttactgtaccttgtttcagaactcggagaaagacctgacagagcttggagaatgtccttatgatcagggtggatacttcattattaatggcagtgaaaaggttctgattgctcaggagaagatgagtacgaatcatgtttatgtgttcaagaaaaggcagccaaataagtatgcttatgttggtgaagtccgttctatggctgaaaaccaaaataggcctccaagcacaatgtttgtgcgtatgcttgctcgtgctagtgcaaaagggggttcatctggacagtatattcgatgtactcttccatacatcagaacagaaattcctattatcatagtatttcgtgcactgggatttgttgccgataaggacatattggaacacatctgctatgattttgccgatacccagatgatggagttgctcaggccttccttggaagaagctttcgttattcaaaatcagctggttgcacttgactatattggaaaacgtggtgcaactgttggtgtaaccaaggaaaaaaggataaagtatgctagagatatccttcagaaagaaatgcttctctatgtaggaattggggagcattgcgagacaaagaaagcttactattttgggtatatcatacaccggctgctgctttgtgcacttggccgaaggccagaagatgatagggatcattatggtaacaaaaggctggatcttgctggtcctttacttggagggctatttagaatgcttttccgaaagttaacaagggatgtgagatcttatgttcaaaagtgcgttgacaatggcaaagaagtcaatcttcaatttgccattaaggctaaaacaattacctctggcctgaaatattctcttgctactgggaactggggccaggcaaacgctgctggcacaagagctggagtctctcaggttcttaaccggttgacatatgcttcgactttgtcacatctgaggcgtctcaattctccaataggacgtgaaggaaaattggcaaaaccaagacaactgcacaactcacagtggggaatgatgtgccctgctgaaacacctgaaggacaggcttgtggtctagtgaaaaacttggctctcatggtctacataacagttgggtcagctgcttatcctatattggaatttttggaagaatggggtactgagaattttgaggaaatatctccatctgttataccccaagccacaaaaatctttgtcaatggaatgtgggttggagttcatagagatcctgacatgttggtgaaaacgttgagacgtttgagacgaagggttgatgtcaacactgaagttggtgtagttagagatatccgtcttaaagagctccggatatacactgattatggacgttgtagccgtccgttgtttattgtagataatcagaagctcttaataaagaagagagatatctatgctctgcaacaaagggaaagtgcagaagaagatggttggcatcatctggttgctaagggctttatagaatacatagacacagaagaagaggaaacgaccatgatttccatgactatcagtgatctggttcaagctagactccgcccagaagaggcttatactgaaaactacacacattgtgagattcacccatctctgatattgggggtctgtgcttcaatcataccatttcctgaccataatcagtcacctcgtaatacatatcaatctgccatggggaagcaagcaatgggaatttatgtcaccaactaccaatttcgcatggatacgttagcttatgttctctattatccacaaaagcctttggttactacaagagctatggagcatcttcactttagacaacttccagcaggaattaatgctaatgttgccatttcttgctattctggatataatcaagaagattctgtcatcatgaatcagtcttcaatagatcgtggtttctttcgatccttgttctttcggtcttacagagatgaggagaaaaaaatggggacgcttgtcaaagaagactttgggcgcccagacagaggaagtacaatgggtatgcgacatggttcttatgataaactggatgatgatggtcttgcgcctcctggtactagagtttcaggtgaagatgttatcattgggaaaaccactccaatatctcaagatgaggctcaaggacaatcatcccgatacactagacgtgatcatagtataagcttgcgacatagtgaaactggaatggtggatcaggtgttattgactacaaatgcagatggtttgaggtttgtgaaagtgagggtcagatccgtgcggattcctcaaattggagacaaatttagtagtagacacggtcagaagggaactgttggcatgacctacacgcaggaggatatgccatggacgattgaaggggtcactccggacattattgtgaatccacatgctattccgtctcgaatgacaattggacagctaattgagtgcatcatgggaaaagtggcagctcacatgggaaaagaaggagatgctactccctttacagatgtcacggtggataatataagcaaagcccttcataagtgtgggtaccaaatgcgtggatttgagagaatgtacaatggtcacacgggcagaccactcacagctatgatattccttggaccaacatattaccaaagattgaagcatatggttgatgacaagattcactcgcgtggacgaggtccggtgcaaatcttaacaagacaaccagctgaagggcgatcacgtgatggtggtctccgttttggagaaatggagcgcgattgcatgattgcacatggtgctgctcactttttgaaagagaggctgtttgatcagagtgatgcgtatagggtacatgtgtgtgaagtctgcgggctcattgccattgcaaatctgaagaagaattcttttgaatgcagaggttgcaagaacaaaacagatattgttcaggtatacattccatatgcttgcaaattactctttcaagagcttatgtcaatggctattgcaccaaggatgctcactaaacacctgaaatcggctaaaggcagacagtgaggagcttgcaatctgattttgtagaaacttgaactttccttctctcttggtcatagctttgtaacaatactaaatttacaaatttgtgtaatatttctgtactaattcttaaagctagaaaggtaccttataagatatatttatggattctttagtaaa

SEQ ID NO: 118073 - DNA, 2974 bp, Arabidopsis thaliana
cagaagcgtgggcgggaaagtagataaaaaatttcggccattaaaggacaaaatcacaagaaagtagaaaccctagagattttgaaaccgaaaccccaaaaacccctttgacgcctccttcttcttatctctttataaaaaaccatttctttcctgcaacatcgttgcttatcatcagacgcacatcacctgttcgacaaaattacctctgagagtgttttttttgttttccttctgacaaagaaatatgtatgtagtgaagcgtgacggaagacaggaaactgttcatttcgataagattactgcgaggcttaagaaacttagctatgggcttagcagtgaccattgtgaccctatcctcgttgctcagaaggtctgtgccggtgtctataaaggagtcactacgagtcaacttgatgagttggctgctgaaactgctgctgctatgacttgtaaccatcctgattatgcatctcttgctgctaggattgctgtgtcgaatctccacaagaacactaagaagtcattttctgagacgattaaggatatgttctatcatgtcaatgatagatctggactaaagtccccactaatagccgatgatgtgtttgagataattatgcagaacgctgctcgtttggacagtgagatcatctatgaccgtgattttgaatatgattactttggatttaaaactcttgagagatcgtacctcttgaaagtccaagggactgttgttgaaaggcctcaacacatgctgatgagggttgctgttgggatccacaaggatgatattgattccgtgatccaaacctaccatttgatgtctcagagatggttcactcatgcatctcctactctcttcaacgcaggaactccaaggcctcaattaagtagctgctttctagtctgcatgaaagatgatagcattgagggcatatatggaacactcaaagagtgtgctgttataagcaaatctgctgggggtattggtgtttcagttcataatattcgtgctaccggaagttacattcgtggcacaaatggaacatctaatggtattgttcctatgctgcgtgtattcaacgatacagctcgttatgttgaccaaggaggaggcaagagaaagggagcctttgctgtttacctggagccatggcatgctgatgtctatgagtttctggagctgcgaaagaaccatggaaaggaagaacacagggctagagatttgttttatgctctctggcttccagatcttttcatggagagggtccagaataatgggcagtggtcactgttttgtcctaacgaagctccaggtttggcagattgctggggagctgaatttgagacactgtacactaagtatgaaagagagggaaaggccaaaaaggttgttcaggcgcagcagctttggtacgaaatattgacatcccaggtagaaacaggaacaccatacatgcttttcaaggattcatgcaaccgaaaaagtaatcagcaaaatctgggtaccataaagtcgtccaacttatgcactgaaatcattgagtacactagtccaacagaaactgctgtgtgcaatcttgcatctattgctttacccagatttgtaagggagaagggtgtcccattagactctcatccacctaagctcgctggcagtctggactcaaagaatcgttactttgattttgaaaaattagcagaggtgactgctactgttactgttaatctcaataagataatagatgtgaattactatcctgtggagactgcaaaaacttcaaacatgcgtcatagacctattggtattggtgtacaaggccttgcagatgcatttatcctccttggaatgccatttgattctccagaggcccaacaactgaataaggatatattcgaaaccatatactaccatgcactcaaagcatctacagagcttgctgcaagacttggcccctatgaaacctatgctggaagtcccgtgagtaagggaatccttcaacctgacatgtggaatgtaattccatcagaccgctgggactgggctgttcttagagatatgatatcaaagaatggagtgaggaactctcttttagtagcaccaatgccaactgcttcaaccagtcaaatccttgggaacaatgaatgttttgagccctacacatcaaacatctacagccgcagagtcttgagtggtgaattcgtagtggttaataagcatcttctccatgacctaactgatatgggactttggactccaacgctgaaaaacaaattaattaatgagaatggttctatagtcaatgttgctgagatacctgatgacttgaaggcgatttacagaactgtctgggaaatcaaacagagaacagtggtggacatggctgctgatcgtggatgctacatagatcaaagccaaagcttaaacatacacatggacaaacccaacttcgcaaaactcacttcgctacacttctatacttggaaaaagggtctgaaaaccgggatgtactacctgcgatcccgtgctgcagctgatgcgataaagttcaccgttgacacagccatgctcaaggagaagccgagtgtagcagaaggagacaaagaagtagaagaagaggataatgaaactaagttggcgcagatggtatgttccttgacaaaccctgaagagtgtttggcctgcggaagttgaagctctaagttatagtttgggtcttaaaaagttagaaagtaaagcatgtctcttggacggtcttttttatttacttgcttatctgggtgtattttgttaatagtttcctaatgcttaatgttgcttgagtttttgtgtaatccaatttcgtttttaccttttctcttgaaacaataaggatttgtaacgagaattatgtataaccaccaccaccttacggtagattttactatccatatataaatattttaccatccattaaaaaaaaaaaaaaaa

SEQ ID NO: 118074 - DNA, 739 bp, Arabidopsis thaliana
  unsure (1)..(739): unsure at all n locations
ccagctacactctacacacattatggaaagctgcgccgcctgcgtgtgccggtccgctataccacgggtcgaccctacgcgttcgcatggccttgcaaaggcatgtatactccttggaatgccataggattctccacaggcccagcaactgagtaatgctatattctaaaccatatactaccatgcactcaaagcatctacagagcttgctgcgagactcgccccctatgaaacctatgctaggatgtcccagactgtaagggaatccttcaacctgacgtgtggaatgtaattccatcggaccgctggcactgggctggtcttagagatatgatgtcacagaatggagtgaggaactctctcttacgagcaccaatgcctatctgcttcaaccagtcagatccttcggtaacaatgaatgttttgagccctacacatcaaacatctacagccgcagagtcttgagtggtgaattcgtagtggttaataagcatcttctccatgacctaactgatatgggactttggacttcaacgntgaaaaacaaattaattaatgaggatgggtctatagtcaatgttgctgaggtaccngatgacttgaaggcggtttncaagactgtcttggggaatcnaacaggggaccagtnggtgggcatgggnttctgatcggngggngctntcaaangggctaaagcccaaaggtttaacaatncanattgggnaaacccnatttnngg

SEQ ID NO: 118075 - DNA, 932 bp, Arabidopsis thaliana
cggacgcgtccgcccacgcgtccgcggacgcgtgggctgtgcgctcttgttatctctgctttgaagtgaaatcagctttggctatggcttcttcgacagctttgtctctctcatggagctcctctccttgttggtcacacagcttcaatggcggtgcaaatgaaaccctaaaagtatctgagcgaaggttcaattttgaagttgtttcccagaagaaagctaagaaacttcgcaaggtaattttgaaagaggatgtgacggatttgggtaagcaagggcaattacttgatgtgaaagctggatttttcagaaacttcctcttgcctactggaaaggctcagcttatgactccacttctgctcaaggaattgaagatggaagacgaacggattgaggcagagaagcaaagggtgaaagaagaggcacaacaactggcgatggtattccaaaccgttggtgctttcaaggttaaacgcaaaggcggtaaaggcaaactgatatttggatctgtcacagctcaagacctcgtcgacatcatcaaatcacagctccaaaaggacatcgacaaacgccttgtctctctcccagaaatccgtgaaaccggagaatacatagccgaactcaagcttcaccccgatgtcactgctcgagttaagatcaatgttttcgctaactaaaccttcaacgattcaagactcctactgcatcccaaggaacgtatagagagggaaaagagagtagcctcttgtggtgaggattgaaggttgtgaagtttttcctttagattgtttgatgcatttgtatttttgctatttttggaatctggaaacgctaaaagtataatattctcttgcaagttatgatatttacttgaagttatattgtattcatttgtctgttgaagtgatgagaatgcttaaattaacactaac

SEQ ID NO: 118076 - DNA, 940 bp, Arabidopsis thaliana
gagagagagagagagagagagagagggtttcttcgaggactttggcatactgcaggttgttggagctgtagtgcttaaaaaccctacctttatactgtttagagcagcagtccctccatgtcaggtctttgtggcgttatgcagagctcgagcttctgcttcgtcttctttattcaacagcgttattcgtcagcattcgcattctctacacctttccgctgatacacagaacaaatcattggtagcacaaatgaaagaagagatgctccacatggacatcaactcaatgataggaagttccatgccactaggtatgatgcgtatcggaacaatcatccacaacatcgagatgaacccagggcaaggcgcaaagatggtccgagctgcaggaaccaacgccaagatcctaaaggagcctgctaaagggaaatgcttgataaagcttccgtcaggggacaccaagtggatcaatgccaaatgtcgtgctacgattggcacagtgtcgaacccgtctcatggaacgaagaagctatataaagcaggacagagtaggtggttagggataaggcccaaagttagaggagtggcgatgaatccgtgtgatcatccacacggtggaggtgaaggaaaaagcaaaagtagtggaagcagaggaaggacatcggttagtccgtggggaaaaccgtgtaaaggcggttacaaatcagctagtgtcaagaagaagaagaagcgtttggcagaagcagcagccaaaatgtgatatgggtgaacaagtttcgattttcttcaacgtttctttcttttaaaaagcctccaatgttatttggttacgttattgaatctgttttttgagagttttttaggcttcatgaaactagaagatctttgatcagttgagaataaatatggttacgtgtttacttttattaaaaaaaaaaaa

SEQ ID NO: 118077 - DNA, 854 bp, Arabidopsis thaliana
cttagaattcctcgagcttcgaaaacaatggcgtcttcttcagcgacgctctctctctgctctactttctctgctcattgcaatgtcaattctcgccgttctagcactatcctctgttctctctctaaaccttcgcttaatttggctaaacctctgactggatttctttctccttccactgcgtcgacgtctcgaaccgcattcaccgtcgctccgaaattcgcggaatcagtcgtcgaagctgaaccggagactaccgatatcgaagctgtggtggtttccgatgtttcggaggttactgaggaaaaagctaaacgagaagagattttcgctgttattatggttggtggacgccaatacatagtgtttccagggagatatctctacactcagaggctaaaagatgcaaatgttgatgaccagattgttctcaacaaagtgttgcttgttggaacaaagacacacacttacattggcaagccggttgtgaccaatgccactgtacatgctgttgtggaaagtcaaggtttgaatgataaagtggtagtcttcaagtacaagcctaagaagaagtaccgtagaaatatcggtcacagacagccgaatacgaggattaggattaccggaatcacagggtatgaagagtatccagcctcgcccaatgttgcagttggagaagtaaatctttgacacaaaatgtttcttgaatgttaaaatttttctgatcttctctatgtaattttgtaaggaccctggtcatttcatttctgctgagattccttttattaatatgtaccttttgccattctttgaaaaaaagctacgtcagggccctgacgtagctcgaggaattc

SEQ ID NO: 118078 - DNA, 982 bp, Arabidopsis thaliana
ctctgtttaaaaaaacctatctctctctctctctctcgccgccttcctctcaccctcttcgcatagcttcactttcgccgatggctctacctaaccagcaaaccgtggattaccctagcttcaagctcgttatcgttggcgatggaggcacagggaagaccacatttgtaaagagacatcttactggagagtttgagaagaagtatgaacccactattggtgttgaggttcatcctcctgatttcttcactaactgtggcaagatccgtttctactgttgggatactgctggccaagagaaatttggtggtcttagggatggttactacatccatggacaatgtgctatcatcatgtttgatgtcacagcacgactgacatacaggaatgttccaacatggcaccgtgatctttgcagggtttgtgaaaacatcccaattgttctttgtgggaataaagttgatgtgaagaacaggcaagtcaaggccaagcaggtaacattccacaggaagaagaacctccagtattacgagatatctgccaagagcaactacaacttcgagaagccattcttgtaccttgctagaaagctcgccggggacgctaatcttcactttgtggaatcacctgcccttgctcccccggaagttcaaatcgacttggctgctcagcagcagcatgaggcggagcttgcagcagcagcaagtcagccacttcctgatgacgatgatgacaccttcgagtagagaaagagagatgtgatctgtcactgattacccgttagggcttgtctgaacttttttttgttcatggtgctatttttatgtgtccgtactttgaaatgaatcgatgacattagtaattttcatttttaagtttttaactgtcgctatgaaagtgaaaaccttttgattacaaaaaaaaaaaaaaaaaacgaccgctctagaggatccaagcttacgtacgcgtgcgatgcgacgtc

SEQ ID NO: 118079 - DNA, 1343 bp, Arabidopsis thaliana
  unsure (1)..(1343): unsure at all n locations
nnnnnnnnnnnnnnnnnnnnnnnnnnnnnnnnnnnnnnnnnnnnnnnnnnnnnnnnnnnnnnnnnnccacgcgtccgtgcgccaaattctcttctctctatctctctcgcgtacgccgcaccgtagcgaccaattgaatccacgaggaaatctcagtaaatactatggcgaccaacgaacccgagcacgagcacagagacgaggaagaggccggagctaacgaggatgaggacaccggagctcaggtcgctccgatcgttaggcttgaggaggttgccgtcactaccggcgaggaagacgaagatgccgtccttgatctgaaatcgaagctttatcgattcgataaggatgcgaatcagtggaaggagagaggagctggtactgtgaagttcttaaagcataagaacactgggaagattcgtctcgttatgaggcaatctaaaactttgaagatctgtgctaatcacttcgttaaatcgggcatgagtgttcaggaacacgttgggaatgaaaagtcatgtgtgtggcacgctcgtgactttgctgatggtgaactcaaggatgagcttttctgtatccgatttgcttctattgagaattgcaaaacatttatgcaaaagttcaaggaagttgctgagtctgaagaagagaaagaagagagcaaagatgccgctgacactgctggccttcttgagaaattgactgtggaagagacaaaaacggaggagaaaaccgaagcgaaagctgtggagacggcaaagactgaagtgaaagcagaagaaaagaaagagagcgaggcagagaaatctggtgaagcaaagaaaacagaagaaagtggtccctcaacataagaagcgtcatcatttaagttgccaaatcctggcgaggtaattaagcctcgaaatgttttgatgcatcatgagtctaccattgtcttggcactatctatctatacatgttttgtcgagtcatatcaagtggttgggggatcgcttggggtcgggttttactgaatgctgagtcgttatgggtctaatagtttttgagtctaaagtgtcgggtgatatgagagatttgggtgaaatattttttcatgttggttatctgaaagagtacattggtttcattgttttaagttttctcatggatcctttttggatggtcttattttgaggatacaaatgtgtttgtccatggacaagaatcagaagtctccatttttttttttttcaaaatttaatgcatgttcagattttttaatcttaaggtaattgccaattgtttgacaaaaaaaaggtaattgccaatctnnnnnnnnnnnnnnnnnnnnnnnnnnnnnnnnn

SEQ ID NO: 118080 - DNA, 1234 bp, Arabidopsis thaliana
tacaactcattatagggaagagctggtccgcctgcaggtaccggtccggaattcccgggtcgacccacgcgtccgctccatcaatctctcttacacactacacaaattcaacaactgaaaccaactcagagcaaaagcttgatttgacactatggcgagcattagcaacgagcccgagcgtgagaacagagacgaagaagagactggagccaacgaagatgaagacaccggtgctcaggttgctcctatcgtcaggcttgaagaagtcgccgtcaccaccggtgaagaagacgaagacaccatcctcgatctgaaatcgaagttgtatcgatttgataaagatggaagtcagtggaaggagagaggtgctggtactgttaagtttttgaaacatagagtttctgggaagattcgtctcgttatgaggcaatcgaaaactttgaagatctgtgctaatcatcttgttggatcgggtatgagtgttcaggaacacgctgggaatgataagtcttgtgtatggcacgctcgtgatttctccgatggtgaattgaaggatgagctcttctgtatccggtttggttcagttgagaattgcaaagcatttatgcaaaagttcaaggaagtagctgaatctgaagaagagaaagaagagagcaaagatgcctctgataccgctggtcttcttgagaagttaacagtggaagagaaggaaagtgagaagaaaccagtggagaaggcagaggaaaacaaaaagagtgaagctgttgaagaaaagaaaacagaggagtctgttccctcagcttaagatgcatgcttacacacacatacggccaggtaatcaatagcctgatgtgttttaaatccatcgaaggaagacttggcttttattttcaaattgaatacatgttttgagtcgtgttgagagtctatatgtttagtgtcacaaaagtgtcacaggtgacattttgcatattgcgagattgattttcgtgcttgtttgggtttcattatctggaagaaaaaaagagtgtattttgagctctcttatgatttttttttggaaaaagtgtggactcaagagaagattttattttgagttcacaaaaatttgtatgcatggatgattcgcgtgttctctttttaatgccagtcgtgttattgaatcaaaaaaaaaaaaaaagggcggccgctctagaggatccaagcttacgtacgcgtgcatggtacgtcatag

SEQ ID NO: 118081 - DNA, 722 bp, Arabidopsis thaliana
  unsure (1)..(722): unsure at all n locations
atgatactgccagctctaatactgactcactattagggaaagnctggtaccgcctgcaggtacccggtccggaatccccgggtcgacccacgcgtccgcaaaaacggaggaagaaaaccgaagcgaaagctgtggagacggcaaagactgaagtgaaagcagaagataagaaagagagcgaggcagagaaatctggtgaagcaaagaaaacagaagatagtggtccctcaacataagaagcgtcatcatttaagttgccaaatcctggcgaggtaattaagcctcgaaatgttttgatgcatcatgagtctaccattgtcttggcactatctatctatacatgttttgtcgagtcatatcaagtggttgggggatcgcttggggtcgggttttactgaatgctgagtcgttatgggtctaatagtttttgagtctaaagtgtcgggtgatatgagagatttgggtgaaatattttttcatgttggttatctgaaagagtacattggtttcattggtttaagttttctccatggatccctttttggatggtctttattttgaggagtacaaatcgtgtttgtccaatggacaaagaatcagaaagtctcccatttttttttttttccaaaataaaaagaaaaaaaaaaaagggcggcnctctagaggatccaagcttacgtacnnnnnnnnnnnnnnnnnnnnnnnnnnnnnnnnnnnngtcc

SEQ ID NO: 118082 - DNA, 1043 bp, Arabidopsis thaliana
agtcgtcgtcgtcgtctagggtttgtttttcgtttcttctccgattgttcagaggaattgcgaattaagataaagatgaggccagtgttcgtcggcaatttcgagtatgaaactcgccagtcggatctggaacggttgttcgacaagtatgggagagtcgaccgagtggacatgaaatctggatatgcttttgtgtactttgaggatgaacgtgatgctgaagacgctattcgcaaactcgacaattttccttttggatatgagaaacgcaagttatcagttgaatgggcaaagggtgaacgtggcaggcctcgtggtgacgcgaaagccccttcaaatctgaagcctacaaagacactgtttgtcattaactttgaccccattagaacaaaagagcacgacattgaaaaacactttgagccctatggtaaggtcaccaacgtgcgtatcagacgcaacttctcatttgttcagtttgaaacacaagaggatgctacaaaagcccttgaagctactcaaagaagcaaaatattggatagggttgtttccgtggagtatgcgttgaaagatgacgatgaaagagatgatcgaaatggtggtcgtagcccgagaaggtctcttagtcctgtgtatcgtaggcgtccaagtccagattatggcaggcgtccaagccctggtcagggtaggcgtccaagtccagattatggtcgtgctcgaagcccagaatacgacagatacaaaggtccagcagcttatgaaagacggaggagtccagattatggacgaaggagttctgattatggtagacaaaggagccctggttatgaccgatacagaagtcgttctccagtcccaagaggaagaccttgatcaatgcagaaaacagaagcttcgaagaatgagtttttcgaaagggcaaatttatctatgttgtgttttgagttagaagatgctttttgatgttttgaaatccttgttaactttgggatcttagacttttatcttaaaatcagtagaaacttcataatggcgctttgtcacga

SEQ ID NO: 118083 - DNA, 434 bp, Arabidopsis thaliana
  unsure (1)..(434): unsure at all n locations
gtttgtttttcgtttcttctccgattgttcagaggaattgcgaattaagataaagatgaggccagtgttcgtcggcaatttcgagtatgaaactcgccagtcggatctggaacggttgttcgacaagtatgggagagtcgaccgagtggacatgaaatctggaacttttcttcaaaggaacaagatttgccatcttcttcttcttcctgcaaaatcatttctacattttcatacctgcctttatcatcttgtgcctaccaatcttcactgactctagagaaactttggaatttgtctgtctattaccaatcatcgatgcttcagatggaagtctattgaatccatcattgccatgccttgccttccatatctgaactcctccactcagaatgtttaagcatgcctggcanatcactcagattttttaaatataa

SEQ ID NO: 118084 - DNA, 1435 bp, Arabidopsis thaliana
gctctaatacgactcactatagggaaagctggtacgcctgcaggtaccggtccggaattcccgggtcgacccacgcgtccgcgagcttcttcttcttctagggcttccacgcgactacgcctgccaaaatcattctacaggaagcatgaagccagtcttctgtgggaactttgagtatgatgcgcgcgaaggtgacctggaacgactattcaggaaatacggcaaggttgagagggttgatatgaaagctgggtttgcttttgtatacatggaagatgaaagggatgcggaagatgccatccgagcacttgaccgctttgaatttgggcgtaagggacgcagacttcgtgttgaatggacaaagagtgaacgtggaggtgataaaagatctggtggtggttcaaggagatcctcatccagcatgagaccttccaagactctctttgtgattaactttgatgcggataatactaggacccgggatctagagaaacactttgagccgtatggaaagatcgtaaacgttaggatcaggaggaattttgcatttatccagtacgaggcacaagaggatgccaccagagcattggatgcttcaaataacagtaagctgatggataaggtgatctcggtggagtatgctgtgaaggatgatgatgctagaggaaatggacacagtcctgaaagacgccgtgataggtcacctgaaaggagaaggcgatcacctagtccttacaaaagagaaagaggaagccctgattatggccgaggagctagtcctgttgctgcctacagaaaggaaaggaccagtcctgactatggtcgaagacgtagcccaagtccttacaagaaatcaagacgtggcagtcccgagtatggtcgtgaccgcagaggcaatgatagccctcgcaggagggagagagtcgcaagccctactaagtacagccgcagtcccaacaacaagagagagaggatgagccctaatcacagcccgttcaagaaggagagtccgagaaatggggttggtgaagttgaaagtcccattgaaaggagagagagatcgaggtctagccccgagaatggccaagttgaaagccctgggtcaataggaagaagagacagtgatggtgggtatgatggtgcagagagcccaatgcagaagagccggtctcctcgttcgccaccagctgacgagtgataagagtggatccacaatctctatcaaagtaggatgttgtaactgtttgtagtcaacaacgctatgtcgtcgtgattagtttttgtcgtttggtttttgatagattcgaactcggatcacttttattgtcggattgaaaaacttatgtcaagttactacatttccggtttcaaaaaaaaaaaaaaaagggcggccgctctagaggatccaagcttacgtacgcgtgcatgcgacgtc

SEQ ID NO: 118085 - DNA, 1508 bp, Arabidopsis thaliana
  unsure (1)..(1508): unsure at all n locations
nnnnnnnnnnnnnnnnnnnnnnnnnnnnnnnnnnnnnnnnnnnnnnnnnnnnnnnnnnnnnnnnnnnnnccacgcgtccgtacggctgcgagaagacgacaggtcgacccacgcggaagaaagcaaataaaatctagagaagcttgtttctagggtttcgactctcgacggccggtacgatttttcaactgcttgttctaaggaatcatgaagcctgtcttttgcggaaactttgagtatgatgctcgtgagagtgatcttgagcggcttttcagaaagtacggcaaggttgagagggttgatatgaaagctgggtttgcttttgtctatatggaagatgaaagggatgctgaagatgcaattcgagcgcttgatcgctttgaatatggtcgcacaggacgcagactccgtgttgagtggacaaagaatgaccgtggaggtgctggaagatcaggtggttcgaggagatcatcttctggcttgagaccttccaagactctgtttgtgatcaacttcgatgcacaaaacactaggactcgggacttggagaggcactttgagccgtatggtaaaattgttaatgttagaatcagaaggaattacgcattcatccaatatgaagcacaagaagatgctaccagagcactggatgctacaaattccagtaagctgatggataaggtgatctcagtggagtatgcagtgaaagatgatgattcaagaggaaatggatacagtcctgaaagacggcgtgataggtcacctgataggagaaggcgatcaccaagtccttacagaagagaaaggggaagtcctgactatggccgaggtgctagtccagtagctcacaaaagggaaaggactagtcctgattatggtcgtggaagacgcagccccagcccttacaagagagccaggcttagcccagattacaagagggatgaccgtaggagggagagagtggctagcccagagaatggagctgtaaggaaccgaagcccaagaaaaggacgtggtgaaagcaggagtcctcctccatatgagaagaggagggaaagcaggagtcctccgccatatgagaagagaagggaaagcaggagtcctcctccatatgagaagaggagggagaggtcaaggtcaaggtcgaagtcaagccctgagaatggtcaagttgagagccctgggcaaataatggaagtagaagctggaagaggatacgatggagcagacagcccgatacgcgagagcccctctcgttcgccgccagcagaggaatgattggagatgcagacagatgattgtgttggattcacaaacaaaagatgtctctcaaagtagttgtatccgaaactgaagtcttttgctatgtcatgtagtatttagtgtgttattttgggtctttgttaagtgttttgtaaactttattatgactccattcgaaatcgcttgtcgtagtattggttaaaagattgctttttagtttggattacaaaatccgactttagatg

SEQ ID NO: 118086 - DNA, 432 bp, Arabidopsis thaliana
cacgcgtccgaacagataaaatctagagaagcttgtttctagggtttcgactctcgacggccggtacgatttttcaactgcttgttctaaggaatcatgaagcctgtcttttgcggaaactttgagtatgatgctcgtgagagtgatcttgagcggcttttcagaaagtacggcaaggttgagagggttgatatgaaagctggatttgtttcgatcttgggatgcccattctcccacacagcccattgatggacaatatggaaaatccatttcctgcccaaaagagtcaacctcatccacgcaatggcactacgttcccataaccccgactttagttgcatttcattcctcttgacttttctcctcttcgagatgcacatgcctctttggtagacttataccaacctctcacagcagaggcagcaaatcaaa

SEQ ID NO: 118087 - DNA, 402 bp, Arabidopsis thaliana
acttcttctagggcttccacgcgactacgcctgccaaaatcattctacaggaagcatgaagccagtcttctgtgggaactttgagtatgatgcgcgcgaaggtgacctggaacgactattcaggaaatacggcaaggttgagagggttgatatgaaagctggatgtgtttgataatcttgggacgcctatactcacacctggccatgaatggaccatagggaaatccatctcttatccctcaaaatcagtcactttccatccgcattagcactgccatcttaattgcatttcattcctcatcactttgcacacttggacatgcctctgcaatgggggaacggctctctattttcattcatatccccgtctgacttccacattttcagttgttccttgacata

SEQ ID NO: 118088 - DNA, 1150 bp, Arabidopsis thaliana
  unsure (1)..(1150): unsure at all n locations
tagggaagcctggacgcctgcaggtaccggtccggaattcccgggtcgacccacgcgtccgaggagatcctcatccagcatgagaccttccaagactctctntgtgattaactttgatgcggataatactaggacccgggatctagagaaacactttgagccgtatggaaagatcgtaaacgttaggatcaggaggaattttgcatttatccagtacgaggcacaagaggatgccaccagagcattggatgcttcaaataacaggaagctgatggataaggtgatctcggtggagtatgctgtgaaggatgatgatgctagaggaaatggacacaggtcctgaaagacgccgtgatagggcacctgaaaggagaaggcgatcacctaagtcttacaaaagagaaagagggaagccctgactatggccgaggtgctagtcctggttgctccctacaaaagggaaagggctagtcctgattatggtcgtggaagacgcagccccagcccttacaagagagccaggcttagcccaaattacaaaagggatgaccgtaggagggagagagtggctagcccagagaatggagctgtaaggaaccgaagcccaagaaaaggacgtggtgaaagcaggagtcctcctccatatgagaagaggagggaaagcaggagtcctccgccatatgagaagagaagggaaagcaggagtcctcctccatatgagaagaggagggagaggtcaaggtcaaggtcgaagtcaagccctgagaatggtcaagttgagagccctgggcaaataatggaagtagaagctggaagaggatacgatggagcagacagcccgatacgcgagagcccctctcgttcgccgccagcagaggaatgattggagatgcagacagatgattgtgttggattcacaaacaaaagatgtctctcaaagtagttgtatccgaaactgaagtcttttgctatgtcatgtagtatttagtgtgttattttgggtctttgttaagtgttttgtaaactttattatgactccattcgaaatcgcttgtcgtagtataagttaaaaaaaaaaaaaaagggcggccgctctagaggatccaagcttacgtacgcgtgcatgcgacgtcatagtatgctatagtgg

SEQ ID NO: 118089 - DNA, 1007 bp, Arabidopsis thaliana
ggaaccctaaaacatcccgcttcgctgctcaggaccaagaatctcagattcaactgatctttgcaacatgacgagggtttatgtcgggaatttggacccacgcgtcaccgaaagagaactcgaagacgaattcaaggccttcggtgttcttcgcaatgtctgggtagctcgtagacctcctggctacgcattcctcgagttcgatgacgaaagagatgctttggatgcaatcagcgcattggatcgaaagaatgggtggcgtgtggagctttctcataaagataaaggaggtcgtggaggtggtggtggtcgtcgtggaggtattgaggattccaagtgctatgagtgtggtgagcttggacattttgctcgcgagtgtcgccgtggtcgaggctctgtgaggcgtagaagccctagtccccgtcgtcgtaggagtccagattatgggtatgctcgcaggagtataagcccgcgtggaagaagatctcctccaaggcgtcgcagtgttactccacctcgccgtgggaggagctacagcagatcccctccttatcgtggttcacgccgtgattctcctcgccgcagagactcgccctatggtcgacgttcgccatatgccaatggggtgtgaaactggaccctgaagagaaagaagctattactaagctatgatgctatatctactctgtggcgccttttaggatagatctttatatctgctattatggtattagctcttctaggtttggttgttgagcatggacatgtcatggtatgttcgagttttattagacaattggatttggtgagttctccttcatgctgttttccaacagccgtcttgacttattctctataacacgcactggcctgctgtcttcacacagcgtccttgaacccctacacttgaggtcgttctttcgtatccataaatgttttgtctcttgttgaatgcactttccttattatatagacatatctaaaaagctcaactgtttccactaaaa

SEQ ID NO: 118090 - DNA, 1028 bp, Arabidopsis thaliana
  unsure (1)..(1028): unsure at all n locations
acgcctgcaggtaccggtccggaattcccggttcgacccacgcgtccagttccacaaagcaaaacacagaaaaagccattctttttgccccttgagtgctttcagctcttcccacaaggttacagaagtaatgtcacgtgtgtacgtcggaaatttggacccgcgagttactgagcgtgaacttgaggatgagttccgtgcctttggagttgtcaggagtgtttgggttgcccgtagaccacctggttacgcttttctagatttcgaagatcctagggatgcccgtgatgctatccgtgctttagatggcaagaatggctggagggttgaacagtctcacaatcgaggtgagcgtggtggcggcggtcgtggtggtgaccgtggaggtggtggcggcggccgtggtggtcgtggtggctctgatttgaaatgctatgaatgcggtgagactggtcatttcgcacgtgaatgccgtaaccgtggtggaactggaaggcgtcgcagcaagagccgtagtcgcactcctccaagatacagaaggagcccaagctatggacggaggagttacagccctcgtgcaagatctccccctcctccaaggcgccgcagtccttctcctcctcctgcccgtggccgcagctacagtagatcaccacctccatacagagcgcgtgaggaagtgccatatgctaatggaaatggactgaaagaaagacgcagaagcaggagctgagtgagtgattttgcaagaaaacgagtgtgtgggaggatactttggaagagaagaagagagggactaagggaagttactatcatctatgaatttcagtaagagaacatgttttaggtctgctgggttggataaagcttgctacttttgcttttggatatgaaacgtacgtagttgtgtatctaccaataggtaaaagaacacttgattcgtaaaaaaaaaaaaaaaaaaaaaaaaaaaaannnaagggcggccgctttaaaggattcaagcttacgtacgcgtgcatgcgacgtca

SEQ ID NO: 118091 - DNA, 498 bp, Arabidopsis thaliana
  unsure (1)..(498): unsure at all n locations
gccctcgtgcaagatcttccctcctccaaggcgccgcagtccttctcctcctcctgcccgtggccgcagctacagtagatcaccaccctccatacagagcgcgtgaggaagtgccatatgctaatggaaatggactgaaagaaagacgcagaagcaggagctgagtgagtgattttgcaagaaaacgagtgtgtgggaggatactttggaagagaagaagagagggactaagggaagttactatcatctatgaatttcagtaagagaacatgttttaggtctgctgggttggataaagcttgcaacttttgcttttggatatgaaacgtacgtagttgtgtatctaccaataggtaaaagaacacttgattcgtaccctagtttcttaaagacataatgtttgattggaaattctgctaaatgcataagcgtttcttgtcttaaaaaggttaaaaaaaccaggngcagccgctctagaggatccaagcttacgtacgc

SEQ ID NO: 118092 - DNA, 1019 bp, Arabidopsis thaliana
  unsure (1)..(1019): unsure at all n locations
gcagcaattaaacaatttcttcactgcaattcacaagcaaccttcaaactaaaactcgagagacaagaaatcctcagaatctttaacttaatggcgctcgaggctcttacatcaccaagattagcttctccgattcctcctttgttcgaagattcttcagtcttccatggagtcgagcactggacaaagggtaagcgatctaagagatcaagatccgatttccaccaccaaaacctcactgaggaagagtatctagctttttgcctcatgcttctcgctcgcgacaaccgtcagcctcctcctcctccggcggtggagaagttgagctacaagtgtagcgtctgcgacaagacgttctcttcttaccaagctctcggtggtcacaaggcaagccaccgtaagaacttatcacagactctctccggcggaggagatgatcattcaacctcgtcggcgacaaccacatccgccgtgactactggaagtgggaaatcacacgtttgcaccatctgtaacaagtcttttccttccggtcaagctctcggcggacacaagcggtgccactacgaaggaaacaacaacatcaacactagtagcgtgtccaactccgaaggtgcggggtccactagccacgttagcagtagccaccgtgggtttgacctcaacatccctccgatccctgaattctcgatggtcaacggagacgacgaagtcatgagccctatgccggcgaagaagcctcggtttgactttccggtcaaacttcaactttaaggaaatttacttagacgataagatttcgtttgtatactgttgagagttgtgtaggaatttgttgactgtacataccaaattggactttgactgattccaattcttcttgttctttcattttaaaaattattaaaccgattctttaccacatattttacaaaaaaaaaaaaaaaaaaagnnnnnnnnnnnnnnnnnnnnnnnnnnnnnnnnnnnnnnnnnnnnnnnnnnnnnnnnnnnnnnnnnnn

SEQ ID NO: 118093 - DNA, 874 bp, Arabidopsis thaliana
  unsure (1)..(874): unsure at all n locations
nnnnnnncactaatacgactcacttagggaaagccggtacgcctgcaggtaccggtccggaattcccgggtcgacccacgcgtccgcggacgcgtgggcggacgcgtgggcggacgcgtgggttcaggtttcttttctaacaagcaaaaactccaacctttactttatttttgttttgttttgtaaccctctcagatcttaattctcaaagaagtatgaagagagaaagatctgatttcgaagaatccctcaagaatattgacattgctaaatgtctgatgatactagcacaaacctccatggtcaaacagatcggtttgaaccaacataccgagagccatacaagcaaccaattcgaatgcaaaacatgtaacaagagattttcttcgtttcaagcccttggtggccaccgggcaagccataagaagccaaagctcaccgttgagcagaaagatgtgaaacatcttagcaacgattataaaggaaatcattctcacaagtgttccatatgcagtcagagttttgggaccggacaggctttaggtggtcacatgagacggcataggtcaagcatgacggtcgagccatcgttcatctctccgatgattccatccatgccggttgtgaaacgatgcggtagtagtaagaggattttagagtttggatttgaatctgactcccgtagagaatgatcttgaatatatctttgggatgacatttggcccaaaaatagatatgaagctcgtcctttagtttttttttcctttatctttaagaagacatttgtccaaaatgatcatttgatggaattcctatctttattctcaaccgtacgctcatctcacgaacttatggtgaagaaaaagagactgaa

SEQ ID NO: 118094 - DNA, 740 bp, Arabidopsis thaliana
accaaactcaaaaaacacaaaccacaagaggatcatttcattttttattgtttcgttttaatcatcatcatcagaagaaaaatggttgcgatatcggagatcaagtcgacggtggatgtcacggcggcgaattgtttgatgcttttatctagagttggacaagaaaacgttgacggtggcgatcaaaaacgcgttttcacatgtaaaacgtgtttgaagcagtttcattcgttccaagccttaggaggtcaccgtgcgagtcacaagaagcctaacaacgacgctttgtcgtctggattgatgaagaaggtgaaaacgtcgtcgcatccttgtcccatatgtggagtggagtttccgatgggacaagctttgggaggacacatgaggtgacacaggatacgtgagtggggctgctggtggcgcgttggttacacgcgctttgttgccggagcccacggtgactacgttgaagaaatctagcagtgggaagagagtggcttgtttggatctgagtctagggatggtggacaatttgaatctcaagttggagcttggaagaacagtttattgattttatttattttccttaaattttctgaatatatttgtttctctcattctttgaatttttcttaatattctagattatacatacatccgcagatttaggaaactttcatagagtgtaatcttttctttctgtaaaaatatattttacttgtagcaaaaaaaaaaaaaaa

SEQ ID NO: 118095 - DNA, 1245 bp, Arabidopsis thaliana
ccggtccgcaattcccgggtcgacccacgcgtccgtctctcttctcttctgtctctctcttgttagttcactccacataataaacaccaaagatttcattctcttctccataatttcgaagtttcttgaattgggtttgtttcttgatttgtttcttgaattgggttttggtcttcttttcttactatatttggatatgatgatgggtcaagatgaggttgggagtgatcagacgcaaatcataaaagggaaacgtacgaagcgacaaagatcgtcttcgacgtttgtggtgacggcggcgacaacagtgacttcaacaagttcatcggccggtggaagtggaggagaaagagctgtttcagatgaatacaactcggcggtttcgtctccggtgactactgattgtacgcaagaagaagaagacatggcgatttgtctcatcatgttagctcgtgggacagttcttccatcgccggatctcaagaactcgagaaaaattcatcagaagatttcgtcggagaattctagtttctatgtgtacgagtgtaaaacgtgtaaccggacgttttcgtcgttccaagcacttggtggacacagagcgagccacaagaagccgaggacgtcgactgaggaaaagactagactacccctgacgcaacccaagtctagtgcatcagaagaagggcaaaacagtcatttcaaagtttccggctcagccctagcttcacaggcaagtaacatcatcaacaaggcaaacaaagtacacgagtgttccatctgcggttctgagttcacttccgggcaagctctcggtggtcacatgaggcggcacaggacagccgtaaccacgattagccccgttgcagccaccgcagaagtaagcagaaacagtacagaggaagagattgagatcaatataggccgttcgatggaacagcagaggaaatatctaccgttggatcttaatctaccagcaccaggagatgatctaagagagtccaagtttcaagggatagtattctcagcaacaccagcgttaatagattgtcattactagttgttttttttactacataatatgatgaaatatttgtgaattcttcttacttactactatattgttgatcaaaaaaaaaaaaaaaaaattaaattgaatcaaatataatcatttttaagaaaaaaaaaaaaaaaagggcggccgctctagaggatccaagcttacgtacgcgtgcatgcgacgtcatg

SEQ ID NO: 118096 - DNA, 1969 bp, Arabidopsis thaliana
  unsure (1)..(1969): unsure at all n locations
nnnnnnngcccgccccaaattttgaatttccgtggccgtccgcgggaccagcgcccgcgcttctctctctctctctctctgcctcctttcggattcaaatctcagatctagctcaaccatggcgttgctcgtcgagaagacctcaagtggccgtgaatacaaggtcaaagacatgtctcaagccgatttcggtcgtctcgaactcgagctcgccgaagttgagatgcctggactcatggcttgtcgtaccgaattcggaccttctcagccattcaaaggcgctagaatcaccggatctcttcacatgaccatccaaaccgccgtactcatcgaaaccctaactgctctcggtgctgaagtcagatggtgttcctgcaacatcttttccactcaagaccacgccgccgcagccatcgctcgtgactccgccgctgttttcgcctggaaaggtgagactcttcaggagtactggtggtgtaccgagcgtgctctagattggggtccaggtggtggtcctgatctgattgttgatgatggtggtgacgctactcttttgattcatgagggtgttaaagctgaggagatctttgagaagactggtcaagttcctgatcctacttctactgataaccctgagtttcagatcgtgttgtctattatcaaggaaggtcttcaagttgatcctaagaagtaccacaagatgaaggagagacttgttggtgtctctgaggaaactaccactggtgttaagaggctttaccagatgcagcaaaatggaactcttttgttccctgccattaacgttaacgactctgtcaccaagagcaagttcgacaacttgtatggttgccgtcactcactccctgatggtctcatgagggccactgatgtcatgatcgctggaaaggttgctgttatctgtggatatggtgatgttggaaagggttgtgctgctgccatgaagactgctggtgctagagtcattgtgactgagattgatcccatctgtgcccttcaagctttgatggaaggacttcaggttcttacccttgaggatgttgtctcagaagctgatatctttgtcaccaccaccggtaacaaagacatcatcatggtcgaccacatgaggaagatgaagaacaacgctattgtgtgcaacattggtcactttgacaatgagattgacatgcttggacttgagacttaccctggtgtgaagcgtatcaccatcaagccacagactgacaggtgggtgttcccagagaccaaggctggaatcattgtcttggctgagggtcgtctgatgaacttgggttgtgccactggtcacccaagtttcgtgatgtcttgctctttcaccaaccaggtgattgcccagctcgagctctggaacgagaaagcaagcggaaagtacgagaagaaggtgtacgttcttcccaagcatttggatgagaaggttgcattacttcacttgggcaagcttggagccaggcttacaaagctgtcaaaggaccaatctgactacgtcagcattccaattgagggaccatacaagcctcctcactacaggtactgagagagagagagagtcgacaaagcggttcaggttcggatctacttgtggttttgtgttgggttgtggtgggagagtggaacagtttgagatattggtcttctgatgaagttgaccaaatatcagtattaataagggttattggcttttgaaggttgtgcttgttttctccatttttcatgaaacttaaattagtttttggtttagtttccctcttgattttattttgtgtgttctgtttagcgttgtactcttcaaacaaatgagaaaccaaaaaaaaaggggaaacttgttttcggcaaaacaataaaaaaagcggccgcgaattcgatatcaagcttatcgataccgtcgacctcgagggggggccnnnnnnnnnnnnnnnnnnnnacaatc

SEQ ID NO: 118097 - DNA, 919 bp, Arabidopsis thaliana
tacgcctgcaggtaccggtccggaattcccgggtcgacccacgcgtccgaaagacatcatcatggtcgaccacatgaggaagatgaagaacaacgctattgtgtgcaacattggtcactttgacaatgagattgacatgcttggacttgagacttaccctggtgtgaagcgtatcaccatcaagccacagactgacaggtgggtgttcccagagaccaaggctggaatcattgtcttggctgagggtcgtctgatgaacttgggttgtgccactggtcacccaagtttcgtgatgtcttgctctttcaccaaccaggtgattgcccagctcgagctctggaacgagaaagcaagcggaaagtacgagaagaaggtgtacgttcttcccaagcatttggatgagaaggttgcattacttcacttgggcaagcttggagccaggcttacaaagctgtcaaaggaccaatctgactacgtcagcattccaattgagggaccatacaagcctcctcactacaggtactgagagagagagagagtcgacaaagcggttcaggttcggatctacttgtggttttgtgttgggttgtggtgggagagtggaacagtttgagatattggtcttctgatgaagttgaccaaatatcagtattaataagggttattggcttttgaaggttgtgcttgttttctccatttttcatgaaacttaaattagtttttggtttagtttccctcttgattttattttgtgtgttctgtttagcgttgtactcttcaaacaaatgagaaaccaaaaaaaaaggggaaacttgttttcggcaaaaaaaaacccaaagggcgaccgctctagaggatccaagcttacgtacgcgtgcgtgcgacgtcatagtcttctatagtgcacctaatagaatcg

SEQ ID NO: 118098 - DNA, 672 bp, Arabidopsis thaliana
  unsure (1)..(672): unsure at all n locations
gcacgtaccggtccggaatttccgggtcgacccacgcgtccgcccagctcgagctctggaacgagaaagcaagccggaaagtacgaagaagaaggtgtacgttcttcccaagcatttggatgagaaggttgcattacttcacttgggcaagcttggagccaggcttacaaagctgtcaaaggaccaatctgactacgtcagcattccaattgagggaccatacaagcctcctcactacaggtactgagagagagagagagtcgacaaagcggttcaggttcggatctacttgtggttttgtgttgggttgtggtgggagagtggaacagtttgagatattggtcttctgatgaagttgaccaaatatcagtattaataagggttattggcttttgaaaggttgtgcttgttttctccatttttcatgaaacttaaattagtttttggtttagtttccctcttgattttattttgtgtgttctgtttagcgttgtactcttcaaacaaatgagaaaccaaaaaaaaaggggaaacttgtgttcggcatcccgagttcgttagcgagcttttggtgaatgaatgtctcaaatgctcatctttaataatgtgtgttaggacacgaacaacaaanaaaaacaataataaaaaaatataaaaaaaaaaagggcggcg

SEQ ID NO: 118099 - DNA, 715 bp, Arabidopsis thaliana
  unsure (1)..(715): unsure at all n locations
nnnnnnnnncagctactccatacgactcacttagggaaagctggtacgcctgcaggtaccggtccggaattcccgggtcgacccacgcgtccgcccacgcgtccgcccacgcgtccggttgtgccactggtcacccaagtttcgtgatgtcttgctctttcaccaaccaggtgattgcccagctcgagctctggaacgagaaagcaagcggaaagtacgagaagaaggtgtacgttcttcccaagcatttggatgagaaggttgcattacttcacttgggcaagcttggagccaggcttacaaagctgtcaaaggaccaatctgactacgtcagcattccaattgagggaccatacaagcctcctcactacaggtactgagagagagagagagtcgacaaagcggttcaggttcggatctacttgtggttttgtgttgggttgtggtgggagagtggaacagtttgagatattggtcttctgatgaagttgaccaaatatcagtattaataaggggttatttgggcttttttaaaggttgntcctngttttcnnccattttttcaatgaactttaaaatagggtttttggnttaggttnccccctngattttnaattttgggnggtnctggttaagnggtggacntttaaanaaantgggnacccaaaaaaaaaggggaacttttttcgganccncgtttcngcntttgttgaan

SEQ ID NO: 118100 - DNA, 683 bp, Arabidopsis thaliana
  unsure (1)..(683): unsure at all n locations
cgtttggggattggtgtcctcaagagagcttaaaatggtttgtcaccaccgccggttaaccgaagacatcntggatggtccggccacatggagggagatgaagggccaactcgagtgtgtgcaacaatgttgcactgtgacaatgagagtgacaagcttgggagccaggcttacaaagctgtcaaaggaccaatctgactacgtcagcattccaattgagggaccatacaagcctcctcactacaggtacttgagagagagagagagtgtcgccaaagcggttcaggttcggatctacttgtggttttgtgttgggttgtggtgggagagtggaacagtttgagatattggtcttctgatgaagttgaccaaatatcagtattaataagggcttgttggcttttgaaggttgtgcttgttttctccatttttcacccaaacttgaaattagtttttggtttagtttccctcttgattttattttgtgtgttctgtttagcgttgtactcttcaaacaaatgagaaaccaaaaaaaaaggggaaacttgttttcggcatcccagtgttagcgacttttgttgaatgaaaaaaaaaaacccagagggcgaacgctctagaggatccaagcttacgtacgcggnnnnnnnnnnnnnnnnnnnnnnnnnnnnnnnnnnnnnnaatcg

SEQ ID NO: 118101 - DNA, 480 bp, Arabidopsis thaliana
gctatcaaggatctaagtgaaataggttgtcggaccatcaaagggcccatcaagccctgttcactccaggtactgagaggataaaagagccaagcttgggttcttcgtttggttttctgattaacccgtttattgccaattgtttgagccgcatggggtctggtttggccggagaaattatgagatattggtcttctgatgcgtgtgaccaaatattggtatgaataaggggttgtttttcatttgtggggggctgttttttgtgttttcttcttcttctattttatatatcttcaacataaattagcttatgctttccattattgttaggcttatttatgctttgttctgtctacttttccaaccaagagtgcggcccgccaaaaaaaaattcctgcaaagcccggggcatcctctagttctagagcggccgccaccgcggtgcagctccagggttgtctcctctttagggagggttaa

SEQ ID NO: 118102 - DNA, 787 bp, Arabidopsis thaliana
gccccccctcgttgtggggggaatcgataagctggatatcgaattcggggccgcccgatctctactgataatcccgagtttcagatcgtcctgtctattatcaaagacggtcttcaagttgatcccaagaagtaccataagatgaaggagagattggttggtgtctctgaggagactactactggtgttaagaggctttatcagatgcaggagactggtgctctcttgttccctgccattaacgtcaatgactctgtcaccaagagcaaggtaatgtggcacattatagctttagaagacactagatctgatattgttttgcctaatttgtggataatacaatgttttgaaatcaccaaaatatgaatgatattgttaatggatccatttaggtggaagcaagaactctgttttttgctctgtttctgctctgcatttctctgtttcactgatgatttgtttgctttatagtttgacaacttgtacggatgccgacactcgcttcccgatggtctcatgagggcgactgatgttatgattcctggaaaggttgcggttatctgtggttagggtgatgtaggaaaaggttgtgctgcagcaatgaaaaccgcgggtgctcgtgtcatagtgactgagattgatccaatctgtgctcttcaggctcttatggaaggtcttcaagttctgacccttgaggatgttgtctcagaagctgatatcttctgtaccactactggtaacaaagatattattatggttgatcacatgaggaagatgaagaacaatg

SEQ ID NO: 118103 - DNA, 1506 bp, Arabidopsis thaliana
  unsure (1)..(1506): unsure at all n locations
aaaangtncgaacggtgatcgntnaagtttgnatcatcgtaattcgccggccgcatggcgtttgctcgtcgagaagacctcaagtggccgtgaatacaaggtcaaagacatgtctcaagccgatttcggtcgtctcgaactcgagctcgccgaagttgagatgcctggactcatggcttgtcgtaccgaattcggaccttctcagccattcaaaggcgctagaatcaccggatctcttcacatgaccatccaaaccgccgtactcatcgaaaccctaactgctctcggtgctgaagtcagatggtgttcctgcaacatcttttccactcaagaccacgtcgccgcagccatcgctcgtgactccgccgctgttttcgcctggaaaggtgagactctttaggagtactngtggtgtaccgagcgtgctctagaattgggtccagggtggtggtcctgatctgattgtttgatnatggtggtgacggaactcttttgnttnatnngggcgntaaaantttaggcgttttctgcattttttcgcggccgccctgatcctacttttactgataaccctgagtttcagatcgtgttgtctattatcaaggaaggtcttcaagttgatcctaagaagtaccacaagatgaaggagagacttgttggtgtctctgaggaaactaccactggtgttaagaggctttaccagatgcagcaaaatggaactcttttgttccctgccattaacgttaacgactctgtcaccaagagcaagttcgacaacttgtatggttgcgcgcactcactccctgatggtctcatgagggccactgatgtcatgatcgctggaaaggttgctgttatctgtggatatggcgatgttggaaagggttgtgctgctgccatgaaaactgctggtgctagagtcattgtgactgagattgatccccatctgtgccctttcaagctttgatggaaggaccttcaaggttcttcccccttgaggatggtgtctcagaagctgatatctttggtcaccaccaccggtaacaaagacctcatcatggtcgcccacactgaggaagatgaagaaccacgcttttgggtgccacattggtcactttgacaaatgagattgacatgcctgggacttgagacttaccctggggtgaagccgtatcaccatccaagcccacagacctggcaggggggggggttccctcagaagacccaaggctgggaatcattgtcttggctgagggtcgtctgatgaacttgggttgtgccacttggtcacccaagtttcgtnatgtcttgctcttttaaccaaccaggtgattgcccagttgnagctttggaacgggaagcaagcggaagtcgggagaaggtgnncgttttcccagnatttggntggaaggttgattnnttntttnggaagtttnggcaggttaaaagtntaaaggccatttttttggggattcatttgggcctnaagtcttttaaggntnnntc

SEQ ID NO: 118104 - DNA, 723 bp, Arabidopsis thaliana
tcgtccgtgaagaacaatgccattgtctgtaacattggtcattttaccaatgaaatcgacatgcttggacttgagacctaccctggtgtgaaacgtattaccatcaagccacagtccgataggtgggtgtttcctgataccaactctggcatcattgttctagctgaaggtcgtttgatgaacttgggatgcgccactggacacccgagtttcgtgatgtcgtgctcattcaccaaccaggtgattgcacagcttgagctctggaacgagaagtcaagcgggaagtatgagaagaaggtctatgttttgcctaaacacttggatgagaaggtagctgcacttcacttaggcaagcttggtgcaagactcaccaagcttaccaaggaccaatctgactatgtcagcatacccgttgaaggtccttacaagcctgttcactacaggtactgagaggataaaagagccaagctttggttcttcgtttggttttctgattaagccgtttattggcaattgtttgagtcggattgggtctggtttggtcggagaaatatgagatattggtcttctgatgcgtgtgaccaaatattggtatgaataaggggttgtttttgatttatgagaggctgttttttttgttttctcctcctcctattttaaaaatcctcccccaaaaaaaaaaaaaaagggcggccgctttaaaggatcccagcttacggacgc

SEQ ID NO: 118105 - DNA, 644 bp, Arabidopsis thaliana
  unsure (1)..(644): unsure at all n locations
gcncccaannnccgaattcctccccttcnccaccgggttattcccaaccccaaccttggaccaaaaacaaacggaaantcnaaaaaaaggtgacggnctcccaanccattggataaaaaggttnnatncctncacttgggaaaacntggacccagccttacaaagcttgtcaaaggaccaatcttcctaccgtcagcattcccaattgggggaccatacaagcctccctcactacaggtactgagagagagagagagagccgacaaagcggttcaggttcggatctacttgtggttttgtgttgggttgtggtgggagagtggaacagtttgagatattggtcttctgatgaagttgaccaaatatcagtattaataagggttattggcttttgaaggttgtgcttgttttctccatttttcatgaaacttaaattagtttttggtttagtttccctcttgattttattttgtgtgttctgtttagcgttgtactcttcaaactaatgagaaaccaaaaaaaaaggggaaacttgttttcggcatcccaaaaaaaaaaaaaaagggcagaccgctctagaggatccaagcttacgtacgcgtgcatgcgacgtcatagtcttgtatagttcacataaatcattc

SEQ ID NO: 118106 - DNA, 1532 bp, Arabidopsis thaliana
acaatctccaaaatacataaatttgttcacatccttccgtttttggttaggccgagaaaaaaaaaaaatgttgccggtcacaagtcgccgccacttcacaatgtccctatatatgctccgttcatcttctccacacatcaatcatcactctttccttcttccttcttttgtttcctccaaattcaaacaccatactttatctcctcctccttctcctcctcctcctcctcctatggctgcgtgcatcgacacctgccgcactggtaaaccccagatttctcctcgcgattcttctaaacaccacgacgatgaatctggctttcgttacatgaactacttccgttatcctgatcgatcttccttcaatggaacccagaccaaaaccctccatactcgtcctttgcttgaagatctcgatcgcgacgctgaagtcgatgatgtttgggccaaaatccgagaagaggctaaatctgatatcgccaaagaacctattgtttccgcttattatcacgcttcgattgtttctcagcgttcgttggaagctgcgttggcgaatactttatctgttaaactcagcaatttgaatcttccaagcaacacgcttttcgatttgttctctggtgttcttcaaggaaacccagatattgttgaatctgtcaagctagatcttttagctgttaaggagagagatcctgcttgtataagctacgttcattgtttccttcactttaaaggcttcctcgcttgtcaagcgcatcgtattgctcatgagctttggactcaggacagaaaaatcctagctttgttgatccagaacagagtctctgaagccttcgctgttgatttccaccctggagctaaaatcggtaccgggattttgctagaccatgctacggctattgtgatcggtgagacggcggttgtggggaacaatgtttcgattctccataacgttacgcttggaggaacggggaaacagtgtggagataggcacccgaagattggcgatggggttttgattggagctgggacttgtattttggggaatatcacgattggtgaaggagctaagattggtgcggggtcggtggtgttgaaagacgtgccgccgcgtacgacggctgttggaaatccggcgaggttgcttggtggtaaagataatccgaaaacgcatgacaagattcctggtttgactatggaccagacgtcgcatatatccgagtggtcggattatgtaatttgaaaaagtctttgtttttggttgttgttgttgtttatggcttttcattgttctctcggcttcttctgttattgaagctggtgaagtatatgatatgcgatgatgctgtttccataatcagatcatttgtctctccataagataacactgattaagatgggattggaaagtaaactcggaaactctgaactctgtttagtggagtttcctgtggttggtttctgattagcagagacttaagatatgtttagtatgtaagtgcttatttggttaaaccatgatttctgtatca

SEQ ID NO: 118107 - DNA, 1479 bp, Arabidopsis thaliana
  unsure (1)..(1479): unsure at all n locations
tttagggttcacaacttgattcggatcgaaagcaccgagaagaagaagccaatcaatcatgtctagacaagtggcaaggcttatcggatctctgtcatcaaaagctcgccgttgttctaccggcggctcagaggtttttccgtcatgccagtctctcacttcgttgacccaatctcgctccttcgcgtcggatcctcatcctcctgcggcggttttcgttgacaaaaacacacgagtcctctgtcaaggcatcaccggaaagaacggcactttccacactgaacaagccattgagtacggcaccaaaatggtggcaggagtgacaccgaagaagggtggaacagaacacttgggtctcccagttttcaactctgttgctgaagctaaggctgacaccaaagccaatgcctctgtgatttatgttcctgctccttttgctgctgctgctattatggagggtattgaggctgagttagatcttattgtgtgtatcaccgaaggaatccctcaacatgacatggtacgtgtaaagcatgctcttaacagtcaatcgaaaactaggctgattggtccaaactgccctgggattatcaagcctggtgaatgcaaaattggaattatgccgggatacatccacaagcctgggaagattggaattgtctcacgatctggaaccttgacatatgaagctgttttccaaacaactgcagtgggtctaggccaatctacttgtgtaggaatcggtggggatccttttaacgggacaaactttgtcgactgcttggagaaattctttgttgatcctcaaacagaaggtatcgttctcattggagaaatcggaggcactgcagaagaagatgctgcagcattgataaaggcaagtggtactgagaagcctgttgttgcttttattgctggacttactgcaccaccgggtcgtcgaatgggtcatgccggagccattgtttccggtggtaaaggtacggctcaggacaaaattaagagtttgaatgatgctggagtgaaggttgttgaatctccggctaagattggatcagcgatgtatgagctctttcaagaaagaggtcttttgaagcagtgaagtgaatttcactagctttcgcttctttttttccatcttgaaaccttcaagaaaaaagaaaagaaagaaaccctaattccacgccattgatggctgcacacttttttggggtttggtttgctatactcatatgatttttccaattgaacagtgataattaaaagagattcaaatcttatggcattggattatttttaatgttatcttccagtacaagaaataagagtgaagcaatgtttctttacacaacaaaaaaaaaaaaaaaaaggnnnnnnnnnnnnnnnnnnnnnnnnnnnnnnnnnnnnnnnnnnnnnnnnnnnnnnnnnnnnnnnnnnnnnnnnnnnnnnnnnnnnnnnnnnnnnnnnnnnnnnnnnnnn

SEQ ID NO: 118108 - DNA, 1689 bp, Arabidopsis thaliana
cactcatatagggaaagctggtacgcctgcaggtaccggtccggaattcccgtgtcgacccacgcgtccgcacggctgcgacgacagaagggtacggctgcgcgaagacgacagaagggtacggctgcgagaagacgacgatcattcatagctgcgactattctctgctctttctacattttctcattttctcttgggctacttttcgactactaacaaatccaacgatgaggggattggtgaacaagctcgtgtccagatctctctccatctccgggaaatggcagaaccaacagcttcgtcgtctcaacatccacgagtatcagggagctgaattgatggggaaatatggagttaatgtgccgaaaggagtagctgcttcttcgttggaagaagttaaaaaggctattcaagatgttttccctaatgaaagcgagttggttgttaagagccagattttggctggtggaagaggtcttggaacattcaagagtggtcttaagggtggtgttcacattgttaaacgtgatgaggctgaagagattgctggaaagatgctaggacaagtacttgtcaccaagcaaactggtcctcaaggcaaagtagttagcaaggtttacttgtgtgagaaattgtcactcgtcaatgagatgtacttttccattattctggaccgtaaatctgctggaccgttgatcattgcctgtaaaaagggtggtaccagtattgaagatcttgctgagaagttccctgacatgatcatcaaggtaccaattgatgtatttgcaggaatcactgatgaagatgctgctaaggttgtggatggtctggctcccaaagctgctgacagaaaagattcgattgaacaagtgaagaagctatacgaactcttccgcaagactgactgcacaatgttggaaatcaatccccttgcggagacatcaactaatcaattggtagctgctgatgccaaattgaacttcgatgataatgctgcgttccgacaaaaagaggttttcgccatgcgtgatccaacacaggaggatccacgagaggtggctgctgctaaagttgacctgaactacatcggtttagatggagagattggttgcatggtgaatggtgctggattggccatggcaaccatggacatcattaaattacacggtggaacacccgccaatttccttgacgttggtggaaatgcttctgagcaccaggtggtggaagcgtttaagatactgacatcggacgataaagtgaaagcaatcttggtgaacatatttggtgggataatgaaatgtgatgtgattgctagtggaatcgtgaacgctgcaaaagaggtcgcattgaaagtgccagtggtggttcgtctagaaggaacgaatgttgagcagggaaagagaatcctcaaggaaagtggaatgaaactcataacagctgatgatttggatgatgcagctgagaaagcggttaaagctttagctcactaatctctctatatataccaaaagccggtttgttaattgttttgtggttgacgcccaatttacactttcttgcggatatcatttcctcaaacagatcaataatgaactggtctcctttttttgtgtgatccatccaaagagattcaaatcagaattctcaatatctttttgtatttaaccaactcatatggttgatact

SEQ ID NO: 118109 - DNA, 947 bp, Arabidopsis thaliana
  unsure (1)..(947): unsure at all n locations
gagattgctggaaagatgctaggacaagtacttgtcaccaagcaaacnggtcctcaaggcaaagtagttagcaaggtttacttgtgtgagaaattgtcactcgtcaatgagatgtacttttccattattctggaccgtaaatctgctggaccgttgatcattgcctgtaaaaagggtggtaccagtattgaagatcttgctgagaagttccctgacatgatcatcaaggtaccaattgatgtatttncaggaatcactgatgaagatgctgctaaggttgtggatggtctggctcccaaagctgcntgaccagaaaaaggattcggattgaacaaggtnaaggaagcttatacgggacctntttcccgcaaggactngncttgcacaaatttttngggaattcaatccccctttttggggggccatcaacctaatcaattggtagctgctgatgccaaattgaacttcgatgataatnctgcgttccgacaaaaagaggttttcgccatncgtgatccaacacaggaggatccacganaggtggctgctgctaaagttgacctgaactacatcggtttagatggagagattggttgcatggtgaatggtgctggattggccatggcaaccatggacatcattaaattacacggtggaacaccgccaatttccttgacgttggtggaaatncttctnagcaccaggtggtggangcntttaagatactgacatcggccgataaagtgaaagcaatcttggtgancatatttggtgggtaatgaatttgatgtgattnctagtggatcgtgaccgttcaaaaggggcgcattgaaagtnccagtggtggtccgcttganggncgattttttncagggaagggtnctaaggaagtggttnactctancacttgtgtttggtatcncttgaacnggtaanttccccctttc

SEQ ID NO: 118110 - DNA, 1440 bp, Arabidopsis thaliana
ctggttcagtacaaaattcggaatcgtaggtttaagaattttagatcattgaaacagccatgtctaggcaggtcacgagacttctcggatctcttcgccattccggcggcggctgcagcggcagctcaaaggtctgctctctcacttcattggtacagtctcgctccttcgggacaactcctccgcctcctgcggcaggtctttgtcgacaaaaatacacgtgtcatctgccaaggtattaccggaaagaacgggaccttccacactgaacaagccattgaatacggcaccaaaatggtagcaggagtgacaccaaagaagggtggaacagaacatttggggctacctgttttcaacactgttgctgaagctaaggctgagactaaagccaatgcctctgtgatctacgtacctgcgcctttcgctgctgctgctatcatggaaggtttagctgctgagttagatcttattgtttgtattactgaaggaattcctcaacatgacatggttcgcgtaaaggctgctcttaacagtcaatcaaaaactaggctgattggccctaattgtcctggtattatcaaacctggtgaatgcaagattgggatcatgccgggatacatacacaagccggggaagatagggattgtttctcgatctggaacattgacatatgaagctgttttccaaactactgcagtaggtttggggcaatctacttgtgtaggaattggtggggatccgtttaatgggacaaattttgttgactgcttggagaagttctttgttgacccccaaacagaaggtatcgttctcattggagaaatcggtgggactgcagaagaagatgccgctgctttgataaaggaaaatggtacagacaagcctgtagttgctttcatagccggacttactgcaccaccagggcgtcgtatgggtcatgcgggacgcattgtttccggtggtaagggcacggctcaagacaagataaagagcctaagagacgcaggagttaaggtggttgagtcaccagctaagcttggtgcggcgatgtttgagcttttccaagaaagaggtcttttgaagtgaaactgaagtaatatcataatacaatgagttgtttcaggaatcaacctctctaataacaacagtttgccaaaatagaagagagaaacggaattcctaaaattccttacatggagataattgcagagaaaaaaaaaatagtcacttttttttttttgtctatgccattctatttttcaatttattgagccgttctatttttttttgtctttgttttggttaaggttacaaaaaatgagaacgaatcaattgcacaaatttcttcttttaagaatcaaaatcaactaatttagctatgttgattccaacttttgtctgctatgctatgagtattgttgtaaaacaaaccttttcttt

SEQ ID NO: 118111 - DNA, 2308 bp, Arabidopsis thaliana
acttaaaggaaacctcctctacgcgaaattcgtattctctcatttcttctacggagatttgcatcgaagaaactgactcgcttgtggaatcaacaacaagacgatgtggcgctgcgtctctcgtggctttcgagctcctgcttcaaagacctcttcactctttgatggcgtctctggatctcgcttttccagattcttctccactggttctaccgatacgagatcctcttatacgatagtggatcacacttatgatgcggttgtggtgggagctggtggtgctggtcttagggcggcgattgggttatcggagcatggctttaacaccgcttgcattactaagcttttccccacaaggtcacatactgttgctgctcagggtggtattaatgctgcactgggaaatatgtccgaagatgactggagatggcacatgtatgacactgtcaaaggaagtgactggctaggtgatcaagatgctatccagtacatgtgtagagaggcaccaaaagcagtcattgaacttgagaattatgggctgcctttctctcgtactgaagaagggaaaatttaccagcgtgcatttggtggtcagagtcttgactttggaaaaggtggtcaggcctatcgttgtgcttgtgctgcggataggactggtcatgctctgttgcatactctctatggacaagctatgaagcataacacacagttctttgttgaatacttcgccttggatctgctcatggctagtgatggcagttgccagggtgtaattgcactaaacatggaagatggaacgttgcatcgtttccgttcttctcaaacaattttggcaactggggggtacggcagagcatacttctctgcaacctcagcacatacatgcacaggggatggaaatgcaatggttgcacgggccggtcttccactgcaggacttggagtttgttcaattccatccaactggtatatatggggccggatgtctcatcaccgaaggatctcgaggtgaaggtggtatccttagaaacagtgaaggtgaacgttttatggaacgatatgctcctacagccaaggatcttgcatcaagagatgttgtctccagatccatgactatggaaatcagggaaggtcgtggtgtaggaccgcataaggatcatatctatctccatctgaatcatcttcctccagaagttctaaaagaaaggcttcctggaatctctgagaccgctgccatctttgctggtgttgatgttaccaaagagccaattcctgtcttacccacggttcattataacatgggtggtatcccaacaaactaccatggcgaggtagttaccatcaaaggcgatgatccagatgcagtgattcctgggctaatggctgctggggaggcagcttgtgcatctgttcatggtgccaacaggcttggtgcaaattcactgctcgacattgtcgtatttggtcgtgcttgtgcaaatagggttgcagagataagcaaaccaggggagaaacagaaacctcttgagaaggatgcgggtgagaagactattgcatggctggacaggttgagaaactcaaacgggtctctacctacttcaactatcagattgaacatgcagaggattatgcagaacaacgcagctgtgttccgcacgcaagaaacattggaagaaggttgtcagttgattgacaaggcctgggaaagttttggggacgtccaggtgaaagatcggagtatgatatggaactcggatttgatagagacattggaactggagaaccttttgataaacgcatccataacaatgcattcagcagaagcacgaaaggaaagcagaggagcacatgctcgggaagacttcacgaaaagagaggatggagaatggatgaagcatacattgggatattgggaagatgagaaagtgagattggattataggcctgttcacatggacactctcgacgatgagatcgacactttccctcccaaagctcgtgtctattgatcgagcccatgtttttattttatctgttatcggaataataataataatcaggaaccccccaaaaaaagggaattaggagaagaagacggagttatgagctgatggagcacaaaggactgttctgaaactgggtttacgttttacaccagaaacgatgaaaataaattgatagaagaggaaaaaacactacaattcttattttctttatcagttcctgaaattgttacattctttgttacctgttaattacgccttggtgatattcatttttttttttaaatcaaaatgttcgaattccgt

SEQ ID NO: 118112 - DNA, 904 bp, Arabidopsis thaliana
  unsure (1)..(904): unsure at all n locations
atacgactcactttagggaaagctcgtacgcctgcaggtaccggtccggaattcccgggtcgacccacgcgtccgcccacgcgtccgcggcagagcatacttctctgcaacctcagcacatacatgcacaggggatggaaatgcaatggttgcacgggccggtcttccactgcaggacttggagtttgttcaattccatccaactggtatatatggggccggatgtctggtgaccgaaggatctcgaggtgaaggtggtatccttagaaacagtgaaggtgaacgttttatggaacgatatgctcctacagccaaggatcttgcatcaagagatgttgtctccagatccatgactatggaaatcagggaaggtcgtggtgtaggaccccataaggatcatatctatctccatctgaatcatcttcctccagaagttctaaaagaaaggcttcctggaatctctgagaccgctgccatctttgctggtgttgatgttaccaaagagccaattcctgtcttacccacggttcattataacatgggtggtatcccaacaaactaccatggcgaggtagttaccatcaaaggcgatgatccagatgcagtgattcctgggctaatggctgctggggaggcagcttgtgcatctgttcatggtgccaacaaggcttggtgcaaattcacttgcttcgacaattgtcgntattttggtcgtggctttntgcaaaatagggggttcaagagggtaaggcaaaacccagggggngaaccaggaancccctttnaggaaggnattccgggttagaagncttntttncnatgggtttggcaaggntttnnaaccntnaancggggggttttnccacntttaantttttantttnaccatccaggggtttttcaa

SEQ ID NO: 118113 - DNA, 2341 bp, Arabidopsis thaliana
  unsure (1)..(2341): unsure at all n locations
catttttctaacttctctcaattcccaaacaaaattcaaattcaaaaaacttctctttttgactgagancgagattttagggttccatggattcagctcccaacttcatccctcggttacttctactatcacttctcatcgtatcaattcctctaacatcatcacaatccgacgccaacactactaatccgtcaccgtcaccaccgtcagattcggatctatgcaacggtgtattcgtttcatacactcacactaaaggatctaagatcccacccaacgacaccgcaaatcaaccctaccggttcgaatctgtgataacagtgctcaaccacggccgcgacgagctcaaatcatggcgtgtcttcgtcaaattcgcacaccgagagatcctcgtctctgcttcaaacgctgtactctcagacggctcgagcttaccggtgagcgtcgaaaacggtaccgttttcgctggttatccttcgtcggatttgaaatcagctattcagactgctggtgatgtcactcagatgcaagctcgtgttgagctcgtcgggactcagttcggagttgcgccgccgaatgtgccgcttcctaagaacatcactctcgctactgatggatggaaatgtcccaaagctactcaaaaaggtacaaatgttctgcaagtatgttgcattcctgacccagactatgataacagagagatcattgataatgagtttcttccacgaaaagatggagacctcactatcatgtacgatgtggtcagatcatattcatccaattatatggcacaggtcactatggagaaccataacccgcttggccggctggataactggaaactgagttttgactggatgcgggacgagtttatctacaccatgaaaggggcttacccgagtattgttgattcatcagattgtgttgatggcccacaggcgaagcactatcaagatcttgacttctctaacgtgttaagctgtgcaagacggccaaccgtcatagatctccctcctacgaaatacaatgattcgacattcggtcttatcccattttgctgcagaaatgggacgattctaccacggtcaatggatcctagcaagtcgagctcagttttccagatgcaggtgtacaaaatgcctcctgatctcaatatctctgctctatcaccgcctcagaactggagaataaacggtacactgaacccggattacaagtgtggccctcctgttcgggtgagcccgagccagttcgtcgatcccagtggattaccttcaaaccggactgcttttgcaagctggcaggtggtctgcaacatcacccaaccaaaagatgcgagtcctagatgttgtgtatcgttctctgcctacttcaacgactcaatcgtcccatgcaagacatgtgcttgcgggtgttccagcaacaaagcagcccgcgcttgcagtgccacagctccgtctcttcttctaccgcagcaagctcttctggttccatttgagaaccgaactgaactcaccgtcgcttgggcttatctaaaacaacggcccgtgccaaacccgatgccttgtggggataactgcggagttagcatcaactggcatttggctacagattatcgaggtggatggacagcccgggtcacagtcttcaactggggagaaacagactttgtagattggtttaccgcggttcagatgaaaaatgctgcaccgggtttcgagaaagcctactcattcaatgcatctacaattggtatcaacgggaagaacaatactattttcatggagggccttcctggattgaattatctcgtcgcagaaagagacggggaaaatccattgaagaatcctcggattccaggaaaacaacaatctgttatgtcctttactaagaaactgactcctggaatcaatgtccctggtggagatggcttcccgagcaaagtgttcttcaacggtgaggagtgctctctcccaaccatactcccaatgagaagtagccaacaccggaaacacatctctgttttcctcctggcattacctgttttggctctcttgattctgcgggcgtaactacactgaagcctcccgttgggttggcgatacagtttcttgattcttccccggcttactcgagaacgggtccaatccgcagtttatggatggagaatcactcgattctttttcaacctgatgagtgttggaacaagctttatataggtgctatgaagatatgttaccattcttgtattgtttatgattagagaatgtcagtaatcactaatcagtatgtattactatattttgtttactcattctccgccaaaaaaaaaaaaaaaaaa

SEQ ID NO: 118114 - DNA, 2219 bp, Arabidopsis thaliana
  unsure (1)..(2219): unsure at all n locations
aggtgacacttagaagagctatgacgtcgcatcgccgcgtacgtaagctcggaattcggctcgaggaaagattccacctgggttgggtcgtgaagaaagagaagaagaaaccgaagaagctcgaagaagaacgaaggagattcttcctttccccagatttttcgtttgaagaagaatcgaaaaacttagatttttggttttgctttcggagttattcgaatttgaaatatctgaatctgttgattcatttattctccgcatgaagctgtgttggtgaagtttttcggagatttagggtttctgagttgttcctcgtttggttggtgaataaagcgaagatgaacgtgatgcgtcgtctcaagagcattgcttcgggtcggacctccatttcttcggatcctggtggggactatgcgttgaagagagctaagctggatcaagagaacgacaacttgtgtgttgatccaatgcaggttgaccaaaatagttcttgttttgagatgaaagctgacgttttgtcacaagaaagtgttgctggaacgtcaaatgtgcctgctgtatcggaaaaacccgtggatgatcagcttcccgatgttatgatcgaaatgaagattagagacgagcgaaatgccaaccgcgaggataaggatatggaaacaactgttgtaaacggcagtgggaccgaaacgggacaagttattacgacgacagttgggggtagagatggaaagccaaagcagactatctcatacatggcccagcgagtggttggaaccggctcattcggagtagtgttccaggccaagtgcctggaaacgggtgaacaagttgcaattaagaaggttctgcaggataaaagatacaagaacagagaacttcagatcatgcgtttgcaagaccatcccaacgttgtgcggctgaggcattctttcttttcaacaactgacaaggatgagctgtatctcaaccttgtccttgagtatgttcccgaaactgtatacagagcatcgaagcactataccaaaatgaatcagcatatgccaattatctttgttcagctctatacttatcagatttgccgtgcgctgaactacttacatcgcgtggttggggtgtgtcaccgtgacattaagccacaaaatctactggttaatccccaaactcatcaattaaaaatatgcgattttggaagcgcaaagatgttggtacccggtgaacctaacatatcctatatatgctcccggtactacagggccccagaacttatatttggggcgacagagtataccaatgccattgacatgtggtccggcggttgtgtcatggcagagcttttacttggtcaaccactgtttcccggggaaagtggcattgatcagctggtggagataatcaagattcttgggacgcctacaagagaagaaatacggtgtatgaatccgaattacacagagttcaagtttcctcaaatcaaagctcacccgtggcacaagattttccacaagcgaatgccacctgaagcagtagacctcgtctcaagactccttcagtactcaccaaaccttcgttgcactgcattggaagcttgtgcacaccccttctttgatgacttacgggatccaaatgtttcactgccaaatggaagagcactgcctccattgtttaacttcactgcccaagaacttgcgggtgcatcaacagagctgcgacagcgtctaattccagcacattgccagggaacgggaagtagctcttaggatcatttatagcgtgtccaaatccagctttctttctctccctctatttactgcagtgtgtacatcaattttgaaccacttctgcttccaagcttttgtcgccggaggagagattggaaatctgtacgccgggacctgatgaggtgtgaaataactggggtcatgaagcttcttcttcttcttctgactggcttttctctcaatttgctatccttgttattttcaccttcactttcatttttttgtttttttttccacaaatctgaccccccttatatgtttggtgtatcatttttatgtgtttgtaatccatcaagatcattttcccttgccctaatattgcaagctaagattccgtttcatgttcctctctaaaaaaaacaaaaaacantnaatnnnnaaganaagggcggccgctctagaggatccaagcttacgtacgcgtgcatgcgtacgtcatag

SEQ ID NO: 118115 - DNA, 2333 bp, Arabidopsis thaliana
  unsure (1)..(2333): unsure at all n locations
cacgcgtcccactcactctctcttctctctctctgaagcgatgtcatcgacgtttcgagctccggcgggagccgctactgtgtttacggcggatcagaagatcagacttgggaggctcgacgctctgagatcctctcattctgttttcttaggaagatatggacgcggcggcgtcccggttcctccttccgcttcttcgtcgagttcttcgcctattcaagccgtctccactcctgcgaagcctgagactgcgaccaagcggagcaaagtcgaaattatcaaggagaagagtaatttcataaggtatcctttgaacgaggagcttttaacagaggctccaaatgtcaacgagtcagccgtgcagcttatcaagttccacggtagctaccaacagtacaacagagaagaacgtggtggaagatcttactccttcatgcttcgaactaagaatccatctgggaaggtccctaaccagctctatttgactatggatgacttagctgatgagtttggaattggtactcttcgtttgaccacaaggcagacgtttcagcttcatggtgttctgaagcagaatcttaagactgtgatgagctcgattattaaaaatatgggtagcacgcttggtgcatgtggtgatctgaacagaaatgttcttgctcctgctgcaccttatgtgaagaaagactatctctttgcacaagaaactgctgacaacattgcggctcttctttctcctcaatcagggttctattatgatatgtgggttgatggagagcagttcatgactgctgaacctccagaggtagtgaaggctcgaaatgataactcccatggaactaactttgtcgactctcctgagcccatctatggcacccagttcttgcctagaaagttcaaggtcgctgtaactgttcctacagataattccgtcgacctcctcaccaatgacattggcgttgttgttgtttcagatgaaaatggggaaccacagggtttcaatatttatgttggtgggggtatgggaagaacacacagaatggagtctacttttgcccgcctggcagaaccaataggttatgttccaaaggaagatattttgtatgctgtgaaggccattgtagtcacacagcgagaacacgggagacgagatgatcgtaaatatagcagaatgaaatatttgatcagctcctggggaattgagaagttcagagatgttgttgagcaatattatggtaaaaagtttgagccttcccgtgaacttccagagtgggagttcaagagttacttgggatggcatgaacagggagatggtgcatggttttgtgggcttcacgtagacagtggtcgtgttggaggtataatgaagaagacgctgagagaagtaatagagaaatacaaaattgatgtccgcatcacaccaaaccaaaacattgtcttgtgtgatataaagactgaatggaagcgtcccatcaccacagtacttgctcaggccggcttactgcaacctgagtttgtcgacccattaaaccaaactgcaatggcttgcccagcttttcctttgtgccctctggcaataactgaggcagagcgcgggatccccagcattctaaagagagttagggcaatgtttgaaaaggttggtctggactacgacgagtctgttgtgataagagtaaccggttgtccaaacggctgtgcaagaccgtacatggctgagctcggtctagtcggggatggtcccaacagctatcaggtttggctaggaggaacaccgaacctgacccagatagcgagaagtttcatggataaggttaaggttcacgacttagagaaagtctgcgagccattgttctatcactggaaactagagaggcaaactaaagaatcatttggagaatacacaacccgcatgggattcgagaaactgaaggagctgatagatacatacaaaggagtttctcaatgagcacaacagagatcatctttcgttttataattcatgtaatgtaatgtctctgtctgaactgttactcttcggtaactctgatggagaacttgttctcgttttggtttgattttgtaccctcttttttttttgtttttttggattgctttgtctttgattggataatgaagcattactgtatcaaggctaattagcccatcaataagcctttttaaagctaaaaaaaaaaaaaaaaaannnnnnnnnnnnnnnnnnnnnnnnnnnnnnnnnnnnnnnnnnnnnnnnnnnnnnnnnnnnnnnnnnnnnnnnnnnnnnnnnnnnnnnnnnnnnnnnnnnnnnnnnnnnnnnnnnnnnnnnnnnnnnn

SEQ ID NO: 118116 - DNA, 1871 bp, Arabidopsis thaliana
atttctgggtttaagctgatctctggatcttcctcaattttactttttcagctcagaaaattttgggacttttttttgctgcattttttggttccgaattttctcctcctccttttttaatttttgagaatggatggatcaggcacaggcagtagaagtggggtagaatcgattctaccaaattacaagcttgggagaactcttggtattggttcctttggtagggtgaagatagctgagcatgcattgacaggacataaggttgctatcaagatcctcaatcgtcgcaaaatcaagaacatggagatggaggagaaagtgaggagagagatcaaaatcttgagactatttatgcatcctcacatcatccgtctctatgaggttatagagactcccacagatatttatcttgtcatggagtatgtgaactctggtgagctatttgactatattgttgagaagggtagattgcaggaggatgaggcgaggaacttttttcagcagataatatcaggagtggaatactgccatcgaaacatggtggttcacagagacctcaagcctgaaaacttgcttttggactctaaatgcaatgtaaagattgctgattttggcctgagcaacataatgcgagatggtcattttttgaagacaagttgtggaagtccaaattatgccgctccagaggtaatttcgggcaagttatatgctggccctgaagtagatgtctggagctgtggtgtgatactctacgctcttctctgtgggacgcttccatttgatgatgaaaacattcccaacctttttaagaagataaagggagggatatacacattacctagccatttatctcctggtgctagagatttgatcccccggatgcttgtagttgaccccatgaaacgagtaaccatccctgagatccggcaacacccttggttccaagctcatcttccgaggtatttagctgttcctcctccagatactgtgcaacaggcaaaaaagattgacgaggagattctccaagaagttatcaatatgggatttgacagaaaccacctcatcgaatcgctccgcaaccgaacccagaatgatggcactgtgacgtactatctgatactggacaatcgtttccgtgcctctagtggttatctcggggctgagtttcaagagaccatggaaggtactccccgtatgcatccagcagaaagcgttgcttcacctgttagccatcggcttccaggactgatggaatatcaaggagttggcttgagatctcaataccctgttgagagaaaatgggctcttggacttcagtctcgggctcatccccgtgaaataatgacggaagtcctgaaagccctgcaagatttgaatgtatgttggaagaagatagggcactacaacatgaagtgcagatgggttcctaacagcagcgcagatggtatgctcagtaactcgatgcacgataacaactactttggagacgagtccagcataatagagaacgaagcagctgttaagtcgcccaatgttgtcaagtttgaaattcagttgtataaaactcgggacgacaagtatctactggatttgcagagagtacaaggtcctcagttcttgttcttggatctgtgtgctgcttttcttgctcagctccgagtcctctgaatactaaaccggacctcttcaagaataatccccacttattccttttttttttttttcttattcgtctaagaaattatttagaaaacgtaaccctttttttcttcttctctttctttctatttctatatgcgtgctctactcaaatacctcttttaacttaaatgtaagactgagcaagagtaaaaaaaagacactttgtacat

SEQ ID NO: 118117 - DNA, 755 bp, Arabidopsis thaliana
  unsure (1)..(755): unsure at all n locations
ggtccagaattcccgggtcgacccacgcgtccgcctttttatattcatctctcagcatcattctttgattgtgtgaatctctcatcgttctctcaaatttcgtgtttttgtaaccggacggagaacctttcacgatgtctgcaaaccaggaggaagacaagaagccaggagacggaggagctcacatcaatctcaaagtcaagggacaggatggaaacgaggttttctttaggatcaagagaagcactcagctcaagaagctgatgaatgcttactgtgaccggcaatctgtggacatgaactccattgctttcttgtttgatgggcgtcgtcttcgtgctgagcaaactcccgatgagcttgacatggaggatggtgatgagatcgatgcgatgctccatcagactggtggcagcggtggtggtgctacggcctgacacttcgtccaggtttagggcttgtgtgtgatatgaatggttaaggagtaatcggcattaggatttgcagacttgtttttttatcgtgaccattctctttagaaactaagttattatggtcacgaaggttaaagaaccctttggttgattttttgtcttgttcgtttggtatcggatcctatgatactactatttcggcttaaaggtgttattaacccaaaaaaaaaaaaaaaaaaaaaaagggcggccgctctagaggatccaagcttacgtacgcgtgcataacaagtcatgnnnnnnnnnnnnnnnnnnnnnnnn

SEQ ID NO: 118118 - DNA, 605 bp, Arabidopsis thaliana
acgcgaatctctcttagggcttcgcttatatcgcagatcgaagttcttgtttccaatcgccgaccgtataatctgataataaagtaagatgtctgctactccggaagaagacaagaagcctgaccaaggagctcacatcaatctcaaagtcaagggacaggatggtaatgaagtcttctttaggatcaagagaagcactcagctcaaaaaactgatgaatgcttactgtgaccgtcagtctgtggatttcaactcaattgctttcttgtttgatggtcgtcgtcttcgtgccgagcagactccagatgagcttgaaatggaagatggagatgagatcgatgcaatgcttcatcagactggtggtggtgctaaaaatggcctgaagctcttctgcttttagtggcggttattttaatggttttccataagattgtgtgatattaatggatttagtgaatcggctttagattaaatttggcaggctttgttttactttgaccagtttctacttactggtgaaagtctatgtgaatcatgaaacttattggatcttaaaatattaatgggcttgtttatggaaaaaatataaataaaaaaaaaaagga

SEQ ID NO: 118119 - DNA, 809 bp, Arabidopsis thaliana
  unsure (1)..(809): unsure at all n locations
atgaactccnnnnnnnnnnnnnnnnnnnnnnnnnnnnnnnnnnnnnnnnnnnnnnnnnnnnnnnnnnnnnnnnnnnnnnccacgggtgcgcgcacgcgtgcgcccacgcgtccgctttcatgtgagagagagagttgaattttgcagatgagtatgagaagaagcaaagcggaagggaagaggagcttacgagaactgagtgaggaagaggaagaagaagaagaaactgaagatgaagatacttttgaagaagaagaggctttggagaagaagcagaaaggtaaagctacaagtagtagtggagtttgtcaggtcgagagttgtaccgcggatatgagcaaagccaaacagtaccacaaacgacacaaagtctgccagtttcatgccaaagctcctcatgttcggatctctggtcttcaccaacgtttctgccaacaatgcagcaggtttcacgcgctcagtgagtttgatgaagccaagcggagttgcaggagacgcttagctggacacaacgagagaaggcggaaaagcacaactgactaaagacggtgaaacgtgtgagatcccggtttgaaggttaatgaaacaggctttgcttactctcttctgtcagtctcttttagctccttgtaatcctctgtgtctctgtctgtttctccatattacctgtaatcaaagctatctgctaaacctacgacatggttaaataaatgcattgagacttagtaaaaaaaaaaaaaaaaacgagggcggccgctcttagaggatccaagcttacgtacgcgtgcatgcgacgtcagagctcgtct

SEQ ID NO: 118120 - DNA, 2421 bp, Arabidopsis thaliana
  unsure (1)..(2421): unsure at all n locations
gannnnnnnnnnnnnnnnnnnnnnnnnnnnnnnnnnnnnnnnnnnnnnnnnnnnnnnncttaaatctaataactctgttcccttccttcacacgaatcaaaaacaaaaagcttcgtacatttcgcctagctttcttcgttctagggtttcggatcttacttaattacccaaaacccttgaatccattactctgtgtgagcttaaatctcttaccttttatcactttcaatcgattgggtattaagttgtaaaggaaggaacttggaatcatgaagcttgggcttttcactctctcgtttcttctgatcttgaatctagcaatgggtagattcgttgttgagaagaacaatctcaaagttacatcacctgattcgatcaaaggtatttacgaatgtgccattggtaatttcggagttcctcaatacggtggtactttagtcggcaccgtcgtctatcctaaatccaatcagaaagcttgtaaaagctactccgatttcgatatctccttcaaatccaaacctggacgattaccaacttttgtccttatcgatcgtggagattgttacttcactttgaaagcatggatagctcaacaagctggagcagcagcgatacttgtagctgatagtaaagctgagccattgattacaatggatacacctgaagaagataaatctgatgcggattatcttcagaacattaccattccttctgctctcattactaaaacattgggagacagtataaagtctgctctttccggtggtgatatggttaacatgaagctagattggactgagtcggttccacatcctgatgagcgtgtagagtatgaactgtggactaatagcaatgacgagtgtgggaagaagtgtgatactcagattgagtttctcaagaattttaaaggagctgctcagattcttgagaaaggtgggcatactcagttcacgccacattatattacttggtactgtcctgaagcgtttacgttgagtaaacagtgtaagtctcagtgcatcaaccatggaaggtattgtgcgcctgatcctgagcaggattttacgaaagggtatgatggaaaggatgttgttgttcagaatctacgtcaggcttgtgtctacagagtgatgaatgataccggtaagccgtgggtctggtgggactatgtgactgactttgctatccggtgtccaatgaaggagaagaagtacaccaaggaatgcgcagatggaattattaagtcccttggcattgatctcaaaaaggtggacaagtgtatcggagaccctgaagcagatgtggagaacccagttcttaaagcagagcaggagtcacagataggcaaaggttcccgtggagacgtgactatactcccaactcttgtcgtgaacaacagacaatacagaggtaaattggaaaagggggcagtgcttaaggctatgtgttcgggttttcaagagtcaacggaaccagctatctgtcttactgaagatttggaaactaatgaatgtttggaaaacaacggtggatgctggcaagacaaagctgccaacattactgcatgcagggatacttttaggggaagattgtgtgagtgccctactgttcaaggtgttaaattcgttggtgacggttacactcactgcaaagcctctggagctttgcattgtggtatcaacaatggaggatgctggagagaatcccgaggtggcttcacttactctgcttgcgtagatgatcattcaaaggattgcaaatgcccacttgggttcaagggcgatggagtgaagaactgtgaagatgtggacgagtgcaaagaaaaaacggtgtgccagtgcccagagtgtaaatgtaaaaacacttggggaagttatgaatgcagctgcagcaacggtttgctttacatgcgtgagcacgacacttgcataggttcaggcaaagttggaaccacaaaactcagctggagctttttgtggatccttataatcggggtgggtgttgcaggtctttctggatatgcagtctacaaatacagaatcaggagttacatggatgcggaaattagagggatcatggcacagtacatgccattggaaagtcaaccacccaacacaagtggtcaccatatggatatatgagtgaagttatcaacacaagccaagagactctctctctttctatgagtagctttaagtttccatgtaaatgaatcaatggacttgatacaactctagagaaaagaaaaaagccacaaacagaaataagtgtacctgcactatttgtaagaaatgtggatttgcagatggaatctcctttttgtctgcatattactcttacaatgtaaaatagacataactggatgaataatgagtgttacattatttactgttgaaaaaaaannnnnnnnnnnnnnnnnnn

SEQ ID NO: 118121 - DNA, 1396 bp, Arabidopsis thaliana
aattcggcacgagccaaacttttgtttcgtccaggaaagaagccgacatggaagcaaaaggggcagcacagtggagctctatcctagttccatccgttcaagagatggttaaggagaagacgatcacgaccgttcctcctaggtacgtccggtctgatcaagacaaaactgaagtcgatgatgattttgatgtgaaaattgagatcccaatcatcgatatgaagcgtttgtgttcttcaaccaccatggattctgaggttgagaaactcgacttcgcttgcaaagagtggggatttttccagcttgtaaaccatggaatagactcaagtttcttggacaaagtaaagtcagagattcaagatttcttcaaccttcccatggaagaaaagaagaagttctggcagcgaccagatgagatagaaggtttcggacaagcttttgtggtttcagaagatcagaaactagattgggcagacttgttcttccataccgtgcaaccagttgaattacgcaagcctcacttgttccccaagctacctcttccctttagagatacactggagatgtattcttctgaagtgcagagcgtagctaagatcttaatagcgaaaatggcaagagccctagagatcaaaccagaggaactggaaaagttgtttgatgatgttgattcggttcaaagtatgaggatgaattactacccaccatgcccacaaccagatcaggttattggtctaaccccgcattctgattcggtcggactcactgtactgatgcaagtgaatgacgttgaaggtctccaaatcaagaaagatgggaaatgggttcctgttaaacccctcccaaatgctttcattgtcaatattggagacgtcttagagatcataactaatgggacataccgaagcatagagcatcgcggagttgtgaattcagagaaagagaggctctctattgcaacgtttcacaatgtgggaatgtataaagaagttggtcctgcaaaaagcctagttgaaagacaaaaggttgcaagattcaaaaggctgaccatgaaagagtataacgatggtttgttctctcgtactctcgacggaaaagcttatctagatgctttgagaatctaaagagagcaatgccttgtcgcccactactctgtttctctgttttcttgatttatgcaataaaacaatctctataatcttatcttcattgtctctctatttgcttcacttcgttaaagacaaaaatctcctgtagagaatgcttctacgtattgctacaataagacaataagtttgttcttagcaaaaaaaaggacaataagtttgttaaagtttcttgacacgttcgttgttgctcaaagatatacctaataatatgatcacatgattcacat

SEQ ID NO: 118122 - DNA, 699 bp, Arabidopsis thaliana
  unsure (1)..(699): unsure at all n locations
ttaggacacctatagaattacttgacgtcccatgcacgcgtacgtaagcttggatcctctagagcggccgctttgttttttttttttttttttttttttttgcaaacagatatattccataacatttgggctttcacctcatgaatcatgatagcagcacccacattgtcaaattttcccgatacaaaacactatcacattttgggaaactagagatcctaactaaaagagatagttttagtgttgtatcaactcgggaatgagcttgagaagaaaggagagctctctgtcagagaagttaggctttggcttagtaccatcagcatctctgttggatggcttcatcatctccctcaccgcctctgttatctcctccacatgatcaactatcactccctctatccccatcaaatgctgcatgtaaaccgcctcggctacattgtttagctttccgtatgtcatcagagagagcttggattcttttatcttgttgacaagagcggggttgcggaatactcccttcacctccgagacaatcccttggaggcctccttctaaacatactttgattgcttcctcaagggaattccttctcgtgtcgtggtacatctaaagttcctccgtttggtnaagggggtttcccgnaaattgaatttggggncaaaaaaaagggttngggggtnaaagggggaangggnt

SEQ ID NO: 118123 - DNA, 1087 bp, Arabidopsis thaliana
ctttttaccgaagagactcctccggccggtgagttttcggacgcagatcatcatcagattcttgtctctctctgttatctgagtgataagaagtattttcagtgcttgaggatctgcaaaagatatccatctgcggtttaacaatggttctattacagttggatccattcctcaatgaactcacgagcatgtttgagaaaagcaaagagaagggttctgtgtgggttactttgaaaagatcatctctcaagtctaaggtgcagaagaggaaactgagctcagttggagaatccattgaatacagatgccttattcgagcaaccgatggaaagaaaactgtttctacttcggttggtgctaaggatcaccagagatttcaagcatcatatgccaccattcttaaggcccacatgactgctttgaaggagaggggaaggaaagaccggaaggaatcggcagaggcagagaaggaaggaaagcacttcaaccccttaaatctaaggaacttttgatttcccccttttgggtttcccattgatttgcaattgctgcttaagggttgaattttgaaagcttttgaaggctctaaaaggttttgacttgtgttataatagagattttggtttgcatttgcttttccctcgagaatgttcatcgtgtataaataaaccaattccatacaaatgtgcgaacataaatccaattcaaagaaactgattctaaatttcaaacactaagaaaaaaaactcaattgttattttggatctcttcctgttcctaacctagtaagattcctcatcagaatttgattccacataagcttcatcagaatttgaatcaacataagccttgataacacgtctgtacttctcagggctatcataccaggttggtgtgttgatgatcgccttttctagccaatactcatcatacactctttgcctcgacatcttctccaagaatcacgttccaactatccatggctcgggtcaatcgaacagtcttaggtcttcccataagaaacctaatgtaatcccttgcaagcttgaccaattcctccccagtgataatgtatgtgtacaaaaag

SEQ ID NO: 118124 - DNA, 1757 bp, Arabidopsis thaliana
  unsure (1)..(1757): unsure at all n locations
nnnnnnnnnnnnnnnnnnnnnnnnnnnnnnnnnnnnnnnnnnnnnnnnnnaagcattctctttctgtggacgaaactaaacctgagagaaaaagccagaagaaccaaactcagaccgagagatagagattgagggagagctctagctctgtagaaaagaaggattcattcatcatatccagaaatggctctaaagtttaaccctttggtggcatctcagccttacaaattcccttcctcgactcgtccgccaacttcttctttcagatctcccaagttcctctgcctcgcttcttcttctccggctctcagctccggccccaaggaggttgagagtttgaagaaaccatttacgccacccagggaagtgcatgttcaagtcttgcactccatgccacctcaaaagatcgagatcttcaaatctatggaaaactgggccgaggagaaccttctgattcacctcaaggatgtggagaagtcttggcaaccccaggatttcttgcctgaccctgcatcagatgggtttgaagatcaggtaagagagttaagagagagggctagagacctccctgatgattactttgttgttttggtgggggacatgatcacagaagaagcacttccgacctatcaaactatgttgaacactttggatggagttagggatgaaacaggtgctagtcctacttcatgggctatttggaccagagcttggactgcagaagaaaaccgacatggcgatcttctgaataaatacctttacttgtctggtcgtgttgacatgaggcagatcgaaaagaccattcagtacttgattggatctggaatggatccgcggacagagaataacccctaccttggcttcatctatacgtcattccaagaaagagcgacattcatctctcacggaaacacagcccgccaagccaaagagcacggggacatcaaactagcccaaatatgtggcacaatagctgcagacgagaagcgtcatgaaacagcatacaccaagatagttgaaaagctctttgagattgatcctgatggtactgtcatggcttttgcagacatgatgagaaagaaaatctcaatgcctgctcacttgatgtatgatggggcgaacgacaacctctttgacaacttctcttccgtggctcagaggctcggtgtttacaccgccaaagactatgcagacattcttgagtttctggttggtaggtggaaaatccaggacttaaccgggctttcaggtgaaggaaacaaagcacaagactatttatgcgggttggctccaaggatcaagagattggatgagagagctcaagcaagagccaagctaaaaggacaaagacaaaaacctatcctcccggttcctcatttcatctgtctgctcttaaaattggtgtagattactatggttttctgataatgttggtgggtctagttacaaagttgagatgcagtgatttagtagctttgtttttcccagtcactatatgtttggtctttggtccgttagcacacttgtagtagttaaaccagtttaagtatggtctgtacttcagtcttcctcttctctgtggagttttgtttaagttcaggttagttttgttttgtctcttcctgttctcgacaaacaactcatgtggctttttagcaattttgatggatgatcatgatgaataaacaactcatgtggctttttagcaattttgatggatgatcatgatgnnnnnnnnnnnnnnnnnnnnnnnnnnn

SEQ ID NO: 118125 - DNA, 592 bp, Arabidopsis thaliana
  unsure (1)..(592): unsure at all n locations
gggnaaacccggcttnccggnttcggngaggaccacccccaggcttttagcggntggcccnaggtcaaggggttggatgagngcctcaagcaggnccaagaaaggcccccaagatccnttccaggtggatccccgacagagaagtgcngctctaangggccaaggccaaaaaccaaaaccntatcctcccggtccctcatttcatctgtctgctcttaaaattggtgtagattactatggttttctgataatgttggtgggtctagttacaaagttgagatgcagtgatttagtagctttgtttttcccagtcactatatgtttggtctttggtccgttagcacacttgtagtagttaaaacagtttaagtatggtctgtactcagtcttcctcttctctgtggagttttgtttaagttcaggttagttttgttttgtctctctgttttttcccctgtttctcgacaaacaactcatgtggctttttagcaattttgatggatgatcatgatgaataattgaatatcaaaaaaaaaacaaaagggcgaccgctctagaggatccaagcttacgtacgcgtgcgttcgacgtc

SEQ ID NO: 118126 - DNA, 1524 bp, Arabidopsis thaliana
  unsure (1)..(1524): unsure at all n locations
gttgatcaacaattaaacacaaaaacccttaagttgacatggctgtatctcttccaactcttaaaaatcaattactattatacccctcagaaaaatggcagagcgtgtgtctctcacactcaacgtaaccctcctttctcctcctcccacaacaacaacaacaacaatgtcttcttctctccgatctaccaccgccgcttctcttctcctccgctcctcctcctcctcctccagatccactctcactctctccgcttcctcctctctctccttcgtcagatctctcgtctcttctccacgtctctcttcttcttcatccctctctcagaagaaatatcgaattgcgtcggtgaatcggagtttcaactccaccaccgccgctactaaatcttcatcttcagatcctgatcagttgaagaacgctagagaagatatcaaagagcttctcagcaccaaattctgccatccgattttggttagattaggttggcatgatgctggtacgtataacaagaacattaaggaatggccacaaagaggtggagctaatggaagtttgagattcgatattgagcttaaacatgctgctaatgctggtcttgtgaatgctttaaacttgattaaggatatcaaagagaaatactctgggatcagttatgctgatttgttccagttagctagtgctactgctatagaggaagctggaggaccgaaaataccgatgaaatatggtagagttgatgcctctggtcctgaggattgtccagaagaaggaaggcttccagatgctggtcctccttcacctgctactcatctcagagaagttttttacagaatgggattagatgacaaggacatagttgcattatctggtgctcacacgttaggaagatctaggccagaacgtagtggttgggggaagcctgagacgaagtacacgaaagaaggacctggagcaccaggaggacagtcatggacaccagagtggctgaagtttgataattcgtacttcaaggagatcaaggaaaagagagatgaagatctccttgtcctacccactgatgctgccatcttcgaagattcttctttcaaggtctatgctgaaaagtatgctgcagatcaggatgcatttttcaaggattacgctgtagcgcatgcgaaactcagcaatcttggcgcagaatttaaccctccggagggtatcattatctaatggggcacctaatttactcaaccagacttatgattttagagaaacgtagttcaataatgaaagagaagaaaaagttgacggagaacttttcatgcgagtacttttcgagataccttttggacaaatgtttctggctgttcaaaggattttgtttagccggaagtatttgatcgttttcatggttttgtgctttcatgtttttttcttgtaataaattgcggaagtgattatccaaaatctatacaaattttgtctggaattgaattattttatcgatgttataactnnnnnnnnnnnnnnnnnnnnnnnnn

SEQ ID NO: 118127 - DNA, 901 bp, Arabidopsis thaliana
tggccgtccgcagtaccggtccggaattcccgggtcgacccacgcgtccgagagtgaatcaatttcggtggagaaagagaagaatggagcagccgtacgtgtacgcatacccgcaaggtagtggcccctcgggagctccgactccacaagccggaggagtggtagtggatccaaagtactgcgctccttaccctatagatatggcgatcgtacggaagatgatgtcgttaacggacggcaatttcgtgataacggacgtcaacggaaacctgctgttcaaggtgaaggaaccggtgtttggtctccacgacaagagggtcttgctggatggttctggtactccggtcgtcactttgagagaaaagatggtgagcatgcatgacaggtggcaagtgtttagaggagggagtacggatcagcgtgatctgctgtacacggtgaaaagatcgtcgatgcttcagctaaagaccaaactcgatgtgtttttgggacacaacaaagatgagaagagatgtgatttcagagtcaaagggagttggctcgaacgttcttgtgttgtttacgccggcgaatctgacgccattgttgcccaaatgcacaggaagcacacggtgcagagcgtattcttgggaaaagacaacttctcggtgactgtttatccaaacgtcgattatgccttcatcgcctctctcgtcgtcattctcgatgacgtcaaccgcgaagaccgcgccgcctgagagaagaagatatcaccttctcttcttcttaattatccatccatcaataatgtgctattcatcaaccgttaaaactttgtgtgatcatctcagttgtaaaataatcaaatcattgtgcctggccttgttgtttaatgactacatttataactgttttttcttat

SEQ ID NO: 118128 - DNA, 785 bp, Arabidopsis thaliana
  unsure (1)..(785): unsure at all n locations
cnnnnnnnnnnnnnnnnnnnnnnnnnnnnnnnnnnnnnnnnnnnnnnnnnnnnnnnnnnnnnnnnnnnnnnnccacgcgtccgtgcggctgcgagaagacgacagaaggggaaagcaaaacaaaagagagagagtgtatccatttttggaggggaaaacaaagtatgcagcagccctgtgtgatagtgggttcgaagtactgctcaccaaaccctgtaggtttggcgatcgtccgtaaggtgatgaagataacggacggtaacttcgtgataacgagtgcggacggtaagttattgttcaaggtgaaggatcctttgtttagtcttcacggcaagaggatcttgctggattgttctggagctaaggtcttaactttgagagggaagatgatgaccatgcatgacaggtggcaagtgtttagaggagggagtacggaggagggtgctctactatacacggtgaaaagatcgtcgatgattcagctagcccctaaacttgaggtgtttttggctaacaacgtagaggagaaggatattgtggatttcaaaagtcaaaaggggcctggctcgacgactctttgtgttgtctacgccggncgattcttacacccattatttcccacattttccggaaanaaaccnntccgaggntttttntttcggaaaaggcccattttnccgncactntttataagaaccgttgntatnccctcattcaatcntnaatgcancctttngaatngaaaacctggtttttcggaattcacccaatntaanggttttttg

SEQ ID NO: 118129 - DNA, 937 bp, Arabidopsis thaliana
  unsure (1)..(937): unsure at all n locations
cacggagcacacaaaaaaaaaaaaaaattagaattcccatggttctacacaccatttagggaaggctagcccgcctgcaggacccggtccggaattcccgggtcgacccacgcgtccgcggccgcgtggggaaaaagaaaacattaatttcaaccaaagcaaaacagagagaaaaaaatagagagagtgaatcaatttcggtggagaaagagaagaatggagcagccgtacgtgtacgcatacccgcaaggtagtggcccctcgggagctccgactccacaagccggaggagtggtagtggatccaaagtactgcgctccttaccctatagatatggcgatcgtacggaagatgatgtcgttaacggacggcaatttcgtgataacggacgtcaacggaaacctgctgttcaaggtgaaggaaccggtgtttggtctccacgacaagagggtcttgctggatggttctggtactccggtcgtcactttgagagaaaagatggtgagcatgcatgacaggtggcaagtgtttaaaggagggagttcggagtcaccgtgctctactatacccggtgaaaagatcgtcgatgattcagctagcccctaaacttgaggtgtttttgactaccaacgtagaggagaagatatgtgatttcaaagtcaaaggggcctggctcgacgactcttgtgttgtctaccccggcgattctgacaccattattgcccacgtaaacaaactctctttccttatttttgttttagaagacagtattttacatgtaaatgtttatatcatatattttctaaatatcgaataaagttttttttttnaatgccnnnnnnnnnnnnnnnnnnnnnnnnnnnnnnnnnnnnnnnnnnnnnnnnnnnnnnnnnnnnnnnnnnnnnnnnnnnnnnnnnnnnnnnnnnnnnnnnnnnnn

SEQ ID NO: 118130 - DNA, 1451 bp, Arabidopsis thaliana
atcaggcaaagaagtaaaagaggcttaaaactctctctctctctctcttggtcttcctcactcttaacgaaaatggactctttaacactcttcttcaccggtgcactcgtcgccgtcggtatctactggttcctctgcgttctcggtccagcagagcgtaaaggcaaacgagccgtagatctctctggtggctcaatctccgccgagaaagtccaagacaactacaaacagtactggtctttcttccgccgtccaaaagaaatcgaaaccgccgagaaagttccagacttcgtcgacacattctacaatctcgtcaccgacatatacgagtggggatggggacaatccttccacttctcaccatcaatccccggaaaatctcacaaagacgccacgcgcctccacgaagagatggccgtagatctgatccaagtcaaacctggtcaaaagatcctagacgtcggatgcggtgtcggcggtccgatgcgagcgattgcatctcactcgcgagctaacgtagtcgggattacaataaacgagtatcaggtgaacagagctcgtctccacaataagaaagctggtctcgacgcgctttgcgaggtcgtgtgtggtaacttcctccagatgccgttcgatgacaacagtttcgacggagcttattccatcgaagccacgtgtcacgcgccgaagctggaagaagtgtacgcagagatctacagggtgttgaaacccggatctatgtatgtgtcgtacgagtgggttacgacggagaaatttaaggcggaggatgacgaacacgtggaggtaatccaagggattgagagaggcgatgcgttaccagggcttagggcttacgtggatatagctgagacggctaaaaaggttgggtttgagatagtgaaggagaaggatctggcgagtccaccggctgagccgtggtggactaggcttaagatgggtaggcttgcttattggaggaatcacattgtggttcagattttgtcagcggttggagttgctcctaaaggaactgttgatgttcatgagatgttgtttaagactgctgattgtttgaccagaggaggtgaaaccggaatattctctccgatgcatatgattctctgcagaaaaccggagtcaccggaggagagttcttgagaaaggtagaaaggaaacatcaccggaaaaagtatggagaattttctcaatttgtttttatttttaagttaaatcaacttggttattgtactatttttgtgttttaatttggtttgtgtttcaagaattattagtttttttttgttttgttgcatatgagaatcttactcttgatttctccgccgtagagccggcgagacataggggattattagtatttttaagtgtgtttaagattgattaacaagttagtaaaataaaatgtacttaggtgtcgaaaaaaaaaggaattc

SEQ ID NO: 118131 - DNA, 534 bp, Arabidopsis thaliana
  unsure (1)..(534): unsure at all n locations
ggcaaagaagtaaaagaggcttaaaactctctctctctcttggtcttcctcactcttaacgaaaatggactctctaacactcttcttcaccggcgcactcgtcgccgtcggtatctactggttcctctgcgttctcggtccagcagagcgtaaaggcaaacgagccgtagatctctctggcggctcaatctccgccgagaaagtccaagacaactacaaacagtactggtctttcttccgccgtccaaaagaaatcgaaaccgccgagaaagttccagacttcgtcgacacattctacaatctcgtcaccgacatatacgagtggggatggggacaatcccttccacttctccaaccatcaatcccccggaaaaattttacaaaaggncgccaaggggcctcccacgggaggagattggcccgtagattccttattccaaagtaaaaccctgggtaaaaagntcctagncgntnggattcggngttggcggtncgattnngggantttgaatttaanttggggggntacgangt

SEQ ID NO: 118132 - DNA, 1168 bp, Arabidopsis thaliana
aaacaaagcaacaagcaagattcatcaaatccttatcttctctctttcactcacaaccaattgctcatcccacctacttgttccccacaaaacactctctccctctttgttctttcatcttctctaagctctttctctgaacctacgcttctgctaagctattctaagagaagccagactagcaataaacccttcattttaagcattctgtttccttcttgagaaacctagatattttggtttcttgtatccggtgatgaagatacagtgtgatgtgtgtgagaaagctccggcgacggtgatttgttgcgccgacgaagctgctctctgtcctcaatgcgacatcgagattcacgccgctaacaaactcgctagcaagcaccaacgtcttcatcttaattccctctccaccaaattccctcgttgcgatatctgccaagagaaggcagctttcattttctgtgtagaggatagagctctgctttgcagggactgcgatgaatccatccacgtggctaattctcgatctgctaatcaccagaggttcttagccactgggatcaaagtagctctgacctcaactatatgtagtaaagaaattgagaagaatcaacctgagccttccaacaaccaacagaaggctaatcagattcctgctaaatccacaagccagcagcaacaacaaccttcttctgctactccacttccctgggctgttgacgatttctttcacttctctgatattgaatccaccgacaagaaaggacagcttgatcttggggcaggggagttggattggttttcagacatgggattcttcggtgatcagattaatgacaaggctcttcctgcagctgaagttcctgagctttctgtttcgcatttaggtcatgttcattcatacaaacctatgaagtcaaatgtttcacacaagaagccgaggtttgagaccagatatgatgatgatgatgaggaacacttcattgtccctgatcttggctaaaaagctatatgtaatctatgtgtagacattcttcaatgtaaaagaacaaacaagaaacctatctgcatgtgtggagttaatgtcatatacattttagttttgtcttaagttgtgtaagatatgttgagagcttataacaaatgtctgtgtttgagttaaaaaaaa

SEQ ID NO: 118133 - DNA, 2035 bp, Arabidopsis thaliana
  unsure (1)..(2035): unsure at all n locations
nnnnnnnnnnnnnnnnnnnnnnnnnnnnnnnnnnnnnnnnnnnnnnnnnnnnnnnnnnnnnnnncccacgcgtccgcccacgcccacgcgtccgcggacgcgtccgctcaatttcggttccactttcctttcgtttgcaaaaacccatcccatcaaaaataaacaagagggcctaaagaagaatcctaaagactttacgggtcttgtttaggataaaagaaatgcctgccggtggattcgtcgtcggggatggccaaaaggcttatcccggcaaactcactccctttgttctcttcacttgcgttgttgctgccatgggcggtctcatcttcggatacgatatcggaatctccggtggtgtgacgtctatgccgtctttcctcaagcgattcttcccgtcggtgtatcggaaacaacaagaggacgcgtcaacgaaccagtactgtcagtacgatagcccgacgctaacgatgttcacatcgtctctatatctagcggcgctaatttcgtcgctggtggcttccaccgtgacaagaaagttcggacggcggctctcgatgctcttcggcggcatactcttctgcgccggagctctcatcaatggtttcgccaaacatgtttggatgctcatcgtcggtcgtatcttgcttggtttcggtatcggtttcgctaatcaggctgtgccactgtacctctctgagatggctccatacaaatacagaggagctttaaacattggtttccagctctcaattacaatcggaatcctcgtcgccgaagtgctaaactacttcttcgccaagatcaaaggcggttggggatggcggctcagtctcggaggcgcggtggttcctgccttgatcataaccatcggctccctcgtcctccctgacactcccaattcaatgatcgagcgtggccaacacgaagaagccaaaaccaagctcagacgaatccgtggtgtcgatgacgtcagccaagagtttgacgatttggtcgccgctagtaaagagtcgcagtcgatagagcacccgtggagaaacctcctccgccgcaagtaccgaccacatctcacaatggccgttatgattccgttctttcaacagctaaccggaatcaatgtgattatgttttacgctccggttttgttcaacaccattggtttcacgaccgatgcttctctcatgtccgctgtggtcactggctcggttaacgtggccgctacgcttgtttctatctacggtgttgacagatggggacgtcggtttctctttcttgaaggtggtacacaaatgcttatatgccaggctgtggttgcagcttgcataggggccaagtttggggtagacgggacccctggtgagctaccaaagtggtatgctatagtggttgtaacgttcatttgcatctatgtggcgggttttgcgtggtcgtggggcccactagggtggttagtaccgagtgaaatcttcccgttggagataaggtcggcggcgcagagtatcaccgtgtccgtgaacatgatcttcacgttcattatcgcgcaaatcttcttgacgatgctttgtcatttgaagtttgggttattccttgttttcgcctttttcgtggtggtgatgtcgatctttgtatacattttcttgccggagacgaaagggattccgatagaggagatgggtcaagtgtggaggtcacactggtattggtcaaggtttgtggaggatggtgagtatgggaatgcgcttgagatgggcaagaacagtaaccaagctggaacgaagcatgtttgatttatcattgtttttaatgagagttttaagaaagaaagaaaaaagatttgtaatttctaatgtcgtaaaggaaaaagtgtattagcctagatatttattggtgtttatataattcaataccacatgaagaaattatgcatatgattcttcgttaattgtccgtaattgttatactctttacttaaaccaagtgttttctctttgnnnnnnnnnnnnnnnncggctcaattnnnnnnnnnnnnnnc

SEQ ID NO: 118134 - DNA, 436 bp, Arabidopsis thaliana
  unsure (1)..(436): unsure at all n locations
ctcaatttcggttccactttcctttcgtttgcaaaaacccatcccatcaaaaataaacaagagggcctaaagaagaatcctaaagactttacgggtcttgtttaggataaaagaaatgcctgccggtggattcgtcgtcggggatggccaaaaggcttatcccggcaaactcactccctttgttctcttcacttgcgttgttgctgccatgggcggtctcatcttcggatacgntattcggaaatctccggtggtgtgacggctatgccgtctttccccaagggatttctttcccgtcgggtgtatcgggaacaaccaagagggccgggtaaacggaccccgtacctttcaagtacgggtagccccaacggttaacggtttttcaaaaaagggttcttataatcttagngggggggtaaaatttcgtncgcntggt

SEQ ID NO: 118135 - DNA, 2083 bp, Arabidopsis thaliana
  unsure (1)..(2083): unsure at all n locations
tgatatctccnnnnnnnnnnnnnnnnnnnnnnnnnnnnnnnnnnnnnnnnnnnnnnnnnnnnnnnnnnnnnnnnnnnnnnnccacgcgtccgcttcttcttcttcttcttctttttcttcttcttacatttgatttctctgtctggaattcgagaaccagatctactaattacctgagagaaaaaagatctgctctgtttgtctgaaacagacagaagtcaacaaatctttcatttgttttttagcaaatcaaagaaatggccggagggttcgtcagtcaaacgccgggtgttcggaactacaattacaaactgacaccgaaagtgtttgtgacatgtttcatcggtgcttttggtggtctcatcttcggatacgatctcgggatctcaggaggggtaacctcaatggagccattcttggaagagttcttcccttacgtctacaagaagatgaagagcgcacatgagaacgagtactgtcgatttgatagtcagcttctcactctcttcacttcgtctctctatgtggcggctttggtgtcttctctctttgcctccaccattactagagttttcggaaggaaatggtcgatgtttctcggtggtttcaccttcttcatcggttctgctttcaacggctttgcccaaaacatcgctatgcttctcattggtcgtatcctacttggtttcggagtcggattcgccaatcaatctgtaccggtttatttatcagaaatggctcctccgaatctaagaggagctttcaacaacgggtttcaagtagcgattatctttggtattgtggttgcaacaatcatcaattacttcaccgcacagatgaaaggaaacatcggatggagaatctctctcggattagcttgtgtccctgcagtgatgatcatgatcggagctctgatccttcccgacactcccaactctctcatcgaacgtggctacaccgaagaggccaaggaaatgcttcagtccatccgaggaaccaatgaagtcgatgaagagtttcaagatctcattgatgcaagtgaggagtccaagcaagtgaaacacccatggaagaacatcatgcttcctcgttacagaccacaattgatcatgacttgcttcattcctttctttcaacaacttaccggaatcaatgtcattaccttctacgccccggttttgttccaaaccctcgggttcggtagcaaagcttccctcctatcagctatggtaacgggtatcatcgagctcttgtgtaccttcgtctctgtttttacagtggataggtttggaagaagaatcttgttcctccaaggaggtatccagatgcttgtctctcagatcgctattggagccatgattggagtcaaatttggagtggctggaacaggaaacatagggaaaagtgatgccaatctaatcgtggcactgatctgcatctatgtagcgggtttcgcctggtcatggggaccgttgggatggttggttcctagtgagatatctccactagagatccgatcagcagctcaagccataaacgtttcggtcaacatgttcttcacattccttgtggctcagctcttcctcactatgctttgtcacatgaaattcggactattcttcttcttcgccttctttgttgtcataatgacaatattcatctacttgatgttgcctgagacaaagaatgtgccaatcgaagagatgaacagagtgtggaaggcacattggttctggggaaagtttattcctgatgaagctgtcaatatgggtgctgctgagatgcaacagaagtccgtatgatgatgatcaagaatgaagttttctttgggcaataaagatttatgagaaaagagaaagtgaataattcttgggatgaaataagaataattgtcaaaaatgccttacttcctaaaagaaagctgctctgtctttagcttcagagacttagctttcattgtttcttctttcttcttttttaatgtttctttgttgaaattgttatttggggcctaaagatgtaaaaacaaaaaaaagaacaaaattatttaaaaatggtttcttattttacatttcaaaaaaaa

SEQ ID NO: 118136 - DNA, 1707 bp, Arabidopsis thaliana
  unsure (1)..(1707): unsure at all n locations
nnnnnnnnnnnnnnnnnnnnnnnnnnnnnnnnnnnnnnnnnnnnnnnnnnnnnnnnnnnnnnnnnnnnnccacgcgtccgcttcgttttcttcgaatccaaatttctgtgtctgcttttgattcacagagaaggagcaggaaagatgttggatatcaatctatttcgtgaagagaaaggtaacaatccggagattatccgagaatcgcaacgccggagatttgccagcgttgaaatcgtcgatgagatcattaagctggacaaggaatggcgtcagcgtcaatttgaagttgatagcttcagaaaggagttcaacaagctcaataagcaagtggcgcagctcaaaattaaaaaagaagatgcgagtgagattattcaacaaactgagaaaaacaaacaagattctactgcaaaggaggctgaagttcgtgaagcttatgctgctttgaaagccaagttggagcaagttggtaatttggtccatgattctgttccagttgataaggacgaggctaataatcttgtgattaaactgtggggtgaaaagcggttttctacgcctggtctgaagctgaaaaaccatgtggatcttgttgagcttctcggtattgcagataccaaaagaggtgctgaaatcgctggagcaagaggctttttcttgaaaggagatggtttgatgcttaaccaagctcttatcaactttgggttaactttcttgaaaaagagaggattcacaggattgcaacctccttttttcatgaggaaggatgttatggccaagtgcgcacaattggcacagttcgatgaagagctttacaaggtgactggtgaaggagatgacaaatacctcattgcaactgctgagcagcctctttgtgcgtaccatattgatgaatggattcatccgactgagcttcccctaagatatgctggttactcatcctgctttagaaaagaagccggttcacatggaagagacacccttggtattttccgtgttcaccagtttgagaaaattgaacagttttgcatcaccggccctaacgagaatgcctcgtgggaaatgctcgatgagatgatgaagaactctgaagatttttaccaagcgctaaaacttccataccaaatcgtctcgatcgtctctggagcattgaatgatgcagctgcgaaaaagtacgatttggaagcttggtttccttcgtccgagacattcagggagcttgtgtcttgttccaactgtacagactaccaggctcgcaggcttgagatcagatacggtcagaaaaagagcaatgagcagacaaagcagtatgtgcatatgctgaattcgacacttactgcaacagagaggaccatttgctgcattctcgagaactaccagcgagaggatggtgtcgacattcctgaggttctgcagccgtttatgggcggagagacgtttttgcctttcaaggccaagcccgtagttgctgataccaaagggaagaaatcgaaagcttgattgatgtattgattcagattaacgactcttctgttttcttgaaattgatgaaacacttcgataaatttctttactttgtggaatttttttggacttctgttattttaccaggaccgttatttatcatctgatttctgctagtatttgttccttttgtttggcgaatcattgttaactttacttcaatgataacaaaatttttgtatt

SEQ ID NO: 118137 - DNA, 2005 bp, Arabidopsis thaliana
  unsure (1)..(2005): unsure at all n locations
cggacgcgtgggttcggataatcctatccttctcttcctataaatacctctccactcttcctcttcctccaccactacaaccaccgcaacaaccaccaaaaaccctctcaaagaaatttcttttttttcttactttcttggtttgtcaaatatggtcagccatccaatggagaaagctgcaaatggtgcgtctgcgttggaaacgcagacgggtgagttagatcagccggaacggcttcgtaagatcatatcggtgtcttccattgccgccggtgtacagttcggttgggctttacagttatctctgttgactccttacgtgcagctactcggaatcccacataaatgggcttctctgatttggctctgtggtccaatctccggtatgcttgttcagcctatcgtcggttaccacagtgaccgttgcacctcaagattcggccgtcgtcgtcccttcatcgtcgctggagctggtttagtcaccgttgctgttttccttatcggttacgctgccgatataggtcacagcatgggcgatcagcttgacaaaccgccgaaaacgcgagccatagcgatattcgctctcgggttttggattcttgacgtggctaacaacaccttacaaggaccctgcagagctttcttggctgatttatcagcagggaacgctaagaaaacgcgaaccgcaaacgcgtttttctcgtttttcatggcggttggaaacgttttgggttacgctgcgggatcttacagaaatctctacaaagttgtgcctttcacgatgactgagtcatgcgatctctactgcgcaaacctcaaaacgtgttttttcctatccataacgcttctcctcatagtcactttcgtatctctctgttacgtgaaggagaagccatggacgccagagccaacagccgatggaaaagcctccaacgttccgtttttcggagaaatcttcggagctttcaaggaactaaaaagacccatgtggatgcttcttatagtcactgcactaaactggatcgcttggttccctttccttctcttcgacactgattggatgggccgtgaggtgtacggaggaaactcagacgcaaccgcaaccgcagcctctaagaagctttacaacgacggagtcagagctggtgctttggggcttatgcttaacgctattgttcttggtttcatgtctcttggtgttgaatggattggtcggaaattgggaggagctaaaaggctttggggtattgttaacttcatcctcgccatttgcttggccatgacggttgtggttacgaaacaagctgagaatcaccgacgagatcacggcggcgctaaaacaggtccacctggtaacgtcacagctggtgctttaactctcttcgccatcctcggtatcccccaagccattacgtttagcattccttttgcactagcttccatattttcaaccaattccggtgccggccaaggactttccctaggtgttctgaatctagccattgtcgtccctcagatggtaatatctgtgggaggtggaccattcgacgaactattcggtggtggaaacattccagcatttgtgttaggagcgattgcggcagcggtaagtggtgtattggcgttgacggtgttgccttcaccgcctccggatgctcctgccttcaaagctactatgggatttcattgaattttagcagtggttgtttggctctctttctctcataaaacagtagtgttgtgcaaatcctacataaagaaaaaagaaaaggaaattaaactcattgggttggtttgtattttacctaaacccacgaagttcctttttctttttgtaactcaatttaaatttggagtatattttactttttgttaaaaaaaaaacggacgcgtgggtcgacccgggaattccggaccggtacctgcaggcgtaccagctttccctatagnnnnnnnnnnnnnnnnnnnnnnnnnnnnnnnnnnnnnnnnnnnnnnnnnnnnnnnn

SEQ ID NO: 118138 - DNA, 2046 bp, Arabidopsis thaliana
  unsure (1)..(2046): unsure at all n locations
nnnnnnnnnnnnnnnnnnnnnnnnnnnnnnnnnnnnnnnnnnnnnnnnnnnnnnnnnnnnnnnnnnnnnnnnnnccacgcgtccgcccacgcaaaaaaaaaaaacagaagacagaaaaaaacaaaaaaaaaaagaaaaagaaaaataaacaaattttcttttcttttttttcctctaaagtttctattttgtctattcgtgtttttttttttacttcctgataatgggagcctatgaaacagaaaaaccaactaaagatgcggcggctctagagacacagtcgccggaagatttcgatcaaccatctccgcttcgtaaaatcatctccgtcgcttccatcgccgccggtgtacagttcgggtgggccttacagctctctcttcttactccgtacgttcaactcctcggaatccctcacaaatggtcatctctcatttggctctgtggtccagtctccggcatgattgttcaaccaatcgtcggtttccacagtgaccgatgtaggtccaaatttggtcgccgtcgtcctttcatcgccaccggagccgcactcgtcgccgtcgctgttttcctcatcggttacgccgcggatttcggttataaaatgggagataaactcgaggagaaggttaaagttcgagctatagggatctttgctctcgggttctggatcctcgacgtagccaacaacaccttacaaggaccttgccgtgctttcttagccgacttagccgccggtgacgctaagagaacgcgagtcgcaaacgcgtttttctctttttttatggcggttggaaacgttttgggttatgcggctggttcgtacactaacctccacaagatgtttccgttcacaatgacaaaagcttgcgatatctattgcgccaatctcaagacttgtttcttcttatccatcactctcctcctcatcgtcaccgtcacgtctctttggtacgttaatgacaaacaatggtctccgccgccgcgaaatgccgacgacgacgagaagacctcaagcgttcctttgttcggtgaaatctttggagcattcaaagtcatgaaacgtcccatgtggatgcttctaatcgtcacggccttaaactggatcgcttggttcccatttcttttgttcgatactgattggatgggtcgtgaagtgttcggtggagattcagatggaaatgaacgatcgaagaaactatacagtcttggagtccaatctggtgcaatgggattgatgtttaactctatagttcttggtttcatgtcacttggtgttgaatggattggtcggaaattaggaggagctaaacggctttggggtattgtcaatttcatcctagccgctggtttggccatgacggttctcgttacgaaattcgccgaggatcaccggaaaaccgccggtgatttagccggaccgagcgctagtgttaaagctggagctttaagtctctttgctgttcttggtatcccattagctattactttcagtactccttttgctctagcatccatattctcaagctgctccggtgcaggccaaggactttcattaggagttttaaatttggcgattgtgataccacaaatgatagtctcactaggaggtggacctttcgacgccttgttcggcggtggaaacttaccggcgtttatcgttgcagcaattgcagcggcgattagtggagtattagcgttaaccgttttaccttcaccaccaccggacgcacccaaggcaacgaccatgggaggattccactagtttactatttttttttttttaatgaaactcatcaaatacagtattactgtggcgaaactggaaaaacccaaataaaagaaaagaatggataaaatgataaaatctaataaaccttgggtcgtctgtatttcacccttttttagttttttttcttctttttttataacttttgtcacttattttaatttgaaatagaatgttttttttttttgcccttaaataagatttgtgtgttgagtacnnnnnnnnnnnnnnnnnnnnnnnnnnnnnnnnnnnnnnnn

SEQ ID NO: 118139 - DNA, 407 bp, Arabidopsis thaliana
cggacgcgtgggctttcacaacaaaaaaactcttttctttttgtctgctcgtttttcttttcataatgggagccttggaagcagaaagagccgccaacaatgctacggcgttagagacacagtcgtcaccggaagatctcggtcaaccatctcctctgcgtaagatcatctccgtcgcttcaatcgccgccggtgtacagttcgggtgggccttacagctttctcttctgactccttacatacaactcctcgggatccctcacaaatggtcgtcttacatgtggctttgtggtcctatctccggcatgattgttcaaccgatcgtcggttaccacagtgaccgatgcgagtccagattcggtcgccgtcgtcctttcattgccgccggagtcgcactcgtagccgtc

SEQ ID NO: 118140 - DNA, 2515 bp, Arabidopsis thaliana
ataaaatcaacccctatttcaacgcctctttttctccctgatttatatatcggagagatttcaaggcaaagctttctcatttcctcgtaattgccggccaattctactaaagagtttgttgagcaatgaagggagcgactctcgttgctctcgccgccacaatcggcaatttcttacaaggatgggacaatgccaccattgctggagctatggtttatatcaacaaagacttgaatctaccaacctctgttcaaggtcttgtcgttgctatgtcattgatcggtgcaacggtcatcacgacttgctcaggaccgatatctgattggctcggcagacgccccatgctcattttatcatcagttatgtatttcgtctgcggtttgataatgttgtggtctcccaatgtctatgttctgtgctttgctaggcttcttaatgggtttggtgccgggctcgcggttacacttgtccctgtttacatttctgaaaccgctcctccggagatcagaggacagttaaatactctccctcagtttcttggctctggtggaatgtttttgtcatactgtatggttttcactatgtccctgagtgactcccctagctggagagccatgctcggtgtcctctcgatcccttctcttctttatttgtttctcacggtgttttatttgcccgagtctcctcgttggctggttagtaaaggaagaatggacgaggctaagcgagttcttcaacagttatgtggcagagaagatgttaccgatgagatggctttactagttgaaggactagatataggaggagaaaaaacaatggaagatctcttagtaactttggaggatcatgaaggtgatgatacacttgaaaccgttgatgaggatggacaaatacggctttatggaacccacgagaatcaatcgtaccttgctagacctgtcccagaacaaaatagctcacttgggctacgctctcgccacggaagcttagcaaaccaaagcatgatccttaaagatccgctcgtcaatctttttggcagtctccacgagaagatgccagaagcaggcggaaacactcggagtgggattttccctcatttcggaagcatgttcagtactactgccgatgcgcctcacggtaaaccggctcattgggaaaaggacatagagagccattacaacaaagacaatgatgactatgcgactgatgatggtgcgggtgatgatgatgactcggacaacgatttgcgtagccccttaatgtcgcgccagaccacaagcatggacaaggatatgatcccacatcctacaagtggaagcactttaagcatgagacgacacagtacgcttatgcaaggcaacggcgaaagtagcatgggaattggtggtggttggcatatgggatatagatacgaaaacgatgaatacaagaggtattatcttaaagaagatggagctgaatctcgccgtggctcgatcatctctattcccggaggtccggatggtggaggcagctacattcacgcttctgcccttgtaagcagatctgttcttggtcctaaatcagttcatggatccgccatggttcccccggagaaaattgctgcctctggaccactctggtctgctcttcttgaacctggtgttaagcgtgccttggttgttggtgtcggcattcaaatactgcagcagttttcaggtatcaatggagttctctactacactcctcagattctcgaacgggctggcgtagatattcttctttcgagcctcggactaagttccatctctgcgtcattcctcatcagcggtttaacaacattactcatgctcccagccattgtcgttgccatgagactcatggatgtatccggaagaaggtcattacttctctggacaatcccagttctcattgtctcacttgtcgtccttgtcatcagcgagctcatccacatcagcaaagtcgtgaacgcagcactctccacaggttgtgtcgtgctctacttctgcttcttcgtgatgggttacggtccattccaaacatcctctgttctgaaatcttcccaacaagcagaccgtggtctctgcatcgccatatgtgctatggtcttttggattggagacattattgtcacgtactcacttcccgttctcctcagctcgatcgaactagttggtgttttcagcatttacgctgcggtttgcgttatctcatggatcttcgtttacatgaaagtcccggagactaaaggcatgcctttggaagttatcacagactactttgcctttggagctcaagctcaagcttctgctccttctaaggatatataacttgtaactttcttcttcgtcaattgctctgtgtacctaaagattctcttcatcccctttttgttttgtttttcagatacccttcatatcgtttttgtttcttttgttttttttctttttcctttgtttcgttgtcaaaatcaatctaataagtactcaattttctctcaaaaaaaaaaaaaaag

SEQ ID NO: 118141 - DNA, 930 bp, Arabidopsis thaliana
  unsure (1)..(930): unsure at all n locations
atgatactgccnnnnnnnnnnnnnnnnnnnnnnnnnnnnnnnnnnnnnnnnnnnnnnnnnnnnnnnnnnnnnnnnnnnnnnnccacgcgtccggtcccacgcgtccggtttcaacggagactcactagtcgatctccgatcctttcttctacccgcccgaaatccgtcgaaacttctcttctttaccattgatttgcctcgtctcagctcaattctcttccgttgctgcttcgtttagttgttgcttcgcttcagtactctggtggtgggagagatgaatcacggccaacaatctggtgaggcaaagcatgaagatgatgctgctcttacagagttccttgcttctctgatggattatactcctactattcctgatgatttagtggagcactacttggctaagagtggatttcagtgccccgacgtacgattgtaggataaggctagttgctgtggctacacaaaagtttgttgcagatgttgccagtgacgcccttcagcattgcaaggctagaccagcaccagttgtgaaagacaaaaaacagcaaaaggataagcgtttggtattgacaatggaagatctttcaaaagctttgcgtgagtatggtgtgaacgtgaagcatccagaatattttgctgatagcccttcgactggaatggaccctgcaacaagggacgaatagaaaccaggaattcctcaaaatctttgcctagtaaggacggtcatgtgactcagatccctgattctctgttgtgtttcagttaaaaacaaaactcacttgtcttgctagtcctcaattactacattacatgtatattcgtttgttgtttgttctctggtgatttttggggttctacatcacttatccaccattcttgcaagtctccaagtcgtgaaaataaaaaaaaaannnnnnnnnnnnnnnnnnn

SEQ ID NO: 118142 - DNA, 340 bp, Arabidopsis thaliana
gtttcaacggagactcactagtcgatctcctatcctttcttctacccgcccgaaatccgtggaaacttctttgctttaccattgatttgcctcgtctcagctcaattctcttccgttgctgcttcgtttagtactctggtggtcggagagatgaatcacggccaacaatctggtgaggcaaagcatgaagatgatgctgctcttacagagttccttgcttctctgatggattatactcctactattcctgatgatttagctggagcactacttggctaagagtggatttcagtgccccgacgtacgattggtaggtatttccgacaagttatatctgata

SEQ ID NO: 118143 - DNA, 1493 bp, Arabidopsis thaliana
ggcaacgcattattgacacgtgtcttttcatttctcttcttccggcgtttttctctccgccgtttcgccaccgtacgtgacaatgtctgtttctctctccgccgcctctcacttactctgttcctccaccagagtctctctttcccccgccgtcacctcttcgtcctcgtcccctgtcgttgctctttcttcctctacatcgccacattctcttggaagcgtcgcatcttcttctctgtttcctcactcctccttcgtgcttcagaaaaaacatccgatcaatgggacgagcacgaggatgatttcaccaaaatgtgccgcttctgatgcagctcaattgataagcgctaaagaagatatcaaagttcttctccggactaagttttgccatcccatcttggttagattggggtggcacgatgctggtacttataacaagaatattgaggagtggccactgagaggtggagctaatggaagtcttaggtttgaggctgagcttaagcatgctgcaaatgctggtctgcttaatgctttaaagctcattcagcctctcaaagacaagtatcctaacatctcttatgcggacttattccagttagctagtgccacagcaatagaggaggctggtggtcctgatatcccgatgaaatatgggagagttgatgttgtagcacctgaacagtgtccagaagaaggaagactccctgatgctggacctccttcaccagctgatcatttgagagatgttttctacagaatgggacttgatgacaaggaaatagttgccttgtctggtgcacataccttagggagagccagaccagaccgtagtggttggggaaaacctgagacaaagtacacgaaaactggacctggagaagcaggaggacagtcatggacagtgaaatggctcaagttcgacaactcttatttcaaggatatcaaagaaaagagggacgacgatcttctggtgttacccactgatgcggcgctatttgaagatccttcattcaagaactatgcagagaagtatgctgaagatgtggctgcatttttcaaggactacgctgaagcccatgccaagcttagcaatctcggtgcaaaatttgatcctcccgagggcatagtcattgaaaacgttccagagaagttcgtagctgcaaagtattctacgggaaagaaggagctttcggattcgatgaaaaagaagataagagcagagtatgaagcaattggaggaagcccagataagccattacccacaaattacttcctcaacatcataattgccattggcgttttggtcctcttgtccactctctttggtggtaataacaactccgatttctctggtttctaattgacaaattatatattttgatttctcttacctacatacataattacgtggtgatcatatattccttgcaaacaaaaacatcattgtaaagtttgcttgaataaaatcaccttataaaaaaaaaaaaaaa

SEQ ID NO: 118144 - DNA, 621 bp, Arabidopsis thaliana
  unsure (1)..(621): unsure at all n locations
cttcttccggcgttttctctccgccgtttcgccaccgtacgtgacaatgtctgtttctctctccgccgcctctcacttactctgttcctccaccagagtctctctttcccccgccgtcacctcttcgtcctcgtcccctgtcgttgctctttcttcctctacatcgccacattctcttggaagcgtcgcatcttcttctctgtttcctcactcctccttcgtgcttcagaaaaaacatccgatcaatgggacgagcacgaggatgatttcaccaaaatgtgccgcttctgatgcagctcaattgataagcgctaaagaagatatcaaagttcttctccggactaagttttgccatcccatcttgggttagattgggggtggcacgattgctggnacttactaacaagaatattgaaggagtggccactgagaaggtgggagccaatgggaagccttagggttgaagggtgaggttaagaattgcggaaaaggcggggctggtaaaggtttaaaagctctttaagcccctcaaagcaaaggttcccaaaaatccttttgcggggttatccaagcagtaaggcanagaaaanaggggtgggggccgnaanccgggaanngggg

SEQ ID NO: 118145 - DNA, 2012 bp, Arabidopsis thaliana
  unsure (1)..(2012): unsure at all n locations
ctggatcttccgcggccgccgcaaatccctctccggttcattggataagcagcctggggaagatgagcattgtacctaaggaaacggttgaggtaatagctcaaagtattgggattaccaacttgttacctgaagctgctcttatgcttgctcctgatgttgagtatcgtgtccgagagatcatgcaggaagctatcaaatgcatgcttcactcaaagagaacaactttaacagcttcggatgtagatggtgcctctcaacttaaaggaaacgttgagccgatatatggatttggcctcaggagggccattttcggttttagaaaagctattggacatcgcgatttgttctacactgatgacagagaagtggatttcaaagatgtgatcgaagccccgctgccaaaagctccccttgatactgaaattgtttgtcactggctggctattgaaggagtgcaaccagctataccagaaaatgctcctttagaagtcattagagcacctggcagaaaccaaaatccagtaacaaaaagacgacctcttattgacgttaggctaccagtgaagcatgtactatctagggaacttcagttatacttccaaaagattgctgaacttgcaatgagcaagtcaaatcctcctctgtataaagaagcattagtgagcttggcctcagactcaggacttcatcctctagttccatattttacaaatttcattgctgatgaggtttcaaatggcttaaatgacttccgactcctgtttaatctaatgcacattgttagaagtcttctacagaatcctcacatacacagagaaccttatctgcaccagttgatgccatctgttgtaacatgccttgtatcaagaaagcttggaaatagatttgctgacaaccactgggaactcagagatttggcggcaaatctggtttcactgatatgtaaaaggtatggaaccgtttatataactcttcagtctcgtcttaccagaactttagtcaatgcactgctggacccaaagaaggctttgactcagcactatggtgcgattcaaggattagcagctttggggcacactgttgtacgccttcttattctatcaaatctcgaaccatatctaagtcttctcgaacctgaatttaatgctgagaagcaaaaaaatcagatgaagatctacgaagcttggcgtgtatatggagccttgctgcgtgctgcaggcttgtgtatacatggccggcttaaaatcttcccacctttaccatctccgtcaccaagttttctccataagggaaagggaaagggaaagataatcagtactgatccccacaagcggaagctgagtgtagattcttcagaaaaccaatcaccgcagaaaagattgataaccatggatgggccagatggtgtacattcacaagatcaatctggctcagctccaatgcaagtagataatccagtggaaaatgacaatccgccacaaaactctgttcagccatcctcatcagaacaagcctctgatgctaacgaatctgaaagcagaaatggaaaggtgaaagaaagcggcaggagtcgggctattaccatgaaagcaatccttgatcagatatggaaagatgatcttgattccggcggctattggtgaaactgcacgaactctatggtgataggattcttccctttatcccttctacagagatgtcagtattcctctaaccaataagagagaaggaggcttggagagattaaagcgccgtctggttggcatacataaactcatttagatccgtgccattgttctcaggtcaactctttagttcttctttttaagcttgagggatttcaaagtccttaggagcctgcagagtgggttgagttgaattgaaccggttgcaatgtatatattaagagaattttaatgattccgtagtggacttatttgtttactctcaaatgtaatccatgaaataatttctcttcaaaaaaaaatgatctagattgcaatttttna

SEQ ID NO: 118146 - DNA, 1195 bp, Arabidopsis thaliana
cgcagatcacaaatctcatccccagagagagaacccagagagcgatattgaaaatcaaaactctctcctttatatataatcccaatttacaaatctctttccctctctaaaaatttcttatctttgtataaaaagccttctcctttttcaaatcattcaccttcctttcgccttttcgggggaatttcttccaatctgttgggtttacgaaaccctagatttcgaaattccggattgctaactagcgaaagagaatggctgattcaaggaacggaagggagccagccagttgaccttactaaacatccttcagggattgttcctactcttcaaaatattgtctcaacagtgaacttagactgcaagcttgatcttaaagccatagctttgcaagctaggaatgctgaatataaccccaagcgtttcgctgctgtaatcatgaggatcagagagccaaagaccacagcgttaatttttgcttctgggaaaatggtgtgtaccggagctaaaagtgaacatctttcaaagcttgctgcaagaaagtatgctcggattgttcaaaagcttggctttcctgcaaagttcaaggattttaagatacagaacattgtaggctcatgtgatgtcaaattccccattaggcttgaaggtcttgcatactctcatagtgctttctcaagttacgagcctgagctatttccaggattgatatataggatgaaacttccaaagattgtactgcttatttttgtgtcaggaaagattgttataactggagccaagatgagagaagagacttataccgcatttgagaatatctacccagttcttagagaattcaggaaggtccagcaataatagtatagcctaccatattgaaggcaaaaaccatgttcacgtttggattgccatgaactagagatctcgggtgttggcaggcgcttggtggggttatattccttggacaagaacttgaaatgattcagattcaaaaccagaaattgtaaatagagaatggagatgccaataaatctcttttcttttttgttctaaaaatgtcttccaagtaatcttgtttcatgttctgtttgtttcagtgaacaatacccaatcattaaagagttacttagttctttgctaactgttctgtaataagacaccaagtctgtttgccctttaatatactctttcaagc

SEQ ID NO: 118147 - DNA, 1124 bp, Arabidopsis thaliana
  unsure (1)..(1124): unsure at all n locations
tnaccncctctctctcacagatctaaaaaccagaagcgagagaaacaaattcactctccccttatataagcaccgatttataaatctttttccctcttcgattctcaattctttgtataaaaggcttctccttttctcaattcttcggcttcctttcgcccaaactcttccctcgaatctttccttctcgtcttaaagctacgaaaccctagatttcggatttcttcgctatccaaagaagaatgactgatcaaggattggaagggagtaatccagttgatcttagcaagcatccttcagggattgttcctactcttcaaaacattgtctccacggtgaacttagactgcaagctagatcttaaagccatagctttgcaggctcggaatgctgaatataatcccaagcgttttgctgcggtgataatgaggatcagagaaccgaagactacagcattaatattcgcctcagggaaaatggtctgtactggagctaagagcgaggacttttcgaagatggctgctagaaagtatgctaggattgtgcagaaattgggattccctgcaaaattcaaggatttcaagattcagaatattgtaggttcttgtgatgtcaaattccctataagacttgaaggtcttgcttactctcacgctgctttctcaagttatgagcccgagctcttcccagggctgatttataggatgaaagtcccaaaaatcgtccttctaatctttgtctctgggaagatcgtaataacaggagccaagatgagagatgagacctacaaagcctttgagaatatataccccgtgctctcggaattcagaaagatacagcaataggtcacggatttgttccctgcaaaactagttgtgcggtcttagccccttggagttgctaaagcttgctgagaattttgcccttgaacaaaggctttcacagtagctagactctcaccttgtgttttggttcataatataacattgtatatacacaatggagattctaaagacaattcttcggttctattttttttctttttctttccaagatatgtcttacatgtatgttgctgtagtgtcctcacatttccacttatgttacaagtagaaccttaactc

SEQ ID NO: 118148 - DNA, 1978 bp, Arabidopsis thaliana
  unsure (1)..(1978): unsure at all n locations
ccttccaaacactattggggaaatggcttcttctcttttttccggtgtaggtttaaggttttagatttgaaggcggatggtgaggagtttgtgttgatgaaatgggtgatttgaagttaaatacctttaagttcttttagccttaagttcttttagcctgtcattacaatatatgtttcagttgtgatcttttggtgctctccaaggtcttagggaatctccgtgtcccctctggtttctttctttgtataaagtctctggaatttaaagatgattttgtcctgttttcttcgaagaatttggcgaagaaacatcaaaagttcactatttgctttacgtgttatgcttgtttgactttgtgtgatctaacttttggttgaaaactaatgctcatcttttgttctttggaatgtcttgatctgcttgattttgaatgctttgtcacattgtttaaacaatttgttctttgttttcagttgaggaaaacatgaattcgacatcgacacattttgtgccaccgagaagagttggtatatacgaacctgtccatcaattcggtatgtggggggagagtttcaaaagcaatattagcaatgggactatgaacacaccaaaccacataataataccgaataatcagaaactagacaacaacgtgtcagaggatacttcccatggaacagcaggaactcctcacatgttcgatcaagaagcttcaacgtctagacatcccgataagatacaaagacggcttgctcaaaaccgcgaggctgctaggaaaagtcgcttgcgcaagaaggcttatgttcagcaactggaaacaagcaggttgaagctaattcaattagagcaagaactcgatcgtgctagacaacagggattctatgtaggaaacggaatagatactaattctctcggtttttcggaaaccatgaatccagggattgctgcatttgaaatggaatatggacattgggttgaagaacagaacagacagatatgtgaactaagaacagttttacacggacacattaacgatatcgagcttcgttcgctagtcgaaaacgccatgaaacattactttgagcttttccggatgaaatcgtctgctgccaaagccgatgtcttcttcgtcatgtcagggatgtggagaacttcagcagaacgattcttcttatggattggcggatttcgaccctccgatcttctcaaggttcttttgccacattttgatgtcttgacggatcaacaacttctagatgtatgcaatctaaaacaatcgtgtcagcaagcagaagacgcgttgactcaaggtatggagaagctgcaacacacccttgcggactgcgttgcagcgggacaactcggtgaaggaagttacattcctcaggtgaattctgctatggatagattagaagctttggtcagtttcgtaaatcaggctgatcacttgagacatgaaacattgcaacaaatgtatcggatattgacaacgcgacaagcggctcgaggattattagctcttggtgagtattttcaacggcttagagccttgagctcaagttgggcaactcgacatcgtgaaccaacgtaggtttgagttattttgtaacaaccaaatgaagaaaatggaaagacctcaaaaaatgaagaatgagtgcatctgaaaacagaggactactctgaataaatagaggggttgctgctgatatttatttttactctgcggcggaattagaaaatttgaaaaacatcatgtattgataagttgtaaatatcagaaaaaggtgggggtgcaaaaatttgtactttttagcttttgaaagaggcaagtttttcgaatgtttgtttgatttgtaaacaatttcagaattatataaacttggttccaaaaaaaaaaaaaaaagggcggccgctctacaggatccaagcttacgtacgcgtgcatgcgacgtcatagtngtctatagtgtaagga

SEQ ID NO: 118149 - DNA, 539 bp, Arabidopsis thaliana
  unsure (1)..(539): unsure at all n locations
acaatttgttctttgttttcagttgaggaaaacatgaattcgacatcgacacattttgtgccaccgagaagagttggtatatacgaacctgtccatcaattcggtatgtggggggagagtttcaaaagcaatattagcaatgggactatgaacacaccaaaccacataataataccgaataatcagaaactagacaacaacgtgtcagaggatacttcccatggaacagcaggaactcctcacatgttcgatcaagaagcttcaacgtctagacatcccgcataagatacaaagacgggcttgctcaatacccgcgagggcttgctagggacaatgtcgctttggcgcgatgggcgtatgttcagcaacttgggaacaagcaggttgaagctaattccaatttgggncaaganctggttcggnnnngcaacaggggttttttttgggaaccgggttngtcctaatntttncggtttttnggaacccnntnccggggttntttcnttttaaatgggttttgcctttggtttnngcncgcc

SEQ ID NO: 118150 - DNA, 529 bp, Arabidopsis thaliana
ggtgcactatagaagagctttgacgtcgcatcgcacgcgtacgtaagcttggatcctctagagcggccgccctttgggtttttttttttttgtaaataactgaattgattctaccagtatttgaagataaaaatacatttatcgctgattgggataggtgttcaaatatttatatgtttatatgttaacaaatgttattgctgacttgcaggtcttagcagctgccataaaggctggtgcttccagagagcatgaaatccttgctgagatcagagattctgtcttttcatttatccggaaaatggaaccaaggagagtaatggatacaatgcttgtttctcgagtcaggatattgtacataaggtccttacttgcacgatcacctgagcttcagtcgatcaaggtgagcataaccagatttagttagctaattttccttttagcttttcctgctggtatgtgtcacaagtttcttctcccggaaagatcaatctcacgtcacccacttcttttaggtttctcctgttga

SEQ ID NO: 118151 - DNA, 1137 bp, Arabidopsis thaliana
  unsure (1)..(1137): unsure at all n locations
gctctcttcaagaagaaattcggcaaggtttacggttccattgaggagcattattacagattctctgttttcaaagcaaatctcctgcgagcgatgcgtcaccagaagatggatccttctgctcgtcacggcgtaacgcagttttcggatctgactcgttctgagtttcggagaaagcatttaggggttaaaggtgggtttaagcttcctaaagacgctaatcaagccccgattctccctactcagaatcttccggaggagtttgattggagagatcgcggcgcggttactcccgtgaaaaaccagggatcttgtggttcttgctggagttttagcactacaggtgcccttgaaggtgctcacttcctcgctactggcaaactcgttagtctcagtgaacaacagctcgtcgattgtgatcacgagtgtgatccagaagaggaaggttcatgtgattctggttgtaacggtgggcttatgaacagtgcctttgaatacacgcttaaaaccggagggcttatgcgagagaaagattatccttacaccggtactgatggagggagctgcaagttagacaggtctaagatcgttgcctctgtctccaactttagtgttgtgtccatcaacgaagatcaaatagctgcaaaccttatcaaaaacggtcctctagctgtggcgatcaatgcagcttatatgcaaacctacattggaggagtctcgtgtccttacatatgctcgaggcggctcaaccacggtgtgttgttggtaggttatggctcggctgggttttctcaagcaaggttaaaggaaaaaccgtattggatcatcaagaactcgtggggtgagtcttggggtgagaatggtttctataagatatgtaaaggtcgtaacatttgcggtgttgacagtttggtctccaccgtcgctgctaccacttcttgagcttttcattattctgctgcaatgctatttaaagtctgtaaataaatgattaacaaaaacatatttcttggtgaattcgaaacaacaatgccataggcttacaaaaaaaaaaaaaaaaaagnnnnnnnnnnnnnnnnnnnnnnnnnnnnnnnnnnnnnnnnnnnnnnnnnnnnnnnnnnnnnnnnnnnnnnnnnn

SEQ ID NO: 118152 - DNA, 641 bp, Arabidopsis thaliana
ggcacgaggagattttggcttattctcagatttgggagaaatggcggcagaagagggtcaagtgattggttgtcacacgaacgatgtatggactgtgcaacttgataaagccaaagaatccaacaagctgattgtgattgatttcactgcttcatggtgtccaccatgccgcatgattgctccaattttcaacgatttggccaagaagttcatgtcaagtgccatcttcttcaaggtggatgttgatgaacttcagagtgttgctaaagagtttggtgtggaggcaatgccaacctttgtgttcattaaagccggcgaagttgtggataagctcgttggtgcgaataaagaagatcttcaggcgaaaatagtgaagcatactggtgttacaactgcgtaaatcagtttgaggcataaataataaggtctaatttgtttatcttaaactagctagacataacgggaatagtgcagattggagatgaagtagaagttattgatctctgactgtcataaaaccatgctttttttatatggtctttggcttttgcctaattcatatgtttaggtgttctttctatacctccatagaccaccactcagtcgaattttcagatcagtgaaatagactcttgtgaatg

SEQ ID NO: 118153 - DNA, 710 bp, Arabidopsis thaliana
ctatatgggaaagctggtcgcctgcagtaccggtccggaattccgggtcgacccacgcgtcgtcggctggagaagacacaaaggtcggctgcgagaagacacagaagggtacggctgtgagaagacgacagaagggtacggctgcgagaagacgacagaaggggattcaccaaaaaaaactcatcaatcaaacaaaactcttaaaagcttaagaacaaataataaaaatggccggtgaaggagaagtgattgcttgccataccctcgaagtttggaacgagaaggtcaaagacgccaatgaatccaagaaactgattgtgatagacttcacagcatcatggtgtccaccttgccgtttcattgcaccagtgtttgcagagatggctaagaagttcactaatgttgtcttcttcaagatcgatgttgatgaattgcaagctgttgctcaggaattcaaagttgaggcaatgcctacttttgttttcatgaaagaaggcaacatcattgatcgtgttgtcggtgctgcgaaagatgagatcaatgagaagctgatgaagcatggtggtcttgtagcttctgcttgattgatttcagtttctaactctttgcatcataataaagtttttatctttcgtatgaaataaaagtgatgcattgctactgcccatttgtattataacctatgttgatttttcgattactggtttgtt

SEQ ID NO: 118154 - DNA, 1476 bp, Arabidopsis thaliana
tctcaatgagccagtcaagattcattataaagtctttatttagcacagcaggaggtttcttacttggatctgctctctcaaattcgccgtctctagccaccgcgttttcttcttcttcctcgtcctcctccgccgccgccgccgtcgtcatggaaactcacaaaaccaaggtttgcatcgtcggaagtggaccagcagcacacacggcggcgatctatgcatcgagagcggagcttaagcctcttctcttcgaaggatggatggctaacgacatcgctcccggcggtcaattaactacaacaaccgacgtcgaaaacttccctgggttccctgaaggtattctcggtattgatatcgttgagaaattcagaaaacaatcggagagatttggaactacgatcttcacggaaactgttaacaaagttgatttctcatcgaaaccgtttaagctattcactgattcgagaactgttctcgctgattctgtaatcatttctactggagctgttgctaaacgtcttagcttcactggatctggtgaaggtaatggtggtttttggaatcgtggtatctccgcttgtgctgtttgcgacggagctgctccgatttttaggaataagcctcttgtggttattggtggtggtgattcagctatggaggaagcgaattttctgactaagtatggatctaaggtttatattattcataggagggatacgtttagggcgtctaagattatgcagcagagagctttgtctaaccctaagattgaagtgatttggaactctgccgtggttgaggcgtatggtgatgaaaatggacgtgttcttggaggattgaaggtgaagaatgttgttactggggatgtttcagatctgaaggtgtctggattgttctttgctattggtcatcagccagctacgaagtttttggatgggcagcttgagcttgatgaagatggttatgttgtgaccaagccaggtactactaagacgagcgtggttggtgtatttgctgctggagatgttcaagacaagaagtatagacaggccatcactgctgcaggaactgggtgcatggcggcattggatgcagagcattacttacaagagattggatctcaggagggtaagagtgattgaagaagcggtaggagttggatccatgataaaatcactctctctccaccttatttgctttgccatttttataaccaataaaggatcagattgatctcatacagacaaatctgaatagaattttgttatttgcatttgtttgcagttggttttgtgccaagttgtaaactctttagttgtcacagcttccaccaaattcatcttttaagatttgttcctcaggtgagaggactttttcatactttaattctctttttatttgattatgtaatcacaattaaaagtggcatatatggaaaggagtttctagagctcaaaaaaaaaaaaaaaaaaagaa

SEQ ID NO: 118155 - DNA, 1261 bp, Arabidopsis thaliana
aagcaaagcacgaagctttgcacggcttggtggtgaatccactctctctcaaccgccgtctctcgcctccgccgcgttttcttcatccgccgtcgatgaatggtctcgaaactcacaacacaaggctctgtatcgtaggaagtggcccagcggcacacacggcggcgatttacgcagctagggctgaacttaaacctcttctcttcgaaggatggatggctaacgacatcgctcccggtggtcaactcaaccaaccaccgcgtgagaatttccccggatttccagaaggtattctcggagtagagctcactgacaaattccgtaaacaatcggagcgattcggtactacgatatttacagagacggtgacgaaagtcgatttctcttcgaaaccgtttaagctattcacagattcaaaagccattctcgctgacgctgtgattctcgctatcggagctgtggctaagtggcttagcttcgttggatctggtgaagttctcggaggtttgtggaaccgtggaatctccgcttgtgctgtttgcgacggagctgctccgatattccgcaacaaacctcttgcggtgatcggtggaggcgattctgcaatggaagaagcaaactttcttacaaaatatggatctaaagtgtatataatcgataggagagatgcttttagagcgtctaagattatgcagcagcgagctttgtctaatcctaagattgatgtgatttggaactcgtctgttgtggaagcttatggagatggagaaagagatgtgcttggaggattgaaagtgaagaatgtggttaccggagatgtttctgatttaaaagtttctggattgttctttgctattggtcatgagccagctaccaagtttttggatggtggtgttgagttagattcggatggttatgttgtcacgaagcctggtactacacagactagcgttcccggagttttcgctgcgggtgatgttcaggataagaagtataggcaagccatcactgctgcaggaactgggtgcatggcagctttggatgcagagcattacttacaagagattggatctcagcaaggtaagagtgattgaggaaattgttggaaggctcaggtcattgattattgttgaatgatccctgattcagttagacattgatggaccagaatgagacttgatctttatcatagaacaagttaagatacattgatttgtttattccttaatattgcagttggaattgagtacgggtattgttc

SEQ ID NO: 118156 - DNA, 582 bp, Arabidopsis thaliana
  unsure (1)..(582): unsure at all n locations
ggtaggtttcttacttggatctgctctctcaaatccgccgtctctagccaccgcgttttcttcttcttcctcgtcctcctccgccgccgccgccgtcgacatggaaactcacaaaaccaaggtttgcatcgtcggaagtggaccagcagcacacacggcggcgatctatgcatcgagagcggagttaagcctcttctcttcgaaggatggatggctaacgacatcgctcccggcggtcaattaactacaacaaccgacgtcgaaaacttccctggggttccctgaaggtattctcggtattgatatcgttgagaaattcaggaaacaatccggaggcagattttgggaactacggntcttctaacgggaaaacttgtttaacaaaggttggatttctcaatcggaaacccggtttaaaggctttttcacttgtttcggggaccttgttcttggtggattctggaatnaatttctacttggggctgtttctnaacggnttaggtnaacttggancttggtnaaggnaatngnggnttttggatntggggntcnccgtttttcnttttttgngggggttnnccg

SEQ ID NO: 118157 - DNA, 3201 bp, Arabidopsis thaliana
  unsure (1)..(3201): unsure at all n locations
gagagaacagagagacggcggagagagataggcttcgctagacaatttcttcaatctctggaagaagaagttggtctgagccttcatcaacgttgttctttcgggaatgggcactgaaacagtttcaaaacctgtgatggataatgggtctggagacagtgatgatgacaagcctttagcgttcaagaggaataatacagtggcttctaattcgaatcaatctaaatccaattcccagagaagcaaggcagttcctaccaccaaggtatcacctatgagatcacctgtgactagcccaaatggaaccactccttcgaataaaacttctatagtgaaatcctctatgccatcatcttcttctaaggcttcaccagcaaagtcaccattgcggaatgatatgccctctactgttaaggataggagccagttacagaaagatcagtctgaatgtaaaattgagcatgaggattctgaggatgatagacctttaagttccatactatctggaaataaagggccaacctcttcgcggcaggtttcttcaccgcagccagagaaaaagaataatggtgatcgacctcttgatagagcaagcagaattataaaagacgagtcagatgatgaaactccaatctcgtcaatgtttcggaagaagattgatagtgggatgtcagggggcaaccagctctccaatgatgaaaagaaacctttggttcaaaagttgcatcagaatggttccacagttaagaatgaagtgccgaatggtaaggtattaggtaagagacctctggagaagaatagttctgcagatcaatcttccttgaagaaggccaaaatatcagcttcacctacttcagtgaaaatgaaacaagattctgtcaagaaagagatagatgataagggaagggttttggtttcaccaaaaatgaaagctaaacagttatctaccagagaagatggaactgatgatgatgatgatgatgatgttccgatatccaagagattcaaatcagattcctccaacagtaacacatcatctgcaaagccaaaagcagtaaaactaaattctacttcatcagctgcaaagccaaaagcgagaaatgtcgtttctcctaggtccagagcaatgaccaaaaacactaagaaagtaacgaaggactcaaaatattccacgtcttcaaaatcatcaccttcctctggagatgggcaaaagaaatggactactttggtgcacaacggtgtaatatttccaccgccatacaagcctcatggcattaagattttgtacaaggggaaacctgttgacctaactattgaacaagaagaggttgcgactatgtttgcagtgatgagagagacagattattatactaaacctcaatttcgggagaatttctggaatgactggcgaagactgcttggcaagaaacatgtgatacagaagttggatgattgtgactttactcccatatatgagtggcatttggaagagaaagagaagaagaaacaaatgagcacagaggagaaaaaagctttgaaagaggagaaaatgaagcaagaggagaaatatatgtgggctgttgttgatggtgtcaaagagaagattggtaatttcagagtggaaccgcctggccttttcagaggccgtggagaacatcccaagatgggaaaactaaagaagcgtatccatccatgcgagatcaccttaaatatcgggaaaggtgctcctattccagaatgtccaattgctggtgaaagatggaaagaagtaaagcatgataacacagtcacctggctagctttctgggctgatcctattaacccaaaagaattcaagtatgtatttttgggagctggcagttctctgaaagggctgagcgacaaagagaagtacgagaaagctaggaatcttacggatcatatagataatataagaacaacatacaccaagaattttactgccaaggatgttaaaatgaggcaaattgctgtggcgacatatctcattgataaattggcgcttagggctggaaatgagaaggatgatgatgaggccgacactgttggttgttgtactttaaaagttggaaatgtggagtgtattcctccaaataaaataaagtttgattttcttggtaaggattcaatccagtatgtgaacacagtcgaggttgagcctcttgtttacaaggccattggacagttccaggcgggaaaatccaaaacagatgatctttttgatgagttagacacaagtaaactgaatgctcatttgaaggaacttgtgcctggtctcacagctaaagtattccgtacatataatgcttccatcactttggatgaaatgctgagtcaagaaaccaaagatggcgatgttactcaaaaaatagtagtttatcagaaagcaaataaggaggttgccataatctgcaatcatcagcgtactgtatcaaagacacatggtgcgcaaattgaaaaattgactgcgagaatagaagaactcaaggaggttcttaaagagctcaaaactaatcttgaccgggctaaaaagggaaaaccaccattggaaggttctgatggaaagaagattagaagcttagaaccaaacgcgtgggagaagaagattgctcaacagagtgctaagatcgagaaaatggaacgagacatgcatacaaaagaggacttgaaaacagtggcactgggcacgtctaagatcaactacctggatcctagaatcacagttgcatggtgcaaacgtcatgaagtaccaatcgaaaagatattcaccaagtctcttttggagaagtttgcgtgggcaatggatgtagaacccgagtacagattctcgcgccgttaggtatagagaagctcttctcggatggagcaagtattggagggcaaaagagctgaatgagataagagcaaagagaaaaccggcctttcttctattcatcttcctcccttgtttagaattttattaccttagtgagtaaaaaacatgaacatgtcaagctgtttcattagtgtcttttttaacattactatgactcaaatgttatgttatttgtaacattactatgattaaagaaatagaaaatccgaagaagaacaaaaacaaaaaaaaaagnnnnnnnnnnnnnnnnnnnnnnnnnnnnnnnnnnnnnnnnnnnnnnnnnnnnnnnnnnnnnnnnnntgtcctaa

SEQ ID NO: 118158 - DNA, 516 bp, Arabidopsis thaliana
  unsure (1)..(516): unsure at all n locations
nnnnnnnnnnnnnnnnnnnnnnnnnnnnnnnnnnnnnnnnnnnnnnnnnnnnnnnnnnnnnnnnnnnnnnnnnnnnnnnnnnnccacgcgtccggaaatgtggagtgtattcctccaaataaaataaagtttgattttcttggtaaggattcaatccagtatgtaaacaagaggctcaacctcgactgtgttcacatactggatggaccctcttgtttacaaggccattggacagttccaggcgggaaaatccaaaacagatgatctttttgatgagttagacacaagtaaactgaatgctcatttgaaggaacttgtgcctggtctcacagctaaagtattccgtacatataatgcttccatcactttggatgaaatgctgagtcaagaaaccaaagatggcgatgttactcaaaaaatagtagtttatcagaaagcaaataaggaggttgccataatctgcaatcatcagcgtactgtatcaaagacacatggggcgcaaattgaaaaatgact

SEQ ID NO: 118159 - DNA, 3099 bp, Arabidopsis thaliana
gcggccgccagtgtgagtaatttagttttggttctgttttggtgtgagcgtatgcctggaaataagtacaactgcagttcttctcatatcccactctctcgaacagaacgcctcttgagagatagagagcttagagagaagaggaagagcaaccgagctcgtaatcctaatgacgttgctggcagttccgagaactctgagaatgacttgcgtttagaaggtgacagttcaaggcagtatgttgaacagtacttggaaggggctgctgctgcaatggcgcacgatgatgcgtgtgagaggcaagaagttaggccttataataggcaacgactacttgtagtggctaacaggctcccagtttctcccgtgagaagaggtgaagattcatggtctcttgagatcagtgctggtggtctagtcagtgctctcttaggtgtaaaggaatttgaggccagatggataggatgggctggagttaatgtgcctgatgaggttggacagaaggcacttagcaaagctttggctgagaagaggtgtattcccgtgttccttgatgaagagattgttcatcagtactataatggttactgcaacaatattctgtggcctctgtttcactaccttggacttccgcaagaagatcggcttgccacaaccagaagctttcagtcccaatttgctgcatacaagaaggcaaaccaaatgttcgctgatgttgtaaatgagcactatgaagagggagatgtcgtctggtgccatgactatcatcttatgttccttcctaaatgccttaaggagtacaacagtaagatgaaagttggatggtttctccatacaccattcccttcgtctgagatacacaggacacttccatcacgatcagagctccttcggtcagttcttgctgctgatttagttggcttccatacatatgactatgcaaggcactttgtgagtgcgtgcactcgtattcttggacttgaaggaacacctgagggagttgaggatcaaggcaggctcactcgtgtagctgcttttccaattggcatagattctgatcggtttatacgagcacttgaggtccccgaagtcaaacaacacatgaaggaattgaaagaaagatttactgacagaaaggtgatgttaggtgttgatcgtcttgacatgatcaaagggattccacaaaagattctggcattcgaaaaatttctcgaggaaaatgcaaactggcgtgataaagtggtcttattgaaaattgcggtgccaacaagacctgacgttcctgagtatcaaacactcacaagccaagttcatgaaattgttggccgcattattggtcgtctcgggacactgactgcagttccaatacatcatctggatcggtctctggactttcatgctttatgtgcactttatgccgtcacagatgttgcgcttgtaacatctttgagagatgggatgaatcttgtcagttatgagtttgttgcttgccaagaggccaaaaagggcgtcctcattctcagtgaatttgcaggtgctgcacagtctctgggtgctggagctattcttgtgaatccttggaacatcacagaagttgctgcctccattggacaagccctaaacatgacagctgaagaaagagagaaaagacatcgccataattttcatcatgtcaaaactcacactgctcaagaatgggctgaaacttttgtcagtgaactaaatgacactgtaattgaggcgcaactacgaattagtaaagtcccaccagagcttccacagcatgatgcaattcaacggtattcaaagtccaacaacaggcttctaatcctgggtttcaatgcaacattgactgaaccagtggataatcaagggagaagaggtgatcaaataaaggagatggatcttaatctacaccctgagcttaaagggcccttaaaggcattatgcagtgatccaagtacaaccatagttgttctgagcggaagcagcagaagtgttttggacaaaaactttggagagtatgacatgtggctggcagcagaaaatgggatgttcctaaggcttacgaatggagagtggatgactacaatgccagaacacttgaacatggaatgggttgatagcgtaaagcatgttttcaagtacttcactgagagaactcccaggtcacactttgaaactcgcgatacttcgcttatttggaactacaaatatgcagatatcgaattcgggagacttcaagcaagagatttgttacaacacttatggacaggtccaatctctaatgcatcagttgatgttgtccaaggaagccgctctgtggaagtccgtgcagttggtgtcacaaagggagctgcaattgatcgtattctaggagagatagtgcatagcaagtcgatgactacaccaatcgattacgtcttgtgcattggtcatttcttggggaaggacgaagatgtttacactttcttcgaaccagaacttccatccgacatgccagccattgcacgatccagaccatcatctgacagtggagccaagtcatcatcaggagaccgaagaccaccttcaaagtcgacacataacaacaacaaaagtggatcaaaatcctcatcatcctctaactctaacaacaacaacaagtcctcacagagatctcttcagtcagagagaaaaagtggatccaaccatagcttaggaaactcaagacgtccttcaccagagaagatctcatggaatgtgcttgacctcaaaggagagaactacttctcttgcgctgtgggtcgtactcgcaccaatgctagatatctccttggctcacctgacgacgtcgtttgcttccttgagaagctcgctgacaccacttcctcaccttaatatcccgagacagtgtcaagtgagttcatgtaacccaataaaaactattgttttgtaacaaaaagcagccattaccagactctttagtggtttgattctaatataataagagtagagcaacttatgacacaaaaaaaaaaaaaaagggcggccgctctagaggatccaagcttacgtacgcgtgcatgcgacgtcaagaatcttctataggtcgcctaa

SEQ ID NO: 118160 - DNA, 615 bp, Arabidopsis thaliana
ccggggcgggccgacgcgtccgctcataccgttttctctctctcctccgtcgtctctgcagaatcactctctcgccggagtttttcacctgcagagctctcgattttttctctcgagcatcatcattttcgtcggatcaatcaccaagagatggcgtcgagaaactccgtcaccggattcgcgttgttcagttttgtattcgccgtcatcttatctctcgccggcgctcaatccctggctccagctcctgctcccaccagcgatggaacatgatagatcaagggatagcgtatttgctaatggtggtggcgttagtgctgacttacctaattcatcctcttgatgcttcttcttcctactccttcttctaatctctctctctctttcttctggttttttttatttctttgcaacttcttattagtttcttcaatttgccttttttcttcttcttgtggataaaattttcaagggttaatttaatcatcatgttctcgattatgatttctggagattgattgattgatgataaaaaaaaaaaaaacccaaagggcgaccgctctagaggatccaagcttacgtacgcggcagtgcgacgtcataatcttctatagt

SEQ ID NO: 118161 - DNA, 2636 bp, Arabidopsis thaliana
cccccctcgttgtcgacggtatcgataagcttgatatcgaattcgcggccgcattcatttgttttactgtttttgataacctcaaaatttgcctaaattttattctctataaatccttatatgttttacttacattcctaaagttttcaactttcttgagcttcaaaaagtacctccaatggcttcttctgcatttgcttttccttcttacataataaccaaaggaggactttcaactgattcttgtaaatcaacttctttgtcttcttctagatctttggttacagatcttccatcaccatgtctgaaacccaacaacaattcccattcaaacagaagagcaaaagtgtgtgcttcacttgcagagaagggtgaatattattcaaacagaccaccaactccattacttgacactattaactacccaatccacatgaaaaatctttctgtcaaggaactgaaacaactttctgatgagctgagatcagacgtgatctttaatgtgtcgaaaaccggtggacatttggggtcaagtcttggtgttgtggagcttactgtggctcttcattacattttcaatactccacaagacaagattctttgggatgttggtcatcagtcttatcctcataagattcttactgggagaagaggaaagatgcctacaatgaggcaaaccaatggtctctctggtttcaccaaacgaggagagagtgaacatgattgctttggtactggacacagctcaaccacaatatctgctggtttaggaatggcggtaggaagggatttgaaggggaagaacaacaatgtggttgctgtgattggtgatggtgcgatgacggcaggacaggcttatgaagccatgaacaacgccggatatctagactctgatatgattgtgattcttaatgacaacaagcaagtctcattacctacagctactttggatggaccaagtccacctgttggtgcattgagcagtgctcttagtcggttacagtctaacccggctctcagagagttgagagaagtcgcaaagggtatgacaaagcaaataggcggaccaatgcatcagttggcggctaaggtagatgtgtatgctcgaggaatgataagcggtactggatcgtcactgtttgaagaactcggtctttactatattggtccagttgatgggcacaacatagatgatttggtagccattcttaaagaagttaagagtaccagaaccacaggacctgtacttattcatgtggtgacggagaaaggtcgtggttatccttacgcggagagagctgatgacaaataccatggtgttgtgaaatttgatccagcaacgggtagacagttcaaaactactaatgagactcaatcttacacaacttactttgcggaggcattagtcgcagaagcagaggtagacaaagatgtggttgcgattcatgcagccatgggaggtggaaccgggttaaatctctttcaacgtcgcttcccaacaagatgtttcgatgtaggaatagcggaacaacacgcagttacttttgctgcgggtttagcctgtgaaggccttaaacccttctgtgcaatctattcgtctttcatgcagcgtgcttatgaccaggttgtccatgatgttgatttgcaaaaattaccggtgagatttgcaatggatagagctggactcgttggagctgatggtccgacacattgtggagctttcgatgtgacatttatggcttgtcttcctaacatgatagtgatggctccatcagatgaagcagatctctttaacatggttgcaactgctgttgcgattgatgatcgtccttcttgtttccgttaccctagaggtaacggtattggagttgcattacctcccggaaacaaaggtgttccaattgagattgggaaaggtagaattttaaaggaaggagagagagttgcgttgttgggttatggctcagcagttcagagctgtttaggagcggctgtaatgctcgaagaacgcggattaaacgtaactgtagcggatgcacggttttgcaagccattggaccgtgctctcattcgcagcttagctaagtcgcacgaggttctgatcacggttgaagaaggttccattggaggttttggctcgcacgttgttcagtttcttgctctcgatggtcttcttgatggcaaactcaagtggagaccaatggtactgcctgatcgatacattgatcacggtgcaccagctgatcaactagctgaagctggactcatgccatctcacatcgcagcaaccgcacttaacttaatcggtgcaccaagggaagctctgttttgagagtaagaatctgttggctaaaacatatgtatacaaacactctaaatgcaacccaaggtttcttctaagtactgatcagaattcccgcccgagaagtcctttggcaacagctatatatatttactaagattgtgaagagaaaggcaaaggcaaaggttgtgcaaagattagtattatagataaaactggtatttgttttgtaattttaggattgtgatgagatcgtgttgtaccaataactaacatcttgtaaaatcaattactctcttgtgatcttcaataagcttgagtgacaaaaaaaaaa

SEQ ID NO: 118162 - DNA, 1201 bp, Arabidopsis thaliana
  unsure (1)..(1201): unsure at all n locations
gcccccgccccccccattgaaatgcattggcattgggaccccccccgaggtcgacggtatcgataagcttgatatcgaattcgcggccgcgttgcgttgttgggttatggctcatcagtttatagctgtttaggagcggctgtaatgctcgaagaacgcggattaaacgtaactgtagcggatgcacggttttgcaagccattggaccgtgctctcattcgcagcttagctaagtcgcacgaggttctgatcacggttgaagaaggttccattggaggttttggctcgcacgttgttcagtttcttgctctcgatggtcttcttgatggcaaactcaagtggagaccaatggtactgcctgatcgatacattgatcacggtgcaccagctgatcaactagctgaagctggactcatgccatctcacatcgcagcaaccgcacttaacttaatcggtgcaccaagggaagctctgttttgagagtaagaatctgttggctaaaacatatgtatacaaacactctaaatgcaacccaaggtttcttctaagtactgatcagaattcccgccgagaagtcctttggcaacagctatatatatttactaagattgtgaagagaaaggcaaaggcaaaggttgtgcaaagattagtattatgataaaactggtatttgttttgtaattttgtttaggattgtgatggagatcgtgtttttcacctgcagagctctcgattttttctctcgagcatcatcattttcgtcggatcaatcaccaagagatggcgtcgagaaactccgtcaccggattcgcgttgttcagttttgtattcgccgtcatcttatctctcgccggcgctcaatccctggctccagctcctgctcccaccagcgatggaacatcgatagatcaagggatagcgtatttgctaatggtggtggcgttagtgctgacttacctaattcatcctcttgatgcttcttcttcctactccttcttctaatctctctctctctttcttctgtttttttttatttctttgcaacttcttattagtttcttcaatttgccttttttcttcttcttgtggataaaattttcgcggccgnnnnnnnnnnnnnnnnnnnnnnnnnnnnnnnnnnnnnnnnnnnnnnnnnnnnnnnnnnnnnnnnnnnnnnnnnnnnnnnnnnnnnnnnnnngtc

SEQ ID NO: 118163 - DNA, 443 bp, Arabidopsis thaliana
caactctccaccaccaccattgtcaccaccacatttaaacacacactttcacttgtagtgggattcgaaagtgcgttttattcatttgttttactgtttttgataacctcaaaatttgcctaaattttattctctataaatccttatatgttttacttacattcctaaagttttcaactttcttgagcttcaaaaagtacctccaatggcttcttctgcatttgcttttccttcttacataataaccaaaggaggactttcaactgattcttgtaaatcaacttctttgtcttcttctagatctttggttacagatcttccatcaccatgtctgaaacccaacaacaattcccattcaaacagaagagcaaaagtgtgtgcttcacttgcagagaagggtgaatattattcaaacagaccaccaactccattacttgacacta

SEQ ID NO: 118164 - DNA, 535 bp, Arabidopsis thaliana
  unsure (1)..(535): unsure at all n locations
tgatcaactagctgaagctggactcatgccatctcacatcgcagcaaccgcacttaacttaatcggtgcaccaagggaagctctgttttgagagtaagaatctgttggctaaaacatatgtatacaaacactctaaatgcaacccaaggtttcttctaagtactgatcagaattcccgccgagaagtcctttggcaacagctatatatatttactaagattgtgaagagaaaggcaaaggcaaaggttgtgcaaagattagtattatgataaaactggtatttgttttgtaattttgtttaggattgtgatggagatcgtgttgtacaataatctaacatcttgtaaaaatcaattacatctctctgtgtatctttcatagctttgtgtgacatattttggtacgagcagtgtttttagcggccgcgaatctnnnnnnnnnnnnnnnnnnnnnnnnnnnnnnnnnnnnnnnnnnnnnnnnnnnnnnnnnnnnnnnnnnnnnnnnnnnnnnnnnnnnnnnnnnnnnnnnnnntcat

SEQ ID NO: 118165 - DNA, 2431 bp, Arabidopsis thaliana
aaaaaaaaaccctagtcacactcagataacataaacctttgacaacaaattttgatgctccttcgtcttacggctcgctctattcgtcgtttcacaacttcttcttcgtctctaccattgctctcatcgtcttcgttttgtactgttccaacaatggcagctaatcatcctaaggatgaagcgtatctctccgccgtcatccccaaacgtatcaagcttttcgagcagatccaagcgaatcaactcgagaatcttaagtctcttccacacgatccgatcaaggttacgttaccagatggaaatgtgaaagaaggaaagaagtgggagacaactccgatggatatcgctgctcagatttctaagggtttggctaattctgcgttgatttcggctgttgatgatgttctttgggatatgaataggccattggaaggtgattgtaagcttgagcttttcaaatttgatagcgataaaggtcgtgatactctttggcattctagtgcgcacattcttggtcaggctctcgagcaggagtatgggtgtcagctgtgcattggaccatgcacaacgagaggagagggtttctactatgatggattttatggtgaattgggcctgagtgacaaccactttcctagcatcgaagcaggtgctgcaaaagctgctaaggaagcacaaccatttgaaaggattgaagtgacgaaggatcaggcactcgagatgttttctgagaataattttaaggttgaactcatcaatggtttgcctgcagacatgaccattactgtctacagatgtggccctttggtggatttgtgtcgtggaccgcacataccaaatacttcctttgtgaaagcgttcaagtgtttgagggcctcatcagcttactggaagggtgacaaagaccgtgagagcttgcagagagtttatgggatatcttatcctgatcagaagcagctgaagaaatatctccaatttctagaagaagccaaaaagtatgaccacagactattgggccaaaagcaggaactcttctttagtcatcaactcagccctgggagttatttcttccttccactcggcactcgtgtatataacaggttgatggacttcattaagaaccaatactggcacaggggttacacagaggttattacaccaaatatgtacaacatggagttgtggcaaacatccggacatgctgacaattacaaggataatatgtttacgtttaatattgagaagcaagagttcgggctcaaacctatgaattgtcctggtcactgcttgatattccagcatagggttcgctcatatagagagttacctttgagactggccgactttggagtgttacaccgcaatgaggcaagtggagcacttagtggattgactcgtgtccgacggttccagcaggatgatgcacacatattctgtacaacggaacaggttaagggagaagtgcagggtgtgttggagttcattgactacgtgtacaaagttttcgggtttacctatgagctaaaactttcaacgaggccagagaagtaccttggagatttggaaacatgggataaagctgaagcggatctcaaagaagctatagaagcttttggaaagccattagtgttgaacgaaggagatggtgcattttatggtccaaagatagacatcacagtttctgatgcaatgaataggaaattccagtgtgctactttacagcttgattttcaacttccgattcgcttcaacttggaatacgcagctgaggatgaagcgaaaaagagtagacctgtaatgatacatagagccgtgttgggatctgtggaacgtatgtttgccatattgttggagcattacaaaggaaaatggcccttctggattagtccgcgacaggccatagtttgtcctatatcagagaaatctcagcaatatgcagaaaaggttcaaaagcaaattaaagatgctgggttctatgttgatgctgacttaacagacagaaagatagataaaaaggtgcgagaagctcagcttgctcagtacaactacattctggtcgtgggtgaaacagaagctgctacaggacaggtgagtgttcgtgtgagagacaatgcagcccactccgtgaagagcattgaggatttgctggaagaattcaaggccaagactgccgaatttgtatgagatccgactcatgaaattcaagttctgatatgatgttttttttttttttttcaaattagggtcgacccagatttaagtgttcatctgtttcattaaaccatattaggcctcaactatattaaagtttcgattacattctgcgaaaactctatgtttggtccccttttagtatccctttatggaagaaaaaaatctggaaaatggaagtttccgaaataaaaaaaaaaaaaaaaaaataaaaagggcg

SEQ ID NO: 118166 - DNA, 1096 bp, Arabidopsis thaliana
ggcacacggaggttgtgtttgaccattccgccggagatacagtttgttcagagtgtggtctcgtgcttgaatctcactcaatcgatgaaacttctgagtggcgtactttcgctaatgagtccggtgataatgatcctgttcgtgtcggtggtccgacgaatcctcttttagcagatggtggtctcactactgtcatttctaaacctaatggatcctctggcgatttcctctcttcttctcttggtcgatggcagaatcgtggatctaatcctgatcgtggccttattgttgctttcaagactatcgctaccatggctgataggttgggacttgttgcgaccatcaaggaccgagcgaatgagatttataaaagggtagaggatcagaagtcaagtagaggaagaaatcaggatgctcttttggctgcttgtttatacattgcttgccggcaagaagacaaaccacggacggtcaaggaaatatgctctgttgccaatggagctactaagaaggagattggtcgtgcaaaagagtacatagtcaaacagttggggctggaaaccggacaattggttgaaatgggtactatacatgctggagattttatgagacgtttttgctccaatcttggtatgaccaaccaaaccgtgaaagcggctcaagagtctgtgcaaaagtcagaagaatttgatataaggaggagtcccatatcgattgcagcagcggttatatacatcataacacagctctctgatgagaagaagcctcttcgagatatatcagtggcaactggagtcgcggaaggaactataagaaactcttacaaagatctttaccctcacctttccaagatcataccagcttggtacgctaaagaagaagatctcaagaaccttcaaagcccttgagtgtcttcctcttctaatctcttactcgcaaccataccttcaagtttcgattgggattatgggttataaagttgttttgtccagaagtgcgactggaggcacgcttgaacaagagttttacagtagatttgtatcactttttcttcataaggtactatacattgttgaattaatgagatggtatttct

SEQ ID NO: 118167 - DNA, 1055 bp, Arabidopsis thaliana
  unsure (1)..(1055): unsure at all n locations
nnnnnnnnnnnnnnnnnnnnnnnnnnnnnnnnnnnnnnnnnnnnnnnnnnnnnnnnnnnnnnnnnnnnnnnnnnnccacgcgtgcgcccacgcgtccgatcgcagtgaagaaggaaggaacctaaatcggaatttgggtgctccatcaatggcttcgattttggctcgcaggtcactgaatactctccgtgctcgacatctcgttttgtcagggcaagctttacagggatctcatctgtctagactgcagtcccgtggtatatcttatggcagcaacaaagatgatgaagaagcagagcaactttctaaggaaatctccaaggactggaatactgtctttgaacggagcataaacaccctgttcctcacagaaatggtccgcggtttgtcgctgaccctcaagtacttctttgatccaaaagttactatcaattatccatttgagaagggtcctctgagccctcgcttccgtggtgaacatgctcttcgaagatatcctaccggggaagaacgctgcattgcctgcaaactctgtgaagctgtatgtccagctcaagcaatcacaatagaggcagaagagagggaagatggaagccgcagaaccactaggtacgatatcgacatgacaaaatgcatctactgtggtttctgccaagaagcttgccccgttgatgcaatcgttgaaggacctaactttgaattcgcaaccgagacacacgaggaacttctctatgacaaagagaagcttcttgagaatggagatcgatgggagacagagattgctgagaatctgaggtcggagagtctctaccgctgaaccattctacaacagtctctgcttcattcaacttgtttttcccggggaaacattttcgttgcttctgtttgaaaataaagacgagatcatatgcgtgtgaaaactcttttgtaatccagattttgtgctgtgtaattgaattgtttgtaaccaacctgactttgattttcggttcatgagttccggttattaggtgttttcggttcggagaaagagcnnnnnnnnnnnnnnnnnnnnn

SEQ ID NO: 118168 - DNA, 734 bp, Arabidopsis thaliana
cgggaaggcattaaaaccaccccttgtttccttcacaagaaaatgggtcccgcgggttttgttcgcttgacccctcaaagtactttttttgatcccaaaagttactatcaaattatccttttaagaagggtcctctgagccctcgcttccgtggtgaacatgctcttcgaagatatcctaccggggaagaacgctgcatgccctgcaaactctgtgaagctgtatgtccagctcaagcaatcccaatagaggcagaagagagggaagatggaagccgcagaaccactaggtccgatatcgacatgacaaaatgcatctactgtggtttctgccaagaagcttgccccgttgatgcaatcgttgaaggacctaactttgaattcgcaaccgagacacacgaggaacttctctatgacaaagagaagcttcttgagaatggagatcgatgggagacagagattgctgagaatctgaggtcggagagtctctaccgctgaaccatttctacaacagtctctgcttcattcaacttgtttttcccggggaaacattttcgttgcttctgtttgaaaataaagacgagatcatatgcgtgtgaaaactcttttgtaatccagattttgtgctgtgtaattgaattgtttgtaaccaaaaaaaaaaaaaaagggcggccgctctagaggatccaagcttacgtacgcgtgcatgcggcgtcatagctctatctatagtgc

SEQ ID NO: 118169 - DNA, 592 bp, Arabidopsis thaliana
ccggaatctccgggtcgacccacgcgtccggtcaatgttcttgtgagatcgaactttctctgggttcgtgcagaagctttgcttttttgagtatcgcgtttaaggcacatcgaagaagagagaccctaatttgatattttgagttctatcgatggcttcgctactagctcgcaggtcgttcagtgctctccgagctcgacatctcgctttttcagggcaaggtttacagggatctcatctctgtgggctacagtcccgtgctatatcttatggaagcaacaaagatgatgaagaagctgagcagcttgctaaagagatctccaaggactggagtactgtctttgaacggagcatgaacaccctatttctcactgaaatggtcaggggtttgtcactgaccctcaagtacttctgtgatccaaaagttacaatcaattatccttttgagaagggtccattgagccctcgcttccggggtgaacacgctcttcgaaggtatccaactggggaagaacgctgcattggctgcaaactctgcgaagctggatgatccagctcaagcaatcaccattgaggcagaggagcgggaaga

SEQ ID NO: 118170 - DNA, 1140 bp, Arabidopsis thaliana
gtcgtctcttgttccttccgctgccaacaaaatggagctgtcgtctgcgtccgccatattaagccactcctcctccgccgctcagcttctcagacctaagctcgggtttattgatttgcttcctcgtcgagcgatgatcgtttcttctccttcttcttcgcttcctcgatttttgcggatggaatctcaatctcagcttcgccaatctatctcttgctctgcttcttcttcttcttctatggcattaggtagaattggagaagtaaagagagtaacaaaggaaacgaatgtttcagtgaagattaatttggatggtactggagttgcagatagttctagtggaattcctttccttgaccatatgttagatcaacttgcttcgcatggcttgtttgatgtgcacgttagagctactggtgatgttcacattgatgatcatcacactaatgaagatatagctcttgccattggaactgctctattaaaggctcttggtgagcgtaaagggattaaccggtttggtgacttcacagctcctctagatgaagcgcttatacatgtttccttggacttgtctggtcgaccatatcttggttacaacttggagataccaactcagagagttggaacatatgatactcagttggtggagcactttttccagtcgttggtgaatacttctggtatgactcttcacattcggcagctcgctggtgaaaactctcatcacataatagaggcgacgtttaaggcgtttgccagagctctacgacaagcaacagagactgatccacgccgtggtgggacaataccaagttcaaaaggagtcttatcacggtcttgaaagctaatcaaacacacaagacagttcccagattcacacttcatcgtcgagttcatgagccatcgtcaattctcttatggtaccaaatgccaagcctgttggatcttgctgttccattccattacagaagcacaaagagcaaaatgtgaaaatagattagagatcacacagttcagaagatcataggctcatctttatattaatctgttgttgcagagtgtattaaacctcttaccattgctgtatcatcatcaactgagaacttactgtgagttgaagtgactgtaatttgcttt

SEQ ID NO: 118171 - DNA, 984 bp, Arabidopsis thaliana
ccacgaatcaaagatggcttttgccattgcttctgctctcacttccacactcacattatccacgagcagagtccaaaatcctacccagagaagaccacatgtagtagcgtccacatcatccaccggtggaagattaatgagagagcgcttggtggtggttcgtgccggcaaagaagtttctagcgtctgtgaaccacttcctccggaccgtcctttatggttccctggtagctctccacctgaattggctcgatggcagcttacctggtgattttggttttgatccttttggtttagggtctgatccggacaccctcaaatggtttgcacaagctgagcttatacatagccggtgggcaatgctggccgtgaccggtatcataataccagaatgtctcgagcggttaggtttcattgaaaatttctcatggtatgacgcagggtctcgtgagtacttcgcggattccactacgctgtttgtggctcaaatggttttaatgggctgggcagaaggtagaagatgggctgatttgattaaaccggggtctgttgacatagaaccaaagtacccgcataaagtaaatcctaaaccggatgctggttaccctggaggtttgtggttcgattttatgatgtgggggagaggttctcctgaaccggtaatggttttgaggactaaagagattaagaacggcaggctagcgatgttggctttccttgggttctgtttccaagctacctacactagccaagatccaattgagaatctcatggctcatctggctgatcctggtcattgcaacgtcttttcggcatttacatcacattaatgaggattagcttggggcgaatataatattttttatatatttatggatgttgaacttttgtatagtgtcactcgccgttgttacaacttctgcttacttaattaacatgtaaaatatattttatatatatgtagaagaaagaaacaagaagaga

SEQ ID NO: 118172 - DNA, 1289 bp, Arabidopsis thaliana
accgaaaaaaaaaaactgtccatgtaccacaccatgagattagttgtcagatagatattcgcgagacgagaagctccaattaaaaaccctagagctcatctctctctccaggtacggccttttcgtttttggctttcaccggcgtggatctccggtgacggggagattcggaatttcggagagattttagatcatgtatagggagagaggtatggttggatcgaagtcggaggtggtcgatcggaaacgaataaacgagattcacgataacaggccttcgcattcgatgtctcagcctgtcaatggaaaaggcaaggtaacatcgacctccgttttgatggggaagcagcaattgcatgataaggaatcttcacgttctggttctatctctaagactaacatttccgacgctgtggatatatcagacacagacagcgaagaatcagaggtcagtggttctgatggagaggacacctcgtggatatcttggttctgcaaccttcgtgggaacgagttcttctgtgaagttgatgatgattacatccaggatgactttaacttgtgtggactcagccatcaagttccttactacgactatgcccttgatttgattttggatgtggagtcttcgcatggtgagatgtttacagaggaacagaatgaattgatcgagtcagcagcagagatgctatatggaatgattcatgctcgtttcatattgactagcaaagggctggcttctatgttagacaaatacaaaaactatgactttggaagatgcccaagagtttattgttgtggccaaccttgtttaccagttggtcaatccgatatccctagagcaagcaccgtaaagatatactgcccaaaatgtgaagatgtctattacccacgatcaaaataccaaggaaacatagatggagcttactttgggacaacgtttccacatctgttcttgatgacgtacgggcatctgaagccacaaaaggcatcacaaagctacactcaaagagtgtttgggttcaagctacacaagccgtgaaggaaacaaggaagaagaaatgcacccttgggttttgagaaacaagaaatgtgtgtaaacaaaacaaaaagaaaaagaccatttgtcatcacagaaggtgaaactagttccatctctctctctctctctctttctttgtttttggtattgtgtttaggtttagataaaacattagcagcatggactggtgaactgaaatcccatattattgtaatactttaccttattgttcttttttgctttctta

SEQ ID NO: 118173 - DNA, 2040 bp, Arabidopsis thaliana
  unsure (1)..(2040): unsure at all n locations
acacggacgcgtgggcccaaaaccgatccaaattccgagaaagacaaccaaattttccttttcctctgcaaaaatgtttattgagagcttcaaagttgagagcccgaacgtgaagtacacagagaatgagattcactctgtgtacgattacgagacgacggaggttgttcatgagaagaccgtcaatggcacttaccaatggattgtgaagccaaagactgtcaaatacgatttcaaaaccgatattcgtgtccccaaattaggggttatgcttgtgggtttgggaggaaacaatggatcaactctcaccgctggtgtgattgcgaacaaagaaggaatctcgtgggcaacgaaggacaaagtgcaacaagcgaattacttcgggtcactaactcaagcttcatcgattcgtgtcggatcttttaacggtgaagagatctatgctcctttcaagagtctccttccaatggtgaatccggatgatgttgtgtttggaggatgggatataagtgacatgaacttagcagatgccatggctagagccagggttcttgatatcgacttgcagaaacagctcaggccttacatggagaacattgtgccactccctgggatcttcgatcctgatttcatagctgctaatcaagggtcacgtgctaaccacgtgatcaaaggtaccaagaaggaacaagtcgaccacatcatcaaggacatgagggagtttaaggagaagaataaggtggataaggttgtggttctctggacggctaacacagagcgttatagcaatgtggtcgttgggatgaacgatacaatggagaatctcatggagtctgtggatagggatgaggctgagatctctccttcaacactttatgcgattgcttgtgttcttgagggaatcccgttcatcaatggaagccctcaaaacacctttgttccaggtctaattgatatggcgatcaggaacaatgttttgatcggtggagatgatttcaagagtggtcaaaccaagatgaaatctgtcttggttgatttcctagttggcgcaggaatcaagcctacttcaattgtgagctacaatcacttgggaaacaacgatggaatgaatctctcagctccacagactttcagatctaaggagatctccaaaagcaatgtcgtggacgatatggttgctagcaatggtatcctctttgagcctggggaacacccggaccatgttgttgtcatcaagtatgtaccgtatgttgcggatagtaagcgagccatggacgagtacacatcagagatattcatgggagggaagaacacaattgtgatgcacaatacctgcgaggactctctcttagctgctccaatcatcttggatcttgttctcctcgcggagctcagcaccaggatccagttcaaatccgagggagagggaaagtttcactctttccatcctgtggccaccatactcagctacctcaccaaggcaccacttgtaccgccgggaactccggtgattaacgcactgtcgaagcagcgggctatgctggagaatattatgagggcgtgcgttggactggctccggagaacaacatgatcatggaattcaagtgaacatgaagaagcatgaatctaagacctttaattagctcataatttaagagtctttaatttgtgtcgttgtttggtttttatataatgtttttaaattatgaaagcttgtgtttctgagagaccaaagagcttttagtttggtctctgtagggtgtgaagtaacttgtatttgtagtaatccggatgggttggtatattttgcaagtgtgtctaggttggaccataatttcaatatctcttatgattttgtttcatatgtttgtaaaacagcttatcttttgagatatataatcatggttttggttccaaaaaaaaaaaaaaaacccacacgtagctcnnnnnnnnnnnnnnnnnnnnnnnnnnnnnnnnnnnnnnnnnnnnnnnnnnnnnnnnnnnnnnnnnnnnntagaatnnnnnnnnnnnnnnnnnng

SEQ ID NO: 118174 - DNA, 1931 bp, Arabidopsis thaliana
  unsure (1)..(1931): unsure at all n locations
gtctatatatccacgctcttgttcgncgtttctagatcacacagtgtgagtaatttagcaaagcttttcaaaaaccagagaaaatgttcatcgagagcttcaaagttgagagcccaaatgtcaaatacacagagaatgagatcaattcggtgtacgattacgaaacaacagaggtcgtccatgagaatcgtaacggtacatatcagtgggtcgtgaagccaaagactgtcaaatacgatttcaaaacagacactcgtgtccccaaattaggggttatgcttgttggttggggaggaaacaatggatcaacactaaccgctggtgtcattgctaacaaagaaggaatatcgtgggcgactaaagacaaagtgcaacaagctaattactttggttcacttactcaagcttcttcgattcgtgttggatcttacaatggtgaagagatctacgctcctttcaagagtcttcttccaatggtgaatccagatgatgttgtgtttggtggttgggatataagtgacatgaatttagcggacgctatggctagagctagagttcttgacattgatctgcagaaacaacttagaccttacatggagaacatgatcccgcttcctggtatctatgatcctgatttcattgctgcgaatcaaggttcacgtgctaatagcgtgatcaaaggtaccaagaaggaacaagttgatcacatcatcaaggacatgagggagtttaaggagaagaacaaagtggataagttggttgtgttatggactgcaaacacagagcgttatagcaatgtgattgtaggacttaatgatacgacggagaatctattggcttctgttgaaaaggatgagtctgagatctcgccgtctacgttgtatgctattgcttgtgttcttgaagggatccctttcatcaatgggagtcctcagaatactttggtccccggtcttatcgagttggctatatcgaataattgtttgatcggtggagatgatttcaagagtggtcagactaagatgaaatccgtttgggttgatttccttgttggagctggcattaagcctacttctattgtgagctataatcatttgggaaacaacgacgggatgaacctctcagcgccacagactttccgctctaaggagatttcaaagagcaatgttgtagatgacatggtagctagtaatggcatcctctttgagcctggtgaacaccctgaccatgtcgttgtcatcaagtatgtaccatatgttgcggatagtaaaagagcaatggatgagtacacgtctgagatattcatgggagggaggaacacaattgtgttgcataacacttgtgaggactctctcttggctgcaccaattatcttggatcttgtccttctcgctgaactcagcaccagaatccagtttaaagctgaaggagaggggaagtttcactctttccacccggtagctaccatactcagttacctcacaaaggcacctcttgtaccgcccggaacagcggtggttaacgctctgtcgaagcagcggccaatgctggaaaacattcttagggcatgtgttgggcttgcgccagagaacaacatgatcatggagtacaagtgaaggatgaggaagaagaagtaaaggtacctaataagaccttaggatatgaagaacactgctccattgtttcattaatatatatcattttgtatgtatattatatgaatgtgtgtgtgagagataatatggataagcttagggttattttgtgtgatatggatctggtcggtttatttggtgagaaaattagccaaggttttggatcacatgtgtaaaagattaagtaattatgcttgtgtctccttgtaatataaccaaacttatgatctaaaaaaaaaaaaaaaaaaaaaaaaaaaaactaaattactcacactg

SEQ ID NO: 118175 - DNA, 688 bp, Arabidopsis thaliana
aatccgagggagaggttcgtcagttcacagtacatgttattttgggttctctgttttcactgaaccgcggttttgatgttttgaaacatctttttggcagggaaagtttcactctttccatcctgtggccaccatactcagctacctcaccaaggcaccacttgtaccgccgggaactccggtgattaacgcactgtcgaagcagcgggctatgctggggaatattatgagggcgtgcgttggactggctcccgaggacaccattgttcatggaattcaagtgaaccatgaagaagcatgattctaagccctttaattagctcataatttaagagtctttaatttgggtcgtggtttggtttttatataaggtttttaaattatgaaagcttgtgtttctgagagaccaaagagcttttagtttggtccctctctgtagggtgtgaagtaacttgtatttgaagtaatccaaaacaggttggtatattttgcaagcccctgtgtctaggtcctggaccacctaatttcaaaatctcttatgattttgtttcatatgtttgtaaaacagcttatcttttgagatatataatcatggttttggttccaaaaaaaaaaattaaaaaaagaataaacacaagggcggaccgctctagaggatccaagcttacgtacgcgtgcgtgcgacgtc

SEQ ID NO: 118176 - DNA, 443 bp, Arabidopsis thaliana
gttcacagatttacaaagaaacttgtcttcacgttaatcacgccacgtgtctgaacccaatttccaacgtgtctctcacattctcgaattcgactcttttagtggttctcgtcctctctgggcttttagactgggctcgaaccatctccattccaccgataacatcgaaacccgccacgtgtcctccctcctctgtctctcgtctatatatccacgctcttgttcgtcgattcgagatcacacacacaaccaccaaacacaaagcttttcaaaacccagagaaaatgttcatcgagagcttcaaagtagagagtccaaatgtcaaatacacagagaatgagatcaattcggtgtacgattacgaaacaacagagtgtcgtccacgagaatcgtaacggtacatatcaatgggtcgtgaagccaaagactgtcaaatacgattt

SEQ ID NO: 118177 - DNA, 1855 bp, Arabidopsis thaliana
  unsure (1)..(1855): unsure at all n locations
nnnnnnnnnnnnnnnnnnnnnnncnnnnnnnnnnnnnnnnnnnnnnnnnnnnnnnnnnnnnnnnnnnnnnnnacctacgtcagggcaaatctctatctctctccattagagcttgaagcagccatagcctaacaaaaccttcaacaatggcttcaatggctgccgtcttaagcaaaactccattcctctctcaaccactaaccaaatcatctccaaactccgatctccccttcgccgcggtttccttcccttccaaatccctacgccgccgcgtaggatcaatccgagccggattaatcgctcccgacggtggtaagcttgtagagctcatcgtggaagagccaaagcggcgagagaagaaacacgaggcggcggatttgccacgtgttgagctgacggcgattgacttgcaatggatgcatgtattaagcgaaggctgggcaagtccactcggaggtttcatgagagaatccgagttcctccaaactcttcattttaactcgctacgtcttgacgacggctccgtcgttaacatgtccgtgcctattgttctcgctattgacgatgaacaaaaagcacgtatcggcgagtctacacgtgtcgctcttttcaattccgatggtaaccccgtcgctatcctcagcgatattgagatttataagcatccaaaggaagaaaggatagctagaacatggggtacgacggctccaggtttgccttacgtagacgaggcgataactaatgctggaaactggctcattgggggtgatcttgaggttcttgagccagtgaagtacaatgatgggcttgatcgtttcaggctttcgcctgctgagttacgtaaagagttggagaagcgtaatgcggatgcggtgtttgctttccagctgaggaatcctgttcataatggtcatgctcttcttatgactgatactcgtaggagacttcttgagatgggttacaaaaaccctattcttttgcttcatccgttaggtgggtttacaaaggctgatgatgttcctttagattggaggatgaagcaacacgagaaggttctagaggatggtgttctcgatccggagactacagtggtttcgatattcccgtcacctatgcattacgctggtccaaccgaagtgcagtggcacgcaaaggctagaatcaatgctggtgctaacttttacattgtgggtcgtgatcctgctgggatgggtcatccagtagagaaacgtgatctttacgatgctgatcatggaaagaaagtactaagcatggcaccaggactcgaacgactcaacatccttcctttcagggttgctgcatatgacaagacgcaaggcaagatggctttcttcgatccctcgaggcctcaagatttcttgttcatctccggcactaagatgcgcacattggcaaagaacaacgaaaacccgccagacggttttatgtgcccaggtggatggaaagttctggtggattactatgagagcttgactccggcgggtaatggtagactaccagaagtggttccggtgtaagacaaaactgttcgtttcaaattgtaacgtttgtgttgtgaagccttgtagcaacaatcattgttgtattgggagagaagcctatgtataatctggcttgacctttttccaaataaaatacagaagaaaaaagactgttttcgtttgcaagataatttacgaacttgtaatatttgtgctcaacttgtacatatatgaacgatgtacgattgtttttacatataaaaaaaaaaaaaaaaaaaaaaaaaaaaagggcggccgctctagaggatccaagcttacgtacgcgtgcgtgcgacgtcatagctcttctagag

SEQ ID NO: 118178 - DNA, 1129 bp, Arabidopsis thaliana
tttttttttttttttttttaatctggaacacttggtacgaaattaaaacagaaacaacaaggtacatagaatgatcgagtactggaacaagataacaactgctatttcttcattttcattgaactctatcaatagcaaataaaacatccgagagaacgaaccacaatatccagtttcagagaaggaacatagttactatgggacgagagcttctacataaccgggttaaggagtataccgaacttggacaaaagcagatatgtgatatcagatcaatccatccttcccttcaggattctctccttcacctcctttggtgttacaacgtagacatgtcctccccacccactaagacaatcgcggtcaactgaagagagaagtgcttgtgaaattgtctcgaatagttcctcagcttccatatctggtttgaacatggcttcacaggcaccatatagagattctgaagcagttcccgagacaacaaaatctttagctaactccttggctccaatagaatccatagtgcaaatgaagggtttgttatcatctcccaatccagcaatcacaggttggcacaagaatgggccaaatcttttctcataaagaatagccgatacaagactagcgaaagtttcaggcttcatgtctctttcttccctaagctgatataacttatgacgaaatacgagtcgctggtacaatgtctggacatcggtggcgagaccggaaagtccgatgaagagatgatcgtggatcttagatattctctgaaaatcggtagcaatggtttgtaattgcacaccaagcctccgatcactagctatagcgaagcaattcttccctaccatagctacgacggcacttccattgtactcgaagatcgacatcgctcgtgccgaattcggcacgagtggcacgcaaaggctagaatcaatgctggtgctaacttttacattgtgggtcgtgatcctgctgggatgggtcatccagtagagaaacgtgatctttacgatgctgatcatggaaagaaagtactaagcatggcaccaggactcgaacgactcaacatccttcctttcagggttgctgcatatgacaagacgcaaggcaagatggctttcttcgatcc

SEQ ID NO: 118179 - DNA, 1601 bp, Arabidopsis thaliana
caacaaattcacattcctctctgtttttttgttttcgattctccttcttcaatggcttccatgtccaccgacttccccaaaccaacctctttcatctctcaacctctaacaaaatctcacaaatccgattccgtaaccacatccatttcattccctgcgaattcgaaaactcgtagcttaagaaccatctctgtacgagctggcttaatcgagccagatggtgggaaacttgtggatcttgttgtaccggaaccgagacggcgagagaagaaacacgaagcggcggatttgccgagagtgagattgacggcgattgatttgcaatggatgcatgtgttgagtgaaggttgggctagtcctcttcgtgggtttatgagggaatctgagttcctccaaactcttcatttcaatttgttgaatctcgatgatgggtctgttgttaatatgtctgtgcctattgttcttgcgattgatgatcaacaaaaagccctaatcggtgaatctaaacgtgtctcccttgttgattctgatgataatccaatcgctattctcaatgatattgagatttataaacatccgaaagaagagcgaatagcgagaacttggggtacgactgcaccgggtttgccttatgtagaagaggcgataaccaatgctggagactggctcattgggggtgatcttgaggttttggaacctgttaagtacaatgatgggcttgatcgtttcaggctttccccgtttgaactgcgtaaggagctagagaaacgtggtgcggatgcggtctttgcgtttcagcttaggaacccagttcataatggacatgctcttcttatgactgatactcgtaggagacttcttgagatgggttataaaaaccctatccttttgcttcatccattgggagggtttacaaaagctgatgatgttcctctaagctggcgaatgaaacagcacgagaaggtgctagaggatggtgttcttgatccagagactactgtggtttccatattcccatctccaatgctctatgctggtccaaccgaagtccaatggcacgcaaaggctaggatcaatgctggtgctaacttctacattgtcggtagggatccggctggaatgggtcatcccgtggagaaacgtgatctgtacgatgctgatcacgggaagaaagttctaagcatggctcctggactcgaacgactcaacattcttcctttcagggttgctgcgtacgataagacacaaggaaagatggctttctttgatccctcaagggctcaggacttcttgttcatttctggcactaagatgagagcattggcaaagaacagagagaacccaccagatggatttatgtgccctggaggctggaaagtccttgtggattactacgacagtttgacactaaccggaaacaccaaacttccggaaaagattccggtttaagaccgataaaaccatttatttgtttttgtttctcaacataatgattattccttcttgttgtaagatttagaaagctatatgaacaaaagtaacacaaatcttacatacatataaactaaaaaaaaaaaccagtatgaatctaacttttaatc

SEQ ID NO: 118180 - DNA, 430 bp, Arabidopsis thaliana
  unsure (1)..(430): unsure at all n locations
cttttctcataaagaatagccgatccaagactagcgaaagtttcaggcttcatgtctctttcttccctaagctgatataacttatgacgaaatacgagtcgctggtacaatgtctggacatcggtggcgagaccggaaagtccgatgacgagatgatcgtggatcttacatattctctgaaaatcggtagcaatggtttgtaattgcacaccaagcctccgatcactagctatagcgaagcaattcttccctaccatagctccgacggcacttccattgtactcgaagatcgacatcggaaaattagggtttactgagtgaagcttcgggagttttcctatcggagaagaaatctgagcaagagaagaaccgtacgcgtgggcggacggatggagccccccgggaaatccggnccggtccctgcaggcgt

SEQ ID NO: 118181 - DNA, 366 bp, Arabidopsis thaliana
agatgcgcacattggcaaagaacaacgaaaacccgccagacggttttatgtgcccaggtggatggaaagttctggtggattactatgagagcttgactccggcgggtaatggtagactaccagaagtggttccggtgtaagacaaaactgttcgtttcaaattgtaacgtttgtgttgtgaagccttgtagcaacaatcattgttgtattgggagagaagcctatgtataatctggcttgacctttttccaaataaaatacagaagaaaaaaagactgtttttcgtttgcaagataatttacgaaacttgtaatatttgggcctcaaactttgtaccatattaatgaaacgattgtttttacatat

SEQ ID NO: 118182 - DNA, 940 bp, Arabidopsis thaliana
  unsure (1)..(940): unsure at all n locations
aaggcggccccctagtgtgtcctttgcccggctccttagtcggtgatttgggttagggaaattcccagaagcgttcttgttccaatttaaaccccctaagaaagtgccccaaggaccgtcgaattcgggcaccccggccccttttaagatttttttcccatttccaaagatttaccataaggttttcgccaaagttaacgggccccatggagggttgaaggaggttttgctgatacaaccccaaacacggcggagaatttccgtgctctctgtaccggcgagaaaggaatgggaaagctaggtaagccacttcacttcaaaggatcgatcttccaccgtgtgattcccggattcatgtgtcaaggaggtgatttcaccgccaagaacggaaccggtggtgaatcgatctacggtgctaagttcaaggacgagaactttatcaagaagcatacaggagctgggattctctcaatggctaactctggtcctaacactaacggatctcagttcttcatctgtaccgataagacgtcgtggttagatggtaagcacgttgtgtttggacaagttgttaaaggcttggacgtcgtgaaggcgattgagaaagttggatctgattctggaaagacttccaaagtcgttaccatcactgattgtggtcagctttcttagatctgagtgagaaagtgagagactttgatctttatgagtaataatggtgtcttttgctttcggttgttcttcctcttaccttaatggattattctgtttagggtttgagttttcgtttcagagtttgtaacaaaacccttttgtgttttctggggtttgaaataattatgagcttacccaaaaaaaaaaaaaaaaaaaaagggcggccgctatagaggatccaagcttacgtacgcgtgcatgcggcgtcatagtncatctatagtgc

SEQ ID NO: 118183 - DNA, 893 bp, Arabidopsis thaliana
gcaggtaccggtctgggattcccgggtcgacccacgcgtccgatcttcttcatcgatttctctcttccaaatctcccaaaagatgtcgaaccctagagttttcttcgacatgagtctcagcggtactcccatcggacggatcgagatggagcttttcgctgatacaaccccaaacacggcggagaatttccgtgctctctgtaccggcgagaaaggaatgggaaagctaggtaagccacttcacttcaaaggatcgatcttccaccgtgtgattcccggattcatgtgtcaaggaggtgatttcaccgccaagaacggaaccggtggtgaatcgatctacggtgctaagttcaaggacgagaactttatcaagaagcatacaggagctgggattctctcaatggctaactctggtcctaacactaacggatctcagttcttcatctgtaccgataagacgtcgtggttagatggtaagcacgttgtgtttggacaagttgttaaaggcttggacgtcgtgaaggcgattgagaaagttggatctgattctggaaagacttccaaagtcgttaccatcactgattgtggtcagctttcttagatctgagtgagaaagtgagagactttgatctttatgagtaataatggtgtcttttgctttcggttgttcttcctcttaccttaatggattattctgtttagggtttgagttttcgtttcagagtttgtaacaaaacccttttgtgttttctggggtttgaaataattatgagcttacccaattgcttctttgtgtttttgcttctatgaacaagtagtaactgattcgtcttctgattcttcaactgaatcgtgaatcttaaaaaaaaaaaaaaaaaaaaaagggcggccgc

SEQ ID NO: 118184 - DNA, 610 bp, Arabidopsis thaliana
  unsure (1)..(610): unsure at all n locations
atcttcttcatcgatttctctcttccaaatctcccaaaagatgtcgaaccctagagttttcttcgacatgagtctcagcggtactcccatcggacggatcgagatggagcttttcgctgatacaaccccaaacacggcggagaatttccgtgctctctgtaccggcgagaaaggaatgggaaagctaggtaagccacttcacttcaaaggatcgatcttccaccgtgtgattcccggattcatgtgtcaaggaggtgatttcaccgccaagaacggaaccggtggtgaatcgatctacggtgctaagttcaaggacgaggacctttatcaaggaagcatacaggagctggggattccctcaatggctaactctggtcctaacactaacgggatctcagttcttcatcttgtacccgtaaagacgtcgtggttagatggtaagcacgttgtttttggcaagttgttaaaggtctttccccccgtagaggcggtttagnaagttggnctnnttttngaaannttccaaagtggtnccacantggtttgggaactttttaggcttgttgnaantggncttncntttttgnaaangggctttcttggttctcgc

SEQ ID NO: 118185 - DNA, 1524 bp, Arabidopsis thaliana
  unsure (1)..(1524): unsure at all n locations
nnnnnnnnnnncnnnnnnnnnnnnnnnnnnnnnnnnnnnnnnnnnnnnnnnnnnnnnnnnnnnnnnnnnnncccgccccgccgccacgcgtccggaaaaaaacagtgccctttcgctcacgctttgagtcgtatctgctctcttcttaatccgccgtctctcactttttcgccggcgtggttagatcgtacaaagctcagagagaatgttgggaatcttgaggcaaagagccatcgatggagcttcgactcttaggaggacgcgattcgcattggtttctgctaggagctatgcagctggtgcaaaagagatgacagtcagagatgctctaaattctgcaattgatgaggaaatgtctgctgatcctaaagtatttgtcatgggtgaagaggttggccaatatcaaggtgcctacaagatcactaaaggccttttggagaaatatggtcctgagagagtttacgatacccctattactgaggctggatttactggaattggagttggtgctgcctatgctggcttaaagcccgttgtagaatttatgacgtttaacttctctatgcaggcaattgatcatatcatcaattccgctgcaaagtcaaattacatgtctgctggacagataaatgtacccatcgtctttagaggacccaatggtgctgctgctggtgttggagctcaacattctcagtgctatgcagcgtggtatgcctcagttcctggtttgaaagtccttgctccgtattcagctgaagatgctcgtggtcttcttaaagctgccattagagaccctgaccctgttgtcttccttgaaaacgagttactatatggtgaatcattccctatttcagaagaagcccttgattcaagtttctgtcttcccataggcaaagccaagattgaacgagaaggaaaggacgtaacgatagtaactttctcgaagatggtcggtttcgccctcaaggcagctgagaagctcgcagaagagggaataagtgctgaggtaataaatcttcgatcaatccgtccgcttgaccgagccaccatcaatgcttcagtgaggaaaacgagtagattggtaacagttgaagaaggtttcccacaacatggagtctgtgcagaaatttgtgcgtcggttgtagaagagagcttttcgtacttggatgcaccggtcgagaggattgcaggagctgatgttccaatgccgtatgcagctaacctagagagattggctcttcctcagatagaggacatcgttcgtgcatcaaagagagcttgttacagatcgaaataaaatcgtcaacatcaacacatttcttctttgatctttaaagggaaaggaaaataagaaaaaaggagaaaaatgatctctctgtctctcacttttgctataagaaaccaccattcctcgtgatttatttcatcttttgctattattcaaaaaaaaaaaaaaaagggcggccgctctagaggatccaagcttacgtacgcgtgcatgcgacgtcaaagatcttctatagt

SEQ ID NO: 118186 - DNA, 613 bp, Arabidopsis thaliana
  unsure (1)..(613): unsure at all n locations
gaacggttgtgntancgttgaangaggttcccccactgggtcttgccagaaatttgcnncgttttagaagggggctttcgnactggntgccnccgtcgagaggattgcaggagctgatgttccaatgccgtatgcagctaacctagagagattggctcttcctcagatagaggacatcgttcgtgcatcaaagagagcttgttacagatcgaaataaaatcgtcaacatcaacacatttcttctttgatctttaaagggaaaggaaaataagaaaaaaggagaaaaatgatctctctgtctctcacttttgctataagaaaccaccattcctcgtgatttatttcatcttttgctattattctttactgcagcggttttcgtttttctttttgtcccttcccaaattgataattctaatctttggggttaattgataaaaattgatcgagaatgctagtaaaggagttcacaacacctgtttttccatcaaataatgaatgaggtgtgcctaaaaaaaaaaaaaaaaaaaaaaaaagaaaaanaaagggcgaccgctctagaggatccaagcttacgtacgcgtgcgtgcgacgtcnnnnnnntgctacctaa

SEQ ID NO: 118187 - DNA, 463 bp, Arabidopsis thaliana
gtgccctttcgctcacgctttgagtcgtctctcctctcttcttaatccgccgtctctcactttttcgccggcggggttagatcgtacagagctcagatctacggggcttttgatcctgcgattactgttgctttttgtttgttaatcagagagaatgttgggaatcttgaggcaaagagccatcgatggagcttcgactcttaggaggacgcgattcgcattggtttctgctaggagctatgcagctggtgcaaaagagatgacagtcagagatgctctaaattctgcaattgatgaggaaatgtctgctgatccctaaagtatttgtcaatggggtgaaagaggttggcccaatatcaaggtgcctacaaagattcacttaaaaggccttttgtggggaaatttggtcctgagagagtttacgatcacccctattacttgggttggatttccctggaatttg

SEQ ID NO: 118188 - DNA, 1735 bp, Arabidopsis thaliana
cggacgcgtgggcggacgcgtggggctcttcacagccattcaatctcataagacatattgccggagaaactctctcggggggtcgcttcttctgcattttctgcttcccaatggcttccagaattgctgattctctcttcgccttcacgggcccacagcaatgtcttcctagggttcctaagcttgctgcttcttctgctcgtgtttctcctggtgtatatgctgtgaagccgattgatcttctgttaaaaggacgaactcatcgaagtagaagatgtgtagctcctgtgaaaaggagaattggatgtatcaaagcggtggctgctccagttgcaccgccttcagctgacagtgcagaagacagggaacagttagcagaaagctatggattcagacaaattggagaagatcttcctgagaatgtcaccttaaaagatatcatggatacacttcccaaagaggtgtttgagattgatgatctgaaagctttgaagtctgtgttgatatctgtgacttcatacactttggggctcttcatgattgcaaaatcgccgtggtatctgctaccgttggcttgggcatggacaggaactgcaattaccgggttctttgtgataggtcatgattgtgcacataagtcattttcaaagaacaaattggtggaagacattgtgggtactctcgccttcctaccacttgtctacccatatgagccatggcggtttaagcacgaccgccatcacgccaaaaccaacatgttagttcatgacacagcttggcagccagttccgccagaggagtttgagtcatcacccgtgatgagaaaggcaatcatttttggatatggcccaattagaccttggttgtccatagctcactgggtgaactggcacttcaatctgaaaaagttcagagcgagcgaggtgaatagggtgaagataagtttggcttgtgttttcgccttcatggccgttgggtggccactgatcgtatacaaagttggtatattgggatgggtaaaattctggttaatgccatggttgggctatcacttctggatgagcacattcacaatggttcatcatacggctccgcatatacctttcaagcctgcggatgagtggaacgcggctcaggcccagctgaatggaactgttcattgtgactaccctagttggattgaaattctctgccatgatatcaacgttcacatcccgcatcatattagcccaagaataccgagctacaatctccgtgcagctcatgagtctatacaagagaactggggaaagtatacaaacttggctacatggaactggcgattgatgaagacgataatgactgtgtgtcatgtctatgacaaataggagaactacattccttttgaccggttagcccctgaagaatctcagccaataaccttcctcaagaaatcaatgcctaactacacagcctgattcgccatggtctcaaactagtcttttgaaatctcaatatctttttgcagtcgccgatgttatatgtaagctttccaagcgatgagcttctctaacacttcaccaacgctttatactgttatcttctttccaatcttatcagaagagagaaactggtcaaattatctcagcgattgcaattcttttatcagtttcttagctataagaagattgaacagtctatatagtttgcaatgtactgtaatgtgatgaaaatttagttgatgagaaaaaaaaaa

SEQ ID NO: 118189 - DNA, 2073 bp, Arabidopsis thaliana
ggtgcagagagagagagagagagagagaagcgaagacgatggcgatgatagggatgaacattattgggctattcatggttcttatgttgcttctcatctccctcatcatccttttcgcctgcaagccatggcgatatttttctcgtttccgatcctcctctcgtttttcttctaccttcaaggtgggggatttgcagagaccacttatttctgatgatggaaatttgatccaaggacaaaccagtgaggtaacaagggaatatgatttagagggagcttgctaccaaaatgatggacttttgcattcatctctgactgagggacggttttacaaacaaaggcttccttcgtcatctccccatttctcccaaggtgaaagctttgttctagaagtaatttctgaaccttctgacaatgctttggtgggccaaacgcttaaacttccagctgaaaaaggttccttggcagaagtgcaaacatatgactggcagaataacagaaatgaaaacttgcaatataatctggaaaaggatcgacttattaatctttctccgaggctcgtggaagatcaaagaagttggctgttcctggaagtcatcgcgggtcctgccattgggcttcaacatgctgtgaactccacaagttcctccaagctgccagtgaaacttggaagggtttctccttctgatttggcattgaaggactcagaagtctctgggaaacatgcacagataacatggaactctactaaatttaaatgggagctggtagatatgggtagcctaaatggaactctcgtaaactctcattcaataagtcatcctgatttaggcagccggaagtggggtaaccctgtcgagcttgcaagtgatgatataataactttgggaacaacaacaaaggtctatgtccgtatctcctctcagaatgagtttcagatacccttcaaaattggtgtggcctcagatcccatggctatgcgtcgaggaggcaggaaacttccgatggaagatgtttgtcattacaagtggccgcttcctggggctaataagtttggactgttttgtgtttgtgatggacatgggggatcaggggctgctcaatccgcaatcaaaattattccggaggttctagcgaatattttatcagactcgctgaggaaggagaaagtgttatcaaaaagggatgcttcggacgtccttagggacatgtttgctaaaacagaagctcgcctcgaagaacaccaatatgagggttgtacagctactgttctcttggtttggaaagacaatgaagaaaacttcttcgcacaatgtgccaatcttggggattcagcatgtgttatccatcttggtggcagatatatacaaatgactgaagatcatcgagtggttagcttgagcgagagaaaacgattccaagaagcaggactagccttgagagatggagagactcggctttttggtataaaccttgcgaggatgcttggagacaagtttccaaagcaacaagacagccgtttcagtgcagagccatatataagtgagcctttgcgtatcgatcaatctagtaaagacgtatttgctgtattggctagtgacggcttatgggacgtggtaagtccgaagaaagctgtgcagcttgtacttcagatgagagataaagagagagggagagagagtagtgcggagaagatagcaaacggtctgctgaatgaagctagagcgatgcgtacaaaggacaacacctccattatttacttagatttcgatacttccctgtaatgttaggaaacatcttttaagatatttgggaagtgtctttcttttgtgtaccatctttttatgtattagtatttttgttagggtataagagagacaaaaaaacctcagatgcagagatttaggatggatcgtcttggtgagcgacattggtttcattatctttacttatataattaataatattatcagttaaaaaaaaaaaaaaaaggaaaaaaaaaaaaaagggcggccgctctagaggatccaagcttacgtacgcgtgcatgcaacgtcatagctgttctatagt

SEQ ID NO: 118190 - DNA, 1393 bp, Arabidopsis thaliana
cttaactaaaaaagaatcgacacacaaaaagagagagtttataaaatacacgataatatcaaagttaaacacacaccaaccaagtaaacaagatacaacacaattggaatctttcttctttgacaaaaaaaaaaggaatctctctctttctctgattctctcatgtccatgcaacaagaaacgtctcacatgacggcggctccacagaccaacggccatcaaatcttccctgagattgacatgtccgccggcgattcctcctccatcgtacgagctacagtcgtccaagcctctacagtcttctacgatactcccgccacgctagataaggcagagagactgctttctgaggcagcggagaatggatctcagctagtggtgttcccggaggctttcatcggtggatatccacgtggctctacctttgaattggctattggttctcgtaccgctaaaggacgagatgactttcgcaagtaccatgcttctgccattgatgttcctggccctgaagtggaacgattagcgttaatggccaagaagtacaaagtatacttggttatgggtgtgatagagagggaaggctacacgctatactgcaccgttcttttcttcgattcacaaggtctgttcttaggtaagcaccgcaaactcatgcctacagctcttgaacgttgcatttggggatttggagatggatcaaccatccctgtgttcgatactcctattgggaaaatcggtgctgctatttgttgggaaaataggatgccttctttgagaaccgcaatgtatgccaaaggcattgagatttattgtgcacctactgctgattcaagagaaacttggctagcatcaatgactcatattgcacttgagggtggatgttttgttttgtcagctaaccagttttgtcgtcggaaagactatccttctccgccggaatacatgttttccggttcagaagagagcctaacaccggactctgttgtctgcgctggtggaagctctatcatttcacctttgggaattgttttagctggaccaaactatagaggagaagctcttatcacagctgatctagatcttggggacatagcacgagccaagtttgattttgatgtggtcggacattactcgaggcctgaagtgtttagcttgaacataagggagcatccgagaaaagcggtcagcttcaagacgtcaaaggtaatggaagatgaatccgtctaacaaatgatcatttgttagacccaaactttctctgtaatttgatgaagtttatctgtagtaaacttcaagacttgtgttgtaattgaaatcgataaaaaaatctaaaccgttagattgagtgttgtcttctattcctcgtttatactatgcttggttctgctca

SEQ ID NO: 118191 - DNA, 1895 bp, Arabidopsis thaliana
  unsure (1)..(1895): unsure at all n locations
acgcgtccgagatcgcgtgggatcactttcctcgatctcactttctctctcttatcatcatctcctggtattctctctctctcatctccgtgatggtgctctcccacgccgtatcggagtcggacgtctccgtccactccacattcgcatcacgttacgtccgtacttcacttcctaggttcaagatgccggaaaactcgattcctaaggaagcggcgtatcagatcatcaacgacgagctgatgcttgacgggaatccacggttgaacttagcctcctttgtgacgacatggatggagcctgagtgtgataaactcatcatgtcctccatcaacaagaactatgttgacatggacgagtaccccgtcaccaccgaacttcagaaccgatgtgtgaacatgattgcacatctattcaatgcaccgttagaagaggcggagaccgccgtcggagtaggaaccgttggatcatcggaggccataatgttggccggtttggccttcaagcgtaaatggcagaacaagcgcaaagctgaaggcaaacccgtcgataaacccaacattgtcaccggagccaatgttcaagtgtgttgggagaaattcgctaggtactttgaggttgaacttaaggaagtgaaattgagtgaaggatactatgtgatggaccctcaacaagctgttgatatggttgatgagaacaccatttgtgttgcggccattcttggttccactcttaatggagaattcgaagatgttaaactcttgaacgatctcttggtcgaaaagaacaaagaaaccggatgggatacaccaatccacgtggatgcggcaagtggaggattcattgcaccgtttttgtatccggaattggaatgggactttagacttcccttggtgaagagtatcaatgtgagtggtcacaagtatggacttgtgtacgcagggattggttgggtgatctggagaaacaaagaggatttgcctgaggaactcatcttccatatcaattatcttggtgctgaccaacccacctttactctcaatttctccaaaggttcaagtcaagtcattgctcaatactaccaacttatccgattgggccacgagggttacagaaatgtgatggagaattgcagagagaatatgatcgtcctaagggaaggacttgagaagacagaaaggttcaacatcgtctcaaaggacgagggagtgccacttgtcgctttctccttgaaagatagcagctgtcacactgagttcgaaatctccgacatgcttcgcaggtatggatggatagtgccggcctacacaatgcctccaaatgcacaacacatcactgttcttcgtgtggttatcagagaagatttctcgagaacactcgctgagagacttgtgatcgatatagagaaagtgatgcgtgagctcgatgagcttccttcgagagtgattcacaaaatatcacttggacaagagaagagtgaatctaacagcgataacttgatggtcacggtgaagaagagcgatatcgacaagcagagagatatcatcactggctggaagaagtttgtcgccgacaggaagaagacgagtggtatctgctaatcgaaatatatttacttcaaatgtttgaagacttttattaataatgcataattgcattgatttggatatttgaatgtttcattcccctttatcgctgaaccaagtttcatttccctttattgctgaagtaagtttcatttccctttattactgaaccaagtttcattcgactttgatttgtaatatcttttgatattnnnnnnnnnnnnnnnnnnnnnnnnnnnnnnnnnnnnnnnnnnnnnnnnnnnnnnnnnnnnnnnnnnnnnnnnnnnnnnnnnnnnnnnnnnnnnnnnn

SEQ ID NO: 118192 - DNA, 4242 bp, Arabidopsis thaliana
gaaaaacgaaactcatcgaacaaatttcgaggctttgcttcttgaatctcacaagaagccgtacagtttctcagctttctagtgttttctcgggtagaagagagatagagagacagagcaaagcctaataagcgatggggaacaagagattcaggtctgataataatgcagggaaaccaacttccgtcgaagctactaggatttgggcgactaaggtcatcgaagactttcgagcctctgggaacgaagtttacacgtttgagcataatctatcaaataacgaacgtggagtgattcatcagatgtgcaggaaaatgggtattcaatcgaaaagttctgggcgtggggaacaaaggcgtctttcgatattcaaaagtaggcataagaatggaaacaagaatgaagctaatgagaaatcaaataaagagaagctcaaatgtgtgtcatttccgccgggagcagatgttattctgcaggagttatttactcattacccaccttgtgatggagatacggctgcaacatcgtttaccaagtactctggtaacaagggtaaacaaggacaatggaaagatgattttttccggaaaccacagattagcagtgaggagattctagaaaaagtggcatctttgagttctagacttaagaaggataaagctcttaaggagatcactaagctgcggtcaaagcttcccatcacatcctttaaagacgcaattacatctgcagtggaatccaatcaggttattctcatttctggtgaaactggttgcgggaaaactactcaggtgcctcaatatcttttagaccatatgtggtcaagcaaaagagaaacttgcaaaattgtttgcacccaacctcgtcggatatccgccatgtcagtttctgaaagaatatcttgtgaaagaggtgaaagcattggagaaaacattggttacaaggttcgactccaaagcaaaggtggaaggcactcatcagttgttttctgcacgaatggtattctcctgagggtgcttgtaggaaaaggctctgttagcagtgtttccgacataactcacatcattgtggatgaaatccatgaaagagattgctattctgatttcatgttggcaattataagggatttgcttccatcaaatccccatctccgtctgattctcatgagtgctacgcttgatgctgagagattttctggatattttggaggttgcccggttgtccgtgtccctggattcacttatccagtgagaaccttatatttggaggatgtgctctctattctgaaatcaggtggagataatcatctaagctctaccaacttgagtatatcagaccacaagcttgatttgacggatgaggataaacttgctttagatgaagcaatcatcttggcttggacaaatgacgagtttgatgccctcttagatctagtttcttctagaggaagtcatgagatctacaattatcagcaccaatcaacctggctaacaccactaatggtctttgctggaaagggcaggatcagtgatgtctgcatgctcctctcctttggtgcagattggagcttaaagtctaaagatggtatgactgcattagaattggctgaagcagagaatcaactagaagctgctcaaataatcagggagcatgcagacaattcccagtctaattctcagcaaggacaacagttacttgataaatacatggcgacaatcaacccagagcaggtcgatgtgagtcttatacaacagttaatgaggaaaatatgtggcgattcagaagacggtgcgattcttgtttttctacctggatgggatgatataaataaaacaagacagagattacttgagaaccctttctttgcagatagtgctaaattcgacattatatgtcttcactcaatggttccagcaggggaacagaagaaagtttttaatcgcccccctccaggttgtcgcaaaattgtgcttgcgacaaatattgctgaatcagcagttaccattgatgatgtggtttatgtgatagatagtggccggatgaaggaaaagagctatgatccttataataatgtttcaactctccaatcttcttgggtatcaaaagcaaatgcaaaacagcgtcagggtcgagcaggccgctgccaacctggcatttgttatcatctctattctagacttcgggcagcctctatgccagattttaaagttcctgaaatcaagaggatgccggtagaagaactctgcttacaagttaagatacttgatccaaattgtaaaacaaatgatttccttcagaaactgttggacccgcctgttgatcaaagtattgcaaacgccttaagcatactacaggatattggtgccctgacacctcaggaagagctgacagaacttggagagaaatttggtcatctcccagttcatcctctgattagcaaaatgctattcttcgctgtgttagtaaactgtctggatccagcacttactctggcatgtgcagcagactacaaggaaccatttacgatgcccatgtcgcctgttgaaagacagaaagctgctgctgcaaaacttgaacttgcatcactttgtggaggtgacagtgatcaccttgcagttgttgctgcctttgagtgctggaaaaacgcaaaaggaagaggtctttcagcagagttttgctctcagtactttgtctctccaagtgctatgaagatgttggatcaaatgcgtagccaacttgagtcggaacttaaaagacatgggattattcctaacgacatttcaagttgtagccaaaattcgcgtgatcccggtatactccgtgctgtgctagcagtaggattgtatcctatggtgggaagattgtgcccagcttttggtaataatcgaagaactatagtagagactgctagtggtgctaaagttcgtgtccattcgctgtcaaacaacttcaacttgtcgtctaaaaagtatgatgaatctttactcgttttcgatgagatcactcgtggagatggaggcatgcacataagaaactgtactgttgctcgtgatcttcctttgttacttatctcaacagagatagctgtggcccctacagggagcagtgattctgatgatagtaatgaagaagaagaagatgatgaagaagcagcagctaatactaatgaagaaggaatggacatacataaagaagagagtaggcgtggagcgaaaatgatgtcttcacctgaaaattcagtcaagttagtagttgatcgctggctgcctttcagaaccacagcccttgaagttgctcaaatgtacattttgcgggaacgactaatggcttctattttattcaaggtaacacatccacgggaacatttgccacctcatctcggagcttctatgcatgcaatagctggtattctctcatatgatggtcatgcaggactttcatgtccaccggagtctatggtaccaaaacattcaaggactgagatgtatgataccggtggatgggaagagaaaccaaactctttccttaactcactcttttggtctctgagtttgaaagagaacaagcatcctagtcccacgaataggaatcagcagcataactacaacatggctccaacagaagctgcatcgatacctaggcagcaaaactataagcaaagaaatcccaaagcaaccaacaataccgattcgggtaagaagaaagagaagatgtttgttaatcccaccaataggattaaccagcctgaagctgcttctacgggtaagccatcaaagcacaaatcagccaacagttcgggttcgagtaacaagaaagagaacatgccttctgatcaggcctatgggaataagcaacataacacagttccaagagaagctgccgcaccaatggcgaagaatcaaagcagtaagaaaaccaagaccaggtcaggcaacaactcggattcgggtaagaagaaagaacagtatattccaaagaggcaacgcgaagacaaagcagaacagaagtgagatgcatgaaaagagattgtttttggttttgggttttggtttgggtttgggtttgggtcccatgaaagcagaggaattgatgatgtataaaaaattcatgtttggatccatgtctcttcggtggttcttggctcaaagtgtttctatttatctaatcatgaaacggagtttttaacggtttcatgttgctctaatatgttccagagtattgtaactattgttgttgttactc

SEQ ID NO: 118193 - DNA, 2763 bp, Arabidopsis thaliana
cagacgcgtgggtccgtagctttggaagatcccacaaaaacacattccatgcatcatatccttctctctctctctcttctttctcaaagagtaaaatgaaacacaatctctgatgtgaagtcggttctgtccttataaatacccattaagacttctctctctctctctttctcaccaaatagtttcatcatctcttcttcactaaatacttagacagagaaaacagagctttttaaagccatgtctcttcagtatcatgttctaaactccattccaagtacaacctttctcagttctactaaaacaacaatatcttcttctttccttaccatctcaggatctcctctcaatgtcgctagagacaaatccagaagcggttccatacattgttcaaagcttcgaactcaagaatacattaattctcaagaggttcaacatgatttgcctctaatacatgagtggcaacagcttcaaggagaagatgctcctcagattagtgttggaagtaatagtaatgcattcaaagaagcagtgaagagtgtgaaaacgatcttgagaaacctaacggacggggaaattacgatatcggcttacgatacagcttgggttgcattgatcgatgccggagataaaactccggcgtttccctccgccgtgaaatggatcgccgagaaccaactttccgatggttcttggggagatgcgtatctcttctcttatcatgatcgtctcatcaatacccttgcatgcgtcgttgctctaagatcatggaatctctttcctcatcaatgcaacaaaggaatcacgtttttccgggaaaatattgggaagctagaagacgaaaatgatgagcatatgccaatcggattcgaagtagcattcccatcgttgcttgagatagctcgaggaataaacattgatgtaccgtacgattctccggtcttaaaagatatatacgccaagaaagagctaaagcttacaaggataccaaaagagataatgcacaagataccaacaacattgttgcatagtttggaggggatgcgtgatttagattgggaaaagctcttgaaacttcaatctcaagacggatctttcctcttctctccttcctctaccgcttttgcattcatgcagacccgagacagtaactgcctcgagtatttgcgaaatgccgtcaaacgtttcaatggaggagttcccaatgtctttcccgtggatcttttcgagcacatatggatagtggatcggttacaacgtttagggatatcgagatactttgaagaagagattaaagagtgtcttgactatgtccacagatattggaccgacaatggcatatgttgggctagatgttcccatgtccaagacatcgatgatacagccatggcatttaggctcttaagacaacatggataccaagtgtccgcagatgtattcaagaactttgagaaagagggagagtttttctgctttgtggggcaatcaaaccaagcagtaaccggtatgttcaacctataccgggcatcacaattggcgtttccaagggaagagatattgaaaaacgccaaagagttttcttataattatctgctagaaaaacgggagagagaggagttgattgataagtggattataatgaaagacttacctggcgagattgggtttgcgttagagattccatggtacgcaagcttgcctcgagtagagacgagattctatattgatcaatatggtggagaaaacgacgtttggattggcaagactctttataggatgccatacgtgaacaataatggatatctggaattagcaaaacaagattacaacaattgccaagctcagcatcagctcgaatgggacatattccaaaagtggtatgaagaaaataggttaagtgagtggggtgtgcgcagaagtgagcttctcgagtgttactacttagcggctgcaactatatttgaatcagaaaggtcacatgagagaatggtttgggctaagtcaagtgtattggttaaagccatttcttcttcttttggggaatcctctgactccagaagaagcttctccgatcagtttcatgaatacattgccaatgctcgacgaagtgatcatcactttaatgacaggaacatgagattggaccgaccaggatcggttcaggccagtcggcttgccggagtgttaatcgggactttgaatcaaatgtcttttgaccttttcatgtctcatggccgtgacgttaacaatctcctctatctatcgtggggagattggatggaaaaatggaaactatatggagatgaaggagaaggagagctcatggtgaagatgataattctaatgaagaacaatgacctaactaacttcttcacccacactcacttcgttcgtctcgcggaaatcatcaatcgaatctgtcttcctcgccaatacttaaaggcaaggagaaacgatgagaaggagaagacaataaagagtatggagaaggagatggggaaaatggttgagttagcattgtcggagagtgacacatttcgtgacgtcagcatcacgtttcttgatgtagcaaaagcattttactactttgctttatgtggcgatcatctccaaactcacatctccaaagtcttgtttcaaaaagtctagtaacctcatcatcatcatcgatccattaacaatcagtggatcgatgtatccatagatgcgtgaataatatttcatgtagagaaggagaacaaattagatcatgtagggttatca

SEQ ID NO: 118194 - DNA, 814 bp, Arabidopsis thaliana
tgaagttaaaagcctaaaattttggtttcaaccttctacaataaatccaaatcactaaccatgatgaagcacttgctaagcatcttcttcataggagctttgttgcttggaaacatcaaaacaagtgaagggtctttgtcttctgcacttgaaactactccaggcagcttgctatccgatctctggctagaccggttccctgatccattcaagatcttggagagaatcccattaggactcgagagggacacaagcgtggctctgtctccagcaagagtagactggaaagaaacagcagaagggcatgagataatgctcgatatccccggtttgaagaaggatgaagtaaagatagaagtggaggagaacggagttttacgagtcagtggagagaggaaaagagaagaagagaagaaaggagatcaatggcatagagtggagagatcatatggaaaattctggagacagttcaagctacctgataatgtagatatggaatcagtcaaggccaagcttgagaatggtgtgctcactattaacctcacgaaactatctcctgaaaaagttaagggtccaagagttgttaacattgcagctgaagaagaccaaactgcaaaaatcagctcttctgaatccaaagaactctgatattgaagaaactatatattactttctgagtctgaagagagttattataaatccaagagttttgagtttcatattgtgtaagctaaatggagtgtcatgttttgtaacctatctaccaaaatctctgtaaccttctctatatgcaataaaatgttcatttctttat

SEQ ID NO: 118195 - DNA, 575 bp, Arabidopsis thaliana
ctactaaatagagaatcagagagaatagttttatatcttgcacgaaactgcatgctttttgagacatggcaatcttccgaagtacactagttttactgctgatcctcttctgcctcaccacttttgagcttcatgttcatgctgctgaagattcacaagtcggtgaaggcgtagtgaaaattgattgcggtgggagatgcaaaggtagatgcagcaaatcgtcgaggccaaatctgtgtttgagagcatgcaacagctgttgttaccgctgcaactgtgtgccaccaggcaccgccggggaaccaccacctttgtccttgctacgcctccattaccactcgtggtggccgtctcaagtgcccttaaacatatacacatacagatgtgtgtatatgtcttccgcgagcacacacgtacgtttatgttttaaggacaatagtatgtatgagcagctataaacaaaccagaagttaatggttcatgttgaactagtataagttgtatgaactgtgcttcttttgaacaaccacttttgctgtaagtttagcaaccctatttaataaattagagattac

SEQ ID NO: 118196 - DNA, 533 bp, Arabidopsis thaliana
accaaagagagtatcagatagaaatagttctaatattttgtacaactcacagaaattgcatgagtttcgaacatggcagtcttccgaagtacactggttctgttactaatcatcgtctgtctcaccacttatgagcttcacgtccacgctgctgatggtgcaaaggtcggtgaaggcgtagtgaaaatcgattgtggtgggagatgcaaagatagatgcagcaaatcttcgagaacgaagctatgcttgagagcgtgcaacagctgttgttcccgctgcaactgtgtgccacctggtacttctggaaacacccacctttgtccttgctacgcctccattaccactcacgggtggccgccttcaagtgcccttaaaatttcctcctgtggctgtttctgtttcgacttctatttcggaatatatgtacatgtgtgtgtacgtgtgtatgtacacaagtactgctatgttttggaggacaaaagtatatgtatgagaagctataaactaattagaagttggtggttatgcgtatt

SEQ ID NO: 118197 - DNA, 812 bp, Arabidopsis thaliana
  unsure (1)..(812): unsure at all n locations
aggtgacactctagaagagctatgacgtcgcatgcacgcgtacgtaagctcggaattcggctcgacatttatcattacagtctgatttgagctaagttctctcatcataaactctccttggagaatcatggctatttcaaaagctcttatcgcttctcttctcatatctcttcttgttctccaactcgtccaggctgatgtcgaaaactcacagaagaaaaatggttacgcaaagaagatcgattgtgggagtgcgtgtgtagcacggtgcaggctttcgaggaggccgaggctgtgtcacagagcgtgcgggacttgctgctacaggtgcaactgtgtgcctccgggtacgtacggaaactacgacaagtgccagtgctacgctagcctcaccacccacggtggacgccgcaagtgcccataagaagaaacaaagctcttaattgctgcggataatgggacgatgtcgttttgttagtatttactttggcgtatatatgtggatcgaataataaacgagaacgtacgttgtcgttgtgagtgtgagtactgtattattaatggttctatttgtttttacttgcaagttttcttgttttgaatttgtttttttcatatttgtatatcgattcgtgcattattgtattatttcaatttgtaataagattatgttacctttgagtggttgtttatcatactttttttcaaaggtaagaggttttggnnnnnnnnnnnnnnnnnnnnnnnnnnnnnnnnnnnnnnnnnnnnnnnnnnnnnnnnnnnnnnnnnnnnnnnnnnnnnnnnnnnnnnnn

SEQ ID NO: 118198 - DNA, 701 bp, Arabidopsis thaliana
cggcacctctattcgattcacttagggacagctgtgccgcctgcaggtgccggtccgctattcccgggtcgacccacgcgtccgtacggctgcgagaagacgacagaagggtacggaaactacgacaagtgccagtgctacgctagcctcaccacccacggtggacgacgcaattgaaagaaaaaaaaaacgagaagcgttttctttctctccaaaatccattactcgcgaactttcctctgctaagtgttcactagaaagaggtggtgattatgagttcaagcgaagcgtttcccgtgatgcaggagatcatgcttgagtttcgtgctgggaagatgtctttgcagggaacaagagttgtccctgatgcacgaaaaggacttgtccgcatagctagaggtgacgagggactgattcatttccagtggcttgatcgaaaccagaatacagtagaagatgatcaaattgttttcccagatgaagctctatttgaaaaggttaatcaatcctcagacagggtgtatattctgaagttcaacaggggtgaccgcaagttcttcttctgcatgcaggagcccagacctgaaggtgaggcagaattgcgctcttcacgcaatcaatgccccaatcacccactagagcatgtaacattcctaccttgttacaaacagtctaggatatgactgcatccttgtactaat

SEQ ID NO: 118199 - DNA, 658 bp, Arabidopsis thaliana
  unsure (1)..(658): unsure at all n locations
ccacgcgtcaacccaagcgtccggcgagatgactacagaaggggacaacaactaaaaccacatttatcattacagtctgatttgagctaagttctctcatcataaactctccttggagaatcatggctatttcaaaagctcttatcgcgcttctcttctcatatctcttcttgttctccaactcgcccaggctgatgtcgaaaactcgcagaagaaaaatggttacgcaaagaagatcgattgtgggagtgcgtgtgtagcacggtgcaggctttcgaggaggccgaggctgtgtcacagagcgtgcgggacttgctgctacaggtgcaactgtgtgcctccgggtacgtacggaaactacgacaagtgccagtgctacgctagcctcaccacccacggttggacgccgcaagtgcccataagaagaaacaaagctcttaattgctgcggataatgggacgatgtcgttttgttagtatttactttggcggatatatgtggatcgaataataaacgagnacggacgttgccgttgtaagtgtgagactggatantaatgggccaattngtggaacctgcaagtttccttggtttnnaattngnttnccaaaantggaaanccnnnncggggannannngganaaccccaattgaaaaa

SEQ ID NO: 118200 - DNA, 1719 bp, Arabidopsis thaliana
  unsure (1)..(1719): unsure at all n locations
ccaacgcgtccgcccacgcgtccgcaacattcctgaagagagccgtgtttgtgtcttgactgattcttctctcaagcttttttaatctctctctcttttcccacgtaattcccccaaatccattctttctagggttcgatctccctctctcaatcatgaaccttcttctcttctagaccccacaaagtttcccccttttatttgatcggcgacggagaagcctaagtctgatcccggaatgtctgtctccgagctcaaagaacgccacgccgtcgctacggagaccgttaataacctccgtgaccagcttagacagagacgcctccagctcctcgataccgatgtggcgaggtattcagcggcgcaaggacgtactcgggtgagcttcggagcaacggatctggtttgttgtcgtactcttcagggacacaccggaaaggtttattcattagattggacaccggagaggaaccggattgtcagtgcatctcaagatgggagattaatcgtgtggaatgctctaacgagtcagaaaactcatgctattaaactcccttgtgcatgggttatgacatgtgctttctctccaaatggtcagtcggttgcgtgtggtggattagacagtgtatgttctatctttagccttagctcaacggcggacaaggatggaactgtaccggtttcaagaatgctcactggtcacaggggatatgtttcgtgctgtcagtatgtcccaaatgaggatgcccaccttatcaccagttcaggtgatcaaacttgtatcttatgggatgtaactactggtctcaaaacttctgtttttggcggtgaatttcagtctggacatactgctgatgtactaagcgtctcaatcagtggatcaaacccaaactggtttatatctggttcatgcgattccacagcacggttgtgggacactcgtgctgcaagccgagcagtgcgtacctttcatggtcacgagggagatgttaatacggtcaagttctttccggatgggtatagatttgggactggatcagacgatggaacatgcaggctgtatgacataaggactggtcaccaactccaggtctatcagccacatggtgatggtgagaacggacctgtcacctccattgcattctctgtgtcagggagacttcttttcgctggctatgcgagcaacaacacttgctacgtttgggataccctcttgggagaggttgtattggatttgggattacagcaggattcacacaggaatagaataagctgtttggggttgtcagcagatggaagtgcattgtgtacaggaagttgggattcaaatctaaagatatgggcgtttggaggacacaggagagtgatttgaagaagatttaacgaaaagtaggagtcacgtctccagttgttggttaatatattctgtagtcgggaagtaaggttcggtttgtggaaggtgtttggtttgaaatagtggagtggttagaagaattaaacttccctttttgtagtgtgctttgatttatttatttcttcattgggaactaaactccttcaacacgctactcaatgtgaattctgtaatcaattgtgtacccaccagtctttactttactatcatctcttcatattgaacgcagaagataaaacgctactannnnnnnnnnnnnnnnnnnnnnnnnnnnnnnnnnnnnnnnnnnnnnnnnnnnnacattc

SEQ ID NO: 118201 - DNA, 2372 bp, Arabidopsis thaliana
atcaaatgtcgatgatgacggtgtgggcacttcgacggaatgttcgtcggaaaaatcactcgatgctcgtgagatatatttccggctccgcatcgatgaagcctaaggagcaatgtattgagaagattttggtggcgaacagaggcgagattgcttgccggatcatgagaacggcgaagcgtttagggattcagaccgttgcggtttacagtgacgctgatagagattcgctccatgtgaaatctgcagacgaagcggatcggattggcccgccctcggctaagagacttagttacctcagcggtgtgactatcatggaggcagcggctcggactggtgcacaggcaatacaccctggctatgggttcttgtcagaaagttctgactttgcccaactctgtgaggattcgggtctaacattcattggacctccagcatctgctattagagacatgggtgataaaagtgcatccaagagaattatgggagctgctggagttcctctcgtgcctggatatcatggccatgagcaagatattgatcatatgaagtcagaagctgaaaagattggataccctataataatcaagccaacacatggaggtggggggaagggaatgaggatagtgcaaagtgggaaggattttgctgactcgtttttgggtgcccaacgtgaagctgctgcttcttttggcgttaacactattcttctcgagaaatacattactcgaccgaggcatatagaagtccagatatttggtgacaaacatggaaatgttcttcatctatacgaaagggattgcagtgtgcaaagaagacaccaaaagattattgaagaagctcctgcggcagttggatattataatgctgggacggtggaatttatagttgacaccgagtctgatcaattttattttatggaaatgaacacccgtctacaggtcgaacatcctgtaactgagatgattgttggtcaagatcttgtggaatggcaaattcgggttgccaatggggaacctctccccttaagccaatccgaggtgccaatgtcaggtcatgcctttgaggccaggatatatgctgaaaacgttccaaaaggatttcttcctgcaactggggtcctcaatcattatcgccctgttgcagtctcaccatcagttcgggttgaaactggagttgagcaaggagacactgttagcatgcactatgatcctatgattgcaaagcttgttgtcttgggaggtaatcgtggcgaagctttagtgaaactgaaggattgcttgtctaactttcaggtagcaggtgttcctacgaacataaatttccttcaaaaacttgctagtcataaggagtttgcagtgggcaatgtagaaactcattttattgagcaccataaaagtgatctatttgctgacgaaagcaatccagctgcaacagaagtggcatacaaggcagtcaagcatagtgcagcattggtggctgcttgtatctccacaatcgagcattctacttggaatgaaagtaatcatgggaaagttccatcgatatggtattcgaatcctccttttagggtccatcatgaagccaaacaaaccattgagctagaatggaataatgaatgcgagggaactggctctaacctcatatcactcggtgtaagatatcaaccagatggaagctatctcattgaggaaggcaatgattctccaagtttagaactcagagtaacacgagcaggaaagtgcgattttagagttgaagcggccggattgagcatgaatgttagtctagctgcgtacttgaaggatggttataagcatatccatatatggcatggttcagaacaccatcagttcaagcagaaggtaggaatcgaattctctgaagatgaagaaggtgtccaacacagaaccagctccgaaacatcatcacaccctccaggaaccattgtggcccccatggctggtttggtagtcaaggtccttgtcgaaaacgaagccaaagtagatcaaggtcaacctatattagtcctagaggcaatgaagatggagcacgttgtgaaagcaccatcctctggaagcatacaggacctcaaagttaaagcaggccaacaggtttcagatggcagtgctctattcaggatcaaagggtaaataacacgatttgcgattgatcaaccattcgctggcttacgcgaaacctgaacctaataagcatttgggtgtgtatataaaccgaaatcttacaaaagataaataaatccaaagctttataaaaaaaaaaaaaaagggcggccgctctagaggatccaagcttacgtacgcgtgcatgcgacgtcaagatcttctataggtgacccaaaataccccccc

SEQ ID NO: 118202 - DNA, 506 bp, Arabidopsis thaliana
  unsure (1)..(506): unsure at all n locations
cgancaagtntcaggccccttntgccctgggcatgagatggcccgttgtgaagccccacctctgggagcattcaggcctcaaagttaagcagccaacaggtttcagatggcaggtgctctattcaggttcaaagggtaaataaccccgatttgcgattgatcaacccattcgctggcttacgcgaaccctgaactaataagcatttgggtgtgtatataaaccgaaatcttacaaaagataaataaatccaaagctttataaatgtttttactgcctctatatagatctgtgcggctagagattgaaggtaacttcttagtatacaaaatggtgattacattaataatcaagatagtccgagccatttcttgaatactaaaccagcttctctcttcttgagctgagactcgctctgaacttttggagctttgcctttataagcagtcttgtgatacttcaagaagagcatccgatacttgtacttatcaacaaacatatttttttt

SEQ ID NO: 118203 - DNA, 5245 bp, Arabidopsis thaliana
  unsure (1)..(5245): unsure at all n locations
agcataccagaaaacgacattctgttcatatggagttttttcaccagatcgagagcacgaagaagatgattactgggttttgatttagtcggcgaaaaatccgtaatctcattgttcgtgatctctgggttgtttttctggattgctggtgcggctgattctagtcaggattgtttttggggtccctttcgctctatttgaatctgcgtctgggttgttaagattgtacaaggggtttcgtggttatttatggaacctcgtgtggggaacaagtttcgtctcggccgaaagatcggtagtggttcgtttggagagatctatctcggtactaatattcatacgaatgaagaactggctattaagcttgaaaatgtgaagacaaaacatcaacagctgctctatgaatcgaagttatacaggattctacaagggggaactggtgttccaaatgtcaaatggtttggtgttgaaggggactataatgttttggtgatggatctactcggaccaagtcttgaagatctcttcaatttttgtagcaggaaactttcattgaagtctgtcctcatgcttgctgatcaaatgatcaaccgtgttgagttttttcattcaaagtctttccttcaccgagatcttaagcagaccaacttcctcatgggccttggaaggcgtgcgaaccaggtatacatcattgactttggtcttgctaagaagtatagggatatgacaacacatcagcacattccctacagggaaaataaaaacctgacaggaactgcgagatatgctagtatgaacactcacttgggaattgaacaaagtcgaagggatgatcttaagtctcttggttacatccttatgtatttcctcaaaggaagtcttccatggcaaggactgaaagctggaacaaaaaagaaaaagtatgaaaggattagtgaaaagaaagtttctacatccattgaggctttatgtcccattgaggctttatgtcgtggttacccatccgaatttgcatcctatttccactactgtcggtcgcttcggtttgatgataaaccagattacgcttatctgaaaagaatatttcgagatctctttatccgtgaagggtttcagtttgattacgtgtttgactggacaatcttgaaatatcaacaatcacaactaaccgctcccccatctcgagccctcaatcctgctgtgggaactagtgccgcattgcctccgggcatttccaacatcgatagatacacaggggaggaagaagggcgaccacatacggaatcatctcgacggagagtttcaggggctcttgataactcagggaatatttcgaaccaaccgacatcctcaagtgctagagactccatgatcccgagctcctcgttgtttgcacaatcagcaggagagtaactgtagtaagtggcagccgggacaattttccaggcagcggaggattgttgcagagaagccgtacaggtgacgtcagccgcggcgtgtatcccgagaaactctcctggggaggctgggaaatccacaagaagacactacgaatcagtagttaaaggcatcgataatcttcaagtctcggacgaacaccatccccactgatacattaattttactcagtgacctttttattcctttttccgttattacactacgaaaatttgaaaatacaatttgattgatccaccatgaaatttggtcttcactacaatatctatgattattggggctcaaacgtaacaattaaaaataaagatgcacaaatgcaaaattcttcttctccgatccggttctgcaatttcaccggatccggttcagctcattagctcaattcttcacagtcgtcgtccatgctttctcacttcttactggaggtctaatctgaggtgacgattcccagaattgttgcagagatctgataaacttgttcgtcttcactgatcggaactggagcttggagtttctatatcgacgatactcggtgagtcttcgtcctcatagtcgtgagatctatttgatcgcggatagtttggtttttatgattacataatctctagttttgtggtctagtggaaagttgatgacttcactggaacaaccttcctggcttcctgctacttatgaatggacatatttgtacagagtgctcttagctcttatatcaatttggaacaaagcgcggtaaataacaaagctcttcgtttggttgatctttttccagtgctttccaccatttctcctcacaataaactgttggcaagttcatctgggtcctcctctcctgaaacggcagtttcttaactctggggcaatttgtgatgactaatgtttcaactttttggaatgaaaatcgagatgggaggatgctgtttagttctggcagatccctagttctcaaggtcttcaggcttgggaacaatgttggatcttcgacggatggactctcgtgttcgcttatcaattcctctatctctctgcagtcgaacagttcaatcacctctagctttgggagtttctgaacccatgagacattcttcagcttgttgcagtgtgaaatgtttatgcaacggatattccgcagacaatcttggcttacagaatttccccacactctggttaagttgtgaaggctgtgtaacgtcagaacctctagactcggaagccaatcattttcaaaatctgcgggtgtgaccaggtactccaagtcatggcaacttttaatgctaagtcttctcaggttcctgccatggttagtgagtgatgggagattgaagtagaggagttcattgcactcttcaacgtggagatgctgtatatgtttatgcaaagcaccgaactcgaagagagtttttagggtctccaatgagagaacagtgataccgagtgtggttaggttttccaagtattccaagtcagcgaatccgagttcttctgcttcatcttctccaaagctctgcagttcccaaccggcgtaactgtagtacaagttcagaacctcgagcttgctcagccaacatatggcatctcgtgggatcgtctgaagaaactgagttctttgtaggtccagatgcttcagttttctaagattcccaagctcctgtggcaatacacttatctttgttcctgacatagacagatgatacaactccaccaaatacttgatagacaacggaatctcagtgatacttgtgaacgacaagtccaagactctgagaacaggcatatgcatgaaaaaccctgttggaatcttcttcaaagagctgttctgttggagcatcagtgttgtcagtttcgggcatatgagtttttcaggcaaggtctggattctgttatctaacaatgagatcaccaacgcttgtcgccagttttctgctttaggagcttcagtatgtcccatgctaggctcaactaggatcagctccttataagtcccctgttcagatgccatccacaatgcaaagcttctgaccacattatgcatcttcacctgtgttttctcatctccggtttccaacaaacatgccgctttcagatccccaatgagaaaatatcccttgtaaatggtgttaacgccatgggagctggtgagaaacccttcgccgacccagtactcaacaagctgctcgatctctatagaatgttcttctgggaataaagcgcagtacaagaaacaagaccgaagcagatcactctcgaggttgtcgtagctgaatttcaaaagggcaaatacatagttcatacccttcatctctgctggaaatctagtcagaacttcactagcatggatccactcttcttctgtctctctatgagccatggctcctcctaaagtgatcaacgctagtggcaatcctccacatttactcactataatctccgcgagccggcgaattgatgatgactctaaaagatcttttctccataccttactacagaacagctcccacgcgtgtttcttctccagaaactccactctcaacttgtattccgcacccatattgttgcataatgctatagaccgtgtcgtgaacatcaccttgcatttgttttccctgtcaggtcgaggaactccagttttctccaagtctatctcttcccagacatcatctagcaacaacaagaaacgtttctgtctcaaagctctgtatatcttcaaagctctgttttcgccggtctccttctcgtcccaagataaacccaaccgtgctccaacggcttgctgaattgtacactcgccgaattctctggacatttgaacccaaatcagtacatcatactgatgtccttttgtgatcagctcgttgttaatgctctgcattaacgttgtcttcccaaccccaccaggtccataaacaccaatgattcctctttcttcttcttcactgagaaattccaaaacctgttccatcatcgtggtatttccgacaacggacttgatgggtatctctctacaagttacttgaattgacccgccatctgttttgatagcttcagagcgttctctcagctcaccaatgctcttcaatatggcagaaaccttcttgcacagtttgtagtcggcacaaccgaaacaactgaggtatctcctcctcattcgcgtcctctgttcccgacgcctaaacctcactaaaagtagggctgttttagtctccgttacttgcaccgcactaagccactctctggcacgatttgagcagcttcgtccctctagaccgtcttgttggatccgtaaagtcaggtcatcacgtatggccttcaagtcaccgatggctgtttcaagatcagtgatggcttgtctaagatcagtcttatgtcctcttctctccgccatattcatagattcacacaacacctgagcacagccaacgataagagatgagatgaaatccatttcgatgatttctcgctctttcttttacttgtctgagctaactaactaataaagatgaggtgttgactcataaagattaaagtaaagtcaactttaataaagctgtcttgcttgcttgtatgacttggttcaagaaacgagtagagagagataggaatcttcctcgaagtctcgaactgttgtttgcatgcttgtaatttctactggccaagtgaaggcccgataacaaaattggccctttaagagcctttttatgcccaaaaaaaaaaaaaaaaaaanaaagggcggccgctctagaggatcccagcttacggacgggtccatcgacgtcatggctgttctata

SEQ ID NO: 118204 - DNA, 3435 bp, Arabidopsis thaliana
aaagttatcaattttacaacattaccgctataatctgcttgattctctgcaaaaagagaagactttttaccgagaagaagtcctctggctcattgaagaaactcaacgaaacaaacccagttctcatatatcgttttaagggattacaaaagctaatcgaagatgaatccagagaaattcacacacaagacaaacgagacaattgctacagctcatgagctagctgtgaatgcaggacatgctcaattcactcctttgcatttagctggtgctttgatctctgatcccaccggtatatttcctcaagcaatctctagtgccggtggcgagaacgcagctcaatctgctgaaagagtgatcaatcaagccttgaagaagcttccttcacaatctcctccacctgatgatattccagcgagttctagtcttattaaggtcattcgtcgtgctcaagctgctcagaagtcacgaggtgatactcatttggctgttgaccagttgattatgggtcttcttgaagattctcaaatcagggatttgttgaacgaagtcggtgtagcgacggcgagggtaaagtctgaggttgagaagcttcgtgggaaagaagggaagaaagttgagagtgcttcaggggacacaaattttcaagctttaaagacttatggaagagatttggttgagcaagcagggaagcttgatcctgtgattggtcgtgatgaggagattagaagagtcgtgaggattctttcgaggagaacgaagaacaatcctgtgcttattggagagccaggagttggtaaaacagctgtggttgaaggtttagcacaaaggattgtgaaaggagatgtgcccaacagtcttactgatgtgagattaatttcgttggacatgggtgcgttagttgctggtgctaaataccgaggagagtttgaagaaaggttgaaatctgttttgaaagaagttgaggacgctgaaggcaaagtgattctctttattgatgagattcatttggttcttggtgctggcaaaactgaagggtcgatggatgcagctaatctgttcaagcccatgttagctagagggcagcttcgatgcattggtgctacaacgcttgaagaatacaggaaatatgttgagaaagatgctgcctttgagaggaggttccaacaagtctatgttgcggagccaagtgtgcctgacaccattagtatccttagaggactcaaggagaagtatgagggacatcatggtgtgcgaatccaagacagagctcttataaatgctgctcagctgtctgctcgttacataactggtcggcatttaccggataaagcaattgatttggttgatgaggcttgtgcgaatgtgagagtccagcttgatagtcaacctgaagagattgataaccttgaaaggaagaggatgcagctggaaattgaacttcacgccttggaaagggagaaggataaagccagcaaagctcgacttatagaggtgcggaaagagcttgatgacctgagagacaagcttcagcctctcacgatgaaatacagaaaggagaaagagagaattgatgagattcgaaggcttaaacagaaaagagaagagctcatgttttctttgcaggaggcagaacgaagatatgaccttgcaagagctgctgatctaagatatggcgcaattcaagaagtggaatctgcaattgcccaacttgaaggaacttcttctgaagagaatgtgatgctcacagaaaacgttgggcctgaacacattgctgaggttgtgagccgttggacagggattccagtgacgagacttggccaaaatgagaaggagaggttgattggtcttgctgataggttgcataagcgggttgtgggacagaatcaagcggtaaatgcagtttctgaggcaattctaaggtcaagggcaggacttggtagggcacaacagccaactggatcattcttattccttggaccaactggtgttggcaaaactgagctcgccaaggctcttgctgagcagctgtttgatgatgaaaacctcttagttcggattgatatgtcggaatatatggaacaacactctgtctctcgcctcattggggcaccaccagggtatgttggtcacgaggaaggtggacaactaactgaggctgtgaggaggcgaccttattgtgtcatactctttgatgaagtggagaaggctcatgttgctgtcttcaacactctgctccaagttttggatgatggtcgattgacagacgggcaaggcaggacagtcgatttcaggaactcggtgataatcatgacatcaaaccttggtgctgaacacctccttgcagggctaactgggaaagtaacaatggaagtggcccgggactgtgtgatgcgggaggtgaggaaacacttcagaccagagctcttgaacaggcttgacgagattgtggtgttcgaccccctttcacatgaccagttgaggaaagtagctcggcttcaaatgaaagacgttgctgtccggcttgctgaaagaggagttgctttggcagtcactgatgctgctttggactatatcttggcagagagttatgacccggtgtatggtgctaggcctataaggagatggatggagaagaaggtggtgacagaactgtcaaagatggttgtgcgtgaggaaatcgatgaaaactccactgtttacatagatgcaggcgctggtgatcttgtgtaccgggtagaaagtggaggtctagtggacgcttcaacaggcaagaagtcagatgtgctgattcatattgctaacgggccaaagagaagtgatgcagctcaggcggtgaagaagatgaggatcgaggaaatagaagatgacgataatgaggaaatgatcgaggattaaagtcttgacctccaacgtgtgagttcttttgaggtgttgtgattgtatgacttgagctttcatgctctgttttggttttgactcttttggtagactataatggtgtggaactgtaaaaaagtctactttattatgttttcgtatatgtaaatcattttacataagaaatccattgtacgtcccataatcttttggggttttttcatacctttgggatcttatcttacttaatgctacgcatcagtggttaagagctgtcttaacaatctcatcaacgacacctttagcgagggggaagaagtggccacctccggcaacctcatgatagtgaagccaaggaagcttatctgcaatgtaacgttgcagcgtcacaggcactaacatgtcctcgtctccttgccacaaatgaacagagccttctctgtttaaaaacggattctcgagttctaaaggatcaaattcccaatttccaaaacccacaatcatatcacggttaatactctcatgtattccttgctgccttacttctgccaaatg

SEQ ID NO: 118205 - DNA, 1357 bp, Arabidopsis thaliana
gcggccgccagtgtgagtaatttagaaactccgagtggccgaaacagagatttcgcagaggaaccatcactgattgtgtcaccgaaccattgatcttcaagttccgatccaatttcagatatgtcgaggattattggtagaaaagggattaactatatccatagactaaattctgcgtcgttcacgagcgtatctgcttcttcaatcgagaaagggcaaaatcgcgtgattgatgcttcgttaactcttattcgtgaaagggcaaaactcaaaggagagttagtgcgtcttttaggtggagctaaagcttcaacatctcttcttggtgtaccacttggtcacaactcttcttttcttcaaggtcctgcttttgctcctcctcgtattcgagaagctatttggtgtggtagcacaaactctgccactgaagaagggaaggagttgaaggatccacgggttctaactgatgttggggatgttccggtacaagagattagagattgtggggttgatgatgatagactgatgaatgtcataagtgaatctgtgaagttggtgatggaagaggaaccattgcgtccgttggtcttaggtggagaccattccatatcttatcctgttgtgagagcggtttctgagaagcttggagggcctgtggacattcttcatcttgatgcacatccggatatatatgactgttttgaaggaaataagtactctcatgcatcttcttttgctcgtatcatggaaggtggctatgcgcgtaggcttttacaggttgggatcagatcgataaaccaggaaggacgggaacaaggcaagaggtttggagtagaacagtatgagatgcgaaccttctcgaaagatcgcccaatgttggaaaatctgaaattaggggaaggagtgaagggggtatacatctcgatagacgttgactgtctcgatccggcatttgcacctggagtgtcgcatatcgaaccaggaggtctctctttccgtgacgtccttaacatcttacacaaccttcaggcagatgttgtcggggctgacgttgtcgagttcaacccgcagcgtgatactgttgacggcatgacagcaatggttgcagctaagcttgttagagaattagctgcgaaaatctcgaaatgaaacagaatggtaattttggagtttgttttttgttatgtttcatcgtgcaagtttgtaacattcatataggtacttgaatgcaataagtctggctcatagacggagtatcaaacaaacataatatgaattctgatctaaggctataaaatcaatgttcatatgcctaaaaaaaaaaaaaaaaaactaaattactcacactggcggccgc

SEQ ID NO: 118206 - DNA, 1649 bp, Arabidopsis thaliana
atccttcgtcctcatctgccaaaaacttcgtacgagtcgctacttctctctctatatataaactccttaccactctctttttctgattttttgacgttaagagatagaaacagagagagatagagagatagagttatggctttggcgatgatgatccgaaacgcagcttcgaagcgaggaatgactccgatctccggtcatttcggtggtttgagatctatgtcttcatggtggaagagcgttgagcctgctcctaaagatccgatcctcggagttaccgaagcttttctcgctgatcctagtcctgaaaaagttaatgttggtgtgggagcatatcgtgatgataatgggaagcctgttgtcttggaatgtgtcagagaagctgagaaaaggcttgctgggagcactttcatggagtaccttcctatgggaggaagtgccaaaatggtggacctaacattgaagcttgcctatggggacaatagtgaatttatcaaagataaaagaattgctgcagttcagactctgtctggcactggagcctgccggctctttgcagacttccagaaacgtttttctcctggttcacagatctacattcctgttccaacctggtccaaccaccacaacatctggaaagatgcacaagtccctcaaaagacatatcattactatcatccagaaaccaagggcttggatttctcagcattgatggatgatgtgaagaatgctccggaagggtcattcttccttcttcatgcttgtgctcataatcctactggagtagaccctacagaggaacaatggagagagatatcacagctattcaaggctaaaaagcatttcgcattcttcgatatggcttaccaaggttttgctagtggagatccagcgagagatgccaagtccatcaggatctttcttgaagatggtcatcatattggaatttctcagtcctatgcaaaaaacatgggactctacggccagagggtgggatgtctcagtgtgctttgtgaagatccgaagcaagccgtggctgtgaaaagtcaattgcagcagctagctagaccaatgtacagcaacccacctttgcatggtgctcagctggtctcaaccattcttgaagacccagagttaaagagtctgtggctaaaagaagttaaggtcatggctgataggatcatcggcatgagaactactttgcgagaaagccttgagaagttaggatcgcctttgtcatgggagcacgttaccaaacagattggaatgttctgctacagtgggttaacaccagaacaggttgaccgcttaacaagcgaatatcacatctatatgacccgtaacggccgtatcagtatggctggtgttacaacaggaaacgtgggataccttgcgaatgctatacatgaagtcaccaagtcatcttaaatcatttacttacatgtttcagccaaacatacaaattttgtttgaagagtcaataagacaggaggctagatttgtacttctgcaattggttttgtgggaactgaaagtttacccataaacagtaatttattagcgcattttttcgttagctgggcaataaaagcaaagcctaaacgatggatttttggatatacaaaattcggattgttttctttcttctc

SEQ ID NO: 118207 - DNA, 1709 bp, Arabidopsis thaliana
  unsure (1)..(1709): unsure at all n locations
gttcaagcttcgcccacagttgccaaatcgcactanttgctcccacagctaaaagttgattctgaaaacctctctctctttgtgaacaagattaaaaagacgacttctcttttaacttattcctcctctgcttcttcaagatccattgtctgcaatttcaatcccttgtctcgtcatggattccgtcttctctaacgttgctcgtgctcccgaagatcctattctcggtgtaactgttgcttacaacaatgatcctagtcctgttaagatcaatttgggtgtcggtgcctaccgaactgaggaagggaagcctcttgttcttgatgtggtgcgtaaggcagagcaacagctagtgaacgatccgtctcgggtcaaggaatacattcccattgttggtatttccgattttaacaagttaagcgccaagctcatcttaggtgctgacagtcctgcgattacagaaagtagagttactacagtccagtgcttgtctggtactggttcgttgagagttggggctgagtttctcaaaacacactaccaccaaagtgtcatttacattccaaaaccaacttgggggaaccatcccaaagttttcaacttggcaggcttgtctgtggagtatttccgctactatgatcctgcaacccgtggtcttgacttcaaaggcttgctcgaggatcttggcgctgcaccatctggagctattgtcttacttcatgcatgtgcacacaatcccactggagttgacccaacctctgaacagtgggaacagattcgacagctgatgagatctaaaagcttattacccttttttgatagtgcatatcagggttttgctagtggtagccttgacacagatgcacaatctgtccgtacatttgttgctgatggcggtgaatgcttgatagctcaaagttacaccaaaaatatgggactttatggggagcgtgttggtgcccttagcattgtctgcaagtcagcagatgtggctagtaaggttgagagccaggtgaagcttgttgtgcggcccatgtattcgagcccccctattcatggagcatcaattgttgccaccattctaaaaagcagtgatatgtacaacaactggaccatcgagctgaaagaaatggctgaccgtataaagagcatgcgccaacagttatttgaagctatacaagctagaggtacacctggtgactggagtcatattatcaaacagattgggatgtttacatttactggattgaacaaggagcaagttgaattcatgaccaaagagttccacatttacatgacctctgatgggagaataagcatggcaggtctaagttcgaagacagtgcctcaccttgccgatgctatgcatgctgcagtgacccgcctcggctaaactagcgaccatacatttttttgctgtttctacaaataaaatgggacaaaaaaaaagaacaccgtttttgttggcttatatactatggtttttttctgatggtaccatatgtttcctcatgtcttttgactaaagatggttgaaccaaaaccaaagtgaggattgtgacattgagatctaccgtttctaagaaaatattggttactttaatttgccaccaacaaaaaaaaaaaaaaaaaaaaagggcggccgctctagaggatccaagcttacgtacgcgtgcatgcgacgtcatagatcttctaagttgtaccta

SEQ ID NO: 118208 - DNA, 1677 bp, Arabidopsis thaliana
  unsure (1)..(1677): unsure at all n locations
agctggcacgcctgcaggtaccggtccggaaatttcttcattcgtaaacaaacacacacgaagcaaaaacaaaaatgaaaactactcatttctcttcctcttcttcttccgatcgcaggatcggtgctctgctccgtcatctcaattccggctcagattcggacaacctgagctctctttatgcatctccgacatcgggaggcaccggtggttctgttttctctcatcttgttcaagctccagaggatcctattcttggggtgacagttgcatacaacaaagatcctagcccagttaagctgaatttaggagttggtgcttaccgaactgaggagggaaaacctttggttcttaatgttgtgaggaaagctgagcagcagcttatcaatgacagaacaagaatcaaggagtatcttcccattgttggattggttgagttcaacaagttaagcgctaagctcatactaggcgctgacagtcctgctattcgggagaatcggattaccaccgtggagtgtttgtctggtactggttctctgagagttggaggagagtttttggctaaacattatcatcagaaaacaatttacatcactcagccaacatggggaaatcatccaaagattttcacgctcgctggtttgacagtgaaaacttaccgatactacgatccagcgacgcgtgggttgaactttcaaggtttattagaagaccttggtgctgccgcacctggttctatagtgcttctccatgcctgtgcccataaccctactggtgttgatccaaccattcaacaatgggagcaaatcaggaagttgatgcgatcaaagggattgatgcccttcttcgatagtgcttatcagggctttgcaagtggaagtcttgatacagatgcgaaacctattaggatgtttgttgctgatggcggagaatgcctcgttgctcaaagttatgcgaagaacatgggactctatggagaacgagttggagctctcagcattgtatgcaaatcagcagatgttgcggggagagttgaaagccaactgaaactagtgataaggccaatgtactcgagtcctccaatccatggtgcatcaatcgtggctgtaatcctccgtgacaagaatttgttcaacgaatggactctggaactgaaggccatggctgatcgtatcatcagcatgaggaaacagcttttcgaggcattacgtactcgaggcactcctggagactggagtcacatcataaagcagattggtatgtttaccttcacagggttaaacccagctcaagtctccttcatgactaaagagtaccacatctacatgacatctgacgggaggataagcatggctggtctgagttcgaagactgtacctcaccttgcagacgctatccatgctgttgtcaccaaagccgtctgagaaactgaacaccaccatgacaccaaagcttcataataaagattttgttcttttctttctattatagcatttccggcagtgacaagataaatgtcgttactattattattgtttcatcccagtatcaataaagtacgcaagaaagcttttgtgctccnnnnnnnnnnnnnnnnnnnnnnnnnnnnnnnnnnnnnnnnnnnnnnnnnnnnnnnnnnnnnnnnnnnnnnnnnnnnnnnnnnnnnnnnnnnnnnnn

SEQ ID NO: 118209 - DNA, 776 bp, Arabidopsis thaliana
  unsure (1)..(776): unsure at all n locations
gcaaccacgcccgcaggaaccggnccggaatncccgggttgacccacgcgtgcgggcgaagcaaaaacaaaaatgaaaactactcatttctcttcctcttcttcttccgatcgcaggatcggtgctctgctccgtcatctcaattccggctcagattcggacaacctgagctctctttatgcatctccgacatcgggtggtacctgnggttgggtgnactctcatcttgttcaagctccagaggatcctattcttggggtgacagttgcatacaacaaagatcctagcccagttaagctgaatttaggagttggtgcttaccgaactgaggagggaaaacctttggttcttaatgttgtgaggaaagctgagcagcagcttatcaatgacagaacaagaatcaaggagtatcttcccattgttggattggttgagttcaacaagttaagcgctaagcttatactaggcgctgacagtcctgctattcgggagaatcttattaccaccgtggagtgtttgtctggtactgattctctgaaagttggaggagagttttttcctcaacattaccatcagaaagcactgcacatcactgaagcaagatagagggcccatccatacattatcacacttgctgctctacctgtgaaaacttaccaccactacaatcccgcgtcgcgtttcatgaacctccattgacaaaggctagtccttgagattgcccattatttcaagactgactttacttttcagagccattctatgctctacactta

SEQ ID NO: 118210 - DNA, 1444 bp, Arabidopsis thaliana
aatgaattttggggtcaaattcatttcaactgattcaatcaattctcatgaattccatcttgtcaagcgtccttcctgctcccgaagatcctgttctcagtgtaatttttgcttgtagagatgatcctagtccggttaagttgaatttgagcgcaggtacctatcgaactgaggaaggaaagcctcttgttcttgatgttgtgagaagagcagagcaacagttagccaacgacctggacaaggaatatcttcccctcaatggacttcctgaatttaataaattaagtaccaagctcatcttaggtgatgatagtcctgcattgaaagagaatagagttgttacaacccaatgtttgtctggtactggttctttgagagttggagctgagtttctagcaacacacaacaaagaaagtgtcattttcgttccaaacccaacgtgggggaaccatccccgtatttttactttggcgggtttgtctgtccagtatttccgttattatgatccgaagagccgaggactcgacttcaaaggcatgctcgaggatcttggcgctgcacctcctggagctatagtggtacttcaagcttgtgcgcataaccccacaggagttgacccaacattcgaacaatgggaaaagtttcgacgactagtgagatcgaaaagcttattacctttctttgatagtgcatatcagggttttgctagtggtagccttgacgcagatgcacaagcggttcgtatgtttgtagccgatggaggtgaatgtttgatagctcaaagttatgccaaaaatatgggcctttatggggagcgtattggctctcttacgatcgtatgcacatcagaagatgtcgctaagaaagttgagaaccaagtgctacttgttgtgaggcctatgtatcttacaccacctattcatggtgcatctattgttgccacaattctaaaaaacagtgatatgtacaatgactggaccattgagctgaaaggaatggctgaccgcataattagcatgcgtcaacagttatatgcagctctagaagctagaggaacacctggtgattggagtcacattattaaacatattgggatgtttacttttaccggattgagtgaggagcaagttcgcttgatggccaaagaatatcacatttacatgacttatgatgggaggataagcatggcaagtctaagttcgaagacagtgcctcaactcgctgatgctatacatgctgttgttactcgcatcgcctaattaaatttgcgattctgttcttttgttgtttaatttatgaacacaattagagaataaaactgcgttcttggtttacatttaataagatagcacaaagaagcaatattatggatgatattgtttctagttggtagtcaaacctaccaaaatgaggattgggacctttaaaccaacacagttttttt

SEQ ID NO: 118211 - DNA, 884 bp, Arabidopsis thaliana
gcaggtaccggtctggaattcccggctcgacccacgcgtgggcggccacaacgccggacgacaatgggtattgatctgatcgcaggaggtaagagtaagaagaccaaaaggactgctcctaagtccgatgatgtctacctaaagcttctcgtcaagctttaccggtttttggtgaggagatctaacagcaacttcaatgctgtgattctgaaaaggcttttcatgagcaaagtcaacaaagctcctctttcactctctaggcttgtagagttcatgactggcaaggatgacaagattgctgtgttggttggaactatcactgatgatttgagagttcatgagattcctgccatgaaggttactgccttgaggtttactgagagggctagggctagaattgagaaagctggtggagagtgcttaacctttgaccagcttgctctcagagctccattgggacagaacacagttcttcttagaggaccaaagaattcacgtgaagcagtgaagcatttcggacctgctcctggtgtgccacacagtcactccaagccatatgttcgggccaagggaaggaagttcgagaaggccagaggaaagaggaagagtcgtggattcaaggtttaagaaagttgttgccgccattggacttgattctggagtactgttgcttcttggttgctttcgtaatcggatttttgttagggaactctgttttttctttcctctttcagacatgctactaagtttgcttctactggattcatcgtgtggttattacacttgcagctttactatgttaaactaaaaagcggccgctctagaggatccaagcttacgtacgcgtgcatgcgacgtcaagctacttctatagtgcgtcctaa

SEQ ID NO: 118212 - DNA, 666 bp, Arabidopsis thaliana
  unsure (1)..(666): unsure at all n locations
cccacgcgtccgcccacgcgtccgcccacgcgtccgcccacgcgtccgcccacgcgtccggttggaactatcactgatgatttgagagttcatgagattcctgccatgaaggttactgccttgaggtttactgagagggctagggctagaattgagaaagctggtggagagtgcttaacctttgaccagcttgctctcagagctccattgggacagaacacagttcttcttagaggaccaaagaactcgcgtgaagcagtgaagcatttcggacctgctcctggtgtgccacacagtaacactaagccatatgttaggcataagggaaggaagtttgagaaagctagaggaaagcgaaagagtcgtggattcaaggtctaagaagatgttttctggtttcgttttgcttggtttaagtatcgaagttttggtagggaacgctggttcctctttaccctgttccagactttgttttaagttctgtttttctattctcaagacaattggatattttgctttgtcttttaatcttactactattagctgcaatgagattttatctagaatttggatttgatcagtatttggagttcatagtatcattatggtctatttcgtttnnnnnnnnnnnnnnnnnnnnnnnnnnnnnnnnnnnnnnnnnnnnnn

SEQ ID NO: 118213 - DNA, 601 bp, Arabidopsis thaliana
  unsure (1)..(601): unsure at all n locations
nnnnnnnnnnnnnnnnnnnnnnnnnnnnnnnnnnnnnnnnnnnnnnnnnnnnnnnnnnnnnnnnnnnnnnnnnnnnnnnnnnnccacgcgtccgcccacgcgtccgtacggctgcgagaagacgacagaaggggggcggttccatcaccacaacgccggacgacaatgggtattgatctgatcgccggaggtaagagtaagaagaccaaaaggacagctccaaagtctgatgatgtctacctcaagcttactgtcaagctttaccggtttctggtaaggagaactaatagcaagttcaatggtgtgatattgaagaggcttttcatgagcaaagtcaacaaagctcctctttctctatctaggcttgtggagttcatgactggcaaggaagataagattgccgtcttggttggaactataactgatgatttgagggtacacgaaattccacccatgaaagtgactgccttgaggttcacaaaaagagcaagggctcccccctttgggaaaagctggaggtggaaatgcttaacctttgaccagttcgttttaaaagctccattgggccagaacacggttttttttaaaggacctaaaaatt

SEQ ID NO: 118214 - DNA, 361 bp, Arabidopsis thaliana
  unsure (1)..(361): unsure at all n locations
cgaaacacgcgaccgccaaaataccagtttccatgttaggatcagaaaacagagcactccgaagtccgatgatgtctacctaaagcttctcgtcaagctttaccggttttctggtgaggagatctaacagcaacttcaatgctgtgattctgaaaaggcttttcatgagcaaagtcaacagagctcctctttcactctctaggcttgtagagttcatgactggcaaggatgacaagattgctgtgttggttggaactatcactgatgatttgagagtccatgagattccctgccatgaagggttacctccctttaaggttttccttangaggggctaggggctagaattttaggaaaacct

SEQ ID NO: 118215 - DNA, 2104 bp, Arabidopsis thaliana
  unsure (1)..(2104): unsure at all n locations
taggtgacactatagaagatcttgacgtcgcatgcacgcgtacgtaagctcggaattcggctcgagcttcgataatcgattcaacgacgaggatacggaaacagtgaggtcagagtatgatttcttcgacacgaggaagcaaaagcagaagcagttcgaatcaatgagaaatcaggtggaggaagagacggagacggagagagaggaagtacagtgtagtgaatgggaggatcacgatcattacagcaccacgagctcctcggacgcagcggaggaagaggaagaagatgatgatagagaatcaatttccgaggtcgggacacgctccgagtttggatctacggtgagaagtaattcgatgagacggcatcatcaacaaccttcaccaatgccgcaagtatacggtggcgctgaacaaagtaaatatgataaagcagatgatgctacgatatcttctggtagctatagaggcggaggagatatcgctgatatgaagatggtagttaggcatagggatttgaaagaaatcatcgatgccattaaggaaaatttcgataaggctgctgcctcaggggagcaagtctctcagatgctcgagcttggcagagctgagctcgatcgtagtttcagccaattgaagaaaacggtgattcattcgagtagtttattaatcaacttgagctcgacatggacctcgaagccgccattggcagtcaagtataggatagacacgactgcgctggatcaaccgaacagttcgaagagcctttgttccactcttgaccgtctcttggcatgggagaagaagctttatgaagaaattaaggctagagaaggtttcaagattgagcatgagaagaagttatcacagcttcaaagccaagaatataaaggggaggatgaagctaagttagacaagacaaaggcctctataacgaggttacagtcactgatcattgttacttctcaagctgttactaccacatctactgccatcatccgtcttcgtgatactgaccttgttccacaactcgttgagctctgtcatggctttatgtacatgtggaaatctatgcatcaataccatgagactcagaacagcatcgtggagcaagtccggggggtcattaacagatcgggcaaaggcgaatcaacatctgagctacaccgacaagctacacgtgacttggaatcagctgtctcttcttggcactccagtttcagtagtttgattaaattccaacgtgacttcatacactcagttcacgcctggttcaagctgacccttcttccggtttggcaacaacacgccgccaatcatcacaaagagccgctcgatgcttacgccttctgcgatgagtggaaactcgctctagatcgtattcccgatacagttgcatctgaggaatcaagagcttcatcaacgttgtcacgtgatatccgaaaacaagccgatgacacaagataagaaagaacagaatcagcatcaaaagagcttgagaagaaggcttcgtcggttagaaacctagagagaaaatactaccagtcatactcaatggttggtgtcggtttaccagagtcaggacccgataaccaacacatgttagacgctcgagacccgttaagcgataaaaagtcagagcttgcggtttgccaaaggagagttgaggaagagatggtgaaatactcaaaggcaatagaagtgacaagagccatgactttgaataatctgcagacagggttgcctggtgtgttccaatctttaacaagtttctctgctttgttcatggagtctcttcaaacggtatgcactcgctcatactctatcaaataggacattatatattatatatatatatatattgatatgcttacagagtttacagtaacaattgtgaggtcagttattgtaatgttccttttttaccaagaaagtgttggatacatttctatttattacaaggagaatgtatataaacaaagttttgaaaaaaaaaaaaaaaggggcggccgctctagaggatccaagcttacgtacgcgtgcatgcgacgtcatagatttaatagtagtgtnnnnnnnnnnnnnnnnnnnnnnnnnnnnggc

SEQ ID NO: 118216 - DNA, 541 bp, Arabidopsis thaliana
  unsure (1)..(541): unsure at all n locations
nnnnnnnnnnnnnnnnnnnnnnnnnnnnnnnnnnnnnnnnnnnnnnnnnnnnnnnnnnnnnnnnnnnnccacgcgtccggttacaatttatttcttagctttttaagttttatagcttatcctgtgaaagttttatagtaagttgctgaaattggtaattagttgagaggcaataacattgttggttaggcgtactgactaatttctagttttgccagaaatgaatgtcttctggtttctggtattcatcatgtgaattctgtaatcaattcgagtctctggacattttgttaaacaaaatcaaaacaagacattaattttgacctttggagacattaatctttgggtttgttttccaccggatgcagctttatgtacatgtggaaatctatgcatcaataccatgagactcagaacagcatcgtggagcaagtccgggggctcattaacagatcgggcaaaggcgaatcaacatctgagctacaccgacaagctacacgtgacttggaatcagctgtctcttcttggactccagtttcag

SEQ ID NO: 118217 - DNA, 781 bp, Arabidopsis thaliana
tacactacagacgagctatgacttcgcatgcacgcgtacgtaagcttggatcctctagagcggccgcccttttttttttttgttatcaaaaccgaatattcttttattcctcacacacacataggaacacacctgaatggtgcatcacacgggataacaacaacacacattcaacacaaacatgacgaaattaaagacaataaaccaaactaaaccggaaacaaagtaaacacggaacataaacatataagagctatagtaatcataatctgctgattccgaggggaaccgaagcttgccaaaggatcgaagttgcccaaacgagggataacaaaagacacatcaagcttgtcttcatcaaccttcatgcaatcttcatcgctccattcacacacaatcctcatcatcatcatcatcaccatattgataattatgatattggataatgatgatgatgatgatgatgatcatttacacaacacccacacacgaacattcacaatcataatctccaagagatctcttcttcttcttaccttttgtgagtactcttgtgtttggggccatcccataaagagaaacttgaacctctcaaaaccctttattggtgagatcttctgatagattcagagggttcttgagcttcagtttctttaggggatggccatattttgtgtgtttggtgttgtgccaaagagagtttcaacaatggatgttgttagggtttttatggcttctctctttgtctttggcggacgcctgggtctaccccggaatttcg

SEQ ID NO: 118218 - DNA, 1206 bp, Arabidopsis thaliana
agatatcaaaaccgaatattcttttattcctcacacacacataggaacacacctgaatggtgcatcacacgggataacaacaacacacattcaacacaaacatgacgaaattaaagacaataaaccaaaccaaacattcagagagacacaacacaaccacatcatcacacgtttctctctctctctttcctctccgtcgtctctctctctctagccaccaccaaaatccttaaaacctagacttttctcttccatcgatggcggctaataacagatccgatcatgggtcagacgaaaacacaagactttacaatccttaccaaaactacgaagtcccaatcaacaaatctcagtacctttacaagcttcctacctcccctgagtttctcttcacggaggaggctttaaggcaacgtagatcttggggtgagaatctcactttctacaccggaacagcttacctcggtggctccgttgccggagcttctgttggagtcatcactggagtcaaaagcttcgaatctggcgacactactaagctcaaaatcaacaggatcttgaactcttctggtcaaactggtcgaacttggggtaatcggattggtatcattggattggtttacgcagggatcgagagtggtattgtggctgccacggatagagatgatgtttggaccagtgtggtggctggtcttggaaccggagctgtttgtagagcggcgagaggagtgagatctgcagctgtagctggtgctcttggtggacttgcggctggagctgttgtagctgggaagcaaattgtgaagcggtatgtgcccatttgaagactgcaagagtctaattggcagactctttttcgggtcgttgttgaaatttttgataggggaaatggtgagaatttgataggtttggtatgtcttggaatcataaaaatgaaaactttatttggtttctagaggtacaacaagtctgtatgtcaagtcataatgcagtttcactttgaagaataacctgcaaacctttttcttatattcatactgattaaatgttttgccgattggtaatttaaaaacccgaattcgtgtttgttctagttagtgttttatgtttctgtttttgatcaatgttaactctttcttgattcgttgagaaactgatgtgttgtaccccatttgaaaatgaagctcttctctcaagttttttctt

SEQ ID NO: 118219 - DNA, 2133 bp, Arabidopsis thaliana
gggaatcatctgatactcttcttcttcccagcgtccgtcgattgcttcaatcatctatcggcgacgagctccatccggtttgtctcctaatcagaatctctgatttcccgatccggctaattcctcatcgtcggatcaattagattatcttatcccaaggagaggagtgtgtgtgaatcggagagagcgagagacagagagagagagagggaaatgaacggtggtgatgaggtcgtcgcagcttcggcagacccatctctgcctttggaatggagattctctcaggtcttcggtgaacgaagcgctggtgaagaagttcaagaagttgatataatctcagcgattgaatttgataattctggaaaccatcttgctactggggaccgtggaggacgtgttgttcttttcgagagaaccgataccaataatagcagtggaaccagaagagagcttgaagaagctgattatccactgaggcatccagagtttcgttataaaacagagtttcagagtcatgaccctgagtttgattacctcaagagtttggagatagaggagaaaattaacaaaattagatggtgtcaaacagcaaatggagctctttttctcctctcgaccaatgataaaaccatcaagttttggaaggttcaagacaagaagatcaagaaaatctgtgatatgaattcagatccttcaagaactgtacgaaacggaaccgttgcaagctcgagcaattcaaacattacaaactcatgccttgtgaatggaggagtatctgaagtgaacaactccttatgtaatgacttctcattgccagcaggaggcatctcttcgctgcgattaccagtggtagtaactagccatgagtcgagccctgtggctagatgtcgaagagtatatgctcatgctcatgattatcatattaattcaatctcaaataacagcgacggcgaaacatttatttctgctgatgatttgcgaattaatctttggaatctggaaattagcaatcaaagtttcaatattgttgatgtcaagcctgcgaaaatggaagatctatctgaggttatcacatcagcagaatttcatcctacccattgcaatatgttagcctatagcagttcgaaaggttcaattcgcctgattgatctgcgccagtcagctttatgtgattcacattcaaaattgtttgaggaaccagagcaagcaggtcctaaatcgttctttactgagataattgcttcagtctcagacatcaaatttgcaaaagaaggaagatatctacttagccgtgactatatgacacttaagttatgggacatcaacatggacgcaggtccagtagcaactttccaggttcatgaatatttgaaaccaaagctctgtgatttatatgaaaatgattccatctttgacaagttcgagtgttgtataagtggcaatggcttgcgagcagctacaggttcttacagcaatctgttccgtgtgtttggtgttgcccccggaagtactgagacggcaaccttagaagcaagcagaaacccaatgaggagacatgtcccaattccgtcgaggccatccagagcactaagcagtataacgcgtgtcgtaagtagaggatcagagagtccgggagtcgatgggaatactaatgctcttgattacacaacaaagctgctgcatcttgcttggcatccaaacgagaactcaattgcttgcgccgctgcaaatagcttgtacatgtactatgcttaactcaatactcagcaaaaaagaagaagaagcagaaaaggcgcatttccttgctctagactctgtttttcttggttccgtatggtttgattgatggggattgctatatacatcatcatgattgtcactcacacatgatctgtaatcatcatcgtggacttatgggaatggcatggggagaaggcaagcagtgaaaaaccaatcattttctctctttctttttttcgttttaagtgcagaatttttcacttgtgcacttggaaactactttacaggccaagaaaaaagaacaaagaaaatccgattggaagaaatcgtgattttagtaagctaatcatctcgtatgacttttggatggatatagattagatttttataatc

SEQ ID NO: 118220 - DNA, 2121 bp, Arabidopsis thaliana
  unsure (1)..(2121): unsure at all n locations
ccagctcccnnnnaacgggaacaaaggctggacctccaccgcgggggcggccgttctaaaactaggggatcccccggcgtgcgcgaattcacacaaccaaaaaaaccaaccttttttttccacctaaatctttgaatatcacaatatttactatttacaatggcgccacaagaacaagcagtttctcaggtgatggagaaacagagcaacaacaacaacagtgacgtcattttccgatcaaagttaccggatatttacatcccgaaccacctatctctccacgactacatcttccaaaacatctccgaattcgccactaagccttgcctaatcaacggaccaaccggccacgtgtacacttactccgacgtccacgtcatctcccgccaaatcgccgccaattttcacaaactcggcgttaaccaaaacgacgtcgtcatgctcctcctcccaaactgtcccgaattcgtcctctctttcctcgccgcctccttccgcggcgcaaccgccaccgccgcaaaccctttcttcactccggcggagatagctaaacaagccaaagcctccaacaccaaactcataatcaccgaagctcgttacgtcgacaaaatcaaaccacttcaaaacgacgacggagtagtcatcgtctgcatcgacgacaacgaatccgtgccaatccctgaaggctgcctccgcttcaccgagttgactcagtcgacaaccgaggcatcagaagtcatcgactcggtggagatttcaccggacgacgtggtggcactaccttactcctctggcacgacgggattaccaaaaggagtgatgctgactcacaagggactagtcacgagcgttgctcagcaagtcgacggcgagaacccgaatctttatttccacagcgatgacgtcatactctgtgttttgcccatgtttcatatctacgctttgaactcgatcatgttgtgtggtcttagagttggtgcggcgattctgataatgccgaagtttgagatcaatctgctattggagctgatccagaggtgtaaagtgacggtggctccgatggttccgccgattgtgttggccattgcgaagtcttcggagacggagaagtatgatttgagctcgataagagtggtgaaatctggtgctgctcctcttggtaaagaacttgaagatgccgttaatgccaagtttcctaatgccaaactcggtcagggatacggaatgacggaagcaggtccagtgctagcaatgtcgttaggttttgcaaaggaaccttttccggttaagtcaggagcttgtggtactgttgtaagaaatgctgagatgaaaatagttgatccagacaccggagattctctttcgaggaatcaacccggtgagatttgtattcgtggtcaccagatcatgaaaggttacctcaacaatccggcagctacagcagagaccattgataaagacggttggcttcatactggagatattggattgatcgatgacgatgacgagcttttcatcgttgatcgattgaaagaacttatcaagtataaaggttttcaggtagctccggctgagctagaggctttgctcatcggtcatcctgacattactgatgttgctgttgtcgcaatgaaagaagaagcagctggtgaagttcctgttgcatttgtggtgaaatcgaaggattcggagttatcagaagatgatgtgaagcaattcgtgtcgaaacaggttgtgttttacaagagaatcaacaaagtgttcttcactgaatccattcctaaagctccatcagggaagatattgaggaaagatctgagggcaaaactagcaaatggattgtgatggatgatttcaaccaaaaagcaaaagatgatttcaatgtgtatatacatacaactgtttgacccaaccaaggaaacaaactcatacgaaccattgtcttttgttgttgttgttgttgttgttgttgctgttcttgcttgattcatgtaatgagcctttgtgatgaaggtggtttcttttttggtttcctatcatgtaacttgtgctggagaaaacagcgcggccgcgaattcgatatccagcttatcgatgccgtcgaccnnnnnnnnnnnnnnn

SEQ ID NO: 118221 - DNA, 375 bp, Arabidopsis thaliana
  unsure (1)..(375): unsure at all n locations
tnaggttcctgttgcgtttgtggtgagatcgaaagattcaaatatatccgaagatgaaatcaagcaattcgtgtcaaaacaggttgtgttttataagagaatcaacaaagtgttcttcactgactctattcctaaagctccatcagggaagatattgaggaaggatctaagagcaagactagcaaatggattaatgaactagggtttatatgatccccgtatatgaatgcaatcttttcaggaaaatgnaaccaaatttcggttttgtggaccaagggatttaaccttcccggtaaaaggattatatttggccctttttccccttaaggggtgtaaaaggggtaaaaagngggnntccnttttttttnggggggg

SEQ ID NO: 118222 - DNA, 2096 bp, Arabidopsis thaliana
  unsure (1)..(2096): unsure at all n locations
ttgtttttgacgaaccagtgtgagtaatttagatcggtattagatccatcttaggtttctctaatttctctcaattcactccaaaattttgattatttcttctttctggcttgtcaattttagtcatttgtaatccttgcttttgcgatcggaatcgtaaaaatccgatctttcttttagattcgttttgtttttgattccaaatcggaaaaatgggtaaagtagctgttggagcgactgttgtttgcacggcggcggtttgtgcggtggctgttttggttgttcgacgacggatgcagagctcagggaagtggggacgtgttttggctatcctcaaggcctttgaagaggattgtgcgactccgatctcgaaactgagacaagtggctgatgctatgaccgttgagatgcatgctggtcttgcatccgacggtggtagcaaactcaagatgcttatcagctacgttgataatcttccttccggggatgaaaagggtctcttttatgcattggacctaggggggacaaacttccgtgtcatgcgtgtgcttcttggcgggaagcaagagcgtgttgttaaacaagaattcgaagaagtttcgattcctcctcatttgatgactggtggttcagatgagttgttcaattttatagctgaagctcttgcgaagtttgtcgctacagaatgcgaagactttcatcttccagaaggtagacagagggaattaggtttcactttctcgtttcctgttaagcagacttctctgtcctctggtagtctcatcaaatggacaaaaggcttttccatcgaagaagcagttggacaagatgttgttggagcacttaataaggctctggaaagagttggtcttgacatgcgaatcgcagcacttgttaatgataccgttggaacactagccggtggtagatactataacccggatgttgttgctgctgttattttaggcactgggacaaacgcagcctatgttgagcgtgcaaccgcgatccctaaatggcatggtctgcttccaaaatcaggagaaatggttataaacatggaatggggaaacttcaggtcatcacatcttccattaaccgagtttgatcacacgctggatttcgagagtctgaatccaggcgaacagattcttgagaaaatcatttccggtatgtacttgggagagattttgcgaagagttcttctaaagatggctgaagatgctgctttctttggcgatacagtcccatctaagctgagaataccattcatcattaggactcctcacatgtcggctatgcacaacgacacttctccagacttgaagattgttgggagcaagattaaggatatattggaggtccctacaacttctctgaaaatgagaaaagttgtgatcagtctctgcaacatcatagcaacccgaggagctcgtctctctgctgctggaatctatggtattctgaagaaactgggaagagatactactaaagacgaggaggtgcagaaatcggttatagccatggatggtggattgtttgagcattacactcagtttagtgagtgtatggagagctcactaaaagagttgcttggagatgaagcttcaggaagcgttgaagtcactcactccaatgatggatcaggcattggagctgcgcttcttgctgcttctcactctctctaccttgaagactcttaaaacctacccaaagagcgccatttttcggtaatttactgaaagcttttcgctatcagaaaacgcctaagccaagttctaaggcgtcataaaagaaagcattccatgtttttactcttccccaagactttctttgtagcaaataagtttccttgggagaaatatttgttttcatgttcttcaaaaataaaagactcagttcttcagattctgggattttattataaccagatatgttgtaaaaactacaaattcaaagctcacttcactggagttctgagtatataaagatttcatttttcctaaaaaaaaaaaaaaaaactaaattactcacactcnnnnnnnnnnnnnnnnnnnnnnnnnnnnnnnnnnnnnnnnnnnnnnnnnnnnctacct

SEQ ID NO: 118223 - DNA, 852 bp, Arabidopsis thaliana
  unsure (1)..(852): unsure at all n locations
aggacttggtnttaagaccnggggggtccnctaaggcggggggnccagaancggtntncccnggntgggggttgttggngcttncccccagttaggggggtgtatggggggcnccctaaaggngtgcttggagatgaagcttcanggaagcgttgaagtcactcactcccatggtggatcaggcattgggactgcgcttcttgctgcttctcactctctctacccttgaaggactcttaaaaacctaccccaaaggngcgccatttttcggtaatttactgaaagcttttcgctatcagaaaacgcctaagccaagttctaaggcgtcataaaagaaagcattccatgtttttactcttccccaagactttctttgtagcaaataagtttccttgggagaaatatttgttttcatgttcttcaaaaataaaagactcagttcttcagattctgggattttattataaccagatatgttgtaaaaactacaaattcaaagctcacttcactggagttctgagtatataaagatttcatttttcctcatcattgagtacacataaaactactgtgtatgaatctcatatgcgtacacaaaagtttacttcaaatcatgttttaccaacaaatgggtacacaaaagatcaaatctttacttcataacaacataaaatctccaacagatgcattatcagaaagtggaacagaacctaaatcaagagtcagatgattgaacagagacattgttgagacgttcaagagccaagagaagagcttgagtaccaagatcaccttcaccatgagccttaagagacaagtaaagctgttgagcatgagctaaaccaggcaaag

SEQ ID NO: 118224 - DNA, 1449 bp, Arabidopsis thaliana
atgcacgcctgcgtaagctcggaattcctctcgagctgggttgatcaaaagttcgaaacttttttttttccggcaatggagggactagttccggtacagagacttccaattaaagtggcttcaccttctctgtatcggtgtaacaattctgtctcaatcagacgttcaatttcaggttttgccatggacaggaagataaactttagggctccgtcgcaattctcgatccgagctcaacagtcggatttgaaggaaagcttagctgtgtcttcttcatcagtagaggataaaggaaatgttcttagaatcaaggaatgggaagtagagatgtatcaggaggaattagctattagtcaaggtattaggataaggagaaaaccaccaagtaaggctcctttgggatactctggaccatttgagttgagattgcataacaatgatgctgattctcctcgtaatatcttggaggagatcacatggtacaaagacgtagaagtttcccggatgaaggagctaaatccgcttgacgtgctgaagaaagctgtagaggatgctcctcctactagggattttgttggggctcttaggatggctcataaaagacctggcttccctggcttgatagctgaggttaagaaggcttctccaagtagaggaatcttaaaagagaattttgacccggtcgagattgctcaagcttatgaaaaaggcggagcagcatgcctcagcgttttgacagaccagaagtatttccagggaggctttgaaaacttggaagcaataaggagcgctggtgtgaagtgtccactattatgcaaagagtttgttgtagatccatggcagatctactatgctcggactaaaggcgcagatgcagtactgcttattgctgctgtattggctgacctagaaataaccttcttgcttaagatttgcaagaagcttagcttggctgcccttgttgaggtacatgatgagagagagatgggtcgtgtacttggaatagaaggaatcgagcttgttggcatcaataaccgaagtcttgaaacatttgaagtggacatcagtaatacaaagaagcttcttgctcttgaaggagagcatggtagacaaatccgtgagagagacatgattgtggttggcgaatctggtctgtttacaccagatgacattgcctatgtacaagcagccggagtcaaagcagttttggttggagaatccattgtgaagcagaacgaccctgagaaaggaatagctggactttttggcaggaacatttctcatacttagagaccatatcataatacatctccaaatacgtttcctagtacatttgttttgtatcttgctctgtgagtattgaggaaagactagaaaggtttgttggttctgatgtttaagacattttcaaaaaaccatcgaataaaatgaatcgaaatcgatttacag

SEQ ID NO: 118225 - DNA, 940 bp, Arabidopsis thaliana
  unsure (1)..(940): unsure at all n locations
nnnnnnnnnnnnnnnnnnnnccacgcgtccgagagatttggtgaagacgatggagatgcaagaggctaatcaaggaggaggatcggaggtttctccgaatcagacgatttacatcaacaatctcaacgaaaaagtgaagcttgatgagctgaagaaatcgctgaatgcagtgttctctcagttcgggaagatactggagatattggcgtttaagacctttaagcacaaaggacaagcttgggtagtcttcgacaacaccgagtctgcttccactgctattgctaaaatgaataattttcctttctacgacaaggagatgagaatacaatatgccaaaacaaaatcagatgttgttgccaaggccgatggtacatttgttcctcgcgagaagagaaagagacatgaggagaaaggaggcggcaagaaaaagaaagaccagcaccatgattctacacagatgggcatgcccatgaactcagcatatccaggtgtctatggagctgcacctcctctatcgcaagtaccataccctggtggcatgaaacccaatatgcccgaggcaccagctccgccaaataatattctctttgtccaaaaccttcctcacgagacaactccaatggtgcttcagatgttgttctgccagtaccaaggatttaaggaagttagaatgattgaagccaaaccgggaatcgcctttgtggagtttgctgatgagatgcagtcgacggtcgcaatgcagggacttcaaggtttcaagattcagcaaaaccagatgctcatcacgtatgccaagaaatagacaatttcgttttatttgtgtttcgatgagatatgtttgtatctgtcaatgttacttcttgccatgggggctgtcttctgggttgtgtgatgctagatatccctctctacttacattttttcatcaaaaaaaaaaaaa

SEQ ID NO: 118226 - DNA, 588 bp, Arabidopsis thaliana
taccgattcggagtttcgacccagacccacccgtacatctaccaacgagattcttctcgaaaatttcctgcgcctctccgtgtctgtgaaatcgattcaggttaaggatgtcgagagctacatacattatcggtgcccttgcgggatctgcggtagtagcttacgtgtgtgacaaagttatttctgatgataagctttttggaggtactacaccaggaactattactaacaaggaatggggtgctgcgactgaagagagattacaagcatggccaagagttgctggtcctcccgtcgtcatgaaccctatcagtcgccagaatttcatcgtcaagtcacgtcctgaataacttttgatgccttctcgtgcatcgttctcattcgttatggattcattttcgaatatctgctcttttgtgtttgatttgaggatcggctgattgctctagctggttatagtaataatttgtgttgatgcgtaacacattattcggatcaagcttttcccccgatgcataaccttttgtaaaggtttgttgattttgacggtaaatgaaatcgggccaaaagagaaaacctctttggccc

SEQ ID NO: 118227 - DNA, 1014 bp, Arabidopsis thaliana
  unsure (1)..(1014): unsure at all n locations
gatgaaccacttttagcaacacacatcaaaaacgacgaaaacagagtaaaagaagaagaaaaaaaacggaggaggaacagttagcgccgtccatggcgggtcttcagagatccaccatctctttccgtcgacccacgcgtccgaatttgctcattagagaacagagaaaaaaaaaaacaatggcaactcaagccgccgggatcttcaactccgccataacaaccgccgcaacctccggcgtcaagaaactccactttttctcaacaacccaccgtcccaaatccctctccttcaccaaaaccgcaatccgcgccgagaaaacagattcctccgccgccgctgctgcagcccccgccacgaaagaagctcccgtgggattcacgccaccgcagctagacccaaacacaccgtctccgatcttcgctggaagcaccggtggtcttctacgtaaagcgcaagtggaagagttctacgttatcacgtggaactcaccgaaagaacagatctttgagatgccgacaggaggagcagcgatcatgagagaaggtccgaatcttctgaagctagcgaggaaagagcagtgtttagctttggggacaaggcttagatccaagtacaagatcacttaccagttttacagagtgtttcctaacggtgaggttcaatatcttcatcctaaagatggtgtttatccagagaaggcgaatccaggaagagaaggtgttggtctcaacatgagatctattgggaaaaatgttagtcccattgaagttaagtttactggcaaacaaagttatgatttgtaagatctgtaaactaaaaaaaccaaaaactatgtgcatgtggtgatgattatgactatgtttcatgttaatttttaatggattttgttttgataaaaaaaaaaaaaaaaaggnnnnnnnnnnnnnnnnnnnnnnnnnnnnnnnnnnnnnnnnnnnnnnnnnnnnnnnnnnnnnnnnnnnnnnnnnntataatcgnnnnnnnnnnnnnnng

SEQ ID NO: 118228 - DNA, 685 bp, Arabidopsis thaliana
  unsure (1)..(685): unsure at all n locations
acgtcgcatgaccgcgtacgtcatttactccacagagaaagattcagagaaaacagaagaaactatggcaactcaagccgccggaatcttcagccccgccataacaaccactacttccgccgtcaagaaactccacctcttctcatcaagccaccgtcccaagtctctctccttcaccaaaaccgccatccgcgccgagaaaacagagtcctcctctgctgccccagccgtgaaagaagctccagttggattcactcccccgcagctagacccaaacacaccatcaccaatcttcgccggaagcacaggaggtctcctccgtaaagcacaagtagaggaattttacgtgatcacatggaactcaccgaaagaacaaatctttgagatgccaacaggaggagctgcgataatgagagaaggaccgaatctattgaaactggcgaggaaagaacagtgtttggctttaggtacgaggttgaggtcaaagtacaagatcacttaccagttttacagagtgttccctaacggagaggttcaatatcttcacccgaaagatggggtttatccagagaaagcgaatccaggaagagaaggtgttggactaaacatgggtccatgggaaatgtngnccttggggtaatcctgggaaanttgnttgaagttanngnttntaaatnngccnggc

SEQ ID NO: 118229 - DNA, 697 bp, Arabidopsis thaliana
  unsure (1)..(697): unsure at all n locations
gttgagaccaatgggttttttgcaggttattaattcttgggcactaattcctcttcatgtaccagagataagcccaaccattggtccaccgtcccggaaaagcgaaacttcttcaccaggacgaacagtccaagctgattcgttcgaaggtcaaggttcagccaaccaaacctatcgccgaagaaggactcaaacctatcagaactgacgnaggtatggagaggagtcgatccaacggaggaggagccatccgccaccatcgaaacacagggagagtgtctccggcggtggacccgccgtcgccgagactgtcggcgtttgggtgctgctctgccttcgggaagaaacagccggggaagaaggttaatcagaggaaaaggccagccaagcgtagatccagataggcatgaactaaagtctaaagtaaagaagaagaacccccccaaatgatgagaaaacaaaccaaaacaaaaagagagtatatatccttagactgcttcttatgaatctttttctttctgtttttgtttgtgtttttttgtttgtgctttaatgttaaaactgtttaaactcagagactatatatatgtttatatttgtttaaaaaaaaaaaaaaaaagnnnnnnnnnnnnnnnnnnnnnnnnnnnnnnnnnnnnnnnnnnnnnnnnnnnnnnnnnnnnnnnnnnnacacgaattc

SEQ ID NO: 118230 - DNA, 1948 bp, Arabidopsis thaliana
  unsure (1)..(1948): unsure at all n locations
tttttcccctttttccnctgtcacttatttcccctctntccttccgtcgattcttgcgtttgtgagtgatttagttgtttgatgaaatctcaggacttctcagattcgaattataaatgggaaattgttgtgcgagcccgggttcggagactgggagtaagaaggggaaaccaaagatcaaaagtaacccgttttatagtgaagcatacactacgaatggatctggaactgggttcaagctctctgttttgaaagatccaacaggacatgatatatctcttatgtatgatctggggcgtgaggttggtcgcggagagtttggtattacttacttgtgcactgatatcaaaacgggcgagaagtatgcgtgcaagtctatatcaaagaagaagcttagaacagctgtggatatagaggatgttaggagggaagttgagataatgaaacatatgcctagacacccaaatatcgtgtcgctgaaggatgcctttgaggatgatgatgcagtgcatatagttatggagttgtgtgaaggaggtgagctgtttgatcggattgttgctagaggtcattatactgagcgagctgctgctgcagtgatgaagactattcttgaagttgttcagatatgccataagcatggagtgatgcatcgggatctaaagcctgagaactttctctttgcaaataaaaaagagacatcagcccttaaagccatagattttggattatcagtcttcttcaagcctggtgagggattcaacgagattgttggaagtccttattacatggcaccagaggtacttaggcgaaattacggacctgaggttgatatctggagtgctggagttatcctttatatcctgctctgtggtgtcccaccattttgggccgagactgagcaaggggtggctcaggcgatcattaggtcagttatcgactttaagagggatccatggccgagagtttctgagactgccaaagaccttgtgaggaagatgctcgaacctgaccccaaaaaacggctttctgctgcacaagtactcgaacattcttggatacaaaatgcgaagaaggctccaaatgtttcactcggcgagacggtgaaagcaagactcaaacagttttctgttatgaacaagctcaagaaaagagcgctacgggtgatagccgaacacttatcagtggaggaagtagctggcatcaaggaagcatttgagatgatggacagtaaaaagacgggaaagataaacctcgaggagcttaaatttggacttcataaactcggacagcagcagatacctgatactgatctacagattctgatggaagctgctgatgttgatggggatgggactttaaattatggggagtttgtggctgtctctgtgcatcttaagaaaatggcgaacgacgaacacttgcataaggcttttagcttttttgaccagaatcagagcgattacatagagattgaggagctgcgtgaggctttaaatgatgaggtggatactaacagtgaagaagttgttgcagctattatgcaagatgttgacacagacaaggacggacgaataagctatgaagagtttgcggcgatgatgaaagctggaacagattggaggaaagcgtcgaggcagtattcccgggaaagattcaacagtttgagcctcaagttaatgagagaaggttcattgcaattagaaggcgaaaattaagaaaggttctttgtttctgtatctcttaaagaagtaaaaagaaaaaggaaaaaacagtattctttgaaaattgtttatctttttttttcctcaataattgtagatcagggtttcaaatgttttagttacttgaatagccagccatgtacgatatgaagcagatgttcttaaattttctgactctttattttcatgttgtctggatccttaatactatttgttggcaaaca

SEQ ID NO: 118231 - DNA, 589 bp, Arabidopsis thaliana
  unsure (1)..(589): unsure at all n locations
gctgctacgcctgcaggtaccggtccggatttcccgggtggacccactgcgtccgtacggctgcgagaagacgacagaaggggaagaaagaggaggaagaaatgaactagtctgaaacacaatgatgaaccacttttagcaacacacatcaaaaacgacgaaaacagagtaaaagaagaagaaaaaaacggaggaggaacagttagcgccgtccatggcgggtcttcagagatccaccatctctttccgtcgacagggctcttcgggtatagtctgggacgatcgtctcatcgccgagctaagccaacaagcggccaacgaccggaaaggcgagactctacaacaggacgaacaggccaagctgattacgtcggaagtacaggatcagacaaccaaacctatcgccggagaaggactcaaacctatcagaactgacggaggtatggagaggagtcgaatccaacggaggaggagccatccgccaccatcgaaacacagggagagtgtctccggcggtggacccgccgtcgccgagactgtcggcgtttgggtgcttctctgccttcggggaaggaacannccgggggaa

SEQ ID NO: 118232 - DNA, 493 bp, Arabidopsis thaliana
agttttacagagggtgccctaccggaggagctgcgataatgagagaaggaccgaatctattgaaactggcgaggaaagaacagtgtttggctttaggtacgaggttgaggtcaaagtacaagatcacttaccagttttacagagtgttccctaacggagaggttcaatatcttcacccgaaagatggagtttatccagagaaagcgaatccaggaagagaaggtgttggactaaacatgagatccatcggtaaaaatgttagtcccattgaggttaaattcactgggaaacaatcttatgatttgtaagattttaattcgtattttatataataatgctagacaaacaaaacaaatttaaaaagggatcacactacatgtaaaatcttgcggatgttataacaactctttgaacttttcaagcaaaaaaaaaaaaaaaaaaagggcggccgctctagaggatccaagcttacgtacgcgtgcatgcgacgtca

SEQ ID NO: 118233 - DNA, 2259 bp, Arabidopsis thaliana
  unsure (1)..(2259): unsure at all n locations
gannnnnnnnnnnnnnnnnnnnnnnnnnnnnnnnnnnnnnnnnnnnnnnnnnnnnnnnnnnnnnnnnnnnngcatatgccacgcgtccgggaaacacataaaaaattaagagttgtcattctttgaatccccgcaagcaagaagaagaagaagaagaagagagtcaatttgtgtgttttgtcatttgaagaagagagagaaagaggaagactttgactcgtcttcttcctctcttcttctctctctatcactgcatttgtttttcctcacagcgaaccttgagatttgattagatggggaattgttgtggcaatccgagttcggctacgaaccagagtaaacaagggaaacccaagaacaaaaacaatcctttttacagcaatgaatacgctacaacagatagatctggagctggttttaagctctctgtgctgaaagatcctacaggacatgatatatccttgcagtatgatcttggacgtgaggttggtcgaggcgagtttggtataacttacttgtgtactgataaggaaactggtgagaagtatgcctgcaagtccatatctaagaagaagctgagaacagcagttgatatagaggatgttaggagggaggttgagattatgaagcatatgcctaaacacccaaatgtcgtctctttgaaggattcctttgaggatgatgatgcggtgcatatagttatggagttgtgtgaaggaggggaactgtttgatcggattgttgcaagaggtcattacactgagcgggctgctgctgcggttatgaagactattgttgaagttgttcagatatgccataagcaaggagtgatgcatcgggatctcaaaccagagaactttctttttgcaaataagaaagagacatcagcccttaaggccattgattttggattatctgtattcttcaaacctggtgagcagtttaatgagattgttggaagtccttattacatggcacccgaggtgctgcggcgaaactatggtcctgagatcgatgtgtggagcgctggagttatcctctatatcctactttgtggtgttccgccattttgggcagagactgagcaaggggtggctcaagcgatcattagatcagttattgactttaagagagatccatggccaagagtttctgacagcgccaaagaccttgtgagaaagatgcttgaacctgatcccaaaaaacggcttactgctgcacaagttctcgaacatacttggatactgaatgcaaagaaggctccaaatgtctctcttggggagactgtgaaagcaagactaaagcagttttctgttatgaacaagctcaagaaacgagctctacgagtgatagctgaacatttgtcagtggaggaagcagcagggataaaggaagcatttgaaatgatggacgtaaacaagagaggcaagataaatctcgaggagcttaaatatggacttcaaaaagctggacaacagatagctgatactgatcttcaaattcttatggaagctactgatgttgatggggatgggacactgaactatagcgagtttgttgctgtttcagtccaccttaagaagatggcgaatgatgaacacttgcataaagcttttaacttctttgatcagaaccagagtggttacatagagattgacgaacttcgtgaagccttgaatgatgaattggataatactagcagtgaggaagtaatcgcagccatcatgcaagatgttgataccgacaaggatggacgaataagctatgaagagtttgttgcgatgatgaaagctgggacagattggagaaaagcgtcaagacagtattctcgggaaagattcaacagtttaagcctcaagttaatgagagatggttcattgcaattagaaggcgagacctaagaaagcaagagacaaaagtttgaatctttttgaaaaagcagcagcagaagaagaagaagaaagaagcgtcagcattgtcaaaaagaaataactattatgttctataagcatttaacacggtaatgatagaaagattggtcgtggtcgtaggttttgtttagggctttcaatttgtttgaaaagttcttcaatggacagcgatgtgattgatgatgatgtcgaacaagtttctgagattccaaagatacgagttttgtgaaaaaaaaaaaaaaaaaagnnnnnnnnnnnnnnnnnnnnnnnnnnnnnnnnnnnnnnnnnnnnnnnnnnnnnnnnnnnnnnnnnnnnnnnnnnnnnnttc

SEQ ID NO: 118234 - DNA, 457 bp, Arabidopsis thaliana
aaaaagagtctctctttgctctcaccacactaagaaagaagaagcgagggagaaggagactttttgactcggctgcttcttctcctttctctctgtcacttatttcccctctttgcttccgtcgattcatcccaatctgatcatctctttctccggttaaggtctcaggacttctcagattcgaattataaatgggaaattgttgtgcgagcccgggttcggagactgggagtaagaaggggaaaccaaagatcaaaagtaacccgttttatagtgaagcatacactacgaatggatctggaactgggttcaagctctctgttttgaaagatccaacaggacatgatatatctcttatgtatgatctggggcgtgaggttggtcgcggagagtttggtattacttacttgtgcactgatatcagaacgggcgagaagtatgcgtgcaagtctatatc

SEQ ID NO: 118235 - DNA, 1561 bp, Arabidopsis thaliana
ccacgcgtccgctctcagttcctacgcgaagttttcaacagattcgccggagaatcttcgaatcaacggcggagaaatggctctatcacgcctctcatcacgatccaacatcatcactcgtcccttctccgccgccttcagccgattaatctcaacggacacaactccgatcacaatcgagacttcgcttcctttcacagctcacttatgtgatccaccgtcacgctccgtcgaatcatcgagtcaagagcttctcgatttcttcagaaccatggcgttgatgcgacgtatggaaatcgcagccgattcgctttacaaagcgaagctaatccgagggttttgtcatctctacgacggccaagaagctgtagctataggcatggaagctgcgattacaaagaaagacgcgattattactgcttatcgtgatcactgtattttcttaggtcgtggtggttcgcttcatgaggttttctcagagcttatgggaagacaagctggttgttctaaagggaaaggtggatctatgcacttctataagaaggaatcgtcgttttacggtggtcatgggattgttggtgctcaggttccattaggttgtggtattgcttttgctcagaagtataataaggaagaggctgtcacatttgctttgtatggtgatggtgctgcgaatcagggacagttgtttgaagctttgaatatttctgctctttgggatttgcctgcaattttggtctgcgagaacaatcactatggaatgggaactgctgaatggagagccgctaagagtccatcttactacaagcgtggtgattatgttcctggactcaaggtagatggtatggatgcatttgctgtcaaacaagcttgcaaatttgctaagcagcatgcgttggagaaggggccaataattcttgagatggacacatacaggtaccacggtcactccatgtctgatcctgggagcacataccgtacccgagatgagatatctggtgtgaggcaggaacgggatccaattgagagaataaagaagctggtactatctcatgacctagcaaccgagaaagagcttaaggatatggagaaggaaattagaaaagaagtagatgacgccattgccaaagctaaggattgcccaatgccagagccttctgagctctttaccaatgtgtatgtgaagggatttggcaccgagtcatttggacctgacagaaaagaagtcaaagcttcccttccatgatcatggagctcttgttcgttaaactgccacgtgtcatgagaaagttggctgatagagaaatctatgaatatgaataaagatctgattgtatactctctctctccccccccttctgaactttaatctctctgtatctttgtttacaaacataaggagaaacaatgttattcttgtgaagctttagtagtctcgtgtttaatattcaagcaatcgagttgagatctcaaaaaaaaaaaaaaaagggcggccgctctagaggatccaagcttacgtacgcgtgcatgcgacgtcatagctcgtgttgtgtgaaaggga

SEQ ID NO: 118236 - DNA, 519 bp, Arabidopsis thaliana
  unsure (1)..(519): unsure at all n locations
aaagattcgatttttgactgcaaaaaagagaatttctaaaagcaaatcggagagcttcggcgatggcgttatcacgactttcttcacgatccaacactttcctaaagccggcgattaccgccttgccctcctccatccgccgtcatgtttccacagactcatcaccgatcacaatcgaaaccgccgtccctttcacatcgcatctatgtgaatcaccgtcacgctccgtcgagacttcatcggaggagatcttagcctttttccgtgacatggctcggatgaggaggatggagatcgcagcagattctctttacaaggcgaagctgatccgtgggttctgtcatttgtacgatggtcaagaggctttagcggtgggaatggaagcggcgattaccaaaaaagatgcgattatcacatcattggaatcggggatccanttgaacttttcattgggccctggttgggaaancttttttnatntttnnnttnagctttttggggggaaaacttggtttgttc

SEQ ID NO: 118237 - DNA, 491 bp, Arabidopsis thaliana
cggtcgcgtgggcggacgcgtgggcggacgcgtgggcgatcggatagcttcggcgatggcgttatcacgactttcttcacgatccaacactttcctaaagccggcgattaccgccttgccctcctccatccgccgtcatgtttccacagactcatcaccgatcacaatcgaaaccgccgtccctttcacatcgcatctatgtgaatcaccgtcacgctccgtcgagacttcatcggaggagatcttagcctttttccgtgacatggctcggatgaggaggatggagatcgcagcagattctctttacaaggcgaagctgatccgtgggttctgtcatttgtacgatggtcaagaggctttagcggtgggaatggaagcggcgattaccaaaaaagatgcgattatcacatcgtatcgtgatcactgtactttcattggtcgtggtgggaagcttgttgatgctttctctgagcttatggggagaaaaactg

SEQ ID NO: 118238 - DNA, 887 bp, Arabidopsis thaliana
cttcttcattcaccatgggaagatctccttgttgtgaaaaagctcacacaaacaaaggagcttggactaaagaagaagatcaacgtctcgtagattatatccgtaatcacggtgaaggttgttggcgttctcttcctaaatccgctggattgttgcgttgtggtaaaagttgtagattgagatggattaattaccttcgtcctgatcttaaacgtggtaattttactgatgatgaagatcaaatcatcatcaaactccatagcttactcggtaacaaatggtcattgatagctggaagattaccaggaagaacagataacgaaataaagaattattggaacactcattttaagaggaagcttcttagtcacggtattgatccacaaactcatcgtcagattaacgaatccaaaacggtgtcgtctcaagttgttgttcctattcaaaacgatgccgttgagtattctttttccaatttagccgttaaaccgaagacggaaaattcctccgataacggagcttcgactagcggcacgacgacggacgaggatctccggcagaatggggagtgttattatagtgataattcaggacatataaagctgaatttggatttaactcttgggtttggatcctggtcgggtcggatagtcggagtcgggtcatcggctgattctaaaccgtggtgcgacccggtgatggaggcgcgtttgtcactgttgtaataatttgtcaaaaaaatcccaaaaaatgggttttgttacttcattttttttttgcttgagtccttttggataaatatagaaattctttacttcaaaaaaaaaaaaaaagggcggccgctctagaggatccaagcttacgtacgcgtgcatgcgacgtcatag

SEQ ID NO: 118239 - DNA, 872 bp, Arabidopsis thaliana
  unsure (1)..(872): unsure at all n locations
nnnnnnnnnnnnnnnnnnnnnnnnnnnnnnnnnncgcagtaaccggtaccggaattcccccgggtcgacccacgccgcctcaaagcattctaaaagaagtttcaaagaagaagtgaaaatggaaaccactgcttttaacacaacatcacgaattggaaactggtcatcggctatttctccacctctacaaacatgtggatctttcaagtgccaattaccaacacgaagaggtgttattgtagctgatcttcgaaactcaaacttccgatggaggaaagcaacgacaacaagcagaggaaatgttgcagcagaggcagttaaaattcctacgtcagtaccagtaagagtggcgcgtgacttagctcaagcaggataccgctatctcgacgtgaggacaccagacgaattcagcatcggacatccgactagagccatcaacgtaccttacatgtacagagtcggatcaggaatggttaagaacccgagttttctaagacaggtcttcgtcccacttcaggaaacacgatgaaatcataatcggttgtgagagcggtcaaatgtcatttatggcctcaactgatcttctcactgctggcttcacggcgatcacagacattgctggaggatacgtcgcttggacagagaatgagctgccggtagaagagtgaaaacaatcatagccatatcacctcctgtaattatcaataaattctgtagatgttctcaacgcaagtatcaatcatcattattattctcttaaaacatagtttaactgtcaaaaaatctagaggatccaagcttacgtacgcgtgcnnnnnnnnnnnnnnnnnnnnnnnnnnnnnnnnnnttgcagcttcaaccttttctttttc

SEQ ID NO: 118240 - DNA, 636 bp, Arabidopsis thaliana
  unsure (1)..(636): unsure at all n locations
gacataaaacttgctgacgtgacacccatacctttgtgtctgtatgtattatataaacgctatagaactaagagaagaagtatctaagtagcatcaaagcattctaaaagaagtttcaaagaagaagtgaaaatggaaaccactgcttttaacacaacatcacgaattggaaactggtcatcggctatttctccacctctacaaacatgtggttctttcaagtgccaattaccaacacgaagaggtgttattgtagctgatcttcgaaactcaaacttccgatggaggaaagcaacgtcaacaagcagaggaaatgttgcagcagaggcagttaaaattcctacgtcagtaccagtaagagtggcgcgtgacttagctcaagcaggataccgctatctcgacgtgaggacaccagacggatttcagcatccggacatccggcttgggggccatcaacggtaccttacatgtacagagtcggtccagggtggttaagccccggttttttaggcagggtcgtcctcttagggacacggtgaatcataatcggttttngngcggnaaatgcatttntggctaactgnntnttantgtggttacggggnaaggattctgggacgcgttgcaggatagtct

SEQ ID NO: 118241 - DNA, 711 bp, Arabidopsis thaliana
  unsure (1)..(711): unsure at all n locations
cggaaatttggggaaaaacttggtgtccatcgcgggtatattttcttcccaacctttcttacaaaacaatgttgggttcctttccaagttgccattttccccacccggaaaaaggtggttatggaagctgttcttcgaaactcaaccttccaatgaagaaaagcaacgacaacaagcagagaaaatgtgcagcagagcaggttaaaattcctacgtcagtaccagtaagagtggcgcgtgagctagctcaagcaggataccgctatctcgacgtgaggacaccagacgaattcagcatcggacatccgactagagccatcaacgtaccttacatgtacagagtcggatcaggaatggttaaagaacccgagttttctaagacaggtctcgtcccacttcaggaaacacgatgaaatcataatcggttgtgagagcggtcaaatgtcatttatggcctcaactgatcttcgccctgctggcttcacggcgatcacagacattgctggaggatacgtcgcttggacagagaatgagctgccggtagaagagtgaaaacaatcatagccggcccccctcctggaaatatcaataaattctgtagatgttttccacgccaggatccattctcctttganaggaaaaaaaaaaaaaaaaaaaaaagggcggccgctttaaaggattccagcttaaggaagggtgcaagcgacgtta

SEQ ID NO: 118242 - DNA, 501 bp, Arabidopsis thaliana
  unsure (1)..(501): unsure at all n locations
aaagcattctaaaagaagtttcaaagaagaagtgaaaatggaaaccactgcttttaacacaacatcacgaattggaaactggtcatcggctatttctccacctctacaaacatgtggttctttcaagtgccaattaccaacacgaagaggtgttattgtagctgatcttcgaaactcaaacttccgatggaggaaagcaacgacaacaagcagaggaaatgttgcagcagaggcagttaaaattcctacgtcagtaccagtaagagtggcgcgtgacttagctcaagcaggataccgctatctcgacggtgaggacacccagacggatttcagcatcggcccatccgncttggaggccttcaacggtccctttacatcgtccagggtcgggttcagggattggtttaacacccctgtttttttgacggacggtttgtnccccttttgggggcccgggtggaatcattatggggtttgngggggaaaattttttttngcccc

SEQ ID NO: 118243 - DNA, 559 bp, Arabidopsis thaliana
  unsure (1)..(559): unsure at all n locations
aaaagaagtttcaaagaagaagtgaaaatggaaaccactgcttataacacaacatcacgaattggaatctggtcatcggctatttctccacctctacaaacatgtggttctttcaggtgccaattaccaacacgaagaggtgttattgtagctgatcttcgaaactcaaacttccgatggtaagctagcaatcaacggcgagaatcgccttctctatctgattttagattatgaataaatattaaatctgagtattaacttcttgctcaaggaggaaagcaacgacaacaagcagaggaaatgttgcagcagaggcagttaaaattcctacgtcagtaccagtaagagtggcgcgtgacgctagctcaagcaggataccgctatctcgacgtgaggacaccagacgaattcagcatcggacatccgactagagccatcaacgtacctnacatntacagagtcggatcaggaatngttaagaacccgattttttctaaagaaaaggtctcgtnccaactttaagggaacaacgggttnaaatantaaatngggttcttna

SEQ ID NO: 118244 - DNA, 1329 bp, Arabidopsis thaliana
caaattcagcacttctcatgaaaacaatcttcctcgtactcatttttgtctcttttgcaatctctccagcaacttcaactgcgccggaagaatgtggaagcgagtcagcgaacccgtgcgtcaacaaagctaaagctttgcctctcaaagtcatagcaatcttcgtaatcctcattgcaagcatgattggtgttggagctcctctctttagccgtaacgtttcgttcctccaaccagacggaaacatcttcactatcattaagtgtttcgcctccgggatcatccttggaaccggttttatgcacgttttacctgattctttcgaaatgttgtcatctatatgtcttgaagagaacccgtggcataaatttcctttctccggatttctcgctatgttatcgggtctaatcactctagccattgactccatggccacgagcctatacaccagcaagaacgcagttggtatcatgccccatggtcatggtcatggtcacggccccgcaaatgatgttaccttaccaataaaagaagatgattcgtcaaatgcacagctcttgcgataccgagtcattgccatggtcttggaacttgggatcatagttcactcggtggtcattggattatctctaggagcaactagtgacacttgcaccattaaaggacttatagcagctctttgcttccatcaaatgttcgaaggcatgggtcttggcggttgtatcctccaggctgagtatacaaatatgaagaaatttgttatggcgttctttttcgcggtaacaacaccattcggaatagcgttagggatcgctctatcaactgtttaccaagataatagcccaaaagctttgatcacggttggacttctaaatgcatgctccgctggattgctcatttacatggcactcgtggatcttctagctgcggagttcatgggacctaagcttcaaggtagcatcaaaatgcagttcaagtgtttaatcgcggctcttctcgggtgcggtggaatgtcgattatcgccaaatgggcttaactaatactccagatattgcggaattgaaatcatgtggatttcattatcgaactaaaaccgttttaggtttacgtctcgattctctatcggttttttatcttctcttacaaaagatttgcgtggatctatcacattttaaggaacatgtcttttggtagatatgtaaatgtgataggccccacgattcatagttttcttttgtatcttcctttattttgtcaaggcagtatagttcatatcgtgtaatgtttttgcatctcatataaataaataaaacttttgctgctttttc

SEQ ID NO: 118245 - DNA, 778 bp, Arabidopsis thaliana
  unsure (1)..(778): unsure at all n locations
atgatcttnnnnnnnnnnnnnnnnnnnnnnnnnnnnnnnnnnnnnnnnnnnnnnnnnnnnnnnnnnnnnnnnnagaactcttgactgtctctctgcggcgaaaaagagagcgaagcttgaaatctccgattaagccatgaatgctcccgaacgatatgagcgattcgtcgtccctgaaggcaccaagaaggtttcttatgatagggatacgaagatcatcaatgctgcttccttcacggttgagagagaagaccatacgattggaaacattgtccgcatgcaacttcatcgcgacgagaatgtcttgtttgctggataccaacttcctcatcctcttaagtacaaaatcatagtgaggattcacacaacaagccagtcttccccaatgcaagcatacaaccaggccatcaatgacttggacaaggagctcgactacttgaagaaccagtttgaggcagaggtggccaagttttcgaatcagttttaaggaacttggagttctccatcagcacatcggggaaaacgttttacattgtcttttgctaagcaccaatcaagactaataatgagcttgggaaattttccctagttatgctttgtataaatcaaaaacaaatcggcctgtaacttcttttaactctatgtttcaacaccatttcaggatgctatgaagtaatgcttagattaaaaaaaaaaaaaaaaggnnnnnnnnnnnnnnnnnnnnnnnnnnnnnnnnnnnnnnnnnnnnnnnnnnnnnnnnnnnnnnnnnnnnnnnnnn

SEQ ID NO: 118246 - DNA, 2338 bp, Arabidopsis thaliana
  unsure (1)..(2338): unsure at all n locations
tgagatttctccatttccgtagcttctggtctcttttctttgtttcattgatcaaaagcaaatcacttcttcttcttcttcttctcgatttcttactgttttcttatccaacgaaatctggaattaaaaatggaatctttatcgaatccaagctgattttgtttctttcattgaatcatctctctaaagtggaattttgtaaagagaagatctgaagttgtgtagaggagcttagtgatggagacaaattcgtctggagaagatctggttattaagactcggaagccatatacgataacaaagcaacgtgaaaggtggactgaggaagaacataatagattcattgaagctttgaggctttatggtagagcatggcagaagattgaagaacatgtagcaacaaaaactgctgtccagataagaagtcacgctcagaaatttttctccaaggtagagaaagaggctgaagctaaaggtgtagctatgggtcaagcgctagacatagctattcctcctccacggcctaagcgtaaaccaaacaatccttatcctcgaaagacgggaagtggaacgatccttatgtcaaaaacgggtgtgaatgatggaaaagagtcccttggatcagaaaaagtgtcgcatcctgagatggccaatgaagatcgacaacaatcaaagcctgaagagaaaactctgcaggaagacaactgttcagattgtttcactcatcagtatctctctgctgcatcctccatgaataaaagttgtatagagacatcaaacgcaagcactttccgcgagttcttgccttcacgggaagagggaagtcagaataacagggtaagaaaggagtcaaactcagatttgaatgcaaaatctctggaaaacggtaatgagcaaggacctcagacttatccgatgcatatccctgtgctagtgccattggggagctcaataacaagttctctatcacatcctccttcagagccagatagtcatccccacacagttgcaggagattatcagtcgtttcctaatcatataatgtcaacccttttacaaacaccggctctttatactgccgcaactttcgcctcatcattttggcctcccgattctagtggtggctcacctgttccagggaactcacctccgaatctggctgccatggccgcagccactgttgcagctgctagtgcttggtgggctgccaatggattattacctttatgtgctcctcttagttcaggtggtttcactagtcatcctccatctacttttggaccatcatgtgatgtagagtacacaaaagcaagcactttacaacatggttctgtgcagagccgagagcaagaacactccgaggcatcaaaggctcgatcttcactggactcagaggatgttgaaaataagagtaaaccagtttgtcatgagcagccttctgcaacacctgagagtgatgcaaagggttcagatggagcaggagacagaaaacaagttgaccggtcctcgtgtggctcaaacactccgtcgagtagtgatgatgttgaggcggatgcatcagaaaggcaagaggatggcaccaatggtgaggtgaaagaaacgaatgaagacactaataaacctcaaacttcagagtccaatgcacgccgcagtagaatcagctccaatataaccgatccatggaagtctgtgtctgacgagggtcgaattgccttccaagctctcttctccagagaggtattgccgcaaagttttacatatcgagaagaacacagagaggaagaacaacaacaacaagaacaaagatatccaatggcacttgatcttaacttcacagctcagttaacaccagttgatgatcaagaggagaagagaaacacaggatttcttggaatcggattagatgcttcaaagctaatgagtagaggaagaacaggttttaaaccatacaaaagatgttccatggaagccaaagaaagtagaatcctcaacaacaatcctatcattcatgtggaacagaaagatcccaaacggatgcggttggaaactcaagcttccacatgagactctattttcatctgatctgttgtttgtactctgtttttaagttttcaagaccactgctacattttctttttcttttgaggcctttgtatttgtttccttgtccatagtcttcctgtaacatttgactctgtattattcaacaaatcataaactgtttaatctttttttttccaaaaaaaaaaaaaaaaaaaaaagnnnnnnnnnnnnnnnnnnnnnnnnnnnnnnnnnnnnnnnnnnnnnnnnnnnnnnnnnnnnnnnnnnnnnnnnnnnc

SEQ ID NO: 118247 - DNA, 1078 bp, Arabidopsis thaliana
tgcttagcagcgacagagctcgacgattcagtaaaaccctagtagaataatggtgaagctcacggctgatttgatctggaaaagtcctcacttcttcaatgctatcaaggagcgagaattggatctacgaggtaacaagattcctgtaatcgaaaacttgggtgctactgaggaccagttcgataccattgatctgtctgataacgagatagttaagctagaaaacttcccatacctcaaccgtttaggaactttactcatcaataacaatcgtatcacccggataaatcctaaccttggagaattcctaccgaagcttcactctttggttcttacaaataacaggcttgtgaatttggttgagattcatccccttgcctccattcccaagctgcagtaccttagtttgttggataataatatcaccaaaaagccaaattatcgcctttatgtgattcacaagctaaaatcacttcgagtactggatttcattaaaatcaaagccaaggagagagctgaagctgcatctttgttttcatccaaagaagcagaagaggaagttaaaaaggtttctcgggaggaggttaaaaaagtgtcagaaactgcagaaaatccagagactccgaaagtggtggcgccaacagcggagcaaatattagctatcaaggctgcaattatcaattctcagacgatagaagaaattgccagactcgaacaggctttgaagtttggacaggttcctgctggcctgataattcctgatccggccacaaatgactctgctcccatggaggaatagaaagcgtgactgttgcccctccaatcgttgtagctactgctccagaatgctcacagcaattgttttctctggcaatcctgtacggtttctgtcacttccttaggaactcatgcgcaacagttggaaccgtgaaactatttactgctcgaggcatctgttttgaacccttaaaaagaatgccaaagaggattgtagtctttttaagtctctgcattggcatggagagcgagggtgcacacagaatttgcttatgctcttttcgcattagaatttcttctt

SEQ ID NO: 118248 - DNA, 1139 bp, Arabidopsis thaliana
ccacgcgtccgcacatctcctcattctgtattttgacaaaaaaaaaacaccctttgttttttctctcctttgcatgttgtgattgtttttgcttcacaacatgggagttttagtaatctcgcttctcgtggttcatctcctagctttttccgtctgcgttcagggcggctaccgtcgtggcggacaccatcccggcggtcacatgggaccttggatcaacgctcatgccactttttacggcggcggtgatgcttccggcactatgggtggagcatgcgggtacggcaatctgtatagccaaggttatggactggagacggcagcgctgagcacagcgttattcgaccaaggacttagttgtggcgcatgttttgagctgatgtgtgtcaacgatcctcaatggtgcataaaaggccgatccattgtggtcactgccactaacttttgtcctcctggtggtgcatgcgaccctcccaaccaccatttcgatctttctcagccgatctacgagaaaattgctctctacaaatccggtatcattcccgttatgtatagaagggttcggtgcaagagaagtggtgggataaggttcacgatcaacggccactcatactttaacttggtgttggtcacaaacgtgggtggagccggggacgtacactcggtctcaatgaaagggtcgaggacaaaatggcaattaatgtcgagaaattgggggcaaaattggcaaagcaactcttatctcaatggtcaaagtctgtcgtttgttgttaccacaagtgatcgtcgaagtgtcgtctcttttaatgttgcaccacccacttggtcctttggccagacctacaccggagggcagtttcggtattaattatatataatcggttcggtttgttattgtgctttttttttttttttcggttccaagttggggactcttttttggtaaccaattgagattgggactgatagtgatatgtagcgaatatatgtgtgggaacgagaaaaagagaagttttattaattctcgttttataatataagaaaatgaaagtgatgttatgtaaaaaaaaaaaaaaaaaaaaaaagggcggccgctctagaggatccaagcttacgtacgcgtgcatgcgacgtcatag

SEQ ID NO: 118249 - DNA, 1125 bp, Arabidopsis thaliana
ttgcacctacccgtctttaatttccgggtcgacccacgcgtccgcaataaactcttcttctgcctcctctgcccatttctcccaatctctctctattttctcagtctctctctcagataatggcaatgttgggcttggttttatctgttcttactacaattcttgcattgtctgaagcaagaatcccaggagtttacaatggtggtggttgggaaactgctcacgccactttctacggtggctctgatgcttctggaacaatgggaggagcttgtggttatggtaacttatacagccaaggctatggtgtgaacacggcggctttaagcacggctctgttcaacaatggttttagctgtggtgcttgttttgagctcaaatgtgctagtgatccaaaatggtgccattctggtagtccttcaatcttcatcactgcgactaatttctgtcctccgaactttgctcagcctagtgacaatggtggttggtgtaaccctcctagacctcactttgatcttgctatgcctatgtttctcaagatcgctgagtatcgtgccggaatcgtccccgtctctttccgccgagtgccatgccggaagagaggaggaataaggttcacaatcaacggtttccgttattttaacttggttctagtcactaacgtcgctggcgccggaaacatagtgcggctaggtgtgaaaggaacacatacttcgtggatgaccatgagtcgtaactggggacaaaactggcaatctaactcagttttggttggtcagtcactttcttttagagtcacaagcagtgaccgtagaagctcgacgtcgtggaacattgctccggcgaattggaagtttggtcagactttcatgggaaagaacttcagagtctgagggcattatcggaaactcatctatcaatattagtattttcattattactattaaaatttccagccgaaggcattagtaatttgagaaattttaatatatatatttatgttttttaagagaccaaaaaaaaaaaaaaagttcttacctcgggcggccgctctagaggatccaagcttacgtacgcgtgcatgcgacgtcatagtcgtattgaatatagacctttcaacctttt

SEQ ID NO: 118250 - DNA, 960 bp, Arabidopsis thaliana
ctttagcccatcagcaaatatcatgaatcttacagaatattcccatattttgtttctttcactatgcaccctcaacttctgcttgtactccataaactccgacgacaacggaggctgggagagaggccatgctaccttctatggtggagctgatgcatccggcacaatgggtggtgcttgtgggtacggtaacttacacagccaaggctatgggctacaaaccgcggctttgagcacggctttgttcaatagtgggcagaaatgtggggcctgctttgagctaacgtgtgaggatgatcctgagtggtgcatccctggttccatcatcgtctcggctacaaacttctgtcctccaaactttgccttagctaatgataatggtggttggtgcaatcctcctcttaagcactttgacttggccgagcctgccttcctccagatcgctcagtaccgagctgggatcgttcctgtcgcattcagaagggttccatgtgagaaaggtggagggataaggtttacgataaacgggaatccatatttcgacctcgtgctaatcacgaatgtgggtggtgctggagatataagggccgtctctttgaaaggctcaaagacagatcagtggcaatccatgtcaagaaactggggacagaattggcaaagcaacacttacctcagaggtcaaagcctttctttccaagtcactgatagtgatggtcggactgttgtgagctacgatgttgtgcctcatgattggcagttcggtcagacttttgaaggcggacaattttagatttatgatcaagtgaaactaatagacgttatatccaagaaaagtcaatgattgtgtttaagataaaactctgcttttcattgatcataaccactcttcgatatataatagtcataagaaagaaatacaatgaaaccaatttcaagcactctttgactctcttttcaaag

SEQ ID NO: 118251 - DNA, 1353 bp, Arabidopsis thaliana
catctctcgtgttttgttttctttgtctccgatttttttcgcgacgaagaagaagacgagagatagagagagaagtagagaaatcgaaggaatctgtaaccgattttaagatctcaatttttagggttgttgatttttcaatttctgggttaattttttttagggttttcatttggaatcatgtcggatgcgtattgtacggattgtaaaaaggagacggagttggttgtcgatcactcagccggagataccctttgctccgagtgtggtttggttttggaatctcactccattgatgagacctctgagtggcgtaccttcgctaatgaatcttccaacagcgatcccaatcgtgtcggtggtccaaccaacccgcttctcgctgatagtgctttaaccactgttatcgctaagcccaatggttcatctggtgatttcttgtcttcttctctcgggaggtggcagaatcgtaactccaattccgatcgtggtttgattcaagcttttaaaaccattgctaccatgtctgaaaggttgggacttgttgcaactatcaaggatcgggctaatgagttatataagaggctggaggatcagaagtcaagcaggggaagaaatcaggatgcactttatgcagcctgtctgtacattgcttgtcgccaagaggacaagccacgaactattaaggaaatatgcgttattgccaatggggcgacaaagaaggaaattggccgagcaaaagactacattgttaagacattgggactggagcctggtcagtctgtggatttaggaactatacacgctggtgatttcatgagaaggttctgctccaaccttgcaatgtctaaccatgcggtgaaagctgctcaggaagctgtgcaaaaatctgaggaatttgatataaggaggagtcctatatcaatagcagcagtagtcatctatatcataacccagctgtctgatgacaagaagactctcaaagatatatcgcatgcgacaggagtagcagaagggacaataaggaattcatacaaagacttgtatccacatctgtcaaagatagcaccaagttggtatgcaaaggaagaggatctgaaaaacctgtcaagtccttgaagtcgtttcttgattcttctatatgcaatagagaactatctatatctataaatctatatcgactgaggaagatacaaagcaattgttctctctctctagtagagccttttgtttctttttcaaatcttttttgaagtcctttgcttaagattcttgtaatggcgttaaaaaacttgaagaaaggacccgctctagaggatccaagcttacgtacgcgtgcatgcgaggtcatag

SEQ ID NO: 118252 - DNA, 444 bp, Arabidopsis thaliana
ggtcgcacacgcgtccgcccacgcgtccgggattttcgtgatatgtaggatcgggcgaatgagttatataagacgctggaggatcagaagtcaagcaggggaagaaatcaggatgcactttatgcagcctggcggtacgtggcttgtcgccaagaggacaagccacgagctattaagggtacatttcacagatttctcatttgagagaggcttgttacctcttgatttagctttgacataagtcaatcaaactcgcgaaccttgtgaatagaaatatgcgttattgccaatggggcgacaaacaaggaaattggccgagcaaaagactacattgttaagacattgggactggagcctggtcagtctgtggatttaggaactatacacgctggtgatttcatgagaaggctctgctccaaccttgcaatgtctaaccatgcggtg

SEQ ID NO: 118253 - DNA, 2154 bp, Arabidopsis thaliana
agacaattttaaaaaaagatcctgactttcaattttctctcttgtttcttctttggatcatcttcaacaaaaaaaagttacgatctttctctccgggtcatcggaatttgagctagcttagctaaagttccgatctttcctctctgggtcgtcggaatttgagctttttaaaatcatgggaaattgttttgccaagaaccatggattgatgaagccacagcaaaatggtaataccactagatcagttgaagtaggagtaaccaaccaagatccaccgtcgtatactccacaagcgagaaccactcagcagccggagaaaccaggttccgtgaatagtcaaccaccaccgtggagggcggcggctgcagcaccaggactaagtcccaagaccaccactaagagcaattcaatactagagaacgctttcgaagacgtgaagctcttttacacattgggtaaagagctaggtcgtggtcaatttggggtaacgtatctgtgcacagagaattccacggggaagaagtacgcttgcaaatcgatctcgaagaagaagctggtgactaaagctgataaggatgatatgaggagagagattcagataatgcagcatttgagtgggcagcctaatattgtggagtttaaaggagcttatgaggatgagaaagctgtgaatttggtgatggagctttgtgctggtggtgaattgtttgatagaatcattgctaagggacattacactgagagagctgctgcttctgtttgtagacagattgtgaatgttgtcaagatttgtcatttcatgggtgtgttgcatagagacttgaagcctgagaatttcttgctctctagcaaagatgagaaggctttgatcaaggctactgatttcggattgtctgtctttattgaagagggaaaagtatatagagatattgttgggagtgcatactatgttgctccagaagtcttacgtcgcagatatgggaaagaagttgatatctggagtgctggaatcatcttatacattctactcagcggtgtgcccccgttttgggctgagactgagaaaggaatatttgatgctatattggaaggccatatcgactttgagagccaaccatggccgtcaatctccagcagtgccaaagatttggtacgtagaatgttgactgcggatccaaaaaggcggatttctgctgctgatgttcttcagcatccatggcttagagaaggtggagaagcatcagacaagccaattgacagtgctgttctctcaaggatgaaacaatttagagcaatgaataagctaaagaaacttgctttaaaggtcatagcggagaatattgacacggaagaaatccaaggattgaaggcaatgtttgctaacatagacactgacaacagtggcacaatcacttatgaagaactgaaagaaggattagccaaattgggatctaaactcacagaggcagaagtgaaacagctcatggatgctgctgatgttgatgggaacgggtccatcgactacatagagtttattacagcaacaatgcataggcacaggcttgaaagtaatgagaatctttacaaagctttccagcattttgacaaagacagcagcggatacattacaatagacgaactggaatctgcattgaaggaatatggaatgggagatgatgcaacaatcaaagaggttttgtcagatgtcgactccgataacgatggtagaatcaactatgaagagttctgcgcaatgatgagaagtggaaatccacaacaacaacaacctcggctgttctagtggacattgttgctggattaaaagtctttttgtttgtatctaatccagaaaaatcaggagctgaattaatgtttgttcagacaaaaaccacgtaaagaggaagatactcaaaactctgattgcttgtgttttgtattttgttcttcacttcttctgttttgtcctttgtgttctgtactcaggctgttgtgatatgagagaaagagaggtttcatttttaccgttaagattttgatcctgactgtgttaacatttttacctcagttcctccacttttaatgtgattctccattccatcaatgtcaaatcaacgaaacaactgctaaagcagagctttcctatattttaacata

SEQ ID NO: 118254 - DNA, 633 bp, Arabidopsis thaliana
  unsure (1)..(633): unsure at all n locations
anaacncccanganccctatttntggaccggnccancgctcctggggttnttcccgcacaattcataggcccggcttgaaggtaatgnganctttccaaaactttccagcattttggcaaaagccagcagcgggtncattccaattaggcgaactggaatctgcattgaaggaatatggaaatgggagatgatgcaaccaatccaaaagaggttttgtcagatgccgactccgataaccgatggtagaatcaactatgaagagttctgcgcaatgatgagaagtggaaatccacaacaacaacaacctcggctgttctagtggacattgttgctggattaaaagtctttttgtttgtatctaatccagaaaaatcaggagctgaattaatgtttgttcagacaaaaaccacgtaaagaggaagatactcaaaactctgattgcttgtgttttgtattttgttcttcacttcttctgttttgtcctttgtgttctgtactcaggctgttgtgatatgagagaaagagaggtttcatttttaccgttaacgattttgatcaaaatcnggccgccaanacnggtatcaaccattaccaacaccagcanccctcanctgggnggcnntnggnnnnac

SEQ ID NO: 118255 - DNA, 2142 bp, Arabidopsis thaliana
atgggtaatgcttgcgttggaccaaacatttctggaaatggtttcttgcaaactgttacggctgcaatgtggaggccacggatcggagctgagcaagcttcttcttcttcccatggtaatggacaagtttctaaagaagcagcttcagaaccagctactgatcaagtccagaataaaccccctgagcctatcacaatgccaagctcaaagaccaatcccgaaactaaactgaaacccgatctagagatccaacctgaagaaaagaaggagaaagttcttgcagaagaaaccaagcagaaagttgttcctgaagaaagtaagcaggaagttcctcctgaagaaagtaagcgggaagttgttgtgcagccggagtcagcaaaaccagaaacaaagtctgaatccaagccagagacaacaaaaccagaaacaacgtctgaaaccaagccagagacgaaagctgaacctcagaagcctaaacatatgaggagagtgtccagtgcagggcttagaactgagtcagtgttgcagaggaaaactgaaaactttaaggagttctattcattagggaggaaacttggacaagggcaatttgggacgacgtttttatgccttgagaaaggtactgggaacgaatatgcgtgcaagtcgatttccaagaggaagcttttgactgatgaggatgttgaagatgtgagaagagagattcagataatgcatcacttggctggtcatccgaatgttatatctattaaaggtgcttatgaggatgttgttgcggtacatcttgtgatggagttgtgttcgggtggcgagctttttgatagaattattcaacgtggacattacactgagaggaaagctgctgagcttgcgagaaccattgttggggttttagaggcttgtcactctcttggtgttatgcatcgggacctcaagccagagaattttctatttgttagtagagaggaagattccctgttgaaaacgatcgactttggactctcaatgttctttaagccagatgaggtttttacagatgttgttggtagtccgtattatgtagctccagaagttcttagaaagcgttatggtcctgaatcagatgtgtggagtgctggtgtgattgtttacattttgttaagcggagttcctcctttctgggccgaaaccgaacaaggtattttcgagcaggtccttcatggagatcttgacttttcatctgatccatggccaagcatctctgaaagcgcgaaagacttggtaaggaaaatgcttgttcgagaccccaagcgaagactaaccgcacatcaagtattatgtcatccatgggtacagattgacggtgtggctccagataaacctctggactctgctgttctgagccgtatgaagcaattttctgcaatgaacaagttcaagaaaatggctcttagagtcatagctgagagcttatctgaagaagaaatagccggtttaaaacaaatgttcaagatgatagacgcagacaatagtggtcagatcacttttgaagaactgaaagcaggactaaaacgagttggtgccaatctcaaagagtcagagattcttgatctaatgcaagctgctgatgtggacaatagcggaacgatagactacaaagagttcatagccgccacattgcatctaaacaaaatagagagagaggaccatttgttcgccgccttctcttactttgacaaggacgagagtggctttatcaccccggacgagcttcaacaagcttgcgaagagtttggtgttgaagatgcccgcatagaagaaatgatgcgcgatgttgatcaagacaaggatggacgaatagactacaacgagtttgtggcaatgatgcagaaagggagcataatgggaggacctgtgaagatgggtttagagaacagcattagcatttctctgaaacattagttacaaacccaaatcaagaagtacttcgtctatttattttgttatgaatgatgatgatcatgattgtgtttatctcaacattttgatgagatttttgttcgttagactggtttaggtaaatctgtttctgtactatgtacttttatgcatatacacatagcttttgtctgtaacttttggtcataagttatctttttaaaa

SEQ ID NO: 118256 - DNA, 782 bp, Arabidopsis thaliana
  unsure (1)..(782): unsure at all n locations
nnnnnnnnngtacgcctgcaggtaccggtccggaattcccgggccgacccacgcgcactcaccaatcaaactcaaaaaactcttgaatttttcaagaacaaaagaaaaagacatctttaatggcggccatgaactcgagtgttctcacttgcagctacgcaattgctggctctggctcggtagagcttaaccagaaagttggtttggtgaattcatcagttgggtttggtcagaagaaacagatgattatgcctgtgatcaaagctcaacgcgttgttggtgatgatgttgatggatctaatggaagacgatcagccatggttttcttagcagctacactcttctccactgctgctgtttctgcttctgctaatgctggcgtcattgacgaatacctcgagaggagcaaaaccaacaaagaacttaatgataagaagagattggcaacaagtggagcaaactttgcgagagcattcactgttcaattcggaagctgcaagttccctgagaatttcactggctgccaagatcttgccaagcaaaagaaagttccatttatctcagaagatattgctttggaatgcgaaggcaaggacaagtacaagtgtggttccaatgttttctggaaatggtgaagaactttgtttgttttcatctattcttatataaatccaaccaatgtatctatctctctctattcatgaaagttttcgcaaaaaaaaaaaaaaaaaagggcggccgctctagaggatcccagcttacggacgcgtgcatcgacgtca

SEQ ID NO: 118257 - DNA, 751 bp, Arabidopsis thaliana
  unsure (1)..(751): unsure at all n locations
acttttgccaataggactgaagggaaatctcaccttatccacactccaaccacaatcccttattacatcttagtccacgtcatcatcatcatcctcattcatctctaatactaaaatctaatctcttccttgctcactcaccaatcaaactcaaaaaactcttgaatttttcaagaacaaaagaaaaagacatctttaatggcggccatgaactcgagtgttctcacttgcagctacgcaattgctggctctggctcggtagagcttaaccagaaagttggtttggtgaattcatcagttgggtttggtcagaagaaacagatgattatgcctgtgatcaaagctcaacgcgttgttggtgatgatgttgatggatctaatggaagacgatcagccatggttttcttagcagctacactcttctccactgctgctgtttctgcttctgctaatgctggcgtcattgacggaatanctcgagaggagcaaaaccaaccaaagaacttaattgataagaagaagattggcaacaagtggggcaaacctttgcgagagnattcantggttcaattcggaagctgcaagttcccngagaatttcactgggtggccaagaattttgccaagcaaaanaaggtccattntcccngaanaaatnnctttgaatgcgaggnaaggcaagncaaggggggccaangttntggnaaggggagactngttgttcacantggggcggattcngngcncantgc

SEQ ID NO: 118258 - DNA, 891 bp, Arabidopsis thaliana
  unsure (1)..(891): unsure at all n locations
ctctaatactaaaatctaatctcttccttgctcactcaccaatcaaactcaaaaaactcttgaatttttcaagaacaaaagaaaaagacatctttaatggcggccatgaactcgagtgttctcacttgcagctacgcaattnctggctctggctcggtagagcttaaccagaaagttggtttggtgaattcatcagttgggtttggtcagaagaaacagatgattatncctgtnatcaaagctcaacgcgttgttggtgatgatgttgatggatctaatggaagacgatcagccatggttttcttagcagctacactcttctccactngctgcttgtttctgcttctgctaatgctggcggcaattgacggaatacctcgagaggagcaaaacccacaaagaacttaatgataagaagagattggcaacaagtggagcaaactttgcgagagcattcactgttcaattcggaagctgcaagttcccctgagaatttcactggctgccaagatcttgccaagcaaaagaaagttccatttatctcagaagatattgctttggaatgcgaaggcaaggacaagtacaagtgtggttccaatgttttctggaaatggtgaagaactttgtttgttttcatctattcttatataaatccaacaatgtatctatctctctctattcatgaaagttctcgcatccatttgaatctatcaagctaaaactctattgagagattaggatgcattattttgcattaagttcagcctaagataaaaaacctgactgaatacaaaaaaaaaaaaaaaagggcggccgctcnnnnnnnnnnnnnnnnnnnnnnnnnnnnnnnnnnnnnnnnnnnnnnnnnnnnnnnnnnnnnnnnnnnnnnnn

SEQ ID NO: 118259 - DNA, 1445 bp, Arabidopsis thaliana
  unsure (1)..(1445): unsure at all n locations
caggtaccgggcccgaattcccgggtttacccacgcggtncgcggacgcgtaaaactaaatcttgccttcctgactttctctctacgacagaatttttgaagcttctctctgcttatcgacacgatggttctcgaggcgactatgatatgtatcgacaactccgagtggatgcgaaacggagattactctccgtctaggttacaggcgcaaacggaagctgttaatcttctttgcggagccaaaacccagtcgaatccggagaatacggtggggattttgacaatggctggcaaaggagttagagtattgactactcctacctctgatcttggcaaaattctggcctgtatgcacggccttgatgtgggaggagagatcaacttaaccgcagctatccagatcgcccagctagctcttaagcatcgccaaaacaagaatcaacgccaaaggattattgtttttgctggaagtccaatcaagtacgagaagaaggccctagagatagttggaaaaaggctgaagaagaatagtgtctctcttgatattgtcaatttcggggaggatgatgatgaggaaaagcctcagaaactcgaggcgctccttacagctgtgaataacaatgacggtagccacattgttcatgttccttctggagccaatgctctctcagatgtgcttctcagcacacctgtattcacgggtgatgagggtgcaagtggctatgtttctgcggcagctgctgcagcggccgcaggtggggacttcgactttggtgtggacccaaatatcgatccagaacttgctcttgcccttcgggtctccatggaggaggagagagcaagacaagaagctgctgccaagaaggcggccgatgaggcaggtcagaaagacaaagatggggacacagcttccgcctcacaggagacagttgctaggacaactgacaagaacgctgaaccaatggatgaggacagtgcgttgctagatcaggcaattgctatgtctgttggtgatgtgaatatgtcagaagcggctgatgaggaccaggatctggctttagctctgcaaatgtcaatgagtggggaagagtcaagtgaagctacaggtgctggaaacaacctcttgggaaatcaagccttcatatcgtctgttctctcatcgcttcctggggtggatccaaatgatccggcagttaaagaactactagcgtctctgccagacgagtcaaagcgtaccgaggaggaagagagtagtagcaaaaaaggcgaggatgagaagaagtgaagaaggatctgagagtctcaataaaaattcctcttgtttctttggtttgatagagattggaactgaatttaactaatctctctgccttgtgaaatttgtttttttctctctctctcgcctttttataatgttgttattgtacgagtcaaggactagcttc

SEQ ID NO: 118260 - DNA, 1212 bp, Arabidopsis thaliana
  unsure (1)..(1212): unsure at all n locations
nnnnnnnnnnnnnnnnnnnnnnnnnnnnnnnnnnnnnnnnnnnnnnnnnnnnnnnnnnnnncccagagagacataagaaagaaagagagagagagatactttggtcatttcagggttgtcgtttctctctcttgttcttgagattttgaagagagagagatatgggaagaggtagggttcagctgaagaggatagagaacaagatcaataggcaagttactttctcaaagagaaggtctggtttgctcaagaaagctcatgagatctctgttctctgcgatgctgaggttgctctcatcgtcttctcttccaaaggcaaactcttcgaatattccaccgactcttgcatggagaggatacttgaacgctatgatcgctatttatattcagacaaacaacttgttggccgagacgtttcacaaagtgaaaattgggttctagaacatgctaagctcaaggcaagagttgaggtacttgagaagaacaaaaggaattttatgggggaagatcttgattcgttgagcttgaaggagctccaaagcttggagcatcagctcgatgcagctatcaagagcattaggtcaagaaagaaccaagctatgttcgaatccatatctgcgctccagaagaaggataaagccttgcaagatcacaacaattcgcttctcaaaaagattaaggagagggagaagaaaacgggtcagcaagaaggacaattagtccaatgctccaactcttcttcagttcttctgcctcaatactgcgtaacctcctccagagatggctttgtggagagagttgggggagagaacggtggtgcatcgtcgttgacggaaccaaactctctgcttccggcttggatgttacgtcctaccactacgaacgagtagaactatctcactctttataatataatgataatataattaatgtttaatattttcataacattcagcatttttttggtgacttatactcattattaataccgatatgttttagctagtcatattatatgtatgatggaactccgttgtcgagacgtatgtacgtaagctatcattagattcactgcgtcttaagaacaaagattcatatcttggtaatgatttctcatgaataaaaaaaaaaaaaaaagnnnnnnnnnnnnnnnnnnnnnnnnnnnnnnnnnnnnnnnnnnnnnnnnnnnnnnnnnnnnnnnnnnnnnnnnnn

SEQ ID NO: 118261 - DNA, 1333 bp, Arabidopsis thaliana
  unsure (1)..(1333): unsure at all n locations
nnnnnnnnnnnnnnnnnnnnnnnnnnnnnnnnnnnnnnnnnnnnnnnnnnnnnnnnnnnnnnnnnnnnnnnnnnnnnnnnnnnccacgcgtccgaatcaatcaaatcaaagcatccatttttgattcagacttcagagagacagagaaggaagaagaagaagaagaagaagaagaaaaaactatggagaatgagagggaaaagcaggtttacttggctaagctctccgagcaaaccgaaagatacgatgaaatggtggaggcgatgaagaaagttgctcagcttgatgtggagctaactgtggaagagaggaatcttgtatctgtagggtacaagaatgtgattggtgcaaggagagcatcatggagaatactatcttccattgagcagaaggaagagtccaagggaaatgatgaaaatgtcaagaggcttaagaattatcgtaagagagttgaagatgagcttgctaaagtttgtaatgacatcttgtctgtcattgataagcatctcattccatcgtctaacgctgtggagtcaactgtctttttctacaaaatgaaaggagattactatcgctatcttgcggagttcagttctggtgctgaacgcaaggaagctgcagatcagtctcttgaagcatataaggctgctgttgctgctgcagagaatggtttggcacccacacatccagttagacttggcttggcgttgaacttttcagttttctactatgagatcttgaactctcccgaaagcgcatgccaattggctaagcaagcattcgatgatgcaattgctgaacttgacagcctcaacgaggaatcatacaaagacagcactcttattatgcagctacttagagacaatctcaccttgtggacttcagaccttaatgaggaaggagatgagagaaccaaaggtgctgatgagcctcaagatgagaactaaatcctctgtgagaagagaaacgactcttgctgcatcctgaatcttgaagtgaagacagtaagtgtcgttgtttgttactcgaatgtgtaatttttaatctatgtctttcttgatggtgttttccagattcttgaacttttcacaacacaacactgcgttgcgtatcttcaaccctcttatgatgtggttgaattctgttttacgcttagtttgcttcttttgttgttgaattgagccagcaggcatgatttgggtttttgtttatcagaatattaggcgtaaaaaaannnnnnnnnnnnnnnnnnnnnnnnnnnnnnnnnnnnnnnnnnnnnnnnnnnnnnnnnnnnnnnnnnnnnnnnnnnnnnnnnnnnnnnnnnnnnnnnnnn

SEQ ID NO: 118262 - DNA, 1752 bp, Arabidopsis thaliana
  unsure (1)..(1752): unsure at all n locations
atgatactccagcgnnnnnnnnnnnnnnnnnnnnnnnnnnnnnnnnnnnnnnnnnnnnnnnnnnnnnnnnnnnnngggtcgaccacgcgtccgcccacgcgtccgcccacgcgtccgcttcctctttaacatcccccccctccccagcgttctgatcaaaactccagtgaaagttcaaagtacacagagagaaacaaaaaaagaagaagaagaagttgaagaagaagaagccatgaatgctttagcagcaacaaacagaaacttcaagttagctgctaggcttcttggtctggattctaagctcgagaaaagtcttctcatccccttccgagaaatcaaggtggaatgtaccataccgaaagacgatggtacactagcatcattcgttgggttcagagttcaacacgacaatgcaagaggtcccatgaaaggtggaatcagatatcatcctgaggttgatccggatgaagtgaacgcattggctcagctcatgacatggaaaacagcagtggctaagattccttacggaggagctaaaggagggattggttgtgatcctagcaagctcagtatctccgagctcgagcggttgactcgagttttcactcagaagattcatgatctcattgggattcatactgatgttccagctccagatatgggcactggtcctcagacaatggcttggattcttgatgaatactctaagtttcatggatactcgcctgcagttgtgactggaaaacccattgatcttggtggatcgctagggagagacgcggctactggaagaggagtgatgtttggtaccgaagctttgcttaacgagcacggaaagaccatatcagggcagcgttttgtcatccagggatttggtaatgtgggttcttgggcggcaaagctgataagtgaaaagggtgggaagattgttgccgtgagtgacattaccggagcaatcaagaacaaggatggtatcgatatcccggccttgctcaagcatactaaagaacacagaggtgtcaaagggtttgatggtgcagatccgatcgatccaaactccatactggttgaggattgtgatatcctcgtccctgcagcacttggtggtgtcatcaacagggagaatgcgaatgagattaaagcaaagttcatcatagaagcagctaatcatccaactgatccggacgcggatgagatcctaagtaagaaaggtgtggttattctcccggacatatatgcaaactctggaggagtcactgtaagttacttcgaatgggttcagaacattcaaggctttatgtgggaggaagagaaggtgaacgatgagctaaagacttacatgactcgctctttcaaggacttgaaagagatgtgcaaaactcactcttgcgatctccggatgggagctttcacactcggtgttaatcgtgtggctcaagctaccattctcagaggctggggagcttaaagattatctaatctcttatgcaatctctttagcagctcctgaataagaattgagccaaactttaatctactttttgttttatcctcctactttggcttagaggtcatcctgagttaacagatatgtgtttacaagtactagaagacgcttctgtatgtaataaaaccttggactctaatagttaatgagcttttttactctagggggatcccctaggtctaaaacggccgcccccccggttgagcttcagcctttgttccccttagttaaggttaattcgagct

SEQ ID NO: 118263 - DNA, 1468 bp, Arabidopsis thaliana
  unsure (1)..(1468): unsure at all n locations
cccacgcgtccgcggacgcgtgggctctctatctcactctttgcttctgcaactcacagtcaatggcggctgaaatggcgttagtgaaacccatctccaagttctcttccccaaagctctcaaacccgagcaaattcctctccggccgacgtttctccaccgtgatcagaatgtcagcctcttcctcaccgcctcctccaaccaccgccacctcgaagtccaagaagggaacgaagaaagagattcaagagtcgcttcttactccgaggttctacacgacggacttcgaggaaatggaacagcttttcaacacggagatcaacaagaaccttaacgaagcagagttcgaggctctgcttcaagagttcaagaccgattacaaccagacacatttcgtgaggaacaaggagtttaaagaagctgcagacaaattgcaaggacctctccgacagatcttcgttgagttccttgagcggtcttgtactgctgagttctctggtttccttctctacaaggagcttggtcgaagatctaagaaaacaaaccctgttgtggctgagatcttctctcttatgtctagagatgaagcaagacatgccgggttcttgaacaagggattgtctgatttcaacttggctcttgatttgggtttcctgacaaaggcaaggaaatacactttcttcaagccaaaattcatcttctacgcgacttacttatccgagaaaatcgggtactggagatacatcacaatctacagacacctcaaggaaaaccctgagttccaatgttacccaatcttcaagtactttgagaactggtgtcaagacgagaaccgtcatggtgatttcttctctgctttgatgaaagctcagcctcagttcctcaatgactggcaagccaagctctggtctcgcttcttctgcctctcggtttatgtgacaatgtacctcaatgactgccaaagaactaatttctacgagggtatcgggttaaacacaaaggagttcgatatgcatgtcatcatcgagacaaaccgaaccacggcaagaatattccctgcggtgctggatgttgagaaccctgagttcaagaggaaactggatagaatggttgtgagctatgagaagctgctggctataggagaaacagatgatgcttccttcatcaagaccctcaagaggattcctttggttacttctttagcctctgagatcttggctgcttatctcatgcctcctgttgagtctggctctgttgatttcgccgagtttgagcctaatcttgtctattagtagctgcaatgtcaagtcttgagtttacggctggttcttgatttcttgtaattgaatgatcgaaactgagaaacatcgtctttttttttttcgcaataaacttttactgcatatatttgatcnnnnnnnnnnnnnnnnnnnnnnnnnnnnnnnnnnnnnnnnnnnnnnnnnnnnnt

SEQ ID NO: 118264 - DNA, 1923 bp, Arabidopsis thaliana
cttcttccttcttcctcttttattataagaagagaaagaaaaaaacatcatcttttttggcgcgccccgcagagcgattgctcttatctcagttgattggccatggcttcttcagtcgtcttcgcgccaactgggtctctctccgttcctccattgaagtctcggagattctatgttaattcttcactcgactccgatgtttccgacatgagtgttaacgctccaaaggggttatttcctccagagcctgtaccatacaagggacctaagctgaaagtagccattataggagctggacttgcaggcatgtcgactgctgtagagcttctggatcagggtcacgaggtggatatatatgattcgaggacattcattggtgccaaagtgggttcttttgtagatagacgtgggaaccatattgaaatgggattacatgttttcttcggatgctacaacaatctcttccgtttgatgaaaaaggtgggtgctgagaaaaaccttctagtcaaagaccatactcatacatttataaacaaagacggcacaattggagagcttgattttcggtttcctgttggagctccaatccatggtattcgcgcatttttggtcacaagtcaactcaagccctatgacaaactaaggaattcactggctcttgcattaagccctgttgttaaagctcttgtcgaccccgatggagcaatgagagacattcgcaaccttgacagcataagtttctcggattggttcctgtcaaaaggtgggacacgggcaagtatccagagaatgtgggatcctgttgcttatgctctaggtttcatagactgcgataacatgagtgcgcgatgcatgcttaccatattctcattattcgctaccaaaacagaagcttctctgttgcgtatgctcaagggctctcctgatgtttacttgagtggtcctatcaaacaatatatcacagatagaggtggcagaatccatctaaggtggggttgcagggagatactttatgataaatcagcagatggagaaacttatgtcactggactagcaatttctaaggctacgaacaagaagattgtgaaagctgatgtatatgttgcagcatgtgatgtgccgggaatcaaaaggttacttccaaaagaatggagggaatctcggtttttcaacgatatatatgaactcgagggagtacctgtggttacaggacagctcagatacaatggttgggtcacggagttacaagacattgaacttgctaggcagttgaaacgagcggttggcttagataatcttctctacactcctgatgctgatttctcgtgctttgcggatcttgcactagcttcgcctgcagattattacatcgaaggacaaggcactttacttcagtgcgttctaacaccaggagatccgtatatgcgaatgccaaatgataagatcatagagaaagtagcgatgcaggtcactgagttgtttccatcgccacgaggcctagaagtcacttgttcgtcggttgtaaaaatcgctcagtctctgtaccgtgaagcacccggaaaagatccattcagacccgatcagaagacgcccataaagaatttcttcctcgccggttcatacacaaagcaggattacatagatagtatggaaggagcaacattatcagggagacaagcttcgtcatacatctgtgatgctggtgaagaactagcagagctaaacaagaagctttcttcttctgcaactgcagttcctgatgagctaagtctggtctaatgatgaaaaatgtttgaaagtagttaccaatggctaattgatgaaggatttgagacactatgggtacatgaagaagaagcatatgtagaaaccctttatatagtgttcataagaggaagtatttgtaatattacaccatcctcc

SEQ ID NO: 118265 - DNA, 1237 bp, Arabidopsis thaliana
gctcttcccatggcttcttcactgaagaagcttatctcaagctttctacttgtcttatactccaccaccatcattgttgcttcatcagaatctcgatgtaggcgttttaaatcgatcatcagctttggtgattccatcgcagacaccggaaattatctccatctctctgatgtcaatcaccttcctcaatccgcctttcttccttatggcgaaagcttcttccatcctccctccggtcgtgcctctaatggccgtctcatcatcgacttcattgccgaattcttgggactaccatacgtaccgccttactttggatcccaaaacgttagcttcgaacaagggatcaattttgcggtgtatggagcaaccgcattggaccgagcgtttcttttgggaaaaggaattgaatctgatttcaccaatgttagtttaagtgttcagcttgacaccttcaagcagattttgcctaacttatgcgcctcgtctactcgtgattgcaaagagatgcttggagactcgctgatactcatgggagagattggaggaaacgactataattacccattttttgaaggaaaaagtatcaatgaaatcaaagagcttgttcctctaatcgtcaaagctatttcttctgctattgtggatttgattgatttagggggcaaaacatttttggtacccggaggcttcccaacaggatgttctgcggcgtatcttactctatttcagaccgtggcagaaaaagaccaggaccctttaacaggttgttacccattgctcaacgaatttggcgagcaccacaacgaacagctaaagacagaactcaagcgactccaaaaattctatcctcatgtcaacatcatttacgctgactaccacaactccttataccggttttatcaagaaccagctaaatacgggtttaagaacaaacctttagctgcttgctgtggagtcggaggtaaatacaacttcactattggtaaggagtgtggatacgaaggagttaactattgtcaaaatccttctgagtatgtgaactgggatggttatcatttaaccgaagccgcctaccagaagatgactgagggtatactcaacggtccctatgcaactcctgctttcgactggtcctgccttggctctggtacagtggatacataaagggtattctttcagcagtaagaattcattcgttgtaaaaaatcaaagaggaagaaaattatgtgatgatgat

SEQ ID NO: 118266 - DNA, 659 bp, Arabidopsis thaliana
  unsure (1)..(659): unsure at all n locations
agctcacnnnnnnnnnnnnnnnnnnnnnnnnnnnnnnnnnnnnnnnnnnnnngcgtccgcccttcgtttacagcacaaaatcgaaaatggttgcctcagccgccgcacgacctcttgtcaccgtccaaggacttgacggtgacatgagcaccgatcaatccaccaccgtcactttaccagacgtcatgactgctccagttcgacctgacattgtcaacttcgtccacgcccaaatctccaacaacagccgtcagccttacgcagtctccaaaaaggccggtcaccaaacctccgccgagtcctggggaaccggaagagccgtgtcacgtatccctcgtgttcctggtggtggaactcaccgtgccggtcaagcagcgttcggaaacatgtgtcgtggtggtcgtatgtttgctccgactaagatctggagacgctggcaccgtcgtgtcaatgtcaacatgaagaggcacgcgattgtttctgcaatcgctgctactgctgttccagctcttgtgatggctcgtggtcacaagatcgagaatgttcctgagatgcctcttgttgttagcgactcagctgaagctgtggagaagacatcagctgcgatcaaggtattgaagcagatcggtgcttacgacgatgcggagaaagctaagaac

SEQ ID NO: 118267 - DNA, 568 bp, Arabidopsis thaliana
aacgactcatttatagggaaagacggtacgcctgcaggtaccggtccggaattcccgggtcgacccacgcgtccggaagagtctaaagagacggagagtgagagaagagagaaacatttcgagacaaatggccgccgccgctgctcgtcctctcgtcaccatccaaaccttggatggtgacatgtccaccgatcaatcctccaccgtcgtacttcccgacgtcatgacggcgccagttcgaccagacatcgttaacttcgttcacgcccaaatctccaacaacagccgtcagccatacgccgtatcgaagaaggccggtcaccagacctccgccgagtcctggggaaccggacgtgccgtgtctcgtatccctcgtgttcccggtggtggtactcaccgtgctggtcaagctgcgttcggtaacatgtgtcgtggtggtcgtatgttcgctccaaccaagatctggcgccgctggcaccgtcgtgtcaatgtcaacatgaagcgtcacgcaatcgtctcagctatcgctgcaactgctgttcctgcgcttgtgatggctcgtggtcac

SEQ ID NO: 118268 - DNA, 865 bp, Arabidopsis thaliana
gatcgtgatttacttttagttcgtcggagagatttgatcagaatgagcggaggaggagacgtgaacatgagtggtggagacagacgcaagggaacggtgaagtggtttgatacacagaaggggtttggtttcatcacacctagcgacggtggtgacgatctcttcgttcaccagtcttccatcagatctgaaggatttcgtagcctcgcagctgaggaatctgttgagttcgacgttgaggttgacaactccggccgtcccaaggctattgaagtgtctggacccgacggtgctcccgttcagggtaacagcggtggtggtggttcatctggtggacgcggtggttttggcggcggtggtggaagaggagggggacgtggtggaggaagctacggaggaggttatggtggaagaggaagcggtggccgtggaggaggtggtggtgataattcttgctttaagtgcggtgaaccaggtcacatggcgagagaatgctctcaaggtggtggaggatacagcggaggcgggggtggtggaaggtacgggtctggcggcggcggaggaggaggtggtggtggcttaagctgctacagctgtggagagtctgggcactttgcaagggattgcactagcggtggtgctcgttgaagcaaaccagactgtgaagaaggggtaaatcagtcatcgatccctcttctccgtgacttctatcaaattattatctatcttttgttattcgactctcttcaatgttgttttcggaatttattaattaggacttgtggttgttatggttatggttccttgtgatttgagaaagaaactggataagttttccccgcatgtttatcataacttttgctca

SEQ ID NO: 118269 - DNA, 1494 bp, Arabidopsis thaliana
  unsure (1)..(1494): unsure at all n locations
nnnnnnnnnnnnnnnnnnnnnaaaaccctaaaaaaccctaaaaaacccatctctttgtctctctttcttctctgccacgcgtccgagtaaacaatggcgataattccgttagcacagcttaatgagctaacgatttcttcatcttcttcttcgtttcttaccaaatcgatatcttctcattcgttgcatagtagctgcatttgcgcaagttctagaatcagtcaattccgtggcggcttctctaaacgaagaagcgattcaacaaggtctaagtcgatgcgattgaggtgttccttctctccgatggaatctgcgagaattaaggtgattggtgtcggtggtggtggtaacaatgccgttaaccggatgatttcaagcggtttacagagtgttgatttctatgcgataaacacggattcgcaagctctgttacagtcttctgctgagaacccacttcaaattggagaacttttaactcgtgggcttggcactggtggaaacccgcttcttggagaacaagctgcagaagaatcaaaagatgcaattgctaatgctcttaaaggatcagaccttgttttcataactgctggtatgggtggtggaacagggtctggtgctgcacctgtggtagctcagatttcgaaggatgctggttatttgactgttggtgttgttacctatccgtttagctttgaaggacgtaaaagatctttgcaggcactggaagctattgaaaagctccaaaagaatgttgatacccttatcgtgattccaaatgatcgtctgctagatattgctgatgaacagacgccacttcaggacgcgtttcttcttgcagatgatgttttacgccaaggagtacaaggaatctcagatattattactatacctggactagtcaatgtggattttgcagatgtgaaggcagtcatgaaagattctggaactgcaatgctcggggtaggtgtttcttccagcaaaaaccgggcagaagaagcagctgaacaagcaactttggctccattgatcggatcatccatacaatcagctactggtgtcgtctacaacatcactggtggaaaagacataactttgcaggaagtgaaccgagtatcacaggtcgtgacaagtttggcagacccatcggccaacatcatatttggagctgttgtggatgatcgctacaccggagagattcatgtaacgataatcgccacaggcttctctcagtcattccagaagacacttctgactgatccaagagcagctaaactccttgacaaaatgggatcatcaggtcaacaagagaacaaaggaatgtctctgcctcaccagaagcagtctccatcaactatctctaccaaatcgtcttctccccgtagacttttcttctagttttctttttttccttttcggtttcaagcatcaaaaatgtaacgatcttcaggctcaaatatcaattacatttgattttcctccaaaaaaaaaaaaaaa

SEQ ID NO: 118270 - DNA, 2516 bp, Arabidopsis thaliana
  unsure (1)..(2516): unsure at all n locations
aagccacacaatctcttttcttctctctctctctgttatatctcttctgtttaattcttttattcttcttcgtctatcttctcctataatctcttctctctccctcttcacctaaagaataagaagaaaaataattcacatctttatgcaaactactttcttgtagggttttaggagctatctctattgtcttggttctgatacaaagttttgtaattttcatggtatgagaagatttgcctttctattttgtttattggttctttttaactttttcttggagatgggttcttgtagatcttaatgaaacttctgtttttgtcccaaaaagagttttcttttttcttctcttctttttgggttttcaattcttgagagacatggcaagagatcagttctatggtcacaataaccatcatcatcaagagcaacaacatcaaatgattaatcagatccaagggtttgatgagacaaaccaaaacccaaccgatcatcatcattacaatcatcagatctttggctcaaactccaacatgggtatgatgatagacttctctaagcaacaacagattaggatgacaagtggttcggatcatcatcatcatcatcatcagacaagtggtggtactgatcagaatcagcttctggaagattcttcatctgccatgagactatgcaatgttaataatgatttcccaagtgaagtaaatgatgagagaccaccacaaagaccaagccaaggtctttccctttctctctcctcttcaaatcctacaagcatcagtctccaatctttcgaactcagaccccaacaacaacaacaagggtattccggtaataaatcaacacaacatcagaatctccaacacacgcagatgatgatgatgatgatgaatagtcaccaccaaaacaacaacaataacaatcatcagcatcataatcatcatcagtttcagattgggagttccaagtatttgagtccagctcaagagctactgagtgagttttgcagtcttggagtaaaggaaagcgatgaagaagtgatgatgatgaagcataagaagaagcaaaagggtaaacaacaagaagagtgggacacaagtcaccacagcaacaatgatcaacatgaccaatctgcgactacttcttcaaagaaacatgttccaccacttcactctcttgagttcatggaacttcagaaaagaaaagccaagttgctctccatgctcgaagagcttaaaagaagatatggacattaccgagagcaaatgagagttgcggcggcagcctttgaagcggcggttggactaggaggggcagagatatacactgcgttagcgtcaagggcaatgtcaagacactttcggtgtttaaaagacggacttgtgggacagattcaagcaacaagtcaagctttgggagagagagaagaggataatcgtgcggtttctattgcagcacgtggagaaactccacggttgagattgctcgatcaagctttgcggcaacagaaatcgtatcgccaaatgactcttgttgacgctcatccttggcgtccacaacgcggcttgcctgaacgcgcagtcacaacgttgagagcttggctctttgaacactttcttcacccatatccgagcgatgttgataagcatatattggcccgacaaactggtttatcaagaagtcaggtatcaaattggtttattaatgcaagagttaggctatggaaaccaatgattgaagaaatgtactgtgaagaaacaagaagtgaacaaatggagattacaaacccgatgatgatcgatactaaaccggacccggaccagttgatccgtgtcgaaccggaatctttatcctcaatagtgacaaaccctacatccaaatccggtcacaactcaacccatggaacgatgtcgttagggtcaacgtttgacttttccttgtacggtaaccaagctgtgacatacgctggtgaaggagggccacgtggtgacgtttccttgacgcttgggttacaacgtaacgatggtaacggtggtgtgagtttagcgttgtctccagtgacggctcaaggtggccaacttttctacggtagagaccacattgaagaaggaccggttcaatattcagcgtcgatgttagatgatgatcaagttcagaatttgccttataggaatttgatgggagctcaattacttcatgatattgtttgagattaaaagattaggaccaaagttatcgatacatattttccaaaaccgattcggttatgtaacggtttagttagataaaaaccaaattagatatttatatataccgttgtctgattggattggaggattggtggacaaggagatattattaatgtatgagttagttggttcgtcaaaaaaaaaaaaaaaaaaaggnnnnnnnnnnnnnnnnnnnnnnnnnnnnnnnnnnnnnnnnnnnnnnnnnnnnnnnnnnnnnnnnnnnnnnnnnnnnnnnnnnnnnnnnnnnnnnnnnnnnaagatcat

SEQ ID NO: 118271 - DNA, 3167 bp, Arabidopsis thaliana
tctagagaatactataccgacgatgactacacacacaaggaaatatatatatcagctttcttttcacctaaaagtggtcccggtttagaatctaattcctttatctctcattttcttctgcttcacattcccgctagtcaaatgttaataagtgcacacaacgttttctcgaagcattagaatgtcctcctcttaattaatctccttctgattagattctcaatagagtttaaatttgttaatggagagatatattgggaccctcaaggcttctaattataccacgtttggcataattctctatcgtttggggccacatctttcacacttcattaccttatcaccaaaacataaaatcaatcaacttttttttgccttattgattgtgttggatccctccaaaattaaaacttgtgttccccacaaaagcttacccaatttcacttcaatcttaacaaataggaccaccactaccacgtacggtttgcatcatacaaaccacaaactccttcttcattacaattattatatcatctactaaaacctctttctccggcgctctttcttgttcttagtgctaaattttctttgttcaggagaaatataatggacctcaagtattcagcatctcattgcaacttatcctcagacatgaagctcaggcgttttcatcagcatcgaggaaaaggaagagaagaagagtatgatgcttcttctctcagcttgaacaatctgtcaaaacttattcttcctccacttggtgttgctagctataaccagaatcacatcaggtctagtggatggatcatctcacctatggactcaagatacaggtgctgggaattttatatggtgcttttagtggcatactctgcgtgggtttacccttttgaagttgcatttctgaattcatcaccaaagagaaacctttgtatcgcggacaacatcgtagacttgttcttcgcggttgacattgtcttgacgtttttcgttgcttacatagacgaaagaacacagcttcttgtccgtgaacctaaacagattgcagtgaggtacctatcaacatggttcttgatggatgttgcatcaactataccatttgacgctattggatacttaatcactggcacatccacgttaaatatcacttgtaatctcttgggattacttagattttggcgacttcgaagagttaaacacctcttcactaggctcgagaaggacataagatatagctatttctggattcgctgctttcgacttctatcagtgacattgtttctagtgcactgtgctggatgcagttattacctaatagcagacagatatccacaccaaggaaagacatggactgatgcgatccctaatttcacagagacaagtctttccatcagatacattgcagctatatattggtctatcactacaatgaccacagtgggatatggagatcttcatgcaagcaacactattgaaatggtattcataacagtctacatgttattcaatcttggcctcactgcttaccttattggtaacatgactaatttggtcgtggaagggactcgtcgtaccatggaatttaggaatagcattgaagcagcgtcaaactttgttaacagaaacagattgcctcctagattaaaagaccagatattagcttacatgtgtttaaggtttaaagcagagagcttaaatcagcaacatcttattgaccagctcccaaaatctatctacaaaagcatttgtcaacatctttttcttccatctgttgaaaaagtttacctcttcaaaggcgtctcaagagaaatacttcttcttctggtttcaaaaatgaaggctgagtatataccaccaagagaggatgtcattatgcagaacgaagcgccggatgatgtttacataattgtgtcaggagaagttgagatcattgattcagagatggagagagagtctgttttaggcactctacgttgtggagacatatttggagaagttggagcactttgttgcagaccacaaagctacacttttcaaactaagtctttatcacagcttctccgactcaaaacatctttccttattgagacaatgcagattaaacaacaagacaatgccacaatgctcaagaacttcttgcagcatcacaaaaagctgagtaatttagacattggtgatctaaaggcacaacaaaatggcgaaaacaccgatgttgttcctcctaacattgcctcaaatctcatcgctgtggtgactacaggcaatgcagctcttcttgatgagctacttaaggctaagttaagccctgacattacagattccaaaggaaaaactccattgcatgtagcagcttctagaggatatgaagattgtgttttagtactcttaaagcacggttgcaacatccacataagagatgtgaatggtaatagtgctctatgggaagcaataatatcgaagcattacgagatattcagaatcctttatcatttcgcagccatatcggatccacacatagctggagatcttctatgtgaagcagcgaaacagaacaatgtagaagtcatgaaggctcttttaaaacaggggcttaacgtcgacacagaggatcaccatggcgtcacagctttacaggtcgctatggcggaggatcagatggacatggtgaatctcctggcgacgaacggtgcagatgtagtttgtgtgaatacacataatgaattcacaccattggagaagttaagagttgtggaagaagaagaagaagaagaacgaggaagagtgagtatttacagaggacatccattggagaggagagaaagaagttgcaatgaagctgggaagcttattcttcttcctccttcacttgatgacctcaagaaaattgcaggagagaagtttgggtttgatggaagtgagacgatggtgacgaatgaagatggagctgagattgacagtattgaagtgattagagataatgacaaactctactttgtcgtaaacaagataatttagaagttgaaaaattataacgaaatgaagtttgagataagagagagcgtgacaaaaaaatgaaaaacaaattgtaatatttatatgcgtccatcaaagtgagatgtaacacatatttgggtaagaaacgttccaaatccctgacgtagctcgag

SEQ ID NO: 118272 - DNA, 2148 bp, Arabidopsis thaliana
agatcccaacggattcaaacagcaaatttgtgctttgctcttctctcttattataatatcctctcaaaaaccctctcctatatcctcctaaagccccccttccttgtttctctaccgcaacaaagaaaaaacaaaagtttgagaaaaatggtgtgttcgttgtgtaaccaatgattgggttttagcttactactgcgtgagttttttagaaagagagagtgaagatacattatagaaagaagagaagcagaaaccaaaaaaagaaaccatgaagtctttttgtgataatgatgataataatcatagcaacacgactaatttgttagggttctcattgtcttcaaatatgatgaaaatgggaggtagaggaggtagagaagctatttactcatcttcaacttcttcagctgcaacttcttcttcttctgttccacctcaacttgttgttggtgacaacactagcaactttggtgtttgctatggatctaacccaaatggaggaatctattctcacatgtctgtgatgccactcagatctgatggttctctttgcttaatggaagctctcaacagatcttctcactcgaatcaccatcaagattcatctccaaaggtggaggatttctttgggacccatcacaacaacacaagtcacaaagaagccatggatcttagcttagatagtttattctacaacaccactcatgagcccaacacgactacaaactttcaagagttctttagcttccctcaaaccagaaaccatgaggaagaaactagaaattacgggaatgaccctagtttgacacatggagggtcttttaatgtaggggtatatggggaatttcaacagtcactgagcttatccatgagccctgggtcacaatctagctgcatcactggctctcaccaccaccaacaaaaccaaaaccaaaaccaccaaagccaaaaccaccagcagatctctgaagctcttgtggagacaagcgttgggtttgagacgacgacaatggcggctgcgaagaagaagaggggacaagaggatgttgtagttgttggtcagaaacagattgttcatagaaaatctatcgatacttttggacaacgaacttctcaataccgaggcgttacaagacatagatggactggtagatatgaagctcatctatgggacaatagtttcaagaaggaaggtcacagtagaaaaggaagacaagtttatctgggaggttatgatatggaggagaaagctgctcgagcatatgatcttgctgcactcaagtactggggtccctctactcacaccaatttctctgcggagaattatcagaaagagattgaagacatgaagaacatgactagacaagaatatgttgcacatttgagaaggaagagcagtggtttctctaggggtgcttccatctatagaggagtcacaagacatcaccagcatggaaggtggcaagcacggattggtagagtcgctggaaacaaagatctctaccttggaacttttggaacccaagaagaagctgcagaagcttacgatgtagcagcaattaagttccgtggcacaaatgctgtgactaactttgatatcacgaggtacgatgttgatcgtatcatgtctagtaacacactcttgtctggagagttagcgcgaaggaacaacaacagcattgtcgtcaggaatactgaagaccaaaccgctctaaatgctgttgtggaaggtggttccaacaaagaagtcagtactcccgagagactcttgagttttccggcgattttcgcgttgcctcaagttaatcaaaagatgttcggatcaaatatgggcggaaatatgagtccttggacatcaaaccctaatgctgagcttaagaccgtcgctcttactttgcctcagatgccggttttcgctgcttgggctgattcttgatcaacttcaatgactaactctggttttcttggtttagttgctaagtgttttggtttatctccggttttatccggtttgaactacaattcggtttagtttcgtcggtataaatagtatttgcttaggagcggtatatgtttcttttgagtagtattcatgtgaaacagaatgaatctctctataacatattattttaatgaatctcctttgct

SEQ ID NO: 118273 - DNA, 2053 bp, Arabidopsis thaliana
  unsure (1)..(2053): unsure at all n locations
atgatcttnnnnnnnnnnnntacgactcacctcnagggagaagaacgtacgcctgcaggtaccggtccggaattcccgggtcgccacgcgtccgcaaaaaaaaaatcgacaacagtgcagacacacgccgatttgcgagatacacacagtctcacctaaaaatcgcaaaagaagaaaaattcggatcaaaattgtcttcaagcatcatggatccatacagggttcgtccttcaagcgctcatgattcccctttcttcactacaaactcgggtgctcctgtctggaacaacaactcttctttgactgtcggaactcgaggtccaatccttctggaggactatcatctgcttgagaaactcgctaactttgacagggagcggattcctgagagggttgttcatgccaggggagccagtgctaagggtttctttgaagtcactcatgacattacccaacttacttctgctgattttcttcgaggacctggtgttcagactcctgttatcgttcgtttctcaactgtcatccatgagcgtggcagtcccgagactctcagagatccccgtggttttgctgttaagttttacaccagagaggggaactttgatcttgttgggaacaacttccctgtattcttcgtccgtgatggaatgaaattccctgacatggtccatgcattgaaaccgaatcccaagtctcacattcaggagaactggaggatactggacttcttctcccaccacccagagagtttgcacatgttttcatttctctttgatgatctcggtatcccacaggactacaggcacatggaaggtgctggggtcaacacttacatgctaatcaacaaagctggaaaagctcactatgtgaaattccactggaagccgacttgtgggatcaaatgcctgtcggatgaggaagctatcagagttggaggagccaatcacagccatgccaccaaagatctctatgactcgatcgcagccgggaactatccgcagtggaatctcttcgttcaggtgatggatcctgcccatgaagacaaatttgacttcgatccgcttgatgtcacaaagatctggcctgaagatatcttgcctttacaacctgttggtcgcttggtcttgaacaaaaacatcgacaacttctttaatgagaacgaacagattgcattctgtcctgctcttgtggttccattcatccactattcagatgataacgtactccagacccggatcttctcctacgctgatagtcagagacaccgtcttggaccaaactatctgcaactacctgttaatgcccctaaatgtgctcaccacaacaatcaccatgatggttttatgaacttcatgcacagggatgaggaggtcaattacttcccttcaaggttggatccagttcgccatgccgaaaaataccctacaactcctattgtctgctctggaaatcgtgagaagtgcttcatcgggaaggagaacaacttcaagcaaccaggggagagataccggtcctgggattcagacaggcaagaacgattcgtgaagcgttttgttgaagcgctttcggagcctcgtgtcacgcacgaaatccgcagcatttggatctcttactggtctcaggcagacaaatctctgggacagaaactagcaactcgtcttaacgtgaggccaaacttctgaatgatatcatctctaaagactaagtgaaatcctataaactcaatatgctcctcttacggtttggtttctaagtaatctcgtttattgacaatgaaacgcttaaagaagggtactagttcctgtttgtaatcttcttttcaaaatattaacgattattttctaaggcaaataaataaaaagctatgactaatatagcttagtaaacaagtatcactatcatccatttggttcgactttaaaaatggatttttatttgtattttaatcttctgcatctatgacgtgagcttatagttggaattttattggggtctaatgtcagacgcacgatcttgataaaaaagttttatgtctgtccatattttgata

SEQ ID NO: 118274 - DNA, 1195 bp, Arabidopsis thaliana
  unsure (1)..(1195): unsure at all n locations
agctctctacgactcactatagggaaagctggcacgcctgcaggtaccggtccggaattcccgggtctgacccacgcgtgcgcggtatcccacaggactacaggcacatggaaggcgctggggtcaacacttacatgctaatcaacaaagctggaaaagctcactatgtgaaattccactggaagccgacttgtgggatcaaatgcctgtcggatgaggaagctatcagagttggaggagccaatcacagccatgccaccaaagatctctatgactcgatcgcagccgggaactatccgcagtggaatctcttcgttcaggtgatggatcctgcccatgaagacaaatttgacttcgatccgcttgatgtcacanagatctggcctgaagatatcttgcctttacaacctgttggtcgcttggtcttgaaacaaaaaacatcggacaaacttcttttatgaagaacggacagaattgcatttctgtcctgcttcttgtggttccaggcatccactatccagatgataagttactcagacccggatcttctcctacgctgatagtcagagacaccgtcttggaccaaactatctgcaactacctgttaatgcccctaaatgtgctcaccacaacaatcaccatgatggttttatgaacttcatgcacagggatgaggaggtcaattacttcccttcaaggttggatccagttcgccatgccgaaaaataccctacaactcctattgtctgctctggaaatcgtgagaagtgcttcatcgggaaggagaacaacttcaagcaaccaggggagagataccggtcctgggattcagacaggcaagaacgattcgtgaagcgttttgttgaagcgctttcggagcctcgtgtcacgcacgaaatccgcagcatttggatctcttactggtctcaggcagacaaatctctgggacagaaactagcaactcgtcttaacgtgaggccaaacttctgaatgatatcatctctaaagactaagtgaaatcctataaactcaatatgctcctcttacggtttggtttctaagtaatctcgtttattgacaatgaaacgcttaaagaagggtactagttcctgtttaaaaaaaaaaaaaaaaagggcggccgctctagaggatccaagcttacgtacgcgtgcatgcgacgtcatgctcgtttata

SEQ ID NO: 118275 - DNA, 1271 bp, Arabidopsis thaliana
ccaaaacacgtcctcaagacgctatttatccatttaagtctcttctcttttcgtcctcataatactcttatagaattccgggtttttcattcataacaaaaaatgggttttataactcgatttttagttttcatgtcactcttcaccagtttggtttctggatttgctctacaaaagcttcctcttatacagttcgacgaaggttacacacagctctttggtgaccagaatcttattgttcacagagatggaaaatctgtccggttaacgcttgatgaaagaaccggttctggatttgtctcaaatgatatttacttgcatggcttcttcagttcctctatcaaattgccagcagattactctgcaggagttgttatcgccttttatttatcaaatggggacttatatgagaagaatcatgacgagattgattttgagtttttggggaatattagaggcagagaatggaggattcagaccaatatatacggtaatggaagcacacacttgggcagagaagaaagatacaatctttggtttgatccaacagaggatttccatcaatacagtatcctttggtctctatctcacatcatattttatgtagacaatgttccgatcagagaagtcaaacgtacggcgtcgatgggcggtgacttcccggcgaagccaatgtctttatattcaaccatatgggatggttccaaatgggcgactgatggaggcaagtacggtgtaaattacaaatatgccccttacgtctctcaattcactgatctgatcctccacggctgcgccgttgaccccaccgagaagtttccgagctgcaaagatgaagcggttcagaatctccggctagcatcggagataacggagtctcagaggaacaagatggagattttccgacagaaacacatgacttattcgtattgttacgatcatatgaggtacaaggtggttttgtcggagtgtgttgtgaatccggctgaggctaagcgtctcagggtctatgatccggtcacgttcggtgggattcctcacggccaccgtcgtgggaagcatcggagcaggagccgattagctcgaactgagtcgatatgaatcggtgtatattgttcggctagagggcatttttggcattttctgtcttgtataggaatactatgaattatggactgaataatggaatgacaccgctatattttgatttcctccattttatgaacattatcgttttaacataataataaaatttcatttttctataagta

SEQ ID NO: 118276 - DNA, 304 bp, Arabidopsis thaliana
  unsure (1)..(304): unsure at all n locations
gcttaacaacttcgggagtagtgctgccggagttaccgtcggaaagtacatgctcaccgaaacttgtagtgttagtgtttgacnaattaagaggtacttaacggtgacggtggtatcggtcacggattttttcattattaataacgtcatatcttttatatataatcccgtagtagttaagttttataactttttttttcctacgtcatagagaaataatatcaagaattgcaatcggttgcgttattgttatgacgagctgtaaaagattcaaaggaaacactnaaatatagtaaaagacaaa

SEQ ID NO: 118277 - DNA, 920 bp, Arabidopsis thaliana
  unsure (1)..(920): unsure at all n locations
caaagcccaccnaaaaagaaaacaatcacttagcaatggcgatgatcagttactccaccattgtggttgctctgcttgcttcttttatgatttgctctgtttccgccaattttcaacgagacgtagagataacttggggagacggacgtggacagatcacaaacaacggcgatcttcttacactctctctcgacaaagcttcaggctcaggattccaatccaagaacgaatatttgttcggtaaaatcgacatgcagatcaaactcgttgccggaaactccgctggaactgtcaccgcttactatttgaaatcccctggatctacatgggacgagattgactttgagttcttgggaaacctaagtggtgatccttacacacttcatactaatgtctttacgcaaggaaaaggcgatagagaacaacaattcaaactctggttcgatcccactagtgatttccacacttactctatcctctggaacccacaacgcatcatattctccgtggatggaactcccataagagaattcaagaacatggaatctcaaggaactctgtttcctaagaaccagccaatgagaatgtactctagtctatggaacgctgaagaatgggccacaaggggtggtctcgtcaaaaccgactggtctaaagctcccttcactgcttcctaccgcggcttcaacgaagaagcttgcgtcgtgatcaacggccagtcttcatgccctaacgtgtcaggacaagggagtactggttcgtggttgtctcaggagctagactcgacgggtcaagaacagatgagatgggtacagaataactacatgatttacaattactgtacggacgctaaaaggttccctcaaggtcttccacgcgagtgcttagctgcgtaaagcttttaaacaaatgatccaaag

SEQ ID NO: 118278 - DNA, 1138 bp, Arabidopsis thaliana
aacacaaagctctcatcttcttttagtttccaaactcacccccacaactttcatttctatcaaccaaacccaaatgggtccaagttcgagcctcaccaccatcgtggcgactgttcttcttgtgacattgttcggttcggcctacgcaagcaacttcttcgacgagtttgacctcacttggggtgaccacagaggcaaaatcttcaacggaggaaatatgctgtctttgtcgctggaccaggtttccgggtcaggtttcaaatccaaaaaagagtatttgttcggtcggatcgatatgcagctcaaacttgtcgccggaaactcggccggcaccgtcactgcttactacttgtcttcacaaggagcaacacatgacgagatagactttgagtttctaggtaacgagacagggaagccttatgttcttcacaccaatgtctttgctcaagggaaaggagacagagagcaacagttttatctctggttcgacccaaccaagaacttccacacttactccattgtctggagaccccaacacatcatattcttggtggacaatttacccattagagtgttcaacaatgcagagaagctcggcgttcctttcccaaagagtcaacccatgaggatctactctagcctgtggaatgcagacgattgggccacgagaggtggtctagtcaagactgactggtccaaggctcctttcacagcttactacagaggattcaacgctgcggcttgcacagcctcttcaggatgtgaccctaaattcaagagttcttttggtgatggtaaattgcaagtggcaaccgagctcaatgcttatggcaggaggagactcagatgggttcagaaatacttcatgatctataattattgctctgatctcaaaaggttccctcgtggattccctccagaatgcaagaagtccagagtctgatgaacacatattacctcatatttctctgcttgtttgatgcaattcttaaattcctctgttattccattgtacattgtcaagatcaataaagcattcctggtttcaaaataaaaaaaaaaaaaaaaacaaagggcggccgctctagaggatccaagcttacgtacgcgtgcatgcgacgtcatagtgttctatagt

SEQ ID NO: 118279 - DNA, 583 bp, Arabidopsis thaliana
  unsure (1)..(583): unsure at all n locations
cacaaagctctcatcttctttaagtttccaaactcacccccacaactttcatttctatcaaccaaacccaaatgggtccaagttcgagcctcaccaccatcgtggcgactgtncttcttgtgacattgttcggttcggcctacgcaagcaacttcttcgacgagtttgacctcacttggggtgaccacagaggcaaaatcttcaacggaggaaatatgctgtctttgtcgctggaccaggtttccgggtcaggtttcaaatccaaaaaagagtatttgttcggtcggatcgatatgcagctcaaacttgtcggccggaaactcggccggcaccgtcaactgcttactacttgtcttcacaagggggcaacacatgacggggtagnctttgagtttcctaggtaacggggcagggaagccttatgttcttaacaccaatgtcttttcttcaaggggaaggggccaaggggcaacagtttttttttttggtgtgtccaaccaagctttcaaaatttntccattntttgggccnaaaaaaaaaattttttggggggaanttcnccttttnggggnttanaattttt

SEQ ID NO: 118280 - DNA, 1140 bp, Arabidopsis thaliana
ggaattcggcacgaggatgaggtcgtttgtctcgttgatttctcttctccttcttctctcattttcttcatctgttctctcaaccaaaaagtcatcatttcaaaaacttccggtgccaggaaacagaacaggccctgaagctttcgcttttgattccaccggaaaaggatttctacccggagtcaccggcggtaaaatcctcaaatatcttccaaagaaaggttatgtcgactttgcccagatcacaaactcttcgaagtcttcgttgtgcgacggagcacttggaaccactaacgtcgaaaaatgtggtcgaccagccggaatagccttcaacacgaaaacaggtgatctttacgtcgcagatgctgcattgggtctccacgtcatccctcgccgtgggggtttggctaagaagatcgccgacagtgtcggcggcaagccctttttgtttcttgacgggcttgacgtagatcccaataccggcgtcgtctatttcacttccttcagctcaacatttggccctagggatgtgttgaaagcagtggcaacaaaagactcgaccggtaagttcttcaaatacgatccatcaaaaaaggtcgtgactgtattgatggacggtcttagcggctcagccggatgtgccgttagctcagatggttcattcgtgctggttggtcagttcacaaaaagtaacatcaagaggtattggatcaaaggatccaaagctggtacttctgaagacttcaccaactcggtctcgaaccctgacaacatcaagaggatcggttctactggaaacttttgggttgcttcggtcgtgaactcagccaccggaccgacaaacccttcggcggttaaagtcagttctgccggtaaagtgcttcagaccattcccctaaaagacaagtttggggatactttggttagtgaagttaacgatcaaaggacagctttatatcggagctctttttgggcctttcgccggaattccttaagctttaaagtgaacatggtattagtatgggttagaattaaagtgattgaatcgaaataaatatggttacaaagtcttgacggatcaatgtacgctcatgttgattctgttcaaataaatatgaattttttttaaagaaaaaaaaa

SEQ ID NO: 118281 - DNA, 1489 bp, Arabidopsis thaliana
  unsure (1)..(1489): unsure at all n locations
cattgtattcctcaaatctctttacttgatcgttggttctctcaaaaatcagatttttatttctgggttttgttcgattttgtgatcatggcggtcattgagagcgtcggagctaatactactgtggaagctggtggtttgatctcgccgtcgccgccgtcttccgtcaccagtcaagaatcaggagcttcttctaacaacgatcacggtggaaatggaatccatgatgagatcggagtccacgtggcgagatccgacggtggtgagagttttaagcgtgatatgagagagcttcacgagctcttgtctaagcttaatcctatggctaaagagtttattcctccttcacttactaagccagttgttaatggttttaacggcggtttcttcgccgttaataatggctttgttgctgccggaaatttccccgtcaacgaagacggtagctttcgtcggaagaagtcgttcggacaacaagggaaacggagaatgaatcctaggacaagtttggctcagcgtgaagagatcataagaagaactgtctatgtgtctgatattgaccaacaggtcactgaggagcagcttgctggtttgtttatcggctttggacaggttgttgactgtcgtatatgtggtgatcccaactcagtacttaggtttgctttcatcgagttcactgatgaagtgggtgcaaggactgctctgaatttgtctgggacgatgcttggattctatcctgtgaaggttatgccgtctaagacagctattgcaccggttaacccaaccttcttgccaaggactgaagatgagcgtgagatgtgtgcaagaactatctactgcactaacattgacaagaagctcactcaaaccgacattaaactcttctttgagtctgtgtgtggcgaggtgtaccgtctgaggctactgggcgattatcatcatccaactcgcatcggcttcgtggagtttgtcatggctgaaagcgcgatagcggctctcaactgcagtggtgtccttcttggttctttaccgataagggtgagtccatcaaagacaccggttcgttcccgtgctatcccgcgacatcaaatgcattaaccgtagctacaagttttatatatatttctgctcctcacagacatgtaaagaatgtttgtctgaaacttctggttcttctgttttcccgtatgtaatgctagaagcttgatgatgcttctgttgccttttgcttttgggtaaatctcttagggagagttttttcgatttgggttcctacgtttagtagtttacacagagcagaagagtaaaacactgagagaggcttttgaagattgtctctgttttttagttatttatactcttacccctgaagttattagaaacttgctttggtgcttaaaagtttcttcnnnnnnnnnnnnnnnnnnnnnnnnnnnnnnnnnnnnnnnnnnnnnnnnnnnnnnnnnnnnnnnnnnnnnnnnnnnnnnnn

SEQ ID NO: 118282 - DNA, 1513 bp, Arabidopsis thaliana
  unsure (1)..(1513): unsure at all n locations
gtccgtccgcagtaccggtccggaattcccgggtcgacccacgcgtccgttaaaattttcgattttgattattgggtttctctctgatcatggcggttgttgagactggagcagcagctactgctgctgactgcaggaggagtcgtgatccagccgccgccgtcttcaccaccatcttcaatgactagtcaagattccggcgtttcttccgatgatcagaaccatcactctaggatcgatcaagttctccggcacgatcaaggtctttacagcaagatcgggtcacacgtggcgagatccgacggcgttgacggtggtgagagctttaagcgtgatatgagagagcttcaggagcttttctctaagcttaatcctatggctgaagagtttgttcctccttctctgaataaacaaggaggtaacggtgttaacggtggtttcttcacctctgctggttccttcttccgcaacaatggctttgctggtaccggaaatggcggatacggtaacgaaaacggtggtttccgacggaagaagagttttggtcaagggaaacgaaggatgaatgctcgaacaagcatggctcagcgagaagatgttatccgtagaaccgtctacgtctctgatctcgatcaacaggtcactgaagagcagcttgctggtttgtttgtgagctgtggacaggttgttgactgtcgcatatgcggtgacccaaactcggtccttcggtttgcattcatagagttcactgatgaagagggtgcgatgactgctctaaatttatcggggactatgttgggattctttccctgggaaagttttcccatccaaaacagctatagccccggttaacccgacatttttgcctaggactgaagatgagcgtgagatgtgtgcaagaactatctactgtactaacatagacaagaaggtgactcaatcagacgtgaagatcttttttgagtccttctgcggagaggtttatcgcctgaggctgcttggagattatcaacactcgactcgtattgcttttgtagagttcgtaatggcggaaagcgcaatagctgctctcaactgcagtggagttgttcttggttctttacctataagggtgagtccttcaaagacgcctgttcgtccgagatcaccgaggcatccaatgcattgatcttagctttacaggttttcacatatctcatgtctccgcaatatatatatcgctgtgtcgtcttaaaaacagcattacccggacatgtaaagatgtttgtctgcatctctcatctcttgttttcgaaatgtaactctgggatctgatgatgcttctttcttcttcctttacctgagaatcttttgggtaaaaaaaacctcgtagagagtttttatttatctcttaaaaagaaaagagcttaaaacataaaaaaaaaaaaaaagggcggccgctctagaggatccgagcgagcgcacgcgagcacatagctggtttattgtgtannnnnnnnnnnnnnnnnnnnnn

SEQ ID NO: 118283 - DNA, 657 bp, Arabidopsis thaliana
  unsure (1)..(657): unsure at all n locations
aagtccatgattaatcactctttaatcgtctctttatttctctctctctctcttcttcttcttcttcttcctccagagagcaccttatgctgattcctctccttttcttcctcaactcataaacccgatcggccgattccttcacaattatccttaaaattttcgattttgattattgggtttctctctgatcatggcggttgttgagactggagcagcagctactgctgctgatgcaggaggagtcgtgatccagccgccgccgtcttcaccaccatcttcaatgactagtcaagattccggcgtttcttccgatgatcagaaccatcactctaggatcgatcaagttctccggcacgatcaaggtctttacagcaagatcgggtcacacgtggcgagatccgacggcgttgacggtggtgagagctttaagcgtgatatgagagagcttcaggagcttttctctaagcttaatcctatggctgaagagtttgttcctccttctctgaataaacaaggaggtaacggtgttaacggtggttnttcaactctnctgggtccttnttccgaaaaatggnttttctggaccggaaatgggggtacggtaacgaaanngntggttccgccggagaagagttttnnaaaggaaacgnaggt

SEQ ID NO: 118284 - DNA, 1082 bp, Arabidopsis thaliana
ccacgcgtccgcttatttttcttgtttctcaatcgatgtaaaataaaattcagttgttgatgattttaccatgtttcgggagcttgtgttgatctagttcttcgctctcactaggctaattttgatcttcctgatgtgcacaatgtgaatgggtcttagacaagggaagatcaaagtaattaaataagctgaagtaagaggaagtgatgttttctcttatgtctggactatggagttacatgtttagcaagactgagtttaatgtgcttattcttggtatcgacaaagctgggaagacgacatttttggagaaactgaagacgatatactcaatctcggaaggtcttcctcatgatcgaattgttcctactgtggggcttaatattggtcgcattgaagtctccaatgctaaaattgtgttctgggatctgggaggtcagcctggtttgcggtctatttgggagaaatactatgaagaagcacacgcgttgatatatttgattgatgcagcttgcccaacccgctttgaagattctaaatctgctttagaaaaagccctgcggcatgaggatttgcaaggagcccctcttttaatattggcaaacaagcaagacctcacaaatgctgtatcggctgaggaactggaccgataccttgatttaaagaaattggatgaaagagtgtacatgtttgaagcagtttctggatatgatgggcgaggaatcaaagaaagtatagaatggctggttggagtaatggagaaaagcaagagaaccgaatcattaagagcccgtgcagggtacactcctgtgccaaattcatagacacgagaaaggactcgcaaactcaactctccagtcaactggtttcctttgaaatacatttgtagataagaacagaccacaatctttgcatcattttggctagcatcaaattcacatgatgagtaggaactagtaatctccttattgccaccttcatatgtttactaatgttataattcaattgagactttgtggtgatgattgcatttagttactgcaaacccaataatgtaatcaagtttcttcatttgcaaactc

SEQ ID NO: 118285 - DNA, 402 bp, Arabidopsis thaliana
ggtgtgcaaaagccaaagctttgatctttcattaattcttctcaagatcttcagagtctacaagggaagatcaaagtaattaaataagctgaagtaagaggaagtgatgttttctcttatgtctggactatggagttacatgtttagcaagactgagtttaatgtgcttattcttggtatcgacaaagctgggaagacgacatttttggagaaactgaagacgatatactcaatctcggaaggtcttcctcatgatcgaattgttcctactgtggggcttaatattggtcgcattgaagtctccaatgctaaaattgtgttctgggatctgggaggtcagcctggtttgcggtctatttgggagaaatactatgaagaagcacacgcgttgatatatttgat

SEQ ID NO: 118286 - DNA, 1137 bp, Arabidopsis thaliana
  unsure (1)..(1137): unsure at all n locations
nnnnnnnnnccnnnnnnnnnnnnnnnnnnnnnnnnnnnnnnnnnnnnnnnnnnnnnnnnnnnnnnnnnnnnnnnnnnnnnnnccacgcgtccgctcgaaatcaaaaagcacgtcggtgacttgtactcttcaatctcttcttcctctctttcacatctccttctctcgaacccatcgacctgcgctaattcatcatcgaccttgctcaaattcatcaaccatgtcttacgattatctcttcaagtacataatcatcggagacacaggtgtgggaaaatcgtgtctgcttctgcaatttactgataagaggttccaaccagtccacgatctcaccattggtgttgagttcggtgctcggatggtcaccgtcgatggacgccccatcaaactccaaatttgggacaccgctggacaagaatcttttagatccatcaccagatcatactacagaggagcagccggagctttactggtttatgacatcaccaggagagagacgtttaaccatctggcaagctggttggaggatgctcggcaacatgcaaatcctaacatgagtattatgctgattgggaacaaatgtgatcttgctcacaagagagctgttagcaaagaggaaggtcaacagtttgccaaagaacatggcctgctattcttagaagcatctgcaagaactgctcaaaacgttgaggaggccttcatagagactgctgccaagatcctccagaacattcaggatggtgtctttgatgtatccaacgagtcatcaggtatcaagattggttacgggcgtactcaaggtgcagctggaggaagagatggtacgatctctcagggaggtggctgttgtggttaaaaaatcctcgagagaggtgtcacatatctgctgtaatctggtgattcgagaaactactattgcttctatttacctctgcaaatggatacaccagaatgtatagtttctctttctttctttctttttttctctttttcccagattgtcttttatcaaaaaaccaaacgggtgcatttaagagtgaacaggctgatctttataaaccaaacaggcgttggcttatttaaaacgttgtcgctttgtatgacgaccgctctagaggatccaagcttacgtgcgcg

SEQ ID NO: 118287 - DNA, 1112 bp, Arabidopsis thaliana
  unsure (1)..(1112): unsure at all n locations
ctacaattcctctgtcgctctcaccagttaacagctacagcacaaaactgtaaccacgcttccgatctctaaaacctgagagagagagagagagagagagagagagacagagagaagtgtttcaatagtttggcgtgaagatggccggaggaggcggatacggcggcgcatcggggaaagttgattacgtcttcaaagttgttctaatcggagattcggctgttgggaaatcgcaactacttgctcgattcgctagagacgaattcagcatggattctaaagccaccatcggcgtcgagttccaaactcgtaccctctccattgaacaaaaaagcattaaggctcagatctgggataccgctggtcaggaaagatacagagccgttacaagcgcatactacagaggagcagttggcgcaatgctggtttatgatatgacgaaacgtgagacctttgagcatattccgcgttggcttgaagaactgagggcgcacgctgataagaacattgtcatcatccttattggaaacaagtctgatctagaagatcaaagagctgttcccactgaagacgctaaagagtttgctgagaaggaaggactctttttcctcgagacctctgctttaaacgcaaccaatgtcgaaaactccttcaacactctaatgactcagatatacaataccgtgaacaagaagaatcttgcatctgaaggcgactcaaataaccccggttcattggctggtaagaagattctcatcccaggttctggacaggagattcccgctaagaccagcacttgttgtacttcttcttgatctgtctcctactcaagcaagattcattttttttcctcctgaaatttgtgatagagaatgctactttcattgtatattctttttcgaatctggcttgtttgctagttcattaaacattggtgtgcaattggacaccgatagaaagtattggaacaaatagcttttgaatgaaatatgaaacaaacagtctttgagagttaaaaaaaaaaaaccaagcccggccgctctagaggatccaagcttacgtacgcgtgcatgcgacgtcatagnnnnnnnnnnnnnnnnnnnnnnnnnnnn

SEQ ID NO: 118288 - DNA, 919 bp, Arabidopsis thaliana
  unsure (1)..(919): unsure at all n locations
nnnnnnnnnnnnnnnnnnnnnnnnnnnnnnnnnnnnnnnnnnnnnnnnnnnnnnnnnnnnnnnnnnnnnnnnnnnccacgcgtccgtacggctgcgagaagacgacagaagagtgaagaagaaaaaaaagaaggtcattttcattttctccatttgatttttgccgaccggagaaaatatcttcttgccgtcttcttcttcatttcaccaggaacttttatttgaaatcggtttgatttagccatggcaaacgcggcatcgggaatggctgtgcatgatgattgcaagctgaaatttatggaactgaaggcgaaaagaacattccgtaccatagtctacaagattgaggataagcaagtgattgtagagaaactcggtgaacctgaacaatcatatgatgactttgcagctagtcttccagctgatgattgccgatattgcatttacgatttcgactttgtcactgcggagaactgccagaagagcaagatcttcttcattgcatggtctccggacactgccaaagtgagagacaagatgatttacgcgagctctaaagataggttcaagagagaactagatggaattcaagtggaacttcaagctactgatccaacagaaatgggtcttgatgttttcaaaagccgcaccaactaagtaaaacaaaaccctgtaagggcatttgaataagtttggtttctggagtgaatatgtttcctctgactgttatgaaaactttttaacaccttcaacttcattctacttggtattattgtatgtctttgatgtgttatgtgtgccttgtgatggttttcaattagttttacatgtacaatacttgaaatcagattgttgctaggcttcaagccttgtctcagttatctatctgataatttattcgtatatgtttggagtccta

SEQ ID NO: 118289 - DNA, 568 bp, Arabidopsis thaliana
  unsure (1)..(568): unsure at all n locations
ccgggaaggaacgggccggccgacgcatgcgtgcgggaatagcgtatacagtttcgacgatgtcattgctgagaactgccagaagagcaagagcttgttcattgcatggtctccggacactgccaaagtgagagacaagatgatttacgcgagctctaaagataggttcaagagagaactagatggaattcaagtggaacttcaagctactgatccaacagaaatgggtcttgatgttttcaaaagccgccccaactaagtaaaacaaaaccctgtaagggcatttgaataagtttggtttctggagtgaatatgtttcctctgcctgttatgaaaaccttttaacaccttcaacttcattctacttggtattattgtatgtctttgatgtgttatgtgtgccttgtgatggttttcaattagttttacatgtccaatacttgnnatccaaaaaaaaaaaaaaaaaaaaaaaaaaaaaaaaaaaacaaagcggccgctctagaggatccaagcttacgtacgcgtgcatgcgaggtcatagctctactatagtgcagttaaatcaagc

SEQ ID NO: 118290 - DNA, 1698 bp, Arabidopsis thaliana
gcctgcaggtaccttttgatacctcttctcttctctctcttcgaagatgtctctctcttccctcactctcgactccaatccaagattcgctgttggtggaccttatcaccgccgttatcctcctcttcaccaccctcgaagcttcgtctcttgctctgctaaacgtccagctgtctccgcttcactgagcgtcgccgctgattcagccgccactgagtctcttggacggattggatcactgagtcaagtatctggtgtactcggttgccaatggggagatgaaggtaaaggcaaactcgttgacatcttagcccaacactttgacatcgttgctcgttgtcagggtggagctaatgctggacacactatatacaattcagagggaaagaaatttgcacttcaccttgtgccttcaggtatcctgaatgaggatactacttgtgtcattggaaacggagttgtggtgcatttgccaggtctcttcaaagagattgatggtttggagtccaatggtgtctcctgtaaaggaaggattttggtctctgatcgcgctcacttgttattcgatttccatcaagaggttgatgggctcagggaatctgagcttgccaagtcgttcattggcaccaccaagaggggaattggtcctgcctactctagtaaagtgataaggaatggtattagagtaggtgatctcaggcacatggatactttacctcaaaagcttgaccttttactatcagatgcagcggcaaggtttcaagggttcaagtatactcctgaaatgcttcgggaagaagttgaagcatacaagagatacgctgacagattggagccctacattactgacactgtccatttcatcaatgactcgatttcgcagaagaaaaaggttttggtcgaaggtggtcaagctacaatgttggacattgactttgggacttatccttttgttacttcctccagcccctcagccggtgggatctgcacaggtcttggtattgcaccaagtgttgttggtgatctaattggagtggtaaaagcatacactacaagagttggttcaggtccattcccgacagaaaatttgggcacaggtggtgaccttcttaggttagctggacaggagtttggcactacaactggtcgtcctcgtcggtgtggctggcttgacattgttgccctgaaattttcttgccaaatcaatggatttgcatcacttaatctcactaagcttgatgtactttcggatctgaacgaaatccagctgggtgtggcttacaagaggagtgacggcacccctgttaaatcattccctggtgatcttcgtcttctcgaagaactgcatgtggagtatgaagtcttacctgggtggaagtctgacatatcctcggtcagaaactactctgatcttccaaaggctgctcagcaatatgttgagaggattgaagaactcgtgggtgtgcccattcattacattggtattgggcccggtcgtgatgcccttatatataaatgatttttagtgttaggcttttttggttcctccacaaactcaaaaattgatcaagtgtcaagttactgagaattattactctctttggaatgactagtgtatctgttgcattgtttctaatattggaatgaaggcggccgcgaattcgatatcgagctggtcgatgcaatcgacaacggggg

SEQ ID NO: 118291 - DNA, 489 bp, Arabidopsis thaliana
aaaaggagtgccgccacccctgttaatccattcctgggtgttcttcgtcttctcaaagaactgcatgtggggtttgaagccctcccccgggggaagtctgccatatcctcggtcagaaactcctctgttcttccaaaggctgctcagcaatatgttgagaggattgaagaactcgtgggtgtgcccattcattaccattggtattgggcccggtcgtgatgcccttatatataaatgatttttagtgttaggcttttttggttcctccacaaactcaaaaattgatcaagtgtcaagttactgagaattattactctctttggaatgactagtgtatctgttgcattgtttctaatattggaatgaagaggaattctgtgcttaagcagtgaggttgctatattcataatgtttaagctttcgtgtttgatcttaaaggaaaaaacaaaaaggcgaaccgctctagaggatccaagcttacgtacgcgt

SEQ ID NO: 118292 - DNA, 2715 bp, Arabidopsis thaliana
catctttcacgtctctcttcaattcgcggccgcgcggccgcgtctcaatcctctattttctcgagaaaattctcattctcattttctttcagggaaaagttttgttgttgaatacagatttggaaacttcatttgtttttttccgtttttaaccaaaatttttaaaaaagctttcttctgaacgttaatcgtggagagtttcgggtcgggtcgggtcgtaaaaggcgggtttcacggtggtgatagattcacctcctgcttccttctgagggggttagccccgaggctcttcgcctcggcgggtttcaaattcccccaaatctaacaaactcacagattcattttctccattttttttgtttgttgaaaatttgaatccacaaattttgaattcatttgtaaccgttcgttgaagaagaagaagatgcctgctctagcttttgttgatactcccatcgataccttttccagtatctttacaccgtcgtctgtttccaccgccgttgttgacggttcctgccattggtctccgtccctctcctcctctctttaccgtatcgacggatggggagctccgtatttcgcagcgaattcctccgggaacatctctgttcgtcctcatggctcaaacactttacctcaccaagacatcgatctgatgaaagttgtgaagaaagttacagatccgagtggtttaggattacagcttccgcttattgttcgtttccctgatgttctgaagaatcgtcttgagtgtcttcaatccgcgtttgattacgcgattcagagtcaaggatatgattctcattaccaaggtgtgtatcctgtgaaatgtaatcaagatcggtttatcatcgaagatattgtcgaattcggatccggttttcgattcggtttagaagctggttccaagcctgagattcttcttgctatgagttgtttgtgtaaaggtaatcctgaagcttttcttgtgtgtaatggttttaaagactctgagtatatctcattggctttgtttgggaggaaacttgaattgaatactgttattgttcttgagcaagaagaagagcttgatttggttattgatttgagccagaagatgaatgtgaggcctgtcattgggttaagggctaagctgaggactaagcattcgggtcatttcggatcaacttctggtgaaaagggtaaatttggattgactacggttcagattcttcgtgtggtgaggaagctgcgtcaatctggtatgcttgattgtctccagcttctgcattttcatattggttcacagattccgtccacggctttgctttccgacggtgtggctgaggctgcgcagctttactgtgagcttgtccgtcttggtgctcatatgaaggtgattgatattggtggtgggttggggattgattacgacgggtctaaatcgggggagtcggatctctctgttgcttatagcctcgaggagtatgctgcagctgtcgtggcttcggttaggtttgtttgtgatcagaagtctgtgaagcatccggtgatttgcagcgagagcggtcgagccattgtgtctcatcactcggtgttgatctttgaagctgtctcagctggtcaacaacatgagacccctactgatcatcagtttatgcttgaagggtactctgaggaagttcgaggtgattacgagaatctttatggtgctgctatgcgtggtgatcgtgaaagctgcttgctttatgttgatcagctgaagcagagatgtgttgaagggttcaaagaagggttccttggcattgaacagttagctggtgttgatggattatgcgagtgggtgattaaggcgattggtgcatcggatccggttcttacttaccatgtcaatctatcggttttcacttcgattcctgatttctgggggattgatcagctgtttcctattgttccaatccataaacttgaccaaaggcctgccgcgagagggatcttatcggatttgacgtgtgacagcgacggaaagatcaacaagttcataggcggagaatcgagcttgccattgcacgagatggacaacaatggctgcagcggtgggcggtactatttgggaatgttcctaggtggagcttatgaggaagctctcggtggagtccacaatctgttcggtggaccaagcgtggttcgcgtattgcagagcgatggacctcacggattcgcagtgacccgtgctgtgatgggccaatcctctgcagatgtcctcagagcaatgcagcatgagcctgagctcatgtttcagactcttaaacaccgagccgaggagccgaggaacaacaacaacaaagcttgtggtgataaggggaacgacaaactagtagtcgcatcgtgtcttgctaagtcattcaacaacatgccttatctttccatggaaacgtcaacaaacgctctcaccgcagcggtcaataaccttggcgtttactactgcgatgaagctgcagctggtggcggcggcaagggcaaagatgagaattggtcttatttcggttgattgagagagacttgacaacatcctctgtctttgatcttcaccgtacgattgattacgatcctagttcttatttgtctttaagttcagttttaaagttttaagttattttcttgtaataagacaaactcttagcaaaatttaataatattatcatttatcatcacggaaaaaaaaaaaaaaaa

SEQ ID NO: 118293 - DNA, 3106 bp, Arabidopsis thaliana
  unsure (1)..(3106): unsure at all n locations
aatacgactcatatagggaaagccggtacgcctgcaggtaccggtccggaattcccgggtcgacccacgcgtccgcttcatttccgtcttttccgctaggtttccgtctctgttttttcttgcattttccccagaattccttcacattctctccttttcctctttttaattcctcaccacctcaaattcttcataaacaaatccacttctgcatggttgggagaatctgttagagaatttttgttgttgttgggttcagatttggaaaatttcctttttttcgagtttcttctgaattattcatcgtggagattctcggatcgggaagggctgcgagaggtggttttcacggcggggatagattcatcttctgtcttctcctgagggggtagccgaggctccggcctcggcggtttttaaacccctacctttacaaattctgggaaattagaaaaaaaaaggtttgatttttcagtttttgctctgttcttctctcgaaagtttttgttttgttcgagaatttctgtaaagtgagattgttgatcgtttgctgataagagggtgaagataaagatgcctgctttagcttgcgttgatacgtcctttgtacctcctgcctacgccttctccgacaccgccggtgatgtttttatcccggcgtcatcaccaacttccgccgccgttgttgttgaccgttggtctccgtcgctctcatcgtctctctatcgaatcgatggatggggagccccttatttcatagccaattcgtctggtaacatctctgttcgtcctcatggctctgaaactttgcctcaccaagacatcgatttgctcaaaatcgttaagaaggtgacgggtccgaaatcttccggtggtttaggattgcagcttccgttgatcgttcgtttccctgatgtgttgaagaaccgtctcgagtgtcttcaatctgcgtttgattacgcgattaaaagtcaaggatatgattctcattaccaaggtgtttatccggtgaaatgtaaccaagatcgattcgttgttgaagatattgtcaagtttggatcttcgtttcgatttggattagaagctggttctaaacctgagatccttcttgctatgagctgcttgtgtaaaggtagccctgatgcctttcttgtgtgcaatggattcaaagatgctgagtatatatcattggctctgcttgggagaaaactggcgttgaatactgtgattgtgcttgagcaagaagaagagcttgatctggttattgagctgagccagaagatgaatgtgaggcctgtcattgggttaagggctaagctgaggactaagcattcgggtcatttcggatcaacttctggtgaaaagggtaaatttggattgactactactcagattgttcgtgtggtgaggaagctgcgtcaatctggtatgcttgattgtctccagcttctgcattttcatattggttcacagattccgtcgacttcgttgctctctgatggtgtcgccgaggctgctcagctttactgtgaacttgtgcgtcttggtgcacatatgaaagttattgatatcggtggtggtttggggattgactacgacgggtctaaatctggagaatcggatctctctgttgcttatagtctcgaggagtatgctgaagctgttgtagcttctgttcgggttgtgtgtgaccggagctcagtgaaacatccggtgatatgcagcgaaagcggtagagcgatagtctctcatcattctgtgctgatctttgaagctgtttcagcagataaaccaatggttcatcaagcaactcccggcgatattcagttcctgcttgaaggtaatgaggaagctcgagccaattatgaggatctttatgctgctgtgatgcgtggagaccacgaaagctgccttctttatgtcgatcagctgaagcagaggtgtgttgaaggtttcaaagaaggtgttttgagcatcgagcagttagcttctgttgatggtttatgcgagtgggtgttgaaggctataggcgcatcggatccggttcatacttacaatatcaatctatcagttttcacttcgattcctgatctctgggggattgatcagctgttccctatagttcctatccataagctcgatcaaaggcccggggctcgcggaatcctttcagatttaacgtgtgatagtgacgggaagatcaacaagttcataggcggtgaatccagcttgccgttgcacgagctggacaagaatggcagtggaggaaggtactttttgggtatgttccttggaggggcttacgaggaggctctcggtggagtccacaatctgtttggtggaccaagcgttgtccgggtctcccagagcgatggaccacacagctttgcagtgacccgagcggtgcctggtcagtcctcagcggatgttctccgagcaatgcagcatgagccggagctaatgtttcagaccctaaagcaccgagcagaggaaatgatgcataccaaaggtggtagcgaaggtgaaaatgaagaggaagaagaagatgatgagttcaacaatgtggcggcttctctcgaccgttcgttccacaacatgccgtatcttgcaactgagcaggcatcgccaagtaactctctttcagctgcgatcagtaaccttgggttttactactgcgacgaagacgtctacgattacatctctgcgtgagaaaaggtggtcgtcgtgtggtttgttgttgcattatattatcgtaaaatcgtcattgtacgatttctttaaataaaagttattaaataagaacatgatgagatccatgatccatcgttgtttaaggttttaagtaagaagatccgaattatgaaagccttttgtgaaattcggatctttttatatttatttcccccttcaaatgtagccgttcccgtttgcggccgcgtaaaaataataaaaaagtttgccccnnnnnnnnnnnnnnnnnnnnnnnnnnnnnnnnnnnnnnnnnnnnnnnnnnnnnnnnnnnnnnnnnnnnnnnnnnnnnnnnnnnnnnnnnnnnnnnnnnnnnnnnnnnnnnnnnnnnnnnnnnnnnnnnnnnnnnnnnnnnnnn

SEQ ID NO: 118294 - DNA, 838 bp, Arabidopsis thaliana
  unsure (1)..(838): unsure at all n locations
nnnnnnnnnnnnnnnnnnnnnnnnnnnnnnnnnnnnnnnnnnnnnnnnnnnnnnnnnnnnnnnnnnnnnnnccacgcgtccgcggacgcgtgggcggacgcgtgggcggacgcgtgggcggacgcgtggggaaagctgccttctttatgtcgatcagctgaagcagaggtgtgttgaaggtttcaaagaaggtgttttgagcatcgagcagttagcttctgttgatggtttatgcgagtgggtgttgaaggctataggcgcatcggatccggttcatacttacaatatcaatctatcagttttcacttcgattcctgatctctgggggattgatcagctgttccctatagttcctatccataagctcgatcaaaggcccggggctcgcggaatcctttcagatttaacgtgtgatagtgacgggaagatcaacaagttcataggcggtgaatccagcttgccgttgcacgagctggacaagaatggcagtggaggaaggtactttttgggtatgttccttggaggggcttacgaggaggctctcggtggagtccacaatctgtttggtggaccaagcgttgtnccggtctcccagagcgatggaccacacagctttgcagtgacccgagcggtgcctggtcagtcctcagcggatgttctccgagcantgcagcatgagccggaactatgtntcagaccctaaagcaccgagcagaggatatgatgcatacccaaaggtggtagcgaaggtgaaaatgaagaggaagaaagagatgatgagttcaacattgtggcggcttctctcgaccgnntcgtccacaacatgccggatcttgca

SEQ ID NO: 118295 - DNA, 604 bp, Arabidopsis thaliana
  unsure (1)..(604): unsure at all n locations
cttctttcacgtctctcttccctgaaactttcccgagaaaattctcaatcctctattttctcgagaaaattctcattctcattttctttcagggaaaagttttgttgttgaatacagatttggaaacttcatttgtttttttccgtttttaaccaaaatttttaaaaaagctttcttctgaacgttaatcgtggagagtttcgggtcgggtcgggtcgtaaaaggcgggtttcacggtggtgatagattcacctcctgcttccttctgagggggttagccccgaggctcttcgcctcggcgggtttcaaattcccccaaatctaacaaactcacagattcattttctccattttttttgtttgttgaaaatttgaatccacaaattttgaattcatttgtaaccgttccgttgaagnagnagnagntgcctnctctagcttttgttgataccnccatcgntaccttttncagnatcttacaccggcggcctgtttcaccgccggttgtnacgggtncctccattggctccggcccntcccccgttttaccgatggcggnttgggggncnnattnggaggnatccncgganatttnttggccagg

SEQ ID NO: 118296 - DNA, 1755 bp, Arabidopsis thaliana
actcacttagggagaagctactacgcctgaatactcaattctttcttcttcaattcatcacaacaaatcaaaaactccaagttcttacctttttcccatttacaatcggtaaatttctccgatcacgagatacaaatttcactttctgatatcttggatcttccgatcactttgaattttttggtttgttgattttttttttttttttttgttccataaagttcgaattttttatagagaagaaaccatgaatgctttagctgcaacaaacagaaacttccgtcatgcatctcgaatcctgggtttggattcgaagatcgagagaagtcttatgatcccatttagagaaatcaaggttgagtgtacgattcctaaagacgatggcactctggtttcatacatcggatttagggttcaacatgacaatgctcgtggacccatgaaaggtggaatcagatatcatcctgaggttgatccagatgaagttaacgcactagctcagctgatgacttggaagactgctgtagcagatattccatatggtggtgctaaaggtggaattggatgtagtcctcgtgacttgagtttgagcgagcttgagaggttgactcgtgtgtttacacagaagattcatgatcttatcggtattcataccgatgtgcctgctcctgatatgggcactaacgctcaaaccatggcttggattcttgatgagtactccaagtttcatggtcattcccctgctgttgtcactggaaagcccattgatcttggtggttcattaggtagggaagctgccacaggtcgtggtgtagtatttgccaccgaagctcttcttgctgagtacgggaaatcgattcagggtttgacatttgttattcagggttttgggaatgttggaacatgggctgcgaagctgatccacgagaaaggcggtaaagtggttgcagtaagcgacattactggtgcaatcaggaaccctgaaggtatcgacatcaacgctctcataaaacacaaggacgcaactggaagtctcaatgatttcaatggtggagacgctatgaattcagatgaattgctcattcatgagtgtgatgttctcattccatgcgctcttggtggtgtcctgaacaaggaaaatgctggagatgtgaaggcaaagtttatagtagaggcagctaaccatccaacagatccagatgctgatgagattctgtcgaagaaaggagtgattatacttccagatatctacgcaaacgcaggaggagtgacagtgagttacttcgagtgggtgcagaacattcaaggattcatgtgggaagaggaaaaagtgaacttggagctgcaaaaatacatgactcgagcctttcacaacatcaagacaatgtgccatactcattcttgcaacctccgtatgggagctttcactcttggagttaaccgagtcgctcgagccacccagttgcgtggttgggaagcttaattcagttgaatcccccttatatactctgtttcttgcttgctctgttttccatttttttttttttggtttcattgttactgaaaatcattgagctttccgaaatggaaaaggaaacaaatggattgaataaaaactaacaaattggaataaaaaaaaaaaaaaaaaaaaaaaaaaaaaaaaaaaaaaaaaaaaaaaaaaaaaaaaaaaaaaaaaaacccaaaagggcggccgctctagaggatccaagcttacgtacgcgtgcatgcgacgtc

SEQ ID NO: 118297 - DNA, 907 bp, Arabidopsis thaliana
  unsure (1)..(907): unsure at all n locations
gtgatgtcatggtatgaatcaagcaacgagatcacaggttgagtcaagtaatcatagtttgacaaatcctggctcaagtcaccgaactctaatccataaccattgcttcccaagctaccgattgaatcgccgaactctaagccatgaccattgcttcccaagctagcgattgaatcgtcgaactctaagccatgatcattgcgtccaacgccagcgattgaatcgtcgctgaatcgagttagctcagaatctaggtcaggtggagtggaaaagaagcgggattggaaaagagcgagcgcgattgacggttgggtcgtggcggagacatggtgaggagagagagaggagcaagtgtggtgagatcggcggaggtgagggcttacggtggatacctaggcacccagagacgaggaagggcgtagtaagcgacgaaatgcttcggggagttgaaaataagcgtagatccggagattcccgaataggttaaccttttgaactgctgctgaatccatgggcaggcaagagacaacctggcgaactgaaacatcttagtagccagaggaaaagaaagcaaaagcgattcccgtagtagcggcgagcgaaatgggagcagcctaaaccgtgaaaacggggttgtgggagagcaaaaaaaagcgtcgtgctgctaggcgaagcggtggagtgccgcaccctagatggcgagagtccagtagccgaaagcatcactagcttatgctctgacccgagtagcattgggcacgtggaatcccgtgtgaattcagcaaggaccacctttcaagggtaaatactccctgggtgaccccttaccgaagtagtaccctttgggaaggcgttnaaaaanccccnatnngggngttnaatttnacntttaaccgtaagcncccaa

SEQ ID NO: 118298 - DNA, 1829 bp, Arabidopsis thaliana
ggcccaccgtctaggacgacggtgtcaataagcttgatatcgaattcgcggccgcgcggccgcaaaagataatatatgcattcatatcgaattgggccaagttagccgtcacccttgtgaagttgcaacagttccaaggtgctgttgatgctgcaaggaaagcaaacagtgcaaagacatggaaggaagtctgctttgcttgcgttgatgctgaggaattccggctggctcaaatctgtggtcttaacattatcattcaggtggatgacctggaagaagtcagcgagtactaccagaacagagggtgcttcaatgaattaatctcacttatggagagtggacttgggcttgaacgtgctcacatgggtatcttcaccgagttgggtgtactctatgctagatatcgttatgagaaacttatggaacacatcaagttattttcaactcgcctcaatattcccaagcttatacgggcctgtgatgaacaacagcactggcaggaacttacctatctgtacattcaatatgatgagtttgataatgctgcgaccaccgtcatgaaccattctcctgaagcatgggagcacatgcaattcaaagacattgttgccaaggttgcgaatgttgagctgtactataaggccgttcacttctacttgcaagagcaccctgatataatcaacgatcttctcaatgtgcttgctctgcggttagatcacacgcgtgtcgttgatattatgcgcaaggctggtcacttgcgccttattaagccatatatggttgcagttcagagcaataatgtatctgctgtaaatgaagctctgaatgagatatatgcagaagaagaagactatgacaggttgcgcgagtctattgatttgcatgacagttttgaccagataggtctcgctcagaagattgagaaacacgagcttgttgaaatgagacgtgtggctgcttatatctacaagaaagctggtagatggaagcaatcgattgctttatcaaagaaagataacatgtacaaggactgtatggaaacggcttcgcaatccggcgaacatgaacttgcagaacaacttctggtgtatttcattgaacagggcaaaaaggaatgctttgctacatgtctctttgtatgttatgacttaatccgaccagacgtggctctagaacttgcctggatcaacaatatgatggactttgccttcccgtatctcctccagtttatccgagagtactctggcaaagtggatgagctaataaaggacaagcttgaggcacaaaaagaggtgaaggccaaagagcaggaagagaaggatgtcatattcccaacagaacatgtttgcccaaatgttgccacttgctttacctgcaccaccgatgccaggaatgggaggtggtggtgggtatggtcctccaccacaaatgggcggtatgccaggaatgcctcccatgccaccatatggaatgccaccgatgggcggctactaaagcagaccagcttatgctttaatatccgcatttggaaaagtatcagtagcgcatagagtcggcccaatttgctagggcggtgttcatctgctagctagcttatatgtctgaccagaatttgtctgggaataatgtggataataacctcctttcgttgtaatattctgttgggtttaggtgagtaatttttttttaactttttgtcaaaagccatttttgagtacatatactcaactctcttactcaaaaaaaaaaaaaaaaaaaaaaacccaaaggtcgaccgctctagaggatccaagcttacgcacgcaacggcattgaacttcaaggttccg

SEQ ID NO: 118299 - DNA, 388 bp, Arabidopsis thaliana
cccaagcgtccgcccacgcgtccgctccaagttcttacctttttcccatttacaatcgttcgaattttttatagagaagaaaccatgaatgctttagctgcaacatacagaaacttccgtcatgcatctcgaatcctgcgtttggattcgaagatcgagagaagtcttatgatcccatttagagaaatcaaggttgagtgtacgattcctaaaagacgatggcactctggtttcatacatcggatttagggttcaacatgacaatgctcgtggacccatgaaaggtggaatcagatatcatcctgaggttgatccagatgaagttaacgcactagctcagctgatgacttggaagactgctgtagcagatattccatatggtggtgct

SEQ ID NO: 118300 - DNA, 392 bp, Arabidopsis thaliana
ggctggcggtggttccctaggtccccagagactaggaagggcgtaccaggcgacgaattgcttcggggagttgaaattaagcttagatccggggattcccaaataggtcaaccttttgaactgcctgctgattccatgagcaggcaagagacaccggcgaccatgaacttgcagaacaactactgggtgtttttcattgaacagggcaaaaaggaatgctttgctacatgtctctttgtatgttatgacttaatccgaccagacgtggctctagaacttgcctggatcaacaatatgatggactttgccttcccgtatctcctccagtttatccgagagtactctggcaaagtggatgagctaataaaggacaagcttgaggcacaaaaaga

SEQ ID NO: 118301 - DNA, 607 bp, Arabidopsis thaliana
  unsure (1)..(607): unsure at all n locations
tatccgagctgatgacaccactcagttcttggaggtcatccgagcctctnaagatactaatgtctatnatgacttggtcagataccttctnatggttagacagaaggtgaaggaacccaaggtggatagtnagctcatctatgcttatgcaaagattgaaaggtggggtgagattgaagaatttattctgatgcccaacgttgccaaccttcaacatgttggtgaccgtttgtacgatgaagctctgtatgaggctgcaaagataatatatgcattcatatcgaattgggccaagttagccgtcacccttgtgaagttgcaacagttccaaggtgctgttgatgctgcaaggaaagcaaacagtgcaaagacatggaaggaagtctgctttgcttgtgttgatgctgaggaattccgactggctcaaatctgtggacttaacattatcatacaggtggatgacctggaagaagtaagcgagtactaccagaacagaggatgcttcaatgaattgatctcccttatggagagtggacttggtctggaacgtgctcacatgggtatcttcaccgagttgggtgtactctatgctagatatcgttatgag

SEQ ID NO: 118302 - DNA, 979 bp, Arabidopsis thaliana
  unsure (1)..(979): unsure at all n locations
nnnnnnnnnnnnnnnnnnnnnnnnnnnnnnnnnnnnnnnnnnnnnnnnnnnnnnnnnnnnnnnnnnnnnccacgcgtccgggtcgctctctctctctctctctcgatcggataatatttgagctttgtggttggaggatctgagttagtcatgttcatgatcgattggttctatggcgttctcgcttcgttagggttatggcagaaagaggctaagatcttgtttctgggactcgataatgctggtaaaaccactctgcttcacatgttgaaagacgagagattggtacagcatcagcctacgcagcatccaacttctgaagaactcagcattgggaaaatcaagtttaaggcttttgatttgggtggtcaccagattgctcgcagggtctggaaggattactatgctaaggtggacgctgtggtctacctagttgatgcttacgacaaagagagatttgcagaatcaaaaaaggaacttgatgcacttctctcagacgaatccctagccagcgttccattcctcattctaggaaacaagatagacataccgtatgctgcatcagaggacgagctccgttaccatctcggcctctccaacttcactacaggaaagggtaaagtgaatctaacggattcgaacgttaggccattggaggttttcatgtgcagcattgtcaggaaaatgggttacggagaaggtttcaaatgggtttctcaatacatcaagtaagacaaacacacgctgtgttattattaagccgtaagcttgcttctataaatcctgttttttgtatcgtcttgcttcgttttttcctctctttaattgtgttgtaagaaaatgtcttaaaccgtacctagctttttctcgtttgtctgatcctcgactggtttgttcttgtagtgaattttttacacgtttcgtaatttattcaaataagggaagaaaaaaagattagattaaaaaaaaaaaaaaaaaa

SEQ ID NO: 118303 - DNA, 1910 bp, Arabidopsis thaliana
atgatactccagctctcctacgactcactattgggaaagctggcacgcctgcaggtaccggtccggaattcccgcctcgcgcccacgcaatcagcaaagcaaaattcgaagagacacaaaaaaaccttcgtttgtgtctcagaatttacaaagttttgagtcagtagagaaatggcgggaatcgtgacagagccgtggtcagtagctgagaacggaaacccaagcataacggcgaaaggatcgagcagagaactaagacttggaagaaccgctcacaacatgtcttcttcttctttgaggaaaaaatcagacctccgagtgattcagaaggttccatacaaaggtcttaaagattttctctctaatctccaagaagtcattctcggaacaaagcttgccattctttttccggccattcctgccgccattatttgcacctattgtggcgtcagtcagccttggatatttggacttagcttgctaggactgacacctttggctgagcgagtcagctttttgacagagcaactagctttctacaccggtcctacattgggtggtctattgaacgcaacgtgtggaaacgcgactgaattgataatcgcgattcttgctttgaccaataacaaagtcgcagtggtgaaatattcgctgctaggttcgattttgtcgaaccttttattggttctagggacttcactcttctgtggaggaatcgctaatatccgaagggaacagcggttcgaccggaaacaagccgatgtgaacttcttcttacttctactgggtttcttgtgtcacttgctgccattgttggtgggatacttgaaaaacggagaggcttcggctgctgttttgtccgacatgcaactgagtatatcgcgaggcttcagtattgttatgttgatcagctacattgcatatcttgttttccaactgtggactcaccgccaattgttcgatgcacaagaacaggaagatgagtatgatgacgatgtggagcaagaaaccgcggtgattagtttttggagcggttttgcatggttggttgggatgacactcgttatcgcattgctatcggagtatgttgtagccacgattgaggaagcatcggataaatggaacttatcagtgagtttcataagcatcatattgcttcctattgttggaaatgcagctgaacatgctggagccgttatttttgcctttaagaacaagcttgacatatctttgggagttgcattaggctctgcgactcagattggcttattcgttgtccccttgaccatcaccgtggcgtggattttgggaattaatatggatctcaattttggtgccctcgaaactggctgtcttgctgtttccataatcatcacagccttcacattacaggatgggagttctcactacatgaagggactggtcctcttgcctttgctatttcattattgccatctgtttcttcgtcgacaaacttccccagaaacaaaatgccattcacttgggacatcaagcgatgaacaatgtcgtcactgcaacaggaggaggagttttctcatcttaaacgaagacaagtaccaatgtgttgaaacaaaatttccaaagcgagagacaatggagaaaggaaaacaaaaaccaattttcttgattcatttataaatattgaaagattgatcagagagattccatgagattcagtgagtattatttcatttttcaaaaatgttgggtgtcttgatgaagatgagttttgagaactttataaattcttcttgtgggtgggttttgcaatgaactatctatgaatgtcttgtgccaaaaaacaaaaaaaagaaaaaaaaaaaagcgaccgctctagaggatccaagcttacgtacgcgtgcatgcgacgtcatcagtcttctatagtg

SEQ ID NO: 118304 - DNA, 529 bp, Arabidopsis thaliana
  unsure (1)..(529): unsure at all n locations
tacatgaagggactggtcctcttgctttgctatttcattattgccatctgtttcttcgtcgacaaacttccccagaaacaaaatgccattcacttgggacatcaagcgatgaacaatgtcgtcactgcaacaggaggaggagttttctcatcttaaacgaagacaagtaccaatgtgttgaaacaaaatttccaaagcgagagacaatggagaaaggaaaacaaaaaccaattttcttgattcatttatcaatattgaaagatttgtcagagagattcctgagattcagtgagtattatttcatttttcaaaaatgttgggtgtcttgatgaagatgagttttgagaactttataaattcttcttgtggccgggtctcccaatgaactatctatgaatgtcttgtgtcaaatgttctatctctttttattaatggttttatcaaaaaaaaaaaaaaagnnnnnnnnnnnnnnnnnnnnnnnnnnnnnnnnnnnnnnnnnnnnnnnnnnnnnnnnnnnnnnnnnnnnnnn

SEQ ID NO: 118305 - DNA, 1617 bp, Arabidopsis thaliana
atggagcaaggatcactttctacaagtttcccccagcacacgcctaaagcaccaaagaacagcgtacttaatagcataaagatcgtgattttttgtaataaactcaatctactactacctttcggtcctctagccatattggtccactacatgatagatagtaaggggtgggtgttcttgctgacgttagtaggcattacaccattggctgaacgtctaggatatgccacagagcaactggcttgttacacgggtccaactgttggaggcctcttgggtgctacattcgggaatgtgacagagctgatcatatcaattttcgctttgaaaaatggaatgatacgtgttgttcagctgacgttactaggctcaattctgtctaacatgttacttgtacttggcctgcgcttcttttgtggtgggctagtcttttaccaaaaagaccaagtctttgacaaaggaattgctactgtgaattcaggattgcttttgatggctgtcatggggatactcttcccggctgttcttcactacacccatagcgaggttcatgctggatcatcagagctagccctgtcaaggttcagcagttgcataatgcttatagcttatgctgcttacctcttcttccagttaaagagccaatctaattctccacgcgtccgcgatgaggaatcaaatcagaacgaagaaacttctgccgaagatgaagatcctgagatctccaagtgggaagctatcatttggctttcaatattgactgcttgggtctctcttctttctggctatcttgttgatgccatagagggtgcctcagtctcatggaatataccaatagcttttatcagtaccatcttgcttcctatagttgggaacgcagctgaacatgcaggggctatcatgtttgccatgaaagacaagctggatctgtctttgggagtggctattgggtcctcgatccagatttccatgtttgcggtcccattctgcgtggtgattggatggatgatgggtcaacagatggaccttaacttccagctttttgagacggcgatgctgttcatcactgttatagtagtagcattttttctccaggaagggtcatcgaattacttcaaaggattgatgctgattctttgttatttgatagtagctgccagtttctttgtacacgaagatcctcaccaagatggtatataaaccggaagaagagtctggtgtgaagcataaaagggtcttaattaatgatctaaggaacacgaattgttggggaagagatgtgaagatgtaaatctgattctcaagtggtatccacaaactcgaatctgctaaacgtattatttgatttacttgttcgtctgactaaaagtctttgttcgaacaagtgaaggtttatttattcctttttggctttccctccccaaccaaaatcaacattcttagaaggttacaagttttgataatattacaatgattccatattacaaatgatattatgaaagattgaagatttgttttaaaaaaaaaaaaaaaaagggcggccgctttaaaggattccagcttacggacgcgtgcatgcgacgtcaaagtcttctatagtgtcacataaatcaatcg

SEQ ID NO: 118306 - DNA, 633 bp, Arabidopsis thaliana
taatcgactttcttagggaaagctggtacgcctgcaggtaccggtccggaattcccgggtcgacccacgcctccgcgatgaggaatcaaatcagaacgaagaaacttctgcccggaagatgaagatcctgagatctccaagggggaagctctcatttggctttcaatattgacctgcttggggctctcttcttttctggctatcttgtttgatcccttggggggggcctcaatctcatggaatataccaatagcttttatcaaagcccatcttggcttccttttgtgggggaccccaactgaacattcaggggggtttcattgtttggcatgaaaagacaaacctggattctgttttttggggaggggttttatggggtcctccattccagtattcccctttggttgcgggtcccattttttcttaggtcgtttggttctggtgtaggtgttaatcatgatgggcgcttttctttccaattctttttttgaaacgcggcggctcgttcctttcacggatttaaccggatgtgattttttttctccagaaggggggtattattttacttgaaggggtttgggtgcgtgtattttggtctcttgttagatgtgtgtcatggttttttgtgcccta

SEQ ID NO: 118307 - DNA, 670 bp, Arabidopsis thaliana
  unsure (1)..(670): unsure at all n locations
tacgacttctatagggaaagctggtacgcctgcaggtaccggtccggaattcccgggtcgacccacgcgtccgcgatgaggaatcaaatcagaacgaagaaacttctgccgaagatgaagatcctgagatctccaagtgggaagctatcatttggctttcaatattgactgcttggggctctcttctttctggctatcttgttgatgccatagagggtgcctccgtctcatggaatataccaataagctgttatcagtaccatcttgcttccctttagttgggaacgcagctgaacatgcaggggctatcatgtttgccatgaaagacaagcctggatctgtctttgggagtggcgtttgggtcctcgatccagatttccatggttgcgggcccattctgcggggtgattggatggatggtgggtcaacagatggacccttaacttccagctttttgagacgggcgatgctgctcctcacggttttagtagtagcattttttctcccggaagggggcatcgaattccttcaaaggattggtggctgattcttctggtttttgatagtacctgccagttcctttggccacgaagatcctcaccaagatggtatatanacccgaagaagagtctngtgtgaagcataaaagggtcttacttaatgatctaag

SEQ ID NO: 118308 - DNA, 2168 bp, Arabidopsis thaliana
acgcacatttgcatcgataataactcaccaacactctctctgtctccatcgaatgtttcctctaactctcaacaaaaatgcgcaaacaatttgtttttcttctgcctttcttgtcacgtctctaccatgtagttatagccggaggagaacggttaactaacggcggtttttcaccggagataaatccgttcacacccaaagcgtctttagtacgttactggaacaaacagatccatcaccaatcacccggctcagcctttctcctctccaaggcttcaccacttaccgccgtcgcctccgccaccttcgccaaactcgcctccgaaaacgctcttccggatcgcctccccgacttctgctccgccgcaaacctcttctgttttccagatttaggtccaaccctcgagaaacacagcaacgacgttaaattctctgtttacgaccaacgaaacttcaccaactacggcacgattcaccccggcggtgctgactcgttcaagaaatattcacaaaacggtaacgcagtaaccgactctttccggcgatacagccgagacgccgccggtcacgaagataaattcacaggctacgctgataacagcaacgtcgtcgaggaaaaattcaattcttacggcacatcagccaccggcggctccggcgattttaaaaactatcaatccggtgttaacaatccgacgactcgtttcaaggcctattccgacgaaggaaatggccgtgctcagacgtttaaaacctatactcacgaagccaactccggaccgggtcaatctttcaccagttacggcaaaaacggtaacggagctccaaacgagttctcttcttacggtgtctcctctaacgtaatcggatctgatttctcaaactacggtgaaaacggtaacgcagccaacgacactttcaaaggctacggtggtgacggcaatgttcctcagaataacttcaaaagctacggtgcctccgggaacgctgccgttgacacgttcttgaattatagagacaatgctaacgttggtgatgattcgttctcgtcgtatgccaagaactcaaacttcgagaaggttgatttcgtaaattacggcaaatctattaacccgggttcagagtcgtttagtggttatggtaaaggagctgagggaaacaaaattgatttcaaaacgtatactcagaactctacgttcaaggactacgcgaaaaccggagtcgaatttgcgaaatataaccggagtagtctcggtggtggcaaaacggtaaataagtgggtggagcctggcaagttctttagagagtcgatgcttaaagaaggtacattgatttggatgcctgacattaaggataaaatgccgaaaaggtcgtttctaccttgtagcattgtctcgaaactaccgttttctacatcgaaaatcgcggaaatcaagcgtgttttccacgctaacgataactcgacgatggaagggataattactgatgcggtaagggaatgtgagagaccgccgacagtcagcgagactaaacgatgtgtcggatcagcggaggatatgatcgatttcgcgacatctgtgcttggtcgaagtgtggtactccggacgacagagagtgtagccggatcaaaggagaaagtcatgatcggtaaagtcaatggaatcaacggtggaagagtgacaaaatcagtgtcgtgtcaccaaagtttgtacccttacttactctactactgtcactctgtgcctaaagttcgggtgtacgagtcagatcttttggatcccaagagtaaagccaagatcaaccatggtattgctatatgtcacatggacacatcagcttggggtgcgaaccatggagccttcatgttgcttgggtcccggccaggtcagatcgaagtatgccattggatctttgagaatgatatgaattgggccatcgccgattaaccatgttgtagccaaatgaataatgaatgttaatgttttgtatctctatatttcagtaacgataccaaaaaaaaaaaaaaaaaaaattctgttaactaaatatgttgtgtcaggattatgttaaccttctaaaccaatgaagttaaaaaaaaaaaccaggggaatgtaaattttctaaaaaaaattgaattcccctagccaatttaagttgtgggggtttgg

SEQ ID NO: 118309 - DNA, 876 bp, Arabidopsis thaliana
  unsure (1)..(876): unsure at all n locations
tttttaggacacactatagaagatcttatgacgtcgcctgcacgcgtacgtaagctcccactcgtccgaaattttcttcaaagaacaaatctcccaaatctaaaatctttctcttctctcttcgtttccataaccatgtctgcgaagaagattgtgttgaagagttccgatggtgaatctttcgaggttgaggaggcggtggctctcgagtcacaaaccatagcgcatatggttgaagacgactgcgtcgacaacggagtccctcttcctaacgtcacgagcaagatcctcgccaaggtgatcgagtattgcaagaggcacgtcgaggctgctgcctctaaggccgaggccgtcgagggtgctgctacctccgatgacgatcttaaggcctgggacgctgattttatgaagatcgatcaagctactctctttgaactcattctggctgctaattacctgaatatcaagaacttgcttgatctaacatgtcagacagttgcggatatgatcaaaggaaagactccagaagagatccgcacaacgttcaacattaagaacgacttcacaccagaggaagaggaagaggttcgcagagagaaccaatgggcttttgaatgattgatcttcagagagaagaatcaaaagcagcaagcaaccagtttcttcttccttatgtttattgccgttttcaagtgttgttgatgacttgctttttaatattcttcatgaatcatgactatcttcttcctcttctttctttcttatcaagaaccaatgtttcttactctttgtgggatggataatttgtgcttttagataatcttcaagagtgatgttggtttgtcttaccnnataacttctttnnnnnnnnnnnnn

SEQ ID NO: 118310 - DNA, 623 bp, Arabidopsis thaliana
  unsure (1)..(623): unsure at all n locations
gttncgggtnnaaacccatccccattggttaaacccccnncttnaaaacgggccccntttcaancgttccgggnaaanacccnnccccaaggntacccgggttttcaaaggggccccttccggggcttctccccccttaaggcccggcccccctcgggggtgctcgacccccccgcatgccggtctttaaggccctgggcccccgggtttttatggaggaccgatcaagctaccctctttgggaaccccattctgggctgctaatttcccctggaataccaaggacttgcttgatcttaccatgtcaggccagttgcggatatgatcaaaggaaagactccagaagagacccgcacaacgttcaacattaagaacgacttcacaccagaggaagaggaagaggttcgcagagagaaccaatgggcttttgaatgattgatcttcagagagaagaatcaaaagcagcaagcaaccagtttcttcttccttatgtttattgccgttttcaagtgttgttgatgacttgctttttaatattcttcatgaatcatgactatcttcttcctcttctttctttcttatcaagaaccaatgtttcttactctttgtgggatggataattt

SEQ ID NO: 118311 - DNA, 584 bp, Arabidopsis thaliana
  unsure (1)..(584): unsure at all n locations
tttatatataaagagagacgcatctttttatttnattcatcgcttctccaaaatttttttcaaagaacaaatctcccaaatctaaaatctttctccttctctcttcgtttccataaccatgtctgcgaagaagattgtnttgaagagttccgatggtgaatctttcgaggttgaggaggcggtggctctcgagtcacaaaccatagcgcatatggttgaagacgactgcgtgacaacggagtccctcttcctaacgtcacgagcaagatcctcgccaaggtgatcgagtattgcaagaggcacgtcgaggctgctgcctctaaggccgaggccgtcgagggtgctgctacctccgatgacgatcttaaggcctgggacgctgattttatgaaggtcgntcaagctactctctttgaactcattctggctgctaattacctgaatatcaagaacttgcttgntctaacatgtcaagacagttccggntnttntcaaaggaaggctccngagggntccganaaggtcaaattaggccgggttnanccngggnaggggagggtncaagggnccatgggtttntttta

SEQ ID NO: 118312 - DNA, 1969 bp, Arabidopsis thaliana
cgatcattccacttccttcttcctctctctcaacattttcccctgaaaataaggaaactaaagattcttcctctctctttctacactcttctgacaatactaaaacactttatcagatcagatcccacataaactttctaggagaagaagaatggcaagggaacaattacaagtgttgaatgcacttgacgtggccaagacgcaatggtaccatttcacggcgatcataatcgccggaatgggattcttcactgatgcttacgatctcttttgcatctctctcgtaacgaagctcctcggtcgtatttattaccacgtggaaggcgcacaaaagcctgggactctccctcccaacgtcgcagccgccgtcaatggcgttgccttctgtgggactctcgccggtcagctctttttcgggtggcttggtgataagctcgggaggaagaaagtttacggtatgacgttgatggtcatggtcctttgttcaatagcctctggtctctctttcggacatgagccaaaagctgtgatggccacgctctgtttttttcggttttggcttggatttggcatcggtggtgactaccctttatccgcaaccatcatgtctgaatatgcgaacaagaagactcgcggagcctttgtctctgcggtttttgctatgcaagggttcggaatcatggctggtggtattttcgctattataatttcctctgcttttgaagctaagtttccatccccggcctatgcggatgatgccttgggatccacgattcctcaagctgatttggtatggcggataatcctgatggctggtgctatccctgcggctatgacgtattactcaaggtcgaagatgcctgagaccgcaaggtacacggctttggttgctaaggacgcaaagcaggcagcttcggacatgtctaaggttctgcaagtggagatagagccagaacaacagaaattggaagagatctcaaaggagaagtccaaggcctttggattgttctcaaaggaattcatgagtcgccatgggcttcatttgctaggcactacatcgacatggttccttctcgacattgctttctacagtcaaaaccttttccaaaaggatattttcagcgcgatcggatggattcctcccgcgcaaagcatgaacgcaattcaagaggttttcaagattgcccgtgcgcaaacgctaatcgccttgtgtagcacggtacctggttactggttcacagttgcgttcatcgacgtcattggaagatttgcgattcagatgatgggtttctttttcatgacggtctttatgtttgctctggctattccttacaaccactggactcacaaggagaaccgaatcggatttgttatcatgtactcgttaacattctttttcgccaactttggacccaatgctacaaccttcgttgtgccggccgaaatcttcccagccaggttcagatcaacctgccacggtatctctgcagcatcaggaaaattaggagcaatggttggtgcgttcgggttcttgtacttggctcagaacccagacaaggacaagaccgacgcaggataccctccagggattggggtcaggaactcgcttattgtgttgggtgtagttaacttcttaggtatcctcttcactttcttggtacctgaatctaaaggtaagtcactcgaggaaatgtccggtgaaaatgaagacaatgagaatagcaacaatgatagtagaacggtcccaatagtttaggtgatataatacgccttttgtaataattttcgttttttctttctccttgtctctagcaactcaagttgttctttgtgtaatccattgatacctaattaatgctagagaaatcaaaattttcaaaaaaaaaaaaaaaaaaaaaaaaagggcggccgctctagaggatccaagcttacgtacgcgtgcatgcgacgtcatagctctacgaagtgt

SEQ ID NO: 118313 - DNA, 1550 bp, Arabidopsis thaliana
  unsure (1)..(1550): unsure at all n locations
nnnnnnnnnnnnnnnnnnnnnnnnnnnnnnnnnnnnnnnnnnnnnnnnnnnnnnnnnnnnnnnnnnnnnnccacgcgtccgcttcttcagcatcttcatcatcttcttctatatatacctctttaagcttgcttctctttgtctttatcttccccgatggttcaaacagaaaccgatcaaaggatgggtcttaatctgaatttgtctatctactctttaccaaaacccttatctcaatttctcgatgaagtgtcgaggatcaaagacaatcattccaaactgtctgaaatcgatggttatgtcggaaaattagaggaagaaaggaacaaaatcgatgtttttaaacgagaactccctttatgcatgctcttattgaacgaagcgattggggcgttgaaggatgaggctagaaaagggttatcactgatggcatctaatgggaaattcgatgatgttgaaagggcaaaaccggaaactgataagaagagctggatgagctctgcccagttatggatctcgaaccctaattcccaattccgatcgacaaatgaagaagaagaagatcggtgtgtgagtcagaacccatttcagacatgtaattaccctaatcaaggaggggtatttatgccgatttaaccgtcccccacctcctccaccaccagctcctctgtctctcatgactccaacatcagagatgatgatggattatagcagaattgagcagagtcatcatcatcatcaattcaataaaccttcttcacagagtcatcacattcagaagaaagagcagagaaggagatggtcacaggaacttcaccgtaaatttgttgatgctcttcataggcttggagggccacaagttgctacaccaaagcagattagagatttgatgaaagttgatggtttaaccaatgatgaagtcaagagccatttacaaaaatatagaatgcatatccgtaagcatccgctgcatccgacaaagactttgtcatcgtcggatcagccaggtgtgttagagagagaatcgcagagcttaataagtttgtcgaggtcggattcgccacaaatcccacttgttgcaagagggttgttcagtagtaatgttggtcatagctcagaggaagatgaggaggaggaggatgaagaggaggagaagtctgatggacgtagtagctgtagaaatgatgaaacaaagaagaagagacaagtgttggatcttgagctttgaaagtctgcatagtgaatgatataatctttaccaacttatgttatatatgctcaaaactttgagtttgttcgggagtttttgtagatgtaaacatgagagttgaaataaggaagaggattttgagcaaaaagtagggtttgtttttgcaagaggaaatagatagagaagagtggttcgaaatcctctgtgttttttttttttttttttttacttcataagtaagataaactcatatatcaaagattttgtttttatactnnnnnnnnnnnnnnnnnnnnnnnnnnnnnnnnnnnnnnnnnnnnnnnnnnnnnnnnnnnnnnnn

SEQ ID NO: 118314 - DNA, 430 bp, Arabidopsis thaliana
cttcatcatcttcttctatatatacctctttaagcttgcttctctttgtctttatcggggccgatggttcaaacagagagccgatcaaaggatgggtcttaatctgaatttgtctatctactctttaccaaaacccttatctcaatttctcgatgaagtgtcgaggatcaaagacaatcattccaaactgtctgaaatcgatggttatgtcggaaaattagaggaagaaaggaacaaaatcgatgtttttaaacgagaactccctttatgcatgctcttattgaacgaagagattgtttttctctgtgtagcgattggggcgttgaaggatgaggctagaaaagggttatcactgatggcatctaatgggaaattcgatgatgttgaaagggcaaaaccggaaactgataagaagagctggatgagctct

SEQ ID NO: 118315 - DNA, 966 bp, Arabidopsis thaliana
  unsure (1)..(966): unsure at all n locations
ctccgtcgacccacgcgtccggaagttgcagagcacacacacacactttcaagtttcaatacagagatggcgagcactgagccagagcgtgagaaccgtgaagatgaaaccgaagtcaacgaagatgaagacaccggagctcaggtagctccgatcgttaggcttgaagaggttgcagtcaccaccggcgaagaagatgaagacgccgtcctcgatctgaaatcgaagatgtatcgattcgataaagaagggaaccaatggaaggagagaggagctggaactgtgaagttattgaagcataaggaaactggaaaagttcgtcttgttatgagacaatctaaaaccctaaagatctgtgccaatcacctcatttcgtctgggatgagtgttcaggaacatagtgggaatgaaaagtcttgtttatggcacgctactgatttctccgacggcgagttgaaagatgagcttttctgcattcgatttgcttccattgagaattgcaaaacatttatggagaagttcactgaaatagctgaaagccagcaagtagggaaagagagcacccagggcgacgaggctgctggtttaatagagaatctttcggttgaggaaaatataagtgaggagaaagccaaggaagcagaagagaaagagcctgcaaaggaagataaagaaacaaaaaaggagaaggtagaagaagagaagaaaacagaggcaagcacttaagtgatcaaattaaaattggttgttggcatcactaagtgtgctttgctttattttaatatattatacttggcactgaacatgatggtagcttcaaaagtttgagtctttgcgctgtgttagagaaagagaatcttaagatttttttttatgttgttgctgtgtaagtgtttgactattgtgtcgtctctttactgtgtcaatttggtttaagatnnnnnnnnnnnnnnnnnnnnnnnnnnn

SEQ ID NO: 118316 - DNA, 1433 bp, Arabidopsis thaliana
  unsure (1)..(1433): unsure at all n locations
nnnnnnnnnnnnnnnnnnnnnnnnnnnnnnnnnnnggtcgacccacgcgtccgctatctctctctctgctcagactctctggtgttgaagactaacactgaagcagatctattatacggaggacgaagaagatgtatgagcagcagcaacatttcatggatttgcaaagcgattctgggtttggggacgatagctcctggctcgccggcgatgacgatcttcgtctctctcctcaccaatctgccgccggtacgaactccggcaatgagaatctagatcgtcgtctcttaaaagatctcgtcgagatggttccccttatcgagcattacatggaacataaagaaaggagttcgtttaagcggcgtggttccatgatctacactaagatgccttcaaaagaatccttgtccgaaggggaagaaatgcttctcaaacagtcccaggaagaaagaagagagaccaagagggaaatgacgatgttatgaacaattctagggaagatgatgaaaacgcaaaggctttggctggtgcagaaaaggaagaaatgagtagactaagagagcaagtgaatgacttgcagacaaaattatcggagaaagaagaggttttaaagtcaatggagatgtcaaagaatcaggtaaacgagatacaagaaaagcttgaagcaacaaatcgattggttgctgagaaggatatgttgatcaagtctatgcagttacaattatcggacacaaagatcaaacttgctgacaagcaagcagcccttgagaagactcaatgggaagcaaagacaacaggaacaagagcaatcaagcttcaagaacagctagatgctgttgaaggagacatctctacattcacacgggtgttcgaaactttggcaaaaactgattccaagaaacccgatagggattatgatgcagtcccatatgaatttgatcatcttccatatttagacgatgtagatgaaactgacctgaggaaaatggaagaagcaagattagcttatgtagcagcagtgaataccgcaaaggaacgagaagatgaagaatctctggtcatggctgctcaagctcgagcttacctgcaatcactagcctttacatattaatcatcttcaggtacttacttctttataggatatttctctccttgggttgttttaggagtatgtagatttgtaccatgaagaaattggagaagaaaagcttatgtgagaaacataaagttatggttttcccctaaaccaatgaacgcaactctgagtttttgtttcttcatttgagcatgtatgtatctatatgatcttctacattattgggaacataaaatcagattgtataaaaaaaaaaaaaaatagtttactttaaaaaaaaaaaaaaaaagcgcggccgctctagaggatccaagcttacgtacgcgggcatgcgacg

SEQ ID NO: 118317 - DNA, 2805 bp, Arabidopsis thaliana
gtttttcaaaaccccgtcaggctcatcttcttctagcaccttcttcttcccttaaagtattcaactttatctgaatttgaccattttctcttcatttctccgactaatttcccttcatttcgatctttaagcatctgggtatctccctttctccatctattcatcggaatttgcgcttagattttgaatagaattcggcacgagcggcacgagaggagattgaaaatggggaaatctggaggaaggaagaagaagagtggtggttcgaattcgaattcgagtcaagtcaattcatctgaaacttcaggattatccaaaccgtcaacgattgttaatggtggtgttgatttcgatgcttcgatattcttgaaacgtgcacatgagcttaaggaagaaggtaataaaaagtttcaagcaagagattacgttggtgctcttgaacaatacgagaatggtattaagcttattcctaagagtcatccagatagagctgtgtttcatagcaatagagctgcttgtttgatcgagatgaaaccaattgattatgaatctgtgatttctgaatgttcaatggctcttaaatctcagcctggttttactcgtgctttgcttagaagagctagagcttttgaagctgttggcaagtttgatttagctgttcaggatgttaatgttttgttgggttctgatcctaatcataaggatgctggtgagattttcgaagcggttaaaaactgcttgggtcctcaccaagatttgcagagccgtcctttcacctgcagctcttggtgcttcggctgctttaggcggtcctattgctggacttggtcttgtttgccttctcgtaatgttcataaaaagggagttacttcgcctgttgggtctgtttcgttgcctaatctagtaatggaaggtttgagaggccgacaggtggtgaatcctgtgactgaaaatggtggttcggtgagtaagggacaggcgtcgagagttgtgttgaagccggttagtcattcgccaaaagggtcgaaggttgaggagttgggttcttcttctgtggcggttgttgggaaggttcaagagaagaggattcggtggaggccgttgaagtttgtttatgaccatgacataaggttgggtcagatgcctgtgaactgtaggtttaaggaattgagagagattgtgagcagtcgtttcccgtcttcaaaggcggttttgattaagtacaaggacaatgacggagatttggtgactataacttctactgcagagctgaaattggcggaatctgctgctgattgtattttgacgaaagagcctgatactgataagtctgattctgttgggatgttgagattgcatgttgttgatgtgagtcctgagcaagagccgatgttggtctcgaggaagaagaggaggaagatggaagagaagcctgttatagaagaagtcatatcatctcctacagaatcactatcggaaacagagatcaacactgagaagacagataaggaagttgaaaaggagaaagcaagttcttctgaagatcctgagaccaaggaattggagatggacgactggttgtttgattttgctcatctgttccgtactcatgtcggtattgaccctgatgctcatattgatttacatgagttgggaatggagctttgctcagaggcgcttgaagaaactgtgacaagcgagaaagctcaaccactattcgataaagcttctgcgaaattccaagaagtcgctgctttagctttctttaactggggaaatgttcacatgtgtgccgctagaaagaggattcctttagacgaatctgcgggaaaagaagtggttgctgcacaacttcaaaccgcttacgagtgggtgaaagagagatacacattggcaaaggagaaatatgaacaggctctctcgatcaaaccagatttttacgaaggtttgcttgcgttaggacagcagcaatttgaaatggcgaagctacactggtcttacttgctagctcagaagatcgatatctcaggttgggatccgtcggaaaccctaaatctctttgacagtgcagaggcgaagatgaaagatgctacagagatgtgggagaagcttgaagagcagaggatggatgatttaaaaaacccgaactcgaacaagaaagaggaagtttcaaagaggagaaagaagcaaggaggagatgggaatgaagaggtttcagagacaatcacagctgaggaagcagcagaacaagcgactgcaatgagatcacagatccatctgttttggggaaacatgctgttcgaaagatcgcaagttgaatgcaaaatcgggaaggatggttggaataagaatcttgattcagctgttgaaagattcaaacttgcaggtgcttctgaagctgacatagcaacagttgtcaagaaccattgttccaatgaagccgctgctaccgaagagatgagaaaaaggtacctgcgccttgaaaccctttatccgaacaagaattacgatatcaaaagctatgaaacaaaaaccgattctcgcttaatgaatggttgtgtgactggaaaataaccctgaagatgtagactactgaatcttgcttgatttgatgattctcagatgttttttttaagtttatcttcttcacctcaaaggtgataaattttccagggcatttgttagataaatttgtaaactctgtttaagtttcaaccttttaagtaaaaaaaaaaaaaaaacattagtgattgattcttctgaacttccttcttcttctttaatgataaaaaaaactttagcttc
